United States Patent Application Publication US 2005/0153317 A1 - sequence listing, part 16

SEQ ID NO: 69747 - DNA, 595 bp, Chicken  19866894342127_2
ccatacaaaggaggttttcaggtttcaagtctctgtgaaagaatcctaaaattcaaatgaaacactgatgtacgttgcaatgccacagtcggctcttacctttattttacctacattgttttgattcttactgctggagcttgaatagcaccrcacagagctgaatgctttcagtgcccaagaaagccagtcagtataatgattgttcaacagtctatgaagaactaatcaactattctgtaacaattctgaatattcagtcaggtaactccctttcagatgactcctcctttaaaaaartaaccaatactattttaatgttagctttattctaactatgatggaaagygtgcaaggaagtaatcaaaactttttacttcaaagcttttttaagcaatagaaattgaaataggaggtgatttttgtactttcaaacctgttttttttccccatctgagaatttcttaatagtctgcaagcactgatactcatcatcctatcaggcagtggatcttagtatatatttttctttttatagagttctctgcattcagcaaataataaacagaacaagatatccttattctcaacctca

SEQ ID NO: 69748 - DNA, 546 bp, Chicken  19866894342127_3
aattcaaatgaaacactgatgtacgttgcaatgccacagtcggctcttacctttattttacctacattgttttgattcttactgctggagcttgaatagcaccrcacagagctgaatgctttcagtgcccaagaaagccagtcagtataatgattgttcaacagtctatgaagaactaatcaactattctgtaacaattctgaatattcagtcaggtaactccctttcagatgactcctcctttaaaaaartaaccaatactattttaatgttagctttattctaactatgatggaaagygtgcaaggaagtaatcaaaactttttacttcaaagcttttttaagcaatagaaattgaaataggaggtgatttttgtactttcaaacctgttttttttccccatctgagaatttcttaatagtctgcaagcactgatactcatcatcctatcaggcagtggatcttagtatatatttttctttttatagagttctctgcattcagcaaataataaacagaacaagatatccttattctcaacctca

SEQ ID NO: 69749 - DNA, 600 bp, Chicken  19866894342128_1
aataaaggtaagagctgactgtggcattgcaacgtacatcagtgtttcatttgaattttaggattctttcacagagacttgaaacctgaaaacctcctttgtatgggaccagaacttgtgaaaatagcagactttggcttagcccgagaaatccgatctagacctccttacacagattatgtatccacaaggtggtaagtgcaagtatttcttgatgctgtaggaacctgcaggtcttaaactgaagctcgtaaataagcagtgtaacatttaggcagaatataataccgctcttgattygtcctctttgtgaaacttttatttaagctgaaataagcttaaataagctgaatttatttaagctgaaaaacacttcaagtggtgcaaggcgatttgcagatagcatcartgcaggaactgagagggatctgatgatgcaggtgggatgtggtaggaacgctgcgtgtcaggaagacataagagaacttaaagkgcttatatagctttttaattcttttttctaggaaaaaagggaagacttaaaggataggaactttttaagggatgtttgctgttagctggaaagaacaaaaagctgga

SEQ ID NO: 69750 - DNA, 600 bp, Chicken  19866894342128_2
cagaacttgtgaaaatagcagactttggcttagcccgagaaatccgatctagacctccttacacagattatgtatccacaaggtggtaagtgcaagtatttcttgatgctgtaggaacctgcaggtcttaaactgaagctcgtaaataagcagtgtaacatttaggcagaatataataccgctcttgattygtcctctttgtgaaacttttatttaagctgaaataagcttaaataagctgaatttatttaagctgaaaaacacttcaagtggtgcaaggcgatttgcagatagcatcartgcaggaactgagagggatctgatgatgcaggtgggatgtggtaggaacgctgcgtgtcaggaagacataagagaacttaaagkgcttatatagctttttaattcttttttctaggaaaaaagggaagacttaaaggataggaactttttaagggatgtttgctgttagctggaaagaacaaaaagctggatgggtttgtgtacaactgctcttgaattgtgttgatgattgcgatttgtttctctcttttcctctctcacaggtacagggctcctgaagtccttctgaggtccaccagc

SEQ ID NO: 69751 - DNA, 600 bp, Chicken  19866894342128_3
ggtaagtgcaagtatttcttgatgctgtaggaacctgcaggtcttaaactgaagctcgtaaataagcagtgtaacatttaggcagaatataataccgctcttgattygtcctctttgtgaaacttttatttaagctgaaataagcttaaataagctgaatttatttaagctgaaaaacacttcaagtggtgcaaggcgatttgcagatagcatcartgcaggaactgagagggatctgatgatgcaggtgggatgtggtaggaacgctgcgtgtcaggaagacataagagaacttaaagkgcttatatagctttttaattcttttttctaggaaaaaagggaagacttaaaggataggaactttttaagggatgtttgctgttagctggaaagaacaaaaagctggatgggtttgtgtacaactgctcttgaattgtgttgatgattgcgatttgtttctctcttttcctctctcacaggtacagggctcctgaagtccttctgaggtccaccagctatagctctccaatagatatttgggctgttggttgtataatggcagaagtttacacactgaggcctctcttcccaggcgccagt

SEQ ID NO: 69752 - DNA, 600 bp, Chicken  19866894342131_1
tatcgagcactttgagcatcctgtgggctgctggggcagttgcctgtgtcatgataaactcatacgtaagtaccttactggatgtgtgcttgctggatgcactgacatgagtcagtctgtgtcctgcagtacctgtaaccatttcacagaatcacagaatcaccaaggctggaaaagacctccaagatcatccagtccaactgtccatctatcgccaatatttcccctctaaaccatgtccctcagtacaacatctgaatgtttcttgaacacctctggggacagtgactccaccacctscctgggcagcytataccagcacctgaccactctttcagagaagtaattcttcctaacatccaacctgaatcttccctggcacaacttgaggccatttggtctggctggggtatatcagccattagaaaaggttaacctttaatcatctgatgtgtagacatggcctgtagattatcccatataataaactggtgggttttgcttcttcccaatccgatgaccaatcatggttaggcatgtgacagaagtagaatcacacctgtttcaggttaactgctccatcatctgttgttttgtttt

SEQ ID NO: 69753 - DNA, 600 bp, Chicken  19866894342131_2
ttgagcatcctgtgggctgctggggcagttgcctgtgtcatgataaactcatacgtaagtaccttactggatgtgtgcttgctggatgcactgacatgagtcagtctgtgtcctgcagtacctgtaaccatttcacagaatcacagaatcaccaaggctggaaaagacctccaagatcatccagtccaactgtccatctatcgccaatatttcccctctaaaccatgtccctcagtacaacatctgaatgtttcttgaacacctctggggacagtgactccaccacctscctgggcagcytataccagcacctgaccactctttcagagaagtaattcttcctaacatccaacctgaatcttccctggcacaacttgaggccatttggtctggctggggtatatcagccattagaaaaggttaacctttaatcatctgatgtgtagacatggcctgtagattatcccatataataaactggtgggttttgcttcttcccaatccgatgaccaatcatggttaggcatgtgacagaagtagaatcacacctgtttcaggttaactgctccatcatctgttgttttgttttcattgtgtggc

SEQ ID NO: 69754 - DNA, 599 bp, Chicken  19866894342142_1
  misc_feature (1)..(70): n is any nucleotide
nnnnnnnnnnnnnnnnnnnnnnnnnnnnnnnnnnnnnnnnnnnnnnnnnnnnnnnnnnnnnnnnnnnnnntttcttttctcttctaaagatcataccacatgtcctttgagacaaagcacactcttgctaaattccctaccagcttctctctctgtgtgaagctccaagcacttgggggtttcttggcactgctgtggttctgatgctaaaagagttgagaaattaatctgatcattagagcgaatggaagaatatcatgttttcagaaattgttctttagggtaaaggaaagaacttgrattttcagagaggctggtgagttgaagaattcctttaagaataccctggtagtttttagctgggcataggaaatgtagggcatggggagagaggagaggcgctgcctggaggtgtctgggttgtgtataaggaagtgaatgagtgaacttgagaagtagtaagggaagggaatgaatgaagctgtgggtgtccaacaggttgcaggtattgaatgacagtgacgatgagtcaggaagcgaagaagcactgtgcagcaagtggagacaacaaacaggaaaaataaagaaaaagagagttr

SEQ ID NO: 69755 - DNA, 600 bp, Chicken  19866894342142_2
rattttcagagaggctggtgagttgaagaattcctttaagaataccctggtagtttttagctgggcataggaaatgtagggcatggggagagaggagaggcgctgcctggaggtgtctgggttgtgtataaggaagtgaatgagtgaacttgagaagtagtaagggaagggaatgaatgaagctgtgggtgtccaacaggttgcaggtattgaatgacagtgacgatgagtcaggaagcgaagaagcactgtgcagcaagtggagacaacaaacaggaaaaataaagaaaaagagagttraagttgacagatggtatgaatgcaaaggaggctgtacagacttaacaataacactaaggtgagaaaacaagttaaagcctttgtaatagaggactagataattctttgtgtaagctcaccaagttcaggagattgtacagggtggtactgtgcaggattgggcccaaaaatcaaaatacatttaaatgcagctatcatgcagtgccctgacttggaaggaaattgtaaggattgtggataggaaaatcttcagtcatcagttcattgtatgacttcagtagaaaaggaaaacaggtggag

SEQ ID NO: 69756 - DNA, 600 bp, Chicken  19866894342142_3
aaaacagtttttcttagacttctgcacattacataaaactgtttttataacagtaatttattaggttaagttgaagagcttttactactttttatataaaaagactggcctgattttggatctccttaatgtggccctttagatgtagtagttctgtagcttggtaatgtgcaaaatatgccaaagaagaaccattactttcagaaaagggcactgtgttctctcatatatttttcaacagtccatagcacaaagagtaataatgccatgtgatttttcatggacatagtctgaagcccyaaaagacactttttgtgtccttctgttctgagacaratctgtaggctgcagtaaaaaggctggatcaaatggggaaatgatctgctaagaaaaaaggcctaattatgtcacatgaaaaagcataggattaaaaaacataattagctgttagagatctagtagcaggataaaagcccatgcaaatgtattttsccacccacacataggaatcccctatgcaatggggattccttttcattgacctggaggatattctctgagagacagcactttgactcagacaatttagcctggatccat

SEQ ID NO: 69757 - DNA, 600 bp, Chicken  19866894342142_4
aactgtttttataacagtaatttattaggttaagttgaagagcttttactactttttatataaaaagactggcctgattttggatctccttaatgtggccctttagatgtagtagttctgtagcttggtaatgtgcaaaatatgccaaagaagaaccattactttcagaaaagggcactgtgttctctcatatatttttcaacagtccatagcacaaagagtaataatgccatgtgatttttcatggacatagtctgaagcccyaaaagacactttttgtgtccttctgttctgagacaratctgtaggctgcagtaaaaaggctggatcaaatggggaaatgatctgctaagaaaaaaggcctaattatgtcacatgaaaaagcataggattaaaaaacataattagctgttagagatctagtagcaggataaaagcccatgcaaatgtattttsccacccacacataggaatcccctatgcaatggggattccttttcattgacctggaggatattctctgagagacagcactttgactcagacaatttagcctggatccataataagttcataaatccagagtgaggagacacctct

SEQ ID NO: 69758 - DNA, 600 bp, Chicken  19866894342142_5
cattactttcagaaaagggcactgtgttctctcatatatttttcaacagtccatagcacaaagagtaataatgccatgtgatttttcatggacatagtctgaagcccyaaaagacactttttgtgtccttctgttctgagacaratctgtaggctgcagtaaaaaggctggatcaaatggggaaatgatctgctaagaaaaaaggcctaattatgtcacatgaaaaagcataggattaaaaaacataattagctgttagagatctagtagcaggataaaagcccatgcaaatgtattttsccacccacacataggaatcccctatgcaatggggattccttttcattgacctggaggatattctctgagagacagcactttgactcagacaatttagcctggatccataataagttcataaatccagagtgaggagacacctctttaaaaccttatcttcttattatttctaatttaaagaaaaccagcatcatggtgtggattttaatactacagcccagtctgaagtgaaacactgaggtgaataaacttcattatatccatctatccaagacaacaaaagtcttactttgtgtctcc

SEQ ID NO: 69759 - DNA, 600 bp, Chicken  19866894342150_1
ctgtattgggaagtgcatcttagaacttgaaacatactctatctgcatggttttctcagtggagatactcccagctatcaacaaccccacagagtagcttgggttgaaaggaaacaacggtgctcacaaaaagctccgtaaatcctaccatccccgctgtcctgtctcacaatgtcacttatgaagtgaggagaatttattgtataacagcatccttcaaccctttcatttaagacagattgaacaaaacagatcctttatgttagacagcagagtcagcacattcacacactgcagagytctcgtgcatttgagcgtgtgtgcagtagccctttgcaggcgcttcctaggctagcttcaagtctgcagagacaagagtacacaagctcaggctcagcacaaaaggggacatcactgaagaaagttatgaagtccttcacaaggtaaatgatttttttcaccttttccaacacacaattaaatacactcatcttgttagcattaccttagtagtgaaaaactgttcgttttttttaacagtacattgtccaactcttgcagagttatgtttgcatattcagacagacacatacataagcc

SEQ ID NO: 69760 - DNA, 600 bp, Chicken  19866894342150_2
tttgagcgtgtgtgcagtagccctttgcaggcgcttcctaggctagcttcaagtctgcagagacaagagtacacaagctcaggctcagcacaaaaggggacatcactgaagaaagttatgaagtccttcacaaggtaaatgatttttttcaccttttccaacacacaattaaatacactcatcttgttagcattaccttagtagtgaaaaactgttcgttttttttaacagtacattgtccaactcttgcagagttatgtttgcatattcagacagacacatacataagcctactaaaawtttttttctgttgagctccccaacaaaagcattagacaaaaatactgtgtactgcaatactctgcttgttgcatagcagcatatgtcaagataatcagaaagcctatatgacccctctcccacacaagaatttacccttaactctcctcattgctttataatgaaagttattatgaaacatggcaaagtaagagaacaacagcatttctcaacacctactttctaatttgaatgtttcatagacgattccattccaagaaaatactttctggctgtactttccctcaagcagagctgact

SEQ ID NO: 69761 - DNA, 599 bp, Chicken  19866894342154_1
  misc_feature (1)..(137): n is any nucleotide
nnnnnnnnnnnnnnnnnnnnnnnnnnnnnnnnnnnnnnnnnnnnnnnnnnnnnnnnnnnnnnnnnnnnnnnnnnnnnnnnnnnnnnnnnnnnnnnnnnnnnnnnnnnnnnnnnnnnnnnnnnnnnnnnnnnnnnnnnaaaatgagtctgatgcttagatcactttattgtgaataaacaaaaataactggttactaaagtgaaaggttatttaagatttaaaagttcagttcacttagtagggatttaagtctatgccttaatagacatactgggaggacataaaggaagatgactattrggaagtcattgttataaatggaaatggtgaaacattgtcttatgaaggaagtatctgtcactgagtgatgtgcctcggccattagtttgttttattcattytttcaaaagaaggagtggaactcatgctcaactgagcagaatgctgatcagtgtgtaaatgggagtagtcctgtattctcttgtagataagcagtagtgtgaaggtccaggctatcttgacaattgaattagattgactcaratctraaaagatttaaaacccacaggaacaaaaaggggggaaaaaatgttgtccaa

SEQ ID NO: 69762 - DNA, 599 bp, Chicken  19866894342154_2
  misc_feature (1)..(36): n is any nucleotide
nnnnnnnnnnnnnnnnnnnnnnnnnnnnnnnnnnnnaaaatgagtctgatgcttagatcactttattgtgaataaacaaaaataactggttactaaagtgaaaggttatttaagatttaaaagttcagttcacttagtagggatttaagtctatgccttaatagacatactgggaggacataaaggaagatgactattrggaagtcattgttataaatggaaatggtgaaacattgtcttatgaaggaagtatctgtcactgagtgatgtgcctcggccattagtttgttttattcattytttcaaaagaaggagtggaactcatgctcaactgagcagaatgctgatcagtgtgtaaatgggagtagtcctgtattctcttgtagataagcagtagtgtgaaggtccaggctatcttgacaattgaattagattgactcaratctraaaagatttaaaacccacaggaacaaaaaggggggaaaaaatgttgtccaacttcagaggttcactgaggaccctcctagactgcttttatagttccccatggatctcaactaaggcacccagagatgttcaacgtgtccattttataaatt

SEQ ID NO: 69763 - DNA, 600 bp, Chicken  19866894342154_3
atttaagtctatgccttaatagacatactgggaggacataaaggaagatgactattrggaagtcattgttataaatggaaatggtgaaacattgtcttatgaaggaagtatctgtcactgagtgatgtgcctcggccattagtttgttttattcattytttcaaaagaaggagtggaactcatgctcaactgagcagaatgctgatcagtgtgtaaatgggagtagtcctgtattctcttgtagataagcagtagtgtgaaggtccaggctatcttgacaattgaattagattgactcaratctraaaagatttaaaacccacaggaacaaaaaggggggaaaaaatgttgtccaacttcagaggttcactgaggaccctcctagactgcttttatagttccccatggatctcaactaaggcacccagagatgttcaacgtgtccattttataaatttaatgtctgattcttacctaacttctgttgtaattcagaggtttgagtgaatatgcatatctgttcttggaggagcctaaagaaagtacactcaggttatgctgctcstattccaggaacatgcatttcagagcagtggctat

SEQ ID NO: 69764 - DNA, 600 bp, Chicken  19866894342154_4
agtctatgccttaatagacatactgggaggacataaaggaagatgactattrggaagtcattgttataaatggaaatggtgaaacattgtcttatgaaggaagtatctgtcactgagtgatgtgcctcggccattagtttgttttattcattytttcaaaagaaggagtggaactcatgctcaactgagcagaatgctgatcagtgtgtaaatgggagtagtcctgtattctcttgtagataagcagtagtgtgaaggtccaggctatcttgacaattgaattagattgactcaratctraaaagatttaaaacccacaggaacaaaaaggggggaaaaaatgttgtccaacttcagaggttcactgaggaccctcctagactgcttttatagttccccatggatctcaactaaggcacccagagatgttcaacgtgtccattttataaatttaatgtctgattcttacctaacttctgttgtaattcagaggtttgagtgaatatgcatatctgttcttggaggagcctaaagaaagtacactcaggttatgctgctcstattccaggaacatgcatttcagagcagtggctatagttg

SEQ ID NO: 69765 - DNA, 584 bp, Chicken  19866894342154_5
caggctatcttgacaattgaattagattgactcaratctraaaagatttaaaacccacaggaacaaaaaggggggaaaaaatgttgtccaacttcagaggttcactgaggaccctcctagactgcttttatagttccccatggatctcaactaaggcacccagagatgttcaacgtgtccattttataaatttaatgtctgattcttacctaacttctgttgtaattcagaggtttgagtgaatatgcatatctgttcttggaggagcctaaagaaagtacactcaggttatgctgctcstattccaggaacatgcatttcagagcagtggctatagttggtttagtttacagtagatatgaatgtaattgtataacatttgaatgatataagttctagcccgatctaagctgtaggtcttcattagcttgcaggaggccgagtaaacagttcttgcattgcaagagattaccacagaaagatggaagccatctgagaaaagatgtcctccagcccttctttcaggagtgggtcagtggttatgttacggcaggtcaggagtgcaagaccaggcagggatccaa

SEQ ID NO: 69766 - DNA, 600 bp, Chicken  19866894342157_1
ctagcaaagggactagagggaatggcctcaagttgtgccaggggaggtttagcttggccattaggaaatacttcttctctgaaagagcggtcaggcattggaataggctgcccagggagatggtggagtcactgtccctggaagtgttcaagaaacatttagatgttgtaccaaggaacatggcttagtgggagatattggcgataggtgaacggttgtactgcgtgattttggaggtcttttccaaccttggtgatcctacgattctttgactttaagaaagaactttaagcacccatmatggttatgctggtgtgagttctctcaatgtaaataaccccaaagaacagtcaaaacatgcaaacagatactcagcagtgcttgcgagtacatacatattatattagcatagcacagtgctgctcttttaagctcttttaagaaggaagtcacccattcatctgcatctatctatctgcatttatttttctctttcaaatgttcctacttttggctgacatgagggagtgagagcaacaaaaaatggaatctgcagatatttgcacacatgagtaagcttgtgatcatgaatagtgccat

SEQ ID NO: 69767 - DNA, 600 bp, Chicken  19866894342159_1
aaacgatgtcttacaacataaagctgctgccaggaaaaatggaggggttgatttgacacatcttcagaaagagctccttcctaaagagctttaacagcacttccttatggctactgaagtcagcagagcttctgcagagccaccagctagcactgatggagtgcaatcctcctgctgtagctctggctgttggtccacatgcagatatcagtcaaactgcatgagaagccaggagcttctgaaggaaaggttgcttttgagtaggcttagcttccaggtctgccaaagcaggtctcttartattaactcattgcagatgtggacttgggattacttatggttttcctgatttcaacacctcctttggaaagctgctgcttcagaagtacaggctcaagttgcccaaagagatggagtctycatgcctggagatgctcagaactggaagagatgggcatgcattgggcaggaggtggccctgggtgacctctgattttctctcctgacctacatgattccatgatgctacaaaccagagctaacatctgaacaatctcttaccttcactgtggtcattggagtcagtgagcatacagaaca

SEQ ID NO: 69768 - DNA, 600 bp, Chicken  19866894342159_2
cagcagagcttctgcagagccaccagctagcactgatggagtgcaatcctcctgctgtagctctggctgttggtccacatgcagatatcagtcaaactgcatgagaagccaggagcttctgaaggaaaggttgcttttgagtaggcttagcttccaggtctgccaaagcaggtctcttartattaactcattgcagatgtggacttgggattacttatggttttcctgatttcaacacctcctttggaaagctgctgcttcagaagtacaggctcaagttgcccaaagagatggagtctycatgcctggagatgctcagaactggaagagatgggcatgcattgggcaggaggtggccctgggtgacctctgattttctctcctgacctacatgattccatgatgctacaaaccagagctaacatctgaacaatctcttaccttcactgtggtcattggagtcagtgagcatacagaacaaatggcttaattacttcacctgctctctgagggtctcctagcaagtaataaaaagcagtgaatgaagctgctttcctccatctcccatcaataaaggacagtaagaaagagttaaggaaa

SEQ ID NO: 69769 - DNA, 600 bp, Chicken  19866894342195_1
aacccacctggaagtactgcatgcagttcaggggcccccagcacaagaaggacacgcggctgttggagcgggtccagagaaggaccacaaggatgatcagagggctggagcagctcccctgcgaggacaggctgagagagctggagctctctgctcatgagtcacgagactgtcccctttttttactgcttgtctctgcagtgtgagctccctgaccgtctcaacttcagcattagtcaggcctttggttcaggacactgtctctcattggatttgatttattagccccaattccaattrtatggtactgtactgggttaacttgcattctgataccatttttggtcaattagtctttctcccttaggagaaaggaaaaaaatacccctacaaagatgatccaatgcctgagataaagaaatggactgctacggaaaaaagcatcaattatttcagagaatgcgccatgagggaaatgctacatgagcccacgtttgttcctggtgatccacaccaagagcatcatcctgagagagtcaggtgtacaccaagtctgtggcatcaacttacaagaactgcaccagaaaagaatgccaatac

SEQ ID NO: 69770 - DNA, 600 bp, Chicken  19866894342206_1
tttttccttacgtttagtgtgttatcagtcgaggctttaattgagttctgatgattgtgttattaatataattagtgctattattttatagtgtggtaatagtttgctaataaacaaaaaagggggagtgcgggtatgacctctcaggaaagaatagctaaagcacgttatgttcttaattttctaaatcgatggacagcagagggccctccactttacaggtactttggtcaaactgctttaactcctgtcaagggaaaagcacaggttgtggtaaaaaaatctgaattctaatcaatkggaagggccctaatcgtygataacagggggccgacgctatgcttgtgtcttaagaggaacaggtccgagatgggtaccagcacgatgggtgcggccagccatctcagcgctggccataatgtgatcactgcacttccagcagtggtttgggcattccccatgttggaaatagccgaataattttgtcaggacggtatctctgataaagcagattttattcgcgattgcaatggcgggcgtcccacaagcaggagagcgcgcttatgggcacggatatgacagcttttgtaccttgtttcc

SEQ ID NO: 69771 - DNA, 600 bp, Chicken  19866894342206_2
gtgttatcagtcgaggctttaattgagttctgatgattgtgttattaatataattagtgctattattttatagtgtggtaatagtttgctaataaacaaaaaagggggagtgcgggtatgacctctcaggaaagaatagctaaagcacgttatgttcttaattttctaaatcgatggacagcagagggccctccactttacaggtactttggtcaaactgctttaactcctgtcaagggaaaagcacaggttgtggtaaaaaaatctgaattctaatcaatkggaagggccctaatcgtygataacagggggccgacgctatgcttgtgtcttaagaggaacaggtccgagatgggtaccagcacgatgggtgcggccagccatctcagcgctggccataatgtgatcactgcacttccagcagtggtttgggcattccccatgttggaaatagccgaataattttgtcaggacggtatctctgataaagcagattttattcgcgattgcaatggcgggcgtcccacaagcaggagagcgcgcttatgggcacggatatgacagcttttgtaccttgtttccccccacccccccgcctcc

SEQ ID NO: 69772 - DNA, 600 bp, Chicken  19866894342212_1
cccccttttgtttgaaattaatttgttataatttacgggagcgtattttgattgcttttgattaagtttaacaagcaggggaaaaaaaaagcctcccgcattaaacatcaaagcaaacaaatccgttttcgaggcccgctcgtgcataattaataaatgctgtcactcctcgtacagtaaatatatctattatgctacaataaatggtgttggtgtaattaatacacgcaaccaaagtatgctctgatgaagatctgggtgtagatgcgcctgtttgtacaacacccacaactcagagckgttgtcaagcgttggtaaaggggggggggaagttgctttttggagagggaagtttgctgtcagagctgggtgagcaaaagcaaattgcagttcctgaggggctgcatgcaaccccattgccctgcagctgggggtccctgcagctgggggtccctgcagctgggggtccctgcagctgggggtccctgcagctgggggtccctgcagctgggggtccctgcagctgggggtccctgcagctgggggtccctgcagctgggggtccctgcagctgggggtccctgcagctgggggtccctg

SEQ ID NO: 69773 - DNA, 600 bp, Chicken  19866894342235_1
agttctttctataatacactgtaatttcttcctgtttcaaagccttgaaaggtgggccatgcagcacttctgtttttattggtaaaagaacataaccactccttttatgtaaaaggaactaacttttaaaaagttatctgaaatatttatagtatttatagaaatgatagtgaagatctttattacaaaatgcattaaagagtcacttcatctaacttgggcaatcaggatataaacaactcttcacatacttcaaaagtttaagtatcacttgatttagtactgattttttaaaagatwagcatttggtaaaggcagctacatcataacaaacatcaactataacaaaagtaacatatayagtaaggctcaaataagaacragcaatattgaattytaaatgtttgccaactgaaaggcccaatttgcagcagacttacggaatgatgataacgcctgctctgctgggcacttgctcacaggaggttggatacacccatgggtagggcaactttacagtgtaatgacttctaacttaataattacacatgcatgcagagctctaggcttcccagacttgcatcagaatttatacattct

SEQ ID NO: 69774 - DNA, 600 bp, Chicken  19866894342235_2
cagcacttctgtttttattggtaaaagaacataaccactccttttatgtaaaaggaactaacttttaaaaagttatctgaaatatttatagtatttatagaaatgatagtgaagatctttattacaaaatgcattaaagagtcacttcatctaacttgggcaatcaggatataaacaactcttcacatacttcaaaagtttaagtatcacttgatttagtactgattttttaaaagatwagcatttggtaaaggcagctacatcataacaaacatcaactataacaaaagtaacatatayagtaaggctcaaataagaacragcaatattgaattytaaatgtttgccaactgaaaggcccaatttgcagcagacttacggaatgatgataacgcctgctctgctgggcacttgctcacaggaggttggatacacccatgggtagggcaactttacagtgtaatgacttctaacttaataattacacatgcatgcagagctctaggcttcccagacttgcatcagaatttatacattcttctttccctgccccttcaaattttctaattttcaaggtcaagaagaacacaaagaagaaca

SEQ ID NO: 69775 - DNA, 600 bp, Chicken  19866894342235_3
taaaagaacataaccactccttttatgtaaaaggaactaacttttaaaaagttatctgaaatatttatagtatttatagaaatgatagtgaagatctttattacaaaatgcattaaagagtcacttcatctaacttgggcaatcaggatataaacaactcttcacatacttcaaaagtttaagtatcacttgatttagtactgattttttaaaagatwagcatttggtaaaggcagctacatcataacaaacatcaactataacaaaagtaacatatayagtaaggctcaaataagaacragcaatattgaattytaaatgtttgccaactgaaaggcccaatttgcagcagacttacggaatgatgataacgcctgctctgctgggcacttgctcacaggaggttggatacacccatgggtagggcaactttacagtgtaatgacttctaacttaataattacacatgcatgcagagctctaggcttcccagacttgcatcagaatttatacattcttctttccctgccccttcaaattttctaattttcaaggtcaagaagaacacaaagaagaacagatgcaactgaatgagaaaga

SEQ ID NO: 69776 - DNA, 600 bp, Chicken  19866894342235_4
actccttttatgtaaaaggaactaacttttaaaaagttatctgaaatatttatagtatttatagaaatgatagtgaagatctttattacaaaatgcattaaagagtcacttcatctaacttgggcaatcaggatataaacaactcttcacatacttcaaaagtttaagtatcacttgatttagtactgattttttaaaagatwagcatttggtaaaggcagctacatcataacaaacatcaactataacaaaagtaacatatayagtaaggctcaaataagaacragcaatattgaattytaaatgtttgccaactgaaaggcccaatttgcagcagacttacggaatgatgataacgcctgctctgctgggcacttgctcacaggaggttggatacacccatgggtagggcaactttacagtgtaatgacttctaacttaataattacacatgcatgcagagctctaggcttcccagacttgcatcagaatttatacattcttctttccctgccccttcaaattttctaattttcaaggtcaagaagaacacaaagaagaacagatgcaactgaatgagaaagacctactgacatccgc

SEQ ID NO: 69777 - DNA, 600 bp, Chicken  19866894342255_1
ggcaggactatctggatgcttccttctgtaggctttttttcctactggggtagagaaatgaaatatcctgcagcaaccgaaatagactccttgaattcaaggtgattgaatccccccattgtactgatgcaagacttctctttccgcagtgtaaggagggaggcttcccaaacgatctttggctgggagtcagcacagagaatgtgtctgtctacaaacgtggagatccgaaaccgctggagactttccagtacgagcacattgttttctttggagcaccgcaagcccaacaccttcaarattacagtggatgagagagaaatgttctttgaaacatcccaggtatgtgaaagcatttgttgtacgtgcgcttttactagcactccagtaaagcccagacttctgaggactagacaaggttatatgtgagatctcttgctgaatgggtcaggacagccaaggcagaggatgaaggaagcttaaacctaaagcgtcatggtacctggtcttgagcacagaagtagaaatgatgctgtgaaagtgaaggagatggcatggtcttctggggcacacggaatttcaaattctgggtgctcagtt

SEQ ID NO: 69778 - DNA, 600 bp, Chicken  19866894342258_1
tgtgtaatgctctactagtgagagagttaagtttaaatgttctaaactcagaaattgggaagatttttccaaaagatctctgctctacatgcctggctggttgcactctgggaaagtgcacttcaattcttcttgctggcaaactcaataggcacagtgactcagactgagtaattccttcaagctttctcactcaggtgaaaaagatttaattgtggaaggaaagcagttctgccactttaacaattacatgtaattttagtccatgtgatttacaggcaactgtccccatatcatttrtacatgtgcagatagatagatatccattaaatacattttgtaagaaattatagcaacttaatcagattctttctcattgtagtaaacccagagtaactaccaaatcaacaagatattcctgatttcactgggagactaagatcaaaacttggtccatagcacataaaatgcaattttatttattctttcatctgtttccctttgagaatgaccaagaaggaaaaaaatgcaatctgatctaaaacaaacatcttgcagacctcagataagggggtgttcccaagaagatggacaggtttt

SEQ ID NO: 69779 - DNA, 600 bp, Chicken  19866894342262_1
cagtatcacatgaggaactgggaaagtcccagtaaaactagaacatatggttaccataaataatagaaacacatacagcagacaaaaaaaatcacaggaattgcatacatagaaaaatgcttttcccaacacctttctaggacaggttccctcgagcacactttctacaagggcaaccagtctactcttaaatttccaaagcaatggtgtttctacaatctcttctgactggatttatgagcttcctgcatatattcattccaacggtggaattcattccaacatctttctcccaacagygccttattactccagaagtcaccacgtagctgaacaactctcgaagaactrggacatgtgctttgttcaggcttttatgttaccaaattaaataccttcagaagatcccttcggttctctccctgcttgctgagtcsggtagytgagcactgttactgtgatggctaagagtatcattttcacagcttgcttttagagagcactctcatctagagtgggcccagagagtmagaggattgctaattctyamactgcacatttgtttgtctgatactgagctggttatttacagtccacaac

SEQ ID NO: 69780 - DNA, 600 bp, Chicken  19866894342262_2
taccataaataatagaaacacatacagcagacaaaaaaaatcacaggaattgcatacatagaaaaatgcttttcccaacacctttctaggacaggttccctcgagcacactttctacaagggcaaccagtctactcttaaatttccaaagcaatggtgtttctacaatctcttctgactggatttatgagcttcctgcatatattcattccaacggtggaattcattccaacatctttctcccaacagygccttattactccagaagtcaccacgtagctgaacaactctcgaagaactrggacatgtgctttgttcaggcttttatgttaccaaattaaataccttcagaagatcccttcggttctctccctgcttgctgagtcsggtagytgagcactgttactgtgatggctaagagtatcattttcacagcttgcttttagagagcactctcatctagagtgggcccagagagtmagaggattgctaattctyamactgcacatttgtttgtctgatactgagctggttatttacagtccacaactttagtgcactcatcaatacaacaaggtcactgaagttaagcaaacgctca

SEQ ID NO: 69781 - DNA, 600 bp, Chicken  19866894342262_3
taggacaggttccctcgagcacactttctacaagggcaaccagtctactcttaaatttccaaagcaatggtgtttctacaatctcttctgactggatttatgagcttcctgcatatattcattccaacggtggaattcattccaacatctttctcccaacagygccttattactccagaagtcaccacgtagctgaacaactctcgaagaactrggacatgtgctttgttcaggcttttatgttaccaaattaaataccttcagaagatcccttcggttctctccctgcttgctgagtcsggtagytgagcactgttactgtgatggctaagagtatcattttcacagcttgcttttagagagcactctcatctagagtgggcccagagagtmagaggattgctaattctyamactgcacatttgtttgtctgatactgagctggttatttacagtccacaactttagtgcactcatcaatacaacaaggtcactgaagttaagcaaacgctcataacttctttttaattgcattccagtggttttaacaaatataatggcaaataaaggtacttcacttcactgaataaactaatgtct

SEQ ID NO: 69782 - DNA, 600 bp, Chicken  19866894342262_4
aggttccctcgagcacactttctacaagggcaaccagtctactcttaaatttccaaagcaatggtgtttctacaatctcttctgactggatttatgagcttcctgcatatattcattccaacggtggaattcattccaacatctttctcccaacagygccttattactccagaagtcaccacgtagctgaacaactctcgaagaactrggacatgtgctttgttcaggcttttatgttaccaaattaaataccttcagaagatcccttcggttctctccctgcttgctgagtcsggtagytgagcactgttactgtgatggctaagagtatcattttcacagcttgcttttagagagcactctcatctagagtgggcccagagagtmagaggattgctaattctyamactgcacatttgtttgtctgatactgagctggttatttacagtccacaactttagtgcactcatcaatacaacaaggtcactgaagttaagcaaacgctcataacttctttttaattgcattccagtggttttaacaaatataatggcaaataaaggtacttcacttcactgaataaactaatgtcttggtag

SEQ ID NO: 69783 - DNA, 600 bp, Chicken  19866894342262_5
ggatttatgagcttcctgcatatattcattccaacggtggaattcattccaacatctttctcccaacagygccttattactccagaagtcaccacgtagctgaacaactctcgaagaactrggacatgtgctttgttcaggcttttatgttaccaaattaaataccttcagaagatcccttcggttctctccctgcttgctgagtcsggtagytgagcactgttactgtgatggctaagagtatcattttcacagcttgcttttagagagcactctcatctagagtgggcccagagagtmagaggattgctaattctyamactgcacatttgtttgtctgatactgagctggttatttacagtccacaactttagtgcactcatcaatacaacaaggtcactgaagttaagcaaacgctcataacttctttttaattgcattccagtggttttaacaaatataatggcaaataaaggtacttcacttcactgaataaactaatgtcttggtagtatcctgctatccttttaaaggatattccttacataaatatcatcttttctaattaattcctgctggtaaagcccattacaatcctc

SEQ ID NO: 69784 - DNA, 600 bp, Chicken  19866894342262_6
catatattcattccaacggtggaattcattccaacatctttctcccaacagygccttattactccagaagtcaccacgtagctgaacaactctcgaagaactrggacatgtgctttgttcaggcttttatgttaccaaattaaataccttcagaagatcccttcggttctctccctgcttgctgagtcsggtagytgagcactgttactgtgatggctaagagtatcattttcacagcttgcttttagagagcactctcatctagagtgggcccagagagtmagaggattgctaattctyamactgcacatttgtttgtctgatactgagctggttatttacagtccacaactttagtgcactcatcaatacaacaaggtcactgaagttaagcaaacgctcataacttctttttaattgcattccagtggttttaacaaatataatggcaaataaaggtacttcacttcactgaataaactaatgtcttggtagtatcctgctatccttttaaaggatattccttacataaatatcatcttttctaattaattcctgctggtaaagcccattacaatcctcagattcaatcctctacat

SEQ ID NO: 69785 - DNA, 600 bp, Chicken  19866894342262_7
tatattcattccaacggtggaattcattccaacatctttctcccaacagygccttattactccagaagtcaccacgtagctgaacaactctcgaagaactrggacatgtgctttgttcaggcttttatgttaccaaattaaataccttcagaagatcccttcggttctctccctgcttgctgagtcsggtagytgagcactgttactgtgatggctaagagtatcattttcacagcttgcttttagagagcactctcatctagagtgggcccagagagtmagaggattgctaattctyamactgcacatttgtttgtctgatactgagctggttatttacagtccacaactttagtgcactcatcaatacaacaaggtcactgaagttaagcaaacgctcataacttctttttaattgcattccagtggttttaacaaatataatggcaaataaaggtacttcacttcactgaataaactaatgtcttggtagtatcctgctatccttttaaaggatattccttacataaatatcatcttttctaattaattcctgctggtaaagcccattacaatcctcagattcaatcctctacatca

SEQ ID NO: 69786 - DNA, 599 bp, Chicken  19866894342274_1
  misc_feature (1)..(21): n is any nucleotide
nnnnnnnnnnnnnnnnnnnnntgtgtgtggaggtgaccccctgtctgtgatgtgttctctttcacatcatgaaacacagtggaagagggcagttctggcagccggggggagcccagggagctcctctagtttcagcttaaagccccttttcttttctatgtgctacacggtatctggtttgctggttgtgggtttatgcaatcgactttgtgatttcagggatttcctaagcaaacaaccaaaccatcaatatcgctctaacagagcgttggtgtttgtctacacttctgcaggaacgcrgattggaattactgactttaaatgagacaccaccagcagttgtggtttgtgctatgggctcagggcacactgctgctatcagccctttgtagagtgcgttgtckttggtgtagtggtgtgctgagctgtctgcctgtacagcacatcacgtaacactgcttgagttgcataaatatgtatacatgtggcattgtttctgaatgttgattaagaggcaaactgtcttccacatgaagagagtggactattcagaaggcatagggcatgttgtccattaggacagatagctgccccagggg

SEQ ID NO: 69787 - DNA, 600 bp, Chicken  19866894342274_2
gggggagcccagggagctcctctagtttcagcttaaagccccttttcttttctatgtgctacacggtatctggtttgctggttgtgggtttatgcaatcgactttgtgatttcagggatttcctaagcaaacaaccaaaccatcaatatcgctctaacagagcgttggtgtttgtctacacttctgcaggaacgcrgattggaattactgactttaaatgagacaccaccagcagttgtggtttgtgctatgggctcagggcacactgctgctatcagccctttgtagagtgcgttgtckttggtgtagtggtgtgctgagctgtctgcctgtacagcacatcacgtaacactgcttgagttgcataaatatgtatacatgtggcattgtttctgaatgttgattaagaggcaaactgtcttccacatgaagagagtggactattcagaaggcatagggcatgttgtccattaggacagatagctgccccaggggcaatattctgaaccttctagttggtggtcaggcttcccactgaatgtgagtgcaaaacagagcctgtcagtgcactatcgggatgcaaacattcttctttatttt

SEQ ID NO: 69788 - DNA, 600 bp, Chicken  19866894342277_1
tttcgcaacatccatttatttttagttttgcaagttatcatgaagtgtgcctacaaataattcttgatgagaatggaggaagagaagggaatgtcaggacaagggaagaatgcagttttgtccctcatttttttcaaatgctacaaattatgcagaatgtattcccttctttaccggcaatgctcaaacactgcaagtcccacatcccaaggaaggatttgccaccagcagagctaacttgtctgagcagtccttttcctagtgataacttctattatattcagttgaacaaacactctstsgtgcaagagctaagcccaggtacaatgaagagctgcaacctccctcagaaggacctgagctcatgctgcttagtgctttgttggcagttcaaagaggtccctgctttgggttttccagttcccaacaaggatatgaactcacctcttgacattcagataagtgttcttagacacagagctaccgagtaagggaataacaccactgcatcctcactcttctgaagatcaatttttgtctcctctttttacagacwtttttttttaattgaactaagaaaaattttggggaagggaaagt

SEQ ID NO: 69789 - DNA, 600 bp, Chicken  19866894342277_2
tcgcaacatccatttatttttagttttgcaagttatcatgaagtgtgcctacaaataattcttgatgagaatggaggaagagaagggaatgtcaggacaagggaagaatgcagttttgtccctcatttttttcaaatgctacaaattatgcagaatgtattcccttctttaccggcaatgctcaaacactgcaagtcccacatcccaaggaaggatttgccaccagcagagctaacttgtctgagcagtccttttcctagtgataacttctattatattcagttgaacaaacactctstsgtgcaagagctaagcccaggtacaatgaagagctgcaacctccctcagaaggacctgagctcatgctgcttagtgctttgttggcagttcaaagaggtccctgctttgggttttccagttcccaacaaggatatgaactcacctcttgacattcagataagtgttcttagacacagagctaccgagtaagggaataacaccactgcatcctcactcttctgaagatcaatttttgtctcctctttttacagacwtttttttttaattgaactaagaaaaattttggggaagggaaagtaa

SEQ ID NO: 69790 - DNA, 600 bp, Chicken  19866894342277_3
tcctagtgataacttctattatattcagttgaacaaacactctstsgtgcaagagctaagcccaggtacaatgaagagctgcaacctccctcagaaggacctgagctcatgctgcttagtgctttgttggcagttcaaagaggtccctgctttgggttttccagttcccaacaaggatatgaactcacctcttgacattcagataagtgttcttagacacagagctaccgagtaagggaataacaccactgcatcctcactcttctgaagatcaatttttgtctcctctttttacagacwtttttttttaattgaactaagaaaaattttggggaagggaaagtaattttgttcagtgggacaaaaagtctcatctaaaccaattttaggaatgaaaacagatccgttattcctgtgacactaatcagaagacattttytgaactcatcattttctacagttacagagttccgatacatttacaggtgcaaatttaactgtcgaaatcagcatcctgattctttgtcatggctacagagttgctgagaatgctgtatcttctttggaaaattggattagattcagggactaaaatatgtg

SEQ ID NO: 69791 - DNA, 600 bp, Chicken  19866894342277_4
gaggtccctgctttgggttttccagttcccaacaaggatatgaactcacctcttgacattcagataagtgttcttagacacagagctaccgagtaagggaataacaccactgcatcctcactcttctgaagatcaatttttgtctcctctttttacagacwtttttttttaattgaactaagaaaaattttggggaagggaaagtaattttgttcagtgggacaaaaagtctcatctaaaccaattttaggaatgaaaacagatccgttattcctgtgacactaatcagaagacattttytgaactcatcattttctacagttacagagttccgatacatttacaggtgcaaatttaactgtcgaaatcagcatcctgattctttgtcatggctacagagttgctgagaatgctgtatcttctttggaaaattggattagattcagggactaaaatatgtgactgtgagtatgtaactaagtctgaaaatattcgcctagaggaacaagccctgcgttcgagtgcttctttgcacatttcttccaaacaaagccacttttccacatgcatcttttggttaactcagactactccacacgc

SEQ ID NO: 69792 - DNA, 599 bp, Chicken  19866894342298_1
  misc_feature (1)..(139): n is any nucleotide
nnnnnnnnnnnnnnnnnnnnnnnnnnnnnnnnnnnnnnnnnnnnnnnnnnnnnnnnnnnnnnnnnnnnnnnnnnnnnnnnnnnnnnnnnnnnnnnnnnnnnnnnnnnnnnnnnnnnnnnnnnnnnnnnnnnnnnnnnnnatgagtacttcaatggatgaagcaggctgggagatgtatcacgttgcagaaggctcgttcttaaaggagaaaggccagccttctgcagggagccaggagccatcctggcagtcctgacccgagccaagcagggctgaggtgagaagagagggatacggttygtggtgcactgcaaagctctgcagctccaagccccgtttcagctccactgtgatgctgcggtatctttacttttcattcctcttgttgtcctagaaacagagcaaaaaattcttccaggcaggcccttttgttacactcaaggcagcatcttgtctctcagcaaaaaaaaaaaaaaaaaaaaaaaaaaagcaccattacataataaaatccttgggagaaaaataacagcgggttcaaagccttctaaagaaacccaaagaaacttcacgcactccaaactttcctgaagtccatccta

SEQ ID NO: 69793 - DNA, 600 bp, Chicken  19866894342298_2
ccaagccccgtttcagctccactgtgatgctgcggtatctttacttttcattcctcttgttgtcctagaaacagagcaaaaaattcttccaggcaggcccttttgttacactcaaggcagcatcttgtctctcagcaaaaaaaaaaaaaaaaaaaaaaaaaaagcaccattacataataaaatccttgggagaaaaataacagcgggttcaaagccttctaaagaaacccaaagaaacttcacgcactccaaactttcctgaagtccatcctaggagcgctccatgtctgaaagggcaaygggcagttcgcagggtgagcaacacgagggaaaaagggaagtggtcgggggggatttgtgttcagtcccggccttgtaagccctgctattcattcatcctttactccctaaagcaggaagcagaaaaggaactgtctttcttttgcactgagacatcactgggttttcggtcaggtctcgtgagctcagagcctttcaggctggtaagaatgccacagatatctgcaaaggtttccgcaggagggcacggcctggcccaaagcacgatcgaccccaaagcacaaggtacccgagctgcat

SEQ ID NO: 69794 - DNA, 600 bp, Chicken  19866894342313_1
cctgtcctatgtccaacctccagcacagggcaaaagcaggccaggtcattcaaggttctcacatgacttgcttaatgaatgctatccctataattctcaaccagcagaaacctctcatatctctcaacaacataccccactgccaactctgtattcttcctccaattaattggatcctccattaattggaatttctgccttcctggtgaatttactacattgcaccactgtgcatggaagtcttcttcccatgggggaaaggcacagatataagcatcaatcactagagaaactatgtcyaaagggctgtggattccaacaacagacacacactgacagcaataaagtttatggttgctagtaaaaagaattttttctgttgccacatgaaagtaactgcactctcaaccacagaagctattggtaaggtgcgctcttgaaagccagcccagtcttgctagtattctagtgactaactgttctcaggaaggctttaaaaaaaataataaattaattaagaacaaaaaccaaacaagcaaacaaacaaacaaacaaacaaaaaaacagacaaaaaacaacaagcaaccaacaacaacaaaa

SEQ ID NO: 69795 - DNA, 600 bp, Chicken  19866894342343_1
tctcggaagtaatccataagtgatgtacagaaagcttccactgatcctagagaaaaaacacacatgcaaactaaagaaaccagtccaaaaatgacaacactgcttcagggtgctttaagcacatgactgtaatatggtcaaaatacatcagttcccatgaagcatgtaggcctgaatttatctagctccagttacttcagttaagactgaagtaatgatacctttacacctaagaactgaatcactctgaagatatctatggacgtgataaaacagctaaggacactaatctcctgagtrggatatatagctagatgtccaaaggtgtacaagtctaagatcttaaaagcaggaattgagmtcaagacagttggaacaacttaacaaattgttgagaatgacagttcctaaaacaaggttctattctgcaaagaaggaaaaacagcaaattgtggggaagttttcaagttcaaaggatataaactcacttggtcttcttgaagtttcttcagaaagaatttctggaacttggacttctttgaacatttctaagcctgaaacacaataatatacttggagaaagatacccaaatgggttgc

SEQ ID NO: 69796 - DNA, 580 bp, Chicken  19866894342343_2
acatgcaaactaaagaaaccagtccaaaaatgacaacactgcttcagggtgctttaagcacatgactgtaatatggtcaaaatacatcagttcccatgaagcatgtaggcctgaatttatctagctccagttacttcagttaagactgaagtaatgatacctttacacctaagaactgaatcactctgaagatatctatggacgtgataaaacagctaaggacactaatctcctgagtrggatatatagctagatgtccaaaggtgtacaagtctaagatcttaaaagcaggaattgagmtcaagacagttggaacaacttaacaaattgttgagaatgacagttcctaaaacaaggttctattctgcaaagaaggaaaaacagcaaattgtggggaagttttcaagttcaaaggatataaactcacttggtcttcttgaagtttcttcagaaagaatttctggaacttggacttctttgaacatttctaagcctgaaacacaataatatacttggagaaagatacccaaatgggttgctgattcagctttactaattttaacaggaaaacgaatcccaa

SEQ ID NO: 69797 - DNA, 497 bp, Chicken  19866894342350_1
gaaaacctttaaagcatcggaacgttttctttaagcacactttttctattgtaaggttcgtacataaaagcttaacctagaaaaatctgcagaaacgactcctgtgagacattctcaaaagctccataacgcttccgagcagacaaagattgccaaaacagcacagaaccattcattgcaatgggacaccatcctcaaaacagaacgctgctccgctccccccgggcccctctggccccaggcatcccccagggaccccaacacacactgcatcctgcatcgctcgccctatgatatttyaacayrggatgctcaattgctgcaaggaaatcaaaacagctgaaaggcttcccaagatgagtcagcaaagccagtgttttgctctcgactccttccatgcacacaacaggaggcagtggtagccagaggattcaatacattggggcacctgctttttctacaagcttgcaccatgagaatgtgtcctttacacaagt

SEQ ID NO: 69798 - DNA, 492 bp, Chicken  19866894342350_2
cctttaaagcatcggaacgttttctttaagcacactttttctattgtaaggttcgtacataaaagcttaacctagaaaaatctgcagaaacgactcctgtgagacattctcaaaagctccataacgcttccgagcagacaaagattgccaaaacagcacagaaccattcattgcaatgggacaccatcctcaaaacagaacgctgctccgctccccccgggcccctctggccccaggcatcccccagggaccccaacacacactgcatcctgcatcgctcgccctatgatatttyaacayrggatgctcaattgctgcaaggaaatcaaaacagctgaaaggcttcccaagatgagtcagcaaagccagtgttttgctctcgactccttccatgcacacaacaggaggcagtggtagccagaggattcaatacattggggcacctgctttttctacaagcttgcaccatgagaatgtgtcctttacacaagt

SEQ ID NO: 69799 - DNA, 491 bp, Chicken  19866894342350_3
ctttaaagcatcggaacgttttctttaagcacactttttctattgtaaggttcgtacataaaagcttaacctagaaaaatctgcagaaacgactcctgtgagacattctcaaaagctccataacgcttccgagcagacaaagattgccaaaacagcacagaaccattcattgcaatgggacaccatcctcaaaacagaacgctgctccgctccccccgggcccctctggccccaggcatcccccagggaccccaacacacactgcatcctgcatcgctcgccctatgatatttyaacayrggatgctcaattgctgcaaggaaatcaaaacagctgaaaggcttcccaagatgagtcagcaaagccagtgttttgctctcgactccttccatgcacacaacaggaggcagtggtagccagaggattcaatacattggggcacctgctttttctacaagcttgcaccatgagaatgtgtcctttacacaagt

SEQ ID NO: 69800 - DNA, 600 bp, Chicken  19866894342370_1
aaaaagccaataaccaaacatccattgctgaggtctggaagaatttgagcaaagtgtagcaggagagaaacttgaagctgtgagagaagtcattctttgcttcctgctgtgttgaggaaagcaaggctgcctgttctttgtaaacaaaaccaagtggaagcatttgagggaggtgtctttaatggtctttaacattctccgaaattcaggtaagatctgaaatattttgagatttctgggttaaatgtgaacctctcctctgtccccagtatttgtgagcgggtgacccctcggctgtcycatgccaactcagcagtggtgctgtcagcagtgaaagttctgatgaagttcctggagcttctccccaaggactcagactattacaacatgctgctgaagaagcttgcccctccgctggttaccctgctgtctggagagcctgaagtccagtatgtcgccctgaggaacatcaacttgattgtgcagaaaaggtaaaacgttagttcctggatgtgggagggtatgtggttaccttctgctatttccatacacgcagaactgcytttaattgaggttcaggttcagccccctcaagggatg

SEQ ID NO: 69801 - DNA, 560 bp, Chicken  19866894342370_2
ccccagtatttgtgagcgggtgacccctcggctgtcycatgccaactcagcagtggtgctgtcagcagtgaaagttctgatgaagttcctggagcttctccccaaggactcagactattacaacatgctgctgaagaagcttgcccctccgctggttaccctgctgtctggagagcctgaagtccagtatgtcgccctgaggaacatcaacttgattgtgcagaaaaggtaaaacgttagttcctggatgtgggagggtatgtggttaccttctgctatttccatacacgcagaactgcytttaattgaggttcaggttcagccccctcaagggatggattaaacagtcttgtgactctggtagcttacataagttgtgtygttgcagagcactcgtgataccagtgtcacacagtgctttgttacctgtctttttctcttttttctcagtgcatcttaagtgcactgagaagtgccctcccaccagactaaatcagattgcatgcagggaggagagtgtaactgcacaggtcataatgacctgtagaaactcagtgtgc

SEQ ID NO: 69802 - DNA, 479 bp, Chicken  19866894342370_3
gaagttcctggagcttctccccaaggactcagactattacaacatgctgctgaagaagcttgcccctccgctggttaccctgctgtctggagagcctgaagtccagtatgtcgccctgaggaacatcaacttgattgtgcagaaaaggtaaaacgttagttcctggatgtgggagggtatgtggttaccttctgctatttccatacacgcagaactgcytttaattgaggttcaggttcagccccctcaagggatggattaaacagtcttgtgactctggtagcttacataagttgtgtygttgcagagcactcgtgataccagtgtcacacagtgctttgttacctgtctttttctcttttttctcagtgcatcttaagtgcactgagaagtgccctcccaccagactaaatcagattgcatgcagggaggagagtgtaactgcacaggtcataatgacctgtagaaactcagtgtgc

SEQ ID NO: 69803 - DNA, 600 bp, Chicken  19866894342382_1
tatcttctcacttctgctttcagtaatgctgtctaagtaaagtccaatctgttgctcagcaaaagacttcattatcatctggggcctttcaatatcagtgaacattatcatactcacgaattcaagatgacagtaaacaggaaaattattttagatttaactgaactctttactacctcacatacatcttccataccaccttgtatttaaatccctgtcaagaaaacctccagttttctcatccctcattcactgaaattcttttcacttgttctctgctcttttgttctcaataccctytgttctttctggatacctttctgcaaaggagcgatcagagccgaasgcagcactcagaattaggacagatactgacaaatgtaatggcattataacattgcgtccttctctaatgacatacatggtgcatttcaggagaactaatttccagcccttccatcccacctccagtcctgcataataatcaagtgccagacaagtgagtcgtcatacctcggggtgccaaggaagcaggcgctgaccacagcaaggaccacatgaggaaccacgttcaatgccagctgattaaagcaatggcca

SEQ ID NO: 69804 - DNA, 600 bp, Chicken  19866894342382_2
atctgttgctcagcaaaagacttcattatcatctggggcctttcaatatcagtgaacattatcatactcacgaattcaagatgacagtaaacaggaaaattattttagatttaactgaactctttactacctcacatacatcttccataccaccttgtatttaaatccctgtcaagaaaacctccagttttctcatccctcattcactgaaattcttttcacttgttctctgctcttttgttctcaataccctytgttctttctggatacctttctgcaaaggagcgatcagagccgaasgcagcactcagaattaggacagatactgacaaatgtaatggcattataacattgcgtccttctctaatgacatacatggtgcatttcaggagaactaatttccagcccttccatcccacctccagtcctgcataataatcaagtgccagacaagtgagtcgtcatacctcggggtgccaaggaagcaggcgctgaccacagcaaggaccacatgaggaaccacgttcaatgccagctgattaaagcaatggccaactctgccatgaacccacacagggagtggatcttctgggggtggtt

SEQ ID NO: 69805 - DNA, 421 bp, Chicken  19866894342382_3
ggccgagtgcttgcgtggccagctcatcctgccaaattaacatcaggaagcatcggcatgcctgcgtgctgtctcaaaatatctcgagctgcttaaactaccacattccagttctacgcatcctcaaaggagcgcggacaaagtcgctccttaaagcgacacgtaacgtcccgcaccctccagctcacacgagtgcaggagggctgggaaagcggcaggatgcggagctccgtgctctgctttgcagactgaagcacgcacgggccgtttcgggccttacaccgcccgaaccagcccagycgagcgccgggtctttcgggcctctcccggtcagcaccaacgccgccccgaggcaggcagctccrcgaggggcgtgcatagcggcgcgctgtcgccgcacgcccaactttgacccctgccc

SEQ ID NO: 69806 - DNA, 356 bp, Chicken  19866894342382_4
gtgctgtctcaaaatatctcgagctgcttaaactaccacattccagttctacgcatcctcaaaggagcgcggacaaagtcgctccttaaagcgacacgtaacgtcccgcaccctccagctcacacgagtgcaggagggctgggaaagcggcaggatgcggagctccgtgctctgctttgcagactgaagcacgcacgggccgtttcgggccttacaccgcccgaaccagcccagycgagcgccgggtctttcgggcctctcccggtcagcaccaacgccgccccgaggcaggcagctccrcgaggggcgtgcatagcggcgcgctgtcgccgcacgcccaactttgacccctgccc

SEQ ID NO: 69807 - DNA, 600 bp, Chicken  19866894342383_1
ggggaaaaatgcatcttggggtgggggtggcacagagctcaagggaacaggatctggcaccgcttggggctgcagaacgctggggatgctgccgttgcctgctcgtgggctggaagtaagtgggagcagctgtgctgctgcaaacaatgaggaaaacaataaaacttttagggaaatgttttcacgataataaaaaatgtgcttttcatttctgaagagggaggaagcaaagagtgctgcggaacctgctggtgcctgaaagttcagcctgggctgtgcagggagaggtggaaaggaagrggagctttggtcttgagatggccttagctcctgtaggctcaccaagctggaaaaggggctgcagagccagcaggaggtatgggatttccagctggagattgcraggggtttcatttcgtcccctctctcatctattggcaaaatgtaaggcagacgttggccatgtcccttctggcttgaagttgagctcgtcttgttgccagttcacctttttcaacacatggactcccattctggacaccatcttggccaaaagagctttgcagaagggcagcacttgtgggaggtcaggggaaaggc

SEQ ID NO: 69808 - DNA, 600 bp, Chicken  19866894342383_2
cgtgggctggaagtaagtgggagcagctgtgctgctgcaaacaatgaggaaaacaataaaacttttagggaaatgttttcacgataataaaaaatgtgcttttcatttctgaagagggaggaagcaaagagtgctgcggaacctgctggtgcctgaaagttcagcctgggctgtgcagggagaggtggaaaggaagrggagctttggtcttgagatggccttagctcctgtaggctcaccaagctggaaaaggggctgcagagccagcaggaggtatgggatttccagctggagattgcraggggtttcatttcgtcccctctctcatctattggcaaaatgtaaggcagacgttggccatgtcccttctggcttgaagttgagctcgtcttgttgccagttcacctttttcaacacatggactcccattctggacaccatcttggccaaaagagctttgcagaagggcagcacttgtgggaggtcaggggaaaggcttacttcagctctttttcacgtcttctcagcctgactcagtcctgtcagctccctcccttgtgttcatcactttggatgaaagcttcatctccactttggtac

SEQ ID NO: 69809 - DNA, 546 bp, Chicken  19866894342394_1
gagaagccccagcgaatgtggaaatagagtacaggccgcctggtgacataaacaatgatgcgctgtaccactgctgtcaggaaaagcagcgtaaacgggatcccaatgacagagtagatgatgcagaaggccttccctccatcagataaaggcactgtgtgtccataacctagaataaagcagagggaaaacacaggatgagtcaaagctgcgacttcatgtatccatttgatattagctatactgcatgaaataaagaatagtgatgggatctgctgacctggctgaagcaggtaaacrgagtctaagtactggcaacaagaaaataaaaatccaaaaatatttttgtgtttcaaaatggtgaaagtaattgtattaatggtcttgtttttcttcaaaatgtaacatgtacactagagcaggaaatctatagcaggaaaactctaaatattgagggttttcctactgaccattttgcttagttttaccaagtgatgcaacaacttctactcaccttgacaagaaggatcatccatacttcagaaa

SEQ ID NO: 69810 - DNA, 600 bp, Chicken  19866894342398_1
cccgatcgcttatcggcaccgagccgttctcacattgacagggcccaggctgtgacattgagcaaggctgggggcagcggtgcctggggcatgggggtcccacggtgcccacatcgtctggcggggccaccccttctcagtgcatggctgagaactggaacggcccaaaggggttggggtgcgagctgcagccctgagcccccgacgtagcgttctcggtgtcccatctcccagaccttggggatggctccgcctgcaccatcatcccacgtgccctcctgcaccgagctgagcgctcasccacgtgcagtacccagtgcagcagtggctgtccccgttggcggctgtgccgctgctgagctgggggcaatccccaccgcaggtcccatcctcacgcacaactccacgccgctggcattctgcagggaccacccggcccagcaccatcagaaggagcatttgacagcaaacaaaccgtttttttttcccctctggctctttcagctcgtttatcgcctgcacagggcaagcagagctgtcattgcctgaacctcactcatccgtttaaccttgggggaagaaacacatttgtggcggata

SEQ ID NO: 69811 - DNA, 599 bp, Chicken  19866894342405_1
  misc_feature (1)..(120): n is any nucleotide
nnnnnnnnnnnnnnnnnnnnnnnnnnnnnnnnnnnnnnnnnnnnnnnnnnnnnnnnnnnnnnnnnnnnnnnnnnnnnnnnnnnnnnnnnnnnnnnnnnnnnnnnnnnnnnnnnnnnnnnncttgttttgcatcggtgtgccaaccaaccccagcaacctccattaacggatgggagccacaggttacgttttgatgaacgcaatcaggcgagcattagcaaaacccgcgccaagctgacgtttgggtcgagtccaacttcagcaaattactttccccgctctttgagcatcagccctcaygcgctctccgacctttagcacgtgccatctccagccacagagcagctctctgacccgcagggagcaccsggcgtcacaaccaaactctgccttcttctctccctgcctgaggtagcagcttgcaagacaaagctgctccgtgcaccgaagcctctacacagccataaataattccctctgctcatgttggttatcaaatccaactgcccttagcttgcagaggactcctgccttgttttgctattcctgcctgmctttttttttttttttccttggtttgccactttgagatgtttctg

SEQ ID NO: 69812 - DNA, 599 bp, Chicken  19866894342405_2
  misc_feature (1)..(51): n is any nucleotide
nnnnnnnnnnnnnnnnnnnnnnnnnnnnnnnnnnnnnnnnnnnnnnnnnnncttgttttgcatcggtgtgccaaccaaccccagcaacctccattaacggatgggagccacaggttacgttttgatgaacgcaatcaggcgagcattagcaaaacccgcgccaagctgacgtttgggtcgagtccaacttcagcaaattactttccccgctctttgagcatcagccctcaygcgctctccgacctttagcacgtgccatctccagccacagagcagctctctgacccgcagggagcaccsggcgtcacaaccaaactctgccttcttctctccctgcctgaggtagcagcttgcaagacaaagctgctccgtgcaccgaagcctctacacagccataaataattccctctgctcatgttggttatcaaatccaactgcccttagcttgcagaggactcctgccttgttttgctattcctgcctgmctttttttttttttttccttggtttgccactttgagatgtttctgtggaaacacagctgtaggaagaggggccttaggggaaacctgggaagtctggggattttgcatttacac

SEQ ID NO: 69813 - DNA, 600 bp, Chicken  19866894342405_3
aacttcagcaaattactttccccgctctttgagcatcagccctcaygcgctctccgacctttagcacgtgccatctccagccacagagcagctctctgacccgcagggagcaccsggcgtcacaaccaaactctgccttcttctctccctgcctgaggtagcagcttgcaagacaaagctgctccgtgcaccgaagcctctacacagccataaataattccctctgctcatgttggttatcaaatccaactgcccttagcttgcagaggactcctgccttgttttgctattcctgcctgmctttttttttttttttccttggtttgccactttgagatgtttctgtggaaacacagctgtaggaagaggggccttaggggaaacctgggaagtctggggattttgcatttacactcatcattagcttatctcatcaataaaatggagcaggatattgtaattacagagtatgaagaaaaattgtaacccttttatttttttttttagcctctttacaagggctggtgtgccccttgatgggctgctaatgacttgttcacagcctaagaagtcaaaaaggcaagaagcactgaaccagaa

SEQ ID NO: 69814 - DNA, 599 bp, Chicken  19866894342410_1
  misc_feature (1)..(76): n is any nucleotide
nnnnnnnnnnnnnnnnnnnnnnnnnnnnnnnnnnnnnnnnnnnnnnnnnnnnnnnnnnnnnnnnnnnnnnnnnnnnaatgtctgttatgtatctgcccgtcagatgctaactctggagtccttcctgcaaagagaaagcctatggaaagtagtataaagccaggtaacttgttacttaggtggaatcttactttggcagctctcatcccagaaacaggcgaggccttgaaactgaagcactttcaatgctctccgtttttgctcctgatgggtttgacagtgcacctccctcagtggtgkacccttctgtctgcatgyatatgcatgtcggtacacagagctgatcttcttctttgcaagttaactaactgttggcctcctgtggcagagagcttcatrgtgctactttacactgtactggcaggagaagacattgctgacaaatggtgtctgcttctctccaaatggacrtgggcagtttttgcccacaatcagaaatagacacaaaagcatgttcagrgtccttctggagccagttgcatatctgaaaactccggaacgtcctgtcctgtcccaaacacactatcagtatctgtcac

SEQ ID NO: 69815 - DNA, 599 bp, Chicken  19866894342410_2
  misc_feature (1)..(58): n is any nucleotide
nnnnnnnnnnnnnnnnnnnnnnnnnnnnnnnnnnnnnnnnnnnnnnnnnnnnnnnnnnaatgtctgttatgtatctgcccgtcagatgctaactctggagtccttcctgcaaagagaaagcctatggaaagtagtataaagccaggtaacttgttacttaggtggaatcttactttggcagctctcatcccagaaacaggcgaggccttgaaactgaagcactttcaatgctctccgtttttgctcctgatgggtttgacagtgcacctccctcagtggtgkacccttctgtctgcatgyatatgcatgtcggtacacagagctgatcttcttctttgcaagttaactaactgttggcctcctgtggcagagagcttcatrgtgctactttacactgtactggcaggagaagacattgctgacaaatggtgtctgcttctctccaaatggacrtgggcagtttttgcccacaatcagaaatagacacaaaagcatgttcagrgtccttctggagccagttgcatatctgaaaactccggaacgtcctgtcctgtcccaaacacactatcagtatctgtcacggccactccaacagctcc

SEQ ID NO: 69816 - DNA, 600 bp, Chicken  19866894342410_3
tcagatgctaactctggagtccttcctgcaaagagaaagcctatggaaagtagtataaagccaggtaacttgttacttaggtggaatcttactttggcagctctcatcccagaaacaggcgaggccttgaaactgaagcactttcaatgctctccgtttttgctcctgatgggtttgacagtgcacctccctcagtggtgkacccttctgtctgcatgyatatgcatgtcggtacacagagctgatcttcttctttgcaagttaactaactgttggcctcctgtggcagagagcttcatrgtgctactttacactgtactggcaggagaagacattgctgacaaatggtgtctgcttctctccaaatggacrtgggcagtttttgcccacaatcagaaatagacacaaaagcatgttcagrgtccttctggagccagttgcatatctgaaaactccggaacgtcctgtcctgtcccaaacacactatcagtatctgtcacggccactccaacagctccttcctgtgacgtataagcaagcrgttctgggagttcacctggcagcaactggatcctgaagaggcttttcaaattctgcaca

SEQ ID NO: 69817 - DNA, 600 bp, Chicken  19866894342410_4
ttacttaggtggaatcttactttggcagctctcatcccagaaacaggcgaggccttgaaactgaagcactttcaatgctctccgtttttgctcctgatgggtttgacagtgcacctccctcagtggtgkacccttctgtctgcatgyatatgcatgtcggtacacagagctgatcttcttctttgcaagttaactaactgttggcctcctgtggcagagagcttcatrgtgctactttacactgtactggcaggagaagacattgctgacaaatggtgtctgcttctctccaaatggacrtgggcagtttttgcccacaatcagaaatagacacaaaagcatgttcagrgtccttctggagccagttgcatatctgaaaactccggaacgtcctgtcctgtcccaaacacactatcagtatctgtcacggccactccaacagctccttcctgtgacgtataagcaagcrgttctgggagttcacctggcagcaactggatcctgaagaggcttttcaaattctgcacaggcttcctttccacggtgatcccctttccccttgctgcacccaggcggcagaagaaagctttgcaagtggaa

SEQ ID NO: 69818 - DNA, 600 bp, Chicken  19866894342410_5
aggccttgaaactgaagcactttcaatgctctccgtttttgctcctgatgggtttgacagtgcacctccctcagtggtgkacccttctgtctgcatgyatatgcatgtcggtacacagagctgatcttcttctttgcaagttaactaactgttggcctcctgtggcagagagcttcatrgtgctactttacactgtactggcaggagaagacattgctgacaaatggtgtctgcttctctccaaatggacrtgggcagtttttgcccacaatcagaaatagacacaaaagcatgttcagrgtccttctggagccagttgcatatctgaaaactccggaacgtcctgtcctgtcccaaacacactatcagtatctgtcacggccactccaacagctccttcctgtgacgtataagcaagcrgttctgggagttcacctggcagcaactggatcctgaagaggcttttcaaattctgcacaggcttcctttccacggtgatcccctttccccttgctgcacccaggcggcagaagaaagctttgcaagtggaactctctgaatggtgttcctgcacaatggcacttggtttagtcagggcta

SEQ ID NO: 69819 - DNA, 600 bp, Chicken  19866894342410_6
ctgatcttcttctttgcaagttaactaactgttggcctcctgtggcagagagcttcatrgtgctactttacactgtactggcaggagaagacattgctgacaaatggtgtctgcttctctccaaatggacrtgggcagtttttgcccacaatcagaaatagacacaaaagcatgttcagrgtccttctggagccagttgcatatctgaaaactccggaacgtcctgtcctgtcccaaacacactatcagtatctgtcacggccactccaacagctccttcctgtgacgtataagcaagcrgttctgggagttcacctggcagcaactggatcctgaagaggcttttcaaattctgcacaggcttcctttccacggtgatcccctttccccttgctgcacccaggcggcagaagaaagctttgcaagtggaactctctgaatggtgttcctgcacaatggcacttggtttagtcagggctaaaggaattgtgctgtggtgagatgcagtccctcagatttcttcagcatcctttgggtctgacggccttaaaatgtatggggtttcaaaagcctggcccagtgacaaagctattgctttca

SEQ ID NO: 69820 - DNA, 600 bp, Chicken  19866894342414_1
gattttgaggagagaatcctgaatttatttcattattcctttatttctgtatgctttcaggaattctttacctgatctcagctttcagtcacctggcacattctatgctgctcctggtagtatctgcacgggatgggggtggtctttcctcatccaccaatgcggctgtcacagtgaacatccttcagaccactttggcccctgccacttttgagagatcctggtatgctttttctgttcccatagatgcacctgaagacagccaagttggagctgtaaaggctagagagcctccaggtragttgtgtgttcagagatgattctctcttacagttgtggccatcagtgggaaatgtttacagataatatttatttaaactttcagataacttactgggttctgttgagcatcaaatagtatttactgctgctatttaaaacaactggtataatcgctgctatattgggatgccctctagatcagatggaggttgatggtcatttctttggtggcccagtgggaatggcaactgcccgcattttctaactttaatttatttacttgctttgcgatatggttagaaaaaagccctagttttc

SEQ ID NO: 69821 - DNA, 599 bp, Chicken  19866894342417_1
ctaactggaaaagcatggtaaactaagactttattattatttttgcataatagagatgcaagcttgaatgcttaacatataactagataaacatcatgtttatatgtaaccattcacggctgtctggtctaagtcagtttatatttcctgtctgttgttgaaaagactccagtatgtgttatcaacaaagtcgacatttttggccgggtgtttaacccctggtatcagaaagctaagaaattcaaagccagctatctaaaccaatggatgatgttagactaagaccagatgcgtataagygagtatgtttaggctagagcttagaaaaagcagtaagattccaactttcctatatgtcaacagcagtctttttgttttatagaaaagatcagattgatttatcaactatattaaagatatcccttggtttcctcttaaaaattattaattacaaaaataattaagcatatatatatacagtcatttattctttatagaaatatgtggtcatttgtctgtaggtacgcatgtcaggcacaatttacctgtccaattctgaaaatgtttattcatttctttaaggacatataaatttaatg

SEQ ID NO: 69822 - DNA, 600 bp, Chicken  19866894342422_1
catgtgcaacacgcatgtgggaaatactccgaccaccaccctcccatcaggaaccacaaaatcctgaggtggagatgcttggagggcaaatcctcagcacgaactggaggccgtggccaactggtttcttgcagtccagccccaaccacacgccattggatggcaccaacctcagcccaaccacacaaccccatgtcagcaggatggacctggtctgccaggtgctgctccaggcgctgcagcccttcgctctcccctcctctccatggggagatgctctcgggggggatcttcagatcygtgggcaaagggaccccgtagcaytcagccaggcccagctcaggggggctgcacctcctaatgggaaagagagggaagcagagcattaataaccctccatgcacaaaagcaatgcaatgcaatgtctaaaagtcactcttatcatttgaccccactgtttcgggcagaggaaggccctgcaggtcccccgttgggtctttacttactggaagtcctcagctgtggggtttcggacaggcacctccggggtccccgagaagggacaggatgcgaaggaacctcttgtatgtcagtggggga

SEQ ID NO: 69823 - DNA, 600 bp, Chicken  19866894342422_2
tactccgaccaccaccctcccatcaggaaccacaaaatcctgaggtggagatgcttggagggcaaatcctcagcacgaactggaggccgtggccaactggtttcttgcagtccagccccaaccacacgccattggatggcaccaacctcagcccaaccacacaaccccatgtcagcaggatggacctggtctgccaggtgctgctccaggcgctgcagcccttcgctctcccctcctctccatggggagatgctctcgggggggatcttcagatcygtgggcaaagggaccccgtagcaytcagccaggcccagctcaggggggctgcacctcctaatgggaaagagagggaagcagagcattaataaccctccatgcacaaaagcaatgcaatgcaatgtctaaaagtcactcttatcatttgaccccactgtttcgggcagaggaaggccctgcaggtcccccgttgggtctttacttactggaagtcctcagctgtggggtttcggacaggcacctccggggtccccgagaagggacaggatgcgaaggaacctcttgtatgtcagtgggggagtcccaccattcagctccaaaatc

SEQ ID NO: 69824 - DNA, 600 bp, Chicken  19866894342422_3
gcagagcattaataaccctccatgcacaaaagcaatgcaatgcaatgtctaaaagtcactcttatcatttgaccccactgtttcgggcagaggaaggccctgcaggtcccccgttgggtctttacttactggaagtcctcagctgtggggtttcggacaggcacctccggggtccccgagaagggacaggatgcgaaggaacctcttgtatgtcagtgggggagtcccaccattcagctccaaaatcctgtacataaaatgaaaacagtgctcgtggtaacgtggatcaggaaggaaacyggagccgtgggtgcatggggaggtgacagcacagtaacascccccgtctgtggagcaaccaccagtgggaacagatggtttgaattcaaggtggaacgtcacatccatccatgcgtttacaccaatgaagggcttttcagggtgagctgttaaggctgttttaatgagtatctccctatcattattaacttcacgatctacggtctttcagctgtgaataactgcgtggacccacaattacccacacaccagtgcaagttggttagatagatcccaaaagccagacagaaggatgtgtac

SEQ ID NO: 69825 - DNA, 600 bp, Chicken  19866894342422_4
tgcaatgtctaaaagtcactcttatcatttgaccccactgtttcgggcagaggaaggccctgcaggtcccccgttgggtctttacttactggaagtcctcagctgtggggtttcggacaggcacctccggggtccccgagaagggacaggatgcgaaggaacctcttgtatgtcagtgggggagtcccaccattcagctccaaaatcctgtacataaaatgaaaacagtgctcgtggtaacgtggatcaggaaggaaacyggagccgtgggtgcatggggaggtgacagcacagtaacascccccgtctgtggagcaaccaccagtgggaacagatggtttgaattcaaggtggaacgtcacatccatccatgcgtttacaccaatgaagggcttttcagggtgagctgttaaggctgttttaatgagtatctccctatcattattaacttcacgatctacggtctttcagctgtgaataactgcgtggacccacaattacccacacaccagtgcaagttggttagatagatcccaaaagccagacagaaggatgtgtacaaaagtccttttgaatgtgggatcatagaatcattaaggt

SEQ ID NO: 69826 - DNA, 600 bp, Chicken  19866894342424_1
gataagttgcagaacgaaatagatcaggagctggaaaataacaattcacttgttaaagaagaaaaagaggcaactgaggcaaggaaaaaagcgttgatttctgctgcgctggctaaatcaggtgaaagactgcaagcccttacactgctgatgatccactacagagcaggcattgaggatatagagtctttggagagcatgtcctcagaccggcagtctaaaagagtgactaaagattcagaggaagccagtatagcagaagaagtggataatgaagatatcggtctgacagaggctccsacattgaacatcatatcagatgaatcagttgatccacctcagtcagtagactgatattcacgtgtttagcctttgaaggaccggacttaaacaaatgctttgcacttaattacaaacatacagaacgaattaaaacgctggtataacacctgcttctccacagttatttgcctatgtaagagtacagctgataacagttcttctccagctacagcaccatcattttattaaactagctggttaaaactgcattttggggtttatattggaaatttatttttaataacttattttcatttt

SEQ ID NO: 69827 - DNA, 600 bp, Chicken  19866894342424_2
aaggaccggacttaaacaaatgctttgcacttaattacaaacatacagaacgaattaaaacgctggtataacacctgcttctccacagttatttgcctatgtaagagtacagctgataacagttcttctccagctacagcaccatcattttattaaactagctggttaaaactgcattttggggtttatattggaaatttatttttaataacttattttcattttttctaattttgtaaccttaccatttcatattaatgtgtggtgtccctattatattacttgtcccccccactcccrgacctccccccyctttatttttttctttgagctaatgatttcaacaagaaactatcaggatttttygaaatgtgtaatttccatttttctgttgtatgatgaaaagaaaagcttgttgcatgcctaagctgatgactgacacagaaatcactgagggaccaggctttaaaattttgattgccgttattttatgtctcctgggcagttgtgtatttcttgccaaacatatcatgaaaacaaagcatctttttttgtgtgtctgttattaatacttgttagagtgattgagtatcaggtcac

SEQ ID NO: 69828 - DNA, 600 bp, Chicken  19866894342424_3
taaacaaatgctttgcacttaattacaaacatacagaacgaattaaaacgctggtataacacctgcttctccacagttatttgcctatgtaagagtacagctgataacagttcttctccagctacagcaccatcattttattaaactagctggttaaaactgcattttggggtttatattggaaatttatttttaataacttattttcattttttctaattttgtaaccttaccatttcatattaatgtgtggtgtccctattatattacttgtcccccccactcccrgacctccccccyctttatttttttctttgagctaatgatttcaacaagaaactatcaggatttttygaaatgtgtaatttccatttttctgttgtatgatgaaaagaaaagcttgttgcatgcctaagctgatgactgacacagaaatcactgagggaccaggctttaaaattttgattgccgttattttatgtctcctgggcagttgtgtatttcttgccaaacatatcatgaaaacaaagcatctttttttgtgtgtctgttattaatacttgttagagtgattgagtatcaggtcacttattttccata

SEQ ID NO: 69829 - DNA, 600 bp, Chicken  19866894342424_4
tataacacctgcttctccacagttatttgcctatgtaagagtacagctgataacagttcttctccagctacagcaccatcattttattaaactagctggttaaaactgcattttggggtttatattggaaatttatttttaataacttattttcattttttctaattttgtaaccttaccatttcatattaatgtgtggtgtccctattatattacttgtcccccccactcccrgacctccccccyctttatttttttctttgagctaatgatttcaacaagaaactatcaggatttttygaaatgtgtaatttccatttttctgttgtatgatgaaaagaaaagcttgttgcatgcctaagctgatgactgacacagaaatcactgagggaccaggctttaaaattttgattgccgttattttatgtctcctgggcagttgtgtatttcttgccaaacatatcatgaaaacaaagcatctttttttgtgtgtctgttattaatacttgttagagtgattgagtatcaggtcacttattttccatacttctgttaaatacaagaacttgtcatagttcttaatatcatttgtagcaatgc

SEQ ID NO: 69830 - DNA, 600 bp, Chicken  19866894342435_1
ctggtttgagaatagctatcatttctggataagggagagctaatccacactgcattttgtatcaatatcaacatcaaaatcactaaaatgcaatagcttcaagtgagcattagaaagaaacagaatgtacaacgtagagtactctgtgctttatagtcaacacttacttcatgacacttcagtatgacccacttctgagagcagcagccatgagagcaaataaaaatgacaaaatggaatgactgagatgctgcaaaattactgacaaagcaaacaatcctgtgaaagtggctgacaaayggttaatgatatgaaatgaagctagtgggatgacagtaaactgaaaaatcaaggcttgtgaattactccacaagataagcgtttcataaccggaataaaccaaacgtagggtcaagracccacgcctgactcactgctaagttcaattctgccttacctgtttgttaaaatatgggaacttatccaaataaaaagccctcagaaatgcacaaaagcctgaccacagacagttccctctttaaaacttgttctgccaagacaatacaggttatttttcctgaaggacttgatcccgcatgg

SEQ ID NO: 69831 - DNA, 600 bp, Chicken  19866894342435_2
aaacagaatgtacaacgtagagtactctgtgctttatagtcaacacttacttcatgacacttcagtatgacccacttctgagagcagcagccatgagagcaaataaaaatgacaaaatggaatgactgagatgctgcaaaattactgacaaagcaaacaatcctgtgaaagtggctgacaaayggttaatgatatgaaatgaagctagtgggatgacagtaaactgaaaaatcaaggcttgtgaattactccacaagataagcgtttcataaccggaataaaccaaacgtagggtcaagracccacgcctgactcactgctaagttcaattctgccttacctgtttgttaaaatatgggaacttatccaaataaaaagccctcagaaatgcacaaaagcctgaccacagacagttccctctttaaaacttgttctgccaagacaatacaggttatttttcctgaaggacttgatcccgcatggttaagcattctgcacaactcccacatctgcaacaagcactcctcactgccgggctgacattcagcctgccaggaggccacacacggatgctctgtgtgtacagtctgggaagcagga

SEQ ID NO: 69832 - DNA, 600 bp, Chicken  19866894342445_1
ttatttacctgacgtgacttgtgggcaagtgtagaacaagcataccctgttcttaaacagcagatcgcttccaaattgcaggttatctgttctgaaacaccaccactcaatgcattatctttccttttaattggtacattaaatcccacttaggagaagtgggagaagcatcctgctactactggctgccagaagaaaggaaagcacagacgtgtcctctcatggcgctttcaaagaaggccctgatctgttcataaaaggtcaggaagggagggagtgatttaaaagccttaaaaaaamcacacacacacactggactggagtgcgtcatctcaagttttcttctcccaagrgagtaattcctcagatgtttcgtgtgccccttgctggtgtctctctgttctgtttttctacrggggcaatttgtctatttttgcatattctgagcctcctcccatcccacagcagcagggttactagacatctgagtacatgggagagtcgggtggggttatcaccaccttccctgagtgtccaccacccaaagctaacactactttgttagatgtacacatagtgggctaccccacagagttgtca

SEQ ID NO: 69833 - DNA, 600 bp, Chicken  19866894342445_2
tatttacctgacgtgacttgtgggcaagtgtagaacaagcataccctgttcttaaacagcagatcgcttccaaattgcaggttatctgttctgaaacaccaccactcaatgcattatctttccttttaattggtacattaaatcccacttaggagaagtgggagaagcatcctgctactactggctgccagaagaaaggaaagcacagacgtgtcctctcatggcgctttcaaagaaggccctgatctgttcataaaaggtcaggaagggagggagtgatttaaaagccttaaaaaaammacacacacacactggactggagtgcgtcatctcaagttttcttctcccaagrgagtaattcctcagatgtttcgtgtgccccttgctggtgtctctctgttctgtttttctacrggggcaatttgtctatttttgcatattctgagcctcctcccatcccacagcagcagggttactagacatctgagtacatgggagagtcgggtggggttatcaccaccttccctgagtgtccaccacccaaagctaacactactttgttagatgtacacatagtgggctaccccacagagttgtcat

SEQ ID NO: 69834 - DNA, 600 bp, Chicken  19866894342445_3
taaacagcagatcgcttccaaattgcaggttatctgttctgaaacaccaccactcaatgcattatctttccttttaattggtacattaaatcccacttaggagaagtgggagaagcatcctgctactactggctgccagaagaaaggaaagcacagacgtgtcctctcatggcgctttcaaagaaggccctgatctgttcataaaaggtcaggaagggagggagtgatttaaaagccttaaaaaaamcacacacacacactggactggagtgcgtcatctcaagttttcttctcccaagrgagtaattcctcagatgtttcgtgtgccccttgctggtgtctctctgttctgtttttctacrggggcaatttgtctatttttgcatattctgagcctcctcccatcccacagcagcagggttactagacatctgagtacatgggagagtcgggtggggttatcaccaccttccctgagtgtccaccacccaaagctaacactactttgttagatgtacacatagtgggctaccccacagagttgtcatggcgctattgcagagcccctgcagtgctgctacatccttctcaaatctggct

SEQ ID NO: 69835 - DNA, 600 bp, Chicken  19866894342445_4
tatctttccttttaattggtacattaaatcccacttaggagaagtgggagaagcatcctgctactactggctgccagaagaaaggaaagcacagacgtgtcctctcatggcgctttcaaagaaggccctgatctgttcataaaaggtcaggaagggagggagtgatttaaaagccttaaaaaaamcacacacacacactggactggagtgcgtcatctcaagttttcttctcccaagrgagtaattcctcagatgtttcgtgtgccccttgctggtgtctctctgttctgtttttctacrggggcaatttgtctatttttgcatattctgagcctcctcccatcccacagcagcagggttactagacatctgagtacatgggagagtcgggtggggttatcaccaccttccctgagtgtccaccacccaaagctaacactactttgttagatgtacacatagtgggctaccccacagagttgtcatggcgctattgcagagcccctgcagtgctgctacatccttctcaaatctggctggcttcgaatggctcagactgtcacacattttctactttctcatgggcacagaatgtcagtc

SEQ ID NO: 69836 - DNA, 600 bp, Chicken  19866894342447_1
aagagggatgaaatggtgattcagatactctcagcctcttgcttgtgattcaaactgtccctaccatggcaaaatactaacacttagagttgtaagcagatgtcttcaaattaagcccacattgagggaaagtatttgactgttagtagggaccaccacaaaatctggtacaagaagtggttcattgtatatgaagttcttgcttctacattacttggtcttctgcacgtatcctggaaagatgctgcccattgttctaaactgcattgttctatgtgttacaaaatacaaaagtccccmaattttttttttttttttcatgtaccatctctatggtaatgctggaagcaactgcagcaattcccagtcatatctttactgaggaggagcctcttggcttcccaggcactatttatgcatcataacattggcagcagttaagcattccaccatttaagaacccctggaccaagcaaagtcatgtaacatacttttaaccatgaactatacataatatttttcttgttgttttattcatgaccaagyagcatgtgtttgcatccatgaaccatttttaaaataggaaaatcattcctaaaa

SEQ ID NO: 69837 - DNA, 600 bp, Chicken  19866894342447_2
gcccattgttctaaactgcattgttctatgtgttacaaaatacaaaagtccccmaattttttttttttttttcatgtaccatctctatggtaatgctggaagcaactgcagcaattcccagtcatatctttactgaggaggagcctcttggcttcccaggcactatttatgcatcataacattggcagcagttaagcattccaccatttaagaacccctggaccaagcaaagtcatgtaacatacttttaaccatgaactatacataatatttttcttgttgttttattcatgaccaagyagcatgtgtttgcatccatgaaccatttttaaaataggaaaatcattcctaaaagtgtgttaagaaaaagcagtatgagtaattcataaatacaaatttctgatcttactggaacaggttttatgcttattatgagttctgattcttacgactagtaaaccctgctccatagctactcgagagcccttcctgctccaactgagttcacttccacagctgtgggagatttggaaaaaagaagattctttgtggaaggccctgagccttgaccttgcagactcataggcagcccagatcact

SEQ ID NO: 69838 - DNA, 600 bp, Chicken  19866894342470_1
tgttttttaacaggtgacacaatgggtctttggctactggccattctttgtaagtgataacttaaaatatccaaaggcaaaaatattgttgctttttcaagtgatggctcctgtggtttcaacgggaaatcattcgcttgcagcagagtattggagtaaatacaagattgacaactgcaggtgttacacacatttttgagtttggaggcaagggagcgggttgaagttctaagaacctgcagtcttctgtcagaagtgtacatcccgaaaatactcaagagcttactcctttctgccttycatagacagtgcaaataaggctcacgtgtaacatcgatttcctgtcaattcttcagttgacatcaaggctcacatgaacccttcttttctgttccatccctcaccctcatccttcccaaagacctgtcatctctgttgcactgagccctgaagaagacagaagacagcatggatcttgcctttaatctgcgtacactcaccatctcgtttactctttttactacttgtcatacgatccttcctgcaaaagggctgtgatgccagctggggcatcttggtgctcctatgatgcaggtacaa

SEQ ID NO: 69839 - DNA, 600 bp, Chicken  19866894342470_2
tttactctttttactacttgtcatacgatccttcctgcaaaagggctgtgatgccagctggggcatcttggtgctcctatgatgcaggtacaaaaggatttacaggaggtgcgtgctgagaagagagtaggagggtagaaacctgttgtgctcagacatttctttatcttttttatctttttttttctcctactccatagactgttctggggtcatcactctgcatgttgttctgtgtattctttttgaacctacttatctgaaatgccttcaaaaaatggaaaaagaagagtgagctgraatagaaaagggatctgtgaaggttgccaaggacttgttctggaggcatgattcgatgagaagacgtgggagttggtctgtgtccatccaagcagactcggggacagtgggcaaatgccagtttatgggatgaaaatctctatgggcggatggcccggcgaggtcactcatccacccacccacagacaggtggccctgccatatgatcacagcaaatggtagaaaaccggtgagatccttgatgcggtgctgtactggtcttccttggaatcagctcctggctgcaaaccccaaaaggct

SEQ ID NO: 69840 - DNA, 600 bp, Chicken  19866894342470_3
ccagtttatgggatgaaaatctctatgggcggatggcccggcgaggtcactcatccacccacccacagacaggtggccctgccatatgatcacagcaaatggtagaaaaccggtgagatccttgatgcggtgctgtactggtcttccttggaatcagctcctggctgcaaaccccaaaaggctctgacatgagaagatgagaaattgtagtcagagctgtcagaacagttcactggtttctgaggctaaatgagtagaaacaaaaacgtaagcagtggtagtgggaacactaggaaattrctatgagcccagttattggattttcaaataacaacaaagcaaatgtagaatttggatggatttgaacagtgatgcttttattttcaaagcatcctaaagactaaacacttggataaatttcttgaatttctccaaaatctctaaacttctacagatgctctcttgtggacactctgatgatagggatcctcctcaataggaaccaaaataaagtagtatcacataagaaaaagccaaggattggctttttgctgggtgtggaaagagataaccaagcactttacccttatatgaggcaaa

SEQ ID NO: 69841 - DNA, 600 bp, Chicken  19866894342474_1
ttcacaattgttaattaaaaaaaaaacccactttttatccttcaagtgtaaataaaaggatgagaatacgagagattgttacctgttaatatcatcttgatacaagtttttgttaaaatactcagctaggtgaggtgcgttgcacagacactgtaatatggagttcatatagcaagtgttccctagattacgaagtcctgtaagagctggtcccgatcccccaaacacgggattaaggttcctaatctgtgacgcagagagtcttgaaatttctgttttagggtaataggctggtctgcraagaaggatttattttttagcagtctgagagttgacaaaaccatgcacataacccaccagaaccaccttcctcacaggcagcaaaacatccgagcgcaagacgtcacccaaawgacatcatttagggtactgaagaccagttaaataaacagtgacaaacctacatacattggcctataatcgggctgaggtatgggctaaatcagcattaatttatgttaattaattatataattaacagctaattcttcacgtttaaaaattaaacactctctttcacagactgaaaatgccaggaga

SEQ ID NO: 69842 - DNA, 600 bp, Chicken  19866894342474_2
taaaatactcagctaggtgaggtgcgttgcacagacactgtaatatggagttcatatagcaagtgttccctagattacgaagtcctgtaagagctggtcccgatcccccaaacacgggattaaggttcctaatctgtgacgcagagagtcttgaaatttctgttttagggtaataggctggtctgcraagaaggatttattttttagcagtctgagagttgacaaaaccatgcacataacccaccagaaccaccttcctcacaggcagcaaaacatccgagcgcaagacgtcacccaaawgacatcatttagggtactgaagaccagttaaataaacagtgacaaacctacatacattggcctataatcgggctgaggtatgggctaaatcagcattaatttatgttaattaattatataattaacagctaattcttcacgtttaaaaattaaacactctctttcacagactgaaaatgccaggagactggcattcaatacattaacacaaataccaagacctaaagagcaactgtcatccaacgacaccgtgacccctgaaatacatgttaatcaagcattacgttaactctcaaaaca

SEQ ID NO: 69843 - DNA, 600 bp, Chicken  19866894342475_1
ttcctgtgtatccagagccaataatctcacattgataggatgttttcctctagtgattctttgctaaattttcttgactctgatttttctctgatgttaaaacacagctgtccagaactaagtaggcagagaaatcataaaaatggtgaaaagttgtccccttcctagactatctgacagcactgttcattcttagggttggagtctttcaatggaagttctcaccacattcctgtggcagaagataaaattccgtctgaattagagtggggatcccaacaagcaaagaagtccatatcragtagcagactgtctagtaaagactacgagcagaacacggatactgacaacacaatagaaaatttgtctggacactccatgttgaggtaacatgaacttacaagactgtatgcgaatataagtaaggtggcttacgttgtagcaggctatcaaaaatgattatgtttctaggtatgtaaaaagaaagtaatataaatgtacaaatgttagtaaggtgaacatgcagtaaccttttcctgtattctaaaaattacggaagcccaaagttgatagctgtcataagtgaaaaggaaaacagtg

SEQ ID NO: 69844 - DNA, 599 bp, Chicken  19866894342480_1
  misc_feature (1)..(85): n is any nucleotide
nnnnnnnnnnnnnnnnnnnnnnnnnnnnnnnnnnnnnnnnnnnnnnnnnnnnnnnnnnnnnnnnnnnnnnnnnnnnnnnnnnnnngcactttattttatgaagtttaacccttttcattgcttctcacgactcattgcttcttagagctgtcccttcagccccaagttaaaatcttccatcctcccagtacaagacagaaaatttcagtgtggaggctgaatgaccactgtgctctacggaaataattttttttagcaagttctctttctctcttctcttatgacacagagattgaaacsccgttggggcgagacctccagctcattgaatggcttctccttccctcccttgaacctgggcaatgctgagactggctacctgacacaggcaaacctgctgagcatcgccaggcgtgtgggagccgactggcagaccattggcctgaacctgggcttgacctatcgacagatcgagcgcataggatacaataacaggtaagatgggacacaagaatcaacagcactttgagctgcagtgcagtaggataaattaatgcttgatcaatggaaagttttttcactggcattgtttcactgga

SEQ ID NO: 69845 - DNA, 600 bp, Chicken  19866894342486_1
tacacaccctttctgaaatatccaacatcagtcaccaagaaagaagcatatcaataaagtgaacattttcagttttatgatggcatttcttaatgtgttaatgcttgtgatttttttgcctagcccaaagctgtgaaaaacagtataattcctactttccatccttcttgtgagaattccagttggaagagctaataaatagagaaaaatgctgtacttgttttcttagagaactgtgaaattatatatggcaacactgctcgtatgtttattaatccagaaagttatttgctatgtatrgcacttgcttcttttcctctttatcttaatttgaaacgcaattaaaatatacagcaatacttattacgtatggaaatgagacacacgaggggaaataaatgtcttgtaaattcccaagaagttgctccttaacttcataaattaactacataaatgtaattagcagtgtgcacactcagcacaaatgcaaaataatatacgcttgcatgtaataatatacatgtatcaaatgccagctcttcttttggtctcgttggcaacaagaatctcagtattactcattctctaagttggagcaaa

SEQ ID NO: 69846 - DNA, 600 bp, Chicken  19866894342486_2
aaataaatgtcttgtaaattcccaagaagttgctccttaacttcataaattaactacataaatgtaattagcagtgtgcacactcagcacaaatgcaaaataatatacgcttgcatgtaataatatacatgtatcaaatgccagctcttcttttggtctcgttggcaacaagaatctcagtattactcattctctaagttggagcaaattacaaacctctcctagtgcttctacttcaagagacgaaaagctgaacaggagcagaactactgacacttctttcccatatctgtttttttwaaaaaataaataataaaaaataaaaagcaattaaccagccagaattcataattccattccaggctcgaaaagatgaatcctggatcctccacagacccatgtgtcacagagcagagatgcagtgctgcaggtacacctgcatgagcatgggcctggaaagcagccagtagtgctgtggtccttacaggctcaggttggtgcaagcttgaggctggtgcattcaacaggttgtagaaaattaacctcgtttttctgctgtgctgtcttgcagatacttctactttattttatgccagttag

SEQ ID NO: 69847 - DNA, 366 bp, Chicken  19866894342486_3
tcaccaggtaagatgctggacacctttcaggattcatttcagtcaggaaggctgttctatgaaaaactatggtcattttaaccctgtgttggcaatagaggagctctgctctcagaaggccactatacaacattcaggcttagtctgagcagggtgaccaaacccaagaagttttctggcattcaaaagagaatgaagcttcccatactgtgtaaatgtgccaagaacaaggttaaaatggcctgcaaaacccaaggaaaaattcaagtctaatctatcactaatgaagcactgaacacratttactttgttctgccttcaggaatcatgactgcaggtgaacgtgccaaatatattacaggtatg

SEQ ID NO: 69848 - DNA, 600 bp, Chicken  19866894342504_1
gggccggtgcagtatttgcgtggtctctgagaagtggtggtaagaggacaggaaatgatgcacgatgtacgctccacgcttacctcacagctgctctgcacagctctgccttccaggaagagcgtctccattatctgccgtttccaggtctttcaggtgcagttcagaaactgttcactagatgtcagttaagggctgggagaaggctgagaacaggctgcgttaaggagcctcccctattgggagggaagatgaactttatgtcggatgaaatagaggaggacttctgaggcctgggtrgatttgaggttatctctgagttctgtgctcagcttccaaggaagcacctgctgagaacatgagctcactctgcgtttcccagaccttacrgagtgtgaattcctgatggtgtagtcsagtttatgggcagctcccagtggcacaaacagcagttgcctgttaatctgatgttcatcccattataccctttgcccgtctgtctaattctcaggtgcagccrggagagggaggcagcagaagggtacatctgctgtggtggcacaagtaggtattttaaagggaatgcatctcttttattgc

SEQ ID NO: 69849 - DNA, 600 bp, Chicken  19866894342504_2
ctgctctgcacagctctgccttccaggaagagcgtctccattatctgccgtttccaggtctttcaggtgcagttcagaaactgttcactagatgtcagttaagggctgggagaaggctgagaacaggctgcgttaaggagcctcccctattgggagggaagatgaactttatgtcggatgaaatagaggaggacttctgaggcctgggtrgatttgaggttatctctgagttctgtgctcagcttccaaggaagcacctgctgagaacatgagctcactctgcgtttcccagaccttacrgagtgtgaattcctgatggtgtagtcsagtttatgggcagctcccagtggcacaaacagcagttgcctgttaatctgatgttcatcccattataccctttgcccgtctgtctaattctcaggtgcagccrggagagggaggcagcagaagggtacatctgctgtggtggcacaagtaggtattttaaagggaatgcatctcttttattgcacctgaagggttgtgcttagacgaaggcaggtactgagctggtttgttgtgatgctgtctctgcattcatgatgtgatttaggagtgaga

SEQ ID NO: 69850 - DNA, 600 bp, Chicken  19866894342504_3
aagagcgtctccattatctgccgtttccaggtctttcaggtgcagttcagaaactgttcactagatgtcagttaagggctgggagaaggctgagaacaggctgcgttaaggagcctcccctattgggagggaagatgaactttatgtcggatgaaatagaggaggacttctgaggcctgggtrgatttgaggttatctctgagttctgtgctcagcttccaaggaagcacctgctgagaacatgagctcactctgcgtttcccagaccttacrgagtgtgaattcctgatggtgtagtcsagtttatgggcagctcccagtggcacaaacagcagttgcctgttaatctgatgttcatcccattataccctttgcccgtctgtctaattctcaggtgcagccrggagagggaggcagcagaagggtacatctgctgtggtggcacaagtaggtattttaaagggaatgcatctcttttattgcacctgaagggttgtgcttagacgaaggcaggtactgagctggtttgttgtgatgctgtctctgcattcatgatgtgatttaggagtgagaaaaggaagaagagacatatcctcgtct

SEQ ID NO: 69851 - DNA, 600 bp, Chicken  19866894342504_4
cgttaaggagcctcccctattgggagggaagatgaactttatgtcggatgaaatagaggaggacttctgaggcctgggtrgatttgaggttatctctgagttctgtgctcagcttccaaggaagcacctgctgagaacatgagctcactctgcgtttcccagaccttacrgagtgtgaattcctgatggtgtagtcsagtttatgggcagctcccagtggcacaaacagcagttgcctgttaatctgatgttcatcccattataccctttgcccgtctgtctaattctcaggtgcagccrggagagggaggcagcagaagggtacatctgctgtggtggcacaagtaggtattttaaagggaatgcatctcttttattgcacctgaagggttgtgcttagacgaaggcaggtactgagctggtttgttgtgatgctgtctctgcattcatgatgtgatttaggagtgagaaaaggaagaagagacatatcctcgtcttacactatttctcctttcctctgctgttactttgactttctctcccatgggcttattgcctgtcctgttgctttctgaagcccagagtgaagcagaaacctga

SEQ ID NO: 69852 - DNA, 599 bp, Chicken  19866894342517_1
  misc_feature (1)..(137): n is any nucleotide
nnnnnnnnnnnnnnnnnnnnnnnnnnnnnnnnnnnnnnnnnnnnnnnnnnnnnnnnnnnnnnnnnnnnnnnnnnnnnnnnnnnnnnnnnnnnnnnnnnnnnnnnnnnnnnnnnnnnnnnnnnnnnnnnnnnnnnnnntggtcttaatgatttgtggtgctttacctagcaactttcgaagtaaaaaaatgttaggaaataactctccaaacctgttttcactaatgaacttaaagacttgcgtggaagtttctctatgctacagttggagatgcttgcaaatgatacggtgtttatatasaaactcatcctgtatcataaacctctcagagtttgattatccttctcctatccacacaataccaggcatctttttgaagtgtttatcacttagtgctaggactctgcaataagagattgcctgctcattttccctcttctttctggagttatgctgttctatacatactttcttatataccgactggagatctgcattgctatttttgtttcttacgagtttctttgataatgcagaccatctacagattgcaagaagggttatatgttgactcttacatttgatgagacctcgtttga

SEQ ID NO: 69853 - DNA, 599 bp, Chicken  19866894342518_1
  misc_feature (1)..(176): n is any nucleotide
nnnnnnnnnnnnnnnnnnnnnnnnnnnnnnnnnnnnnnnnnnnnnnnnnnnnnnnnnnnnnnnnnnnnnnnnnnnnnnnnnnnnnnnnnnnnnnnnnnnnnnnnnnnnnnnnnnnnnnnnnnnnnnnnnnnnnnnnnnnnnnnnnnnnnnnnnnnnnnnnnnnnnnnnnnnnnnnntgactcctctgggttcccaggtgtgcaccccacagccaggcttgcttatgtctagtttctttacttcagcagcaacatagagatatctctgtagttgctatgatatagatgtttaatttcagtrctcttttctctcctgtgacacacggtcacagctgttraacattcttccagccatttcctgtgctttgcatcactgtaagagtgttttcccatgtcagatagaaatgagaagtagtgtagttagtcctgctcatcacagacagcacaagctacttgcaaatattgtagtgtgttatgatgcaacagaaagcacagcagtgacaacatagtagcgaagtcctaggctacagcaagtgagaatatgctcaaatacagcagttgcagacacagaaatgaaagaaagattctactcaccctcag

SEQ ID NO: 69854 - DNA, 599 bp, Chicken  19866894342518_2
  misc_feature (1)..(139): n is any nucleotide
nnnnnnnnnnnnnnnnnnnnnnnnnnnnnnnnnnnnnnnnnnnnnnnnnnnnnnnnnnnnnnnnnnnnnnnnnnnnnnnnnnnnnnnnnnnnnnnnnnnnnnnnnnnnnnnnnnnnnnnnnnnnnnnnnnnnnnnnnnntgactcctctgggttcccaggtgtgcaccccacagccaggcttgcttatgtctagtttctttacttcagcagcaacatagagatatctctgtagttgctatgatatagatgtttaatttcagtrctcttttctctcctgtgacacacggtcacagctgttraacattcttccagccatttcctgtgctttgcatcactgtaagagtgttttcccatgtcagatagaaatgagaagtagtgtagttagtcctgctcatcacagacagcacaagctacttgcaaatattgtagtgtgttatgatgcaacagaaagcacagcagtgacaacatagtagcgaagtcctaggctacagcaagtgagaatatgctcaaatacagcagttgcagacacagaaatgaaagaaagattctactcaccctcagagcacctcgtacacagagggattttcagcaagatacc

SEQ ID NO: 69855 - DNA, 433 bp, Chicken  19866894342518_3
tcctaggctacagcaagtgagaatatgctcaaatacagcagttgcagacacagaaatgaaagaaagattctactcaccctcagagcacctcgtacacagagggattttcagcaagatacccttacctctactgccaacccttaaaagaagactgggaaggggtggatcctggctcggtccctttctgacactcaggtgcattgcatccacctgagctcccctgggttgattctgcctttctaccaggtgctcaatcactagttcactgtgacttagcatttctgctacatgtatccacaygccttcctgttttggcctaatgtaggcagtgggtaatttctaaagccttaataacacaatcttgtgattgagcatgcttttcctgagctagactccaccctgtttcaaagtaatttcttcctccattgcccca

SEQ ID NO: 69856 - DNA, 600 bp, Chicken  19866894342520_1
ttccacggagacagctgtgaaagatgcaatggagttgcaaaataaacaagtggtagagagtcagacacacaaactagactgaaagtaaatgaaaaatacaggagcaaacaaggtatgaattgttttctgtactatagctcttcacgtgaccttaatgttttgctagaaatataagcaattctgaaaaagaaatgatggaagatcatgtttacaagaagtgttacattccaagagaaaagaacacgaagctagaatagactatatatatgcatatatatatacaatgcattatgtgacagmtactagccatggctggtattcaaacttactatacagtaatagcaagatgaaatcccttccacattttggaatgcacttcagaatgttactaggtagtagttcaaatgcaaacagaatatgctgcaggaaaataaaatgtctctgaaaggtcataattaaggatgaaaaaatcaaaaactgcaggttacaaagtgatagtaattcagttttcaattctgattcagattcacatttagatttctaaatataagtggaaataatctttccctcactctcaaggatactcactcttctscattt

SEQ ID NO: 69857 - DNA, 600 bp, Chicken  19866894342520_2
acagmtactagccatggctggtattcaaacttactatacagtaatagcaagatgaaatcccttccacattttggaatgcacttcagaatgttactaggtagtagttcaaatgcaaacagaatatgctgcaggaaaataaaatgtctctgaaaggtcataattaaggatgaaaaaatcaaaaactgcaggttacaaagtgatagtaattcagttttcaattctgattcagattcacatttagatttctaaatataagtggaaataatctttccctcactctcaaggatactcactcttctscatttataaagcacccatttcaggagcactgagacacctcatgctaaagaacaagctgtatctgtcactgcaactagaatttatcctatgataattgtcttcattggcataatcagctgtgtcactcaatatatatagtcagagacctcattcagcactcacattattcaaaatgtgtatgcccctcagatcctgctctggacatagttattcatgatgatgatcagacgactggaatgtctcttctatgaaaacaggttgagggatttgggcttatttagataggagaagagaaggtga

SEQ ID NO: 69858 - DNA, 600 bp, Chicken  19866894342522_1
tgaatgcagaagtcaagagctgagaagaatcccatgtattttgagataaaagcctgcctcaaattgttctcaaagtggtctatttttgacatccaaccaaatattaccataatctcatctaaattaaaatattagttttgcgactctcctcttagcctggcaataacagaatggcagtaaagtatagctatttttcacatatctctcctttccagtatttctatggatttcagagtttatgaaagtgaaggtctgaaagcaataagaatgtaagcacaatactatgaattttagaaaggmctctgtagcccaaatagccatgaaacctaatttaaactcctaaactgttttgccttcagaattaaaaatctgaatttaatctctgttcttttttctaattaaaaaaataattggatcaagccatgaatttcaataaggcttacccatagctactttaattttatgaaaaagcttaatactaggctatcagcattccttattaagcttctaaaagaagttaaaaaaaatcagcaggcctgcatgttaaaattttgcaagaagaagaaaggttttaaagacacagaacttaacagaaaatta

SEQ ID NO: 69859 - DNA, 600 bp, Chicken  19866894342533_1
agacaagcataagttccattttggtaacagcaaatgcatatttttgctcgcacaacctgcctcctctgtcagctgtacctgcacttctgtctgctctttggctgataaaatgccactgacgtcaactatagcaaagctccgtgcttgatatctgtgcaaagaggaagaggatcagggccacacacaaacaaatgtcagtcatcaagggctaagtgctcagaggaaaggtaagtgaaaggggctttgtgtaactcttccgccatcctcagaggtgacataaggttggatctagctaaggargactgcragttgccttctttttacttcgtgtgctcttggaggaaatgctttgaaaaggctaaagccgctgacattttggtgctatgagaggtggaatgttagctagaaattaatggaaacgctcccctaagtgtgtgatccattaagttgttttgcaacactgggaaatgaagcatggagtattttactgaagtcagtgtcccatggggatgaaagaaagatcagaatctttctctgcaataggctgagctctgccagcaaggatgtagatataaaaacggaatatctccagtttagttg

SEQ ID NO: 69860 - DNA, 600 bp, Chicken  19866894342533_2
cataagttccattttggtaacagcaaatgcatatttttgctcgcacaacctgcctcctctgtcagctgtacctgcacttctgtctgctctttggctgataaaatgccactgacgtcaactatagcaaagctccgtgcttgatatctgtgcaaagaggaagaggatcagggccacacacaaacaaatgtcagtcatcaagggctaagtgctcagaggaaaggtaagtgaaaggggctttgtgtaactcttccgccatcctcagaggtgacataaggttggatctagctaaggargactgcragttgccttctttttacttcgtgtgctcttggaggaaatgctttgaaaaggctaaagccgctgacattttggtgctatgagaggtggaatgttagctagaaattaatggaaacgctcccctaagtgtgtgatccattaagttgttttgcaacactgggaaatgaagcatggagtattttactgaagtcagtgtcccatggggatgaaagaaagatcagaatctttctctgcaataggctgagctctgccagcaaggatgtagatataaaaacggaatatctccagtttagttgaaagaat

SEQ ID NO: 69861 - DNA, 600 bp, Chicken  19866894342538_1
tcttttaaatttgaaattaagacatttcaaaatagttatttctgaaaactcctaggaatgcagaaatgaccaaacggcacaagggaactataaaattaaccttttttggggtgttttttttgttttgttttttttaaacaagtagaataatagcagaaagcattttttggtttggttttctttgtggaagcattaacgtcctaaaaactctttatggcacagctgacaacgcgtatcaggatggatcacaatcgacgcagattctgcttgcttttcttagtcccagggagggttcccagyttaaagcttggtttcactggtttgccactcacacagtcactggagctgtggtagctgcacatgcactttgtgcagaagtcaaagccacagctttcacgattgcacattgctctttgcagataggagtcgtactttgcaggtgagccacagcgactgcagactttgaagctttcagtgtttttcaaggtcttggctgcctaatggaaaaaaaatacataaaggaagtcataagtggatgataaacacacactgcaaacattccccagtgccattaatgtgccacaaaatatatcataattg

SEQ ID NO: 69862 - DNA, 600 bp, Chicken  19866894342538_2
agtcataagtggatgataaacacacactgcaaacattccccagtgccattaatgtgccacaaaatatatcataattgctctcactctagagaaagaaactacatgcatactaagtttaattctggtcacaccaaattctcatgggatactggagagtctgaagatactttggactggatttgaggtatgcagtttgtaattcttttagcttaaagggcagtcagactaaatgcaaagcgataacaaaaacagcccaaatccaagttctgagtcctccaaacttcatccaagaatagtgaytyagctaactttaaaaagaaaaaaaataatctgaatcctatggaaattactcatctcatttctcagaaaacgaaccggttacttagttcttgaaacaagaaattgcccactggagttgaagtaaaattgacagattctcttaggttgcataattggaaaacgtgattcattataaacccatgggaaatgaaaggaaatgactacacttcttatgtcccatggaagccaatatcgaagccaaaaaaaaaaaaaaaccactgagccattttgatgattcctaaacacagggaggaaaaaagt

SEQ ID NO: 69863 - DNA, 600 bp, Chicken  19866894342538_3
tcataagtggatgataaacacacactgcaaacattccccagtgccattaatgtgccacaaaatatatcataattgctctcactctagagaaagaaactacatgcatactaagtttaattctggtcacaccaaattctcatgggatactggagagtctgaagatactttggactggatttgaggtatgcagtttgtaattcttttagcttaaagggcagtcagactaaatgcaaagcgataacaaaaacagcccaaatccaagttctgagtcctccaaacttcatccaagaatagtgaytyagctaactttaaaaagaaaaaaaataatctgaatcctatggaaattactcatctcatttctcagaaaacgaaccggttacttagttcttgaaacaagaaattgcccactggagttgaagtaaaattgacagattctcttaggttgcataattggaaaacgtgattcattataaacccatgggaaatgaaaggaaatgactacacttcttatgtcccatggaagccaatatcgaagccaaaaaaaaaaaaaaaccactgagccattttgatgattcctaaacacagggaggaaaaaagtga

SEQ ID NO: 69864 - DNA, 600 bp, Chicken  19866894342543_1
ctgaagcctgccactgccttggggctggaccatcttgacactgattgtcatctgattgtgagcatctgagctctgaaaggacgtgattgattctcttatttggagtggcatagattaaactgtcattgtcagacaaataatagcttgattactgaaccactgtgtttgcagcttgtaaaatgctatcaaagtagcatttaaaacctttttgaattctggttgcttgcagagaaattcctatttgtgttggtagcccttgtttcaacaagccacacgggaaattaactatggcaattcaarttgtgaactctttgcaaatggaagtgcatgagagtgccaagctctgtcgctttaagaaactgaatcaaaatattcatcatgcatgggaataagttgcacrggaataattacatttcctgtttgagttgtttctgcacatctcatttaatatatttgctgttgcattcagtgcttgggcttctgcagtctttggggttcacgaaaaaatatccacggtacagaaaaagtcaagaaacaaacgttttgaatgaggagatatacatgtgcgtgtgcagaaacacatcctagaatgagctgcag

SEQ ID NO: 69865 - DNA, 600 bp, Chicken  19866894342543_2
tggagtggcatagattaaactgtcattgtcagacaaataatagcttgattactgaaccactgtgtttgcagcttgtaaaatgctatcaaagtagcatttaaaacctttttgaattctggttgcttgcagagaaattcctatttgtgttggtagcccttgtttcaacaagccacacgggaaattaactatggcaattcaarttgtgaactctttgcaaatggaagtgcatgagagtgccaagctctgtcgctttaagaaactgaatcaaaatattcatcatgcatgggaataagttgcacrggaataattacatttcctgtttgagttgtttctgcacatctcatttaatatatttgctgttgcattcagtgcttgggcttctgcagtctttggggttcacgaaaaaatatccacggtacagaaaaagtcaagaaacaaacgttttgaatgaggagatatacatgtgcgtgtgcagaaacacatcctagaatgagctgcagcatttcaatgtgattaagtggttttctatagtacatagagctctctggccattactgtctaatgtagcatctgatgtcagatggatgagattcataactc

SEQ ID NO: 69866 - DNA, 600 bp, Chicken  19866894342551_1
ttaaggtaacaatccctccgtattaattgtaatgactgtttcctacaacttgtgtgacagaaagccgagtcctgtacacactgcacacacacacacacacaaatgtacagacacctcccagctgctgcaagcatcaggaccgtgggattttttttgttggcctccttttctcctgtaaatgtaaatgggcaaaacattgcacagaagttagcagaaaatcagaaaacttgagcactgtcaggagtttaaactcagtcatccacgttgctaagaactgtaataaccaactgaaaaaaaaamcagttcaaactctctgctgcaaaaccagatacaggcatgcctacagctgttwttcaccacattttcaccacaactcacacactcttctcaaatttctgggcaaagaacatggcattcaatatactggtctcttaaggaaagctccagtgagactgcagcatttgcactttttatggtcagctgtcctgtttcataacaagagcgccatatccttacacccaggcaggcaaccttcccctccatccaagcactacacagcattctaatgattaatgtactgtcgctaatgtcaaagcactg

SEQ ID NO: 69867 - DNA, 600 bp, Chicken  19866894342551_2
tgtgacagaaagccgagtcctgtacacactgcacacacacacacacacaaatgtacagacacctcccagctgctgcaagcatcaggaccgtgggattttttttgttggcctccttttctcctgtaaatgtaaatgggcaaaacattgcacagaagttagcagaaaatcagaaaacttgagcactgtcaggagtttaaactcagtcatccacgttgctaagaactgtaataaccaactgaaaaaaaaamcagttcaaactctctgctgcaaaaccagatacaggcatgcctacagctgttwttcaccacattttcaccacaactcacacactcttctcaaatttctgggcaaagaacatggcattcaatatactggtctcttaaggaaagctccagtgagactgcagcatttgcactttttatggtcagctgtcctgtttcataacaagagcgccatatccttacacccaggcaggcaaccttcccctccatccaagcactacacagcattctaatgattaatgtactgtcgctaatgtcaaagcactgcagtgcttacgtgcttttaaaaggtaactggaagtgagctgtatttgcagca

SEQ ID NO: 69868 - DNA, 600 bp, Chicken  19866894342551_3
ctgggcaaagaacatggcattcaatatactggtctcttaaggaaagctccagtgagactgcagcatttgcactttttatggtcagctgtcctgtttcataacaagagcgccatatccttacacccaggcaggcaaccttcccctccatccaagcactacacagcattctaatgattaatgtactgtcgctaatgtcaaagcactgcagtgcttacgtgcttttaaaaggtaactggaagtgagctgtatttgcagcaattcaaggtttgtatgcacatacaaaagcagggttcctcatcmaagagagatgtgatgctcagaaaactgcacaccgtatactggatttttttcccccagactttaatatacatacacatttacacatcactagtaaaaatctgtacacttcacattacagtacatacgagccaccagttgctagctaacaccagaacactgatgaagcccaagacgactgccctagaacaggcaggggggctagtcttcccctccaaggaagtttctttggattacacattctgatgagacatcgcttcccagactcaagccaagaaggtggaacaggtcccagaaatggac

SEQ ID NO: 69869 - DNA, 599 bp, Chicken  19866894342555_1
  misc_feature (1)..(41): n is any nucleotide
nnnnnnnnnnnnnnnnnnnnnnnnnnnnnnnnnnnnnnnnnaaaaaaaaaaagaatggcttaactaaagaaaaaaaatgaaaagtaatagcatatctgtcccttgatgtaggtcccagtttttgtctccctgatatctttttccctaaaaagataaaagaggaaattctaccatgccacaatatatttctacaaaatatctcaaaatctgaccaggactagatgctctgaaatggccaagcactgcttgcaatattcactccactgttcacaagatccccatcctgcccagaaaaaaacwtatgatgtgaatttgtagccatacttagtcaatttagttgaaacggtaactcccagtcactaacgtcctggattgatctgaactgacattactgcagtgaaaggtatgatcttattacccatgcttgagatctttaatccactcagggagccacattttaaacatcttgatccatttatagatgagagacttatgytggaaaatcctattgatgccagggaaggagcagctcagctgatcttttgtgcagtaactgcagagaagtctacacagattgagggtaaagaaagatgaaatta

SEQ ID NO: 69870 - DNA, 600 bp, Chicken  19866894342555_2
tatctcaaaatctgaccaggactagatgctctgaaatggccaagcactgcttgcaatattcactccactgttcacaagatccccatcctgcccagaaaaaaacwtatgatgtgaatttgtagccatacttagtcaatttagttgaaacggtaactcccagtcactaacgtcctggattgatctgaactgacattactgcagtgaaaggtatgatcttattacccatgcttgagatctttaatccactcagggagccacattttaaacatcttgatccatttatagatgagagacttatgytggaaaatcctattgatgccagggaaggagcagctcagctgatcttttgtgcagtaactgcagagaagtctacacagattgagggtaaagaaagatgaaattaagacctcatctgagaggcatattgcgtgttagatatgaagaatataaagcagacagaaaccgtattgccaacagttgtggttaacattaatcaagccaaactgcaagtagaaaattcaagattctgktgtagaattaatrcttaagtgacacagagagtccacagtgttgactctcacttgaagatgacacagaggt

SEQ ID NO: 69871 - DNA, 390 bp, Chicken  19866894342555_3
gagatctttaatccactcagggagccacattttaaacatcttgatccatttatagatgagagacttatgytggaaaatcctattgatgccagggaaggagcagctcagctgatcttttgtgcagtaactgcagagaagtctacacagattgagggtaaagaaagatgaaattaagacctcatctgagaggcatattgcgtgttagatatgaagaatataaagcagacagaaaccgtattgccaacagttgtggttaacattaatcaagccaaactgcaagtagaaaattcaagattctgktgtagaattaatrcttaagtgacacagagagtccacagtgttgactctcacttgaagatgacacagaggttcaaacagtgaagtcatatt

SEQ ID NO: 69872 - DNA, 377 bp, Chicken  19866894342555_4
cactcagggagccacattttaaacatcttgatccatttatagatgagagacttatgytggaaaatcctattgatgccagggaaggagcagctcagctgatcttttgtgcagtaactgcagagaagtctacacagattgagggtaaagaaagatgaaattaagacctcatctgagaggcatattgcgtgttagatatgaagaatataaagcagacagaaaccgtattgccaacagttgtggttaacattaatcaagccaaactgcaagtagaaaattcaagattctgktgtagaattaatrcttaagtgacacagagagtccacagtgttgactctcacttgaagatgacacagaggttcaaacagtgaagtcatatt

SEQ ID NO: 69873 - DNA, 600 bp, Chicken  19866894342558_1
cggagaaagcaaaagaaatataggacaaattatactcgagcactgcagctaaattattttaacagcagggtatctttaaaaaaaaaagttaggacaaaattctacacagagcaaggaaaaaagcttttacatcttactgtaattagaaactcatcaggttaatggggcaacttttcataaactgccatttaagtttttgcatatggcattgatattgctgtatttcagtttgcaaatagaacttgtccaggacaaaaatagcaatcaggcattttggaatgtacatgaaaattcaaatgyctgtgtcgctgtgtctgcgctctttcatgcaatttgtagttgtgacagaattccaagaggatttcgttttcacttctatctccatcagctggaatttccaaaagcagcagatgattctggrgtattctggtcttyacaggggaaactgaaaggcctcaagaaagcagagggaagggagccagcttgtcaagatcaactctgagtttgaacacccagaatgtgaggcacggggaattaaggcttgcttttgatgatttagatcagtactttaggaaagttgttcaatatttacataaacaa

SEQ ID NO: 69874 - DNA, 600 bp, Chicken  19866894342558_2
agcttttacatcttactgtaattagaaactcatcaggttaatggggcaacttttcataaactgccatttaagtttttgcatatggcattgatattgctgtatttcagtttgcaaatagaacttgtccaggacaaaaatagcaatcaggcattttggaatgtacatgaaaattcaaatgyctgtgtcgctgtgtctgcgctctttcatgcaatttgtagttgtgacagaattccaagaggatttcgttttcacttctatctccatcagctggaatttccaaaagcagcagatgattctggrgtattctggtcttyacaggggaaactgaaaggcctcaagaaagcagagggaagggagccagcttgtcaagatcaactctgagtttgaacacccagaatgtgaggcacggggaattaaggcttgcttttgatgatttagatcagtactttaggaaagttgttcaatatttacataaacaatgagaagaaattccaaaatgaatggaaaaggaggcaggataatgggcaaagttttcaaaaacagtcaaataacagaagtccaaattcataacaactttgattattgcgtatggcggttttc

SEQ ID NO: 69875 - DNA, 600 bp, Chicken  19866894342558_3
actgtaattagaaactcatcaggttaatggggcaacttttcataaactgccatttaagtttttgcatatggcattgatattgctgtatttcagtttgcaaatagaacttgtccaggacaaaaatagcaatcaggcattttggaatgtacatgaaaattcaaatgyctgtgtcgctgtgtctgcgctctttcatgcaatttgtagttgtgacagaattccaagaggatttcgttttcacttctatctccatcagctggaatttccaaaagcagcagatgattctggrgtattctggtcttyacaggggaaactgaaaggcctcaagaaagcagagggaagggagccagcttgtcaagatcaactctgagtttgaacacccagaatgtgaggcacggggaattaaggcttgcttttgatgatttagatcagtactttaggaaagttgttcaatatttacataaacaatgagaagaaattccaaaatgaatggaaaaggaggcaggataatgggcaaagttttcaaaaacagtcaaataacagaagtccaaattcataacaactttgattattgcgtatggcggttttcacacatcttgtttt

SEQ ID NO: 69876 - DNA, 600 bp, Chicken  19866894342564_1
ttctgaagagaaaggttttatcaaacagagaataggaactgtcagacttcatatagtatttggaagcagtgatgtttcagctccttgttatctgcagcaaagtcagagacagacagtagcccatggaagctgggcactggaacacctaacacaaaagatgacaatgctgtctaaaacgttgtgggaattagcaggtttaatatctgacttactccttccgtgtgatgagacgtgaggtcgttcatgctagcagcagaatgttctcatctaaattaaagcgttccaaggtctcacttgttycatcctttctgttttatttgctcagttgctggaagaggccgtggccgaggccgtggaagaggccggggccgcggcagaggaagaggaggcccaagacgataacttctcccatgccactgttagcaaattctgggtgactttggattctttttgtacaggtcttgtttatggtatccgtttttaataaaccgagaagtgaaacaggtgtctttcttttgttattgaagtatgggatgggaggcatgcatagaaatgggctgctgcagactaagcgtgtcctgttggtgttgattatgactt

SEQ ID NO: 69877 - DNA, 366 bp, Chicken  19866894342574_1
tgatttcaggttcttctgatttactcaaccacttcttaaacttcctgatggaaaatctttttatgttatgattcagtctttggaagaagtctagtggtcttgaatgatgctgcctccagctggcactgactacagaaataactcaaaccagtactgaaagccattggagtacagttgcagaatggagaaaaggaattcattaactcgaagtagaaatgaaattatattctgttcattcttaataagtttttctttgatctacaacagcatccaggtgccactgctttgagactgtagcaytgacacacaaaagcattaatagggcagaagctctaaccacattccaaaagtcacagtctccccttg

SEQ ID NO: 69878 - DNA, 600 bp, Chicken  19866894342581_1
cggcagctcaaccgccaggcttgagctgaatttccatattcactgcactagacgttggctttcagacagaagtggagacaagctcttgagtaaagagtcacagaaaatctgctgctgtctgcactgtcactttgctgatagcacagcttttaaaatggcactgttaattaactttgtgccctactttcagttcttggtgccagagaaatgcttgaagtggtgtggctttgctcctgctgttggactactgaattcatgcaaagctgaaatgaaggaggaagaggaggggttacgatgacrttggtacagtttggaaacacatttacgtagttatcatttgtgatgtatcaaaatctattgcctgtatttttagtgtaactctygtatttaaaatttgttaatatattttgaagttagaaaatatgcatgcaacatgtgagacagcattgcaccaagttcctacttaaagccagagctttggcccctctggaatgggatatttgcttaatcatactctgttggatcttacctactgttttttccacccctctttcttcacccacggttcacgtggttggctgaatatatgtttgttggatg

SEQ ID NO: 69879 - DNA, 600 bp, Chicken  19866894342581_2
tcttgagtaaagagtcacagaaaatctgctgctgtctgcactgtcactttgctgatagcacagcttttaaaatggcactgttaattaactttgtgccctactttcagttcttggtgccagagaaatgcttgaagtggtgtggctttgctcctgctgttggactactgaattcatgcaaagctgaaatgaaggaggaagaggaggggttacgatgacrttggtacagtttggaaacacatttacgtagttatcatttgtgatgtatcaaaatctattgcctgtatttttagtgtaactctygtatttaaaatttgttaatatattttgaagttagaaaatatgcatgcaacatgtgagacagcattgcaccaagttcctacttaaagccagagctttggcccctctggaatgggatatttgcttaatcatactctgttggatcttacctactgttttttccacccctctttcttcacccacggttcacgtggttggctgaatatatgtttgttggatgcatcagcatgaaatgttgcagatggccaccagccttaatacacgcgaagctgtgatcacagttttctaaacagtgccagagat

SEQ ID NO: 69880 - DNA, 599 bp, Chicken  19866894342587_1
  misc_feature (1)..(45): n is any nucleotide
nnnnnnnnnnnnnnnnnnnnnnnnnnnnnnnnnnnnnnnnnnnnnttgtagctggcaaaatgtatataagggatactgtcaataattaaagattttctaaatgcccgtaatgctccaaaaccagcagtataatgctaacacagggttaaatctcaagttcttaaataactcactacatgcatacgagatgtgtgcccatgctcagcatgttgcagcagttaatcctaaagtgacatcactcctggcttttgcactttgtcacgattcctggttgctgctctatcaaattaccaagcatcraaaagtacaaatgacagtccttaaaaaagatattcacagtaaccatcatcatcccctcaaacatttcccctcttctctgcagtccgtaacttttcactggggtgccattctgacaataaatgcaacataattcattgatcaaggggcctggccctaagctttgccctgggaccatctcatcagtgaggaaaacagtattttacagatgagctcagtatgttgtgctcactctctcgttaatacactgctaccctatcttaagaaatttttcatccatagaattactattacatgaaaat

SEQ ID NO: 69881 - DNA, 600 bp, Chicken  19866894342588_1
agtcatatttcatctgcatctatgagggaatagagcaagcagagaaatctggtcagctcagagggagggtgcagctctgggacctttaaatgacttgatggctccaggctgagtaactggttttaacagcaaatgggtttcccagctctcaccgaagaacaaacacttttgagtgactttataaagaggcagaatggcgtttctgtaatttttgctcagaacctcctccactttgcagagctgcttggaacagcgtattgccaaaactgctctgaagttgcacataataaggaataaaasatgagaacaacttagccaagactccagccttggaaagcatgacccatrcacaaggagatagcttgggtgctgcaggttcttgcacagatacagagtgatgcagagcactttgtgtgacagattgtacgtttgatgtagaaatgtaaaggaaagaaaacaaaagcctggtcagaggtgatccttgtgttttcttctgaaatgctatcaggaagtcactgtgatttgctatgcacgaygagttctttcagattttttgcaggagtaatgccagtcaaattgatgtagtctgaccygcatatg

SEQ ID NO: 69882 - DNA, 600 bp, Chicken  19866894342588_2
ctggtcagctcagagggagggtgcagctctgggacctttaaatgacttgatggctccaggctgagtaactggttttaacagcaaatgggtttcccagctctcaccgaagaacaaacacttttgagtgactttataaagaggcagaatggcgtttctgtaatttttgctcagaacctcctccactttgcagagctgcttggaacagcgtattgccaaaactgctctgaagttgcacataataaggaataaaasatgagaacaacttagccaagactccagccttggaaagcatgacccatrcacaaggagatagcttgggtgctgcaggttcttgcacagatacagagtgatgcagagcactttgtgtgacagattgtacgtttgatgtagaaatgtaaaggaaagaaaacaaaagcctggtcagaggtgatccttgtgttttcttctgaaatgctatcaggaagtcactgtgatttgctatgcacgaygagttctttcagattttttgcaggagtaatgccagtcaaattgatgtagtctgaccygcatatgattacaaaggcttttgtactgcagaagcagagcagaagaccctatggg

SEQ ID NO: 69883 - DNA, 600 bp, Chicken  19866894342588_3
agagctgcttggaacagcgtattgccaaaactgctctgaagttgcacataataaggaataaaasatgagaacaacttagccaagactccagccttggaaagcatgacccatrcacaaggagatagcttgggtgctgcaggttcttgcacagatacagagtgatgcagagcactttgtgtgacagattgtacgtttgatgtagaaatgtaaaggaaagaaaacaaaagcctggtcagaggtgatccttgtgttttcttctgaaatgctatcaggaagtcactgtgatttgctatgcacgaygagttctttcagattttttgcaggagtaatgccagtcaaattgatgtagtctgaccygcatatgattacaaaggcttttgtactgcagaagcagagcagaagaccctatgggacacgtgactgcaattggtcactgcccccacacactttctgctctctgaaagtagctcagggaccaycgcctaatggagrgtgcagccctgtggcattgcactgtgacatcacgttccaagtgggaaaaagcaactcatctctctgaaaagcaaaccgaacaaataatactgtaaggaaactgtgatg

SEQ ID NO: 69884 - DNA, 600 bp, Chicken  19866894342588_4
ataaaasatgagaacaacttagccaagactccagccttggaaagcatgacccatrcacaaggagatagcttgggtgctgcaggttcttgcacagatacagagtgatgcagagcactttgtgtgacagattgtacgtttgatgtagaaatgtaaaggaaagaaaacaaaagcctggtcagaggtgatccttgtgttttcttctgaaatgctatcaggaagtcactgtgatttgctatgcacgaygagttctttcagattttttgcaggagtaatgccagtcaaattgatgtagtctgaccygcatatgattacaaaggcttttgtactgcagaagcagagcagaagaccctatgggacacgtgactgcaattggtcactgcccccacacactttctgctctctgaaagtagctcagggaccaycgcctaatggagrgtgcagccctgtggcattgcactgtgacatcacgttccaagtgggaaaaagcaactcatctctctgaaaagcaaaccgaacaaataatactgtaaggaaactgtgatgtcagacttcgaacaataaaattctttaaaaatccagtactgtgaatgcgctattccc

SEQ ID NO: 69885 - DNA, 509 bp, Chicken  19866894342588_5
gacagattgtacgtttgatgtagaaatgtaaaggaaagaaaacaaaagcctggtcagaggtgatccttgtgttttcttctgaaatgctatcaggaagtcactgtgatttgctatgcacgaygagttctttcagattttttgcaggagtaatgccagtcaaattgatgtagtctgaccygcatatgattacaaaggcttttgtactgcagaagcagagcagaagaccctatgggacacgtgactgcaattggtcactgcccccacacactttctgctctctgaaagtagctcagggaccaycgcctaatggagrgtgcagccctgtggcattgcactgtgacatcacgttccaagtgggaaaaagcaactcatctctctgaaaagcaaaccgaacaaataatactgtaaggaaactgtgatgtcagacttcgaacaataaaattctttaaaaatccagtactgtgaatgcgctattcccaggcttggtggaataacggacagttgttaac

SEQ ID NO: 69886 - DNA, 496 bp, Chicken  19866894342588_6
tttgatgtagaaatgtaaaggaaagaaaacaaaagcctggtcagaggtgatccttgtgttttcttctgaaatgctatcaggaagtcactgtgatttgctatgcacgaygagttctttcagattttttgcaggagtaatgccagtcaaattgatgtagtctgaccygcatatgattacaaaggcttttgtactgcagaagcagagcagaagaccctatgggacacgtgactgcaattggtcactgcccccacacactttctgctctctgaaagtagctcagggaccaycgcctaatggagrgtgcagccctgtggcattgcactgtgacatcacgttccaagtgggaaaaagcaactcatctctctgaaaagcaaaccgaacaaataatactgtaaggaaactgtgatgtcagacttcgaacaataaaattctttaaaaatccagtactgtgaatgcgctattcccaggcttggtggaataacggacagttgttaac

SEQ ID NO: 69887 - DNA, 600 bp, Chicken  19866894342592_1
gacctaaccatactaccctaactaacagcccctcactaaaccatgtccctgagcaatccactgagaatgaggtacgtgccatttgtttcaagggaaagcagcgatctcttcacccatacatgcctttttgaatatatttatgtatcaacagttgtactaatatcattctttaatcatgtccttgcattttgtctttgcttttccgaggcttctaatagacaagtttgtagcataaggctgagtaaagtacgtatcaacactttgaaagatgtggatgttcatctttagctctagtgcttstaaaggcatttcatgttttcaaattcattttactacatcttagcagaaaacacattgagatttcacattcttctcagcagctctgtgatgttgatacattctttaagcagcttttaaaaactaaaccacgcatgacatggatttttactgagtactcttgtcagatgagaatagtccacttaaaatgttagagatttccaggcaatctctaataatgctagtcaacaaagagaatgttggttcagtaatagttttgcatttggctgcatctaaaaataaacgttttgtttgtaaaccttt

SEQ ID NO: 69888 - DNA, 600 bp, Chicken  19866894342601_1
ttcagaaaaatcagacttaggctacagtcaaacaatgagtcattttagataagtcaaagaattatcatttatgtgaatgcacagtatttaatacttattctagtgttaatagacgtagtcaaatcctcataatcccttgggaccctttaatgcagtactttcacccacacagtctttctctgctgttcattctatttcctacatgatcagagacatataacaatgtaatctaaatgcatttccttagagaaagagaaagaaaaccaagcataacagataaagaacaatgtagagtggaaraagaaacactataacaaaagaacaaaagaaaaaagcccatctaagtaggccactcacaatgttaaattggataagtgaataattttaggaagcggtataaatgttagcatgtttgtgttacaaactactaaaatgctccagttagtgcttcctagaatagcaagaaagtggcacatctctcctcatgagatctcagcaccacactctgagctacawgataaactaggttacacaggtttattggaaagtctgcatattgccattgggaatagagcatttaatagacttggctaataaaga

SEQ ID NO: 69889 - DNA, 600 bp, Chicken  19866894342601_2
ataacaatgtaatctaaatgcatttccttagagaaagagaaagaaaaccaagcataacagataaagaacaatgtagagtggaaraagaaacactataacaaaagaacaaaagaaaaaagcccatctaagtaggccactcacaatgttaaattggataagtgaataattttaggaagcggtataaatgttagcatgtttgtgttacaaactactaaaatgctccagttagtgcttcctagaatagcaagaaagtggcacatctctcctcatgagatctcagcaccacactctgagctacawgataaactaggttacacaggtttattggaaagtctgcatattgccattgggaatagagcatttaatagacttggctaataaagagtctgtaatactgaaacaggtcgtgtgaatacacaaatacctctcagtgtatttccaccttcagtaggattgaaaggataaaacttctcagatcccactttctcctgagttctcccaccaacagctctccccatgttatttccaggggtgaccaaataattatgaagcaatgaaatggtagaaagtcctctagaatatttttgcaatgcataatag

SEQ ID NO: 69890 - DNA, 599 bp, Chicken  19866894342602_1
  misc_feature (1)..(131): n is any nucleotide
nnnnnnnnnnnnnnnnnnnnnnnnnnnnnnnnnnnnnnnnnnnnnnnnnnnnnnnnnnnnnnnnnnnnnnnnnnnnnnnnnnnnnnnnnnnnnnnnnnnnnnnnnnnnnnnnnnnnnnnnnnnnnnnnnnncatagaagagagcagctgtcagaatggtaggagtgattagaagtgtgtaaaccccccccactgcagtatttttctcttcgccagtctgcattattttactttccaaatatgaattaagggactgccagtggggcctgataagcagtttttgccaccaatggaaatgttygtgctttcttccatagattcagttaaactaaactgacatctcttcygaatgtggtgggattggagttttgatttgcaacagtacatacctctaacaagttttctggcccttatctacgtcagacacatgtctatgcattaacttaaaaatacttgttggaaataagctattaagggaccttttcagcaaaggctgtctggaaggcactcaagctctgggctagcaagaggggaaaaaaaatgaaccacaaatgataccgactgtgatrtgctgatcattcataaaccgagagaaaaatg

SEQ ID NO: 69891 - DNA, 599 bp, Chicken  19866894342602_2
  misc_feature (1)..(85): n is any nucleotide
nnnnnnnnnnnnnnnnnnnnnnnnnnnnnnnnnnnnnnnnnnnnnnnnnnnnnnnnnnnnnnnnnnnnnnnnnnnnnnnnnnnnncatagaagagagcagctgtcagaatggtaggagtgattagaagtgtgtaaaccccccccactgcagtatttttctcttcgccagtctgcattattttactttccaaatatgaattaagggactgccagtggggcctgataagcagtttttgccaccaatggaaatgttygtgctttcttccatagattcagttaaactaaactgacatctcttcygaatgtggtgggattggagttttgatttgcaacagtacatacctctaacaagttttctggcccttatctacgtcagacacatgtctatgcattaacttaaaaatacttgttggaaataagctattaagggaccttttcagcaaaggctgtctggaaggcactcaagctctgggctagcaagaggggaaaaaaaatgaaccacaaatgataccgactgtgatrtgctgatcattcataaaccgagagaaaaatgcgtaataaactgttgaacagctcagggtgaaatgtttccttccttt

SEQ ID NO: 69892 - DNA, 600 bp, Chicken  19866894342602_3
ataagcagtttttgccaccaatggaaatgttygtgctttcttccatagattcagttaaactaaactgacatctcttcygaatgtggtgggattggagttttgatttgcaacagtacatacctctaacaagttttctggcccttatctacgtcagacacatgtctatgcattaacttaaaaatacttgttggaaataagctattaagggaccttttcagcaaaggctgtctggaaggcactcaagctctgggctagcaagaggggaaaaaaaatgaaccacaaatgataccgactgtgatrtgctgatcattcataaaccgagagaaaaatgcgtaataaactgttgaacagctcagggtgaaatgtttccttcctttccagtgaaatgcctctgagttgaatgcctgaacgccaggtggttcaggaaggtgtttgtgctgcgtgtggttggctttctttgatggtcttgcacgtgccttatctgtgctgttgcacatttggaaggatcttcagaagcttctgttccatgtgtttttttcattgttgtgcatacatataattaggcctagagattgcatagagataaatgtatgaatgtat

SEQ ID NO: 69893 - DNA, 600 bp, Chicken  19866894342610_1
caggtactgatgattacaatgagaattaaaccaacggagtacaagtgctgtggacagatctccagttatttttgttctgagctgcatttttcaattgtttggtccagcaagcaaaacttatctgcactggtaatttgcattacaacagctaaactgaggcaaaatattcacactgcagacaacagtcagacttctgtgcacaatatgaagaaactatttcagtggaaagaatttcacttcggaaaaaaataaacaatccacgtgtcaatctccagaatggttttgatcagtgagtcaaaratgaatgttccacagtttggtcttgcaacagctgtgcacagcagcccaggctcttgctccctgctgacttgtcccgacactgcattagcagaaatacttgatttgatgaggcttaatcttttgtaaacttctgtaaatatttatgtttgcacaaaaagcatcatcctgtgacaaaagtgagacagcttcaaggaaacatgtagctgagaagtacagatgatgggagagaggacaatgaactgcaatacattatggaagaacactggagagcgattctctctgctaattaatacaagacag

SEQ ID NO: 69894 - DNA, 600 bp, Chicken  19866894342617_1
actgtggcggccactgcctaaatgtcttgctcctcacatgtgtgaaagattattttattagaggagttcttggaagataagaaataatgtttttttgctttgtatcttttgcatacgttaataatgacaccttaagttattaggactggaacacatttaaattcggatgtagttctaccctatataaattttttttaccttgggcttgtagtattacagagagtttgacattgaagatttgtttatttataagcactggcatagctctgctcctcctttttacatgcaatacccgaaaayaaggatgcagagaatgtagtgcatactgtcaggccacctcctgctgctcggtggagctttgtaccgttgggtcatgccagtgccaagaagccatcatgggaacatatgagcctgattctgagataacacgtctgggtggcagtggcattgggcttgttctggtccctgctgccttgccatgtaggcggagtgtttgggtgcctgtgtgtttgtccctgctgtgtgagtggttctcggggttcacagaagtatcaggcatcagaagtaaacttatgctatgctggtaggtttaacaacagg

SEQ ID NO: 69895 - DNA, 600 bp, Chicken  19866894342622_1
atctttaaggccttttccaacttgagaattcttcgattccatgattctatgattgtatgagataatttacattgagactagaaacaaaaggtttgctatgttttgaaataactggtgtaaatagaaacctggaggtaccagttcatcacgggtgactgtgaatcatagaagtgtgatgcaacgataaagagaaacatgcatagtatgcatagcaagatgtgtttccagccaaagcagagaagtattgctgttagtagtgtgagaccgctgatacgtctgctacttcaaatactgtgtatrctcttggtagtgctgttaaaacaacaacaacaaaacccctggaatttgagcagatacagagaaaacttacaaagatggtcaagggggtgtgttctcataagaacacagggaagaattttgtttgtttaatcaaccatactgaaacatgagaagcaatatgactgcatgctatacagtcacttgggagaagttatagcatcaccaaaggaaagaactatttaagtgaaggccaatggaataagagcagataaacataagcttgccaaaaatgccagtatgctgggatgctagaagaaattt

SEQ ID NO: 69896 - DNA, 600 bp, Chicken  19866894342622_2
cagaaatggagctgtagcacaggtgagaggcagcagctgtttaaagtgtggttatactcaaactatgaagaagtgtttacattttctaatggagaagaccaaagtgatctttgggggaagaaagtatttttgctgaaaaaatgtaagcattctgtatttcctatcttcttctctgggcaagcgtttgatgttgatgtcatggaaggatcgaggtgcagcagtcttagcagaatgatggcaaaaatgtttcccccattcatggttctaccacttatgaaaataattttttatgtgtgcaaygttgcaaacccattgctactctctgattttaggaacttccctgacttcttcagagaatgttatctcagaagattcattagggcatgatcaaatgtatccctatacattgaagaggatattgaaatgcgtttgctttgtgggacaatggtgggctaccttccctcccacacagtagttttactcatgaaaaaaacaaaattggaaaagacccttgcagccacatacagaggcttggctagctgtcaaacctaagccttcaaaaattgcgagtctctttatgagcagatcaaggctgtgctc

SEQ ID NO: 69897 - DNA, 600 bp, Chicken  19866894342624_1
ctcacttcagggcttcacccaaactctcctggggaggcactggttcagctcatccctcccacaaagaactccatctggagatagggaaacagctgccacagaaccccctgatgcaaaaagatggctttcaataccttggggaagcaggaaaacacaaagggactccaatggcaagaggttcatggtgacaaatctgaaataaagaaaaaaaaggggaaggaatattaacccaatccctaaagcaggtttctttccctgcagctaacatctccttgctggctgtctcacataaggagttaygaaacacgtgctcagggcaaaaagcaatggggagaagggtaggaaatgggggggaaaagcatccaaatagaaggaatgatagaaaagaaagttygtcctgtgtgctcatcccaaaacagagaaggcagctttgcaaggaaggagggactgcccagccccaacaccactcagccacaggctctccagccttctatttcctgaggagacacttttatgtgtaaacacccagaaaggtcaattttctgctcattttgttcctttgaaatcagaaggtctgccatcgctttgttggttgactgc

SEQ ID NO: 69898 - DNA, 600 bp, Chicken  19866894342624_2
ctcatccctcccacaaagaactccatctggagatagggaaacagctgccacagaaccccctgatgcaaaaagatggctttcaataccttggggaagcaggaaaacacaaagggactccaatggcaagaggttcatggtgacaaatctgaaataaagaaaaaaaaggggaaggaatattaacccaatccctaaagcaggtttctttccctgcagctaacatctccttgctggctgtctcacataaggagttaygaaacacgtgctcagggcaaaaagcaatggggagaagggtaggaaatyggggggaaaagcatccaaatagaaggaatgatagaaaagaaagttygtcctgtgtgctcatcccaaaacagagaaggcagctttgcaaggaaggagggactgcccagccccaacaccactcagccacaggctctccagccttctatttcctgaggagacacttttatgtgtaaacacccagaaaggtcaattttctgctcattttgttcctttgaaatcagaaggtctgccatcgctttgttggttgactgcagcagcactcccatgcaggcccagatttagatccagcatatctggcag

SEQ ID NO: 69899 - DNA, 600 bp, Chicken  19866894342624_3
gccacagaaccccctgatgcaaaaagatggctttcaataccttggggaagcaggaaaacacaaagggactccaatggcaagaggttcatggtgacaaatctgaaataaagaaaaaaaaggggaaggaatattaacccaatccctaaagcaggtttctttccctgcagctaacatctccttgctggctgtctcacataaggagttaygaaacacgtgctcagggcaaaaagcaatggggagaagggtaggaaatgggggggaaaagcatccaaatagaaggaatgatagaaaagaaagttygtcctgtgtgctcatcccaaaacagagaaggcagctttgcaaggaaggagggactgcccagccccaacaccactcagccacaggctctccagccttctatttcctgaggagacacttttatgtgtaaacacccagaaaggtcaattttctgctcattttgttcctttgaaatcagaaggtctgccatcgctttgttggttgactgcagcagcactcccatgcaggcccagatttagatccagcatatctggcagaggccttggctttcaatttgcaatacacatgtttattttttttctc

SEQ ID NO: 69900 - DNA, 557 bp, Chicken  19866894342625_1
ttataggtacggggagggggacacatgcgtttggaaatctttgtgaagatgtgcttttttttcatcttctttaatatttatatccatgccattagctggcaatcatgcttctataaaaggatgggatatgtttccaaacaatgtcttagtttaaaatagttgggcacttcttgtggaatgtaacttcagctgaaaaaaagtacactgtgtcttccatttaagaacaagtagacaccctgctgaaggattatgtcactgagcctgaagatttggatgaaacacagcacaagctattatcaygcgtatatctgtaatatgagaaaatagtacattttatgatttatttttaataactatgaagcaatatgttttcagaaaattttgatttggtgcaatgaaggcagaaatcttgttttcaaaaaatgtttcatccttctattatgggaatctgatgtacccaagatgttttaggaatgactttctactactggcaatttatgcagaatatttcttctgattgacaaatatatgtagcattaatgcattggctgcactgc

SEQ ID NO: 69901 - DNA, 600 bp, Chicken  19866894342627_1
tgcattgctttttagtgttttagtctggggaatacaaaccttgaactgcacaactagctgtgggccaggaacagtttaactggcaggagtcaggtgtatgctgcattcttgcaaactagtgatgtaaatgtgcctttctgtaattgtaagaacttaatgtgtaatcttcagtgccattcacttttgttttaagcagtttctatttctgttaatttgggggtcagaccaatttctcagttaagcatttactttcagtaacattttctctgtaacattaaggtcttgggcaacggtatcccrtatggtccatgtcagatgtggccatgggaacgcagtgcaatcacatcagccttgttcttgcagcacctggtgtacggacttagccatatgctttcctggaacaaatacattgtaaaccctttcctcatttaactttctcccactgcaaaaccagacggacagcatgaacagtttgttgtggcaacacaagtatttctcttcctggtggagaactttgcttatccactgtattctattcagtgtggtgtcagaagaaaaaaaaagtaagcactgaaccagtaacctatactgcacctggtc

SEQ ID NO: 69902 - DNA, 600 bp, Chicken  19866894342629_1
tctgtggatgagaatgcggcacctggcactgtggtggccttgctgacagtgagcgatgctgactcccctgctgccaacgggaacatctctgtgtcaatcttggcaggcaacgagcagcggcacttcgaggtgcacagcagtaaggtacccaacctcagtctgatcaaggtggcggctgcactggaccgggagcgcatccctgcctataaccttacagtggcagtggctgataactatggggcctcaccaccacccccaggcttccccacctcttccctttcccctgatggggtggcggcractcctgtaagccgctcttcagtggctagcttggtgatctttgtgaacgacatcaatgaccacccgcctgtctttgaacagtcagtgtacagggtgaacatcagtgaggaggtgcctttgggcagctacgtgcggggcttgactgcgacagaccgtgactcgggcctcaatgccaacctcagatacagcattgtgtctggcaatgagctgggctggttccacatcagcgagcacagcgggctggtcaccacagctggtcctgggggtggcactgctgggcatgctgggggtgcgtctgtc

SEQ ID NO: 69903 - DNA, 599 bp, Chicken  19866894342632_1
  misc_feature (1)..(184): n is any nucleotide
nnnnnnnnnnnnnnnnnnnnnnnnnnnnnnnnnnnnnnnnnnnnnnnnnnnnnnnnnnnnnnnnnnnnnnnnnnnnnnnnnnnnnnnnnnnnnnnnnnnnnnnnnnnnnnnnnnnnnnnnnnnnnnnnnnnnnnnnnnnnnnnnnnnnnnnnnnnnnnnnnnnnnnnnnnnnnnnnnnnnnnnncagttgatttcagtgatttcagaaacactctagtcatgttaaaaacaactaagacacagatatagaacaattaaatgcacacaaatacataaaatgtatgttataattatataacrgatgtaatgctgtctgtataaaagttttcataagaaaagaatcatatataatttggttctgtattaaagtaacttctacgtaaaactgaaaatgattaaatcaaaaatgwtcatacgcttctcgttcaagatctgcattcagtgttgtaagttgtttcaaataattttgttccttttcaactgaacaagtcagctgtacttccagatcacacatttctttctgtgggagaaaaacagtattttgattatgtgtaggtaaattacagttcaaggaagctatcagaattgaactgacaaca

SEQ ID NO: 69904 - DNA, 599 bp, Chicken  19866894342632_2
  misc_feature (1)..(74): n is any nucleotide
nnnnnnnnnnnnnnnnnnnnnnnnnnnnnnnnnnnnnnnnnnnnnnnnnnnnnnnnnnnnnnnnnnnnnnnnnncagttgatttcagtgatttcagaaacactctagtcatgttaaaaacaactaagacacagatatagaacaattaaatgcacacaaatacataaaatgtatgttataattatataacrgatgtaatgctgtctgtataaaagttttcataagaaaagaatcatatataatttggttctgtattaaagtaacttctacgtaaaactgaaaatgattaaatcaaaaatgwtcatacgcttctcgttcaagatctgcattcagtgttgtaagttgtttcaaataattttgttccttttcaactgaacaagtcagctgtacttccagatcacacatttctttctgtgggagaaaaacagtattttgattatgtgtaggtaaattacagttcaaggaagctatcagaattgaactgacaacaaaaagcattaagatgaaacaaagccataaacaagacagactttatttttgcatcaatctgatgtaatgtggaagtatcgtgggacattaaactctgatatgaatgaaaac

SEQ ID NO: 69905 - DNA, 599 bp, Chicken  19866894342633_1
  misc_feature (1)..(7): n is any nucleotide
nnnnnnnactgagtctgtgccagagcaatcagaagggcccaccacagaactggaatttgcaatacacagaactttattagctgtatcaaatgaagtttgaccataattacactctttaacttgtttcctcacactctcccccactccttatgacaatctgtttcattcttcttcagacaagccactgtctcctcatccaccaccattcctccacacttgggacaaatacaattctgagatgcaatgcacaactactgagtctcatctcatagaattcagaactgatcttacagatcattyattccccatgcttgactttaaagccattttcccctgctgttcttataaactaggattaatgttttyacttctgctgtaggtgcaaatggcatagtttctgaactcattaaayacagctatgcatttgtaagtttagacagcatctatcttctccagttgaagacagaaaatgagctctggrttgtcctcagtgtgcactggactaaacactcaaactcttccagtgcagccaaatatattctagtcaacygtgttacatctgwgaagtccatctaagagcactacaagttctggaagca

SEQ ID NO: 69906 - DNA, 600 bp, Chicken  19866894342633_2
cagaactttattagctgtatcaaatgaagtttgaccataattacactctttaacttgtttcctcacactctcccccactccttatgacaatctgtttcattcttcttcagacaagccactgtctcctcatccaccaccattcctccacacttgggacaaatacaattctgagatgcaatgcacaactactgagtctcatctcatagaattcagaactgatcttacagatcattyattccccatgcttgactttaaagccattttcccctgctgttcttataaactaggattaatgttttyacttctgctgtaggtgcaaatggcatagtttctgaactcattaaayacagctatgcatttgtaagtttagacagcatctatcttctccagttgaagacagaaaatgagctctggrttgtcctcagtgtgcactggactaaacactcaaactcttccagtgcagccaaatatattctagtcaacygtgttacatctgwgaagtccatctaagagcactacaagttctggaagcaccaagtgttcaccctgacccaagatatcacagaatatacaggaaaggacagaaagaggggaaaaaat

SEQ ID NO: 69907 - DNA, 600 bp, Chicken  19866894342633_3
tctttaacttgtttcctcacactctcccccactccttatgacaatctgtttcattcttcttcagacaagccactgtctcctcatccaccaccattcctccacacttgggacaaatacaattctgagatgcaatgcacaactactgagtctcatctcatagaattcagaactgatcttacagatcattyattccccatgcttgactttaaagccattttcccctgctgttcttataaactaggattaatgttttyacttctgctgtaggtgcaaatggcatagtttctgaactcattaaayacagctatgcatttgtaagtttagacagcatctatcttctccagttgaagacagaaaatgagctctggrttgtcctcagtgtgcactggactaaacactcaaactcttccagtgcagccaaatatattctagtcaacygtgttacatctgwgaagtccatctaagagcactacaagttctggaagcaccaagtgttcaccctgacccaagatatcacagaatatacaggaaaggacagaaagaggggaaaaaatacaacactgccctcactggaagactgcagtattatcactgggtact

SEQ ID NO: 69908 - DNA, 600 bp, Chicken  19866894342633_4
ccactgtctcctcatccaccaccattcctccacacttgggacaaatacaattctgagatgcaatgcacaactactgagtctcatctcatagaattcagaactgatcttacagatcattyattccccatgcttgactttaaagccattttcccctgctgttcttataaactaggattaatgttttyacttctgctgtaggtgcaaatggcatagtttctgaactcattaaayacagctatgcatttgtaagtttagacagcatctatcttctccagttgaagacagaaaatgagctctggrttgtcctcagtgtgcactggactaaacactcaaactcttccagtgcagccaaatatattctagtcaacygtgttacatctgwgaagtccatctaagagcactacaagttctggaagcaccaagtgttcaccctgacccaagatatcacagaatatacaggaaaggacagaaagaggggaaaaaatacaacactgccctcactggaagactgcagtattatcactgggtactagattagacagttggactagatgatcctagtggtcttttccaacctttaagagtccactctcaaaacca

SEQ ID NO: 69909 - DNA, 600 bp, Chicken  19866894342633_5
actactgagtctcatctcatagaattcagaactgatcttacagatcattyattccccatgcttgactttaaagccattttcccctgctgttcttataaactaggattaatgttttyacttctgctgtaggtgcaaatggcatagtttctgaactcattaaayacagctatgcatttgtaagtttagacagcatctatcttctccagttgaagacagaaaatgagctctggrttgtcctcagtgtgcactggactaaacactcaaactcttccagtgcagccaaatatattctagtcaacygtgttacatctgwgaagtccatctaagagcactacaagttctggaagcaccaagtgttcaccctgacccaagatatcacagaatatacaggaaaggacagaaagaggggaaaaaatacaacactgccctcactggaagactgcagtattatcactgggtactagattagacagttggactagatgatcctagtggtcttttccaacctttaagagtccactctcaaaaccagtctgaggactgatttctgtacatagaactttgtatttccagaaattaaatgtatatgggaacttccat

SEQ ID NO: 69910 - DNA, 600 bp, Chicken  19866894342633_6
atctcatagaattcagaactgatcttacagatcattyattccccatgcttgactttaaagccattttcccctgctgttcttataaactaggattaatgttttyacttctgctgtaggtgcaaatggcatagtttctgaactcattaaayacagctatgcatttgtaagtttagacagcatctatcttctccagttgaagacagaaaatgagctctggrttgtcctcagtgtgcactggactaaacactcaaactcttccagtgcagccaaatatattctagtcaacygtgttacatctgwgaagtccatctaagagcactacaagttctggaagcaccaagtgttcaccctgacccaagatatcacagaatatacaggaaaggacagaaagaggggaaaaaatacaacactgccctcactggaagactgcagtattatcactgggtactagattagacagttggactagatgatcctagtggtcttttccaacctttaagagtccactctcaaaaccagtctgaggactgatttctgtacatagaactttgtatttccagaaattaaatgtatatgggaacttccattatctaaaatcag

SEQ ID NO: 69911 - DNA, 600 bp, Chicken  19866894342640_1
cgtaacagcacagcctacataggacaggcaaagaatgaagcagaattaagccttaagggatgttatagcccttggagaaagatgagcctgatttcttttatcctccagttttacagcaacttagaaagcactcatcttcagagcaggctctgcagtgctcattacatcaggcgttcggcagcgaccactctcgcctcaaacaaatatataacctaaactgcagccatcaggcacggcactgccaccacacgggctcaatttcagagcactgtcctcgtagaagaaattaaagcccgctcytgtagctgaaattcagacgtacagcaaaagcactcactacagaccgatggccctccctgcccatcagcgctcttctgctcttcgaggagcgctgttttcagtcctcctccaactgttggattatccagttgttggatgagccaactgctgggttaactattggaggagcaccactggaagctctcctttcagaacagttccaccccagcagcaccctcatggagaccaagagccaggatagtcagttctttgcccccgccgtcagccaagatgtcccttctgttgagagatggctgggga

SEQ ID NO: 69912 - DNA, 600 bp, Chicken  19866894342642_1
ctgacaggaccttcagctttccagtacagatgagacacctgagctttgcctgggacagaaggcataactggatgcaatactgaggagttgtgatgaagtgcaatgcttttggaaagacaagaaaattgagagtgagaatctccactccaccattttcaggcctacaaaccctaagaggtttgaagcaccccacagacaagatgcaggcagacgtgggtggctcttgcctcctgttctgagaggagctgcatttgatgcatcctgctaaacaaaagaaattccccgaatgcaccctcacgyttggcagaacgacacccttcaagagcacttccaaggcctgccttcatcctacacaactcatcttctcaacatctttggcagttcacagcaaacattgtgcctatgggtaaaaattcttccactgtgccaggctctagaaatccagccaaggatgaagtagatactagcagcttggaagtgttttgcaacaataaattgctgcaggcctgcatgtggtatggyacctctcagagctctccttatatggtggcacatggataccaccaaagccagcagcccttcggttacatttaaccatcc

SEQ ID NO: 69913 - DNA, 600 bp, Chicken  19866894342642_2
cttgcctcctgttctgagaggagctgcatttgatgcatcctgctaaacaaaagaaattccccgaatgcaccctcacgyttggcagaacgacacccttcaagagcacttccaaggcctgccttcatcctacacaactcatcttctcaacatctttggcagttcacagcaaacattgtgcctatgggtaaaaattcttccactgtgccaggctctagaaatccagccaaggatgaagtagatactagcagcttggaagtgttttgcaacaataaattgctgcaggcctgcatgtggtatggyacctctcagagctctccttatatggtggcacatggataccaccaaagccagcagcccttcggttacatttaaccatccaatcaaggaaacattttaattggcaactagatttaattcttttattttaactcttttttagctggactctacgtctaaaaacacctgcagcgtctgatgcacggcctcagacgtgaacaatccaaactgcttattacaagttctcacatcacctatacacattcacaagtttccttttttagctttcccatccacccttacatcctcccatctacctttgca

SEQ ID NO: 69914 - DNA, 600 bp, Chicken  19866894342652_1
tgaagaaccgtttcttaaccccactcctgatcctccccctgacgcagctccatgccgttccacctccactccttgtgaggagctgcagccgccatgaggcctcccctcagcctcctctgctctgggctgaacaaacccagggacctcagctgctcctcacacaccttgccctcaagacccttccccatctttgtagtcctcctttggacagtctctaatacttttttgtccttcttacattgtggcacccaaccctgcaccccgtgctggaggtgcagctgccagtggcagttgcccagyggcagttctgggcctggtgcaccccagggtacagttggtcctttgagctgccagggcacactgctggctcagatacaacttgctgccagccagaatccccacatccctttcagtgggactgctgtcctgygtctcatctcccagtctataagtatatgcatgtttkctctgtcccagttgcagaatcgagcacttgctcatgttgaactttatgtgatcggtgattgcccagccctctaatttgtcaacatctctgttttacccttcaaagtagagagggtcttttcttagcatgtctct

SEQ ID NO: 69915 - DNA, 600 bp, Chicken  19866894342652_2
acaaacccagggacctcagctgctcctcacacaccttgccctcaagacccttccccatctttgtagtcctcctttggacagtctctaatacttttttgtccttcttacattgtggcacccaaccctgcaccccgtgctggaggtgcagctgccagtggcagttgcccagyggcagttctgggcctggtgcaccccagggtacagttggtcctttgagctgccagggcacactgctggctcagatacaacttgctgccagccagaatccccacatccctttcagtgggactgctgtcctgygtctcatctcccagtctataagtatatgcatgtttkctctgtcccagttgcagaatcgagcacttgctcatgttgaactttatgtgatcggtgattgcccagccctctaatttgtcaacatctctgttttacccttcaaagtagagagggtcttttcttagcatgtctcttcaggccagctgttctgtcaccctgtagctgtctacgagcctcgtcatgtcctcatggctccttcttggagaaaagaatcatggaatcatagaatcacaggatcacagaatcacagaatggcctgggttg

SEQ ID NO: 69916 - DNA, 600 bp, Chicken  19866894342652_3
tgccctcaagacccttccccatctttgtagtcctcctttggacagtctctaatacttttttgtccttcttacattgtggcacccaaccctgcaccccgtgctggaggtgcagctgccagtggcagttgcccagyggcagttctgggcctggtgcaccccagggtacagttggtcctttgagctgccagggcacactgctggctcagatacaacttgctgccagccagaatccccacatccctttcagtgggactgctgtcctgygtctcatctcccagtctataagtatatgcatgtttkctctgtcccagttgcagaatcgagcacttgctcatgttgaactttatgtgatcggtgattgcccagccctctaatttgtcaacatctctgttttacccttcaaagtagagagggtcttttcttagcatgtctcttcaggccagctgttctgtcaccctgtagctgtctacgagcctcgtcatgtcctcatggctccttcttggagaaaagaatcatggaatcatagaatcacaggatcacagaatcacagaatggcctgggttgaaaaggaccataacgatcatctagtttcaaccccaa

SEQ ID NO: 69917 - DNA, 600 bp, Chicken  19866894342658_1
ttcagtctcattcactatcgtgcagaaattgggaacgaaggagggaatcttcagaagtgacagtgagtcgggttcgtcagtgagagggacaggaatcagattaatcaacgctctgattccaaggtctgttttgaggagtgagagtgtcggcccacagcgctggagaagggatgggggggtgagactcacctggaggtggcagtcctgaatcagcaaagagcaacgatggccgccatgaagatgatgaagatgacccgcaagatccccttcagacatccctttgtgcctgctgggtgtgcwgttcaccctccccaaggtcacaaacaagtgagttcacagcaacagcttggccaaaaatgagtctgtagccacaactttctcatgggaatggtagggcggttggtcaacaaagcactgccagtgtttggccacaccaagcacagcacagaaaacaggaatgtgtcttctgttggtccttcccagcatcccttccttccgttgtatcctctgyagcactcggctcagtgccatcagcaaagtgctgagggtgcactccatcccatcatctgtgtcagtgagaggtggtgaagagcagcgctc

SEQ ID NO: 69918 - DNA, 600 bp, Chicken  19866894342658_2
agcaaagagcaacgatggccgccatgaagatgatgaagatgacccgcaagatccccttcagacatccctttgtgcctgctgggtgtgcwgttcaccctccccaaggtcacaaacaagtgagttcacagcaacagcttggccaaaaatgagtctgtagccacaactttctcatgggaatggtagggcggttggtcaacaaagcactgccagtgtttggccacaccaagcacagcacagaaaacaggaatgtgtcttctgttggtccttcccagcatcccttccttccgttgtatcctctgyagcactcggctcagtgccatcagcaaagtgctgagggtgcactccatcccatcatctgtgtcagtgagaggtggtgaagagcagcgctcccaggagggacctctgggggtcaccactcatcaccacctccacctggacatggagctgttggccacagccctctggctgcgactttccaatctattccttctctgcagaacagcccaatgctcacatccatatctcttccattttgagatgagggagtggtgtgcagccktgtcaaggacattgtggaagcccmggtagatgacatcagtt

SEQ ID NO: 69919 - DNA, 600 bp, Chicken  19866894342658_3
tggtccttcccagcatcccttccttccgttgtatcctctgyagcactcggctcagtgccatcagcaaagtgctgagggtgcactccatcccatcatctgtgtcagtgagaggtggtgaagagcagcgctcccaggagggacctctgggggtcaccactcatcaccacctccacctggacatggagctgttggccacagccctctggctgcgactttccaatctattccttctctgcagaacagcccaatgctcacatccatatctcttccattttgagatgagggagtggtgtgcagccktgtcaaggacattgtggaagcccmggtagatgacatcagttgcctttggatgacatgaraagccctcaaatgctcatctctaaccccaacattcctccttaagcaccatgaattcattataaccagttgagaatgccaaatccaaccaatccaccccaaaacacagccaccatgcatgagggagcacaattttttctgattcatctcaaactcccaccacctcttctgtggtacccaaaatctgtaccaatccaaccgaaaaatcccataagaccagggaggtgtgtggggcatcacaac

SEQ ID NO: 69920 - DNA, 600 bp, Chicken  19866894342658_4
tccgttgtatcctctgyagcactcggctcagtgccatcagcaaagtgctgagggtgcactccatcccatcatctgtgtcagtgagaggtggtgaagagcagcgctcccaggagggacctctgggggtcaccactcatcaccacctccacctggacatggagctgttggccacagccctctggctgcgactttccaatctattccttctctgcagaacagcccaatgctcacatccatatctcttccattttgagatgagggagtggtgtgcagccktgtcaaggacattgtggaagcccmggtagatgacatcagttgcctttggatgacatgaraagccctcaaatgctcatctctaaccccaacattcctccttaagcaccatgaattcattataaccagttgagaatgccaaatccaaccaatccaccccaaaacacagccaccatgcatgagggagcacaattttttctgattcatctcaaactcccaccacctcttctgtggtacccaaaatctgtaccaatccaaccgaaaaatcccataagaccagggaggtgtgtggggcatcacaacatctgtgccacacagttgggatcc

SEQ ID NO: 69921 - DNA, 600 bp, Chicken  19866894342658_5
atcagcaaagtgctgagggtgcactccatcccatcatctgtgtcagtgagaggtggtgaagagcagcgctcccaggagggacctctgggggtcaccactcatcaccacctccacctggacatggagctgttggccacagccctctggctgcgactttccaatctattccttctctgcagaacagcccaatgctcacatccatatctcttccattttgagatgagggagtggtgtgcagccktgtcaaggacattgtggaagcccmggtagatgacatcagttgcctttggatgacatgaraagccctcaaatgctcatctctaaccccaacattcctccttaagcaccatgaattcattataaccagttgagaatgccaaatccaaccaatccaccccaaaacacagccaccatgcatgagggagcacaattttttctgattcatctcaaactcccaccacctcttctgtggtacccaaaatctgtaccaatccaaccgaaaaatcccataagaccagggaggtgtgtggggcatcacaacatctgtgccacacagttgggatccctgtaatgccaccacctccatgggaacgacggtta

SEQ ID NO: 69922 - DNA, 599 bp, Chicken  19866894342659_1
  misc_feature (1)..(120): n is any nucleotide
nnnnnnnnnnnnnnnnnnnnnnnnnnnnnnnnnnnnnnnnnnnnnnnnnnnnnnnnnnnnnnnnnnnnnnnnnnnnnnnnnnnnnnnnnnnnnnnnnnnnnnnnnnnnnnnnnnnnnnnnctcttggctttgcattgtgttctttgccccgaactgccttccagatggctgtttgcatgttgaagtgtgcatcagctggcgccatctgagacggaatcacagaacagcccaagttggaagggactcataaggattgtggacttcaactctacacaggactatcatccccttgtcctcttygtctcytctcccctatcaaggacctgtctcctctttgccacctcactaagttgtccttgtaagacagtagtgcttgtttgcagaggaatcctgtacataacggtgtgctgagaggactgggttttcacattgctgggtgacttctttcagtagaacgctttcctgctggcttcagtgaggttgctgttgtccaccttgcagatgggagcagtgctttgaacttgctcaggacctcacaaagagaatgtggctgggggacttccccttcaccaccatcagcagcagctgcactacgtccc

SEQ ID NO: 69923 - DNA, 599 bp, Chicken  19866894342659_2
  misc_feature (1)..(114): n is any nucleotide
nnnnnnnnnnnnnnnnnnnnnnnnnnnnnnnnnnnnnnnnnnnnnnnnnnnnnnnnnnnnnnnnnnnnnnnnnnnnnnnnnnnnnnnnnnnnnnnnnnnnnnnnnnnnnnnnnnctcttggctttgcattgtgttctttgccccgaactgccttccagatggctgtttgcatgttgaagtgtgcatcagctggcgccatctgagacggaatcacagaacagcccaagttggaagggactcataaggattgtggacttcaactctacacaggactatcatccccttgtcctcttygtctcytctcccctatcaaggacctgtctcctctttgccacctcactaagttgtccttgtaagacagtagtgcttgtttgcagaggaatcctgtacataacggtgtgctgagaggactgggttttcacattgctgggtgacttctttcagtagaacgctttcctgctggcttcagtgaggttgctgttgtccaccttgcagatgggagcagtgctttgaacttgctcaggacctcacaaagagaatgtggctgggggacttccccttcaccaccatcagcagcagctgcactacgtccctgttct

SEQ ID NO: 69924 - DNA, 600 bp, Chicken  19866894342665_1
ccagactttgcactcctccttgctgaacttcaggatgttcctgtcagaccatttctcacccccggccctcttagatgggaatctgatggcattcagactggcctccacaggacacaaggaggatgccagacagctgcccacagcagcaaatgagccaccacatcaggatgggggccgagccacaatgccaggatgggggtccccactggcagcatccccacagggccgccctggggacaggtgacagctggaaccccatggccaggcccatggctgtggggcactggcacaaaccttggsaaccgggcacaaggacacgaggcagccttcccttcgaggtagcacaaagatcagagcttcttatcagcaccattgatcggtacaactgctgttcgttacaaatcacattgtgaattctttgaatcagaagctgtaacaacaaagggccatatgtttcctgcctttccaggtcatgtggggagctggagcaggagaagaaataactctgaatactgtctggctgaaaaaaagccattacctctccaccttggaactgattcgagccccagcatgggacaccaggcccagctgcagcccctc

SEQ ID NO: 69925 - DNA, 600 bp, Chicken  19866894342665_2
cacgaggcagccttcccttcgaggtagcacaaagatcagagcttcttatcagcaccattgatcggtacaactgctgttcgttacaaatcacattgtgaattctttgaatcagaagctgtaacaacaaagggccatatgtttcctgcctttccaggtcatgtggggagctggagcaggagaagaaataactctgaatactgtctggctgaaaaaaagccattacctctccaccttggaactgattcgagccccagcatgggacaccaggcccagctgcagcccctcactggccacagtcarccctgcacagaggaactgaggagtgccaaaggaggtctgcacttcattcccagcaayacagtactttattcccagcaacttatttctagtctgaggaaatctgctcagtgtctctctcatccctcttcctagctcctggtttttgcaccctgacctgttttcctgtatatgccccatgtttatagtgcagaaaactgtagtgtgagtcttccaagaggtgcagaacaccatctggagagagagggctcccactgaggacattcgtcaggaggtctgtcacatccccaggcactgccagga

SEQ ID NO: 69926 - DNA, 600 bp, Chicken  19866894342665_3
ttgatcggtacaactgctgttcgttacaaatcacattgtgaattctttgaatcagaagctgtaacaacaaagggccatatgtttcctgcctttccaggtcatgtggggagctggagcaggagaagaaataactctgaatactgtctggctgaaaaaaagccattacctctccaccttggaactgattcgagccccagcatgggacaccaggcccagctgcagcccctcactggccacagtcarccctgcacagaggaactgaggagtgccaaaggaggtctgcacttcattcccagcaayacagtactttattcccagcaacttatttctagtctgaggaaatctgctcagtgtctctctcatccctcttcctagctcctggtttttgcaccctgacctgttttcctgtatatgccccatgtttatagtgcagaaaactgtagtgtgagtcttccaagaggtgcagaacaccatctggagagagagggctcccactgaggacattcgtcaggaggtctgtcacatccccaggcactgccaggagccagcacttcaggtacagtgatcaggcccagaaaaccccagcaggagtgtatggca

SEQ ID NO: 69927 - DNA, 600 bp, Chicken  19866894342672_1
tttattaaacccatctaacgaaagctcattttgtcataagttagtttttgagagcttccatagctgcttgttgttaacaattctatcatctcttctgacagagtctgtgggtcacaatatcccatctgttgctttcttaatacacgaagtggtaaccgcaaagatcacttgtttccatttttgataactctaccatgtttgctttttctagtcttctacaacactcccacctcttctggagattaagcagcactacaggtgtttccatgtctaatgtcaatgattcatgactcttcagayataattgtcaataatttgttctcggttaagtatacttaacattctggttatgctctctcacacagatacacttgcggagacatttcattcttccaagcacactgcctgctctcagctgtctttccagcagtctcccttgctcccaaacagacaatctctttttttmttcatttttcttgagaagatacttctgatgcattcataacatctcatttactgctgcacctgtttgccacctagtgttctccgtcccaaatgatttcaggaaycctcatgtccttaccacaacagcaatttcct

SEQ ID NO: 69928 - DNA, 600 bp, Chicken  19866894342672_2
acttgtttccatttttgataactctaccatgtttgctttttctagtcttctacaacactcccacctcttctggagattaagcagcactacaggtgtttccatgtctaatgtcaatgattcatgactcttcagayataattgtcaataatttgttctcggttaagtatacttaacattctggttatgctctctcacacagatacacttgcggagacatttcattcttccaagcacactgcctgctctcagctgtctttccagcagtctcccttgctcccaaacagacaatctctttttttmttcatttttcttgagaagatacttctgatgcattcataacatctcatttactgctgcacctgtttgccacctagtgttctccgtcccaaatgatttcaggaaycctcatgtccttaccacaacagcaatttccttctcatttcctcattcacctcatggcctaatgactttttcacattcagtttgatctctgtccctacagcaagtcagtagggaggatatgggacctataccaggatcacttcccgaaggattcagggatatttgtattttcatccatgaaactaaaatgccttcaaa

SEQ ID NO: 69929 - DNA, 600 bp, Chicken  19866894342672_3
tctaatgtcaatgattcatgactcttcagayataattgtcaataatttgttctcggttaagtatacttaacattctggttatgctctctcacacagatacacttgcggagacatttcattcttccaagcacactgcctgctctcagctgtctttccagcagtctcccttgctcccaaacagacaatctctttttttmttcatttttcttgagaagatacttctgatgcattcataacatctcatttactgctgcacctgtttgccacctagtgttctccgtcccaaatgatttcaggaaycctcatgtccttaccacaacagcaatttccttctcatttcctcattcacctcatggcctaatgactttttcacattcagtttgatctctgtccctacagcaagtcagtagggaggatatgggacctataccaggatcacttcccgaaggattcagggatatttgtattttcatccatgaaactaaaatgccttcaaattgcgtttagctcttacctggctggatctggatagattggatgttcccgggaccctgctccgtcatagcgggataacgaaatgagggaagactccagcaatct

SEQ ID NO: 69930 - DNA, 469 bp, Chicken  19866894342674_1
tcagctgcagtttgaccccaaagctggagttgttttgaagggaaaactggaacaaacaagatgaggtcgttaagctggaaccaataagagcgctgccatcatctagttttgctggacttcggggaaaaaaaaactaataaggaaacagtttatctttggaataaacaaagcgtaaaggaacatgcaggcatgcagggagcgcccgcagccccacaggccggagcccctcttcctgcatcccgcagccatgggagcagtgcctgaaacccgagcaccagggagcccccgtggcgaaacccygagcaaatcccgtggcgacccgcggcccagccaggtggagcgcagtgcgtccgtggggatgagcaactgggcccaaattggtcccaaaccccacgtctgagcgaggctgcgccggcagctgctggctctgcagcgtccctttaaatttagggttggggctttgagttgt

SEQ ID NO: 69931 - DNA, 600 bp, Chicken  19866894342676_1
cttcagtgctataaaactagggcttgggaatatttttgccttattaagaaagaagagagggacccctaagccttccttttccttcagctaaaccatcacactgcagcctttgtttttgggagcaaactgcacagcctccagcactgaacaatctgtataatttcttctcaggtgtgcgcaccttgccaaaagccaagtgccaggtgtaaagtccacactcagccttatcagtacacaaaataaagtcttcttccctctcggcctaaccaaacacctgagggcaggcatcagcagggatamctgcatgcttgcagcccgtctcatcatgccacaggccgcaggcacctgggtgaggatgtcaagccaaagcttgtccccacgaggagcatcaacaacttccaaatccagctgccagaagcacaagtttgggcttggttgcaatacctacatttaactcctgccaggcaagagtgatgcaacgcaggagacacgcgttcagttcagctgctgtcagttctggtcgtatgtaacctggctgctaaaaataattctgtggaaattaaggaacattctgttgttatgtcaaactaattctgaatt

SEQ ID NO: 69932 - DNA, 600 bp, Chicken  19866894342676_2
tgtcgttaaaacaaaccatgtccattccatgctcacagcgagagactataagagcacaggaaaacccaaaaataaagctgactagaaacaaaagcaaaggtttttttttttttccttgtgcctaaacaaaaggaaatataaacaatgaacaagcatcaagagcaaaaagaagattccattttaatgagattatgtttgtttaacaacacgctgtaaaaagcatgagtaaaactcaccccaacgccctctaaacctccaagggttcagaatacaagcgcttttctgcacaaccatcagtaraagcactcatatgtagaatttctggggcacaaggtttaagctgagagccatctgaaatgcctctagacctcattccttaacgatgtgagccaaaggcgtggctagcatgcaaactagaagctcaaggtaaagttaaacttgttgcaaaaggacttttaaatgtatatatatgcacatttgtgacaagttatgttcacttttatagtaaacagcagggtcttcttactccacattcctgggagatgtgtcgtgccatggcagctgctcgtaagaccccgtaaatgaggtaatgtgcagaac

SEQ ID NO: 69933 - DNA, 600 bp, Chicken  19866894342676_3
tcgtaagaccccgtaaatgaggtaatgtgcagaacttcatccgaaaccaaaacgaggtttgtttccctggatgatgacattaaataggacaggaatggctacctgcactatgcacggtacaggctaagcctttttttgctgttaaaatataaattcaattagttacttccacgcttaagcagaactgcctctgctgaaattgtactccaacgataattgcaatccaacagtgatctaattatgtatgagtctcagtggctgcaatcccacgttgctccctacaacccggattcactacartacaactcataagtgaaaaccaccgttttcaagcactctcccttaagaccgtatgactttatatatgtttaatgagaatggagtcagtctattagcaggcttgctataaaactgtgagtttctacctgtcgttaaacacaaaagaattgaaaggcacttgagttgcatgtagaaagcagctgatgggctgacctgaacaagggaaagtacattcttttaattaaggtgttagaggaggattcaagtaccagccttcatgttttgctctgccaccagcttcctgtgtgacccagggcaaga

SEQ ID NO: 69934 - DNA, 599 bp, Chicken  19866894342682_1
  misc_feature (1)..(99): n is any nucleotide
nnnnnnnnnnnnnnnnnnnnnnnnnnnnnnnnnnnnnnnnnnnnnnnnnnnnnnnnnnnnnnnnnnnnnnnnnnnnnnnnnnnnnnnnnnnnnnnnnnncttgcatctttttatatttatggcataccattccttgggcctagagctgttcagagaacatgaaattaaatttacttctcctaatcacactgaggttttgtgaacgtggctaggagtcagcttcttccacaaggtttgccatttgaggcctcacctctgtttgacagggatattgccgaacacagcccaggtctggggcargagctgctgtgccagcagatagctggttatttccttccagacagcattaaactaatctctgccatgaggttacagatcaccatgctgcaggagatgacatacagtaaaagaaaaacwaaactgaattctctgtagcaagcctcacagcaagccctaaattacttgatagggttaccatgcatggttacactgctgctgctctaccctagggctggctggtcttcagtggggagatagaaggagccatttcaagcagaggtaaatatttttactctttctataaaaggaatacacagaga

SEQ ID NO: 69935 - DNA, 600 bp, Chicken  19866894342682_2
tatggcataccattccttgggcctagagctgttcagagaacatgaaattaaatttacttctcctaatcacactgaggttttgtgaacgtggctaggagtcagcttcttccacaaggtttgccatttgaggcctcacctctgtttgacagggatattgccgaacacagcccaggtctggggcargagctgctgtgccagcagatagctggttatttccttccagacagcattaaactaatctctgccatgaggttacagatcaccatgctgcaggagatgacatacagtaaaagaaaaacwaaactgaattctctgtagcaagcctcacagcaagccctaaattacttgatagggttaccatgcatggttacactgctgctgctctaccctagggctggctggtcttcagtggggagatagaaggagccatttcaagcagaggtaaatatttttactctttctataaaaggaatacacagagacaagcagtctaaacagtttgaggcgatagtaacagttttcatatctgcagttaaaacgygcactcagaaagtactaaagttgtgcagatttatctgatggacaaaatggcagccggta

SEQ ID NO: 69936 - DNA, 458 bp, Chicken  19866894342682_3
ctgccatgaggttacagatcaccatgctgcaggagatgacatacagtaaaagaaaaacwaaactgaattctctgtagcaagcctcacagcaagccctaaattacttgatagggttaccatgcatggttacactgctgctgctctaccctagggctggctggtcttcagtggggagatagaaggagccatttcaagcagaggtaaatatttttactctttctataaaaggaatacacagagacaagcagtctaaacagtttgaggcgatagtaacagttttcatatctgcagttaaaacgygcactcagaaagtactaaagttgtgcagatttatctgatggacaaaatggcagccggtaagaagaaaatagcggtgggaaatgctacgttgtcatgtcacagttagtcagatctatggaaaaatctgaggtgctctcacagtacttgtgtctgtatgt

SEQ ID NO: 69937 - DNA, 599 bp, Chicken  19866894342684_1
  misc_feature (1)..(155): n is any nucleotide
nnnnnnnnnnnnnnnnnnnnnnnnnnnnnnnnnnnnnnnnnnnnnnnnnnnnnnnnnnnnnnnnnnnnnnnnnnnnnnnnnnnnnnnnnnnnnnnnnnnnnnnnnnnnnnnnnnnnnnnnnnnnnnnnnnnnnnnnnnnnnnnnnnnnnnnnnnnttctgcagtgatttacaataactgagtgtgatacctgggtagggcaaaatcctcttctttctctaccaccagtgctcatttcagaaataccagcttcttggatccctaaactctcgggtctaagcatcatattgacaggagacaygtgagtcactctccatggaaggttgtacgtttgtgactgaaattctgttttcatcacattttttacctcagtatgccaaactatgggatttgtacccycctcaataccactttatgcctgtgaaaccyctgcagactccttcgctttgctttgaaaagatctgtttgcttacatggtgcattaatgagaggagatgttacttacctcatgcttccctttccaaggttatacggggacagcatgtgcgaacacttctgttgtgttacagtatttagcctagtatactaatgacagccatt

SEQ ID NO: 69938 - DNA, 599 bp, Chicken  19866894342684_2
  misc_feature (1)..(57): n is any nucleotide
nnnnnnnnnnnnnnnnnnnnnnnnnnnnnnnnnnnnnnnnnnnnnnnnnnnnnnnnnttctgcagtgatttacaataactgagtgtgatacctgggtagggcaaaatcctcttctttctctaccaccagtgctcatttcagaaataccagcttcttggatccctaaactctcgggtctaagcatcatattgacaggagacaygtgagtcactctccatggaaggttgtacgtttgtgactgaaattctgttttcatcacattttttacctcagtatgccaaactatgggatttgtacccycctcaataccactttatgcctgtgaaaccyctgcagactccttcgctttgctttgaaaagatctgtttgcttacatggtgcattaatgagaggagatgttacttacctcatgcttccctttccaaggttatacggggacagcatgtgcgaacacttctgttgtgttacagtatttagcctagtatactaatgacagccattgccagagtgcatctgtgctagcacaccaagttcaatttcaacagttacacgtgcagaaatttcattcagatgtctgtgttacagggtagcaacctctg

SEQ ID NO: 69939 - DNA, 599 bp, Chicken  19866894342684_3
  misc_feature (1)..(27): n is any nucleotide
nnnnnnnnnnnnnnnnnnnnnnnnnnnttctgcagtgatttacaataactgagtgtgatacctgggtagggcaaaatcctcttctttctctaccaccagtgctcatttcagaaataccagcttcttggatccctaaactctcgggtctaagcatcatattgacaggagacaygtgagtcactctccatggaaggttgtacgtttgtgactgaaattctgttttcatcacattttttacctcagtatgccaaactatgggatttgtacccycctcaataccactttatgcctgtgaaaccyctgcagactccttcgctttgctttgaaaagatctgtttgcttacatggtgcattaatgagaggagatgttacttacctcatgcttccctttccaaggttatacggggacagcatgtgcgaacacttctgttgtgttacagtatttagcctagtatactaatgacagccattgccagagtgcatctgtgctagcacaccaagttcaatttcaacagttacacgtgcagaaatttcattcagatgtctgtgttacagggtagcaacctctgaaatggctggtgccctactttcagaccatc

SEQ ID NO: 69940 - DNA, 600 bp, Chicken  19866894342686_1
ccaacgcagcattctgccatagctcaaaccccgcagtttcacctggacagttcctcaagctcgcagtgcgacctacagagctgacacaggatgagatgaaggttggctgacaatctgtggtttcaactaaagaattaagagcagcgagcgacctccaacatctgcacgagcctgaagaagccacaacaggtgagatgccctgctgtctcacatcattttaaagacctgttactccagggatgccatcccaccgaacttcaggtggcagtgtgcgctgagcccttcccagctgcacacccsctgtgggtatctcaccacatcccagccctaaggcttgagacgtgagcaagctgccgtcaagctgcgtgctgaaatccacccaagcgctgcggaaccagggaagcgtctcccctcaaatcttcccacatcgataacggtgaattattttaatgagcgttaatgatttcttatagacacgatgacctcaccctttcccccccgctccaggattaaacagtttttcctggaacgccgtgacacttgggctgccgcacatctgtctgacagctttgtgttcctgcgagcatcacaactcactcg

SEQ ID NO: 69941 - DNA, 527 bp, Chicken  19866894342686_2
ctccaggattaaacagtttttcctggaacgccgtgacacttgggctgccgcacatctgtctgacagctttgtgttcctgcgagcatcacaactcactcgctgctctttattagtgctgcttttatcccatcggctctcctggaactcggaggcatgaaattcccatctccttccacacccacaaaacaaaggtgcagaatacggcaaaggctgccgggctgcttccaccaaacccccagccgctcgtgtggggagataaacggaataataggcgatacacggagtacagcggaatcaaayrgaataaaataaacggaataaacggaatacaatggaattgtttcgctccctaccagcagcccggtccttaaaaccgaacaaaagcacgcacacgagccgaacccggcagtgccacaagctgcccgccgccgtacccgccgctctcgccctccctttgttgcccggtgccacctgtgccgcgccacgcgcgggctcctccacatcgccggggccgcgctccgctgaca

SEQ ID NO: 69942 - DNA, 526 bp, Chicken  19866894342686_3
tccaggattaaacagtttttcctggaacgccgtgacacttgggctgccgcacatctgtctgacagctttgtgttcctgcgagcatcacaactcactcgctgctctttattagtgctgcttttatcccatcggctctcctggaactcggaggcatgaaattcccatctccttccacacccacaaaacaaaggtgcagaatacggcaaaggctgccgggctgcttccaccaaacccccagccgctcgtgtggggagataaacggaataataggcgatacacggagtacagcggaatcaaayrgaataaaataaacggaataaacggaatacaatggaattgtttcgctccctaccagcagcccggtccttaaaaccgaacaaaagcacgcacacgagccgaacccggcagtgccacaagctgcccgccgccgtacccgccgctctcgccctccctttgttgcccggtgccacctgtgccgcgccacgcgcgggctcctccacatcgccggggccgcgctccgctgaca

SEQ ID NO: 69943 - DNA, 600 bp, Chicken  19866894342691_1
ctttatcgcctttcaaatactatagtgagtcatatgctctttgataactgtcttgaaacatctgtaatgaatctccctctagaagaaatgcataaattccaagatggggataactaatgataaaaaataaagtgaagatggaagtgtgaggctgaataatatcacagtgcatattttatatccatgcattcagttaaagaaaaaataaataggacagaacaatttgcttttagttgtggcataaaaataatttctcaccttcctgtagtttctggtcagaattagaggaagtgatggttkatctgctcaaaactggcagtaaaattgatccaaattttcaaaaatatatcctcctttcaagttcctgaaataatagaataattatgaaattttgggggtttaacaagatgatatgtggtaatggaactacagctkagtctattccaagtgacactcatgtctcctattttataggccagcttaacatggtcttaaaaaamttgaatttataggtaataaaggactaaccttatttaaactagtcttccctaaagaattagaaatacacattcaccagttgattccagtaatrttgggaat

SEQ ID NO: 69944 - DNA, 600 bp, Chicken  19866894342691_2
agatggaagtgtgaggctgaataatatcacagtgcatattttatatccatgcattcagttaaagaaaaaataaataggacagaacaatttgcttttagttgtggcataaaaataatttctcaccttcctgtagtttctggtcagaattagaggaagtgatggttkatctgctcaaaactggcagtaaaattgatccaaattttcaaaaatatatcctcctttcaagttcctgaaataatagaataattatgaaattttgggggtttaacaagatgatatgtggtaatggaactacagctkagtctattccaagtgacactcatgtctcctattttataggccagcttaacatggtcttaaaaaamttgaatttataggtaataaaggactaaccttatttaaactagtcttccctaaagaattagaaatacacattcaccagttgattccagtaatrttgggaatgttatcctgtgacagttgagggacatgagaaggttgcaaaattacatcctagcaatataatgtttttaaatctttatacaaaatacattttctctactaactctgtgatgaataaatagatatagggccagcttg

SEQ ID NO: 69945 - DNA, 600 bp, Chicken  19866894342691_3
aaaaataaataggacagaacaatttgcttttagttgtggcataaaaataatttctcaccttcctgtagtttctggtcagaattagaggaagtgatggttkatctgctcaaaactggcagtaaaattgatccaaattttcaaaaatatatcctcctttcaagttcctgaaataatagaataattatgaaattttgggggtttaacaagatgatatgtggtaatggaactacagctkagtctattccaagtgacactcatgtctcctattttataggccagcttaacatggtcttaaaaaamttgaatttataggtaataaaggactaaccttatttaaactagtcttccctaaagaattagaaatacacattcaccagttgattccagtaatrttgggaatgttatcctgtgacagttgagggacatgagaaggttgcaaaattacatcctagcaatataatgtttttaaatctttatacaaaatacattttctctactaactctgtgatgaataaatagatatagggccagcttgtacgtgttgttggtgtaactgaaaggaaagagactgagctgaattcaaatgagaaatttgaaaat

SEQ ID NO: 69946 - DNA, 600 bp, Chicken  19866894342691_4
gatggttkatctgctcaaaactggcagtaaaattgatccaaattttcaaaaatatatcctcctttcaagttcctgaaataatagaataattatgaaattttgggggtttaacaagatgatatgtggtaatggaactacagctkagtctattccaagtgacactcatgtctcctattttataggccagcttaacatggtcttaaaaaamttgaatttataggtaataaaggactaaccttatttaaactagtcttccctaaagaattagaaatacacattcaccagttgattccagtaatrttgggaatgttatcctgtgacagttgagggacatgagaaggttgcaaaattacatcctagcaatataatgtttttaaatctttatacaaaatacattttctctactaactctgtgatgaataaatagatatagggccagcttgtacgtgttgttggtgtaactgaaaggaaagagactgagctgaattcaaatgagaaatttgaaaatgtgatattgtttaggctgcaatttcccaatctgttttgtttttgtttttgtttttttttaaaaaaaccttccacaggtatattttggcctgt

SEQ ID NO: 69947 - DNA, 600 bp, Chicken  19866894342700_1
agcaagagagctcctgtaagcagagtttaatttggatactcttttccaaaagaattctgtgtcatttcagttcttggtttttctccctcatggtctttacttcctgtcctccttcctgtgacttctcccattttcaccccactttatcacctccaacttatgtgccgttgttttggctactgtcacaccatcactattcacaaaccactgataaagcactgcaagcacctatgataacactatttgtaacccttagactagtttcgtgtaatgaaagcctacaagaaaaatacattcctygggagtcatcacaagctgacaaagttttaaagtccaaacaaagagtaatagaaagtccaaacaagatagcaccaggaaaacgggctcagcctggctaaaaacaagaggtctgacaaacagcatgcacagacccatagctcatttctagcacttgttccccaagctgcagagaaatgctgcgatgaaatcatttcattcgttggtaatgaacctgggcagagggtacacagacaacaaagaccgagtgttggtctggacatttggaggcaagcactgctgaacttctaagctgtgctaagg

SEQ ID NO: 69948 - DNA, 600 bp, Chicken  19866894342701_1
tgcccccagagcccatgcttttgttcctcttctttagcccctattctgaagcctctcccctttggccttgtgtttgggggttttccactccccatcctcccactccctccaggtaaacatggtcaagggagtttgcttccacctggggctcttgctggcacacctgctgcatggccagggcatgggggcaaggtttgctgctgtcccaacacagccatccttccccacactgctgctgggaaggacacaaggctctgggagggctcccaaggcagggctgtctcctgcaggctcctagcmcagctgaacacatcccacattctccaaagccagaataaagctccatcaccatcaatgttgcagctgctcactgtatggacttccctcctccccccatccaccaacactgcctggatttgggcatcttcatcccatgcccatctcttctttcccccaaagcactctgcctcacttctttgcaggttggagaaccctctgctccagcagctcccatgctccctcccactcaggagcctctgacagctcacatgggagcacgctcctctacctgctgccagctgatctttacataagtaatgc

SEQ ID NO: 69949 - DNA, 600 bp, Chicken  19866894342701_2
tggtccaggcccagcctgtcatggtaggagaatgagagaatcccattcttcatgctctgtaaagatttaaagatgtgaaacccaagactttccggtcatatggctttctctcccccccattaaaagaagtttcaacttttacttcaagcccaaaccacaagaagaaatgaaccaaaagccctgggctttgcatgaaaaccaaactaccttttgcacacaagaaaagcctgcctggagccatatatcaagcgcacctctgacgcaatgaggcattgaaaaaaagccctatgctggcaaacrgaggttgtactgctgacaggaaaaaggagcagaacgctcatggtttcctaattactattagttctcaattgataaattccccagcaaagctctgtaaaaagaaccccgagcaataagcaaagagccataatgaaattgagcagccccttttcatcccgcagccctacagccatgagtaaacacaaccagtccattctcaacacttttttgttccactgccattagcagcaaagcaaagagctccgaggtggttgtgcaatggggacttcttaagtgcctgtctctccattgtctctttgc

SEQ ID NO: 69950 - DNA, 600 bp, Chicken  19866894342703_1
gtcaaaatttcatcttgagatgtatcgttaaattgattatgattatttcagatcgctaagacatggttccaacagccagcgaatcagtagaggaaaatctcttgaaaccttgactcaagatgtaagtcctcatagaaaagatggtttcagtttgggaatataaaaaatcggatatgtactaaataatgaatgcttgtgtaaagctaatgtctgcctatggtcttgattacagtttatcttttgaaatcctgaaatcataaaacaaatactataattgcattagaatcctcaaaacaattygttggcatggctatatcactgataaacttagtggttttgaagcactttctgagatcgatatcctgaagctgtagacactccattaggaaaaagaaaattgctatacaggacacctcaaaagaccttactctagaattacagaaatgactcaggctggtgaaacaacacttcaaaattcccagtggaaatttaacattatttttcaaacttgaaaactgccagacaaaaggacaaaaactaaaagggagaatggtagtcacatattttgttcacagattttgctgtggtatagtttcatgc

SEQ ID NO: 69951 - DNA, 599 bp, Chicken  19866894342707_1
  misc_feature (1)..(45): n is any nucleotide
nnnnnnnnnnnnnnnnnnnnnnnnnnnnnnnnnnnnnnnnnnnnntaatatcccttggaatctccccatcagctctgtaagtcttgataggaggaagtcagaccttaacctcacgaagggagataggcagggaagcagaaaaaaaaagtcagaagacattgttctgagtgctgggaatatcattttccctaacttttgctgcagcactatcttgctgcctctgatgctgtcctggatcagcagtctgccttggcctgacccaagtgacaatgccttttcttttcgggtagagatttgcamagtactcagtgagggacaacatgaggcagctgtgcactgataggagaggttaaccataaatttccttgtaatgtttctctggaaacccctttgtgcaagctatgatcccttgcattccttgttgaacrcagtggcatgctctcaacctcacgttgttttggctcccacttctgtgttttaccctgagtttggttgggccacctgtaagctgctggggtggcctgtcttgtccattttttcccaccgaaaccaagactgaaaatgaaggaaaaaatcatgccctggcaggcaactcgttg

SEQ ID NO: 69952 - DNA, 600 bp, Chicken  19866894342707_2
agggaagcagaaaaaaaaagtcagaagacattgttctgagtgctgggaatatcattttccctaacttttgctgcagcactatcttgctgcctctgatgctgtcctggatcagcagtctgccttggcctgacccaagtgacaatgccttttcttttcgggtagagatttgcamagtactcagtgagggacaacatgaggcagctgtgcactgataggagaggttaaccataaatttccttgtaatgtttctctggaaacccctttgtgcaagctatgatcccttgcattccttgttgaacrcagtggcatgctctcaacctcacgttgttttggctcccacttctgtgttttaccctgagtttggttgggccacctgtaagctgctggggtggcctgtcttgtccattttttcccaccgaaaccaagactgaaaatgaaggaaaaaatcatgccctggcaggcaactcgttgttccactgcagtagtcgtgagctctgtaagaaaatggtctagtctcagagaaataaggaggagctttgagaatgccctctccccttgtgggaaggagctgagatgggaccaatatggtgcaaggaagca

SEQ ID NO: 69953 - DNA, 599 bp, Chicken  19866894342708_1
  misc_feature (1)..(5): n is any nucleotide
nnnnntgcaaatcagatgtactgttctggggtaggaaaaatagaaatctttttccttgtgctaataacaccacaaagacttgcaacaaatttgcccactctaagtgggttggaacttttctgtataaaaatgggccagatgggtgcaatgcttgtagttcgctcaactgattgattaaggaaggagcgtttgtgatacagagcttggatatatttctgtttcttttgtataaggaagtaaaacctcacttttcttctccatctgagaatgtagggtaaaacaagcaaataaaaactgaaratctcaagactcattgcttttgcatgcgagggctctkgagcagtgtgggctgggcacrctcctgctgtaggctgtatctcttcttagtcgatagatggcagcacgagcacacaatgtcagctcccggctgatgtgtatttactagtgagaacaaatcttggctaatacagctgtaaaggtgaaaatggtcctcccgagacacttgctgagggtttatttctcacagagtgctgcatccctgcaggtttacgtttactttccgaagcagttcatgcttggcagcttgattggcatccgta

SEQ ID NO: 69954 - DNA, 600 bp, Chicken  19866894342708_2
aaatagaaatctttttccttgtgctaataacaccacaaagacttgcaacaaatttgcccactctaagtgggttggaacttttctgtataaaaatgggccagatgggtgcaatgcttgtagttcgctcaactgattgattaaggaaggagcgtttgtgatacagagcttggatatatttctgtttcttttgtataaggaagtaaaacctcacttttcttctccatctgagaatgtagggtaaaacaagcaaataaaaactgaaratctcaagactcattgcttttgcatgcgagggctctkgagcagtgtgggctgggcacrctcctgctgtaggctgtatctcttcttagtcgatagatggcagcacgagcacacaatgtcagctcccggctgatgtgtatttactagtgagaacaaatcttggctaatacagctgtaaaggtgaaaatggtcctcccgagacacttgctgagggtttatttctcacagagtgctgcatccctgcaggtttacgtttactttccgaagcagttcatgcttggcagcttgattggcatccgtagtgcctttggtttgccagatgtctttagccctggagtt

SEQ ID NO: 69955 - DNA, 600 bp, Chicken  19866894342708_3
tgctaataacaccacaaagacttgcaacaaatttgcccactctaagtgggttggaacttttctgtataaaaatgggccagatgggtgcaatgcttgtagttcgctcaactgattgattaaggaaggagcgtttgtgatacagagcttggatatatttctgtttcttttgtataaggaagtaaaacctcacttttcttctccatctgagaatgtagggtaaaacaagcaaataaaaactgaaratctcaagactcattgcttttgcatgcgagggctctkgagcagtgtgggctgggcacrctcctgctgtaggctgtatctcttcttagtcgatagatggcagcacgagcacacaatgtcagctcccggctgatgtgtatttactagtgagaacaaatcttggctaatacagctgtaaaggtgaaaatggtcctcccgagacacttgctgagggtttatttctcacagagtgctgcatccctgcaggtttacgtttactttccgaagcagttcatgcttggcagcttgattggcatccgtagtgcctttggtttgccagatgtctttagccctggagttggtgcacctgactcccaaact

SEQ ID NO: 69956 - DNA, 600 bp, Chicken  19866894342711_1
ttaaaattttattcaggtctgcatttggagaaacttgaactgtaccagcgtgcaaaagataaatagagtctacagactcagttctgcatgacttctggtataaaaactaataggatggaaaattagtatgaagcaaaaaagtgcctagatattagataattaacgctgcttacttgcagttctgtaacagttgactggcaatggggatattcaccgtctataacctgagagcaaagtctcttcctttacttggctcgacagcagtgatttaaaggcagcagagagagtagtaaggactgyaccactacatttcaagaaagacttgctcagatctcactggcagagcctggaggaatgtaaaggaagtccatattttcttttcttctccctctctttttacttctctaatggtctactggaacctttcctgatatatgagtgctttctccagctgcttattctagtgtgaaggtaaaagttgtttcagttttatctattaaagtagataagaatacaagaaatgagctactggaacagacagataccatcttggtccagccttctgtctctgaatggtgcaacaggagatgctgtttagaa

SEQ ID NO: 69957 - DNA, 600 bp, Chicken  19866894342719_1
ctctgattagactaagtagggacagaaaagaggaaggagttgcaacacactcacacatcaacaatcatgctgtgccttttcagagtaattgcctgtcacacttttccctcaggacaagaaagagatacagacagaaaggtaactagggtttaataaagggacaatagagccacgagttaattattgaaaaatgaaaattggtattttgatagtaagattagaaaatcctttgtaactcagtctttcaagtttgacttaactggcaattaaagcttaaatcagaaattctctgcgtcactkcagatttttattgacattgtctgcaaataccaaatgtagtgtaagttttacctyataaaaataaaagcactctagaagacaataagcagattctccacacaagaaccatgctgctgtttattctgattttgaatgcctaatttttcctttgtatcgatactgctcacatgttctcatcagtctgcaaatatgacaccattagggataatctgagaggccaggtggcttcaggttttccatttctgtttataatcacaatggataatctattagaaaagcagtcagtaagtattaatgcca

SEQ ID NO: 69958 - DNA, 600 bp, Chicken  19866894342719_2
acatcaacaatcatgctgtgccttttcagagtaattgcctgtcacacttttccctcaggacaagaaagagatacagacagaaaggtaactagggtttaataaagggacaatagagccacgagttaattattgaaaaatgaaaattggtattttgatagtaagattagaaaatcctttgtaactcagtctttcaagtttgacttaactggcaattaaagcttaaatcagaaattctctgcgtcactkcagatttttattgacattgtctgcaaataccaaatgtagtgtaagttttacctyataaaaataaaagcactctagaagacaataagcagattctccacacaagaaccatgctgctgtttattctgattttgaatgcctaatttttcctttgtatcgatactgctcacatgttctcatcagtctgcaaatatgacaccattagggataatctgagaggccaggtggcttcaggttttccatttctgtttataatcacaatggataatctattagaaaagcagtcagtaagtattaatgccataagcaaggctgaggagcattaaatctcaagtgtccgtgactgcctactacctt

SEQ ID NO: 69959 - DNA, 583 bp, Chicken  19866894342719_3
gcactctagaagacaataagcagattctccacacaagaaccatgctgctgtttattctgattttgaatgcctaatttttcctttgtatcgatactgctcacatgttctcatcagtctgcaaatatgacaccattagggataatctgagaggccaggtggcttcaggttttccatttctgtttataatcacaatggataatctattagaaaagcagtcagtaagtattaatgccataagcaaggctgaggagcattaaatctcaagtgtccgtgactgcctactaccttcatctgtgtctytgggaaggcttgatgtgatgtcagaccactgtttctctcacccctcctacatcctactcagttcaactcccatcatactaacaaagttagaaccagtctgctagctattttctcatgcacaaaaacaactagttttgccatcttggatgaagctacaaagtttcaatttagaataagaataaaagcacacagtatgtattatacactacaaacatcactttgtatgctgggccatacctgcttttgtagacatcccaatcatgcttctctttttcttccaaaa

SEQ ID NO: 69960 - DNA, 599 bp, Chicken  19866894342723_1
  misc_feature (1)..(76): n is any nucleotide
nnnnnnnnnnnnnnnnnnnnnnnnnnnnnnnnnnnnnnnnnnnnnnnnnnnnnnnnnnnnnnnnnnnnnnnnnnnnatctgcatttgctgtattttcttgcttttattctaaccacaattatgcttctgtaataaaataggaggtgaaagaaaagatatagcaatgcctgatgccataaataatgcatgagtggctgtctgaaacagtgaagaacagttaacaaagaggccagttttgtgaaatgtagtcctgtaatgttgccaaagacaacgtctgcctagattatctctgttttgagsgctggctgtgtaaactaaagtcacctggggacacgttaaattgtcctcttgaaggtcttaaaaatgttcaaatgctttaaaccataaatcagcatcttttgatcacttattcccctactttcttggtttctgagccagtcaaatttcaaaaacttagtgaggactggaaaatgaagaacttttaagtaaggcgtaggccagaaatgatgtcttttgtgagttttgttcttccttgtgaattgacacaaaatgacagttaattagggagaatggtaaattgcaactagtggtgtcattct

SEQ ID NO: 69961 - DNA, 600 bp, Chicken  19866894342727_1
gctactaaatgtacaattactgttcctgttaccccagcaggaaaaaaggcaaacccttccagtagttataaacagctttatttggacagtgttgagttttctgtagggaggtataaggctgtaactcctgtgttaatttcagtggtctgaactcctcttcactaggcactatgcagacatgggacaactgtactgtcaccttgaagatcaggccccctgtactggggtctttgtgcacagttctggggctcatcaggctgcccgggccatgcagcaatttgtcacaccacccatgctggyagcgatgatgcagtgtgttggctccttcacttcatcctctgcttctttctgtcctgaagttccttccctatccctttgcatatcctcattcccctcccacttatctcacagtgatgcctccatagaatggggagatacagagagggaacagatgttacctgcatttctctgttttatctctctttctggaaagctgtaaarctagtatcagaaataatacctctttattttattttttccctcatgttaattattatagtttctttgcttgtgcatagagaaacaccatagattttattc

SEQ ID NO: 69962 - DNA, 600 bp, Chicken  19866894342727_2
tgaagatcaggccccctgtactggggtctttgtgcacagttctggggctcatcaggctgcccgggccatgcagcaatttgtcacaccacccatgctggyagcgatgatgcagtgtgttggctccttcacttcatcctctgcttctttctgtcctgaagttccttccctatccctttgcatatcctcattcccctcccacttatctcacagtgatgcctccatagaatggggagatacagagagggaacagatgttacctgcatttctctgttttatctctctttctggaaagctgtaaarctagtatcagaaataatacctctttattttattttttccctcatgttaattattatagtttctttgcttgtgcatagagaaacaccatagattttattctttttatttctatatctttcaatctttgagaaattaaatacatttcatttgatgtaatatattgcacattttattatagtcatattttttcattgactgttgtttctaaagtaaggaactcagtaaatttagcatctagaaacaatgacagctagcattatttgaccaagaagggctccaaccctacaaattacagctgaa

SEQ ID NO: 69963 - DNA, 526 bp, Chicken  19866894342727_3
ttaaatacatttcatttgatgtaatatattgcacattttattatagtcatattttttcattgactgttgtttctaaagtaaggaactcagtaaatttagcatctagaaacaatgacagctagcattatttgaccaagaagggctccaaccctacaaattacagctgaaaactgttgtatcaggatagatttcatatttatatataactgcctggagcaagcatgagaaaaaccatgtgctgccctattttagctactactgtattttagcacatattaaatttactacttaatcaacgtrctgcaattctacattattttgactgaactgcagctcagttttcaaaaagcagtcaatttcagtgaaataaaaaatgatgaggctccctctcctgtaagcataaaatgaccattctgcacagaaaggattgttttggagaactttatttcttttttaataaattgaaaacttggcttctggctattaccagatcaatggatacaattttaaatcctttttctatctt

SEQ ID NO: 69964 - DNA, 600 bp, Chicken  19866894342731_1
atttgtcacacaaaagtcactactggtagaataaatgggaccgttaggctggcattgctggtccaaaattggctaagtgtttttttgtttgtttgtttttttcttttgtctctacaaagccactaacattccctgaagttcttctagaaagtggtcttaaataataccgtgtatgcttaataatgttactgttaaagtagatgtgaggaatgaatagatacataattagtaaaccctattgaattacatagagactagggaaataaagagtaagaaggaagtctttgaagctcttaaacrtacagtgaaatttgctcacttgcagaggtgtgataccacttcttgctgtacacgttatatcaaagccctcatactgcaattagaggaactgacatttcttcatctacaagcaaagatcatagaggctcactgggtaattgaatcaaaataattgaaacacaaaataatgatgacagcttgatttctcagccttctctttcctctccatacctttttttagctacatttgttctggtctttttgttctatgaggacacatcacattgaggtgatggttgttctctgcagacactatatcat

SEQ ID NO: 69965 - DNA, 600 bp, Chicken  19866894342733_1
catgaagtcaaaggcagttcaaggtctcagtgttgggtaatgccaacttaaagtcccatttggcactgcatcttgtgatgagctctcctgttctcatcatctctcattgctgaggtctggaagatcatccagtcccttgggggtggcttcaggggaccagaccagcagaaagcttgcttgtatagggttcttcttttgtaggattatctccttgaacgagtccactgtgatcttcctagtgcaagtaattttgtcagtaaaaagcaagacaaaggaagaggaaaggtaacagtgtggaarctttcctactgaaagaggtgttttaatatcagaccttgacccaaagcagtggatgaccatcacgagaagcagatgactttgtcatgaggcagttgaaaaaggttgagtctgtgtttcagatggccatggttctcttatgctttcacatactggctgaggacttaagcaaacaattttccctctcattgactgtttcttcatgttaaacagcaatagtattgttttctcattgactgctgytacacagatatttagattttctctggtggggaataytgcagaagcaaaattatgaagtgc

SEQ ID NO: 69966 - DNA, 600 bp, Chicken  19866894342733_2
gcaagtaattttgtcagtaaaaagcaagacaaaggaagaggaaaggtaacagtgtggaarctttcctactgaaagaggtgttttaatatcagaccttgacccaaagcagtggatgaccatcacgagaagcagatgactttgtcatgaggcagttgaaaaaggttgagtctgtgtttcagatggccatggttctcttatgctttcacatactggctgaggacttaagcaaacaattttccctctcattgactgtttcttcatgttaaacagcaatagtattgttttctcattgactgctgytacacagatatttagattttctctggtggggaataytgcagaagcaaaattatgaagtgcagagttttaaagatggagaattattaaaaggcacaatcattttctgtacttcagtgttgcttggaatttataggcttaaraaaaaaaaaaaaaagagctttctttttaattaaagttaaagcttcattactcctaagttgataagagctcaatatgaaaatatcattgctattcagractaccagaatctattgcaagtcatttgtgaatcatctctaattaacaaggtgctctattaca

SEQ ID NO: 69967 - DNA, 600 bp, Chicken  19866894342733_3
agaggaaaggtaacagtgtggaarctttcctactgaaagaggtgttttaatatcagaccttgacccaaagcagtggatgaccatcacgagaagcagatgactttgtcatgaggcagttgaaaaaggttgagtctgtgtttcagatggccatggttctcttatgctttcacatactggctgaggacttaagcaaacaattttccctctcattgactgtttcttcatgttaaacagcaatagtattgttttctcattgactgctgytacacagatatttagattttctctggtggggaataytgcagaagcaaaattatgaagtgcagagttttaaagatggagaattattaaaaggcacaatcattttctgtacttcagtgttgcttggaatttataggcttaaraaaaaaaaaaaaaagagctttctttttaattaaagttaaagcttcattactcctaagttgataagagctcaatatgaaaatatcattgctattcagractaccagaatctattgcaagtcatttgtgaatcatctctaattaacaaggtgctctattacagagctgtctgaacaatgacaggctatttcatgcaac

SEQ ID NO: 69968 - DNA, 600 bp, Chicken  19866894342733_4
gtcatgaggcagttgaaaaaggttgagtctgtgtttcagatggccatggttctcttatgctttcacatactggctgaggacttaagcaaacaattttccctctcattgactgtttcttcatgttaaacagcaatagtattgttttctcattgactgctgytacacagatatttagattttctctggtggggaataytgcagaagcaaaattatgaagtgcagagttttaaagatggagaattattaaaaggcacaatcattttctgtacttcagtgttgcttggaatttataggcttaaraaaaaaaaaaaaaagagctttctttttaattaaagttaaagcttcattactcctaagttgataagagctcaatatgaaaatatcattgctattcagractaccagaatctattgcaagtcatttgtgaatcatctctaattaacaaggtgctctattacagagctgtctgaacaatgacaggctatttcatgcaaccctctaagctaaaatctattagctttatattatctcaattatttttagtattctggagaagctgtttatggtttttgcctgccaaagaactccaaaaagcaaag

SEQ ID NO: 69969 - DNA, 503 bp, Chicken  19866894342733_5
ccctctcattgactgtttcttcatgttaaacagcaatagtattgttttctcattgactgctgytacacagatatttagattttctctggtggggaataytgcagaagcaaaattatgaagtgcagagttttaaagatggagaattattaaaaggcacaatcattttctgtacttcagtgttgcttggaatttataggcttaaraaaaaaaaaaaaaagagctttctttttaattaaagttaaagcttcattactcctaagttgataagagctcaatatgaaaatatcattgctattcagractaccagaatctattgcaagtcatttgtgaatcatctctaattaacaaggtgctctattacagagctgtctgaacaatgacaggctatttcatgcaaccctctaagctaaaatctattagctttatattatctcaattatttttagtattctggagaagctgtttatggtttttgcctgccaaagaactccaaaaagcaaag

SEQ ID NO: 69970 - DNA, 599 bp, Chicken  19866894342745_1
  misc_feature (1)..(128): n is any nucleotide
nnnnnnnnnnnnnnnnnnnnnnnnnnnnnnnnnnnnnnnnnnnnnnnnnnnnnnnnnnnnnnnnnnnnnnnnnnnnnnnnnnnnnnnnnnnnnnnnnnnnnnnnnnnnnnnnnnnnnnnnnnnnnnnnttggagccctgtcacacttgtaaaagtcagcccattgggttttactgtatccaaagattaaaactagcagagacaacagagttggcatctttagatttcaacttctgttcagaagtagctgcatgttaaaatatacaacactgtcaataagtataccacaggtcacagttcygttgcctgaagatagttatttaccataaagatcgccaggttttctcacctgctctccagctgctgttctggaagggcatatgccttctgaaggttgtgtgacacacctatcaaacycacactgatatttcaaatgstctaaggcatctcagatgacacgggaaaagtcaatcttttattgatcatctatcaaaatatgagacaccactgatcaatctgtaggaatacagtcattcataagggaatacagtcattcatattcatataagggcaaagggttaaggaacagctgtttctcct

SEQ ID NO: 69971 - DNA, 599 bp, Chicken  19866894342745_2
  misc_feature (1)..(12): n is any nucleotide
nnnnnnnnnnnnttggagccctgtcacacttgtaaaagtcagcccattgggttttactgtatccaaagattaaaactagcagagacaacagagttggcatctttagatttcaacttctgttcagaagtagctgcatgttaaaatatacaacactgtcaataagtataccacaggtcacagttcygttgcctgaagatagttatttaccataaagatcgccaggttttctcacctgctctccagctgctgttctggaagggcatatgccttctgaaggttgtgtgacacacctatcaaacycacactgatatttcaaatgstctaaggcatctcagatgacacgggaaaagtcaatcttttattgatcatctatcaaaatatgagacaccactgatcaatctgtaggaatacagtcattcataagggaatacagtcattcatattcatataagggcaaagggttaaggaacagctgtttctcctgtaagcactgtcaagccctcatttatagtcttaaagtcatgagrcttcacctttatttttctgtatttgcctgaaattaaacttgctatctactacttacctccaaagacagataa

SEQ ID NO: 69972 - DNA, 600 bp, Chicken  19866894342745_3
ctgtcacacttgtaaaagtcagcccattgggttttactgtatccaaagattaaaactagcagagacaacagagttggcatctttagatttcaacttctgttcagaagtagctgcatgttaaaatatacaacactgtcaataagtataccacaggtcacagttcygttgcctgaagatagttatttaccataaagatcgccaggttttctcacctgctctccagctgctgttctggaagggcatatgccttctgaaggttgtgtgacacacctatcaaacycacactgatatttcaaatgstctaaggcatctcagatgacacgggaaaagtcaatcttttattgatcatctatcaaaatatgagacaccactgatcaatctgtaggaatacagtcattcataagggaatacagtcattcatattcatataagggcaaagggttaaggaacagctgtttctcctgtaagcactgtcaagccctcatttatagtcttaaagtcatgagrcttcacctttatttttctgtatttgcctgaaattaaacttgctatctactacttacctccaaagacagataactgcagtgcagtgattctaca

SEQ ID NO: 69973 - DNA, 553 bp, Chicken  19866894342745_4
ctcacctgctctccagctgctgttctggaagggcatatgccttctgaaggttgtgtgacacacctatcaaacycacactgatatttcaaatgstctaaggcatctcagatgacacgggaaaagtcaatcttttattgatcatctatcaaaatatgagacaccactgatcaatctgtaggaatacagtcattcataagggaatacagtcattcatattcatataagggcaaagggttaaggaacagctgtttctcctgtaagcactgtcaagccctcatttatagtcttaaagtcatgagrcttcacctttatttttctgtatttgcctgaaattaaacttgctatctactacttacctccaaagacagataactgcagtgcagtgattctacatggatgtatttctttccaaaacaagaaaaaatgttgggtgtgttacaccagatattgcaatttgagttgacaaaacttgattttttgctgtagtttacattatttttccttcttttggggggaaaatgggaagaggcagatagagggggaagggagataa

SEQ ID NO: 69974 - DNA, 600 bp, Chicken  19866894342751_1
tgtgtggtcctaatttccctcacagagcaatgctggggaaaatcctctgaaaaacatcagcaagaggctggttgagcagtaagggaaacccaaaagcaaaccccgacacagctgccacgcttgcaggcctccccatcccatcacatggttacagacacagctgaagtggtttatttttgataagcaggtgtgtgtgtgtgacaggctatcactgaaatagtatttcagcttgtcagagcatctcctcgaaagaagatcttgatattatgaggttaagacaatctgaatgtaaagctgagmcacaacataaaagccatgctatctgtcaaagtcatcaacagccttgtcggtgggattttgcagtggaactcccaagcccagagcctgtcagctccatctcccgcagcagataacgcatttagcagcagaactctagcacatgagacaaaaaatttaactgaccacagaaacaaacttcggattttagcctctccttttttaattggtgatgaacatgtaataaagaggaagaagaaagctgtgaaacaactgaaaaaaaaaaagattaaccctgagtcagacgaggagcttttcctgctg

SEQ ID NO: 69975 - DNA, 600 bp, Chicken  19866894342754_1
atcttaggtattggaagagaactgcaaaatgtaaagacacatgaaggtaaaaggtgggtaaaatttaccatggggctttgaatttaagtatttcaagtagtgaaaattgaccttttttaaatgactaagtgatgttcttcatattattaggtgtcttgtgaatgttgcatttttgtatgagcataaatcataaagcaaacatggagtatttttctgtgatattctttctttcttgacaaaatctccatttttctttccttccatctttaataacttcagaaaaagctttctttcccccargaaaaatggaattttatctcctcgtctgttacctcttcctatcaaatttatgctggcttatggctcagtaagattttaaatttagatgtctcacaacaccactgaatgaaaaatcaagaaaagaaaactcattctcactatttccaaggatttaaagtaatggcatacttaagcatatgtaagttatctaaggtcaattttgctatgtgttaaatataatgtatgttctctcttcatgccttgtcaaattgaatacatgcagctaaagaagtctggctgtaagtatgcagcagtaaggaa

SEQ ID NO: 69976 - DNA, 600 bp, Chicken  19866894342761_1
ataccacttcagtgctgaatttactgctgtgcctcctagcctgggcctcaccatacagcgtacatgtcaatgtgctcttcatcagagaaagctgcaacacttcttctaagacatggggagcattccctcactggccatcgtgtgtgtgtagcaagttcaattaaagctattgtcctatattaacagcagctagcattgaaacaatcagttttagcaccaaatcaatttgaccaaccactcctccccgtggcatcaccttgctctgttctcctagaacataacaccgggaatgtgtgattyttttggcaggarcactatggtggtctgaacgggctcaccatcgcctggattggggatggaaacaatgtcctccactccatcatgacaagtgctgcaaagctgggaatgcatctccgcattgcaactcccaaggtataaaagctgcatgcatggagaaaggagggtgaacttcacctttcccatctcagccagcttgatccttcccaagggcctcagctagcagtgcttgcatctcgagtatcagcttgcagaactaaggttcagaatcacgattcagatgttttgatgcaaaacaggagt

SEQ ID NO: 69977 - DNA, 600 bp, Chicken  19866894342761_2
tgctgaatttactgctgtgcctcctagcctgggcctcaccatacagcgtacatgtcaatgtgctcttcatcagagaaagctgcaacacttcttctaagacatggggagcattccctcactggccatcgtgtgtgtgtagcaagttcaattaaagctattgtcctatattaacagcagctagcattgaaacaatcagttttagcaccaaatcaatttgaccaaccactcctccccgtggcatcaccttgctctgttctcctagaacataacaccgggaatgtgtgattyttttggcaggarcactatggtggtctgaacgggctcaccatcgcctggattggggatggaaacaatgtcctccactccatcatgacaagtgctgcaaagctgggaatgcatctccgcattgcaactcccaaggtataaaagctgcatgcatggagaaaggagggtgaacttcacctttcccatctcagccagcttgatccttcccaagggcctcagctagcagtgcttgcatctcgagtatcagcttgcagaactaaggttcagaatcacgattcagatgttttgatgcaaaacaggagtaattctgactcc

SEQ ID NO: 69978 - DNA, 600 bp, Chicken  19866894342771_1
aattcaaaagctggaaaataaattcttatcacaccatgttcctactctgcccacactcactgccccacatgctagcatcatggtggggctaaataagaaaatatctctcaaagaaagacctcagaaaatcctcagccacattcccttaaacaaaggaaaagcaccaatgttgtcatgcctgaagaacttcttggatacacaactttcaaagacaaattgcatattcaaagtgacttttcttcttttttctgttcatttttattgtaatctaggcagtgcttatcataaggaggctacacrcattcctgatcctcggtttcttataatttacaaatccttgtttgttttctatatccaaaggatatagtggaaggagccattgaagctttattgatgttctgaaatatttaagtctgaatcattgtggtcgtttccaaataaaggggagaaaaagtcattttgtttatgttccagaaaaaaaatctgacatttgctttacagaatgccagtattctccttttgtcttactcttttaaagtagagatttgagaracaatatcagaagttgtcttcatacctacaacagacattttttatccc

SEQ ID NO: 69979 - DNA, 600 bp, Chicken  19866894342771_2
tcatttttattgtaatctaggcagtgcttatcataaggaggctacacrcattcctgatcctcggtttcttataatttacaaatccttgtttgttttctatatccaaaggatatagtggaaggagccattgaagctttattgatgttctgaaatatttaagtctgaatcattgtggtcgtttccaaataaaggggagaaaaagtcattttgtttatgttccagaaaaaaaatctgacatttgctttacagaatgccagtattctccttttgtcttactcttttaaagtagagatttgagaracaatatcagaagttgtcttcatacctacaacagacattttttatcccttctcagatgtccaaattgtgaccctttcaaaagggtttttccatggcttttcatgccatgtatcttattggtgatagcagcaaactttccaacagatcccactgtgtactcagcaccttcaatcacaaagatggtacaactccaagctagtatgagattaaagagcttggctgtggcacctgaattcggagtatgcaacatctcaattgcaatctctcctctgctttcatgctgtactcgggtatacctgg

SEQ ID NO: 69980 - DNA, 600 bp, Chicken  19866894342774_1
ttaggtaacatcaacaccaatatggttttttttataaggaagcagagctttatatggatttgtatcagatagaaattaaagatgctacccaggacgtgatacacgttaaaagccaggacacaccagggtacatctctactaggcaaacgataaaagtgcataaatctatgaactatgccaggtgagctacctctggaaacagcatagaaataactaagaaagcgtgtctctgtgtcctggttaattagcactgccaacagaccaaggtaattaacttatgtcctgtgatgaattaatgcygtcttgtttgcagggtccaactggatatatytgccaagcactgtgtaatactatataaatgttccagctagtccagcatgacrcatggtatagatgcatccagaatcaagctctgaaaactgatcagtctcatctttragctatttgtctatgtagttcaggaagaaaatgttaaccaactactacatcatccagatgtttcaatacattgcaggactttccaaactgcttttgaagcatcattcatgacaaactgccagaagttgaacaataggtgagacaaagtgaaatcatatttgt

SEQ ID NO: 69981 - DNA, 600 bp, Chicken  19866894342774_2
ttataaggaagcagagctttatatggatttgtatcagatagaaattaaagatgctacccaggacgtgatacacgttaaaagccaggacacaccagggtacatctctactaggcaaacgataaaagtgcataaatctatgaactatgccaggtgagctacctctggaaacagcatagaaataactaagaaagcgtgtctctgtgtcctggttaattagcactgccaacagaccaaggtaattaacttatgtcctgtgatgaattaatgcygtcttgtttgcagggtccaactggatatatytgccaagcactgtgtaatactatataaatgttccagctagtccagcatgacrcatggtatagatgcatccagaatcaagctctgaaaactgatcagtctcatctttragctatttgtctatgtagttcaggaagaaaatgttaaccaactactacatcatccagatgtttcaatacattgcaggactttccaaactgcttttgaagcatcattcatgacaaactgccagaagttgaacaataggtgagacaaagtgaaatcatatttgtttcaaaaacagttargtagtgattttggaca

SEQ ID NO: 69982 - DNA, 600 bp, Chicken  19866894342774_3
gctacccaggacgtgatacacgttaaaagccaggacacaccagggtacatctctactaggcaaacgataaaagtgcataaatctatgaactatgccaggtgagctacctctggaaacagcatagaaataactaagaaagcgtgtctctgtgtcctggttaattagcactgccaacagaccaaggtaattaacttatgtcctgtgatgaattaatgcygtcttgtttgcagggtccaactggatatatytgccaagcactgtgtaatactatataaatgttccagctagtccagcatgacrcatggtatagatgcatccagaatcaagctctgaaaactgatcagtctcatctttragctatttgtctatgtagttcaggaagaaaatgttaaccaactactacatcatccagatgtttcaatacattgcaggactttccaaactgcttttgaagcatcattcatgacaaactgccagaagttgaacaataggtgagacaaagtgaaatcatatttgtttcaaaaacagttargtagtgattttggacatagaatgatccaaactgctcaaatttcaaacacaactgctcttggaatggta

SEQ ID NO: 69983 - DNA, 600 bp, Chicken  19866894342774_4
ctaggcaaacgataaaagtgcataaatctatgaactatgccaggtgagctacctctggaaacagcatagaaataactaagaaagcgtgtctctgtgtcctggttaattagcactgccaacagaccaaggtaattaacttatgtcctgtgatgaattaatgcygtcttgtttgcagggtccaactggatatatytgccaagcactgtgtaatactatataaatgttccagctagtccagcatgacrcatggtatagatgcatccagaatcaagctctgaaaactgatcagtctcatctttragctatttgtctatgtagttcaggaagaaaatgttaaccaactactacatcatccagatgtttcaatacattgcaggactttccaaactgcttttgaagcatcattcatgacaaactgccagaagttgaacaataggtgagacaaagtgaaatcatatttgtttcaaaaacagttargtagtgattttggacatagaatgatccaaactgctcaaatttcaaacacaactgctcttggaatggtaatgagacaatcctatgagagatatcaggtagaagagacacatcccttcastgcgt

SEQ ID NO: 69984 - DNA, 600 bp, Chicken  19866894342774_5
tccaactggatatatytgccaagcactgtgtaatactatataaatgttccagctagtccagcatgacrcatggtatagatgcatccagaatcaagctctgaaaactgatcagtctcatctttragctatttgtctatgtagttcaggaagaaaatgttaaccaactactacatcatccagatgtttcaatacattgcaggactttccaaactgcttttgaagcatcattcatgacaaactgccagaagttgaacaataggtgagacaaagtgaaatcatatttgtttcaaaaacagttargtagtgattttggacatagaatgatccaaactgctcaaatttcaaacacaactgctcttggaatggtaatgagacaatcctatgagagatatcaggtagaagagacacatcccttcastgcgtagatcaggttgagtaaggccagtgatcatgaagatgattaattagacctgacaacacactgtaagtagtgaatagagtatggaatgttgtgtggagtgcttgtattggagttggatctggcaaaagctgagtcagaaaaatccagtgatcacagcatttttctacatcttgcaaagc

SEQ ID NO: 69985 - DNA, 519 bp, Chicken  19866894342774_6
ctttragctatttgtctatgtagttcaggaagaaaatgttaaccaactactacatcatccagatgtttcaatacattgcaggactttccaaactgcttttgaagcatcattcatgacaaactgccagaagttgaacaataggtgagacaaagtgaaatcatatttgtttcaaaaacagttargtagtgattttggacatagaatgatccaaactgctcaaatttcaaacacaactgctcttggaatggtaatgagacaatcctatgagagatatcaggtagaagagacacatcccttcastgcgtagatcaggttgagtaaggccagtgatcatgaagatgattaattagacctgacaacacactgtaagtagtgaatagagtatggaatgttgtgtggagtgcttgtattggagttggatctggcaaaagctgagtcagaaaaatccagtgatcacagcatttttctacatcttgcaaagcataagtctctctgaatataaacttctacagtggaaca

SEQ ID NO: 69986 - DNA, 600 bp, Chicken  19866894342778_1
cctcgcagccctggtgcttttctttttctttttaacagttttctcatccccaatggtttgtctacagatagtctatttaatggggacggcgccccatactgtcaatttttagatgcatgttatactgttaaacagtggcttttaataacagatacgtgtgaaagcgagaaggtaggttgtgtatcagaccctgcaactcactgttccttagacaccagattaaagagtctgatcctgttataagtgtagttggtctttcattttacgagactgcttgcaattctgttgttacaatttacrtgtcatatagcttaattttgcactgggacaaatgagcaaaataaaggctaatgttgtattttcaataaatgttaatttattaaaatatgttgtgatgaagtgcaacttagatattttgaacctggagtagagggaggcagccttctgtgtgtcctgagccacaaggatatgtttatctttctgtgctgttcgtgataaagctctacttaacatttacactgagatattgacatttcaaggaagggttctgcaagtgttctgaacagatctgtatgcatttgttaaaagctgagagcagaa

SEQ ID NO: 69987 - DNA, 600 bp, Chicken  19866894342778_2
acaaatgagcaaaataaaggctaatgttgtattttcaataaatgttaatttattaaaatatgttgtgatgaagtgcaacttagatattttgaacctggagtagagggaggcagccttctgtgtgtcctgagccacaaggatatgtttatctttctgtgctgttcgtgataaagctctacttaacatttacactgagatattgacatttcaaggaagggttctgcaagtgttctgaacagatctgtatgcatttgttaaaagctgagagcagaaataatgtggggtggtttataagccacscttacagagagattctatgcagtctgcaaacaaggtgccaattgtttcttgcagtccycctgagcctggagactccggcctctgctgtgacacgagactgcaagcaagcctttgctgcttgggtcaggtgggtttcctcagcacayggtctctcctgcagcgtggtaggagctggctttaaacatttccagcaagtgtgccatgaatcactggtatcactacatccaggttaggaagaacagttgaaggaattgacgcacgtggaaaagaggaaaaaaaacagcctgggagaagcagttt

SEQ ID NO: 69988 - DNA, 600 bp, Chicken  19866894342778_3
tatgttgtgatgaagtgcaacttagatattttgaacctggagtagagggaggcagccttctgtgtgtcctgagccacaaggatatgtttatctttctgtgctgttcgtgataaagctctacttaacatttacactgagatattgacatttcaaggaagggttctgcaagtgttctgaacagatctgtatgcatttgttaaaagctgagagcagaaataatgtggggtggtttataagccacscttacagagagattctatgcagtctgcaaacaaggtgccaattgtttcttgcagtccycctgagcctggagactccggcctctgctgtgacacgagactgcaagcaagcctttgctgcttgggtcaggtgggtttcctcagcacayggtctctcctgcagcgtggtaggagctggctttaaacatttccagcaagtgtgccatgaatcactggtatcactacatccaggttaggaagaacagttgaaggaattgacgcacgtggaaaagaggaaaaaaaacagcctgggagaagcagttttttatttaaaaaagcacaggtgaagagtctgtctgtgcaatggagatgcagcagtgca

SEQ ID NO: 69989 - DNA, 600 bp, Chicken  19866894342778_4
tatctttctgtgctgttcgtgataaagctctacttaacatttacactgagatattgacatttcaaggaagggttctgcaagtgttctgaacagatctgtatgcatttgttaaaagctgagagcagaaataatgtggggtggtttataagccacscttacagagagattctatgcagtctgcaaacaaggtgccaattgtttcttgcagtccycctgagcctggagactccggcctctgctgtgacacgagactgcaagcaagcctttgctgcttgggtcaggtgggtttcctcagcacayggtctctcctgcagcgtggtaggagctggctttaaacatttccagcaagtgtgccatgaatcactggtatcactacatccaggttaggaagaacagttgaaggaattgacgcacgtggaaaagaggaaaaaaaacagcctgggagaagcagttttttatttaaaaaagcacaggtgaagagtctgtctgtgcaatggagatgcagcagtgcatactgcaagaagtactacaaataataatgcaagttatggttgattcctgtgacttcaccgctgattatgtcaggcacagtagctctgt

SEQ ID NO: 69990 - DNA, 600 bp, Chicken  19866894342778_5
gaatcactggtatcactacatccaggttaggaagaacagttgaaggaattgacgcacgtggaaaagaggaaaaaaaacagcctgggagaagcagttttttatttaaaaaagcacaggtgaagagtctgtctgtgcaatggagatgcagcagtgcatactgcaagaagtactacaaataataatgcaagttatggttgattcctgtgacttcaccgctgattatgtcaggcacagtagctctgttcctctgaggtaccgcctttcattcatccatgcatagaataaatctgtgtgaacccrggctgtcctctgcaactcacagctggattgctctgcctaagttcagcacaggactgcctctgaaaatctgctccttctctcctgagagcagctgagattaatagtaacagttcaccggtgctgctgccgtctgttcctatcttcaaggaatgccaagcaattagctgcccatctgatggtataaatgcaaatggccagcttcctttgcgaaaggcaatgaagctctgccaatttacactgctaaaagaatttggccccaaatagcccagttttaatctcggtgagaagagatttataccg

SEQ ID NO: 69991 - DNA, 600 bp, Chicken  19866894342795_1
acacttctgcatttatccaccaaagtggcatgaataagagggatttgcttatctatttgtctttttcaaagagataaaagttatcctttctgaaaagttaattcctgcttataaatgctaaggttggctgcctcctttgcttttaaatgtgccccagatatatcaaaattgttttcacaagtgtaggctgacatgatgataatttaaaaaagatagtttctaattggagcaggacacatgttatagtcatgccatgttacaggggagagtaatgttttctcattcatatattatggcacrtacccttgagaaatgatattttttctcctaggttcaatttttttgcccgtatggtgtagatcttcttgcagtaaagawttggagatactctgggagtttccacagaaggcttttgtggaagagattatggtttaagatattacaygtgctccayggagagcttttaacgtctacagcaaaatatctctgttttgttttacctctgcttttcagttcaaagaaactgatataaacaaagtatacttagaaaatacattttacacattccacaaattaatgagtagaggttattactccaga

SEQ ID NO: 69992 - DNA, 600 bp, Chicken  19866894342795_2
agttatcctttctgaaaagttaattcctgcttataaatgctaaggttggctgcctcctttgcttttaaatgtgccccagatatatcaaaattgttttcacaagtgtaggctgacatgatgataatttaaaaaagatagtttctaattggagcaggacacatgttatagtcatgccatgttacaggggagagtaatgttttctcattcatatattatggcacrtacccttgagaaatgatattttttctcctaggttcaatttttttgcccgtatggtgtagatcttcttgcagtaaagawttggagatactctgggagtttccacagaaggcttttgtggaagagattatggtttaagatattacaygtgctccayggagagcttttaacgtctacagcaaaatatctctgttttgttttacctctgcttttcagttcaaagaaactgatataaacaaagtatacttagaaaatacattttacacattccacaaattaatgagtagaggttattactccagaattcaataaaaaattcacgtttttacctcagagaggtaaaaaaaaaaatgatgggcagacttttttcacctttagtta

SEQ ID NO: 69993 - DNA, 600 bp, Chicken  19866894342795_3
aatgtgccccagatatatcaaaattgttttcacaagtgtaggctgacatgatgataatttaaaaaagatagtttctaattggagcaggacacatgttatagtcatgccatgttacaggggagagtaatgttttctcattcatatattatggcacrtacccttgagaaatgatattttttctcctaggttcaatttttttgcccgtatggtgtagatcttcttgcagtaaagawttggagatactctgggagtttccacagaaggcttttgtggaagagattatggtttaagatattacaygtgctccayggagagcttttaacgtctacagcaaaatatctctgttttgttttacctctgcttttcagttcaaagaaactgatataaacaaagtatacttagaaaatacattttacacattccacaaattaatgagtagaggttattactccagaattcaataaaaaattcacgtttttacctcagagaggtaaaaaaaaaaatgatgggcagacttttttcacctttagttaaataatttgtgctaaaaagtgtctgactaaaggcgctgaacaaaataaactgacaatccaatgtagt

SEQ ID NO: 69994 - DNA, 600 bp, Chicken  19866894342795_4
cagatatatcaaaattgttttcacaagtgtaggctgacatgatgataatttaaaaaagatagtttctaattggagcaggacacatgttatagtcatgccatgttacaggggagagtaatgttttctcattcatatattatggcacrtacccttgagaaatgatattttttctcctaggttcaatttttttgcccgtatggtgtagatcttcttgcagtaaagawttggagatactctgggagtttccacagaaggcttttgtggaagagattatggtttaagatattacaygtgctccayggagagcttttaacgtctacagcaaaatatctctgttttgttttacctctgcttttcagttcaaagaaactgatataaacaaagtatacttagaaaatacattttacacattccacaaattaatgagtagaggttattactccagaattcaataaaaaattcacgtttttacctcagagaggtaaaaaaaaaaatgatgggcagacttttttcacctttagttaaataatttgtgctaaaaagtgtctgactaaaggcgctgaacaaaataaactgacaatccaatgtagtgcgagcctc

SEQ ID NO: 69995 - DNA, 600 bp, Chicken  19866894342800_1
tgctggcataggttgcctggagaggttgtggaatctcctctttgagaatctccgaaagctgcacacgcatgagcctgggcacagtgctctgggtggtccttcttgagcagagggcattggaccagttggacccagagatcccttccaaactaaacaattccaatcgaggttattctatagcagagtacagataccttcagtatgaaggtgaatttcagagtatgctatgtgtgtaaggttatagaatcatggaatggctttggttggaaggggcctttaagctcactctgttccagcttyctactatgggttgccacccactagatggggctgcctagggcctcatccagcctggtcttgaacacctgcagggatgggtcacagcttctttgggcagactgttgtagcacctcaccaccctctgagtaaagaatttcttcctaatgtttaatctaaatttcctgttttagttatttaagatttccaactgattctcttttaaaatgtttgagtctcataagtatggccaagaaggatataagmttggaggaaggaaggaaccttgcagataaaatactcttaattagaaagcagttacag

SEQ ID NO: 69996 - DNA, 600 bp, Chicken  19866894342800_2
gaatcatggaatggctttggttggaaggggcctttaagctcactctgttccagcttyctactatgggttgccacccactagatggggctgcctagggcctcatccagcctggtcttgaacacctgcagggatgggtcacagcttctttgggcagactgttgtagcacctcaccaccctctgagtaaagaatttcttcctaatgtttaatctaaatttcctgttttagttatttaagatttccaactgattctcttttaaaatgtttgagtctcataagtatggccaagaaggatataagmttggaggaaggaaggaaccttgcagataaaatactcttaattagaaagcagttacagtttgagtaatcaaaagtacttgaggataggtgcagcttttggattggttttaaggctactactcaagcagtagctctgatttgcagtgcaacttctgcatacagcttcctagctctgcttaccagaggcacgtggattctgggtgagagattactgcttaaaagtgtaaacttgactctttttttttttctagaagttcctcataaacagaaatctgtttgccagcagcctttgagcttctgt

SEQ ID NO: 69997 - DNA, 600 bp, Chicken  19866894342811_1
aggagagtttcctagatttcttccttagtggaagttccccaaggagagccaacagtgaaacgagtattcatctctgttagaaatgaacagcaattactggttctcagtgtctccaaataaaatagtagaatccgcaaggaatacagaaacattaggaaattaatactgacagaggttggcactagaacacacctgaattttaagtacttagacataaggcagcagaagattcatagtcttctccaatcctacttgtctatgactttaggaggataaaactatggagtggatctgttttaracactatttgataatcataacattcagaagaatgtaagtattatcatgtgttgatcagttaagacacgtccctggctaaaatgcaatgtattgaattgtactcagaaaattttctgtgtagagcaagcttgcgtcaatagattaaatatctcatttaaacatctttgaccattatgctttttgtgctatcacttacatctgtgcttgttggaaagactgcagagaaagcaaacacctttgacagagatatactatagagacagatgaaaacattggtatgatggatgtatgaaaaagaaa

SEQ ID NO: 69998 - DNA, 600 bp, Chicken  19866894342811_2
tagattaaatatctcatttaaacatctttgaccattatgctttttgtgctatcacttacatctgtgcttgttggaaagactgcagagaaagcaaacacctttgacagagatatactatagagacagatgaaaacattggtatgatggatgtatgaaaaagaaatgtacagctgtgtcagtactagaaagaaaataacagagaaaaaaatggcatgtatttagaaataggctatgatggacaacaaaaaaaaactggtcaacacagaggtgggtatttttgcaataagaccacaggatagrtaacttagaagatcacccttgtaacagatagcaacaacattgcacatgtgactccttaacagactgtaactgtataatatggaaaatgaggcaagggcagcaaccctcacagtatttgcaggggaagaagtaagaaacaggactttaagtatcaaagatcagacgataacaagttttcaaatcataagtgctataaaatagtttagccaaaaatcagttccttgtcaccaactaagaagaacccaagagatggcttgatagctagcaacmattatcttccatatgaaacaaatgggtaaa

SEQ ID NO: 69999 - DNA, 600 bp, Chicken  19866894342811_3
ggtatttttgcaataagaccacaggatagrtaacttagaagatcacccttgtaacagatagcaacaacattgcacatgtgactccttaacagactgtaactgtataatatggaaaatgaggcaagggcagcaaccctcacagtatttgcaggggaagaagtaagaaacaggactttaagtatcaaagatcagacgataacaagttttcaaatcataagtgctataaaatagtttagccaaaaatcagttccttgtcaccaactaagaagaacccaagagatggcttgatagctagcaacmattatcttccatatgaaacaaatgggtaaaatacataagggaatgagtgtgactgactgaaaactgttctgctcaagacaaaatctatttccataagatttccgttgagttttcttatgcttaattcttactcaacttctgtaacttctattcaggttaatatcagaaggaagcacaaaactgtaaatcaacagttatctccatgtgattgaataaattgagtttcatttatcagggaaataaaagaaaacaactattttttaagcttcagttaagtccagggttttgtttgttaaataa

SEQ ID NO: 70000 - DNA, 600 bp, Chicken  19866894342831_1
cacttgcagagacatacctgaattctcagcctgttgttatttctttcaatagaaatgactatgactgtgattttggaccaaagagtttgtttcaccagttttcaaaactagatggtcaaagatttgacagactcaaagatatcaagtttgatgattgaagttacttttctattttaagttaatagctctatgtcccgcattccgcttttttctatcacagaactccttacaaaaaggaatcttcctgcttgaacagcaagctctgtactctacagtttgaagtttttcttgaatgacttrttgtaagtagtaacatatgtgacatccagaacacaatctagctttagcatgtttattttcatttttcaaaaattcttaacttgtgcacccatttctggaatggttaagcagcacgttgtctaactaactggctgatcctagtagcttagttaatgaatgtattcaactgtgaaagttccctaggatgcacttttctaattataattactgtgacacaacaacatgtagaactcagattcaggatctagttttttttcttatcagtgatgaatagatttctggtgggacaagaattaggtc

SEQ ID NO: 70001 - DNA, 599 bp, Chicken  19866894342836_1
  misc_feature (1)..(2): n is any nucleotide
nnttttccacacaatcatgctgtaattacatgtcaccccaggtgttctcaatatgattactccctataaaactataagtgaggcatgagacagcccatacagctgcagaaaaaaaaaaaaaaataataatgaagcagcagggtttctctttttccatgtgcgcttgtttggtgctgtgtatatagtcaatctgttccctgggaatgctgagagagcccttatggtcctaggtatccagggaccgtagaagctgatctgtagtaacaggaatgtggaatccagctactttttttgacaaarttatctatcatatatttactgtaaaagccattctgaaaggcataaacccttttagagaagaatatgtcaacagaaagaaacaagaaaatatattattatttccagaaatgtcaaaaacaacattattacacacagggaaatgtatacagtttgaaaatataacttactgtatgcctgttcttaggaagatttgaactgtcatatactgtttcccaaataggtatcctaagtccaaaatatctagatacttcacagtttctctttattaacagtattttatttcattcttcaactgttat

SEQ ID NO: 70002 - DNA, 600 bp, Chicken  19866894342838_1
aaccccaaccccttctccatccctgtcctcatctccaatctccatctccatcactgaccccaaccccaccgcaatccccaaacccaaccccatccctgtccccagccccagccccctccccgcctccatcctcatccccatctcaagctgagggtcccactgggtgcccccattgcattggacactcacaccttctccttttccccaactctcccaaccaaccaaagccatcatcaaacctctgccgtgccgggcactgagcagagccctgttgggattattcgaaagcagtgtggccaygcactccccaccccgctgggccagccggcgcctgcagccagcccccccgcactgacgcttccctccggctctattttaagagcatttccaaccagtgctgccaaagtcccatcccgaaacagcccatggggaggatgctgggggcaagcggggcccgttgcgctcacacatttttttattactcctattttttcatgcacaagcccctgtttccttccttttccttcaaagaaacctcaccgctgccccccggccggagtgaagcagcaggatgtgggcagagataagggccatgcggga

SEQ ID NO: 70003 - DNA, 600 bp, Chicken  19866894342840_1
ccggggcgatgaggccaggtgtcacctgctgtgcctgtgtgctgctctgaacccgagggcggccctggctgtgtcctggggtgaaggacagctggaaaggtgagcctgagcagcagcaggaacagtaacgtttgatgggaaacatcttgtaagagttactgcagaagaagggctttgttgccatgtataaaaagcagtgtgcatctccgtaatgaactcctgctgcagcagctccaacttctggaactttcaggagtgtttgccttagtttctgattttctttcttttttttatttaatycctcccttcccttgccctgcagtgaaaataaaatagcaactccctatgaattggatgtgtactgttgctccaagataaatgggaactgatttgaggcttactggcagtgtggagctgagcgagcacagctctgtgtgtayggggatggagagctgggtgtgacacggcgtgggcacggctcgtggcactgctctctgctgctctgccatggtcccgagtgctgctggcagggagtggctggggcacagcacagagggttgcgggttcgtttcggctgctagcagccttgttggtgctgag

SEQ ID NO: 70004 - DNA, 600 bp, Chicken  19866894342840_2
aacatcttgtaagagttactgcagaagaagggctttgttgccatgtataaaaagcagtgtgcatctccgtaatgaactcctgctgcagcagctccaacttctggaactttcaggagtgtttgccttagtttctgattttctttcttttttttatttaatycctcccttcccttgccctgcagtgaaaataaaatagcaactccctatgaattggatgtgtactgttgctccaagataaatgggaactgatttgaggcttactggcagtgtggagctgagcgagcacagctctgtgtgtayggggatggagagctgggtgtgacacggcgtgggcacggctcgtggcactgctctctgctgctctgccatggtcccgagtgctgctggcagggagtggctggggcacagcacagagggttgcgggttcgtttcggctgctagcagccttgttggtgctgaggtgcatagaatgacctccagtgtcctcctgtacagcagaacgcctgcctgttcttttttgagtgaagctcacagaaggagcagggggcaatgagggtagccaggaggctgcccctggtcaccttgcagggctgcggtgtg

SEQ ID NO: 70005 - DNA, 600 bp, Chicken  19866894342856_1
gggcaggggatctttttcatgctaatgcttttttttttatatataaaaaaaaaaaaagggtggccagcagggagagggaggtgattgtctccctctactcagctcttgtgaggccccatctggactactgcatccaggcctgcggctcccagcacaagaaagatgcagagctcttggaatgggtccagaggaggaccactaagatgatcatagggctggagcacctctcttatgattaaggttgagggaactgggcttgtttagcttggagaagagaaggctctggggagacctcattgyggcctttcgatacttgaagggagtgtataaataggaagggggaacagttgtttatgagggtagatagtgataggacaaggaggaatggttttaaactgagacaggggaggtttaggttagatattaggaagaagtttttcactcagagggtggtgactcactggaacaggttgcctgaggaggctgtgcgtgccccatccctggaggcattcaaggccaggctggatgtggttctgggcagcctggtctagtggttggcgatcctgcatatagcagggaggttgaaactcaatgatcatt

SEQ ID NO: 70006 - DNA, 600 bp, Chicken  19866894342865_1
cccggtcatccagagtgccggcaaagctctactgcaaccatgactgtgtccctggtgacagggagatgcttttgcccagggcgcctctccttggcccatccgcaggctccggctcctcttcttgctcgctccttcctcccaggtccacgcaccgctttgccttcttcctcctgcagcagctcctgcaaatgaaggaaaacgcaattaggcattttggcattaagtgcagtaacaatagcaacttaaccttcagaatcccatgtcctaaaatcttaagtgaaggcacgtcttaaattatcmactggaattacacacaaatacccatcttttcactctctctagcyttcttttccttcctcttktttgatttttttttcctcttttatcttccaatactttacggaagcctacagataagaacaagtatgtttgtttatgtgggtatatagtgataggacaagggggaacggctttaaactgagaccagggatgtttaggttagatatttggaggaagtttttctgtacagaggctggtgtctcactggaacaggttgcccaaggatattgtagatgccccatccctggcatttacagccag

SEQ ID NO: 70007 - DNA, 600 bp, Chicken  19866894342865_2
tgtgtccctggtgacagggagatgcttttgcccagggcgcctctccttggcccatccgcaggctccggctcctcttcttgctcgctccttcctcccaggtccacgcaccgctttgccttcttcctcctgcagcagctcctgcaaatgaaggaaaacgcaattaggcattttggcattaagtgcagtaacaatagcaacttaaccttcagaatcccatgtcctaaaatcttaagtgaaggcacgtcttaaattatcmactggaattacacacaaatacccatcttttcactctctctagcyttcttttccttcctcttktttgatttttttttcctcttttatcttccaatactttacggaagcctacagataagaacaagtatgtttgtttatgtgggtatatagtgataggacaagggggaacggctttaaactgagaccagggatgtttaggttagatatttggaggaagtttttctgtacagaggctggtgtctcactggaacaggttgcccaaggatattgtagatgccccatccctggcatttacagccaggctggatgcggcacctggcagcctggtctagttgttggcatccc

SEQ ID NO: 70008 - DNA, 600 bp, Chicken  19866894342865_3
gagatgcttttgcccagggcgcctctccttggcccatccgcaggctccggctcctcttcttgctcgctccttcctcccaggtccacgcaccgctttgccttcttcctcctgcagcagctcctgcaaatgaaggaaaacgcaattaggcattttggcattaagtgcagtaacaatagcaacttaaccttcagaatcccatgtcctaaaatcttaagtgaaggcacgtcttaaattatcmactggaattacacacaaatacccatcttttcactctctctagcyttcttttccttcctcttktttgatttttttttcctcttttatcttccaatactttacggaagcctacagataagaacaagtatgtttgtttatgtgggtatatagtgataggacaagggggaacggctttaaactgagaccagggatgtttaggttagatatttggaggaagtttttctgtacagaggctggtgtctcactggaacaggttgcccaaggatattgtagatgccccatccctggcatttacagccaggctggatgcggcacctggcagcctggtctagttgttggcatccctgcacatagcagggggtt

SEQ ID NO: 70009 - DNA, 600 bp, Chicken  19866894342875_1
ctttgttaagagcagaactgcttttgagctctccttcagagagtcagaagctacagcacatacatcacctgaatgggctgtgtcagctgttcccttcctactctttcttgagtgttggtgtggttcacacctttcagggaccacatttttcagccccctggcttgctcttagcacatggctataaaggtgctgatggtgggtctccttgtattgactgcttgctagttcggctcatctatacaatctgggttttgggataggtttgtcagctcagcttggaataaatttgtctgcagcakctatacctgcaacaggtgtccttctggccttcacaaatgactgacagagactgacagaaactgcgtcccctcctattttctatgcgttgcactccacagttaggctcatctagtgaccctgtagtggagctagtgtctgtgctttgtgcttcctcttctaagagagcacatgagaaggctcagattctcactagagaggtttttgtttgcagcctttttttctggaaatagtggtctcagaacggagcaggtggggttgcttctgaattgaagcattctgatgcatttagggaaaagctc

SEQ ID NO: 70010 - DNA, 600 bp, Chicken  19866894342885_1
tacaagccagctgttcccataccattgccccccaacctccttctttcagctgtctcagcctctaaacacttgcagttttacagcacatgatgaaagaaattttgttttaatgccaactgttcgtgcttagatagttaatgacagagaaattgagttacttttaagtgttagatattctttcttgtatgtactctatgaaaaacagctttattttcttcccttcctcccccagaatttaattcaaggcttgtttattttcaacagagaagggaggaaaccactttatctccttttataagratttttctactcagttgaaagttaagggtcttttaagcagaaaagaattgaccattataagaagagagaagtagctacactgggaagctttgacacattaaagaaattgaaaagctatgggaaatttgtttattattattattattattgctgttgtagttgttcataatgatcatcttagatgttgagtgtcagtgaaaagagaaaatgatgtttggaattgatagtcccattaatgcatttgtcctgaatttgaaataacactttttctttcataatgtgatagtgtttcttcaaaca

SEQ ID NO: 70011 - DNA, 600 bp, Chicken  19866894342885_2
tggctgaagggttgacttactctggtttatgccaatgtttagcaactctgaggaataaaactgaaaaagtgcttgatcttcatgaattcaaagctctgtgaaaatgatttgtgaagaccatgattcttcataacagaaaagtctctaaaaacatttgtacgtttctttttgattttgttcttttcagaaggaagtgggtaaatccaccttatattaactggtgctgtttctgtgagcatgactatggttgagcatgtgtggtggtcactgatgcccgtcttttgcagggaatggctctgygggacaagttagttgtttttatatgtcagtcattcctaggaaattccctagcagtttggaaagtctgtccttgttactctctcaactaggctgatataaaatgcaacaatttccttggcgtatgcattgtcatcttttgcaggtttcattgaaggtctttctctcttagtgagctcattaacctgtaagcatttcagtaattaagaaacactgactactacttcggcttgtactgcactgttctttagttctctgcaaaatgtgtcaatctctatcaccatttcacaggcttatataacc

SEQ ID NO: 70012 - DNA, 600 bp, Chicken  19866894342892_1
tttttcctaacatccaacctaaagctccccgggtacaacttcagggcattctctctcatcctatcaagtccaaagcataaaattattaattactcattcattatatatcatctggtaatgaatgatgaagggttatgtttgactgcatgtaacatactaaccaaattccacagtgtttagttgcaagtagcagcatagagtcctgtgataaggaaagctactggcattttgagttaacagcaatatgatgtggggcaggaaaaacatgcaaagtaaagagcagcagcagagaaacatcartggtcatgcagaawgcatgggtttaacccaccagcacctgcatggtcattctcaaccacaaaggtcacaggatggcagtgaataacttgtttgctagtaacagagcagaaaacatttatcataaataatgcagagatgtaagggaaaaaggaaatgtgccacagcatgattttcacctggggaaataaacatgacctcgcctaaacttcatctcatctccaattgctaagtgttgtcctggaattcactgagaacctcttgcatttaccaaggatatctagtagcttgagcagagcaggg

SEQ ID NO: 70013 - DNA, 600 bp, Chicken  19866894342892_2
caacctaaagctccccgggtacaacttcagggcattctctctcatcctatcaagtccaaagcataaaattattaattactcattcattatatatcatctggtaatgaatgatgaagggttatgtttgactgcatgtaacatactaaccaaattccacagtgtttagttgcaagtagcagcatagagtcctgtgataaggaaagctactggcattttgagttaacagcaatatgatgtggggcaggaaaaacatgcaaagtaaagagcagcagcagagaaacatcartggtcatgcagaawgcatgggtttaacccaccagcacctgcatggtcattctcaaccacaaaggtcacaggatggcagtgaataacttgtttgctagtaacagagcagaaaacatttatcataaataatgcagagatgtaagggaaaaaggaaatgtgccacagcatgattttcacctggggaaataaacatgacctcgcctaaacttcatctcatctccaattgctaagtgttgtcctggaattcactgagaacctcttgcatttaccaaggatatctagtagcttgagcagagcagggagagaccagcacgt

SEQ ID NO: 70014 - DNA, 600 bp, Chicken  19866894342893_1
attttaagaatttaataggttactctggatttcttgtatgtcctagaagtttggatgctaccatgtaggctgccgtatgttcttaaatctcaggtgtctgtcagtccagctggaactggtgtgcaaatgaaacctcatagatccagcatatatctcagcaaatcgtgggaggagttggatcctcccaaggtactaaaaaccctcaacttgggcacggaaacaccctgagctgttggactggtttgttgttgatggacaggagcacctgcagtctgcttatattcacgctttgttatttcyctaaactctgtccgtttgtgcagacagtctgagtgtgtttacatggataaggtaaaagtggtcatatgtaatatatttcggaattcaggctttttgaagcygtgcatttgaatacgtatacctgggctctgatcttagaaacagagtgtaaattcagggcaccttttggatctcagtgcagtttttctaggtttacatcttagcaacagagattagaatgggaactgctcagtgggacttcattttcttctctctccctctctccctctttttttccttttatcytgaatactcatgttt

SEQ ID NO: 70015 - DNA, 600 bp, Chicken  19866894342893_2
cagtccagctggaactggtgtgcaaatgaaacctcatagatccagcatatatctcagcaaatcgtgggaggagttggatcctcccaaggtactaaaaaccctcaacttgggcacggaaacaccctgagctgttggactggtttgttgttgatggacaggagcacctgcagtctgcttatattcacgctttgttatttcyctaaactctgtccgtttgtgcagacagtctgagtgtgtttacatggataaggtaaaagtggtcatatgtaatatatttcggaattcaggctttttgaagcygtgcatttgaatacgtatacctgggctctgatcttagaaacagagtgtaaattcagggcaccttttggatctcagtgcagtttttctaggtttacatcttagcaacagagattagaatgggaactgctcagtgggacttcattttcttctctctccctctctccctctttttttccttttatcytgaatactcatgtttaccagggaaaccaagaaggctgaacttgtatagtgtgtgctgaaaacaagcytttttgtgctcgatgtatattgtacaaattgtttgagaacaatttatcc

SEQ ID NO: 70016 - DNA, 565 bp, Chicken  19866894342893_3
cgctttgttatttcyctaaactctgtccgtttgtgcagacagtctgagtgtgtttacatggataaggtaaaagtggtcatatgtaatatatttcggaattcaggctttttgaagcygtgcatttgaatacgtatacctgggctctgatcttagaaacagagtgtaaattcagggcaccttttggatctcagtgcagtttttctaggtttacatcttagcaacagagattagaatgggaactgctcagtgggacttcattttcttctctctccctctctccctctttttttccttttatcytgaatactcatgtttaccagggaaaccaagaaggctgaacttgtatagtgtgtgctgaaaacaagcytttttgtgctcgatgtatattgtacaaattgtttgagaacaatttatccataggctgtcactgcagtgctttcaaggacagtttcatcctgggttatcagctgctgtaagtgccagttgcacaaaggcatatttaaccttgtgcactcagtttgccttacagtcagattttgcattcatgaacagataaaatttgctt

SEQ ID NO: 70017 - DNA, 498 bp, Chicken  19866894342893_4
taaaagtggtcatatgtaatatatttcggaattcaggctttttgaagcygtgcatttgaatacgtatacctgggctctgatcttagaaacagagtgtaaattcagggcaccttttggatctcagtgcagtttttctaggtttacatcttagcaacagagattagaatgggaactgctcagtgggacttcattttcttctctctccctctctccctctttttttccttttatcytgaatactcatgtttaccagggaaaccaagaaggctgaacttgtatagtgtgtgctgaaaacaagcytttttgtgctcgatgtatattgtacaaattgtttgagaacaatttatccataggctgtcactgcagtgctttcaaggacagtttcatcctgggttatcagctgctgtaagtgccagttgcacaaaggcatatttaaccttgtgcactcagtttgccttacagtcagattttgcattcatgaacagataaaatttgctt

SEQ ID NO: 70018 - DNA, 600 bp, Chicken  19866894342895_1
caaatgctttatcataagcaaataaattatgttctaccagttcagaataagttcacattgccagagttcatgcaatttggcacacagtttcatgaatacgttagttatatcaatttggaaaacttgaaaagctgagtaattatgtgttgattctctaaatgttttgttatcactgagcgtggtagagcagttgttatctttggaaagtcttaagactgtagagccattcaacagcttagcttgtattttcattgaagaatgttactaccagagtaatactagactccgtacaatttcacractgccagcagatgagaaggtaaattactaactgtctttaaaaaaaatacctatttgtattcccttgttttgaactttttggagtctgtgcagaggttaatgaaaaaaattaagtattcagggcttgaactcctttcttgtatggatgaatggatgtaatgttttctacaggaatccagcattaggcaattcagcttaatatttcattctgtggtattggagactaagcacacatctgaggtgaagtacatacacaatatacattcaggagaagcattcaagtttaatagattctgttca

SEQ ID NO: 70019 - DNA, 600 bp, Chicken  19866894342902_1
gctcataccactggcctcagcccattcattcagcctatccagatcaagtagaggaggaggagggaccgacaaggatgctactggtaagggttagcagttctgcaggttagcaatagttattctctagaagttcctccaaaagggcaggatggtcaggaagaaaggaggcaaggaacagccgggtagaaggctggccaaagagatgctgagaacagatggtacctgaagagcactgcctgaaaagactgcggggctttgtggaagaaaccggctgtacttacagcaatgaccggaggtgayggcagcctgagaagggtggtagagcactgacagccmcacggggaagggatagtacagtgtaagtgagaaattaatggtgaggccaagggagaaaagagggactaggcatacaaaggaatgggtatatggtagttgatgtaacccgatcaattatgggaagtttaacggctaaattaaytaacaactgttgacaaatgactacatcaacacacactttcagatgcaggactaggaaattagacatcaaattctcctacttttctccttcccagttcttgggtctttttaaagtacttattt

SEQ ID NO: 70020 - DNA, 600 bp, Chicken  19866894342902_2
atccagatcaagtagaggaggaggagggaccgacaaggatgctactggtaagggttagcagttctgcaggttagcaatagttattctctagaagttcctccaaaagggcaggatggtcaggaagaaaggaggcaaggaacagccgggtagaaggctggccaaagagatgctgagaacagatggtacctgaagagcactgcctgaaaagactgcggggctttgtggaagaaaccggctgtacttacagcaatgaccggaggtgayggcagcctgagaagggtggtagagcactgacagccmcacggggaagggatagtacagtgtaagtgagaaattaatggtgaggccaagggagaaaagagggactaggcatacaaaggaatgggtatatggtagttgatgtaacccgatcaattatgggaagtttaacggctaaattaaytaacaactgttgacaaatgactacatcaacacacactttcagatgcaggactaggaaattagacatcaaattctcctacttttctccttcccagttcttgggtctttttaaagtacttattttcctcctgaaagttgattcaaatagttaccattcag

SEQ ID NO: 70021 - DNA, 600 bp, Chicken  19866894342902_3
ccgggtagaaggctggccaaagagatgctgagaacagatggtacctgaagagcactgcctgaaaagactgcggggctttgtggaagaaaccggctgtacttacagcaatgaccggaggtgayggcagcctgagaagggtggtagagcactgacagccmcacggggaagggatagtacagtgtaagtgagaaattaatggtgaggccaagggagaaaagagggactaggcatacaaaggaatgggtatatggtagttgatgtaacccgatcaattatgggaagtttaacggctaaattaaytaacaactgttgacaaatgactacatcaacacacactttcagatgcaggactaggaaattagacatcaaattctcctacttttctccttcccagttcttgggtctttttaaagtacttattttcctcctgaaagttgattcaaatagttaccattcagtgagaatcagctgccactgagatttaagtgcagaggtctgtttcagcttagcaaaaggatatataactggaaccacaatatgaagaaaggaaaaaacaaggtatgcacctctaccttcctaattatccayggcgaacttttc

SEQ ID NO: 70022 - DNA, 600 bp, Chicken  19866894342902_4
ggctaaattaaytaacaactgttgacaaatgactacatcaacacacactttcagatgcaggactaggaaattagacatcaaattctcctacttttctccttcccagttcttgggtctttttaaagtacttattttcctcctgaaagttgattcaaatagttaccattcagtgagaatcagctgccactgagatttaagtgcagaggtctgtttcagcttagcaaaaggatatataactggaaccacaatatgaagaaaggaaaaaacaaggtatgcacctctaccttcctaattatccayggcgaacttttcttctaacatactgttcatgtttacacaagggagctgagagcagccartgtgtactgatgcactggacatattaatttctgatgcactaagggactttcctacaaataattctcatatatattcctctcttttccccctctatttttcttgtaaaaggatgaataaaataacataaaccaaaacaacacacgccaaagtacccaggaatgctggcagaaaccagcaagatatgaaaagtcacaaaagagttcacatggaaaaaaatcaaatttcatttttgggaccgga

SEQ ID NO: 70023 - DNA, 600 bp, Chicken  19866894342902_5
ggactaggaaattagacatcaaattctcctacttttctccttcccagttcttgggtctttttaaagtacttattttcctcctgaaagttgattcaaatagttaccattcagtgagaatcagctgccactgagatttaagtgcagaggtctgtttcagcttagcaaaaggatatataactggaaccacaatatgaagaaaggaaaaaacaaggtatgcacctctaccttcctaattatccayggcgaacttttcttctaacatactgttcatgtttacacaagggagctgagagcagccartgtgtactgatgcactggacatattaatttctgatgcactaagggactttcctacaaataattctcatatatattcctctcttttccccctctatttttcttgtaaaaggatgaataaaataacataaaccaaaacaacacacgccaaagtacccaggaatgctggcagaaaccagcaagatatgaaaagtcacaaaagagttcacatggaaaaaaatcaaatttcatttttgggaccggattaatgacacaattttctagtcaagactgtgtaatttacatttaatttttctgtgtatg

SEQ ID NO: 70024 - DNA, 600 bp, Chicken  19866894342917_1
ctttcatccctccctctagaagcccatatgcagagtgaaaaacaaacattatgtctcatcttaatcttaacaattgcactattaattacaattctgtcaaagaaagaaaagaaaaatacgtatataaaaaataaaattaaaactcaaaagggaagtcagccaaccagacatcagaaaatcagatgatatttggagaatcttgtggtgagagaactcatccatagtcaaaatcaaattatactgctccacaaactagcagctgtgtagcttcaaacctgctgtacaactgtacaagtgcaytgataagacagttttactttcctaagaaatgatgaaacccattttaattaagttggctaacagaaaatacagaagtatgtgtaaaagtacgtgatctcwctaaagccttttaaaacctaggaagatcttcaggtcaatttcttaaataagtcagtagtgtagagaaaaacattggttgatactgaagaatcctaaactgaaattaaatgttacagttctatttttttcaggattagtcagcgtgtgcttttgaggcgtgcacagtctaaacaagctgatgttcaacagaacctgttaaaa

SEQ ID NO: 70025 - DNA, 600 bp, Chicken  19866894342917_2
aagaaagaaaagaaaaatacgtatataaaaaataaaattaaaactcaaaagggaagtcagccaaccagacatcagaaaatcagatgatatttggagaatcttgtggtgagagaactcatccatagtcaaaatcaaattatactgctccacaaactagcagctgtgtagcttcaaacctgctgtacaactgtacaagtgcaytgataagacagttttactttcctaagaaatgatgaaacccattttaattaagttggctaacagaaaatacagaagtatgtgtaaaagtacgtgatctcwctaaagccttttaaaacctaggaagatcttcaggtcaatttcttaaataagtcagtagtgtagagaaaaacattggttgatactgaagaatcctaaactgaaattaaatgttacagttctatttttttcaggattagtcagcgtgtgcttttgaggcgtgcacagtctaaacaagctgatgttcaacagaacctgttaaaacataaaatcaaattgatacagagcttcactcgttctttgggaaagaatgagttaaagcttatcccttcagagtattttgctgttgatacgatgagatga

SEQ ID NO: 70026 - DNA, 600 bp, Chicken  19866894342925_1
atggttgtgtcatggttgacagcaagaaacaatgcagtagctcatactcaggatgggaatgattggctttttgctgtatcctctcatgaatcttctctatttcagagagaatagcattttattgagtcataaatggaatgaatataagaacctccttcttaaaattgaaggcaatcatctcagagaaaccagactgtctgccaggaacttcaaacacagatctcatcccttcttagaggaaggtctactttgcaggctccagtcatacacccttctcactctctctatcagtatttgttwaaaaaaaammaaaaaaacaacacaacaatatcttatagctgtcaatatcatacctaccttgtaaggatctcagttgctgaagttttctgccttcgtagtcttctgtgatttttccaacttgctgatagtagttttctaccagtctattgatattattgctggtcccatatacactttctacagcagcttctaccagtttctcctgtattacatattacaaagaacaattcattttctaagtaaaaagctaggtgttttgatctgtctaaaactgaagacctaaattaatattgtatacac

SEQ ID NO: 70027 - DNA, 600 bp, Chicken  19866894342925_2
tcatggttgacagcaagaaacaatgcagtagctcatactcaggatgggaatgattggctttttgctgtatcctctcatgaatcttctctatttcagagagaatagcattttattgagtcataaatggaatgaatataagaacctccttcttaaaattgaaggcaatcatctcagagaaaccagactgtctgccaggaacttcaaacacagatctcatcccttcttagaggaaggtctactttgcaggctccagtcatacacccttctcactctctctatcagtatttgttaaaaaaaaammaaaaaaacaacacaacaatatcttatagctgtcaatatcatacctaccttgtaaggatctcagttgctgaagttttctgccttcgtagtcttctgtgatttttccaacttgctgatagtagttttctaccagtctattgatattattgctggtcccatatacactttctacagcagcttctaccagtttctcctgtattacatattacaaagaacaattcattttctaagtaaaaagctaggtgttttgatctgtctaaaactgaagacctaaattaatattgtatacacatacaagat

SEQ ID NO: 70028 - DNA, 600 bp, Chicken  19866894342925_3
catggttgacagcaagaaacaatgcagtagctcatactcaggatgggaatgattggctttttgctgtatcctctcatgaatcttctctatttcagagagaatagcattttattgagtcataaatggaatgaatataagaacctccttcttaaaattgaaggcaatcatctcagagaaaccagactgtctgccaggaacttcaaacacagatctcatcccttcttagaggaaggtctactttgcaggctccagtcatacacccttctcactctctctatcagtatttgttaaaaaaaaammaaaaaaacaacacaacaatatcttatagctgtcaatatcatacctaccttgtaaggatctcagttgctgaagttttctgccttcgtagtcttctgtgatttttccaacttgctgatagtagttttctaccagtctattgatattattgctggtcccatatacactttctacagcagcttctaccagtttctcctgtattacatattacaaagaacaattcattttctaagtaaaaagctaggtgttttgatctgtctaaaactgaagacctaaattaatattgtatacacatacaagatt

SEQ ID NO: 70029 - DNA, 538 bp, Chicken  19866894342934_1
tgttttcactaacatctgtagagtcttaagagtcaacaaggagctgggtcagttctgttcatagaactaaagtcctgatttacagtcaagtcccagatagtgctttaatgtacctaaagcagaaaccagtgtctaccttactagattccacttaggcaaaacacttctggtcatataccactgaatcctgaccccactcagaacaacacacacttaagttctctcttgagcagtcttaaaactcttctttctctcattacaaacagacattgataggagacacagtaaggctttaatttkaaaggcaacattattttaatattacctggcacatcctagtttagaacaggacttaaacagcaggagctgttaaggatgattatttccaagttttatgttgacctcagactgattttttccgcagagttaccaattaagtgatctgtagatgaagacagaatgaagcaacttcgctttaccacacacaatcagaaatcaatggaatttgcacaaaagcagcaacattctttctgggaaa

SEQ ID NO: 70030 - DNA, 599 bp, Chicken  19866894342939_1
  misc_feature (1)..(71): n is any nucleotide
nnnnnnnnnnnnnnnnnnnnnnnnnnnnnnnnnnnnnnnnnnnnnnnnnnnnnnnnnnnnnnnnnnnnnnntcgctcagtgttttggcacttttttagttggagttttctaaagagatgtttatgcataactgtatagaaatttatagctaaattttcaaaatcatgatagatctacttaacgtgtaaatacaatttcatatgcacaaaaatataagaggggtaacttggactcatttgatctaaagtagtagttcatagaaaaaatgggtttgtctaattatacatttaacttaccaartacgatttatatgcataactttatggaaatgtgagctgtctgttttgattttacctaagttacataaaatgcataaaatacataaaaagtgcagattacatgcagattgttcaatcgcgtaatgatttactataagagcagaaataatcaaaacattcaatgcaaaatatactgcattgcctcatctgatacatattaaaatacagaacataaaaagcataaataataggctaaaattataacatgtacaagtttattagtctgtcacagagagctataatattaaactaaggggcata

SEQ ID NO: 70031 - DNA, 600 bp, Chicken  19866894342943_1
cctcaggatgaagaaaaagaaaactaaggtaagatatgtataacttccttcttgtagtactggaagagggaacaggaaggaccccaaaagattcttgatggggcagcgaggcatatagcaagattagtaatcaatgccaaagtgcaaaggttgtatgtaccatgtcctaggcgagtggctcagagcacatagcagagatcaggggaatgtaaatgcttcagagtcagatagaaaagtgctttcaaacatatctgtcttaacagtttttagctggcctcatttattgatatagctgagagygtaaatcttcagttatgttcttagtactaatgaaataataaggaatgaaaccactgtacagtaaattgggtttaatgaagagttagattctctgtgcttctcacagagagtaggagcaaaatgaatgcaaagcattgtgtccattgccagcactggtgcctcatttattctgactgcctctaaatatgagtgatagattttccaacaagtaaagtgatggtgggctgtatctaattccatgcttatggagccctggttccttctgtatagcttgcaacatgaattgcgtgcaaccagtga

SEQ ID NO: 70032 - DNA, 600 bp, Chicken  19866894342951_1
atctcccctcctttagtttaaaatcatttccacttgtgctttcacacacacagaccctgctaaagagtctgtccccttctttcctgtagctcccctatagttactgaagggcctctatcaggtcacctcggagccttctcttcttcaggctgaacagccccagtcctctctgcctgtcctcgaaggagaggtgttccattccttggatcatatttgtggccctcctctgaacactttccaacagctccatgtctccacactccacgtctggatgtagttctccaggtgaggcttcaccascacagagtagagggacaggatcacttcagtagaggctgtgttctgaatggtatgagatatctgttgtccattactgcttctgttttcaatttatagaatagcacaatgtttctggttaaaaaattagtgatggaaggtatatcattggatagttcatattttaatccatgtccacactgcttaacgcagtatgaagcaaagaaagccaggaaaatagatttgaaaaaaccctatgtaggtaccataatccataataatgtaagcactccacccaagctagggtaatgtcactctgaaaag

SEQ ID NO: 70033 - DNA, 600 bp, Chicken  19866894342958_1
gcagctccttccagcttcacaccatcagcaaacttgttgagggcacattctgtcccttcactgatgaagatattaagatcatacccactgctgaagacgatgagcattgccaaggcagcacagaccctgccttcagtccccatctaaaaaacagcccccagtcactgtggggcagtgtcagggctgggctggctcccatcacatggctggattcaaccctcggctttcacagacacaagctatgccccaaatccagcagcaaataggatgagtttcatccttggtagcacacacagacaygcatcccatcctgagacggttcaggggagggggtgctgccacggtgctaatctgcagcatcatgtgcataatggagaaacagtgcggctttggagtgagcaggcagatgctgggggagragaaggcctctgttgaggctggtctggcagctgcctccgaggcacagaggtttggggacctgaaagtgcaaggatgagcagatccttcctgggaatggggctgggatggggagcaacacattgacgcctgtcaaatcatagcagccagcaaaggtggattttccccctgcttctgtggtct

SEQ ID NO: 70034 - DNA, 600 bp, Chicken  19866894342958_2
acagaccctgccttcagtccccatctaaaaaacagcccccagtcactgtggggcagtgtcagggctgggctggctcccatcacatggctggattcaaccctcggctttcacagacacaagctatgccccaaatccagcagcaaataggatgagtttcatccttggtagcacacacagacaygcatcccatcctgagacggttcaggggagggggtgctgccacggtgctaatctgcagcatcatgtgcataatggagaaacagtgcggctttggagtgagcaggcagatgctgggggagragaaggcctctgttgaggctggtctggcagctgcctccgaggcacagaggtttggggacctgaaagtgcaaggatgagcagatccttcctgggaatggggctgggatggggagcaacacattgacgcctgtcaaatcatagcagccagcaaaggtggattttccccctgcttctgtggtctgggcttaaatgggaccattggaggagtttgggacgcagacagggttggtaccctcatcttgtgcatgccggctgtcaacagagggaggagtgggtgtccttggagggctcagtgagggg

SEQ ID NO: 70035 - DNA, 600 bp, Chicken  19866894342960_1
tagcattaaattgtcataataaaacatgttaacactggagacaatgacatgtccatgatgcacttaccttagcaccatgctttaataggaaactggcacaagcagcatgaccacctaggcaggcttcgtggagaggagacacatggtctgcagtaacaagattaacactcactcccctgatgaaagaaaataccattacagccaactacaaaacaaacaaacaacaatagcaacaacccaccagtcttccataacgattcttaaaagatttgtttaatcacaattttctcaactgcttgragttactaggtgagcactgtaagaggctgtggtgcttcagctggaacagatactagcacatcgtaccagaggtcaagccttctacacatcactaatcaatacagaaagctgtggtcagcaaactgcctaatggaacaatgcagacatccttctaggcactttgctttattttacagctactacatcacagctatcaaactccaaaataaaaaaagattaaaaaatgtttttagagctctcaacagggtcgtgcctcctcttgtttacatgtctgctcacgtcttttgacctccagtctgt

SEQ ID NO: 70036 - DNA, 600 bp, Chicken  19866894342963_1
aggcagtattgcaatttatgtattattgtttataggctttaagaatccatacagcaaacattagggtttataaagcggaggtacataatgtatagaaaaggtaaaagtagcaaagtttttgtttctactcaaaaatatctttaaaacttaaaggactaggagcttaggagacagaatcaaagagagggaaaagggacaaagacaatctccttggaagacactattggagtagtaactcttccctgactgatgagaggcagtcggaaagatttagcccagctgaaggtggagtgaaaaagyctgacgttgaatgggttttctgagctgttccaggatgatactgtgatttatgcctactatgagaactaatgagcataggaaaatcggggtgaaagtagagaatactgttcaactagaattaatggcactttcagtattatgagagattatgaaaaccatgaattctaaagagtttgagacatttatatgctgttacatgccttcactttcattcctcacttccacagaactaagagaagatatgctggcacgaaatttgtataataaggtgataaactgggctgttattttgaagagtgg

SEQ ID NO: 70037 - DNA, 600 bp, Chicken  19866894342964_1
taagtgatagacagtcttcccttttaggcaggcagtgtagtctgttagattcatctctataaccagagatgctatgaaatgtgatgtggatttattggcaattgctattctgtacaaagggtctgatttatcacggtgtttaggtgtcaaggatctcattgatttcagctgagaaaatagatcccaagtatctttgggttataagagcctagcacctcatggagacacttaattcccagtgagcacactcacaggggaatgatgacaattcaccgctactactggggcatgactgttctkggctatttgcgttgcttaataagactttagtagctgcaggagcccaggaagaccctgaagctcatacagcctcatctgagcccaatctgtcctctctcccttgcacgctaatgccattctacctctgcaccaggaaatagtccatcttcaagacaatgcacacactgcagaagctgctggctaaaactcagttgtgactgtcctaagtttactgctgagtttggtcaacgcacaaagatgccttgaactggctccttgcctggcacccagttggttcttcctgttgaatacatttgggaa

SEQ ID NO: 70038 - DNA, 600 bp, Chicken  19866894342967_1
tgaccctatgtcctgaatgaatactggagtatgtatggaactgcactgctgattttattttttctgatggaatttagcttgtaagcactaaagccactctgaagctggcatcaatgacaggcaaatggagatggttggcaggaaggtggcagagatgcatcgaaactatgttattgctgaaaccaaagcaaagtaattgcattttgagaaaacacgtagattttgcagcactttgaagaacagatttataatagaaaaaggcttcacagcttacctggtaggacctttctagacacaaaygttttaagtacttttttacaatttgtgatgaaaatgttcatgttattgtcttcctatcctctcttgttctctgcagtgttcatcataacctgcttttatagcacctcaaacttcaaacccsagccttaaaacctctctgtcctgaccaaatgaaggaaaggagaagcataaaatgtgatgcatgatctacgatgtgagagcacagtggtaataatccttctggtttgtggcatttggaactgaattgatacagacttcccttgatttaccaccaaattagcaatgaaaaacagctagcac

SEQ ID NO: 70039 - DNA, 600 bp, Chicken  19866894342967_2
caaatggagatggttggcaggaaggtggcagagatgcatcgaaactatgttattgctgaaaccaaagcaaagtaattgcattttgagaaaacacgtagattttgcagcactttgaagaacagatttataatagaaaaaggcttcacagcttacctggtaggacctttctagacacaaaygttttaagtacttttttacaatttgtgatgaaaatgttcatgttattgtcttcctatcctctcttgttctctgcagtgttcatcataacctgcttttatagcacctcaaacttcaaacccsagccttaaaacctctctgtcctgaccaaatgaaggaaaggagaagcataaaatgtgatgcatgatctacgatgtgagagcacagtggtaataatccttctggtttgtggcatttggaactgaattgatacagacttcccttgatttaccaccaaattagcaatgaaaaacagctagcacatactttgcatttatctctgcttttttaccaggcttcttctccagaggtaacttgcatgccatcttgaactttatgaagacatacatttaaaatctgaaactttaagtgatttgtcattta

SEQ ID NO: 70040 - DNA, 600 bp, Chicken  19866894342974_1
gtcccctttggggatattactgtctggcagtagcaaggcacactctttagaattgtaattctgatgaaccctgttttgtggtgttggcctgaacatccttacagaccagacacagcttggctgtgttgcttagcaatgcatttctgccagagcattgtacagacctgaggtcttttaaagttttctaggcccctttcttgctgctacaattgaaacttgagcaaagaaaacaagatagctttcaagaatctctccaaatccaaatatttgactttttcctgaggtttatgggaagagaaygcaaaggtagtttggaaggtttccaggcaggagatgggaaaggtaggaatgagtgytcctttgtgcagtgatgctgctgcgatttaaagcttgtaagctgagtggtgttggtaaaactcacctgtcagacctctgwaaatgggttctggcctagagatgctttgggtgctcagtkgggcagagtcagaggagcacagccactgccctcacagagtgagcttctgtagagtgcttttaccataatgaactgcttggtgtcaggactgctgcwtwcaaaaaaaaacasacaaatcaaaaacc

SEQ ID NO: 70041 - DNA, 600 bp, Chicken  19866894342974_10
ggtttatgggaagagaaygcaaaggtagtttggaaggtttccaggcaggagatgggaaaggtaggaatgagtgytcctttgtgcagtgatgctgctgcgatttaaagcttgtaagctgagtggtgttggtaaaactcacctgtcagacctctgwaaatgggttctggcctagagatgctttgggtgctcagtkgggcagagtcagaggagcacagccactgccctcacagagtgagcttctgtagagtgcttttaccataatgaactgcttggtgtcaggactgctgcwtwcaaaaaaayacasacaaatcaaaaacccaccttgaaatagaacttgtctggctctgcaaggaaacagcagcagctataggaaactgctattccatctgctgaagaaagcctgtgtgtggaattgattgccaatacttgtttgcctgagtggtgtgcgtggggaggtgcaggtttagggcagcaattccttgcagatctgaggaccaccagctctgacctgtgagtgctgctaaacctgaccctattgtgtctcagctgaagggtctgaccaaaggttatctcaagggcgtataactgaagttcagcttc

SEQ ID NO: 70042 - DNA, 599 bp, Chicken  19866894342974_11
tatgggaagagaaygcaaaggtagtttggaaggtttccaggcaggagatgggaaaggtaggaatgagtgytcctttgtgcagtgatgctgctgcgatttaaagcttgtaagctgagtggtgttggtaaaactcacctgtcagacctctgwaaatgggttctggcctagagatgctttgggtgctcagtkgggcagagtcagaggagcacagccactgccctcacagagtgagcttctgtagagtgcttttaccataatgaactgcttggtgtcaggactgctgcwtwcaaaaaaaaacasacaaatcaaaaacccaccttgaaatagaacttgtctggctctgcaaggaaacagcagcagctataggaaactgctattccatctgctgaagaaagcctgtgtgtggaattgattgccaatacttgtttgcctgagtggtgtgcgtggggaggtgcaggtttagggcagcaattccttgcagatctgaggaccaccagctctgacctgtgagtgctgctaaacctgaccctattgtgtctcagctgaagggtctgaccaaaggttatctcaagggcgtataactgaagttcagcttccag

SEQ ID NO: 70043 - DNA, 600 bp, Chicken  19866894342974_2
aattctgatgaaccctgttttgtggtgttggcctgaacatccttacagaccagacacagcttggctgtgttgcttagcaatgcatttctgccagagcattgtacagacctgaggtcttttaaagttttctaggcccctttcttgctgctacaattgaaacttgagcaaagaaaacaagatagctttcaagaatctctccaaatccaaatatttgactttttcctgaggtttatgggaagagaaygcaaaggtagtttggaaggtttccaggcaggagatgggaaaggtaggaatgagtgytcctttgtgcagtgatgctgctgcgatttaaagcttgtaagctgagtggtgttggtaaaactcacctgtcagacctctgwaaatgggttctggcctagagatgctttgggtgctcagtkgggcagagtcagaggagcacagccactgccctcacagagtgagcttctgtagagtgcttttaccataatgaactgcttggtgtcaggactgctgcwtwcaaaaaaaaacasacaaatcaaaaacccaccttgaaatagaacttgtctggctctgcaaggaaacagcagcagctataggaaa

SEQ ID NO: 70044 - DNA, 600 bp, Chicken  19866894342974_3
tgcatttctgccagagcattgtacagacctgaggtcttttaaagttttctaggcccctttcttgctgctacaattgaaacttgagcaaagaaaacaagatagctttcaagaatctctccaaatccaaatatttgactttttcctgaggtttatgggaagagaaygcaaaggtagtttggaaggtttccaggcaggagatgggaaaggtaggaatgagtgytcctttgtgcagtgatgctgctgcgatttaaagcttgtaagctgagtggtgttggtaaaactcacctgtcagacctctgwaaatgggttctggcctagagatgctttgggtgctcagtkgggcagagtcagaggagcacagccactgccctcacagagtgagcttctgtagagtgcttttaccataatgaactgcttggtgtcaggactgctgcwtwcaaaaaaaaacasacaaatcaaaaacccaccttgaaatagaacttgtctggctctgcaaggaaacagcagcagctataggaaactgctattccatctgctgaagaaagcctgtgtgtggaattgattgccaatacttgtttgcctgagtggtgtgcgtgggga

SEQ ID NO: 70045 - DNA, 600 bp, Chicken  19866894342974_4
taaagttttctaggcccctttcttgctgctacaattgaaacttgagcaaagaaaacaagatagctttcaagaatctctccaaatccaaatatttgactttttcctgaggtttatgggaagagaaygcaaaggtagtttggaaggtttccaggcaggagatgggaaaggtaggaatgagtgytcctttgtgcagtgatgctgctgcgatttaaagcttgtaagctgagtggtgttggtaaaactcacctgtcagacctctgwaaatgggttctggcctagagatgctttgggtgctcagtkgggcagagtcagaggagcacagccactgccctcacagagtgagcttctgtagagtgcttttaccataatgaactgcttggtgtcaggactgctgcwtwcaaaaaaaaacasacaaatcaaaaacccaccttgaaatagaacttgtctggctctgcaaggaaacagcagcagctataggaaactgctattccatctgctgaagaaagcctgtgtgtggaattgattgccaatacttgtttgcctgagtggtgtgcgtggggaggtgcaggtttagggcagcaattccttgcagatctgagg

SEQ ID NO: 70046 - DNA, 600 bp, Chicken  19866894342974_5
ctttttcctgaggtttatgggaagagaaygcaaaggtagtttggaaggtttccaggcaggagatgggaaaggtaggaatgagtgytcctttgtgcagtgatgctgctgcgatttaaagcttgtaagctgagtggtgttggtaaaactcacctgtcagacctctgwaaatgggttctggcctagagatgctttgggtgctcagtkgggcagagtcagaggagcacagccactgccctcacagagtgagcttctgtagagtgcttttaccataatgaactgcttggtgtcaggactgctgcwtwcaaaaaaaaacasacaaatcaaaaacccaccttgaaatagaacttgtctggctctgcaaggaaacagcagcagctataggaaactgctattccatctgctgaagaaagcctgtgtgtggaattgattgccaatacttgtttgcctgagtggtgtgcgtggggaggtgcaggtttagggcagcaattccttgcagatctgaggaccaccagctctgacctgtgagtgctgctaaacctgaccctattgtgtctcagctgaagggtctgaccaaaggttatctcaagggcgtataactga

SEQ ID NO: 70047 - DNA, 600 bp, Chicken  19866894342974_6
ttttcctgaggtttatgggaagagaaygcaaaggtagtttggaaggtttccaggcaggagatgggaaaggtaggaatgagtgytcctttgtgcagtgatgctgctgcgatttaaagcttgtaagctgagtggtgttggtaaaactcacctgtcagacctctgwaaatgggttctggcctagagatgctttgggtgctcagtkgggcagagtcagaggagcacagccactgccctcacagagtgagcttctgtagagtgcttttaccataatgaactgcttggtgtcaggactgctgcwtwcaaaaaaaaacasacaaatcaaaaacccaccttgaaatagaacttgtctggctctgcaaggaaacagcagcagctataggaaactgctattccatctgctgaagaaagcctgtgtgtggaattgattgccaatacttgtttgcctgagtggtgtgcgtggggaggtgcaggtttagggcagcaattccttgcagatctgaggaccaccagctctgacctgtgagtgctgctaaacctgaccctattgtgtctcagctgaagggtctgaccaaaggttatctcaagggcgtataactgaag

SEQ ID NO: 70048 - DNA, 600 bp, Chicken  19866894342974_7
ggtttatgggaagagaaygcaaaggtagtttggaaggtttccaggcaggagatgggaaaggtaggaatgagtgytcctttgtgcagtgatgctgctgcgatttaaagcttgtaagctgagtggtgttggtaaaactcacctgtcagacctctgwaaatgggttctggcctagagatgctttgggtgctcagtkgggcagagtcagaggagcacagccactgccctcacagagtgagcttctgtagagtgcttttaccataatgaactgcttggtgtcaggactgctgcwtwcaaaaaaawacasacaaatcaaaaacccaccttgaaatagaacttgtctggctctgcaaggaaacagcagcagctataggaaactgctattccatctgctgaagaaagcctgtgtgtggaattgattgccaatacttgtttgcctgagtggtgtgcgtggggaggtgcaggtttagggcagcaattccttgcagatctgaggaccaccagctctgacctgtgagtgctgctaaacctgaccctattgtgtctcagctgaagggtctgaccaaaggttatctcaagggcgtataactgaagttcagcttc

SEQ ID NO: 70049 - DNA, 600 bp, Chicken  19866894342974_8; identical to SEQ ID NO: 70048

SEQ ID NO: 70050 - DNA, 600 bp, Chicken  19866894342974_9; identical to SEQ ID NO: 70048

SEQ ID NO: 70051 - DNA, 600 bp, Chicken  19866894342978_1
tttcatggaatcacaaagtggttgacacttgaagagacctctgcatccatctgattcaacgcctgctccagcagggttacccacagcagggtgatcatgtctggctggtttttggagatctctaaggagactccacaacttctctgggcaatctttaataggtctctgccaccacaaggtaacaaaatgctctctgaaattcagacagaacctcctatgtttcaattattctcttttgcctcttttcctgtcactgggcaccactggaaagagcctggctgtgtcctcattgcaatttcytttcagatatttgtatacattgatcaaatgccctcaacctttctcctctctwggctaagaagtctctcagcctttcgtcagagtagacatacttcaatcccttcatcatctgtgtggactttccttagactctctacagtatatctgtgtttcttttgcactgcgggcccagaaggtttgaactggacrcagtactccagatgtggcctcacaaatactgtgcagagtggaaggatcacttctttgacctgcttgcagaattttgcctaatacagccaagaatatcactagccttcttag

SEQ ID NO: 70052 - DNA, 600 bp, Chicken  19866894342978_2
gattcaacgcctgctccagcagggttacccacagcagggtgatcatgtctggctggtttttggagatctctaaggagactccacaacttctctgggcaatctttaataggtctctgccaccacaaggtaacaaaatgctctctgaaattcagacagaacctcctatgtttcaattattctcttttgcctcttttcctgtcactgggcaccactggaaagagcctggctgtgtcctcattgcaatttcytttcagatatttgtatacattgatcaaatgccctcaacctttctcctctctwggctaagaagtctctcagcctttcgtcagagtagacatacttcaatcccttcatcatctgtgtggactttccttagactctctacagtatatctgtgtttcttttgcactgcgggcccagaaggtttgaactggacrcagtactccagatgtggcctcacaaatactgtgcagagtggaaggatcacttctttgacctgcttgcagaattttgcctaatacagccaagaatatcactagccttcttagaagcaagggcacattcctggctagtgtttatcttggtgtccaccaggacccc

SEQ ID NO: 70053 - DNA, 600 bp, Chicken  19866894342978_3
ctctctgaaattcagacagaacctcctatgtttcaattattctcttttgcctcttttcctgtcactgggcaccactggaaagagcctggctgtgtcctcattgcaatttcytttcagatatttgtatacattgatcaaatgccctcaacctttctcctctctwggctaagaagtctctcagcctttcgtcagagtagacatacttcaatcccttcatcatctgtgtggactttccttagactctctacagtatatctgtgtttcttttgcactgcgggcccagaaggtttgaactggacrcagtactccagatgtggcctcacaaatactgtgcagagtggaaggatcacttctttgacctgcttgcagaattttgcctaatacagccaagaatatcactagccttcttagaagcaagggcacattcctggctagtgtttatcttggtgtccaccaggacccccaggtctttttctgcatagctggttccaactgggtgccccccagaatgttcagctgcctgatgctattcctcccccagggcatggctttgcacttttctttgagcttcatgatagaatcacagaacagcttgggttg

SEQ ID NO: 70054 - DNA, 599 bp, Chicken  19866894342981_1
  misc_feature (1)..(83): n is any nucleotide
nnnnnnnnnnnnnnnnnnnnnnnnnnnnnnnnnnnnnnnnnnnnnnnnnnnnnnnnnnnnnnnnnnnnnnnnnnnnnnnnnnnaaaatttcactattagattactgaacaattttttttccccccctatcttttagttcacatcatgggagataaagaaaggaaggccatgcttacttacagttgccacaacctctaccctcccagacatgtccagtaggcttaaagtgtccaagtcaatttccaaaaatacatccagcattttgtatgtttacttacaagctcagatgaggctatcttkgttatacttggttaagactggatgcatttgatagctgttaaacatgcagttgtcacaacatgaaggccttgtggcacagtaagctggaggtacaaatcttttcatttggtcttatgcatcactgtgtgcagtctgttaatacctgagtactgctttctaatttcaagtaatgaagttgaatttcagaagacgcttggcacatcatctgtctttaaaacaaggtgctgaataatctagtcaaaagagctaggtgatgtgcagtgaaatacttaaagctcttctgaatcattatgcaagca

SEQ ID NO: 70055 - DNA, 600 bp, Chicken  19866894342983_1
aagttaatgctgataaaatgttgacaaataaccattcagagtagtctgatgtgggtcagtgcatttttcctctataaatattacgtgggcaattgatgtaaaatctttgagaaacgcttctcttgaatactcttgaggaagtagttaggaattggtttggtttggttttgtttgctagtggatatgggcattcattgctgggatgaaaggaaagcagtgagagccactgaaacactgtgagaagctgttactgcagttgagcagcatgttcacatggtccagcttgttaattgcatttgyatttatcgccacagtcatttaaagaacaaaaaaatcattttggtcgtgagttgatttgtttatagcttttcattccagtgtgctcattaggtggagcacatggatgccttgaggaactcggtggtgattcatctacttgaactgcatttattttgtaagaaaaacattaaaatgactgtgaattatctaactgttgttctttattgtgcactcctgtattttatgcagttgaacctaaagatacagtagagtgaagaccttcattaggacgggggttgtaacagacggcaaggacacaat

SEQ ID NO: 70056 - DNA, 600 bp, Chicken  19866894342995_1
aaaaagctccaagagacaaacggaaataattccggtgcagcaagtgcctactcggtctcttgcagcctcgatgcgtttctaaatcttcttttttttttctctcctttctctccgctttttttatggtagcaactcggagatcgttattctccgattccctttcagggctgcagttcgcttcctcgcttgtttgttggttcgtttggaagcttttcgtctttgcatcctcacatcagccgtggggcagcgcgggcagacgggcgcgctcggtttgacggtctccgtttatacctctatgcrcggggatatcagaaaccccgaagcaacacggggacaccgcaccccgttggcatcacctcggctttgacactccgctccttctgccgtgggctcagcgagaggtaattccgcctctaaattcgtttgacgttttattgctcgtggagggagagaagtgccgggaaagtgcatctctctattaaagaaataaacaagaaaatacgtaaaataaaatgagaaaccccaccaaaacaaaaccaaacagaagctaagacccgctcagccctgcgggaagcaggtagtgagaaatacaacccaaaa

SEQ ID NO: 70057 - DNA, 599 bp, Chicken  19866894342996_1
  misc_feature (1)..(156): n is any nucleotide
nnnnnnnnnnnnnnnnnnnnnnnnnnnnnnnnnnnnnnnnnnnnnnnnnnnnnnnnnnnnnnnnnnnnnnnnnnnnnnnnnnnnnnnnnnnnnnnnnnnnnnnnnnnnnnnnnnnnnnnnnnnnnnnnnnnnnnnnnnnnnnnnnnnnnnnnnnnnccgagtgatgtgctttcctggaaaccaggagaagtgcacctacctcaaatggagctcctccatctgctgcattggtcttcgtgtgcagcctgggctggccgcacgcatggagcgtctccgtgcggcactgcagcctaacaatgrgcggccgctgtgttgctttggagaataattagcttcccttggaatcaaaacttacgaggtgagtctcggacagcaaggtgtgcctctactgcaccttacctatgctggtaatgaaagattggtttattctttttctctcttttaaaaccagcagggacagtacttgttttgatatctgctggaatacacgcatgttcctctctctgtgcaccttctggtctcagcttcaccaccatttcattcttaaccaatggtatatggccccatgctcctgatgagtgtgaggcataaatatttaa

SEQ ID NO: 70058 - DNA, 600 bp, Chicken  19866894342996_2
tacctatgctggtaatgaaagattggtttattctttttctctcttttaaaaccagcagggacagtacttgttttgatatctgctggaatacacgcatgttcctctctctgtgcaccttctggtctcagcttcaccaccatttcattcttaaccaatggtatatggccccatgctcctgatgagtgtgaggcataaatatttaaagcttaggaaaaactaatttcttggctttctgggaggaggaaaatcctttttttttttttttttttttattagaaaaaaagaaaaaaaacggggggraaaaaaaagcaaatgtttggggagggggaaaaagtaggaaacctgtgaaacagtaaacccagtcctcaagaggtttatgcatgtgtgtatgttgccaggataatgatttcactataaattatagttctttaagtcttccgtgctaattgtgttcattagtttctttaagtttgtatattgagcaaattacatgagtctgttactttaaatgtgcttgtagacagtatatggcagtttgcagctggagcattgcaaagaaatatttccagccttatgcagatcagacgctaataaaattac

SEQ ID NO: 70059 - DNA, 600 bp, Chicken  19866894343003_1
tgtgtattctgttcatacatttgtctagcagctcagttcttcagttcctattcatccataaaagcagctgaatgttaataggccattgcagctctaagtattaacacgtccttctccaaagggtttatgtcagacttcagaagcctgagtgacccttgggctttgttggaaaacaatacaaacctcttaatgtggctgtattgagatattactgcctttcagatgactaggcagggccttagtgtaatgatggaaggatgtgtttttcctctgcttgttaacagaggtagagaaaaagcracgaaggactttaagcaatactttttcagtacagttattttgtttgttcccatctttgctacaaatataaaattgtactctggtgaacgaatattaaaagccttgggtatacacatttttcttctgtgactaatggtgtaagcttgccagtctatacttggtttcctcttcagatacagagatatagttcaatggagtacagtgggagagttagtttctttcttcatcctcacatttaatttttgccaatacagcttctcttctgcataacacagtcctgggagtgaaataacttccttt

SEQ ID NO: 70060 - DNA, 600 bp, Chicken  19866894343028_1
atgccttcagaacaggaaagtggtgctcctttcagtgaaatcagtattccctttagaccttatcagatgggaaagcatggtgacaccagacacctagggggtttaaggacgtcttcagtgtcagtcagtcaggactgtgtagacaagcaaaactgatggccttacacctctccattgcaggtaactcatcagtgaatttttccacactagttttgtcagttttgttccccagaaaagcagaggatggacatgttcagtaaggcaaaggctgcctgtgggcactgagaccacagagggagkggtatggtggtcacagggcaggtgctggggccttgaaggccagttctgcagttgtgtgcccactggttgtcccaagtgcagaggttgctctgtcagtgggtgctgcttttcttcttttcagctctctgctttatggtggtttttagcactgaggcagagctgtgaggatgccctcagctcatagcaagcacttggcagtccagtttaagtttgggcagtgtaaagaggtccatctgaaatgaccagcatatagaatcatagaatcaccaargttggaaaagacccacaggatcacccagt

SEQ ID NO: 70061 - DNA, 600 bp, Chicken  19866894343028_2
cctgtgggcactgagaccacagagggagkggtatggtggtcacagggcaggtgctggggccttgaaggccagttctgcagttgtgtgcccactggttgtcccaagtgcagaggttgctctgtcagtgggtgctgcttttcttcttttcagctctctgctttatggtggtttttagcactgaggcagagctgtgaggatgccctcagctcatagcaagcacttggcagtccagtttaagtttgggcagtgtaaagaggtccatctgaaatgaccagcatatagaatcatagaatcaccaargttggaaaagacccacaggatcacccagtccaaccatccacccatcaccaatagttcttactaaaccatgtccctcaacacaatgtccaaacactccttgaacacctccagggttggtgactccaccacctccctgggcagcccattccagtgcctgaccactctttcagagaagtagtaaaatatagagggatctaagactcctatccctgtgagaagatgagaaaaaaaaaatgagagaacctcagaatgaatgtataggatgagatctgaggggagaaaaaggaaaaatagtgtttc

SEQ ID NO: 70062 - DNA, 600 bp, Chicken  19866894343028_3
tacataaatcgcctagtcagaaagtcacaattaagacaaagttattgacagtaacattaatggatcttctttcaagtttttgccatgcgccatcctagtaatattagataaaacagttacaagtgaacatggttaaaaattataaattacttcaataatatttagtaataatttattaaaaatgaaaaaatactcttagaacagtgagggggaactactagggcaagaagcatttgcaaaggaaaaggagagaaccatgtttttgggctatctgtgctgctgttaccgcttagctggacraggagcacgctgaaatggcactcaagtggtacatggcagtgaaagtgatgaactctggaaaatggcatccagagcacaggacaagaccctggagctgtttacttctctgtgtccttctcctacctttcctgtggtttcaatccctcgaatggtgcagagatacacaattgcccagcaagctgctaagcacaaaatcagccaccactgtaatgtgccactgtcggtgacgtcgggtgttatgttcaaagttttcctgtaccaaaaataattgactgcagtactttcataacattcttcgtt

SEQ ID NO: 70063 - DNA, 599 bp, Chicken  19866894343029_1
  misc_feature (1)..(150): n is any nucleotide
nnnnnnnnnnnnnnnnnnnnnnnnnnnnnnnnnnnnnnnnnnnnnnnnnnnnnnnnnnnnnnnnnnnnnnnnnnnnnnnnnnnnnnnnnnnnnnnnnnnnnnnnnnnnnnnnnnnnnnnnnnnnnnnnnnnnnnnnnnnnnnnnnnnnnncttaagtctatatgtatttacataaaaatgctctttaaagtctgcattttgaagagctgcatcttatctattctatttggaacaaactgcaagtaacaaacaaaggattacaaaccaaagcacaaaaatcttcctccaaaaagtactatraatctaattgttcacatcactctcaattttcacacaacctattaagacataaatgctgctgcygtgtgattctctcgttcagaattcatacagttttagtcactaaaacacgatgatttgtaaaacaaagtacttcgcacatcctaacaactataaatggaagtgtaatgccaaaaccatcataataaaatttgtatcttacaaagtaaaaggtaccaataactataggatgtctgtacatgtgtttgtttttcttattttgttttcatacatcacccaggggcctctgttatttgaaa

SEQ ID NO: 70064 - DNA, 599 bp, Chicken  19866894343029_2
  misc_feature (1)..(87): n is any nucleotide
nnnnnnnnnnnnnnnnnnnnnnnnnnnnnnnnnnnnnnnnnnnnnnnnnnnnnnnnnnnnnnnnnnnnnnnnnnnnnnnnnnnnnnncttaagtctatatgtatttacataaaaatgctctttaaagtctgcattttgaagagctgcatcttatctattctatttggaacaaactgcaagtaacaaacaaaggattacaaaccaaagcacaaaaatcttcctccaaaaagtactatraatctaattgttcacatcactctcaattttcacacaacctattaagacataaatgctgctgcygtgtgattctctcgttcagaattcatacagttttagtcactaaaacacgatgatttgtaaaacaaagtacttcgcacatcctaacaactataaatggaagtgtaatgccaaaaccatcataataaaatttgtatcttacaaagtaaaaggtaccaataactataggatgtctgtacatgtgtttgtttttcttattttgttttcatacatcacccaggggcctctgttatttgaaattttcacaataaaaaaagcaaacaaattgcttttgctgtcagtaagagctgtttagtaattga

SEQ ID NO: 70065 - DNA, 600 bp, Chicken  19866894343039_1
aaactatcgatacaaattaggatcttttggtttccactgcctcctattctgtagttttgactaaaatctattctgtttcacttcaaatacattcagaaccacgttccagacatcattttcttggttgtttatttcagccacaacatttgactttttgaaggtttatttcaagatacgagcgttcagattcttccattaatgttttggctttccacaccagcaaaatgtcacccaccacctccatccttttgatgatcagatgacaagactgaagggctgtaaccagtgtggctgcacatmcacaatgccctctgctcccacacctggtgatgtgaaagcaaagctgacagtagtgctctgtcatcaaaatagtsctctccaacaggtgatctccatctatattgtctactagaccaattttactaaaatcagtttgaggttttatctattaatccctgtggaagtagcattcacaaaaccttatcaggaatttccctaagttcttctcttccataatgtcttcatggcaatatgtggcttaatagccagaactaatttttctttctgtcaataacaststcattgctgtccatatttgat

SEQ ID NO: 70066 - DNA, 600 bp, Chicken  19866894343039_2
gtttcacttcaaatacattcagaaccacgttccagacatcattttcttggttgtttatttcagccacaacatttgactttttgaaggtttatttcaagatacgagcgttcagattcttccattaatgttttggctttccacaccagcaaaatgtcacccaccacctccatccttttgatgatcagatgacaagactgaagggctgtaaccagtgtggctgcacatmcacaatgccctctgctcccacacctggtgatgtgaaagcaaagctgacagtagtgctctgtcatcaaaatagtsctctccaacaggtgatctccatctatattgtctactagaccaattttactaaaatcagtttgaggttttatctattaatccctgtggaagtagcattcacaaaaccttatcaggaatttccctaagttcttctcttccataatgtcttcatggcaatatgtggcttaatagccagaactaatttttctttctgtcaataacaststcattgctgtccatatttgataaattcctctacaacttcatattacactcaaatttcaggcagttcacgtatgggactatctttcactatatcac

SEQ ID NO: 70067 - DNA, 600 bp, Chicken  19866894343039_3
tgtaaccagtgtggctgcacatmcacaatgccctctgctcccacacctggtgatgtgaaagcaaagctgacagtagtgctctgtcatcaaaatagtsctctccaacaggtgatctccatctatattgtctactagaccaattttactaaaatcagtttgaggttttatctattaatccctgtggaagtagcattcacaaaaccttatcaggaatttccctaagttcttctcttccataatgtcttcatggcaatatgtggcttaatagccagaactaatttttctttctgtcaataacaststcattgctgtccatatttgataaattcctctacaacttcatattacactcaaatttcaggcagttcacgtatgggactatctttcactatatcacaatatcaggccatggtactaactgccactcttggcatgcagttcatccaagsaaaaagagtattatgttactcctacagacacatatgctctgtgggacaatttctcatttcagccacaacrctataaatctggaataattccacctcaaagctgctcttctgcaccagaacatggtgtattatatctactgtttgctgttaa

SEQ ID NO: 70068 - DNA, 600 bp, Chicken  19866894343039_4
taaccagtgtggctgcacatmcacaatgccctctgctcccacacctggtgatgtgaaagcaaagctgacagtagtgctctgtcatcaaaatagtsctctccaacaggtgatctccatctatattgtctactagaccaattttactaaaatcagtttgaggttttatctattaatccctgtggaagtagcattcacaaaaccttatcaggaatttccctaagttcttctcttccataatgtcttcatggcaatatgtggcttaatagccagaactaatttttctttctgtcaataacaststcattgctgtccatatttgataaattcctctacaacttcatattacactcaaatttcaggcagttcacgtatgggactatctttcactatatcacaatatcaggccatggtactaactgccactcttggcatgcagttcatccaagsaaaaagagtattatgttactcctacagacacatatgctctgtgggacaatttctcatttcagccacaacrctataaatctggaataattccacctcaaagctgctcttctgcaccagaacatggtgtattatatctactgtttgctgttaaac

SEQ ID NO: 70069 - DNA, 570 bp, Chicken  19866894343039_5
aatcagtttgaggttttatctattaatccctgtggaagtagcattcacaaaaccttatcaggaatttccctaagttcttctcttccataatgtcttcatggcaatatgtggcttaatagccagaactaatttttctttctgtcaataacaststcattgctgtccatatttgataaattcctctacaacttcatattacactcaaatttcaggcagttcacgtatgggactatctttcactatatcacaatatcaggccatggtactaactgccactcttggcatgcagttcatccaagsaaaaagagtattatgttactcctacagacacatatgctctgtgggacaatttctcatttcagccacaacrctataaatctggaataattccacctcaaagctgctcttctgcaccagaacatggtgtattatatctactgtttgctgttaaacatgggggatgacttttccatttatacataatttctttcagctttagcattatttcaaactttgcatgccaagctagctatgattcaaatggcacaaaaataaatctcttcctctttt

SEQ ID NO: 70070 - DNA, 500 bp, Chicken  19866894343039_6
taagttcttctcttccataatgtcttcatggcaatatgtggcttaatagccagaactaatttttctttctgtcaataacaststcattgctgtccatatttgataaattcctctacaacttcatattacactcaaatttcaggcagttcacgtatgggactatctttcactatatcacaatatcaggccatggtactaactgccactcttggcatgcagttcatccaagsaaaaagagtattatgttactcctacagacacatatgctctgtgggacaatttctcatttcagccacaacrctataaatctggaataattccacctcaaagctgctcttctgcaccagaacatggtgtattatatctactgtttgctgttaaacatgggggatgacttttccatttatacataatttctttcagctttagcattatttcaaactttgcatgccaagctagctatgattcaaatggcacaaaaataaatctcttcctctttt

SEQ ID NO: 70071 - DNA, 599 bp, Chicken  19866894343045_1
  misc_feature (1)..(13): n is any nucleotide
nnnnnnnnnnnnnctgcactgtatttcttggctcccctaagccacacatagaacccttggctggatggggcaggggttctctgacccaattctttggtgcatttaaccctgctgctacctccatacaaacaggctgcaagatttggagcagcttccagtgggcaccacgaaaggtctggactgtgtggctacggggcatgtagcagtgtcatgttccatgcaaacaatagcattaatgaggtacatcctggggaagggccgtgaagtacacacaagccagctgtgcctctaatttcataytgaattgtcatatggctcttttgtgtcataatgtattccacagggctttttcataaaagtctaagaagggaakagcaacccctgctgtgtgtgtacgttgctgtgttctttaaatcatttttcttgtcccctaaacgtttctttttctttcattcgcttttcttttgtagcagataaaaaaatgatggcctcagcatccacagcaggaaaccagcagctgtattcacagggaagcccatttcagccaggacattcaggaaagagtttcaggtactgtagtcctgatcctgagcacatca

SEQ ID NO: 70072 - DNA, 600 bp, Chicken  19866894343045_2
gggttctctgacccaattctttggtgcatttaaccctgctgctacctccatacaaacaggctgcaagatttggagcagcttccagtgggcaccacgaaaggtctggactgtgtggctacggggcatgtagcagtgtcatgttccatgcaaacaatagcattaatgaggtacatcctggggaagggccgtgaagtacacacaagccagctgtgcctctaatttcataytgaattgtcatatggctcttttgtgtcataatgtattccacagggctttttcataaaagtctaagaagggaakagcaacccctgctgtgtgtgtacgttgctgtgttctttaaatcatttttcttgtcccctaaacgtttctttttctttcattcgcttttcttttgtagcagataaaaaaatgatggcctcagcatccacagcaggaaaccagcagctgtattcacagggaagcccatttcagccaggacattcaggaaagagtttcaggtactgtagtcctgatcctgagcacatcaactaatgactgagtgcaagctttttccttcaatttgctggaaaccacactaacctatagcaaaaaggctttctt

SEQ ID NO: 70073 - DNA, 599 bp, Chicken  19866894343049_1
  misc_feature (1)..(172): n is any nucleotide
nnnnnnnnnnnnnnnnnnnnnnnnnnnnnnnnnnnnnnnnnnnnnnnnnnnnnnnnnnnnnnnnnnnnnnnnnnnnnnnnnnnnnnnnnnnnnnnnnnnnnnnnnnnnnnnnnnnnnnnnnnnnnnnnnnnnnnnnnnnnnnnnnnnnnnnnnnnnnnnnnnnnnnnnnnnnaccacatcctttctcttgtattctttccattagttcacttttctctccttttaaaatctgtaggtttaggaactccttgtcccaaagcataagataacataagaaagagaaataaataacctactagytttwtacctgtgaattgtatacaaaatgtgtttagagaaaaagtggcaagatcatgaggtatttttcatgtacatgtggacttctagtttaaaattattctaccactagcataataaaaaagactaaaatgtcattccatttttatgggtcataaaacagaacagcatctatccaccatgtcccttctcactaattacagttcattatcaaacctatgagaagaattaatgcctcttctaatagctgtcttgtgttgaatattgagtcacagaatactgaagttggaagagctgttcaa

SEQ ID NO: 70074 - DNA, 599 bp, Chicken  19866894343049_2
  misc_feature (1)..(168): n is any nucleotide
nnnnnnnnnnnnnnnnnnnnnnnnnnnnnnnnnnnnnnnnnnnnnnnnnnnnnnnnnnnnnnnnnnnnnnnnnnnnnnnnnnnnnnnnnnnnnnnnnnnnnnnnnnnnnnnnnnnnnnnnnnnnnnnnnnnnnnnnnnnnnnnnnnnnnnnnnnnnnnnnnnnnnnnnaccacatcctttctcttgtattctttccattagttcacttttctctccttttaaaatctgtaggtttaggaactccttgtcccaaagcataagataacataagaaagagaaataaataacctactagytttwtacctgtgaattgtatacaaaatgtgtttagagaaaaagtggcaagatcatgaggtatttttcatgtacatgtggacttctagtttaaaattattctaccactagcataataaaaaagactaaaatgtcattccatttttatgggtcataaaacagaacagcatctatccaccatgtcccttctcactaattacagttcattatcaaacctatgagaagaattaatgcctcttctaatagctgtcttgtgttgaatattgagtcacagaatactgaagttggaagagctgttcaagtct

SEQ ID NO: 70075 - DNA, 599 bp, Chicken  19866894343055_1
  misc_feature (1)..(251): n is any nucleotide
nnnnnnnnnnnnnnnnnnnnnnnnnnnnnnnnnnnnnnnnnnnnnnnnnnnnnnnnnnnnnnnnnnnnnnnnnnnnnnnnnnnnnnnnnnnnnnnnnnnnnnnnnnnnnnnnnnnnnnnnnnnnnnnnnnnnnnnnnnnnnnnnnnnnnnnnnnnnnnnnnnnnnnnnnnnnnnnnnnnnnnnnnnnnnnnnnnnnnnnnnnnnnnnnnnnnnnnnnnnnnnnnnnnnnnnnnnnnnnnnnnnnnnnnnnngtccctggggaacaaaggagagaggaaatccaaggcaatgctttcaaaygtgatgagctctggggatgtcgtgcagggttccctgtagctcttctgctgttttcctaacagggtcccaaaggtgccagtggggaacctggccttcctggtccgactggaattcgtggagagtctggtgacagggtaaggagaagatgatgtttgtaacwccwtcctgtttgggagatgtgaaattagagctgatgtcatcacagcaagcggatgcagtctcagtagcaggctggcacatggggtgtccccccttgtcctgctgctgctgcatgcccaagctgggccccaagcagrcag

SEQ ID NO: 70076 - DNA, 599 bp, Chicken  19866894343055_2
  misc_feature (1)..(91): n is any nucleotide
nnnnnnnnnnnnnnnnnnnnnnnnnnnnnnnnnnnnnnnnnnnnnnnnnnnnnnnnnnnnnnnnnnnnnnnnnnnnnnnnnnnnnnnnnnngtccctggggaacaaaggagagaggaaatccaaggcaatgctttcaaaygtgatgagctctggggatgtcgtgcagggttccctgtagctcttctgctgttttcctaacagggtcccaaaggtgccagtggggaacctggccttcctggtccgactggaattcgtggagagtctggtgacagggtaaggagaagatgatgtttgtaacwccwtcctgtttgggagatgtgaaattagagctgatgtcatcacagcaagcggatgcagtctcagtagcaggctggcacatggggtgtccccccttgtcctgctgctgctgcatgcccaagctgggccccaagcagrcagcaggattygtgcatctgctcctattcctgcccatgtcccttgcagtgcaggagctcctgytagttccaggcaggatgggatcctatgtaagccagaatagacaactctygtttcctgctttgcatgccacacatgcacaggagagctgattcgcgctgtc

SEQ ID NO: 70077 - DNA, 599 bp, Chicken  19866894343055_3
  misc_feature (1)..(88): n is any nucleotide
nnnnnnnnnnnnnnnnnnnnnnnnnnnnnnnnnnnnnnnnnnnnnnnnnnnnnnnnnnnnnnnnnnnnnnnnnnnnnnnnnnnnnnnngtccctggggaacaaaggagagaggaaatccaaggcaatgctttcaaaygtgatgagctctggggatgtcgtgcagggttccctgtagctcttctgctgttttcctaacagggtcccaaaggtgccagtggggaacctggccttcctggtccgactggaattcgtggagagtctggtgacagggtaaggagaagatgatgtttgtaacwccwtcctgtttgggagatgtgaaattagagctgatgtcatcacagcaagcggatgcagtctcagtagcaggctggcacatggggtgtccccccttgtcctgctgctgctgcatgcccaagctgggccccaagcagrcagcaggattygtgcatctgctcctattcctgcccatgtcccttgcagtgcaggagctcctgytagttccaggcaggatgggatcctatgtaagccagaatagacaactctygtttcctgctttgcatgccacacatgcacaggagagctgattcgcgctgtcatt

SEQ ID NO: 70078 - DNA, 600 bp, Chicken  19866894343055_4
aaaygtgatgagctctggggatgtcgtgcagggttccctgtagctcttctgctgttttcctaacagggtcccaaaggtgccagtggggaacctggccttcctggtccgactggaattcgtggagagtctggtgacagggtaaggagaagatgatgtttgtaacwccwtcctgtttgggagatgtgaaattagagctgatgtcatcacagcaagcggatgcagtctcagtagcaggctggcacatggggtgtccccccttgtcctgctgctgctgcatgcccaagctgggccccaagcagrcagcaggattygtgcatctgctcctattcctgcccatgtcccttgcagtgcaggagctcctgytagttccaggcaggatgggatcctatgtaagccagaatagacaactctygtttcctgctttgcatgccacacatgcacaggagagctgattcgcgctgtcattcagatgccttgattagcgtttcaggattttatttttaattacagtttgctctgtgatttctttctgaacagccccacagggccccacacctccgaacaaatccaactgtttttttttttttttatgtaaatgaa

SEQ ID NO: 70079 - DNA, 600 bp, Chicken  19866894343055_5
gctctggggatgtcgtgcagggttccctgtagctcttctgctgttttcctaacagggtcccaaaggtgccagtggggaacctggccttcctggtccgactggaattcgtggagagtctggtgacagggtaaggagaagatgatgtttgtaacwccwtcctgtttgggagatgtgaaattagagctgatgtcatcacagcaagcggatgcagtctcagtagcaggctggcacatggggtgtccccccttgtcctgctgctgctgcatgcccaagctgggccccaagcagrcagcaggattygtgcatctgctcctattcctgcccatgtcccttgcagtgcaggagctcctgytagttccaggcaggatgggatcctatgtaagccagaatagacaactctygtttcctgctttgcatgccacacatgcacaggagagctgattcgcgctgtcattcagatgccttgattagcgtttcaggattttatttttaattacagtttgctctgtgatttctttctgaacagccccacagggccccacacctccgaacaaatccaactgtttttttttttttttatgtaaatgaattccttctcat

SEQ ID NO: 70080 - DNA, 600 bp, Chicken  19866894343055_6
cagggtcccaaaggtgccagtggggaacctggccttcctggtccgactggaattcgtggagagtctggtgacagggtaaggagaagatgatgtttgtaacwccwtcctgtttgggagatgtgaaattagagctgatgtcatcacagcaagcggatgcagtctcagtagcaggctggcacatggggtgtccccccttgtcctgctgctgctgcatgcccaagctgggccccaagcagrcagcaggattygtgcatctgctcctattcctgcccatgtcccttgcagtgcaggagctcctgytagttccaggcaggatgggatcctatgtaagccagaatagacaactctygtttcctgctttgcatgccacacatgcacaggagagctgattcgcgctgtcattcagatgccttgattagcgtttcaggattttatttttaattacagtttgctctgtgatttctttctgaacagccccacagggccccacacctccgaacaaatccaactgtttttttttttttttatgtaaatgaattccttctcatttaaaagaaggcagcagggcaaagtgaatggcatttgctcagggcctgcagg

SEQ ID NO: 70081 - DNA, 600 bp, Chicken  19866894343055_7
gaattcgtggagagtctggtgacagggtaaggagaagatgatgtttgtaacwccwtcctgtttgggagatgtgaaattagagctgatgtcatcacagcaagcggatgcagtctcagtagcaggctggcacatggggtgtccccccttgtcctgctgctgctgcatgcccaagctgggccccaagcagrcagcaggattygtgcatctgctcctattcctgcccatgtcccttgcagtgcaggagctcctgytagttccaggcaggatgggatcctatgtaagccagaatagacaactctygtttcctgctttgcatgccacacatgcacaggagagctgattcgcgctgtcattcagatgccttgattagcgtttcaggattttatttttaattacagtttgctctgtgatttctttctgaacagccccacagggccccacacctccgaacaaatccaactgtttttttttttttttatgtaaatgaattccttctcatttaaaagaaggcagcagggcaaagtgaatggcatttgctcagggcctgcaggagagcagcagccgtgtgttgggcggctgccctgactccagctttaaggt

SEQ ID NO: 70082 - DNA, 600 bp, Chicken  19866894343060_1
acacagttgtaaaaactcaaataccaggcaagctaatttttagaataccagcttccctacaggcagataaaatatcccaagtgaaaaaaaaagaaaaaaaaaaaaaaagaggagcctgggaagagtttattgagaaggctgcaagatggccaaattgtgttaaaaactcaggtgtcattgtccctgcattgaactgaatccttgcaattttattttctggaatatggaataattatttcattgctgtcttacattgtttcagagtttgaaaaacttctgatgaaaattgagtacctttcrgttttagctactgagcagcactgaatggttctggcattcttcaccttgacaagtgttctttgattagtgtaattaagtaccagctgaacctctagaccaattatggggaactgttatatttttcttgtcatatggttactttttctgtctttcagtttaagtgaatttcctttatttccttaagcttttttttttttttaattaataattttgttttgtttctttctactaactttgctggcagagttacacttttcccagccacttgttccactgcacagtcatgaagcctatgaacat

SEQ ID NO: 70083 - DNA, 583 bp, Chicken  19866894343080_1
ccggcgtggccgtggggctggggtcccgtggggcttcgcggtgcccggtcgctacttgggtcggaaggggatagtggcgggctcggaaaaccctacagagagtgggcacagccgtatccacatccccacgtcggaaggacgtggccgtgtgtagccgtgcgctgccatggggacaccgctgctgccgcggttacctggagcgtgggcagtgccaccgggtggccccgagagcccccgtgcccacggaagcggtgtctgccgccgtcccccccggcgtcgtcccgcccggcgtcgcggagsaagtggctctgctttttggggccggttcccatccgacggcaatggcctggggcgctgcgtcagcatcccacagcacagtgcgatggagcgcagtgagcccccagcgcggcccgaccgtgggattcagctgcttggccacgcacggggctgcagggctgcctgccccttgtcccactcagcgtttgcatgggctggaaggaaagccccgcagaaagtcatgcactgagcaacttcctccgggaagtggggaggaaggaggcgcagcaccgggggtccggagcgg

SEQ ID NO: 70084 - DNA, 600 bp, Chicken  19866894343086_1
ccaagttccagttcttaaactttttggttttttacatgtagctaatctattttctgcatccaaaagttagcataaaaaaaaaaattgcttgcctagctttctcttatgaaaagtacaagtatttaaaaattaaatgttacagtttatttgcttaaagtgaaaacaacatatatatgccgagaatctgtcaaaactggggggcttttgtatcagtacagataggtggaggatgggacaaaagaggcagcataacattcatattaactacaaaatatatacagaaaatatgtttcctattgkggtgggtaatatgaccaattcctaggaaaaaaatgacttagtataacacaaatacttgcaaactagtgaaattacaaatgcttttatctgtgtaatatccaacccaattccagctgaaaaaaatatatatatatataatttataacttataatatatatatataatttatatatatatatataatttataatatataatttaatatatatatataaattaaatatatatatgtatacacacacacacacacacacatatatatatatatacatacaagattggaaaagaaaagggaaatt

SEQ ID NO: 70085 - DNA, 455 bp, Chicken  19866894343095_1
atattctggcctagcagtcttgcttatttgtttgtttgtttgtttgttccttcaatttggccaatgaaataccatgctaaaacaggtagactaaagcaactaaggaacagtttctcaaagtgtgcatggtgtagaggggatagggtgatgaacatataaaaaacttttattccaaagcttgtaacagtatttttttgtatggtaatggaaagggcagcttgttctagaacagagcagaagatcatgaaatagagtaagctgggaaaaagaaggtaatagctgactccaagagcagaagayagcaactgacagttcagaatcycatctgttatgagatccctcacacagagcaatagtgtatagaatcaagttatcaactcatttttacccctgaattaaaactgctgatagtgtgattaaggtagagagctgcacctctgcctgggcctgggttt

SEQ ID NO: 70086 - DNA, 433 bp, Chicken  19866894343095_2
cttatttgtttgtttgtttgtttgttccttcaatttggccaatgaaataccatgctaaaacaggtagactaaagcaactaaggaacagtttctcaaagtgtgcatggtgtagaggggatagggtgatgaacatataaaaaacttttattccaaagcttgtaacagtatttttttgtatggtaatggaaagggcagcttgttctagaacagagcagaagatcatgaaatagagtaagctgggaaaaagaaggtaatagctgactccaagagcagaagayagcaactgacagttcagaatcycatctgttatgagatccctcacacagagcaatagtgtatagaatcaagttatcaactcatttttacccctgaattaaaactgctgatagtgtgattaaggtagagagctgcacctctgcctgggcctgggttt

SEQ ID NO: 70087 - DNA, 600 bp, Chicken  19866894343102_1
tgggctgcgcagcctgcaggactttggcaggaaggcggagcggctggaggcctggatgcggagcaaggtgcgggctgtgggcatcgtgccccggggtgggacgccagccgtgtccccacctgctcacagcctcccctgtcccaggaggagaagccctccctggcagccctcctgcaggagagcccggacaagatccagctcacccgccgcatcctcgacttgaagcaggtgagaggctgctgggggttgatttggggggagctcaacctcacagcccactccgtttcccccttccagccygcaagtgagrcctcacatctctgtctcttatttctgtctctgtgtgggcaggaggagcagcagttccagagcctgcatgaggagcttaacagcctggcccagaagctagagaaacaaggcaaaagtgagagcaggaccatctccgcccggcgcaagcacctcaataagatgtgagcagaggcagcatgggctgcgcagggcagagctgggcttcctcctggtgcggccagcaccgtggcacaggtcagccttcacgtctgccttcccgtctgtgcaggtggctgcggctgcaggggaccc

SEQ ID NO: 70088 - DNA, 600 bp, Chicken  19866894343102_2
agcctgcaggactttggcaggaaggcggagcggctggaggcctggatgcggagcaaggtgcgggctgtgggcatcgtgccccggggtgggacgccagccgtgtccccacctgctcacagcctcccctgtcccaggaggagaagccctccctggcagccctcctgcaggagagcccggacaagatccagctcacccgccgcatcctcgacttgaagcaggtgagaggctgctgggggttgatttggggggagctcaacctcacagcccactccgtttcccccttccagccygcaagtgagrcctcacatctctgtctcttatttctgtctctgtgtgggcaggaggagcagcagttccagagcctgcatgaggagcttaacagcctggcccagaagctagagaaacaaggcaaaagtgagagcaggaccatctccgcccggcgcaagcacctcaataagatgtgagcagaggcagcatgggctgcgcagggcagagctgggcttcctcctggtgcggccagcaccgtggcacaggtcagccttcacgtctgccttcccgtctgtgcaggtggctgcggctgcaggggaccctgaaggagca

SEQ ID NO: 70089 - DNA, 600 bp, Chicken  19866894343109_1
tggctgatttcaagggtaagtaaagtttggaaggataaggatgttcttagatggttccggaaaatctgtagttaggtggtagtgaaaggcccagagtagttctccttcagaaggagaaacaggtgaagcagaccctcagcctggagacggtgcagttgagttggacaacacaggctggccagtgtacatgtgtgactggctcagcacacacactgtttttctcaattaccagccaggaatgaggatgggtacatggaacagaaacattactagaggctacagagtcaaagccccagaaawmcaagagtcatcatctcttctgcttttcataatgacaaaaggtctttccttttttcttctcaccattctatgtatcgcattgtatttcttagaatgacataatacttcaggaagattagctttcttctaatgccaaatggcagacttacttagaacgcagggaatacaatatctattactttaactcaagggtgttcccttacaaccttctggctttcatattacagatgtaaagaaacatgaaaaatcttcattttagctcagaaatagcagaacaaagggaaggtggttaggtaaaag

SEQ ID NO: 70090 - DNA, 600 bp, Chicken  19866894343109_2
ggctgatttcaagggtaagtaaagtttggaaggataaggatgttcttagatggttccggaaaatctgtagttaggtggtagtgaaaggcccagagtagttctccttcagaaggagaaacaggtgaagcagaccctcagcctggagacggtgcagttgagttggacaacacaggctggccagtgtacatgtgtgactggctcagcacacacactgtttttctcaattaccagccaggaatgaggatgggtacatggaacagaaacattactagaggctacagagtcaaagccccagaaawmcaagagtcatcatctcttctgcttttcataatgacaaaaggtctttccttttttcttctcaccattctatgtatcgcattgtatttcttagaatgacataatacttcaggaagattagctttcttctaatgccaaatggcagacttacttagaacgcagggaatacaatatctattactttaactcaagggtgttcccttacaaccttctggctttcatattacagatgtaaagaaacatgaaaaatcttcattttagctcagaaatagcagaacaaagggaaggtggttaggtaaaaga

SEQ ID NO: 70091 - DNA, 600 bp, Chicken  19866894343110_1
atggctgaaggtcctgacaggatagtgttttgctcacttgccctttctctgccatgtagatttttctctcctacatgcattagtacatcattattcttcctgcaagagcattcttcacagccactgctccagctctcatacctccagcttgcactcacctgacaccatgttgacccctgttcctccattgcccccaatggccatgtgctacttttctccagctgggatgttgacacctcacgggtttgcacaatattgctattgtggtacatacaaaaaagcatgagatctaaaaccacktattcacttttcaggttgcctagttttttagctctgcaccagtgtgagacgataccaaatcacagtacacacatggtgcagaaagaaatgtyctaaagcrtgtgaagatatgcctctttctgcatgtttctgcagaactagctgtttttcagtgcacagtgtgctgatctacagactgcttcagtaacactcctctctgttggagggggaagaaaagcccaaggaaggatgtgacacggagctgcccacatcctctgagagacgaaaaaagagaaggcttgagtgaaaaagctcacgagg

SEQ ID NO: 70092 - DNA, 600 bp, Chicken  19866894343110_2
attcttcctgcaagagcattcttcacagccactgctccagctctcatacctccagcttgcactcacctgacaccatgttgacccctgttcctccattgcccccaatggccatgtgctacttttctccagctgggatgttgacacctcacgggtttgcacaatattgctattgtggtacatacaaaaaagcatgagatctaaaaccacktattcacttttcaggttgcctagttttttagctctgcaccagtgtgagacgataccaaatcacagtacacacatggtgcagaaagaaatgtyctaaagcrtgtgaagatatgcctctttctgcatgtttctgcagaactagctgtttttcagtgcacagtgtgctgatctacagactgcttcagtaacactcctctctgttggagggggaagaaaagcccaaggaaggatgtgacacggagctgcccacatcctctgagagacgaaaaaagagaaggcttgagtgaaaaagctcacgaggaatgacagagagggaggtggtcagcagctgtgagatccagttgctcaaaggttggtgaggctgatgcatgtcctggaaagcacaggcaatga

SEQ ID NO: 70093 - DNA, 600 bp, Chicken  19866894343110_3
tgcaagagcattcttcacagccactgctccagctctcatacctccagcttgcactcacctgacaccatgttgacccctgttcctccattgcccccaatggccatgtgctacttttctccagctgggatgttgacacctcacgggtttgcacaatattgctattgtggtacatacaaaaaagcatgagatctaaaaccacktattcacttttcaggttgcctagttttttagctctgcaccagtgtgagacgataccaaatcacagtacacacatggtgcagaaagaaatgtyctaaagcrtgtgaagatatgcctctttctgcatgtttctgcagaactagctgtttttcagtgcacagtgtgctgatctacagactgcttcagtaacactcctctctgttggagggggaagaaaagcccaaggaaggatgtgacacggagctgcccacatcctctgagagacgaaaaaagagaaggcttgagtgaaaaagctcacgaggaatgacagagagggaggtggtcagcagctgtgagatccagttgctcaaaggttggtgaggctgatgcatgtcctggaaagcacaggcaatgactgtctta

SEQ ID NO: 70094 - DNA, 600 bp, Chicken  19866894343111_1
ttatgcacatgtatcaggaaaggatgagccctgagcagatctggtactctaaacacacaggaggaggcagacagcaaaggacaattctattcagaagaaaatttgtttcagagaaatcattttcacagcatgaaatatcaccttgcttgagtagtttctttccccacaattgacgaaggtgataattttaatacatccattttaatctgcatatgcctgagtcttctgcatgttgaaaaagaaacattttcctcatttcctacaaaatagttgaaaacaaatgtcttctgtcagaagctsgcttcccccaacttcagttaaacttcagagcaactttcatgcatcagaggctgcaccaaatagatcagtcagttctatcttctccacatcatctttgtactgccacatatggccaacattgattcttcaggcaccgcagagaatttmactacatttttcaattttctggcaattgcacctttaactgagggtgaaattattatggcttttgctgtcatcttgactttattcaaagtacttaatataccctgatttattcagtgttaaaaaaatcctgtttagtcattttgttttgacact

SEQ ID NO: 70095 - DNA, 600 bp, Chicken  19866894343111_2
tgagtagtttctttccccacaattgacgaaggtgataattttaatacatccattttaatctgcatatgcctgagtcttctgcatgttgaaaaagaaacattttcctcatttcctacaaaatagttgaaaacaaatgtcttctgtcagaagctsgcttcccccaacttcagttaaacttcagagcaactttcatgcatcagaggctgcaccaaatagatcagtcagttctatcttctccacatcatctttgtactgccacatatggccaacattgattcttcaggcaccgcagagaatttmactacatttttcaattttctggcaattgcacctttaactgagggtgaaattattatggcttttgctgtcatcttgactttattcaaagtacttaatataccctgatttattcagtgttaaaaaaatcctgtttagtcattttgttttgacactcacagattacttcccacatgctatttattaaaacaatccatggagcattttgctttttttttttctatttttcttcatttttctaaaaaaactctgatgccggatttaaattctgaaatgcaaaagtcttggtggattaaaaaataa

SEQ ID NO: 70096 - DNA, 574 bp, Chicken  19866894343116_1
  misc_feature (1)..(162): n is any nucleotide
nnnnnnnnnnnnnnnnnnnnnnnnnnnnnnnnnnnnnnnnnnnnnnnnnnnnnnnnnnnnnnnnnnnnnnnnnnnnnnnnnnnnnnnnnnnnnnnnnnnnnnnnnnnnnnnnnnnnnnnnnnnnnnnnnnnnnnnnnnnnnnnnnnnnnnnnnnnnnnnnnntccctttcccttcctgtccctttcccgttccctgtgccccttttccctgccatgtccctttgcaccactcctcccgtgccatgcgggcagcagggccaccactgccaccgcgtgagagggggcgcagggggtgctggrcgtgagaggtgcgggggggcayggggctgctgccagggccctgttggtttcagcaaagcacccgagacagaggtgcaatcctgcagccctgctttgctgagcgggtgctgcatccctgatggcatcacgtcccctccagcagccggacgtgtctctggtgccgggataccggggagccggctgcctgtttcggggcgccatctcccagcatcactggtgagctgagtgcggcaggtctcagcagcgcagcaggaggaagagggagggaggggga

SEQ ID NO: 70097 - DNA, 552 bp, Chicken  19866894343116_2
  misc_feature (1)..(140): n is any nucleotide
nnnnnnnnnnnnnnnnnnnnnnnnnnnnnnnnnnnnnnnnnnnnnnnnnnnnnnnnnnnnnnnnnnnnnnnnnnnnnnnnnnnnnnnnnnnnnnnnnnnnnnnnnnnnnnnnnnnnnnnnnnnnnnnnnnnnnnnnnnnntccctttcccttcctgtccctttcccgttccctgtgccccttttccctgccatgtccctttgcaccactcctcccgtgccatgcgggcagcagggccaccactgccaccgcgtgagagggggcgcagggggtgctggrcgtgagaggtgcgggggggcayggggctgctgccagggccctgttggtttcagcaaagcacccgagacagaggtgcaatcctgcagccctgctttgctgagcgggtgctgcatccctgatggcatcacgtcccctccagcagccggacgtgtctctggtgccgggataccggggagccggctgcctgtttcggggcgccatctcccagcatcactggtgagctgagtgcggcaggtctcagcagcgcagcaggaggaagagggagggaggggga

SEQ ID NO: 70098 - DNA, 600 bp, Chicken  19866894343117_1
caatttgtatttccatcctagcttgggcaactaggtgagactacactcttctttttaatgtgctttattgttgctaggttggttttgcctcacagaagtgtgtgactatggcttttgttaaactacgaggttaataacattggaaaaacgcaactattcaaacaatatttattcagaactctgtgttactgttaagagaaaacattaaaaacctcttgcagagttctcttttctggaagattcttaactctctccttccccctccttctccccctttttctttcaatgtttttgtaatawccaaagacatataatatatataataaccaagtgcaacaaataactgctgctaaatgttgtaggtggtgttcaccccttacaccaataatgactaccagactgaatgtttttgagacttcatgacttaaaacctactgtgttgagaccctttgttatctgtgtatgcagataaatgtcattcaaaccctaaaactttcagcagctttgagttagtagttccatgaaacagattactcacatgcagtgtgtgagatgaaaccctaatacagaaatttctaattggccaagaagtatgggaaa

SEQ ID NO: 70099 - DNA, 599 bp, Chicken  19866894343121_1
  misc_feature (1)..(43): n is any nucleotide
nnnnnnnnnnnnnnnnnnnnnnnnnnnnnnnnnnnnnnnnnnngagttgaggattctggaattttaaggtatttttgtcaagaagagatgcttgggggccacacctggtgtgaatgagcagctggaggggcctggggacctccatacctcatcttggtatagctgacagctatatcacatcagtaagggaaggagtgtgacactctcttgtcctcagatagataagtctgattttcacataggagttgtcatattataaggcaaatcgggggtcagagggttagtatattttgttttacycttctgcatggttgcatttcagcttatcctcatgcaagaagttactttttactcaggaagggggagatagggagaaggcagaagggagaataggaagggacagaagtttcaattcttaagatgtaaaatctgagactgaagcgtgttctccagggaagaagtattgttctttcctctcttgtatcatcagcatcttgaatctcttgccatttccatggacatttatttataaagtcaggaggctctgactgtttcagataagcataatgaagacagaggaactccagtaaaccccttga

SEQ ID NO: 70100 - DNA, 600 bp, Chicken  19866894343141_1
ttgtttatctatttgttgtgatttttttttttctatttaccactggagtctgacagctgccttttatctgacagctgctttttatttgtcacataaaacgagtgaagagtttttggcacatatattattgtttataagatatttgatttatttatttcatgaggtattgtgtacataaatgcaatgtatttagaatttattaagatattttttataagctatttacctatttggttaccaaaacagtttaaaaaggaaaataatgtacaacaaatggaaaatcacagctggcataaatgsttgttctctttcagagtacacccatgtatttataaagacatggatattcatgtaaacataaattatgagtaggcataggagaagtaaatgttgtttgtttaaaatattaatgagaagacaagatgatggtgaaaacagaatatttctagtgaagcatgtggagacagtgctgtagtgtgatttcagttggataagccatgtacatttttaaatgagcaaattgtgtgtactgtgataatactgagataatacatgttgtgcatgtggaagggggtggagagggaactgtgacagttttct

SEQ ID NO: 70101 - DNA, 600 bp, Chicken  19866894343141_2
agttgctcaagcactggctgggtattgatagtgagcaactgtgttgtgcatcacttgctttttcctttggttgtgcttatttttcctttcctttccttcagcatttttatctttcttattaaacaatctttagttcaactcacaagccttctaacttttgtcctcattcttttccctccacatccagatttgtataagggcaggtattaagcaagaagctgtatgctgggtagctactgggtttaatgtactgcggttatatcacagcaaatgtcaagatgaaactcttttaatgatttwtatatatatatacgtatatacataattaaaatgtctatattccatgttccttagaaatataagagttatgtagttatggtagaggttggaatcactgttttgagtgaactcattcacaggatgattttccycctatataactgctgctaccaatgattaaataatattaagaaaatgtacaaaggatgactttgaaaatgtgattgtctttttttttttttcctgcagtatttatatactgcaagaaaatgtagcttttcctatatctaatcctgcttaatgaggatcgtgctgtcaaat

SEQ ID NO: 70102 - DNA, 600 bp, Chicken  19866894343141_3
agttcaactcacaagccttctaacttttgtcctcattcttttccctccacatccagatttgtataagggcaggtattaagcaagaagctgtatgctgggtagctactgggtttaatgtactgcggttatatcacagcaaatgtcaagatgaaactcttttaatgatttwtatatatatatacgtatatacataattaaaatgtctatattccatgttccttagaaatataagagttatgtagttatggtagaggttggaatcactgttttgagtgaactcattcacaggatgattttccycctatataactgctgctaccaatgattaaataatattaagaaaatgtacaaaggatgactttgaaaatgtgattgtctttttttttttttcctgcagtatttatatactgcaagaaaatgtagcttttcctatatctaatcctgcttaatgaggatcgtgctgtcaaattgcatactatgtgcattttcattaaaggagtatagaaggaaagttcatgttgaatgagaaaacaaaattaccattttaaactttggctttttcttattggtatgcaagtttggttggcagttttggaactg

SEQ ID NO: 70103 - DNA, 600 bp, Chicken  19866894343149_1
tgttttgaaattctgtaaacctgccaaatttaaataaaagtggtgggctttttttgtttgtttgttttttttaaagagcccatttcattacttcaaatgtggaccattttccttttcctctgtgagttatggcttcttgtgcaacttatttgcatttcttcgtaagtatatagattagacactccaagttcgttctatcagctgtcctgggagattttactacgaagacaaagaaaaaaaagtgaaaccttctggaagaacaatcaatttttcacttagtcaaactttaatgcctatatrcattttccagatgcttgttgaatacaattacgtacttctgctgggtaaggctttgagtagtaatatatagaaaatgtatgtgaaaatcctatccaaacataataatcagaacttacatgcttatagtgtacaataaagtgtcttccagggaaactgaatgactttgcattcctgtcttatacaagtacagactggaaaaatgtatataattgttattcagttgggtttctgtgagtagattttaattctctaatctcccacagcagttttatgctcatattttcttactaaaatcaacaa

SEQ ID NO: 70104 - DNA, 600 bp, Chicken  19866894343166_1
caacacactatggaacctcagaacaatgcaaatatacagcaacaggcattaacaaagcacctttttagaaaaatggagtttactctcaacttacctgctatatctgcaaagtattgacaaagatctttctactgaacagttgacctccgttattgtctccctttctacttctctccgcaaaatcttgtattatatacaagattagaaaagtcatcatccctatgaaccattctttgtgtacctgcaatgagctacctgagattgctgagaaactacatattgcttttaagttgcttctgrtgttgtggaatcaagttctggaagaacctaaatgcctctgaacagttgcttgcccttgttcacatacagcatttattttccagaacactgacaacaatcactgaatcttaaaagaaaacaacacggagatgcaggcagcaaagaacaaaggctcagtcattctcctgtgttccaaaggaatacttgaccatcagcccctactcagagaagggccaaagaagtccattgcacacatagttaagccatttaaaaacagaaagaaaaaaaaaagtaataacacatacagcagtttttttaaaa

SEQ ID NO: 70105 - DNA, 600 bp, Chicken  19866894343173_1
acactggcattacatgtcattgagaatagaagtaaatgagcctgcactaagagctgtgcatctgagattaaattgcccttgcagctaacagaggttgtttagatctaattagggctcatctaaatagcattacgttactgtagttgctgtacagatagatactaaacaggaatcctatgtaatacaatgtacttcttaaatagagcatatttcaatctataatcaagatcctgagcaagggcgatttcagtaacatatgggaacagaaacagatgcatagtagattgcattggatgacamtgaacaatatttctgcatagatttaaaaaataaaaacaaaaacaacaaaaaaaaacctctggagaagtcttcatttcctactcctttaatctgtctagtgtgcaatgtacccatatcaaaatgttttaaacttgatttctgagtcttttactcagctgctaccttgacaataaatcagatttattcctgaagaaagttatcctcctttgtttttttgaaaatgagacgcaaaggcatgaagaactacaattgaattaaatctcatagactccattaaaaaaaaaaaatctggaaaaaaat

SEQ ID NO: 70106 - DNA, 599 bp, Chicken  19866894343181_1
  misc_feature (1)..(69): n is any nucleotide
nnnnnnnnnnnnnnnnnnnnnnnnnnnnnnnnnnnnnnnnnnnnnnnnnnnnnnnnnnnnnnnnnnnnntgcttggctgcctcatggtgaaaaagctttccttacactgaggctgaacctctcctttcaatttacgtttgttgcctctatgtcctctcaccatccactgctgtgaagtctcaataacctcttcctggataccgaaaggctgctattagacacaccctgtctccaaagctttattctgggcgtgacaaacccagttcccatatcttctccataagcagcagccccaaccayctcratgacccttyggtgagctctactgctcaccagtgcctttcttatatggaagggacgtaaacttgatggagttttttagacgaagactaaagaatggtatgtaaggggaaaggttgtatcttccttcagtytactgactaagctctcgtgaatacagccaaggatgcctktattggatgcaaggatgcttgggagacattkttaaaaaagtcttgctaaagttatgacaaatgatatctactgctctcccttcctcatccacagcctcatccagctgttttatcatggaaggcaat

SEQ ID NO: 70107 - DNA, 599 bp, Chicken  19866894343181_2
  misc_feature (1)..(65): n is any nucleotide
nnnnnnnnnnnnnnnnnnnnnnnnnnnnnnnnnnnnnnnnnnnnnnnnnnnnnnnnnnnnnnnnntgcttggctgcctcatggtgaaaaagctttccttacactgaggctgaacctctcctttcaatttacgtttgttgcctctatgtcctctcaccatccactgctgtgaagtctcaataacctcttcctggataccgaaaggctgctattagacacaccctgtctccaaagctttattctgggcgtgacaaacccagttcccatatcttctccataagcagcagccccaaccayctcratgacccttyggtgagctctactgctcaccagtgcctttcttatatggaagggacgtaaacttgatggagttttttagacgaagactaaagaatggtatgtaaggggaaaggttgtatcttccttcagtytactgactaagctctcgtgaatacagccaaggatgcctktattggatgcaaggatgcttgggagacattkttaaaaaagtcttgctaaagttatgacaaatgatatctactgctctcccttcctcatccacagcctcatccagctgttttatcatggaaggcaattagt

SEQ ID NO: 70108 - DNA, 599 bp, Chicken  19866894343181_3
  misc_feature (1)..(55): n is any nucleotide
nnnnnnnnnnnnnnnnnnnnnnnnnnnnnnnnnnnnnnnnnnnnnnnnnnnnnnntgcttggctgcctcatggtgaaaaagctttccttacactgaggctgaacctctcctttcaatttacgtttgttgcctctatgtcctctcaccatccactgctgtgaagtctcaataacctcttcctggataccgaaaggctgctattagacacaccctgtctccaaagctttattctgggcgtgacaaacccagttcccatatcttctccataagcagcagccccaaccayctcratgacccttyggtgagctctactgctcaccagtgcctttcttatatggaagggacgtaaacttgatggagttttttagacgaagactaaagaatggtatgtaaggggaaaggttgtatcttccttcagtytactgactaagctctcgtgaatacagccaaggatgcctktattggatgcaaggatgcttgggagacattkttaaaaaagtcttgctaaagttatgacaaatgatatctactgctctcccttcctcatccacagcctcatccagctgttttatcatggaaggcaattagtgtaaccttga

SEQ ID NO: 70109 - DNA, 600 bp, Chicken  19866894343181_4
cgtttgttgcctctatgtcctctcaccatccactgctgtgaagtctcaataacctcttcctggataccgaaaggctgctattagacacaccctgtctccaaagctttattctgggcgtgacaaacccagttcccatatcttctccataagcagcagccccaaccayctcratgacccttyggtgagctctactgctcaccagtgcctttcttatatggaagggacgtaaacttgatggagttttttagacgaagactaaagaatggtatgtaaggggaaaggttgtatcttccttcagtytactgactaagctctcgtgaatacagccaaggatgcctktattggatgcaaggatgcttgggagacattkttaaaaaagtcttgctaaagttatgacaaatgatatctactgctctcccttcctcatccacagcctcatccagctgttttatcatggaaggcaattagtgtaaccttgataaatcctcgtggagtgtttccagtcactttcttctcctttcaaacaatatattactgttaattgtttactcagtgccctcacatgccatcagtgtgttgaatgcacatagaagataagag

SEQ ID NO: 70110 - DNA, 600 bp, Chicken  19866894343181_5
gaagtctcaataacctcttcctggataccgaaaggctgctattagacacaccctgtctccaaagctttattctgggcgtgacaaacccagttcccatatcttctccataagcagcagccccaaccayctcratgacccttyggtgagctctactgctcaccagtgcctttcttatatggaagggacgtaaacttgatggagttttttagacgaagactaaagaatggtatgtaaggggaaaggttgtatcttccttcagtytactgactaagctctcgtgaatacagccaaggatgcctktattggatgcaaggatgcttgggagacattkttaaaaaagtcttgctaaagttatgacaaatgatatctactgctctcccttcctcatccacagcctcatccagctgttttatcatggaaggcaattagtgtaaccttgataaatcctcgtggagtgtttccagtcactttcttctcctttcaaacaatatattactgttaattgtttactcagtgccctcacatgccatcagtgtgttgaatgcacatagaagataagagcacacaggctttgtcactgaaactagcagcacaagtgct

SEQ ID NO: 70111 - DNA, 600 bp, Chicken  19866894343181_6
aaggctgctattagacacaccctgtctccaaagctttattctgggcgtgacaaacccagttcccatatcttctccataagcagcagccccaaccayctcratgacccttyggtgagctctactgctcaccagtgcctttcttatatggaagggacgtaaacttgatggagttttttagacgaagactaaagaatggtatgtaaggggaaaggttgtatcttccttcagtytactgactaagctctcgtgaatacagccaaggatgcctktattggatgcaaggatgcttgggagacattkttaaaaaagtcttgctaaagttatgacaaatgatatctactgctctcccttcctcatccacagcctcatccagctgttttatcatggaaggcaattagtgtaaccttgataaatcctcgtggagtgtttccagtcactttcttctcctttcaaacaatatattactgttaattgtttactcagtgccctcacatgccatcagtgtgttgaatgcacatagaagataagagcacacaggctttgtcactgaaactagcagcacaagtgctgctccaagacatactgtcatgccggtacaca

SEQ ID NO: 70112 - DNA, 599 bp, Chicken  19866894343186_1
  misc_feature (1)..(225): n is any nucleotide
nnnnnnnnnnnnnnnnnnnnnnnnnnnnnnnnnnnnnnnnnnnnnnnnnnnnnnnnnnnnnnnnnnnnnnnnnnnnnnnnnnnnnnnnnnnnnnnnnnnnnnnnnnnnnnnnnnnnnnnnnnnnnnnnnnnnnnnnnnnnnnnnnnnnnnnnnnnnnnnnnnnnnnnnnnnnnnnnnnnnnnnnnnnnnnnnnnnnnnnnnnnnnnnnnnnnnnnnnnnnnnnnncctccatcacagctaccactaaataaaaatctcactaatgtgaatctcctctcaaaggatgttaatctctgggamyggggcttactgagccccatggagctgcctagaagggatccagcaggagctgtacccccctctgaagcagtttctcctcctcgagcatctcactgcccagcagtctggcagcctgcaaactccagcagaagagtttcgctctgttttcattgttagacatagcacacaatcactgttaaaccattcgaaggaaaacacagctggtgattctggactatgttatatttttattctgagtcatttaccacctcttttaaataatcccagaagcctccacagggatttgcttttatggcacc

SEQ ID NO: 70113 - DNA, 599 bp, Chicken  19866894343186_2
  misc_feature (1)..(224): n is any nucleotide
nnnnnnnnnnnnnnnnnnnnnnnnnnnnnnnnnnnnnnnnnnnnnnnnnnnnnnnnnnnnnnnnnnnnnnnnnnnnnnnnnnnnnnnnnnnnnnnnnnnnnnnnnnnnnnnnnnnnnnnnnnnnnnnnnnnnnnnnnnnnnnnnnnnnnnnnnnnnnnnnnnnnnnnnnnnnnnnnnnnnnnnnnnnnnnnnnnnnnnnnnnnnnnnnnnnnnnnnnnnnnnnncctccatcacagctaccactaaataaaaatctcactaatgtgaatctcctctcaaaggatgttaatctctgggamyggggcttactgagccccatggagctgcctagaagggatccagcaggagctgtacccccctctgaagcagtttctcctcctcgagcatctcactgcccagcagtctggcagcctgcaaactccagcagaagagtttcgctctgttttcattgttagacatagcacacaatcactgttaaaccattcgaaggaaaacacagctggtgattctggactatgttatatttttattctgagtcatttaccacctcttttaaataatcccagaagcctccacagggatttgcttttatggcaccg

SEQ ID NO: 70114 - DNA, 600 bp, Chicken  19866894343192_1
agggaaagctgctgagataatagcataaataaatactctggaaaaactaattattgcatgggagagcttcttcctctgtcttactgctctgttgtatccgtacttgagtttaaacagaaatgaccattgtggtagaactgcaagcgtacccgaagctgtgggtagaggtgacttgctccttccaccttgttctttgctctgtgagtgtacttcaggcacatccagaggtggtcagggaagcgttctaacacattttggaagtttaatgaagcaagctgatgtatgaaatgtaaactagcrggaatattacaacttgggtataattacacttaaggtaatatactgaaaaatggctactggctttcagctataaaaaattattatggatatgggtttatgaacacgggtagcaaactttgtatctattatctgactctttgcaatttaaggcttagcctgtgaaggtgtcaaagcaaatgaaggaacactacagcattgtcatagcgtttacttgggaaaaacaaccagtttgtaatagatatggtacaggcttacaatttcttttactatatgacagtgaagggagcagtagtacacaca

SEQ ID NO: 70115 - DNA, 600 bp, Chicken  19866894343203_1
agaggcgccgagacgaagtttgggagttgcctcgcggcccgggggctgaggcgggaggggccggaggccgcggcgtcggaagcatgggaggtccggcccggcctcgccgctgcggcgcccgcgggagggcaggcccgggggggcacctccgtgaggtgcgcgcagtaatagcaggccctcggcgaaccgcccgcctttcccgcgctctcctttcccccgcggcgagaagctctccgggacggcgtgcggaggcggccgggagccccccgaggagcccggattccgactcgaagcttcgtyttggggccggaggcggctccgcatggaggctccgggcgcgcagccggggcgcggggctctccgagaggcgccgtgagcctccccgcctcccccccggccctgcccggcccggcccggcccgccggcgccatccgagcgaacttccccgcggcgttccgcgatggagccccccgggatggactatttctgcgcccaggtgcagcagaaggacgtgggccgcaggctgcaggtcggccaggagctgctggagtacctgggcgaccccgcccgctcccccgacgtggagcaggaccagcagcg

SEQ ID NO: 70116 - DNA, 600 bp, Chicken  19866894343209_1
gaggttgtttccacctcactacaacttcttttcaggcagttgtagagatcagtgaggtctcccctgaacatcctcttctctggactaaacaatccaacttccctcaatcactccctgtaagacttgtgtttgctaaactctggacagactacatccacagtattttcctcattctctaagcaggtcagcacctggtcataggaaatcaggttggtcaagcaggacctggctttcatgaatccatgctggctaggcctgatcccctgactgttctgcaggtgttgtatgattgcactcacratgatctgctctatgacatttcccaataccaagatcaggttgatatgtctgtacctccctggatctttcattcttgtagatgggcatcacactggcaagtttttagtcatctgggatttccctggttgaccaggactggctgataaatgatggaaagcagtatggcaatcacttccaccagctccctccatactctctgttggattctatctggtcccatgaacttgagacagtctgagtggagcagcaggttgttaactgtttccatctgaatcatgggggtttaattttattccacgt

SEQ ID NO: 70117 - DNA, 599 bp, Chicken  19866894343211_1
  misc_feature (1)..(21): n is any nucleotide
nnnnnnnnnnnnnnnnnnnnnaatacataacaaagtcactgacaaatatgcgtgcaacttccatgtcctgaacagactggagtagatattctgtaacaagaaaccgagtatttcattaatatatacaagtgatctggaggaaagcacagaaagcaaatatatgtagtagaacaactgaactgaatgtaactgaacaaagctgggagcacacattcctctgacccaaagtgccatatgctaaaaaccgtgtgcagctttcaaaacttgtgagatcaataagtacacttaaggaggatctcmgcacatcagcacatgctgaaaacactgcttccctcttcatctgccaatgtcaacagcttttgttgactcctattccacatttgacctgtgctcttttcaaatatattacacccctcactgctcatgaaagcatataaatgaattagcacatgcacacgtacctcagactggtactgttatgatgcttccacctccttgacactcaagaaagaacaagccgagagcaggcccatagtaagaatgaactgagatggcatttatacagatccagttatttgtacccagctctttggctttgc

SEQ ID NO: 70118 - DNA, 424 bp, Chicken  19866894343211_2
gtcaacagcttttgttgactcctattccacatttgacctgtgctcttttcaaatatattacacccctcactgctcatgaaagcatataaatgaattagcacatgcacacgtacctcagactggtactgttatgatgcttccacctccttgacactcaagaaagaacaagccgagagcaggcccatagtaagaatgaactgagatggcatttatacagatccagttatttgtacccagctctttggctttgcgtgacagggcttcagtcataagtgtccctacactccaaaaggaccaacrcatttattacacagaactatcatgcaaaaactgtacacaaaacaaagtgaaaaagaccataagaaaccatcaaaatatactgctgccaaggatcacactgaggaaagttcacaaataaaagccg

SEQ ID NO: 70119 - DNA, 600 bp, Chicken  19866894343212_1
aacacgcatgtttgcaaagtatgtttaacttgcgtctttcatctgtgattaatattaaatctattgagctacataaataagtaattcacttacagacctgtcaaaccaatagtaatttcttcccctctgaagctctgagctatccgttctaattgtttaatttccttttgtgtacctggagataaaaacagcctgctaggccgcttccacttggaaagaagggagggctgcccagtcactctcctcctctgcctctttcccactgcgtacaaggtctgcaaatgtccttaaaagccttgrgtgaagagtaaaagagccattttgcacatcatttctgcggtggtagcttgtgcatggaaagtggactcctgctcagccttctggcttggatcacagccctgcaaaatcatctccaccaagagactatggatctgtttctgttctcctgcaaatgaaattagcagaattatataaacataaaaccaggggcaaatgagaggaaactcwtgtttgctcttttgtgttgatatggagttgtgctcctcgagcactaataaggcagtgctctcacggaagactgagagcatgtattcaggcccc

SEQ ID NO: 70120 - DNA, 600 bp, Chicken  19866894343212_2
cacttggaaagaagggagggctgcccagtcactctcctcctctgcctctttcccactgcgtacaaggtctgcaaatgtccttaaaagccttgrgtgaagagtaaaagagccattttgcacatcatttctgcggtggtagcttgtgcatggaaagtggactcctgctcagccttctggcttggatcacagccctgcaaaatcatctccaccaagagactatggatctgtttctgttctcctgcaaatgaaattagcagaattatataaacataaaaccaggggcaaatgagaggaaactcwtgtttgctcttttgtgttgatatggagttgtgctcctcgagcactaataaggcagtgctctcacggaagactgagagcatgtattcaggcccctggcctcccagtgactgtgcacaacactcagctccttkaagtttrcaagtastttacaggttgcttatagagaagagtatgwagttggtttgagggaaaataatccccaggtagggaagtccctcctagctaaagaaagcactgagcacagggagtcragaggaaacctcatcccctccccagttcatccaggtgcctatatcaaag

SEQ ID NO: 70121 - DNA, 600 bp, Chicken  19866894343212_3
ggtggtagcttgtgcatggaaagtggactcctgctcagccttctggcttggatcacagccctgcaaaatcatctccaccaagagactatggatctgtttctgttctcctgcaaatgaaattagcagaattatataaacataaaaccaggggcaaatgagaggaaactcwtgtttgctcttttgtgttgatatggagttgtgctcctcgagcactaataaggcagtgctctcacggaagactgagagcatgtattcaggcccctggcctcccagtgactgtgcacaacactcagctccttkaagtttrcaagtastttacaggttgcttatagagaagagtatgwagttggtttgagggaaaataatccccaggtagggaagtccctcctagctaaagaaagcactgagcacagggagtcragaggaaacctcatcccctccccagttcatccaggtgcctatatcaaagcagcaggggaggatctcccagcagcaagggatcctttctgaaacacagttgtgtaggacttctctttggaagcaatgatgagagagcactccctcgaaacccaccccagcgccatttcaggctggtggagg

SEQ ID NO: 70122 - DNA, 600 bp, Chicken  19866894343212_4
gcttgtgcatggaaagtggactcctgctcagccttctggcttggatcacagccctgcaaaatcatctccaccaagagactatggatctgtttctgttctcctgcaaatgaaattagcagaattatataaacataaaaccaggggcaaatgagaggaaactcwtgtttgctcttttgtgttgatatggagttgtgctcctcgagcactaataaggcagtgctctcacggaagactgagagcatgtattcaggcccctggcctcccagtgactgtgcacaacactcagctccttkaagtttrcaagtastttacaggttgcttatagagaagagtatgwagttggtttgagggaaaataatccccaggtagggaagtccctcctagctaaagaaagcactgagcacagggagtcragaggaaacctcatcccctccccagttcatccaggtgcctatatcaaagcagcaggggaggatctcccagcagcaagggatcctttctgaaacacagttgtgtaggacttctctttggaagcaatgatgagagagcactccctcgaaacccaccccagcgccatttcaggctggtggaggtggtggt

SEQ ID NO: 70123 - DNA, 600 bp, Chicken  19866894343212_5
catggaaagtggactcctgctcagccttctggcttggatcacagccctgcaaaatcatctccaccaagagactatggatctgtttctgttctcctgcaaatgaaattagcagaattatataaacataaaaccaggggcaaatgagaggaaactcwtgtttgctcttttgtgttgatatggagttgtgctcctcgagcactaataaggcagtgctctcacggaagactgagagcatgtattcaggcccctggcctcccagtgactgtgcacaacactcagctccttkaagtttrcaagtastttacaggttgcttatagagaagagtatgwagttggtttgagggaaaataatccccaggtagggaagtccctcctagctaaagaaagcactgagcacagggagtcragaggaaacctcatcccctccccagttcatccaggtgcctatatcaaagcagcaggggaggatctcccagcagcaagggatcctttctgaaacacagttgtgtaggacttctctttggaagcaatgatgagagagcactccctcgaaacccaccccagcgccatttcaggctggtggaggtggtggtactgggc

SEQ ID NO: 70124 - DNA, 600 bp, Chicken  19866894343212_6
ggcttggatcacagccctgcaaaatcatctccaccaagagactatggatctgtttctgttctcctgcaaatgaaattagcagaattatataaacataaaaccaggggcaaatgagaggaaactcwtgtttgctcttttgtgttgatatggagttgtgctcctcgagcactaataaggcagtgctctcacggaagactgagagcatgtattcaggcccctggcctcccagtgactgtgcacaacactcagctccttkaagtttrcaagtastttacaggttgcttatagagaagagtatgwagttggtttgagggaaaataatccccaggtagggaagtccctcctagctaaagaaagcactgagcacagggagtcragaggaaacctcatcccctccccagttcatccaggtgcctatatcaaagcagcaggggaggatctcccagcagcaagggatcctttctgaaacacagttgtgtaggacttctctttggaagcaatgatgagagagcactccctcgaaacccaccccagcgccatttcaggctggtggaggtggtggtactgggctacagctcttaatctgtgggaattttcctc

SEQ ID NO: 70125 - DNA, 599 bp, Chicken  19866894343212_7
tagcagaattatataaacataaaaccaggggcaaatgagaggaaactcwtgtttgctcttttgtgttgatatggagttgtgctcctcgagcactaataaggcagtgctctcacggaagactgagagcatgtattcaggcccctggcctcccagtgactgtgcacaacactcagctccttkaagtttrcaagtastttacaggttgcttatagagaagagtatgwagttggtttgagggaaaataatccccaggtagggaagtccctcctagctaaagaaagcactgagcacagggagtcragaggaaacctcatcccctccccagttcatccaggtgcctatatcaaagcagcaggggaggatctcccagcagcaagggatcctttctgaaacacagttgtgtaggacttctctttggaagcaatgatgagagagcactccctcgaaacccaccccagcgccatttcaggctggtggaggtggtggtactgggctacagctcttaatctgtgggaattttcctccctccagcatttgctgcatatgtaaagccctgcataagccattgtagtctctgggatctgggggggaaagaggaa

SEQ ID NO: 70126 - DNA, 600 bp, Chicken  19866894343217_1
ctcacttcaataaccttgcaatagatgctatcctcataaggttttgatattttctcagattgccttggtcaagactttatttgcagtatctgacttactgatatgctgacacaaaaacatcaaccagatgccatcagtgacacaaatatctttaattggctactgatcatctcttgtcaaaaaaagtttaaaagggaactctgtggttaaacggtaacaaatatatttttagcctgggtaccaagttaatagattttaatagcagcacaggcagccgagctaagtacatggagacaccgyttattttcacagctggccaagtgctgctaccattgctctgtttgggacataaattaytgagaatggtatattacctgaagccttccaggaaggatatttttcctaagaaggcttgttgagcttgtacatggatttcctgagcatgaagctgttgctcaaaggtgtctagtcacatggtgaaaaaggacagatgtcccaggcagtcccctgctgcatggccattagagctgacaccgcgccatgacgctggctctttgccactgtcatgaccatttcaagaagcaggctgttcctgcttct

SEQ ID NO: 70127 - DNA, 600 bp, Chicken  19866894343217_2
gattgccttggtcaagactttatttgcagtatctgacttactgatatgctgacacaaaaacatcaaccagatgccatcagtgacacaaatatctttaattggctactgatcatctcttgtcaaaaaaagtttaaaagggaactctgtggttaaacggtaacaaatatatttttagcctgggtaccaagttaatagattttaatagcagcacaggcagccgagctaagtacatggagacaccgyttattttcacagctggccaagtgctgctaccattgctctgtttgggacataaattaytgagaatggtatattacctgaagccttccaggaaggatatttttcctaagaaggcttgttgagcttgtacatggatttcctgagcatgaagctgttgctcaaaggtgtctagtcacatggtgaaaaaggacagatgtcccaggcagtcccctgctgcatggccattagagctgacaccgcgccatgacgctggctctttgccactgtcatgaccatttcaagaagcaggctgttcctgcttctgtgtttgcgtaggagggagcagaggttatgagaacgagtgggcttttaagctcagct

SEQ ID NO: 70128 - DNA, 600 bp, Chicken  19866894343217_3
caccgcgccatgacgctggctctttgccactgtcatgaccatttcaagaagcaggctgttcctgcttctgtgtttgcgtaggagggagcagaggttatgagaacgagtgggcttttaagctcagcttccttatcaaactgctagagattttaaaaacacgcagccaaacagttaaacataactgtgcctgtatttgcagtgaaatactcactgaacacttctatatagtttgccttttcttgttaggctctgcttgaataatgctgtctggatacaatgcagtgcttagtcttgcatgcrcgtcatgtccagactcaggataacttaagtaattatttcaaatcattgtagtcttgatagacttgacagaaagccactttatctaaagtttatggcacatgaaagaagctcaaatgcatatttagaatgacaattaagcagaaagcacaaatgctgaaaaaagatgcaggtttttatgaggtttctaatgattttgagaagaactaagcttgaatatttgtcccttagctgcactaatcaagatgactaccaatccagtcattattaaactaaaatatccatcaatttgcacaataacat

SEQ ID NO: 70129 - DNA, 600 bp, Chicken  19866894343227_1
gaggagtggctgaaacaccagaaggctgtgctgccattcagtgagacagattggagagctggtcagaaaggaagctgataaggatgtgtgaagtcctacatctgggcagaaacgatctcatgcatcagtacagactggaggctgacctgctggaaggaagctctgcagtgaagaacctattctgattgacaacaggtagaccatgaggtaacagtgtgcccttgaggccaagaaggacaatggtatcctgaagtgtattaggaaaagtgtggccagcaggttgagggagatgatcctctmcctctacctttgtgaaacctcatctagggtaccatctccagttctaggctcctctgttcaagaaagacaatgaatttctagagttgcaaagttgattaagtgcttggagtatcatccctatgaggaaaggctgagagacctgagactgtttatcttggacaagagaaaactgagaagagatcctatcaattctactaaatatctgaagtacagaagtcaaaggctctctttgatagtgcccagcagttgaacaacaaacaatgggcaaaaattggaacataggaagttttgtacgagcat

SEQ ID NO: 70130 - DNA, 600 bp, Chicken  19866894343231_1
aagtgaactccatgacacacctccatccacaaactctgaattcagttatcaaaaagcactctacatcctcccagaggcaaaggtcagaatgcctatccatgccgcagatgcaattaattgctggccaggatgacaccatgcagccattcatgcatacagccctctcattagggaccaatattatggcattttccaaaagtacacaaagtatttcccataaagacaacctttataagcacgagtctgctgagctctgacaacacagctgttgtgcattcttttcctggaaaacggcagcaratatccctttgccatggaagcaagcagcgttaggggaggacaggagggttttactggatgcgctcctgcagatcttctgctccagcattcaccataagaaatgagcattttcaaagggcctttgagtgactgtgccttgtggtgtcagtatatgagaaattactggcacagcttcggcgctctgctggatttaaaagctggttctcatggagaaatatgtcctttgattgctttaaattttttttgcccttactatcactgcatgaactctcctgctcctcacctcactggatagcacag

SEQ ID NO: 70131 - DNA, 600 bp, Chicken  19866894343232_1
gttttgggatcattttgttggttggcacaaactgcttttgcaaagacatttcattttgcactctttggcacttaggatttacctcttatctcgtggtttaaacacaggcaggtgtggatagagcagcggagtcagtccagactgcacaaggagtgaggaaatgcactattttggttgtctgcacagtttttgcaccaggaagaacagcactttccccacagggtgctgctctgtgtagtgcacagaacaataagcagcaagttgcagggcttgcaaaactgacttaagtctttacaaagrgtttatctacctcaggggctctcattgtctgctttcaaagggttcctcagtgccagacggattcctgagtatggttggtgagaaaatattaaaatgggatttggaagctatcaatcataatgtgcctttatagcacagagcaaaagagatttgaaatgtgggggctagctgataacaggctgcattaaatgcccatttgttttggtcctggagctgtttgtgtgcacaaagcactgcaggatctctcttctcctgggagcactgagctgggccctgcaggatggcatcacctcggctgga

SEQ ID NO: 70132 - DNA, 600 bp, Chicken  19866894343244_1
cctagaatgagaagcataatttcctccagtattgttcagatttatgaattacttggttctctgaatatttttacttggcctttttccattattgcattatatctgcaacgatattatctttgcaggaagaaaaacagaaaggaagtcaggaatatcttttggccattcacgtgaagctttaataattttctttaattttttctcagtgtcaccattaagagtatagtttcctgagtgtaagttgtttccagaaaacaaagctatattttattacaatatgagattacagtttattttctkctgtaagtcaaggcacataaaatattaaaaacatttttccaatctaagcactgaggtattgttaatcttctgcagttttgtagtgattttaaaaggtcacagtcttctttgtaaactttataatacagtgcgctggcatctttccaccatccaatacaacgcagctctctctgaagtcaagtggagcaacacctatttctacaagctttagggtctcttccctgtgagtattggtgttttttatcactctcttatgtttgggatctcattttatttcctgcctcattttaatgggacagt

SEQ ID NO: 70133 - DNA, 600 bp, Chicken  19866894343250_1
tttttttgtgtgtctcctttccgacaaaaataaaaaagagctataacagtaataatacgagcaccatgtgttttatcatgaaagaaaactcatatggtaaaagcacatttcatttctactcaactgtctgaaattttactattttcataatcatagaatcctaaagtccattatctttgttatgatacatgcatttttcagcaagagatttttctgaagatttgtaagcggtgttcattctactccccttttcaggagtagatgtatagatgtaatatttgaaactgcttgtctgtattraaatgaaaattcagaagcaaatgtcactggctgctttgatgttcatgtatacctcacttagaaattaagtagtcaaaaaaaaaaaaaaaaaaaaagagaagtggatccgctctatcagtacctataacatgtatttaaaacccttgaataccattttatttccattgcacaagaaagatgtgaaatccttcttcatttctcaaaatgtacacaaaagctgatgtgagaacacaagagcatttatatagcagagatgaaagcaaagaaatgggttgttttcatgatttgctgtctgtgttg

SEQ ID NO: 70134 - DNA, 600 bp, Chicken  19866894343252_1
caaattttctgttcttgccaggaggaacagctgggttggaggcaaagcatatcacccagctctccaggaaaaccacgtggaaacaagcctcgttatccagatagaatgtcagctgccaaactgctgctgaggttttcagtacacttctgtcctgaggaggatttcagggaagaatatgcaagaggagaaggcagcctcagtggtgcccagcagcactagaggagaggctctgggaataaaggtgggggtgtgggatggatgtgttttgagaaatgtaagagagagagagaacagcaaggratctgagtgttttacagccttgcagatgtgacagataggactggggtagagtaccaaggcagttctttccctgggatatcctggagaagggaacacccagggcaatggcacgatgagggatgctccagcccaagtgatgagccagagtaacagatccttgtttgtgacagaaatactcgcatcacagctcaaaaaactaaatgccatttccaacatgaaggaagggcaccaggcagcactctgggactcatgctgagccctgacccctcaagaggctgtggaggttgatgtggaaagtat

SEQ ID NO: 70135 - DNA, 600 bp, Chicken  19866894343252_2
aacacccagggcaatggcacgatgagggatgctccagcccaagtgatgagccagagtaacagatccttgtttgtgacagaaatactcgcatcacagctcaaaaaactaaatgccatttccaacatgaaggaagggcaccaggcagcactctgggactcatgctgagccctgacccctcaagaggctgtggaggttgatgtggaaagtattgtattgacacagaagtggggagctgacctggccatttgtggtgagcgcagcaaggagacactgacctccttgaccaaatgcttgctgaakgcttagaggagattgccacacagaagctggcaatgaccaaaaatttgggccctgatgcaagggtctgagcagccagcatggtttctccctgagctggcaaaaacatctatcagcacccacagaagggctgagctgtcacacaaagrctgcaagagaccttggcaagcagtactccttgttccctctgtttgaagcagccccgtgagtgggcagcatttttctgtattattcaaaatcatctgacaagctatttatttttttaccctctaattattatttgatattcaggtatccggttgg

SEQ ID NO: 70136 - DNA, 560 bp, Chicken  19866894343252_3
actctgggactcatgctgagccctgacccctcaagaggctgtggaggttgatgtggaaagtattgtattgacacagaagtggggagctgacctggccatttgtggtgagcgcagcaaggagacactgacctccttgaccaaatgcttgctgaakgcttagaggagattgccacacagaagctggcaatgaccaaaaatttgggccctgatgcaagggtctgagcagccagcatggtttctccctgagctggcaaaaacatctatcagcacccacagaagggctgagctgtcacacaaagrctgcaagagaccttggcaagcagtactccttgttccctctgtttgaagcagccccgtgagtgggcagcatttttctgtattattcaaaatcatctgacaagctatttatttttttaccctctaattattatttgatattcaggtatccggttggaattcattcctgagctataatgtgagaagtaaaactgctggggagttttcccactgtgaaagctcatggagagcccatataaagtttgcttctccacaagcacttg

SEQ ID NO: 70137 - DNA, 600 bp, Chicken  19866894343263_1
agctcccatttccacctcctctcttggaaaagggatcttgggcctggctctgcccctgaacctggtctcacctttcaggcactgtcagactctactctgccacccaggagagatgcagccacatgtggaactggggcaaaaggcaccaggaaaagccgtgcatatgaaagggcgaaactgatgacaccagaatccttttgattttagcacgggcagagcctcaaagggaggcagacttgttttctcagtgcctatgtatagagcagtgagctcatagtttccgacaacggagagcatcckaactatgggaaacaggaatttccaccccgcccggtgccagctgagagctgaaggtggggagatgctcggtgccccagacctgcctgtgctggcccaggtcacttctccagcactgaggacctgggggagagatcagccctggtagcttcaaggagaggtcacaaatgggaatgtgcacccaaaggtgacggtgggacctcagccctgggtcagtccagagagttctcaacttcagtttatgatcacgccataaaaatagtgatagtgagaggagtggatgtggagcagaggagcagctct

SEQ ID NO: 70138 - DNA, 600 bp, Chicken  19866894343263_2
caggaatttccaccccgcccggtgccagctgagagctgaaggtggggagatgctcggtgccccagacctgcctgtgctggcccaggtcacttctccagcactgaggacctgggggagagatcagccctggtagcttcaaggagaggtcacaaatgggaatgtgcacccaaaggtgacggtgggacctcagccctgggtcagtccagagagttctcaacttcagtttatgatcacgccataaaaatagtgatagtgagaggagtggatgtggagcagaggagcagctctggatctccttaygktgggatttcatggcataagaggtatgaagggtaccaaccccacacgaggtgctctttgcattttgkcagctgccccacagcatgggatggcctgataagtttgcacccacccctttttcatccagaaaccaaccctgtgatgtaagcgctgcacccacgggtggtgataccactgcccacgcatgccagggctcgaaacaaccactgctgcccgtgcagtgactgtggggacccatctgttgagtgctgggtgtcagaggtgccttaacactcttgccctctattcttgccccataga

SEQ ID NO: 70139 - DNA, 600 bp, Chicken  19866894343263_3
ggaatttccaccccgcccggtgccagctgagagctgaaggtggggagatgctcggtgccccagacctgcctgtgctggcccaggtcacttctccagcactgaggacctgggggagagatcagccctggtagcttcaaggagaggtcacaaatgggaatgtgcacccaaaggtgacggtgggacctcagccctgggtcagtccagagagttctcaacttcagtttatgatcacgccataaaaatagtgatagtgagaggagtggatgtggagcagaggagcagctctggatctccttaygktgggatttcatggcataagaggtatgaagggtaccaaccccacacgaggtgctctttgcattttgkcagctgccccacagcatgggatggcctgataagtttgcacccacccctttttcatccagaaaccaaccctgtgatgtaagcgctgcacccacgggtggtgataccactgcccacgcatgccagggctcgaaacaaccactgctgcccgtgcagtgactgtggggacccatctgttgagtgctgggtgtcagaggtgccttaacactcttgccctctattcttgccccatagatc

SEQ ID NO: 70140 - DNA, 600 bp, Chicken  19866894343263_4
tgcctgtgctggcccaggtcacttctccagcactgaggacctgggggagagatcagccctggtagcttcaaggagaggtcacaaatgggaatgtgcacccaaaggtgacggtgggacctcagccctgggtcagtccagagagttctcaacttcagtttatgatcacgccataaaaatagtgatagtgagaggagtggatgtggagcagaggagcagctctggatctccttaygktgggatttcatggcataagaggtatgaagggtaccaaccccacacgaggtgctctttgcattttgkcagctgccccacagcatgggatggcctgataagtttgcacccacccctttttcatccagaaaccaaccctgtgatgtaagcgctgcacccacgggtggtgataccactgcccacgcatgccagggctcgaaacaaccactgctgcccgtgcagtgactgtggggacccatctgttgagtgctgggtgtcagaggtgccttaacactcttgccctctattcttgccccatagatcctggagatccccggacaccttcttgaggctggaggagcacagggctgggaatggttctacagagca

SEQ ID NO: 70141 - DNA, 600 bp, Chicken  19866894343265_1
ggagcaagctgggtgcatcgagggaggagccgaagtgtgctgtgatacgcagtaaaggagtttcctctttacattagcagacttcagcattccagagccaagcttcacaggtactctgaagcaaaatgaagaggtgtgtgcggaggagcaggaagccacggagggtgcagagtttactgagctcagtgtgggtgagttctgagcagtgccacaatatgctgtgcaactggggacctggggagaaccggtgctgcatgagggcaccccagatgtttcccctgcatgtgcagggccctgggragagagcaagagccatgctgaggttagcaaagcagactgaaatattatggacagttttacacgtaggaagattgaagtggtgggtaggcaaggcatttctgatatttttccctggaatttcttctgcttggtggcagcagtctcagaggaaggagctgtgctccagaagagtccctcaacagatacctgagggctgggacagtcaccagcgagctgggatggctctgttattcccaacaacaatgtaatacttgattattaggctgttcccagctcaccggtcatttccttgtttcatgc

SEQ ID NO: 70142 - DNA, 600 bp, Chicken  19866894343268_1
tgtcagtctgctcaagtggcttcttgaatgtatgctcatattgagggagatagttctaaatgcattgactctgataggaatgtagcttgctgtggtgcgtgatgtacacaatgatggttttgttctgtgcagtagacacagtaaaggttttattcagcagggtggtgaaggggctgggttctgggttggtgtgcaacagagtaaggaaagtggggtgcaactgctgaggtggttttcattcacttggccgtttggttttgggaggtttctagctggctctggctcgctttgcatttctcrctcttttattcccatcagctttataaaatcttaaatgtttatgaatcagggccacatagtatttaaattttcaaacagagaaccattcttctttataacagccttctgactttctaaggttgtcagacgtgttactcgtttttaaaagggagtattgtatatagaacctcaattatttcctcataaagtgattttaaaatgactccccagtgagttttaggaaagtgtgtctagacttttttctttttctgttttatcccagtctccccttcccgcctgcccctatcattttgtaggtta

SEQ ID NO: 70143 - DNA, 600 bp, Chicken  19866894343274_1
agcattattccaatgtttcaagagttttggaaatggatgtttaagccttttgcattaatatgttctggagtctcaggatatttttccatggcaagttctgttcttatatctgaagaggtttaggtcaatctacgtgctcttgcacctatcagaaatcatgctgttccttcaccatacttggtgaattccagtgtatgtatgtttgatcacgtgagaaaagaatagtcacatctggatacaagaagatacaatctcagttcagtttatcccattagctgcagagggtggtattgcatatcmtccaaccttatgtgacctttaaactggacaaacagctgtgagccttattttgtgctcaccgcattgacttaagatacagatactatccactctgtgggtaccagagacgatcatggtttcatgttaggaccagaagtgctgttattttttcatttagtggyatctccaagtgctttgtgattcattaaaagcagctgttgcaactgggagaattctcatgttcattttggagcccacatccagatatgagtccagtcacaggactgaagcaacagagctgggttacagacatcattggca

SEQ ID NO: 70144 - DNA, 600 bp, Chicken  19866894343274_2
tgttccttcaccatacttggtgaattccagtgtatgtatgtttgatcacgtgagaaaagaatagtcacatctggatacaagaagatacaatctcagttcagtttatcccattagctgcagagggtggtattgcatatcmtccaaccttatgtgacctttaaactggacaaacagctgtgagccttattttgtgctcaccgcattgacttaagatacagatactatccactctgtgggtaccagagacgatcatggtttcatgttaggaccagaagtgctgttattttttcatttagtggyatctccaagtgctttgtgattcattaaaagcagctgttgcaactgggagaattctcatgttcattttggagcccacatccagatatgagtccagtcacaggactgaagcaacagagctgggttacagacatcattggcaaagctgggttacagacatcgttggtgcagttggaggaaagctggaccaatgttgctcatttccattcactttattacctttttatttaaattttcccagtgcagaaagaacagcccaatgacaaatagataaatagcagataaacagaaaccaactgtgga

SEQ ID NO: 70145 - DNA, 600 bp, Chicken  19866894343274_3
gtcaaaagagtcaagggggaaaatgagtatataattggcattcaccttaagcattcactcattacattcattttaaaacattataaagatgatggaggagtggtaaggccaataaggaagcatttgttattatgctgctattatctttagcatgtcaaatggatttcagcctcactgctttactttatttatttatttgtgatatctttgacaatacctctgttacaaatgagcctaaggaagtatttaggtcctatagccttgaaatgcgatggggtctttctgtgcagggttaaatcratgtaacatcaytgagaaaagtccctaatgcagtccatgcgtgttgttctgagtgctgaacactagccctggtttcaagcttagtccaggattacaaaatktattgatgccttcatcactcaacccctccgtgcctcagttccccctttgcaaagtgttgtcattgtcccccygctttgtaagtcagtaaagaacttctgtcaccaatcctacctacctgcaagcattgtgcgtatgtaacgtaacagtcttcatggaacagaaggttggttttactccacaagtttcattacaaagtaa

SEQ ID NO: 70146 - DNA, 600 bp, Chicken  19866894343274_4
aagggggaaaatgagtatataattggcattcaccttaagcattcactcattacattcattttaaaacattataaagatgatggaggagtggtaaggccaataaggaagcatttgttattatgctgctattatctttagcatgtcaaatggatttcagcctcactgctttactttatttatttatttgtgatatctttgacaatacctctgttacaaatgagcctaaggaagtatttaggtcctatagccttgaaatgcgatggggtctttctgtgcagggttaaatcratgtaacatcaytgagaaaagtccctaatgcagtccatgcgtgttgttctgagtgctgaacactagccctggtttcaagcttagtccaggattacaaaatktattgatgccttcatcactcaacccctccgtgcctcagttccccctttgcaaagtgttgtcattgtcccccygctttgtaagtcagtaaagaacttctgtcaccaatcctacctacctgcaagcattgtgcgtatgtaacgtaacagtcttcatggaacagaaggttggttttactccacaagtttcattacaaagtaaatagtctttttt

SEQ ID NO: 70147 - DNA, 600 bp, Chicken  19866894343274_5
ggtaaggccaataaggaagcatttgttattatgctgctattatctttagcatgtcaaatggatttcagcctcactgctttactttatttatttatttgtgatatctttgacaatacctctgttacaaatgagcctaaggaagtatttaggtcctatagccttgaaatgcgatggggtctttctgtgcagggttaaatcratgtaacatcaytgagaaaagtccctaatgcagtccatgcgtgttgttctgagtgctgaacactagccctggtttcaagcttagtccaggattacaaaatktattgatgccttcatcactcaacccctccgtgcctcagttccccctttgcaaagtgttgtcattgtcccccygctttgtaagtcagtaaagaacttctgtcaccaatcctacctacctgcaagcattgtgcgtatgtaacgtaacagtcttcatggaacagaaggttggttttactccacaagtttcattacaaagtaaatagtcttttttcagctgccttcagcatatctgtaaacaatgacacatggctttcccaacactatcttgagtgcaagagtgtttcagaggccagtgactca

SEQ ID NO: 70148 - DNA, 600 bp, Chicken  19866894343274_6
actgctttactttatttatttatttgtgatatctttgacaatacctctgttacaaatgagcctaaggaagtatttaggtcctatagccttgaaatgcgatggggtctttctgtgcagggttaaatcratgtaacatcaytgagaaaagtccctaatgcagtccatgcgtgttgttctgagtgctgaacactagccctggtttcaagcttagtccaggattacaaaatktattgatgccttcatcactcaacccctccgtgcctcagttccccctttgcaaagtgttgtcattgtcccccygctttgtaagtcagtaaagaacttctgtcaccaatcctacctacctgcaagcattgtgcgtatgtaacgtaacagtcttcatggaacagaaggttggttttactccacaagtttcattacaaagtaaatagtcttttttcagctgccttcagcatatctgtaaacaatgacacatggctttcccaacactatcttgagtgcaagagtgtttcagaggccagtgactcagttcccagcattagccctgccatgacctggtgcacttgcttggacaagagtctgaaaccaagcccaggacgt

SEQ ID NO: 70149 - DNA, 368 bp, Chicken  19866894343276_1
tcgccacacagccctcaagtgtttggtttggtaggagggggctggggaagcaacatccctcccactgtaagcgaagatcaggttcgtgaccacctgaggaacctgaacatctgcaagtctatgggtcccatgagatgcaccccagagtccttagggaactagctgatgtagtcaccaagccactctctatgacatttggaaagtcctggagatcagtctctggtgactggaaaaaaggcaacatcaaacccacttctaagaaggataaaaaggatgaccctcggaactaccaacccatcrgtctcacctctgtgagctaaggcacatggaaggcagggagaaccaacaggcttcaccaaggccaaatc

SEQ ID NO: 70150 - DNA, 600 bp, Chicken  19866894343281_1
agacgatgaattatgagtatattttttcaaactctggtcttcctgctgtcacattgttttcatagacgtggtttcttaggctatgttcttcaaagaaggatcattttcttcctctgccagcaaagggaattgtcctgcatttattatgggaagcaagggatgcatttcaattcagacctcgtggtttcttctctcctactgcacaaagctaaggctgagcatagatttgcacaggagaaactatcaatcttttggtcaaacaggactcagcctccaagagacataaacatacttcaggtraaagaaattgtgaatggatctcagatgagagaatgtgcagacacggggtgatttgagacactttttctaatgtaaccctttgctgaggcagagccacaaaacatgatgatcttcacagctgaacctagaaattaaaaaaaaacatattctcttgatttttctatttttgactgtggacctgaagtcaagcactgacaactatgatagcttaaaagcaaactattatatctcacataatcctgtgtttatcataggtcaacatcacatgcaactgtaaaaaagacctacacctttcaccgt

SEQ ID NO: 70151 - DNA, 599 bp, Chicken  19866894343282_1
  misc_feature (1)..(221): n is any nucleotide
nnnnnnnnnnnnnnnnnnnnnnnnnnnnnnnnnnnnnnnnnnnnnnnnnnnnnnnnnnnnnnnnnnnnnnnnnnnnnnnnnnnnnnnnnnnnnnnnnnnnnnnnnnnnnnnnnnnnnnnnnnnnnnnnnnnnnnnnnnnnnnnnnnnnnnnnnnnnnnnnnnnnnnnnnnnnnnnnnnnnnnnnnnnnnnnnnnnnnnnnnnnnnnnnnnnnnnnnnnnnntcttactggcattagtagtactggtatcttactgttgtccttctggtaccttaatggtgtcctgctggtactaatagtrtcctactggtgccttacaggtgtctctggtgccttacagttttaatagtgtcttagtggtgtcttactggtgtcttactgatctcagtagcattgtagtggtgtcctacaagtcttagtggtgttctgctggtcttagtcgtgtcctactagagccttagtagtgttagtgttactggtgccttactggtttagtactgtcttaatggtgccctaatggttccttaccggtgttagttgaactggttttgtatttgtgacttactggtgtgactgatgccttactggtgtcactggtgt

SEQ ID NO: 70152 - DNA, 599 bp, Chicken  19866894343283_1
  misc_feature (1)..(11): n is any nucleotide
nnnnnnnnnnngcgctcagcacagctcgtaacatccttccctctgtgcactgcaccagggctgtgtgtctgcaggcggttttgctctccaaatccacgtcatgggaagctcaccctaaatcgatcctggttaaccttgttcgaggcgatgatgctgggacataaatcattagcttaacaccggtgactcagctttgggggagcagcagctcaggcgggcttccatcaagctgacaagtgacagcagaggcaaggccaagctcagccttgtgccaggcctgctgtcctggagcagctgggragggaaaggcaaaggaaaatgggaagggaggagaagggcagccctggttgaggttggcaccagccctgccagcatgggtgtccactgcaagcttgggtctcactgagcagtgatgtacttgtaggcctgcttggagcacagccctggcaccggctgtatcagagcctctcttcctcttttccaaccccctctttacacccacctgcttcttaaatgtgttcctttttcatcgtctgctgagcttttcctgctctttatttttaagaatggggaaggaagttggtgtgtcagttttctgg

SEQ ID NO: 70153 - DNA, 600 bp, Chicken  19866894343283_2
caggcggtaatctgtagctccctctgagctggggaggtgggagaggactggagtaggatgagcagcaagcacagctctcctatgatttatccaacaggcagaatggctgctctgccatagactgcagtaggagaagaaaatagaaaagagggctagtgttccaggtgaaagaaattggctttaggcctcgttaatccatagtaggtgatgtgcaagcgtggctaggtaaacacgcctttgaaatgcatgcttaatattctgcatgctcgccactgtgtgtgtttgcagcatctgtacttsggtgatagatgttaccacgagctgcccaaatcgrctgcatctatttagtcaactgcagtaaaagcccggttgttggtttgtggttttctttaggaggctgctagtattttattgttctcattttttggtgtcaatcaatcaaatgcatgatggctgtagcctaatagtttgcaggtgtattactgtcaatttttaaagcgtcattcagtccccactattaagcttaaattaagcaaaagctccgtgtggtgtttttcagcttagtgggctatgtggagaggtatgatctttgtttatgct

SEQ ID NO: 70154 - DNA, 600 bp, Chicken  19866894343283_3
aggtgggagaggactggagtaggatgagcagcaagcacagctctcctatgatttatccaacaggcagaatggctgctctgccatagactgcagtaggagaagaaaatagaaaagagggctagtgttccaggtgaaagaaattggctttaggcctcgttaatccatagtaggtgatgtgcaagcgtggctaggtaaacacgcctttgaaatgcatgcttaatattctgcatgctcgccactgtgtgtgtttgcagcatctgtacttsggtgatagatgttaccacgagctgcccaaatcgrctgcatctatttagtcaactgcagtaaaagcccggttgttggtttgtggttttctttaggaggctgctagtattttattgttctcattttttggtgtcaatcaatcaaatgcatgatggctgtagcctaatagtttgcaggtgtattactgtcaatttttaaagcgtcattcagtccccactattaagcttaaattaagcaaaagctccgtgtggtgtttttcagcttagtgggctatgtggagaggtatgatctttgtttatgctggaaaacttcaagggtggttgttgggcatctata

SEQ ID NO: 70155 - DNA, 600 bp, Chicken  19866894343285_1
catgtttagaatgtgttttaaatagtgatttaccatctcttaaaataaatatcatttgtaccagacagtctctggcttagttttgttttccctatctgacatgaggatcccattttccctttagtatgctgacaacacaacttcgttaaggctggttggttccatttgcattggacatctcttctgcatatagattgatgagtttaatcagcgaatcaggagaaagacttggacatcaatcagtgtcagttttctttctttctaatttctgatttgctacttctagttatcaatgcaatraaatgataccaatttaagataaaatcttagaaataatgcaaagttagtgtaaaatttccaacagacccaggagatctactgcattaccatcactgatattttgaaaaggatatgtcatatttaacagtcaggacaaatgatgaacccattgttcagagttcagtagagaaaaggcatctagtaatgtctaatctgatgatattgaatcttctattgtctcattagtaaagcaaaaataatccgatgcatttccatattctcctaaagaatggaaaaaacagtttgtgcattaaaacatag

SEQ ID NO: 70156 - DNA, 600 bp, Chicken  19866894343288_1
cttgcttgtgattagacttgggcatgagtgaagagtagttgcgagtcatgatgatatgcagatgattatgctctcaatatatttttcatctctacattttcatacccagcagatgcttctggaagcatttgcttatagtccataagtaattcttgagcttttctttttggtgctggttagtattgttagtaactaggaatagtttaattggtttgttttaatgagaactctgtttttgtgatgttacgaatatgcaggaagcttacagtatatattgatatctgtgtacttctgaatatmaaatcattcaatttttgatacccaggaacttcttcaggatgaaggactacatttcttgccgttgctggattcttgggatcatctgaagtaatctgaccctcatccacttcaactttttgacgaagcattatcagttcttcagaagttttctccatattgtatatattgaacttttgtcagttaagaagccacatatcagaaatgtaagtttggcaactgacttaaggtcaggcttatgtagaaaattactatttttttgtctgctacttatgacagcctgtcactaggaaaataaaacct

SEQ ID NO: 70157 - DNA, 541 bp, Chicken  19866894343288_2
tgtagaaaattactatttttttgtctgctacttatgacagcctgtcactaggaaaataaaaccttagtgtggatgaggaaaacagaaatacagtgtttaaaaaaaaaaatctatctgggaatcattagcagttatagttttaatgaaaaatcatagtactggaacatatgatataaatttcttttgatgttcttggtgtttaatgttgcctaaggcttagcttcaggaagttgacttcatccatactcttaatgggtacggctcaaggactgatctttaagaatgttctcaactataaaraggagatctggagtgagagtttgtgtattaattaagggcaaaactgcaacaggcaccaaaatcttggcaatgaggggattattttattcgtgtgaggtaactaagtatcatgcttggaatggcatgcagacagtctttgctacagtaatcacccctgtcatcttttagcaatgtgatttctaaaagactagattgtttattgagactgtctcaaagctgctgaagatgattctcctcaatg

SEQ ID NO: 70158 - DNA, 600 bp, Chicken  19866894343291_1
attccagtgaactcaaatcgatgtttaaaggttttgctattgattactggggttcaagttgtcattttaaaatcatcaagagtgctacattacatactacatgcatatattgtctgcctccatgcataagagatcccaaagagctgttaacaactaagtctatatgggaaatcatccatatgttatttaattgaagcattcattaaggaatgaaaggcaattgttttccaagccctgaaaactaaaatttgttttggaaaaatgtaaaaattattttatccgagtaaaatatctgttagyattaaagtaggcaaagattaattaatgatcaagggtaggattttgctagattggagttaatagctgaccccttcagaaatatattctctaatrctccttgacagtttacttctaaatcttgtatcttctctgagggatccaacagtaagactgataatctggtaactaaatgctraagagtaagtaatcaagtaataatatgccattttccattccgttttcttccatgtgataaattgatcacctgcttccagttaatgtcaagatattgccagcactttttacagttttgttcattta

SEQ ID NO: 70159 - DNA, 600 bp, Chicken  19866894343291_2
atactacatgcatatattgtctgcctccatgcataagagatcccaaagagctgttaacaactaagtctatatgggaaatcatccatatgttatttaattgaagcattcattaaggaatgaaaggcaattgttttccaagccctgaaaactaaaatttgttttggaaaaatgtaaaaattattttatccgagtaaaatatctgttagyattaaagtaggcaaagattaattaatgatcaagggtaggattttgctagattggagttaatagctgaccccttcagaaatatattctctaatrctccttgacagtttacttctaaatcttgtatcttctctgagggatccaacagtaagactgataatctggtaactaaatgctraagagtaagtaatcaagtaataatatgccattttccattccgttttcttccatgtgataaattgatcacctgcttccagttaatgtcaagatattgccagcactttttacagttttgttcatttactggtgtccgtataggcaaactcaagtggatttagcagtgggacaacaactgcagcataaataaaaaataccacactctaaatccagtctcta

SEQ ID NO: 70160 - DNA, 600 bp, Chicken  19866894343291_3
ccatatgttatttaattgaagcattcattaaggaatgaaaggcaattgttttccaagccctgaaaactaaaatttgttttggaaaaatgtaaaaattattttatccgagtaaaatatctgttagyattaaagtaggcaaagattaattaatgatcaagggtaggattttgctagattggagttaatagctgaccccttcagaaatatattctctaatrctccttgacagtttacttctaaatcttgtatcttctctgagggatccaacagtaagactgataatctggtaactaaatgctraagagtaagtaatcaagtaataatatgccattttccattccgttttcttccatgtgataaattgatcacctgcttccagttaatgtcaagatattgccagcactttttacagttttgttcatttactggtgtccgtataggcaaactcaagtggatttagcagtgggacaacaactgcagcataaataaaaaataccacactctaaatccagtctctamaatgctactcagtgctcttcagtgctactcttataggaaactgtacataatatttctcttcactaaactgttttgctatta

SEQ ID NO: 70161 - DNA, 600 bp, Chicken  19866894343291_4
tccttgacagtttacttctaaatcttgtatcttctctgagggatccaacagtaagactgataatctggtaactaaatgctraagagtaagtaatcaagtaataatatgccattttccattccgttttcttccatgtgataaattgatcacctgcttccagttaatgtcaagatattgccagcactttttacagttttgttcatttactggtgtccgtataggcaaactcaagtggatttagcagtgggacaacaactgcagcataaataaaaaataccacactctaaatccagtctctamaatgctactcagtgctcttcagtgctactcttataggaaactgtacataatatttctcttcactaaactgttttgctattattttttatatttgatgatgattttgattgaaactatttttgatgtttataaaggtaaacctttataatgtaatgatataatcaagtaggaaccagtgagccatagggacccataagtatacaaatacagtgagcagatattctttactctgtccaaacagacacctggcagagaataaacatataacatgcaagtaaaacaaataaagaaattgacacc

SEQ ID NO: 70162 - DNA, 600 bp, Chicken  19866894343291_5
acataatatttctcttcactaaactgttttgctattattttttatatttgatgatgattttgattgaaactatttttgatgtttataaaggtaaacctttataatgtaatgatataatcaagtaggaaccagtgagccatagggacccataagtatacaaatacagtgagcagatattctttactctgtccaaacagacacctggcagagaataaacatataacatgcaagtaaaacaaataaagaaattgacaccaccaaatgtcgtattaatggattattcctctgttttcatttggsgragaggaacttaaacgataagctaaattaagaaaacaaaagcatygagcccaaaaggatgctgacaatggggtaagagaacagagcacatagatgttaagtgaggcaggggattaggaagtgagagggttggagcaaactgtacaggccagaggaatactgcccaagtatgagcttttctgaatgtccaaatctcgctacctcaacgtcttttcctacagttctgaggtctagctaggtgtgggtagtttcttcctccctttttcctttccaagcaaatttcctactgtgggataagaa

SEQ ID NO: 70163 - DNA, 600 bp, Chicken  19866894343291_6
ataatatttctcttcactaaactgttttgctattattttttatatttgatgatgattttgattgaaactatttttgatgtttataaaggtaaacctttataatgtaatgatataatcaagtaggaaccagtgagccatagggacccataagtatacaaatacagtgagcagatattctttactctgtccaaacagacacctggcagagaataaacatataacatgcaagtaaaacaaataaagaaattgacaccaccaaatgtcgtattaatggattattcctctgttttcatttggsgragaggaacttaaacgataagctaaattaagaaaacaaaagcatygagcccaaaaggatgctgacaatggggtaagagaacagagcacatagatgttaagtgaggcaggggattaggaagtgagagggttggagcaaactgtacaggccagaggaatactgcccaagtatgagcttttctgaatgtccaaatctcgctacctcaacgtcttttcctacagttctgaggtctagctaggtgtgggtagtttcttcctccctttttcctttccaagcaaatttcctactgtgggataagaaaa

SEQ ID NO: 70164 - DNA, 600 bp, Chicken  19866894343291_7
tttgatgatgattttgattgaaactatttttgatgtttataaaggtaaacctttataatgtaatgatataatcaagtaggaaccagtgagccatagggacccataagtatacaaatacagtgagcagatattctttactctgtccaaacagacacctggcagagaataaacatataacatgcaagtaaaacaaataaagaaattgacaccaccaaatgtcgtattaatggattattcctctgttttcatttggsgragaggaacttaaacgataagctaaattaagaaaacaaaagcatygagcccaaaaggatgctgacaatggggtaagagaacagagcacatagatgttaagtgaggcaggggattaggaagtgagagggttggagcaaactgtacaggccagaggaatactgcccaagtatgagcttttctgaatgtccaaatctcgctacctcaacgtcttttcctacagttctgaggtctagctaggtgtgggtagtttcttcctccctttttcctttccaagcaaatttcctactgtgggataagaaaatggcttctcatttgtgggtcactgtgctgcagcatgtacatggg

SEQ ID NO: 70165 - DNA, 600 bp, Chicken  19866894343301_1
atgaggccacatccagagtaggttaccctagactgtgcacaaagtaaaagctgagaatccgatataattgcaaagaaaggtaagtagtattctggtatataatcacaagccttttaagttgctgttttttgctatgataacattgatttcgttgaccttgtggtcctttatactcttaaaaaaggataacatttctttgaccatagtgttcaaggacaaggaactgttctgcttgcaattcctagagcagataaactgtagatgcagaaatgccccattatttgtgaaaatttcactttygyttgagagacactgctgattttgtcagatgtgtggatcaaagagagccaacataagctttttgaatttgcgtggatgtaggagctttattatcatcactcaacatggagactggagccttccactggcatttttggctcagccctgtaccatcagctagtaatgctttcttcttsttctttcttttccttcccttttcctgttattctaggttgaacttctactcaggtaatgagctggaattaacatttgatccttgccctaaaaagacatgacaatagtctagagagtgcaaatcac

SEQ ID NO: 70166 - DNA, 600 bp, Chicken  19866894343301_2
gaggccacatccagagtaggttaccctagactgtgcacaaagtaaaagctgagaatccgatataattgcaaagaaaggtaagtagtattctggtatataatcacaagccttttaagttgctgttttttgctatgataacattgatttcgttgaccttgtggtcctttatactcttaaaaaaggataacatttctttgaccatagtgttcaaggacaaggaactgttctgcttgcaattcctagagcagataaactgtagatgcagaaatgccccattatttgtgaaaatttcactttygyttgagagacactgctgattttgtcagatgtgtggatcaaagagagccaacataagctttttgaatttgcgtggatgtaggagctttattatcatcactcaacatggagactggagccttccactggcatttttggctcagccctgtaccatcagctagtaatgctttcttcttsttctttcttttccttcccttttcctgttattctaggttgaacttctactcaggtaatgagctggaattaacatttgatccttgccctaaaaagacatgacaatagtctagagagtgcaaatcactg

SEQ ID NO: 70167 - DNA, 600 bp, Chicken  19866894343301_3
taaaaaaggataacatttctttgaccatagtgttcaaggacaaggaactgttctgcttgcaattcctagagcagataaactgtagatgcagaaatgccccattatttgtgaaaatttcactttygyttgagagacactgctgattttgtcagatgtgtggatcaaagagagccaacataagctttttgaatttgcgtggatgtaggagctttattatcatcactcaacatggagactggagccttccactggcatttttggctcagccctgtaccatcagctagtaatgctttcttcttsttctttcttttccttcccttttcctgttattctaggttgaacttctactcaggtaatgagctggaattaacatttgatccttgccctaaaaagacatgacaatagtctagagagtgcaaatcactgaatgctgtaattagcaatgagactctgaaatttgaaaaggcaatagaagctgattcttgttcctgagaaaagggagcaaagcagagagaaccacaactaaatcagtggtatcytgtaycttattgtttgataactacactgacatgatgatgtagctaatagwagaggtcacta

SEQ ID NO: 70168 - DNA, 497 bp, Chicken  19866894343301_4
agccttccactggcatttttggctcagccctgtaccatcagctagtaatgctttcttcttsttctttcttttccttcccttttcctgttattctaggttgaacttctactcaggtaatgagctggaattaacatttgatccttgccctaaaaagacatgacaatagtctagagagtgcaaatcactgaatgctgtaattagcaatgagactctgaaatttgaaaaggcaatagaagctgattcttgttcctgagaaaagggagcaaagcagagagaaccacaactaaatcagtggtatcytgtaycttattgtttgataactacactgacatgatgatgtagctaatagwagaggtcactaagagggctgatgtaggagaactaatagagagccaagtagcagaaaccttttggcaattgctttatatggatttatgtaacaaatctaatttcagattaagtaattgtttttcagctcatagttttcaaccacacca

SEQ ID NO: 70169 - DNA, 492 bp, Chicken  19866894343301_5
tccactggcatttttggctcagccctgtaccatcagctagtaatgctttcttcttsttctttcttttccttcccttttcctgttattctaggttgaacttctactcaggtaatgagctggaattaacatttgatccttgccctaaaaagacatgacaatagtctagagagtgcaaatcactgaatgctgtaattagcaatgagactctgaaatttgaaaaggcaatagaagctgattcttgttcctgagaaaagggagcaaagcagagagaaccacaactaaatcagtggtatcytgtaycttattgtttgataactacactgacatgatgatgtagctaatagwagaggtcactaagagggctgatgtaggagaactaatagagagccaagtagcagaaaccttttggcaattgctttatatggatttatgtaacaaatctaatttcagattaagtaattgtttttcagctcatagttttcaaccacacca

SEQ ID NO: 70170 - DNA, 447 bp, Chicken  19866894343301_6
ctttcttcttsttctttcttttccttcccttttcctgttattctaggttgaacttctactcaggtaatgagctggaattaacatttgatccttgccctaaaaagacatgacaatagtctagagagtgcaaatcactgaatgctgtaattagcaatgagactctgaaatttgaaaaggcaatagaagctgattcttgttcctgagaaaagggagcaaagcagagagaaccacaactaaatcagtggtatcytgtaycttattgtttgataactacactgacatgatgatgtagctaatagwagaggtcactaagagggctgatgtaggagaactaatagagagccaagtagcagaaaccttttggcaattgctttatatggatttatgtaacaaatctaatttcagattaagtaattgtttttcagctcatagttttcaaccacacca

SEQ ID NO: 70171 - DNA, 600 bp, Chicken  19866894343309_1
aacttatctccagaagatatttcatcctggcagtagagaatgagattgtgttcctgctctcagcaacaaaacagcctccacttggcccgcttgcttcacaccacctctgctcccacccacaggccagatgcgaggccccgcgggtgcatgggtgttcctgcatcccctgggtgaccctgatcagcccatgagataaggcagcagtgggatgggaacaaagcactgccaggctgctccaacacaaggccatggagacagctgtgctggcacagcccaatgcagtagctgcttgaggatggyatctccaaacagcagttctctggttagtttttgtgaccatacagagcctctgaatcaggttaggcattaccatcataccaccaaatcacacctaagtctcttcctggatatcagtggtcagggacacctgggaggctctgaaactccaggccgttctcttctcagccttcccatgactccttgcaaccagtttttatccagcctggctaatggagaaaaatctgacgtgaattcaggtgtaacactgtagttcacagacagactacagcattccaactgcaatgatttccaagctcgtat

SEQ ID NO: 70172 - DNA, 599 bp, Chicken  19866894343311_1
  misc_feature (1)..(9): n is any nucleotide
nnnnnnnnntatttagagcagcctgtattgaactgtttattgccttttgcttataagtcccaaagttgtttttggcttggagactgatccaagctgttccgtgctctcagaagatgaatttttcatttttccttccccccattccctgtgcttttccccttctgtgcagtaaggtgggaggggaggggcaactaattcctgaacccctctgggacaaactgtgtgtgtctttctggcttcaggactgcacaaggaggtagggcacgtgcctgcccctctcgcagtccccagagttgtttkgggaagcattgagccatcattaccttaggtgcgttctgacaggttatatactgtattcttgctcagaagagcagtgcaaaacagcttacagagttcttaaaaatggattatttaaaagtgcttgttatcctgagcacctggtacctttagctctgcagtgaattactggggccacagtgtgctctgtatgttgtgagtagcttcacctggcaatcctcaattgagtatatcagcatacttgaggaaagcccctttgctaattcttgagtcttggggacagccatgaagtggatctagca

SEQ ID NO: 70173 - DNA, 599 bp, Chicken  19866894343312_1
  misc_feature (1)..(92): n is any nucleotide
nnnnnnnnnnnnnnnnnnnnnnnnnnnnnnnnnnnnnnnnnnnnnnnnnnnnnnnnnnnnnnnnnnnnnnnnnnnnnnnnnnnnnnnnnnnncacaaagaactgaatatggcccatggaaagacccctgaaaccaagcaaacagctagaacaaaccaaccagagctttattattaaaaacctctatctctgttctgagatcaagattagatatgcattgtccttgacagtcaggggctgtctgcccaacacagttataaatgaggatatagcctgatttgaggaaattattcatatgttmcttcagattcagttacctggaataaattatttgttttgacagcctttgtgtcttacctcattagaaagtgaatcagaggcagatccatgtccacagcttcccatgaaactgctgcagtttcaagaggtcacaaaataattaaattccacgtcacagctgagctaaaacagaaactttttatgcctctgagcttcttaaactggacaacgctcaaacacagcagtctgtgggttttaggtaagttttaaagacctctcagcaaatgcaaaaggtactattctatggctcttgttctatct

SEQ ID NO: 70174 - DNA, 600 bp, Chicken  19866894343314_1
tattaggcagctttcgtaaactctctgttttgttctctgctcctgagcttatacaggcatttggatagggagcaaaagacataaattcctgtgtcaaatgagacgagctgctcttctccagaaagcaaataggtagatctctgcctgacctgaacctctagaaaaactggatttagtctttgtgcaagagaaaaagatgacttgattcatcctcatttttcagaaacaatattccccaacttgtaattcaatctctaactgcatcatctagcagagcattaaccatctctcagtccctcrtttcttagcagggatgygtcagccttgcaatgttaggtaaaagggcttgagaaaactgtacaagcacagstatagttacaagtcctcacaaactggtgcctgaaatcctggattgtttgcaagcctttttgagcttgtcttcataccacactttgaccctagccatagaagagagaattgctgggagactctcaccttagactgtggcaatacatgattataccagcagccagacgttacagctggctctcatttcccagtctccagggtaatgaacttctgagagtgaagttttattac

SEQ ID NO: 70175 - DNA, 600 bp, Chicken  19866894343314_2
aaactctctgttttgttctctgctcctgagcttatacaggcatttggatagggagcaaaagacataaattcctgtgtcaaatgagacgagctgctcttctccagaaagcaaataggtagatctctgcctgacctgaacctctagaaaaactggatttagtctttgtgcaagagaaaaagatgacttgattcatcctcatttttcagaaacaatattccccaacttgtaattcaatctctaactgcatcatctagcagagcattaaccatctctcagtccctcrtttcttagcagggatgygtcagccttgcaatgttaggtaaaagggcttgagaaaactgtacaagcacagstatagttacaagtcctcacaaactggtgcctgaaatcctggattgtttgcaagcctttttgagcttgtcttcataccacactttgaccctagccatagaagagagaattgctgggagactctcaccttagactgtggcaatacatgattataccagcagccagacgttacagctggctctcatttcccagtctccagggtaatgaacttctgagagtgaagttttattacttttttctttctataaa

SEQ ID NO: 70176 - DNA, 600 bp, Chicken  19866894343314_3
agcaaaagacataaattcctgtgtcaaatgagacgagctgctcttctccagaaagcaaataggtagatctctgcctgacctgaacctctagaaaaactggatttagtctttgtgcaagagaaaaagatgacttgattcatcctcatttttcagaaacaatattccccaacttgtaattcaatctctaactgcatcatctagcagagcattaaccatctctcagtccctcrtttcttagcagggatgygtcagccttgcaatgttaggtaaaagggcttgagaaaactgtacaagcacagstatagttacaagtcctcacaaactggtgcctgaaatcctggattgtttgcaagcctttttgagcttgtcttcataccacactttgaccctagccatagaagagagaattgctgggagactctcaccttagactgtggcaatacatgattataccagcagccagacgttacagctggctctcatttcccagtctccagggtaatgaacttctgagagtgaagttttattacttttttctttctataaaatggttggctttacaatatagtcattaaaaagcttaaatgaaaaaaaaaaaga

SEQ ID NO: 70177 - DNA, 600 bp, Chicken  19866894343317_1
ttgtgacctcacaaaattgcctaatttatgcttttgaacttacttatttgaatattattcttactgctctgtgatgtcagctcacatttttagttatggagataaatctttactctgtaatagcagtacttccagactttgtgacacagcatatgtaaggagagcatttaaagtaagactgttctcttcaagttaagattcccatgttagaatggcaactccttggacagattccttttctggccaacaagaacaggtcatcatagggctttgttcagcccactccaggaagactataayctcscctcgaagtattcgttactctctactgactgtaatgatgatgttgatcagtagaggcacatacatccgctttgttaatgtccactggtttgctgtgggttttgtgctggttttgatttcttttttaattttaattgtwtttaaagaaaccggataatgttacttgtgtctctggttcttttttgtggattgttaatctcagctataatcagtctcaagaccaaacctgmggactgctagatatatctgatctccactgkgttctttactctttttatattaattgcctcattgtaa

SEQ ID NO: 70178 - DNA, 600 bp, Chicken  19866894343317_2
gacctcacaaaattgcctaatttatgcttttgaacttacttatttgaatattattcttactgctctgtgatgtcagctcacatttttagttatggagataaatctttactctgtaatagcagtacttccagactttgtgacacagcatatgtaaggagagcatttaaagtaagactgttctcttcaagttaagattcccatgttagaatggcaactccttggacagattccttttctggccaacaagaacaggtcatcatagggctttgttcagcccactccaggaagactataayctcscctcgaagtattcgttactctctactgactgtaatgatgatgttgatcagtagaggcacatacatccgctttgttaatgtccactggtttgctgtgggttttgtgctggttttgatttcttttttaattttaattgtwtttaaagaaaccggataatgttacttgtgtctctggttcttttttgtggattgttaatctcagctataatcagtctcaagaccaaacctgmggactgctagatatatctgatctccactgkgttctttactctttttatattaattgcctcattgtaagact

SEQ ID NO: 70179 - DNA, 600 bp, Chicken  19866894343317_3
gacacagcatatgtaaggagagcatttaaagtaagactgttctcttcaagttaagattcccatgttagaatggcaactccttggacagattccttttctggccaacaagaacaggtcatcatagggctttgttcagcccactccaggaagactataayctcscctcgaagtattcgttactctctactgactgtaatgatgatgttgatcagtagaggcacatacatccgctttgttaatgtccactggtttgctgtgggttttgtgctggttttgatttcttttttaattttaattgtwtttaaagaaaccggataatgttacttgtgtctctggttcttttttgtggattgttaatctcagctataatcagtctcaagaccaaacctgmggactgctagatatatctgatctccactgkgttctttactctttttatattaattgcctcattgtaagactgctctttaatcagcttgcagcctccccatttatcccaataataataaataatgtaatgtaaaatctgcaccagtttccagcagaatttctacctacttcactatctttgtatcatcataaataactgatatttaggga

SEQ ID NO: 70180 - DNA, 600 bp, Chicken  19866894343317_4
ccttttctggccaacaagaacaggtcatcatagggctttgttcagcccactccaggaagactataayctcscctcgaagtattcgttactctctactgactgtaatgatgatgttgatcagtagaggcacatacatccgctttgttaatgtccactggtttgctgtgggttttgtgctggttttgatttcttttttaattttaattgtwtttaaagaaaccggataatgttacttgtgtctctggttcttttttgtggattgttaatctcagctataatcagtctcaagaccaaacctgmggactgctagatatatctgatctccactgkgttctttactctttttatattaattgcctcattgtaagactgctctttaatcagcttgcagcctccccatttatcccaataataataaataatgtaatgtaaaatctgcaccagtttccagcagaatttctacctacttcactatctttgtatcatcataaataactgatatttagggaagacgtgtgtatgcagtacagagtrattctgctcctgtactccccttgtgatatcagtactgcatcattagtctggggacttcctggtcag

SEQ ID NO: 70181 - DNA, 600 bp, Chicken  19866894343317_5
tagggctttgttcagcccactccaggaagactataayctcscctcgaagtattcgttactctctactgactgtaatgatgatgttgatcagtagaggcacatacatccgctttgttaatgtccactggtttgctgtgggttttgtgctggttttgatttcttttttaattttaattgtwtttaaagaaaccggataatgttacttgtgtctctggttcttttttgtggattgttaatctcagctataatcagtctcaagaccaaacctgmggactgctagatatatctgatctccactgkgttctttactctttttatattaattgcctcattgtaagactgctctttaatcagcttgcagcctccccatttatcccaataataataaataatgtaatgtaaaatctgcaccagtttccagcagaatttctacctacttcactatctttgtatcatcataaataactgatatttagggaagacgtgtgtatgcagtacagagtrattctgctcctgtactccccttgtgatatcagtactgcatcattagtctggggacttcctggtcagaggctgctctcaaatcatcgcgtcagtgat

SEQ ID NO: 70182 - DNA, 600 bp, Chicken  19866894343317_6
tgtgtctctggttcttttttgtggattgttaatctcagctataatcagtctcaagaccaaacctgmggactgctagatatatctgatctccactgkgttctttactctttttatattaattgcctcattgtaagactgctctttaatcagcttgcagcctccccatttatcccaataataataaataatgtaatgtaaaatctgcaccagtttccagcagaatttctacctacttcactatctttgtatcatcataaataactgatatttagggaagacgtgtgtatgcagtacagagtrattctgctcctgtactccccttgtgatatcagtactgcatcattagtctggggacttcctggtcagaggctgctctcaaatcatcgcgtcagtgatggatatttccttcctggatacatgcagtcctcagttttcaccttcacgtcattgtatggcagggaactctttaggaggaaatatttctatttatctgttgtgcctcttgttcttaaattgcagaagaagtcagtgatattttttgttggaaccctgtcattccccatcaatgtcattgtcatagttctctgtgctttgtgcctt

SEQ ID NO: 70183 - DNA, 600 bp, Chicken  19866894343319_1
taatttgctggcaaattagggttatggctcaggatttgggacggccacatggggcgtggatgggtgtgctctgagctcggggcgcaggcaggaggcagcgatgcagctccgccaaagctccttgtttgcagaatattaataagagtcaagctgtgcgccgcaattaaaatgctgattatgatttcttccatctgtagccgatgctactcgggaaattaaataaaaaggaaggagagatgtggatgttgtgtggggaaacgtctgggagagaagcagccattgctcgcagctctgcatccygcactgtgctcccagaaggcaattttggggaatcggctgaatttccaagggtttaaaattgcatgaatggggggatgtgcaggttggtgtgggcactcatgcaaggagcagagggaagcttcagaaagcacagtgttgcatggggaaggagtacgtgctccgatcgcatccatagcacggaattgtgccctcgccccagtggcaggatggagagccagcgtgaacggaggagtgctgatgtattggtgtatttttgttcctcctcgtgctcccctagccggctcttaacaatgaagtgac

SEQ ID NO: 70184 - DNA, 600 bp, Chicken  19866894343323_1
ggtggcagaagtgtccgcagtcccttttcagggatgctaagcatcagaactgataggttaaagatcagtaagagttcagtaggaagaagcaggggcctgggaacaaccaacatcagaaaaaaaaggctcctccaggtctcaacctgcactgggacatccctaaagcccaccaaaggaagtggggccaatgggacgccacatcctttcctcttttccttccatgaggaaggagatactcagggatagctcacaatggggatccaacccgtgcacatcacaccatgaatatacacccagacragtgcaygaagacagcagacgcagcagagctctcccatccctgctccrtgcttctgctcccaacacacgtgtcagaatcagaacgtgatctgtgcctgctccctgcaccccaaaatcccagcccacagccgaggctgcaggcgaggacggatccacaatgggcacagcatccaataaaaatctcactcaagagacagctgatccctgggtgcacctcagcagtaaaactggaatcaacttattgctcttgtaaagcagtaggacagaaaaataaatgtaattcctacccacctcaggcat

SEQ ID NO: 70185 - DNA, 600 bp, Chicken  19866894343323_2
gaagtgtccgcagtcccttttcagggatgctaagcatcagaactgataggttaaagatcagtaagagttcagtaggaagaagcaggggcctgggaacaaccaacatcagaaaaaaaaggctcctccaggtctcaacctgcactgggacatccctaaagcccaccaaaggaagtggggccaatgggacgccacatcctttcctcttttccttccatgaggaaggagatactcagggatagctcacaatggggatccaacccgtgcacatcacaccatgaatatacacccagacragtgcaygaagacagcagacgcagcagagctctcccatccctgctccrtgcttctgctcccaacacacgtgtcagaatcagaacgtgatctgtgcctgctccctgcaccccaaaatcccagcccacagccgaggctgcaggcgaggacggatccacaatgggcacagcatccaataaaaatctcactcaagagacagctgatccctgggtgcacctcagcagtaaaactggaatcaacttattgctcttgtaaagcagtaggacagaaaaataaatgtaattcctacccacctcaggcataaataca

SEQ ID NO: 70186 - DNA, 600 bp, Chicken  19866894343323_3
actgataggttaaagatcagtaagagttcagtaggaagaagcaggggcctgggaacaaccaacatcagaaaaaaaaggctcctccaggtctcaacctgcactgggacatccctaaagcccaccaaaggaagtggggccaatgggacgccacatcctttcctcttttccttccatgaggaaggagatactcagggatagctcacaatggggatccaacccgtgcacatcacaccatgaatatacacccagacragtgcaygaagacagcagacgcagcagagctctcccatccctgctccrtgcttctgctcccaacacacgtgtcagaatcagaacgtgatctgtgcctgctccctgcaccccaaaatcccagcccacagccgaggctgcaggcgaggacggatccacaatgggcacagcatccaataaaaatctcactcaagagacagctgatccctgggtgcacctcagcagtaaaactggaatcaacttattgctcttgtaaagcagtaggacagaaaaataaatgtaattcctacccacctcaggcataaatacaacagaaatctctccacttttcctcacatcattctcctccta

SEQ ID NO: 70187 - DNA, 600 bp, Chicken  19866894343327_1
tcaggcagtttaattctgactgttgtaagagttggccagaacacaattctgacgtaaagggctggcattgttactaggaagtgaagcagagcgtctccctgttgctgcagcatcacagatgaggtttagagggacctctggagatcatctggtctaacccccttgcttgagcagggacacccaagagcagggtgcccaggcccgtgtgcagtcagcttttgaagacctgcaaggaagagactcagcaacctctgggcattcttgctggtgctccgtcaccctcatagaaagattgtttcytgaggttcacacagagcctgctctgtttcagtttgcatcctttgtgtcttgccctgccacttagcactgctgaaaagaggctggcttcatctgttttgcatcctcccttcaggtacttatgtacattgatgagaataccctgagagaatacttctattcactaggctaaacagtcccagctctctcagcctttccttatgcgagagctgttgactttgtagctctttcttgggctgtttccagtagctccgtgtctgttttgccctgaggagcccagaactggacaaagcactccaggtg

SEQ ID NO: 70188 - DNA, 600 bp, Chicken  19866894343331_1
tggtctgtaccgtagctgggtgtgtgatttggatggaggtgtcactgcagataaatccacgtgcagtaactgtgacattaattaatgttacattaatgcttaactgctaatacgtatgtgaagggctgtgactgcggtgagtgtcttccagggcagatctcagagcccctggaacgtgtgtaagcagacatggcagcgccttcatggattacttctgggcactgaatcacatgagctgaagtgagctgttggctgggcggcaactcaacgaacttggaaaaagagcagtctgcctccaamctattgcaggartgactgaagtgggttctggaaggaaggaggagtggtggttggcaatgaccttcacggcgctttcattgctatccgtttggatgtgtcgatgccgtggccaaacagggaaaacaaagtgtcctaggaggagccagctctaggatgggggtccggagcaataggctggtggagaaaaacctgatggaggaaatgagcaagaggaaatagggtgaaggcggacaggcgttgtgggatgggaagctatggtgatattaagagactaaatgagccctggtaactcacgaagca

SEQ ID NO: 70189 - DNA, 600 bp, Chicken  19866894343331_2
tagctgggtgtgtgatttggatggaggtgtcactgcagataaatccacgtgcagtaactgtgacattaattaatgttacattaatgcttaactgctaatacgtatgtgaagggctgtgactgcggtgagtgtcttccagggcagatctcagagcccctggaacgtgtgtaagcagacatggcagcgccttcatggattacttctgggcactgaatcacatgagctgaagtgagctgttggctgggcggcaactcaacgaacttggaaaaagagcagtctgcctccaamctattgcaggartgactgaagtgggttctggaaggaaggaggagtggtggttggcaatgaccttcacggcgctttcattgctatccgtttggatgtgtcgatgccgtggccaaacagggaaaacaaagtgtcctaggaggagccagctctaggatgggggtccggagcaataggctggtggagaaaaacctgatggaggaaatgagcaagaggaaatagggtgaaggcggacaggcgttgtgggatgggaagctatggtgatattaagagactaaatgagccctggtaactcacgaagcagggggaaagcga

SEQ ID NO: 70190 - DNA, 600 bp, Chicken  19866894343336_1
tttaatattatgtgattaaggagcccagatcctacttggttaacaccaagactttcaaaacaaacttgtgatttttttggtgccttgaacaaattacttggcttagtgtgtttctgcctttcagctacactgcaataataatgtgtgttcttcttaaaagaacaagtaatttaaaaacacctaactagagacatcttgaaaaatacagttttccagaaagttgtagaatagtctttgcaggttgtcactcaggctcaatactggaaaatacaggtattttttcctgcagaacaactggarcatatatggcaagagtatattggtgttctcttaggcaataccactttagctggaaaatgtaatggtcgtgtttctgaagaaaggtctcaaataggaggcatattgagatccctggagttagtcttaagggacttttgttttcaacatcctatgtaacagagcttaaggcacaccactggacttttttctttggactagctgcctacttacattcctgcattttcctttaaaaatacatatgctttagttttagcttgctagataagaatgttctctcctgaagcacttaataattaatgc

SEQ ID NO: 70191 - DNA, 600 bp, Chicken  19866894343348_1
tgtggatagatttttcttgaatttaccgttatgattgattttaaaaagctgtacgtcaaaatccactagattcctttgaaaccctgaagcagtatattacatattctaatttgttatcccttttcagaaatctaaagtagttaagaatctcatccagtagggtcagtgtgttttctaacccttacacagtggtaagaaatattacaaagtcacaatgttttagccacgcaaaaggacgtagacagtgcttggttagccaagcagtaggacactgcctgtctacaagggctccaggaggayttcartagctggttttcaaatggtcgaaacagagatattgagctaaaagcagacccactctgtggcattctcaaaagagtgaagggcacacagagcacaatacgactggttttgtgattcaagmgaattattyctcttccatataagacaagctcttttaagatacggaagtgaagtatggtggcactaaacccatttgaggcaatgacaaaatcccaatgctaacttaaatgcaatcactctagtaccagtaatgcctacctgtgtactcaatggagtttccattcaagagctctagtg

SEQ ID NO: 70192 - DNA, 600 bp, Chicken  19866894343348_2
atagatttttcttgaatttaccgttatgattgattttaaaaagctgtacgtcaaaatccactagattcctttgaaaccctgaagcagtatattacatattctaatttgttatcccttttcagaaatctaaagtagttaagaatctcatccagtagggtcagtgtgttttctaacccttacacagtggtaagaaatattacaaagtcacaatgttttagccacgcaaaaggacgtagacagtgcttggttagccaagcagtaggacactgcctgtctacaagggctccaggaggayttcartagctggttttcaaatggtcgaaacagagatattgagctaaaagcagacccactctgtggcattctcaaaagagtgaagggcacacagagcacaatacgactggttttgtgattcaagmgaattattyctcttccatataagacaagctcttttaagatacggaagtgaagtatggtggcactaaacccatttgaggcaatgacaaaatcccaatgctaacttaaatgcaatcactctagtaccagtaatgcctacctgtgtactcaatggagtttccattcaagagctctagtgaagat

SEQ ID NO: 70193 - DNA, 600 bp, Chicken  19866894343348_3
cagaaatctaaagtagttaagaatctcatccagtagggtcagtgtgttttctaacccttacacagtggtaagaaatattacaaagtcacaatgttttagccacgcaaaaggacgtagacagtgcttggttagccaagcagtaggacactgcctgtctacaagggctccaggaggayttcartagctggttttcaaatggtcgaaacagagatattgagctaaaagcagacccactctgtggcattctcaaaagagtgaagggcacacagagcacaatacgactggttttgtgattcaagmgaattattyctcttccatataagacaagctcttttaagatacggaagtgaagtatggtggcactaaacccatttgaggcaatgacaaaatcccaatgctaacttaaatgcaatcactctagtaccagtaatgcctacctgtgtactcaatggagtttccattcaagagctctagtgaagattactctaattaaacttttcagaagttatctccccattttttttttcaatggcttttttgaagctcctcaacctaaagtatttcctagtggagaaactaaaagagacttaccttgccagg

SEQ ID NO: 70194 - DNA, 600 bp, Chicken  19866894343348_4
aaagtagttaagaatctcatccagtagggtcagtgtgttttctaacccttacacagtggtaagaaatattacaaagtcacaatgttttagccacgcaaaaggacgtagacagtgcttggttagccaagcagtaggacactgcctgtctacaagggctccaggaggayttcartagctggttttcaaatggtcgaaacagagatattgagctaaaagcagacccactctgtggcattctcaaaagagtgaagggcacacagagcacaatacgactggttttgtgattcaagmgaattattyctcttccatataagacaagctcttttaagatacggaagtgaagtatggtggcactaaacccatttgaggcaatgacaaaatcccaatgctaacttaaatgcaatcactctagtaccagtaatgcctacctgtgtactcaatggagtttccattcaagagctctagtgaagattactctaattaaacttttcagaagttatctccccattttttttttcaatggcttttttgaagctcctcaacctaaagtatttcctagtggagaaactaaaagagacttaccttgccagggatacctca

SEQ ID NO: 70195 - DNA, 599 bp, Chicken  19866894343355_1
  misc_feature (1)..(90): n is any nucleotide
nnnnnnnnnnnnnnnnnnnnnnnnnnnnnnnnnnnnnnnnnnnnnnnnnnnnnnnnnnnnnnnnnnnnnnnnnnnnnnnnnnnnnnnnnntgtttgctcccggcgcctttgtgtgccacgggccccgttctggtggccacctccccgtgctgcagcagaagatgggttccttatggctgagcattcattcgctctgctgatcgacagcctgcggtctggctgagcagccccaattgttcccaacgcgcccggacaaagaaatgcctcgagagatggcacggctcgggaacggaggacatrctaggaatatttgtgctgcctcgcacaccaacagccttccctcctcctgccagaatgggcggcactgctccaggttcacgcgtccccacggctggagcagggctgcagcgtggctgtccccatgcaggctgtccccgtggccccactccggccaccgcagcctccccgcagagacagggccggtgctgcctgccccgggcaggctgtggggtcagcgccataatgcagcgtttgtttcgggccgtaggggtcacagaggccccgctgcgcatagccgggctctggcctctgctgtgagg

SEQ ID NO: 70196 - DNA, 600 bp, Chicken  19866894343355_2
gtggctgtccccatgcaggctgtccccgtggccccactccggccaccgcagcctccccgcagagacagggccggtgctgcctgccccgggcaggctgtggggtcagcgccataatgcagcgtttgtttcgggccgtaggggtcacagaggccccgctgcgcatagccgggctctggcctctgctgtgaggaatttgctgatctgggggtttggggcacctgaacttgttcttgcgattgctgcagatccatgtggagctggggctgtgttccctgcctgcccccggtccccgtgctcagygtgctggagctgcggtgtggggcaggctgtgctggggggcrtttggctgctggatccggctctgccatccccctccctgcctgagcccggtgtgggacgtgtctgcatgggagtggtccccagacagccccctcctgcccacatctcctgatggctgctgcagtgggagccgcctgcagcaggaatgcagcggtgctgcagatgggaacagccaagcactgggatgatggagatttgaggtgcacggacagggagcagaaatggagccacgcacagcacagtgcctgcatcacaaggcaa

SEQ ID NO: 70197 - DNA, 584 bp, Chicken  19866894343355_3
gccaccgcagcctccccgcagagacagggccggtgctgcctgccccgggcaggctgtggggtcagcgccataatgcagcgtttgtttcgggccgtaggggtcacagaggccccgctgcgcatagccgggctctggcctctgctgtgaggaatttgctgatctgggggtttggggcacctgaacttgttcttgcgattgctgcagatccatgtggagctggggctgtgttccctgcctgcccccggtccccgtgctcagygtgctggagctgcggtgtggggcaggctgtgctggggggcrtttggctgctggatccggctctgccatccccctccctgcctgagcccggtgtgggacgtgtctgcatgggagtggtccccagacagccccctcctgcccacatctcctgatggctgctgcagtgggagccgcctgcagcaggaatgcagcggtgctgcagatgggaacagccaagcactgggatgatggagatttgaggtgcacggacagggagcagaaatggagccacgcacagcacagtgcctgcatcacaaggcaagttccgtgcctgtaagccccgggtg

SEQ ID NO: 70198 - DNA, 585 bp, Chicken  19866894343356_1
cgttaatgtctctctgtaacatttttatttgcatatggctgacctgactcacttcatttttgctctgaaaactttcctttaacaaatgtcataagtgatgtttttcatatcttaaagctctattcctgtaagctctatctgtattaagaggctgctcagagaggctgtgggatctcctccttggaaataacacggccctgggctgtggtgccctgctcggacaggcctgcaaggccggaaaggccgggcctgaggcctcctgggatcctctcttcagtcacctgagctctaatcatataygctgtagtccttagccctcagatatttaagtcaaggcacttaagtgctagcagttcagcactgctagcccaagtgtgaaaagagtggtcataatttagagacatttgggatgcaaggacagggccttcatacatgcagaaayggcctaggatgcaaggatatgccctcaagtagcactaagaagggttagattgggtgtcaggaaggatttcttcacagaaagggtgactgggcattggaatgggctgtcgggggaagtggtggaatcgccatccctgaaggtat

SEQ ID NO: 70199 - DNA, 443 bp, Chicken  19866894343356_2
attaagaggctgctcagagaggctgtgggatctcctccttggaaataacacggccctgggctgtggtgccctgctcggacaggcctgcaaggccggaaaggccgggcctgaggcctcctgggatcctctcttcagtcacctgagctctaatcatataygctgtagtccttagccctcagatatttaagtcaaggcacttaagtgctagcagttcagcactgctagcccaagtgtgaaaagagtggtcataatttagagacatttgggatgcaaggacagggccttcatacatgcagaaayggcctaggatgcaaggatatgccctcaagtagcactaagaagggttagattgggtgtcaggaaggatttcttcacagaaagggtgactgggcattggaatgggctgtcgggggaagtggtggaatcgccatccctgaaggtat

SEQ ID NO: 70200 - DNA, 600 bp, Chicken  19866894343357_1
caattgacccctgtgcaaccccagtgcagagctgaggctcctgcagtctattatgtgtacatcagcagctgtcagtcagagctgtcaccctgtctaattactgtgccttcacagcctgtgccttagaaggagtgacaaggaacttatttattaatgtctttacttatcttcccctcctaaaatttcagcgcatgtggatcagtccaaggatccttaaacttcttttaaggcttctatttctgtccaataactgaaattccctgtaattgaggtagtacaatgggttattggttaagaagytgcatccttttggctacggactcctccagaggtgcacaaaccttccttcagcttcctatggtagaagagtgctgcctgtagcagatgttcagagctctggagttccaatcccagagataatgagatttctttaagcatgtttattaactatacttaatctttggccttcagagctctaaagttcagtagggctgcattttttgtcacttcctccttaactttctgtttgagtaaatgccaacattgtgcaaattggattctgcatgaacctgtaaygtaagcttttgaaggagaagctca

SEQ ID NO: 70201 - DNA, 600 bp, Chicken  19866894343357_2
acaatgggttattggttaagaagytgcatccttttggctacggactcctccagaggtgcacaaaccttccttcagcttcctatggtagaagagtgctgcctgtagcagatgttcagagctctggagttccaatcccagagataatgagatttctttaagcatgtttattaactatacttaatctttggccttcagagctctaaagttcagtagggctgcattttttgtcacttcctccttaactttctgtttgagtaaatgccaacattgtgcaaattggattctgcatgaacctgtaaygtaagcttttgaaggagaagctcagctatcataggctggtatagtacagatttggtcaccctgttactgttctgtatttgccaatttcagtgtccaatgtttttaagcctgtaatacatactgggaaacgagtgcaatgcatgctgtgtgggaaatagacacttgcaatactcatgcctcacatcaagcatcatacagacaaacagaacaagaatcggctctccagctctcttgatctggtctccatgtttgtcatctttgtttactaaggttgagagctggagagttggatagataatc

SEQ ID NO: 70202 - DNA, 600 bp, Chicken  19866894343357_3
ctcagctatcataggctggtatagtacagatttggtcaccctgttactgttctgtatttgccaatttcagtgtccaatgtttttaagcctgtaatacatactgggaaacgagtgcaatgcatgctgtgtgggaaatagacacttgcaatactcatgcctcacatcaagcatcatacagacaaacagaacaagaatcggctctccagctctcttgatctggtctccatgtttgtcatctttgtttactaaggttgagagctggagagttggatagataatcctgctggggcccttgctgayctatcrataagtgttgtttgttttggttttctaagactgtacaactgtacattaaggcaagagaactgcaggccagaaagaagctatttcaggaatacaagcacttaattaaggaatgtatcgacagcaagataatgtatggcatctctccctcttttactttttctctaacatcctgacatcaaagcacaaattcagaaacctactgtaggtgccctggaggaaagcctgtctctttcctcagcaagttatgttgttggaggttgtccttatgcctcaaggaggatggagatggccctg

SEQ ID NO: 70203 - DNA, 600 bp, Chicken  19866894343357_4
tatcataggctggtatagtacagatttggtcaccctgttactgttctgtatttgccaatttcagtgtccaatgtttttaagcctgtaatacatactgggaaacgagtgcaatgcatgctgtgtgggaaatagacacttgcaatactcatgcctcacatcaagcatcatacagacaaacagaacaagaatcggctctccagctctcttgatctggtctccatgtttgtcatctttgtttactaaggttgagagctggagagttggatagataatcctgctggggcccttgctgayctatcrataagtgttgtttgttttggttttctaagactgtacaactgtacattaaggcaagagaactgcaggccagaaagaagctatttcaggaatacaagcacttaattaaggaatgtatcgacagcaagataatgtatggcatctctccctcttttactttttctctaacatcctgacatcaaagcacaaattcagaaacctactgtaggtgccctggaggaaagcctgtctctttcctcagcaagttatgttgttggaggttgtccttatgcctcaaggaggatggagatggccctgggggag

SEQ ID NO: 70204 - DNA, 600 bp, Chicken  19866894343358_1
taaaggtaatgttctttgcaaaattttgtgttgataaaggcgttgagtttaaagataggcgtaaacttaaaaacagcacaaaaatgttatcgtaagcctctttaccctgttaactacaacctttctattttgaataaagccagaaaaactacctctgttaatttgcatatatttctagttaacctgtgaattaaatctgttgatcttttaatgtcgttaacaaagctcctttgtggctattgcatcttatgtgttctatacctcacagaacataatctgttctttacactgagtgactgrgaaatataaccagaaggcttgtaaactcctccagatattaggaaacaaatgttccttgtagtgtgatgaaattctgtgtaaagtttttccacacagagggtggtgtcacactctcaggttgctcaaggaggttgtggatgccccatccctggaggcattcaaggccaggctggatgtggctctgggcagcctggtctggtggttggcgaccctgcacakagcaggggggttgaaactcgatgatcattgtggtccttttcaacccaggccgttctatgattctatgcaacactactttta

SEQ ID NO: 70205 - DNA, 600 bp, Chicken  19866894343358_2
acaaagctcctttgtggctattgcatcttatgtgttctatacctcacagaacataatctgttctttacactgagtgactgrgaaatataaccagaaggcttgtaaactcctccagatattaggaaacaaatgttccttgtagtgtgatgaaattctgtgtaaagtttttccacacagagggtggtgtcacactctcaggttgctcaaggaggttgtggatgccccatccctggaggcattcaaggccaggctggatgtggctctgggcagcctggtctggtggttggcgaccctgcacakagcaggggggttgaaactcgatgatcattgtggtccttttcaacccaggccgttctatgattctatgcaacactacttttaattacttttttaatgtaatagcggtatagcagtaataatttttactgcaaattgaaaaatggattagggctttgggttcactatctcattctgaaagccrtgagaaactaccaaccataaaacatggtaaagaaaccacttggggtatctgtgctggaatagctattgagtgaactgaatgtgcttgtgaagtcttcagatttgtttttcgttatcaag

SEQ ID NO: 70206 - DNA, 600 bp, Chicken  19866894343358_3
tggtgtcacactctcaggttgctcaaggaggttgtggatgccccatccctggaggcattcaaggccaggctggatgtggctctgggcagcctggtctggtggttggcgaccctgcacakagcaggggggttgaaactcgatgatcattgtggtccttttcaacccaggccgttctatgattctatgcaacactacttttaattacttttttaatgtaatagcggtatagcagtaataatttttactgcaaattgaaaaatggattagggctttgggttcactatctcattctgaaagccrtgagaaactaccaaccataaaacatggtaaagaaaccacttggggtatctgtgctggaatagctattgagtgaactgaatgtgcttgtgaagtcttcagatttgtttttcgttatcaaggccttgattaggaggtgaattcactgatacttctgccaagttgttggctttttgtgatagtggatttatttttttttccccgctcctcccttcctccccctcttcccttccagtggaacaatacacattggaaatggcttgmgaataggaatacctggatttggcagctggcttctttcca

SEQ ID NO: 70207 - DNA, 600 bp, Chicken  19866894343358_4
gattagggctttgggttcactatctcattctgaaagccrtgagaaactaccaaccataaaacatggtaaagaaaccacttggggtatctgtgctggaatagctattgagtgaactgaatgtgcttgtgaagtcttcagatttgtttttcgttatcaaggccttgattaggaggtgaattcactgatacttctgccaagttgttggctttttgtgatagtggatttatttttttttccccgctcctcccttcctccccctcttcccttccagtggaacaatacacattggaaatggcttgmgaataggaatacctggatttggcagctggcttctttccactgcatgcagttctccctgatgacagtggaaaaagagaattaaatcatctctcttcttccttttttatatgtgtgtactctaagattgggattctcttgtacagtttttgtgcagtggtactttcatttgtgctttctagctgctactgtagtacacagtccaggttttatgagtaatgaaacgtttctactatatttgtgaaacttgctcttgagtgagaatgttggttgtaatgccttcatgaaagtcagtcacttact

SEQ ID NO: 70208 - DNA, 600 bp, Chicken  19866894343360_1
ttttaaagaacatgtttgtgttttgatttgttatttaatccttttttccaaggctaatgaagaatatcaggactgaactggatatccacatgcagtgaaagaagtttctttcacactgtcttcattcttaccttattatactgtaatctttctttctacaagcagttagtgtatttcttccattacaacttttttccatttagaatacctgtggctcaaatgcctgacctcaaaaagttatttcaatgaaatgcagatttcagaaattgtcatgttacctctaaatctcactgcattacwctactgaaaataacttaataaaataatgaattcctaaaatccataagttgccartaaaataatgacatagtagatgtttctacaaagtaacagcaaataaaacttacatgtccatcagaaaggaaaaaaaaaaaagaaatcaagagttttggaataaatataaattctcttatcatctctaattgtcacttgctgtagatgtcaaactaacagacaggcagaatctaatttccttgtttgattcaccatgaaattaaactgaactgacaatttttattttcacctggcaaattcatccaa

SEQ ID NO: 70209 - DNA, 600 bp, Chicken  19866894343360_2
taatgaagaatatcaggactgaactggatatccacatgcagtgaaagaagtttctttcacactgtcttcattcttaccttattatactgtaatctttctttctacaagcagttagtgtatttcttccattacaacttttttccatttagaatacctgtggctcaaatgcctgacctcaaaaagttatttcaatgaaatgcagatttcagaaattgtcatgttacctctaaatctcactgcattacwctactgaaaataacttaataaaataatgaattcctaaaatccataagttgccartaaaataatgacatagtagatgtttctacaaagtaacagcaaataaaacttacatgtccatcagaaaggaaaaaaaaaaaagaaatcaagagttttggaataaatataaattctcttatcatctctaattgtcacttgctgtagatgtcaaactaacagacaggcagaatctaatttccttgtttgattcaccatgaaattaaactgaactgacaatttttattttcacctggcaaattcatccaacactatttaaatctagctaatcaagtacagttatctgctgcacacactcatctc

SEQ ID NO: 70210 - DNA, 600 bp, Chicken  19866894343361_1
acgcgcatgcgcacccatggcgcatggaagtgacgtcaccccgccggctccttgccccgccccttcgctgtttttatccagtcacaagcgtttctggccgctcggcccaatggagcggcaatatgttaataagggggcgtggaaagaagggggtggtgcttgtcgttttgtccaatcagaaggcgcgagggtggggataggggctcgccgctaagggcactcacctggccgggaggtggcgctgctgtgggccgcgctgaggcttcgcgtcgcgggttcggggctcccgggggtccctgsaggctcgagatgacttcgttcagcggttcctccacgccttctggtgagccgtcgccttcgaatgctgctcccagcgccccgtcccttgcaggtgttagctcacctgcgccaccagtacagaggccttgcaaaacaagctcctcgtgaatgggtctccaattggcgccagtgaggatggagcagtgggagagcatccacacagcctttgggctcagaggagccaaaataactgtggtgtaatccgtccctgaagggcragtctatggatgtttgcacgagggtcatgacatacttccaaat

SEQ ID NO: 70211 - DNA, 347 bp, Chicken  19866894343361_2
tgaggcttcgcgtcgcgggttcggggctcccgggggtccctgsaggctcgagatgacttcgttcagcggttcctccacgccttctggtgagccgtcgccttcgaatgctgctcccagcgccccgtcccttgcaggtgttagctcacctgcgccaccagtacagaggccttgcaaaacaagctcctcgtgaatgggtctccaattggcgccagtgaggatggagcagtgggagagcatccacacagcctttgggctcagaggagccaaaataactgtggtgtaatccgtccctgaagggcragtctatggatgtttgcacgagggtcatgacatacttccaaatctca

SEQ ID NO: 70212 - DNA, 600 bp, Chicken  19866894343365_1
attatgatgatctgggattaaaatgctgtggtggttgttattatcacttaaaagactttgaaactcttctactgaagtgatgaaggtgtatgctaaaagaatagtgatgtacaatatatctactggtcagtatgcactaacacatctgatgcaagaatagagttaatcccaattaccatttgtacatctgatattatatgtatgtgtatgtacgcatgtgtgagtgtatatttactcttttgctgcttttaaaaatccttacttttttaatctttttttgttgttgtttttgttttatastgttctgtaaatagtgagacacatgggaaagtctacatgtgaaacaagtcagttgagagcagtaagaagttgaacaggtctgagcatcaacaaagatctctgcaaaggaagattgtgtctttgtgtytttctatacatgttacaataatttgaacctttagcaagttacagacattaatttaattaacagatgtctaccacacttaatatgcttggcatggaaaagtagcaagtaagtaaaatgcacatcgtgttttctctgaaccctagctcttcttaagtttatcagctaaatctcta

SEQ ID NO: 70213 - DNA, 600 bp, Chicken  19866894343365_2
cagtatgcactaacacatctgatgcaagaatagagttaatcccaattaccatttgtacatctgatattatatgtatgtgtatgtacgcatgtgtgagtgtatatttactcttttgctgcttttaaaaatccttacttttttaatctttttttgttgttgtttttgttttatastgttctgtaaatagtgagacacatgggaaagtctacatgtgaaacaagtcagttgagagcagtaagaagttgaacaggtctgagcatcaacaaagatctctgcaaaggaagattgtgtctttgtgtytttctatacatgttacaataatttgaacctttagcaagttacagacattaatttaattaacagatgtctaccacacttaatatgcttggcatggaaaagtagcaagtaagtaaaatgcacatcgtgttttctctgaaccctagctcttcttaagtttatcagctaaatctctatatgaaacaatttggcccagaaatttaatgaaactctcatctgggagagttgctcattcaggagaaaagaaaaaaccaaaacacaaccattagactaattttcaaattgcttccattgtaatatctt

SEQ ID NO: 70214 - DNA, 600 bp, Chicken  19866894343367_1
taaagggctccaaacaaacagcatcttaagtttcttagtcttttgggaggtttagaagtgggtttagtgggtgagaacttagaagtgctcctccagattccaaacgtgctttaagtagtcgaaagaaaaaaggaacaaaaaaaactcaataatgaaaggccaaaaagcacaatggcataacattaacaggagagctgtttcccaaattcagaacaatcctgagaaacccccaaattgctgtaatattcagtttttccaatcactaccaatagctaagagctaaccagcagtcagccatcrtcccgtaactcaggcaaagcttcctgcaaaacctacacgaggacagtacctactgagaaaggttatgcagacacaaaacaaaagcagatggaataaaaattctgaatgtgatcttcacacatatgaatgcgttctatagttgaggaaatgtagtaacagcaacagaggagtcgtttgctgcaagtttaagacaaaaaaaatacagaattttaaagggtttacackataagaaccttgaaatgtgatctttgatacgatctactcagaaattccaaatacaacatatatacaaatacatac

SEQ ID NO: 70215 - DNA, 430 bp, Chicken  19866894343367_2
acccccaaattgctgtaatattcagtttttccaatcactaccaatagctaagagctaaccagcagtcagccatcrtcccgtaactcaggcaaagcttcctgcaaaacctacacgaggacagtacctactgagaaaggttatgcagacacaaaacaaaagcagatggaataaaaattctgaatgtgatcttcacacatatgaatgcgttctatagttgaggaaatgtagtaacagcaacagaggagtcgtttgctgcaagtttaagacaaaaaaaatacagaattttaaagggtttacackataagaaccttgaaatgtgatctttgatacgatctactcagaaattccaaatacaacatatatacaaatacatacacaaatacatatatctcatatatattacggacaaggaaagaaaatgtcattaaaa

SEQ ID NO: 70216 - DNA, 600 bp, Chicken  19866894343375_1
aagttgattacttctctgtaatcagtcctgtctggatacattaaacaggagtgcagcactgaatatgagcatgcctttgacatctcgcataccctccaaggattgatctagtatataaaattcagtgtccctcacacctgtagtacgatatgctattgattaaaatgatgataattcatgtaatcgagtgatatcaaagggagataacctcatatatgacagcactgagtactcaatttatttctccaatactataagggtattcactatctcaaaaacgaagcaaccgattttagatgytcttttatgagaaacaaaggaatgttaaggttcactgaggccttccaaaaacagcagcgggggtttagttaaccgtagttcaaccagccactatgcctatcaytccacacatgaaaagcttttgctacctcctgatcgatgtctcttttgaagaggcattgcccattatactacacatttagatcatctgaatcgctaatggtggagggggaattggcacaagatttcctctttgctcctctagttcattcaaaagccccttcctgttacaccagtcagtattgaacaaacacctccaaa

SEQ ID NO: 70217 - DNA, 512 bp, Chicken  19866894343375_2
tgatctagtatataaaattcagtgtccctcacacctgtagtacgatatgctattgattaaaatgatgataattcatgtaatcgagtgatatcaaagggagataacctcatatatgacagcactgagtactcaatttatttctccaatactataagggtattcactatctcaaaaacgaagcaaccgattttagatgytcttttatgagaaacaaaggaatgttaaggttcactgaggccttccaaaaacagcagcgggggtttagttaaccgtagttcaaccagccactatgcctatcaytccacacatgaaaagcttttgctacctcctgatcgatgtctcttttgaagaggcattgcccattatactacacatttagatcatctgaatcgctaatggtggagggggaattggcacaagatttcctctttgctcctctagttcattcaaaagccccttcctgttacaccagtcagtattgaacaaacacctccaaagatgaaaggctaaca

SEQ ID NO: 70218 - DNA, 600 bp, Chicken  19866894343380_1
ccgcgccgcgcagccccggttttccgtcatctagcaaaaggcatctgtgtattgtgtgcggagtgaagcagagcgtgcgggaggaaggcagccataaatcctcccccctcccgcgtcccggggctgtctggcaggcgcgagccccgtctgtcatcggcggatcagacgggctgaaattcgacaggcctgtggaaaaacgcggggtgacatcacgcagagacaccaacccactgattaatctccagggtcagtggctgctttatttataaccaggagagtggtggaggtgggttttggggyttttttttttgcagggaggagtgctggcggtgagcggtgcttgggcccatcctgcacygctgggtgctgcygtgtccccwatgkttggggacagtgtggccaagaagtggccctggcagtgctgtaccccagcctggctgcatagccccgtgcccccatagcccccagtggctttgttcccagattacctgggcagcttcggggtgggtgactgaattggaacagacccaggtttggaaatgttttgcaaagccaggactgctttgctgctgccaagtgggaggtggccaagggagaaaa

SEQ ID NO: 70219 - DNA, 600 bp, Chicken  19866894343380_2
cggagtgaagcagagcgtgcgggaggaaggcagccataaatcctcccccctcccgcgtcccggggctgtctggcaggcgcgagccccgtctgtcatcggcggatcagacgggctgaaattcgacaggcctgtggaaaaacgcggggtgacatcacgcagagacaccaacccactgattaatctccagggtcagtggctgctttatttataaccaggagagtggtggaggtgggttttggggtttttttttttgcagggaggagtgctggcggtgagcggtgcttgggcccatcctgcacygctgggtgctgcygtgtccccwatgkttggggacagtgtggccaagaagtggccctggcagtgctgtaccccagcctggctgcatagccccgtgcccccatagcccccagtggctttgttcccagattacctgggcagcttcggggtgggtgactgaattggaacagacccaggtttggaaatgttttgcaaagccaggactgctttgctgctgccaagtgggaggtggccaagggagaaaaaagcctatcagatgtgctccacattgtttctaaacggagaaagtaaaaggagtgagtt

SEQ ID NO: 70220 - DNA, 600 bp, Chicken  19866894343380_3
agcgtgcgggaggaaggcagccataaatcctcccccctcccgcgtcccggggctgtctggcaggcgcgagccccgtctgtcatcggcggatcagacgggctgaaattcgacaggcctgtggaaaaacgcggggtgacatcacgcagagacaccaacccactgattaatctccagggtcagtggctgctttatttataaccaggagagtggtggaggtgggttttggggtttttttttttgcagggaggagtgctggcggtgagcggtgcttgggcccatcctgcacygctgggtgctgcygtgtccccwatgkttggggacagtgtggccaagaagtggccctggcagtgctgtaccccagcctggctgcatagccccgtgcccccatagcccccagtggctttgttcccagattacctgggcagcttcggggtgggtgactgaattggaacagacccaggtttggaaatgttttgcaaagccaggactgctttgctgctgccaagtgggaggtggccaagggagaaaaaagcctatcagatgtgctccacattgtttctaaacggagaaagtaaaaggagtgagtttctaagtattgag

SEQ ID NO: 70221 - DNA, 600 bp, Chicken  19866894343380_4
gaggaaggcagccataaatcctcccccctcccgcgtcccggggctgtctggcaggcgcgagccccgtctgtcatcggcggatcagacgggctgaaattcgacaggcctgtggaaaaacgcggggtgacatcacgcagagacaccaacccactgattaatctccagggtcagtggctgctttatttataaccaggagagtggtggaggtgggttttggggtttttttttttgcagggaggagtgctggcggtgagcggtgcttgggcccatcctgcacygctgggtgctgcygtgtccccwatgkttggggacagtgtggccaagaagtggccctggcagtgctgtaccccagcctggctgcatagccccgtgcccccatagcccccagtggctttgttcccagattacctgggcagcttcggggtgggtgactgaattggaacagacccaggtttggaaatgttttgcaaagccaggactgctttgctgctgccaagtgggaggtggccaagggagaaaaaagcctatcagatgtgctccacattgtttctaaacggagaaagtaaaaggagtgagtttctaagtattgagtataaccat

SEQ ID NO: 70222 - DNA, 600 bp, Chicken  19866894343380_5
aaggcagccataaatcctcccccctcccgcgtcccggggctgtctggcaggcgcgagccccgtctgtcatcggcggatcagacgggctgaaattcgacaggcctgtggaaaaacgcggggtgacatcacgcagagacaccaacccactgattaatctccagggtcagtggctgctttatttataaccaggagagtggtggaggtgggttttggggtttttttttttgcagggaggagtgctggcggtgagcggtgcttgggcccatcctgcacygctgggtgctgcygtgtccccwatgkttggggacagtgtggccaagaagtggccctggcagtgctgtaccccagcctggctgcatagccccgtgcccccatagcccccagtggctttgttcccagattacctgggcagcttcggggtgggtgactgaattggaacagacccaggtttggaaatgttttgcaaagccaggactgctttgctgctgccaagtgggaggtggccaagggagaaaaaagcctatcagatgtgctccacattgtttctaaacggagaaagtaaaaggagtgagtttctaagtattgagtataaccatttca

SEQ ID NO: 70223 - DNA, 600 bp, Chicken  19866894343380_6
gtttgcatgtgccaatgaagacagctattggcttttgtccttaacctgtgctcagtgctggctcaggctgatgttggtgcaggtgggaaccaccaaggtttcacctcacccacagatgtgcagcacatacagcgtgagccttggtttgagcacgatgcgagctggtgctgagcccccatagctcacaggacagctgggatggggtgggaaggtggaagaagtgaggaagcgtggatggcacgagcatggctccgaagtagggcaggacacgtcctgcacataatttcaaccttatcgtcraggatggattttaagtgcttcttcaatgactcacagttcctggatgggctcagaggaccgtcctcyaaaatggaaggacgggaacccggatcagataacagcagtgcccaaaccttgtgcccgctgtgcggtgccctgccaggcgctgggggcagtcctggagctgagcccagccggtcctgcactgcagcaatccctggggctcagggcatggctgctcctcacccactgtgtgtgccataggcggtgcgtccctcgtgccccggctggctgggatgagggcaatcagaaaccatccag

SEQ ID NO: 70224 - DNA, 600 bp, Chicken  19866894343380_7
gctgatgttggtgcaggtgggaaccaccaaggtttcacctcacccacagatgtgcagcacatacagcgtgagccttggtttgagcacgatgcgagctggtgctgagcccccatagctcacaggacagctgggatggggtgggaaggtggaagaagtgaggaagcgtggatggcacgagcatggctccgaagtagggcaggacacgtcctgcacataatttcaaccttatcgtcraggatggattttaagtgcttcttcaatgactcacagttcctggatgggctcagaggaccgtcctcyaaaatggaaggacgggaacccggatcagataacagcagtgcccaaaccttgtgcccgctgtgcggtgccctgccaggcgctgggggcagtcctggagctgagcccagccggtcctgcactgcagcaatccctggggctcagggcatggctgctcctcacccactgtgtgtgccataggcggtgcgtccctcgtgccccggctggctgggatgagggcaatcagaaaccatccaggatgctcattagggatccaggctcgtgctaagaaaccctctccgtatggtgccgcacatgaaagat

SEQ ID NO: 70225 - DNA, 599 bp, Chicken  19866894343381_1
  misc_feature (1)..(140): n is any nucleotide
nnnnnnnnnnnnnnnnnnnnnnnnnnnnnnnnnnnnnnnnnnnnnnnnnnnnnnnnnnnnnnnnnnnnnnnnnnnnnnnnnnnnnnnnnnnnnnnnnnnnnnnnnnnnnnnnnnnnnnnnnnnnnnnnnnnnnnnnnnnntgacactagttggtaatgtgccttttgctttatggtatttagagcaagtttcccattctttggcctcatgttgcaaatggtgccaggtttcaaacgattgtaggtgttcagcacccactcacatggcatgttttccaggatgaagagatggtgtcagtgygttgaattattacagcagcggtagggtaactcccaggtgccttaggacataygcagtaacactcttagcagccagagggatttggaaggcaaagcattaccttctcctcctcaytgcctatataccatagaccttccctggtctgtgrtatatatatattaaaaaaaactactgtgctgctgtctaagcagtcacaactcaaagtgttgtggcaggaccaaatgcagaggataattattgtgtgggactttccctttttcataggcatgtaggctactttttcatctcagtgagtctac

SEQ ID NO: 70226 - DNA, 599 bp, Chicken  19866894343381_2
  misc_feature (1)..(88): n is any nucleotide
nnnnnnnnnnnnnnnnnnnnnnnnnnnnnnnnnnnnnnnnnnnnnnnnnnnnnnnnnnnnnnnnnnnnnnnnnnnnnnnnnnnnnnnntgacactagttggtaatgtgccttttgctttatggtatttagagcaagtttcccattctttggcctcatgttgcaaatggtgccaggtttcaaacgattgtaggtgttcagcacccactcacatggcatgttttccaggatgaagagatggtgtcagtgygttgaattattacagcagcggtagggtaactcccaggtgccttaggacataygcagtaacactcttagcagccagagggatttggaaggcaaagcattaccttctcctcctcaytgcctatataccatagaccttccctggtctgtgrtatatatatattaaaaaaaactactgtgctgctgtctaagcagtcacaactcaaagtgttgtggcaggaccaaatgcagaggataattattgtgtgggactttccctttttcataggcatgtaggctactttttcatctcagtgagtctactcctgcccaggccttctccaagagacatccytttaagtcactttcagctcag

SEQ ID NO: 70227 - DNA, 599 bp, Chicken  19866894343381_3
  misc_feature (1)..(26): n is any nucleotide
nnnnnnnnnnnnnnnnnnnnnnnnnntgacactagttggtaatgtgccttttgctttatggtatttagagcaagtttcccattctttggcctcatgttgcaaatggtgccaggtttcaaacgattgtaggtgttcagcacccactcacatggcatgttttccaggatgaagagatggtgtcagtgygttgaattattacagcagcggtagggtaactcccaggtgccttaggacataygcagtaacactcttagcagccagagggatttggaaggcaaagcattaccttctcctcctcaytgcctatataccatagaccttccctggtctgtgrtatatatatattaaaaaaaactactgtgctgctgtctaagcagtcacaactcaaagtgttgtggcaggaccaaatgcagaggataattattgtgtgggactttccctttttcataggcatgtaggctactttttcatctcagtgagtctactcctgcccaggccttctccaagagacatccytttaagtcactttcagctcagaccraacctgagaggcactgaaggttatrtccaatattttcagaaatgtctygtgatttgga

SEQ ID NO: 70228 - DNA, 600 bp, Chicken  19866894343381_4
gttggtaatgtgccttttgctttatggtatttagagcaagtttcccattctttggcctcatgttgcaaatggtgccaggtttcaaacgattgtaggtgttcagcacccactcacatggcatgttttccaggatgaagagatggtgtcagtgygttgaattattacagcagcggtagggtaactcccaggtgccttaggacataygcagtaacactcttagcagccagagggatttggaaggcaaagcattaccttctcctcctcaytgcctatataccatagaccttccctggtctgtgrtatatatatattaaaaaaaactactgtgctgctgtctaagcagtcacaactcaaagtgttgtggcaggaccaaatgcagaggataattattgtgtgggactttccctttttcataggcatgtaggctactttttcatctcagtgagtctactcctgcccaggccttctccaagagacatccytttaagtcactttcagctcagaccraacctgagaggcactgaaggttatrtccaatattttcagaaatgtctygtgatttggaagctgcagttatgtgttttattcaccagataattg

SEQ ID NO: 70229 - DNA, 600 bp, Chicken  19866894343381_5
tcccaggtgccttaggacataygcagtaacactcttagcagccagagggatttggaaggcaaagcattaccttctcctcctcaytgcctatataccatagaccttccctggtctgtgrtatatatatattaaaaaaaactactgtgctgctgtctaagcagtcacaactcaaagtgttgtggcaggaccaaatgcagaggataattattgtgtgggactttccctttttcataggcatgtaggctactttttcatctcagtgagtctactcctgcccaggccttctccaagagacatccytttaagtcactttcagctcagaccraacctgagaggcactgaaggttatrtccaatattttcagaaatgtctygtgatttggaagctgcagttatgtgttttattcaccagataattgtctgtcatyggcagtgagcaaaaggtttgatgttctcagaaaaccaggctcctaaggagagagcttcgagctgtctgtttctaagctcagtttacccctttgcgttcagcaagtgcttggggccaatagaagtgactctgctactgaaatatagtaaataaatgaatccagtgactgtgagc

SEQ ID NO: 70230 - DNA, 600 bp, Chicken  19866894343381_6
gtaacactcttagcagccagagggatttggaaggcaaagcattaccttctcctcctcaytgcctatataccatagaccttccctggtctgtgrtatatatatattaaaaaaaactactgtgctgctgtctaagcagtcacaactcaaagtgttgtggcaggaccaaatgcagaggataattattgtgtgggactttccctttttcataggcatgtaggctactttttcatctcagtgagtctactcctgcccaggccttctccaagagacatccytttaagtcactttcagctcagaccraacctgagaggcactgaaggttatrtccaatattttcagaaatgtctygtgatttggaagctgcagttatgtgttttattcaccagataattgtctgtcatyggcagtgagcaaaaggtttgatgttctcagaaaaccaggctcctaaggagagagcttcgagctgtctgtttctaagctcagtttacccctttgcgttcagcaagtgcttggggccaatagaagtgactctgctactgaaatatagtaaataaatgaatccagtgactgtgagcttttgaacaggaatagaacaacccc

SEQ ID NO: 70231 - DNA, 600 bp, Chicken  19866894343381_7
tttggaaggcaaagcattaccttctcctcctcaytgcctatataccatagaccttccctggtctgtgrtatatatatattaaaaaaaactactgtgctgctgtctaagcagtcacaactcaaagtgttgtggcaggaccaaatgcagaggataattattgtgtgggactttccctttttcataggcatgtaggctactttttcatctcagtgagtctactcctgcccaggccttctccaagagacatccytttaagtcactttcagctcagaccraacctgagaggcactgaaggttatrtccaatattttcagaaatgtctygtgatttggaagctgcagttatgtgttttattcaccagataattgtctgtcatyggcagtgagcaaaaggtttgatgttctcagaaaaccaggctcctaaggagagagcttcgagctgtctgtttctaagctcagtttacccctttgcgttcagcaagtgcttggggccaatagaagtgactctgctactgaaatatagtaaataaatgaatccagtgactgtgagcttttgaacaggaatagaacaacccctggagtgcacgccagggcagcgctg

SEQ ID NO: 70232 - DNA, 600 bp, Chicken  19866894343381_8
ctcctcctcaytgcctatataccatagaccttccctggtctgtgrtatatatatattaaaaaaaactactgtgctgctgtctaagcagtcacaactcaaagtgttgtggcaggaccaaatgcagaggataattattgtgtgggactttccctttttcataggcatgtaggctactttttcatctcagtgagtctactcctgcccaggccttctccaagagacatccytttaagtcactttcagctcagaccraacctgagaggcactgaaggttatrtccaatattttcagaaatgtctygtgatttggaagctgcagttatgtgttttattcaccagataattgtctgtcatyggcagtgagcaaaaggtttgatgttctcagaaaaccaggctcctaaggagagagcttcgagctgtctgtttctaagctcagtttacccctttgcgttcagcaagtgcttggggccaatagaagtgactctgctactgaaatatagtaaataaatgaatccagtgactgtgagcttttgaacaggaatagaacaacccctggagtgcacgccagggcagcgctgggtaaatcttagatgaaaatggc

SEQ ID NO: 70233 - DNA, 600 bp, Chicken  19866894343381_9
attaaaaaaaactactgtgctgctgtctaagcagtcacaactcaaagtgttgtggcaggaccaaatgcagaggataattattgtgtgggactttccctttttcataggcatgtaggctactttttcatctcagtgagtctactcctgcccaggccttctccaagagacatccytttaagtcactttcagctcagaccraacctgagaggcactgaaggttatrtccaatattttcagaaatgtctygtgatttggaagctgcagttatgtgttttattcaccagataattgtctgtcatyggcagtgagcaaaaggtttgatgttctcagaaaaccaggctcctaaggagagagcttcgagctgtctgtttctaagctcagtttacccctttgcgttcagcaagtgcttggggccaatagaagtgactctgctactgaaatatagtaaataaatgaatccagtgactgtgagcttttgaacaggaatagaacaacccctggagtgcacgccagggcagcgctgggtaaatcttagatgaaaatggctggaaacgagcgcaggatttgaatgctctaggtgttcttacaagagggtgtgtt

SEQ ID NO: 70234 - DNA, 600 bp, Chicken  19866894343392_1
gttttcttacatcaatgagtggcaaggcagcacagtaagtaccacatacatccaaaaaaccaggaaaaatttctcctctcctctttcattttcccttttatttttgcttttcttgtaagaattacaaataaagccctaagtttttatgccttggccataaatattacttttctgctcggcctattgaatggattacatttatgtaaatcaaagttatgtaacttgatttggaaagattactctttccctttccaaagatttcgtcagccattctgtaagtaatcactgctgcataacacmcgagaacgctcaaaaacatgactcatcctttgtgtgcctctttgcagggtaacrtcataaattttaaacactcttgtttaaataattaagataggaatatattatgtttcatgcttattacagtagaagtaagctttgttgattattttaaagactcattattatgatccatgaaaatcaaagacggccattaacaaacacaaacagtagctgaaaaatgttttaccttttcacatgtgctaaaatagatgtgaatatgaagtatacataatcgtaataaatctctctctccctgctttc

SEQ ID NO: 70235 - DNA, 600 bp, Chicken  19866894343392_2
aaaaaccaggaaaaatttctcctctcctctttcattttcccttttatttttgcttttcttgtaagaattacaaataaagccctaagtttttatgccttggccataaatattacttttctgctcggcctattgaatggattacatttatgtaaatcaaagttatgtaacttgatttggaaagattactctttccctttccaaagatttcgtcagccattctgtaagtaatcactgctgcataacacmcgagaacgctcaaaaacatgactcatcctttgtgtgcctctttgcagggtaacrtcataaattttaaacactcttgtttaaataattaagataggaatatattatgtttcatgcttattacagtagaagtaagctttgttgattattttaaagactcattattatgatccatgaaaatcaaagacggccattaacaaacacaaacagtagctgaaaaatgttttaccttttcacatgtgctaaaatagatgtgaatatgaagtatacataatcgtaataaatctctctctccctgctttctgcttcctacagatccaaaagcctttagcttttataaatgaaatattacagatc

SEQ ID NO: 70236 - DNA, 600 bp, Chicken  19866894343398_1
aagtcattcgtagagacctcccgcccccttgagaaatgaattactcggttttacaaccgcaggcagttgcgacagccagttctgcctcctgcaaatgcagtgctgaatgccagggcaagctctgaggttagccaaagagctaaggttagccaaagagctaaggttagccaaagagctgtgccagccacgctaatggaaagcccccagctccagcatcaaaagccagcgtgtccgttccccttcttggcagcaccaaatctgagctcctctccctgacttcagcagcaaaacctctgatgygaaaactttcttaagtgttctcagtggacagtatttaccaacagtctgcagtttaattgttctggtgatttcatatgtgacaccttcatatggaaaagccatcttgcaggtgtagtagccggagtctgtcggtaatacagaagtgaagaacagggaagamgactctttcagaaatacaaatttttcactgtcgtcttccaaaagcagagcatcctggagaaaggacaactatgttacagctcagataggtgtggttaaactctgagtaacctccagacaaaaatatttatctttatctct

SEQ ID NO: 70237 - DNA, 600 bp, Chicken  19866894343398_2
aggttagccaaagagctgtgccagccacgctaatggaaagcccccagctccagcatcaaaagccagcgtgtccgttccccttcttggcagcaccaaatctgagctcctctccctgacttcagcagcaaaacctctgatgygaaaactttcttaagtgttctcagtggacagtatttaccaacagtctgcagtttaattgttctggtgatttcatatgtgacaccttcatatggaaaagccatcttgcaggtgtagtagccggagtctgtcggtaatacagaagtgaagaacagggaagamgactctttcagaaatacaaatttttcactgtcgtcttccaaaagcagagcatcctggagaaaggacaactatgttacagctcagataggtgtggttaaactctgagtaacctccagacaaaaatatttatctttatctctctcttacgagaagtttgctgatcactgttgaatctgtgcagcttcactttcccaccataatgcaagttctacaagcatatattcctcaccaaaaggatctgaggcattatatgaagtatgaagagctgctactttaacatatctttccagtaagtcacat

SEQ ID NO: 70238 - DNA, 600 bp, Chicken  19866894343404_1
cgactattgagtaaagttgagtattcaactataagttaaacaaaagttcactgatttctaagtgacacatgactgagaaaaaatacaagcatcacaacaacttggggcaaaaatgactgagatttgagtatcattccttggatatagtacaaggatgctgtttaggtgttgtgctgagggatgtggtttagtgggaaatattggtgatggggggaccggatgattttggaggtcttttccaaccttggtggttcaatgattctaatacttggacaaaatgctaaaaataagcagatattmaaaaaaaaagtcttaaattcacatcaaagwcactcatgtttcagaagaattctattatatacttcacaaataatcttcaaagcaaaaccctgtatctcagcacctcctctcttctactctgagcacgtgaaagagtgctgttttgtaatttgctattttgtatttttcaccagtaagaatacaagtaatgagccaaagtgccatggatatacctaccctgggcggtttcataccctgcgtttacaggtcttgctgcagctgcaaccatctgttcccgacgaggatcctgatagctcattt

SEQ ID NO: 70239 - DNA, 600 bp, Chicken  19866894343404_2
ataagttaaacaaaagttcactgatttctaagtgacacatgactgagaaaaaatacaagcatcacaacaacttggggcaaaaatgactgagatttgagtatcattccttggatatagtacaaggatgctgtttaggtgttgtgctgagggatgtggtttagtgggaaatattggtgatggggggaccggatgattttggaggtcttttccaaccttggtggttcaatgattctaatacttggacaaaatgctaaaaataagcagatattaaaaaaaaaagtcttaaattcacatcaaagwcactcatgtttcagaagaattctattatatacttcacaaataatcttcaaagcaaaaccctgtatctcagcacctcctctcttctactctgagcacgtgaaagagtgctgttttgtaatttgctattttgtatttttcaccagtaagaatacaagtaatgagccaaagtgccatggatatacctaccctgggcggtttcataccctgcgtttacaggtcttgctgcagctgcaaccatctgttcccgacgaggatcctgatagctcattttactaataaattcaatggctgcttctatgc

SEQ ID NO: 70240 - DNA, 600 bp, Chicken  19866894343405_1
ttgggttccctttaaaaagatctgccagcacccagccagagagctcaccctccttggacttgtggacaacgggagcagcgtatgggagatgaactaaaaatcccagcttagaagatatttgtgtgtgtatttgttggctgttcagtagaaaagtcattcattttgtaggtctaggttcagaaaactgagcgtgtacaaccacagaatgggtcaactctaagcaggtggaggggcccattggcttttatgaacatgacatgcacagggtttgcaatgtgcagtcagattcaataaggcctrgaaagtacatgttgaagccatgtggatrcctcccttgtctcacatrtactagaagatctgttgtggaccccctcccttggagatgcagcacaggggtgtggagtccccatgctgtgaccccgctgtgtgccactggctaccctccagcatgagcagggatgtggtcggtgggagctgggcacttggggccagttkccgttctgcctgatgcatggctgctgttacttcttgcagcttttgcaaagcaaagtgtgcccaggctctttttagctttactgctcgtgccagatcaaacccaca

SEQ ID NO: 70241 - DNA, 600 bp, Chicken  19866894343405_2
cacccagccagagagctcaccctccttggacttgtggacaacgggagcagcgtatgggagatgaactaaaaatcccagcttagaagatatttgtgtgtgtatttgttggctgttcagtagaaaagtcattcattttgtaggtctaggttcagaaaactgagcgtgtacaaccacagaatgggtcaactctaagcaggtggaggggcccattggcttttatgaacatgacatgcacagggtttgcaatgtgcagtcagattcaataaggcctrgaaagtacatgttgaagccatgtggatrcctcccttgtctcacatrtactagaagatctgttgtggaccccctcccttggagatgcagcacaggggtgtggagtccccatgctgtgaccccgctgtgtgccactggctaccctccagcatgagcagggatgtggtcggtgggagctgggcacttggggccagttkccgttctgcctgatgcatggctgctgttacttcttgcagcttttgcaaagcaaagtgtgcccaggctctttttagctttactgctcgtgccagatcaaacccacagcctgttttaagatggagagcttggacg

SEQ ID NO: 70242 - DNA, 600 bp, Chicken  19866894343405_3
accctccttggacttgtggacaacgggagcagcgtatgggagatgaactaaaaatcccagcttagaagatatttgtgtgtgtatttgttggctgttcagtagaaaagtcattcattttgtaggtctaggttcagaaaactgagcgtgtacaaccacagaatgggtcaactctaagcaggtggaggggcccattggcttttatgaacatgacatgcacagggtttgcaatgtgcagtcagattcaataaggcctrgaaagtacatgttgaagccatgtggatrcctcccttgtctcacatrtactagaagatctgttgtggaccccctcccttggagatgcagcacaggggtgtggagtccccatgctgtgaccccgctgtgtgccactggctaccctccagcatgagcagggatgtggtcggtgggagctgggcacttggggccagttkccgttctgcctgatgcatggctgctgttacttcttgcagcttttgcaaagcaaagtgtgcccaggctctttttagctttactgctcgtgccagatcaaacccacagcctgttttaagatggagagcttggacggaggcggcaagcaatgca

SEQ ID NO: 70243 - DNA, 600 bp, Chicken  19866894343405_4
caaccacagaatgggtcaactctaagcaggtggaggggcccattggcttttatgaacatgacatgcacagggtttgcaatgtgcagtcagattcaataaggcctrgaaagtacatgttgaagccatgtggatrcctcccttgtctcacatrtactagaagatctgttgtggaccccctcccttggagatgcagcacaggggtgtggagtccccatgctgtgaccccgctgtgtgccactggctaccctccagcatgagcagggatgtggtcggtgggagctgggcacttggggccagttkccgttctgcctgatgcatggctgctgttacttcttgcagcttttgcaaagcaaagtgtgcccaggctctttttagctttactgctcgtgccagatcaaacccacagcctgttttaagatggagagcttggacggaggcggcaagcaatgcactacaaagcagcatctgtctaagatctttctgcctttctgttccaccctgaagcttccctttgccaggctggggtatgcagcacagccccgcagccactgcaacgctccattacttgcttcacagtgcccacctttgctggcatgccca

SEQ ID NO: 70244 - DNA, 599 bp, Chicken  19866894343408_1
  misc_feature (1)..(14): n is any nucleotide
nnnnnnnnnnnnnncaccgaggcatcgtagctcctattgttacttgtctgtcatcctacgttagtagaattcaatgcatgcagtgttcgccaaggagatgtggcattagagctgcatatgcagatgaaggctccccacatgtgttgtactgaaaagttcagagccctgagcacacagcagttactttttcttcccttggaatctgtataattcaatgaggcaccacagaccaaatagtctcaaaggaactaatagcctttgccactgtgggtcactctctgatgcaatgggaggagacaycttcagagtgctgagccaggagttgtacagtctaaaatgtcaacttgaaacatgtccaagcactactcgagaaataactgcagagttgaatgytcaggtgctgkagatgcttgggtatttggagagcattgcagctaagtaaaatgactttagacatgtctgagaaaacaatggaaactactgaaattgagctattgagagattcaatttgtagtgaaggagaaggaaattacctaattgtttcagtgcactaggagatgaatgtatttcttcctagggagaactcttgtcttgatgta

SEQ ID NO: 70245 - DNA, 600 bp, Chicken  19866894343408_2
ggagatgtggcattagagctgcatatgcagatgaaggctccccacatgtgttgtactgaaaagttcagagccctgagcacacagcagttactttttcttcccttggaatctgtataattcaatgaggcaccacagaccaaatagtctcaaaggaactaatagcctttgccactgtgggtcactctctgatgcaatgggaggagacaycttcagagtgctgagccaggagttgtacagtctaaaatgtcaacttgaaacatgtccaagcactactcgagaaataactgcagagttgaatgytcaggtgctgkagatgcttgggtatttggagagcattgcagctaagtaaaatgactttagacatgtctgagaaaacaatggaaactactgaaattgagctattgagagattcaatttgtagtgaaggagaaggaaattacctaattgtttcagtgcactaggagatgaatgtatttcttcctagggagaactcttgtcttgatgtaatgatgttgttaactcctggatctctcttcaagaaggtgggataccacaggtctgctgagcagttaatttcatctgttcttttgctacccagtt

SEQ ID NO: 70246 - DNA, 600 bp, Chicken  19866894343408_3
attagagctgcatatgcagatgaaggctccccacatgtgttgtactgaaaagttcagagccctgagcacacagcagttactttttcttcccttggaatctgtataattcaatgaggcaccacagaccaaatagtctcaaaggaactaatagcctttgccactgtgggtcactctctgatgcaatgggaggagacaycttcagagtgctgagccaggagttgtacagtctaaaatgtcaacttgaaacatgtccaagcactactcgagaaataactgcagagttgaatgytcaggtgctgkagatgcttgggtatttggagagcattgcagctaagtaaaatgactttagacatgtctgagaaaacaatggaaactactgaaattgagctattgagagattcaatttgtagtgaaggagaaggaaattacctaattgtttcagtgcactaggagatgaatgtatttcttcctagggagaactcttgtcttgatgtaatgatgttgttaactcctggatctctcttcaagaaggtgggataccacaggtctgctgagcagttaatttcatctgttcttttgctacccagttctcttccactg

SEQ ID NO: 70247 - DNA, 600 bp, Chicken  19866894343408_4
gagaaaacaatggaaactactgaaattgagctattgagagattcaatttgtagtgaaggagaaggaaattacctaattgtttcagtgcactaggagatgaatgtatttcttcctagggagaactcttgtcttgatgtaatgatgttgttaactcctggatctctcttcaagaaggtgggataccacaggtctgctgagcagttaatttcatctgttcttttgctacccagttctcttccactgcatactcctttgcaaagacaaagtgtggggaccctgagtgaagagcatttctgaagyaaggtggagagggggaaaagaacccgtaactggcacaagttagaggctttcctaggtttctcttagttctgttgtccaaactacagaagatttgccagtgtaatgaaaatatcccatgggagaaaagtttctgtgatttctttgcttctttatacgagatgctacagtgatgtattatcactaaagtgatcatatccaactatttcacctcaggaattcgagttacctttcaccattttttttgtttgtttggtttgcagagtttagtgaagcataggcaacactgaattgataaagagg

SEQ ID NO: 70248 - DNA, 600 bp, Chicken  19866894343409_1
atgccatagaaacaatgctaaagcctacttgaagctgagtatctttcaagatagctttgtactataaaaaaaaaaagaacacatcagtactaagcaggaataagagagtaattatagctctttacattacatatcccactaagaatactttctactaatattacgataataataataaaggaggatgctcaagtgaagattgaaatcctgggcaaaagagaatataattcaataacacatcttaaaatgcatgtatttactgttacgtaggtatgtttatactcatttagacacagcaaygttaggtggaaggaaatgattttaagagattgtacttttactaactgctatcaaactctactctaaaacaaccttaacacttgygaagttcacactaccttcactgctttagctgtttccaaggattgctcaggaggaattcctacttctcgctccctcagcagctgctgaatgaagtatgttatatctcgccctgcaattggaatgtgtttgatacagctgccaatcacgtatccttcagcctgtaaataaaattaattgggagaaagacattgataagcattccttccaacaaagctt

SEQ ID NO: 70249 - DNA, 600 bp, Chicken  19866894343409_2
cagtactaagcaggaataagagagtaattatagctctttacattacatatcccactaagaatactttctactaatattacgataataataataaaggaggatgctcaagtgaagattgaaatcctgggcaaaagagaatataattcaataacacatcttaaaatgcatgtatttactgttacgtaggtatgtttatactcatttagacacagcaaygttaggtggaaggaaatgattttaagagattgtacttttactaactgctatcaaactctactctaaaacaaccttaacacttgygaagttcacactaccttcactgctttagctgtttccaaggattgctcaggaggaattcctacttctcgctccctcagcagctgctgaatgaagtatgttatatctcgccctgcaattggaatgtgtttgatacagctgccaatcacgtatccttcagcctgtaaataaaattaattgggagaaagacattgataagcattccttccaacaaagcttagaaaggagggagagccataaagtgtcaagtcctattcactacctgtgatcacgagattgaagcctttaaaggctggctcttaa

SEQ ID NO: 70250 - DNA, 599 bp, Chicken  19866894343413_1
  misc_feature (1)..(59): n is any nucleotide
nnnnnnnnnnnnnnnnnnnnnnnnnnnnnnnnnnnnnnnnnnnnnnnnnnnnnnnnnnnaatggatgactcctcacattatgcgtggcctggccgttactgttatgccttctatggctgtgaagttgtgtcacaactcagtgcccttttctggaaatactttttgcaagactgtaagggatgtgagtccaggatgatcacaagagcagtggagaccagctgaaaggccctgaaagtgttctggggcttggattttgacagacctgtccccttcctaacaatgatgaataatacctgcttrttagggacaagaatcatcttttattgtttcttctgtgagggccattgctaaaacacaaggatctgagtgtttacaacatgagcttcagaagtgcaagaaaagtgtaatatgatcaacaattaattagtttaggatttaatcaaattagaacaaagcatagtgaagaaatttaaacaatgctaaatggatgatggagtcatatactccaattaagaagaagaatattattagatgaataaaatattcacatgcagatttcaaaatagtaatgtttacagcataaagcaaaaacaaacaaa

SEQ ID NO: 70251 - DNA, 600 bp, Chicken  19866894343418_1
taaattaatcctgcaggtgatggagcagcccatgtacagggcgcagaacatgtgaccctatccttgagtctcatcacccaaaatgtaggtgacctgccccctcctgtccttctcgtcagctcgggttaaacgtggggaaaaagtcatggcctccctacccatctcagtgcgtgtttcgttgcatctcatgggactggggaggagtacctaggagtgctgcaagcctcccccgcctcccgttgcagtggatccttgcttctcacagatcctctttagaaaatgccctgtatcaggtttgakgcccactggatttttctcttgtctgagaaggatggaaaaaatcatccaattggttttgaatcacatgagtgggagcaggaaccaactccagaagataagtgctctgacctttacctcgctcggataactgaaaatgataacaaataaatacctctcgtttctaagctcagacttagggatgtgttccttctggatgctgcgggaggcagaaccagggctcttgcgagggctgggaattcaaaacaggcaactgcctgcagtaagcggcagccccttcgctttccttttcagaatgcagcc

SEQ ID NO: 70252 - DNA, 517 bp, Chicken  19866894343426_1
cttttggctgtaaggctttcagggcctcggtcgtgagtgatggaggttctgtaaaactcagttctggaggcctgctttaggaacatacagaggggatcttcagctttcagcagggtggttaaagtgtgggtttacatattggtgtttttaatgacaaatgagccctggtgtttggtgcattgtatttcgctgttaaaaagtagaaatccgttcctaaatcggtgattcagagagcagaatgctgatagcctgaaagtgctgaacacagcaacgaaaagcagcagcatttctaacacaggyggtattctctagagatggaagaaatatgactatacagatgaattgtaggcttgaaggtaaattttcctaaatgttactggacacttaaatctcatgctctgatctgtaagagcgtgactcctccatagcacgactgcccggctgtgctatcgagggctgcccggcggctgcgggcgccgctccccgccgcgtcggtcggtatggagcggccctcccg

SEQ ID NO: 70253 - DNA, 600 bp, Chicken  19866894343431_1
caaggaggaaacttttcctttcttgtactactatgtgttactgttaaggtctgagtggatgccgctgtgcacctgggcgggtggacatgtggtgcacagggacaaattactcctgcagttttggtctatcaaaatgtttttggaggaatgatttttattctctcactggaatcatcaggcctaagtgagaccaacactttctccattttacagactggcctagtcagaagtatttgccttttcatttgaggaaatggttgcatttgctctcatagtattcattgaagtgttcttttaacrtatactaatgctacttgtgagtagctaagcacaacggaatcattcatgtttactataaaagagtaaaattaacagtatgtgtactcaagactgccagaggatttttgtatttgcatttctgcatgcagtccttgttacttctgtttaattttacatctctccctcaatccatggtgagtcttgagtacaggaaacatggaagaaataatctcaacaataatgtatatgaaaaaaaatagttggaattatatgctagtgaaaagaggaaattccactttaattgatcgtaatatgacatac

SEQ ID NO: 70254 - DNA, 600 bp, Chicken  19866894343433_1
aataatttcaggactactgctagctacttcaaatgtagatactgattgcagttttcaaaaaatctttgcataaaattgcccctgaatccttagatatcactggatatgtaaagatcctgggttttgaggggatggagaacctaaaaagcaattctatttccttcaagtgtttaactacacgtatatttgagctgagattaccagctgagcactaaattcgcactgttaatttcaattttaatctaagtttcgtcttttgttgaatgatatagtacaaataacatcagcgtttcaagcagygcagaagtagtgaactttgggaagcactaaatcactggaacccctgtatttatctcatgttgccctggctgatcattgtgctgacaagtaggccagctgtgaaacaacagttattaaagagcagtggggaaaggcagtgccagagcagagctgtgcatggctttgcatgcgagaataggagttaactatgactcagtagacatagaggtgggtgacagtgcaaggattcagactgggttttcatggcctaacaataagcagcgttaggcaatgacagattatgaggaattaagtacgctg

SEQ ID NO: 70255 - DNA, 599 bp, Chicken  19866894343434_1
  misc_feature (1)..(176): n is any nucleotide
nnnnnnnnnnnnnnnnnnnnnnnnnnnnnnnnnnnnnnnnnnnnnnnnnnnnnnnnnnnnnnnnnnnnnnnnnnnnnnnnnnnnnnnnnnnnnnnnnnnnnnnnnnnnnnnnnnnnnnnnnnnnnnnnnnnnnnnnnnnnnnnnnnnnnnnnnnnnnnnnnnnnnnnnnnnnnnnnccatcacacttcagatactcccccctgtctctaaagccaggttgtatatacaaaaaatacttcagattagagaggttttgataaagacgtgcaaaaacgatgaccctgtacctcacaagacctrtggtgactggagccaggaatactactcagaaccaagccgggcacagcggtgctggctgaggcagccccacacgctgctggcaccgcgcagcagagctggcaaggaagctccctgtaaaggctcaccagtgtcagccatgaaccaggcaggtccccarcagctccctccatgttgcgctgctggaatggtacttgctaacacctgttacgttctgcgtggaagtgccttgtaccaacacttcctttttccactgaaaacgcagaaaccacttgcatgaaaccattttaagtgaaatacat

SEQ ID NO: 70256 - DNA, 599 bp, Chicken  19866894343434_2
  misc_feature (1)..(19): n is any nucleotide
nnnnnnnnnnnnnnnnnnnccatcacacttcagatactcccccctgtctctaaagccaggttgtatatacaaaaaatacttcagattagagaggttttgataaagacgtgcaaaaacgatgaccctgtacctcacaagacctrtggtgactggagccaggaatactactcagaaccaagccgggcacagcggtgctggctgaggcagccccacacgctgctggcaccgcgcagcagagctggcaaggaagctccctgtaaaggctcaccagtgtcagccatgaaccaggcaggtccccarcagctccctccatgttgcgctgctggaatggtacttgctaacacctgttacgttctgcgtggaagtgccttgtaccaacacttcctttttccactgaaaacgcagaaaccacttgcatgaaaccattttaagtgaaatacatgaagacttttaagaaggaagccagtcgtggacaaaaacattactttttaatgctgcacttaaagtttgtaaacttggcaggggtaggagcacctgacgtgcagttcacaaagatggaaactgcagccaactctaattttcagttaattgctcttcat

SEQ ID NO: 70257 - DNA, 600 bp, Chicken  19866894343435_1
caaataaatacaaaggtgctttcttcagaaagttagaaaaatacgtaatagctgaaaagggaggattgagtagctataaatgttcaagtgaaatgatctgataaagattctgactgcatttcatgacaaaaaattaagatttatgttatcactttgtacttgctattgacattcatatgctttttgtcaacttagtaattctcaactttaatcacttaagagaattttatggaaagatcttccccttgttagtgtgtcaatgtgttaagttggatttccaatctacgctccacagtagargtaagctgccaagccattttgtttttagttcgtactatggcaaacgtggcttgctgtaagactgtaaaaatatgttataacaagatccaagttcatccattcaccacttggtgccactctagctttatgaacttcactgtcagcaaaattacagacctttttttcttcaaagttttcgatgtgctgtctaaaacacaaaactyagagcaaccttctttcagttatgtttctctgactcaaagtgaatggtggctgatggacagttttcagatattgctcagaacagaaaggatatggtca

SEQ ID NO: 70258 - DNA, 600 bp, Chicken  19866894343435_2
aactttaatcacttaagagaattttatggaaagatcttccccttgttagtgtgtcaatgtgttaagttggatttccaatctacgctccacagtagargtaagctgccaagccattttgtttttagttcgtactatggcaaacgtggcttgctgtaagactgtaaaaatatgttataacaagatccaagttcatccattcaccacttggtgccactctagctttatgaacttcactgtcagcaaaattacagacctttttttcttcaaagttttcgatgtgctgtctaaaacacaaaactyagagcaaccttctttcagttatgtttctctgactcaaagtgaatggtggctgatggacagttttcagatattgctcagaacagaaaggatatggtcatatctgtattagggatttaaaactgagtatgtagagagatgagagtacagcatgtttttgttttctaatgctgctgtcagttcaaacctgaaactgggctaaaacctttcagtgactgctttaagtctgtccttttcctgatgagggggggagagagagcgcgcgcgctgttgagtgcatacaggcatttgcatgtagatttc

SEQ ID NO: 70259 - DNA, 600 bp, Chicken  19866894343438_1
gctgaacatcaccccctgagcttatacttagaacatctccaggtggattgaagctgttgagtgaagaatgaaggattctgttaaactacggaatcccattgcagttttcttgcaacttaggacttaagaaacctacagattgcttaagaaatataaaatatatcagccaaatgctcagtgtgtaagttgatggcatctagaacaatggtcacaccacttaatggtgctcaggcagaactccagtaaggtcattagctctttttctgtttcacaggccaggaatagtatatacttcaaaastgagaaatgctaaaggcactgttgtgacaggcacagagatttcactgtaagcaaggagaaaaatgtaccttgaaaaaagcacttgagtaagcagctaagatcatcagacacagcttgccttttctttgttctgtagggagatccagaaagagtagccagtgggaaaagcactgtgaattatggacagcctccatgagttgcagtgagtgctttgttttacaggttagaaggtaacagcaactgtccagactgtgaagctgaaaaaattggtattaaaacatttacaatcttaatttctcc

SEQ ID NO: 70260 - DNA, 600 bp, Chicken  19866894343443_1
agacctcgagagtctgagtccaaccctgctgctaaacagcctccctgtgcaggcacacaggcaggtgtctccacacacggtcccgaatacctccagagaagtaccacaatctctgtgggcagcccgtcccagcgctccatcatgctgacagtaaagaagttcctccttgtgttagcgtggaacttcctgtgttccaatttctgcccattaccccttgttctactgcagcgcaccaccgaaaggagtgcacccacatcaacttgggtcccacgcgttatgtgcttataaacagttatgagracccctctcagccttcccttctccagactgaacggtcatgggtccctcacagcgctcagccttccctcgtatgggagatgctcttattcaggcccttattcatctctgtggtcytctctagaccctttccaggagacccctgtctttttgaaccggggagcccagaactgtattccacatgtggccttaccagggcagagtagagggtagagatcacctccctttacctcctggccaggctcccagctttgtatcatcagcaaacttgctgagtatggactctatccctccatccaggtc

SEQ ID NO: 70261 - DNA, 600 bp, Chicken  19866894343443_2
gtgggcagcccgtcccagcgctccatcatgctgacagtaaagaagttcctccttgtgttagcgtggaacttcctgtgttccaatttctgcccattaccccttgttctactgcagcgcaccaccgaaaggagtgcacccacatcaacttgggtcccacgcgttatgtgcttataaacagttatgagracccctctcagccttcccttctccagactgaacggtcatgggtccctcacagcgctcagccttccctcgtatgggagatgctcttattcaggcccttattcatctctgtggtcytctctagaccctttccaggagacccctgtctttttgaaccggggagcccagaactgtattccacatgtggccttaccagggcagagtagagggtagagatcacctccctttacctcctggccaggctcccagctttgtatcatcagcaaacttgctgagtatggactctatccctccatccaggtcaccagtgaagatgttgaacaagatcaaacccagcactgacctctggggatcaccgctagttgcaggtctccaaccagactctgcactgctgcccacaaccctgattattaagag

SEQ ID NO: 70262 - DNA, 600 bp, Chicken  19866894343446_1
tcagcttattctgtatgtctcacttgtgtcctctgtgagaggaagcgataacaacagaataacatgtttgaagtgaggaagcatggaatgtttctatcacagttatatttttctgcatattaatctttatttccttcttaatatttccaatgctctacaaccatttcttgaggggctgccaccaaagagatgtccttaccaattagaatgacattttgatttttttttcctgccaagagagtaactgaaaacccatcaatgtgagtaagatacctaaattatttcttccatagggctttkcttaccatttatctccagttaactgaacttcatgtgcccccttgctatcctatcaacccagcttggaacaatttggagactggaagtcacttcgtcttgttttctgggttcagaacagcccacagagctgctgcaagcagagcaggatgccctccctgaatgctgtgccttctggcagtgcattccctggtgagggctgtgactgggaagcagaagcacagtgtggagaaatgtggactgctgtgctgcagctcggggggcaggaaatgggaaatggcacctgtaatgaggggactggct

SEQ ID NO: 70263 - DNA, 600 bp, Chicken  19866894343448_1
aagcttttattcctattcacttgccctcacctgtttagtctatggcaggaattgcttctccgagtcccatgcctagtgttatactattgttacccagggcctctaataatagaaaataataccccccaatctaaatcttagaaagcaatgtttgaaaagataaactggttttcaaaactgctctggtcagctttttagtttctctgtgctgtcaccaattttacatttaccctgattggtaggagacagaaatatgtgcatataaagagattcttgtgtaactgttgggttggtttttgkttttttttttaataaaagwwgtttaaaaaattttaaaactcatcagagaaaaagagaaagaagaacttagtcaccagaatatgaaaacttgctttttctagacatgctggttgacttccaagccgcttctgacagccaaagaagtgcagtccatcatggctctttttccatttccagacctttccctgaagcccttcatttctgtgaaacattccctctcagtgtaccccacacttcattccactcacaactggcttaagtgatggatctgaaagatcagagctgtgtgaaacaggtgtg

SEQ ID NO: 70264 - DNA, 600 bp, Chicken  19866894343448_2
cttgccctcacctgtttagtctatggcaggaattgcttctccgagtcccatgcctagtgttatactattgttacccagggcctctaataatagaaaataataccccccaatctaaatcttagaaagcaatgtttgaaaagataaactggttttcaaaactgctctggtcagctttttagtttctctgtgctgtcaccaattttacatttaccctgattggtaggagacagaaatatgtgcatataaagagattcttgtgtaactgttgggttggtttttgtttttttttttaataaaagwwgtttaaaaaattttaaaactcatcagagaaaaagagaaagaagaacttagtcaccagaatatgaaaacttgctttttctagacatgctggttgacttccaagccgcttctgacagccaaagaagtgcagtccatcatggctctttttccatttccagacctttccctgaagcccttcatttctgtgaaacattccctctcagtgtaccccacacttcattccactcacaactggcttaagtgatggatctgaaagatcagagctgtgtgaaacaggtgtggtaatttggaaaactcaca

SEQ ID NO: 70265 - DNA, 600 bp, Chicken  19866894343448_3
ttgccctcacctgtttagtctatggcaggaattgcttctccgagtcccatgcctagtgttatactattgttacccagggcctctaataatagaaaataataccccccaatctaaatcttagaaagcaatgtttgaaaagataaactggttttcaaaactgctctggtcagctttttagtttctctgtgctgtcaccaattttacatttaccctgattggtaggagacagaaatatgtgcatataaagagattcttgtgtaactgttgggttggtttttgtttttttttttaataaaagwwgtttaaaaaattttaaaactcatcagagaaaaagagaaagaagaacttagtcaccagaatatgaaaacttgctttttctagacatgctggttgacttccaagccgcttctgacagccaaagaagtgcagtccatcatggctctttttccatttccagacctttccctgaagcccttcatttctgtgaaacattccctctcagtgtaccccacacttcattccactcacaactggcttaagtgatggatctgaaagatcagagctgtgtgaaacaggtgtggtaatttggaaaactcacag

SEQ ID NO: 70266 - DNA, 600 bp, Chicken  19866894343450_1
attttattgcttccagaaagatcttgctcaatagctggtgttccaaatcacagaggattccatagtcttcgcttatgcaaactgtcctttggcttgtgcgtttgtggaaaaaagcaaaactccaaaacagtcaagagaacacagtgcttgatagctgcttgatgatatattcacgtgactgagattggatgaccttccagagttgtagtctgaccccttgtgcagagcacagtcagaacaagttgttgagggccactggttgagcacctctgaggatagagccctttttgcaacctgttkcagttgtcagcctcaggataagaagttctttcttaagtctaaaagaaatgccttgtaattcaatttgtgyscattacttcttgtccttctactgggcccagcataggagagttggcctccactgtctttgctttcaccaawcaggtatttattatacatggataaggtttgtcttttttatgcctaggctaaagaggttcttggaagccatccttgtaaagctggctgtaccccagcctgcatggatgcctggcttattcctcccaggtgtaggacttggtatagccctctgtgctggaa

SEQ ID NO: 70267 - DNA, 600 bp, Chicken  19866894343450_2
gcttatgcaaactgtcctttggcttgtgcgtttgtggaaaaaagcaaaactccaaaacagtcaagagaacacagtgcttgatagctgcttgatgatatattcacgtgactgagattggatgaccttccagagttgtagtctgaccccttgtgcagagcacagtcagaacaagttgttgagggccactggttgagcacctctgaggatagagccctttttgcaacctgttkcagttgtcagcctcaggataagaagttctttcttaagtctaaaagaaatgccttgtaattcaatttgtgyscattacttcttgtccttctactgggcccagcataggagagttggcctccactgtctttgctttcaccaawcaggtatttattatacatggataaggtttgtcttttttatgcctaggctaaagaggttcttggaagccatccttgtaaagctggctgtaccccagcctgcatggatgcctggcttattcctcccaggtgtaggacttggtatagccctctgtgctggaaaagattctaattggcccacttctccagtgtgttaaggtcctctgaatggcagcacaaccagctagttgct

SEQ ID NO: 70268 - DNA, 600 bp, Chicken  19866894343450_3
cttatgcaaactgtcctttggcttgtgcgtttgtggaaaaaagcaaaactccaaaacagtcaagagaacacagtgcttgatagctgcttgatgatatattcacgtgactgagattggatgaccttccagagttgtagtctgaccccttgtgcagagcacagtcagaacaagttgttgagggccactggttgagcacctctgaggatagagccctttttgcaacctgttkcagttgtcagcctcaggataagaagttctttcttaagtctaaaagaaatgccttgtaattcaatttgtgyscattacttcttgtccttctactgggcccagcataggagagttggcctccactgtctttgctttcaccaawcaggtatttattatacatggataaggtttgtcttttttatgcctaggctaaagaggttcttggaagccatccttgtaaagctggctgtaccccagcctgcatggatgcctggcttattcctcccaggtgtaggacttggtatagccctctgtgctggaaaagattctaattggcccacttctccagtgtgttaaggtcctctgaatggcagcacaaccagctagttgctc

SEQ ID NO: 70269 - DNA, 600 bp, Chicken  19866894343450_4
cagtgcttgatagctgcttgatgatatattcacgtgactgagattggatgaccttccagagttgtagtctgaccccttgtgcagagcacagtcagaacaagttgttgagggccactggttgagcacctctgaggatagagccctttttgcaacctgttkcagttgtcagcctcaggataagaagttctttcttaagtctaaaagaaatgccttgtaattcaatttgtgyscattacttcttgtccttctactgggcccagcataggagagttggcctccactgtctttgctttcaccaawcaggtatttattatacatggataaggtttgtcttttttatgcctaggctaaagaggttcttggaagccatccttgtaaagctggctgtaccccagcctgcatggatgcctggcttattcctcccaggtgtaggacttggtatagccctctgtgctggaaaagattctaattggcccacttctccagtgtgttaaggtcctctgaatggcagcacaaccagctagttgctcctggctgtttggtgtcttctgttttctttcagtctacgggaacctgtccagaatgcctccatgactctca

SEQ ID NO: 70270 - DNA, 599 bp, Chicken  19866894343458_1
  misc_feature (1)..(164): n is any nucleotide
nnnnnnnnnnnnnnnnnnnnnnnnnnnnnnnnnnnnnnnnnnnnnnnnnnnnnnnnnnnnnnnnnnnnnnnnnnnnnnnnnnnnnnnnnnnnnnnnnnnnnnnnnnnnnnnnnnnnnnnnnnnnnnnnnnnnnnnnnnnnnnnnnnnnnnnnnnnnnnnnnnnngagcaggatcgctgccaaaactgccctgaggaaaagctgggtgccacagggcagcagcaggttgctcagccagccccgggacaagccagggctctgccatccccgccaccaggatccagcactgtgtgctgctccygctgccagcagctgtaaaggggttctgacaccaggcttcgtggcaaaagggaggaagtcaagcagtgttatttgacttactaaaagtctgatatttaaacagttacttacccaagaaagtaaaaggatgtaaaaacacagtcttaccagcagactattgcattttctggtaacaaaagttacacccttatagcagtaacatagcctaagtaacagtgacctgacatggatccaataccaatgcactcagacaatttaaaataatagatgacttgaggcaaatcacagctggtgatttct

SEQ ID NO: 70271 - DNA, 599 bp, Chicken  19866894343460_1
  misc_feature (1)..(198): n is any nucleotide
nnnnnnnnnnnnnnnnnnnnnnnnnnnnnnnnnnnnnnnnnnnnnnnnnnnnnnnnnnnnnnnnnnnnnnnnnnnnnnnnnnnnnnnnnnnnnnnnnnnnnnnnnnnnnnnnnnnnnnnnnnnnnnnnnnnnnnnnnnnnnnnnnnnnnnnnnnnnnnnnnnnnnnnnnnnnnnnnnnnnnnnnnnnnnnnnnnnnnnaacgtgtgggtgaacgaggctgaaagaagcagcgtgcagccatgtcaaagccctggagatactgaactccgtgctgagaggagtacggggaatctttgctgygggtattagaggagcagtgtgccacctgtgccgtgtacatgcacacccaaggagcagccaccagcctaagagagcgcacatggcagcgtgaaagcataaagcatctgctctcggtgtctgcctgatgtcacaacaaggaaaaaagagcttttcctggaaaggaagtaatttaaaagtaatgctaaagggcacactgggaactgcagcaccctcctgactgccctggaagcgtgcaagtcatttctcagctcatgggacaaaggcaaatctgcagataggagggtaaacgtggaccatcc

SEQ ID NO: 70272 - DNA, 600 bp, Chicken  19866894343466_1
ccacagataaagcctggctgtatacattcatttaaggtcttactcatattagtgtgtttacttatggcaatgtatgaccttgcattctaaaaagaaaaaaaaatatatcacagctgctgtagcaaaatgtaacacttactgtatatgttgtgaatggtctttcataaatttattatatttgatatttttttacttaaaaaagtctctttttccatggagattaatgatccttacactcttcatgatgaactctgagtcaaggtaataggaacttgcgggatccccgttgtttgaagaggraagttgttgcaaagtaaaccatccagttagcagcatttaactgtttattacactcagccctccccgctgggacttgaaactgctcatcagcaggagcagaaaaagaaagaaaaacaaaaacaaaaacagaaggaaatgatgacaaaaatcataagagaaattgcttgttctatccttcaggaagccagagagtaatggattctgtttgtaaaactgttaataaaagcactaattttttagtatgtttcaagaatctgctttgaatactgcaatcaaacttgccatagaagtagtgcatca

SEQ ID NO: 70273 - DNA, 600 bp, Chicken  19866894343466_2
actgctcatcagcaggagcagaaaaagaaagaaaaacaaaaacaaaaacagaaggaaatgatgacaaaaatcataagagaaattgcttgttctatccttcaggaagccagagagtaatggattctgtttgtaaaactgttaataaaagcactaattttttagtatgtttcaagaatctgctttgaatactgcaatcaaacttgccatagaagtagtgcatcacttgtgtgtagtgctcaaggcaccgtctatgctggcagagttaagggcatgggataggctatgatttcccaggaacaytgagctaagcagcctttctggaaactctgtgcatcaatattactccaaaaatagtattattagtcataacaacactgattgggtcatgrggaatggctgcagcagtgtgttcaagaaggttggaggggaatcgcccctggatctgtatgtaacctctaaggttttgaatcctttcttctcagcgtccatctttcattttatcagatggtacagttagatgactggggaaggacaagaaatataggaaccaatgataagaatccactagaaaatagaaatatcctcattcctgcaggcaaa

SEQ ID NO: 70274 - DNA, 600 bp, Chicken  19866894343466_3
ttctatccttcaggaagccagagagtaatggattctgtttgtaaaactgttaataaaagcactaattttttagtatgtttcaagaatctgctttgaatactgcaatcaaacttgccatagaagtagtgcatcacttgtgtgtagtgctcaaggcaccgtctatgctggcagagttaagggcatgggataggctatgatttcccaggaacaytgagctaagcagcctttctggaaactctgtgcatcaatattactccaaaaatagtattattagtcataacaacactgattgggtcatgrggaatggctgcagcagtgtgttcaagaaggttggaggggaatcgcccctggatctgtatgtaacctctaaggttttgaatcctttcttctcagcgtccatctttcattttatcagatggtacagttagatgactggggaaggacaagaaatataggaaccaatgataagaatccactagaaaatagaaatatcctcattcctgcaggcaaaggaatatttacagctgacgcatcagcttcaggccaaagaaatgacaacagaatggaaggtggatgtgtggctgtagaaaagtattagag

SEQ ID NO: 70275 - DNA, 599 bp, Chicken  19866894343470_1
  misc_feature (1)..(38): n is any nucleotide
nnnnnnnnnnnnnnnnnnnnnnnnnnnnnnnnnnnnnncagtcatatttcttagcatctccttctgacctaaattctttctaaggattgaaatctgttgtggccagatctcaatccatacttagctctagttacttggctagaggttattttattcatgtcattattgaagtcacctacttagatttaaaatgcttttaaagagtttgcagattctgcctatatagcataagccaaggaatattcctcaaatgaggtatagaagttgtgtccagcactcccgaaaatcatttggattgcycatatttgtgatactgcttaatttaagcaagcagcaaaattggtaccatagtaaagatgacatgaatttagaaaatgcttctcttttaatattgatcgagaacactagtagtaaatttaagacaatctaagacaataagaatgatttttgaaatataataatctcctttttagttctgaatgatcctgctatgtctaatgggaatggaggaatacaaaattctgcaagttgcttgcctttaatctccttttcctatttttctggttcttctaactgatgagttataacaactacagatg

SEQ ID NO: 70276 - DNA, 600 bp, Chicken  19866894343473_1
ccatccgtctgcacacaaaacatgacaaagtacaaaagaacaaaacatgcttttcaacagtgtctgtcttaaaaattcaaggctactcccttgtttgaaactgtacaatcacattcattccttttcaatgcacagaaggaggtaaattactgaaatactaagttatttatttcttggagaaaaataggcccattgatctctaagaataaagctggaaatctcacttttaaatgattactttgatagctgtgtgttagctgcttctcacacactttcaactggtgttcattaatgctgtcygtttcctcactgagctcttgcaggaagctacttattgctgacaatgtgcacattaaaaacacatcagtttttaaaccaaaaagtcttcccctggccatgaatccactgaaaattatgtttttaagtaaatctccttatgsctgtatatacgcatttcctataagaggcttaacaaacaraagtgtaaaatctattaacagagtatgcaaattattccctgaaagaaaatgatttytttcttgaaacacgttaaaaacaaagtgtgtggcccattaatgatatggcatgaactgtgtaagt

SEQ ID NO: 70277 - DNA, 600 bp, Chicken  19866894343473_2
ggtaaattactgaaatactaagttatttatttcttggagaaaaataggcccattgatctctaagaataaagctggaaatctcacttttaaatgattactttgatagctgtgtgttagctgcttctcacacactttcaactggtgttcattaatgctgtcygtttcctcactgagctcttgcaggaagctacttattgctgacaatgtgcacattaaaaacacatcagtttttaaaccaaaaagtcttcccctggccatgaatccactgaaaattatgtttttaagtaaatctccttatgsctgtatatacgcatttcctataagaggcttaacaaacaraagtgtaaaatctattaacagagtatgcaaattattccctgaaagaaaatgatttytttcttgaaacacgttaaaaacaaagtgtgtggcccattaatgatatggcatgaactgtgtaagtgcgtgcacctgtccttggtctctgggttcttacttcagactgtctcagcttctatcagtgagggctcaatattgcctagtggtagctgagttgaagaaataaagtagtacccagctgtagctgaatgctactgtggttta

SEQ ID NO: 70278 - DNA, 600 bp, Chicken  19866894343473_3
aaaaataggcccattgatctctaagaataaagctggaaatctcacttttaaatgattactttgatagctgtgtgttagctgcttctcacacactttcaactggtgttcattaatgctgtcygtttcctcactgagctcttgcaggaagctacttattgctgacaatgtgcacattaaaaacacatcagtttttaaaccaaaaagtcttcccctggccatgaatccactgaaaattatgtttttaagtaaatctccttatgsctgtatatacgcatttcctataagaggcttaacaaacaraagtgtaaaatctattaacagagtatgcaaattattccctgaaagaaaatgatttytttcttgaaacacgttaaaaacaaagtgtgtggcccattaatgatatggcatgaactgtgtaagtgcgtgcacctgtccttggtctctgggttcttacttcagactgtctcagcttctatcagtgagggctcaatattgcctagtggtagctgagttgaagaaataaagtagtacccagctgtagctgaatgctactgtggtttatattgcataaccatgcgttagctccacatacatgcaagc

SEQ ID NO: 70279 - DNA, 600 bp, Chicken  19866894343473_4
tactttgatagctgtgtgttagctgcttctcacacactttcaactggtgttcattaatgctgtcygtttcctcactgagctcttgcaggaagctacttattgctgacaatgtgcacattaaaaacacatcagtttttaaaccaaaaagtcttcccctggccatgaatccactgaaaattatgtttttaagtaaatctccttatgsctgtatatacgcatttcctataagaggcttaacaaacaraagtgtaaaatctattaacagagtatgcaaattattccctgaaagaaaatgatttytttcttgaaacacgttaaaaacaaagtgtgtggcccattaatgatatggcatgaactgtgtaagtgcgtgcacctgtccttggtctctgggttcttacttcagactgtctcagcttctatcagtgagggctcaatattgcctagtggtagctgagttgaagaaataaagtagtacccagctgtagctgaatgctactgtggtttatattgcataaccatgcgttagctccacatacatgcaagcagcgagtgaaaagcttggcactcaggattaaaacagtgtcaccttttttttttttt

SEQ ID NO: 70280 - DNA, 600 bp, Chicken  19866894343474_1
ttgtttacactaagatcagtatcatttaatgtattacgcagtttaggtactgtcaatatatctacacttaaattaccaataaaacagcacattttgctcatgactgtgctatcacctggtaaaagtcctttaagatggttaattcttttgcttgcttagtaagagcatgaggaacatgtctatgacctcagtgttctattgaaattctggcagcaaatgttttatggctgttgtttatacaagattaacgaatgtcatattagtacagactcattcctctttgtattctatcccagttcstaagaagatcaaatttgctctctaacttttaaaacagaacagttttcacaattgcagaaagagacaatggacaggaacatactgtgctaaatatgttcacatttttctgcccaaacagatgttacaacttttgttggaatatgtacaatttttagaataattcctggtgtccaaactaattgttgcttcctaaaactaacaaacaaaaatcaagtactacattcaatggactcattcaagaatgactgcttaatcacaggaaactaactggtggcacacatgacttcatcctgtgtccat

SEQ ID NO: 70281 - DNA, 600 bp, Chicken  19866894343475_1
gacctgaatacgtgaagtagaaacagctccaagcattctcaacatggtgctcccttgctcaaggcagtacattttattcccaagtgctccatatactcaaattatacttccacctctcccctaagagtcccttaggagaaaagagtacgtatttgatttccatttaatcatcattcttaaagaacctcaataatatcagagtcagaagaatcactggagcaccaaaaaaaaaaaaaaaaaaatggatgaagagcaaccctctccatgaccttacacttataaccttacacaattgttaarttcttacaatctgtgtggttagtgagttgcaggtttggaaagaaaggatacttactttctagtaaaaccttgaagctgtttctaacatgagctaacattaagcattcacctaactgccaggcttgtggctctctgggcgagggaagacccaagaaatgtatttatttacagctctacccacataagttagacgtactgttcttgccctctcctccatgctagatttcctatcatctatgaaaaactggcatccccacaaaagctaaaagtaaagcataaatgataaaacgtgttacctaa

SEQ ID NO: 70282 - DNA, 600 bp, Chicken  19866894343476_1
aaagttcacatgctgtacatagggatggtaaggtggaatcagctattgactttggctagtcaaggatctagcctgcttattccagttggagggataaagattcattatgcatgaggtgatagaaaaaaaaaaaaaatctcattaaaaaaagtctaaaattgaagaacttcaatggtacaggaggtgaaagcatgtggagactaaatgaaaggccactgcagtaaatgaggatatttccactgaccaaaaagcacctgattgagctttaaaaggatagactcattttttagataagaaaarccaaggcctgattaataagactagaaatctagaaaatcttcagagctagaagagaaagtaagcagtctgttttcttttcctggtatggaagtgacagtacagcagagcagggttatttcaagagacaggctcaccagtgacaagtaccatttattcaggtggctgatcttgtgtgatcactgcattaaaactgagtctgaaatattaggactgccagtgaaccgttctaagagaggtccatttctaagacctattcataaggcactgtcagtggtagagatctctctaaaatgtttctac

SEQ ID NO: 70283 - DNA, 600 bp, Chicken  19866894343490_1
gatgaagaaagaagcaaccgagtagcatctctgttgagttgtaaactcagctaggtagttttgagagccattccatgtgaataagatgagagacacccactcttcacttctgctcaaagcactgacaaacctaattttaaccctgactagatactagatgactagatgaggcccctttccttttaggctttttttgggcaacgcagtcccattatgtgaaatagaaaaacacaatcatcttgagagggtgtatgcactaccactttacctcctgtatctttggttatcttgaggatgatrtctgcttcttatcccaccattcaatattaaaaaggcaactctatattctacctcagcttcatgactttgagcttgtttacatcaacactttaatcccaaagtcagaagcgtggaagcaaatgtttcaaggtaatttctgtgatgtaaaggtgtccactgttttttatttcaggatgaatcatcagggtggtgatgacaggaaatttgccatgaagtacccacacagttctgtagattggcttcccatttagttctgctacaccctttgtattttgggactatctacaggaagcatggtga

SEQ ID NO: 70284 - DNA, 600 bp, Chicken  19866894343497_1
agtgtgcatcgttttttgaatgcagagggctgtatttgtttgaatcttttcttgacactctttggcgtgattggcagcatatctcttgaggatagatagaataacagccagggagaggtttggcaggtcaggaaagtaagaaagcaaagctgtccagcatatggaagtctgcctcatcacagcaggcagctggggacaggcgctgctctcttaaattcccagaaatccaaaaatccctggaattccttcagtataacagaacagaaatttgccccgaaggggtgcgacctagccattcaratcaggctatttgtggatgtattttcttttttggggggtacaaatatatgtgttgagagggctctaagtggtgtcacgtgaatgtgttctgaaaaggggtgaccaagagctccttattagaaacrgcaatgtactccttatttcggtgcagagccagttgcattttcttttgttctttcaacaggttagtaattactgttgcagtaattaggcttgatggagagtatataagacgataaatggttattctgtgcagtagtggggggatatttggtgccaagcttattattttcagtcaaa

SEQ ID NO: 70285 - DNA, 600 bp, Chicken  19866894343497_2
ggtcaggaaagtaagaaagcaaagctgtccagcatatggaagtctgcctcatcacagcaggcagctggggacaggcgctgctctcttaaattcccagaaatccaaaaatccctggaattccttcagtataacagaacagaaatttgccccgaaggggtgcgacctagccattcaratcaggctatttgtggatgtattttcttttttggggggtacaaatatatgtgttgagagggctctaagtggtgtcacgtgaatgtgttctgaaaaggggtgaccaagagctccttattagaaacrgcaatgtactccttatttcggtgcagagccagttgcattttcttttgttctttcaacaggttagtaattactgttgcagtaattaggcttgatggagagtatataagacgataaatggttattctgtgcagtagtggggggatatttggtgccaagcttattattttcagtcaaagctaattatctctattataatacatgactctctttcttgaattatgagtgggaaactgctgaatagatttttttcaaagtgccccgaaccatggagagaaatgaaaattaaaaacaatgaaaagc

SEQ ID NO: 70286 - DNA, 599 bp, Chicken  19866894343498_1
  misc_feature (1)..(61): n is any nucleotide
nnnnnnnnnnnnnnnnnnnnnnnnnnnnnnnnnnnnnnnnnnnnnnnnnnnnnnnnnnnnntgggttatacagaaagtgactgcaaagaggctgacctccctgccctctgtccctggtgggcacactcggccttctcctggtcgggcccaagcgaagggaagccccttcctgcacatgatgacccactacggccctgtgccaatctgttttattagcaagccttgctcgaggccctgataagctgctgcagtcagcaagataccaatggtcccagcttgtggcagagctgtgggcaggastgatctcggcattaagaaccgcaaggacacagaggaacacggctgatgtttccagacgttcatctcttgcccaatccttgctctgcctgcctgttgtgccacgctrgcccagcttctctcccatttccctgcaggggaagggtcacagcggtgacagctgcacaaaagcaagcttgtgactgtgacacattttttgttagtcagcagcaaccggctcatgtttcaaactggccaaagcaaccagtctcggcctctaaatatttacaggggagacaggaaatgggagcaaagccagctaa

SEQ ID NO: 70287 - DNA, 520 bp, Chicken  19866894343498_2
tgggttatacagaaagtgactgcaaagaggctgacctccctgccctctgtccctggtgggcacactcggccttctcctggtcgggcccaagcgaagggaagccccttcctgcacatgatgacccactacggccctgtgccaatctgttttattagcaagccttgctcgaggccctgataagctgctgcagtcagcaagataccaatggtcccagcttgtggcagagctgtgggcaggastgatctcggcattaagaaccgcaaggacacagaggaacacggctgatgtttccagacgttrgcccagcttctctcccatttccctgcaggggaagggtcacagcggtgacagctgcacaaaagcaagcttgtgactgtgacacattttttgttagtcagcagcaaccggctcatgtttcaaactggccaaagcaaccagtctcggcctctaaatatttacaggggagacaggaaatgggagcaaagccagctaaaaggacaggcttagatagggctttggg

SEQ ID NO: 70288 - DNA, 600 bp, Chicken  19866894343504_1
tgttttcccttcttccatccagttcttaaaaaatgccattctcaacttttattgagcttagtagatgtgatatgcattcagtgtcttacattatcagcccaataaatgcaaaatgattcacaacatctattttcactctgtctattctgccttttgggcaccacatttttcaattgatcccttgtaagagtacagcattgctcttctctgctgcactctgtgcacttccactgaaaatattcaaacaccagctctgattcctttcagtggaaaatgaacattattcaaggaaggtggggrgggggggggagcaaaggcaaagaaagaaatgtgtgtgcaagttgatcactcagggcagagaaggaagagagagaggaggttgggagacagaagaaagtaaattattagcaagaacgtagtactgcagaagagaggctatattaatttcagacctaagctggtaattccatgtgatgctgcagtgaatcatgtagacagtctagcttgtatttcttctaactcagagatctctgcagttcatttcattgcaagagaagtcaatatagatgtgttgaagagagcagggcttggttaacctct

SEQ ID NO: 70289 - DNA, 600 bp, Chicken  19866894343511_1
ttaaagaagagtgagaaacaagtgcagaaatctcttttagcattgtcaaactcggaaagagctgaatcctgagaaatagaagtcaaggtggaggctgctgccatccttgagttaaacaaaagccaaagcgttccgtcattttagactattaaatgacagtgtatgtggtcacacctgtaagtgcactgatttgccatctgcatacagaaatcagtattagagaggctgctgacctgcctggatgtctcagcatcccgctctggagcaacaggatcactccttaatccctgtctcacccaygctaaaacagagttctggcttatgatcaccacatgacagactctcatgaccaacatgagatgagctgtggacttgcaagcagacagatgtccctagctcaaagactccatccttgctgacatacttgaccacagcattagctaaggaattcactgaggggaatgaaataggcaagaaaaatgctcaaaaacaaaaacattcacaaaaagygagtgtcacttgtagcctatccactttgcatctaagcctatcactctggctaatctacctactttcatctacttttgtaagaaaacatct

SEQ ID NO: 70290 - DNA, 600 bp, Chicken  19866894343511_2
tcagtattagagaggctgctgacctgcctggatgtctcagcatcccgctctggagcaacaggatcactccttaatccctgtctcacccaygctaaaacagagttctggcttatgatcaccacatgacagactctcatgaccaacatgagatgagctgtggacttgcaagcagacagatgtccctagctcaaagactccatccttgctgacatacttgaccacagcattagctaaggaattcactgaggggaatgaaataggcaagaaaaatgctcaaaaacaaaaacattcacaaaaagygagtgtcacttgtagcctatccactttgcatctaagcctatcactctggctaatctacctactttcatctacttttgtaagaaaacatcttatctaggtcagaggaattgcttttcaaatagtccttgtgctacaagaaagtcttgagggggggaggggcttggatctcaaagtcaggtaccaggtgacagccacatgctatggatgaaacacacccacaaggtgggatgaagatagcagaattccttctagattcctcagcagaggagaatgcacatagctgaatattgctggcatagg

SEQ ID NO: 70291 - DNA, 599 bp, Chicken  19866894343513_1
  misc_feature (1)..(5): n is any nucleotide
nnnnntttgagattgagaaaagaaaagccacccaccaaaaactgttttttagtttgaagtgttcttgtttttgttatttgtagtacttcccaaagcagtcatttaaaagtgtgtgttttgtggtagcaaaaagcatgctaatgttagataaagatatgaaatagttcgttgaaattttgtggtcatgtttttttgttgtttttctacctcactgattcattctgttattaaacacagagacagtttttgttttcactcgaagtcagaattcagaacgttttatcactaaacccacagttmtgctttttttctcttagattgtgcctgaatgaaattctggtgattttttttttccccctatcttactgctttgtaagcagtactggtttttcactggtgataagatgaagatgctagtcatgatagaaagatgataatcagaagagaagtcagaaatctgtacttgtttgtaggaacttcacacaactgtttttcttagcaaagttcgtccctgtccttaaataaagaaaatgcacatgaacgtgaaggtgagagtctcatatacaataaaggcatatggtaggctttgtacaatacat

SEQ ID NO: 70292 - DNA, 600 bp, Chicken  19866894343513_2
tactggtttttcactggtgataagatgaagatgctagtcatgatagaaagatgataatcagaagagaagtcagaaatctgtacttgtttgtaggaacttcacacaactgtttttcttagcaaagttcgtccctgtccttaaataaagaaaatgcacatgaacgtgaaggtgagagtctcatatacaataaaggcatatggtaggctttgtacaatacataaaatcgtatgacatttttaatacttggtgatctaaaaaaaaataaattgggttgcataagatcctagaatatggtttacrtattttcaaaagccagaatttatctgcatgcgctgtatgatgcacaggcagtagaaaatgtagraaataagatataaaatggaactctgctctttgtaatgatactctcatatttgcatagccatgtcatgcttgagaatgcttctcaaagatatgtttcgttttcttggacaagagatgcaaggttgtattgacgtttttacattaaaatgaacttttatgaatatgaagtcttttcatattttggtgaaagtgtaagtgatagcacattgatatccttcctggacctgatgaaaaaac

SEQ ID NO: 70293 - DNA, 600 bp, Chicken  19866894343513_3
agaagtcagaaatctgtacttgtttgtaggaacttcacacaactgtttttcttagcaaagttcgtccctgtccttaaataaagaaaatgcacatgaacgtgaaggtgagagtctcatatacaataaaggcatatggtaggctttgtacaatacataaaatcgtatgacatttttaatacttggtgatctaaaaaaaaataaattgggttgcataagatcctagaatatggtttacrtattttcaaaagccagaatttatctgcatgcgctgtatgatgcacaggcagtagaaaatgtagraaataagatataaaatggaactctgctctttgtaatgatactctcatatttgcatagccatgtcatgcttgagaatgcttctcaaagatatgtttcgttttcttggacaagagatgcaaggttgtattgacgtttttacattaaaatgaacttttatgaatatgaagtcttttcatattttggtgaaagtgtaagtgatagcacattgatatccttcctggacctgatgaaaaaacacttacttgtaactaaaacagtttcttatttaaaaaaaaaaaaaagggctaatcagcagtgcag

SEQ ID NO: 70294 - DNA, 600 bp, Chicken  19866894343515_1
cacagaaaaactatgggattaatcacataattggaatactagaattgagaaggtgatccgagacaaccagcatggcttcaccaagggcagattgtgcatggccaatttggtggccttcaatgatggagtaaggacaccagtggacaaaggaagagtgactgatgtaatctatcagaacttcaaggcttttgtacaaagccaacatcacgtttttatctctaaattggaaaatatggatttaaagtgtggactattcagtggataaagacttggtctaacggtcacagccagagggctgtmgtcaatggctttatgtccaggtggaggccaatgacaagtggtatcccccaggggtccatcttgggaccagtgctcttcaatgtcttttcaattacacaaatagtggaattgaatacatcctcagcaaacttgctgacagcactaagctgagtggtgcagctgataaaacagaagaaagcaatgccacccagagggacctgaacaaacttgaaaagtgggcccctgagaacctaatgaaatccaacaaggcaaagtgcaaggtgttgcacttggatggattcaatccaagatatgagtgca

SEQ ID NO: 70295 - DNA, 600 bp, Chicken  19866894343518_1
tgtcaataaactagatggctattattgcccttacggaacacattttttaccatcttgaactaacatcctacagttatgggaaatgaggtatgtcagatgtcaccatttacaaaggaaattactgcccttgaaaacatggggcaaaatgagaagtgatgtttttgaaatgtcatattccagctaggtaacaaaagaggcattttgtaaatgtttcggcacatcattaaagccttagggaaatctctatcacctctaaattttcaacagttacttaatttatatgtcttagtagaactttaytcttcatcagttgtgtcatccaattccttgaactactctgaaactgatcttttcattcacaggctcaaaaagtgggctcacagaaacctaatgaggtttgacaaggccaagtgcaaggtgttgcacttggactgggacaaacccaaatatgactgcagactgggaggagcagccatgcagggaaagtctttcggatcctggtggatgaaaagcttggcacgagtcagtgttgtgtgcttgcagccaaggatgtcaaaagtatccaggactgtatgaaaagaggagtgattgttcctctct

SEQ ID NO: 70296 - DNA, 600 bp, Chicken  19866894343520_1
tgtctttcgctgttaaaaacatgacctatgaaacaaatgcactgttacattttccttcatcattgtatcagttgacttcccaaaataaatgagagtattcaaaatcgttctgagcaggtttaacagctgtcaggaaatttaattggacttttgttgagtagttttgagtatgggctcccttgtgcctccgtaaacattctcacattccttatagcagtgtcaaaaatcctgcatgaaatgactgcgctgccaaggagagggagattagatatagtgcaaaggtttggagattttgttgtygttgttgttgctgctgcaattcaccatcccttctggctgttctgaatgtcagtgttacaaagtcatgtatttgggagagttctaggaaagtacttgagatagctgacacatagccaccacagctggtgaacgccatgtaccccaggaaatcccatttctgcaaaagcatggcatgagacagcagcactcttgctggtgaagccaggtgattttggctgcaagacaagacaagtgaaaatgcatttcatagcctcaycatgagtatgtccagatagtaaaaaggaagaccccgacttccgt

SEQ ID NO: 70297 - DNA, 600 bp, Chicken  19866894343520_2
gagggagattagatatagtgcaaaggtttggagattttgttgtygttgttgttgctgctgcaattcaccatcccttctggctgttctgaatgtcagtgttacaaagtcatgtatttgggagagttctaggaaagtacttgagatagctgacacatagccaccacagctggtgaacgccatgtaccccaggaaatcccatttctgcaaaagcatggcatgagacagcagcactcttgctggtgaagccaggtgattttggctgcaagacaagacaagtgaaaatgcatttcatagcctcaycatgagtatgtccagatagtaaaaaggaagaccccgacttccgtgattactggtattctcagtactcatgaaaaattgtgatgtgcttgcctttttttaaataataataataataataataaatatttctcaaattatcaccacaatttcactgagacaaaacattaacaccaaaatcacatatttagcacaaaaaggatttcagttatgaatgttttgctttgtatgtcctctaaagtctctgtaagaggtacctggacaggagaattgtgcccagacacataggaactcggacaaaga

SEQ ID NO: 70298 - DNA, 600 bp, Chicken  19866894343531_1
aggtaaaggctctggatgctgataaatctagaagcctggtcaagtggcggtacttgaaaagcctagctctgcctttctactgaggactgtgtgcaaggatatggtgctgtgctcctgctgtgtggtggaagagggtgatgaaaagagagaggagaccaggcaggtctcacacagacagtaaaattagactgtatgctgtgcatttgcctctctttttctgtgtctacagtaacacagagaagtctgaggtctttttcctggctcagagatgatggaagcatcactgatatgaacatgctyatgctcttcctttgaaggcatggggtcctcgttgatgtaacctgttgggagcagtctggtccatacgcttgcctgaattgtgtgggtactatccagaagagcactggttgtcagagaacacgattaatgcaggaaaatcagtcaattaacaatgattaatcaatgcctgtgtgccagtgctcaagctgatgctgaactggtcctgctgagctgatacagaaagagtaaagcacaggctaatgcagggacacaccaggctgctttaaacaagtttgtttgacagaagccattaacgctttc

SEQ ID NO: 70299 - DNA, 599 bp, Chicken  19866894343544_1
  misc_feature (1)..(189): n is any nucleotide
nnnnnnnnnnnnnnnnnnnnnnnnnnnnnnnnnnnnnnnnnnnnnnnnnnnnnnnnnnnnnnnnnnnnnnnnnnnnnnnnnnnnnnnnnnnnnnnnnnnnnnnnnnnnnnnnnnnnnnnnnnnnnnnnnnnnnnnnnnnnnnnnnnnnnnnnnnnnnnnnnnnnnnnnnnnnnnnnnnnnnnnnnnnnnggcagaggagactgttaagaagtctgggaactgaactggaagccataagagctcatttaaccctttaccctacagaaaagacatgttattcacgtgaatgcagatctcatrtttatacacatcaagagcttgtctaaatgcctgatgtaggtatgacctttcttatttaggaaaaaagagtacccttaggaaaaaagattaccttttgttcagatagagaatttctgtagtgacacaaaggaaactcaaatcctctacaacgtgcattcttrcgaagggcataggaaaagatcacctaaagaaattctgaggcagttagaacagtcactgccaaggagccagagacaggaggttaagtacactatgtccatataaagtaagttttagagatgttggagyttcatgataag

SEQ ID NO: 70300 - DNA, 599 bp, Chicken  19866894343544_2
  misc_feature (1)..(28): n is any nucleotide
nnnnnnnnnnnnnnnnnnnnnnnnnnnnggcagaggagactgttaagaagtctgggaactgaactggaagccataagagctcatttaaccctttaccctacagaaaagacatgttattcacgtgaatgcagatctcatrtttatacacatcaagagcttgtctaaatgcctgatgtaggtatgacctttcttatttaggaaaaaagagtacccttaggaaaaaagattaccttttgttcagatagagaatttctgtagtgacacaaaggaaactcaaatcctctacaacgtgcattcttrcgaagggcataggaaaagatcacctaaagaaattctgaggcagttagaacagtcactgccaaggagccagagacaggaggttaagtacactatgtccatataaagtaagttttagagatgttggagyttcatgataaggcctgtagaataatcaagctagcaaacacaatatatgatggcagcgtactagctagagggtgattataagctctaagataccagagaggtttacaatggaaaagatctctctttggctgagagctaactacacacaagtccaccttcctgtaatttcagtg

SEQ ID NO: 70301 - DNA, 600 bp, Chicken  19866894343544_3
gcagatctcatrtttatacacatcaagagcttgtctaaatgcctgatgtaggtatgacctttcttatttaggaaaaaagagtacccttaggaaaaaagattaccttttgttcagatagagaatttctgtagtgacacaaaggaaactcaaatcctctacaacgtgcattcttrcgaagggcataggaaaagatcacctaaagaaattctgaggcagttagaacagtcactgccaaggagccagagacaggaggttaagtacactatgtccatataaagtaagttttagagatgttggagyttcatgataaggcctgtagaataatcaagctagcaaacacaatatatgatggcagcgtactagctagagggtgattataagctctaagataccagagaggtttacaatggaaaagatctctctttggctgagagctaactacacacaagtccaccttcctgtaatttcagtgtaaggatgaattttgggatctctacgcaccctgggaactcarcagaagctaaaagtttgtcatgggcaagagcttacttggagcactaggtctcagattcagctgttcatgcttctggcttgcttttt

SEQ ID NO: 70302 - DNA, 563 bp, Chicken  19866894343544_4
agttagaacagtcactgccaaggagccagagacaggaggttaagtacactatgtccatataaagtaagttttagagatgttggagyttcatgataaggcctgtagaataatcaagctagcaaacacaatatatgatggcagcgtactagctagagggtgattataagctctaagataccagagaggtttacaatggaaaagatctctctttggctgagagctaactacacacaagtccaccttcctgtaatttcagtgtaaggatgaattttgggatctctacgcaccctgggaactcarcagaagctaaaagtttgtcatgggcaagagcttacttggagcactaggtctcagattcagctgttcatgcttctggcttgctttttgtagagagctgtgcaggaagagatggtacaagatcctggtctagtattacatatgaaggttggttgctctgcatgtggcagggaggttggagcttgatgatccttgaggtcccttccaacccaagccattctatgattctatgataagagaaagcagtgagatgagctgagactcat

SEQ ID NO: 70303 - DNA, 593 bp, Chicken  19866894343549_1
ccaaatgtagtgaaaatccctgtggacagtcgtgtttacaagggtaactgtctgcattcaattgtgggttataaaagtgcttgcttgaataaatacactgagctatcagacagaacaaccaatagttctttggactaattgaccttgtcagtagaatagaaacacttgcaaataaaattcttgttgccagtgaagttgcagctgaaaacccctgaagaaactgtgcatatcctctaactatcttggaatgcaatgattaaaacagcagacttgcaggggagtatttggggggtggggggrgggggatgatatggagtaggacctcattaagtaagaaagtttcatatactaatgtttttaggtatctttttcatagcatgagatcaaatgcattcctaaaatcatgaagttgttcactttccctattcagaattatattttctaacaattgctattacttctaccatatctcaagtctgattgtataatttgttttgctggtctgcctttattgtcatgtaccctgtttcagaaaaggcaaagatctttggctagtacccagcatgttgtaatgagggtggagtatgtttgtt

SEQ ID NO: 70304 - DNA, 600 bp, Chicken  19866894343555_1
cacagagtactgcagttttgtgaaaggtcaaaattcagggtgtctttacttgacaatactgcttaaacatattctgtgtaactaatatatccaggcaatattactttcagtaattaaaaatacatatttctggattcttggaaatcagaacagctaacagtggcaggtggaaatctaggctgtttgtactccatagagactgataaagactggaaaaaattataccatttctcataggagaaaaaacatggaagggtgtgaaacatatttttcccttcctaaaatcaacaaatctttackaagtccaagcctagtgacagctacacagacacatgaagagaacagattccatagcttcctctacatttttgctctccagattcttattttaagcgttgaaaggaggaatatgcttctactcaaaatcacatcattgaaaaattcatgttaatcacatggatagcattttgtaagatcatctgtataaaaagacaaatattctagttatagtttcattttaaaagcttgtgaaaaagaaaggaagaaagagagaaagaaagagaaagagagaaagaaagagtaagaaagagagaaaaagag

SEQ ID NO: 70305 - DNA, 600 bp, Chicken  19866894343566_1
gcatgcaaggaacacagaaaaataaaaacgtggaataaaaagtgaggaaggaaaacacaaaacctgttgaccagaacttcttgcactttgtattcttgcaaaaagttcaactcatattttgaggaaagtgtgtagatattcagtaggcatggtggtaatgggtagatggttggactcggtcatcttagaggcctttcccaaccttaatgattccatgaagcaacatcaactctaagctggatgaaaatggtctccaagagatgtcatcatctcatgtttatatgtagtggtagttttgtrgactgctctgcttattccccagaggacattatttctcactatgtaaatctagcatgattaagctccaagaaattccttctgctcaattcagttttacactgttctttaaagagcagttatttgaccaatgaggcagcctcagccatctgcatctgcatatggaccctactggtgtccatagaacttctgtgaaatgtggagagaacaactcacctggtacctgagttgatggtagaatggcctggacatggttcacacactaagggattgtttggtggtagcccctgataaatttgtttg

SEQ ID NO: 70306 - DNA, 599 bp, Chicken  19866894343574_1
  misc_feature (1)..(111): n is any nucleotide
nnnnnnnnnnnnnnnnnnnnnnnnnnnnnnnnnnnnnnnnnnnnnnnnnnnnnnnnnnnnnnnnnnnnnnnnnnnnnnnnnnnnnnnnnnnnnnnnnnnnnnnnnnnnnnncgctgcccttgaattcagaatcaggcctctgggggctgctaccttgatctagaactcaatctttcatcctgctaactagctggagattttctgtggagaatacacagcaattatattcctttacttcctaactttaaaagatttcatccttctgttggagtgtagtttgctctgaatgagaggcagggmgtgagatgttgaattcttcatagagccaaaggtctgctcctggaagccgcagagcatcctcggtttcttctgaagtcagtgtaagtagtgctgtgtagcacaggattaggcttgaaggaagcgagtgtaaaaaaataatttgcattttctatgtaaaccagaggcagtatctgtattgacagatggaaagcggtttgcacggagaatacaaatactgtaatgcactctgtgttttcgcatgcataaaggattctgcaattccattctgtggagagggccaaatcctacaatgcttgtca

SEQ ID NO: 70307 - DNA, 600 bp, Chicken  19866894343576_1
cttcctcaattctggccagctccttttgtttattatcttgcaagtatttttcttccttctctgcatcatatttaatgcctgtaagccaagttgggacagcattaccctaaatttcaaagtatgtaaatgcacaatcaagcaatatgcactattttgaacataatgttgcaaaatgacattttaaaacaaaggctattctagttgctgaaacctctatcctgactctgaaaataacaggatacaagagactataccaacattcaagcattgttttacaggagtacctttccatgtataacraygcacttaaacatggtcagcactacataacacaggttgtaatttctgctacacacgtacatgacattctagaaattttaaagtttccttattgtagcaaagcatctgatttcagagaaagtaaattaagttctttgatcttcttcccctccataaatatcagttctaacagaattactacttttgattgttattaattaggaccagactataccctgcaacagccaaaagatccaaaccatgctagaagaacggattcaaaatagcacacatcaaagtaatcatgtttgttaaactgaa

SEQ ID NO: 70308 - DNA, 600 bp, Chicken  19866894343576_2
tcctcaattctggccagctccttttgtttattatcttgcaagtatttttcttccttctctgcatcatatttaatgcctgtaagccaagttgggacagcattaccctaaatttcaaagtatgtaaatgcacaatcaagcaatatgcactattttgaacataatgttgcaaaatgacattttaaaacaaaggctattctagttgctgaaacctctatcctgactctgaaaataacaggatacaagagactataccaacattcaagcattgttttacaggagtacctttccatgtataacraygcacttaaacatggtcagcactacataacacaggttgtaatttctgctacacacgtacatgacattctagaaattttaaagtttccttattgtagcaaagcatctgatttcagagaaagtaaattaagttctttgatcttcttcccctccataaatatcagttctaacagaattactacttttgattgttattaattaggaccagactataccctgcaacagccaaaagatccaaaccatgctagaagaacggattcaaaatagcacacatcaaagtaatcatgtttgttaaactgaact

SEQ ID NO: 70309 - DNA, 600 bp, Chicken  19866894343588_1
ggaacagaagcaatcctggctctacaccacctcagcccactgccgaggctggggaaaggatgagacctacggggcagatttcccccccgcaggtgctcttgtcaagctcctaacccagggaagggcaccgaagtgcagcagctcttcccataagcactcttcccagagttgtttgacgcctttcagaaacagccacatcccgtcagagcgtcttaaggacaggcagctgcaacgctccccacccctcctcccgccctatcgcccctcagagccggcctgaaggtggcccacaagatggcrccccatcgccttcgggagtgcccagagtaaagatggcggcggcgccctcttccacttccgcggtgctggcagccgtcccgccctcagtagcaatggcggtttcctgcgcggtgtggctggaggatcaggtaacggcgccgcccgtcaatccccagctcctctgctgcccgacgagggtcggcgggcggcccgggggtcgcggtttgcgctgacgcgtgtcccgccgcaggtggagcgggtgccctgcccttacgacgtccatcaccgtgtgccgcgggcgtcgttggagaggcacgcggc

SEQ ID NO: 70310 - DNA, 600 bp, Chicken  19866894343590_1
atttgtctttcttcttgggagggaaattattcagcattggttgaaggcttcttcaaggaagaagcaggcatttcccctaatttcagaactgcactgtaatgtctccacaaagcagagcgagaacaagaacactcattttcctccctcttttctaaaactatttcatggttatcttctgcttgaaggcaagtgaagtaaaaggaatcgaaacaggacccaaataaatagcaccacttgggtccatcatttttctgtgaagcattttcagttgataattcaggtcttggctgaagatcttayttctacagtggttaactcttaaatgaggacatcccaaagtttatttgaattaatttaaatctctggatttttagtttatttctcggtattcttttaccacagattgttaatgatagaactagtgctagttagagaaataagaaataaagagctgttccastcccctgtcacagtaatacataaattcataaattcagtaatacaaaaattcatattttttcattgggaaaggcaggaagtgaggtagtgaggtgctttttttctttcaaataaaaacggcactcctcttttttcatcccg

SEQ ID NO: 70311 - DNA, 600 bp, Chicken  19866894343590_2
tttcatggttatcttctgcttgaaggcaagtgaagtaaaaggaatcgaaacaggacccaaataaatagcaccacttgggtccatcatttttctgtgaagcattttcagttgataattcaggtcttggctgaagatcttayttctacagtggttaactcttaaatgaggacatcccaaagtttatttgaattaatttaaatctctggatttttagtttatttctcggtattcttttaccacagattgttaatgatagaactagtgctagttagagaaataagaaataaagagctgttccastcccctgtcacagtaatacataaattcataaattcagtaatacaaaaattcatattttttcattgggaaaggcaggaagtgaggtagtgaggtgctttttttctttcaaataaaaacggcactcctcttttttcatcccgccccaaaaagttttcctatcctgcccaataacgtccctcaatgaggaaaaamgtcaaaagaaagctggaattgctgttttttttcacatgttcttcatactcagatctctaagatggggggaaaaaacaccacaatcaaattcattatctacttgccatt

SEQ ID NO: 70312 - DNA, 560 bp, Chicken  19866894343590_3
atttaaatctctggatttttagtttatttctcggtattcttttaccacagattgttaatgatagaactagtgctagttagagaaataagaaataaagagctgttccastcccctgtcacagtaatacataaattcataaattcagtaatacaaaaattcatattttttcattgggaaaggcaggaagtgaggtagtgaggtgctttttttctttcaaataaaaacggcactcctcttttttcatcccgccccaaaaagttttcctatcctgcccaataacgtccctcaatgaggaaaaamgtcaaaagaaagctggaattgctgttttttttcacatgttcttcatactcagatctctaagatggggggaaaaaacaccacaatcaaattcattatctacttgccatttattagtgtcaatattagctttttctgttttgtttttttttctcattagactggagttattcattatttctacatcgaagactggcagtatgtgaatgaatatcgtcatcctgtcagtgtgagaaaaattttcccagatcctaatggaacca

SEQ ID NO: 70313 - DNA, 600 bp, Chicken  19866894343591_1
cttatttgtcttgctgtcactacatagtttgaagatttttctcagcatagacaacaatgtgttcttttgttgttttgtttcatttagttgttgtttgggcttttttttttttgcacagtccagtaacacgatgttgctgttctatcaggtgaaatctgttaagggcatttttctcttaattacaatgggacttgaagcaatgaagtgacagtatgtctaataggaaagggagatagagaacctagattctagttagtgtgttgaatcttgttcaatagtagtggttcaacaaggtaaagwcttcttgtctacctttttgggttacgtgtccttcttatcatacggcaccatttggtacctatattttttacctgtttggtgtggttttgaagtataaggattagttgaaaacaaatgtaagtaaccagaacaggcttttttgttcacttgtttaatcccctctctttctccagcagatgaaagaacttgatttgttttttttgtttctttgagtgaaccctgagatgttattcctcattattttgaagaagcttcatttcttttgctatttgcgttaacacccttattgacctaattttc

SEQ ID NO: 70314 - DNA, 599 bp, Chicken  19866894343600_1
  misc_feature (1)..(69): n is any nucleotide
nnnnnnnnnnnnnnnnnnnnnnnnnnnnnnnnnnnnnnnnnnnnnnnnnnnnnnnnnnnnnnnnnnnnntttccagggtaaattaatctatctgaagctcctgtgcttgctgtgttattctgctccttgtatttgagctttctcagaatgtctttaggctgcagtattcatatatcccaatttctcagcttcatagaagtgaaggcaccattacagttttgaagcatcaagtatcccttggaagggtctttttctggcagcagtatattttacagtgactggatcaggaaaagatggcarttggtgaagagctgatgtgggagatggggaatgccacaagggcatggatttctctgtagcagcactggtgaaacagagtgcaagtgcaccagtgttgtakgtgcagccagatccaaccaagccaaatgtgaaactttagtyttgctctgttaaatcttgtcaatgtacaagaaaggtggaaaaagataagtcagacatgatagcagtccctttaagccaagtaatttctttttgtgttgtataggctcacaacctcaaaacatycaagcagaaacattttttggttgattaatatttac

SEQ ID NO: 70315 - DNA, 600 bp, Chicken  19866894343600_2
ctgtgcttgctgtgttattctgctccttgtatttgagctttctcagaatgtctttaggctgcagtattcatatatcccaatttctcagcttcatagaagtgaaggcaccattacagttttgaagcatcaagtatcccttggaagggtctttttctggcagcagtatattttacagtgactggatcaggaaaagatggcarttggtgaagagctgatgtgggagatggggaatgccacaagggcatggatttctctgtagcagcactggtgaaacagagtgcaagtgcaccagtgttgtakgtgcagccagatccaaccaagccaaatgtgaaactttagtyttgctctgttaaatcttgtcaatgtacaagaaaggtggaaaaagataagtcagacatgatagcagtccctttaagccaagtaatttctttttgtgttgtataggctcacaacctcaaaacatycaagcagaaacattttttggttgattaatatttacagctttaacagctgttttactctcagaatgattactattctccccgattgtcagtggcttgctcataatgcaaaatgctcaaacagacccgtaattattga

SEQ ID NO: 70316 - DNA, 600 bp, Chicken  19866894343600_3
ctcagaatgtctttaggctgcagtattcatatatcccaatttctcagcttcatagaagtgaaggcaccattacagttttgaagcatcaagtatcccttggaagggtctttttctggcagcagtatattttacagtgactggatcaggaaaagatggcarttggtgaagagctgatgtgggagatggggaatgccacaagggcatggatttctctgtagcagcactggtgaaacagagtgcaagtgcaccagtgttgtakgtgcagccagatccaaccaagccaaatgtgaaactttagtyttgctctgttaaatcttgtcaatgtacaagaaaggtggaaaaagataagtcagacatgatagcagtccctttaagccaagtaatttctttttgtgttgtataggctcacaacctcaaaacatycaagcagaaacattttttggttgattaatatttacagctttaacagctgttttactctcagaatgattactattctccccgattgtcagtggcttgctcataatgcaaaatgctcaaacagacccgtaattattgaacagatatcttcagaattgccatgaaaggctgtggaaacat

SEQ ID NO: 70317 - DNA, 589 bp, Chicken  19866894343600_4
atattttacagtgactggatcaggaaaagatggcarttggtgaagagctgatgtgggagatggggaatgccacaagggcatggatttctctgtagcagcactggtgaaacagagtgcaagtgcaccagtgttgtakgtgcagccagatccaaccaagccaaatgtgaaactttagtyttgctctgttaaatcttgtcaatgtacaagaaaggtggaaaaagataagtcagacatgatagcagtccctttaagccaagtaatttctttttgtgttgtataggctcacaacctcaaaacatycaagcagaaacattttttggttgattaatatttacagctttaacagctgttttactctcagaatgattactattctccccgattgtcagtggcttgctcataatgcaaaatgctcaaacagacccgtaattattgaacagatatcttcagaattgccatgaaaggctgtggaaacatcagaagagtgctttctagaagtccatgttctttgttgaccaaatcactctctgtgcgttaggattcttccttcattgcatagtctttgaaattgccaactaccttagtttaa

SEQ ID NO: 70318 - DNA, 600 bp, Chicken  19866894343609_1
atttatcttgtcattctggagcatggagtggtggcgatgttaagatggctctgcataaattcacacgtaggccatttcctttgattttggaattttttcaagccgaatggcacagcccagtgtgtaacttaacccctctgccccactgcgtgggctctccccgaggggctgcgggagcacagtggtctcagctctgctgtgggtgggacggaggcggtgggactgacgcgatgaaatgcgaatcttctgtgcacactcaatgtgtattttgagtcatgtagcagaaaatgctcatcttasttcagtgcagacatgaatggtatttgtcataagcaatgacatttgtaactgaattaacaaacagggaagggaacggtcctgctgagctgggaaaaaagctccattcctggtggttttgttccttctctctcctgcatctgtcctgctcacagccactgccctgacagtttcttttgctgaagcaaatggcgggtaggtccaaaattaccccggtacaagggggcctgctttggaatcaatgctaggaactygactccagtgccagggctcccctcaagctgctgcctttgcagtgcagat

SEQ ID NO: 70319 - DNA, 600 bp, Chicken  19866894343609_2
cacactcaatgtgtattttgagtcatgtagcagaaaatgctcatcttasttcagtgcagacatgaatggtatttgtcataagcaatgacatttgtaactgaattaacaaacagggaagggaacggtcctgctgagctgggaaaaaagctccattcctggtggttttgttccttctctctcctgcatctgtcctgctcacagccactgccctgacagtttcttttgctgaagcaaatggcgggtaggtccaaaattaccccggtacaagggggcctgctttggaatcaatgctaggaactygactccagtgccagggctcccctcaagctgctgcctttgcagtgcagatgcccttgttgtcagggccagacctgagagctctctgcttcctgggtgctggagtgcccgctttygggctgaggggcagcaccacagcgaggtgggggcagagatgggcagggggttccctcragtgtgctgtggctttaaggcctgtactgaaactccagcatctcatcttcccattattaaaatttcagcaaaatataaagttttcattaatctcctgcagcaaatttagtactctgaactggcagttgg

SEQ ID NO: 70320 - DNA, 600 bp, Chicken  19866894343609_3
ggaagggaacggtcctgctgagctgggaaaaaagctccattcctggtggttttgttccttctctctcctgcatctgtcctgctcacagccactgccctgacagtttcttttgctgaagcaaatggcgggtaggtccaaaattaccccggtacaagggggcctgctttggaatcaatgctaggaactygactccagtgccagggctcccctcaagctgctgcctttgcagtgcagatgcccttgttgtcagggccagacctgagagctctctgcttcctgggtgctggagtgcccgctttygggctgaggggcagcaccacagcgaggtgggggcagagatgggcagggggttccctcragtgtgctgtggctttaaggcctgtactgaaactccagcatctcatcttcccattattaaaatttcagcaaaatataaagttttcattaatctcctgcagcaaatttagtactctgaactggcagttggttcagcttttaggactgcattagctggtatattgaacaaaacgtgtcattcttcagtatctacttgaagaagctaaatcagttttcagatatatttataccgcttttatctaa

SEQ ID NO: 70321 - DNA, 600 bp, Chicken  19866894343609_4
ttctctctcctgcatctgtcctgctcacagccactgccctgacagtttcttttgctgaagcaaatggcgggtaggtccaaaattaccccggtacaagggggcctgctttggaatcaatgctaggaactygactccagtgccagggctcccctcaagctgctgcctttgcagtgcagatgcccttgttgtcagggccagacctgagagctctctgcttcctgggtgctggagtgcccgctttygggctgaggggcagcaccacagcgaggtgggggcagagatgggcagggggttccctcragtgtgctgtggctttaaggcctgtactgaaactccagcatctcatcttcccattattaaaatttcagcaaaatataaagttttcattaatctcctgcagcaaatttagtactctgaactggcagttggttcagcttttaggactgcattagctggtatattgaacaaaacgtgtcattcttcagtatctacttgaagaagctaaatcagttttcagatatatttataccgcttttatctaacagcactggaatgatcatttagagctgagatgctttattagcagctggcatagaaatt

SEQ ID NO: 70322 - DNA, 578 bp, Chicken  19866894343609_5
ttggcttaacgagatgttaccttttataaagccatacctgcagcagtaacaagaatactaattgacagtaagctgctgcaccgtgagctgagctgggggcagaggcggtgccggcagtgcagaggccgcgttgcaccgcaccgtgctgtgctgtgctgtgctgcagccgggagagccgtgcaggtgtgggcacccacggccgtggctgacacgggcccgggcagtgagtgtgctggggctgagctcagccgctgcttccccacgtgctgtgctggagatcccgtgtggcagcgccgtggygtcccatgccccgcgaggggctgacgttgggacattgcaccgctctgcattgggatgtgaacttctgctgcaacgtctgcgatgagccggtggccatgtctgtgggtggagcgtgagagtgtcctcccactgccgtgggccctgagcactttctcctttcctaaaaggatttggcagtccctcggtttagacgtcagtgcaggtgcccccgtacagccgcgtgctgccggtttgtgtgcctcctgtaacctcttgttcattgctgtgggcttgttttg

SEQ ID NO: 70323 - DNA, 600 bp, Chicken  19866894343617_1
gttttactcgtaaagctcaataatcatatcttatctgccaagaacagcttttcaaagcaaataactcatacttcgataggaaagtttcctaagtaaacatttctataaactactgagttcatgacattggttttaagtaagggaaaggttatctgcagaggagacattcgccttgcaaataccctatgaagcactaggattttactcatgaaaacagagcaatatatccctgtttagatattgctgaacctgataatgagtgctctgcacattgtggaaaaaacaacactggtgtgtaartgtaccaaattaggatgctcacctactctccttctctttggagtagygtagtctttaacttcaagacttgtaagcaggtgtgaactattctagcctatgctgaaataagctaaggagaaaggaaggaaggggaaatatgtagtaattcagattccctttagctcagcacaagaagaaatcttcacaacttcacgaagaatgtgttggcacactcattactgtgagtcacaattcacatcttaagatagaataagaagtaggactttttgtcaacactcaactaacatccataagcaacta

SEQ ID NO: 70324 - DNA, 600 bp, Chicken  19866894343617_2
cttttcaaagcaaataactcatacttcgataggaaagtttcctaagtaaacatttctataaactactgagttcatgacattggttttaagtaagggaaaggttatctgcagaggagacattcgccttgcaaataccctatgaagcactaggattttactcatgaaaacagagcaatatatccctgtttagatattgctgaacctgataatgagtgctctgcacattgtggaaaaaacaacactggtgtgtaartgtaccaaattaggatgctcacctactctccttctctttggagtagygtagtctttaacttcaagacttgtaagcaggtgtgaactattctagcctatgctgaaataagctaaggagaaaggaaggaaggggaaatatgtagtaattcagattccctttagctcagcacaagaagaaatcttcacaacttcacgaagaatgtgttggcacactcattactgtgagtcacaattcacatcttaagatagaataagaagtaggactttttgtcaacactcaactaacatccataagcaactatayagaacaacatgagcattttaaaattwttattttgtatacagagc

SEQ ID NO: 70325 - DNA, 600 bp, Chicken  19866894343617_3
accaaattaggatgctcacctactctccttctctttggagtagygtagtctttaacttcaagacttgtaagcaggtgtgaactattctagcctatgctgaaataagctaaggagaaaggaaggaaggggaaatatgtagtaattcagattccctttagctcagcacaagaagaaatcttcacaacttcacgaagaatgtgttggcacactcattactgtgagtcacaattcacatcttaagatagaataagaagtaggactttttgtcaacactcaactaacatccataagcaactatayagaacaacatgagcattttaaaattwttattttgtatacagagcaataataaaataattaatttatatgtgcagtaaaactctttaggatggacaggactgaagtcatggtagacagaactgtgtggatccttatcagctcagcatctagcattctgtgacatatagcaattgacaccagtcattatctcttgcttttgttgttttcatcagcgttttccacaagtagttcrgaaaaggggatgtacttgtgccaaaatatctaatcctactgtgtgtttttagcaacagccgtagagga

SEQ ID NO: 70326 - DNA, 592 bp, Chicken  19866894343617_4
ccttctctttggagtagygtagtctttaacttcaagacttgtaagcaggtgtgaactattctagcctatgctgaaataagctaaggagaaaggaaggaaggggaaatatgtagtaattcagattccctttagctcagcacaagaagaaatcttcacaacttcacgaagaatgtgttggcacactcattactgtgagtcacaattcacatcttaagatagaataagaagtaggactttttgtcaacactcaactaacatccataagcaactatayagaacaacatgagcattttaaaattwttattttgtatacagagcaataataaaataattaatttatatgtgcagtaaaactctttaggatggacaggactgaagtcatggtagacagaactgtgtggatccttatcagctcagcatctagcattctgtgacatatagcaattgacaccagtcattatctcttgcttttgttgttttcatcagcgttttccacaagtagttcrgaaaaggggatgtacttgtgccaaaatatctaatcctactgtgtgtttttagcaacagccgtagaggattgcagtaggctttacca

SEQ ID NO: 70327 - DNA, 386 bp, Chicken  19866894343617_5
catcttaagatagaataagaagtaggactttttgtcaacactcaactaacatccataagcaactatayagaacaacatgagcattttaaaattwttattttgtatacagagcaataataaaataattaatttatatgtgcagtaaaactctttaggatggacaggactgaagtcatggtagacagaactgtgtggatccttatcagctcagcatctagcattctgtgacatatagcaattgacaccagtcattatctcttgcttttgttgttttcatcagcgttttccacaagtagttcrgaaaaggggatgtacttgtgccaaaatatctaatcctactgtgtgtttttagcaacagccgtagaggattgcagtaggctttacca

SEQ ID NO: 70328 - DNA, 600 bp, Chicken  19866894343635_1
cccagttccctcaacctttctccatagaagaggtgctctggccctctgaccatcttagtggccctcctctggacccactccaagagctccttcatgtactgggggccccaggcctgtacacagaacttcagatggggcctcacaagaactgagtagaggggggacaatcacctccctctccctgctggccactcctcttgtaaggcagcccagaacatagttggccttcgacactgcaagctcagactgctggctcgtgtccaacttctcatctaccaggctttttcagaaatggaaacrcaaagcaagcatatggaattggatttgaactggtctgtaaatatgttgaatagttaaatgaagtctatggaagggagaaatttatttgccactgccgatcttgactgggaccactgyagtctcactataggtgcttcagccaggagcctaaaggttaatggagtgaatctggtggaaataggctaaatgattgttsttattgcccttcatgcctcatccttccacagtagatgtttgattgtaaccactaccacaaacatggtataatgtgatctgagcttctttcaattcccattgtct

SEQ ID NO: 70329 - DNA, 600 bp, Chicken  19866894343635_2
acacagaacttcagatggggcctcacaagaactgagtagaggggggacaatcacctccctctccctgctggccactcctcttgtaaggcagcccagaacatagttggccttcgacactgcaagctcagactgctggctcgtgtccaacttctcatctaccaggctttttcagaaatggaaacrcaaagcaagcatatggaattggatttgaactggtctgtaaatatgttgaatagttaaatgaagtctatggaagggagaaatttatttgccactgccgatcttgactgggaccactgyagtctcactataggtgcttcagccaggagcctaaaggttaatggagtgaatctggtggaaataggctaaatgattgttsttattgcccttcatgcctcatccttccacagtagatgtttgattgtaaccactaccacaaacatggtataatgtgatctgagcttctttcaattcccattgtctgcagtatagaagaaaaggcatgaatttcctcacaaaacacgaaagtgtgaaaagattgtgaagaagatgaatgataaaaccttgagaaagacacacatcttggtttggcattcttta

SEQ ID NO: 70330 - DNA, 600 bp, Chicken  19866894343635_3
cttgtaaggcagcccagaacatagttggccttcgacactgcaagctcagactgctggctcgtgtccaacttctcatctaccaggctttttcagaaatggaaacrcaaagcaagcatatggaattggatttgaactggtctgtaaatatgttgaatagttaaatgaagtctatggaagggagaaatttatttgccactgccgatcttgactgggaccactgyagtctcactataggtgcttcagccaggagcctaaaggttaatggagtgaatctggtggaaataggctaaatgattgttsttattgcccttcatgcctcatccttccacagtagatgtttgattgtaaccactaccacaaacatggtataatgtgatctgagcttctttcaattcccattgtctgcagtatagaagaaaaggcatgaatttcctcacaaaacacgaaagtgtgaaaagattgtgaagaagatgaatgataaaaccttgagaaagacacacatcttggtttggcattctttatattatagtctattttggtattattgtagttggacccatacaacagtgagttagaattctgtaaaagtttgctttcttg

SEQ ID NO: 70331 - DNA, 600 bp, Chicken  19866894343635_4
cattgtctgcagtatagaagaaaaggcatgaatttcctcacaaaacacgaaagtgtgaaaagattgtgaagaagatgaatgataaaaccttgagaaagacacacatcttggtttggcattctttatattatagtctattttggtattattgtagttggacccatacaacagtgagttagaattctgtaaaagtttgctttcttgctgtgttattacactgtagggcagagagatatatttatttgtatttgcaattatggatctttatgacataagtggtgccattaaaagatcgtaaaygtaattggatttattaacagaatgcttcgtggcataaaaagaatagaagttttgcatctttaaaggctggctacaatttccttcctcttcagtgaagttactgggaaaaaaaaaaatagcctgacaggcatcagaactggaagggatgtgaaggaagtcttgtggtccattcctctgccccaggccaggaccagtgctgcccaagccaggctgcggatgtttgccctctggtgcgcaaaggcttccaatgatggaggctccgcaagctcttcaggaaagctgtgacagtgcttgctgttc

SEQ ID NO: 70332 - DNA, 600 bp, Chicken  19866894343639_1
gccatcttcaacttttgttttatatggaaaaaaatgcttttaaaattctagatttagaagtttttacagagcttaataaaaactcacttttggggcaaagcacagttgacagctgtactggtactgatggtttctatttaaaaacacgttcctttcagatgctgcatcttgcagctgctgagagtcctctgtcttgcttcctctgtgtttctcttgccatcttccaggcaacagagagaggagccaagtgccttcaacagcaccaacggagagaagctgcttttcctttctctatccctmaactcagctcttcstatcaatgtgggaaagatatagacaagcaccagagataggacagagactatttgttattctgaagctgcgtcttctcttgagcagtaaggtccaatagaaacagtaacaatggtactatgggactcctgctaaaggggtacgcctgtgtgtgtccaaacagattattttctaatgcctgccacgaggccttcatgatccattggctttggactgacactgaaaggacaggtaggcaacagccaaccaataaccacagtaagatgtactcttctgggggaataacgg

SEQ ID NO: 70333 - DNA, 595 bp, Chicken  19866894343639_2
ttgttttatatggaaaaaaatgcttttaaaattctagatttagaagtttttacagagcttaataaaaactcacttttggggcaaagcacagttgacagctgtactggtactgatggtttctatttaaaaacacgttcctttcagatgctgcatcttgcagctgctgagagtcctctgtcttgcttcctctgtgtttctcttgccatcttccaggcaacagagagaggagccaagtgccttcaacagcaccaacggagagaagctgcttttcctttctctatccctmaactcagctcttcstatcaatgtgggaaagatatagacaagcaccagagataggacagagactatttgttattctgaagctgcgtcttctcttgagcagtaaggtccaatagaaacagtaacaatggtactatgggactcctgctaaaggggtacgcctgtgtgtgtccaaacagattattttctaatgcctgccacgaggccttcatgatccattggctttggactgacactgaaaggacaggtaggcaacagccaaccaataaccacagtaagatgtactcttctgggggaataacggagggaaaaa

SEQ ID NO: 70334 - DNA, 599 bp, Chicken  19866894343640_1
  misc_feature (1)..(37): n is any nucleotide
nnnnnnnnnnnnnnnnnnnnnnnnnnnnnnnnnnnnnaaatagtaatattgtattagtgtagatttgtatgcatccatgccaattctcccaaaattgtaatgtgaatattaatgctcacaaacatttttctgttcgtcattctgtgaagactccctacaatgaagtgttctgaactgcgtgtgagaagaatgacaaaatgagaaggaagctttgattacatgattggtcttgcttactgtaagaatatccagctgggccatgtccttaagtgttcactgtggaatgaaagtcagtcacaytcaggatatacatatgaaatcatatacatctgtgtcaatttccccatttcattgtgcttactgatttgatttgaggaaataacatgcatctgatttgcacaggatgtctttatttggtttgtgtgccagccraaygtaggttcataactgaaattgttcacagtgaaagaatgcatggacatctagcatagaatccctgtaagaacaaactgaagctgatgacttggtcatgctcttttttcttctcagttcgctttcctgaggatttggaggatgacaacacaacatttaacccagag

SEQ ID NO: 70335 - DNA, 600 bp, Chicken  19866894343640_2
ttcgtcattctgtgaagactccctacaatgaagtgttctgaactgcgtgtgagaagaatgacaaaatgagaaggaagctttgattacatgattggtcttgcttactgtaagaatatccagctgggccatgtccttaagtgttcactgtggaatgaaagtcagtcacaytcaggatatacatatgaaatcatatacatctgtgtcaatttccccatttcattgtgcttactgatttgatttgaggaaataacatgcatctgatttgcacaggatgtctttatttggtttgtgtgccagccraaygtaggttcataactgaaattgttcacagtgaaagaatgcatggacatctagcatagaatccctgtaagaacaaactgaagctgatgacttggtcatgctcttttttcttctcagttcgctttcctgaggatttggaggatgacaacacaacatttaacccagagtatagccatcaagtgtttggtgatgagtaagttaaattattcagagtcaaatkaataggtcttgaagggaatgttgtttcctaattgctctttaaaaaacaacagtaataaaaataatgctaccaaagtattg

SEQ ID NO: 70336 - DNA, 600 bp, Chicken  19866894343640_3
gtcattctgtgaagactccctacaatgaagtgttctgaactgcgtgtgagaagaatgacaaaatgagaaggaagctttgattacatgattggtcttgcttactgtaagaatatccagctgggccatgtccttaagtgttcactgtggaatgaaagtcagtcacaytcaggatatacatatgaaatcatatacatctgtgtcaatttccccatttcattgtgcttactgatttgatttgaggaaataacatgcatctgatttgcacaggatgtctttatttggtttgtgtgccagccraaygtaggttcataactgaaattgttcacagtgaaagaatgcatggacatctagcatagaatccctgtaagaacaaactgaagctgatgacttggtcatgctcttttttcttctcagttcgctttcctgaggatttggaggatgacaacacaacatttaacccagagtatagccatcaagtgtttggtgatgagtaagttaaattattcagagtcaaatkaataggtcttgaagggaatgttgtttcctaattgctctttaaaaaacaacagtaataaaaataatgctaccaaagtattgtaa

SEQ ID NO: 70337 - DNA, 600 bp, Chicken  19866894343640_4
tgtgcttactgatttgatttgaggaaataacatgcatctgatttgcacaggatgtctttatttggtttgtgtgccagccraaygtaggttcataactgaaattgttcacagtgaaagaatgcatggacatctagcatagaatccctgtaagaacaaactgaagctgatgacttggtcatgctcttttttcttctcagttcgctttcctgaggatttggaggatgacaacacaacatttaacccagagtatagccatcaagtgtttggtgatgagtaagttaaattattcagagtcaaatkaataggtcttgaagggaatgttgtttcctaattgctctttaaaaaacaacagtaataaaaataatgctaccaaagtattgtaaagtgacaaagcaatacttcagttttatgactgtgtagttaaataatggctttgaatcctagcctctggagttgaggccttgtagtcattttacatggtattttaaagatactagcagagaacaaaatgcccggattgtacagtcagaattgctcatttcagctgctattgtgttcaagtcatccttataaggtttgtaagaattaatagttctttat

SEQ ID NO: 70338 - DNA, 599 bp, Chicken  19866894343648_1
  misc_feature (1)..(72): n is any nucleotide
nnnnnnnnnnnnnnnnnnnnnnnnnnnnnnnnnnnnnnnnnnnnnnnnnnnnnnnnnnnnnnnnnnnnnnnntattttcttttcaattgtaaaatatggaattaataaatatcttccaaatgttctgtagtcatttatataatgagtgaagttcagttatgcaagtaatagagaaatgttgctgcatgcttgttaggactgctatggaaaagcagtctattgaatggtatgtagtaggtacaaggagaagaatcaagtccccttcctaatagtgagcatcctctcttctgctctctgctycctttctgccataactrttgccccagctccccatgtacggtaacagagccctcatttgtcctgtttgatttcctttgatgcacccactctttttccatataaattttatatgcaaccataatcttaaattgctgggagtataaataaattatattcagaagaggtagttaaaaaacactttacaaattttaaaagccattctttaaatagaaaataatagagytcttctgttgttaggtggaagaggcaytctaataaattaaagtgaggccaactgataatatcaggaaacagctact

SEQ ID NO: 70339 - DNA, 599 bp, Chicken  19866894343648_2
  misc_feature (1)..(55): n is any nucleotide
nnnnnnnnnnnnnnnnnnnnnnnnnnnnnnnnnnnnnnnnnnnnnnnnnnnnnnntattttcttttcaattgtaaaatatggaattaataaatatcttccaaatgttctgtagtcatttatataatgagtgaagttcagttatgcaagtaatagagaaatgttgctgcatgcttgttaggactgctatggaaaagcagtctattgaatggtatgtagtaggtacaaggagaagaatcaagtccccttcctaatagtgagcatcctctcttctgctctctgctycctttctgccataactrttgccccagctccccatgtacggtaacagagccctcatttgtcctgtttgatttcctttgatgcacccactctttttccatataaattttatatgcaaccataatcttaaattgctgggagtataaataaattatattcagaagaggtagttaaaaaacactttacaaattttaaaagccattctttaaatagaaaataatagagytcttctgttgttaggtggaagaggcaytctaataaattaaagtgaggccaactgataatatcaggaaacagctacttacatacagtgctgatg

SEQ ID NO: 70340 - DNA, 600 bp, Chicken  19866894343648_3
atggtatgtagtaggtacaaggagaagaatcaagtccccttcctaatagtgagcatcctctcttctgctctctgctycctttctgccataactrttgccccagctccccatgtacggtaacagagccctcatttgtcctgtttgatttcctttgatgcacccactctttttccatataaattttatatgcaaccataatcttaaattgctgggagtataaataaattatattcagaagaggtagttaaaaaacactttacaaattttaaaagccattctttaaatagaaaataatagagytcttctgttgttaggtggaagaggcaytctaataaattaaagtgaggccaactgataatatcaggaaacagctacttacatacagtgctgatgaatacataaagcaaagaggaagagtttttcctctctaatcttccacatggctgttaggtgtttgtgctctaggtataagggagattgttttacaattgtttgcacaaattattttgactcataatatttgtaaaatactttttttttgttttcagatctgttgtattttacacagacaaaagggaagtactatagccaaattatttg

SEQ ID NO: 70341 - DNA, 600 bp, Chicken  19866894343648_4
aatcaagtccccttcctaatagtgagcatcctctcttctgctctctgctycctttctgccataactrttgccccagctccccatgtacggtaacagagccctcatttgtcctgtttgatttcctttgatgcacccactctttttccatataaattttatatgcaaccataatcttaaattgctgggagtataaataaattatattcagaagaggtagttaaaaaacactttacaaattttaaaagccattctttaaatagaaaataatagagytcttctgttgttaggtggaagaggcaytctaataaattaaagtgaggccaactgataatatcaggaaacagctacttacatacagtgctgatgaatacataaagcaaagaggaagagtttttcctctctaatcttccacatggctgttaggtgtttgtgctctaggtataagggagattgttttacaattgtttgcacaaattattttgactcataatatttgtaaaatactttttttttgttttcagatctgttgtattttacacagacaaaagggaagtactatagccaaattatttgtacgttcacagttaatttttgcttaca

SEQ ID NO: 70342 - DNA, 600 bp, Chicken  19866894343653_1
gtggagtattgcaggaagagattaggcacttagttgtgctctcctaatctgaatagttctctgaaagtctaattttaacgtgtgtgctcctgcaccaaatttgttgttctccactggcagtcagttttgaaagtgtctgtaatgcgtatgcaggatggtgagggggagtcatcttaacctctgccaagaggaaaacacaacagttgggagaggcacaacatagcaataaatattttattgacatgttccaaacatattggttgtaaatgtacacagtatctgagattcgttaggtttccytgtgaattgttcctgtgaagcctggctcgctaattggctgcagggcgatgagcgttggtggtgctgtgccagcacccgggggctggggctgtgactctggrggcatctcatgttgcccagcccctcggggagacctgaaggcagaattgtgctgctgcgattcgcgagtcagggtgtttatccgcagagcaaagagtgggaaaaatttgattaaatctgcaatttggtgtgagtattgcaggtaaatggaatcttacagaaatgtgtcctcctgacttttatcagcatgcttgtaatttg

SEQ ID NO: 70343 - DNA, 600 bp, Chicken  19866894343653_2
tgttgttctccactggcagtcagttttgaaagtgtctgtaatgcgtatgcaggatggtgagggggagtcatcttaacctctgccaagaggaaaacacaacagttgggagaggcacaacatagcaataaatattttattgacatgttccaaacatattggttgtaaatgtacacagtatctgagattcgttaggtttccytgtgaattgttcctgtgaagcctggctcgctaattggctgcagggcgatgagcgttggtggtgctgtgccagcacccgggggctggggctgtgactctggrggcatctcatgttgcccagcccctcggggagacctgaaggcagaattgtgctgctgcgattcgcgagtcagggtgtttatccgcagagcaaagagtgggaaaaatttgattaaatctgcaatttggtgtgagtattgcaggtaaatggaatcttacagaaatgtgtcctcctgacttttatcagcatgcttgtaatttgaaggttttccattagatgtgcaataaaagttgtgttctgaagatgtgccctacttcctgtgcttgctttccagttgatgatcactaaaaagaaaaagtaca

SEQ ID NO: 70344 - DNA, 600 bp, Chicken  19866894343654_1
caagaactgacttcccgttcagcttcactagaaatcccccccacatggtgatgaatctaaattgccagcggcatttggagacctgttagccagttgttaatacattacaagtatgtcatgttgattgtgtgtcactttattttctaatccaaatgtcagccagaactaagtcaaaagcaataacggactatatcacattgacactattatttttatcaacagatatcaaattattttgacaaaatctatttttcatgatttgtttgaatagaaattgattatattatggtcctatcacartttaagaatttgaaccctcagtcgtatcacatttttttctgaggaagctattagagcagacatataaaacagacatatagaagttaaggtcattgtctcgggtaggatagaataaatgacagcccacattgaatctgtataatgaagtccacttaagaatctctgagatcagaccttttgttctgcttggttatctcagataggcattcacttgctcccacacaagtccactaagtattaacttactatccaatcagaggcatacattcctcttggtctgtggttgtcagacagaaagtc

SEQ ID NO: 70345 - DNA, 600 bp, Chicken  19866894343661_1
cttggataaatttaggttgcctcagacacaagagcattttttgaactatgtcgacagcatacagtggacactcccctacctgcactggtttttaatcccgagactctccctgcagaaggtatgcacagattatttatgaactccaaaagtttgaggacgaataccatttgatagcgcacacacataaaaaaaagccttcagacgtcatgtatgacacagaggtgttattagtaccacagcacagcacagggaagcaactgaaacaaaggtaatagcaagacgcatcagagcacttccagyttcctgctgtgcgtatttatcacaaacgaggtgtcccatttcagacttggacgctgttcttcttgaaatacaatgactttcctgacctctcacagatgtcggccagtttctatagcaatcagttttatttccttscagagttaagtaaagttagttaagcaaatctgaaactgtttgatattggatttaagctaatcttttaataagcaaagcagcctggttctcaagcctgttctccagcatataagaatgatctctttttttctttgcccgcatttaatcgtgtctggtttattgcaa

SEQ ID NO: 70346 - DNA, 600 bp, Chicken  19866894343661_2
atgaactccaaaagtttgaggacgaataccatttgatagcgcacacacataaaaaaaagccttcagacgtcatgtatgacacagaggtgttattagtaccacagcacagcacagggaagcaactgaaacaaaggtaatagcaagacgcatcagagcacttccagyttcctgctgtgcgtatttatcacaaacgaggtgtcccatttcagacttggacgctgttcttcttgaaatacaatgactttcctgacctctcacagatgtcggccagtttctatagcaatcagttttatttccttscagagttaagtaaagttagttaagcaaatctgaaactgtttgatattggatttaagctaatcttttaataagcaaagcagcctggttctcaagcctgttctccagcatataagaatgatctctttttttctttgcccgcatttaatcgtgtctggtttattgcaatgcatcttggaggtccatgagtaggaccagtatttccattaaaactaattctaaattcatctgccaggacttaaaaaccaaagaaaaccatacacatacttcatttataatgagatcactacattggaagatgca

SEQ ID NO: 70347 - DNA, 600 bp, Chicken  19866894343686_1
cacgtagtggaattgattgcctggggtcagtgtagagtcttcatcactgtctgacctgttcttgagagcctcccaacaatcattttggtacaaatgcatctgctctggggcttggagcaggctaaataacctcctaagattcattccactctttttattttcttaatactttcttgtgtttgttttaattctttaaaaccagtctgtgaaagctctatgtacagcagccagcatttattcaaaagaatacctgaatgccattcatgccaaaaagcaagcatacaacgccacaatttatgyattttgctgaattaaagcctataggtatcaaagacaccataaatggcattgaaatgctttgaataccagtgccacagaaatgactactgatgcctggagaactggaaatcctctgtttttgatattgaccagaagatctatccctgagtttgctaccacctggcctgcttttaatattaccatttgcacgagatgtttgagtggctgtggcagtgtgtaactgatatgattgaggatgacagttgccagagggacaggctgctgcacaaggaagccaagaatctcaaactcaatacgctc

SEQ ID NO: 70348 - DNA, 600 bp, Chicken  19866894343686_2
aggttttgttcgttcatttacactccaactgaaatgcattaaatgtttctttgggtgttcctacccctcttggtcttagtgaatgacagtcaccataaaatacagcctaactgcctttccaaaagtgaaattgttgcctggtttctttacagaagcaatgctgggggaaaaatagctatctgatgggacttcaatgctgaaagtgcattgcaaatgtggttatcttgtgtaaatcagacctgtgagggagggtaaaacctttataagaagttgcacacaaaacagttattctgcattacrtccaggacttaagcatgatgccagcatgctgaggtttgcaaaaatggttaggacagctactttcttctctgagactccacaggcacaagtcttttgaaagtcagaccccacggagcttggaatccccaaactggatattggcaaagtcattcttctgccgtgaagagtgaagaaacaaggagagatgtatgctttcacacagccttgagacaacatggcagaaacatcttcacgcattctacacgtattcaactgcatacatcattatgcaacattatgcgtatgcagacaagacttctg

SEQ ID NO: 70349 - DNA, 600 bp, Chicken  19866894343696_1
gcatgctgttatttgcataaaatgactatattctaagagaagatttccattcatttaagcaaagttaacagtattttctgtttctctgactacatttacattttgcttactgctttattgacactatacaaaggctgtttttgatttagaattcctcacaacatcttctcttagaccttaaactcaaagtcaaaattcagaatgcacgtcagtatgaaaagttaaagctattcttttcagtctatgctgatttacattactttatgaataattcaattgctattttgctgaacatctgaytggctttcttaartctccttttgcagttcttcacaagcttctcctgttttgatgtcagraataatttwatgtgatctgaaagttttggcagtagctagcaacagtcatagctttactaaaacattttaatttctgtgtgcaaatagaaacaaattttacaaagaaaatgatctctttttatcttacaaccgatacaaattgttttctaggcctttcagatcaaatataaatatgctaagccgttggagtatatctcttacgttggtgttggattgtccattgctggtctcaccattacta

SEQ ID NO: 70350 - DNA, 600 bp, Chicken  19866894343696_2
tgcataaaatgactatattctaagagaagatttccattcatttaagcaaagttaacagtattttctgtttctctgactacatttacattttgcttactgctttattgacactatacaaaggctgtttttgatttagaattcctcacaacatcttctcttagaccttaaactcaaagtcaaaattcagaatgcacgtcagtatgaaaagttaaagctattcttttcagtctatgctgatttacattactttatgaataattcaattgctattttgctgaacatctgaytggctttcttaartctccttttgcagttcttcacaagcttctcctgttttgatgtcagraataatttwatgtgatctgaaagttttggcagtagctagcaacagtcatagctttactaaaacattttaatttctgtgtgcaaatagaaacaaattttacaaagaaaatgatctctttttatcttacaaccgatacaaattgttttctaggcctttcagatcaaatataaatatgctaagccgttggagtatatctcttacgttggtgttggattgtccattgctggtctcaccattactattttgtttcaaat

SEQ ID NO: 70351 - DNA, 600 bp, Chicken  19866894343696_3
caaagttaacagtattttctgtttctctgactacatttacattttgcttactgctttattgacactatacaaaggctgtttttgatttagaattcctcacaacatcttctcttagaccttaaactcaaagtcaaaattcagaatgcacgtcagtatgaaaagttaaagctattcttttcagtctatgctgatttacattactttatgaataattcaattgctattttgctgaacatctgaytggctttcttaartctccttttgcagttcttcacaagcttctcctgttttgatgtcagraataatttwatgtgatctgaaagttttggcagtagctagcaacagtcatagctttactaaaacattttaatttctgtgtgcaaatagaaacaaattttacaaagaaaatgatctctttttatcttacaaccgatacaaattgttttctaggcctttcagatcaaatataaatatgctaagccgttggagtatatctcttacgttggtgttggattgtccattgctggtctcaccattactattttgtttcaaatattcactaggtaagatgtaaaactgtattttgtgctaagctacaat

SEQ ID NO: 70352 - DNA, 600 bp, Chicken  19866894343696_4
cagtattttctgtttctctgactacatttacattttgcttactgctttattgacactatacaaaggctgtttttgatttagaattcctcacaacatcttctcttagaccttaaactcaaagtcaaaattcagaatgcacgtcagtatgaaaagttaaagctattcttttcagtctatgctgatttacattactttatgaataattcaattgctattttgctgaacatctgaytggctttcttaartctccttttgcagttcttcacaagcttctcctgttttgatgtcagraataatttwatgtgatctgaaagttttggcagtagctagcaacagtcatagctttactaaaacattttaatttctgtgtgcaaatagaaacaaattttacaaagaaaatgatctctttttatcttacaaccgatacaaattgttttctaggcctttcagatcaaatataaatatgctaagccgttggagtatatctcttacgttggtgttggattgtccattgctggtctcaccattactattttgtttcaaatattcactaggtaagatgtaaaactgtattttgtgctaagctacaatattttgctc

SEQ ID NO: 70353 - DNA, 600 bp, Chicken  19866894343699_1
ctgcaagaccacatcccatgatttcagtagagatcacctgtgcccatctctgggctggatgtgatgataagggcttacagggtgataagaattacggtgtaaggccattacgctaacaagcaaatccactgcttggtgacaaggagacacgataggagcacacatttgcattgaggtgacagagccacgggctggaggctgggggcactgggctgtgcctgaccttttggggctggacatcaatttgaggggatcccacagtaaatcccgtggccattactccatgctttggagcagcascagatccccacccgaaaacactggggccaacctgctgtctgtgtgggagatctccagatcggtgtttaattatggccatctgctgctccaggcttcagatgcacctcagtgcgtttggtctctgctcaaatcagccccattgggttttcctcgatgctggttttcttgcccraggctcccattctcatctgatatggggcagttctttgttccccagctcccagcactcatttgtattcagcattaggctttacgagcgcttcccttttttaattgtgctcattatctcctaatagcctc

SEQ ID NO: 70354 - DNA, 600 bp, Chicken  19866894343699_2
gaggtgacagagccacgggctggaggctgggggcactgggctgtgcctgaccttttggggctggacatcaatttgaggggatcccacagtaaatcccgtggccattactccatgctttggagcagcascagatccccacccgaaaacactggggccaacctgctgtctgtgtgggagatctccagatcggtgtttaattatggccatctgctgctccaggcttcagatgcacctcagtgcgtttggtctctgctcaaatcagccccattgggttttcctcgatgctggttttcttgcccraggctcccattctcatctgatatggggcagttctttgttccccagctcccagcactcatttgtattcagcattaggctttacgagcgcttcccttttttaattgtgctcattatctcctaatagcctcaatgctatggggttgtgggtggggtttttttggacactgcagcatttccagcctttgttggaggacacagcactgatccttttccaatagagtgtgaggaaacaccctcaaaaggctgaaccctaatcaacccaacccaacmcaacacaacccaacccaacacagcacaact

SEQ ID NO: 70355 - DNA, 546 bp, Chicken  19866894343699_3
ggttttcctcgatgctggttttcttgcccraggctcccattctcatctgatatggggcagttctttgttccccagctcccagcactcatttgtattcagcattaggctttacgagcgcttcccttttttaattgtgctcattatctcctaatagcctcaatgctatggggttgtgggtggggtttttttggacactgcagcatttccagcctttgttggaggacacagcactgatccttttccaatagagtgtgaggaaacaccctcaaaaggctgaaccctaatcaacccaacccaacmcaacacaacccaacccaacacagcacaactcaacccagagccctcagtggcccaagcccacttccagtagccacttggaggataaaaagggaaattcttacacctgtgattgaacaaatccctcttaagggcctccagctccaccccagaatagctttcaggagatattttctcccgttatggtgctgggaacttatgtagcatgaatggaaatggctgtcttcgttgtgctcttctctttcaaaa

SEQ ID NO: 70356 - DNA, 600 bp, Chicken  19866894343705_1
cattgcctccagcatgcagagcttacccagtgctgccatgagacacagcatcactcacagaccaagactatattttgctgctactgctctactaatatcaatttcaacagaacagtatattctcttgaataatcagacaggactagcaccctcatggacttgacacgcctcccctaatcaaatattaacaaagcaatatgtgaacattcataatgttcataaaaacctgttatacacattacacaagaaaacagagatggatttcaaggagcctgaaaaacagcagtcatacagcgcaaygtactaccgagctgaaaggagaggtctaagtggatggcaatggtcaaagtcaaattcaggtctctattggaagcaaacctttaacttgttttgttaatcagggtgacattttggaaccttgaaatggcttctgattggcttacagtagaaatcatttacctctccctgaaaacaaatacacaagccatgggggccaggagaagcagatgcgccctaacttgggattttattaaaatcctcttctgaacagaactctaaagcaaagccctcgtaatcccatgaccagatgcaagaagtatc

SEQ ID NO: 70357 - DNA, 599 bp, Chicken  19866894343712_1
  misc_feature (1)..(56): n is any nucleotide
nnnnnnnnnnnnnnnnnnnnnnnnnnnnnnnnnnnnnnnnnnnnnnnnnnnnnnnntgatgaggccccagctcatgtaactgctgcattctttatatgggaaagaaagtggagagaaagagcgtaagaggaaaagaaatagagacagaatggcacacagctaagcagggggaaacccgcacatcacaaagatcaacatctcaccagacacctgtgagaaactgtcttgtgagtttctagtcatctcctccccctggccttcccatcctctccagaatggaaattcattgcacatattccyctgctggggccagagctgaagagttcctgcccaccacaggcccacattcccctgagttcagactaagtgagaaactgggcctgaggtgttgacaagatacagtgtagctggaagctatataaagtcaacagggaaataccaggaagaaatcaccagggaaggcagcagtgcccagctgaagctctgggtaggaggagttggcctgggaatccaggcaagccctgtggccactgctgaatggggctctacaacctctgcagcacatttctacccacagcgttgaatctgcaytacccagc

SEQ ID NO: 70358 - DNA, 466 bp, Chicken  19866894343712_2
catattccyctgctggggccagagctgaagagttcctgcccaccacaggcccacattcccctgagttcagactaagtgagaaactgggcctgaggtgttgacaagatacagtgtagctggaagctatataaagtcaacagggaaataccaggaagaaatcaccagggaaggcagcagtgcccagctgaagctctgggtaggaggagttggcctgggaatccaggcaagccctgtggccactgctgaatggggctctacaacctctgcagcacatttctacccacagcgttgaatctgcaytacccagcaatggcagcgcagacccrctgccctcaacyggtgtagcttctacatgaaagatagcatttagggtcgccatgaaggactgcaattgcaagttgaatacrcttgcaataaatgttggttgcccagatccaaatccatgctagcaatctagtgatctcca

SEQ ID NO: 70359 - DNA, 440 bp, Chicken  19866894343712_3
gaagagttcctgcccaccacaggcccacattcccctgagttcagactaagtgagaaactgggcctgaggtgttgacaagatacagtgtagctggaagctatataaagtcaacagggaaataccaggaagaaatcaccagggaaggcagcagtgcccagctgaagctctgggtaggaggagttggcctgggaatccaggcaagccctgtggccactgctgaatggggctctacaacctctgcagcacatttctacccacagcgttgaatctgcaytacccagcaatggcagcgcagacccrctgccctcaacyggtgtagcttctacatgaaagatagcatttagggtcgccatgaaggactgcaattgcaagttgaatacrcttgcaataaatgttggttgcccagatccaaatccatgctagcaatctagtgatctcca

SEQ ID NO: 70360 - DNA, 428 bp, Chicken  19866894343712_4
cccaccacaggcccacattcccctgagttcagactaagtgagaaactgggcctgaggtgttgacaagatacagtgtagctggaagctatataaagtcaacagggaaataccaggaagaaatcaccagggaaggcagcagtgcccagctgaagctctgggtaggaggagttggcctgggaatccaggcaagccctgtggccactgctgaatggggctctacaacctctgcagcacatttctacccacagcgttgaatctgcaytacccagcaatggcagcgcagacccrctgccctcaacyggtgtagcttctacatgaaagatagcatttagggtcgccatgaaggactgcaattgcaagttgaatacrcttgcaataaatgttggttgcccagatccaaatccatgctagcaatctagtgatctcca

SEQ ID NO: 70361 - DNA, 359 bp, Chicken  19866894343712_5
acagtgtagctggaagctatataaagtcaacagggaaataccaggaagaaatcaccagggaaggcagcagtgcccagctgaagctctgggtaggaggagttggcctgggaatccaggcaagccctgtggccactgctgaatggggctctacaacctctgcagcacatttctacccacagcgttgaatctgcaytacccagcaatggcagcgcagacccrctgccctcaacyggtgtagcttctacatgaaagatagcatttagggtcgccatgaaggactgcaattgcaagttgaatacrcttgcaataaatgttggttgcccagatccaaatccatgctagcaatctagtgatctcca

SEQ ID NO: 70362 - DNA, 600 bp, Chicken  19866894343728_1
cagaaaacagaccccctgtgcggtaagatgcagtactggataatgtatgcaacagccccaacaaaagaacagtcagtctccagatttgcatgagaatctcatcaagctcagtagatagcatctgcaattacaataacctgccccatcctgcaaaaaaagaaagaaagaaggaaagaaagacagaagaaagaaaaagaagggagaggtagggatgaacacacttgggtaatcaagtttccgtctgttctgtcagcattttgggcccctttgaatcctgggcactaccttctttcttgtccyaaagttacgtttgtttatggttgctttctagtttaagcatcacttttacacagctggagggttattctgtcctgtcccagcaccattgctgtctggcccaacaagaagccaggcaagcccacrtgcctccatcgaccctcagaaaaggatgcaaggatragaagtgccccaggcagcacaagcctgtgctccctgagaaccaagctgcttcaggacaaggatggcaaactgttccctgcatggccactgtgggaggcaaaatcccattactggaaatctactttgatatttcaggtgtgg

SEQ ID NO: 70363 - DNA, 600 bp, Chicken  19866894343728_2
gcaattacaataacctgccccatcctgcaaaaaaagaaagaaagaaggaaagaaagacagaagaaagaaaaagaagggagaggtagggatgaacacacttgggtaatcaagtttccgtctgttctgtcagcattttgggcccctttgaatcctgggcactaccttctttcttgtccyaaagttacgtttgtttatggttgctttctagtttaagcatcacttttacacagctggagggttattctgtcctgtcccagcaccattgctgtctggcccaacaagaagccaggcaagcccacrtgcctccatcgaccctcagaaaaggatgcaaggatragaagtgccccaggcagcacaagcctgtgctccctgagaaccaagctgcttcaggacaaggatggcaaactgttccctgcatggccactgtgggaggcaaaatcccattactggaaatctactttgatatttcaggtgtggaagaaaatgacttttgctttttgtcatcagcagtctggggcacagattcagcatctcttcctatagacgcacctcaggcagtctgctagcaaacagaggccgtgctcttctttgctgttgcca

SEQ ID NO: 70364 - DNA, 600 bp, Chicken  19866894343728_3
aaagaaagaaggaaagaaagacagaagaaagaaaaagaagggagaggtagggatgaacacacttgggtaatcaagtttccgtctgttctgtcagcattttgggcccctttgaatcctgggcactaccttctttcttgtccyaaagttacgtttgtttatggttgctttctagtttaagcatcacttttacacagctggagggttattctgtcctgtcccagcaccattgctgtctggcccaacaagaagccaggcaagcccacrtgcctccatcgaccctcagaaaaggatgcaaggatragaagtgccccaggcagcacaagcctgtgctccctgagaaccaagctgcttcaggacaaggatggcaaactgttccctgcatggccactgtgggaggcaaaatcccattactggaaatctactttgatatttcaggtgtggaagaaaatgacttttgctttttgtcatcagcagtctggggcacagattcagcatctcttcctatagacgcacctcaggcagtctgctagcaaacagaggccgtgctcttctttgctgttgccatttccttgtgttcctgccyttaaacagagatcctct

SEQ ID NO: 70365 - DNA, 466 bp, Chicken  19866894343728_4
aaaaggatgcaaggatragaagtgccccaggcagcacaagcctgtgctccctgagaaccaagctgcttcaggacaaggatggcaaactgttccctgcatggccactgtgggaggcaaaatcccattactggaaatctactttgatatttcaggtgtggaagaaaatgacttttgctttttgtcatcagcagtctggggcacagattcagcatctcttcctatagacgcacctcaggcagtctgctagcaaacagaggccgtgctcttctttgctgttgccatttccttgtgttcctgccyttaaacagagatcctctgagatataacataaccctaagaaatggaaagtacacctagaaggctagcacaggaagtgcacacactgttgctaactgcctctgtcaccagctcagaagcagagagcatgtcttcttgcagggcatgagcagtcctagtaaataccagg

SEQ ID NO: 70366 - DNA, 600 bp, Chicken  19866894343729_1
cactcagctctagcaaaatgatcaagtattaacaacctccctttaattgcttctgcggagctcatcctgacgttcttctttttcctcctacactggcttccatcggtgtgctcattattgacatgcttaatatttatgctgaccctcctgagggaaattcacagcttactgagagcagaagctgcgttccttatcaaataacgtgctcggatttaatggcattctgcttgccatatctgaatgcaaaacactctcctctcagaaaagcatagcagtcgctatgagctttcattgggtgtsagctaaactttgcttctgggaacaacaccaaaagtagcgttctgggcatgttaaggtacaggcccatgctctcagcagagctttaatgacaacaataacagttataatgtgatacttccttgatacgaagcatgttggacaaacttgtgttgggagactaagggcagtagatttcaacactgaactttccttgcttggtttttaattctctggagtgtcacttctcacttttttttcctctctggcactgaaggctcaaagcacagttaaagcaccattacgtacactctgattttgcaa

SEQ ID NO: 70367 - DNA, 600 bp, Chicken  19866894343732_1
cggaggaccacaagaccgctctaaagaaacaagagcatccttagggcacggagcaacagaaatagaaaggctgatgtgatttttgtggtggtgtttcatgctgaacgtttagaaatgcagctggagggaaggaattgatgctgaggtactcactgcgacacagctcaggaacttctgaccatgttgaattctcttggcaggtgctgctggggagcacagcagagctgttctcatagcctcggctgcagttgtagcgcactgtggtcccaacagcataaaaattcttcatttcatcttctkctgatagtttggcaaaaggcacctggggagggctctggcagctgcctggcaacaaggacagacaagtgtacagctccaaagcaagaaacaacagtattttgcactcagatagctacaaatacaggcaatgatgcacaagcctcctttaggatactgctacactgacagtcttaagaaagcaatgggtaatttctatggtttttaaacatccacagagggctgcttcactgaaaaagatttcaaatgttcatctgtgcctttgtggagctgcccacaagccgggtgcccacctgccctgcc

SEQ ID NO: 70368 - DNA, 600 bp, Chicken  19866894343732_2
gggctgcttcactgaaaaagatttcaaatgttcatctgtgcctttgtggagctgcccacaagccgggtgcccacctgccctgccagcttcacaaatggaacctttggtgtgggacagcacagccaattagccacaaactttcccacattaactccaaattcagccctgggctgtgccggtgctccccagctgtttttcttcccctcgctgctggcgctgccctcgggtatctgcgtttatgaacgcagaggtcacagctccaaggcaaggcagtcaggaagaagggcaagaagagggtcyccaggtgaggaagcccttacagccatgattgctacagtcacgaacgcggtcccaagcagcaaactactcacggtcacagaactcctgcaggttggaccataggggagttattaaagcacactattgtgtccagccgcgatgggattttcgagaaattctggaggcatctgtacgttactttggagcccacggggaaactgtcctggtgccggacgtcctccgggggctctgccctgctgatgttgggcagcggcccgcagtcacctgtaagagaagaaaaacgcattcaggaggagctcc

SEQ ID NO: 70369 - DNA, 600 bp, Chicken  19866894343740_1
tcaccactggcattctgaggagaataaacagttcctttgtaagccagatacatgttttatggtctgcacttaccagtttctatttttttttttaatagtgtgaaaccacaaaaacgtttttaatatttatttttcgggaattacagtaaaaacatactagagattatcaggatgtatctgacgagatatttgagcagcagctttcccacaaagttttatgttggtaaaatcatacctaggaattccgaactcttcttctaataacttttgtgtctgctgtgtatgggctgtcgatgtgtrttcataaatcttgagtgctcggaaagtaaaagtaagcgtaacttctggagtacagccttagcaacagatagccgcagtatcccrctaaaaactttgcatttttattttgaaataatgacgtctgtgatagtgtttatttttagcagacatgcacagatgagaaacgttaagagattataagtgatagtgcattcaacaacttctgatgccagtgtaatataaaagacagaccgctgttttaagaaaggcttaggctcacatgtacgaatagcttagctggcagtgtttttcttgcattta

SEQ ID NO: 70370 - DNA, 600 bp, Chicken  19866894343740_2
tttttttttaatagtgtgaaaccacaaaaacgtttttaatatttatttttcgggaattacagtaaaaacatactagagattatcaggatgtatctgacgagatatttgagcagcagctttcccacaaagttttatgttggtaaaatcatacctaggaattccgaactcttcttctaataacttttgtgtctgctgtgtatgggctgtcgatgtgtrttcataaatcttgagtgctcggaaagtaaaagtaagcgtaacttctggagtacagccttagcaacagatagccgcagtatcccrctaaaaactttgcatttttattttgaaataatgacgtctgtgatagtgtttatttttagcagacatgcacagatgagaaacgttaagagattataagtgatagtgcattcaacaacttctgatgccagtgtaatataaaagacagaccgctgttttaagaaaggcttaggctcacatgtacgaatagcttagctggcagtgtttttcttgcatttaatgggatctcccaatgactttttgccctttctcsgagacaccattttcagcaccttatttattattgtatttttaatataaaaa

SEQ ID NO: 70371 - DNA, 600 bp, Chicken  19866894343740_3
agcgtaacttctggagtacagccttagcaacagatagccgcagtatcccrctaaaaactttgcatttttattttgaaataatgacgtctgtgatagtgtttatttttagcagacatgcacagatgagaaacgttaagagattataagtgatagtgcattcaacaacttctgatgccagtgtaatataaaagacagaccgctgttttaagaaaggcttaggctcacatgtacgaatagcttagctggcagtgtttttcttgcatttaatgggatctcccaatgactttttgccctttctcsgagacaccattttcagcaccttatttattattgtatttttaatataaaaatacggttctccttttccgttactctttgtgcctatccctttctcactttttattcataaaaatgcaaagacagctgagtttcatctctgcttctgcctgtctcgtaactgggataactgctgcacttcgagggttaaaagtgcatctcatttacacaactgcagctcagcctcgctcactgtatattatccttcttcaaggagatagacaaatacatcatatctgtcaccatagctgtaaaataagatgg

SEQ ID NO: 70372 - DNA, 600 bp, Chicken  19866894343740_4
atttttaatataaaaatacggttctccttttccgttactctttgtgcctatccctttctcactttttattcataaaaatgcaaagacagctgagtttcatctctgcttctgcctgtctcgtaactgggataactgctgcacttcgagggttaaaagtgcatctcatttacacaactgcagctcagcctcgctcactgtatattatccttcttcaaggagatagacaaatacatcatatctgtcaccatagctgtaaaataagatggcaagtcgtctaaatgaaggttactgctgttctgmaaaataaggattcaggaaagcaattaagggaagcctaactcgcaagcttcacttaagagaaatggaagtccaaaaaaggaagcagaggaattcttttaacactcattatccctgaataatttgaaatgatgtgcattctaaaacagccatagttttgaactgaagtttgtttgtgctattacacaattttataacacttttctctccctttatcacaagttctgcctcatttacgcatacttctctaatgcactaatttgttttctttcatttgaatttggagtggtatcacatctacag

SEQ ID NO: 70373 - DNA, 600 bp, Chicken  19866894343740_5
acacttttctctccctttatcacaagttctgcctcatttacgcatacttctctaatgcactaatttgttttctttcatttgaatttggagtggtatcacatctacagtttatgcagcacagacatcaaaacatttctatacagatcagtgattttttctttctaaaataatatcgatcattttcaatattggagggtttctaatctaacaaccttcagaaatgtgtaataaaatatggccaggtagacgttttttagaaaaatactccaatcgaatttattacacttttaagataaaggyatccataagagtgaaaattcatatttttgaatttttacttattatatctataaaayaatgccagtgtatgtcatgcaaagcgtcaccaggaatatctgtacttaatatttgtagagatttttttttttwwaaaaagcatcttttaaaaaataaaaatagaagcaaagcagtttgcccattgtttcctgatgggattaaaggtgctctgtgggattatagctgatgtacgcatcatagaagcgtacttcattgaataactcacattaattccagaggatcagtggcatattaacctagagg

SEQ ID NO: 70374 - DNA, 600 bp, Chicken  19866894343740_6
gcactaatttgttttctttcatttgaatttggagtggtatcacatctacagtttatgcagcacagacatcaaaacatttctatacagatcagtgattttttctttctaaaataatatcgatcattttcaatattggagggtttctaatctaacaaccttcagaaatgtgtaataaaatatggccaggtagacgttttttagaaaaatactccaatcgaatttattacacttttaagataaaggyatccataagagtgaaaattcatatttttgaatttttacttattatatctataaaayaatgccagtgtatgtcatgcaaagcgtcaccaggaatatctgtacttaatatttgtagagatttttttttttwwaaaaagcatcttttaaaaaataaaaatagaagcaaagcagtttgcccattgtttcctgatgggattaaaggtgctctgtgggattatagctgatgtacgcatcatagaagcgtacttcattgaataactcacattaattccagaggatcagtggcatattaacctagaggggaaaaaacattcgaaataccaaatacagacaatttggatgtaagtgattcagaaa

SEQ ID NO: 70375 - DNA, 600 bp, Chicken  19866894343740_7
acagacatcaaaacatttctatacagatcagtgattttttctttctaaaataatatcgatcattttcaatattggagggtttctaatctaacaaccttcagaaatgtgtaataaaatatggccaggtagacgttttttagaaaaatactccaatcgaatttattacacttttaagataaaggyatccataagagtgaaaattcatatttttgaatttttacttattatatctataaaayaatgccagtgtatgtcatgcaaagcgtcaccaggaatatctgtacttaatatttgtagagytttttttttttwwaaaaagcatcttttaaaaaataaaaatagaagcaaagcagtttgcccattgtttcctgatgggattaaaggtgctctgtgggattatagctgatgtacgcatcatagaagcgtacttcattgaataactcacattaattccagaggatcagtggcatattaacctagaggggaaaaaacattcgaaataccaaatacagacaatttggatgtaagtgattcagaaatgtaaaggcacagctgagcaagggtgcatttgcagcatccatccctaccaacataatgaag

SEQ ID NO: 70376 - DNA, 600 bp, Chicken  19866894343740_8
acatttctatacagatcagtgattttttctttctaaaataatatcgatcattttcaatattggagggtttctaatctaacaaccttcagaaatgtgtaataaaatatggccaggtagacgttttttagaaaaatactccaatcgaatttattacacttttaagataaaggyatccataagagtgaaaattcatatttttgaatttttacttattatatctataaaayaatgccagtgtatgtcatgcaaagcgtcaccaggaatatctgtacttaatatttgtagagatttttttttttwwaaaaagcatcttttaaaaaataaaaatagaagcaaagcagtttgcccattgtttcctgatgggattaaaggtgctctgtgggattatagctgatgtacgcatcatagaagcgtacttcattgaataactcacattaattccagaggatcagtggcatattaacctagaggggaaaaaacattcgaaataccaaatacagacaatttggatgtaagtgattcagaaatgtaaaggcacagctgagcaagggtgcatttgcagcatccatccctaccaacataatgaagcattttgcaaaa

SEQ ID NO: 70377 - DNA, 600 bp, Chicken  19866894343740_9
catttctatacagatcagtgattttttctttctaaaataatatcgatcattttcaatattggagggtttctaatctaacaaccttcagaaatgtgtaataaaatatggccaggtagacgttttttagaaaaatactccaatcgaatttattacacttttaagataaaggyatccataagagtgaaaattcatatttttgaatttttacttattatatctataaaayaatgccagtgtatgtcatgcaaagcgtcaccaggaatatctgtacttaatatttgtagagatttttttttttwwaaaaagcatcttttaaaaaataaaaatagaagcaaagcagtttgcccattgtttcctgatgggattaaaggtgctctgtgggattatagctgatgtacgcatcatagaagcgtacttcattgaataactcacattaattccagaggatcagtggcatattaacctagaggggaaaaaacattcgaaataccaaatacagacaatttggatgtaagtgattcagaaatgtaaaggcacagctgagcaagggtgcatttgcagcatccatccctaccaacataatgaagcattttgcaaaaa

SEQ ID NO: 70378 - DNA, 600 bp, Chicken  19866894343741_1
aaaagggaagcaagaatttaaaaaaaataaaaatcaaagcagtaaattacttcaatcaggtatgtgcaagtaaagaaatgttaaatgcctagataaaaaccaccttagactgtatcccatgatttagtagtgctctatacaaaccttgcctatgcataagaacatttaatacagtcacagctctgtgaaattgctggaggagtgggctggctcagattcagggccttgccatcagtaaggtcagggtatacactgtgcaagtcacacttcatgtggcactgtacttgcttctattctctraggcactttcctatcactgaaataaaaatgtaagacaaagcatccagtgccatgacagctgtatctgccttccagctaatgggaaaagtaccaaaccccaacaccagccttgcagagaggaggaactccctcagccactgctgtgatctaacgtgatctcttcccagccacggtcaacagcaagttcaacgtaagtcaccaggtaactttattaactaggtaatgcattaatttcagctgaaggactgaaagcacgtaatctgtagttaacaacactgatgagatgtttagtttaatttt

SEQ ID NO: 70379 - DNA, 525 bp, Chicken  19866894343745_1
ctgttcagaattccccttgtaaatgaccttccatttttaatttgtgttttctgtaatactcagccacaaacagtaaacaatttgcagacaacagaaggtcagaagtttaactagcttatgcccatcagtcgtcacagatgaaaagcttctccacctgaaaatctggttgctgctttgcttaaatcagaggatacccacaagcccagtcttcattctttactaatattttcatgaataaaatgaccttacgcagataaggataaaacatgcctacctccaaacatgatccaagaagaagawggttcatataaactgaatgcacacaaagctaaggagtaatgccagaggcaggtaggaaacccaacgacatctaaaactaagcgcttaaacctatgcttggtacatcctgttgctggatcaatggttactggagccctcacgtagctcctcatcttgctacactcctcttctttcccaaggtcccacaggtagcagagtccggggattctggaagacagaagaaag

SEQ ID NO: 70380 - DNA, 600 bp, Chicken  19866894343748_1
taaatttattaccaaaatcacaagcctgaaatagactcaaactattccagcagagactaataaataactgtgagtgcagcagggacagtaattaaaataagaaaatgtaacattaattccaaaagccaactgaaatgccaactctcgaatgcggtgcacagagtgccctgcaaggggccgggggttggcaaagcgggtcagcaaatacacccactgcacctccatggccagagcacctcatctgctgcggaaatgcaaagccatctggagcagaatgctggagagaacgtctttcccaakgcaaatcatacagatggactcaggcactttgggtctcttcatgcraacatcctaaaacccatcagcagaactttaagacacrcttgtgttagccccaaccactatggggtcactgcagacagagctactgaaatggtcagcaataaactgctgtgtgatgtgacatacaaatcccatttctggaaggaaaggacagcagctgggagccacagcagagatgctgatccccaaccctcagaaccaagctggggaaagcagacggggttacactggaaccactggtgccaagatttgtgcttg

SEQ ID NO: 70381 - DNA, 600 bp, Chicken  19866894343748_2
tccagcagagactaataaataactgtgagtgcagcagggacagtaattaaaataagaaaatgtaacattaattccaaaagccaactgaaatgccaactctcgaatgcggtgcacagagtgccctgcaaggggccgggggttggcaaagcgggtcagcaaatacacccactgcacctccatggccagagcacctcatctgctgcggaaatgcaaagccatctggagcagaatgctggagagaacgtctttcccaakgcaaatcatacagatggactcaggcactttgggtctcttcatgcraacatcctaaaacccatcagcagaactttaagacacrcttgtgttagccccaaccactatggggtcactgcagacagagctactgaaatggtcagcaataaactgctgtgtgatgtgacatacaaatcccatttctggaaggaaaggacagcagctgggagccacagcagagatgctgatccccaaccctcagaaccaagctggggaaagcagacggggttacactggaaccactggtgccaagatttgtgcttgaaaaccagcaacagcggtacagattccactaagtaagaagttccc

SEQ ID NO: 70382 - DNA, 600 bp, Chicken  19866894343748_3
ggacagtaattaaaataagaaaatgtaacattaattccaaaagccaactgaaatgccaactctcgaatgcggtgcacagagtgccctgcaaggggccgggggttggcaaagcgggtcagcaaatacacccactgcacctccatggccagagcacctcatctgctgcggaaatgcaaagccatctggagcagaatgctggagagaacgtctttcccaakgcaaatcatacagatggactcaggcactttgggtctcttcatgcraacatcctaaaacccatcagcagaactttaagacacrcttgtgttagccccaaccactatggggtcactgcagacagagctactgaaatggtcagcaataaactgctgtgtgatgtgacatacaaatcccatttctggaaggaaaggacagcagctgggagccacagcagagatgctgatccccaaccctcagaaccaagctggggaaagcagacggggttacactggaaccactggtgccaagatttgtgcttgaaaaccagcaacagcggtacagattccactaagtaagaagttcccagttgcaaagtatttgggataatcaygcgttgctaaa

SEQ ID NO: 70383 - DNA, 600 bp, Chicken  19866894343748_4
tttaagacacrcttgtgttagccccaaccactatggggtcactgcagacagagctactgaaatggtcagcaataaactgctgtgtgatgtgacatacaaatcccatttctggaaggaaaggacagcagctgggagccacagcagagatgctgatccccaaccctcagaaccaagctggggaaagcagacggggttacactggaaccactggtgccaagatttgtgcttgaaaaccagcaacagcggtacagattccactaagtaagaagttcccagttgcaaagtatttgggataatcaygcgttgctaaaaccttttggtgaacayggttaaccagcttctatccatgggaaaagtgagctgtagggaggaagaagggattaacctaattttactgagaaatcccaaatgctaaacttggtttcctacagccttctgcrgaacagagtgccaacagggaatgttttaaggacactttctgtagacactaaactatgtgataagtacacatggaggaagggagccttatctttccaagaagccacttcttaacaaattgacttttttgctcactttgacctttcatctcacaatcacaga

SEQ ID NO: 70384 - DNA, 600 bp, Chicken  19866894343748_5
ccactatggggtcactgcagacagagctactgaaatggtcagcaataaactgctgtgtgatgtgacatacaaatcccatttctggaaggaaaggacagcagctgggagccacagcagagatgctgatccccaaccctcagaaccaagctggggaaagcagacggggttacactggaaccactggtgccaagatttgtgcttgaaaaccagcaacagcggtacagattccactaagtaagaagttcccagttgcaaagtatttgggataatcaygcgttgctaaaaccttttggtgaacayggttaaccagcttctatccatgggaaaagtgagctgtagggaggaagaagggattaacctaattttactgagaaatcccaaatgctaaacttggtttcctacagccttctgcrgaacagagtgccaacagggaatgttttaaggacactttctgtagacactaaactatgtgataagtacacatggaggaagggagccttatctttccaagaagccacttcttaacaaattgacttttttgctcactttgacctttcatctcacaatcacagaacctctgggagctgaagttacctggaa

SEQ ID NO: 70385 - DNA, 580 bp, Chicken  19866894343748_6
gcagagatgctgatccccaaccctcagaaccaagctggggaaagcagacggggttacactggaaccactggtgccaagatttgtgcttgaaaaccagcaacagcggtacagattccactaagtaagaagttcccagttgcaaagtatttgggataatcaygcgttgctaaaaccttttggtgaacayggttaaccagcttctatccatgggaaaagtgagctgtagggaggaagaagggattaacctaattttactgagaaatcccaaatgctaaacttggtttcctacagccttctgcrgaacagagtgccaacagggaatgttttaaggacactttctgtagacactaaactatgtgataagtacacatggaggaagggagccttatctttccaagaagccacttcttaacaaattgacttttttgctcactttgacctttcatctcacaatcacagaacctctgggagctgaagttacctggaaataggacgcaacactctcagttcttccactgtgctgtgagctttgcccctttaaaattcaagcacagcaaaaattctatctaaaccatctttt

SEQ ID NO: 70386 - DNA, 600 bp, Chicken  19866894343753_1
tccctaagttcactcatatctaagagcaaccattccacacccataacaccttttgttaagtggctactgttctgagactatttagctttaagaggaaaggatattttcttactcacttgaaagaattactataagagttttcagctaagtggttccccacaaaatagccactaagaaacatacagcaatcgtccaaagactgcaaagaaagtggagtagaggcaagactgtccacaacaacaggaagattatggcaaagacatgtcagtactttcatgttcctcattaattcaggaaaayctcactggaagtctagttaagataaactttgccatactcatcatatatttacagtaaaccctaatcagtatagtaatactctgatataacatgacaaagcacagccctaagaaaatgcatttactcaatgcatagctaatagtaacagaagtgaggtaaaggaatacagggaattattttgtgatctaaagcaaaacttaatagaaaaactgtttgcaaagtaaacagattagtactgtaaagtgctctaccctttgaaacttgttgaagtgctgacttttctcagagacaacaggtcct

SEQ ID NO: 70387 - DNA, 599 bp, Chicken  19866894343757_1
  misc_feature (1)..(135): n is any nucleotide
nnnnnnnnnnnnnnnnnnnnnnnnnnnnnnnnnnnnnnnnnnnnnnnnnnnnnnnnnnnnnnnnnnnnnnnnnnnnnnnnnnnnnnnnnnnnnnnnnnnnnnnnnnnnnnnnnnnnnnnnnnnnnnnnnnnnnnnctggcagtctttttgatttctaatctaatttatttgcactctccatcagcttcatggagatctcagttccgttctctaaattgtttagaaaacaccatcttgtataggtcagacattctatgggctctgggctcttgacaatatttgcccttccattttgacagygaattaatgttatctgctgtatcagtatgattttccagttgattctgcacatatttgatattagattctttcaaacctgctttccttgctttgctctttcaaagagccattgtcaacagcgttgagaacatatggattataggtgtggtactcaaaagcaaacaagagtttatatctattgtgagaacataacatacaacaattactggttttccttcaatccrcaggtccactcartagctaaataagraaattaatttggatcttgacaaatccatagatttattcaaaaatccagg

SEQ ID NO: 70388 - DNA, 600 bp, Chicken  19866894343757_2
aaacaccatcttgtataggtcagacattctatgggctctgggctcttgacaatatttgcccttccattttgacagygaattaatgttatctgctgtatcagtatgattttccagttgattctgcacatatttgatattagattctttcaaacctgctttccttgctttgctctttcaaagagccattgtcaacagcgttgagaacatatggattataggtgtggtactcaaaagcaaacaagagtttatatctattgtgagaacataacatacaacaattactggttttccttcaatccrcaggtccactcartagctaaataagraaattaatttggatcttgacaaatccatagatttattcaaaaatccaggcgtgctttttttccttcctttgtaatccttgcaaattgtcaccaaaagtcacttttggctatttctccataactccaaacaactgagttaaactggctaatcagtaattctttggcctccttttcaaggtatgtcatatttgctgttatctgcttttgcatacctcacccgaaagtcatgtattctgtaagaccaccatcagtggttacaagaggagatcactca

SEQ ID NO: 70389 - DNA, 600 bp, Chicken  19866894343757_3
tataggtcagacattctatgggctctgggctcttgacaatatttgcccttccattttgacagygaattaatgttatctgctgtatcagtatgattttccagttgattctgcacatatttgatattagattctttcaaacctgctttccttgctttgctctttcaaagagccattgtcaacagcgttgagaacatatggattataggtgtggtactcaaaagcaaacaagagtttatatctattgtgagaacataacatacaacaattactggttttccttcaatccrcaggtccactcartagctaaataagraaattaatttggatcttgacaaatccatagatttattcaaaaatccaggcgtgctttttttccttcctttgtaatccttgcaaattgtcaccaaaagtcacttttggctatttctccataactccaaacaactgagttaaactggctaatcagtaattctttggcctccttttcaaggtatgtcatatttgctgttatctgcttttgcatacctcacccgaaagtcatgtattctgtaagaccaccatcagtggttacaagaggagatcactcagttcwtgaagtat

SEQ ID NO: 70390 - DNA, 600 bp, Chicken  19866894343757_4
ttctatgggctctgggctcttgacaatatttgcccttccattttgacagygaattaatgttatctgctgtatcagtatgattttccagttgattctgcacatatttgatattagattctttcaaacctgctttccttgctttgctctttcaaagagccattgtcaacagcgttgagaacatatggattataggtgtggtactcaaaagcaaacaagagtttatatctattgtgagaacataacatacaacaattactggttttccttcaatccrcaggtccactcartagctaaataagraaattaatttggatcttgacaaatccatagatttattcaaaaatccaggcgtgctttttttccttcctttgtaatccttgcaaattgtcaccaaaagtcacttttggctatttctccataactccaaacaactgagttaaactggctaatcagtaattctttggcctccttttcaaggtatgtcatatttgctgttatctgcttttgcatacctcacccgaaagtcatgtattctgtaagaccaccatcagtggttacaagaggagatcactcagttcwtgaagtattccaggatgaaag

SEQ ID NO: 70391 - DNA, 532 bp, Chicken  19866894343757_5
ccactcartagctaaataagraaattaatttggatcttgacaaatccatagatttattcaaaaatccaggcgtgctttttttccttcctttgtaatccttgcaaattgtcaccaaaagtcacttttggctatttctccataactccaaacaactgagttaaactggctaatcagtaattctttggcctccttttcaaggtatgtcatatttgctgttatctgcttttgcatacctcacccgaaagtcatgtattctgtaagaccaccatcagtggttacaagaggagatcactcagttcwtgaagtattccaggatgaaagtcagttytttggactcaacaaatttgaaaatgtgaaaccaagcaaagtgctctctaacctatctcttctctgtctgagggattttaattgcaaaatccactttttagggaatactgattaaaaaaaaaaaaagcattatgtatattaccttccaatgtcatctgctagtaggctttcccttctgtttacaagttcactaaccctgcttttc

SEQ ID NO: 70392 - DNA, 504 bp, Chicken  19866894343757_6
tttggatcttgacaaatccatagatttattcaaaaatccaggcgtgctttttttccttcctttgtaatccttgcaaattgtcaccaaaagtcacttttggctatttctccataactccaaacaactgagttaaactggctaatcagtaattctttggcctccttttcaaggtatgtcatatttgctgttatctgcttttgcatacctcacccgaaagtcatgtattctgtaagaccaccatcagtggttacaagaggagatcactcagttcwtgaagtattccaggatgaaagtcagttytttggactcaacaaatttgaaaatgtgaaaccaagcaaagtgctctctaacctatctcttctctgtctgagggattttaattgcaaaatccactttttagggaatactgattaaaaaaaaaaaaagcattatgtatattaccttccaatgtcatctgctagtaggctttcccttctgtttacaagttcactaaccctgcttttc

SEQ ID NO: 70393 - DNA, 599 bp, Chicken  19866894343758_1
  misc_feature (1)..(105): n is any nucleotide
nnnnnnnnnnnnnnnnnnnnnnnnnnnnnnnnnnnnnnnnnnnnnnnnnnnnnnnnnnnnnnnnnnnnnnnnnnnnnnnnnnnnnnnnnnnnnnnnnnnnnnnnnacagaggattcaattttaatgcataggcttttaattactgtcttccctactgacatcccataggcagttttgaaaggaatccttcaaagtttatgtgctctctaagctgaatatccaataagttgtaaatgaaaagaattatgagtgtctcagtgtgtatgggagatgagacattttagtgctgccctaaaaagrattagactagagcattatagcccatatttggcagagtccgtgtagtgaaaggatgttccwgttgtccctaagtgcttaggaccaagagttaggttggctttttatcacatgagggccattacaggttgattagtagggtcaaaaaaggaaagaccacattcattcaaatgaagatttcacagtcttcatcggttacagtgacactatgcatttagacaaccatcagcagttcctgaataataaatgttttaggtaaaaaattaaacaaattctctcagcacggtgttctgggtggtagt

SEQ ID NO: 70394 - DNA, 599 bp, Chicken  19866894343758_2
  misc_feature (1)..(45): n is any nucleotide
nnnnnnnnnnnnnnnnnnnnnnnnnnnnnnnnnnnnnnnnnnnnnacagaggattcaattttaatgcataggcttttaattactgtcttccctactgacatcccataggcagttttgaaaggaatccttcaaagtttatgtgctctctaagctgaatatccaataagttgtaaatgaaaagaattatgagtgtctcagtgtgtatgggagatgagacattttagtgctgccctaaaaagrattagactagagcattatagcccatatttggcagagtccgtgtagtgaaaggatgttccwgttgtccctaagtgcttaggaccaagagttaggttggctttttatcacatgagggccattacaggttgattagtagggtcaaaaaaggaaagaccacattcattcaaatgaagatttcacagtcttcatcggttacagtgacactatgcatttagacaaccatcagcagttcctgaataataaatgttttaggtaaaaaattaaacaaattctctcagcacggtgttctgggtggtagttcacttcttagttaggaatctagacaggggctaacccaacaagcagttaaatccagctct

SEQ ID NO: 70395 - DNA, 456 bp, Chicken  19866894343758_3
ttagacaaccatcagcagttcctgaataataaatgttttaggtaaaaaattaaacaaattctctcagcacggtgttctgggtggtagttcacttcttagttaggaatctagacaggggctaacccaacaagcagttaaatccagctctacatgaggactggtattcccccatccctagccagtgaaagagatgggaaatgacctcaggtaaaacttctgttagaattaggcaagggtctagattagacacatgattaattagagctgatacttaacagaagctctttcaatgaaggaggmttaagaatctcagtaaaaggaatcagattgagatgatggaggactgattgtgaaggaaaatctttcaaacttgatgtcaaaggatggaaaagcatgtaagatttttctggggaagatatttattaaagcttaaattcatgcatgctctcatttaaa

SEQ ID NO: 70396 - DNA, 365 bp, Chicken  19866894343763_1
gaaggacctggttgttctggtggacaacaggatgatcatgaaccagcactgtgccctttgcagcccagaaggccactggtatcctgtgttgcattaaaaagagagcggtcagcagcttgaaggaggtgatcctccctctctactctaccctgatgaagccacatttagaatactgtgtccagttctgggcttcacagttcaaagaagacagggatctcctagaaagagtctagtggagggccacaaagataataaagagcctggagcatctcctgtatgaggaaaggatgagcaacctcrgtctgttcaggctggggaaaagaagactgaaggtggatctgataaatgtttatacatgtctaatg

SEQ ID NO: 70397 - DNA, 599 bp, Chicken  19866894343767_1
  misc_feature (1)..(185): n is any nucleotide
nnnnnnnnnnnnnnnnnnnnnnnnnnnnnnnnnnnnnnnnnnnnnnnnnnnnnnnnnnnnnnnnnnnnnnnnnnnnnnnnnnnnnnnnnnnnnnnnnnnnnnnnnnnnnnnnnnnnnnnnnnnnnnnnnnnnnnnnnnnnnnnnnnnnnnnnnnnnnnnnnnnnnnnnnnnnnnnnnnnnnnnnntcaggactgaagtgttttttgggaactgaaggactgaaagaaacaaagctgttctctcctggaacaaagccattcttaaatttgattttaactgtgtgtcattttttatttctcrttttcccttctcctccattttaaaagtagataaatacagtggagggaattcagcgctctgaaaatgttcctgtaagcactagggtcagagagatgaggcatgggcaggctttccctagctgattcccaaacctgtgcattatatatcaaataaattgagaacaatccccttttcaaggtcataattgttctcagtgattacagaccaccrtgtgtatggggaatattgtcagaatactgtggccctcaaaaacctccagtaggtttacccacacraggcatttcttatctcttccaagc

SEQ ID NO: 70398 - DNA, 561 bp, Chicken  19866894343767_2
tcaggactgaagtgttttttgggaactgaaggactgaaagaaacaaagctgttctctcctggaacaaagccattcttaaatttgattttaactgtgtgtcattttttatttctcrttttcccttctcctccattttaaaagtagataaatacagtggagggaattcagcgctctgaaaatgttcctgtaagcactagggtcagagagatgaggcatgggcaggctttccctagctgattcccaaacctgtgcattatatatcaaataaattgagaacaatccccttttcaaggtcataartgtgtatggggaatattgtcagaatactgtggccctcaaaaacctccagtaggtttacccacacraggcatttcttatctcttccaagccttctgtcttggtatccccctccgcacatctctggcatgcgaagaagactcagcctttgctgtgcttgtatttccccaagagactgaagcaaccaaattgcatttggatcagggttatgcaggatgaggaggtggggagagtcgaggaaagaggccacgtatggttcagatt

SEQ ID NO: 70399 - DNA, 496 bp, Chicken  19866894343767_3
tcaggactgaagtgttttttgggaactgaaggactgaaagaaacaaagctgttctctcctggaacaaagccattcttaaatttgattttaactgtgtgtcattttttatttctcrttttcccttctcctccattttaaaagtagataaatacagtggagggaattcagcgctctgaaaatgttcctgtaagcactagggtcagagagatgaggcatgggcaggctttccctagctgattcccaaacctgtgcattatatatcaaataaattgagaacaatccccttttcaaggtcataaraggcatttcttatctcttccaagccttctgtcttggtatccccctccgcacatctctggcatgcgaagaagactcagcctttgctgtgcttgtatttccccaagagactgaagcaaccaaattgcatttggatcagggttatgcaggatgaggaggtggggagagtcgaggaaagaggccacgtatggttcagatt

SEQ ID NO: 70400 - DNA, 600 bp, Chicken  19866894343777_1
gagtattgcttgggcagataaggaaaggcaccacagccaaaacgattcagcaaagtttgtagatgccaaagaaacttgatttgaagagccaaaaatataatccttttacattttctttaaactaggtcatagagctgtttagaagcaagtctccgaagtatctttaaatgaattcttctaaacaggaaaggtactgcaggtcacctgaaacaaaaaatatgctcattgatggttgtgggtgtgaggtttttcagtagggtaatttaatttttctttctgggtttcctattttagaagcaracttcatattcagttcactctgcaaaggaaaatagatagagcaaattacagcacagtgctgcaactaataacagcttatattgtaatgtgtctagcacaatatctgaaatgtaaccatgtttatcaaattaagctccttcagctaatttaaatgtttggatggcatttttgcgtataattattccctgtttaattttttccatgtggtctctccatgtaagttttaatattctttgaaggaagtttgccatctattttctgactagatgggaaaatcaaataattgaaatcttgttttaa

SEQ ID NO: 70401 - DNA, 600 bp, Chicken  19866894343782_1
taaacccaaggacaacctacatgtggtctgggagaagtggggtgggaaggcaggagctgatcactttagcatttgctgtcagccactaccaagcaataggacatcacctccaaggaaagctgttcccagccccgtggctttttctccgtgcacatctaagacgtgcttggtttaacagccagttatcaccagaagggacagcactgctcttgcccacaccaggcacgtgttctcgtgtcacttacattacatccagcccagtcagggctaagcacagtgctgggatcagcttgctgatcwggctgaaaaccgaccggggcaaatgaaaaaccaacatgagacttttagtccgtgagcaacytgatacgcagctaatccaaatcctgcagagctgcaggatcacagacccaggtgcaggcgagggcagcagacgcaggcagagttggcagggacaagcacctcctgctcacacaaattcacttagctcaggttaagcttatcaggaacaccttcagtagataagatggctgaaaccatgtaagaggtgagaaatcaggtgaacaggacaaaatgtggctttgctgttgtaagctgtgatgc

SEQ ID NO: 70402 - DNA, 600 bp, Chicken  19866894343782_2
cactttagcatttgctgtcagccactaccaagcaataggacatcacctccaaggaaagctgttcccagccccgtggctttttctccgtgcacatctaagacgtgcttggtttaacagccagttatcaccagaagggacagcactgctcttgcccacaccaggcacgtgttctcgtgtcacttacattacatccagcccagtcagggctaagcacagtgctgggatcagcttgctgatcwggctgaaaaccgaccggggcaaatgaaaaaccaacatgagacttttagtccgtgagcaacytgatacgcagctaatccaaatcctgcagagctgcaggatcacagacccaggtgcaggcgagggcagcagacgcaggcagagttggcagggacaagcacctcctgctcacacaaattcacttagctcaggttaagcttatcaggaacaccttcagtagataagatggctgaaaccatgtaagaggtgagaaatcaggtgaacaggacaaaatgtggctttgctgttgtaagctgtgatgctacccacccgttatcagcttcacaccagaaacacgtacatcacagcagaaatccacagagc

SEQ ID NO: 70403 - DNA, 599 bp, Chicken  19866894343787_1
  misc_feature (1)..(11): n is any nucleotide
nnnnnnnnnnnacgggcagtgtcctgggccagtttaccctgagtacttgtaagcaaagcgctgatgagatgtggcacttttcttctagcagagttagctattcttgaagtgcccttgagagcttgaagtatgctctaagctcctaccgaaatacatttcacaataaggaggaaagagagcagtgaaatggccatagcatatttctgctcaaggatcctgcaagcagacacaataagtctaggcagcagcaggagtttatgctgaactgaaggcataaaatccaggtgtgcactgaggtastgcccctatgcttgggggaatgtggatgagccaaagcataacggagcagctaagccaagctgtgaaatgtgagggcagtccattttcttagcacacagcgtgcagggaaactgtgcactttgcaaagtgtccccttcgctccattcagctttggtgtgagaaaactgtggaggcctgtatttcacaccttctttttttgctctgcatattcaaaatttcattctgcctcatacaattgtatcttgcgaagaacgaagttgaaaggcagattgttcttacactctagacccaagctcatt

SEQ ID NO: 70404 - DNA, 532 bp, Chicken  19866894343787_2
gcaaagtgtccccttcgctccattcagctttggtgtgagaaaactgtggaggcctgtatttcacaccttctttttttgctctgcatattcaaaatttcattctgcctcatacaattgtatcttgcgaagaacgaagttgaaaggcagattgttcttacactctagacccaagctcattaacactttatcattttcataattcattagtttcaatttcacaggaactgccaccagcagtgattttgtcatcatggccaaaatagattaaactctataggaaaccataaaattgtaatcctwggagaaagcatgagttgaatgcacaacagaagactatggacgaagtccaaaacagtgaagttttggctcttgttgaggaaaaaaaaaaaaaaaaacccaagaaaacacaacaagacagcaaaaacaaccaacagcttcatgaaagagtcactagaaagacatgaaagataaagtaggcctgggttgcccaagacagtctagaaagacatgaaagataaagtaggcctgggtt

SEQ ID NO: 70405 - DNA, 600 bp, Chicken  19866894343801_1
ctgaatggaaccagagatgcttcttctagcttattttcatgagcaatcctttagctggaaccctctgttgatctacaaaacaagtttccacaagctctgtggatgcatgcttgtcctgcactgccttagcaatgtgatcccttgcctgcagtcaatggcttgttgggatggagggacccacacccgtcttatgcccatttacccctaagctggtctgtgaagctgggatggatcacacatttcttaaagaggaagcctgatgtgctccattcaaataaatagtggagcagaaactctctrtagacctctacctgttcaggactgactttctctcatcctagcacatgctgagatgcagggtgggaaacacctacctgggggtactatatagcaattgcacagagctctgcactatgtggctcctcaacaaggagctatgcaggcttattatatcatacctgttagaaatccctcccttttcctcagtataaggtaaaacaatctgtgcagatacagggatggctgattcttctgatgctagatttgtcatgatttgtcaaacgtgacaattagcctgatagcaaacaattccttctttca

SEQ ID NO: 70406 - DNA, 600 bp, Chicken  19866894343803_1
tcctgcctttcctctctcccaccccacacctggccagctctgttttgtcatcctaactgtgatcctctcctttttcttccttcatccccttctggcaaagtccagattcctgtctaccacccccatccctcagccaggccctcaaagaccttcactgtccttcccaatgactccatccccagtgagaacgacaccagcttctcaccagggcctctccctctgcaggactgcaatttctgaagctattattgcagcttgggcattgcctgggcattgcctgggcagagcagggactggggkctgaatctgtgccccctctgaaaaagcctggctaatcaatgggaaagcaatactgtgggctgggagggtttgcaagttcagaggaggaacgtctgggccagaagggaagtggacctgttagaascatcgaatcatggaatggttgggttgaaagggacattaaagccccccaagccccaacccctgccttgggctggttgccccccaccagatcaggctgcccagggccccatccaacccatccttgggcacctccaggggagaaaaagaaccttccaaaggctctccaaagggaggaga

SEQ ID NO: 70407 - DNA, 564 bp, Chicken  19866894343803_2
atccctcagccaggccctcaaagaccttcactgtccttcccaatgactccatccccagtgagaacgacaccagcttctcaccagggcctctccctctgcaggactgcaatttctgaagctattattgcagcttgggcattgcctgggcattgcctgggcagagcagggactggggkctgaatctgtgccccctctgaaaaagcctggctaatcaatgggaaagcaatactgtgggctgggagggtttgcaagttcagaggaggaacgtctgggccagaagggaagtggacctgttagaascatcgaatcatggaatggttgggttgaaagggacattaaagccccccaagccccaacccctgccttgggctggttgccccccaccagatcaggctgcccagggccccatccaacccatccttgggcacctccaggggagaaaaagaaccttccaaaggctctccaaagggaggagagggggaaaatatcacagaggaaaaaaaagctgccgattggcatcgctgtgccctttggagaaaggctcatttgtgatcacagaccgtg

SEQ ID NO: 70408 - DNA, 600 bp, Chicken  19866894343824_1
cggtcctgcaaacactaagattaatttatctgatgctgaggctcgccgcttgtggttgcctgaactgtgatggtgtcagccgtgccaatgtgggcatctcgggtttggcgtcgttcctgtgcatgcttggcagctcccgtggctgtggccgggctgctgcagtgtgatggtataagctctgcgtgttttcgctttggggttggcaaaggagttggggtctgacgctgctttttatttcctcttcctggagaaaaaagcgtgtggaggggtatcatcctctgggagaaatcaaagcaatcyaagttatccgaagtgagtgcatgtggagcatttccctcaaatacagtstttgtatggatcctttccctcggttgcttgattttctgagaacatgctgcctgctctcttgtccttttccattgcttacgttaaccgtgcactagaacctgcaaataatttcctaatatagggtaagcaccccctaaagggtctgtgctgcagaagccacacttatccctccgacaagttctggtgccaggtgtaggtactgtggtctcagcatgtgggtccgatgcagcggtgtagtggtaattgagagaa

SEQ ID NO: 70409 - DNA, 600 bp, Chicken  19866894343824_2
cttgtggttgcctgaactgtgatggtgtcagccgtgccaatgtgggcatctcgggtttggcgtcgttcctgtgcatgcttggcagctcccgtggctgtggccgggctgctgcagtgtgatggtataagctctgcgtgttttcgctttggggttggcaaaggagttggggtctgacgctgctttttatttcctcttcctggagaaaaaagcgtgtggaggggtatcatcctctgggagaaatcaaagcaatcyaagttatccgaagtgagtgcatgtggagcatttccctcaaatacagtstttgtatggatcctttccctcggttgcttgattttctgagaacatgctgcctgctctcttgtccttttccattgcttacgttaaccgtgcactagaacctgcaaataatttcctaatatagggtaagcaccccctaaagggtctgtgctgcagaagccacacttatccctccgacaagttctggtgccaggtgtaggtactgtggtctcagcatgtgggtccgatgcagcggtgtagtggtaattgagagaagcgttcgaatatatgttcagccactgtcgctttgctgctggaatcctc

SEQ ID NO: 70410 - DNA, 600 bp, Chicken  19866894343824_3
ccaactcctgctgtgggcagggctgccctccaccagctcaggctgcccagggccccatccaacctggccttgatttttggggtaagaaaagctaattcttgtggtacaggaggttaaggaagtgattttgtatcacagacctaaaacaccatttcctttctgtggcgtttagcaaagatgtccttgacatctctctcatcattttaactccgggactcctgagctctgaatggaaggcaatgaagatgtggatggtggtaggcttaaaacatttttgttcttaaatccccactatttttmagtaggattttagaaatcaactgtatttyaatttggtttgtcaaagtataattactgcaaatgaggtaagaaaccaatttaaatatagcaagtgtagtggagaatccaattttcagaaatcagtagaaatataattggagtcattaagtgctgacttcagtaattaagagtcagcttttgacgtttcaggcttgtgttgctaattgcccatggagaagttagaaaaatattttgtttcctgcaaaataggttgctctccggatggggcttcagcagctttgtgcctgcctgggccgggcg

SEQ ID NO: 70411 - DNA, 600 bp, Chicken  19866894343824_4
ccaccagctcaggctgcccagggccccatccaacctggccttgatttttggggtaagaaaagctaattcttgtggtacaggaggttaaggaagtgattttgtatcacagacctaaaacaccatttcctttctgtggcgtttagcaaagatgtccttgacatctctctcatcattttaactccgggactcctgagctctgaatggaaggcaatgaagatgtggatggtggtaggcttaaaacatttttgttcttaaatccccactatttttmagtaggattttagaaatcaactgtatttyaatttggtttgtcaaagtataattactgcaaatgaggtaagaaaccaatttaaatatagcaagtgtagtggagaatccaattttcagaaatcagtagaaatataattggagtcattaagtgctgacttcagtaattaagagtcagcttttgacgtttcaggcttgtgttgctaattgcccatggagaagttagaaaaatattttgtttcctgcaaaataggttgctctccggatggggcttcagcagctttgtgcctgcctgggccgggcggacaggttggatgggccctgggcagcctg

SEQ ID NO: 70412 - DNA, 599 bp, Chicken  19866894343829_1
  misc_feature (1)..(223): n is any nucleotide
nnnnnnnnnnnnnnnnnnnnnnnnnnnnnnnnnnnnnnnnnnnnnnnnnnnnnnnnnnnnnnnnnnnnnnnnnnnnnnnnnnnnnnnnnnnnnnnnnnnnnnnnnnnnnnnnnnnnnnnnnnnnnnnnnnnnnnnnnnnnnnnnnnnnnnnnnnnnnnnnnnnnnnnnnnnnnnnnnnnnnnnnnnnnnnnnnnnnnnnnnnnnnnnnnnnnnnnnnnnnnnnttggcaaaacaaaaaggctgcatttgccaggaagcacatcagaccattcatgacggagaatgtcaattgcagtgacraatactccaagtgatatagcacttaaaacagcagcaagtctcagcagtccccagcgatcctcaatgacagcaaaggaccatgagcagagagcaagacaacaaaaagcattccctgccaccaccatttcagcttaacttctgcttctgttactaccgtaaytccatctgcattgcctggctgatctaataccttatcatgagaggttatatgatttcttttccagacagtatcccwattctgaatattctcttcactgcaatgtttctatgaaatctggctggctccagggtacaatttc

SEQ ID NO: 70413 - DNA, 599 bp, Chicken  19866894343829_2
  misc_feature (1)..(63): n is any nucleotide
nnnnnnnnnnnnnnnnnnnnnnnnnnnnnnnnnnnnnnnnnnnnnnnnnnnnnnnnnnnnnnnttggcaaaacaaaaaggctgcatttgccaggaagcacatcagaccattcatgacggagaatgtcaattgcagtgacraatactccaagtgatatagcacttaaaacagcagcaagtctcagcagtccccagcgatcctcaatgacagcaaaggaccatgagcagagagcaagacaacaaaaagcattccctgccaccaccatttcagcttaacttctgcttctgttactaccgtaaytccatctgcattgcctggctgatctaataccttatcatgagaggttatatgatttcttttccagacagtatcccwattctgaatattctcttcactgcaatgtttctatgaaatctggctggctccagggtacaatttcttgtctctgttttcagcaactaaatccagattgaagatgttaaaagtgtaacagaactaataggaaagaaataggctgtacttgccaaagagatggtatttgatcagcagtgtgatggaaaggggtacaacaccatagttgcttctctggtacttctgct

SEQ ID NO: 70414 - DNA, 600 bp, Chicken  19866894343829_3
aaaggctgcatttgccaggaagcacatcagaccattcatgacggagaatgtcaattgcagtgacraatactccaagtgatatagcacttaaaacagcagcaagtctcagcagtccccagcgatcctcaatgacagcaaaggaccatgagcagagagcaagacaacaaaaagcattccctgccaccaccatttcagcttaacttctgcttctgttactaccgtaaytccatctgcattgcctggctgatctaataccttatcatgagaggttatatgatttcttttccagacagtatcccwattctgaatattctcttcactgcaatgtttctatgaaatctggctggctccagggtacaatttcttgtctctgttttcagcaactaaatccagattgaagatgttaaaagtgtaacagaactaataggaaagaaataggctgtacttgccaaagagatggtatttgatcagcagtgtgatggaaaggggtacaacaccatagttgcttctctggtacttctgctatttccaaacataccagctggatcttgcccactctgtcaacattttaagaactccatttacaagttctgtgataga

SEQ ID NO: 70415 - DNA, 600 bp, Chicken  19866894343839_1
tcgtccatgcacagcgctgggcaggatcaatgagaaccaggagggaggatgcagatacacgtcttaatagctatggcaagactgagagatagagaggtggtgtcccatgagtatgaactgaggctggagaaatatgtctagtctcagtggagttgcttcctaatacagtggaaagaacctgttagaagacacgagattttccccatatgttgcctggcagaagaagagctctgtggccctttcccacggaaaaggatgacagacatcccacagggctgcctggatgcagagtagggcatrcagtgggatgtggtgaagaacagggcagcygaggcccctcatttgactaaccttatcagagggaagaaattcatccttttatcccttagtaaatatgctaagtataatctaccacagaagtaattatttctctcagctccatagattcattaaggagatgttccccaagatcataaatatttaagtttcttagatacaggtgaaaactatgttatttatacacatgggacagaagaaccagctcagtctgcatgtggcaagagaactgtatagcagaaggaaaatatgcccacagagata

SEQ ID NO: 70416 - DNA, 600 bp, Chicken  19866894343839_2
tgagaaccaggagggaggatgcagatacacgtcttaatagctatggcaagactgagagatagagaggtggtgtcccatgagtatgaactgaggctggagaaatatgtctagtctcagtggagttgcttcctaatacagtggaaagaacctgttagaagacacgagattttccccatatgttgcctggcagaagaagagctctgtggccctttcccacggaaaaggatgacagacatcccacagggctgcctggatgcagagtagggcatrcagtgggatgtggtgaagaacagggcagcygaggcccctcatttgactaaccttatcagagggaagaaattcatccttttatcccttagtaaatatgctaagtataatctaccacagaagtaattatttctctcagctccatagattcattaaggagatgttccccaagatcataaatatttaagtttcttagatacaggtgaaaactatgttatttatacacatgggacagaagaaccagctcagtctgcatgtggcaagagaactgtatagcagaaggaaaatatgcccacagagataaggctttctgagcagatattgaatccaggt

SEQ ID NO: 70417 - DNA, 600 bp, Chicken  19866894343844_1
cctacttttagcccttttcagagcagcaaaagcgagtaacatgaagtcccagtacagctgaaatctggttttgttaagctgcggtgtcaatcaggttggctaagctgacctggcttctgagatggtatgagtttgtttattttagtttattttgtaaatgtcctcctttgcaaatacaatcttaaaaatctagggaactataaaaaggaaacctttaagcatccttttctgtccacctttctgaactaccttgcttagggactgcttaggaggatggattgacccaggatgctgtgggartgctgcacccggttaaggtctcgcattcctcttctgcgtgcatttaaggatgagaggtgcctggcagtatcgaatacttcagtgaacagatcttctcctcctagcaagcaatttgctccccaccctgccccctgcacactgctgcctttgaagagtaatgagggctgggtcagcccagcctttttacgggcattttctttctttggggatccacggctcacccaaaagaaaattaaatcacctcctaaaggacggggatatttatttctttgaagtaaatcaagccatgctgccaaacaa

SEQ ID NO: 70418 - DNA, 600 bp, Chicken  19866894343852_1
ggagggaataggatgatgatacagtcatttgcaagccagctgtctttcttaaggcaatttagtgttcatttcgccttcaaattccaccttcctagtctgtggcagaaaggatattgttgctgctgcagcaccacagaaactgcttttaaaacggctcaggttccacattattctcaggaagccaagtcttgctcaggatttgttagtggttgtgttttgtccagagctcactgtctgtcttggtgggagctgagcagtaccacttgtaggcaggagcttctgcaaaaactggatacaggwgtccccttaaggtgccccctaagtcacatcacggctgctggagctgctgtgtgaacaagtgttaccatccaacatgtcaccataygcactgcttccttctccggtgtacacaactgttagcaaatcttggggatcttcatcgtggttctccagcacctctaactgaggcatgctagggtctctcaaatactggaaaatggcagaaacaacagtttagctactgagccacagaataggtatattagaagttacagagacagagtaagtactactgactataggcaagctgttttagaatgg

SEQ ID NO: 70419 - DNA, 600 bp, Chicken  19866894343852_2
accttcctagtctgtggcagaaaggatattgttgctgctgcagcaccacagaaactgcttttaaaacggctcaggttccacattattctcaggaagccaagtcttgctcaggatttgttagtggttgtgttttgtccagagctcactgtctgtcttggtgggagctgagcagtaccacttgtaggcaggagcttctgcaaaaactggatacaggwgtccccttaaggtgccccctaagtcacatcacggctgctggagctgctgtgtgaacaagtgttaccatccaacatgtcaccataygcactgcttccttctccggtgtacacaactgttagcaaatcttggggatcttcatcgtggttctccagcacctctaactgaggcatgctagggtctctcaaatactggaaaatggcagaaacaacagtttagctactgagccacagaataggtatattagaagttacagagacagagtaagtactactgactataggcaagctgttttagaatggagttcgaagtactaattagatgtatatttattttattctggatttccttgaaggagataagaaccaaacaaggagaaggttaaaa

SEQ ID NO: 70420 - DNA, 600 bp, Chicken  19866894343863_1
gtctgaggtaaaagggtggttaacttaatgttctccataagcacctccatttcccttttctcctcagccacttcagtagtcatttttgtatcttcagtctctagggttgcttcctcccaagcagggacctttgttttggtgacagccacttcagtaactgaactctcaaaaacagaaggtttaagagtaactttagcagatgatagttccacactgtcagttttcagagttgtaaccagcttaacagttgtaggctctgatacaatttttttcccttaaaaaaaaaaaaaaaaaaaaaaragagaataaagaaaagttaaggaatcattcagtaatattacaaatactttcaattagttcacatgttcctagaagaaattacatgttacactgagaaataagtatagaggcaaaaagctttagataactgttgagcatacaactgagctctgagtgacataaatatcatattatttaagttccatgtaacttaatgtcagatgaaatgagaacaggagcagttgtttatataattatccctgggtgtcctaatactatacaagtatctatttgacagctaagtactgatcaggaaatata

SEQ ID NO: 70421 - DNA, 600 bp, Chicken  19866894343868_1
gcatagttttattttagttggtgttataatgtggagataaatgctttgtataattaacaaaaggagctaaatagatgactatcacagacagaaaagcatctctttcttttgtaacctgttgaagcgtttaggtgtccttcaaatcctgccagtagctatttgtatcttttgttctttcagaaaattaagaagcatgcaatttagatgaaatttttactttttgttggcttgtaaagtataaaattaacttaatctgagaatttatattccttgggtacatgttttcctgttgctaatctrtttttttttttttttttcccaaaggttatttacatgcaggtggtacttttagtttgcagtgcagtaaaaggagacatctgtactcttttcccacaaggagattacatgaatttaaaaagtcaaacaccaacaaaagttaggcttgcagatgccacaagaaggaagtaagttattttaatctttaaatcatagaatcatagaatgacctgcgttgaaaagaaccacaacgaacatctagtttcaacccccttgctagctgcaaggtcgccaactgctagaccaggctgcccagagccacgt

SEQ ID NO: 70422 - DNA, 600 bp, Chicken  19866894343868_2
catagttttattttagttggtgttataatgtggagataaatgctttgtataattaacaaaaggagctaaatagatgactatcacagacagaaaagcatctctttcttttgtaacctgttgaagcgtttaggtgtccttcaaatcctgccagtagctatttgtatcttttgttctttcagaaaattaagaagcatgcaatttagatgaaatttttactttttgttggcttgtaaagtataaaattaacttaatctgagaatttatattccttgggtacatgttttcctgttgctaatcttrttttttttttttttttcccaaaggttatttacatgcaggtggtacttttagtttgcagtgcagtaaaaggagacatctgtactcttttcccacaaggagattacatgaatttaaaaagtcaaacaccaacaaaagttaggcttgcagatgccacaagaaggaagtaagttattttaatctttaaatcatagaatcatagaatgacctgcgttgaaaagaaccacaacgaacatctagtttcaacccccttgctagctgcaaggtcgccaactgctagaccaggctgcccagagccacgtc

SEQ ID NO: 70423 - DNA, 600 bp, Chicken  19866894343868_3
atagttttattttagttggtgttataatgtggagataaatgctttgtataattaacaaaaggagctaaatagatgactatcacagacagaaaagcatctctttcttttgtaacctgttgaagcgtttaggtgtccttcaaatcctgccagtagctatttgtatcttttgttctttcagaaaattaagaagcatgcaatttagatgaaatttttactttttgttggcttgtaaagtataaaattaacttaatctgagaatttatattccttgggtacatgttttcctgttgctaatctttrtttttttttttttttcccaaaggttatttacatgcaggtggtacttttagtttgcagtgcagtaaaaggagacatctgtactcttttcccacaaggagattacatgaatttaaaaagtcaaacaccaacaaaagttaggcttgcagatgccacaagaaggaagtaagttattttaatctttaaatcatagaatcatagaatgacctgcgttgaaaagaaccacaacgaacatctagtttcaacccccttgctagctgcaaggtcgccaactgctagaccaggctgcccagagccacgtcc

SEQ ID NO: 70424 - DNA, 520 bp, Chicken  19866894343872_1
atggaaagtgagaaagaaacaagcactgtgatagagctgtggtataacgagacctgttcaacccacagcctgcaggctcgatgcactgcaccatggcctccctgtccagccccagctcatagaatgattcatagaatcatagtggtccttttcaactcaggccactctatgattctatgattctgtgattctatgattctatgaacatttcacattttgataccttggaggaacacagccttgtgaacagcaaaaaaatatgcagactcactttccatttgagtaaaggaattcaagaawaggtttcaagattgctgtaaaaagaaatcactgtttttttggcatatttgcaactccattttaagtcaacacagatacatgggctgtgaatttccaaatggactgtacagaactgcaatcaagcattcaactcaagagaaaaatctcatcatgcctctttaccagatctttataagctccatcttaagagagagaaatactgctcgcttcacagtcacac

SEQ ID NO: 70425 - DNA, 600 bp, Chicken  19866894343888_1
catgccagtaaaacttctactcctgtcaccagaaaatgaagaagatgtgaaaataaagattatctttaagtcgtgtctaaatcttttggttgacttagagataatagcctatctactccagctatccaccactttgaaggctgtattcagactctatcagggctttgcaggcttccttttagtgctttaacctagattattgaaattgtattttctgtttaagccaatgctttagacagacttacagtgatccctgctagtgtgaccacctaatgatattcctcctgggttgcttttttwatcctgttttggcttgatccattytgtttagctcagaactcagrtttgtgtttagtgagggagttgtcttgttatgcagagggtgccctgacattcagtaaatgtacatttgattcataaagccaagagtattgttaattgagtgggggagacattcagaaatgcctttccttgaggaatacgtatctgaaccacacctgataccatctcaggaatggatttatttttcttgctgtgctcagggaagtgtgartttacgtaaaagcgcttcttttatctttgctgtgctctgtatgaatg

SEQ ID NO: 70426 - DNA, 600 bp, Chicken  19866894343888_2
gtcaccagaaaatgaagaagatgtgaaaataaagattatctttaagtcgtgtctaaatcttttggttgacttagagataatagcctatctactccagctatccaccactttgaaggctgtattcagactctatcagggctttgcaggcttccttttagtgctttaacctagattattgaaattgtattttctgtttaagccaatgctttagacagacttacagtgatccctgctagtgtgaccacctaatgatattcctcctgggttgcttttttwatcctgttttggcttgatccattytgtttagctcagaactcagrtttgtgtttagtgagggagttgtcttgttatgcagagggtgccctgacattcagtaaatgtacatttgattcataaagccaagagtattgttaattgagtgggggagacattcagaaatgcctttccttgaggaatacgtatctgaaccacacctgataccatctcaggaatggatttatttttcttgctgtgctcagggaagtgtgartttacgtaaaagcgcttcttttatctttgctgtgctctgtatgaatgtcggtatgctctrttagagtgaaa

SEQ ID NO: 70427 - DNA, 600 bp, Chicken  19866894343888_3
atgtgaaaataaagattatctttaagtcgtgtctaaatcttttggttgacttagagataatagcctatctactccagctatccaccactttgaaggctgtattcagactctatcagggctttgcaggcttccttttagtgctttaacctagattattgaaattgtattttctgtttaagccaatgctttagacagacttacagtgatccctgctagtgtgaccacctaatgatattcctcctgggttgcttttttwatcctgttttggcttgatccattytgtttagctcagaactcagrtttgtgtttagtgagggagttgtcttgttatgcagagggtgccctgacattcagtaaatgtacatttgattcataaagccaagagtattgttaattgagtgggggagacattcagaaatgcctttccttgaggaatacgtatctgaaccacacctgataccatctcaggaatggatttatttttcttgctgtgctcagggaagtgtgartttacgtaaaagcgcttcttttatctttgctgtgctctgtatgaatgtcggtatgctctrttagagtgaaaaagtgcatggcaattaattg

SEQ ID NO: 70428 - DNA, 600 bp, Chicken  19866894343888_4
ctgctagtgtgaccacctaatgatattcctcctgggttgcttttttwatcctgttttggcttgatccattytgtttagctcagaactcagrtttgtgtttagtgagggagttgtcttgttatgcagagggtgccctgacattcagtaaatgtacatttgattcataaagccaagagtattgttaattgagtgggggagacattcagaaatgcctttccttgaggaatacgtatctgaaccacacctgataccatctcaggaatggatttatttttcttgctgtgctcagggaagtgtgartttacgtaaaagcgcttcttttatctttgctgtgctctgtatgaatgtcggtatgctctrttagagtgaaaaagtgcatggcaattaattgaagtccgggtgggatattggttactcaacaactttcacctagctaatgaaacaaggagtgtaaaaacacaatttcaattgtatctccagaagcaaaacaggagctgtgttccatacttacattgcagaaaactactttggcatgacttggaccagtagagttgctttcatttgctataataactaacttgtagcaaatagaacagatgc

SEQ ID NO: 70429 - DNA, 600 bp, Chicken  19866894343888_5
ttgatccattytgtttagctcagaactcagrtttgtgtttagtgagggagttgtcttgttatgcagagggtgccctgacattcagtaaatgtacatttgattcataaagccaagagtattgttaattgagtgggggagacattcagaaatgcctttccttgaggaatacgtatctgaaccacacctgataccatctcaggaatggatttatttttcttgctgtgctcagggaagtgtgartttacgtaaaagcgcttcttttatctttgctgtgctctgtatgaatgtcggtatgctctrttagagtgaaaaagtgcatggcaattaattgaagtccgggtgggatattggttactcaacaactttcacctagctaatgaaacaaggagtgtaaaaacacaatttcaattgtatctccagaagcaaaacaggagctgtgttccatacttacattgcagaaaactactttggcatgacttggaccagtagagttgctttcatttgctataataactaacttgtagcaaatagaacagatgctctcttctagcaattaaaatttaaaaatagtgtaattattttcacagcgcaacaatccag

SEQ ID NO: 70430 - DNA, 600 bp, Chicken  19866894343891_1
gatttcttctttgtgaacccatgttgatggctcctgataaccttcttctcctccacttgcttggaagtgacatccagagcaagttgttcaatcccctttccagggacagaggtgaggctgactggcctgtagtttccccgctcctcctccctgccctttttgaagactagagtgacgttggctatcctccagccttcaggcacctctcctattctccatgagcttttcaagaagatagagagcagctcagcaatcacttctgccagctttctcagctcttgtatctgcatcccatcgggkcccatggatttgtgtgcatagagtttgcttagacaatctctgaccagatcctctttgaccacggggaagtcttcctctgcccagactctctctcttacctccagggcctggtattcttgaagggcagtcttagcagtaaagagtgaagcaaagaagagttaatggaaagtatggaaacatacatagagttatgtgtgacactgaagactgctgtctgctagatattattgttgtgcactggcatgtagataaatagcatacttcattgtattgtatccatatttcaatttattaacatct

SEQ ID NO: 70431 - DNA, 535 bp, Chicken  19866894343899_1
agctaggcagcttgaacatagaggaaaccaaaagcatggaaacaggatgaggtggaagtccctttggttaggtgacatggctgtatagattcaatgtctaaaatcccctgcaagaagacagtgacatagagtcactgactgcagttaactgtgggatttcctgaaggccagatgtaggaatgcctgaaagaacacatttgagcataattagaggctttttgaaattaagataaaacttgatctacaaagtctgtacacttggatctcatgttgcactacaccccctggagtaggccttcrtcttacatttacatcaggatgttaggcaatatgccaccacctacaatttacttgggatatggtgactgttaattcttaaagtgtggattgaagcaatgtgctaaaacgttttagaagatttcctgtctgataaaatttcctgtctgatatttggtcattaggctgaaaagggttatgtacctcaaaggaaggtggtaataaacattgcgaaagtgtaagggaaagggtattgtaa

SEQ ID NO: 70432 - DNA, 600 bp, Chicken  19866894343907_1
agatgtcaaattctccctgcagagaattttagagcaaatactttacataagattaacagctgtttgctgtgttttttatccacaaaatctctcaattagtatttgcagaagcaaattggctactgtaaaatgctgccaaaggctacatattgcagaagtttgtttgaaattgaaagcaggaaattagataaaaaaaagtctttgaaacatgccaagtacttgcacaacaagttttatttgtgaaatttaaactgcaagccctaaagaatgaggtcttttaaagtaaagaaaatgaaaagkataaaaagaaacctgaatttaaaaagataaaagtttcaaatctaatcaacatttgtccatttcctccactggtaatatagattgttctgtgagaaatttttcaagatcaaatgctttgtttagattattcctggtcttttctattaaataaagtaacaaacattttgttagaaaacagtaacaataaaaaattaaaccaaacatctgataaatgtaaaattaaaatatcttctgaagtgttaatgcatttttctaatccagcttcttcgtcgctaaatgaaatgcatgaaatacaaaaat

SEQ ID NO: 70433 - DNA, 600 bp, Chicken  19866894343912_1
gtagttaaggggaagccctcttgtctcccccagcagactggttgtagctatgagcttggaaacagtcccagactgcttaaaactgaagggagaaggggcacgccaagatgcttgctctgtctaacgagggctgtgggagtggcagtctgggtgcaaatggctggagaatgcagctcacttctggattgccacattgcctaattttagcatttttaaatgcagtttatttgtttgtgcttccttaaggagtgtagtcagcgaggtgtttgtgtcagctctaggacactggtctcacaaggygctactgcaatttgcttaattcatgttgtctattcagtgtataatggataaccaagaatcaataaaaagatgtgccctcacacctgtcrccatcctctgaggcagggatgtttcttgtttttctacagcagaaatgcagctttacactcatgggcattgctactctcacctagatccccaccttgcagagtctcagcgctgaayccttccccagcacctttgctcctatgytagtagacataactcaacccttaatccctgacataactcaacccttcaaccctcaaccagactcaaccc

SEQ ID NO: 70434 - DNA, 600 bp, Chicken  19866894343912_2
gagaaggggcacgccaagatgcttgctctgtctaacgagggctgtgggagtggcagtctgggtgcaaatggctggagaatgcagctcacttctggattgccacattgcctaattttagcatttttaaatgcagtttatttgtttgtgcttccttaaggagtgtagtcagcgaggtgtttgtgtcagctctaggacactggtctcacaaggygctactgcaatttgcttaattcatgttgtctattcagtgtataatggataaccaagaatcaataaaaagatgtgccctcacacctgtcrccatcctctgaggcagggatgtttcttgtttttctacagcagaaatgcagctttacactcatgggcattgctactctcacctagatccccaccttgcagagtctcagcgctgaayccttccccagcacctttgctcctatgytagtagacataactcaacccttaatccctgacataactcaacccttcaaccctcaaccagactcaacccttcatcccagctgtcccttaccacagccctgcacccacctcttcttcctatctctgttcttaatattactctgtcttgagaaaaatata

SEQ ID NO: 70435 - DNA, 600 bp, Chicken  19866894343912_3
tagcatttttaaatgcagtttatttgtttgtgcttccttaaggagtgtagtcagcgaggtgtttgtgtcagctctaggacactggtctcacaaggygctactgcaatttgcttaattcatgttgtctattcagtgtataatggataaccaagaatcaataaaaagatgtgccctcacacctgtcrccatcctctgaggcagggatgtttcttgtttttctacagcagaaatgcagctttacactcatgggcattgctactctcacctagatccccaccttgcagagtctcagcgctgaayccttccccagcacctttgctcctatgytagtagacataactcaacccttaatccctgacataactcaacccttcaaccctcaaccagactcaacccttcatcccagctgtcccttaccacagccctgcacccacctcttcttcctatctctgttcttaatattactctgtcttgagaaaaatataaaaatccagcygaccttgctgctgctctatgtaagctctttcacatactccaccccagtgtggttctgttcatgcccatggtttccctgagcctaagcactctgggatacaaacc

SEQ ID NO: 70436 - DNA, 600 bp, Chicken  19866894343912_4
ttgtgcttccttaaggagtgtagtcagcgaggtgtttgtgtcagctctaggacactggtctcacaaggygctactgcaatttgcttaattcatgttgtctattcagtgtataatggataaccaagaatcaataaaaagatgtgccctcacacctgtcrccatcctctgaggcagggatgtttcttgtttttctacagcagaaatgcagctttacactcatgggcattgctactctcacctagatccccaccttgcagagtctcagcgctgaayccttccccagcacctttgctcctatgytagtagacataactcaacccttaatccctgacataactcaacccttcaaccctcaaccagactcaacccttcatcccagctgtcccttaccacagccctgcacccacctcttcttcctatctctgttcttaatattactctgtcttgagaaaaatataaaaatccagcygaccttgctgctgctctatgtaagctctttcacatactccaccccagtgtggttctgttcatgcccatggtttccctgagcctaagcactctgggatacaaacccaatgaccaccttgtgtctgccctgtg

SEQ ID NO: 70437 - DNA, 600 bp, Chicken  19866894343912_5
ggcagggatgtttcttgtttttctacagcagaaatgcagctttacactcatgggcattgctactctcacctagatccccaccttgcagagtctcagcgctgaayccttccccagcacctttgctcctatgytagtagacataactcaacccttaatccctgacataactcaacccttcaaccctcaaccagactcaacccttcatcccagctgtcccttaccacagccctgcacccacctcttcttcctatctctgttcttaatattactctgtcttgagaaaaatataaaaatccagcygaccttgctgctgctctatgtaagctctttcacatactccaccccagtgtggttctgttcatgcccatggtttccctgagcctaagcactctgggatacaaacccaatgaccaccttgtgtctgccctgtggcagtggtctagtggagcaagataacaatccacgtgattatttaatttagataagattgtaccacacacagaggcaggactgaattaaattgtgttgggaatctcaattgcgatagttgctaggagtttttttaattttacactttcattaatacagtgcttagtgcag

SEQ ID NO: 70438 - DNA, 599 bp, Chicken  19866894343914_1
  misc_feature (1)..(86): n is any nucleotide
nnnnnnnnnnnnnnnnnnnnnnnnnnnnnnnnnnnnnnnnnnnnnnnnnnnnnnnnnnnnnnnnnnnnnnnnnnnnnnnnnnnnnnggctgcccagcaagcagctgcctgccggtgtcctcaccatggccctcacagctcagccaccccttcctctgcctcctcttcctcagccagggaagctggggggcctcgcacttatgcagcaccccctggggcagctctgtgagacctggcaccttcccggctctcctttggggaccttcagaatcctctgaagccaggagggaataaacagccrcaaagtgagttttgaaataaaaaaataaaaatgtgaaatatgtagtatataaaaaagaaagttattaaaaacttaagataagatcaaaacattccagacattacgctcagtgttcctgcagagctgtgtaaaaaatgctggagctttacaaaagggagcagcagaagagttcatatatgtcaaatacttttgaccttgcagcccattaacgtaacaaattaaaaacaacagacgatggtctcgctctgatactgcagcacagttgcatgttcaaaggctgaaaatgtttgtgattttta

SEQ ID NO: 70439 - DNA, 600 bp, Chicken  19866894343915_1
ttttggaacagttttctctctgtcatttggtggcttgcagctttgctccaagcgagcttaagtcaactgttggttctattttctgtctgatcctgggtgtttcaaagtgaattgcaatgcagggtgtcacagaacaagcattaatatagtgccagccagtgattaatgtcccatcactgcagaacgagtgataagcaatgtgtgcagcctttcctgtatgggaaaggggtcatgggaagaactgtagagttggctagctgcagaggaagagagcattgccaaaaagcacctcaatagttygagtgttttagaaaatccaggtgtcctttcagcttaaataggtgaccacagtgaacagagttgcagaggaagttccccagtgcttttgagtgcttgctagtgctggagtgtgtgaagrgtaaatgaaaactgctgagttctcagactctgtactgaacttttattgcttggttttgaaaccacagatttcctcctttttactcttccctcgaattaagctgttttgaatcaatggctatttgtcacacccaagcaagaccacaggcttctgtaaggctacccttcagtcagcctgtgcca

SEQ ID NO: 70440 - DNA, 578 bp, Chicken  19866894343915_2
gcagggtgtcacagaacaagcattaatatagtgccagccagtgattaatgtcccatcactgcagaacgagtgataagcaatgtgtgcagcctttcctgtatgggaaaggggtcatgggaagaactgtagagttggctagctgcagaggaagagagcattgccaaaaagcacctcaatagttygagtgttttagaaaatccaggtgtcctttcagcttaaataggtgaccacagtgaacagagttgcagaggaagttccccagtgcttttgagtgcttgctagtgctggagtgtgtgaagrgtaaatgaaaactgctgagttctcagactctgtactgaacttttattgcttggttttgaaaccacagatttcctcctttttactcttccctcgaattaagctgttttgaatcaatggctatttgtcacacccaagcaagaccacaggcttctgtaaggctacccttcagtcagcctgtgccagtgctgcttgctgagctggcagcctacatcttgcttttgcatagggtgttcatactcagagatctcccccaaccctgcaagcattgatctgtgggc

SEQ ID NO: 70441 - DNA, 353 bp, Chicken  19866894343918_1
tgcacctataggatcatttcttaacacttttctgagagtctaattcatgcacagctttggtttgaaacttcagcaagctttttgggttgccttatgggagtttttttcatatcccatgaaaaaaaggaaagcaatctaagcaattgaaagaggaaatccattctccgttcatgttttgtagtgtcctaaaagcaagaatttgaaagcatgaggaatatctagaaaactaggccaagtatttctgagctcttgctgcatactgtggcggtgagtgagagtatgccagtgctctgagatggraaacaagaaatatagatctagtgaggtctttatgtaagaatgcagatgcacgt

SEQ ID NO: 70442 - DNA, 599 bp, Chicken  19866894343919_1
  misc_feature (1)..(129): n is any nucleotide
nnnnnnnnnnnnnnnnnnnnnnnnnnnnnnnnnnnnnnnnnnnnnnnnnnnnnnnnnnnnnnnnnnnnnnnnnnnnnnnnnnnnnnnnnnnnnnnnnnnnnnnnnnnnnnnnnnnnnnnnnnnnnnnnncagggatggacattcagcaaattgccaaaatggtggagagagaggattccaaatctctctttttttttttatttatgttaacgagcagaagtgtttgtaataaagatgttttgggaaataacgaccagcatggcgcagtagcgtgatagttgtctttaattatggatgatwtatgaagtggttctgtatttctgaaggtgagtcagaggggttgaggtttattcctatgtatacccttcyccacrtgttttggagtagtttctttaagattagggtggctgaagggggatatcttctattccccttacatcagagacccgaaaataaccctaaaaatgaatctggtaactgaacaggatgtggagattgcatgaaagctttcatctcatcagtgcttgcactgtgccagtgttggctggggtacctgatactctgaaactcatcagtgacaaagcagatgcagggkatgg

SEQ ID NO: 70443 - DNA, 599 bp, Chicken  19866894343919_2
  misc_feature (1)..(60): n is any nucleotide
nnnnnnnnnnnnnnnnnnnnnnnnnnnnnnnnnnnnnnnnnnnnnnnnnnnnnnnnnnnncagggatggacattcagcaaattgccaaaatggtggagagagaggattccaaatctctctttttttttttatttatgttaacgagcagaagtgtttgtaataaagatgttttgggaaataacgaccagcatggcgcagtagcgtgatagttgtctttaattatggatgatwtatgaagtggttctgtatttctgaaggtgagtcagaggggttgaggtttattcctatgtatacccttcyccacrtgttttggagtagtttctttaagattagggtggctgaagggggatatcttctattccccttacatcagagacccgaaaataaccctaaaaatgaatctggtaactgaacaggatgtggagattgcatgaaagctttcatctcatcagtgcttgcactgtgccagtgttggctggggtacctgatactctgaaactcatcagtgacaaagcagatgcagggkatggaacatcacaaccaactttayctacattgtatccctgtgaaagaaaggaagaggtayaatgaacagcttt

SEQ ID NO: 70444 - DNA, 599 bp, Chicken  19866894343919_3
  misc_feature (1)..(55): n is any nucleotide
nnnnnnnnnnnnnnnnnnnnnnnnnnnnnnnnnnnnnnnnnnnnnnnnnnnnnnncagggatggacattcagcaaattgccaaaatggtggagagagaggattccaaatctctctttttttttttatttatgttaacgagcagaagtgtttgtaataaagatgttttgggaaataacgaccagcatggcgcagtagcgtgatagttgtctttaattatggatgatwtatgaagtggttctgtatttctgaaggtgagtcagaggggttgaggtttattcctatgtatacccttcyccacrtgttttggagtagtttctttaagattagggtggctgaagggggatatcttctattccccttacatcagagacccgaaaataaccctaaaaatgaatctggtaactgaacaggatgtggagattgcatgaaagctttcatctcatcagtgcttgcactgtgccagtgttggctggggtacctgatactctgaaactcatcagtgacaaagcagatgcagggkatggaacatcacaaccaactttayctacattgtatccctgtgaaagaaaggaagaggtayaatgaacagcttttgtgc

SEQ ID NO: 70445 - DNA, 600 bp, Chicken  19866894343919_4
tgatwtatgaagtggttctgtatttctgaaggtgagtcagaggggttgaggtttattcctatgtatacccttcyccacrtgttttggagtagtttctttaagattagggtggctgaagggggatatcttctattccccttacatcagagacccgaaaataaccctaaaaatgaatctggtaactgaacaggatgtggagattgcatgaaagctttcatctcatcagtgcttgcactgtgccagtgttggctggggtacctgatactctgaaactcatcagtgacaaagcagatgcagggkatggaacatcacaaccaactttayctacattgtatccctgtgaaagaaaggaagaggtayaatgaacagcttttgtgcctttggactgctctgttcagagtcgctcattgtagtatcaaatacaggaggaggaccaccaaacttagctctgagtcttacatcagaaatgctcactgaagtgatatttctgcagccaggaactggaaggctcattctgatcacctcatgtcctacacctccagagggagcgtgtatgtatgtactgaagtgtgtagtgcaaggcctggtcaggtattgaca

SEQ ID NO: 70446 - DNA, 600 bp, Chicken  19866894343919_5
tctgaaggtgagtcagaggggttgaggtttattcctatgtatacccttcyccacrtgttttggagtagtttctttaagattagggtggctgaagggggatatcttctattccccttacatcagagacccgaaaataaccctaaaaatgaatctggtaactgaacaggatgtggagattgcatgaaagctttcatctcatcagtgcttgcactgtgccagtgttggctggggtacctgatactctgaaactcatcagtgacaaagcagatgcagggkatggaacatcacaaccaactttayctacattgtatccctgtgaaagaaaggaagaggtayaatgaacagcttttgtgcctttggactgctctgttcagagtcgctcattgtagtatcaaatacaggaggaggaccaccaaacttagctctgagtcttacatcagaaatgctcactgaagtgatatttctgcagccaggaactggaaggctcattctgatcacctcatgtcctacacctccagagggagcgtgtatgtatgtactgaagtgtgtagtgcaaggcctggtcaggtattgacacacaaagaaaaagtacagcgaggc

SEQ ID NO: 70447 - DNA, 600 bp, Chicken  19866894343919_6
atgtatacccttcyccacrtgttttggagtagtttctttaagattagggtggctgaagggggatatcttctattccccttacatcagagacccgaaaataaccctaaaaatgaatctggtaactgaacaggatgtggagattgcatgaaagctttcatctcatcagtgcttgcactgtgccagtgttggctggggtacctgatactctgaaactcatcagtgacaaagcagatgcagggkatggaacatcacaaccaactttayctacattgtatccctgtgaaagaaaggaagaggtayaatgaacagcttttgtgcctttggactgctctgttcagagtcgctcattgtagtatcaaatacaggaggaggaccaccaaacttagctctgagtcttacatcagaaatgctcactgaagtgatatttctgcagccaggaactggaaggctcattctgatcacctcatgtcctacacctccagagggagcgtgtatgtatgtactgaagtgtgtagtgcaaggcctggtcaggtattgacacacaaagaaaaagtacagcgaggctgtgtcttatttctacctgtaggaagatgaatgcat

SEQ ID NO: 70448 - DNA, 600 bp, Chicken  19866894343933_1
tactcaaaagcatataataactactaggacaaatatcttaaaaaagcttcacttcctcttaaagatgtcttgcttataagggggtaattaatgatgagcatttgactgtgccacgaagactggctttcagatgaaatgactgagagcatgctgccttgtaatacatctcctggacaactacagtgtttaactaacaagtgaaactggttcagattttttttgagcttctctcagagaagagaattgaattattgtcttatattctttgttactgctgcagcccctgagtattgcacacayagatcatagaatcatagaatggcttaggttgaaaggaaccataaagcccatctagttccaactcccctaccatgggcagggctgccactctccagatcgggctgcccagggccccatccaacctggccctatgtgcttcagggatggggcactacagcttctgtgggcagcctgtgtcagtgcctcactgccctcttagtaaaaaatttcttccttacatctaacctaaatctaccctcatttaatttaaagctattcccccttgttctgttactactatcacactgaaaaaaagtaagt

SEQ ID NO: 70449 - DNA, 600 bp, Chicken  19866894343935_1
tgcaggtcattagtcaaagcatcacagcagtgttattcttgctgcctgttttcagagtatgatcacatttcattgtaagtgcagagctggagtctcttcacctgaactaatgtgagtcaggagtaatttcagtgaaggcagctagctcagttctgagacgtgtttcagacaggcagctcactaccattccttatatgagtgtggggagcccagcccatgattaaaactgccagggttagctcattttggaagtagtagctaaaaatagtattattttaatgctttaaatacaagaatgawttttatcctcaagatctccagcktaatgttctgcttcctgccttattttctccagttgtgtcccaccccctcactcctgccagatatgattctgtttcmgtgtcagtgcctgcagcaatccctaaagcaaggttttgccagttccacatattgctaaaagctaggcacttccactgcagagatgagttaaatgaagttttctaactcctgttccttttccttttgccttctccctctgtgcatgcccttctgctccttaccaatctgtggattggaaatagtggtttccacgtttaagtg

SEQ ID NO: 70450 - DNA, 600 bp, Chicken  19866894343935_2
acagcagtgttattcttgctgcctgttttcagagtatgatcacatttcattgtaagtgcagagctggagtctcttcacctgaactaatgtgagtcaggagtaatttcagtgaaggcagctagctcagttctgagacgtgtttcagacaggcagctcactaccattccttatatgagtgtggggagcccagcccatgattaaaactgccagggttagctcattttggaagtagtagctaaaaatagtattattttaatgctttaaatacaagaatgawttttatcctcaagatctccagcktaatgttctgcttcctgccttattttctccagttgtgtcccaccccctcactcctgccagatatgattctgtttcmgtgtcagtgcctgcagcaatccctaaagcaaggttttgccagttccacatattgctaaaagctaggcacttccactgcagagatgagttaaatgaagttttctaactcctgttccttttccttttgccttctccctctgtgcatgcccttctgctccttaccaatctgtggattggaaatagtggtttccacgtttaagtgcggcccacccaatggcctacctg

SEQ ID NO: 70451 - DNA, 600 bp, Chicken  19866894343935_3
acctgaactaatgtgagtcaggagtaatttcagtgaaggcagctagctcagttctgagacgtgtttcagacaggcagctcactaccattccttatatgagtgtggggagcccagcccatgattaaaactgccagggttagctcattttggaagtagtagctaaaaatagtattattttaatgctttaaatacaagaatgawttttatcctcaagatctccagcktaatgttctgcttcctgccttattttctccagttgtgtcccaccccctcactcctgccagatatgattctgtttcmgtgtcagtgcctgcagcaatccctaaagcaaggttttgccagttccacatattgctaaaagctaggcacttccactgcagagatgagttaaatgaagttttctaactcctgttccttttccttttgccttctccctctgtgcatgcccttctgctccttaccaatctgtggattggaaatagtggtttccacgtttaagtgcggcccacccaatggcctacctgtagtgaaccagttctactttgrccttcctgtgttgaactgagggttcgacactattctggctagatctaactcatc

SEQ ID NO: 70452 - DNA, 600 bp, Chicken  19866894343935_4
ttttctccagttgtgtcccaccccctcactcctgccagatatgattctgtttcmgtgtcagtgcctgcagcaatccctaaagcaaggttttgccagttccacatattgctaaaagctaggcacttccactgcagagatgagttaaatgaagttttctaactcctgttccttttccttttgccttctccctctgtgcatgcccttctgctccttaccaatctgtggattggaaatagtggtttccacgtttaagtgcggcccacccaatggcctacctgtagtgaaccagttctactttgrccttcctgtgttgaactgagggttcgacactattctggctagatctaactcatcagtatctagcagacttctcaggtacgactgaagaacagaggctgcagtccacgtgcaccattgggtgcatacctttgggccctacgtggatggtctccctcatctcatagtgtctgctttgtaatagaatgggtcaggagactgtgggatgaacatgtgtctccttgtattaaccatcttatgttgttaccatcttattggcatgacatgcatttttttcatgtggcaggcaagacccctttacct

SEQ ID NO: 70453 - DNA, 600 bp, Chicken  19866894343949_1
tcctgtgggggtagctactctgaagaatgttctcagttgcctggttgagtatttttcagtcctggctataccatggtttcggttcattaaaccataggcaacaaggacatccttcagccactcagcagatcttttatctgcagggcatatgtaattgttacaggttcagagagctcttgtagatgaaagacacggtgtatagctcaattaaaattcacagattgtggaaattttaccagcagtatgagccaacctgtactttctgcgtctctttgtactgctaaccaggagctaactagycctttctagcatttctaagcaggcttccaaattgttggatcccatgccgtgtgttgccatgtgatkcatggtgggatttgtattccagatcagaacatctcatgtgaggactatgccwgcactgtgtccattagtgtcacagacaatgaatgagcataacctcatagatcctcatgatgtagatgtcataaagggtgtgaattatacattaatctaataaagccccrgaatcttctcccagttacagatggatcatgtgtttttatgttagaggccgtgtttggcagaacatttttgatg

SEQ ID NO: 70454 - DNA, 600 bp, Chicken  19866894343949_2
tataccatggtttcggttcattaaaccataggcaacaaggacatccttcagccactcagcagatcttttatctgcagggcatatgtaattgttacaggttcagagagctcttgtagatgaaagacacggtgtatagctcaattaaaattcacagattgtggaaattttaccagcagtatgagccaacctgtactttctgcgtctctttgtactgctaaccaggagctaactagycctttctagcatttctaagcaggcttccaaattgttggatcccatgccgtgtgttgccatgtgatkcatggtgggatttgtattccagatcagaacatctcatgtgaggactatgccwgcactgtgtccattagtgtcacagacaatgaatgagcataacctcatagatcctcatgatgtagatgtcataaagggtgtgaattatacattaatctaataaagccccrgaatcttctcccagttacagatggatcatgtgtttttatgttagaggccgtgtttggcagaacatttttgatgcggactctgagtagcagggatgaatcaatggcattattgggggggaaacaaacagtaatttcatca

SEQ ID NO: 70455 - DNA, 600 bp, Chicken  19866894343949_3
cactcagcagatcttttatctgcagggcatatgtaattgttacaggttcagagagctcttgtagatgaaagacacggtgtatagctcaattaaaattcacagattgtggaaattttaccagcagtatgagccaacctgtactttctgcgtctctttgtactgctaaccaggagctaactagycctttctagcatttctaagcaggcttccaaattgttggatcccatgccgtgtgttgccatgtgatkcatggtgggatttgtattccagatcagaacatctcatgtgaggactatgccwgcactgtgtccattagtgtcacagacaatgaatgagcataacctcatagatcctcatgatgtagatgtcataaagggtgtgaattatacattaatctaataaagccccrgaatcttctcccagttacagatggatcatgtgtttttatgttagaggccgtgtttggcagaacatttttgatgcggactctgagtagcagggatgaatcaatggcattattgggggggaaacaaacagtaatttcatcattccagtaatgatggttttatttagatgaagttgtgattgaaaacacctgta

SEQ ID NO: 70456 - DNA, 600 bp, Chicken  19866894343949_4
aaattttaccagcagtatgagccaacctgtactttctgcgtctctttgtactgctaaccaggagctaactagycctttctagcatttctaagcaggcttccaaattgttggatcccatgccgtgtgttgccatgtgatkcatggtgggatttgtattccagatcagaacatctcatgtgaggactatgccwgcactgtgtccattagtgtcacagacaatgaatgagcataacctcatagatcctcatgatgtagatgtcataaagggtgtgaattatacattaatctaataaagccccrgaatcttctcccagttacagatggatcatgtgtttttatgttagaggccgtgtttggcagaacatttttgatgcggactctgagtagcagggatgaatcaatggcattattgggggggaaacaaacagtaatttcatcattccagtaatgatggttttatttagatgaagttgtgattgaaaacacctgtaagtgtgctgaatgcaaagttactaaggttaggaaaactaatatattggaaacacaggagatagatactggtattactgaaacaaatcaatcaggttaccctaattctgt

SEQ ID NO: 70457 - DNA, 600 bp, Chicken  19866894343954_1
cacgtttctgttctgaaggaaagactttttaggccacaataacatctcactgtgacccacagaagctcagacctgcagcagagttgccacaggcacaggttctacaaactgtacactgtgaacattaaataataacaaaaaagaatgcatgtgaaatgcaggaattctgcttctcacagagtggagcatggctaaaggcttgggaaaccccctgggatgtgaacacagtgaaaaatgtatttaatgctcagcagtttacctctggaactgcatgaaaatggtgacacgttaagaaagggygttctgctgctttctttcaccaacttcctccgtagaaacattcccttatcctgaaagcaccaagtgatctgtacgataaaacagctgtcaaatgtatgtgggaaagtagccaaagcttctgcaaacactgagcataygagaagaaagcctccccctgcacctcagcctggcacaggcagattggcaaggacatagctgttgggctttgtgcttgcaggcaagctgggttgcaatgaaccaacctgtgtgctctgaaagaagattcattaggttttctgaagttgtgtaacatccttgctg

SEQ ID NO: 70458 - DNA, 600 bp, Chicken  19866894343954_2
aaaaagaatgcatgtgaaatgcaggaattctgcttctcacagagtggagcatggctaaaggcttgggaaaccccctgggatgtgaacacagtgaaaaatgtatttaatgctcagcagtttacctctggaactgcatgaaaatggtgacacgttaagaaagggygttctgctgctttctttcaccaacttcctccgtagaaacattcccttatcctgaaagcaccaagtgatctgtacgataaaacagctgtcaaatgtatgtgggaaagtagccaaagcttctgcaaacactgagcataygagaagaaagcctccccctgcacctcagcctggcacaggcagattggcaaggacatagctgttgggctttgtgcttgcaggcaagctgggttgcaatgaaccaacctgtgtgctctgaaagaagattcattaggttttctgaagttgtgtaacatccttgctgtggcaataaaacaacatcagctttcctgcatccactgaggcttttaaaaatcctttgaatttatctttagacatttgcagggacattttaatggagaaagagacatcgttgtagatttctttacctcaaacaacagg

SEQ ID NO: 70459 - DNA, 599 bp, Chicken  19866894343955_1
  misc_feature (1)..(106): n is any nucleotide
nnnnnnnnnnnnnnnnnnnnnnnnnnnnnnnnnnnnnnnnnnnnnnnnnnnnnnnnnnnnnnnnnnnnnnnnnnnnnnnnnnnnnnnnnnnnnnnnnnnnnnnnnnctgaggtagaaaagcttcagagaagtcttttgattgtggaattatacataacttatttgaaatcttgatcaaacctctcctctaataatcctatttaagtaaaaaaggttaattccaaatccttgccatatcttactttatcccaataccttctgaagtcaaaacaatacttttttgttatctaattatgttgkttttttacatcactcatatattctctacctactcttcaaatctttaggtgatcatcttaggaytgacatttacatttttctctgggatgcaaattttacataactttgagactgttgaaatcctttccataatgtccatcaactctctggtcccctcagtcctactaactagtgmctgagcttcgcctttgtactctctctaaaggcaaaattatacccatagcctatttgcattcctacttcttttwatctctcagtccaaatgartggtagttgcatcaagagtgattcatatcagc

SEQ ID NO: 70460 - DNA, 599 bp, Chicken  19866894343955_2
  misc_feature (1)..(43): n is any nucleotide
nnnnnnnnnnnnnnnnnnnnnnnnnnnnnnnnnnnnnnnnnnnctgaggtagaaaagcttcagagaagtcttttgattgtggaattatacataacttatttgaaatcttgatcaaacctctcctctaataatcctatttaagtaaaaaaggttaattccaaatccttgccatatcttactttatcccaataccttctgaagtcaaaacaatacttttttgttatctaattatgttgkttttttacatcactcatatattctctacctactcttcaaatctttaggtgatcatcttaggaytgacatttacatttttctctgggatgcaaattttacataactttgagactgttgaaatcctttccataatgtccatcaactctctggtcccctcagtcctactaactagtgmctgagcttcgcctttgtactctctctaaaggcaaaattatacccatagcctatttgcattcctacttcttttwatctctcagtccaaatgartggtagttgcatcaagagtgattcatatcagcagaagtattttttgaagctggtagaaattcttaagttcctgatgtacagctcatctgaaggaa

SEQ ID NO: 70461 - DNA, 600 bp, Chicken  19866894343955_3
caaacctctcctctaataatcctatttaagtaaaaaaggttaattccaaatccttgccatatcttactttatcccaataccttctgaagtcaaaacaatacttttttgttatctaattatgttgkttttttacatcactcatatattctctacctactcttcaaatctttaggtgatcatcttaggaytgacatttacatttttctctgggatgcaaattttacataactttgagactgttgaaatcctttccataatgtccatcaactctctggtcccctcagtcctactaactagtgmctgagcttcgcctttgtactctctctaaaggcaaaattatacccatagcctatttgcattcctacttcttttwatctctcagtccaaatgartggtagttgcatcaagagtgattcatatcagcagaagtattttttgaagctggtagaaattcttaagttcctgatgtacagctcatctgaaggaaaaaaaacagctgaactgctacaggtatgcaggtagttattttggaggcgaactgcattggctaacagcaggaatttttctaacttgcatttttgtcagaatatccagtttcac

SEQ ID NO: 70462 - DNA, 600 bp, Chicken  19866894343955_4
ccaataccttctgaagtcaaaacaatacttttttgttatctaattatgttgkttttttacatcactcatatattctctacctactcttcaaatctttaggtgatcatcttaggaytgacatttacatttttctctgggatgcaaattttacataactttgagactgttgaaatcctttccataatgtccatcaactctctggtcccctcagtcctactaactagtgmctgagcttcgcctttgtactctctctaaaggcaaaattatacccatagcctatttgcattcctacttcttttwatctctcagtccaaatgartggtagttgcatcaagagtgattcatatcagcagaagtattttttgaagctggtagaaattcttaagttcctgatgtacagctcatctgaaggaaaaaaaacagctgaactgctacaggtatgcaggtagttattttggaggcgaactgcattggctaacagcaggaatttttctaacttgcatttttgtcagaatatccagtttcacttaaaattaaaataaacattttaaaactgaacacaaattttgtgcctctcaayacacagcgtaggtacattta

SEQ ID NO: 70463 - DNA, 600 bp, Chicken  19866894343955_5
aaacaatacttttttgttatctaattatgttgkttttttacatcactcatatattctctacctactcttcaaatctttaggtgatcatcttaggaytgacatttacatttttctctgggatgcaaattttacataactttgagactgttgaaatcctttccataatgtccatcaactctctggtcccctcagtcctactaactagtgmctgagcttcgcctttgtactctctctaaaggcaaaattatacccatagcctatttgcattcctacttcttttwatctctcagtccaaatgartggtagttgcatcaagagtgattcatatcagcagaagtattttttgaagctggtagaaattcttaagttcctgatgtacagctcatctgaaggaaaaaaaacagctgaactgctacaggtatgcaggtagttattttggaggcgaactgcattggctaacagcaggaatttttctaacttgcatttttgtcagaatatccagtttcacttaaaattaaaataaacattttaaaactgaacacaaattttgtgcctctcaayacacagcgtaggtacatttagatccctgaaaattgcagt

SEQ ID NO: 70464 - DNA, 501 bp, Chicken  19866894343955_6
ttgcattcctacttcttttwatctctcagtccaaatgartggtagttgcatcaagagtgattcatatcagcagaagtattttttgaagctggtagaaattcttaagttcctgatgtacagctcatctgaaggaaaaaaaacagctgaactgctacaggtatgcaggtagttattttggaggcgaactgcattggctaacagcaggaatttttctaacttgcatttttgtcagaatatccagtttcacttaaaattaaaataaacattttaaaactgaacacaaattttgtgcctctcaayacacagcgtaggtacatttagatccctgaaaattgcagtgagttaattaatttagaacacaaaactgaattattctaacaatttacttaagtaactagacaaacagcttccctgaagaacaaagaagataggatactcttgaaaagcagtgttaaaaactgattaaatgttttaatagtagagattttttcctatctattt

SEQ ID NO: 70465 - DNA, 600 bp, Chicken  19866894343956_1
atacttggaaacagcctgggagttttcctcagatgagcatgttgctgccaacagacttttggactctgagtacaacacccccatgctgaaatggttccagctccttcagtgcctgatctcagcgccttccaggctcctggtgttggcagatgccgtcatggtggactagaggtggaatgaaagcacatttgatgagttagaagactgtaatttctaccaccacacgcgattaatttcatacctgaaggaatgacctaatctagagaatatgggagatacttctgtttggaaggtgggctmtgtgctcagttcattaagataaggggrtgctgtccccactgggcagtagggtccatgtgtgtgggagggacaatacagaatgccgtgtggtactgacattcaggtgcctctgctgggcatcagaagttccaggataaggaaaatcacttggatcaaaatgatttccaagcaacttccaaaagtggtaacttgtttagggagacttsagggtgtttaactttagaggttcttatgcctagtaaatgggacagcaggccttgctcatggtgacaagagtagccattaactgcagtaagagag

SEQ ID NO: 70466 - DNA, 600 bp, Chicken  19866894343956_2
ctcagatgagcatgttgctgccaacagacttttggactctgagtacaacacccccatgctgaaatggttccagctccttcagtgcctgatctcagcgccttccaggctcctggtgttggcagatgccgtcatggtggactagaggtggaatgaaagcacatttgatgagttagaagactgtaatttctaccaccacacgcgattaatttcatacctgaaggaatgacctaatctagagaatatgggagatacttctgtttggaaggtgggctmtgtgctcagttcattaagataaggggrtgctgtccccactgggcagtagggtccatgtgtgtgggagggacaatacagaatgccgtgtggtactgacattcaggtgcctctgctgggcatcagaagttccaggataaggaaaatcacttggatcaaaatgatttccaagcaacttccaaaagtggtaacttgtttagggagacttsagggtgtttaactttagaggttcttatgcctagtaaatgggacagcaggccttgctcatggtgacaagagtagccattaactgcagtaagagagatttagtccatcttccaggtgtattac

SEQ ID NO: 70467 - DNA, 600 bp, Chicken  19866894343956_3
gtaatttctaccaccacacgcgattaatttcatacctgaaggaatgacctaatctagagaatatgggagatacttctgtttggaaggtgggctmtgtgctcagttcattaagataaggggrtgctgtccccactgggcagtagggtccatgtgtgtgggagggacaatacagaatgccgtgtggtactgacattcaggtgcctctgctgggcatcagaagttccaggataaggaaaatcacttggatcaaaatgatttccaagcaacttccaaaagtggtaacttgtttagggagacttsagggtgtttaactttagaggttcttatgcctagtaaatgggacagcaggccttgctcatggtgacaagagtagccattaactgcagtaagagagatttagtccatcttccaggtgtattacctgctgagtgatctgcttatgtatacacatgccgcacagtggagtacttttctttaactaacgaagaataaaatgaaataaaaaaataattacatatctgcaatcaactctgtcaagatcatattaatcataactaaatagcacatttataaatgtccagtcaggaaacaccactccac

SEQ ID NO: 70468 - DNA, 600 bp, Chicken  19866894343956_4
atgtaggaatctaaaatcaaaggctccagactaattagagagagagagaaagcaagaggagttaaagcaacagggagaaaaaaaataaccagaatagctgattaatgcaagaagtagattaagaagggaatgagaaataaagcactgtcaggtcaaggctttgaattacttcaataggtgaagacaggaagcagcagtgagggtaactgggtagttccctgacacagcccacgcagtttgggtggctcaggcctgtccctgtgtcccagcgtggccctctatcccttccctcactctggrcaaagtctgcaaccacaagcaggtgttctccaggctgaaattcagagcagagaaacaagccgcgatggaagctttgaatgacttgttgggccatgtggaatctgcccagcactggcagtgccgtggagaccctttaagagtaggcaaagtaggaaggagacagctttatgtctctgatcatacctcagccaacactcctgaaatatctcagtacatccactgggaaacaggcagggtgaacaccacattcatgctattatttctcaacacgctcttaaaaactgtccatcgagatgattt

SEQ ID NO: 70469 - DNA, 600 bp, Chicken  19866894343958_1
agcctggtcgcatggggactgtaactcatgcgcccagcagaaggcttctcagggctgagggactctgggccgagggagcggcaccaagagcgagaagcaagacagtggcatctggagtgtccctgggatgaaacagtttgagaacagaatctggccatgctcacaggagccaaaaccataccaggctaagcagtgatagtccgttatcatgattattttataatctagctatgtatgccttagaaaaaagcaggcgtcagcaaaagcggcaatgaattggtactactggagcaagagcgragcaayccagccttgcaggtttcctttaccaaagccatgactgatagcacgtccatctccttgctggtgaagcctgtgctctatgtgaaggcaacagagcaaacagcttgactggttttccttgcaaggcctcttggcttgtgctgggctctgtgttgtccctcctcagccacactcacttaagctgctctctcccaagcttcacttgccccatctggaaagctgcccagacgttccctccccagatttagggccaggacccaaacagcagagtcaggctcacttcttgggttgtgcccc

SEQ ID NO: 70470 - DNA, 600 bp, Chicken  19866894343958_2
gtcgcatggggactgtaactcatgcgcccagcagaaggcttctcagggctgagggactctgggccgagggagcggcaccaagagcgagaagcaagacagtggcatctggagtgtccctgggatgaaacagtttgagaacagaatctggccatgctcacaggagccaaaaccataccaggctaagcagtgatagtccgttatcatgattattttataatctagctatgtatgccttagaaaaaagcaggcgtcagcaaaagcggcaatgaattggtactactggagcaagagcgragcaayccagccttgcaggtttcctttaccaaagccatgactgatagcacgtccatctccttgctggtgaagcctgtgctctatgtgaaggcaacagagcaaacagcttgactggttttccttgcaaggcctcttggcttgtgctgggctctgtgttgtccctcctcagccacactcacttaagctgctctctcccaagcttcacttgccccatctggaaagctgcccagacgttccctccccagatttagggccaggacccaaacagcagagtcaggctcacttcttgggttgtgccccttggct

SEQ ID NO: 70471 - DNA, 600 bp, Chicken  19866894343960_1
gctggagctctgcacaaaaaacatgggaagggttttccccagcaagctgctggaatacataaacacaaatattatcgcctttccctgcatggatagtgacgtttcaaacacagagccatgaggatgaaagcttcaggaaagcaaattgctgtgccttggaagtggagcagctctgcagccatccgttctgttccagctcaggatgctgcatctgctgaacttcgcaggtctcattgccagtatttagatgcttctcaaccagggcaaaacttgtttcccagccttcccttctgtggtaayttatttagggactttttagagcatctcttctgttgttcacctcatgctcagcgtttcagccatggtgcttaaaagccacgtgtttccagcatgacagaatatgattataattaccttgtgtacctatttaagtgcttggcacaggaaaagtccttttgacagatgaatacgtgcaatacttttaatcagcctacttgtctgcaaagcgatgggttgctgtgatttattctgatgcttgttttggtaatattttaggctgccatgtactgcagatacctacaaagcgcttctttttttttt

SEQ ID NO: 70472 - DNA, 600 bp, Chicken  19866894343967_1
ctttggatacctctactttctccagctgcaggcagcagccactgccccagtgcaccctgcagtgccctgaagccccctgtgcagttcagcccaagcgtggcatttgccagcagaacactgatgccagagtttggtttcctgaaggtctgacacttggctgccttctccctacagctatggggagaaatgaaaacaatgctgataactcccagagacattataaaaagcacggcgcagcttttaagtttgaaaggcaggctggcaaggcagtgctgataatgctacctccatttcccttcygttacaacaacccaaggaagacgtattaggtcacagccaatgcgaattacacgtattatcattaatgcccatagtttctatcactcagaatgcagagcttcatctgctcaagcacaccacatggattacagcacttcactctttacccaagaaatgcagtgatctctgygctgcctgccagtgacgcaaacacagtagtaaaacagataagagcgattttcttgctccttgcctttgtttggaggcacaaaagcaatgctgtctgcataacaatgccgctccacctccaaggcctgaatc

SEQ ID NO: 70473 - DNA, 541 bp, Chicken  19866894343967_2
tacagctatggggagaaatgaaaacaatgctgataactcccagagacattataaaaagcacggcgcagcttttaagtttgaaaggcaggctggcaaggcagtgctgataatgctacctccatttcccttcygttacaacaacccaaggaagacgtattaggtcacagccaatgcgaattacacgtattatcattaatgcccatagtttctatcactcagaatgcagagcttcatctgctcaagcacaccacatggattacagcacttcactctttacccaagaaatgcagtgatctctgygctgcctgccagtgacgcaaacacagtagtaaaacagataagagcgattttcttgctccttgcctttgtttggaggcacaaaagcaatgctgtctgcataacaatgccgctccacctccaaggcctgaatccctttccaacaattctacccattttaaataaccccactgagttacagatacagatcagctacatcccatagcatggggtcagggtggggtcccagtacagtaactccaag

SEQ ID NO: 70474 - DNA, 599 bp, Chicken  19866894343973_1
  misc_feature (1)..(4): n is any nucleotide
nnnntgttgaaggaaagggtagatgttgtacttaaggataagctttaatgggcagtactggtggtaggtggatggttggactaggggatcttactggtcttttccaaccgtaacgattctataattctatgtgtatcctttctaatggggaatccttccagctgtgtaagaatgctttgtacatgtaagaatatacacagacgtacacagatgctttgtgcatgtaagaatttggttccatgggtcttccgggcttcccagcctcggcacaagggacaggagtatgctgtcctggggccytggggctcacagtgagtgttttctgcrtggtcagcctgagatgtctcaaaggaaaccgttttctgaggctgaattttggcaaacggrtgggcagagccctaccacrcacgggaggagctgacaagggcagtggcgtsacccacaggatgccatggagcagggtgctgccacgtgctgtgctcagctgctcctggccccatccaccccccaggagagctctgaaggagaacccagtgtcctcccctggcgtgggaatagtgctcagagaggatgcaggggctgatttacgtcacggcact

SEQ ID NO: 70475 - DNA, 600 bp, Chicken  19866894343973_2
gtacttaaggataagctttaatgggcagtactggtggtaggtggatggttggactaggggatcttactggtcttttccaaccgtaacgattctataattctatgtgtatcctttctaatggggaatccttccagctgtgtaagaatgctttgtacatgtaagaatatacacagacgtacacagatgctttgtgcatgtaagaatttggttccatgggtcttccgggcttcccagcctcggcacaagggacaggagtatgctgtcctggggccytggggctcacagtgagtgttttctgcrtggtcagcctgagatgtctcaaaggaaaccgttttctgaggctgaattttggcaaacggrtgggcagagccctaccacrcacgggaggagctgacaagggcagtggcgtsacccacaggatgccatggagcagggtgctgccacgtgctgtgctcagctgctcctggccccatccaccccccaggagagctctgaaggagaacccagtgtcctcccctggcgtgggaatagtgctcagagaggatgcaggggctgatttacgtcacggcactgcgtgtaaagcagcaagttacaaaaggg

SEQ ID NO: 70476 - DNA, 600 bp, Chicken  19866894343973_3
atcttactggtcttttccaaccgtaacgattctataattctatgtgtatcctttctaatggggaatccttccagctgtgtaagaatgctttgtacatgtaagaatatacacagacgtacacagatgctttgtgcatgtaagaatttggttccatgggtcttccgggcttcccagcctcggcacaagggacaggagtatgctgtcctggggccytggggctcacagtgagtgttttctgcrtggtcagcctgagatgtctcaaaggaaaccgttttctgaggctgaattttggcaaacggrtgggcagagccctaccacrcacgggaggagctgacaagggcagtggcgtsacccacaggatgccatggagcagggtgctgccacgtgctgtgctcagctgctcctggccccatccaccccccaggagagctctgaaggagaacccagtgtcctcccctggcgtgggaatagtgctcagagaggatgcaggggctgatttacgtcacggcactgcgtgtaaagcagcaagttacaaaagggcattctatagaaaggattaaaatactaaccaaacgttaggagaatgtttgtcttcctgct

SEQ ID NO: 70477 - DNA, 600 bp, Chicken  19866894343973_4
accgtaacgattctataattctatgtgtatcctttctaatggggaatccttccagctgtgtaagaatgctttgtacatgtaagaatatacacagacgtacacagatgctttgtgcatgtaagaatttggttccatgggtcttccgggcttcccagcctcggcacaagggacaggagtatgctgtcctggggccytggggctcacagtgagtgttttctgcrtggtcagcctgagatgtctcaaaggaaaccgttttctgaggctgaattttggcaaacggrtgggcagagccctaccacrcacgggaggagctgacaagggcagtggcgtsacccacaggatgccatggagcagggtgctgccacgtgctgtgctcagctgctcctggccccatccaccccccaggagagctctgaaggagaacccagtgtcctcccctggcgtgggaatagtgctcagagaggatgcaggggctgatttacgtcacggcactgcgtgtaaagcagcaagttacaaaagggcattctatagaaaggattaaaatactaaccaaacgttaggagaatgtttgtcttcctgcttttagctcaacatggctct

SEQ ID NO: 70478 - DNA, 600 bp, Chicken  19866894343973_5
ctttctaatggggaatccttccagctgtgtaagaatgctttgtacatgtaagaatatacacagacgtacacagatgctttgtgcatgtaagaatttggttccatgggtcttccgggcttcccagcctcggcacaagggacaggagtatgctgtcctggggccytggggctcacagtgagtgttttctgcrtggtcagcctgagatgtctcaaaggaaaccgttttctgaggctgaattttggcaaacggrtgggcagagccctaccacrcacgggaggagctgacaagggcagtggcgtsacccacaggatgccatggagcagggtgctgccacgtgctgtgctcagctgctcctggccccatccaccccccaggagagctctgaaggagaacccagtgtcctcccctggcgtgggaatagtgctcagagaggatgcaggggctgatttacgtcacggcactgcgtgtaaagcagcaagttacaaaagggcattctatagaaaggattaaaatactaaccaaacgttaggagaatgtttgtcttcctgcttttagctcaacatggctctttttttagttagtcatgtaagaagaccgaaa

SEQ ID NO: 70479 - DNA, 600 bp, Chicken  19866894343973_6
agtctgatgccccctaaagtctccagtaagacttgcagtgaagaaatcgacgtttcccctcagcattctcaagcaataacagctctgaagttattagttatttatagttctttgtggctacattaagcacagcagaagtttgcactgtgagaaaattagctcggtcatgctgggctgggtaacggtccaaattgctgtcatcctccgcctgcaagaaggagacgttgtaatgcagcccaaaatcaaggctgtgtaacagagagcatgcctctattcccctgctgctcacactggcgcagyaatgaggctcctttatttgcaatgtttggaaaccgtgtgactgtaaaagggaattgggttcagtagctggagggatggtgtatgccgtacgctttgcatgagcgatatgaagccttaacttcatgggtatttcagagcacttttccaggcagggttaataccattatcatgacagttggtccaaagcccatcaaaatgtattattattgtgtggttggctgttttggttttgcattgtttgcttatctcgtttttgtctgatttagccatttttcttcaattcactgtctcttgtttgtg

SEQ ID NO: 70480 - DNA, 600 bp, Chicken  19866894343975_1
aattctccatactgagatggcagtctctcagaaaaattattttatcagttttggctgaaacagtccaactattcatagagagagaggtcattttgcccaggtgcttagggaaggagaacggaaactgaggatgaacatggaagtcaaggacatggtgaacatttcagatgactgtaatttaaagattgagactggctacaaattagcaggaagagacagattgaagagcaactgaggggaggaatagactcttctggaaagagaatcagaactgagataggagagttgagatctggaaayacaaaaactaaacaaaaacaacccccaaacttaaaatcatgaataagatgattgcactgcaaagagaggtaagaractgacaaagaatcttgagagaaaattagaaagtgctacagaaatagcaaaaacatttcacttggtactgatgagttggagawgaaatagaactaagataaggacaagaaagcaaccactcagaagcaaatttggaggaaacggatgacaaatttcacatactcctaccctatactacatctcccacmtacctgtatgtcagaaaggcaactgtgagatcaacaa

SEQ ID NO: 70481 - DNA, 590 bp, Chicken  19866894343975_2
tagagagagaggtcattttgcccaggtgcttagggaaggagaacggaaactgaggatgaacatggaagtcaaggacatggtgaacatttcagatgactgtaatttaaagattgagactggctacaaattagcaggaagagacagattgaagagcaactgaggggaggaatagactcttctggaaagagaatcagaactgagataggagagttgagatctggaaayacaaaaactaaacaaaaacaacccccaaacttaaaatcatgaataagatgattgcactgcaaagagaggtaagaractgacaaagaatcttgagagaaaattagaaagtgctacagaaatagcaaaaacatttcacttggtactgatgagttggagawgaaatagaactaagataaggacaagaaagcaaccactcagaagcaaatttggaggaaacggatgacaaatttcacatactcctaccctatactacatctcccacmtacctgtatgtcagaaaggcaactgtgagatcaacaacaaacatctctgcaaacaccttcagactatgtgtaagcgccgcatgaaactcattaacagttttg

SEQ ID NO: 70482 - DNA, 507 bp, Chicken  19866894343975_3
acatttcagatgactgtaatttaaagattgagactggctacaaattagcaggaagagacagattgaagagcaactgaggggaggaatagactcttctggaaagagaatcagaactgagataggagagttgagatctggaaayacaaaaactaaacaaaaacaacccccaaacttaaaatcatgaataagatgattgcactgcaaagagaggtaagaractgacaaagaatcttgagagaaaattagaaagtgctacagaaatagcaaaaacatttcacttggtactgatgagttggagawgaaatagaactaagataaggacaagaaagcaaccactcagaagcaaatttggaggaaacggatgacaaatttcacatactcctaccctatactacatctcccacmtacctgtatgtcagaaaggcaactgtgagatcaacaacaaacatctctgcaaacaccttcagactatgtgtaagcgccgcatgaaactcattaacagttttg

SEQ ID NO: 70483 - DNA, 402 bp, Chicken  19866894343975_4
aatcagaactgagataggagagttgagatctggaaayacaaaaactaaacaaaaacaacccccaaacttaaaatcatgaataagatgattgcactgcaaagagaggtaagaractgacaaagaatcttgagagaaaattagaaagtgctacagaaatagcaaaaacatttcacttggtactgatgagttggagawgaaatagaactaagataaggacaagaaagcaaccactcagaagcaaatttggaggaaacggatgacaaatttcacatactcctaccctatactacatctcccacmtacctgtatgtcagaaaggcaactgtgagatcaacaacaaacatctctgcaaacaccttcagactatgtgtaagcgccgcatgaaactcattaacagttttg

SEQ ID NO: 70484 - DNA, 599 bp, Chicken  19866894343976_1
  misc_feature (1)..(192): n is any nucleotide
nnnnnnnnnnnnnnnnnnnnnnnnnnnnnnnnnnnnnnnnnnnnnnnnnnnnnnnnnnnnnnnnnnnnnnnnnnnnnnnnnnnnnnnnnnnnnnnnnnnnnnnnnnnnnnnnnnnnnnnnnnnnnnnnnnnnnnnnnnnnnnnnnnnnnnnnnnnnnnnnnnnnnnnnnnnnnnnnnnnnnnnnnnnnnnnntgacaaaagtgttgaagataatggtgtagtgctctgaaggaggagagtggagcggtgcattcctcccactgtcaatcttaaacattttctcacctaggtataagacaraagtaaaggtttccactagaatacatcaaacagagtgtttttatttcctttatttgctttagcttgttgcctgctttgctctactttttttctgaccttactatctataggcaaaattctgcactccagaaagcaaaagacatctaaagttcctgagcagaaagcttccccaatgataacttttctstaataactcaatatacctgctcacatagttttcagtagtatttttcctctaaccaaatattaagtattctaagtcaattcctcctgatgtaatgagcacttaagacccattg

SEQ ID NO: 70485 - DNA, 550 bp, Chicken  19866894343976_2
  misc_feature (1)..(5): n is any nucleotide
nnnnntgacaaaagtgttgaagataatggtgtagtgctctgaaggaggagagtggagcggtgcattcctcccactgtcaatcttaaacattttctcacctaggtataagacaraagtaaaggtttccactagaatacatcaaacagagtgtttttatttcctttatttgctttagcttgttgcctgctttgctctactttttttctgaccttactatctataggcaaaattctgcactccagaaagcaaaagacatctaaagttcctgagcagaaagcttccccaatgataacttttctstaataactcaatatacctgctcacatagttttcagtagtatttttcctctaaccaaatattaagtattctaagtcaattcctcctgatgtaatgagcacttaagacccattgtcagtatgtttccatttttctaccagaattagaagcaatcactcttcaacagtttttaacctgtttgctaatacgcttgccatgactcttgacaagtgttcatggatattaatgataacagcacagacattcatgatt

SEQ ID NO: 70486 - DNA, 583 bp, Chicken  19866894343979_1
tcccagtgaagtaactaggaatattccatactgagaaagtgattttaaccattttccaaaaaaattatgggcaagcatttcattccactgcacccctttatttgtaaaggctgcactgtcagcattctaaataaatcacatacaaatgtatttcagagaacacgtgccaaatccaacacctaaaggtatgttgacaccagaatcctggttctcaatgcaacttagtttgacatatatatacatgagcagaatgcacagcatataatcatgtaaaaactggtatttcctctggatttttgytccctagcttggcatcttgcaaatgtaacagcctccgtggtctggcaacccatcccagacaactctatactttcagcaatcttcttgtacagcctctgtctgttccgctgccctcatttgtcagcttcttatctgccgttcttcttctatttgtgttctttgaatttagaacaggcagacttccctgtgacaatgactacaactcaacagtaggtacatgagggcactcccactacagccagtggaagtatggacaagtctaaatttgctactgctaaaacaa

SEQ ID NO: 70487 - DNA, 599 bp, Chicken  19866894343984_1
  misc_feature (1)..(2): n is any nucleotide
nntcctcctacctacttcctatggaggtagtgacacacagaagtgttgcatcagcgtcacaacaacaacgaaagccaacataaaagcaacagaaacccccatgaaaaataccaacgttgacctcctaagcatctgtaactcatataattgcctgccgtctgcccattctcccttgtgagctcaggacagcatcaatttcttgtctaagtaagtgtcacctgggtcaaaatggacaaattcaccagatcctcaaggtggtgactatactatctgttcttcatccacgcacactttttactyggtgtattattacagtatgggctgaacagtgcagcttctcggcctcccccaggctgaggtcagccaactcagctgcgatgggctcagcatcgagtaccaattatgtaaggggatgggggaacgtaacagatgccttgttttattctggctggcacacgagttagttcacattagaacacagacaatgctagctccttaatttttcactgacgagttgagtatttggcaggtcacaccatgaagttcagcgttcacaacaagggcagggttgctttaaagaaatatcccttcatgcagag

SEQ ID NO: 70488 - DNA, 599 bp, Chicken  19866894343991_1
  misc_feature (1)..(213): n is any nucleotide
nnnnnnnnnnnnnnnnnnnnnnnnnnnnnnnnnnnnnnnnnnnnnnnnnnnnnnnnnnnnnnnnnnnnnnnnnnnnnnnnnnnnnnnnnnnnnnnnnnnnnnnnnnnnnnnnnnnnnnnnnnnnnnnnnnnnnnnnnnnnnnnnnnnnnnnnnnnnnnnnnnnnnnnnnnnnnnnnnnnnnnnnnnnnnnnnnnnnnnnnnnnnnnnnnnnnnccattgcttgcttcttgccatggaaatacctacttcttctgtaacaaaatgatgttgtcatttgatacatttgatgcttttatttargaacttgcttatctgtgatgaagaattttaagtttcgtaaaagaaaaaatgaagtccaatttcatttttctagttgcttctccatgcagtcttcaggcagtttgtagtgtaggagctgaaggtgtatctayctggcckgctggtggaagggccagctgtggtgtttgctcttcrcatggttttgcatcatgactctgtccatgaagagcattccataaattaccaatattaatattaaatacttcctagtcttctctctgacatctgcaaatcactcttggctttcttaytagcattaa

SEQ ID NO: 70489 - DNA, 599 bp, Chicken  19866894343991_2
  misc_feature (1)..(82): n is any nucleotide
nnnnnnnnnnnnnnnnnnnnnnnnnnnnnnnnnnnnnnnnnnnnnnnnnnnnnnnnnnnnnnnnnnnnnnnnnnnnnnnnnnccattgcttgcttcttgccatggaaatacctacttcttctgtaacaaaatgatgttgtcatttgatacatttgatgcttttatttargaacttgcttatctgtgatgaagaattttaagtttcgtaaaagaaaaaatgaagtccaatttcatttttctagttgcttctccatgcagtcttcaggcagtttgtagtgtaggagctgaaggtgtatctayctggcckgctggtggaagggccagctgtggtgtttgctcttcrcatggttttgcatcatgactctgtccatgaagagcattccataaattaccaatattaatattaaatacttcctagtcttctctctgacatctgcaaatcactcttggctttcttaytagcattaaayaatgccaatcttcagtctatcatctaaaaattgctactgggctttttcttcttgaaactgcagctgaattgccaaaaagaatgtgtcattctacttttgccacatgttagtaatttagagtggcactga

SEQ ID NO: 70490 - DNA, 599 bp, Chicken  19866894343991_3
  misc_feature (1)..(75): n is any nucleotide
nnnnnnnnnnnnnnnnnnnnnnnnnnnnnnnnnnnnnnnnnnnnnnnnnnnnnnnnnnnnnnnnnnnnnnnnnnnccattgcttgcttcttgccatggaaatacctacttcttctgtaacaaaatgatgttgtcatttgatacatttgatgcttttatttargaacttgcttatctgtgatgaagaattttaagtttcgtaaaagaaaaaatgaagtccaatttcatttttctagttgcttctccatgcagtcttcaggcagtttgtagtgtaggagctgaaggtgtatctayctggcckgctggtggaagggccagctgtggtgtttgctcttcrcatggttttgcatcatgactctgtccatgaagagcattccataaattaccaatattaatattaaatacttcctagtcttctctctgacatctgcaaatcactcttggctttcttaytagcattaaayaatgccaatcttcagtctatcatctaaaaattgctactgggctttttcttcttgaaactgcagctgaattgccaaaaagaatgtgtcattctacttttgccacatgttagtaatttagagtggcactgagatatta

SEQ ID NO: 70491 - DNA, 599 bp, Chicken  19866894343991_4
  misc_feature (1)..(39): n is any nucleotide
nnnnnnnnnnnnnnnnnnnnnnnnnnnnnnnnnnnnnnnccattgcttgcttcttgccatggaaatacctacttcttctgtaacaaaatgatgttgtcatttgatacatttgatgcttttatttargaacttgcttatctgtgatgaagaattttaagtttcgtaaaagaaaaaatgaagtccaatttcatttttctagttgcttctccatgcagtcttcaggcagtttgtagtgtaggagctgaaggtgtatctayctggcckgctggtggaagggccagctgtggtgtttgctcttcrcatggttttgcatcatgactctgtccatgaagagcattccataaattaccaatattaatattaaatacttcctagtcttctctctgacatctgcaaatcactcttggctttcttaytagcattaaayaatgccaatcttcagtctatcatctaaaaattgctactgggctttttcttcttgaaactgcagctgaattgccaaaaagaatgtgtcattctacttttgccacatgttagtaatttagagtggcactgagatattaattaatggcccatkactgaagcacagagtacagatt

SEQ ID NO: 70492 - DNA, 600 bp, Chicken  19866894343991_5
ttttatttargaacttgcttatctgtgatgaagaattttaagtttcgtaaaagaaaaaatgaagtccaatttcatttttctagttgcttctccatgcagtcttcaggcagtttgtagtgtaggagctgaaggtgtatctayctggcckgctggtggaagggccagctgtggtgtttgctcttcrcatggttttgcatcatgactctgtccatgaagagcattccataaattaccaatattaatattaaatacttcctagtcttctctctgacatctgcaaatcactcttggctttcttaytagcattaaayaatgccaatcttcagtctatcatctaaaaattgctactgggctttttcttcttgaaactgcagctgaattgccaaaaagaatgtgtcattctacttttgccacatgttagtaatttagagtggcactgagatattaattaatggcccatkactgaagcacagagtacagattttttttgtttgtttcagatgtatcccaacactctggcttttgtactgtactttacacatcaatattcaagtctccctctttggatcacagcttcccttgccagcagccatggcatca

SEQ ID NO: 70493 - DNA, 600 bp, Chicken  19866894343991_6
aacttgcttatctgtgatgaagaattttaagtttcgtaaaagaaaaaatgaagtccaatttcatttttctagttgcttctccatgcagtcttcaggcagtttgtagtgtaggagctgaaggtgtatctayctggcckgctggtggaagggccagctgtggtgtttgctcttcrcatggttttgcatcatgactctgtccatgaagagcattccataaattaccaatattaatattaaatacttcctagtcttctctctgacatctgcaaatcactcttggctttcttaytagcattaaayaatgccaatcttcagtctatcatctaaaaattgctactgggctttttcttcttgaaactgcagctgaattgccaaaaagaatgtgtcattctacttttgccacatgttagtaatttagagtggcactgagatattaattaatggcccatkactgaagcacagagtacagattttttttgtttgtttcagatgtatcccaacactctggcttttgtactgtactttacacatcaatattcaagtctccctctttggatcacagcttcccttgccagcagccatggcatcagtcctagctgc

SEQ ID NO: 70494 - DNA, 600 bp, Chicken  19866894343991_7
ccagctgtggtgtttgctcttcrcatggttttgcatcatgactctgtccatgaagagcattccataaattaccaatattaatattaaatacttcctagtcttctctctgacatctgcaaatcactcttggctttcttaytagcattaaayaatgccaatcttcagtctatcatctaaaaattgctactgggctttttcttcttgaaactgcagctgaattgccaaaaagaatgtgtcattctacttttgccacatgttagtaatttagagtggcactgagatattaattaatggcccatkactgaagcacagagtacagattttttttgtttgtttcagatgtatcccaacactctggcttttgtactgtactttacacatcaatattcaagtctccctctttggatcacagcttcccttgccagcagccatggcatcagtcctagctgctcgcacaaaaagttaggaacagtgacatttatgcttagcaagtgtcgtgtttctctccatcataatggagcaatgtgcaagcccttgtaaaacccgttcttttgccccttcaacatccttttcataattacataattagagattctcagt

SEQ ID NO: 70495 - DNA, 599 bp, Chicken  19866894344003_1
  misc_feature (1)..(88): n is any nucleotide
nnnnnnnnnnnnnnnnnnnnnnnnnnnnnnnnnnnnnnnnnnnnnnnnnnnnnnnnnnnnnnnnnnnnnnnnnnnnnnnnnnnnnnnntttacaatgagagtgcaagtcagatgccaatttgcacgtggcattcatacatcacctgttaaaatctcttggaaaactagatcctgtgcctctgttgctgagtgttgtcccttagcagctgcaactgagttttccctttcttcgttgcatctgaggctgcccttctgccttcagcagagctcctcctatccgagaagtgggaaaagtggcakagagcaggtaggaaagggcttaacaaccacatagagctatcagtgggattacaaccagccctgcaactttcccagagacatggaggatcgttcttagtacgtctcctttgcacccaggtggggtgtctttgactttgatgggataaaaggaggatggatgtctttcatgttctattgagatgctgcaagcctatatccaaaacctcaggtcagggtcatggtctattttgatagctacagttatggtattctcagcacagcactttgccttcccagtctagatgcctcttagttacagg

SEQ ID NO: 70496 - DNA, 528 bp, Chicken  19866894344003_2
tgtctttgactttgatgggataaaaggaggatggatgtctttcatgttctattgagatgctgcaagcctatatccaaaacctcaggtcagggtcatggtctattttgatagctacagttatggtattctcagcacagcactttgccttcccagtctagatgcctcttagttacaggctgcacacgctaattagcattgctcgtacaatagtgggaagccattaggcattccatgaagttattagggccaggattttatagataacattagcctctgaggagtttacccaaggtaatttaygttctatttgcaactaaaggaaaactcttagatgtttgacattataaaacagtaaaacagggagatttattacaggggcagagataacagggcccttgagctgctttgtttatcataaaaagtcgggttaatcagatgtgcacatgtgcctcccatattttctgcttcagttttgctcctgtcctgctccttgacaagcactgcaaaatgcaaagaggcaccaaaaag

SEQ ID NO: 70497 - DNA, 600 bp, Chicken  19866894344007_1
acctgcctgtccctgggcgcataacaaacatctccacacaaccaagaactgggcatgcagttctgtcctttacgtttcctttggaggtgcgttttctgtactgactggtgacaaaagcaactcctgatacaagcacacgccattcaggctgggcttcaaagtgggccctgagagacgtgacagctgtcgcactgtgcttacagagccagcggctgcagagctgcctgccctcaggaaagcagcctgaaaagcactggtttcaggacaggaaaccagagctctgaaaacttctaaacacartttcactccctcttttcgaaacacrcccctctccttcaaatccagcttcagaattgaagytcgcattcccctggtctcaggcttcagtaacacaygaagtaaagcactggtttcaagggacacttgctgaattttatagaccaacctcccctactgtattatctgacagcgtgtggaaacagttggctgccacatggaaacagtaaattgcaagcagggatcgctgcaagtgagcgcgatcccagatggtcagacacaaaggcagccctttggctgctctccagcacaccttacacagac

SEQ ID NO: 70498 - DNA, 600 bp, Chicken  19866894344007_2
aaacatctccacacaaccaagaactgggcatgcagttctgtcctttacgtttcctttggaggtgcgttttctgtactgactggtgacaaaagcaactcctgatacaagcacacgccattcaggctgggcttcaaagtgggccctgagagacgtgacagctgtcgcactgtgcttacagagccagcggctgcagagctgcctgccctcaggaaagcagcctgaaaagcactggtttcaggacaggaaaccagagctctgaaaacttctaaacacartttcactccctcttttcgaaacacrcccctctccttcaaatccagcttcagaattgaagytcgcattcccctggtctcaggcttcagtaacacaygaagtaaagcactggtttcaagggacacttgctgaattttatagaccaacctcccctactgtattatctgacagcgtgtggaaacagttggctgccacatggaaacagtaaattgcaagcagggatcgctgcaagtgagcgcgatcccagatggtcagacacaaaggcagccctttggctgctctccagcacaccttacacagacacgctgtgggcacccatcctggcac

SEQ ID NO: 70499 - DNA, 600 bp, Chicken  19866894344007_3
ttctgtcctttacgtttcctttggaggtgcgttttctgtactgactggtgacaaaagcaactcctgatacaagcacacgccattcaggctgggcttcaaagtgggccctgagagacgtgacagctgtcgcactgtgcttacagagccagcggctgcagagctgcctgccctcaggaaagcagcctgaaaagcactggtttcaggacaggaaaccagagctctgaaaacttctaaacacartttcactccctcttttcgaaacacrcccctctccttcaaatccagcttcagaattgaagytcgcattcccctggtctcaggcttcagtaacacaygaagtaaagcactggtttcaagggacacttgctgaattttatagaccaacctcccctactgtattatctgacagcgtgtggaaacagttggctgccacatggaaacagtaaattgcaagcagggatcgctgcaagtgagcgcgatcccagatggtcagacacaaaggcagccctttggctgctctccagcacaccttacacagacacgctgtgggcacccatcctggcacttcccaacttgctgcccacggacagagctgcagtc

SEQ ID NO: 70500 - DNA, 600 bp, Chicken  19866894344007_4
ctgtactgactggtgacaaaagcaactcctgatacaagcacacgccattcaggctgggcttcaaagtgggccctgagagacgtgacagctgtcgcactgtgcttacagagccagcggctgcagagctgcctgccctcaggaaagcagcctgaaaagcactggtttcaggacaggaaaccagagctctgaaaacttctaaacacartttcactccctcttttcgaaacacrcccctctccttcaaatccagcttcagaattgaagytcgcattcccctggtctcaggcttcagtaacacaygaagtaaagcactggtttcaagggacacttgctgaattttatagaccaacctcccctactgtattatctgacagcgtgtggaaacagttggctgccacatggaaacagtaaattgcaagcagggatcgctgcaagtgagcgcgatcccagatggtcagacacaaaggcagccctttggctgctctccagcacaccttacacagacacgctgtgggcacccatcctggcacttcccaacttgctgcccacggacagagctgcagtcccagcactgtgctgtcacctcccagcgtacgacag

SEQ ID NO: 70501 - DNA, 600 bp, Chicken  19866894344007_5
aaacagtaaattgcaagcagggatcgctgcaagtgagcgcgatcccagatggtcagacacaaaggcagccctttggctgctctccagcacaccttacacagacacgctgtgggcacccatcctggcacttcccaacttgctgcccacggacagagctgcagtcccagcactgtgctgtcacctcccagcgtacgacagcttgttgtgactgcagaacagtgcaacctagcgagataattacatgctacattgggctgacagacatgcacgtcccatgtcctactgtacgcagcctgtgtrgggacaaaggagggtatcaatccttatctgttgcagctgctcctttttgaagacctctattcttatctttggttcttagacatttctctctcccctttcacagagatcacccaaggcagacaaggtaggaagcaacatttctcatcacagatacacctcagggaagtttggaacttgaggacgtgctatctatttttacataaggaaacaggggacattggagaaatacaagaaatacaatcctatttattattatgggcttgggcacatgaggttcagtcagacaatacatgaaatgtc

SEQ ID NO: 70502 - DNA, 600 bp, Chicken  19866894344009_1
gtggtctcagagtacttcatcagctcctgctgggcaaaggtggccaccgggtccttgcggggccagcggagcttccaggtggcgttggggacgtggaaggtgaggaaggctgtcccattgagggatacctcgtagaagctgcaggtcgtgccgttggggaagaggcagcagcccaggcggcagtgcaggttttgggtgtctgtgggatggagggcgtcaggctgcagctgccccttgctgtcatagagctattgtgtgtgcacagccccagcttgtgggcttgcaccgcccagacccctygtgagctccctgcagcttctccttgrgaaattggcctgtgcacagtgagctcctcgtggctctcgtatggggtatggtctatggcatggacataaggacatggctggcactggagacccagggtgagatgttgctccaggtgcagaaatgaatgggggcaaaatgggctctggggaggaacgcgggtacagggggtgtagggagggacacgtcaaagcacagccacagcagcacgcctgtgtagggacacagcctcctcatcctcagcatcccacttccaagcagtgaacccagggtgag

SEQ ID NO: 70503 - DNA, 600 bp, Chicken  19866894344009_2
ctgctgggcaaaggtggccaccgggtccttgcggggccagcggagcttccaggtggcgttggggacgtggaaggtgaggaaggctgtcccattgagggatacctcgtagaagctgcaggtcgtgccgttggggaagaggcagcagcccaggcggcagtgcaggttttgggtgtctgtgggatggagggcgtcaggctgcagctgccccttgctgtcatagagctattgtgtgtgcacagccccagcttgtgggcttgcaccgcccagacccctygtgagctccctgcagcttctccttgrgaaattggcctgtgcacagtgagctcctcgtggctctcgtatggggtatggtctatggcatggacataaggacatggctggcactggagacccagggtgagatgttgctccaggtgcagaaatgaatgggggcaaaatgggctctggggaggaacgcgggtacagggggtgtagggagggacacgtcaaagcacagccacagcagcacgcctgtgtagggacacagcctcctcatcctcagcatcccacttccaagcagtgaacccagggtgagccctctgccaggggctgcccgcagcc

SEQ ID NO: 70504 - DNA, 600 bp, Chicken  19866894344013_1
cttgtaatagcattgcaggatctagttttgaaatgcttatctgaaatgcttttctttctttctgaatgtgtctgaagtgcacatcaatttaggaacttctgattaagtttgtcagcatatgggcaataatgctgctccgagctcagtggaaatcttccagtggtctgctcctcagtcagaaagtcaatgcatgcagttaaataaatgtacgaatgtgtttggttctcacatttctccaatggaaacagcttcttgttgattcccttgctttcctgtcaggctgctgctgggttggcaccrtgtcaggacccctcaggcagggagatgcatcttgaggcagcagccaagggagcagtgttcacaggcctcacgagtccccagactcagctgtccgtgtgcctggctgcaagaccagcatctcaagcactgtccccaaggctttgcattggaaagccctcatctgtttgctaatcagtaatcagtctggatttgtcataaattaggattccattccgtggtagaactttaggatcatttaaataaaagaattcaccatattccagtgaaacagggtatgtttttctgttttgatgcagtagg

SEQ ID NO: 70505 - DNA, 600 bp, Chicken  19866894344021_1
gctcctgctgatgctcccccatttcttcttcttttcttcttttttcacagggattcaggcagttaagactcttggttgagaaccgtggtcgtgtcaattacggcctggcgctgaacgagcagcggaaaggtgagttgagttggttgttcttggagcctctcattgaggtgcttctctgagtttaagtcctgtgcaactgtctttcttgtgtactttatgaactgaagactgatgcagctgtgttagttttagccaaggtgtcagggagatggtgggaaacggtgtgacagagggaagctstgaagwctgctgttcatcgctccctatctggagtgatygtagatgaacagcagtggctgcttgacaaattgcattaaggcctctcattttatagggcagcagctgaacccaaggctgtcactgaatcttaccctgctctgttttgccaggtgatgggagggaacccattctctttctctmtgagcacgttacttcacagggcaggaaggaaaagaccttttttaagctctgtcctcccctggggtttgatattggaggatcacagcrttttaaaactcacacagcgttcagcatagtcag

SEQ ID NO: 70506 - DNA, 600 bp, Chicken  19866894344021_2
gctgatgctcccccatttcttcttcttttcttcttttttcacagggattcaggcagttaagactcttggttgagaaccgtggtcgtgtcaattacggcctggcgctgaacgagcagcggaaaggtgagttgagttggttgttcttggagcctctcattgaggtgcttctctgagtttaagtcctgtgcaactgtctttcttgtgtactttatgaactgaagactgatgcagctgtgttagttttagccaaggtgtcagggagatggtgggaaacggtgtgacagagggaagctstgaagwctgctgttcatcgctccctatctggagtgatygtagatgaacagcagtggctgcttgacaaattgcattaaggcctctcattttatagggcagcagctgaacccaaggctgtcactgaatcttaccctgctctgttttgccaggtgatgggagggaacccattctctttctctmtgagcacgttacttcacagggcaggaaggaaaagaccttttttaagctctgtcctcccctggggtttgatattggaggatcacagcrttttaaaactcacacagcgttcagcatagtcagaaggaa

SEQ ID NO: 70507 - DNA, 600 bp, Chicken  19866894344021_3
cttttttcacagggattcaggcagttaagactcttggttgagaaccgtggtcgtgtcaattacggcctggcgctgaacgagcagcggaaaggtgagttgagttggttgttcttggagcctctcattgaggtgcttctctgagtttaagtcctgtgcaactgtctttcttgtgtactttatgaactgaagactgatgcagctgtgttagttttagccaaggtgtcagggagatggtgggaaacggtgtgacagagggaagctstgaagwctgctgttcatcgctccctatctggagtgatygtagatgaacagcagtggctgcttgacaaattgcattaaggcctctcattttatagggcagcagctgaacccaaggctgtcactgaatcttaccctgctctgttttgccaggtgatgggagggaacccattctctttctctmtgagcacgttacttcacagggcaggaaggaaaagaccttttttaagctctgtcctcccctggggtttgatattggaggatcacagcrttttaaaactcacacagcgttcagcatagtcagaaggaacgagwtgcatcctgttgagcagaatttgctaa

SEQ ID NO: 70508 - DNA, 600 bp, Chicken  19866894344021_4
tttaagtcctgtgcaactgtctttcttgtgtactttatgaactgaagactgatgcagctgtgttagttttagccaaggtgtcagggagatggtgggaaacggtgtgacagagggaagctstgaagwctgctgttcatcgctccctatctggagtgatygtagatgaacagcagtggctgcttgacaaattgcattaaggcctctcattttatagggcagcagctgaacccaaggctgtcactgaatcttaccctgctctgttttgccaggtgatgggagggaacccattctctttctctmtgagcacgttacttcacagggcaggaaggaaaagaccttttttaagctctgtcctcccctggggtttgatattggaggatcacagcrttttaaaactcacacagcgttcagcatagtcagaaggaacgagwtgcatcctgttgagcagaatttgctaaagcgttcaagtccattacgtacagctgtggagctggaagaggttgaaaccccaggattctattttagtggggaaatgtatgcaaaaagtgtacaagaaagaataatggagtgaggcatgtgactgtactaattctgttatac

SEQ ID NO: 70509 - DNA, 600 bp, Chicken  19866894344021_5
gatggtgggaaacggtgtgacagagggaagctstgaagwctgctgttcatcgctccctatctggagtgatygtagatgaacagcagtggctgcttgacaaattgcattaaggcctctcattttatagggcagcagctgaacccaaggctgtcactgaatcttaccctgctctgttttgccaggtgatgggagggaacccattctctttctctmtgagcacgttacttcacagggcaggaaggaaaagaccttttttaagctctgtcctcccctggggtttgatattggaggatcacagcrttttaaaactcacacagcgttcagcatagtcagaaggaacgagwtgcatcctgttgagcagaatttgctaaagcgttcaagtccattacgtacagctgtggagctggaagaggttgaaaccccaggattctattttagtggggaaatgtatgcaaaaagtgtacaagaaagaataatggagtgaggcatgtgactgtactaattctgttatactgcagagtatatgtataaagcctctgctgcttgggcaggctcaactgcagccctgcaattagggggctagattagggcccaggctct

SEQ ID NO: 70510 - DNA, 600 bp, Chicken  19866894344021_6
gttcatcgctccctatctggagtgatygtagatgaacagcagtggctgcttgacaaattgcattaaggcctctcattttatagggcagcagctgaacccaaggctgtcactgaatcttaccctgctctgttttgccaggtgatgggagggaacccattctctttctctmtgagcacgttacttcacagggcaggaaggaaaagaccttttttaagctctgtcctcccctggggtttgatattggaggatcacagcrttttaaaactcacacagcgttcagcatagtcagaaggaacgagwtgcatcctgttgagcagaatttgctaaagcgttcaagtccattacgtacagctgtggagctggaagaggttgaaaccccaggattctattttagtggggaaatgtatgcaaaaagtgtacaagaaagaataatggagtgaggcatgtgactgtactaattctgttatactgcagagtatatgtataaagcctctgctgcttgggcaggctcaactgcagccctgcaattagggggctagattagggcccaggctctgtttgctccaagtatctaacaaggaagtactggagggagattat

SEQ ID NO: 70511 - DNA, 599 bp, Chicken  19866894344024_1
  misc_feature (1)..(134): n is any nucleotide
nnnnnnnnnnnnnnnnnnnnnnnnnnnnnnnnnnnnnnnnnnnnnnnnnnnnnnnnnnnnnnnnnnnnnnnnnnnnnnnnnnnnnnnnnnnnnnnnnnnnnnnnnnnnnnnnnnnnnnnnnnnnnnnnnnnnnngatggtaaatggcctggagcatctcctgtatgaggagaggctgagtaaacggggtctgttcaggctggggaaaagaagactgggaggggatctgataaatatgtataaatatctgaagggaggtgggaggcaaatggatgaggccaggctcttctccgtggtgtgyagtgataggacaaggagtaatggcctaaaacttgaacataggaagttctgygctaacaagcagaacagtaaagatgatggagcactggaacaggttgcccagagatgttgtgaagtctccttctctggagatattcaagacgcagctggatscctacctctgcaatgtattgtagagcacctgctttaacaggggggttgaaatcgatgatgtcttgtggacccttccaacacctgagattgtgtgatgagccagcatgtgcccttgcagcccagaaagccaaccatatcctgggctgc

SEQ ID NO: 70512 - DNA, 599 bp, Chicken  19866894344024_2
  misc_feature (1)..(83): n is any nucleotide
nnnnnnnnnnnnnnnnnnnnnnnnnnnnnnnnnnnnnnnnnnnnnnnnnnnnnnnnnnnnnnnnnnnnnnnnnnnnnnnnnnngatggtaaatggcctggagcatctcctgtatgaggagaggctgagtaaacggggtctgttcaggctggggaaaagaagactgggaggggatctgataaatatgtataaatatctgaagggaggtgggaggcaaatggatgaggccaggctcttctccgtggtgtgyagtgataggacaaggagtaatggcctaaaacttgaacataggaagttctgygctaacaagcagaacagtaaagatgatggagcactggaacaggttgcccagagatgttgtgaagtctccttctctggagatattcaagacgcagctggatscctacctctgcaatgtattgtagagcacctgctttaacaggggggttgaaatcgatgatgtcttgtggacccttccaacacctgagattgtgtgatgagccagcatgtgcccttgcagcccagaaagccaaccatatcctgggctgcatcaaaagcagcatggccagcagggtgagggaggtgatcctgcccctctac

SEQ ID NO: 70513 - DNA, 600 bp, Chicken  19866894344024_3
gcatctcctgtatgaggagaggctgagtaaacggggtctgttcaggctggggaaaagaagactgggaggggatctgataaatatgtataaatatctgaagggaggtgggaggcaaatggatgaggccaggctcttctccgtggtgtgyagtgataggacaaggagtaatggcctaaaacttgaacataggaagttctgygctaacaagcagaacagtaaagatgatggagcactggaacaggttgcccagagatgttgtgaagtctccttctctggagatattcaagacgcagctggatscctacctctgcaatgtattgtagagcacctgctttaacaggggggttgaaatcgatgatgtcttgtggacccttccaacacctgagattgtgtgatgagccagcatgtgcccttgcagcccagaaagccaaccatatcctgggctgcatcaaaagcagcatggccagcagggtgagggaggtgatcctgcccctctactctgtgctgatgaggcctcacctggagtactgcgtccagatgtgaagtcctcagtacaggagagaaatagacctgttggagtgtgttcagaggagggacaca

SEQ ID NO: 70514 - DNA, 600 bp, Chicken  19866894344026_1
ctacctaatgaatattctcatagctggatagtccacagagaggatcatgaaaaactgagacctaacaacaccaaacagcaatgtctagtcaatgaattctgtgtattatctatcagcatccctgcaatacagtacattaataacccagtttattttatgatggggtatttgctaacattttacagagtgtagacatcatcttaataaaaaaacaaaacactagtttgtggaggcctcccatcacatttgcacagaatctctctactcgtgatcccagtacatctttttggcaaccagaayaatgtcttacatggataagtaatatttggaaaacatccataatttttccatttttctaatgcagtcaacagctggaaacaagcagccaagtcagttcaagagaggccaccagtgagcgctgcccaccagaacttcagggttgttgatgtagtgatctaagcacccgcaaactaaacagggtgctgctggatcaggcttcccccagaggtttgtgggcattgctaaacacagccatttccccagataagcattcttccctctgcacagagccaagcaacatgatgcaatggtagatgacat

SEQ ID NO: 70515 - DNA, 600 bp, Chicken  19866894344030_1
aaaatgtatgaatttttccagtagtttgccattgcatttaaaactgcttaaaattatatttttgacacgcttataaaaattgtaacataataatctgtgcataaaatatattttaaattaatgtacagatttagaaaaagattcttcctatatcacttttgagcactctaatgtacctattaattattgttgaaagtactagtgaactaaaatatccaacaatgcacataatgaatatgaaacatctatttcttcattttttatagtctctgagtatatcttaccaatataagctgaggrctgaaactactgaacgcagatcgagaggtgatcctgcacctctactctgcactggtgaggcctcacctggagtaccgcatccagatttggagtcctcagtacaggagagacatgaacctgttggagtgcatccagaggagggccacaaaaatgatcaaaggcttggaacacctctcctaccataacaggctgaaagagctggggctgtccagcctggagaagagaaggctccaaggtgacctgatagtgccctttcactatctaaaggggaactacagaaagcaggagacagactttagc

SEQ ID NO: 70516 - DNA, 600 bp, Chicken  19866894344032_1
acagcaagtgtattcagaccagaacacacagctggaaccaaacagtttatggtcttatttgtggcaggatgtcttacatgtgcaaccagaatgaaaacttacacctgaatatcagctgtacaagcttagtgattttccagcccagggcttaagacagtgagtggaattaacattcgtaacacagctttctccctacataaattgggatttaacccttcttctgtactttgaaaagacagaataattccaagtccttgtgaaaaaaaaaagtaagtatttttaaggactgcactgttgtgyaagctgtgattctgagctctggttttcccaatgctacccatccccttcctataattttcaatctaccagacagttttgactaatcacagacgttctgaatgaagccatgcctcccctggggaatcaaacttcttaagcctcttcttgatgcagtcaaagctttttttatacacaaaaacctgcaacagaaaggccgttgatttcccagcattatcttttttctccgcaggtcttcacatcttgagaacctgggagctctacaggagcagcagttctctctatctcaggaccaattaggcc

SEQ ID NO: 70517 - DNA, 600 bp, Chicken  19866894344041_1
agctaggcagatttaattttgtaaagaagggatcctattgttctaacattattttgtttcatgatgttttgagaaattggctccctctggtttggatttttgaagactggcatggggcagatatgatgaatgaagaaagcctgtaggactataaatggaatagaactgtagtttccatgctcacttatgtgtggatcttacattcttacatatcagaaaaaaaaggggggaggggggtgaaactgttgacatagagctgagagtacattagtaaatctagggtaagatgcatccaagaayactgtaaaccctcagagcttggcattatcttaaactggaatacaataaccctggaaatacgcagctaagggcatctagatgaatgtaattttttctgcggtgtcacttgtggccaagcatgtgattatagttaatatctgaagccaaagattctactaccctctcctgccagcaactataataattccccaaggtagagggaatccacctcttatctcctatggagcctctcctcgtaggtttaaccttgarcccaagttgcaagatttccactcttagcacatgaattagaaaagtgta

SEQ ID NO: 70518 - DNA, 600 bp, Chicken  19866894344041_2
agagctgagagtacattagtaaatctagggtaagatgcatccaagaayactgtaaaccctcagagcttggcattatcttaaactggaatacaataaccctggaaatacgcagctaagggcatctagatgaatgtaattttttctgcggtgtcacttgtggccaagcatgtgattatagttaatatctgaagccaaagattctactaccctctcctgccagcaactataataattccccaaggtagagggaatccacctcttatctcctatggagcctctcctcgtaggtttaaccttgarcccaagttgcaagatttccactcttagcacatgaattagaaaagtgtacgtgcatggaagtwactatcaagtttacacttccatcttcaccaacatatttcccaaatttcttctcttatttcaatattgaaatgctactgaaaacgtacgcttcataagagatgagctccgccacrtcaaagatcccacactcaccaacctgtctcaataaatactcacatgggtatttattttacttaaccttaagccaaagcagctcagctttgttgcgcagacggtccctatattttcttgtttttg

SEQ ID NO: 70519 - DNA, 600 bp, Chicken  19866894344041_3
gagcttggcattatcttaaactggaatacaataaccctggaaatacgcagctaagggcatctagatgaatgtaattttttctgcggtgtcacttgtggccaagcatgtgattatagttaatatctgaagccaaagattctactaccctctcctgccagcaactataataattccccaaggtagagggaatccacctcttatctcctatggagcctctcctcgtaggtttaaccttgarcccaagttgcaagatttccactcttagcacatgaattagaaaagtgtacgtgcatggaagtwactatcaagtttacacttccatcttcaccaacatatttcccaaatttcttctcttatttcaatattgaaatgctactgaaaacgtacgcttcataagagatgagctccgccacrtcaaagatcccacactcaccaacctgtctcaataaatactcacatgggtatttattttacttaaccttaagccaaagcagctcagctttgttgcgcagacggtccctatattttcttgtttttgtgaatttgtatacagataaacagcattcatgatctgacatttcactttgattgcaagttgct

SEQ ID NO: 70520 - DNA, 600 bp, Chicken  19866894344041_4
agttaatatctgaagccaaagattctactaccctctcctgccagcaactataataattccccaaggtagagggaatccacctcttatctcctatggagcctctcctcgtaggtttaaccttgarcccaagttgcaagatttccactcttagcacatgaattagaaaagtgtacgtgcatggaagtwactatcaagtttacacttccatcttcaccaacatatttcccaaatttcttctcttatttcaatattgaaatgctactgaaaacgtacgcttcataagagatgagctccgccacrtcaaagatcccacactcaccaacctgtctcaataaatactcacatgggtatttattttacttaaccttaagccaaagcagctcagctttgttgcgcagacggtccctatattttcttgtttttgtgaatttgtatacagataaacagcattcatgatctgacatttcactttgattgcaagttgctgtaattaagaaccacagctttatgaattttaatcatcagctgtaagtggtacattatctctagttcacaatgaaagcaatcaagtggacaagatatttttagagacattactgt

SEQ ID NO: 70521 - DNA, 439 bp, Chicken  19866894344045_1
aggcagtagaagtgtgttttgggagtggggactctcactttttcttggtctgttctagaaaccatcaacttctggccagcaagcggtagcaaaggaaggtaatagtctgaaagaaaactttggactcacttttctgaattatgcagctgcttatggaaggataggatttaactgtggaaaactgatgtgtgaaataagtctggacttatttccagggggctggagaggtgagcgcagcactgacttcagtcatgcaagccctcatggtgggctcctatttgcagtacaaatgttaactcmgagacattcaccctaaacatagggaaaggggattcaaaagaaagttaagcaatattcaaactgactctaagcaaaacatgcgtcagctaagtgacatattggaaatatattggatgtttattcgtggttttcctaaggg

SEQ ID NO: 70522 - DNA, 600 bp, Chicken  19866894344048_1
actgagagagagcttctgttggatacagccttagtctagagcctttcatttacacctttctttaattagtatatttagtggctgaaaaatccttgttacaaataacaattacaagtaacaaggtgttgttaaagcaatatgtaggctttgactgccactattttagctttcattcagttcacctagaactgctacttcaatctttggcttttgatgtaatagacccccttcaaaacctgcatgaaactgatttaaaataactgtagaggcatacagtgtattttcttaatcttacagatmgattttttttttgtatttgtttctctctgatctttgtaaaaattcaatagaggaacttgaaatgctacatttaagtaagaccaaatctaaaatagaaaaacaaataaaagcaggttgctattcatggtaggtctgatttcatgcattacagctcagccaaggcccatttsaggagaagcttctgtggtttgccagcagcagcctccggcagctcaggctgcttctggcgcctgctgtaaatattctgctgctttacaactggcaactgttaaacttggcacaagcccatgtaaaatgttt

SEQ ID NO: 70523 - DNA, 600 bp, Chicken  19866894344048_2
ctgagagagagcttctgttggatacagccttagtctagagcctttcatttacacctttctttaattagtatatttagtggctgaaaaatccttgttacaaataacaattacaagtaacaaggtgttgttaaagcaatatgtaggctttgactgccactattttagctttcattcagttcacctagaactgctacttcaatctttggcttttgatgtaatagacccccttcaaaacctgcatgaaactgatttaaaataactgtagaggcatacagtgtattttcttaatcttacagatcmattttttttttgtatttgtttctctctgatctttgtaaaaattcaatagaggaacttgaaatgctacatttaagtaagaccaaatctaaaatagaaaaacaaataaaagcaggttgctattcatggtaggtctgatttcatgcattacagctcagccaaggcccatttsaggagaagcttctgtggtttgccagcagcagcctccggcagctcaggctgcttctggcgcctgctgtaaatattctgctgctttacaactggcaactgttaaacttggcacaagcccatgtaaaatgttta

SEQ ID NO: 70524 - DNA, 600 bp, Chicken  19866894344048_3
tgagagagagcttctgttggatacagccttagtctagagcctttcatttacacctttctttaattagtatatttagtggctgaaaaatccttgttacaaataacaattacaagtaacaaggtgttgttaaagcaatatgtaggctttgactgccactattttagctttcattcagttcacctagaactgctacttcaatctttggcttttgatgtaatagacccccttcaaaacctgcatgaaactgatttaaaataactgtagaggcatacagtgtattttcttaatcttacagatcgmttttttttttgtatttgtttctctctgatctttgtaaaaattcaatagaggaacttgaaatgctacatttaagtaagaccaaatctaaaatagaaaaacaaataaaagcaggttgctattcatggtaggtctgatttcatgcattacagctcagccaaggcccatttsaggagaagcttctgtggtttgccagcagcagcctccggcagctcaggctgcttctggcgcctgctgtaaatattctgctgctttacaactggcaactgttaaacttggcacaagcccatgtaaaatgtttag

SEQ ID NO: 70525 - DNA, 600 bp, Chicken  19866894344048_4
gagagagagcttctgttggatacagccttagtctagagcctttcatttacacctttctttaattagtatatttagtggctgaaaaatccttgttacaaataacaattacaagtaacaaggtgttgttaaagcaatatgtaggctttgactgccactattttagctttcattcagttcacctagaactgctacttcaatctttggcttttgatgtaatagacccccttcaaaacctgcatgaaactgatttaaaataactgtagaggcatacagtgtattttcttaatcttacagatcgamtttttttttgtatttgtttctctctgatctttgtaaaaattcaatagaggaacttgaaatgctacatttaagtaagaccaaatctaaaatagaaaaacaaataaaagcaggttgctattcatggtaggtctgatttcatgcattacagctcagccaaggcccatttsaggagaagcttctgtggtttgccagcagcagcctccggcagctcaggctgcttctggcgcctgctgtaaatattctgctgctttacaactggcaactgttaaacttggcacaagcccatgtaaaatgtttaga

SEQ ID NO: 70526 - DNA, 553 bp, Chicken  19866894344048_5
cattcagttcacctagaactgctacttcaatctttggcttttgatgtaatagacccccttcaaaacctgcatgaaactgatttaaaataactgtagaggcatacagtgtattttcttaatcttacagatcgattttttttttgtatttgtttctctctgatctttgtaaaaattcaatagaggaacttgaaatgctacatttaagtaagaccaaatctaaaatagaaaaacaaataaaagcaggttgctattcatggtaggtctgatttcatgcattacagctcagccaaggcccatttsaggagaagcttctgtggtttgccagcagcagcctccggcagctcaggctgcttctggcgcctgctgtaaatattctgctgctttacaactggcaactgttaaacttggcacaagcccatgtaaaatgtttagataaaaaaacaaatactcatttttctctcccttcagaggtaatcatgttaataaataccaagaagaacaaacaatcaaatcagtagtgaggatacattagtaaatactgttatctcgctca

SEQ ID NO: 70527 - DNA, 600 bp, Chicken  19866894344050_1
gatttttaagtaaggataaaaatgcagcagtcttcctggaataaaactctgacagactatgatgaattaccttattatggttgttcgcatgacaaatgtacttgatcagtgtttcttcttgggaatagttgagcttatccagaggcaaaatttgaaaggaaatgaaagctaactagtaatcctaagtggaatgcatcagaatttctggaagcagagactgagacacctaatcaattattacttatgtcaatactaaaacacttctcatgtccctcataatatgacttcttcctttatctytttaatgtcattgatataaatttcacatacttttataattaagatggtaaaattaagagatcaacttaaagccaaatgttttataaatagcaagatttagcatttttcatgctgacagaccagttgcagaactagcttagagcacttactgcgcttgcactgccatttctctgtcagtctctgtgctcaccacatctatccattattaaataactactgactttgttacccaacatgacctagacaatccttgttttcaggccagtttgggactttgtgtttggtgtagaaggcatggtt

SEQ ID NO: 70528 - DNA, 600 bp, Chicken  19866894344050_2
gattcccctgcagcctggggagataccatggcagagcagtcactttcctgcagtctgtggaagggaccatgcagaagcatggaggacctcctgtgctagaggaagtgaatgagccctgaagaaactgtgtcttgtaggcctccctatactggggagtatttccctatactccacatctggatacagcactccaggtgaggcctcatcagtgcagatcaactgcagggggcaggatcaactccattgatttgctggctgtgcttcttttcatgcagcccaggatacagttggctttctggrctatatggccacgttgctggtgcatgtttagcttcctgtctacctccaggtcttttttggaaaggctatgctcaatcctttcattccccagcttgtattggtaacgaggattgcctcgaccttgcatatggatttgctgaacttcatgagattctgggctcactactcaagactgtctaggtccttctagatggcatcatgttcctcttgtgtgtcaactgctccccagagcttggtgtcatcagcaaacttgctgagggtgcactcaaccccactattaatgtcattgatgaagatatt

SEQ ID NO: 70529 - DNA, 600 bp, Chicken  19866894344053_1
tggcccagttcaacaagacgacccagcaaagaacaagcttgcaatcagtgtagctctttggaaacaggtggtagagtgataatgtcacttcctttccaccagcagcctggcagctgccctctactccagacctggagctctggaatcattccagctcaggtttgtcagctcctgctctaaaggtcagctgcagctacgcccagcaaaagctgctcccctcagcaaaactaaacaaaactaaataaatgaaagaaagagaagaaagaaaaggaaaggaagaaagagaagaaaaaaaaggaraggaaggaaggaaggaaggaaggaaggaaggaaggaaggaaggaaggaaggaaggaaggaaggaaggaaggaaggaaggaaggaaggaaggaaggaaggaaaacagtaaagatttgtctctcaaatcaaatgggcagctgtgtctaaaggtcaaattccagctactggaactcacttttgttgcaatcctgcacaagcagtgagcagaccctaagtgggaagaaaccaaataatgagccaatgagtctctggtctctgccacttgaggaaaccactaagaaactactgtatttaaaaaaa

SEQ ID NO: 70530 - DNA, 600 bp, Chicken  19866894344053_2; identical to SEQ ID NO: 70529

SEQ ID NO: 70531 - DNA, 600 bp, Chicken  19866894344053_3; identical to SEQ ID NO: 70529

SEQ ID NO: 70532 - DNA, 600 bp, Chicken  19866894344053_4; identical to SEQ ID NO: 70529

SEQ ID NO: 70533 - DNA, 600 bp, Chicken  19866894344071_1
gcttttcccatctatctggtttctcctacctccacttctctcacaagaagcaaagccaagcctgccccacacctgtgtgatgtggagaaagctgcatcattttcccttcgctcttcgtgctctcaagtttcaattgctcctgcagacccttctgggctctctcttctgagacatcttggccgtaaagtacctctacagacataaaatcatttttttctgtgtgaagatgttgctattttcacagtaaaatactcctgctgtgcagtgctgcacctccacacaggacccttgtcacagtgkctgtgcccttgtggctctgyctgaygcttcagaggcaagcccgcagctccccatgtcctggccagctcaggaaacttggctgctgagcaggagaagacagccccacacacagcaaaggtaggtatcatttctcctctggtagctctgtcctgttaagtgataaaaagcagtttattaacgtgaactatggcattgtgaggtgattgaggagaataccaatgcaggaccaagagcaagggctgggaggaatgtggtcatactgctccagtgcttgtagggacccttatgtttactcaggac

SEQ ID NO: 70534 - DNA, 600 bp, Chicken  19866894344071_2
ttctcctacctccacttctctcacaagaagcaaagccaagcctgccccacacctgtgtgatgtggagaaagctgcatcattttcccttcgctcttcgtgctctcaagtttcaattgctcctgcagacccttctgggctctctcttctgagacatcttggccgtaaagtacctctacagacataaaatcatttttttctgtgtgaagatgttgctattttcacagtaaaatactcctgctgtgcagtgctgcacctccacacaggacccttgtcacagtgkctgtgcccttgtggctctgyctgaygcttcagaggcaagcccgcagctccccatgtcctggccagctcaggaaacttggctgctgagcaggagaagacagccccacacacagcaaaggtaggtatcatttctcctctggtagctctgtcctgttaagtgataaaaagcagtttattaacgtgaactatggcattgtgaggtgattgaggagaataccaatgcaggaccaagagcaagggctgggaggaatgtggtcatactgctccagtgcttgtagggacccttatgtttactcaggacttttggtgtgtctgtgctga

SEQ ID NO: 70535 - DNA, 600 bp, Chicken  19866894344071_3
ctacctccacttctctcacaagaagcaaagccaagcctgccccacacctgtgtgatgtggagaaagctgcatcattttcccttcgctcttcgtgctctcaagtttcaattgctcctgcagacccttctgggctctctcttctgagacatcttggccgtaaagtacctctacagacataaaatcatttttttctgtgtgaagatgttgctattttcacagtaaaatactcctgctgtgcagtgctgcacctccacacaggacccttgtcacagtgkctgtgcccttgtggctctgyctgaygcttcagaggcaagcccgcagctccccatgtcctggccagctcaggaaacttggctgctgagcaggagaagacagccccacacacagcaaaggtaggtatcatttctcctctggtagctctgtcctgttaagtgataaaaagcagtttattaacgtgaactatggcattgtgaggtgattgaggagaataccaatgcaggaccaagagcaagggctgggaggaatgtggtcatactgctccagtgcttgtagggacccttatgtttactcaggacttttggtgtgtctgtgctgagtgat

SEQ ID NO: 70536 - DNA, 600 bp, Chicken  19866894344077_1
ggtaagacgacaggatcaccagatgaaagcagtttatgtggctaaggaagtgcaggtaagaatagagaattaggttttctttgtatgattatcaagatgagacatatttctataaaaaacaaacgaaaggaaaacaagaaacagacaaaaacactcataaagccaatcagaagagaaagaaaacagttctttagtgaaggagtggttttctcagcttaaaggggttcagatctacaggtgtcactcaagggaggctgccatggggtatatgtggaaggaaaaccattttctttttgtgtyaaaaaaaaaaaaaaaaaaaaaaaaaaaaggagtatagctttcttactccattaaacacatctgtgagggaggtggtttcatctctttctgtgcctgtaggataatccattcccaagcacctgcgttggaatgtccaaattgtttcactatcagagtgctctgggatgattttggcatcagccaatctgccctcctctaagcaggtcctgggcatgctttgggtattaatgtgagtgagaaacaattcctacaaggcaatttggatgtggctactctgctttggagcgtaagagtatttag

SEQ ID NO: 70537 - DNA, 599 bp, Chicken  19866894344083_1
  misc_feature (1)..(10): n is any nucleotide
nnnnnnnnnntttgatgtgtgtttataatgggtggacaaaggagatattacatcttttgttagcactaagtaccaaggtcaggttgggtaaataagcaatgatttcagaattttaattatgtaagaaatgattctgtttaattcttgcagaaatttttctgcctcctaaggattttccagaaggtagcattttgacattaaccattttttttgtgtgttcagacatacacattttgaagtatgttttatttctaggcttgtaagtattaggaacataattcagatcttctctggtttggstgagggtgcactgcaagcttaataggaggcatgtggatgttttcactgtagcataatgaagattcaacagagtttcctctagaatactaatcagtggaattacaagatattttaacatgggacacaaagtggttttcttctaaataaaaattattggcctttcattatttaaaatgctaaaattttagtttcctaaatcttatgaatttacttttctagttgcttatgtattatttaaagtatgatttcactttgttctgttccaagttataaactaaccttgtaacactgagcacatc

SEQ ID NO: 70538 - DNA, 600 bp, Chicken  19866894344094_1
gcctttgttcaaaatgtactttttgtcacagtggcttttggcattagcatgcacgactagaagaaatattcaacagtttggggcaagcaggataaaacacccacccaactccaggaatctgaaacatccaggtttatgcactaatttgacagaaggatttgacatcatgcctactgtaatcaccctttagaagttcaggcataacttctgagattcacagacagcagcttgtctgcaaaggcagaggcttatttagctgaacatgggtaaggtgtgggttactaaaggtcataattaccmaagcactttgctctgctctccagatgtccccttggttagttggtttgtccataagcgatcaggaaatgcagagtacctttcttgctgcagctcagccagaacagaagatctttagttgtgctccttcatctgtaaatgttattgcacagctagttacatatacagctctaattgctgacttgttgagcttatttgtaagtttgctaagcgtatagtgcaatagaaagcaacaaaatgcaagcaacataaaggaaaaaataatccacgcctggcttcctatttcagaagtcagaagcatgt

SEQ ID NO: 70539 - DNA, 600 bp, Chicken  19866894344094_2
atttcagaagtcagaagcatgtcttttgctaatttcctatcttgcatgtgggtagcttgcctacaaagtttcctaacatcagaggcgtaattgttaacacgcatcgcaaatgtgtttgcctattaggctgagctttagatctgcccttggaatttgtgtgtggtgaaaagtatttggcagagattaaacaagagcagaggaaaatctaacagagcgcgcgatctaagaaggtaaggaaaggaagagaggctatgtttaacttaacacaggatcaagctggaaggctttttatgtgttggmtgccttttgtagatcaacctatgtggggagcgcatccagccactggaatacaagctgttttcaacttcacactgtttggctgcaagatcctctctctcctctgggttcagtctgtaagtcagcatgactacaggatctgagatgcagctaaacagtggttcagctaactgtggttccagaagagaaataaatgggcctatctctggttgttctcttggtatggattacctaaagaggcactgtgtggctttgtcagctggaaagtaagggtgttgagaatgagatcagacagaaaaacar

SEQ ID NO: 70540 - DNA, 600 bp, Chicken  19866894344094_3
tgccttttgtagatcaacctatgtggggagcgcatccagccactggaatacaagctgttttcaacttcacactgtttggctgcaagatcctctctctcctctgggttcagtctgtaagtcagcatgactacaggatctgagatgcagctaaacagtggttcagctaactgtggttccagaagagaaataaatgggcctatctctggttgttctcttggtatggattacctaaagaggcactgtgtggctttgtcagctggaaagtaagggtgttgagaatgagatcagacagaaaaacartctcttacgtggagagaaatagaagtgactgagactacccactctaccagggtgaagartaaggggaacaaaataaaagataatgaaatagcctagggtttagttacctcctgataaaagagcagcatgatagaaatacgaaaagccttgaatgagaaaaggatacatcttcaagacacgctgttgaaatataggtgtcgtcattgcttgagccaggaaatgtaggttcaaagtgtggtgggatattttttatgactaacaagaatcttgtatgatgcaatgctagtaaaagcacattgg

SEQ ID NO: 70541 - DNA, 600 bp, Chicken  19866894344094_4
ttcaacttcacactgtttggctgcaagatcctctctctcctctgggttcagtctgtaagtcagcatgactacaggatctgagatgcagctaaacagtggttcagctaactgtggttccagaagagaaataaatgggcctatctctggttgttctcttggtatggattacctaaagaggcactgtgtggctttgtcagctggaaagtaagggtgttgagaatgagatcagacagaaaaacartctcttacgtggagagaaatagaagtgactgagactacccactctaccagggtgaagartaaggggaacaaaataaaagataatgaaatagcctagggtttagttacctcctgataaaagagcagcatgatagaaatacgaaaagccttgaatgagaaaaggatacatcttcaagacacgctgttgaaatataggtgtcgtcattgcttgagccaggaaatgtaggttcaaagtgtggtgggatattttttatgactaacaagaatcttgtatgatgcaatgctagtaaaagcacattggagaaaacaaaactctgggtcttagcatttaagcagaatgaccttttgcaggcaaaatta

SEQ ID NO: 70542 - DNA, 600 bp, Chicken  19866894344101_1
ctgccacatgaaaagctttcttcttttaaactcgttgccatgatagaaggctttttgctgttcttgtttttcatgcagactcaccttttgctgccgggtccaaagcagatcagtgcctggtctgacgataaagccttttagataaggagttaaaaacacatttttactgatccagatgaatttaagaaaaatattggggaaactcattcagaatatataaaaaaaatgtgcgtatgaaataggtgttttcattttaaagagcttattacactgcctgtacttaggcatcttgggagaaarggtatatgtgaatgtagagttggatttcctgtaaaggaaaacgaaataaacaaaacccacacattaaatgtgcatagtgggaatgggtattttcaagttggattatggaattaagcaatgttttggtggagtcagataaacatttttaccttctcttcccttaaattaactgtattttgtatcttgaaagaaacagaacaattctgcctgtgaagaattgagtagattttattttacttttataattgtaaattaaatcttcccagaactgaacaatgattctttttttcctttgccacc

SEQ ID NO: 70543 - DNA, 600 bp, Chicken  19866894344101_2
aggaaaacgaaataaacaaaacccacacattaaatgtgcatagtgggaatgggtattttcaagttggattatggaattaagcaatgttttggtggagtcagataaacatttttaccttctcttcccttaaattaactgtattttgtatcttgaaagaaacagaacaattctgcctgtgaagaattgagtagattttattttacttttataattgtaaattaaatcttcccagaactgaacaatgattctttttttcctttgccacctaaattatttctaaatatttctcaaacaaaattytttacatttcatttgacacatatggtcatgcagatagtgctgtgtttgaatggtttgtgtcaggatctgacagatctgagggggagttggctctktacatcccagtcactccaagctgtgtcttggctttgactcctggagcattagggatgagtctgttgctctctgtgacatggtgagagctttaactcaggaagtaaagtgtgatttctaaaccaaaaaattctgatctatacagaaacaaaaatgaggggaaactttaatctgtttccctacgcccagcaaattatattgcgcgct

SEQ ID NO: 70544 - DNA, 531 bp, Chicken  19866894344101_3
agtcagataaacatttttaccttctcttcccttaaattaactgtattttgtatcttgaaagaaacagaacaattctgcctgtgaagaattgagtagattttattttacttttataattgtaaattaaatcttcccagaactgaacaatgattctttttttcctttgccacctaaattatttctaaatatttctcaaacaaaattytttacatttcatttgacacatatggtcatgcagatagtgctgtgtttgaatggtttgtgtcaggatctgacagatctgagggggagttggctctktacatcccagtcactccaagctgtgtcttggctttgactcctggagcattagggatgagtctgttgctctctgtgacatggtgagagctttaactcaggaagtaaagtgtgatttctaaaccaaaaaattctgatctatacagaaacaaaaatgaggggaaactttaatctgtttccctacgcccagcaaattatattgcgcgctgttgaagacccttgtgtaggttctgt

SEQ ID NO: 70545 - DNA, 600 bp, Chicken  19866894344109_1
catccctgcaggcattcaaggccaggctggatgtggctctgggcagcctggtctgctggttggcgaccctgcacatagcagggggttggaacgggatgagcactgtggtccttttcatcccaggccattctaggagtctattctatatgtttaaatgtatgctattctatgtagcacaaaaaaaaacaacacctatgtattaaaccatactctttatctaagttagaaagcacacgtcagagaacagtagatggtgcccccatcagctaatattgatggtaacaagtaggtatgcttcayaaaactgtccatttttgagtgtaaccccaggattcacttcattcagacagtacttaacatgctttccttctggtaccaagtatttagagaggaggtaagatgacttttcactgcttcagatatattctaccagcagaaccttaacacagacagtttcatatgttaatacatggctatgataacgtattcactgaaatgctgttcttcctttgtctacactaggcctcagatgaaaacgtgcacaatattagcaatacatatggaagactcatagggatctccaaggtttttgtttgtttt

SEQ ID NO: 70546 - DNA, 600 bp, Chicken  19866894344115_1
gtaatgcaagtgggatgactgtcatttcaccctaagttccgtgacatggttgttgccttgctatacttggatgcaaactgctctgagtcaaatgccagaataccagtgttggtatttattaaagtgtaaatcaataccagaaacctgaaaatgcactgacagtttaaccgatgtcccctattactggaacaaattaaccattagtcaagggcagtgttgtgccattaaagacttcagtattttccctgtgaagtggtggtttttctcagtggaattaaaaagaaaaccagtgaatgaggmtctggagaagtaataacacttaattttaatagccccaaattacagaaggcttttaggacaactgttccatcctttggcctttcaggtatctcacygctttagctgggtaagaggaattgccattagtgattcagtagattagtcatgagatactggagtccaacttaacatttggtaagaattgtggggatttgggttgaataagtagctgcatgaatgattgggattgccagcatcagctgctgctggtccatgtttcttacccttagaggtacctgtaattgtttgctatctgtatag

SEQ ID NO: 70547 - DNA, 600 bp, Chicken  19866894344115_2
cagaataccagtgttggtatttattaaagtgtaaatcaataccagaaacctgaaaatgcactgacagtttaaccgatgtcccctattactggaacaaattaaccattagtcaagggcagtgttgtgccattaaagacttcagtattttccctgtgaagtggtggtttttctcagtggaattaaaaagaaaaccagtgaatgaggmtctggagaagtaataacacttaattttaatagccccaaattacagaaggcttttaggacaactgttccatcctttggcctttcaggtatctcacygctttagctgggtaagaggaattgccattagtgattcagtagattagtcatgagatactggagtccaacttaacatttggtaagaattgtggggatttgggttgaataagtagctgcatgaatgattgggattgccagcatcagctgctgctggtccatgtttcttacccttagaggtacctgtaattgtttgctatctgtatagtaaggtggttttttcataattgaaagaattttactgtaatttcatgtatgcaagtgcttgccttagagatgagaaacacttcaatcttggttctg

SEQ ID NO: 70548 - DNA, 600 bp, Chicken  19866894344121_1
aaggcattttctctcagacttggcatttctcatgtgcttggaatggactacacggggttgtacattattttcctctgaaaactaaggaaagtctttcaacttgtttgcattgatgtcattggaagattccagaagaagacagacctgatccccatttgagacaacattttccatatatatgaagttacaattgatcagatttattttcactgcttttcagctgtgattaagcagcacttctaggtggctggacagtaggccttgagcacagtgtctgtagaaaccagacatttgggcagyttcacttgtgccagatgattacctcctgtacgaggacagtataagagagctggggctgttcagactgaagagaagamtcccaggagacctgatagtggcctttcagtatctaaaggggggctgtaagaaagaagggaacaaattctttagctgggtctgctgtgataggacaaaggaaaatgattgcaaactaaagggggagaatttagcttggacgtaaggaagaagttttttacaatgaaggtggtgakgcagtggaacaggttgccagagatgtgttggatgccctgtacctgtaga

SEQ ID NO: 70549 - DNA, 600 bp, Chicken  19866894344121_2
aaaactaaggaaagtctttcaacttgtttgcattgatgtcattggaagattccagaagaagacagacctgatccccatttgagacaacattttccatatatatgaagttacaattgatcagatttattttcactgcttttcagctgtgattaagcagcacttctaggtggctggacagtaggccttgagcacagtgtctgtagaaaccagacatttgggcagyttcacttgtgccagatgattacctcctgtacgaggacagtataagagagctggggctgttcagactgaagagaagamtcccaggagacctgatagtggcctttcagtatctaaaggggggctgtaagaaagaagggaacaaattctttagctgggtctgctgtgataggacaaaggaaaatgattgcaaactaaagggggagaatttagcttggacgtaaggaagaagttttttacaatgaaggtggtgakgcagtggaacaggttgccagagatgtgttggatgccctgtacctgtagacattcaaggtcaggctgaatggggctctgagtaacctagctgagctgtggatgtccctgttcattgcagggcagttg

SEQ ID NO: 70550 - DNA, 511 bp, Chicken  19866894344121_3
acagtaggccttgagcacagtgtctgtagaaaccagacatttgggcagyttcacttgtgccagatgattacctcctgtacgaggacagtataagagagctggggctgttcagactgaagagaagamtcccaggagacctgatagtggcctttcagtatctaaaggggggctgtaagaaagaagggaacaaattctttagctgggtctgctgtgataggacaaaggaaaatgattgcaaactaaagggggagaatttagcttggacgtaaggaagaagttttttacaatgaaggtggtgakgcagtggaacaggttgccagagatgtgttggatgccctgtacctgtagacattcaaggtcaggctgaatggggctctgagtaacctagctgagctgtggatgtccctgttcattgcagggcagttggaatagatgaccttcaaaggtcccttccaattcaaaagattctatgatgctgtgattcagtgtgattggtatcctcatctccctt

SEQ ID NO: 70551 - DNA, 600 bp, Chicken  19866894344123_1
catcactactggccatagcgcaactatactttaacttccagcttttacctacatcctctgcttagccaacagagagcaaggctgaagaatattccctgacaggttcccatttcccatgccaattaaataaattggccttttctatgctatggtgacagcagaatgcagactacaagagtaggagaggtgtttgtattttattttaaccagacatccccatgataataaatcctaccagaagttacatctttgttaactcccagatgttttggagtaaatgagctgtttctcctaaccatytgaaggcattagggatctcatcaccaatttttgatatcttgagacatgtactagggaggtgagatgagcagtctaattcccaggctgctgaaatccatctcacttactcttttggttagatctcttctgattgtgtcaggcctaagttttgacttaagtgactaaagagtaaatacttttgaatgtacatagatatctaaatcatttgacttctcctaaggtatccaaagcaactgtatagggctacttgatttatagagtaccatacccttctgtatcaacatctggaagccagaaagt

SEQ ID NO: 70552 - DNA, 600 bp, Chicken  19866894344123_2
taatttccatggaaatgacaatagctacaatgagcacaataacactatttgatagagcaaattctcagcccaatacactattttttaacactgttgccaccattagcaatgcattttcaccaacagtgaacaagagccctcatgacatgcctgtaaaatttgcatgattttctggaatctggcttgcctttcatgtcatgtttactactgctgaaacacaccacccaccaacgcactgtgctcacatccactatttgatctccataaatgttcacaagcactgatgaatgtcaatgggtktgatcttgaaggacrtggaggaagggaggaattcaattccacacctttgcttcatacaggcttccatrtgagatgctattgtatcagactgtccctctgctgccacctgttgtacggcaacaaaatgtaatggaatattggtggtagattmaacctctactgccataccaccagcatccacctctgatgttgtggaccaacatagcattatagaatcactaaggttggaaaagacctccaagatcagacataacaaaacataacaaaatagtaggcattatttttggtgcatcccatgta

SEQ ID NO: 70553 - DNA, 600 bp, Chicken  19866894344123_3
tgacaatagctacaatgagcacaataacactatttgatagagcaaattctcagcccaatacactattttttaacactgttgccaccattagcaatgcattttcaccaacagtgaacaagagccctcatgacatgcctgtaaaatttgcatgattttctggaatctggcttgcctttcatgtcatgtttactactgctgaaacacaccacccaccaacgcactgtgctcacatccactatttgatctccataaatgttcacaagcactgatgaatgtcaatgggtktgatcttgaaggacrtggaggaagggaggaattcaattccacacctttgcttcatacaggcttccatrtgagatgctattgtatcagactgtccctctgctgccacctgttgtacggcaacaaaatgtaatggaatattggtggtagattmaacctctactgccataccaccagcatccacctctgatgttgtggaccaacatagcattatagaatcactaaggttggaaaagacctccaagatcagacataacaaaacataacaaaatagtaggcattatttttggtgcatcccatgtagttcaaggcagctta

SEQ ID NO: 70554 - DNA, 600 bp, Chicken  19866894344123_4
cccaatacactattttttaacactgttgccaccattagcaatgcattttcaccaacagtgaacaagagccctcatgacatgcctgtaaaatttgcatgattttctggaatctggcttgcctttcatgtcatgtttactactgctgaaacacaccacccaccaacgcactgtgctcacatccactatttgatctccataaatgttcacaagcactgatgaatgtcaatgggtktgatcttgaaggacrtggaggaagggaggaattcaattccacacctttgcttcatacaggcttccatrtgagatgctattgtatcagactgtccctctgctgccacctgttgtacggcaacaaaatgtaatggaatattggtggtagattmaacctctactgccataccaccagcatccacctctgatgttgtggaccaacatagcattatagaatcactaaggttggaaaagacctccaagatcagacataacaaaacataacaaaatagtaggcattatttttggtgcatcccatgtagttcaaggcagcttaggaaattttcatattttttactaatcctaatgctcaccaccacactctgtgct

SEQ ID NO: 70555 - DNA, 600 bp, Chicken  19866894344123_5
tgtaaaatttgcatgattttctggaatctggcttgcctttcatgtcatgtttactactgctgaaacacaccacccaccaacgcactgtgctcacatccactatttgatctccataaatgttcacaagcactgatgaatgtcaatgggtktgatcttgaaggacrtggaggaagggaggaattcaattccacacctttgcttcatacaggcttccatrtgagatgctattgtatcagactgtccctctgctgccacctgttgtacggcaacaaaatgtaatggaatattggtggtagattmaacctctactgccataccaccagcatccacctctgatgttgtggaccaacatagcattatagaatcactaaggttggaaaagacctccaagatcagacataacaaaacataacaaaatagtaggcattatttttggtgcatcccatgtagttcaaggcagcttaggaaattttcatattttttactaatcctaatgctcaccaccacactctgtgctgcttatcttcttgaaccagctgaactagttagtttaaaatctgcctcattaaaaaccctgcagtaaaagaaaaggcaatattt

SEQ ID NO: 70556 - DNA, 600 bp, Chicken  19866894344127_1
aatctacacaaagccctgtaaataacccacaggttgttagtcattatctaaccttgtatccaaaattttcattttaactctttcatattactgcattatacatagagtactttaaataaccataaacaaccagattccttacaatgtaaggaagaactacagagaatcattctgaattcccatgtaaaaaaatttcttaggattccttctactttatgtacaaacacctttgaaggaactgaaaaatctttagtggattgtcttggaacagatcagtaaagcagaattcaaaagcaaatrtaaggtgctctctgggccatgggcatcatgaaaggtattaagacacactgttttcatctttcttctttcagttggcattcacattggcttctttttgacgtagtctctctttctgttattaaaagtaaaaagaactttattatcattctttcctctaattttccttctgctctcaagttgccttaagtatttcgtctagaatactgagaagtaataaatgaggcagcagattagagttctccttaattaaaaagaagcgatcagacaaagaaactcctggagcactcaaggaaggctcac

SEQ ID NO: 70557 - DNA, 599 bp, Chicken  19866894344129_1
  misc_feature (1)..(49): n is any nucleotide
nnnnnnnnnnnnnnnnnnnnnnnnnnnnnnnnnnnnnnnnnnnnnnnnnccagggaaggggcatccataagttctctgggcagccagtgcctcagctctctcaccatgaagaatttcctcccaacatctaacctaaatctacccagccattacccattccttgtattatcaatacctttcttgctgaagggccccttcccttaaggtattcctagtggacagaattctcgagtattgtgaacaacaatagtttccatctaaattaaagtggaaacttttaattacaaatgggtcctgtgyrtgtatcctccactctgaccttgcactgaccatttggttgatgcacagaaggtgggaggggtgaggttggcagagggtgagcaggcagatggatgcagcaagcacccatggggagcaccagcctgaggctgggcatgcacacatttgcttgtacactgtgacactaactggagagctggtgctgctgttgagctgtcctatgggtttgtgcaatcactgctgtgtgaagaggggaagtgcagccacatgtggctattgcaggctgctttatgtggcagtcaggtgtctgggatgtctca

SEQ ID NO: 70558 - DNA, 599 bp, Chicken  19866894344129_2
  misc_feature (1)..(48): n is any nucleotide
nnnnnnnnnnnnnnnnnnnnnnnnnnnnnnnnnnnnnnnnnnnnnnnnccagggaaggggcatccataagttctctgggcagccagtgcctcagctctctcaccatgaagaatttcctcccaacatctaacctaaatctacccagccattacccattccttgtattatcaatacctttcttgctgaagggccccttcccttaaggtattcctagtggacagaattctcgagtattgtgaacaacaatagtttccatctaaattaaagtggaaacttttaattacaaatgggtcctgtgyrtgtatcctccactctgaccttgcactgaccatttggttgatgcacagaaggtgggaggggtgaggttggcagagggtgagcaggcagatggatgcagcaagcacccatggggagcaccagcctgaggctgggcatgcacacatttgcttgtacactgtgacactaactggagagctggtgctgctgttgagctgtcctatgggtttgtgcaatcactgctgtgtgaagaggggaagtgcagccacatgtggctattgcaggctgctttatgtggcagtcaggtgtctgggatgtctcag

SEQ ID NO: 70559 - DNA, 600 bp, Chicken  19866894344129_3
atgcacacatttgcttgtacactgtgacactaactggagagctggtgctgctgttgagctgtcctatgggtttgtgcaatcactgctgtgtgaagaggggaagtgcagccacatgtggctattgcaggctgctttatgtggcagtcaggtgtctgggatgtctcagtggcagttttgagcggggacacagaatagccagaagaaacatatcctttcttggatttgaaagccctggggccacatatagcatcaatggatgctgatgactgtagttttatcaggcaaggagaagaacctgtwctctctgataaagtcacagtgtttgtttttcacataagcacaggagaactagctcaggtgtgagtcattagaatgtaacagacataaaagctgrgtctggttagcaggaaggataaggacaaccctctcaaggccactccacccatgcttacctgatctgcttcagtgcctaataggttctgcacatgtcaaagcctgggtttacaaagccaacttgttttgatcagccaaacagctgctgcaaacaaacaaaaaggctcattgtcactgctgtaaaactagggcagccaagaggctttt

SEQ ID NO: 70560 - DNA, 600 bp, Chicken  19866894344129_4
gaggggaagtgcagccacatgtggctattgcaggctgctttatgtggcagtcaggtgtctgggatgtctcagtggcagttttgagcggggacacagaatagccagaagaaacatatcctttcttggatttgaaagccctggggccacatatagcatcaatggatgctgatgactgtagttttatcaggcaaggagaagaacctgtwctctctgataaagtcacagtgtttgtttttcacataagcacaggagaactagctcaggtgtgagtcattagaatgtaacagacataaaagctgrgtctggttagcaggaaggataaggacaaccctctcaaggccactccacccatgcttacctgatctgcttcagtgcctaataggttctgcacatgtcaaagcctgggtttacaaagccaacttgttttgatcagccaaacagctgctgcaaacaaacaaaaaggctcattgtcactgctgtaaaactagggcagccaagaggcttttttaactttgaagtcaggtgtgctttcctccatggggacaaggtgggctttgggtattcatggaaatatgactgagaaatgccaagatgtgcaag

SEQ ID NO: 70561 - DNA, 600 bp, Chicken  19866894344129_5
aaagcataacaacctgtcattcttcctatgaggcttcctctgtattgaaaacacctcccaagtttcttgttagcacatttcattgtctcgcttgtcattttttgctccaaactgacttaatgacattattcagatggaatcctccaggcccatactttgctgtcagcagtttttacctctgtcattgactccttcagcattttatcatgtttacattaatccccaccttcttgagtttaactaatgcattttctagtaataccaaatcaaatactttaccaaagtccaggttgataagaytttactagtttttctttgtccacaaatgcagttatcttatcaaagaaagatactgggttcatctacacacaacatgcctatcttgcactttaacccttttcctgcttccctctgtgccgtttgttactcatttgctctttggcctgygtgctaaaaagccaatagattttgtgctgaccaacctatagattttggtgatggagattactcagtcttcagaactgaatggtaaagatctttcaagttttgcagctgtattgcatgtggtaatttccatatccatgcccttaagcccattaa

SEQ ID NO: 70562 - DNA, 600 bp, Chicken  19866894344129_6
gcccatactttgctgtcagcagtttttacctctgtcattgactccttcagcattttatcatgtttacattaatccccaccttcttgagtttaactaatgcattttctagtaataccaaatcaaatactttaccaaagtccaggttgataagaytttactagtttttctttgtccacaaatgcagttatcttatcaaagaaagatactgggttcatctacacacaacatgcctatcttgcactttaacccttttcctgcttccctctgtgccgtttgttactcatttgctctttggcctgygtgctaaaaagccaatagattttgtgctgaccaacctatagattttggtgatggagattactcagtcttcagaactgaatggtaaagatctttcaagttttgcagctgtattgcatgtggtaatttccatatccatgcccttaagcccattaagtgtgttgcctctgcccttcagggttgcataattttctttatggaaactgaagcaacatattgctttagcttctagccatctaccctactgctattgctgggtgatcctttcttttggttttctttgtaatgatgcagataaaaccc

SEQ ID NO: 70563 - DNA, 523 bp, Chicken  19866894344130_1
cagtagtagttatatggcctagttttaaaagcatttcatcatttttagtgcttccacaggtgaatcaaagctcataaagtttagtacttgtctgtcattactctggagtttctgcctaggaataatgacttctgacatccatgtggtgatcgctcaagcctacgcttcttattccagtaaatatgcatcatagccaagtactttttttctgatctgtgtgtattagctattagtgtagcttctcacagtttcctgttaactggaagcactgtcctagacttggttctaatatgaagaagyagattgtctcctgttcctgctagagctgacagtggcatgagcatactgtactaaaatcccataatgcctcytggatttctgaaaaacaataggtcattattttaggggagtgctgacctattcttttactgaagaacttgtcctgcattccacttactttcccatttttagaatcgtgggtcatattcctcttggttcacaatcatataacatccttgtggca

SEQ ID NO: 70564 - DNA, 452 bp, Chicken  19866894344130_2
tcataaagtttagtacttgtctgtcattactctggagtttctgcctaggaataatgacttctgacatccatgtggtgatcgctcaagcctacgcttcttattccagtaaatatgcatcatagccaagtactttttttctgatctgtgtgtattagctattagtgtagcttctcacagtttcctgttaactggaagcactgtcctagacttggttctaatatgaagaagyagattgtctcctgttcctgctagagctgacagtggcatgagcatactgtactaaaatcccataatgcctcytggatttctgaaaaacaataggtcattattttaggggagtgctgacctattcttttactgaagaacttgtcctgcattccacttactttcccatttttagaatcgtgggtcatattcctcttggttcacaatcatataacatccttgtggca

SEQ ID NO: 70565 - DNA, 600 bp, Chicken  19866894344149_1
cctggaattttgccctaccattcacttcccagctccagcttttggcacagcaataagggcacacacttccccagatcctgcaggccactttgctggccctgtactgcctgaggacttccaaaccacagcacaggaaaaggcaaaggtgccatactgctgtctaattaaaggcatcgtgcaaaggtgtcccagacaccgctcagctcaatcaaagggccaaagctccagtcctgagcaggttttccactctgctttctaaggctgtgatcctttccccaccctcctgaagagaagcagtaygtgggttacaacagattccttgggaaagttcctcccctcaacacaacaaagggcatgcagtatatggagaactgggagaggatttggcctgcagcagacggttaccttggcacagggatatgggaagaaggctttggcacacactgaaactgagtgaggcctgagtttgctccttaaaaggaatttccttatttctcacttcttccctgtttccctcaggaagtctgtatccaagcttttgctggatgatttaaaaaaacacgtttacattttgcttggaaaaacgtttaaaaattgcat

SEQ ID NO: 70566 - DNA, 600 bp, Chicken  19866894344160_1
acctgagcaaccttggcttccctgtatggctactgtggtcaaaggacacattaacttcctaactaaaactttatcatctcctcaccctctttctctttctcaggaacttctcagaaaatccatgtgccaattctagcagcgtgaggtgcctgatgaattgcaaagccaggtgacaggttgaaaatatgtgaacttactccctggtgaaattagagaactaagcttcatctgtacaaatgcttgtatttttcagtcttagaaaggagctgacccttaccttgtattcttttgctttcctcytctagtgtttcatgctgctgccaaatcaaagaacacttcaaagtagtttagggcataaaatttaacctatgtttgaaactgttgcaatcctgtaggaaacggtcaccccattctcaccatgttatgcaaccaataaaaaataaaataaaataaaataaaaaaaatgtctagcaacactacacaaaagactttctgtaaagaagtaaatactgtttgtgtgtgttttttaagcagtgtgaaattctttgactaggtgtcatatattaatgctgaacatattttttctctttccacttcatc

SEQ ID NO: 70567 - DNA, 600 bp, Chicken  19866894344165_1
tgccctgatccattgactttgtaataatggcttttgtaagagcctgatagaagaggaggggaattttaatgttcacgtgtgcatcgtgtggcttgtttccaaaggacaggtgaaatattagctcttctgcttatacttggtccccagtgcttatgtttggaaaccccaaaactggacttcattagagtgctgcccaaagggtgaaagaaacccttttatctcttcatttccactgataagggctgttagactgttttctctaggcagtacgatagattattaatgtattttagattactsttagatgatatgctaggtcttgtgatcttgtcattttcctgtgagaacctgcatttattttcaatataagtttatcatcacaargtctttcaccatattcttaactgacagcctgagtgcagtcttcgaaggagtgaatatcaccataagagagccagtccaagtggcttggaagtcatgggagaaacaagtgcctctttgctgttagttactcattctgactattgttgtaacaactctcaattcactgcggcaaagaaggcctttctatgcttgtgatgtgttctgtctttacactgt

SEQ ID NO: 70568 - DNA, 521 bp, Chicken  19866894344165_2
cgtgtggcttgtttccaaaggacaggtgaaatattagctcttctgcttatacttggtccccagtgcttatgtttggaaaccccaaaactggacttcattagagtgctgcccaaagggtgaaagaaacccttttatctcttcatttccactgataagggctgttagactgttttctctaggcagtacgatagattattaatgtattttagattactsttagatgatatgctaggtcttgtgatcttgtcattttcctgtgagaacctgcatttattttcaatataagtttatcatcacaargtctttcaccatattcttaactgacagcctgagtgcagtcttcgaaggagtgaatatcaccataagagagccagtccaagtggcttggaagtcatgggagaaacaagtgcctctttgctgttagttactcattctgactattgttgtaacaactctcaattcactgcggcaaagaaggcctttctatgcttgtgatgtgttctgtctttacactgtgctca

SEQ ID NO: 70569 - DNA, 511 bp, Chicken  19866894344172_1
agcttttaaaggtagcattcttacagatttcatcagccttcacgggagtcggtttcatttccttgcagtggatgaagttggtgaagatcagtccactttttcttagaaggaatagctctgattcatttttagaaatctatggaaggctttgccaaagctttgctactggaatgctgcagagcttttattcgaggcgctgccctctgccattattcccttttttaattgatgagtaaagaggtttataatcggcttcctattccagcagctgttttttttctgttgttcagcatatttctstttttgcttgcaagtatccatttctgtttcttgtttctaacacattgaaggactgtggcaatagctctgctgatgtttcgattctcattaaactcacgcctaacgaagctcttattcataccctggtcttgtacctagttagctgtgtaggctctgctttgacgttttccccaaaccaaaagccagtttcattactgaagctctccagcga

SEQ ID NO: 70570 - DNA, 600 bp, Chicken  19866894344176_1
tcagtggaaatgataactgggaatgagaaatactcacacttttccatttctgttatgaccatctcccatgacagtaccatttcatgacagatccatctagcttcctcacacacactgtacctaatgttactttggctgctataaacactgtagtctctcaagcccacagtcctttcccaatacaccacttggcaaaagctactttttcttaaacccaggtcacgtgtggaggtttctacactttgttcacaaatatgaaaacaaattgtttttgtatgcctaatggtgacatttacccascatagctatctcaccctggtttcaagaactgcaacaaaacgagaacgtgcaagaagaaaatcatgaagtaaagaaataaaacatgcttcagccccagtgaatagaagggaaagtgccctggctagaactcaggatgctatttttaagtacagtggtaggaaaagggaaaaccatggtgtcgatgcagtatcgtatttgttatttggtgcccaaggagacactcaagtgatttgtgtggatgggttttaagttggtatttctttctaggcttctgttacacaagaaaaatgatttccttac

SEQ ID NO: 70571 - DNA, 599 bp, Chicken  19866894344177_1
  misc_feature (1)..(262): n is any nucleotide
nnnnnnnnnnnnnnnnnnnnnnnnnnnnnnnnnnnnnnnnnnnnnnnnnnnnnnnnnnnnnnnnnnnnnnnnnnnnnnnnnnnnnnnnnnnnnnnnnnnnnnnnnnnnnnnnnnnnnnnnnnnnnnnnnnnnnnnnnnnnnnnnnnnnnnnnnnnnnnnnnnnnnnnnnnnnnnnnnnnnnnnnnnnnnnnnnnnnnnnnnnnnnnnnnnnnnnnnnnnnnnnnnnnnnnnnnnnnnnnnnnnnnnnnnnnnnnnnnnnnnnctgatgctacagtgatacatgtgactgatgcacatgtraagtggtgagctgcagaagctcattgctcactcaagggccccaraaaggtaagttgtttctctcaggctagagatggaattgctcccattaaatgaggccaggaatatagccttgctcagtctgaaaatattggctgagctgaatgcaaggataacattgcaaaattcaaaagcctgtgatatatatggaaattgagaaggcatggtctaatggtccctatggtcctattatctataaaagtggtatgcaccattaggactcaattagtccttatagtcatcaaagcaggctcacagtc

SEQ ID NO: 70572 - DNA, 599 bp, Chicken  19866894344177_2
  misc_feature (1)..(218): n is any nucleotide
nnnnnnnnnnnnnnnnnnnnnnnnnnnnnnnnnnnnnnnnnnnnnnnnnnnnnnnnnnnnnnnnnnnnnnnnnnnnnnnnnnnnnnnnnnnnnnnnnnnnnnnnnnnnnnnnnnnnnnnnnnnnnnnnnnnnnnnnnnnnnnnnnnnnnnnnnnnnnnnnnnnnnnnnnnnnnnnnnnnnnnnnnnnnnnnnnnnnnnnnnnnnnnnnnnnnnnnnnnctgatgctacagtgatacatgtgactgatgcacatgtraagtggtgagctgcagaagctcattgctcactcaagggccccaraaaggtaagttgtttctctcaggctagagatggaattgctcccattaaatgaggccaggaatatagccttgctcagtctgaaaatattggctgagctgaatgcaaggataacattgcaaaattcaaaagcctgtgatatatatggaaattgagaaggcatggtctaatggtccctatggtcctattatctataaaagtggtatgcaccattaggactcaattagtccttatagtcatcaaagcaggctcacagtcaccttgcagaagggaacgttatcactttaggtgcagctggaggt

SEQ ID NO: 70573 - DNA, 599 bp, Chicken  19866894346077_1
  misc_feature (1)..(22): n is any nucleotide
nnnnnnnnnnnnnnnnnnnnnntttaaccctgaaagctcttcagggtaatttcagtgagctgatggcagcagaattcaatggcctgcagagacacagggctccctccaggcactatcttgcttgtgtgtaaaacacatgcaatgtcccagcatattttatgaaattatgggaaaggacgccaaggattaaatggggaaaaaggaagaattggactcacttgaaaggcctccaagaagtttgcgctgcttgtgcctgaagccagccctaggttaggtggacgtgaggagagaggcaaactyggaagaggagccatcctgatagtctttaactgagragacactgcctcaaaggccccagcagcagaaatgtcttgaaagggatgtgaatttaratagatggaggtggacagggcttccctttgtcaggggaggaatgtgtggagagagaaaggctgagcctggcagcttagaagctgccagttctgcccactgccttgttgtccaccactggcaacaatgctactgagagcttggatggattttagtcttccctgtttttggggtgactgctcagtacacagctactctcagctgttatt

SEQ ID NO: 70574 - DNA, 600 bp, Chicken  19866894346077_2
gctcttcagggtaatttcagtgagctgatggcagcagaattcaatggcctgcagagacacagggctccctccaggcactatcttgcttgtgtgtaaaacacatgcaatgtcccagcatattttatgaaattatgggaaaggacgccaaggattaaatggggaaaaaggaagaattggactcacttgaaaggcctccaagaagtttgcgctgcttgtgcctgaagccagccctaggttaggtggacgtgaggagagaggcaaactyggaagaggagccatcctgatagtctttaactgagragacactgcctcaaaggccccagcagcagaaatgtcttgaaagggatgtgaatttaratagatggaggtggacagggcttccctttgtcaggggaggaatgtgtggagagagaaaggctgagcctggcagcttagaagctgccagttctgcccactgccttgttgtccaccactggcaacaatgctactgagagcttggatggattttagtcttccctgtttttggggtgactgctcagtacacagctactctcagctgttattccttcacagagcagatcctgtgtgttttctctgttt

SEQ ID NO: 70575 - DNA, 600 bp, Chicken  19866894346077_3
cacagggctccctccaggcactatcttgcttgtgtgtaaaacacatgcaatgtcccagcatattttatgaaattatgggaaaggacgccaaggattaaatggggaaaaaggaagaattggactcacttgaaaggcctccaagaagtttgcgctgcttgtgcctgaagccagccctaggttaggtggacgtgaggagagaggcaaactyggaagaggagccatcctgatagtctttaactgagragacactgcctcaaaggccccagcagcagaaatgtcttgaaagggatgtgaatttaratagatggaggtggacagggcttccctttgtcaggggaggaatgtgtggagagagaaaggctgagcctggcagcttagaagctgccagttctgcccactgccttgttgtccaccactggcaacaatgctactgagagcttggatggattttagtcttccctgtttttggggtgactgctcagtacacagctactctcagctgttattccttcacagagcagatcctgtgtgttttctctgtttgctctttggattttgtttcattgtaaggataatgatccatccatggcgaaacttggc

SEQ ID NO: 70576 - DNA, 600 bp, Chicken  19866894346077_4
gagcttattattgttaggactgacaggaaaagcaagtgtaaactcttagttttctcagcaagagatgtcttttccctgtggcttcagtctccagctgagaggaaaggtttagtatttttgaagcctcctgcagggagctcacttggctcaagacacgtgggagcaattaccatgaaatcccatttcttctgagaagtttccaccatttcctctgccaccgaaagcgcacgaaggctgcttgggcagcttgtcagacagggtgggtgttcaggcttcagtgtccctcagagcagcagtacrttcacttacagagcgtgtgttcccaccaccatgctgacatagcaggaattcttgtcggtagggtgcaggagtgtcagagatattgaacacttctcatacagcgctgtcctcagtgaagctggagagtttccttctctctgtgtgtaactgcccattacaatgggaattgtttcagcctgtgaggggtgttacgggatggctcagctgtggtttactcagaggagcaatctaaagctgacgtcccacatcctgttcagaaagctctggcaaaacagaagcagcacgtaaaccttagcccag

SEQ ID NO: 70577 - DNA, 423 bp, Chicken  19866894346078_1
atgtgctcttacagagagaagctatgtgcaaatattagcagtaaattttacttcaaaatattttctacagcaaaaagctctagtcttcagattttattacttaatatgaattgaatttctcattgaacacttgcatttcctaagtattaactactaatagaacaggattcaagaaagcaatatttaactgcctactattaaaattataagcacatttctagtcacctacccgaagcgtagcctggaccacgtctgctatgccctctgtttctgtaaggtcgactaccccttccgagtccyaattgcgtttatcaggaaaaatgaaagtgtttctgttgataatctagtagttgataactactagaagagatacacaaacaggagctattcatagcagtacatttagaaagcacttctgttata

SEQ ID NO: 70578 - DNA, 599 bp, Chicken  19866894346081_1
  misc_feature (1)..(114): n is any nucleotide
nnnnnnnnnnnnnnnnnnnnnnnnnnnnnnnnnnnnnnnnnnnnnnnnnnnnnnnnnnnnnnnnnnnnnnnnnnnnnnnnnnnnnnnnnnnnnnnnnnnnnnnnnnnnnnnnnngaagagttcttcctttctacgttcttgcagaattcagacattaatgttgatattttcacctagattagttactatgagcacaagaacatccaaacattgtttagtgaccaaaaaatgcatgggatgtacttgtggcagcagacagaagccaggtcaaaggcagcacctggaggaggcggcagcagwggcagggcagagcaggtgcctgagggcagtgccatggcacccagagcccatcggcagggctcctggcgagcacagtgaggtcaggcagcaggaagccatgagcacccacgtggtggcactgccagccaagctgcaggccgggagggccacgggacgatccctgatgcacgtcagcccagcacatcacatccctgccagacatcagcacaaaccacacgccctcccagtttgtctcttctcaaagaacagccccaaaaacccctgtattccttcaccctttgcttccctcagcgagggca

SEQ ID NO: 70579 - DNA, 600 bp, Chicken  19866894346081_2
tgcttccctcagcgagggcaccaacacgcagctcctcagcagccccgcacagggcagggctcagcaccaccaccacgccggcacctcgctgccacagcactacacctgcttaacacagcacgtgttaaaactagaacgggtttctttaagttattttagctttaagtactattttatacgtagttaaaaacttcagtgttgtacttaatacacatagtacataccatatatgatcacacgtagcatttgaattaaatcgatggattaacgcaagcattacaaaactactgacattgctcrggggaggaggggtctcgtctggaagacagaaaaacacttccaatatttagcccatttaaaacacaaatagtgcaattggtcaaaataccacagaataaaccctactttagccctgtagaaaactacacttacacacacaacaccaaaggcaagttctggggctgcatttgccattctgcactcttaaagtctgcacatacacaaagctatattaagagaaccatttctgtggctgagctgcagttcccattctcttaagctccacgttagctgaacagcacgctgctggcttggctctgt

SEQ ID NO: 70580 - DNA, 600 bp, Chicken  19866894346084_1
agtggagttcagtcagcagtctggtacagtcaagtgaggttttttcctactcaagtcagattccatccaacctgtgacttcatcctgtctctataggaacagaggcttggttagcacaaggaggggcatcatttcactatatgtctgacctgaacatccctaatagcatatataaatgtgctgcaggattttgtgcctagtgctcagatgtaaaataagaaaagggggttccatcttcaggtaagtttccctgttggttattcagcccttggatgatgaaggacttactgggctgttccyagaggggctgtgaaataacattttattcatatttggtttagatatatatyatagctctctttgcgtgcattgatatattctctttctccaaaaaagtttttcttgtttcatgtatagactcagtttttatggacagggaggtactgcatgttggggacacccagcaaaaatacctagaaataccaataattctggttgtggtctcaagggctacctgttcgtgcctagagaatgatttctttttttcttctttttgcatgtaasaggagatttaaaaggatgggttatgccatactggtt

SEQ ID NO: 70581 - DNA, 600 bp, Chicken  19866894346084_2
tcaagtcagattccatccaacctgtgacttcatcctgtctctataggaacagaggcttggttagcacaaggaggggcatcatttcactatatgtctgacctgaacatccctaatagcatatataaatgtgctgcaggattttgtgcctagtgctcagatgtaaaataagaaaagggggttccatcttcaggtaagtttccctgttggttattcagcccttggatgatgaaggacttactgggctgttccyagaggggctgtgaaataacattttattcatatttggtttagatatatatyatagctctctttgcgtgcattgatatattctctttctccaaaaaagtttttcttgtttcatgtatagactcagtttttatggacagggaggtactgcatgttggggacacccagcaaaaatacctagaaataccaataattctggttgtggtctcaagggctacctgttcgtgcctagagaatgatttctttttttcttctttttgcatgtaasaggagatttaaaaggatgggttatgccatactggttgtcaaagaaaccttgctctttggttcagtttgctgaagccttagttgtca

SEQ ID NO: 70582 - DNA, 600 bp, Chicken  19866894346084_3
gcccttggatgatgaaggacttactgggctgttccyagaggggctgtgaaataacattttattcatatttggtttagatatatatyatagctctctttgcgtgcattgatatattctctttctccaaaaaagtttttcttgtttcatgtatagactcagtttttatggacagggaggtactgcatgttggggacacccagcaaaaatacctagaaataccaataattctggttgtggtctcaagggctacctgttcgtgcctagagaatgatttctttttttcttctttttgcatgtaasaggagatttaaaaggatgggttatgccatactggttgtcaaagaaaccttgctctttggttcagtttgctgaagccttagttgtcatgacttcctaatagaatagtaaaataatatgaacaattgttattggagtatcctaactttaaaaatgcaaatagcaacagcctgggttttctagatctgtcaaagctgacaagaggtcctttgacagtcaaggacttctatttctaccttttagtgtaaaatgaaagtgacttggctcccttttgggattatatattgttcagttttatatatt

SEQ ID NO: 70583 - DNA, 600 bp, Chicken  19866894346085_1
aaggcccttagttgggggggttggcatacccagctcagccctgggagccaagctccaaaggaaggcatatccagagacccactgtcacagaatcatagaatcacagcatggcctgggttgaaaaggcccacagtgctcatccagttccaaccccctgctatgtgcagggtcgccaaccagcagcccaggctgcccagagccacatccagcctggccttgaatgcctgcagggatggggcatccacagcctccttgggcaacctgttcagtgcgtcaccaccctctgggggaaaaacttcytcctaatatccaacctaaacctcccctgtctcagtttgaaaccattcccccttgtcctatcactatctacctttgtaaaaagccgttccccctcctgtttatacactcccytcatcaggagatgtccctgcacagcagggcattgcttgtctgtcctttagtcatgactttatttatactttttgttccaggttctgtggagatgagctgccagatgatatcattagcacaggtaacacactccttatggctaaaacaaaaaatcagcccaaatcaacttttatccctactttctagtta

SEQ ID NO: 70584 - DNA, 495 bp, Chicken  19866894346085_2
cctgggttgaaaaggcccacagtgctcatccagttccaaccccctgctatgtgcagggtcgccaaccagcagcccaggctgcccagagccacatccagcctggccttgaatgcctgcagggatggggcatccacagcctccttgggcaacctgttcagtgcgtcaccaccctctgggggaaaaacttcytcctaatatccaacctaaacctcccctgtctcagtttgaaaccattcccccttgtcctatcactatctacctttgtaaaaagccgttccccctcctgtttatacactcccytcatcaggagatgtccctgcacagcagggcattgcttgtctgtcctttagtcatgactttatttatactttttgttccaggttctgtggagatgagctgccagatgatatcattagcacaggtaacacactccttatggctaaaacaaaaaatcagcccaaatcaacttttatccctactttctagttacaaatg

SEQ ID NO: 70585 - DNA, 599 bp, Chicken  19866894346087_1
  misc_feature (1)..(79): n is any nucleotide
nnnnnnnnnnnnnnnnnnnnnnnnnnnnnnnnnnnnnnnnnnnnnnnnnnnnnnnnnnnnnnnnnnnnnnnnnnnnnnnttttttgctgcaatattgggctgccagtgaatagctttgtggtttgcatttgagacctgttctactctcataattttcccaagttcctttcaagctgctttcaaactaaagctaaagagtgatagtgggttcgggggtatttgcagagaaataaagtatacttttaaatgaatcagggagtttgttctcaggtaagtcataaatgcataaaatataacttyggccccaayggtaatggacatttaaacaacaaagtaagtgtcagactctcaattctgtaaaggatctcaagatacaataaggatgttttggaggctactggaatttttctgtctttatttctgtataaaatactttaaggatgttttaaggttatgttacttacacacacagcactgaaattttctgctttatgtataaaatcaaggaagttttaggtgctatgaacaaaacagttacacataaaaaaaacatttagtagctgygcacagtctctcagttactgccagttctgctagag

SEQ ID NO: 70586 - DNA, 599 bp, Chicken  19866894346087_2
  misc_feature (1)..(70): n is any nucleotide
nnnnnnnnnnnnnnnnnnnnnnnnnnnnnnnnnnnnnnnnnnnnnnnnnnnnnnnnnnnnnnnnnnnnnnttttttgctgcaatattgggctgccagtgaatagctttgtggtttgcatttgagacctgttctactctcataattttcccaagttcctttcaagctgctttcaaactaaagctaaagagtgatagtgggttcgggggtatttgcagagaaataaagtatacttttaaatgaatcagggagtttgttctcaggtaagtcataaatgcataaaatataacttyggccccaayggtaatggacatttaaacaacaaagtaagtgtcagactctcaattctgtaaaggatctcaagatacaataaggatgttttggaggctactggaatttttctgtctttatttctgtataaaatactttaaggatgttttaaggttatgttacttacacacacagcactgaaattttctgctttatgtataaaatcaaggaagttttaggtgctatgaacaaaacagttacacataaaaaaaacatttagtagctgygcacagtctctcagttactgccagttctgctagagctcccaagc

SEQ ID NO: 70587 - DNA, 600 bp, Chicken  19866894346087_3
tctcaggtaagtcataaatgcataaaatataacttyggccccaayggtaatggacatttaaacaacaaagtaagtgtcagactctcaattctgtaaaggatctcaagatacaataaggatgttttggaggctactggaatttttctgtctttatttctgtataaaatactttaaggatgttttaaggttatgttacttacacacacagcactgaaattttctgctttatgtataaaatcaaggaagttttaggtgctatgaacaaaacagttacacataaaaaaaacatttagtagctgygcacagtctctcagttactgccagttctgctagagctcccaagctaggattgtgaaaagactttgagctttgtagagctgagagctgccaaggctgtgagttcagaacaaagaaggcgcaagccctccctatgaagcggatggcatttgttagctctccaagcaaaagaacggggtagtatcaacattagcatatggctgcggtattatgtaatggtggaaagatcaagaaaaatgccaaaagcaatttaaaaattggagccaacaatgttaacccagctgctctgatacatctggaata

SEQ ID NO: 70588 - DNA, 600 bp, Chicken  19866894346087_4
agctcccaagctaggattgtgaaaagactttgagctttgtagagctgagagctgccaaggctgtgagttcagaacaaagaaggcgcaagccctccctatgaagcggatggcatttgttagctctccaagcaaaagaacggggtagtatcaacattagcatatggctgcggtattatgtaatggtggaaagatcaagaaaaatgccaaaagcaatttaaaaattggagccaacaatgttaacccagctgctctgatacatctggaatatcacctgttacaacagccctcatgaagaatccyttggtttagatgcaygtgagttaaatgctgtatgttggtacacattcagacacccctttgggttactcagccataacaataccttcatgttttcaagcttgacaacaaatttgactcaacaccagagtaaaggtagtgcttttgcacataattaagagtaacactgttcattttctacctagatgtttcatgagatcagagcacccaaatccaggtgcagaacacacatccactgtaaatcatgacatcagtcaagtacatttkgaggaggtaatatacattttctgcctctcctccaag

SEQ ID NO: 70589 - DNA, 600 bp, Chicken  19866894346087_5
attgtgaaaagactttgagctttgtagagctgagagctgccaaggctgtgagttcagaacaaagaaggcgcaagccctccctatgaagcggatggcatttgttagctctccaagcaaaagaacggggtagtatcaacattagcatatggctgcggtattatgtaatggtggaaagatcaagaaaaatgccaaaagcaatttaaaaattggagccaacaatgttaacccagctgctctgatacatctggaatatcacctgttacaacagccctcatgaagaatccyttggtttagatgcaygtgagttaaatgctgtatgttggtacacattcagacacccctttgggttactcagccataacaataccttcatgttttcaagcttgacaacaaatttgactcaacaccagagtaaaggtagtgcttttgcacataattaagagtaacactgttcattttctacctagatgtttcatgagatcagagcacccaaatccaggtgcagaacacacatccactgtaaatcatgacatcagtcaagtacatttkgaggaggtaatatacattttctgcctctcctccaagtgtacctgccttttc

SEQ ID NO: 70590 - DNA, 600 bp, Chicken  19866894346087_6
atatcacctgttacaacagccctcatgaagaatccyttggtttagatgcaygtgagttaaatgctgtatgttggtacacattcagacacccctttgggttactcagccataacaataccttcatgttttcaagcttgacaacaaatttgactcaacaccagagtaaaggtagtgcttttgcacataattaagagtaacactgttcattttctacctagatgtttcatgagatcagagcacccaaatccaggtgcagaacacacatccactgtaaatcatgacatcagtcaagtacatttkgaggaggtaatatacattttctgcctctcctccaagtgtacctgccttttcaggatgtgtctcatctccatcttccacttagagcttggtgctccctcctaagaaatttcctctctctccttggataggcaaacacagttctggcactctccatgtccgactgtctgtctgtctcaaaagatctgctcactccttctctcacctctgttctctggaaatgtaggtagcaatcctccagcctccaagtctacaccactctgtacacattccctcctctcctggagtccctcaacccaacaa

SEQ ID NO: 70591 - DNA, 597 bp, Chicken  19866894346089_1
tgaacagatgtcctgaaagcatcagttgcacttgaagctaactgagatgctctaacatttcccatacatccgcagggccaaacgctgaccaactgcactcagccacagcacggacttgctatgcagaagcactcagcacacggtctgaccaccagcctggttctatcatttctttacacagaagcatgctctgaagcactgctgcatcgcttcacctctgctgtcactctccacctcccttctaactcatggcatcatacagagacggtgctgggatggcacagcctctgacaccagcayccatctaatccaaccggtctccatccttggcctctgctgctggctggccccaggagcaacccaaaagcattaagctcacactgataacagacaaactgcagtgggcaattgttgcttcttgcaaggatttgcttgctagggctgctatagatttttatcctcttttctttgcttctaatacagaagtaatgtcaaactgagtgagtctgtgagatgcccacaactcactctcaacagcatgttgacaaccagcgctacatctacattaaagatgagcagagccatcactcaaacagc

SEQ ID NO: 70592 - DNA, 599 bp, Chicken  19866894346093_1
  misc_feature (1)..(40): n is any nucleotide
nnnnnnnnnnnnnnnnnnnnnnnnnnnnnnnnnnnnnnnncaacagctgctctgaaacttgtaggcttgcttgttgctataatgaagggagttaacatcacaactgagataggaggtctcaaaaatacttgtaatgttactgaaaattaatatgcaatcacatttcttgttcttgtcaaaaagttaatgaatttgcattctccccaaaatacatcattttgactgcaaggagggaagatcagattgtcaattcatttgttcattttacctttctgatctcagcaactaactaatagctayccaaacccattcttaaatgcaaaatgctcttcaaacttccatacagagaagcgtctatgaaaataaacacttcagctcaagatctacgagtctctacatataatgcttggtggccctgagatggctgtaaatgagtaaattaacacctgtgacctagggtaaaatacagaggattttaatacatataaccgttactgtacatagaagggaaatgaccaagagctttcttcttacattgactgatgcatttcagagtaaagcatttccaaattcttccaaatcattcttttccgcttcct

SEQ ID NO: 70593 - DNA, 600 bp, Chicken  19866894346095_1
tgccgtttggtagtgtcaataatctgccagtaactgaccatttccgtagaactaaggaggaaatagtcaaaatatgaacaaaaacgttgtatatgatgtgattaaaatgtgttgtgtgggtggtatgcagaatgaacacttatgtctcatagatttatgagtagtaggacatcttaaagcactgaaaaaaaaaatgtctagcctacataacacaactttgtaaaaacctttacagatttgttagatgagaatagcactttcaagtgtacaggaagaatatgatcttttcatagaagtctrtgagcagagataaatatgtaagcttttcattcagaagaaaatgtgtattgttattattattgctttcagaaagggactggtgcaggatcctgcaaggccactctatgtatccaaatccagctatcttgttttaaccagttcaaagagagctctgcacccaaactaaaataattcatctacttctgacaaagaaatgcagagcgatggactgtttcagactattgcagcactgggtgcccatgacagtcaggctttgtagattctatttaaaaatgattccactggaaatggccagatgac

SEQ ID NO: 70594 - DNA, 600 bp, Chicken  19866894346096_1
ccatcagctatgcattttagccagtgatgagcaagagcctgcttgccacactcataaaaacctgtaccagtggaggtaaaccactggctcataagtgttaagacagcattgtttctcagaaaatgttacctacacagtatatctttcattggtccaaacagatggaattcagaatttgccaaatccagactatgcagcaagtgtgctagggcagtcgagccaagattggaagtgtgctttagtcttcagactgccactttcagccttgtgttggttcaatacatattaacaaacttgcaygtggagttttttctcttcctgtgtaagcatatatgagatctagctggtgcaaactctgtgatattccaatattgccaccattttttccaatgcattgaagccaatataatgttccatacacagttccctgttcataatttgcctatttacatggatgagctgaccaatacagtattttgtggtgtaacagctgtgcatgatttgtttttcatgttgctgttgccactgctgaagtgcaccactcaccattttaccatgctcacatccacttcttgttctccataagaattcagcaagcat

SEQ ID NO: 70595 - DNA, 600 bp, Chicken  19866894346097_1
tgtccctcagtgccacatccacacacttcttgaagacctccaggaacagtgactccaccacctctctgtgttgtctgttttaatgtctcactactctttctgaggggaaatttttcataatatccaacctgagatatcaccttcccaagtgaaggtatggcagcaagggtcaaggacatagctacatcaaatccacaggttcgattctgctaactcccgaaaaatgatctgattggtccagctttaactacacgctctggaagtgaacaagcatatgcagtcatattaacattcattccwctctgaaatcctcactcacccttatccatggccaaagaacccaaatcccctaacctaagtgcagattttccatctgcattttctacctgttttcttgcacattaatcaaatcttagcattgacaatgtgacaactggtataaagaaagacaaggtctttgaggaggaaaatatctagcgcacaatgccctacacaagcatttttgacagccctgtttctattttaaattatttttttttaaaggatgtacactatttgattactataatctagtaaatgtgyatcttggtcatgttaaag

SEQ ID NO: 70596 - DNA, 600 bp, Chicken  19866894346097_2
atattaacattcattccwctctgaaatcctcactcacccttatccatggccaaagaacccaaatcccctaacctaagtgcagattttccatctgcattttctacctgttttcttgcacattaatcaaatcttagcattgacaatgtgacaactggtataaagaaagacaaggtctttgaggaggaaaatatctagcgcacaatgccctacacaagcatttttgacagccctgtttctattttaaattatttttttttaaaggatgtacactatttgattactataatctagtaaatgtgyatcttggtcatgttaaaggatactattaatgtctcttttcttctctgttcagtggcctaaagcacacagctgcagcaatatttactgaagcttatgggataaatcacactgcaattttacccaggcaagttctgttgtcagatactacaggtaaataaacatgttagttcaatatattgctatatttgtgctttattaaatgcacaagatttgtattcttgagaaaacttttttctagtaagtgattgaaaatttatttaaaaagctgtttccaaaaaacaaattacacatggaaaacta

SEQ ID NO: 70597 - DNA, 599 bp, Chicken  19866894346098_1
  misc_feature (1)..(166): n is any nucleotide
nnnnnnnnnnnnnnnnnnnnnnnnnnnnnnnnnnnnnnnnnnnnnnnnnnnnnnnnnnnnnnnnnnnnnnnnnnnnnnnnnnnnnnnnnnnnnnnnnnnnnnnnnnnnnnnnnnnnnnnnnnnnnnnnnnnnnnnnnnnnnnnnnnnnnnnnnnnnnnnnnnnnnncacgcgggctgcttgggtatggggcatgctgaggttttgcagagacaactgtgaacttggttcataggctagaaaactaaaacttcgtgtatttagatgctcctgtgttggaatcaaggacactgaattctctrgagcatcacatttctttagcacaagacttggagccctggggtccgacagctggtatgacacttatgttggagcttttgatctgtgcatgatgggagtccccaaaacctgagtctacagaagtgatgtgaccgcatgttgagtgcctcccctggagaggtcagtaaatgggtttcatatgttgcattttgttacccccatcctggagaggctggatctgagagtasacaagggcttacatactgactgggtgctatcgaactgctttggctagtgtcagtctccacctgggcacrcttct

SEQ ID NO: 70598 - DNA, 600 bp, Chicken  19866894346098_2
gttcataggctagaaaactaaaacttcgtgtatttagatgctcctgtgttggaatcaaggacactgaattctctrgagcatcacatttctttagcacaagacttggagccctggggtccgacagctggtatgacacttatgttggagcttttgatctgtgcatgatgggagtccccaaaacctgagtctacagaagtgatgtgaccgcatgttgagtgcctcccctggagaggtcagtaaatgggtttcatatgttgcattttgttacccccatcctggagaggctggatctgagagtasacaagggcttacatactgactgggtgctatcgaactgctttggctagtgtcagtctccacctgggcacrcttctgactccagcttctkaattttctttattccctttggaaactctagtgtggtctgtttctgatagcttgcagcagctttgttcttttacagataggtgagaccatttgagttgctctttgttactaagaaattccctatttcatcacgtctccctgcacatactgggtgttgctctgctttgaagtgctgtcctgccttacctggatgcactttgtttttgtgcttcc

SEQ ID NO: 70599 - DNA, 600 bp, Chicken  19866894346098_3
tctctrgagcatcacatttctttagcacaagacttggagccctggggtccgacagctggtatgacacttatgttggagcttttgatctgtgcatgatgggagtccccaaaacctgagtctacagaagtgatgtgaccgcatgttgagtgcctcccctggagaggtcagtaaatgggtttcatatgttgcattttgttacccccatcctggagaggctggatctgagagtasacaagggcttacatactgactgggtgctatcgaactgctttggctagtgtcagtctccacctgggcacrcttctgactccagcttctkaattttctttattccctttggaaactctagtgtggtctgtttctgatagcttgcagcagctttgttcttttacagataggtgagaccatttgagttgctctttgttactaagaaattccctatttcatcacgtctccctgcacatactgggtgttgctctgctttgaagtgctgtcctgccttacctggatgcactttgtttttgtgcttcctgacagtgtgtcgtgccagggagaactgtccttccctgcagaagacgcccccctccccagccatgtagg

SEQ ID NO: 70600 - DNA, 600 bp, Chicken  19866894346098_4
ctttagcacaagacttggagccctggggtccgacagctggtatgacacttatgttggagcttttgatctgtgcatgatgggagtccccaaaacctgagtctacagaagtgatgtgaccgcatgttgagtgcctcccctggagaggtcagtaaatgggtttcatatgttgcattttgttacccccatcctggagaggctggatctgagagtasacaagggcttacatactgactgggtgctatcgaactgctttggctagtgtcagtctccacctgggcacrcttctgactccagcttctkaattttctttattccctttggaaactctagtgtggtctgtttctgatagcttgcagcagctttgttcttttacagataggtgagaccatttgagttgctctttgttactaagaaattccctatttcatcacgtctccctgcacatactgggtgttgctctgctttgaagtgctgtcctgccttacctggatgcactttgtttttgtgcttcctgacagtgtgtcgtgccagggagaactgtccttccctgcagaagacgcccccctccccagccatgtagggtgcatcttggaagtcagg

SEQ ID NO: 70601 - DNA, 600 bp, Chicken  19866894346101_1
gataatttcccaaatctttgagttttactgggagctccccatggtgataagtatgggcatgaagagcatagaaagttactcgacgggaaatcacgtggaacacgttcctgtttggatagcagctcacctaggcaggctgtgggcgttgtctggggctttgttttggtttggttttggttttggtttagagcacctgaggacagcatgtaattacagcgaggctgctcattacccttcctggcagtatggcaatgtggccaccatgcttggtatccagatggtttggaattcagacacttrggacagcttatggaggtgggcagcacactgcattctctaaccgatttctgtgctacagtaaaatcccttcgagagcaggaaggtcagcctgtgtgccagccaaaaaacctgagccaagaatcactgtagtggcaccagagcagctcagcctttctactatcctgcagtatgaaagccgcctaattttgctggagaaaattagagcctgtttatttgttcccttgctacatttccctaagtatgttcatgtgtccctgagtatgtccctatggcaggacgttgtccttcccacgggcccca

SEQ ID NO: 70602 - DNA, 600 bp, Chicken  19866894346104_1
acctttcaactaacactccacctgaaaagttctgaagaataagaaaattagagattttgtgataaacagttttctgaggaagatatccatcagttggctcttcttaagatctgataactaaactgagcagcaatggctataggattcagtgttaatggagaagctggttaatagaatgtaaatctccttcaagatacacagaaaacctgaaatatgtagagtaacacagcagttgtaatatcatgaatagcagaatctgtggctgagaacttgcaaaaacataagaagcaataatttacratgctatgctgcagctcagcatttaataatcacagagattctctctctgtttttgttgggttcttgctgttggtggtggtttttgtggggtttttttttagcagcaaaaggtagactgaaggtcagatttttagaatttttaattgcattccaatgattttcctttagatctgtgagcttgagaccagttcatttcagtctttgcctcctgacacttcgtgttgtggctgttgggcctcagaatttagtgtataaatatatgtccactcatacctgttccttagtgtttgactcacatat

SEQ ID NO: 70603 - DNA, 600 bp, Chicken  19866894346106_1
ccctgcctgcagagttcagtgagccacccatcagcccatacagtgagaccacctttgggaacacagtcccagcccgggagcagaaggtgagaggggcccatggggccaaaatctatcccctggcatcaccggtggccactctgtacccccacctcctgagagccagcgagctgcagctggtgggagtgtggcacaggctgaagtttgactactgtctcctcccagggcacagatgtcccttctgggcagagctatgaagcagtgactgagctggagcaagaaacacaaaggtaggcaacrgaatgatgagggtgcataggggacttyaaaaacgctttcaaaatgcaatttccctgagtcctgatagcatctcagaaagaggaaggaaagctgctcttcccatttcggacggggagggttacttttcctgtgttgcttgcagagaagggagctgagctgtggctctgcatccttcagctcttgtgtctgctgtgccttcttgtttctggtgccagagcctggtctgagccaggggcatggtcagcccaagtgacacagccacatgggtcacaggtgggggactgtagatacctgggaaca

SEQ ID NO: 70604 - DNA, 600 bp, Chicken  19866894346106_2
ccatcagcccatacagtgagaccacctttgggaacacagtcccagcccgggagcagaaggtgagaggggcccatggggccaaaatctatcccctggcatcaccggtggccactctgtacccccacctcctgagagccagcgagctgcagctggtgggagtgtggcacaggctgaagtttgactactgtctcctcccagggcacagatgtcccttctgggcagagctatgaagcagtgactgagctggagcaagaaacacaaaggtaggcaacrgaatgatgagggtgcataggggacttyaaaaacgctttcaaaatgcaatttccctgagtcctgatagcatctcagaaagaggaaggaaagctgctcttcccatttcggacggggagggttacttttcctgtgttgcttgcagagaagggagctgagctgtggctctgcatccttcagctcttgtgtctgctgtgccttcttgtttctggtgccagagcctggtctgagccaggggcatggtcagcccaagtgacacagccacatgggtcacaggtgggggactgtagatacctgggaacaggactctgtggctgggaaggagctgca

SEQ ID NO: 70605 - DNA, 600 bp, Chicken  19866894346106_3
gtggctctgcatccttcagctcttgtgtctgctgtgccttcttgtttctggtgccagagcctggtctgagccaggggcatggtcagcccaagtgacacagccacatgggtcacaggtgggggactgtagatacctgggaacaggactctgtggctgggaaggagctgcagtctctgatcctgcaatgcagagcaggactgagagctgtttgcagtctctgtttggagcttgtaggaatctgaaaccctgagcatcccgagggcatggacggggtgcctacagcactgatagtgcatcccrggagtgtttgcagcatgggtctactgggaaaagccaccatggtgtcagaagcagycttgataggattttcctcttactagggctcggagagttgaagagagtaaaaacctctgcagaccttctggsatctgctcctggaccaaatgggacaggtgttcccatgcttttcttctgagatacccactctaaacatttctccccatgcctcaaggctccttccctgtaggacatgaaatcccaggcgtgatgtgaccctgccagccaccaggtgcccaccagcaggctgactgcctgccctat

SEQ ID NO: 70606 - DNA, 600 bp, Chicken  19866894346106_4
agagcctggtctgagccaggggcatggtcagcccaagtgacacagccacatgggtcacaggtgggggactgtagatacctgggaacaggactctgtggctgggaaggagctgcagtctctgatcctgcaatgcagagcaggactgagagctgtttgcagtctctgtttggagcttgtaggaatctgaaaccctgagcatcccgagggcatggacggggtgcctacagcactgatagtgcatcccrggagtgtttgcagcatgggtctactgggaaaagccaccatggtgtcagaagcagycttgataggattttcctcttactagggctcggagagttgaagagagtaaaaacctctgcagaccttctggsatctgctcctggaccaaatgggacaggtgttcccatgcttttcttctgagatacccactctaaacatttctccccatgcctcaaggctccttccctgtaggacatgaaatcccaggcgtgatgtgaccctgccagccaccaggtgcccaccagcaggctgactgcctgccctatagcctcacctgaaaccagatccacctatggctccttgtctgtcctccattactaa

SEQ ID NO: 70607 - DNA, 600 bp, Chicken  19866894346106_5
tagatacctgggaacaggactctgtggctgggaaggagctgcagtctctgatcctgcaatgcagagcaggactgagagctgtttgcagtctctgtttggagcttgtaggaatctgaaaccctgagcatcccgagggcatggacggggtgcctacagcactgatagtgcatcccrggagtgtttgcagcatgggtctactgggaaaagccaccatggtgtcagaagcagycttgataggattttcctcttactagggctcggagagttgaagagagtaaaaacctctgcagaccttctggsatctgctcctggaccaaatgggacaggtgttcccatgcttttcttctgagatacccactctaaacatttctccccatgcctcaaggctccttccctgtaggacatgaaatcccaggcgtgatgtgaccctgccagccaccaggtgcccaccagcaggctgactgcctgccctatagcctcacctgaaaccagatccacctatggctccttgtctgtcctccattactaatccttcatcttccaccaactctgccatatgagcagcagcaggctgaggctgcccagctcagtgcaccccag

SEQ ID NO: 70608 - DNA, 600 bp, Chicken  19866894346116_1
tgatcgagttcttggcttgaagaaaagctctgcaaagccagtgatgctgttgcacgcatttaacacagggctatgatggttctaagactgaaggagtgatttcagacctgtgcgttagtgtgcaaatgactgcccatgctctggcaaaagggatggctccatgcagcctcctgtcctgggctcatgtcagtgagctgctgtgtcattggaatggggggagcctgtgctgtgtgtcccatgcaagggtcttgtcctgcctcatttctccttgtagttaagggggagcaggagaaggtggtrggtgaggaggaaggggagcagcgagtgtctcggagcagttgagctgctgcaggagatggctctggttagtacaggggtggctgctcctcctgtaggggtgaccaggtgtctgtcctttgtgctgagcttcttttgtggtctcatatgaaaatgatatacttcacccagtgaaagaaatagaggaatgacatctcaacctgttctgtgctgtattaaaactcctgcaggttttttataatggatttggcatgctcatgaacagcgtgtgcctgttctggttgttagtccagcaagcactgc

SEQ ID NO: 70609 - DNA, 600 bp, Chicken  19866894346122_1
aaaggaaaaaatcgcatcctgaaatgcactacaagttcaagcagctgctgatgtatttttatggtgtgcagctggagtgtgtgtgtgcacattcagccctcttactgagcagggagcatcgtttgtttgctgctgcgagggatgtgatccaagcagaaggtgcaagctcccaagcttcttcaatttaaaatctctgcagagctgctcaggggatctcctgtcccaggagaattcattaagctccacgcagtgtgttgtgtgttaggacttctacgtagctcctcaaaaataatggcatcrttgctctgcattatcaccattgagggcatccgtggtgctgtgtctgtggtttttgtggtcctgtcctctcctgaggaagctgcagcagacagctccaatcccaccccctggaagtggtgctggcccagcggcactgctttgctcaagtttgaagtgtgtcgctgtgagatcttgctgtcgtgctgtttccttcatgtgtgtgcttttcttttttgccttgcagctcctggggcatgcctgcggatggcagggatgtgtgcttgtccttgtgtcgtgaccttggtgctgccctgctgccag

SEQ ID NO: 70610 - DNA, 510 bp, Chicken  19866894346123_1
tgcatcaaatgttacattcaggaccggtgtgggaagaaggcaactcgggatacctgcgctgctaacactgcccctatttgtttcaaacaaactcctttgtttcctgactaatatgcacgaacttggagcagcagcaaagtcagcaccgaaagctcactctgaagggcagacatccacaggggaaagcatcccacccaagatctgattttcctatacagtgatagatgggagcaggggaagccaaagcctggctctctgttcagtgtatggaaaccagcttctaccagcaccagcaagcaytgtgaaaacttcatacaagttgtactagaaatggctaagacatacaaaagaaatgtgtgtgctgatggactgtgttgctacctcttgaccaagacaatacatatcaaattctataggataaaatgtcagcaaagtggcattaagtcttcaacattaagtcattaacctaccgggaaaaaataagcatgcaagccatccccaggcatcaga

SEQ ID NO: 70611 - DNA, 541 bp, Chicken  19866894346142_1
ggtaataaaaaggcaaacttcagtgtatgtgtgctgagtgacagccgctatgctgccgtgatccggcccgcagtagagcggaccattcttcactctctgctaataactaaatcttctgctacgaaactaattaaactactttctaaagagttcccaacttccactttaaagcttcattcttgcggtgcttattcaacccaaattccaatacttgtgctttccagaattgtattcaagggaaaacagtggaatcaaacctatctcagtgacaccacgcaagtcacttgcttttcctttctrttcttcttgtcctagtgcggaactgtgtgcagtttatcctggttgccatttcttatacagaagttatatcagctgatacaagaaatatttgtttctttgaattcgatataaataatatctttctccagagaatttacgcaagcagagaagggcagaaaaagtgtaattgtgtatctcatttacccaaagagtatgattgtatgtgcaaattaaacaattgcatgcacgtgctaaattagat

SEQ ID NO: 70612 - DNA, 599 bp, Chicken  19866894346156_1
  misc_feature (1)..(67): n is any nucleotide
nnnnnnnnnnnnnnnnnnnnnnnnnnnnnnnnnnnnnnnnnnnnnnnnnnnnnnnnnnnnnnnnnnnccccaaaatacacccgtccccggtgtgcggctacacgtgcacccacatccacatccgagtgatgtcagtctgatcgctatcgcgctgactcaccccagcaacaacaacagcagggagggaaggcgagcccaacaccgagggcaaaccacagcggtgcagcagcggctccgcagcttcgctctaccaaaacctcccagcaaagccgcgtgcgcagcgggtgggagccagcagcygggctccttttatgggcaaggcacgggtgcgacgcagcagccgggcgagcgcgggcggycgtgacgtcccatcaaacacatctgccatggagattaaacagagcgccaggcagcccgggggccactttaatatccctacgcattcccagaagtaacacaagtgggggcggtgagcccggctgggggtcctgcagggcaatctgagcaggaaggctgcgagccgcatggctgcgccatctcctaaccccgcacatctctctgtctcccctccaggctgccctacgaggtggaccccatca

SEQ ID NO: 70613 - DNA, 599 bp, Chicken  19866894346156_2
  misc_feature (1)..(8): n is any nucleotide
nnnnnnnnccccaaaatacacccgtccccggtgtgcggctacacgtgcacccacatccacatccgagtgatgtcagtctgatcgctatcgcgctgactcaccccagcaacaacaacagcagggagggaaggcgagcccaacaccgagggcaaaccacagcggtgcagcagcggctccgcagcttcgctctaccaaaacctcccagcaaagccgcgtgcgcagcgggtgggagccagcagcygggctccttttatgggcaaggcacgggtgcgacgcagcagccgggcgagcgcgggcggycgtgacgtcccatcaaacacatctgccatggagattaaacagagcgccaggcagcccgggggccactttaatatccctacgcattcccagaagtaacacaagtgggggcggtgagcccggctgggggtcctgcagggcaatctgagcaggaaggctgcgagccgcatggctgcgccatctcctaaccccgcacatctctctgtctcccctccaggctgccctacgaggtggaccccatcactgtcttcgcctccttgtcgccggaggggctgctgatcatcgaggctccccagatcccc

SEQ ID NO: 70614 - DNA, 600 bp, Chicken  19866894346159_1
ctgcagcagtcagggtgtgagatggggctgagcagaccccgcaggactacaggagcggggttccaccacagccctgcggcgcgtgatgacggcgcggatttcatcacatgcagattaccagggaggaaccatcccagacgtccccttgggcagcagcttcccgtgactcacagcaccagaggctgcagagctgccacgcagcccccggcacagcgcctgcaatcagagcctgcagtcagagcctgcaaccagagcctgcaccgggcctgagcagcacctctgtgcagcacctctgctctkytctgctctgytctgctctgcctggtgctgcaccgaccccctttcagcaggaaggcgggctgtgaaacgatggttgaatttgatccttcctgccctggaagtctccatggctccagcgctgcactcacagcacccacctgaatccacgtgcccagcagtgcccagagcatcaccagggcaggcagggcaaaatggaagctctggccatgctccggcagagcagagccagcaggaacagcccagacgtggcgtgttccctccgtgcagctgccgagcggaggctccggctcgccaagtcct

SEQ ID NO: 70615 - DNA, 600 bp, Chicken  19866894346159_2
tgcagcagtcagggtgtgagatggggctgagcagaccccgcaggactacaggagcggggttccaccacagccctgcggcgcgtgatgacggcgcggatttcatcacatgcagattaccagggaggaaccatcccagacgtccccttgggcagcagcttcccgtgactcacagcaccagaggctgcagagctgccacgcagcccccggcacagcgcctgcaatcagagcctgcagtcagagcctgcaaccagagcctgcaccgggcctgagcagcacctctgtgcagcacctctgctctkytctgctctgytctgctctgcctggtgctgcaccgaccccctttcagcaggaaggcgggctgtgaaacgatggttgaatttgatccttcctgccctggaagtctccatggctccagcgctgcactcacagcacccacctgaatccacgtgcccagcagtgcccagagcatcaccagggcaggcagggcaaaatggaagctctggccatgctccggcagagcagagccagcaggaacagcccagacgtggcgtgttccctccgtgcagctgccgagcggaggctccggctcgccaagtcctg

SEQ ID NO: 70616 - DNA, 600 bp, Chicken  19866894346159_3
agggtgtgagatggggctgagcagaccccgcaggactacaggagcggggttccaccacagccctgcggcgcgtgatgacggcgcggatttcatcacatgcagattaccagggaggaaccatcccagacgtccccttgggcagcagcttcccgtgactcacagcaccagaggctgcagagctgccacgcagcccccggcacagcgcctgcaatcagagcctgcagtcagagcctgcaaccagagcctgcaccgggcctgagcagcacctctgtgcagcacctctgctctkytctgctctgytctgctctgcctggtgctgcaccgaccccctttcagcaggaaggcgggctgtgaaacgatggttgaatttgatccttcctgccctggaagtctccatggctccagcgctgcactcacagcacccacctgaatccacgtgcccagcagtgcccagagcatcaccagggcaggcagggcaaaatggaagctctggccatgctccggcagagcagagccagcaggaacagcccagacgtggcgtgttccctccgtgcagctgccgagcggaggctccggctcgccaagtcctgggggagggat

SEQ ID NO: 70617 - DNA, 600 bp, Chicken  19866894346175_1
cagcttataacaacaaagcggtcatcaagtaacacagagcaacgctgtgactgctttaagcatttgcctaaaccaagtgcttatagttcagctctcagcaaatgcagcttactccatccacaacgcccttgattcaatgaggaggcttcagcctttagctgtgcttccaccccatgcacaccagaaaacacaacacaaagtgtcactgaggagccaggccagggaaggatgctcagagtgccacgggtggtcaccagggcaaacacaacactgcctcagccttcccagtttgctcactgwtttttcagccctgatggtgctcaygcagagtgccagaggattttacacaaaaaacaataacagcccagaaaacgcattggcagaaaacatgccaacgggaaaccctctccaagtattgctgtaaamctcaaagctgaagggtacttctagaacttgggaaagcacaaatccagcagtgtgccccacagttcacatggatgtgtgggaaggagcagtgcaggatctgggcagcaccccatccaccccagctctcacatacccaggagggctcatgcagggagaacacgtagaccacctctg

SEQ ID NO: 70618 - DNA, 600 bp, Chicken  19866894346175_2
tcaagtaacacagagcaacgctgtgactgctttaagcatttgcctaaaccaagtgcttatagttcagctctcagcaaatgcagcttactccatccacaacgcccttgattcaatgaggaggcttcagcctttagctgtgcttccaccccatgcacaccagaaaacacaacacaaagtgtcactgaggagccaggccagggaaggatgctcagagtgccacgggtggtcaccagggcaaacacaacactgcctcagccttcccagtttgctcactgwtttttcagccctgatggtgctcaygcagagtgccagaggattttacacaaaaaacaataacagcccagaaaacgcattggcagaaaacatgccaacgggaaaccctctccaagtattgctgtaaamctcaaagctgaagggtacttctagaacttgggaaagcacaaatccagcagtgtgccccacagttcacatggatgtgtgggaaggagcagtgcaggatctgggcagcaccccatccaccccagctctcacatacccaggagggctcatgcagggagaacacgtagaccacctctgaaaggtccctccacaaccttacca

SEQ ID NO: 70619 - DNA, 503 bp, Chicken  19866894346175_3
ccttgattcaatgaggaggcttcagcctttagctgtgcttccaccccatgcacaccagaaaacacaacacaaagtgtcactgaggagccaggccagggaaggatgctcagagtgccacgggtggtcaccagggcaaacacaacactgcctcagccttcccagtttgctcactgwtttttcagccctgatggtgctcaygcagagtgccagaggattttacacaaaaaacaataacagcccagaaaacgcattggcagaaaacatgccaacgggaaaccctctccaagtattgctgtaaamctcaaagctgaagggtacttctagaacttgggaaagcacaaatccagcagtgtgccccacagttcacatggatgtgtgggaaggagcagtgcaggatctgggcagcaccccatccaccccagctctcacatacccaggagggctcatgcagggagaacacgtagaccacctctgaaaggtccctccacaaccttaccatgtct

SEQ ID NO: 70620 - DNA, 600 bp, Chicken  19866894346176_1
taaaagctacaaaagtaggaggtaaaggggttgcttgtattgcatattaaatgggatagctatagttactgtgagagcaacctggctattcaagctgtgctcaagaccactgacatttgatttgcacttagtgcattctgctttatttctcttggtcactcttgaggttaagatactgaacttcagctgccttcccattgtacgtgaggattcttctcccaccccacagaagtacaggtgaggtaacatctgcactccaggtggaaatagtcctgtcctgcaaaagcattcttcctaaascaattttcccctacascatagtaacgaagaggtagctattttaattgttccctaacaaaatgttttgaagaaagtgcagttcttgacctctgcccataggacagggaaatcatgatcaaatgatcaaatggagttcatttaaacagatcatctcattaagtaaagcagaaatgataatggattggtccatactttcaggtggtcacacgtgctacttctgcatggatcttatttcatgtctacaatttgtctgatgctctcaaaaagaggcgctaccttaatttagcactccctgactgg

SEQ ID NO: 70621 - DNA, 600 bp, Chicken  19866894346176_2
aggaggtaaaggggttgcttgtattgcatattaaatgggatagctatagttactgtgagagcaacctggctattcaagctgtgctcaagaccactgacatttgatttgcacttagtgcattctgctttatttctcttggtcactcttgaggttaagatactgaacttcagctgccttcccattgtacgtgaggattcttctcccaccccacagaagtacaggtgaggtaacatctgcactccaggtggaaatagtcctgtcctgcaaaagcattcttcctaaascaattttcccctacascatagtaacgaagaggtagctattttaattgttccctaacaaaatgttttgaagaaagtgcagttcttgacctctgcccataggacagggaaatcatgatcaaatgatcaaatggagttcatttaaacagatcatctcattaagtaaagcagaaatgataatggattggtccatactttcaggtggtcacacgtgctacttctgcatggatcttatttcatgtctacaatttgtctgatgctctcaaaaagaggcgctaccttaatttagcactccctgactggtacatgggaaaatcca

SEQ ID NO: 70622 - DNA, 600 bp, Chicken  19866894346176_3
ctccccttccaagaaacctccccttctcccttgccatagattttctttccttctgtttgtcctacaagcacttcattatttatttgttgttgctaaagtggtatccgacaacgtggcatctccaacaagctatttaagtaatgcaataaaacactttttaaacaggatatttggcttaatttgaaatgtcagtgtatagaaattaggagcataacaccttctttcttatcgtctccagactgtctgaacaagaagactgactagctctctttcaaacaggaataaagacacgttcatgamtttacagtgttctcaaagggcctctcacaataartgaaaatcaggtgtatgtttatagctaagttaaggaacatacctttcaacacaggtcactttacctgtgaggcatctcatttaccgcgatcgtactccattttggttcatagtcagtactgtattaaagcaaacttccatgttttaatttttgtgccagatgggtgattttgtggggagagtgaacagcttcacagttccttttggtgggtgaaaattatttgttaacatggtcattcacaagtgattccagcagtcactagtaga

SEQ ID NO: 70623 - DNA, 600 bp, Chicken  19866894346176_4
catagattttctttccttctgtttgtcctacaagcacttcattatttatttgttgttgctaaagtggtatccgacaacgtggcatctccaacaagctatttaagtaatgcaataaaacactttttaaacaggatatttggcttaatttgaaatgtcagtgtatagaaattaggagcataacaccttctttcttatcgtctccagactgtctgaacaagaagactgactagctctctttcaaacaggaataaagacacgttcatgamtttacagtgttctcaaagggcctctcacaataartgaaaatcaggtgtatgtttatagctaagttaaggaacatacctttcaacacaggtcactttacctgtgaggcatctcatttaccgcgatcgtactccattttggttcatagtcagtactgtattaaagcaaacttccatgttttaatttttgtgccagatgggtgattttgtggggagagtgaacagcttcacagttccttttggtgggtgaaaattatttgttaacatggtcattcacaagtgattccagcagtcactagtagaaacgctatctggaacacaaatatggataccccag

SEQ ID NO: 70624 - DNA, 600 bp, Chicken  19866894346186_1
agctcaacgttttccttaaggtgatgatttgatagtgctttctttgctctgactcgcaaattaagttgtcaaaaataattcctgtggcttccagatatgaaatcatggcagaagatgcctcgtgctttaagacacccctggttgctgctatcagatatgaacccacgtctttcagccctgtagttcaaccttgagttaaagacaggaccccaaaacacacctcctttccctaaaaatagagcttataaaacaaggagatcacacggattattacatgcttcacttggcactacagcctawatacaagtagagtccatctataaaaacaatccccatccaccccaaaagccaagttaagaatttcagccaatggctgggagtggatgcagaactttgctcccaaactcttcccttttgataggaagaagccaaaaaatcccagtgaggaacgcatccccatgcagaagggacaaggagccaggacacagaatcgggttctccagttggctcattggaaaacagacaacgtgcccctacctgcttctgctttacagaatcactttgggatactgactcaatccaaccccaaagctcctcaga

SEQ ID NO: 70625 - DNA, 600 bp, Chicken  19866894346188_1
ttcctgctctagggaacctgctttagcacaaggttggactagatgatctgcagaggtcccctccaaccgtacgattctgcagtaacaggctaagcagaaatgcaaactgtaaccacgagcgagacaagtgctcaaagcctcacaaatacacggcaagaaccattgcttccatcacataggtcacagccaagatgaggctgataaaagcagcagcatcttctgctgtatttcaaatgattccaacctaagtataagcagtttgccctgtgttcccacccagtgtacgtgttttaagtaacygctgcagcccaagaacagatgaaatgtcagttgttcaaaactcacttgaacaagccacaacatttacaaagcatttctttgaaaaacaccgatattgctattgcttcaaattactaaatacttccagaaaacmtgaatcaccacaagatcctctctggaagtttaattgcagctgcacctaccaatttcagaagtcaaccctaaaaagcaaggtcgaacgttttcttgaagcttattctatagcttctacacaatccaagtacataattgcagaaaaaatatcactcagtaccattccca

SEQ ID NO: 70626 - DNA, 510 bp, Chicken  19866894346188_2
aaagcctcacaaatacacggcaagaaccattgcttccatcacataggtcacagccaagatgaggctgataaaagcagcagcatcttctgctgtatttcaaatgattccaacctaagtataagcagtttgccctgtgttcccacccagtgtacgtgttttaagtaacygctgcagcccaagaacagatgaaatgtcagttgttcaaaactcacttgaacaagccacaacatttacaaagcatttctttgaaaaacaccgatattgctattgcttcaaattactaaatacttccagaaaacmtgaatcaccacaagatcctctctggaagtttaattgcagctgcacctaccaatttcagaagtcaaccctaaaaagcaaggtcgaacgttttcttgaagcttattctatagcttctacacaatccaagtacataattgcagaaaaaatatcactcagtaccattcccattcgccaactcccaaaagcagagctgtcgttcccgtaaacagg

SEQ ID NO: 70627 - DNA, 600 bp, Chicken  19866894346190_1
gatatactgatttcactgggcccattcacatacaaaacaactacgcaggcagttctttttaaatgctgttcacagataagctgagtaaagaataacatcagaccaaaggaccaaagcaaagtgcaggagctggacttggtgatcccttccagctcggggtgttcagtgatttcagcatttatagatggccccgagttgtgctgcagagtggattccatcctggctcactgtacgaacgcagcagtgatgtctcccttggcactcatcaacctttcctttccttcgtcatctttttctatrttggtttttctttttttttttaatccattttggaaaaagaacttcattaactgttagaattgtttgctgtatttctgcttactgtgttctgcccatcaaaagaatcagaatgcaccacaaaggaataaccttccaataaccaaaggtagctcatcacatgtcttgcaatgttttctctcagctccaaacacragagatttggatgttttcctgcgaaaacaagagtcgggcttcggattccgtgtgcttggaggggacggaccggatcagcctgtaggtgaaacttcttacagctgctta

SEQ ID NO: 70628 - DNA, 600 bp, Chicken  19866894346190_2
gagttgtgctgcagagtggattccatcctggctcactgtacgaacgcagcagtgatgtctcccttggcactcatcaacctttcctttccttcgtcatctttttctatrttggtttttctttttttttttaatccattttggaaaaagaacttcattaactgttagaattgtttgctgtatttctgcttactgtgttctgcccatcaaaagaatcagaatgcaccacaaaggaataaccttccaataaccaaaggtagctcatcacatgtcttgcaatgttttctctcagctccaaacacragagatttggatgttttcctgcgaaaacaagagtcgggcttcggattccgtgtgcttggaggggacggaccggatcagcctgtaggtgaaacttcttacagctgcttacatgtgatctcaccgtgctgctgctggggtggctcctgctctgtcctcctcatttctgtgtcctcctaaggaattcagtgatggaaaaaatgattgataattgacttgtaaagatggagaatcggttcagattaccagatcgattctgggtttaagaagtgattcagctctagctccgaagagaggagaacc

SEQ ID NO: 70629 - DNA, 600 bp, Chicken  19866894346191_1
gttcatcttgctgttcactgagaccctcaggtcccttactgcaaagctacttcccagataattggcccaccagcatgcactcatgtatgaggttgttcctgtacaagaagttcctgtcagcctatttcccaacctgtccaggtaatatgatcctctggcatatcagccactcccccattcatttttgtgtcatctgcaaacatgctcactccgtcccaccattcagattactaagatgatattaaatgctattggacatagcatttaccaggacacaccactagatactggccaccaatwatgtgcctcaagttctaatcaagatagtcattttcagttcctttttcacagtatctgagttacaacacrgaacgccgtagatgctatttggtgccaatggtattggttctgtattaaatgatgtcacaaagaaaaacatcttctcttaactgaaaaacaataaggcacatcttacagaaatcatttctagcctacagccagtgaatacaaaccagtacctccgtgaggagagcttaaaaaaaatttgcctcaccatcgtgcccacatcaaaagaacaaacatcaggatggagaattcacc

SEQ ID NO: 70630 - DNA, 600 bp, Chicken  19866894346191_2
ccagcatgcactcatgtatgaggttgttcctgtacaagaagttcctgtcagcctatttcccaacctgtccaggtaatatgatcctctggcatatcagccactcccccattcatttttgtgtcatctgcaaacatgctcactccgtcccaccattcagattactaagatgatattaaatgctattggacatagcatttaccaggacacaccactagatactggccaccaatwatgtgcctcaagttctaatcaagatagtcattttcagttcctttttcacagtatctgagttacaacacrgaacgccgtagatgctatttggtgccaatggtattggttctgtattaaatgatgtcacaaagaaaaacatcttctcttaactgaaaaacaataaggcacatcttacagaaatcatttctagcctacagccagtgaatacaaaccagtacctccgtgaggagagcttaaaaaaaatttgcctcaccatcgtgcccacatcaaaagaacaaacatcaggatggagaattcacccctcttttttgtagctatcagagcaaagcaactgtaacagcctgaggggtcaacagacagcatattaaa

SEQ ID NO: 70631 - DNA, 469 bp, Chicken  19866894346205_1
tggttggttacttgatgtacttcaatggtaatgaaatcatctggggaacagtgtattttgaatgtgtgtgggccttttatgcaccatgaatgttagaaaatatttcatgtacactaagctttaactgataatactcttgtaggaagcactgtattacagaatctctcataataggccactagggaagaaacaaatacattgaatcagaattccagcatctggaattgtctgtgaaacttttctttttgagaaactgagcagtaagacatcatttgcacactgactaagagtgctgaaagratgttaatggcattaacactcttgtcatctgttaacacttgggagttccttctagcttgttatggaaaaataattcacttcaagtgttctggagatgtcatttttaggaaagcctgttttgtttttgagacagtttgaaatgcactgtcaccttcatttctgcatcaaa

SEQ ID NO: 70632 - DNA, 599 bp, Chicken  19866894346207_1
  misc_feature (1)..(137): n is any nucleotide
nnnnnnnnnnnnnnnnnnnnnnnnnnnnnnnnnnnnnnnnnnnnnnnnnnnnnnnnnnnnnnnnnnnnnnnnnnnnnnnnnnnnnnnnnnnnnnnnnnnnnnnnnnnnnnnnnnnnnnnnnnnnnnnnnnnnnnnnnaaaatatatatatatatattatttttttttactcttgccacctcattgccatagtaacagaggtcctgaggacacctccatgaagtaggtcaccacagacccctgtttgctgctgctcacagccagcactgggcatccccaatggtgcgagcatggctgggcyggagaggtaccctgcagtggggtaccccatggccatgccctggtgaggacaccgtgacatcacccaggtgccatsgagggccgtcccaygcccggacaccgatcgtgggaaactgycgtccctcctgttggtgtccccaagtcagggctccctcccatccccctctgcctccctcccccctttcactggagcctctctcctcctgatttgcataattttccattttcagtgtccccttttctttttctcctctccatatggtgcgtccccctctctgcctggtgcaggagccctcctta

SEQ ID NO: 70633 - DNA, 599 bp, Chicken  19866894346207_2
  misc_feature (1)..(62): n is any nucleotide
nnnnnnnnnnnnnnnnnnnnnnnnnnnnnnnnnnnnnnnnnnnnnnnnnnnnnnnnnnnnnnaaaatatatatatatatattatttttttttactcttgccacctcattgccatagtaacagaggtcctgaggacacctccatgaagtaggtcaccacagacccctgtttgctgctgctcacagccagcactgggcatccccaatggtgcgagcatggctgggcyggagaggtaccctgcagtggggtaccccatggccatgccctggtgaggacaccgtgacatcacccaggtgccatsgagggccgtcccaygcccggacaccgatcgtgggaaactgycgtccctcctgttggtgtccccaagtcagggctccctcccatccccctctgcctccctcccccctttcactggagcctctctcctcctgatttgcataattttccattttcagtgtccccttttctttttctcctctccatatggtgcgtccccctctctgcctggtgcaggagccctccttaacaagctcagcaaagccctctctctcaggggctgcacatgaaagatgctctgtaaaaacagaggccggcaaggag

SEQ ID NO: 70634 - DNA, 599 bp, Chicken  19866894346207_3
  misc_feature (1)..(48): n is any nucleotide
nnnnnnnnnnnnnnnnnnnnnnnnnnnnnnnnnnnnnnnnnnnnnnnnaaaatatatatatatatattatttttttttactcttgccacctcattgccatagtaacagaggtcctgaggacacctccatgaagtaggtcaccacagacccctgtttgctgctgctcacagccagcactgggcatccccaatggtgcgagcatggctgggcyggagaggtaccctgcagtggggtaccccatggccatgccctggtgaggacaccgtgacatcacccaggtgccatsgagggccgtcccaygcccggacaccgatcgtgggaaactgycgtccctcctgttggtgtccccaagtcagggctccctcccatccccctctgcctccctcccccctttcactggagcctctctcctcctgatttgcataattttccattttcagtgtccccttttctttttctcctctccatatggtgcgtccccctctctgcctggtgcaggagccctccttaacaagctcagcaaagccctctctctcaggggctgcacatgaaagatgctctgtaaaaacagaggccggcaaggagccctccccctctcc

SEQ ID NO: 70635 - DNA, 599 bp, Chicken  19866894346207_4
  misc_feature (1)..(21): n is any nucleotide
nnnnnnnnnnnnnnnnnnnnnaaaatatatatatatatattatttttttttactcttgccacctcattgccatagtaacagaggtcctgaggacacctccatgaagtaggtcaccacagacccctgtttgctgctgctcacagccagcactgggcatccccaatggtgcgagcatggctgggcyggagaggtaccctgcagtggggtaccccatggccatgccctggtgaggacaccgtgacatcacccaggtgccatsgagggccgtcccaygcccggacaccgatcgtgggaaactgycgtccctcctgttggtgtccccaagtcagggctccctcccatccccctctgcctccctcccccctttcactggagcctctctcctcctgatttgcataattttccattttcagtgtccccttttctttttctcctctccatatggtgcgtccccctctctgcctggtgcaggagccctccttaacaagctcagcaaagccctctctctcaggggctgcacatgaaagatgctctgtaaaaacagaggccggcaaggagccctccccctctcccccttgatttataaggggccgggatgt

SEQ ID NO: 70636 - DNA, 599 bp, Chicken  19866894346213_1
  misc_feature (1)..(10): n is any nucleotide
nnnnnnnnnntattatttttataagcataaaggcaatgatagtacaattaactgagtgcaggaaaatgatgtattttaacacaaaacataataacagcattgactttctggttggcagaatgcagaatctaaaaagtacagaaaaaggtaatgtctgatggcaaaggcaaggaaacaaaaataaacctgaaagtttaacaatgtgaaatgatgaggaaaagaaattagcctccaaattttcatttttcaaggttactcttggcatagaatacaagttaatgttatgcaataatgaaacakctttaaaaacaaaataataataataataataatacagcacatctaagcatccaagtcaagtcttgagttctggagcaggagcattacgtttgagacttcagctcctcttacaaatacagtttgaacaacaagcatggccaacaaatccaaaaattagtcatagggtactaaacaacaacagaagtatttaagtctcatttgtgtaggaagctaagctacgtcagatgtaattaaagattttagtgagagcttgccattttactaaacaactcagaattgccagagcggacatgaagtgt

SEQ ID NO: 70637 - DNA, 600 bp, Chicken  19866894346213_2
tatttttataagcataaaggcaatgatagtacaattaactgagtgcaggaaaatgatgtattttaacacaaaacataataacagcattgactttctggttggcagaatgcagaatctaaaaagtacagaaaaaggtaatgtctgatggcaaaggcaaggaaacaaaaataaacctgaaagtttaacaatgtgaaatgatgaggaaaagaaattagcctccaaattttcatttttcaaggttactcttggcatagaatacaagttaatgttatgcaataatgaaacakctttaaaaacaakataataataataataataatacagcacatctaagcatccaagtcaagtcttgagttctggagcaggagcattacgtttgagacttcagctcctcttacaaatacagtttgaacaacaagcatggccaacaaatccaaaaattagtcatagggtactaaacaacaacagaagtatttaagtctcatttgtgtaggaagctaagctacgtcagatgtaattaaagattttagtgagagcttgccattttactaaacaactcagaattgccagagcggacatgaagtgttgggtacacccatc

SEQ ID NO: 70638 - DNA, 600 bp, Chicken  19866894346213_3; identical to SEQ ID NO: 70637

SEQ ID NO: 70639 - DNA, 600 bp, Chicken  19866894346213_4; identical to SEQ ID NO: 70637

SEQ ID NO: 70640 - DNA, 600 bp, Chicken  19866894346220_1
gtataatttgctggcataataggtgcaacctatatccagttattttcaagtgccaggtattgagatacttttaaagtaatgtctggaagaatactttaaaaaaaaaagcttttatttctaaaacaaaatgtgaattattttgaactgcattattaaaaggagtaggtccagtcagatgctctttgtaaactgaagagtcacgatttaacgtacacggtggaaaacacatttttggattcatttgccttcagaagcaattatcagacttgagcagtcaacacatcaaaactgtatttagakacctctactttgtctagtgattggcaaggtttgtaatgawgtttgatwacagaactaatatttattttattctgtactgactgaattttatttcttctttatattcagatgctgaatttctttgataatgtagtctcataatgcagtagtgaaaataaaatcaatagcctctgtctcaaaagactgtagtttttctctcctttcctctgctttgcggactgaagtatcaacaaattatgctatgagattgacataagtactgtgccctttgtgcagccatcaaataacttggtggctaag

SEQ ID NO: 70641 - DNA, 600 bp, Chicken  19866894346220_2
tattttcaagtgccaggtattgagatacttttaaagtaatgtctggaagaatactttaaaaaaaaaagcttttatttctaaaacaaaatgtgaattattttgaactgcattattaaaaggagtaggtccagtcagatgctctttgtaaactgaagagtcacgatttaacgtacacggtggaaaacacatttttggattcatttgccttcagaagcaattatcagacttgagcagtcaacacatcaaaactgtatttagakacctctactttgtctagtgattggcaaggtttgtaatgawgtttgatwacagaactaatatttattttattctgtactgactgaattttatttcttctttatattcagatgctgaatttctttgataatgtagtctcataatgcagtagtgaaaataaaatcaatagcctctgtctcaaaagactgtagtttttctctcctttcctctgctttgcggactgaagtatcaacaaattatgctatgagattgacataagtactgtgccctttgtgcagccatcaaataacttggtggctaagaccaaycatttaaatttctatctgcctgccttcaccaatc

SEQ ID NO: 70642 - DNA, 600 bp, Chicken  19866894346220_3
agtgccaggtattgagatacttttaaagtaatgtctggaagaatactttaaaaaaaaaagcttttatttctaaaacaaaatgtgaattattttgaactgcattattaaaaggagtaggtccagtcagatgctctttgtaaactgaagagtcacgatttaacgtacacggtggaaaacacatttttggattcatttgccttcagaagcaattatcagacttgagcagtcaacacatcaaaactgtatttagakacctctactttgtctagtgattggcaaggtttgtaatgawgtttgatwacagaactaatatttattttattctgtactgactgaattttatttcttctttatattcagatgctgaatttctttgataatgtagtctcataatgcagtagtgaaaataaaatcaatagcctctgtctcaaaagactgtagtttttctctcctttcctctgctttgcggactgaagtatcaacaaattatgctatgagattgacataagtactgtgccctttgtgcagccatcaaataacttggtggctaagaccaaycatttaaatttctatctgcctgccttcaccaatctctctcag

SEQ ID NO: 70643 - DNA, 600 bp, Chicken  19866894346220_4
actttgtctagtgattggcaaggtttgtaatgawgtttgatwacagaactaatatttattttattctgtactgactgaattttatttcttctttatattcagatgctgaatttctttgataatgtagtctcataatgcagtagtgaaaataaaatcaatagcctctgtctcaaaagactgtagtttttctctcctttcctctgctttgcggactgaagtatcaacaaattatgctatgagattgacataagtactgtgccctttgtgcagccatcaaataacttggtggctaagaccaaycatttaaatttctatctgcctgccttcaccaatctctctcaggggatcattgaagactactgggtattttatcatccacaagtatagggtgctttatactggtggaataggaataataagatatggtaagccactattagggcctcattatctacagtgtttcatggctctagggaagaaatatggtgcctgaggtggaagtgagctcaccctttgccagagcacgtgctgctccctgggaattttcaggaggcccagcagagcacaagcgtggatggaggttgtgagggacaaacttca

SEQ ID NO: 70644 - DNA, 600 bp, Chicken  19866894346222_1
aagagggaacaaatttaattaccaagagctagaaacattttatcataagtcaatctagtgcaccttctgccacagaattgggatcctgacctgtaagctcttcatttttcgtacttagcccattatactttgctggcactagcactaacttgcctttctgcattacctttgaacttgctctacatgattacataaacagtactcccaacgtaagaaagatggcaggaacaagttatcaaggccaacaactcctcacaacaacagaaatagtttagcttacagagattgtgaaactacagyttcacacagctgtcttaagaggtgaaaatggctatcgcaggccctgttccttcttgccttgcagtctcaccgcagtgccactgagagcatgaactgaaacgggmctcggaacattcactctggagtccccaraggagagaggtaggaacagaaaggcatttgccatgcaagctccatctcactctcttaaaaagtaacccatccatcactaaaatgactaacaacgcctaccatctctccgtgagagatctatgaactgttcagcaatgaagatcttttcccagttcccaaacagtaaca

SEQ ID NO: 70645 - DNA, 600 bp, Chicken  19866894346222_2
tttttcgtacttagcccattatactttgctggcactagcactaacttgcctttctgcattacctttgaacttgctctacatgattacataaacagtactcccaacgtaagaaagatggcaggaacaagttatcaaggccaacaactcctcacaacaacagaaatagtttagcttacagagattgtgaaactacagyttcacacagctgtcttaagaggtgaaaatggctatcgcaggccctgttccttcttgccttgcagtctcaccgcagtgccactgagagcatgaactgaaacgggmctcggaacattcactctggagtccccaraggagagaggtaggaacagaaaggcatttgccatgcaagctccatctcactctcttaaaaagtaacccatccatcactaaaatgactaacaacgcctaccatctctccgtgagagatctatgaactgttcagcaatgaagatcttttcccagttcccaaacagtaacatctctcaacaggtgaaagatggggaacctgcttcaagctagagattttgatgagcttcagagctaccgaggaaaaatatttctgcatcagtcagactttcccca

SEQ ID NO: 70646 - DNA, 600 bp, Chicken  19866894346222_3
ctggcactagcactaacttgcctttctgcattacctttgaacttgctctacatgattacataaacagtactcccaacgtaagaaagatggcaggaacaagttatcaaggccaacaactcctcacaacaacagaaatagtttagcttacagagattgtgaaactacagyttcacacagctgtcttaagaggtgaaaatggctatcgcaggccctgttccttcttgccttgcagtctcaccgcagtgccactgagagcatgaactgaaacgggmctcggaacattcactctggagtccccaraggagagaggtaggaacagaaaggcatttgccatgcaagctccatctcactctcttaaaaagtaacccatccatcactaaaatgactaacaacgcctaccatctctccgtgagagatctatgaactgttcagcaatgaagatcttttcccagttcccaaacagtaacatctctcaacaggtgaaagatggggaacctgcttcaagctagagattttgatgagcttcagagctaccgaggaaaaatatttctgcatcagtcagactttccccaacactcatcctgcctgaatcttcactga

SEQ ID NO: 70647 - DNA, 600 bp, Chicken  19866894346225_1
tgtttctattaaaaaaaaaaaaaagactgcaaaagacctggctgattgatggctacataaagcaagcagcacattagccagctcccgtgaagcttgtgtgattaagaggaaggcaactaatcacaagtattttatccacacccagctgcaaagtccagtgagtttcagcaccccaagtaacactagcacgaatggcccaggatgtattatgggtctaaattattcatgtccagggcagcacacaatgcaataaatacacacttgaccttccaagccgaagcagctgaagtaaaaacaatmatctttaaaggaactcagtacactcatatgctgcgttgcatcaagagatcagtaggaagagaaaccagtttcatttttaactctctagcaacttctctttatactacacatataactgtactgaattataccaacattaaaaggccggtggcactctagaaattcttgcagacagacacacagcacatgttggctgtgagtgaagattcaacaactgcagactattcttacccagcagatcgtgttatgtacactgcgtgatcaagacatgcgagcacatacagaacatcctgacactgg

SEQ ID NO: 70648 - DNA, 600 bp, Chicken  19866894346227_1
taaatgtgtccagctatacagccttctagttattgtctcagttctctctttattgctgcattcaatcatcccttctcacaaacattcctttgtgggttgtttttttgttgttgttgtttcaatctaactttgaattacatctttcttactcagttgttgacactttctagcacgatttcgttaattcttacctagctattatccacgctttagtacttaatacctttaccccctctgtcctttggcatgtagttgtagaggggaagagagcaacatattatttttttagattgccttttwtaataagaatggatatttgtagctcctccagtgggagaaaagtgattgaaaaacacattcaaaaactgtccattctttctaagaactacagcagagttatagagaaagtgatattctctgatgagtgatttgatcagagagtaacaataatgtttttgcaccttgactcctgctctataattttattacaagggatttaaagagaaagtttttttgttaaaaaaaaaaaaaaagtgttttcatccttgtttcataatattctgacaggaatgctgctgctgaaaggaagtactctcttcc

SEQ ID NO: 70649 - DNA, 599 bp, Chicken  19866894346234_1
  misc_feature (1)..(128): n is any nucleotide
nnnnnnnnnnnnnnnnnnnnnnnnnnnnnnnnnnnnnnnnnnnnnnnnnnnnnnnnnnnnnnnnnnnnnnnnnnnnnnnnnnnnnnnnnnnnnnnnnnnnnnnnnnnnnnnnnnnnnnnnnnnnnnnnggacactgctgtcctcctccctgttcagcaaatcgtgctgccgcctgtccccaaaatccctctgcaaaggacgcatcgccctggggatgccgtggggccacagcactgtgcctgcagccctggggcaccctctgggcagagggacacccactccaagcagtcaaagcgcacygcactgctgtgggagcctttgtttggtgtctgcgggcgccctgagccgggctgggcggtgatttgtctgcctcctgcagcggggctgtcagctcacagctgccaaccacttccatttgcgctgccattaaacaatcgcaggtctgacaggtaggaacaaaatwaagcgggggagaaaagcctcaaaaaatcacccagcaggagcaccgctggcttcaccgcatccggaaccctcctcacgtctgttgcgctctttggatctgcgtccccaaaggagtttggtcaccctgggaagcccac

SEQ ID NO: 70650 - DNA, 600 bp, Chicken  19866894346234_2
tgctgccgcctgtccccaaaatccctctgcaaaggacgcatcgccctggggatgccgtggggccacagcactgtgcctgcagccctggggcaccctctgggcagagggacacccactccaagcagtcaaagcgcacygcactgctgtgggagcctttgtttggtgtctgcgggcgccctgagccgggctgggcggtgatttgtctgcctcctgcagcggggctgtcagctcacagctgccaaccacttccatttgcgctgccattaaacaatcgcaggtctgacaggtaggaacaaaatwaagcgggggagaaaagcctcaaaaaatcacccagcaggagcaccgctggcttcaccgcatccggaaccctcctcacgtctgttgcgctctttggatctgcgtccccaaaggagtttggtcaccctgggaagcccacgtggagccgggcagcacagagccatcccagtgcatcccaatggcctggagaygccgtgccaggtcagctcctgcagctcctgcagggatggggcctggcaccgagctgccgcccgggggacaccgcgtgccatccccgtgacaccgtgctggcagagcagggcc

SEQ ID NO: 70651 - DNA, 587 bp, Chicken  19866894346234_3
tgggcggtgatttgtctgcctcctgcagcggggctgtcagctcacagctgccaaccacttccatttgcgctgccattaaacaatcgcaggtctgacaggtaggaacaaaatwaagcgggggagaaaagcctcaaaaaatcacccagcaggagcaccgctggcttcaccgcatccggaaccctcctcacgtctgttgcgctctttggatctgcgtccccaaaggagtttggtcaccctgggaagcccacgtggagccgggcagcacagagccatcccagtgcatcccaatggcctggagaygccgtgccaggtcagctcctgcagctcctgcagggatggggcctggcaccgagctgccgcccgggggacaccgcgtgccatccccgtgacaccgtgctggcagagcagggccggcccgcagagggttaacagctgattgcagcctttgtctctgcatcagtgtacataatgcgccccgcatttgcatactgcagtgtgcgctcaattaaaatgaacttttaatttcttctaagtaaattacttcttcccgctacgtgacgcgcacaaatgtcagaataatgggagag

SEQ ID NO: 70652 - DNA, 579 bp, Chicken  19866894346237_1
cattgcaaacgtgatcaccagcctggagggcagcagtaggagcacggagctgccagctttcagaacactatctcccaccaacgccaggcaaggccaaggcctgaaccacggctgggaggccatggtgagtgtgctgggagcagcaggaggagaaagaactgttcaggttgtgctggggggtagggggatgggggtggggggggaagttgtccgtttacaagtcataattttgtcaacaatccaaatctggttttaaattaaatattagcaataaactcagagagaaaagatttccaaaawgcatgacaaaggaagtgctaggagcatatgtcttttcaacaactcaacagatgtctctttcccccccagttatcccagcccatctatttaaggttctctatacttttaagagctggagtcctccgactgctgtttgcatactagcttcagaggaaatccccacagaccttctgttccttttacacaacccgaggtatggcttcagtggaagagggggaagtgttcaacaccttctgaaaaaaatcagactccgtggatgtgcatcacaccagattccca

SEQ ID NO: 70653 - DNA, 504 bp, Chicken  19866894346238_1
tgagcgcgtcctcgtgggcccctctgcggcggaaaatagaccgctcccctggggctgacgggcattgaggtctcaggagcggctccagagctgcagcccttcccttccggtttccatccaggaggaaagaattgccttttttcccctttagttcgttacggtaggaaatgagacggctcccagcccatttcccaccgtttggcactgctgtatgagcacagacccgggccgctcagcgctcacaggacacgtcccgttacacggcagtaaggagctccctgaggcctccccgccctctgycaccttctctctccccatcacagcgcgctcagcctgaccccgtttgccatcaagcctctgctcaggagagcggctgcctatgaggccctggagagcttygcgttggcctacgtggactataagaccgcactgcaggtggactgctccatacaggcggcccacgatggggtcaacaggtaacccccaccgcgccctgctttttgc

SEQ ID NO: 70654 - DNA, 405 bp, Chicken  19866894346238_2
ttcccttccggtttccatccaggaggaaagaattgccttttttcccctttagttcgttacggtaggaaatgagacggctcccagcccatttcccaccgtttggcactgctgtatgagcacagacccgggccgctcagcgctcacaggacacgtcccgttacacggcagtaaggagctccctgaggcctccccgccctctgycaccttctctctccccatcacagcgcgctcagcctgaccccgtttgccatcaagcctctgctcaggagagcggctgcctatgaggccctggagagcttygcgttggcctacgtggactataagaccgcactgcaggtggactgctccatacaggcggcccacgatggggtcaacaggtaacccccaccgcgccctgctttttgc

SEQ ID NO: 70655 - DNA, 600 bp, Chicken  19866894346240_1
atctttctctcatattgtttttatctgcagaacacttcccatatttttctcttactgttgttgtccttttttaccttccccatgaaagatatgtctcatctctctgtcttgttgcctttcagaaaagctgaaacaagcaggttcaaactgactgtgaaaatgaattttcattataccttgtagctaaccaccataaatattaaatgtatgaaacagaagaaaagtcttcaccatggtatttcaataaatacagggtgaataaacaggtaacactgtgcattaagttctagcatcaaatgrcccctgtaaccgctcatgtgaatatctggaccctgtggtaagcctaaggtaaaaggcaaagaaagattttcttcatatctggaaaagggtgagctaatatgcagagatatttgcctcaaatcataagagctgttttacacgckgtgtcattcaggctggtgctcccatttcctggtttacatgagcwctccctactccatggcccgcatccccagacgaccaacaaggctgcattgaactcacgggatggacacctcctgcagccttctggatcagccaccgagctgctgggagaactgg

SEQ ID NO: 70656 - DNA, 600 bp, Chicken  19866894346240_2
caaactgactgtgaaaatgaattttcattataccttgtagctaaccaccataaatattaaatgtatgaaacagaagaaaagtcttcaccatggtatttcaataaatacagggtgaataaacaggtaacactgtgcattaagttctagcatcaaatgrcccctgtaaccgctcatgtgaatatctggaccctgtggtaagcctaaggtaaaaggcaaagaaagattttcttcatatctggaaaagggtgagctaatatgcagagatatttgcctcaaatcataagagctgttttacacgckgtgtcattcaggctggtgctcccatttcctggtttacatgagcwctccctactccatggcccgcatccccagacgaccaacaaggctgcattgaactcacgggatggacacctcctgcagccttctggatcagccaccgagctgctgggagaactggacacaccagggccactacatggctcttgtgagatggagtcaccagccaggagggtggtaggcccttggtggggcagtgaggggcgggatgttgaaaaccatttgttccttctggatagatgttcttgttttgcctgagataga

SEQ ID NO: 70657 - DNA, 600 bp, Chicken  19866894346240_3
ccaccataaatattaaatgtatgaaacagaagaaaagtcttcaccatggtatttcaataaatacagggtgaataaacaggtaacactgtgcattaagttctagcatcaaatgrcccctgtaaccgctcatgtgaatatctggaccctgtggtaagcctaaggtaaaaggcaaagaaagattttcttcatatctggaaaagggtgagctaatatgcagagatatttgcctcaaatcataagagctgttttacacgckgtgtcattcaggctggtgctcccatttcctggtttacatgagcwctccctactccatggcccgcatccccagacgaccaacaaggctgcattgaactcacgggatggacacctcctgcagccttctggatcagccaccgagctgctgggagaactggacacaccagggccactacatggctcttgtgagatggagtcaccagccaggagggtggtaggcccttggtggggcagtgaggggcgggatgttgaaaaccatttgttccttctggatagatgttcttgttttgcctgagatagagttattctcttcataggagatggtaggcagctgtgttttggatt

SEQ ID NO: 70658 - DNA, 599 bp, Chicken  19866894346248_1
  misc_feature (1)..(210): n is any nucleotide
nnnnnnnnnnnnnnnnnnnnnnnnnnnnnnnnnnnnnnnnnnnnnnnnnnnnnnnnnnnnnnnnnnnnnnnnnnnnnnnnnnnnnnnnnnnnnnnnnnnnnnnnnnnnnnnnnnnnnnnnnnnnnnnnnnnnnnnnnnnnnnnnnnnnnnnnnnnnnnnnnnnnnnnnnnnnnnnnnnnnnnnnnnnnnnnnnnnnnnnnnnnnnnnnnntgcggtgtcccgtgtgaggcatttatagagtattacagttggaaatgacctctcagataatctcatccaaccatcagtccatcccccccrtgcccactaacccatgtccctcagtgccacattcacgtggctcttgatcacctccggggacagcgactccaccacctccctgagcagcccatcccggygcctcagagaagaaaattttcctaatgtccaacctgatttttgggtaatcccattgcactttggcaccctaccaaygctgctgcacagagcccatctccctacctcgttcctcccatccctacccactccatcgcctcctctcagtgctgggcaacccttcccccaccccccacatcgatgcctggatcccagatgagacc

SEQ ID NO: 70659 - DNA, 599 bp, Chicken  19866894346248_2
  misc_feature (1)..(112): n is any nucleotide
nnnnnnnnnnnnnnnnnnnnnnnnnnnnnnnnnnnnnnnnnnnnnnnnnnnnnnnnnnnnnnnnnnnnnnnnnnnnnnnnnnnnnnnnnnnnnnnnnnnnnnnnnnnnnnnntgcggtgtcccgtgtgaggcatttatagagtattacagttggaaatgacctctcagataatctcatccaaccatcagtccatcccccccrtgcccactaacccatgtccctcagtgccacattcacgtggctcttgatcacctccggggacagcgactccaccacctccctgagcagcccatcccggygcctcagagaagaaaattttcctaatgtccaacctgatttttgggtaatcccattgcactttggcaccctaccaaygctgctgcacagagcccatctccctacctcgttcctcccatccctacccactccatcgcctcctctcagtgctgggcaacccttcccccaccccccacatcgatgcctggatcccagatgagacctgggtacatctgatgtgctcacaggcctttcagcaccattgtacgcacccagcagtgccgggtgacttctgggcacaaacacctggaaatcattagga

SEQ ID NO: 70660 - DNA, 599 bp, Chicken  19866894346248_3
  misc_feature (1)..(36): n is any nucleotide
nnnnnnnnnnnnnnnnnnnnnnnnnnnnnnnnnnnntgcggtgtcccgtgtgaggcatttatagagtattacagttggaaatgacctctcagataatctcatccaaccatcagtccatcccccccrtgcccactaacccatgtccctcagtgccacattcacgtggctcttgatcacctccggggacagcgactccaccacctccctgagcagcccatcccggygcctcagagaagaaaattttcctaatgtccaacctgatttttgggtaatcccattgcactttggcaccctaccaaygctgctgcacagagcccatctccctacctcgttcctcccatccctacccactccatcgcctcctctcagtgctgggcaacccttcccccaccccccacatcgatgcctggatcccagatgagacctgggtacatctgatgtgctcacaggcctttcagcaccattgtacgcacccagcagtgccgggtgacttctgggcacaaacacctggaaatcattaggaaccagcggaggcgcccgaacgtgttaattcaataacatgagccctgggagcgtgaaacccagccttgtgagcaaca

SEQ ID NO: 70661 - DNA, 363 bp, Chicken  19866894346248_4
gtgtgaaaagagaattagtgaaattaggttagcccaataaaacgcactccccgccccgtagcctcaggcgagcgcagctatcagccccagctattgtttccccccctggcaggggagttattgtgtgataaataattcctggaggaaaaaaaaagagagagagagagaaaaaaagtgggtacatttgcataatcagtgctttgatgtggccagggcagggagctgtgtccccagacctgctgtgggccagaagggatggggcaggaggcggccttccagcagggcggcggcccgggggcrctgggaaggaccccctgtaatggtttgtccccatcgatgctggctgggagtggggggggggga

SEQ ID NO: 70662 - DNA, 599 bp, Chicken  19866894346249_1
  misc_feature (1)..(6): n is any nucleotide
nnnnnncctctccctctacgctttctaagaagagcttcaaaatttgcagaggtaaagttgaaaagaggtacttggtaagcagtcctgcaagatgcaatacttgactgtcacagcttgtaaaaatggttcaaaactcgcatttgagcattgcaacattttagcaactgttggctttcagtcactgagcctagcccagacaaaagtagagtcgaatcgcctgatactgcaggtgattgctagacacctgttacaaggacaccagcaacctaaccgggctgatcactgctcggtggttaagcragccactgccatgtcaagcctagagcttgagtgtgcttgctaaggaagtatttcttcctccttgactaaacaaaggcaacgctgttagagttgacaggatgcttttgccttggggaaggcccatactcaaatctgacttactataggtggataaggaacagcagtggatgaggaatgaggaagctcccgctggagttatccatcctggactacgatgtggttcacttccctccatccatggctgctgctttctgcttggctataaaactcgctaatagagacacgtgggtaagtgctct

SEQ ID NO: 70663 - DNA, 600 bp, Chicken  19866894346250_1
aaagacaggatagttcagctgtcttctaggaagacagaacatagctgcgcaaccacataacaaacagcctatgaatttgagctagctatttgatggaaaaaaaggtaaacctttctttgcataagacaacacctgaaaaaacactggcagatggttaatgagagagaaactactctttttcttaaagaccagccttagaattccatataacctcagcccagacctcctcttaatgtattaagtctgcattccccagttcatttcctctttctacagaaagatatcagctttcacactctrtagagtactgcacagtttacatcattctttccctaaattatatgacagtaatgactcccatgaactgcttgaaaactaaggatctcctcccatttggggtaattattctttaagatctgtttcttgccacctgaatcttttaaatcctgccctgttataagcyattaaacacctctttcatctaaggaaaggaccaagtgccttccagctacttgaaaagactggatatacagcaacgcttgaatggttattggtcaggacagccacacaatgcatgaagagaaaatgaagtattagaag

SEQ ID NO: 70664 - DNA, 600 bp, Chicken  19866894346250_2
gagaaactactctttttcttaaagaccagccttagaattccatataacctcagcccagacctcctcttaatgtattaagtctgcattccccagttcatttcctctttctacagaaagatatcagctttcacactctrtagagtactgcacagtttacatcattctttccctaaattatatgacagtaatgactcccatgaactgcttgaaaactaaggatctcctcccatttggggtaattattctttaagatctgtttcttgccacctgaatcttttaaatcctgccctgttataagcyattaaacacctctttcatctaaggaaaggaccaagtgccttccagctacttgaaaagactggatatacagcaacgcttgaatggttattggtcaggacagccacacaatgcatgaagagaaaatgaagtattagaagaaaaaaaaagttctgctgcagaacaggggctgtggaagctgcttttgttctgatctctaatggtagagaaagagcagagagcattacaacactgtttaacagaaagcagaaagaaaacctaccatgccttggggtaaagcaatgtaaagcctcagcatttcct

SEQ ID NO: 70665 - DNA, 600 bp, Chicken  19866894346259_1
tacaacaggaaagaagcaaggcctttgttctcctaccagatgaacagaaagcagcagattctctaccacagccatgcctgaaaagtttctgttggagatctaactgcggctgttgagggcaatgaatcaccaaggaacacactgcatgcctaagagtccagcttcagccctgactgctgtctgttcagaaaggacaaaaccagaaaccacacacaaataaaacacccccagcgctgctgccatggaaaagccttactgacgggatgcaaaccagctacagaagtggctgtgtgcaagagycggatgtttgggcatgcaaataccacacatctctgtgctcaagaagccaccgtcactcattctccttcccccactcactcacgcctctggcttggagtcactttaccgagtgtgggttactggtcatgacctccatggaaagagcagcacaaactgaattctcagtggctgaggatgcatgtactgcaccccgcatcacaggcagcttgccaagaagcaccttgctaaagctgctggattgacggcaccccagaagacaggtgcagctctctgcagggacagcagtgctgcatgctgctg

SEQ ID NO: 70666 - DNA, 600 bp, Chicken  19866894346259_2
agtcactttaccgagtgtgggttactggtcatgacctccatggaaagagcagcacaaactgaattctcagtggctgaggatgcatgtactgcaccccgcatcacaggcagcttgccaagaagcaccttgctaaagctgctggattgacggcaccccagaagacaggtgcagctctctgcagggacagcagtgctgcatgctgctgtcctcgagaaatggaccgtccaccatccacctctgcaagcactgttctgctcacaatggcactggcatgacctagcctgacctgggcacttctcytgcctggagaaatggcagctgaggaatcagaaagccaaagcaaacaacagataacagagaactgtgagagaaggaaacctttcagtgcaaagaaaaagatatggtgagctttaccctccattacaaacatgcatttcttcacatttgcaccttgcagcaaacaactacagggaaaaatgagtgccattatctaatgaaatatttgacaaaaacccaatcctgaattctgtcattctccactgtggtccatggtgctcctattccctcagctgcctgaaatcttcagtctgcttttcttca

SEQ ID NO: 70667 - DNA, 600 bp, Chicken  19866894346260_1
aagattattctgggagttactgaaaaacacctgaaaacaatgaagtcattggtcacagccaacgtgttcacgaggggaaggtcctgttcttaatctccttttatgacagtgctacccacttaattgaccaagggaagcccattagtataatacttttggatttcagcaaaccttttatactgtttgtcacagcatccttctggaaaaactgttcagcgtacaattagacaaaaacagaatgcgatgggtgaacaattggctgacaggtcgggctcagagggctatagtaagtgagcttayatcaggctggtggccagtcgctggcagggctccatttcagggccagatccctttaatttttttctgaaatgacctggacacaggcctccaacatatactgagtaagtctgtggacagcactaaactgggaggagctgttaactccctcaggaatgaaraagmcttgcagagagatcctgacaaattggagagctgggcaaacagctctgtaactctcagagttcaaggagcgtttggacaacactctcagacacagtttgattttcgtgctgtcctgtgtggaggcaggacttagagtca

SEQ ID NO: 70668 - DNA, 600 bp, Chicken  19866894346260_2
gatttcagcaaaccttttatactgtttgtcacagcatccttctggaaaaactgttcagcgtacaattagacaaaaacagaatgcgatgggtgaacaattggctgacaggtcgggctcagagggctatagtaagtgagcttayatcaggctggtggccagtcgctggcagggctccatttcagggccagatccctttaatttttttctgaaatgacctggacacaggcctccaacatatactgagtaagtctgtggacagcactaaactgggaggagctgttaactccctcaggaatgaaraagmcttgcagagagatcctgacaaattggagagctgggcaaacagctctgtaactctcagagttcaaggagcgtttggacaacactctcagacacagtttgattttcgtgctgtcctgtgtggaggcaggacttagagtcaatgatgatgtgsgtcccttccacttgggatattctgtgaatgcagtgaacaaaggtgactaaggagaggtagaattaattaaactggtaagattgatgttctccttcttgccatggcaataaaccatctggcagaagcgtaaagaagccatacatgat

SEQ ID NO: 70669 - DNA, 600 bp, Chicken  19866894346260_3
tcagcaaaccttttatactgtttgtcacagcatccttctggaaaaactgttcagcgtacaattagacaaaaacagaatgcgatgggtgaacaattggctgacaggtcgggctcagagggctatagtaagtgagcttayatcaggctggtggccagtcgctggcagggctccatttcagggccagatccctttaatttttttctgaaatgacctggacacaggcctccaacatatactgagtaagtctgtggacagcactaaactgggaggagctgttaactccctcaggaatgaaraagmcttgcagagagatcctgacaaattggagagctgggcaaacagctctgtaactctcagagttcaaggagcgtttggacaacactctcagacacagtttgattttcgtgctgtcctgtgtggaggcaggacttagagtcaatgatgatgtgsgtcccttccacttgggatattctgtgaatgcagtgaacaaaggtgactaaggagaggtagaattaattaaactggtaagattgatgttctccttcttgccatggcaataaaccatctggcagaagcgtaaagaagccatacatgatgtga

SEQ ID NO: 70670 - DNA, 469 bp, Chicken  19866894346260_4
gccagtcgctggcagggctccatttcagggccagatccctttaatttttttctgaaatgacctggacacaggcctccaacatatactgagtaagtctgtggacagcactaaactgggaggagctgttaactccctcaggaatgaaraagmcttgcagagagatcctgacaaattggagagctgggcaaacagctctgtaactctcagagttcaaggagcgtttggacaacactctcagacacagtttgattttcgtgctgtcctgtgtggaggcaggacttagagtcaatgatgatgtgsgtcccttccacttgggatattctgtgaatgcagtgaacaaaggtgactaaggagaggtagaattaattaaactggtaagattgatgttctccttcttgccatggcaataaaccatctggcagaagcgtaaagaagccatacatgatgtgacatagacaggctaactcca

SEQ ID NO: 70671 - DNA, 600 bp, Chicken  19866894346269_1
gtatggaggagcgcactgtttcatagcctgaaaaatgtataaatcagaaatctctctttgatctccccactagctcatacagagctgtggggactctggtccttattctgccagagccggtgctgctgagagatgtgaagccacacaccatctccagttcctcctccctaaacagaagtacacagagcagaagtagcagctttgttgaagcctgaactcataacctttctgctgttactgtagggagagaattaaatttattcagcaaattgccattgtcaaaattgaagtgaaccatcrgtgggatgccatgctggttgcagagaagaatcctataaaatgaactttgttttggtttacctctgggagaaaagatctctgtaggggcttccgtgctgcagtgcaatcccgtatcctttgctgctgatgctgttaccaatgactgtcacagagcattcatcatctgtcagcgcagcatattccaccactgtcacatcccacaggaatgcataatttcctttctttgcctggaaatgcaacacgaacacaacaaaatctaaactaaactacatttttagataggaggaaaaaaaaaaaaag

SEQ ID NO: 70672 - DNA, 600 bp, Chicken  19866894346269_2
tgactgtcacagagcattcatcatctgtcagcgcagcatattccaccactgtcacatcccacaggaatgcataatttcctttctttgcctggaaatgcaacacgaacacaacaaaatctaaactaaactacatttttagataggaggaaaaaaaaaaaaagcaaaaataaaaagcccgatgctggtatttcaccaggttgcatctgtagacctccagcaccttaatacatttttaacagtcttccctccccacattacctcatctatgcttttcccagcagtacatcatctacttcaaamctctctaaaatgtcttccatttttaatagagagagaaagcataggatgacatagcctactgtaagtttaggcaaggcttacataacaggtaattaattataaatcaaagccattgccttaactgatgaaatttgatgtatgttttgtaggagacatggattagaaggagtggaaccagctccatacattcatgtaactagacaggtacaggatgagcactaagtggtgtttcctaatcatcgcagtcaccaaaatggaaactttacagatactctcaagtaaatgtgtaagtgaaaggag

SEQ ID NO: 70673 - DNA, 600 bp, Chicken  19866894346272_1
ccccagccccacgtcccactgctgtgatagcagcagagatagctaaggagttttctttaagcactccatgtaaaatcagattgctggagcatggagtttccctaaagccggttctggatggtatatgtgtttcaagaaactgaaatcaaagggcacaaagtgattgctcctccaccttactgtgcaaatcccagtcagggctgggtacggctctcagactgtgggctgtaagctgcagtggcgtggagcagcgctgagagcaggaattaggcctttctggaatgaggtgctgcagtgctsaggatgataccgttgagatgtcattgctatggaagtaaagccccatctctttttccagtcattcagaaagcaaagggctgctgctgttggttggcatagcagttcagatggaataaaggattggtctgtgaatactgcagcagtttgccattggaagtaagaggaattcagctcagttcctgctttggttttttacttattagtttgtttttttctgcatgcactcgtgcaagcagaagtagctcatggagaagagatattgaggctactgtgaaagtgatgctgcttcataaaatcaac

SEQ ID NO: 70674 - DNA, 600 bp, Chicken  19866894346272_2
tgtcattgctatggaagtaaagccccatctctttttccagtcattcagaaagcaaagggctgctgctgttggttggcatagcagttcagatggaataaaggattggtctgtgaatactgcagcagtttgccattggaagtaagaggaattcagctcagttcctgctttggttttttacttattagtttgtttttttctgcatgcactcgtgcaagcagaagtagctcatggagaagagatattgaggctactgtgaaagtgatgctgcttcataaaatcaacctgacagtctttaaatgytgaaatgctttacctggtcaactgtacagctgcaagacatcatcctacagtctctaaataaagatgctttaaaatcataaggctgtaagaaagtagccaccccacggtgttgagctgaaaatgcagcactgctggtaggctyctgccttgcaaagatgttttatgatttcttaatcrtgcggaacacagcacagctgaagttccagggcaagttaagcaaaatgctgcatgggttcatgtccaggtggagcctgaaatctactgggactgtgctgaggagcargctcctggggacgaggg

SEQ ID NO: 70675 - DNA, 600 bp, Chicken  19866894346272_3
gaggaattcagctcagttcctgctttggttttttacttattagtttgtttttttctgcatgcactcgtgcaagcagaagtagctcatggagaagagatattgaggctactgtgaaagtgatgctgcttcataaaatcaacctgacagtctttaaatgytgaaatgctttacctggtcaactgtacagctgcaagacatcatcctacagtctctaaataaagatgctttaaaatcataaggctgtaagaaagtagccaccccacggtgttgagctgaaaatgcagcactgctggtaggctyctgccttgcaaagatgttttatgatttcttaatcrtgcggaacacagcacagctgaagttccagggcaagttaagcaaaatgctgcatgggttcatgtccaggtggagcctgaaatctactgggactgtgctgaggagcargctcctggggacgaggggttctgagatggctcttaaacaacctgtttggcctaaacaacagggaaactcacacactgaaacatccaacaataaaattatgttttcaggcrcactgtaagtaattggatcaaacaagctgaagaaagttcaccttgcaac

SEQ ID NO: 70676 - DNA, 600 bp, Chicken  19866894346272_4
cttattagtttgtttttttctgcatgcactcgtgcaagcagaagtagctcatggagaagagatattgaggctactgtgaaagtgatgctgcttcataaaatcaacctgacagtctttaaatgytgaaatgctttacctggtcaactgtacagctgcaagacatcatcctacagtctctaaataaagatgctttaaaatcataaggctgtaagaaagtagccaccccacggtgttgagctgaaaatgcagcactgctggtaggctyctgccttgcaaagatgttttatgatttcttaatcrtgcggaacacagcacagctgaagttccagggcaagttaagcaaaatgctgcatgggttcatgtccaggtggagcctgaaatctactgggactgtgctgaggagcargctcctggggacgaggggttctgagatggctcttaaacaacctgtttggcctaaacaacagggaaactcacacactgaaacatccaacaataaaattatgttttcaggcrcactgtaagtaattggatcaaacaagctgaagaaagttcaccttgcaacttgaatatttttcaccctcaatactggtcttttac

SEQ ID NO: 70677 - DNA, 600 bp, Chicken  19866894346272_5
tgacagtctttaaatgytgaaatgctttacctggtcaactgtacagctgcaagacatcatcctacagtctctaaataaagatgctttaaaatcataaggctgtaagaaagtagccaccccacggtgttgagctgaaaatgcagcactgctggtaggctyctgccttgcaaagatgttttatgatttcttaatcrtgcggaacacagcacagctgaagttccagggcaagttaagcaaaatgctgcatgggttcatgtccaggtggagcctgaaatctactgggactgtgctgaggagcargctcctggggacgaggggttctgagatggctcttaaacaacctgtttggcctaaacaacagggaaactcacacactgaaacatccaacaataaaattatgttttcaggcrcactgtaagtaattggatcaaacaagctgaagaaagttcaccttgcaacttgaatatttttcaccctcaatactggtcttttacttaggtcagcatctacggaaaagtttcagcttctgctagagatgttaaagcttctgctattaccatacctgatgaaacaaacagccagtggcagaggattgagttg

SEQ ID NO: 70678 - DNA, 600 bp, Chicken  19866894346272_6
tagccaccccacggtgttgagctgaaaatgcagcactgctggtaggctyctgccttgcaaagatgttttatgatttcttaatcrtgcggaacacagcacagctgaagttccagggcaagttaagcaaaatgctgcatgggttcatgtccaggtggagcctgaaatctactgggactgtgctgaggagcargctcctggggacgaggggttctgagatggctcttaaacaacctgtttggcctaaacaacagggaaactcacacactgaaacatccaacaataaaattatgttttcaggcrcactgtaagtaattggatcaaacaagctgaagaaagttcaccttgcaacttgaatatttttcaccctcaatactggtcttttacttaggtcagcatctacggaaaagtttcagcttctgctagagatgttaaagcttctgctattaccatacctgatgaaacaaacagccagtggcagaggattgagttgcaggtactaaaactgtctgttctcatgctcagtttaccgttaccacacacttaacccagaacttttagctagagagccattacatgttgtaagcacgtcttcagctgttt

SEQ ID NO: 70679 - DNA, 600 bp, Chicken  19866894346288_1
tcaaagtcttggaacgttttcacacttgtagcttaacagccaggaaggttttaagagtatcaggggtgagttgtgaataactattaagattaccatgcctaactaaaggctcaattacagaatgctcctttctgctccactaagtataggaaagggcagatacctggccttgcaaaacaactcttaacagcgtactgatgttaattttcagcctccttttagtgaagaatgtggcaggaggcagttggctgcagcaggtgaggattcgggtcatcgcagacatccggctcgttcctgtcraacatttcctgtggctcagcctgcagtgctgttggagcacgttaccagtgggaacaccrtgcaagcacccagagcaggccatcctcatgctgccacaaaatcaatagaaagtgatgtaccggaaaaatagactaagcctcgcacccttgagaagcagcttttttcatcgctctttttagttggagatctccaaggtgagcccatctagtacatgattaaaagtgtatgggaagacaaaggactgcattctttttcgtgggattaagttccaaaacaccctaggagagccgttcttggttt

SEQ ID NO: 70680 - DNA, 600 bp, Chicken  19866894346288_2
tcaggggtgagttgtgaataactattaagattaccatgcctaactaaaggctcaattacagaatgctcctttctgctccactaagtataggaaagggcagatacctggccttgcaaaacaactcttaacagcgtactgatgttaattttcagcctccttttagtgaagaatgtggcaggaggcagttggctgcagcaggtgaggattcgggtcatcgcagacatccggctcgttcctgtcraacatttcctgtggctcagcctgcagtgctgttggagcacgttaccagtgggaacaccrtgcaagcacccagagcaggccatcctcatgctgccacaaaatcaatagaaagtgatgtaccggaaaaatagactaagcctcgcacccttgagaagcagcttttttcatcgctctttttagttggagatctccaaggtgagcccatctagtacatgattaaaagtgtatgggaagacaaaggactgcattctttttcgtgggattaagttccaaaacaccctaggagagccgttcttggttttgggatcatcagaaaggtcctagggaagattctttggcttcagtattgctttcctcaag

SEQ ID NO: 70681 - DNA, 531 bp, Chicken  19866894346292_1
ttcagggttacagccactagtattagatttacttaaaaatatgaagttgcttcattctgttctaaataccactgtgggccattgtgagcttcccctctgcaatctgaatctccttaaagttagacatgcactggtttctgagaaataactctacgggggaatgcagtgtacatgtcaacttaattaaatgaatttgtttaaaatacgatcgatggtgtgtgaaattatataattattctataaatacactttgttaattaattaatattttaattaaagggtaattggaaactctttgcrttactaccttttccgaggggcgtgaatgtgtctttacctcttagtaactgatcagaccaaagaggtattaaaaaaaagcattaaactggaagcccaggagagtttcaaaagaagcacaggtgacagctaggtcccactttgccataggaagaaatttgacagctctttaaattcttccttctcaatcagcctttcagtttttctaatatttttcacttctctcttttgggg

SEQ ID NO: 70682 - DNA, 599 bp, Chicken  19866894346301_1
  misc_feature (1)..(132): n is any nucleotide
nnnnnnnnnnnnnnnnnnnnnnnnnnnnnnnnnnnnnnnnnnnnnnnnnnnnnnnnnnnnnnnnnnnnnnnnnnnnnnnnnnnnnnnnnnnnnnnnnnnnnnnnnnnnnnnnnnnnnnnnnnnnnnnnnnnngccttggaaaagtctgggaacagaagtggaaaaaaaccagctgatggtgatgttcaccaagctgtgaataacaatggacctgttgatacagattccctctgttcagaggtggtccaagcaaactgtaaggagcaattctctcttttcagaggctttgcaatttgtctrtttgttttagtcggtgctgatgtcaagcatgctttggttctgctaaaagctttgcagcaggacaaactggaagttctggggaaagcagcattgcattcttygtgccctgtggtgctggtgataccggtatgaaatgcacacacatcgattgggcacgctgcactgctttatattctcagtttggttaaatggcaataatggctgtagtgatgctttcgtatttcagttcttttcaaacccacattaaaagctgaaccaatgtgtgttctaaagcattgatttctatctgttctacgttt

SEQ ID NO: 70683 - DNA, 599 bp, Chicken  19866894346301_2
  misc_feature (1)..(31): n is any nucleotide
nnnnnnnnnnnnnnnnnnnnnnnnnnnnnnngccttggaaaagtctgggaacagaagtggaaaaaaaccagctgatggtgatgttcaccaagctgtgaataacaatggacctgttgatacagattccctctgttcagaggtggtccaagcaaactgtaaggagcaattctctcttttcagaggctttgcaatttgtctrtttgttttagtcggtgctgatgtcaagcatgctttggttctgctaaaagctttgcagcaggacaaactggaagttctggggaaagcagcattgcattcttygtgccctgtggtgctggtgataccggtatgaaatgcacacacatcgattgggcacgctgcactgctttatattctcagtttggttaaatggcaataatggctgtagtgatgctttcgtatttcagttcttttcaaacccacattaaaagctgaaccaatgtgtgttctaaagcattgatttctatctgttctacgttttcttgcttgtgttccaaatgtcagccttacaaacatgagtttttgcagcaccgctcccttttgggaggctgtgcaaagagctcctttttttcccttggaag

SEQ ID NO: 70684 - DNA, 445 bp, Chicken  19866894346315_1
taactaatacaatgaaaaactgtgttctatataagtaattcttattttctgttaaacatttccttccacaggaaaatgacgtgtctgtatatacaagtggctgacttgtctaaaaatcgtgtatgaacatgcataggtcactctgaaagcaatgcctcctgttgatttccttgaaagctgtaacagatacaaagagcacaataatactatttgacagaacaaattctcagctacaaaacactttttcaacactgtcaccatcatcagctatgcatttttgctggcaatgaacaagaaccwrtgtgaaatgcttttaacaatctgcatgactgtcaggaacgtggcttgtctttcgtgctgctatcgccattgctgcaacgcacccattcagtgcctcagtgtgctcacatccaccatttgggtgtccataaatgttcagcaaatg

SEQ ID NO: 70685 - DNA, 444 bp, Chicken  19866894346315_2
aactaatacaatgaaaaactgtgttctatataagtaattcttattttctgttaaacatttccttccacaggaaaatgacgtgtctgtatatacaagtggctgacttgtctaaaaatcgtgtatgaacatgcataggtcactctgaaagcaatgcctcctgttgatttccttgaaagctgtaacagatacaaagagcacaataatactatttgacagaacaaattctcagctacaaaacactttttcaacactgtcaccatcatcagctatgcatttttgctggcaatgaacaagaaccwrtgtgaaatgcttttaacaatctgcatgactgtcaggaacgtggcttgtctttcgtgctgctatcgccattgctgcaacgcacccattcagtgcctcagtgtgctcacatccaccatttgggtgtccataaatgttcagcaaatg

SEQ ID NO: 70686 - DNA, 600 bp, Chicken  19866894346345_1
gggaatcgggttcagggatacctacttaagcaactcatgtctgcatatggacaggcttcattttgtgctttcattgtgtacaatatgatcatggggatgaagagatgccatgaaaaagcagtagttctttcggacattctgaaccatgaagtttagtataaagcctccttttgaagagagtggaaatcattccgaaatttaagggaaagctattcatagttcattgggactaatattcctggtaaaaactacatatatctataccataatatcctaaaattatgtgagttttttgagtartaaatttggtatatcatcataagaacaactgctggagcacttctaggacataagtccttgtcaaagtgatttttcaaacctcccaattccctcaactttatttagtttttcatttgttggttttcatttgtgttcaagaccagaagttttctgtgtgtgaatgaacttcgagctataagccaaatctggagatgtccatgtgccagaactagagctattgtcaataaccactggtctgtttcagacttggttttcttccttgcttttgtcttttaacctccctagtaataatacaaaggt

SEQ ID NO: 70687 - DNA, 600 bp, Chicken  19866894346359_1
gtcagctgctgactgtgtggcagcttaggtaaatctcattcatattcccacaggggagctcgctcagggaggtacacacccagggctgagctctcagagggtggctattctgctccaaggatgcttccctcagcttacctttattttagttttctgaccaaggaaaaccctaggcaaaagctgctatttctctcaagtttgtatgaaaggaagaattcaaagctgtgctaattaatattggctactgctcaggtcaaccactgcttcagggctggaacattggagtgggttgatcccagsctggttgtctcctcacaggcaggatctgccccacacttctctggaactgggtgtcaggagggctagggractgatggtgaggtagtgaggctggtggtgaggaagggcctggcaggctggggccagctgggacttcatcagataaatttatggagcagggtcartgggctctgtgtccatgctgagacgctgttgcagcattgctagtacaggtggaaggctcgaggctgagccaaaatgcagaccaggatccatgggcagtgggaagggccaatcaaggctgcaaatggctacgtgggc

SEQ ID NO: 70688 - DNA, 567 bp, Chicken  19866894346359_10
ttatttctaacatgagcattacattacctggaagaaaagktaattttttgacaaataaaattgatgcactaaagaagtagttaaagcaggaggggtggaaatttatggctgttgaaatgtttccattggaaacctctgatttccttagggtaccatgttttaatgatagatttctttctgactattgcaccattagaagtggttgtggagcctatatgcactgaccagttgaatgctrttatgtttcttagatggattcatgttattcttcttaatagtctcagaagatagtctctaaaygaataggaatatagacaggtatatcctacgaattattctatagacatgggataaatcaycataaaacaacacaataatgaacttttctttgcttatttttaaatgtatatatgtataatttgtgtatatatttatatatgcaaatatataatataaatattatatatatatatatatatatatatatatgcaaaattttgtttgctcttaatatcagccctgctgacatcagtgtagttagctcaggataagggggaagattctcaa

SEQ ID NO: 70689 - DNA, 508 bp, Chicken  19866894346359_11
attgatgcactaaagaagtagttaaagcaggaggggtggaaatttatggctgttgaaatgtttccattggaaacctctgatttccttagggtaccatgttttaatgatagatttctttctgactattgcaccattagaagtggttgtggagcctatatgcactgaccagttgaatgctrttatgtttcttagatggattcatgttattcttcttaatagtctcagaagatagtctctaaaygaataggaatatagacaggtatatcctacgaattattctatagacatgggataaatcaycataaaacaacacaataatgaacttttctttgcttatttttaaatgtatatatgtataatttgtgtatatatttatatatgcaaatatataatataaatattatatatatatatatatatatatatatatgcaaaattttgtttgctcttaatatcagccctgctgacatcagtgtagttagctcaggataagggggaagattctcaa

SEQ ID NO: 70690 - DNA, 600 bp, Chicken  19866894346359_2
aggtacacacccagggctgagctctcagagggtggctattctgctccaaggatgcttccctcagcttacctttattttagttttctgaccaaggaaaaccctaggcaaaagctgctatttctctcaagtttgtatgaaaggaagaattcaaagctgtgctaattaatattggctactgctcaggtcaaccactgcttcagggctggaacattggagtgggttgatcccagsctggttgtctcctcacaggcaggatctgccccacacttctctggaactgggtgtcaggagggctagggractgatggtgaggtagtgaggctggtggtgaggaagggcctggcaggctggggccagctgggacttcatcagataaatttatggagcagggtcartgggctctgtgtccatgctgagacgctgttgcagcattgctagtacaggtggaaggctcgaggctgagccaaaatgcagaccaggatccatgggcagtgggaagggccaatcaaggctgcaaatggctacgtgggcctcaggggcatgaatgctaagtgcagctgaacagaggggtacagtggctgttggtgcagcaggatggac

SEQ ID NO: 70691 - DNA, 600 bp, Chicken  19866894346359_3
aaaccctaggcaaaagctgctatttctctcaagtttgtatgaaaggaagaattcaaagctgtgctaattaatattggctactgctcaggtcaaccactgcttcagggctggaacattggagtgggttgatcccagsctggttgtctcctcacaggcaggatctgccccacacttctctggaactgggtgtcaggagggctagggractgatggtgaggtagtgaggctggtggtgaggaagggcctggcaggctggggccagctgggacttcatcagataaatttatggagcagggtcartgggctctgtgtccatgctgagacgctgttgcagcattgctagtacaggtggaaggctcgaggctgagccaaaatgcagaccaggatccatgggcagtgggaagggccaatcaaggctgcaaatggctacgtgggcctcaggggcatgaatgctaagtgcagctgaacagaggggtacagtggctgttggtgcagcaggatggactcttcatttctgctgaaagctgaactgttttggtggcactgctcaggtgggctttgggaagaacagcaccctagtaaagcaaatgcatcaatttg

SEQ ID NO: 70692 - DNA, 600 bp, Chicken  19866894346359_4
gcagcattgctagtacaggtggaaggctcgaggctgagccaaaatgcagaccaggatccatgggcagtgggaagggccaatcaaggctgcaaatggctacgtgggcctcaggggcatgaatgctaagtgcagctgaacagaggggtacagtggctgttggtgcagcaggatggactcttcatttctgctgaaagctgaactgttttggtggcactgctcaggtgggctttgggaagaacagcaccctagtaaagcaaatgcatcaatttgttcccctctacttattcttaagcagatggragacatgctggccaataatattaatgaatgagatgagaaattggcacatttggatgcacagagaggagtggcttggggaattttttcaagtcttaggaaaaaatcttatcatctctttgtttagaaaatmagagtctgcatccctcaatacctctaaaatwcttgagccttaattatgtgatgtggcaagtagtactttctttcctgacattaattacatgaatttctttcttaagcctatatatttacttaatattttaggaatgggaaatgcctttgataaaatattgtgcaaatgac

SEQ ID NO: 70693 - DNA, 600 bp, Chicken  19866894346359_5
agctgaacagaggggtacagtggctgttggtgcagcaggatggactcttcatttctgctgaaagctgaactgttttggtggcactgctcaggtgggctttgggaagaacagcaccctagtaaagcaaatgcatcaatttgttcccctctacttattcttaagcagatggragacatgctggccaataatattaatgaatgagatgagaaattggcacatttggatgcacagagaggagtggcttggggaattttttcaagtcttaggaaaaaatcttatcatctctttgtttagaaaatmagagtctgcatccctcaatacctctaaaatwcttgagccttaattatgtgatgtggcaagtagtactttctttcctgacattaattacatgaatttctttcttaagcctatatatttacttaatattttaggaatgggaaatgcctttgataaaatattgtgcaaatgacaaaaggattacaagaaaaactctagcttaaaacttcttaatgaatattcatttttgaaaattttagtttttcatcttttcccatgaatatatttagagatcttgtaagcaaagggaagatgagttctttc

SEQ ID NO: 70694 - DNA, 600 bp, Chicken  19866894346359_6
gcagcaggatggactcttcatttctgctgaaagctgaactgttttggtggcactgctcaggtgggctttgggaagaacagcaccctagtaaagcaaatgcatcaatttgttcccctctacttattcttaagcagatggragacatgctggccaataatattaatgaatgagatgagaaattggcacatttggatgcacagagaggagtggcttggggaattttttcaagtcttaggaaaaaatcttatcatctctttgtttagaaaatmagagtctgcatccctcaatacctctaaaatwcttgagccttaattatgtgatgtggcaagtagtactttctttcctgacattaattacatgaatttctttcttaagcctatatatttacttaatattttaggaatgggaaatgcctttgataaaatattgtgcaaatgacaaaaggattacaagaaaaactctagcttaaaacttcttaatgaatattcatttttgaaaattttagtttttcatcttttcccatgaatatatttagagatcttgtaagcaaagggaagatgagttctttcctaatcactggtttacaagttctttcttcct

SEQ ID NO: 70695 - DNA, 600 bp, Chicken  19866894346359_7
taattacatgaatttctttcttaagcctatatatttacttaatattttaggaatgggaaatgcctttgataaaatattgtgcaaatgacaaaaggattacaagaaaaactctagcttaaaacttcttaatgaatattcatttttgaaaattttagtttttcatcttttcccatgaatatatttagagatcttgtaagcaaagggaagatgagttctttcctaatcactggtttacaagttctttcttcctagtccttttttcgtcttgcctctatattatagaaaattaaggaaaacatytttttttttctcaaattctgaatagtggacatagaatccagggtcactgatgctttaacatttgaggtgctgtgttttgttatttatttaatgccagtagatcttatttctttattagaagttcttatcttgctttgagatggagaaaagcttcctttctacttactctcaatgtctttatttctaacatgagcattacattacctggaagaaaagktaattttttgacaaataaaattgatgcactaaagaagtagttaaagcaggaggggtggaaatttatggctgttgaaatgtttc

SEQ ID NO: 70696 - DNA, 600 bp, Chicken  19866894346359_8
tcctaatcactggtttacaagttctttcttcctagtccttttttcgtcttgcctctatattatagaaaattaaggaaaacatytttttttttctcaaattctgaatagtggacatagaatccagggtcactgatgctttaacatttgaggtgctgtgttttgttatttatttaatgccagtagatcttatttctttattagaagttcttatcttgctttgagatggagaaaagcttcctttctacttactctcaatgtctttatttctaacatgagcattacattacctggaagaaaagktaattttttgacaaataaaattgatgcactaaagaagtagttaaagcaggaggggtggaaatttatggctgttgaaatgtttccattggaaacctctgatttccttagggtaccatgttttaatgatagatttctttctgactattgcaccattagaagtggttgtggagcctatatgcactgaccagttgaatgctrttatgtttcttagatggattcatgttattcttcttaatagtctcagaagatagtctctaaaygaataggaatatagacaggtatatcctacgaattattcta

SEQ ID NO: 70697 - DNA, 600 bp, Chicken  19866894346359_9
tagaagttcttatcttgctttgagatggagaaaagcttcctttctacttactctcaatgtctttatttctaacatgagcattacattacctggaagaaaagktaattttttgacaaataaaattgatgcactaaagaagtagttaaagcaggaggggtggaaatttatggctgttgaaatgtttccattggaaacctctgatttccttagggtaccatgttttaatgatagatttctttctgactattgcaccattagaagtggttgtggagcctatatgcactgaccagttgaatgctrttatgtttcttagatggattcatgttattcttcttaatagtctcagaagatagtctctaaaygaataggaatatagacaggtatatcctacgaattattctatagacatgggataaatcaycataaaacaacacaataatgaacttttctttgcttatttttaaatgtatatatgtataatttgtgtatatatttatatatgcaaatatataatataaatattatatatatatatatatatatatatatatgcaaaattttgtttgctcttaatatcagccctgctgacatcagtgtagt

SEQ ID NO: 70698 - DNA, 600 bp, Chicken  19866894346367_1
gggttttcagtgcagtgtagactgagacagagacatctacctgcaggcggtgctttcaggaaaatctcatttttattctgccttctttttttctcttgtttttcacatcaaagtcattcaaactgaaaacagctgttgattattggttgtggcaaaatccagcacagactttttcacatgtgaaatagtgaatagttttcttccaacatattgatattcaggagtagtattctgcatataataaatttgatggcattagctatatttatcccaccataatggaattcattaataagccaytgtgttttctttatgatagttagaggtgattagtgcctggattttcttctgcattttgcctaagaatcaattgtgacattggtttaatggattagtgtgtatttatcagacacgtgccaataaagcaatcagtttgctaccaagtactatcaatctttgctgtaattgccaggcccagtaagtagctgcagtggcgataacagcattgggagctaattccttttcatgtcacaacccattcaacagaagctgcttctttattatttcttttccaggtgttgagcccattgactgtgtaat

SEQ ID NO: 70699 - DNA, 600 bp, Chicken  19866894346370_1
tcttccatttgaagttttgggaacatcaggctatgattattatcatgtggatgatctagataatctggcaaaatgtcatgagcattgtgagtatgaccaagttgctaaaatgagttaatttgctttctagatgttcagtttaaagtttgttaagtggtttgagtgaagttttgttgtatctgtgagtgaagtttctttactcctgttcatttgatacatactactgatcgtggtatttttcttttgacacagaactggaaaatagattcaacttttaatttagatttttccttgtggtgmattggagtgtacagcactatgattaatacttctccagttcttccaatagcatttaaaaggctctgtgatgttttataaatacaaaaattgtctaggcatgtgatagaataaattctctgtttagctatgattttcttcagtttttttgcatatgagtatttccctatatataaaagctctacaaaaatggtcatttgaattttgcaattctcagacaagtgcagattctttctggtagaaaactacaatttaattctcttcttagccttaatatcagattgaacatgggctcagaacatg

SEQ ID NO: 70700 - DNA, 600 bp, Chicken  19866894346372_1
gctaagtgctcgggcttccagtgatgctagcagataatgtggcacttctttaaagcaagattgtagctcactcttaggatgtgaggtttgcacactgctggcaccctagggtgtctgtgtaggggcattggggctgcacaaagctgctctggggtcggtgctttcagccccagtgctcccattgcagctcagcccctctcagcccttgctgtgcaggcaccatctgcaggtgagattggacagcacctggaattggtgcatctttggtgctgttagggattagcttgagtgatggctgcrtccttcctggctgagaatcctgccccatggtgtcctgcccccatgcagggctctgggctgtgccatgcagatgtgtgctgagagctgctgggatctgtgaggctgctttatttctggcgctatctcagaaagcataaattaatgtatacgtgtatatatttttggtccttcttcaagctgcttcttctgtgttggaaacccaaacgcagcagtactatgctgctattcagagagtagatacgtaaccggctgctttaatttgactatccagaacaagccatggggtgtgggagagtgaaa

SEQ ID NO: 70701 - DNA, 563 bp, Chicken  19866894346374_1
attaggcacagacaattccctaaaatcaattataatcatgcagtatttgaaagttatcagagtccaagtaatcattcaaaaagtctgaagtaatgttgaaaggattctttaaaacagcttcacagataatatgaaccagggaaaaaaaaaaaaaaaaaaagacaagaagtctcagctggaaggcaggaagcttcctatttccatgaagtgagagatctggttctgccagattcggtcattcggtcaccagaagtacttacggtaaaataccagtgaatcttactgcagagatgtacaaarggccccaactttataatgctgatgtaactgaatacaactgttcctgaatctatacccaaagaaggtcccacgtccttcccatgaccagctacgttcctgctcccccacacccacatcacatgcccagcagccaaaggatctcccccaccccacttcttctgtcacatcagttcttacctgcatctgggacccaataacagtattattgcaggccaattctgttttgttgattgtgtctagcatagcagttttgcccacatatt

SEQ ID NO: 70702 - DNA, 579 bp, Chicken  19866894346384_1
aaataataggaaatttagtgtaaagtcacatttcactgtagatcagcatagtgcaatggctgctggtcagcaagtatcagcctctttctatgaccataagcagcaagaatgtgagaataaaaatggctgttgagaacacatttgaatcggtgggtttgatctttctgaattcaagctgtcctgtattgcctctagctgtattcactacaattccagattttattcatactgcatctccttcttgcccttgggtatgcgtattttttggagtagcggggagggaggagaactgggataagyggtgtggaattaagactgttttggcttactgtaagtgatacggcctagcaatgaagtaaacaaggcgagggagtaatcttccaggggaagtgataaaacctgcattatttaaggcatttacaactggactgaactaaagcatttacaaccatacagggatagtttagatgacctaattgsgagttttttttccctctttttcccctttttatgatgttactgggatcatcgattcaggtcttggtagagttctgtccgttaaaggagtttttatgtttc

SEQ ID NO: 70703 - DNA, 399 bp, Chicken  19866894346384_2
ctgtattgcctctagctgtattcactacaattccagattttattcatactgcatctccttcttgcccttgggtatgcgtattttttggagtagcggggagggaggagaactgggataagyggtgtggaattaagactgttttggcttactgtaagtgatacggcctagcaatgaagtaaacaaggcgagggagtaatcttccaggggaagtgataaaacctgcattatttaaggcatttacaactggactgaactaaagcatttacaaccatacagggatagtttagatgacctaattgsgagttttttttccctctttttcccctttttatgatgttactgggatcatcgattcaggtcttggtagagttctgtccgttaaaggagtttttatgtttc

SEQ ID NO: 70704 - DNA, 599 bp, Chicken  19866894346395_1
  misc_feature (1)..(6): n is any nucleotide
nnnnnnttactgttataaagattggctctggtctgtattacagaacaatgctgtcagcttttgttgtaaaggaacagttcttaacaacactgagtgctctgaacacactgaaaaaatgtacaagcatatattaactactggataagtactattgtgcttatcgcacacacacgcacgcatgcacacacacacacacaaatgcttcctaaatacctgatagaagagcagatatgagtcatcctcagcagcaatgtggctgtcactcttgcatttaacactgagcaaccctaaaataccacrtttctatcacagctgctattttgcttcattgattgcacgcagttccctggaatctgttaatcaacttgcagagcttcacttctttttcccttgtcccaaacaattgactcartcttcattttaatttcatctgttagcgtacatttaacactaacatctactattagccccagccaaaagaaagaaggggataattgtttctcagggcagatcagatagatttacaagttctatgatgttcttggttctgagaggagaggaacaactaccaaaatgttttagaaatacatcaaacaatt

SEQ ID NO: 70705 - DNA, 600 bp, Chicken  19866894346395_2
aaaatgtacaagcatatattaactactggataagtactattgtgcttatcgcacacacacgcacgcatgcacacacacacacacaaatgcttcctaaatacctgatagaagagcagatatgagtcatcctcagcagcaatgtggctgtcactcttgcatttaacactgagcaaccctaaaataccacrtttctatcacagctgctattttgcttcattgattgcacgcagttccctggaatctgttaatcaacttgcagagcttcacttctttttcccttgtcccaaacaattgactcartcttcattttaatttcatctgttagcgtacatttaacactaacatctactattagccccagccaaaagaaagaaggggataattgtttctcagggcagatcagatagatttacaagttctatgatgttcttggttctgagaggagaggaacaactaccaaaatgttttagaaatacatcaaacaatttcccaaactgaaggtagacatatgacatgcttatcatcataagctaactgaattttctagttagagagctagaaagggggatctttattcttggctacctaagacttcctccg

SEQ ID NO: 70706 - DNA, 599 bp, Chicken  19866894346398_1
  misc_feature (1)..(119): n is any nucleotide
nnnnnnnnnnnnnnnnnnnnnnnnnnnnnnnnnnnnnnnnnnnnnnnnnnnnnnnnnnnnnnnnnnnnnnnnnnnnnnnnnnnnnnnnnnnnnnnnnnnnnnnnnnnnnnnnnnnnnnncaacagagcccaacaagccttcttacaatggactcaccagctacaagcgcatgaagctcatcatttagggtccgtacccaggcgcaggaagcagcttgtaccctgcaggtgaacagatagcaggatgagccccaggcacttctcttttgggatgcacagactggagataatctgctataarctactaatacaaygcacagcatggmttaagagtatggtgttgtaatacccataatccgcacaacctgaagtgttttgattgttcactgtcactgtttcttttagaatcacagagcagaacaatctagtttgaataccaatctaattcacgggtgataaataaagctaattttaaactaagagcatcttcctttgctgtagttgtcttgactctttcccatgagaagtccatcacatcctctgtattgtttttttaactgttttggaaatccatacttcgctgcctaattttatccctgg

SEQ ID NO: 70707 - DNA, 599 bp, Chicken  19866894346398_2
  misc_feature (1)..(106): n is any nucleotide
nnnnnnnnnnnnnnnnnnnnnnnnnnnnnnnnnnnnnnnnnnnnnnnnnnnnnnnnnnnnnnnnnnnnnnnnnnnnnnnnnnnnnnnnnnnnnnnnnnnnnnnnnncaacagagcccaacaagccttcttacaatggactcaccagctacaagcgcatgaagctcatcatttagggtccgtacccaggcgcaggaagcagcttgtaccctgcaggtgaacagatagcaggatgagccccaggcacttctcttttgggatgcacagactggagataatctgctataarctactaatacaaygcacagcatggmttaagagtatggtgttgtaatacccataatccgcacaacctgaagtgttttgattgttcactgtcactgtttcttttagaatcacagagcagaacaatctagtttgaataccaatctaattcacgggtgataaataaagctaattttaaactaagagcatcttcctttgctgtagttgtcttgactctttcccatgagaagtccatcacatcctctgtattgtttttttaactgttttggaaatccatacttcgctgcctaattttatccctggcgaatctgtttgc

SEQ ID NO: 70708 - DNA, 599 bp, Chicken  19866894346398_3
  misc_feature (1)..(94): n is any nucleotide
nnnnnnnnnnnnnnnnnnnnnnnnnnnnnnnnnnnnnnnnnnnnnnnnnnnnnnnnnnnnnnnnnnnnnnnnnnnnnnnnnnnnnnnnnnnnnncaacagagcccaacaagccttcttacaatggactcaccagctacaagcgcatgaagctcatcatttagggtccgtacccaggcgcaggaagcagcttgtaccctgcaggtgaacagatagcaggatgagccccaggcacttctcttttgggatgcacagactggagataatctgctataarctactaatacaaygcacagcatggmttaagagtatggtgttgtaatacccataatccgcacaacctgaagtgttttgattgttcactgtcactgtttcttttagaatcacagagcagaacaatctagtttgaataccaatctaattcacgggtgataaataaagctaattttaaactaagagcatcttcctttgctgtagttgtcttgactctttcccatgagaagtccatcacatcctctgtattgtttttttaactgttttggaaatccatacttcgctgcctaattttatccctggcgaatctgtttgcttccaaatggct

SEQ ID NO: 70709 - DNA, 467 bp, Chicken  19866894346398_4
ataaagctaattttaaactaagagcatcttcctttgctgtagttgtcttgactctttcccatgagaagtccatcacatcctctgtattgtttttttaactgttttggaaatccatacttcgctgcctaattttatccctggcgaatctgtttgcttccaaatggctcaagacttgactgtagggccaaatccagtgctgatggctctgggacaacagtacacaatgctgtatgataacctgctggtgtctaatttgagatgaatgtcagcctcttaacccatctaacatgtgcttttcayggaatcaaagaataactcattttggaagagacctttgggagatcatctagtccagtctccagatttaattaaagcaggttgctcaggaactcatcatccaattaagttctggagtgtttccacacatggagcccatacagccttaccaggcaaccctttaaaatttc

SEQ ID NO: 70710 - DNA, 580 bp, Chicken  19866894346403_1
atgaaggagtaatgaaataagagccaccagacactgttagcttaatattatgctttaaagagttgaatttaactgagggataatttaactaacacaccattagtaatttttctgcattaactttagagccggatacgaaatgggagtaaacttgtgcatctgcagggattgatactagcggaggatctgagcatttgcattcagaaatggagcccaagtagcagccctagagactgccatcctcctcctgcccaacaacgagccccggtgatggaagtgcccatctcccattgctctctyrctcagcccagccaccacctcagctccatgctggcaacacccagtaggatgccatggaccccgtggcgattccatgcaaagcccaaagccaacaaagtagggtaaattaatgtttaattaaaagctgacataggaagagaaattaaattaatgccctaattaatgtgtcgggtttagtccaaataggaaacttaatgattctcctttcccttttttcagtactacgcttaccttgggagcagtgacgaatttcagctcatttggccccagtcctggaaaa

SEQ ID NO: 70711 - DNA, 579 bp, Chicken  19866894346403_2
tgaaggagtaatgaaataagagccaccagacactgttagcttaatattatgctttaaagagttgaatttaactgagggataatttaactaacacaccattagtaatttttctgcattaactttagagccggatacgaaatgggagtaaacttgtgcatctgcagggattgatactagcggaggatctgagcatttgcattcagaaatggagcccaagtagcagccctagagactgccatcctcctcctgcccaacaacgagccccggtgatggaagtgcccatctcccattgctctctyrctcagcccagccaccacctcagctccatgctggcaacacccagtaggatgccatggaccccgtggcgattccatgcaaagcccaaagccaacaaagtagggtaaattaatgtttaattaaaagctgacataggaagagaaattaaattaatgccctaattaatgtgtcgggtttagtccaaataggaaacttaatgattctcctttcccttttttcagtactacgcttaccttgggagcagtgacgaatttcagctcatttggccccagtcctggaaaa

SEQ ID NO: 70712 - DNA, 600 bp, Chicken  19866894346405_1
ccatctatatagccagctctgctggtgcttagcagggcaaagtaacttgtatttagtccagttaaaagctattaccaaggcagagcttatagcatggatcttttacaggaggagtgatacaaacaatactcccaataaaccgtatgaaagcttctaacagaacagttcccagtgcaatttccagctaagcacagagctcttatcagaactcatctgagggttgtttacaactccacatttactagcaattagactgagttcagtcacaccagtgaaaaccctccaaaacacatcaccgtktccttgcatggaatacacagttattccatgtgcagttatcagtacaaacacacacacgctgtgtgcttacaaagaagaggggaaagtgattttccttgccttttttctgcacttgttgcatcacaacacaggcaagaaatactggagttctcaattggagaccacatcaacatcccaaggggactttggggctttcagagagaaaccccataacgctttttctaacctttcagtactaccatcacttatgaacaccgcagtagaagagacgcagagagagccgggcaaagcacgtgcata

SEQ ID NO: 70713 - DNA, 599 bp, Chicken  19866894346407_1
  misc_feature (1)..(221): n is any nucleotide
nnnnnnnnnnnnnnnnnnnnnnnnnnnnnnnnnnnnnnnnnnnnnnnnnnnnnnnnnnnnnnnnnnnnnnnnnnnnnnnnnnnnnnnnnnnnnnnnnnnnnnnnnnnnnnnnnnnnnnnnnnnnnnnnnnnnnnnnnnnnnnnnnnnnnnnnnnnnnnnnnnnnnnnnnnnnnnnnnnnnnnnnnnnnnnnnnnnnnnnnnnnnnnnnnnnnnnnnnnnnnaacggagcaatcgtttcctccgaacgctggtttattttattgtacttaatgctgccaacgaatttgctgtgggagaaargaggaggccccagcataaccccccaatgsgtagtcgtttttttccctcttcttctgratatgaattccttttgctgtcaggtgaatggtctagctgcagcggtgacaaacatcastwtcacagttacttcttgattaacaccattaaatgaaaaccaactgtgacacaatcccaggagaccatagggtaaaactgttggagagctcataataaaccctgtgaaaaatgcaaaattgctacgggctaaattttccacccggcttctcagaacacagctgtgccacttgtaagtacaactg

SEQ ID NO: 70714 - DNA, 599 bp, Chicken  19866894346407_2
  misc_feature (1)..(192): n is any nucleotide
nnnnnnnnnnnnnnnnnnnnnnnnnnnnnnnnnnnnnnnnnnnnnnnnnnnnnnnnnnnnnnnnnnnnnnnnnnnnnnnnnnnnnnnnnnnnnnnnnnnnnnnnnnnnnnnnnnnnnnnnnnnnnnnnnnnnnnnnnnnnnnnnnnnnnnnnnnnnnnnnnnnnnnnnnnnnnnnnnnnnnnnnnnnnnnnnaacggagcaatcgtttcctccgaacgctggtttattttattgtacttaatgctgccaacgaatttgctgtgggagaaargaggaggccccagcataaccccccaatgsgtagtcgtttttttccctcttcttctgratatgaattccttttgctgtcaggtgaatggtctagctgcagcggtgacaaacatcastwtcacagttacttcttgattaacaccattaaatgaaaaccaactgtgacacaatcccaggagaccatagggtaaaactgttggagagctcataataaaccctgtgaaaaatgcaaaattgctacgggctaaattttccacccggcttctcagaacacagctgtgccacttgtaagtacaactgcttacacatgcgatccctgctctgttttc

SEQ ID NO: 70715 - DNA, 599 bp, Chicken  19866894346407_3
  misc_feature (1)..(164): n is any nucleotide
nnnnnnnnnnnnnnnnnnnnnnnnnnnnnnnnnnnnnnnnnnnnnnnnnnnnnnnnnnnnnnnnnnnnnnnnnnnnnnnnnnnnnnnnnnnnnnnnnnnnnnnnnnnnnnnnnnnnnnnnnnnnnnnnnnnnnnnnnnnnnnnnnnnnnnnnnnnnnnnnnnnnaacggagcaatcgtttcctccgaacgctggtttattttattgtacttaatgctgccaacgaatttgctgtgggagaaargaggaggccccagcataaccccccaatgsgtagtcgtttttttccctcttcttctgratatgaattccttttgctgtcaggtgaatggtctagctgcagcggtgacaaacatcastwtcacagttacttcttgattaacaccattaaatgaaaaccaactgtgacacaatcccaggagaccatagggtaaaactgttggagagctcataataaaccctgtgaaaaatgcaaaattgctacgggctaaattttccacccggcttctcagaacacagctgtgccacttgtaagtacaactgcttacacatgcgatccctgctctgttttcacaggtgagaaaggagctctcagtgtgg

SEQ ID NO: 70716 - DNA, 599 bp, Chicken  19866894346407_4
  misc_feature (1)..(106): n is any nucleotide
nnnnnnnnnnnnnnnnnnnnnnnnnnnnnnnnnnnnnnnnnnnnnnnnnnnnnnnnnnnnnnnnnnnnnnnnnnnnnnnnnnnnnnnnnnnnnnnnnnnnnnnnnnaacggagcaatcgtttcctccgaacgctggtttattttattgtacttaatgctgccaacgaatttgctgtgggagaaargaggaggccccagcataaccccccaatgsgtagtcgtttttttccctcttcttctgratatgaattccttttgctgtcaggtgaatggtctagctgcagcggtgacaaacatcastwtcacagttacttcttgattaacaccattaaatgaaaaccaactgtgacacaatcccaggagaccatagggtaaaactgttggagagctcataataaaccctgtgaaaaatgcaaaattgctacgggctaaattttccacccggcttctcagaacacagctgtgccacttgtaagtacaactgcttacacatgcgatccctgctctgttttcacaggtgagaaaggagctctcagtgtggggaaacattttatgtatataaagtggatttttcaattgctctgctggaagtgatgcac

SEQ ID NO: 70717 - DNA, 599 bp, Chicken  19866894346407_5
  misc_feature (1)..(104): n is any nucleotide
nnnnnnnnnnnnnnnnnnnnnnnnnnnnnnnnnnnnnnnnnnnnnnnnnnnnnnnnnnnnnnnnnnnnnnnnnnnnnnnnnnnnnnnnnnnnnnnnnnnnnnnnaacggagcaatcgtttcctccgaacgctggtttattttattgtacttaatgctgccaacgaatttgctgtgggagaaargaggaggccccagcataaccccccaatgsgtagtcgtttttttccctcttcttctgratatgaattccttttgctgtcaggtgaatggtctagctgcagcggtgacaaacatcastwtcacagttacttcttgattaacaccattaaatgaaaaccaactgtgacacaatcccaggagaccatagggtaaaactgttggagagctcataataaaccctgtgaaaaatgcaaaattgctacgggctaaattttccacccggcttctcagaacacagctgtgccacttgtaagtacaactgcttacacatgcgatccctgctctgttttcacaggtgagaaaggagctctcagtgtggggaaacattttatgtatataaagtggatttttcaattgctctgctggaagtgatgcacac

SEQ ID NO: 70718 - DNA, 600 bp, Chicken  19866894346407_6
cttcttgattaacaccattaaatgaaaaccaactgtgacacaatcccaggagaccatagggtaaaactgttggagagctcataataaaccctgtgaaaaatgcaaaattgctacgggctaaattttccacccggcttctcagaacacagctgtgccacttgtaagtacaactgcttacacatgcgatccctgctctgttttcacaggtgagaaaggagctctcagtgtggggaaacattttatgtatataaagtggatttttcaattgctctgctggaagtgatgcacacctcttctcarctgagaggacaaatgtgcagttttatgctcttggaaggttgtttgttgaatgtttgtaaggccctttttgtgggagctgagagtgtcaagacagtgacagtacagaggatctgctgctgaagtacagtaggaatccttatttgtaaaatttagagactgtgcatttgtggtacttaatcatcaacacaggcaaacagagcttccccatggccaggtggccatatgagggttcttcgcaaagcccaaagccatctctttacctcctgctttacataggtctgcagatcattgaatcataga

SEQ ID NO: 70719 - DNA, 600 bp, Chicken  19866894346409_1
taattttagtggtccctatgacatatacttgctactctcctgaaaaggtgctctataaccagaatacttaaagctatgatatgaaagttaggagtgtctagggacatacataacgtgttcttaagaggaagaaccaatgaagagggaaaatgtcagaagaggaaatcctttctgacaagtggcctttggtgaaggagtagatgttgtatatctggatcccacggaaacatagataggatatgcctttatgaaatgatgtgccctcgcaatgagaagatctagctaaaatcaaatatggarcagaagttgcatggctgctactagcagctagaaaatccaccagtttgtttgcttccgtgacgatgagatgtgttaaagccattcctttaaaatagagtaaatccctctttcagcakatttattccttaaagatgcactgggttaacttgtctgaaccactgacaaaaattgctgcagatcaaatatatttacttagcacggtatttcacagaacattcggctaattactggattgtacttacagagctatgctttgtgaacaggtttttctaatgtttttctttcaaactcaacaagaac

SEQ ID NO: 70720 - DNA, 600 bp, Chicken  19866894346409_2
gttcttaagaggaagaaccaatgaagagggaaaatgtcagaagaggaaatcctttctgacaagtggcctttggtgaaggagtagatgttgtatatctggatcccacggaaacatagataggatatgcctttatgaaatgatgtgccctcgcaatgagaagatctagctaaaatcaaatatggarcagaagttgcatggctgctactagcagctagaaaatccaccagtttgtttgcttccgtgacgatgagatgtgttaaagccattcctttaaaatagagtaaatccctctttcagcakatttattccttaaagatgcactgggttaacttgtctgaaccactgacaaaaattgctgcagatcaaatatatttacttagcacggtatttcacagaacattcggctaattactggattgtacttacagagctatgctttgtgaacaggtttttctaatgtttttctttcaaactcaacaagaactgtctgctacacaacagtcaccttattgatttcaaagatttaagtttcatggtggatggctgctgataacctgtgccacttttctggtgcaggttggactacccattttcattcaa

SEQ ID NO: 70721 - DNA, 599 bp, Chicken  19866894346418_1
  misc_feature (1)..(125): n is any nucleotide
nnnnnnnnnnnnnnnnnnnnnnnnnnnnnnnnnnnnnnnnnnnnnnnnnnnnnnnnnnnnnnnnnnnnnnnnnnnnnnnnnnnnnnnnnnnnnnnnnnnnnnnnnnnnnnnnnnnnnnnnnnnnnacaaaattacgtcttaattacaagcctggtgaccactaaagctagagtgagaggcagatggctggtggcagctcaggaggtgcatcacggtcacctccctgctccacctggagcatcccacatgccctgggcgtttgcaaaggcagtgagtattcacagttgccttaaagcctgmaatgaacatatgaatgtttggccgctctgaaaaatgaatcctccaaaaccatcatatgttggtgcacagaagtgcccaacaccacgcaggtatgtgtgatgttaaccaaagcaccgcggcagctcatagcaggctgtcccaccccatgttgccagcagagagctacaaaggctgccttcctaaggacgtgtgtccctcctcaggtaccagacacgagcagagcaccttaagtaccaccacaggaaacgtttgactccaattctcctacaggtgtaggacagctacaccagaaggtaaag

SEQ ID NO: 70722 - DNA, 600 bp, Chicken  19866894346418_2
gttggtgcacagaagtgcccaacaccacgcaggtatgtgtgatgttaaccaaagcaccgcggcagctcatagcaggctgtcccaccccatgttgccagcagagagctacaaaggctgccttcctaaggacgtgtgtccctcctcaggtaccagacacgagcagagcaccttaagtaccaccacaggaaacgtttgactccaattctcctacaggtgtaggacagctacaccagaaggtaaagacttgaatgtttttccagcggttttcaatcacccactggctcaggagagatgtttcarttctacagaaaccgtaagagctggtacaagagcaaaataaagtaacagggattacttcaaccccaatacatctctcttcctccgcccccaattttctttactcatctatacatgttagcaatcaaattgtcaggtttttatcttgcagctactactgaagctcatcctgcgtgtgaataaatgctgccagcctctttagttctatttgtgccccttcacacacrtactgtttatcttcactgcacacactggaaaacaagatttggagggttatcccctcgtcctcagtgttgccagtac

SEQ ID NO: 70723 - DNA, 600 bp, Chicken  19866894346418_3
ctacaccagaaggtaaagacttgaatgtttttccagcggttttcaatcacccactggctcaggagagatgtttcarttctacagaaaccgtaagagctggtacaagagcaaaataaagtaacagggattacttcaaccccaatacatctctcttcctccgcccccaattttctttactcatctatacatgttagcaatcaaattgtcaggtttttatcttgcagctactactgaagctcatcctgcgtgtgaataaatgctgccagcctctttagttctatttgtgccccttcacacacrtactgtttatcttcactgcacacactggaaaacaagatttggagggttatcccctcgtcctcagtgttgccagtacacacccagaagtttcagtatttgttgaaagaaaacttgcaagacattcaagcctttaaaaaaatgaacagttacttactttcggctcctgctttagcaggatcaggcagcatcaagcagcacagaatgactgctggcacagtgagtactgagacacagaagttaggcaccatattccaaagcagagcaagtcctcttcagtctgaggcaagtggtcagcacatc

SEQ ID NO: 70724 - DNA, 600 bp, Chicken  19866894346425_1
gcaaagcagaggtgagtgaatgaaaaatggagtttagatacccattaaaagtgtaaccctttggcatttccagctggaactgttgaggactgagttaactgacattcatacttcggtgtaatgtagcagtggactagcactggtaatgaaagatttaaatttaataaaaacagaatgaagcacacttttctgtaagcagacagaacagggactgaaggattatttcctggagggcaactggccacagagcattttggctggttctgtagggaaagctgtttcagtttcatggctttcatktgcattattactgcactgtctgtgtattcccagcctgatttcttcatttgacagctttaatttcttttgtttcctgctgctatgcgtggaggaccaagcagtgaacatcagtcttattctgagaaaaataatacgtctgtaattggaatatgtaaatcagctagtttgtcctgtagataacttcagtgcaaccaaatagttgcatttgggtaggcaacttcttgtaattcaagatctggaacaaataactgtagatacctttttttgccatcagaagagtgagacacaaaagctttccca

SEQ ID NO: 70725 - DNA, 599 bp, Chicken  19866894346426_1
  misc_feature (1)..(64): n is any nucleotide
nnnnnnnnnnnnnnnnnnnnnnnnnnnnnnnnnnnnnnnnnnnnnnnnnnnnnnnnnnnnnnnnatatctggcactgaaagtgactttatccttaatgtatcttaaaaaaaaaatctaccgaactatgtttgtaggttgatcctaacaatattgctctgaatactacatatgccactgaataggcttgaagatcagatacacaaaaggattcagagacccaaatgcttcttggtttaatttagtccaagcctggtgggttttaagcaccaacacattttacaggatctggctttatgaaycttcgtaaggctactggaggaattaccctcagggataagattaagtctcagctccactctcatcctcagtttattaggttatagccttttctcagttacatcaatagagttaatagaaatagcacatgacctttctgtgataaggttctttggtacagcgtcctcccagaaaggctgtgctactatacagagctaataatagacaacattcctgcagagtcataactcatggggctgtatacacaaaagtcatgcaccaaagcctcataaagcaccaaatgaatcatgctctgaataaa

SEQ ID NO: 70726 - DNA, 599 bp, Chicken  19866894346429_1
  misc_feature (1)..(177): n is any nucleotide
nnnnnnnnnnnnnnnnnnnnnnnnnnnnnnnnnnnnnnnnnnnnnnnnnnnnnnnnnnnnnnnnnnnnnnnnnnnnnnnnnnnnnnnnnnnnnnnnnnnnnnnnnnnnnnnnnnnnnnnnnnnnnnnnnnnnnnnnnnnnnnnnnnnnnnnnnnnnnnnnnnnnnnnnnnnnnnnnnctgatctggacagttccaaatgtttgttgtaacgggtaggaagtaggtcttgactgtttcattgcccttactttattttccctagctcgtgtaggttttttggagatcaaagctaaaagttgrgcagtgtgttccagccaaaagtgccagttctataggagaagactgtctgagagagtcaaaggtcaatttcatctctctayagaggatatttggctcttctcaacagcataaaattattgactcttgttcatcattgatgcataacaaagctcacattcatttcaatagaagtgctaagtacctgatccacatcctacatttgcatagccaattatttctgcttaggtacaaaaatttgtctttgtccctactgaataaacatcctatgcttttcatctgcattcctgtttgtgaatttt

SEQ ID NO: 70727 - DNA, 599 bp, Chicken  19866894346429_2
  misc_feature (1)..(97): n is any nucleotide
nnnnnnnnnnnnnnnnnnnnnnnnnnnnnnnnnnnnnnnnnnnnnnnnnnnnnnnnnnnnnnnnnnnnnnnnnnnnnnnnnnnnnnnnnnnnnnnnnctgatctggacagttccaaatgtttgttgtaacgggtaggaagtaggtcttgactgtttcattgcccttactttattttccctagctcgtgtaggttttttggagatcaaagctaaaagttgrgcagtgtgttccagccaaaagtgccagttctataggagaagactgtctgagagagtcaaaggtcaatttcatctctctayagaggatatttggctcttctcaacagcataaaattattgactcttgttcatcattgatgcataacaaagctcacattcatttcaatagaagtgctaagtacctgatccacatcctacatttgcatagccaattatttctgcttaggtacaaaaatttgtctttgtccctactgaataaacatcctatgcttttcatctgcattcctgtttgtgaattttatttgaattcctagattgtcctccagctcatttgcagtccctaccagctttgcttatctgcagatttaaaaactctgaga

SEQ ID NO: 70728 - DNA, 600 bp, Chicken  19866894346431_1
atttcaattttgggacctcagtgatcagtgcatttcaaaaagtgctggacacttttgtattatgaaaataaagactgaagcacttgcatcctctggtggcagcctgacttatttttcagtaacaaaacacagaaagagtccgtatttaccataagaaaaatttgtacttctgtcttttattatgcatgcacatattacagaacattttttaaatgacagaaaggaacagattttaaaatgctttaaagtgactttgtcttttttaataggttgctgagattacatcgatttggaaagtaygtgattttaggacattctagcaatgatgcagagaattacttagaaagacagattctgaaggagcaggctaatcagttgggtctgcactccaaaatctcccactttacttcttaaaytctttctcctactgaaaacattatgctctgcgttagctgtaaatcttcaggaaaaaacccttcagccaaacaacccaagagattaattttctaaaaccacaagagatggctatagtcacctactcttttcttttatatagcacaaatcaatgtcattttctgagcatggggaatttcttcccca

SEQ ID NO: 70729 - DNA, 600 bp, Chicken  19866894346431_2
cagtaacaaaacacagaaagagtccgtatttaccataagaaaaatttgtacttctgtcttttattatgcatgcacatattacagaacattttttaaatgacagaaaggaacagattttaaaatgctttaaagtgactttgtcttttttaataggttgctgagattacatcgatttggaaagtaygtgattttaggacattctagcaatgatgcagagaattacttagaaagacagattctgaaggagcaggctaatcagttgggtctgcactccaaaatctcccactttacttcttaaaytctttctcctactgaaaacattatgctctgcgttagctgtaaatcttcaggaaaaaacccttcagccaaacaacccaagagattaattttctaaaaccacaagagatggctatagtcacctactcttttcttttatatagcacaaatcaatgtcattttctgagcatggggaatttcttccccatgtcctctgcatcctatgtacccacactgaaaaacaatagcataaacttctcccagtacaggaacaaattctgatatcttttttaaattccctattctctgaattaaactctgatc

SEQ ID NO: 70730 - DNA, 600 bp, Chicken  19866894346432_1
atatacatgttaatgaaagtgtggttgaaaatacagtaactgtagtagtgatggtgtgtcagggactgtgacaagtcctaagcacatttttaagctgggatcacagtcacctttaagctgtcattgttttgttttgtttttttatttcttcctttctttccttgcatttatttattctagttgttgtttatgtagggaaatgttggttgcactttgaattagaactggtgaaattgtttctgtcttactgcttgcagacctgtgacagtgatgtggccatataacgctgtaaaattgcaktgagcttccaggtctcctggaagattcctgttgttttatcaatggaragttgcacgtggctcacagtyagcttgctgaggttttggtttgctgcgtgagctgaaataggaggtttcttgttggtttgtttttatgtgtgctcttttcctatatacttgagtatatgcccctgcagtgggagaaataacagtagagtaacgctcttaacaatgtgcacagtgtcagtgatacaatcggaggtgagtgaacctactgctgtaggttgcaccagatccgatcacatcttacaagttttacaaa

SEQ ID NO: 70731 - DNA, 600 bp, Chicken  19866894346432_2
gtgatggtgtgtcagggactgtgacaagtcctaagcacatttttaagctgggatcacagtcacctttaagctgtcattgttttgttttgtttttttatttcttcctttctttccttgcatttatttattctagttgttgtttatgtagggaaatgttggttgcactttgaattagaactggtgaaattgtttctgtcttactgcttgcagacctgtgacagtgatgtggccatataacgctgtaaaattgcaktgagcttccaggtctcctggaagattcctgttgttttatcaatggaragttgcacgtggctcacagtyagcttgctgaggttttggtttgctgcgtgagctgaaataggaggtttcttgttggtttgtttttatgtgtgctcttttcctatatacttgagtatatgcccctgcagtgggagaaataacagtagagtaacgctcttaacaatgtgcacagtgtcagtgatacaatcggaggtgagtgaacctactgctgtaggttgcaccagatccgatcacatcttacaagttttacaaacttttgcaatctgcaggcacagcctcatgtttcaggttttactgcct

SEQ ID NO: 70732 - DNA, 600 bp, Chicken  19866894346432_3
tgacaagtcctaagcacatttttaagctgggatcacagtcacctttaagctgtcattgttttgttttgtttttttatttcttcctttctttccttgcatttatttattctagttgttgtttatgtagggaaatgttggttgcactttgaattagaactggtgaaattgtttctgtcttactgcttgcagacctgtgacagtgatgtggccatataacgctgtaaaattgcaktgagcttccaggtctcctggaagattcctgttgttttatcaatggaragttgcacgtggctcacagtyagcttgctgaggttttggtttgctgcgtgagctgaaataggaggtttcttgttggtttgtttttatgtgtgctcttttcctatatacttgagtatatgcccctgcagtgggagaaataacagtagagtaacgctcttaacaatgtgcacagtgtcagtgatacaatcggaggtgagtgaacctactgctgtaggttgcaccagatccgatcacatcttacaagttttacaaacttttgcaatctgcaggcacagcctcatgtttcaggttttactgcctctgcccccccggcacggcgtg

SEQ ID NO: 70733 - DNA, 599 bp, Chicken  19866894346434_1
  misc_feature (1)..(171): n is any nucleotide
nnnnnnnnnnnnnnnnnnnnnnnnnnnnnnnnnnnnnnnnnnnnnnnnnnnnnnnnnnnnnnnnnnnnnnnnnnnnnnnnnnnnnnnnnnnnnnnnnnnnnnnnnnnnnnnnnnnnnnnnnnnnnnnnnnnnnnnnnnnnnnnnnnnnnnnnnnnnnnnnnnnnnnnnnnncgcagccttctccactgcatgaagcagaaccagcccctcttgggacacagcgtgtgatggagatgtgctgtttggctgatgtaattaaaagagagggtcactgctgcgggtttgataaagaaacatgaygaagctgttacatctcccaaccttcccttcaaagatgacaagtcctgaaaaattaaaaagcacatgcacacacatgcagttgttacatctttccctccggtgtctgtgcgcaggacagagctgagcatagcaaagtgatggcacccagatccagatagctgtgataatgtgctcrggtttgttgttccctgttggttttcccttctctgactcacggcagcactgtgaggttctgggtgcaccaartcaaaatgggctccactttggagtctctcttttgtggtggagaggaaaccaaa

SEQ ID NO: 70734 - DNA, 600 bp, Chicken  19866894346434_2
gccttctccactgcatgaagcagaaccagcccctcttgggacacagcgtgtgatggagatgtgctgtttggctgatgtaattaaaagagagggtcactgctgcgggtttgataaagaaacatgaygaagctgttacatctcccaaccttcccttcaaagatgacaagtcctgaaaaattaaaaagcacatgcacacacatgcagttgttacatctttccctccggtgtctgtgcgcaggacagagctgagcatagcaaagtgatggcacccagatccagatagctgtgataatgtgctcrggtttgttgttccctgttggttttcccttctctgactcacggcagcactgtgaggttctgggtgcaccaartcaaaatgggctccactttggagtctctcttttgtggtggagaggaaaccaaatgggtcacagctcttccytcccgctctctacccctgtggccattcaaaggaattaagtccagaaaaacctgtggtgacgagcaatgaccccctggggtccatcttggcaccggtgctcttcaacatctttatcaaccatgtagatgatggcatcaagagcaccatcagcagtttgc

SEQ ID NO: 70735 - DNA, 600 bp, Chicken  19866894346434_3
ctgatgtaattaaaagagagggtcactgctgcgggtttgataaagaaacatgaygaagctgttacatctcccaaccttcccttcaaagatgacaagtcctgaaaaattaaaaagcacatgcacacacatgcagttgttacatctttccctccggtgtctgtgcgcaggacagagctgagcatagcaaagtgatggcacccagatccagatagctgtgataatgtgctcrggtttgttgttccctgttggttttcccttctctgactcacggcagcactgtgaggttctgggtgcaccaartcaaaatgggctccactttggagtctctcttttgtggtggagaggaaaccaaatgggtcacagctcttccytcccgctctctacccctgtggccattcaaaggaattaagtccagaaaaacctgtggtgacgagcaatgaccccctggggtccatcttggcaccggtgctcttcaacatctttatcaaccatgtagatgatggcatcaagagcaccatcagcagtttgcaccaaggtgagcggtgcagctgacccagcagaaggaakggacaccatycagaaggacygggtgggtggcaa

SEQ ID NO: 70736 - DNA, 600 bp, Chicken  19866894346434_4
caaccttcccttcaaagatgacaagtcctgaaaaattaaaaagcacatgcacacacatgcagttgttacatctttccctccggtgtctgtgcgcaggacagagctgagcatagcaaagtgatggcacccagatccagatagctgtgataatgtgctcrggtttgttgttccctgttggttttcccttctctgactcacggcagcactgtgaggttctgggtgcaccaartcaaaatgggctccactttggagtctctcttttgtggtggagaggaaaccaaatgggtcacagctcttccytcccgctctctacccctgtggccattcaaaggaattaagtccagaaaaacctgtggtgacgagcaatgaccccctggggtccatcttggcaccggtgctcttcaacatctttatcaaccatgtagatgatggcatcaagagcaccatcagcagtttgcaccaaggtgagcggtgcagctgacccagcagaaggaakggacaccatycagaaggacygggtgggtggcaacccttcccatggcgactggggcagaactgggggatctggatgttcctctccatcctaagccactttggggt

SEQ ID NO: 70737 - DNA, 600 bp, Chicken  19866894346434_5
acggcagcactgtgaggttctgggtgcaccaartcaaaatgggctccactttggagtctctcttttgtggtggagaggaaaccaaatgggtcacagctcttccytcccgctctctacccctgtggccattcaaaggaattaagtccagaaaaacctgtggtgacgagcaatgaccccctggggtccatcttggcaccggtgctcttcaacatctttatcaaccatgtagatgatggcatcaagagcaccatcagcagtttgcaccaaggtgagcggtgcagctgacccagcagaaggaakggacaccatycagaaggacygggtgggtggcaacccttcccatggcgactggggcagaactgggggatctggatgttcctctccatcctaagccactttggggtttagtcattctacgtttgctaagagcagccatccaagctgcctcttttcttccaggaactacactgttctgtctcaagaagaacccaccgggcactttcttcaccatttatctccagcaaaccttcagagagcattttatctccctccctccaacagccagccctgcaggcgctcccatcccatccctctgtcagc

SEQ ID NO: 70738 - DNA, 600 bp, Chicken  19866894346434_6
tgtgaggttctgggtgcaccaartcaaaatgggctccactttggagtctctcttttgtggtggagaggaaaccaaatgggtcacagctcttccytcccgctctctacccctgtggccattcaaaggaattaagtccagaaaaacctgtggtgacgagcaatgaccccctggggtccatcttggcaccggtgctcttcaacatctttatcaaccatgtagatgatggcatcaagagcaccatcagcagtttgcaccaaggtgagcggtgcagctgacccagcagaaggaakggacaccatycagaaggacygggtgggtggcaacccttcccatggcgactggggcagaactgggggatctggatgttcctctccatcctaagccactttggggtttagtcattctacgtttgctaagagcagccatccaagctgcctcttttcttccaggaactacactgttctgtctcaagaagaacccaccgggcactttcttcaccatttatctccagcaaaccttcagagagcattttatctccctccctccaacagccagccctgcaggcgctcccatcccatccctctgtcagcactgcttttg

SEQ ID NO: 70739 - DNA, 600 bp, Chicken  19866894346434_7
tgggtgcaccaartcaaaatgggctccactttggagtctctcttttgtggtggagaggaaaccaaatgggtcacagctcttccytcccgctctctacccctgtggccattcaaaggaattaagtccagaaaaacctgtggtgacgagcaatgaccccctggggtccatcttggcaccggtgctcttcaacatctttatcaaccatgtagatgatggcatcaagagcaccatcagcagtttgcaccaaggtgagcggtgcagctgacccagcagaaggaakggacaccatycagaaggacygggtgggtggcaacccttcccatggcgactggggcagaactgggggatctggatgttcctctccatcctaagccactttggggtttagtcattctacgtttgctaagagcagccatccaagctgcctcttttcttccaggaactacactgttctgtctcaagaagaacccaccgggcactttcttcaccatttatctccagcaaaccttcagagagcattttatctccctccctccaacagccagccctgcaggcgctcccatcccatccctctgtcagcactgcttttgtagtacccgc

SEQ ID NO: 70740 - DNA, 600 bp, Chicken  19866894346439_1
aaactgaagccacagacaaatacaacggacacctaccaaaatctgctcaggagtccaaataccaacggctgagcaaggcgaggcgctccggatcccaaacccacagccatgcccatgggtgggagaaaagcacctcctttctgtgccatagagctgcctgctcacacgttgcttatttacacggagagctctctggcacaggacgtgaaggaaatgtgtaatgagtgctccaagccctttgccatcccacaacaatgggacggctgtgccagcaccacgagcgcacagcctcagccccarcgagttttggtggggagggctttgtgttttgttttgctcttcgaaagatagccctgtaatttagtgactcatgcgttctacatcctttgttgcttttcgttttcaacatctttaagckgtttgcggagaaggcgcttatttttagacttcccatcagcgaggggtggtttgggggggaaaagctccattgagatttttgtatctggggtgctaacaggcaaatctcctggtgggaagacagttgttttttttccttttctttcctttatttctcactcggggatgggcagtgattttggg

SEQ ID NO: 70741 - DNA, 600 bp, Chicken  19866894346439_2
gtgggagaaaagcacctcctttctgtgccatagagctgcctgctcacacgttgcttatttacacggagagctctctggcacaggacgtgaaggaaatgtgtaatgagtgctccaagccctttgccatcccacaacaatgggacggctgtgccagcaccacgagcgcacagcctcagccccarcgagttttggtggggagggctttgtgttttgttttgctcttcgaaagatagccctgtaatttagtgactcatgcgttctacatcctttgttgcttttcgttttcaacatctttaagckgtttgcggagaaggcgcttatttttagacttcccatcagcgaggggtggtttgggggggaaaagctccattgagatttttgtatctggggtgctaacaggcaaatctcctggtgggaagacagttgttttttttccttttctttcctttatttctcactcggggatgggcagtgattttggggcacaccgatgggctgttgcaaggaggaggaggtggtcacgagtgaaaacagacacatgtggggctcaaatagtcggtgtgggctctgggaacactcatccttcccctccctcttcat

SEQ ID NO: 70742 - DNA, 600 bp, Chicken  19866894346446_1
cacagtaactacatgctaattatgctaatgcacatggaagacagggaggtgatatgagagaaccagcatggcttcaccaagggcaaatcctgcttgatcaacctagtggcctccagtgatggtgtaactgcatcaatgaacaaggggaaaaccactgatgtcatctatctggacttcagtaaggtctttgacatactacctcacaaaattcttctctccaaattggaaagatatggatttcatggttgcactgttcaatggacaaagaattgtctacaggatcgagtccagacagtggaytgacagcagccctgcagaaaaagacctgggggtactgggggatagtaaaccttaaccaacctctcacagcccagagagtcaaccatatcctgggctgcatcaaaagtgtggccagcagggcagtggaagtgatctggcccctctactttgcactggtgagacctcaccagtactgcagtactcgtgagacctgcagtactgcatccagatatagagtctgcagtacaggagggacatagacctgttggagcgcatccagagaacagccacaaaaatgatcccagggatggaacacttcta

SEQ ID NO: 70743 - DNA, 600 bp, Chicken  19866894346455_1
tactctctaatacagagtgaaatagcatgaagaagattcagataaccccacacacagaatccctccaaagttctactcaagtatctacgatgctaagagaaatgcacacctacagccattttgcagggggtgaatgcagcccccttctgtttgcaacacatctgagcatcatgtcatgcaaaagctgcttgcctgaaacgttcagacaaaaatcacagaagttgggtaagagaagaaatgaagcaaagcccacgtggcaagtagcctgtagcagttatcttttgctgcagtcttgtatcraatgagcttggagacctttatgaagagacaatctcttttctaccacgtctaattcracggctttcatattggtgtcctgaacgaaaagtcctgttggaacttgttctggaatgcactaactgaccaggagaaaagaaacctacacttacccagaacaattataaaaagcacaaatcctgataatgcggatgttcaccttcacctgtaaaaaggagagctgacagaccatataattttagttgtcagctgaagccatcaggcagtgactttaaacccattccctacaaaaataaaaataaa

SEQ ID NO: 70744 - DNA, 600 bp, Chicken  19866894346455_2
gaatccctccaaagttctactcaagtatctacgatgctaagagaaatgcacacctacagccattttgcagggggtgaatgcagcccccttctgtttgcaacacatctgagcatcatgtcatgcaaaagctgcttgcctgaaacgttcagacaaaaatcacagaagttgggtaagagaagaaatgaagcaaagcccacgtggcaagtagcctgtagcagttatcttttgctgcagtcttgtatcraatgagcttggagacctttatgaagagacaatctcttttctaccacgtctaattcracggctttcatattggtgtcctgaacgaaaagtcctgttggaacttgttctggaatgcactaactgaccaggagaaaagaaacctacacttacccagaacaattataaaaagcacaaatcctgataatgcggatgttcaccttcacctgtaaaaaggagagctgacagaccatataattttagttgtcagctgaagccatcaggcagtgactttaaacccattccctacaaaaataaaaataaaaagcataattgctctcataarctttgatttctaaaaattcaagcatgcatctttta

SEQ ID NO: 70745 - DNA, 600 bp, Chicken  19866894346455_3
gaagagacaatctcttttctaccacgtctaattcracggctttcatattggtgtcctgaacgaaaagtcctgttggaacttgttctggaatgcactaactgaccaggagaaaagaaacctacacttacccagaacaattataaaaagcacaaatcctgataatgcggatgttcaccttcacctgtaaaaaggagagctgacagaccatataattttagttgtcagctgaagccatcaggcagtgactttaaacccattccctacaaaaataaaaataaaaagcataattgctctcataarctttgatttctaaaaattcaagcatgcatcttttatgtataggtcartgcttccattttctgggtgagtatcagtacttctgcactgagtgaagctttgatacactgttcagatgtatgaagccaaaacatttcattacctcctctggaggtttctaaatgaaactggttgaactcatcacagttcagcccacagttgtatttcagtactgggttagcaccaggtcaggttagcggccaagcaactgggtcaggacttagaagagattgcaaagaaatgctcttcccagcctcagttttg

SEQ ID NO: 70746 - DNA, 600 bp, Chicken  19866894346455_4
ttggtgtcctgaacgaaaagtcctgttggaacttgttctggaatgcactaactgaccaggagaaaagaaacctacacttacccagaacaattataaaaagcacaaatcctgataatgcggatgttcaccttcacctgtaaaaaggagagctgacagaccatataattttagttgtcagctgaagccatcaggcagtgactttaaacccattccctacaaaaataaaaataaaaagcataattgctctcataarctttgatttctaaaaattcaagcatgcatcttttatgtataggtcartgcttccattttctgggtgagtatcagtacttctgcactgagtgaagctttgatacactgttcagatgtatgaagccaaaacatttcattacctcctctggaggtttctaaatgaaactggttgaactcatcacagttcagcccacagttgtatttcagtactgggttagcaccaggtcaggttagcggccaagcaactgggtcaggacttagaagagattgcaaagaaatgctcttcccagcctcagttttgtagacactgatctgtgatctgctagtgaaagatgcagcacttcatta

SEQ ID NO: 70747 - DNA, 600 bp, Chicken  19866894346458_1
tcagtgataatgaaaaaatcacctttgaaactcttgaatccccactgatagtttgctaatgggtaccacatcatagaatacttgtcagtgttggagtacaagctaaaatattttgtccaggtaattcacatattcccatgggttcttttaacgatattactgctgataatatgaaggaatacagtacactttagagatgttttacttaatctaccagtagccttttttgccaaatgatgactattgtttcagaggttcaagaatagctctctgaaattctcttaactgaaacatctgtgyctatagatacctaaaattgaatgattaggacacacccctctactgaagatctcatatttattctctttgatatccaattatcagacagcttattttaactaacttccacgggcaagtcagacaaataatacaatgtgttcttatcctactgtaaaactttgccagtaatagcttttggaggagacatccttgaaaactaattcagctttgaagatgaggaagtgctgagtggatgtggaacattaggaaacaagagctactaattgcaagaaaagttcttcaaaaagttattctttttat

SEQ ID NO: 70748 - DNA, 599 bp, Chicken  19866894346459_1
  misc_feature (1)..(230): n is any nucleotide
nnnnnnnnnnnnnnnnnnnnnnnnnnnnnnnnnnnnnnnnnnnnnnnnnnnnnnnnnnnnnnnnnnnnnnnnnnnnnnnnnnnnnnnnnnnnnnnnnnnnnnnnnnnnnnnnnnnnnnnnnnnnnnnnnnnnnnnnnnnnnnnnnnnnnnnnnnnnnnnnnnnnnnnnnnnnnnnnnnnnnnnnnnnnnnnnnnnnnnnnnnnnnnnnnnnnnnnnnnnnnnnnnnnnnnccgctccctgttagagctaggcatcgcccacagccccctcttgcagcctgcaaagcatggaagaactgcrccccattaccttcctcaggtgcaagcattggagggacctctcctctgattctgcactaaacaggctgcacacgtgccttgccgcgattgaaacaaaacataacacactttggatgcttgtcagcagatttttctccagctttcttctagcaattaaaacatggacgattcctctagcgcttcctgcaggagttaaaagacagccttggaaacaggccgtgcattcagtatttgcagcattcatgtgattgtgagaaacgcgtttgcaaggaaatgctaagcactgttgcttctcatttt

SEQ ID NO: 70749 - DNA, 600 bp, Chicken  19866894346459_2
tgtgagaaacgcgtttgcaaggaaatgctaagcactgttgcttctcattttctcacgagcgctgcaggcaggcacagctgagtcttcgtaacctttccgtcatacataaaccagagatcattaagaccttattaccatattttgaaaaatgccgttaatttctccatctcccagaaactgaaacgcttctccacagctgctttgaacaaaacctgatttgtgcacttcgctgcattggaaaaagaaatgctttctccgaatgaatatgaatgaaatgtagctgtgagccgaaaacgtgcwttcacatacacgcatcgcagagctgggagatggtgtgacaagccaaatggctgctctctgcctttatttgtgtttcctcgagacccagcatcacaaaaacgtgaatgctggtagaaagcctatgcacattttgtacgagaaaaatgtaattgcaaaattacagcacacccctaaatggtgtgaatgctaaaaatatgacatattgttttccataagtgtgctttgtgataaaagaaaacagccaagctttgtgatttttgtggtacagtactggaagcgtttgggtatctgctgccagtt

SEQ ID NO: 70750 - DNA, 600 bp, Chicken  19866894346460_1
tgcccctgggtcacagcaacccccagtatcagtacaagctggggatgtaaggatggagcacaaccctgccaaaaaggacctgagggtattggtggatggcagctgaacatgagccagcactgtgtcctcacagcccagccagccaatggtatccggggctgcatccaaagcagcgtggccagcagggtgagagaggggatctgcccctctgctctgtgctgtgagacctcacctggagcactgcgtccagatggggagtgctcagtacaggagagacatggagctgttggagagcgtccrgaggagggccacagaaatgagcccagggatggaacacctccctgtgaggacaggctgagagaagggaaggctccatgagacctgagagtggtcttcagtatctgaaggggctgtaagaaggaagggaacagactctttagcggggtctgttgtgataggacaaggggaaatggtttctaactaaaaggggagatttagattggacataaggaagaagttttttacactaagggtagcgaggcactggaacagttgcccagagaggtggtgcatatcccataggtgtgcacatgaggtcgg

SEQ ID NO: 70751 - DNA, 600 bp, Chicken  19866894346462_1
accgtaatgttgttgttcagctgttaggagtttaaactatataggcacctgttgctttttttttttttccccagctgcttatcatcttcccttccttaaaggggtatggtggaggttctgggatctgtgctaccttgtgacttgtagcagaggttccagagcaaacaagtgaatgtgaaattttaattgacattattagtaattcagattatttggaagctcatataattaattgaggggtggagggttaaacctattcaactgttgctttgttttatttaatgccagcagcgctggaaragtaagcagcaacccagtggaaatatgagaataataaaacctggcgctttccagctgtagatgccaaatccatttccagagctgggcagtgctattctagctcccttaggaagggaactgaagctcagcgacctgaagagacttgtcccaatgattctgtttcctgttctgttaccgcaatgctttgggcatttgattcccagcctttaaagtacctacaagacataactgactgtcagtagaagggggggggggggggttgggtagaagcagttttgctgaaggcatgatgattaaatg

SEQ ID NO: 70752 - DNA, 600 bp, Chicken  19866894346462_2
gtaactgcagccacagcagtgatgaggaagcagctccgatggtgcttgctatgagctctgttttcttcataccttttacatgaggcagcggtgctgaacctgcagcccagggactggccccaggacggttcatctggcttgtttctgaccgttatctttcctggaggctcccacccctccagtgttgggaggagccatgggactgctggttgagaagagagctacgagcagactgttctgtcatactacttagtggcatatatttttctccctgtctgtgtctgaagggtctcaaaaaargggagaagctgagagcaaggtctggggtggataagtttgctccatagtcacctttctggaagtactttttggtgcaacagctgcatcaagcctttctgaattaaatcctgcctaaaatagctggcacatctgcaagggtagtcagtttgtagtgaaaagagggtacgtagtgtaccttcagcctaacttgtgcaactgtgctatgcagggagagggcctccctgccagacagggatatgtggtattggtctcctctcatgaaaaactgacatgaaaatgactcactggagccctctgctt

SEQ ID NO: 70753 - DNA, 600 bp, Chicken  19866894346469_1
ggaggctttatgttttactggaatcaattcttgctaatcagaaatggtaactgaccatagaatcttttagagaaccagctctggagtccttctgttgacctccctggcactttcagcgggttaagcacaatttgagtacatacacttgagcagaatatacttgtgctctgaaaaaaataattcagtataatttattcctgctctcatgctatcttgagaaacaagatatctatgaaattatctaggaaacaagtatttaggaaaccactgtggaaaaagtacaactgtggggttttgttmttcaaaatgctatacttttgcaagtgccctacaaaaaactgctattctctgattccaaggaagcagaaaaaaaaagtttattaaaatcaaaagacttcaaactcccatatttaagaaaaaccttcattctacctcaacctgtgggaagttggtgatgtaagtagaattcactacctactttgccaagctagggattttctttggtgacacaaaagattttgatatgcctgctgatggtgattttactctgaaatctctggaatggaacaatagcctagaactttgctcatctaagatgga

SEQ ID NO: 70754 - DNA, 498 bp, Chicken  19866894346469_2
caaactcccatatttaagaaaaaccttcattctacctcaacctgtgggaagttggtgatgtaagtagaattcactacctactttgccaagctagggattttctttggtgacacaaaagattttgatatgcctgctgatggtgattttactctgaaatctctggaatggaacaatagcctagaactttgctcatctaagatggacaaatccaacaattatttttcctaggtagttattcactgagagatggaaatactgaaaattatttgttatgactagactttttcccagagaaataaygtagaaggggctccaggcattttgtcctgaactttgctcaaatcaggtattctctccttgttcatcattattctggcacttaaaaatatccctttcatattgtgaactttctcttgcattgagaggccatcaagtttcataaacaacttcagtgcatggattaagtgctctagatctctatttcactggccataaaat

SEQ ID NO: 70755 - DNA, 600 bp, Chicken  19866894346478_1
agcagaaaaagaataaatcctgtagatttcaacaaaaacacatgctaaataccaacactgaaaacccgttaatcatatatacatacaaaaactgtggattctaggattcgtcaaccgaagaaatagtagaagttaatgacaaaatgggcattggtaacaaacccacgtgtactctaacagctgtaaatttctgaccgtaactataataatttttcctgaacaaaatgatacctgtatctagatacagtatttagctttattcttaatttctttatcaaatttatttccattttttaatcrattgaatttagtcttcagccatatttttcacacaaaatggttakatggtaattctgccattttattttgagttcatacaactaaaattattcacaaagcagcactgtgttccttaattctcctcataatttttatgtatcatacagctattgtgattctttctgaagggagctgataggtgtaatctaaatggtaatgtaaggattgagatttacctactagatgcactattccaaatgcctttaaaaattgaaatatattgatctaattcacccatatgccacataaacacttgctgca

SEQ ID NO: 70756 - DNA, 600 bp, Chicken  19866894346478_2
ctaaataccaacactgaaaacccgttaatcatatatacatacaaaaactgtggattctaggattcgtcaaccgaagaaatagtagaagttaatgacaaaatgggcattggtaacaaacccacgtgtactctaacagctgtaaatttctgaccgtaactataataatttttcctgaacaaaatgatacctgtatctagatacagtatttagctttattcttaatttctttatcaaatttatttccattttttaatcrattgaatttagtcttcagccatatttttcacacaaaatggttakatggtaattctgccattttattttgagttcatacaactaaaattattcacaaagcagcactgtgttccttaattctcctcataatttttatgtatcatacagctattgtgattctttctgaagggagctgataggtgtaatctaaatggtaatgtaaggattgagatttacctactagatgcactattccaaatgcctttaaaaattgaaatatattgatctaattcacccatatgccacataaacacttgctgcagtctatatgtagcaatgcaaacacaagcaattaactggagaata

SEQ ID NO: 70757 - DNA, 600 bp, Chicken  19866894346487_1
ctcttctcttccccagacacagagccactctcttctttaagggcacgaaagtacattgttttgtagctgcagggcaggtgagtttgcaggaagaccttacagctcccttcctccacagagaatcacccctgcctggcagcgatcaacatccacctgcctccctgaaacagacttgtattacagctgcagtcctcccagcagaaagcaaagacagagggccttgcaagcaccaatcatttaaacagatactgctgcagcagaaatgaagtgctgatcactctctgccctttatcacttccytctgaaagtacacatccttacaaccacaaagcacacacagcattatgttcaaattgcttgcaggatatcactggtccacctagccagcctaaccagctgtgaatctaacatcacaattaaaattcaattgaatttaatgaacaaaccaaatgcagtctgatactacagaacagcttcagatatttagttccaaggtctattatcatttacttatgctgtgtttaaggtcaactaacaaaaagggtgctggcacaaacaacatacagcctctggctaattacaaagagtaaggactgttct

SEQ ID NO: 70758 - DNA, 600 bp, Chicken  19866894346488_1
tgggaaaaacaagcacctcagacacttaaagcccattacgctgtggaatatgaaagaagcacacttgagcagtgaagcagttctctggttttctcactgggtataatatgctacttgttaatgaccctcatcatgctgtaagaaagccccaccatggatgagggctctgccttcacaggtgctttgcaagtggcagacacaatgaacattgacataaaatcttaaggtaagggtacatgaaacagaaaaagggatagatgcattatcctgctaattttgtagcacatctattaagatacratatttatttatatgtagctgaggcccagatatatcatgttttttactgaatgccacccaacaaacagttggctatggaaaacctatgcaaaatgactcttctttgagctaagctgtatgaatctacatactaaccagcgccagcgaagtctttgcccttagagtgaccaccacagaatgtagttctgcatacttaactgagtatgtgggctgtatttgtaagcaaggattaagaattcttcatcaagaagaaaatctctttattgaaaggggtgggttacacaaagaaactttcacaat

SEQ ID NO: 70759 - DNA, 600 bp, Chicken  19866894346491_1
gccaacttaataaaataggagacactattttcagggcagtttttgcacatatgaaatcctgactccctagtcaccttgctgttatgaaaagaggaaaaaaaagactcttaaaaaaaatcccagtgtgaaggtatctgagcatgtatcccactcgccaccgtttctgtttaaatacattaaaatacagatctgtgcaagcaccaatgggtatgaaatgaatggcaatataaaaggactgatataattgttctttttttctttatgacttacatgtatcaggtcttgtcaagagtttccccwgtttctagaaaaggaagctttcttaaaaaagtgcgatgtttatggtccaatgtttatggtccaatttcctaatttctaagagttaatcagaggttttacacagaaatgcatctttttgcctacttgtagttgggaaaacgaaagcaggctcactcatggagtgcctggtttggatatgcctgtgaagaagacagatctgttgcttctagagaaatttccgagacagttttaaatgagcttccttggttctgccagcagcaggaaggcttctcccctccttctgtggcctttgcagcccac

SEQ ID NO: 70760 - DNA, 599 bp, Chicken  19866894346492_1
  misc_feature (1)..(6): n is any nucleotide
nnnnnnactgcagagagctcaagattattggatttgttgtgtatagataaagacacatagatatgaatttaatttcctggtgtcaaagtcatggcttttaaaataattatccccttacagtctttcccacaagattttagccactttaaattaggtgatgttttggactttccaaaggcatcctttggacagtgtaacaaaaaagctaatcctctgtcattgtcttctctaagaatatgtgcaggaatgcacatagtcaggagaataactgattgtaggatctagcttctttaatgtatkggaattatgacagacatagcaataaattccttctgtacaacatcttccagaaagcgataaatgagtcaccttgtcaagctttacacctctgaggtagaaaaacgctatcccattcttcttttgtatttatatttctttttttatgtaatataaaacaagagaatggtctctgaaaactctttcccttttagggttcagtttttcggcagatgtgtattttgaatataattcatgaggtgtttaacttcatattatcatgcctcaaattgaagttaaacagctaaaattcttggcaaaaa

SEQ ID NO: 70761 - DNA, 600 bp, Chicken  19866894346506_1
gtaataacatgctgagcactttttgtctctaatgtgattgatgtcatgcacaccctttgcctgtcattcaaataatatatattttttttatttggagctttgttcttttgaatgatcaattcagatccattgctatacacacattgtgtatgtacagaactgtttgtcttcttttttttttttttttgtaggtttatgatcaagcaagtagaacaaatctgtacatccccccgacagaatgttacaggtggtgaacaaggcagaagccagaactctctgcaggaacagatccatgacacrtttgtcctacgactggtgtcgtgcattcagcttgcgagcaaactttccttacactataaygtaagatatatgagccttttcctgttgcattttcagtagtgtagaaaagtatataatccctctaagcaatacattttctctctgaaaatcagctgtgataatacaaaggatagcaaaatgaggacctaagtctcttgcatttagggcagatgaaatataactcatcttgtgaaaatgtgtcaggaaacgttcccagtacacatcagtaagaaagtacaggcagctggaaaccccagcctg

SEQ ID NO: 70762 - DNA, 600 bp, Chicken  19866894346506_2
ctgtcattcaaataatatatattttttttatttggagctttgttcttttgaatgatcaattcagatccattgctatacacacattgtgtatgtacagaactgtttgtcttcttttttttttttttttgtaggtttatgatcaagcaagtagaacaaatctgtacatccccccgacagaatgttacaggtggtgaacaaggcagaagccagaactctctgcaggaacagatccatgacacrtttgtcctacgactggtgtcgtgcattcagcttgcgagcaaactttccttacactataaygtaagatatatgagccttttcctgttgcattttcagtagtgtagaaaagtatataatccctctaagcaatacattttctctctgaaaatcagctgtgataatacaaaggatagcaaaatgaggacctaagtctcttgcatttagggcagatgaaatataactcatcttgtgaaaatgtgtcaggaaacgttcccagtacacatcagtaagaaagtacaggcagctggaaaccccagcctggggctgtcagaacacagagagctacatagagcttgtctgggtaccatatatgggtataga

SEQ ID NO: 70763 - DNA, 600 bp, Chicken  19866894346510_1
aaacatggatttttttaaaatactatttgtttatgtacagctctgatgtaaataaaaaccaaacaaaaataaaaagcaaactagaacaaacaaaaaccaaaaacaacttctggtgtcaaagaagttaggtcagataatgataactcttcaatcagaattatgaagactttgtggcttatgcagacattttgttgtaaggggtttctttgcttcaaactgtacatatctgtggctgagctaattgtgcaaggttcctgtattgtcaagagacatagacaggtacatgccattttattctcrtttagacatttaacgctagtratatgaatctgccgaagaactgagtatttcatccaattgattctaatagagcactggactgtatggttcagaactccatatatgcagtgtaaatatccacttcatatacagttttcaagctgaaaatcagttatggaaattgccttaagtcttaagcagcatttggtgacagcccatcaaaaggacttaagagtyctgagtctcagtcacattttcatctttgtctttctattatattcattaattatacctttatttaaatgctagtaacaatttaat

SEQ ID NO: 70764 - DNA, 600 bp, Chicken  19866894346510_2
actatttgtttatgtacagctctgatgtaaataaaaaccaaacaaaaataaaaagcaaactagaacaaacaaaaaccaaaaacaacttctggtgtcaaagaagttaggtcagataatgataactcttcaatcagaattatgaagactttgtggcttatgcagacattttgttgtaaggggtttctttgcttcaaactgtacatatctgtggctgagctaattgtgcaaggttcctgtattgtcaagagacatagacaggtacatgccattttattctcrtttagacatttaacgctagtratatgaatctgccgaagaactgagtatttcatccaattgattctaatagagcactggactgtatggttcagaactccatatatgcagtgtaaatatccacttcatatacagttttcaagctgaaaatcagttatggaaattgccttaagtcttaagcagcatttggtgacagcccatcaaaaggacttaagagtyctgagtctcagtcacattttcatctttgtctttctattatattcattaattatacctttatttaaatgctagtaacaatttaattaattttttacctactttttt

SEQ ID NO: 70765 - DNA, 408 bp, Chicken  19866894346510_3
ctgtacatatctgtggctgagctaattgtgcaaggttcctgtattgtcaagagacatagacaggtacatgccattttattctcrtttagacatttaacgctagtratatgaatctgccgaagaactgagtatttcatccaattgattctaatagagcactggactgtatggttcagaactccatatatgcagtgtaaatatccacttcatatacagttttcaagctgaaaatcagttatggaaattgccttaagtcttaagcagcatttggtgacagcccatcaaaaggacttaagagtyctgagtctcagtcacattttcatctttgtctttctattatattcattaattatacctttatttaaatgctagtaacaatttaattaattttttacctacttttttttt

SEQ ID NO: 70766 - DNA, 599 bp, Chicken  19866894346511_1
  misc_feature (1)..(236): n is any nucleotide
nnnnnnnnnnnnnnnnnnnnnnnnnnnnnnnnnnnnnnnnnnnnnnnnnnnnnnnnnnnnnnnnnnnnnnnnnnnnnnnnnnnnnnnnnnnnnnnnnnnnnnnnnnnnnnnnnnnnnnnnnnnnnnnnnnnnnnnnnnnnnnnnnnnnnnnnnnnnnnnnnnnnnnnnnnnnnnnnnnnnnnnnnnnnnnnnnnnnnnnnnnnnnnnnnnnnnnnnnnnnnnnnnnnnnnnnnnnntcttttatagacacacagcagtgcaaaatgaaatgtatctttcacagaagatgcagtaaaatartgttaggaagcactttgtcattaatttaaaagaatgtgtgaaaatgcaattaggagggctatacaaattctggaattcactgcatctcaggcagttcttagaaattcaaatacacatttgagctacacatcaaattttcgctgaagactgttccccacagctcttggagtcttctgaaattacagttgtgtctgtatacacaagatatattgatatttttctgattttgctcacaagtcccataccattgactgcttccaaagcacagagtacacacaggctctgctgtgattcatttc

SEQ ID NO: 70767 - DNA, 600 bp, Chicken  19866894346512_1
cccatgctgcaaatagcctaaaagaatgcttcagagagatgcacactgaatggggcagcatttttggaggcatgctggtgtatttcccaaagcagtttttctgctgggggggggcaatagtacccaacacgttccccagttttaggcaaaagaggatcttggggtccctgcccctctttggaatgggactgctgtgaggtgaggtcctgcaggttgccattgagcagccacaagtcatgcaggggctctgctggtgcacagacaacaggaaggctgccaggatggtgtggcaacacctgrcagctgtgccactgagaacggccaactcggaatacattctgggtgaaatcatggacagaatcatagaatggcttgggttggaaaggacctgaggatcatcaagttccaacccctctgccgcaggcagggccaccgacctccagatctggtaccagaccaggctgcccagggccccatcctggtctttgaacacctccagggacgaagcatacacacctgtctgggcagctgtcccagcactccatctttgcagcaggctgagaacgatgagggaaaaaggctgcatgtgggttagaggtc

SEQ ID NO: 70768 - DNA, 576 bp, Chicken  19866894346513_1
ttttgttcctgtgtaatcccagtgcccccatcccagcttcagccatttttatctaggcacaagagtgggtggatcagatttcttttctcatcgttggtagaacagaacagcactgcttcaactcatcgggctgagcaaggagccgagctgtgcgggctgctccttcctgtccatatgtaaattccccaataaaagattgcggtgaaacctcactgcccatcgtgtccccatagccgcactgtggatgggtgcggactgctctgtgtgctgggagcagagctgcgtcccaacatcgggcayggagagctcctgggagccgggggggcagcgccgggcacagcgggggtgagttcgggtcagttgacagctctgtatacaacagaaacctgcagcccgtggctgtgatgcagcattcctgctgcggggagagcttcggctgcagctggtggttgatggcggggggttggaagcccggtgatcttttggggtcccttccagccccagccgttctgtgatagagctgactgcggcccgttggggggggttggagctctcccggccccgtgatggtgggag

SEQ ID NO: 70769 - DNA, 600 bp, Chicken  19866894346520_1
cgtgcattattgtctacaatacagcatgaaagaaagcgatgctgatgaagcgtggttatagaaatgttactaaccctctcaaaatgagtcactctctaagcctctaaagagaagaaaggaagtcagaattgagaatattaaataattttgactgttaatatttaatattttacctttttcaacctgctttaccctgttcttctctatatcagctgggttgaaaatgactttcattgttcttaagggagacagtgttttggtatattacatctgttctctaaattcatgaaccctggaagycacagaagcagataaatatctttgtcaagaagacatactcaagttccaggagcaaaactgatctttgcctcgtgggttaatagcattaataattgccattttttgtaagtctgaatgtaagaagcctgctccaacaaaagagtcaacccttcaaaaatgactatccatgataaattttgaagagcaatgaaaattgtcactctgccagcttgataaattgtagccccaactggcagagccacttgccttgcagtaagcacaaaatgacagatctttgctgaatacaaactatatgcttgc

SEQ ID NO: 70770 - DNA, 600 bp, Chicken  19866894346520_2
tcaagttccaggagcaaaactgatctttgcctcgtgggttaatagcattaataattgccattttttgtaagtctgaatgtaagaagcctgctccaacaaaagagtcaacccttcaaaaatgactatccatgataaattttgaagagcaatgaaaattgtcactctgccagcttgataaattgtagccccaactggcagagccacttgccttgcagtaagcacaaaatgacagatctttgctgaatacaaactatatgcttgcacctttcacagctggtttagcttgtaaacgcagaaaaraaaaaaaaaaaaaaaaaaagctttaataaaaactgaaggttatgcacaaaaaaatggtttcacaactgcttctttcctttccttttaaagatgttgccttcatattggaaagtagtcttgaaacaaacccctcagctgtctatgagatcatgttccaaaaatacatgcacaactatgtggcggtaatttcttcactaaaaagattcaacagtgcaatcatctcaaggaaggaaaaattgtcttttaagtatcgccttaatatttaggagaacacacacatatcacttgtgaaaaaagaca

SEQ ID NO: 70771 - DNA, 600 bp, Chicken  19866894346523_1
tggacaatttagaacagattaattaccattgataatttctgcaactgatttgcaaatactgatggtattgtcaactactaatgcagaatgtgcaggtaaatgccttatgctgtcttttgggagaagcaggaaatagaagctttacagggaaaaaacagggatatgttttttaaatttacatttttaaatacttttctcacttcccttggttagaagttagataattgtttaaacaagcattccattttctctactaaaggtgagattttgaaatgtaaaattaccacactagaaagacartaaatttatttctgtaaatatgcttttgcccacacctaagctagagttcacatatttaacataatagatggtttatgctgttgacaaaatggaaggcagtcatcaacattgaaactttgaaactttttagtatgtggacactaaaatttaagtaatcttcagatttgacttgaaggtttcctgccaacattgatcatgcaggaaataggaggcagagtcttcaaatttccctagtggatctggtaggtgttgaatgccccctgtggattttgggcacattctgtgagtgttcctttccca

SEQ ID NO: 70772 - DNA, 600 bp, Chicken  19866894346524_1
aggatttatcttcactgatagcaagttctctgcttgggctttatgagttatcattagagcgtggagtgtttagggaagaggttatgatttaagttcatatctgagctgaagtgcttccttgaaaaagtgcttactcggtccggttgtcttcagggtcttttccaaagaagggcatgtttctgttagagaggaaagtcagaatattaatactgccttttctcttggtagcacgaggaggaagcgtttgcagagaggctggtatggaaatagcccatggcagggggataactgagtgctgcrtggcaggtcgtcatcttgcacgtggcggctgcctgctgaggtctgccctgtgctggggacaagctgtgtacacactttgtgcaagcagggcygatggggctcrggaggatggcaggatctcttcagagcttacatttgggggtgtctggagcagagtgttaacgatgagtggcctgtgtcagacaggagggcagccccccatgtcagaagggctgctgacaccctgcctgcatgtcattgtaagacacttcctgggctttctcacctgcctgctctacctgttccttttgaattatagca

SEQ ID NO: 70773 - DNA, 600 bp, Chicken  19866894346524_2
gttcatatctgagctgaagtgcttccttgaaaaagtgcttactcggtccggttgtcttcagggtcttttccaaagaagggcatgtttctgttagagaggaaagtcagaatattaatactgccttttctcttggtagcacgaggaggaagcgtttgcagagaggctggtatggaaatagcccatggcagggggataactgagtgctgcrtggcaggtcgtcatcttgcacgtggcggctgcctgctgaggtctgccctgtgctggggacaagctgtgtacacactttgtgcaagcagggcygatggggctcrggaggatggcaggatctcttcagagcttacatttgggggtgtctggagcagagtgttaacgatgagtggcctgtgtcagacaggagggcagccccccatgtcagaagggctgctgacaccctgcctgcatgtcattgtaagacacttcctgggctttctcacctgcctgctctacctgttccttttgaattatagcaacaattaaatgctgttttgagaatacattctagcaggtggcagaaaattacctgctctgggagaactgttacgtgtcagacgagctgcagtc

SEQ ID NO: 70774 - DNA, 600 bp, Chicken  19866894346524_3
agctgaagtgcttccttgaaaaagtgcttactcggtccggttgtcttcagggtcttttccaaagaagggcatgtttctgttagagaggaaagtcagaatattaatactgccttttctcttggtagcacgaggaggaagcgtttgcagagaggctggtatggaaatagcccatggcagggggataactgagtgctgcrtggcaggtcgtcatcttgcacgtggcggctgcctgctgaggtctgccctgtgctggggacaagctgtgtacacactttgtgcaagcagggcygatggggctcrggaggatggcaggatctcttcagagcttacatttgggggtgtctggagcagagtgttaacgatgagtggcctgtgtcagacaggagggcagccccccatgtcagaagggctgctgacaccctgcctgcatgtcattgtaagacacttcctgggctttctcacctgcctgctctacctgttccttttgaattatagcaacaattaaatgctgttttgagaatacattctagcaggtggcagaaaattacctgctctgggagaactgttacgtgtcagacgagctgcagtcggtgttttatg

SEQ ID NO: 70775 - DNA, 599 bp, Chicken  19866894346528_1
  misc_feature (1)..(51): n is any nucleotide
nnnnnnnnnnnnnnnnnnnnnnnnnnnnnnnnnnnnnnnnnnnnnnnnnnnaaaagcaagagaattatgagtgatcagagctggtgtccatggtccatatttaactgttttccttcagctgtttaccaaacactgctcttcagaggataaagtgagagaaaaccctgtgtataatggtaactacacataatgaatctattaaccatacatatgcccctattactgagagctgtttttgtagaaattgtgcttcctatcatttcactaaagccactgtaactgtaaccagtgtcagagctrtaattagtgttgtgagttccagttcactgtcctttgctccaatcatttgatatcagtagtagagaaagaagcttggaagcagtagcaaggtggttgaataggagagtacagtaaagctctccataggtctgctgtgcattttaccatctctttacattattactggctttatttacctggctatatatcccccaaagtatgccacgggagtctgagagactatttgttattatggaccaaacccaaaccaaagagggtgctgaaatgaaacaatgtgggtagtcatgcttgagttctca

SEQ ID NO: 70776 - DNA, 600 bp, Chicken  19866894346529_1
ttcgcacattcgttgtatctcttggtggtccatagtggtcttttaaagaacgtcatacgtccttctcactatgtactcctcaaccttggttgaaatggaagacacttgactctatctagccagtcatcttatctgctagaactccatcaacagtcaagacaactgaagcaataaacttctaaaacaataggtacaaaaggtgctaagggaaaaaactgccctgccatggtctaggaaacaagaatactgctgctcaacgcattgccatgtaaacaactctgtggaattggacgtgtcccmgttttaacctaagcagccatttccctgacaaagctatgggggccagcagcaaatggctcgcaacatccatcctaatgaccatcgttcccctaaacacatgcaggcagaaatgtcctgagatgccagaagctaataaaaaccccattgacattctacagcagctggacatctgtaaaacaaccaaaagaaagtaaatgcaaccctaygtgtggatactcacaaacatccacgcacctgtcaccaaatttcagatctggggcactaaggtgaatcaaaaaagggttggatagaaaccaaaca

SEQ ID NO: 70777 - DNA, 600 bp, Chicken  19866894346529_2
gggaaaaaactgccctgccatggtctaggaaacaagaatactgctgctcaacgcattgccatgtaaacaactctgtggaattggacgtgtcccmgttttaacctaagcagccatttccctgacaaagctatgggggccagcagcaaatggctcgcaacatccatcctaatgaccatcgttcccctaaacacatgcaggcagaaatgtcctgagatgccagaagctaataaaaaccccattgacattctacagcagctggacatctgtaaaacaaccaaaagaaagtaaatgcaaccctaygtgtggatactcacaaacatccacgcacctgtcaccaaatttcagatctggggcactaaggtgaatcaaaaaagggttggatagaaaccaaacagcacacttctgttagcattaaggcaggaagtctttattatcaattccagaaagcacgggggatatttctactgtaacagcttcaaagatgacacaattcagactccatgctagttcaacagatactgcatgctcagcagtaacacacaagatgatcaacacaggcagacccccatgtccctctaggtccctatgctctccaagaca

SEQ ID NO: 70778 - DNA, 600 bp, Chicken  19866894346530_1
cttgagaagatctgaatttacatcttgctgaaaatgtttttgtgtagtctgtgtgaagttcatacaacaggtgcattttcttctttcaagatgtatctaatccattaaaaatgatttttgtctcacaggaccaaggaagtgatggagagatgtacgaggacataaatgatatcaggtattaatttaaaaccctgtagcctattgtatctttattagcaaaagcttcctagagtaggtgcttcatcttgcacagtagtgtgattccagtgcagtagctgccaagcactattggattcatcyatttcactcagagaaagacagattgttcacaggttatttccaacttatatctcatatgccctcaggtggaaaaaaaatcctttaataaaaccatgtgattcctgtgagctaggtaacagaacagactgctttcttatctaatgaacatgtatgaatcattatgtggaattacagcttaggaacaaaagtaaggttagccccctcagtattatggtcccacagagatccttttgttgtggctgttcttgctttctatatagatgtacataaatgaatttgtatgagtggctggatttacaa

SEQ ID NO: 70779 - DNA, 600 bp, Chicken  19866894346536_1
attcccacaaggcttgcctattccttctcttactgtgggtatattttgaactgctagggacttaaatgccagcaatattcacaagacagctttctacatcaacagagatagcgctactggactatcttttcaaatcctacgagacatcctaacagcatccctgccttaccttattccaggcaactgaatagagaaatgcagctaaaagcagtcaaagaaccaggattttatgagcgagtagcaccagtcatagccttctcggggaccttaaagaccttatctctgtttctaaactctcargtgaggtcagtaaccagactgtgtaactgtttcatctgtaaggcaataatagggtgacatgctctgtacttrggacatagactactctccagctaacatgggggaagaattcagtagtgatttgagcagtactttctgtaaacacggcatggcagatagtcttcctgtgcatttgttatgcacattaactcagctgagttttgtgatatccagtgtctgataaaatcatggcctgaagtaatactagaataaagctgtaagtagttattatgtgcagcactgtcttaactgaagttcaaa

SEQ ID NO: 70780 - DNA, 600 bp, Chicken  19866894346536_2
caatattcacaagacagctttctacatcaacagagatagcgctactggactatcttttcaaatcctacgagacatcctaacagcatccctgccttaccttattccaggcaactgaatagagaaatgcagctaaaagcagtcaaagaaccaggattttatgagcgagtagcaccagtcatagccttctcggggaccttaaagaccttatctctgtttctaaactctcargtgaggtcagtaaccagactgtgtaactgtttcatctgtaaggcaataatagggtgacatgctctgtacttrggacatagactactctccagctaacatgggggaagaattcagtagtgatttgagcagtactttctgtaaacacggcatggcagatagtcttcctgtgcatttgttatgcacattaactcagctgagttttgtgatatccagtgtctgataaaatcatggcctgaagtaatactagaataaagctgtaagtagttattatgtgcagcactgtcttaactgaagttcaaagctaattactgacatttctacaactgcaaatatgttgatattgtttgagataaagcaatttctgagctccaa

SEQ ID NO: 70781 - DNA, 599 bp, Chicken  19866894346537_1
  misc_feature (1)..(17): n is any nucleotide
nnnnnnnnnnnnnnnnnctgcagatgtgacagcgataatggctccgtctctgctgaagcgtgtaacagaacgcataggcaggagcagaagctttgatctgctcgttgggtgcatttagtgctgtttgtctttggtttgtctgcaaggcgtgtaggcaaatgagtcgtggaaaactcttccctctagcgttcagtgctgctgcagcttgcaggcacaaccctcagctcccccccccccccccagctctgctgctcacctctgctttgtcctcccttctgctgcaggtgaacattatcccgrtcattgccaaagcagacaccatctccaagagcgagttgcacaagtttaagataaagatcatgagcgagctggtcagcaatggcgtgcagatctatcagttccccactgacgacgaagcagtggctgagatcaactccgtgatgaatgtgagtaacgctgccaactgcagggcttccagaagttgtgacaaattgaattgctgtgcacaaacccgtctgaaaagcaagtttccttgggatggtccagatgctaaatctatttcaaagtcaagctgtggatctgacagatgcctgaggcat

SEQ ID NO: 70782 - DNA, 600 bp, Chicken  19866894346542_1
aacagagcctcgatcattccatttctaagtaggggtaaaaacctaagcaacatcttcctttactcacatttaaggcagctgcctctaccaaactttccaaaatacagttgcactttggatagcattcaaagcagacttgagtgccatggtgcaacccatacacttcagctgtacaatacccctgatcacgctgcatccctgctaactagatatggcagctccttgctaacacacaactatcctatgtaagacagagagccaagacactcagaccaggcttccacattctgctctcagaayagaacacctttactgagtatcctaatggggcagggaatgtcatctttccagaattataagcctctccattatgcagagcaggaaaggatactccaggtgtttgttttagagctaggtaagcagagcattatgcaaacagttgacctggttaagcatctttttcaagcataagcactgtttcctgtttgttgttgcatttcatttcatttataactttatatakagaggttaggctgtagttccttgaatcacagagagcatcccaaagtgcctgctttccgtggacaaagaccatttccc

SEQ ID NO: 70783 - DNA, 600 bp, Chicken  19866894346542_2
tgctaacacacaactatcctatgtaagacagagagccaagacactcagaccaggcttccacattctgctctcagaayagaacacctttactgagtatcctaatggggcagggaatgtcatctttccagaattataagcctctccattatgcagagcaggaaaggatactccaggtgtttgttttagagctaggtaagcagagcattatgcaaacagttgacctggttaagcatctttttcaagcataagcactgtttcctgtttgttgttgcatttcatttcatttataactttatatakagaggttaggctgtagttccttgaatcacagagagcatcccaaagtgcctgctttccgtggacaaagaccatttcccttaacttcctacaaggtgggaaaggtggcactggatgtgtatttggcagcagaaaatatcactgagaaatacacttctgctgtgcaggggagaaaaagtaaagaaggttcatacaaaagtaggaactgtctgcaaactgtcatgttgacaaacaatcagtaacagcagaaaccaaaatagagcaaagcaaagcagtaacatgcaagaggatcttgaagcaagt

SEQ ID NO: 70784 - DNA, 600 bp, Chicken  19866894346548_1
gcagattaagagcacagcagcacaggcaggtgattagggtttgcatttctattccttaccgttcagctccagcatcagagttgaaacatgttcttgctaatgctgcctgcttgacaaactgtcaacacctctcctgctctgtgtttaatttagaacacactgcctgcaagactccaatctgttgctacatgtacctgtgcaagatatgtttttgccctggaactggatctactttatgccaacataacatgcctgctattactttctaatacagtccacttaggtagtgtccagtaaaaygtggagctggagctgttccctatggcctacatgaagctgaaggatgctatgtgataagtgtgcctttatgaaacagaatgggggtgctgtgctaagtatattttaaacagttgaatgaaattgcacattttgtttttgcagctataaacttgctgttggggagtagggagtggcacagtatttgctcagcatttacatagggaataaactgctagaaacctgcgattgatgatgataacaataactgtataagtatattgtataggtatttatgtccttcatacatgctgttattggcca

SEQ ID NO: 70785 - DNA, 599 bp, Chicken  19866894346550_1
  misc_feature (1)..(69): n is any nucleotide
nnnnnnnnnnnnnnnnnnnnnnnnnnnnnnnnnnnnnnnnnnnnnnnnnnnnnnnnnnnnnnnnnnnnnaaataatttttttcttaaatcacgtatgataaagttgtgtatggtatcttgaccacaaccttccaatcacctagtcttgctataagtgatgaatactaaacaatctacatatgagtgctcagagtttttagagaggctgaaaagtggaagctgagattctgatactgcttttgagaggatgtgttgtaatgcagtaagtctgcatgtcatctacatccagcctctgtaaayaggggctgaagtaataagagatcccctttcagaaaaataaatatacttagaaagacatgtaaattgaagagagaaatgcatgagagctgaccaagccacctatgtaagagtacttgtatgaattaagtatgcttttcagtttggatgatcactagtaaggaaaaaaacaacttcattgaattttctgaaggcacacagctgtctaggcttccattacagttaagggacactgagaaaatatgggagctgaggagaagctggggaactgctctatatagggccaaattgctctctaggtt

SEQ ID NO: 70786 - DNA, 600 bp, Chicken  19866894346550_2
aagagtacttgtatgaattaagtatgcttttcagtttggatgatcactagtaaggaaaaaaacaacttcattgaattttctgaaggcacacagctgtctaggcttccattacagttaagggacactgagaaaatatgggagctgaggagaagctggggaactgctctatatagggccaaattgctctctaggtttcattagtgacatctccattaattttctggtatctgggcagcagtagacactcaccttttaaacacaaataaacctcactttaggtccctttagacagacatttaygcaatttagcatagatttaatttccctgcacaactgaaaaaccctccttttttatgagagaaaaaggaaaaaayagaatggctgacatatagaaatatatataaaagaacaagaacaatgaaaatcagggcacttaggattttgaataattttacagttgtagatagcagttcttcaggtctctgtgagcccaccacatgtcctccatggtcttggtgattgagaggaaatatccagaagaggttctcctctatctagagggaaaagctctgccagaccttgatccaatgtgatccagca

SEQ ID NO: 70787 - DNA, 600 bp, Chicken  19866894346550_3
attttctgaaggcacacagctgtctaggcttccattacagttaagggacactgagaaaatatgggagctgaggagaagctggggaactgctctatatagggccaaattgctctctaggtttcattagtgacatctccattaattttctggtatctgggcagcagtagacactcaccttttaaacacaaataaacctcactttaggtccctttagacagacatttaygcaatttagcatagatttaatttccctgcacaactgaaaaaccctccttttttatgagagaaaaaggaaaaaayagaatggctgacatatagaaatatatataaaagaacaagaacaatgaaaatcagggcacttaggattttgaataattttacagttgtagatagcagttcttcaggtctctgtgagcccaccacatgtcctccatggtcttggtgattgagaggaaatatccagaagaggttctcctctatctagagggaaaagctctgccagaccttgatccaatgtgatccagcataatgcatygatgcattgtcagatctacagctgacatcacccactccatctaaaatagcagctgaaaagttcta

SEQ ID NO: 70788 - DNA, 600 bp, Chicken  19866894346550_4
catagatttaatttccctgcacaactgaaaaaccctccttttttatgagagaaaaaggaaaaaayagaatggctgacatatagaaatatatataaaagaacaagaacaatgaaaatcagggcacttaggattttgaataattttacagttgtagatagcagttcttcaggtctctgtgagcccaccacatgtcctccatggtcttggtgattgagaggaaatatccagaagaggttctcctctatctagagggaaaagctctgccagaccttgatccaatgtgatccagcataatgcatygatgcattgtcagatctacagctgacatcacccactccatctaaaatagcagctgaaaagttctataattatagtgacagatacagtccatgaaagagaggtattcttttccattatcatgacgataacagactacaaaaaatgcggagaattcagcatcaatgaaagaaaaattcagcaagttccagctaaatcaggaagatagtgctctgactggtcttttcttttaaagaaaacatgaaaatctccatgacaaaaggataaaatgatgaaatgacccactggcactgatttggctag

SEQ ID NO: 70789 - DNA, 599 bp, Chicken  19866894346552_1
  misc_feature (1)..(129): n is any nucleotide
nnnnnnnnnnnnnnnnnnnnnnnnnnnnnnnnnnnnnnnnnnnnnnnnnnnnnnnnnnnnnnnnnnnnnnnnnnnnnnnnnnnnnnnnnnnnnnnnnnnnnnnnnnnnnnnnnnnnnnnnnnnnnnnnnaagggagggaagtgaatgctgcctgtggccaggtctggaggagggaggggagctgctccagagggtatcagtggggtccggatcccctgaccctgcatctcccagtgccagcggagagcagagggatgcaggcacctgaagagtccaggaagggtggaggagggaaggggragagaattccttgccgtgggatgagaattttagggaagaggaccaagcaatagcctggtccagcagccatgagctgggaaagcgatctctctcagagctgtctccatgagcactttggtggagttgggttttgcacagtggagtggaaatggtgcatgtaaatgcatggactgtgtaagcttgactgtgtggttctagctgctccctcggggttggacttgcatccctcaaggctggtgtcttcttcacccaccacacacagtttgagtcacagtggatgagcattaacacactgcttc

SEQ ID NO: 70790 - DNA, 600 bp, Chicken  19866894346556_1
aatgttttcgttttggaaattttatggtttgggtatgtcttgtctaacagacacataagtaaatctgcagaaaatattgtgaaaataatctcctttatacatagacgtaagaagaggtaatttagaattgtcacagttgaggaaggtgaattttttgtatgtgatatctgttcatactgaaaaatacaacttcttaaaaaatctatagtttacctacagtatttatttctaaagaaagtaagaaaatatattaatgaatgaatgcaaagattttctttgaatgatatttctataaatacrattttgctcactactggtaggaagatgaacttgtcttttctccctgggtaaggtgaattctatataatatttatggtaacagaaataaactatctttgttatcgtattcagatatatttaaagtaattctatttttttttaatctgctcttagatgtacttgaaatttggacagatttatacctattagaaatatatttgagcataactaaaaccatatgattaaaatctcaaattttctttgaaaatcttcttttcccaaattccctcctattgttcaaatgcttccagtttgggggaa

SEQ ID NO: 70791 - DNA, 600 bp, Chicken  19866894346557_1
tgatttttttttttcttcagtttgttggatggaaaaaaaaaatctgcagttcaacttcagcgctgggaaacaatcctgtttcctcccctgcttctggcctagggagcagcgtgctccagggtcccagcgccgtctctcccgacactttggtccttcctgcaggtccccacatctcccggggctttgtcctcactgtctttccgttctgctccccaaaacctgctgctctcttccctcctcttccaggggaacggcagggctggggaaatgctcttgcaccgatatgaaaattgaaaggarcacataacaaaacaggcacggagctgctctgcggtgtgctcccagcacgggcrggcrctgggggctgtgctggacccccccgagtcccccatgctcacagccctgcaacgggcagcccaggcggatgctaccatctggcggcttgggctcgcagcagctctggctctgcactgctgcactgaggaaacgagcagcgagcagaacaaagccccggccccgctttgctggcgctgggggaaatagagctgcctcgtggagcagggctgctgtggccacagcaaccacctgggtgctgtgggg

SEQ ID NO: 70792 - DNA, 600 bp, Chicken  19866894346557_2
acttcagcgctgggaaacaatcctgtttcctcccctgcttctggcctagggagcagcgtgctccagggtcccagcgccgtctctcccgacactttggtccttcctgcaggtccccacatctcccggggctttgtcctcactgtctttccgttctgctccccaaaacctgctgctctcttccctcctcttccaggggaacggcagggctggggaaatgctcttgcaccgatatgaaaattgaaaggarcacataacaaaacaggcacggagctgctctgcggtgtgctcccagcacgggcrggcrctgggggctgtgctggacccccccgagtcccccatgctcacagccctgcaacgggcagcccaggcggatgctaccatctggcggcttgggctcgcagcagctctggctctgcactgctgcactgaggaaacgagcagcgagcagaacaaagccccggccccgctttgctggcgctgggggaaatagagctgcctcgtggagcagggctgctgtggccacagcaaccacctgggtgctgtgggggggtcgtcggtgcagccgtgcgtaaccccttccactaacagtgctgcatttcc

SEQ ID NO: 70793 - DNA, 600 bp, Chicken  19866894346557_3
cagcgctgggaaacaatcctgtttcctcccctgcttctggcctagggagcagcgtgctccagggtcccagcgccgtctctcccgacactttggtccttcctgcaggtccccacatctcccggggctttgtcctcactgtctttccgttctgctccccaaaacctgctgctctcttccctcctcttccaggggaacggcagggctggggaaatgctcttgcaccgatatgaaaattgaaaggarcacataacaaaacaggcacggagctgctctgcggtgtgctcccagcacgggcrggcrctgggggctgtgctggacccccccgagtcccccatgctcacagccctgcaacgggcagcccaggcggatgctaccatctggcggcttgggctcgcagcagctctggctctgcactgctgcactgaggaaacgagcagcgagcagaacaaagccccggccccgctttgctggcgctgggggaaatagagctgcctcgtggagcagggctgctgtggccacagcaaccacctgggtgctgtgggggggtcgtcggtgcagccgtgcgtaaccccttccactaacagtgctgcatttccagag

SEQ ID NO: 70794 - DNA, 581 bp, Chicken  19866894346564_1
gtgcagtatttccatttcaaatgggttttttttgtttttttttgacataactattaactcctgaacatcttttttaaatcatcaaagtttacaatagctctgcgcacctctgggcatttactcttgggagtggtgcggatctaccacaggaaaacaaaatacctcctgtcagactgcagtgaagctctgacaaaaatgaagacagcctttcgcccaggtatgtgcagaattctgcatcttcccacctgcattgctttctgcttttgttaactgtggttgtttcagttacgtacacatcaytgatctcaaaagacgttgaatgtattggtgcatactgctgatggttagtctggcttaatttaatgcaatttcaactctttgactcctttaaaagaagcaatatcttaaatggtcctacaagaagcagcttgaattcagcttccattgctagataattaattgtcaccactgatgactccaacaacatgtctaagaacgtggtagtgccagatctgactgtgttttgagctctggccacaaagctagcaagaagagaactaatatgatggaatcctttccaa

SEQ ID NO: 70795 - DNA, 600 bp, Chicken  19866894346572_1
tccacgactgcagtgcaccgtgagaaataactaaccctcactgcacagtgctgaaggaagtctacagtcaacttaaggctccatagatgaaaaaaagaggagtttgcagttctttgtggttctaaaataagcctagaggacactcagaggcttaatctatgctccatctgtttttgggcttagtcaaacttcagactgaaactgaatcattgggagggacagggagccccaaatggaccaggaccaaataaaatatttgcaaaaattgccaagcagtaaaaccaccaacccttgcaatgkctttatttatcagttatatgaaatagcaagtactttaacttgggttgcatctgatttgacattcaagtcagttctgaaatcaacggcaaagccactgacagctccagtgaaaaactggccaacgccagtccttgtgtgctatccttccgatttacactggtgatgaaaccagggaatggtgacttgacttcctctatgcctcacaggagaacagcagcgtttgaagaggtaggtattaccatggggggtcagagatgtatgttgatacacttcctaactgaatcaagctcaaaagataac

SEQ ID NO: 70796 - DNA, 600 bp, Chicken  19866894346573_1
acagttacttagagtatagggcaagaaaagaatcaagtccattactgctgatgacataagttagactatataagccctttcattaaatgcttggaaccctcttcaagttaattttcctttcccccctaatattctttctggaattctttcacagtggtcactctttcagtggtgttacatctccttctaatgacaagattcagttcacacacagagatattttatctctacttctttttgtaccaattttaacctttatgtattggcagagattacagatttaaataacaatattcatcytaaatattcagtataaaaatataaacctcattgacaccattaaaatgttgggtgattcaggacttttcaaatagcttggagtaaaatactggatccaataaaattaatgacaaaatctgacagattctattaaacrtgaatctcatcaatgctttccagtcgagaccacttgacatagatatctaattaggataataagtaaacaagcaaacaagtagcatttacaagtaaaagaaaacagaggaaatatgggtggattcccttctttctgtctttcaactgtttctccttatcattgaa

SEQ ID NO: 70797 - DNA, 600 bp, Chicken  19866894346573_2
tctggaattctttcacagtggtcactctttcagtggtgttacatctccttctaatgacaagattcagttcacacacagagatattttatctctacttctttttgtaccaattttaacctttatgtattggcagagattacagatttaaataacaatattcatcytaaatattcagtataaaaatataaacctcattgacaccattaaaatgttgggtgattcaggacttttcaaatagcttggagtaaaatactggatccaataaaattaatgacaaaatctgacagattctattaaacrtgaatctcatcaatgctttccagtcgagaccacttgacatagatatctaattaggataataagtaaacaagcaaacaagtagcatttacaagtaaaagaaaacagaggaaatatgggtggattcccttctttctgtctttcaactgtttctccttatcattgaaacatggataatgcatgagcactataaaaagaaaccattaagcaaaagcatattaagcatatttatactcttcttttctacataaatttgaaggctgatcacttctttcaatacctctattaattctttgttccaaa

SEQ ID NO: 70798 - DNA, 600 bp, Chicken  19866894346577_1
agggtaacgacttagtcaccacagttgccctgatcctcaattttatatgaaatttctaaaaataaacatctgcgattacatgagaacattttactgggttttagacccttggatgtttcaatgaagtcagggagtttaccaggcaacagctgttaaacaagttaaactcccatttaactcatcaaaaaaaggaaacacaaacgtaaaaactgacaatcggttgtaaatcacaccaccccagatgctactgtgtggtgaagaacattaaatttagctcttctcagtctttgaagctgagastttttccacaggagctgaagaaaactagagtkaaygctgaatttccatttcccagacgtttcactgtaagaattaacttgatgtggagacatttcttaatttcctttgaaaatcctggttcctgagtctacagagtcgagagtcctccccatyctggctrgagatcagaggagttcatagcaacctctctcccctgggttgcctaaaagrcgcacrcagtgttagttcagatttggtgccaaagcaagacctcctgagctgggctctgctgcctgtggaggtgaagactgccagcgaagt

SEQ ID NO: 70799 - DNA, 600 bp, Chicken  19866894346577_2
atcctcaattttatatgaaatttctaaaaataaacatctgcgattacatgagaacattttactgggttttagacccttggatgtttcaatgaagtcagggagtttaccaggcaacagctgttaaacaagttaaactcccatttaactcatcaaaaaaaggaaacacaaacgtaaaaactgacaatcggttgtaaatcacaccaccccagatgctactgtgtggtgaagaacattaaatttagctcttctcagtctttgaagctgagastttttccacaggagctgaagaaaactagagtkaaygctgaatttccatttcccagacgtttcactgtaagaattaacttgatgtggagacatttcttaatttcctttgaaaatcctggttcctgagtctacagagtcgagagtcctccccatyctggctrgagatcagaggagttcatagcaacctctctcccctgggttgcctaaaagrcgcacrcagtgttagttcagatttggtgccaaagcaagacctcctgagctgggctctgctgcctgtggaggtgaagactgccagcgaagtgacaaaataggaatgctggaggttcagagatg

SEQ ID NO: 70800 - DNA, 600 bp, Chicken  19866894346577_3
ctcaattttatatgaaatttctaaaaataaacatctgcgattacatgagaacattttactgggttttagacccttggatgtttcaatgaagtcagggagtttaccaggcaacagctgttaaacaagttaaactcccatttaactcatcaaaaaaaggaaacacaaacgtaaaaactgacaatcggttgtaaatcacaccaccccagatgctactgtgtggtgaagaacattaaatttagctcttctcagtctttgaagctgagastttttccacaggagctgaagaaaactagagtkaaygctgaatttccatttcccagacgtttcactgtaagaattaacttgatgtggagacatttcttaatttcctttgaaaatcctggttcctgagtctacagagtcgagagtcctccccatyctggctrgagatcagaggagttcatagcaacctctctcccctgggttgcctaaaagrcgcacrcagtgttagttcagatttggtgccaaagcaagacctcctgagctgggctctgctgcctgtggaggtgaagactgccagcgaagtgacaaaataggaatgctggaggttcagagatgcaa

SEQ ID NO: 70801 - DNA, 600 bp, Chicken  19866894346577_4
taaacaagttaaactcccatttaactcatcaaaaaaaggaaacacaaacgtaaaaactgacaatcggttgtaaatcacaccaccccagatgctactgtgtggtgaagaacattaaatttagctcttctcagtctttgaagctgagastttttccacaggagctgaagaaaactagagtkaaygctgaatttccatttcccagacgtttcactgtaagaattaacttgatgtggagacatttcttaatttcctttgaaaatcctggttcctgagtctacagagtcgagagtcctccccatyctggctrgagatcagaggagttcatagcaacctctctcccctgggttgcctaaaagrcgcacrcagtgttagttcagatttggtgccaaagcaagacctcctgagctgggctctgctgcctgtggaggtgaagactgccagcgaagtgacaaaataggaatgctggaggttcagagatgcaaagcaaacctctttttccccccttttctttgttctgttttgtctccctcattcaggacagcttttgccagctgttgcttcctacgctcccacttgctgatggagtcccaccatctttga

SEQ ID NO: 70802 - DNA, 600 bp, Chicken  19866894346577_5
gttaaactcccatttaactcatcaaaaaaaggaaacacaaacgtaaaaactgacaatcggttgtaaatcacaccaccccagatgctactgtgtggtgaagaacattaaatttagctcttctcagtctttgaagctgagastttttccacaggagctgaagaaaactagagtkaaygctgaatttccatttcccagacgtttcactgtaagaattaacttgatgtggagacatttcttaatttcctttgaaaatcctggttcctgagtctacagagtcgagagtcctccccatyctggctrgagatcagaggagttcatagcaacctctctcccctgggttgcctaaaagrcgcacrcagtgttagttcagatttggtgccaaagcaagacctcctgagctgggctctgctgcctgtggaggtgaagactgccagcgaagtgacaaaataggaatgctggaggttcagagatgcaaagcaaacctctttttccccccttttctttgttctgttttgtctccctcattcaggacagcttttgccagctgttgcttcctacgctcccacttgctgatggagtcccaccatctttgagctctgc

SEQ ID NO: 70803 - DNA, 591 bp, Chicken  19866894346577_6
tgacaatcggttgtaaatcacaccaccccagatgctactgtgtggtgaagaacattaaatttagctcttctcagtctttgaagctgagastttttccacaggagctgaagaaaactagagtkaaygctgaatttccatttcccagacgtttcactgtaagaattaacttgatgtggagacatttcttaatttcctttgaaaatcctggttcctgagtctacagagtcgagagtcctccccatyctggctrgagatcagaggagttcatagcaacctctctcccctgggttgcctaaaagrcgcacrcagtgttagttcagatttggtgccaaagcaagacctcctgagctgggctctgctgcctgtggaggtgaagactgccagcgaagtgacaaaataggaatgctggaggttcagagatgcaaagcaaacctctttttccccccttttctttgttctgttttgtctccctcattcaggacagcttttgccagctgttgcttcctacgctcccacttgctgatggagtcccaccatctttgagctctgcatgacctgtcacttctctgtccgctttacaatacacaggag

SEQ ID NO: 70804 - DNA, 585 bp, Chicken  19866894346577_7
tcggttgtaaatcacaccaccccagatgctactgtgtggtgaagaacattaaatttagctcttctcagtctttgaagctgagastttttccacaggagctgaagaaaactagagtkaaygctgaatttccatttcccagacgtttcactgtaagaattaacttgatgtggagacatttcttaatttcctttgaaaatcctggttcctgagtctacagagtcgagagtcctccccatyctggctrgagatcagaggagttcatagcaacctctctcccctgggttgcctaaaagrcgcacrcagtgttagttcagatttggtgccaaagcaagacctcctgagctgggctctgctgcctgtggaggtgaagactgccagcgaagtgacaaaataggaatgctggaggttcagagatgcaaagcaaacctctttttccccccttttctttgttctgttttgtctccctcattcaggacagcttttgccagctgttgcttcctacgctcccacttgctgatggagtcccaccatctttgagctctgcatgacctgtcacttctctgtccgctttacaatacacaggag

SEQ ID NO: 70805 - DNA, 600 bp, Chicken  19866894346582_1
tgctcccttcaggtgccatgtcatacaagagggacagactgcccagaacaaaacaacagaggtccctctgagccaagcaaagaagtaaacagatagcttgtccctgaatctggtcctaaaaatgttttgcacttccacagcatcttccacttctgcaccatcctgcatttcacaataagaactatgtgttttgtgttatctttaggcaacagagaacactcagagaaactgaggcatgactgttaaaccaacaaaacgcgaagtgctaggtaagagctgatgaatgtttttgattctacrttaagctgcagacatggtttaaacgcagggtaagtttcatgtgcattgggccatagtttctgaaggtgaggttttcagtgaattattatttggtatttgtcgtgcagtacaactcttgatttaaatgcaggaaaacactttgggcacaacaggctcgaaacaatgaactgaacctaactttgtccaactcagcattcagaattgttattggcagggatttgtagaaaggaaccaaaaatcataattcagcaaattccttctatcacggctcaactttctgtcctcttattaaattattaa

SEQ ID NO: 70806 - DNA, 600 bp, Chicken  19866894346587_1
taccacgtaaaggttaagatagcattgtagcccggaaataatctcatttattcttttctcccagcacaaactttctttgaaggatgaaaggttgttgatgattggacttgtgttttaaagaaggggataaatggttattgagcagatcacttcaaagttgctgcagtggagcgtgccaattaataattctggtgtagtttggctcaaaggacagatcgatagctgacttctctccaggtattgatcccgaggagttgaatgagccaaggtgttggctcagggcaacctgagcaaagtctytgtttgtaagtgagtggctgaatgagccgaggtagaggattaggtttgtcaataaaagagtcccttcscagaggctcggagggatgctaggaaactacagcacttgaaacttactcagtgctcagtkttcccatgtccgatcctatcagtgtcacagtggtactaagaacacctcctgctccaagtgcatcgctgcttttcttctgtgcccaccacccagaacagattcggtgctgatgtttgccacggatcaggccgtcacagcggctgcttccttccccgggctcctgatgacttcag

SEQ ID NO: 70807 - DNA, 600 bp, Chicken  19866894346587_2
aactttctttgaaggatgaaaggttgttgatgattggacttgtgttttaaagaaggggataaatggttattgagcagatcacttcaaagttgctgcagtggagcgtgccaattaataattctggtgtagtttggctcaaaggacagatcgatagctgacttctctccaggtattgatcccgaggagttgaatgagccaaggtgttggctcagggcaacctgagcaaagtctytgtttgtaagtgagtggctgaatgagccgaggtagaggattaggtttgtcaataaaagagtcccttcscagaggctcggagggatgctaggaaactacagcacttgaaacttactcagtgctcagtkttcccatgtccgatcctatcagtgtcacagtggtactaagaacacctcctgctccaagtgcatcgctgcttttcttctgtgcccaccacccagaacagattcggtgctgatgtttgccacggatcaggccgtcacagcggctgcttccttccccgggctcctgatgacttcagcccttaatcctttaagccactctgtcctgtatctcattaaaagaccggcactctccaggggatggggc

SEQ ID NO: 70808 - DNA, 600 bp, Chicken  19866894346587_3
taaatggttattgagcagatcacttcaaagttgctgcagtggagcgtgccaattaataattctggtgtagtttggctcaaaggacagatcgatagctgacttctctccaggtattgatcccgaggagttgaatgagccaaggtgttggctcagggcaacctgagcaaagtctytgtttgtaagtgagtggctgaatgagccgaggtagaggattaggtttgtcaataaaagagtcccttcscagaggctcggagggatgctaggaaactacagcacttgaaacttactcagtgctcagtkttcccatgtccgatcctatcagtgtcacagtggtactaagaacacctcctgctccaagtgcatcgctgcttttcttctgtgcccaccacccagaacagattcggtgctgatgtttgccacggatcaggccgtcacagcggctgcttccttccccgggctcctgatgacttcagcccttaatcctttaagccactctgtcctgtatctcattaaaagaccggcactctccaggggatggggcagcactgcaaatgggtcactgccttgtactggtgggggatactcctgtaaataaacata

SEQ ID NO: 70809 - DNA, 599 bp, Chicken  19866894346594_1
  misc_feature (1)..(179): n is any nucleotide
nnnnnnnnnnnnnnnnnnnnnnnnnnnnnnnnnnnnnnnnnnnnnnnnnnnnnnnnnnnnnnnnnnnnnnnnnnnnnnnnnnnnnnnnnnnnnnnnnnnnnnnnnnnnnnnnnnnnnnnnnnnnnnnnnnnnnnnnnnnnnnnnnnnnnnnnnnnnnnnnnnnnnnnnnnnnnnnnnnnccatggagtcagatgtcggaacagaaggaaagtcttactgttcagataaaggctcaagaaggagttttacagcccaccctccactataggttcctccatgataagtactgctgcaagaccragaacagggtctcatactgtgtgagtctatggttccatatgttgcaaagatgctgcttatcactacagtcacatgttcctgcacagaacacaaaactgtgccagcagttgagatttgttcttctatgttcttccaaagaaggttgccattgcccagggaaaattgagtggtattccctgaggttcccctctgatttttgcatcttgcaaagcatagatcmcagggatgcattgagacacagtatgacatgagcatactctcttccacgctgccatgacattarcaggtgctaaacttta

SEQ ID NO: 70810 - DNA, 600 bp, Chicken  19866894346594_2
tcagataaaggctcaagaaggagttttacagcccaccctccactataggttcctccatgataagtactgctgcaagaccragaacagggtctcatactgtgtgagtctatggttccatatgttgcaaagatgctgcttatcactacagtcacatgttcctgcacagaacacaaaactgtgccagcagttgagatttgttcttctatgttcttccaaagaaggttgccattgcccagggaaaattgagtggtattccctgaggttcccctctgatttttgcatcttgcaaagcatagatcmcagggatgcattgagacacagtatgacatgagcatactctcttccacgctgccatgacattarcaggtgctaaactttaccacaamctccctacttccccatgtcagtgtcttgtcactttggtgcactttgctacccatcactcttccccatcctggttgcaattttcacgatgcctctgcttccaaacccatgcaataygtactcccacgcccacatgtctccaggtcrttctttgactgcccatttctggactgacttatcaaaaacaagtcttctctgcccagaaaacactctggg

SEQ ID NO: 70811 - DNA, 600 bp, Chicken  19866894346594_3
gtactgctgcaagaccragaacagggtctcatactgtgtgagtctatggttccatatgttgcaaagatgctgcttatcactacagtcacatgttcctgcacagaacacaaaactgtgccagcagttgagatttgttcttctatgttcttccaaagaaggttgccattgcccagggaaaattgagtggtattccctgaggttcccctctgatttttgcatcttgcaaagcatagatcmcagggatgcattgagacacagtatgacatgagcatactctcttccacgctgccatgacattarcaggtgctaaactttaccacaamctccctacttccccatgtcagtgtcttgtcactttggtgcactttgctacccatcactcttccccatcctggttgcaattttcacgatgcctctgcttccaaacccatgcaataygtactcccacgcccacatgtctccaggtcrttctttgactgcccatttctggactgacttatcaaaaacaagtcttctctgcccagaaaacactctgggccaccatcagctctgtcacaacattttagcagtagctggtcactggatcggcggccagaggaa

SEQ ID NO: 70812 - DNA, 600 bp, Chicken  19866894346594_4
gggtctcatactgtgtgagtctatggttccatatgttgcaaagatgctgcttatcactacagtcacatgttcctgcacagaacacaaaactgtgccagcagttgagatttgttcttctatgttcttccaaagaaggttgccattgcccagggaaaattgagtggtattccctgaggttcccctctgatttttgcatcttgcaaagcatagatcmcagggatgcattgagacacagtatgacatgagcatactctcttccacgctgccatgacattarcaggtgctaaactttaccacaamctccctacttccccatgtcagtgtcttgtcactttggtgcactttgctacccatcactcttccccatcctggttgcaattttcacgatgcctctgcttccaaacccatgcaataygtactcccacgcccacatgtctccaggtcrttctttgactgcccatttctggactgacttatcaaaaacaagtcttctctgcccagaaaacactctgggccaccatcagctctgtcacaacattttagcagtagctggtcactggatcggcggccagaggaacatgtgtttgcttcagggtttga

SEQ ID NO: 70813 - DNA, 506 bp, Chicken  19866894346594_5
tctatgttcttccaaagaaggttgccattgcccagggaaaattgagtggtattccctgaggttcccctctgatttttgcatcttgcaaagcatagatcmcagggatgcattgagacacagtatgacatgagcatactctcttccacgctgccatgacattarcaggtgctaaactttaccacaamctccctacttccccatgtcagtgtcttgtcactttggtgcactttgctacccatcactcttccccatcctggttgcaattttcacgatgcctctgcttccaaacccatgcaataygtactcccacgcccacatgtctccaggtcrttctttgactgcccatttctggactgacttatcaaaaacaagtcttctctgcccagaaaacactctgggccaccatcagctctgtcacaacattttagcagtagctggtcactggatcggcggccagaggaacatgtgtttgcttcagggtttgatttcctccctaggctctccat

SEQ ID NO: 70814 - DNA, 476 bp, Chicken  19866894346594_6
cccagggaaaattgagtggtattccctgaggttcccctctgatttttgcatcttgcaaagcatagatcmcagggatgcattgagacacagtatgacatgagcatactctcttccacgctgccatgacattarcaggtgctaaactttaccacaamctccctacttccccatgtcagtgtcttgtcactttggtgcactttgctacccatcactcttccccatcctggttgcaattttcacgatgcctctgcttccaaacccatgcaataygtactcccacgcccacatgtctccaggtcrttctttgactgcccatttctggactgacttatcaaaaacaagtcttctctgcccagaaaacactctgggccaccatcagctctgtcacaacattttagcagtagctggtcactggatcggcggccagaggaacatgtgtttgcttcagggtttgatttcctccctaggctctccat

SEQ ID NO: 70815 - DNA, 600 bp, Chicken  19866894346596_1
gaattatcttctatttattcagcaagtggagacatcttctcttgcttaaatactgtaagattaacactaaaaatctgatcgctgaattattgaattttcctaaaaggaatttagcccagttacttaaggaaaatgccctttccagaatttgaatatggctgtgagaacagcaaggagaggaagaaactgatatgtaaactacaaagtgcattctgtttttcagtataagattaaaccctgatgatgccgcagatgtggggaaaagcataaacatcaagaagagaagcattatgtaagacyatttaacaattcaaaaggacacagtaccacgtaaagggataaaagttagaaaaggaacacttagagaaaattagaaggaaaacaaaagtccttcgtaacactctcagaaagtgctagaaacactggaaacagcccagcaaggagctgggggtctcatgatgctaaatgtacagaaaaagaagtcttcagtacatgactgaaaaaactttacagtgagacatgagcatattctaagacagtttgtcagctacaactaacacgtggttgttgaagttccttaaatagaaatactgaatgcca

SEQ ID NO: 70816 - DNA, 600 bp, Chicken  19866894346597_1
ttcttgtttaacacacttttctgcattaccagtgaatttgaggcagctagaaaagggctggctggtttactgatacctgcagcaagattcttaagctctaatacaaagggacttcccaactgacaaagcacttttgcttctatttcccataaatctttcttttcaataacattttcatgcattgatttttatgcttttattttttctcaactttcatctttattattgtctctttaacttcccctccaggtacgttactcataacaacatcctcctgacagagcatttcacaagttcccrgtctgactcatgtgatttctcacccaaattctttttgtaaggcattctgccattcagatccagtagttctgcactgtttcttttttcattcacttttttttatttgayctgacctaaaccagtgaaatgctaaatgatattttaaaagtcagtcagctgtgatcttctgaacaaattgtttgtaccgtcacatatttggtaacatattttcaagtaatgagcagctattttgctaaaattctcctaggaaaccactagggatcttaagtaaacagagaactgttacttgaaacacayttc

SEQ ID NO: 70817 - DNA, 600 bp, Chicken  19866894346597_2
ggacttcccaactgacaaagcacttttgcttctatttcccataaatctttcttttcaataacattttcatgcattgatttttatgcttttattttttctcaactttcatctttattattgtctctttaacttcccctccaggtacgttactcataacaacatcctcctgacagagcatttcacaagttcccrgtctgactcatgtgatttctcacccaaattctttttgtaaggcattctgccattcagatccagtagttctgcactgtttcttttttcattcacttttttttatttgayctgacctaaaccagtgaaatgctaaatgatattttaaaagtcagtcagctgtgatcttctgaacaaattgtttgtaccgtcacatatttggtaacatattttcaagtaatgagcagctattttgctaaaattctcctaggaaaccactagggatcttaagtaaacagagaactgttacttgaaacacayttcctccaaatagattgtctaaatttgggtcactttgaataactggagttgcgcagacatttggattttgyaatatgatgtccatataaatttctgcactgaaaaaaaaca

SEQ ID NO: 70818 - DNA, 469 bp, Chicken  19866894346597_3
ccrgtctgactcatgtgatttctcacccaaattctttttgtaaggcattctgccattcagatccagtagttctgcactgtttcttttttcattcacttttttttatttgayctgacctaaaccagtgaaatgctaaatgatattttaaaagtcagtcagctgtgatcttctgaacaaattgtttgtaccgtcacatatttggtaacatattttcaagtaatgagcagctattttgctaaaattctcctaggaaaccactagggatcttaagtaaacagagaactgttacttgaaacacayttcctccaaatagattgtctaaatttgggtcactttgaataactggagttgcgcagacatttggattttgyaatatgatgtccatataaatttctgcactgaaaaaaaacatgttctgtgatttattgtgtgcagacaagccttgagcaacagaagtgtttgtcacgtg

SEQ ID NO: 70819 - DNA, 398 bp, Chicken  19866894346597_4
ctgcactgtttcttttttcattcacttttttttatttgayctgacctaaaccagtgaaatgctaaatgatattttaaaagtcagtcagctgtgatcttctgaacaaattgtttgtaccgtcacatatttggtaacatattttcaagtaatgagcagctattttgctaaaattctcctaggaaaccactagggatcttaagtaaacagagaactgttacttgaaacacayttcctccaaatagattgtctaaatttgggtcactttgaataactggagttgcgcagacatttggattttgyaatatgatgtccatataaatttctgcactgaaaaaaaacatgttctgtgatttattgtgtgcagacaagccttgagcaacagaagtgtttgtcacgtg

SEQ ID NO: 70820 - DNA, 600 bp, Chicken  19866894346608_1
ttttatagaagtaaactgcaacttgtgttattaaaggcagaggtggtgagaaaaatacagttcatcagtatattggcaaagtatgtgcaggtaataatcacaactgtatcacagtgtgttaatgagcagtgacagatttgaagctttcaaataatttatggaaaacttggatttctattcatgatttgtggatgttgattatttctcggtccaggaccagaaaattggccataaagaagactttatggatgctcaattgaacatctatgtagctggttattatgtttttagaacagattyggggaaataaaactttattgagcagaaattcaaaccattttgtttgaggcagaacacactgtaaacgttttaaaaatatgatataytagattttgttcagagttatttcagatcgctgtgctgttgtctggagctcttttgtataattataccattggacttattgttcaaagttcacttactggaattgtggttttgtttttgtagtaacctcagtttgttgtccgcaggaactgacaaagagagaggttgaatatattgcactctcaagggacaccacggagacagacctcaaacagc

SEQ ID NO: 70821 - DNA, 600 bp, Chicken  19866894346608_2
gcaggtaataatcacaactgtatcacagtgtgttaatgagcagtgacagatttgaagctttcaaataatttatggaaaacttggatttctattcatgatttgtggatgttgattatttctcggtccaggaccagaaaattggccataaagaagactttatggatgctcaattgaacatctatgtagctggttattatgtttttagaacagattyggggaaataaaactttattgagcagaaattcaaaccattttgtttgaggcagaacacactgtaaacgttttaaaaatatgatataytagattttgttcagagttatttcagatcgctgtgctgttgtctggagctcttttgtataattataccattggacttattgttcaaagttcacttactggaattgtggttttgtttttgtagtaacctcagtttgttgtccgcaggaactgacaaagagagaggttgaatatattgcactctcaagggacaccacggagacagacctcaaacagcgacgagagatccgagatggcagtgctttttatcttgatcaggcaagttgcagtcacacaccacctcattgctgtttacaactggtt

SEQ ID NO: 70822 - DNA, 600 bp, Chicken  19866894346609_1
agaaatgctacaaattgcagttcacaaaggtattgtaacatttcaaagctacaagcttcatcagaagccaagtttctgactcctcatgcatatatatttgctcaaattaatagtagtcagtagaaatctgatgtgaaacccacataaaataacctggcaagtttgtaagggttaagaggctccagagctatcaaacatgagtaacttgctcccaaacctctagttacgctgcagagcttgtttgccgtgcttagaaacttgtatatcaaaaggataaaaacaaatgaaaaattcaccctrtaaaggcaagatagtggttatccatttgcctgagacacagagcttgagcagttaggcttttatagcatggaaggataaaagaatgtaacagatctatacacgaaggtctatcattctagcaaaaatctgtgatattatgccttgctcacactcgtaaaaacaaattatatttacaaaggcatactgcatttactgttgatcccatcctcccagaacaaaagctgctgatgtaaatgtctttgctatacaaggcactgaagatctgatcttgaatttctttcagtctatgagctcacccca

SEQ ID NO: 70823 - DNA, 599 bp, Chicken  19866894346610_1
  misc_feature (1)..(91): n is any nucleotide
nnnnnnnnnnnnnnnnnnnnnnnnnnnnnnnnnnnnnnnnnnnnnnnnnnnnnnnnnnnnnnnnnnnnnnnnnnnnnnnnnnnnnnnnnnntttttttttttttttttaaagaatctattccaacccaaacaaaacaatatcagtactgggggaaaattaaataaaagaatgagttagttataagtcatcaaattcttttctttctctctctctgctgcttattctattaaggtagaatgtagcagttaccatgttgcgcaactatatctacttatcacggtttaagcaaatctacacgwtgcatttctgcacatgcctaagcaaggtgcaaaagtcttcatccatacaacatctcatgtgagtatgtgaggagctcagagataatgctagcaccaagttgaaaatttttgaggagaggctcctaataatatcaaataactgatttttctctcggtatttttgcaggtcattctttgtaaaagtattggtatagcggagtgtgcaaagaatctaatcagcttttaayacaggttttraaaagacacaggcttaaaacaggaaaatccaaccatctgaaaaatacagaaaatstcttcct

SEQ ID NO: 70824 - DNA, 600 bp, Chicken  19866894346610_2
ttaaggtagaatgtagcagttaccatgttgcgcaactatatctacttatcacggtttaagcaaatctacacgwtgcatttctgcacatgcctaagcaaggtgcaaaagtcttcatccatacaacatctcatgtgagtatgtgaggagctcagagataatgctagcaccaagttgaaaatttttgaggagaggctcctaataatatcaaataactgatttttctctcggtatttttgcaggtcattctttgtaaaagtattggtatagcggagtgtgcaaagaatctaatcagcttttaayacaggttttraaaagacacaggcttaaaacaggaaaatccaaccatctgaaaaatacagaaaatstcttcctttttgtttatctaaataaatgaaatatcagggaaattcccaaagccaatcaacattttgtttagtgtttgcattggctcgggttcataactgaagctctatatttaacaagccatcctgagaaggctagatagtcatggctaatggcaatggaagcaatttccccttgtggtgtcagagctgggcttctgttgcagtaagcctcgagctttgatgtctgcttgacacc

SEQ ID NO: 70825 - DNA, 600 bp, Chicken  19866894346610_3
atgtagcagttaccatgttgcgcaactatatctacttatcacggtttaagcaaatctacacgwtgcatttctgcacatgcctaagcaaggtgcaaaagtcttcatccatacaacatctcatgtgagtatgtgaggagctcagagataatgctagcaccaagttgaaaatttttgaggagaggctcctaataatatcaaataactgatttttctctcggtatttttgcaggtcattctttgtaaaagtattggtatagcggagtgtgcaaagaatctaatcagcttttaayacaggttttraaaagacacaggcttaaaacaggaaaatccaaccatctgaaaaatacagaaaatstcttcctttttgtttatctaaataaatgaaatatcagggaaattcccaaagccaatcaacattttgtttagtgtttgcattggctcgggttcataactgaagctctatatttaacaagccatcctgagaaggctagatagtcatggctaatggcaatggaagcaatttccccttgtggtgtcagagctgggcttctgttgcagtaagcctcgagctttgatgtctgcttgacaccacttagaaac

SEQ ID NO: 70826 - DNA, 600 bp, Chicken  19866894346610_4
ctacacgwtgcatttctgcacatgcctaagcaaggtgcaaaagtcttcatccatacaacatctcatgtgagtatgtgaggagctcagagataatgctagcaccaagttgaaaatttttgaggagaggctcctaataatatcaaataactgatttttctctcggtatttttgcaggtcattctttgtaaaagtattggtatagcggagtgtgcaaagaatctaatcagcttttaayacaggttttraaaagacacaggcttaaaacaggaaaatccaaccatctgaaaaatacagaaaatstcttcctttttgtttatctaaataaatgaaatatcagggaaattcccaaagccaatcaacattttgtttagtgtttgcattggctcgggttcataactgaagctctatatttaacaagccatcctgagaaggctagatagtcatggctaatggcaatggaagcaatttccccttgtggtgtcagagctgggcttctgttgcagtaagcctcgagctttgatgtctgcttgacaccacttagaaacattacattaattaagaatataaaactgagaactattgccacattaattgaaagct

SEQ ID NO: 70827 - DNA, 599 bp, Chicken  19866894346616_1
  misc_feature (1)..(93): n is any nucleotide
nnnnnnnnnnnnnnnnnnnnnnnnnnnnnnnnnnnnnnnnnnnnnnnnnnnnnnnnnnnnnnnnnnnnnnnnnnnnnnnnnnnnnnnnnnnnncgtcacccgcgtggtggcggggggggggggagggatgcggtggccgagttgccgcccctgggtgctgcgtgccgtgaggcgcctcagggctcccctcagcgaagcgtggctctgcgcgctcacgcctcctcctcgtcgtcgtcccggagaagttcctccgagcccagcccgcgtctcgggagagaaaagccacggggatgcaaggakcgaggctgccggccgaggggagaggagcgcgggctgagggagcggggtcccggctgccgtgaggggatcgccgctgtccgagrgaaactgcagtcggtgcagcggccggcaatcatcgaaacccctgttccaaaagttatgcgagccttttaagcgcagggtaagcccgggaaaaggtcttcccctccgccccacgctgccccggagggagcagagccgtacccgcgaggcagcagcggctgtcgaggcgtgaggtgcggccccgcgctctgccacctcccgctgccctaacgtccccg

SEQ ID NO: 70828 - DNA, 599 bp, Chicken  19866894346616_2
  misc_feature (1)..(10): n is any nucleotide
nnnnnnnnnncgtcacccgcgtggtggcggggggggggggagggatgcggtggccgagttgccgcccctgggtgctgcgtgccgtgaggcgcctcagggctcccctcagcgaagcgtggctctgcgcgctcacgcctcctcctcgtcgtcgtcccggagaagttcctccgagcccagcccgcgtctcgggagagaaaagccacggggatgcaaggakcgaggctgccggccgaggggagaggagcgcgggctgagggagcggggtcccggctgccgtgaggggatcgccgctgtccgagrgaaactgcagtcggtgcagcggccggcaatcatcgaaacccctgttccaaaagttatgcgagccttttaagcgcagggtaagcccgggaaaaggtcttcccctccgccccacgctgccccggagggagcagagccgtacccgcgaggcagcagcggctgtcgaggcgtgaggtgcggccccgcgctctgccacctcccgctgccctaacgtccccggctggcacgtcctcgagccggggagagagggctcacccctgctgctgcctccgagcgcgcagcgggcagctcccagcaggtgg

SEQ ID NO: 70829 - DNA, 600 bp, Chicken  19866894346620_1
gactggagagttgggcagagaaagctgatgaagttcaacagaggcagcttaggggctgacctactggatagaagctctaaagagaaggacataggtgttatagtggacaacaacaagttgactatgagccagcattgtattcttgtggccaagaaggctgattgtatcccagggtgcattataaaaagttgtggccaagaagttgagtgaggagatcctccctttctactctgccctggtgaggcatggaaaagactcagaggggatcttagcaacacaagtatctaaggatgtcaagargatagrgccaggctctcttttggtggtgcccagcaacagaaaaagaggcaatgggtacaaactggaacatatgaagttccatgcaaacatgaaaaaaaaccttctttattttgcgagttacaagcactgcaacaggctgcccagagagactgtggagtctccttccctggagatattcaaaacctgcctggatgctttcctttgcagcctactctggggaacctgttttagcagggagttggatttgatgatctccagaggtcccttccaatccctatgattctgtgattgtrtaactgc

SEQ ID NO: 70830 - DNA, 600 bp, Chicken  19866894346620_2
agagttgggcagagaaagctgatgaagttcaacagaggcagcttaggggctgacctactggatagaagctctaaagagaaggacataggtgttatagtggacaacaacaagttgactatgagccagcattgtattcttgtggccaagaaggctgattgtatcccagggtgcattataaaaagttgtggccaagaagttgagtgaggagatcctccctttctactctgccctggtgaggcatggaaaagactcagaggggatcttagcaacacaagtatctaaggatgtcaagargatagrgccaggctctcttttggtggtgcccagcaacagaaaaagaggcaatgggtacaaactggaacatatgaagttccatgcaaacatgaaaaaaaaccttctttattttgcgagttacaagcactgcaacaggctgcccagagagactgtggagtctccttccctggagatattcaaaacctgcctggatgctttcctttgcagcctactctggggaacctgttttagcagggagttggatttgatgatctccagaggtcccttccaatccctatgattctgtgattgtrtaactgcgcagca

SEQ ID NO: 70831 - DNA, 600 bp, Chicken  19866894346620_3
tcaagargatagrgccaggctctcttttggtggtgcccagcaacagaaaaagaggcaatgggtacaaactggaacatatgaagttccatgcaaacatgaaaaaaaaccttctttattttgcgagttacaagcactgcaacaggctgcccagagagactgtggagtctccttccctggagatattcaaaacctgcctggatgctttcctttgcagcctactctggggaacctgttttagcagggagttggatttgatgatctccagaggtcccttccaatccctatgattctgtgattgtrtaactgcgcagcaataggaccatagtagggcagaaactgaaaaacactgtgcaagcaaaatgtctgcctgtccttttctcaaagctttgttctattaccagaagaaacccaacaatcttttctctctcattttcagagctgccttgatctcttgtccttttcaagtcctctgcctcactacccaccagaagtagctagagtagccattacaatactgcaaacctaatgaacaagacaggctggaatgaaagaggaatatttttctctaacttggacatacaggaggacttggaaattagt

SEQ ID NO: 70832 - DNA, 600 bp, Chicken  19866894346621_1
ctccacggcacggaactctgtttggaagtttcgtttacatgtttatttagaggagaacacgcacggccgtcttccctcgctgcagaaccaccattagctgcaggaagctcttagaggaaatttcagcgtggaactcagcagggacagcacttgttaatacctcagtatcccgcttaataacagccaccctccagaaggagggcgatgggtttgtggtgaggaaacctgctgtgatttttaacagccgattcacatgaatggttactgtatttgatttatacatttcatttcgtacacacrcacacactttctctttttctcatgctgtcagcttccttcctccttccagcttctccctgcagctctgagtggcgtagcgagaagagaacattccaggctctgcatgaagacatccacctgatgactctacagttcccctcaagatactgtgcggatctttgcattcaaatacaggccggcctcccagacatttctgagacgaaatcacagaggtggcgattcattacagcatctgacacctttagggatgaaagaaaatcccctccatgccttgtaaccacttgttcaggacctggcagg

SEQ ID NO: 70833 - DNA, 600 bp, Chicken  19866894346628_1
aagagcatgattagttcatgttcatttgaaatacagcgcctgagataaaaagcattttaagcttaagctaggaaatgttttgtagcagtaatagcctttcagagctttgtttgtttataagaaatccaaagctcctctgcatttcatcaaagattaactcagcactgttgtagacaattattttaacagggcgctgtttttgccttaggaagttaggcacaagcggtcagctatgcaaatctgccatttagacttcaagctgcattagtctgttctagaccacagcagagagcatccacrggttgtatacatggatgatcaagtggtaggaatgagctataaaccagcacatattttttggatgagaacattcgtgaatgttagtttatattaacttaccccacaaaatttggcctaagaaactgagaggtgcctgttcattaaactctgccaaccctttccagttttagggctgtgactgtgctcgttcagagtgacctggtgtaaaaagccatcaaagaatgcttaggaagaagktaatctaaagtcacagaggtcatgtttaaggctttattaccacctcacttacagcactgcaat

SEQ ID NO: 70834 - DNA, 600 bp, Chicken  19866894346628_2
aatctgccatttagacttcaagctgcattagtctgttctagaccacagcagagagcatccacrggttgtatacatggatgatcaagtggtaggaatgagctataaaccagcacatattttttggatgagaacattcgtgaatgttagtttatattaacttaccccacaaaatttggcctaagaaactgagaggtgcctgttcattaaactctgccaaccctttccagttttagggctgtgactgtgctcgttcagagtgacctggtgtaaaaagccatcaaagaatgcttaggaagaagktaatctaaagtcacagaggtcatgtttaaggctttattaccacctcacttacagcactgcaattcctttcatttcacaattccactgcacatttatgaagctgatggtactccaacaggctcctctttgcagtggacagaaagctcaaaggacagaaatttattagtgtggagacctgtgcgtagtttacaaggctgctggccttctagctggggctgagcagggacctgccagcctgggacacctctgggacatccctaccaggccacacagccagcctctgctacaaacatcaaggac

SEQ ID NO: 70835 - DNA, 600 bp, Chicken  19866894346632_1
aagagctgatttataaagttctgttttagatttcagccttgctgaaagtatctcataagaaaaacgttcagaaaacttactcagaagaaccactgttctcttactaaaaacaagtatctattttgataatttccaatgaagcaaaattagtttacaatgaacagtttaaaactggtgttaaaaatcctcagcaatcagtttgtatttggctagctgcacaattacagtctgaagaaatgttcactttcaacatctgtgtagatcaaacacagatatgtgaggctgtgaacctatgtgtaystgagcatcataattagtagcctggcttgtaagtgtactgagcacctacaactacataagcctcattaactggatgcrttccaggtgaattgagtgatatataaaacaaaacaaaacaaaacaaaactctaagactttccttagtcaaagtccaggcttcaggcttcaggctctcagaggggaaaaaaaataataataaaaagcccacctttttgctctcatatcaaatgcttttactgactagctgttgcctttgtctagcctcagctgttggcaggtcctgacattatcaaaagccaa

SEQ ID NO: 70836 - DNA, 600 bp, Chicken  19866894346632_2
agagctgatttataaagttctgttttagatttcagccttgctgaaagtatctcataagaaaaacgttcagaaaacttactcagaagaaccactgttctcttactaaaaacaagtatctattttgataatttccaatgaagcaaaattagtttacaatgaacagtttaaaactggtgttaaaaatcctcagcaatcagtttgtatttggctagctgcacaattacagtctgaagaaatgttcactttcaacatctgtgtagatcaaacacagatatgtgaggctgtgaacctatgtgtaystgagcatcataattagtagcctggcttgtaagtgtactgagcacctacaactacataagcctcattaactggatgcrttccaggtgaattgagtgatatataaaacaaaacaaaacaaaacaaaactctaagactttccttagtcaaagtccaggcttcaggcttcaggctctcagaggggaaaaaaaataataataaaaagcccacctttttgctctcatatcaaatgcttttactgactagctgttgcctttgtctagcctcagctgttggcaggtcctgacattatcaaaagccaag

SEQ ID NO: 70837 - DNA, 600 bp, Chicken  19866894346632_3
actcagaagaaccactgttctcttactaaaaacaagtatctattttgataatttccaatgaagcaaaattagtttacaatgaacagtttaaaactggtgttaaaaatcctcagcaatcagtttgtatttggctagctgcacaattacagtctgaagaaatgttcactttcaacatctgtgtagatcaaacacagatatgtgaggctgtgaacctatgtgtaystgagcatcataattagtagcctggcttgtaagtgtactgagcacctacaactacataagcctcattaactggatgcrttccaggtgaattgagtgatatataaaacaaaacaaaacaaaacaaaactctaagactttccttagtcaaagtccaggcttcaggcttcaggctctcagaggggaaaaaaaataataataaaaagcccacctttttgctctcatatcaaatgcttttactgactagctgttgcctttgtctagcctcagctgttggcaggtcctgacattatcaaaagccaagcctcaacgttgctaaagggcaggagggttctctacatgatgtgtgagagttgtcctctctttgatgggatgtgctgc

SEQ ID NO: 70838 - DNA, 600 bp, Chicken  19866894346635_1
caatttcaaagcagtggtggtagtggggggaaagaagatgttaggctgctgcttctcccccagttcggatatttttttttctgtgatcccatctcatttgaaatggtttcaacctttgaatttaggcgtgggcagaaactgcacaacccctttctgacagtggcgggggtgcccagctgggccccgcactgctgcggcagggcagagttcacttatcccagattgggtaattgtaccacaaacagaaccctggaaaaccgcttagaatactcagcaaaactgagttttaagcttataatrctgccttcaattaacggttggcgctgtgcttaattgccagctttcgcagttgtagttttgtgatggttttttgttgtttgtttttgctttttactgaaaagggtttttggtttggttttatttacatattcctatgggaggaaaaaaatcaaaggaaattaaactgatatttggaagtcatcctttgtcaaaacttgcttgctttgatgagagtgaatccataatcactgaaaaattaactgtgcagctgctaatcttgctgtgattgcttgttaaggggacacatgctgttcattcttt

SEQ ID NO: 70839 - DNA, 600 bp, Chicken  19866894346635_2
tccatgttgcttcaagaggcttttttctgtgagataatagcagcagctcttcatagatccatttgttgccgtggtgatctgcctactgcttttgttagtccgactctacttcaataaacccccttcctgttatcagcccggtgaaaatgtctgcaagttcttcagagctaataaacagcatacatcattcctttcatctgatcactatagcgcggggctgtacgagagagtgagaatggcgcatgaattgtacagctgcactaatggaactctgaagaatgagcctcctggtcagccccrcgagtgcacgacagggcactacctttctctcccagctgaaagtgccaggacccgaaagctgcaccttgtttcgagcaccagtgaatgaaccgtctcttgaaacgaataatgcaggcctctcgatgactagttcaaagttgctggttttacaaatagcctagagatctccagttgttctgttgttggttggttttttttttcccagctaaaacggtgttttttcctttgtcttctgtccctcctaggaatgagatggaaagacacttcttggagctactgcagtttaatatcaatgttcct

SEQ ID NO: 70840 - DNA, 600 bp, Chicken  19866894346637_1
caaccagagtattatcaataaataaccaagcaatatacttcttttttaaatctttaatggccatgttagaaaaggttgaattatgcacactagttgtaggaaaagaaaccacgttttctcgaagttttatgggtcacatctttctgtgatctatattaaaagtcagctgtgattatcagttctattacttttgttaattgtgtcctgttgctcatactggtatcaattatggccttatttacctcatatacattatggctttgatattctgtattggcaaaaaactgcaggtctagattkccttctggrgttaggttcctgcataaaagggcaatgtcatacctaacacggcatcgtatctatagacaatatgcaaaaatgcaagatcagcatacatgcatctatagatgcacataaaaggtataaatctcttttctgtcatgactctgtattataagactattagaagccatacttgcacaaatagacaaatagaacaaaaacaaatccgtgaaaactttacaattactttatttgttgagatataatataaatattccacatgaaaatatcaggttttgtgttgattaaaactgttat

SEQ ID NO: 70841 - DNA, 600 bp, Chicken  19866894346637_2
tattatcaataaataaccaagcaatatacttcttttttaaatctttaatggccatgttagaaaaggttgaattatgcacactagttgtaggaaaagaaaccacgttttctcgaagttttatgggtcacatctttctgtgatctatattaaaagtcagctgtgattatcagttctattacttttgttaattgtgtcctgttgctcatactggtatcaattatggccttatttacctcatatacattatggctttgatattctgtattggcaaaaaactgcaggtctagattkccttctggrgttaggttcctgcataaaagggcaatgtcatacctaacacggcatcgtatctatagacaatatgcaaaaatgcaagatcagcatacatgcatctatagatgcacataaaaggtataaatctcttttctgtcatgactctgtattataagactattagaagccatacttgcacaaatagacaaatagaacaaaaacaaatccgtgaaaactttacaattactttatttgttgagatataatataaatattccacatgaaaatatcaggttttgtgttgattaaaactgttatgatcaaaca

SEQ ID NO: 70842 - DNA, 558 bp, Chicken  19866894346641_1
gagaggttcattctactgggcaccagcagcaattttaacaaattgaaaatttgttaaatgaaaagtttagctgtttttttttttccccccccacatcatgttgaataggcctgagaagccggtatgtgacagaagccacactgggcatgcgcgtccaccatgggacacagcaacaccatgcttgagctggtaaggtagggaacgcatgtctcaaggttgttttctggctgagaagacgagatataccctaagcttattaaactataccaaacagaaaatggttgagtgctttttcttgcrttttttttttttcctgcaagttggactgagctatttaaaatattgaaaacacatgtctgctggggccaccaagcccattagagtagggggatgtaatgaagttgcttaaggaatatagggagtgaggccaaaacaaattccccgaggaatttaagattctaacccaaatggttcagaaagcacagagcacacctcactattccaaaaactgtttttggaaaaatgcatctgtgacgtgagtgaatttcagcacacaaa

SEQ ID NO: 70843 - DNA, 511 bp, Chicken  19866894346643_1
tccttgttaaattctcacttccaatcaaaaacggaactactgagaacttcctatgcaggaacttttcctacaggatttcctagacagactgtcccctatctggggacacctggctgactccaaactgagtgacacagattatctccaactttaaagaatcacagaatgaccgagttggaaagcaccttgaagatcatttttttccatccctccccacgatgaaaactttgatttcagttggccccacatctgggactggtctgatgaatgactggttccagtaacataatacaaaatacmaaaaaaaaaaaaaaaaaaaaagcatataatatgcataattaaatgtacataattaaatgcacatttgctactttactagtgataagtttgtagtaagcttgtaatatgaaaatatatttgtagctactactgattgctgctactattgtgtatgtggtatatacacacacgcttcctgttaacaggtctgtaataacttgatatataataa

SEQ ID NO: 70844 - DNA, 510 bp, Chicken  19866894346643_2
ccttgttaaattctcacttccaatcaaaaacggaactactgagaacttcctatgcaggaacttttcctacaggatttcctagacagactgtcccctatctggggacacctggctgactccaaactgagtgacacagattatctccaactttaaagaatcacagaatgaccgagttggaaagcaccttgaagatcatttttttccatccctccccacgatgaaaactttgatttcagttggccccacatctgggactggtctgatgaatgactggttccagtaacataatacaaaatacmmaaaaaaaaaaaaaaaaaaaagcatataatatgcataattaaatgtacataattaaatgcacatttgctactttactagtgataagtttgtagtaagcttgtaatatgaaaatatatttgtagctactactgattgctgctactattgtgtatgtggtatatacacacacgcttcctgttaacaggtctgtaataacttgatatataataa

SEQ ID NO: 70845 - DNA, 509 bp, Chicken  19866894346643_3
cttgttaaattctcacttccaatcaaaaacggaactactgagaacttcctatgcaggaacttttcctacaggatttcctagacagactgtcccctatctggggacacctggctgactccaaactgagtgacacagattatctccaactttaaagaatcacagaatgaccgagttggaaagcaccttgaagatcatttttttccatccctccccacgatgaaaactttgatttcagttggccccacatctgggactggtctgatgaatgactggttccagtaacataatacaaaatacmamaaaaaaaaaaaaaaaaaaagcatataatatgcataattaaatgtacataattaaatgcacatttgctactttactagtgataagtttgtagtaagcttgtaatatgaaaatatatttgtagctactactgattgctgctactattgtgtatgtggtatatacacacacgcttcctgttaacaggtctgtaataacttgatatataataa

SEQ ID NO: 70846 - DNA, 600 bp, Chicken  19866894346649_1
atagcatgaaaatatgtacgtttgaattgtatataacagtaagaagacctaaaaaatgtagcagatgactgtctcaggcctcatctgattctttgaaatatgtctgaatcccctctgggactcaggaagatccaaactaagtattttttaccattcatcttctgcatttcaattaccacctcatttgctgaaacatgctgatagaatccagcctaagcagaagaaggaagcattaacaggtcctgtcaaacatctggtcattcatttataggctgaaggctatacgaacagtatagatasaaacgattttgtttgctttcctgagcctaactcctaactttgaggtgttttgttaactgtactgataagcctctctctctgtacaagccttttctcatctttgttgcatgcctatgattctgcaatcatttataaagctttatattcagaaggttgttgcaacatcagctttttgttaggatggcttttgagatctttttcccctaaatcatgtttcatttcatctgctgcctctgcagggatgctgtcaatgagtacatggacatgaaaccaggagtgtcatatgctgttcccccaaaa

SEQ ID NO: 70847 - DNA, 599 bp, Chicken  19866894346659_1
  misc_feature (1)..(18): n is any nucleotide
nnnnnnnnnnnnnnnnnnactgtgcaattctctcttcctgggatgtttacgtctaagcattcatcctcctttaacttttacaggtcccttggggaatggcatgaaaacctatacccagattccattagaatatgttcttaaaagttcaaaagatcatgcttgggtacaaacaacattttcagtaagagcagaacaccagggcacttcacagcaagacagtcttaaaacaccgctgtcattaaagcatgggcaccattttgctttcctatctgccttcagtcagctactgtttatctcctraagtgaggtatacctttgaagacataaaacarcagtcactctagcaaggaagaggggctgctagactccacggtaggtaaaagaaagccttgtcactggcaacaatagcttagggatttcacatcggattatttcttcacatattttacgtacagtaataattcatacaggtcactgagtgaacraatgytcattcaaatcccactaactcaacaacaaaatgaaacaaagattcctagtctctggtaaactatgcctaaactcaaagaaagaaacacaccatgaagttgtattcccta

SEQ ID NO: 70848 - DNA, 600 bp, Chicken  19866894346659_2
tcttcctgggatgtttacgtctaagcattcatcctcctttaacttttacaggtcccttggggaatggcatgaaaacctatacccagattccattagaatatgttcttaaaagttcaaaagatcatgcttgggtacaaacaacattttcagtaagagcagaacaccagggcacttcacagcaagacagtcttaaaacaccgctgtcattaaagcatgggcaccattttgctttcctatctgccttcagtcagctactgtttatctcctraagtgaggtatacctttgaagacataaaacarcagtcactctagcaaggaagaggggctgctagactccacggtaggtaaaagaaagccttgtcactggcaacaatagcttagggatttcacatcggattatttcttcacatattttacgtacagtaataattcatacaggtcactgagtgaacraatgytcattcaaatcccactaactcaacaacaaaatgaaacaaagattcctagtctctggtaaactatgcctaaactcaaagaaagaaacacaccatgaagttgtattccctatcagctcctggaggtaaggccctccaccaaggg

SEQ ID NO: 70849 - DNA, 600 bp, Chicken  19866894346659_3
gagcagaacaccagggcacttcacagcaagacagtcttaaaacaccgctgtcattaaagcatgggcaccattttgctttcctatctgccttcagtcagctactgtttatctcctraagtgaggtatacctttgaagacataaaacarcagtcactctagcaaggaagaggggctgctagactccacggtaggtaaaagaaagccttgtcactggcaacaatagcttagggatttcacatcggattatttcttcacatattttacgtacagtaataattcatacaggtcactgagtgaacraatgytcattcaaatcccactaactcaacaacaaaatgaaacaaagattcctagtctctggtaaactatgcctaaactcaaagaaagaaacacaccatgaagttgtattccctatcagctcctggaggtaaggccctccaccaagggtaactcagcagtgaaattatattgtcttttcttggaaatctctgtgatcttcaccatctgtttcatgtgataaagttgttgatttgatgctgcatctcctatatcagaataaaggccagttccaatttgcattraggagcagaaaaaaaaaaa

SEQ ID NO: 70850 - DNA, 600 bp, Chicken  19866894346659_4
gaacaccagggcacttcacagcaagacagtcttaaaacaccgctgtcattaaagcatgggcaccattttgctttcctatctgccttcagtcagctactgtttatctcctraagtgaggtatacctttgaagacataaaacarcagtcactctagcaaggaagaggggctgctagactccacggtaggtaaaagaaagccttgtcactggcaacaatagcttagggatttcacatcggattatttcttcacatattttacgtacagtaataattcatacaggtcactgagtgaacraatgytcattcaaatcccactaactcaacaacaaaatgaaacaaagattcctagtctctggtaaactatgcctaaactcaaagaaagaaacacaccatgaagttgtattccctatcagctcctggaggtaaggccctccaccaagggtaactcagcagtgaaattatattgtcttttcttggaaatctctgtgatcttcaccatctgtttcatgtgataaagttgttgatttgatgctgcatctcctatatcagaataaaggccagttccaatttgcattraggagcagaaaaaaaaaaaagacg

SEQ ID NO: 70851 - DNA, 600 bp, Chicken  19866894346659_5
acaggtcactgagtgaacraatgytcattcaaatcccactaactcaacaacaaaatgaaacaaagattcctagtctctggtaaactatgcctaaactcaaagaaagaaacacaccatgaagttgtattccctatcagctcctggaggtaaggccctccaccaagggtaactcagcagtgaaattatattgtcttttcttggaaatctctgtgatcttcaccatctgtttcatgtgataaagttgttgatttgatgctgcatctcctatatcagaataaaggccagttccaatttgcattraggagcagaaaaaaaaaaaagacgtaattacaaattacaaagaaaacaagcacatgcttttctgcatttcaatgaagcaaaggtagctgcactggtttacagatccaatcaaattcagatcacggtagttgaatatttcagtttcagaagagtaaaactgtagtaaacaggtacagtacaaacacaaatgagcttcctcaccacataaaaattatccagcaagctgtacaaagatcactcaaatgaaaacagatactcagtaaagcagataattgactccaatcttatttaataagatgg

SEQ ID NO: 70852 - DNA, 567 bp, Chicken  19866894346663_1
tattgaaaaatataaaaaatccctccattttcttcactgtatgtacaagagattctctaaaaataatgcctcctattttattatgttgactcatgatgttagagagagatgttggtggtatggcaaccaaggatgaacctttctaccaagattctgtaatattttgttgccatgcaacagatggcagcagaggggcacacagacaaaatggagtctgacaaggaattgtgtattatgcatatactattatgcaataatatatggttttgatggttgtacctacaaagaaataaattcaartgattttgctcaatgtaatatttctgactttcctgaaaagaagtaacgaaacttaaattttcctattctttgatatactatcatgtatatcattttagatttaaaacagcatatgaagaggtgtaacaatcactttcatatcatagaaacaaaaacatgtagaaaaatattgattagctatttgcaaaatgagaggtatttagtgccaacagatttaataaaaaaatcaacatcagcatgattttttatcctagggtatctatacca

SEQ ID NO: 70853 - DNA, 534 bp, Chicken  19866894346666_1
attcttccatgagacacagaggcctggtttcctgtcagaaagaattgagctgaagtaagacaaaagcatctcttggtctttttagatccatcttattgtattgtcttaattggttgcaatagtagcctcgacccaacagaagtttggctgggatgctgtcccactgctgctgccaggagaaaactttgggcccttccaaaacagagggtgacgtcgatgggaacatcgttgcatggggcccgggtgacagagtatgctggcagccataggcactgtggccaatgccacatgagctccacrttggcttccctccatgttctccaggctcccagacattcccacttctgctagtcactggacaggccagaggagattcaaagatatgcagcaagtccaaaacctaatgttcctttcctacagaaggggaaacacatgatgctgagcccagactatcctgctgaactcaataagatccttaatgcagccctaaatgaagtagaatggggagcagagcctgaggaaggtgcccaaatc

SEQ ID NO: 70854 - DNA, 599 bp, Chicken  19866894346671_1
  misc_feature (1)..(71): n is any nucleotide
nnnnnnnnnnnnnnnnnnnnnnnnnnnnnnnnnnnnnnnnnnnnnnnnnnnnnnnnnnnnnnnnnnnnnnngcactgctcccttcagtcccccctagtattctggccagcttcctcattcctcatgctcctgaaaatccctttgggctcctgccagaaagtcaatacatctgtgctggaaagtaaagctatgattgcagccatatagctctaacgtggccagagcaggcagcaaaatcagggaaaacacattagcaaatgtaagaacctgagctatctgcctgaggtcctggagctatcrtatttttattcctctgggttatcatttctttcttcctaacttacatcaacgtatgaaataaacacaactccatcttgctgtctaaagatgcctacagaggtcaagctgccatttggaatctggcatggtgatacaatttgcacagagmatgttttcctctcctgtctgttgctggtatatcagatacatgttaaccagcacttgcttcttttcttttgctttatatttgcttcattctcaggccttttgtgaaactgggacaagtgctttctgagaaactgactatggatttgaggacc

SEQ ID NO: 70855 - DNA, 600 bp, Chicken  19866894346671_2
cctgccagaaagtcaatacatctgtgctggaaagtaaagctatgattgcagccatatagctctaacgtggccagagcaggcagcaaaatcagggaaaacacattagcaaatgtaagaacctgagctatctgcctgaggtcctggagctatcrtatttttattcctctgggttatcatttctttcttcctaacttacatcaacgtatgaaataaacacaactccatcttgctgtctaaagatgcctacagaggtcaagctgccatttggaatctggcatggtgatacaatttgcacagagmatgttttcctctcctgtctgttgctggtatatcagatacatgttaaccagcacttgcttcttttcttttgctttatatttgcttcattctcaggccttttgtgaaactgggacaagtgctttctgagaaactgactatggatttgaggaccttgctgggaaggctatttaccaatgggtgtgagctgggcttaaatttaaaggagccatgratgccttgtctggcacagggctaccagacgtgtcacagcttcgattattgctgcctgccatgctgggaggtgaatgtgagataaatgaa

SEQ ID NO: 70856 - DNA, 465 bp, Chicken  19866894346671_3
aaacacaactccatcttgctgtctaaagatgcctacagaggtcaagctgccatttggaatctggcatggtgatacaatttgcacagagmatgttttcctctcctgtctgttgctggtatatcagatacatgttaaccagcacttgcttcttttcttttgctttatatttgcttcattctcaggccttttgtgaaactgggacaagtgctttctgagaaactgactatggatttgaggaccttgctgggaaggctatttaccaatgggtgtgagctgggcttaaatttaaaggagccatgratgccttgtctggcacagggctaccagacgtgtcacagcttcgattattgctgcctgccatgctgggaggtgaatgtgagataaatgaagattgggggaacagtcagatctgagcaatcaaggtgatccacacctggaagtggatgggagcgagagaggggaaga

SEQ ID NO: 70857 - DNA, 600 bp, Chicken  19866894346678_1
cagaacctcacccacctacattctaaacaagtgaataatgtgtaattgtttacatttatttactacaactgttttaatttatataggtagtggctgaaatattggccatttaagctttttcagaatctttttttttttttttcccatatcaccctcagaactgctggtcctttattctgatagctgaccaaaaaattagaagaatctatcaggctgagaactctgatcatcatgtaatccagaaggaaagacttaacactgagatcagtggtgctctctgaaattaaacctggcatatgsatctcaytgaagcttactgagctgtcagttttagttaagcaaaaatagttacacagatgaagrcactcacctcatctattgttcctaaatctaagtgcagccggctttgtaaggagcgaagctttggcaaggatattttttctatgtctccatagttttccatgtaaggtaatgaagtagataggcaggcagctaattgcaccttcagcttttttaatttattttccactgcttccttcttctgaagagcacgttgtttgtcagcagatgcaacgtcagcacgttcatttgcttcttgag

SEQ ID NO: 70858 - DNA, 600 bp, Chicken  19866894346678_2
tcacccacctacattctaaacaagtgaataatgtgtaattgtttacatttatttactacaactgttttaatttatataggtagtggctgaaatattggccatttaagctttttcagaatctttttttttttttttcccatatcaccctcagaactgctggtcctttattctgatagctgaccaaaaaattagaagaatctatcaggctgagaactctgatcatcatgtaatccagaaggaaagacttaacactgagatcagtggtgctctctgaaattaaacctggcatatgsatctcaytgaagcttactgagctgtcagttttagttaagcaaaaatagttacacagatgaagrcactcacctcatctattgttcctaaatctaagtgcagccggctttgtaaggagcgaagctttggcaaggatattttttctatgtctccatagttttccatgtaaggtaatgaagtagataggcaggcagctaattgcaccttcagcttttttaatttattttccactgcttccttcttctgaagagcacgttgtttgtcagcagatgcaacgtcagcacgttcatttgcttcttgagcctcttt

SEQ ID NO: 70859 - DNA, 600 bp, Chicken  19866894346678_3
tacaactgttttaatttatataggtagtggctgaaatattggccatttaagctttttcagaatctttttttttttttttcccatatcaccctcagaactgctggtcctttattctgatagctgaccaaaaaattagaagaatctatcaggctgagaactctgatcatcatgtaatccagaaggaaagacttaacactgagatcagtggtgctctctgaaattaaacctggcatatgsatctcaytgaagcttactgagctgtcagttttagttaagcaaaaatagttacacagatgaagrcactcacctcatctattgttcctaaatctaagtgcagccggctttgtaaggagcgaagctttggcaaggatattttttctatgtctccatagttttccatgtaaggtaatgaagtagataggcaggcagctaattgcaccttcagcttttttaatttattttccactgcttccttcttctgaagagcacgttgtttgtcagcagatgcaacgtcagcacgttcatttgcttcttgagcctctttctgccatgcatcacatgcctgagagaaaacaatttccagaatgtaagaaaattatt

SEQ ID NO: 70860 - DNA, 353 bp, Chicken  19866894346680_1
cacccgggccatcacgactatgttctggagcaaggcggtccttcttttgtaggatgaagtgcaacagaccttcagtgaaagtagaagacaaggattttccttccacctgttcaaagaagaaaggtaacgattatgtgttcgaacatcaaatgtaatggctgtcaggctttttttatataactgctcacttgcagtggttacgttcttgatatttattgaatagtattaatttttattcttaagatatcgttatatgaactatgttttgatctgatactttttcctttacatacagtttcygttccacacytcccttcaaatgtagtacttctgcaccctgaagtatttggtca

SEQ ID NO: 70861 - DNA, 343 bp, Chicken  19866894346680_2
atcacgactatgttctggagcaaggcggtccttcttttgtaggatgaagtgcaacagaccttcagtgaaagtagaagacaaggattttccttccacctgttcaaagaagaaaggtaacgattatgtgttcgaacatcaaatgtaatggctgtcaggctttttttatataactgctcacttgcagtggttacgttcttgatatttattgaatagtattaatttttattcttaagatatcgttatatgaactatgttttgatctgatactttttcctttacatacagtttcygttccacacytcccttcaaatgtagtacttctgcaccctgaagtatttggtca

SEQ ID NO: 70862 - DNA, 600 bp, Chicken  19866894346681_1
aatcccacagttgtttttacatggtatggttcatgggactcttgatagttcattgccttttggttacatacaaaaaattggatcattttttgtctttcaagtgagtaatttttctgtagagaattgctgttttttttctttctggaaagtgtgccatgtcattatctttcagatgaatatgtgtttagttacaaatttcaaagtttgtattagatattggaaggtactttgaaaaaatcaatagaagaaaaccagtcagaacatcatccttgtgaaaaatctgttcagatactcaaaagmaatctattamatttccttttctttccagacagtacaagatagatattgatttcagccattaagcatgtaatgcttgatgtggtttgtgtaataataaaaataaaatcacaaaaccattggatataactaaaaaggttttttgaagtgatttagggtattaaatgtgaaytgtgaacactgtaaaggtgtggtgtgatgacaatctaacttttagatgttatccagacttttattcttgcctctcacccagaacttagtcgcatcagttgagatgctggaattgcatgtgtaagcaggacc

SEQ ID NO: 70863 - DNA, 600 bp, Chicken  19866894346681_2
ttgtttttacatggtatggttcatgggactcttgatagttcattgccttttggttacatacaaaaaattggatcattttttgtctttcaagtgagtaatttttctgtagagaattgctgttttttttctttctggaaagtgtgccatgtcattatctttcagatgaatatgtgtttagttacaaatttcaaagtttgtattagatattggaaggtactttgaaaaaatcaatagaagaaaaccagtcagaacatcatccttgtgaaaaatctgttcagatactcaaaagmaatctattamatttccttttctttccagacagtacaagatagatattgatttcagccattaagcatgtaatgcttgatgtggtttgtgtaataataaaaataaaatcacaaaaccattggatataactaaaaaggttttttgaagtgatttagggtattaaatgtgaaytgtgaacactgtaaaggtgtggtgtgatgacaatctaacttttagatgttatccagacttttattcttgcctctcacccagaacttagtcgcatcagttgagatgctggaattgcatgtgtaagcaggaccagtttgcttc

SEQ ID NO: 70864 - DNA, 600 bp, Chicken  19866894346681_3
cagatgaatatgtgtttagttacaaatttcaaagtttgtattagatattggaaggtactttgaaaaaatcaatagaagaaaaccagtcagaacatcatccttgtgaaaaatctgttcagatactcaaaagmaatctattamatttccttttctttccagacagtacaagatagatattgatttcagccattaagcatgtaatgcttgatgtggtttgtgtaataataaaaataaaatcacaaaaccattggatataactaaaaaggttttttgaagtgatttagggtattaaatgtgaaytgtgaacactgtaaaggtgtggtgtgatgacaatctaacttttagatgttatccagacttttattcttgcctctcacccagaacttagtcgcatcagttgagatgctggaattgcatgtgtaagcaggaccagtttgcttcagtgcaaggtaaaatgggttaatttatcagctttaacactgtcagtttaaaatagtctgccttacctctgaaacatggagtccactaccatatcaggggaggaggctcctcatgtacaactggaggcagtaatgaggagttggaagtagtgagtttaca

SEQ ID NO: 70865 - DNA, 600 bp, Chicken  19866894346687_1
ccaaggctccttagttaatgaagacgtatcagcaactataaaattgtaccacttggacaattttggatcaggtgacttattttctttaattttttcttaatggcaaaatttgattaaactaaattgcattttagagcacgtgtgcaacatttttatacaaccatcagcatgaattatttctgtttttcttctactagttttcctaatactatctggatttcccttgtcttttgacagctattgatggtacagcagtttccaaaagaatgggtaacaaaagtttgtagattttgataattwattcttgttgatattaggtttgtgtcatttggaaaaataaaaaacaaacagaccaacaaacgagagcagtgtcaaatataattacgtctttgcttctaagtataaaatgaaggaaagatttcactgacagatctgccacacacacacacacacacacacacacacacacaaaagaaagaaagtaagaaaaaacaacaaaaaaataaccctacgatgatcaccaaatatattctataatatttttatgacagtaaataatccttaaaatgttacagtgtacactcctgtatctattcatta

SEQ ID NO: 70866 - DNA, 600 bp, Chicken  19866894346688_1
ttggatctgccaaatgtttgctaccagttgataaagaaaaaggaagaacacttatccattcctgaagatattattctgggacatcaacttcatgtgctctctggagatcagttccctgcaagtatacccccaggtacttacagacataggtaaaattatcatgatcttcctcttccccaggctgaacaggggaagagaggttgagctccctcagcctctcctcacaggataggtgcttcagtccctgaaaagatctgaagatctttttctgcatgataaataatggctgagttacatacyctgaggctttcaagtgaattgggtactaatttagcacatttccaaaatggccaatggctggtagatagaagccacaggagatttgtgcccttctggagaggcagatggaggtcagatcacagtgtccaaagtgagtagatttctatgtttcggcagctacatccacatcacctttatgctatgctgacctcatgttaggccatccttgcaccccagcaatagccaggtgctgtagagcccctccacagctctctcaccaccacagaataacctggagccagcagaaggtgccggctttga

SEQ ID NO: 70867 - DNA, 600 bp, Chicken  19866894346688_2
aatggctggtagatagaagccacaggagatttgtgcccttctggagaggcagatggaggtcagatcacagtgtccaaagtgagtagatttctatgtttcggcagctacatccacatcacctttatgctatgctgacctcatgttaggccatccttgcaccccagcaatagccaggtgctgtagagcccctccacagctctctcaccaccacagaataacctggagccagcagaaggtgccggctttgaacgtgcctacaggcactagcaagtgacagtaaatccatgtagactactcccrgaatgttctggttyattacaaggcttaaaggattaagagagtacagaagtactgctgaaaagctgtgcaggtgattacaaagaagatgaaggagaagccrcagttgcacagggatgtgacttcgtggtttaaaaatacgaatactttggaagagaaaggcaagctcactgatcatgtttagtagactatttacaatgaaagcttaattaaaactctcaattaggctatgaatgagaggaaaaaatgaacaacttctttagagaggaaaaaaaaaaagtagagaaagatttgtcctcaaac

SEQ ID NO: 70868 - DNA, 600 bp, Chicken  19866894346688_3
agaagccacaggagatttgtgcccttctggagaggcagatggaggtcagatcacagtgtccaaagtgagtagatttctatgtttcggcagctacatccacatcacctttatgctatgctgacctcatgttaggccatccttgcaccccagcaatagccaggtgctgtagagcccctccacagctctctcaccaccacagaataacctggagccagcagaaggtgccggctttgaacgtgcctacaggcactagcaagtgacagtaaatccatgtagactactcccrgaatgttctggttyattacaaggcttaaaggattaagagagtacagaagtactgctgaaaagctgtgcaggtgattacaaagaagatgaaggagaagccrcagttgcacagggatgtgacttcgtggtttaaaaatacgaatactttggaagagaaaggcaagctcactgatcatgtttagtagactatttacaatgaaagcttaattaaaactctcaattaggctatgaatgagaggaaaaaatgaacaacttctttagagaggaaaaaaaaaaagtagagaaagatttgtcctcaaactttcagctccaaaa

SEQ ID NO: 70869 - DNA, 600 bp, Chicken  19866894346688_4
gcagctacatccacatcacctttatgctatgctgacctcatgttaggccatccttgcaccccagcaatagccaggtgctgtagagcccctccacagctctctcaccaccacagaataacctggagccagcagaaggtgccggctttgaacgtgcctacaggcactagcaagtgacagtaaatccatgtagactactcccrgaatgttctggttyattacaaggcttaaaggattaagagagtacagaagtactgctgaaaagctgtgcaggtgattacaaagaagatgaaggagaagccrcagttgcacagggatgtgacttcgtggtttaaaaatacgaatactttggaagagaaaggcaagctcactgatcatgtttagtagactatttacaatgaaagcttaattaaaactctcaattaggctatgaatgagaggaaaaaatgaacaacttctttagagaggaaaaaaaaaaagtagagaaagatttgtcctcaaactttcagctccaaaacaacaagtgcttacagaaaggttttacttcaatcataagctgacgttacaaaaatcagtgaaatcaaatatcacgggatttcagaa

SEQ ID NO: 70870 - DNA, 600 bp, Chicken  19866894346690_1
ctcaatagtctgtcctggtggagagaggttggaatcccctgtctcgtggaggtgtgctgggatgtggctgccttacatctgcggcatggcgagctgtgtaaaggggaacggattgaaggtgagcattgatgcttcctgtccatgtatggggttgcagtgatgctaggagcttttgtgtgtgtcgagggcgtctttccgagcttttgccatgaatgtgataaaactgggcagctgggctgttacacgagttcaggtgatgtttttccctcccaggattttctacgggatgcatctgtcggygtgtgaaagctcatggtggcttagtaataccaggagatgctgcatgttttagtttgaatggatccagtgacgattcaaatgccatccccacgcttttacacatgaraattactgaatttagcttgcttttgagcaataaaggatcgctaataagcatggcagtttatttgggagacacgatgcagtggttttaagggtctgaccaaatgctgcttgaagttgatgagaaatrccagtgggcctgcacagctttaaggatgaaatgcatattggaataaagcatattatacctgcagcgtc

SEQ ID NO: 70871 - DNA, 600 bp, Chicken  19866894346690_2
aacggattgaaggtgagcattgatgcttcctgtccatgtatggggttgcagtgatgctaggagcttttgtgtgtgtcgagggcgtctttccgagcttttgccatgaatgtgataaaactgggcagctgggctgttacacgagttcaggtgatgtttttccctcccaggattttctacgggatgcatctgtcggygtgtgaaagctcatggtggcttagtaataccaggagatgctgcatgttttagtttgaatggatccagtgacgattcaaatgccatccccacgcttttacacatgaraattactgaatttagcttgcttttgagcaataaaggatcgctaataagcatggcagtttatttgggagacacgatgcagtggttttaagggtctgaccaaatgctgcttgaagttgatgagaaatrccagtgggcctgcacagctttaaggatgaaatgcatattggaataaagcatattatacctgcagcgtctcttcccagcttgcagtggttgctctgcgagggcttaaaacagcacatctggtgtaagcaggaaggcgagctctttgtccacatctgtgacaactacccctttctt

SEQ ID NO: 70872 - DNA, 600 bp, Chicken  19866894346690_3
tgggctgttacacgagttcaggtgatgtttttccctcccaggattttctacgggatgcatctgtcggygtgtgaaagctcatggtggcttagtaataccaggagatgctgcatgttttagtttgaatggatccagtgacgattcaaatgccatccccacgcttttacacatgaraattactgaatttagcttgcttttgagcaataaaggatcgctaataagcatggcagtttatttgggagacacgatgcagtggttttaagggtctgaccaaatgctgcttgaagttgatgagaaatrccagtgggcctgcacagctttaaggatgaaatgcatattggaataaagcatattatacctgcagcgtctcttcccagcttgcagtggttgctctgcgagggcttaaaacagcacatctggtgtaagcaggaaggcgagctctttgtccacatctgtgacaactacccctttcttcccagtttccttctcccatagtgtttcgggtgtggttatttaaatagtagctggcaggatgagtatggttgatattttcttcctagcaaagggctcatccatgtgccaaagtataatcagcccttc

SEQ ID NO: 70873 - DNA, 600 bp, Chicken  19866894346700_1
gttttagggcaaatgctgtataatagctctcctcctatgaaaccatggagatcctgccagggttatgtatttttttagctttgagagcattttacagaggcatcagttaagggtctgatagtacatcaagtctggttcacatggattcctcacgactttcttctcttccttactgtgcagcagaagagtgaaattaaagtcaagagcaatgagcacgtgtgatcagagctgggtctcttgaagttaagttcatctcaaactggtgtatgggaatttgaatctttaactgctaagtttatycccctcagattcaccctttaacaggttattctgcactttgttatgattgctttctgggaaatgtaatattttaaatagacatatacttttacgtatatatcaccactcttttaagtggatacctctgaagcaggagggatttatgtattaaaatgtacaaagaattgtactcccaactttgatcttgatatcaagagaaacaaaataggtttgtccagcacaatcacttgcagattacttcacagtggagctctgggggttgtctcccaaacaggagcattgtgtatttgctgggtctca

SEQ ID NO: 70874 - DNA, 600 bp, Chicken  19866894346709_1
agctgaggaggaaacaaaatctgctgtgcatccacgcgttgtgtgctgactttctacctgtgtaatgctagaaacacagcctggagaggataatacaaagggacgtaagttgtctgaacatacgacagctgaatgcacattggccgcattagtctagcactgctgagagttggggcttactttcagggctaggtgagccttagccaatctggtaactgtggcattgtgggtttgcagctgtgagtcccttgtcttggaatctccagtctgttatgtagcatggacatgtcttgtaagccrgagcatctgcagacagtttgagagaggaagtctgcaattccttaaagagaacttcagggcagtctaacggttatccaatagaatmcatcattccttccatcatgatggaagaaggcayaaaggtacctttaattatgcttggagaggtgttttgtttgtgactgatgtttgctgccttgatttcagtaaggtatggtccaacagaacaggtgtactctatgtattcatggcagtatgtgccactgtctgccccttttgctatctatgttttattcttgaagtgtgtgtaagcaggtgtct

SEQ ID NO: 70875 - DNA, 600 bp, Chicken  19866894346709_2
gaggataatacaaagggacgtaagttgtctgaacatacgacagctgaatgcacattggccgcattagtctagcactgctgagagttggggcttactttcagggctaggtgagccttagccaatctggtaactgtggcattgtgggtttgcagctgtgagtcccttgtcttggaatctccagtctgttatgtagcatggacatgtcttgtaagccrgagcatctgcagacagtttgagagaggaagtctgcaattccttaaagagaacttcagggcagtctaacggttatccaatagaatmcatcattccttccatcatgatggaagaaggcayaaaggtacctttaattatgcttggagaggtgttttgtttgtgactgatgtttgctgccttgatttcagtaaggtatggtccaacagaacaggtgtactctatgtattcatggcagtatgtgccactgtctgccccttttgctatctatgttttattcttgaagtgtgtgtaagcaggtgtcttttgctgctctccccagcgctgcatgccacaagatactgccttctcctccctcttcttcaaagtcctcatgcagatgctgcagtg

SEQ ID NO: 70876 - DNA, 600 bp, Chicken  19866894346709_3
catacgacagctgaatgcacattggccgcattagtctagcactgctgagagttggggcttactttcagggctaggtgagccttagccaatctggtaactgtggcattgtgggtttgcagctgtgagtcccttgtcttggaatctccagtctgttatgtagcatggacatgtcttgtaagccrgagcatctgcagacagtttgagagaggaagtctgcaattccttaaagagaacttcagggcagtctaacggttatccaatagaatmcatcattccttccatcatgatggaagaaggcayaaaggtacctttaattatgcttggagaggtgttttgtttgtgactgatgtttgctgccttgatttcagtaaggtatggtccaacagaacaggtgtactctatgtattcatggcagtatgtgccactgtctgccccttttgctatctatgttttattcttgaagtgtgtgtaagcaggtgtcttttgctgctctccccagcgctgcatgccacaagatactgccttctcctccctcttcttcaaagtcctcatgcagatgctgcagtggttggacaaccctgcagtggaagatggtcctct

SEQ ID NO: 70877 - DNA, 599 bp, Chicken  19866894346713_1
  misc_feature (1)..(164): n is any nucleotide
nnnnnnnnnnnnnnnnnnnnnnnnnnnnnnnnnnnnnnnnnnnnnnnnnnnnnnnnnnnnnnnnnnnnnnnnnnnnnnnnnnnnnnnnnnnnnnnnnnnnnnnnnnnnnnnnnnnnnnnnnnnnnnnnnnnnnnnnnnnnnnnnnnnnnnnnnnnnnnnnnnnncccgtgagagctgcattgcactgtgcattgccaacagctgcccacaacgggagccttgataatagtcacaaaaatatgcagattaggaaataacggaaggctctcgctcagaagtgaagtagtaagaaagcaattyattctccctgctttgtggtgcggccacggaaaaggaayaagttctttgtttcccggctgctgaatgggcaaagttggatctgaaaaatcaagctgggtttttcttccatgtatgtccttcagagcctgccagactgctgatcatccccattccttgtgcagcgtggcctgggctgagacccctgcactgtccgtggcagtgctgaaaggatgcagcaatgcaggaaggcattgggtgccatgcagcaatgagtcgtgggtcagactggaggaggaaaggagtctgtgtgctcacatcat

SEQ ID NO: 70878 - DNA, 599 bp, Chicken  19866894346713_2
  misc_feature (1)..(126): n is any nucleotide
nnnnnnnnnnnnnnnnnnnnnnnnnnnnnnnnnnnnnnnnnnnnnnnnnnnnnnnnnnnnnnnnnnnnnnnnnnnnnnnnnnnnnnnnnnnnnnnnnnnnnnnnnnnnnnnnnnnnnnnnnnnnnncccgtgagagctgcattgcactgtgcattgccaacagctgcccacaacgggagccttgataatagtcacaaaaatatgcagattaggaaataacggaaggctctcgctcagaagtgaagtagtaagaaagcaattyattctccctgctttgtggtgcggccacggaaaaggaayaagttctttgtttcccggctgctgaatgggcaaagttggatctgaaaaatcaagctgggtttttcttccatgtatgtccttcagagcctgccagactgctgatcatccccattccttgtgcagcgtggcctgggctgagacccctgcactgtccgtggcagtgctgaaaggatgcagcaatgcaggaaggcattgggtgccatgcagcaatgagtcgtgggtcagactggaggaggaaaggagtctgtgtgctcacatcattggactgctgtgtccacaaaggctgctgcaggagcccc

SEQ ID NO: 70879 - DNA, 600 bp, Chicken  19866894346717_1
gttccttggctccaggacagccctggcatgctctgccagccccatatccccagggcctcactgcagagagggcaaggaggctgggctgtgagaagtgagcccagggttatttttgctgctcttgagccttgccttgtgttcttgtttccctgtgctatgtttagataactttgcaggacttgcttgctcctgctcctaaaccattttttttgctgcacgatggaagtctgacaagagaagggcagaagaaatccaaggcaagttcctggggccattcagacagcacaggcaatgatgaakttgggcttctctgggcttagcttgagcctcttgttgaatttgtgtggatgacctctgcatctccaggacttggggcatccaatcaagttctggtggatggagctcttcaggaggacagaggtaccatggaattccctgttcccgatgcacccttgagagatcagagtagcacagggtgcrtctctccaaattcccygcacagggagatccagacgagtgcacatctgtgactgaacataattacagcttctgagacacttttcttgctctccttgactgctgaggcctgagaacgtgggg

SEQ ID NO: 70880 - DNA, 600 bp, Chicken  19866894346717_2
tgcttgctcctgctcctaaaccattttttttgctgcacgatggaagtctgacaagagaagggcagaagaaatccaaggcaagttcctggggccattcagacagcacaggcaatgatgaakttgggcttctctgggcttagcttgagcctcttgttgaatttgtgtggatgacctctgcatctccaggacttggggcatccaatcaagttctggtggatggagctcttcaggaggacagaggtaccatggaattccctgttcccgatgcacccttgagagatcagagtagcacagggtgcrtctctccaaattcccygcacagggagatccagacgagtgcacatctgtgactgaacataattacagcttctgagacacttttcttgctctccttgactgctgaggcctgagaacgtggggtcatttctcagggagacaagtgttaagtgttccccttctccgtctctggcagccggcactaatctcagcagtgcctaagaggggagattattcagtgaatatgaacatccttgagtctaatccacacgcaaatgcaaacttaaattgaaaccagaagatggctttagcggcatggtttaa

SEQ ID NO: 70881 - DNA, 600 bp, Chicken  19866894346717_3
taaaccattttttttgctgcacgatggaagtctgacaagagaagggcagaagaaatccaaggcaagttcctggggccattcagacagcacaggcaatgatgaakttgggcttctctgggcttagcttgagcctcttgttgaatttgtgtggatgacctctgcatctccaggacttggggcatccaatcaagttctggtggatggagctcttcaggaggacagaggtaccatggaattccctgttcccgatgcacccttgagagatcagagtagcacagggtgcrtctctccaaattcccygcacagggagatccagacgagtgcacatctgtgactgaacataattacagcttctgagacacttttcttgctctccttgactgctgaggcctgagaacgtggggtcatttctcagggagacaagtgttaagtgttccccttctccgtctctggcagccggcactaatctcagcagtgcctaagaggggagattattcagtgaatatgaacatccttgagtctaatccacacgcaaatgcaaacttaaattgaaaccagaagatggctttagcggcatggtttaaagccattaaccctttg

SEQ ID NO: 70882 - DNA, 599 bp, Chicken  19866894346722_1
  misc_feature (1)..(72): n is any nucleotide
nnnnnnnnnnnnnnnnnnnnnnnnnnnnnnnnnnnnnnnnnnnnnnnnnnnnnnnnnnnnnnnnnnnnnnnntgcttgttagatgcttattgctagacaccaaaaaacaatatttgtataatgaaattgataaaacaaaactagcaatgaatattttcacagctagattttaattaggaaacagactatatttcagcatatttaagtcagctccatctagcatttcagtaaaactacatgtttacctgcttttcttttatatactacctctatttctgggcatgctttgatacaagtagwgattttaatggttataattcagggggatgataaaaggaaaatagagatgtgagaaagtgaaagtgaaggagaagtgacttggagaaaaggcagatctcttccattaactgtattgtacaacatggtacagtatttttcagaaactaaagtagatcaggattttgtaggtgtttaacgttaaagcatccatgaaatcatgattgtatacagacaacagcactctagtgttcttggtcactgcttgtgagatgtgttactactggatgtttttagagatgtagccttgctcttttgtgtac

SEQ ID NO: 70883 - DNA, 600 bp, Chicken  19866894346726_1
tggatttgacactgcattttttttctttcaaataacccagaggtgcactcagcacctccacagccgtggtgtggggcagtggcagtttggtgcggggtgggaagcggcacagcccctggaggaagcaccgagtacagtcagagcaccagagggtcataactgttgattaataatccaaaccatccgttcgtagattaaaaccagaggatgatgtgtttaattatccagtctggttatactcctgcagtgcgctgcgagggtgggggtgggagagcaggggaatacgagccagattttgtstcagtgccactgcaaatgctccagcactccttgcagcaggcagggagagcagtgccgcagcagcgggcggatgtcaggcagtgattctcggcgcatcgctgctcttgtgttacagcagyggggctgaggctttgtcattgtcttctgcacaagtatacaagttagcgcacaccgattaaaagagaggatttcagcctgtgggctgcagttttaacctgatttgtcttaaattggtgtagtcatttaaaacgtaacgcactgctcctgttacttccaatagagcttgatgtaaaacacgag

SEQ ID NO: 70884 - DNA, 600 bp, Chicken  19866894346726_2
aggaagcaccgagtacagtcagagcaccagagggtcataactgttgattaataatccaaaccatccgttcgtagattaaaaccagaggatgatgtgtttaattatccagtctggttatactcctgcagtgcgctgcgagggtgggggtgggagagcaggggaatacgagccagattttgtstcagtgccactgcaaatgctccagcactccttgcagcaggcagggagagcagtgccgcagcagcgggcggatgtcaggcagtgattctcggcgcatcgctgctcttgtgttacagcagyggggctgaggctttgtcattgtcttctgcacaagtatacaagttagcgcacaccgattaaaagagaggatttcagcctgtgggctgcagttttaacctgatttgtcttaaattggtgtagtcatttaaaacgtaacgcactgctcctgttacttccaatagagcttgatgtaaaacacgagctgcttctagccctcggtctggatgtggactaaagcaatgaggaaggggagaaaagagcctttaaaagcaaccaaaaacgtgcaagccagttctaggaaaagctgccactggccatgca

SEQ ID NO: 70885 - DNA, 600 bp, Chicken  19866894346726_3
ttgtcattgtcttctgcacaagtatacaagttagcgcacaccgattaaaagagaggatttcagcctgtgggctgcagttttaacctgatttgtcttaaattggtgtagtcatttaaaacgtaacgcactgctcctgttacttccaatagagcttgatgtaaaacacgagctgcttctagccctcggtctggatgtggactaaagcaatgaggaaggggagaaaagagcctttaaaagcaaccaaaaacgtgcaagccagttctaggaaaagctgccactggccatgcacatcaactgccwcctctctgaaakccctcagctctctgctgagcttcatcctgcagtggggaggcatttcccctgctcaggcagttctctcttcatatcagatacctgcattctggctgatgctgtcgctgggatggaggcatgratatttagaagtaaccaagctgagtgtgtgacttaatactcttcttgatatatatatttttttacctttgtatattttattttatttggcttacggattaaggaggaaaggggtgccaagccaccctggtatgaattcagaaggatttgcacaagtgcagcttcact

SEQ ID NO: 70886 - DNA, 600 bp, Chicken  19866894346726_4
tctgcacaagtatacaagttagcgcacaccgattaaaagagaggatttcagcctgtgggctgcagttttaacctgatttgtcttaaattggtgtagtcatttaaaacgtaacgcactgctcctgttacttccaatagagcttgatgtaaaacacgagctgcttctagccctcggtctggatgtggactaaagcaatgaggaaggggagaaaagagcctttaaaagcaaccaaaaacgtgcaagccagttctaggaaaagctgccactggccatgcacatcaactgccwcctctctgaaakccctcagctctctgctgagcttcatcctgcagtggggaggcatttcccctgctcaggcagttctctcttcatatcagatacctgcattctggctgatgctgtcgctgggatggaggcatgratatttagaagtaaccaagctgagtgtgtgacttaatactcttcttgatatatatatttttttacctttgtatattttattttatttggcttacggattaaggaggaaaggggtgccaagccaccctggtatgaattcagaaggatttgcacaagtgcagcttcactgcgaagcacatc

SEQ ID NO: 70887 - DNA, 600 bp, Chicken  19866894346726_5
ctgttacttccaatagagcttgatgtaaaacacgagctgcttctagccctcggtctggatgtggactaaagcaatgaggaaggggagaaaagagcctttaaaagcaaccaaaaacgtgcaagccagttctaggaaaagctgccactggccatgcacatcaactgccwcctctctgaaakccctcagctctctgctgagcttcatcctgcagtggggaggcatttcccctgctcaggcagttctctcttcatatcagatacctgcattctggctgatgctgtcgctgggatggaggcatgratatttagaagtaaccaagctgagtgtgtgacttaatactcttcttgatatatatatttttttacctttgtatattttattttatttggcttacggattaaggaggaaaggggtgccaagccaccctggtatgaattcagaaggatttgcacaagtgcagcttcactgcgaagcacatctttattcaggtgatcctgtcatgaagagaggaacatgcgttcgagtayggctgtttgcttgttggtggtgacttaggaatcagttggtacaaggatttaatcattactgtttccatttaga

SEQ ID NO: 70888 - DNA, 600 bp, Chicken  19866894346726_6
ctgctcaggcagttctctcttcatatcagatacctgcattctggctgatgctgtcgctgggatggaggcatgratatttagaagtaaccaagctgagtgtgtgacttaatactcttcttgatatatatatttttttacctttgtatattttattttatttggcttacggattaaggaggaaaggggtgccaagccaccctggtatgaattcagaaggatttgcacaagtgcagcttcactgcgaagcacatctttattcaggtgatcctgtcatgaagagaggaacatgcgttcgagtayggctgtttgcttgttggtggtgacttaggaatcagttggtacaaggatttaatcattactgtttccatttagattttaaatgtagaaaatctctctgactcagagaatctcagcatttccaccagcattattccttctgtgccttgtggtgagggttagagctccccaggcaccatgagcactgcagacctggctcggtttgggttgtgcctcacttccactgctatgggatggggttgggatgttcccatacaggaccggggtcagggtgttgggctgagccccacattcccacccaga

SEQ ID NO: 70889 - DNA, 600 bp, Chicken  19866894346735_1
gaaagcctcaagagggaaaggtggaagttggtgggaaaggcagatatgatggccatgagtgggggctgtgcaggagcacgtgggttgttcccacatcacatcatcggaactaaaacttctttcatgtaaactcataagagcagttattttgccattccactcatgcttcatgagctcttctcaataccagagttgttcttatcattgttctcaagacctgtacatagaagctccccagctacccttcctcagccacacagcattcttgaacaagttggaaaacagactaaaaaggaacayaaacrggagtcaaatgagcagttgtcatagaaataaaaagcaaaggtagaattcaaccatcatctcaaagagcaaagcttcctcacgaatcacttcacaggagatgacctacaaccatcacgtcctgtgtgtgctaaaagtgagaaattaattgaatttccttttcaaaatcatttccttttcaaaaaatgcagttttccccagctcagacactttgaaccaaatcattttacagcagcaccgttgcatcttctgtgatgttttctgccacatcagacccttttgcctgcactgaaaggc

SEQ ID NO: 70890 - DNA, 600 bp, Chicken  19866894346735_2
cctcaagagggaaaggtggaagttggtgggaaaggcagatatgatggccatgagtgggggctgtgcaggagcacgtgggttgttcccacatcacatcatcggaactaaaacttctttcatgtaaactcataagagcagttattttgccattccactcatgcttcatgagctcttctcaataccagagttgttcttatcattgttctcaagacctgtacatagaagctccccagctacccttcctcagccacacagcattcttgaacaagttggaaaacagactaaaaaggaacayaaacrggagtcaaatgagcagttgtcatagaaataaaaagcaaaggtagaattcaaccatcatctcaaagagcaaagcttcctcacgaatcacttcacaggagatgacctacaaccatcacgtcctgtgtgtgctaaaagtgagaaattaattgaatttccttttcaaaatcatttccttttcaaaaaatgcagttttccccagctcagacactttgaaccaaatcattttacagcagcaccgttgcatcttctgtgatgttttctgccacatcagacccttttgcctgcactgaaaggcttact

SEQ ID NO: 70891 - DNA, 600 bp, Chicken  19866894346735_3
aaaggcttacttctgtttattcttcataagcatttcactgagtaatgtttactaccactcagtcacttctgccagcaccccaggtgcagcactgcaaagtttatgatgggtttttatgctcctattggcaaacagtcgcacagatatatcattgccaataatttcacaaggttaactttcaatcacaagcctcgctctgtcttattatctgctactcaggtaggacaacaaattgtagtaggcaataaaaaaagaaagaaaaacagcagttacagctacatcctcacttaggtcaaattyagatcttgttttacttggagacattaagccaccttgccgatacagatataataacactcctgttctgctcttcagagcaacagaaacccctgaagygaaatactgacatactctggaaacaagccctctccagctctcctctcattcctaaacccacagggaggacrgtcccctgttctcaggtgaaaaagcaggacgcgtatgggcatctgctggtttcagatgggatgtgtacggtcccatctatttctatgcagtctgactgcctccgcaacctgctacagatttctaatggatttg

SEQ ID NO: 70892 - DNA, 600 bp, Chicken  19866894346735_4
aagtttatgatgggtttttatgctcctattggcaaacagtcgcacagatatatcattgccaataatttcacaaggttaactttcaatcacaagcctcgctctgtcttattatctgctactcaggtaggacaacaaattgtagtaggcaataaaaaaagaaagaaaaacagcagttacagctacatcctcacttaggtcaaattyagatcttgttttacttggagacattaagccaccttgccgatacagatataataacactcctgttctgctcttcagagcaacagaaacccctgaagygaaatactgacatactctggaaacaagccctctccagctctcctctcattcctaaacccacagggaggacrgtcccctgttctcaggtgaaaaagcaggacgcgtatgggcatctgctggtttcagatgggatgtgtacggtcccatctatttctatgcagtctgactgcctccgcaacctgctacagatttctaatggatttgaatgttgctgaaaaactatgaagctgctgcaccttcatttgtrctctaytgaagctaccttggagcacctctacatctacaaaccactcccacygt

SEQ ID NO: 70893 - DNA, 600 bp, Chicken  19866894346735_5
aaggttaactttcaatcacaagcctcgctctgtcttattatctgctactcaggtaggacaacaaattgtagtaggcaataaaaaaagaaagaaaaacagcagttacagctacatcctcacttaggtcaaattyagatcttgttttacttggagacattaagccaccttgccgatacagatataataacactcctgttctgctcttcagagcaacagaaacccctgaagygaaatactgacatactctggaaacaagccctctccagctctcctctcattcctaaacccacagggaggacrgtcccctgttctcaggtgaaaaagcaggacgcgtatgggcatctgctggtttcagatgggatgtgtacggtcccatctatttctatgcagtctgactgcctccgcaacctgctacagatttctaatggatttgaatgttgctgaaaaactatgaagctgctgcaccttcatttgtrctctaytgaagctaccttggagcacctctacatctacaaaccactcccacygtagaatagagatataactggaatattttgcatgaaatacatgaagtaggtacagatatttagcaacctattt

SEQ ID NO: 70894 - DNA, 600 bp, Chicken  19866894346735_6
agatataataacactcctgttctgctcttcagagcaacagaaacccctgaagygaaatactgacatactctggaaacaagccctctccagctctcctctcattcctaaacccacagggaggacrgtcccctgttctcaggtgaaaaagcaggacgcgtatgggcatctgctggtttcagatgggatgtgtacggtcccatctatttctatgcagtctgactgcctccgcaacctgctacagatttctaatggatttgaatgttgctgaaaaactatgaagctgctgcaccttcatttgtrctctaytgaagctaccttggagcacctctacatctacaaaccactcccacygtagaatagagatataactggaatattttgcatgaaatacatgaagtaggtacagatatttagcaacctatttttctctacatatagaacccacaaaattattaccactatacccacaggagcaactgcagcaataatgaagagcccacgtgtcctaaggccactccagtcatcagttgcttcctcaaactggaaactgatgaagaaacagcagccaggatgacctggctgctattccttggtgggttt

SEQ ID NO: 70895 - DNA, 600 bp, Chicken  19866894346735_7
aataacactcctgttctgctcttcagagcaacagaaacccctgaagygaaatactgacatactctggaaacaagccctctccagctctcctctcattcctaaacccacagggaggacrgtcccctgttctcaggtgaaaaagcaggacgcgtatgggcatctgctggtttcagatgggatgtgtacggtcccatctatttctatgcagtctgactgcctccgcaacctgctacagatttctaatggatttgaatgttgctgaaaaactatgaagctgctgcaccttcatttgtrctctaytgaagctaccttggagcacctctacatctacaaaccactcccacygtagaatagagatataactggaatattttgcatgaaatacatgaagtaggtacagatatttagcaacctatttttctctacatatagaacccacaaaattattaccactatacccacaggagcaactgcagcaataatgaagagcccacgtgtcctaaggccactccagtcatcagttgcttcctcaaactggaaactgatgaagaaacagcagccaggatgacctggctgctattccttggtgggttttggttc

SEQ ID NO: 70896 - DNA, 600 bp, Chicken  19866894346735_8
gygaaatactgacatactctggaaacaagccctctccagctctcctctcattcctaaacccacagggaggacrgtcccctgttctcaggtgaaaaagcaggacgcgtatgggcatctgctggtttcagatgggatgtgtacggtcccatctatttctatgcagtctgactgcctccgcaacctgctacagatttctaatggatttgaatgttgctgaaaaactatgaagctgctgcaccttcatttgtrctctaytgaagctaccttggagcacctctacatctacaaaccactcccacygtagaatagagatataactggaatattttgcatgaaatacatgaagtaggtacagatatttagcaacctatttttctctacatatagaacccacaaaattattaccactatacccacaggagcaactgcagcaataatgaagagcccacgtgtcctaaggccactccagtcatcagttgcttcctcaaactggaaactgatgaagaaacagcagccaggatgacctggctgctattccttggtgggttttggttctcagtatgtacaagggtcgctctgaaagtaatgcctcctatttta

SEQ ID NO: 70897 - DNA, 600 bp, Chicken  19866894346737_1
tccagagccaattgtgaagaaaaaaatggatgactgactacagcagcaggctgcctttattattcataacatcacttccacttctgacccactaagctttttcttgttttgctgtcttaaggagagaccaaacccgaagtacacaactcctggagtacatgttttaatcaatggttcctcaaccttcaccagtagtcttggctaattctcagtatcagtgggatgaagatagctgggtctgtacatgtcacagtcaatgtaaccaggcacaagatctccctgctttcttcatgactccaygcatgcattaagtctgccctacaagycatacaggcataacaagtcaagtacacaaaatgtaaataggttacaagtgtgactagatattttccagtctgaaattagggtaaaatatgcatttaatactccacacagaaccctgtagtccagcttactgcagggatggcactgaaagagtggttgtgaacagtggagagcccgtgctgttcttctacatcatctcaatcatccattcccatgaatttattttaattgtttttagctttattggatggttacatgtattcatctgaacagcat

SEQ ID NO: 70898 - DNA, 600 bp, Chicken  19866894346737_2
tggatgactgactacagcagcaggctgcctttattattcataacatcacttccacttctgacccactaagctttttcttgttttgctgtcttaaggagagaccaaacccgaagtacacaactcctggagtacatgttttaatcaatggttcctcaaccttcaccagtagtcttggctaattctcagtatcagtgggatgaagatagctgggtctgtacatgtcacagtcaatgtaaccaggcacaagatctccctgctttcttcatgactccaygcatgcattaagtctgccctacaagycatacaggcataacaagtcaagtacacaaaatgtaaataggttacaagtgtgactagatattttccagtctgaaattagggtaaaatatgcatttaatactccacacagaaccctgtagtccagcttactgcagggatggcactgaaagagtggttgtgaacagtggagagcccgtgctgttcttctacatcatctcaatcatccattcccatgaatttattttaattgtttttagctttattggatggttacatgtattcatctgaacagcatcaaatgcatgagtaaaacccatggct

SEQ ID NO: 70899 - DNA, 600 bp, Chicken  19866894346751_1
ttagccaggactgctgagaaatgatggagagtggcttggcaaccacacctgccaactccctcagaactctacggtgcaatccatccagcaccatggacttgtgagcatccagctttcggagcaggtccaaaaccatctcattgtggattatgcagggcccgttttgttccctatccctatctatcaacgcagggggctgtgttccctgagagtaacaagtcttactattaaagactgaggcaaagaaggcattaagtacctcagtcttatcctgatccttggtcaccaagctgccctccrcatccaaaaagggatggagattgtccctagccttcctcttaccgttgatgtatttatagaaatatttattgttgtccttatcatgtgagtatgaaggacaaaaaatttgagataaataatgctcctgctttaagacttgttcagtttctggggactgtttgggccttttcaatcacacctaaagattttctttgtgactctaggaactctttccaaatgggagaataaggatactgtctgtattgctctgcatgtgagtgattggagttagtatgttgttgctttgtgctcacttctgac

SEQ ID NO: 70900 - DNA, 600 bp, Chicken  19866894346759_1
cactagcatcatcctcccttcacccattagcactggcactgggcaccagtgagacaggagagagactgggcacccaggagacaccaagagagctccttgctccctggcactgcatgtacccattgcttttgcagcatttatggcaaacgtctgatttatagctgctttggacccagcacccagctggacttgccagaccacagcattggtctctgtgtccctgtggacagaggggttattggggttatctgtgcacctggcacccaggtgcagtgcccaatgacaagcaccggggagggsatggctggttttgggaacaccatctgtgctttgctggcatcagctcttccagaagtgacctgtttctcccttctctcccaccagcacatcaacaatgatcatatccatggggagaagaaggagtttgtctgccgctggcaggactgcacrcgggagcagaagcccttcaaagctcaatacatgctggtggtgcacatgcgaaggcacactggagagaagccccacaagtgcacggtgagctggcaggggcgtgcagaacttctcagcttggcaattgggacactgaattttgggtcacaa

SEQ ID NO: 70901 - DNA, 600 bp, Chicken  19866894346759_2
ctgatttatagctgctttggacccagcacccagctggacttgccagaccacagcattggtctctgtgtccctgtggacagaggggttattggggttatctgtgcacctggcacccaggtgcagtgcccaatgacaagcaccggggagggsatggctggttttgggaacaccatctgtgctttgctggcatcagctcttccagaagtgacctgtttctcccttctctcccaccagcacatcaacaatgatcatatccatggggagaagaaggagtttgtctgccgctggcaggactgcacrcgggagcagaagcccttcaaagctcaatacatgctggtggtgcacatgcgaaggcacactggagagaagccccacaagtgcacggtgagctggcaggggcgtgcagaacttctcagcttggcaattgggacactgaattttgggtcacaaacatgtgcagacagggtcatctctgcttgcaggttgcrccctggggacagtgcaggtgcaccaggaggagggcagttgagtctggtgggcaaaactgcattttgtggggaaactgggttcagctctactgcagagatatagagtgactca

SEQ ID NO: 70902 - DNA, 600 bp, Chicken  19866894346759_3
atcagctcttccagaagtgacctgtttctcccttctctcccaccagcacatcaacaatgatcatatccatggggagaagaaggagtttgtctgccgctggcaggactgcacrcgggagcagaagcccttcaaagctcaatacatgctggtggtgcacatgcgaaggcacactggagagaagccccacaagtgcacggtgagctggcaggggcgtgcagaacttctcagcttggcaattgggacactgaattttgggtcacaaacatgtgcagacagggtcatctctgcttgcaggttgcrccctggggacagtgcaggtgcaccaggaggagggcagttgagtctggtgggcaaaactgcattttgtggggaaactgggttcagctctactgcagagatatagagtgactcaggacaggtgacttaatgtgcaaaaaaggcaacgtggtgcttgtgtccaagaaggaaactcaggagcaccacactatagggaagcagccagccttggttgtgtgtaattcagcgtcacattcagcattgcctagcactactgctgggggctacaagttacctgcacccatgtacctggacatgcacaca

SEQ ID NO: 70903 - DNA, 600 bp, Chicken  19866894346761_1
ggggccgatgcgcatctctgtgcacagtgccgcgttcctctgcctgagtcgcagtgccttcagcccttcacacttcccttacgctgacctcccactgaaggaatggctgaactggggccatagggctgggaaagctccgagccacatgaaaaccaagaagataaaacacaatggctgatttttcagctgctgctccctccttgtagcttggtgagacagtaagcaacaaagcagagaatgtcacagagcagtggagcactggaccactctgcttgccggggtctctggggacaatgcagmcctttgttgcagtgcagtcaaactgaatatctaaacaaatgttccagaccgagttacagctctgaagcaaagcctggatgccagcaatgtcctcagaaagccaaaagtgggtggtaagcaaagccagaggcttcttaactggagctgtgatccccatcctgttaactggaacaggacagagggtctgtgctgagctctcagtacaaatgagacctttgttgaatttcgcacagggctccccttctcctcttataacatccaagagacaaaaggcaagaacagaaagggaaaaaagccttg

SEQ ID NO: 70904 - DNA, 600 bp, Chicken  19866894346762_1
aatttggaggagtagtgttttgcttaattttcaagcaaaagtcgacactgctgtgtgttattcaagtctatctgagagtttcaggtttttaaacgtgtgtcattttgaacattcaagtatgggcattgcataggtatttcacatacatgtttatattaactagttaagatggtgtaaacttcctgaactgttaacacagccaaagttttagtcagtgctgtgaatttgtattagtatgctcagtgaggaatatttaaaaagtaatttatctcaacaatacacaaaactaattcaaaattmttgtgtttatttataggagactttgcaaattgatgaagatgatagaccagagctggtgtggtggaaatgcaagaaatgggcattacatattgtagctcgtctttttgaacggtaaggaactaacaagctgattaaaaactaaattagggttacaaatctttgacgttccttgggtacagttagacaagacagttgagttggtttaacagctcatagtcaccaaagagatattccyacagctgtcctctgccttgcactggcacagccaatggcttgagctcttagtgagattatttggct

SEQ ID NO: 70905 - DNA, 600 bp, Chicken  19866894346762_2
atgctcagtgaggaatatttaaaaagtaatttatctcaacaatacacaaaactaattcaaaattmttgtgtttatttataggagactttgcaaattgatgaagatgatagaccagagctggtgtggtggaaatgcaagaaatgggcattacatattgtagctcgtctttttgaacggtaaggaactaacaagctgattaaaaactaaattagggttacaaatctttgacgttccttgggtacagttagacaagacagttgagttggtttaacagctcatagtcaccaaagagatattccyacagctgtcctctgccttgcactggcacagccaatggcttgagctcttagtgagattatttggctctcraagctggcaagaaactagcaaggaaatgtactcttttttttcttcttttttttttatgtattcatctacaactgcttgtattcttgaatacaaaggcagagaaagatttgaaaagcaatccaaaacgatgkaagttacagagcttayggcaacagtgcagctgtatttacttgrctgtaacgttacactgtatgaggttctaagaaaagaaaagggaagtgaggcattatg

SEQ ID NO: 70906 - DNA, 600 bp, Chicken  19866894346762_3
gtttatttataggagactttgcaaattgatgaagatgatagaccagagctggtgtggtggaaatgcaagaaatgggcattacatattgtagctcgtctttttgaacggtaaggaactaacaagctgattaaaaactaaattagggttacaaatctttgacgttccttgggtacagttagacaagacagttgagttggtttaacagctcatagtcaccaaagagatattccyacagctgtcctctgccttgcactggcacagccaatggcttgagctcttagtgagattatttggctctcraagctggcaagaaactagcaaggaaatgtactcttttttttcttcttttttttttatgtattcatctacaactgcttgtattcttgaatacaaaggcagagaaagatttgaaaagcaatccaaaacgatgkaagttacagagcttayggcaacagtgcagctgtatttacttgrctgtaacgttacactgtatgaggttctaagaaaagaaaagggaagtgaggcattatgtaggaaataatggcttagtagaatatctgtggagagggtttgttggggatggaaggctactcaggatca

SEQ ID NO: 70907 - DNA, 600 bp, Chicken  19866894346762_4
agctggtgtggtggaaatgcaagaaatgggcattacatattgtagctcgtctttttgaacggtaaggaactaacaagctgattaaaaactaaattagggttacaaatctttgacgttccttgggtacagttagacaagacagttgagttggtttaacagctcatagtcaccaaagagatattccyacagctgtcctctgccttgcactggcacagccaatggcttgagctcttagtgagattatttggctctcraagctggcaagaaactagcaaggaaatgtactcttttttttcttcrtttttttttatgtattcatctacaactgcttgtattcttgaatacaaaggcagagaaagatttgaaaagcaatccaaaacgatgkaagttacagagcttayggcaacagtgcagctgtatttacttgrctgtaacgttacactgtatgaggttctaagaaaagaaaagggaagtgaggcattatgtaggaaataatggcttagtagaatatctgtggagagggtttgttggggatggaaggctactcaggatcatttgtgatatagaaaatactgtattttcgtgccacagaaggctctt

SEQ ID NO: 70908 - DNA, 600 bp, Chicken  19866894346762_5
aaactaaattagggttacaaatctttgacgttccttgggtacagttagacaagacagttgagttggtttaacagctcatagtcaccaaagagatattccyacagctgtcctctgccttgcactggcacagccaatggcttgagctcttagtgagattatttggctctcraagctggcaagaaactagcaaggaaatgtactcttttttttcttcttttttttttatgtattcatctacaactgcttgtattcttgaatacaaaggcagagaaagatttgaaaagcaatccaaaacgatgkaagttacagagcttayggcaacagtgcagctgtatttacttgrctgtaacgttacactgtatgaggttctaagaaaagaaaagggaagtgaggcattatgtaggaaataatggcttagtagaatatctgtggagagggtttgttggggatggaaggctactcaggatcatttgtgatatagaaaatactgtattttcgtgccacagaaggctctttgcaatgtaagtaaatacctgtcttctctacgttttaaaggtatggaagcccgggaaatgtaactaaagaatactttgaattctc

SEQ ID NO: 70909 - DNA, 600 bp, Chicken  19866894346762_6
acaaatctttgacgttccttgggtacagttagacaagacagttgagttggtttaacagctcatagtcaccaaagagatattccyacagctgtcctctgccttgcactggcacagccaatggcttgagctcttagtgagattatttggctctcraagctggcaagaaactagcaaggaaatgtactcttttttttcttcttttttttttatgtattcatctacaactgcttgtattcttgaatacaaaggcagagaaagatttgaaaagcaatccaaaacgatgkaagttacagagcttayggcaacagtgcagctgtatttacttgrctgtaacgttacactgtatgaggttctaagaaaagaaaagggaagtgaggcattatgtaggaaataatggcttagtagaatatctgtggagagggtttgttggggatggaaggctactcaggatcatttgtgatatagaaaatactgtattttcgtgccacagaaggctctttgcaatgtaagtaaatacctgtcttctctacgttttaaaggtatggaagcccgggaaatgtaactaaagaatactttgaattctcagagttttttttaaaa

SEQ ID NO: 70910 - DNA, 600 bp, Chicken  19866894346762_7
gttagacaagacagttgagttggtttaacagctcatagtcaccaaagagatattccyacagctgtcctctgccttgcactggcacagccaatggcttgagctcttagtgagattatttggctctcraagctggcaagaaactagcaaggaaatgtactcttttttttcttcttttttttttatgtattcatctacaactgcttgtattcttgaatacaaaggcagagaaagatttgaaaagcaatccaaaacgatgkaagttacagagcttayggcaacagtgcagctgtatttacttgrctgtaacgttacactgtatgaggttctaagaaaagaaaagggaagtgaggcattatgtaggaaataatggcttagtagaatatctgtggagagggtttgttggggatggaaggctactcaggatcatttgtgatatagaaaatactgtattttcgtgccacagaaggctctttgcaatgtaagtaaatacctgtcttctctacgttttaaaggtatggaagcccgggaaatgtaactaaagaatactttgaattctcagagttttttttaaaaacgtatgctgtgggcatacaacaagta

SEQ ID NO: 70911 - DNA, 599 bp, Chicken  19866894346763_1
  misc_feature (1)..(66): n is any nucleotide
nnnnnnnnnnnnnnnnnnnnnnnnnnnnnnnnnnnnnnnnnnnnnnnnnnnnnnnnnnnnnnnnnncaaataaacttcaggactctctgggagaggcactgagcattgtagtccataacaggactgctgttccacgtgaacccactctgtatttctaggaatagaggaagaagaggctcaggggagaccttattgctctctataactacctgaagggaggttgtagtgagctgggggtcagcctcttctctcgggtgactagtgataggactagagggaatggcttcaagctgtgccagrgaagattcaggctggacgttaggaaatactacttctctgaaagggtggtcaggcactggaatgggctgcccagagaggtggtggagtcactgaccctggaggtgttcaaggaacgtttggacgttgtgttgagggacatggtttaatgagaactattggtgatgggtggatggttggactgggtgatcctgtgggtcttttccaaccctggtgattctatgattctatgcacctacagctaagaaaatcccttctacacttctttgttaaataattcctaatacgaatyggccccaaag

SEQ ID NO: 70912 - DNA, 600 bp, Chicken  19866894346763_2
gctgtgccagrgaagattcaggctggacgttaggaaatactacttctctgaaagggtggtcaggcactggaatgggctgcccagagaggtggtggagtcactgaccctggaggtgttcaaggaacgtttggacgttgtgttgagggacatggtttaatgagaactattggtgatgggtggatggttggactgggtgatcctgtgggtcttttccaaccctggtgattctatgattctatgcacctacagctaagaaaatcccttctacacttctttgttaaataattcctaatacgaatyggccccaaagccactcaaagtccccagagccattcatgacccacagggatgaggaacccaaaaaagcttaagratttaaagccctcgagagctgaggttgtccccagcagactgatggagagcggtgatgtttgtcttccccactgctgcttttaagcgcattgggaatccaagggggagggattaaataacggggacggtttgtagtagttccactcagctacgagatatctgccagtaaataaaaaatatcaggaatagggagcaaccacaggtcttgggagcagtgatgcggcaagt

SEQ ID NO: 70913 - DNA, 590 bp, Chicken  19866894346763_3
gggctgcccagagaggtggtggagtcactgaccctggaggtgttcaaggaacgtttggacgttgtgttgagggacatggtttaatgagaactattggtgatgggtggatggttggactgggtgatcctgtgggtcttttccaaccctggtgattctatgattctatgcacctacagctaagaaaatcccttctacacttctttgttaaataattcctaatacgaatyggccccaaagccactcaaagtccccagagccattcatgacccacagggatgaggaacccaaaaaagcttaagratttaaagccctcgagagctgaggttgtccccagcagactgatggagagcggtgatgtttgtcttccccactgctgcttttaagcgcattgggaatccaagggggagggattaaataacggggacggtttgtagtagttccactcagctacgagatatctgccagtaaataaaaaatatcaggaatagggagcaaccacaggtcttgggagcagtgatgcggcaagtgcagggaatctgaatgccgcagaggggcggagggaaggctggcagcaccaatgctgatgtttt

SEQ ID NO: 70914 - DNA, 600 bp, Chicken  19866894346775_1
aaaaggacaaacatacaaaaaaaatcacgtaaattactgtacaaagtgccttatttgcatgagggagaggtagtatcattgataaatgcaatgcattttctgactttaaacaagcaagtctcaaacatgtatttgttaatcttggagtgctcacacaattcagaatcttttctggcagttttcattaaatcaagttctcatttttaaacttgagaacagaccttcaaattaaaaaattgctgaggcaataacttgctttttgtagtgttatgtgacctatcaaagcaagaagacaaaaawccctaacaccctttgtcaagttacaaacaagtaaaaaactggaacttagtccattttggaatacgtagttctgttacagaaggctttaaacaagggattcactattgcagagctaaaacacagaaaatccctttttctaaaatgaagccttacctgagtaaggaatctagggcaaccctcaaagtgaagatgtaaaaggttgctttttgttttctaaatactagagctataaatagaataacttaaataaataaattaggtggctaatttacaactcagcagattgctctttcagtagta

SEQ ID NO: 70915 - DNA, 600 bp, Chicken  19866894346778_1
ccaaatataataacaaaccaaaaacagaactggatctcaaaggctaacagtttgaacacattttgtctagtggccacacagccttaacttcagtgctggtgttcactttagcactggcttgaaatggagaggacttccttaggtattcttcacttaaggagccaaaaaggaaagaacatcctagggataaaatatgtccatacaagactgtgccatctaaattcaattccaaattcagcaacagctctctgacagtaagcaagccatttgctttgctcccttatttccttcccttgtctyggttttcccacctgccctatccagtaattttcaagctttaagagatcttaarggtttctcaaatccaacactgtttgcatgggtcattctagatgctcccatagagtaataaatgacttagaaagatatacacgtagaacttaaccagaaagagctataaactcatgtagtccagtggggattcagcagaagggtcaagaactccaagtactctctggagagaagagctagaaagcaagaccagctgcatttagcgcgagccagagttatttgctgcagagcacagggagcaagctggtg

SEQ ID NO: 70916 - DNA, 600 bp, Chicken  19866894346778_2
tgaacacattttgtctagtggccacacagccttaacttcagtgctggtgttcactttagcactggcttgaaatggagaggacttccttaggtattcttcacttaaggagccaaaaaggaaagaacatcctagggataaaatatgtccatacaagactgtgccatctaaattcaattccaaattcagcaacagctctctgacagtaagcaagccatttgctttgctcccttatttccttcccttgtctyggttttcccacctgccctatccagtaattttcaagctttaagagatcttaarggtttctcaaatccaacactgtttgcatgggtcattctagatgctcccatagagtaataaatgacttagaaagatatacacgtagaacttaaccagaaagagctataaactcatgtagtccagtggggattcagcagaagggtcaagaactccaagtactctctggagagaagagctagaaagcaagaccagctgcatttagcgcgagccagagttatttgctgcagagcacagggagcaagctggtgcacgccacagctcccaccctgctcttctaagtaaccaaccctgcaggaaaac

SEQ ID NO: 70917 - DNA, 600 bp, Chicken  19866894346782_1
taaatccatggagctccagaaatggaaacagcctggttgtcatagcagcagagcatgctacctgggctaattactcagtctgagagacagagctaattagcccagaagcagcatcacactgacacagatccttctgggacctgggcacacatcctgctgattagacatttcagcttccttgcagctagtgcaaaagaaaaacgttccttcaaataagaaagcaattgaaaagggctctaaaacaaacacagaaaactgacactgagcagcaactgcaccacagagaaggacagctatatycacactgctacagaccaaactaccaaatctgtactggcaaactcagctgcatggatgtacttattccctccagtccagtggaagttacttgagcaaccagtttatcactacgacagcctaaatcctacaagctccctgttactgaagaatgcaaactgctacattcagtttccggcagacccagaaggcggcaaatacaacacccgtgttacggaccgtgaatactgtagaaaacaaatattaccaaacaaacaaatcttcctaggattggaaacagcatttacttatgggttttccaaa

SEQ ID NO: 70918 - DNA, 599 bp, Chicken  19866894346806_1
  misc_feature (1)..(18): n is any nucleotide
nnnnnnnnnnnnnnnnnnatgaagggtcccacttccttgcacatgctcagtgattttgagcgggggtctcaagaccctcagagatggaggaagcagtcttcctcttcatgaccaccaattgccttcctcttgttttttctaggttggcagtttcatggtaatgtactggagagggcccccatactgacttagataacagtgatatacttggcttcttgagcagataaaggacgttctgcttatcatcagacccaacgtgttttgcttagcattagctagttttgtgaaagcaagtatcgytcagttacrtacgcttaataccagaccaagtgcattttgcatagcattagctaggttagtgatatcacgtccttccttgcaaaaagatgtgtattgcaagaaaatcatttactatacagagcaaatgagttgagaccttcttcatcatgccagctgaaagagctaactacgaggttaagaaaaaagcagatgtgctataatgacatttctggaagaattttaaatcccatttgtttacaagaagatgacaaaacaacaggcatttaaatacttgttatttttactgtcttgctgttgaa

SEQ ID NO: 70919 - DNA, 599 bp, Chicken  19866894346806_2
  misc_feature (1)..(9): n is any nucleotide
nnnnnnnnnatgaagggtcccacttccttgcacatgctcagtgattttgagcgggggtctcaagaccctcagagatggaggaagcagtcttcctcttcatgaccaccaattgccttcctcttgttttttctaggttggcagtttcatggtaatgtactggagagggcccccatactgacttagataacagtgatatacttggcttcttgagcagataaaggacgttctgcttatcatcagacccaacgtgttttgcttagcattagctagttttgtgaaagcaagtatcgytcagttacrtacgcttaataccagaccaagtgcattttgcatagcattagctaggttagtgatatcacgtccttccttgcaaaaagatgtgtattgcaagaaaatcatttactatacagagcaaatgagttgagaccttcttcatcatgccagctgaaagagctaactacgaggttaagaaaaaagcagatgtgctataatgacatttctggaagaattttaaatcccatttgtttacaagaagatgacaaaacaacaggcatttaaatacttgttatttttactgtcttgctgttgaaatgagacag

SEQ ID NO: 70920 - DNA, 600 bp, Chicken  19866894346812_1
ttgcatctgcctttaagcactgtcctagcaggaactgagggaggctgcgcactcttgtcattagagctgtaaatgctgttggacaaccataatttgattggcttcaaatctacaggatcatagagcacagagagatccttgaaacacagagggacactttctagcattgtatgaaaggcatagcactggatatgttgtctttgtttaactatcagttgttttcaatcaaacaacaatgtaaatgcagactgtccttgatggaaggtaccttgagaaactcatagcttgagtatgactccyagtatgttctttcatcttaaactttggtggataactttgactttattgcaggaagaagaataaaaaaaagaaaaataagaagagccggaaggaatccagtgattcaagcagtgaagattctgacgatgaagcacttcaagggggaagatctctggattgagagatcaagtaggttcccatcaatttgtcttgaaacttcttgctgttctttacatgcttttttttttttttgttgggtgtctgctgacctgttgactgtttgataacaaagaacaggtacagtattaatctgctttgctg

SEQ ID NO: 70921 - DNA, 600 bp, Chicken  19866894346812_2
gctgtttgatcattgcagaaaatatggaagctgatagcttgattggaccagaagctcccaaaacacatgcgtctcaagatgataggcctttgaagtgagtactctaaaatggtaccttgagcaaatcaagtaaatccagcgtgaagatttctgctcaaaaagactgttagaataatatggtttatatcagagagagatgctgtaccagaaaactaagacagaagtggtagtggtgcttgtctttactctgacctgagttcaagtagagaagtctgttttatgcattttatcctggattcrtagaaaattaattgatctttacttcagtaacgtgcctttactgtaatgctctgcagcgttgtaactgtatacagccttcattactgtttaaccagaatttattaaactggttgcttaaaatgttcttgctaagattagccttaagtatgaaatgggaacgtacttgggaaagagtaggaaagtccttaaaatgtagctgtagccaayagtgattagggaagctggatgtttagctcagactcactcaaattgagactgattaaaatccctgctgtttatctctctgtttatttatttagc

SEQ ID NO: 70922 - DNA, 600 bp, Chicken  19866894346812_3
gaaaactaagacagaagtggtagtggtgcttgtctttactctgacctgagttcaagtagagaagtctgttttatgcattttatcctggattcrtagaaaattaattgatctttacttcagtaacgtgcctttactgtaatgctctgcagcgttgtaactgtatacagccttcattactgtttaaccagaatttattaaactggttgcttaaaatgttcttgctaagattagccttaagtatgaaatgggaacgtacttgggaaagagtaggaaagtccttaaaatgtagctgtagccaayagtgattagggaagctggatgtttagctcagactcactcaaattgagactgattaaaatccctgctgtttatctctctgtttatttatttagctatgggcatgccctgttgccgggtgaaggtgcagcaatggcagagtatgtaaaagcaggaaaacgcatacctcggagaggtgagattggcttgaccagtgaagaaattgcatcgtttgagagctctggttatgtaatgagtggcagcaggtatgtttttgatgatggtaatatttcagtaatattttcaaaagctgcttcctttatt

SEQ ID NO: 70923 - DNA, 600 bp, Chicken  19866894346814_1
attctgtgatgattctaagacttacagactgctatggagtatagcacacccaaaaataccacccaaacaaatgcgaccttgacttcatcaacagttttaactgaatagcattatatgagatggaaaagaaaagattttaagcaagtatagttgacttcatatgtttcggaccacaacaaggccagagatcagggagtgacagaaaccttatacatccttagacacagaggaattcaaagactttggagtggggctatataagtagcaaagtcattggtgccttataccaacaacctgctwcagaaaccaacagatatctcagacagtagccatggagcatgggggacagcagccacatgcatctcaggyagaaggagccactacacatagaaatcaggtcactaactgggacccagcatatcagactgctggaacaaggctcctgctttcacatacctgtaaaactggtctgaactggcagcaagactgtgcaagtatgaggagtgtgcaagtcagtgtatgagtcttgcaggttaaaaacaaacaaaaaagttactattcaagtcaataaattgtaagctgctacccagcaacaggatt

SEQ ID NO: 70924 - DNA, 600 bp, Chicken  19866894346814_2
aatgcgaccttgacttcatcaacagttttaactgaatagcattatatgagatggaaaagaaaagattttaagcaagtatagttgacttcatatgtttcggaccacaacaaggccagagatcagggagtgacagaaaccttatacatccttagacacagaggaattcaaagactttggagtggggctatataagtagcaaagtcattggtgccttataccaacaacctgctwcagaaaccaacagatatctcagacagtagccatggagcatgggggacagcagccacatgcatctcaggyagaaggagccactacacatagaaatcaggtcactaactgggacccagcatatcagactgctggaacaaggctcctgctttcacatacctgtaaaactggtctgaactggcagcaagactgtgcaagtatgaggagtgtgcaagtcagtgtatgagtcttgcaggttaaaaacaaacaaaaaagttactattcaagtcaataaattgtaagctgctacccagcaacaggattctgttctcgcaaacacctcactcaattcccttaacacagccatagataatagctctcttttagtttatt

SEQ ID NO: 70925 - DNA, 599 bp, Chicken  19866894346819_1
  misc_feature (1)..(27): n is any nucleotide
nnnnnnnnnnnnnnnnnnnnnnnnnnncatacacccttccaactccttggatcatatctagttccttcatacctcccgcatcatcctacataatcacaagaccaacaagcactggaacatttatctgcagctttagcaggataaaacatgcatgtatgagaaggcaagaacctttaccaagatttaaagaacaccactttcatgcctttgactttgctcacaggaatacttaccagctgcggtaagaagagagagcaaatgatctatcacaggttgttttcatttaagatgacatgaagkgcttattcaacttcaagaaatggaaaacaaacaaacaaacaaacaaaaaacacgtgggggtggaattcaaatgcagatgcccaattttacactgagctacagaagagattcaaaattgctccacaattctccagtctgtgtccagtaaagagtacttcatccaggactcttctggtgctgaggcagcttgagaacacagaagggctgtcctcactgatcataaatgccaacctttcaccccagcttctcccctaaccagcagaatgctgcatgttggaaccaaggcagtgagcatttgc

SEQ ID NO: 70926 - DNA, 600 bp, Chicken  19866894346824_1
ggagaggtgttgtaattgggcaggaaagtgggtacagttccttgctcccactcaagatttccctgaaatcccgcactgttgctgtgattagagagaagtgattattacaaggaaatctgctaaaactactagcagcattagaggtgttacagccagcagaataaatgatgccattctccggcaacaaacttgatgtgacaaactctcttgtgcgtcgtataggctggggggaacaaaaaaaaggaagaacatggcttcaccaagggtaaatcctgcctgaccaaccttgttgttttctaygatggggtaactgcatcagtgggtaagggaagaaccactgatgtcatctactgaactgggcttcagtaaggcctttgacacagtcctctatagcatccttctctccaaattggaaagatayagatttgatgggtgaaccattcagtggatgaaaagcttgttgcaacatcacacccagagattagcagtgaatggctcaatgtctggatggaagtcagtgataagtgatgtccctcatgtgtctgtacaggaccgatactctttaataccttcatcagttacatcaactgttttgcttca

SEQ ID NO: 70927 - DNA, 600 bp, Chicken  19866894346824_2
aaaactactagcagcattagaggtgttacagccagcagaataaatgatgccattctccggcaacaaacttgatgtgacaaactctcttgtgcgtcgtataggctggggggaacaaaaaaaaggaagaacatggcttcaccaagggtaaatcctgcctgaccaaccttgttgttttctaygatggggtaactgcatcagtgggtaagggaagaaccactgatgtcatctactgaactgggcttcagtaaggcctttgacacagtcctctatagcatccttctctccaaattggaaagatayagatttgatgggtgaaccattcagtggatgaaaagcttgttgcaacatcacacccagagattagcagtgaatggctcaatgtctggatggaagtcagtgataagtgatgtccctcatgtgtctgtacaggaccgatactctttaataccttcatcagttacatcaactgttttgcttcacttatacactcattcttcagggctagttcagataagtagcattggtttggygtttgtggttgcaaaaatattttccttagtgcttgacaactgcagatgacattttatgtagctcttctaa

SEQ ID NO: 70928 - DNA, 600 bp, Chicken  19866894346824_3
tgaactgggcttcagtaaggcctttgacacagtcctctatagcatccttctctccaaattggaaagatayagatttgatgggtgaaccattcagtggatgaaaagcttgttgcaacatcacacccagagattagcagtgaatggctcaatgtctggatggaagtcagtgataagtgatgtccctcatgtgtctgtacaggaccgatactctttaataccttcatcagttacatcaactgttttgcttcacttatacactcattcttcagggctagttcagataagtagcattggtttggygtttgtggttgcaaaaatattttccttagtgcttgacaactgcagatgacattttatgtagctcttctaacacaagaattttatcgttttcctggttctttgtacagaatgctagatatctagttgcatcaattcctttgtgtattattcattatttttagtcacacagccacataatttcatctgtaaactaccatgtgattcaaaatgagtcaactaattgccatttttgacatggccgaagtccactgcttattacagaataatctgtaaacaaaataattttgtagcagagatgac

SEQ ID NO: 70929 - DNA, 600 bp, Chicken  19866894346825_1
aaggagtctattctgctccccaggctccatgaagtattggcagccatcagaaatcaagttttcactttctgttttcccaaaatccagtgggttttatattgtttagattttgcatatcaggaggatgcaaagaaaatacaatgcacatactttgcttagtcaaagaatattctagctggaaagtgccacatgagtattcgaacaactgactctttggagaacctatcatcaaactaggtgagacatgaagaaatcaactcatttgctttcatcatacaataaatctcacacacacacacyaaaaaaaaaaaccctaaatattgagggaatcatacatcactacaaagttttaagcatctccaaaagcaacacaatcaatttgataggtttggcatgtatccttcacatcaaaagttgcatcgtgtctaacaaactccttttccacaaagtacttaaaaattcagtacaaaataagcagtttataaaatatcctaacacatcaaaaacgcatctccccaacaagccaaataccagattgcggaaagctgaaattttgaactagaaggctctattatgtccattaaatatactatggatgac

SEQ ID NO: 70930 - DNA, 600 bp, Chicken  19866894346827_1
actgtcagagccaacatcgctgccatcacggagtcagacaaattcttcatcaatggctccaactgggaagggatcctggggctggcctatgcttgagatcgcacgggtgagtcctgatagcacctgggggcccacatctgccagtactgcatccagcttctttcagtaaacataggcatcctgtcccagcacagcacaccgtgctcaaggggttaaatttcttctctccttagctccacacagtcccaatgggctaaatagggtgtgcatttacaagactgacattgagccctgccccarcagcatacagagccaggattcctggggcacagagcaaggggacatctgggcatcctccactgacacatccctgtcctgcctctgcttttctccagcctgacgacagcctggagcccttttttgattccctggtgaagcagacccaggtgcccaacatcttctccctccagctttgtggggcaggcttctcacccaacgagacagagaccttggcatcagtgggaggcagcatggtgagtgccctagagcaaggaaccagcatggcagcgggagactggagattctccacgtggtttgggt

SEQ ID NO: 70931 - DNA, 600 bp, Chicken  19866894346827_2
agcaaggaaccagcatggcagcgggagactggagattctccacgtggtttgggtgtccccgtgggcagggatggccacacagaatgtgccctggctggaggtggcaacatgtggtatcaggcacctttctgtccccattgcagatcattggtggcatcgaccgctcgctgtatgtgggtgacatctggtacacacccatccggaaggagtggtactacgaggtcatcattgtcaagctggaggtcaatgggcaggacctgaacatggactgcaaagaggtgacaggggcaccagggggayctgccctgcgaggggttgctttgttgttgaaggcatctgtcctttggttacagctaaaatcattgagtgtagtgaatgctgcaggtcctggtgcctgggaattcagtgcttggttggtgatggaggctgagggcacgaggtagcttggccaggggtgaagctgagaygagygtgggctttgagtccgtcacggtagaaaacaggggatgggctcagcctcattagctgtgcagggggagccagagcagtcaggtgctggcatggaggggagctgggctggtttacacctggatcactcct

SEQ ID NO: 70932 - DNA, 600 bp, Chicken  19866894346827_3
ctgtatgtgggtgacatctggtacacacccatccggaaggagtggtactacgaggtcatcattgtcaagctggaggtcaatgggcaggacctgaacatggactgcaaagaggtgacaggggcaccagggggayctgccctgcgaggggttgctttgttgttgaaggcatctgtcctttggttacagctaaaatcattgagtgtagtgaatgctgcaggtcctggtgcctgggaattcagtgcttggttggtgatggaggctgagggcacgaggtagcttggccaggggtgaagctgagaygagygtgggctttgagtccgtcacggtagaaaacaggggatgggctcagcctcattagctgtgcagggggagccagagcagtcaggtgctggcatggaggggagctgggctggtttacacctggatcactcctcctctcactgtctgcagtacaactatgacaagagtatcgtggacagtggcaccaccaacctcaggctgccgaagaaggtgtttgaggccgcagtgaaatccatcaaaacagcttcttcggtcagtgtggcccttgaaactcatccatccatctctcctttctgtggg

SEQ ID NO: 70933 - DNA, 600 bp, Chicken  19866894346827_4
atgtgggtgacatctggtacacacccatccggaaggagtggtactacgaggtcatcattgtcaagctggaggtcaatgggcaggacctgaacatggactgcaaagaggtgacaggggcaccagggggayctgccctgcgaggggttgctttgttgttgaaggcatctgtcctttggttacagctaaaatcattgagtgtagtgaatgctgcaggtcctggtgcctgggaattcagtgcttggttggtgatggaggctgagggcacgaggtagcttggccaggggtgaagctgagaygagygtgggctttgagtccgtcacggtagaaaacaggggatgggctcagcctcattagctgtgcagggggagccagagcagtcaggtgctggcatggaggggagctgggctggtttacacctggatcactcctcctctcactgtctgcagtacaactatgacaagagtatcgtggacagtggcaccaccaacctcaggctgccgaagaaggtgtttgaggccgcagtgaaatccatcaaaacagcttcttcggtcagtgtggcccttgaaactcatccatccatctctcctttctgtgggcaca

SEQ ID NO: 70934 - DNA, 600 bp, Chicken  19866894346836_1
ctttaccaaggttgagacagcttaattgtacacatatctctctgtgtatcagctgactgtcatttctgatgaggtcagatttactcatgagctgttattccagtggtctacctgtacattttggtctcttagtctcttcagtttttgtgatgcacagaactccaccaatatggcagctaggctttaatccagtagccctacagaaagttattacattttctccttgctttcttttctggttttcaccatgtcaacatgtcatccagccaaacagttctccctcagatactgcaaattttkctctatttcctataaaacactgcaagaattggggacaacccaaacagatgtgatacgtgttcctcctatgatgaaacctatctatgattctcaagttggacagccccagagatctttctaaatagagagagaaggtcttggttaaccatcacagttctacaaagctgttctcaaatgtgcaagcctggcaaatctcaagcatactcatatgaaaaagtcacacctaggaatatatttcctcagaactgtaatgtaccaaacctccttcctagtaaacagtaacgtaatctcatattattt

SEQ ID NO: 70935 - DNA, 600 bp, Chicken  19866894346836_2
aagatgacttgcatctacaggagaaaaaagtgacgctggttttgctttccccatgatgaccacagactgtacgtcttctagcagttatgtgttcttgaggcttcccagaacactgaactactccactcctctccagcctttttcacagagcaagagggacttccctgaagaaatgaatcacagggcagtcagggtctttcagttccttattgcaaaagacttcagtttcactttggtccccttttcctctgaacaacttgtcctctgaataatactcaggacatgaactgctttgaaatyctttgtgcttatgctcagggaatacagtagttccttgtgctgttacaaacaaccaagattttctgtgaacatttacactttatttactttttatccttactgcatgcatagaatggcttgggttggaagggaccttaaagatcatcttggttccaaccccctgccatgggctgagttgctacctactgaatcaagctgccctggtctccatctagcctggttttgaataacttcagggatggggcatccatgtgccagtgcttcatcaccctctgagtgaaaattttccaactaacattt

SEQ ID NO: 70936 - DNA, 600 bp, Chicken  19866894346836_3
tgagtgaaaattttccaactaacatttaatcaaaatctccccttatgaaaggtacattctagtaagaatcacagaattgtgggggttggaaggaatctgacgagactgagtccaaccccctgctaaagcaggtaccctacaataagtcacacaggtaggcatccagctgggtcttgaatatctccacagaaggagactccacaacctctctgggcagcctgttccagtgctctgtcacccttgccattaagaagttcttctgcatgttaatacagaacttcctgtgttcaagttttaggscgttactccttatcctatccctgcacaccacgcagaagagcctggcctcatccatttgccttccacctccctttagatatttataaacatttatcaggttccctctcagtcttcttttccccaggctgaacagacccaggttactcagcttttcctcctaagggagatgctccaggcccttaatcacctttgtggccctctgctggcctgaattttaccctttactgactaggatttacagtgttaatactgctccttcttccatcacagcagatcagaataaatattaaagaacaatcc

SEQ ID NO: 70937 - DNA, 600 bp, Chicken  19866894346839_1
taactcactatatcattttatctctctgccgtgtcatgtgctgcttttggagatgggctgtcacagatattcccagtggcttttgcaagcttcagaggtagaactgaagtgagttagactgagctgtcatgtactgtaattctttattttatactcttaagaaggtttattttttctgaattgacgctctgtaaactttgtgagggtcctaaatatgcattaactaaggttttagtcattgatttcttttgtcaaataatgtgatttctaaatgcagggggatatagatttatatcttayttctttcagagatactgactgtaagaatgaatagctaaactcaagaacccatccatgccactctccaaacaaaacaaacaaacaaaaagaaaagaaaaacaaaacttcaaagactgaattaggactcaaagcacaatgattacatgcataaaaatgtttatagctgagtgagaaagggcgttttaatgaaatgctgagaatgccccacctcagtgtatttccagaaaaggatatatagttatttgaaatgcataaaagtttcatgttaaatggcaaaataatttccttacctattttgtc

SEQ ID NO: 70938 - DNA, 599 bp, Chicken  19866894346846_1
  misc_feature (1)..(10): n is any nucleotide
nnnnnnnnnnctgactgtgaatacacctcatctcacaagtagcaaaccttttcgacttagagctgtaagaactttcaggagaacctaagctgaaggattcgttcccgatttgcagctgctgagaaactgattcttaatgagctaatttgctccttcttggctggggaaaggtgtttctttcctgtttgaccagcagtctaaagttaatattgatatcaccacattatgacttatgatcttttcagcccagaatcaaagtcatatacattatgtaatagactttttacttggcagtcaatkaggtatkttccaagtttggtcgtgcacagcagttggatttactaaatacatgtactgtaaggacagaattaagaacatttcagcattctgatctggcagatagcaaaattatcaaatgctatacagccttccagaattgactacaattacaaaaattcttgaggtctggtagctaaggcagatattttgtttaaaaaggcagtattaaaaataaacagttaccttgatgttacctacaaaatccattttaacaggagcaaaaacagttggtcccaacttgtctagagaaaaaaaaaaaa

SEQ ID NO: 70939 - DNA, 599 bp, Chicken  19866894346846_2
  misc_feature (1)..(3): n is any nucleotide
nnnctgactgtgaatacacctcatctcacaagtagcaaaccttttcgacttagagctgtaagaactttcaggagaacctaagctgaaggattcgttcccgatttgcagctgctgagaaactgattcttaatgagctaatttgctccttcttggctggggaaaggtgtttctttcctgtttgaccagcagtctaaagttaatattgatatcaccacattatgacttatgatcttttcagcccagaatcaaagtcatatacattatgtaatagactttttacttggcagtcaatkaggtatkttccaagtttggtcgtgcacagcagttggatttactaaatacatgtactgtaaggacagaattaagaacatttcagcattctgatctggcagatagcaaaattatcaaatgctatacagccttccagaattgactacaattacaaaaattcttgaggtctggtagctaaggcagatattttgtttaaaaaggcagtattaaaaataaacagttaccttgatgttacctacaaaatccattttaacaggagcaaaaacagttggtcccaacttgtctagagaaaaaaaaaaaaggtacat

SEQ ID NO: 70940 - DNA, 600 bp, Chicken  19866894346846_3
aaaaattactgttccagacatagccatagatttccagacagcttatacgcaggtcctatctaaatgagaggatcatctataagagcaagaatgagaaacacctcctagcaccagtcacattaattctgctggtgggaactacttatattaccttaatttaaagaagtaaaaaatttgccaaaacaaatgatcgaccttttctcccagctggtggcagacaaaaggtctcagagggaccacggcatgaaaagaagctgcttacccagaacgggcacaattgcataacatgactccagaaaytcttctgttggtattccytcttcctcctgaagttcaatatcactgaacctggtgtccaggacaagcaggaaagattgttactttaacaatgccttttctgtaactactaaaaaccagaactgtttcatgcttacttaatttgagcagwattaaaatttatacatattaaaccaccaacatggcttttgttttcatcatctaatgactgcagaaaatacacatctggtggcatgtgaagcatgtagttacaaacaagggaaaaaccctcccactccattctgtacaactcattttacaaag

SEQ ID NO: 70941 - DNA, 600 bp, Chicken  19866894346846_4
catagccatagatttccagacagcttatacgcaggtcctatctaaatgagaggatcatctataagagcaagaatgagaaacacctcctagcaccagtcacattaattctgctggtgggaactacttatattaccttaatttaaagaagtaaaaaatttgccaaaacaaatgatcgaccttttctcccagctggtggcagacaaaaggtctcagagggaccacggcatgaaaagaagctgcttacccagaacgggcacaattgcataacatgactccagaaaytcttctgttggtattccytcttcctcctgaagttcaatatcactgaacctggtgtccaggacaagcaggaaagattgttactttaacaatgccttttctgtaactactaaaaaccagaactgtttcatgcttacttaatttgagcagwattaaaatttatacatattaaaccaccaacatggcttttgttttcatcatctaatgactgcagaaaatacacatctggtggcatgtgaagcatgtagttacaaacaagggaaaaaccctcccactccattctgtacaactcattttacaaagggcatcttcatccatttc

SEQ ID NO: 70942 - DNA, 600 bp, Chicken  19866894346846_5
taccttaatttaaagaagtaaaaaatttgccaaaacaaatgatcgaccttttctcccagctggtggcagacaaaaggtctcagagggaccacggcatgaaaagaagctgcttacccagaacgggcacaattgcataacatgactccagaaaytcttctgttggtattccytcttcctcctgaagttcaatatcactgaacctggtgtccaggacaagcaggaaagattgttactttaacaatgccttttctgtaactactaaaaaccagaactgtttcatgcttacttaatttgagcagwattaaaatttatacatattaaaccaccaacatggcttttgttttcatcatctaatgactgcagaaaatacacatctggtggcatgtgaagcatgtagttacaaacaagggaaaaaccctcccactccattctgtacaactcattttacaaagggcatcttcatccatttctgtgctgcatgcattcttgtcacatattatatcagcaaataaagctttgcagacagaacagacttgaaaatgagtcaattaaaggcttaaaaagttttatcatcctcgtgatgtaaatctgcaacatgta

SEQ ID NO: 70943 - DNA, 599 bp, Chicken  19866894346851_1
  misc_feature (1)..(170): n is any nucleotide
nnnnnnnnnnnnnnnnnnnnnnnnnnnnnnnnnnnnnnnnnnnnnnnnnnnnnnnnnnnnnnnnnnnnnnnnnnnnnnnnnnnnnnnnnnnnnnnnnnnnnnnnnnnnnnnnnnnnnnnnnnnnnnnnnnnnnnnnnnnnnnnnnnnnnnnnnnnnnnnnnnnnnnnnnnattttcagtatttggaattcaaagaaaagaatatttattatctttctgaaatcagaataggtgattcaattttggcttagttagcacgatatgaaaagctctcctttactctggttgtaagcgtttttawgatacatcttcttaccactttcatccagcaagaaatcatcctggtaacggaacttttccggtccacatgcaataaaaatgtcatcatcgccaaagaaatcctgaaggcacatcacctgtaagcaaaaaggaaaggaaggcattgtatgaaacatctcatcatcagagttgtaaaaacaataaatccctccttgtctccatctgcatgaaaactcttcacttttaagggaatcagcagggcttcatctccagataaatttcaaagctgtgctctgaccatctgttacaagtgagaaacac

SEQ ID NO: 70944 - DNA, 600 bp, Chicken  19866894346851_2
gaacttttccggtccacatgcaataaaaatgtcatcatcgccaaagaaatcctgaaggcacatcacctgtaagcaaaaaggaaaggaaggcattgtatgaaacatctcatcatcagagttgtaaaaacaataaatccctccttgtctccatctgcatgaaaactcttcacttttaagggaatcagcagggcttcatctccagataaatttcaaagctgtgctctgaccatctgttacaagtgagaaacacttttatggacatgcaggaagagagagataagacaaaaagccctaacgtcrcatttattacatgatgcatcaatggggtatgaggtaaatgccttctgattacgcataaggtcccattcagttgttagtggataatcaatttgcttttgtgaccacatttcaactygttgacagccatgaatataggtaacagttttagatgcaatatgtaattatttctgcaaaatctcactgacaaggaatgaaactcatacgggtgaacagagtctccatcaaacattcttcatctctgtcagcagtcaatgtgatttttcttcatgggcgccaatctgagcaatcaggtgagctgga

SEQ ID NO: 70945 - DNA, 600 bp, Chicken  19866894346851_3
gagttgtaaaaacaataaatccctccttgtctccatctgcatgaaaactcttcacttttaagggaatcagcagggcttcatctccagataaatttcaaagctgtgctctgaccatctgttacaagtgagaaacacttttatggacatgcaggaagagagagataagacaaaaagccctaacgtcrcatttattacatgatgcatcaatggggtatgaggtaaatgccttctgattacgcataaggtcccattcagttgttagtggataatcaatttgcttttgtgaccacatttcaactygttgacagccatgaatataggtaacagttttagatgcaatatgtaattatttctgcaaaatctcactgacaaggaatgaaactcatacgggtgaacagagtctccatcaaacattcttcatctctgtcagcagtcaatgtgatttttcttcatgggcgccaatctgagcaatcaggtgagctggaactgagtagaaggatcatctctttctgctcccaaatgtgaataatcaggattaggttggtgcaggattaggttggtgcagttttatgttcatgcaggagattttgtttcaatact

SEQ ID NO: 70946 - DNA, 600 bp, Chicken  19866894346852_1
aattttcctccaagcggcagggaaattggacgtgattttgctctgtttaagcacagctggagcaggagaacacggggctgaagaacaacgggattgattgagatgctaacagggagggatggggctgacattgcctctctttatcacctcccatccccaccaaagccatgcaagcactgcccaaggttctcaccctgagccagcagatcccacctatcaccaggcctgccccaaaggcttcacagtgcaggtgctgccccaaaatgggaccatctcagcccacctccagagcccagaggrtggaaggrgcacggagcaggctcgctgctgattgagaaggcgatttgcatgttaaataggtgcatattgatgcccagggtgggaaaatcacactattacttttgtgtagactggagttcacggctggatggaaagaaggggaggaaaagcagggtgggatcgattttcccatccccgatgcgaggccaaagagagatcgaagcagcagtggcaaactgacagctgggtggtgaaggagagaaactttgccaagcaaattaaaggttgctttaatgaggagagtaatggaaggttaattag

SEQ ID NO: 70947 - DNA, 600 bp, Chicken  19866894346852_2
tccaagcggcagggaaattggacgtgattttgctctgtttaagcacagctggagcaggagaacacggggctgaagaacaacgggattgattgagatgctaacagggagggatggggctgacattgcctctctttatcacctcccatccccaccaaagccatgcaagcactgcccaaggttctcaccctgagccagcagatcccacctatcaccaggcctgccccaaaggcttcacagtgcaggtgctgccccaaaatgggaccatctcagcccacctccagagcccagaggrtggaaggrgcacggagcaggctcgctgctgattgagaaggcgatttgcatgttaaataggtgcatattgatgcccagggtgggaaaatcacactattacttttgtgtagactggagttcacggctggatggaaagaaggggaggaaaagcagggtgggatcgattttcccatccccgatgcgaggccaaagagagatcgaagcagcagtggcaaactgacagctgggtggtgaaggagagaaactttgccaagcaaattaaaggttgctttaatgaggagagtaatggaaggttaattagcacattta

SEQ ID NO: 70948 - DNA, 599 bp, Chicken  19866894346856_1
  misc_feature (1)..(48): n is any nucleotide
nnnnnnnnnnnnnnnnnnnnnnnnnnnnnnnnnnnnnnnnnnnnnnnnctttgctaatacttgaaggaggacagaaggttgttttcaaacccaagaggtaaatattgtctttggtggcggagttaatagctgccttacttatttatgttgtcgcatttatctgtgttacaaatttgccggcaaacagaaaggtcattctgctacttgtgagacagtagagagccttgctagtctcctggttacctgaggttactgagccagctgtctctggctgtagagcttggaacaacctttaggaawgctgattaaacctgatggttctgagcagcatcttccttattctggaagtgctggttctggcagtgtggagggtctttctcaataagtcacattaaggtgccatgggsgaacgcagctcaggaatagggagggaatgaaagttcacggtggtrttaaatgcatatctgggtgtgagctacagctgtgttaagactgtaaaactgacttgcaggtcagagcaaaaacccctgcgtttcttggctgccagtattgagtactggaggagcaaattaagaatgggcaagcaatgatacttcctt

SEQ ID NO: 70949 - DNA, 600 bp, Chicken  19866894346856_2
tctttggtggcggagttaatagctgccttacttatttatgttgtcgcatttatctgtgttacaaatttgccggcaaacagaaaggtcattctgctacttgtgagacagtagagagccttgctagtctcctggttacctgaggttactgagccagctgtctctggctgtagagcttggaacaacctttaggaawgctgattaaacctgatggttctgagcagcatcttccttattctggaagtgctggttctggcagtgtggagggtctttctcaataagtcacattaaggtgccatgggsgaacgcagctcaggaatagggagggaatgaaagttcacggtggtrttaaatgcatatctgggtgtgagctacagctgtgttaagactgtaaaactgacttgcaggtcagagcaaaaacccctgcgtttcttggctgccagtattgagtactggaggagcaaattaagaatgggcaagcaatgatacttccttggtgtggcctctatttatggtgacccaaagggaaacttgacatgatggaatgcttatgaaatcctgagcccatctataaagccttttgaactgcttgccttcagagaa

SEQ ID NO: 70950 - DNA, 600 bp, Chicken  19866894346856_3
gcatttatctgtgttacaaatttgccggcaaacagaaaggtcattctgctacttgtgagacagtagagagccttgctagtctcctggttacctgaggttactgagccagctgtctctggctgtagagcttggaacaacctttaggaawgctgattaaacctgatggttctgagcagcatcttccttattctggaagtgctggttctggcagtgtggagggtctttctcaataagtcacattaaggtgccatgggsgaacgcagctcaggaatagggagggaatgaaagttcacggtggtrttaaatgcatatctgggtgtgagctacagctgtgttaagactgtaaaactgacttgcaggtcagagcaaaaacccctgcgtttcttggctgccagtattgagtactggaggagcaaattaagaatgggcaagcaatgatacttccttggtgtggcctctatttatggtgacccaaagggaaacttgacatgatggaatgcttatgaaatcctgagcccatctataaagccttttgaactgcttgccttcagagaaaggaatgaggagaaaagaaaaagatgtaaaaatgtaaggtaggtg

SEQ ID NO: 70951 - DNA, 599 bp, Chicken  19866894346860_1
  misc_feature (1)..(200): n is any nucleotide
nnnnnnnnnnnnnnnnnnnnnnnnnnnnnnnnnnnnnnnnnnnnnnnnnnnnnnnnnnnnnnnnnnnnnnnnnnnnnnnnnnnnnnnnnnnnnnnnnnnnnnnnnnnnnnnnnnnnnnnnnnnnnnnnnnnnnnnnnnnnnnnnnnnnnnnnnnnnnnnnnnnnnnnnnnnnnnnnnnnnnnnnnnnnnnnnnnnnnnnntctccttaaacagatgtatgctctgaacagccaattccaataacttatccatacaacagcctacttcagcttattggccagctataatagcctaatatayctatgcatagcaaggctacaaaacrgcagttccrgcatccaactgcagctagcaactaaaccttggttatttctaaggaggcaatcctggagtatagaggcttcataatattccaacaaaagaaaacaccactatctgcagtctgagcttgcaaagcctcrgtccctgcaggtttacacgtgttttctattactagctcccttttcctgcctcaataattacaggcaacrtgctattttctaatttatcctgggacaaagttggaaaactggcttcgctgtgaaagtgtgtttcccatg

SEQ ID NO: 70952 - DNA, 599 bp, Chicken  19866894346860_2
  misc_feature (1)..(175): n is any nucleotide
nnnnnnnnnnnnnnnnnnnnnnnnnnnnnnnnnnnnnnnnnnnnnnnnnnnnnnnnnnnnnnnnnnnnnnnnnnnnnnnnnnnnnnnnnnnnnnnnnnnnnnnnnnnnnnnnnnnnnnnnnnnnnnnnnnnnnnnnnnnnnnnnnnnnnnnnnnnnnnnnnnnnnnnnnnnnnnntctccttaaacagatgtatgctctgaacagccaattccaataacttatccatacaacagcctacttcagcttattggccagctataatagcctaatatayctatgcatagcaaggctacaaaacrgcagttccrgcatccaactgcagctagcaactaaaccttggttatttctaaggaggcaatcctggagtatagaggcttcataatattccaacaaaagaaaacaccactatctgcagtctgagcttgcaaagcctcrgtccctgcaggtttacacgtgttttctattactagctcccttttcctgcctcaataattacaggcaacrtgctattttctaatttatcctgggacaaagttggaaaactggcttcgctgtgaaagtgtgtttcccatgcagtaacttaaatagctcttttttt

SEQ ID NO: 70953 - DNA, 599 bp, Chicken  19866894346860_3
  misc_feature (1)..(166): n is any nucleotide
nnnnnnnnnnnnnnnnnnnnnnnnnnnnnnnnnnnnnnnnnnnnnnnnnnnnnnnnnnnnnnnnnnnnnnnnnnnnnnnnnnnnnnnnnnnnnnnnnnnnnnnnnnnnnnnnnnnnnnnnnnnnnnnnnnnnnnnnnnnnnnnnnnnnnnnnnnnnnnnnnnnnnntctccttaaacagatgtatgctctgaacagccaattccaataacttatccatacaacagcctacttcagcttattggccagctataatagcctaatatayctatgcatagcaaggctacaaaacrgcagttccrgcatccaactgcagctagcaactaaaccttggttatttctaaggaggcaatcctggagtatagaggcttcataatattccaacaaaagaaaacaccactatctgcagtctgagcttgcaaagcctcrgtccctgcaggtttacacgtgttttctattactagctcccttttcctgcctcaataattacaggcaacrtgctattttctaatttatcctgggacaaagttggaaaactggcttcgctgtgaaagtgtgtttcccatgcagtaacttaaatagctctttttttctagcctca

SEQ ID NO: 70954 - DNA, 599 bp, Chicken  19866894346860_4
  misc_feature (1)..(39): n is any nucleotide
nnnnnnnnnnnnnnnnnnnnnnnnnnnnnnnnnnnnnnntctccttaaacagatgtatgctctgaacagccaattccaataacttatccatacaacagcctacttcagcttattggccagctataatagcctaatatayctatgcatagcaaggctacaaaacrgcagttccrgcatccaactgcagctagcaactaaaccttggttatttctaaggaggcaatcctggagtatagaggcttcataatattccaacaaaagaaaacaccactatctgcagtctgagcttgcaaagcctcrgtccctgcaggtttacacgtgttttctattactagctcccttttcctgcctcaataattacaggcaacrtgctattttctaatttatcctgggacaaagttggaaaactggcttcgctgtgaaagtgtgtttcccatgcagtaacttaaatagctctttttttctagcctcatgttcttcagctttcctgaaacacaggtctgtatttcaagtaggctgagttttgacagacctttcagtacaagacaatagaacatgaaattggggaagccttttctctggaaggagaggcttgtgct

SEQ ID NO: 70955 - DNA, 600 bp, Chicken  19866894346860_5
ccaattccaataacttatccatacaacagcctacttcagcttattggccagctataatagcctaatatayctatgcatagcaaggctacaaaacrgcagttccrgcatccaactgcagctagcaactaaaccttggttatttctaaggaggcaatcctggagtatagaggcttcataatattccaacaaaagaaaacaccactatctgcagtctgagcttgcaaagcctcrgtccctgcaggtttacacgtgttttctattactagctcccttttcctgcctcaataattacaggcaacrtgctattttctaatttatcctgggacaaagttggaaaactggcttcgctgtgaaagtgtgtttcccatgcagtaacttaaatagctctttttttctagcctcatgttcttcagctttcctgaaacacaggtctgtatttcaagtaggctgagttttgacagacctttcagtacaagacaatagaacatgaaattggggaagccttttctctggaaggagaggcttgtgctcgtaacatggttagccacaatctcatcctgacgcaacttttcaacagttcaaggacaaattcctgtgttc

SEQ ID NO: 70956 - DNA, 484 bp, Chicken  19866894346860_6
ctgtgaaagtgtgtttcccatgcagtaacttaaatagctctttttttctagcctcatgttcttcagctttcctgaaacacaggtctgtatttcaagtaggctgagttttgacagacctttcagtacaagacaatagaacatgaaattggggaagccttttctctggaaggagaggcttgtgctcgtaacatggttagccacaatctcatcctgacgcaacttttcaacagttcaaggacaaattcctgtgttctttctagcaagatgaatttttgcttgctgcaacaacaaatcccatcmatttgaacttaaaatgtattactttttccctctcgtttttgctcttcaaaggtcaaagcacaagcagctccaccagtacagcataaaaatcaagccacctatcaatacaagactcctcctttcagaaagcagtctcacatgaagtgaacaaaataaagtttcttatttatttcaagtagaatga

SEQ ID NO: 70957 - DNA, 600 bp, Chicken  19866894346869_1
tgaagaaacttctgcacaccctcaataaggataagatttatagcatgaatttctgcaatatattatggcaatactttctctttcacatatgtgctctttaccattcaagttcacaaacttgagaaatggaacatatttgaggcccagcacggtcctcctcactctttctacctgaattgttcatcttgacatttttggcagatctattacagtctctccagtacaaaagttatcccacgtgttccaaatacactacaggaataaacactgagagcacccatctttgaaaccacctgcacrcacaaaaaaagctttaaaaccataaaaggtgtaaaaacagttgcgtttaaaaattctggtaccttttggtactatatagtaccatatatatatatatacatatcaaagtctcatatatatatatagatatatatcaaagtctcagaaatcaatgtccccctagatatccacttcaagtcttgaggcaaaattttagtaatttcataacttcaattaaaactgtggcctcaaatccagtagcagaacatgtgtatgaatttcatactgcaaaaacataattaccaaccttcatcaaaaaca

SEQ ID NO: 70958 - DNA, 600 bp, Chicken  19866894346871_1
ggtagctgcatttgactctgggggggttggggttgcatgtagattttttgtgccgttggtgcctgttgcagtttgggcagctgctgcgtggtttttactgcaagcacctgtactacagtttgctgtggctgcgccactaaggtagggagctgcctttctttggccatcatgtggtgtggggggtgctgtgcatctggtttggtctgtgcttgctcttgctgcaggggggttagcttttgatgccttatagaaagctggggcatttgtgggagtttgtgctggatttggtcggcctgcagrtggattgtctgcttctgcttagtctggaaacattgcagagttttcacttgcagttgagtctgttccagctgcggctgactcagtttttgctgtttttgtscctgcgattgtgtcagggcagatctgtagaacaggccagtctgaggatctaaggtgtccatctcttccacttctccctcctcagttccaagctgttcactctgtttggtgaacgcagtgtgactgcttaaggccttaggaaaaagaagttggagcaagttagtaaggagaaatctaatttataagagcacataatctaaa

SEQ ID NO: 70959 - DNA, 600 bp, Chicken  19866894346871_2
caagcacctgtactacagtttgctgtggctgcgccactaaggtagggagctgcctttctttggccatcatgtggtgtggggggtgctgtgcatctggtttggtctgtgcttgctcttgctgcaggggggttagcttttgatgccttatagaaagctggggcatttgtgggagtttgtgctggatttggtcggcctgcagrtggattgtctgcttctgcttagtctggaaacattgcagagttttcacttgcagttgagtctgttccagctgcggctgactcagtttttgctgtttttgtscctgcgattgtgtcagggcagatctgtagaacaggccagtctgaggatctaaggtgtccatctcttccacttctccctcctcagttccaagctgttcactctgtttggtgaacgcagtgtgactgcttaaggccttaggaaaaagaagttggagcaagttagtaaggagaaatctaatttataagagcacataatctaaacataattgttgatgcttccatctttcttcaactgattttactgactcccatctcctgtatacccttacacaaaaggtcatgatacctatgtaattaatat

SEQ ID NO: 70960 - DNA, 600 bp, Chicken  19866894346872_1
agccatcgtgtgcatgagaacagcccccagcacagctggggcgagggcttgtagctgctcctgtaatatagatcaaagtgaagctcgtctctctggttaggtctccagtatgttgtataacttcttgtagcaagcttattaatgcatggaagtcatcttcctgcttgttcggtttaagtgttgcactgaaacctctgctgttcgttcccggtgtaggtgaatatggaatgctttttgcaacaggtgttcaatatattttctccatgcacttctgaggtttatttgcagcgagctgagctstgagcgcacagtttcctgctgagctacaccacctcttactgttctgttttagcccaggttttgttttgagaagcactccgtcaaggtctcatggcagtgagcaccgggcgcaggtctggcgctgctccctgcatccctgcctggtcccccgctgcctcctacagcactatcagcgctgcgatgtaaacctctccattccttcttgaaaattcaggtctgttttgttgtgtggtgtgcagagcacagaggaagcctttggttagtttagtctctgctcctgggtgttgtgcatgcctgggt

SEQ ID NO: 70961 - DNA, 599 bp, Chicken  19866894346876_1
  misc_feature (1)..(102): n is any nucleotide
nnnnnnnnnnnnnnnnnnnnnnnnnnnnnnnnnnnnnnnnnnnnnnnnnnnnnnnnnnnnnnnnnnnnnnnnnnnnnnnnnnnnnnnnnnnnnnnnnnnnnntgcctgccctggagacttgccagtccattagtagtggagatgccaaatcaaaaatggtctaatgattagaaattgattgggcaacaacaaaagtgagatatggctcaaaagagaaggaaggctcgtggtgtagtagaggaagcagcaatggacaatgcagagtcacagaagagaggaacaaaaggggatttaagagtrggagatggcaggcaacagaaatgctattaaagtgccattaatggtggctagtaaaagagaaaatgaaaaaaagctacacctatgtcatggcttactggaaaagccacacaattcagaactggtccagaaggtggcaggrattcatcagcttacttagggatggttaggagttggggggtagttagcttatttattgctttcctctagtcacgtcacagatttaacccaccaaatttgaaaagcagctttcaaaaccagtttatgcctgttataatttttatgaagcatttaatgaaatc

SEQ ID NO: 70962 - DNA, 600 bp, Chicken  19866894346876_2
agatgccaaatcaaaaatggtctaatgattagaaattgattgggcaacaacaaaagtgagatatggctcaaaagagaaggaaggctcgtggtgtagtagaggaagcagcaatggacaatgcagagtcacagaagagaggaacaaaaggggatttaagagtrggagatggcaggcaacagaaatgctattaaagtgccattaatggtggctagtaaaagagaaaatgaaaaaaagctacacctatgtcatggcttactggaaaagccacacaattcagaactggtccagaaggtggcaggrattcatcagcttacttagggatggttaggagttggggggtagttagcttatttattgctttcctctagtcacgtcacagatttaacccaccaaatttgaaaagcagctttcaaaaccagtttatgcctgttataatttttatgaagcatttaatgaaatctaaattgactcttgattccttaatatgtgtactgctttctccaacccatctccatgcaaaacagttctttatcaatgcagtgttatcagcatgtaaagatgagaaaaatgatccgtgtaggtcctgcaggtttttcctat

SEQ ID NO: 70963 - DNA, 600 bp, Chicken  19866894346880_1
atacggcatagggaagtttcttcgctccccatatgaacaccctggattcttccctgaactggcctatcaaagagaacagagaagctccttcgctctcaccgtgctgccctccacattgctcgcttctctgcctccagggcacgccgttctgctggagaaagttccttctcttggctgctcagcagctcagggctctgcattcgcaacctctcctggtgccgccgctccgctttggctgtccgcaccggggccaacgcatcccctgcagcaagacttactggactcaacctgggcagagaragaagcagtgagaaacaggcaccctcatccacttcaatactgcctgctcttctcaagttgatggtaaggtaatgaccaacacccccagacattgttctgcaccaccaccaggtccaaggatgtcatcttgagggatggaagaataaaacaaacacagaggtaaattgctaagaagttctttttccaatcacagtttcatcttctccacaaaatccttcctttatactctatatctgttagaaagtaggagccttgtgctccatcacctggcatttctgggcaaagcacgcggctcatcca

SEQ ID NO: 70964 - DNA, 599 bp, Chicken  19866894346890_1
  misc_feature (1)..(224): n is any nucleotide
nnnnnnnnnnnnnnnnnnnnnnnnnnnnnnnnnnnnnnnnnnnnnnnnnnnnnnnnnnnnnnnnnnnnnnnnnnnnnnnnnnnnnnnnnnnnnnnnnnnnnnnnnnnnnnnnnnnnnnnnnnnnnnnnnnnnnnnnnnnnnnnnnnnnnnnnnnnnnnnnnnnnnnnnnnnnnnnnnnnnnnnnnnnnnnnnnnnnnnnnnnnnnnnnnnnnnnnnnnnnnnnnacaaatggaaattatttacaggaaatatgtatgtggaaaatccataacatcccacacgactgactgcaccggcccrttgcctgtaatgtaatgtcacacacgaaatgtattccagttattaggaaagctggaagtgagtcaattatgtgaataaacaaacaaagacctggtctccccgtagtttagtgcatcactgaggtatccgaaggctcctttcccacgcctgctgcctcattcctaaactagcaggggctgttgtgcaaggcaacttgacagcccataataaccaggtagctcggcacactgatctgaagcaatccttgtacaccacttgcacatctggggcacaggggatgcacgartgcttgtggatgt

SEQ ID NO: 70965 - DNA, 600 bp, Chicken  19866894346890_2
actgcaccggcccrttgcctgtaatgtaatgtcacacacgaaatgtattccagttattaggaaagctggaagtgagtcaattatgtgaataaacaaacaaagacctggtctccccgtagtttagtgcatcactgaggtatccgaaggctcctttcccacgcctgctgcctcattcctaaactagcaggggctgttgtgcaaggcaacttgacagcccataataaccaggtagctcggcacactgatctgaagcaatccttgtacaccacttgcacatctggggcacaggggatgcacgartgcttgtggatgtctggggataaagaggaggctttgcagctttagggaaagggaaggatcgggcttctctggtccctccgaaacagagagaacttcttgccccgtgtgcatggacgcaatgggatacagcaggttggtctggctaaaggtgaacaaacagcagtaacttcagccaaaagaagtaactctgcctcaggggtggctacaccaatagccttgctggtgtgcaacacccctaaaggagaattctcaggtaaccgaacgaggataaacagaagcagcgcatgaaagaaagaaayc

SEQ ID NO: 70966 - DNA, 600 bp, Chicken  19866894346890_3
rtgcttgtggatgtctggggataaagaggaggctttgcagctttagggaaagggaaggatcgggcttctctggtccctccgaaacagagagaacttcttgccccgtgtgcatggacgcaatgggatacagcaggttggtctggctaaaggtgaacaaacagcagtaacttcagccaaaagaagtaactctgcctcaggggtggctacaccaatagccttgctggtgtgcaacacccctaaaggagaattctcaggtaaccgaacgaggataaacagaagcagcgcatgaaagaaagaaaycccatagatctgagcgaagcttctcgtgctgtgacataatatgcatattttaatttcttaagaatgaaagccttcacttcaaaagtgaacagtgctgtttmccttaaggtccctgactgggtgtccaaagccccgtaaagctgttggccaacgyatttatattgactctgggagtcggcgcaagactcatgacatttctccttattaattgcctggctctagtgtggttggattttgcaagttatgacacagtaaatacatttgtgtcacttagcaacctcagctgcttctaaaggaatg

SEQ ID NO: 70967 - DNA, 600 bp, Chicken  19866894346890_4
cccgtgtgcatggacgcaatgggatacagcaggttggtctggctaaaggtgaacaaacagcagtaacttcagccaaaagaagtaactctgcctcaggggtggctacaccaatagccttgctggtgtgcaacacccctaaaggagaattctcaggtaaccgaacgaggataaacagaagcagcgcatgaaagaaagaaaycccatagatctgagcgaagcttctcgtgctgtgacataatatgcatattttaatttcttaagaatgaaagccttcacttcaaaagtgaacagtgctgtttmccttaaggtccctgactgggtgtccaaagccccgtaaagctgttggccaacgyatttatattgactctgggagtcggcgcaagactcatgacatttctccttattaattgcctggctctagtgtggttggattttgcaagttatgacacagtaaatacatttgtgtcacttagcaacctcagctgcttctaaaggaatgccttttgttcttggaaatgtattataaaygcaggttacaaaacgattattggggaatctaaactcgccttagttggawggcattctgkcctctccccattc

SEQ ID NO: 70968 - DNA, 600 bp, Chicken  19866894346890_5
caaacagcagtaacttcagccaaaagaagtaactctgcctcaggggtggctacaccaatagccttgctggtgtgcaacacccctaaaggagaattctcaggtaaccgaacgaggataaacagaagcagcgcatgaaagaaagaaaycccatagatctgagcgaagcttctcgtgctgtgacataatatgcatattttaatttcttaagaatgaaagccttcacttcaaaagtgaacagtgctgtttmccttaaggtccctgactgggtgtccaaagccccgtaaagctgttggccaacgyatttatattgactctgggagtcggcgcaagactcatgacatttctccttattaattgcctggctctagtgtggttggattttgcaagttatgacacagtaaatacatttgtgtcacttagcaacctcagctgcttctaaaggaatgccttttgttcttggaaatgtattataaaygcaggttacaaaacgattattggggaatctaaactcgccttagttggawggcattctgkcctctccccattctgcattgtaaaccgtgcataggaaattaatttcttttgcacaagcatcagtca

SEQ ID NO: 70969 - DNA, 600 bp, Chicken  19866894346890_6
tgtgacataatatgcatattttaatttcttaagaatgaaagccttcacttcaaaagtgaacagtgctgtttmccttaaggtccctgactgggtgtccaaagccccgtaaagctgttggccaacgyatttatattgactctgggagtcggcgcaagactcatgacatttctccttattaattgcctggctctagtgtggttggattttgcaagttatgacacagtaaatacatttgtgtcacttagcaacctcagctgcttctaaaggaatgccttttgttcttggaaatgtattataaaygcaggttacaaaacgattattggggaatctaaactcgccttagttggawggcattctgkcctctccccattctgcattgtaaaccgtgcataggaaattaatttcttttgcacaagcatcagtcattggcaccgcatctattgttatgaagagaagctctgcatatttaatagatatgacagaagtttctgttgaaaataaaagacatgagaaacgaccacggaaacaaagggctggaaaggacctcctcggcccggggttcgccgagggcaaatctctgtgactgcttcataaacaatt

SEQ ID NO: 70970 - DNA, 600 bp, Chicken  19866894346890_7
tcaaaagtgaacagtgctgtttmccttaaggtccctgactgggtgtccaaagccccgtaaagctgttggccaacgyatttatattgactctgggagtcggcgcaagactcatgacatttctccttattaattgcctggctctagtgtggttggattttgcaagttatgacacagtaaatacatttgtgtcacttagcaacctcagctgcttctaaaggaatgccttttgttcttggaaatgtattataaaygcaggttacaaaacgattattggggaatctaaactcgccttagttggawggcattctgkcctctccccattctgcattgtaaaccgtgcataggaaattaatttcttttgcacaagcatcagtcattggcaccgcatctattgttatgaagagaagctctgcatatttaatagatatgacagaagtttctgttgaaaataaaagacatgagaaacgaccacggaaacaaagggctggaaaggacctcctcggcccggggttcgccgagggcaaatctctgtgactgcttcataaacaattctataaatacttgaccatcatgatgcaacactccacagcctctttcatg

SEQ ID NO: 70971 - DNA, 600 bp, Chicken  19866894346890_8
acagtgctgtttmccttaaggtccctgactgggtgtccaaagccccgtaaagctgttggccaacgyatttatattgactctgggagtcggcgcaagactcatgacatttctccttattaattgcctggctctagtgtggttggattttgcaagttatgacacagtaaatacatttgtgtcacttagcaacctcagctgcttctaaaggaatgccttttgttcttggaaatgtattataaaygcaggttacaaaacgattattggggaatctaaactcgccttagttggawggcattctgkcctctccccattctgcattgtaaaccgtgcataggaaattaatttcttttgcacaagcatcagtcattggcaccgcatctattgttatgaagagaagctctgcatatttaatagatatgacagaagtttctgttgaaaataaaagacatgagaaacgaccacggaaacaaagggctggaaaggacctcctcggcccggggttcgccgagggcaaatctctgtgactgcttcataaacaattctataaatacttgaccatcatgatgcaacactccacagcctctttcatgaacttatcag

SEQ ID NO: 70972 - DNA, 599 bp, Chicken  19866894346898_1
  misc_feature (1)..(236): n is any nucleotide
nnnnnnnnnnnnnnnnnnnnnnnnnnnnnnnnnnnnnnnnnnnnnnnnnnnnnnnnnnnnnnnnnnnnnnnnnnnnnnnnnnnnnnnnnnnnnnnnnnnnnnnnnnnnnnnnnnnnnnnnnnnnnnnnnnnnnnnnnnnnnnnnnnnnnnnnnnnnnnnnnnnnnnnnnnnnnnnnnnnnnnnnnnnnnnnnnnnnnnnnnnnnnnnnnnnnnnnnnnnnnnnnnnnnnnnnnnnnctgcaaatcctcaggtttggaaaatgaaggttgtcctgtgggccttctgaatgcagcgtgtcaytggcagcaagcagccacggggagaaacagccaatagttttgtgtagtatttaacctcaacattgctaatgtttaccattataatgtaatgtattacagcaaactgcctgataatgctgtccacaatgccctgagctacctggtgatggcaggcagaagcctccctgccttgttcatagatatcacttaggacctgtctgagaaatccgccaccctgctatgttcattagcagtggataatggctctgagcagtttctagtggctctcttctgcatcctgtggttaaattctttgtctct

SEQ ID NO: 70973 - DNA, 600 bp, Chicken  19866894346905_1
atatgagaaatagatggtatggtttacagaaaaaaaaatgcacttcgggatggcataatagaagtaggaaatatcaccaatatatcattctctcatgcatacttataaagatctgtatgtaaaagctcccacccataaatgcacaacacacaaaaatgcatagcacttcagcaataggtttggcataatctaatagaaaaactttactatgggatatttgaaaatagattgataattattgccccgctttgaacatctcctgagctacactgtaatatctgtacaaagctgacaacatcwatcagggatcttcagagatgtttcatttgatttttcagactgatgagaaaagaaaaaaaagtgactggaccaagcaatttcagatacatttatttcagatacagtacatttatcaatttgaaatgaactccctttgtctgcagatgtaatggctcagaagacattttctaaacaaatagatatttatttttctatttgaactgaacaagcactgaaacgtctatataaggatttatatttaaaaaaagtagtttttttattaaaaagaacattcacaaatttaacaaatgtgaaatcatg

SEQ ID NO: 70974 - DNA, 600 bp, Chicken  19866894346918_1
acaaattgttcagtgctacctttaattctttacagtgaatcctgctggttctttcttgggaaaggattttctgccaccagcttttgtgccccgagtaattctcatgtttctcacacaccattaatattgctagtgctccaggtatcactaaacaatataattaatggagcccaacctagccatgttgagatgtgatttgggtctataaagaacgtgctgaatgccttagcagaattggtcaaattacccaaaataataatgctacataggttcataaaaagaagtaaaaaaaaaaaaatrccaacagaaaaccctttcaatataatcaagccattggagtacaactgtaataaactaagaataatgagcatgttacaatgctacttatttgtaaatatcagtttaaacagcttagcaaakgaaaaaaaccttgcaagatggaccactgggtttgggggatggggaaagagttcagattattggcctaagttcagcagcagagttagcaatttatggacttgattataccttcaaaatgaacaataacccagtaactactgcagtagaaaggtactaaatttttatgatatggggtaatca

SEQ ID NO: 70975 - DNA, 600 bp, Chicken  19866894346918_2
ttaatattgctagtgctccaggtatcactaaacaatataattaatggagcccaacctagccatgttgagatgtgatttgggtctataaagaacgtgctgaatgccttagcagaattggtcaaattacccaaaataataatgctacataggttcataaaaagaagtaaaaaaaaaaaaatrccaacagaaaaccctttcaatataatcaagccattggagtacaactgtaataaactaagaataatgagcatgttacaatgctacttatttgtaaatatcagtttaaacagcttagcaaakgaaaaaaaccttgcaagatggaccactgggtttgggggatggggaaagagttcagattattggcctaagttcagcagcagagttagcaatttatggacttgattataccttcaaaatgaacaataacccagtaactactgcagtagaaaggtactaaatttttatgatatggggtaatcaggttggctaccaaagacgtagtagacatgctgcaaagaagaaacaattcacattaaaatagctgagtgacaaattcccttcttgaaaagggtatttttcttgagatgatgtctttagcag

SEQ ID NO: 70976 - DNA, 600 bp, Chicken  19866894346918_3
agagttagcaatttatggacttgattataccttcaaaatgaacaataacccagtaactactgcagtagaaaggtactaaatttttatgatatggggtaatcaggttggctaccaaagacgtagtagacatgctgcaaagaagaaacaattcacattaaaatagctgagtgacaaattcccttcttgaaaagggtatttttcttgagatgatgtctttagcagactgtaggctgtttctttaaatgaatgcatgacacacttaattttcaggcacacttggttacagaaacaggcactacwctgtacatcatgtttagtaacaaatagagctgtcatacctggattcgtattgacatttacatcagactcttaatctgtatagatttgacgtataggaaaaagtcagacatctcacatataaatgatgcttacatgctcataatcaaaatgttcttgattgtttacctagtaaagmaaaactagtgtatttttttacatctttactatggtagtaaatagtctgacatttcagcatgtttggaaacagtacactacttgattgaaaattaagaggcaaaaaatgtggtgatttttcaaaaa

SEQ ID NO: 70977 - DNA, 600 bp, Chicken  19866894346918_4
ttcccttcttgaaaagggtatttttcttgagatgatgtctttagcagactgtaggctgtttctttaaatgaatgcatgacacacttaattttcaggcacacttggttacagaaacaggcactacwctgtacatcatgtttagtaacaaatagagctgtcatacctggattcgtattgacatttacatcagactcttaatctgtatagatttgacgtataggaaaaagtcagacatctcacatataaatgatgcttacatgctcataatcaaaatgttcttgattgtttacctagtaaagmaaaactagtgtatttttttacatctttactatggtagtaaatagtctgacatttcagcatgtttggaaacagtacactacttgattgaaaattaagaggcaaaaaatgtggtgatttttcaaaaaaataatgtattcattttcgttgaaggttgaaaagaattgtattctttgcttcatggtgtaatgggtactcacagactgtggaattagcaatttgatgcaaaatcagtaaactttttctttctatttagtgcatgagttgctaataaaaatgaaattaaaaaaagtgaagaaacta

SEQ ID NO: 70978 - DNA, 600 bp, Chicken  19866894346920_1
atctgagggagggcaatcaaacccatgaggctgtgtagaaaggaggtggacaatcctacctgcaccctaaatatctcctgccactgagagagatgtgtccagagcagagtgctgccagtccagactgcaaaccgctgagcaatctgcatttcgtgcagagaggtgactccagctgaaatggatggtcaggtgatggaaaaggcaggtttcatatcacagcattgcctgcacttgtcatggatcttttccaatgcaaagacttcatcacattggtttctacacataacaatgctatctttycttaaaataaataaataaataaattaggacctaggcctcttagaaaaatgatctgctatgactgtgtcatttttagcatggtgttagtaggtgtacaggttggccttgttattgcttctgaaataaatgagggcttcttttgttgaagcttttaatagaccttgagattggaacattgccaagatggtcacaagatcgcatgactcagagggctactgagatttaaaagcattttgaaagtttaaaacaataaaaatagctctactgtgtcatttttaatagatacaaatatgtagtaca

SEQ ID NO: 70979 - DNA, 527 bp, Chicken  19866894346921_1
atggcaggcagtgttattgatttagggtttggtgtttaaagttcaatccgtgctggcagagctgttcgcacaagcactgcaggactgggttcccactgtgtaccaggcagcgttttccatcctcccaccagaagtgcttcccgtggcggctgtgtggagactgcaggttggtgtgagccaaatacaagcactatagggcggtctctttaaatatgccatgaatgagagaggcttccatcacctttggtgcaggatgctgtgacaccgactgtgacacacttcactgtttgctcactcctygagttccagcagtgggaatgtcagctcacgcgtgccttctgctccaaaaaacagctcagtgcgctgctgctatgtcaaacttctcatgctgtgtgttttgtcaaatccttttccttcagtattagcatgcaggggcattataacagaaccaatcaattatgggactctgcttgctgacttctgttgaggtatgcagaacaagaatgtgatgtttatttaagtatcac

SEQ ID NO: 70980 - DNA, 599 bp, Chicken  19866894346922_1
  misc_feature (1)..(71): n is any nucleotide
nnnnnnnnnnnnnnnnnnnnnnnnnnnnnnnnnnnnnnnnnnnnnnnnnnnnnnnnnnnnnnnnnnnnnnncagaggtgtctattaacacttgatacaacattctatttcccccttactaaggacacaaacatgcctaacttcatgaaccacgcggcctgacataacacagctctgcaccatgcacggactaccaaagcctatgacagcatataaccaggaggcgactcctgcatgcagtccatgccgtggtactgtatgggcaaactgcagcagagctcaaaagaggtctgaaaacttyacacagtgacccacaatgtacattccactatcatacagcacctgcattaagacrccaaaagcttgccattcattctgtattggaattagggtagtattttacagactgtctgtaagccacacaactggaggagccttctgctgctggggtaggcagacacaaaactgacactgtcacaagcaggcaaggcagcagccacagccaccagcaccagcctcagtgctgctatgtatgtgtctctgtaacacctgcctggagtaataatctggtgaaggctgtttgcatgaaatacactgcta

SEQ ID NO: 70981 - DNA, 599 bp, Chicken  19866894346922_2
  misc_feature (1)..(17): n is any nucleotide
nnnnnnnnnnnnnnnnncagaggtgtctattaacacttgatacaacattctatttcccccttactaaggacacaaacatgcctaacttcatgaaccacgcggcctgacataacacagctctgcaccatgcacggactaccaaagcctatgacagcatataaccaggaggcgactcctgcatgcagtccatgccgtggtactgtatgggcaaactgcagcagagctcaaaagaggtctgaaaacttyacacagtgacccacaatgtacattccactatcatacagcacctgcattaagacrccaaaagcttgccattcattctgtattggaattagggtagtattttacagactgtctgtaagccacacaactggaggagccttctgctgctggggtaggcagacacaaaactgacactgtcacaagcaggcaaggcagcagccacagccaccagcaccagcctcagtgctgctatgtatgtgtctctgtaacacctgcctggagtaataatctggtgaaggctgtttgcatgaaatacactgctaagtccagtttctgaagaggaaaaaaagactatctcaagcaaggccacaagctaa

SEQ ID NO: 70982 - DNA, 600 bp, Chicken  19866894346923_1
cagaatggccatctcttatattttaatgttatcttaacatatcctaaggcaaatagatgtagtattttactgtctgtgtatccaaaatcccagcctatttcttatttttgatttatcacttttctaatgttcttttttttcctttttttctacacatttttcttctatttatattagcaatacatattttgtcttgaggtgtgatctccatttatagcatgttcacttgggtaaagttgcatgaataatatgtatgtttctgtactgcaagggcctcaggcctacagctaaaaagaaggwtcagtacattggttgataaaagggtttccccaaccaacatgaaaacaagtttaccgagatcttactgactgtcaaaccaagtattagccacagagttgggaataatgtacagacagagtctttaacctaaggattattactcttaagtgtaaaaatacatattcagagcagtccaggtatagctaagggctacacattactgcttaaagctactgattaccttgttttatcagggcatttttttagatcacttaatctttgactttatcatgtttttggtagcttttaaattgttttcaa

SEQ ID NO: 70983 - DNA, 600 bp, Chicken  19866894346926_1
taaaaaagaaacagaaagccccttaatattaacaagggaatgcaccatcagtcttgcctcacttcagctggccagccagcacaaaatccataaccaatcctctgttgcatatgctcaaaaaaacccctccttctagcttcaggaacttcttgatattataagtctgaagacaaaaagaaacatatttcagaagcttcacttttattttgtctttttcggtatgaaaaccattgaattccagggtgtaaaggtgaaggaaagtggcagaaaaatgaagttcctacatgggcattgagttasaaaagaacattaaaagatcagtgtctgcaggtaaatgcartagaatcacagaagtgtggtgttaacgaggaattggtacacacaccaacagaattaatcttaattcgagcaaagaggatttttttctgcaaaatgaactttttatgctgatacgaccgaattcacagcatacgaacccctactattcacacaaattatgatctaagtatttcaaatccatctggaaatagatcatggcaagagaatattttgcatgagatctcattaagagtttccgctgagattgtatttttcagggtt

SEQ ID NO: 70984 - DNA, 589 bp, Chicken  19866894346926_2
tgcaccatcagtcttgcctcacttcagctggccagccagcacaaaatccataaccaatcctctgttgcatatgctcaaaaaaacccctccttctagcttcaggaacttcttgatattataagtctgaagacaaaaagaaacatatttcagaagcttcacttttattttgtctttttcggtatgaaaaccattgaattccagggtgtaaaggtgaaggaaagtggcagaaaaatgaagttcctacatgggcattgagttasaaaagaacattaaaagatcagtgtctgcaggtaaatgcartagaatcacagaagtgtggtgttaacgaggaattggtacacacaccaacagaattaatcttaattcgagcaaagaggatttttttctgcaaaatgaactttttatgctgatacgaccgaattcacagcatacgaacccctactattcacacaaattatgatctaagtatttcaaatccatctggaaatagatcatggcaagagaatattttgcatgagatctcattaagagtttccgctgagattgtatttttcagggttttttttcctcctattttcaggagtaattt

SEQ ID NO: 70985 - DNA, 600 bp, Chicken  19866894346935_1
atccactgtttgacctccataaatgttcagcaaacatccaatgaatgtcagtgggtgccacttttccacataggggaattcaatgaaactcctttacttcatacatcttttcatgtcaaatgctgttcttgcagactgctcctctgctgccatctttcacatggcaataagaagtagtggaatgttggtgggaaggttcaatccctactgccataacaccaacatccgcctctgatgtcatgggccagagtaataaaataggaggcattactttcaaagcagctctcataaacacacgcrtaycacatatgttctgagtgcagttgttcattacaggatcccttatactgatataccascatgctgcaatatgtctccatgctacgtttacagattatcttcatggtacacagtactttggtttgggtgcagtgcaatagtcagagaaatgtggctgcaactgataaagtacctckcaatcaagtagcaatgaaagaatcagaaagaactgtattgaaacaatgccaattgaaaatgaagtattcaaaataagatgtgacagtaccttacattgtaaattctcttcggaatatatttcat

SEQ ID NO: 70986 - DNA, 600 bp, Chicken  19866894346935_2
cactgtttgacctccataaatgttcagcaaacatccaatgaatgtcagtgggtgccacttttccacataggggaattcaatgaaactcctttacttcatacatcttttcatgtcaaatgctgttcttgcagactgctcctctgctgccatctttcacatggcaataagaagtagtggaatgttggtgggaaggttcaatccctactgccataacaccaacatccgcctctgatgtcatgggccagagtaataaaataggaggcattactttcaaagcagctctcataaacacacgcrtaycacatatgttctgagtgcagttgttcattacaggatcccttatactgatataccascatgctgcaatatgtctccatgctacgtttacagattatcttcatggtacacagtactttggtttgggtgcagtgcaatagtcagagaaatgtggctgcaactgataaagtacctckcaatcaagtagcaatgaaagaatcagaaagaactgtattgaaacaatgccaattgaaaatgaagtattcaaaataagatgtgacagtaccttacattgtaaattctcttcggaatatatttcatgtt

SEQ ID NO: 70987 - DNA, 578 bp, Chicken  19866894346935_3
acttttccacataggggaattcaatgaaactcctttacttcatacatcttttcatgtcaaatgctgttcttgcagactgctcctctgctgccatctttcacatggcaataagaagtagtggaatgttggtgggaaggttcaatccctactgccataacaccaacatccgcctctgatgtcatgggccagagtaataaaataggaggcattactttcaaagcagctctcataaacacacgcrtaycacatatgttctgagtgcagttgttcattacaggatcccttatactgatataccascatgctgcaatatgtctccatgctacgtttacagattatcttcatggtacacagtactttggtttgggtgcagtgcaatagtcagagaaatgtggctgcaactgataaagtacctckcaatcaagtagcaatgaaagaatcagaaagaactgtattgaaacaatgccaattgaaaatgaagtattcaaaataagatgtgacagtaccttacattgtaaattctcttcggaatatatttcatgttttatttatttttattatatttcttcctttttttt

SEQ ID NO: 70988 - DNA, 461 bp, Chicken  19866894346935_4
gtggaatgttggtgggaaggttcaatccctactgccataacaccaacatccgcctctgatgtcatgggccagagtaataaaataggaggcattactttcaaagcagctctcataaacacacgcrtaycacatatgttctgagtgcagttgttcattacaggatcccttatactgatataccascatgctgcaatatgtctccatgctacgtttacagattatcttcatggtacacagtactttggtttgggtgcagtgcaatagtcagagaaatgtggctgcaactgataaagtacctckcaatcaagtagcaatgaaagaatcagaaagaactgtattgaaacaatgccaattgaaaatgaagtattcaaaataagatgtgacagtaccttacattgtaaattctcttcggaatatatttcatgttttatttatttttattatatttcttcctttttttt

SEQ ID NO: 70989 - DNA, 600 bp, Chicken  19866894346944_1
aaagttgtaagacagtagtcagcactttactactgacttactcagtaaaaaaaaatacttttatcttgcagctacagctgtaatgatgtaaaggaaatgataacattatagggatgttgaaaggattggttaaacattaagctatttgggaacgaatcatttcctttgagtttggaagcatctgatatttctgccatgtgaccaacaaaaatatgttgcattattttttttaccagccccgtcaaaattcatgctgtgttaaagaagataaaactcttctcaaaatccagtttaaaagcyctaccttttaaatagggaatttggattttgatataatcagatttgtaactcattcttccatatttatgttccacacataaatgtacatttacataatttgcataaataatgtacaaataacactttgagatcaaggctagtgtgttattttatcaatatgactctggtcaacttctttggtgtagtggtgttggagacctgctcaattgctgtatgtatgttatgtaagttctccaattkttcccatctccaaataattgaatacaatccagtactgactaatttgttttgaaggtaaaa

SEQ ID NO: 70990 - DNA, 600 bp, Chicken  19866894346944_2
gtcaaaattcatgctgtgttaaagaagataaaactcttctcaaaatccagtttaaaagcyctaccttttaaatagggaatttggattttgatataatcagatttgtaactcattcttccatatttatgttccacacataaatgtacatttacataatttgcataaataatgtacaaataacactttgagatcaaggctagtgtgttattttatcaatatgactctggtcaacttctttggtgtagtggtgttggagacctgctcaattgctgtatgtatgttatgtaagttctccaattkttcccatctccaaataattgaatacaatccagtactgactaatttgttttgaaggtaaaaattgatttcttgttctccctatgagcaaattacatcagttgcaatattgttttgatagagctttaactagacaaggttcttttctcattcacatgtactaaaacccattaaataatatatgtgaattttttttttccatgtcagaatatgaaaaaaaggttgaagaatgttccttgcacaagcagaggcaaatctgcataaaatgtcaataagtaaataatgagtttgtattgtgcgtga

SEQ ID NO: 70991 - DNA, 600 bp, Chicken  19866894346945_1
gtgggagtcctgctagcttctcttctggacagggaagctgtgtgcaggagccagcagtcccctcccccatttctgtcgcatgttgtgtgcttgtgaaattctgttcttgttgctgtttggcaggatatctggaggggaaggaaggaaggagagaggtgcctcgcagtttctcagggtggcatctggtctgccaggggaggtcaccatggaaggaaaaagcaaattctccaggtagtttaatttcttagaaggaaaagctctgaagtccactgcttttgtttatggggctctgaaagattkaaggcagctacatctacttacttcacatccacatcagaggcaacctgartagataggtttggaaaagctgcagtgaatgggtaaggacaagaagagtcactacagcttaaattcgttttgcttgcatraagggcagtgtggtgcttgaaaatgggataraccragaaaatcctcatccgtgataaatcttcaagggaggagaggggagaagagaaactcgagctgagttatgaaggtatcgaggagcagaaaacattaagaagtggccgtggctgctgtaggtgactcataattttttcc

SEQ ID NO: 70992 - DNA, 600 bp, Chicken  19866894346945_2
gccagcagtcccctcccccatttctgtcgcatgttgtgtgcttgtgaaattctgttcttgttgctgtttggcaggatatctggaggggaaggaaggaaggagagaggtgcctcgcagtttctcagggtggcatctggtctgccaggggaggtcaccatggaaggaaaaagcaaattctccaggtagtttaatttcttagaaggaaaagctctgaagtccactgcttttgtttatggggctctgaaagattkaaggcagctacatctacttacttcacatccacatcagaggcaacctgartagataggtttggaaaagctgcagtgaatgggtaaggacaagaagagtcactacagcttaaattcgttttgcttgcatraagggcagtgtggtgcttgaaaatgggataraccragaaaatcctcatccgtgataaatcttcaagggaggagaggggagaagagaaactcgagctgagttatgaaggtatcgaggagcagaaaacattaagaagtggccgtggctgctgtaggtgactcataattttttcctcaaatgacctgaaaatatatgaaaagggaatggggatttcctgcgtcg

SEQ ID NO: 70993 - DNA, 600 bp, Chicken  19866894346945_3
ctggaggggaaggaaggaaggagagaggtgcctcgcagtttctcagggtggcatctggtctgccaggggaggtcaccatggaaggaaaaagcaaattctccaggtagtttaatttcttagaaggaaaagctctgaagtccactgcttttgtttatggggctctgaaagattkaaggcagctacatctacttacttcacatccacatcagaggcaacctgartagataggtttggaaaagctgcagtgaatgggtaaggacaagaagagtcactacagcttaaattcgttttgcttgcatraagggcagtgtggtgcttgaaaatgggataraccragaaaatcctcatccgtgataaatcttcaagggaggagaggggagaagagaaactcgagctgagttatgaaggtatcgaggagcagaaaacattaagaagtggccgtggctgctgtaggtgactcataattttttcctcaaatgacctgaaaatatatgaaaagggaatggggatttcctgcgtcgtacaaaggcgtgggaaggggctgctgtctgtctgggtggccgctgtgggctggaatggagcttcgctccttcccactgc

SEQ ID NO: 70994 - DNA, 600 bp, Chicken  19866894346945_4
ctcgcagtttctcagggtggcatctggtctgccaggggaggtcaccatggaaggaaaaagcaaattctccaggtagtttaatttcttagaaggaaaagctctgaagtccactgcttttgtttatggggctctgaaagattkaaggcagctacatctacttacttcacatccacatcagaggcaacctgartagataggtttggaaaagctgcagtgaatgggtaaggacaagaagagtcactacagcttaaattcgttttgcttgcatraagggcagtgtggtgcttgaaaatgggataraccragaaaatcctcatccgtgataaatcttcaagggaggagaggggagaagagaaactcgagctgagttatgaaggtatcgaggagcagaaaacattaagaagtggccgtggctgctgtaggtgactcataattttttcctcaaatgacctgaaaatatatgaaaagggaatggggatttcctgcgtcgtacaaaggcgtgggaaggggctgctgtctgtctgggtggccgctgtgggctggaatggagcttcgctccttcccactgcgctgccagtacagcaaggtgtgcctgtgtgt

SEQ ID NO: 70995 - DNA, 600 bp, Chicken  19866894346945_5
cagtttctcagggtggcatctggtctgccaggggaggtcaccatggaaggaaaaagcaaattctccaggtagtttaatttcttagaaggaaaagctctgaagtccactgcttttgtttatggggctctgaaagattkaaggcagctacatctacttacttcacatccacatcagaggcaacctgartagataggtttggaaaagctgcagtgaatgggtaaggacaagaagagtcactacagcttaaattcgttttgcttgcatraagggcagtgtggtgcttgaaaatgggataraccragaaaatcctcatccgtgataaatcttcaagggaggagaggggagaagagaaactcgagctgagttatgaaggtatcgaggagcagaaaacattaagaagtggccgtggctgctgtaggtgactcataattttttcctcaaatgacctgaaaatatatgaaaagggaatggggatttcctgcgtcgtacaaaggcgtgggaaggggctgctgtctgtctgggtggccgctgtgggctggaatggagcttcgctccttcccactgcgctgccagtacagcaaggtgtgcctgtgtgtgaga

SEQ ID NO: 70996 - DNA, 600 bp, Chicken  19866894346953_1
gacaggagtattgcaaactggggagaagcaataattacaaattgtgatgtttgtaagagctatgctaaagagaaagaagtgattctgaaaagaaacagtaaatgctgactcctattttctttgctttatgagtaggatgtctgtcttagtttggtggaagccataatgagaaacagctgaaatagctgctaggaaaaagactggtttgcttttaaatacagtatagtcactgacttcagtttccttgctaaggtttgtaagattcatcaaatctacttgttcttttgagcaaggacagartactgaaatccaaggaaatgcttagtttgaactatttttggaaaaaaaaaaaccaarcatttaaacaagcattaagaagttacagtaaaaacataggaacagaaaatttgcagatttggtatgaaacatctttgagcaagtgagtggcatctattcaatattaattttctttttacactttcaaaagaagttttttgcaaacatttatttttggatctttgaaaatgaatttggtatctcttcttactggtgcttgcaggtgacatttcttttttttttttttttcccccctggattttg

SEQ ID NO: 70997 - DNA, 600 bp, Chicken  19866894346953_2
agctatgctaaagagaaagaagtgattctgaaaagaaacagtaaatgctgactcctattttctttgctttatgagtaggatgtctgtcttagtttggtggaagccataatgagaaacagctgaaatagctgctaggaaaaagactggtttgcttttaaatacagtatagtcactgacttcagtttccttgctaaggtttgtaagattcatcaaatctacttgttcttttgagcaaggacagartactgaaatccaaggaaatgcttagtttgaactatttttggaaaaaaaaaaaccaarcatttaaacaagcattaagaagttacagtaaaaacataggaacagaaaatttgcagatttggtatgaaacatctttgagcaagtgagtggcatctattcaatattaattttctttttacactttcaaaagaagttttttgcaaacatttatttttggatctttgaaaatgaatttggtatctcttcttactggtgcttgcaggtgacatttcttttttttttttttttcccccctggattttgcttcagctttattgaattgctgtcctgacatttggctgcttgctgctctgaaaccag

SEQ ID NO: 70998 - DNA, 600 bp, Chicken  19866894346960_1
agggcttcagccgggctgatgcgcttggatggctcatacgctggcatgctctcaatgatatatgtatgtctatatctacttatctctctctctgtatatatatatatatatatatatatgtatgtatatgtatatctttaatggttttggagatctgtagaatacttttcttgatacaacactctcttggacttaaacaagttcatattataccataattcagacacagaaaacacttggcacatcagggtacgtcttgcaattaaaaagacctttgttacattactaaaatgggaggcwttatgtgttcatgtgtgtgtctaatttgggagtttgattagtttcgttttcttgtcttgtttaaagggttattttggagctgttggggcgcttttagaattgcttaaaatgacagacgatcaatgatgaagctgtctgaagagatttctaccgcagatgctgctggataagagtgaaagccactacaaggatggaaatgaagccattatgatagttctacctgctggatttgtaaataatttaaaatccttttagctgatctttaacttctgggttttgagcttatacttcggagttcat

SEQ ID NO: 70999 - DNA, 600 bp, Chicken  19866894346961_1
ctccatagattacttctgcttcctacttttaacaaagatatgcaccacatagctcaaagcatccctagcagtaaatttaaagtcacccaaattcccttcataaaactttaagcttattatgtaaacgagctgcactttttgacagcaacactttgaccattacattcatctttttgctcagccttaccttcctctttgcatttctctctccagagaagattatcttcagccagaatcctccaataacggcacgtctgggctgcctgcagaaggtccctgggttccaggaatgacagcacrtacagtgccagctgtaagaaaaggaagggaggtttctaaattgcttttgaaaggaaaagtgaagtaactccaagcattatcacacatcagaggctgaaatacagaaaattgaaacaatgaattattaaatgatctcagaaacttaacagagctacagcttgttccagtgggcacatgagaagtacagcaatcatcttaaataactaaatccatacagatcacatcaaaaatgtatattatttgcaagagactagatgtcagctgaaatcactggctattatgcttttttaaaatgtcatc

SEQ ID NO: 71000 - DNA, 600 bp, Chicken  19866894346968_1
atttgaacaaaaataactgataaatacagaataaatgcatacatatgggcctatttgagaagcaaaagtaaatttttgcagagattttgagtattcagtacaaattactagcaggactttttgaaagactggcttaaaagcattgtcgctaaggtgagagaaatttcgtacttctacttctctgtgcggagtttttggtaaagtaccgagtgctttttgaaaatggcccctctttactggaaccacaaacgtatacgtgtgtttgtatgaaaacaagtggaattatattatgtaaacatrcatacaattcatattcattaataaatacgtatctatgtatggtagctgtatactagagcttctgggggaaaaaaagtgggctttgtacttgtactgactacacaagcagagctaatgcttttgcaatctattcctccagttgtcaaaacaaaaataatctccaaggatctagttgcttactttcatgagggcaacttacattagtccaaggtttgagcaatcaaaaatcatcagatttctgtactcttactgatagttatagtagtcagcattgtctgtaataatggaagttgttcatag

SEQ ID NO: 71001 - DNA, 599 bp, Chicken  19866894346971_1
  misc_feature (1)..(7): n is any nucleotide
nnnnnnnttaagaaacggagcacagaagtgccaggagcgcaggaagtaccatgagcaatagcacggctcaaagacgcagcaaagtgttttcccaacaatttctgaaccctctgtcagtgtttttggtgggtttttctgcccctctttactggagtgagttttactataagttttgtctctttcgtgcagtcttagccttcacactgataaaaaccagactgaagtccttctcctctgttctttctcatccctaatttcctccccgagctgtatttagtaacaggacaataagatatttcrtgtgaatgacagcaagatgaacaagacacataaaaaaggacgctgtggctcaccacacctcacgccccactgtgctcaccctcctggtgcttgttaaaaagacaaaaacaatgacaagggaagctttacctcctccagttcctcccagttgtagttgctgtttccaactatcatggccctgagctctgtgggctggaatagctccaggactttcccaccacacactttcaggaagccagtggagaaggctgtgtaccactcatggatggagcagttgaagatgtaatttacataggctt

SEQ ID NO: 71002 - DNA, 600 bp, Chicken  19866894346978_1
taaatggtgctaacacaagccctgaccatacattttgtgatggtacttgtaaagatgttgccatttggaggactcaactgtggagatgttctctatgtgaaaagatcatccaactgcgctacaccaggttgttgctatgaggttctcagcaggaaataaccagaagctccagaaaagccaaactgcttttcatgatgaaataatgttgtattgcatgatatctttgctagcaatattgatttcctaatgtacctatgctatgatattagactgtaggaataacgttgtgagactcgtcaraatttctcttccttctcccctcccccttttcgagacagaaaattggggtttggattaactgattggattaactgatttggattaacttagtgaggactgcaatacctatggaaaacatttgtgcctcttacatgaagcaaatctcccagcctgaggcatgcaatgtgcactgcacggtgggagccatagtccttatgtttcgtgttcctatttcaatgtatcaatcagcttgacttcatctttcaaggtttccacatgccttgtgccacaggtaactccacctcttactgcctcaatcca

SEQ ID NO: 71003 - DNA, 600 bp, Chicken  19866894346984_1
aatgagatgggatggggtccttgtggttcaagcatgatgtggtcaggcacatcgggtggtgttagaaacgtcatcagtggacctcttcatggcaacctcagtcttgaatgaattagtgtggatagaagcatggaaggcagtctgaacaggagagaactgaagtctgcaacaccatattttattggcacattgacatattcccaaaagttggaaaaaaagcatctgcatctgattgtgcatgtggcagtaacctggtaaggaagacctcacaacctctgataacaactgttccagtctttytcctcatcatttttcgagcttgtttttgcagtatgctcagaaccttgtcaccattgttattttgtctggtgtttagttcatcagaatgctgttacagctttccttamgtcaagtgtatcagcttcaagtttttgattctttggttcagagctccatgttaaggcagtggccccatgtttgatcccagcaggagacagaagctctccatggacagaaaggttcttggagatggataccaaaaagctgtgggagcccatgacatcatccatttccctttccagagacaaacttggatgtatg

SEQ ID NO: 71004 - DNA, 600 bp, Chicken  19866894346984_2
atgaattagtgtggatagaagcatggaaggcagtctgaacaggagagaactgaagtctgcaacaccatattttattggcacattgacatattcccaaaagttggaaaaaaagcatctgcatctgattgtgcatgtggcagtaacctggtaaggaagacctcacaacctctgataacaactgttccagtctttytcctcatcatttttcgagcttgtttttgcagtatgctcagaaccttgtcaccattgttattttgtctggtgtttagttcatcagaatgctgttacagctttccttamgtcaagtgtatcagcttcaagtttttgattctttggttcagagctccatgttaaggcagtggccccatgtttgatcccagcaggagacagaagctctccatggacagaaaggttcttggagatggataccaaaaagctgtgggagcccatgacatcatccatttccctttccagagacaaacttggatgtatgtaaaagttctcaagagatctgccttgctgctgcttaaaatgttcagtccaaaggcttcagcgtcggtgtggatgagaagctgggctgagatcagtgttaaatattct

SEQ ID NO: 71005 - DNA, 600 bp, Chicken  19866894346985_1
taaaaggaagggttggggcagagaagatgggtggtgggagaatggcatgcaaaggcttgcttgctgcttcacttagatcagatttctgagtcggaccctatataataaataagcagtgtgtggatagcacctcactaaaaagtgtaaccagaatagagaatgagttaggcaaggggcagccaggtgggattaacgtgcaggaaaggatcagcaggaagagagcacagcaccgtctgcatagcttgaggagaaagggttgggctcaaacccacacaaatggtggatgcttccccaggggcwgcacagtgctgctgtcttggaggagggaaggaataatgtggggaaaaacacagcccaggagctggaaacscatcttgtaggcaaacagtctcaaggatctggggctgtattgcagatgcacttttgcttgcttgggcagattgacttctgttatacattgtggctgtggctgtcgtctggttagcccaggtgaataagtgctgtcgggtcccccttgctgcccggtccagtattacacatgagcattgaaagagattgcttgagattggtggtggaccaaaacctgtggttgtcttaagc

SEQ ID NO: 71006 - DNA, 600 bp, Chicken  19866894346985_2
acttagatcagatttctgagtcggaccctatataataaataagcagtgtgtggatagcacctcactaaaaagtgtaaccagaatagagaatgagttaggcaaggggcagccaggtgggattaacgtgcaggaaaggatcagcaggaagagagcacagcaccgtctgcatagcttgaggagaaagggttgggctcaaacccacacaaatggtggatgcttccccaggggcwgcacagtgctgctgtcttggaggagggaaggaataatgtggggaaaaacacagcccaggagctggaaacscatcttgtaggcaaacagtctcaaggatctggggctgtattgcagatgcacttttgcttgcttgggcagattgacttctgttatacattgtggctgtggctgtcgtctggttagcccaggtgaataagtgctgtcgggtcccccttgctgcccggtccagtattacacatgagcattgaaagagattgcttgagattggtggtggaccaaaacctgtggttgtcttaagcacagtcccttcggacatacaaaatacttccttgattttgctttaagccttagagagcagagcaaagatga

SEQ ID NO: 71007 - DNA, 555 bp, Chicken  19866894346986_1
  misc_feature (1)..(1): n is any nucleotide
nattctgcatgctattaacgtgggctttttacatatgtcttacctggactctcttgggttgatggcaagatagatttcccatgaactctcttcaggaattgctccatgtggcaccaacagactgactcctacaacagaggaaaggcagaagttacctggatgtaaagctgagtttaaaggaaaccctgaataaagatcatgagagctcgaaagacaacctgttagccagaaatgggggcatccagccatgacagagaggaaactactcagcactatatgaacatggtggtgtagtgcaarcacactgcacgagcatgatctcaacatcctttattcgatgttagacattctcagctaatttaacgcatgcaaagtctcgaattctgtctcacagaactctgaagtcacaaaacaaattctacttcttaatgcaaactgagcattcctgttgcagtgcttcagtgcatggcccagccttgaagtgctctactatggaaatctgtcaaactgctcatctcatagaaagagaaaaccagaaagccaggagtacaataa

SEQ ID NO: 71008 - DNA, 600 bp, Chicken  19866894346988_1
tgaatggcacaaagtgtgtagagcacattagtcaatttgttattaatccagcaaaaggcattactgatgtttttctttttacctttagaactgctaggtgaatgtgatgttaatacaggagaaaacttatgacttctcaaaacaaattcctgagtaaattccatctatgttatttatatgaacaatagagtaatccagtaattaaaaaatgaaataagtccattaaatatgactagaagtgaaaacaaaaaaagatatgagttctgatctctgaatcttagagtttaggtgtaagacagwctttttycawaagtttgtcatctcctatggttttttttttcattagtatcctctggtttaatgaaaaataagtactaagaacataagaatactgaaggttgttagggaattacatttgtttgaaacttgtaagaacagataatggtaatatacctcaaatgattcaaatacacctttcatttgctaactacttttctatcattgtttcagaccaccccatgtatatgtgtttgtactgttacacctgccaggatgaatttgcttagtttcttgcattaggccttcaggttggccaaattt

SEQ ID NO: 71009 - DNA, 600 bp, Chicken  19866894346988_2
cacaaagtgtgtagagcacattagtcaatttgttattaatccagcaaaaggcattactgatgtttttctttttacctttagaactgctaggtgaatgtgatgttaatacaggagaaaacttatgacttctcaaaacaaattcctgagtaaattccatctatgttatttatatgaacaatagagtaatccagtaattaaaaaatgaaataagtccattaaatatgactagaagtgaaaacaaaaaaagatatgagttctgatctctgaatcttagagtttaggtgtaagacagwctttttycawaagtttgtcatctcctatggttttttttttcattagtatcctctggtttaatgaaaaataagtactaagaacataagaatactgaaggttgttagggaattacatttgtttgaaacttgtaagaacagataatggtaatatacctcaaatgattcaaatacacctttcatttgctaactacttttctatcattgtttcagaccaccccatgtatatgtgtttgtactgttacacctgccaggatgaatttgcttagtttcttgcattaggccttcaggttggccaaattttactaat

SEQ ID NO: 71010 - DNA, 600 bp, Chicken  19866894346988_3
aaagtgtgtagagcacattagtcaatttgttattaatccagcaaaaggcattactgatgtttttctttttacctttagaactgctaggtgaatgtgatgttaatacaggagaaaacttatgacttctcaaaacaaattcctgagtaaattccatctatgttatttatatgaacaatagagtaatccagtaattaaaaaatgaaataagtccattaaatatgactagaagtgaaaacaaaaaaagatatgagttctgatctctgaatcttagagtttaggtgtaagacagwctttttycawaagtttgtcatctcctatggttttttttttcattagtatcctctggtttaatgaaaaataagtactaagaacataagaatactgaaggttgttagggaattacatttgtttgaaacttgtaagaacagataatggtaatatacctcaaatgattcaaatacacctttcatttgctaactacttttctatcattgtttcagaccaccccatgtatatgtgtttgtactgttacacctgccaggatgaatttgcttagtttcttgcattaggccttcaggttggccaaattttactaatgtg

SEQ ID NO: 71011 - DNA, 599 bp, Chicken  19866894346994_1
  misc_feature (1)..(144): n is any nucleotide
nnnnnnnnnnnnnnnnnnnnnnnnnnnnnnnnnnnnnnnnnnnnnnnnnnnnnnnnnnnnnnnnnnnnnnnnnnnnnnnnnnnnnnnnnnnnnnnnnnnnnnnnnnnnnnnnnnnnnnnnnnnnnnnnnnnnnnnnnnnnnnnnaatggccaaagtttgttcttgagcctagtactaaaaatggatttttagtctgcatttctgttcaatttttatgttcatctaaagcttaattttaaaaggatgggaatagtatggaacccctgtcactctgaagggattcgttaatcccagaaaagyatctatacacaaattcatgggaaggttgttccttgtctcatgtaagatactgtgagttggctgctccagatcagatacgtgtcttaaacttcacctaggtaactaagtgacttcacttagatacggcttctcttcagatgggaagaggttgatgtggaaagtacgttctcatcccccacctcctaactccttataactgctgctgttcacttccttccatctcaccgtgtcccgatataatggtactggctatggaagaggagggaaaaccgataggaaattgagtgttctcattttat

SEQ ID NO: 71012 - DNA, 600 bp, Chicken  19866894346994_2
atggaaaacaaaatttcagaaggaagctgtgagcaaggagcagaattcagaaagcctggagtactttcttcaagcagatcctttttcaggaataagttgttcagaacaatgtatagaaagatgagtatcagaaatttgccatctcctgagccaggaaaggagcagggcatccagacatcaggatggttccagaagctgtttggaataacaggcagctgaagcttgcagctctgggtttatctgtagagactgaacagccatcatcgcaagcctggtgatagaccacactgacaaaagggwatcatcagtatataaagtatatttgttataggttttactgttctataaggttttgtaacctcatttcattgcttctaatctgtgattttaggtaagcattctgataggcactgtgctgtatatctgtattctgattctgytattaatggtaataagctggttatgcagagcctactrcaccwgtgtcttggtacagagtgttcttgtcyttarggtacttttctctagagctgcagaagttggttttaggagctgctaagactacaaactttggacagtcctagcttagtcattagccag

SEQ ID NO: 71013 - DNA, 541 bp, Chicken  19866894346994_3
atctcctgagccaggaaaggagcagggcatccagacatcaggatggttccagaagctgtttggaataacaggcagctgaagcttgcagctctgggtttatctgtagagactgaacagccatcatcgcaagcctggtgatagaccacactgacaaaagggwatcatcagtatataaagtatatttgttataggttttactgttctataaggttttgtaacctcatttcattgcttctaatctgtgattttaggtaagcattctgataggcactgtgctgtatatctgtattctgattctgytattaatggtaataagctggttatgcagagcctactrcaccwgtgtcttggtacagagtgttcttgtcyttarggtacttttctctagagctgcagaagttggttttaggagctgctaagactacaaactttggacagtcctagcttagtcattagccagagaatttccttgtaaggggcagggaagtgcagcccaagtgtcctgcgaaagcttagagcagtgattcttattgtaagtctg

SEQ ID NO: 71014 - DNA, 504 bp, Chicken  19866894346994_4
tcaggatggttccagaagctgtttggaataacaggcagctgaagcttgcagctctgggtttatctgtagagactgaacagccatcatcgcaagcctggtgatagaccacactgacaaaagggwatcatcagtatataaagtatatttgttataggttttactgttctataaggttttgtaacctcatttcattgcttctaatctgtgattttaggtaagcattctgataggcactgtgctgtatatctgtattctgattctgytattaatggtaataagctggttatgcagagcctactrcaccwgtgtcttggtacagagtgttcttgtcyttarggtacttttctctagagctgcagaagttggttttaggagctgctaagactacaaactttggacagtcctagcttagtcattagccagagaatttccttgtaaggggcagggaagtgcagcccaagtgtcctgcgaaagcttagagcagtgattcttattgtaagtctg

SEQ ID NO: 71015 - DNA, 499 bp, Chicken  19866894346994_5
atggttccagaagctgtttggaataacaggcagctgaagcttgcagctctgggtttatctgtagagactgaacagccatcatcgcaagcctggtgatagaccacactgacaaaagggwatcatcagtatataaagtatatttgttataggttttactgttctataaggttttgtaacctcatttcattgcttctaatctgtgattttaggtaagcattctgataggcactgtgctgtatatctgtattctgattctgytattaatggtaataagctggttatgcagagcctactrcaccwgtgtcttggtacagagtgttcttgtcyttarggtacttttctctagagctgcagaagttggttttaggagctgctaagactacaaactttggacagtcctagcttagtcattagccagagaatttccttgtaaggggcagggaagtgcagcccaagtgtcctgcgaaagcttagagcagtgattcttattgtaagtctg

SEQ ID NO: 71016 - DNA, 472 bp, Chicken  19866894346994_6
aggcagctgaagcttgcagctctgggtttatctgtagagactgaacagccatcatcgcaagcctggtgatagaccacactgacaaaagggwatcatcagtatataaagtatatttgttataggttttactgttctataaggttttgtaacctcatttcattgcttctaatctgtgattttaggtaagcattctgataggcactgtgctgtatatctgtattctgattctgytattaatggtaataagctggttatgcagagcctactrcaccwgtgtcttggtacagagtgttcttgtcyttarggtacttttctctagagctgcagaagttggttttaggagctgctaagactacaaactttggacagtcctagcttagtcattagccagagaatttccttgtaaggggcagggaagtgcagcccaagtgtcctgcgaaagcttagagcagtgattcttattgtaagtctg

SEQ ID NO: 71017 - DNA, 468 bp, Chicken  19866894346994_7
agctgaagcttgcagctctgggtttatctgtagagactgaacagccatcatcgcaagcctggtgatagaccacactgacaaaagggwatcatcagtatataaagtatatttgttataggttttactgttctataaggttttgtaacctcatttcattgcttctaatctgtgattttaggtaagcattctgataggcactgtgctgtatatctgtattctgattctgytattaatggtaataagctggttatgcagagcctactrcaccwgtgtcttggtacagagtgttcttgtcyttarggtacttttctctagagctgcagaagttggttttaggagctgctaagactacaaactttggacagtcctagcttagtcattagccagagaatttccttgtaaggggcagggaagtgcagcccaagtgtcctgcgaaagcttagagcagtgattcttattgtaagtctg

SEQ ID NO: 71018 - DNA, 599 bp, Chicken  19866894347009_1
  misc_feature (1)..(199): n is any nucleotide
nnnnnnnnnnnnnnnnnnnnnnnnnnnnnnnnnnnnnnnnnnnnnnnnnnnnnnnnnnnnnnnnnnnnnnnnnnnnnnnnnnnnnnnnnnnnnnnnnnnnnnnnnnnnnnnnnnnnnnnnnnnnnnnnnnnnnnnnnnnnnnnnnnnnnnnnnnnnnnnnnnnnnnnnnnnnnnnnnnnnnnnnnnnnnnnnnnnnnnnaaattattttaatgtttcacagcaatactgtagaatgtatttttccaactttagaaacagatattttagtataggaataaaataattaaaaacatatttcratgtgttttctgctttttwaaaaatgttttaggatgttttataggtgcttatggtagtcaatacatctagaacaaagtaaatgaacacagaacctattcagttccaaaagttcccagtgaacttttaggtttacacacagaaaaatgatctctacgcatctcttgggacttgacctatttcatgagagaacttaggcaaaacattggtttcacagtctctcaaaactatatccttactttcagctacaaacttaagggacgtgggtacaaaactttgcagttatcattgacttctgctt

SEQ ID NO: 71019 - DNA, 599 bp, Chicken  19866894347009_2
  misc_feature (1)..(180): n is any nucleotide
nnnnnnnnnnnnnnnnnnnnnnnnnnnnnnnnnnnnnnnnnnnnnnnnnnnnnnnnnnnnnnnnnnnnnnnnnnnnnnnnnnnnnnnnnnnnnnnnnnnnnnnnnnnnnnnnnnnnnnnnnnnnnnnnnnnnnnnnnnnnnnnnnnnnnnnnnnnnnnnnnnnnnnnnnnnnnnnnnnnnaaattattttaatgtttcacagcaatactgtagaatgtatttttccaactttagaaacagatattttagtataggaataaaataattaaaaacatatttcratgtgttttctgctttttwaaaaatgttttaggatgttttataggtgcttatggtagtcaatacatctagaacaaagtaaatgaacacagaacctattcagttccaaaagttcccagtgaacttttaggtttacacacagaaaaatgatctctacgcatctcttgggacttgacctatttcatgagagaacttaggcaaaacattggtttcacagtctctcaaaactatatccttactttcagctacaaacttaagggacgtgggtacaaaactttgcagttatcattgacttctgcttacatgcaacaatatatttt

SEQ ID NO: 71020 - DNA, 600 bp, Chicken  19866894347015_1
caaataacactggtttctgaaaatgaccagttccatttacatttcataatgtgttgaaaggaaaaacgtttgtgactgagtatgagaaggaaggagctgtcaaccctgttttgtgattactgcccacaaatgttctcacattttacttcaaaaaagtgttctgacaaaaatattagcactaatagtacagcatgcatatgttctcatcatataaatagtgcaacttcatctcatgagatagctgagggctttatccaatgactttagtgaaatttgaggttgctcagcaccttgcagcakgcacttggcgcgctcaaggaaggcaacgtgttgaccttgcagccacatcaggtatgaagaaccaycagttaatgtgaaacccaacaggaggcacagagcttcagtgcctacagcatcaagactctctttccccaacggacgacaaaaaaatgtttcttgctctaccacagtgtatcagcatcctccaacagacacatcctacaaacagcaatctgtatcagcagcctgctttctttcacacaaggagtggaactcattttccacaacttagcagcctgcattaccctaggttccctcttc

SEQ ID NO: 71021 - DNA, 600 bp, Chicken  19866894347015_2
acgtttgtgactgagtatgagaaggaaggagctgtcaaccctgttttgtgattactgcccacaaatgttctcacattttacttcaaaaaagtgttctgacaaaaatattagcactaatagtacagcatgcatatgttctcatcatataaatagtgcaacttcatctcatgagatagctgagggctttatccaatgactttagtgaaatttgaggttgctcagcaccttgcagcakgcacttggcgcgctcaaggaaggcaacgtgttgaccttgcagccacatcaggtatgaagaaccaycagttaatgtgaaacccaacaggaggcacagagcttcagtgcctacagcatcaagactctctttccccaacggacgacaaaaaaatgtttcttgctctaccacagtgtatcagcatcctccaacagacacatcctacaaacagcaatctgtatcagcagcctgctttctttcacacaaggagtggaactcattttccacaacttagcagcctgcattaccctaggttccctcttcgggcaatagagagaaatactcttcatccagttgtaggtgcctaaaaagagacgagatgaatccta

SEQ ID NO: 71022 - DNA, 600 bp, Chicken  19866894347015_3
atgtgaaacccaacaggaggcacagagcttcagtgcctacagcatcaagactctctttccccaacggacgacaaaaaaatgtttcttgctctaccacagtgtatcagcatcctccaacagacacatcctacaaacagcaatctgtatcagcagcctgctttctttcacacaaggagtggaactcattttccacaacttagcagcctgcattaccctaggttccctcttcgggcaatagagagaaatactcttcatccagttgtaggtgcctaaaaagagacgagatgaatcctacccaasgcgtttgctgtttttcattcattccttatgaggtttctttttataatttgaagttttgtaggggaatttttgtctgtctagtggtcaagaaatagatcacctcacctacagaagtaaaggagactgtaaaggagagacatttctactctaatgtgaaatctggattattgaaataaatatccaattaaaaatacacatgccattaaggcagcatgttgtgtacaagactgtcaaatggatgcatcttctagaatttcagtgtttttcaactttaacacttgaatgtgatctcctgacaaa

SEQ ID NO: 71023 - DNA, 599 bp, Chicken  19866894347017_1
  misc_feature (1)..(176): n is any nucleotide
nnnnnnnnnnnnnnnnnnnnnnnnnnnnnnnnnnnnnnnnnnnnnnnnnnnnnnnnnnnnnnnnnnnnnnnnnnnnnnnnnnnnnnnnnnnnnnnnnnnnnnnnnnnnnnnnnnnnnnnnnnnnnnnnnnnnnnnnnnnnnnnnnnnnnnnnnnnnnnnnnnnnnnnnnnnnnnnntgcttctctatacatggctgcttgtcttttgccatcccaggttcttcctgaatattttggccccctccgaaacacacaattcctaaaccaacccacaaggtcattagcttatgctttaagcttyagtttgagatcagatgttctaactgtgatatacgtctgtccaaagacaactagcaatggatagaacagggtttggaggcagtggaagcctatttaaacacaaaacaaactaagatataataaaatgttattgattgagagcatctctgtgtcactgatckgagctgctgacacagcagagagcacttgggtgtctgttcacatgtcagcagaacccagcaatccttaccattacrctttctgtggcttgtaccagcctcccagaagcagaagttaacagtctgtagctctgagatgcac

SEQ ID NO: 71024 - DNA, 599 bp, Chicken  19866894347017_2
  misc_feature (1)..(16): n is any nucleotide
nnnnnnnnnnnnnnnntgcttctctatacatggctgcttgtcttttgccatcccaggttcttcctgaatattttggccccctccgaaacacacaattcctaaaccaacccacaaggtcattagcttatgctttaagcttyagtttgagatcagatgttctaactgtgatatacgtctgtccaaagacaactagcaatggatagaacagggtttggaggcagtggaagcctatttaaacacaaaacaaactaagatataataaaatgttattgattgagagcatctctgtgtcactgatckgagctgctgacacagcagagagcacttgggtgtctgttcacatgtcagcagaacccagcaatccttaccattacrctttctgtggcttgtaccagcctcccagaagcagaagttaacagtctgtagctctgagatgcactctggcagaggtaagctggtttttatgggatgccagacttttagagtcaagatattaactactacagtgagcactgaggctgcacatacacatcaccaaaggcagctcctatggagccgtgttaggtgaatgcagccgtgctgctgcccgtgctgccaag

SEQ ID NO: 71025 - DNA, 600 bp, Chicken  19866894347017_3
gccccctccgaaacacacaattcctaaaccaacccacaaggtcattagcttatgctttaagcttyagtttgagatcagatgttctaactgtgatatacgtctgtccaaagacaactagcaatggatagaacagggtttggaggcagtggaagcctatttaaacacaaaacaaactaagatataataaaatgttattgattgagagcatctctgtgtcactgatckgagctgctgacacagcagagagcacttgggtgtctgttcacatgtcagcagaacccagcaatccttaccattacrctttctgtggcttgtaccagcctcccagaagcagaagttaacagtctgtagctctgagatgcactctggcagaggtaagctggtttttatgggatgccagacttttagagtcaagatattaactactacagtgagcactgaggctgcacatacacatcaccaaaggcagctcctatggagccgtgttaggtgaatgcagccgtgctgctgcccgtgctgccaagctgactcagatctccaggcgagggatgcacatcctgtaattgagatgtaactgtgtcctgtgcaagaggcatagaa

SEQ ID NO: 71026 - DNA, 600 bp, Chicken  19866894347018_1
tcaggtgaggttgcattgtatttttttaattcaaatattcatagcatgactgaatgattttcagaaaggtggctcttggtcagtacagagacaattgctaaagtactttggatttacagaaggttacataatgccagaaacatccaatcttcccctttgttatttaaccaaaaaaaaaccccaggctattttgaggaattgtgcttacagacatacttattgttggtattactttaaaaaagaaacaaaaaaccaacaccaacttgaaatgcaaagaacatgctatcttgggtactcatrctactgggatttmtgtaaagatgcaactaacctacactattctgtgttacaaattagtatattgaaagtaatgaaaattgatgataattacatatttgagttaaaaagcargcattayatttttttatgttattttgcctaggatcgagctcacagaattggtcaaacaaagactgtaagagtgttcagatttatcacagacaatacagtggaagaaaggatagtggagcgtgcagaaatgaaactccgccttgattccatagtcattcagcaaggcaagtatatgcaggcaattagtta

SEQ ID NO: 71027 - DNA, 600 bp, Chicken  19866894347018_2
cattgtatttttttaattcaaatattcatagcatgactgaatgattttcagaaaggtggctcttggtcagtacagagacaattgctaaagtactttggatttacagaaggttacataatgccagaaacatccaatcttcccctttgttatttaaccaaaaaaaaaccccaggctattttgaggaattgtgcttacagacatacttattgttggtattactttaaaaaagaaacaaaaaaccaacaccaacttgaaatgcaaagaacatgctatcttgggtactcatrctactgggatttmtgtaaagatgcaactaacctacactattctgtgttacaaattagtatattgaaagtaatgaaaattgatgataattacatatttgagttaaaaagcargcattayatttttttatgttattttgcctaggatcgagctcacagaattggtcaaacaaagactgtaagagtgttcagatttatcacagacaatacagtggaagaaaggatagtggagcgtgcagaaatgaaactccgccttgattccatagtcattcagcaaggcaagtatatgcaggcaattagttaagtctgtacacag

SEQ ID NO: 71028 - DNA, 600 bp, Chicken  19866894347018_3
atttacagaaggttacataatgccagaaacatccaatcttcccctttgttatttaaccaaaaaaaaaccccaggctattttgaggaattgtgcttacagacatacttattgttggtattactttaaaaaagaaacaaaaaaccaacaccaacttgaaatgcaaagaacatgctatcttgggtactcatrctactgggatttmtgtaaagatgcaactaacctacactattctgtgttacaaattagtatattgaaagtaatgaaaattgatgataattacatatttgagttaaaaagcargcattayatttttttatgttattttgcctaggatcgagctcacagaattggtcaaacaaagactgtaagagtgttcagatttatcacagacaatacagtggaagaaaggatagtggagcgtgcagaaatgaaactccgccttgattccatagtcattcagcaaggcaagtatatgcaggcaattagttaagtctgtacacaggatgagttttttggtttttttatttttaaacaattaaaatagtgaaatcaagtgaatgttaatgggaatgttacttttgcctcagctgtactctgaag

SEQ ID NO: 71029 - DNA, 600 bp, Chicken  19866894347018_4
gaaggttacataatgccagaaacatccaatcttcccctttgttatttaaccaaaaaaaaaccccaggctattttgaggaattgtgcttacagacatacttattgttggtattactttaaaaaagaaacaaaaaaccaacaccaacttgaaatgcaaagaacatgctatcttgggtactcatrctactgggatttmtgtaaagatgcaactaacctacactattctgtgttacaaattagtatattgaaagtaatgaaaattgatgataattacatatttgagttaaaaagcargcattayatttttttatgttattttgcctaggatcgagctcacagaattggtcaaacaaagactgtaagagtgttcagatttatcacagacaatacagtggaagaaaggatagtggagcgtgcagaaatgaaactccgccttgattccatagtcattcagcaaggcaagtatatgcaggcaattagttaagtctgtacacaggatgagttttttggtttttttatttttaaacaattaaaatagtgaaatcaagtgaatgttaatgggaatgttacttttgcctcagctgtactctgaagatggagt

SEQ ID NO: 71030 - DNA, 600 bp, Chicken  19866894347019_1
aatattgaattgaatcaaaaatttagatttagatcaaatttggtgaacaaaaaagttattaaacattctctgcagttagttattgaacaaatattgcatgaaggaaactctcactcaaagtaaatatgggcaatctatttgcccttatctagtaaatataggcattgcccaaagtcaaaaataagtcagaaatgcaggagctcaaatgaagaagaaacaaatatctgaaaaatcattgccattttgccaatgtctggaggcatttagtaacacagatgaggtcgtataagcaattcagtrccttaacttttcctgttagagtagagatagcttcctacttgcatcttgcagagaaatatgaaagcagtggagtgttgacaaagaacagtgatggtgaatattctttacctctacctcacccttcgccgtcgcatgggtaaatgctatcaagcaagacagatgctaatggatatgacttgttagctgatcatgaagccatattttcatgaagaagatttaaaatggagcacctcatagatccgcagagaatagctctgcatcagtccgtttcccattttcctgttttcatatgagctgcta

SEQ ID NO: 71031 - DNA, 460 bp, Chicken  19866894347022_1
tctgagcgtgctaatccacagcattatgagaattacatatttttgatgttggtaatcacattgattgatatcaaggtcaatgatctttggaaatatttcatttaaataccaagtactattctaaaatgtcaaaacattaattagttcctagttagataacttctgccgtatactaaaaaagggatcttgtttctgtaattcatagaaagtctaatccaaatcccattgaagtctgcaggaggtttttcaaagcaaataagatgaagatcatgaagtctttgtatttctgtgggatgtagkgcttcctttgtttttctaatgaaggcgaaagagagtctgaactgggcctgtgggctagaagattgcataacattttcatatgtctgcaatgtagagctcaatggataaatattaataacaataacaatcttagttttgcattcagggtaactcaatgctg

SEQ ID NO: 71032 - DNA, 600 bp, Chicken  19866894347024_1
atatgttttaaaatttcttcaactttagaattaacatttgccttacatctctatcatcacggttgttcaggaaattgtagtttttctacattttaactgtttcctaaaagcctaccaattttgtggctacttactttgtctccttttgtccctgggcttccacattcacctctttcacccttaaaaggaacaaagataaatatttatgatacatactgagcatatcatcctgtacagtcaacaaagtacagttagaaagaataccatagtaagagaacaaaagaagagagaagaaatgcwcatccatatccatagatttacactcacaatgaaaagttccacaaagaagaaacctccagaaagagatccttccccaagggcactcagcccttaaatggggtctaagagaggtgtagccaggctccaccccttctggtcacacacatgaattgccttcacctgtgctcccatggctgagtccttgcctcaggtgatcaatcagtggttcaggctgtgactcaacagttctacacacatccttattcattgagtgctttaggtgaaaatgacctaaatgttattttcatgacatatagcaat

SEQ ID NO: 71033 - DNA, 599 bp, Chicken  19866894347047_1
  misc_feature (1)..(136): n is any nucleotide
nnnnnnnnnnnnnnnnnnnnnnnnnnnnnnnnnnnnnnnnnnnnnnnnnnnnnnnnnnnnnnnnnnnnnnnnnnnnnnnnnnnnnnnnnnnnnnnnnnnnnnnnnnnnnnnnnnnnnnnnnnnnnnnnnnnnnnnnccaatgtatcacatatgctctcattccatcaacccaacccagccctgtctcacacgtagaaggatgatacttgagatgcctgttacatcacgatgctgcgagacacaattgcacttctttgaaatgtacccagcacctattgcatcatgagagaaggatgaaartgttcctttaataacatattagccaatgtgtttaacaaatgcattttaagtgccaactgcagacagaagaaggtgtatttcaacatgcattagcagatcaaggaaaatctcaggaggaagtccaaagggaacaaatgaacttggcaatctggggaatccagcccacacaatgtaatgggaattaggaccctaattcatcaaggtacttaaagacagatttttagaagtagttagtgagttaaacatttaaatacctttaaaaatctcatccacaaacatgtaatgatctctaagcctgt

SEQ ID NO: 71034 - DNA, 600 bp, Chicken  19866894347059_1
ttatttttttcccttgttcatgtaaataacagataaaagtgaggcagtactttgaaactcctttcctggatgcttactatttgagtggtgggccaacttttggacttgctggagaaacagggaagtattagcaaagctaggcaaactggcagcactttgcataactgagtttaatcaaaatgaatgtttttcatgggcagatctctttttctattgaaagtacctgtggaaacttgaagtgtttgtttctgagattcctaaacaggaatttcacatttggggggatactgtaagaatccwgctcacccacaggccagtactggagacaatatgcgacctgatataatacacacgtcatgccatgtcatgatagcagaactcttatttcttttggtattatgaagacacaaggaaggcgcactgccccccctttccactcagatgtggagctgggattcccccacacttttcctgtgtttctattctgagtcttttgttaattcatcgtcaataaccaaaacttgagatgatttttaattattatgattacacttctctatgggaaaaactaccttttagaatgttatccttgcttttctt

SEQ ID NO: 71035 - DNA, 600 bp, Chicken  19866894347059_2
agatgatttttaattattatgattacacttctctatgggaaaaactaccttttagaatgttatccttgcttttcttctgtagaatgagctgactgccatatagtaattttcttatggtgtatgctatttaatgtaatcatatattttaagggaaaacgcacccaaatgtgtgttcttaatcatgggtaattcttatgttacttttctttagaaatcacaagcatgttatcaggcatattaattgttggattggtgtatgactaaggatacaaatatctcctcctttttccctctcccctsttaacatttygtttgagcagatcagtacattttgtctgtgaaaagccctggattaaatgccacccaccatagattttgtacatgctttattttgccaaaggaggttgttagacattagaggaagtaatgtaatactggttgacctaagactttcattaactgccaaggaagtttacaaaaactatcttattaactttgcacatcatttttctagggcagaaaagctttgtcacaaagcactcatttcttgttttgcttacctcaaggcataaaggcgtaaaggaaataaatatrttcctt

SEQ ID NO: 71036 - DNA, 600 bp, Chicken  19866894347059_3
taattattatgattacacttctctatgggaaaaactaccttttagaatgttatccttgcttttcttctgtagaatgagctgactgccatatagtaattttcttatggtgtatgctatttaatgtaatcatatattttaagggaaaacgcacccaaatgtgtgttcttaatcatgggtaattcttatgttacttttctttagaaatcacaagcatgttatcaggcatattaattgttggattggtgtatgactaaggatacaaatatctcctcctttttccctctcccctsttaacatttygtttgagcagatcagtacattttgtctgtgaaaagccctggattaaatgccacccaccatagattttgtacatgctttattttgccaaaggaggttgttagacattagaggaagtaatgtaatactggttgacctaagactttcattaactgccaaggaagtttacaaaaactatcttattaactttgcacatcatttttctagggcagaaaagctttgtcacaaagcactcatttcttgttttgcttacctcaaggcataaaggcgtaaaggaaataaatatrttccttatttctggtg

SEQ ID NO: 71037 - DNA, 600 bp, Chicken  19866894347059_4
cccctsttaacatttygtttgagcagatcagtacattttgtctgtgaaaagccctggattaaatgccacccaccatagattttgtacatgctttattttgccaaaggaggttgttagacattagaggaagtaatgtaatactggttgacctaagactttcattaactgccaaggaagtttacaaaaactatcttattaactttgcacatcatttttctagggcagaaaagctttgtcacaaagcactcatttcttgttttgcttacctcaaggcataaaggcgtaaaggaaataaatatrttccttatttctggtgcaaatagcattctagaaatatgaaatagaaggaagattttttctaccagtcattcctgtttgagctcaatacaagccaaataagctgtatttgatgtgcacatttaaattagcattgtgggctcagctttgaactgaatccttagacatgagggcagcatgtgattttaaccctgcaagaagctagtggacgactttcacattgtcttttaccaaaaataktttatggacagtgtttacatgttttttgatgatgcctctaagcccacgtgcctttcaactaca

SEQ ID NO: 71038 - DNA, 600 bp, Chicken  19866894347059_5
acaaagcactcatttcttgttttgcttacctcaaggcataaaggcgtaaaggaaataaatatrttccttatttctggtgcaaatagcattctagaaatatgaaatagaaggaagattttttctaccagtcattcctgtttgagctcaatacaagccaaataagctgtatttgatgtgcacatttaaattagcattgtgggctcagctttgaactgaatccttagacatgagggcagcatgtgattttaaccctgcaagaagctagtggacgactttcacattgtcttttaccaaaaataktttatggacagtgtttacatgttttttgatgatgcctctaagcccacgtgcctttcaactacatgaaggactgctgttcacttccctttctattactgtctgttttacccacagattcctcaggccagtccttataggaggttacacttcaggcagctgtttttcttcagccttcattttctactgaaatacgtctgtcagatccaccatctcttttttttttccttttctttttccttttttcttttttaatcttttttccttcaaacgtgtctatcttttcatttcttttattgtaaa

SEQ ID NO: 71039 - DNA, 501 bp, Chicken  19866894347059_6
aagcccacgtgcctttcaactacatgaaggactgctgttcacttccctttctattactgtctgttttacccacagattcctcaggccagtccttataggaggttacacttcaggcagctgtttttcttcagccttcattttctactgaaatacgtctgtcagatccaccatctcttttttttttccttttctttttccttttttcttttttaatcttttttccttcaaacgtgtctatcttttcatttcttttattgtaaaccatcaaccaggtgctttcctccatatgcgaatattccyttgctagaatctctgttcctgctctggtcacttttccttgttaataacatctttcctactagctgcttttctttttcctttgcctatagtcagtgttagcagtcattggtaaaattatcttcatgttcatccattcagccatattgccctttggtggaatttttttgtaggcttttggcaatcaaattcaaacggcttttt

SEQ ID NO: 71040 - DNA, 600 bp, Chicken  19866894347061_1
gtgaaatagatgcttgtgtgctacatgtgctgagatgtgcagtaatactgtctggacagaagcacagggaggatagcttggtgcttctttctctgtaatagtctctgctgtgagttaagagcattacagtacagacacaacatgggccagagtttccaaaatggccagtcttgcatgtgtgtgaataatatttggtgcagctgttccccgactagacggcttccacgtggagctttcacaatgctgttttgtatatttgtccctgtctgatttgcacactgtgttctgattcaaagaacstaagttctctgggccaaatgctttcatgcctatctatacaaaggctaacagagatcctgactcgcaactggggatcttagctctattgtgatataaataataagcttaacgcttaatgaacttgtgggagaaagatatcgttgttaattattcagcagccttatctcttcaaataagatacagtaaatctcccagtaaatatctgaaacttccagcaaggcttgtggtaaagctgaagtagagcagagctggcatcctttatctgctgaagaaggcagtcaggaataaatgggaatcatc

SEQ ID NO: 71041 - DNA, 600 bp, Chicken  19866894347065_1
tgcttccttccaaaggtggattgatttgtgatgttgagataatcaaccatatggtgcagcaggtaggtcacacatgttttctcagtagccagtggctgctggctgtgaaaggcatgcatagcattacattcatttctgtcctaagaattctagtcacggtctcaaaatttgctaaaaacagcaagaggaatgaaatgttgtacgagtccattttagactgaatatttatttcatctcaatgcctctctggtttctattatagttcctgtttgggccctgcacagatttattttacactcrtcctactgtgacagaggaggaagtttctcamagctaaatctattatgaatgtgttattagttgaagtctcattattgcattgccttttctaatcaaagcgaagaatctgttattaacaatgtaatctcttttcctgatggcttgttgttgtagatacaaccataaaagcaattggcttgaatggttcctttgcactcaggttcttttccataacatagattactcctaattaccatttcttagctacagtgatttaggattatgtttttgagtcatggctttcgcaagacgacgtgcatt

SEQ ID NO: 71042 - DNA, 600 bp, Chicken  19866894347065_2
tgttgagataatcaaccatatggtgcagcaggtaggtcacacatgttttctcagtagccagtggctgctggctgtgaaaggcatgcatagcattacattcatttctgtcctaagaattctagtcacggtctcaaaatttgctaaaaacagcaagaggaatgaaatgttgtacgagtccattttagactgaatatttatttcatctcaatgcctctctggtttctattatagttcctgtttgggccctgcacagatttattttacactcrtcctactgtgacagaggaggaagtttctcamagctaaatctattatgaatgtgttattagttgaagtctcattattgcattgccttttctaatcaaagcgaagaatctgttattaacaatgtaatctcttttcctgatggcttgttgttgtagatacaaccataaaagcaattggcttgaatggttcctttgcactcaggttcttttccataacatagattactcctaattaccatttcttagctacagtgatttaggattatgtttttgagtcatggctttcgcaagacgacgtgcattgacagtctggagatagcttggatatgattga

SEQ ID NO: 71043 - DNA, 600 bp, Chicken  19866894347088_1
taatagaatcatctttaattcttacgttggaaccagaccaaagtatattaagagagttcagcagtaaagtttgctttatgaattactattttgtacatttactatggtgagattgatctccgaaggtattactaatagtcttagacctccccccttattattatccaaaatgcttaataaaatacacagttttaatatgatctgttgcttatgataatgtgtgaaatgaaaaggtgatgtactgacaccttcatttttaaatggcaactggttagctggagtgaaattgaggcaacattktaatgaaacatcataccaactcatgtttgcctgtcgtaagtgtagacatcatcagctccaggtttcagcagaatctgatatttctaaatctcattttagacaataaaacctttttttgaacttctgtatccgtgagttttgcaaatacgacttcaatttgggtaaatcttcagacgtgtcagagtggaatgtaattgtttagtaataaaacggattattttgtaaactcgcagtaccagaaactctaagtgaagtatacaaatctgaatttattgagccaggcttagttattctgtgtga

SEQ ID NO: 71044 - DNA, 600 bp, Chicken  19866894347089_1
gaaatgtgaaacatgaacatcaatagctttctcctgccaagataagagcttgctgcagaggccaaacatatgtctttctttccttccccagggaggtttctggataaggaagaggtgtgtctgcacctgagctgcttaaaatggctcagccacatatgtgcattttgtgaacttccctttggtcttgctgagattttgtcctcagagccgcagccatctgcgttccgcgggcctgaggccggactcaccactaaagggattttagcactggggttggagcctcgtggtaggtgagagccycatcggaggggctcagcaagaaagggtgacccctaggattgccctttgaaagcagcagcaggttcctctcgataaaacacaatgygattcatcaccacccacctcggcgccagcgaggttcaggtgagggaggtgatagcgatgcaaatgtgtgacactgctgcatgtcaaagcagagctcctgggccaggaaaagcaatgtctggccatgctaggcagccaaggtggtgcctctgccacctcatgctggcagtgctgcccatgcccaacgccccacacaagtgggacaaagcacggctt

SEQ ID NO: 71045 - DNA, 600 bp, Chicken  19866894347089_2
ccccagggaggtttctggataaggaagaggtgtgtctgcacctgagctgcttaaaatggctcagccacatatgtgcattttgtgaacttccctttggtcttgctgagattttgtcctcagagccgcagccatctgcgttccgcgggcctgaggccggactcaccactaaagggattttagcactggggttggagcctcgtggtaggtgagagccycatcggaggggctcagcaagaaagggtgacccctaggattgccctttgaaagcagcagcaggttcctctcgataaaacacaatgygattcatcaccacccacctcggcgccagcgaggttcaggtgagggaggtgatagcgatgcaaatgtgtgacactgctgcatgtcaaagcagagctcctgggccaggaaaagcaatgtctggccatgctaggcagccaaggtggtgcctctgccacctcatgctggcagtgctgcccatgcccaacgccccacacaagtgggacaaagcacggctttgtcttcagcaagcttgcccaaaaggcaaattagttcttgcagctcaagtttaatgaacaaaaagtgctagtagtaaccagaccc

SEQ ID NO: 71046 - DNA, 600 bp, Chicken  19866894347092_1
ttagcacctgaggggcacaggctgctgtcctgactcaggtgtacctcagaatgcttcatagggtctcgtggggctgctcatgaggcaggtagtgcccagctcaggtgcaggcctgcagggtgttcccagccacccccgtagaacaagagaccctgctgactggccagcacacaacactgtggcctggggccctgtaaaacaagagtcatgccagctcttcccattattttgctcaagtaatgagtaatatcagcggctcctgattttaagtctgtgagcaatgtcggaacactgtaaaastggggattgtaggcagccgtgtaacaagttaatgacttcgactattacgtgactcatctgtaaaatgggccctgagttatgaagacacacaccgactgtggagtattacagaaaattaagaccaatgtgacataattacgatagaagtactgcagctggaaacaatgggaaaaatgggaggggccatagctccgctgattggcttaattacactcctgcaccccatttccaaaagcagagcatgagttagacccagcacctcctgccagcccttgcagcccttacaagggggtgtaaaac

SEQ ID NO: 71047 - DNA, 600 bp, Chicken  19866894347092_2
taaaacatccttccagcatcatccctctgctccttcctcttcctcatctgtgtgtgctgagaaccctcattcataggatggcattgtcccattggtggtcactgaagagtgatgcatgttcttgtcacaacaggtcaagccccatgtgacaatctgaggaggtgcacagcccacgttatccatcaccccagcagcatcccagctgtgctggctgtctctgagagacacgtatgtcctgcaagcaggggcagcttgagaacagcatgtcagcacgtacttcatgggaagctgttatctacraattatttcaaaaccttaatacatactgaagtaggtagtataatacgttgtgaagagtaattgagggttatgctaattgtgctcaggctggaaaaataattacaacacactgaagcctctgacctcttctgaatgagctcagtggtagaaacagttttaaaaatgctttaggaggagacaactgattttatttagacgcaaggtcctgcctaaaaatattctaagcaacacgtccatcaaaaatgtagcacagataaatacgaaaagaggtgaaaaaagtgtctcaaactcttaacacat

SEQ ID NO: 71048 - DNA, 599 bp, Chicken  19866894347098_1
  misc_feature (1)..(170): n is any nucleotide
nnnnnnnnnnnnnnnnnnnnnnnnnnnnnnnnnnnnnnnnnnnnnnnnnnnnnnnnnnnnnnnnnnnnnnnnnnnnnnnnnnnnnnnnnnnnnnnnnnnnnnnnnnnnnnnnnnnnnnnnnnnnnnnnnnnnnnnnnnnnnnnnnnnnnnnnnnnnnnnnnnnnnnnnnnctctcttctgagttactatcaaaagacttcagaaaaaacagttggacaggacttccagatgttaggaacatcattcccattgagaggcaaaggaatgctacctgcaaatagatgctcatcagtttctaartaagttacatgaagactacaaccttatcagatgtttactttggtgcttagtttcccttttcactacactagatttcaagaaacatctgtcctcctgtactgcaaaagtcattgtttgtgtccagtgtaggcagtacttactttcttcrttagcttgttatgtttgatgactcatctcctatcagtctcttcttctgccaactaaataaatgaccatagctctttcagatgataaacatctgcaagtggttgctttgcttttatctggactttctctgatatacttaaaacaacactcta

SEQ ID NO: 71049 - DNA, 599 bp, Chicken  19866894347098_2
  misc_feature (1)..(22): n is any nucleotide
nnnnnnnnnnnnnnnnnnnnnnctctcttctgagttactatcaaaagacttcagaaaaaacagttggacaggacttccagatgttaggaacatcattcccattgagaggcaaaggaatgctacctgcaaatagatgctcatcagtttctaartaagttacatgaagactacaaccttatcagatgtttactttggtgcttagtttcccttttcactacactagatttcaagaaacatctgtcctcctgtactgcaaaagtcattgtttgtgtccagtgtaggcagtacttactttcttcrttagcttgttatgtttgatgactcatctcctatcagtctcttcttctgccaactaaataaatgaccatagctctttcagatgataaacatctgcaagtggttgctttgcttttatctggactttctctgatatacttaaaacaacactctaaccctcacattctatgcttatgtgctaggactaatgaatcctaactctaggattatatagcaatctgcagaaaatgagctttgtttttaatttactgatgcaagacaactgggataagattcaagaggatctgattcacacctcagaa

SEQ ID NO: 71050 - DNA, 461 bp, Chicken  19866894347100_1
catcaggccattattacttgaatggacaggacaggtttctaggtttgttttgctttgtctgctcctagctgagaaagaaagagttgttgatcactttgttaatagtgcctgcacatcatcttccacaaaggtggctgtatgaagacatggagctgctatacccctgaagagcacattctgtgcattggaattacttctggactttgcttgtacctggagggatatttgctcttggaatttgggtttaggatttagttgctttgtactacaattccagggtagctcttgctcagtgttggrgtgctccaaagtgtttgctttagtagctctgtaagggcatttcacctgccaagggcccgctaattttgctggctcataattttgttgaacttaatgatagctataggcgcttttttattgaatatgggtggtgcagcagatgaaatgggggagatcggttt

SEQ ID NO: 71051 - DNA, 599 bp, Chicken  19866894347121_1
  misc_feature (1)..(177): n is any nucleotide
nnnnnnnnnnnnnnnnnnnnnnnnnnnnnnnnnnnnnnnnnnnnnnnnnnnnnnnnnnnnnnnnnnnnnnnnnnnnnnnnnnnnnnnnnnnnnnnnnnnnnnnnnnnnnnnnnnnnnnnnnnnnnnnnnnnnnnnnnnnnnnnnnnnnnnnnnnnnnnnnnnnnnnnnnnnnnnnnnattgttttattatgtacataataacaattccgtgtattccatcactgctgctctgaaagtaatgcctcccgatttattgtggcagcccatgctgtccaaggccaatgctggtggtacaaagcrgaggctgaacgttcccaccaatatcccactgtgttttgacaccatgtgatggakggcaatagaggggcaatctgaccaaatggcatctcacaaggaagtgcatcgctgcactcctccatgcacaaagaattgcatccattgacattcactaacgcttgctgaatgtttatggagaacaaagagtggatgtgagcaccatgaggtgttggatgatgtatttgtgcagtggctacagagggccacatcctctgtcaaagatttatatgagtgcaacatgaaggctttggttcacagcccgt

SEQ ID NO: 71052 - DNA, 599 bp, Chicken  19866894347121_2
  misc_feature (1)..(123): n is any nucleotide
nnnnnnnnnnnnnnnnnnnnnnnnnnnnnnnnnnnnnnnnnnnnnnnnnnnnnnnnnnnnnnnnnnnnnnnnnnnnnnnnnnnnnnnnnnnnnnnnnnnnnnnnnnnnnnnnnnnnnnnnnnnattgttttattatgtacataataacaattccgtgtattccatcactgctgctctgaaagtaatgcctcccgatttattgtggcagcccatgctgtccaaggccaatgctggtggtacaaagcrgaggctgaacgttcccaccaatatcccactgtgttttgacaccatgtgatggakggcaatagaggggcaatctgaccaaatggcatctcacaaggaagtgcatcgctgcactcctccatgcacaaagaattgcatccattgacattcactaacgcttgctgaatgtttatggagaacaaagagtggatgtgagcaccatgaggtgttggatgatgtatttgtgcagtggctacagagggccacatcctctgtcaaagatttatatgagtgcaacatgaaggctttggttcacagcccgtaaaatgcagaggtacaatggggataatgatgaaaaatcgaattctgtaactatg

SEQ ID NO: 71053 - DNA, 600 bp, Chicken  19866894347135_1
aacactgagctgagaagctgggtagctctgtaagctgagtagttagctgaatacaagaaatgacatggctctgcaggccacaaggaccacatgaccagtaagcgtctgactttaaggctggtttagctaaatcttccttagtgatctcccacatccataggcataagttggctcctagacagaggtcaaagaccttcatgcattttcacatctcacttcagccctcaagcctgcagttaggtaagacccagtggtagctgggactcatgcactcgtgctgccctggctgttttctcctcrtgyatttgtgggagttgtgacattctgctcatctgaaggtgaaagccttgctgctcccagcttttctgctgctcatcacttgccctcctgagatgggcctgaagtgatgtttatgactgaaaggacctaagtacgttaggatcattggtggtagcactgagcacacggccatacatgtaggctggcaaagcaatggggctgccctctgcctgcccagcgtcacagcctggccctgaagcagccaaactgcccctccagctccagccttagtttattggttcaacttcctaagggagcatg

SEQ ID NO: 71054 - DNA, 600 bp, Chicken  19866894347135_2
actgagctgagaagctgggtagctctgtaagctgagtagttagctgaatacaagaaatgacatggctctgcaggccacaaggaccacatgaccagtaagcgtctgactttaaggctggtttagctaaatcttccttagtgatctcccacatccataggcataagttggctcctagacagaggtcaaagaccttcatgcattttcacatctcacttcagccctcaagcctgcagttaggtaagacccagtggtagctgggactcatgcactcgtgctgccctggctgttttctcctcrtgyatttgtgggagttgtgacattctgctcatctgaaggtgaaagccttgctgctcccagcttttctgctgctcatcacttgccctcctgagatgggcctgaagtgatgtttatgactgaaaggacctaagtacgttaggatcattggtggtagcactgagcacacggccatacatgtaggctggcaaagcaatggggctgccctctgcctgcccagcgtcacagcctggccctgaagcagccaaactgcccctccagctccagccttagtttattggttcaacttcctaagggagcatgctc

SEQ ID NO: 71055 - DNA, 599 bp, Chicken  19866894347137_1
  misc_feature (1)..(51): n is any nucleotide
nnnnnnnnnnnnnnnnnnnnnnnnnnnnnnnnnnnnnnnnnnnnnnnnnnnaatttaagataacacttactctgagtcggtgcagtagagtactggtgtgctcttgttcttgtttcccaaaactgcccaggtatgtttcctaaatgaagtcctccaggactggtgactgtctgatccagaaccagtgaggttagcatctgaaaattgctgtaaattgtccagagtgaagaaaataaatcatacaatcatagaatggcctgggttgaaaagaaccacaatgatcatctagtttcaaccccyctgctatgtgcagggtcacgaacaaccagaccaggctgcccaaagccacatccaatatttcaagactgttaggtaacaattcgttttgttagatggatgtatttgtttgtttttttacagaaacagaggaattgagtatttcccagtattataccaattatagaagtgaacagtactagtagaggtaatagttgctgtggtacttaggcttttataacattattgttacaaacacttcaaactgtgaaaatttttgctgttgtcatccctgaaatgtttccttgactttaattgagtta

SEQ ID NO: 71056 - DNA, 600 bp, Chicken  19866894347153_1
ggcagtaataacatcgggtttctcgttgcaagtgttgtatgatatagactttatttatttatctaagaatggttaatatgttttattaaatctaaagggtgcatagtaggaattaaatcttctattatctaccattttagattacatgtactaactatggcataagatgtgtctgttattaaagaatttcttcatgaaaattaaacaaagaaaagccatctacattacactcttccttgacaaatatacactactttttaatctgtttaagtttaagttaagatttgctaggtaatgcayaggctaggtctttcacttatgaagtaatctgattttggttaggaaagtgattacagagttatgttcttcttcgaatagttttttttatttattttcttcatacttatttccaaggtttagtttgaagatgcctggatatataaacagaaaaaagctgctttatggttacatgcacagaggcacccatgcaagtgacttgcgccagagagctgttacccccagcaaaaagtgggacatggcgcccaagagaaagagcaggctgaatcgtataccttgctgcatgagagctccaactccaaa

SEQ ID NO: 71057 - DNA, 600 bp, Chicken  19866894347155_1
atttccgatactctcagcccttgtacctctgtctccatagcccctcccttccaagacctctgtaggtactggagcaggtaatgctcacagagctgcctctccctcgtgccagtgttgcagcagcaactgcaagctgtaagcaaagatgacatgagctttccatgcatctcctcctatcagggtttgtcccttggctaatgtagtgtaatggctttttgcctgctgctaataaattatgaaccacgctatcatccttataatgcctttctgcagcacaggatctgtatctataatccacaygcagactattctcacagcagcatgtctgtagggacaggcagaactcaatctccccccaaggactacctctacctccaatgttctcatgccaggcgtaccagtaacctgaatggtttctacagtggagaaaaattcacctgttgatacctctgccacgtttcatcaaatacctcaatccatttaaaaaaatccctcaagatgagaaagcactgccctttttccactcccaagacatgaaggtctcaaaaataaataaataaataaataaataaataaataaaattactggcttattctatc

SEQ ID NO: 71058 - DNA, 600 bp, Chicken  19866894347167_1
ttttcccaagggcacagattaatgttacaccactgacagaaagaaagatacataagcttctgtgaacatagcaagtgtagagaatgtttactctgggtacacccagatatcaaatactgaaagtgttatatcctctaatataatatgaaaaaaataaaaataaaaatcagagataagagacatcagcttctaaataccatacctcttaaagcagtctcttaggagctggggaggtattcgtggatattcttatcaagaaaagaactatttgaaactctcagcctctattaagaggtatcraaatttgatgttgttttcttctaatcaggattcttacagagagtttgggggtttctaaattcacttgcaccataatcctgagctcttcgtatttcttttctatttcaaaattggttttagcaatttattctgacaacaaacaagcacattcatgctcagaggttaaacacacacacacagactcccaaggaatttcaatcttgtttatcacaaatgcatttttcatttctgcttttgctattccacagtggcaaccagacaagcctttgcttattcatttgcatccttctgctgtctcag

SEQ ID NO: 71059 - DNA, 600 bp, Chicken  19866894347168_1
tctgcctgggacagccataccctctggggaaaaagggtttgggacaacaacagtgctgcttctttgatggtaagccaaaggaaaggcacaaagcgcatctaaaaccagctgtggaggcaaggatggccacatgtgattgatgctcagctgttggtgtgggtggatcactggctacaagcagctgttggagagctgtgtgcacccattgtgccctgtagctgtggctgagggtcaggaggagtttcatggcaatactttccatactggtgaatattcacgtaagggtgtctcaggagcagyggcattgctgctcactgcatgcacaccatgggtttctaagagccacttcttgggagaataacatgaaaacatatgtttgtgcatgccgcrgggaagcaagaatgcccagctgttcactttatggtcacagacccgctgttcctctctccttctttatcagactgagaacaaaggaaacatttccgcctgcaacctattatctgaaatatttgtgctaactcatgtcagcatttcagtagtgagaggtaaggaacaccacagcccaacaaaacaagctggaagcttgaaaataaagggttc

SEQ ID NO: 71060 - DNA, 600 bp, Chicken  19866894347168_2
aagcgcatctaaaaccagctgtggaggcaaggatggccacatgtgattgatgctcagctgttggtgtgggtggatcactggctacaagcagctgttggagagctgtgtgcacccattgtgccctgtagctgtggctgagggtcaggaggagtttcatggcaatactttccatactggtgaatattcacgtaagggtgtctcaggagcagyggcattgctgctcactgcatgcacaccatgggtttctaagagccacttcttgggagaataacatgaaaacatatgtttgtgcatgccgcrgggaagcaagaatgcccagctgttcactttatggtcacagacccgctgttcctctctccttctttatcagactgagaacaaaggaaacatttccgcctgcaacctattatctgaaatatttgtgctaactcatgtcagcatttcagtagtgagaggtaaggaacaccacagcccaacaaaacaagctggaagcttgaaaataaagggttctcagcctggaggaaacctcatttgctacacaataaacaggcatgaaagtaactctattttatgccacatgtgtccatattaggatgtgtt

SEQ ID NO: 71061 - DNA, 517 bp, Chicken  19866894347170_1
tcgaaagctgaattccctggggaacagtaagggggaagcatagccactgtctaataaggaccgtccagaagttatccaagtacaaataggattttgatatgcgaagattaatttaaatgtgttttattgcaaacaaaaaatcattcttaaacagaacagataatattacacagccgggagacttacagtaagaacaaaattagtctgactgaaataaggactgaatgtatttgctattaggaagatagcgtatgtaggcttgttctacatacaaggtaaagcagtgctagtagtgtaggwaaagtaggaggtctagtttggaccttttaattaagttaatcttcctgctttttgtgtgtgcrtgtgtcttgaataagtagtgcagaaaacagtgtagtaagcaggggtgctaatactgatgtaaattgatactgtctggatttttttcgtagctgatgaaacaataatggcattagggcctcaatatgagctttgtctcacttgagaggatagcaga

SEQ ID NO: 71062 - DNA, 455 bp, Chicken  19866894347170_2
gtccagaagttatccaagtacaaataggattttgatatgcgaagattaatttaaatgtgttttattgcaaacaaaaaatcattcttaaacagaacagataatattacacagccgggagacttacagtaagaacaaaattagtctgactgaaataaggactgaatgtatttgctattaggaagatagcgtatgtaggcttgttctacatacaaggtaaagcagtgctagtagtgtaggwaaagtaggaggtctagtttggaccttttaattaagttaatcttcctgctttttgtgtgtgcrtgtgtcttgaataagtagtgcagaaaacagtgtagtaagcaggggtgctaatactgatgtaaattgatactgtctggatttttttcgtagctgatgaaacaataatggcattagggcctcaatatgagctttgtctcacttgagaggatagcaga

SEQ ID NO: 71063 - DNA, 592 bp, Chicken  19866894347173_1
agccagcagcaaatacaattttatgcccatgaacttcaacatcatctatatggacgacaacatcacaaaatttgttttcttctctcagtttgttcattttctgtaacatcgaatcgccgtaattgtcaaacttgaagtgaagaatatctgatctttctgacattttggcacacctaaaggaaagcagcaaggaaaaaaaaaacaagtgagaattttttgcttagtttccagaacacaaattagaaaagtctgtgttacacattgcctggaagtaccttttcttaaaaaaaaaaaaaaagrtgcagtttgattacgaaggagaaacaatgccagatattctcctgaagcagtatcctaaagagttacaaggttttccacattactcctggaatttaaagggaaaaatcatgcaaatattttagcagccttagctcttgcacagttttcctttcacaataagattcttcagagatgtttgtcttttccaaatacagtgacagccctatagcttttgggttctttgtttactttcatgtgaagagctttcataacacatgaatgcactgtagatagaacccagcatctgccagac

SEQ ID NO: 71064 - DNA, 599 bp, Chicken  19866894347177_1
  misc_feature (1)..(137): n is any nucleotide
nnnnnnnnnnnnnnnnnnnnnnnnnnnnnnnnnnnnnnnnnnnnnnnnnnnnnnnnnnnnnnnnnnnnnnnnnnnnnnnnnnnnnnnnnnnnnnnnnnnnnnnnnnnnnnnnnnnnnnnnnnnnnnnnnnnnnnnnnaaaattaactatagttcagcccaaacctgcacatctgtcttcttacagctgttaaaattactttctaaccagacctatgttgcaatcaaaaaaaaaaaagaaaacccaagcaaacaactgtttctattgtctgtgtgtatctcaaggagcttgctgtaagttrggatttgcagtatatcacaagttggaactcagaatataaagactcttcccagccaggtagttcatagcttaatagaaattttggaaggagtaggatgtttagaatcctaaagcaccacttaaatcatcagtctgatcttggagytgctgaaatttttatggatgaacagacaaagtaactgcggggaaatttgatgggaggastattaacagaaattgagaaagctgggggttgtaaaaagtacagtatcagcagtatcagatgtcatgtttcttctcgaagaaaggagaagaaaaagg

SEQ ID NO: 71065 - DNA, 600 bp, Chicken  19866894347177_2
actatagttcagcccaaacctgcacatctgtcttcttacagctgttaaaattactttctaaccagacctatgttgcaatcaaaaaaaaaaaagaaaacccaagcaaacaactgtttctattgtctgtgtgtatctcaaggagcttgctgtaagttrggatttgcagtatatcacaagttggaactcagaatataaagactcttcccagccaggtagttcatagcttaatagaaattttggaaggagtaggatgtttagaatcctaaagcaccacttaaatcatcagtctgatcttggagytgctgaaatttttatggatgaacagacaaagtaactgcggggaaatttgatgggaggastattaacagaaattgagaaagctgggggttgtaaaaagtacagtatcagcagtatcagatgtcatgtttcttctcgaagaaaggagaagaaaaaggttgggttttggtctttggttgtggatgtttctttgttgattttcagttgtttgttttgttttttattgctatttggagattccaaaactcatgtcttgaagagaacgaatcatggcagagatgtttcagaatttgccactttttt

SEQ ID NO: 71066 - DNA, 600 bp, Chicken  19866894347177_3
aaccagacctatgttgcaatcaaaaaaaaaaaagaaaacccaagcaaacaactgtttctattgtctgtgtgtatctcaaggagcttgctgtaagttrggatttgcagtatatcacaagttggaactcagaatataaagactcttcccagccaggtagttcatagcttaatagaaattttggaaggagtaggatgtttagaatcctaaagcaccacttaaatcatcagtctgatcttggagytgctgaaatttttatggatgaacagacaaagtaactgcggggaaatttgatgggaggastattaacagaaattgagaaagctgggggttgtaaaaagtacagtatcagcagtatcagatgtcatgtttcttctcgaagaaaggagaagaaaaaggttgggttttggtctttggttgtggatgtttctttgttgattttcagttgtttgttttgttttttattgctatttggagattccaaaactcatgtcttgaagagaacgaatcatggcagagatgtttcagaatttgccacttttttttttgtactctgttgactgtgatctccarcagtggtgcattgagtagtgctacaaccgt

SEQ ID NO: 71067 - DNA, 600 bp, Chicken  19866894347177_4
agtaactgcggggaaatttgatgggaggastattaacagaaattgagaaagctgggggttgtaaaaagtacagtatcagcagtatcagatgtcatgtttcttctcgaagaaaggagaagaaaaaggttgggttttggtctttggttgtggatgtttctttgttgattttcagttgtttgttttgttttttattgctatttggagattccaaaactcatgtcttgaagagaacgaatcatggcagagatgtttcagaatttgccacttttttttttgtactctgttgactgtgatctccarcagtggtgcattgagtagtgctacaaccgttaccgtttgtgtcacatgtaggttcctgtttgccatgcttttcccctactgtattttgtcactgactcctctctctcactctttttatctagtgtatgttataatactggtcttctgcttggcatctgcaatgagcctgtacaattgtcttgctgcattaataggagaaatcccatttgggcagtgcaggtactgtatgcctctcgatttttataaggtgtcttttgggtaacttctggtttatactccaggtagtgtgaaaatgtgaat

SEQ ID NO: 71068 - DNA, 577 bp, Chicken  19866894347177_5
tttcaaagaaattataaaagtatttatgaaacttaccaagtatgggaataatagagaacaaagctatacaaatgaactgtgtggtaatttggagttgcaaaaaagttatgaaggtgaggaccaactagcttggttgttactgatcaccgtggagtagaaaggtgcagaaataggaatgtaagcatgagaccataaataaatactgtagtaaaatcctcagtagcatcaaagccatactgcaagcaaggcttccagtccacttgctcactgagcaagtgagcagctgtacaagtgaacagyaggagcctgcagtgtcctctgctgaactcatcttctgtgtacgacactgtcgtgtttatgatcagggagtagcataaaagctactgtatttttgcagttcttttagtagtgcttcataaaaaatagcctcttgctttctgtttccttttgaaatcttggtatgtccagcaaaatctaaaatatcagtattatacatagattccatgagtagcgtggacaaggtgtaaatgtgtgttcttatgtttaggtgggcttggatactgcaagacattttggg

SEQ ID NO: 71069 - DNA, 600 bp, Chicken  19866894347182_1
tttcttcagtgcttactttcagtcaagtagctattatattcagaacacagtgtcttctgaagcatatgtcatcaaggggcagtctccttggtaagtcaattccaagttgctactaaaagagacagtcttttctgtttattctcatttctgaagtatgcatctcacctttttatggagatgtggctttgcatctcattaagtcagactgaaaacttaagcagtaaaatttggtatggtggtcagttttcaaatggatcagggtgttgactttatttatgacaccaccaccacgtgttaatsctgactgatgggaaaggaatgtggagccaggagctgaatatatgtagcagcaacacacgttcagacaagcttaagccaattgggaaacttcaaccctagggccttagcaccctgttgatactttacaggcatacctggtttctagagcttccagmtcttcaccaaggatgtatggatttttggtcaggaacggtcccagttgattgtcttctatacccacatccttcagaaacagaagtattttagttatatctttttcaaagtccaaggtcagtaagagttgacctgccttttgacgtt

SEQ ID NO: 71070 - DNA, 600 bp, Chicken  19866894347182_2
tgcatctcacctttttatggagatgtggctttgcatctcattaagtcagactgaaaacttaagcagtaaaatttggtatggtggtcagttttcaaatggatcagggtgttgactttatttatgacaccaccaccacgtgttaatsctgactgatgggaaaggaatgtggagccaggagctgaatatatgtagcagcaacacacgttcagacaagcttaagccaattgggaaacttcaaccctagggccttagcaccctgttgatactttacaggcatacctggtttctagagcttccagmtcttcaccaaggatgtatggatttttggtcaggaacggtcccagttgattgtcttctatacccacatccttcagaaacagaagtattttagttatatctttttcaaagtccaaggtcagtaagagttgacctgccttttgacgtttctccacttgagataagtcaactcctacaacaaataaaatgagagatrgttttagttaaacacagacctgatttcctataaatgtttcagaaggtcatgctgaagtttctaaggagtaatacatatatatattttattttattttcctcttattt

SEQ ID NO: 71071 - DNA, 600 bp, Chicken  19866894347182_3
agcaacacacgttcagacaagcttaagccaattgggaaacttcaaccctagggccttagcaccctgttgatactttacaggcatacctggtttctagagcttccagmtcttcaccaaggatgtatggatttttggtcaggaacggtcccagttgattgtcttctatacccacatccttcagaaacagaagtattttagttatatctttttcaaagtccaaggtcagtaagagttgacctgccttttgacgtttctccacttgagataagtcaactcctacaacaaataaaatgagagatrgttttagttaaacacagacctgatttcctataaatgtttcagaaggtcatgctgaagtttctaaggagtaatacatatatatattttattttattttcctcttatttagcataccttgctaacacaacacagtaaggttgtatattatggaaacgttccagataaaacaagcagattgttttcagactcttgctaaatttgttttcggaagggagacgtcttcagtgaatcccacatgtgagaaattgagcatgctagtatgtaccacatgcagagacctgtcttgttgcacagaaatat

SEQ ID NO: 71072 - DNA, 600 bp, Chicken  19866894347185_1
ctaatgcagcaaaatatacacacttgtaaaagtatttgtggaagtggcaaacttataagcaaacaggcataaaaacgaactctgacaaagtggtctgagtattcctgccagtaatttctgcctaacagcttctgacgggacgcagtaagagaaaggagatctcataagaatatttccagtaaaagctagccaaatcaccctcacagattttggatatttacacattcagcagaccagaagctatttacatcagttgccatatttccacgtgtttagcccacaattcaaataagttacatrcctttataccgatttawaataagccatcagaaaacctgcacaaagtcaaagacagaggtcaggaggccaagagaacgaataagttgtcaagggcagagaaagagcaagtgggctctaggggtaaacatcctcttaaatttcctgcgtactcattcagagatgctgaaatgcagcatccttgtttcaaaaaaagaactgctcacacacagcctgcagcttacccctgtgaaaatacaagtcaacaaaccttagggaatagctcaagaactcaaagaaaaagaatataagccaatctgtgat

SEQ ID NO: 71073 - DNA, 600 bp, Chicken  19866894347185_2
acacacttgtaaaagtatttgtggaagtggcaaacttataagcaaacaggcataaaaacgaactctgacaaagtggtctgagtattcctgccagtaatttctgcctaacagcttctgacgggacgcagtaagagaaaggagatctcataagaatatttccagtaaaagctagccaaatcaccctcacagattttggatatttacacattcagcagaccagaagctatttacatcagttgccatatttccacgtgtttagcccacaattcaaataagttacatrcctttataccgatttawaataagccatcagaaaacctgcacaaagtcaaagacagaggtcaggaggccaagagaacgaataagttgtcaagggcagagaaagagcaagtgggctctaggggtaaacatcctcttaaatttcctgcgtactcattcagagatgctgaaatgcagcatccttgtttcaaaaaaagaactgctcacacacagcctgcagcttacccctgtgaaaatacaagtcaacaaaccttagggaatagctcaagaactcaaagaaaaagaatataagccaatctgtgatgagttggcaaaaggaaa

SEQ ID NO: 71074 - DNA, 600 bp, Chicken  19866894347193_1
aatctggtcttaccagtaaagaatataggggatttacttcgaatttcctccaatttttgaacgaataaggcattcatttccctctgtagggtgcccacttgccttcgagaagtttcagaacagcgcttgggaaattctgggcttccaaggctttctagactgctggagttggaggatatggagccattgctggctgcaaccaagttgatagtgcttccatacttgccacctgattggcactgccaccgctgccgggaatgagcttttattccatgacatttagattcaacgtttttcttycctgaggtcacgaaagactgggtactccttgttagatcatcagcatttccagggctactgcaagactgcaaatctgactgtggtctggactgagctttcataccccagtttttaagctctaacctctcttctccagttatactgctatactgatcatggtgaagcaaatctttagcaataggcctggtaggttggtcactccacttgctttctagatctgggctttctttagaaccaatcatgcatttcatgcagttggtggccactccaatcctaccagagctgttgatggcgcagcgt

SEQ ID NO: 71075 - DNA, 600 bp, Chicken  19866894347203_1
attagaaaaatattactaattaacattttttaaaagagaattaacccagttatttagaagttaaaactaagctgcagattggaaggaaacatttcttgatgattatcctaaaattgtctataacaggttttgtttttgtgtcgttgtcattttattttgttttctggaaatttttaattgcatggcaagctaatggacagtaagaagctacagattttatccaaaactgtgtgctggtattattgcatttgaaagatttcttgatttttataatttactagtaagtgactgaaatcctgragtgtaaagaatttataagcacattttkttgttgttgttgctattgttgctttgttgttgatattgtgtttattttttttaattgtgtcaaagctattcatactgtctatgctgtgacttttaccacttttgttagcctattttttaaacctgcatcctgtccacttgtattttttgtctcccttgaatacatagcccctgactcttcaacttctttctgcaaaagttgtaatgcctgtctcacatacctctgttttcaatagagctctagaaaagaaaatgctaggtcttctgtgcaaa

SEQ ID NO: 71076 - DNA, 600 bp, Chicken  19866894347203_2
tttaaaagagaattaacccagttatttagaagttaaaactaagctgcagattggaaggaaacatttcttgatgattatcctaaaattgtctataacaggttttgtttttgtgtcgttgtcattttattttgttttctggaaatttttaattgcatggcaagctaatggacagtaagaagctacagattttatccaaaactgtgtgctggtattattgcatttgaaagatttcttgatttttataatttactagtaagtgactgaaatcctgragtgtaaagaatttataagcacattttkttgttgttgttgctattgttgctttgttgttgatattgtgtttattttttttaattgtgtcaaagctattcatactgtctatgctgtgacttttaccacttttgttagcctattttttaaacctgcatcctgtccacttgtattttttgtctcccttgaatacatagcccctgactcttcaacttctttctgcaaaagttgtaatgcctgtctcacatacctctgttttcaatagagctctagaaaagaaaatgctaggtcttctgtgcaaaagtgttttgtttgttgtgcagcttctat

SEQ ID NO: 71077 - DNA, 600 bp, Chicken  19866894347203_3
aatggcctgggttgaaaaggacctcaaagatcatgaatctccaacctccacaccacaggcagggccaccaacctccccatttactagaccaggttgcccagggccccatccaggaatggggcatccacaacctctctgtgaagcctgttccagcatctcaccactttccttgtaaagaacttccccctaacatccaacctaaatcttccctctttcaacttaaaatcattcccccttgtcctgctgttatctaccctttcaaagagtttactccctacctgtttataggctcccttcagktactgaaaggctgaaatgaggtcaccccacagccttctcttctccaggctgaataagcccagctccctcagcctgtcttcataggggacaagtccaaccatcaacctggtctacaagtctcatcccaaaaccacgtctcttagtgcctgatcccccttccacatagtgtctgtaagctttatacacatcttggcttgcagttattaaaagcataagctgtgttcttcaggcttaatttcatgttttactcaatcaaaatagcagagcttttttttcttcttcttctttttttgtttttac

SEQ ID NO: 71078 - DNA, 599 bp, Chicken  19866894347208_1
  misc_feature (1)..(144): n is any nucleotide
nnnnnnnnnnnnnnnnnnnnnnnnnnnnnnnnnnnnnnnnnnnnnnnnnnnnnnnnnnnnnnnnnnnnnnnnnnnnnnnnnnnnnnnnnnnnnnnnnnnnnnnnnnnnnnnnnnnnnnnnnnnnnnnnnnnnnnnnnnnnnnnntgagtgattatccgctgactacagtggaagcagaaggaggacagagaggaatctggctcagggcagacatgagaagatgtggtttattggtacgttatcattagttactgcttaggctgaagatctgatgagcagcccttggttgtgctgtccacrtgtgattgtggccttgtaccatgcctccagcacatatcccttgattggtgtcattcagggaagtcaaaggtgctggagaagactggtgccaaaaagtatcccaaatgctaatgtgaaagcagtgccagtgcaaatgcatttttcctgcagtcgagtgctgtctaaaagtcatatgtaacatatgtgccactaacaacaactatgctgcttaaaagtgggctccataatttaggaaaggcactttggtgctgcagaaaaggaagagtctatgacagagtccgcccatgtattttccttta

SEQ ID NO: 71079 - DNA, 600 bp, Chicken  19866894347208_2
taaaagtcatatgtaacatatgtgccactaacaacaactatgctgcttaaaagtgggctccataatttaggaaaggcactttggtgctgcagaaaaggaagagtctatgacagagtccgcccatgtattttcctttaagatcacctataaactttattgcagactaaccacagaactgaaaattgttggtattaacactctggggcatcctgtgcactgaagtctcaatttcttaccctgaatacgtgttctggctgacaagttttggggtgttattttcccttctagatattcagatgmtctttcgacatctgggaatttaactaacagcttttgcatgtatttaatgcaaagtaaactttcctcgagcctcctgatggtgaggagcaatcttatttatgagcactggcacctgtcctgttcatttgtacaaactttctgatttatcctcgaagaacacattacgcagtggatttgaaggagttaaagggaacctgcgggtgactttaatctttatgtctttatatacttgagggcattttactgcacctttgcactgctttcactacacagtcattttctgctgtagaaatgtagcca

SEQ ID NO: 71080 - DNA, 600 bp, Chicken  19866894347212_1
aaaaaaaaagccccaaaataacaacaaaaaacttttatccattagcagcattcaattaatttatttccttctctctaaagcatactccttctccccttttactctcctaagggcctactactttgtttttccatcatgttcttccatcttactgcaaaattctatggttaccccttgcagaaactcatttctacttcttgctcctttcaacttgtctcttctcattcttttcttcattatcatatttcagataattaattcccacttgcacatgccatttcctgtgtagcagttgattarttcccataagcaatgtcacgcttgtagaaataatatgaaggtaatggtaaagaaaaattttttctccatttatcccatggcttagagggaaagtaagtggcaaataaattttgcatttgtttgctttaaattcatgaagtgagacaaacttttccttaaatcttccctttttttcttgttttttattttttattttttttaaagatgttcttggtttcccatgcactgagatcactatgtcctaaaatcttattttggatagaacaggatggtctgtgtgaggcatcgtgccctaaaatt

SEQ ID NO: 71081 - DNA, 600 bp, Chicken  19866894347220_1
atacttgatccacaattaatccatagctagtccatgaagaaaatcttcctctagtatccagagtctttggaatactacaacttggaaatgaaagtttcaaaaaaccagataagtgctctattggcaagctttcacaagctttcactgtttggtttttaaaatagaacatcagacccacgaatgtattgaaaaggagtaagatttgacaaatatgaatgctttttataaattcagatacataattcacaaatgaaaagttctaattgagaaggtttctttaatgacaatgccaggcagtgrgatagaggtggcaatgtaaattgccttttcttaacttgatctgaaaatggattttgctattatgaagcacagtttccattcagcaagccattcatagatgaatgaattaggaacagagttatcagaataatggtgacatcaacatgtttcaccttggtaaaactgtatatttgatctttttttctgaataaataatattaatttaayatgttttataaacattccagctttgaaatatttataaaatcagcatttttaagttttatgctaaatgaaagtttttgctatcagaattacaga

SEQ ID NO: 71082 - DNA, 600 bp, Chicken  19866894347220_2
aaatatgaatgctttttataaattcagatacataattcacaaatgaaaagttctaattgagaaggtttctttaatgacaatgccaggcagtgrgatagaggtggcaatgtaaattgccttttcttaacttgatctgaaaatggattttgctattatgaagcacagtttccattcagcaagccattcatagatgaatgaattaggaacagagttatcagaataatggtgacatcaacatgtttcaccttggtaaaactgtatatttgatctttttttctgaataaataatattaatttaayatgttttataaacattccagctttgaaatatttataaaatcagcatttttaagttttatgctaaatgaaagtttttgctatcagaattacagaaatgacctttgtttccaaagacctcaacttctgagtacattatatgagacatagcaggcacataataggtagaattttatttgtctgtttttcccttattacttctaccactgattggaattttgctactatcatttcactctctggatgtcttgtattgagctaatttaaatgtcagaaacaaaattaaggatcaattaacttcca

SEQ ID NO: 71083 - DNA, 600 bp, Chicken  19866894347222_1
gtaagcaaaagagtgctacataatctagatagggtggtactgaatattagtacttttcccaaaagccagggtttgtaaagattcaagttctgtccatttggtccttatccatacaagaatttaaagagccattctctactgtcagtaagtcattagtatcaccctaatcattctttttttttccctctggggtgactgggttattacatcaggtacgaataccttaaaatgaacaaggacagattgttgccctgcagccctccaaataaatcttgcatcatttctttctgaagtatgctyaaatgaaacaaataatcctgtttgtagaattgcatgtccacaacacaacagaaatctgaagatgtttattagaggtaaaatttcaactatgaaaataaacactatttgccgtggtgcccctcaaaagacagccgaaagcgtttttcaccaaacccactatttcctcaacaggatttgtttatcattgctttagctccacacacagatagacagaaaaatgcattttggcctaatagcaagtacagtgaagtcctggaatttttgttatctagccttccttacgacatgtgtagaaaggat

SEQ ID NO: 71084 - DNA, 600 bp, Chicken  19866894347230_1
catacctgatgtgcctaaagaatacacagtcagcatagtcaacacatctgaagcctgccctgaagagccattaggcagttagtgcgctggatgcactaaccgcagaaaccgatacccgtggtgtctcacagcaggcatctctgattgcctatgcagcccatgaatcagaaaggctttcctgagctcctcgtgactgacctttccctgcccagcttcaattggctccgtgcagaggcagcacatagagaactcagggaaagcttcctattaccgcaaactttgctgacatctttgaagccygctgctgagcacccccagagatgtgtgtccagactgctctacagtccctcccctcacaaagacacacacactacttttgtctgatcwaattaaaaaaacaccccaaaaccaaaaaacagaacacaatgactaacaatgaagtgctaatagatgtattataaatggatgctactaatgacctctggcatccacccgtttgttaatccatgaagtgaggcagctttttcaattctcccagccaatatgacatttgagcacagccagataactgctgtgttccagtgctccataaatcgatcc

SEQ ID NO: 71085 - DNA, 600 bp, Chicken  19866894347230_2
tggatgcactaaccgcagaaaccgatacccgtggtgtctcacagcaggcatctctgattgcctatgcagcccatgaatcagaaaggctttcctgagctcctcgtgactgacctttccctgcccagcttcaattggctccgtgcagaggcagcacatagagaactcagggaaagcttcctattaccgcaaactttgctgacatctttgaagccygctgctgagcacccccagagatgtgtgtccagactgctctacagtccctcccctcacaaagacacacacactacttttgtctgatcwaattaaaaaaacaccccaaaaccaaaaaacagaacacaatgactaacaatgaagtgctaatagatgtattataaatggatgctactaatgacctctggcatccacccgtttgttaatccatgaagtgaggcagctttttcaattctcccagccaatatgacatttgagcacagccagataactgctgtgttccagtgctccataaatcgatcccaccgaactgtccaaagcacctcctggcaaagaaacccaaaagctcttatggcagtcatgctcgggggattttccatatgtttgaag

SEQ ID NO: 71086 - DNA, 600 bp, Chicken  19866894347239_1
cttcctacagcttctccatgtctttatgcagaggtctgactttgtactttgaagactaagcagcaaacccattaactctgctcattccttcttatttcccaaagctgcatctaaacagaaagctaaactggtaagagaccaaagtcacttagcttatctatggctggcaataagaaaatctgtaagtggctggattttaaaagaagatgttagtttcaacaaaatgtaaaagcttaaaaatcttctgtattctgttcctgaaacaaatggggtaacgggctcgagaagtttcttcccctrtacttctacagcattcttctatttgctgtcttggccacttaattcactctttatctgttcatatgccagttatcctttcacttacacacagattacaaattcttcacagtatatgtgccccatgtggcacaggaatagagatcctaaatgccccattaatactatgaaatgccactggcagcagttaaactgtgtttcattaacgaacacactatatataacagtttggcttatactgaatgacagaacacaaactgaagattatggcccaccttcagtttattacttcgggctttgata

SEQ ID NO: 71087 - DNA, 600 bp, Chicken  19866894347239_2
tcagtgtagcaaatcagctacatacaagcctacagaaccttaactttttctgaaaaatctatttacagacttagtaaccatatcgtatttcgtagttcttaattaaaaagcacctctttcagttgcatcttttagccacatttacaggctagcatgaagtatcctataattggagcgttagacaggaaggaaaaggtctttcctttctctgtgtggtaattaaaacttagtcttcaaagccagcccagctctttcaatttgttttgaactctgcctagcacaacaagcaccacagtctcmagttaaagtgcccatgcctcagcacaaaaggaatatgtataaaatacattcaatagacattaatttgtcgaatatcttaggataatrtttctgttcccgtaagaaggaagcttgaaaggaagtcattctggctgtaaacaggattttatcatgtcccacttccttctgaattgtgtagtgatttttctttgtatggctacttgatttatggcactgtacaaagctcagcagctaacaaaactcaatctcgggagcatcagaggttcctctctgacattttaactccattttcactatggc

SEQ ID NO: 71088 - DNA, 600 bp, Chicken  19866894347239_3
tttcgtagttcttaattaaaaagcacctctttcagttgcatcttttagccacatttacaggctagcatgaagtatcctataattggagcgttagacaggaaggaaaaggtctttcctttctctgtgtggtaattaaaacttagtcttcaaagccagcccagctctttcaatttgttttgaactctgcctagcacaacaagcaccacagtctcmagttaaagtgcccatgcctcagcacaaaaggaatatgtataaaatacattcaatagacattaatttgtcgaatatcttaggataatrtttctgttcccgtaagaaggaagcttgaaaggaagtcattctggctgtaaacaggattttatcatgtcccacttccttctgaattgtgtagtgatttttctttgtatggctacttgatttatggcactgtacaaagctcagcagctaacaaaactcaatctcgggagcatcagaggttcctctctgacattttaactccattttcactatggcctacagcatccaggtagaaaacatttgcaagaaaaaaaaaatcaaactgctctacagacaaaattaaggtaatcacagcactcaagc

SEQ ID NO: 71089 - DNA, 599 bp, Chicken  19866894347240_1
  misc_feature (1)..(70): n is any nucleotide
nnnnnnnnnnnnnnnnnnnnnnnnnnnnnnnnnnnnnnnnnnnnnnnnnnnnnnnnnnnnnnnnnnnnnnccactgagtttgtagctcagatctgtaaggagtgacaatggatatgtgggttcaaaatatatattacagatatgtgtctatgtctactatggagcaaactacatgaagtcagtgtttaaaacaaaagtaattttttttttcatcattattagtgctctctgttccctgatacgtttggtgccaaactgctatgtagtaatcaaggagaatatttggttaatatttttttwactttattttctttgtatttatttgctacatcccagttacttggcattacttgggaacgtgaattgcatccattttctctcagtcatacaaaatttatcattcagatgaactaacacctgagttggtaacaggctgtgaaagtgtttgcttttccttgttcattagttagcatttcatctgtgagcctgggatgggtaaatttcagagtgcatcttatttaacctctaaaaatgtatcctctgctcagtgacaaggggcacccagtgttgtgcctgccccactctttacttctagagga

SEQ ID NO: 71090 - DNA, 600 bp, Chicken  19866894347244_1
aatactactgtatgaagcctgggagctatttcatattaattgagccactgtttctagctggcaggagagcaagcataactgaatttaacactttcagaaaatcaagccagtgatttgtcttatcaacttgggagagctctttctttctttttgggttcattaattgcagagatgggctttgaatgtacttttaaacagaaattacttccccagagtcacttccaaagtcagacccacactgaacaaataaagcaagtcaacagagaattctggcacacggtccctgaaatgcagaggccyggtgtaaacgccccacacatgcatccacacagataggtgtgagggttattttccattagtttttaattttagaagacccagagattaccaaaaggctkgtttccacatactgtcctgtcactcacaaaacagctcagaggggatttcttgctctaaagggcaggagagtacaactcattgctcacagcccacatccactgagatttctccaagagggtgtcagtccctgggacatggcagttaacgccacggcttggctgcacgttttccctgcacacgtgggacagacacagccatgac

SEQ ID NO: 71091 - DNA, 600 bp, Chicken  19866894347244_2
aaatcaagccagtgatttgtcttatcaacttgggagagctctttctttctttttgggttcattaattgcagagatgggctttgaatgtacttttaaacagaaattacttccccagagtcacttccaaagtcagacccacactgaacaaataaagcaagtcaacagagaattctggcacacggtccctgaaatgcagaggccyggtgtaaacgccccacacatgcatccacacagataggtgtgagggttattttccattagtttttaattttagaagacccagagattaccaaaaggctkgtttccacatactgtcctgtcactcacaaaacagctcagaggggatttcttgctctaaagggcaggagagtacaactcattgctcacagcccacatccactgagatttctccaagagggtgtcagtccctgggacatggcagttaacgccacggcttggctgcacgttttccctgcacacgtgggacagacacagccatgacttgcagttgttaccacctggattagggatgaagaagttcaccctatgactaattcctcaggctcctatttcaaggaatcattgctgtggcatgcaaaa

SEQ ID NO: 71092 - DNA, 600 bp, Chicken  19866894347244_3
agggatgaagaagttcaccctatgactaattcctcaggctcctatttcaaggaatcattgctgtggcatgcaaaaccctctacataaatcatctttacgaccattctcattccagcctgtattatcggcttgcagcacggccctcagatccaacagacagtcaagtaaagagcatcccaccaacatgcattcactcgctaacgggttacaacaggcaaccgacagcaatctgcatctcctcatacctgtctgtctgtgaagtggtactggcagagcttcttccacagcagccggtcttcrctgagcacttgcaggtcgggagccacttgaccaaggctaaccaggtccctcccatcgctcagtcgttgcatgatgttcaattgtaaacacaatggcaggtctgtgaaggtagttcctttaaaggcaggctggaaaatataaaataaaattgaactcagacaaagctgaaaacccaagtgattctaccttgcagtaacattactgcttcaagtactgctctttatgcaggaaaaaaacycaacatttcyctcttatgaataaagagacatttcaacttctctctaacatttcaactcccag

SEQ ID NO: 71093 - DNA, 600 bp, Chicken  19866894347244_4
ctcatacctgtctgtctgtgaagtggtactggcagagcttcttccacagcagccggtcttcrctgagcacttgcaggtcgggagccacttgaccaaggctaaccaggtccctcccatcgctcagtcgttgcatgatgttcaattgtaaacacaatggcaggtctgtgaaggtagttcctttaaaggcaggctggaaaatataaaataaaattgaactcagacaaagctgaaaacccaagtgattctaccttgcagtaacattactgcttcaagtactgctctttatgcaggaaaaaaacycaacatttcyctcttatgaataaagagacatttcaacttctctctaacatttcaactcccagaaaaggacatgaggtatcttcaaggaagagtacatttgtatgtattacagtagtagtcagaagcagagtcacagtctatgcctcttcctctctcatccctcctacacccactctgcccccagaagtaccaccaccagcttccaccagaacaggacactggaggacactggccacatcacggtgtcgagcatgaccatccacatctctgcaagacaagagatgctggcattcattctca

SEQ ID NO: 71094 - DNA, 600 bp, Chicken  19866894347244_5
tctgtctgtgaagtggtactggcagagcttcttccacagcagccggtcttcrctgagcacttgcaggtcgggagccacttgaccaaggctaaccaggtccctcccatcgctcagtcgttgcatgatgttcaattgtaaacacaatggcaggtctgtgaaggtagttcctttaaaggcaggctggaaaatataaaataaaattgaactcagacaaagctgaaaacccaagtgattctaccttgcagtaacattactgcttcaagtactgctctttatgcaggaaaaaaacycaacatttcyctcttatgaataaagagacatttcaacttctctctaacatttcaactcccagaaaaggacatgaggtatcttcaaggaagagtacatttgtatgtattacagtagtagtcagaagcagagtcacagtctatgcctcttcctctctcatccctcctacacccactctgcccccagaagtaccaccaccagcttccaccagaacaggacactggaggacactggccacatcacggtgtcgagcatgaccatccacatctctgcaagacaagagatgctggcattcattctcaactkcaagtc

SEQ ID NO: 71095 - DNA, 600 bp, Chicken  19866894347244_6
atttcyctcttatgaataaagagacatttcaacttctctctaacatttcaactcccagaaaaggacatgaggtatcttcaaggaagagtacatttgtatgtattacagtagtagtcagaagcagagtcacagtctatgcctcttcctctctcatccctcctacacccactctgcccccagaagtaccaccaccagcttccaccagaacaggacactggaggacactggccacatcacggtgtcgagcatgaccatccacatctctgcaagacaagagatgctggcattcattctcaactkcaagtcttctgtcacccacactgctgggaacctcatccacttccaacatgtgttttagctcatcccatcacaagatcccaccgtaaccacagcagtggctgatgagtacccacagcaggattttccctgcatggactctcaagtcactgctggcagggctcatctttcttctgtaaacatctgcagaacctgcctgcccctcttcgagcagccacagtcctgcaggctgctcagccacaccaaagcacagcccaaagagtcaaaagccaccttcacctccagtcacttttgcctggtctg

SEQ ID NO: 71096 - DNA, 490 bp, Chicken  19866894347244_7
catcacaagatcccaccgtaaccacagcagtggctgatgagtacccacagcaggattttccctgcatggactctcaagtcactgctggcagggctcatctttcttctgtaaacatctgcagaacctgcctgcccctcttcgagcagccacagtcctgcaggctgctcagccacaccaaagcacagcccaaagagtcaaaagccaccttcacctccagtcacttttgcctggtctgcatgaggcctgggactattttacaagcctgcatggcagcacagctccagaacaaactgctcacaraggatcagcaggtcctgaactctggagcaaatcaaggcacccgtgggagcaaagcctccacaaagaccacaacctgggctctagctgctccaaaatcagcctcagccttaataaggcaaacagcagctttgcagattgagcctcaaagaaacaatgttaaagagatgtgccaagtttatcatttaccctg

SEQ ID NO: 71097 - DNA, 600 bp, Chicken  19866894347249_1
atgtttgttcaatattaaaatggatacatcttgaagtgaaagtatacaggtctttcagtaaaccaaataaacatttcaaaaaagaatacaccatactacagctactctatttatgagaggaattaagacatttggatatgcttgtaattatttccaataaaatcaattggagattacaagataagatgtcctttacaagttacatatcctgcaccctatcataccttcagagtatgagatactttgtattatgtcatagcacagataagaaacctaagatatttaaaataatggaacttyatttttctataaaaacatggctttgaagcagtaaacagttcatttttgtaattggcatcaggtatttgagaacagatgactgatcatcactttagtaatatttacctaaaatgaaggaaaatatttgaagagtagcaaagatgcacagtcttctcattatgtcactcctaaatttttcattttaaggaaggctttgggagttgtttcaactccaagatgtagtacttaggaaaaaagtaagcatgcttacagaagttttacctctatatagaccgtcaatgtttacactgataattttaa

SEQ ID NO: 71098 - DNA, 600 bp, Chicken  19866894347263_1
tattctacctttctcaaactgcattgttcttgtgtaaagaatatgaaaaagtctgcttaaaacttataaataatgcttatttcccttcctatattgtttttctaccaacttccccctcagcatgggaagctgccacctgatctccctggaggctgtaaaaggcattgtagatgtgtaactttctcatttaggcacttatgttgtgaagggagagcagataagcaggatccaactatgtgaaaatgctgatttgcttttttatgtcaagtttgagattcctggacataggagggcttttgytatgtatagttagtggagtttttctcctacagaggcagctgttttaagtagtgcacagagaaagggatgtccttgggaacctaaagatgttgattagtattgaaggcattctggccctcctcgatatctctgtttaacccaggttgcagggaaccctcagccaatccagttgcattctcttttgaggatggttagctaacatcactgcacactttgtaagtgccagtgtatttttgagcacaagtagatcacattaaatactctaggaacttctagcctatgtaggaaatcatctgctga

SEQ ID NO: 71099 - DNA, 600 bp, Chicken  19866894347293_1
ctgtctggggtgatggggtggactctggctggagggcctggcactgctgcccacgtacacagcccccagggagctcccagcccgcatggcaatctaacacctctctaatacattcagttccctaataacctgaaggcgggtcattccttccaggacaaccaaaatggctagttttttacccactcatctccttaggcaatggaattgatcagaatctgcaaaggaatgatttttagaaagaagtctgctttgaggcttactttggtagaacacattgtgctgccattccctcatcagagwacaaatcctagccaccatttttaccatggatagttattaaccacagagaaggagctgctgcaaatgaacttgcagaaagaaatcatgtctaaagctttttatatcaaaaagctgtcagaatcttttcctgtcaacaaaacaatcaggcaatgttatgttagtcaaaaatatgctcttgatgcatttaactcttgagtctcttcagaagtactgttcaaaattgctgatgtgattggcatttgacaagccattgctgaaccttttgttatttcttgtcacccttttctggattgtactaca

SEQ ID NO: 71100 - DNA, 600 bp, Chicken  19866894347295_1
agggactctgtttctgtttgccgtagccttttgttatttagtgtctgtaaaccatttagaaggtgagtttggactgtcattgattactctgtaattagtgctcacaggcagtgtggttgaggccatattagagggaagaatatatatcacttgctaaaggccacatgacttgtatagaaggacctaagtgcaggctctaaggtgtattaaattgcagtgcttatcagcagcataaatactactgtcgcttctccaactgcttaatgtattggctgttcctcaaagtgaggcagtgataaygtgtgtttcgtttacaacagactgagcatgaggcaattatcagtaagccatgtggtggtgaatcttattccccaggtcaggaaagtaggaacgggtactctgtgacagattggggaagagctttccaaaatgaccatagtgcccgtgcagatacacagtggaacatctgtgcggccatcaggcagtcatttatacacattagtgagagcactgkttttgtgccgctcctgcagggcgtgcaaacacagcgcaactgttattttgatggaagcccgtcttgccaaattttgttattatggg

SEQ ID NO: 71101 - DNA, 578 bp, Chicken  19866894347295_2
cagtgcttatcagcagcataaatactactgtcgcttctccaactgcttaatgtattggctgttcctcaaagtgaggcagtgataaygtgtgtttcgtttacaacagactgagcatgaggcaattatcagtaagccatgtggtggtgaatcttattccccaggtcaggaaagtaggaacgggtactctgtgacagattggggaagagctttccaaaatgaccatagtgcccgtgcagatacacagtggaacatctgtgcggccatcaggcagtcatttatacacattagtgagagcactgkttttgtgccgctcctgcagggcgtgcaaacacagcgcaactgttattttgatggaagcccgtcttgccaaattttgttattatgggataacgtacaaatgagatgaaaagcctaaaaacgctgcctgcgtgtgtgctttagtaatgcgacttgcaagtatttctgctggggttagtcttctcactgcaacagcacagggtgttgcagcatgtttcttcactggaagaaacgcacccacgtgtatgggtttctccattactgccttcaccctatgctgt

SEQ ID NO: 71102 - DNA, 599 bp, Chicken  19866894347296_1
  misc_feature (1)..(22): n is any nucleotide
nnnnnnnnnnnnnnnnnnnnnncatccaacctcaatctctctctgagctcctttgtagttgtgagcttttgtcacatacttatgttaaatctctcagcagcagtcaagagcgattgcacgatgcatcacatacacaaaactgacagatttcagaatcacagaataccccaagggttggaagctgcccacaaggatcaatcactgagcccatctcctggctccacacaggaccacccaaaccccatgtctgagagcagagtcccaacactccttgagctccagcatctcagggccatgccyactgtcctgggcagcctgctccatgtccaccaccctcttcctcacccctggcatgatcccccatccagcaaagctccatgccattcccttgggccctgccaccatcacaagaaagcagaaatcagcacctccattccccactgtggggaagccatcaaccagaacccccacatccctttctgtggggctgctcttcagcctcttgtctcctggcccgcacatggcagaactattaacagaaggaagagcaagtgarggacaaacacagctgatgttgacatgagttgcagctcattaag

SEQ ID NO: 71103 - DNA, 456 bp, Chicken  19866894347296_2
gagtcccaacactccttgagctccagcatctcagggccatgccyactgtcctgggcagcctgctccatgtccaccaccctcttcctcacccctggcatgatcccccatccagcaaagctccatgccattcccttgggccctgccaccatcacaagaaagcagaaatcagcacctccattccccactgtggggaagccatcaaccagaacccccacatccctttctgtggggctgctcttcagcctcttgtctcctggcccgcacatggcagaactattaacagaaggaagagcaagtgarggacaaacacagctgatgttgacatgagttgcagctcattaagtcccataatggataaccttgtcatttgttgaggtaattggaagagtctgtctctttgtattgaggagataagggagattccacaagtcttaggagctgtatttggatacacga

SEQ ID NO: 71104 - DNA, 600 bp, Chicken  19866894347299_1
agagaagcagtgcaaaatagaatgtaaatactttcatcacttttagcttcattgtttctaaattaaaatctgtctgtctgagaacaaataacaaattttccctcaccccaaacctgatttggcaactattgatccaagttgctttgcctttgaatggaaaacacctcatgttcatgcaatacagcttgtgtttccacagcaacctcttctgctcttggacctgccagaaccaacaggtgatatttaaactctgaagcatttatgtgcactgctgcctctttggccatgagtgagacttgsccaaacctgtattcttgcagagagctgaagttatggaagggtgatggagtcrgattctatctgccatatgagggctgctccgaaagtaatgcttcccattttattgtgttggcccactgcatcagaggtggatgttgtrcaaggaatgttttgtagctgagacctgctctatcaaagygctcttgtggtctttgtatctgcagtagttttccatgtaaataaacaggaggtattacttttggarcawgctacttacatcctgctgatttacaaaggatgtgggaagtcctgtttccctga

SEQ ID NO: 71105 - DNA, 600 bp, Chicken  19866894347299_2
tgtttctaaattaaaatctgtctgtctgagaacaaataacaaattttccctcaccccaaacctgatttggcaactattgatccaagttgctttgcctttgaatggaaaacacctcatgttcatgcaatacagcttgtgtttccacagcaacctcttctgctcttggacctgccagaaccaacaggtgatatttaaactctgaagcatttatgtgcactgctgcctctttggccatgagtgagacttgsccaaacctgtattcttgcagagagctgaagttatggaagggtgatggagtcrgattctatctgccatatgagggctgctccgaaagtaatgcttcccattttattgtgttggcccactgcatcagaggtggatgttgtrcaaggaatgttttgtagctgagacctgctctatcaaagygctcttgtggtctttgtatctgcagtagttttccatgtaaataaacaggaggtattacttttggarcawgctacttacatcctgctgatttacaaaggatgtgggaagtcctgtttccctgacctcagaacaaatccagcagcaggactgattccagatcyccctctgctgctc

SEQ ID NO: 71106 - DNA, 600 bp, Chicken  19866894347299_3
tgctttgcctttgaatggaaaacacctcatgttcatgcaatacagcttgtgtttccacagcaacctcttctgctcttggacctgccagaaccaacaggtgatatttaaactctgaagcatttatgtgcactgctgcctctttggccatgagtgagacttgsccaaacctgtattcttgcagagagctgaagttatggaagggtgatggagtcrgattctatctgccatatgagggctgctccgaaagtaatgcttcccattttattgtgttggcccactgcatcagaggtggatgttgtrcaaggaatgttttgtagctgagacctgctctatcaaagygctcttgtggtctttgtatctgcagtagttttccatgtaaataaacaggaggtattacttttggarcawgctacttacatcctgctgatttacaaaggatgtgggaagtcctgtttccctgacctcagaacaaatccagcagcaggactgattccagatcyccctctgctgctctgcactgttgtgttggctcttaccttaaaaccaggggagtggtgaacccatttcagcttaagtgaggtctcatccaactgacaatca

SEQ ID NO: 71107 - DNA, 600 bp, Chicken  19866894347299_4
atacagcttgtgtttccacagcaacctcttctgctcttggacctgccagaaccaacaggtgatatttaaactctgaagcatttatgtgcactgctgcctctttggccatgagtgagacttgsccaaacctgtattcttgcagagagctgaagttatggaagggtgatggagtcrgattctatctgccatatgagggctgctccgaaagtaatgcttcccattttattgtgttggcccactgcatcagaggtggatgttgtrcaaggaatgttttgtagctgagacctgctctatcaaagygctcttgtggtctttgtatctgcagtagttttccatgtaaataaacaggaggtattacttttggarcawgctacttacatcctgctgatttacaaaggatgtgggaagtcctgtttccctgacctcagaacaaatccagcagcaggactgattccagatcyccctctgctgctctgcactgttgtgttggctcttaccttaaaaccaggggagtggtgaacccatttcagcttaagtgaggtctcatccaactgacaatcaatttgaaaagcatttataaaataataattaaaaaaaaat

SEQ ID NO: 71108 - DNA, 600 bp, Chicken  19866894347299_5
taaactctgaagcatttatgtgcactgctgcctctttggccatgagtgagacttgsccaaacctgtattcttgcagagagctgaagttatggaagggtgatggagtcrgattctatctgccatatgagggctgctccgaaagtaatgcttcccattttattgtgttggcccactgcatcagaggtggatgttgtrcaaggaatgttttgtagctgagacctgctctatcaaagygctcttgtggtctttgtatctgcagtagttttccatgtaaataaacaggaggtattacttttggarcawgctacttacatcctgctgatttacaaaggatgtgggaagtcctgtttccctgacctcagaacaaatccagcagcaggactgattccagatcyccctctgctgctctgcactgttgtgttggctcttaccttaaaaccaggggagtggtgaacccatttcagcttaagtgaggtctcatccaactgacaatcaatttgaaaagcatttataaaataataattaaaaaaaaatgaggaagagggatggaaaagaccaagttatcctggagggaccggaggggaggtcttgcattgagca

SEQ ID NO: 71109 - DNA, 600 bp, Chicken  19866894347299_6
actctgaagcatttatgtgcactgctgcctctttggccatgagtgagacttgsccaaacctgtattcttgcagagagctgaagttatggaagggtgatggagtcrgattctatctgccatatgagggctgctccgaaagtaatgcttcccattttattgtgttggcccactgcatcagaggtggatgttgtrcaaggaatgttttgtagctgagacctgctctatcaaagygctcttgtggtctttgtatctgcagtagttttccatgtaaataaacaggaggtattacttttggarcawgctacttacatcctgctgatttacaaaggatgtgggaagtcctgtttccctgacctcagaacaaatccagcagcaggactgattccagatcyccctctgctgctctgcactgttgtgttggctcttaccttaaaaccaggggagtggtgaacccatttcagcttaagtgaggtctcatccaactgacaatcaatttgaaaagcatttataaaataataattaaaaaaaaatgaggaagagggatggaaaagaccaagttatcctggagggaccggaggggaggtcttgcattgagcactg

SEQ ID NO: 71110 - DNA, 551 bp, Chicken  19866894347299_7
ggtgatggagtcrgattctatctgccatatgagggctgctccgaaagtaatgcttcccattttattgtgttggcccactgcatcagaggtggatgttgtrcaaggaatgttttgtagctgagacctgctctatcaaagygctcttgtggtctttgtatctgcagtagttttccatgtaaataaacaggaggtattacttttggarcawgctacttacatcctgctgatttacaaaggatgtgggaagtcctgtttccctgacctcagaacaaatccagcagcaggactgattccagatcyccctctgctgctctgcactgttgtgttggctcttaccttaaaaccaggggagtggtgaacccatttcagcttaagtgaggtctcatccaactgacaatcaatttgaaaagcatttataaaataataattaaaaaaaaatgaggaagagggatggaaaagaccaagttatcctggagggaccggaggggaggtcttgcattgagcactgaagtgcagttcgtttggttggccaggcttaactgtaaaacttt

SEQ ID NO: 71111 - DNA, 600 bp, Chicken  19866894347303_1
ttaagattgcagctgcatcgtgttctcgatcatgccctaggtgacatgagaattcagggagatgtgggaacacagctcaggcttcctgaatcgaaccatgtgaatcagccccgaatgcatcctcctcctccacaattgcacaaccgactcgtgagaaggacccttctctattagggtttgtgttccctctcatatgtcacttacagcagttttgccctcctgcggaagaggtactcaatgattttgacaagatggataggttgtttttctgcctaccttgaaattacttcaggaaggaaygggaacagcacagcaggtacatacctttctacagcagcaggagtaagcagtgggagttgtacagacttattgcataggcctatatgcacgcatttttctgcagaacaactgttagtagaatactggaaaatgcaggcaaaactctgacttttgctcagaatacgaagcatgtagtgactgctaaggagatttttgctaagtcaccatagcaactatgatgtgacagaaaacaaaactgcatccacaaactgttcacaagtcaaggccgctctctattttcaatcctctttcaacgtatca

SEQ ID NO: 71112 - DNA, 599 bp, Chicken  19866894347304_1
  misc_feature (1)..(79): n is any nucleotide
nnnnnnnnnnnnnnnnnnnnnnnnnnnnnnnnnnnnnnnnnnnnnnnnnnnnnnnnnnnnnnnnnnnnnnnnnnnnnnnattgtgaagaatgagctggatgtggttttgggtactaagaaaagatgggagaaaaggggagaaggatactatgaatggctaagacagcaaagaaatgacctctggatatataggtgtattttctgcaacacatcaaaggatgtcaaaatcggcaaaggaggcaaggtaacacaaactaattctgtttcacaggcaagttgcaaaatggtggtgatctcttyatagcaacaagcctgatcaaagaactgcaaggctcatcattcaagaaattgrtaacatttatagttgaccagatctcagaygacctcactaaaatagaacttgagaagtaataaaggttggtcctcagatgcaacattatggagctcattaggcacttgatgaagctgcgaaacaatgtcatatgtaccatgcccctaacaatcaagtgtttggtgatgtctaatgtaacagcaaatatgcttaaatttggaatcttccatagcagtaataaagccagctcaaaacaacatgatttcaa

SEQ ID NO: 71113 - DNA, 599 bp, Chicken  19866894347304_2
  misc_feature (1)..(27): n is any nucleotide
nnnnnnnnnnnnnnnnnnnnnnnnnnnattgtgaagaatgagctggatgtggttttgggtactaagaaaagatgggagaaaaggggagaaggatactatgaatggctaagacagcaaagaaatgacctctggatatataggtgtattttctgcaacacatcaaaggatgtcaaaatcggcaaaggaggcaaggtaacacaaactaattctgtttcacaggcaagttgcaaaatggtggtgatctcttyatagcaacaagcctgatcaaagaactgcaaggctcatcattcaagaaattgrtaacatttatagttgaccagatctcagaygacctcactaaaatagaacttgagaagtaataaaggttggtcctcagatgcaacattatggagctcattaggcacttgatgaagctgcgaaacaatgtcatatgtaccatgcccctaacaatcaagtgtttggtgatgtctaatgtaacagcaaatatgcttaaatttggaatcttccatagcagtaataaagccagctcaaaacaacatgatttcaatgataaatggctttctctaaacacattctaaacatttccagaagtttgagtg

SEQ ID NO: 71114 - DNA, 600 bp, Chicken  19866894347304_3
tgtgaagaatgagctggatgtggttttgggtactaagaaaagatgggagaaaaggggagaaggatactatgaatggctaagacagcaaagaaatgacctctggatatataggtgtattttctgcaacacatcaaaggatgtcaaaatcggcaaaggaggcaaggtaacacaaactaattctgtttcacaggcaagttgcaaaatggtggtgatctcttyatagcaacaagcctgatcaaagaactgcaaggctcatcattcaagaaattgrtaacatttatagttgaccagatctcagaygacctcactaaaatagaacttgagaagtaataaaggttggtcctcagatgcaacattatggagctcattaggcacttgatgaagctgcgaaacaatgtcatatgtaccatgcccctaacaatcaagtgtttggtgatgtctaatgtaacagcaaatatgcttaaatttggaatcttccatagcagtaataaagccagctcaaaacaacatgatttcaatgataaatggctttctctaaacacattctaaacatttccagaagtttgagtgtaaaagaataatctcttcttgtacaccaaa

SEQ ID NO: 71115 - DNA, 600 bp, Chicken  19866894347317_1
cctgcaggacagcagtcccacacttatctccattatcacacacgggttgtgctggctctgctggcacactgccacacacatcccagcatgctgctgcccgcctcgggccgtgggaatggccccacactgtgtgccagctctgctcccctgctctgctccctgcacagacaccacagaacagagtggagctgggatgttagtgagccatggcactcgtggaagggcagcccatcagtttgcagcacaaaaagcaggtgaaaaaatgggtaagattaagaaaggacaacaaaagctgggggraaaaaaggatggtgtaaattgtctggaagacatgtagctcttygaatggaaacaagaggagatggatctcttgactttctaacaactccattaggcagtcgctggcagtatagaagtgacacctggcctttttttttaggcagtgctaagctggaggggactcctggtatttctgttgtctccaggaacaaaccatcatggctcagtaaacagttacttgcrtttcctatgctcacttctgagccttccttaattttgtttagcattaatgttggaacttagtattcaaacacctttcca

SEQ ID NO: 71116 - DNA, 600 bp, Chicken  19866894347317_2
gggttgtgctggctctgctggcacactgccacacacatcccagcatgctgctgcccgcctcgggccgtgggaatggccccacactgtgtgccagctctgctcccctgctctgctccctgcacagacaccacagaacagagtggagctgggatgttagtgagccatggcactcgtggaagggcagcccatcagtttgcagcacaaaaagcaggtgaaaaaatgggtaagattaagaaaggacaacaaaagctgggggraaaaaaggatggtgtaaattgtctggaagacatgtagctcttygaatggaaacaagaggagatggatctcttgactttctaacaactccattaggcagtcgctggcagtatagaagtgacacctggcctttttttttaggcagtgctaagctggaggggactcctggtatttctgttgtctccaggaacaaaccatcatggctcagtaaacagttacttgcrtttcctatgctcacttctgagccttccttaattttgtttagcattaatgttggaacttagtattcaaacacctttccaaatctctcttaatgacatgcaatggaggtttggtgccaggtcc

SEQ ID NO: 71117 - DNA, 600 bp, Chicken  19866894347317_3
ggcagcccatcagtttgcagcacaaaaagcaggtgaaaaaatgggtaagattaagaaaggacaacaaaagctgggggraaaaaaggatggtgtaaattgtctggaagacatgtagctcttygaatggaaacaagaggagatggatctcttgactttctaacaactccattaggcagtcgctggcagtatagaagtgacacctggcctttttttttaggcagtgctaagctggaggggactcctggtatttctgttgtctccaggaacaaaccatcatggctcagtaaacagttacttgcrtttcctatgctcacttctgagccttccttaattttgtttagcattaatgttggaacttagtattcaaacacctttccaaatctctcttaatgacatgcaatggaggtttggtgccaggtccttctcttgctggtacacaggttgatcccagactcctttcacttatctagcaacacaaggtcgttaactacagtattacagccatcctgtaaataccaactgcagtatctacaaatcagttcctcctccatggcacaggcaatcagcttgatttgacataatgtaatctcgagttggata

SEQ ID NO: 71118 - DNA, 600 bp, Chicken  19866894347332_1
tccacagatactcctgttctcacagtaggagtaggtaactcttgtggttttgaagctttgagattagtctcaactaacttgattgcaagaactggaaggctttttttttttctttaatttgtcatggtaacacaggcacttcccttgtagggctaaaccacattctagttcctagttacctcactctagatgttttattttactatatttatcaaccagagtaccttaaatgaacttagtgttgcacagaaatcatttgtcatctggaagaaggttttatgcctcatatgttttcacttyggattattctgctgtagctggcaaggagcttcttcatgctcacatacaaacaagaatttgacttgcttttctaaaaagtaggagctgagctttgcagtgatagtatttctagcctgctaaatataagatactaaaaatgttatttggaaggtatcataaaaaaaaatttggtcagaacaacagcacatacgcttcctattgttcctctaggttgtatktgaacacttgtttattcagtaaactcccaagagtttatcaagctaagctgctaattttcaagacataagaaaaaggtttatg

SEQ ID NO: 71119 - DNA, 592 bp, Chicken  19866894347332_2
gagtaccttaaatgaacttagtgttgcacagaaatcatttgtcatctggaagaaggttttatgcctcatatgttttcacttyggattattctgctgtagctggcaaggagcttcttcatgctcacatacaaacaagaatttgacttgcttttctaaaaagtaggagctgagctttgcagtgatagtatttctagcctgctaaatataagatactaaaaatgttatttggaaggtatcataaaaaaaaatttggtcagaacaacagcacatacgcttcctattgttcctctaggttgtatktgaacacttgtttattcagtaaactcccaagagtttatcaagctaagctgctaattttcaagacataagaaaaaggtttatgtactatggatattaaagtttgatgtgttgggaacacatcattggtcacaaaaccagataattatcttctaaagtgacaaagcttcaaagatgaaaagcaggaatattcaaacttcagctttacagctttaccttgaagcaaaatgactatcattttatgacagctgtgccaaatctgactgctgagctgtttgtacatgatgctatcgta

SEQ ID NO: 71120 - DNA, 600 bp, Chicken  19866894347337_1
taagaccatctgattgctgactttcagttgaattttgtagttggaaattaaagattagcatgtgcagaaatgtgtctctttgcttcactcctcattaatgatgtgtttaatattttgtagctgtggtgttatggggaaaaatttttcttcactcatggaaaagtgctaacagtagttatttacaagtgtgaaacttcatccttggcagctgctgtgggaaagctgaaggacagtcaaacctctggtaagaagttttctgattactgggagatctcctagcaggaaaacttctgaaattgygtaagaattgttctataaaatcagttaagcctaaacagcttgaagtaagttggtgtattccgctgctagatgttagtattctcagtgagaacatcagagaattcgaagcatacaaatgcttgaatttatggtggcttcattgaagtgtcattcaaatgctgcaattattgaaaacactgagatgccagaataagcactgaaacaattaaagcacagtctttcatgttgtgttttcaaagcacttagtaataagtagggcagtaccaaacctaagtttgtaaactttaggctaaagaaaat

SEQ ID NO: 71121 - DNA, 600 bp, Chicken  19866894347337_2
tcctaccagagactaaaaagggaaaacatgcaaaatgtctcaaagttgcttgctgctgagagaaaacagagaagtttctttgcgaaaaatgtattacatttcagaaaatgcatattagtatcagaagttaagattttaaaagtggcactaagtgttaacttcatgacttcatgtaattttatttttgtcttcacagatctttcttcatttgtaaactggaatacccttggagatgaagagctcctggtttccttacagtcacagcagtccgtagctctaaaatctgaatccaaaatgacrgtaagttaacacgacaaacgtgtgagctcttttgtttcatatttgtctcttcccaatgctgctatttttaaatgtaatttgtagcaaatgacacatgatgttcctagttatcttgcttgaaatctttgaatccttttcggagctgaataataacttggttttttttattatagttaagatcaaaaaagagcrcagttgcgaacatacagccagatacctccacagttgggcagttcttactaagtataaaagtaagtataccaagtagccttaatgaattttcagtcacacttgagaaca

SEQ ID NO: 71122 - DNA, 600 bp, Chicken  19866894347337_3
acagatctttcttcatttgtaaactggaatacccttggagatgaagagctcctggtttccttacagtcacagcagtccgtagctctaaaatctgaatccaaaatgacrgtaagttaacacgacaaacgtgtgagctcttttgtttcatatttgtctcttcccaatgctgctatttttaaatgtaatttgtagcaaatgacacatgatgttcctagttatcttgcttgaaatctttgaatccttttcggagctgaataataacttggttttttttattatagttaagatcaaaaaagagcrcagttgcgaacatacagccagatacctccacagttgggcagttcttactaagtataaaagtaagtataccaagtagccttaatgaattttcagtcacacttgagaacattccaggcatctcctaagctgttatcttctcacgtttcctcttgtgtagatcaagctgaagaagctgcctcaaacaggtttgttggaggattctgtcattactgtgtaaaaatagtgtttgggcatgatgaagttttgtcataggaagatgttattcaactgttcagtatggggtttataacagctgtctga

SEQ ID NO: 71123 - DNA, 600 bp, Chicken  19866894347343_1
tgtggttatagcacggcctgcagcattttatatcagatttttgatacaattgacattcatcatatttttttgataacagcgttgttttctatgttaaagaaaacttcacatatgacaacaaaggtccaaagacagccaaagcaatgagctgtaaaatcatgagaatctatggaggagataagcgctttgtctctctacagaacccttgatgcaatacagtcattattgatgtaagatacagagaataaacactaacactctggatgaactgtaattcctttcattaaacactgaaattcrtaacatcattctgtaaattaagatgtgctttgtgtatgttggatctcagaataccttctttacaaagagttgagtgactcatatgtttgtaaaatgagctgacccaaagtatccaaaactgagtttgaattgtacctttgattttattcccaccaaaatactcagctgtgtactgaacacatcatgtgagccctcaagataccctttactttgcaagttacattagaagctgcttcatcatgctgtctttgctttttgcctactactttcctcactgaactttctctacttcattgcttt

SEQ ID NO: 71124 - DNA, 593 bp, Chicken  19866894347343_2
ctactttcctcactgaactttctctacttcattgctttgctttctgtttgtgtcattggtctttacagctttctgcacaagaagaacctgctcccatttttatcaccaaaaatgagcaatctagcctgagaacggctgcagccacactcgttatgttactggtttccctgcttatatacctcctgaagtaaacatatgctgaacatcttcactgtcaatcatgatctgtattttatgattagcgtcgaaggtttggcaatcactgaacaccagtaatacctcctcacatgtgaaaatgtygcaagatcacaaaggagaacacttccctctctttgttgtgcctggcaaattaattaaaaagaaagaaatagctacagtcagcttttgtacaaaagctgtaaacacacatgagatgccgccaaaggttaagagagcgatataaagtaggagcatttctggactgaggagtcgaggccaggaatggaaaagaagtgagggacaaccagtacacacattttatagcatgcacagattgtttatggaacacactttgatttattgaatcaaagttcaaaaagggccctcataaatta

SEQ ID NO: 71125 - DNA, 600 bp, Chicken  19866894347347_1
tattctcctggccctggtatgtgactccacaacataattttagatttagcagtttttaatcaggcatgatctacttcagaacttatgcccagagtaatacactgccttattagacttttcagtttgtaccaagagatggtctcataactggagtataagtgacatggacaaagtagcctgtgtggtctaaaaagtgttctgatgaggcagggagaaatttgatgccagtctcttgctcttcattttagctttcagctacacatggatgaagaaggagctgacatgtaatttttgttgaasttgtattctgtagaatattattatgtgctaagtaaacttgtggtcattatgtatataattgttaagtgttttaccaggataaaagtttaaatataaggtactaattagactgtacagtttaaatttaatcaataatattttctaagtataaatcatatgagagattaaccttgagcttatatgaaactcattgaatcagtagatattggtgatcagaatttgaggtcaagagtaaataaacctgtgtttgaattactgtaactgcccttcacatgctacaactttttaagattttgcatt

SEQ ID NO: 71126 - DNA, 600 bp, Chicken  19866894347347_2
atgaggtaccattcttctcaagatacttaaggaactgggattgtctagataatgctagtttctactctagcaaaaaaatgtatcatgcaaattaagctactgtgaatagaatcatagagtcatagaatcatagaatcaatgacatgggttgaaaaggaccacaatgatcatccagtttcaacccccctgctatgtgcagggtcaccaaccaccagaccaggctgcccagagccacatccagcctggccttgaatgcctccagggatggggcatccacagtctccttgggcaacctgttcmagtgcgtcaccaccctctgtgtgaaaaatttcctcctaatgtctaacctaaacctcctctgtctcagtttataaccattctctgttgtcctatcactgttcaccctcgtaaacaggggtaatagattgtacagtaatcgtgtacttcaccattgttttgctttaaggaaacagttgcctacaccagcatagcttagctcattcccttcaaaatgccagtccaccagagtatgtctccttaattctaggagtctgtttttgctggccaactgggaattgaaggactcacactctgcccaaa

SEQ ID NO: 71127 - DNA, 450 bp, Chicken  19866894347350_1
caaggagcccactcctgcagacacaggtgctcagcctcagccctgagccatccgccccagcatgaggagggacgtggaacagttaactgtggtcagggaggagacagatgatcatcctgccccaaatcacttaaccgtcttaagggtctacccttgtctgcctgggcgagccaactaatcttacagcgagctgcacaagtgggcttggagctatatatgggactgggagagaaaggccacaaagcaaccaattcccccgcaccacctttccccccaaaaaactgctcaatatgcatccgrttgctacttaaggaaaatcactgcagatcagctgttctccatttcatgctttttgggagatgacagcagatcgcacttgggaaagttgttcggcaatgtgggagagcgcacatctgcacagcggccacacgtgatgtcctcagtggcctc

SEQ ID NO: 71128 - DNA, 599 bp, Chicken  19866894347355_1
  misc_feature (1)..(162): n is any nucleotide
nnnnnnnnnnnnnnnnnnnnnnnnnnnnnnnnnnnnnnnnnnnnnnnnnnnnnnnnnnnnnnnnnnnnnnnnnnnnnnnnnnnnnnnnnnnnnnnnnnnnnnnnnnnnnnnnnnnnnnnnnnnnnnnnnnnnnnnnnnnnnnnnnnnnnnnnnnnnnnnnnnaaaatataaactatgcttgctcagcggaaattaatctgtagttgtcccatattaatttgcttcacatttctttttgtaatccaagccctacaaaatgggtttggttaagactacattcaattgtatctctaactttartgagagcagtagctaattgatatctcatataaataccttttaaaacatacatttaaatgagttctttttttatacccatcacatccttaaaatcctgacttccaaagcagaacagctgttcatatacttaggtgaggacacagtattctgaagtactacattaataaaaaaaatacagccctrtaatagtttcaccagtaacatattatatattttattatatatgtaaagtctaaawatattaaatacaaatataaattaagataatgtgtatatattttctaaatgacacatataaa

SEQ ID NO: 71129 - DNA, 600 bp, Chicken  19866894347355_2
cagcggaaattaatctgtagttgtcccatattaatttgcttcacatttctttttgtaatccaagccctacaaaatgggtttggttaagactacattcaattgtatctctaactttartgagagcagtagctaattgatatctcatataaataccttttaaaacatacatttaaatgagttctttttttatacccatcacatccttaaaatcctgacttccaaagcagaacagctgttcatatacttaggtgaggacacagtattctgaagtactacattaataaaaaaaatacagccctrtaatagtttcaccagtaacatattatatattttattatatatgtaaagtctaaawatattaaatacaaatataaattaagataatgtgtatatattttctaaatgacacatataaaagaataatatattctcaaaagaataactcttctcaaaaatgactcagtagtcatgaaccataaccatgctttgtttaaactaagtcttaaaagaacaacacatagaaaaataattaatgatttatattactggcatttatattgcaggaaatttcataattaataaaaccaaactcttaaacaa

SEQ ID NO: 71130 - DNA, 600 bp, Chicken  19866894347355_3
taatccaagccctacaaaatgggtttggttaagactacattcaattgtatctctaactttartgagagcagtagctaattgatatctcatataaataccttttaaaacatacatttaaatgagttctttttttatacccatcacatccttaaaatcctgacttccaaagcagaacagctgttcatatacttaggtgaggacacagtattctgaagtactacattaataaaaaaaatacagccctrtaatagtttcaccagtaacatattatatattttattatatatgtaaagtctaaawatattaaatacaaatataaattaagataatgtgtatatattttctaaatgacacatataaaagaataatatattctcaaaagaataactcttctcaaaaatgactcagtagtcatgaaccataaccatgctttgtttaaactaagtcttaaaagaacaacacatagaaaaataattaatgatttatattactggcatttatattgcaggaaatttcataattaataaaaccaaactcttaaacaaaatttcaaagcaagcaatatatacagaaaccttcctgtaacctattacattccaa

SEQ ID NO: 71131 - DNA, 600 bp, Chicken  19866894347362_1
gtccagctctgtgctgtgcacttattgaacacctgtggatttgcagtgctgtcccatgcagccttccaggcacacatttcatatgtccctttggacaaacaccccagaagtagtcataactgattggagcctgtcacatttcagattgaaccctgaatttcaatctgtgaccttctcaatcacttcagtttatttttcagtttcttaattggcttcacatttcatggcaaaatttaaaagaaaatgggggagacaagactctaatattatcataccactggatcagaggccttttggggyactgtattgcatgagtaaggctactgagatttggtggtgtcataaagcgcagaatgaatggaactctactgtggtattacaaatctacagcttatttcattaagatcttaggatggtgactcctccatttttctgagatgacagtgcaaccataattgacagtcattttttgcaggtaaggaaactcakaaaattaaaaataagtaaataaataaatcatgaaaacagagagatgtttatctccatttacagttatttccagaaaaggcactggtttgctctggacttctttgcccgtga

SEQ ID NO: 71132 - DNA, 567 bp, Chicken  19866894347362_2
ttatttttcagtttcttaattggcttcacatttcatggcaaaatttaaaagaaaatgggggagacaagactctaatattatcataccactggatcagaggccttttggggyactgtattgcatgagtaaggctactgagatttggtggtgtcataaagcgcagaatgaatggaactctactgtggtattacaaatctacagcttatttcattaagatcttaggatggtgactcctccatttttctgagatgacagtgcaaccataattgacagtcattttttgcaggtaaggaaactcakaaaattaaaaataagtaaataaataaatcatgaaaacagagagatgtttatctccatttacagttatttccagaaaaggcactggtttgctctggacttctttgcccgtgagaagccatttttacattttcaggcacctcttattttgtgtttgacattttcaagcacctcctagttttgtgatgcacagtcacagagaagactgaatactcatcactgaactgaaaatgtaaggtgatgctatcaaaatgtgagctattttcctga

SEQ ID NO: 71133 - DNA, 600 bp, Chicken  19866894347364_1
tttttgtagtctggagaaggctcaggggagaccttattgctccttataactacctgaagagaagttgtagcgagctggtagtcggccttttctctcgtgtaacaatgacaggacttgagggaatgccctcaagttgtatcaggaaaggttcaggctggacgttaggaaacaccacttttctgaaagagtggtcaggcactagaatgggctgcccagggaggtggtggagtcactgatcctggaggtgttcaaggaacgtttggatgttgagttgagggacatggtttagtgagaactacyggtgatagayggacagttggactagatgaccttgtagatcttttccagctttggtgattctataattctatgattaataacaatttttttaaaaaagtgatattaaaaaaggctttattcttgcacgatgtacttttggaaaccattgcattttcccatataaaatctagttatagtgctctacttaccaaaataaggtgactgcattagctgaaatggtaatacatcccccagttatatgtggttcaacaactagagtgaacgcaagagtaaaagacatatttctaacatatatgtcct

SEQ ID NO: 71134 - DNA, 600 bp, Chicken  19866894347364_2
ctggagaaggctcaggggagaccttattgctccttataactacctgaagagaagttgtagcgagctggtagtcggccttttctctcgtgtaacaatgacaggacttgagggaatgccctcaagttgtatcaggaaaggttcaggctggacgttaggaaacaccacttttctgaaagagtggtcaggcactagaatgggctgcccagggaggtggtggagtcactgatcctggaggtgttcaaggaacgtttggatgttgagttgagggacatggtttagtgagaactacyggtgatagayggacagttggactagatgaccttgtagatcttttccagctttggtgattctataattctatgattaataacaatttttttaaaaaagtgatattaaaaaaggctttattcttgcacgatgtacttttggaaaccattgcattttcccatataaaatctagttatagtgctctacttaccaaaataaggtgactgcattagctgaaatggtaatacatcccccagttatatgtggttcaacaactagagtgaacgcaagagtaaaagacatatttctaacatatatgtcctggtcctactc

SEQ ID NO: 71135 - DNA, 600 bp, Chicken  19866894347372_1
ctgtgtttgcttcctaaaagatcgatacattactctgaggtctatggttactgccgaagaagctgatagctagcctgtttccccataatagcaatgcagttaacaaaagagagctatcagactactgtgtgttctgccaatgtcactggtgatagttatcatctgagtgatagaggaaatcttcaattcaaagagctgtgtgtcttcatatctccttcctccattcttatccactgtttttaaaggagtttggaaaggggccttttcaatttgtgcagtgtttcttcctttccagttcaygtaatggatacaagaggactwgtttgatgcactgacagtatggtacagctgcagtaatacaggaagctcttactaagtctgagcctttcttaatatgctctctctcagcatgtcttaagcatttgagcaaggttggacaacctgccccttagtacacgagcgtggtccagaatctctcagctcctaccgctccagagatgtagcataggaattcagtttttgcatgtaatagtagatctgcatccacattccctgtaggtacctgcagtagcaaaggctgagacatgaaagacacacaac

SEQ ID NO: 71136 - DNA, 600 bp, Chicken  19866894347372_2
tcgatacattactctgaggtctatggttactgccgaagaagctgatagctagcctgtttccccataatagcaatgcagttaacaaaagagagctatcagactactgtgtgttctgccaatgtcactggtgatagttatcatctgagtgatagaggaaatcttcaattcaaagagctgtgtgtcttcatatctccttcctccattcttatccactgtttttaaaggagtttggaaaggggccttttcaatttgtgcagtgtttcttcctttccagttcaygtaatggatacaagaggactwgtttgatgcactgacagtatggtacagctgcagtaatacaggaagctcttactaagtctgagcctttcttaatatgctctctctcagcatgtcttaagcatttgagcaaggttggacaacctgccccttagtacacgagcgtggtccagaatctctcagctcctaccgctccagagatgtagcataggaattcagtttttgcatgtaatagtagatctgcatccacattccctgtaggtacctgcagtagcaaaggctgagacatgaaagacacacaacctagcgtagatatggtaattt

SEQ ID NO: 71137 - DNA, 600 bp, Chicken  19866894347373_1
aatcaaagttctgaatgctaacacttcctattttcatgctaaacaaagaatgcttgtttggtcagttttttgtttgtttgttttaaagaacagtgtttacgtatgagtcttccatgcaaacactattttcacctaatatacgataaactggaaattcaccagtgttaaagacatctaaatgtttaaggaatcctagacatgcctgagggtaatcctaaattgttaagtggaatgatgatataacaaatgtcaacatacaacagggattatactaagttcttatatctgaaaaaaaaaagwaaaaaaaaaaaaggaaatatctgggatattttgaatggaaccagaacatctgatttaagacaaaattttagagaaatagaaagggattcctgggttaaacagcaatgaaaaaggtatggctaaaagttgcacaagacgatccttgtggtttccttccaattcaggatattctatgattacttgattctttaattctgattctatgtctgtgacaatggccatggtgaggaataattcagattcatgtgagaacactgcttttgactgaaaatccggaaggaaaaaatctttcatattttg

SEQ ID NO: 71138 - DNA, 600 bp, Chicken  19866894347375_1
acaagctggcattgagtgcctttgctagaaatggtttgttttgctcctaaaaatataaagaggccaaaatgttcaagcatgagcagatcaaagcaggcatctattccagttccatgggtaagtctggcattttccatagaggctgagctcacatccccagggtgtaggctggataccatgctctgcgtgctccaggttaacatttccaaaatgttagggcaggcggcctcatttgcagggcttcagggactccacagttttgggggaaaaaaatcattttcttcctgacttaggagtctyggtgcctgatatgtatcccaaagtaaatgtgtttctgctttcttggtgtctgtactgcttacgacctgtggggtcacaatgactgttgtcagttacctttagttaaccatcagcgcgtccttcagatatcaaagtgtcaacctcaggaaagcaataatgtactgttggcagatggtgaacccaaacaatgcacacaggttctcatcttgatagggtcacatgaatcaaagaatcacctttggaaaaagctttcaagttcataaaggccaacagggtcacaaggaaaattctgcttttgta

SEQ ID NO: 71139 - DNA, 549 bp, Chicken  19866894347378_1
ctgtgaagatattgactatccagaaaactgtttttgctgaaaaatctcattaagatcaaaactgtcactgcaatacctatcaggaaattcagttcagatatttgtgcccttcaggtgcatcaagagcacctcagctgaaagactccgtgctgtccttcagcttctttctccttactcctttactttcatttatgcgcatggagtgattctcctctgcacataacactcaacatatgccatctgaacctctcttcagatcctactttgggatctacaaagtgctgagaactgctgactggragcaagcagatgtggaaggagtcatggggaggcttggtgaaatttccaaagtcaccagctgagaaagactatgaaaatacattacccagtatagctataagtgtgagagaaagccaatttgtttctgggatactaaaatattttgatttattttcattttcctttgattgttctctgaaatttgcattgacagttgagttttgaaatcacttgattctataggagaagttggattgggtaggctgaaca

SEQ ID NO: 71140 - DNA, 600 bp, Chicken  19866894347381_1
agagaatgccccaggatggcattaaaattatgtatcaaacttgtggttcttgggctattcctttccaagtacctgttttgtctgagtgcagtggttttaaaagctgtatttagggccacatcctcagctgggaagaattggcattaatcagtggataacagcatctggagcaagaaagcaaacctgagctgaaaagaaacatattgtttggaaacaaaggtagttctacaaagatattactggaaaccaatgttcagtcctctatgaacccctctaaaacaggctttgggcatgcatagrtgaaatgcacgtcttgcaaattgaagtggtgatgacaatgagttcacaaaatacatatacaacacatattcaaatagttatatttgtatctatttttaaaatgggatttaaattatgatattcataacagataacaattaaaaattgaatctgtgcttaagatcaaaactactacagattttattcttacaaagatagtcctgctgtattgctgtctgtgtaaatcttcatgtgacagaaataattttgtttgaaaaatctcactgagattctatggataaaatcatatacatcagcttt

SEQ ID NO: 71141 - DNA, 600 bp, Chicken  19866894347384_1
gaatttgatctgcttctcatccttgagcaaggtaaaacattaatatggcatgaatacccacaatggatcctgccagcagctctgccttcttgtctaagaaaactcctgtttagagagctggttgctgcaacctgaatttgctgcttaggtagcaattggtgctctcaagaaatgtaaacgctttttgtgacatctacatcagatacgaacatacagaaggtgacgtattacacaggaacagcagtgtaacactggggcttttttgaggctaacacacagcagaaatatgtcacccctgtraaaaaaaagtacatgtaagccagtcacgtactcaaggtgaaggccacgaggagctgaccctcgaagaagcactgcagagttggcatcagctctctagatggactaacaaatttgaaaactgaacagtatttgaggtcgttatggacccaggcttctragtcraaagtgccaagagtcaggctgtacccaacagagtctgtggccacttgcagtttgagccaaaagaaataaagaaaaaaaggatgtcgttagggggaaaacattcaatttttgttttgttttgttttgttttattttttc

SEQ ID NO: 71142 - DNA, 537 bp, Chicken  19866894347384_2
ggtgctctcaagaaatgtaaacgctttttgtgacatctacatcagatacgaacatacagaaggtgacgtattacacaggaacagcagtgtaacactggggcttttttgaggctaacacacagcagaaatatgtcacccctgtaaaaaaaaagtacatgtaagccagtcacgtactcaaggtgaaggccacgaggagctgaccctcgaagaagcactgcagagttggcatcagctctctagatggactaacaaatttgaaaactgaacagtatttgaggtcgttatggacccaggcttctragtcraaagtgccaagagtcaggctgtacccaacagagtctgtggccacttgcagtttgagccaaaagaaataaagaaaaaaaggatgtcgttagggggaaaacattcaatttttgttttgttttgttttgttttattttttcccctcctaattagggaaagtcatcaagtcaagctttttcagtaaaagtcaggtggccaaggaaaagtacaaaaaatgttttaaaaataacttat

SEQ ID NO: 71143 - DNA, 532 bp, Chicken  19866894347384_3
tctcaagaaatgtaaacgctttttgtgacatctacatcagatacgaacatacagaaggtgacgtattacacaggaacagcagtgtaacactggggcttttttgaggctaacacacagcagaaatatgtcacccctgtaaaaaaaaagtacatgtaagccagtcacgtactcaaggtgaaggccacgaggagctgaccctcgaagaagcactgcagagttggcatcagctctctagatggactaacaaatttgaaaactgaacagtatttgaggtcgttatggacccaggcttctragtcraaagtgccaagagtcaggctgtacccaacagagtctgtggccacttgcagtttgagccaaaagaaataaagaaaaaaaggatgtcgttagggggaaaacattcaatttttgttttgttttgttttgttttattttttcccctcctaattagggaaagtcatcaagtcaagctttttcagtaaaagtcaggtggccaaggaaaagtacaaaaaatgttttaaaaataacttat

SEQ ID NO: 71144 - DNA, 599 bp, Chicken  19866894347389_1
  misc_feature (1)..(56): n is any nucleotide
nnnnnnnnnnnnnnnnnnnnnnnnnnnnnnnnnnnnnnnnnnnnnnnnnnnnnnnnagtcatcctggactttttattctgtgcgtgcaaaggaaaaaaaaaaaaggaaaagttttgtttcatctgttaccaaaaccatcactctgtagtcaacacttctaatgaaatacaggccagaggattagtcagagcagattcatggaaaaaaaacacacaaacaatggaaatctgtatgcaaatacaagattatcacagcaattaaacccaaggatgagccctgcccaaaagtacctctaagcaycatcctacaaggctttccctcaccccaactccacatccatgagtagataatgcaagccattgccccaaagaagagaagcgatcctgaaatcataattacagctctcacttaagcactctaaataccaaatgtatcagaaatgaagcccctatctctaaaatcccataaagactgcgttcatttctgcaaagaaggagtgggcaggggcttggagaggaaagctgtcctcttgtctacgctttgggctgttgccatgcagaggaaaggttgctgsagagcaacgtcccaaacaggaggca

SEQ ID NO: 71145 - DNA, 524 bp, Chicken  19866894347389_2
ccctgcccaaaagtacctctaagcaycatcctacaaggctttccctcaccccaactccacatccatgagtagataatgcaagccattgccccaaagaagagaagcgatcctgaaatcataattacagctctcacttaagcactctaaataccaaatgtatcagaaatgaagcccctatctctaaaatcccataaagactgcgttcatttctgcaaagaaggagtgggcaggggcttggagaggaaagctgtcctcttgtctacgctttgggctgttgccatgcagaggaaaggttgctgsagagcaacgtcccaaacaggaggcaggagttctttgaaagcttaaggtgttgcagacaaacaaacaagcgaagacatctaccgatcatgcttgtcttgggaaaagcaggctgtggtacggagccccaggttggctggaggcaaggcagcaaaccaccgagcggcatcracaccgctttcaggccagatccatcagaggaggaagtggcaacaaaacgcttttca

SEQ ID NO: 71146 - DNA, 356 bp, Chicken  19866894347389_3
aagcccctatctctaaaatcccataaagactgcgttcatttctgcaaagaaggagtgggcaggggcttggagaggaaagctgtcctcttgtctacgctttgggctgttgccatgcagaggaaaggttgctgsagagcaacgtcccaaacaggaggcaggagttctttgaaagcttaaggtgttgcagacaaacaaacaagcgaagacatctaccgatcatgcttgtcttgggaaaagcaggctgtggtacggagccccaggttggctggaggcaaggcagcaaaccaccgagcggcatcracaccgctttcaggccagatccatcagaggaggaagtggcaacaaaacgcttttca

SEQ ID NO: 71147 - DNA, 599 bp, Chicken  19866894347409_1
  misc_feature (1)..(35): n is any nucleotide
nnnnnnnnnnnnnnnnnnnnnnnnnnnnnnnnnnnaccgcggcccgaagctacgaaatcctttttttaacccgttgctcaggaatccatcgacctccacccccgtaaaagaagacaggagggaggggagggaggccaaacacacacacacacacacacaaaacacacacacacacacacacacaaaaaaaatagggaagaaaaaaaaagaaaaggatttaatgataattaagctgatgtcacgttgaccgccgaggcgttggagaggagcacggagctggaagagccaacccccatcccyggggtggggacaccgcgatgccgaccgccccttgggctgctttttctttttcaagtgcgacttgacagtttctggttgaaatcccatacgaggagctccaaacaggtttaatcggaacgcttcgcaaacgatttcactgtcttttttggggggacgttgattctcgagtttttaatgctaagatatataataagttattttatgatattgatggaaaagaattatttatactctgaggtctgagtaccggactaccctcgagcagttggtccacagccgcacgtccttcagctgctgct

SEQ ID NO: 71148 - DNA, 568 bp, Chicken  19866894347422_1
cacgactgacacaggctcactgtcagctccccattctgcatccttttcccttcacacttgcattgagagggcaggcacggcctccaagccacctccccagccccttcacacaatgagcaccagcagcaattccagctgcaaagtttgctttccttgacacacagtttactttctccattcccccgcatcccgcccctgccacttacccctcactccaaaaaggcgctctcaaacaggcttaagctttaaacaaataagggtttggaaagcagcagcctgctcccgtttccctccccaccrcccctgctctctcccccccgccctccgcctccagctcggagcaagggcgcaagcagtgctggcaagcgccgcgcaggcacagaaaacaaacacgtggagccgagccagctgtgaagttggatttggcgcacgctgtttgcaaaagaaataaaagcacatgggagaagggggaagagaagaaggggcagagcggagggagctgggggtgccccggccccaagggaagagtgcgagcgccttacaaaggcctggcaagcacatgggtggg

SEQ ID NO: 71149 - DNA, 599 bp, Chicken  19866894347429_1
  misc_feature (1)..(51): n is any nucleotide
nnnnnnnnnnnnnnnnnnnnnnnnnnnnnnnnnnnnnnnnnnnnnnnnnnnacaaaacctggagcactggcaggccaggcttaaaatcatagcactgcaccctcccgtgctctttacatggccatttgttattgtttgtgagtttgttttttttaattgattatagtgggtcttttgtatatttaccacctcatttataaatgtaatgttatatatttagactggatacaagaaaagagtgtttttacaataatggcactgaggtactacacagactgccaatgatggtgccccatcccwgcagacagccaagggccgyrgatgggctctgagcactgatggagctgtgggtgtctctgtgcattgtggggagtgggaccagagggccttgaagggccccttccaactcattctgtgattcagtgattcagtgatacatattatatataatcctgaattaccrtttccacgaggaatgaagttctgaagtacacacacagttccttcctgagacttttgaaatgttcctgtgtatcttggggaaagaaaaaagatgaaacaaatgtaacagcgctcttcatcagcatctgcattgtcac

SEQ ID NO: 71150 - DNA, 599 bp, Chicken  19866894347429_2
  misc_feature (1)..(32): n is any nucleotide
nnnnnnnnnnnnnnnnnnnnnnnnnnnnnnnnacaaaacctggagcactggcaggccaggcttaaaatcatagcactgcaccctcccgtgctctttacatggccatttgttattgtttgtgagtttgttttttttaattgattatagtgggtcttttgtatatttaccacctcatttataaatgtaatgttatatatttagactggatacaagaaaagagtgtttttacaataatggcactgaggtactacacagactgccaatgatggtgccccatcccwgcagacagccaagggccgyrgatgggctctgagcactgatggagctgtgggtgtctctgtgcattgtggggagtgggaccagagggccttgaagggccccttccaactcattctgtgattcagtgattcagtgatacatattatatataatcctgaattaccrtttccacgaggaatgaagttctgaagtacacacacagttccttcctgagacttttgaaatgttcctgtgtatcttggggaaagaaaaaagatgaaacaaatgtaacagcgctcttcatcagcatctgcattgtcactccttgtttcatggctgcc

SEQ ID NO: 71151 - DNA, 599 bp, Chicken  19866894347429_3
  misc_feature (1)..(31): n is any nucleotide
nnnnnnnnnnnnnnnnnnnnnnnnnnnnnnnacaaaacctggagcactggcaggccaggcttaaaatcatagcactgcaccctcccgtgctctttacatggccatttgttattgtttgtgagtttgttttttttaattgattatagtgggtcttttgtatatttaccacctcatttataaatgtaatgttatatatttagactggatacaagaaaagagtgtttttacaataatggcactgaggtactacacagactgccaatgatggtgccccatcccwgcagacagccaagggccgyrgatgggctctgagcactgatggagctgtgggtgtctctgtgcattgtggggagtgggaccagagggccttgaagggccccttccaactcattctgtgattcagtgattcagtgatacatattatatataatcctgaattaccrtttccacgaggaatgaagttctgaagtacacacacagttccttcctgagacttttgaaatgttcctgtgtatcttggggaaagaaaaaagatgaaacaaatgtaacagcgctcttcatcagcatctgcattgtcactccttgtttcatggctgcct

SEQ ID NO: 71152 - DNA, 600 bp, Chicken  19866894347429_4
tagtgggtcttttgtatatttaccacctcatttataaatgtaatgttatatatttagactggatacaagaaaagagtgtttttacaataatggcactgaggtactacacagactgccaatgatggtgccccatcccwgcagacagccaagggccgyrgatgggctctgagcactgatggagctgtgggtgtctctgtgcattgtggggagtgggaccagagggccttgaagggccccttccaactcattctgtgattcagtgattcagtgatacatattatatataatcctgaattaccrtttccacgaggaatgaagttctgaagtacacacacagttccttcctgagacttttgaaatgttcctgtgtatcttggggaaagaaaaaagatgaaacaaatgtaacagcgctcttcatcagcatctgcattgtcactccttgtttcatggctgcctgaagcagtttccactaagaaagagctcagcaatgcaccccactattccacacacagcttcagttatcctggcatcacacaaagcccaaaccacaccctttgcttcggcagactgcacagacaggtggtgtgtcacagagacagg

SEQ ID NO: 71153 - DNA, 600 bp, Chicken  19866894347431_1
gtaaagagttgactcccctcctgtttgtaggctccctttgggtcctggaaggctgcaatgaggtcaccccgcagctttctcttctccaggctgaacaaacagctccctcagtttgtcttcgtaggggatgaagggagcacattaattagtttccctggttgtgctggaaaagaaaagctttttgctttggaagggtaaaatggaagggaggacaccccgtcagccatttagtagcagaagcatttaataaaaggaacaaatagtgaattgtaaagcagtctgttggcttcacttgtgtcygttcttmtaagttctgataacttcattattgaaattgtttgctgagcaatgaggatgagtttgtgctgagtctgcgtggagattcaattgattatttaaatgttcttttcattattcacagcgaaagatgatggaagcattgctgttgccctgggctacaccgctcatttggtttcaatgatatcctacttcttacaagtgccactcaggtatcccataattcacaagggctccaggtctacaatcaaagataacatcaatgacaaactgaccgagaaagagcgagagtaagtatgtcac

SEQ ID NO: 71154 - DNA, 600 bp, Chicken  19866894347431_2
gttgactcccctcctgtttgtaggctccctttgggtcctggaaggctgcaatgaggtcaccccgcagctttctcttctccaggctgaacaaacagctccctcagtttgtcttcgtaggggatgaagggagcacattaattagtttccctggttgtgctggaaaagaaaagctttttgctttggaagggtaaaatggaagggaggacaccccgtcagccatttagtagcagaagcatttaataaaaggaacaaatagtgaattgtaaagcagtctgttggcttcacttgtgtcygttcttmtaagttctgataacttcattattgaaattgtttgctgagcaatgaggatgagtttgtgctgagtctgcgtggagattcaattgattatttaaatgttcttttcattattcacagcgaaagatgatggaagcattgctgttgccctgggctacaccgctcatttggtttcaatgatatcctacttcttacaagtgccactcaggtatcccataattcacaagggctccaggtctacaatcaaagataacatcaatgacaaactgaccgagaaagagcgagagtaagtatgtcacaggtgta

SEQ ID NO: 71155 - DNA, 600 bp, Chicken  19866894347431_3
gcaatgaggatgagtttgtgctgagtctgcgtggagattcaattgattatttaaatgttcttttcattattcacagcgaaagatgatggaagcattgctgttgccctgggctacaccgctcatttggtttcaatgatatcctacttcttacaagtgccactcaggtatcccataattcacaagggctccaggtctacaatcaaagataacatcaatgacaaactgaccgagaaagagcgagagtaagtatgtcacaggtgtacttctttcttcagagcaacaaagcagcaaccaaacacrccygaamttgagcagtcctgggtgctcagctgggctattgatcttgaagtgatttgttactgtcttcrgtagctttgggacagtgcttttgagtttctgatgtccaaattctgtggtctgacagtagttagccccgctttgtcatctggggtcgtttggcaggcatgtgatgttgattaggcatctaataatgacagaaaaacctggatagtgtgtctgctaggtaagctgtggcttctgatgggaaaactcacctttttgtgttctttctgactatgggaatgaaatgcacgtagcaga

SEQ ID NO: 71156 - DNA, 600 bp, Chicken  19866894347431_4
atgaggatgagtttgtgctgagtctgcgtggagattcaattgattatttaaatgttcttttcattattcacagcgaaagatgatggaagcattgctgttgccctgggctacaccgctcatttggtttcaatgatatcctacttcttacaagtgccactcaggtatcccataattcacaagggctccaggtctacaatcaaagataacatcaatgacaaactgaccgagaaagagcgagagtaagtatgtcacaggtgtacttctttcttcagagcaacaaagcagcaaccaaacacrccygaamttgagcagtcctgggtgctcagctgggctattgatcttgaagtgatttgttactgtcttcrgtagctttgggacagtgcttttgagtttctgatgtccaaattctgtggtctgacagtagttagccccgctttgtcatctggggtcgtttggcaggcatgtgatgttgattaggcatctaataatgacagaaaaacctggatagtgtgtctgctaggtaagctgtggcttctgatgggaaaactcacctttttgtgttctttctgactatgggaatgaaatgcacgtagcagaagc

SEQ ID NO: 71157 - DNA, 600 bp, Chicken  19866894347431_5
ggatgagtttgtgctgagtctgcgtggagattcaattgattatttaaatgttcttttcattattcacagcgaaagatgatggaagcattgctgttgccctgggctacaccgctcatttggtttcaatgatatcctacttcttacaagtgccactcaggtatcccataattcacaagggctccaggtctacaatcaaagataacatcaatgacaaactgaccgagaaagagcgagagtaagtatgtcacaggtgtacttctttcttcagagcaacaaagcagcaaccaaacacrccygaamttgagcagtcctgggtgctcagctgggctattgatcttgaagtgatttgttactgtcttcrgtagctttgggacagtgcttttgagtttctgatgtccaaattctgtggtctgacagtagttagccccgctttgtcatctggggtcgtttggcaggcatgtgatgttgattaggcatctaataatgacagaaaaacctggatagtgtgtctgctaggtaagctgtggcttctgatgggaaaactcacctttttgtgttctttctgactatgggaatgaaatgcacgtagcagaagcagcc

SEQ ID NO: 71158 - DNA, 588 bp, Chicken  19866894347431_6
attcacagcgaaagatgatggaagcattgctgttgccctgggctacaccgctcatttggtttcaatgatatcctacttcttacaagtgccactcaggtatcccataattcacaagggctccaggtctacaatcaaagataacatcaatgacaaactgaccgagaaagagcgagagtaagtatgtcacaggtgtacttctttcttcagagcaacaaagcagcaaccaaacacrccygaamttgagcagtcctgggtgctcagctgggctattgatcttgaagtgatttgttactgtcttcrgtagctttgggacagtgcttttgagtttctgatgtccaaattctgtggtctgacagtagttagccccgctttgtcatctggggtcgtttggcaggcatgtgatgttgattaggcatctaataatgacagaaaaacctggatagtgtgtctgctaggtaagctgtggcttctgatgggaaaactcacctttttgtgttctttctgactatgggaatgaaatgcacgtagcagaagcagcctttagtgaggctgccagtgctgctatactgcttgcaatgaaataaacag

SEQ ID NO: 71159 - DNA, 600 bp, Chicken  19866894347436_1
ttctgagctacgtaagcaaggctgagtctacgccagaaattgcagaagtaaggtcctgctttttaatttgcacaaattttccctttgttttctgtctccaaagtttgtaaaataatttaagtccccattctacgaattgtaccctctaagacttccttcatcttacagtctattcttcctctaatccagtcactccctgtctcctatactattcctttcaagattcattgttaattatctcccatgatatgcatgtaggaaatcttgttcatggtaaaaggagagagacttcttgtcctyagtttgttccacatttcctgagattgatgaggtgaagttatcttgctgttgagatttgcaagtcatttattagggtgaaatatcccaaggatataatcaaaatggttttcaaactgcttgttcactactgctttttctcatcctatagcaaagaggagaaagagacagccagacacaagcaattctcactaagctgaaatgtgcagcaggtgagtccttcagcttctcctattttttttttcatgcctggttttcttcttatctgtccataggaatcttagacaacagaatatgcttgat

SEQ ID NO: 71160 - DNA, 599 bp, Chicken  19866894347447_1
  misc_feature (1)..(15): n is any nucleotide
nnnnnnnnnnnnnnncacaacacttttgttggctccaggagaacactcttttatgattctccttcaagactcctacatattctctcttgcacccagcattcaaggagacactgaatattcatgcagaaatactctgtgctttatcaccatatgcttcctccttccatgaaatggatttcacctcatttcccatgctgacacaggttgacaagccctgccaaggctagtgggacaagctctatatttgctcaaagctgtgctgtgtggatgacctgaagaagacagaacttcacccctcakagatcttcaaagctattaggaaaaaaaaaagttccaataacctcaccaaggcaaaaamtatgcaccaaaatgtgactatttgcttatatctatttggtgtttcaatgcctgttcaagttcctcctgaagttaaagtgcatatgcactgcctttataagccagtcaatcagttacttcagcaaggtacttaattcccctctcataatcagatctagcttcaagaaatgtagaaaacaggaaattcaaagagctcctgcaagccaacagtcaccaaagtgattttcttttgtgtgaagtcc

SEQ ID NO: 71161 - DNA, 600 bp, Chicken  19866894347447_2
ctccttcaagactcctacatattctctcttgcacccagcattcaaggagacactgaatattcatgcagaaatactctgtgctttatcaccatatgcttcctccttccatgaaatggatttcacctcatttcccatgctgacacaggttgacaagccctgccaaggctagtgggacaagctctatatttgctcaaagctgtgctgtgtggatgacctgaagaagacagaacttcacccctcakagatcttcaaagctattaggaaaaaaaaaagttccaataacctcaccaaggcaaaaamtatgcaccaaaatgtgactatttgcttatatctatttggtgtttcaatgcctgttcaagttcctcctgaagttaaagtgcatatgcactgcctttataagccagtcaatcagttacttcagcaaggtacttaattcccctctcataatcagatctagcttcaagaaatgtagaaaacaggaaattcaaagagctcctgcaagccaacagtcaccaaagtgattttcttttgtgtgaagtccaatctgattatgaaaatggcagaagtggaaatcagcaaatagtatctatgcagccttga

SEQ ID NO: 71162 - DNA, 600 bp, Chicken  19866894347451_1
ctttaaactagactccactttctactaaaatgcaaggggctgaaatctgaatgaactgctttgaatatattgaaaatgtttcaaatgactcaaaacaattctgcttttttgttccaacatagaacaaaatttcttttgctcgcttcccagaacctcaagaatctggaaaatccatctgccatccagtcctactcacagcacaaacatcaagaggtctcatttgctgttgcctggatggtgtctgaactgaagaagtgctgtcaaaacaaagtctcacccatcccttcaaatttccagttyggaaaggagtctgatctcagctgggactgaggtctcagtgctgccatcatcagggagcattccagtgaatataaccttggaccaccatccagacttctccctgcctaccaaagccaagccctaattgtgaagacactgaattttgcagctctcgggttacagttcgctgcactccgcactaccagctttcacagatgagagcctggtctcctgcctgtgtcagtgattttctgtaggcatgctgacagaccggagggctttacatcttgctgcgcatatctgctttcacatctttcacca

SEQ ID NO: 71163 - DNA, 600 bp, Chicken  19866894347456_1
aaccataaagtaaatatgaagcaaattcatcttatcctgataaaccagagatacatagaaaaaataaccaaaatatgattcccagagattaaggaagggattgattttataatccttgatttataaactgccaactatttatatcacagttgctgaaaaattagtatgtagttgtgaaaggattttctgtcaccactgttggagggcctacagatgaggatgtaatcaagacatgaggacctgatccctaaagaaaaaagatgttttgtctgtgtagattggacctaggatctgtcttcrtcattaatgctaggcagatggtgacaccctaggaaataagacccttgaaccatatgtgtcaaggtacctttaaacacagtaaaacccatcattacttactccatgtgccatacttctatattactggctgacacgttccattatggctaatgaatttactctctacagatgtagtgtttgtgcctttgttgaaccagatgtttctgaaccaggggtcatttgtgggaattggggtatcactctgtttttgagctgcagtttaataaatcagctctgctgaagtcttagacactaggaaat

SEQ ID NO: 71164 - DNA, 599 bp, Chicken  19866894347458_1
  misc_feature (1)..(94): n is any nucleotide
nnnnnnnnnnnnnnnnnnnnnnnnnnnnnnnnnnnnnnnnnnnnnnnnnnnnnnnnnnnnnnnnnnnnnnnnnnnnnnnnnnnnnnnnnnnnnnctgtgtgtacgtgcttattgttgggtccattacataccaggcttgagaacatctggctttcttcccagattccagtctggtggcaatacatacaacttccagcttgcttctgttgattacctttcattttttagtagaggtttgaggtatatttctctagcagtcagtgcagactactgagagattaggaggatcgattctgtttytggcttttgtgttgacttcattgggtcaygttacttctcccatgcctcactttccttcccttgcaattttcctgccttatctacttaagctcgctggagctgtgatggtctccttctgtaagactgtataatttcaagttcataggggtctcagtatgcatgaggaatgcagttgctacagcagtgccaacattagtgtccttttcttgcctcacttttcaatgggtgtgtattttgtaagcattaactagtagccaaaacgagtacagaaaaacgtagcctttggcttgactagtcat

SEQ ID NO: 71165 - DNA, 599 bp, Chicken  19866894347458_2
  misc_feature (1)..(65): n is any nucleotide
nnnnnnnnnnnnnnnnnnnnnnnnnnnnnnnnnnnnnnnnnnnnnnnnnnnnnnnnnnnnnnnnnctgtgtgtacgtgcttattgttgggtccattacataccaggcttgagaacatctggctttcttcccagattccagtctggtggcaatacatacaacttccagcttgcttctgttgattacctttcattttttagtagaggtttgaggtatatttctctagcagtcagtgcagactactgagagattaggaggatcgattctgtttytggcttttgtgttgacttcattgggtcaygttacttctcccatgcctcactttccttcccttgcaattttcctgccttatctacttaagctcgctggagctgtgatggtctccttctgtaagactgtataatttcaagttcataggggtctcagtatgcatgaggaatgcagttgctacagcagtgccaacattagtgtccttttcttgcctcacttttcaatgggtgtgtattttgtaagcattaactagtagccaaaacgagtacagaaaaacgtagcctttggcttgactagtcatgtaaagatattaataaccacaaacacaaa

SEQ ID NO: 71166 - DNA, 600 bp, Chicken  19866894347459_1
ctgggtaaaactggctgagactctattgaatgaaattctcctgagatagcaactgaagttgctggactcttggctctcctctctctccctcctgaagctttctgctgtctgcagcaccccactaggtcacagcagacacagggcagtctggaggctagagattatctttgaacccgaactgacagggacatcaaggctcactcaacatgtagcttcttcatacagctaggactgccaaatctggtgctgatactccctccgttgtgctggaactccttttgagttaggctggcaaagttmctcagtttgagaaaatagcaaggcatatgttgcagaattttctgaagttagatcaagtccctgattgaattcacagcatgggagtggggcttgggagcaggagcactgcaagccagcattgttgcagaatgctttgttttgtgaaatcatggccaaagagatttgtgttggagaggaggatatgggtattgtgtaccatgcaaacagctcgtttggttgtacttttctttcttattctgcttagggaaaggggattttgtataaagtaaacaaacagggttgcaccaagaacagagaagt

SEQ ID NO: 71167 - DNA, 600 bp, Chicken  19866894347467_1
atatgaattctggccataaatgaaagctatgggactaatgttttactcactggtctcatttctgccttgcctgcttctctgaaaaatattggatgtatcatcttgcctcctgacctcagcttgccttacttgtttggagacaatcatacaaagctttcactgaggaatgtcttctgatttaaggggtgagaatcagctgtaaataatttaagtaacgttatgtgctgatatacttattgctatttaattttcccattaagaaaatggcatgcttgggtgaaaaatggggagcactctttrttagctaacatttggcagttctttattaaatgagacctcatcaggatgacctttttcagataccaayactgtttagataatttttcaaaatgcaaacatattaggagagagattatgcacagaaatcattctagttggattaaaagatttacaaaggagcagtattgaacaggaagagagacataaagttgttactttctttctacgtgtgctgctgctatcactggtttctcaaattcctgtgtgttacatacagagtacagaaatatactccaaatgtctgtactgctagagaggaca

SEQ ID NO: 71168 - DNA, 600 bp, Chicken  19866894347467_2
tgcctgcttctctgaaaaatattggatgtatcatcttgcctcctgacctcagcttgccttacttgtttggagacaatcatacaaagctttcactgaggaatgtcttctgatttaaggggtgagaatcagctgtaaataatttaagtaacgttatgtgctgatatacttattgctatttaattttcccattaagaaaatggcatgcttgggtgaaaaatggggagcactctttrttagctaacatttggcagttctttattaaatgagacctcatcaggatgacctttttcagataccaayactgtttagataatttttcaaaatgcaaacatattaggagagagattatgcacagaaatcattctagttggattaaaagatttacaaaggagcagtattgaacaggaagagagacataaagttgttactttctttctacgtgtgctgctgctatcactggtttctcaaattcctgtgtgttacatacagagtacagaaatatactccaaatgtctgtactgctagagaggacaaaatttcaagttggatattaggaaaaatttattctcagaaagagtggtcatgcattggaacaggcca

SEQ ID NO: 71169 - DNA, 600 bp, Chicken  19866894347468_1
ccagcagggacacattactgggcagacaaattagtattcatatataaatgaatgcctcttcatttatgaaaggtgccccatactttcatgttaacttagtcagtgttcattaatattttaataaatgcaaatgactattcaaccattcaaaaatttatgaacatggactaagtatggaatttggaaagtcactgaatggattgtgctgtttccatttataaaaataaatatgtcctgggtacgcttaccatctttagctctcaccggataaatgtagaattttaaaaagcacgctcttaytgcagtatttgcaagtaaagatgaaagataaactcaatttcagtctactagaatggtagcactaataggtataaaacaagagaggatctcaggcaccaaagagtttacagccctagataataaaaactgacaaaaggaaggaaaaacataaaagaaagagaatcacaaggaagactgtaatgagttagatacgcttttcttgtaactaattatgtgcaggcgtataatgaaaattgttgttatctagtatgaagacagaaggctaagatggaaaatgaagttatctaatattactctgag

SEQ ID NO: 71170 - DNA, 599 bp, Chicken  19866894347469_1
  misc_feature (1)..(90): n is any nucleotide
nnnnnnnnnnnnnnnnnnnnnnnnnnnnnnnnnnnnnnnnnnnnnnnnnnnnnnnnnnnnnnnnnnnnnnnnnnnnnnnnnnnnnnnnnncatttcaaatctacttgtattattaatagcatcaattgtaccattctagccttgggccattttctatataattttaaccaagggtttgctatcgcaacttgagaattgattgtcaatgttctgttactgtgagagtatgtctagtgttacctaagcaccgtttcccactttgacatttaaaaaagccaaagtaacccaattttatgaaawaggttcagtaaattcaaagcaggaacaacagaaaatgtctagctattaatatatttgcctttccaaccgtagtgaggaaatccagaaccttacagagaaagtagggaaatcacagtcaaaaytggaggaagaggagagacaaatgamagaagatgcattaaagaaacttaacaaggtacagagaaatgttttgtgggtattcttcctttcatctgatatcctgtgaattgatcagatagtctaaatagctaaatgtttcttctcttttctgacaaaagacacacacagaaggwaaggag

SEQ ID NO: 71171 - DNA, 600 bp, Chicken  19866894347469_2
caattgtaccattctagccttgggccattttctatataattttaaccaagggtttgctatcgcaacttgagaattgattgtcaatgttctgttactgtgagagtatgtctagtgttacctaagcaccgtttcccactttgacatttaaaaaagccaaagtaacccaattttatgaaawaggttcagtaaattcaaagcaggaacaacagaaaatgtctagctattaatatatttgcctttccaaccgtagtgaggaaatccagaaccttacagagaaagtagggaaatcacagtcaaaaytggaggaagaggagagacaaatgamagaagatgcattaaagaaacttaacaaggtacagagaaatgttttgtgggtattcttcctttcatctgatatcctgtgaattgatcagatagtctaaatagctaaatgtttcttctcttttctgacaaaagacacacacagaaggwaaggagggaggggaagtgagaggaaaaacagccctttccaatgattttatgctgaccaggtgatcatttagggcacttgcgctatcaagtcagaaaatactatttagattttctgttggaggaagctgg

SEQ ID NO: 71172 - DNA, 596 bp, Chicken  19866894347469_3
cattttctatataattttaaccaagggtttgctatcgcaacttgagaattgattgtcaatgttctgttactgtgagagtatgtctagtgttacctaagcaccgtttcccactttgacatttaaaaaagccaaagtaacccaattttatgaaawaggttcagtaaattcaaagcaggaacaacagaaaatgtctagctattaatatatttgcctttccaaccgtagtgaggaaatccagaaccttacagagaaagtagggaaatcacagtcaaaaytggaggaagaggagagacaaatgamagaagatgcattaaagaaacttaacaaggtacagagaaatgttttgtgggtattcttcctttcatctgatatcctgtgaattgatcagatagtctaaatagctaaatgtttcttctcttttctgacaaaagacacacacagaaggwaaggagggaggggaagtgagaggaaaaacagccctttccaatgattttatgctgaccaggtgatcatttagggcacttgcgctatcaagtcagaaaatactatttagattttctgttggaggaagctgggcccttttttttttttttccc

SEQ ID NO: 71173 - DNA, 450 bp, Chicken  19866894347469_4
atgaaawaggttcagtaaattcaaagcaggaacaacagaaaatgtctagctattaatatatttgcctttccaaccgtagtgaggaaatccagaaccttacagagaaagtagggaaatcacagtcaaaaytggaggaagaggagagacaaatgamagaagatgcattaaagaaacttaacaaggtacagagaaatgttttgtgggtattcttcctttcatctgatatcctgtgaattgatcagatagtctaaatagctaaatgtttcttctcttttctgacaaaagacacacacagaaggwaaggagggaggggaagtgagaggaaaaacagccctttccaatgattttatgctgaccaggtgatcatttagggcacttgcgctatcaagtcagaaaatactatttagattttctgttggaggaagctgggcccttttttttttttttccc

SEQ ID NO: 71174 - DNA, 600 bp, Chicken  19866894347474_1
ataaaaatcaccataacattgcactgtttggagaaggtagctaacaggtttttttggctatatgggctaaacacaccaagcagtaatattttaagttttttgcaattatgatacatttttcataatgcaaaagaatcttttctaaagattatctgcatcctgggctagccattttcctaacttttatgcagatgtgatctcaaattcaaagcacttagaatccaagataagcaacattaaatgagtgggaaaaagaataaaatgcagctatcctcaactgcttcttccatgaacattatraattaattattttcatgaaacatttagttttacaccagctttagaagggatatgtaaaaaggagcagtttcctgtacagttgtctcaacagggatatgatcttgtcagccactggaaaggcaaaacaaaattgcgctcactaaatttgttttcattaaggaggcttagagagtattgaagatgcagtaaaggcaaaagtatatacaacaaaagtaaggctgtgaaataagctcaaatatagagaacagaaagaaaagataatgaacagaaataatgaaacttactaagagaaacattaaa

SEQ ID NO: 71175 - DNA, 600 bp, Chicken  19866894347475_1
catcttccactagagaaaaaagccaacggccacaacaaaacggcagcaactcaggtagagtgctattgaatatgttaagcactgaatggtactggggctcttttcttcccaaaattgagtttttattggaatacaaagatagtattgtatgagcagtcaataccaccttttcctgagcagcccaaccccgtcttgcagtctcagccactcagagaaggagcttctcacatttcagggctgatctgctgtgggatccctgctctgggtccctgctgctgaaaaatgagacaccttcaaaaygaatccaatgcccagatctgtgccagtcacttccatcacaccattacaacacaccagaggaygttaattggggctaacacagctggagcacctggttcagctttctagctctgccagaggaagcttacacaacgcaagcaaatagatgacatataggtaccattaagcactgcagtgtgcaaaagcatcagagggtgtatgcctattcatccctgtttctgaaataattattaaaatagacacctgctgcctgcagaggcctcgtcggtccgagttagggtgtctcagtaggagatttct

SEQ ID NO: 71176 - DNA, 600 bp, Chicken  19866894347475_2
ctattgaatatgttaagcactgaatggtactggggctcttttcttcccaaaattgagtttttattggaatacaaagatagtattgtatgagcagtcaataccaccttttcctgagcagcccaaccccgtcttgcagtctcagccactcagagaaggagcttctcacatttcagggctgatctgctgtgggatccctgctctgggtccctgctgctgaaaaatgagacaccttcaaaaygaatccaatgcccagatctgtgccagtcacttccatcacaccattacaacacaccagaggaygttaattggggctaacacagctggagcacctggttcagctttctagctctgccagaggaagcttacacaacgcaagcaaatagatgacatataggtaccattaagcactgcagtgtgcaaaagcatcagagggtgtatgcctattcatccctgtttctgaaataattattaaaatagacacctgctgcctgcagaggcctcgtcggtccgagttagggtgtctcagtaggagatttctgtacagatgtaatgaattatgtacacatattgatctgagctgaatgaagatttgttcttctt

SEQ ID NO: 71177 - DNA, 600 bp, Chicken  19866894347482_1
cctgtgccttgctccaaatgtgaaggtggacagtcagggatgtgccaagagaaggggaggacttctgtattgtggaggaaatcttcattgagaatgtccatgatttgtctgtaagagacagtcaaaaagcggggagctgggtaactcatctgtcagccacagtttgtgtgtcaaagttagacatctgtcctttctgtgtgaagttttgagtgcagtttagctttttgttccttattgctattttcaagcatggataaatgtttagaggtgaaacatctttttaaaatgtttgcttaattrgaaagtttctctagtgattccactctgctcatcttccttagccatgctgatgctcataaaaagacctgaagctgtgaaaatgttcttttaaaagttaattccatctgaaccatcatgttttttcaggctccttggcattcgagcctcaggtcacagtgcagagaaaaaaatattcatgttcataattagcttataaataatgcagtgttctctttcagacttcatcctttcaacatgaccgtggattattgttctttgtgcactttaaatttccaagcactctgtggctcgatttttcta

SEQ ID NO: 71178 - DNA, 600 bp, Chicken  19866894347486_1
cccgagcttctcttcagcaaatgttattactctttattaatggcgagactagattaagaaagactcgtgcatgtaaaagtgaaagcacaggcagtgttaaattgtgcagtcatgagcttgttatttcccctccccccgagcatgcaagccagttagtaacctagtgatctatacatgaggctttaattggatatatgcccagagtgcagattaatatggaaaagctataaaggcatgggttcacaaactttatttgaccacatgaggactgtctgcatgatcccatgtggaatgtgcgarggattctcaaaacaaagaaataccttcatgtactcgggcagagctgcatgtgcgagccacagggtacagaggtgatgtcttggcgtggaagtgaataggctgttgatgaaatagcacttcatcagcacagtattcactgtgtgcttcgtgctttaagcagggcygaggtgcgtctggagtttccgtgttgtttacctgccttcatttctgaaattgctgaagttttctttttatgattggatataatcttggcctcctttggaggtgagggggaagaatctccctgcagtgaagtggaag

SEQ ID NO: 71179 - DNA, 446 bp, Chicken  19866894347486_2
tgatctatacatgaggctttaattggatatatgcccagagtgcagattaatatggaaaagctataaaggcatgggttcacaaactttatttgaccacatgaggactgtctgcatgatcccatgtggaatgtgcgarggattctcaaaacaaagaaataccttcatgtactcgggcagagctgcatgtgcgagccacagggtacagaggtgatgtcttggcgtggaagtgaataggctgttgatgaaatagcacttcatcagcacagtattcactgtgtgcttcgtgctttaagcagggcygaggtgcgtctggagtttccgtgttgtttacctgccttcatttctgaaattgctgaagttttctttttatgattggatataatcttggcctcctttggaggtgagggggaagaatctccctgcagtgaagtggaagcaagcagatg

SEQ ID NO: 71180 - DNA, 600 bp, Chicken  19866894347495_1
tgtaacacaaagtgtgtctttcaaagcttcataacttaaacaaacaacaaaaaaaagcaaataaaaatatatctctcacaaaagcaacacatttacctattacacctctgtgtaaaacaagtggctcactcaatcactttggtacagcgataaatgtactaaacagaactttggacttcacaagaaatcagcctgatttcttaattggaaggaaacaactggattccttcagtaagatgtttacaattcagggagcaccttcttttaagaaagatctttgcatggtggggattgtatcaygtgctcctggatccatcatttcctggaactccgggattgtagctttactgttatgttatatttcaaggacagctcttctatttttcctttaattttactgtaagagccagaactctttctcattctgttatttcagtgtaaattgaaagcaaagccttgaaactcagtagcgttactgtgggatttactgttttataactgggatcagaaaagtggccctaaactttctatgttattgtggaatggttttacaggagggaaagattactttaaggataaaacgggaaaattaatcaaaaa

SEQ ID NO: 71181 - DNA, 600 bp, Chicken  19866894347498_1
ttttgaaaggaaggaggcagcagaatctccccacgcagagcacagcgctgccccacgcgtgcagcctccacctgacctcctgcgggtaaatgcaacctagctattacgctcctctcctggctgccagatataggaacatctcctgtcagatggataattcctgggatttttacagtttgacacataaatgacatagctgaggattcgcagcttccaattctgttctacgctctgcctttttttctgccttttttttatagcatgtttctcctgcggctgagaaaatcccaccaggcaagygatggaatctacactaccaacgtcctaagagtgcacacagcataatcctgctccgctttacttcgggaggaccgtttcccattttggttaaggagaagttcataaacaccgatgggagaggtacaacaagagggtgaatgtagaactyctgtgtatctaagatgggaagaatgactcaaactaaagaagagcccatgggaaatgcaaatgaaaggtcttgagagggtgggagaggtcctgtacgcgggctctgaattaactgagataaagagtgcgttatgcaaaaagcagaagataaaa

SEQ ID NO: 71182 - DNA, 502 bp, Chicken  19866894347498_2
gatggataattcctgggatttttacagtttgacacataaatgacatagctgaggattcgcagcttccaattctgttctacgctctgcctttttttctgccttttttttatagcatgtttctcctgcggctgagaaaatcccaccaggcaagygatggaatctacactaccaacgtcctaagagtgcacacagcataatcctgctccgctttacttcgggaggaccgtttcccattttggttaaggagaagttcataaacaccgatgggagaggtacaacaagagggtgaatgtagaactyctgtgtatctaagatgggaagaatgactcaaactaaagaagagcccatgggaaatgcaaatgaaaggtcttgagagggtgggagaggtcctgtacgcgggctctgaattaactgagataaagagtgcgttatgcaaaaagcagaagataaaagagctcttgagaatgtatttaaggtttggggtgtataggaagtcaacttg

SEQ ID NO: 71183 - DNA, 600 bp, Chicken  19866894347501_1
gtccttcggctgtttatagaaaaagtatccatgagatgacaccgatccacatcatttttgcaagctccagggtttgcgctagggtgtgtgatttaaataacagatgggtaaaatcacatgtaaccaggcagctccctagtggctgtatagatgtggatgttggagagtatatgattttccaagctaaggtcagcactaacctgagctcaatttttcccccagatctgctttttctagtgctatcatgcagcttaatttttttggcttgtttcacctccttctgctgaaatcacacccctrtgaaggatccttccaatgcaaacaggggagtcacatggctccagagctgcaccatttctggaagatgagaacatacctctgtgaggtgtggaaagtgctgtctgccacattaatgaagccaaattgcagaaatctgcactgtgaatcagatggtaccatctggccctcagcgtaaaggagataagcaccctggtttataaagagtttattaaagctattagctttggaaactactcaccaaacagtacactttatacatgataaacaagaaacctctagtacttttttttttttttttta

SEQ ID NO: 71184 - DNA, 599 bp, Chicken  19866894347502_1
  misc_feature (1)..(35): n is any nucleotide
nnnnnnnnnnnnnnnnnnnnnnnnnnnnnnnnnnnggggaactatggagtctgtttaactttcaccagatcaacccaagatttggctgaacaaacagccaaataaatgctactgctggcaagaagaggcgggaggaataaacatgtggggaggaaagagccacagaggaaatgtaggaccacactttttggtggcagtgttaacataaaacggtggagctgcactaccagaatcactgtaatcatgtatttttggtggcttaaactgctgtgggaactgtgctacccacctgctgtggaratgcacacaggacactgctcaggcacygctccaggtgaacgtgggctgcagaattgggctgcagaactggggggtgaacgcacaacgcaaaaatgatgaagaatggaaagtgacaagacagaaattcagttatctgtaagaaacagcaaccatttgtaagaaagaaagaatttgtttttgcaagtgtttgtggtggactttttgacaaccacgctggaaagcacaacaaaactgcactcagaaacatactccttaagcaaaatttgctgccttaacctgaacttcccaggctctgagct

SEQ ID NO: 71185 - DNA, 599 bp, Chicken  19866894347502_2
  misc_feature (1)..(8): n is any nucleotide
nnnnnnnnggggaactatggagtctgtttaactttcaccagatcaacccaagatttggctgaacaaacagccaaataaatgctactgctggcaagaagaggcgggaggaataaacatgtggggaggaaagagccacagaggaaatgtaggaccacactttttggtggcagtgttaacataaaacggtggagctgcactaccagaatcactgtaatcatgtatttttggtggcttaaactgctgtgggaactgtgctacccacctgctgtggaratgcacacaggacactgctcaggcacygctccaggtgaacgtgggctgcagaattgggctgcagaactggggggtgaacgcacaacgcaaaaatgatgaagaatggaaagtgacaagacagaaattcagttatctgtaagaaacagcaaccatttgtaagaaagaaagaatttgtttttgcaagtgtttgtggtggactttttgacaaccacgctggaaagcacaacaaaactgcactcagaaacatactccttaagcaaaatttgctgccttaacctgaacttcccaggctctgagcttttctaagtcttgaagctgagcaatcc

SEQ ID NO: 71186 - DNA, 527 bp, Chicken  19866894347502_3
tgaacgtgggctgcagaattgggctgcagaactggggggtgaacgcacaacgcaaaaatgatgaagaatggaaagtgacaagacagaaattcagttatctgtaagaaacagcaaccatttgtaagaaagaaagaatttgtttttgcaagtgtttgtggtggactttttgacaaccacgctggaaagcacaacaaaactgcactcagaaacatactccttaagcaaaatttgctgccttaacctgaacttcccaggctctgagcttttctaagtcttgaagctgagcaatcccattatcartatgaaaatgccagagaaactggaacacttcaactttgctctcttttctatctttctgaaaaaataaaagccttttaccagttcacagtcaggctctgagtcaaagccctaccaaaaggaataattaacaatactgaaattgttccatcttgtataaataatggtctcatccctcaatttctatatagataagttatgtgtttcttttcattgacaaaggaaatagg

SEQ ID NO: 71187 - DNA, 600 bp, Chicken  19866894347506_1
tgcttggtgacagaaaaacactccttactaagcagcaagtagttacttccagtgggtaagatttactgcaggaattcaccggtgtatttggagacacaaagaggagaacaacagtgctgtgttttactttcaggtggccactgtattttggaattgttttcgagtgtttcttaagaagaatcgggtattaatgaaatgataatgtttatagaaatcgtatttcttaatgaagctatacttctaagagcagatgcatccttgcagtatttcagagatttctcattgtaaaactagagatayttttagtggtgtgtgtatgtgcatgttcagtattcagcacaaaaagcaggaattaaaaaagagcagaccttgatctcaaccatatagagttttattattttttaaagcctttttagagttgtcttgtaggcctagcattctgacagctattactgcatttggactgcacttttgtagctagcgtttctcataagaggcaaaattgtcttgattataatcccctttaagggcttgaatttttctccactttattgaacagtagaatatgttgaaattgtaggaacmttttgctacttaaar

SEQ ID NO: 71188 - DNA, 600 bp, Chicken  19866894347506_2
taaaactagagatayttttagtggtgtgtgtatgtgcatgttcagtattcagcacaaaaagcaggaattaaaaaagagcagaccttgatctcaaccatatagagttttattattttttaaagcctttttagagttgtcttgtaggcctagcattctgacagctattactgcatttggactgcacttttgtagctagcgtttctcataagaggcaaaattgtcttgattataatcccctttaagggcttgaatttttctccactttattgaacagtagaatatgttgaaattgtaggaacmttttgctacttaaartacattgcagcaggctcaggagtcactctgggaggtgcagaatcccagatgtcccagtgcagagtctttctccacccttgctgtcaatggggcagctatgaaataacatcgcattgtttccagtggagccattaaaagaagccagttatggaacaaaattaggaaactcacacagaccttaaggctgakkacagagattccagaaatggctacagcagttgcaacaactgcactcagtgttcttttcccagacctgaaataaatgtcagaaatcctgatactcaa

SEQ ID NO: 71189 - DNA, 600 bp, Chicken  19866894347506_3
ttttagtggtgtgtgtatgtgcatgttcagtattcagcacaaaaagcaggaattaaaaaagagcagaccttgatctcaaccatatagagttttattattttttaaagcctttttagagttgtcttgtaggcctagcattctgacagctattactgcatttggactgcacttttgtagctagcgtttctcataagaggcaaaattgtcttgattataatcccctttaagggcttgaatttttctccactttattgaacagtagaatatgttgaaattgtaggaacmttttgctacttaaartacattgcagcaggctcaggagtcactctgggaggtgcagaatcccagatgtcccagtgcagagtctttctccacccttgctgtcaatggggcagctatgaaataacatcgcattgtttccagtggagccattaaaagaagccagttatggaacaaaattaggaaactcacacagaccttaaggctgakkacagagattccagaaatggctacagcagttgcaacaactgcactcagtgttcttttcccagacctgaaataaatgtcagaaatcctgatactcaatattttgctgctatt

SEQ ID NO: 71190 - DNA, 600 bp, Chicken  19866894347506_4
ataagaggcaaaattgtcttgattataatcccctttaagggcttgaatttttctccactttattgaacagtagaatatgttgaaattgtaggaacmttttgctacttaaartacattgcagcaggctcaggagtcactctgggaggtgcagaatcccagatgtcccagtgcagagtctttctccacccttgctgtcaatggggcagctatgaaataacatcgcattgtttccagtggagccattaaaagaagccagttatggaacaaaattaggaaactcacacagaccttaaggctgakkacagagattccagaaatggctacagcagttgcaacaactgcactcagtgttcttttcccagacctgaaataaatgtcagaaatcctgatactcaatattttgctgctatttcacacaattttgtaattccctggtaaagcaagcattccctgggagatgttattccctgtgctattctgctgctgctttgcccttgaagtgctggaggtttttaactgtggaaatgaagatgccaaagccaagcctcctttccatcagaattccttctcgctgcttgctctgtgccatagctgtatcat

SEQ ID NO: 71191 - DNA, 600 bp, Chicken  19866894347506_5
taagaggcaaaattgtcttgattataatcccctttaagggcttgaatttttctccactttattgaacagtagaatatgttgaaattgtaggaacmttttgctacttaaartacattgcagcaggctcaggagtcactctgggaggtgcagaatcccagatgtcccagtgcagagtctttctccacccttgctgtcaatggggcagctatgaaataacatcgcattgtttccagtggagccattaaaagaagccagttatggaacaaaattaggaaactcacacagaccttaaggctgakkacagagattccagaaatggctacagcagttgcaacaactgcactcagtgttcttttcccagacctgaaataaatgtcagaaatcctgatactcaatattttgctgctatttcacacaattttgtaattccctggtaaagcaagcattccctgggagatgttattccctgtgctattctgctgctgctttgcccttgaagtgctggaggtttttaactgtggaaatgaagatgccaaagccaagcctcctttccatcagaattccttctcgctgcttgctctgtgccatagctgtatcata

SEQ ID NO: 71192 - DNA, 600 bp, Chicken  19866894347506_6
ctacagcagttgcaacaactgcactcagtgttcttttcccagacctgaaataaatgtcagaaatcctgatactcaatattttgctgctatttcacacaattttgtaattccctggtaaagcaagcattccctgggagatgttattccctgtgctattctgctgctgctttgcccttgaagtgctggaggtttttaactgtggaaatgaagatgccaaagccaagcctcctttccatcagaattccttctcgctgcttgctctgtgccatagctgtatcatagaatcatagaatggcctgrgctgaaaaggacctcaaagatcatctagtttcaactgattgtgttatttccaggctgcacgcgcacactgctggctcatgtccagyttctcatccaccaggacccccaggtccttctycacagtgctgctctcaaggagatcttcccccagtttgtataaatacctggggattgctctggcccaaatgcagcaccctgcacttggccttattgaacctcattaagttcacatgggcccacttctccagcctgtccaggtccctctggatgacttcccttccctccagtgtgtcaactgca

SEQ ID NO: 71193 - DNA, 600 bp, Chicken  19866894347506_7
ctatttcacacaattttgtaattccctggtaaagcaagcattccctgggagatgttattccctgtgctattctgctgctgctttgcccttgaagtgctggaggtttttaactgtggaaatgaagatgccaaagccaagcctcctttccatcagaattccttctcgctgcttgctctgtgccatagctgtatcatagaatcatagaatggcctgrgctgaaaaggacctcaaagatcatctagtttcaactgattgtgttatttccaggctgcacgcgcacactgctggctcatgtccagyttctcatccaccaggacccccaggtccttctycacagtgctgctctcaaggagatcttcccccagtttgtataaatacctggggattgctctggcccaaatgcagcaccctgcacttggccttattgaacctcattaagttcacatgggcccacttctccagcctgtccaggtccctctggatgacttcccttccctccagtgtgtcaactgcaccgctcagcgtgggtgttgtctgcaaacttgatgagggtgcacttgatgccatcgtctgtcattgatgctgaagagcaccagtccc

SEQ ID NO: 71194 - DNA, 600 bp, Chicken  19866894347506_8
agcaagcattccctgggagatgttattccctgtgctattctgctgctgctttgcccttgaagtgctggaggtttttaactgtggaaatgaagatgccaaagccaagcctcctttccatcagaattccttctcgctgcttgctctgtgccatagctgtatcatagaatcatagaatggcctgrgctgaaaaggacctcaaagatcatctagtttcaactgattgtgttatttccaggctgcacgcgcacactgctggctcatgtccagyttctcatccaccaggacccccaggtccttctycacagtgctgctctcaaggagatcttcccccagtttgtataaatacctggggattgctctggcccaaatgcagcaccctgcacttggccttattgaacctcattaagttcacatgggcccacttctccagcctgtccaggtccctctggatgacttcccttccctccagtgtgtcaactgcaccgctcagcgtgggtgttgtctgcaaacttgatgagggtgcacttgatgccatcgtctgtcattgatgctgaagagcaccagtcccaagactaacccctgggggagtaccacttatga

SEQ ID NO: 71195 - DNA, 600 bp, Chicken  19866894347516_1
aatgcttcccacaacccactcaaactaaaataattctgcaaaaaactaacattttctttggaacaaggagtgattttcctctgttctctctttcctttcacataggtgattttaaacatccaaaacgaggaaaggtctcacaaaagctgttcctcaagtgtgtgttgctgattttacatctctagatcatctctcatcttctaaccttgtatgttttttcagcctggttaggggaacatttgctggattaaaaagatggatttagtgggccaaattctttcctctcttatgccaatggcrkatcacctgagtttgcacctgtgttagagaatgaaygtagaattggattttgtgtattttacttttgcagttaaatttctcaraagatactgtgtttattcatagctgtcactgtagaagtaacagattttggtagctctaggaacataggcttgtgcatgggcaactttctcctgctgtttctcctgcttttccagatcctaagtcactccagaacacaaatcataaccttgtggttagttgttgatccagtttccacaggtgttcaatatgaccaaaagcgggaccaaaccaaaatgt

SEQ ID NO: 71196 - DNA, 600 bp, Chicken  19866894347516_2
atgcttcccacaacccactcaaactaaaataattctgcaaaaaactaacattttctttggaacaaggagtgattttcctctgttctctctttcctttcacataggtgattttaaacatccaaaacgaggaaaggtctcacaaaagctgttcctcaagtgtgtgttgctgattttacatctctagatcatctctcatcttctaaccttgtatgttttttcagcctggttaggggaacatttgctggattaaaaagatggatttagtgggccaaattctttcctctcttatgccaatggcrkatcacctgagtttgcacctgtgttagagaatgaaygtagaattggattttgtgtattttacttttgcagttaaatttctcaraagatactgtgtttattcatagctgtcactgtagaagtaacagattttggtagctctaggaacataggcttgtgcatgggcaactttctcctgctgtttctcctgcttttccagatcctaagtcactccagaacacaaatcataaccttgtggttagttgttgatccagtttccacaggtgttcaatatgaccaaaagcgggaccaaaccaaaatgtg

SEQ ID NO: 71197 - DNA, 600 bp, Chicken  19866894347516_3
tgcaaaaaactaacattttctttggaacaaggagtgattttcctctgttctctctttcctttcacataggtgattttaaacatccaaaacgaggaaaggtctcacaaaagctgttcctcaagtgtgtgttgctgattttacatctctagatcatctctcatcttctaaccttgtatgttttttcagcctggttaggggaacatttgctggattaaaaagatggatttagtgggccaaattctttcctctcttatgccaatggcrkatcacctgagtttgcacctgtgttagagaatgaaygtagaattggattttgtgtattttacttttgcagttaaatttctcaraagatactgtgtttattcatagctgtcactgtagaagtaacagattttggtagctctaggaacataggcttgtgcatgggcaactttctcctgctgtttctcctgcttttccagatcctaagtcactccagaacacaaatcataaccttgtggttagttgttgatccagtttccacaggtgttcaatatgaccaaaagcgggaccaaaccaaaatgtgagaggtcacagagtataataatttctggcagtgat

SEQ ID NO: 71198 - DNA, 600 bp, Chicken  19866894347516_4
ttctctctttcctttcacataggtgattttaaacatccaaaacgaggaaaggtctcacaaaagctgttcctcaagtgtgtgttgctgattttacatctctagatcatctctcatcttctaaccttgtatgttttttcagcctggttaggggaacatttgctggattaaaaagatggatttagtgggccaaattctttcctctcttatgccaatggcrkatcacctgagtttgcacctgtgttagagaatgaaygtagaattggattttgtgtattttacttttgcagttaaatttctcaraagatactgtgtttattcatagctgtcactgtagaagtaacagattttggtagctctaggaacataggcttgtgcatgggcaactttctcctgctgtttctcctgcttttccagatcctaagtcactccagaacacaaatcataaccttgtggttagttgttgatccagtttccacaggtgttcaatatgaccaaaagcgggaccaaaccaaaatgtgagaggtcacagagtataataatttctggcagtgatgctgtcgattataatacttagctgggatgcactaagtgaacagttaa

SEQ ID NO: 71199 - DNA, 600 bp, Chicken  19866894347523_1
tgctgtacgatcagatgaaacccagtgtgactctacaagaagagaaagtttgtctttatgacataaacataacgtgatcaccgtgcaaccaattttatatgcagttaagtcttctaaagaggagtggctatatggccatttggtgcataatgtattgctaacatgtagccacattagaacagacagcaaggtgggatttaatacatattatactgccacagatttcaataaaagctagtgcaagggaaatgatttcaatagcttgtagctagtatacctagctgtcacgtgctaaaatgmttaagcagatagcacataaagaggtcttcagcaagaagtgctcttgcagcagattagaaaggagttgtaaaattagttgtaatatatcccatagaaagtacagtgtaatgtatgtctgtggttagagcggtgtgagtcagtcccccaaagcgtgaatgctgggatccrgtttccatctgtcagtgtaagcaaagaccacaggagtgaaagggaagtatttgggcaaatacgattatgaagataaactgctatgtaaataactaggcagatggctgtcaggaacatgcttatatttcttac

SEQ ID NO: 71200 - DNA, 600 bp, Chicken  19866894347523_2
ccacattagaacagacagcaaggtgggatttaatacatattatactgccacagatttcaataaaagctagtgcaagggaaatgatttcaatagcttgtagctagtatacctagctgtcacgtgctaaaatgmttaagcagatagcacataaagaggtcttcagcaagaagtgctcttgcagcagattagaaaggagttgtaaaattagttgtaatatatcccatagaaagtacagtgtaatgtatgtctgtggttagagcggtgtgagtcagtcccccaaagcgtgaatgctgggatccrgtttccatctgtcagtgtaagcaaagaccacaggagtgaaagggaagtatttgggcaaatacgattatgaagataaactgctatgtaaataactaggcagatggctgtcaggaacatgcttatatttcttacccacttaaattatttaagtaatagtaagcttccatactttgcagtcacccaaagtaatgtgaaaccctacatcaacttcaccattctctgtccctccctcccttttcactgtgttttgtgttcccacaggactgtgtccccactgagactgcagcctccctggagcgg

SEQ ID NO: 71201 - DNA, 600 bp, Chicken  19866894347526_1
gggacaaatgctctgaatctgtgaggtctgctgacaaaaatgataatgaagactaaaggttttaaaagcaggcaatgtgggaaaccaaataccctcgtttccttcttttcttattcctcattttttgccacaatctgtttttcccctactaataaaaatccatgaagagctgagtgttgagagcagggctaacgcactgtgctttagtgtaacatactgaccaggcaggaactcctccctcaacagtcaacactacacacaatgtagtgtgtgtagaggcagctcatgtacttctacacrgacatggcaagggctatgaaacattattcacggagggaaacagagacagttaattccttcactttgttaaccactctttaagcctcatagacaccttcagactgtcgaagttacagaaattcatctaccgatcaggagtgactacttaaaatcctatttctgacaaatttaacagtacttcatcaattgaacccaacaagagactacatattccgtgtctcctcactgaggagcaaaacaaaaggcttaccttgatttcaatggcctcagtcgttcaattatcactatgtgttctgacct

SEQ ID NO: 71202 - DNA, 432 bp, Chicken  19866894347531_1
aatacaccgatcaatttaatctgattttaatgttaatcagaatttagatctgatttttagaatggcaactgggttgaaattttataacagtgtagccaaaagatgcaaaagaatgtaaaccattttcatatatgatttgttttgtaatttggtccgtgagtgagagcatgggcttgcaatgtcaggagtcaagccatgggagaaaaggatttcagaaaaaataatggaaatctgatgaagtcatagaatcatagaatggcctgagttgaaaaggaccataacaatcaagtttcaaccccyctgctatgtgcaaggtcgccaaccaccagaccaggctgcccagagccacatccagcctggccttgaatgcctccggggatggagcatccacaacctcctttggcagtctgttccagtgcgtcaccaccctct

SEQ ID NO: 71203 - DNA, 600 bp, Chicken  19866894347541_1
atgcataatatcctgaactattccacgcactcatagcttaatttggagaagaaccatgaacacatctggggttagtccacgggctcacgctgctagaaacagaaatgctacagaaaccacaacctctcaataaaacacaagaaacttaaaacaggcactttttccagaaggatttggtgtgaaagacaatgtgaacgcaacaaaggtgaaagaaaactgcttttgcttttatacaaatcctgaacagtgatgcaagagtgtgaacagactttagatttccacacactgaaaggctttaakgtgggtactccgaagtcagagagtggggtatctgtctgaggatgactgcagtgaycagccctgtagtcagggcagggctggcagcagagaataagaagcaaaagtcactgaggcactgctgcccactgtgtgctgagatcagattctcccaaasgccatataatgctaaaagagctgtaccacaatcaggccagaaacgtaacgtcaccaagtttcactgtgatagtgatactttgataacaagggctgataattttttcagatctgttctgagaaagaagaatttaatcttcaaataaa

SEQ ID NO: 71204 - DNA, 600 bp, Chicken  19866894347541_2
atgaacacatctggggttagtccacgggctcacgctgctagaaacagaaatgctacagaaaccacaacctctcaataaaacacaagaaacttaaaacaggcactttttccagaaggatttggtgtgaaagacaatgtgaacgcaacaaaggtgaaagaaaactgcttttgcttttatacaaatcctgaacagtgatgcaagagtgtgaacagactttagatttccacacactgaaaggctttaakgtgggtactccgaagtcagagagtggggtatctgtctgaggatgactgcagtgaycagccctgtagtcagggcagggctggcagcagagaataagaagcaaaagtcactgaggcactgctgcccactgtgtgctgagatcagattctcccaaasgccatataatgctaaaagagctgtaccacaatcaggccagaaacgtaacgtcaccaagtttcactgtgatagtgatactttgataacaagggctgataattttttcagatctgttctgagaaagaagaatttaatcttcaaataaaggcagctatacttaactttgtcatttcttcttggactagtccagccacatctcct

SEQ ID NO: 71205 - DNA, 593 bp, Chicken  19866894347541_3
gcactttttccagaaggatttggtgtgaaagacaatgtgaacgcaacaaaggtgaaagaaaactgcttttgcttttatacaaatcctgaacagtgatgcaagagtgtgaacagactttagatttccacacactgaaaggctttaakgtgggtactccgaagtcagagagtggggtatctgtctgaggatgactgcagtgaycagccctgtagtcagggcagggctggcagcagagaataagaagcaaaagtcactgaggcactgctgcccactgtgtgctgagatcagattctcccaaasgccatataatgctaaaagagctgtaccacaatcaggccagaaacgtaacgtcaccaagtttcactgtgatagtgatactttgataacaagggctgataattttttcagatctgttctgagaaagaagaatttaatcttcaaataaaggcagctatacttaactttgtcatttcttcttggactagtccagccacatctcctttattcattataattctaaaggcgttgggtgatttttggtatactattggcatattcattgttggctttttttttttttttttttttttttt

SEQ ID NO: 71206 - DNA, 599 bp, Chicken  19866894347546_1
  misc_feature (1)..(55): n is any nucleotide
nnnnnnnnnnnnnnnnnnnnnnnnnnnnnnnnnnnnnnnnnnnnnnnnnnnnnnnacatgctccaacaggtccatgtctctcctgttttaagggactacacatctgcacacagaactccaagtgaggtctcaccagtacagagcagaggggtgggatcaccttgcttgacctgctgactgccttggcacactgcttgattctgtctaggtctccctggatggcatcccattcttcaggcatgttgacaccacacagcttggtgtcagtggcaaacttgctgagggtgcactcgatcccaytgcccawgtaattgattatgagcatcagtcccagtactgatccctgagagacatcactcatcactgatctccatctgaacatctactcgttgaccaccactctstgagtatggtctcatctatcaaatagtccacacctaacacatccatttctttccaattcraagaggctaacaaaacggagtctgacatggaagtgcatataattcctccatgcagaaaaatggtacgcactaacattcatcaatgcttgctgaatgtttctggagaccaaaargagtatgtgagtgcagtgaggc

SEQ ID NO: 71207 - DNA, 599 bp, Chicken  19866894347546_2
  misc_feature (1)..(48): n is any nucleotide
nnnnnnnnnnnnnnnnnnnnnnnnnnnnnnnnnnnnnnnnnnnnnnnnacatgctccaacaggtccatgtctctcctgttttaagggactacacatctgcacacagaactccaagtgaggtctcaccagtacagagcagaggggtgggatcaccttgcttgacctgctgactgccttggcacactgcttgattctgtctaggtctccctggatggcatcccattcttcaggcatgttgacaccacacagcttggtgtcagtggcaaacttgctgagggtgcactcgatcccaytgcccawgtaattgattatgagcatcagtcccagtactgatccctgagagacatcactcatcactgatctccatctgaacatctactcgttgaccaccactctstgagtatggtctcatctatcaaatagtccacacctaacacatccatttctttccaattcraagaggctaacaaaacggagtctgacatggaagtgcatataattcctccatgcagaaaaatggtacgcactaacattcatcaatgcttgctgaatgtttctggagaccaaaargagtatgtgagtgcagtgaggcagtgggt

SEQ ID NO: 71208 - DNA, 600 bp, Chicken  19866894347546_3
tgcacacagaactccaagtgaggtctcaccagtacagagcagaggggtgggatcaccttgcttgacctgctgactgccttggcacactgcttgattctgtctaggtctccctggatggcatcccattcttcaggcatgttgacaccacacagcttggtgtcagtggcaaacttgctgagggtgcactcgatcccaytgcccawgtaattgattatgagcatcagtcccagtactgatccctgagagacatcactcatcactgatctccatctgaacatctactcgttgaccaccactctstgagtatggtctcatctatcaaatagtccacacctaacacatccatttctttccaattcraagaggctaacaaaacggagtctgacatggaagtgcatataattcctccatgcagaaaaatggtacgcactaacattcatcaatgcttgctgaatgtttctggagaccaaaargagtatgtgagtgcagtgaggcagtgggtgttacatttcagcagtggcaacagagatgtaaatgataggccctgttctgaatggccttgcacaactgtcacacaatgaaatgcagaatatctccatc

SEQ ID NO: 71209 - DNA, 600 bp, Chicken  19866894347546_4
cttgacctgctgactgccttggcacactgcttgattctgtctaggtctccctggatggcatcccattcttcaggcatgttgacaccacacagcttggtgtcagtggcaaacttgctgagggtgcactcgatcccaytgcccawgtaattgattatgagcatcagtcccagtactgatccctgagagacatcactcatcactgatctccatctgaacatctactcgttgaccaccactctstgagtatggtctcatctatcaaatagtccacacctaacacatccatttctttccaattcraagaggctaacaaaacggagtctgacatggaagtgcatataattcctccatgcagaaaaatggtacgcactaacattcatcaatgcttgctgaatgtttctggagaccaaaargagtatgtgagtgcagtgaggcagtgggtgttacatttcagcagtggcaacagagatgtaaatgataggccctgttctgaatggccttgcacaactgtcacacaatgaaatgcagaatatctccatcagctaatccacacaaactggcaaattatggacagggaagtgtatatcgaactgagtgtta

SEQ ID NO: 71210 - DNA, 600 bp, Chicken  19866894347546_5
gctgagggtgcactcgatcccaytgcccawgtaattgattatgagcatcagtcccagtactgatccctgagagacatcactcatcactgatctccatctgaacatctactcgttgaccaccactctstgagtatggtctcatctatcaaatagtccacacctaacacatccatttctttccaattcraagaggctaacaaaacggagtctgacatggaagtgcatataattcctccatgcagaaaaatggtacgcactaacattcatcaatgcttgctgaatgtttctggagaccaaaargagtatgtgagtgcagtgaggcagtgggtgttacatttcagcagtggcaacagagatgtaaatgataggccctgttctgaatggccttgcacaactgtcacacaatgaaatgcagaatatctccatcagctaatccacacaaactggcaaattatggacagggaagtgtatatcgaactgagtgttagtttcaatgtattggaaatgatggtggcaacgttggaatatcagaaagtttgtgccaggtgggcctcagaaatgctcacacaagaacagagggaaaaccatttgaaagtttgt

SEQ ID NO: 71211 - DNA, 599 bp, Chicken  19866894347547_1
  misc_feature (1)..(168): n is any nucleotide
nnnnnnnnnnnnnnnnnnnnnnnnnnnnnnnnnnnnnnnnnnnnnnnnnnnnnnnnnnnnnnnnnnnnnnnnnnnnnnnnnnnnnnnnnnnnnnnnnnnnnnnnnnnnnnnnnnnnnnnnnnnnnnnnnnnnnnnnnnnnnnnnnnnnnnnnnnnnnnnnnnnnnnnntataaattaatagaaatcaagaaatcaccttcccaagaccctttgctgataatttctgctaaggtaactgcaatagtcctggaatctttctgtacagttctttcctctagcttcattgtttcatatacttaygtaagaagctggactgccctactgagaaaaagataaaaaaagattcaacttctcttcaaatctcatatgccacctgctgactaagtatgcactggtacctgacagaaccttcctgctgccacagaaaggaagctgggtctccatgcacctttttgtgaccctctatgtttacaaccaatgtgagcaactgcctatggcagcatattgctggggactgcaaaacagccctggccctgctgcctccttttcgtgccagagcttgcaagaagcaagactggttggtggagatgctgaggaaa

SEQ ID NO: 71212 - DNA, 600 bp, Chicken  19866894347547_2
gtacctgacagaaccttcctgctgccacagaaaggaagctgggtctccatgcacctttttgtgaccctctatgtttacaaccaatgtgagcaactgcctatggcagcatattgctggggactgcaaaacagccctggccctgctgcctccttttcgtgccagagcttgcaagaagcaagactggttggtggagatgctgaggaaaggctcacctgacaggcctaacacagctggctctgccaagtcaggcctcttgtagctgtgagaagtgaccaactgcagtcttctaaaacacaagcrgcattcacactgttggctagaaagattccaaagattwcctacattaaatcatctacaatgcaaagactgctgtctgaaggtaatgtaggaaaactcatcagacaaacccaaccggaaccctcatctgaggctccactgtccctcaataaaataattgttctttctccaattgcgcttttccctttgctcttcactgcatagtcatctttggctgtcctttcattctcctctgactgttctcagatatttgtacagaagcagttcacttccagaaactctttttcatgactacttacttct

SEQ ID NO: 71213 - DNA, 600 bp, Chicken  19866894347547_3
gctgggtctccatgcacctttttgtgaccctctatgtttacaaccaatgtgagcaactgcctatggcagcatattgctggggactgcaaaacagccctggccctgctgcctccttttcgtgccagagcttgcaagaagcaagactggttggtggagatgctgaggaaaggctcacctgacaggcctaacacagctggctctgccaagtcaggcctcttgtagctgtgagaagtgaccaactgcagtcttctaaaacacaagcrgcattcacactgttggctagaaagattccaaagattwcctacattaaatcatctacaatgcaaagactgctgtctgaaggtaatgtaggaaaactcatcagacaaacccaaccggaaccctcatctgaggctccactgtccctcaataaaataattgttctttctccaattgcgcttttccctttgctcttcactgcatagtcatctttggctgtcctttcattctcctctgactgttctcagatatttgtacagaagcagttcacttccagaaactctttttcatgactacttacttctcttcccactgctgcctgctaaattgaagttgcgtatt

SEQ ID NO: 71214 - DNA, 600 bp, Chicken  19866894347552_1
tagtaaatttctttgcctccacctattgctcttttgggacaacatctcctatactcgctcatgttgccaggccccgtgtaccagccacatcctctcagccgtatggctgagcgaggttgcatggttttggcttgaaacacagttggctttctattagaaatcatcagacggtgtgcttgtattttgttgctaccatttaagtgtgatgtactttcaatattgtgttttccccaaatctatcttctgcgcgtctcaacaagtatgacccagatgacctacatttctgaatttctattatarttatyctgaaaatatgttttgaataatttttcagtctttggaggctgaatgtgctttgttccttcctcgaccccttcctctacttgacagcttggattctggtttaccagcagagtaattagtgtaatggaggcaaatttcattttgtatttgctgtgagaggtaagatgtgtactgtcaatgcaattgtaaagtgtaccttcattgtagaattgttccagtatataaacctcaaaatagcccatatagtcatcagtcacgaggaaaatcttcaactgcgagtagggcataagctcctgt

SEQ ID NO: 71215 - DNA, 600 bp, Chicken  19866894347552_2
aatttctttgcctccacctattgctcttttgggacaacatctcctatactcgctcatgttgccaggccccgtgtaccagccacatcctctcagccgtatggctgagcgaggttgcatggttttggcttgaaacacagttggctttctattagaaatcatcagacggtgtgcttgtattttgttgctaccatttaagtgtgatgtactttcaatattgtgttttccccaaatctatcttctgcgcgtctcaacaagtatgacccagatgacctacatttctgaatttctattatarttatyctgaaaatatgttttgaataatttttcagtctttggaggctgaatgtgctttgttccttcctcgaccccttcctctacttgacagcttggattctggtttaccagcagagtaattagtgtaatggaggcaaatttcattttgtatttgctgtgagaggtaagatgtgtactgtcaatgcaattgtaaagtgtaccttcattgtagaattgttccagtatataaacctcaaaatagcccatatagtcatcagtcacgaggaaaatcttcaactgcgagtagggcataagctcctgtcagat

SEQ ID NO: 71216 - DNA, 600 bp, Chicken  19866894347561_1
tggcgtgttgttttagtggttggagtatgacataaagtaaaacccataagttcaaagtgtctcgctgtttacgggaatcccaccacccgagaactggcaggagtgccccggattactcatctgcattaactctttggataaacattttcctgttgagcacaaggttgagctgcacattcactgacaaaaacccatgttcaaaaataaacacaacctatgcctgaattatgggtttattacatacaaaatacatacatatatatttatgcaagggcagctcagctcatcacgacatgctcrttttccagactagcaaattctccttctgcaaagggatctgggaggaataattaccagggaaccgagatctaaacattcatgactgagcggcattaaaccatgccagctacgtgagcccaaggatgctttgtaactcctgctctgcagtgagcttggaaggagaaggagctggcagacatggtgggtgtgctgcagcgcttctgaactgaactgggaaagcgatctaatgctctaatggcagaaacacctacatctcccacatataccataataatttattggcatccattgaatttccat

SEQ ID NO: 71217 - DNA, 600 bp, Chicken  19866894347561_2
gcacatctgaattgctttacactttttttgtctctttttttcttctcttttttctttaccgtcaagcatcaatgtgtcaccaactccatttttccccatttgattttcccacaatttttctaacactttaaaagtgtaatagggacagaattctggtaaatcccagaacttatacactgatctttagcatcagtgcagcagtaatgcttatagtccagtgcagcagatatcatggtctaaggaaaagagtaacaggatgctatttactggaaaacaaactggttcaatgctctgggaacrtgatcaagccagccgctctgaaaggggagggcttcccaattaatctaatcccaggagccctttgggggcctgctggcaaatctcagactaaattgtctrygaaraatccaaaagaaaggacagcaacaaaccctgtgtgctgggagggccagcactgaggttttgcatggacgtcagcagcaaaggctctggcacaaggagcacacagcagacagcctgacccaatgcaggacggagccgtggcctgactcactgctgagcacacccaaaggggctggggctgtcctttcaccttcgttt

SEQ ID NO: 71218 - DNA, 600 bp, Chicken  19866894347561_3
ttgattttcccacaatttttctaacactttaaaagtgtaatagggacagaattctggtaaatcccagaacttatacactgatctttagcatcagtgcagcagtaatgcttatagtccagtgcagcagatatcatggtctaaggaaaagagtaacaggatgctatttactggaaaacaaactggttcaatgctctgggaacrtgatcaagccagccgctctgaaaggggagggcttcccaattaatctaatcccaggagccctttgggggcctgctggcaaatctcagactaaattgtctrygaaraatccaaaagaaaggacagcaacaaaccctgtgtgctgggagggccagcactgaggttttgcatggacgtcagcagcaaaggctctggcacaaggagcacacagcagacagcctgacccaatgcaggacggagccgtggcctgactcactgctgagcacacccaaaggggctggggctgtcctttcaccttcgttttccagctttaacatgtccttgtcaggtgcccactttgaaatggctttacagctctaacaagccctttctttgcatcaaaatcaggcagcagcgcagctg

SEQ ID NO: 71219 - DNA, 600 bp, Chicken  19866894347561_4
tgattttcccacaatttttctaacactttaaaagtgtaatagggacagaattctggtaaatcccagaacttatacactgatctttagcatcagtgcagcagtaatgcttatagtccagtgcagcagatatcatggtctaaggaaaagagtaacaggatgctatttactggaaaacaaactggttcaatgctctgggaacrtgatcaagccagccgctctgaaaggggagggcttcccaattaatctaatcccaggagccctttgggggcctgctggcaaatctcagactaaattgtctrygaaraatccaaaagaaaggacagcaacaaaccctgtgtgctgggagggccagcactgaggttttgcatggacgtcagcagcaaaggctctggcacaaggagcacacagcagacagcctgacccaatgcaggacggagccgtggcctgactcactgctgagcacacccaaaggggctggggctgtcctttcaccttcgttttccagctttaacatgtccttgtcaggtgcccactttgaaatggctttacagctctaacaagccctttctttgcatcaaaatcaggcagcagcgcagctgt

SEQ ID NO: 71220 - DNA, 600 bp, Chicken  19866894347561_5
tttcccacaatttttctaacactttaaaagtgtaatagggacagaattctggtaaatcccagaacttatacactgatctttagcatcagtgcagcagtaatgcttatagtccagtgcagcagatatcatggtctaaggaaaagagtaacaggatgctatttactggaaaacaaactggttcaatgctctgggaacrtgatcaagccagccgctctgaaaggggagggcttcccaattaatctaatcccaggagccctttgggggcctgctggcaaatctcagactaaattgtctrygaaraatccaaaagaaaggacagcaacaaaccctgtgtgctgggagggccagcactgaggttttgcatggacgtcagcagcaaaggctctggcacaaggagcacacagcagacagcctgacccaatgcaggacggagccgtggcctgactcactgctgagcacacccaaaggggctggggctgtcctttcaccttcgttttccagctttaacatgtccttgtcaggtgcccactttgaaatggctttacagctctaacaagccctttctttgcatcaaaatcaggcagcagcgcagctgttttt

SEQ ID NO: 71221 - DNA, 600 bp, Chicken  19866894347573_1
acctcctcctgcttcctcctgaaggacgcattcaaggccaggctggatggggctttgagcaacctgatctggtgggacgtatccctgcctatagcaggggattggaactagatgatcataaagattccttccaacccaaaccactctacaattctgtgaaaacataaatgtggcttggctcactatgaaatatatacacatttttcacacgttgaaatcagaataagaaaataattatcccaaaaccagcacgtaaaaatagaaattccctacaaaaatatgttttttccccctagaaargaaatggcagcaaagaaacacgttttcacataagcctgctctattgtcatagctacaattccgatttccagtaaaactatgcacctctcatagacagcaaatattacaggaatacttgggagtgtacctgatcctaatgttttcattctgcaggtgcagcaccataccctaaatttcacaatggtatgttagaacacatatagcctataagtttactctatttttattgttctgctgtttctttttcttctccattcattcagtatttagagacttaagctactaaattgaggggaaaaa

SEQ ID NO: 71222 - DNA, 600 bp, Chicken  19866894347585_1
tatgtcaaattaccttccacattctcagtttgtaaaagctgtgttaccaaagagacaagatcctgctatgacgactatttaagtaaaagtgcatcctttctgatattgccaaagagtctgttgtgggaggatggcagttcacacccaattacacaccatgacggattcgtatttcttgatcaatggttttgaagccttctggaacaacactgcacaatgacccttcgtcttaaagaccaaataagatgattagtggcatacagaaaaaaagctcagaatttcatgcatgtcagaaaaacycttaaccactttctgtctgtggcagtgctcctgaactggaagaaacttcagtcactccagcacagagaaagctgttcaatggaaacaaacaactgcactattagagcagtaacaccactgtccctgaaaggcttccatttaacaaaagctatatcacaatttgaaaccaaaagcaaaatacttgtgcatttattactagaactttggatttctggagtttgaaaacacaatggaaatcacaaatgttactgaagattcagtgcacgtcagtgtgatgaggcgtattagtattgctgacag

SEQ ID NO: 71223 - DNA, 599 bp, Chicken  19866894347592_1
  misc_feature (1)..(114): n is any nucleotide
nnnnnnnnnnnnnnnnnnnnnnnnnnnnnnnnnnnnnnnnnnnnnnnnnnnnnnnnnnnnnnnnnnnnnnnnnnnnnnnnnnnnnnnnnnnnnnnnnnnnnnnnnnnnnnnnnnctgcactttctacttgagtcacccgaccaaagccagtgtgcactgttgcactgtcaggtgggtctgaaagggctctgctatgcctgtgagctgtgtgctgctgtatttgcatgaccattaccttctcaattttcttggaatgcagacagttaaaaaataaaaaataaaaaaattagagagagaggragattccttatgacaagctgcaaatcttcattgtctttttcagctccaagagraggatcctagcattttcatcacaagttrcaaagagcttgactcacacattacttctgttgcrtacttaggatttctcctagcagttgtttgcctctgctaatagttttcatagcaaagtttgggctaaccttatggctttggccaggctgcaaataataaaaacatagacaaattgttttctttgggctgtctatttcttttcagaaatgttttttgaatatccagtattattgtgaattccccaa

SEQ ID NO: 71224 - DNA, 599 bp, Chicken  19866894347592_2
  misc_feature (1)..(61): n is any nucleotide
nnnnnnnnnnnnnnnnnnnnnnnnnnnnnnnnnnnnnnnnnnnnnnnnnnnnnnnnnnnnnctgcactttctacttgagtcacccgaccaaagccagtgtgcactgttgcactgtcaggtgggtctgaaagggctctgctatgcctgtgagctgtgtgctgctgtatttgcatgaccattaccttctcaattttcttggaatgcagacagttaaaaaataaaaaataaaaaaattagagagagaggragattccttatgacaagctgcaaatcttcattgtctttttcagctccaagagraggatcctagcattttcatcacaagttrcaaagagcttgactcacacattacttctgttgcrtacttaggatttctcctagcagttgtttgcctctgctaatagttttcatagcaaagtttgggctaaccttatggctttggccaggctgcaaataataaaaacatagacaaattgttttctttgggctgtctatttcttttcagaaatgttttttgaatatccagtattattgtgaattccccaatgatgcagtgatttttgctccccctgctgtctctacagcagcaaattaaccaa

SEQ ID NO: 71225 - DNA, 599 bp, Chicken  19866894347592_3
  misc_feature (1)..(33): n is any nucleotide
nnnnnnnnnnnnnnnnnnnnnnnnnnnnnnnnnctgcactttctacttgagtcacccgaccaaagccagtgtgcactgttgcactgtcaggtgggtctgaaagggctctgctatgcctgtgagctgtgtgctgctgtatttgcatgaccattaccttctcaattttcttggaatgcagacagttaaaaaataaaaaataaaaaaattagagagagaggragattccttatgacaagctgcaaatcttcattgtctttttcagctccaagagraggatcctagcattttcatcacaagttrcaaagagcttgactcacacattacttctgttgcrtacttaggatttctcctagcagttgtttgcctctgctaatagttttcatagcaaagtttgggctaaccttatggctttggccaggctgcaaataataaaaacatagacaaattgttttctttgggctgtctatttcttttcagaaatgttttttgaatatccagtattattgtgaattccccaatgatgcagtgatttttgctccccctgctgtctctacagcagcaaattaaccaatccttttgcccaccgtgaatgtgtattg

SEQ ID NO: 71226 - DNA, 600 bp, Chicken  19866894347592_4
tgcactttctacttgagtcacccgaccaaagccagtgtgcactgttgcactgtcaggtgggtctgaaagggctctgctatgcctgtgagctgtgtgctgctgtatttgcatgaccattaccttctcaattttcttggaatgcagacagttaaaaaataaaaaataaaaaaattagagagagaggragattccttatgacaagctgcaaatcttcattgtctttttcagctccaagagraggatcctagcattttcatcacaagttrcaaagagcttgactcacacattacttctgttgcrtacttaggatttctcctagcagttgtttgcctctgctaatagttttcatagcaaagtttgggctaaccttatggctttggccaggctgcaaataataaaaacatagacaaattgttttctttgggctgtctatttcttttcagaaatgttttttgaatatccagtattattgtgaattccccaatgatgcagtgatttttgctccccctgctgtctctacagcagcaaattaaccaatccttttgcccaccgtgaatgtgtattggtaatgtgcatgaacagggtatttttgctaaaaac

SEQ ID NO: 71227 - DNA, 600 bp, Chicken  19866894347592_5
ttcttttcagaaatgttttttgaatatccagtattattgtgaattccccaatgatgcagtgatttttgctccccctgctgtctctacagcagcaaattaaccaatccttttgcccaccgtgaatgtgtattggtaatgtgcatgaacagggtatttttgctaaaaactaacttccagtgaaaggagaatggagctatgctgtatttaaaaagccagcccagggaatattctatattttagtccccaacggcagtatgttctaagcaaaaagttgacaaaaattgatcaagtgggaagatwagttactcttcwttaaagaggagttatattactaacactctttgagtctgagaatgcgtaccttggaattgatcagtattcctgcagtgaaattactgctttattaagaacccttttcagaggtgtaggtttgctttgctttccagtgagctgatctgctgacactttccttcaaaattaattgtatatatctggtcaggttctgaaaagaccagagccacctgcttttgagggcatgaaggttgtcacagtggttgtgcaactgtggagggaaatgcggcctatgtgtgggggcagcag

SEQ ID NO: 71228 - DNA, 600 bp, Chicken  19866894347592_6
atgttttttgaatatccagtattattgtgaattccccaatgatgcagtgatttttgctccccctgctgtctctacagcagcaaattaaccaatccttttgcccaccgtgaatgtgtattggtaatgtgcatgaacagggtatttttgctaaaaactaacttccagtgaaaggagaatggagctatgctgtatttaaaaagccagcccagggaatattctatattttagtccccaacggcagtatgttctaagcaaaaagttgacaaaaattgatcaagtgggaagatwagttactcttcwttaaagaggagttatattactaacactctttgagtctgagaatgcgtaccttggaattgatcagtattcctgcagtgaaattactgctttattaagaacccttttcagaggtgtaggtttgctttgctttccagtgagctgatctgctgacactttccttcaaaattaattgtatatatctggtcaggttctgaaaagaccagagccacctgcttttgagggcatgaaggttgtcacagtggttgtgcaactgtggagggaaatgcggcctatgtgtgggggcagcagaggtgggcttgc

SEQ ID NO: 71229 - DNA, 600 bp, Chicken  19866894347604_1
acacctctagaatatgcctcttctatactctttctttcatcatttgtaaggccactatggtgataggcaacaccaaaaggaattgtttgcctcagaacaggacagatgcttccatttccaatatcctttaggttcttaatgaggtcctgtttctctttctccctgtgagctctgaattctctttgagaacaaaaaacatttcttcagactttgaccaattaataaccactttaaaaaattaaggcagacggatcttctacatttctgttcactatccattcctgcaactaaatatgtgartttggataaagatttgtttctcataacagtaatacagaagtagagactgaagtcacccacractgatttttttgttgttgtttggaagcatgggtacagaaggcatcaaatattgattaggtgtgtatcaggcacattgaagacgagagggaaggtcaatatcagcttatagcaaagcctatagacacaaaaattgcttccaagatcggtggcaggggaatttgaatatcgctgtaatttcttcctacgtaccatttaaactttgctagactacaattatatcaaatcaaacttatatcg

SEQ ID NO: 71230 - DNA, 600 bp, Chicken  19866894347604_2
gataggcaacaccaaaaggaattgtttgcctcagaacaggacagatgcttccatttccaatatcctttaggttcttaatgaggtcctgtttctctttctccctgtgagctctgaattctctttgagaacaaaaaacatttcttcagactttgaccaattaataaccactttaaaaaattaaggcagacggatcttctacatttctgttcactatccattcctgcaactaaatatgtgartttggataaagatttgtttctcataacagtaatacagaagtagagactgaagtcacccacractgatttttttgttgttgtttggaagcatgggtacagaaggcatcaaatattgattaggtgtgtatcaggcacattgaagacgagagggaaggtcaatatcagcttatagcaaagcctatagacacaaaaattgcttccaagatcggtggcaggggaatttgaatatcgctgtaatttcttcctacgtaccatttaaactttgctagactacaattatatcaaatcaaacttatatcgagtcaaacaaatctcgatttcttttgtccatgaagcttagtttagtaattacatcctctaa

SEQ ID NO: 71231 - DNA, 599 bp, Chicken  19866894347607_1
  misc_feature (1)..(78): n is any nucleotide
nnnnnnnnnnnnnnnnnnnnnnnnnnnnnnnnnnnnnnnnnnnnnnnnnnnnnnnnnnnnnnnnnnnnnnnnnnnnnntatattttgccaaaactctgtacctcactgtttgcattccaaaggttatggcttacctttctgagcacaggtgttcccagactggactcttcaaccaacatgagtgatttttccaaactgcagccagcatctggtgccatcagcagggaaagcagagtagcaacaaagccaaatctttcaaaatggcttacaacttgttgggtcttgctccttttcttctaytcttccatcagttgttttctcccaaaagtttgcttttggaaaatttctgtccaaatcagaacacagttgattaaataatgagctctggcatatggtttagtttaccctattttaacaaatggtattttaaaaaggatttatttttcaagctagtcttggtgtccagccctgagaacctgcttgccaagaagaaataggaagatggaggaaattgcctgaaaataagggttgggggggatctggcttgtggaggagactctattaattmtccactcctttgccctggagagccattcaca

SEQ ID NO: 71232 - DNA, 600 bp, Chicken  19866894347607_2
caacttgttgggtcttgctccttttcttctaytcttccatcagttgttttctcccaaaagtttgcttttggaaaatttctgtccaaatcagaacacagttgattaaataatgagctctggcatatggtttagtttaccctattttaacaaatggtattttaaaaaggatttatttttcaagctagtcttggtgtccagccctgagaacctgcttgccaagaagaaataggaagatggaggaaattgcctgaaaataagggttgggggggatctggcttgtggaggagactctattaattmtccactcctttgccctggagagccattcacacctctgtattcgaattcygactccctcttgaattcagtgagatcagggtgataaaatgtacatcaagtataagaggcatggaaagacatcagtggttagagtaggtaaagagtgcttttactgtctttctcagccctgcttggtaaaattaggtgtacaaaaggtatcatgtggttcccagagagaggaagaggtagtccgaactgaaactgcaagaagggaaaatgataaaaagggaacacgaaggttggatgcagagagctattttc

SEQ ID NO: 71233 - DNA, 600 bp, Chicken  19866894347607_3
tctcccaaaagtttgcttttggaaaatttctgtccaaatcagaacacagttgattaaataatgagctctggcatatggtttagtttaccctattttaacaaatggtattttaaaaaggatttatttttcaagctagtcttggtgtccagccctgagaacctgcttgccaagaagaaataggaagatggaggaaattgcctgaaaataagggttgggggggatctggcttgtggaggagactctattaattmtccactcctttgccctggagagccattcacacctctgtattcgaattcygactccctcttgaattcagtgagatcagggtgataaaatgtacatcaagtataagaggcatggaaagacatcagtggttagagtaggtaaagagtgcttttactgtctttctcagccctgcttggtaaaattaggtgtacaaaaggtatcatgtggttcccagagagaggaagaggtagtccgaactgaaactgcaagaagggaaaatgataaaaagggaacacgaaggttggatgcagagagctattttctaagtagaagagcaaaggactgcatgaaaatagctaaggaaataaaaaa

SEQ ID NO: 71234 - DNA, 600 bp, Chicken  19866894347613_1
ccagtggggacataaggcacaactccagagtaaagtgtgtgttttaaaaagcaccttttgggtaacagtgggaataacccccttgcaagacactgtgcagatttgccggaatctgctgcccagatcccagtatctcagaaggaatgtacccttcccacgactgggtgaacatcagggagattcacaccattcccagacagcaatcaccaggatgcttgtaccttctcatcgtttctttgaggctgatctcatctacctatgaccagtttatgtgagcagttttctttactagctgtacakcagtgggcygccatcagattcttctgctccatccaaagcaaagagtggctgccctcagctgcccccaggggccactgcctgcttctgcctcccatccccaactgcagtgctgctgtctgagctctgtaactgcatcacagctcaatcagctctaaaaccttacgtaactcctgtctgcttatggagacacggctttgaaatctttaacctggtatcttcttcaagatatagcctcattctcctcacccagcaattctttatctatttgctctgtgttagtaggggatagaatctggtgaa

SEQ ID NO: 71235 - DNA, 600 bp, Chicken  19866894347613_2
acataaggcacaactccagagtaaagtgtgtgttttaaaaagcaccttttgggtaacagtgggaataacccccttgcaagacactgtgcagatttgccggaatctgctgcccagatcccagtatctcagaaggaatgtacccttcccacgactgggtgaacatcagggagattcacaccattcccagacagcaatcaccaggatgcttgtaccttctcatcgtttctttgaggctgatctcatctacctatgaccagtttatgtgagcagttttctttactagctgtacakcagtgggcygccatcagattcttctgctccatccaaagcaaagagtggctgccctcagctgcccccaggggccactgcctgcttctgcctcccatccccaactgcagtgctgctgtctgagctctgtaactgcatcacagctcaatcagctctaaaaccttacgtaactcctgtctgcttatggagacacggctttgaaatctttaacctggtatcttcttcaagatatagcctcattctcctcacccagcaattctttatctatttgctctgtgttagtaggggatagaatctggtgaaggggcaccc

SEQ ID NO: 71236 - DNA, 600 bp, Chicken  19866894347622_1
aatgcagcgcaaaaccctaaaacacattgtaagctcagttacttggaagaaaactcactaatgcagtatgtaactgagcctttatgagagagtaaataggagggaaccaagggctagcccttcctgctatgcgggagatctcagcattgcgaggtgtctgctttccacgcagagataaccttctcagagatgtgctttggctcaaagggacaggatcctacagaacgtaatcactgtgtattaggtgacagcctgcaggctggagttagaacaaaggctccgcaacacaagtcagccacrttaaaagaaaactgcaaccaattattatgctacagtggcttagccaaggaagtctgggatttttccactcctatcaacttcttttggacaatattctccctttccctacgccccacttttcatttcccggaacatgctgggaacatcccacaaagatcacagttccacttgccatctctctgggtttcccagctcacaacaaggggcgtgtaatccatcttcacatttatcagacactgaggagtttgttttcaagacttcttgccaagagctcccagaattcttcactttggtttgcaa

SEQ ID NO: 71237 - DNA, 600 bp, Chicken  19866894347640_1
aagtctgttgtgctttctttcctgggtgagggccctactcgtctcacatctccaacgcagagtctttccagtatggtgtccacaggcacaacttcttggtcaggctgttctcttctgacctggtacgccaggccgatgtaggcatccagtgtctgatcactgatctcaggatcaatcctgcagaaggctgccttcagatcatctgcatccacctctctgcttgcaaaacaattcagtcacttgcagtgctgtggtatgtgataggaatgctcaagcatttgtactacagtgagaatctaygttgctcgaaatgcacagtggttcaatattatctctggtgggacttttttaatatgcatgtaataaactaagtactaaattaaactgaacagaagttatgaaaagttagtttgtcatcacctgggaagactttaattttgctctgttaagctttttgataccctttgctacataactatgcttttctttgctaattcagtgcccatgaaagacagcatcaaacttcctgggcatccagcccaccttcagtgtttccctcattgcttggtgcctggcacaaggcttcttttctatgctatt

SEQ ID NO: 71238 - DNA, 600 bp, Chicken  19866894347646_1
aggaacctctaaatggatactgaaagcccagcatggtccccaagttagtgagacagaaacagctggcttataatccagaagataaccagtagataagcctgaccagttcaaaaatgctgcaggtttgtcaggccactaagaaacagtgaagttgtcaagtctctaccatacccaatgattttttttcaagtactggcattaatttctagttttgtctccagcttgctaagattttacacattcctatcatgcttttagttttagaaacacagacaggaggtgttagataacctttgcagyggtaagcaaaacagatcttagaccttgccattggtaaacaagccttattttatctactcccggctgctagttttcccagttcctaaaggctgggcaggaaacaagtaactgagaagacttcaacaaaggttcaggcactcgagtcacaaacaatggcatgagaaatggctgcaagactatacacctcagagctgttctgctttagcaccagaatcctagcaagtgggacaggacaaatactgataggagatccaatcccatacatgcaaatgtgaagcactacaaaaccagcattaacag

SEQ ID NO: 71239 - DNA, 599 bp, Chicken  19866894347653_1
  misc_feature (1)..(118): n is any nucleotide
nnnnnnnnnnnnnnnnnnnnnnnnnnnnnnnnnnnnnnnnnnnnnnnnnnnnnnnnnnnnnnnnnnnnnnnnnnnnnnnnnnnnnnnnnnnnnnnnnnnnnnnnnnnnnnnnnnnnnnatgggatagatctggaaggatggttctttttgcctttgcccttactgaatccaggactgtaacatgatgcaatctctctgctatgatgaaacaagttcaaatggcaaagcctggagagagaccacctcttcccaccctaaaaggcagaaaacaacgaaactctcagctgtacaaagcggcasctctccggcagccgggcwgctgcctctctccgggaagggatgccgctttcggtaccgcagacgccgggtcgccctccaggggatctccgccgggttttcggtctcccgaagcccggcgaggacggctcatggcggcgacgtggggcccggcgagcagccgccgccggatgctaaggctcgctcatagcattttccacgtgcacctcccggccaagaaaccgaacgagactttgtgccgtttatccgcccctgggctggaatgctttccagcaagcagaacctcgacagaaaaaaaatcc

SEQ ID NO: 71240 - DNA, 599 bp, Chicken  19866894347653_2
  misc_feature (1)..(100): n is any nucleotide
nnnnnnnnnnnnnnnnnnnnnnnnnnnnnnnnnnnnnnnnnnnnnnnnnnnnnnnnnnnnnnnnnnnnnnnnnnnnnnnnnnnnnnnnnnnnnnnnnnnnatgggatagatctggaaggatggttctttttgcctttgcccttactgaatccaggactgtaacatgatgcaatctctctgctatgatgaaacaagttcaaatggcaaagcctggagagagaccacctcttcccaccctaaaaggcagaaaacaacgaaactctcagctgtacaaagcggcasctctccggcagccgggcwgctgcctctctccgggaagggatgccgctttcggtaccgcagacgccgggtcgccctccaggggatctccgccgggttttcggtctcccgaagcccggcgaggacggctcatggcggcgacgtggggcccggcgagcagccgccgccggatgctaaggctcgctcatagcattttccacgtgcacctcccggccaagaaaccgaacgagactttgtgccgtttatccgcccctgggctggaatgctttccagcaagcagaacctcgacagaaaaaaaatcccttgtctcaacctaaccc

SEQ ID NO: 71241 - DNA, 600 bp, Chicken  19866894347655_1
aggataaaaattcccgaactccacactcagttccacgaatgggttgcaatactgagaagatgaatacataacccaaacataaacacttcgttaattacccatattagcattttgtgacatcagatctttacacttcaccttgtccaggctcctcacccgatttctcaatattacctctgttctaacagagaatgcttcaaaagttaaagggatgacaactgagaaaattaaactgcactgtgtcataaggtacatgttgtctgacattttacagcttttaaaaccatatatcatttactrgtactctgatgctacgacttttcaaggtcagccatttggaaaaaagatattcagtatctgtcattatcaaactacacaccccacacatgaatgtgcacacaaactataatagcaagtgtttctataagttaaaagactgtcagccttttccattataattccttttctttcaaaggcttatatcacagccataaagatttcctttaggctagaacttggcaatcatgaaatatggagtcaaattaaaaaaaaaaagttttcaatttttcagctcttgctaaagtatagctcatataaggt

SEQ ID NO: 71242 - DNA, 600 bp, Chicken  19866894347660_1
ttttcccatgtagacaaataatggttgtatctactatacataatatgcaggacaaatagaggattttcctaggtgaacacaggaccccatccaaattggccttgaacacctccagggatggggcatccacagcttctctgggcagcctgtaccagtgcctcaccgccatcttggtgaaaactttccccctaacacctaatctaaatcttccctcttactgtttgaaaccatttcccctcatccaaaataccatgttgtatggtaacacgtacaaacatatatctggcgctctctgctctygctgcctggtgcgtacccactagaaatgtagggagggatggattgacaggacaggcatgagccatcttaactcaaagctgggtttccactttccagctgtgtttgggaaaccatccattctgctcacattacacagacatcatggcctggctatggaaatgactttctctgccatttgttggcagaggatggaaatcttttccaaggcagcagcaggtcatgggccttgcttggacatctcctggcagattgctccaaagatcactccccacaggagaggcatttggagacacaattgct

SEQ ID NO: 71243 - DNA, 600 bp, Chicken  19866894347670_1
cagaaaaagaaaataaaaaaagcactgaatattcattttactcatttgctaactatactaatatactcttttgtaaatgagtctctatctccagcactagctattgaactgaagggtatttgaataggtgggttttgctatagtgccacactaagataatgtgctagaaacaaatggttcactgattcctgaatagaaaatttgctggaaaaccctgagaaccagaagatgagggggaggggattaaaacgtctcctcagagccaccaaccaaacccttgtcatttttaaaagatgctcmtatggcacaatatgaatagtttatagccacaattgtgaacattcaatgtcatataagaaaagacacttgtcaagagcctttcccttacaagcaccctcatcatgacctgtgttaatgaagttaattgaatttaagatcaataatggttaattattgcaatttgacattctgagataaatggctttaagacagagaaatgtgtgtgtatgtgaattctctccaaagaaggtgaacatgttacagcctaagagggatcacacagtcctcccattgatcctggtacaatctgatcgacctaat

SEQ ID NO: 71244 - DNA, 470 bp, Chicken  19866894347679_1
gcatggattgcagtctgtcctgcagttctgttctagaccttcctcagaatagaatctcagccttcctttcctctaaaactgtgctatatttcctatatatgaacagtagctgagtttgtatactgctaagttctccagaatgtatagtcaggagccacttacacatagagagtatagacaggagtcatctttctgttcttcctttgcagtctaatacaatgaggttattgtacatgacagtagttccagtataacgtactaatataaatatgttattattaagaataatagtaagatttwaagagttaaaagattgatctgggagatgtttttgattaatagaaataagaagggaggtaggctgttactctgcatcacattgcgtgagaggtacacaccctcagcactggggacaatggttgaatatggcacctggggtcatgcaagctggtggagtccctgggaccaag

SEQ ID NO: 71245 - DNA, 599 bp, Chicken  19866894347693_1
  misc_feature (1)..(35): n is any nucleotide
nnnnnnnnnnnnnnnnnnnnnnnnnnnnnnnnnnnaagtattggtatgggtgaatggcttgctgatctactactgtgttccattacctgctgaatagactgtcattgttgtttgtttgtttgtttgttgttttcgttttttttcttttgtggagagcagacctttttttactgttcttcagcagatactgggttcaggtagtgaagtgaaaaagctatgagtgctcaaacttgctttcaacagagaatgcattaagggaaaatccatcacctcaccccgactcccatctgttttcatggkttttttttttgtgtgtgtgtgtgtggtttttttgttattgtttgtttgtttgtttgtttaatgtgagaagaggtgatcagagccctgttattaaatatttatgtactccccacaaggtagtaatgttacgtagcatatgcacataatggttcttgaccatgcaacaattgtaaaggtagtaaaaaagtataatagtggatgtttcagttatacataactgctaggagactccaaagcatgacagcttccagatgtatgaaacgaccaatccctttgtttagattacacaccacagctga

SEQ ID NO: 71246 - DNA, 599 bp, Chicken  19866894347707_1
  misc_feature (1)..(12): n is any nucleotide
nnnnnnnnnnnnaattatctaaaagctggagaaaactatcttgtaatcctcaacttaaaccgctccatctatttttattagtaaggagaaaagtctgaaaagttacttgattatacttaattatagcacatatgtgcatctggtaggaggaggggcagagaaggaactggaaaagtctttgatctgattacaccaagaatgaagaggtgaaaaggtgcaccagaaagctgatatagaaatcagtcaaattttgaacagggcgcacagttaatcacagcaacaaactgttagtgtcaccaktaggtttgctattgctttcatatcctcagatccagaggggtgcttttctgaaagatattcttaacgtaarcagactgctgcattcagtctaggagtaaacaagggaaatttaaggacctgaatccaacagacagtaacgctagaaataatactagatcatcccatggtctccttctgaatgctaaactgtatgaacctgtgaattatgatgttctgaaagtaatgcctcctgatttattatgtcggcccacaacatcagaggcagatggtggtggtatggtagtagccattgaaccttm

SEQ ID NO: 71247 - DNA, 600 bp, Chicken  19866894347707_2
atttttattagtaaggagaaaagtctgaaaagttacttgattatacttaattatagcacatatgtgcatctggtaggaggaggggcagagaaggaactggaaaagtctttgatctgattacaccaagaatgaagaggtgaaaaggtgcaccagaaagctgatatagaaatcagtcaaattttgaacagggcgcacagttaatcacagcaacaaactgttagtgtcaccaktaggtttgctattgctttcatatcctcagatccagaggggtgcttttctgaaagatattcttaacgtaarcagactgctgcattcagtctaggagtaaacaagggaaatttaaggacctgaatccaacagacagtaacgctagaaataatactagatcatcccatggtctccttctgaatgctaaactgtatgaacctgtgaattatgatgttctgaaagtaatgcctcctgatttattatgtcggcccacaacatcagaggcagatggtggtggtatggtagtagccattgaaccttmccaccaatattccgttacatgttgttgctgtgtgacagatggcagcagaggggcagtctcacagaatggta

SEQ ID NO: 71248 - DNA, 600 bp, Chicken  19866894347707_3
ktaggtttgctattgctttcatatcctcagatccagaggggtgcttttctgaaagatattcttaacgtaarcagactgctgcattcagtctaggagtaaacaagggaaatttaaggacctgaatccaacagacagtaacgctagaaataatactagatcatcccatggtctccttctgaatgctaaactgtatgaacctgtgaattatgatgttctgaaagtaatgcctcctgatttattatgtcggcccacaacatcagaggcagatggtggtggtatggtagtagccattgaaccttmccaccaatattccgttacatgttgttgctgtgtgacagatggcagcagaggggcagtctcacagaatggtatctggcatggaagtgcatctgaagcaaaggtgtggcattgaattcctccatgtggaaaaaaaaggtacgcactgacatgcattgacacttctgaaggtgtacgaagaccaaatactaaatgtgaatgcagtgaggtggtgggtggtgcgtttcaacagtgaaaacagcgacagtgggtcacaatcggccccagcaaaggtgacaagtgcaacatgcaggttcctgtgca

SEQ ID NO: 71249 - DNA, 599 bp, Chicken  19866894347710_1
  misc_feature (1)..(22): n is any nucleotide
nnnnnnnnnnnnnnnnnnnnnntgcctgttgtctctgcaccacacagcttcttgtgcttgggctaaaaatgtgcatcagagcttcacaaatttaatacatcagaaaaattaaatttctccattatgaaagctctttattattgaaatgaatgaaaggaagggaagatctgatgatcagaagcctgagaaattagtagcagtcttattgcctctccctgttctttgatatggcgtttaatacataaattctaagtgttgttcttgactggaaaaaaatataagaaatttgctacagtctcrgtgtaagtgggtttaaaaagttgtcagaagaaataatgaaagcaaacagtaaatattctgtgtggtggatgatgtggtgactgactgacaactctccccatgttatttcatcagtctttgcaaataagctttcctaaaaattgcaagaatctctggttttcaatagcacattcagatgtgtgatctccttcactaatgatggcaacagaaatgcctctgatttttaactttaaaagaaaaggcattcagctgagatacatgagcattatttgatatgctcttagatgcacttgatatca

SEQ ID NO: 71250 - DNA, 600 bp, Chicken  19866894347719_1
cctccacactgcatttgctgagtaacgtggaccaggagaccagaccagtgtcgctcattttgctgttgcagttggcagagagctggggctggttgctgcagtgctgatagtggttggtagctcctctgggccttgcttgagagtgtgccttccaaatcattcaggcaaccactgctttgtggacactcctgtgtgctcctggggactgattgagccactgcacctcctccagcctttggggcatctgtttgtagtgggttcctgctcctcctgctgtctgagtgcccttgtggtggctgmtctgaactgctcgtggcccttgggaatttcccatggcccctggagaggtccctggtcatggttccctggaggtacctgtgtccccagcccatggggtaagaaaaagccctctggtcttggagacttctctgggtggagaatccatcataaattcctcactattcatttcttcttgtttttttttttttttyccctcttctctttcaaagctgctgcagcgaggtgcaaccaccatcaccaacctggagggctgggtaggccaccctctgaaccccatcggctgcctctttctcacactga

SEQ ID NO: 71251 - DNA, 600 bp, Chicken  19866894347719_2
tgtgctcctggggactgattgagccactgcacctcctccagcctttggggcatctgtttgtagtgggttcctgctcctcctgctgtctgagtgcccttgtggtggctgmtctgaactgctcgtggcccttgggaatttcccatggcccctggagaggtccctggtcatggttccctggaggtacctgtgtccccagcccatggggtaagaaaaagccctctggtcttggagacttctctgggtggagaatccatcataaattcctcactattcatttcttcttgtttttttttttttttyccctcttctctttcaaagctgctgcagcgaggtgcaaccaccatcaccaacctggagggctgggtaggccaccctctgaaccccatcggctgcctctttctcacactgaccgaagcttgtagattagaagaggaaaattgccttgaaatctcaggtactgggtgctccctcgctctctaccaggcagctccagctggtcctgggtgcaatgcttggcctcagggctcctgagctccacacttcccgttcccagccctggggttggcagcagagcagggcagctgcttggcagagctgggc

SEQ ID NO: 71252 - DNA, 599 bp, Chicken  19866894347721_1
  misc_feature (1)..(163): n is any nucleotide
nnnnnnnnnnnnnnnnnnnnnnnnnnnnnnnnnnnnnnnnnnnnnnnnnnnnnnnnnnnnnnnnnnnnnnnnnnnnnnnnnnnnnnnnnnnnnnnnnnnnnnnnnnnnnnnnnnnnnnnnnnnnnnnnnnnnnnnnnnnnnnnnnnnnnnnnnnnnnnnnnnnttgattctgttgtcagttgcaactgcgcttgtttccttatctggcctttataaatctggtgggaatctcacttttttttcctcagtgctaataaatttgagctgtaggtacacctggttaaaagacaatgagtgatsgaagagaaaagtagtcttgactgaacaatgagtctgtaaacagctatgggagagaaaaagggactagacaggagcagtgataacataggaactatatggtgggaaaaggtaggaaggaggggagggggaagcagggtgggggaaaagaagaatgggtaaagagaaaatgggatggatcttggggaatagaagaggcaaactgcccaagcaactggaagaaaaacacctgtgtcaagacaataaaaatgagctgctgctgcatctgttttgtagtggtacacagagcatatttttttctc

SEQ ID NO: 71253 - DNA, 600 bp, Chicken  19866894347726_1
ttttgctccgtaagtagactagcctgctagtgattcccaacagatctattctaacaacaatgacgtattcatttacttctattatgaccatacaatacagtaactgagcagtaatttttcacagtcaatttcatgtgtgattcttaatgcttaaagatgctgaaataatgtgtactacatagccatatgctcacttctctatactgcacaagggtagttgcctgggtaacacattttctctctggtttagcatcacccttttgggtttagcataacccttcactgaatatcattaggtgycattaaacagcacatattaacacggacttcaatatactacttaagagttattttacctacataaacaagtgctcatttatattacaaaagcagagaaaagcctagtaattttaacagtgcaaagagaggaagccgaaatgtttcccacatttttactttagcgttgaagatatcctacccaaccggccaagtctttcctcaccttcgtgctcacattaacagtgtcaagattgcactgtttactcaggaagactgaaacactgatgttttagaacttatccacacataagagcaacatgc

SEQ ID NO: 71254 - DNA, 600 bp, Chicken  19866894347726_2
ggaaaccttaaaagacacctcagtaaaaggcaagaagataagcccacctccaaatatttctgcacccttagatggagacaaaacttgctcccatggcaacagatattcacagaatgtcagagactgcctttataggtcttacatctttgtcacaccaacagcaatttctgtgaaactcttaatttttgccagtgcaggaactgtgcttgagctacacaagagattttgtccatggcaaccacagtgagattgcatgtaaaaaaatttgcacgttctctgcttgcagttttcccattctasttcaggtctctgagaaaaaaaacatgcaagaagcaaatacccagtgtcgtgcccacttcatctacctactctkatctactccaatgccacagaatttacagtacctgctgactgctaataacatgctaagtataagataacttcatttccatgcccagagttcacgctatggattttttcaattctggggctaagcaaccccctgcacatctattagtgctgttaatgaatcagtagctctcatgttgtctgcctgtcacctttatgagttccagatttcagtatttctcactgactaca

SEQ ID NO: 71255 - DNA, 600 bp, Chicken  19866894347726_3
ggagacaaaacttgctcccatggcaacagatattcacagaatgtcagagactgcctttataggtcttacatctttgtcacaccaacagcaatttctgtgaaactcttaatttttgccagtgcaggaactgtgcttgagctacacaagagattttgtccatggcaaccacagtgagattgcatgtaaaaaaatttgcacgttctctgcttgcagttttcccattctasttcaggtctctgagaaaaaaaacatgcaagaagcaaatacccagtgtcgtgcccacttcatctacctactctkatctactccaatgccacagaatttacagtacctgctgactgctaataacatgctaagtataagataacttcatttccatgcccagagttcacgctatggattttttcaattctggggctaagcaaccccctgcacatctattagtgctgttaatgaatcagtagctctcatgttgtctgcctgtcacctttatgagttccagatttcagtatttctcactgactacacttggtatttatatattacatcccagcagaactaacaggaattaaaaagcattttatatacatagctaggaac

SEQ ID NO: 71256 - DNA, 600 bp, Chicken  19866894347726_4
ccctggactgccaagctggaaagcattcaacaagagaagaccaacaggtcttgttgccgttctgaagggatttcattccagcaataaaaaacaagtgcccctgcttcagacggtcactctaaggattacttcatgtgccaccagcaaaaggtacaaatgcccggtcacatggccaaaaatgctagagattagcaatactaatcactttctgaactttctccactttttcacataatagtgtagcagctaaacaagcagacagcctgaatactaaaagagaatctccaaagtcacgatacraacacgcagtcacctgtcactgcagcctggcctgcagaaacaatccttacccgtggcagaaagcagcaattagaagcttcaacactacacggcaaaaatgctgaactgctgcaagatcacaccaagttacaaaatcccaatctgtcaacaagtacacataggctatagttttctattttgctccctccgacatcagcttctgcttgtaagggaggtccaaattacaaggtatggattatactcacagacttcttattacaaaatggatctgaatctgcgcaagccagaaaatgcagttct

SEQ ID NO: 71257 - DNA, 600 bp, Chicken  19866894347728_1
aaatgcaaaccatgtgccaccaacctcactgctgtcttcccaggactgtggagtggctccctaaatacctttgttgctcttcctccctcttgagggaaaatggaagaaacttttattaatgctgcaacaaacttaaggagaggcactttttgtactgtttcttcctacattatctaaacttattttggattgctatttgaatgtgtttgtgaccaatacttagagtaaacagagacagaaagactcgtggaaggaaagggaaacaagacttagaggagccagccaacaaacatgaaaggytcaatgagttaaaaatacatagtagagagaaaatggtttgctcagctaaatgctacacgcagcccaaaacattgtttctactctttccacttaaaagatactgtaattccatcatgtatttgcaggcaaaaaataataaaaaataaaaaccaacaaacaacccacaaacaaaaaaccaaaccaaaataaagaatcaccagccttgttttggaaggaatgcttttgtgttttttaaatgaacaacaaagaaagaaaaaaaagaagaagaaaaaagmccagaaaacttacccatcttttgtc

SEQ ID NO: 71258 - DNA, 600 bp, Chicken  19866894347728_2
gagccagccaacaaacatgaaaggytcaatgagttaaaaatacatagtagagagaaaatggtttgctcagctaaatgctacacgcagcccaaaacattgtttctactctttccacttaaaagatactgtaattccatcatgtatttgcaggcaaaaaataataaaaaataaaaaccaacaaacaacccacaaacaaaaaaccaaaccaaaataaagaatcaccagccttgttttggaaggaatgcttttgtgttttttaaatgaacaacaaagaaagaaaaaaaagaagaagaaaaaagmccagaaaacttacccatcttttgtctgatccaccacacctgcaaggagctgaacagtgtttgcattcggcaaaccatccccaattatcttcaggtaccgtgtgacaaagtcattaggagacatgaagaattccccattcttctccacacttgcatactgtcaaatgaatacaacatttagtgtcacaactgcacctttctccaagttctcactgccacaggcattatccccaactcatggctcataaccaggaccacatttactgcaggtaaggacagttctgctctgaagaaattaaaa

SEQ ID NO: 71259 - DNA, 600 bp, Chicken  19866894347741_1
aggggagccctccccacccctctgcaggcaacaggcacccctctcggtgtcccgcagctctcaccggtgcggtgccggtgcctcagttgccccgcggctctggaaagctgcccctctgctgatgcccgaagcggtgctgctgctgccacgccgcttcctgatacctctcgcagccggggccaggccggagctccgccgggacgcagcgggctgagccgttgcctctctctctccgcccggggccggctctccaggctcagctccgcagagctcccggccagctgccgactacccgtcccytcggcagtctcgcagcgctgccgcgggcggctgtcggggacggggaaaggccgcgctgccgggagggccccgatagccgccgcttatcgccgccgttggccacccagctgcgctccgcttccaggaagccgaggctccgcagcggctgtttgctgctggacgccgatcgccccgtcccgctcgctgcctccctccctccgacccccctcatgctggcaggggggctgggaaagtgcaacgaggctccggcacacgccgagcttgcggtcgcggctcggaccctctgatattaagcagggc

SEQ ID NO: 71260 - DNA, 600 bp, Chicken  19866894347746_1
tcccgcgccaactcgcgcctgggcgcggcgggggcgagaagatgggcgtggcctaagatcaatgggcggggctatgtgaaagcaggcgtggctgtaaccaaaggggcgtggctaaagagcaagtgggcgtggctaaagagcacgggggcgtggcgtagagccgtagtgctgcctgggcgccgttgccgttcgtggccgtgccttgcagcacagcgcccctccaagagcaacagggggagcaaaacagagctgggggggtttgggccgtgctcacagcccgctggggctctcagcgtttgkctgccgggtgctcggctctccacccgctgtaactgctgggtaatgtttgcgaaaggggccattagcaaatggcaaatgcaaaatgattcacgggtggaaacccatcgaagaaaagcattacagcctgctcttacatcgcaacgtaattaatatcaattgaattaatcaccgygagctaaatgaaatgttattcagcaatgcacacacacgcaaacatcacggcgtcccctccagacaaaatgtaaggtttccaatatttgcctgcagctgacaacaataaatcctcttaaatttgccttc

SEQ ID NO: 71261 - DNA, 600 bp, Chicken  19866894347746_2
ctgggcgccgttgccgttcgtggccgtgccttgcagcacagcgcccctccaagagcaacagggggagcaaaacagagctgggggggtttgggccgtgctcacagcccgctggggctctcagcgtttgkctgccgggtgctcggctctccacccgctgtaactgctgggtaatgtttgcgaaaggggccattagcaaatggcaaatgcaaaatgattcacgggtggaaacccatcgaagaaaagcattacagcctgctcttacatcgcaacgtaattaatatcaattgaattaatcaccgygagctaaatgaaatgttattcagcaatgcacacacacgcaaacatcacggcgtcccctccagacaaaatgtaaggtttccaatatttgcctgcagctgacaacaataaatcctcttaaatttgccttccaaggtcagcgagtgcgggagatgcatgtatatgattttctagtttacctgctaaggagagaggggtcagtaaattatcctcccgcctcagcctaattgaatagaccagtggacgtcaggctggaacgtcgagggagcatgaggacacacttgacaacatctatctgtcacc

SEQ ID NO: 71262 - DNA, 600 bp, Chicken  19866894347759_1
atgttttcagttgtgcaggcaccctgctgttccagggttgctgggattttcctagcttttcctcattttcacgctggcatcaaaactgggtgcagcatggaaaacagtgactttcatgtgtccccatctgagtcctgtattgttgtagagagcaagcacgggacttgcaagtgtctctctgatcttcagggttactttttcactcttgttccactgctgatgttgataattctaacgtctttcacaattactgacatcatttctgcctgataatgatcagttatttcagtgaaatgtctytgtgcygtttcagagtagcagtgctttagttaacccctagacctgcatgctataactgtgacttctgttgcatgaaacctttttaacacctaagcaatgcctttcctatcaccgatagaggcatctagggcactgttttgaggaacatgttgagggtggacatgtaggaggagattcataaaagacttggaacagggcctgttttggctgttacctgctggtaacatgatgagaaatgcaagcaacttagaaggacagggaataaggtcgtggccttgcaaaatgcttccaagagcactg

SEQ ID NO: 71263 - DNA, 600 bp, Chicken  19866894347759_2
tcagttgtgcaggcaccctgctgttccagggttgctgggattttcctagcttttcctcattttcacgctggcatcaaaactgggtgcagcatggaaaacagtgactttcatgtgtccccatctgagtcctgtattgttgtagagagcaagcacgggacttgcaagtgtctctctgatcttcagggttactttttcactcttgttccactgctgatgttgataattctaacgtctttcacaattactgacatcatttctgcctgataatgatcagttatttcagtgaaatgtctytgtgcygtttcagagtagcagtgctttagttaacccctagacctgcatgctataactgtgacttctgttgcatgaaacctttttaacacctaagcaatgcctttcctatcaccgatagaggcatctagggcactgttttgaggaacatgttgagggtggacatgtaggaggagattcataaaagacttggaacagggcctgttttggctgttacctgctggtaacatgatgagaaatgcaagcaacttagaaggacagggaataaggtcgtggccttgcaaaatgcttccaagagcactggtgttg

SEQ ID NO: 71264 - DNA, 599 bp, Chicken  19866894347764_1
  misc_feature (1)..(30): n is any nucleotide
nnnnnnnnnnnnnnnnnnnnnnnnnnnnnnagtagataagaacctgctgtgcttgcagcagctcccttccttttttaaccacaagtgcatcaggtgtttgtacgtgacagaaaggagtttgttcactcagttcaggtgcaggtttgactgataatgtcctctccctggtgaaggatctctgaaagatttattggtcagtccgctcaggaggcagagatgaacaaggaacgagacgtttgaatttctttcattttccatgtttcgatcaccgcaatttccttttgcaggacagcaaaaaaraaataaaagmcccaaaatggctacaacggcggcaaacacccaacgacaaacaataggcagcgaggaatacagtctgtacagcagcctgagtgaggacgagctgatcaacatggccatccagcagagcctgggggaggacccggtgggccatgcagyggcccagggccacccaaagcctctgggagggggacccagcgaggcrgctkcccccagccgtgccaacagccacaaccctccctaccacctctacccttggcaaaggtgagtgagcaacaaatgcgctgcctgccagcttcctc

SEQ ID NO: 71265 - DNA, 599 bp, Chicken  19866894347764_2
  misc_feature (1)..(27): n is any nucleotide
nnnnnnnnnnnnnnnnnnnnnnnnnnnagtagataagaacctgctgtgcttgcagcagctcccttccttttttaaccacaagtgcatcaggtgtttgtacgtgacagaaaggagtttgttcactcagttcaggtgcaggtttgactgataatgtcctctccctggtgaaggatctctgaaagatttattggtcagtccgctcaggaggcagagatgaacaaggaacgagacgtttgaatttctttcattttccatgtttcgatcaccgcaatttccttttgcaggacagcaaaaaaraartaaaagmcccaaaatggctacaacggcggcaaacacccaacgacaaacaataggcagcgaggaatacagtctgtacagcagcctgagtgaggacgagctgatcaacatggccatccagcagagcctgggggaggacccggtgggccatgcagyggcccagggccacccaaagcctctgggagggggacccagcgaggcrgctkcccccagccgtgccaacagccacaaccctccctaccacctctacccttggcaaaggtgagtgagcaacaaatgcgctgcctgccagcttcctccrt

SEQ ID NO: 71266 - DNA, 599 bp, Chicken  19866894347764_3
  misc_feature (1)..(20): n is any nucleotide
nnnnnnnnnnnnnnnnnnnnagtagataagaacctgctgtgcttgcagcagctcccttccttttttaaccacaagtgcatcaggtgtttgtacgtgacagaaaggagtttgttcactcagttcaggtgcaggtttgactgataatgtcctctccctggtgaaggatctctgaaagatttattggtcagtccgctcaggaggcagagatgaacaaggaacgagacgtttgaatttctttcattttccatgtttcgatcaccgcaatttccttttgcaggacagcaaaaaaraaataaaagmcccaaaatggctacaacggcggcaaacacccaacgacaaacaataggcagcgaggaatacagtctgtacagcagcctgagtgaggacgagctgatcaacatggccatccagcagagcctgggggaggacccggtgggccatgcagyggcccagggccacccaaagcctctgggagggggacccagcgaggcrgctkcccccagccgtgccaacagccacaaccctccctaccacctctacccttggcaaaggtgagtgagcaacaaatgcgctgcctgccagcttcctccrtcaaaaca

SEQ ID NO: 71267 - DNA, 600 bp, Chicken  19866894347764_4
tcctctccctggtgaaggatctctgaaagatttattggtcagtccgctcaggaggcagagatgaacaaggaacgagacgtttgaatttctttcattttccatgtttcgatcaccgcaatttccttttgcaggacagcaaaaaaraaataaaagmcccaaaatggctacaacggcggcaaacacccaacgacaaacaataggcagcgaggaatacagtctgtacagcagcctgagtgaggacgagctgatcaacatggccatccagcagagcctgggggaggacccggtgggccatgcagyggcccagggccacccaaagcctctgggagggggacccagcgaggcrgctkcccccagccgtgccaacagccacaaccctccctaccacctctacccttggcaaaggtgagtgagcaacaaatgcgctgcctgccagcttcctccrtcaaaacacgtgcccttctaattagctttgccaaacagcttcatgcgcttggtctgagagtctgtcattagtttaaaagtcagagcctgctataaatccagtgaggtcaacaatttacgccctcacagtgaaatgaaaatcagcctgaagctgtc

SEQ ID NO: 71268 - DNA, 600 bp, Chicken  19866894347764_5
ctcaggaggcagagatgaacaaggaacgagacgtttgaatttctttcattttccatgtttcgatcaccgcaatttccttttgcaggacagcaaaaaaraaataaaagmcccaaaatggctacaacggcggcaaacacccaacgacaaacaataggcagcgaggaatacagtctgtacagcagcctgagtgaggacgagctgatcaacatggccatccagcagagcctgggggaggacccggtgggccatgcagyggcccagggccacccaaagcctctgggagggggacccagcgaggcrgctkcccccagccgtgccaacagccacaaccctccctaccacctctacccttggcaaaggtgagtgagcaacaaatgcgctgcctgccagcttcctccrtcaaaacacgtgcccttctaattagctttgccaaacagcttcatgcgcttggtctgagagtctgtcattagtttaaaagtcagagcctgctataaatccagtgaggtcaacaatttacgccctcacagtgaaatgaaaatcagcctgaagctgtctggtttaagcaataaattaaaccagaaaggggcactgctggtgtgt

SEQ ID NO: 71269 - DNA, 600 bp, Chicken  19866894347764_6
ggaggcagagatgaacaaggaacgagacgtttgaatttctttcattttccatgtttcgatcaccgcaatttccttttgcaggacagcaaaaaaraaataaaagmcccaaaatggctacaacggcggcaaacacccaacgacaaacaataggcagcgaggaatacagtctgtacagcagcctgagtgaggacgagctgatcaacatggccatccagcagagcctgggggaggacccggtgggccatgcagyggcccagggccacccaaagcctctgggagggggacccagcgaggcrgctkcccccagccgtgccaacagccacaaccctccctaccacctctacccttggcaaaggtgagtgagcaacaaatgcgctgcctgccagcttcctccrtcaaaacacgtgcccttctaattagctttgccaaacagcttcatgcgcttggtctgagagtctgtcattagtttaaaagtcagagcctgctataaatccagtgaggtcaacaatttacgccctcacagtgaaatgaaaatcagcctgaagctgtctggtttaagcaataaattaaaccagaaaggggcactgctggtgtgttttc

SEQ ID NO: 71270 - DNA, 527 bp, Chicken  19866894347764_7
aataaaagmcccaaaatggctacaacggcggcaaacacccaacgacaaacaataggcagcgaggaatacagtctgtacagcagcctgagtgaggacgagctgatcaacatggccatccagcagagcctgggggaggacccggtgggccatgcagyggcccagggccacccaaagcctctgggagggggacccagcgaggcrgctkcccccagccgtgccaacagccacaaccctccctaccacctctacccttggcaaaggtgagtgagcaacaaatgcgctgcctgccagcttcctccrtcaaaacacgtgcccttctaattagctttgccaaacagcttcatgcgcttggtctgagagtctgtcattagtttaaaagtcagagcctgctataaatccagtgaggtcaacaatttacgccctcacagtgaaatgaaaatcagcctgaagctgtctggtttaagcaataaattaaaccagaaaggggcactgctggtgtgttttcctgaagtaaagaagcccttgcg

SEQ ID NO: 71271 - DNA, 600 bp, Chicken  19866894347766_1
attacggcaggaaaatgcagcgttcacagctggatggaaaaacccctgaaatgcagtttcctgcgactctccattctgcaacagttgggactctgtctgaaattcaaattaactttcataccctgcctacaattccattttgtgccccaaagcgaaatttcctgcataattgggtgtatttaggtcacttctccattgttagcttctgcaaaagaaaacgcatgattttctaggggagaaaattcctagtacagttttcaaaggcattcttgcaattagaggccgtactcccaaatgagrctggaagacgggcgtgcgttagcttgggtgctgccttgagactttctgcgagcctcttcttgagggcagggtgactccatctgagcacagaccacgtcctacacccatacaggaataagcggctctgccaaactgcattttaagaagaagttgccccatgttttgcacgcctatcaaatatgaaccaatacgatgcggtgtgtacaaatattaatctatccaatcgatgttaaatccaaagaaacagcacactcatcttttcccattctaaggttcctttccctgaaaattttccctaca

SEQ ID NO: 71272 - DNA, 600 bp, Chicken  19866894347770_1
gtcgtcaccccagtgatgaccatgggtatgataaaaaccttgctgtaaagatgagccattaatgcctgctcttttccattcatctggttgcattattccacacctaatcttaaatgacaggtgtctggggcagtgacaatcataacaaactgccctgttgtaacacagcctgggatgctgcaataagtcagcaggtgtgtttgtttgctgacttttcatttggaaaatatacttcttttacagatcggtaatgcgctgtctcaacccacacattgcctatttctcctcccacttaagctkttgccatatctctttacttgaatcttgttctccctttmacctgggcgctatatggatgtaggagaccctgaactagatggatgatctatgaggccccttccaacccaagacaacctatgatctttgattgaaacagggaggcagttytgaggatacagaacaacaataatctcctgaagcaagcaatgtcagaggggaaggacagctggaggctgatgagtcctrttaaagcagcctaagaatttttgctgatatttttccctttaattttagagagacgtaatgctgggctggatatac

SEQ ID NO: 71273 - DNA, 600 bp, Chicken  19866894347770_2
cttgctgtaaagatgagccattaatgcctgctcttttccattcatctggttgcattattccacacctaatcttaaatgacaggtgtctggggcagtgacaatcataacaaactgccctgttgtaacacagcctgggatgctgcaataagtcagcaggtgtgtttgtttgctgacttttcatttggaaaatatacttcttttacagatcggtaatgcgctgtctcaacccacacattgcctatttctcctcccacttaagctkttgccatatctctttacttgaatcttgttctccctttmacctgggcgctatatggatgtaggagaccctgaactagatggatgatctatgaggccccttccaacccaagacaacctatgatctttgattgaaacagggaggcagttytgaggatacagaacaacaataatctcctgaagcaagcaatgtcagaggggaaggacagctggaggctgatgagtcctrttaaagcagcctaagaatttttgctgatatttttccctttaattttagagagacgtaatgctgggctggatatactcagccaaacgttctatgaattgggaatctcccaagct

SEQ ID NO: 71274 - DNA, 600 bp, Chicken  19866894347770_3
aactgccctgttgtaacacagcctgggatgctgcaataagtcagcaggtgtgtttgtttgctgacttttcatttggaaaatatacttcttttacagatcggtaatgcgctgtctcaacccacacattgcctatttctcctcccacttaagctkttgccatatctctttacttgaatcttgttctccctttmacctgggcgctatatggatgtaggagaccctgaactagatggatgatctatgaggccccttccaacccaagacaacctatgatctttgattgaaacagggaggcagttytgaggatacagaacaacaataatctcctgaagcaagcaatgtcagaggggaaggacagctggaggctgatgagtcctrttaaagcagcctaagaatttttgctgatatttttccctttaattttagagagacgtaatgctgggctggatatactcagccaaacgttctatgaattgggaatctcccaagcttttttatttgaagagctcttgatattcttttccagtaagtcagcattactgcagtaaacacagagcctttcataaccttgctgcctgtgatcccttctgaaagtcactc

SEQ ID NO: 71275 - DNA, 554 bp, Chicken  19866894347770_4
aatatacttcttttacagatcggtaatgcgctgtctcaacccacacattgcctatttctcctcccacttaagctkttgccatatctctttacttgaatcttgttctccctttmacctgggcgctatatggatgtaggagaccctgaactagatggatgatctatgaggccccttccaacccaagacaacctatgatctttgattgaaacagggaggcagttytgaggatacagaacaacaataatctcctgaagcaagcaatgtcagaggggaaggacagctggaggctgatgagtcctrttaaagcagcctaagaatttttgctgatatttttccctttaattttagagagacgtaatgctgggctggatatactcagccaaacgttctatgaattgggaatctcccaagcttttttatttgaagagctcttgatattcttttccagtaagtcagcattactgcagtaaacacagagcctttcataaccttgctgcctgtgatcccttctgaaagtcactctgcaatcaaatgtactgggatttcataatagt

SEQ ID NO: 71276 - DNA, 600 bp, Chicken  19866894347784_1
acctggatgctcaggtcatctgtgagggtcaagaagaagccaggacacaggagggccctttcctagttgcagctcatgagaaatggtctgctgaatgttcagtgtgaccagatgaagacgaaggagctacagagggtgagatgaagagcgtgggctttgctttacacatttacctcaatgtgcacaacattttaaggggttgtggcaagagcttccaaaagtacatctgaaacactgacaacctgggctatgaacatctggctgtacacagagttgtcttgatcttggtcaaggcgtgtrgaaaagattcccagctttccatttgatcaaatgacagtatctctgcaaaagtgttagaaggctgttttattacctctgggcccatcagactgtgaaattattacagctagagagttttcttcactttgtttttattcagacaagagtagtgaagtctagcagaaacgtagtttcttagcttcacacttacaggtgtctgaacaggctgtgctgtctttctcaatcagtacatggtttcaaactgacctggagggttaaatgtgactttatttatacatattgcctttggaatttctagta

SEQ ID NO: 71277 - DNA, 600 bp, Chicken  19866894347797_1
aaatgcgggtaatttttagccagaacagattgattactaggaaacactttcctcaccttctcctacactgttgtttctatggccccagaaggctattgttattcactcctttcattaccaagaagagattccttccctcaggcacctgacgagtgtttagactctgaaaataagagctgctttttcctcagcttgatgaaaaaggtgtagcacagcaggtggagtttggctgtatccatgttctcagaagtctgtcttctgtttcctgaagctcataacctgcttgacgaattctctttrcatttggaggctttatgttagtaatttacaaagttatttgaaatatgtgatactcacttttcctataatgtataatggagataatttagtgcattggctaacaccatgtacatataacttctggaacagtggagcactagtgtatcataatacattatcttcagagatyttacacttgcaggtatcttaaaatgttccatgcgagcacagtgtgactccactgttcttgtgtattttctatgcaatatatgtgctgaaaatatccatatagaaatttttcagactaacaacttagtaccc

SEQ ID NO: 71278 - DNA, 600 bp, Chicken  19866894347797_2
ataagagctgctttttcctcagcttgatgaaaaaggtgtagcacagcaggtggagtttggctgtatccatgttctcagaagtctgtcttctgtttcctgaagctcataacctgcttgacgaattctctttrcatttggaggctttatgttagtaatttacaaagttatttgaaatatgtgatactcacttttcctataatgtataatggagataatttagtgcattggctaacaccatgtacatataacttctggaacagtggagcactagtgtatcataatacattatcttcagagatyttacacttgcaggtatcttaaaatgttccatgcgagcacagtgtgactccactgttcttgtgtattttctatgcaatatatgtgctgaaaatatccatatagaaatttttcagactaacaacttagtaccctaaatagctaattgcttttgttacttcattagcataaatggtgtctcccaggcttacactgaactgttaaaagctttttgttatactcatgtttatctttaaagaataagaaatgtttctcactctactctgtgtaaacaagataaagttcaggcaggggttcacagta

SEQ ID NO: 71279 - DNA, 600 bp, Chicken  19866894347798_1
cattttgggcccatttccacttctatactgacatgagatctacagttttccacaagcaaaaggcaaacatctcacctaaagccctacaagagagtaactgagctactgatgatgcgtgcaataagcggagcagtgacttttatggcacaatgcaacaaaagcaacgttttatgtcacagcctctgaagttcagccttaccctgaggtgtgagttttttggtctgtgtgtagaacatcaggtagatcccagagaaaggtgcgtcccgtagcagagtggcagtgagcccactgaacatgccrcgagccccttccgtctgatagatactcctcagagctccatacacactcccatagccaaatcttccactctgcagagttagataagagtcagtcatccacatgccaaggagttccactcacaccctgaggccactgtgttctcatctgatacaagagatggcagtagagaggatagcccaaggcaaaaactgtgttccacctacctcagcctctaaaagagtccttcaagaaggtaaaacacaaaaagtatccyacaaatacagaggcactgtatacaaacagcactgtaaaatctcaggg

SEQ ID NO: 71280 - DNA, 600 bp, Chicken  19866894347798_2
aaggtgcgtcccgtagcagagtggcagtgagcccactgaacatgccrcgagccccttccgtctgatagatactcctcagagctccatacacactcccatagccaaatcttccactctgcagagttagataagagtcagtcatccacatgccaaggagttccactcacaccctgaggccactgtgttctcatctgatacaagagatggcagtagagaggatagcccaaggcaaaaactgtgttccacctacctcagcctctaaaagagtccttcaagaaggtaaaacacaaaaagtatccyacaaatacagaggcactgtatacaaacagcactgtaaaatctcagggtaagtttcacattcacattctgcctagttatcagtagtatggcttggcacttgtggtccaatgtgtgaagtaggacgacaccacagctacatcccagactgtaccacggggcagcaacctyctcctgacaaaaatgtctgtcatcaggaggaagggatgtgacatcattagcagtgaactaattaaaaagtcatactcacctcataccgtgtcttcaccactgttactggcaacatgcaaatcccagatattg

SEQ ID NO: 71281 - DNA, 600 bp, Chicken  19866894347798_3
ccctgaggccactgtgttctcatctgatacaagagatggcagtagagaggatagcccaaggcaaaaactgtgttccacctacctcagcctctaaaagagtccttcaagaaggtaaaacacaaaaagtatccyacaaatacagaggcactgtatacaaacagcactgtaaaatctcagggtaagtttcacattcacattctgcctagttatcagtagtatggcttggcacttgtggtccaatgtgtgaagtaggacgacaccacagctacatcccagactgtaccacggggcagcaacctyctcctgacaaaaatgtctgtcatcaggaggaagggatgtgacatcattagcagtgaactaattaaaaagtcatactcacctcataccgtgtcttcaccactgttactggcaacatgcaaatcccagatattgcacgtgcagtggcacccagaaagacagactccagggctgtgggtgaacggtcccctagaaacttctgcttcatggtgtacagagtgctgaagtaaatcccgaccccagggatacatcttgcaaaggacttcaaagaaacagaagcaaagaaagacagaaaaagcatac

SEQ ID NO: 71282 - DNA, 599 bp, Chicken  19866894347801_1
  misc_feature (1)..(80): n is any nucleotide
nnnnnnnnnnnnnnnnnnnnnnnnnnnnnnnnnnnnnnnnnnnnnnnnnnnnnnnnnnnnnnnnnnnnnnnnnnnnnnnntttttttttttttttaagctgataatctgctctgtcaaatagtgttattgtgctctttttaactgctgtagtttccataaaaataaacaggaagcattacttttggaacaaccctacatatttgcacatgcactgtcctggtgcaagcagagccatgcatacatcagccacgggaccctccggcctccctatccctgcagaaaaatgtatgccctgctgyagggagatgccccatccatctgccctgctgggatcagcacagctcaggacagctggaragaactgaggtgaatcagcctctggtttgtttccagctctgccacgtttgtaagaacagaccttttcttgcagtatattcgcaataagttttgtgtcaaacggcagataatggaaatcatcctggttcccattactttggtggcagcctaccctgaatgcagcattcagttctgggccacatcattaccaggcaaaaacagacaagctggagacaattcaaagagcagctaaaatgatttg

SEQ ID NO: 71283 - DNA, 599 bp, Chicken  19866894347801_2
  misc_feature (1)..(22): n is any nucleotide
nnnnnnnnnnnnnnnnnnnnnntttttttttttttttaagctgataatctgctctgtcaaatagtgttattgtgctctttttaactgctgtagtttccataaaaataaacaggaagcattacttttggaacaaccctacatatttgcacatgcactgtcctggtgcaagcagagccatgcatacatcagccacgggaccctccggcctccctatccctgcagaaaaatgtatgccctgctgyagggagatgccccatccatctgccctgctgggatcagcacagctcaggacagctggaragaactgaggtgaatcagcctctggtttgtttccagctctgccacgtttgtaagaacagaccttttcttgcagtatattcgcaataagttttgtgtcaaacggcagataatggaaatcatcctggttcccattactttggtggcagcctaccctgaatgcagcattcagttctgggccacatcattaccaggcaaaaacagacaagctggagacaattcaaagagcagctaaaatgatttgggggttgaaaagattgatttatgaggaaagatgatgaactaagtatatatagcttcac

SEQ ID NO: 71284 - DNA, 600 bp, Chicken  19866894347822_1
tgtttttaattcatgccaactttctttccacatgtttttatgcccctgccttcttcaggtggctgccaatactagagagcactggaactaaaacagcaagtatcatttttccttgcctacatcttaagaaggccttagtcctgatattgctgatcactccaagtctgatcctgctctgatagacctttaattggacagactccggctgctgagaaaacttgaagcaggagggaaaaagtgtctcttaggtcagagcttttgaggagataacaaatggggggttgtctttcttatgactgrgtctcccacagttcttatttctgcaactattgacagccgtcttggccattagtttaaccctgttttcctgcatagcaagggctgtgatattgttagcaaaattctcattactaagcctaggcatttgtctggtcttatgcgcctgatgtggacttctcacagccatgcgttcagtgccagctaattctggtatcagtcagtgcagccttggtggtaagggttgtatgaggcaagatctgtggtatctgagattaactagagccagcagcaacctggcaggcaacacaacacctaagtctg

SEQ ID NO: 71285 - DNA, 600 bp, Chicken  19866894347826_1
tattttaagattgccgtcgtaacatttaggatataacaaaaacctactgaacaaacagtagatttaattgacattagtacattactgattaaggccataacatttgacaatctctcatttattcttttctgtttactagcaggagagacaaaagaaccctatccacaatatgaaaaatgagtctctgctgtttatttaatctgcaagtttcttgctatgttactgcattgtggcttttgctgaccggtcacggattgttcacaggcagaacatattttcttatggcaaagactgctgaayrttctccgtggagaaagtacttcattctcaaaatgagaatggcagtgcaagtgacctagttgctttttgcctctctttgaatgtgaaaagcagagtttgaggaaatcagctaggatttttgactttgcttttcctactgagcttccaggaggttctgtaacctgccgtctgctgctttttatacccgatttccctcccaaccttgtttgttcagggtctgttgaaacctttttgttcaggtgccatcactaccttctagcttaaatgctgacttttttttttattccttcatacttactt

SEQ ID NO: 71286 - DNA, 600 bp, Chicken  19866894347826_2
attttaagattgccgtcgtaacatttaggatataacaaaaacctactgaacaaacagtagatttaattgacattagtacattactgattaaggccataacatttgacaatctctcatttattcttttctgtttactagcaggagagacaaaagaaccctatccacaatatgaaaaatgagtctctgctgtttatttaatctgcaagtttcttgctatgttactgcattgtggcttttgctgaccggtcacggattgttcacaggcagaacatattttcttatggcaaagactgctgaayrttctccgtggagaaagtacttcattctcaaaatgagaatggcagtgcaagtgacctagttgctttttgcctctctttgaatgtgaaaagcagagtttgaggaaatcagctaggatttttgactttgcttttcctactgagcttccaggaggttctgtaacctgccgtctgctgctttttatacccgatttccctcccaaccttgtttgttcagggtctgttgaaacctttttgttcaggtgccatcactaccttctagcttaaatgctgacttttttttttattccttcatacttacttt

SEQ ID NO: 71287 - DNA, 599 bp, Chicken  19866894347828_1
  misc_feature (1)..(70): n is any nucleotide
nnnnnnnnnnnnnnnnnnnnnnnnnnnnnnnnnnnnnnnnnnnnnnnnnnnnnnnnnnnnnnnnnnnnnnttttttctaaaacaaagaggcagttttgctggaagcctgcacatttccctcttatccagtattcaggaggtatttagaacattacagataaaaataaataatgatagaagagcctgcacttagattctcaagttgtctagtgagtcttttggaaactgagactctttctaggatttggtaaataggttttgatttaagaataacccagaatctccacatagatcgacackgtggagctactagcagaaatattccttaaaaaaaattatatatgtgtatgtatatatatagaagattggatttgctcaggttggaaaagcccttcaatatcatcaagtccaaccacaacctaaccaaacttaccctaactctaacaaccctctgctaaatcgtgtccctgagcaccacatccaaacagtttttaaacacatttagggatggtgactcaaccacctccctggggagcctatatatgtatatatatatgcatgtatgtatgtatatatatcctacatctttgcttcaatat

SEQ ID NO: 71288 - DNA, 600 bp, Chicken  19866894347832_1
agagattttcttagttttaaatgcttaaggcctgattaaccactgcatcatggattttagaaatgtttatcgtagcccatgaggaaaatctgacttatatatgcatactccatggctcaggaacaggatttccactgatactgggaagatgtaagtttagattaatcagaaatattacagtgacttctgcatatattttctttattatttgctcagacagaaggttgtaggttatgttgccaccttcctgctgtaacaggagatagtgagaaacaaatgtgaatttcattatccatcccratctgattgtttttactgaagaatacaggtcttctgtgtctcttgaataaatgatatctamtagactataaagaaatctgttctccttcatgagggataaactttcgttccttaatactgcagtggaatagaaaaaatttaatgtttttatccaccatcaaggaggtgatttctgcattaaagctccaaacacactgtgctaattatctttcaaggtcttgaatggattctgttacctttttgtcttctgttgataagtaattttagtgataaaaaatgctaccataacagtgtgttcct

SEQ ID NO: 71289 - DNA, 600 bp, Chicken  19866894347832_2
aatgtttatcgtagcccatgaggaaaatctgacttatatatgcatactccatggctcaggaacaggatttccactgatactgggaagatgtaagtttagattaatcagaaatattacagtgacttctgcatatattttctttattatttgctcagacagaaggttgtaggttatgttgccaccttcctgctgtaacaggagatagtgagaaacaaatgtgaatttcattatccatcccratctgattgtttttactgaagaatacaggtcttctgtgtctcttgaataaatgatatctamtagactataaagaaatctgttctccttcatgagggataaactttcgttccttaatactgcagtggaatagaaaaaatttaatgtttttatccaccatcaaggaggtgatttctgcattaaagctccaaacacactgtgctaattatctttcaaggtcttgaatggattctgttacctttttgtcttctgttgataagtaattttagtgataaaaaatgctaccataacagtgtgttccttcagtgacagcatgctgacatccagtgccagcaacccaaacaattagtgttacataggaat

SEQ ID NO: 71290 - DNA, 600 bp, Chicken  19866894347832_3
gactggtaattttcactgtaatggtccttgaaaaagatgcgtgtattatatgggtgaagatgatggaacagtgagggttgtgtcaagaacccaatcatgaaaaaatattttctttcccatgagggaaatcatatcagtttactgagcaatcttacaaaaatataaaaaaaaccatatatttgaagcaacttggtcacctgtaggaagatggtcccaggttgtaaaggtgtcagtctgaatggaagtaccctgtgttaccctaactgatagaagtcaggaaagcaagatgtgcagaaagarctgaagagaactcaggttctcatcttaaaaactatgacaagtctttaatgtagcaccaaaatgaagataccatgccaggcttgtcaccaactcacacctggtttgttgttacctattccaagcttctcagagaaagagctgtcttcatatgggctactaatcatccctaacacagaagtaatttctccatgaggcttttgaaaaaagcttctttgtgacaaaatcatgtgcctatcaatggtagggttggtgcatttcattcactaaatattgcatacttgcatttgtttatttttttac

SEQ ID NO: 71291 - DNA, 600 bp, Chicken  19866894347834_1
atggactcccaagtgccttccgacctgagccatcctatggtttgaaaaagtgatttatctactttctagatacagaaaggtgtgcattgaagtcaggcagtccctccttgtccacatgtcagccaggtggtgggagaactgtaggcgagtgaccaacctgtgtgccatggggtgagcgggtatgggagctgagcagacagctcagttctgtgtctgcctcttcctgcactgctgcctgagctctgcccacacctctgtccttcatcctcctcctcgaagggaacattgtggtgaaatcartgagagcgactcacacggccccactgctgggatgggcagcgtgccataarcctggcagtgctgggaatggggcatcctcagggggaggcgagtggaaacagcaccaaaaaaaggggatggagtccctgagccctctgctcacagagcagcaccccggtgctcccccagctcctcgtcagcgggtgaattaattgcgctgtcgtggagaggccaaaggtagagctctgcactgggcttcggttggggctgtcagaaagagccctttgtccccatgttatgatttttacagtgctgatgggg

SEQ ID NO: 71292 - DNA, 600 bp, Chicken  19866894347834_2
tgatttatctactttctagatacagaaaggtgtgcattgaagtcaggcagtccctccttgtccacatgtcagccaggtggtgggagaactgtaggcgagtgaccaacctgtgtgccatggggtgagcgggtatgggagctgagcagacagctcagttctgtgtctgcctcttcctgcactgctgcctgagctctgcccacacctctgtccttcatcctcctcctcgaagggaacattgtggtgaaatcartgagagcgactcacacggccccactgctgggatgggcagcgtgccataarcctggcagtgctgggaatggggcatcctcagggggaggcgagtggaaacagcaccaaaaaaaggggatggagtccctgagccctctgctcacagagcagcaccccggtgctcccccagctcctcgtcagcgggtgaattaattgcgctgtcgtggagaggccaaaggtagagctctgcactgggcttcggttggggctgtcagaaagagccctttgtccccatgttatgatttttacagtgctgatgggggactggcagctgtgtcaccatctggctcttagcagagtgcctgcctgcat

SEQ ID NO: 71293 - DNA, 600 bp, Chicken  19866894347848_1
gtttgctcactgttgttgcagttgaccgttacctgacaatctgcaggcctgacataggtactgtctgcttagtgaaacacacttagcagttaggcttctatggactaggtgtccaattgttttgttttgttttgtgaatgactccacagttaaagagctgggtgtagttaaaacatagattatgataccacagtacatgatgatcagtatggttcacaagcagtgctatccatgcaaacatgagaatttcagaggcaggctgttacttggtttataagttgtattttcctgtcagtttcsagtcattagagggccacatccatatactgaagcacacaaaaacctcagctgtgagaggttttgacttctgtcaagtctacgtttkcttctagcactgagtcagcactgtactgaatatttttcactcttctttattacagctgtattcctctttgttgacaacagtcaattcctctttgttctttctttctgtgttgcatagtaggccttttggcatggcattagggtcaggtcttgtctgtacgctgtgggttggagtggatcatggaattaagtggcttttaagtctggaatgcttag

SEQ ID NO: 71294 - DNA, 600 bp, Chicken  19866894347848_2
gcagttaggcttctatggactaggtgtccaattgttttgttttgttttgtgaatgactccacagttaaagagctgggtgtagttaaaacatagattatgataccacagtacatgatgatcagtatggttcacaagcagtgctatccatgcaaacatgagaatttcagaggcaggctgttacttggtttataagttgtattttcctgtcagtttcsagtcattagagggccacatccatatactgaagcacacaaaaacctcagctgtgagaggttttgacttctgtcaagtctacgtttkcttctagcactgagtcagcactgtactgaatatttttcactcttctttattacagctgtattcctctttgttgacaacagtcaattcctctttgttctttctttctgtgttgcatagtaggccttttggcatggcattagggtcaggtcttgtctgtacgctgtgggttggagtggatcatggaattaagtggcttttaagtctggaatgcttagatgtatttcagtgataggaagcatgaatgctgcaatgtttgggactttagttctctgagaggatcgttatcgttaacaccacaca

SEQ ID NO: 71295 - DNA, 420 bp, Chicken  19866894347857_1
tcttagtgaatacgataactaggaaaaaaaaatgactgactagagctgttagttttgtcatcttcaggaatgtttattcaagaaaaaaaaaagccactgtgtaaatacttgaatgatatataatagtaagctacttatgtttaatagtttggatttctttccaaatcacaagttaaaaaagtagatattggagcaggtgttcattattcttccaagtgtaaacattttatattaaataattttctatcgtgtccacgtagtgcatggaatgtttgtcagaagacagttctctaagactgyttattaccaagttagcaaacgtaacgcttattaatatcagatctcagtagtttaaaaatgatttgccttaccttgcacaagtaaagcagggtttctgaaaactgccttcagttatctttc

SEQ ID NO: 71296 - DNA, 600 bp, Chicken  19866894347865_1
cctgtcagcagcaacatctctgtgagaagctggggctgatcatagccagcctgcacaggagaaggtgccggtagctgagcagcttgagcgttgtgacagtgtccctcactgccaccagacccactgttaatgtgcttgtattagagcagtgagtgggcctgcagaagtccgtgtcctcttggaccagatggtgacaggtgggttgctcagaaagccccaaaggacctaccacagttttgttgatggccaaatgcctcaggccaggaggatgtcgttctgtcacacagtggacccacccartgcaccagtacttactgtgccttgattgtatgtctttgctctagaacccttccagaataatccctgcacagcccacagacttgtctgtcctaattgttaattactgtatctcccgcttttagtatcacctctattttcagtgttagtagttcgctgagtctgtgtttgtaccctctggagagtgtgagttggctgaatgcagggcttgggttctggggagtatattgcattgctctagctgggaagaagtaaggaggtcttggtctgtctttccagctctactgcattatgttttggttt

SEQ ID NO: 71297 - DNA, 600 bp, Chicken  19866894347867_1
taattagaactattgtttgcctcctggaaattgtccttccattgcaaatatagatagttgtccttgtccaggagggagtgcctggaaactcacttgtctgtggcaaagcctaaaatgataggccagggatatgctctccagtcccgactcctcaggtggtgtcatttgaaggcagtctccaaagtctctggaaccagacaagcttacactggcatactgtctgccaggtactctcagttcccaaggctgcctttaaacttaagtcccttaagccttttttataagcactcagcatttcaygcagacagcctggaagacttaaaatgatggagagcaaagaaaaaggggattttccagtgggaagagatcttagcaaagactcttcctggattttgtgggttttgctctctctttcatagggtctttttgtagctgggcttctgcttttagtgccaatggcaaatgaaaaatgtaattgatttgaaatttctatggcggtgtgagtgtttgcaatttccttttgctgtgggaatgttagtgtcacaagctggttctcagcaccatgcttttggtctggaactctctgcaaggttgtaatga

SEQ ID NO: 71298 - DNA, 600 bp, Chicken  19866894347871_1
tctgcctgtcagtttcaagtagaaagcaatgcccttgtgctcagccttcttcccagccacagtacttttgtcaccaggtgaaaagtgccactccaaaggaacgatgtcagaggaaacctcccgtcccttggctgatgaaagccgctgtctgcgtggagccaggtcagtgccatgagctccagaatgcagcagttgtcagtacttcttgaatcccagttgctgcttttcagtgtaatcacccagaagagggtactgagaggctccaggatgaatgtagctcagcctttctgccccagaatygtgtggctggaacgcactgagataaaggaggaatcccaccatcaagctggacttgctaaggcagaacagctgacaagggagtaccaaagctgtcaaatacttacttgccacaaccagtatatttctgctcttaatattaaaagtgtgtcagaatttccattataaagcacttattttgtggggttatagctttgccataaaaatacaccttgggttgagtcttggcacaaagccatttggcggcttctaacaccatattaattcagaacatccagacaacgtttttaaagaccagtatct

SEQ ID NO: 71299 - DNA, 600 bp, Chicken  19866894347872_1
gtaaaggatgctgaaaagttcaaattttgattggttaccataggattgaagaagaaacactgtgagggagtgaagtacaatcatctccctcccatcctccttttctcttgcctcctgattaaacacctagaagaaatggtccctctctcattagctatacctgcacacaagggacagaaaaaaaatcactcagaagcgttgcaaggccagaaggactaatccagttaacaaggtgtgggacagatgcctttttgtcctccctttcccaccaaggagcatcctgcctgcttgcctggctcrgtcaaggcatctggctaccaaggtgcagtgtctcctrccagcagcactctacacaagggaagagctgtaactgtccacagacagaaaaagcagcaaaatttgcatggattcacatggtttgcatttgtttatccttcagaaagcttttgctccagagaagccacctttctcttatgcttatgaggctttagtaaaaaaaaaaaaataatgttttgcagcactattcttttagtcccaaggtttgaccttgaaatggaataattcaatttgcctctacttgatatgtttctacttggctta

SEQ ID NO: 71300 - DNA, 600 bp, Chicken  19866894347872_2
ccataggattgaagaagaaacactgtgagggagtgaagtacaatcatctccctcccatcctccttttctcttgcctcctgattaaacacctagaagaaatggtccctctctcattagctatacctgcacacaagggacagaaaaaaaatcactcagaagcgttgcaaggccagaaggactaatccagttaacaaggtgtgggacagatgcctttttgtcctccctttcccaccaaggagcatcctgcctgcttgcctggctcrgtcaaggcatctggctaccaaggtgcagtgtctcctrccagcagcactctacacaagggaagagctgtaactgtccacagacagaaaaagcagcaaaatttgcatggattcacatggtttgcatttgtttatccttcagaaagcttttgctccagagaagccacctttctcttatgcttatgaggctttagtaaaaaaaaaaaaataatgttttgcagcactattcttttagtcccaaggtttgaccttgaaatggaataattcaatttgcctctacttgatatgtttctacttggcttacaccagaattattctgttctgttttagttaggtgcaa

SEQ ID NO: 71301 - DNA, 599 bp, Chicken  19866894347880_1
  misc_feature (1)..(57): n is any nucleotide
nnnnnnnnnnnnnnnnnnnnnnnnnnnnnnnnnnnnnnnnnnnnnnnnnnnnnnnnnagcctcctcagacaggtccttgcagtggagcacccctgtgcacccagcaacgagcctgctgccagcaggaagacatcaagcagagctgggcatcagaatgaaatagtgatggtgcaggggacgctgctagctctgagtctcgcaatgaatgccacacatggctctgccaggctggtccatgaccagccatcctaatgagggggctttttgtgctgttttgttggcaagtggcacagaggtgcyrtgggctaaaaggttcgctagctctgtctcactgctcctccttgtttgcttctattttgaccccaattactgcagcaactagggatgcctggcatttttgtgaagatgaaagcaaaagcgacctttatactgaaccaaatcccgacgttctttttcagtttttagaatccttatttggaaaaagcttaccttcataacagcttcatcaagagctttgctttccagtaaggacggaaggaaaactgaaagatggctttagaactggatccacgtggtgcaaacgcgatgcagatgctgct

SEQ ID NO: 71302 - DNA, 599 bp, Chicken  19866894347880_2
  misc_feature (1)..(56): n is any nucleotide
nnnnnnnnnnnnnnnnnnnnnnnnnnnnnnnnnnnnnnnnnnnnnnnnnnnnnnnnagcctcctcagacaggtccttgcagtggagcacccctgtgcacccagcaacgagcctgctgccagcaggaagacatcaagcagagctgggcatcagaatgaaatagtgatggtgcaggggacgctgctagctctgagtctcgcaatgaatgccacacatggctctgccaggctggtccatgaccagccatcctaatgagggggctttttgtgctgttttgttggcaagtggcacagaggtgcyrtgggctaaaaggttcgctagctctgtctcactgctcctccttgtttgcttctattttgaccccaattactgcagcaactagggatgcctggcatttttgtgaagatgaaagcaaaagcgacctttatactgaaccaaatcccgacgttctttttcagtttttagaatccttatttggaaaaagcttaccttcataacagcttcatcaagagctttgctttccagtaaggacggaaggaaaactgaaagatggctttagaactggatccacgtggtgcaaacgcgatgcagatgctgcta

SEQ ID NO: 71303 - DNA, 600 bp, Chicken  19866894347881_1
gtgattcataccaacataaaaggtacttacccctcagccagattaatcagtcgtcctcttacagtacatttggatttatatcagaggcatctgccagtacaaatatatacattgggaactgcggtctttaacatagctgctgccagaaatctgacacgttcaccttgtctgagttctcagatttgagtgcttttcttcatatgcattgcactttgttttcaggaggccaattttctaatccagtttctctggattactaaatatctcttaatatgtaaaatttaagaaatgatttatttktatggtgttgaaacaattctagaaattctgtctgtgctgaggagagtatcaagtttgaagtttaattaatcttttaacttggtcactgtgttctatatacttgccaatttgtctttcagctaattttcacagaaggagccataacgttattgcagttgtgccaatgttctgttgagaaaatagtattttctagcttggagtcattcccaaattgtattagctaattttgcagccctgctgaattgcaaacttggtaaaaaaaaaaaaaaaaaagctgtatatttcccctactttttagat

SEQ ID NO: 71304 - DNA, 599 bp, Chicken  19866894347887_1
  misc_feature (1)..(174): n is any nucleotide
nnnnnnnnnnnnnnnnnnnnnnnnnnnnnnnnnnnnnnnnnnnnnnnnnnnnnnnnnnnnnnnnnnnnnnnnnnnnnnnnnnnnnnnnnnnnnnnnnnnnnnnnnnnnnnnnnnnnnnnnnnnnnnnnnnnnnnnnnnnnnnnnnnnnnnnnnnnnnnnnnnnnnnnnnnnnnntggaggggaatggctttgggaacctggctagtctcacgatccaagtggagccctcagccaagaaacccccctctatctcctcagtgaaagtggcaccacctgactcggctgaagaccttctctatrcaagcctgtctgtagaaagtggtgactcagaaacagggatagattcagtagactttgtagacggagatccaggaaggcattttgcagtcatcagatcctactttggaagcacagagttcatgattgtggcaataaaagagatagattggctacttcacccttttggtttcaacctcagtctacaagccaaggacaagagtaaaccaccacttttctctcctgttagagttatacatatacctccttccaagtatgtctctgccagatttgagaaagaagtctaccgagttcarctcagt

SEQ ID NO: 71305 - DNA, 600 bp, Chicken  19866894347887_2
ctctatrcaagcctgtctgtagaaagtggtgactcagaaacagggatagattcagtagactttgtagacggagatccaggaaggcattttgcagtcatcagatcctactttggaagcacagagttcatgattgtggcaataaaagagatagattggctacttcacccttttggtttcaacctcagtctacaagccaaggacaagagtaaaccaccacttttctctcctgttagagttatacatatacctccttccaagtatgtctctgccagatttgagaaagaagtctaccgagttcarctcagtgaattttccccacctggaagccaagttgctatggtgaagattacaccagtcctcccgaatcttaaatatgttttgagacctactcctgacagcacacattttaaaatcaatcctcacactggattgattactactgtcagagcaatggacttccatgagcaatctaattttcagcttgaagttgcaactactaacagtcacacatctgcaactgttgtcattgacatcattgactgcaacaatcacgctccaagttttagtcagtcttcataccgtggggcctttgatgagaat

SEQ ID NO: 71306 - DNA, 600 bp, Chicken  19866894347894_1
tgttttttcgcttgcatgctccagcttgatttatcttggcataaaaacaactctggccaggtgcagagttgtgtgcttcgaatcggtgctaaggtccaaggagctgctgcttgagtgaccaacgtttgctgttcccagggacttaaattcactgagtaggggttgagggttaaagaacagacttttcttgaaggcagaagtttgaattcctttgcaatgaagagtgaacctgaatctgaacagcacattttgggttttattgtcctctgatgccaccacactgcttttcctgcctttatrgctgctcctgttcccctctgtttctgcacaccatgagtctctgggtggtttgtgcacatttggctgcagctcagttccctgcagtcctctccatttctcagccttggggctccagaatgtgcactgcattctggttaacttctgctccaccagcaagctggaaaacttctccagcaatgtcagaaatctccagcagttgatatttattgaggcttttgctgcctgcaagaaatgtaaaagccaacccaagtgattgatagacccgatctggattgctctgtgttttcttagccaggttga

SEQ ID NO: 71307 - DNA, 600 bp, Chicken  19866894347895_1
gagagtgactaccagctgtctccaggggaaacaggattctctatgtgacagagtgagctgggcagttctaagacccttccacaaatacacgctgtatttgtgcccatcactgatgagcattcaagcagaaatccagtcatggtttacagaatcagatcatagtttctgaatcatacgtgcacacctaatttgcctgtgcagtgactatttgcaccagctggtttaagatgtctaggcattcattctgagatgcgcttgcttagatgagtcctagaggcataaaaaagccaagagtgaagrtactattcaagtggcctatttataggtttattataattaaataatagatctattataattagattgaacataagaaatgttagttaggcagacaggagagcacatacgagaaatgtgttttcctgaacttgtggaaatagaggtgaagtgatctggagaagtaagcctcttctgtttagagtgtgcgttacatatttacagggtttttgcatttaagtagcacttcctgatcgcagcccagttctgggaaaatggttaaaaccatgagttggttcagccagcgctactaacacaggctaa

SEQ ID NO: 71308 - DNA, 600 bp, Chicken  19866894347899_1
tgggaacctgggctgtgtgttctgcagctcctgtcctcccccaggcagggctgggtcggggatgcagtgtcatcacagagccatgtcaacatgcagtgttctgttgtcaccagcctattttaataccaaaaccaatgatgtacacggggcccaggaaggtttctaacaactctgtctgaagttagacagccctgagaagcacagctaagaaacatggggatagctgtcctctggctgacttgccatggaaccaggaactcattgcatacagtgatgctacttagatatgaaatcccagcraagcacggtggctgaatgcactgcagagttcttgtatctcctcttgaacacatgcaagtttgccttctgtgcagtgagtgctgatgcagcaggcactgcagtgacgtgctgaccttggctgcaccacgagcagtctgtgtccagggatgctctgctcctgagcagcgctctcagtgttgtggcaggagcatttctttgatgatatcagccctgaatatctgattgttctgctctcccagctgtcagatatgattaatggcagtcgtgtatcccaaatgactgaggtggtgtggaacactg

SEQ ID NO: 71309 - DNA, 600 bp, Chicken  19866894347899_2
ctcccagctgtcagatatgattaatggcagtcgtgtatcccaaatgactgaggtggtgtggaacactgctgctgccagtacccttttagattgagacctgatcatgaaatgacttcttcatccactggtaagagaagatctctctccatatgaaaactttatacaatgtcatggaaatagatgttatattgagaccagatacccaagctttgtgattaagctaataggaactctgcagactgaggtgcaagtgccagcctcactatggtttccaacttagctcagcttccagaggaatgrtggacgtcaggagtcctctatgttttatcacttaatatctttaaagaaatgagcaatctgatagagatctccctgcaccaaacacatggaacacataacagcccgaactctgcagaaatattctctcggtcccacagcagaaatctgcaacaaagccaatgaaaaaaaatccatatgcagagcagccgtgggacctggtcccaaawgtgtgtgctcaagctctcctccagcgcaccttcctggcagctgctaactccattcctgtccttgctccgcggtgtgctgcagacctgttggatc

SEQ ID NO: 71310 - DNA, 600 bp, Chicken  19866894347899_3
gctttgtgattaagctaataggaactctgcagactgaggtgcaagtgccagcctcactatggtttccaacttagctcagcttccagaggaatgrtggacgtcaggagtcctctatgttttatcacttaatatctttaaagaaatgagcaatctgatagagatctccctgcaccaaacacatggaacacataacagcccgaactctgcagaaatattctctcggtcccacagcagaaatctgcaacaaagccaatgaaaaaaaatccatatgcagagcagccgtgggacctggtcccaaawgtgtgtgctcaagctctcctccagcgcaccttcctggcagctgctaactccattcctgtccttgctccgcggtgtgctgcagacctgttggatcccttccagcacagatgtacgattgttcagagacctcagtgctgaccgtaggaactgcgatacacgaacgagagcactgaattgctcaaacttttgctcaagttacagtgcagaatctcatccgttaaaccctggcgtgggcagagctgtgggttctcagctcctcgggaagatttcagcaagcacaaagcgcaggagggcggcagc

SEQ ID NO: 71311 - DNA, 508 bp, Chicken  19866894347903_1
gattcctgatcaagatattttactaaattgcctaggagctttattgaatttcttgtatgtgttacaaatgtggtatttttagttttctgttttaataaggaaaccactatcaaagaatgctgaagaaatattttgaaaataagggttttgggaaatgtaagaaagaatcagaaaaagtgtgcacttgatgaagtatttcctgcctacaatatttctgcctgagtgtttattccaatatttcttaagtgtcattgaagtgaagttaatgaatcaaggttttaactctcatgtttgaactcygaatcgcattattcaataaattttacattgatgactaatgttttcaattttagtttttccatttgcaaaggctgtagtattatttgcggatggctgctggtcagcaaacctaactgttttaatttacttgcaacaaagcactgacttgtgattctttgtattttaaaaaccctaccaaagttaaatcatacaatcatagaatcgtaga

SEQ ID NO: 71312 - DNA, 600 bp, Chicken  19866894347909_1
acctaactggcacagaaaaaaaacaacagtttggacatgcccacggtgaaaaacatacaggaagcgtctctgttaaggtcctaagtaacacaaaaaaaattaaatccaaacatttatgattcaaaatgggcatcaggttctgtgacctgaccctaagatattctgcctgtcactaaggagtactggcattatttgtgcaggtaccggcacaatttgtgcagctgagtgaataccatcacacccagcatgcaagcattgctactcattaccatttataaggtttctgacagccagggaaayggcagtacagaactggtgaagagagatcactcattcagtgatggtacagggattgctgatcaaaagacacaggcaaagtggctgatcttcctgctaggtcccaccctgagtacagtacagataagactgctctctgtcagcatggccactttatcactcatcttcagaacatgaaatggcttcaaattctgctcaggccagtggaaatatttctgctgtcatagcagcggtgacaaaacagagaaaacaaggcaagagagatgcacagaatagccaccttctcacaggaagccccaggca

SEQ ID NO: 71313 - DNA, 600 bp, Chicken  19866894347910_1
agtttgtttctcctcagatcgttgccactgtttttaattattttggggtcccctgcttcctttcctggaggcgcagattttgtgaaaatccctctgccccactagtcacagaactgggccggaccagcctttaaacggctgacatccagccaagagtgtactggtccaagccacggagtgccagcttctgcaggagaatactgtgcgagacagtgtcaaaggctttgctgaagtctaggtagaccacatcaacagcctttccctagtccaccaggcaggtcatagaaggagatcagattkgtcgagcaggacctgtccttcgtgaacccatgctggctagacctgatccccagttatcctgcatgtgcctgctgcatgatcttcctcaagacaatctgctccataatcttccccagcaccgagatcaggctaacaggcctttagttccctggatcccccctgcagctcttcttgtagatgagagtcacattggcaagcctccagtcttctaggacctctccagtcaacaaggagcactggtagatgatggaaagctgcttggctgtcacctccgccagttccctcagcactctcgagtga

SEQ ID NO: 71314 - DNA, 599 bp, Chicken  19866894347914_1
  misc_feature (1)..(23): n is any nucleotide
nnnnnnnnnnnnnnnnnnnnnnncctgtcactgtttccacgtgccgtatttcagttactgaaaacacttcctcaacacagtcactaagccaagatccctgttccaagaagcaggtgacttcaggcgattcaaagacatgtgcaacattggcatcttgtgaagcataattttgcctcttaggataaagaaaagcttttggaaagacagtgaatctgaaagttatgcccacactgcagtgagtgcttcacaggtgtgcatgtctgggagtaactgagttgactggaacaggttctatgtctrtatcgtctttctgaaactcttatacaaagaatatgttcttaggctgtatatccaggatctgaatcttactttaaaaatgtaagtaattaaaaacatttaactgaagacatttctatactgttttgtctcacttggttagctctttaaattcttcatattcttgttttgaagtcgccagttcactttgagtttgtagcaggcgtgctttcagcttctcaacagatgccagtgagttgccttcggctaacatggtgctagaatatacgtgctgacctaaagaacaaaaatagcccctctga

SEQ ID NO: 71315 - DNA, 519 bp, Chicken  19866894347914_2
tctgaaactcttatacaaagaatatgttcttaggctgtatatccaggatctgaatcttactttaaaaatgtaagtaattaaaaacatttaactgaagacatttctatactgttttgtctcacttggttagctctttaaattcttcatattcttgttttgaagtcgccagttcactttgagtttgtagcaggcgtgctttcagcttctcaacagatgccagtgagttgccttcggctaacatggtgctagaatatacgtgctgacctaaagaacaaaaatagcccctctgaaatcacggartatctcaaatatcttaacttttacccaaatgtaagcattcatttgtagacttttgaagacggcaaccatgattgaacaaaamaggtatcagctacagcccacatgacaaccaatagaatgattaacaktacttgagcccccacgatagagataaggacaacagaataagattacccatggtatgcacaagatgaaaatgaatcccaataccctacagcg

SEQ ID NO: 71316 - DNA, 437 bp, Chicken  19866894347914_3
aacatttaactgaagacatttctatactgttttgtctcacttggttagctctttaaattcttcatattcttgttttgaagtcgccagttcactttgagtttgtagcaggcgtgctttcagcttctcaacagatgccagtgagttgccttcggctaacatggtgctagaatatacgtgctgacctaaagaacaaaaatagcccctctgaaatcacggartatctcaaatatcttaacttttacccaaatgtaagcattcatttgtagacttttgaagacggcaaccatgattgaacaaaamaggtatcagctacagcccacatgacaaccaatagaatgattaacaktacttgagcccccacgatagagataaggacaacagaataagattacccatggtatgcacaagatgaaaatgaatcccaataccctacagcg

SEQ ID NO: 71317 - DNA, 391 bp, Chicken  19866894347914_4
agctctttaaattcttcatattcttgttttgaagtcgccagttcactttgagtttgtagcaggcgtgctttcagcttctcaacagatgccagtgagttgccttcggctaacatggtgctagaatatacgtgctgacctaaagaacaaaaatagcccctctgaaatcacggartatctcaaatatcttaacttttacccaaatgtaagcattcatttgtagacttttgaagacggcaaccatgattgaacaaaamaggtatcagctacagcccacatgacaaccaatagaatgattaacaktacttgagcccccacgatagagataaggacaacagaataagattacccatggtatgcacaagatgaaaatgaatcccaataccctacagcg

SEQ ID NO: 71318 - DNA, 600 bp, Chicken  19866894347916_1
ctggaggtgtatttgatgccacacaacaaatgtcactgacgaacccacacgcacaccgctggtagctgtgatagcaccagtgacaaaaagcacaccaccgtcgtaacaccatccaccatcaccacgcacgtttgctttgttttcccttttaagttgaagggaaaagaaccccacaagctttaaagatattcccctccaggcaatgggatcccgtgcagagttagaacagttacaagatcggaatggaaaagcacttccaacggttggcttctttctacctgctaacgacacatacttaaygaatttgacgcggcgctttggattagttgtacagatccggtctgtggaaggaccgatgactttaataacaaacagtcagtgcaaaccggcagtaagcagcgcagtactttacagaaaccacaacagtgaggctacgggaaaccggcaggtgtgtgagtgacgcaggaacctgctgcatctctacaagggttctttgcagcccacgctcctaaggccatttgcaaatgttacccgtcgtttctgtaacgaatcaggccattttattttcaccggtaaagtggttatgatcgtctctgagtg

SEQ ID NO: 71319 - DNA, 600 bp, Chicken  19866894347917_1
ttgcctagtgaaatctttgtcaactagaactactaagactaggcattacctgctcctgtctctgtctgatgcaagtcacaatgatacacctagaaccctgaactagtcatgggcatgggagaaataaaaggcctcccaaggataaccagaaggtctgtattggaggtgctccagtttcctgccctgtgttttggataccgttttctcctttgctccattcaagttatggtggacactgcaggctgagccctcacagctgaatcaaggttagatgtctagaagtcaggaggcacagtatgyctagatcatacatctgccccatttgaagggttcttcagyagcggatattaaatctccaaaaagcaaaaagccatttacaagtgctgctaagtattacacagtgctctctttcaacaggagttaaagatggtatttcttggcattgcactcaacattgcactctcactcccattttcagagaaatttgaaggatgcatatttctcacataagacaataaaaaccctaggctttgggaatcctaacagcagcaactgctgaaagaactcagtctaggaaggactctaaggggcaaggtggca

SEQ ID NO: 71320 - DNA, 600 bp, Chicken  19866894347917_2
taggcattacctgctcctgtctctgtctgatgcaagtcacaatgatacacctagaaccctgaactagtcatgggcatgggagaaataaaaggcctcccaaggataaccagaaggtctgtattggaggtgctccagtttcctgccctgtgttttggataccgttttctcctttgctccattcaagttatggtggacactgcaggctgagccctcacagctgaatcaaggttagatgtctagaagtcaggaggcacagtatgyctagatcatacatctgccccatttgaagggttcttcagyagcggatattaaatctccaaaaagcaaaaagccatttacaagtgctgctaagtattacacagtgctctctttcaacaggagttaaagatggtatttcttggcattgcactcaacattgcactctcactcccattttcagagaaatttgaaggatgcatatttctcacataagacaataaaaaccctaggctttgggaatcctaacagcagcaactgctgaaagaactcagtctaggaaggactctaaggggcaaggtggcagttagcttcagtcctcctggggtgacttcacagttaaaa

SEQ ID NO: 71321 - DNA, 600 bp, Chicken  19866894347918_1
aggacactgcatggatatgtcaaagtaaaataaccttcagctagcagaaacagactgggctataggtcaattttattgtattatggaagcagatattgtttttcacattgtgttaacagagatacctgtgagatactcaagacagatttttgttttaaaaaaaaggagaccacatgtcaagccacagtagagacacaaagaaactatgtggtggaacaagcatattttctctacctttacaaagacccttgcaaaagttggccttaatgtatctctgaaataaaagttgaacatggcaaygcagagtaaattcgcaatgtgaaatgataaagaacaagtgctgagcacatgcatttacataggcaccaaagagccatgaattattggtaactgctctaccaggaggcctgctagttgaactgcaggctgacagtgatgtcagtcactcccyttctgggtgctgaacacatacactcttccaggttgaaaacytccagggatatgctgctaatggaacagacttatctatgtcctgaaaataatgaccacttcatctgagcgtctcacttaaagttcttgccttcttgatcgtgacactaa

SEQ ID NO: 71322 - DNA, 600 bp, Chicken  19866894347918_2
gttttaaaaaaaaggagaccacatgtcaagccacagtagagacacaaagaaactatgtggtggaacaagcatattttctctacctttacaaagacccttgcaaaagttggccttaatgtatctctgaaataaaagttgaacatggcaaygcagagtaaattcgcaatgtgaaatgataaagaacaagtgctgagcacatgcatttacataggcaccaaagagccatgaattattggtaactgctctaccaggaggcctgctagttgaactgcaggctgacagtgatgtcagtcactcccyttctgggtgctgaacacatacactcttccaggttgaaaacytccagggatatgctgctaatggaacagacttatctatgtcctgaaaataatgaccacttcatctgagcgtctcacttaaagttcttgccttcttgatcgtgacactaactgtcatcagcaggcttaaaaagctgtatgtatgcttccatgattggatgtagcagaaccttcaagttatactgaggcagaagtaagggcactgttctcaaatttatgattgcattgagagatgaggtcatgcttagagagttttactgtc

SEQ ID NO: 71323 - DNA, 600 bp, Chicken  19866894347918_3
acacaaagaaactatgtggtggaacaagcatattttctctacctttacaaagacccttgcaaaagttggccttaatgtatctctgaaataaaagttgaacatggcaaygcagagtaaattcgcaatgtgaaatgataaagaacaagtgctgagcacatgcatttacataggcaccaaagagccatgaattattggtaactgctctaccaggaggcctgctagttgaactgcaggctgacagtgatgtcagtcactcccyttctgggtgctgaacacatacactcttccaggttgaaaacytccagggatatgctgctaatggaacagacttatctatgtcctgaaaataatgaccacttcatctgagcgtctcacttaaagttcttgccttcttgatcgtgacactaactgtcatcagcaggcttaaaaagctgtatgtatgcttccatgattggatgtagcagaaccttcaagttatactgaggcagaagtaagggcactgttctcaaatttatgattgcattgagagatgaggtcatgcttagagagttttactgtctgtcttaaacacctgccttgagaagtatttgtccagttatg

SEQ ID NO: 71324 - DNA, 600 bp, Chicken  19866894347922_1
gactgctcagcaatagtacaaatgctcctctttctttggaagccagatacctagttatccattttctgtgtgtgaagtcctacgcacaagatgccccgagtctattgtcatgcctaacttttaaacataatccttgaggctacagctgtttttattggtgataacagccaaccagggacaaattcctgtcattctgatgggataattggcaagtcccttataaaatagactggccatatattacctaatgtaatctgagtttcatctgggtaccatgatgtgtctgtggccctaatataraactaattggtgttgtagtttagagcatctcaagggagttgcatgactgtccaccaaagccatgagtttattgtatagcattgtgagagctgtcttattatgtaagaatgagttgattagaaagagtagaatagggagcaatgtatgagaagagtggttttttttctactggaaggaacagataccagagagatctgctcaacagttcgaacaatgctgggttatagaacaatttaaaaataatgtggatttgaaaatacacagaaggaaattgttagacagcattatcaagttgacagt

SEQ ID NO: 71325 - DNA, 600 bp, Chicken  19866894347928_1
ttaagcatggattttagtcaaataaaacttaccaagagagtatgctgtgatctgtgcttagcaccatgatctgttgttttgatgtatctgaaaatgataaggatgattgtcatccatcttcaaaattcaaattcatcagtgttagtctttatctgatagtcatgaacaaataaatgtattttggaatgttttgaagagcgtacagtagaggagcggtgagcgtaactcagaaggcattgtcgtttgtcagtggtacgtgttacatggggcatgattctcagactagaatcaggattgtckcattcaagtcaaagagaatgtgtgtatgtgcacatggcactcagcctgcccaggtgaaatgctcagtcttcatgaggccatgctgcartgtcacttagcaaagccaaagcttttcatcgcagcatttaaaatgtgatttttcacactttagtaactgtaatgacaaagcttgacaggaaatcatcaccacattgcaaagagaatccagagygttcctgtttgagagataccttcccctaaagaaaaaattcttagaaactgcactttctcaayggaattgtgatttgccgttcagtttac

SEQ ID NO: 71326 - DNA, 600 bp, Chicken  19866894347928_2
tgaaaatgataaggatgattgtcatccatcttcaaaattcaaattcatcagtgttagtctttatctgatagtcatgaacaaataaatgtattttggaatgttttgaagagcgtacagtagaggagcggtgagcgtaactcagaaggcattgtcgtttgtcagtggtacgtgttacatggggcatgattctcagactagaatcaggattgtckcattcaagtcaaagagaatgtgtgtatgtgcacatggcactcagcctgcccaggtgaaatgctcagtcttcatgaggccatgctgcartgtcacttagcaaagccaaagcttttcatcgcagcatttaaaatgtgatttttcacactttagtaactgtaatgacaaagcttgacaggaaatcatcaccacattgcaaagagaatccagagygttcctgtttgagagataccttcccctaaagaaaaaattcttagaaactgcactttctcaayggaattgtgatttgccgttcagtttacagaagccgtgaaagtgaaaggtgtgatcgtgtttttacagtggttattgtaggtgatatcacttagcagggaggtgagtattctttgt

SEQ ID NO: 71327 - DNA, 600 bp, Chicken  19866894347928_3
agcggtgagcgtaactcagaaggcattgtcgtttgtcagtggtacgtgttacatggggcatgattctcagactagaatcaggattgtckcattcaagtcaaagagaatgtgtgtatgtgcacatggcactcagcctgcccaggtgaaatgctcagtcttcatgaggccatgctgcartgtcacttagcaaagccaaagcttttcatcgcagcatttaaaatgtgatttttcacactttagtaactgtaatgacaaagcttgacaggaaatcatcaccacattgcaaagagaatccagagygttcctgtttgagagataccttcccctaaagaaaaaattcttagaaactgcactttctcaayggaattgtgatttgccgttcagtttacagaagccgtgaaagtgaaaggtgtgatcgtgtttttacagtggttattgtaggtgatatcacttagcagggaggtgagtattctttgtgtacatcactgaatatttgtatttttgtgtttacagacttggcacggtggaaaatgctggaaaaaatagctgttgttgataagctgagttgccaagttgccagagtacatagcaatcactgtg

SEQ ID NO: 71328 - DNA, 600 bp, Chicken  19866894347928_4
attctcagactagaatcaggattgtckcattcaagtcaaagagaatgtgtgtatgtgcacatggcactcagcctgcccaggtgaaatgctcagtcttcatgaggccatgctgcartgtcacttagcaaagccaaagcttttcatcgcagcatttaaaatgtgatttttcacactttagtaactgtaatgacaaagcttgacaggaaatcatcaccacattgcaaagagaatccagagygttcctgtttgagagataccttcccctaaagaaaaaattcttagaaactgcactttctcaayggaattgtgatttgccgttcagtttacagaagccgtgaaagtgaaaggtgtgatcgtgtttttacagtggttattgtaggtgatatcacttagcagggaggtgagtattctttgtgtacatcactgaatatttgtatttttgtgtttacagacttggcacggtggaaaatgctggaaaaaatagctgttgttgataagctgagttgccaagttgccagagtacatagcaatcactgtgttaacaccgttgtaggagacaagataaactttttactaacagagtaaagtatcacttggtat

SEQ ID NO: 71329 - DNA, 600 bp, Chicken  19866894347930_1
tcccactgcaagcagatgggccatgtctgggctgcaatgagactgcccctggagcaggtagatgtggcatgctttgtgtcctccttatggccttattgctgctggccagataggcagcacatgtgcctggcagcctgcttgtagtcaggagcaaagtttcaccgttgcctaagttaagtaaatgctttgagctaaaatattcctgggtgtaactgacaccggactgtggctaatacaattacaaaccagtgatactcaccagtgattttgatttctggagtttcttagatccacaacctrctttcttttttttctcagctgcctgctggctaaggtccggggtcttccctcctcctttcttcctcctgcagagtacaacagaagattattaacaagtgctatggagttggttccctggggtggggaagaagaaaattccttatgataagccacccgaaaagacatggtttgagctcatacattttatcttgtacctgaggcagaccaagagtgcacaatcagttctgtggctcagaggagcttgctattttttaaattatgataacttcatagcattcaaatgcacgtctttgccttgat

SEQ ID NO: 71330 - DNA, 600 bp, Chicken  19866894347933_1
aagtctatttgggcagagttcctctggaatttgtgaaaatcatcaaactcatactcagatctttactaatgtggttacttgcaataggaccgaattgtgggagcctttccttggtaatcagctgctagcacaggtaatcttcagtaatttgctgggagagtggaataaagcttatttcagaattactatggccaggagacaggaccatccgttatgagctacaactggataccaaacaactttcattgttctccataaaaatgttacgggatcgataaaaactgaagggcagtgagatgygcctggctttgcccagaaatacccccattttctcttatctttagcatccctyagctgcgtggagctcgtcccgcttatctcctrcyacgtttcatagcgacctgctaatgaaagatgtggaaaaaccccatcctggcaaagcccacgcaatgaaacgcagctgagctaatgagcgctgccaccaatttgccaatttcacgcctgtgagcagcctcacccagcacttcagttggcagctctggattaagtgttacttcttcaaatcacgtagcaaagggacttgtcacttccatttccttc

SEQ ID NO: 71331 - DNA, 600 bp, Chicken  19866894347933_2
actcagatctttactaatgtggttacttgcaataggaccgaattgtgggagcctttccttggtaatcagctgctagcacaggtaatcttcagtaatttgctgggagagtggaataaagcttatttcagaattactatggccaggagacaggaccatccgttatgagctacaactggataccaaacaactttcattgttctccataaaaatgttacgggatcgataaaaactgaagggcagtgagatgygcctggctttgcccagaaatacccccattttctcttatctttagcatccctyagctgcgtggagctcgtcccgcttatctcctrcyacgtttcatagcgacctgctaatgaaagatgtggaaaaaccccatcctggcaaagcccacgcaatgaaacgcagctgagctaatgagcgctgccaccaatttgccaatttcacgcctgtgagcagcctcacccagcacttcagttggcagctctggattaagtgttacttcttcaaatcacgtagcaaagggacttgtcacttccatttccttcgccgctgcaatatttgctttataatcgcatcaaatcgggaggcaattttccc

SEQ ID NO: 71332 - DNA, 600 bp, Chicken  19866894347933_3
taggaccgaattgtgggagcctttccttggtaatcagctgctagcacaggtaatcttcagtaatttgctgggagagtggaataaagcttatttcagaattactatggccaggagacaggaccatccgttatgagctacaactggataccaaacaactttcattgttctccataaaaatgttacgggatcgataaaaactgaagggcagtgagatgygcctggctttgcccagaaatacccccattttctcttatctttagcatccctyagctgcgtggagctcgtcccgcttatctcctrcyacgtttcatagcgacctgctaatgaaagatgtggaaaaaccccatcctggcaaagcccacgcaatgaaacgcagctgagctaatgagcgctgccaccaatttgccaatttcacgcctgtgagcagcctcacccagcacttcagttggcagctctggattaagtgttacttcttcaaatcacgtagcaaagggacttgtcacttccatttccttcgccgctgcaatatttgctttataatcgcatcaaatcgggaggcaattttccctgtgttctgctctgctcttggactgcttacct

SEQ ID NO: 71333 - DNA, 600 bp, Chicken  19866894347933_4
ggaccgaattgtgggagcctttccttggtaatcagctgctagcacaggtaatcttcagtaatttgctgggagagtggaataaagcttatttcagaattactatggccaggagacaggaccatccgttatgagctacaactggataccaaacaactttcattgttctccataaaaatgttacgggatcgataaaaactgaagggcagtgagatgygcctggctttgcccagaaatacccccattttctcttatctttagcatccctyagctgcgtggagctcgtcccgcttatctcctrcyacgtttcatagcgacctgctaatgaaagatgtggaaaaaccccatcctggcaaagcccacgcaatgaaacgcagctgagctaatgagcgctgccaccaatttgccaatttcacgcctgtgagcagcctcacccagcacttcagttggcagctctggattaagtgttacttcttcaaatcacgtagcaaagggacttgtcacttccatttccttcgccgctgcaatatttgctttataatcgcatcaaatcgggaggcaattttccctgtgttctgctctgctcttggactgcttacctgt

SEQ ID NO: 71334 - DNA, 600 bp, Chicken  19866894347933_5
acgtagcaaagggacttgtcacttccatttccttcgccgctgcaatatttgctttataatcgcatcaaatcgggaggcaattttccctgtgttctgctctgctcttggactgcttacctgtggtttccagcagcttcgtgggcatggtggaaatgggagggccgcagagggcacaggaggagaacaaaccagctgtgtaactccaatgggaccagcttttacaaagattgccttgattaaagcctggggaatgccctttcctctgctggcagagagccctgatgcaggctgatcctcaaygtgctgctttgaagccagattctcttctatagtggctggaaatcctctagctggagttgggttggcctaacttggtgctttcctgatccactgccttcatcacaactttgccatcaagaatgcagcccactgatttgttgtaagaaactccattacttcattgtcagtgggtctgcaaagtcctggtgcatctgcagaggcgctggctctgcactatggttgtagagctttcaaaagtacttttatttcctcagattgcaacgttacacaaaaaaaaaagcagtgacagaagtgcagctc

SEQ ID NO: 71335 - DNA, 600 bp, Chicken  19866894347957_1
aactcctcaggtctggagtgactggggatgttaccagcccggactgaggagccacgtcggagccatctgatgcttagattgtgcatgacatcctgtggagtgggaatagcataatgctgaatgggagcttccatgctcctttgtcagtggttggccacagctgtttgcttgtcatttcattttcttccacggccgtgttcttaatgaagaaaacatcgacccgaaacagcagcagaaaagtagaacaacctgatctcttcctttcccctttgtgtctgatcctccccttctttctgcctkcctgcagtacgaacaagagatagcaaagctgaaggaacgcttgaaagtgtcgagccgccggctggaggagtacgagcggcggctcctggtgcaggagcagcaaatgcagaagctgctgatggagtacaagtccaggctggaggacagcgaggagagactgcgcaggcaacaggaggagaaggacagccagatgaaaagcattatcagcaggtgaggcttggggggggtttggaactgtgtagggcaagaagctcccgtgtgtgccttatgctgcctttgacactaaggaaggtagagctg

SEQ ID NO: 71336 - DNA, 600 bp, Chicken  19866894347959_1
gctgaacaaattgctgctgtgttcctgagtggtctgaattccctgggagctcctggtgtgatagtatatacctctctccatccttggcatgtgctttggagttgaaaagtccattgctgtcttcagagtttgattagcataacctacaggaatattatgtagtcctcaactggtgttttggggtggtttggtgagatgacacttctgtggcttgagagcattcctgcagtcagactggagaactggggatgttgaagcccttacagtgtgacataggttgtaagctagagcatgtgttarttacctcttccatattgctttgcttagcagagatggctggatgctaccatagtaatgaaaattcctaagtgtctgccttgtctgttgccatgagtcctttgtggatccttgcaaaattccttctcatgtgcagtttgctgttaccatggcacataagggcttccagtgtggctggcccttggaaacaagtccagttgaacagcccttgtcctggctaggcttgcttttttcttcccctccagccccatatggtactctgcacagccagggctgttgcttttctcccatcctattgatggg

SEQ ID NO: 71337 - DNA, 600 bp, Chicken  19866894347960_1
agccctgagaaggatctgggaatgtcagtggataaaagactcaacatgagccagcaacgtgtgcttgcagcccagaaggccaaacgtatcctgggctgcgtcaagagaagagtgaccagcagggagagggaggtggttctgtccctctgctctgctcctgggagaccccacctgaagtactgcacccgggtctggagcccccaacacaaggaggacatggagctgctggagggcacaaagatgatcagatggagcacctccactatgaggacaggctgagagagctggggctgttcagcytggagaagaaaaggctctggggagacgttatagcatacatatatgtatagtatataggatagatttagactagctattaggaagaaattctttattgtgagggcagagagacactggaacaggttgcccagtgaggctgtggatgccccctccctggaagcactccaggccaggctggatgggacggtgagcaacctgggctatgggaggtgtccctgcctacagcaggggggtggaacgaggtggtcttaaaggtcccttccaacccaaaacccattctatgattctgtgattctaagg

SEQ ID NO: 71338 - DNA, 600 bp, Chicken  19866894347960_2
agatttagactagctattaggaagaaattctttattgtgagggcagagagacactggaacaggttgcccagtgaggctgtggatgccccctccctggaagcactccaggccaggctggatgggacggtgagcaacctgggctatgggaggtgtccctgcctacagcaggggggtggaacgaggtggtcttaaaggtcccttccaacccaaaacccattctatgattctgtgattctaagggagggaagatttagtttgggtgtcaggaggaagtttttcagtgagagactagtgaggtgstggcaccactgcccagagaggctgaggatgccccatccctggaggtgctcacagccaggctgggtgggccctgtgtgacctgacctagtcctgacctagcggctggcagccctgcctgcagctcaggggtggaatctgatgatcctgatgagcccaagccattctgtgattctgagattccacgagcagagccgggcccatcccagcccacaggcagtggctccatgtgcagtcagcgcaaaagggaagcaataattttcactggctttaagttttgttgaaagtaatacggtttttatt

SEQ ID NO: 71339 - DNA, 600 bp, Chicken  19866894347963_1
ccactcttgtttagctgttcttgctgtacagttgctgaacagaccctggaaactgccacctgaagctgaactcacttcagttgagtcacacccagcatgtcacaaacacatcattttaactccaaaaacttctgactttttggtaacagaaatttctgactgataaacttattcagtgcatgttttttgcttttgattaatgcttggaagtaatactactgaaaatatgtccagagaactgtcttatttattttttcttcatatgtattatcaaaatgctagtttttgtgaaagtgcctrtttctttgtattttcagcaaagtcacagtatattgactgaaatgcacttatcatttgcacttacaatattattttaacatacttttacgtatgcattttaaatctttcagataagtttaagacagagaaaactgactatttcataatttaagggaatatatctgattaaacctctcattaatttcctcatttagatgaatcttactacaaactattctgaacatgacacatgaagtaacccatttttgttatcgttaacacattttactgtagcaaaaatttccattaatctttttttag

SEQ ID NO: 71340 - DNA, 600 bp, Chicken  19866894347965_1
acacaccttagaaaagtgtatttgatagtagaagaagaaacatgaaagcggagatagcatcctgctatggcaatatagtgctgaaacaggaactcactgtaataagtcaagaacacgagggatcaaaacccagttgcaaggctgagtgcaccagacttgacaggtatcttatgcagtccagcctgtgtaccttgtcatgccaatagagctcaattgattagaaatgaaatgaaagatgggagccttcagttttcaatttcctccagtctccgttctggaaaggctcttccggataaagcraaagccttgtatttcttggggctttagtgaagggaagtattatgttcagatagctcatgatatttttaagtttacttatttggttagctactcagatacgtgcgtgggaagaaagaaagaagttgttgagttagcatctaacttgcctagtatatttggaagaatcatctaaaatgaaatagttctaacatcaatatttgttttctgaaaacacaagtgtttctaaaccacaccggaatgactgaagaatgtttctgagtataactgtctactggccaacggcatgatttgctcatctac

SEQ ID NO: 71341 - DNA, 599 bp, Chicken  19866894347978_1
  misc_feature (1)..(185): n is any nucleotide
nnnnnnnnnnnnnnnnnnnnnnnnnnnnnnnnnnnnnnnnnnnnnnnnnnnnnnnnnnnnnnnnnnnnnnnnnnnnnnnnnnnnnnnnnnnnnnnnnnnnnnnnnnnnnnnnnnnnnnnnnnnnnnnnnnnnnnnnnnnnnnnnnnnnnnnnnnnnnnnnnnnnnnnnnnnnnnnnnnnnnnnnnatgtacacgtgcttctagagaaatttctgacagcgatgtgacgagaaaaaaagaagaaatctgaaaatccttcagtttattcaaacaaggaaggccttaaacttgatttagatcrgagtgccatacacaagtggaattaagaatcaagggcacactaaagcagatgtaaagcagaaaatacttggaatataaagcaaatgcaaatctgaaattaaaagagccagacaaaccaaactaaattccagtctttaaaatagacaaaaccagcaatcagctagacttccacaaaaaaagacagaataataagaaatacagtcaataactccttcgaagggtaattcttgaagatgaaaaaagttattgcagtgatagaatcatttaaagtagtttagaaatagttggtcacgcaactgt

SEQ ID NO: 71342 - DNA, 600 bp, Chicken  19866894347982_1
aaacctaaacagttaccttggactcaggaaaatctgcacactaaatcagatataccaataaacaacattggtgaggttactgtagaaagttttggagaagatagagtatttggagtatctgaggtgatggctgtcacagcagtatcaaccaagtacacacggaaagcaagcaagcaaaaggagtcactcagccattgaacaggaaaatcctaccctagggcatgctgtgtgcttgtgtgatcaggtgtgcaaccaagctctgaagtccataatgcttagtgcacatagggcatcatgttyctccagccccagtcagtcytatccagtgcctcccaagacarccttcatgtttcctttatygtgagtgggaggccgcttgggttcactccacagtggctttggcatggctgagatattaagttcagaatcctagccmgtttccaacttgagtgtttacattttgcttccctgaattgcctcttaatcctgctacctctttctgccattcactaaaaacaattaaaagctagcaaacagctgctgagttcttgctgagaagtggctgcattccggtgaaaagcccacttggggataaactgt

SEQ ID NO: 71343 - DNA, 600 bp, Chicken  19866894347982_2
ggactcaggaaaatctgcacactaaatcagatataccaataaacaacattggtgaggttactgtagaaagttttggagaagatagagtatttggagtatctgaggtgatggctgtcacagcagtatcaaccaagtacacacggaaagcaagcaagcaaaaggagtcactcagccattgaacaggaaaatcctaccctagggcatgctgtgtgcttgtgtgatcaggtgtgcaaccaagctctgaagtccataatgcttagtgcacatagggcatcatgttyctccagccccagtcagtcytatccagtgcctcccaagacarccttcatgtttcctttatygtgagtgggaggccgcttgggttcactccacagtggctttggcatggctgagatattaagttcagaatcctagccmgtttccaacttgagtgtttacattttgcttccctgaattgcctcttaatcctgctacctctttctgccattcactaaaaacaattaaaagctagcaaacagctgctgagttcttgctgagaagtggctgcattccggtgaaaagcccacttggggataaactgtttctcagctctgctcttag

SEQ ID NO: 71344 - DNA, 600 bp, Chicken  19866894347982_3
taaatcagatataccaataaacaacattggtgaggttactgtagaaagttttggagaagatagagtatttggagtatctgaggtgatggctgtcacagcagtatcaaccaagtacacacggaaagcaagcaagcaaaaggagtcactcagccattgaacaggaaaatcctaccctagggcatgctgtgtgcttgtgtgatcaggtgtgcaaccaagctctgaagtccataatgcttagtgcacatagggcatcatgttyctccagccccagtcagtcytatccagtgcctcccaagacarccttcatgtttcctttatygtgagtgggaggccgcttgggttcactccacagtggctttggcatggctgagatattaagttcagaatcctagccmgtttccaacttgagtgtttacattttgcttccctgaattgcctcttaatcctgctacctctttctgccattcactaaaaacaattaaaagctagcaaacagctgctgagttcttgctgagaagtggctgcattccggtgaaaagcccacttggggataaactgtttctcagctctgctcttagcacatagcctttgtcctgtttt

SEQ ID NO: 71345 - DNA, 600 bp, Chicken  19866894347982_4
aacaacattggtgaggttactgtagaaagttttggagaagatagagtatttggagtatctgaggtgatggctgtcacagcagtatcaaccaagtacacacggaaagcaagcaagcaaaaggagtcactcagccattgaacaggaaaatcctaccctagggcatgctgtgtgcttgtgtgatcaggtgtgcaaccaagctctgaagtccataatgcttagtgcacatagggcatcatgttyctccagccccagtcagtcytatccagtgcctcccaagacarccttcatgtttcctttatygtgagtgggaggccgcttgggttcactccacagtggctttggcatggctgagatattaagttcagaatcctagccmgtttccaacttgagtgtttacattttgcttccctgaattgcctcttaatcctgctacctctttctgccattcactaaaaacaattaaaagctagcaaacagctgctgagttcttgctgagaagtggctgcattccggtgaaaagcccacttggggataaactgtttctcagctctgctcttagcacatagcctttgtcctgtttttcagatgctgcctctaaac

SEQ ID NO: 71346 - DNA, 600 bp, Chicken  19866894347982_5
cagcagtatcaaccaagtacacacggaaagcaagcaagcaaaaggagtcactcagccattgaacaggaaaatcctaccctagggcatgctgtgtgcttgtgtgatcaggtgtgcaaccaagctctgaagtccataatgcttagtgcacatagggcatcatgttyctccagccccagtcagtcytatccagtgcctcccaagacarccttcatgtttcctttatygtgagtgggaggccgcttgggttcactccacagtggctttggcatggctgagatattaagttcagaatcctagccmgtttccaacttgagtgtttacattttgcttccctgaattgcctcttaatcctgctacctctttctgccattcactaaaaacaattaaaagctagcaaacagctgctgagttcttgctgagaagtggctgcattccggtgaaaagcccacttggggataaactgtttctcagctctgctcttagcacatagcctttgtcctgtttttcagatgctgcctctaaacatgctacccaggccttctttgattgcctgcgagcagaggttgagcagtacgacatcgatgtgaccgttataagccc

SEQ ID NO: 71347 - DNA, 600 bp, Chicken  19866894347986_1
gaattgaggcaattactgcagttttcctaaaacagatgacggcaatactccggtaaggaggagcaatcccagctgcagcgtggataagagttaagatgctgaaatgcccgttgggcccaaatttccagctgtcacagtttcctggtctacgtctggccgcttttctcaatcgtgtgtggattcaggcagcagcagccaggagctgaggcaccgcgggctgcaggaggtgtctgctctgcaagcaatcatttgctatcagtgagagagactgcaacaatccttgctgtttgcaagcaagcrgggcytgaaagcatcaatgcatttatggaaaaggagaaagaaataactcttgagtgatttttggggggggttggggctggcggctcactgggacgtattggatgggaggggcagctcctgtcccagctstttaaccaagcactgatttcatggctatgccagcccagygtgctgctttcagatacgatctgcacatgagcttcatcagactttaaaggacaaaaaatctgccactgggtgccttgtccttgccatggaggcactttagtgaaaaggaaacctaatgaagatgaattaagc

SEQ ID NO: 71348 - DNA, 600 bp, Chicken  19866894347986_2
gaggcaattactgcagttttcctaaaacagatgacggcaatactccggtaaggaggagcaatcccagctgcagcgtggataagagttaagatgctgaaatgcccgttgggcccaaatttccagctgtcacagtttcctggtctacgtctggccgcttttctcaatcgtgtgtggattcaggcagcagcagccaggagctgaggcaccgcgggctgcaggaggtgtctgctctgcaagcaatcatttgctatcagtgagagagactgcaacaatccttgctgtttgcaagcaagcrgggcytgaaagcatcaatgcatttatggaaaaggagaaagaaataactcttgagtgatttttggggggggttggggctggcggctcactgggacgtattggatgggaggggcagctcctgtcccagctstttaaccaagcactgatttcatggctatgccagcccagygtgctgctttcagatacgatctgcacatgagcttcatcagactttaaaggacaaaaaatctgccactgggtgccttgtccttgccatggaggcactttagtgaaaaggaaacctaatgaagatgaattaagctgaac

SEQ ID NO: 71349 - DNA, 600 bp, Chicken  19866894347986_3
tgtcacagtttcctggtctacgtctggccgcttttctcaatcgtgtgtggattcaggcagcagcagccaggagctgaggcaccgcgggctgcaggaggtgtctgctctgcaagcaatcatttgctatcagtgagagagactgcaacaatccttgctgtttgcaagcaagcrgggcytgaaagcatcaatgcatttatggaaaaggagaaagaaataactcttgagtgatttttggggggggttggggctggcggctcactgggacgtattggatgggaggggcagctcctgtcccagctstttaaccaagcactgatttcatggctatgccagcccagygtgctgctttcagatacgatctgcacatgagcttcatcagactttaaaggacaaaaaatctgccactgggtgccttgtccttgccatggaggcactttagtgaaaaggaaacctaatgaagatgaattaagctgaactgcgtgaaaatgagttaaggaatcttgaaatcagcttcccatttgtctgccttcccaaagccttagaaatactcatacttacaacagcaaaccgcagccccagcgtgagaatggtcccaccccc

SEQ ID NO: 71350 - DNA, 600 bp, Chicken  19866894347986_4
atcgtgtgtggattcaggcagcagcagccaggagctgaggcaccgcgggctgcaggaggtgtctgctctgcaagcaatcatttgctatcagtgagagagactgcaacaatccttgctgtttgcaagcaagcrgggcytgaaagcatcaatgcatttatggaaaaggagaaagaaataactcttgagtgatttttggggggggttggggctggcggctcactgggacgtattggatgggaggggcagctcctgtcccagctstttaaccaagcactgatttcatggctatgccagcccagygtgctgctttcagatacgatctgcacatgagcttcatcagactttaaaggacaaaaaatctgccactgggtgccttgtccttgccatggaggcactttagtgaaaaggaaacctaatgaagatgaattaagctgaactgcgtgaaaatgagttaaggaatcttgaaatcagcttcccatttgtctgccttcccaaagccttagaaatactcatacttacaacagcaaaccgcagccccagcgtgagaatggtcccaccccccaggaatggggccaggcccaccctgcactgctgctctgc

SEQ ID NO: 71351 - DNA, 600 bp, Chicken  19866894347987_1
tactcaagatgtggcctcaccagagctgagtacagggagacgattgcctccattctcctgctggcagcactatttctgatataaaccaggatgtcattggccttcttggtcacctgggcatgctgctggctcatattcagccaagcctcaaccaagcacccccaaggtccatctcttccacacagtcttcctgccgctctactccaagtctgtagcattgcctgggattgctgtccaaagtgcaggacctggcacttggtcttattaaatttcatcctattggcctcagcccagcgatcyagcctgtcctgatccttctgtagggccttcccatccccaggcagatcaacatttcctcccaacttggtgtcatctgctaacttactgggattgcactcagttccctcatccagatagtcagtgaagatgttaaacaggacgggctccaataccaacccctggggaaaaacacgagtgtccagtcaccagctgatttcaattccattcactgccactctctgggcccagccctccagccggttctttatgcagcaagaacagtatctgtcctagccgcagactgccagcttctccaggaga

SEQ ID NO: 71352 - DNA, 600 bp, Chicken  19866894347989_1
aaaatctgaatttatcttcctctgaaacaaagataatgatactatttatattacaatcaatggcctcggtggttaaaggcagcccaaatcttaaatgccattttaaggtaaaacatccattctggcacacgggatcacaaaggacacagactattacagaagggcagactcagaagcagaagtcacagtctcttctctgagtccaccctgaacattaaaaacatgtacttttccgctgcaagaaagaaaacactaaacaagcagcaaagtgttttcactgaggaaaaaaagtgtgttctycacctcagcagaagatgccctccaacatactcctcaggccagcaaaaacatgcatcctcaagctacaactggggatgtttaaatgttatgcactgttatgcactgatgttctagcctctgttgtaattaaaaccagattcctatcaatggcactgttgtgtaggaattgagctgcacaaagcagcaacagatctgttctgcctgctgagggaatgttttccagaagtgaccacaagtacacactctgctraaatgacatttttycccctcttcctcccttcctctataataagcaggttc

SEQ ID NO: 71353 - DNA, 600 bp, Chicken  19866894347989_2
cactaaacaagcagcaaagtgttttcactgaggaaaaaaagtgtgttctycacctcagcagaagatgccctccaacatactcctcaggccagcaaaaacatgcatcctcaagctacaactggggatgtttaaatgttatgcactgttatgcactgatgttctagcctctgttgtaattaaaaccagattcctatcaatggcactgttgtgtaggaattgagctgcacaaagcagcaacagatctgttctgcctgctgagggaatgttttccagaagtgaccacaagtacacactctgctraaatgacatttttycccctcttcctcccttcctctataataagcaggttcagactgatgtgctattctycctttaagcagaaatgagatataccacgttacatgctccagggctgcctatctgagcccctcccatttgcccttcatagggcagcaagctgatcttctccaagttttgtctggaaaaaaagtgactaaaactctcataccacaaattgattcttttctatcccatcctgtaattatttttagttaatatagttcaaacactaacataaaaagaatcaagaaatgtgaccta

SEQ ID NO: 71354 - DNA, 600 bp, Chicken  19866894347989_3
caaagtgttttcactgaggaaaaaaagtgtgttctycacctcagcagaagatgccctccaacatactcctcaggccagcaaaaacatgcatcctcaagctacaactggggatgtttaaatgttatgcactgttatgcactgatgttctagcctctgttgtaattaaaaccagattcctatcaatggcactgttgtgtaggaattgagctgcacaaagcagcaacagatctgttctgcctgctgagggaatgttttccagaagtgaccacaagtacacactctgctraaatgacatttttycccctcttcctcccttcctctataataagcaggttcagactgatgtgctattctycctttaagcagaaatgagatataccacgttacatgctccagggctgcctatctgagcccctcccatttgcccttcatagggcagcaagctgatcttctccaagttttgtctggaaaaaaagtgactaaaactctcataccacaaattgattcttttctatcccatcctgtaattatttttagttaatatagttcaaacactaacataaaaagaatcaagaaatgtgacctaatgcaaaagagctt

SEQ ID NO: 71355 - DNA, 600 bp, Chicken  19866894347989_4
ctccaacatactcctcaggccagcaaaaacatgcatcctcaagctacaactggggatgtttaaatgttatgcactgttatgcactgatgttctagcctctgttgtaattaaaaccagattcctatcaatggcactgttgtgtaggaattgagctgcacaaagcagcaacagatctgttctgcctgctgagggaatgttttccagaagtgaccacaagtacacactctgctraaatgacatttttycccctcttcctcccttcctctataataagcaggttcagactgatgtgctattctycctttaagcagaaatgagatataccacgttacatgctccagggctgcctatctgagcccctcccatttgcccttcatagggcagcaagctgatcttctccaagttttgtctggaaaaaaagtgactaaaactctcataccacaaattgattcttttctatcccatcctgtaattatttttagttaatatagttcaaacactaacataaaaagaatcaagaaatgtgacctaatgcaaaagagctttttccagtagataaacaaatgttactgcaatatttgtaactacagtaaaaggaac

SEQ ID NO: 71356 - DNA, 599 bp, Chicken  19866894348003_1
  misc_feature (1)..(163): n is any nucleotide
nnnnnnnnnnnnnnnnnnnnnnnnnnnnnnnnnnnnnnnnnnnnnnnnnnnnnnnnnnnnnnnnnnnnnnnnnnnnnnnnnnnnnnnnnnnnnnnnnnnnnnnnnnnnnnnnnnnnnnnnnnnnnnnnnnnnnnnnnnnnnnnnnnnnnnnnnnnnnnnnnnnggaggatggaggccttggttgccctgagatgctcccaggtgagaggcagcaggacaacagggaatgcccacccagtttcctggcaggacccctggtctggctgccttccctgctgtgctggggacagtgtcattctrggaacacgtccctccaacctgagtgtgcttctaagtgcccgtcatggctgtctgctccatgggaaagtagccgagggcaggtctctggggagggaggaaggagcatggaaacgctgctgagatggaggcaccaagtggggtctgcaccgggctgggtgcaagatgggagatggggcttggctgggctcattcataccccgaattgcccatctgttgccctccttggcacagggcaggggtgatgtggggtcaagcagcatrcaagaggccggggaaggggctcagtgcctcgyggggct

SEQ ID NO: 71357 - DNA, 558 bp, Chicken  19866894348003_2
ggctgccttccctgctgtgctggggacagtgtcattctrggaacacgtccctccaacctgagtgtgcttctaagtgcccgtcatggctgtctgctccatgggaaagtagccgagggcaggtctctggggagggaggaaggagcatggaaacgctgctgagatggaggcaccaagtggggtctgcaccgggctgggtgcaagatgggagatggggcttggctgggctcattcataccccgaattgcccatctgttgccctccttggcacagggcaggggtgatgtggggtcaagcagcatrcaagaggccggggaaggggctcagtgcctcgyggggctcagcccagctgcactctcggaaatagcccatgtcaacaaacatgagtcactctgggagacgcgaggatcaggatggggacagcacagcttgtctctgctatgcagaagtcctggaggaagaaagggagagatagggggcctcagggctgcttgccccaaggaagacctggctggatgcagtggtgtctctgacgttgggacaggggtgacaagccatcac

SEQ ID NO: 71358 - DNA, 526 bp, Chicken  19866894348003_3
cattctrggaacacgtccctccaacctgagtgtgcttctaagtgcccgtcatggctgtctgctccatgggaaagtagccgagggcaggtctctggggagggaggaaggagcatggaaacgctgctgagatggaggcaccaagtggggtctgcaccgggctgggtgcaagatgggagatggggcttggctgggctcattcataccccgaattgcccatctgttgccctccttggcacagggcaggggtgatgtggggtcaagcagcatrcaagaggccggggaaggggctcagtgcctcgyggggctcagcccagctgcactctcggaaatagcccatgtcaacaaacatgagtcactctgggagacgcgaggatcaggatggggacagcacagcttgtctctgctatgcagaagtcctggaggaagaaagggagagatagggggcctcagggctgcttgccccaaggaagacctggctggatgcagtggtgtctctgacgttgggacaggggtgacaagccatcac

SEQ ID NO: 71359 - DNA, 600 bp, Chicken  19866894348004_1
ttaccttgcaagttggatggatcctacagacaaagaaagaaaaataaactttcagatccagaattaatatctggagatctcagaagacatttttaaattcaactacacttatatacgtgccaatatgccacaagaggaattggtgccacaaatacacctttgaaatcagaacatttaagctattggattagcatgattacagcaccacagggagaaactgcagttcttcctgttcccgttaatactgcctgcttcagcaagatctgtctgatcccgcttcataacattatactgattatrttaagcttggtattgccttaaaaataccccgacactgatctttgtttttaccttgtaagcctcatcggtagcagttttcattttttcattaacccaactcttcagttcatcagagtccctgaaaaactgctggagatggaaagagtctgccagttgggcacggcgcttcatggctctttcatgaagagcatttcggcgactcagaagctgaacaaataaaagaaaagaaaaaacgtaagtgaagatttttaagttcttcagtttataagaaagtctgctgtatgcattgaaacctccagt

SEQ ID NO: 71360 - DNA, 600 bp, Chicken  19866894348006_1
tgctgggtcccaaaggagaggaattatggcgttattgccacagtgacaggacaagggtccaggaacagtgaggtttgcctgatggaggggaagatccaccacgcacgtggagacccaaagacttatcctctgtagcaaatggaaaggagagaaggctgctcctctgctagggccatcgatgtgggaaaagagaaaaactcacagctgagtttctgtgcagtagacagaagcaacaccatccaaaaaaccaaagcaggctggttgatgcgttggaaggtgacccgagctcacatcattctrcctgccttacagcctgttctgccacatgcagcaagaagatcatgtttctactctcctcgtgacctgatgggtgcatggatttgaagacagcattggagaagtgaagctgaaaagctgagctgcaggatggagtggtaggagggtcacctcgtaatttgctggggctaagtttgtgatgctggcgtgcacgctgcagaaagctgcctgcattttggcaaagagctgcagctctcttactgaagggctgcaggatgctatttttctcctccttctgtactgtctttcttattttatcagtct

SEQ ID NO: 71361 - DNA, 600 bp, Chicken  19866894349940_1
tgagaattaacagaggtaacacagacagaaggttgcctgctagtatcctctagaaaaccaacttctgaggaagcaatacctgtaaatcccaggagttatgagttaagattcattacattccttccacctttttcttcacttggcctctggaagccataatgatgctctttcacatggctgttggagtcagctctaatttccaaattagaccttactcccacctgtgcagctttttgccccttgtccctgaaagagcattgcagctgttcttcagggcagatctttcccctccctgcagcrtctccaccgggcttcatgctgaccctgtgtccctgtcctgctggcactsgttccttgtgcctctcctgggagatgcagttagtgtgcagagagctgaagcctcttggytgctctgagctccaagcattgtatttttgctgaatcctatttttttaggttttgaagccatgctamagagctgttaacactgtaataaagttctgttttccctctgtatttccttttactaaggaaacaaagacagctggagcagaatgcaggatgccttttagttgtgttcattcgcttaaaaacaatccc

SEQ ID NO: 71362 - DNA, 600 bp, Chicken  19866894349940_2
ctagaaaaccaacttctgaggaagcaatacctgtaaatcccaggagttatgagttaagattcattacattccttccacctttttcttcacttggcctctggaagccataatgatgctctttcacatggctgttggagtcagctctaatttccaaattagaccttactcccacctgtgcagctttttgccccttgtccctgaaagagcattgcagctgttcttcagggcagatctttcccctccctgcagcrtctccaccgggcttcatgctgaccctgtgtccctgtcctgctggcactsgttccttgtgcctctcctgggagatgcagttagtgtgcagagagctgaagcctcttggytgctctgagctccaagcattgtatttttgctgaatcctatttttttaggttttgaagccatgctamagagctgttaacactgtaataaagttctgttttccctctgtatttccttttactaaggaaacaaagacagctggagcagaatgcaggatgccttttagttgtgttcattcgcttaaaaacaatcccaaaacgcagatctgtacatcagaacctctcaaaggttcaaaatagataa

SEQ ID NO: 71363 - DNA, 600 bp, Chicken  19866894349940_3
ttcattacattccttccacctttttcttcacttggcctctggaagccataatgatgctctttcacatggctgttggagtcagctctaatttccaaattagaccttactcccacctgtgcagctttttgccccttgtccctgaaagagcattgcagctgttcttcagggcagatctttcccctccctgcagcrtctccaccgggcttcatgctgaccctgtgtccctgtcctgctggcactsgttccttgtgcctctcctgggagatgcagttagtgtgcagagagctgaagcctcttggytgctctgagctccaagcattgtatttttgctgaatcctatttttttaggttttgaagccatgctamagagctgttaacactgtaataaagttctgttttccctctgtatttccttttactaaggaaacaaagacagctggagcagaatgcaggatgccttttagttgtgttcattcgcttaaaaacaatcccaaaacgcagatctgtacatcagaacctctcaaaggttcaaaatagataaggattgtggatgacacgtgaagccacctcgtgctgctcgccggctgttcctgcagtgtg

SEQ ID NO: 71364 - DNA, 600 bp, Chicken  19866894349940_4
tggctgttggagtcagctctaatttccaaattagaccttactcccacctgtgcagctttttgccccttgtccctgaaagagcattgcagctgttcttcagggcagatctttcccctccctgcagcrtctccaccgggcttcatgctgaccctgtgtccctgtcctgctggcactsgttccttgtgcctctcctgggagatgcagttagtgtgcagagagctgaagcctcttggytgctctgagctccaagcattgtatttttgctgaatcctatttttttaggttttgaagccatgctamagagctgttaacactgtaataaagttctgttttccctctgtatttccttttactaaggaaacaaagacagctggagcagaatgcaggatgccttttagttgtgttcattcgcttaaaaacaatcccaaaacgcagatctgtacatcagaacctctcaaaggttcaaaatagataaggattgtggatgacacgtgaagccacctcgtgctgctcgccggctgttcctgcagtgtgttactcccatgctctctgaggagggcgtgctaggagggaagcagctcccagctgcctgcagtgcca

SEQ ID NO: 71365 - DNA, 600 bp, Chicken  19866894349942_1
caacacctgaacagagaggcatccaactcacttttgcgctcttcctccttctgcaggaacttccgcagccggtctgaggggatggcaaaggagatgcctgacgtcaccttcatggtgttcaccccaatcacttcgccatcctgcatggaaaagggcagtgtgttctgcaacctgtgcttttatggaactgtgcaaaacctaaagcctgcgcagccatcccctccaaggcagtctgaccctgctgaggctgggcagggacgagtcccaccaagcagagctctcaccccatgccaattcctygatcccacccttcaatatgcccagagcacacagttccccctttcctcctgacagctgaggatgcctgcacagtgctcccactgagggcactcagccccaggagaaaaggaccactgggatgcaggcaggagaacttaccaagttgacgaggggaccaccagagttcccaaactgaaacagcagagagagcagcaatgaggccatgaaagcaaacctcaaacactgacccacagcaaggaggcagagcccagagaacaggacttgggctgagaaacaccagatcaccaaccagaaacaccc

SEQ ID NO: 71366 - DNA, 600 bp, Chicken  19866894349943_1
cactgatcttgcaggtttctctctgtaagaactatttgtgggcttctttttgtacatcaggagagctccaccttgataaactctgggaagtcacatgtctgtatcctccttgaaaaaatgtacagtgttaaaataaaaataaaaagattatctaaatgaagtgtgattacagaacaaattctacttgttttccatctagttttaaaagctgttttacattttcagtcttttttctgtatggcaagaagcagaagctaacctctcactaaataaaaattgacccttggctatcaggactcmtgaagctaggtgtgttggaataataaagtaaatgttgagcctcaggaacatcaagagcatcttatcattaaactcatgtatgtcagctcggagcttgaagtactatttgaaaggaacccaaaactgtaaatactaattctgctcatgaaaacaatgaaaaaaaatgttcaattwtttgtcattacgaggaaattagtgacacaaacattttcccagaagatactgtcgaaaggttttggatactttaactaataggtgtatgctgccatagccatgtaactgttcctaaaaatatgacca

SEQ ID NO: 71367 - DNA, 600 bp, Chicken  19866894349943_2
caaattctacttgttttccatctagttttaaaagctgttttacattttcagtcttttttctgtatggcaagaagcagaagctaacctctcactaaataaaaattgacccttggctatcaggactcmtgaagctaggtgtgttggaataataaagtaaatgttgagcctcaggaacatcaagagcatcttatcattaaactcatgtatgtcagctcggagcttgaagtactatttgaaaggaacccaaaactgtaaatactaattctgctcatgaaaacaatgaaaaaaaatgttcaattwtttgtcattacgaggaaattagtgacacaaacattttcccagaagatactgtcgaaaggttttggatactttaactaataggtgtatgctgccatagccatgtaactgttcctaaaaatatgaccacatgattttttaaaggggaactcctatgattttgacagyttatatttggctccgtggattccctttcgaatcataatttttcatttaattctcatcacttttctatactgttaaccagcctttaacttagctattcaattcaatcaattgatatccatagtacccagatttaaa

SEQ ID NO: 71368 - DNA, 600 bp, Chicken  19866894349943_3
cctcaggaacatcaagagcatcttatcattaaactcatgtatgtcagctcggagcttgaagtactatttgaaaggaacccaaaactgtaaatactaattctgctcatgaaaacaatgaaaaaaaatgttcaattwtttgtcattacgaggaaattagtgacacaaacattttcccagaagatactgtcgaaaggttttggatactttaactaataggtgtatgctgccatagccatgtaactgttcctaaaaatatgaccacatgattttttaaaggggaactcctatgattttgacagyttatatttggctccgtggattccctttcgaatcataatttttcatttaattctcatcacttttctatactgttaaccagcctttaacttagctattcaattcaatcaattgatatccatagtacccagatttaaatcagttaaaataaaatttatgcctaatttctgagcstctttcctctttacactgcagatttatttatttttactttttaatatcaaattaggaaaaaaatgatacaatctccaaactctaaattgccttttcattttgattgtcaaaggttgtgtttttgttgtt

SEQ ID NO: 71369 - DNA, 600 bp, Chicken  19866894349943_4
tcccagaagatactgtcgaaaggttttggatactttaactaataggtgtatgctgccatagccatgtaactgttcctaaaaatatgaccacatgattttttaaaggggaactcctatgattttgacagyttatatttggctccgtggattccctttcgaatcataatttttcatttaattctcatcacttttctatactgttaaccagcctttaacttagctattcaattcaatcaattgatatccatagtacccagatttaaatcagttaaaataaaatttatgcctaatttctgagcstctttcctctttacactgcagatttatttatttttactttttaatatcaaattaggaaaaaaatgatacaatctccaaactctaaattgccttttcattttgattgtcaaaggttgtgtttttgttgttgttttttggttttggataacatgttaaattagtgataagctttaagtacaattcatagcaaatgctacctatagcacacacttattctaatattatatgctgatagatactaaaggaggaaaaacaaaagtaatatgtgtagttgcagcaattttagttgttaaactgcct

SEQ ID NO: 71370 - DNA, 600 bp, Chicken  19866894349943_5
gataacatgttaaattagtgataagctttaagtacaattcatagcaaatgctacctatagcacacacttattctaatattatatgctgatagatactaaaggaggaaaaacaaaagtaatatgtgtagttgcagcaattttagttgttaaactgcctaaaaatcattctttcaatgcaccatcatgtgaattttccagttcctccctgaaggttttattgacatcatatctgacttgagtaaatttttctgtatactattttatcctcaaaaatcccatgacaaccaacttagattgtaragtgattatttaaaatattgcttttattttacctggattagtgagaaggccatattttctgaactgaagtgtattaaacagaagatctttgaaatcaaatgcttttttgcctgtaggatctgcagagttaaatttcattttctctctgggaatcttgacaaagtctcttattatatccttaacatcctttcactcaaattaaaatatagtcctttatatcttcgctgcagtagaaatcctccaagatctgcacaagtattaattgaactgttttatcatcatatccaatggtaaaagaaa

SEQ ID NO: 71371 - DNA, 600 bp, Chicken  19866894349945_1
tccttatctgtatttcctcctatacgtccaaacttccttaagagatattatggctgcagatgtttattattaaaacacaaactacctttaacatgaacttctctgtctacttgctttgtgagatcatgtttgctttatgagtcctatatcttaggaggaaaccaaaaagaagtaaggaagagaaccaataaaattctttgtcttggtctcagatgggaaagagttgatgtttttttttcatagtgtctggtatgatgctgtcttctggttttaggagaaaaacaatgttgataacacacyratgttttagttatggctgagcagtgctgtacagagccaaggacattccagtttctcagtttcttgtactgtcctgcaaatgaaggtgactgagggggcacaaagagttgggatgggacagaagyaggacagctgacctaaactggccaaagggatactccattccatataacatcttgcagaaaccttgaaaaatggtaggaacttggccaagagagaagccactgctcagggacaggctgggcattggtgagtggtgagcaattgctctgtgcatcacttgttttgtgtatgtatata

SEQ ID NO: 71372 - DNA, 600 bp, Chicken  19866894349945_2
ccttatctgtatttcctcctatacgtccaaacttccttaagagatattatggctgcagatgtttattattaaaacacaaactacctttaacatgaacttctctgtctacttgctttgtgagatcatgtttgctttatgagtcctatatcttaggaggaaaccaaaaagaagtaaggaagagaaccaataaaattctttgtcttggtctcagatgggaaagagttgatgtttttttttcatagtgtctggtatgatgctgtcttctggttttaggagaaaaacaatgttgataacacacyratgttttagttatggctgagcagtgctgtacagagccaaggacattccagtttctcagtttcttgtactgtcctgcaaatgaaggtgactgagggggcacaaagagttgggatgggacagaagyaggacagctgacctaaactggccaaagggatactccattccatataacatcttgcagaaaccttgaaaaatggtaggaacttggccaagagagaagccactgctcagggacaggctgggcattggtgagtggtgagcaattgctctgtgcatcacttgttttgtgtatgtatatat

SEQ ID NO: 71373 - DNA, 600 bp, Chicken  19866894349945_3
atgtttgctttatgagtcctatatcttaggaggaaaccaaaaagaagtaaggaagagaaccaataaaattctttgtcttggtctcagatgggaaagagttgatgtttttttttcatagtgtctggtatgatgctgtcttctggttttaggagaaaaacaatgttgataacacacyratgttttagttatggctgagcagtgctgtacagagccaaggacattccagtttctcagtttcttgtactgtcctgcaaatgaaggtgactgagggggcacaaagagttgggatgggacagaagyaggacagctgacctaaactggccaaagggatactccattccatataacatcttgcagaaaccttgaaaaatggtaggaacttggccaagagagaagccactgctcagggacaggctgggcattggtgagtggtgagcaattgctctgtgcatcacttgttttgtgtatgtatatatatatacaattaccattatcctttttttttttcctctttatttttctgacttagttttttatctcaacctacgagttctccgtttctttttttttctgattctctccaccatcccactgagaggg

SEQ ID NO: 71374 - DNA, 600 bp, Chicken  19866894349952_1
ttaacagtgcagtaatattcacgttgacttgttagtgctgtcctgagaaatgtgtgctagttaaataaggatgttgctagaggaggagggaactgaccaataaggttttcacatgacttcacacagtgatgctgacttttggaaggagggatgaagaatggtaagaactccagttggaagcacagctgtagatgtggaaggtcatatttccagagatctgtgcaggattcattggcaagcaagagcaatgtcagcacttctcactgaggagtgagtgttgttcttcctctggaagatcaytgccacctccctggagccggatcattttggtaactcctgttgggacctcaggctgcacagaggacaggaggacccagtgggaacagcacaagccctttgaccaaggtgccatactgtgggagggaggggctctgggtctgtaaaaccaggtggtcccacctgcaaagtggtgtgcatgtcttgtgtgctagcatttcagaggtcccatccaggcgaactaacatgtgtatgttagagaagacacaaataaacagatgatctggatgctatcttatagcaggaagtagtgtcagaagcaga

SEQ ID NO: 71375 - DNA, 599 bp, Chicken  19866894349953_1
  misc_feature (1)..(51): n is any nucleotide
nnnnnnnnnnnnnnnnnnnnnnnnnnnnnnnnnnnnnnnnnnnnnnnnnnnaaaaatattgttaagcactctgctaaaaagcaagaactgacataatcagtgatggggaaacttcggaaactggaagcttattctaatccaaagatcagctgagtgtgtcatataaatgattttgtaaatatctctctccagttttcttgtgaagctgcagcatttctgcaaaatagagatctgatatttttaaagactattttcttaacattgagattaatttggttcctgtttgggtgaaagttcagytcagtgtttatcttattcaaaatgcttcactcatattctgataaacaaattaaaatgattgtccatgaaacaaatctctgctgcaaggaaaaaataataaaaaagagagatgctgctcagcatttgcagaatctctaggcttataatttatctgagtgacacagagggtgagctgaagattagcaaattcatgacagtttcaaaggaaatctgaatatatttcagagtgtggttgatgtgtacattgctgatgaggacacctcgggtcaaaatgatcaactatgcatacttgttctgct

SEQ ID NO: 71376 - DNA, 600 bp, Chicken  19866894349954_1
tgggaggtgtttcagcacttgcaagtctgtctggaacctccctgcagttagatctgtacctgagcatcggtgtgtgagcttaggttcttcttgcaccgtatttcattctgctatgactcagaaaccagtgtgagcttttaaatacagttcttccattaggttctgagttcccctctgtcaccacataaataataaattggtcatttattctcctcagagaacagattttcctgagtttagtccagatggaagatttgggagtcataacagtctggatacacagctgactctagtcttacrtactgtggtctccttcttcatagagtcatttcattttccttcccatatgtaggaaatgggatactgaactgagtaggctttgatttggtctgtgtttcatttggggggaatgtctgtattttatctgtatcacacttcatgtgttttcaaagtatgtacttgcaacaggaaaagttctttactgtctctttaaagaaaaccctacacaataatgtgggcaatactccctaatgtgtgtatcttctgttgattctagcatcaagccagatgcaattttattgtcctgatagaacttttata

SEQ ID NO: 71377 - DNA, 600 bp, Chicken  19866894349958_1
caatgaatttttatcagtgctatagtgaaaaaaaatcttctcatgcattttcttgttcccgtgattcacattttggcagtatgttacatttagtcttttataccttgaaactattggaaattggataactcattggagttcttggaaaaattgtctccctttctttaggaaatattaagatacccaactttcttggaattacattgcagttcagggaacgtggtttctctttagatcttcctgccatgaacctgttgtattgtgcaattgcagtcagctacccatttctgctagtttttyaagcacttagtcatagcctgcagtgctttgatttgaccttgctcagctgaatctggctttatttctcttcccagtggctcattgcttttcrtgttccagatagtgaaggagaaggaaatgaattagtacctctgcagtcaactgctgtgaaaatagcatgtgccatgccacttgtgtatgctactgaatgatattttccttgatagtcaatgargtgaaggatgttgcktgttcataacgagctggcagtgctgcccctcctgccrtcttcacagttacgactgtcacccggagatgaca

SEQ ID NO: 71378 - DNA, 600 bp, Chicken  19866894349958_2
agtcttttataccttgaaactattggaaattggataactcattggagttcttggaaaaattgtctccctttctttaggaaatattaagatacccaactttcttggaattacattgcagttcagggaacgtggtttctctttagatcttcctgccatgaacctgttgtattgtgcaattgcagtcagctacccatttctgctagtttttyaagcacttagtcatagcctgcagtgctttgatttgaccttgctcagctgaatctggctttatttctcttcccagtggctcattgcttttcrtgttccagatagtgaaggagaaggaaatgaattagtacctctgcagtcaactgctgtgaaaatagcatgtgccatgccacttgtgtatgctactgaatgatattttccttgatagtcaatgargtgaaggatgttgcktgttcataacgagctggcagtgctgcccctcctgccrtcttcacagttacgactgtcacccggagatgacaactttatatagttagggatgtttgtgcatgttattgtgtgagatattacaagcactgatgggctggatgtcagtgaagcttcatatgagat

SEQ ID NO: 71379 - DNA, 600 bp, Chicken  19866894349958_3
ggaacgtggtttctctttagatcttcctgccatgaacctgttgtattgtgcaattgcagtcagctacccatttctgctagtttttyaagcacttagtcatagcctgcagtgctttgatttgaccttgctcagctgaatctggctttatttctcttcccagtggctcattgcttttcrtgttccagatagtgaaggagaaggaaatgaattagtacctctgcagtcaactgctgtgaaaatagcatgtgccatgccacttgtgtatgctactgaatgatattttccttgatagtcaatgargtgaaggatgttgcktgttcataacgagctggcagtgctgcccctcctgccrtcttcacagttacgactgtcacccggagatgacaactttatatagttagggatgtttgtgcatgttattgtgtgagatattacaagcactgatgggctggatgtcagtgaagcttcatatgagatattcttctatgagtagataaagccaatgagttgtgaagacacataacctttyggtagcagtgtcagtgaattactaatgctggtacttccagagttgatactctgaacagtttgcagggatga

SEQ ID NO: 71380 - DNA, 600 bp, Chicken  19866894349958_4
tttagatcttcctgccatgaacctgttgtattgtgcaattgcagtcagctacccatttctgctagtttttyaagcacttagtcatagcctgcagtgctttgatttgaccttgctcagctgaatctggctttatttctcttcccagtggctcattgcttttcrtgttccagatagtgaaggagaaggaaatgaattagtacctctgcagtcaactgctgtgaaaatagcatgtgccatgccacttgtgtatgctactgaatgatattttccttgatagtcaatgargtgaaggatgttgcktgttcataacgagctggcagtgctgcccctcctgccrtcttcacagttacgactgtcacccggagatgacaactttatatagttagggatgtttgtgcatgttattgtgtgagatattacaagcactgatgggctggatgtcagtgaagcttcatatgagatattcttctatgagtagataaagccaatgagttgtgaagacacataacctttyggtagcagtgtcagtgaattactaatgctggtacttccagagttgatactctgaacagtttgcagggatgatttgtgagtatgttt

SEQ ID NO: 71381 - DNA, 600 bp, Chicken  19866894349958_5
attgcagtcagctacccatttctgctagtttttyaagcacttagtcatagcctgcagtgctttgatttgaccttgctcagctgaatctggctttatttctcttcccagtggctcattgcttttcrtgttccagatagtgaaggagaaggaaatgaattagtacctctgcagtcaactgctgtgaaaatagcatgtgccatgccacttgtgtatgctactgaatgatattttccttgatagtcaatgargtgaaggatgttgcktgttcataacgagctggcagtgctgcccctcctgccrtcttcacagttacgactgtcacccggagatgacaactttatatagttagggatgtttgtgcatgttattgtgtgagatattacaagcactgatgggctggatgtcagtgaagcttcatatgagatattcttctatgagtagataaagccaatgagttgtgaagacacataacctttyggtagcagtgtcagtgaattactaatgctggtacttccagagttgatactctgaacagtttgcagggatgatttgtgagtatgtttttgaaagaagtgtaacaaaccttgcagcctaagccac

SEQ ID NO: 71382 - DNA, 600 bp, Chicken  19866894349958_6
gctgtgaaaatagcatgtgccatgccacttgtgtatgctactgaatgatattttccttgatagtcaatgargtgaaggatgttgcktgttcataacgagctggcagtgctgcccctcctgccrtcttcacagttacgactgtcacccggagatgacaactttatatagttagggatgtttgtgcatgttattgtgtgagatattacaagcactgatgggctggatgtcagtgaagcttcatatgagatattcttctatgagtagataaagccaatgagttgtgaagacacataacctttyggtagcagtgtcagtgaattactaatgctggtacttccagagttgatactctgaacagtttgcagggatgatttgtgagtatgtttttgaaagaagtgtaacaaaccttgcagcctaagccacgctctcactcagtgatgaatataagtcctgcctagttcttgtcagctgtataccagcttcagattgttgtgggaagttccagcaagcctgtgcagggaacggaggtcaggcagatgggaagtgaatgctgcagaatcctgatgagtcattttaagtcccacgtttaattgatttatg

SEQ ID NO: 71383 - DNA, 600 bp, Chicken  19866894349962_1
tgcgttgcgcccctgctggtgctgcgtctatgccctgggtgggtcgtgtgggggtgtggctgctctacaggtcgagcagcagcacgcggggatcctccaccgctgccttgatcttgcgcaggaaagtcaccgcctctctgccgtcaatcagccggtgatcgtaggtcagtgccacgtacatcatgggccggacctcgatctgaagggagagaacaagatgagtactggtgcgctcagccctactactgcctgcaggataccctcctctcaatctagggaagacttggctttctcctatcstgaattagagscttaggacacaacaaggcagaatacacacccactcattccacccaggcaccagcactagcttgatctgcactgcgcaacacctggtcccyctctggagctgttctctatcasagagtctacagccccctcctcctttccacacccaagcaggttattcagctgctccccttasgaatcgggcaaggctctcygcacatctcaggcaagtaccagtgccagcaaagttgcccttcgtcttttagtctccgttcctccttcacagaaggaggcagcctttcagaaggcaac

SEQ ID NO: 71384 - DNA, 600 bp, Chicken  19866894349962_2
cctgctggtgctgcgtctatgccctgggtgggtcgtgtgggggtgtggctgctctacaggtcgagcagcagcacgcggggatcctccaccgctgccttgatcttgcgcaggaaagtcaccgcctctctgccgtcaatcagccggtgatcgtaggtcagtgccacgtacatcatgggccggacctcgatctgaagggagagaacaagatgagtactggtgcgctcagccctactactgcctgcaggataccctcctctcaatctagggaagacttggctttctcctatcstgaattagagscttaggacacaacaaggcagaatacacacccactcattccacccaggcaccagcactagcttgatctgcactgcgcaacacctggtcccyctctggagctgttctctatcasagagtctacagccccctcctcctttccacacccaagcaggttattcagctgctccccttasgaatcgggcaaggctctcygcacatctcaggcaagtaccagtgccagcaaagttgcccttcgtcttttagtctccgttcctccttcacagaaggaggcagcctttcagaaggcaacatcaacccccc

SEQ ID NO: 71385 - DNA, 600 bp, Chicken  19866894349962_3
gctgccttgatcttgcgcaggaaagtcaccgcctctctgccgtcaatcagccggtgatcgtaggtcagtgccacgtacatcatgggccggacctcgatctgaagggagagaacaagatgagtactggtgcgctcagccctactactgcctgcaggataccctcctctcaatctagggaagacttggctttctcctatcstgaattagagscttaggacacaacaaggcagaatacacacccactcattccacccaggcaccagcactagcttgatctgcactgcgcaacacctggtcccyctctggagctgttctctatcasagagtctacagccccctcctcctttccacacccaagcaggttattcagctgctccccttasgaatcgggcaaggctctcygcacatctcaggcaagtaccagtgccagcaaagttgcccttcgtcttttagtctccgttcctccttcacagaaggaggcagcctttcagaaggcaacatcaacccccctaggaaaagcatacagggcatgatcctcatcccacagagccctcctctctactcattgaaacctcctgtgcagctccacctaccttgcct

SEQ ID NO: 71386 - DNA, 600 bp, Chicken  19866894349962_4
aagtcaccgcctctctgccgtcaatcagccggtgatcgtaggtcagtgccacgtacatcatgggccggacctcgatctgaagggagagaacaagatgagtactggtgcgctcagccctactactgcctgcaggataccctcctctcaatctagggaagacttggctttctcctatcstgaattagagscttaggacacaacaaggcagaatacacacccactcattccacccaggcaccagcactagcttgatctgcactgcgcaacacctggtcccyctctggagctgttctctatcasagagtctacagccccctcctcctttccacacccaagcaggttattcagctgctccccttasgaatcgggcaaggctctcygcacatctcaggcaagtaccagtgccagcaaagttgcccttcgtcttttagtctccgttcctccttcacagaaggaggcagcctttcagaaggcaacatcaacccccctaggaaaagcatacagggcatgatcctcatcccacagagccctcctctctactcattgaaacctcctgtgcagctccacctaccttgcctcccacagccacaggcctgtcaa

SEQ ID NO: 71387 - DNA, 600 bp, Chicken  19866894349962_5
gggccggacctcgatctgaagggagagaacaagatgagtactggtgcgctcagccctactactgcctgcaggataccctcctctcaatctagggaagacttggctttctcctatcstgaattagagscttaggacacaacaaggcagaatacacacccactcattccacccaggcaccagcactagcttgatctgcactgcgcaacacctggtcccyctctggagctgttctctatcasagagtctacagccccctcctcctttccacacccaagcaggttattcagctgctccccttasgaatcgggcaaggctctcygcacatctcaggcaagtaccagtgccagcaaagttgcccttcgtcttttagtctccgttcctccttcacagaaggaggcagcctttcagaaggcaacatcaacccccctaggaaaagcatacagggcatgatcctcatcccacagagccctcctctctactcattgaaacctcctgtgcagctccacctaccttgcctcccacagccacaggcctgtcaaagatggcatgcatgcctaagatagcagactgcggtgggttgatgataggtgtcccaaagag

SEQ ID NO: 71388 - DNA, 600 bp, Chicken  19866894349962_6
agggagagaacaagatgagtactggtgcgctcagccctactactgcctgcaggataccctcctctcaatctagggaagacttggctttctcctatcstgaattagagscttaggacacaacaaggcagaatacacacccactcattccacccaggcaccagcactagcttgatctgcactgcgcaacacctggtcccyctctggagctgttctctatcasagagtctacagccccctcctcctttccacacccaagcaggttattcagctgctccccttasgaatcgggcaaggctctcygcacatctcaggcaagtaccagtgccagcaaagttgcccttcgtcttttagtctccgttcctccttcacagaaggaggcagcctttcagaaggcaacatcaacccccctaggaaaagcatacagggcatgatcctcatcccacagagccctcctctctactcattgaaacctcctgtgcagctccacctaccttgcctcccacagccacaggcctgtcaaagatggcatgcatgcctaagatagcagactgcggtgggttgatgataggtgtcccaaagagtgacccaaaaacccctcca

SEQ ID NO: 71389 - DNA, 600 bp, Chicken  19866894349964_1
cctgtccttgaatgcttccagggtgagggcattcacagcatcactgggcaacctgttccagtgtctcaccaccctcacagtaaagaatttcttcctaacatctagtctaaatctactctcttccatctccctttgcctgtcactacatgcccttctaaaatgtctctccccagctttcctacatgcccccttcaggtactggaaggctgctttaaagtcctcatggagccttctcttctctaggctgaaaagtcccatctctctcagcctgtcctcgtaggggaggtactccagccttcrtggccctcctctgaaccctctccaacagcttgatgtcctttttgtgttaggggccccagaactgaacacaatactccaggtgagagctcaggagagcagagtagaggggcagaatcacatccctcaacctgctgttcatgcttctattgatgccaggatgcagttgaccttctggggtgcaagcacacattgccagctcatgctgattctttcaccaactgacactcccaaatccttcttctcagggctgctctcaaaccattcccttcccagcctgtatctgcgcttgggattgcccca

SEQ ID NO: 71390 - DNA, 600 bp, Chicken  19866894349972_1
ttgcattttgttaaatattcaaaggtaccgtgcaattagcatgtcattaatgaataattaattactgctaaaacagccttcagattttttttttgcaactaaattatttaaagagcaaataaaataatggaatgcagctcctccactacccccttaactctgtgttttcatcagcgcattggtttgtagatgaataggggtttattagctaagaaaaaaatggtgttttgatatatagaaagattccacttccctttcctgttctactgccctcagactctcaaagaaagccaaaaaagygacgtggtccttgttagcatctgctaggaatgcaggarttaaaatacctgggataggattcagagtaccagatttggacagcgtctgcctaaaacaagaaaaaaataccccatacattttaaagagtggttcagctgctacttcacagagttgtayccccagttttatcaagagcaatgtatttttgttaatggctattcaccagctctaacgacagctactgttattaaaatgtacctcaccatacagccaagagttaaagagaaagtaatttgttgccacttgcagatatacatcact

SEQ ID NO: 71391 - DNA, 600 bp, Chicken  19866894349972_2
gcatgtcattaatgaataattaattactgctaaaacagccttcagattttttttttgcaactaaattatttaaagagcaaataaaataatggaatgcagctcctccactacccccttaactctgtgttttcatcagcgcattggtttgtagatgaataggggtttattagctaagaaaaaaatggtgttttgatatatagaaagattccacttccctttcctgttctactgccctcagactctcaaagaaagccaaaaaagygacgtggtccttgttagcatctgctaggaatgcaggarttaaaatacctgggataggattcagagtaccagatttggacagcgtctgcctaaaacaagaaaaaaataccccatacattttaaagagtggttcagctgctacttcacagagttgtayccccagttttatcaagagcaatgtatttttgttaatggctattcaccagctctaacgacagctactgttattaaaatgtacctcaccatacagccaagagttaaagagaaagtaatttgttgccacttgcagatatacatcactagtaagacgttagtttatatttataagctgcacatctg

SEQ ID NO: 71392 - DNA, 600 bp, Chicken  19866894349972_3
taaattatttaaagagcaaataaaataatggaatgcagctcctccactacccccttaactctgtgttttcatcagcgcattggtttgtagatgaataggggtttattagctaagaaaaaaatggtgttttgatatatagaaagattccacttccctttcctgttctactgccctcagactctcaaagaaagccaaaaaagygacgtggtccttgttagcatctgctaggaatgcaggarttaaaatacctgggataggattcagagtaccagatttggacagcgtctgcctaaaacaagraaaaaataccccatacattttaaagagtggttcagctgctacttcacagagttgtayccccagttttatcaagagcaatgtatttttgttaatggctattcaccagctctaacgacagctactgttattaaaatgtacctcaccatacagccaagagttaaagagaaagtaatttgttgccacttgcagatatacatcactagtaagacgttagtttatatttataagctgcacatctgtggatcagttggcctacccatctgttaactgcaccagtaaacagtgagtctgtgagctgca

SEQ ID NO: 71393 - DNA, 600 bp, Chicken  19866894349972_4
actctgtgttttcatcagcgcattggtttgtagatgaataggggtttattagctaagaaaaaaatggtgttttgatatatagaaagattccacttccctttcctgttctactgccctcagactctcaaagaaagccaaaaaagygacgtggtccttgttagcatctgctaggaatgcaggarttaaaatacctgggataggattcagagtaccagatttggacagcgtctgcctaaaacaagaaaaaaataccccatacattttaaagagtggttcagctgctacttcacagagttgtayccccagttttatcaagagcaatgtatttttgttaatggctattcaccagctctaacgacagctactgttattaaaatgtacctcaccatacagccaagagttaaagagaaagtaatttgttgccacttgcagatatacatcactagtaagacgttagtttatatttataagctgcacatctgtggatcagttggcctacccatctgttaactgcaccagtaaacagtgagtctgtgagctgcatatccctgcatccatcacaaattctttctttaattgtatgtttatgcaacaaacctc

SEQ ID NO: 71394 - DNA, 599 bp, Chicken  19866894349975_1
  misc_feature (1)..(168): n is any nucleotide
nnnnnnnnnnnnnnnnnnnnnnnnnnnnnnnnnnnnnnnnnnnnnnnnnnnnnnnnnnnnnnnnnnnnnnnnnnnnnnnnnnnnnnnnnnnnnnnnnnnnnnnnnnnnnnnnnnnnnnnnnnnnnnnnnnnnnnnnnnnnnnnnnnnnnnnnnnnnnnnnnnnnnnnnatagatgcctgtcacagatagcctttaatgacaggaattcatggtatatttgtgcactggctcccacctgatgaagatacttccttctaatatctatggaaataaatataattactattctcatgcttaaaratgatattaccttgtatcaaaaatgtttaaaccagctaagttgaagctcacagaaacttcaaatactgaggagcactctctagcatcctgcactggtggttattttgtaaaagcaacaagctgaacttgatggagagtagttgcactgagtgctttctacacttcagtcaccgtagaggccacttcagaagctagaatggaatttgcatgtttcaggaataggatgctgacaaaacatttttaatggagtttgtactttcaagagttcctgtaagcagtagcaaagaaaccgaagggag

SEQ ID NO: 71395 - DNA, 600 bp, Chicken  19866894349976_1
acttttcaaacactgatgagaagttcacctacctagcgtccccccgcttcccctcatcatgtaaggaaagcactgttttgattctgtgtgtgtgattgtgtctgctccagcgctaagcatgctatcagcatgtgaccaaacagcaaagctgacatttttgctatgattatccatgaaatgtgtttcccacctctgatttacaagagccctattcatgagaaatgattaatagctcactagcactgccaaaaagcacatgaatctagacatcctctacgctgctgacatgctgctcatctygcagatatgttcagatctctctccttcttttttgctttcagtgtctgatccccaatgggcacatgcttgtgctgattaggcagtgcagttgctgactgggacgatctcaggcttacattatggatggcacccaattacaggttgcagagagcagcgtccttcctagcttgtactatatgagcatgattatgcgttaaatgccctctaaattaacaggcagcatcaccaacttgcctgtctcaacttactggtataacaaactggccccactgccaaattttcactactcacagtcagtct

SEQ ID NO: 71396 - DNA, 600 bp, Chicken  19866894349978_1
cattttaaaccagcagagccatttgttgctggtgaaagccaaacgctgtgacgctgcctgcttcccagttcccccgtcgttaatctcagagcagacatttctgcaagaagacttatttacagaacaaccccactccggcatgcagcacggcccagtcaggctcacccctgcgggcagccgggcgcccaccagccggcacctcagggtgctcccaggggccgcacacccccagaccccctgcaggtgccccacgccagccccgcgccccgggcctgcagcaccggccacagctggcggcasagctcctggagctgcacagcacacrgcccagctgcagcacaggaatgcgatggaggcggttcccagcggcgctttgcatagcgcgtctccaacgccgcgtgctcctacacgctccgtgtcaacgggggcaactgcgagagcaaagcggagtcggcctgccaggtgcatggcgggggccctgcagggatgctgcgcccatgctgcagctcggccctcagcccgactccctccccagcggggtgctgagctgggaggaggaaatacacggcacaggtgctgctgggctcaaccgtttgcttt

SEQ ID NO: 71397 - DNA, 582 bp, Chicken  19866894349978_2
ttgctggtgaaagccaaacgctgtgacgctgcctgcttcccagttcccccgtcgttaatctcagagcagacatttctgcaagaagacttatttacagaacaaccccactccggcatgcagcacggcccagtcaggctcacccctgcgggcagccgggcgcccaccagccggcacctcagggtgctcccaggggccgcacacccccagaccccctgcaggtgccccacgccagccccgcgccccgggcctgcagcaccggccacagctggcggcasagctcctggagctgcacagcacacrgcccagctgcagcacaggaatgcgatggaggcggttcccagcggcgctttgcatagcgcgtctccaacgccgcgtgctcctacacgctccgtgtcaacgggggcaactgcgagagcaaagcggagtcggcctgccaggtgcatggcgggggccctgcagggatgctgcgcccatgctgcagctcggccctcagcccgactccctccccagcggggtgctgagctgggaggaggaaatacacggcacaggtgctgctgggctcaaccgtttgcttttttctct

SEQ ID NO: 71398 - DNA, 600 bp, Chicken  19866894349985_1
aaacccaaataaataaataaaaatctaaattgctgttaataaacttgatgaaatttgaactgatatagaagtaaaacattagataagaaagccttttatttaatgaaacgtgttgtctttttttttttttttaattacagatacttgtagaactcataaggaaaagataataattaagaaaaatcataattttactcttcaaacctgttttctaatttagttagtggctttatggcttatacaagtaatctaggtacttttcatttcttgggattgctccaacaaataaaataatagtawtttttcttatttcagttttctttcaatatctaattacgtatagaaaggcaaacatgtttgccattatttccactttacacaaagcttcaaaaagctttgtatatagcttctatatacatcagcttggtaactcttctgatgttcagctctgttttgttttataattgtcaatattttctggtgaaagacattttgttgcctacaatacaatactgtcacaacatattgcagctttatttaatctgcttttccaattgaaaattattttactgaataggcagatagaaagtcagatcaagc

SEQ ID NO: 71399 - DNA, 600 bp, Chicken  19866894349985_2
aggcaaacatgtttgccattatttccactttacacaaagcttcaaaaagctttgtatatagcttctatatacatcagcttggtaactcttctgatgttcagctctgttttgttttataattgtcaatattttctggtgaaagacattttgttgcctacaatacaatactgtcacaacatattgcagctttatttaatctgcttttccaattgaaaattattttactgaataggcagatagaaagtcagatcaagcaacccatttcatccaagtttcagaagtagaaaaaatatgacagastttggagtacaatctattatgaagtcatgagcaaaaccacaagaaaaattactgttctaactacaagactgacattctttcagtttgcctattttttttacattttattttattttttattaaaagaaataaaggaaactaaagacctaagaatgaagtgtatatgtacttagaaaagaaaaggatgagtagaaaatttcattaagagagttttcaaaattttgtagaaggtattagtagcttttatactttctttttttatggtcttactttaacttaaatatctgttgcaggagatga

SEQ ID NO: 71400 - DNA, 599 bp, Chicken  19866894349988_1
  misc_feature (1)..(81): n is any nucleotide
nnnnnnnnnnnnnnnnnnnnnnnnnnnnnnnnnnnnnnnnnnnnnnnnnnnnnnnnnnnnnnnnnnnnnnnnnnnnnnnnnctcgaagcgccgcgccgggagctgagggtcgctccgtcgctctccgggtgcggcgccccgcggccggggggggctctgcggggccgcgctgccgcccgcgggctctccgggtgctgcaatgctgtctttttgcctcagcgccgagctgaaatagcgcgcgcctctgtgcagaaatcgctaatgcagggcggcgttggaagcgatggtaacgatggagcrgctgggcgctatcacgagacgcggcagcccgtgcgaggctcagaaaaccacttgaaatttagatcttccgcgagggctgcgctttaaaaatgttccgtcgcgttcggtttcacctttgccgttcgccaggaatgccgttcccgagctcacgtattcttggcacggcgctgctcaccagcagcacccgtccagctgtgccagcatctggccctgcgcttctccgcgctccgctcccggagccgcgcggctttgggagccgctccgtgtcccgcgttcgttgtgcggtgctgttatgtctg

SEQ ID NO: 71401 - DNA, 599 bp, Chicken  19866894350010_1
  misc_feature (1)..(137): n is any nucleotide
nnnnnnnnnnnnnnnnnnnnnnnnnnnnnnnnnnnnnnnnnnnnnnnnnnnnnnnnnnnnnnnnnnnnnnnnnnnnnnnnnnnnnnnnnnnnnnnnnnnnnnnnnnnnnnnnnnnnnnnnnnnnnnnnnnnnnnnnnctggattctactttgcacctaggcagacatggctacaaacactcacatcacctattatccctttgcaggtactcatcagagaatggagaggacttcttcaaattgcaaaagctggaatatctttttcgttgctggttattttatttgcaaggtagctggaacragatgttctctgttcaaaaattagctagcctactttgaaagcagcaacacacttgcttgtcattgacagaaagcatttatttagaatggtatttacatttaaccatcataagaataggtgtacaggaaatattaaaagaatgaacagcaattatgagaaaaaaaatcttatcctttgtaacataaccagctcacagcagccccaaaaccgtctgacagttttctactgcttgttttctggcaccttcctctcaagtgtctgacatcagccactggatctgaaagagcttacrtggcatc

SEQ ID NO: 71402 - DNA, 568 bp, Chicken  19866894350010_2
ctggaacragatgttctctgttcaaaaattagctagcctactttgaaagcagcaacacacttgcttgtcattgacagaaagcatttatttagaatggtatttacatttaaccatcataagaataggtgtacaggaaatattaaaagaatgaacagcaattatgagaaaaaaaatcttatcctttgtaacataaccagctcacagcagccccaaaaccgtctgacagttttctactgcttgttttctggcaccttcctctcaagtgtctgacatcagccactggatctgaaagagcttacrtggcatctaacgagtgcctgctgccttaagccatcagacaaggtgcatctctagcwctgcgtggcaattagtgcgtaattccatacagaaaaggggtgagtataacagagcagaacggtgtccgggaatagaactgagagccctccaagggaagaaaaagtgctaacttggaagatgaaaaactcaattattttgtacatcatcggtcagcattttccacagatgtacagtgctgtgtctgggaataggacaaacctgctgggcagca

SEQ ID NO: 71403 - DNA, 512 bp, Chicken  19866894350010_3
acacttgcttgtcattgacagaaagcatttatttagaatggtatttacatttaaccatcataagaataggtgtacaggaaatattaaaagaatgaacagcaattatgagaaaaaaaatcttatcctttgtaacataaccagctcacagcagccccaaaaccgtctgacagttttctactgcttgttttctggcaccttcctctcaagtgtctgacatcagccactggatctgaaagagcttacrtggcatctaacgagtgcctgctgccttaagccatcagacaaggtgcatctctagcwctgcgtggcaattagtgcgtaattccatacagaaaaggggtgagtataacagagcagaacggtgtccgggaatagaactgagagccctccaagggaagaaaaagtgctaacttggaagatgaaaaactcaattattttgtacatcatcggtcagcattttccacagatgtacagtgctgtgtctgggaataggacaaacctgctgggcagca

SEQ ID NO: 71404 - DNA, 600 bp, Chicken  19866894350011_1
ccatctccccttgtcctaataggaccatagaatcatttgagttggaaaggacctttacagatcatctggtccaactccccagccgggacagctagcagcaaagcgcagttagacccagggcagcaaagcacaggttacacactctgttcacgatatgaagtcaaaatcccagagccagggatcaatttgctaaagatctactttctagttataggttttccaaatcccacctgcagatccttgctcagagcccgaagccgcaggactcaccaaacactgccctgctgtatgccctgctgyagcacagagggctttggatggactcaagtcagagagattctgaaactattaaggccagaagctgaaagcaaacaaagcacattactacatgaatctgggaggaggagcttgcaaaaaattcaaatcacaaacattttgtgaatgttaccagcagtgctgcttgcaagcatggaatagcttcttagaaactgtctatctttagggttctgcctgtccagctgcagtattttggttggcttgctgttgctaattccagtatttgcccctttcttctgctctcttgccttctaccagccttgc

SEQ ID NO: 71405 - DNA, 600 bp, Chicken  19866894350013_1
ggtactttttaaagaaggtgcttttgtaatccaaagggcttgtacttataaagtttgaagagctttccattttcttaatcttgtttcagctgaagtagttacaccatttcccaagtagctgctatgtagatataattgtacttgccctgctgcaagaggagcacaaacatccagaacatctaactgaactatcaccagaattttctgaaactggtagtggatttatcccagtatgttagatagatatatatgatatatagatatattgtatctataagatatatatgacactaatcatgraaaacatataagtgatctttaaaataaaagtcctgaaggatatttctcgtcaatggtatttttgtaaatagcatgtctkaacttcaccacagctaatattttatggattagcctccttcatgaaactttactcgaattctgagctgaagaactatagcaataatttcaaatttattctgagactgtaggcaaacactactgggtctccacattctgttttactgacctgtaaaacaatgcctgcattagcagctttacagtaataacattatattttgcaaataattaaaattttgtatc

SEQ ID NO: 71406 - DNA, 532 bp, Chicken  19866894350013_2
cttgtttcagctgaagtagttacaccatttcccaagtagctgctatgtagatataattgtacttgccctgctgcaagaggagcacaaacatccagaacatctaactgaactatcaccagaattttctgaaactggtagtggatttatcccagtatgttagatagatatatatgatatatagatatattgtatctataagatatatatgacactaatcatgraaaacatataagtgatctttaaaataaaagtcctgaaggatatttctcgtcaatggtatttttgtaaatagcatgtctkaacttcaccacagctaatattttatggattagcctccttcatgaaactttactcgaattctgagctgaagaactatagcaataatttcaaatttattctgagactgtaggcaaacactactgggtctccacattctgttttactgacctgtaaaacaatgcctgcattagcagctttacagtaataacattatattttgcaaataattaaaattttgtatcaacttttcaga

SEQ ID NO: 71407 - DNA, 600 bp, Chicken  19866894350020_1
cacgcctatcaacactcaaatcatagatgagactgcagaagactcaacacaattcaaatcagagccactcatgcagagatgtattaactaaacaagaccagatttcactcaggctactaaggaaaagtatgagtaatggcaggataagaatccacgttacaaacccattttcttctcccaagtgggtagcaccttagaattctggggaatacaaagaggtgctgctttttattgtttagacagatctgaaggattgctcatcaggaaacggcaagtgcacatctccttcctttagaagtyatccataagcttttcctgatagaaaattacattcaacagaaaaaaaaacgagcaggaaaaaccaaaaggtaccataagaaatactcagcagtttcaggcacttttttttgttgttgttggaaaaatatcctcgaagaatttattttatggtctgcctcttcagtttgcagctactgctacacatctgcctcaggtcatttccttcttgcagccagaaacagtcaaatccatcatcattcagaaaatagcaacagctaatttaatagcttcaaaacgtaacttactgtgtggatggcagag

SEQ ID NO: 71408 - DNA, 600 bp, Chicken  19866894350024_1
ttcaaaataccccctaaaatgccttaggattaaagcaatcatctgtaatacaatatctgtggctctttgttgattggctcaaaacatgaaatacagcttttttatattatttttaatttttttttttttttttggaacagtcagtgtgtttccttcggtgtctgccttcaccaaaattctgcattcctcgtctaatcctgagatattaaaataattaagtgggatagtcacagtttcacttaattaagcataattgaggtttgggatactttggtattacagtttaaaaaagaaagcatyaaaaaatggctttgctgagcatatgcagcattacttctatatattgctgcctgttttaaacagtaaayggggagcttgcttgcctaaggacagttagactgacctgctaacaacttgtttagcctgctagtctttatcagagagcgtgtgcaactctgtttatcggacctatgtgaagggttaaccccaaccaaagtaatcattataattttgaagacatgaacatttgattccatcagtgtttattcttttgggtcaagtggccaaaagaaaatcaaagctctgcaagagccattcaga

SEQ ID NO: 71409 - DNA, 600 bp, Chicken  19866894350024_2
gttgattggctcaaaacatgaaatacagcttttttatattatttttaatttttttttttttttttggaacagtcagtgtgtttccttcggtgtctgccttcaccaaaattctgcattcctcgtctaatcctgagatattaaaataattaagtgggatagtcacagtttcacttaattaagcataattgaggtttgggatactttggtattacagtttaaaaaagaaagcataaaaaaatggctttgctgagcatatgcagcattacttctatatattgctgcctgttttaaacagtaaayggggagcttgcttgcctaaggacagttagactgacctgctaacaacttgtttagcctgctagtctttatcagagagcgtgtgcaactctgtttatcggacctatgtgaagggttaaccccaaccaaagtaatcattataattttgaagacatgaacatttgattccatcagtgtttattcttttgggtcaagtggccaaaagaaaatcaaagctctgcaagagccattcagatatttttgctgtacgtaaatgaaatattattaattggtgggggaaacgcatttattcagcaaatgctg

SEQ ID NO: 71410 - DNA, 599 bp, Chicken  19866894350026_1
  misc_feature (1)..(27): n is any nucleotide
nnnnnnnnnnnnnnnnnnnnnnnnnnnacggccgtgccctcccgtcctccctttctaaagcgttctctcagctgcactccttctaaaggctgccccaactcaaatgaccacaaaggtccgtatccctctgtgacccccaacggtcatttctgaccccgtgagtgccctatttacagtgtgcctccatgggctgaagctcgaggcccttctgccccctcccaagctgagattggtggcactcacactgcatcacaagaactgcccctatcctacatcccatagcacagcccatgggaacakctgggatgcatcgagcaccagagatcccccgaaaggagcgagccctgagcagcactgcagcgcattacagcacggggcagacatcccaaagagcttcatcccaaaacaaaggcatatgtgaaaacagttcaaggcagataagcaacgcactgcgacggcgggttttgttcaggacgctgaatcctgccgagaaaggaaacgaaggaaggaacccaaaggtccatcagcgtcgtgcagtgctgagaatggagcccacagaagcctcacagcccggctgggagaaacgggatgccgttcag

SEQ ID NO: 71411 - DNA, 600 bp, Chicken  19866894350035_1
gagaatggctttctcttttgcaggtttttttcattgcttattgagtatgctaatggaaagtagagtcaaattgtttgtgcttcttaagttaattaactgttagtgtaatttattaaaataaacaccattgtgacatgaatgttaggaaaggcatatcttctgtctacttcagtaaggcatttgatcatgctagctgtaatcccctgcttgccttaatgtgagagtaataggacacaggaagctcccttgcactggcaggctgaattggaatacgatatgtaactgcttttttcctttacyggattatgtgacacagatatctcttctttcctgtttaggaggaaacaaaacagttgttaaatcaacagaagtctggttcacgctcagactcacgggaggatgaaatctctcctcctcctcctatgaaccctgtggtcaagggtcgaagaagacgtggggccatcagtgcagaagtctatacagaggaggatgctgcatcttatgttagaaaggtgctctaatttttttcctttaatgttgccaagagttgcacacacaatcagaatttatctaagtctacttaatatccagtatattaag

SEQ ID NO: 71412 - DNA, 599 bp, Chicken  19866894350036_1
  misc_feature (1)..(32): n is any nucleotide
nnnnnnnnnnnnnnnnnnnnnnnnnnnnnnnncatgagcagttgtcacccacccaccccacacacctgggagcaggctggacctggcaggagcaatgcctttagcaagccaattaagccgtgctgcttgatgaggatgtactacacagcttgcaaacgacacggggtcagtactgcttctgtctctcacgcttgcttgttagcacacctcatttctcgggctttaagccgcctaattggatgttgcggcggcggcagtagggaggagggaggaaggtgggagcaccgcggggagaagcakctcctggagctcatcagccacgatgatcgctagatggcattgcaaccacaccgttaccagccccagcgcgacaaccggccgtgatgggaggggagggacgtgcgggcggcagcggccggggatgrgaatggggccggggatggggatgagactggggatggcgatcggaatggggccagggctgtgattggggctggggctaggactgggattggggctcaatttagggccgagattgcccacaaccacagaacagccaaggatgctcctcggccactccgtcatcatgcacttttatc

SEQ ID NO: 71413 - DNA, 600 bp, Chicken  19866894350036_2
cttgatgaggatgtactacacagcttgcaaacgacacggggtcagtactgcttctgtctctcacgcttgcttgttagcacacctcatttctcgggctttaagccgcctaattggatgttgcggcggcggcagtagggaggagggaggaaggtgggagcaccgcggggagaagcakctcctggagctcatcagccacgatgatcgctagatggcattgcaaccacaccgttaccagccccagcgcgacaaccggccgtgatgggaggggagggacgtgcgggcggcagcggccggggatgrgaatggggccggggatggggatgagactggggatggcgatcggaatggggccagggctgtgattggggctggggctaggactgggattggggctcaatttagggccgagattgcccacaaccacagaacagccaaggatgctcctcggccactccgtcatcatgcacttttatcgtgtgattctgatgaaactctaggggaagcaaagagcaaaagttgtaaaacgatacacttttcataacaaggactactttttcctatgggttccatatcatgaagcagtcacggagttgtgtttgg

SEQ ID NO: 71414 - DNA, 567 bp, Chicken  19866894350042_1
acgtgaaaaatatttaatgcttatcatgttaaatttttttatgtacttttttgaaactggttttataactttagagtatataaccatctttcaaggaataataaataattagctgatggataattgcatgatgccttacagttttcaataatatactttcttatgcaacgtcatgcaataaatttaaatccagtttttggcaactttaatggaaaatgtttcattttaatgtgtcttaactagtgaggctgtctgaccatctgaatatgggggatgttttcctgaagcaaaggaggccaygaagtactttcactgtatattaaagagtaaggtgtttccttcagactaccaaattgcatctcctttaggatctyacattaatagaagggaactctaatctgatgcccttataactaccacctttaaaaagtacagatcacagaaagcagttgtgccaatgtagatctcgaactaatataaaaagtggtcttactctactggtaccttgacttatacccctgaaatgacacaaaattgcaattaacactagtactacactaaattatt

SEQ ID NO: 71415 - DNA, 493 bp, Chicken  19866894350042_2
agtatataaccatctttcaaggaataataaataattagctgatggataattgcatgatgccttacagttttcaataatatactttcttatgcaacgtcatgcaataaatttaaatccagtttttggcaactttaatggaaaatgtttcattttaatgtgtcttaactagtgaggctgtctgaccatctgaatatgggggatgttttcctgaagcaaaggaggccaygaagtactttcactgtatattaaagagtaaggtgtttccttcagactaccaaattgcatctcctttaggatctyacattaatagaagggaactctaatctgatgcccttataactaccacctttaaaaagtacagatcacagaaagcagttgtgccaatgtagatctcgaactaatataaaaagtggtcttactctactggtaccttgacttatacccctgaaatgacacaaaattgcaattaacactagtactacactaaattatt

SEQ ID NO: 71416 - DNA, 600 bp, Chicken  19866894350045_1
aggagtcagtcagtacctgtgagctgcttttagagctgtgagaagactcagggagactgaattgggttcgttgcttctctctgtcctaccacagagaagggcttcgtgttgccacctgccgggggggtatgctcaaggggatggggtttaggatggggtttatattggagagtcttgagatttccttttaatttccatagaaaaaccagtgccccccctatccgctgtctgcatcttgcctttctttagtagatgctggcaggattcgtggttgctataataaagaaacatttgtgccawcaaacaagaactgttctggacaggtgggatttgagctggattctggttttcctgtgttgtggactcattctacttttatttcactgcttccctcccactttcttcctccctctctgtccgtctccctcaaatttccttcctttgctgcacgcagagcccctgagcgtggagagcacagcctgcagcctgggcagcatgagtgaatcaggacagggctacgagtgcagtactccttcagagacgaattgttcctttgaccctgcagaggaggcctcctcaggcaccatctctgcctcctgc

SEQ ID NO: 71417 - DNA, 600 bp, Chicken  19866894350051_1
aacaccaaatgctggcttctcgtgtcactgtgtgccttggtgttccacccaacccattcagccattgctttgcctatgcagtgcaacgtctctttactgacaacccaaaacacggcgtgcagcagccacctctgactcaaattctacatttgtatggcattttcctccgatttggcacaataataatttccactgctttcaatcccaacagaggaaaaaagtatactgcttttcacaaagaaacatcacacctgcacacagtatctgcaggaatattccaagagggccatttactgcacrgagaattacagttaccatgaagaccttatgcagggagctgatttatttaaccctttcattacagccttctttcacaatgaccaagtacaaagtgcagaaaggcagggatacaaagtttgaggtaacacttacttgttgatttctgagtacgttctaaaggcttttggtgctttttgggggtagagttgattgtcacagcatttttatttcaccaaaaacctgcatcactttctgacgtagctcctgcaccacaatccctcacgtaggaaagactgatttcaaatcaaaccacagcatctg

SEQ ID NO: 71418 - DNA, 600 bp, Chicken  19866894350055_1
gtctctaaagcaggcaaatgctttgctgtgaagaggtacacagtacatacaactatcaataaactgaagaagacagacttgtaaggcaagaaattttacaggtgagtgtgcagtttttaatcagtttaatgaggcagtgcctcttccagaagattcactgatttctatggatgaaaaagtagtccctaaattcaaaaatctcttttattgcctggttatgtctggactgctgtccagtttgcccctggaatttgcatcaggagaattagaagggaatataggaacagtaatacccttccraaacctgtctgcatcacagtaacacacagcactatgctagttctacaacatttggaatttctacccaaaattgcaacatgatctgaagaatctgtaataacgaratggaaaatcatcagccaatgcaaacagtagctatgaaaaaaatgtaagaatgcactgtacgttctgtaaaaccaataagtatccaaaatgtgatttcattcttatgaaaaagaaaggatgggaaatgtatccaatctaatatcatttgcaattaggatggctgtctcttcctgttcttcttttcttttttaaaaa

SEQ ID NO: 71419 - DNA, 600 bp, Chicken  19866894350055_2
agtgtgcagtttttaatcagtttaatgaggcagtgcctcttccagaagattcactgatttctatggatgaaaaagtagtccctaaattcaaaaatctcttttattgcctggttatgtctggactgctgtccagtttgcccctggaatttgcatcaggagaattagaagggaatataggaacagtaatacccttccraaacctgtctgcatcacagtaacacacagcactatgctagttctacaacatttggaatttctacccaaaattgcaacatgatctgaagaatctgtaataacgaratggaaaatcatcagccaatgcaaacagtagctatgaaaaaaatgtaagaatgcactgtacgttctgtaaaaccaataagtatccaaaatgtgatttcattcttatgaaaaagaaaggatgggaaatgtatccaatctaatatcatttgcaattaggatggctgtctcttcctgttcttcttttcttttttaaaaattctaattctgaaacacatttttaattttttatatatgtgtgtatcttgatttgtcttttgagaagctgccaaggttagaatttctctcctgttaatcctggta

SEQ ID NO: 71420 - DNA, 514 bp, Chicken  19866894350055_3
ttatatatgtgtgtatcttgatttgtcttttgagaagctgccaaggttagaatttctctcctgttaatcctggtagatctagcagctgttactagaaaggagaacctttggttccaggcgacttgagacatgatttcttacacttcttaatgtgagccactaggatcaatgtgacaaaaagaaaagattccctcagtatattttcgaagcatgattcctgtacagaagtcagtggagcacatgtaaaattggaaaaaatcaatgctttctgtctggctggataatgtggggtgtcatccygtttcctacttctgatgtgattgtatcaatttcttaagcagtctttaaaactagcacactgactaaaaactgatcgtttttcttttgaatacacttcatcttcagctatttcttatggtttatttttttatccaactcttctgtttgagtttcaaaatctaaaaaaacagtgataattatgaaatgattcttcatataaagggatgtgatagca

SEQ ID NO: 71421 - DNA, 543 bp, Chicken  19866894350060_1
aatagcttgcatatctttttattttaacttttgttccttgctcattcataagataaaatgactcagttttgcagctgttacagagatttgaagcccctataattctagttgaagacagtagttagcacatgcttaatgctgactcagaactcaccaacacaaacctttatgatattcaaattggaggggaagtaaaaagccaataatcaactctttgtgaatgtttgcagtgttatgctggagccaaaggaaagttcaagctatggcatcagcagtaaaatagtcatattaatgcccttycctccatcaaagtcctggggctaggatacttttcctctgaagtacagttgtgtagttttgggggaacactgggttaacacacttaccttgcttcaattgccttgcttcaccttgttcacaagatctggcagtttctgtgcatgacactacaatacagactcctgtctttaacccttatcattatgtcagttggtcacctctctttatgggcaagggggatgtggtggatgtgatacaccttga

SEQ ID NO: 71422 - DNA, 554 bp, Chicken  19866894350066_1
gccaaaacaggcttgcagagaggagattaaagggatgcaggaagctgaacaaatgaaatacaaaacaaacgtagaaaaccgtgcagagttgactctgaacatttctcaagtgtcagtctctgtttaaaaggctggtgaaggaaattgttctggcttctacagttaagaaaaccatagtgtggaaaaccatatgtactataaaataccaagtcccatctatgcaagcgtataatagtaaaaatccagggctacatgcacttgaaatatgaagaacgttgacgtatgtatccaattaaattygtaatgttaccggggaaaaaacaactcctaaccatgcaactggcccagtttcctcgtggtttaggctgggtaatttcttttcttgtactttttatccttgcaaattctcatactaggctttcattcagctccttctttcacacgcgcttcttccactggagcatccagcactaactgtgacaagggagctcagaaagaggaaagctgtcagtgcaagcaggtggcagcggggtggggatgatggtgaggagcca

SEQ ID NO: 71423 - DNA, 600 bp, Chicken  19866894350071_1
agatctatacttctagaattaagttatctgaagatatcgtcatttgatctgtcctgacaacaaacggaataataaaataagcattttgataaggtagataagggacatagagagtaaaaaagtcctacatttctttatatgctgtgaatcatgcatttgttcaacttaggcctctatgaattttctcatagaatgctgtggagattctgtcagtggcgaggtacctctttccttctgtaacatgctgccctttattttggataacaaagaaaatcatcagcattctgacaggctgaaatrttatttgtcacaacatccaactgcgcrtagtgcatccctggaggcactccagcaaattcgcttacagtgactagtcatgctaatgtaagggcttctcctatacctctccttaagaggccccatagagcagtctcagtttgaccaagatcattgactcttcaaatacaatgtcttccacaagacttccaaaacatctggcgacttaaaaagtacgagcttttatccatcaagctgttgcaagtgcaggttgttagtcattttggaaatctgcttatggtctgattcttgtcttttcttaca

SEQ ID NO: 71424 - DNA, 600 bp, Chicken  19866894350071_2
ctgaagatatcgtcatttgatctgtcctgacaacaaacggaataataaaataagcattttgataaggtagataagggacatagagagtaaaaaagtcctacatttctttatatgctgtgaatcatgcatttgttcaacttaggcctctatgaattttctcatagaatgctgtggagattctgtcagtggcgaggtacctctttccttctgtaacatgctgccctttattttggataacaaagaaaatcatcagcattctgacaggctgaaatrttatttgtcacaacatccaactgcgcrtagtgcatccctggaggcactccagcaaattcgcttacagtgactagtcatgctaatgtaagggcttctcctatacctctccttaagaggccccatagagcagtctcagtttgaccaagatcattgactcttcaaatacaatgtcttccacaagacttccaaaacatctggcgacttaaaaagtacgagcttttatccatcaagctgttgcaagtgcaggttgttagtcattttggaaatctgcttatggtctgattcttgtcttttcttacataatgagtagtactgtttaacattaac

SEQ ID NO: 71425 - DNA, 600 bp, Chicken  19866894350072_1
tccctttaggttcagagttgggctctgctcacagagaccccctttccagccccttgctaccaaaaatttggacataacaccattcaatacaattgtttgagttctaccaaatagataatagcagaacaaggggaaatggtttcaagttgaaggagggaagatttaggttggatgtcagggggaagttcttaaccaagggagtggtgaggtgctggaacaggctgcccagagaggttgtggatgcccggtccctggaggtttgaggccaggttggatggggccttgggcagcctggtctastattaaatatggaggttggtggctctgcctgtagtgggggcactggagcttcatggtcccttccaatctgggccattctgtgattatgtgattatgaagtgtagcatgaacctgtttatcttacagttggacaatttgtccagaagtatgctatgcaggacagaattaaaagccttattaaaatctagaaggaccacacccactgccttccctttatcactgaattagactcgatgtttattgtgcaccccttccaactcagggtgctctacgattcatccatcaaaaaaatgaaagaag

SEQ ID NO: 71426 - DNA, 600 bp, Chicken  19866894350072_2
cacttggtaaaaaaaacaaacatagaattatgagatttctatcttcatgacactgatgaatcataaagatggtcagatccaaagtataggtctgtattacatgaactagcagaggatgtcacaggaaccaaagcagatattaacgcaaaggtgggaagattaaagagagaaaattggctttgaataatctttccaatttttcacaacttactcctgagagctgaagagtgggattcagtgaattctacattctctctacttttctctctcctttcttctagtttattcccccctgtcctrttactatctacctgtataaaaaattcatttccctcatgttaataaactcgctttaaatactggaaggccacaattaggtctccccataaccttctcttttccaggttgaataagcccagttccttcagccagtctttataggagaggtgtttcagccctctgatcctctttgtggctatcctctgtaccctctcaaaaagcttcacatccttcctgtgctggaggccccagacttggatgcaacattacagctggggcctcacaacagcagaatagaggaggacaatcacttcccttgtc

SEQ ID NO: 71427 - DNA, 600 bp, Chicken  19866894350078_1
cggctgcctgctcgccggcttcgacgaggcaaggaacctctccgctccttcctcgggcagccttcggcccaacccgagcgccgccgaagggcgacgtgccgggcaccccgaactgctgctgacgttctcacttctctctccgcaggagaaatgcctgacgaagctctccagcggcctgttcgcctttcagacctacctggaattcattcaagagactttcgatagcgaaaagcagaacgtcgagtctctgtgctacagcacaaagcacctggcggccacgatccggcagatggtgagtcrgcgcgcggggcgctgccacggcacggggacgtgcagcggtgtgcagtcggcaataggtgctgccccaggctgagcgtttcccgctgccgcttatcccatcagcagcaggtgttggctgcctgtgctgctttcccttatgactaacgttcaagttttacaagctcgcgttctgtactctccttccaactttctatttccattcctaactcccagacaacaatcaaacgcgtcagactcctttaaaaaccacgtgctcggagctgcagttcggtctcagcccccccagtgctgctgagccct

SEQ ID NO: 71428 - DNA, 599 bp, Chicken  19866894350081_1
  misc_feature (1)..(88): n is any nucleotide
nnnnnnnnnnnnnnnnnnnnnnnnnnnnnnnnnnnnnnnnnnnnnnnnnnnnnnnnnnnnnnnnnnnnnnnnnnnnnnnnnnnnnnnncgtgtaggtgtaaaaaaagctgcttccaatacaaaataagaaattctcaggcaaagacaccttctttaaataaacctgaagggggaaagccagcagggatctgttagcaggaaagtttgaagcagtaaagctctcactggagggctgtatccttccttggtattcacacaaagctctgaaccctgaggctgagttaagggttcatctctagraagatatccaaacctgatggtaaagactgagatgataacaaactcactgaatcctgcaaaataacagttcaagatacattatgcagctttaaaacgctgtttaattgtgacatcttataaataagatgctggaaacacaagagatcaaattctggtcccaatgtatggctgcagctccggtccatccccacatgcacccagcacaggttttgttgtgttctacctttgtaccaagatgtgactcactgacaggaggtgtaagccaggagagcccgagtgatccccaaataaacccccta

SEQ ID NO: 71429 - DNA, 600 bp, Chicken  19866894350086_1
tttcctctcttcaggtctaacagggatttgaatatttgtttccctcaagtaaaggttgtgaaatcccttgaaacacaaaactatgatgaaaaggtctctagtgtgcaaaagaaatttcatttacttgtgcagtgctttgagatttgattcttcacttaagactagtcaatttccttgggatgatgaaagattgtataaaccccaaaggagcacagaaaggtttaactcccacttctgaattcctttaattaagaaaatgttatctgcagatttgtcaggagtgggggtgtcagttcttgkcttgaggaacagtgaaaacatagtgaaagctttcaagatgcgttcaagaactatattgaaagaaacagtttttgacccctttaacaacaaatcactcagaaaaacctgcacattaagtttcatccaacagtgagctgtgcagccttttaaagattcttctgactacccaagaaccctccacatgatgtcacatacatgtgttctcttctgaaggtgagraagttttgcctcattcctttggtaaggcctgctctgcatctgagttcatcacaagggcattttcctttctcctccttttta

SEQ ID NO: 71430 - DNA, 600 bp, Chicken  19866894350086_2
gtttaactcccacttctgaattcctttaattaagaaaatgttatctgcagatttgtcaggagtgggggtgtcagttcttgkcttgaggaacagtgaaaacatagtgaaagctttcaagatgcgttcaagaactatattgaaagaaacagtttttgacccctttaacaacaaatcactcagaaaaacctgcacattaagtttcatccaacagtgagctgtgcagccttttaaagattcttctgactacccaagaaccctccacatgatgtcacatacatgtgttctcttctgaaggtgagraagttttgcctcattcctttggtaaggcctgctctgcatctgagttcatcacaagggcattttcctttctcctcctttttatcttattacatttgcttatctctaatagattttgtcacttcgttcaaatgttgaagcttgagtgatggcaatcagagatacctgcatgctatcatgttagctcctacatgctagttcattttgaacaacctgtctcttccaggatttaatgtccctgtacttgaatrggatctttcttttacatatttttttctcttccaattgggctgtgtgcatggc

SEQ ID NO: 71431 - DNA, 600 bp, Chicken  19866894350086_3
caagaaccctccacatgatgtcacatacatgtgttctcttctgaaggtgagraagttttgcctcattcctttggtaaggcctgctctgcatctgagttcatcacaagggcattttcctttctcctcctttttatcttattacatttgcttatctctaatagattttgtcacttcgttcaaatgttgaagcttgagtgatggcaatcagagatacctgcatgctatcatgttagctcctacatgctagttcattttgaacaacctgtctcttccaggatttaatgtccctgtacttgaatrggatctttcttttacatatttttttctcttccaattgggctgtgtgcatggcaagtgctctggcaacaacagacaaggctattctttagtctgactaccaagcattctatctattttctgggagatgaaaacaaacttatctggagcatgtgatatttgaaagcttttgccttatcttagtggtcagctatccatcagatatactcagtgctaaagattggaatatctgcaacaatagactagaggcaatagagttgaaatctttataattgcgaccaactataacgagttaatgacagg

SEQ ID NO: 71432 - DNA, 599 bp, Chicken  19866894350087_1
  misc_feature (1)..(151): n is any nucleotide
nnnnnnnnnnnnnnnnnnnnnnnnnnnnnnnnnnnnnnnnnnnnnnnnnnnnnnnnnnnnnnnnnnnnnnnnnnnnnnnnnnnnnnnnnnnnnnnnnnnnnnnnnnnnnnnnnnnnnnnnnnnnnnnnnnnnnnnnnnnnnnnnnnnnnnngggttgtgctcagggatgagctcaaggtgctgtgatgctgttctgagtggggaattgtctgtgtggagagaatgggcctctgctcctctctgaatgctgggagagctggagaggcaaaggagccatcctccccccaccccaaggagacytgcatggygcttttcctctcagaggggtggctggaagggaggagtkgggttctgcaccaggaaggacccttccgagttcrttatattttccttttggcatcgggtaggtggagggagggggattaaaacaygwtgtctggactaagctcacaaggattttccaccccttctctcttgtggtgctttgttagaactccagacaggaaaacaggctttcaggtggagggaggaagggcctccctgctgatctctgctctcctggatgcagggccgtgatgcttggccaggacaccagcggc

SEQ ID NO: 71433 - DNA, 599 bp, Chicken  19866894350087_2
  misc_feature (1)..(143): n is any nucleotide
nnnnnnnnnnnnnnnnnnnnnnnnnnnnnnnnnnnnnnnnnnnnnnnnnnnnnnnnnnnnnnnnnnnnnnnnnnnnnnnnnnnnnnnnnnnnnnnnnnnnnnnnnnnnnnnnnnnnnnnnnnnnnnnnnnnnnnnnnnnnnnngggttgtgctcagggatgagctcaaggtgctgtgatgctgttctgagtggggaattgtctgtgtggagagaatgggcctctgctcctctctgaatgctgggagagctggagaggcaaaggagccatcctccccccaccccaaggagacytgcatggygcttttcctctcagaggggtggctggaagggaggagtkgggttctgcaccaggaaggacccttccgagttcrttatattttccttttggcatcgggtaggtggagggagggggattaaaacaygwtgtctggactaagctcacaaggattttccaccccttctctcttgtggtgctttgttagaactccagacaggaaaacaggctttcaggtggagggaggaagggcctccctgctgatctctgctctcctggatgcagggccgtgatgcttggccaggacaccagcggcatctctct

SEQ ID NO: 71434 - DNA, 599 bp, Chicken  19866894350087_3
  misc_feature (1)..(105): n is any nucleotide
nnnnnnnnnnnnnnnnnnnnnnnnnnnnnnnnnnnnnnnnnnnnnnnnnnnnnnnnnnnnnnnnnnnnnnnnnnnnnnnnnnnnnnnnnnnnnnnnnnnnnnnnngggttgtgctcagggatgagctcaaggtgctgtgatgctgttctgagtggggaattgtctgtgtggagagaatgggcctctgctcctctctgaatgctgggagagctggagaggcaaaggagccatcctccccccaccccaaggagacytgcatggygcttttcctctcagaggggtggctggaagggaggagtkgggttctgcaccaggaaggacccttccgagttcrttatattttccttttggcatcgggtaggtggagggagggggattaaaacaygwtgtctggactaagctcacaaggattttccaccccttctctcttgtggtgctttgttagaactccagacaggaaaacaggctttcaggtggagggaggaagggcctccctgctgatctctgctctcctggatgcagggccgtgatgcttggccaggacaccagcggcatctctctgggaaaagagggctcccccagccctgtcctgccagagg

SEQ ID NO: 71435 - DNA, 599 bp, Chicken  19866894350087_4
  misc_feature (1)..(71): n is any nucleotide
nnnnnnnnnnnnnnnnnnnnnnnnnnnnnnnnnnnnnnnnnnnnnnnnnnnnnnnnnnnnnnnnnnnnnnngggttgtgctcagggatgagctcaaggtgctgtgatgctgttctgagtggggaattgtctgtgtggagagaatgggcctctgctcctctctgaatgctgggagagctggagaggcaaaggagccatcctccccccaccccaaggagacytgcatggygcttttcctctcagaggggtggctggaagggaggagtkgggttctgcaccaggaaggacccttccgagttcrttatattttccttttggcatcgggtaggtggagggagggggattaaaacaygwtgtctggactaagctcacaaggattttccaccccttctctcttgtggtgctttgttagaactccagacaggaaaacaggctttcaggtggagggaggaagggcctccctgctgatctctgctctcctggatgcagggccgtgatgcttggccaggacaccagcggcatctctctgggaaaagagggctcccccagccctgtcctgccagaggagagcagaagggagagcagagctcatcccgaagc

SEQ ID NO: 71436 - DNA, 599 bp, Chicken  19866894350087_5
  misc_feature (1)..(20): n is any nucleotide
nnnnnnnnnnnnnnnnnnnngggttgtgctcagggatgagctcaaggtgctgtgatgctgttctgagtggggaattgtctgtgtggagagaatgggcctctgctcctctctgaatgctgggagagctggagaggcaaaggagccatcctccccccaccccaaggagacytgcatggygcttttcctctcagaggggtggctggaagggaggagtkgggttctgcaccaggaaggacccttccgagttcrttatattttccttttggcatcgggtaggtggagggagggggattaaaacaygwtgtctggactaagctcacaaggattttccaccccttctctcttgtggtgctttgttagaactccagacaggaaaacaggctttcaggtggagggaggaagggcctccctgctgatctctgctctcctggatgcagggccgtgatgcttggccaggacaccagcggcatctctctgggaaaagagggctcccccagccctgtcctgccagaggagagcagaagggagagcagagctcatcccgaagcagcggctggccccacacatgggcacayttgctgtccgtgaaagaaagatgt

SEQ ID NO: 71437 - DNA, 599 bp, Chicken  19866894350087_6
  misc_feature (1)..(18): n is any nucleotide
nnnnnnnnnnnnnnnnnngggttgtgctcagggatgagctcaaggtgctgtgatgctgttctgagtggggaattgtctgtgtggagagaatgggcctctgctcctctctgaatgctgggagagctggagaggcaaaggagccatcctccccccaccccaaggagacytgcatggygcttttcctctcagaggggtggctggaagggaggagtkgggttctgcaccaggaaggacccttccgagttcrttatattttccttttggcatcgggtaggtggagggagggggattaaaacaygwtgtctggactaagctcacaaggattttccaccccttctctcttgtggtgctttgttagaactccagacaggaaaacaggctttcaggtggagggaggaagggcctccctgctgatctctgctctcctggatgcagggccgtgatgcttggccaggacaccagcggcatctctctgggaaaagagggctcccccagccctgtcctgccagaggagagcagaagggagagcagagctcatcccgaagcagcggctggccccacacatgggcacayttgctgtccgtgaaagaaagatgtaa

SEQ ID NO: 71438 - DNA, 515 bp, Chicken  19866894350087_7
ggtggagggagggggattaaaacaygwtgtctggactaagctcacaaggattttccaccccttctctcttgtggtgctttgttagaactccagacaggaaaacaggctttcaggtggagggaggaagggcctccctgctgatctctgctctcctggatgcagggccgtgatgcttggccaggacaccagcggcatctctctgggaaaagagggctcccccagccctgtcctgccagaggagagcagaagggagagcagagctcatcccgaagcagcggctggccccacacatgggcacayttgctgtccgtgaaagaaagatgtaatgccacctcttgctgcacctcccaccattctgcaacacgcagtgaagctgagtgcagcagccctgcgtggggctgagctccagcagtggtggttagtgcccatctgaggactgcagcacaagctggaaatgggtgcttatttttacctgggttttgttccccacctataatgcatgcaaaagcataagg

SEQ ID NO: 71439 - DNA, 600 bp, Chicken  19866894350089_1
gtgaccctgctgtactgggcatttttccagtagtgtgggctaactttgcacccagtcttgcagttcctttcaacgtggtgttgatcccaccaccttgtgtgtttaaattattgcaaaactgcactattttgaagctgctgtagcactgcttaaagaactctgctcataaaacaactcattaatatttgtgctattcaaggtttgccagaagtgtcatggtctgtcttgcctcctccactctttgctcctttctgccatcaaaatgtctgcaagaaagtgtgggcaaaattgattcccccrtggccatttcaaactacacagttcgggctcatcctttgatccctcctcatgactttatttcattatcccttaagtataaggaggaaagttaatgacatcataaaaactagaactctataaaagatgtttctgctgatttactgccaatgtactagcagcatgtcatataactgcccattaaagatggtgagttgcactcctgcctgcagcattccttatcatcagcccttttatttatgaccagattatagggattgggtgagcactgtaaaacataaaacttatttttatcatgcctat

SEQ ID NO: 71440 - DNA, 600 bp, Chicken  19866894350090_1
cgactattagtttttttcagtgcttccttccctgggcccatctgcactctctacagagatgctgaagtagcaaatggaacagctagctatgcacttacatacccttaccagaggcagcaaacacgggagcatcatgagaaaacatgaaacaagctgagagatgcagaaattaggcactgaacacaacctcattctgtaaagacaataccataactgaaaacactttcctatgttaaatttaatggaggtaaacagtctcccactgacttcccttcttaaagagaagccttttttgccagygctttgctgaaaacaagtctgagtgcttcagtggagggccaaatgccctaaagacctaatcccgatctcacagcaaaccacataacacaygccagctctctgaaggtagtgggtaagaattgctactcctgtaagctaaatagcagtgctcccattcagcttaggtagatcgaatrtcattcrgctgaagcaaaaaaaggaaaggcaaacagaggcacacgtgaaatattcaaagatttggtgaatgagacagtaaactagaaataagcttctacagtttctccctaattagtcaaagca

SEQ ID NO: 71441 - DNA, 600 bp, Chicken  19866894350090_2
gcacttacatacccttaccagaggcagcaaacacgggagcatcatgagaaaacatgaaacaagctgagagatgcagaaattaggcactgaacacaacctcattctgtaaagacaataccataactgaaaacactttcctatgttaaatttaatggaggtaaacagtctcccactgacttcccttcttaaagagaagccttttttgccagygctttgctgaaaacaagtctgagtgcttcagtggagggccaaatgccctaaagacctaatcccgatctcacagcaaaccacataacacaygccagctctctgaaggtagtgggtaagaattgctactcctgtaagctaaatagcagtgctcccattcagcttaggtagatcgaatrtcattcrgctgaagcaaaaaaaggaaaggcaaacagaggcacacgtgaaatattcaaagatttggtgaatgagacagtaaactagaaataagcttctacagtttctccctaattagtcaaagcaagaacatgaatgataaatcagtcatgactgtgaggtcaaaattaaaagagtaaggtgaatactaggttaaatcatttagttttttttttt

SEQ ID NO: 71442 - DNA, 522 bp, Chicken  19866894350090_3
ctgaacacaacctcattctgtaaagacaataccataactgaaaacactttcctatgttaaatttaatggaggtaaacagtctcccactgacttcccttcttaaagagaagccttttttgccagygctttgctgaaaacaagtctgagtgcttcagtggagggccaaatgccctaaagacctaatcccgatctcacagcaaaccacataacacaygccagctctctgaaggtagtgggtaagaattgctactcctgtaagctaaatagcagtgctcccattcagcttaggtagatcgaatrtcattcrgctgaagcaaaaaaaggaaaggcaaacagaggcacacgtgaaatattcaaagatttggtgaatgagacagtaaactagaaataagcttctacagtttctccctaattagtcaaagcaagaacatgaatgataaatcagtcatgactgtgaggtcaaaattaaaagagtaaggtgaatactaggttaaatcatttagtttttttttttttttctag

SEQ ID NO: 71443 - DNA, 515 bp, Chicken  19866894350090_4
caacctcattctgtaaagacaataccataactgaaaacactttcctatgttaaatttaatggaggtaaacagtctcccactgacttcccttcttaaagagaagccttttttgccagygctttgctgaaaacaagtctgagtgcttcagtggagggccaaatgccctaaagacctaatcccgatctcacagcaaaccacataacacaygccagctctctgaaggtagtgggtaagaattgctactcctgtaagctaaatagcagtgctcccattcagcttaggtagatcgaatrtcattcrgctgaagcaaaaaaaggaaaggcaaacagaggcacacgtgaaatattcaaagatttggtgaatgagacagtaaactagaaataagcttctacagtttctccctaattagtcaaagcaagaacatgaatgataaatcagtcatgactgtgaggtcaaaattaaaagagtaaggtgaatactaggttaaatcatttagtttttttttttttttctag

SEQ ID NO: 71444 - DNA, 600 bp, Chicken  19866894350093_1
ctacctgctctttcattcacacatttcaagcaatttgtgaactttttatattttggggtgtttattttgtttttaaagaataggcataattatatttcttcagtaaaaaattctagactgtagcagagggggcatctagttggttgatctggtataaaatcctaaattccaggatgaagccactttgagaatatacctctatcttcctggctatatttaagcatcttcctactgatttttttgatcctttcttcctgttcaagaagctatcaccttactctgctataggcacttaaaaayttagaaaaaaaaagagtactaatttcttttttttcaaatgagagtgctataaagagtgtaagtagtcccctttttgcttctgttgggcttgcattaagmatgctatgccactttgcagaaaccatggaaatgcttacttcacgtatggataacagaatcacaggatcatagaatgattttgagttggaaaggatcctaaagcccatccaattccaattccctgccatgatctggctgccacccacccatgatcgggctgcccagtgacccatccaacttggggttggggcattcacagat

SEQ ID NO: 71445 - DNA, 597 bp, Chicken  19866894350093_2
tcagtaaaaaattctagactgtagcagagggggcatctagttggttgatctggtataaaatcctaaattccaggatgaagccactttgagaatatacctctatcttcctggctatatttaagcatcttcctactgatttttttgatcctttcttcctgttcaagaagctatcaccttactctgctataggcacttaaaaayttagaaaaaaaaagagtactaatttcttttttttcaaatgagagtgctataaagagtgtaagtagtcccctttttgcttctgttgggcttgcattaagmatgctatgccactttgcagaaaccatggaaatgcttacttcacgtatggataacagaatcacaggatcatagaatgattttgagttggaaaggatcctaaagcccatccaattccaattccctgccatgatctggctgccacccacccatgatcgggctgcccagtgacccatccaacttggggttggggcattcacagattctctgggcagctgtgccagtgcctcaccactctctgagtaaagaatttcctcctaatagctaatctaaatctcctctcttttagtttaaaaccat

SEQ ID NO: 71446 - DNA, 600 bp, Chicken  19866894350094_1
ttctgtatttcagtgaaatgcctaaagattctgaaacatgaagatgtgttttcctaaatcctctatgaatctcctcttcctgcttaggaacaatttcaaaagaaacatagaactgaatttggtgagggatgtgaaaaatcacaagaagggattctacaggtacactagtcagaagacacagatcaaggagaatataccctctctgattaatgagaactggctacaacagacatggagaagactgagatacttaacaagttctctgccttggtcttcactgagagtcaggcttcccacatmtttcatgacactgaacctccaggcaggggctggaggagcaaaaccctctcattgtaagagaagaggaagtccaagactgtctcatgagactgaatatgtacaagcctattgggctggacaacatgcatcccagagttccagtggaagtggctgatgtaatgccaagccactcttcatcctatttgaaaagtcatgtctgtcagtcttaggacaggtgctctttaacatctttatcagtgacctagacagtgggaacaagtgcaccctcagcaagtttgctgacgacacctagctaagtga

SEQ ID NO: 71447 - DNA, 600 bp, Chicken  19866894350095_1
ggtgcagcaggcggcagcgcggaggccgaaggtgaggagtgctgaagcgcggaggggacttgggtttgggggaaggagtgctgcgtgcggatataggcctgctcgccacgaagacgagcccgaatcgcgagggcggcccgcccgtccccatggcaacgggcccaccgcgatagcagcgcccccgcgcaccgacagctcagtgtgagccgggccggggtccggccggggctgcagggcggggttggggcctgccaggccgcccccggcaccgagcgcttttcccgcagggactcccggacrtgcagccgcgcctggtggccgtcagcaagacgaagcccgcggagatggtgctggacgcctacagccacgggcagcgcagcttcggggagaactacgtgagtgcggccggagccgggctgtgctgtgctgtgctgtgtgccccgggagcggctgtgccgggtgcaccgttggctgtgatgttgttcttacagcttgagctggtctggttggtcctgacaagatcttgttgtgttcttctaggttcaagagctgctagaaaaggcgtcagactccagagtaagtgtgtgctttattgtatgt

SEQ ID NO: 71448 - DNA, 599 bp, Chicken  19866894350097_1
  misc_feature (1)..(5): n is any nucleotide
nnnnnctctgtgtctgcgaaaatgggaattcctgtggacctgaggtgcacaagccctgccccggtggtttataatcctagcctgttctggctaatcttcactttattagtttgtggctcacatgaacagggattcaaatgtgcccgcaatggttgctttcccttcgagaggagggtgctactctctcttttcacccctccccatccacctgctttgcattacgtcccaatccgatttccccaagtctctggtgtctgatttaatttgcctgacgctgctcctggaatcagccctcccccrgcccctcccgtccacagccttccagctccccatggggagatcagtcctgggagaggttgaggagctgagagggagccagggtggacgacgggaccgactgggcaccacgaggggacaaggaccttctggctggtgggaagccatcctcagctgggaggcaggctgtgagagtcccaactagggaaggcaacccggcctgtgctacagatcctggtaaggatgctgctttgttgccccccatgtcactgcggtgaagctggcacttgggacgctgggtttcctggtctgatgctgtggtg

SEQ ID NO: 71449 - DNA, 600 bp, Chicken  19866894350101_1
gggggggaaaaaatgacattatgaaccaatattaaggctgtgtaattcagcctgtctaaaaggcaggagattccaaacatgattgctctagcaacttcagcagcatgtcatgccatacatattttaataacaaagagggcagtgcatccctatttacatttaacaagggaaagataaacagcaaaatataaccaggtcctagcttaagactgctttggtgtttttgtggagcctgtgagtggagacctaatccagtctctgagaatcgattagaaggctttccacttagctttgaatttytgttatctgtgcagctgagatacttcagttctagaactgagatgtgttttggagtatttagtattctctttttcagttccagagagacagctatttgcctctatctattagaggcagtttcctcactaaaactcccacccaagtcttcattaaaactcactcccacttctttgactgaacaacacttttcttatcaccaaacatatttatattgacagtattagcagataagaggtcccaacaaaactctacatgcttcaaaaaagaaaaaaaaaaggggggggggaggggaagaaaaaa

SEQ ID NO: 71450 - DNA, 600 bp, Chicken  19866894350102_1
tgttatcatgtatcttccaaagatgaaccttgaaattttaattcttctcactttttgtaccataaaatattttccttccaatgctattgccttatttaagtccttccagattgtcattatttatctggtatgaagtttcccagaagcaagcccaataaggcatgctagagctgtgtaagcagtaacatgttcatattactgcccactcttctgcttattattctatgaccatggtgtcccttctaccctcttttcttctctcccttagtccttgttataatttaaaatataatctgtttrttaaaataaaaaaaatattgaagtgagttctgatgtagcttgttttctggtgcgtacaaaaatatcttttatatcagggaaattcttatccaattggacaggagcctaaggaagagctgccgatgtttctggttatgcaatgtgactctgaattaacaaatcccagtataagccacactggtgcatgatgttcactcactgaggtgaatatgatggctatatagaatagtaggttcctctattggatctacattcctgtggggatattaacatttggaattgcattgaaaagtcattctt

SEQ ID NO: 71451 - DNA, 600 bp, Chicken  19866894350121_1
cctgtttagtcttgactcccatttgaccaactgacctcagcgttcattggacaatgttgtagactggtaggactgctgcctgcagaatgtcatttcatgcagaggtgtcagcagatggcttttacttagctcaaacatagtttaatctgttttcagtccctgggcattcaaaggtaagcctcccatccctaaaccggtgcctcaagcgtgagcaataaacatttaaaatgaagaggtaccatgctctctacatcgtttcttgaaatccttcagtggtggcaaagggttcaacattcatcratcttcatcgatcctgactataggtctcagatacacttaatttgtgttagatttgcagatgtcattttggcccagtatgtgtgccagatttacaaacagatcattggtatagctttggagtagacaagctttatgtgaggtgagggacccgggatgtgctcaggaccaatctcctgctgctctgccagccctacacagtgcaggacatggctgtaactcaccacttcctcctcttccaaagcaaaaagaagccagggaactacaaagcagctgatgtgactccaggcttaagtaaactga

SEQ ID NO: 71452 - DNA, 530 bp, Chicken  19866894350127_1
taagtataatttgtggaaaggagatgctgcacttataaaatccttcaaattaacctgcgcttctcctgctaactgccttctgcatgatgtccagcatgtagtttcctttaatataataaatcattttcctcatctgattcttgttggaagtaaaattgacagcatgttaaaggcaatggcatagctagttctctttcaaattttactgaatattttagtatcagtacgtggagaacatttcaggtagaactccattgctttcagactaatattctgccctgggttacatggggacagagrtgctgtacagtggtcagaatcaattccagaatttcaaatcttttttttttttttttaacaaagagtttaatatttttgcagatagatgggttctgaaaactctgttttgtctgcaggcctgaacctcatttttttttttagaagcttgcatgatgagagtatggttttggagcagatgaagcatgacatgttgtgctgcaccgaagctttccatccagagtatgacctgg

SEQ ID NO: 71453 - DNA, 600 bp, Chicken  19866894350138_1
agtgcgtcaccaccctctcagtaaaaaatttccctctaacatctaatgtaagtctcccttctttttgtttaaaatcattcccactatcgctatcaaactatgtaaaaatttggtccccctactgattactagctccctttagggtacaggaaggctgcaaggaggttctcttctccaggctgaacaagcccagttccctcaacctttctgtgtcagagaggtgcttcagtcctctgatcgtctttgtggccctcctcaggaccaactccaaatgcttcgtgtcctggttctgaaggcccyaggcctggacatagtattccaaatgagatctcatgagggcagagtggaaggggacagctacctgctctcagtgctggccattcctcttttgatgcagccaaggattcagttggtcttctgagatgcaagtgtacactgctggctcaagaaacacgcacattcaaaacaaatacattcattacaatcagtcttgagaaaaaaattggtgtgcctcaggcaaaaacttaggaagaaaagtaaaaaaaaagtttaaacaagaaatctagtcactgtttatctacacacaggcagacatgccta

SEQ ID NO: 71454 - DNA, 600 bp, Chicken  19866894350145_1
caccttaaaggaacctcttttgccacaaacacctcccaggggaaaacaatacccaggtttccaggcactgaaatcagcagaaagaaaccagctgcagccttgaaccatctgtctcagggtggatggttgtggtgctgggcagcaccagcactgtttggtcttacctggctagtcaaagaaacattctgcttggccttggaccttttaactttcttcctcttcacagggaggccctgcgcagcctaggaagcaaaacggatgaggtgaattgctacaaacttcccacgtgaagatgtaaaytcttacctaacagccaatagggtttttttttgctttttaactacaaaagctttgctacagaactacccaaattacacgcagtctggagcttgggaaaagcccctgttgctcttctttgacctacaaacttaaagatgggactatcaactgtttggcagaagaaaaggaacttgatttccttgtactcagcacacatcttcagaaaccagtttttcatacaacgctcatcaaaaccaccacagacttacaaatccagggaagctgtacttgatccccttctcggccaacctcttccgcaaa

SEQ ID NO: 71455 - DNA, 600 bp, Chicken  19866894350148_1
ttcaaaaatataaatcatttagtaaatatcgggtactagaagctcattcgtggtcagagaactgttgctaataggctttgttgtactaatctgaggaaattgcaggtctacagaataattttctgatcacacacttaatcatagtaaggtataggtatgcaagcttttagctaagaaatgtgttactacatttttctatgagaggtaatctcatcaaaccaagccttaactttaaagattttggcatcctaattaaactgtgttggaattttgtgtcactgcttaagtaggagttctgasgttcttggcatttactccaagtttgcttgatcaagatctaggctagaagccctttagttgtattactttgttaccatgcctgataaaacttctgaagggcacccagagattgtctagtgctttaatcagctaagttgtatccacgtgatcaaaaacaaatgcttagaaagagaacatctctctttgtaaacccaacttcaaataatcatgtttatttcattttatccccaaaatattatttgaaccaatctccaccctgccaacagttttttgttgttgttgttgttgttgttgtttttt

SEQ ID NO: 71456 - DNA, 600 bp, Chicken  19866894350152_1
gtgtaaggaaaaggctgctctgacacttagtaaactgatttggcctaaccgtaaccaaagtatcatttcgtatgtagtttttttttctgaaataccactgaaatagtaatattagactgcctttgttgtcaaaatccttggtttgaaatacaaatggaatttaaaatgttagtccagtggatttattcgaggaagtaaagcttaaaggaaattgttcagccttactctaggagtacattagtcttatagataaaaagcatgtgtacctttccaaacccatttttcggtctgaagcaaaaygtggctcagctggaatttaagagggaggctatattaggaagtatgcgtccccagyggaatagccttttaacagcttccatctttgcaaaccttaaccagtttactttgagttcagttgtataaagtaggaaattcggagttttacaaacagttaaagtgagatttagaaagcctaagaaaattattcaggatctcagaagagccagagtcaaacctttgaattctatagttcctgatcttgcgtattttgaaacatgcttttcatttttatagcctacatgttattaagtgaaaaagtat

SEQ ID NO: 71457 - DNA, 600 bp, Chicken  19866894350152_2
caaagtatcatttcgtatgtagtttttttttctgaaataccactgaaatagtaatattagactgcctttgttgtcaaaatccttggtttgaaatacaaatggaatttaaaatgttagtccagtggatttattcgaggaagtaaagcttaaaggaaattgttcagccttactctaggagtacattagtcttatagataaaaagcatgtgtacctttccaaacccatttttcggtctgaagcaaaaygtggctcagctggaatttaagagggaggctatattaggaagtatgcgtccccagyggaatagccttttaacagcttccatctttgcaaaccttaaccagtttactttgagttcagttgtataaagtaggaaattcggagttttacaaacagttaaagtgagatttagaaagcctaagaaaattattcaggatctcagaagagccagagtcaaacctttgaattctatagttcctgatcttgcgtattttgaaacatgcttttcatttttatagcctacatgttattaagtgaaaaagtattcagtagtaataccaggtctgtgcaagcatctytacttgtgtaacagctgtaaac

SEQ ID NO: 71458 - DNA, 391 bp, Chicken  19866894350152_3
ttaggaagtatgcgtccccagyggaatagccttttaacagcttccatctttgcaaaccttaaccagtttactttgagttcagttgtataaagtaggaaattcggagttttacaaacagttaaagtgagatttagaaagcctaagaaaattattcaggatctcagaagagccagagtcaaacctttgaattctatagttcctgatcttgcgtattttgaaacatgcttttcatttttatagcctacatgttattaagtgaaaaagtattcagtagtaataccaggtctgtgcaagcatctytacttgtgtaacagctgtaaacagtaggctgtttctgtgtgatgggaatggaaatcccatgataaatgaagttgtaaataggctgaaatct

SEQ ID NO: 71459 - DNA, 600 bp, Chicken  19866894350158_1
ggggtgagctcctcccacgttctccacagctcaggtgtgatggacgtggcctggcaacactgtgaggtgctggtgtgcttgtggggtcacataggatgtgacacccagcttttacatcccaagtgaatataatgcctctgctttgctcactgcacgcaaaggatggtttggagttcctcctgcactggactctgcttggcaatctgttagggactggtgaacatgacatctcatatataagtggttgttcacagtgagaatatgcactaacatcatgaagcccctttggctttggagcaygacatttatgctgcataaggaaagcaggaattctgtgttatttgttcaactctacagagttctgtgtttcttaaagctactatttcacattgctgataggcctccataaaagattggatgcaattattacagtggggcaatttttggtggagctctttgttttcccgtaggccaggaaggatctgcactaactatttaacctgcgtttaatcgtagaatcatttacgttggaaaagacttctaaggtcatctagtccagctgtcagcccatcactatacccactaaccacatcccttagc

SEQ ID NO: 71460 - DNA, 600 bp, Chicken  19866894350159_1
ccacacagccctgggccacgggcatggcatcagattgaaactgcccagtctgtgggcacagctgggacagtgctgcctacaagaccccattaccaccagttttgctacagctgtatgctatgaagggaccttaaagctcaccagttccaaccctctgccatggtcagggttgccagatcccccaccagataaggctacccagagccctacccaacctgatcttgagtgcttccagggacggggcacccccagcttctctgcacacctgtgccagggcctcattgtcttctgagtgaagaytgtcttccttatatctaatctttctaatttgaaagatctcagttgtcatatgatgcctcaaatgtgaaactgaccagaggttcagcaggtctttatgtcaccaggtaggcacaggctcattatactttctctccaaaacaaaataagatatgcttatttgcaaagtagaagttataattgaactatggatatgcatagttataccaaatacagtcacaatgtttttctgtagcaacagaatggacatagctggatcctgccttgttgtaagacatagcaatgaggttattgctactcaaa

SEQ ID NO: 71461 - DNA, 600 bp, Chicken  19866894350171_1
ttgtccaaatctataaatatctgatgtggggtggggttaagaaggtagagccagactcttcccagcagtgctcaatgtaagcacaagaggctatcagcacaaacagaaatacaggaaattcactttaaatttaacaagaaaaaacattactctgagggttgttgaatattgaagtatgtgcagtctctgttcttggacattataaaacctggttagacaaaaatctgactaatttatctatctgaccttgctttgagcaagcaggctggtctggagcaagcaaactgaattatttctgtwggtgcatctatgtgtatatgtggtgaatatgctctcattgtggtggactctgggttttttttattaatgaggtattggtttctgagggtgatgcccagcttcttaggaggaagtgagagatgcctttttttttttttccctaattatgtgttttttaagagcatgtgctgatctgtctgtaggccaaaaatcatgctcaaacaagtatagactagagtaacttacagctggaaaggttatcacacaatactttgttaaatattaataagatttcttgacattttctcccatatctttctc

SEQ ID NO: 71462 - DNA, 600 bp, Chicken  19866894350171_2
ctctgcaaatctgtggatcagactaagacagggagagttattgacatagaaactgttggaagttttattcagagcaacattgtgcatctttaagatttagccaaaatcaaaaatttcagcaagaagggcagattattgcctccagggtgaaatgaccttgcacactagtaaaggctgagtcccgaggactgctgaaaaaggctgaaggctatggtggatgaaggttgaatatgaaccaacagtgtgctcatttcaagccaggtacacacagtgttattagtctacagcataagagaggtrgataggaaagacttcatccctcactagtcaacatttagaatattttgtctggttttatgtccttcaatctccaactgaagagagatgtggagaaatttcataggatccagtggtaggtttcaaaggcaattaggaccctattgtgctgtatatactgtatattgtgaagatagcttgagggagatggatttatctaatctggaaaagtagagatagttacttagatctgtyagttgcttaaaatttgaaggaaaaaaataacctaaataattttcagtagcaccagatgacattgcaaat

SEQ ID NO: 71463 - DNA, 600 bp, Chicken  19866894350171_3
tgaaccaacagtgtgctcatttcaagccaggtacacacagtgttattagtctacagcataagagaggtrgataggaaagacttcatccctcactagtcaacatttagaatattttgtctggttttatgtccttcaatctccaactgaagagagatgtggagaaatttcataggatccagtggtaggtttcaaaggcaattaggaccctattgtgctgtatatactgtatattgtgaagatagcttgagggagatggatttatctaatctggaaaagtagagatagttacttagatctgtyagttgcttaaaatttgaaggaaaaaaataacctaaataattttcagtagcaccagatgacattgcaaatgtcaaacactacagatcgtaaactgaaatgttcaagttaaacattaggaaaagtttttccctgatgtactctagagttttgcagcactgggaagaagcagaaatttctatcctttgacattttcagcacccaccaatacaaatcctactctagtgttgacaatagtctggatctgaggaggaagttggactagattacttttagagctctcttccaactatctgtatttct

SEQ ID NO: 71464 - DNA, 600 bp, Chicken  19866894350181_1
agagggaaaatgatatgattagatggggagagatttgcaatagatgctaactgtaggaatttaaatttttcaaaaacgtcaatacatgtatgattatttatcctttcctatttgggttgtcctttatttcatgatatatacttgatggtaaattacagtaatctgttgtctcagcattttgaaagcaataggcatttttcacctcttcaaaaattgttcactacatcagtttcttgcaaaagaaggtaaaataagcttgctgtgcatttaccctatatgaagctgccattacagcacacrggatttactgaactatcagaggaacagtatcattgactgacttcaatcattcagccgtgcataggtacaaacttgaataatgatcataacccaagttcaagacttcgaatatgrcatgcggaatgttacataaagcatttggctcaaaaatatttttatgatgtgtgggttaagtcctgagattgactgtttcattcggtttggcaagcatatttggaaaatactgatgttcattttctggataataaacagcaactgcagggtttgcaggaagctggtacgctgaattgtgtttgaaat

SEQ ID NO: 71465 - DNA, 600 bp, Chicken  19866894350181_2
ggttgtcctttatttcatgatatatacttgatggtaaattacagtaatctgttgtctcagcattttgaaagcaataggcatttttcacctcttcaaaaattgttcactacatcagtttcttgcaaaagaaggtaaaataagcttgctgtgcatttaccctatatgaagctgccattacagcacacrggatttactgaactatcagaggaacagtatcattgactgacttcaatcattcagccgtgcataggtacaaacttgaataatgatcataacccaagttcaagacttcgaatatgrcatgcggaatgttacataaagcatttggctcaaaaatatttttatgatgtgtgggttaagtcctgagattgactgtttcattcggtttggcaagcatatttggaaaatactgatgttcattttctggataataaacagcaactgcagggtttgcaggaagctggtacgctgaattgtgtttgaaattccatctgcttggtttgcagaatgccgtgttatgaaatcatcttactcccgatcatctggcatgaggtattctgggtccaaaagtccaggaccttcacgtcgaagcaaatcacc

SEQ ID NO: 71466 - DNA, 600 bp, Chicken  19866894350183_1
cttcaagtgaaaatatttggggaagtttcagtgaaaaacatcacactgtttctaagaggaagattacagagaaacagattgatttcccagtattaaaatgtatttctttaaagagctgcagtacctccatgtgttataacaccaactggcttgttgttttatcaatgagaatttacttatttggataagttataaaaccttgaaaactgttatttgcatatgttcaatacagtttcaacagaatttccatctacattatctgatatttcccaacaagcttaccttgtcccagtcccaacragcttactgtattacagatgtgtacccaacccaagcaatgaatgctcagtaataacacttgattctctcttggccttacaggaaggcatggagacgttcctcttcagaaattttcttaatatgaagaatttaatttcacctaccttcaaacatgtatgtgtagctaaaacatatagttgtctagtcttctcccatagtgacagataggtagatcagaggacttagatacataagttagaaaaaagatgttccttagtatctttgttttcttgcattatctacaggagaagatagataact

SEQ ID NO: 71467 - DNA, 600 bp, Chicken  19866894350191_1
aactgagagaagagaaatatctatgccaatataccaaaacaaagaaaaacatctagtgagttataattactttgctaaatatacggagcaaacagaaggaaataattactttctagcctacaaatgcactgaaagtccagaacattttaattgtgtatcagcagtgcaagcatcaattttggaaataaaagaaagtgttctgactagattgtataagaatgatgggaataacctgtgcatcctatccctccctgacaattcatgtataaatcactgctgcctgtacctgaacaacaagasatgaagttaggggttagattcctggaactggtaccatctccttgctgcttgggtccttgcagctttgyagctaggctaytacctgcaagtgaaagcctgagaacagagaagatgccctgagtgagctcaggaagtatactgcaacaaattcaagggtactcacctaccaagggtacagcctgaattccagaaagcagaggagcttggaaaaataacatcactgctcaaatatccttctgtgcctgctgagkatttatatgcttgtcagcgggatgtggctagacgagattgctgtctcct

SEQ ID NO: 71468 - DNA, 600 bp, Chicken  19866894350191_2
actttgctaaatatacggagcaaacagaaggaaataattactttctagcctacaaatgcactgaaagtccagaacattttaattgtgtatcagcagtgcaagcatcaattttggaaataaaagaaagtgttctgactagattgtataagaatgatgggaataacctgtgcatcctatccctccctgacaattcatgtataaatcactgctgcctgtacctgaacaacaagasatgaagttaggggttagattcctggaactggtaccatctccttgctgcttgggtccttgcagctttgyagctaggctaytacctgcaagtgaaagcctgagaacagagaagatgccctgagtgagctcaggaagtatactgcaacaaattcaagggtactcacctaccaagggtacagcctgaattccagaaagcagaggagcttggaaaaataacatcactgctcaaatatccttctgtgcctgctgagkatttatatgcttgtcagcgggatgtggctagacgagattgctgtctcctgaccggcatgggagaggtcaggagcacaactctgtgcacactccttatccctctccttggcatcttgg

SEQ ID NO: 71469 - DNA, 600 bp, Chicken  19866894350191_3
tatacggagcaaacagaaggaaataattactttctagcctacaaatgcactgaaagtccagaacattttaattgtgtatcagcagtgcaagcatcaattttggaaataaaagaaagtgttctgactagattgtataagaatgatgggaataacctgtgcatcctatccctccctgacaattcatgtataaatcactgctgcctgtacctgaacaacaagasatgaagttaggggttagattcctggaactggtaccatctccttgctgcttgggtccttgcagctttgyagctaggctaytacctgcaagtgaaagcctgagaacagagaagatgccctgagtgagctcaggaagtatactgcaacaaattcaagggtactcacctaccaagggtacagcctgaattccagaaagcagaggagcttggaaaaataacatcactgctcaaatatccttctgtgcctgctgagkatttatatgcttgtcagcgggatgtggctagacgagattgctgtctcctgaccggcatgggagaggtcaggagcacaactctgtgcacactccttatccctctccttggcatcttggaaccagacatt

SEQ ID NO: 71470 - DNA, 547 bp, Chicken  19866894350191_4
ctgacaattcatgtataaatcactgctgcctgtacctgaacaacaagasatgaagttaggggttagattcctggaactggtaccatctccttgctgcttgggtccttgcagctttgyagctaggctaytacctgcaagtgaaagcctgagaacagagaagatgccctgagtgagctcaggaagtatactgcaacaaattcaagggtactcacctaccaagggtacagcctgaattccagaaagcagaggagcttggaaaaataacatcactgctcaaatatccttctgtgcctgctgagkatttatatgcttgtcagcgggatgtggctagacgagattgctgtctcctgaccggcatgggagaggtcaggagcacaactctgtgcacactccttatccctctccttggcatcttggaaccagacatttctgcatccacccagtgaaaccagctgggagcagttaagcacgtttgtgcagctaactaaagtcgttactccaggcagtaatgatctccctggcaaaaacagacataactctaacctca

SEQ ID NO: 71471 - DNA, 600 bp, Chicken  19866894350193_1
ggaaaagcaaagggtcttcaagacccatcagtaagctacagaaaagtcaccacctggctctcctgtattattcttatggttttcctccagcatcacttgacagtgacctgaaaagatggttaaaaaaaaggctgggtgaaaataagcttgcttcaatataatgcttttctaattgattattccattccttacacatctctattgtgtgtttgtttagctttatccacagcagtagtaagttgtgacgtgcctgtacttttgcctgttgaggtgagagcagcatactgacattgggcattygctgtccctctaatagtgtctctgtcaccaaataattgaagtataaaaacataagcagtcaaaaacctgaattgattccacttctttactaacgtcccaacttttagctcttacagcaaataattatttaattgtaagttctagggttatctgatctgacattactgtaacattttatttctctatttgaacaagcactgcacagaaattcaccagtgaggacaatgcagctcagaaggtacacactgaaaaagagttttcagtctgccagacagamggytgaagtgtgtccagacccag

SEQ ID NO: 71472 - DNA, 600 bp, Chicken  19866894350193_2
cagcatactgacattgggcattygctgtccctctaatagtgtctctgtcaccaaataattgaagtataaaaacataagcagtcaaaaacctgaattgattccacttctttactaacgtcccaacttttagctcttacagcaaataattatttaattgtaagttctagggttatctgatctgacattactgtaacattttatttctctatttgaacaagcactgcacagaaattcaccagtgaggacaatgcagctcagaaggtacacactgaaaaagagttttcagtctgccagacagamggytgaagtgtgtccagacccagacaaagacctcctgatgctgcttgggaaatttatgttctgcagactgcctaagtgctctgccwctcctcacatacagacacgcaacctgtattcctcagggaagcggatacttgattcatgaatgaactaaatgaaagtctgaagtcttagcttccgcttctaatgcagacatttcatggatgttttcagtaatccagtttggttcagttatcctatgactttgataaaattacacagtgatgaactaattttgatttttctggcagcaaatgcata

SEQ ID NO: 71473 - DNA, 600 bp, Chicken  19866894350193_3
catactgacattgggcattygctgtccctctaatagtgtctctgtcaccaaataattgaagtataaaaacataagcagtcaaaaacctgaattgattccacttctttactaacgtcccaacttttagctcttacagcaaataattatttaattgtaagttctagggttatctgatctgacattactgtaacattttatttctctatttgaacaagcactgcacagaaattcaccagtgaggacaatgcagctcagaaggtacacactgaaaaagagttttcagtctgccagacagamggytgaagtgtgtccagacccagacaaagacctcctgatgctgcttgggaaatttatgttctgcagactgcctaagtgctctgccwctcctcacatacagacacgcaacctgtattcctcagggaagcggatacttgattcatgaatgaactaaatgaaagtctgaagtcttagcttccgcttctaatgcagacatttcatggatgttttcagtaatccagtttggttcagttatcctatgactttgataaaattacacagtgatgaactaattttgatttttctggcagcaaatgcatattt

SEQ ID NO: 71474 - DNA, 600 bp, Chicken  19866894350193_4
aacctgaattgattccacttctttactaacgtcccaacttttagctcttacagcaaataattatttaattgtaagttctagggttatctgatctgacattactgtaacattttatttctctatttgaacaagcactgcacagaaattcaccagtgaggacaatgcagctcagaaggtacacactgaaaaagagttttcagtctgccagacagamggytgaagtgtgtccagacccagacaaagacctcctgatgctgcttgggaaatttatgttctgcagactgcctaagtgctctgccwctcctcacatacagacacgcaacctgtattcctcagggaagcggatacttgattcatgaatgaactaaatgaaagtctgaagtcttagcttccgcttctaatgcagacatttcatggatgttttcagtaatccagtttggttcagttatcctatgactttgataaaattacacagtgatgaactaattttgatttttctggcagcaaatgcatattttatatacatacgttataaaagatttggacacaatattataagacccattttgttcttaatcacagattgttcctacgggctat

SEQ ID NO: 71475 - DNA, 600 bp, Chicken  19866894350193_5
ctttttggcaaaggagtagaaaactaaagctacttagttactaagacagatccctggggagagattttatcaatgctcttctggggacagaaagtagtattgaatctcttatttcatgtgccagcttgttctcacagcacagattgataggatgagtatttttactgcctgaagaaaaacctgttccaatgatagaattttcaagaatcgctgaatcactgaatatccttagttggaagggaccacaaagattactgagcccaacttgtggctccacaaaggagtacccgcagttcaaaycccatgtgtgagatcgctgtccaaacgctccttgaactgtggcagcttgtggccatgaccactgccctgtggatgctttttccagggctcagccacctcctcagtggaaaaccttttcctaacacacgacatgaagctcccctggcacagcttcatgctgttccctccctacgcacaaagtcagtgagctgctgttgtattttctaacagaaaatagtaattatgccattgctttgtaagtgatattaacactgaagacaggtcttatgtcagagaagtgataacagaaatattcttttt

SEQ ID NO: 71476 - DNA, 465 bp, Chicken  19866894350209_1
ttatcatccaagaacgccatttctgactagcagaatgctataacttcttaactattttacacttaaattcctgttgtatacatctgtccgaaatatttgcacataaacactgaagattaacaagtgaaaaaacggtgcccatgtgtacatatgctgtttgcacagatcttctaaaaatgccaagatttgggtcacctttatgcacagccacattttaaattacattttaatgtagtatgaaatcatatttcacttactgaaaaatccagcagagggcactaaagactgcgtttttcaatycttctgttccatgactgaattttacaatctctygatttattaaaaaaatattactcttacttgtgtatttgttagacaaagtgctgccttttagctgacataacctaagcaactgtaagtggcggtagcacaagcgataaatgagcttagcaaaaagcagtactg

SEQ ID NO: 71477 - DNA, 432 bp, Chicken  19866894350209_2
aatgctataacttcttaactattttacacttaaattcctgttgtatacatctgtccgaaatatttgcacataaacactgaagattaacaagtgaaaaaacggtgcccatgtgtacatatgctgtttgcacagatcttctaaaaatgccaagatttgggtcacctttatgcacagccacattttaaattacattttaatgtagtatgaaatcatatttcacttactgaaaaatccagcagagggcactaaagactgcgtttttcaatycttctgttccatgactgaattttacaatctctygatttattaaaaaaatattactcttacttgtgtatttgttagacaaagtgctgccttttagctgacataacctaagcaactgtaagtggcggtagcacaagcgataaatgagcttagcaaaaagcagtactg

SEQ ID NO: 71478 - DNA, 600 bp, Chicken  19866894350212_1
ttttgttttacatgtattactagtcctaaataggtgaggagctccccagacaacattttgcatgaagagattatttttcagatcaaaaacctttttctttactgaagaaaacctgtacagtccctctctatcaacgaagctgataaagggcaaattaagatgcccctatcaacagatctttctttttacccctcccccaaacccctggctcaaataggtattgcagtggtaaacgtgttgtttgtatttcgtattctttctgtgcatctagtggagacatagcatcctttgcttcaacargtgccagactgaacaacagcccaagttacaacctgagcctagcttgactgacagctatgttttagccgcttcctgtagtggcccacttgatcaactttgttgcgtaatgaaaacaacctaattctgcatacggaggtattgggaacatgttctcatatcacagaaaataaacctcatcattaaaaagttgtctacagtgattctgatctatgctctctgtaaacctcatttgaagcaggatttgaaagaaggatgtacgggagattgttttgctgatggtcagtcagaatgatcctttag

SEQ ID NO: 71479 - DNA, 600 bp, Chicken  19866894350212_2
ttgtttgtatttcgtattctttctgtgcatctagtggagacatagcatcctttgcttcaacargtgccagactgaacaacagcccaagttacaacctgagcctagcttgactgacagctatgttttagccgcttcctgtagtggcccacttgatcaactttgttgcgtaatgaaaacaacctaattctgcatacggaggtattgggaacatgttctcatatcacagaaaataaacctcatcattaaaaagttgtctacagtgattctgatctatgctctctgtaaacctcatttgaagcrggatttgaaagaaggatgtacgggagattgttttgctgatggtcagtcagaatgatcctttagaaaaactacagtgataaatcatgtctttraatgaatcackgaagcaccattgatgctactgactgggacytaatccaccagactgatggcagaacagtatycttcacagagagcctgagccyccaaagccctctctactttgggatttttagtatgcaatttgatttaaaacttcagaagatcataaaacaagctaggatwgattaaatgataacatttgtagaggaagatatgttt

SEQ ID NO: 71480 - DNA, 600 bp, Chicken  19866894350212_3
aacctgagcctagcttgactgacagctatgttttagccgcttcctgtagtggcccacttgatcaactttgttgcgtaatgaaaacaacctaattctgcatacggaggtattgggaacatgttctcatatcacagaaaataaacctcatcattaaaaagttgtctacagtgattctgatctatgctctctgtaaacctcatttgaagcaggatttgaaagaaggatgtacgggagattgttttgctgatggtcagtcagaatgatcctttagaaaaactacagtgataaatcatgtctttraatgaatcackgaagcaccattgatgctactgactgggacytaatccaccagactgatggcagaacagtatycttcacagagagcctgagccyccaaagccctctctactttgggatttttagtatgcaatttgatttaaaacttcagaagatcataaaacaagctaggatwgattaaatgataacatttgtagaggaagatatgtttagagtcacatttacaattgtgatgactatggcatgtagtgtcttaaagaaacaactgatagccacctggaaaatttcagttgggttaaagaa

SEQ ID NO: 71481 - DNA, 600 bp, Chicken  19866894350212_4
agcttgactgacagctatgttttagccgcttcctgtagtggcccacttgatcaactttgttgcgtaatgaaaacaacctaattctgcatacggaggtattgggaacatgttctcatatcacagaaaataaacctcatcattaaaaagttgtctacagtgattctgatctatgctctctgtaaacctcatttgaagcaggatttgaaagaaggatgtacgggagattgttttgctgatggtcagtcagaatgatcctttagaaaaactacagtgataaatcatgtctttraatgaatcackgaagcaccattgatgctactgactgggacytaatccaccagactgatggcagaacagtatycttcacagagagcctgagccyccaaagccctctctactttgggatttttagtatgcaatttgatttaaaacttcagaagatcataaaacaagctaggatwgattaaatgataacatttgtagaggaagatatgtttagagtcacatttacaattgtgatgactatggcatgtagtgtcttaaagaaacaactgatagccacctggaaaatttcagttgggttaaagaacatctgtttct

SEQ ID NO: 71482 - DNA, 597 bp, Chicken  19866894350212_5
tcctgtagtggcccacttgatcaactttgttgcgtaatgaaaacaacctaattctgcatacggaggtattgggaacatgttctcatatcacagaaaataaacctcatcattaaaaagttgtctacagtgattctgatctatgctctctgtaaacctcatttgaagcaggatttgaaagaaggatgtacgggagattgttttgctgatggtcagtcagaatgatcctttagaaaaactacagtgataaatcatgtctttraatgaatcackgaagcaccattgatgctactgactgggacytaatccaccagactgatggcagaacagtatycttcacagagagcctgagccyccaaagccctctctactttgggatttttagtatgcaatttgatttaaaacttcagaagatcataaaacaagctaggatwgattaaatgataacatttgtagaggaagatatgtttagagtcacatttacaattgtgatgactatggcatgtagtgtcttaaagaaacaactgatagccacctggaaaatttcagttgggttaaagaacatctgtttcttggggggctgtgctgatagagaagcca

SEQ ID NO: 71483 - DNA, 566 bp, Chicken  19866894350212_6
gcgtaatgaaaacaacctaattctgcatacggaggtattgggaacatgttctcatatcacagaaaataaacctcatcattaaaaagttgtctacagtgattctgatctatgctctctgtaaacctcatttgaagcaggatttgaaagaaggatgtacgggagattgttttgctgatggtcagtcagaatgatcctttagaaaaactacagtgataaatcatgtctttraatgaatcackgaagcaccattgatgctactgactgggacytaatccaccagactgatggcagaacagtatycttcacagagagcctgagccyccaaagccctctctactttgggatttttagtatgcaatttgatttaaaacttcagaagatcataaaacaagctaggatwgattaaatgataacatttgtagaggaagatatgtttagagtcacatttacaattgtgatgactatggcatgtagtgtcttaaagaaacaactgatagccacctggaaaatttcagttgggttaaagaacatctgtttcttggggggctgtgctgatagagaagcca

SEQ ID NO: 71484 - DNA, 545 bp, Chicken  19866894350212_7
tctgcatacggaggtattgggaacatgttctcatatcacagaaaataaacctcatcattaaaaagttgtctacagtgattctgatctatgctctctgtaaacctcatttgaagcaggatttgaaagaaggatgtacgggagattgttttgctgatggtcagtcagaatgatcctttagaaaaactacagtgataaatcatgtctttraatgaatcackgaagcaccattgatgctactgactgggacytaatccaccagactgatggcagaacagtatycttcacagagagcctgagccyccaaagccctctctactttgggatttttagtatgcaatttgatttaaaacttcagaagatcataaaacaagctaggatwgattaaatgataacatttgtagaggaagatatgtttagagtcacatttacaattgtgatgactatggcatgtagtgtcttaaagaaacaactgatagccacctggaaaatttcagttgggttaaagaacatctgtttcttggggggctgtgctgatagagaagcca

SEQ ID NO: 71485 - DNA, 466 bp, Chicken  19866894350212_8
tctgatctatgctctctgtaaacctcatttgaagcaggatttgaaagaaggatgtacgggagattgttttgctgatggtcagtcagaatgatcctttagaaaaactacagtgataaatcatgtctttraatgaatcackgaagcaccattgatgctactgactgggacytaatccaccagactgatggcagaacagtatycttcacagagagcctgagccyccaaagccctctctactttgggatttttagtatgcaatttgatttaaaacttcagaagatcataaaacaagctaggatwgattaaatgataacatttgtagaggaagatatgtttagagtcacatttacaattgtgatgactatggcatgtagtgtcttaaagaaacaactgatagccacctggaaaatttcagttgggttaaagaacatctgtttcttggggggctgtgctgatagagaagcca

SEQ ID NO: 71486 - DNA, 599 bp, Chicken  19866894350214_1
  misc_feature (1)..(97): n is any nucleotide
nnnnnnnnnnnnnnnnnnnnnnnnnnnnnnnnnnnnnnnnnnnnnnnnnnnnnnnnnnnnnnnnnnnnnnnnnnnnnnnnnnnnnnnnnnnnnnnnngaaacaacggctttcagctgctggcggttggaaggaggagcgaggcccaggctgggctcactccagcctgcccaggcctctcttgtgctgggggcccagaatgggacccggcccctccaggtgtggcctccacagtgctgagtagagcagaaggatcaccttgacctgctggtgatgctttgcctggtgcagcccaggtcacygtcagcctgtgatttgtgaagctggagctgccatgaatgagcacattgtgtctcagtggctgctggctgcctggcacaagcggggacgtccttcatgccctcaccctccacacatcccaagagggcattgggwcccctgcatgggtgggagatccaggagcctggagcttgggcccatgtatttagggagacagtgtttaagcgatggattagggcgacgtttctcatcttggtgtgtgtctgtgtcggtgtcagatgggtttcactgcagcacaaacaggagacggctgctattttaa

SEQ ID NO: 71487 - DNA, 600 bp, Chicken  19866894350214_2
ggagcgaggcccaggctgggctcactccagcctgcccaggcctctcttgtgctgggggcccagaatgggacccggcccctccaggtgtggcctccacagtgctgagtagagcagaaggatcaccttgacctgctggtgatgctttgcctggtgcagcccaggtcacygtcagcctgtgatttgtgaagctggagctgccatgaatgagcacattgtgtctcagtggctgctggctgcctggcacaagcggggacgtccttcatgccctcaccctccacacatcccaagagggcattgggwcccctgcatgggtgggagatccaggagcctggagcttgggcccatgtatttagggagacagtgtttaagcgatggattagggcgacgtttctcatcttggtgtgtgtctgtgtcggtgtcagatgggtttcactgcagcacaaacaggagacggctgctattttaatcacgagagtttctcataaaggtcgtaaaattaaaataaaccccgacaggctgacccatcattagtggtaaaaccaactgtgcactgctacagacatgtcccacagcacgggaactggacgtaggggtgggttg

SEQ ID NO: 71488 - DNA, 600 bp, Chicken  19866894350228_1
ggtgaaatgatgtcattggagcaacaacaaaacatcccatccagtaggtcacggcctgatttgttacctgcgctgtgttctctgcttaatctctagtgagcaatcgggtaattagcgaggacttcttacaggcagcttccttgaggagaggccaaggggcagaggagggatccgtgttccttcctcacccgtcctggcagcgctgtgctcgtgggctttggctgcggtgtgtgtggaggtgcaggaagctctttgtctcttcccagggaggctcaaaagatccttccaaaaagccaatcrctgtgatcagtcagatgtgcggattaaccccgatttatggtcccaaagcaattattgctgcctttctctggtgcccttttgaggttctgtgagctcaacttgaggaagggtgggtttgccaggttgttattcagctatgccagcttccaagtggaagaatggggtgatggtgcttccaagaagcttgaacgagggcaatccttggtgttgcaacatgcccttggggctgtgatgaatatgaaaggtaactgatacctaccagctttcttaaaaacacctctttagagtcatagaatcact

SEQ ID NO: 71489 - DNA, 356 bp, Chicken  19866894350228_2
tgctgcctttctctggtgcccttttgaggttctgtgagctcaacttgaggaagggtgggtttgccaggttgttattcagctatgccagcttccaagtggaagaatggggtgatggtgcttccaagaagcttgaacgagggcaatccttggtgttgcaacatgcccttggggctgtgatgaatatgaaaggtaactgatacctaccagctttcttaaaaacacctctttagagtcatagaatcactgaggttggaaaagacctctaaagatcgaacagtcaacctgtctacctaccaccastgctgcccacatctgcacagttcctgagcacttcagggacagtgactccacctgca

SEQ ID NO: 71490 - DNA, 599 bp, Chicken  19866894350233_1
  misc_feature (1)..(13): n is any nucleotide
nnnnnnnnnnnnncgttcaaaggatgtgcagggtgcaggtattcccttgtcccgcattcctctccctgctgcatgagggattctgcgttaagcacctgcgatggctgggaggctctgcggtgcggtgctgtgaggatgttctcagcagagtgcagctgtgtgctgagagctgctgaggggcagagctcagcagtgtcacccagagctcagcctctgacgctccctcagaggagctgtatgttgctttgtggctttctctgctcgctcttcccctttctgtgggccagcagcagtggctgygttgtcacatctgcaaattactgagtcaaagtgacactcgtgggcgtgctggggtcagcggtgctctgactcagagcgttccctctcccccctttgcaggtgggtgcagcggggcttcgcttgactcctgttggagtgcattcagatgggtcctcacaygaggtgatgtttcctgtcctcacttctatatcacagaaaggaaatctgtggccgcagcaggacctcagatctgcaaacctctgcctagattgagtgtgctttgccgtgctgattagattagaaatctcttgggggaggct

SEQ ID NO: 71491 - DNA, 600 bp, Chicken  19866894350233_2
gtgctgagagctgctgaggggcagagctcagcagtgtcacccagagctcagcctctgacgctccctcagaggagctgtatgttgctttgtggctttctctgctcgctcttcccctttctgtgggccagcagcagtggctgygttgtcacatctgcaaattactgagtcaaagtgacactcgtgggcgtgctggggtcagcggtgctctgactcagagcgttccctctcccccctttgcaggtgggtgcagcggggcttcgcttgactcctgttggagtgcattcagatgggtcctcacaygaggtgatgtttcctgtcctcacttctatatcacagaaaggaaatctgtggccgcagcaggacctcagatctgcaaacctctgcctagattgagtgtgctttgccgtgctgattagattagaaatctcttgggggaggctggcatcttgtctctgccttgtggaagctaaatgttgttcagaagatgtgtgcgtcgcagagggaaagcacaaagagcacgactggaattggctgcccctctatcctgctggctaggaggctcaaggcacctcctgcttggggtcggggtggtggtagttt

SEQ ID NO: 71492 - DNA, 570 bp, Chicken  19866894350240_1
gatgcaaaagaacagttgggaaatcttaccaatcagctgaaggaacaggaaatgctgaatccttagcgaacatgttttctgaaagtagtaattgggataaatactttttaaagtaccccaacatttccaagtattaacgttttattcctttgatactttgatgccatgtgcctgctgaatcttcaccaaagctttctaggaaaaggatagaaaaaaaatgcagcttccaatagagagaaataagcaagagaataacctaatcagcctgtcttcatatgtaacaagaaacataaattcttytattgctttttcacaaatcatcattttaacaacagccatcttttttccccaacgctggctgctattcagttgctgataattcmcagcattagatcatatttgcaatgccacatttcataccaaaacacctaaaaataatgctcagtaaagatcaccaacaaatgctttactgcagcttcccagaaggtaacctgtctctactcgcagcgcaagtaaccacacaggtactttctgtgcccactacatagctgtggcttaaaagatctgaag

SEQ ID NO: 71493 - DNA, 487 bp, Chicken  19866894350240_2
agtagtaattgggataaatactttttaaagtaccccaacatttccaagtattaacgttttattcctttgatactttgatgccatgtgcctgctgaatcttcaccaaagctttctaggaaaaggatagaaaaaaaatgcagcttccaatagagagaaataagcaagagaataacctaatcagcctgtcttcatatgtaacaagaaacataaattcttytattgctttttcacaaatcatcattttaacaacagccatcttttttccccaacgctggctgctattcagttgctgataattcmcagcattagatcatatttgcaatgccacatttcataccaaaacacctaaaaataatgctcagtaaagatcaccaacaaatgctttactgcagcttcccagaaggtaacctgtctctactcgcagcgcaagtaaccacacaggtactttctgtgcccactacatagctgtggcttaaaagatctgaag

SEQ ID NO: 71494 - DNA, 600 bp, Chicken  19866894350243_1
ccatgctgcaggagttgtggcttcttgttttgtgcactgctgaaacactttaaagttgcttgcaattttgctgttaatcagcatgtgacagcaatgtgtgatcacagcaagggtcaacagaaaagaacagagcacgttcttccatgtttgtttgtttttttttcttcctatttgctgaaaagaactctattcctaggaactctggtttaataaccttaaatcctgacctcaataatctagccttctaacacatgcctgccaatgtccttcaaatctaagcctaaacctaggcctaaatcycaggcaggccctttctagcaaggaaacttagcaacactgagtaaaatagttgttttaaaatataagaaacatttgaggagttactaaaacaaaacctctccagtgtttatttcccactgagatgcaaagaaagacctccaagataggagaggcctagctcaaaagtgctgcctacgtggtaggaagtttcacattaccaggttgatgttgttggcttctatatgcttcagtacaaaggaggcaaggagctgtgtgtcccattgaacggaaggattgtccggaagatccctaaaaaatgac

SEQ ID NO: 71495 - DNA, 599 bp, Chicken  19866894350245_1
  misc_feature (1)..(77): n is any nucleotide
nnnnnnnnnnnnnnnnnnnnnnnnnnnnnnnnnnnnnnnnnnnnnnnnnnnnnnnnnnnnnnnnnnnnnnnnnnnnnaaaaatcagttatgactcttagtcttccttctctccagtgttactactgataggataaaattagagataaaattctagtttattgccttttaagtgcaacctatcccagttatctcttttcaaccaggcttcatatatgaactgaataatatgcatatttttgcacatatgatattgtccagtgatttttacaagaatgttgaacacagatgcctgtttcagwctcataatacacattttgcttggttacatgttacagttatttcatactcattgctgttaaaagcagctagggtcacttacttcccatctaacatttctggctcatggaatttttcaaattgacacataggttcagtgtgggttcagcacagttttygagccttgttttttgctgatacttcttaaaattccatctccttctctctccttctccccacacattggagattagacataaataggcagtattcacattcatttcayttgtgattatgattgccttatggttcctgaacttct

SEQ ID NO: 71496 - DNA, 600 bp, Chicken  19866894350245_2
ttattgccttttaagtgcaacctatcccagttatctcttttcaaccaggcttcatatatgaactgaataatatgcatatttttgcacatatgatattgtccagtgatttttacaagaatgttgaacacagatgcctgtttcagwctcataatacacattttgcttggttacatgttacagttatttcatactcattgctgttaaaagcagctagggtcacttacttcccatctaacatttctggctcatggaatttttcaaattgacacataggttcagtgtgggttcagcacagttttygagccttgttttttgctgatacttcttaaaattccatctccttctctctccttctccccacacattggagattagacataaataggcagtattcacattcatttcayttgtgattatgattgccttatggttcctgaacttctgggaaagtatacattttccatwaacttttgccatcagtatttacctgcttgtgtatttagctttaattcttctgatgccaaaatatattttgtataattctaatcagaatccatcttgtgkttttttttttcagttgttcagaaaatgtaagtaaaa

SEQ ID NO: 71497 - DNA, 600 bp, Chicken  19866894350245_3
ttttacaagaatgttgaacacagatgcctgtttcagwctcataatacacattttgcttggttacatgttacagttatttcatactcattgctgttaaaagcagctagggtcacttacttcccatctaacatttctggctcatggaatttttcaaattgacacataggttcagtgtgggttcagcacagttttygagccttgttttttgctgatacttcttaaaattccatctccttctctctccttctccccacacattggagattagacataaataggcagtattcacattcatttcayttgtgattatgattgccttatggttcctgaacttctgggaaagtatacattttccatwaacttttgccatcagtatttacctgcttgtgtatttagctttaattcttctgatgccaaaatatattttgtataattctaatcagaatccatcttgtgkttttttttttcagttgttcagaaaatgtaagtaaaagtaaacaacagacaaaatgtattttctatagacttttaattttctattcatacagtttctattttcctcccaggtacttgccacggtgtgaaaccttcatcagatat

SEQ ID NO: 71498 - DNA, 600 bp, Chicken  19866894350245_4
ggttacatgttacagttatttcatactcattgctgttaaaagcagctagggtcacttacttcccatctaacatttctggctcatggaatttttcaaattgacacataggttcagtgtgggttcagcacagttttygagccttgttttttgctgatacttcttaaaattccatctccttctctctccttctccccacacattggagattagacataaataggcagtattcacattcatttcayttgtgattatgattgccttatggttcctgaacttctgggaaagtatacattttccatwaacttttgccatcagtatttacctgcttgtgtatttagctttaattcttctgatgccaaaatatattttgtataattctaatcagaatccatcttgtgkttttttttttcagttgttcagaaaatgtaagtaaaagtaaacaacagacaaaatgtattttctatagacttttaattttctattcatacagtttctattttcctcccaggtacttgccacggtgtgaaaccttcatcagatataaatgaatcagaatttgtttagctgaacaaaagattctaatgttgagcaactgagcat

SEQ ID NO: 71499 - DNA, 600 bp, Chicken  19866894350245_5
gacacataggttcagtgtgggttcagcacagttttygagccttgttttttgctgatacttcttaaaattccatctccttctctctccttctccccacacattggagattagacataaataggcagtattcacattcatttcayttgtgattatgattgccttatggttcctgaacttctgggaaagtatacattttccatwaacttttgccatcagtatttacctgcttgtgtatttagctttaattcttctgatgccaaaatatattttgtataattctaatcagaatccatcttgtgkttttttttttcagttgttcagaaaatgtaagtaaaagtaaacaacagacaaaatgtattttctatagacttttaattttctattcatacagtttctattttcctcccaggtacttgccacggtgtgaaaccttcatcagatataaatgaatcagaatttgtttagctgaacaaaagattctaatgttgagcaactgagcatctcaagattaaattataatattgctccagcctgcttttttctctattatggttctgagtgcttcattactttattaatttctcctgcaaagaagaaagt

SEQ ID NO: 71500 - DNA, 600 bp, Chicken  19866894350248_1
tttgaaataaagtttgtgtctactcttgccaaatccattatagaattattgagctcctccatggtatttcaaagtcgttatccataaagatggtattctataaatcagagataaaacatatgtacacagctaaaatattacagtatactaggaaacagaacactgtcagtgaaagtaatttcttcttttacataattgccaagatcaaggtgttgtgtacagtgcttctttagaaggaatggaaacaattcctaacacacttatgcaacagacatgcatgcatgctagctgtccattaaygaggtggagaagaggaataccaaactccctggaaaggttgctccaagccaccagctcttcacagttcagtgcagtcattactgcaagagaactcagctctgttacaggcacctatcctcagtgcaagcttgggtctggtggtgaatggcattggttcatcttggatgaaaacccacagcgaaaaaaaaaaaaaaaagcagaagaaaatgtttactctgcaagttgaaattcaaggtcgtaggtcttattacagcttgttttttgtttgcttgtttggtttgttcagaaaagcccaagaaa

SEQ ID NO: 71501 - DNA, 600 bp, Chicken  19866894350251_1
gccctgcatggatcttttctagccttgcttcagataaatacccctttgttcctttcttcctacctgctcagctccactgaagcagctgcagccttttttttttcttccctaagggtgaacagagcgtcaggactgagccagcccaggtaacaaaagctggagaagaggcacttgtggaaaactcgctgttaaaatatgaacaacagcaacaacaaaaaacacgccacagtaagaggtggaagaagcctggatttactgaaagcagccttgccactagataatgctttttaatattactartaagagttcttcgacttcttcaacttcttktgctgaggttgttcttggcaatcatctgcttcactgctgggacacttgcactgtgaaatctgctgttctctcatgttaaragaaagtaactttgccagcgaatctacagagaagcacctcgacctccagactgggagcagtcatttgagatttagcaagtctcatgctgatgtcaaggatatgccttttgcggtatctcttaataatacacccacatctgacctggtggtgagtaagtctctgcacagcctcactttgcatgtaggggct

SEQ ID NO: 71502 - DNA, 600 bp, Chicken  19866894350251_2
cagataaatacccctttgttcctttcttcctacctgctcagctccactgaagcagctgcagccttttttttttcttccctaagggtgaacagagcgtcaggactgagccagcccaggtaacaaaagctggagaagaggcacttgtggaaaactcgctgttaaaatatgaacaacagcaacaacaaaaaacacgccacagtaagaggtggaagaagcctggatttactgaaagcagccttgccactagataatgctttttaatattactartaagagttcttcgacttcttcaacttcttktgctgaggttgttcttggcaatcatctgcttcactgctgggacacttgcactgtgaaatctgctgttctctcatgttaaragaaagtaactttgccagcgaatctacagagaagcacctcgacctccagactgggagcagtcatttgagatttagcaagtctcatgctgatgtcaaggatatgccttttgcggtatctcttaataatacacccacatctgacctggtggtgagtaagtctctgcacagcctcactttgcatgtaggggcttagctcatctaagctgagttctccccaaac

SEQ ID NO: 71503 - DNA, 600 bp, Chicken  19866894350251_3
aagggtgaacagagcgtcaggactgagccagcccaggtaacaaaagctggagaagaggcacttgtggaaaactcgctgttaaaatatgaacaacagcaacaacaaaaaacacgccacagtaagaggtggaagaagcctggatttactgaaagcagccttgccactagataatgctttttaatattactartaagagttcttcgacttcttcaacttcttktgctgaggttgttcttggcaatcatctgcttcactgctgggacacttgcactgtgaaatctgctgttctctcatgttaaragaaagtaactttgccagcgaatctacagagaagcacctcgacctccagactgggagcagtcatttgagatttagcaagtctcatgctgatgtcaaggatatgccttttgcggtatctcttaataatacacccacatctgacctggtggtgagtaagtctctgcacagcctcactttgcatgtaggggcttagctcatctaagctgagttctccccaaactatctgcatatcctcccacaagccctgcttgccaagcagcctggagatgctctgctccaaggcttcaaaggcgaagccag

SEQ ID NO: 71504 - DNA, 600 bp, Chicken  19866894350261_1
tcaaacaggacaactaacttctgtcaacatagatgtccctccgaattttcaaccatataattatcattatttctgtgaatgatgaaacagctgctgtctttctctctgaggcagctgtacctcgggggcaggtggtcggttcctggctatatctcatgcaaactctgatagtcaggtgaaatctgacatcctaactcagttccacatcaaagccatgctgtagctataaggagtgaactccccctagtccttctgcacccaaaggcttttccaccttcacaagagcactgacaggtaagyctgatacttcaaactgcaaaagcactctagaaccaagacagaaaaaatactgctgtaaggtgtagattaatgaagaaactgcctaaaattcaaacaccaggaagatgcacttaaaaatggcccctggatgtgtaggaagctgtktctccttaactacattggattgttattttgctctcttacagacaccgcctttggggtgaaacacttgcaggacagctgcatgcaaaaacacaaagatactcatgcaggtcaccaacttgtccatccatgtcctgttacctctttgtgtttgggctg

SEQ ID NO: 71505 - DNA, 600 bp, Chicken  19866894350261_2
ggctatatctcatgcaaactctgatagtcaggtgaaatctgacatcctaactcagttccacatcaaagccatgctgtagctataaggagtgaactccccctagtccttctgcacccaaaggcttttccaccttcacaagagcactgacaggtaagyctgatacttcaaactgcaaaagcactctagaaccaagacagaaaaaatactgctgtaaggtgtagattaatgaagaaactgcctaaaattcaaacaccaggaagatgcacttaaaaatggcccctggatgtgtaggaagctgtktctccttaactacattggattgttattttgctctcttacagacaccgcctttggggtgaaacacttgcaggacagctgcatgcaaaaacacaaagatactcatgcaggtcaccaacttgtccatccatgtcctgttacctctttgtgtttgggctgctagtcctccacagcttctgtccacgtcattttttacagctgtttggagtaccatgtgtatccttgtaaaacagagcaaacaagatgcatgaattaacatagctgttggggaagaacagatcaagcagtgcttgtttttcctct

SEQ ID NO: 71506 - DNA, 492 bp, Chicken  19866894350262_1
taaggccactgcacaccacacatacgaactgccttaagccactgacctatgcaagtaaaaagttgggctatcactcatacaaaatccagtaggagggatggagacaatttaactctttctcaaaagccatcttattgcacagaaagtggcagactcaggagcagccagagacagaaatagattaaaatactcttctaccaactttcaagtctggcatgactcttctggaggttggtggccctgccccttggcagggggttgcaacttaatgatccttggggtcccttccaacccaacaaktctatgattctgattcttctgctatttattctagtattgggaactacaaacatccaggtgattacacttgtgaaaaaaatgagacaaagcaataccaagagctttgcactattaaactttccatgccttcacagtgttagtggatgattcccaacaaatgatactgtttcaatagaagcttaccatatttga

SEQ ID NO: 71507 - DNA, 599 bp, Chicken  19866894350269_1
  misc_feature (1)..(94): n is any nucleotide
nnnnnnnnnnnnnnnnnnnnnnnnnnnnnnnnnnnnnnnnnnnnnnnnnnnnnnnnnnnnnnnnnnnnnnnnnnnnnnnnnnnnnnnnnnnnnnaaattgtgctagatgcaccgcaggcgcagaatgctacgtactaaattcttcgacaggagagagaaaaaaaatccctaaaaaaactggatgcgcagtaccctctagtggcagaggcctgtcctcacactcggtttgaggaagtgcacacgatctgctcagtgagcgactcttaactggagaactcggtctaagaaaatcctggaaartgrggtacgaaccaagcagagcatcttccktctctaactcagagtttctcagtctaaattccagttttcaatgctttactccattcaatcaagtgtattttcacactttttcttttgacaaataatctccctgagaaaataatacagaaggaaaacatctctgttactaactcatgtattccaagactgataccctgaaagtaaaatgaaatctcagttaattccagctaaataatgcaaagttgaatataaaagattaataaaagatagcatactggcatagctgcccatagaagctg

SEQ ID NO: 71508 - DNA, 599 bp, Chicken  19866894350269_2
  misc_feature (1)..(91): n is any nucleotide
nnnnnnnnnnnnnnnnnnnnnnnnnnnnnnnnnnnnnnnnnnnnnnnnnnnnnnnnnnnnnnnnnnnnnnnnnnnnnnnnnnnnnnnnnnnaaattgtgctagatgcaccgcaggcgcagaatgctacgtactaaattcttcgacaggagagagaaaaaaaatccctaaaaaaactggatgcgcagtaccctctagtggcagaggcctgtcctcacactcggtttgaggaagtgcacacgatctgctcagtgagcgactcttaactggagaactcggtctaagaaaatcctggaaartgrggtacgaaccaagcagagcatcttccktctctaactcagagtttctcagtctaaattccagttttcaatgctttactccattcaatcaagtgtattttcacactttttcttttgacaaataatctccctgagaaaataatacagaaggaaaacatctctgttactaactcatgtattccaagactgataccctgaaagtaaaatgaaatctcagttaattccagctaaataatgcaaagttgaatataaaagattaataaaagatagcatactggcatagctgcccatagaagctgtgg

SEQ ID NO: 71509 - DNA, 599 bp, Chicken  19866894350269_3
  misc_feature (1)..(64): n is any nucleotide
nnnnnnnnnnnnnnnnnnnnnnnnnnnnnnnnnnnnnnnnnnnnnnnnnnnnnnnnnnnnnnnnaaattgtgctagatgcaccgcaggcgcagaatgctacgtactaaattcttcgacaggagagagaaaaaaaatccctaaaaaaactggatgcgcagtaccctctagtggcagaggcctgtcctcacactcggtttgaggaagtgcacacgatctgctcagtgagcgactcttaactggagaactcggtctaagaaaatcctggaaartgrggtacgaaccaagcagagcatcttccktctctaactcagagtttctcagtctaaattccagttttcaatgctttactccattcaatcaagtgtattttcacactttttcttttgacaaataatctccctgagaaaataatacagaaggaaaacatctctgttactaactcatgtattccaagactgataccctgaaagtaaaatgaaatctcagttaattccagctaaataatgcaaagttgaatataaaagattaataaaagatagcatactggcatagctgcccatagaagctgtggtgccccatccctggcgacactcaaggc

SEQ ID NO: 71510 - DNA, 599 bp, Chicken  19866894350274_1
  misc_feature (1)..(82): n is any nucleotide
nnnnnnnnnnnnnnnnnnnnnnnnnnnnnnnnnnnnnnnnnnnnnnnnnnnnnnnnnnnnnnnnnnnnnnnnnnnnnnnnnngcaatactcaagagactccctaggcctgtctggctccccttactgtgttctggttgctgtatccttctgcagtgacatcttttaccctcactggcagagcccctcattaaccattttctagaattagagtgtgaaggccagaaagtgaacttgctgctttcacaaagagggaagaacacccaggaggaggtatttaaattatgtcctgaggcagaatkaagttgatttatgtcagggattatttttatccttccagtcagacagaagttacgcagcgaagtttgcataggcacagagatgcagcactgctttgggccagacagaccctgacagcacctgagaatgaaggaygctgagccgcaggcagacccctgccttcctgcagcccttcccacagcacctgcagggaggggtcccggctctctgctcaggcaggtgccagacctaccttacctgcactgcrtgggtagcacggagcagacatatgctgctctactccaccacacctgtcccaaca

SEQ ID NO: 71511 - DNA, 600 bp, Chicken  19866894350274_2
ggttgctgtatccttctgcagtgacatcttttaccctcactggcagagcccctcattaaccattttctagaattagagtgtgaaggccagaaagtgaacttgctgctttcacaaagagggaagaacacccaggaggaggtatttaaattatgtcctgaggcagaatkaagttgatttatgtcagggattatttttatccttccagtcagacagaagttacgcagcgaagtttgcataggcacagagatgcagcactgctttgggccagacagaccctgacagcacctgagaatgaaggaygctgagccgcaggcagacccctgccttcctgcagcccttcccacagcacctgcagggaggggtcccggctctctgctcaggcaggtgccagacctaccttacctgcactgcrtgggtagcacggagcagacatatgctgctctactccaccacacctgtcccaacagagcaaaaagaatggaacgatatggaggcccccatactgtgtttgttgttctcataccgatggcaaacatctttgtgcactgagatcagaacgactcacctacagatatctgggattgttctccttcctattaa

SEQ ID NO: 71512 - DNA, 600 bp, Chicken  19866894350274_3
aaagagggaagaacacccaggaggaggtatttaaattatgtcctgaggcagaatkaagttgatttatgtcagggattatttttatccttccagtcagacagaagttacgcagcgaagtttgcataggcacagagatgcagcactgctttgggccagacagaccctgacagcacctgagaatgaaggaygctgagccgcaggcagacccctgccttcctgcagcccttcccacagcacctgcagggaggggtcccggctctctgctcaggcaggtgccagacctaccttacctgcactgcrtgggtagcacggagcagacatatgctgctctactccaccacacctgtcccaacagagcaaaaagaatggaacgatatggaggcccccatactgtgtttgttgttctcataccgatggcaaacatctttgtgcactgagatcagaacgactcacctacagatatctgggattgttctccttcctattaaggaaaattcaaacccaagaaggaatgtattcttccagccctgagacctcaatccaaagcccactatcatcagcagcattgattttaaagagtctttgcatcaagtcctaacc

SEQ ID NO: 71513 - DNA, 600 bp, Chicken  19866894350276_1
tgcagcagcagttatttcctctttccagacaaatcatcgggagtttcagaatacctgcacagatttgctatgagggaacaattccagaagaaagaaactttatatctactaaatgcatgtagtcatttcaggcttcataaatacaggtgttttccatctatgggttgccttctcagagcctcttgcttttgaaactagtcagctgacgagagcagaggtgataagcttaatagcagatactatgcatattaataaaaaattcctcagtgaaataggagatgagaggtaaaattatgcaarctgaaaaaaactgaaccagcaataagctgtgttgctctcctagagtatcaagtgctaggggctgaaagaaacagaaggatttttccagaggtgtcgtaggcagatgagtgatggataggaatgagcttctaaagctttttattacaaacacgtctacagaatcttcacatctggatttcttttaacctttcataaacaagtgctttgaaacagtacctctgacattctttatagaacttagaccacaaatatttgcagtgcagcgtatggaattacatccaaaggaaattacctctcctt

SEQ ID NO: 71514 - DNA, 600 bp, Chicken  19866894350279_1
taatagcactcaaatctcatgcattccacatgtgttgttcccattaaactatatactgcaacttatttagtaggtaaagtttgctttggcaattgggggtttggacccaatgatctccttgaggtcccttccaacccctgcgattctgtgaagttccaaagactaccaggttataaaaatctgagattgttaactagtctctagcaattcctactgcaaataatgaagtacaacttgtagcatattatttatatacacatgatctaatttcacacttccattaaaaaaacaaacaagcayggaagcagtcttggctttctccatgctgaagagacatggttttctcgttcccaacaacaaaaaactctttcaaaagtcaacatttctaaatctgtacaagtggagttaatagcctccatttctctctacccactctctctagaggtgggtagatctctctagagatcttcctcccttgctgttcacacctagtggtggttatccacactttaaatatttatttttccctctttcatgagggtttaagatatttgcatgagtacttctaaaagctaataacaatccccactaatgatcact

SEQ ID NO: 71515 - DNA, 572 bp, Chicken  19866894350283_1
aacttggctccactatgtggataaccttcctgtaggtattggaatgccatatggagtccttcatagactgctctgttctcttcaaataaaaacgaagaaaaataacccaccaacaacaaacacattctcgtgcagtgattgcagttcacaggtgaatgatggatgtattgtgcctacagcacagacactggtgatagattcagttaatactggtaacagacagaattcagtgtggttgcagcactgccagtatattttactgtttccaagccttcatatgacatggagataagtgatgckagttcaagccagagggatttcagaaataaacttcaatcatcatagccatagcccagctgcctggcacctgtgtgggtcttgggcaggtctgagttaatcacctccagtgctgactagggctgagctcgagctagtgacctgggttgggtgtctacatactgagcgctgtggaaagattgaaatcctggcaaatagcgctgttggaacctgcagtgggagctcagggtcaggctgtcactctgctaataaataagctctctgcaaccccagaa

SEQ ID NO: 71516 - DNA, 600 bp, Chicken  19866894350296_1
tgcttgcagcaatttggcttcgtatatttctgaagaaaactctgtttcttcttggttctgttagtggcatccaaacattttgtcatgtatttctttttcagtcttctttctataattgggatagtgcctctgttttagttggaggaaatattaagtatttgctggacccaaaagccacttacacattccccgcatagtaatagttctagtcttactaaattcagccttgcagctttttaaatacctgaaaaattggaagaatcactatttttggcatcattacagggaccataattcatmattggtatttcatgtataatcaataccaacattaacccctcgaggcttcttcatagggggaaaaggaaaaaacgtaaagctcagcttttaaattgatcttttaacctcacaaatgctcatttcctaaaatgtttggcagcatgttgttcttactcaactattctaaatcagatactctactggagacttaacttcaagcacttttttctttttcctctttgttttaaacactttcatgcactagaatactggtcagatatttcaatatattagacaaaataactcctatgttgaattaga

SEQ ID NO: 71517 - DNA, 599 bp, Chicken  19866894350309_1
  misc_feature (1)..(55): n is any nucleotide
nnnnnnnnnnnnnnnnnnnnnnnnnnnnnnnnnnnnnnnnnnnnnnnnnnnnnnnaattttactctgaagattacttatcaaagtgtgtgggttttttttttattttttttattttttatgataacacttacattgaagaaaacctgaatggcaatatcaattcaccatttctcatgaaagaagtcaccatatttcaccagaatttagtgtgggttattgcaaaataccatcatattccaagaaaagaaaattgaagcctagaagccaaaataaaggcagccaggattcagtccttcagygtaagcaccactgtcagacatggatagattttcatagttcygtgatggtgctttttctttattatgggtaatcctttagtcagatagatacaactacaaaaatgaagtaacaacaacacatataagactttcaagcttgaaaaaataaagtttagtgaagaaatacctctcagtttccttgaaaaattctcagccttcactctagtatttttctggtagacaaacttatgcaaggagaaatagctttgtttatcttgacagtaagaaggacaagaagaggaacaacaaaaaatacagag

SEQ ID NO: 71518 - DNA, 599 bp, Chicken  19866894350309_2
  misc_feature (1)..(14): n is any nucleotide
nnnnnnnnnnnnnnaattttactctgaagattacttatcaaagtgtgtgggttttttttttattttttttattttttatgataacacttacattgaagaaaacctgaatggcaatatcaattcaccatttctcatgaaagaagtcaccatatttcaccagaatttagtgtgggttattgcaaaataccatcatattccaagaaaagaaaattgaagcctagaagccaaaataaaggcagccaggattcagtccttcagygtaagcaccactgtcagacatggatagattttcatagttcygtgatggtgctttttctttattatgggtaatcctttagtcagatagatacaactacaaaaatgaagtaacaacaacacatataagactttcaagcttgaaaaaataaagtttagtgaagaaatacctctcagtttccttgaaaaattctcagccttcactctagtatttttctggtagacaaacttatgcaaggagaaatagctttgtttatcttgacagtaagaaggacaagaagaggaacaacaaaaaatacagagggcagcagatgtatttaactgtataaaaaagattaggttaa

SEQ ID NO: 71519 - DNA, 600 bp, Chicken  19866894350312_1
tgcaccgctcccccgctgaacagctcctttccaggaagtccccacccatctcttctccatggctgttaccgcaccctctcacaaccctgctgcctcacggcccaccgttgccctcacgtagctgtaggcctcagcctgctggcccccctgcaacagcgctgcctcctgtcgcttccagtcacgtttctacagattatttttaattcccatttcatccttctggtcactccccagttagtgctgcctgtggaggccgctaataaaacagacccctttggaaacacatgtgtaatccactcrattgccaggaaatgaccaatacctgctggcatcagagttccatgcccgctacctgacattttcacataaactgaacttcctcatttatgaactaaggcacagaacctaactaaggtcactccattcttycaccacaaggtccgttctgctgctggcaaaggcaatttggtcagcttgaccctcttggctgtttgcaatggatttgcctggttgtactgggaagaaaatggctgcctgctccctgtggcttttaaagcgctcttccacagacaggccccactcgtgctttttcatcagcac

SEQ ID NO: 71520 - DNA, 600 bp, Chicken  19866894350312_2
ctcagcctgctggcccccctgcaacagcgctgcctcctgtcgcttccagtcacgtttctacagattatttttaattcccatttcatccttctggtcactccccagttagtgctgcctgtggaggccgctaataaaacagacccctttggaaacacatgtgtaatccactcrattgccaggaaatgaccaatacctgctggcatcagagttccatgcccgctacctgacattttcacataaactgaacttcctcatttatgaactaaggcacagaacctaactaaggtcactccattcttycaccacaaggtccgttctgctgctggcaaaggcaatttggtcagcttgaccctcttggctgtttgcaatggatttgcctggttgtactgggaagaaaatggctgcctgctccctgtggcttttaaagcgctcttccacagacaggccccactcgtgctttttcatcagcacattcctcagttgcccttcccaagcttccaggaatggacagtaatgtttccagccttgtcagagccactcctttcagcaccctcacccatagccaggccagcatgttgactcaaacacctctaacctgct

SEQ ID NO: 71521 - DNA, 600 bp, Chicken  19866894350315_1
tacacatattgtcactttctttaatcttgtttaaacagctttcccattcactttgagattaacactttactatctagcttcagatacctaacagacaacaaatcaggactcttgataagcatgataaataacccttggttagaaagtgccaaaccattcacaagttatttccagacatcaaaggcatgcaagttctgtacaggtgctcctgctgagttttgggcatgctgaattcatctctagagagaacctgggaagaacaggtacatgctggtattgtttgttgaattcaatgtattwtgctgtcttcatacttggttatgttcttccatttgtgtttcgcctcctcagctgggggctgcttgagcttccttggactttagtagtaatcctaaacgttgctttcttgaagtgttcccattccagattgttttgaagcgtccttgggatgatcagttgatgtttagttgcatcaaaaagagatttgacggtacataaggttggcaaacagaggtcatggcctgcacatctggtcagcgagtttttactccccgggacagaattacaacctgtaagcaatccgctctgcgttgcagccgg

SEQ ID NO: 71522 - DNA, 600 bp, Chicken  19866894350319_1
tagctatatgcttgcagccaatgaaaggcattgttcacgttaaaataaaatcaagtgattatgactcagaatgcttatgttaggaaatggatcatttgcaatttaagaaaatagataatttacaaagttttaaataaaatacatgattgcattgttctaagcattgagggactgaacaaaaggcttctacttccttatcagcatcaattatggcatgagtatgaataatatgaattgtgattgaatcattactaaccatttttgcataaatttctagtttcacttctccaatataacatwttcataagagataaaattataattcttctaaaagccattaaaaagccacagagcttgatctgtgacaattattgtagagaagatacaaatggtctcccaagccattgtccccctcacaragggccttcaattcagttcccaagaagaaaaactgagatgacatttttcttctgcggtctcttaagtcctccttatgccttcaagatggtcagaagctgaggactagagctggcacacaagctggctgccagcttctgtgagggaaaagcaggatttgtttgcttttccaaggagccacag

SEQ ID NO: 71523 - DNA, 600 bp, Chicken  19866894350319_2
ttacaaagttttaaataaaatacatgattgcattgttctaagcattgagggactgaacaaaaggcttctacttccttatcagcatcaattatggcatgagtatgaataatatgaattgtgattgaatcattactaaccatttttgcataaatttctagtttcacttctccaatataacatwttcataagagataaaattataattcttctaaaagccattaaaaagccacagagcttgatctgtgacaattattgtagagaagatacaaatggtctcccaagccattgtccccctcacaragggccttcaattcagttcccaagaagaaaaactgagatgacatttttcttctgcggtctcttaagtcctccttatgccttcaagatggtcagaagctgaggactagagctggcacacaagctggctgccagcttctgtgagggaaaagcaggatttgtttgcttttccaaggagccacagcacgtgctgaaagagaacaggagtggcagaggtacatctgtgtgaaactgaaccaggctggcacagcggcccactgatgcagggactgagagaagggtaatcaatcctctgttaattac

SEQ ID NO: 71524 - DNA, 600 bp, Chicken  19866894350324_1
taggcagcagtactctgtgacttctccactagtgttcctctttgcagattttcagccagtgatccattatttttgagtatttcatgaaaggtgacaaaaaacaaacctatgtattttctccaaaaacatacctaattcagatatctgaaagtatctgaatctcccccagtgaatttgcaggaagagtcattccatagatcaatcaagcaagcagtcaatcaattaattgatttctattattgcctaagtgtaaatataaggcttagatttgcccaacaccacacactctggttaacataktagctccagatattgacaatggaggcatctacaaatgagctagatagagatgtactatggggttatactgtaaggagagagactagtaaacagagagaatagacttcaggtattgatgctgacttgaatgagtctgaaaaataacttcccttcatttccatgactaaagaagataattggtgatgccttttctctttcctttatcttgcatgcctatttaggtgatagacttttcataataaagactgtttataactgtctctgtagcacagcttcccagattgcaacagatgataataa

SEQ ID NO: 71525 - DNA, 530 bp, Chicken  19866894350324_2
atattgacaatggaggcatctacaaatgagctagatagagatgtactatggggttatactgtaaggagagagactagtaaacagagagaatagacttcaggtattgatgctgacttgaatgagtctgaaaaataacttcccttcatttccatgactaaagaagataattggtgatgccttttctctttcctttatcttgcatgcctatttaggtgatagacttttcataataaagactgtttataactgtctctgtagcacagcttcccagattgcaacagatgataataacactaaaaycaagaacaaaaaaagctgttgcttttcttctgaaaactgaaggcatgtaatttgttgtttatttgacttaatgcaagtattttttaagacaaacttgggattacatactgcttactgcaatagaattaaaatttgtcacgctcatctggctatcaagtttatgtacatattctaggttggacatcaatcctttaacttagttacaactcaacactttcttcccaaagcta

SEQ ID NO: 71526 - DNA, 600 bp, Chicken  19866894350339_1
ttatcataattgtacttaaaaaatgcagtaatatgctccccccccccccaggtctttaaaatcacagtattttaaaagttctaaggcaaatctttaaagacatcacttaagtactgcagcagatttggaattttactaccaactgggatgatgaatgagctcttacctactcaggcctgaattttcaaagaaaggtaaagcattgagtacttatggtttcacagctaattccctgaaatgttttcgaaacagtaaaatttcatactgctcgtttttatgattagtgttgtcctgacaaaygagtaacarttatgcaaaaggcttcaaggaaaagtaaaacgtacagtagggctgccggtctggacttaagacttggatgtccatgggagaatacaaagcagataatatttctctcctcttctctcctgtccgtttgttacaggcatgaatggaacgtgtctgccagtccgtccaatacaaagtgtccccagacaacgtcaatgcaaatggatgagtaagacttccttcaacaaccttttgcctaggtgaaagaaagggcaagggattagtttgcattgctttcactagacaccctttagg

SEQ ID NO: 71527 - DNA, 600 bp, Chicken  19866894350339_2
ttgtacttaaaaaatgcagtaatatgctccccccccccccaggtctttaaaatcacagtattttaaaagttctaaggcaaatctttaaagacatcacttaagtactgcagcagatttggaattttactaccaactgggatgatgaatgagctcttacctactcaggcctgaattttcaaagaaaggtaaagcattgagtacttatggtttcacagctaattccctgaaatgttttcgaaacagtaaaatttcatactgctcgtttttatgattagtgttgtcctgacaaaygagtaacarttatgcaaaaggcttcaaggaaaagtaaaacgtacagtagggctgccggtctggacttaagacttggatgtccatgggagaatacaaagcagataatatttctctcctcttctctcctgtccgtttgttacaggcatgaatggaacgtgtctgccagtccgtccaatacaaagtgtccccagacaacgtcaatgcaaatggatgagtaagacttccttcaacaaccttttgcctaggtgaaagaaagggcaagggattagtttgcattgctttcactagacaccctttaggaaaaaataa

SEQ ID NO: 71528 - DNA, 600 bp, Chicken  19866894350342_1
aggagtatgcagtcgtggtaccattatcctccttgcattgacggttaccctcagaaggccactgccagcattaaccagcgctgctgctctcctggccttgtggggatctgagatgtgggcagatgaaggagaaacccactgccttcagatatgtgactgttggggctgctcagctccggtgtgacagcagccacagaagtgccagcacctcgcagcccagcccaagggcagctggctctggaattccagccctgtcctggtctaaatctagtcatgatcttcctgatttgcttccacatmtacaaagtgggaataatcataatatctcaatatataatcataatagttaccaggcacgccgaaacagatcttcagcatttacacttcatatcatctgttaagctgcctctgcttgactaggtcatgcctctttggtgctaccacataaatgctaaaacttaccatcatctcatctttgagcagaacrgatccaattctgcgccttttttggaaaactaccctttgaaatactgttttaatcaaaaagaacagaaaaaagtctacttggccaattcttatgtcaagatccaggacagattg

SEQ ID NO: 71529 - DNA, 600 bp, Chicken  19866894350342_2
cagccacagaagtgccagcacctcgcagcccagcccaagggcagctggctctggaattccagccctgtcctggtctaaatctagtcatgatcttcctgatttgcttccacatmtacaaagtgggaataatcataatatctcaatatataatcataatagttaccaggcacgccgaaacagatcttcagcatttacacttcatatcatctgttaagctgcctctgcttgactaggtcatgcctctttggtgctaccacataaatgctaaaacttaccatcatctcatctttgagcagaacrgatccaattctgcgccttttttggaaaactaccctttgaaatactgttttaatcaaaaagaacagaaaaaagtctacttggccaattcttatgtcaagatccaggacagattgctggatagcattttacattcaggctgaaattattaccctggcccttaggtaaaatgttccagaaacttgtcttgggtcatgctagcaacaaatgatgaaaaaagcaaacattctttattttaaatatagtctgtgaactttttcaaacgcagagactaaatttagacaattgtcttggaaatacact

SEQ ID NO: 71530 - DNA, 599 bp, Chicken  19866894350343_1
  misc_feature (1)..(1): n is any nucleotide
nattaagcagcaatttgatatagataaaatttttaaacatctcatctcttaatcctaacatatattggctgtatgtgcctttctcttgtgttttgatctgtcttctatcagatcctactgtttcacccttccagcttctggagtacagagtatctaacagaaagaatcagagcactttctcttggagtctctgcaagggatgagtgcacctgtgaaggttctgacccttgttactcataccctggggggataaagagatgaatagcagctacatacttcaaagctcagttcttgaagagrtttttttattattattattttttacttttttttaaaaaacacgcttacccagagagcttccacatttctctcagcaaataaaacaaggaaaatctcacagacaatatgatttgtagtaagtaaaattctggggtttacatggtaaaccccctaaggtacatgtagttggagaggggtggaaaatagttcaagctgcataggaagggggaagaagaaacagcatctacttctatatcttttgtgcagacctcagtagatcaaaatccacacaccagtttaataaagactcaaaatcaatk

SEQ ID NO: 71531 - DNA, 600 bp, Chicken  19866894350343_2
aaacatctcatctcttaatcctaacatatattggctgtatgtgcctttctcttgtgttttgatctgtcttctatcagatcctactgtttcacccttccagcttctggagtacagagtatctaacagaaagaatcagagcactttctcttggagtctctgcaagggatgagtgcacctgtgaaggttctgacccttgttactcataccctggggggataaagagatgaatagcagctacatacttcaaagctcagttcttgaagagttttttttattattattattttttacttttttttraaaaacacgcttacccagagagcttccacatttctctcagcaaataaaacaaggaaaatctcacagacaatatgatttgtagtaagtaaaattctggggtttacatggtaaaccccctaaggtacatgtagttggagaggggtggaaaatagttcaagctgcataggaagggggaagaagaaacagcatctacttctatatcttttgtgcagacctcagtagatcaaaatccacacaccagtttaataaagactcaaaatcaatkcagaaataatgtcctaccagaactttaggatacac

SEQ ID NO: 71532 - DNA, 600 bp, Chicken  19866894350343_3
ttttttttattattattattttttacttttttttaaaaaacacgcttacccagagagcttccacatttctctcagcaaataaaacaaggaaaatctcacagacaatatgatttgtagtaagtaaaattctggggtttacatggtaaaccccctaaggtacatgtagttggagaggggtggaaaatagttcaagctgcataggaagggggaagaagaaacagcatctacttctatatcttttgtgcagacctcagtagatcaaaatccacacaccagtttaataaagactcaaaatcaatkcagaaataatgtcctaccagaactttaggatacacttgctattagaatatacttctaagtacattttaaagtgagattatttgtgtgtgtgtgtgtgtgtgtggttaataaaaatacagcgtttcccaccatcctcctggaactagtatgatatcacttgtataatatctcatataatatatattcctatttgaactatgttatgcttgttataatacttctaaaaattttaagagaaattagattacaatgaaagttaaagctcatcagcttaaagaaaaggaaacagcatcawgtaac

SEQ ID NO: 71533 - DNA, 600 bp, Chicken  19866894350343_4
caatkcagaaataatgtcctaccagaactttaggatacacttgctattagaatatacttctaagtacattttaaagtgagattatttgtgtgtgtgtgtgtgtgtgtggttaataaaaatacagcgtttcccaccatcctcctggaactagtatgatatcacttgtataatatctcatataatatatattcctatttgaactatgttatgcttgttataatacttctaaaaattttaagagaaattagattacaatgaaagttaaagctcatcagcttaaagaaaaggaaacagcatcawgtaacaaattgtgagtttgtgttttgaagacaaagaactatatggcactgttaaatctttcctctagaaaggaaaattgagaaagcatatcaaaatgacaacttctgagtgtttctgagggtatgacatgagctaaagaactgggacatgtagaggccagcctctttagaaccagaacctatgacatacttttcattcatacccatcccatgagggtgcaccagtggaacggactcaattcctactgctagacagtgcaggcatgtgaaatgagagtatcctctcactcatcttggcaat

SEQ ID NO: 71534 - DNA, 600 bp, Chicken  19866894350345_1
ggataaaagcactgtcatctgaaaatcatgccttttagagacatcttgagatgaacaccccaaaattgagtggcattcaaaatatgaggtctctcatggcaatgtgggcgaaaatgcctacagctctctgaacaagtagtgcagacaatcctccatttaaaagaaaaaataaattccctgctactggcatgagaaagtttactttcaggcttaaagaaatgatcgtgtggttttgaggatggcattccgttctgctgaagaatagcaccctgcctgcctgtctatctgtggctttgtagmtacattacaatcttggagagctctgtttacatattttacatgttttcttctgcagaacatgaaaccaaattacacagtaaaggacgttacggtttcactcctgcacgcttttccatcctctccttccaatcgtgttttaattccatccgaaataattgactgggtatttgtaactgtgcttgattgactggcaatccttcaggcaggtttgcttgctgttgcacagggaaatcatgcaaaagctggagaagctacatgccaggggggtaggcagaggatggccggggcgggggtgggatg

SEQ ID NO: 71535 - DNA, 600 bp, Chicken  19866894350348_1
ttttcttagcaataccagaaaaaatgtctacgtctttttaaactgaaaatcaactgctttatcatgctaataacacagttcatagaatcatagagacataaaatctaagaatcatagaatggcttcagctggaagggacctcaaggttcaccaagttccaacccttgtgcctcaggcagggttgccagccaccagatcaagtgctagatcagattgcccagggccatatccaacctggccttcagtacctctgggtataggccatccacagcctctccgagcagtctgtgtcagtgcctyactgcactttctgtgaaaaacttcccccttacatataatctaaatcttctctcctttaatttaaaaccattccctcctcttctatcactatctattggcgtaaaaagttgatttccctcttgtttataaactccctttgaatattggaaggctgtaatgaagtctcctcacagccttctcttctccaggctgaacaagcccagctcctccagcctgtcttcataggagaggcactccagctatctgattatcctactggtcctcctctgagctctgtccaaatactccacatcctttcca

SEQ ID NO: 71536 - DNA, 543 bp, Chicken  19866894350359_1
catggtgtcatggctgtctgtctcttctctttccctggaggagttgttgactccctcaaaagaaatattgacagactatagtcaatcaccagtgtgaagcttaacaagagcaagtgccagattaggtacctgagatgagacagccctggttatatgtacacacttggggacgagaggctgaagagcagccctgaagaaagggatctgagtttctggttgttggcaagttgaatctgagtcagcggtgtgccctggcagccaaaaggagcaaccatatcctggggtgcatgaggtccagcrctgcctccaggcgagggattgaactgctctgctctgtgttggtgcactttgtacaggtttgggtgccacaatataagaaggacgtaaaattgctagagaacatccaaatgaggtctacaatgatggtgagaggtctgaaggacaaaagatatcagaagaagatgggtcatttggtttgttcagccctgaggagactgagggaaggccacacggggcccataggttcctccaaagcagggcaga

SEQ ID NO: 71537 - DNA, 600 bp, Chicken  19866894350368_1
gatgcaataatcccttggttacaattgttctgtggggtgtcctgaacagacagttaatgaaagagatagctctcattccaacaggtttgcagcatgagtgtgaagacccagaaaaacaaagcaaagttgttgggggaaggggggtatctttttcttttcgtaggatttcaaattctacaaaatgaatgaatgttatgtatgtttaggggcagctgtcaaacttatagcactgtaacaaataatcaacaggagtatcgaagagaagttctcccaaaacaaagcatgtttgaagcaaattcraaatgaaaactatgcacacttgtgctttttaactagaaaatatagctgaaccagtagttcctaggtatgacttccttccttggctaagaatgaagaaaagaggaagaaaatgaacttgacatttactgtacacgtgttctaccaagaaacaccattaattttagaccraygcttatttatccacaggaaaaaaagagaaaagaagcagcaacttgtgctattctgaaaaaaggaaatagaggagaacgaaggcaaaaagcaaacaaccatctcttgtaatttcagtgaaaataaacaaga

SEQ ID NO: 71538 - DNA, 600 bp, Chicken  19866894350368_2
caaattctacaaaatgaatgaatgttatgtatgtttaggggcagctgtcaaacttatagcactgtaacaaataatcaacaggagtatcgaagagaagttctcccaaaacaaagcatgtttgaagcaaattcraaatgaaaactatgcacacttgtgctttttaactagaaaatatagctgaaccagtagttcctaggtatgacttccttccttggctaagaatgaagaaaagaggaagaaaatgaacttgacatttactgtacacgtgttctaccaagaaacaccattaattttagaccraygcttatttatccacaggaaaaaaagagaaaagaagcagcaacttgtgctattctgaaaaaaggaaatagaggagaacgaaggcaaaaagcaaacaaccatctcttgtaatttcagtgaaaataaacaagaaggatgaacacaagaggtggagcaacctggtgcttctttatagaaatagctaaggattaaagaacaatgactgtggctcacctgaagaacctccagcacgctgaactattcctggagcctcatagttaagtcaggtttagagacagatttttaagccctacatatcat

SEQ ID NO: 71539 - DNA, 600 bp, Chicken  19866894350368_3
aattctacaaaatgaatgaatgttatgtatgtttaggggcagctgtcaaacttatagcactgtaacaaataatcaacaggagtatcgaagagaagttctcccaaaacaaagcatgtttgaagcaaattcraaatgaaaactatgcacacttgtgctttttaactagaaaatatagctgaaccagtagttcctaggtatgacttccttccttggctaagaatgaagaaaagaggaagaaaatgaacttgacatttactgtacacgtgttctaccaagaaacaccattaattttagaccraygcttatttatccacaggaaaaaaagagaaaagaagcagcaacttgtgctattctgaaaaaaggaaatagaggagaacgaaggcaaaaagcaaacaaccatctcttgtaatttcagtgaaaataaacaagaaggatgaacacaagaggtggagcaacctggtgcttctttatagaaatagctaaggattaaagaacaatgactgtggctcacctgaagaacctccagcacgctgaactattcctggagcctcatagttaagtcaggtttagagacagatttttaagccctacatatcatta

SEQ ID NO: 71540 - DNA, 600 bp, Chicken  19866894350369_1
caagtgcttccttgaatatgacctccagagttgaatactcacacaactttatcttgggatactgcttgtgacttcatattctctaggaggaattatcttctgaagatgcttcatatggagaatgttagagttaacaaagatttgtgcttttcagaaaatattcttgcaacactcatctgtagttcttactctgctaaagaattcgttttaaattggctttatctccagttggatgtgttgaattagtatgagtttcactgctttgcagagagtgactgaagtcttaagaaaaagaagagwggtggaattgtaagtttttaagacagaaaggagagattgtttttatcatcttcaaaagttttatcttgcagccagaggtggttctgctcatttgctaaatttgaaaagcaaaacttgtttaaaatacatgatttcctccaaattgaaggcaaaggttgaaactgactaaggtagcttaattatctgtgccctrtgagggatatrgtgcttatgatcttagctctagcagactgcwgagatctggactggaaatttaaactgttaacccagtgctgagccttgaagaggtcagctccactg

SEQ ID NO: 71541 - DNA, 600 bp, Chicken  19866894350369_2
ctaaagaattcgttttaaattggctttatctccagttggatgtgttgaattagtatgagtttcactgctttgcagagagtgactgaagtcttaagaaaaagaagagwggtggaattgtaagtttttaagacagaaaggagagattgtttttatcatcttcaaaagttttatcttgcagccagaggtggttctgctcatttgctaaatttgaaaagcaaaacttgtttaaaatacatgatttcctccaaattgaaggcaaaggttgaaactgactaaggtagcttaattatctgtgccctrtgagggatatrgtgcttatgatcttagctctagcagactgcwgagatctggactggaaatttaaactgttaacccagtgctgagccttgaagaggtcagctccactggaaggcwgaatattcattagctggattgagctctacagtgctgggatggctcagctttcatctcagagctggcatctccctcccttgcatggtgaaagccatcatgcacttctcaaggaagactggaggaacatcatagccactgtagagattcagatatgttcaaagctagggtgttaatgtatataagttg

SEQ ID NO: 71542 - DNA, 600 bp, Chicken  19866894350369_3
gttttaaattggctttatctccagttggatgtgttgaattagtatgagtttcactgctttgcagagagtgactgaagtcttaagaaaaagaagagwggtggaattgtaagtttttaagacagaaaggagagattgtttttatcatcttcaaaagttttatcttgcagccagaggtggttctgctcatttgctaaatttgaaaagcaaaacttgtttaaaatacatgatttcctccaaattgaaggcaaaggttgaaactgactaaggtagcttaattatctgtgccctrtgagggatatrgtgcttatgatcttagctctagcagactgcwgagatctggactggaaatttaaactgttaacccagtgctgagccttgaagaggtcagctccactggaaggcwgaatattcattagctggattgagctctacagtgctgggatggctcagctttcatctcagagctggcatctccctcccttgcatggtgaaagccatcatgcacttctcaaggaagactggaggaacatcatagccactgtagagattcagatatgttcaaagctagggtgttaatgtatataagttgtaaatccagac

SEQ ID NO: 71543 - DNA, 600 bp, Chicken  19866894350369_4
tgttgaattagtatgagtttcactgctttgcagagagtgactgaagtcttaagaaaaagaagagwggtggaattgtaagtttttaagacagaaaggagagattgtttttatcatcttcaaaagttttatcttgcagccagaggtggttctgctcatttgctaaatttgaaaagcaaaacttgtttaaaatacatgatttcctccaaattgaaggcaaaggttgaaactgactaaggtagcttaattatctgtgccctrtgagggatatrgtgcttatgatcttagctctagcagactgcwgagatctggactggaaatttaaactgttaacccagtgctgagccttgaagaggtcagctccactggaaggcwgaatattcattagctggattgagctctacagtgctgggatggctcagctttcatctcagagctggcatctccctcccttgcatggtgaaagccatcatgcacttctcaaggaagactggaggaacatcatagccactgtagagattcagatatgttcaaagctagggtgttaatgtatataagttgtaaatccagacaagtgaatgaaaagcacaagaacccctgatg

SEQ ID NO: 71544 - DNA, 600 bp, Chicken  19866894350369_5
ttgtaagtttttaagacagaaaggagagattgtttttatcatcttcaaaagttttatcttgcagccagaggtggttctgctcatttgctaaatttgaaaagcaaaacttgtttaaaatacatgatttcctccaaattgaaggcaaaggttgaaactgactaaggtagcttaattatctgtgccctrtgagggatatrgtgcttatgatcttagctctagcagactgcwgagatctggactggaaatttaaactgttaacccagtgctgagccttgaagaggtcagctccactggaaggcwgaatattcattagctggattgagctctacagtgctgggatggctcagctttcatctcagagctggcatctccctcccttgcatggtgaaagccatcatgcacttctcaaggaagactggaggaacatcatagccactgtagagattcagatatgttcaaagctagggtgttaatgtatataagttgtaaatccagacaagtgaatgaaaagcacaagaacccctgatgtgttcttttgtttccagtaagcttaacttgaatttccttctccttttccctatgtgtgttggttgataacat

SEQ ID NO: 71545 - DNA, 487 bp, Chicken  19866894350369_6
tcaaagctagggtgttaatgtatataagttgtaaatccagacaagtgaatgaaaagcacaagaacccctgatgtgttcttttgtttccagtaagcttaacttgaatttccttctccttttccctatgtgtgttggttgataacatttcaggtcctttcagtaatcaggagatggcagagtggttccaggctggatatttcactatgtcactgttgattaagagagcttgcgatgagactttccagccacttggagacatcatgaaaatgtggggcagggttcccttcacttcaggtccarcaccacttccacatctggtaattatgagacttactatattcaaatattcctataacgaagggaaatttaattatgtacatatcaaatactctgtcttataaatttaagtactctgagcgccaaagttgaacactgtgttaaactacctttttaagatgagaaaagacagttttcagaatgacagttt

SEQ ID NO: 71546 - DNA, 439 bp, Chicken  19866894350392_1
aaagaactcttatttccatgataaataggtgctaaattattcttagctttccaaagactctttatctatttaattcagggtaaatgaacaggagacttgctagttattacagattatcttactcatagaatttcatgcaagtagcaataaggtggggataattttctagagaaaagagcaccagataatggggattatgtaagagaacgggtgctttctgtttaggtgtttgaatgtttgagtctgatgagttagtgattgaaatagaggtagggaagttgatgtgtgaagtagtgtgtsttagagcaatcaggagcatgcaatttctgagaaatgtaggggatgaatttatctatacctaaaaatggctgtctttgattttgttggatggagttccacatcttgtgaacatcaggtgatgaactgttcatttttagca

SEQ ID NO: 71547 - DNA, 599 bp, Chicken  19866894350396_1
  misc_feature (1)..(156): n is any nucleotide
nnnnnnnnnnnnnnnnnnnnnnnnnnnnnnnnnnnnnnnnnnnnnnnnnnnnnnnnnnnnnnnnnnnnnnnnnnnnnnnnnnnnnnnnnnnnnnnnnnnnnnnnnnnnnnnnnnnnnnnnnnnnnnnnnnnnnnnnnnnnnnnnnnnnnnnnnnnncattgagacagactgggtgcagacggtgaaacacgactactgttttacattcttcactagctcccgaatcctaaagtgaatggaggctaggatgcttattgtctttttacctgccgaaacaagaaagtgtatatataatgcctyctgtctggagaatgcagattgatttctacttctgtggctaggtgtgagttaacccacaacaacttcaacaattaactccatccagccaaaacaagagctctagatatttgctttaagtgagaagtgatatatctaaatggtstaggtgctgtaggacaggagtttatattcatgctgagtcatatcagaacttcttattttaatagtctctaaaacttattctgggcagcaaaacagtgttsatacataagcaggactcgggttcatgtccagtgggatgctgtgttaactgcagaagg

SEQ ID NO: 71548 - DNA, 599 bp, Chicken  19866894350396_2
  misc_feature (1)..(14): n is any nucleotide
nnnnnnnnnnnnnncattgagacagactgggtgcagacggtgaaacacgactactgttttacattcttcactagctcccgaatcctaaagtgaatggaggctaggatgcttattgtctttttacctgccgaaacaagaaagtgtatatataatgcctyctgtctggagaatgcagattgatttctacttctgtggctaggtgtgagttaacccacaacaacttcaacaattaactccatccagccaaaacaagagctctagatatttgctttaagtgagaagtgatatatctaaatggtstaggtgctgtaggacaggagtttatattcatgctgagtcatatcagaacttcttattttaatagtctctaaaacttattctgggcagcaaaacagtgttsatacataagcaggactcgggttcatgtccagtgggatgctgtgttaactgcagaaggttcccttatttgcttccaagagttccttataaaatattttgacaagaagcaaatggttaaaggactttgtgctgcttctggcttcgatctgaatgttgggacttctcagaatgctcccacatgctcygttgagcttcataca

SEQ ID NO: 71549 - DNA, 600 bp, Chicken  19866894350396_3
ctaggatgcttattgtctttttacctgccgaaacaagaaagtgtatatataatgcctyctgtctggagaatgcagattgatttctacttctgtggctaggtgtgagttaacccacaacaacttcaacaattaactccatccagccaaaacaagagctctagatatttgctttaagtgagaagtgatatatctaaatggtstaggtgctgtaggacaggagtttatattcatgctgagtcatatcagaacttcttattttaatagtctctaaaacttattctgggcagcaaaacagtgttsatacataagcaggactcgggttcatgtccagtgggatgctgtgttaactgcagaaggttcccttatttgcttccaagagttccttataaaatattttgacaagaagcaaatggttaaaggactttgtgctgcttctggcttcgatctgaatgttgggacttctcagaatgctcccacatgctcygttgagcttcatacatctaaggaattagtcttgatccagaaagtgggccacctaaacttcattctgatttttttttttggtcttcactatatttgttggggcctctacctaaaggt

SEQ ID NO: 71550 - DNA, 523 bp, Chicken  19866894350396_4
atatatctaaatggtstaggtgctgtaggacaggagtttatattcatgctgagtcatatcagaacttcttattttaatagtctctaaaacttattctgggcagcaaaacagtgttsatacataagcaggactcgggttcatgtccagtgggatgctgtgttaactgcagaaggttcccttatttgcttccaagagttccttataaaatattttgacaagaagcaaatggttaaaggactttgtgctgcttctggcttcgatctgaatgttgggacttctcagaatgctcccacatgctcygttgagcttcatacatctaaggaattagtcttgatccagaaagtgggccacctaaacttcattctgatttttttttttggtcttcactatatttgttggggcctctacctaaaggttgtctctaaatttctatttaaaccagtcgagactttatattgtacttaatcagctgtggaagatacactcattgaaagttcccttctgatgctgatcatgcttaata

SEQ ID NO: 71551 - DNA, 600 bp, Chicken  19866894350402_1
ccagtgaattattgccacagaaaagtacattacctaaagcagctgtaagatctttacagtttaatctcataaggaaggtggacttctgacattcctaaatttcatgtaattctattacgtgaaagttaaattagagttaaatttagagttaaagtctagtttggctaaacttaaactgcaaatgtataacctgaaattacaaaggaagacctcattttatgtcataatttgtctcaatcatagacaaaaaaatgcaaaggaaaatctgcttctctcttatacactgagacacatcaatakgtagaaaacttcgaaaacttctaatactgtggttccttggaacactaagatttttagacacttgccaagtcagctttagaacaaaaaagggaaagcatatctagttcttactttcatagtgaaaatctacatgcctctgcaagcatatgccgaacacatttttgatagagtacttctacctggaaaaactgtcaggaaaacctctcactgtaactaaatataaatatccaaagcttttaacttgcctctgtattccccgctccaataagctgcctaagtaggaacccagaaatcttttac

SEQ ID NO: 71552 - DNA, 600 bp, Chicken  19866894350402_2
cagagaggtattctcaaaaaataatttgcacttacgttagaaaacaggtctttgggcactttcaacatcaataagaacaatatgcatttcagtcatgttgaaaaagaaaaattacatttattcccaatttacagatgtgaaaaccctaattttcctgtgctcctgcattttcatcacttgatgcccaaatgagacagagaagcaatctgatcccttcttgtgcctacaacagtcatataactttctgacagcaactaaaataaatcctgcaactccattggtttgttcttgcttaacttraggaagaccaatccacctccatatatttcaataagyaagcatattggttcagttctgaaataaataggaaatcgactaataaatcaaatcatctttcttcttaatcgcaccttgatgaaatcagattaaaaatcctttaaggacaatgtacatcagaattacttacactttgarctcctgttctatcaggtctctcatccttctcccttttatggctttttattcatctccttaacttttattaaatcccagattttgcaaactctttcttcatttgactgctcaatgagctttcactgg

SEQ ID NO: 71553 - DNA, 600 bp, Chicken  19866894350402_3
ttagaaaacaggtctttgggcactttcaacatcaataagaacaatatgcatttcagtcatgttgaaaaagaaaaattacatttattcccaatttacagatgtgaaaaccctaattttcctgtgctcctgcattttcatcacttgatgcccaaatgagacagagaagcaatctgatcccttcttgtgcctacaacagtcatataactttctgacagcaactaaaataaatcctgcaactccattggtttgttcttgcttaacttraggaagaccaatccacctccatatatttcaataagyaagcatattggttcagttctgaaataaataggaaatcgactaataaatcaaatcatctttcttcttaatcgcaccttgatgaaatcagattaaaaatcctttaaggacaatgtacatcagaattacttacactttgarctcctgttctatcaggtctctcatccttctcccttttatggctttttattcatctccttaacttttattaaatcccagattttgcaaactctttcttcatttgactgctcaatgagctttcactggacctgcaaagcttaatgttctcataaatgatacaat

SEQ ID NO: 71554 - DNA, 600 bp, Chicken  19866894350402_4
cacttgatgcccaaatgagacagagaagcaatctgatcccttcttgtgcctacaacagtcatataactttctgacagcaactaaaataaatcctgcaactccattggtttgttcttgcttaacttraggaagaccaatccacctccatatatttcaataagyaagcatattggttcagttctgaaataaataggaaatcgactaataaatcaaatcatctttcttcttaatcgcaccttgatgaaatcagattaaaaatcctttaaggacaatgtacatcagaattacttacactttgarctcctgttctatcaggtctctcatccttctcccttttatggctttttattcatctccttaacttttattaaatcccagattttgcaaactctttcttcatttgactgctcaatgagctttcactggacctgcaaagcttaatgttctcataaatgatacaatgtaggtgaatctggtgataaatttgcatatttttaactgaatctgactgtaagttagaatggcataaaaaaatgtgatcagaagttaagaaaccctactgataaaactaaggactggactttccagtaagaattcacc

SEQ ID NO: 71555 - DNA, 600 bp, Chicken  19866894350402_5
tcactggacctgcaaagcttaatgttctcataaatgatacaatgtaggtgaatctggtgataaatttgcatatttttaactgaatctgactgtaagttagaatggcataaaaaaatgtgatcagaagttaagaaaccctactgataaaactaaggactggactttccagtaagaattcaccatcaaatcacactaaaagtccttattgaaccatacataatctcattaattaaaagggtgaaattacatgcaattcttattctctaaatgtacatgttataataaatcctactgacataygattgcatgggctcaggagcggggatctattataatctacttaccctctgagaacctaatttccacttgaaataataattaaaaaaaacatccttaaatacattgacctctaatacatttcaaaatgctggaataaatcaaatagagttaataattgaccctttactaatgcgatcttatgaaagaaagaatttaatatgcttagtgctattcctaatttgaagctctatttattagtccattctcattattcttcatcctgccagtttccaaggtaaaccttcttacgcatttggaact

SEQ ID NO: 71556 - DNA, 600 bp, Chicken  19866894350408_1
gagttagagctccaggactgagctctgaattattaaaagggaatgatatgtaagaatttatgtcaattttcaaaacagcccagcaaaggtggagaaaaacctttctttgaaactagcagaaggtacgtggttgaactcctagtctgctttgaaatttcagcactgctttttagcgagacacggtgccttttaaacctcatattttaatcatcagacttctgtacaatgcagaactcttgccttgctgctttggttcaaatacaaccttccccattatgggctttacagtgtaagtgagcyccttgtatcacaagctgacattctcctggcagggaagccaaaggctcctttccttcctcctgcaaaacaatctgctgtaggaacaggcaaatataacttcccagwgcaacttaycgatatccctccttgttcccacacagcaggtccagagagtcaggtgaacaccaaatactgctttaggcattgcattaacattggtaagattagccttgggtacagcagcacctgtagctcatcaggtaattaactcttccctgggtttgggcttcagtccatgccacctatgcagccacacaagct

SEQ ID NO: 71557 - DNA, 600 bp, Chicken  19866894350408_2
tttgaaactagcagaaggtacgtggttgaactcctagtctgctttgaaatttcagcactgctttttagcgagacacggtgccttttaaacctcatattttaatcatcagacttctgtacaatgcagaactcttgccttgctgctttggttcaaatacaaccttccccattatgggctttacagtgtaagtgagcyccttgtatcacaagctgacattctcctggcagggaagccaaaggctcctttccttcctcctgcaaaacaatctgctgtaggaacaggcaaatataacttcccagwgcaacttaycgatatccctccttgttcccacacagcaggtccagagagtcaggtgaacaccaaatactgctttaggcattgcattaacattggtaagattagccttgggtacagcagcacctgtagctcatcaggtaattaactcttccctgggtttgggcttcagtccatgccacctatgcagccacacaagctggggatgaagacccacttcccacatatttaggtggtcttgctgaattcagaaaattatcaccttggcagcaccttttattacaataccttcatagttttgtaaat

SEQ ID NO: 71558 - DNA, 600 bp, Chicken  19866894350408_3
agcagaaggtacgtggttgaactcctagtctgctttgaaatttcagcactgctttttagcgagacacggtgccttttaaacctcatattttaatcatcagacttctgtacaatgcagaactcttgccttgctgctttggttcaaatacaaccttccccattatgggctttacagtgtaagtgagcyccttgtatcacaagctgacattctcctggcagggaagccaaaggctcctttccttcctcctgcaaaacaatctgctgtaggaacaggcaaatataacttcccagwgcaacttaycgatatccctccttgttcccacacagcaggtccagagagtcaggtgaacaccaaatactgctttaggcattgcattaacattggtaagattagccttgggtacagcagcacctgtagctcatcaggtaattaactcttccctgggtttgggcttcagtccatgccacctatgcagccacacaagctggggatgaagacccacttcccacatatttaggtggtcttgctgaattcagaaaattatcaccttggcagcaccttttattacaataccttcatagttttgtaaataatattttt

SEQ ID NO: 71559 - DNA, 600 bp, Chicken  19866894350409_1
tgaagcaatacagagccctaaagaaactccgactgtattaagattctgtaagtctttctacttttattactaaatataggaaactaaaaacctggattctttggcttatgtgcaagattttttatatttgttgtttttcaggaactcatacattcgcaataaaattttcaaaaaagcaaacttacgtcaatattaatttgacttcaagttctgcatatgtattttgagaaaatctatacataggagtctaagaaaataactttatattatcaacttaagacatctcatgatcatgcacaragcaagctgggacatataatgggatcaaaatcagctctgacatcatggagaactagttccactgaaattctcgatcttgcaacagccttccctcactgtaacctagggaagaacttgtcctatacttacaagttgtcctagatggcacactcagttctgtatcatttgttccagtgaaggtacatgttgcatcacagtgtggtctattacaaggctaccagtattactatagatatctgatgtttgagaagtgggggcaatgatatgattcctacataacatctatctacctaaggagga

SEQ ID NO: 71560 - DNA, 600 bp, Chicken  19866894350410_1
cacatctgtctgcatcagacagcgttagcttctctgctgagaaatgccatgttctgcaattcagatgaatcctgaaaatgattgtttgctcaccctggtactacctgtagttttgtcctttgaatcgacatggagaaaccagagcagcacgtgactgtgctcaggctgttgatcagcatatgaccgtggctctgccgtgccatgagtggtccccctgccagccttcctaccaacatgttttttctcacctattttttatgttgcagtcaaacattttattttttctttctgcctcagctygtgtttattctgttctgtgggctgtaaatcagaaatgtgctttattgttttctgttttagagttatgttaactgtaattgctgtgctttcccaaatcttgataggagcaaaaattggagtaaaagttaatgtctcccaagctgtgtgtgcagcatccttgtgccagagagctgctaggcatggcaggcagcgcggggcgggtgggactgatagcgccgtgtccttggcacccactgatggcttttgagctcagagatgcgctcaaaagttggcagataagagttttttagtagatgataa

SEQ ID NO: 71561 - DNA, 600 bp, Chicken  19866894350413_1
aaatcattcaattgagaagaaatttaatgcagataatcagttatagattcatgtagtgaaagtgctgtcacagtaataaggtgaaagacagcaagagagatgagatgtagcagacgtaattaaggaattgaggtcctgatttttaaagatttttaagcaatcctctataggaaggctgaaaaagaagatcctgacaactctatctcttcctgggtaaaatgttaagtgattcaatttttatttgtttttttttttaaatttaattttccctatacagccaaaaggcatttcacatactcrgaggtcttttgggaacatgaaaatttcaccaaacacagatcactaagcaatttctagatacttagtgtcatttgtgtagaattctggtatgcaaagcactctctgatgaagacctgtgttttccactttcttaaatctgaaaggatataggcctatactttccaccttcaaagcaagatctttaaccactcagtttaaactactgtttgatagaaacattcttcytatagaaacaaagaarcaaatacatgcacaaaactcaaagtatcagaaaaatggcaaacaagaagatgtatagca

SEQ ID NO: 71562 - DNA, 600 bp, Chicken  19866894350413_2
gtgattcaatttttatttgtttttttttttaaatttaattttccctatacagccaaaaggcatttcacatactcrgaggtcttttgggaacatgaaaatttcaccaaacacagatcactaagcaatttctagatacttagtgtcatttgtgtagaattctggtatgcaaagcactctctgatgaagacctgtgttttccactttcttaaatctgaaaggatataggcctatactttccaccttcaaagcaagatctttaaccactcagtttaaactactgtttgatagaaacattcttcytatagaaacaaagaarcaaatacatgcacaaaactcaaagtatcagaaaaatggcaaacaagaagatgtatagcagctggacagaggcaatttagaaggtgggactccagtggctagaagctgtagatcatgatggctggattgcacctcagaaatttaagttcttttaggaagaacagcttagaatatctcttacattttaggaaatatcttcttttaggaagatgaacttgatgaagccatgcttaattttccatgcttaaccaatctcagcagcattaaaaatgtgccattttctag

SEQ ID NO: 71563 - DNA, 600 bp, Chicken  19866894350413_3
ttgtttttttttttaaatttaattttccctatacagccaaaaggcatttcacatactcrgaggtcttttgggaacatgaaaatttcaccaaacacagatcactaagcaatttctagatacttagtgtcatttgtgtagaattctggtatgcaaagcactctctgatgaagacctgtgttttccactttcttaaatctgaaaggatataggcctatactttccaccttcaaagcaagatctttaaccactcagtttaaactactgtttgatagaaacattcttcytatagaaacaaagaarcaaatacatgcacaaaactcaaagtatcagaaaaatggcaaacaagaagatgtatagcagctggacagaggcaatttagaaggtgggactccagtggctagaagctgtagatcatgatggctggattgcacctcagaaatttaagttcttttaggaagaacagcttagaatatctcttacattttaggaaatatcttcttttaggaagatgaacttgatgaagccatgcttaattttccatgcttaaccaatctcagcagcattaaaaatgtgccattttctagtctattgccaagtgca

SEQ ID NO: 71564 - DNA, 600 bp, Chicken  19866894350414_1
aactgagacatttctaaatgcaaccgatacttcctacattgatttattttttttttaagccttgcatacccttggtcctagctaccaaagggcatttctttctttcagcatccaaggtgaagcaacggagggcagctaaagccctcacagggatgtttctcaagactgcgggcaaaaccaagggcttggaacacattcacctttgggcacagcgccaagcccacctgcttactcagggttttgccagcaaaggcagctatcaccataccgatttgtccttcgaaggtgcatcctattgcrcttgcttctgctgctacaccttgcatgcggactcctgcacacacrgaggaaggatgtgaagtgcagatgttgctggagaagaagccatctgaatgtctgatgtttttcccccacagcagatgctgacaatttcaagcaagagaaaaccctcgtgcctgcatagcttgtaccctcccaagaaattccacactgggatttgaagaaattatatgaaagactgggatgcaagagattcccctcactcattaagcacgggacccaggataatgaagcaccaaactgcacaagtgccacaatagt

SEQ ID NO: 71565 - DNA, 600 bp, Chicken  19866894350414_2
attttttttttaagccttgcatacccttggtcctagctaccaaagggcatttctttctttcagcatccaaggtgaagcaacggagggcagctaaagccctcacagggatgtttctcaagactgcgggcaaaaccaagggcttggaacacattcacctttgggcacagcgccaagcccacctgcttactcagggttttgccagcaaaggcagctatcaccataccgatttgtccttcgaaggtgcatcctattgcrcttgcttctgctgctacaccttgcatgcggactcctgcacacacrgaggaaggatgtgaagtgcagatgttgctggagaagaagccatctgaatgtctgatgtttttcccccacagcagatgctgacaatttcaagcaagagaaaaccctcgtgcctgcatagcttgtaccctcccaagaaattccacactgggatttgaagaaattatatgaaagactgggatgcaagagattcccctcactcattaagcacgggacccaggataatgaagcaccaaactgcacaagtgccacaatagttactctcattttagcgtatggttattatgaaaaatataccgagca

SEQ ID NO: 71566 - DNA, 600 bp, Chicken  19866894350416_1
actgagaagtctgttctgcagaactactaataaagtcagaaaataggtcagcttccatgtacattagtgtttggcctctgcacagaggctgccaacaaggatgccaattaatgacagttgtgttggacatttgttgactgggaactaaacagagattgcagattccttttacgcagcctaccaaatgctcatcaaatggcaattgctttttgaccttggacaacattaaaagaattttccagtgagggaaaacttctcaaaagggatacactgaacaatatgaaacgaaaatagtttttwctgttgaaggagcaagttccttttataaagattaaccaaaaatatgtacatttacagaaactttatgtagttatattggagaaatccattctgtgtgacagaaaagttgttttcttaagatccttaaatcatgaaaatgttattaaaaatctggtttgtttagaaaggcaatattttttccagaatattttttaaaaatcttgtttttttgaggattgaaaatttttgtttgaaattattaaaactgtattatatgagaatgcaatagaagccttaaaataacactttcttaaaatgtgg

SEQ ID NO: 71567 - DNA, 600 bp, Chicken  19866894350429_1
ttggtatctggtcatctgcgccgggcagcgtcgcggtgacatcggttgctgtcatggcgcctccgtgggggccgcagttctccttctccagctgcaagttcaaggtgcagaagagcaaggaggggacgggcagggtggtcatgtggcggatgggcattgccaacagctacaccatagaggtggccttcggcggctccacgctgggtgagggacagcgctgcggatggcatcacactcagaagcacaattccagccctaaggacacgctctggggcctggtggagggatgcagccgcttaytttgttgtcccgtgtccccttcaggtgggaggaactcacacttcaccgtggaggacctcaaatcattgggctaccacctgtgcgacacgctgctagacttctgcgaccccagtccagccaaggtgggcrggtgactgcagccagcggcagccccacacagcagtgacagtgacactggctccaccatacagttccagcagtgcctggacgaggtggatgcattgctgcggcagcggttgggctccggtcagagctggagtgacgtccccacctcggagctggagtccaggtgtgtcccgg

SEQ ID NO: 71568 - DNA, 600 bp, Chicken  19866894350429_2
gcagggtggtcatgtggcggatgggcattgccaacagctacaccatagaggtggccttcggcggctccacgctgggtgagggacagcgctgcggatggcatcacactcagaagcacaattccagccctaaggacacgctctggggcctggtggagggatgcagccgcttaytttgttgtcccgtgtccccttcaggtgggaggaactcacacttcaccgtggaggacctcaaatcattgggctaccacctgtgcgacacgctgctagacttctgcgaccccagtccagccaaggtgggcrggtgactgcagccagcggcagccccacacagcagtgacagtgacactggctccaccatacagttccagcagtgcctggacgaggtggatgcattgctgcggcagcggttgggctccggtcagagctggagtgacgtccccacctcggagctggagtccaggtgtgtcccggtggtgccatccgtggggacagtggcagtggctgcagttgtcctctccctcgcacagcaccagcggctccgacagctccgtgtctgatgggtccctggagaggagggagagcccctggggacagaagggg

SEQ ID NO: 71569 - DNA, 600 bp, Chicken  19866894350431_1
ctatatacacatacactttccaatgactgggtacagaattcttgcttaatatccaaagctaaaaacttcaccatcatttttaaaaggattaagttggaatacaaattatatgcagaatgatactgaaagcattctgaagaatttgtagtaagaatcttgatgaaatagtatggcattctttagcaaaatctagccaacacctgttgcacagttttcatcactaacaccataaatctgttccctctagtgaactgcattgctggctgataagcacaaatgaagttttgaacatgaatgcarttttgaagcagccaagacagctttactgaaaaggaaatgaccttcccttctaagccttcttccccttttttctaagcttctgcagatggatgcaataccatggaccattgttagagaaacctctcactatgagagccaagagttgcttaatgacacattacaatttccaatgctctgcatgccgttcactttctaaaacttctcatgctgcttccttttccgaacacaatgggttcaagacacatgatgtctggttcccaactatgcttgtatttgctggatgtttttatgcattgaaga

SEQ ID NO: 71570 - DNA, 600 bp, Chicken  19866894350431_2
aatgctctgcatgccgttcactttctaaaacttctcatgctgcttccttttccgaacacaatgggttcaagacacatgatgtctggttcccaactatgcttgtatttgctggatgtttttatgcattgaagatttatgatcaacttcaaatcaagtgcaagtttcatactctaaactggggtgcccacaaacatattgttctttggagaacagctctctggctccatagatgtaacttggacagagtagttacactcttctgcagcccatgctcgatcaagatccacaagccccatacaytgctttcctgaaaaaaagagcaaaagaaagcacagagtctaaaaatatgcaagcattatcagaactatgcacttcaattttaagaagaaacatcagtaagtcatctaaaagaagttccaaatctgctttaaaatctatcttaatctgttttacttcaaatagacaggcattaatagttctaaatcacatctgcatcttgtaaccttcatttactaatgttttggagaaggattattaactctgtacatatggaaaaatgtaataggcacaactattttcaagtattcccaaaacttgcag

SEQ ID NO: 71571 - DNA, 504 bp, Chicken  19866894350431_3
tatcttaatctgttttacttcaaatagacaggcattaatagttctaaatcacatctgcatcttgtaaccttcatttactaatgttttggagaaggattattaactctgtacatatggaaaaatgtaataggcacaactattttcaagtattcccaaaacttgcagaagaatgtgggcattaaagtaaaagccacaggaagaaaacagctagtttatccctccactcctgaattgctaaatcctcactcctttataaccgtagtagttttcctgctgcagtttcatctaaaatctgaaaayctttggttactgataaacaaggaaagaagaaaatactgaacagttatccagtgtacttgatctgaaaacacaaactgtgagtgaagatcagatttgtgactacctgaggaacctgaatatccacaagtctacaggtcctgatgatatgcaccccagagtcctgagggaacggctgacgcagtcgccaagccactctcaaagcca

SEQ ID NO: 71572 - DNA, 600 bp, Chicken  19866894350432_1
ccaaccacctcaacttcctcaactccttcaagatgaagatgtcggtggtgctgggcatcgtgcacatgggcttcggcgtcctgctgggcgtcttcaaccacgtgtgagtcccccattggatcacgctgagggggctgtggtagaatggggtgggcgaggggggtcccgcgcctgcatcggagctgagctgagcgcaagcctcatcattgactcctgctcaggcacttccgacagtggcaccggctggtgctggagctcctgcctgaggtcgtcttcttgctggcgctctttggctacctygtcttcctcatcttctacaagtgggtcaagttcagcgccgtcgaytcccaggtggcccccagcatcctcatccacttcatcgacatgtttctcttcacctccaacgctgacaacctcccgctctaccgggggcaggtagcacttctgggacccccaccaagaccggcgtgtcccattgtcacgggcagggacatcctcagctccacttgctgaggatttgtggggcattgagtgtcccggtgccggaagggaccccgaattgctgtgtgctgcaggtgccggtgcagatggtgctggtgg

SEQ ID NO: 71573 - DNA, 600 bp, Chicken  19866894350432_2
tggtgctgggcatcgtgcacatgggcttcggcgtcctgctgggcgtcttcaaccacgtgtgagtcccccattggatcacgctgagggggctgtggtagaatggggtgggcgaggggggtcccgcgcctgcatcggagctgagctgagcgcaagcctcatcattgactcctgctcaggcacttccgacagtggcaccggctggtgctggagctcctgcctgaggtcgtcttcttgctggcgctctttggctacctygtcttcctcatcttctacaagtgggtcaagttcagcgccgtcgaytcccaggtggcccccagcatcctcatccacttcatcgacatgtttctcttcacctccaacgctgacaacctcccgctctaccgggggcaggtagcacttctgggacccccaccaagaccggcgtgtcccattgtcacgggcagggacatcctcagctccacttgctgaggatttgtggggcattgagtgtcccggtgccggaagggaccccgaattgctgtgtgctgcaggtgccggtgcagatggtgctggtggtgctggcactgttgtatgtgcctgtcctgctcctggggacacccc

SEQ ID NO: 71574 - DNA, 599 bp, Chicken  19866894350441_1
  misc_feature (1)..(21): n is any nucleotide
nnnnnnnnnnnnnnnnnnnnntgctggataaatgctcagactacccaggaagtgcaaaccacaaccagagcacaaacaaggcagcagcagagtgcacacacaaatgcagtgctgcacaacgctgaagaactcaggaacaaaacaagtccctttgctcctcacctcatccccctgcagtgcttctgacacagtacggtgcctgcgtggtgcaagcagaacccaccaattcccactgcctgtgccctgcaaagcacctctgctttggtgccagcacatgaaggcacatttccaccaccacargcaattgcagcagcagcctgcaggcttccctgccctctcaaagacctccacgaggctgagctctgctctctgggatatttcaccatgcgaagagccctctgctgtgcccggctcagcacaagccctccccagaacacgttatttctccaggaattgtcctcttctatactcctgttgcataagctgaaggcaattcgactccagcagctgcaggtcaaggccaacgtcagacctccccaagctttggactctacaccagagctctgcagccctaccattgctctccggggcccaagaac

SEQ ID NO: 71575 - DNA, 600 bp, Chicken  19866894350445_1
gttgcaattccaagaagagcggctgtggggagtagccactggtaagtcatcggttgtgctacaggggtctggcagggacacatgggtcgcccttactgcatgactaacagcactttccttttattgtaaattatgacctctgtttttgaaatgtcatagcatagctacagacaaccttccctttctacatgaaaacttgaaacagaaaacattttgtgaggcagaggctcacagaggctacttttgcttttttttttcccttttctcagtgcattctgctgataagaaaaaacagcaccrcgttatgtcagctataaatatagtacaaaggctatcaaaacacaaacatgaaataagattgtgacttttcctgtagtatggtaaactaggatrtttacctttaccctagattgtggaaaatgaatgtagtgctgtgaaaatacagtattacaactttgtttatgcacattttacctcaatatatgctgaatataatgatgaaaaaccaaattcctttccccaaagttctgctatcacagaatttctgttattctaaactcaggacatacccaaatccacgtttgagattcaaagattctg

SEQ ID NO: 71576 - DNA, 600 bp, Chicken  19866894350445_2
tactgcatgactaacagcactttccttttattgtaaattatgacctctgtttttgaaatgtcatagcatagctacagacaaccttccctttctacatgaaaacttgaaacagaaaacattttgtgaggcagaggctcacagaggctacttttgcttttttttttcccttttctcagtgcattctgctgataagaaaaaacagcaccrcgttatgtcagctataaatatagtacaaaggctatcaaaacacaaacatgaaataagattgtgacttttcctgtagtatggtaaactaggatrtttacctttaccctagattgtggaaaatgaatgtagtgctgtgaaaatacagtattacaactttgtttatgcacattttacctcaatatatgctgaatataatgatgaaaaaccaaattcctttccccaaagttctgctatcacagaatttctgttattctaaactcaggacatacccaaatccacgtttgagattcaaagattctggatattccagataaccagatccaagcctggattgtcctttttcagcctcccaacctccccccttgtcccatagcatctgctcctttaatttaa

SEQ ID NO: 71577 - DNA, 600 bp, Chicken  19866894350451_1
cacaagagcaaagctgaaggggaaagtcacctccttcccactgctgttacacttagaattcatgcaactttctattctggctcgtttgccagctcaagttgatttttcatcaatcaagtcgtgcttctcagggctgctctcacatgtctcagagatgtgttcatcctctctgaaaacatttactctccccttggcttgcctcaaggggcaaaagaattactctccatgcagagaaatacagaataacacagagggaaatagtgaaaataagcaatttgcttcttttagttcagtgatggwtgcacctcagtataatgamatttgcctgtaccgtaatattatcttgaatgcttcctaagaaatggaaatctaaatcatttttacttgatcatctgtgctctgtgcttgtctgtaaatactaagtacaagtaagggctcttgattttcatggaagttttctcttttataggagagagcttcctccatgtttkagggatcttaactagcagattgattgtgtggctccaagggaaggaaaaatagacctatgtatgtaaaacacaaggcctgttagtatagatatgatccttcgaactacta

SEQ ID NO: 71578 - DNA, 600 bp, Chicken  19866894350451_2
gggaaagtcacctccttcccactgctgttacacttagaattcatgcaactttctattctggctcgtttgccagctcaagttgatttttcatcaatcaagtcgtgcttctcagggctgctctcacatgtctcagagatgtgttcatcctctctgaaaacatttactctccccttggcttgcctcaaggggcaaaagaattactctccatgcagagaaatacagaataacacagagggaaatagtgaaaataagcaatttgcttcttttagttcagtgatggwtgcacctcagtataatgamatttgcctgtaccgtaatattatcttgaatgcttcctaagaaatggaaatctaaatcatttttacttgatcatctgtgctctgtgcttgtctgtaaatactaagtacaagtaagggctcttgattttcatggaagttttctcttttataggagagagcttcctccatgtttkagggatcttaactagcagattgattgtgtggctccaagggaaggaaaaatagacctatgtatgtaaaacacaaggcctgttagtatagatatgatccttcgaactactagtccaagaatgatttcagc

SEQ ID NO: 71579 - DNA, 600 bp, Chicken  19866894350451_3
tggcttgcctcaaggggcaaaagaattactctccatgcagagaaatacagaataacacagagggaaatagtgaaaataagcaatttgcttcttttagttcagtgatggwtgcacctcagtataatgamatttgcctgtaccgtaatattatcttgaatgcttcctaagaaatggaaatctaaatcatttttacttgatcatctgtgctctgtgcttgtctgtaaatactaagtacaagtaagggctcttgattttcatggaagttttctcttttataggagagagcttcctccatgtttkagggatcttaactagcagattgattgtgtggctccaagggaaggaaaaatagacctatgtatgtaaaacacaaggcctgttagtatagatatgatccttcgaactactagtccaagaatgatttcagccaaagagacaaaggtggcagtccccagactggtgttggtgagagttttccccataactatgagtttcaccatcagcatgtctttaaatccttctgatgggctgagttgcagctgtgttgttcagctgcaaagtgtattgtattagtgatgcaaggaaatcttgtttttctag

SEQ ID NO: 71580 - DNA, 600 bp, Chicken  19866894350452_1
ttataacattttgaatctcagatgcaagtactttctctaaattaacagtattgtattgttgatgacctattattcagctaatatttcaaaagctaattaaaatctattcatgtatagttttaaatatatgaaggataaataaaggaatataacagttgaatgtaatgtgcttcttttattaatcttggggtgaatggacataataaaaaacattaatcttatctgccattaatttcttcaaaaatttctaactttgtttcaactgagattatatccatatgcaaaattatagcattccartgtgatgcatttaattatttctgagtggcataatcaatttaaactacatctctgtataaaacttgttaatgacatcaagtttgaagtaattggatgagagctaatccaaatgtaacgcctcctattttattatgctagcccagtgaaagaaatgggataacaccttttctttttcttgtaattaatgtccaggcacctcaaattgagaagtcaaccccacattaggctattatgaaagctgtaggagaatcacagatgacatagaacatgaaaaagcaaggaaagactgagataagatag

SEQ ID NO: 71581 - DNA, 599 bp, Chicken  19866894350464_1
  misc_feature (1)..(19): n is any nucleotide
nnnnnnnnnnnnnnnnnnncgcagatcctaaccgagttaagtgtgttgagcaaataatatttcggctgctaacaattgagtcaacatcaggggtgatcaagatttcatctgctacttcacagggggagaccatgctgctattttactaagcctttttcatcacaataggattccctgaatcaaaggcttacaggtgcaactttggagtggggacctgcagttgcgttcctgtcaaacatatgctgctttccaagcacaaatagctttcaactctttgcagttcaagataattgctttccrgaaaagggaggggttgccttcctgtgagttccaaccaacacatcaggaatgtgttggttgggatgctgctagagaagcatccttcattaccaaggaaccaattcctgggagttaaccaaggaaaaaaataactacaggaggctaaaaaatgcagaatttgaaccagaaagaagtgagaagattgcctcgccttacccttgcccagaaaggttgtgaatgccccctcccttgggagcattcaaggccaggctggrtgggactttgagcagcctggtgtagagggaggtgtccctgcccat

SEQ ID NO: 71582 - DNA, 600 bp, Chicken  19866894350464_2
cacaaatagctttcaactctttgcagttcaagataattgctttccrgaaaagggaggggttgccttcctgtgagttccaaccaacacatcaggaatgtgttggttgggatgctgctagagaagcatccttcattaccaaggaaccaattcctgggagttaaccaaggaaaaaaataactacaggaggctaaaaaatgcagaatttgaaccagaaagaagtgagaagattgcctcgccttacccttgcccagaaaggttgtgaatgccccctcccttgggagcattcaaggccaggctggrtgggactttgagcagcctggtgtagagggaggtgtccctgcccatagcaggagggttggaacttgatgatcttaaaggtcccttccaaaccaaaccattctgtgattcattcartgattctgttcttttctttttttcctgaaaagaatcaaaaaaccaccctctctagctttaagcaatgcccctttcaaaatcagtggggtaaacctgacatttctttcaaaaaacaagctgaaatgatgctgaatatttttggatcttcgtagggttatcactatgtaattggcattggatttgctc

SEQ ID NO: 71583 - DNA, 600 bp, Chicken  19866894350464_3
ctagagaagcatccttcattaccaaggaaccaattcctgggagttaaccaaggaaaaaaataactacaggaggctaaaaaatgcagaatttgaaccagaaagaagtgagaagattgcctcgccttacccttgcccagaaaggttgtgaatgccccctcccttgggagcattcaaggccaggctggrtgggactttgagcagcctggtgtagagggaggtgtccctgcccatagcaggagggttggaacttgatgatcttaaaggtcccttccaaaccaaaccattctgtgattcattcartgattctgttcttttctttttttcctgaaaagaatcaaaaaaccaccctctctagctttaagcaatgcccctttcaaaatcagtggggtaaacctgacatttctttcaaaaaacaagctgaaatgatgctgaatatttttggatcttcgtagggttatcactatgtaattggcattggatttgctctctgcaagattagattagatgagcataaagattccctctgcccttaaaggctattcattttgtcatgtggattacttttagacttccttcattttattgcatcaaaaattttgt

SEQ ID NO: 71584 - DNA, 485 bp, Chicken  19866894350471_1
ctgtctgtctgcgaaataatttaactctcacgagcacttatgcccaagttagggaggctgtgtttgtttcttcagttttgagggacacagaacacctctggtttacctttcccctagctgtggtgtgtatgcagctttaacctaagtgcaaacaatgctaacgcttcagcatctgaaatgtatcacttacagctggagaggaacagagctgcaggatggtcatggatgtgttaagtagcaattgactaatcaataaagcattcaggatttaataagagaaattttcaccaatttaattaytgatttgtttgtaaaccagcttagatgaatcgttgctagatgcaatatatgttctggtttcagttactaccttgaactgattactgatagaatgcatacagtatctttctctgacaaatattcctccatgagcttgcactgattgccaaagtttcaaaactgaattgttaaaatggagcagttta

SEQ ID NO: 71585 - DNA, 600 bp, Chicken  19866894350473_1
atcatgtccataaccagaagtaaaactgtgtcttataaaaacatctcttctacccagaagacgtatgttcataatgaggatcaggtacagcatgaataccagttcatttaaaacatacaattaaattgcttgggagaccaagccagaagataaatatcctacgacttatttgtatgttaagataacctatgtttattctcaattcagagatcacgtgaatgatcaaaacaaatttataacaaagcattcagaatatagattatttttttgtgtaagagaatgaagcttttcctttgccaygatgcttgtagaaaggattgtcagtgctggggaacatgatgttctgagattactgcttyccatgattgtctcacagatctctcttatttcttgtttgtttgtctctgtctctctcttgccctgcatttaggtactgggctccttgggcagagcgtgattcagccttcagtattacagcagtcattattccaaaggagcccgcagtttgggaccaaacagtgatggtcacagatactgaatgtaagtcacaaagcaagctccacagctgagtttggatttaaaaacacaactgcataaaag

SEQ ID NO: 71586 - DNA, 600 bp, Chicken  19866894350473_2
gacgtatgttcataatgaggatcaggtacagcatgaataccagttcatttaaaacatacaattaaattgcttgggagaccaagccagaagataaatatcctacgacttatttgtatgttaagataacctatgtttattctcaattcagagatcacgtgaatgatcaaaacaaatttataacaaagcattcagaatatagattatttttttgtgtaagagaatgaagcttttcctttgccaygatgcttgtagaaaggattgtcagtgctggggaacatgatgttctgagattactgcttyccatgattgtctcacagatctctcttatttcttgtttgtttgtctctgtctctctcttgccctgcatttaggtactgggctccttgggcagagcgtgattcagccttcagtattacagcagtcattattccaaaggagcccgcagtttgggaccaaacagtgatggtcacagatactgaatgtaagtcacaaagcaagctccacagctgagtttggatttaaaaacacaactgcataaaaggtttatgagaaagcacagattttgtatggtcatatttagttcctcttctgtttcctgat

SEQ ID NO: 71587 - DNA, 599 bp, Chicken  19866894350479_1
  misc_feature (1)..(18): n is any nucleotide
nnnnnnnnnnnnnnnnnnacctctctgggcagcctgttccagtgcactgtcatccttaccataaagaagctcttctgtatgtttgtatggaacttacttcacacataggccaccaatgtatggtttatctctggatgaaaactcactatcccatacaatgcaactactaacgccttaccaaaaaacataataaaaaaaagcttagtaaattccaaaaataaatacaaaatagattacaacatatcaaatgttacatccatccatccacgcccttccccctttgtcctaacaataactgtytggtaataggacacagctagcatcatccaactgacagttaatggaactgcagtgccagttttgttttgctttgtagacttagcaatgctgtagtatgacctgatttaatgaggctagagcagtacaacttttctcccaaaatcagcactagaatggctgaaataccaatttggtgtaatctcacccctaacagaactgtatgtgtactaataggaaaaagaaatattaaaaaaaatgcagaacgttagcccaaatacatcagttctagtgaactcatttagaaatcattgattgggcaa

SEQ ID NO: 71588 - DNA, 600 bp, Chicken  19866894350482_1
gtgagcgcggtgatgcagacagagtgctcccacgggtggggtggggacggagcagagcggttcttccagagggcagagcaaatggtgcagaaaaacgagacggtgaggttgggagcggtgcttccaaaaatcattcgggttcagctggcaaacagaacgtctccaaatgtcaccgggtttaaaatccggaaaaatgcttggagtggatttcgcccctttgcctcagcaaaatcaaaaacagtcctctgtttgcttttaagcgctcagatctgcggctgatgcaaagcaaatgcaaacggraaggttgctgcgaaggattgttttgcatgcaattttcccaaaaacggggggaaaaaaaagctgtgcgaatccgtgcgcttatggaaggctgccggtgcttctccacttgtaaatctggcactgagtagtgatagtggcgctctgtgctgtacccctcacccatccctaatgatgagagcagggcgagggctgctgggcgcttaggccagagctctcggatggatgttgagcagttctctgctgcatggcacactgctgggtgcaggagggatgcgccctggcgatgctccggggttgcaa

SEQ ID NO: 71589 - DNA, 599 bp, Chicken  19866894350483_1
  misc_feature (1)..(14): n is any nucleotide
nnnnnnnnnnnnnnttagctctaaactccataaaagagatactaccacgctgtatcagaacaatacacaaagacaagagaaaacaagaaagtaaaaagcattcaaagccactggacagacaagaagcagaccaccggggccactcacagctgatttgagtggacagaacttcacaaagcagattacgcatctgttctctttgtttcattacagcaggaaaaaaaaaaaagtaaatccaatctaaaagtatcctaccctgaactatttttatattgttccctcaaacttctttaaaaacayacccaccactgtcctgggctctagcaggctmtggccygtttgcaacagcarcagtctgctgtcagttgctatacttttacagctatgttttgtaactggtcagtattgactattctttgacaaagcctcacgcaccaaagccacaggcagctgaacagagtaccgcagaaacagtcacacatagaaattcaagtactctcttttcaaccacatgacacttacaggcaaataaataattctctgtattcttaaacatttactaagctgtgtgactctgggatattgagtggggactaccc

SEQ ID NO: 71590 - DNA, 600 bp, Chicken  19866894350483_2
aaaagagatactaccacgctgtatcagaacaatacacaaagacaagagaaaacaagaaagtaaaaagcattcaaagccactggacagacaagaagcagaccaccggggccactcacagctgatttgagtggacagaacttcacaaagcagattacgcatctgttctctttgtttcattacagcaggaaaaaaaaaaaagtaaatccaatctaaaagtatcctaccctgaactatttttatattgttccctcaaacttctttaaaaacayacccaccactgtcctgggctctagcaggctmtggccygtttgcaacagcarcagtctgctgtcagttgctatacttttacagctatgttttgtaactggtcagtattgactattctttgacaaagcctcacgcaccaaagccacaggcagctgaacagagtaccgcagaaacagtcacacatagaaattcaagtactctcttttcaaccacatgacacttacaggcaaataaataattctctgtattcttaaacatttactaagctgtgtgactctgggatattgagtggggactaccccttacagacaccagcaggcttttcagtacttg

SEQ ID NO: 71591 - DNA, 600 bp, Chicken  19866894350483_3
gatactaccacgctgtatcagaacaatacacaaagacaagagaaaacaagaaagtaaaaagcattcaaagccactggacagacaagaagcagaccaccggggccactcacagctgatttgagtggacagaacttcacaaagcagattacgcatctgttctctttgtttcattacagcaggaaaaaaaaaaaagtaaatccaatctaaaagtatcctaccctgaactatttttatattgttccctcaaacttctttaaaaacayacccaccactgtcctgggctctagcaggctmtggccygtttgcaacagcarcagtctgctgtcagttgctatacttttacagctatgttttgtaactggtcagtattgactattctttgacaaagcctcacgcaccaaagccacaggcagctgaacagagtaccgcagaaacagtcacacatagaaattcaagtactctcttttcaaccacatgacacttacaggcaaataaataattctctgtattcttaaacatttactaagctgtgtgactctgggatattgagtggggactaccccttacagacaccagcaggcttttcagtacttgcccaca

SEQ ID NO: 71592 - DNA, 600 bp, Chicken  19866894350483_4
gtatcagaacaatacacaaagacaagagaaaacaagaaagtaaaaagcattcaaagccactggacagacaagaagcagaccaccggggccactcacagctgatttgagtggacagaacttcacaaagcagattacgcatctgttctctttgtttcattacagcaggaaaaaaaaaaaagtaaatccaatctaaaagtatcctaccctgaactatttttatattgttccctcaaacttctttaaaaacayacccaccactgtcctgggctctagcaggctmtggccygtttgcaacagcarcagtctgctgtcagttgctatacttttacagctatgttttgtaactggtcagtattgactattctttgacaaagcctcacgcaccaaagccacaggcagctgaacagagtaccgcagaaacagtcacacatagaaattcaagtactctcttttcaaccacatgacacttacaggcaaataaataattctctgtattcttaaacatttactaagctgtgtgactctgggatattgagtggggactaccccttacagacaccagcaggcttttcagtacttgcccacaaatcataatctttc

SEQ ID NO: 71593 - DNA, 600 bp, Chicken  19866894350490_1
gaaattaatcgctcaggaatgagatatttctgctcattggtatgtggcactcacagtcagattttcccaactgatgcgcaagaccttagaatgtcttctcttgtggagacttaagtggttcatgagatttagtagatgccaataagactgacaatttattaagaagaaatgttataatctgtacctaaatacaagcttgagactttcaccttcagaaacagccattccttggcagtgccctgcacaaggcctacaggatcactaggtgaaggagcatggagcacaactcaagatagcagsagcaacaggaggtagggcaattctatccatctttttagcagtctgtattgattcagacagtactgatgccagagctaataatcaagggcactgaacttgaatgaacccctccagatggctccgtgagctggaaagcctctgaattagtgtggttctgatctggcctggtcttctatgtcccaagaatttaaataggaacagactgaggaacagctaagttcattacagctgggttattttctgggtaagcaatgagagcattttcatacacttaactttcaagtctggttataatgacaa

SEQ ID NO: 71594 - DNA, 600 bp, Chicken  19866894350513_1
ttttttgttgttttgttttgttttatttgttttttgccacaagcgtgcattgctggctccttgtcagtgtggtgtgcaccagaaccctcatgtccttctaagcagaattaccttccagttagttggagcacagcatgtagtggctcccggggatgtccctgccccaggccaggactttggttttccccttgttccagacgttcttctcaccccatttctacaccctggggaggttcttctggatggcagtacagccctcttctctatgagtactgagcacatcattcagctggttttcartccacttcttcaacttgatgtagtttgtaattcctgttggtagccacgtgacagagtctgtgctgctcgctgttgttgtgcaagtctccacccttttccaaccaggtccagacagagtgagttagattggtgagtaacatgcagtctgtcctggcttcctggaaaataaggtttgtaacctgaattaaagagctctggtgaatcgcacaacatagtaacygagttaaatgcaaattacatcaacatttaygaagtttcaaaaatgcaagtgctcttataaatgaacaggaatagaagtaa

SEQ ID NO: 71595 - DNA, 600 bp, Chicken  19866894350513_2
caccctggggaggttcttctggatggcagtacagccctcttctctatgagtactgagcacatcattcagctggttttcartccacttcttcaacttgatgtagtttgtaattcctgttggtagccacgtgacagagtctgtgctgctcgctgttgttgtgcaagtctccacccttttccaaccaggtccagacagagtgagttagattggtgagtaacatgcagtctgtcctggcttcctggaaaataaggtttgtaacctgaattaaagagctctggtgaatcgcacaacatagtaacygagttaaatgcaaattacatcaacatttaygaagtttcaaaaatgcaagtgctcttataaatgaacaggaatagaagtaaactcattttccaggtgtgctattgggcttcatctgcatcctactgttttgtactatctgtgtaacaggatacaaaggtttacccagctctcagtggcacaaagacaggaaagagaggcaggttccccagtgggattggagccagatccagccatgaaagcccctccaggatgggctatcaaatagatgtggagatcttacacaaccaacccattcccaat

SEQ ID NO: 71596 - DNA, 600 bp, Chicken  19866894350513_3
acagccctcttctctatgagtactgagcacatcattcagctggttttcartccacttcttcaacttgatgtagtttgtaattcctgttggtagccacgtgacagagtctgtgctgctcgctgttgttgtgcaagtctccacccttttccaaccaggtccagacagagtgagttagattggtgagtaacatgcagtctgtcctggcttcctggaaaataaggtttgtaacctgaattaaagagctctggtgaatcgcacaacatagtaacygagttaaatgcaaattacatcaacatttaygaagtttcaaaaatgcaagtgctcttataaatgaacaggaatagaagtaaactcattttccaggtgtgctattgggcttcatctgcatcctactgttttgtactatctgtgtaacaggatacaaaggtttacccagctctcagtggcacaaagacaggaaagagaggcaggttccccagtgggattggagccagatccagccatgaaagcccctccaggatgggctatcaaatagatgtggagatcttacacaaccaacccattcccaatacagagaaaatggtttccgcatcattcctg

SEQ ID NO: 71597 - DNA, 600 bp, Chicken  19866894350516_1
gtcttgcagaatggtacagttaatctcagctacctggctaactgtcctttgcagcagagggtgtgcacttgatgcatttgttagagcctagtgaaggatttggtgtttctggacacaggagcgtttccctgctggttgaacagctctgtaggccccataggcagtggcctgctgatgaatgtaggccaggcctgccaggagaacaaaacatatgctgacaactaaatgtgggtgtctaaaatgccagttgccctcatctgaaagctgaatcccactcacagagttttgaaaaagggaacragatgtctgctgtttgctggggacagcagascaaaagctttctgcttacttttgtgaccacaatctcacatgcataggaattgctatacaatgggtatgtctatcattactggattagcttgcaatgaaaagctcgttgaacaattataggaagttctgcagctaacaatattgtcatttgaagcagttatcattagcttttgaattgaatgctgcacaaatgcgtgaggatagtttatactttactgaacgttataatttgagtctcaaaagaaagacatcacattgttgacattcaat

SEQ ID NO: 71598 - DNA, 600 bp, Chicken  19866894350516_2
acctggctaactgtcctttgcagcagagggtgtgcacttgatgcatttgttagagcctagtgaaggatttggtgtttctggacacaggagcgtttccctgctggttgaacagctctgtaggccccataggcagtggcctgctgatgaatgtaggccaggcctgccaggagaacaaaacatatgctgacaactaaatgtgggtgtctaaaatgccagttgccctcatctgaaagctgaatcccactcacagagttttgaaaaagggaacragatgtctgctgtttgctggggacagcagascaaaagctttctgcttacttttgtgaccacaatctcacatgcataggaattgctatacaatgggtatgtctatcattactggattagcttgcaatgaaaagctcgttgaacaattataggaagttctgcagctaacaatattgtcatttgaagcagttatcattagcttttgaattgaatgctgcacaaatgcgtgaggatagtttatactttactgaacgttataatttgagtctcaaaagaaagacatcacattgttgacattcaatattaacacttcagcaagagggctttagaaac

SEQ ID NO: 71599 - DNA, 600 bp, Chicken  19866894350523_1
ttttaaatgagcttagataattgaccagaatgaataatagcactgaactcttattgtataaagattccaaccacataatccaaatatttgcaagctgggatgagtcaaagttaatttctcatggatacctctatgaaagggcagtttacaggaaggatttgaatgctaaaaagttcctgccttgccatttgtgcttggaataaactttggatggggagcaatactctttagaaataaaaagaaaggtaatcacataacacagctgaattcacacagatgagtagcatttaaaagtcacaytggtatttgagaaaatgacaggtgttagatatctggaaacattcttaatgtgctgaaactccgaagagaagcatacctttgacccatttaatgactacccaaataaatcactctcccttttcatgtttcatcaaaattgcatccattcccaacagagcctcacacgaaactttatcggaataactctgactgactgcagtgaatctcctcacatgtaggttttggaacagatttaatatcctcctcgcttcctctgaatgtaatagctagcactgcaaaagtctgcatctcttgctgtaa

SEQ ID NO: 71600 - DNA, 600 bp, Chicken  19866894350529_1
aacaaatcaaattgtacagtactgttgttgtgcaaattagttctattaagagctctatttgcaagcttcaggggtttgtaactccaatacaaaatcttaatatattaaagagggggaaaatattttacagaagttcacagtgaggtaaaaccaaaaaaagtattcaggggttttataatttgaaataatgtaacttttcttcatctgaattttatgagcattaagactagaatataaaggcaagaaattgcaaaatactttttataaagattgtgcaaatttgattctttggcattcaawctgtatatgagataataagcacattatggctgaaaagataacccaggataattgtaaaaaatatagggctcaggaacattgtttgcatttcttcattggtaatacaagattaattgaaggatatgtacataaaatccccaagcaaaattcttaattatagattacatacatacagcacaaataaaggaattgtgagattatttgaagttaagattttgcagtatcaatattgcagaataacaactattttagtcatgtctcaaagatgacctcagcattgtgtcagaagtcaggacaaga

SEQ ID NO: 71601 - DNA, 599 bp, Chicken  19866894350534_1
  misc_feature (1)..(10): n is any nucleotide
nnnnnnnnnngaaacttggttctttaaaattgtttttccgtaatcatactgtcagtttgacaaccctactattttaagtggacaagctgcagcaaggccctgtatgtgtacaagtaagtcaaggcttgcctctatagcacagttaccaagtgaggaaggctgtggattttgaagcatgatgactattgtagaataactgtgaatgcaatactcagctcctagtacctttttcctatttgaccattttaatcagctcttctctaagtgcaaattctcagtaatttccattttcctgtaaarcttatgaagggrcacgtcttcatatcctatgagtttcaaaaagtgatattcttggttgcagcagctggtgtctgaatgtgaagcaccccwagcacagagatggatctattctgttaatgttgtgagataaaatgttgagtaaattcttgagacctgttgaaaacatttcatttgcttttgttgtacaccaaaactgtttgtcttgattggaaatattaaggtctcgaggctttaaacacattttcttgtgtaggctcctttgcacaactatgcatcatttaggatgacttcaagtcttt

SEQ ID NO: 71602 - DNA, 600 bp, Chicken  19866894350534_2
aacttggttctttaaaattgtttttccgtaatcatactgtcagtttgacaaccctactattttaagtggacaagctgcagcaaggccctgtatgtgtacaagtaagtcaaggcttgcctctatagcacagttaccaagtgaggaaggctgtggattttgaagcatgatgactattgtagaataactgtgaatgcaatactcagctcctagtacctttttcctatttgaccattttaatcagctcttctctaagtgcaaattctcagtaatttccattttcctgtaaarcttatgaagggrcacgtcttcatatcctatgagtttcaaaaagtgatattcttggttgcagcagctggtgtctgaatgtgaagcaccccwagcacagagatggatctattctgttaatgttgtgagataaaatgttgagtaaattcttgagacctgttgaaaacatttcatttgcttttgttgtacaccaaaactgtttgtcttgattggaaatattaaggtctcgaggctttaaacacattttcttgtgtaggctcctttgcacaactatgcatcatttaggatgacttcaagtctttatgattagagtat

SEQ ID NO: 71603 - DNA, 600 bp, Chicken  19866894350534_3
agcaaggccctgtatgtgtacaagtaagtcaaggcttgcctctatagcacagttaccaagtgaggaaggctgtggattttgaagcatgatgactattgtagaataactgtgaatgcaatactcagctcctagtacctttttcctatttgaccattttaatcagctcttctctaagtgcaaattctcagtaatttccattttcctgtaaarcttatgaagggrcacgtcttcatatcctatgagtttcaaaaagtgatattcttggttgcagcagctggtgtctgaatgtgaagcaccccwagcacagagatggatctattctgttaatgttgtgagataaaatgttgagtaaattcttgagacctgttgaaaacatttcatttgcttttgttgtacaccaaaactgtttgtcttgattggaaatattaaggtctcgaggctttaaacacattttcttgtgtaggctcctttgcacaactatgcatcatttaggatgacttcaagtctttatgattagagtatagaraaacttggaagtgttaattgcatckgcaaggtgttggttttgaatgacttggctaatactctttcacttctcaa

SEQ ID NO: 71604 - DNA, 600 bp, Chicken  19866894350534_4
tcttcatatcctatgagtttcaaaaagtgatattcttggttgcagcagctggtgtctgaatgtgaagcaccccwagcacagagatggatctattctgttaatgttgtgagataaaatgttgagtaaattcttgagacctgttgaaaacatttcatttgcttttgttgtacaccaaaactgtttgtcttgattggaaatattaaggtctcgaggctttaaacacattttcttgtgtaggctcctttgcacaactatgcatcatttaggatgacttcaagtctttatgattagagtatagaraaacttggaagtgttaattgcatckgcaaggtgttggttttgaatgacttggctaatactctttcacttctcaaaatagattctgcaactattgacctcccaratttatttataataagactttgtaggaatgaactgttcttaacagagcactgtcataactggatgttagtatttctagacttttaagcttgggaagtctcaattgtttaaggcatggaaggaaactatgttagaaaatttggaaggatgagctaaagaagctattcatctttattttttgatgtagacgtagattga

SEQ ID NO: 71605 - DNA, 600 bp, Chicken  19866894350534_5
agtgatattcttggttgcagcagctggtgtctgaatgtgaagcaccccwagcacagagatggatctattctgttaatgttgtgagataaaatgttgagtaaattcttgagacctgttgaaaacatttcatttgcttttgttgtacaccaaaactgtttgtcttgattggaaatattaaggtctcgaggctttaaacacattttcttgtgtaggctcctttgcacaactatgcatcatttaggatgacttcaagtctttatgattagagtatagaraaacttggaagtgttaattgcatckgcaaggtgttggttttgaatgacttggctaatactctttcacttctcaaaatagattctgcaactattgacctcccaratttatttataataagactttgtaggaatgaactgttcttaacagagcactgtcataactggatgttagtatttctagacttttaagcttgggaagtctcaattgtttaaggcatggaaggaaactatgttagaaaatttggaaggatgagctaaagaagctattcatctttattttttgatgtagacgtagattgactctgtcgcatgtaacctggaaggt

SEQ ID NO: 71606 - DNA, 600 bp, Chicken  19866894350534_6
ttgtgagataaaatgttgagtaaattcttgagacctgttgaaaacatttcatttgcttttgttgtacaccaaaactgtttgtcttgattggaaatattaaggtctcgaggctttaaacacattttcttgtgtaggctcctttgcacaactatgcatcatttaggatgacttcaagtctttatgattagagtatagaraaacttggaagtgttaattgcatckgcaaggtgttggttttgaatgacttggctaatactctttcacttctcaaaatagattctgcaactattgacctcccaratttatttataataagactttgtaggaatgaactgttcttaacagagcactgtcataactggatgttagtatttctagacttttaagcttgggaagtctcaattgtttaaggcatggaaggaaactatgttagaaaatttggaaggatgagctaaagaagctattcatctttattttttgatgtagacgtagattgactctgtcgcatgtaacctggaaggtagagaaactgccacctctgaaacctgcctgcccttagccataagggagaggaagcaacaccttcaagttgccaccagt

SEQ ID NO: 71607 - DNA, 600 bp, Chicken  19866894350535_1
catggacagataaacaaactgccaccaatttcctttatcctccaagctcacttgcattccttgaaactcgcagattcttcttggctttgtatcatgctctgaaggttacttggaagacgtgtggcagtgaccagagttaccagctgaccttcatgagctgtacaggtctttgcagcactgaaagtatgtgctttagtactcagaggccttgtaagaagcaccgccatgaaaagaactggtccccttctagtacttgaaggggacctacaggaaagctgaggagggtctttttataagggyatgtagagacaggacaaggggaagtggctttaaamtggagtaaggtagatttagactagatattaggaagaaattctttactgtgagggtggtgagacackgsaacaggttgcccagtgaggctgtggatgccccctctgtggaagcattcaaggccaggctggatggggctttgagtaacctggtctagagggaggtgtccctgcctaaacaggggggttgaaactagatgatcttaaaggtcccttccaacccaaaccattctatgattctataactctatgtgccaacagcacttca

SEQ ID NO: 71608 - DNA, 600 bp, Chicken  19866894350535_2
tatcctccaagctcacttgcattccttgaaactcgcagattcttcttggctttgtatcatgctctgaaggttacttggaagacgtgtggcagtgaccagagttaccagctgaccttcatgagctgtacaggtctttgcagcactgaaagtatgtgctttagtactcagaggccttgtaagaagcaccgccatgaaaagaactggtccccttctagtacttgaaggggacctacaggaaagctgaggagggtctttttataagggyatgtagagacaggacaaggggaagtggctttaaamtggagtaaggtagatttagactagatattaggaagaaattctttactgtgagggtggtgagacackgsaacaggttgcccagtgaggctgtggatgccccctctgtggaagcattcaaggccaggctggatggggctttgagtaacctggtctagagggaggtgtccctgcctaaacaggggggttgaaactagatgatcttaaaggtcccttccaacccaaaccattctatgattctataactctatgtgccaacagcacttcagggtcaaatgaagtagcaatcaattgacattcaag

SEQ ID NO: 71609 - DNA, 600 bp, Chicken  19866894350535_3
aaggttacttggaagacgtgtggcagtgaccagagttaccagctgaccttcatgagctgtacaggtctttgcagcactgaaagtatgtgctttagtactcagaggccttgtaagaagcaccgccatgaaaagaactggtccccttctagtacttgaaggggacctacaggaaagctgaggagggtctttttataagggyatgtagagacaggacaaggggaagtggctttaaamtggagtaaggtagatttagactagatattaggaagaaattctttactgtgagggtggtgagacackgsaacaggttgcccagtgaggctgtggatgccccctctgtggaagcattcaaggccaggctggatggggctttgagtaacctggtctagagggaggtgtccctgcctaaacaggggggttgaaactagatgatcttaaaggtcccttccaacccaaaccattctatgattctataactctatgtgccaacagcacttcagggtcaaatgaagtagcaatcaattgacattcaagtaaactccacatttgctgatttcttccaaatgatgtcttgggaagggtccagaactgagggaggcc

SEQ ID NO: 71610 - DNA, 600 bp, Chicken  19866894350535_4
ggttacttggaagacgtgtggcagtgaccagagttaccagctgaccttcatgagctgtacaggtctttgcagcactgaaagtatgtgctttagtactcagaggccttgtaagaagcaccgccatgaaaagaactggtccccttctagtacttgaaggggacctacaggaaagctgaggagggtctttttataagggyatgtagagacaggacaaggggaagtggctttaaamtggagtaaggtagatttagactagatattaggaagaaattctttactgtgagggtggtgagacackgsaacaggttgcccagtgaggctgtggatgccccctctgtggaagcattcaaggccaggctggatggggctttgagtaacctggtctagagggaggtgtccctgcctaaacaggggggttgaaactagatgatcttaaaggtcccttccaacccaaaccattctatgattctataactctatgtgccaacagcacttcagggtcaaatgaagtagcaatcaattgacattcaagtaaactccacatttgctgatttcttccaaatgatgtcttgggaagggtccagaactgagggaggccca

SEQ ID NO: 71611 - DNA, 599 bp, Chicken  19866894350538_1
  misc_feature (1)..(63): n is any nucleotide
nnnnnnnnnnnnnnnnnnnnnnnnnnnnnnnnnnnnnnnnnnnnnnnnnnnnnnnnnnnnnnncagttttctatctcagttatggcgctcttctcaaagacataatatgctttttaagaatgttcagatttctacttctcttcataggaatttatatttttgtagttaagatgtgagaatataaaataattgattatactatttacttttatttgttaaagtcagtatatacttgtagttaacgaaacagcaaccacttggcttgtcttctgtagcagttagaagatcactggccagatygcagtttagatttactatgtaattgagaatttttgcattccacaataggtcaaataaacagaccctcccacattcacaggagtgagtgctggagcaggtggcatgggcagaccgtcaaacacagtcctcaatcacaacaaacgctgtgtgtgttcctgcacaatgatgaccagtaaacagcttcaaggtcagatcacattaaaaatcacatgaattccaaaatcttgtctaacaggatgaaagctgagtgaggtaactaggctccttcaaggaaagaaccattaagcaaatacaaaaga

SEQ ID NO: 71612 - DNA, 501 bp, Chicken  19866894350539_1
aaaaatgtattggcttaagatggagtttttttccacatactttgaatcctggatacatcctttatttaaatatatgaaatactataagcacagttcccttcaggaagacaatatagtttttacatcttcttaggctttctgccagaaaacttggctaccttttctcacataacactgttagtctttgctctgaatgcatcatggaataacaagaacagttcgtggcctcttgctttatattcactctttctgtcttctcaatgtgatgttcatgttaacttaagcatcctttatattttycacattttgatatttgttcaataaatgttggcattttcattctacattgctttattagcaaatattgctaaaattttctgaaaattgaaaatattttgaattagattataatatattactaatgaatctcagagtttaatgaatggagatccatgcagctgtgatcctgggatgtactccatcaccttgctgctctctgtt

SEQ ID NO: 71613 - DNA, 600 bp, Chicken  19866894350545_1
agagtctatctgtttgaagatgtccacagtgtgcaggtgctaaagcaattttgggtccgcggtatgtgagattttcactctcatttcactgatatgatgtatgtgcaacatcatgcagcagatttacagctgcagggctgtgcatggtgggtgtgatcagatgtatgctgagggcctcagtcagctccagcaggcagcgatgctccagcagcatccccatttccgtgctcaactatgcgggctgtggctgggatggcaggcagagcccagagcgtgcagcagggatgaacccattggggrcagtgctgatggtttttgtgtggtaygtttggcacatgcagaatattttctagaggctgaagttgttgggagmacttcaagccagagaaggttcaaagaacagatgattttgtcctgatcccagtcatgtgtaacagtgtgggagttggattctggagggcacaggaaggacaaaggtgcacaactctttgtaacgtgtcccactagatcaatcatttccacagtgggttagagatcagaatttattgcatgagaatgtatccaggtcagcttccaggcaattgagttctcctacacctt

SEQ ID NO: 71614 - DNA, 600 bp, Chicken  19866894350545_2
cagtgtgcaggtgctaaagcaattttgggtccgcggtatgtgagattttcactctcatttcactgatatgatgtatgtgcaacatcatgcagcagatttacagctgcagggctgtgcatggtgggtgtgatcagatgtatgctgagggcctcagtcagctccagcaggcagcgatgctccagcagcatccccatttccgtgctcaactatgcgggctgtggctgggatggcaggcagagcccagagcgtgcagcagggatgaacccattggggrcagtgctgatggtttttgtgtggtaygtttggcacatgcagaatattttctagaggctgaagttgttgggagmacttcaagccagagaaggttcaaagaacagatgattttgtcctgatcccagtcatgtgtaacagtgtgggagttggattctggagggcacaggaaggacaaaggtgcacaactctttgtaacgtgtcccactagatcaatcatttccacagtgggttagagatcagaatttattgcatgagaatgtatccaggtcagcttccaggcaattgagttctcctacacctttttcctgctgtttcaaagagcccttc

SEQ ID NO: 71615 - DNA, 600 bp, Chicken  19866894350545_3
ttcactctcatttcactgatatgatgtatgtgcaacatcatgcagcagatttacagctgcagggctgtgcatggtgggtgtgatcagatgtatgctgagggcctcagtcagctccagcaggcagcgatgctccagcagcatccccatttccgtgctcaactatgcgggctgtggctgggatggcaggcagagcccagagcgtgcagcagggatgaacccattggggrcagtgctgatggtttttgtgtggtaygtttggcacatgcagaatattttctagaggctgaagttgttgggagmacttcaagccagagaaggttcaaagaacagatgattttgtcctgatcccagtcatgtgtaacagtgtgggagttggattctggagggcacaggaaggacaaaggtgcacaactctttgtaacgtgtcccactagatcaatcatttccacagtgggttagagatcagaatttattgcatgagaatgtatccaggtcagcttccaggcaattgagttctcctacacctttttcctgctgtttcaaagagcccttcagtgcatcctacctctgctttggaggtagcagcacacgatgacagtg

SEQ ID NO: 71616 - DNA, 600 bp, Chicken  19866894350545_4
gcttgctcaccgggaggaagacattcagaactttgtcaagttcacatccaaagactccatccagaagtcactttcaacgtacatggagatgctgaggaagaagaagaggtgaggagcagccagtggatgcttttgtgacccacactgcagtatctgtaggccttcacagtgatgctgtctgcagtgtgagtgatgggtgagatgctgcctgctccgaggtcaccacaaccaccccctcctgttagtccccatagagtgcctgtcaccactgctgccttcctgagggcagggagagctgtkggctcagctcacccaaggaacaaacagggagagccttggcaacactatggctcgagcctacatgtcctcgggtgtcctccctcctgtccaacaactaattgtgcaaatgatgtttgttggtaaagcctttgatgaggtgggagacgtgtgctttgttcccaagtgtgtctgcagtcgctgcttgcttcctggctcctggtggactgggagggctccgccacaagccataggatgggggcctgggcacgagctgcagccaggcactgcccttctccagagcaggctcaggagcatcccaca

SEQ ID NO: 71617 - DNA, 600 bp, Chicken  19866894350554_1
ccagctctgtcggtcctccccctcacaactgcccttcacttacattttagggtgtttatagaagcacagtaacaagacatacgttagatacatgcgtaacaatcattataaacatgcgtacaaaatatacacagatatacacttatatatgtaatatcaactgtatgcccacataaaacatagccgtgtccacagcatttattccttccctggcagttaccttttcattcaattatcctagcaaaattagacctccagataaaaggagctgttgagtgattgtcaaaaccctccatgttrtagcactaatgacaataattgaaggtagagaggaagaaagaaattaacttcttatttaaggatgtaaaatactgtctgccccctgttccacttcatcaaaaaaataaaaaaattgcacagtcacatttacagtctgtgaaagaacagtcgatttctaagtcacagattctgaaacctcattttctataaccagtaatggtctatgragaaaattacaccaaattacaggaatacggaacatccttattagaaaaatactgtaataggtaacttgggttttcttcaagccttcatgaaacc

SEQ ID NO: 71618 - DNA, 600 bp, Chicken  19866894350554_2
tccctggcagttaccttttcattcaattatcctagcaaaattagacctccagataaaaggagctgttgagtgattgtcaaaaccctccatgttrtagcactaatgacaataattgaaggtagagaggaagaaagaaattaacttcttatttaaggatgtaaaatactgtctgccccctgttccacttcatcaaaaaaataaaaaaattgcacagtcacatttacagtctgtgaaagaacagtcgatttctaagtcacagattctgaaacctcattttctataaccagtaatggtctatgragaaaattacaccaaattacaggaatacggaacatccttattagaaaaatactgtaataggtaacttgggttttcttcaagccttcatgaaaccagtttattatttgtcaaatgataatttataaatcttacctgtttagttcttgaagttgccttgggcaacagacttgctgagaaaactgatgcaaatggagaacaacacagctcaggaaaaggatttggaatcgctgggatttccaaaatcttgccgtctgtctttttcctcctgttcagtaaaatacagaataataactatcacaa

SEQ ID NO: 71619 - DNA, 600 bp, Chicken  19866894350554_3
gttttcttcaagccttcatgaaaccagtttattatttgtcaaatgataatttataaatcttacctgtttagttcttgaagttgccttgggcaacagacttgctgagaaaactgatgcaaatggagaacaacacagctcaggaaaaggatttggaatcgctgggatttccaaaatcttgccgtctgtctttttcctcctgttcagtaaaatacagaataataactatcacaaaaactgccataaaaattgcagcaatcaactacattgcgtgccatgctaaggcacgaataccccgagagytgctggttgcagcaattagcttttttgtgcagttattttttaatcagtaggctgaatctattaacatacagtgcttaactctacttgaaagcaatccaagtattcagctctgaatataaagttgtttgaatacgggtaagtctttgcagagtaagagcatggatatatttatattggctcctaaggacattggtaaatattctgttgttcctgtattcgtgccattccctatgtacaaatattacaacagcagacgcaygcagcttctcagtcacacttcccaagcacatcacaactata

SEQ ID NO: 71620 - DNA, 386 bp, Chicken  19866894350554_4
ctacattgcgtgccatgctaaggcacgaataccccgagagytgctggttgcagcaattagcttttttgtgcagttattttttaatcagtaggctgaatctattaacatacagtgcttaactctacttgaaagcaatccaagtattcagctctgaatataaagttgtttgaatacgggtaagtctttgcagagtaagagcatggatatatttatattggctcctaaggacattggtaaatattctgttgttcctgtattcgtgccattccctatgtacaaatattacaacagcagacgcaygcagcttctcagtcacacttcccaagcacatcacaactatatattaatcaaattgaaactttttttcctccagaatcaggactcaa

SEQ ID NO: 71621 - DNA, 599 bp, Chicken  19866894350557_1
  misc_feature (1)..(24): n is any nucleotide
nnnnnnnnnnnnnnnnnnnnnnnntgttgtttgtttgtttttatcctaataccttaatactgtaacaagaagccttctgggactataattatcagtgttcaagattaactatatagtcagctgattaacagatacagagacagatgaaatagatggcctattcagactgcaaaacatacactattaatgcacatgcttaccatcatactggaaaatatgtttaaagaatagtaacaaagaatgagagtaattgccttgttcaatcttcctatgatttaaaaaaaaaaattcttgcactaygaaagggtactgaacacatttatagtttgcgtttgcttgtctaaaagtctgcattcttattttctttgagagtcttcattgacaaatctttgacttctataaataatattctacatagcagtttatttgtgcagaatggtgatacagaaagattaaatatatgtgggcagaatatgtttttgtacttaaatggtggatccttttcaggcaaaatttaaattgagtaagaaacatgacttctcagcaggtttttatttatgaaaatttcaaaataaaaaactgtaaattatcacatttcc

SEQ ID NO: 71622 - DNA, 600 bp, Chicken  19866894350557_2
gcgtttgcttgtctaaaagtctgcattcttattttctttgagagtcttcattgacaaatctttgacttctataaataatattctacatagcagtttatttgtgcagaatggtgatacagaaagattaaatatatgtgggcagaatatgtttttgtacttaaatggtggatccttttcaggcaaaatttaaattgagtaagaaacatgacttctcagcaggtttttatttatgaaaatttcaaaataaaaaactgtaaattatcacatttcctttctgcatctcatctcatgaattaattwatttgataacgtkaaagcatctgaacaattcctttcttttcataacattagaagatgctccaaagtttaagtaaggaaataaactgtgaaaaatttatgtttttacagttgcacttctaatgtgccagaaaattacacttactacagcatgattggctggccacatctacctgaagtcttattcacaagtagatctcatgaaattgaatgtgtataaatycatggggccggatgatatccatcctggggttttgaaagagatggctgatgtggttcccaagccactctccatgatatttg

SEQ ID NO: 71623 - DNA, 600 bp, Chicken  19866894350557_3
taaaagtctgcattcttattttctttgagagtcttcattgacaaatctttgacttctataaataatattctacatagcagtttatttgtgcagaatggtgatacagaaagattaaatatatgtgggcagaatatgtttttgtacttaaatggtggatccttttcaggcaaaatttaaattgagtaagaaacatgacttctcagcaggtttttatttatgaaaatttcaaaataaaaaactgtaaattatcacatttcctttctgcatctcatctcatgaattaattwatttgataacgtkaaagcatctgaacaattcctttcttttcataacattagaagatgctccaaagtttaagtaaggaaataaactgtgaaaaatttatgtttttacagttgcacttctaatgtgccagaaaattacacttactacagcatgattggctggccacatctacctgaagtcttattcacaagtagatctcatgaaattgaatgtgtataaatycatggggccggatgatatccatcctggggttttgaaagagatggctgatgtggttcccaagccactctccatgatatttgaaaaatcatgact

SEQ ID NO: 71624 - DNA, 600 bp, Chicken  19866894350557_4
tttttatttatgaaaatttcaaaataaaaaactgtaaattatcacatttcctttctgcatctcatctcatgaattaattwatttgataacgtkaaagcatctgaacaattcctttcttttcataacattagaagatgctccaaagtttaagtaaggaaataaactgtgaaaaatttatgtttttacagttgcacttctaatgtgccagaaaattacacttactacagcatgattggctggccacatctacctgaagtcttattcacaagtagatctcatgaaattgaatgtgtataaatycatggggccggatgatatccatcctggggttttgaaagagatggctgatgtggttcccaagccactctccatgatatttgaaaaatcatgactgtctggtgaagtctccggtgactggaagatggaaaacattactcctatttttaagaaaggagaaaggaagactcagggaactacagattggrtcggggcaaccccaggtatttctacaagctgggggaagatcttgagagcagccytgcagagaaggacttgggggtcctggtagatgagaagctggacatgagccagcagtgtgag

SEQ ID NO: 71625 - DNA, 600 bp, Chicken  19866894350557_5
cagttgcacttctaatgtgccagaaaattacacttactacagcatgattggctggccacatctacctgaagtcttattcacaagtagatctcatgaaattgaatgtgtataaatycatggggccggatgatatccatcctggggttttgaaagagatggctgatgtggttcccaagccactctccatgatatttgaaaaatcatgactgtctggtgaagtctccggtgactggaagatggaaaacattactcctatttttaagaaaggagaaaggaagactcagggaactacagattggrtcggggcaaccccaggtatttctacaagctgggggaagatcttgagagcagccytgcagagaaggacttgggggtcctggtagatgagaagctggacatgagccagcagtgtgagcttgcagcccagaaggccaactgggctgcattaaaaagggggtggccagcagggggagggaggtgattgtccctctctactcggctcttgtgacaccccatctggagtactgtgtccaggcctggggcccccagtacaagaaagacgcagagctcttggagcgggtccagagaagggctacaaag

SEQ ID NO: 71626 - DNA, 600 bp, Chicken  19866894350557_6
gccacatctacctgaagtcttattcacaagtagatctcatgaaattgaatgtgtataaatycatggggccggatgatatccatcctggggttttgaaagagatggctgatgtggttcccaagccactctccatgatatttgaaaaatcatgactgtctggtgaagtctccggtgactggaagatggaaaacattactcctatttttaagaaaggagaaaggaagactcagggaactacagattggrtcggggcaaccccaggtatttctacaagctgggggaagatcttgagagcagccytgcagagaaggacttgggggtcctggtagatgagaagctggacatgagccagcagtgtgagcttgcagcccagaaggccaactgggctgcattaaaaagggggtggccagcagggggagggaggtgattgtccctctctactcggctcttgtgacaccccatctggagtactgtgtccaggcctggggcccccagtacaagaaagacgcagagctcttggagcgggtccagagaagggctacaaagatgatcagagggctggagtacctctcctatgaggaaaggttaagcatacggggc

SEQ ID NO: 71627 - DNA, 600 bp, Chicken  19866894350562_1
tggatgaggcatctgagcacataggcatacaatggatggagtggagcagagcatgtcctctggagaaagacttgttgcctctcggtgtctttcttgggccaggcctggctgcatgccaggcagcacagagggaaggttctgtttctggtatcgctttgtgttcatatgatctcttatcgataaacaatgacaaatcattaaataaactctgaatggcctcctgtgtcctatatttgaaattgcaacaatatctaaaagtaatataatagtcacacaagaaaaggagccaacaaatccaarccaacacaaaagctggttcaagaagcactttcaagctgcgtggttgatttatctcatttttcattacagtaacaaatttcctctctgtgttaacttacccctgcagattttctcacatgaatggcaaaaacatcctaaccactttttgtgagggaattgtctttatctgcaagtggaaatgccctgaggtttgaagaagcttcagaaattgcacttgtccaaaaacttacacagtttttgtatttatgtgttgttgttgttttttaaagttgtcatagtattcttcaaaaaaatttttgt

SEQ ID NO: 71628 - DNA, 600 bp, Chicken  19866894350562_2
aatgttttcatgtgcttacatgttattcaaacagataaatacagatgcctacctataaaggtgctagagcctgggctactctcagatgtcctcttggtgatgataagcaagagacattttctctttacacatttgatgtggaaaatgcatgtttcacattctgatataggccttggagcaattatttgttgccttcaaatttgattgttttaactgagttactttttgtgaccaccataacaattaagggaggacattgcataagtaaagacttgtacaagatcctagcacaatatttcygtttatgactgctaagtggggtggttttatctgatgatgctagctttcatttgcagcatctttatggctttgcaaccatttatccttctgcttcaaacactgtacaaacagctcttgatccaccgtgattcagtaccgcctggacttggtaagttttcaggcatccatcaatgtctgcctattctctcacatggagaaggaagcagtagctatttagttatgtagcagcaatctcccatactgattttttttactttgtgtagggtatattactactcacaggattattttttttttaat

SEQ ID NO: 71629 - DNA, 600 bp, Chicken  19866894350564_1
aaaacactgattctcaaagtcaggagaacttaaaagtttaaaaaaaaagtccacaattcattaactgagcctttctgaactgaataacaaacacagaattcctctgctgcgtacaaagtcattgcagtgcaaacaaatctgtttaaatgaacactgatttctataaccccatagtccacaattaacttgaaaccaaacagttcccacaagccacaaaacaaaggaactagtgatggggaattaaatttttaaacacataggattatactacccttaaaagaacttcatgctaacatgccyttctacatgaaatagcgaaagtgattatttcctatgggtcaaactaaagtgtaatgtttttcttgtaaagcagagattcccttttattttgattaaggttacagcaccccctccctgcgcttagagaacaagctgacccacagagtattttccatgaagctacacctaagaattaggccatctgaaaaaaaacaagtcatcctrcatcacttgacagtcatcaccygtcagaaaaaagtcatcccaatatctcctgtgcgtcctgaacattctttgctagagaaaagtgtggacctttca

SEQ ID NO: 71630 - DNA, 541 bp, Chicken  19866894350564_2
cacaagccacaaaacaaaggaactagtgatggggaattaaatttttaaacacataggattatactacccttaaaagaacttcatgctaacatgccyttctacatgaaatagcgaaagtgattatttcctatgggtcaaactaaagtgtaatgtttttcttgtaaagcagagattcccttttattttgattaaggttacagcaccccctccctgcgcttagagaacaagctgacccacagagtattttccatgaagctacacctaagaattaggccatctgaaaaaaaacaagtcatcctrcatcacttgacagtcatcaccygtcagaaaaaagtcatcccaatatctcctgtgcgtcctgaacattctttgctagagaaaagtgtggacctttcagcgttccatttcatggggataggaaatcccacatatttcaaaaacaaatcaaaaacagactacgttaatttaaatttgtagtttaaagcaacttttatgtggagttgtgaatgacgaagacatcgaaatgaaacctctctctcat

SEQ ID NO: 71631 - DNA, 519 bp, Chicken  19866894350564_3
ctagtgatggggaattaaatttttaaacacataggattatactacccttaaaagaacttcatgctaacatgccyttctacatgaaatagcgaaagtgattatttcctatgggtcaaactaaagtgtaatgtttttcttgtaaagcagagattcccttttattttgattaaggttacagcaccccctccctgcgcttagagaacaagctgacccacagagtattttccatgaagctacacctaagaattaggccatctgaaaaaaaacaagtcatcctrcatcacttgacagtcatcaccygtcagaaaaaagtcatcccaatatctcctgtgcgtcctgaacattctttgctagagaaaagtgtggacctttcagcgttccatttcatggggataggaaatcccacatatttcaaaaacaaatcaaaaacagactacgttaatttaaatttgtagtttaaagcaacttttatgtggagttgtgaatgacgaagacatcgaaatgaaacctctctctcat

SEQ ID NO: 71632 - DNA, 600 bp, Chicken  19866894350566_1
cagagctacgtgctggctgagcagcatgaaccttgtcttgtaacgcagtcattgtgatagcaaagctaacaatgtgacttactggttgtatttttatttcagagcacaaagtaatcattgttggtctggataatgcaggaaaaactaccattctttatcaattgtaagtatgagctgccagtgatgtttcatgtgttttgaggtgtgtgttgtgtgcactgctttggcttgttttgactcctttctttttacttggagatcactgtggaaattatgggataggtgacgctgggtcagagygtgtgttcagagttcagaaatgtctgtgttctgcctgatgtgtgagtaaggttttgttgagaacttctgtttatcaaattacatttctattacacttgatcacagctgcctttggtgtcacagcacaggttgtctgccagctccataaaatagggttacactgagggttagccacagcataatgctgctgtgctggtcagcatgtaactgacatcgtttgtgagctgcaaagcaccaaagcctgacctctccctgcctcaggttgtgtcctgcccaccttgatggcacagggagggcaga

SEQ ID NO: 71633 - DNA, 500 bp, Chicken  19866894350586_1
aataggtcaggttggtgtagcacaagtgccccttctcacacttcagtattatttttattcaaactgttaaataataatacttttaaaagaaacaaagcccacttcaggagaacattgagtcctgaagtaccccaaacaataaccctgctccaaattcctgctctgtgtgtggtgaagagaccagcacaagcatgggactttctattctgaggctgagctatagccaccgatgagaaatggagcaagaagggtggaagggagtctgtaacaacacagtggcaaggctgctctctaaagccmgccctttatataacccaggatgtcagcaacagttcagctcaggtttatttttacattccttcgtggttgtggctgacagacagccccagggcttgcaccctgccttctagggcagcccggtggcaccgtgaccttctctgcaccctgccaccagcatgtccccaccccagggactgcagccgggccccagcagccgctca

SEQ ID NO: 71634 - DNA, 600 bp, Chicken  19866894350591_1
ggtgacccagaaaggcggggggctcagagatgcagcaagtctagatctgcttgtaaatacttgcatgcatcccagctgcctgcatcgttaggtgcacaggtacaccggcagcacatgttcgtgccatacagcttccttctgaacagactggaggtaactgtgccctccagggctgcagttcagtggtgtccagtgcctcaaactcacccctgatgcagctgggagcagggcacgctcaggaaaggaaggccggggctctcagagcctatttgctgggctccatctcagcttctgcttgcrcaagtatgagaggcacaaggagagaaaagtgggagagccagtgttgcataatgatgaagttgcaccaaaggtacgtgcagctgtgagtagctgaagggggttactctgctaccagaaagttctgtctgtgtcaccatgagggaaagcatttacatgctgctggcctccsgagtgctcctgaggaaccgttgttcagatgccaaaagaaggaagccagactgtgttatttcctttttccctacgtgacagcttctgaactggaatgaatctgcaayggtatcaatgcagagaacaaatgga

SEQ ID NO: 71635 - DNA, 600 bp, Chicken  19866894350591_2
gggctgcagttcagtggtgtccagtgcctcaaactcacccctgatgcagctgggagcagggcacgctcaggaaaggaaggccggggctctcagagcctatttgctgggctccatctcagcttctgcttgcrcaagtatgagaggcacaaggagagaaaagtgggagagccagtgttgcataatgatgaagttgcaccaaaggtacgtgcagctgtgagtagctgaagggggttactctgctaccagaaagttctgtctgtgtcaccatgagggaaagcatttacatgctgctggcctccsgagtgctcctgaggaaccgttgttcagatgccaaaagaaggaagccagactgtgttatttcctttttccctacgtgacagcttctgaactggaatgaatctgcaayggtatcaatgcagagaacaaatggactttgaatcaaattgtcaaataaaaataattgtcctcgcttttacctgcatatctctccygtgagctccctgcccttttgttgactgctcaggacacgctgttcttctctgagggagagcaacagtttactgaactcttagtttagctggctgacatgctgatagaaat

SEQ ID NO: 71636 - DNA, 600 bp, Chicken  19866894350591_3
ggctccatctcagcttctgcttgcrcaagtatgagaggcacaaggagagaaaagtgggagagccagtgttgcataatgatgaagttgcaccaaaggtacgtgcagctgtgagtagctgaagggggttactctgctaccagaaagttctgtctgtgtcaccatgagggaaagcatttacatgctgctggcctccsgagtgctcctgaggaaccgttgttcagatgccaaaagaaggaagccagactgtgttatttcctttttccctacgtgacagcttctgaactggaatgaatctgcaayggtatcaatgcagagaacaaatggactttgaatcaaattgtcaaataaaaataattgtcctcgcttttacctgcatatctctccygtgagctccctgcccttttgttgactgctcaggacacgctgttcttctctgagggagagcaacagtttactgaactcttagtttagctggctgacatgctgatagaaatgagtgcagaaggcagctgggagcacaggcctgtgggagtgatcactgtacctgcatgtttctcacctggttccaagggcagattacatacaactgcacctcccatc

SEQ ID NO: 71637 - DNA, 600 bp, Chicken  19866894350591_4
tgcaccaaaggtacgtgcagctgtgagtagctgaagggggttactctgctaccagaaagttctgtctgtgtcaccatgagggaaagcatttacatgctgctggcctccsgagtgctcctgaggaaccgttgttcagatgccaaaagaaggaagccagactgtgttatttcctttttccctacgtgacagcttctgaactggaatgaatctgcaayggtatcaatgcagagaacaaatggactttgaatcaaattgtcaaataaaaataattgtcctcgcttttacctgcatatctctccygtgagctccctgcccttttgttgactgctcaggacacgctgttcttctctgagggagagcaacagtttactgaactcttagtttagctggctgacatgctgatagaaatgagtgcagaaggcagctgggagcacaggcctgtgggagtgatcactgtacctgcatgtttctcacctggttccaagggcagattacatacaactgcacctcccatccggggaagtggtccgttcccctcatcttccacccgccttcaaacccaaaggtagcaaagcatacatgcacgagcccctcctagtg

SEQ ID NO: 71638 - DNA, 508 bp, Chicken  19866894350592_1
ttccttttttgcttccaactgatgtcagatgtttcccttgcttctgttaattccaggttcagttgctgtatgctttaaattcttcagctcctgagggtactagaagaggcacccagcctttaagcagactgttttagtagagaagcaagtgctgctgttttacattttggtggtgaacattgaaatgacagtgtccaatctgtccacaaagcagccatagtccacaggacggagcatcaacactgcagtaatgaggaagttttcaaagaagctgaggtgatctgaagctcaatgaaaaarcgttagtcatacatgaaatgttttctacctggaaacttcagaatcaacaggttagaaatctagaaagcaagaccttgaagcaaattgtgtttatttccaagtagtgacctctgtgtatcgttagtttagtctcaagctttctagcagccatttaatacagaaaagctcggtggacatttactctttgtgcatatattcacttttgcag

SEQ ID NO: 71639 - DNA, 534 bp, Chicken  19866894350595_1
gtgttctatacaaaagtgattcttcattatttattagtgacaaatgcattatttctttagaatttgtgtctgcggatatcctcgccagcaagtgagaaagtataagggagtaaacagcaggattccagtttcatctgaattcatggtgcaaatgctcacagggatttattatgccttgtaagtgagagtggttttttgtttttgttttttaaacattcacttgaaaaaagaaataccagcttaatttatatgttcatttcggcatgcaacctttggagtgttttattttcaaatggaaawacttgttagattacattacctgtgtgatactggggaatgaaggctagaataacacttaatagtcataactgatggtgtgaaaaaatacctgaaaaacctttcccagcttttgtctgctgtccacatttttgacatcaatctagttaaggaaaaaggtcttagcattctttctctaaaatattgaatgtcatccaccctttgatagtgtgttgatgtgtaaagctctttcattaa

SEQ ID NO: 71640 - DNA, 600 bp, Chicken  19866894350596_1
ctgcaggtgaacgttattgtttatttgcacatgaaaacagcaacgtgtgatatcatccctttgaggttcagaatgttcttaagttaccttataaatgatcgtgtgctacgaacataggtggccttcatggtagtgctctgtacatcggcctcgcttgtgagtgcagtcagtgccacctgcacaaaaaaacccagcaagaacaaaatccaaggaacagaagtttttttttaatggacttactgtaggaatacgggtgggaaggaaccgattgcgaaggagcacaattaatttttacagaayttattcatagcgtaaataaaaataagttcattacaggcagatcgttgctgctaattgtaaattgctctgtagtcatcatgcagataaaactgcagatctgcctgggatcaaagtcagcaagctttggtctggaatcagaagtcaacttcggttgtcctacttgtagagataccctaaaacgaaatgaatcaacacctttctcagcatgagaaagaagtttcaaaggctcaggatagcttccattctgtttttcacctctgcctcctggtgctcgtgtcgcttcatggctgtgcaggcgcc

SEQ ID NO: 71641 - DNA, 600 bp, Chicken  19866894350597_1
cctggcataatgggttcatctttgcatttttgcattctatagatataattttctctcttctgtgattcatgttttcttattcatgtaactgccattcctcgtgctctatattcttccaagataaatgatttcatgcagtggttcttgaaacactacattttaagcattaaattaacccatgggcccatccatggccttgggcagctctagtgccactcgcagctctggatgcagtgctgtagatggggtctcatgagggcagagctgagggggacaatctcttccctgccccactgctgycactctcttgatgcagcccaggacactgttggccttccaggctgtgagtgcacactgctgcctcttgtccagctttgtaccaccagatcccccaagtcccagtgctgctctcagtgagttcttctcccatctgcactcatatctgggattgccctgacccaagtgtagcgccttgcacttggccttgttaaacttcattagattctcatgtgcccacttcctgagtgtgccctggtccctctggatggcatcccttccttctgtcatgccaactgcatcactcagcttggtgtcagcagc

SEQ ID NO: 71642 - DNA, 600 bp, Chicken  19866894350597_2
cagactgtgtttttgcatgttcacagtgtgtttattgtttattacaggctctgtcactttgccaaggaggccatttgcaagcccataattggtagatactttatagagcctctcttgtaggtgggtattacattagcagcactgcaggcctctagcagggtcaccctttgtgaggcggatagcacatgtatgccagcagctctcctgtttcacatttgagagttctctgttctctgtatgcagacaccccttccatttctttaaattccagccttttctttctgaccactaccttaactycttattaatccaaatgggaattaattggtgtggggttttttctttgtttcctatttatccttttggtctctgcttctaatcctgtgaagcttcaagactcccataggcttcctgctctcagggctgctcttttcagcattttcatgactagtagtgttgtctttacattgttatgtttcttcaccatttttacctggtgctttcttcaagcacatgctttttttctctgtttagctatcactgctaaagagcagctcttacactgataccacagacctgcttcccatgcaccacttgagt

SEQ ID NO: 71643 - DNA, 600 bp, Chicken  19866894350597_3
acctcagctctacccgtagccattccccatccctgcagcatcactgctgctgaagaatgaaatgaataatctctgtgtgcactactaaggagaggtgaccataatgtaatgggctgatgtaacctctggtcctctctttattcttcacctatttaaatacacacttatcgttctgcccaacagcactggacagcttcacatctaattgggctttggtcgtgtccaatttttccctgcaatgttgagcagcatctcagtgtttctcccatatcagccggtcccactcccagtagccagccwctttctttttctgcctaacctctagaaggagatcccagcttagctgaaggcacagcttttgctttaccaactaaactgtcctcatgccagcccacggggccttgcaccactcccatttccaccgttccccacccaacatgggcagaggcatcgagcagcagcgtggtgctgggctgcctgcagggagaaggagggcagagcccagggctgtgcagtgctggggctgcagcccggccctgcactgtgctgccctgcaggtgctctgagccagggagtgcccggccccatctgcagacacac

SEQ ID NO: 71644 - DNA, 600 bp, Chicken  19866894350598_1
agctggtattagaagcagtgtcacctgaaggaaagtactgtaacaaaaccttctggaagagtaagttgatatttattttcagaagctctaaataaattgattttatccactgacactcacataaccacattctcagaaactctaggctgaatgtgcccaagtgttctgctaggataacttttaccacataggaatatgaaacgtcccaggtattgagtactagtcacattccagagctcttgtttgatgatactgaggtaatgtgggagctgatattttgtacacattagaagtgaacarttattatggggttgttctttgattcagaatcttgcattagtgtccttaaatcttaagcaaggttactgctcattatctttcttgtctgtagtatatagttggaatacctatatatatctgtgtagctgtatcttgttttctttatgggctaacaagaaaaggaatgacatttgtgatagaagatgaccttgatgccattctcctgctgtcagtgtaggatctcccccgatgaatcatttgtgctatggtctttccagagtgcagactttgtggtcttgacatgaacaacatatttctcat

SEQ ID NO: 71645 - DNA, 600 bp, Chicken  19866894350599_1
gctgcttttaacattatacagcattaagtttactgaaatgatgctaaatgaattagaaatggaaacagtgaggctccatcatgacagcgctgtacctgatttaggatgcagatgtagtcagcatgcagttcatttcctatggtgctctgctgcttgaggtatctgtacctaaaaaaaaaataataaactaaaacaacaacaacaagaaaaaacccacagcattttatttcgattcagtttttcatcatttttattaataatacataagatgctctcatatgctttagggtaaatgagaakaagaaaaattgtttattgacatatcttcagattttgttccagagcagtgaattaaaaargtgcagcataactgttactttaccattcaggaactgcttctgattgctaataacctttcatgtttttattaccacacatcttagtgggactttccaaatatgctctgtggcatacttttttccatttgactctgaagagcaattaggtcagcttattgtgaattatgctctccaggaggcattactgagaaatctgaagtctcacatatgtggaacaatcttcagtatcacaacaatcaca

SEQ ID NO: 71646 - DNA, 600 bp, Chicken  19866894350599_2
tggaaacagtgaggctccatcatgacagcgctgtacctgatttaggatgcagatgtagtcagcatgcagttcatttcctatggtgctctgctgcttgaggtatctgtacctaaaaaaaaaataataaactaaaacaacaacaacaagaaaaaacccacagcattttatttcgattcagtttttcatcatttttattaataatacataagatgctctcatatgctttagggtaaatgagaakaagaaaaattgtttattgacatatcttcagattttgttccagagcagtgaattaaaaargtgcagcataactgttactttaccattcaggaactgcttctgattgctaataacctttcatgtttttattaccacacatcttagtgggactttccaaatatgctctgtggcatacttttttccatttgactctgaagagcaattaggtcagcttattgtgaattatgctctccaggaggcattactgagaaatctgaagtctcacatatgtggaacaatcttcagtatcacaacaatcacagtacattgcatttttaataacttaggtaagggaaagcctacataaaaaccattgggttt

SEQ ID NO: 71647 - DNA, 600 bp, Chicken  19866894350604_1
aacacatttttctcaaagactactgatcatcactgaagagaaagcctgaaaagtctttatttcaaagccctcacgtggctctgaaatatatctgaagtaaaacacaggcttgggttggccttctgcaaagaagagaatttcaccctgagttctgcttagctttgaaaaatgacttaaaatagtaaccttgttcaaaaatctttttctgttaacacaagttacactggttttcttatagaaacaaaatattttttcctctgtttattctaaagctaacatagttactgggtttctgatctkaaaacccctttagcccatgatgtgtcyagcttttggtgaaacaattaagagcgggagctaatcttagcactaaaaatatgcttgtatagatttattccttgtatcttaaaatatctctgctccctcaaaaatgccaggaagaccttgagcagctggttcctagggtgcagtctccagcaggaaaaccagtgtgaccttaggagaaaggtttgagtctctatattagtatttgaatattattaaaatattaactttaaaaagccatgctgttcactctagatagggggatcactgtgagtc

SEQ ID NO: 71648 - DNA, 600 bp, Chicken  19866894350604_2
catcactgaagagaaagcctgaaaagtctttatttcaaagccctcacgtggctctgaaatatatctgaagtaaaacacaggcttgggttggccttctgcaaagaagagaatttcaccctgagttctgcttagctttgaaaaatgacttaaaatagtaaccttgttcaaaaatctttttctgttaacacaagttacactggttttcttatagaaacaaaatattttttcctctgtttattctaaagctaacatagttactgggtttctgatctkaaaacccctttagcccatgatgtgtcyagcttttggtgaaacaattaagagcgggagctaatcttagcactaaaaatatgcttgtatagatttattccttgtatcttaaaatatctctgctccctcaaaaatgccaggaagaccttgagcagctggttcctagggtgcagtctccagcaggaaaaccagtgtgaccttaggagaaaggtttgagtctctatattagtatttgaatattattaaaatattaactttaaaaagccatgctgttcactctagatagggggatcactgtgagtcatatgaaatccccaatgtcctttcagt

SEQ ID NO: 71649 - DNA, 600 bp, Chicken  19866894350605_1
aggttagaaattagttttattagctcaatgagccccttttctttacatccatctggaagaataattccctgtcactgattaactggttttgttgatgggaataaatctgatgccttcaagaaaggattattaattaagcttctttaaaatgtctgggtgacttttctaactggtaaaggctgctggatttttattttttaaatagcaatagttgtacatgattgcagtacactggaaacaaatgctttttgtgatttgtatgaatggataacttgttctgccgagaagaaactaatgcaygagctaccttgcagctggtgactgaggagacctaaatagctaaacagaagcaccaaggtttgggtaagttctgcacaaatactgccagattatctagtgaaagtctctatgtgagaaaagaattacaaatcaaggtattcagakctctcaaaaatgaggttgaatcataagttctgagtaaggttaaataaagaagttaacaaataagagatttttctccttagtaaaaccaagaaagcctgttttagcagtttcttcctttctccattccagctgagcattgttgtacaaggtctacca

SEQ ID NO: 71650 - DNA, 600 bp, Chicken  19866894350605_2
taaaatgtctgggtgacttttctaactggtaaaggctgctggatttttattttttaaatagcaatagttgtacatgattgcagtacactggaaacaaatgctttttgtgatttgtatgaatggataacttgttctgccgagaagaaactaatgcaygagctaccttgcagctggtgactgaggagacctaaatagctaaacagaagcaccaaggtttgggtaagttctgcacaaatactgccagattatctagtgaaagtctctatgtgagaaaagaattacaaatcaaggtattcagakctctcaaaaatgaggttgaatcataagttctgagtaaggttaaataaagaagttaacaaataagagatttttctccttagtaaaaccaagaaagcctgttttagcagtttcttcctttctccattccagctgagcattgttgtacaaggtctaccaattcagaaagtaaaatgttagcttatatgttagcttactcttgaacagagtcctgatagttacaacagctttaaagctcataatcccatagcttggtagtaggttttatttatttatttattcagaagaatagcatgatctact

SEQ ID NO: 71651 - DNA, 600 bp, Chicken  19866894350606_1
ctggtctctattcttgaaaaacttttgaatctcgagcaggacctgtggctcactgatgtatgcatctgctctctgaaacacttgaaccagtgattttttttttctttctatagttcactaaactcttttgtggtagaggcagcgtagtccaatgtggacatgcaggcctgtgccacccttcagggttaggatggaattgaaaaatggggcttgtgtgttgaagcaattggtcttttacatgttacaggtgataagagttaaatttttgataaggctgccctttgtagacggaggcagcaraggtctgacaattctgaatgtctatagttagaaattcatgtgttgcaccaacaggaaacatttagcttcctgccttcttacctttgaatcaagtctgttaaggctgatttgcttttagactacctggtttactgcacagggaaattctcagggtattctcagtcaactagataagataaagtgggatttgaagttgtgtagttcatgtgtttacctcttttccccttctgttttctttaaattatggttagcccagtgttgcaaaagttttcttaaaagatgaaataaaaaatgcttatt

SEQ ID NO: 71652 - DNA, 600 bp, Chicken  19866894350606_2
ttgaaaaatggggcttgtgtgttgaagcaattggtcttttacatgttacaggtgataagagttaaatttttgataaggctgccctttgtagacggaggcagcaraggtctgacaattctgaatgtctatagttagaaattcatgtgttgcaccaacaggaaacatttagcttcctgccttcttacctttgaatcaagtctgttaaggctgatttgcttttagactacctggtttactgcacagggaaattctcagggtattctcagtcaactagataagataaagtgggatttgaagttrtgtagttcatgtgtttacctcttttccccttctgttttctttaaattatggttagcccagtgttgcaaaagttttcttaaaagatgaaataaaaaatgcttattttattatcagtgtctgcctttctttaaatcatatgtattccctgtgtaagttttctttctctgatcatgcatatacccaggtgtccctgctgaggaggaggaggaggaagaggaagaatttgactgggaaatagagcagaccctttataaagaagctgcagaaggccctgtaccacttcagtgctactatggattt

SEQ ID NO: 71653 - DNA, 599 bp, Chicken  19866894350607_1
  misc_feature (1)..(166): n is any nucleotide
nnnnnnnnnnnnnnnnnnnnnnnnnnnnnnnnnnnnnnnnnnnnnnnnnnnnnnnnnnnnnnnnnnnnnnnnnnnnnnnnnnnnnnnnnnnnnnnnnnnnnnnnnnnnnnnnnnnnnnnnnnnnnnnnnnnnnnnnnnnnnnnnnnnnnnnnnnnnnnnnnnnnnntttgttacttaattctttatctagctaatcaagctcttctgtagctcacactgtatggaccttgtttccttcaaggcatttttcacatcacattcctcagctctcctaagtacagatgcatgttagaatcttawcccagctgatcctgcttggactgagggttaagttcaggaagacttagtagcataaatctttgtatctgactaacaagctgaaatcacaataatgacacactgctgcttaagaaataatggactaggtgatcaaaagaatttcttctggccttttaatccttttactgattcatacagacatcaaagtttaatgtagtacacagactcttccatgaacctcttaattatttacacttccagcagaactttaaccaaacttttaataggtatgggttgattaagccttagtcaagttgaga

SEQ ID NO: 71654 - DNA, 599 bp, Chicken  19866894350611_1
  misc_feature (1)..(2): n is any nucleotide
nnacagacatccctcacctgtcagccattcttcttttcaaagggaactctggcaggttggttacagtctcaaacatcattttttaaatcctaagtacttaggttaaagttatcatttgatacagattatttttcagaatgctgctgaaaatttccgattagatatgaaatttcaagagccccgtttcacctgcagtcacgattgaatttcctccccgccactttttaaatcctgcagaaaatgcacattatccccaccactcagctggaaatggagtcccccacaagcccacaaacacaygtagccttagcacagctgtttccaagtacacatcctacagtttctgtcctaaggtgaattaccaaaaccagggtggctcttaagctaaaaggagttyctcactgcgctgtgaacagacatcctatctatatgttatcagaatagaagttaaaaaaatacaaatacctaaaatatctaagtaatctttatcaaaggaaaatctgtgctattttaatggcatactcattacacagaaggtatcacaatttattttaagctcagtttttatcatgtactttacagtaagacctgcaagccac

SEQ ID NO: 71655 - DNA, 600 bp, Chicken  19866894350611_2
ttaggttaaagttatcatttgatacagattatttttcagaatgctgctgaaaatttccgattagatatgaaatttcaagagccccgtttcacctgcagtcacgattgaatttcctccccgccactttttaaatcctgcagaaaatgcacattatccccaccactcagctggaaatggagtcccccacaagcccacaaacacaygtagccttagcacagctgtttccaagtacacatcctacagtttctgtcctaaggtgaattaccaaaaccagggtggctcttaagctaaaaggagttyctcactgcgctgtgaacagacatcctatctatatgttatcagaatagaagttaaaaaaatacaaatacctaaaatatctaagtaatctttatcaaaggaaaatctgtgctattttaatggcatactcattacacagaaggtatcacaatttattttaagctcagtttttatcatgtactttacagtaagacctgcaagccacatctgacaatgcttgttttgtatcccccacctaagtagaactcttacccaagctaagatgatggctgttccagaaataatgtcagaattcggctgaag

SEQ ID NO: 71656 - DNA, 600 bp, Chicken  19866894350616_1
ttgctagcaaagaaactaagataccttgcactcatcagacagctagcctggctgacttttattggaaaaatatcaggaaagtttttctaaatatgctcctactagaagatactatgcatgagcttaagcatgacaaaattagtcactggataaagtaaaaacaaaaaaggaacttcagtaatcagagctatgattgtaacacaaaacctactgcttagcaatttctacagagaaaaaagcaacataaacaaaaattgtcacttcttagttgcaaggtttgaggtttcgtcaaggttcaaytaccatcaaatgtaatggggtacctgactgtagaacagtacagtaaagcctctcaagttataaagtataaaactagtccattcagactaaaaattaagctattagtgaaattaatagacctcctgctgttaaaaataaacacggtctccgccatacagacttcatgttgttatactcctacagtttggggagcaaagtctgaacaacattaaagatttaccttcagatgatatatctgctcttcggtatctaaatctatacattttgttgatttctttacagacatgacagaaagtccaa

SEQ ID NO: 71657 - DNA, 600 bp, Chicken  19866894350617_1
aagtctggtttgcagtcacacatgaaaacagaatcaggaagaacaagatcattttctctctatttaaggtagcttcaaaggacttgacaaaagacaaaacccactttagcaaatacagcaatatagagatataaaagaaatagttttgtagactcatgaagagacagaaacaccaaaaagcaagaaaaagaccgtcactcacccaaacacctgtagggaaccacaatatgtgggtgaccattgcactgcttccatcctctcttgcaccaattctggattgtaaccggctggttggcttcracaacattggtaatttgcaattcagggtaaacctaatattaaaaatagaaagaagaaattgaaaaatgttattgtaaatatgcactctgggtcatgcaaaacggttatcatagaaccatacttcattttctaacctctccttcttctgctgtatattatatttcgatttatatcatagtgtgagtacagatgtttacctgaaaaggtggttttttagtgatgaataaatatacatgcagctgccagttcagaatgcaatggtagtaacagctggctgtcaaaatataacttggccacata

SEQ ID NO: 71658 - DNA, 600 bp, Chicken  19866894350619_1
aggcagtatggcactcacacagcagcactttggccccctgtcttgaagaatattcagatttcactgttatcgcagcgtattgcgtgtcctgctttgtgttactgcacactcaaaatatcacccaagcttgtaattggtgtgtgtcagggtatttctttacacttaaacaagcacaggtcagattttcaaagtgtgtcaatatgtcaggctggctgcatatgagtcaatgggaccgagttcctttatactggctaaggatttggtcctgcgtatttaaaaatagactaatgagggaaggayccatccacctactgaaaggttttatgacctacttctgcagctctcctcttcgttgttcagggaagctctgctgggtttctgcttcttaatctccttggcctcccctaaatcgctcacaaaagcaaattccaccggagagagagacagctgtttctgcatatattaataatatgcagctctataaattattaataaaagttaccaatgactttgagttatggtgcagtaattcacacttagctgtttagatggctctcagccttcatcctggtgttccattatgcacctggtrtgaatgat

SEQ ID NO: 71659 - DNA, 436 bp, Chicken  19866894350619_2
ggaaggayccatccacctactgaaaggttttatgacctacttctgcagctctcctcttcgttgttcagggaagctctgctgggtttctgcttcttaatctccttggcctcccctaaatcgctcacaaaagcaaattccaccggagagagagacagctgtttctgcatatattaataatatgcagctctataaattattaataaaagttaccaatgactttgagttatggtgcagtaattcacacttagctgtttagatggctctcagccttcatcctggtgttccattatgcacctggtrtgaatgattacgttggaattcagattgttgtttctagttgctgaaatttagcgctgtgcatactggactggatcacagagatgattatggcatgccagaaaagctctgcacaccacatggatggatgcaatcaaaa

SEQ ID NO: 71660 - DNA, 600 bp, Chicken  19866894350630_1
gacaagggacaaattcattaataaattgaaaaagacagcactagagatcacatcattaattaaaagaaagaaggcaccagagaccacacatcattgcccagctaagaaaatgctttttaccagttctttgtgttaacttctgttggctcaaaccataagccagcccctggttggccctaaacgcacagaaagctggtcaggcatacagctgtgttcctatgagcttctccatgaactgctgagctacccgtgttctgatgtgtcactaccaagcaggtccccagtaagacagtttactawgtgctgcctctatgtaaaacaacactcacttgcatttctgttatttctaataaagaaagtctgctttaaagaaaccagaactgaaacaaccggctgcatcagcacgagaaagcagcgtttaggaatgccaaagagaagtgagctctggtaaacaggcttagcttatactagcagctgccacattctctgtccctygaggctaaggtttacacagaagtttaagctaytgaggcactgaagtttggttcaaattctaacaactgtgtagaagtgtccctaactcaccagcaccacctatac

SEQ ID NO: 71661 - DNA, 600 bp, Chicken  19866894350630_2
gtcaggcatacagctgtgttcctatgagcttctccatgaactgctgagctacccgtgttctgatgtgtcactaccaagcaggtccccagtaagacagtttactawgtgctgcctctatgtaaaacaacactcacttgcatttctgttatttctaataaagaaagtctgctttaaagaaaccagaactgaaacaaccggctgcatcagcacgagaaagcagcgtttaggaatgccaaagagaagtgagctctggtaaacaggcttagcttatactagcagctgccacattctctgtccctygaggctaaggtttacacagaagtttaagctaytgaggcactgaagtttggttcaaattctaacaactgtgtagaagtgtccctaactcaccagcaccacctatacacgccaatggccagtaatgatacacttaggcaacattaatacagtcagtaactacaggaaagataaattagtccctgtgggggtatatggggctgtaattccagttcacgtttctatgacaatataagccaagagactgaagtctggatcacactgaacctaattggaagtggcacactggaaagccatctgtaa

SEQ ID NO: 71662 - DNA, 600 bp, Chicken  19866894350630_3
tccatgaactgctgagctacccgtgttctgatgtgtcactaccaagcaggtccccagtaagacagtttactawgtgctgcctctatgtaaaacaacactcacttgcatttctgttatttctaataaagaaagtctgctttaaagaaaccagaactgaaacaaccggctgcatcagcacgagaaagcagcgtttaggaatgccaaagagaagtgagctctggtaaacaggcttagcttatactagcagctgccacattctctgtccctygaggctaaggtttacacagaagtttaagctaytgaggcactgaagtttggttcaaattctaacaactgtgtagaagtgtccctaactcaccagcaccacctatacacgccaatggccagtaatgatacacttaggcaacattaatacagtcagtaactacaggaaagataaattagtccctgtgggggtatatggggctgtaattccagttcacgtttctatgacaatataagccaagagactgaagtctggatcacactgaacctaattggaagtggcacactggaaagccatctgtaaccttgctttgaactggcgtgctatactaacaa

SEQ ID NO: 71663 - DNA, 600 bp, Chicken  19866894350633_1
ggactgccaagggtgaaaggcagaggtggcatggatggccactacctagtgggcatcccatctgttgactccaactctctcctgtgctgcactatgaagcagaaggacagatgtgcctggctgagcccctgcaactgctgcagttgctaggttggtaatgggctgtcctagcctctgatcctcgtcccagagactcaagatgaagcacaccctgcccagctctgtccaacagagcctcctccaccctgttattagagtgggaacaaacgcacagactggtgccatgaaaacactggactygctgaccttcttctgccttaccagctgcctttcctgcctttcctttctctctgccacttgctgttcatatgtaatgcagcaaataagtaggactcaagctctaaggtgagttcttttttctttcttgaatactgtagttcctctttcaatatgctcagcattttccttatacctgctgccacttctcatttctccacctgtctctgctatctggggttgcaaataatgaactgtatttctggagtgctgcaattcttattaattacctgtatctcagagtcagagaaaccatttcactta

SEQ ID NO: 71664 - DNA, 599 bp, Chicken  19866894350638_1
  misc_feature (1)..(151): n is any nucleotide
nnnnnnnnnnnnnnnnnnnnnnnnnnnnnnnnnnnnnnnnnnnnnnnnnnnnnnnnnnnnnnnnnnnnnnnnnnnnnnnnnnnnnnnnnnnnnnnnnnnnnnnnnnnnnnnnnnnnnnnnnnnnnnnnnnnnnnnnnnnnnnnnnnnnnnncagctgatgaagtcttatttttgctgcatctttctgagattatcttattttgacttgagagctgcatgtggtggtggtaaggctgttttttaatgtgtgtgtatggctcttgactaattgagctgacctcttgaccaaggcttctaaargcagctttaataaaatagtaaatcaactttagattcgttaacaagtgacctaattatgtagcactgtaggtgagaaatgcagtggtttagagctgcttctgccttctttcaagtactwattttaatggttgcatacacgggatgtgcattgcagycagccaagataaagccaaacgttaccttacatctgtgctaagaaacatagcacattgagggtggactgttttgtttaaacttgacataattatgtcagtttctctcagagaaacaagcctttgctgtcaatacttctgtgcttg

SEQ ID NO: 71665 - DNA, 599 bp, Chicken  19866894350638_2
  misc_feature (1)..(33): n is any nucleotide
nnnnnnnnnnnnnnnnnnnnnnnnnnnnnnnnncagctgatgaagtcttatttttgctgcatctttctgagattatcttattttgacttgagagctgcatgtggtggtggtaaggctgttttttaatgtgtgtgtatggctcttgactaattgagctgacctcttgaccaaggcttctaaargcagctttaataaaatagtaaatcaactttagattcgttaacaagtgacctaattatgtagcactgtaggtgagaaatgcagtggtttagagctgcttctgccttctttcaagtactwattttaatggttgcatacacgggatgtgcattgcagycagccaagataaagccaaacgttaccttacatctgtgctaagaaacatagcacattgagggtggactgttttgtttaaacttgacataattatgtcagtttctctcagagaaacaagcctttgctgtcaatacttctgtgcttgcagggtgcagcaagrttgttgggattttagtaacggtttaaagaagaaacttacagcctatgtagactggayggatgagatttctgctgtagtttctgtcctttcttcctttttctgt

SEQ ID NO: 71666 - DNA, 600 bp, Chicken  19866894350638_3
tgatgaagtcttatttttgctgcatctttctgagattatcttattttgacttgagagctgcatgtggtggtggtaaggctgttttttaatgtgtgtgtatggctcttgactaattgagctgacctcttgaccaaggcttctaaargcagctttaataaaatagtaaatcaactttagattcgttaacaagtgacctaattatgtagcactgtaggtgagaaatgcagtggtttagagctgcttctgccttctttcaagtactwattttaatggttgcatacacgggatgtgcattgcagycagccaagataaagccaaacgttaccttacatctgtgctaagaaacatagcacattgagggtggactgttttgtttaaacttgacataattatgtcagtttctctcagagaaacaagcctttgctgtcaatacttctgtgcttgcagggtgcagcaagrttgttgggattttagtaacggtttaaagaagaaacttacagcctatgtagactggayggatgagatttctgctgtagtttctgtcctttcttcctttttctgtattctgttctagctctggcagatagaaaaatcaaaaat

SEQ ID NO: 71667 - DNA, 600 bp, Chicken  19866894350638_4
atagtaaatcaactttagattcgttaacaagtgacctaattatgtagcactgtaggtgagaaatgcagtggtttagagctgcttctgccttctttcaagtactwattttaatggttgcatacacgggatgtgcattgcagycagccaagataaagccaaacgttaccttacatctgtgctaagaaacatagcacattgagggtggactgttttgtttaaacttgacataattatgtcagtttctctcagagaaacaagcctttgctgtcaatacttctgtgcttgcagggtgcagcaagrttgttgggattttagtaacggtttaaagaagaaacttacagcctatgtagactggayggatgagatttctgctgtagtttctgtcctttcttcctttttctgtattctgttctagctctggcagatagaaaaatcaaaaatatgcttctgatttgatctttgtatgtcaagtgagttgtctctgacttctcagtgcatatgtcctcaggacacatctttaggctgtgatatcctcaggctgttgttcttattcacttgcctctggacgttggtcggcctcttccttgtttgagtgccctt

SEQ ID NO: 71668 - DNA, 600 bp, Chicken  19866894350638_5
gagaaatgcagtggtttagagctgcttctgccttctttcaagtactwattttaatggttgcatacacgggatgtgcattgcagycagccaagataaagccaaacgttaccttacatctgtgctaagaaacatagcacattgagggtggactgttttgtttaaacttgacataattatgtcagtttctctcagagaaacaagcctttgctgtcaatacttctgtgcttgcagggtgcagcaagrttgttgggattttagtaacggtttaaagaagaaacttacagcctatgtagactggayggatgagatttctgctgtagtttctgtcctttcttcctttttctgtattctgttctagctctggcagatagaaaaatcaaaaatatgcttctgatttgatctttgtatgtcaagtgagttgtctctgacttctcagtgcatatgtcctcaggacacatctttaggctgtgatatcctcaggctgttgttcttattcacttgcctctggacgttggtcggcctcttccttgtttgagtgcccttccaaaaatgtctctstgtaagcaattggtcaccgtacatctgcccagtgacccagtc

SEQ ID NO: 71669 - DNA, 600 bp, Chicken  19866894350638_6
taacggtttaaagaagaaacttacagcctatgtagactggayggatgagatttctgctgtagtttctgtcctttcttcctttttctgtattctgttctagctctggcagatagaaaaatcaaaaatatgcttctgatttgatctttgtatgtcaagtgagttgtctctgacttctcagtgcatatgtcctcaggacacatctttaggctgtgatatcctcaggctgttgttcttattcacttgcctctggacgttggtcggcctcttccttgtttgagtgcccttccaaaaatgtctctstgtaagcaattggtcaccgtacatctgcccagtgacccagtcaaaaaccagcaactgcaaagtcagctgtttggcgtggacatttagagaactgtgggaggctggggtgtgcagaagccttggcagatgcttgaggcaatcatcttgcacgtctaacctgaaatctctcatctgggacaagaagatgcattacagcagggaacgaaccgtttcttaagtgaataaaaaaaaggaaatggcaaatttagacttctgcagagtctttaactcaagccccatgtgcctgcctgttaaacaact

SEQ ID NO: 71670 - DNA, 599 bp, Chicken  19866894350639_1
  misc_feature (1)..(21): n is any nucleotide
nnnnnnnnnnnnnnnnnnnnnatctgctataaattaaccacaagtgtattctgaggagaaactcctgactgctgctagttaccccgctgtggctagcagtacacaaatgccttggatcacataacctcagttctcccagatgaaactaagttgaaaggtgggctaggtgttaattggctctcaggctgtagcaccacttcagagacactcagaagtaacaccccctcccagctggctccttcattctgcaggcccacacggcagcactgaggcaggtgcagccagcacactgcagtaccrggaatcccttctatcgggcaggaccgacgagggagggcacgtcctccagctaacagagttttcagactgacttcacagattctagctgaactaactaggagtaaatggaacgctrccgtgttgtctgcaaaggaaatggcgcttaagagagcatccacgctagayacattttgtacaggcagctaattcagacaagctatgatttggtaccaaggcttaatacctacaatcatcaaactgtatctcctaagctcttacagcgcatcttttggtctcattttatccccagtaaagcaggt

SEQ ID NO: 71671 - DNA, 600 bp, Chicken  19866894350639_2
atcacataacctcagttctcccagatgaaactaagttgaaaggtgggctaggtgttaattggctctcaggctgtagcaccacttcagagacactcagaagtaacaccccctcccagctggctccttcattctgcaggcccacacggcagcactgaggcaggtgcagccagcacactgcagtaccrggaatcccttctatcgggcaggaccgacgagggagggcacgtcctccagctaacagagttttcagactgacttcacagattctagctgaactaactaggagtaaatggaacgctrccgtgttgtctgcaaaggaaatggcgcttaagagagcatccacgctagayacattttgtacaggcagctaattcagacaagctatgatttggtaccaaggcttaatacctacaatcatcaaactgtatctcctaagctcttacagcgcatcttttggtctcattttatccccagtaaagcaggtctgtatgctcttagaacaatccacaayggaaagactgagygggagcatgtatgtgaactgaagcactgacacacccctacaaaccaccaacagtgacaataaattacactggggag

SEQ ID NO: 71672 - DNA, 600 bp, Chicken  19866894350639_3
ggtgttaattggctctcaggctgtagcaccacttcagagacactcagaagtaacaccccctcccagctggctccttcattctgcaggcccacacggcagcactgaggcaggtgcagccagcacactgcagtaccrggaatcccttctatcgggcaggaccgacgagggagggcacgtcctccagctaacagagttttcagactgacttcacagattctagctgaactaactaggagtaaatggaacgctrccgtgttgtctgcaaaggaaatggcgcttaagagagcatccacgctagayacattttgtacaggcagctaattcagacaagctatgatttggtaccaaggcttaatacctacaatcatcaaactgtatctcctaagctcttacagcgcatcttttggtctcattttatccccagtaaagcaggtctgtatgctcttagaacaatccacaayggaaagactgagygggagcatgtatgtgaactgaagcactgacacacccctacaaaccaccaacagtgacaataaattacactggggagaggactacgtttcaracaacatcactgcacacttttaaaggaactacaaa

SEQ ID NO: 71673 - DNA, 600 bp, Chicken  19866894350639_4
acgagggagggcacgtcctccagctaacagagttttcagactgacttcacagattctagctgaactaactaggagtaaatggaacgctrccgtgttgtctgcaaaggaaatggcgcttaagagagcatccacgctagayacattttgtacaggcagctaattcagacaagctatgatttggtaccaaggcttaatacctacaatcatcaaactgtatctcctaagctcttacagcgcatcttttggtctcattttatccccagtaaagcaggtctgtatgctcttagaacaatccacaayggaaagactgagygggagcatgtatgtgaactgaagcactgacacacccctacaaaccaccaacagtgacaataaattacactggggagaggactacgtttcaracaacatcactgcacacttttaaaggaactacaaacacactttttttagaaatccatggtgtggcccttggttataggagactgactctgtgacttgaggtgacttactctggggtcagttttaatcctaagaaactgcttgcacagaagtggtgatgctttaaacatgtaaacagtttggttataaattcctgag

SEQ ID NO: 71674 - DNA, 600 bp, Chicken  19866894350639_5
cgtcctccagctaacagagttttcagactgacttcacagattctagctgaactaactaggagtaaatggaacgctrccgtgttgtctgcaaaggaaatggcgcttaagagagcatccacgctagayacattttgtacaggcagctaattcagacaagctatgatttggtaccaaggcttaatacctacaatcatcaaactgtatctcctaagctcttacagcgcatcttttggtctcattttatccccagtaaagcaggtctgtatgctcttagaacaatccacaayggaaagactgagygggagcatgtatgtgaactgaagcactgacacacccctacaaaccaccaacagtgacaataaattacactggggagaggactacgtttcaracaacatcactgcacacttttaaaggaactacaaacacactttttttagaaatccatggtgtggcccttggttataggagactgactctgtgacttgaggtgacttactctggggtcagttttaatcctaagaaactgcttgcacagaagtggtgatgctttaaacatgtaaacagtttggttataaattcctgagcacagtcacgttt

SEQ ID NO: 71675 - DNA, 600 bp, Chicken  19866894350639_6
aggaaatggcgcttaagagagcatccacgctagayacattttgtacaggcagctaattcagacaagctatgatttggtaccaaggcttaatacctacaatcatcaaactgtatctcctaagctcttacagcgcatcttttggtctcattttatccccagtaaagcaggtctgtatgctcttagaacaatccacaayggaaagactgagygggagcatgtatgtgaactgaagcactgacacacccctacaaaccaccaacagtgacaataaattacactggggagaggactacgtttcaracaacatcactgcacacttttaaaggaactacaaacacactttttttagaaatccatggtgtggcccttggttataggagactgactctgtgacttgaggtgacttactctggggtcagttttaatcctaagaaactgcttgcacagaagtggtgatgctttaaacatgtaaacagtttggttataaattcctgagcacagtcacgtttgcaggctattcctttaaagcagtatggctactcctgtggaacagagggaatgtaggggtatattctgcttccaagagaggacttctataca

SEQ ID NO: 71676 - DNA, 599 bp, Chicken  19866894350640_1
  misc_feature (1)..(46): n is any nucleotide
nnnnnnnnnnnnnnnnnnnnnnnnnnnnnnnnnnnnnnnnnnnnnnccgctccttttcttttcttcctccctccgcctcccgcgccgcacagcgaggcgggcgggcggccggcgccggaggaggaggaggcggtggcagcggagagccgccaaacccgggacgcgggaggtacggctccgtgccacagcgcaaccccccggctgcagggcgggtggaggggtggtcgggggggcactttctacgcggagagaagcggggaacgagcttcggaaacaaagttgggagcgaagttgcggagmgagcgggggcggcggcggagcgggagctgtgaggggcggccccgcgctgccacctcgcgctgcttcagcctcctcaggagttgggggcagcgtggggtcgcgttgcgggccgggatggatggtcccgcttcctggtgagttgtacgcaccgagcgccttcgcttctcgccctccgtcgtgcgatctgccgtgcttttttgcctggttgttccccgtggggctgcaccatagcgaaacgcggtgacggagtctcaggagaggcgttgggaatacatgtggtggggttgcagccctccccc

SEQ ID NO: 71677 - DNA, 600 bp, Chicken  19866894350640_2
ccgttttagtgggagttctctctccctgcatcaaaccaagacgtggtatttgcacgtgttacggctgggcgcattttgcttaaggtaaaagcgccgtgggggtgtttttggtagacaccgaggccctgaaatacggaaatagagcggtgcactgacagcccaacccttgctgccatagctgcactaaagggaactgatgatcgaaatcgtgctattgctttatcttttgctgtgtgtgaagaacatatatgcatcccctccgtgtggaagtttccagactcagccccttacaggtgcccragttgcactctgatgcacggaggccgtgatgccgggctgtgtgcacacctgcgtccatttggagttagggctgctaaattgttcagctgtgggatgggtgtgaaggagccygcatgcagccccctcccttttcttgtgatcacccacatcatttttccccatctttgagaagctcccaagcaccaaacctcagccttcggctctgcctattgcccagctctgagctgtgcgtcccgctgccaggcaccacraagtaggggtcatcagaagctgagttttgctgtaagtgcacctaaaact

SEQ ID NO: 71678 - DNA, 600 bp, Chicken  19866894350640_3
tagacaccgaggccctgaaatacggaaatagagcggtgcactgacagcccaacccttgctgccatagctgcactaaagggaactgatgatcgaaatcgtgctattgctttatcttttgctgtgtgtgaagaacatatatgcatcccctccgtgtggaagtttccagactcagccccttacaggtgcccragttgcactctgatgcacggaggccgtgatgccgggctgtgtgcacacctgcgtccatttggagttagggctgctaaattgttcagctgtgggatgggtgtgaaggagccygcatgcagccccctcccttttcttgtgatcacccacatcatttttccccatctttgagaagctcccaagcaccaaacctcagccttcggctctgcctattgcccagctctgagctgtgcgtcccgctgccaggcaccacraagtaggggtcatcagaagctgagttttgctgtaagtgcacctaaaactcaaacgcttgcctggaaacagctgatgaagccttcagtgatttttttttttttaacacttggtttgtggttaaagcgctgtgcatgcagtgaggaaggagygggcagcttt

SEQ ID NO: 71679 - DNA, 565 bp, Chicken  19866894350640_4
catcccctccgtgtggaagtttccagactcagccccttacaggtgcccragttgcactctgatgcacggaggccgtgatgccgggctgtgtgcacacctgcgtccatttggagttagggctgctaaattgttcagctgtgggatgggtgtgaaggagccygcatgcagccccctcccttttcttgtgatcacccacatcatttttccccatctttgagaagctcccaagcaccaaacctcagccttcggctctgcctattgcccagctctgagctgtgcgtcccgctgccaggcaccacraagtaggggtcatcagaagctgagttttgctgtaagtgcacctaaaactcaaacgcttgcctggaaacagctgatgaagccttcagtgatttttttttttttaacacttggtttgtggttaaagcgctgtgcatgcagtgaggaaggagygggcagcttttgggtggtggtggtggtggtggtggatcacttaccccatccccagctcgggaagccatctgcacacctgggtcctgcttgccaaaccaggaggtgcgtggtgtgt

SEQ ID NO: 71680 - DNA, 415 bp, Chicken  19866894350640_5
gaaggagccygcatgcagccccctcccttttcttgtgatcacccacatcatttttccccatctttgagaagctcccaagcaccaaacctcagccttcggctctgcctattgcccagctctgagctgtgcgtcccgctgccaggcaccacraagtaggggtcatcagaagctgagttttgctgtaagtgcacctaaaactcaaacgcttgcctggaaacagctgatgaagccttcagtgatttttttttttttaacacttggtttgtggttaaagcgctgtgcatgcagtgaggaaggagygggcagcttttgggtggtggtggtggtggtggtggatcacttaccccatccccagctcgggaagccatctgcacacctgggtcctgcttgccaaaccaggaggtgcgtggtgtgt

SEQ ID NO: 71681 - DNA, 600 bp, Chicken  19866894350644_1
acaacagaaaggagggttgccatccagagggacttggacaggctcaataaggctcaaaaagtgggcccacaggaacctaatgaggtgtaataagatcaattgcaaggtgttgcacttgtgttgaggcaatctcagatatgagtgtggactgggagaagaactcattgagggtagccctgtggagagggacttgtgggtcccaatagaccaaaatctggacatgagccagcagtgcaacatagaaggccaattctgtcctgggctgaatgaaaacaggggcggccagcagggagagggagrtgattgtcctcctctattctgccccatctggagtagtgtccaaatctgggacgatcagtataggaagggtgtgaagctcttggagcagatcttgagaagagctacaaagatgattaaagggctggagtacctctcttatgaagaagggttgaaagaattaggcttgttaatcctggagaagagaaatctgtgctgagaccttattgcaattctccagtacttgaagggagcttacaagcaggagggagaccaactttttacacagtctgattgtaataggacaaaggggaatggctttaa

SEQ ID NO: 71682 - DNA, 596 bp, Chicken  19866894350644_2
gggtgtgaagctcttggagcagatcttgagaagagctacaaagatgattaaagggctggagtacctctcttatgaagaagggttgaaagaattaggcttgttaatcctggagaagagaaatctgtgctgagaccttattgcaattctccagtacttgaagggagcttacaagcaggagggagaccaactttttacacagtctgattgtaataggacaaaggggaatggctttaaattaaaagaggggagatacaggttagatgtgaggaagaatttttttactgggtaggtgctgaggtkctggaacttgttgcccagagaggttgtgtaagctggaggtgctcaaggctgggttagataggaccagggcagcctgaccaagtgattggcaaccctgtctgtggctggagggctggaactggatgatccttaagctacgctccaaagtaagcaattctatggattctattattccatgattactttcaagatggcttctcaacatgtttttacaagaatttgttttcatttggttctaaatctactgtacttgatgtgtttgatttgaaacactcagaaggtctttgaaagggaaa

SEQ ID NO: 71683 - DNA, 600 bp, Chicken  19866894350645_1
aggtaataatcccaacgagctggtatggaaatctaactggtccaaccagtgtatgctggagaagcagtactgtagggatgcaaaacagcctcctggtctcagtagctgaggaagaattcagaactgggcatcttcatgtagctttttgtgtcttggcatgctcagctgcttctggcatgcagaaacactgcgagtgaattatttccagtagcatccttctaataagaagacaaaccagaagagaaaaggaggagagtctaggcactgctatggctttgagaagctctctttagaggcagyaagtactgtatctctacctaacagaatcctaatgttgccctgtcctggcagagggtcagaagttcagaaagcaaaaaggacatctggagcatatatgctgttgctgactcagcattcttattttattttgctactgagtggctgcaatatagctaaggaaggcatgcacagacaaacaaagtttctgccccagtcagctcacatctttactttagaatggcactacttcaggcctctgtgatggaggatgttgcaggctggwgtgtagacagacagatggagtcattttttacttgtgaa

SEQ ID NO: 71684 - DNA, 600 bp, Chicken  19866894350645_2
cactgctatggctttgagaagctctctttagaggcagyaagtactgtatctctacctaacagaatcctaatgttgccctgtcctggcagagggtcagaagttcagaaagcaaaaaggacatctggagcatatatgctgttgctgactcagcattcttattttattttgctactgagtggctgcaatatagctaaggaaggcatgcacagacaaacaaagtttctgccccagtcagctcacatctttactttagaatggcactacttcaggcctctgtgatggaggatgttgcaggctggwgtgtagacagacagatggagtcattttttacttgtgaaaaattttcttctgagttacttttttttaattgatcctatgtcttctgatgctttgtatctgtttttcctgctttgtcgtggaaacaaaagacrgatttatggctccttgtagaacttcagccttgtttataaattgcttttgattgattaagtaataaaaatgcttttaggacagggaggtaaatctactggctaattgctcagtgctttgcattataaccttgttacagcagctgtgccggacaggtctgctactcctatc

SEQ ID NO: 71685 - DNA, 600 bp, Chicken  19866894350645_3
tatgctgttgctgactcagcattcttattttattttgctactgagtggctgcaatatagctaaggaaggcatgcacagacaaacaaagtttctgccccagtcagctcacatctttactttagaatggcactacttcaggcctctgtgatggaggatgttgcaggctggwgtgtagacagacagatggagtcattttttacttgtgaaaaattttcttctgagttacttttttttaattgatcctatgtcttctgatgctttgtatctgtttttcctgctttgtcgtggaaacaaaagacrgatttatggctccttgtagaacttcagccttgtttataaattgcttttgattgattaagtaataaaaatgcttttaggacagggaggtaaatctactggctaattgctcagtgctttgcattataaccttgttacagcagctgtgccggacaggtctgctactcctatctccactcccagtggaaccatcacccccactatgctgctgtgccctgactgtcagaagccacagactgataattaatgggtcaggaggcaacacaattgctgcagctgaaacataggaagaaatcttccctt

SEQ ID NO: 71686 - DNA, 600 bp, Chicken  19866894350648_1
atacctgtttagcaagcaccttcatgtgagcaacacttcctcggcagtaagcttcaagtatcaaaccaaactgtactgaaacagcaggtatgtgaacctctgacctacaagggaacgtcacagcagaaaggtttctcatttatcaaaacagaccgcacgattttacagattaacatttaaagctattgaaattgaggaaaagaataaaaacaaaacacttcatggccatttagataaaagctacattttgtaagaaatacacacatgctgaacactcaaaaggaatagctggtttcaacrtaccacttgtttctaggtctaggactgttctagatgcaaaaatgttaagaggtagcaatgggatatttgttttcaggatccacgtatattaaagaaagcagtactaatagatgatattgagagttagggctgatgttcaagtgtgtgttttcaaatctttgtaaggaaaaaacaagatttctctgaggagaaacactttgaaagaaaccactgaactttactgcagtgccgattatcctccaaaacatttgcaagtagagcttgctctttttatttagaaatattagaataagttggatt

SEQ ID NO: 71687 - DNA, 600 bp, Chicken  19866894350652_1
agaacgaacattttaaaggtagacatttatttcacagaaagtggtaaataaccaaactttaagtctgaggacagcacggtgaaggggaaaaaataatataatcgaaagtaacaaaggtataaaacatatgcgtctgaaaacttcactagatatagcacagcaaactttagctgcactactgtgctctttcttctcagatctccagcatatatttaaattagaagattaagtgataaattggacgtaaatctgcccaaataaattacttcccttgatgagcttttccttttccattctctycaccaagttraaattgctcagatgcctatttctcccactagcctacgagaaaaataactgctccggagactacaaacaacaaacgctgcatggctttgtcctcatggagtgaaggaaaatacagtaaaataaatgtggcaaggcagcacacagctgaactaacaggtcagggggctgccacatgccaaagctgcagcattaccgataccagaaagtcaccacgcaccgacacgcaaagagcagcttacctgcaggaccagggctgccaacttgaagaccgtctcactttcgacctcgatc

SEQ ID NO: 71688 - DNA, 600 bp, Chicken  19866894350652_2
ttttaaaggtagacatttatttcacagaaagtggtaaataaccaaactttaagtctgaggacagcacggtgaaggggaaaaaataatataatcgaaagtaacaaaggtataaaacatatgcgtctgaaaacttcactagatatagcacagcaaactttagctgcactactgtgctctttcttctcagatctccagcatatatttaaattagaagattaagtgataaattggacgtaaatctgcccaaataaattacttcccttgatgagcttttccttttccattctctycaccaagttraaattgctcagatgcctatttctcccactagcctacgagaaaaataactgctccggagactacaaacaacaaacgctgcatggctttgtcctcatggagtgaaggaaaatacagtaaaataaatgtggcaaggcagcacacagctgaactaacaggtcagggggctgccacatgccaaagctgcagcattaccgataccagaaagtcaccacgcaccgacacgcaaagagcagcttacctgcaggaccagggctgccaacttgaagaccgtctcactttcgacctcgatctgcccctgtg

SEQ ID NO: 71689 - DNA, 600 bp, Chicken  19866894350658_1
tttactttcacctgagagtgaattttccagcatactgaagatcaatcatcatatgagtacctgtgcaggtgccttgaattttttactaatagggaagccagtaaccatgatgcagagaattcaggaatggaccagcaaacaacaaggaagggtatgaacaaactgcaaactctgtcatgtcagcacaattaccagcaaaccccagagtttatgctgctaatagaacccttccttttggctacattatcatcctctgatgcattattttatcgtaagttaaacattattttatcgtaacaytattttagccgaagttaaaacctgagattggtcaagcaaccttgagctggaaggactgtatcctcataatacaatttcctttccacacacctgtctgtggtacttagggacttccatcttgttttcaaactatttatcacgggacttatcttctgtgttcctagtcagttacaatcccattcmtgggtttgtaccactggaatcatccagatgctttagtcagtgtaaataagaaaagtttctttcctcaaatctaatggtaggaatgtttttagcagtttaatagcagaagagtttaag

SEQ ID NO: 71690 - DNA, 600 bp, Chicken  19866894350658_2
cacaattaccagcaaaccccagagtttatgctgctaatagaacccttccttttggctacattatcatcctctgatgcattattttatcgtaagttaaacattattttatcgtaacaytattttagccgaagttaaaacctgagattggtcaagcaaccttgagctggaaggactgtatcctcataatacaatttcctttccacacacctgtctgtggtacttagggacttccatcttgttttcaaactatttatcacgggacttatcttctgtgttcctagtcagttacaatcccattcmtgggtttgtaccactggaatcatccagatgctttagtcagtgtaaataagaaaagtttctttcctcaaatctaatggtaggaatgtttttagcagtttaatagcagaagagtttaagcaaatgcaaaaacaatgacaagatgactgatgacaggatatgatcacaacagtaatcattttgctgatgttctacacagagaagaattgcaacaaatttcaccagataaaaaattaaacaaacagaaaacataaacggaatctgtgttccgtttatgatcacccagagtgattcaaatttgtc

SEQ ID NO: 71691 - DNA, 600 bp, Chicken  19866894350658_3
aatttgtccagcactgaagaagaaattatcttttattgttagacttttggttagcctgtcagtaacatgacatgcataaaaactagcaagagtaagtggattaatgatagaccggatgcgatttgcttatcttggccagatcttagaactgagatggatacccatctctgctgatgcaggcatcactgccagcattcctctaacagcctgacgcatgtgactctgcactgggaaaaaaaaaggcaccttttttgcatcagcacctcagcttcccttatgtattatgtcacagcctctttmagaacagaaattattgctcaccccttcttttcctgtattgctgagagaaaaaaataaaacaacaaaacatggattctttaccttccagttaatcacaaacaaacttatcctcgctaaaagatgaggcatcatgaagagcatgacaggggaagacagacttttttgcccacaatttaatccacacaggaaatgaagtgagtttgcttaccggtttgcaaagtctgcaaaataaacaagttcttttttccaaactgagcatatatgataaaatataaagagcatgagaatattgagacaacg

SEQ ID NO: 71692 - DNA, 600 bp, Chicken  19866894350674_1
taaggggaaattatagtacaataatcaaagcctgagacagagaaacactctatttgaccagaaaaggagagatcacatagtcattaataaaacaatagacaggatttttggtacttagtaccagcagtcattttgtacctaaatgggagcaagacagcagcaaagagaagaatgactgtctctctgtcatccatttttcaaacctttctagcattaaaagtgacaggtcatgtctagttcaaatataatgtgaacatgaagaacaaaacactgagagaacaaaatgaaactgactgggakttgattgtatttttcttttatatgtctgaatacttgaaaaacccatatttaagaaaggaagtaatgccaaccacttataggctgaaaaaagtaatgagatggccatgggcaggatggcctggggaagcaatttgcattggctatccctggtggagacatcagtgtagccatggtagcacaatgcttgtttttattgtttgtttgttgtttttcttctggaaaaggccgttggtactctgcattgtgttcatgccaaaaggttttgcacgactgtattcattaattgtaaatgtgctttta

SEQ ID NO: 71693 - DNA, 600 bp, Chicken  19866894350674_2
tattggatgaaaaaggatttcctgataataggatacgagtgtctcttggaaattcagggttcttcagtgtgtaagttaaatagattaataaattttttttgtggagtagcatcaagagaaagttaaatgcctcaatatctgctttgtatatgtgtgacatccctgacccccctgctgaaacaaaatctgcaggactacattaagtgctggggtttcctgtgcagctctggaagaagtacgtaaaagcttaaaaaaacaatcaaaattctcatactatttgctagtaacaaaacagagaayggaaagttgactatgaaattctatttgaaataggagtctaaatattttgctgaatgctgcctagaaatagctctgcacacaggattctcctacaggtagttgactgcaattttattcttttcacattcaaaagaatggaaactagttgcacagttaggttggttttgttttgttttttgtttttatgatttgttttctgggaaaataaaactttggttctgagaactattagtttattttaccacatacaagcagaatacagatcatgcctttggaaatgaagcaggcacccagggcttc

SEQ ID NO: 71694 - DNA, 599 bp, Chicken  19866894350687_1
  misc_feature (1)..(111): n is any nucleotide
nnnnnnnnnnnnnnnnnnnnnnnnnnnnnnnnnnnnnnnnnnnnnnnnnnnnnnnnnnnnnnnnnnnnnnnnnnnnnnnnnnnnnnnnnnnnnnnnnnnnnnnnnnnnnnncaggagtacatagtgacaggatgaaaaccaatgcatggaacacaggaaactttgagtagatatgaagatgcccagagaagttgtggtatcttcatcctcattgaactgcccaagacaaaagccctgttctactagatctacttgaacctgctttgagtagggtgttagacctgaattgttctctttcgstatgtctcagcaaagctgttgcatttagtgctgcttttggcacaagaataaggcagtattttaaatgttaaaaagctgtgttgttcttataattgctcctaaaaatgggagactccagatgcactgactatgggtcacacatctttattttctcctttcttctccatactcatgaagcattaatagaaattggacaaataatacaggaaaaatcaaatgattggctaatactgtaacactcrggcaaaaggtcagacctggccatcacggcatgtgaaaagacttctggagaactggca

SEQ ID NO: 71695 - DNA, 600 bp, Chicken  19866894350687_2
ctagatctacttgaacctgctttgagtagggtgttagacctgaattgttctctttcgstatgtctcagcaaagctgttgcatttagtgctgcttttggcacaagaataaggcagtattttaaatgttaaaaagctgtgttgttcttataattgctcctaaaaatgggagactccagatgcactgactatgggtcacacatctttattttctcctttcttctccatactcatgaagcattaatagaaattggacaaataatacaggaaaaatcaaatgattggctaatactgtaacactcrggcaaaaggtcagacctggccatcacggcatgtgaaaagacttctggagaactggcaaatcatgcagtaatatttctattggaaacaaagtacaaaatgtttgaatgttcctggatgatcgtttgggggaaaaagaagacacagctgtcctggaaagcactggaaaaatgaatakagatgttaagtatccatgctacattcaaggagaattctcagctcaaaaatacttttcaaaattaggttagggtaacacctttaagtaggaactaagtagttgggaggcgaagtgttgctgtttta

SEQ ID NO: 71696 - DNA, 600 bp, Chicken  19866894350687_3
gatgcactgactatgggtcacacatctttattttctcctttcttctccatactcatgaagcattaatagaaattggacaaataatacaggaaaaatcaaatgattggctaatactgtaacactcrggcaaaaggtcagacctggccatcacggcatgtgaaaagacttctggagaactggcaaatcatgcagtaatatttctattggaaacaaagtacaaaatgtttgaatgttcctggatgatcgtttgggggaaaaagaagacacagctgtcctggaaagcactggaaaaatgaatakagatgttaagtatccatgctacattcaaggagaattctcagctcaaaaatacttttcaaaattaggttagggtaacacctttaagtaggaactaagtagttgggaggcgaagtgttgctgttttaaaatgtagttagtgtggtggtggaaacaggagaaaaaaagatgtcagaaagcaacaggtattcagaagatctattgataaagatagcaatagcattaaaaatgagcgcaagaaacwgcagaatgacaccttccatagatgtattatctacctaatatgctgcaatttctccattt

SEQ ID NO: 71697 - DNA, 600 bp, Chicken  19866894350687_4
gatcgtttgggggaaaaagaagacacagctgtcctggaaagcactggaaaaatgaatakagatgttaagtatccatgctacattcaaggagaattctcagctcaaaaatacttttcaaaattaggttagggtaacacctttaagtaggaactaagtagttgggaggcgaagtgttgctgttttaaaatgtagttagtgtggtggtggaaacaggagaaaaaaagatgtcagaaagcaacaggtattcagaagatctattgataaagatagcaatagcattaaaaatgagcgcaagaaacwgcagaatgacaccttccatagatgtattatctacctaatatgctgcaatttctccatttctaaggctaatgtctgtcagagaagtagcagtggggaaaaatagaaactgatctactcaggcattctagggttttctcgcttttctgcagtatgctttcaaaatagagatgaaaatgttacccgagttccacaaaccaaatgcaaccctatgtaatcctactaaatcagcagcattgcatcttggtgaattcatccctgcaattcagagtacataacattgggttcaaggtgctcatgtat

SEQ ID NO: 71698 - DNA, 599 bp, Chicken  19866894350691_1
  misc_feature (1)..(72): n is any nucleotide
nnnnnnnnnnnnnnnnnnnnnnnnnnnnnnnnnnnnnnnnnnnnnnnnnnnnnnnnnnnnnnnnnnnnnnnnaagctctcccggggcgggatgccagcagggccgaagcagcacctcagccacacggcaccgccttccatcccccattcccgaggcagacccggcccacgttacccaggagagggatgcgctgcagagcagaagcggaggagcacccctcggtgccactgggctccgcaacgcccgtcacatggcaccgctaccacatttccgtgactttcagtaatgtcaccgggtgcygcgctccagattgaggaaccaggaggctctgctcacacagctcagggctgcgggaagccgggcggcacccagcagcagccccgctgctgtcactgtcaccttgatcgcaagggtggctcgctcccggcgtccttgccaagtgatgcccctgccactgcccagggacaccacgccacttgggaaacacctctccccgccgtgcgcacgtgttacagacaaggggagctgacggcacgctccatgccgacagtaccactcacaggagggcacgctgagatagcaaagcactgggaagcaaa

SEQ ID NO: 71699 - DNA, 600 bp, Chicken  19866894350694_1
ctggctgggttgtcaaagctgacaaagcctggaaacagcagggacatggggacagtggggacacagggacggtggtgacaatggggatgtggggacagcagagacacagtcatggtggtgcagatgttgtggccctgcagttggcccatgatatccacagccaccctaactccacccccctggccttggtggctccagctgttgtgtccccatggcgttttgatgtcccgaccatgatgtccccatgtctctggccgtggtgaccccatctgtgaagtccctgtgccttggccatgatgyccacatgttctggccatcgtgtccccatactcctggtcatggtgtccccatctatgatgtcccaatgctacgacaatggtgttcccatgtctccatccttggtgaccccatctgtgatgtccccgtgccctgaccataccacaatgtccccatactctgaccatggtgcctccatcccatgacacccccagtccctaccgaagcacttgctctggttggtggcgcggtcgacgaacactttggcggagatgacgttgccgaagggcaggaacatttgtaggatctcggtgtcagcgaact

SEQ ID NO: 71700 - DNA, 599 bp, Chicken  19866894350704_1
  misc_feature (1)..(146): n is any nucleotide
nnnnnnnnnnnnnnnnnnnnnnnnnnnnnnnnnnnnnnnnnnnnnnnnnnnnnnnnnnnnnnnnnnnnnnnnnnnnnnnnnnnnnnnnnnnnnnnnnnnnnnnnnnnnnnnnnnnnnnnnnnnnnnnnnnnnnnnnnnnnnnnnnntctcctacttccctaaagattgactttcatttatgaacagcatactaagttatccagaagtggctcttaatcttcagctgcaggaaggcagaatggctcatgactgattcagtggtgctgagctccactaagcagaatgccacttgtcatggcrgaactgtttccacaattaaccctgctgatctcaccctgctacagtcagtcacacatcccagaccgtaattccccaccctcagaccaaggtgtcacgctaaaactccctgctttcaaatgcatgcatctgggaaggcactacttgtttctgtttcaagtttacacaacactagtacaacagggtcttgttccacaattacagtgcctagactggatmgtaattactcttctcagcttcagaaacttctccctaaggcaggtaaaccacagaagtcttcttccctctaaaccacactccag

SEQ ID NO: 71701 - DNA, 600 bp, Chicken  19866894350704_2
tcttcagctgcaggaaggcagaatggctcatgactgattcagtggtgctgagctccactaagcagaatgccacttgtcatggcrgaactgtttccacaattaaccctgctgatctcaccctgctacagtcagtcacacatcccagaccgtaattccccaccctcagaccaaggtgtcacgctaaaactccctgctttcaaatgcatgcatctgggaaggcactacttgtttctgtttcaagtttacacaacactagtacaacagggtcttgttccacaattacagtgcctagactggatmgtaattactcttctcagcttcagaaacttctccctaaggcaggtaaaccacagaagtcttcttccctctaaaccacactccagtatttccaggctscaatgcccaaggcatcacttctgtgtgctgcttgactgcctcctgagactgactccctgyaagcaattgttctcttaagtttgccaagaagcagcctctgggccctacaaatgctcggagggctgctgcgtgcagccctgcaggaatttgtccacagaaacagagtttgttcacttgccaggcaaggccttctgcccaactttt

SEQ ID NO: 71702 - DNA, 600 bp, Chicken  19866894350704_3
caattaaccctgctgatctcaccctgctacagtcagtcacacatcccagaccgtaattccccaccctcagaccaaggtgtcacgctaaaactccctgctttcaaatgcatgcatctgggaaggcactacttgtttctgtttcaagtttacacaacactagtacaacagggtcttgttccacaattacagtgcctagactggatmgtaattactcttctcagcttcagaaacttctccctaaggcaggtaaaccacagaagtcttcttccctctaaaccacactccagtatttccaggctscaatgcccaaggcatcacttctgtgtgctgcttgactgcctcctgagactgactccctgyaagcaattgttctcttaagtttgccaagaagcagcctctgggccctacaaatgctcggagggctgctgcgtgcagccctgcaggaatttgtccacagaaacagagtttgttcacttgccaggcaaggccttctgcccaactttttccccttctcctgagtacaagctcaagcaccgggttcaggcagacagaaacgactttgaattatatttatcaagtaaccagggctttggcagaagg

SEQ ID NO: 71703 - DNA, 600 bp, Chicken  19866894350704_4
ccaccctcagaccaaggtgtcacgctaaaactccctgctttcaaatgcatgcatctgggaaggcactacttgtttctgtttcaagtttacacaacactagtacaacagggtcttgttccacaattacagtgcctagactggatmgtaattactcttctcagcttcagaaacttctccctaaggcaggtaaaccacagaagtcttcttccctctaaaccacactccagtatttccaggctscaatgcccaaggcatcacttctgtgtgctgcttgactgcctcctgagactgactccctgyaagcaattgttctcttaagtttgccaagaagcagcctctgggccctacaaatgctcggagggctgctgcgtgcagccctgcaggaatttgtccacagaaacagagtttgttcacttgccaggcaaggccttctgcccaactttttccccttctcctgagtacaagctcaagcaccgggttcaggcagacagaaacgactttgaattatatttatcaagtaaccagggctttggcagaaggagatttttattatgaaccagtttctatgtgtcgcttagcttaactttaacacctagtttt

SEQ ID NO: 71704 - DNA, 600 bp, Chicken  19866894350711_1
gtctttttgcttctggaaacctgggctcaaattgtgcttacgcgcatgatattataacatgagcctggttatgaagcagtgctaaagcatggtgctcagcaggttatttttgtgacactatcatgattcgtaaagtgagctcatacttaaatgcttctctggatctgggcaaaatctgactaaatttttaattctttaaaggtaagaccgaattatatgtaaaataaataaaaatagcttcaagatttttaaattccgaaggctgtagatttcaaatgactaaataggctgttctcttgkaagttctgtaatacatgtgcagcagtgctttgtttatgcttgataaaaaatggtaataaataagaaatccagtgtcttcacagcttcagtgcaccaatctccacattccatccacttagtgagctctgtgagctcacacaggatcatcacctaatagcctcagtatgctaaaatgcgaaaaataacttccatctgaaatgttccagcaatagaatatgtcatggcgtgttttatccaagtgtccaagctcctgacttaaaatttcttaacaaatacatggtttttattgcattcgtggaa

SEQ ID NO: 71705 - DNA, 600 bp, Chicken  19866894350712_1
ttctttccatctctgtattcatggaatatcagtgtctctgtaatgaattctggggtctgtaccactgagagcttgggaaaaatcgatagtgacttctttctaacatggataccacctacaatgccaattactgtgtttaccattgccaacataaacaagctctagcagctgtgataattttcactacagctgcagattgtataaaatcattcagctgcgtggttatgtaaaagatttacgtaaatgaacacagctagattgtgacctgagttacaggggagcactgtattagttccagcwgtgcattgctcagtaatactgctataaagcccttccccatctgcagtggcagagacctcattgctgtaattttctgctttgtctgccattatcctgtatcttgccactgctgttatgagtgcagacctgttcagtgttgctatggaagaactgtgaatgactttggatgctgcctttagcctctgttcagatcaagagcatagcaaacctgagaacaaacacattaatcttccattgttattgaggtttctgtgaagcagagctgcgtatccaaaggaagaaaaatcatttaagaagact

SEQ ID NO: 71706 - DNA, 600 bp, Chicken  19866894350712_2
ctgtatcttgccactgctgttatgagtgcagacctgttcagtgttgctatggaagaactgtgaatgactttggatgctgcctttagcctctgttcagatcaagagcatagcaaacctgagaacaaacacattaatcttccattgttattgaggtttctgtgaagcagagctgcgtatccaaaggaagaaaaatcatttaagaagactttaagccttatagtcaggaggcagaggaatactgggcccactgtttttccagtcactatgttacaattataggtttccatagcagactgtaawtgcawgttcctraagtgtatacataaagctgaacaactgaaggcagggagagctagccattgcaaaggctgcgggagtatttccatgtacagttgtatacaggatctgtgtccagaagggtggtcaataaatactggttgagggcatataagatgaggaagggaaagcagaaaaggattaccatgtattttcttaccctcaggagagaaagacactgtgattctgtgacactgaaatattgcctctagaagcacaaccactaatactgctggtcagccagagagtttgtctgagcaatcc

SEQ ID NO: 71707 - DNA, 600 bp, Chicken  19866894350712_3
tcttgccactgctgttatgagtgcagacctgttcagtgttgctatggaagaactgtgaatgactttggatgctgcctttagcctctgttcagatcaagagcatagcaaacctgagaacaaacacattaatcttccattgttattgaggtttctgtgaagcagagctgcgtatccaaaggaagaaaaatcatttaagaagactttaagccttatagtcaggaggcagaggaatactgggcccactgtttttccagtcactatgttacaattataggtttccatagcagactgtaawtgcawgttcctraagtgtatacataaagctgaacaactgaaggcagggagagctagccattgcaaaggctgcgggagtatttccatgtacagttgtatacaggatctgtgtccagaagggtggtcaataaatactggttgagggcatataagatgaggaagggaaagcagaaaaggattaccatgtattttcttaccctcaggagagaaagacactgtgattctgtgacactgaaatattgcctctagaagcacaaccactaatactgctggtcagccagagagtttgtctgagcaatcctacct

SEQ ID NO: 71708 - DNA, 600 bp, Chicken  19866894350712_4
actgctgttatgagtgcagacctgttcagtgttgctatggaagaactgtgaatgactttggatgctgcctttagcctctgttcagatcaagagcatagcaaacctgagaacaaacacattaatcttccattgttattgaggtttctgtgaagcagagctgcgtatccaaaggaagaaaaatcatttaagaagactttaagccttatagtcaggaggcagaggaatactgggcccactgtttttccagtcactatgttacaattataggtttccatagcagactgtaawtgcawgttcctraagtgtatacataaagctgaacaactgaaggcagggagagctagccattgcaaaggctgcgggagtatttccatgtacagttgtatacaggatctgtgtccagaagggtggtcaataaatactggttgagggcatataagatgaggaagggaaagcagaaaaggattaccatgtattttcttaccctcaggagagaaagacactgtgattctgtgacactgaaatattgcctctagaagcacaaccactaatactgctggtcagccagagagtttgtctgagcaatcctaccttatctgt

SEQ ID NO: 71709 - DNA, 600 bp, Chicken  19866894350718_1
cagtatcagcacatttcttcaaagatgggaagtgaaggagaggtgggaaaaggtctccccaggtttagcagggacaaagagggaggcaagcccgtgaataaagagaagaaacaatctggaagttaaagtgtttattgatgtgtttaaactttgtacattccccacagaccacactaaggagtttgcaggtaaatctgtgcatagtgggaagagacatggaagggaaaagaaagtaaagtcacaggagaaatagaaaaaatacaccacaggttaccagaacctccagatttaaaaaagccrtgagcattaacaccaactatacaagcattacaaagacaagatggtgagcagaacgataccccttttgttcttctcggggccttgcatccaatttcccttaaagcaggcagaatccctttcccaacttatccctctctcctctccccacgttcagcagctcccaagctgctgcctatcgcagtgatttgtcattctgggaaagacccaaagctgtgcctacagcccaacaccactggaagagatgcaaaggctcaaagcactgcgcctctttaactacttaccatgttggtgaggcaggag

SEQ ID NO: 71710 - DNA, 600 bp, Chicken  19866894350719_1
tcaagctgtccagatctcctagcctgaccttggttgtttccaaggatggggcatccaccacgaatcataatcaaaatgaaaaagaatttatattaaaaaaaaaaaaaaaaggaaacccttatatatatgttaaagaaagaaaatgtgccttttcacatcacccatttgagatgaggctataaaggcaatagctagttgtaacctctgcaggtatatctggaaagaagtctgggaaaacaccaaagcatgcacatgacttgcagttcttgcatttgaccacatttaagccactgcatacartttttttcttgttaatacgcagtccaaacaaattgatctagactcagaaatcccactgacattagggtagaacatggccagtcatttgctattgcaaattgcagagtattaatggttgaagatactgtgttattccatctgtaattactatataatttgtagcattgcaagaagattgtagcgtagaagacagaaatgagtgtctagcggttattctgtaataacatggaatcttctgtgtaggttcttggtcaaattttaacctataactatccagcttttaacatagtagcctgactg

SEQ ID NO: 71711 - DNA, 600 bp, Chicken  19866894350724_1
tctctgtacaggggaaggcgcagccctggaaccctctcactgcatcaaccagtccccaaaacaagctgtaccagatagctttaaagtagttgtcaccaaatgcttgtgcagcattgctcagaggaaaggcttgggaagctcttgtgcaaagatgacctaatttacagctctcggtgctattctagtaggtttgtgtgtgtgtgtgtgtgtagcaaaaaggaacctggcatctatcctcatttaatactgctctcagcctgactttgcaatgtcctactgaaagtacagccaagagaaacrttttttttctyttttaaccagacaaggggagtaaaaagcaaggaagaatgagggagaaagaagcagacaaatagcaaccaaggatttgggcactgcagtcccaaacagcttcatgaataacattacccactgcaaatcaagctgctggaatggctgccctgacccaatatgcaaatctgctgagggaagggctggggcggccaggagtgttggtagccagggcagcccccacacccagcccagattgtgcttcagctgacacggccatgctcagggaggcagtggggccgggtctgcctt

SEQ ID NO: 71712 - DNA, 600 bp, Chicken  19866894350724_2
gggaaggcgcagccctggaaccctctcactgcatcaaccagtccccaaaacaagctgtaccagatagctttaaagtagttgtcaccaaatgcttgtgcagcattgctcagaggaaaggcttgggaagctcttgtgcaaagatgacctaatttacagctctcggtgctattctagtaggtttgtgtgtgtgtgtgtgtgtagcaaaaaggaacctggcatctatcctcatttaatactgctctcagcctgactttgcaatgtcctactgaaagtacagccaagagaaactttttttttctyttttaaccagacaaggggagtaaaaagcaaggaagaatgagggagaaagaagcagacaaatagcaaccaaggatttgggcactgcagtcccaaacagcttcatgaataacattacccactgcaaatcaagctgctggaatggctgccctgacccaatatgcaaatctgctgagggaagggctggggcggccaggagtgttggtagccagggcagcccccacacccagcccagattgtgcttcagctgacacggccatgctcagggaggcagtggggccgggtctgccttttcccagctca

SEQ ID NO: 71713 - DNA, 599 bp, Chicken  19866894350726_1
  misc_feature (1)..(41): n is any nucleotide
nnnnnnnnnnnnnnnnnnnnnnnnnnnnnnnnnnnnnnnnntatgcaagcattgtatctaaatctaactgaagttaaactctaattttaacacacaggctgtactgtgaattcacaaatgccaggaaggattttaaaagtatcacgacaagatcctaggcctgtccccagctgtcctaaaaatcctgtgcagcctgatacagattttattctattaaatgtccagccacatggtattgaataggtacagccagaaatggcaggaaaaaggtgattatctttttgaaaaagatgacagcaytcccaayagcattctctgattttagagtttgtcagtgctcgagaaattctaattccagttaccttatatgtgtaaccttgctgttacayggcatactacgtagatgtccraagggaccagcctatgctacacacactggaagcaatgcttccactctccattcccggtagctctctttstcccaacagacaccactcatcyctagcgtctggtacttccctgttgcttctcttcatgtgatggatgacacactggaaactaaattattggcagataaggaaataaaacaaagcctacaa

SEQ ID NO: 71714 - DNA, 599 bp, Chicken  19866894350726_2
  misc_feature (1)..(34): n is any nucleotide
nnnnnnnnnnnnnnnnnnnnnnnnnnnnnnnnnntatgcaagcattgtatctaaatctaactgaagttaaactctaattttaacacacaggctgtactgtgaattcacaaatgccaggaaggattttaaaagtatcacgacaagatcctaggcctgtccccagctgtcctaaaaatcctgtgcagcctgatacagattttattctattaaatgtccagccacatggtattgaataggtacagccagaaatggcaggaaaaaggtgattatctttttgaaaaagatgacagcaytcccaayagcattctctgattttagagtttgtcagtgctcgagaaattctaattccagttaccttatatgtgtaaccttgctgttacayggcatactacgtagatgtccraagggaccagcctatgctacacacactggaagcaatgcttccactctccattcccggtagctctctttstcccaacagacaccactcatcyctagcgtctggtacttccctgttgcttctcttcatgtgatggatgacacactggaaactaaattattggcagataaggaaataaaacaaagcctacaactcagcc

SEQ ID NO: 71715 - DNA, 600 bp, Chicken  19866894350726_3
acacacaggctgtactgtgaattcacaaatgccaggaaggattttaaaagtatcacgacaagatcctaggcctgtccccagctgtcctaaaaatcctgtgcagcctgatacagattttattctattaaatgtccagccacatggtattgaataggtacagccagaaatggcaggaaaaaggtgattatctttttgaaaaagatgacagcaytcccaayagcattctctgattttagagtttgtcagtgctcgagaaattctaattccagttaccttatatgtgtaaccttgctgttacayggcatactacgtagatgtccraagggaccagcctatgctacacacactggaagcaatgcttccactctccattcccggtagctctctttstcccaacagacaccactcatcyctagcgtctggtacttccctgttgcttctcttcatgtgatggatgacacactggaaactaaattattggcagataaggaaataaaacaaagcctacaactcagccaaaacctcttccaaaacagggaagtcaatatggtatggtaaaaattatccaaaactcaatctctttcagataattaagcaact

SEQ ID NO: 71716 - DNA, 600 bp, Chicken  19866894350726_4
ttcacaaatgccaggaaggattttaaaagtatcacgacaagatcctaggcctgtccccagctgtcctaaaaatcctgtgcagcctgatacagattttattctattaaatgtccagccacatggtattgaataggtacagccagaaatggcaggaaaaaggtgattatctttttgaaaaagatgacagcaytcccaayagcattctctgattttagagtttgtcagtgctcgagaaattctaattccagttaccttatatgtgtaaccttgctgttacayggcatactacgtagatgtccraagggaccagcctatgctacacacactggaagcaatgcttccactctccattcccggtagctctctttstcccaacagacaccactcatcyctagcgtctggtacttccctgttgcttctcttcatgtgatggatgacacactggaaactaaattattggcagataaggaaataaaacaaagcctacaactcagccaaaacctcttccaaaacagggaagtcaatatggtatggtaaaaattatccaaaactcaatctctttcagataattaagcaactgaatttataacattcctggtc

SEQ ID NO: 71717 - DNA, 600 bp, Chicken  19866894350726_5
aaatcctgtgcagcctgatacagattttattctattaaatgtccagccacatggtattgaataggtacagccagaaatggcaggaaaaaggtgattatctttttgaaaaagatgacagcaytcccaayagcattctctgattttagagtttgtcagtgctcgagaaattctaattccagttaccttatatgtgtaaccttgctgttacayggcatactacgtagatgtccraagggaccagcctatgctacacacactggaagcaatgcttccactctccattcccggtagctctctttstcccaacagacaccactcatcyctagcgtctggtacttccctgttgcttctcttcatgtgatggatgacacactggaaactaaattattggcagataaggaaataaaacaaagcctacaactcagccaaaacctcttccaaaacagggaagtcaatatggtatggtaaaaattatccaaaactcaatctctttcagataattaagcaactgaatttataacattcctggtcttacatccatcatggatgaatccatcttacatccagtcatgggatgtgagtacaaatataaaaggaaga

SEQ ID NO: 71718 - DNA, 600 bp, Chicken  19866894350726_6
gattttattctattaaatgtccagccacatggtattgaataggtacagccagaaatggcaggaaaaaggtgattatctttttgaaaaagatgacagcaytcccaayagcattctctgattttagagtttgtcagtgctcgagaaattctaattccagttaccttatatgtgtaaccttgctgttacayggcatactacgtagatgtccraagggaccagcctatgctacacacactggaagcaatgcttccactctccattcccggtagctctctttstcccaacagacaccactcatcyctagcgtctggtacttccctgttgcttctcttcatgtgatggatgacacactggaaactaaattattggcagataaggaaataaaacaaagcctacaactcagccaaaacctcttccaaaacagggaagtcaatatggtatggtaaaaattatccaaaactcaatctctttcagataattaagcaactgaatttataacattcctggtcttacatccatcatggatgaatccatcttacatccagtcatgggatgtgagtacaaatataaaaggaagagaagccaggaagagtaaataca

SEQ ID NO: 71719 - DNA, 600 bp, Chicken  19866894350727_1
atttgctgtgatctgcccaacggcactccagtgaaggcagagtgtgagaccaatagcagccagcagccttttgcaggcaggacaggaatccctaggaatcactatgggctcatcccacaaaacattttccccagacaaagctgcccacagcctgaggtcacattggttacgcactgaccacagaccccactgaggacccaagcacggcacacacccagtgcccacagaacaccatttgggactgcccaggctccccatcctccctgccttgtgcctgggaagttgtccctctagcccctrtgtggtcttgaggttaagggccagcacttcatggagtgaagaagccagcactgggatgaagaggttgaggtgcaggtctcaccagccctgtatgctgcacagctcttcactgcagggtatgcaatgcactccaaaccctgcagccatccacacctgctcacaccctctctgcaccgcagaaaccaggaaattgtctctgtggctgtttgcagccatgccaaggtgttttcccattgatggagtattgcaaaatcacacagagctgttctgttcccctgggagctaaaagaagctcgattt

SEQ ID NO: 71720 - DNA, 600 bp, Chicken  19866894350727_2
tgttcccctgggagctaaaagaagctcgatttttttcttggcttcactgggatcagcaggagatcaacactcggagcaccagggatggcagccctctgataccaatgagttgaggcagatcttgagcagcccctttggcagattttccagcagcaggctgccctccccaccttgccccgcagcctcgtcccatgcacagcctgcttctgctgttggcagacgctcggcctggcagctcacgctgtggtggggaacagagagcagtaaatgagctgctcaggtgcacagagtccagggcakgcaccatgggtttgacgtggaacatgagagagggaccgtatgcgcatcctgctgccagccgggccgcccgctgccttgggaaatcgtcttcgtgctgtgtctgcagctggctggctgaaatgcagatgtttgcgttgtttacgggaggcctcagttgcagaattcaatttcctcaggtttcgagtattttggatctgtggtttgccctcttgagcagagacagggacttggttgttttaagtggagagctgagtttacatgataaatctcatttacacaatggtgggaagaagctcgatt

SEQ ID NO: 71721 - DNA, 600 bp, Chicken  19866894350732_1
gcaaacaacaaacagtcctgtccctgagcaaaaaggtatgtgtgtccaccatcacttgagttatttttgtacctttttcatcattaagctctgactttctcctccatttcacaagctattttaagaacacttcttactgagcaaagagacggacaaacgaatggagactaaaggactcctggtgtgtcccagcctctgtgaaatgtgccattttcagcctggcaaagtcagcaggggaggtaatacctttgatgctactgaacaatacagcaagaactggcgagaagcttccaggcacayggggctgaagtgctgagccctgctcatacccatctaaagcagcctgagatgggcttagtgrggtggatggggaagcacaggcagagcaatgggccttgcctaaaggcagctgcttttcaaagcaccccagcaagagatctaacctattacacaccagggctacggctaagagcaacttgtcatgcttgaagttttcccttattctgtgcatgtgctctgacttccaggaaacaaactctaagaaagaaaacattctcagttttaagaaaatttaagagccaaacatatctgcgatccagt

SEQ ID NO: 71722 - DNA, 600 bp, Chicken  19866894350732_2
tatttttgtacctttttcatcattaagctctgactttctcctccatttcacaagctattttaagaacacttcttactgagcaaagagacggacaaacgaatggagactaaaggactcctggtgtgtcccagcctctgtgaaatgtgccattttcagcctggcaaagtcagcaggggaggtaatacctttgatgctactgaacaatacagcaagaactggcgagaagcttccaggcacayggggctgaagtgctgagccctgctcatacccatctaaagcagcctgagatgggcttagtgrggtggatggggaagcacaggcagagcaatgggccttgcctaaaggcagctgcttttcaaagcaccccagcaagagatctaacctattacacaccagggctacggctaagagcaacttgtcatgcttgaagttttcccttattctgtgcatgtgctctgacttccaggaaacaaactctaagaaagaaaacattctcagttttaagaaaatttaagagccaaacatatctgcgatccagtagaagatcagttgtctccctcagacagcacttgaacagggttcaatcaatcactcaagcca

SEQ ID NO: 71723 - DNA, 599 bp, Chicken  19866894350733_1
  misc_feature (1)..(155): n is any nucleotide
nnnnnnnnnnnnnnnnnnnnnnnnnnnnnnnnnnnnnnnnnnnnnnnnnnnnnnnnnnnnnnnnnnnnnnnnnnnnnnnnnnnnnnnnnnnnnnnnnnnnnnnnnnnnnnnnnnnnnnnnnnnnnnnnnnnnnnnnnnnnnnnnnnnnnnnnnnnttaagttggacttatgttctggctggattacaattttgcttgggagatacttcgttagctgatgatttactgttggactgcacaacctccatatgactttgtggcttgcagcagtatttctgttagaagccaatcccatgattgytaaacaatagctgtggcaacggcatcaattagtgggcttgaactagamgtatctgacaaaaatattgcaaactttttcagattgtggttattcttttgtgcaggttttgtgcttaactgtgaataagtttctagtcactgaaacacacacaaaatgattataactttgagtaaatagaaattatttcctrgagagattccatgcactgggaagccacagtgttttgagtttaaatttacatcagatccgccacgatcacatcactgctctgtggctcccaaggggtttctgtggcagaa

SEQ ID NO: 71724 - DNA, 599 bp, Chicken  19866894350733_2
  misc_feature (1)..(107): n is any nucleotide
nnnnnnnnnnnnnnnnnnnnnnnnnnnnnnnnnnnnnnnnnnnnnnnnnnnnnnnnnnnnnnnnnnnnnnnnnnnnnnnnnnnnnnnnnnnnnnnnnnnnnnnnnnnttaagttggacttatgttctggctggattacaattttgcttgggagatacttcgttagctgatgatttactgttggactgcacaacctccatatgactttgtggcttgcagcagtatttctgttagaagccaatcccatgattgytaaacaatagctgtggcaacggcatcaattagtgggcttgaactagamgtatctgacaaaaatattgcaaactttttcagattgtggttattcttttgtgcaggttttgtgcttaactgtgaataagtttctagtcactgaaacacacacaaaatgattataactttgagtaaatagaaattatttcctrgagagattccatgcactgggaagccacagtgttttgagtttaaatttacatcagatccgccacgatcacatcactgctctgtggctcccaaggggtttctgtggcagaactggttgcagcttcagtcctagkcctgtgtaacacagacttgagaggg

SEQ ID NO: 71725 - DNA, 600 bp, Chicken  19866894350733_3
ttgcttgggagatacttcgttagctgatgatttactgttggactgcacaacctccatatgactttgtggcttgcagcagtatttctgttagaagccaatcccatgattgytaaacaatagctgtggcaacggcatcaattagtgggcttgaactagamgtatctgacaaaaatattgcaaactttttcagattgtggttattcttttgtgcaggttttgtgcttaactgtgaataagtttctagtcactgaaacacacacaaaatgattataactttgagtaaatagaaattatttcctrgagagattccatgcactgggaagccacagtgttttgagtttaaatttacatcagatccgccacgatcacatcactgctctgtggctcccaaggggtttctgtggcagaactggttgcagcttcagtcctagkcctgtgtaacacagacttgagagggaaaatggtcccagtgttggaagaggtttgaactaaaaagctttatttctgccagacattattggagtgtttttatttctgtgaagtgtataaatatttattctggaaacagaattgttttgtgagaactatcccacttcatac

SEQ ID NO: 71726 - DNA, 600 bp, Chicken  19866894350733_4
catcaattagtgggcttgaactagamgtatctgacaaaaatattgcaaactttttcagattgtggttattcttttgtgcaggttttgtgcttaactgtgaataagtttctagtcactgaaacacacacaaaatgattataactttgagtaaatagaaattatttcctrgagagattccatgcactgggaagccacagtgttttgagtttaaatttacatcagatccgccacgatcacatcactgctctgtggctcccaaggggtttctgtggcagaactggttgcagcttcagtcctagkcctgtgtaacacagacttgagagggaaaatggtcccagtgttggaagaggtttgaactaaaaagctttatttctgccagacattattggagtgtttttatttctgtgaagtgtataaatatttattctggaaacagaattgttttgtgagaactatcccacttcataccctttttcaagagctgtctttagaaattcagatatgccttataccaattatttgcacctgttacatttcttatgcagaattaagtcactgattcttttgcaaagctcctaagggacttacattctacctcag

SEQ ID NO: 71727 - DNA, 600 bp, Chicken  19866894350736_1
cgaggtgtgcttgctgaagttgtatttcttcttccaaaagtagataaatacagtactaataagcatctagaagctggatttaaggtttatttctctctcaatgttggttctacagttcaaaagtcacagatctagaaaggacctttcaaatgcccaaataagcacagcgttacgcacagcgcatcactgatggaacggcctaccacaagcagaggccgtaatcctgaaataaatccatgattcaacccatacagaactgtcataacagcaacctgaactttcctttttttaagcttccarattaacatcctaagtagaaagagctaattaacttctaatagagaattaaaattctagcaagcttcgctgtatgtacaaataagagccagcaacaataactgaaggaaggtatacactgatctaatggaattaatgccggtgagacaaatataattaagacattggtagctgatttggtaagtgcttttaatggtgagaagcttcctctcagaaatataaaaaggattttaacattacacaaaaaacatcgtattttatagaccagaaacagaagttaagcaacagtttattgcaggtgat

SEQ ID NO: 71728 - DNA, 599 bp, Chicken  19866894350744_1
  misc_feature (1)..(41): n is any nucleotide
nnnnnnnnnnnnnnnnnnnnnnnnnnnnnnnnnnnnnnnnntgatcttatgtttaaagtgtctgttctaattcctctggacggggccaggacagctcctttgtcctctgtttagggctgcagatctgcagtagaatcccaggaaatgatatgagagtagtctggaccaatttattggatttctttgctcatctagttagcagcaacacattaataaacaagtagcatatctgtggccctgagaggtattcttaaatccatacttgcagcaaaattatccaaatcaaatgtcatcacaaarcttgggatgatcgttgctaaaggcaggatggtgtcctcagcccccgcatattgaaacacaggatgattaaacaagagttgttatcttggattgacatcctcagttcctcccactatggaggagttactataaacaggtaaaaataaacagtttatataacttcttctctaagcagtatcagaaaataactggtcttacgttttacattttgactgccaagtattttgtgcaatgggcaaaatttcagcacataaataaaaatagtatttaaaaaaactgtgtgtgtgtaaagaatgtga

SEQ ID NO: 71729 - DNA, 600 bp, Chicken  19866894350744_2
agaatcatagaataactcaagttggtaggaacccataaggatcattgtgttggacttctcgttatccttttatctttggatggacagtgaaaacattgtttcactttttctgatgataagtgactgtataagctggcctgtggtagctttgttctcttgtgtttcttaaaaatgaacgtttaatgtacaaaaactcctagatgccctttttttccaaatttttcacagtcctgtgaaacagtgcagatggggacacaggctataaacctgggactcagaggcatctgattttattcaatrattgaattttcattcaatcatatgaaagaatgaatgatcttttctacagagaaaagcagcatagcttcacttaatcagatagctccagtgttgagtgaagccaagcaatcaaaggctgtccaacagccagtataagctgtgggcttatgagtgtagaaaacttttatttctttctgtattggttgagggattcactgctttctggtctgtggctgggaatcccactgtgtaaataataatgaccttcagctaaatgtagtgtttctttttaagtgggtgaacgcaaacagctttgatctg

SEQ ID NO: 71730 - DNA, 599 bp, Chicken  19866894350747_1
  misc_feature (1)..(116): n is any nucleotide
nnnnnnnnnnnnnnnnnnnnnnnnnnnnnnnnnnnnnnnnnnnnnnnnnnnnnnnnnnnnnnnnnnnnnnnnnnnnnnnnnnnnnnnnnnnnnnnnnnnnnnnnnnnnnnnnnnnntctttttttttcccccacattttccattttctagaagcaaatcaaacaagctgttattgcgttctattgtagcagaagagcagcatgtaattcctgagaatgttgtgatattttatggtccccttctgtcccttgagataaagtaatcccttgtgaaaaatctgatcctattatgctggaaacstaagctcagaagaaatcaataagtatcaacttgctgatgtgtcaaatcaggataaagaacataaaaaatacatatattcatttccatcgtcccaaagggagaaagctttgtgcgctgttgtgcttccttgcatgaaatgtagtggctatagaggatctgcctggtaacyagagtttctccctttccacagattgtttatcttattaatcataattcttcacagaggaaatctttggtcagtagtytaacaagtaatcttgttagtactttgattctgtaatgtaatatagttgcaccca

SEQ ID NO: 71731 - DNA, 524 bp, Chicken  19866894350747_2
tctttttttttcccccacattttccattttctagaagcaaatcaaacaagctgttattgcgttctattgtagcagaagagcagcatgtaattcctgagaatgttgtgatattttatggtccccttctgtcccttgagataaagtaatcccttgtgaaaaatctgatcctattatgctggaaacstaagctcagaagaaatcaataagtatcaacttgctgatgtgtcaaatcaggataaagaacataaaaaatacatatattcatttccatcgtcccaaagggagaaagctttgtgcgcyagagtttctccctttccacagattgtttatcttattaatcataattcttcacagaggaaatctttggtcagtagtytaacaagtaatcttgttagtactttgattctgtaatgtaatatagttgcacccatggaacaccaatgctccttcatgttcataagaggcaatgggtattgataaaccaaatagttttctagatcagactgaagagaattaatgccaac

SEQ ID NO: 71732 - DNA, 448 bp, Chicken  19866894350747_3
tctttttttttcccccacattttccattttctagaagcaaatcaaacaagctgttattgcgttctattgtagcagaagagcagcatgtaattcctgagaatgttgtgatattttatggtccccttctgtcccttgagataaagtaatcccttgtgaaaaatctgatcctattatgctggaaacstaagctcagaagaaatcaataagtatcaacttgctgatgtgtcaaatcaggataaagaacataaaaaatacatatattcatttccatcgtcccaaagggagaaagctttgtgcgcytaacaagtaatcttgttagtactttgattctgtaatgtaatatagttgcacccatggaacaccaatgctccttcatgttcataagaggcaatgggtattgataaaccaaatagttttctagatcagactgaagagaattaatgccaac

SEQ ID NO: 71733 - DNA, 600 bp, Chicken  19866894350751_1
atttgctcttctctgaccagccatgggcatggtctgtgggaaggagcagacggtgtcactggtgtgcctgatgtcactgcatagaactgggctgtgctcctacaacaaacgtgggtttctctttcctccagctctaacacttgggttttgttgtttattttttgctgttgttgatcagaaacaggacagcctgtggtctccttgctcagtaaggcagcagtgctttgcagccctctatctcagctggagctgttagtgtggagtgggtcctcctgtgctctgtgcaaagcaattcctccycctcatcttcactgcttttgggaaggcaaaggattttatggcctttgtttgtggcaggggtttgaacacttgcattgcttgctaaagctccatctgccgtgtgttttacacctgaaggctctttgttcttcacctgtctgccctgtcaaagctgtgtgagatgagagagctctgagaggaggatcttggtgctgacagtgccttggctcagtccaaaagctattggggaaggctggcttccatgtaaaccacagcagagctcagcttctgcccttaaaatcaaacatgttgccgggaaga

SEQ ID NO: 71734 - DNA, 600 bp, Chicken  19866894350776_1
gctgaaacagaaaacctgctgaaattaaaacataagaccatctctttctgtcctcttgtctgccttccctttctccatataaatagcacaggtgaaacagagttaactagctgcctaaggcaggttacctctattaaaggtgaatgtggtctctactttcactgatcagaccggtttttgttcttgaactgaaaacacctcacaaatttttgtaccagttgcttccatgaatatcccttcctaaccgttttccataaagtcatttgcacacctacttcttgttcactgagtagccagackgacacagaaaatcattgctttcactgaaatggtgtcataatgtggcataaaacttctcagttatgtttgagaaaattgtgttgttcyycttagaaactratttcataaagactaactagttaattaatttctccaccaccacaaaacagtactgtcacgttacagaatgcaaaaaatagtacagagaatcaaagctcaaagccttgctgggcagagtaggagcatatattaaggcacccttagttcatctcactttcacctcttgctcttaaattaacttccaaaactggatgcgttctg

SEQ ID NO: 71735 - DNA, 578 bp, Chicken  19866894350776_2
acaggtgaaacagagttaactagctgcctaaggcaggttacctctattaaaggtgaatgtggtctctactttcactgatcagaccggtttttgttcttgaactgaaaacacctcacaaatttttgtaccagttgcttccatgaatatcccttcctaaccgttttccataaagtcatttgcacacctacttcttgttcactgagtagccagackgacacagaaaatcattgctttcactgaaatggtgtcataatgtggcataaaacttctcagttatgtttgagaaaattgtgttgttcyycttagaaactratttcataaagactaactagttaattaatttctccaccaccacaaaacagtactgtcacgttacagaatgcaaaaaatagtacagagaatcaaagctcaaagccttgctgggcagagtaggagcatatattaaggcacccttagttcatctcactttcacctcttgctcttaaattaacttccaaaactggatgcgttctgtttccctgacccatatcaattattagttttcctctttgctgttaaaaagactgtatctacagtat

SEQ ID NO: 71736 - DNA, 577 bp, Chicken  19866894350776_3
caggtgaaacagagttaactagctgcctaaggcaggttacctctattaaaggtgaatgtggtctctactttcactgatcagaccggtttttgttcttgaactgaaaacacctcacaaatttttgtaccagttgcttccatgaatatcccttcctaaccgttttccataaagtcatttgcacacctacttcttgttcactgagtagccagackgacacagaaaatcattgctttcactgaaatggtgtcataatgtggcataaaacttctcagttatgtttgagaaaattgtgttgttcyycttagaaactratttcataaagactaactagttaattaatttctccaccaccacaaaacagtactgtcacgttacagaatgcaaaaaatagtacagagaatcaaagctcaaagccttgctgggcagagtaggagcatatattaaggcacccttagttcatctcactttcacctcttgctcttaaattaacttccaaaactggatgcgttctgtttccctgacccatatcaattattagttttcctctttgctgttaaaaagactgtatctacagtat

SEQ ID NO: 71737 - DNA, 566 bp, Chicken  19866894350776_4
gagttaactagctgcctaaggcaggttacctctattaaaggtgaatgtggtctctactttcactgatcagaccggtttttgttcttgaactgaaaacacctcacaaatttttgtaccagttgcttccatgaatatcccttcctaaccgttttccataaagtcatttgcacacctacttcttgttcactgagtagccagackgacacagaaaatcattgctttcactgaaatggtgtcataatgtggcataaaacttctcagttatgtttgagaaaattgtgttgttcyycttagaaactratttcataaagactaactagttaattaatttctccaccaccacaaaacagtactgtcacgttacagaatgcaaaaaatagtacagagaatcaaagctcaaagccttgctgggcagagtaggagcatatattaaggcacccttagttcatctcactttcacctcttgctcttaaattaacttccaaaactggatgcgttctgtttccctgacccatatcaattattagttttcctctttgctgttaaaaagactgtatctacagtat

SEQ ID NO: 71738 - DNA, 599 bp, Chicken  19866894350777_1
  misc_feature (1)..(11): n is any nucleotide
nnnnnnnnnnnctgtgctatttatatggagaaagggaaggcagacaagaggacagaaagagatggtcttatgttttaatttcagcaggttttctgtttcagccttttcctgaaaagaagaggtacttttatgttatttacattaatatcttaattaagttaaaagcagaactatctttcaagtcttttctattttttcctgtgataagttacaagagtaaagttaaatggaaaaatgtggagatttagcaaataagaggcatgtctcatttttattttagaaacttcagtagcagactcyctcagtagaaagtaagctataataccagatatgtccttgtaccctgaagagtttgggtaagtgtgatggtatttttaaatgatgttagatgcatgccactttttctcaaaggttagttctttcatatggaagtacagaaataagacttgagagtgtttttatgagtgttgaaacttgattcacacatgcagttttgctcaaactttgttactgaagaattctratgtatgaagggctgacattgagtgtgtttgcgaaacacagtacaaaagaatgtaaagggaacaaagaatatgcat

SEQ ID NO: 71739 - DNA, 600 bp, Chicken  19866894350777_2
taaatggaaaaatgtggagatttagcaaataagaggcatgtctcatttttattttagaaacttcagtagcagactcyctcagtagaaagtaagctataataccagatatgtccttgtaccctgaagagtttgggtaagtgtgatggtatttttaaatgatgttagatgcatgccactttttctcaaaggttagttctttcatatggaagtacagaaataagacttgagagtgtttttatgagtgttgaaacttgattcacacatgcagttttgctcaaactttgttactgaagaattctratgtatgaagggctgacattgagtgtgtttgcgaaacacagtacaaaagaatgtaaagggaacaaagaatatgcatgtgtgcatgcaaagtattgtcccaatgtccttagcagctgcgtgtctcaaaactgcagagatttccagcatctcagtggcagagagaagtgcgattatccatgtttcaaggattggatgtgtgtcacagagtgcccatgcaactttctaactgcatgtagcctttctctgtggagatcaaaattaaattcacaggtgctgagtcccagttcaactctggcctaa

SEQ ID NO: 71740 - DNA, 600 bp, Chicken  19866894350780_1
aatgaatatcacaggcaagtgcacaaaacaggaaatccaggcaggaaaatgacagttaataacagacctttcaagtacagcagataaaagaaagaaaaagagaataacatatgtaagacatcagggaaggtgtcttacatccactccctcacaatccaactcgactactactttttttggattcagaaccatcagaataaaggttattgccatagaaatagaggctacactggaagcacagcagaaaagaggactgcactggaaaatattgcagttcaactgagtactgaatatttatcyccagargagaaagaggccctatkcaagactagtccwaaatccacaaacattgaatcttttctgctaaaagaaaacaaacagcagtaattcaacctgcatgacccaaagctgaagtattttctctgcctgtgcccaaaaaggattacgacaagagatatgcagcatttaccattagggactgatcttttaattactaccattacattttttcagtaatactgctgcaagcttctccctgcaacccttacacccacagcagctctacagaaatgcagtcaaagtcagggaaaaacacatagt

SEQ ID NO: 71741 - DNA, 600 bp, Chicken  19866894350780_2
tatcacaggcaagtgcacaaaacaggaaatccaggcaggaaaatgacagttaataacagacctttcaagtacagcagataaaagaaagaaaaagagaataacatatgtaagacatcagggaaggtgtcttacatccactccctcacaatccaactcgactactactttttttggattcagaaccatcagaataaaggttattgccatagaaatagaggctacactggaagcacagcagaaaagaggactgcactggaaaatattgcagttcaactgagtactgaatatttatcyccagargagaaagaggccctatkcaagactagtccwaaatccacaaacattgaatcttttctgctaaaagaaaacaaacagcagtaattcaacctgcatgacccaaagctgaagtattttctctgcctgtgcccaaaaaggattacgacaagagatatgcagcatttaccattagggactgatcttttaattactaccattacattttttcagtaatactgctgcaagcttctccctgcaacccttacacccacagcagctctacagaaatgcagtcaaagtcagggaaaaacacatagtaaagtc

SEQ ID NO: 71742 - DNA, 600 bp, Chicken  19866894350780_3
caaaacaggaaatccaggcaggaaaatgacagttaataacagacctttcaagtacagcagataaaagaaagaaaaagagaataacatatgtaagacatcagggaaggtgtcttacatccactccctcacaatccaactcgactactactttttttggattcagaaccatcagaataaaggttattgccatagaaatagaggctacactggaagcacagcagaaaagaggactgcactggaaaatattgcagttcaactgagtactgaatatttatcyccagargagaaagaggccctatkcaagactagtccwaaatccacaaacattgaatcttttctgctaaaagaaaacaaacagcagtaattcaacctgcatgacccaaagctgaagtattttctctgcctgtgcccaaaaaggattacgacaagagatatgcagcatttaccattagggactgatcttttaattactaccattacattttttcagtaatactgctgcaagcttctccctgcaacccttacacccacagcagctctacagaaatgcagtcaaagtcagggaaaaacacatagtaaagtcaagctgtagaagtagca

SEQ ID NO: 71743 - DNA, 600 bp, Chicken  19866894350780_4
ccaggcaggaaaatgacagttaataacagacctttcaagtacagcagataaaagaaagaaaaagagaataacatatgtaagacatcagggaaggtgtcttacatccactccctcacaatccaactcgactactactttttttggattcagaaccatcagaataaaggttattgccatagaaatagaggctacactggaagcacagcagaaaagaggactgcactggaaaatattgcagttcaactgagtactgaatatttatcyccagargagaaagaggccctatkcaagactagtccwaaatccacaaacattgaatcttttctgctaaaagaaaacaaacagcagtaattcaacctgcatgacccaaagctgaagtattttctctgcctgtgcccaaaaaggattacgacaagagatatgcagcatttaccattagggactgatcttttaattactaccattacattttttcagtaatactgctgcaagcttctccctgcaacccttacacccacagcagctctacagaaatgcagtcaaagtcagggaaaaacacatagtaaagtcaagctgtagaagtagcaaaagctatatcat

SEQ ID NO: 71744 - DNA, 600 bp, Chicken  19866894350782_1
tgaagaaatagacaaaacaaggcatgacaaataaatgctgcgcccattgcttgagctttctgagctatgtggaattcacagcaataccttttaagggtaaaatggtgtaaaatcagtgcatttgtctatctgtggtttctttaggctggatacttgatcacagttgtcagtgcagataacagtgaaagcagaagagtaacactgctcctgagagtggggataggccactggagaagtcttagaagacctttgtttgctgtggaggttaagaccttcagatgagcagcactctcagaacaraagtagccctgtgtgttcccagtacccattcttgtactgaatgacttcaggtcatcagggaaaagtaatgttttgaggtggatgtggattggctggaactaaaattggaggacaaaagtgccatatctacccccagcttctctttggctctccgtggtagtatccttttacatatcttgccagtgggcatactctacacagtagtgtgcttacaatcttgctcatactcccaaacttgggaacttcaggtggcagcacggaaggccagtgacagagttttccttttgttgctgaatcagc

SEQ ID NO: 71745 - DNA, 600 bp, Chicken  19866894350782_2
atcttgctcatactcccaaacttgggaacttcaggtggcagcacggaaggccagtgacagagttttccttttgttgctgaatcagcccagaggtccctcagagcaaaattatataggtctgctaaatgagatcttacagcgagaacacagtaacaacattacagctttcaaatctttttgattgaaagccctaagtctttatatccagagggcaaagtatattgctttcacactttcaggacccattcaaaaatccacttgaaacaaggccagaatgacattgtctctactccttttcamagggacgggagggaaasgctgaagcagcacaaaggcactatgagaaaaaaagttaggactggtaggctgtgcaagtaggggttcatttacgcatccttccacaatcttcactgaaagctacagcttgtctttttgagcagcagtcactgcagaggttataggcttctcagctgtgagtgcttaccttgctctgagatgcaccgacacattgtaaaatctatgtctggagcaccagcttcctcgctgagtaattgcgagtaaatgtcataaagcctgccgtggattcagagcagtggctcc

SEQ ID NO: 71746 - DNA, 600 bp, Chicken  19866894350782_3
aaacttgggaacttcaggtggcagcacggaaggccagtgacagagttttccttttgttgctgaatcagcccagaggtccctcagagcaaaattatataggtctgctaaatgagatcttacagcgagaacacagtaacaacattacagctttcaaatctttttgattgaaagccctaagtctttatatccagagggcaaagtatattgctttcacactttcaggacccattcaaaaatccacttgaaacaaggccagaatgacattgtctctactccttttcamagggacgggagggaaasgctgaagcagcacaaaggcactatgagaaaaaaagttaggactggtaggctgtgcaagtaggggttcatttacgcatccttccacaatcttcactgaaagctacagcttgtctttttgagcagcagtcactgcagaggttataggcttctcagctgtgagtgcttaccttgctctgagatgcaccgacacattgtaaaatctatgtctggagcaccagcttcctcgctgagtaattgcgagtaaatgtcataaagcctgccgtggattcagagcagtggctcctggcttcctaaagcctc

SEQ ID NO: 71747 - DNA, 600 bp, Chicken  19866894350783_1
caggcccctcattatctttgtggccctcctctggtttctccccaataattcccttttatcatcagaaaacctgcagctgacagtgtcaatgaaatcagatcaggcaccagggtgacagctgctgacctgtcactctgagagattactgtggtcagaagtcagaagtaacatttataccaaaggtcattcctgctgcagtcatcacattcctgccaactgctctcatctaggaaacctagaaaaattactacttggcaatgggtcacattttaccctgttagaaagtgaaatcttcctgayaaagagaaacaattggcagattgccattgcattatccttaaggttaaggggaaattgaattcttcaatagacatttagaaattataaataggtaagctgggacacaaaccaccataactctttactgcacacytcctctgggcatgtagagctaagtagcatggaacagttccaaagctgactgttattgctgaacaggagagcgataaatgaataagtaaatactgctgacataccgatgcctgctctgccaaggtgacaggtgccagtatgactgaatgaaaacccaatagaaaaaaa

SEQ ID NO: 71748 - DNA, 600 bp, Chicken  19866894350783_2
tctgagagattactgtggtcagaagtcagaagtaacatttataccaaaggtcattcctgctgcagtcatcacattcctgccaactgctctcatctaggaaacctagaaaaattactacttggcaatgggtcacattttaccctgttagaaagtgaaatcttcctgayaaagagaaacaattggcagattgccattgcattatccttaaggttaaggggaaattgaattcttcaatagacatttagaaattataaataggtaagctgggacacaaaccaccataactctttactgcacacytcctctgggcatgtagagctaagtagcatggaacagttccaaagctgactgttattgctgaacaggagagcgataaatgaataagtaaatactgctgacataccgatgcctgctctgccaaggtgacaggtgccagtatgactgaatgaaaacccaatagaaaaaaaataaaaggaaaaatatacattagcaaaaccagcagtaacaacaaaactaaatattctgaaatctcttagtgkgactaattaatgaaaatcctagagtctggagatctactgaagggggaataaatgtaagact

SEQ ID NO: 71749 - DNA, 600 bp, Chicken  19866894350783_3
atttagaaattataaataggtaagctgggacacaaaccaccataactctttactgcacacytcctctgggcatgtagagctaagtagcatggaacagttccaaagctgactgttattgctgaacaggagagcgataaatgaataagtaaatactgctgacataccgatgcctgctctgccaaggtgacaggtgccagtatgactgaatgaaaacccaatagaaaaaaaataaaaggaaaaatatacattagcaaaaccagcagtaacaacaaaactaaatattctgaaatctcttagtgkgactaattaatgaaaatcctagagtctggagatctactgaagggggaataaatgtaagacttaaatttcaagatcaatgatgaaaaacttttaagtcttttcaccaaaaatggaatggaattgtttagggacacctgaattgaatacatttatttcatcacctggcctacagaattcaagttttaatagatctgacagcatactctttaaataggtcaacaactgttatataaaactgatcttacacaaaacttctgaatcttagccatagttgcctgtcccctcattactgactacata

SEQ ID NO: 71750 - DNA, 600 bp, Chicken  19866894350784_1
ttcttttgctaacggcccattaggagtaaaagtgaaggaaatggaatcctgggggtatataattcatagcctgctcacaaagtatttgctagtgtcatagcagcagaaaaacaaaacaatgcttgctctctgtctcagttactgtaagtttaaacatttttaaaaccaggtgtatttaaaaaccgaactttatttagccaagtgcatatacagcttgatagatttgtcaagttatatgatgacaaaggtacaagagataaaaaaaaagttctcctttgcagccatgcaatacgggaaagyttttcctctcagccttagcacgagtacagcaggattttgtacttttttctttatttcttctttcttgaataagagacatcagcatcctggagtgagaatacattgtcagcattttccctccttgtactgtattggtgtccctcacctacagcattactttgcctcaaccagcctgtgatcgtgggcagctgcaacttaaagcttcctgcctttgcaatgtatgtgccaacattagtgttccttttccagattttggaatgcttcagcacgttattgcatactatgttcaacaagaacaca

SEQ ID NO: 71751 - DNA, 428 bp, Chicken  19866894350787_1
tcggctatgcctggattgcgatatttaggtgagctggcatggaaaccatcctgtggggcaggggttgtgcctacccgtgtgctatggggctgtgtgaccgctctcctgaggctgtacgtgtatagtagtagtgtaagggtgctggaaatggcagggagacaacgtggtgcttgctcagatgcctccatggataaaagcttggtccaagcgctgtgagtgcaggactgtgcagagcctgctcttccttctgcactgtgctgaagctgtctttaagtccatctgggaaagaagggctgagtrctgtgggcagatggcaacacgggattggtgtraatgggagcggtttttggttccttggtgtctggcaccgctctgggaccagctgtgggtgtaagaactgacccagccagcagtgacattgcctgctc

SEQ ID NO: 71752 - DNA, 396 bp, Chicken  19866894350787_2
tcggctatgcctggattgcgatatttaggtgagctggcatggaaaccatcctgtggggcaggggttgtgcctacccgtgtgctatggggctgtgtgaccgctctcctgaggctgtacgtgtatagtagtagtgtaagggtgctggaaatggcagggagacaacgtggtgcttgctcagatgcctccatggataaaagcttggtccaagcgctgtgagtgcaggactgtgcagagcctgctcttccttctgcactgtgctgaagctgtctttaagtccatctgggaaagaagggctgagtraatgggagcggtttttggttccttggtgtctggcaccgctctgggaccagctgtgggtgtaagaactgacccagccagcagtgacattgcctgctc

SEQ ID NO: 71753 - DNA, 600 bp, Chicken  19866894350793_1
tatttttcacacaaataagaatccaggatcattgttacagtcaaaagcaatagagcatcaaaatactttcaggaattcagacaaattcacattcacatgctgaaatcataagtggcctcatttcccagaagttgttaagtacagaacacatagcattcaaagaaagaggagcctacttcgttcttttggctgttgggcaacacttaaaggccagacatatatctggagagttcaaatggacacaacacctgtttgcgaagtttgaggtgtcccacataagagacagtaaggcctcacagygacctttttatctgtcacagtactttggaggccaagaatggcaaggaccatctcatcacctcagccaagagcagggccaagggaggggtacyaagcacctgcccatgaaacaggccaaggccaggttgtatgcttaggaacaggatcagctcagcagggcccaaggccaagcagggctgtggggagctggagaccagccctgctgtggcaggaactgatagctgcagaggtgacattggatcctgggccttgggaagggtggaggagacatcagaccagggagcaaggacagtcagaact

SEQ ID NO: 71754 - DNA, 600 bp, Chicken  19866894350793_2
tcacatgctgaaatcataagtggcctcatttcccagaagttgttaagtacagaacacatagcattcaaagaaagaggagcctacttcgttcttttggctgttgggcaacacttaaaggccagacatatatctggagagttcaaatggacacaacacctgtttgcgaagtttgaggtgtcccacataagagacagtaaggcctcacagygacctttttatctgtcacagtactttggaggccaagaatggcaaggaccatctcatcacctcagccaagagcagggccaagggaggggtacyaagcacctgcccatgaaacaggccaaggccaggttgtatgcttaggaacaggatcagctcagcagggcccaaggccaagcagggctgtggggagctggagaccagccctgctgtggcaggaactgatagctgcagaggtgacattggatcctgggccttgggaagggtggaggagacatcagaccagggagcaaggacagtcagaactgatgggacctacaggacctggatgtttcacttggttgtgcacctaatggtttttaggttttcatttttaaagttcagaaggtaagaaggtat

SEQ ID NO: 71755 - DNA, 599 bp, Chicken  19866894350800_1
  misc_feature (1)..(150): n is any nucleotide
nnnnnnnnnnnnnnnnnnnnnnnnnnnnnnnnnnnnnnnnnnnnnnnnnnnnnnnnnnnnnnnnnnnnnnnnnnnnnnnnnnnnnnnnnnnnnnnnnnnnnnnnnnnnnnnnnnnnnnnnnnnnnnnnnnnnnnnnnnnnnnnnnnnnnnccatatgtctgcagcctcctgggctgaatacctctgctttgggctgctcctctgttttttgaaagtgatttctatgcttggaacaaagatgagtcttcaatctctttaaaagtctccaaaaaacagcgtttgttgagtatcatttctaaygatacatagtattccactattgccatgggttaggctcaggaatacttccaggtccagggtgcagtgcaaaactcagtttccaatatgttgctgtagagcaaaaatagctcttatcaactattactcttagttctaccagggaggtttgaaacgtaatatcttcgaataccattgtatgattctatggtcttacttcaggctttgtcccaccaaaccctttaagaaagggatttgctgctggatcatctgacatttgtccttttgcacgactctcaaatcatatcccacaagctcggact

SEQ ID NO: 71756 - DNA, 600 bp, Chicken  19866894350800_2
aaaagtatcaattaaaaattaacagtgaaaagcactgaatttggacacacaaagtaggcagtttttggagggtatatggagtagttaaaaaaaatagttccctaaatcaagggaaaacaccaaacctgagtgagatctgtgctttgggcaaactggcatcaactagatgatgtagagatctgacattttctttagaaacaatcacagagctgcccagcctctgccccagagtcctctggctctgttacctcctgctccaggcactggccaaagaggtcagaaaccatcagagcaaaacawstttccattcccccacttgcatgccacttgcacaccatccccactgaacctcgttgaaaccagcccaggagttcaaaagttatcaggatctgcaggctgccaggaggacagacagatgcagatggtggggtcaccccagtcctgtttgcataggaaattgcrctaaaatggtgcaagggtttgtttgtgtactgattcactccttccacaacatgaccctgggttgcacatatgctttagcatttatgaaggtagagcagcgctatactgcatgtgctgggagacaccaaagcacccagt

SEQ ID NO: 71757 - DNA, 600 bp, Chicken  19866894350800_3
aaagtatcaattaaaaattaacagtgaaaagcactgaatttggacacacaaagtaggcagtttttggagggtatatggagtagttaaaaaaaatagttccctaaatcaagggaaaacaccaaacctgagtgagatctgtgctttgggcaaactggcatcaactagatgatgtagagatctgacattttctttagaaacaatcacagagctgcccagcctctgccccagagtcctctggctctgttacctcctgctccaggcactggccaaagaggtcagaaaccatcagagcaaaacawstttccattcccccacttgcatgccacttgcacaccatccccactgaacctcgttgaaaccagcccaggagttcaaaagttatcaggatctgcaggctgccaggaggacagacagatgcagatggtggggtcaccccagtcctgtttgcataggaaattgcrctaaaatggtgcaagggtttgtttgtgtactgattcactccttccacaacatgaccctgggttgcacatatgctttagcatttatgaaggtagagcagcgctatactgcatgtgctgggagacaccaaagcacccagtg

SEQ ID NO: 71758 - DNA, 600 bp, Chicken  19866894350800_4
ctagatgatgtagagatctgacattttctttagaaacaatcacagagctgcccagcctctgccccagagtcctctggctctgttacctcctgctccaggcactggccaaagaggtcagaaaccatcagagcaaaacawstttccattcccccacttgcatgccacttgcacaccatccccactgaacctcgttgaaaccagcccaggagttcaaaagttatcaggatctgcaggctgccaggaggacagacagatgcagatggtggggtcaccccagtcctgtttgcataggaaattgcrctaaaatggtgcaagggtttgtttgtgtactgattcactccttccacaacatgaccctgggttgcacatatgctttagcatttatgaaggtagagcagcgctatactgcatgtgctgggagacaccaaagcacccagtgctaattgacattcacatttctctgaaagtctgcctttttgaccatctgaaagctaaagtctgctagatatggatgagaaaagggggctggatggagcccttcctagaaggggatgcaggagcaagaccacaacctggctgatcgcctccatagcttgttac

SEQ ID NO: 71759 - DNA, 599 bp, Chicken  19866894350807_1
  misc_feature (1)..(12): n is any nucleotide
nnnnnnnnnnnncagcaaaagagctcttgcaaaatcaggcttaatgtctgcttatggcaacaccagcttgaaagattgcaggcttgtgctttgaggccattaaaaaacaaactgctctccaagcatttggcttttgcatgtagtgcactgagtagttcaggatggagatttatatgcggaatttcaaaagtggatgctcaaagtttcaaccaaatcttaaataagtgacattcagaagcttccaaactcattgggagctgctgagtggtcagcaccattaacgaggcacaattacttgtytgtctatatgaggactcttagcatcaggaacctatttttgcaggtcatggtcttcttatttactgacatgaccacaaatagccttccccagttttggwacagcatgctcataagcatgatttgcagatggcctggggtcatgtttaaaatgagcacatagtgcccacaatgctgagaagtggcacacatcagacagcattcaacagcagtccctgctcctacctttgtgcattgcttggagaaaagggggtccagagaagctcaaaactcccagagtccaataaaggcaagagtgggaa

SEQ ID NO: 71760 - DNA, 600 bp, Chicken  19866894350807_2
attaaaaaacaaactgctctccaagcatttggcttttgcatgtagtgcactgagtagttcaggatggagatttatatgcggaatttcaaaagtggatgctcaaagtttcaaccaaatcttaaataagtgacattcagaagcttccaaactcattgggagctgctgagtggtcagcaccattaacgaggcacaattacttgtytgtctatatgaggactcttagcatcaggaacctatttttgcaggtcatggtcttcttatttactgacatgaccacaaatagccttccccagttttggwacagcatgctcataagcatgatttgcagatggcctggggtcatgtttaaaatgagcacatagtgcccacaatgctgagaagtggcacacatcagacagcattcaacagcagtccctgctcctacctttgtgcattgcttggagaaaagggggtccagagaagctcaaaactcccagagtccaataaaggcaagagtgggaaawttcctccattaatctccggagggatccatgcctggggaccttctctctgagaatctaaatctgacaaggttaaagcaacaagctatttttcatgcct

SEQ ID NO: 71761 - DNA, 600 bp, Chicken  19866894350807_3
gtctatatgaggactcttagcatcaggaacctatttttgcaggtcatggtcttcttatttactgacatgaccacaaatagccttccccagttttggwacagcatgctcataagcatgatttgcagatggcctggggtcatgtttaaaatgagcacatagtgcccacaatgctgagaagtggcacacatcagacagcattcaacagcagtccctgctcctacctttgtgcattgcttggagaaaagggggtccagagaagctcaaaactcccagagtccaataaaggcaagagtgggaaawttcctccattaatctccggagggatccatgcctggggaccttctctctgagaatctaaatctgacaaggttaaagcaacaagctatttttcatgccttgctgctagattcatgctgataacgttttgagagggggtctgttttctggcatgtggctgaggaaataaaatgagtgagtgctgaggctgaaacatacccctgtgctcaacaaggatgagtagaggtgtgggatctcctctgcctaactccatttctgcaccaacacttgctcagctcttcccttgctgttcagtgccttaaa

SEQ ID NO: 71762 - DNA, 600 bp, Chicken  19866894350810_1
ttaatgggctcaccataagcaatagctgggagacagctgaagggataaagcaccttgtagtgtatctttgaagagtgggctgattggtttagcaaaaggcaattggaggagtaatgggattgtgaagtgaacgttaattgctgaccaacttcagaggaaagttttcgatgttctgcgtgattgtcacccgttctgtatcattgcagaccttatatatatatataaaataatcatgtaattttacctttgtatcttgttaaaggacaaagtgagggctgagtaaccagactgcggggaacrtttgctaccaacctttgcactgtgcagtgctctgccctcgtgaggcactgatctccaggtcagttcaatcactgtgccacggagtgggtgcagttctccctcactgccctgtaatggtcagtgtgggtaccgggagcacagtgctgtgagctgcaatccggcaaccgtccctaaccaaaaccatcttgtggtgtgcaggcactggggagtctgggttgtcatcgagcatttgtctcttactttttttctgaagtcattgggaagacttcttgtctctttaaagaaggggcaggtttgtaa

SEQ ID NO: 71763 - DNA, 600 bp, Chicken  19866894350816_1
tctccataaagagcatggaaacaggatacaaccaattgtagttcgcaatcaagtgtaccgtgagcactgacaactcttgagtatttcaagagacgcttatcagaaatgcagggaccagaacaggcctcacaatctgttaatccctgttacttccacaagcgtcttccatacagggaagaggcagacatcagcttctctcccccttcagtcttgatcttgaactctgcttacaaacactggattgaaataataaaagtatttcaatcaagtatttgtgaatgtggttcactctctatcagytgtagcaagaacagttcaactatctcatactatgtacagctgaaaaaaawtgagggcaatctctttttgatcagaggttgatttctttggagagaaaagttccaagcttatgtctcagagatactgtgactgacaccacacagcaatataacaagaggcaggtggtgactgcatataagtaagaggatttattctgtgattttggactgaatgtttccaaaattaccataatgcacaaatttattttcacagcagtaagtttgcatgtttcttatgtagcaatttgatagcaatacttaa

SEQ ID NO: 71764 - DNA, 600 bp, Chicken  19866894350816_2
aagtgtaccgtgagcactgacaactcttgagtatttcaagagacgcttatcagaaatgcagggaccagaacaggcctcacaatctgttaatccctgttacttccacaagcgtcttccatacagggaagaggcagacatcagcttctctcccccttcagtcttgatcttgaactctgcttacaaacactggattgaaataataaaagtatttcaatcaagtatttgtgaatgtggttcactctctatcagytgtagcaagaacagttcaactatctcatactatgtacagctgaaaaaaawtgagggcaatctctttttgatcagaggttgatttctttggagagaaaagttccaagcttatgtctcagagatactgtgactgacaccacacagcaatataacaagaggcaggtggtgactgcatataagtaagaggatttattctgtgattttggactgaatgtttccaaaattaccataatgcacaaatttattttcacagcagtaagtttgcatgtttcttatgtagcaatttgatagcaatacttaaagtaaatagcattcagaggtacactgtgcatatactcacagtacatactt

SEQ ID NO: 71765 - DNA, 600 bp, Chicken  19866894350831_1
tactgccttgtgaattgcaacactgctcagggtaatatacaactttactctacgaacaggcattcatggctttgtaactgacatcctgcttcattctcgtacagaaatggggactaaagcataggcctagagattttgaaactggagtacttactgtactgggggctgctctgaacacaagctgtttgcaagcacttggtcatgcctacttgtactgacctaaaagaaactatgctctcatactctgtctttaacagagtaatcctctggaactgctgttagcactgataacttgcaccrtcctccttatcccgtccttcacagttttgctcactggaagtcttccctgagtggggaatttccactcctggaaaatttcccagagtggttcagctgacagttgcattaaaaatcacagcgtgtgcctggagatgcccttgtatcaaacgttcagagatgtaacacagcaaagatgtaattgccacagccatgttcctaaacaactgcttatatcccagggtgtgctcttaccagagctgagcagctccaagcacacaagtgcatatcttgctcccytaatagctgcgtaaccttatgtct

SEQ ID NO: 71766 - DNA, 594 bp, Chicken  19866894350831_2
tgttagcactgataacttgcaccrtcctccttatcccgtccttcacagttttgctcactggaagtcttccctgagtggggaatttccactcctggaaaatttcccagagtggttcagctgacagttgcattaaaaatcacagcgtgtgcctggagatgcccttgtatcaaacgttcagagatgtaacacagcaaagatgtaattgccacagccatgttcctaaacaactgcttatatcccagggtgtgctcttaccagagctgagcagctccaagcacacaagtgcatatcttgctcccytaatagctgcgtaaccttatgtcttcgctgcagaatccactgcccaggattttcccttattttcagggtcatccatccacacccatacacaaaaacccaactcataaatcttcctgctggcacatcaagataaaaattaacaagattgcgaaggccagccagtgctaaggacagcctccctgccccagcagcttcccaggactgtttttagagcagatacgtcgcaccgtcctccttgccttgtccttgacaattctgcccattgttccctggaaaacttcccagaacagttca

SEQ ID NO: 71767 - DNA, 559 bp, Chicken  19866894350838_1
agatcatgaatttaaatatttgcatggtaagtaaatgggaaagtccacatgtgaatataatgaataactttgattctgagatcttagggatcaactttcatttctgcaaggaagcaaaactgcagacccatttcaaatgtcacagtaacagaagtacggctttcaaattcagaactaagtcagaaaagtagcagataaagttgctatatcatgggaaatgaaccacgttgcacaaaatacctgacactgtaagcttacaactacattgccaaaatactataaaggcttcaatggtcatcmgtatataagggctatttgcattctaataatgtacatctgtcaagtcccctattaatatacagcttcatttaaagaaaaaaatctgagcagcaatcattctgtatgagaaatggatccagttaatgacatgatgaaattgcaagttttaaatgccctgcatttatctatttagcctcacatctatctgagaaatttgtgcttagattaattatttaaaagaaaatggagcaatgccaatgtaggtcttcactggtctttt

SEQ ID NO: 71768 - DNA, 599 bp, Chicken  19866894350843_1
  misc_feature (1)..(187): n is any nucleotide
nnnnnnnnnnnnnnnnnnnnnnnnnnnnnnnnnnnnnnnnnnnnnnnnnnnnnnnnnnnnnnnnnnnnnnnnnnnnnnnnnnnnnnnnnnnnnnnnnnnnnnnnnnnnnnnnnnnnnnnnnnnnnnnnnnnnnnnnnnnnnnnnnnnnnnnnnnnnnnnnnnnnnnnnnnnnnnnnnnnnnnnnnnnttcctggtcctctgcagagaaaatgaacatctgaggagaatctctgcagcaggctgaacagagaatggtaaaaataacatcttttgagagtgccacaaagagcctctgctgcytctgcctatgttctctccagcaacataccaggaatgtctgaaacattccaataacgtgccccagaaaatgacacttgtgttacttctaacatacaggagaaaagtttcagaagccctttatgttttcctgtctctaaacagataaaggtgatggtgcacagtaattactgtcacatttcctgggcaaaggatgtgagatcaaaatacctaattaacagcttcttccccatgggagccattctttgagctttgcaaaaaaaaccaaaacccaaatgaaatgcaacacgcacggcacttgc

SEQ ID NO: 71769 - DNA, 600 bp, Chicken  19866894350846_1
atttctcagtaggcaaaatgttttactgacgtttgtgcttgctgtgttatttaatattacaagtttcacatacaattatgacacctccccctgctttgagagtcctggaagtcttcacttgcactcttatgtgtttatgtgctcaaatgcttggagttgctaaacatctatttatccaaattgttgatccaaacaatccttagataaaaagagttttcagtaattgccatatttatttacagaaaaaataatcattttcattctctttcgaaagtcttctttaccaccatctttctgatwctgagatgccagatctaaacacaattgtcattatgtaccttcactacagttttatagaataaatcctaaattccttgcytgtgtgaacacaggtcaaaaaacacaactatttctttgttgagttaccataatgcaagttgagatctcattttttttatctgcttagttgtagatcgctttgctctaatacttaccaaatatttctctttgtcatatcttatatagtctgattctagtgaaagtctggacgactattgctgcggtgcccttggagcaagaaatgattattacatgttaaat

SEQ ID NO: 71770 - DNA, 600 bp, Chicken  19866894350846_2
gacacctccccctgctttgagagtcctggaagtcttcacttgcactcttatgtgtttatgtgctcaaatgcttggagttgctaaacatctatttatccaaattgttgatccaaacaatccttagataaaaagagttttcagtaattgccatatttatttacagaaaaaataatcattttcattctctttcgaaagtcttctttaccaccatctttctgatwctgagatgccagatctaaacacaattgtcattatgtaccttcactacagttttatagaataaatcctaaattccttgcytgtgtgaacacaggtcaaaaaacacaactatttctttgttgagttaccataatgcaagttgagatctcattttttttatctgcttagttgtagatcgctttgctctaatacttaccaaatatttctctttgtcatatcttatatagtctgattctagtgaaagtctggacgactattgctgcggtgcccttggagcaagaaatgattattacatgttaaattcataggctgatggaacatgagaagttggggaaaatggaaaatgttctcagatttcagcacaaagaactttcctgaatt

SEQ ID NO: 71771 - DNA, 600 bp, Chicken  19866894350846_3
aacacaactatttctttgttgagttaccataatgcaagttgagatctcattttttttatctgcttagttgtagatcgctttgctctaatacttaccaaatatttctctttgtcatatcttatatagtctgattctagtgaaagtctggacgactattgctgcggtgcccttggagcaagaaatgattattacatgttaaattcataggctgatggaacatgagaagttggggaaaatggaaaatgttctcagatttcagcacaaagaactttcctgaattttattgcaatgctgacaatrcatataaaatgtggaggcttcaacgtatctgcatgagatagcctaagctaaattggcccaaagccatgaaacwgtattagtataaatgattttaagaaagcaagtcctgttaaacattttgtgctttttggaaggaatctggctttgtgtcacaccagcctgaatgtgatgcagagtacgttcccacatctcttctccaaatcccatgtgcagatggttttagaagcaggcttccagaagactagtgctttcttttgtattgaaaagatgtaatgttctccattaaattaatttcatcag

SEQ ID NO: 71772 - DNA, 600 bp, Chicken  19866894350846_4
atcgctttgctctaatacttaccaaatatttctctttgtcatatcttatatagtctgattctagtgaaagtctggacgactattgctgcggtgcccttggagcaagaaatgattattacatgttaaattcataggctgatggaacatgagaagttggggaaaatggaaaatgttctcagatttcagcacaaagaactttcctgaattttattgcaatgctgacaatrcatataaaatgtggaggcttcaacgtatctgcatgagatagcctaagctaaattggcccaaagccatgaaacwgtattagtataaatgattttaagaaagcaagtcctgttaaacattttgtgctttttggaaggaatctggctttgtgtcacaccagcctgaatgtgatgcagagtacgttcccacatctcttctccaaatcccatgtgcagatggttttagaagcaggcttccagaagactagtgctttcttttgtattgaaaagatgtaatgttctccattaaattaatttcatcagtccttttaacgtattcagcagaggtggcacaaagacagacaaaggtggtgtttgcattaggtttggctgcaaa

SEQ ID NO: 71773 - DNA, 600 bp, Chicken  19866894350846_5
cccatgtgcagatggttttagaagcaggcttccagaagactagtgctttcttttgtattgaaaagatgtaatgttctccattaaattaatttcatcagtccttttaacgtattcagcagaggtggcacaaagacagacaaaggtggtgtttgcattaggtttggctgcaaagttgaatcaggggtaggacttagttacagaacatcaaaatctcattctcctaacagacctcaaatttatgtgatgaatggaagtctttcgagaggtcatgggaaattatagatgtccatattcatgcargttctgagaaatacaactgttttgggctgagaactgacctgaaacaaaccctgcagagacatgtgcttagaaatggaccatcactagagatgcacacagtgtgaagattcagtcagagtcatcttagattccagggtttgtttggtttgttttgctcaaactaaaactagaaactagtagtgaaaaaagtactcttttgtgtgctcactattcttcacatgtggaaaacaaaatgttaattgttagcattaaattgattaaatagaccagaccaaaagcattggctgaggttcttggttg

SEQ ID NO: 71774 - DNA, 600 bp, Chicken  19866894350847_1
tcctgacgggagaccatgtatacaagtagcaagttaaatgggccacaggcatgggccacagatacagaaccatcatctctctgtggttcaagttaaaatctgtttttgcacactttcatggtatttcaatgtatttttctttcttgaattttgttagcattagggaacagtgagctacgctagattttgaaatcttaactttcatcttttttttttggttctaagtcgcttccaagactggagcagcacatatgttctgcttccatttgtgtgtattatacatgtaatcttgtgaagacrgtgattcttaggaggttttggccaagagggtctgaaattccttcagattttgctgcagttgaacacagcccttgtcttaattaggtctctcatctgaacctcaaaacccagactaaccctaaattgaatccatctccaggcacaaacawctttctcaccactccctattttatttttgactcttcctctctttttatctggacagccttgcctcagttctcagatgtgcagaagttgttcacctctggtttacaagtgtagctcaatacagcaaagagtatatatgagctctgggaaaga

SEQ ID NO: 71775 - DNA, 600 bp, Chicken  19866894350847_2
tttgttagcattagggaacagtgagctacgctagattttgaaatcttaactttcatcttttttttttggttctaagtcgcttccaagactggagcagcacatatgttctgcttccatttgtgtgtattatacatgtaatcttgtgaagacrgtgattcttaggaggttttggccaagagggtctgaaattccttcagattttgctgcagttgaacacagcccttgtcttaattaggtctctcatctgaacctcaaaacccagactaaccctaaattgaatccatctccaggcacaaacawctttctcaccactccctattttatttttgactcttcctctctttttatctggacagccttgcctcagttctcagatgtgcagaagttgttcacctctggtttacaagtgtagctcaatacagcaaagagtatatatgagctctgggaaagaattttcagtgagggagtctgtatattctttaccatcacactgaagacgttaatcctgccttagtattttcatcattctgcacagttactggaattatttatctacagccagaactgtagcccttgttttactattttaatgcttaaaaa

SEQ ID NO: 71776 - DNA, 600 bp, Chicken  19866894350850_1
tcaaagtgacctagaaaaatcatcaagtccaactgtcagactactttggagtgactaaaaattatataattgttataagcattagccaaaggcatcttaaacacagtgtagcaggaggcaaccactgcctctccaggaaatttgtttcagtgtctaactactctcttggtagagaagtttttccttatgcctagtctgaacttctgtcatgacgctttgagtcattcccacagattctatcagtagatactagagagaaaatatgagggagcatctccccctccccttctcttcttcagraagatatagagagcaattaagtcatctccttttctccaagttcaacaaacttagcatccccattttctcctcctaggatcttccagccctttaaccatctttgttgcccttctccaggcccattcaagtttcttaacatcttttataaattgcagagcccaaaaccacacacaatattccagatgaggctgcaccaccactcagatttacaaaactcttctacttcaaagcctccaaatgagctaggttacagccttccactgctttctatcattttgaggcttctgagcatttgttcat

SEQ ID NO: 71777 - DNA, 600 bp, Chicken  19866894350850_2
tggttggcttttggtattgtacttgaccagttatctaactttttaactgtcgacacccgagacagttgagtatttgaaaaacattgttcaacaacactacactggaagacttgcaaaagaaaagaaagtacagacacctctgaaagcatttctattccttcataagtagcacttaatatcagagagtcattaggttttttcagccattatgaaatgggtggaaattggccaacacataagaactgtatggaaacagccagtataagtagggctagagaaagaatggtttccatcctatayagtttgttcccatatagcctctggttcttactgccagaataaatgagctctgcgctgtaacaggttgtttcttctcagatcaggaagacatgtgcatgtggggaatagtgcatgaatgaagatcagtagagagtcctgaggtggaataaaatgcagactgccatgacaaaagggaaagaacagaaaacaaaataagaaaaaaaatgcagagtataaagccagacaatcacaggggatggagaaaaacaaaggaaagaggtaggaggtaagaaagcttcacttttatccacacagatatcc

SEQ ID NO: 71778 - DNA, 599 bp, Chicken  19866894350862_1
  misc_feature (1)..(52): n is any nucleotide
nnnnnnnnnnnnnnnnnnnnnnnnnnnnnnnnnnnnnnnnnnnnnnnnnnnnaaaacacagacaagctaggcccttgtttcgtgagagctgaactcacctgctttgcactgatggcactgataacacaacaggaggcactgcagcccttccttcagagcggctgtgtcggatcggctgcaaagttatcacactcatctctgtgctgtgagccttcccatcacagctggagcagcggggaggaaacagttgtagatactggtctttcagctgtgtttcagcgtgaagctttggggaacccygaagatgtcagtactttgcatgcatgtgcatyagatctaagtatccccatctgcctggtgctgaggaggaccagagtgagcagtccctccagcctggtcctcgcaggtccttcctctgatgggaaggagagggagcagcagacagagcctaggtcctgttaatgacatggccccgtgcagcagccaccaaagygaggtgtggtgaggcccacagsttttgggggaggaggaagcagggatgaggccacttgctgccaatgccacaacccatgcaaaaagatgcctggcaattgcttcct

SEQ ID NO: 71779 - DNA, 599 bp, Chicken  19866894350862_2
  misc_feature (1)..(20): n is any nucleotide
nnnnnnnnnnnnnnnnnnnnaaaacacagacaagctaggcccttgtttcgtgagagctgaactcacctgctttgcactgatggcactgataacacaacaggaggcactgcagcccttccttcagagcggctgtgtcggatcggctgcaaagttatcacactcatctctgtgctgtgagccttcccatcacagctggagcagcggggaggaaacagttgtagatactggtctttcagctgtgtttcagcgtgaagctttggggaacccygaagatgtcagtactttgcatgcatgtgcatyagatctaagtatccccatctgcctggtgctgaggaggaccagagtgagcagtccctccagcctggtcctcgcaggtccttcctctgatgggaaggagagggagcagcagacagagcctaggtcctgttaatgacatggccccgtgcagcagccaccaaagygaggtgtggtgaggcccacagsttttgggggaggaggaagcagggatgaggccacttgctgccaatgccacaacccatgcaaaaagatgcctggcaattgcttcctccttcaccctgctaattactgttggaaaaact

SEQ ID NO: 71780 - DNA, 600 bp, Chicken  19866894350862_3
catctctgtgctgtgagccttcccatcacagctggagcagcggggaggaaacagttgtagatactggtctttcagctgtgtttcagcgtgaagctttggggaacccygaagatgtcagtactttgcatgcatgtgcatyagatctaagtatccccatctgcctggtgctgaggaggaccagagtgagcagtccctccagcctggtcctcgcaggtccttcctctgatgggaaggagagggagcagcagacagagcctaggtcctgttaatgacatggccccgtgcagcagccaccaaagygaggtgtggtgaggcccacagsttttgggggaggaggaagcagggatgaggccacttgctgccaatgccacaacccatgcaaaaagatgcctggcaattgcttcctccttcaccctgctaattactgttggaaaaactgtctccaatgcaaagcacctgggctggcttcacagcaaggagagcattgcttaaacagatggtatcacccatgcacactggtragmagacagtgacctcgtacatgtcttggggtgaagcaggatatgccacacaggagggcgctttgcattggcttgctgt

SEQ ID NO: 71781 - DNA, 600 bp, Chicken  19866894350862_4
ccatcacagctggagcagcggggaggaaacagttgtagatactggtctttcagctgtgtttcagcgtgaagctttggggaacccygaagatgtcagtactttgcatgcatgtgcatyagatctaagtatccccatctgcctggtgctgaggaggaccagagtgagcagtccctccagcctggtcctcgcaggtccttcctctgatgggaaggagagggagcagcagacagagcctaggtcctgttaatgacatggccccgtgcagcagccaccaaagygaggtgtggtgaggcccacagsttttgggggaggaggaagcagggatgaggccacttgctgccaatgccacaacccatgcaaaaagatgcctggcaattgcttcctccttcaccctgctaattactgttggaaaaactgtctccaatgcaaagcacctgggctggcttcacagcaaggagagcattgcttaaacagatggtatcacccatgcacactggtragmagacagtgacctcgtacatgtcttggggtgaagcaggatatgccacacaggagggcgctttgcattggcttgctgtgcccacacacctcctgccatga

SEQ ID NO: 71782 - DNA, 600 bp, Chicken  19866894350862_5
tctgatgggaaggagagggagcagcagacagagcctaggtcctgttaatgacatggccccgtgcagcagccaccaaagygaggtgtggtgaggcccacagsttttgggggaggaggaagcagggatgaggccacttgctgccaatgccacaacccatgcaaaaagatgcctggcaattgcttcctccttcaccctgctaattactgttggaaaaactgtctccaatgcaaagcacctgggctggcttcacagcaaggagagcattgcttaaacagatggtatcacccatgcacactggtragmagacagtgacctcgtacatgtcttggggtgaagcaggatatgccacacaggagggcgctttgcattggcttgctgtgcccacacacctcctgccatgacctgatgtgtcccaaagggcgcttgcagcccacaggtacgctgcttggttgcatgtggccaactgcagctcggaggcctagctggtgtggttggggctgctgagcacaaatacacggccctggaagcagaaacactggaggcacttgtttcttggcagcagtctgacagaaagggctcatcccacctgagcccagcatc

SEQ ID NO: 71783 - DNA, 600 bp, Chicken  19866894350862_6
gatgggaaggagagggagcagcagacagagcctaggtcctgttaatgacatggccccgtgcagcagccaccaaagygaggtgtggtgaggcccacagsttttgggggaggaggaagcagggatgaggccacttgctgccaatgccacaacccatgcaaaaagatgcctggcaattgcttcctccttcaccctgctaattactgttggaaaaactgtctccaatgcaaagcacctgggctggcttcacagcaaggagagcattgcttaaacagatggtatcacccatgcacactggtragmagacagtgacctcgtacatgtcttggggtgaagcaggatatgccacacaggagggcgctttgcattggcttgctgtgcccacacacctcctgccatgacctgatgtgtcccaaagggcgcttgcagcccacaggtacgctgcttggttgcatgtggccaactgcagctcggaggcctagctggtgtggttggggctgctgagcacaaatacacggccctggaagcagaaacactggaggcacttgtttcttggcagcagtctgacagaaagggctcatcccacctgagcccagcatccca

SEQ ID NO: 71784 - DNA, 600 bp, Chicken  19866894350873_1
gactatgatcacaccttgcatcaaagctggagaacttgctgcctcagtgacctcttacgacctgatccatcctacaagggaagaagcaacctgaaattaaacagactccaaggaagaatcaagaactaccagacctagttagcatccccacaaactgcagtcccagatgcagccagacacaggcctgttgttgtggaaaggctgaggcagggagctgacagctgcagcctgtcatctctgagcaacagcagcctcactgctcctggggaccagctcctccctgcaggacctcaggctgcytcacctgtttgactggcaggaaccagactttccagcccacatactcccaccacctgacagcaggacacatgctagcacagatccagcacaaaagcatagaaacagacaaaatctcttgggtcaccacaggtgccactcccagtacctcttgaagctcattcgtaaaggatcacagcccaagagctgtgagaagaacaaactgctcacctccactctgtgacagcagtgcagagtcaatcacatagcaatgcaaggaaaccagtatcagagcatcatgtaaatgtaaagcttttctgcatc

SEQ ID NO: 71785 - DNA, 600 bp, Chicken  19866894350875_1
tactgccatgctctcactgctggatatctgcatgctgttggtctagacaccattccaaagtgattctactgcatgctagtttttgttgtcaacttttatggaattttaaagataattcatgggccacattttttaaaacagtggtctagcattaacaaaactgatcattatttgagtagctactcagtctttatgattccaattttgttatgatacatgacctcataataacgaatgaaccttcattaaaatatgaatggggtcttagaagccatgaattagtctgggcattgattgccyttgaaattgtctctggaaaatgcagtttgctcacttctgactggctgtttttctggtgctctagcaggattaattacagggctttctcttgtcaaatcatgaaggaaaacagaaaaaaccgtgagcaaaaaagggacattattttaaccagcctgaccaatattgtgtaattaataattttgaaaggggaaataaatgtagacattcctgtaatgactctatgtactccgaaagagtcggttgtataaaaatagttcatgaagcatccagactagaagattgaaaataatacttaaaagc

SEQ ID NO: 71786 - DNA, 599 bp, Chicken  19866894350886_1
  misc_feature (1)..(35): n is any nucleotide
nnnnnnnnnnnnnnnnnnnnnnnnnnnnnnnnnnntgatccagaatgtaacttacatcctatcaatgcagagcaaagacgctttaaaataaccacagtcccttgcacagtcaccaccccaaagctaggagcttagtaggacaagaccagggaagcagaagagtgctgtgcaccactgcccggtggtgagaggtcttttaaaaatgataatagtaataaccttactccaaaagtcagagtcagaccaggccctgctagcctcaaactccaaaaagtactgccaagttcttttgtcccactrcctgcattgggcacaagtgccatgcaaggaatgagacattcatgggctacatggacagacagagcttctctgctttctgagttccttcctggaggcagctccaacttgctgtcagctccagcagctgctggggctccacgtggtgctaagagagctcctcagcttggcattcgcattggagcacatcctgacagtctggggaagggaccgcacatggattgccttcatatgggcaatgcaaagcaaggcttgcttgaagcttcccacattccttcctctttgttttatcagtgacattt

SEQ ID NO: 71787 - DNA, 599 bp, Chicken  19866894350887_1
  misc_feature (1)..(156): n is any nucleotide
nnnnnnnnnnnnnnnnnnnnnnnnnnnnnnnnnnnnnnnnnnnnnnnnnnnnnnnnnnnnnnnnnnnnnnnnnnnnnnnnnnnnnnnnnnnnnnnnnnnnnnnnnnnnnnnnnnnnnnnnnnnnnnnnnnnnnnnnnnnnnnnnnnnnnnnnnnnngaaagagccctcaccagagcatgcctcgtggtacagattaatgccaccaaagaggatattactaatccaaccattaccatctctgtataacctaagcatctccacacttaaaagtttatgttcaacatggtgctaactgttttwktatgggtaagggcttctacacatacaattaagtcactacagacatatgagctgtcagactcccagtccagcatgtgaataaacactttcaagcactcaaaaacatagtctggttttctgcctagactactctactccagcacatttgccagagactcctgaatggaagaagtagaaattacgcgtagcagagctgttataacacacaattccttgtcatcactccatcatatctcacatacrtaccaggtaggaaagctaggcttacacaagagagataagtgacctttttccatcac

SEQ ID NO: 71788 - DNA, 599 bp, Chicken  19866894350887_2
  misc_feature (1)..(155): n is any nucleotide
nnnnnnnnnnnnnnnnnnnnnnnnnnnnnnnnnnnnnnnnnnnnnnnnnnnnnnnnnnnnnnnnnnnnnnnnnnnnnnnnnnnnnnnnnnnnnnnnnnnnnnnnnnnnnnnnnnnnnnnnnnnnnnnnnnnnnnnnnnnnnnnnnnnnnnnnnnngaaagagccctcaccagagcatgcctcgtggtacagattaatgccaccaaagaggatattactaatccaaccattaccatctctgtataacctaagcatctccacacttaaaagtttatgttcaacatggtgctaactgttttwktatgggtaagggcttctacacatacaattaagtcactacagacatatgagctgtcagactcccagtccagcatgtgaataaacactttcaagcactcaaaaacatagtctggttttctgcctagactactctactccagcacatttgccagagactcctgaatggaagaagtagaaattacgcgtagcagagctgttataacacacaattccttgtcatcactccatcatatctcacatacrtaccaggtaggaaagctaggcttacacaagagagataagtgacctttttccatcaca

SEQ ID NO: 71789 - DNA, 600 bp, Chicken  19866894350887_3
taacctaagcatctccacacttaaaagtttatgttcaacatggtgctaactgttttwktatgggtaagggcttctacacatacaattaagtcactacagacatatgagctgtcagactcccagtccagcatgtgaataaacactttcaagcactcaaaaacatagtctggttttctgcctagactactctactccagcacatttgccagagactcctgaatggaagaagtagaaattacgcgtagcagagctgttataacacacaattccttgtcatcactccatcatatctcacatacrtaccaggtaggaaagctaggcttacacaagagagataagtgacctttttccatcacaaaactactgtaggagtgggaagaatgacagacagattctgaaaagagacaaaaaaagcacctttcacggtgtcaaaattctaccatcccataggacactgagcaaatgttcatctacagatgaacatttctcaagctcaagaacagatccagagagagataaaactgtcagtcacaacaacaacagaagatcttgacaggaaaatacaccccaatattactgacaagaagtattataggaaag

SEQ ID NO: 71790 - DNA, 584 bp, Chicken  19866894350889_1
ggtataggagacaattttctttagcccttaattgaaattcctagtactttactgacccttcagcaattcttcctgaattattggacagttgatggctgctgccttttgctgttaatcctagcaacaggcagaaggcaatagcatttcagcatttattcttgctcctttgaagagccttaaatgacagccaacttctctttactgagaagcaataaatgaaaccaagagatgataaaattcagctttccagtgttaaataattcaccattcttatggactaatagtttccactagatttayagtcatgctgcgtgactggtgtcacacttgtttttattgtatgtagaaggtacctacccccagatgagaggaatcgtgactcatgcaagccattggcaggacaagctccatatttgcattgctcacaattttgttagcaaagatagtttaaatgatcagcgttgagccctggcatcctaaatactttcttgtattttgaaggtgtgattcactgttttcagtaatgggctgtctagatatatggatctgtatcctgtagcatgatgactactcagctattcttg

SEQ ID NO: 71791 - DNA, 583 bp, Chicken  19866894350899_1
ccttgagacttctgttttgtcagctaacttaactcttgtatatcatagaagtcacacagaagtgtaatcctgatagaggtaatcacttttgattactgtgaggcaatgtagtagcttgagtaattgtatggtgtgcaaggctagaagaaaggaagttgtctgtgttgtcattattcacatacgtgaatctgaattagttgtccgtatatctgcctcatttaaaatcgatagttctttaaatgttcacccgaaagtgcgatttaaagtcaaatttgtctagataggttttacagtgccttraaaaaatttattaccagccaaagtggtagcaaaatgcccatactacttatgatttggctggtatcctgacttcctcgctttccagattatttttggatagtttggcaaatctgtactttcgggcagttcagcacagctcctcgtaatacaacataaattgaaccgtaaaaactaatggactggaatacatcagggctttaaagacttatggccagttctatatatcttgtgcagtgaaagtggctatcagccttaggtttgtcatacaaaaaaatcaacccga

SEQ ID NO: 71792 - DNA, 599 bp, Chicken  19866894350901_1
  misc_feature (1)..(173): n is any nucleotide
nnnnnnnnnnnnnnnnnnnnnnnnnnnnnnnnnnnnnnnnnnnnnnnnnnnnnnnnnnnnnnnnnnnnnnnnnnnnnnnnnnnnnnnnnnnnnnnnnnnnnnnnnnnnnnnnnnnnnnnnnnnnnnnnnnnnnnnnnnnnnnnnnnnnnnnnnnnnnnnnnnnnnnnnnnnnnggggaatggtttccactgggacaggggaggtttaggttggatattaggaggaagtttttcacccaaagggtggtgatgcactgaacaggttgcccaagtggatgccctgtggatgccccatccctgsaggcattcaaggccaggctggatgtggctctgggcagcctggtctgctggttggcgaccctgcacatagcagggggttggagctggacgagcattgtggtcctttgcaacccaagccattctatgactctatgatttgctgaccaccgctgttggctgagtgctccagaaacagctttcaacctctctgggattgtgaacccttaccaattttcaacaggaagcacagattctccctagaacggctttgagactaatgacaaagaatgcttctctgagctccattaaaatcagccccct

SEQ ID NO: 71793 - DNA, 600 bp, Chicken  19866894350903_1
attagcttattctttgaagcaatataaagcaaaatacaatgtctgacactggctcagttacctacatttctattatctcaacactacttgaaccacaagctttttgcttacataaattaagtaggagcatttacccacttccagctacggtgaattacaaatgattaatgttctgattctattccactccataatttcctcacattcatatatgcaaaggtagattttatacatttccactcaatacctcaaataagtttgttgaagtttttattaagtaacctattttacagaccacaracagaaaacattttgatcagtaaggatagactacaggttaacctgctactctgaagcacgagttcaattgaggaaagaagttcagtgcattataaattcagtacttgtatgtttagaatgatgtcatccttaattaagagcaatcactgttgtcattctgctaaaacaggtggaatacttccaaagaagtaawttaacacattctgtgtacatgccacttttgtcaggacagccgtggctttgcccagactcaagaaagatgcctcttgaaagactttggtaagataataaaacataagc

SEQ ID NO: 71794 - DNA, 600 bp, Chicken  19866894350903_2
atttcctcacattcatatatgcaaaggtagattttatacatttccactcaatacctcaaataagtttgttgaagtttttattaagtaacctattttacagaccacaracagaaaacattttgatcagtaaggatagactacaggttaacctgctactctgaagcacgagttcaattgaggaaagaagttcagtgcattataaattcagtacttgtatgtttagaatgatgtcatccttaattaagagcaatcactgttgtcattctgctaaaacaggtggaatacttccaaagaagtaawttaacacattctgtgtacatgccacttttgtcaggacagccgtggctttgcccagactcaagaaagatgcctcttgaaagactttggtaagataataaaacataagcctgaaaattctaactcaaaatggtgcctccatcttcttaaccactgaaatcacgtacttggtctaggaaaacagtcagcagccagcactaagagattaagaggaacttcgtgccacagatgcaagtacatggcacacatggcaaagcagcacaggaaacatggagagtaaccaatacctacttatgctaattt

SEQ ID NO: 71795 - DNA, 599 bp, Chicken  19866894350915_1
  misc_feature (1)..(251): n is any nucleotide
nnnnnnnnnnnnnnnnnnnnnnnnnnnnnnnnnnnnnnnnnnnnnnnnnnnnnnnnnnnnnnnnnnnnnnnnnnnnnnnnnnnnnnnnnnnnnnnnnnnnnnnnnnnnnnnnnnnnnnnnnnnnnnnnnnnnnnnnnnnnnnnnnnnnnnnnnnnnnnnnnnnnnnnnnnnnnnnnnnnnnnnnnnnnnnnnnnnnnnnnnnnnnnnnnnnnnnnnnnnnnnnnnnnnnnnnnnnnnnnnnnnnnnnnnnnactgtctcccgtcacaagtgtgaggagacagggctgtgagccaggactsagacagaggatggagagtgaaaataccaaatatgtgctctcattttaatcagttgttaattcatatctcctagccagggcttattattagagactgtaaatctcagacagacaaggagtcatgagatgttgaagttgccttgtaaattagtcactggtaattaaaccatttagtttttgaatggacagaattgtgagggctttctatgtcgaaataattattgaatattactgaaccaaataattaaactttgcagtaaaaatactcctatagtaatacaccatttctttttccttctt

SEQ ID NO: 71796 - DNA, 473 bp, Chicken  19866894350915_2
ttgaatggacagaattgtgagggctttctatgtcgaaataattattgaatattactgaaccaaataattaaactttgcagtaaaaatactcctatagtaatacaccatttctttttccttctttttaaatttctaaattattgggcttgttattgttatacggagataaaaatatgactgtcagagctgacaaagttcattgtttcaaattatataaacatgtagtgcatgaatcaagagcaattcattttcaccacagaatccacccagagccatatatttcagagattctaaacatayaatcagacaaggggatacttcataaaatgtaagatgtttgatttcaaattaaattttgaacaagtgctgtaataaaggatgataaggaggatgataaacatagagcctcgtgtgcaaaaatagttttcagttattctactttcatttgagtttctataatgatgagactggaa

SEQ ID NO: 71797 - DNA, 600 bp, Chicken  19866894350924_1
gaggcaacgtgtccaagtacagccaggggaggttgggattgagatcctgagctagaggagtgctgcaatgcaacctcacaccgacttggcatgtagctcatagccttgcacaggaaagacagctcatgagaagcttggggctagcttggaacaagtgggtttttgggagattcctttcccctgtagagtggagctgggataaggtcagctgcggtcatgccaagcccagctgcatagttcctgggtgcctccaaatcaggctccaaatgtcagcagctgctgggcagggaagatgatccygaacaattcgctattaataggctgcagaggggaggcacagggcaggatgggcctcactggcttcgttcctctgatgggaggctgggagagtcaggggggaagaactggctgcggggctgggggtccagggaagctctgctgaaaggatgcatggacattctgtatcccatgatgtggttctcagggtcccctcctacctctgtggggacagagtgacagagtccacctccccacactgcattgcttctaggaaagcttgggtgggaatccagtgcaaatctctctcttcctactcctcac

SEQ ID NO: 71798 - DNA, 600 bp, Chicken  19866894350928_1
cattcacaggccagaattgtgacctatatacaatgaccaaaatattgtgtaaatgtgtgtcactgtgctatcactattgtgctgcaacctgtgttgttattttgatacctgtgtgtgttcactggctcttctgatttcttgccgtgaccttggtggccttgtgcatcatctttacaatgacaaaatgtgacaagcatataaaatcccttactcctttggggttggctcatataggaggaagaattgggacaaaaccaaattgtaacctttgggtaaatctgcttctaaacaggttatctrtgttcactgtaactaaccttcccttccctgcgtctccacgratgggcttgactttcacacgcagatgcagagatctaggcaagcaccttcatacyccaccaactgaaaaaagatgcagagttacagtgcatctgaaattaagaagcttatcaagcattagcttgcactaaaatcacttgcaacacctgtatttttgaattttggaaaaaaatatttagctcagtaaatattattaagaaaggttaggaaaaatgaaagtgaattatagtacattttttaagcaagttctttaggatggac

SEQ ID NO: 71799 - DNA, 600 bp, Chicken  19866894350928_2
atattgtgtaaatgtgtgtcactgtgctatcactattgtgctgcaacctgtgttgttattttgatacctgtgtgtgttcactggctcttctgatttcttgccgtgaccttggtggccttgtgcatcatctttacaatgacaaaatgtgacaagcatataaaatcccttactcctttggggttggctcatataggaggaagaattgggacaaaaccaaattgtaacctttgggtaaatctgcttctaaacaggttatctrtgttcactgtaactaaccttcccttccctgcgtctccacgratgggcttgactttcacacgcagatgcagagatctaggcaagcaccttcatacyccaccaactgaaaaaagatgcagagttacagtgcatctgaaattaagaagcttatcaagcattagcttgcactaaaatcacttgcaacacctgtatttttgaattttggaaaaaaatatttagctcagtaaatattattaagaaaggttaggaaaaatgaaagtgaattatagtacattttttaagcaagttctttaggatggacaacttgtactaccttaaataacggtaattaactcacttctg

SEQ ID NO: 71800 - DNA, 600 bp, Chicken  19866894350928_3
gttattttgatacctgtgtgtgttcactggctcttctgatttcttgccgtgaccttggtggccttgtgcatcatctttacaatgacaaaatgtgacaagcatataaaatcccttactcctttggggttggctcatataggaggaagaattgggacaaaaccaaattgtaacctttgggtaaatctgcttctaaacaggttatctrtgttcactgtaactaaccttcccttccctgcgtctccacgratgggcttgactttcacacgcagatgcagagatctaggcaagcaccttcatacyccaccaactgaaaaaagatgcagagttacagtgcatctgaaattaagaagcttatcaagcattagcttgcactaaaatcacttgcaacacctgtatttttgaattttggaaaaaaatatttagctcagtaaatattattaagaaaggttaggaaaaatgaaagtgaattatagtacattttttaagcaagttctttaggatggacaacttgtactaccttaaataacggtaattaactcacttctggggatgaaacctattcatatggtactgtattctgggacaggtcttttaacggtc

SEQ ID NO: 71801 - DNA, 600 bp, Chicken  19866894350935_1
gagtttctccagggatacaatacaaaagtgctctatcagaaatgcaatcaattccagagatgactgcttcctgcacacttccaagctgctgctttataaaacaactcctcataaaaggagcaggaaatgcatgacatcgtttagcaaccggtcattagaatttaatggaagaggattaaaatacaaaaatgccatgcttatagaccttcccatacattaccccagtttttgagcagaggaatcagtgttacaccagtaaagctttaactctttcctcaaccttcagaagtggaaacatcmcactgtcaaagaaaagctttgtcatattagaaagaaagacaaataaaaaccaaacctttgaatcaaagccaggtcagtggttatgttttctcagtttcataccatcactcagtttaaaaatttctggggaaaatgaaaatgtgcatgctaaccttgatttctccttaattgtttttgcataggtgccgtaccatgacatctcttgcctcttagcagttttcttccttatagttgcttacattaaagtgaatgtgcacttccttacagatacatacgaggtacaataagaacaaacaaaat

SEQ ID NO: 71802 - DNA, 600 bp, Chicken  19866894350940_1
aagtgttaagattatcacagagatcaactcatttaaaaattaatatatgacctgaaaagacaaaactgaaagcaaaaaactgcaggtaagacacttcataatagcccaatttttgcttgactgtgttctacagactccactaattacacaaaataagttgtataaatcctcctacttcatttgaaaaggaaaaacaaaccacagaaattcttgactggtgtttgcagttatcaaaatactcctcagcagtttctgctgtgacttcagctattttgaggtgtattttattcctttttttcmttttttgcatctaaagacaaaaatcacaggtgagaatgagaacctgaaaagacccaacactaaattaagaaaagtatttacatcatttaagtcttctaattacaaaacgtgtgctacagtaattacaacaacgagcatgttgttgaacagtttccatgaggaacaatatttgatgggggatgatatttggtgccacccccatcccctttcttaattaaattcttattctggcacgaaactcagtggagaatcagccaacatatctcaggggctactgggtagagaactcctggatctggc

SEQ ID NO: 71803 - DNA, 599 bp, Chicken  19866894350948_1
  misc_feature (1)..(143): n is any nucleotide
nnnnnnnnnnnnnnnnnnnnnnnnnnnnnnnnnnnnnnnnnnnnnnnnnnnnnnnnnnnnnnnnnnnnnnnnnnnnnnnnnnnnnnnnnnnnnnnnnnnnnnnnnnnnnnnnnnnnnnnnnnnnnnnnnnnnnnnnnnnnnnntatgctatcagtctcattgattattcaatcagccatagtgcaagcggctgcacaccctcttctccccagcatgagagttcacagaagcacagaattgtaggagttggaagggacctctggggatcgctaaggttaaggagcattcgcgttgcttccyggtgtggaccgaggttcttgcctagcacttgcctccctcccacttctgttgctgtcttcagcatttcttcttggttaacctacttcttttttcccccactcacaattcctttccattctcctttctcctttatagtctcactatgcctctttcctctccagtactttccaccttaatgttgacattgttgcgcactgaatatccaaacaaagccactattcatccaaaaagtaaaataaaataaaatttgggtcatttgttggctcacagcaaagagctcaaagtaccagacagtctct

SEQ ID NO: 71804 - DNA, 600 bp, Chicken  19866894350949_1
cagaaagctatttccctcagcagcaccctcctccagcctagtgcttattctatcatacaggtacattgatgctttgctctgtgtaccctcagctcccactggctccgtgggagttcactctcccagcagtgctcacaagtgcagcagtttgatgcagcactgctgagataaccacagctcacctaagagctgatcttttaccaaaaggtccagaacaaaggcacttgggtggtggctcctgcatttagaattgcaagaggtcaaagcttatgggaactttattatctgcacaagccatcrcacttcagatgaaatgcaaaaggacgtgacactccaaaattatgccttactgctcctctaatggtagctacggcgcacagaaatatcctttaatcagttatcctcaaccaycttccagtgctctgccttttataattaaaacatgctagccagaaggaaataggagattaactagcattcacaacatgcctttgagcagagatttacagagaacaagtcatttgaaattgaaaagatattccaatcctttctgaaagttctgaagaatatgagcagaagtgcaaagagagtaaccagaac

SEQ ID NO: 71805 - DNA, 600 bp, Chicken  19866894350949_2
agttcactctcccagcagtgctcacaagtgcagcagtttgatgcagcactgctgagataaccacagctcacctaagagctgatcttttaccaaaaggtccagaacaaaggcacttgggtggtggctcctgcatttagaattgcaagaggtcaaagcttatgggaactttattatctgcacaagccatcrcacttcagatgaaatgcaaaaggacgtgacactccaaaattatgccttactgctcctctaatggtagctacggcgcacagaaatatcctttaatcagttatcctcaaccaycttccagtgctctgccttttataattaaaacatgctagccagaaggaaataggagattaactagcattcacaacatgcctttgagcagagatttacagagaacaagtcatttgaaattgaaaagatattccaatcctttctgaaagttctgaagaatatgagcagaagtgcaaagagagtaaccagaactattcacacagactgctaatgtcaagatgatgaaaatacaaagttttgcattcctgttacaggaagagaaaaggctctgcctggcactgagctctgctggtaaccctgaaa

SEQ ID NO: 71806 - DNA, 600 bp, Chicken  19866894350950_1
gatatacaaatgatacgttagatattcacataaaatagccaccaaagcctgtataaaaattcagcaggtttttggtcaagactgtggagatccaagagcttgataatgtggccctattgagcaacaagcaagtagagcaggagacaagctaacaagctaattgctccagtacctccacattaggagttggactcaatgatcctttatgggtcccttccaactcgggatatcctgtgattgtatggtgccctaatccttgaaagaatttgtcataatgcattaatgtgaattagcagaagsgtggaggcagatacacacttaaaccattactgaaagtagtgtgtttcagtataatgtgtgaaggagttcaaggagtcagtgagctaagtagtgtttaatgaatgctgatttggtcacccaagcktgtcatacttagaacagcactgtgagaaggatattgtcttttctcttgtagactccaggctggcgttgaggatagtttcttgactttcggagtttacaaagatgagatcacaatgcaacttgttgacaaagcctgcaaaatattaggtatgtgtcaccatgcctcaaaaataaacc

SEQ ID NO: 71807 - DNA, 600 bp, Chicken  19866894350950_2
caagcaagtagagcaggagacaagctaacaagctaattgctccagtacctccacattaggagttggactcaatgatcctttatgggtcccttccaactcgggatatcctgtgattgtatggtgccctaatccttgaaagaatttgtcataatgcattaatgtgaattagcagaagsgtggaggcagatacacacttaaaccattactgaaagtagtgtgtttcagtataatgtgtgaaggagttcaaggagtcagtgagctaagtagtgtttaatgaatgctgatttggtcacccaagcktgtcatacttagaacagcactgtgagaaggatattgtcttttctcttgtagactccaggctggcgttgaggatagtttcttgactttcggagtttacaaagatgagatcacaatgcaacttgttgacaaagcctgcaaaatattaggtatgtgtcaccatgcctcaaaaataaaccctgcagattcacacctgagactacatctcagattttggtctcatctgctcttcagaatacctttcctatgttgcagacattctgcattcactcctaatccatctgacagcactacaagaatttc

SEQ ID NO: 71808 - DNA, 600 bp, Chicken  19866894350956_1
taaggcctgaaagtaggcgagatccctacttttaacttctggctgtggtagagagaagaggacggctctaccacgatcaggatttgtggtgccccatgatgtggctgtctgctgtctttcttttaggttgccaacacaaagcaaggttgaggaactgcccacatggctttttccagccatgcctgcactactgaagtgaaaatgcagataatgctgcctttagtacctccttgctcatggcagcctggtagttacacatgcccctgctcaataccgagacccttcctctatgtgagtcayagtggggtggggatggtgggattctttctctgttccatgctccaggatgaaggagaatgaggagcggtcccgagccctggaggcggagcgggagttttactcttcccagtcacaagcactrcagaactcactctcagagctgactgcagagaagcagcagacagagagagacctcaaggtactggctctatgcatcatgcattgccatccctgggccctgacttccttcactttcctttcagatcatctgccatcaaaagagagacttgttcttatcctgtggtcacaactctttgtttg

SEQ ID NO: 71809 - DNA, 600 bp, Chicken  19866894350956_2
tttaggttgccaacacaaagcaaggttgaggaactgcccacatggctttttccagccatgcctgcactactgaagtgaaaatgcagataatgctgcctttagtacctccttgctcatggcagcctggtagttacacatgcccctgctcaataccgagacccttcctctatgtgagtcayagtggggtggggatggtgggattctttctctgttccatgctccaggatgaaggagaatgaggagcggtcccgagccctggaggcggagcgggagttttactcttcccagtcacaagcactrcagaactcactctcagagctgactgcagagaagcagcagacagagagagacctcaaggtactggctctatgcatcatgcattgccatccctgggccctgacttccttcactttcctttcagatcatctgccatcaaaagagagacttgttcttatcctgtggtcacaactctttgtttgctatgcttcatatcacagttacatgaggatccatgctgtatctgtgtagcactattatttattctgtctttctgatgctgattaacctattcagtaaaaattatttccatttgttcatgtg

SEQ ID NO: 71810 - DNA, 600 bp, Chicken  19866894350968_1
tccagagttaaactctattgcagaatgaaaatggcagaaaggcacctgattctgtgctaatatagagctatataaggctacatgtgatcctactgcagtctgtagagtgacatgcagaaaactaataagacacagaaaggtgtaatacctatcagaatgcagatttctaccaccgtaatactaatgtaaagtagtggcataatttactctttagaaatgcatgtgaaagacagggtgctatccaataccttgtctttgctcaagccagtgagagcttctctcaagcttttctgggtcccrgatttcatccattacattaatcaacaattgagtgcaatggtttgtttctgattaacattattttgtattaaaattccyaatgtataatagcattttatagatgactttgaaatgttgcaacttaattagatttttcaacaatgtactattcttataaatattatgagtattgcctctttaaagcatgaaggcattttaattggattgcgtaaatagagtacacagtacagcttccaagatgagaaggaatggtaatcctttatgtaatcacatgcatgatagattatatctgggtttctg

SEQ ID NO: 71811 - DNA, 600 bp, Chicken  19866894350968_2
tacatgtgatcctactgcagtctgtagagtgacatgcagaaaactaataagacacagaaaggtgtaatacctatcagaatgcagatttctaccaccgtaatactaatgtaaagtagtggcataatttactctttagaaatgcatgtgaaagacagggtgctatccaataccttgtctttgctcaagccagtgagagcttctctcaagcttttctgggtcccrgatttcatccattacattaatcaacaattgagtgcaatggtttgtttctgattaacattattttgtattaaaattccyaatgtataatagcattttatagatgactttgaaatgttgcaacttaattagatttttcaacaatgtactattcttataaatattatgagtattgcctctttaaagcatgaaggcattttaattggattgcgtaaatagagtacacagtacagcttccaagatgagaaggaatggtaatcctttatgtaatcacatgcatgatagattatatctgggtttctgggaagacaaaggctgttgtatatacagctactgaagtgagcagcacacatttctccaagctctgcaattttttttttt

SEQ ID NO: 71812 - DNA, 519 bp, Chicken  19866894350970_1
gcccaggatatggttggtattctgggctacaaaggcacatcgctggctcgtgtctggcttatcatccaccagtacccccaagttctctttgtcaaggctatgctctatcatttcttctcctagtttggtgaaaattgcagcaatccaggcgcaagaccttacacttggattttttaaaactcaagaggttatcctgggcccactgctcaagcctgtctaggtctgtctggatggcatcccatcccctaggcatgtcaactgcatcatacagcttgatgtcatctgcaaaactcctgaagktgcactcagtcccactgttgacactatgatgaagatgttagatgctggtctgtctcagtactggctcaagggacaccactcaccgctgatctccatccggacattgagccactggccaccactctctgggtacgatctcataaccagttcctcatccactgaacagtctgcccatcaaatccatgtcttaccaatttgaagaaaaggatattgtaggga

SEQ ID NO: 71813 - DNA, 600 bp, Chicken  19866894350975_1
agatcctcagaatgtttattattattattattattataaaaaatataacaatcacagaaatttaaaaaggtaaagtgaaattaataaatgccagtaaaaactgagactgcaaatgggccacatggtctaaaacaagtatgtagtctaagttgatgtattctgtaatcaattgatcaaactggtgtcagctaaagtatggtatgatgaacccatactcaaagccgattatgagatttagtttgataagtcaaagctcaacagcatattagcacacacaaattattgctatatattatgttmtataaatgcttcctcattatacaataacgtatttgcaacaacaaagacaatattcctaaatgcaatatgttttaggaaattttgcctttcgttttttaagtatgacactgcatcaattggatagcttaaaactcataaccaccagttgttttcctaaagataatactttctagctatctgatggccctaaaattttcagttgagtttccttgtgtgtagccacacactgcagtttatatgacccaagtagggaaaagcaattcatgtgaatccttttgtgagctgaagaatttaataatg

SEQ ID NO: 71814 - DNA, 600 bp, Chicken  19866894350980_1
catgtgatattgcttaaatcagcaacagggataagtcacaaatgagcagtaagccagacttcttcaaaaatcatgagaggaaactgcattcacaattgttagcgtagacaggtatatgaatatggaccagtgcaaagttaaaattcaccttagtttacccactttttgctcttcatttggtttgatgtgtttcttggttgtgtttattattattattattatcatcaagttagtgagttgtttgtttatgttgattgcaaacctgttttcatgcctctgttcccaagtatccggccttcrggtttagatgagtaaagtggtttgggcagaatccagatcagttcatgcagaggctatgcagaaagtagaaaagtgcataacaaatctaagcatggattttgtatgcacttttaccctaagaaaataagtctgtatatatatgtacacatgtgtgtatgcatatatcctatgacaccagtgtaaaattttcagcaatttactgycttgccaaaaacatatgtcaccatgtgtattttgtaaaaaatccaaggcttcccatcctttaaggaaactcagtttacgttctgagtaagggtttaa

SEQ ID NO: 71815 - DNA, 600 bp, Chicken  19866894350980_2
ttattattattattattatcatcaagttagtgagttgtttgtttatgttgattgcaaacctgttttcatgcctctgttcccaagtatccggccttcrggtttagatgagtaaagtggtttgggcagaatccagatcagttcatgcagaggctatgcagaaagtagaaaagtgcataacaaatctaagcatggattttgtatgcacttttaccctaagaaaataagtctgtatatatatgtacacatgtgtgtatgcatatatcctatgacaccagtgtaaaattttcagcaatttactgycttgccaaaaacatatgtcaccatgtgtattttgtaaaaaatccaaggcttcccatcctttaaggaaactcagtttacgttctgagtaagggtttaaaacttgcagccacatatttactggtttatagtacacggtattttaaatccagtatgttaaaatgtttcatgcattcaaattcaaactgctttgagaaaataatagtttaaatatctataattttatcaaatgagagtatgtgataatataaatccattctgaaattgagcatatcttcaaactgctggaaaagtattttcctg

SEQ ID NO: 71816 - DNA, 600 bp, Chicken  19866894350981_1
gggaggaggagagaaggaaaaaagtgaaagattcacacttacgccttgaatcagcctatgaaatcagcaacacgttttgtcaaatatttagtgtaagtgggacacaaagttagacggagtacaacaaggcaagtgatacacattgtttatacagtgggaaaaataccatatgggaacgatggttatgacccatataatggaaactggaggaattctgtaatgtaaacattcaagattctacaccatgggcttaagaaacttttctactatgaagatgttcatgatatgcatttaagatgwtatggtacaaactagcaggctgagcagcataaaattcaagagtaagtaaacatttttttctgaaaacagaaggatcatcttttagaaactctaagaagagttgaaggttttggctgttttagtgatggactgagttaccaatgtgacaaagccttgaaagagccaaaagtttcagttgtttaaatctgtaaatgaagtaaagtcagagatgaccacaatacagagatgcagaataacaaatgcaaaagatttgactgtaataaaaacagtgtgctcatgtaaattggtcctgaataaaat

SEQ ID NO: 71817 - DNA, 600 bp, Chicken  19866894350985_1
gtatttgtgactttattgttcatgagcagtttggtacttttctctctaacttttgctgagggcttaattcttcagtgacagagagcaaaggcagtgcaaaacttgaaaccaaaattctctgttccatctgcacagtctttacaaatgtgcttgtgaaggaatcagaggcaagacttgtatgggtagctagaaatatttctgccaaaattatgctgatcctactaataggccaccacctttgacttgctcacatgtatgcaaactctgctcacacacttcacagatcagttcctttctctraagacctttttgctaycaatttgtatggaagtggttcctaattccaccgctcatgaggtaaggctgtgaatgtataccacataattctgttccttttgttttcgcgtttttctattgcaagygcgtatctaacattctgktcagccacacctctgttgcattattgctttcttcttcctactaaatatctatcatagcgtgttctcacatgtatcgtatcttgcatttttcagctttaatattgtttttattctcttcttcgtaaccaattgatgtcatcttatgtattttctcctcact

SEQ ID NO: 71818 - DNA, 600 bp, Chicken  19866894350985_2
tgttcatgagcagtttggtacttttctctctaacttttgctgagggcttaattcttcagtgacagagagcaaaggcagtgcaaaacttgaaaccaaaattctctgttccatctgcacagtctttacaaatgtgcttgtgaaggaatcagaggcaagacttgtatgggtagctagaaatatttctgccaaaattatgctgatcctactaataggccaccacctttgacttgctcacatgtatgcaaactctgctcacacacttcacagatcagttcctttctctraagacctttttgctaycaatttgtatggaagtggttcctaattccaccgctcatgaggtaaggctgtgaatgtataccacataattctgttccttttgttttcgcgtttttctattgcaagygcgtatctaacattctgktcagccacacctctgttgcattattgctttcttcttcctactaaatatctatcatagcgtgttctcacatgtatcgtatcttgcatttttcagctttaatattgtttttattctcttcttcgtaaccaattgatgtcatcttatgtattttctcctcactggtattagtarttcct

SEQ ID NO: 71819 - DNA, 600 bp, Chicken  19866894350985_3
tccatctgcacagtctttacaaatgtgcttgtgaaggaatcagaggcaagacttgtatgggtagctagaaatatttctgccaaaattatgctgatcctactaataggccaccacctttgacttgctcacatgtatgcaaactctgctcacacacttcacagatcagttcctttctctraagacctttttgctaycaatttgtatggaagtggttcctaattccaccgctcatgaggtaaggctgtgaatgtataccacataattctgttccttttgttttcgcgtttttctattgcaagygcgtatctaacattctgktcagccacacctctgttgcattattgctttcttcttcctactaaatatctatcatagcgtgttctcacatgtatcgtatcttgcatttttcagctttaatattgtttttattctcttcttcgtaaccaattgatgtcatcttatgtattttctcctcactggtattagtarttcctcccaccttcatatagactttgcttttcatttatatgctacataatgaatgataacatcaaatatgcctagactgagtactttcccgtgcagtaccccagatgaaac

SEQ ID NO: 71820 - DNA, 600 bp, Chicken  19866894350985_4
acaaatgtgcttgtgaaggaatcagaggcaagacttgtatgggtagctagaaatatttctgccaaaattatgctgatcctactaataggccaccacctttgacttgctcacatgtatgcaaactctgctcacacacttcacagatcagttcctttctctraagacctttttgctaycaatttgtatggaagtggttcctaattccaccgctcatgaggtaaggctgtgaatgtataccacataattctgttccttttgttttcgcgtttttctattgcaagygcgtatctaacattctgktcagccacacctctgttgcattattgctttcttcttcctactaaatatctatcatagcgtgttctcacatgtatcgtatcttgcatttttcagctttaatattgtttttattctcttcttcgtaaccaattgatgtcatcttatgtattttctcctcactggtattagtarttcctcccaccttcatatagactttgcttttcatttatatgctacataatgaatgataacatcaaatatgcctagactgagtactttcccgtgcagtaccccagatgaaacctctccctcccctaaact

SEQ ID NO: 71821 - DNA, 600 bp, Chicken  19866894350985_5
gctaycaatttgtatggaagtggttcctaattccaccgctcatgaggtaaggctgtgaatgtataccacataattctgttccttttgttttcgcgtttttctattgcaagygcgtatctaacattctgktcagccacacctctgttgcattattgctttcttcttcctactaaatatctatcatagcgtgttctcacatgtatcgtatcttgcatttttcagctttaatattgtttttattctcttcttcgtaaccaattgatgtcatcttatgtattttctcctcactggtattagtarttcctcccaccttcatatagactttgcttttcatttatatgctacataatgaatgataacatcaaatatgcctagactgagtactttcccgtgcagtaccccagatgaaacctctccctcccctaaactgatacacagccatttatcattcccctttgtaattcccctggaaagggtagatctaatgggtttctaagcaaacacataaaatcttaacttccctatcagaagtgaagtggtggaagacagagttaggactgtctttcatcaacataatatttatagccaagcaaatgaaca

SEQ ID NO: 71822 - DNA, 600 bp, Chicken  19866894350986_1
gccttacataaggattacctacactcgggcagcttctcatcacattaactgttcctctgagcagggaggcactcgcttgtgcttttggacagtaatgaggagatcggttcttttgctgagaagtcttgcaatgggtgtagcttatggtgttagagggtaagtgtgtgtgctcttatgatttatttaaataggtatttaaatggactgttgatttttctagcttactagattttgagcagctgtggcaggtgagtaatttggtaactcaggtttcctcaagcttttccaaaggaatatgtrttgtgctgggacaaagatagctatatggaatttcttcctttacaaacttgcatcctaacaaatgattttctcattttagcactgagaagttcctcaggcaagtagtaaatcttttaaatcatattagaatcatttgagttggaatggaccctgaaaggtcatctactccagctcccgtgcactgaacagggacagctacagctagatcaggctgctcagtcccagaccttgaatgtctccagggacggatcatccaccacatctctgggcagcctgttccagtgcctcacgacccttact

SEQ ID NO: 71823 - DNA, 600 bp, Chicken  19866894350988_1
tactaaattgatttcacagatacatagaaagccatgctgagtctgttaaaattctccaaactctaactgggattgaaaatttaattacattttaaaagggaagcagatactcatatttcacagaaactgtaaacagaccacattcaatcctatgccttccttcccattagatcacacttcctcttcaaagggtctcatttttatttcttttaaagaaaagatatatttgcaataaaaattgtgcaggaactcaaaaaatagaaatgcaatatatagaaatgaaaaatcctttacaaaacrccaaagaatctagttcttcatgtcctgtaaacaaacacctttcagtttttactacctgaaagacaaaattccacttagacaaaaagtaaaagctcgatgtcaaaacatttgcagaacactgtactctgaaaggagaacccctacagttactgaatactgagttcatattttctgtggcatcaagccagcatatactccttcacagactttttaagatttttgaccttagctgcttggatcataaaagatcctggaatgcatactgatgctctgtgggctttacctatcagtttcaggaat

SEQ ID NO: 71824 - DNA, 599 bp, Chicken  19866894350990_1
  misc_feature (1)..(83): n is any nucleotide
nnnnnnnnnnnnnnnnnnnnnnnnnnnnnnnnnnnnnnnnnnnnnnnnnnnnnnnnnnnnnnnnnnnnnnnnnnnnnnnnnnnttctgcactggtggaaatgatctgcccatttagctggaaaaaaaatagaaaaagaaagttaaacgtactgtactttgcactctgtcttgccatgggtagtacagggaaaataaaagataggtacagctcagaaagcagggtcatgctgtggactgagcattaggctggaagtatgaggacttttttaattaactgaaaatgttttcttttgtgcagrttttaactattaaaaatacactttcygaagtcaaaatgccacaggaaataaaaccaaacgtttggggaaatactgagggggggagttggactcagtcttccatcttccaacccctacgattctgttgtgatactattgtggcacacagctttgatttgttctttgacatagagctctattactgttaggttattctattaccattcttctgttaggataagactctgtagatcaccaagaatttcacagcagrgaacatgattgcrgcttcagtgacacaaacatatgagacctgagca

SEQ ID NO: 71825 - DNA, 599 bp, Chicken  19866894350990_2
  misc_feature (1)..(57): n is any nucleotide
nnnnnnnnnnnnnnnnnnnnnnnnnnnnnnnnnnnnnnnnnnnnnnnnnnnnnnnnnttctgcactggtggaaatgatctgcccatttagctggaaaaaaaatagaaaaagaaagttaaacgtactgtactttgcactctgtcttgccatgggtagtacagggaaaataaaagataggtacagctcagaaagcagggtcatgctgtggactgagcattaggctggaagtatgaggacttttttaattaactgaaaatgttttcttttgtgcagrttttaactattaaaaatacactttcygaagtcaaaatgccacaggaaataaaaccaaacgtttggggaaatactgagggggggagttggactcagtcttccatcttccaacccctacgattctgttgtgatactattgtggcacacagctttgatttgttctttgacatagagctctattactgttaggttattctattaccattcttctgttaggataagactctgtagatcaccaagaatttcacagcagrgaacatgattgcrgcttcagtgacacaaacatatgagacctgagcattgaatagcattagctatgagcagcc

SEQ ID NO: 71826 - DNA, 518 bp, Chicken  19866894350990_3
gtatgaggacttttttaattaactgaaaatgttttcttttgtgcagrttttaactattaaaaatacactttcygaagtcaaaatgccacaggaaataaaaccaaacgtttggggaaatactgagggggggagttggactcagtcttccatcttccaacccctacgattctgttgtgatactattgtggcacacagctttgatttgttctttgacatagagctctattactgttaggttattctattaccattcttctgttaggataagactctgtagatcaccaagaatttcacagcagrgaacatgattgcrgcttcagtgacacaaacatatgagacctgagcattgaatagcattagctatgagcagcctcctcagtggtacgtttcaatcaactcttaccacagtgttagakgcatggattttgtgagcgttggcaaggagtcgtgttttggctcagacttagagcagcatagaaatttccttttggagcttcccattatcctcaataatatag

SEQ ID NO: 71827 - DNA, 505 bp, Chicken  19866894350990_4
tttaattaactgaaaatgttttcttttgtgcagrttttaactattaaaaatacactttcygaagtcaaaatgccacaggaaataaaaccaaacgtttggggaaatactgagggggggagttggactcagtcttccatcttccaacccctacgattctgttgtgatactattgtggcacacagctttgatttgttctttgacatagagctctattactgttaggttattctattaccattcttctgttaggataagactctgtagatcaccaagaatttcacagcagrgaacatgattgcrgcttcagtgacacaaacatatgagacctgagcattgaatagcattagctatgagcagcctcctcagtggtacgtttcaatcaactcttaccacagtgttagakgcatggattttgtgagcgttggcaaggagtcgtgttttggctcagacttagagcagcatagaaatttccttttggagcttcccattatcctcaataatatag

SEQ ID NO: 71828 - DNA, 402 bp, Chicken  19866894350990_5
atactgagggggggagttggactcagtcttccatcttccaacccctacgattctgttgtgatactattgtggcacacagctttgatttgttctttgacatagagctctattactgttaggttattctattaccattcttctgttaggataagactctgtagatcaccaagaatttcacagcagrgaacatgattgcrgcttcagtgacacaaacatatgagacctgagcattgaatagcattagctatgagcagcctcctcagtggtacgtttcaatcaactcttaccacagtgttagakgcatggattttgtgagcgttggcaaggagtcgtgttttggctcagacttagagcagcatagaaatttccttttggagcttcccattatcctcaataatatag

SEQ ID NO: 71829 - DNA, 600 bp, Chicken  19866894350992_1
cacagcaaactcttgtcatagcgaatccatttcactgcctcgagtttagtaagacccagtttttttctttaattttaattgtcagtaagccctcatttgacaaaatctcttccaagttgaaagtgctggtcaggcaattcctggtggtccctatgcagtacttaacagagcaatacttaacagatatatgcacatttctcctttttttttgtttctattcatgtaagtgtggatgatgtgagctgatctctgcgaagatgaggtgtatgtatgtaaacatgatactgctgttctcttctygattccatagaggtgaagtatgatgtcctcttatagtgagagctgttatagcagacttctctggcctcagaaatggcagcaagaggaggaattgttaccagcacatggaaaagctgcacaattggaatgcaagagacatggcttgtgcatttattttatctatggacctcagagtttgagtactgctctagtaaatgtgcttagggtatgtggtagggttagctgcaggatcaggacctgatgcatatctactaaggcattttggcagattccagttgatgttgtgctgtactgtgtgct

SEQ ID NO: 71830 - DNA, 600 bp, Chicken  19866894350992_2
taagcccaaagtcatggtggcaattctaagaaatgatattgctctattaaggcttggtctagctgtctgcagctccttgaaatggattccagaaatagacatagctctccttgcttatgctgttttacctgcttagaaaactcaagggaaatgttgttggccttcagtgaggctgttttccctctctaacaatttcacctggagcttctgagctaggcacaactgaaattaaaggttgcatatgaaggtttcttcctgttttctggacatggatgtttattgtctgagtagctctttagyggtccaggtacagaaataagagctttcctctaaatgagggcaggttaaactcaaatctttccaggcagcctctgaagcagactgaaattacttgggatttcttcgcattttgcagcctgctgtaagcagtctttgtaccagaagcagctctgaatttttgttctgatgttgtttctgaggtaggatgtggtcctgagatgcccacctcagctctgcgtgttctggctgtgtgcatgctgttctccttttgatagtgctgacctctgacatcaggtactgaaagggtgtgttatccaacca

SEQ ID NO: 71831 - DNA, 600 bp, Chicken  19866894350992_3
ctgaggtgtgtccagtcgatggcatcaaagagtgcaggtacagggttctctggtttgcagctggctggtaaaataacacaataggcagctcctctaccactgaaaggtgagtaaataatactgtataaaaggagggggggggaggaaaagccccaaacattggtatgtgtttaggttttttttgtttttgtgggagctttttgcatatcattttttcctacacgtgctcagtttacatttaagcagcaatttcctctgcttctcatcactggtttaatagcacaaatagtattgcagttytaaactatgctggccttattaaccttaaagtgcgtgtgaggaagaccacagcacagtcaaggtagaatactttatggcattcctctctagtatttcattagttaaccagatcaccctcactcggtagacggtgatattgaactatttgcattttgttgtttgcttggttgtgtgccaatkggagtctttatgtagggatcttccagttcaatgtgattgactgtgaattctaagggttaggaatggggagaggagagacgtggcctgcctcccttcctcttcctgtttgaatttgaagtg

SEQ ID NO: 71832 - DNA, 526 bp, Chicken  19866894350992_4
tttgtttttgtgggagctttttgcatatcattttttcctacacgtgctcagtttacatttaagcagcaatttcctctgcttctcatcactggtttaatagcacaaatagtattgcagttytaaactatgctggccttattaaccttaaagtgcgtgtgaggaagaccacagcacagtcaaggtagaatactttatggcattcctctctagtatttcattagttaaccagatcaccctcactcggtagacggtgatattgaactatttgcattttgttgtttgcttggttgtgtgccaatkggagtctttatgtagggatcttccagttcaatgtgattgactgtgaattctaagggttaggaatggggagaggagagacgtggcctgcctcccttcctcttcctgtttgaatttgaagtgagtgagagagcacgagaggggcatttcccaacgttatactaacgcaaggtcgtgagctggaggaattgaggactcttgttctggtagctatgtttattgagctatt

SEQ ID NO: 71833 - DNA, 600 bp, Chicken  19866894351004_1
ctagaaaatgtagtggctgatgagagaatagaaaatgagatgagctcgataaagtccacatgtaaagatttacacgagggatgaagttctggctccagattgtttgggtgaaatgaactatttcttggttccattcagtctcataaaatatgttccagcctgttctttttaagtaggtagtttaagctaaaaggaggaaaaggaggtaaattatggtatgtactgcatgataagattgtatgtattgatgttctgtatttggcctgcagatttattccctactaaatatggtggaataaktttttttttttttaatggagattgcagtaatgaggtggaataatatgccatatgctgccagtacctaacaagatgtaatacacatagctgacaaaataaaattctttcatcactttctttgtatcggtacataaatgtttaagaactggtggtgattatgaattgaaagctattgactggccttgaaatccctcaatgaacagatgtttaatctgagtagttcaacattttcccttcattggagcagtgatgatgttcttgcagtgccctgatgcagcccatagctaagttctcaatgca

SEQ ID NO: 71834 - DNA, 600 bp, Chicken  19866894351005_1
gtactgtggtacaaaggagactgaatgacgctactccggactttattttatttgcctctcgctagcacagaaagaaaggggggaaaaaaaagcatcatacagacagtaggaattgggaaagtcttaaacgagaccttctgtccataaaaagtaataaatcattgaaaatgaaactgtcctgtgtttcagtttgggatttgaaagtgaaggtttgatgctttattctgggattttattattattattttgcttttaattgtctttttatcccgcacagcgagtgtgatgcttttggggcawgtcgaggacaggaaatttatggcacagtcctttatttgaacacaaagcctcgcgtttgtgaacttttttgtgctgctttacctttacttggtgtaatgaaaatactcactcatttccataacgtctcagaagatgtgcataggaattaagtgaaaacgggttatttttgtgtcctgatggtgttagcgtatttatttatttgttatgtagaagagtgaagattaaaaaaaaaaaaacaaagtcaaaccaaaaatgggaaagaggggctgaaatgcagcgtctctccttcccagactcatg

SEQ ID NO: 71835 - DNA, 421 bp, Chicken  19866894351006_1
accaagaatgcagcaacataaagaagctgaatcatttccaagaagttcctggagtttaataaaatcttgaaaagatacttggtctttctcattagttagcagtgaagacacattatttagtgctgtgttttgtcagcgatatgaaaaataaagttgactgaagcagaggattgcattgggatctcttgacatggtgtcatttaggtctctgcatcaaagagtgctgaaaatgttctgtccaaagtctaaaaatttccattctgataccaatttcttacatttagcttttattatcacaaygcaattttatattgataattaagaatagcttaacttcttcatgtgcacttttatatatttcaattgattttctagagtagctacttcatgtgatgactaagtacttcaagtctttttctgt

SEQ ID NO: 71836 - DNA, 600 bp, Chicken  19866894351008_1
gaaaacagcacaagcttggagagcctcgctacaaaaatacaaaaatgtccagcaatagtcatccagtctttttactttcttaacaaaagacagctgagatcacaagtttaatgcctgtgttatcagttggtgacatcccagaatccagactgagctgctgcagaccatgcatggaagagatcccctgattcccagactaaaattacatggctttctacatatgatggcaaagctggctctaacatttcatattctctaaaacaaaaatatgaaagaagaaacaatcttctgctaacttcrggaaataatatcacctctttctaaagaaactaaacacaaggaagatttgtttttagtcaagagatctgcagctagctagagagcagagaaacattagatgactaaatcattatccaatagaaaacctgcttatggaaattwgaaaaatttatagaaatttttatgcagcatatttgcacttcaacagaagcatcctgactctgatttatttgggtaatctgcatttattaccatttcttgtatttgccatttaaatgaaacaactgttctagccattgatactttccttatgatgaaaag

SEQ ID NO: 71837 - DNA, 600 bp, Chicken  19866894351008_2
aatccagactgagctgctgcagaccatgcatggaagagatcccctgattcccagactaaaattacatggctttctacatatgatggcaaagctggctctaacatttcatattctctaaaacaaaaatatgaaagaagaaacaatcttctgctaacttcrggaaataatatcacctctttctaaagaaactaaacacaaggaagatttgtttttagtcaagagatctgcagctagctagagagcagagaaacattagatgactaaatcattatccaatagaaaacctgcttatggaaattwgaaaaatttatagaaatttttatgcagcatatttgcacttcaacagaagcatcctgactctgatttatttgggtaatctgcatttattaccatttcttgtatttgccatttaaatgaaacaactgttctagccattgatactttccttatgatgaaaagtgttcagaagcccttcccataagtctgcgtttcttctactgtatccagcataagctttactctacactgcaagggtaggtgaattttttttaataacaaggacaagaaaattgcttatcctagtggtatgtgaaaggggca

SEQ ID NO: 71838 - DNA, 600 bp, Chicken  19866894351009_1
ttgaattgttgcagcaccgctgcaatcatgaccttgctcttttgtaaaattctctgcctttaattgcaaattggtccttgacctggatacattctttttctcctgagtgcttttatgctgcttcttttttgtctgtgtagacacaatgatagacacttcctctctgactcaaaagacgctgagtaaaacctgcgaaatactgaaccagagattccagattcacacgtaatcacctttcttgctcagtgatagtcagccctttgatttttggtttcaaaatatgtactcattctcctactratttttttttccttggaagctgttgtatgcaaacttaccatttcctttgatattctctttacactatgtctatgctgcctcttataagcagtggaagaggaaggcttgggtcccacccattctccagctgctaatgtgaacaaggtggagctcctctggccatgatgagcaccacaagggcagctgtgtccaggctcaaggctttaagaactttcttgatgacgggatggatcgattgatctattgatttatctatcaaatgtcaaggctccaaattaaagcagactctatcttgttagg

SEQ ID NO: 71839 - DNA, 599 bp, Chicken  19866894351020_1
  misc_feature (1)..(60): n is any nucleotide
nnnnnnnnnnnnnnnnnnnnnnnnnnnnnnnnnnnnnnnnnnnnnnnnnnnnnnnnnnnnatacatatattatttatttttcattcctctacttgggattctttctttataaggagacttagtttcttcgacaagcctcgtgagataccccggatggtgacaaaacagtgcttggacaaaggttttaggagatcacctaagtcagactccctgaacagttagtgtgtgtcctgcaaggagagatcgtgcccagctgggaagtgcctagtgaagaagttgttctgtaggttttcgatcatyctgctcacttggataactgcagctatctgagcactgagatatacagtgagtggatttgggtacaactggtattacattctaagagatataagagaggaagaggaactaattggaatgggacaagaggaataataagtaactcaggcctgattctagaccacagtttcttagtgtgaaggtctattacctcaaaggaagagatgagaagcctgtctctagaagttcacacaggrcttggaaygcccttgcctctttttttcaatgaaccagatgttaaacagaacatttttaatgtcctt

SEQ ID NO: 71840 - DNA, 600 bp, Chicken  19866894351020_2
caaggagagatcgtgcccagctgggaagtgcctagtgaagaagttgttctgtaggttttcgatcatyctgctcacttggataactgcagctatctgagcactgagatatacagtgagtggatttgggtacaactggtattacattctaagagatataagagaggaagaggaactaattggaatgggacaagaggaataataagtaactcaggcctgattctagaccacagtttcttagtgtgaaggtctattacctcaaaggaagagatgagaagcctgtctctagaagttcacacaggrcttggaaygcccttgcctctttttttcaatgaaccagatgttaaacagaacatttttaatgtccttaaatggaccaaaatgatgatctagccaccacctacatggaactgggactcagcagcagatgaattccttacaggcatatgttactatctgagtaattgctctaaaattgaaaaaagcagatacaaaagacccctgcttatcttctccctgacaaagaagggaggaagagaagacaaaatatatccttgcaacatgcacccaaacaagaccatgtctttattaagctatttgata

SEQ ID NO: 71841 - DNA, 600 bp, Chicken  19866894351020_3
gatcgtgcccagctgggaagtgcctagtgaagaagttgttctgtaggttttcgatcatyctgctcacttggataactgcagctatctgagcactgagatatacagtgagtggatttgggtacaactggtattacattctaagagatataagagaggaagaggaactaattggaatgggacaagaggaataataagtaactcaggcctgattctagaccacagtttcttagtgtgaaggtctattacctcaaaggaagagatgagaagcctgtctctagaagttcacacaggrcttggaaygcccttgcctctttttttcaatgaaccagatgttaaacagaacatttttaatgtccttaaatggaccaaaatgatgatctagccaccacctacatggaactgggactcagcagcagatgaattccttacaggcatatgttactatctgagtaattgctctaaaattgaaaaaagcagatacaaaagacccctgcttatcttctccctgacaaagaagggaggaagagaagacaaaatatatccttgcaacatgcacccaaacaagaccatgtctttattaagctatttgatagttttgat

SEQ ID NO: 71842 - DNA, 600 bp, Chicken  19866894351032_1
tgaaaaccctcgccatatgttatgcaagaaaagaagtagctgagcagtaggaggtagtggactccttacactgctgctgtcctactcataaggcaagatgaagcagtagtacaaggagcaactaaaaggaagtggtgatcaagagcaaatgggctgtgaacacaatgcccataattagttagataagtatttttttcatatgaccgttactgctaatgagaagagttattttcctccacttcttgaattgtaagctttaaagaggagcagaagcagctaaaaagcactaatcagtgagtkaagggggagagaacacttgtctctctgaggtggttcagactcattttgttttagctcaggctaaatcaaattctgggctggtacagccagagcagaatgggcatgcaagggaaacggagccctggcatagtccaaacgagccccygtaagttaaatggcctgatcagtcactgttcagtcaagcaattgttaacaagcctcaccctttcaactttggccattttaattagaacctgctggtgtttggaccagagagtaactgagagtagktactacttggcctacccactcttccagaag

SEQ ID NO: 71843 - DNA, 600 bp, Chicken  19866894351032_2
caaatgggctgtgaacacaatgcccataattagttagataagtatttttttcatatgaccgttactgctaatgagaagagttattttcctccacttcttgaattgtaagctttaaagaggagcagaagcagctaaaaagcactaatcagtgagtkaagggggagagaacacttgtctctctgaggtggttcagactcattttgttttagctcaggctaaatcaaattctgggctggtacagccagagcagaatgggcatgcaagggaaacggagccctggcatagtccaaacgagccccygtaagttaaatggcctgatcagtcactgttcagtcaagcaattgttaacaagcctcaccctttcaactttggccattttaattagaacctgctggtgtttggaccagagagtaactgagagtagktactacttggcctacccactcttccagaagaggtggaagggtggacagtgtctgaagtttggtcctctgatcagaagaggttatacgaaagctgttctattgatgctggcattctttcataaaagtgtctgtgttaaggatgcgtaggggttgctcttgttcatttgcaaaataa

SEQ ID NO: 71844 - DNA, 600 bp, Chicken  19866894351032_3
aagcagctaaaaagcactaatcagtgagtkaagggggagagaacacttgtctctctgaggtggttcagactcattttgttttagctcaggctaaatcaaattctgggctggtacagccagagcagaatgggcatgcaagggaaacggagccctggcatagtccaaacgagccccygtaagttaaatggcctgatcagtcactgttcagtcaagcaattgttaacaagcctcaccctttcaactttggccattttaattagaacctgctggtgtttggaccagagagtaactgagagtagktactacttggcctacccactcttccagaagaggtggaagggtggacagtgtctgaagtttggtcctctgatcagaagaggttatacgaaagctgttctattgatgctggcattctttcataaaagtgtctgtgttaaggatgcgtaggggttgctcttgttcatttgcaaaataacactacatctaggataattagatcagggcaatgagtgccaatcagtcttgggaataatatatataatcacggtatctgacctgtggtaaatatgcatgtacaagtacttattccccaagctagta

SEQ ID NO: 71845 - DNA, 600 bp, Chicken  19866894351038_1
tgaacaggattctgggttgcatctattcagtatccatagtcactaataatgatactaaacaggcagattgtgaattgtttacattcgtctgaagataagcaaattggtcaattccctagccaacagttaagagtggaaatgattagtggtatggcctgtcccattgtgtgtcagaaaatctaggtcaaatccttctgtgtttactaattacctctagtgatacaactgaatggcatgcttattcaaacagattttacctcaagttttttttattgcagccatcagtgcagttgctaatasttgaaagccaagacttgtttttatgtgcctgtgtaatatcaaatcactgcaagcatgagctaatccagctgtagatcagaggtggaaatagactktgcttttcttgacttaaagagcttaatattttgcttccagattttcttatgctctctgtagaaaaattctggtcctataagggattggggtaggaagacacctggcttctttgaaacagtgattttaatcaacttatatatattgctgttgcaatggatcagaccattagataggcatttgccttatttacagcagtgagatgat

SEQ ID NO: 71846 - DNA, 600 bp, Chicken  19866894351038_2
taagcaaattggtcaattccctagccaacagttaagagtggaaatgattagtggtatggcctgtcccattgtgtgtcagaaaatctaggtcaaatccttctgtgtttactaattacctctagtgatacaactgaatggcatgcttattcaaacagattttacctcaagttttttttattgcagccatcagtgcagttgctaatasttgaaagccaagacttgtttttatgtgcctgtgtaatatcaaatcactgcaagcatgagctaatccagctgtagatcagaggtggaaatagactktgcttttcttgacttaaagagcttaatattttgcttccagattttcttatgctctctgtagaaaaattctggtcctataagggattggggtaggaagacacctggcttctttgaaacagtgattttaatcaacttatatatattgctgttgcaatggatcagaccattagataggcatttgccttatttacagcagtgagatgatgggtgaggatatttaaactgtaaagctctatgctgtgtacgaggcctaataaggccacagatgaggtatcacaggtatgtatgtgcttgtgataa

SEQ ID NO: 71847 - DNA, 600 bp, Chicken  19866894351038_3
gacttaaagagcttaatattttgcttccagattttcttatgctctctgtagaaaaattctggtcctataagggattggggtaggaagacacctggcttctttgaaacagtgattttaatcaacttatatatattgctgttgcaatggatcagaccattagataggcatttgccttatttacagcagtgagatgatgggtgaggatatttaaactgtaaagctctatgctgtgtacgaggcctaataaggccacagatgaggtatcacaggtatgtatgtgcttgtgataatgaacttggyaataatttataggtatggggtgttttcaatcagatttcttttaagttgctttttaatatgcaacaacctatgggaaactaacttttgtcaaccaagtgtccaggtcttggctttaattccagtagacttcaatttaagttgagaagacctgagtgctgttttcttggaacaccagtatagccacaggacacagtgcaaacaacatgttaagagttaaatgtactctctagtgcagaagggagagctagaggagcaacagcccaaacactggttgtacagaartgctaatggtttccttgt

SEQ ID NO: 71848 - DNA, 600 bp, Chicken  19866894351038_4
tgtgataatgaacttggyaataatttataggtatggggtgttttcaatcagatttcttttaagttgctttttaatatgcaacaacctatgggaaactaacttttgtcaaccaagtgtccaggtcttggctttaattccagtagacttcaatttaagttgagaagacctgagtgctgttttcttggaacaccagtatagccacaggacacagtgcaaacaacatgttaagagttaaatgtactctctagtgcagaagggagagctagaggagcaacagcccaaacactggttgtacagaartgctaatggtttccttgtctgtttgtggagtataactgaagaagttcagcttgcatctgcttttgtaaatgacctgtgcttgggtcatgtgagttgatggactttaatgtagattcrttagtgcatgcatgggtttgctttacgaccgctatacatatatgtgtgcgagtgtatatacaaaaggatgtatttcaagtataccttaagcaggctgaagattaatatcttgtcatgccatgaatttgactcatccagagaagctggatttagaaagcattcaaacttctgtctttaatttta

SEQ ID NO: 71849 - DNA, 600 bp, Chicken  19866894351038_5
ccaggtcttggctttaattccagtagacttcaatttaagttgagaagacctgagtgctgttttcttggaacaccagtatagccacaggacacagtgcaaacaacatgttaagagttaaatgtactctctagtgcagaagggagagctagaggagcaacagcccaaacactggttgtacagaartgctaatggtttccttgtctgtttgtggagtataactgaagaagttcagcttgcatctgcttttgtaaatgacctgtgcttgggtcatgtgagttgatggactttaatgtagattcrttagtgcatgcatgggtttgctttacgaccgctatacatatatgtgtgcgagtgtatatacaaaaggatgtatttcaagtataccttaagcaggctgaagattaatatcttgtcatgccatgaatttgactcatccagagaagctggatttagaaagcattcaaacttctgtctttaattttagagcagcatcagtagcattatctgacatgtggtttcttacctgtcactcaaactattgtaatgaaatgtagtctgtttttcaagtatggtatctctcaaactattagcaaaagcttt

SEQ ID NO: 71850 - DNA, 600 bp, Chicken  19866894351038_6
tttacgaccgctatacatatatgtgtgcgagtgtatatacaaaaggatgtatttcaagtataccttaagcaggctgaagattaatatcttgtcatgccatgaatttgactcatccagagaagctggatttagaaagcattcaaacttctgtctttaattttagagcagcatcagtagcattatctgacatgtggtttcttacctgtcactcaaactattgtaatgaaatgtagtctgtttttcaagtatggtatctctcaaactattagcaaaagctttccacagggcagcagctctgtstcttgagactttttccagcatcctctgaaacaatagtgacaaactgtttcttggcacaattagatttatgtacttttttcagatgtactcataaaaaatgctattttcaaaaaacccacaatattagctttaatacttaaaaatgcacattgtattttactgtaatagaaacttctgattttagctagtgttctttaacatgaaaattacaagattccctttccaaaataatttttttttgtagtggttttgaaacctactgatcactcaggaagcttgattctatctcttccataagaa

SEQ ID NO: 71851 - DNA, 600 bp, Chicken  19866894351042_1
aaggcagcatagcccagactgcggcacatggtcagattggtgctgtgctgaccagcagtgtctcacccgaggcccctcacagctgcagacaggacacagctgtgtctgtgctcatgacacggctgccaatgactacaagggattgctatctagaagcaagaactgattttctcttctcctcccaaccctgacccaggagagttcctcttagggaaggactctcttcgacatgacagcacagtcttcttcaccccagatttggactgttttgtactgaggctgttctcatgcctgtcagarctgctactacygcacggcgtcagggcagctttgccccactcacaactttgtaccacagaccaccttgcaatcacattgcactgccaggttcttgtgtcccaccagagttactctcatctattattcactgaaatgcatggggcaatttgttaataaaacatcaggtggtttccagcagagattctcttcaaagcctacatgtttattctactctttaacttaggcagttttgtagagaggaccccaagaggcagaacttgaaaactaaccacagcacacamatagctttcagagttgcat

SEQ ID NO: 71852 - DNA, 600 bp, Chicken  19866894351042_2
gcccagactgcggcacatggtcagattggtgctgtgctgaccagcagtgtctcacccgaggcccctcacagctgcagacaggacacagctgtgtctgtgctcatgacacggctgccaatgactacaagggattgctatctagaagcaagaactgattttctcttctcctcccaaccctgacccaggagagttcctcttagggaaggactctcttcgacatgacagcacagtcttcttcaccccagatttggactgttttgtactgaggctgttctcatgcctgtcagarctgctactacygcacggcgtcagggcagctttgccccactcacaactttgtaccacagaccaccttgcaatcacattgcactgccaggttcttgtgtcccaccagagttactctcatctattattcactgaaatgcatggggcaatttgttaataaaacatcaggtggtttccagcagagattctcttcaaagcctacatgtttattctactctttaacttaggcagttttgtagagaggaccccaagaggcagaacttgaaaactaaccacagcacacamatagctttcagagttgcatatccagttgag

SEQ ID NO: 71853 - DNA, 600 bp, Chicken  19866894351042_3
gttctcatgcctgtcagarctgctactacygcacggcgtcagggcagctttgccccactcacaactttgtaccacagaccaccttgcaatcacattgcactgccaggttcttgtgtcccaccagagttactctcatctattattcactgaaatgcatggggcaatttgttaataaaacatcaggtggtttccagcagagattctcttcaaagcctacatgtttattctactctttaacttaggcagttttgtagagaggaccccaagaggcagaacttgaaaactaaccacagcacacamatagctttcagagttgcatatccagttgaggtctgattctgctcaacaacagcactttcagtacccaaaaggcggctgtaagaaagaagaggacagtttagmaggtctgccatggcagtgtaggaatggaatattgtttctgcattagatattgaaaagggggagctgatctgaagaagcagagcatagtgtatttgtattttgtaacttgtcygtagaaatagctgatgtgaaaaagtaaaaataccatatattttagtagcatattttagaaatatagttgctgaattatgtgattaa

SEQ ID NO: 71854 - DNA, 600 bp, Chicken  19866894351042_4
ccaggttcttgtgtcccaccagagttactctcatctattattcactgaaatgcatggggcaatttgttaataaaacatcaggtggtttccagcagagattctcttcaaagcctacatgtttattctactctttaacttaggcagttttgtagagaggaccccaagaggcagaacttgaaaactaaccacagcacacamatagctttcagagttgcatatccagttgaggtctgattctgctcaacaacagcactttcagtacccaaaaggcggctgtaagaaagaagaggacagtttagmaggtctgccatggcagtgtaggaatggaatattgtttctgcattagatattgaaaagggggagctgatctgaagaagcagagcatagtgtatttgtattttgtaacttgtcygtagaaatagctgatgtgaaaaagtaaaaataccatatattttagtagcatattttagaaatatagttgctgaattatgtgattaattcttgcttgcaaaactgcaatagtttttaaattttgtgaatagtatgggtatagtattgtggactagaaagcatgttgtaaggctattctgtatagataag

SEQ ID NO: 71855 - DNA, 600 bp, Chicken  19866894351042_5
tacatgtttattctactctttaacttaggcagttttgtagagaggaccccaagaggcagaacttgaaaactaaccacagcacacamatagctttcagagttgcatatccagttgaggtctgattctgctcaacaacagcactttcagtacccaaaaggcggctgtaagaaagaagaggacagtttagmaggtctgccatggcagtgtaggaatggaatattgtttctgcattagatattgaaaagggggagctgatctgaagaagcagagcatagtgtatttgtattttgtaacttgtcygtagaaatagctgatgtgaaaaagtaaaaataccatatattttagtagcatattttagaaatatagttgctgaattatgtgattaattcttgcttgcaaaactgcaatagtttttaaattttgtgaatagtatgggtatagtattgtggactagaaagcatgttgtaaggctattctgtatagataagagaccctcagcagaagaaaaacagacttaacaaccatcaaagcagccagggcctcaacacaaggccagacagtatcactctgtgggtaggctgggatgcaacaggcaggcat

SEQ ID NO: 71856 - DNA, 600 bp, Chicken  19866894351045_1
tttacaatattaaagtgctattttatgtgacaaggagcaggaacggcagtagacaagatctcccatttatttcctagactaaatttgagaatgtatagcagaaatgcaaaatctctcagagaattgtggaaaaacctgtcattcctgacagagaaacaagcagtatgttttcttcaacaatgtacccatcttcagctggatcccatgtgtcattgtcctttaacgaccaattcttctaaagctcttcaatacaattatctaatcctgtatgctattatatagcttagtaccaatgtgtcratttttagattaacatcgaacgtatatatattttttctgctttctcagcatatttaaatatctacaagctgcaaaacctttctcctacagccatcgtaaagaaagcagaaagatgatatgcagcttaaagggcataatgaagcatgtactcctctgaaaagtagttccaaccccaaaactcctaggaacaaccaggattgtgggaatatttttgctcaaaatactaaattattttatttcattagcatcaggaagataaaagagatgaaaagctatatagtaatggtttataatatcagt

SEQ ID NO: 71857 - DNA, 600 bp, Chicken  19866894351045_2
acatcgaacgtatatatattttttctgctttctcagcatatttaaatatctacaagctgcaaaacctttctcctacagccatcgtaaagaaagcagaaagatgatatgcagcttaaagggcataatgaagcatgtactcctctgaaaagtagttccaaccccaaaactcctaggaacaaccaggattgtgggaatatttttgctcaaaatactaaattattttatttcattagcatcaggaagataaaagagatgaaaagctatatagtaatggtttataatatcagtaacaactccagraaaaaataraagatatcctctgaaatagtacactcgactattaaaagtgccatttcatgggaytgtgttatcactggataggctgaacaacagtgtttagtctatgatatttctagtataaataaaatctgtaataaaaatctttattggtctcaaattcattaaactttttgcaaccaaccagtgattttatgttaaaattgtccactacgatgcagttattagaaaatgtgatgaacattactggtagttatggtacctgatgttggacaatactttgaaagaagatggaagtttaga

SEQ ID NO: 71858 - DNA, 600 bp, Chicken  19866894351045_3
gtatatatattttttctgctttctcagcatatttaaatatctacaagctgcaaaacctttctcctacagccatcgtaaagaaagcagaaagatgatatgcagcttaaagggcataatgaagcatgtactcctctgaaaagtagttccaaccccaaaactcctaggaacaaccaggattgtgggaatatttttgctcaaaatactaaattattttatttcattagcatcaggaagataaaagagatgaaaagctatatagtaatggtttataatatcagtaacaactccagraaaaaataraagatatcctctgaaatagtacactcgactattaaaagtgccatttcatgggaytgtgttatcactggataggctgaacaacagtgtttagtctatgatatttctagtataaataaaatctgtaataaaaatctttattggtctcaaattcattaaactttttgcaaccaaccagtgattttatgttaaaattgtccactacgatgcagttattagaaaatgtgatgaacattactggtagttatggtacctgatgttggacaatactttgaaagaagatggaagtttagaaaacaaagc

SEQ ID NO: 71859 - DNA, 600 bp, Chicken  19866894351045_4
acctttctcctacagccatcgtaaagaaagcagaaagatgatatgcagcttaaagggcataatgaagcatgtactcctctgaaaagtagttccaaccccaaaactcctaggaacaaccaggattgtgggaatatttttgctcaaaatactaaattattttatttcattagcatcaggaagataaaagagatgaaaagctatatagtaatggtttataatatcagtaacaactccagraaaaaataraagatatcctctgaaatagtacactcgactattaaaagtgccatttcatgggaytgtgttatcactggataggctgaacaacagtgtttagtctatgatatttctagtataaataaaatctgtaataaaaatctttattggtctcaaattcattaaactttttgcaaccaaccagtgattttatgttaaaattgtccactacgatgcagttattagaaaatgtgatgaacattactggtagttatggtacctgatgttggacaatactttgaaagaagatggaagtttagaaaacaaagccgttctcccasgtgatgactgcagatgagaactgcatacaattatgtacacaca

SEQ ID NO: 71860 - DNA, 596 bp, Chicken  19866894351045_5
tgaaatagtacactcgactattaaaagtgccatttcatgggaytgtgttatcactggataggctgaacaacagtgtttagtctatgatatttctagtataaataaaatctgtaataaaaatctttattggtctcaaattcattaaactttttgcaaccaaccagtgattttatgttaaaattgtccactacgatgcagttattagaaaatgtgatgaacattactggtagttatggtacctgatgttggacaatactttgaaagaagatggaagtttagaaaacaaagccgttctcccasgtgatgactgcagatgagaactgcatacaattatgtacacacatataaagttgggaatttttttggatttttttgttgaacttgatttctatccggtctctactcatcactgcatcaagcaagaaattactggcattcattcgataatgaaaataattattcaggagattaaataaacaccaccagcctcaaaggtataaaaaggattcaggcttaaatgaaaaataactgaatttgtatgatgtgaattcaactgcatctcacagaaattctagtcaatctcatttctcagaaag

SEQ ID NO: 71861 - DNA, 600 bp, Chicken  19866894351047_1
aaactgcggcacttctggggttctttttgctcttcttcacgtccacctacgtgtatttcttcatcttctcaaatagcgctgtcagttttaaaatgaggtttccataggtggctgtaaaccagcattctttcttttttcttttcagtagaacaagtaaaactctcaccatgctgtcctgattagacctgactctgaagtcctcgcttttaattccacggtctattgccacagtgtatttatagaaaatggtatatctgtacagaccctatatttagaaataccatatggtggacaaatgarggatcaaaaagggaaagractgggggctgtcccttttatgtagccatagatgtttggaaaggtggttaggcttcagcctcaccaggtgcatgttttaaagagtaaaggccccattggcaaatgagctgaagggaagcaggtggygtgcgactctttgatggctcctttagacctcatttcagaaagtgagggacctgtaagggccagcatgaaacatacccaaaagagatttgaaagyttatctgaacttaattaatttctgagcacagtggcccttggtaggttgtattgtgtggcatt

SEQ ID NO: 71862 - DNA, 600 bp, Chicken  19866894351047_2
ggttctttttgctcttcttcacgtccacctacgtgtatttcttcatcttctcaaatagcgctgtcagttttaaaatgaggtttccataggtggctgtaaaccagcattctttcttttttcttttcagtagaacaagtaaaactctcaccatgctgtcctgattagacctgactctgaagtcctcgcttttaattccacggtctattgccacagtgtatttatagaaaatggtatatctgtacagaccctatatttagaaataccatatggtggacaaatgarggatcaaaaagggaaagractgggggctgtcccttttatgtagccatagatgtttggaaaggtggttaggcttcagcctcaccaggtgcatgttttaaagagtaaaggccccattggcaaatgagctgaagggaagcaggtggygtgcgactctttgatggctcctttagacctcatttcagaaagtgagggacctgtaagggccagcatgaaacatacccaaaagagatttgaaagyttatctgaacttaattaatttctgagcacagtggcccttggtaggttgtattgtgtggcattaaagagtgggagcatatt

SEQ ID NO: 71863 - DNA, 600 bp, Chicken  19866894351047_3
gtagaacaagtaaaactctcaccatgctgtcctgattagacctgactctgaagtcctcgcttttaattccacggtctattgccacagtgtatttatagaaaatggtatatctgtacagaccctatatttagaaataccatatggtggacaaatgarggatcaaaaagggaaagractgggggctgtcccttttatgtagccatagatgtttggaaaggtggttaggcttcagcctcaccaggtgcatgttttaaagagtaaaggccccattggcaaatgagctgaagggaagcaggtggygtgcgactctttgatggctcctttagacctcatttcagaaagtgagggacctgtaagggccagcatgaaacatacccaaaagagatttgaaagyttatctgaacttaattaatttctgagcacagtggcccttggtaggttgtattgtgtggcattaaagagtgggagcatattttacacttttatattaacttcttaaaaaacatcttaacgcacactttcatcaaagccataaggtttatttctwgcgatgtgtagattaaccatctgcctcagtgctttgaggtctgcagtactgga

SEQ ID NO: 71864 - DNA, 600 bp, Chicken  19866894351047_4
atagaaaatggtatatctgtacagaccctatatttagaaataccatatggtggacaaatgarggatcaaaaagggaaagractgggggctgtcccttttatgtagccatagatgtttggaaaggtggttaggcttcagcctcaccaggtgcatgttttaaagagtaaaggccccattggcaaatgagctgaagggaagcaggtggygtgcgactctttgatggctcctttagacctcatttcagaaagtgagggacctgtaagggccagcatgaaacatacccaaaagagatttgaaagyttatctgaacttaattaatttctgagcacagtggcccttggtaggttgtattgtgtggcattaaagagtgggagcatattttacacttttatattaacttcttaaaaaacatcttaacgcacactttcatcaaagccataaggtttatttctwgcgatgtgtagattaaccatctgcctcagtgctttgaggtctgcagtactggaataaggatgaccaagcataagttccatgattgctatttcactagccaggtgcggtgtgatccagggggtgagcagcaagtttacagattagctt

SEQ ID NO: 71865 - DNA, 600 bp, Chicken  19866894351047_5
gttttaaagagtaaaggccccattggcaaatgagctgaagggaagcaggtggygtgcgactctttgatggctcctttagacctcatttcagaaagtgagggacctgtaagggccagcatgaaacatacccaaaagagatttgaaagyttatctgaacttaattaatttctgagcacagtggcccttggtaggttgtattgtgtggcattaaagagtgggagcatattttacacttttatattaacttcttaaaaaacatcttaacgcacactttcatcaaagccataaggtttatttctwgcgatgtgtagattaaccatctgcctcagtgctttgaggtctgcagtactggaataaggatgaccaagcataagttccatgattgctatttcactagccaggtgcggtgtgatccagggggtgagcagcaagtttacagattagctttgcagttcatcatgaagtattttggcaagctttaagggcacacctgttagtccttaaaaatgtaatgaaaccttagcctcttgaggtagcatgttattacctttagaatggcctgtgggttaagtagatgaagcattggtgtgtgtgtaatat

SEQ ID NO: 71866 - DNA, 600 bp, Chicken  19866894351048_1
agcagcacccggcgggcacggcagccccggggccgcccggcccttcccggcagccacgtgcccgtaccgcgcgccgccggtgctgccggatcgtagcgccgggaggggctcagcgctgaaacgtcgggatgcggacggggcgttttttaaacgggacttccgttaccaaatgtaaaaagtgagagcggaggccgcgacccttccggggagcgcgttccaaggccggtgattcatgcttacgggttcaaactgagacgtgggtctgaaggacagttacgttgctaagcgaatgagaagcckgggtgaggctccaggcagcggtgaaaggacatctcagtgggggcgctggatgggaggctcatttgagctgatagaagccggmagataacagtttgctgctgttgtccaagaagcggattcatccccgcgtgcattgagtggatcatcgcacgcctggggcagacgctgcttgttgatggcagcawtgcacaagcccggctgtgcggtgctttcccacaggtcgatcacacagagccacccttctgcacagcacttacagaactgcagccagcagtgttccacgccagacccagacagttg

SEQ ID NO: 71867 - DNA, 600 bp, Chicken  19866894351048_2
ctgccggatcgtagcgccgggaggggctcagcgctgaaacgtcgggatgcggacggggcgttttttaaacgggacttccgttaccaaatgtaaaaagtgagagcggaggccgcgacccttccggggagcgcgttccaaggccggtgattcatgcttacgggttcaaactgagacgtgggtctgaaggacagttacgttgctaagcgaatgagaagcckgggtgaggctccaggcagcggtgaaaggacatctcagtgggggcgctggatgggaggctcatttgagctgatagaagccggmagataacagtttgctgctgttgtccaagaagcggattcatccccgcgtgcattgagtggatcatcgcacgcctggggcagacgctgcttgttgatggcagcawtgcacaagcccggctgtgcggtgctttcccacaggtcgatcacacagagccacccttctgcacagcacttacagaactgcagccagcagtgttccacgccagacccagacagttggtctgtagctttcatgcaattacagtcgtgctgatgctgctgccactactatgcctgctcacgggagaggtcttcacccagg

SEQ ID NO: 71868 - DNA, 600 bp, Chicken  19866894351048_3
cggaggccgcgacccttccggggagcgcgttccaaggccggtgattcatgcttacgggttcaaactgagacgtgggtctgaaggacagttacgttgctaagcgaatgagaagcckgggtgaggctccaggcagcggtgaaaggacatctcagtgggggcgctggatgggaggctcatttgagctgatagaagccggmagataacagtttgctgctgttgtccaagaagcggattcatccccgcgtgcattgagtggatcatcgcacgcctggggcagacgctgcttgttgatggcagcawtgcacaagcccggctgtgcggtgctttcccacaggtcgatcacacagagccacccttctgcacagcacttacagaactgcagccagcagtgttccacgccagacccagacagttggtctgtagctttcatgcaattacagtcgtgctgatgctgctgccactactatgcctgctcacgggagaggtcttcacccaggcagggctcttcttgccctgtgggtgtgaatcttagctttacatcgaaggtagttaagccaaggatacacaaacctgggggttttcttcccaagttgtgtcacc

SEQ ID NO: 71869 - DNA, 599 bp, Chicken  19866894351049_1
  misc_feature (1)..(137): n is any nucleotide
nnnnnnnnnnnnnnnnnnnnnnnnnnnnnnnnnnnnnnnnnnnnnnnnnnnnnnnnnnnnnnnnnnnnnnnnnnnnnnnnnnnnnnnnnnnnnnnnnnnnnnnnnnnnnnnnnnnnnnnnnnnnnnnnnnnnnnnnncttgaagcccgagctgggcaggacgatgggagggtggttgtcgaaggactccagcactgcatctgcagggcagaggtagggggatggcagggcaggcaggtcctgccccccaagccccactgtgcctccaagcagcatcacttgggcacacgggaagggcccyacagcytctgagcacacttgcatccttcacatcccaaygccatagaactatggttacccctgatgaccgcagttacctacaagacccccatggtttgaagggcactgcccattcagttgatccrtaaaaccttatgggtgacagcagcatgcagggctgggggctcaccaggctggaaggcggccgtgctctcctcatcccagggctgccatgctgccacrctgcccacctccatggctgcctggcagtggctcagcacccggtgcagctgcgcagggctcagcgctgggaactcagct

SEQ ID NO: 71870 - DNA, 599 bp, Chicken  19866894351049_2
  misc_feature (1)..(131): n is any nucleotide
nnnnnnnnnnnnnnnnnnnnnnnnnnnnnnnnnnnnnnnnnnnnnnnnnnnnnnnnnnnnnnnnnnnnnnnnnnnnnnnnnnnnnnnnnnnnnnnnnnnnnnnnnnnnnnnnnnnnnnnnnnnnnnnnnnncttgaagcccgagctgggcaggacgatgggagggtggttgtcgaaggactccagcactgcatctgcagggcagaggtagggggatggcagggcaggcaggtcctgccccccaagccccactgtgcctccaagcagcatcacttgggcacacgggaagggcccyacagcytctgagcacacttgcatccttcacatcccaaygccatagaactatggttacccctgatgaccgcagttacctacaagacccccatggtttgaagggcactgcccattcagttgatccrtaaaaccttatgggtgacagcagcatgcagggctgggggctcaccaggctggaaggcggccgtgctctcctcatcccagggctgccatgctgccacrctgcccacctccatggctgcctggcagtggctcagcacccggtgcagctgcgcagggctcagcgctgggaactcagctctcagg

SEQ ID NO: 71871 - DNA, 599 bp, Chicken  19866894351049_3
  misc_feature (1)..(99): n is any nucleotide
nnnnnnnnnnnnnnnnnnnnnnnnnnnnnnnnnnnnnnnnnnnnnnnnnnnnnnnnnnnnnnnnnnnnnnnnnnnnnnnnnnnnnnnnnnnnnnnnnnncttgaagcccgagctgggcaggacgatgggagggtggttgtcgaaggactccagcactgcatctgcagggcagaggtagggggatggcagggcaggcaggtcctgccccccaagccccactgtgcctccaagcagcatcacttgggcacacgggaagggcccyacagcytctgagcacacttgcatccttcacatcccaaygccatagaactatggttacccctgatgaccgcagttacctacaagacccccatggtttgaagggcactgcccattcagttgatccrtaaaaccttatgggtgacagcagcatgcagggctgggggctcaccaggctggaaggcggccgtgctctcctcatcccagggctgccatgctgccacrctgcccacctccatggctgcctggcagtggctcagcacccggtgcagctgcgcagggctcagcgctgggaactcagctctcagggatggccacgtcatctgggcaaagggacagtg

SEQ ID NO: 71872 - DNA, 599 bp, Chicken  19866894351049_4
  misc_feature (1)..(13): n is any nucleotide
nnnnnnnnnnnnncttgaagcccgagctgggcaggacgatgggagggtggttgtcgaaggactccagcactgcatctgcagggcagaggtagggggatggcagggcaggcaggtcctgccccccaagccccactgtgcctccaagcagcatcacttgggcacacgggaagggcccyacagcytctgagcacacttgcatccttcacatcccaaygccatagaactatggttacccctgatgaccgcagttacctacaagacccccatggtttgaagggcactgcccattcagttgatccrtaaaaccttatgggtgacagcagcatgcagggctgggggctcaccaggctggaaggcggccgtgctctcctcatcccagggctgccatgctgccacrctgcccacctccatggctgcctggcagtggctcagcacccggtgcagctgcgcagggctcagcgctgggaactcagctctcagggatggccacgtcatctgggcaaagggacagtgcagggggtgaacacmatcccatcacccccatcccaaacccaacgcagccagcacctcacctgcagcagctgggagccgggcatggc

SEQ ID NO: 71873 - DNA, 600 bp, Chicken  19866894351049_5
tggcagggcaggcaggtcctgccccccaagccccactgtgcctccaagcagcatcacttgggcacacgggaagggcccyacagcytctgagcacacttgcatccttcacatcccaaygccatagaactatggttacccctgatgaccgcagttacctacaagacccccatggtttgaagggcactgcccattcagttgatccrtaaaaccttatgggtgacagcagcatgcagggctgggggctcaccaggctggaaggcggccgtgctctcctcatcccagggctgccatgctgccacrctgcccacctccatggctgcctggcagtggctcagcacccggtgcagctgcgcagggctcagcgctgggaactcagctctcagggatggccacgtcatctgggcaaagggacagtgcagggggtgaacacmatcccatcacccccatcccaaacccaacgcagccagcacctcacctgcagcagctgggagccgggcatggccagcaggttggccacgctggccagcttagcgaagaactgctgggagagctgctcaaagccggctccacgcagccactccagcagcagccgcacgctgg

SEQ ID NO: 71874 - DNA, 540 bp, Chicken  19866894351049_6
gttacccctgatgaccgcagttacctacaagacccccatggtttgaagggcactgcccattcagttgatccrtaaaaccttatgggtgacagcagcatgcagggctgggggctcaccaggctggaaggcggccgtgctctcctcatcccagggctgccatgctgccacrctgcccacctccatggctgcctggcagtggctcagcacccggtgcagctgcgcagggctcagcgctgggaactcagctctcagggatggccacgtcatctgggcaaagggacagtgcagggggtgaacacmatcccatcacccccatcccaaacccaacgcagccagcacctcacctgcagcagctgggagccgggcatggccagcaggttggccacgctggccagcttagcgaagaactgctgggagagctgctcaaagccggctccacgcagccactccagcagcagccgcacgctggctcgcagcttcacgccctgcgaccaatggaagcagccaagagaggagcctgcggggcacaacacgggttgg

SEQ ID NO: 71875 - DNA, 600 bp, Chicken  19866894351055_1
gtatttatttatactaacttaactgttgagtctgtggatttggggtttataaaagagaaagagatgatgaaatttctcttctgagtaaaagtatcaagtacacaattgcaaggatggctccaaggaaattgtcactgcttctgggagtggaagaatatttagttggatgaatgaaatgaataagttcatatatttgaggttgaaaagcatactagtcttgaactcagtaataattaaagctaaaataaattaactattcaatgtttaatttactgtttacatagtagaagatgcaatcaraagtaatttgaagtaccaccacctcaagagattttctaataaacattaaaaggcttagaaaatgtatatcagaaaagaatatctttaacaccaagatgagcattagaacccaaattaaaaaaaaaaaaaataaataaaagaaaaaagcattaggtagcaaatattttcatgaatgatatatgaaaacaaaaataaaggtcgcaactaggggatgcagagaatgaactggagctgttacacattcaataagtcaccagctagagaaacctacattaagcattttccagaaagaacagaaat

SEQ ID NO: 71876 - DNA, 600 bp, Chicken  19866894351062_1
ttgctctcttgggggggcccttccctgttaaaccactgctgtttccagcacaccaagttcttttcacaactacttatcccttttttccccttctttttctgttgcagtcttcttgattgctttctccccaactgttccttaaatgctccttgcatttgtgctttcagagtgtgcagaaatggtccaatctactccaatttggactcaggtttgcatttctagaaaatgccctgggtgttctgggttattttatatttacagaggcttctagctgatggtgtttcaggccagggatggggytgacagccctgaggtaccgtggatgtgaggtccaggaagatgtgaagatgccattctccttcattatctgttgacatgactaggttaatatgggctctatgatccaagaagcacaacagccaattggaaagcattcagagaagtgccactggacaggtctgagctgtagcagacttgctttcctctacaggttttcagtgcactgggggaactgtggactgctttgatgcctccatccagcacctggaagtgtttctggcccagcagcaccagggagatctttatgtaacatcttgcttt

SEQ ID NO: 71877 - DNA, 600 bp, Chicken  19866894351063_1
cagcaccacacaacacgaaacttcagcacacaaatgcccagcactccaccagcaccatattttccagtagccaacaagcatgatgtatcacaacagctcctctgcccctgaactgcttgaaaaacacaagtccacacagaataaaagcccaagttatggaggagggaaagaaatccacaacgtactgcgtgcttttctggctgtccacctgacttctgacagcagctgggcacagggagggctcctcgggcagaagggatgaggggcaggctgctcgctgggctctccccagactcacaygtctccaacacagccctgggagggatgtttcctcccagagcagcccaggctgtgcccgggtatcccgtcgccacgtgttgctcgctccccagcaccgcgttctgcccctgcgcagagcccagaagatggcgccgggtcctcagtcatcgccgccctcagccgcggcctcccaccacggcgcggagggggcacctgcggggcgctgaggtaaaacacggcggaggaaacctccttgtccccggggcagcgttaaaacaaatcagctcctcgcaatgccggcgggggaacaggagccacgct

SEQ ID NO: 71878 - DNA, 600 bp, Chicken  19866894351072_1
aaatcaccttctgattcagactcagatacttccccctttcttattcctttcttaaaggaaatcagcatagtatctgtgagcagcgacagaacagatgatggcaaagctaacagatgtcaggtagctgaatcccaccagcgatcagatcataagatctgtactgagtctgcatcatgcgtggtgcagttggacgtgttcacataaacattactcagagtttgtaatcaaagcagagcacttcatgcaggaggcagcaggaagaataactactgagtcaaaggcagccagctttatagagcrcagcgcatttttaagtgcagtgctaatacagcttgattgagtccatgtgtacctacacaggcttacattagaaaccacttgagattaatatattgctgggagatgagatactctggtgaatcaggaactttgtcatttcatggactgataagcctggacaaaccaatagggttttccttcctcgctggctgtgttatagggtttcttctccaaaagggaagcagtaacagtgacgtctctgtgggcgtgcactgaaacagtggcagtcaggtggtggatctctggaccgtgggcttaggg

SEQ ID NO: 71879 - DNA, 600 bp, Chicken  19866894351080_1
ttccccctctgataaatgaggacggaggacatggcttcctcagccatggaaagagctgagttgctcagtgagtactttgccttggtcttcactggtggtcaggctcctccccatgtctgccaggaccatgagcctctaagtgtgagtgagaggagcagattccatcccactgtaactgtggaagaagtctgagacctcctcatgaaaccaagtatatataagtccatgggtgatatgcatctcaggggcctcttcaacatattcatcagtgacatagatgatggcatcgagtgcaccccyggcaagtttgcagatgacaccaagctgagcggtgtggttgatacggagggaagggaagccatccagagggacctggacaggctggagaagtgggcccatgtgaaactagtgaggttcaataaggccaagtgcaaggtgttgcacttgggttggggcagtcccgagtatctatacagactgggtgaacatctccttgagagcagccctgcagagaaggacttgggggtcctggtggacgagaagctggacatgaaccagcagtgtgcgcttgcagcccggaaggccaactgtgttctgggc

SEQ ID NO: 71880 - DNA, 600 bp, Chicken  19866894351080_2
gagaagtgggcccatgtgaaactagtgaggttcaataaggccaagtgcaaggtgttgcacttgggttggggcagtcccgagtatctatacagactgggtgaacatctccttgagagcagccctgcagagaaggacttgggggtcctggtggacgagaagctggacatgaaccagcagtgtgcgcttgcagcccggaaggccaactgtgttctgggctgcatgaaaaaaggggcggccagcagggagagggagttgattgtcccccctctactcagctcttgtgaggccccatctggagtrctgcatgtaggccaggggctccctcttggagcgggtccagaggatggccaccaagattatcagagggctggtgacctcttctatgaggaaacaytgagggaatggggcttgtttagcttggcgaagagaaggctctggggagacctcattgtggccttcctgtacttgaagggagcttataaacaggaggggraacgactgtttacgagggtggagagtgataggacaagggggaatggtcttaaactaagacgggaggtttatgctaggtattagaaggaagttttttcacccagagag

SEQ ID NO: 71881 - DNA, 587 bp, Chicken  19866894351080_3
tgggtgaacatctccttgagagcagccctgcagagaaggacttgggggtcctggtggacgagaagctggacatgaaccagcagtgtgcgcttgcagcccggaaggccaactgtgttctgggctgcatgaaaaaaggggcggccagcagggagagggagttgattgtcccccctctactcagctcttgtgaggccccatctggagtrctgcatgtaggccaggggctccctcttggagcgggtccagaggatggccaccaagattatcagagggctggtgacctcttctatgaggaaacaytgagggaatggggcttgtttagcttggcgaagagaaggctctggggagacctcattgtggccttcctgtacttgaagggagcttataaacaggaggggraacgactgtttacgagggtggagagtgataggacaagggggaatggtcttaaactaagacgggaggtttatgctaggtattagaaggaagttttttcacccagagagtggtgatgcactggagcaggttgcccaaggacgttgtggatgccccatccatggaggcattcaaggccagcctggatgtgg

SEQ ID NO: 71882 - DNA, 488 bp, Chicken  19866894351080_4
ggaaggccaactgtgttctgggctgcatgaaaaaaggggcggccagcagggagagggagttgattgtcccccctctactcagctcttgtgaggccccatctggagtrctgcatgtaggccaggggctccctcttggagcgggtccagaggatggccaccaagattatcagagggctggtgacctcttctatgaggaaacaytgagggaatggggcttgtttagcttggcgaagagaaggctctggggagacctcattgtggccttcctgtacttgaagggagcttataaacaggaggggraacgactgtttacgagggtggagagtgataggacaagggggaatggtcttaaactaagacgggaggtttatgctaggtattagaaggaagttttttcacccagagagtggtgatgcactggagcaggttgcccaaggacgttgtggatgccccatccatggaggcattcaaggccagcctggatgtgg

SEQ ID NO: 71883 - DNA, 600 bp, Chicken  19866894351082_1
aacgtgctgcagatgctttctaaactgcatcaaacaggatgtagaaaatttgctatttaatacagattcaaaagcaaattccttataaccaccacaggaaccatggcagtttgctaaatactgtgaattgatgctgtgctttttaagtgctacttgctgacttatgcatgctgttgcctacgtagtgcagacttgcttacagcttagatatgcagaggcagcaaagacagttgaccataccttgttcttggggaaataattactatatcctgccaatttcttagatagatgtagaatcarttttagttcctacacagcagaaagacgcttttacatatattaaatgttttactctagaagctttgctataaaattcaggcattttgcacaaaagaattatatgaatagaattaaatggaggtgtctgtgtcagtatttgatgctttcttcaactgagaactacctgaatctgtatttgatcagaactgttttctgacctctaaattcagtgttactcaaaattgagcagtagttgtcttgttccttctgacttcaaggtaatagcaactgtttttagtctatgacatctatttgtctgag

SEQ ID NO: 71884 - DNA, 528 bp, Chicken  19866894351083_1
tttgcctagctagccagtagtccagtgtttattgaatctgtttctaacctagacttctcctctcatctgaaatgttcagtgaggaatcttataaaagctcagttccttcttttatttttttaaactgtttactagattgcagttattggattcaagttcacagtggcactttgaggaagtgaatttgggttccacccaaatcttgagtgactgtcaaataatgtgaatatccattcttgttacgtttgccatgctgaggtgccagagttatcctttgagaattctaggtcgcatcagaasctaaatatgaaatgagttgatattctttattgctaaaatcaaaataagctatggtttcacaaaattgcttacaggcagtttgttatattgcctctctcaacactggcaaaagttacaggrtcaacacatttcaaaagtttyacctgtcaggataagtgaattccaaagtgacattttctaagcatctctttcatccttcagttcatttatgtagttatatttagttgt

SEQ ID NO: 71885 - DNA, 408 bp, Chicken  19866894351083_2
taaactgtttactagattgcagttattggattcaagttcacagtggcactttgaggaagtgaatttgggttccacccaaatcttgagtgactgtcaaataatgtgaatatccattcttgttacgtttgccatgctgaggtgccagagttatcctttgagaattctaggtcgcatcagaasctaaatatgaaatgagttgatattctttattgctaaaatcaaaataagctatggtttcacaaaattgcttacaggcagtttgttatattgcctctctcaacactggcaaaagttacaggrtcaacacatttcaaaagtttyacctgtcaggataagtgaattccaaagtgacattttctaagcatctctttcatccttcagttcatttatgtagttatatttagttgt

SEQ ID NO: 71886 - DNA, 387 bp, Chicken  19866894351083_3
gttattggattcaagttcacagtggcactttgaggaagtgaatttgggttccacccaaatcttgagtgactgtcaaataatgtgaatatccattcttgttacgtttgccatgctgaggtgccagagttatcctttgagaattctaggtcgcatcagaasctaaatatgaaatgagttgatattctttattgctaaaatcaaaataagctatggtttcacaaaattgcttacaggcagtttgttatattgcctctctcaacactggcaaaagttacaggrtcaacacatttcaaaagtttyacctgtcaggataagtgaattccaaagtgacattttctaagcatctctttcatccttcagttcatttatgtagttatatttagttgt

SEQ ID NO: 71887 - DNA, 600 bp, Chicken  19866894351085_1
cagactgttaaaacatttgttctaagaatgcaacattttcttcttcaaaaatatttttaaagaaaattcaaggtttatatagaatgttcagatgctaagtaagttgttcttatatagtccagcctaatgtatttatttcatgcttgcatttctcacttgctattaatcaatctgaattaagtacattctaccgtgccagtatactacacatgattcctggcattgatcgattcactatacacttgagtactgttttaaaacttgatctggaagatataaatggtaattcccctagggagscaagagtcaagatctctcaaaagtacaacatttagtgataaattagattgtttaattttaaacatgagtacaggttagttgtaatcccaataaatcatccaccaatatctacactgggtagaattttaattcacccttgcaaggaaaagccctaacctgtaatttgcttttattgaacggataatggaaagatcaaatgataaggttgaagagagaatactcagatgttaagaaaagaagatctgtccatagcaatattattattattgtaaaagacataagaacatactaggcatacaa

SEQ ID NO: 71888 - DNA, 600 bp, Chicken  19866894351097_1
ttcaggtttgcagattctccaatttgcatctcctttgagcacagaaatctcaggggatgatctcagtggaaggcatcagtgtggaagtgacagaagaatcagttggattttcatgactgtcatgtttggattcatggcagcaagtacactgagggttgggatacctacaatagccaactggaaaagctaagacagagatatgtatgaaactctgagtcctcttggtctctgtgtttctgcgatggaagggactccctgcatccagtgttatttcggtgcctattcctgctctagatagarttgggtacctcagttcctcaaggctgatcttgcatgatcctgccagcaagcagttgagaagagatggcaaaatatctctttcacagcactgaaaatgtcttataactcaaatagcctttcttcatcccatttttgagctttggttctgatagaataaaggagaggcatgttcttctctccagtgttctcacacacagtttggcaatgcaaggccatgcctgtctttgaacacagtgaatgaacctggacttgggcataggctcacatcaaagatcatctgaaagcacacacatctccact

SEQ ID NO: 71889 - DNA, 600 bp, Chicken  19866894351097_2
ctcaaatagcctttcttcatcccatttttgagctttggttctgatagaataaaggagaggcatgttcttctctccagtgttctcacacacagtttggcaatgcaaggccatgcctgtctttgaacacagtgaatgaacctggacttgggcataggctcacatcaaagatcatctgaaagcacacacatctccactgttgcatgcaaaagatcattcagccttgaataaagggaggaaaattaatataactaatgaaacaagtcaagaaaatggaaaatcctaacccaccgtaccaaagarcagtaatgcaatgagactgataaatcagtggcaatacattattgctgcagctgcaggagatataaagattttcartcttgtctctcctacttgtgacacttgagaagattttttgaagttaactgtcagaagcagctgcactctgcaagggaggttctgcaataaatgactttctggtaaaggaaatagtgcatatatctgttgtttaaaggaaaagggatcataaagctcaaggaacctttgaaactaagtttcattttatatagtctgttttttaaggtttttttaatttatatttgt

SEQ ID NO: 71890 - DNA, 600 bp, Chicken  19866894351097_3
agtgttctcacacacagtttggcaatgcaaggccatgcctgtctttgaacacagtgaatgaacctggacttgggcataggctcacatcaaagatcatctgaaagcacacacatctccactgttgcatgcaaaagatcattcagccttgaataaagggaggaaaattaatataactaatgaaacaagtcaagaaaatggaaaatcctaacccaccgtaccaaagarcagtaatgcaatgagactgataaatcagtggcaatacattattgctgcagctgcaggagatataaagattttcartcttgtctctcctacttgtgacacttgagaagattttttgaagttaactgtcagaagcagctgcactctgcaagggaggttctgcaataaatgactttctggtaaaggaaatagtgcatatatctgttgtttaaaggaaaagggatcataaagctcaaggaacctttgaaactaagtttcattttatatagtctgttttttaaggtttttttaatttatatttgtttcatcatattgtatcttgcactgatttgtatatatagaaaaactgaaagttgctctttgcaatacaagctcgtt

SEQ ID NO: 71891 - DNA, 600 bp, Chicken  19866894351097_4
tttttgaagttaactgtcagaagcagctgcactctgcaagggaggttctgcaataaatgactttctggtaaaggaaatagtgcatatatctgttgtttaaaggaaaagggatcataaagctcaaggaacctttgaaactaagtttcattttatatagtctgttttttaaggtttttttaatttatatttgtttcatcatattgtatcttgcactgatttgtatatatagaaaaactgaaagttgctctttgcaatacaagctcgttaaactggtttgctttacagagcttaatgacagarctgcagtgataaatcatagctacagagcagaaacatttctgactttgctaaagaaacagatatttcttcagctgatgtttggtgagaaatactgggttcttgagacagaaagaaaagtatagaatagatggcacttgcactgacagtcacaagttgacctaaacaacagaatgaattttgagcctgtatgaccagagacaagaataatatacctgaacataagataaatgctttgatgtagttgtaagaaaattatttaaagacagcatgcctgggaaccaggtgctgtagtatgctcta

SEQ ID NO: 71892 - DNA, 600 bp, Chicken  19866894351099_1
atttggagtgcctcctttttcttaaagaaacttacctactttagcaagaccgagttgaagctcttgctgtgcagaatttgcttcttacaccctactggtgtaataaactgaataacctattgttttcagatcttcaaatccatatagtcagtaagataggaagctttttactgcatgggtatgtaattgtgatgattttattttggttaggaaaactctggtgtgcaaagaagaacaaaaagaaacggaagaaggttttatacaatgcaaataaaaatgatggtaagtaacatcctgtaygtactgtgcatttataaataactatagaagatttaacaaatgctcttgtataaagagtagaaacacttagaactgttttgggttactaggcaagtcataatatttgaggttgtagaggggagcttcctggaactttgcactgtaggacaagtgacacattcaacgagtaataatatgttgacctttttactgtttttctttcaagattacgataatgaagaaattttaacttatgaggaaatgtcactgtatcatcaaccagcgaatagaaaacgacctattgttctcattggcccacag

SEQ ID NO: 71893 - DNA, 600 bp, Chicken  19866894351103_1
tactcagaaggagattgatgatgtttgtggagcattctctaagggtgccaaagaggtgtttgttcctgaggcttaagaattatttttgtggaaggcttttatcattaaagttgatgatgtgcctacaaccaagaaaataaaagagcaatgcttgcaaccgcagagtgatttgtattcttttgcatgacaaaaactttcatcatccatccctttgacagttatgatttgttaaaattttctgcagggtgtttggaacaaaaatttgaatttattgttatgtgatttgcatttttgcttccwctatgtatgagaattctctagcatttagcagatctagctcayagttcaggtctaatttacatacagtggagacctcttaaacatgtagcctttgtgtataataaattcattcattgaaagagactgatatgttttatgaggtgttaattaaagttggtctcaacataagataactgccaaaaactgatatgcggtagttctattaattaacagcttaatttagagttacatatcacagtattacaattttctatttcctggacaattttggggaaattataaaacgtgaatgaccacata

SEQ ID NO: 71894 - DNA, 600 bp, Chicken  19866894351103_2
gggtgccaaagaggtgtttgttcctgaggcttaagaattatttttgtggaaggcttttatcattaaagttgatgatgtgcctacaaccaagaaaataaaagagcaatgcttgcaaccgcagagtgatttgtattcttttgcatgacaaaaactttcatcatccatccctttgacagttatgatttgttaaaattttctgcagggtgtttggaacaaaaatttgaatttattgttatgtgatttgcatttttgcttccwctatgtatgagaattctctagcatttagcagatctagctcayagttcaggtctaatttacatacagtggagacctcttaaacatgtagcctttgtgtataataaattcattcattgaaagagactgatatgttttatgaggtgttaattaaagttggtctcaacataagataactgccaaaaactgatatgcggtagttctattaattaacagcttaatttagagttacatatcacagtattacaattttctatttcctggacaattttggggaaattataaaacgtgaatgaccacataaaattagacacctgtgcatgatacatagaagtaaatgttttg

SEQ ID NO: 71895 - DNA, 600 bp, Chicken  19866894351104_1
accattttaatacagaagtcacaggtggactataaatacagaaaagccaatgtgccatatttttatagtatccccattctgaataccttttaaacatgctatttgtttagagcaggtgtagaacctagactcacccacttttcctttgaacatctactatttttcaatgggtgaacctccgaaaacccaaatgtgtccaatacacaattcatctgaatgtgcacttgagttaactgaccccacaaaagccaactgtgttcattcagggtaggaattacccaatttgctcacataatctcrgcaattacatgttcatcttgtttaaatatcagacttacggtgtcatttgcgtagtatctgatctttctagttaacctcaaagatattaatctttattaaaggggcgagaggcaaagaggcaaagagatgctggtggcagatattttgacagctaggaaaagccatttataaagtgaacatcagtaaacactaggagtgacatgttgatatcagcagcaagtaaatggttgaccaagactggagaaggtatttacaccttgaatagtagcaaacatttttttttcctgaagttgatctttt

SEQ ID NO: 71896 - DNA, 600 bp, Chicken  19866894351105_1
agagtgtgcagtcctggtctgcgtttgacagtttgaggcataacactgtaggctgaatagatttgcattaatgacttcagaaatagattttgactgagatctgcaaatcttaattaacagccactggtgatgatttttttttattgaaacataatttagaagacatgatttaaagttattttaagctacgtagtaatgtatcacgtagggaaattgttcgcagcagcttctctgcctcagatgagattttatatggacaaccttggcttgaagtagctaatgagaggcattggtaataayrtggagcaatccattaagatatgtggaacttgctgcacagctgcagaggaggggagactgcccaagtacgtctatacaggyacatgcatgatagctgtgctcctcgtttttcttcaggcactcggtgagagttactgtgatacctccagaaccactgcgtgtagcaggaagaagctgtggttgtgttcagtgctcttctgttacctacttctgttttgcttgaaggtttgatgtatgctgtgaaagggattaggctattttcctatatcctgtaataggattgggattggtagtttcagt

SEQ ID NO: 71897 - DNA, 600 bp, Chicken  19866894351105_2
gagtgtgcagtcctggtctgcgtttgacagtttgaggcataacactgtaggctgaatagatttgcattaatgacttcagaaatagattttgactgagatctgcaaatcttaattaacagccactggtgatgatttttttttattgaaacataatttagaagacatgatttaaagttattttaagctacgtagtaatgtatcacgtagggaaattgttcgcagcagcttctctgcctcagatgagattttatatggacaaccttggcttgaagtagctaatgagaggcattggtaataayrtggagcaatccattaagatatgtggaacttgctgcacagctgcagaggaggggagactgcccaagtacgtctatacaggyacatgcatgatagctgtgctcctcgtttttcttcaggcactcggtgagagttactgtgatacctccagaaccactgcgtgtagcaggaagaagctgtggttgtgttcagtgctcttctgttacctacttctgttttgcttgaaggtttgatgtatgctgtgaaagggattaggctattttcctatatcctgtaataggattgggattggtagtttcagtc

SEQ ID NO: 71898 - DNA, 600 bp, Chicken  19866894351105_3
aatagattttgactgagatctgcaaatcttaattaacagccactggtgatgatttttttttattgaaacataatttagaagacatgatttaaagttattttaagctacgtagtaatgtatcacgtagggaaattgttcgcagcagcttctctgcctcagatgagattttatatggacaaccttggcttgaagtagctaatgagaggcattggtaataayrtggagcaatccattaagatatgtggaacttgctgcacagctgcagaggaggggagactgcccaagtacgtctatacaggyacatgcatgatagctgtgctcctcgtttttcttcaggcactcggtgagagttactgtgatacctccagaaccactgcgtgtagcaggaagaagctgtggttgtgttcagtgctcttctgttacctacttctgttttgcttgaaggtttgatgtatgctgtgaaagggattaggctattttcctatatcctgtaataggattgggattggtagtttcagtctggggtcaccatgctttagtttggtagcaccgtgttttagtctgtaataggaaataattgctgtagcttcactacttttt

SEQ ID NO: 71899 - DNA, 600 bp, Chicken  19866894351105_4
gattggtagtttcagtctggggtcaccatgctttagtttggtagcaccgtgttttagtctgtaataggaaataattgctgtagcttcactactttttcctgattttattaatggtatgatttacaacagagatgttcaagaaccatctttgactgggttcttgtgatatgtgttgtacagagagttgtgacacaaaagagggggttttacatttgtaagtaaacatcgggtctgtcttatagtcagagctagtgcctttcagaaaagagaccttagctgtcactaacaaactttttcttstttgtctttatacaggaaacaataacagagtccgctccgttacgctgcaggaagctcagcaatcctgacatcttttcatctactgggaaaactaagctccatcgtcagctaagtcaagatgactgcaagctgcgcagaggtagtttggcaagttctttatcaggtatggcaattggtagagaccacgtgataattcattagaattaaaagactcggtattagttgttctcataacagttgtaataagatattcctacgttatttcttttaaactagagatgatttcttgttgggaaggca

SEQ ID NO: 71900 - DNA, 600 bp, Chicken  19866894351116_1
tggattaacttcttgtgttcacaattaaccattacagtcacatccctctgaatataccacctttcatattacttgaaacctttactcagattttcttcaatttaagcttggatatctctgatgaaaatcagaattaaaagtaacagaaaaaaaaaaatgttcaagatctaattgctacagaagattcaacattatttgcttacctctaaacagcaaggtcttcatccatggatttattgtgttactgtgatttttgggcaaaatcccttcccaaagaaaattccttattctgcaggactrtgtcatcagattcttaaaacatatggcgctgtctcacagataagaatgtgctacgggaatatgtattattccacataaattgtctgttactttttccacatcatcctttcatgctgaggttcgtatttctcagatagtttcagatagcgatatataaaaaataagctcatgtaatgatgactctttcagcactttttctgtaacatattatgatcaaaactaggtaggctttaaacaactcactgagattaagttttttttccccttgactgagatgttcttaaacaaaatataaaaaga

SEQ ID NO: 71901 - DNA, 600 bp, Chicken  19866894351118_1
caggaacagtgtcagtaaaggcagcaatagtttccttaactagagtactagttttttttccagaaagagtcaacagtaaaatactgataaccgaaaatcatcttcttcagacctaaatgtgtaaggaggagccccaaggacgcaactggaacagatctaatattagcagtttatcagccactgggaaaacaaacatccttttctttcttgcttccctctctcctcctattccatcagccccaacaaaacatgtaagcaaggcaaaaagagagcttctgagagaccagaaatgcaattgcygcatatttgtttctaaagctttgaggttttccatttttagaagcagcagcaccaacttgctcaggcaccaaatagtgggaaaataagctcaagtctgaagcaaagacaacttctttggcatgaggagtcacactccaacatctgttgtgttattttgttttgctttaaaattttttccaattaagagtccaaaaattcttcaattgtaaggtgaagaaagcaccgcagagaccaaggcttctgttgtacaggctggccacagaacgaagcagtttctggtgttctgacatgcaatattac

SEQ ID NO: 71902 - DNA, 600 bp, Chicken  19866894351121_1
cccagcatttttctacagcccacaaatgttaattgtcctatgatgttgtggaaacaacagaataaacaagttcaaaacacagaatagatagaagaaaactccactacggtctgttaaacacaaagatgtagctacaggctctggttcagaaagaaacactcacctactgccaaaaaatgggaacagacactgaggaaaacattactctctgtttatccacttaaaatagtcttaccctaagtaactgctacaggctaacgtctagctaaataagcttttggattaatacagtactgctgyttttgtatgttggtcaaattcttctttcccaactagaacattgcaaaatgatgtcgaagacttagtaaatcttcagggaaggagagcactatcaaaaaagggaaccaacatagacagaaagcagcaaaaaatttggtagaaagagcacttagaaaagttgataacattagtgggacagaaagaactttggtattcactggctgaaagagttggagcataaaacaatggtaccaagtctggctattcagtccttcagagtccagtattacagcagatgttaattaagttataaatataatg

SEQ ID NO: 71903 - DNA, 600 bp, Chicken  19866894351136_1
taagtttcattaaaaaataaaatctagcttatatttgacataaaggcacttacaatgtaaaaatagccacattccttttccttttttattgtgaaatacgtagataagggaaatccttcctgcattgaaggtagagctattcttaatgtttcaaaatggacgacaacatcgtaaatagaacttaattaaaaattcaagtacataatatttctttactttattatgtatattacttttctgcttgctgtacagctcagaacaaaaactcttaaaaggcctctgtgaaggcagcaggcgatkctccaaagcccttccctcagctctgcrgaatggaagttctgtagaaggcagtggctgcaggaggtgctgctgtctggaatcaggggatgaagagagacacgggctgcagccaaggaaaacacaccaaggaactgcatgtcattcctggatggagttgtcttgcaggcagtctccttaatggccataccggaggtatgtctcagctatgaaaggaaacaccaggcagtaaccttgtgtgcttactgctttcagatctgacgctgagacagctcggttgtgactcttccaaagcagccgtga

SEQ ID NO: 71904 - DNA, 600 bp, Chicken  19866894351136_2
cttatatttgacataaaggcacttacaatgtaaaaatagccacattccttttccttttttattgtgaaatacgtagataagggaaatccttcctgcattgaaggtagagctattcttaatgtttcaaaatggacgacaacatcgtaaatagaacttaattaaaaattcaagtacataatatttctttactttattatgtatattacttttctgcttgctgtacagctcagaacaaaaactcttaaaaggcctctgtgaaggcagcaggcgatkctccaaagcccttccctcagctctgcrgaatggaagttctgtagaaggcagtggctgcaggaggtgctgctgtctggaatcaggggatgaagagagacacgggctgcagccaaggaaaacacaccaaggaactgcatgtcattcctggatggagttgtcttgcaggcagtctccttaatggccataccggaggtatgtctcagctatgaaaggaaacaccaggcagtaaccttgtgtgcttactgctttcagatctgacgctgagacagctcggttgtgactcttccaaagcagccgtgaagctggttgaacatccagggtgaacac

SEQ ID NO: 71905 - DNA, 600 bp, Chicken  19866894351143_1
taacaatgatttgtatttgattacactataatcattgctgatagcaaagggcaaaaggatgaacagaatggatcagaagtacacaaatgatgtacaatctgaaagcaaagacatctttatgttgttaattggtttcattcatcagttgtcttctctttgcggtaaaccataaaacaagcactaagaatcaactggactactgctaagggtctagagagcttcacaaagtctgtcttcggtttacctaagtttcctgagttgagtagcttacattatagcaccaccttgtgtcaaggactrtgaagaaaaccactgaactatctattatagttaccttcgttgtccaaagctttactgtccagtcaaaagaagaggtgacaaaaagatgtgagaagtctacaggtccaactgctgcatggcagtggatacctgtgattggtccctggtgtccttcaaacatctcactgattccagctttgctgttttagaatatataaccaaagttaatttctctggaaaccatacatctgcagacagagacagcactgaaacgcattttaaatataacctcaagaagattttgctgctttgaatggatgt

SEQ ID NO: 71906 - DNA, 600 bp, Chicken  19866894351150_1
caagtaaaaccccatcccctcctaaagctcagccttaactccctttctgacagcaccacatcctctcatctgtaatgttcttcaggcccagccagagactcactgtccaaagaaaacagcagttttcaatgccctctcctacttaccatatctcatttttcttttccaacaaatattttatgatcttttctctcccattataaaaataccttgtagaaaattattttcctgtggaagtctcccttaataattcccaccctgtcactcctcccacaccagatatctttggatggccagtgrattgttcgtaccattagcacagagggcacagcaacctcacggattcccttagattcccttatcatgatgaagttgagccagtcctccaggcaatttaacagctttccccctacaatagaccactttatagcactcttgcccgattcaaattgacctgcagggcatatttcaatagcagcttaattcactttctcccttccctcgagctgaaaacaggaaggcatttagctgccgtataatgtgacgtctatgtcttttctctgctattatcttgactaagtaaatcaaaaaaatagcagt

SEQ ID NO: 71907 - DNA, 600 bp, Chicken  19866894351170_1
tgggtggtagaagcaccaccagtagatctctccaagactaaggctagctggctcctcattgtcagcacatggctataaaggtttgctatctgcaaagagacataagttacagaggaaagagatctatccatgctcttttgccctccaaggctacaaatagccttgaataggtaaaggaaaactgaagcttttgttagggatcctgcctaggttctggtctgaacccaaggtgtgtctcctgtctgagaaggtgggtgaatggagaagcaacggcaacagatcaaatggcttataatctgratcaatgaggagcaagctcagtaattctcagtggccctcctgaagacaactttatctgcaagaaaatgtacacttcttatgaagaatatccttatcagttcttgtttaaatttcacatggagatggcctttggtcagaagatgtaggtttagctcccttaaagatcactgtgctaattcagtggaagaagaaatctccctctctactgtttgctgctagtaagtatgtacttatttttgctcctccaaatttcttacccaccagctggcatacggcaacgtgtcagccctccttccttga

SEQ ID NO: 71908 - DNA, 600 bp, Chicken  19866894351170_2
tgaggagcaagctcagtaattctcagtggccctcctgaagacaactttatctgcaagaaaatgtacacttcttatgaagaatatccttatcagttcttgtttaaatttcacatggagatggcctttggtcagaagatgtaggtttagctcccttaaagatcactgtgctaattcagtggaagaagaaatctccctctctactgtttgctgctagtaagtatgtacttatttttgctcctccaaatttcttacccaccagctggcatacggcaacgtgtcagccctccttccttgaagatrtgtctttaggcaatatgacacatctcagagactcagtacacaggaataactgaagagagggccttcatttccaacaggagaaacaagagaaagtgtcttaaagctgccacatttcacyctaacccatgtttttcctctttccacttaaatatcagccatacctaagcataagccaaagcaaagctttgtttagcaggaccgttgtttcaaactggaaagtatgtagaaaacattcattcaaagttaggaaggcttcttattcatccttgtgtgtggtacctacagtgtacaggtgctcaa

SEQ ID NO: 71909 - DNA, 600 bp, Chicken  19866894351170_3
tggcctttggtcagaagatgtaggtttagctcccttaaagatcactgtgctaattcagtggaagaagaaatctccctctctactgtttgctgctagtaagtatgtacttatttttgctcctccaaatttcttacccaccagctggcatacggcaacgtgtcagccctccttccttgaagatrtgtctttaggcaatatgacacatctcagagactcagtacacaggaataactgaagagagggccttcatttccaacaggagaaacaagagaaagtgtcttaaagctgccacatttcacyctaacccatgtttttcctctttccacttaaatatcagccatacctaagcataagccaaagcaaagctttgtttagcaggaccgttgtttcaaactggaaagtatgtagaaaacattcattcaaagttaggaaggcttcttattcatccttgtgtgtggtacctacagtgtacaggtgctcaagaatgagggtaactcccctgtcacagaatcatggcaaaatttgggttggaagggaccataacgatcatctagttccactccccctgtgctgtgtgcaggaacactttccaatgagacc

SEQ ID NO: 71910 - DNA, 600 bp, Chicken  19866894351174_1
cacacctctttgcaaccaaaagaaaatgatgtcatttctcattgtttgaagtagtccaaaactcaaatgtttctctgaatggatagcaacaacttaattgttgctaataaatatgaatagcatcttacatctttggtatacttgttcattccatgccaccttaaaataatttcgggaaaaaatattcttagaagtatttttactgttattataagactatatatcatctgttcaaccattttgaagttgctttggagaggatattcagtatgacttaacaggagaagatctgaagcacgrtaatttgtgttgcgcaaatgtaaaatctgtatgaccagctacttaagagaccattagtaatgatagttttttgtcagtaaagtggtaattattgcatgataataatacctctctacacatttgaaagcggtcatcactgtattcagactttctattagcgacataaattttagtcaaagaattagagaaagagctcagcttttataaatgcagtagccagactctccaacattccttgctcccagcagtgttcattcttaggaacactggaaagttctggttgttgaatgtttaagaaaa

SEQ ID NO: 71911 - DNA, 600 bp, Chicken  19866894351174_2
ggtcatcactgtattcagactttctattagcgacataaattttagtcaaagaattagagaaagagctcagcttttataaatgcagtagccagactctccaacattccttgctcccagcagtgttcattcttaggaacactggaaagttctggttgttgaatgtttaagaaaatgaaatatcctgcattctaaacagaagtggatttcatctgaaactctgctactttagtaattaattgtccacaacagcttttgcttctctcattttcatggaggtgcagtagtgttggttgacagctyggtagcttgtcattcccttaaaggaaacttaaaaaaaatgtgcagtggaattcatattttagtttgctgtagaagtttgctataaattttgttctaaacaacttctttttttagaagccgtgattcatccagagaaatacacaggacaagtctctggtctttagtgaggtcttttatttctgttgactttttattttcattggcacagaagcaacctcaggttagaattctaccattggtgaattcaagatgtcaaaaatctaagaaaatcatggctgaagtacatctaagaatcaaata

SEQ ID NO: 71912 - DNA, 470 bp, Chicken  19866894351174_3
tagaagtttgctataaattttgttctaaacaacttctttttttagaagccgtgattcatccagagaaatacacaggacaagtctctggtctttagtgaggtcttttatttctgttgactttttattttcattggcacagaagcaacctcaggttagaattctaccattggtgaattcaagatgtcaaaaatctaagaaaatcatggctgaagtacatctaagaatcaaatatgtcatactccattttctgaatatgcagcgtgattcaatcttcagtatttcttctagttaactgtgcamtgtgaccctctgtataaacctgtgaatggctctcctgtgtctacggagattactaagtataagccaactttgtggcactgtatattgctttggtaccccaattggttttaagtacctcctctaaaacaaaactagaagaaagaaacatcagataaatccttgccctagat

SEQ ID NO: 71913 - DNA, 600 bp, Chicken  19866894351179_1
gatattagtccttaaagcagggtaaggcagtggggttcatcagtcacttgatttactgtattgaatcctcctggaaaaggtgtagagggggtttgactccatgacaggccttgcaggtctgtcagctctgctgcaatggcatttcttccacctctgcatctgaggatgcttctcttcctctggtgttgctgttcattttcctagcaggtatctgatttgagggagttggttttgctagatgttttctgctggctgcatattctgcttgctcaggtccctgaactatgtcagtgttggcayaggggaggagagagaagcaaagaagggaagcaaatggttgatcctggcatctccatrgcaggagatgccaaagctgctatgtggagcagcacctcagagcactcatgcaaaaaccaggtggcttattgctcaaccaaggtggatcagcacagtcctggcagcagtgtaaaaagcttactgggatgggtggtagcctgtcgtgagccytgaatctctgcagtactgatttcattcagttaagaagtgtgtgcccragaataggaaatcagatctttctttgctgaagctttgtatttaaag

SEQ ID NO: 71914 - DNA, 600 bp, Chicken  19866894351179_2
gtattgaatcctcctggaaaaggtgtagagggggtttgactccatgacaggccttgcaggtctgtcagctctgctgcaatggcatttcttccacctctgcatctgaggatgcttctcttcctctggtgttgctgttcattttcctagcaggtatctgatttgagggagttggttttgctagatgttttctgctggctgcatattctgcttgctcaggtccctgaactatgtcagtgttggcayaggggaggagagagaagcaaagaagggaagcaaatggttgatcctggcatctccatrgcaggagatgccaaagctgctatgtggagcagcacctcagagcactcatgcaaaaaccaggtggcttattgctcaaccaaggtggatcagcacagtcctggcagcagtgtaaaaagcttactgggatgggtggtagcctgtcgtgagccytgaatctctgcagtactgatttcattcagttaagaagtgtgtgcccragaataggaaatcagatctttctttgctgaagctttgtatttaaaggataaattaactgtttatggcacggctaatactaataaagtaagactcttgtatgag

SEQ ID NO: 71915 - DNA, 600 bp, Chicken  19866894351179_3
gtatctgatttgagggagttggttttgctagatgttttctgctggctgcatattctgcttgctcaggtccctgaactatgtcagtgttggcayaggggaggagagagaagcaaagaagggaagcaaatggttgatcctggcatctccatrgcaggagatgccaaagctgctatgtggagcagcacctcagagcactcatgcaaaaaccaggtggcttattgctcaaccaaggtggatcagcacagtcctggcagcagtgtaaaaagcttactgggatgggtggtagcctgtcgtgagccytgaatctctgcagtactgatttcattcagttaagaagtgtgtgcccragaataggaaatcagatctttctttgctgaagctttgtatttaaaggataaattaactgtttatggcacggctaatactaataaagtaagactcttgtatgagaagtgttagtgttaatatatcataaatactagttgaaatgtcagagcaaccgcgtgacatagccatcaggtctgggaagttcaccaggtaatatcctgaacctacagtggcattatttttcagaatgttgtcttggggaaattaatggct

SEQ ID NO: 71916 - DNA, 600 bp, Chicken  19866894351179_4
gcatattctgcttgctcaggtccctgaactatgtcagtgttggcayaggggaggagagagaagcaaagaagggaagcaaatggttgatcctggcatctccatrgcaggagatgccaaagctgctatgtggagcagcacctcagagcactcatgcaaaaaccaggtggcttattgctcaaccaaggtggatcagcacagtcctggcagcagtgtaaaaagcttactgggatgggtggtagcctgtcgtgagccytgaatctctgcagtactgatttcattcagttaagaagtgtgtgcccragaataggaaatcagatctttctttgctgaagctttgtatttaaaggataaattaactgtttatggcacggctaatactaataaagtaagactcttgtatgagaagtgttagtgttaatatatcataaatactagttgaaatgtcagagcaaccgcgtgacatagccatcaggtctgggaagttcaccaggtaatatcctgaacctacagtggcattatttttcagaatgttgtcttggggaaattaatggcttcatggttgtcctcaaaataatgtacctgacagtttttctgattccc

SEQ ID NO: 71917 - DNA, 599 bp, Chicken  19866894351180_1
  misc_feature (1)..(159): n is any nucleotide
nnnnnnnnnnnnnnnnnnnnnnnnnnnnnnnnnnnnnnnnnnnnnnnnnnnnnnnnnnnnnnnnnnnnnnnnnnnnnnnnnnnnnnnnnnnnnnnnnnnnnnnnnnnnnnnnnnnnnnnnnnnnnnnnnnnnnnnnnnnnnnnnnnnnnnnnnnnnnnnacacacttcagcaagaatcattcagtgaaaaggaaaacagatcgatgtgcatttctgcttcacattctttgcttttgacagcaaagtgtgccattgctacctcattctttgcccttccaattgcataatacaccctacacygygacactttgcacttgacaactttgtcacctttacctgagcaattttagccatcctgaattcacaacacatcccctcgggagctaaagtactcaattacttcctgtttcaaagcataaggagataacttgaatcattagataagttggaacaagtctatcaaacgctttagctcaaaagacatcacayatcctcctgaagtatactcagtgtgaccaaagtttaagggagcaccttcctgcaatgttatcttgtcccttcttggattcaaatagattacatttgtcctggcccataca

SEQ ID NO: 71918 - DNA, 599 bp, Chicken  19866894351180_2
  misc_feature (1)..(157): n is any nucleotide
nnnnnnnnnnnnnnnnnnnnnnnnnnnnnnnnnnnnnnnnnnnnnnnnnnnnnnnnnnnnnnnnnnnnnnnnnnnnnnnnnnnnnnnnnnnnnnnnnnnnnnnnnnnnnnnnnnnnnnnnnnnnnnnnnnnnnnnnnnnnnnnnnnnnnnnnnnnnnacacacttcagcaagaatcattcagtgaaaaggaaaacagatcgatgtgcatttctgcttcacattctttgcttttgacagcaaagtgtgccattgctacctcattctttgcccttccaattgcataatacaccctacacygygacactttgcacttgacaactttgtcacctttacctgagcaattttagccatcctgaattcacaacacatcccctcgggagctaaagtactcaattacttcctgtttcaaagcataaggagataacttgaatcattagataagttggaacaagtctatcaaacgctttagctcaaaagacatcacayatcctcctgaagtatactcagtgtgaccaaagtttaagggagcaccttcctgcaatgttatcttgtcccttcttggattcaaatagattacatttgtcctggcccatacact

SEQ ID NO: 71919 - DNA, 600 bp, Chicken  19866894351180_3
aggaaaacagatcgatgtgcatttctgcttcacattctttgcttttgacagcaaagtgtgccattgctacctcattctttgcccttccaattgcataatacaccctacacygygacactttgcacttgacaactttgtcacctttacctgagcaattttagccatcctgaattcacaacacatcccctcgggagctaaagtactcaattacttcctgtttcaaagcataaggagataacttgaatcattagataagttggaacaagtctatcaaacgctttagctcaaaagacatcacayatcctcctgaagtatactcagtgtgaccaaagtttaagggagcaccttcctgcaatgttatcttgtcccttcttggattcaaatagattacatttgtcctggcccatacactttcastgaaagtttttcatgctcctaggagataktggcagaggaggtagggggggagaaagtcatgtaacactcactgtgctggatttcttactaaataatgcatgctatgagttcacttccaataagaaatggggaaaaaaaacatgccaagttgcctgctctgtaattatttaaattccaattttc

SEQ ID NO: 71920 - DNA, 600 bp, Chicken  19866894351180_4
ctttgcacttgacaactttgtcacctttacctgagcaattttagccatcctgaattcacaacacatcccctcgggagctaaagtactcaattacttcctgtttcaaagcataaggagataacttgaatcattagataagttggaacaagtctatcaaacgctttagctcaaaagacatcacayatcctcctgaagtatactcagtgtgaccaaagtttaagggagcaccttcctgcaatgttatcttgtcccttcttggattcaaatagattacatttgtcctggcccatacactttcastgaaagtttttcatgctcctaggagataktggcagaggaggtagggggggagaaagtcatgtaacactcactgtgctggatttcttactaaataatgcatgctatgagttcacttccaataagaaatggggaaaaaaaacatgccaagttgcctgctctgtaattatttaaattccaattttcaatatcagcatcctggagagcataatgctctccctccctcctttgtgcacccaagattgaaacggtatttttcaaaagctgcacaaaaatcactttcacagccatcatcctctcagc

SEQ ID NO: 71921 - DNA, 600 bp, Chicken  19866894351180_5
cctgagcaattttagccatcctgaattcacaacacatcccctcgggagctaaagtactcaattacttcctgtttcaaagcataaggagataacttgaatcattagataagttggaacaagtctatcaaacgctttagctcaaaagacatcacayatcctcctgaagtatactcagtgtgaccaaagtttaagggagcaccttcctgcaatgttatcttgtcccttcttggattcaaatagattacatttgtcctggcccatacactttcastgaaagtttttcatgctcctaggagataktggcagaggaggtagggggggagaaagtcatgtaacactcactgtgctggatttcttactaaataatgcatgctatgagttcacttccaataagaaatggggaaaaaaaacatgccaagttgcctgctctgtaattatttaaattccaattttcaatatcagcatcctggagagcataatgctctccctccctcctttgtgcacccaagattgaaacggtatttttcaaaagctgcacaaaaatcactttcacagccatcatcctctcagctaaatgagagacgagcattaatgagacaa

SEQ ID NO: 71922 - DNA, 600 bp, Chicken  19866894351194_1
taactcaaggggtacgtgagctcccctttaactgcaggggctgtgctgcatctcggcccttgcttgcagcagtcagcacatagtggcgcaaagctgtgcctctgaaggttttggctctgatgttggtttttcataaccacattcctgcagtttcactgacaaagccacactgcatgttatgatcttttctagatgtcatgcatttgtatttcagttgtgaagagcaagcaaacaaccaagtgttgctgtgttttatgcaattgtattagagaaaagagaaatgggtttgcattggtgaartaggaggctttccggattgatgcaactcagttgtttttctgtggtgaccacagaggtgtgtgggtttttgtttgtttgtttgtgggcttttgttttgcttacctcagtgattaatccagttctcttatttctggagttggaagtcatattaattctatgccctaaaagaaaatggtggcttctaaaggtggcttctgatgggatatgaatatttgctgcctagatggttgtccagggctgtgggtgctaccagtagggatgtgtttccactgggtcacagtgagtgacttggcaccagcc

SEQ ID NO: 71923 - DNA, 600 bp, Chicken  19866894351196_1
gagcttttgccttatgatcacatacgagctggcagaagagaggaggcaacagagctggctgttctaccttggcaacacatcgtccccagaattatccatgctctctgcaatctcttattatgctggctggcctgagaaacagcagcctctcctccaagacagagagaatagagagagccctcatcaacaagaggtttgagctcaccttcacagccccacagtgatcgttcacacaagggatccgcacccctccagcctcaccgtcacattcagaaagctgggactaggatccaggacttyatagatgaagacayagaaaaagttctccggctcagaacactcactgaagctgctggaaggcagaataatcatagagagggagccaagtcacactgatattgtatggagcctatttggaggcttggcctcaattagcatataaatgaagcgatacacgcagtcgcagcttgccagaaaatgagacagaataatctccccaatttggcagctctctagagcatttagtttgtgaatgaggagccaggcacaatctgaagccaagctgggtccacagcttacagccaattgactttacatggt

SEQ ID NO: 71924 - DNA, 595 bp, Chicken  19866894351196_2
tgatcacatacgagctggcagaagagaggaggcaacagagctggctgttctaccttggcaacacatcgtccccagaattatccatgctctctgcaatctcttattatgctggctggcctgagaaacagcagcctctcctccaagacagagagaatagagagagccctcatcaacaagaggtttgagctcaccttcacagccccacagtgatcgttcacacaagggatccgcacccctccagcctcaccgtcacattcagaaagctgggactaggatccaggacttyatagatgaagacayagaaaaagttctccggctcagaacactcactgaagctgctggaaggcagaataatcatagagagggagccaagtcacactgatattgtatggagcctatttggaggcttggcctcaattagcatataaatgaagcgatacacgcagtcgcagcttgccagaaaatgagacagaataatctccccaatttggcagctctctagagcatttagtttgtgaatgaggagccaggcacaatctgaagccaagctgggtccacagcttacagccaattgactttacatggtgaaaacagg

SEQ ID NO: 71925 - DNA, 600 bp, Chicken  19866894351203_1
ttatgctccagagctcccacggtttgcaaatccaagcagtaaatgagccaaaaagccaccgtgcccacgatcaccctatgccctgacctgttctgctggcctcaaatgcataaagaaaaggagaaaatgaggcccagcttggtgggtttgcaaagcatgggtgatggcacagggctgctcagcaggtttccctggtgcactggctgagcaggaggtggaaatgggtgcagagaggggcaggaggagcacaatttgctgtaaatcctcttctaaagggaagaagaggctggcagggagaaycatgcacctcaaggcaccccaggctcaagaactgagggagcagcccaggctggaagaaattygaaccccacatccctattgcaaagtcctgatggagaaagccaaccctcatggttgcttgcatgtatctgtaggttccaacaagacatggggagcaacaagagataccagcaagggttttaaagctgcttttgtgcagcagaaatgtgcactgaaaggatgtgaggtctttttggactcctcttgccaagaaaaccccatgcaactgtgatacacagaccacaacccacaccagcagag

SEQ ID NO: 71926 - DNA, 600 bp, Chicken  19866894351203_2
gcccacgatcaccctatgccctgacctgttctgctggcctcaaatgcataaagaaaaggagaaaatgaggcccagcttggtgggtttgcaaagcatgggtgatggcacagggctgctcagcaggtttccctggtgcactggctgagcaggaggtggaaatgggtgcagagaggggcaggaggagcacaatttgctgtaaatcctcttctaaagggaagaagaggctggcagggagaaycatgcacctcaaggcaccccaggctcaagaactgagggagcagcccaggctggaagaaattygaaccccacatccctattgcaaagtcctgatggagaaagccaaccctcatggttgcttgcatgtatctgtaggttccaacaagacatggggagcaacaagagataccagcaagggttttaaagctgcttttgtgcagcagaaatgtgcactgaaaggatgtgaggtctttttggactcctcttgccaagaaaaccccatgcaactgtgatacacagaccacaacccacaccagcagagcacccagtgatggtgacaaaagaaggtttatggtgttttcagggcctcctacggggcacaaa

SEQ ID NO: 71927 - DNA, 599 bp, Chicken  19866894351205_1
  misc_feature (1)..(141): n is any nucleotide
nnnnnnnnnnnnnnnnnnnnnnnnnnnnnnnnnnnnnnnnnnnnnnnnnnnnnnnnnnnnnnnnnnnnnnnnnnnnnnnnnnnnnnnnnnnnnnnnnnnnnnnnnnnnnnnnnnnnnnnnnnnnnnnnnnnnnnnnnnnnnaatagaaagtagtatgattttttttctttcattattattactatcttaagacaagtgagaaagagcagctactagctactaggtcttttcattaagaatacaggtgacaaaaatagcaccaaatgagaaatagttctcacagactttttaagcttacayattctagcactaaaatattcttagactttcaaaaaattaaagcagatgatttcacctagacaacagcttgtggtgacagcatatcagacatcatgattccactaacttggataaaatagtttgttggagtattttaattcagatttgtgaattctggattcatttaccattcagatgtccaatttaatgaaatatgaatcaaacagtgttaaaattagtattttcactgccattctgaagtacatgaaattgctacctttatgttccacatccttataccttttaaaaaatgtttctag

SEQ ID NO: 71928 - DNA, 600 bp, Chicken  19866894351220_1
cattacattgaattgcactatattacaatattatgttatggctatattccatagcaattatccaaatatggcagttgcatagctgcaaggttcctgtgtttgagggtattattatttgtgctgtcctttacaattaaagctattctggctttgaaaaggcagactgtcacacaaactgagctagattttgcagtctgtgtgacagttgggtaaacgcagtgtctgatgtagtggcattaagtatatattttagctaattctgtaagaaatgtagaattcctgtgaatccaattatatcaygaaaaagataaatgccattgccgttctccactcactcccaagtgccttatgctctctccctggcagtcatcagggtgaaagatgtctctgaggacacacgcatccccctgttcgggtcagcaggtgaggcgaggccatgcagcaggactgtgcccctcttaccccgtactgacacagctctggggagcgtatctttttcctttgcttccaaatcctcctaatctaccctgcatgagtagcacgatgcatttccatgcaacagaaaaactattctgcctctattttctaaccaaggagaag

SEQ ID NO: 71929 - DNA, 600 bp, Chicken  19866894351225_1
cctgggttcccatgccctctagaactgcctcccaagggacgctctcaaccatggtctgaaagaggacagagtctgccctccagaagtccaaggtggcagttctactgactcccctccgtggttcaacaaggatcaaaaaatctagcacctcatgatcattttttattaaaaacatttatcttgtgagaaaaagactttgagagccttgatcaacaagatatgcagaaatcatgtcttatgctgcaaacttatctggatcttcagagccatgctgcctggctgatgtctccagaagaaagygaggaagcacgatgttttgttctccgggcttttcatgatcccacatcaaggagacctgaagctagcactgcacagagctttcctttgggacctcttggaggatgctgagctttatagaatcactgaatgagttatagaatggctaacatagaaaggaaaattaaagaccaaccagctgcaaccccctgtcatgagttagctgccccacaccagatcaggctgcccaaggccccatctgacctggccccacaggatggggcatccatagcttctctgggcaacccgttccaatgagtaaag

SEQ ID NO: 71930 - DNA, 599 bp, Chicken  19866894351231_1
  misc_feature (1)..(104): n is any nucleotide
nnnnnnnnnnnnnnnnnnnnnnnnnnnnnnnnnnnnnnnnnnnnnnnnnnnnnnnnnnnnnnnnnnnnnnnnnnnnnnnnnnnnnnnnnnnnnnnnnnnnnnnnacattttaatattttcttcctgaagaagtttcaccttactggggatactttgcaaagcaaccctgcaaaaaataacagcaacaagaaccaaaccccaaaaccaaaaccaaaccaacaccatgagcatactgactgaaagaaggcaaagaaaatgattcaaaaaaacctcatgctgtgattgaaacaaatacaacaraatgagtttctgaccttccctcattccacccagtttctactttatttttcccacaaacacaataactatctgtacaacccagaccattttctgacttcaaaactcagttttctatcttcctgtccaccactatgaatgactattttttttccaaccctaaacatttaacttttctgttctttgtctttttcttccaccttgggtcagagcttgcactaacatctgatacagacagtatatgaaacaggtttagatctattaaaatacaagttacagtgcaggcactttgaagtgccaca

SEQ ID NO: 71931 - DNA, 599 bp, Chicken  19866894351244_1
  misc_feature (1)..(139): n is any nucleotide
nnnnnnnnnnnnnnnnnnnnnnnnnnnnnnnnnnnnnnnnnnnnnnnnnnnnnnnnnnnnnnnnnnnnnnnnnnnnnnnnnnnnnnnnnnnnnnnnnnnnnnnnnnnnnnnnnnnnnnnnnnnnnnnnnnnnnnnnnnnatgcaacgtagatacctggggcgattcctaatacagttatcacttctcccttttctgccagtcaggcactctttcctcatcagtttatcctgacgcactgagatgctaagtgtcctcagaaataggtggagaatagcttgaaggaataaccaaaggtgaascttcccaaaatgccccatttgcaaaagcgtatttttctggaacagcacagaaaatgattttggaggtgggtgaaaaatgtcacaagaagttgcaaactgttacatgtgcatctgtagtaaataacagcatcaggaaccagctgtgcagctttcctctgggagtctcataggaaaaagcagatgagtaacaaaattgtgctgcattaactggttgcatgcatttttcttgactgccttaactcttctgagacaaaatgaatttctactgacttttgcttgtctctgaaggttgcaccttg

SEQ ID NO: 71932 - DNA, 600 bp, Chicken  19866894351247_1
tgttaatttgttcttattcctttcctcccttataagctgtgttatcatcttgcatacacattgatgtagtatacacaatctgacaaacttcaagaccattttggaaagtggtgttaatactttccgtattagcattttgtaataagtaggctgccagtatggaaatttgcctgcaaaggtcaaagatcctataaggtaactgcttccagaaagataccaataattccctgtactcttttgaactggtaagataaataggaattccttgtgctgcaaaacagctgccaaaaacaaacaaayaaataaataaataaaacacagccggaaaaaaacaacagctctctgaatctctgtgaaatctcagtgaaagtaatgcaagttcaacagactgggataagacrcattggaaagtagtgacaggtatacaggaggacactgttcaggactaggaaagggttctgatacactgtactgaaacaaaatttacctgtctgttgccaggcaggcacacactggtttaaaacatttgattttctttcctcactaaatattccaaacatgtcagatcaacagaacrgttctgtgtctctgttaccttct

SEQ ID NO: 71933 - DNA, 600 bp, Chicken  19866894351247_2
tggaaagtggtgttaatactttccgtattagcattttgtaataagtaggctgccagtatggaaatttgcctgcaaaggtcaaagatcctataaggtaactgcttccagaaagataccaataattccctgtactcttttgaactggtaagataaataggaattccttgtgctgcaaaacagctgccaaaaacaaacaaayaaataaataaataaaacacagccggaaaaaaacaacagctctctgaatctctgtgaaatctcagtgaaagtaatgcaagttcaacagactgggataagacrcattggaaagtagtgacaggtatacaggaggacactgttcaggactaggaaagggttctgatacactgtactgaaacaaaatttacctgtctgttgccaggcaggcacacactggtttaaaacatttgattttctttcctcactaaatattccaaacatgtcagatcaacagaacrgttctgtgtctctgttaccttctgccctgtgcttttcctgatttctttctcccttcctcttagatgtattatgccatcttctagctttgaagatggcactgctttgaactgaggactagaccaa

SEQ ID NO: 71934 - DNA, 600 bp, Chicken  19866894351247_3
acagctgccaaaaacaaacaaayaaataaataaataaaacacagccggaaaaaaacaacagctctctgaatctctgtgaaatctcagtgaaagtaatgcaagttcaacagactgggataagacrcattggaaagtagtgacaggtatacaggaggacactgttcaggactaggaaagggttctgatacactgtactgaaacaaaatttacctgtctgttgccaggcaggcacacactggtttaaaacatttgattttctttcctcactaaatattccaaacatgtcagatcaacagaacrgttctgtgtctctgttaccttctgccctgtgcttttcctgatttctttctcccttcctcttagatgtattatgccatcttctagctttgaagatggcactgctttgaactgaggactagaccaatgacctgcagaggtccctttcagctaagattctatgattatctagttgtcacaaattcttctgccttctggcaaaatctgccttctggctttttctaatattaaaatcttcattgctttcactgcatcttatgaagccactcccaaatggattcttccttaaccctttaatataat

SEQ ID NO: 71935 - DNA, 600 bp, Chicken  19866894351253_1
attttgcagctcagatgttgcagttgctgaaaagaaatgggagagcaggcaatgattacaaaagccacaaccctccccataactataaataagttccctgtcttgtcattgtaaataaatactgccttgtcattgagtgtaccttaaaacctgtttatctcaggatatattggaatcacaactgtattcagtatatatactgcagatttttaaacgtgcaactcttttgaggaggaaaaaaaaggaagaataagcttagtagaataggtagcagttgtgaaacaagtgtactgttagaargcatgagactagaagtgctgcctgattactgtatctttcccatatgtgcaagtaatatcagataggtgatttagtttcatagagatcagggagactgcttgtgttcaaaaaggtctttgtagcttcttatttcagctgcttggcttcttcctgtgatgtggttaatatatcctgcagcgacacattgaaatgcacatctgctgtaagatagcgtgtactaaaagaaatgtaacttyctgatctaacaaaatagatagactcttactgtggtaaaatggyagtcgtttgggcaggatagat

SEQ ID NO: 71936 - DNA, 600 bp, Chicken  19866894351253_2
aaaaaaaggaagaataagcttagtagaataggtagcagttgtgaaacaagtgtactgttagaargcatgagactagaagtgctgcctgattactgtatctttcccatatgtgcaagtaatatcagataggtgatttagtttcatagagatcagggagactgcttgtgttcaaaaaggtctttgtagcttcttatttcagctgcttggcttcttcctgtgatgtggttaatatatcctgcagcgacacattgaaatgcacatctgctgtaagatagcgtgtactaaaagaaatgtaacttyctgatctaacaaaatagatagactcttactgtggtaaaatggyagtcgtttgggcaggatagataccctttattttaatataaattccaggtttagaggaagcaattaggaacagaaacragagaggcaggtagtctctaaatgtttgtgcaaaaacaaacacatcaaattccagagaacggtatgtartaacatacctacttttctattccagatatgaagtgcattccaatctttattgtacagctatgattttatgaaactggcctttcagcctttcaattttgagtcatcagtgca

SEQ ID NO: 71937 - DNA, 600 bp, Chicken  19866894351253_3
aaacaagtgtactgttagaargcatgagactagaagtgctgcctgattactgtatctttcccatatgtgcaagtaatatcagataggtgatttagtttcatagagatcagggagactgcttgtgttcaaaaaggtctttgtagcttcttatttcagctgcttggcttcttcctgtgatgtggttaatatatcctgcagcgacacattgaaatgcacatctgctgtaagatagcgtgtactaaaagaaatgtaacttyctgatctaacaaaatagatagactcttactgtggtaaaatggyagtcgtttgggcaggatagataccctttattttaatataaattccaggtttagaggaagcaattaggaacagaaacragagaggcaggtagtctctaaatgtttgtgcaaaaacaaacacatcaaattccagagaacggtatgtartaacatacctacttttctattccagatatgaagtgcattccaatctttattgtacagctatgattttatgaaactggcctttcagcctttcaattttgagtcatcagtgcaatgactggacatttcttaygacttaaacctcyagtattttgct

SEQ ID NO: 71938 - DNA, 600 bp, Chicken  19866894351253_4
atcagataggtgatttagtttcatagagatcagggagactgcttgtgttcaaaaaggtctttgtagcttcttatttcagctgcttggcttcttcctgtgatgtggttaatatatcctgcagcgacacattgaaatgcacatctgctgtaagatagcgtgtactaaaagaaatgtaacttyctgatctaacaaaatagatagactcttactgtggtaaaatggyagtcgtttgggcaggatagataccctttattttaatataaattccaggtttagaggaagcaattaggaacagaaacragagaggcaggtagtctctaaatgtttgtgcaaaaacaaacacatcaaattccagagaacggtatgtartaacatacctacttttctattccagatatgaagtgcattccaatctttattgtacagctatgattttatgaaactggcctttcagcctttcaattttgagtcatcagtgcaatgactggacatttcttaygacttaaacctcyagtattttgctgtggatttgcagtgtaactctgttgaatgccccatctgtgctctccccattttaaggaggactgaggcagtgaagga

SEQ ID NO: 71939 - DNA, 600 bp, Chicken  19866894351253_5
cttatttcagctgcttggcttcttcctgtgatgtggttaatatatcctgcagcgacacattgaaatgcacatctgctgtaagatagcgtgtactaaaagaaatgtaacttyctgatctaacaaaatagatagactcttactgtggtaaaatggyagtcgtttgggcaggatagataccctttattttaatataaattccaggtttagaggaagcaattaggaacagaaacragagaggcaggtagtctctaaatgtttgtgcaaaaacaaacacatcaaattccagagaacggtatgtartaacatacctacttttctattccagatatgaagtgcattccaatctttattgtacagctatgattttatgaaactggcctttcagcctttcaattttgagtcatcagtgcaatgactggacatttcttaygacttaaacctcyagtattttgctgtggatttgcagtgtaactctgttgaatgccccatctgtgctctccccattttaaggaggactgaggcagtgaaggatagttcacagagcacactgagaacacctgtatcagacactgcttcaacttgagcattcggatttgcaat

SEQ ID NO: 71940 - DNA, 600 bp, Chicken  19866894351253_6
agactcttactgtggtaaaatggyagtcgtttgggcaggatagataccctttattttaatataaattccaggtttagaggaagcaattaggaacagaaacragagaggcaggtagtctctaaatgtttgtgcaaaaacaaacacatcaaattccagagaacggtatgtartaacatacctacttttctattccagatatgaagtgcattccaatctttattgtacagctatgattttatgaaactggcctttcagcctttcaattttgagtcatcagtgcaatgactggacatttcttaygacttaaacctcyagtattttgctgtggatttgcagtgtaactctgttgaatgccccatctgtgctctccccattttaaggaggactgaggcagtgaaggatagttcacagagcacactgagaacacctgtatcagacactgcttcaacttgagcattcggatttgcaatttttccactacttcactgcgatatgttggcatggcagcactgtttgcttttgtttcttctcctgattggttgggacctccattaaacttttcattattatcatatctggaataagaaagtttggggggta

SEQ ID NO: 71941 - DNA, 600 bp, Chicken  19866894351253_7
ggtaaaatggyagtcgtttgggcaggatagataccctttattttaatataaattccaggtttagaggaagcaattaggaacagaaacragagaggcaggtagtctctaaatgtttgtgcaaaaacaaacacatcaaattccagagaacggtatgtartaacatacctacttttctattccagatatgaagtgcattccaatctttattgtacagctatgattttatgaaactggcctttcagcctttcaattttgagtcatcagtgcaatgactggacatttcttaygacttaaacctcyagtattttgctgtggatttgcagtgtaactctgttgaatgccccatctgtgctctccccattttaaggaggactgaggcagtgaaggatagttcacagagcacactgagaacacctgtatcagacactgcttcaacttgagcattcggatttgcaatttttccactacttcactgcgatatgttggcatggcagcactgtttgcttttgtttcttctcctgattggttgggacctccattaaacttttcattattatcatatctggaataagaaagtttggggggtactggaataccatg

SEQ ID NO: 71942 - DNA, 600 bp, Chicken  19866894351255_1
agttccagcacaggaaacctaaacctttggtctgtatcttggtagtcagaacaaattagctgtaaatagacatggatgttgtcatctcatcataaaaaaacaattgaggtagagcagcaagcataggagaggcagagtgaggcgaagccctacagctgggaacccagctgcttggggacctccacgagagatgctcagagtaaggccagagagaaaagttaaactatgcagtactgaactaattacctcaggatgagtccaggaatgcagctacataaggcagctctggcaccccaaggsaggcagaaggaaatacaggtgtgcagacaagaattctgtatggatttgaaatgatcaaggtccaattgctggtgatattccactgtattttcaggaatggtgtttatttgctccatgcatctgttcattctctataaaatggagtaaataacatttccttctcccaggtgctgcctgtctcacctcaatgtcagcacmagctcatgccatgctgtccagccatacggtagctgccctgcttgctgagcagcagatacatggaatgaggcactgtcagaagatgtacaaatttaaatacta

SEQ ID NO: 71943 - DNA, 600 bp, Chicken  19866894351255_2
agtaaggccagagagaaaagttaaactatgcagtactgaactaattacctcaggatgagtccaggaatgcagctacataaggcagctctggcaccccaaggsaggcagaaggaaatacaggtgtgcagacaagaattctgtatggatttgaaatgatcaaggtccaattgctggtgatattccactgtattttcaggaatggtgtttatttgctccatgcatctgttcattctctataaaatggagtaaataacatttccttctcccaggtgctgcctgtctcacctcaatgtcagcacmagctcatgccatgctgtccagccatacggtagctgccctgcttgctgagcagcagatacatggaatgaggcactgtcagaagatgtacaaatttaaatactaaaattggaaattattttctaccatggacggagcctgtctgtcagcaatattccccactggagccagtctgaaacgctgtgtgtgtgtgcctggaaaatctccatgtgagcacaaggctacaggaacagcctgcaaaatgtgatggctcatatgcttaggtagatggactcttaattcctggagatgtagctgaggtaa

SEQ ID NO: 71944 - DNA, 599 bp, Chicken  19866894351263_1
  misc_feature (1)..(80): n is any nucleotide
nnnnnnnnnnnnnnnnnnnnnnnnnnnnnnnnnnnnnnnnnnnnnnnnnnnnnnnnnnnnnnnnnnnnnnnnnnnnnnnntaaagaaaggaaaaggaaaaaaaaaaaccaacaacttgatttcattttttatgggaagcctggaagaaaatgtttatttcaactgaaaattagtcccaaattatatctgtatataataggaagttgatattttccagtcatgttaattggagactgcatgccttactaaggtgcgcgacattgcagccacattgtctgcttcgtctgaaagctgtcagasctgaggggccttaaacaagaatataaatattattccaaatatctaatttcaaacagcttttggcatgttattctagtgcttgtgctyaagcttcagtagcactgaagatgtttttgtggtcttctggcctatgtttcaacagataacgttgaaattcatgcagcgttcattattagtgattattcctcactgggaacacttgttgaatgagcctttctcctgcaccagtaataggtggttgattggtgctgatttaatgatgcatagcatcttatctcctgctgagaccggagctcaca

SEQ ID NO: 71945 - DNA, 600 bp, Chicken  19866894351263_2
aggaaaaggaaaaaaaaaaaccaacaacttgatttcattttttatgggaagcctggaagaaaatgtttatttcaactgaaaattagtcccaaattatatctgtatataataggaagttgatattttccagtcatgttaattggagactgcatgccttactaaggtgcgcgacattgcagccacattgtctgcttcgtctgaaagctgtcagasctgaggggccttaaacaagaatataaatattattccaaatatctaatttcaaacagcttttggcatgttattctagtgcttgtgctyaagcttcagtagcactgaagatgtttttgtggtcttctggcctatgtttcaacagataacgttgaaattcatgcagcgttcattattagtgattattcctcactgggaacacttgttgaatgagcctttctcctgcaccagtaataggtggttgattggtgctgatttaatgatgcatagcatcttatctcctgctgagaccggagctcacargaactgccagggatgtgcctgttgagaagctgacatgggctgcatatttcatgtgctgctgaggcgtgcagccaggctgtgtagtga

SEQ ID NO: 71946 - DNA, 600 bp, Chicken  19866894351263_3
ctgaggggccttaaacaagaatataaatattattccaaatatctaatttcaaacagcttttggcatgttattctagtgcttgtgctyaagcttcagtagcactgaagatgtttttgtggtcttctggcctatgtttcaacagataacgttgaaattcatgcagcgttcattattagtgattattcctcactgggaacacttgttgaatgagcctttctcctgcaccagtaataggtggttgattggtgctgatttaatgatgcatagcatcttatctcctgctgagaccggagctcacargaactgccagggatgtgcctgttgagaagctgacatgggctgcatatttcatgtgctgctgaggcgtgcagccaggctgtgtagtgatcaaaccccagaagatgtacatatctccaattttcccatgtaacaaaaatcttgtcatctgttgacataaaagactgagataactgctctgcgaccccatatagttcttcagtctggacagatgagacaaatctaaataattgagcatgagctcctctgacttccatcatgttaatgcagtgccacatccaaaacataagacagtcttgaact

SEQ ID NO: 71947 - DNA, 600 bp, Chicken  19866894351273_1
tgttgtgacttgaaaaaaaaaccaaaggtgaaacaaacccctcaagccttttttttgtattgaagtttttaattcagctctcccttgagtagcactgctgttctggcaaatagcacaaaacaaaagcaagggcttagtccatagggaagaacagccctctgagccctggacccacccaaggctccctttaagatgtgggaaccccatgcagcagattgttttcccaaatactccccacagctccagtctgcttaagtagaagctttctggctcagaagcagagctgtttgccctccccaygtggtcagtcctttagtactggagacaagatgctgtgatccatgcaggagtkgtttgcctgctgcatctagtttggatttttaaaagtgcctaccatcagcttacatcacagccatagaggttaggacatgcaaagagcttttaaatttctttgatcaggtcagtttacatctgaaccagaagtgtatatccacaaccaaagacctgggcaaactccagagaaaccacaagccaccatggaagtgaaaggaaacaaactcactgttactaggtaggaataatgtgcttgattgctctctt

SEQ ID NO: 71948 - DNA, 600 bp, Chicken  19866894351273_2
ttttgtattgaagtttttaattcagctctcccttgagtagcactgctgttctggcaaatagcacaaaacaaaagcaagggcttagtccatagggaagaacagccctctgagccctggacccacccaaggctccctttaagatgtgggaaccccatgcagcagattgttttcccaaatactccccacagctccagtctgcttaagtagaagctttctggctcagaagcagagctgtttgccctccccaygtggtcagtcctttagtactggagacaagatgctgtgatccatgcaggagtkgtttgcctgctgcatctagtttggatttttaaaagtgcctaccatcagcttacatcacagccatagaggttaggacatgcaaagagcttttaaatttctttgatcaggtcagtttacatctgaaccagaagtgtatatccacaaccaaagacctgggcaaactccagagaaaccacaagccaccatggaagtgaaaggaaacaaactcactgttactaggtaggaataatgtgcttgattgctctctttatgactttcttctccttttaatgatctcaaactgcaggcttaattaaggat

SEQ ID NO: 71949 - DNA, 599 bp, Chicken  19866894351276_1
  misc_feature (1)..(30): n is any nucleotide
nnnnnnnnnnnnnnnnnnnnnnnnnnnnnnctgcaatttcttgtaacgatcttcgtcatatttggatcaaagtcactacccaagacatccgtactccaggtttcactcacagtttctgatatatctctgtcatcagtcaaccccatcatatcacggatttcaaatttacggagcttgtcatcaagattatcctgagttgtggctacatgaaaataaaaggtacagagttttttgaaagacccctccaactacttctaattgaaaatttacaggagtacactgaaggggaaaaaaaaaaamcacacaaactctgactctgtcagatgagatagcatttaaaagtaaaacttgtaaagtactcttatactattcaagagatggtgcctaaaagcaccgaagtatagttcaagatttttcttacacttcgaatacatttggtgacataaactaatagacaaagtaatagataaaattaacacactaacaggaaacgtaagacaattcctataaaaagaacttctcacacaattgctgaggctggaaggggtaactgaaatcccaacccctctacacagaacatggtgtattacaggttggct

SEQ ID NO: 71950 - DNA, 600 bp, Chicken  19866894351277_1
agcccaccttccatattcatgcagatatacatggcactcaataaaccatagcatttatgtaacttgttatattttcaaagcacttttcaaacaattcataattatgtctttgctgttgcatctgttcttatgtatgcaacccacactatacataggtaccatagacatgcctagttttgtttaatttctatttatttatctagaaattcaaggacaatgggtaaaactcaaagttagacccagaaatttgcactgatataaattttggcacagtacatatggaggggagaagtctctcarttacagagacacacagtaatacaagagttagatttgatgatccrtatgtgtcctttccaactcagaatatcctatgattttacattctacaggatggaattacagctccatttggctgggccatctattacgacttatttgctatactttctttctttcttttttttgttaatgcaacttagctatgactggatcctgatttcttttgtatgtgatagtttgacagatacttataagaacattgagtgcaacatctcataggacaccatgatgcattttaagtgctgctttgtactgcaa

SEQ ID NO: 71951 - DNA, 600 bp, Chicken  19866894351277_2
accatagcatttatgtaacttgttatattttcaaagcacttttcaaacaattcataattatgtctttgctgttgcatctgttcttatgtatgcaacccacactatacataggtaccatagacatgcctagttttgtttaatttctatttatttatctagaaattcaaggacaatgggtaaaactcaaagttagacccagaaatttgcactgatataaattttggcacagtacatatggaggggagaagtctctcarttacagagacacacagtaatacaagagttagatttgatgatccrtatgtgtcctttccaactcagaatatcctatgattttacattctacaggatggaattacagctccatttggctgggccatctattacgacttatttgctatactttctttctttcttttttttgttaatgcaacttagctatgactggatcctgatttcttttgtatgtgatagtttgacagatacttataagaacattgagtgcaacatctcataggacaccatgatgcattttaagtgctgctttgtactgcaaggcagattgtcatactgtggcagcggatcagttagagtttagaa

SEQ ID NO: 71952 - DNA, 600 bp, Chicken  19866894351278_1
cattccccaaatccatctctggatgctgacagcactgctggagcgctcatcctagaccaccattccctccccagacccttcgtgcccccgtccagctcccgtgctctgcacccttcgcaccccacaccagcctcctgtggggcacggatgcgctcgcaacccacgcagcgcccagcccagtgagaacacactgccacctaacatccaagccagcaaaaccacggcagattggcttcagaactatcccaggcctattatttctccttggatcttcctccagctgtctaacttaccatcaamagcaagcagtgaggctccagagcagcccacccacccgctcccgtgcccccactgtgctcctgctttggttctatgccagcaggaggaagggcactgaaccgagcagcccaggggtcaccaccagaggggcactcctccacatcagaccctctgtcagatatgaatcaattgtaaaataataacctgttggtagccatgaaataggacgtctgcgccaagtccttgctggctgcaagagagaagggaaaagctgggtgttaatccaggcttcgtgccaaacacatcttaattcaggagtga

SEQ ID NO: 71953 - DNA, 600 bp, Chicken  19866894351295_1
tgcagcattcacttaaactatgaagtgtcaagttgtaagagcataatccttttttcctggaattaaaattttttgctctctaaggcacaggatagattattctacctttcctgctgtgaatcttgaaagtatttacgtaagactttcctgtacaagtgacttactgtatataatttcttcttcattagcataatctctagtgcaagtcagttacttctgctcctgacactactttcaatggcattacaaggagctgcattgttctgttccagtgtaatggtttctatttaaaaaaaaaamaaaaaaaaccagtgcattctcatctctcactctcctacttagctaaaatttggtttctggagattgaatacctgtataatagcatattgtattgattcattcccaacaatggatttgcacagtgagatgataatttttactcttctcttcctttctcagtagtttgtagtgctcacttttctcaccagataccagacttatgttttcacagcattatatgcagtgaccttaacatcgtgttcctgtgtgttagtagttgacttatcactgtgtaggtaaagttatttttttccttgtgta

SEQ ID NO: 71954 - DNA, 599 bp, Chicken  19866894351298_1
  misc_feature (1)..(21): n is any nucleotide
nnnnnnnnnnnnnnnnnnnnntctgaggagcttttgatattaggagacaagatgagatagtcgtaaagttgggttttggtaagaatttcataagattgctaatgatatccccttgactccaaaggtgcttgtaaaactgttgttactttcatgatactgcagatacagacacaacgtgcaggagttaatgtgtaactgaaggcataaggttctctaagtatattgcatataccatcattgcagctgtttgaattatcagcaggctttgaagcgttacccaggattcttccagcaattacyggtaggattgtgctaggcaaggagactgtgtgaatagatacaggagtaattcagagtaattcaggttggaagagttagggttagggtctccagtccaaactcctgctcagagcaaggccagctctgcacttggaccagtctgctcaggatgtgatccagctgttgaccaatacccccaaggtgcccttctgcagtgccagccctcagcctctgttgttgctgagaawtatttgcagcttgctgaacatcataaagttctcgttggcatattcctcctgcttgtttatgtttctccaaat

SEQ ID NO: 71955 - DNA, 600 bp, Chicken  19866894351298_2
tataccatcattgcagctgtttgaattatcagcaggctttgaagcgttacccaggattcttccagcaattacyggtaggattgtgctaggcaaggagactgtgtgaatagatacaggagtaattcagagtaattcaggttggaagagttagggttagggtctccagtccaaactcctgctcagagcaaggccagctctgcacttggaccagtctgctcaggatgtgatccagctgttgaccaatacccccaaggtgcccttctgcagtgccagccctcagcctctgttgttgctgagaawtatttgcagcttgctgaacatcataaagttctcgttggcatattcctcctgcttgtttatgtttctccaaatgatagcctgccgtatatgctttgaatttttcttgtaagttttatgaatatatttatttcatttttagtttgcttactatttcttcagatgaaactgattcctcattgccagatttttttcctttcataccaaactttgtaagtttgccttttgagcattttagagattgtgcatataagctgtagtttcaggctacagctaagtactagccatgctttcctgccttct

SEQ ID NO: 71956 - DNA, 600 bp, Chicken  19866894351306_1
cagaagagacaaaatgaatacccttcgcaaatctcagtaccagtcttggcaggagatatcactgagggctgagcttcattaaaggagcaaacaaaacaaacaaaacaaataaacaaaaacccatcctttcccagaaaaacaatgactctggatcaccccatcgcattcactgtgtatttgttttgaaaatactccaaaaggggcatggttacttatgtcaatgttgccaaatgcttgattacacaaacactaccatctggaggaaaaaaaaaaagatttagaggctgtttagccataacsaactacattttaactctgagatatgcatgtatgtgcctgggaggtctcagctggagagtccacacagctctaagacatgggagctcccacagcttctgaagcggactgatggggtgaccgccacagcaatttccagaaatagtgggccaaatcttcaccaactcatttccttgaaatagggctggattcctggcacaagagcatttatcctctcatgtggagatgcattactctctgagggattctgggcacgctaatagaaaacattttcaccctcaccaccggccattgacatgtagc

SEQ ID NO: 71957 - DNA, 600 bp, Chicken  19866894351312_1
gtaggagcatttaccaaaagcccatgaggttactgccttcttagaaaatagcttgtatgtgttgtttgcttactgctgtagtagagctaagctgtatcttaatgttagagtgctgcttttaccagcccggcactgagctgcagctgtggctgttactgaccgctatgctgtggtgtgacactcctcctgggcaacaaaaatacagttaccggaggttcttgcaggcttcttgttgagttttctatcttccagtctcttctggaggataatactgcattctgtttgctgcacctttgtgtrtaggtaggggtatggtgactcttgtgtgtcttttgggaacttctctgtgttagagaccaacagcagagacagctggctgattgctcatgtgttcctcagcaggcagatggagcaaaaagcatgacagtctttttggcactgtttcagctacacttgccctctgcacaaaggacttttgtattttccattgcactgaggatccttgtatagcaaaataaatcatgccaggaaaattaagtatatggggtacttgtacccgttgtgacttcccactgtcatggtccttctatgtttgtgatt

SEQ ID NO: 71958 - DNA, 600 bp, Chicken  19866894351317_1
tttcaagcacgtgagaaaatgtcaaaatatccaaatgaacaactgttaattcaaacagcatcatacactctcagaaggtctgataaacccgtcagaatcaaaggtgcttacaaaaaaaagcatgcttcttcttggcaatccaagcttgctgctttcattgtgcataaattcagagcatcacagcaatgcttatcagtctcaaggaaaggaaatacaagaggtggtgactggcagatgattcctctctggaaatgataaaaaaccctacagaatatgtcctgcccagtaaaaattagttgkttttttttttctgcctgaagttgtcatcaaatagtggtgcttgcccctcaccagcattcactgatattggaaaggttagactacatttccaaggtaaaagtcacatttagctgaagaaagttggatttaccaaaggcctamctgctgccgtgagggtggagattggaattttaccacaatttaaggagttggacttcatgatctctaggagtctcttccaacttgggtaattctgtgattytaactgtgtgcatttggagatgggaaaatgaaaaagagctgcatctacaaattgcttat

SEQ ID NO: 71959 - DNA, 600 bp, Chicken  19866894351317_2
aagcttgctgctttcattgtgcataaattcagagcatcacagcaatgcttatcagtctcaaggaaaggaaatacaagaggtggtgactggcagatgattcctctctggaaatgataaaaaaccctacagaatatgtcctgcccagtaaaaattagttgkttttttttttctgcctgaagttgtcatcaaatagtggtgcttgcccctcaccagcattcactgatattggaaaggttagactacatttccaaggtaaaagtcacatttagctgaagaaagttggatttaccaaaggcctamctgctgccgtgagggtggagattggaattttaccacaatttaaggagttggacttcatgatctctaggagtctcttccaacttgggtaattctgtgattytaactgtgtgcatttggagatgggaaaatgaaaaagagctgcatctacaaattgcttattcactgtgagagagagaagagggaatttcctttgagatgagagcttatttattaatggactgaaactgtaaagatattttaaaaatggagaagcagagacagacatcctgcatcgtgagccacgtgcactgacgtagggat

SEQ ID NO: 71960 - DNA, 516 bp, Chicken  19866894351317_3
ctctctggaaatgataaaaaaccctacagaatatgtcctgcccagtaaaaattagttgkttttttttttctgcctgaagttgtcatcaaatagtggtgcttgcccctcaccagcattcactgatattggaaaggttagactacatttccaaggtaaaagtcacatttagctgaagaaagttggatttaccaaaggcctamctgctgccgtgagggtggagattggaattttaccacaatttaaggagttggacttcatgatctctaggagtctcttccaacttgggtaattctgtgattytaactgtgtgcatttggagatgggaaaatgaaaaagagctgcatctacaaattgcttattcactgtgagagagagaagagggaatttcctttgagatgagagcttatttattaatggactgaaactgtaaagatattttaaaaatggagaagcagagacagacatcctgcatcgtgagccacgtgcactgacgtagggatgtctcggggcaagatg

SEQ ID NO: 71961 - DNA, 600 bp, Chicken  19866894351323_1
tgaaagatactttcaggtttttgacaggattcttttcatgtgaatttaaatgacatgggcaacttatatttaattacacacacagatgagatcagtataggcattaagtttgactgctgtaattgatttttctgtttccattcctcaacacctctcaatggagaaagagtgactcagttctgcgatggggcttattgtagacctatgttttcattctttcagactttaatatttgcagtgtatcttagttgtgagtcctttaattgaggcagaaaattggattatcatcatttgagcagwaagcacagcctgaagatgtgttttgttttatccctgctgctgtaactaatgctttcctacatttgtgtaatatgggccaggcctatacaaggtaaggggagttatttgaaaacttgttggaagtcctgtccattctctgaacaaagctgatttgtacgcaggcagcactcaaacaggcagtgcatctgatgtatgttaatatgccaacttcaggctcctgcagtatgggtcagcaagctgctgagtagagtgactttgcctggtttggatgctaaagtggtatttcagtatgtaatcaac

SEQ ID NO: 71962 - DNA, 455 bp, Chicken  19866894351323_2
acaaggtaaggggagttatttgaaaacttgttggaagtcctgtccattctctgaacaaagctgatttgtacgcaggcagcactcaaacaggcagtgcatctgatgtatgttaatatgccaacttcaggctcctgcagtatgggtcagcaagctgctgagtagagtgactttgcctggtttggatgctaaagtggtatttcagtatgtaatcaactaagtgtgaactctggaggcagtgatgtaactaagaaagttcctgagtataaaatcaaggctgtacagcatcagaaagaacactgmtaaaactttatgtcccactctgatatttcagtagttccgctaagaaaagtctcaaaaaagwctcaaccgtatgagkagagctgtatgtgtgatcttgaaagctatgactgaaaggtgttcagtgaagaaacaaagaaataagccacagctcttta

SEQ ID NO: 71963 - DNA, 394 bp, Chicken  19866894351323_3
tgatttgtacgcaggcagcactcaaacaggcagtgcatctgatgtatgttaatatgccaacttcaggctcctgcagtatgggtcagcaagctgctgagtagagtgactttgcctggtttggatgctaaagtggtatttcagtatgtaatcaactaagtgtgaactctggaggcagtgatgtaactaagaaagttcctgagtataaaatcaaggctgtacagcatcagaaagaacactgmtaaaactttatgtcccactctgatatttcagtagttccgctaagaaaagtctcaaaaaagwctcaaccgtatgagkagagctgtatgtgtgatcttgaaagctatgactgaaaggtgttcagtgaagaaacaaagaaataagccacagctcttta

SEQ ID NO: 71964 - DNA, 379 bp, Chicken  19866894351323_4
cagcactcaaacaggcagtgcatctgatgtatgttaatatgccaacttcaggctcctgcagtatgggtcagcaagctgctgagtagagtgactttgcctggtttggatgctaaagtggtatttcagtatgtaatcaactaagtgtgaactctggaggcagtgatgtaactaagaaagttcctgagtataaaatcaaggctgtacagcatcagaaagaacactgmtaaaactttatgtcccactctgatatttcagtagttccgctaagaaaagtctcaaaaaagwctcaaccgtatgagkagagctgtatgtgtgatcttgaaagctatgactgaaaggtgttcagtgaagaaacaaagaaataagccacagctcttta

SEQ ID NO: 71965 - DNA, 599 bp, Chicken  19866894351325_1
  misc_feature (1)..(113): n is any nucleotide
nnnnnnnnnnnnnnnnnnnnnnnnnnnnnnnnnnnnnnnnnnnnnnnnnnnnnnnnnnnnnnnnnnnnnnnnnnnnnnnnnnnnnnnnnnnnnnnnnnnnnnnnnnnnnnnnnctgagtactgtaccacctcactgcctttgttcccctggaggggcagaggcattagcccacatcctctccttcacctgggaggaaggagggagagaagctccccaccccaaagccacgcatgggtacaaaggaagttgagcagagttgggcagaaagaagggcaaaatataggggtgcacaaagtatrgggatgccacgtgctgcctcatctacccagccttccctgacaccaattaatctgaagrtggaaaggttctrgggaagaaaaagcacacagctgcagggaaaggttggtgaaccacagataatgttggtcccagaaaggcagtgggctcatggcttcrctgcaacaaccagtccsggggcagaatgggatttggttttcagttcttccctttccaaacctcactgtctggctcagataggggtggctgagggcaagccaccaccttgggaaatcactgtgcagaagtcatcgtgcttgtc

SEQ ID NO: 71966 - DNA, 599 bp, Chicken  19866894351325_2
  misc_feature (1)..(55): n is any nucleotide
nnnnnnnnnnnnnnnnnnnnnnnnnnnnnnnnnnnnnnnnnnnnnnnnnnnnnnnctgagtactgtaccacctcactgcctttgttcccctggaggggcagaggcattagcccacatcctctccttcacctgggaggaaggagggagagaagctccccaccccaaagccacgcatgggtacaaaggaagttgagcagagttgggcagaaagaagggcaaaatataggggtgcacaaagtatrgggatgccacgtgctgcctcatctacccagccttccctgacaccaattaatctgaagrtggaaaggttctrgggaagaaaaagcacacagctgcagggaaaggttggtgaaccacagataatgttggtcccagaaaggcagtgggctcatggcttcrctgcaacaaccagtccsggggcagaatgggatttggttttcagttcttccctttccaaacctcactgtctggctcagataggggtggctgagggcaagccaccaccttgggaaatcactgtgcagaagtcatcgtgcttgtccccatccctcaagggaggcgatggaagatttttaatgacaagcactccaactccctaa

SEQ ID NO: 71967 - DNA, 599 bp, Chicken  19866894351325_3
  misc_feature (1)..(42): n is any nucleotide
nnnnnnnnnnnnnnnnnnnnnnnnnnnnnnnnnnnnnnnnnnctgagtactgtaccacctcactgcctttgttcccctggaggggcagaggcattagcccacatcctctccttcacctgggaggaaggagggagagaagctccccaccccaaagccacgcatgggtacaaaggaagttgagcagagttgggcagaaagaagggcaaaatataggggtgcacaaagtatrgggatgccacgtgctgcctcatctacccagccttccctgacaccaattaatctgaagrtggaaaggttctrgggaagaaaaagcacacagctgcagggaaaggttggtgaaccacagataatgttggtcccagaaaggcagtgggctcatggcttcrctgcaacaaccagtccsggggcagaatgggatttggttttcagttcttccctttccaaacctcactgtctggctcagataggggtggctgagggcaagccaccaccttgggaaatcactgtgcagaagtcatcgtgcttgtccccatccctcaagggaggcgatggaagatttttaatgacaagcactccaactccctaaggataataaacac

SEQ ID NO: 71968 - DNA, 600 bp, Chicken  19866894351325_4
agaggcattagcccacatcctctccttcacctgggaggaaggagggagagaagctccccaccccaaagccacgcatgggtacaaaggaagttgagcagagttgggcagaaagaagggcaaaatataggggtgcacaaagtatrgggatgccacgtgctgcctcatctacccagccttccctgacaccaattaatctgaagrtggaaaggttctrgggaagaaaaagcacacagctgcagggaaaggttggtgaaccacagataatgttggtcccagaaaggcagtgggctcatggcttcrctgcaacaaccagtccsggggcagaatgggatttggttttcagttcttccctttccaaacctcactgtctggctcagataggggtggctgagggcaagccaccaccttgggaaatcactgtgcagaagtcatcgtgcttgtccccatccctcaagggaggcgatggaagatttttaatgacaagcactccaactccctaaggataataaacacagggcttacagaaacaacaggaacattaactggtttggccttaaatcaaaacactggatgattcttgagaaagaaaaagaaaaaaaa

SEQ ID NO: 71969 - DNA, 600 bp, Chicken  19866894351325_5
tcctctccttcacctgggaggaaggagggagagaagctccccaccccaaagccacgcatgggtacaaaggaagttgagcagagttgggcagaaagaagggcaaaatataggggtgcacaaagtatrgggatgccacgtgctgcctcatctacccagccttccctgacaccaattaatctgaagrtggaaaggttctrgggaagaaaaagcacacagctgcagggaaaggttggtgaaccacagataatgttggtcccagaaaggcagtgggctcatggcttcrctgcaacaaccagtccsggggcagaatgggatttggttttcagttcttccctttccaaacctcactgtctggctcagataggggtggctgagggcaagccaccaccttgggaaatcactgtgcagaagtcatcgtgcttgtccccatccctcaagggaggcgatggaagatttttaatgacaagcactccaactccctaaggataataaacacagggcttacagaaacaacaggaacattaactggtttggccttaaatcaaaacactggatgattcttgagaaagaaaaagaaaaaaaaaatgcatttcagctgtg

SEQ ID NO: 71970 - DNA, 600 bp, Chicken  19866894351328_1
tcctttcaggcaaggatagttttttacacacagggagcaaagtgtgaagagggcacaacccccctaatacaaccatagaaccattaagattggaaaagacatctacgataatccagtccaaccatcaactcgttaccaccatacccactaaaccacatccctaagtatcacatctaaatgtttcttgaacacctctaggggaataataatttggataaaattttgaaagaatatttgcttttgactgggaagaaaataaattggaaagttcactctgtggagaaagaaggactccacctkaaattgccttattcaagctattaccatcacttctgctggaggaggagagacatgatgtgacacgatgtgcagactgctcagcatatggttacagaagacagttgctgatggcttacaaaaaataaaaaatcagcttctcagcagagacagcaacatatttcctttaaaaacaaaagcatattgtttgtcgcatttccctctgactgccaggagcctcgtggcatgtatggttcctggtgtttggcacctcacagcagtcctgcttgctgagcaaaaatccacctgccgccctgggggagg

SEQ ID NO: 71971 - DNA, 599 bp, Chicken  19866894351343_1
  misc_feature (1)..(131): n is any nucleotide
nnnnnnnnnnnnnnnnnnnnnnnnnnnnnnnnnnnnnnnnnnnnnnnnnnnnnnnnnnnnnnnnnnnnnnnnnnnnnnnnnnnnnnnnnnnnnnnnnnnnnnnnnnnnnnnnnnnnnnnnnnnnnnnnnnngcggtgcggggagacgacgtaggccgtcatgttggggaaggatgcgccgacgcgttggatgatcttcaacagccccttctgcatcttggccggcggcccccagaagatgaggacggtctccggggtcttattgacgaactcttggggcctcttgaggacgcggtagatrctggagtgggccaccacgcggaaggtggtcttgttgcccacatcggcctcgtagccggtggtgggagcgtcgttcatgcggatggtgcactcggcttggtcgatctcagcacccaggtgggtgcccaggaggtggctggagctggtgacgatggcgcattggtggcagtgggcagtcaggctctgaggcgatggacacaatgagtccagaccaaagggaccccaaaacacggggaccccaaaccgaggggagtccaaaccatagggagtccaaaccaaggggctttcagtgtcccaccc

SEQ ID NO: 71972 - DNA, 457 bp, Chicken  19866894351346_1
agacttaatcattggaatctaactcggggggtcataaaatggaagaaagtaatttgttttatttcaatatctactcaatgtaaaaatgtgtgaatggttctgggaacaaagacagaaaccagacatgagctggaaacaaaagaagtgaatagaaaaagtactgggttcacggactgggtcccagggcttgcctttcttggctgagtgcttgtgctgcaaagcatgcacaggttcagggctgctctgtcagaccccctgatcccagaatggggcagagggaatgcaccggggtgctagggmtgaggcagtcctgagcagctgcagcagcagaaatacagctwcaagggagaagaggaaggcacttaataatttcgggtgatttttatgttaggtggtcaaggaataagttttatttttaatttctgtctgaacctgtagtgcccaaactataaataga

SEQ ID NO: 71973 - DNA, 416 bp, Chicken  19866894351346_2
gaagaaagtaatttgttttatttcaatatctactcaatgtaaaaatgtgtgaatggttctgggaacaaagacagaaaccagacatgagctggaaacaaaagaagtgaatagaaaaagtactgggttcacggactgggtcccagggcttgcctttcttggctgagtgcttgtgctgcaaagcatgcacaggttcagggctgctctgtcagaccccctgatcccagaatggggcagagggaatgcaccggggtgctagggmtgaggcagtcctgagcagctgcagcagcagaaatacagctwcaagggagaagaggaaggcacttaataatttcgggtgatttttatgttaggtggtcaaggaataagttttatttttaatttctgtctgaacctgtagtgcccaaactataaataga

SEQ ID NO: 71974 - DNA, 600 bp, Chicken  19866894351348_1
agtaaatcctgtgttccagtaataactgtaaactttgtgttgaacctcatgctgtgagtattgattactgctttatttagaggtcaaagacaggaaaggtctattccttttcatagaatttacgctgaagatgtaagcagaaaaagcaagtaagagaagtttcatacctgatcacatgcctaaaactctaccctaatgtgtgtttctctgctgaaaattaaaatattctactaaatattactaaatatgtgtgctgattgctgttttattttgaaagcagtttgagccaagatcagttartgttctgtagttatcccattttctgctttcattctctgttaacacagttgcttatgtttcctcacagtatgcttttttcctgaaagataaaaatgggatgatgcagggggttttgtttaagtgattttctgctatgtgctcaaacatgtgaccccaaaacagcagaatatgctttaccttcacctcccatttctttggttttattacatttctttcattatgcttgtttttcragttggatgtggagttttagacaaaggttcagaacctgcttatattttactgaaggtccagatggac

SEQ ID NO: 71975 - DNA, 446 bp, Chicken  19866894351348_2
aatattactaaatatgtgtgctgattgctgttttattttgaaagcagtttgagccaagatcagttartgttctgtagttatcccattttctgctttcattctctgttaacacagttgcttatgtttcctcacagtatgcttttttcctgaaagataaaaatgggatgatgcagggggttttgtttaagtgattttctgctatgtgctcaaacatgtgaccccaaaacagcagaatatgctttaccttcacctcccatttctttggttttattacatttctttcattatgcttgtttttcragttggatgtggagttttagacaaaggttcagaacctgcttatattttactgaaggtccagatggactcgaatgagtagcatttgcatctgggttaggaacgcgctaggtctctggtacagagagaggaggacagcagattcaaat

SEQ ID NO: 71976 - DNA, 600 bp, Chicken  19866894351353_1
tatcaggcataaaccctgtataaacacacagtgaaggactgttttccccctagagatatttgcagaggctaaactgagaatctaacaaaatttatcacgctctatactttgtaaaacaaaaacgtctaattgtgtcactcctgaataacagctgagtgcagtgcataggtttttatcagtgatcatgtctctgaacagaacagtttccttttttctaaagctctataaggtatccaatggctcaacctgagtattctttttcaagtggatgaaagtatggaccagctcaggatgagttayattacaatccagaattgctccagtctagaacgtcttgaagcttgcttactcttccgcccattcccaggcataagtattcaactgtgctctttagactgtgtatggtcacagaggagcagaacagccaccagyagtgccacatactaccattgaaaactttctgcattttttggcatagcttagaaaagatcatctaggtgaagactgactagttttagctgtatccagcaaaagaaaggtttttctagtagatacaagagggtgttttgaagctcttgtcttctcagtattgccagttct

SEQ ID NO: 71977 - DNA, 473 bp, Chicken  19866894351353_2
tgtcactcctgaataacagctgagtgcagtgcataggtttttatcagtgatcatgtctctgaacagaacagtttccttttttctaaagctctataaggtatccaatggctcaacctgagtattctttttcaagtggatgaaagtatggaccagctcaggatgagttayattacaatccagaattgctccagtctagaacgtcttgaagcttgcttactcttccgcccattcccaggcataagtattcaactgtgctctttagactgtgtatggtcacagaggagcagaacagccaccagyagtgccacatactaccattgaaaactttctgcattttttggcatagcttagaaaagatcatctaggtgaagactgactagttttagctgtatccagcaaaagaaaggtttttctagtagatacaagagggtgttttgaagctcttgtcttctcagtattgccagttctcaaaa

SEQ ID NO: 71978 - DNA, 600 bp, Chicken  19866894351359_1
aagaataaggattataaccatctgatatgattttttattttttcagtcaaattatgtaaatccctccttgcataaacccaatctattcctctggaatataaatctgtcaaaattgagaaagatgtaaataaatgaatgaatgaataaataaataaataaataaataaatttctctcttacggactctgaaagaaggtagcctttttaaattccttgaagaataatttttataaggaacaaaccattcttccaaggaatgtttcctgttttccttacatacattttgaagtcaatctgaaygggtcagaagacctgccatgctgtggtggggcatcttgcctgtacaagcctagcttgtttatcatattggaacagatatttttcctggtgagaaagaaaccttccttttcagccaaagtaatagatttcatgctaaaatgtcacttgaggaaattactctgaagaaagaaattggcaagcaagaaaatcaggtgtttgtatgatacttggacttaagcaacaacttctggagccctggatgtgagagggattattggagattggtgaagaatctgtaaagcagccaaagaaaactgaaca

SEQ ID NO: 71979 - DNA, 600 bp, Chicken  19866894351361_1
atgactcatgaaatcttacagctcttaaacaaactcttaaatccagttaactgtaagtgaaatcatttctaccaagtttgaatcctttctaccgagtgcacatcagccagcactgacctgacgctgtgcagctgtacccttccagctcacatgttgagaattgacatctatgttcccaaggtgtgttttgagagacactgataacctctgacggatccatgtgaaaaaggggatatgctctctgacacgaagctccgaagttacaatctttagctataggttttcaactatctgattctsctaaggtaaaaccaaaacaagcctaagctttgattctgattagattttgattctgaatgattctgattctgatccacaggcactttcccccccacacactaaagattaaggacacgcttgtgaagatatgttaggaaaaggacctggaaactccctgagaaaaagtaccttggcttcccaaggaatctcaccatatgccctacccccccygtaacctctctcacctgtagcccaggttggctcacagctagctcacctcatcartcaggtagtagaagcttcttgcmatatgggytcatc

SEQ ID NO: 71980 - DNA, 600 bp, Chicken  19866894351361_2
acggatccatgtgaaaaaggggatatgctctctgacacgaagctccgaagttacaatctttagctataggttttcaactatctgattctsctaaggtaaaaccaaaacaagcctaagctttgattctgattagattttgattctgaatgattctgattctgatccacaggcactttcccccccacacactaaagattaaggacacgcttgtgaagatatgttaggaaaaggacctggaaactccctgagaaaaagtaccttggcttcccaaggaatctcaccatatgccctacccccccygtaacctctctcacctgtagcccaggttggctcacagctagctcacctcatcartcaggtagtagaagcttcttgcmatatgggytcatcacctctgcatatcaacaactttgatgtgcttctctttatcctaagagatgctgagtttctaatcctcagctatcctactagctggcacgagcagacctcrttttccagctgtggctaagacatttcccttcatggtgtttcggatgtaactggtttatcttttggtgcagcatgaggatgattaattcagcgtcccctcatctgactctt

SEQ ID NO: 71981 - DNA, 592 bp, Chicken  19866894351361_3
aatctttagctataggttttcaactatctgattctsctaaggtaaaaccaaaacaagcctaagctttgattctgattagattttgattctgaatgattctgattctgatccacaggcactttcccccccacacactaaagattaaggacacgcttgtgaagatatgttaggaaaaggacctggaaactccctgagaaaaagtaccttggcttcccaaggaatctcaccatatgccctacccccccygtaacctctctcacctgtagcccaggttggctcacagctagctcacctcatcartcaggtagtagaagcttcttgcmatatgggytcatcacctctgcatatcaacaactttgatgtgcttctctttatcctaagagatgctgagtttctaatcctcagctatcctactagctggcacgagcagacctcrttttccagctgtggctaagacatttcccttcatggtgtttcggatgtaactggtttatcttttggtgcagcatgaggatgattaattcagcgtcccctcatctgactcttacctctcttctgttgctctcacacttggccctcctgacacgactag

SEQ ID NO: 71982 - DNA, 569 bp, Chicken  19866894351361_4
ctatctgattctsctaaggtaaaaccaaaacaagcctaagctttgattctgattagattttgattctgaatgattctgattctgatccacaggcactttcccccccacacactaaagattaaggacacgcttgtgaagatatgttaggaaaaggacctggaaactccctgagaaaaagtaccttggcttcccaaggaatctcaccatatgccctacccccccygtaacctctctcacctgtagcccaggttggctcacagctagctcacctcatcartcaggtagtagaagcttcttgcmatatgggytcatcacctctgcatatcaacaactttgatgtgcttctctttatcctaagagatgctgagtttctaatcctcagctatcctactagctggcacgagcagacctcrttttccagctgtggctaagacatttcccttcatggtgtttcggatgtaactggtttatcttttggtgcagcatgaggatgattaattcagcgtcccctcatctgactcttacctctcttctgttgctctcacacttggccctcctgacacgactag

SEQ ID NO: 71983 - DNA, 561 bp, Chicken  19866894351361_5
ttctsctaaggtaaaaccaaaacaagcctaagctttgattctgattagattttgattctgaatgattctgattctgatccacaggcactttcccccccacacactaaagattaaggacacgcttgtgaagatatgttaggaaaaggacctggaaactccctgagaaaaagtaccttggcttcccaaggaatctcaccatatgccctacccccccygtaacctctctcacctgtagcccaggttggctcacagctagctcacctcatcartcaggtagtagaagcttcttgcmatatgggytcatcacctctgcatatcaacaactttgatgtgcttctctttatcctaagagatgctgagtttctaatcctcagctatcctactagctggcacgagcagacctcrttttccagctgtggctaagacatttcccttcatggtgtttcggatgtaactggtttatcttttggtgcagcatgaggatgattaattcagcgtcccctcatctgactcttacctctcttctgttgctctcacacttggccctcctgacacgactag

SEQ ID NO: 71984 - DNA, 456 bp, Chicken  19866894351361_6
aaagattaaggacacgcttgtgaagatatgttaggaaaaggacctggaaactccctgagaaaaagtaccttggcttcccaaggaatctcaccatatgccctacccccccygtaacctctctcacctgtagcccaggttggctcacagctagctcacctcatcartcaggtagtagaagcttcttgcmatatgggytcatcacctctgcatatcaacaactttgatgtgcttctctttatcctaagagatgctgagtttctaatcctcagctatcctactagctggcacgagcagacctcrttttccagctgtggctaagacatttcccttcatggtgtttcggatgtaactggtttatcttttggtgcagcatgaggatgattaattcagcgtcccctcatctgactcttacctctcttctgttgctctcacacttggccctcctgacacgactag

SEQ ID NO: 71985 - DNA, 600 bp, Chicken  19866894351366_1
gcattacatgcttatttttttttgctgtgttgtatactaccaggtcattaatcattagtagaaagagtaaaggtcccaatttagtgccctggggagacatctccattaatcgcttgccaattcgaggggacacaattgactttaacctgctggctacggtccataggaaaagctctgacccatttaatcagcctggaatgtgttccataacctttcaagttggatcatcgaatgtcaagttctgtcgaaggctttacttagtcaaccatgactggtaacctccttatcttttcatgtcaraggtacaatagttttatcaacatgtgtggctatttattttttttaaagctgaaaaactgtgttctgtccaaatggttttgaaagatttactgtaacggcactggtaacatattttatgcacaagcttaatgaaaaagtgaaatttctaagtgctcttttttttctctgtacttttatctgcactatgaatagtaagcatatttagtctgcttcaatagtaaatttcttcagagacttgataaaaattaatagaagaccctccagtttctgatacatagtgggtgctttcctttcctctat

SEQ ID NO: 71986 - DNA, 600 bp, Chicken  19866894351369_1
gagataacaaagccaccattttacacacgaagtaaaacaaacatttgccatatttcaaatattttattttagtacttttaaatatgttttaatacaacaaagatataaaacaatatattaattcaatctgagtttataatcaaacaatatttacttatttacagtacttgcttcaaacttcactggcataccttctagccattacataatactattttctctgccatagacaaattgaagtaactgctcagtgtgaaaactcattttcctatatccctactatgttatggaacacgcacratgcagtttgtgcttactcacatgtgacaattttttcatatttgacaaaaccgaattcaaagagacagcaataccaagttacacgttgtctttaactacataaccactgggctaacatgtcaggttattgtcctccacagtcaccatctgaagttcttatacacctactacaaactggctttaaaaacatgcacgtcactgaattatgtacataatgctcactgcacctttctcaagatacaaacagtaagtatccaggaaactgctataagcaaagttcagagttcacaacagcatagt

SEQ ID NO: 71987 - DNA, 600 bp, Chicken  19866894351369_2
tacataaccactgggctaacatgtcaggttattgtcctccacagtcaccatctgaagttcttatacacctactacaaactggctttaaaaacatgcacgtcactgaattatgtacataatgctcactgcacctttctcaagatacaaacagtaagtatccaggaaactgctataagcaaagttcagagttcacaacagcatagtgcttgaagggctgtgagggttttttgaatgcttttctcaatacaacaagcaagacatctgcacaatcacttcaaaggccttttttccaccccaccycccccaggaaacacagtttcaatttaagaagtggcaacgtcaaagatgcatcagaaagagtgagtctattaatcatcagtggtctagcaattaatccttgtttcatagtctatatgcacaaaataattccgaggacaagctggctcactgccaggagctctgctgaattgacttcctgcttaaagattctggtgttttctatagttacaggtttttataaagcaatcctagattattaaagaagtgaaatcaaaaagccacagaagtaatacaaacgccaattccagcaaactccccacc

SEQ ID NO: 71988 - DNA, 600 bp, Chicken  19866894351375_1
gcacaaggagctaggaggggacagaactaggacagctggcctaaaccttacaaagggatgtgccataccacatggcactatgtgaaaaaaaaactataaaactgatggttgatggccaggacaaggagtgctgctcagggcctggctgggcattagtcaaagagctgtaagaaactgttttgtgcatcacttgttttgtgtatatatatctatgtatatatataatgactaacattactgttatttctatcttccttttctgtcctaataaatagtttttatttcaacctatgagtttgmtgggtgaaaccacaataatatggccctccaatttaaagcacactgcttgtttgtattcagctgaatacattccttacccctatctaagattgtaatgaacaagacgggtattcaccccagaatacttttcctgcatcttagagcccaacaaaatgaagtggaggggaaatataagtaactatataccactaccaggatctcattgccaaaacttatcaatgtagacctcatcaaggaagcaatctatgtctttgtattatcaatgatttaaactgatgcctgcagatggcagtctaacgg

SEQ ID NO: 71989 - DNA, 600 bp, Chicken  19866894351378_1
tcaatgaaagaaaggctatcatgatgaaatcctgtccccacgatgaaatcagcagtaaccagctttagctttgagtccacttgctacaagagcagtttccaccttccttatcaaattacaaatctgatacaagaaaaaatactttgtttttgtttctgtgttctctaataactttccatcttcacatttaggatgcggagttgaaaagggtttttactcgctgcacacgctgtgcaaaaacaggagtagagacatttacaaaaatacaacaaacaaacaaacaaacatcaacaacaaaakcaaccaatgcagctgaagagccctctctgcagttttccgtgagagaaatactgtactctccattctcacgtggacactctgtagtggcagaaaggattcccaattatactctaacactgtgcagagccagtgggttgagtagccactttatcccagacgcatgcagcttgcacagctttgctgcctctctctccatcacaaatacacaatacagaaatgccagacttggcaagagcaggctgatgatattaccgaagagggtttcttgataagatcatcatctgtttctggactctcggg

SEQ ID NO: 71990 - DNA, 600 bp, Chicken  19866894351387_1
actgagaaaacacaatgtgctgccccagccggccgtggctgcactatttcaggaggggaggagagggtaaaaaagcagatgtcagccactcattcaaaggcagtcactcagagctgctcaggccaaggctcccccacagcacaagacatgtagcagagcaatgagagctctctctgccacacacattcttatttgaaaggcagcaagtcactgactgtgctttagcattcctcagcagccacagctgtattatagcaagtctgttattccagatagctagagggaaaagtacctgcatgrggtggtgtgagcttcggcctctaattgcacagtgatgtcatccacgagatttaacttgtgcttctgaccccacatcagaattttgatggaagtagtgcacagagctaaagcgtttggctcctcttcagtaatacacctatactgtcttgctggtcttcttcctcttttaaaaccagggacaaaccaagtataaaaaggtacataaatgtttcctctatcaggaaaggttcctatttccaagcctgaatctgcatattgtgattgttttaaaatgtgagaagtaaaagttacattggaatg

SEQ ID NO: 71991 - DNA, 600 bp, Chicken  19866894351411_1
atttcttgacgtgtaagtttagtggagcctttgcaatgggacaccttctgtttgtcttttgtatgaagtaaccagcatgttgcctgtgcttcagtttgctcgcttgtagcttttgagctatagcagctcatggtcgtgtcttccttcagtttttttgtgtgacttggccatgaaattcatcacttgaccatcagtgaaatgatgccatccattaccacgaagacaaacttaggttttgatattgtgttttcttggaacattgagatctccagctcttactactggtttgctccttcttgstgatggaagagcaatttaccagagctgatgactgtaaatatcatgccctgagaatgaattccatgcttccctctgtctttagagtgagaactctaggcttgttggcagcaagtaaagccatttatgatttttgtagcagaaatctgcattattgatatttcctgatatttccttagtaagagtgaaactgagaggttttcttgcactgataaagtgactctcatggaagagtaacagtatagaacgtgggcgctgtaaatttcaacatatcgtttttgaatgtgatactcagatctggat

SEQ ID NO: 71992 - DNA, 600 bp, Chicken  19866894351418_1
catgctataaaatactaagtgctcaccaaaaatgaatcaatggaaaaaaaaccctaaccctttttactctaaaagctaatgaactatgatttctttttatttgtcttttgggtttaaaacctccagacctcattttcaaactctttttctgaatccaagagagctagtttattttctaaagtaaatagagagaggtcagcagagcctctcacaagtacaaaggagcctgggctttaagatttcaagtgattatgacacaagcagcttaagcattctcagcaatgaatttttttttccttmcaaccccamgataaatataatctgctcaaaratgttaacctaccggacaggtcyccttgctgtagaaatacacatttgtatacgtggaggtgygacgttaccacaacaatgaatctgctgactgtggaaggtaccctgtctatcctgggacctggggtaggaacatttaatcctggctttgccattatgacctggtattttttcctctatttttttttctttcccctgtgaaatagaaatgccacagctagcacctgcagactgggcatctatctgctagagcagatagatgagtttggt

SEQ ID NO: 71993 - DNA, 600 bp, Chicken  19866894351418_2
aaatactaagtgctcaccaaaaatgaatcaatggaaaaaaaaccctaaccctttttactctaaaagctaatgaactatgatttctttttatttgtcttttgggtttaaaacctccagacctcattttcaaactctttttctgaatccaagagagctagtttattttctaaagtaaatagagagaggtcagcagagcctctcacaagtacaaaggagcctgggctttaagatttcaagtgattatgacacaagcagcttaagcattctcagcaatgaatttttttttccttmcaaccccamgataaatataatctgctcaaaratgttaacctaccggacaggtcyccttgctgtagaaatacacatttgtatacgtggaggtgygacgttaccacaacaatgaatctgctgactgtggaaggtaccctgtctatcctgggacctggggtaggaacatttaatcctggctttgccattatgacctggtattttttcctctatttttttttctttcccctgtgaaatagaaatgccacagctagcacctgcagactgggcatctatctgctagagcagatagatgagtttggttgcccagag

SEQ ID NO: 71994 - DNA, 600 bp, Chicken  19866894351418_3
atgaatcaatggaaaaaaaaccctaaccctttttactctaaaagctaatgaactatgatttctttttatttgtcttttgggtttaaaacctccagacctcattttcaaactctttttctgaatccaagagagctagtttattttctaaagtaaatagagagaggtcagcagagcctctcacaagtacaaaggagcctgggctttaagatttcaagtgattatgacacaagcagcttaagcattctcagcaatgaatttttttttccttmcaaccccamgataaatataatctgctcaaaratgttaacctaccggacaggtcyccttgctgtagaaatacacatttgtatacgtggaggtgygacgttaccacaacaatgaatctgctgactgtggaaggtaccctgtctatcctgggacctggggtaggaacatttaatcctggctttgccattatgacctggtattttttcctctatttttttttctttcccctgtgaaatagaaatgccacagctagcacctgcagactgggcatctatctgctagagcagatagatgagtttggttgcccagagtttgggcagggtggctgtgttg

SEQ ID NO: 71995 - DNA, 600 bp, Chicken  19866894351418_4
taaccctttttactctaaaagctaatgaactatgatttctttttatttgtcttttgggtttaaaacctccagacctcattttcaaactctttttctgaatccaagagagctagtttattttctaaagtaaatagagagaggtcagcagagcctctcacaagtacaaaggagcctgggctttaagatttcaagtgattatgacacaagcagcttaagcattctcagcaatgaatttttttttccttmcaaccccamgataaatataatctgctcaaaratgttaacctaccggacaggtcyccttgctgtagaaatacacatttgtatacgtggaggtgygacgttaccacaacaatgaatctgctgactgtggaaggtaccctgtctatcctgggacctggggtaggaacatttaatcctggctttgccattatgacctggtattttttcctctatttttttttctttcccctgtgaaatagaaatgccacagctagcacctgcagactgggcatctatctgctagagcagatagatgagtttggttgcccagagtttgggcagggtggctgtgttgctgatagcacatgaagatgtgac

SEQ ID NO: 71996 - DNA, 600 bp, Chicken  19866894351418_5
tttttatttgtcttttgggtttaaaacctccagacctcattttcaaactctttttctgaatccaagagagctagtttattttctaaagtaaatagagagaggtcagcagagcctctcacaagtacaaaggagcctgggctttaagatttcaagtgattatgacacaagcagcttaagcattctcagcaatgaatttttttttccttmcaaccccamgataaatataatctgctcaaaratgttaacctaccggacaggtcyccttgctgtagaaatacacatttgtatacgtggaggtgygacgttaccacaacaatgaatctgctgactgtggaaggtaccctgtctatcctgggacctggggtaggaacatttaatcctggctttgccattatgacctggtattttttcctctatttttttttctttcccctgtgaaatagaaatgccacagctagcacctgcagactgggcatctatctgctagagcagatagatgagtttggttgcccagagtttgggcagggtggctgtgttgctgatagcacatgaagatgtgacatggccagaatggctgcttggacattcagtgtgaaggat

SEQ ID NO: 71997 - DNA, 599 bp, Chicken  19866894351427_1
  misc_feature (1)..(167): n is any nucleotide
nnnnnnnnnnnnnnnnnnnnnnnnnnnnnnnnnnnnnnnnnnnnnnnnnnnnnnnnnnnnnnnnnnnnnnnnnnnnnnnnnnnnnnnnnnnnnnnnnnnnnnnnnnnnnnnnnnnnnnnnnnnnnnnnnnnnnnnnnnnnnnnnnnnnnnnnnnnnnnnnnnnnnnnccaaattagatcagagcaccacatggactgttatgaaataaattcattcaatctcagccatactctgcatcagctcactctaaaattggcatgaagtttgggattcagctgtgtaaatatgtagtgacatttraaatatctgacttcatcatgtgtgaccttctatatgctgtttacaatgctgaatatctttctaaggttctcagctactgctgtgaaaatgttttgttggtttataatatctaaaattttaccagatacatgtgttaggtaatttattcccactacataggcacccattttagtaagctgatgaaaaagtgtttttagaacactccaaagcacaatagaaaggctcaaatttctcagaaattgctgtatggaagtattttccaagatttgagagacttgaatcaactttgttcaaaacaa

SEQ ID NO: 71998 - DNA, 600 bp, Chicken  19866894351427_2
tggtttataatatctaaaattttaccagatacatgtgttaggtaatttattcccactacataggcacccattttagtaagctgatgaaaaagtgtttttagaacactccaaagcacaatagaaaggctcaaatttctcagaaattgctgtatggaagtattttccaagatttgagagacttgaatcaactttgttcaaaacaagtaggtgaagagtcctgcatcttatttcttagatgtctttcaccttcctactgtaactcttgttctatcatgacagatacttttgaaatgtctctcyccatctttcttatttgtccctcttaagaattgaaagactgcaataaggtgtcttcagttcycttccgcaggctaaataacccaaactttcccagcctgtgtttgtaggagaggtgttccagccctgtaatcatttttttttattcctcctctggactcaccccaataactcctcatctttctcatatggaggctggagctgaacattgtactccaagtgtggtcttatgagagcaaagtagagaataccagtcacctcacttgacctactagctttctaagcagtaaggacacattgttg

SEQ ID NO: 71999 - DNA, 600 bp, Chicken  19866894351427_3
aggcacccattttagtaagctgatgaaaaagtgtttttagaacactccaaagcacaatagaaaggctcaaatttctcagaaattgctgtatggaagtattttccaagatttgagagacttgaatcaactttgttcaaaacaagtaggtgaagagtcctgcatcttatttcttagatgtctttcaccttcctactgtaactcttgttctatcatgacagatacttttgaaatgtctctcyccatctttcttatttgtccctcttaagaattgaaagactgcaataaggtgtcttcagttcycttccgcaggctaaataacccaaactttcccagcctgtgtttgtaggagaggtgttccagccctgtaatcatttttttttattcctcctctggactcaccccaataactcctcatctttctcatatggaggctggagctgaacattgtactccaagtgtggtcttatgagagcaaagtagagaataccagtcacctcacttgacctactagctttctaagcagtaaggacacattgttggttcatgtgcaaattttcatccatcaatatttctaagtccttctccataaggttgctctca

SEQ ID NO: 72000 - DNA, 599 bp, Chicken  19866894351444_1
  misc_feature (1)..(51): n is any nucleotide
nnnnnnnnnnnnnnnnnnnnnnnnnnnnnnnnnnnnnnnnnnnnnnnnnnnttcagaatcattccactcgcagcttaagctattgtgtactacctgtcaaaatattattgctgaactattcataaaggtctataagttagtggatctgaatgtatgttccagttggttttctgaactcagctctctgaatgcctacgctttgtcaggcttcaatctccttttcccatgttacaagaggacgaggccatcttttctttttctgagcaatgagaaattttatgctcttctgtctcttaaacwtttattttgtttttgctgcttattaactactttgcaacataccttcctgcatttggtcaattagaatcaaggtatgttggctggctttaaatagtcctctcgtaagttaccttttcccattacaactatgacaaagctgtccaagcatctaagagtttcaattcaggctagtaaattcttccaaaatgtgtgtctcctggatgctttacatgtttagaatttgaatacagtccagtattactgacagtgagactgaattattaaaccaatataggccagctgaaacaaatacattcaca

SEQ ID NO: 72001 - DNA, 600 bp, Chicken  19866894351447_1
agcccttgttacacgcagggctaggaatgcattgaggggattttaaaaggattgggctacacaagttaaacccttcccctcaagcccctaagataacaagccttctggaaaagttctaatcaaataacagaccaaataatgtggacctacaatggctgctctgaaagtaatgcttactattttatgatgttggcccttgatgtcagaggcagatgttggtggtatgacagtagaagttgaaccttcccaccaattttcagttacgtgctgttgccctgtgacaaatggcagcagaggggytgtctgacagaatggcatctggcatggcagtgcagkgtgacgtggaagcaaaggtgtgtcattgaattcccccacgtggaaaaaaatggcatccattaacatttatagatgcttttaacatcactgcacctaaattttgatctttagtgttgttcctaaatcttctaagaggtgattagactggcaatctactgaatacgtagctacttgaagtaggccataataaaacctgatctgtgttttaaaaggcctctcaatcactttttggcagatgcattctgagacttgtttcactactct

SEQ ID NO: 72002 - DNA, 600 bp, Chicken  19866894351447_2
gggattttaaaaggattgggctacacaagttaaacccttcccctcaagcccctaagataacaagccttctggaaaagttctaatcaaataacagaccaaataatgtggacctacaatggctgctctgaaagtaatgcttactattttatgatgttggcccttgatgtcagaggcagatgttggtggtatgacagtagaagttgaaccttcccaccaattttcagttacgtgctgttgccctgtgacaaatggcagcagaggggytgtctgacagaatggcatctggcatggcagtgcagkgtgacgtggaagcaaaggtgtgtcattgaattcccccacgtggaaaaaaatggcatccattaacatttatagatgcttttaacatcactgcacctaaattttgatctttagtgttgttcctaaatcttctaagaggtgattagactggcaatctactgaatacgtagctacttgaagtaggccataataaaacctgatctgtgttttaaaaggcctctcaatcactttttggcagatgcattctgagacttgtttcactactctgaacctgctgaaagtaggtattccagtcttgagttt

SEQ ID NO: 72003 - DNA, 600 bp, Chicken  19866894351449_1
aattgctacggtgaactctcatccccaaggagtagcttgtctgttcttgtcccctgcacgcatagatgagaaggtgaagcaccgtagtctgactttgaggttttggcacatatatttctttttctgggggatttgattttcgtgcacaggtgtgtgtgcaaacaaacaatttcccacagatgtgcagtggaaagatgggtggtgaatggtgatcagacgatgggatcaaccgtctctggggagtgcacttccctctgtaatggtgagtgctctgctcagaatggttgaatcgagaacaarggatttatctaaaatgaactcgcttctgagtttttaattctttgttataaatcttcactggaaatctaaatagttctctgagttttggtgatttgatcattatgcaaagcctctttgcgtggcagtggtagcaagtgaaaataaatccagatgcgctggtagacttaagactcccttcacagccccaagatgtgaaataatatctgctatcttcatcatttcttactgtctagccatttatgaaatgcttacccagtgaagatgcaatagttttcatttaaagtcttggtactagatatt

SEQ ID NO: 72004 - DNA, 599 bp, Chicken  19866894351454_1
  misc_feature (1)..(126): n is any nucleotide
nnnnnnnnnnnnnnnnnnnnnnnnnnnnnnnnnnnnnnnnnnnnnnnnnnnnnnnnnnnnnnnnnnnnnnnnnnnnnnnnnnnnnnnnnnnnnnnnnnnnnnnnnnnnnnnnnnnnnnnnnnnnnngaaatcctgggatctgttgtgcaacagcagctgcagctctctggccaccctgagcagatcgccggcccactgtgcaggaagcctgacacgtacaacctgtcaagctcagtgtatgcacagcacccacagcacagatacatgtatttcaggccaggaaatcccaacagaagcacrgcagctgctgcctgtccagaagcttgctaggattcctccctrgggcagacaagcaaygagctgtttgcttgcagcaagcagttgcccagttggcttacggcgagttgcacagcttttccttgccacaggctcactgactggccctgaccctttagggcagcttgcaaaggcaccacagcgtgcccagctgctgggtgtagatgtgatgcctgcagcttcctgttgctttggcaggaagccactgcagataccatggcctagtttagtagggcaggagcaggctgaagtrgtagaggsag

SEQ ID NO: 72005 - DNA, 599 bp, Chicken  19866894351454_2
  misc_feature (1)..(84): n is any nucleotide
nnnnnnnnnnnnnnnnnnnnnnnnnnnnnnnnnnnnnnnnnnnnnnnnnnnnnnnnnnnnnnnnnnnnnnnnnnnnnnnnnnnngaaatcctgggatctgttgtgcaacagcagctgcagctctctggccaccctgagcagatcgccggcccactgtgcaggaagcctgacacgtacaacctgtcaagctcagtgtatgcacagcacccacagcacagatacatgtatttcaggccaggaaatcccaacagaagcacrgcagctgctgcctgtccagaagcttgctaggattcctccctrgggcagacaagcaaygagctgtttgcttgcagcaagcagttgcccagttggcttacggcgagttgcacagcttttccttgccacaggctcactgactggccctgaccctttagggcagcttgcaaaggcaccacagcgtgcccagctgctgggtgtagatgtgatgcctgcagcttcctgttgctttggcaggaagccactgcagataccatggcctagtttagtagggcaggagcaggctgaagtrgtagaggsagctggagctgagctcccagctgtttagcagagcccttgctcaa

SEQ ID NO: 72006 - DNA, 599 bp, Chicken  19866894351454_3
  misc_feature (1)..(69): n is any nucleotide
nnnnnnnnnnnnnnnnnnnnnnnnnnnnnnnnnnnnnnnnnnnnnnnnnnnnnnnnnnnnnnnnnnnnngaaatcctgggatctgttgtgcaacagcagctgcagctctctggccaccctgagcagatcgccggcccactgtgcaggaagcctgacacgtacaacctgtcaagctcagtgtatgcacagcacccacagcacagatacatgtatttcaggccaggaaatcccaacagaagcacrgcagctgctgcctgtccagaagcttgctaggattcctccctrgggcagacaagcaaygagctgtttgcttgcagcaagcagttgcccagttggcttacggcgagttgcacagcttttccttgccacaggctcactgactggccctgaccctttagggcagcttgcaaaggcaccacagcgtgcccagctgctgggtgtagatgtgatgcctgcagcttcctgttgctttggcaggaagccactgcagataccatggcctagtttagtagggcaggagcaggctgaagtrgtagaggsagctggagctgagctcccagctgtttagcagagcccttgctcaaagcacgtaaacaaac

SEQ ID NO: 72007 - DNA, 600 bp, Chicken  19866894351454_4
acagaagcacrgcagctgctgcctgtccagaagcttgctaggattcctccctrgggcagacaagcaaygagctgtttgcttgcagcaagcagttgcccagttggcttacggcgagttgcacagcttttccttgccacaggctcactgactggccctgaccctttagggcagcttgcaaaggcaccacagcgtgcccagctgctgggtgtagatgtgatgcctgcagcttcctgttgctttggcaggaagccactgcagataccatggcctagtttagtagggcaggagcaggctgaagtrgtagaggsagctggagctgagctcccagctgtttagcagagcccttgctcaaagcacgtaaacaaactctggatgttcctttgcagcagkggatctgcttctgtggggctgcacgagggtgatcctgcttcaccttctgctccccaccacgttggcctctggcttcggcattcccctttgcttgctctgtagcttggttgccaaaagtgcccygtcgatttcagcaaacagataggcttttaaaagtgaaggggtgcggtgcctatcattaccatgcttgcacttttctgacaagctggt

SEQ ID NO: 72008 - DNA, 600 bp, Chicken  19866894351454_5
acrgcagctgctgcctgtccagaagcttgctaggattcctccctrgggcagacaagcaaygagctgtttgcttgcagcaagcagttgcccagttggcttacggcgagttgcacagcttttccttgccacaggctcactgactggccctgaccctttagggcagcttgcaaaggcaccacagcgtgcccagctgctgggtgtagatgtgatgcctgcagcttcctgttgctttggcaggaagccactgcagataccatggcctagtttagtagggcaggagcaggctgaagtrgtagaggsagctggagctgagctcccagctgtttagcagagcccttgctcaaagcacgtaaacaaactctggatgttcctttgcagcagkggatctgcttctgtggggctgcacgagggtgatcctgcttcaccttctgctccccaccacgttggcctctggcttcggcattcccctttgcttgctctgtagcttggttgccaaaagtgcccygtcgatttcagcaaacagataggcttttaaaagtgaaggggtgcggtgcctatcattaccatgcttgcacttttctgacaagctggtttgttttc

SEQ ID NO: 72009 - DNA, 567 bp, Chicken  19866894351454_6
agttgcccagttggcttacggcgagttgcacagcttttccttgccacaggctcactgactggccctgaccctttagggcagcttgcaaaggcaccacagcgtgcccagctgctgggtgtagatgtgatgcctgcagcttcctgttgctttggcaggaagccactgcagataccatggcctagtttagtagggcaggagcaggctgaagtrgtagaggsagctggagctgagctcccagctgtttagcagagcccttgctcaaagcacgtaaacaaactctggatgttcctttgcagcagkggatctgcttctgtggggctgcacgagggtgatcctgcttcaccttctgctccccaccacgttggcctctggcttcggcattcccctttgcttgctctgtagcttggttgccaaaagtgcccygtcgatttcagcaaacagataggcttttaaaagtgaaggggtgcggtgcctatcattaccatgcttgcacttttctgacaagctggtttgttttctcctcacaccacatcctgctgcccttctacatctgtacgcgcagaaagt

SEQ ID NO: 72010 - DNA, 444 bp, Chicken  19866894351454_7
gtgatgcctgcagcttcctgttgctttggcaggaagccactgcagataccatggcctagtttagtagggcaggagcaggctgaagtrgtagaggsagctggagctgagctcccagctgtttagcagagcccttgctcaaagcacgtaaacaaactctggatgttcctttgcagcagkggatctgcttctgtggggctgcacgagggtgatcctgcttcaccttctgctccccaccacgttggcctctggcttcggcattcccctttgcttgctctgtagcttggttgccaaaagtgcccygtcgatttcagcaaacagataggcttttaaaagtgaaggggtgcggtgcctatcattaccatgcttgcacttttctgacaagctggtttgttttctcctcacaccacatcctgctgcccttctacatctgtacgcgcagaaagt

SEQ ID NO: 72011 - DNA, 599 bp, Chicken  19866894351460_1
  misc_feature (1)..(148): n is any nucleotide
nnnnnnnnnnnnnnnnnnnnnnnnnnnnnnnnnnnnnnnnnnnnnnnnnnnnnnnnnnnnnnnnnnnnnnnnnnnnnnnnnnnnnnnnnnnnnnnnnnnnnnnnnnnnnnnnnnnnnnnnnnnnnnnnnnnnnnnnnnnnnnnnnnnnagctggatctctgcagttgttaatctaagaagcagcttgatgttatccagctgtcctcagttgtgtagcagcatccgatacttcggtccttcatttcttttctttttgttcccattacctgagtgcttcgaatcgctgtactcagtgctgcrcaacaaggctgagccgctgtagtgctgtgcccatggtttcacctgccaggtgatcgcttccaagtgctgagcactggggggctgctgtgaggtagatttgtgtttgttctgtccctgagctgcagtgctgcccggagcccaacccctgactctcaattcctttcctgccagaccctggatgggcgcatcgtggtgcgcagccacgcgcgggtatcgtccctgactctcaaagaaatccagtacacagacgccggagagtacgtgtgcacggccagcaacaccatcgggcaggactcaca

SEQ ID NO: 72012 - DNA, 600 bp, Chicken  19866894351466_1
tgtgttattaaatcatgctggctgatgtgtttaataaggacctattaaatgtttataaaattagggaaataaatacgggcttttagtcagattgtgtgatggatctggtaacctattgttaaaagcactgctggtaaaaacgtgtgtaaagaaatagactcaaaggctccctttaaaataagaaacccaatattcgatacagcgcgtttccagaatgatatttgcagatgtacggaaagaagagcccaattagaaaactctctttcgatggtgggaagaagtgcttcctgcacagccacrgggctcrgttctgctctgcgagggtgatgtggagcatggggtggmcttggacgcctgtgctgctctggttccagctcttcatggctgcacatcctcagacacccccagkttggggctgcacatcttcaggtgcctccaagtgctcagccccatggcagggcagcaccccactgagggtctccctgaagtaacgatggagctccaatggaccatgacagaaaaatgtgcaaggaaaaaaatgaaaaagatgatgcagcaragcacgtctgacctagaaacagagctccatccttcgtcctt

SEQ ID NO: 72013 - DNA, 600 bp, Chicken  19866894351466_2
ttaaatcatgctggctgatgtgtttaataaggacctattaaatgtttataaaattagggaaataaatacgggcttttagtcagattgtgtgatggatctggtaacctattgttaaaagcactgctggtaaaaacgtgtgtaaagaaatagactcaaaggctccctttaaaataagaaacccaatattcgatacagcgcgtttccagaatgatatttgcagatgtacggaaagaagagcccaattagaaaactctctttcgatggtgggaagaagtgcttcctgcacagccacrgggctcrgttctgctctgcgagggtgatgtggagcatggggtggmcttggacgcctgtgctgctctggttccagctcttcatggctgcacatcctcagacacccccagkttggggctgcacatcttcaggtgcctccaagtgctcagccccatggcagggcagcaccccactgagggtctccctgaagtaacgatggagctccaatggaccatgacagaaaaatgtgcaaggaaaaaaatgaaaaagatgatgcagcaragcacgtctgacctagaaacagagctccatccttcgtccttcgcacag

SEQ ID NO: 72014 - DNA, 600 bp, Chicken  19866894351466_3
taaatgtttataaaattagggaaataaatacgggcttttagtcagattgtgtgatggatctggtaacctattgttaaaagcactgctggtaaaaacgtgtgtaaagaaatagactcaaaggctccctttaaaataagaaacccaatattcgatacagcgcgtttccagaatgatatttgcagatgtacggaaagaagagcccaattagaaaactctctttcgatggtgggaagaagtgcttcctgcacagccacrgggctcrgttctgctctgcgagggtgatgtggagcatggggtggmcttggacgcctgtgctgctctggttccagctcttcatggctgcacatcctcagacacccccagkttggggctgcacatcttcaggtgcctccaagtgctcagccccatggcagggcagcaccccactgagggtctccctgaagtaacgatggagctccaatggaccatgacagaaaaatgtgcaaggaaaaaaatgaaaaagatgatgcagcaragcacgtctgacctagaaacagagctccatccttcgtccttcgcacagccgctctctctgtgctccctctttgtgcagcgctgctc

SEQ ID NO: 72015 - DNA, 600 bp, Chicken  19866894351466_4
aacctattgttaaaagcactgctggtaaaaacgtgtgtaaagaaatagactcaaaggctccctttaaaataagaaacccaatattcgatacagcgcgtttccagaatgatatttgcagatgtacggaaagaagagcccaattagaaaactctctttcgatggtgggaagaagtgcttcctgcacagccacrgggctcrgttctgctctgcgagggtgatgtggagcatggggtggmcttggacgcctgtgctgctctggttccagctcttcatggctgcacatcctcagacacccccagkttggggctgcacatcttcaggtgcctccaagtgctcagccccatggcagggcagcaccccactgagggtctccctgaagtaacgatggagctccaatggaccatgacagaaaaatgtgcaaggaaaaaaatgaaaaagatgatgcagcaragcacgtctgacctagaaacagagctccatccttcgtccttcgcacagccgctctctctgtgctccctctttgtgcagcgctgctcactggcacacctttgtctcaccatcagcaaccttgataactccttgcatgcccaacctcgcttt

SEQ ID NO: 72016 - DNA, 455 bp, Chicken  19866894351466_5
ctctttcgatggtgggaagaagtgcttcctgcacagccacrgggctcrgttctgctctgcgagggtgatgtggagcatggggtggmcttggacgcctgtgctgctctggttccagctcttcatggctgcacatcctcagacacccccagkttggggctgcacatcttcaggtgcctccaagtgctcagccccatggcagggcagcaccccactgagggtctccctgaagtaacgatggagctccaatggaccatgacagaaaaatgtgcaaggaaaaaaatgaaaaagatgatgcagcaragcacgtctgacctagaaacagagctccatccttcgtccttcgcacagccgctctctctgtgctccctctttgtgcagcgctgctcactggcacacctttgtctcaccatcagcaaccttgataactccttgcatgcccaacctcgctttctggg

SEQ ID NO: 72017 - DNA, 600 bp, Chicken  19866894351467_1
gtagtgaggccctggcactgctgctcagagagctgggggtgcttggccccatccagcctggctctctgggcaacctgagctgggaggaggtgtccccgcctgtggcagaggttgtggcagagtgggctgtaagatcccttccagcccgactgttctgtgattctctgactgagctcccaggtttcccttggctgagtgagggaaatctgccttgtcattgaccaggctgagctcagtgcttcagaaacttggttactttaacttctcttagtgccacaactgtggaatagattactgttwaaaaaaaaaaaaaaaaccacggaagctttgtctctttaagaaggcattttgggaccatcttccggaagaaaggcaagagggaataagggaagtatcttcttcccaaatggtgaaaatggtgttgttggcaggaatagaagtgatgagggtttagtcttgaccatatttccagtctgtaaagggaggtcacctttaggttgaytcagggggatttttttctttaattaattaaacagaatctgataatgcatccttatctaattgttagtctagggatgtttgcttgtcctgtgtcttgtc

SEQ ID NO: 72018 - DNA, 600 bp, Chicken  19866894351467_2
actgctgctcagagagctgggggtgcttggccccatccagcctggctctctgggcaacctgagctgggaggaggtgtccccgcctgtggcagaggttgtggcagagtgggctgtaagatcccttccagcccgactgttctgtgattctctgactgagctcccaggtttcccttggctgagtgagggaaatctgccttgtcattgaccaggctgagctcagtgcttcagaaacttggttactttaacttctcttagtgccacaactgtggaatagattactgttwaaaaaaaaaaaaaaawccacggaagctttgtctctttaagaaggcattttgggaccatcttccggaagaaaggcaagagggaataagggaagtatcttcttcccaaatggtgaaaatggtgttgttggcaggaatagaagtgatgagggtttagtcttgaccatatttccagtctgtaaagggaggtcacctttaggttgaytcagggggatttttttctttaattaattaaacagaatctgataatgcatccttatctaattgttagtctagggatgtttgcttgtcctgtgtcttgtctgtatgtcagcaagca

SEQ ID NO: 72019 - DNA, 600 bp, Chicken  19866894351467_3
aaatctgccttgtcattgaccaggctgagctcagtgcttcagaaacttggttactttaacttctcttagtgccacaactgtggaatagattactgttwaaaaaaaaaaaaaaaaccacggaagctttgtctctttaagaaggcattttgggaccatcttccggaagaaaggcaagagggaataagggaagtatcttcttcccaaatggtgaaaatggtgttgttggcaggaatagaagtgatgagggtttagtcttgaccatatttccagtctgtaaagggaggtcacctttaggttgaytcagggggatttttttctttaattaattaaacagaatctgataatgcatccttatctaattgttagtctagggatgtttgcttgtcctgtgtcttgtctgtatgtcagcaagcacagagtactcctcaaagtgcccctgctgtatcgttgcccttgcttctccttgctgtgcagttcagcagtgctggtgtgtctcttccctctcactgcagcagcagactgacgtctttcactgctgatgcaacttggaaatcacttgtgtacttagagcttgttttgactttgcttacctttgctctc

SEQ ID NO: 72020 - DNA, 600 bp, Chicken  19866894351474_1
taaaacataatgtgtattccctggataaatgtatcatgttgccaaatttttgtctacaaattgctaaaactatttatgcaagcatgtttgcaaatgcacatggctctggggactgtgcttttgtgtaaaatagcccattaatctgaacagaacgtttaaaatagttggagatgatttatttctaaaagcttagttgctctgatgtaacaagtagcagatgagcagatgtgctgatacttgttcctatgtatgatagatgggcttgggaggaatctcagcttgcactgacattgcagttcwgcataatgttggtctcctgcagtggagagagctaaactgtaaggatgttcagtagtgggctttctggtgcgttgaagtgctgatttgctagtgacatacaaaaaggctgagggtgaatattgggcaaacagttgaaagaactggtacatagatggcacaaaagcccaaaaacttgaatagcattggaagatggctgtgtgcatcaggcacagcttcagraactgattgtattgcagagtgcttgtctttgtaataaatgtcgtcttgcagttgacttgtatgtcttgacaactgtattca

SEQ ID NO: 72021 - DNA, 561 bp, Chicken  19866894351474_2
gagcagatgtgctgatacttgttcctatgtatgatagatgggcttgggaggaatctcagcttgcactgacattgcagttcwgcataatgttggtctcctgcagtggagagagctaaactgtaaggatgttcagtagtgggctttctggtgcgttgaagtgctgatttgctagtgacatacaaaaaggctgagggtgaatattgggcaaacagttgaaagaactggtacatagatggcacaaaagcccaaaaacttgaatagcattggaagatggctgtgtgcatcaggcacagcttcagraactgattgtattgcagagtgcttgtctttgtaataaatgtcgtcttgcagttgacttgtatgtcttgacaactgtattcagtcagcacggagcagtggctgcaaagatgggcttgtgccatgtaatatgaatagcaaagattagcaataggacaagaggaaatggcctccagctgtaccaggggaggttcagtttggatatcaggatgaatttcttctcagtaggagctgtcaggcgctgtaacaggctgcccagggagg

SEQ ID NO: 72022 - DNA, 600 bp, Chicken  19866894351484_1
aaagggaaaatattcagactgccctgcatccatccctttctccaagcctaccaaaccattctaccatcttaaatatgcacccacaagcaagacagaaatgctttaataaaatggaaaacagatcagagttaaagtactcagggaggaaattgtagaaacttgtaaactgagcaacacacaccacacatccctctaatttactcttatgaaacagagattgatagaaggaactagtccaaatccacaaagaaacaaactgtagcataaagcgtctccacagccaccacttctatcatttcytaaaagcaacactttttaggaggaaagtgtacccckgttcaaattgagaagcacaagaactgggcaacatttatatcttacttctcacccctgcttccctagcatcagtgatgttgaaatcatgtggcacatacraacagagacatgagaatttcagctaaaggtctgtctccaagggcttgttaaaactctcttgttcttgttatacttgagtagtcattttgtgatttttttccctgtttggagttaaaaagctctacttagccaaatagctctttatagaggctgctctgccatgta

SEQ ID NO: 72023 - DNA, 600 bp, Chicken  19866894351484_2
tttctccaagcctaccaaaccattctaccatcttaaatatgcacccacaagcaagacagaaatgctttaataaaatggaaaacagatcagagttaaagtactcagggaggaaattgtagaaacttgtaaactgagcaacacacaccacacatccctctaatttactcttatgaaacagagattgatagaaggaactagtccaaatccacaaagaaacaaactgtagcataaagcgtctccacagccaccacttctatcatttcytaaaagcaacactttttaggaggaaagtgtacccckgttcaaattgagaagcacaagaactgggcaacatttatatcttacttctcacccctgcttccctagcatcagtgatgttgaaatcatgtggcacatacraacagagacatgagaatttcagctaaaggtctgtctccaagggcttgttaaaactctcttgttcttgttatacttgagtagtcattttgtgatttttttccctgtttggagttaaaaagctctacttagccaaatagctctttatagaggctgctctgccatgtaatcaaaacatctcacaaaaggctgctcttttagaaa

SEQ ID NO: 72024 - DNA, 600 bp, Chicken  19866894351484_3
actcagggaggaaattgtagaaacttgtaaactgagcaacacacaccacacatccctctaatttactcttatgaaacagagattgatagaaggaactagtccaaatccacaaagaaacaaactgtagcataaagcgtctccacagccaccacttctatcatttcytaaaagcaacactttttaggaggaaagtgtacccckgttcaaattgagaagcacaagaactgggcaacatttatatcttacttctcacccctgcttccctagcatcagtgatgttgaaatcatgtggcacatacraacagagacatgagaatttcagctaaaggtctgtctccaagggcttgttaaaactctcttgttcttgttatacttgagtagtcattttgtgatttttttccctgtttggagttaaaaagctctacttagccaaatagctctttatagaggctgctctgccatgtaatcaaaacatctcacaaaaggctgctcttttagaaatgtcaaattagctccctttgaaattctacttgtctatactctcaaccaaaacctagaagcaaccagctaaaggagaaccaacaaaactgatgttgagtg

SEQ ID NO: 72025 - DNA, 550 bp, Chicken  19866894351487_1
aatgagtacgtagacagcagaactgttatgtagggaaaggtaaattagagaaatttcttgcataacttgttttattcctaagaaatggatgatattttaacaatgtaaacaaataaaggaggtaaagattatttcagacagagcaaggaagtataaataaaaatatgagatcaatatgaaataaataaataaataaaagacagaacattcagaacgagtttcaagaaaaacatcttgccagcaatatataagcttgctgggagattcaatgaaaatatgctacctagtcaatttaaaackactttaaaaaatacactactatgaagtgtattaaagaacaatcacattgctcttagactggcagagaattaactgaaggagttaatggtctgttttgattcacaaaaacagcttattaagaacaatgattctgtcatttacaatgaagataattacaacctgagccataacatctcataacatgtttgaagaatgaaaagaccatatcaatattggccaaagatatcctgtcatctttactacaaaagat

SEQ ID NO: 72026 - DNA, 600 bp, Chicken  19866894351492_1
atctgcatcattacactgtaatgatggaagcaaacagactgcaaatgttattccagatgtgcatgagtctgaacctatgtaaagtagtaccaggtaacagttatattggtctggaggtttgaaatactatgcatagtagttctctgttttggcagcaccaggtaaaaccctgctggagcattttgttcagcacatagatacttgcaaagagtactccacataaagttacccaagaaacataaatacagattaaaatttgagcttaataggaatatgaagagtgtgtaattctgtgcagcytgggaatacaaagtttatcaagcattgtcgtttccaggtaaatgatctgtggatcatccaattttgtacatggataaagttttgcctataggatctcatactgctgaccaaaacaaataatgtgttacaratgctgctctttcttgtctgcatcttgatttatttcactttctatcgtgatgtgaacagtataggagtgctttgtgactgactattgcgatgtggagtatgtggacaaatatgttattttggttttatttcctcaccatcttccatcctaaatttgttgagtttctctgg

SEQ ID NO: 72027 - DNA, 600 bp, Chicken  19866894351492_2
gcatagtagttctctgttttggcagcaccaggtaaaaccctgctggagcattttgttcagcacatagatacttgcaaagagtactccacataaagttacccaagaaacataaatacagattaaaatttgagcttaataggaatatgaagagtgtgtaattctgtgcagcytgggaatacaaagtttatcaagcattgtcgtttccaggtaaatgatctgtggatcatccaattttgtacatggataaagttttgcctataggatctcatactgctgaccaaaacaaataatgtgttacaratgctgctctttcttgtctgcatcttgatttatttcactttctatcgtgatgtgaacagtataggagtgctttgtgactgactattgcgatgtggagtatgtggacaaatatgttattttggttttatttcctcaccatcttccatcctaaatttgttgagtttctctgggcctgtttgttcccaggtttcctcttcagtgcagtttgttaccagggagtgcatgggatgcttttcttggttaatggcttctaagagcaggacttataatatatactgttttctgctttctttctctgta

SEQ ID NO: 72028 - DNA, 600 bp, Chicken  19866894351493_1
acaggaaatagtatgtaaaaatagcataggaaaaaataatcctttgggccattctctcagtaagtgatttctacaagccttgaataattatcggagttacttgtggaacaagcttatgcaaaactatggcaccataagatgtctgtttaatagttagccccaaaatgcatctagattatcttgaaagtttaaaatttaaaatttaaaaatggtcagcataatttcattcttctgaagaggttgcagatggaatgatatacttcactcttaagagagaaacggcaatatatttattgatawaatatggtgatctaacaaaacttaattataaataagacaagtttaacaagatttgagatagcagggtgcacttgattatttactaaagcatcaaagaacatttaattgtaagttacataaagagcattacatagaagacattactacttctctgaaagggtggtcaggcgctggaatgggctgcccagagaagtggtggagtcaccgaccgtgggaggtgttcaaggaacatttggacgttgtgttgagggacatggtttagtgagaaccactggtgatgggtgaatgattggactggat

SEQ ID NO: 72029 - DNA, 600 bp, Chicken  19866894351494_1
cattgtcatggaaagacaagcagacctgcactagcactaacaaggactgctgaaaatattttgctctttccagaccatgacctcttctgcggatgtcagcagaataaacatacttttataaagtaccctcagatcttgccttccctcctgctgttttgtcacatttcttgaaatttgccttaaattacttgctttcacaccgaggttcatgatgctgtttgttttaaaaaagcgttgtttgctctgcacagacccacctgggatgccacaagcattggaaatggatggattttctgaccygccagcaactagctttcgtcccatcggtttgctgcaggtcacaggtctctcagtgatggaggagacatccagttctgacaggctttgaccattgccactgtccaaatgcacatttgaaaaaagatgaaatatgtccgggatccagtttgcttacaagtgcccctttcatgtggaagatgataggactagagggaacagcctcaagttgcatcacaagaagttcgggttggatattaggaaaaaattgttctccaaaagaatggtgaggtgctggaatggactgccagggaggtgatggag

SEQ ID NO: 72030 - DNA, 600 bp, Chicken  19866894351494_2
gtggtgattttattattctgtgatactttgtgagcagtgtgtctcagccatcaggcagaggaagaaagaaagtgtgaatgcaatgagagacctaggaccatagaatcatagaattattaaagctgggaaagacctctaagatcatctagtccaaccatctacctgctgccaatattgcccactaaaccatgtccctaagctcactctacatctacagctcaccctcttctatgggaagtgctctcagagggctatgaatttgagggtggctctcggagagttctctgctggagcttcttyccagccccatacattgctgggaggaggtttgggtgatgccaaaggaaaactatgtgggatatcttagaatgggtgagtgkctgctgaagggctagtggtgtacaccagggacgtcactgtgagcagccaaagaggaggcagcatctactctgccgcaggtaaacacttctctgcaccaaaccagggtaatttcctttcaagctgaggtgtgaggccagcagtctcaagcgtaattcgcacggtattacttccacagatgagacaagggtattaggggcactgccacctaggcaggcaatc

SEQ ID NO: 72031 - DNA, 600 bp, Chicken  19866894351494_3
caatgagagacctaggaccatagaatcatagaattattaaagctgggaaagacctctaagatcatctagtccaaccatctacctgctgccaatattgcccactaaaccatgtccctaagctcactctacatctacagctcaccctcttctatgggaagtgctctcagagggctatgaatttgagggtggctctcggagagttctctgctggagcttcttyccagccccatacattgctgggaggaggtttgggtgatgccaaaggaaaactatgtgggatatcttagaatgggtgagtgkctgctgaagggctagtggtgtacaccagggacgtcactgtgagcagccaaagaggaggcagcatctactctgccgcaggtaaacacttctctgcaccaaaccagggtaatttcctttcaagctgaggtgtgaggccagcagtctcaagcgtaattcgcacggtattacttccacagatgagacaagggtattaggggcactgccacctaggcaggcaatctttaagtgtagctgcaagttgcttgtttttatgacaacaaactttagtggtgagaaagagaggacaggtagcaacactga

SEQ ID NO: 72032 - DNA, 600 bp, Chicken  19866894351498_1
cagcttggagtacggagaagatctgagctcagagcacagcacatattacaagtggctgggggccaggggaggtacttaatgggtgcacactataactgcttgtaaacactgacctgaatacatctcctttcctgtccattataagagatctagcataagctccaataaatccaaaagggtgcatttcatagaatcattaaagttgtaaaagacctctaagatcatccagtccaatcatccacctactatcaataatgcccactaaatcatatccctaccacatctccatgtttcttgaaygcctccagggtgactccgccgcctccctgggcagcctattccaatgcctcaccactctttcagagaattaagtttttcacaatatccaacctgatttatgaagatgcagagcttgtggtcctgcagcactcagtgagtacttccaaaccctcagcacagaggtccagctccctggggatgaacatgagacacagcagtgcagatacagccaccatctcctaaggttctgcatcccagacacagctcccttcctcaaaggggaatggctgtgtgctccatgtgagcaggaacagctgtgtc

SEQ ID NO: 72033 - DNA, 600 bp, Chicken  19866894351499_1
agacccaggctgcagcatagatatcaggaaatacatcatgcatttgtttacttacctgtctgcgcaggtctctatttcaccatgccccattgttcctggagacttggtatacatcagcaagctgttgctttgttttttactagtttcaagccactgagcaaacaaattgctcctaggcagcataatactgtcaccaatgaaaactaaacacacagtaatgaaacagtgatgtaatgaagctgtggcagagaacagaatctgtcaattctcataacaaaatgctgcttcaagttaccggaktttttggggctgtgccacaaggcaaacagtaatgttaaatataccttctagcatgccctggagaatgaccctggcttttcaggctgaaatctgtgtggtctggggatcaaaactgctgattaataaataccacctggctgtaaccaaagacattccaggcaccgcagggatttttgcaattcatataccatgagttggtgcatgtaatcaaattgaaatggccacagtgctaaataaaacatcattatcatacctggcactggttgtctgtctgtgcatggaactaaggagaagagaagc

SEQ ID NO: 72034 - DNA, 600 bp, Chicken  19866894351510_1
tgaggacgtggtgacagtcagcaatgggacacactgatggggctgggttctctgtcctgacatggtgaatccggcaagaaaactgacattccctaccggacactgggagaatcataggatggcctgggttgaaaaggaccacaatgatcattgactttcaacccccctgctgtgtgcagggtcaccaaccaccaagaccaggctgcccagagccacatccagcctggccttgaatgcctccagggatggggcatccacagcctccttgggcaacctgttcagtgcgtcaccaccctctgwgtgaaaaacttcctcctaatatctaacctagacctctcctgtctcagtttaaaagaccctacgtaggagaggtgcatcccattcccagatgagtccaccgcgctacatcctgctctgacaaggtgaagggagaagagaagaggcggcgatctggcaggaaagtaacatgctgaccccaaatctcagcagcttgctgtgcatgcaaataaagtcaactgtttccatgtggtgggccgggagcagccgctgctgagggccgctcggccggaaaaaccatttggagactccaccttagctcac

SEQ ID NO: 72035 - DNA, 600 bp, Chicken  19866894351514_1
attttgatcttcctctgctttgactttactgcaacgctttacaactgatagattttctacaggaactcaggacacaagatggcaatgttggtatcgccagtaagtgtggtctgcaaggtagtgctccctagatttctaatcacaaaacaagtattaaatagaagtctcgagagtataatataaacaaaggcatttagttcattaataagagcttcagagctatctacatatacttaagttacacatcaggaaactcataaaggagatagagacagtctcttccaacagagatgcacagcraagggataagagtcaayagccacaaattactacaggaaatattccaagtggctacaggggaaaaacatttcacaatggcagtggtttagccctgggacaagtgcctggacagytggtggcatctctgtttcaggagatactcaaagctcagcaggacactgctctgaaccactagatttgactttgaagttaaatttacttggagtaggaggttggactggatctctccagagatcccttaataacttaaattattctgctactctgtgatttcacagtaactgatgtctttgggagaaa

SEQ ID NO: 72036 - DNA, 600 bp, Chicken  19866894351514_2
ctttgactttactgcaacgctttacaactgatagattttctacaggaactcaggacacaagatggcaatgttggtatcgccagtaagtgtggtctgcaaggtagtgctccctagatttctaatcacaaaacaagtattaaatagaagtctcgagagtataatataaacaaaggcatttagttcattaataagagcttcagagctatctacatatacttaagttacacatcaggaaactcataaaggagatagagacagtctcttccaacagagatgcacagcraagggataagagtcaayagccacaaattactacaggaaatattccaagtggctacaggggaaaaacatttcacaatggcagtggtttagccctgggacaagtgcctggacagytggtggcatctctgtttcaggagatactcaaagctcagcaggacactgctctgaaccactagatttgactttgaagttaaatttacttggagtaggaggttggactggatctctccagagatcccttaataacttaaattattctgctactctgtgatttcacagtaactgatgtctttgggagaaactggaagtcttttctat

SEQ ID NO: 72037 - DNA, 600 bp, Chicken  19866894351514_3
caaggtagtgctccctagatttctaatcacaaaacaagtattaaatagaagtctcgagagtataatataaacaaaggcatttagttcattaataagagcttcagagctatctacatatacttaagttacacatcaggaaactcataaaggagatagagacagtctcttccaacagagatgcacagcraagggataagagtcaayagccacaaattactacaggaaatattccaagtggctacaggggaaaaacatttcacaatggcagtggtttagccctgggacaagtgcctggacagytggtggcatctctgtttcaggagatactcaaagctcagcaggacactgctctgaaccactagatttgactttgaagttaaatttacttggagtaggaggttggactggatctctccagagatcccttaataacttaaattattctgctactctgtgatttcacagtaactgatgtctttgggagaaactggaagtcttttctatgctctcagctgttccaggacagtcacagcatgtaactgctatgactcactcaatggtctccttcatttaaacatcaatcctccagaaaaaaagaca

SEQ ID NO: 72038 - DNA, 600 bp, Chicken  19866894351515_1
attccagatagtgaacaatgctatctttcactgtgctgctttacagcattccctctgctgtacattttctttcataagattacaattgattttcaaataaggagaagcatatctgctcaaacaaggtaaaacaatgggcaacacgagagctgctagagtaaacataagactgataaaacactgcttgacctatacttgtagcatttactcgtattcccctgtaattcatttagcttcactttcaattgttgcatttgaagtccttaatttccagagtgcttttctgagaccattcagaargacttctaaggctgattgttatacactccgcttcccttctgagataagaatttgttctgaacttggyatgtttttaagttcttaaattctgtacggtcttttttcctccccttctctccataaaagcacgtgctggcaaaagtcctttcctcattcctctagagctggcctgtctgaagtcatgtcttgctgaaaaggtaataattcattctgactttctggttccatcagattctactaaaattgtttaatcccagagtttgtcttttgtctcatccagcgcctgacagcatataaaca

SEQ ID NO: 72039 - DNA, 600 bp, Chicken  19866894351515_2
tctttcataagattacaattgattttcaaataaggagaagcatatctgctcaaacaaggtaaaacaatgggcaacacgagagctgctagagtaaacataagactgataaaacactgcttgacctatacttgtagcatttactcgtattcccctgtaattcatttagcttcactttcaattgttgcatttgaagtccttaatttccagagtgcttttctgagaccattcagaargacttctaaggctgattgttatacactccgcttcccttctgagataagaatttgttctgaacttggyatgtttttaagttcttaaattctgtacggtcttttttcctccccttctctccataaaagcacgtgctggcaaaagtcctttcctcattcctctagagctggcctgtctgaagtcatgtcttgctgaaaaggtaataattcattctgactttctggttccatcagattctactaaaattgtttaatcccagagtttgtcttttgtctcatccagcgcctgacagcatataaacacgcagacaaatatcactcaggaggagtcaaggattgatgtggggggacaaatgatgaatccacacac

SEQ ID NO: 72040 - DNA, 599 bp, Chicken  19866894351525_1
  misc_feature (1)..(62): n is any nucleotide
nnnnnnnnnnnnnnnnnnnnnnnnnnnnnnnnnnnnnnnnnnnnnnnnnnnnnnnnnnnnnntgaggatgaggcaagatgcaggcaaaggacctgccatcttccagttctcaccagttaccataatggtaggaaaaatatgtggagaaaagctagatggcagagcttaaattgcctggttctgttttgcatttatttcctttaaatggttcacttttctagaaatctgactttgcgttttcattttattgtacttgcagtagtttctccaagaataattgcagtaactctgcttttcttkctatrggttgtttttttattttaacttaagaacacttgatatatgctaaaccttaacttgatctaacatttctatgttaggtgaaaattaataccaatgcattcatctcctgcttcctgaaatctaaagcaatgcagtgtttaatggatacagaatttgcatgtgtccactttgtgttgtaaataaaatctgcttaatcaccctaaggaagtgattccctcctttctcttatatctcccataaacctatatcacccttatactgtggcacactctgaaaatgttatatgccttcactcc

SEQ ID NO: 72041 - DNA, 599 bp, Chicken  19866894351525_2
  misc_feature (1)..(57): n is any nucleotide
nnnnnnnnnnnnnnnnnnnnnnnnnnnnnnnnnnnnnnnnnnnnnnnnnnnnnnnnntgaggatgaggcaagatgcaggcaaaggacctgccatcttccagttctcaccagttaccataatggtaggaaaaatatgtggagaaaagctagatggcagagcttaaattgcctggttctgttttgcatttatttcctttaaatggttcacttttctagaaatctgactttgcgttttcattttattgtacttgcagtagtttctccaagaataattgcagtaactctgcttttcttkctatrggttgtttttttattttaacttaagaacacttgatatatgctaaaccttaacttgatctaacatttctatgttaggtgaaaattaataccaatgcattcatctcctgcttcctgaaatctaaagcaatgcagtgtttaatggatacagaatttgcatgtgtccactttgtgttgtaaataaaatctgcttaatcaccctaaggaagtgattccctcctttctcttatatctcccataaacctatatcacccttatactgtggcacactctgaaaatgttatatgccttcactcctccag

SEQ ID NO: 72042 - DNA, 600 bp, Chicken  19866894351525_3
aaatattgcgagaataacattaatatctttagctgagagtagagaggtgtaaaaaccagtaaaaactgagctcttgtatatgcatacttttctcttaaaatgcaggagatacaggatgcaagctgtgctactcatttaactccagcttgttccataataggttcttcaaatggagatgagaatggccactcctgtgaggcctgggcaagagatggccaaataccagtctggtagtcagcaagctttattttagtctttcttggctactgacctatagcacggtatcatttagttttattyacatcttaggctttcctcctcactccgccttgtttgttgagagtgtttccaatttagggccataattaaatgtatgcacagcacctctcccaccaggcccttccaagagccaccgtatcacaactcaaggtgacgggtgtttgcattctgcattacattcactggtgaaacagagtttgagataactgaggtacactattttccacgagtctctttctcactctctctagtgttttatttttttaaattctttacaattaatgaacacatcattagtagaggaggacagttatttgatta

SEQ ID NO: 72043 - DNA, 600 bp, Chicken  19866894351526_1
actgctttttccagtttgttctgagaggatgcaaaggatacaaactgcccagcaaataattacttcaaaagaaagcatcgattgtttgtaatgaaatgtattcctaacttgaaaccaccaccgttttgttattagtgcttttgagatagatactatattactactgagattacagtataggcttaattatctcggcactcagttgtaactacttacacttcctggaatgatgtatcaaggttactccgaaaataatgcctcctatttatttccatggaaactacaactggtacaaagagyacaataacaccatttgatagggcatcttctcagctacagaactcaatttttcagtgtagtcaccaccaccagctatgcatttttgccagctatgaacaagaatctgcatgccaagctcataaacatccacaccagcacaagtaacccactgtcgctttcaccactgctgaaatgcaccacccactgcctcactgtgctcacatccactgtttggtctccagaaacattcagcaagtattgatgaatgtmactgggtgccatkttttgaacatggaggaattcagtggcacrcctttgcta

SEQ ID NO: 72044 - DNA, 600 bp, Chicken  19866894351526_2
aaataatgcctcctatttatttccatggaaactacaactggtacaaagagyacaataacaccatttgatagggcatcttctcagctacagaactcaatttttcagtgtagtcaccaccaccagctatgcatttttgccagctatgaacaagaatctgcatgccaagctcataaacatccacaccagcacaagtaacccactgtcgctttcaccactgctgaaatgcaccacccactgcctcactgtgctcacatccactgtttggtctccagaaacattcagcaagtattgatgaatgtmactgggtgccatkttttgaacatggaggaattcagtggcacrcctttgctacatatgcacttccatgtcagacgccattctgtcagactgcccctctgctgccatctgttacatggcaacaaaacataatgttgaaggttgaatctctatagccatcccaccaatatctgcctctgacattgtggactgacataaaataggaggtattacttttgaagcagcgctcatattttaatccaaggaaaatcagattcttcccttcgcttttccaaagcagatgaactcaattctagagaacct

SEQ ID NO: 72045 - DNA, 600 bp, Chicken  19866894351526_3
tatttatttccatggaaactacaactggtacaaagagyacaataacaccatttgatagggcatcttctcagctacagaactcaatttttcagtgtagtcaccaccaccagctatgcatttttgccagctatgaacaagaatctgcatgccaagctcataaacatccacaccagcacaagtaacccactgtcgctttcaccactgctgaaatgcaccacccactgcctcactgtgctcacatccactgtttggtctccagaaacattcagcaagtattgatgaatgtmactgggtgccatkttttgaacatggaggaattcagtggcacrcctttgctacatatgcacttccatgtcagacgccattctgtcagactgcccctctgctgccatctgttacatggcaacaaaacataatgttgaaggttgaatctctatagccatcccaccaatatctgcctctgacattgtggactgacataaaataggaggtattacttttgaagcagcgctcatattttaatccaaggaaaatcagattcttcccttcgcttttccaaagcagatgaactcaattctagagaaccttaaagaagaggga

SEQ ID NO: 72046 - DNA, 600 bp, Chicken  19866894351526_4
acaaagagyacaataacaccatttgatagggcatcttctcagctacagaactcaatttttcagtgtagtcaccaccaccagctatgcatttttgccagctatgaacaagaatctgcatgccaagctcataaacatccacaccagcacaagtaacccactgtcgctttcaccactgctgaaatgcaccacccactgcctcactgtgctcacatccactgtttggtctccagaaacattcagcaagtattgatgaatgtmactgggtgccatkttttgaacatggaggaattcagtggcacrcctttgctacatatgcacttccatgtcagacgccattctgtcagactgcccctctgctgccatctgttacatggcaacaaaacataatgttgaaggttgaatctctatagccatcccaccaatatctgcctctgacattgtggactgacataaaataggaggtattacttttgaagcagcgctcatattttaatccaaggaaaatcagattcttcccttcgcttttccaaagcagatgaactcaattctagagaaccttaaagaagagggatttacccttagacctataaaaatgacttt

SEQ ID NO: 72047 - DNA, 599 bp, Chicken  19866894351531_1
  misc_feature (1)..(171): n is any nucleotide
nnnnnnnnnnnnnnnnnnnnnnnnnnnnnnnnnnnnnnnnnnnnnnnnnnnnnnnnnnnnnnnnnnnnnnnnnnnnnnnnnnnnnnnnnnnnnnnnnnnnnnnnnnnnnnnnnnnnnnnnnnnnnnnnnnnnnnnnnnnnnnnnnnnnnnnnnnnnnnnnnnnnnnnnnnnggaaagctggaggaaaggaactgctttgttacaaaggttacaattgcagtacaggtaatgtgtttttgagctggtcctagccactggttgtcatgtggcttatctttctggcaggactcaaaggcttcygttcattggtatgcaaacacttggaatccacatggagccactccaggtcttccaaagccttaacagacccctgccagatcttcattctcaaaaagctatgtatgctcagccaacatcacagtgactgtacttacgagtcctgccaaagccaagtgacctggagtgtccctgcagctctgttacccacatagttgttactggagtgttgccctctctaaaactgttgtgactctcattacctcttttactaaaaagggtttagttcactaacagtgcctaactagtataagaactggcgc

SEQ ID NO: 72048 - DNA, 600 bp, Chicken  19866894351531_2
attataataagagactgacttttctcaaggcttctgttacagtacatacccactgaataaatggcaactacttagaatcgtttagcatccaaattttctacagtccagtagccagcacagtgagctcttctgagaatttaactgtttacctggttatggaaattatgggaatagaaagtactggaaactagcctttactgagtatactgaatacttctgcaatcttattactagtgcttttattgggatcaagactttgagctctgctttgaagtgaatgggaagtcaagagagccacaragtaaatcttcacattagtcttcattgctaatgaggtacgtcctgtattctgcaacaattgaagcttttttgtagctgttacatacaaatccagacagattgagttaaagaagtgcaggctaaaactgaggagcacagaagacaaaaagaaaaaagaaataaaataaaatcaactacttaaagcacagcaaaaggtcacacacttgctgaaaatagtggtctccaatacagtgttcatattgaattccttgccagctttcacaaaacagaacacagtacattgatttgaaaaatcaatca

SEQ ID NO: 72049 - DNA, 600 bp, Chicken  19866894351532_1
ggtgtttcgctccatctaacagtgcagtgctcgtatgccacgttatcaccctgacaaagcactgctggtttcttaaccaacaccactccgaattggatccctgtcttcaggcttctgcccactcaaaggtatctctccagagcccttttgctgtgggagaaatctctgagggcaggttgacctgtgatggctgtagcttttccaagcacgcttggaatcagccctcagaagctaaaaaagctggaaggcagtgctaatcctctgaggagctggaactctggtggctctaggaatagaggraaaaaaagctaagcatcgtggctgatatctcgtgaggaatgtgaagcaaagtcagtgcagttcagctgttagctcagcagggagtcggcatggttccgttactcacaggactgctatttttcattggtctggtatgccttttccactcatctgcaatctgctgtgtgtgactgtgtggtaagtcgatttgctggctgtccaccacagttttgtgaggctgaaatctcatttagccctggctgctcccatgctaattgctagaagcatttggaggcagggtttccatatgcacatggcagg

SEQ ID NO: 72050 - DNA, 599 bp, Chicken  19866894351533_1
  misc_feature (1)..(104): n is any nucleotide
nnnnnnnnnnnnnnnnnnnnnnnnnnnnnnnnnnnnnnnnnnnnnnnnnnnnnnnnnnnnnnnnnnnnnnnnnnnnnnnnnnnnnnnnnnnnnnnnnnnnnnnnttctgtaaatatccctgagtgtttctgaggtgaccgtggcctactgtgtctttcacaccatgaactctgcctactgcacggcaccctcctccccacgcccactgaattactctgcaaaataaatgcagcaaacattgccctccaatttggagctgtcatccgagggtgaccaatgactcctggagagtgttggacrgagaggcggaattcgtccttcagggacagtcacctttctttcccatgtgaagaactgataatactttccaaacaagcagaaatacaaagccattacaagcagatgggaacacgcagacagattttacatgccctgagattctgcctccctcccttgtgatgaaggggattacacttactgaatatttttggctattcaagctgttttaacaaactataattgagccgctgttaaagatataacttcatatggtcatggtgttagggatatgccattctttcatacttcagaacagggct

SEQ ID NO: 72051 - DNA, 572 bp, Chicken  19866894351543_1
tccttccccccatcttccacctccaccccccaaggttttagcatctaaagtaacacatccttacaattgtactgctagatttagataacttgataatcacagttgctgactcttaataggcatagaggtccttttcaaagatactgtctctcttttagcccctgattaccattgtttttcatcttagaattactgttaaaaaatgcagtttaaattttaatggtgctaaaactttgacaaataaatctgtcttctgatatgctgggagttgtctcctaagtttgatatattttagactcmatagggtctccaagttttcctggaagattgtcaggggtcaaaggtgctaagcttctattttctttaggcatgaggactgaattttgtttttctataatgaacctgctgtagtgtcttgactggagggagttcaaggaattttccctcatgtatcttcaggctgtgcacttaaggcaattacgagtctatttatggtccacagcatcatttctcacactgtagtatattaatgctgtccaagaaaatgagtgcctcttcctgcccatgtgcat

SEQ ID NO: 72052 - DNA, 600 bp, Chicken  19866894351545_1
gtggggtctcctgagagcagagtagaggggcagaatcacctcccttgaccctctggtcacacttctcttgatgcagcccaggatacagttggtcttttgggctgtaggagcacactgctggctcatgttgagtctttcatcagccaacacccccaactcctcctcagggctgctctcaagctgttaaccacacagcctatatttgtacttgggattgccccaacccaggtgcaggatcttgcacatggccttgttgaactccatgaggttggcatggccctacctcttaagcctgtccaygtccatctggatagcaaacgtcagctacaccacttaacaatgacattgggctccagcaaagtaggggagaggcaccttgggtctgtaaaagcagacacaggggcagtaagtgttctctcaagtttgtgtggccagaaccttggcctgttctcacatggtttgaagatggtattcataatgcccatagttccagacttgctgtgtcactgcttttactgcttattttgagcattaaagcagcaaaatctattttgatttcagagaaaaaaaataccacttaggcacaagaaagaaagagaa

SEQ ID NO: 72053 - DNA, 600 bp, Chicken  19866894351556_1
tgggactgaaaaggctagaggctgatgacacttaactgtacaaaaccctgaaatatcaagtgcaagttgtattcagtttccctgcaatatcactcaggcttttggctctagactaattctttccatattcctcagtcctcaagagccttgctgtccttgccccaggtaccatattcctcctgcattctgccatgcagtgctccagctccagactttcagtgcaaggaaaagaagacaagatgcatcacaccaacttaaatatttcctatctgcattgctggctgctcttctaggctcacrggtatccaccctttaccttgtcaaagtctagtttcaggagtctgcatgtggtaacctgctcaggtcactgtactgctaatctgaatttgtcataaaaaaaaaaaaamaacttctggggtgctctagagctgagcttacatttgggctcaagtgcttgcgtacatgtaaaacattcctgtatttcaactcaataacaggactgagttcacctgagcaacagagacccacggctgcataagcctcacctttgttcagcactgaataatgttgccaaagagaacctgcagctggaggcaaatg

SEQ ID NO: 72054 - DNA, 600 bp, Chicken  19866894351556_2
ctagactaattctttccatattcctcagtcctcaagagccttgctgtccttgccccaggtaccatattcctcctgcattctgccatgcagtgctccagctccagactttcagtgcaaggaaaagaagacaagatgcatcacaccaacttaaatatttcctatctgcattgctggctgctcttctaggctcacrggtatccaccctttaccttgtcaaagtctagtttcaggagtctgcatgtggtaacctgctcaggtcactgtactgctaatctgaatttgtcataaaaaaaaaaaaamaacttctggggtgctctagagctgagcttacatttgggctcaagtgcttgcgtacatgtaaaacattcctgtatttcaactcaataacaggactgagttcacctgagcaacagagacccacggctgcataagcctcacctttgttcagcactgaataatgttgccaaagagaacctgcagctggaggcaaatgaccagacttgttccacaaacagactagaaagtgttggcatgtttgctgttgcttccttcagcctcgtgtgcatgccatagtgtgtcccaaggcatcagccagctcgg

SEQ ID NO: 72055 - DNA, 599 bp, Chicken  19866894351558_1
  misc_feature (1)..(196): n is any nucleotide
nnnnnnnnnnnnnnnnnnnnnnnnnnnnnnnnnnnnnnnnnnnnnnnnnnnnnnnnnnnnnnnnnnnnnnnnnnnnnnnnnnnnnnnnnnnnnnnnnnnnnnnnnnnnnnnnnnnnnnnnnnnnnnnnnnnnnnnnnnnnnnnnnnnnnnnnnnnnnnnnnnnnnnnnnnnnnnnnnnnnnnnnnnnnnnnnnnnntgctctgttatccttgcattcaagttgcacatgtatcttcagtggggtttattttgtgagataatgccttcattgctacaatagcaggttgttctcaagtaagygttgagtcttagttgcaaatttctgaaaggtagagaaaagtgagggccagctgtggtggaataaattcatccaggtgttcaaatttctacactggcaaactgaagaaraagtagtgtgtctatgcagttatagagcaacctgttacttgagaatgaggggatgtaccaagatccacatgaaaaaaaraatgcaaggttagtctgtacccacaatgatacaagtatagccatagaaataataatgactgttctgtggtttcacctgtgcagacagataaacaccaaacagctgctcactc

SEQ ID NO: 72056 - DNA, 599 bp, Chicken  19866894351558_2
  misc_feature (1)..(88): n is any nucleotide
nnnnnnnnnnnnnnnnnnnnnnnnnnnnnnnnnnnnnnnnnnnnnnnnnnnnnnnnnnnnnnnnnnnnnnnnnnnnnnnnnnnnnnnntgctctgttatccttgcattcaagttgcacatgtatcttcagtggggtttattttgtgagataatgccttcattgctacaatagcaggttgttctcaagtaagygttgagtcttagttgcaaatttctgaaaggtagagaaaagtgagggccagctgtggtggaataaattcatccaggtgttcaaatttctacactggcaaactgaagaaraagtagtgtgtctatgcagttatagagcaacctgttacttgagaatgaggggatgtaccaagatccacatgaaaaaaaraatgcaaggttagtctgtacccacaatgatacaagtatagccatagaaataataatgactgttctgtggtttcacctgtgcagacagataaacaccaaacagctgctcactcacttttgctatactgagataggggagagaattggaaaggcaaaattacagtaactcatatgttgagatgacaacagtttacttgataaaacagtagctatgtgagtaa

SEQ ID NO: 72057 - DNA, 599 bp, Chicken  19866894351558_3
  misc_feature (1)..(9): n is any nucleotide
nnnnnnnnntgctctgttatccttgcattcaagttgcacatgtatcttcagtggggtttattttgtgagataatgccttcattgctacaatagcaggttgttctcaagtaagygttgagtcttagttgcaaatttctgaaaggtagagaaaagtgagggccagctgtggtggaataaattcatccaggtgttcaaatttctacactggcaaactgaagaaraagtagtgtgtctatgcagttatagagcaacctgttacttgagaatgaggggatgtaccaagatccacatgaaaaaaaraatgcaaggttagtctgtacccacaatgatacaagtatagccatagaaataataatgactgttctgtggtttcacctgtgcagacagataaacaccaaacagctgctcactcacttttgctatactgagataggggagagaattggaaaggcaaaattacagtaactcatatgttgagatgacaacagtttacttgataaaacagtagctatgtgagtaagcagagcaaaacatggaattcattcaccacacaaaatattytcttgagaagacaaactccagtgctcccagaatccctc

SEQ ID NO: 72058 - DNA, 600 bp, Chicken  19866894351558_4
gagaatgaggggatgtaccaagatccacatgaaaaaaaraatgcaaggttagtctgtacccacaatgatacaagtatagccatagaaataataatgactgttctgtggtttcacctgtgcagacagataaacaccaaacagctgctcactcacttttgctatactgagataggggagagaattggaaaggcaaaattacagtaactcatatgttgagatgacaacagtttacttgataaaacagtagctatgtgagtaagcagagcaaaacatggaattcattcaccacacaaaatattytcttgagaagacaaactccagtgctcccagaatccctcctctacttctttcttygctccagcttttatcattgagcatgacaccatgtgttatacagtctgggtcagctgtcctgggttgtgtctcctcccagcttcctgtacactgccagtacattgctgtcagagcagtgtgagaagcagaaatgtccatgggttctgtctaaactggagtaagttactggttattttcaccacaaactcaaaccataccatgatttaaacctctatgaagaacattacctctatcccaaccaaaaaa

SEQ ID NO: 72059 - DNA, 588 bp, Chicken  19866894351558_5
tgtacccacaatgatacaagtatagccatagaaataataatgactgttctgtggtttcacctgtgcagacagataaacaccaaacagctgctcactcacttttgctatactgagataggggagagaattggaaaggcaaaattacagtaactcatatgttgagatgacaacagtttacttgataaaacagtagctatgtgagtaagcagagcaaaacatggaattcattcaccacacaaaatattytcttgagaagacaaactccagtgctcccagaatccctcctctacttctttcttygctccagcttttatcattgagcatgacaccatgtgttatacagtctgggtcagctgtcctgggttgtgtctcctcccagcttcctgtacactgccagtacattgctgtcagagcagtgtgagaagcagaaatgtccatgggttctgtctaaactggagtaagttactggttattttcaccacaaactcaaaccataccatgatttaaacctctatgaagaacattacctctatcccaaccaaaaaaaaaggaccgttgtaattcaactattgatgctatttgaaagat

SEQ ID NO: 72060 - DNA, 600 bp, Chicken  19866894351561_1
tcaaacaaagactcaggtacagacattaaatacttctataacatcaaggaacccaagtgaatcatagaatggcctgggttgaaaaggacctcaaagatcatctagtttcaacctccatgacatgggcagagtcaccaaccattagaccaggctgcccagagccacatccagccttgaagcagcactgtgccaacagactgtccttgcagatcaagatgctgaatcatcttttcacagcaggttccctcacattaattcctcctgcttcccctctctcctctccatctctcagccccttcytagttccccatgtctgctaagctgggttgacctcaccaacctgcatgctgacccactgcctctctgccctaaatcatccgttcccctggcaggtctactgcgacaacctacagtcaggtctacaccagaacctaaagagaagggctctggggctaaaaaatggagccacttctcttgcagatctcctttataccacttcttacctctgtcccatgtgccacagcaacctgccacacagtgtcctccactgttcagcccagccttccacccccttgaaccagatgtattctttttaacaga

SEQ ID NO: 72061 - DNA, 600 bp, Chicken  19866894351568_1
tatactttcattccgtgtgtgtatacatgtgtgtgcatatagcacatgaatatttggtcttctaatgtaaaatgcacctctctattctccttgggccagcagtgtactcctgcctcctccatttgctctaattttcattgttcacagaaggcttcagaatccagccaacacacatcatagaattagtgagaactatcagtcagaaatttatgcactaattaagcttttaactttacacaagagatcatgtcttgaaatgctttcataccatcacagaagagaacaagctagctgggagcwgtaagcaccatctgagatttcttccataactcagactgtctaccattcagcttcacccggacccccattcaagcacrtctcttttccctcatatccttttactgcttcttcctttgaagttgacttccagggatagctcgagtcctgatttctctggcccccagcaatgtctggcacagaccaagttccttctaacacactacaaagctaggtttctttataacaagacacatgtctgcgattctttctacactggtagtgtcacttaagcagcctttttctaagctcaggctttacatc

SEQ ID NO: 72062 - DNA, 588 bp, Chicken  19866894351568_2
ctctctattctccttgggccagcagtgtactcctgcctcctccatttgctctaattttcattgttcacagaaggcttcagaatccagccaacacacatcatagaattagtgagaactatcagtcagaaatttatgcactaattaagcttttaactttacacaagagatcatgtcttgaaatgctttcataccatcacagaagagaacaagctagctgggagcwgtaagcaccatctgagatttcttccataactcagactgtctaccattcagcttcacccggacccccattcaagcacrtctcttttccctcatatccttttactgcttcttcctttgaagttgacttccagggatagctcgagtcctgatttctctggcccccagcaatgtctggcacagaccaagttccttctaacacactacaaagctaggtttctttataacaagacacatgtctgcgattctttctacactggtagtgtcacttaagcagcctttttctaagctcaggctttacatctgggacatgggggcagtaccacagctatctaacccctctatgagagagcacagcccaggaactag

SEQ ID NO: 72063 - DNA, 599 bp, Chicken  19866894351571_1
  misc_feature (1)..(203): n is any nucleotide
nnnnnnnnnnnnnnnnnnnnnnnnnnnnnnnnnnnnnnnnnnnnnnnnnnnnnnnnnnnnnnnnnnnnnnnnnnnnnnnnnnnnnnnnnnnnnnnnnnnnnnnnnnnnnnnnnnnnnnnnnnnnnnnnnnnnnnnnnnnnnnnnnnnnnnnnnnnnnnnnnnnnnnnnnnnnnnnnnnnnnnnnnnnnnnnnnnnnnnnnnnncacacctggagcagcagtggctgtgaggtcggagcctgtcccagccttccactgcctcaggaaaagggaaacgaggaccacggccctgaggggtgaygtggtgcagtcttttgctgacaaagagaaatagaaactgagaggacagggacacaaaggccttgatctgtctgatgttctgctcctatgcctggacttctgtctgtctgcctgcaggccagtggatggraagaaggtgctgatgtgtggtgcgaacctcacacagatgagtgggaatggggccatccaaccacccatctattttaaaacgtttcttgcattcttcctccgttaccaygtaggcatcttgttgcaaaacatggacatcctaaactataatttgcttttgttgagctattg

SEQ ID NO: 72064 - DNA, 599 bp, Chicken  19866894351571_2
  misc_feature (1)..(74): n is any nucleotide
nnnnnnnnnnnnnnnnnnnnnnnnnnnnnnnnnnnnnnnnnnnnnnnnnnnnnnnnnnnnnnnnnnnnnnnnnncacacctggagcagcagtggctgtgaggtcggagcctgtcccagccttccactgcctcaggaaaagggaaacgaggaccacggccctgaggggtgaygtggtgcagtcttttgctgacaaagagaaatagaaactgagaggacagggacacaaaggccttgatctgtctgatgttctgctcctatgcctggacttctgtctgtctgcctgcaggccagtggatggraagaaggtgctgatgtgtggtgcgaacctcacacagatgagtgggaatggggccatccaaccacccatctattttaaaacgtttcttgcattcttcctccgttaccaygtaggcatcttgttgcaaaacatggacatcctaaactataatttgcttttgttgagctattgatcctgattgtgcctgagatttgggagtttcccaaatacaataactgtgtttacatgcagtagtcagggaggaaattgcatgtgaaagcactcaataaggagatggtattttgttgcaattatacataa

SEQ ID NO: 72065 - DNA, 600 bp, Chicken  19866894351571_3
cctgtcccagccttccactgcctcaggaaaagggaaacgaggaccacggccctgaggggtgaygtggtgcagtcttttgctgacaaagagaaatagaaactgagaggacagggacacaaaggccttgatctgtctgatgttctgctcctatgcctggacttctgtctgtctgcctgcaggccagtggatggraagaaggtgctgatgtgtggtgcgaacctcacacagatgagtgggaatggggccatccaaccacccatctattttaaaacgtttcttgcattcttcctccgttaccaygtaggcatcttgttgcaaaacatggacatcctaaactataatttgcttttgttgagctattgatcctgattgtgcctgagatttgggagtttcccaaatacaataactgtgtttacatgcagtagtcagggaggaaattgcatgtgaaagcactcaataaggagatggtattttgttgcaattatacataagccttgtgtttacatggggtttttaaggagaattcaaagcatatctcctttttgtgatgcatcaacaagcatatcaaatgattgttcaaaaagcttgtgctttttgcaa

SEQ ID NO: 72066 - DNA, 600 bp, Chicken  19866894351573_1
aacttaaatatgattgccatgcaaccttctctttgtcattgcccttgatcagtacaacttcatcatttaattcaaatgctatatattagtctgagaagtgcttgcagaagccaagtttggtagtatctacagcccatcaaaaactccatctactttttcatttgccttaactacgatgcaatcctactttatgttcaatatttaagacctcacttgcaactgttctagtggggcacagttctcacctgggaacattggtctttcactgttggattcatgctttcagctaaatctggtgtrtggaaagcattttctctatcccagtmtcaggtggagtcaacttaaaggcattctgagctgtcatctccaaaattatgaaacataacaggtagcacacaatgacatcttgtgcggtagaagctacacttacatactgaaatgctcaggaaacattcacagagggaagtacttttagttggaaaaagcagtttttcatgatgtactaattcatttacagcagcagtagttaagtgaaaatatattaacaaaataaagcatatatatatatatatatatattctaagtctagtagtctttcta

SEQ ID NO: 72067 - DNA, 587 bp, Chicken  19866894351573_2
ttctctttgtcattgcccttgatcagtacaacttcatcatttaattcaaatgctatatattagtctgagaagtgcttgcagaagccaagtttggtagtatctacagcccatcaaaaactccatctactttttcatttgccttaactacgatgcaatcctactttatgttcaatatttaagacctcacttgcaactgttctagtggggcacagttctcacctgggaacattggtctttcactgttggattcatgctttcagctaaatctggtgtrtggaaagcattttctctatcccagtmtcaggtggagtcaacttaaaggcattctgagctgtcatctccaaaattatgaaacataacaggtagcacacaatgacatcttgtgcggtagaagctacacttacatactgaaatgctcaggaaacattcacagagggaagtacttttagttggaaaaagcagtttttcatgatgtactaattcatttacagcagcagtagttaagtgaaaatatattaacaaaataaagcatatatatatatatatatatattctaagtctagtagtctttctatacactaataaaa

SEQ ID NO: 72068 - DNA, 600 bp, Chicken  19866894351576_1
cttcatacacaaacaggtaggagggtcttgctgtttagagtctgagggttcaggagggaatgaagcagggaggaagaatggaaacaatggaacaatggaaagtcttaaatgtgccaacagtgcttgttatttgtccgtttccataataataagtttatttttaaaaaagcaggaaaacaatattggtggtagatattatttctgataacctggttgtcatgaggctatgtgctgagggtagaatgctgaagaagactctaagtttactgctgaattcataatgatgtattttacctcaayacaaagtgttgacttaggtttagaattagctttactaaaatactcgtgtatttttgcagaataacagttggaaaaacggtgaccagtcccctgtctctcttcaaagcagtacattgcaaaagaaaagtccattgttacactgcaaagccttgttataagaggaaacagttccctaaatcaaggggctgtaacatggcaaataaagaaaatgaactggcttgtgcagggaatctgccagcaaaactgaatgacagtcgtacacacttgctgaattctagtgactctggttcatctcaaaca

SEQ ID NO: 72069 - DNA, 599 bp, Chicken  19866894351580_1
  misc_feature (1)..(139): n is any nucleotide
nnnnnnnnnnnnnnnnnnnnnnnnnnnnnnnnnnnnnnnnnnnnnnnnnnnnnnnnnnnnnnnnnnnnnnnnnnnnnnnnnnnnnnnnnnnnnnnnnnnnnnnnnnnnnnnnnnnnnnnnnnnnnnnnnnnnnnnnnnnttttctattaaaaagatgcaaaaaatacccaaaaaatagcagtgaaggtatatacgcccataggtgaacaaaatcctttattaaactatgtgtatgtcacccaacacttcaggagtgtgtatagttatatattaataacaattcaatttatcatcattatyatcaactgagattttagytgagaatgcaactgaaaacataaaaagttctaaatcagaaagatccccatctccaagaagcactttttccatctmaccacagtgaaggcaagaagcrgttgtgttgatggaacagacacattggtgaggtggatctggaagcaagaaaagcaggaaagcaagcagtcagagtatggagaagccctgctcttcctctttcctcagtcactgtggctgccacacggaagttcacattgccatttcccattgctaatcaacccagcacatcaggttcagtgatt

SEQ ID NO: 72070 - DNA, 599 bp, Chicken  19866894351580_2
  misc_feature (1)..(121): n is any nucleotide
nnnnnnnnnnnnnnnnnnnnnnnnnnnnnnnnnnnnnnnnnnnnnnnnnnnnnnnnnnnnnnnnnnnnnnnnnnnnnnnnnnnnnnnnnnnnnnnnnnnnnnnnnnnnnnnnnnnnnnnnnttttctattaaaaagatgcaaaaaatacccaaaaaatagcagtgaaggtatatacgcccataggtgaacaaaatcctttattaaactatgtgtatgtcacccaacacttcaggagtgtgtatagttatatattaataacaattcaatttatcatcattatyatcaactgagattttagytgagaatgcaactgaaaacataaaaagttctaaatcagaaagatccccatctccaagaagcactttttccatctmaccacagtgaaggcaagaagcrgttgtgttgatggaacagacacattggtgaggtggatctggaagcaagaaaagcaggaaagcaagcagtcagagtatggagaagccctgctcttcctctttcctcagtcactgtggctgccacacggaagttcacattgccatttcccattgctaatcaacccagcacatcaggttcagtgattcagggaggtttgctgaag

SEQ ID NO: 72071 - DNA, 599 bp, Chicken  19866894351580_3
  misc_feature (1)..(46): n is any nucleotide
nnnnnnnnnnnnnnnnnnnnnnnnnnnnnnnnnnnnnnnnnnnnnnttttctattaaaaagatgcaaaaaatacccaaaaaatagcagtgaaggtatatacgcccataggtgaacaaaatcctttattaaactatgtgtatgtcacccaacacttcaggagtgtgtatagttatatattaataacaattcaatttatcatcattatyatcaactgagattttagytgagaatgcaactgaaaacataaaaagttctaaatcagaaagatccccatctccaagaagcactttttccatctmaccacagtgaaggcaagaagcrgttgtgttgatggaacagacacattggtgaggtggatctggaagcaagaaaagcaggaaagcaagcagtcagagtatggagaagccctgctcttcctctttcctcagtcactgtggctgccacacggaagttcacattgccatttcccattgctaatcaacccagcacatcaggttcagtgattcagggaggtttgctgaaggccagctaatttgctgcatactgcacttcattcccagtagaaatgtaacactgctctcagtgctgagaggtgaca

SEQ ID NO: 72072 - DNA, 599 bp, Chicken  19866894351580_4
  misc_feature (1)..(24): n is any nucleotide
nnnnnnnnnnnnnnnnnnnnnnnnttttctattaaaaagatgcaaaaaatacccaaaaaatagcagtgaaggtatatacgcccataggtgaacaaaatcctttattaaactatgtgtatgtcacccaacacttcaggagtgtgtatagttatatattaataacaattcaatttatcatcattatyatcaactgagattttagytgagaatgcaactgaaaacataaaaagttctaaatcagaaagatccccatctccaagaagcactttttccatctmaccacagtgaaggcaagaagcrgttgtgttgatggaacagacacattggtgaggtggatctggaagcaagaaaagcaggaaagcaagcagtcagagtatggagaagccctgctcttcctctttcctcagtcactgtggctgccacacggaagttcacattgccatttcccattgctaatcaacccagcacatcaggttcagtgattcagggaggtttgctgaaggccagctaatttgctgcatactgcacttcattcccagtagaaatgtaacactgctctcagtgctgagaggtgacagcaggttagggatgtgtttaca

SEQ ID NO: 72073 - DNA, 600 bp, Chicken  19866894351588_1
aatacgtaattcaatccttgcccaaggtttcagtcccttttactaagaggagttagctatacagttcttcctcgtggtctgaattctgagctgttccaagattcagaattttttgactgtgtccgttataattaaaagcagagattccaaagtaatgaggtaaggctaaaaaaacaaccaagaaaaagtgatggaaaagaaaaacctaaacaggggcaaagtgtaatgaaaatgcagtagaaactaagctatagaagcaagtggatgcaagaaaagcagaaagcatcccccaggttacasaacatgataaacccacatacaatccagagtactccaaggtctgcaccaatgctgtagcagtgttattttagagtatccagttcaagtgcacacaaaagctggaacgtagctttccaggagcccccacttagcagtgaagwttytactcaggtcacagctgaaaaccagcttacagtgagtgagaagaccgcactatgctattttttggttgcttgctcagttgtagagtactcagtccatcaccagctcacctgtaggctgtcttyatttctgattacaaggctgtcagatgctcaaatc

SEQ ID NO: 72074 - DNA, 600 bp, Chicken  19866894351588_2
gagattccaaagtaatgaggtaaggctaaaaaaacaaccaagaaaaagtgatggaaaagaaaaacctaaacaggggcaaagtgtaatgaaaatgcagtagaaactaagctatagaagcaagtggatgcaagaaaagcagaaagcatcccccaggttacasaacatgataaacccacatacaatccagagtactccaaggtctgcaccaatgctgtagcagtgttattttagagtatccagttcaagtgcacacaaaagctggaacgtagctttccaggagcccccacttagcagtgaagwttytactcaggtcacagctgaaaaccagcttacagtgagtgagaagaccgcactatgctattttttggttgcttgctcagttgtagagtactcagtccatcaccagctcacctgtaggctgtcttyatttctgattacaaggctgtcagatgctcaaatccttcctgagacctgaatatttgggtagtatttggagagtgtttgctttttcaagaagatagagctcttgcaatctgcttactgaccaacagcaaccatccaaaaccaaagcaaacaaaaccgaaacaaaaaccagaatgt

SEQ ID NO: 72075 - DNA, 600 bp, Chicken  19866894351588_3
attccaaagtaatgaggtaaggctaaaaaaacaaccaagaaaaagtgatggaaaagaaaaacctaaacaggggcaaagtgtaatgaaaatgcagtagaaactaagctatagaagcaagtggatgcaagaaaagcagaaagcatcccccaggttacasaacatgataaacccacatacaatccagagtactccaaggtctgcaccaatgctgtagcagtgttattttagagtatccagttcaagtgcacacaaaagctggaacgtagctttccaggagcccccacttagcagtgaagwttytactcaggtcacagctgaaaaccagcttacagtgagtgagaagaccgcactatgctattttttggttgcttgctcagttgtagagtactcagtccatcaccagctcacctgtaggctgtcttyatttctgattacaaggctgtcagatgctcaaatccttcctgagacctgaatatttgggtagtatttggagagtgtttgctttttcaagaagatagagctcttgcaatctgcttactgaccaacagcaaccatccaaaaccaaagcaaacaaaaccgaaacaaaaaccagaatgttct

SEQ ID NO: 72076 - DNA, 600 bp, Chicken  19866894351588_4
gcaagaaaagcagaaagcatcccccaggttacasaacatgataaacccacatacaatccagagtactccaaggtctgcaccaatgctgtagcagtgttattttagagtatccagttcaagtgcacacaaaagctggaacgtagctttccaggagcccccacttagcagtgaagwttytactcaggtcacagctgaaaaccagcttacagtgagtgagaagaccgcactatgctattttttggttgcttgctcagttgtagagtactcagtccatcaccagctcacctgtaggctgtcttyatttctgattacaaggctgtcagatgctcaaatccttcctgagacctgaatatttgggtagtatttggagagtgtttgctttttcaagaagatagagctcttgcaatctgcttactgaccaacagcaaccatccaaaaccaaagcaaacaaaaccgaaacaaaaaccagaatgttctccaagtgtcaaatgtattgcagctattaagaaccaatgacatttccatttcaaagacaaaaacatgtaatagtrattgttggtgagtcatttgttaacaaaatggtcatgactttagaagaaa

SEQ ID NO: 72077 - DNA, 600 bp, Chicken  19866894351588_5
cagttgtagagtactcagtccatcaccagctcacctgtaggctgtcttyatttctgattacaaggctgtcagatgctcaaatccttcctgagacctgaatatttgggtagtatttggagagtgtttgctttttcaagaagatagagctcttgcaatctgcttactgaccaacagcaaccatccaaaaccaaagcaaacaaaaccgaaacaaaaaccagaatgttctccaagtgtcaaatgtattgcagctattaagaaccaatgacatttccatttcaaagacaaaaacatgtaatagtrattgttggtgagtcatttgttaacaaaatggtcatgactttagaagaaatgtaactggcttcttattagcgcagacaagaaagaaggaagcatttaatcttgctgtccggcagaagcagaccgttgcayrcaacataccctttgctcagagcactacattggctggcaaggaattcagatggcagtggcagatttcctcattcattctgcactcagaaaggttaatggagactttctcagcacttagctgacttcacatggtacttgtgaagttgtgaactttgagactgttacagtgaa

SEQ ID NO: 72078 - DNA, 600 bp, Chicken  19866894351588_6
ttttcaagaagatagagctcttgcaatctgcttactgaccaacagcaaccatccaaaaccaaagcaaacaaaaccgaaacaaaaaccagaatgttctccaagtgtcaaatgtattgcagctattaagaaccaatgacatttccatttcaaagacaaaaacatgtaatagtrattgttggtgagtcatttgttaacaaaatggtcatgactttagaagaaatgtaactggcttcttattagcgcagacaagaaagaaggaagcatttaatcttgctgtccggcagaagcagaccgttgcayrcaacataccctttgctcagagcactacattggctggcaaggaattcagatggcagtggcagatttcctcattcattctgcactcagaaaggttaatggagactttctcagcacttagctgacttcacatggtacttgtgaagttgtgaactttgagactgttacagtgaagagtggtgtttctctaaagacatcaatgacttcccctaggattactcctaagcacaccgaagctggcatggccttttcctacggaagccacattttaaggagcagtgagttacctttgttttcctctag

SEQ ID NO: 72079 - DNA, 600 bp, Chicken  19866894351588_7
tttcaagaagatagagctcttgcaatctgcttactgaccaacagcaaccatccaaaaccaaagcaaacaaaaccgaaacaaaaaccagaatgttctccaagtgtcaaatgtattgcagctattaagaaccaatgacatttccatttcaaagacaaaaacatgtaatagtrattgttggtgagtcatttgttaacaaaatggtcatgactttagaagaaatgtaactggcttcttattagcgcagacaagaaagaaggaagcatttaatcttgctgtccggcagaagcagaccgttgcayrcaacataccctttgctcagagcactacattggctggcaaggaattcagatggcagtggcagatttcctcattcattctgcactcagaaaggttaatggagactttctcagcacttagctgacttcacatggtacttgtgaagttgtgaactttgagactgttacagtgaagagtggtgtttctctaaagacatcaatgacttcccctaggattactcctaagcacaccgaagctggcatggccttttcctacggaagccacattttaaggagcagtgagttacctttgttttcctctagt

SEQ ID NO: 72080 - DNA, 600 bp, Chicken  19866894351594_1
ttaaccacgacagctgttgccatcaaaatggagggatctctgagctagaaatggtgaaatgaagtgaggcaaaaatatgggacataatatgaaaatgtacccatcatatagtttaaacgaagaattttgatgaaattcaatatttgaaatgcatccaccatattggcatattccagaatgctgagatgggaggatttttatttttaattgccctaattataacctgattattccaaattttctgcagaacttaggcagctgtacagcataactgtaagcttgctaaaggtgcccaagcartacagaacaagcaaaggtactgcagtgtgaccacccgtgcaggtgagttcatagcaactgaggtgtcacaaccaaatcagaattaacataacagttaagcaaaacacaagaaagcctgcctcaaaactcactgcagcaataaacgtctacacctgcgggtggcattatyggctttcttttcatttcactgtgcagggcaagaaagcaattactgaactgcagaagcaagtattggtacaaatggaaatctgatgcatacaaattcagtttctaacaaatttccttctttcctactcgaga

SEQ ID NO: 72081 - DNA, 575 bp, Chicken  19866894351594_2
attccagaatgctgagatgggaggatttttatttttaattgccctaattataacctgattattccaaattttctgcagaacttaggcagctgtacagcataactgtaagcttgctaaaggtgcccaagcartacagaacaagcaaaggtactgcagtgtgaccacccgtgcaggtgagttcatagcaactgaggtgtcacaaccaaatcagaattaacataacagttaagcaaaacacaagaaagcctgcctcaaaactcactgcagcaataaacgtctacacctgcgggtggcattatyggctttcttttcatttcactgtgcagggcaagaaagcaattactgaactgcagaagcaagtattggtacaaatggaaatctgatgcatacaaattcagtttctaacaaatttccttctttcctactcgagaattttgcagagaaaaagatggttgtgactactgtctctgctttagtttctccctgattattaaaagctgcatgagcaagtatgacatctgcagtgtgcttatgaatgatattttcagtggcaaaacccaccaacattgatcgag

SEQ ID NO: 72082 - DNA, 599 bp, Chicken  19866894351596_1
  misc_feature (1)..(16): n is any nucleotide
nnnnnnnnnnnnnnnnaatactataggtgattcattgttacctgtacggacccattttacatagctcatcactgcttttcctggtagcggagaacatttcgggccctgccctgttgaagaggcttgcaggttgcattcaaacctcttgttcctaaccttgaggtcgacagtagtgttgcatgaagtccattacacaagctgtaagtatgaccagctgggtcatttgaataagcatttgatttgctatccacaggttaacgatcacttttggcctagctaatgtatatttttctctttttygwgatggtccttaggatgaggatttttcccatgctctgagaaaagagcaatcataatctggggatgtgagccaggcrttttgcttctggcatctgcccttggtgatatttctcagtttctggcttggctgccttgttctggtgctggctgtggcaccctgtgtagcccttccctggcccaaaggacacagcaggaccactctgtaagaccttactgtcttgcaaagatttccaactaattaggggcttagagatattctggagagttgcttttcctgcttgtcgtctggcattggcccc

SEQ ID NO: 72083 - DNA, 599 bp, Chicken  19866894351596_2
  misc_feature (1)..(14): n is any nucleotide
nnnnnnnnnnnnnnaatactataggtgattcattgttacctgtacggacccattttacatagctcatcactgcttttcctggtagcggagaacatttcgggccctgccctgttgaagaggcttgcaggttgcattcaaacctcttgttcctaaccttgaggtcgacagtagtgttgcatgaagtccattacacaagctgtaagtatgaccagctgggtcatttgaataagcatttgatttgctatccacaggttaacgatcacttttggcctagctaatgtatatttttctctttttygwgatggtccttaggatgaggatttttcccatgctctgagaaaagagcaatcataatctggggatgtgagccaggcrttttgcttctggcatctgcccttggtgatatttctcagtttctggcttggctgccttgttctggtgctggctgtggcaccctgtgtagcccttccctggcccaaaggacacagcaggaccactctgtaagaccttactgtcttgcaaagatttccaactaattaggggcttagagatattctggagagttgcttttcctgcttgtcgtctggcattggccccaa

SEQ ID NO: 72084 - DNA, 600 bp, Chicken  19866894351596_3
ttcctggtagcggagaacatttcgggccctgccctgttgaagaggcttgcaggttgcattcaaacctcttgttcctaaccttgaggtcgacagtagtgttgcatgaagtccattacacaagctgtaagtatgaccagctgggtcatttgaataagcatttgatttgctatccacaggttaacgatcacttttggcctagctaatgtatatttttctctttttygwgatggtccttaggatgaggatttttcccatgctctgagaaaagagcaatcataatctggggatgtgagccaggcrttttgcttctggcatctgcccttggtgatatttctcagtttctggcttggctgccttgttctggtgctggctgtggcaccctgtgtagcccttccctggcccaaaggacacagcaggaccactctgtaagaccttactgtcttgcaaagatttccaactaattaggggcttagagatattctggagagttgcttttcctgcttgtcgtctggcattggccccaaggtttctyactgctctttgatgatgcagtgctgtgcttgtttctgctctctaattagctctagtgcctgtgtgatc

SEQ ID NO: 72085 - DNA, 600 bp, Chicken  19866894351596_4
cttaggatgaggatttttcccatgctctgagaaaagagcaatcataatctggggatgtgagccaggcrttttgcttctggcatctgcccttggtgatatttctcagtttctggcttggctgccttgttctggtgctggctgtggcaccctgtgtagcccttccctggcccaaaggacacagcaggaccactctgtaagaccttactgtcttgcaaagatttccaactaattaggggcttagagatattctggagagttgcttttcctgcttgtcgtctggcattggccccaaggtttctyactgctctttgatgatgcagtgctgtgcttgtttctgctctctaattagctctagtgcctgtgtgatcctgcaggtgttaatgagggctgtgtgagtgtgctggggccatcgtcaggaaatgtcaaggtagtgtggttgctctgtaacttgctccctgtaagaggttatcttgctctcactgggatggctttgcttttgcagggctaaataattaaagagctcttcaggcaggtggcaccttccaggaaactctgggttacttccctgtgcagggctgctctgtggggctagaccccgca

SEQ ID NO: 72086 - DNA, 600 bp, Chicken  19866894351608_1
tagagctgcctcctgcagcactctgcctcttctctgctgctcgagtgactcctagggacctgctccagtttagtcctggggacctggaatgacactgtggcacgatctgattttgcctgttaggaggcttggggtcgttctgccttgctttcttttttccctccccttttttttagaggggaaaaaaaaaccctaagaattgccaggtcggggagtatttatgagtgtttatttattttccatctgggcttctgaatactgatttatgagtgaggacgtggccagggcaggagatgggtratgagaggtcaggatatagcctgataggagtgtaggagcatgaaaggagcccctgcttgagcaaatatttagctmtcctggggtgaggtttggccaagggagggttaaaccstgctcctctttgtgccatcctgactccttttagtgggattctccatttgcagagggtttctttggggaaactgaggtgcagagggaggcacatctcagctcagggtctctgagtcartttgatggaaaaatagggttcaaactcaagtgttcaggtgaccaaaatcgcctgaatggctcaggtttatg

SEQ ID NO: 72087 - DNA, 600 bp, Chicken  19866894351608_2
ctggggacctggaatgacactgtggcacgatctgattttgcctgttaggaggcttggggtcgttctgccttgctttcttttttccctccccttttttttagaggggaaaaaaaaaccctaagaattgccaggtcggggagtatttatgagtgtttatttattttccatctgggcttctgaatactgatttatgagtgaggacgtggccagggcaggagatgggtratgagaggtcaggatatagcctgataggagtgtaggagcatgaaaggagcccctgcttgagcaaatatttagctmtcctggggtgaggtttggccaagggagggttaaaccstgctcctctttgtgccatcctgactccttttagtgggattctccatttgcagagggtttctttggggaaactgaggtgcagagggaggcacatctcagctcagggtctctgagtcartttgatggaaaaatagggttcaaactcaagtgttcaggtgaccaaaatcgcctgaatggctcaggtttatggcaatgactggcatttgggtattgctacaacacacagctgtgttgaaacaccaaagctccggaccacttgcttgc

SEQ ID NO: 72088 - DNA, 600 bp, Chicken  19866894351608_3
ttgcctgttaggaggcttggggtcgttctgccttgctttcttttttccctccccttttttttagaggggaaaaaaaaaccctaagaattgccaggtcggggagtatttatgagtgtttatttattttccatctgggcttctgaatactgatttatgagtgaggacgtggccagggcaggagatgggtratgagaggtcaggatatagcctgataggagtgtaggagcatgaaaggagcccctgcttgagcaaatatttagctmtcctggggtgaggtttggccaagggagggttaaaccstgctcctctttgtgccatcctgactccttttagtgggattctccatttgcagagggtttctttggggaaactgaggtgcagagggaggcacatctcagctcagggtctctgagtcartttgatggaaaaatagggttcaaactcaagtgttcaggtgaccaaaatcgcctgaatggctcaggtttatggcaatgactggcatttgggtattgctacaacacacagctgtgttgaaacaccaaagctccggaccacttgcttgcactgagcagaaggaagcgctgtgcctcggggctttgg

SEQ ID NO: 72089 - DNA, 600 bp, Chicken  19866894351608_4
tatttattttccatctgggcttctgaatactgatttatgagtgaggacgtggccagggcaggagatgggtratgagaggtcaggatatagcctgataggagtgtaggagcatgaaaggagcccctgcttgagcaaatatttagctmtcctggggtgaggtttggccaagggagggttaaaccstgctcctctttgtgccatcctgactccttttagtgggattctccatttgcagagggtttctttggggaaactgaggtgcagagggaggcacatctcagctcagggtctctgagtcartttgatggaaaaatagggttcaaactcaagtgttcaggtgaccaaaatcgcctgaatggctcaggtttatggcaatgactggcatttgggtattgctacaacacacagctgtgttgaaacaccaaagctccggaccacttgcttgcactgagcagaaggaagcgctgtgcctcggggctttggggactcgggcttttgaaggtgaggtttgcagggaaatccttgcagcacgaaatgcagctcctggctgacgatccacggatgagcaggaagagctttaagcagagctctggtggggtt

SEQ ID NO: 72090 - DNA, 599 bp, Chicken  19866894351611_1
  misc_feature (1)..(215): n is any nucleotide
nnnnnnnnnnnnnnnnnnnnnnnnnnnnnnnnnnnnnnnnnnnnnnnnnnnnnnnnnnnnnnnnnnnnnnnnnnnnnnnnnnnnnnnnnnnnnnnnnnnnnnnnnnnnnnnnnnnnnnnnnnnnnnnnnnnnnnnnnnnnnnnnnnnnnnnnnnnnnnnnnnnnnnnnnnnnnnnnnnnnnnnnnnnnnnnnnnnnnnnnnnnnnnnnnnnnnnncaaggcagtgactccacccactccctgggcagcctgtgccaatgctgaccactctttctggcattcaggaactgcagcagttctsaaagtctttctgttaacatcctctagatccrgaaagtggaagcatgcagattttcaaaggcrtgtgtgattctaagctattttcagaatctcaccttttgtgccatagtgattcctcatgccatggtaaaggwtaagtatgtgaaaatctggcctgaaaagtgcaagctaagttctcacttaacttttaattgcagtgcttcctggtggtggcagttggtcttgtttgtttgtctggtttttccccagagggactggctttggcttttgtcgtgcatcaagaagcatgcactagtgaga

SEQ ID NO: 72091 - DNA, 599 bp, Chicken  19866894351611_2
  misc_feature (1)..(184): n is any nucleotide
nnnnnnnnnnnnnnnnnnnnnnnnnnnnnnnnnnnnnnnnnnnnnnnnnnnnnnnnnnnnnnnnnnnnnnnnnnnnnnnnnnnnnnnnnnnnnnnnnnnnnnnnnnnnnnnnnnnnnnnnnnnnnnnnnnnnnnnnnnnnnnnnnnnnnnnnnnnnnnnnnnnnnnnnnnnnnnnnnnnnnnnncaaggcagtgactccacccactccctgggcagcctgtgccaatgctgaccactctttctggcattcaggaactgcagcagttctsaaagtctttctgttaacatcctctagatccrgaaagtggaagcatgcagattttcaaaggcrtgtgtgattctaagctattttcagaatctcaccttttgtgccatagtgattcctcatgccatggtaaaggwtaagtatgtgaaaatctggcctgaaaagtgcaagctaagttctcacttaacttttaattgcagtgcttcctggtggtggcagttggtcttgtttgtttgtctggtttttccccagagggactggctttggcttttgtcgtgcatcaagaagcatgcactagtgagagtaataagggcaaatgcagtgttgaaatcag

SEQ ID NO: 72092 - DNA, 599 bp, Chicken  19866894351611_3
  misc_feature (1)..(153): n is any nucleotide
nnnnnnnnnnnnnnnnnnnnnnnnnnnnnnnnnnnnnnnnnnnnnnnnnnnnnnnnnnnnnnnnnnnnnnnnnnnnnnnnnnnnnnnnnnnnnnnnnnnnnnnnnnnnnnnnnnnnnnnnnnnnnnnnnnnnnnnnnnnnnnnnnnnnnnnnncaaggcagtgactccacccactccctgggcagcctgtgccaatgctgaccactctttctggcattcaggaactgcagcagttctsaaagtctttctgttaacatcctctagatccrgaaagtggaagcatgcagattttcaaaggcrtgtgtgattctaagctattttcagaatctcaccttttgtgccatagtgattcctcatgccatggtaaaggwtaagtatgtgaaaatctggcctgaaaagtgcaagctaagttctcacttaacttttaattgcagtgcttcctggtggtggcagttggtcttgtttgtttgtctggtttttccccagagggactggctttggcttttgtcgtgcatcaagaagcatgcactagtgagagtaataagggcaaatgcagtgttgaaatcagaaaggcaaaggtgctggagaagtttctgcat

SEQ ID NO: 72093 - DNA, 599 bp, Chicken  19866894351611_4
  misc_feature (1)..(82): n is any nucleotide
nnnnnnnnnnnnnnnnnnnnnnnnnnnnnnnnnnnnnnnnnnnnnnnnnnnnnnnnnnnnnnnnnnnnnnnnnnnnnnnnnncaaggcagtgactccacccactccctgggcagcctgtgccaatgctgaccactctttctggcattcaggaactgcagcagttctsaaagtctttctgttaacatcctctagatccrgaaagtggaagcatgcagattttcaaaggcrtgtgtgattctaagctattttcagaatctcaccttttgtgccatagtgattcctcatgccatggtaaaggwtaagtatgtgaaaatctggcctgaaaagtgcaagctaagttctcacttaacttttaattgcagtgcttcctggtggtggcagttggtcttgtttgtttgtctggtttttccccagagggactggctttggcttttgtcgtgcatcaagaagcatgcactagtgagagtaataagggcaaatgcagtgttgaaatcagaaaggcaaaggtgctggagaagtttctgcattgaaatcagtggaagaaaatgtagtcctgtcaagataattagtatgatgagtaaaagtgacctttatagct

SEQ ID NO: 72094 - DNA, 599 bp, Chicken  19866894351614_1
  misc_feature (1)..(121): n is any nucleotide
nnnnnnnnnnnnnnnnnnnnnnnnnnnnnnnnnnnnnnnnnnnnnnnnnnnnnnnnnnnnnnnnnnnnnnnnnnnnnnnnnnnnnnnnnnnnnnnnnnnnnnnnnnnnnnnnnnnnnnnnntcgccagcatccctctgggacaggctgggacagggctggctcacagcacaatgagtctttggtggtgaaacctctgtggtgggacacacgagcagcctgcaccgaggtcacactcttctcaatgggatttcaccatccggagagttactgcgggaggacagcgctggttctgctgtgawttatccctgctgcagagctgcctgtccccacagctgggtgctgggacccccacctccttctgccccaaatgtggggaaggtgcaccaatgtgtgcagcatgcatgggggttgggtgagcccatcacccctggataatattctctgagcccagtgctcattttcaccccaattacacccagaggcagaagtcaaaaggctatttctatgcgctccagagctgctgatggagaggaaacattcctgctgagcaaaacgctgcggtgtgagcccagccctgctctacgatatcagagctgag

SEQ ID NO: 72095 - DNA, 600 bp, Chicken  19866894351619_1
cttttgtggtgttcatcacttctgatctctgtcgcagccgggagcaggaactgcacatgtaaacaaagatgaaaaactgtagctgaaaaataaagttaatggaacttcttgtacatcaaagccaaaatagagcagtttgggtttaaggtgcaattcactcggtagtatgctgtcatcttctaagccatttgtacttcagtttatccctctgtagcagaaacaatgttgctttaaaaagcaattgcacaacatctaccgatatgaaaaccctaaaataccacaagaaaccatataaatgawaaaaaaagaatcaattctgacaccatacatcactgtatgaatgtgttaatgttgtgctactgtactgtgtatcatctatttgttttctttgttcttaacccctttgttccgagtcaggatatcctgacgctgaggacacttcaaaataacagtacaacaacaatggtataattctttggaagcacttcatcattttcaagacggagccacctgaaagcgtagtggggactacagcctgcagtcagaacgaggatagcttccgtaaaatgctggggcagccagtttgaggtgggagcattc

SEQ ID NO: 72096 - DNA, 600 bp, Chicken  19866894351619_2
gtgttcatcacttctgatctctgtcgcagccgggagcaggaactgcacatgtaaacaaagatgaaaaactgtagctgaaaaataaagttaatggaacttcttgtacatcaaagccaaaatagagcagtttgggtttaaggtgcaattcactcggtagtatgctgtcatcttctaagccatttgtacttcagtttatccctctgtagcagaaacaatgttgctttaaaaagcaattgcacaacatctaccgatatgaaaaccctaaaataccacaagaaaccatataaatgagaaaaaaawaatcaattctgacaccatacatcactgtatgaatgtgttaatgttgtgctactgtactgtgtatcatctatttgttttctttgttcttaacccctttgttccgagtcaggatatcctgacgctgaggacacttcaaaataacagtacaacaacaatggtataattctttggaagcacttcatcattttcaagacggagccacctgaaagcgtagtggggactacagcctgcagtcagaacgaggatagcttccgtaaaatgctggggcagccagtttgaggtgggagcattcagacaagc

SEQ ID NO: 72097 - DNA, 600 bp, Chicken  19866894351622_1
cttacataaaacgcttccctatgtccctaaagaatgagtcctaaaatgcatcacctccactttacctcctgataaggacagagggagaaatttcaagcgcatatcccctcaatttttttctgagtttgcattcaacttgccctgaacagaaaggggagagcacggaaagaagcattttgttttgcagacagtgctgcatgtgcagcatctccaaagtgctatgctaagacacagaaaagtgagatgcgtggggctgtggctgtgcagtctgcctgtccctgccccatggcaaagcccccmgctgcctgtacctgccaggacttctcagaggcgtgcagcagcgtggcgagcagctcctgcaggatcaccatcttctgcttgagcagcagctcacggtgcagagcctcctgtggggaagcagcccatggtctgataatggtaatgacatgcggttgttcttgcatcggggtggtgcgtggtgcctaccttcaggtagccrgagagctgcacgatttcctgcaggaaaggggaagtatttcagaccacagggttgtttcagttcacaaacaaayaacagatgggctacagcatccaaatgct

SEQ ID NO: 72098 - DNA, 600 bp, Chicken  19866894351622_2
gtgcagcatctccaaagtgctatgctaagacacagaaaagtgagatgcgtggggctgtggctgtgcagtctgcctgtccctgccccatggcaaagcccccmgctgcctgtacctgccaggacttctcagaggcgtgcagcagcgtggcgagcagctcctgcaggatcaccatcttctgcttgagcagcagctcacggtgcagagcctcctgtggggaagcagcccatggtctgataatggtaatgacatgcggttgttcttgcatcggggtggtgcgtggtgcctaccttcaggtagccrgagagctgcacgatttcctgcaggaaaggggaagtatttcagaccacagggttgtttcagttcacaaacaaayaacagatgggctacagcatccaaatgctttgaaatcaggtggaggcaacagtgggaacagggattcaggcacatggagatggccagtcccatggtggggtggttggttcttagggaactggaagtgctgtctgtagtgccttgcagtgatgcagtcatggcacatgatgcctgaaatcacagcagttcctgaatgagaaccatggatgcccatggaagaggagtgtc

SEQ ID NO: 72099 - DNA, 600 bp, Chicken  19866894351622_3
ctgtccctgccccatggcaaagcccccmgctgcctgtacctgccaggacttctcagaggcgtgcagcagcgtggcgagcagctcctgcaggatcaccatcttctgcttgagcagcagctcacggtgcagagcctcctgtggggaagcagcccatggtctgataatggtaatgacatgcggttgttcttgcatcggggtggtgcgtggtgcctaccttcaggtagccrgagagctgcacgatttcctgcaggaaaggggaagtatttcagaccacagggttgtttcagttcacaaacaaayaacagatgggctacagcatccaaatgctttgaaatcaggtggaggcaacagtgggaacagggattcaggcacatggagatggccagtcccatggtggggtggttggttcttagggaactggaagtgctgtctgtagtgccttgcagtgatgcagtcatggcacatgatgcctgaaatcacagcagttcctgaatgagaaccatggatgcccatggaagaggagtgtctgccttccctgcattatcattgcctttatttatgaaaccagagaagtggagcactagttacagctctggtaag

SEQ ID NO: 72100 - DNA, 599 bp, Chicken  19866894351625_1
  misc_feature (1)..(140): n is any nucleotide
nnnnnnnnnnnnnnnnnnnnnnnnnnnnnnnnnnnnnnnnnnnnnnnnnnnnnnnnnnnnnnnnnnnnnnnnnnnnnnnnnnnnnnnnnnnnnnnnnnnnnnnnnnnnnnnnnnnnnnnnnnnnnnnnnnnnnnnnnnnntagtctgaccaaacatcttccccctaacttctttctccaaagcacatttgaataatttaggatcacaaaaacaatttgggaaccaaaataatttggtcaggcatccagtgaaacttaatggaacctatgaaaatcctggacgtccctttgaaagccatcrggatgctagaagttgattgtttctttgttgccatgcatgctggtgcagcagtcacacatacagcttttagctcttgggccagactcaaccaggaaacwgcaatggggactgaaactcagagcttgcttagcactaactaaaggttcccaaaaytcrcagcaragtattacagaacaaaaaccagaagagaaaaggtaggagccagatctccaaaaacttgctggcacagtgcagtgtatacaggatctgtgcaagcaaccattgccagcacwgctagcctttsccaattgcagtcataa

SEQ ID NO: 72101 - DNA, 599 bp, Chicken  19866894351625_2
  misc_feature (1)..(42): n is any nucleotide
nnnnnnnnnnnnnnnnnnnnnnnnnnnnnnnnnnnnnnnnnntagtctgaccaaacatcttccccctaacttctttctccaaagcacatttgaataatttaggatcacaaaaacaatttgggaaccaaaataatttggtcaggcatccagtgaaacttaatggaacctatgaaaatcctggacgtccctttgaaagccatcrggatgctagaagttgattgtttctttgttgccatgcatgctggtgcagcagtcacacatacagcttttagctcttgggccagactcaaccaggaaacwgcaatggggactgaaactcagagcttgcttagcactaactaaaggttcccaaaaytcrcagcaragtattacagaacaaaaaccagaagagaaaaggtaggagccagatctccaaaaacttgctggcacagtgcagtgtatacaggatctgtgcaagcaaccattgccagcacwgctagcctttsccaattgcagtcataaatgcctcaaaaataagcatcagcaatcttgtcacaaagtatttcaatcaggactgtgaggggacgcctccgtctccactcaaacccaacgcagcatta

SEQ ID NO: 72102 - DNA, 600 bp, Chicken  19866894351625_3
catcttccccctaacttctttctccaaagcacatttgaataatttaggatcacaaaaacaatttgggaaccaaaataatttggtcaggcatccagtgaaacttaatggaacctatgaaaatcctggacgtccctttgaaagccatcrggatgctagaagttgattgtttctttgttgccatgcatgctggtgcagcagtcacacatacagcttttagctcttgggccagactcaaccaggaaacwgcaatggggactgaaactcagagcttgcttagcactaactaaaggttcccaaaaytcrcagcaragtattacagaacaaaaaccagaagagaaaaggtaggagccagatctccaaaaacttgctggcacagtgcagtgtatacaggatctgtgcaagcaaccattgccagcacwgctagcctttsccaattgcagtcataaatgcctcaaaaataagcatcagcaatcttgtcacaaagtatttcaatcaggactgtgaggggacgcctccgtctccactcaaacccaacgcagcattaaaccttcagcctctaagtgctaaaaaaccatccatgctctaagtagaacacatccc

SEQ ID NO: 72103 - DNA, 600 bp, Chicken  19866894351625_4
cttccccctaacttctttctccaaagcacatttgaataatttaggatcacaaaaacaatttgggaaccaaaataatttggtcaggcatccagtgaaacttaatggaacctatgaaaatcctggacgtccctttgaaagccatcrggatgctagaagttgattgtttctttgttgccatgcatgctggtgcagcagtcacacatacagcttttagctcttgggccagactcaaccaggaaacwgcaatggggactgaaactcagagcttgcttagcactaactaaaggttcccaaaaytcrcagcaragtattacagaacaaaaaccagaagagaaaaggtaggagccagatctccaaaaacttgctggcacagtgcagtgtatacaggatctgtgcaagcaaccattgccagcacwgctagcctttsccaattgcagtcataaatgcctcaaaaataagcatcagcaatcttgtcacaaagtatttcaatcaggactgtgaggggacgcctccgtctccactcaaacccaacgcagcattaaaccttcagcctctaagtgctaaaaaaccatccatgctctaagtagaacacatcccatc

SEQ ID NO: 72104 - DNA, 600 bp, Chicken  19866894351625_5
cctaacttctttctccaaagcacatttgaataatttaggatcacaaaaacaatttgggaaccaaaataatttggtcaggcatccagtgaaacttaatggaacctatgaaaatcctggacgtccctttgaaagccatcrggatgctagaagttgattgtttctttgttgccatgcatgctggtgcagcagtcacacatacagcttttagctcttgggccagactcaaccaggaaacwgcaatggggactgaaactcagagcttgcttagcactaactaaaggttcccaaaaytcrcagcaragtattacagaacaaaaaccagaagagaaaaggtaggagccagatctccaaaaacttgctggcacagtgcagtgtatacaggatctgtgcaagcaaccattgccagcacwgctagcctttsccaattgcagtcataaatgcctcaaaaataagcatcagcaatcttgtcacaaagtatttcaatcaggactgtgaggggacgcctccgtctccactcaaacccaacgcagcattaaaccttcagcctctaagtgctaaaaaaccatccatgctctaagtagaacacatcccatcatacag

SEQ ID NO: 72105 - DNA, 600 bp, Chicken  19866894351625_6
atcctggacgtccctttgaaagccatcrggatgctagaagttgattgtttctttgttgccatgcatgctggtgcagcagtcacacatacagcttttagctcttgggccagactcaaccaggaaacwgcaatggggactgaaactcagagcttgcttagcactaactaaaggttcccaaaaytcrcagcaragtattacagaacaaaaaccagaagagaaaaggtaggagccagatctccaaaaacttgctggcacagtgcagtgtatacaggatctgtgcaagcaaccattgccagcacwgctagcctttsccaattgcagtcataaatgcctcaaaaataagcatcagcaatcttgtcacaaagtatttcaatcaggactgtgaggggacgcctccgtctccactcaaacccaacgcagcattaaaccttcagcctctaagtgctaaaaaaccatccatgctctaagtagaacacatcccatcatacaggacaaaagaagtctcgctgaattccaatatgctgctgaaagttcaaaatgaaagcagcagaagtgttttctgcaagacgtatttctttctgctggtatttttgcagaaga

SEQ ID NO: 72106 - DNA, 600 bp, Chicken  19866894351625_7
ccctttgaaagccatcrggatgctagaagttgattgtttctttgttgccatgcatgctggtgcagcagtcacacatacagcttttagctcttgggccagactcaaccaggaaacwgcaatggggactgaaactcagagcttgcttagcactaactaaaggttcccaaaaytcrcagcaragtattacagaacaaaaaccagaagagaaaaggtaggagccagatctccaaaaacttgctggcacagtgcagtgtatacaggatctgtgcaagcaaccattgccagcacwgctagcctttsccaattgcagtcataaatgcctcaaaaataagcatcagcaatcttgtcacaaagtatttcaatcaggactgtgaggggacgcctccgtctccactcaaacccaacgcagcattaaaccttcagcctctaagtgctaaaaaaccatccatgctctaagtagaacacatcccatcatacaggacaaaagaagtctcgctgaattccaatatgctgctgaaagttcaaaatgaaagcagcagaagtgttttctgcaagacgtatttctttctgctggtatttttgcagaagataggattagtt

SEQ ID NO: 72107 - DNA, 599 bp, Chicken  19866894351629_1
  misc_feature (1)..(76): n is any nucleotide
nnnnnnnnnnnnnnnnnnnnnnnnnnnnnnnnnnnnnnnnnnnnnnnnnnnnnnnnnnnnnnnnnnnnnnnnnnnntaacatatcctctgggaaatcaaggaagcatacttaatcatccggcttatttctggtcaaagtatattttattggtccagaaacctctaaatcttttttgtcttgggaataagttagcactgtgttttaacccagctgaatttcagactctattaataagttatctttgactaaccaatttgtttttcttccttctgcttttttttttttttttttttttggasgggttcttttttatttccagaatcttaagtctttttatgctttactgttccttttgtgattttctgctattgaagaggagacagacattcctacttctcttcatacatatagttctttatccttatatttgcaatggagcttgttaagatcagtagttcctttataccccaccaataagcttcaggctagcagaagatggttactggctgtcccagctatgggtgaagtagcaatcctcrtttctaactagagaggttttttcttataaattttgatcctatccccccatacgcagatg

SEQ ID NO: 72108 - DNA, 600 bp, Chicken  19866894351629_2
ctttgactaaccaatttgtttttcttccttctgcttttttttttttttttttttttggasgggttcttttttatttccagaatcttaagtctttttatgctttactgttccttttgtgattttctgctattgaagaggagacagacattcctacttctcttcatacatatagttctttatccttatatttgcaatggagcttgttaagatcagtagttcctttataccccaccaataagcttcaggctagcagaagatggttactggctgtcccagctatgggtgaagtagcaatcctcrtttctaactagagaggttttttcttataaattttgatcctatccccccatacgcagatgaggagatcattagattaaaaatatcctcgtcattgatctgtccataatctgttggataggcaaataaggactttcactcagtgtcatgttagtgaactttataactgagaaaatgagtctttgtaacctgggatatttactggtttgggcttttatgtgtgtggactttagattgcattagctttctgctagtgagcaactggaaatatttatgaatgttttacttgtgttactccattat

SEQ ID NO: 72109 - DNA, 600 bp, Chicken  19866894351639_1
aaaattcttcagattaatgttaatattaaaactgtaggtgtgagggaagttatgacagtatgcttaacattgctcaggtaagcaaataaggagaagggaaaaggaatctgaggggtaagagaactctaagaaaactcttgttctaccagaagaaatacagcagttgcttttaagtttgcagtcagtcgtggttgttacttagtggtcacttaatcagactggcataatctcctttaaggaatttgcaatattgctgtccagtttttgttgagctttgatgttaattttgttacgtttaarctcttgcccatgtatcacacagctctgagccttggcgtgaaaatgcagcgttgcaaaccttcggggcgctgctttttcataacttctggttcaggaagcttgatttcaatacacagtttgtccaagaaacgatacagcaaatgtccctcctcttggcacatcctctggtcctgggatctctgtggctgcagcagagtggctctgcctgggagctagaagggagagcaggaccgctgagttgtgcatttcatttcctcctggtgaccgggcgctgggttcagccgtgtgggtgggacgtgg

SEQ ID NO: 72110 - DNA, 600 bp, Chicken  19866894351639_2
tgcaaaccttcggggcgctgctttttcataacttctggttcaggaagcttgatttcaatacacagtttgtccaagaaacgatacagcaaatgtccctcctcttggcacatcctctggtcctgggatctctgtggctgcagcagagtggctctgcctgggagctagaagggagagcaggaccgctgagttgtgcatttcatttcctcctggtgaccgggcgctgggttcagccgtgtgggtgggacgtggaggagctgtaacccaaccctgccagcgtgaaggattctctgcagtgctttyttctcctgtgaagtsaagtgagttgtatatttttgctttaaaagcaaacaaatgataaaacttgggctcagtgtagctcgaaatggaaacatggtctcctgacctgacccctgtgaagcagtttcacacgtgcatcagatgtgcagaatggtctcttgtgtgggtggaaacactgagaaaccccctgtgtgtctgcagcttctgagcttagtttctagtgagggactggggaggaggcaggagccacgtggagccacaatcattaatttggggtgaatggtaagaaggcaggaagagaaa

SEQ ID NO: 72111 - DNA, 600 bp, Chicken  19866894351639_3
cgctgctttttcataacttctggttcaggaagcttgatttcaatacacagtttgtccaagaaacgatacagcaaatgtccctcctcttggcacatcctctggtcctgggatctctgtggctgcagcagagtggctctgcctgggagctagaagggagagcaggaccgctgagttgtgcatttcatttcctcctggtgaccgggcgctgggttcagccgtgtgggtgggacgtggaggagctgtaacccaaccctgccagcgtgaaggattctctgcagtgctttyttctcctgtgaagtsaagtgagttgtatatttttgctttaaaagcaaacaaatgataaaacttgggctcagtgtagctcgaaatggaaacatggtctcctgacctgacccctgtgaagcagtttcacacgtgcatcagatgtgcagaatggtctcttgtgtgggtggaaacactgagaaaccccctgtgtgtctgcagcttctgagcttagtttctagtgagggactggggaggaggcaggagccacgtggagccacaatcattaatttggggtgaatggtaagaaggcaggaagagaaaccgtcctgacagcac

SEQ ID NO: 72112 - DNA, 600 bp, Chicken  19866894351644_1
ggggaaaaatgctttcaagttcagcattccacttccctaggcttaaatattcataaagcaagaaccacaccaaaaaggtttagctccagtttgagaaatgagatgggaaacgggaatattgatccaaggtgcaaacagccagagcagctttgtgtatgcaaggaaaccatcgggaacacgatgtcccccacgtgggtggggtggatacagctcccatccacttccaaggtctgaaccaagcatggcagcatgcattgctaaattggtgggatgagtccttgtcttgctgtgaggcttctmtctccccactgcttgcacatctgcagtcctcaagccagcatgagcccgtgaagtgactgcaaggaattagggacacggcttagtgggcatggtggtgatgggtcaacagttggactcaatgattttagaggtcttttccaaccttaatgattctatggtgctgtgatctatgattaagagtctcagcagctttatgttcaaaccagtgatagagcttttctggctgcatcccaaagtctgaaggctccagggctggtgcatcaaggacycgtggcttctgccttcaccaatccagcccta

SEQ ID NO: 72113 - DNA, 600 bp, Chicken  19866894351644_2
gatgagtccttgtcttgctgtgaggcttctmtctccccactgcttgcacatctgcagtcctcaagccagcatgagcccgtgaagtgactgcaaggaattagggacacggcttagtgggcatggtggtgatgggtcaacagttggactcaatgattttagaggtcttttccaaccttaatgattctatggtgctgtgatctatgattaagagtctcagcagctttatgttcaaaccagtgatagagcttttctggctgcatcccaaagtctgaaggctccagggctggtgcatcaaggacycgtggcttctgccttcaccaatccagccctagggatgacagtgctggccccagaccacctctcccattgtgtgggacatggctgagatgttaaaatccctacgtttcaggcttgccagctggggctggtcatgcatcccagcaagatgtcctcctagatccccaacccaccccaccatgcccactgaccacgtccctcagtgccacatctccatggctctggagcacctccaaggactccaccactccctggacagctgtgccagtgccctaccactccgagaatgaatgtttcttaata

SEQ ID NO: 72114 - DNA, 561 bp, Chicken  19866894351649_1
ctggataggatcctgctaaagtttaagcacatgaaaatcgggagtcactctgctgactcaaggctcacaccagtacagggaaacaaaacagaggccccagggtcttgatgcaagaaaatccatccttttgcattttcccagttaagtccaacaagtgcagtcctcccaagacagggaagaccctgaggaaagcttgcagagtacttagtctacaaaactctgccttgttcttcattgatctgtacttcaggaactttgaaaaggaatctccaacatttggaaaggcacttctaagtcacrgaacagaaattcatgcccctagtcaacaagccagtgctaccctcccgtcccctgggagacacagtcatctcaagatgagtggaagaaacaatgcagaaggaaagtaaacagtctcatatgtcacatagtagaaatatccgtgccattcaggatttctgctttactgtttttctatttctttttccagtcctagcatttaaagcaaaacaacactaaatcttccccagcaaactagagctctccacttcagagaccatcaag

SEQ ID NO: 72115 - DNA, 600 bp, Chicken  19866894351651_1
gttgaattcagaagagaaaaagagagcaagtaaaaagcagagctgatttttctgaggctattaagagcttagattcatctatacctgatgcagagaatgggattactttcttggtaagcaggcaatagctcttcagcatgatgagctttgaaaatacatgtgttttatacatctggctgtcaactgagattcaatctccttcttttgtgtacatgtttaagaaaatacaatacaaacatctgatttttttcttttattttcaagattgactggttgctataaacattttaactttaggargaaagcccagagagagccgtatatgaaattaatgcgttgcatgcatttattacatgatgaataattgtctgtcttgtaagaaaaaagagaggtacaagtggcactaattgctgcattttttgacattctcagtaaagccamtacaattctgaatgaactactaccttcctcaccaagatcctatttctagacagtatatgattatagcaaatacagaatagtcatgggtttgtattttcaaatcacagcctagtcaaaataccatttgaatcagaattatttctagaacaggtgaaggaa

SEQ ID NO: 72116 - DNA, 600 bp, Chicken  19866894351651_2
tgagctttgaaaatacatgtgttttatacatctggctgtcaactgagattcaatctccttcttttgtgtacatgtttaagaaaatacaatacaaacatctgatttttttcttttattttcaagattgactggttgctataaacattttaactttaggargaaagcccagagagagccgtatatgaaattaatgcgttgcatgcatttattacatgatgaataattgtctgtcttgtaagaaaaaagagaggtacaagtggcactaattgctgcattttttgacattctcagtaaagccamtacaattctgaatgaactactaccttcctcaccaagatcctatttctagacagtatatgattatagcaaatacagaatagtcatgggtttgtattttcaaatcacagcctagtcaaaataccatttgaatcagaattatttctagaacaggtgaaggaatgtagatgtgctgagctttatgaaatacttccaaaatgcataaagaaatattccttaattttcttcttgcagaattattctgagaaatatctaacagctgaaatttgtttcccacatttctgtttgagggtttcttttcaa

SEQ ID NO: 72117 - DNA, 600 bp, Chicken  19866894351653_1
gtcaaccagcattcccaggtcattttctgctgggcaactttccagcccaaagcctacttcgttcatggggttgttatgacctaagtgcaggacctggcatttacttttgctgaatgtcacacaattggactcagcccatcgatccagcctatccagatccctctgcaaagccttcctagcctcaagcagattaacacttctgcctaacttggtatcatctgaaaacttaccaagggtacactcagtcccttcatcaatattattgataaaggtattaaacaaaactgatcctctgtaacrccacttttgattggctgacatctggatttaactccattcaaaatgacctttaaggcccagccatccagcaacttaattgtccttacaactttaacctttactcttttgactgcacatagcttttgccaaaggattgcatgatgtggtttgcataggcctggagaggtcacttaaccaacttacatgatgaacgtatcctttgcctgccttcttttccagtctgtgatctttccgtggactgacaataatttctccaaacttgtgaatcatttgtttgctagtgttttgtctaaacaaatt

SEQ ID NO: 72118 - DNA, 600 bp, Chicken  19866894351656_1
catgagcaagctgtgatacaactcggggtgtagatgccacgctatgcccatccccctacccctcacccagcaggtatgtgcagactgaactgctggcacatgcagctgcaaagcctccgtgtgatggagcactgccccatggctcctacctgtgtgaagaagggctcgtagatctctactcccttatcggagccctgcagcagcacctcctggccacgtctccagctgtaccggacgggcgggttggagttggccacgcacctgaggaacacagttctctcatagtaaaactgctctttygcttcgccgatgctctggtggactgtcactatcgggtcatccagatctggaaaggcagaacagagaaccaaggttaaatcaggctgcagcctgtacaacagacacratacaatggtagcatccatcatttctgatacgtttccactaatatttaggtctcacttggttttcatcttcactacttatttcatatgtatgatttcaatttaaacatttcttagacaaaatagtttatcaagcttcggtaataaatagtcagattcatttgcatcctaatggcaggatccagtagaacgctga

SEQ ID NO: 72119 - DNA, 600 bp, Chicken  19866894351656_2
tgcaaagcctccgtgtgatggagcactgccccatggctcctacctgtgtgaagaagggctcgtagatctctactcccttatcggagccctgcagcagcacctcctggccacgtctccagctgtaccggacgggcgggttggagttggccacgcacctgaggaacacagttctctcatagtaaaactgctctttygcttcgccgatgctctggtggactgtcactatcgggtcatccagatctggaaaggcagaacagagaaccaaggttaaatcaggctgcagcctgtacaacagacacratacaatggtagcatccatcatttctgatacgtttccactaatatttaggtctcacttggttttcatcttcactacttatttcatatgtatgatttcaatttaaacatttcttagacaaaatagtttatcaagcttcggtaataaatagtcagattcatttgcatcctaatggcaggatccagtagaacgctgatcatgctcatgcatccattttcctttaaagcagcaatttaatacagcaatttaatgcatatttccttattttggttatacgcattgaacttcaagcaggtaaattc

SEQ ID NO: 72120 - DNA, 401 bp, Chicken  19866894351656_3
ttaaacatttcttagacaaaatagtttatcaagcttcggtaataaatagtcagattcatttgcatcctaatggcaggatccagtagaacgctgatcatgctcatgcatccattttcctttaaagcagcaatttaatacagcaatttaatgcatatttccttattttggttatacgcattgaacttcaagcaggtaaattcatccaggctttacaacacacttctcttgattaaaatacagatatcatataattactcccaccacatcactgcagagaaaattaattccccggaacagaayttgttcattttaaattcagaagaaacagagatggccattggaatgtaaatacacctaatgaattacgtttgggctttgttccaccaggaacaagtagaccc

SEQ ID NO: 72121 - DNA, 599 bp, Chicken  19866894351657_1
  misc_feature (1)..(6): n is any nucleotide
nnnnnnttgacagcataaagcaaacatttgggcttgccgtaaatagcgaacataccgggaccagaggcaggtagcttgtgatttttaagtggattgccaaccaaagtttgtaaatctgggaaatcaaatcattatatttaacagacaaatgtgtataatataaaatcagtgaaaagataacataataagtactttgactattatctgggggcctaattagactggtggaatcactgtagtcagtgaaattagagttccacaaccagggggaggggaaacccagccctttagctgaacgarcactaatggagccctgttgacatttgctgtcccaggtattcggcagctgttcctctcctttgtggaacgcagggctctgctcttgccaggccatattttccttaatttaaccccctggcagaggaagcaatggaaaagtccaaagkggytcagccctgcttgaagccctgattgctcaactgcatgcaatgctttcacgactgtgatcccccctgtgctcacccaccagcctgggcactgagaggcgatgtccctcaagcagaagccctgggactgcaggtctctgcagccaggacarc

SEQ ID NO: 72122 - DNA, 600 bp, Chicken  19866894351657_2
aaatgtgtataatataaaatcagtgaaaagataacataataagtactttgactattatctgggggcctaattagactggtggaatcactgtagtcagtgaaattagagttccacaaccagggggaggggaaacccagccctttagctgaacgarcactaatggagccctgttgacatttgctgtcccaggtattcggcagctgttcctctcctttgtggaacgcagggctctgctcttgccaggccatattttccttaatttaaccccctggcagaggaagcaatggaaaagtccaaagkggytcagccctgcttgaagccctgattgctcaactgcatgcaatgctttcacgactgtgatcccccctgtgctcacccaccagcctgggcactgagaggcgatgtccctcaagcagaagccctgggactgcaggtctctgcagccaggacarcggagggatctgggcaccaggagaggtctaaaggacagtgatggggaggctggagtgtctgggagcgagcagagaacggcatgaattgtgttgggctggtagctcttttagggacgtgagtcatttaagccaagcaaatcatttccca

SEQ ID NO: 72123 - DNA, 600 bp, Chicken  19866894351657_3
tgtgtataatataaaatcagtgaaaagataacataataagtactttgactattatctgggggcctaattagactggtggaatcactgtagtcagtgaaattagagttccacaaccagggggaggggaaacccagccctttagctgaacgarcactaatggagccctgttgacatttgctgtcccaggtattcggcagctgttcctctcctttgtggaacgcagggctctgctcttgccaggccatattttccttaatttaaccccctggcagaggaagcaatggaaaagtccaaagkggytcagccctgcttgaagccctgattgctcaactgcatgcaatgctttcacgactgtgatcccccctgtgctcacccaccagcctgggcactgagaggcgatgtccctcaagcagaagccctgggactgcaggtctctgcagccaggacarcggagggatctgggcaccaggagaggtctaaaggacagtgatggggaggctggagtgtctgggagcgagcagagaacggcatgaattgtgttgggctggtagctcttttagggacgtgagtcatttaagccaagcaaatcatttcccagat

SEQ ID NO: 72124 - DNA, 600 bp, Chicken  19866894351657_4
arcactaatggagccctgttgacatttgctgtcccaggtattcggcagctgttcctctcctttgtggaacgcagggctctgctcttgccaggccatattttccttaatttaaccccctggcagaggaagcaatggaaaagtccaaagkggytcagccctgcttgaagccctgattgctcaactgcatgcaatgctttcacgactgtgatcccccctgtgctcacccaccagcctgggcactgagaggcgatgtccctcaagcagaagccctgggactgcaggtctctgcagccaggacarcggagggatctgggcaccaggagaggtctaaaggacagtgatggggaggctggagtgtctgggagcgagcagagaacggcatgaattgtgttgggctggtagctcttttagggacgtgagtcatttaagccaagcaaatcatttcccagatgaaacaaataattttcaagggaggatcttctgcttgcattctgccagcatgtttagctgcagaggagatgtctgtgcttgtagggctccatgcctccgtagcttgggtgaactcacattggtagaagatcgctttggcagctgaaagta

SEQ ID NO: 72125 - DNA, 600 bp, Chicken  19866894351662_1
gagaaagcctgcttactcataagtgttatgagtctgggagaggagtttggcaggagtttagagtgagacttataccatggtagccagaaaacataaacacagagcaatggtaccactgtgcctactgctctctgtttcacctcctgcaagctgcactttctctgtcacttgaaatacatccattgctcagcctcctgttgtgcagagagcctgttctacagccagatagaggaaggtctgcaggctgttgggttctcttatttagaccaactcttgatcatatttatctacatatttccycccttctgctacagaactttggataaacaatttaaacaagtgcattttcccaccttctacttcataaaattaaagctgcattggtagcaatattcacgcagagtctctgctcttgattctctagtcttcttgaggaatacaacttaagaagcctatagagttgacataaatgaagtgactttttgtattgggtaggaataaatctttatgccagtatatctaatcaaccattaagataggtgattgtctcaacgtaaaatgtgggtctaactgcagcaccaaaggtgcgatatccccttg

SEQ ID NO: 72126 - DNA, 600 bp, Chicken  19866894351663_1
atgagctctttgttactgtgctgtactatttagcccctcacatctctcttgtggccactacatctttgggcgtgcatcagtttgtacactgtttcatgaggcagcacaactttgagacacccaatccatgctccctgtgcctgtttgctgatcattgcataaccagtcacagagtgaagggaggttctgccagtgttgtggctgcagtgtagaactttgtacgttataatgtgctgtcagtgtctaaattcagatgactgggagtgacctaaggcctaaagctcagaaaactgttatcarcgtaaggttttagaagttaccctccaattctagagtgttttcaggtacagatgtactctgctctgtgctacacatgtgcttgtttaagagttgtttttacatatgcaatgtgtaagttaactttgtatatcattacagctatgggaactctgagaaacaatgaagatatgagtgaagcaaactggttaggtgcagtataggttctaggttagaacaggtataagcacaaggagcacacttgaaaagtgcctcggtagccattctaaacaacttggcttcactagaagctgycgtgcaaag

SEQ ID NO: 72127 - DNA, 577 bp, Chicken  19866894351663_2
tgttatcarcgtaaggttttagaagttaccctccaattctagagtgttttcaggtacagatgtactctgctctgtgctacacatgtgcttgtttaagagttgtttttacatatgcaatgtgtaagttaactttgtatatcattacagctatgggaactctgagaaacaatgaagatatgagtgaagcaaactggttaggtgcagtataggttctaggttagaacaggtataagcacaaggagcacacttgaaaagtgcctcggtagccattctaaacaacttggcttcactagaagctgycgtgcaaagtcatgggactagcactggttgtcatgagcgcagtgtgacaggtctgttgttgtatgcacagagactagtcatataacggaagcacattcaatctgatttagccatggtaggtgataagaacttaaattcttactcatcctaccaacaatgtatgctcagatacctgctgagtgccacagaagtcctcgcacgctgcaggtataagtgcctcctgagaggaatggacagggtgaccagagtgtgtgcctccagggctgccaacagcaga

SEQ ID NO: 72128 - DNA, 599 bp, Chicken  19866894351671_1
  misc_feature (1)..(161): n is any nucleotide
nnnnnnnnnnnnnnnnnnnnnnnnnnnnnnnnnnnnnnnnnnnnnnnnnnnnnnnnnnnnnnnnnnnnnnnnnnnnnnnnnnnnnnnnnnnnnnnnnnnnnnnnnnnnnnnnnnnnnnnnnnnnnnnnnnnnnnnnnnnnnnnnnnnnnnnnnnnnnnnnnggatctgcatgctgaaatgatggctatgggcacaaagaaagaaaaacaggaaggaaaatcacacaatttaggcaaaatactgaagtgaggatacgggcattgacaagaggaagaacagatgagaaaaattaagttaacytggagcctgcagatcctgggagtccagctcagagtctgctgttggctttacagataccagcagcaacagagcgagagctgcctgttctgttccaactctactgctattgagccaccagcattcctctgcagcttgcttttccaaacactatcgaagataaaactgcataaaaggccaaataaatttgtcatcactaactctgagtatttgacacatccactgatcctccaaaaggcygagtgtgaaccttgtaatgacgagttttgatccagaatgaggttgaaattaggataagaagc

SEQ ID NO: 72129 - DNA, 600 bp, Chicken  19866894351671_2
atactgaagtgaggatacgggcattgacaagaggaagaacagatgagaaaaattaagttaacytggagcctgcagatcctgggagtccagctcagagtctgctgttggctttacagataccagcagcaacagagcgagagctgcctgttctgttccaactctactgctattgagccaccagcattcctctgcagcttgcttttccaaacactatcgaagataaaactgcataaaaggccaaataaatttgtcatcactaactctgagtatttgacacatccactgatcctccaaaaggcygagtgtgaaccttgtaatgacgagttttgatccagaatgaggttgaaattaggataagaagcttctggtttgctcctaagactttggagaggcaaaggaagtgctagaaaactaacactgtgtaaagcccagccctgctgaaatggctaattatcatcccatcaaaaagcactgtttgttttcttatcccagttggttcgtttctactctgtcagataagagagaactaaaaagtcttaaaatgctcttcttgtgtgtgctctgctcattggccatttgctttcagaattatttaccctt

SEQ ID NO: 72130 - DNA, 600 bp, Chicken  19866894351673_1
ctctaaaacttcactgttaatcagcttgctttcttggaaaatagcagtgcttgggctccagatttgggtctgggagggctgtgtggcactggagggtgcatgcactgcagtgctgctcatcacccacagttgagactgtgttttctgacagtgattagttgtatgttttatatattcatgaaatgatagtagcgcaaaattaaaataggataagagttaaatttattttttgagagcaaaggaaaacatcccatttggaaaacagaacataaaatgtgtaggaagatcttagtggcatcrggagagccatgtgcagttctgccacagctacgaggaggtggaagttggtgctgtctgagctcctcttagcaaacttgtgttctgagattaggaacttcctatctatactgagatctcccttataagagttgaatctctctcctgctgagcagcccctgtgttggtccagctcccagagctgctcaggttccgttatggttcccggaatgctggcagaagaacaggacggtttgcacggcgctcaggaaggaatgcagcactttggcctcttcccttgtgcacctgccccggtcacaagga

SEQ ID NO: 72131 - DNA, 600 bp, Chicken  19866894351681_1
gtagaagctttttgatgccatttcccaggtgttttcatccatcactgctaagcacacaacttcagtctccactcactgtgggcaggtacaaacagtatgttgatgacatgaggccacttcacacctactggaaaagctcacagctgtgactgaggaccttctgagtgagcagtctccatggtgtggtgatggtgtcagagagcaggccacagcaagcatgtgcccaggtgacagggacaaagcaagtagcacacatgggctctgaacacaattcaggaacctctgctgtccctgccttgrtcttcacagggtcaccacacaccagcttctggcttccatggcaccccgcaggcacagtggatgcagaagtacctccagactgacgtgctttctcaacagctgagaatggtattcctctctccaggtctgagatgccactgtcatggcgataattcccctgtgcagttagatcttctggtccattytaggtgctcacagtaggacggggtgattcttgctctagaaggacgctgtctataaagatgcatgtgtgattagctgtgttgagacacttacagtgtaaatgtctaaggtcaagac

SEQ ID NO: 72132 - DNA, 600 bp, Chicken  19866894351681_2
gtgatggtgtcagagagcaggccacagcaagcatgtgcccaggtgacagggacaaagcaagtagcacacatgggctctgaacacaattcaggaacctctgctgtccctgccttgrtcttcacagggtcaccacacaccagcttctggcttccatggcaccccgcaggcacagtggatgcagaagtacctccagactgacgtgctttctcaacagctgagaatggtattcctctctccaggtctgagatgccactgtcatggcgataattcccctgtgcagttagatcttctggtccattytaggtgctcacagtaggacggggtgattcttgctctagaaggacgctgtctataaagatgcatgtgtgattagctgtgttgagacacttacagtgtaaatgtctaaggtcaagacaggtgaatcttccctcgtttctagaaataggccagcctaaaggaagaggcttgaatgcacacacttttgaattatgtattattatttccctgttaatttgcacattttgggaacacaggactgaaaatcaaggtctatttatttgactgctcagccagaaggcacaaaacccagcctggaagttg

SEQ ID NO: 72133 - DNA, 600 bp, Chicken  19866894351687_1
gcagctcacctgcaggcccaggaacaacagtgacactcaccgttatgtgacatgcccaacgagaggcatttctggaagcggcagtactggcacttattccggttcttcttctgaatcttgcagcttcgctcacacttctcatattccagcttcatgcggatcgtccggcggaagaaaccctgcacagagagggacatggagcagggggacaagggaacagcagcattagcacccacactataggatcaggccagtttgttatccccagcagcttcgcagaggttcatcctccactgggtrttttcagcgcagagccacaaagagaggtggtgcggtgggaaaaggggaagagtaggactgggtgtgtgatactgcaggcagccagcagggagggatggaggaacaggctgtgggccccagcctgcaggaaagtctggcagggcctcactgctaatgcagccccgctggcatctggtgcgggggaaggaattttagaggtgcggccaaggctgtggccagcaatcccagtgggatacacacgcaactcatggctgatctgcagcacagacagcatctttaaaagcaaagccaaggtcccca

SEQ ID NO: 72134 - DNA, 600 bp, Chicken  19866894351688_1
ggtcaccacgcagctggtctgtaatacacttgggaaagtgtggccagagccctgggcagggtgtcaggccacctaagccatgatgtgtgctggatgcctcaagacatttgtatgtgtgtttgtgtcctctattgtaaaccttttggagcatgtttgtacatcacccaatgcgagaggaattttagattagcctgtgaatacagcaataaaatacccttatggcagtaagtggcctgacctgcttgctggtgagtgagcccttctgaggtcctttcatgtggtttggtgttctcttcagcragaagcatgtactacttgcactatttttttttcaggcactgggtaaatggatatcagacattgtagcaagttctgtgagtgtttggagttgttcttttggcctagtttaagcaaccatcccagcaaaatgttaagcaagtgcataaataaaactatctgcctcagtgtctgagccaattgcttggagctgaggtactacagtacagaatatgggaaggggctggtgctgctcccatgggcagctgggctgtgacctctttttttcttcatgttatactgtccttggtagtatagaatgca

SEQ ID NO: 72135 - DNA, 600 bp, Chicken  19866894351689_1
gagatatatatatatataaatctttattcaaggaatgaaattaagttctgatcccttgatctccagccagggtgaggtagattggtcaatttaaatagtcactgctgatcagcaaacagctgagtttgtactaaaacagagcactagtattcctgtaccttcttgccagcagataaatacacagataagatctagggctgaatcaataggatgcctgaagttttgtctatagaagagaggcaacactcacccctgctgggctggctatcacaaggccaaagtgacctgctgaggggtagmtactcattcccattgcccccacttccactgaaaactgcagcaagctgtacagccaacaggccaggctctgtctgactccctgtgcacccaggagctgcccaagatgggagctgcatggttttcctggggttactccaaacccctttgcccagcagatgcaatactccattgtctgcctttgaactctatggaaaccacaaagctctccaaccttttggcagacagaagtcactgcaacccctagcccagtagagttctcttctccaccatatttacagtgcatagtgcttcacaggtggt

SEQ ID NO: 72136 - DNA, 599 bp, Chicken  19866894351694_1
  misc_feature (1)..(139): n is any nucleotide
nnnnnnnnnnnnnnnnnnnnnnnnnnnnnnnnnnnnnnnnnnnnnnnnnnnnnnnnnnnnnnnnnnnnnnnnnnnnnnnnnnnnnnnnnnnnnnnnnnnnnnnnnnnnnnnnnnnnnnnnnnnnnnnnnnnnnnnnnnnagggtctttgcaggttctccttgtgctatcttgtagaggctgctgtacaagccttgttgctagagctcttgcttcctttcttttagtccttttcctaagagcagctagaggatgtgctctgtagggccttttggaaggtgcttagtgttgtgtgggcttgyagggagctgtagggttcatgagtggttatgcagaactaatggatgcatcctgtgctgaggtggttattaaaagcgtacctacctctgtgttgtttcagtgtctttagtttggctttgcatcctggataatctactaaataaaggaactgataagtacaagcccaaagatacagccttcataatgtctttgaggcaagatttagggcaaygtgactgcttgcataaggctgacccttggggagtgatctgtatattgtgaagttccaagtaggccaagtgatgcctttaaaagtctcggt

SEQ ID NO: 72137 - DNA, 600 bp, Chicken  19866894351694_2
gcttcctttcttttagtccttttcctaagagcagctagaggatgtgctctgtagggccttttggaaggtgcttagtgttgtgtgggcttgyagggagctgtagggttcatgagtggttatgcagaactaatggatgcatcctgtgctgaggtggttattaaaagcgtacctacctctgtgttgtttcagtgtctttagtttggctttgcatcctggataatctactaaataaaggaactgataagtacaagcccaaagatacagccttcataatgtctttgaggcaagatttagggcaaygtgactgcttgcataaggctgacccttggggagtgatctgtatattgtgaagttccaagtaggccaagtgatgcctttaaaagtctcggtgaagggtgaagtraaataccctcatacatgaattttatgttctctttgctgcttttgtatttctttgtggtttctctgctgaatgtggtttgggtgttttttggtttttttgtttgtttttttgtttttttgttctggagcaccataaggcagtgctcactatggtgtgacaaatggtgatgtgaaagtaataattatgaataggatatt

SEQ ID NO: 72138 - DNA, 562 bp, Chicken  19866894351694_3
ggttcatgagtggttatgcagaactaatggatgcatcctgtgctgaggtggttattaaaagcgtacctacctctgtgttgtttcagtgtctttagtttggctttgcatcctggataatctactaaataaaggaactgataagtacaagcccaaagatacagccttcataatgtctttgaggcaagatttagggcaaygtgactgcttgcataaggctgacccttggggagtgatctgtatattgtgaagttccaagtaggccaagtgatgcctttaaaagtctcggtgaagggtgaagtraaataccctcatacatgaattttatgttctctttgctgcttttgtatttctttgtggtttctctgctgaatgtggtttgggtgttttttggtttttttgtttgtttttttgtttttttgttctggagcaccataaggcagtgctcactatggtgtgacaaatggtgatgtgaaagtaataattatgaataggatattgctgtgttaatgctgccaaagaataggctccataccacgttgatgttgtccttcacgtgcttgat

SEQ ID NO: 72139 - DNA, 600 bp, Chicken  19866894351697_1
catctacctgtatgcagcagaaagatgaaaaagaatattgatagcataaactgggctgttatgtaaatgggacaagtaaaccgattccaaataatcttgaagtcttttctctccctacaataaaatttattactactccctacagtaaacaacctttggcagccaattttttgcagctgtcgctggaaaagtagtcaaaaaaggggagataatagattttggaacctggcagtcattctatacagatatttcctgtgattatcaacggtttttacagttactgttttaaagccactcacygtgcattaatctactattttctgctaacatagtggccagagtttkgtaaatatttctctacttgtctttttatccttttgttagcataaaaataacatttactcacataagtgattaggatgcccgtgagagactatagtttcttgtcaacacaaagaggatgaaaatgagttttaaagcaagtggcaataagttttttaaccaaattagccatttaaagaatatagctataaatacagaaaaaagccatccagtttctcaagataagtatatttcttacacaagaattaaaactccata

SEQ ID NO: 72140 - DNA, 600 bp, Chicken  19866894351697_2
ataaactgggctgttatgtaaatgggacaagtaaaccgattccaaataatcttgaagtcttttctctccctacaataaaatttattactactccctacagtaaacaacctttggcagccaattttttgcagctgtcgctggaaaagtagtcaaaaaaggggagataatagattttggaacctggcagtcattctatacagatatttcctgtgattatcaacggtttttacagttactgttttaaagccactcacygtgcattaatctactattttctgctaacatagtggccagagtttkgtaaatatttctctacttgtctttttatccttttgttagcataaaaataacatttactcacataagtgattaggatgcccgtgagagactatagtttcttgtcaacacaaagaggatgaaaatgagttttaaagcaagtggcaataagttttttaaccaaattagccatttaaagaatatagctataaatacagaaaaaagccatccagtttctcaagataagtatatttcttacacaagaattaaaactccataattaagcattatcaattcttagcttgaaatggatgttcatgaaag

SEQ ID NO: 72141 - DNA, 442 bp, Chicken  19866894351711_1
tgagtcagtggccttggaggaacacttggtcatgttagcatagacaatactacatcccttaaatgataggcattaagagattgtcttaataggattttctgattcgatgcttttagggtagtactgaacaatattgaataaagagaagcaagtactagtagctcgtcctgaaggaagttgtaataatgagatttaattgtgattacagttcctggttggggtcctgtttgactgctttttacgtgtgacgcccatcagtggtgtcatttacagctgggtgttgtgggatgaggccttaaygttgtccctcttgatttctttggctggagacaaaagccagtttagcccatacatttttaaagagagtgttttttcttactctgcaggtggaaaagcccttaaaaggaatatttcagtagaccatagcaacttaaatagtttt

SEQ ID NO: 72142 - DNA, 600 bp, Chicken  19866894351717_1
ataagtgcagcagtagatgcagccccatttcctggtgtaagtgtctgagttttccaagggagagcccacactcctatgctgcatttgaggacatgagggaccgacaagcacatacctcactggcagtcattaaggtgaaggacatgaaatcaacatgttaacagttaaaacatatacacgcttgaacacacggtgccctggagcactgaggtcccattcacttagtgcttcctaatactttcaccacctgtgaaaagtgaaagtcctgctcattctcagtggaaaaacttcctttaggayaagcacagcatgctctgcacgtggccctgagcaactggatggctgtgagcactgatggggctgtgggtgcccctgggcactgcaggcagtgggaccagatgcccttcaggggtcccttccaactcaaaccactcgatgatctatgctactctccctgtcctgtggcattacatgcaacgcagaaataaacactataagtaaaaggtaggagtgaaaacaaagattcaaagaaaagagatgagtcacagtaacgttgctagagaccatatacagaagctgtgaacaaaaagctttcaagaa

SEQ ID NO: 72143 - DNA, 599 bp, Chicken  19866894351719_1
  misc_feature (1)..(48): n is any nucleotide
nnnnnnnnnnnnnnnnnnnnnnnnnnnnnnnnnnnnnnnnnnnnnnnntttaaaaatccccccccctgtggctagttagtacagtgctcaggctttgtgaagttcagctgcagcactgagccccaggcagagcctttggagctgagcaagagtcaggagatgcaacgtgtgcaagtcttgtctgagtttgcttgtcgcagtcctcgctctgtgattcccagggctggctggtcatctcatacagagcacttgtgtgaaagaatgctgtcagatgtctgcatgggaaccgaaaaccagggsagagctgtgcctatgactggctgacttctgtggagtttcccaacttgttctgtggtggtctgcctcatcactcttcaagtgaaatggaggctgcctccattagtggtytgggcttttaaattgctttcctattcttatacttccttctcttttgccctccttgaaggcaagtaaaaagacagaattgtatttctcaacatgggaaaatgagaattcatttgtgagaagtcaggccaagggagggagccttgctgctaatcttgactgtgaaggatttatgtttcagcttaatctgggta

SEQ ID NO: 72144 - DNA, 600 bp, Chicken  19866894351719_2
tgcagcactgagccccaggcagagcctttggagctgagcaagagtcaggagatgcaacgtgtgcaagtcttgtctgagtttgcttgtcgcagtcctcgctctgtgattcccagggctggctggtcatctcatacagagcacttgtgtgaaagaatgctgtcagatgtctgcatgggaaccgaaaaccagggsagagctgtgcctatgactggctgacttctgtggagtttcccaacttgttctgtggtggtctgcctcatcactcttcaagtgaaatggaggctgcctccattagtggtytgggcttttaaattgctttcctattcttatacttccttctcttttgccctccttgaaggcaagtaaaaagacagaattgtatttctcaacatgggaaaatgagaattcatttgtgagaagtcaggccaagggagggagccttgctgctaatcttgactgtgaaggatttatgtttcagcttaatctgggtaattctgtaatatcgtacaaagctagttccaaaggtccgccagggcttcacttcataaaagctgggatgatacctggcctgtactcaccgtatcccaggggctgacattt

SEQ ID NO: 72145 - DNA, 599 bp, Chicken  19866894351736_1
  misc_feature (1)..(108): n is any nucleotide
nnnnnnnnnnnnnnnnnnnnnnnnnnnnnnnnnnnnnnnnnnnnnnnnnnnnnnnnnnnnnnnnnnnnnnnnnnnnnnnnnnnnnnnnnnnnnnnnnnnnnnnnnnnnctcgatattcaaacttgatttctaggtctgtcactgagagaacccatcagtaggacttttcctggacctctgcacatacatcagcagtagagacatatcatgcaatccaagctaggcttgcggggatgttttagctctacacagatgctaacaagcaaaaaggattaaaaaatggttttgactttttaagtwtaatgacagaaacactacaaacccatgaacgtacttggaagagagctgatccagagctccgggctgctgaagaagtcatgttgcagagcagtcggaggcatctccatatccagaggttcattcttcggccacacagcttcagggctgcagttctctgcactggctggagccatcggagaatctacagaaggaaaatgactctttcctaagccaagtcttaatttcaagcatgcaccaatatacaagcaaataacttcactattacattacagactatggcaccaaccattgatattaag

SEQ ID NO: 72146 - DNA, 600 bp, Chicken  19866894351749_1
aaccttcccaccaatattctgttacacattgctgccctgtgacagatggcagcagaggggtagtctgactgaatgacatttgacatggaagtgcagatgaagcaaaggtgggaaaccgaattcctccaagcagaaaacacagcacccactggcatccaatatttatagagaccaaacagcacagtgaggtggtgggtagtgcatttcagcactggtgacaataacagaaggtcacctttgctcatacagatttttaagaacacagcacagaggctcttgttcattgctgccaaaaagggyacaactaatggtggtgactaagttgaaaaagagtgttttctagctgagaatttgctctactaaatagcrttattgtgctctttgtacatgttatggttttgatgaacatatataggaggaggtgttacctttggagcaacctgcatatttattctttactccagacttcagcatgatcaagctttatttctcttcaaaaagagcgcacttttgccttctgtctcaatcttttgcaaccttccagcactgcctcaaacctgttccagccgctttctgttttgcagcagcaagaagacggcc

SEQ ID NO: 72147 - DNA, 600 bp, Chicken  19866894351749_2
tgaatgacatttgacatggaagtgcagatgaagcaaaggtgggaaaccgaattcctccaagcagaaaacacagcacccactggcatccaatatttatagagaccaaacagcacagtgaggtggtgggtagtgcatttcagcactggtgacaataacagaaggtcacctttgctcatacagatttttaagaacacagcacagaggctcttgttcattgctgccaaaaagggyacaactaatggtggtgactaagttgaaaaagagtgttttctagctgagaatttgctctactaaatagcrttattgtgctctttgtacatgttatggttttgatgaacatatataggaggaggtgttacctttggagcaacctgcatatttattctttactccagacttcagcatgatcaagctttatttctcttcaaaaagagcgcacttttgccttctgtctcaatcttttgcaaccttccagcactgcctcaaacctgttccagccgctttctgttttgcagcagcaagaagacggccataaagctccctataatctgtctcacctgggtgagtcatgcagaaatgccaccggcccatggctgcggc

SEQ ID NO: 72148 - DNA, 600 bp, Chicken  19866894351749_3
gcacctgaagtgaggggattttcagggcaataggaacttttggtataggtctgtgaccatttgttggtaaagctatgagtcctccccagtggtccacggggcacaaaggcttctgtaataatgctaacacagtgcaaggagggaaggggtgggggtaagaggagagagaggaaagccaaatgatttcaatacaaataatcttcaaggagcgttctgtaaacaaagaggagggcatcatgccaggagcacctgcctctctgcattgacgttaattgttaggggaaggagaaaaaatagggraaaaaaaaaaaagaaagaaaaaactggattgcccataccatgtgtgcatgcagggagaggcagccatgctcttcctcagcctttcccaatgaaggcagataaggaggaaacatggggacaggacagagctcatgggtgccggaacaaagacagccctgcaagccaaacctgtcggcatctgctctgccttcctcctgactgcttccttgaggatgcacatactttccaaagctctttrgtagttgtggcttcytggtgttttacatcactctgcaatcccactatggtttttccctatgt

SEQ ID NO: 72149 - DNA, 600 bp, Chicken  19866894351749_4
gccaggagcacctgcctctctgcattgacgttaattgttaggggaaggagaaaaaatagggaaaaaaaaaaaaagaaagaaaaaactggattgcccataccatgtgtgcatgcagggagaggcagccatgctcttcctcagcctttcccaatgaaggcagataaggaggaaacatggggacaggacagagctcatgggtgccggaacaaagacagccctgcaagccaaacctgtcggcatctgctctgccttcctcctgactgcttccttgaggatgcacatactttccaaagctctttrgtagttgtggcttcytggtgttttacatcactctgcaatcccactatggtttttccctatgtacccaggacaagcctyggtgcagtgctgctaggctcccacctctcatgcccagtcccttgggtgcaagcctcttcctgttccccgggtgggtatggagcagctggaaggctcctgcacccacacaagtggttgaggaggattaggctgtgcatgaacaagtccttaatcatccagtttggcaatctcccacaagccactgtgcccctcctggaggcatcgctcacccatgtaaagtgc

SEQ ID NO: 72150 - DNA, 600 bp, Chicken  19866894351749_5
ctctctgcattgacgttaattgttaggggaaggagaaaaaatagggaaaaaaaaaaaaagaaagaaaaaactggattgcccataccatgtgtgcatgcagggagaggcagccatgctcttcctcagcctttcccaatgaaggcagataaggaggaaacatggggacaggacagagctcatgggtgccggaacaaagacagccctgcaagccaaacctgtcggcatctgctctgccttcctcctgactgcttccttgaggatgcacatactttccaaagctctttrgtagttgtggcttcytggtgttttacatcactctgcaatcccactatggtttttccctatgtacccaggacaagcctyggtgcagtgctgctaggctcccacctctcatgcccagtcccttgggtgcaagcctcttcctgttccccgggtgggtatggagcagctggaaggctcctgcacccacacaagtggttgaggaggattaggctgtgcatgaacaagtccttaatcatccagtttggcaatctcccacaagccactgtgcccctcctggaggcatcgctcacccatgtaaagtgcctggcacttccagca

SEQ ID NO: 72151 - DNA, 600 bp, Chicken  19866894351749_6
gaaaaaactggattgcccataccatgtgtgcatgcagggagaggcagccatgctcttcctcagcctttcccaatgaaggcagataaggaggaaacatggggacaggacagagctcatgggtgccggaacaaagacagccctgcaagccaaacctgtcggcatctgctctgccttcctcctgactgcttccttgaggatgcacatactttccaaagctctttrgtagttgtggcttcytggtgttttacatcactctgcaatcccactatggtttttccctatgtacccaggacaagcctyggtgcagtgctgctaggctcccacctctcatgcccagtcccttgggtgcaagcctcttcctgttccccgggtgggtatggagcagctggaaggctcctgcacccacacaagtggttgaggaggattaggctgtgcatgaacaagtccttaatcatccagtttggcaatctcccacaagccactgtgcccctcctggaggcatcgctcacccatgtaaagtgcctggcacttccagcagccaccacaggccaaatgcagagctctctttgtgcctggctcttcagatggccccacagtgct

SEQ ID NO: 72152 - DNA, 600 bp, Chicken  19866894351751_1
ctgggtgtgcatcaacagcatttgtttcaattcccatgaggatttcaacctcctccatcccacgacaagcaacttaggcagaagttatttagtcactggtataagcaacttcttttagacaactcaaagtccactcaaattaataaatacagtgggtttgggatatgtccagtacccaatttcagccctaactcttacagcatactactccatcttcaaacctattattatatacggtgaaactgctcttccctcctagatgttgctaaaggtttcaagcacccacgccaagatttgtgyccccttcacaacagtggtattcatcacaactagaagcaagcagtgctctctaaatagaggtacataaagctgagaggagcagccttcatccctaaaagaaccacagaatagggcacagctgcagctcaccctctcgytccttttccttttcttccttcttgctctttttcgtggatgatttgctctgggtggctggctgcccagagcccgatgctgcgggagcagaggtggaagaagtgcttgatgatccagaggatgaagccacagacagcactttgctgccacacagagcacaagaga

SEQ ID NO: 72153 - DNA, 600 bp, Chicken  19866894351751_2
aattaataaatacagtgggtttgggatatgtccagtacccaatttcagccctaactcttacagcatactactccatcttcaaacctattattatatacggtgaaactgctcttccctcctagatgttgctaaaggtttcaagcacccacgccaagatttgtgyccccttcacaacagtggtattcatcacaactagaagcaagcagtgctctctaaatagaggtacataaagctgagaggagcagccttcatccctaaaagaaccacagaatagggcacagctgcagctcaccctctcgytccttttccttttcttccttcttgctctttttcgtggatgatttgctctgggtggctggctgcccagagcccgatgctgcgggagcagaggtggaagaagtgcttgatgatccagaggatgaagccacagacagcactttgctgccacacagagcacaagagagcagctgcaggagaactggcgacactccttcgtctaccaagaagctgacttgaaggaggaaatagagaaccgctgcggagaaaggaagaaaattgttattgcctaaattaaatctaaatgcaccacaccaaactacc

SEQ ID NO: 72154 - DNA, 600 bp, Chicken  19866894351756_1
tgaagtcatttcccagcaagtttaagaaacataaggaccactaggtgggataacagaatagcacaggttggaagggacctctagaggtgtctagttcaaccttcagttcaaagcagggccagtttcaaagctagactgagcagttcaggacattctgttggggaatttttaagatctcccaagtggaggttgccccatctctgtgggttttccagccctgatgcttagccaccctggttgcagagatcttgtccttttatccagctggagtttcctttattttaatttgtgtctgccctyggctttcccaggccttactctgactgccacctgtccaccatgcaggaacagaggggttcccaaaatccagatgcctcactgctgtgtttacctctgcctccacccctccctccagttgctaagcgatatctgcgctctccaaagtcactgatacagacccttggctgctgcatttcaccatccaatttgcaatttaaattctctgacaggcagaagcaaccaagctgttcacttaagattgcacaaagttatattgaaatccaggaaatcgccaatgcctcgagctcttcataaatttca

SEQ ID NO: 72155 - DNA, 600 bp, Chicken  19866894351756_2
atttcaccatccaatttgcaatttaaattctctgacaggcagaagcaaccaagctgttcacttaagattgcacaaagttatattgaaatccaggaaatcgccaatgcctcgagctcttcataaatttcactttgatagtaacagagacggaggtagggagagaaaagaagggagaaagcaaagcaataggtgctcatgtaaggggggagatgaagcagaaacagtggggaatgaccaccacggtggagtttcctctttattcccgctggtcatcctctgcctgctaaaagcttgtccttyttaaatgctcccacagtattgttaaaacaacattttttatctctttccactccctctatcctttattagcacttcctggataaagggataggtgccctttgcatcatatttttgcttcctaaaacacccaacccagcaatcattgtggcagaggtgcctatcctgcaaagcagggtgctgagcagctgctgcccgtggctctctgactcattgtgtagctttgctgggattcacttcagccacattcagagggagggtcgtattttgctaatagcttgcctgggtctcctttgctcatgt

SEQ ID NO: 72156 - DNA, 600 bp, Chicken  19866894351765_1
gctttagaaatatgtgtgttcactgaacatctgtctgttctcgttaacagaaatatcattcctttcaggactgcttagcctcctgaagtggaaggtcatggaaaactctggaaaaaacaattcattacattgtcacattacaatgtaactttaaaaaaagattgagacttgcagcaaattttactccattacttaaatgtgcactgtggtgtgctaaagcaatataccgtcagagtcattagatgagtttattatagagctatcaaaacaggtaagtttttaggcatgcctctttgtcartaaactgagatgtggggcatcaccaggatttatgggatatggaaggctccattctctcgtgctctttgccttttttgttgacggtaggggaaagagcaaagagactgctacaactttgtgtatggtaaatttctgaggccacggagtaccggcggaaaaaaatgggctgatagagatgcgtgtggctgaagatcgagcctattgctgggcaaactggatcaggtttttgatcttgttctgctgtttgtgattagtatatctggtgctgtttcatagcagtttgggtttaaaatggaaaga

SEQ ID NO: 72157 - DNA, 600 bp, Chicken  19866894351765_2
ctcgtgctctttgccttttttgttgacggtaggggaaagagcaaagagactgctacaactttgtgtatggtaaatttctgaggccacggagtaccggcggaaaaaaatgggctgatagagatgcgtgtggctgaagatcgagcctattgctgggcaaactggatcaggtttttgatcttgttctgctgtttgtgattagtatatctggtgctgtttcatagcagtttgggtttaaaatggaaagaagagcttcagtatagaatcagtgacttctggaagatattcagaatctgtcagttsagagaaaaacacatgcagtggttgtaggagcaaaccctcatgagtagcttgggcagctgcactgtctgaaccttttatccacgtgatggacagagtcttcaccagaggtcaggctgtcasgggctcttctctgtggacttcaagatttgctgattctggagatgtactttacaggaacacagttaactaagtaggtgaccccggttttacagtgtcagatccagttttgcaaataaacctagctaagtggtaccctcatagtaggagcactgtgctaggcagtatgtgtttaggaacaag

SEQ ID NO: 72158 - DNA, 600 bp, Chicken  19866894351765_3
atgcgtgtggctgaagatcgagcctattgctgggcaaactggatcaggtttttgatcttgttctgctgtttgtgattagtatatctggtgctgtttcatagcagtttgggtttaaaatggaaagaagagcttcagtatagaatcagtgacttctggaagatattcagaatctgtcagttsagagaaaaacacatgcagtggttgtaggagcaaaccctcatgagtagcttgggcagctgcactgtctgaaccttttatccacgtgatggacagagtcttcaccagaggtcaggctgtcasgggctcttctctgtggacttcaagatttgctgattctggagatgtactttacaggaacacagttaactaagtaggtgaccccggttttacagtgtcagatccagttttgcaaataaacctagctaagtggtaccctcatagtaggagcactgtgctaggcagtatgtgtttaggaacaagtccaagggttttatcttaagcctttttcatccctgctgtttgtgtatttctttagcagttgtcttaaaacctgtgaaaataccagtacttatcatgcttgagtaatgcttgaaagttcct

SEQ ID NO: 72159 - DNA, 600 bp, Chicken  19866894351771_1
gatacacttcttttccatatagccattgagttactgatctgtgggaatggaataaggggtcggactgcacccagctctcgggacaggcttccagaagcagccaagtgcccagaagagcatcactgtttgggtcttacgtgtctaaaaagtgtttcgtgttactccgctcaccggctgaattggcgaaggtaggtgaagtcggtgcctccaggctggtctgatccgagagagagaaaagtcaaataaatgttttggagatgcctttatttatttatttattttacttctttttccttcttyctttcyttctttctttctttttttttttttktttgttttttgtggaggagatcaggagagatgaatttgtccgttggtttaatgggagtycgtaaggcagcgtttcagcctctttgagccaccgagcactgtgaggatgcttacccaggcaatatttgtttccaaagccacacarcgcagctgagtaaccccagcttccctctgcactcaactgatgggtgctgcaccgtgcttcttcaggctgtgccctctacgccgtgctcttgcagcagcagggaataggacagcatgctccctgct

SEQ ID NO: 72160 - DNA, 600 bp, Chicken  19866894351771_2
cttcttttccatatagccattgagttactgatctgtgggaatggaataaggggtcggactgcacccagctctcgggacaggcttccagaagcagccaagtgcccagaagagcatcactgtttgggtcttacgtgtctaaaaagtgtttcgtgttactccgctcaccggctgaattggcgaaggtaggtgaagtcggtgcctccaggctggtctgatccgagagagagaaaagtcaaataaatgttttggagatgcctttatttatttatttattttacttctttttccttcttyctttcyttctttctttctttttttttttttktttgttttttgtggaggagatcaggagagatgaatttgtccgttggtttaatgggagtycgtaaggcagcgtttcagcctctttgagccaccgagcactgtgaggatgcttacccaggcaatatttgtttccaaagccacacarcgcagctgagtaaccccagcttccctctgcactcaactgatgggtgctgcaccgtgcttcttcaggctgtgccctctacgccgtgctcttgcagcagcagggaataggacagcatgctccctgctggaagc

SEQ ID NO: 72161 - DNA, 600 bp, Chicken  19866894351771_3
tactgatctgtgggaatggaataaggggtcggactgcacccagctctcgggacaggcttccagaagcagccaagtgcccagaagagcatcactgtttgggtcttacgtgtctaaaaagtgtttcgtgttactccgctcaccggctgaattggcgaaggtaggtgaagtcggtgcctccaggctggtctgatccgagagagagaaaagtcaaataaatgttttggagatgcctttatttatttatttattttacttctttttccttcttyctttcyttctttctttctttttttttttttktttgttttttgtggaggagatcaggagagatgaatttgtccgttggtttaatgggagtycgtaaggcagcgtttcagcctctttgagccaccgagcactgtgaggatgcttacccaggcaatatttgtttccaaagccacacarcgcagctgagtaaccccagcttccctctgcactcaactgatgggtgctgcaccgtgcttcttcaggctgtgccctctacgccgtgctcttgcagcagcagggaataggacagcatgctccctgctggaagcaggagtagggcagagtccttgggtg

SEQ ID NO: 72162 - DNA, 594 bp, Chicken  19866894351771_4
ccagaagcagccaagtgcccagaagagcatcactgtttgggtcttacgtgtctaaaaagtgtttcgtgttactccgctcaccggctgaattggcgaaggtaggtgaagtcggtgcctccaggctggtctgatccgagagagagaaaagtcaaataaatgttttggagatgcctttatttatttatttattttacttctttttccttcttyctttcyttctttctttctttttttttttttktttgttttttgtggaggagatcaggagagatgaatttgtccgttggtttaatgggagtycgtaaggcagcgtttcagcctctttgagccaccgagcactgtgaggatgcttacccaggcaatatttgtttccaaagccacacarcgcagctgagtaaccccagcttccctctgcactcaactgatgggtgctgcaccgtgcttcttcaggctgtgccctctacgccgtgctcttgcagcagcagggaataggacagcatgctccctgctggaagcaggagtagggcagagtccttgggtgagctgagaagcacgatgttatcccagccctacaacggactgtgcggggtcccc

SEQ ID NO: 72163 - DNA, 509 bp, Chicken  19866894351771_5
tgaattggcgaaggtaggtgaagtcggtgcctccaggctggtctgatccgagagagagaaaagtcaaataaatgttttggagatgcctttatttatttatttattttacttctttttccttcttyctttcyttctttctttctttttttttttttktttgttttttgtggaggagatcaggagagatgaatttgtccgttggtttaatgggagtycgtaaggcagcgtttcagcctctttgagccaccgagcactgtgaggatgcttacccaggcaatatttgtttccaaagccacacarcgcagctgagtaaccccagcttccctctgcactcaactgatgggtgctgcaccgtgcttcttcaggctgtgccctctacgccgtgctcttgcagcagcagggaataggacagcatgctccctgctggaagcaggagtagggcagagtccttgggtgagctgagaagcacgatgttatcccagccctacaacggactgtgcggggtcccc

SEQ ID NO: 72164 - DNA, 600 bp, Chicken  19866894351781_1
taacaaagatttaacaaattaacattacagggagatgttcctgggccaaaaaaaaggggggggagtggggtggtggatatgatggagtcaaatatgccccttaattttttgggaacctaattcaaactgcagtgactagtttagaaatatgtggcagtgacaagtgacagagaccagtactaaggcagaacgaagtcctgcagatcaatagctaaacaataatggagtgtatgtaagaagtaactgaaaagcctcagtgtggaaaaaaaaaaaagggaaaagtggcacaaaaattagaarggaacattgactctacttctctgctgtcrtgatatcctgcaaccagtaraactcttccttctaatggttgtttattcacattgttcctcttaggaggttattctgagcttcactctgctgttttgaaggcttctgctagttttcagcctgaatttatttatgaccagtgtatatctgttttaagttctttccatttttaaactctaacctgttgttagccacatttagtaaaagttcagggcataattcctttactccaaatatgtgtgatttgtcccttttttatttttgactttcagg

SEQ ID NO: 72165 - DNA, 600 bp, Chicken  19866894351781_2
gggagatgttcctgggccaaaaaaaaggggggggagtggggtggtggatatgatggagtcaaatatgccccttaattttttgggaacctaattcaaactgcagtgactagtttagaaatatgtggcagtgacaagtgacagagaccagtactaaggcagaacgaagtcctgcagatcaatagctaaacaataatggagtgtatgtaagaagtaactgaaaagcctcagtgtggaaaaaaaaaaaagggaaaagtggcacaaaaattagaarggaacattgactctacttctctgctgtcrtgatatcctgcaaccagtaraactcttccttctaatggttgtttattcacattgttcctcttaggaggttattctgagcttcactctgctgttttgaaggcttctgctagttttcagcctgaatttatttatgaccagtgtatatctgttttaagttctttccatttttaaactctaacctgttgttagccacatttagtaaaagttcagggcataattcctttactccaaatatgtgtgatttgtcccttttttatttttgactttcaggaaagcagaacaatatggcaaggcaagatg

SEQ ID NO: 72166 - DNA, 600 bp, Chicken  19866894351781_3
aaaaaaggggggggagtggggtggtggatatgatggagtcaaatatgccccttaattttttgggaacctaattcaaactgcagtgactagtttagaaatatgtggcagtgacaagtgacagagaccagtactaaggcagaacgaagtcctgcagatcaatagctaaacaataatggagtgtatgtaagaagtaactgaaaagcctcagtgtggaaaaaaaaaaaagggaaaagtggcacaaaaattagaarggaacattgactctacttctctgctgtcrtgatatcctgcaaccagtaraactcttccttctaatggttgtttattcacattgttcctcttaggaggttattctgagcttcactctgctgttttgaaggcttctgctagttttcagcctgaatttatttatgaccagtgtatatctgttttaagttctttccatttttaaactctaacctgttgttagccacatttagtaaaagttcagggcataattcctttactccaaatatgtgtgatttgtcccttttttatttttgactttcaggaaagcagaacaatatggcaaggcaagatgaaacagatgtttcaggtcta

SEQ ID NO: 72167 - DNA, 599 bp, Chicken  19866894351786_1
  misc_feature (1)..(99): n is any nucleotide
nnnnnnnnnnnnnnnnnnnnnnnnnnnnnnnnnnnnnnnnnnnnnnnnnnnnnnnnnnnnnnnnnnnnnnnnnnnnnnnnnnnnnnnnnnnnnnnnnnnggccctgccgggcctcgcttcgctgtcacgcattcacagccaaccttaatttgcacagcacggccacacctcggccccaccaccgcacgtccccacgctgtcccctgtgtgtgtcggtgcggtgctgggcagaggccgtccctccacaccgtttgctcctctgtaaacccacaaggacacggaggacgggggcggccgggygcgtcgctccccgttcggctgytttcctcgttggtaggatcccagtttggcccwactcctgcctgggggcgagaggctcctccggggtgaaggcagctcccggcggaggccttccgacagggccgggcccggtgtctgccagcaaccagacactgctctggcggccatacggggctgtgggcctggctccgaggcgtgcctgaggccagccaacctgcagagcgcgccgggcctgaggcctgcagctcgaggcccgcttcagccccgcgtcctctcggccccacgcgggaccgcagccg

SEQ ID NO: 72168 - DNA, 599 bp, Chicken  19866894351786_2
  misc_feature (1)..(77): n is any nucleotide
nnnnnnnnnnnnnnnnnnnnnnnnnnnnnnnnnnnnnnnnnnnnnnnnnnnnnnnnnnnnnnnnnnnnnnnnnnnnnggccctgccgggcctcgcttcgctgtcacgcattcacagccaaccttaatttgcacagcacggccacacctcggccccaccaccgcacgtccccacgctgtcccctgtgtgtgtcggtgcggtgctgggcagaggccgtccctccacaccgtttgctcctctgtaaacccacaaggacacggaggacgggggcggccgggygcgtcgctccccgttcggctgytttcctcgttggtaggatcccagtttggcccwactcctgcctgggggcgagaggctcctccggggtgaaggcagctcccggcggaggccttccgacagggccgggcccggtgtctgccagcaaccagacactgctctggcggccatacggggctgtgggcctggctccgaggcgtgcctgaggccagccaacctgcagagcgcgccgggcctgaggcctgcagctcgaggcccgcttcagccccgcgtcctctcggccccacgcgggaccgcagccgtccccaccccgctcctgtgccc

SEQ ID NO: 72169 - DNA, 599 bp, Chicken  19866894351786_3
  misc_feature (1)..(45): n is any nucleotide
nnnnnnnnnnnnnnnnnnnnnnnnnnnnnnnnnnnnnnnnnnnnnggccctgccgggcctcgcttcgctgtcacgcattcacagccaaccttaatttgcacagcacggccacacctcggccccaccaccgcacgtccccacgctgtcccctgtgtgtgtcggtgcggtgctgggcagaggccgtccctccacaccgtttgctcctctgtaaacccacaaggacacggaggacgggggcggccgggygcgtcgctccccgttcggctgytttcctcgttggtaggatcccagtttggcccwactcctgcctgggggcgagaggctcctccggggtgaaggcagctcccggcggaggccttccgacagggccgggcccggtgtctgccagcaaccagacactgctctggcggccatacggggctgtgggcctggctccgaggcgtgcctgaggccagccaacctgcagagcgcgccgggcctgaggcctgcagctcgaggcccgcttcagccccgcgtcctctcggccccacgcgggaccgcagccgtccccaccccgctcctgtgccccctcctccccgtgttggagcttcgggccccgg

SEQ ID NO: 72170 - DNA, 600 bp, Chicken  19866894351802_1
aaccagaataatttcttttttttcttttttcctttctttctttctttctttctttctttctttctttttttttttttttcccgaggaaaaaaaaagaaaagagagagagagatgaaggcagaaaagatttctgagcctgttcaaaaggaagcaaaggaagtatttccaagctgaagattttggacttaagagataaaatcactgctgctatgcttggctattctctgtctttcattacataggtaatgaaagattcaggcttgctgtatttctttaacttctacagtatatcctgcctcygagtataactcaggcaaacccagaggtagaaatccatttcattttctattcgctgttagtatatttcttttaatggttctttctcaactaaaagataggaatgtatatatatgtacatttatatacataaatatacatatatgtgtctctctctatatatatttggaagatattcctatcatttttaccaattggaaattggttatatttttgaagataggtcctgtaaactaaatgttcaaaacttcaccagagccagtgcaatccacagagatagtgtggaaaaaaacagggyaaaag

SEQ ID NO: 72171 - DNA, 600 bp, Chicken  19866894351802_2
cctcygagtataactcaggcaaacccagaggtagaaatccatttcattttctattcgctgttagtatatttcttttaatggttctttctcaactaaaagataggaatgtatatatatgtacatttatatacataaatatacatatatgtgtctctctctatatatatttggaagatattcctatcatttttaccaattggaaattggttatatttttgaagataggtcctgtaaactaaatgttcaaaacttcaccagagccagtgcaatccacagagatagtgtggaaaaaaacagggyaaaaggggaaacagccactggcttgagcacaagaacatttctggagattagttaagtccccagaagctgcagtgagttttatgtatgtttctgttttggaaacaactgaaaaaaaatatattagcaatcagagacggaagtgtggaaaagatagggaactgaaagcatagaagaaaaaatgctctagcagactgtatatacttttttatctcactgtttgtatttcaaagtcttttctatattagaaagttacaccaatctatttaggtatgcagttttaaatacatagctcgggcattc

SEQ ID NO: 72172 - DNA, 600 bp, Chicken  19866894351809_1
attcacgtgcactactgaaattacagctctcatttactgtgaagagctaaaatgaatgtatcatttacagttccatacttggaacaattccatgttactttagctctgaagacactgcagtgttcacagaagccaagaagctggcaatagcttacacacaagaaaaagctgcagctttatctctgaacacatttaaataggtcagacagagttacagcttcaggtgagcttccctttatcctaagcacacaactccaaacctcctgtacttctgatacagtattctgcctttagcagcasactttaaaggaggtaaccgataagtcctgtaagtaactcccagaagaattcttacttcctttaaaccagatttcaaataaagtcaaacagaaagacagacttgtagcttcctatctaaaaaaagttatcaacatacacatactgcttgaaggcacttgcaggtagcaagaagagactatttttctcatgtgaaaaacaaacaaacaacataaccatcatcaacaacaacaaaaaccctccttcctcaagctctgaattaagagagaaaggcaaaaatgatgcacttgtttgaaaaggaaa

SEQ ID NO: 72173 - DNA, 599 bp, Chicken  19866894351811_1
  misc_feature (1)..(103): n is any nucleotide
nnnnnnnnnnnnnnnnnnnnnnnnnnnnnnnnnnnnnnnnnnnnnnnnnnnnnnnnnnnnnnnnnnnnnnnnnnnnnnnnnnnnnnnnnnnnnnnnnnnnnnntataatgtgaggttatctgctagattaaggcctatacattgacatgtttacaaaccaatctgcctctaatacacatatcagcagtcttttttggttatgaaaagaaaaacaatctgccgtgcatcaagcatcactggtgcaatatcaagtaccacagagaaacttttttcacttctggagaagcaggagtgatacaraggccctgcatacatgcagatcacaattacttcacaaagattcctctccaacatgcaagtggttgtgactcactccaccasttaatgaagaggtggtgcttctacaaatgaaagtttctatagaactgcagatgttgttatttaagaggaaaayttctgatgccacaagaaggcctgtggtcttcagccttaacacagattgcagtaaaaagcatgtattctggcccagatggcatgccagtctcattgtatcgtaacagtttttaccagtttaatagtaaccaacaagttayccatga

SEQ ID NO: 72174 - DNA, 599 bp, Chicken  19866894351811_2
  misc_feature (1)..(22): n is any nucleotide
nnnnnnnnnnnnnnnnnnnnnntataatgtgaggttatctgctagattaaggcctatacattgacatgtttacaaaccaatctgcctctaatacacatatcagcagtcttttttggttatgaaaagaaaaacaatctgccgtgcatcaagcatcactggtgcaatatcaagtaccacagagaaacttttttcacttctggagaagcaggagtgatacaraggccctgcatacatgcagatcacaattacttcacaaagattcctctccaacatgcaagtggttgtgactcactccaccasttaatgaagaggtggtgcttctacaaatgaaagtttctatagaactgcagatgttgttatttaagaggaaaayttctgatgccacaagaaggcctgtggtcttcagccttaacacagattgcagtaaaaagcatgtattctggcccagatggcatgccagtctcattgtatcgtaacagtttttaccagtttaatagtaaccaacaagttayccatgaatgaccgtcactggctctcaactccacaagatgaagacaacaatacagacttctctgtgcatgctactagctactgttcct

SEQ ID NO: 72175 - DNA, 600 bp, Chicken  19866894351811_3
aaaccaatctgcctctaatacacatatcagcagtcttttttggttatgaaaagaaaaacaatctgccgtgcatcaagcatcactggtgcaatatcaagtaccacagagaaacttttttcacttctggagaagcaggagtgatacaraggccctgcatacatgcagatcacaattacttcacaaagattcctctccaacatgcaagtggttgtgactcactccaccasttaatgaagaggtggtgcttctacaaatgaaagtttctatagaactgcagatgttgttatttaagaggaaaayttctgatgccacaagaaggcctgtggtcttcagccttaacacagattgcagtaaaaagcatgtattctggcccagatggcatgccagtctcattgtatcgtaacagtttttaccagtttaatagtaaccaacaagttayccatgaatgaccgtcactggctctcaactccacaagatgaagacaacaatacagacttctctgtgcatgctactagctactgttcctgctccaatatacaaaaatctgcataattaagacactccagcccctccttaactaattgtacgcgttcccacact

SEQ ID NO: 72176 - DNA, 550 bp, Chicken  19866894351811_4
gatacaraggccctgcatacatgcagatcacaattacttcacaaagattcctctccaacatgcaagtggttgtgactcactccaccasttaatgaagaggtggtgcttctacaaatgaaagtttctatagaactgcagatgttgttatttaagaggaaaayttctgatgccacaagaaggcctgtggtcttcagccttaacacagattgcagtaaaaagcatgtattctggcccagatggcatgccagtctcattgtatcgtaacagtttttaccagtttaatagtaaccaacaagttayccatgaatgaccgtcactggctctcaactccacaagatgaagacaacaatacagacttctctgtgcatgctactagctactgttcctgctccaatatacaaaaatctgcataattaagacactccagcccctccttaactaattgtacgcgttcccacactaccagctatttagtctccttggccccactccagagttcacaggatttaaaataaagaggctatcagtgggaagaatgcttcaaaacaca

SEQ ID NO: 72177 - DNA, 599 bp, Chicken  19866894351812_1
  misc_feature (1)..(31): n is any nucleotide
nnnnnnnnnnnnnnnnnnnnnnnnnnnnnnngcattaaaattatcaatatttaaaacttcagtacacaagagccaactttaaggggcctttaaaggagcagccaggtgagttctgtgttctagacacaagggatgcagggaggcgatgaaacaaaaccccaaacatctgagacaaggtcctattttaacaagtctttgtcctatccaacctgggaattgtggtttctttactgttttgggtaacagatggaagaatgttcacaatcctaggaagcattgtgctgttcttctcctcgccaygtaagctctcataacatctatatgtggctctgatgctggatcttgggtctctagcacccagattgagctttcctatttgtttcacctctagagagagtactgggatccagtggtagcatgarttagatgtctttggtgtcaaacatgaattctctrgtataaattcaggctagaaatgtttgtttcagattgtctgcagaagcgtagcaagtgtgttgctgtgctgtagtttcatttcagtgwcacatcagctgcagttcaggtcttaggagtcttgtagtttgagtaaccagttcttt

SEQ ID NO: 72178 - DNA, 600 bp, Chicken  19866894351812_2
gacacaagggatgcagggaggcgatgaaacaaaaccccaaacatctgagacaaggtcctattttaacaagtctttgtcctatccaacctgggaattgtggtttctttactgttttgggtaacagatggaagaatgttcacaatcctaggaagcattgtgctgttcttctcctcgccaygtaagctctcataacatctatatgtggctctgatgctggatcttgggtctctagcacccagattgagctttcctatttgtttcacctctagagagagtactgggatccagtggtagcatgarttagatgtctttggtgtcaaacatgaattctctrgtataaattcaggctagaaatgtttgtttcagattgtctgcagaagcgtagcaagtgtgttgctgtgctgtagtttcatttcagtgwcacatcagctgcagttcaggtcttaggagtcttgtagtttgagtaaccagttctttattttttttttcacatcaagtcccctaactaaagatagagaagacaactccatacggcttttgatttttttgaacacctagggctgagaagtgaggagttggtgaaagctgttctttctacat

SEQ ID NO: 72179 - DNA, 600 bp, Chicken  19866894351812_3
ccccaaacatctgagacaaggtcctattttaacaagtctttgtcctatccaacctgggaattgtggtttctttactgttttgggtaacagatggaagaatgttcacaatcctaggaagcattgtgctgttcttctcctcgccaygtaagctctcataacatctatatgtggctctgatgctggatcttgggtctctagcacccagattgagctttcctatttgtttcacctctagagagagtactgggatccagtggtagcatgarttagatgtctttggtgtcaaacatgaattctctrgtataaattcaggctagaaatgtttgtttcagattgtctgcagaagcgtagcaagtgtgttgctgtgctgtagtttcatttcagtgwcacatcagctgcagttcaggtcttaggagtcttgtagtttgagtaaccagttctttattttttttttcacatcaagtcccctaactaaagatagagaagacaactccatacggcttttgatttttttgaacacctagggctgagaagtgaggagttggtgaaagctgttctttctacatctgcaaacttccctgagaggatgaaactctcttt

SEQ ID NO: 72180 - DNA, 600 bp, Chicken  19866894351812_4
cagatggaagaatgttcacaatcctaggaagcattgtgctgttcttctcctcgccaygtaagctctcataacatctatatgtggctctgatgctggatcttgggtctctagcacccagattgagctttcctatttgtttcacctctagagagagtactgggatccagtggtagcatgarttagatgtctttggtgtcaaacatgaattctctrgtataaattcaggctagaaatgtttgtttcagattgtctgcagaagcgtagcaagtgtgttgctgtgctgtagtttcatttcagtgwcacatcagctgcagttcaggtcttaggagtcttgtagtttgagtaaccagttctttattttttttttcacatcaagtcccctaactaaagatagagaagacaactccatacggcttttgatttttttgaacacctagggctgagaagtgaggagttggtgaaagctgttctttctacatctgcaaacttccctgagaggatgaaactctcttttccagacagaagtcttttgtaaagaaacgacctttataatctgcttcaaaaatctattgaatctaatgcttaaataccctcaacata

SEQ ID NO: 72181 - DNA, 600 bp, Chicken  19866894351812_5
taagctctcataacatctatatgtggctctgatgctggatcttgggtctctagcacccagattgagctttcctatttgtttcacctctagagagagtactgggatccagtggtagcatgarttagatgtctttggtgtcaaacatgaattctctrgtataaattcaggctagaaatgtttgtttcagattgtctgcagaagcgtagcaagtgtgttgctgtgctgtagtttcatttcagtgwcacatcagctgcagttcaggtcttaggagtcttgtagtttgagtaaccagttctttawtttttttttcacatcaagtcccctaactaaagatagagaagacaactccatacggcttttgatttttttgaacacctagggctgagaagtgaggagttggtgaaagctgttctttctacatctgcaaacttccctgagaggatgaaactctcttttccagacagaagtcttttgtaaagaaacgacctttataatctgcttcaaaaatctattgaatctaatgcttaaataccctcaacatagaaatcgaggtcaaaggaaaatggtatgctgttacatagctctgataataccacctct

SEQ ID NO: 72182 - DNA, 599 bp, Chicken  19866894351814_1
  misc_feature (1)..(71): n is any nucleotide
nnnnnnnnnnnnnnnnnnnnnnnnnnnnnnnnnnnnnnnnnnnnnnnnnnnnnnnnnnnnnnnnnnnnnnntcaagatacactctgtcataagacagagaaggttctaacactggaaaaacaaaagctggagttaaagaaagccatagcagaaagaactgaggaaattaagatccataaggcaatgctggattcccagatcagactcgtggatcaggaacggcaaacgcataaggtaatgattattttcaaaatctctggtgcagcaactcaaaaacaacattacaatttagaacactaygtttccctgaaaatcctaaccaatcatcctttagttccttcatcttcgaagtaaatgagaaaaaaacaaagtaattaaaatgattttatcaagtaccttttacatgtgagcttgcttaaaaagagaggcattttaaccaattttgccagttggaggaattgagtgaagtaagtcttgctgtcagtcacatactgagacagttaaggctaacaagcaatcttttctctgaaaactggcgtgcaagcattaaccactagrcagcatctctggctttgctgtccattatcactggtcaacga

SEQ ID NO: 72183 - DNA, 600 bp, Chicken  19866894351814_2
ggtgcagcaactcaaaaacaacattacaatttagaacactaygtttccctgaaaatcctaaccaatcatcctttagttccttcatcttcgaagtaaatgagaaaaaaacaaagtaattaaaatgattttatcaagtaccttttacatgtgagcttgcttaaaaagagaggcattttaaccaattttgccagttggaggaattgagtgaagtaagtcttgctgtcagtcacatactgagacagttaaggctaacaagcaatcttttctctgaaaactggcgtgcaagcattaaccactagrcagcatctctggctttgctgtccattatcactggtcaacgagagactgctacttactatgttgctgaagatcctctacagtaccgagaagaaatgccagttgcaggcattttgtttgaagcacaagttgtgtgtccaaccctgcattgttcaaaataatcaggaaacgtgcagtcggtgtttggagcatgagaaagtactccaagtgtttaaaacatgaaagttgttgttgaagaggtcttgataaaactaatttatttggctcatctagcatgggggtgttctcttatttttatattaa

SEQ ID NO: 72184 - DNA, 600 bp, Chicken  19866894351816_1
cccactgggagatgccatcctagtgcaaggatcttgtgggatgcaggggcctctgggctgcttccagaaggaggaggttgagctggggaaaagagggggtagagcgaaggttgttccatccaagcgatctcccttggtgcaaccaaggtaaatgttctgtacacatattggtacccagtaacaggcaagttgtgaagtaacatgagtctggtcccactcaggagctgtgaagatggagtgccaccctggtgaggcttctcccaggaagccccccatggaaccattgtcctcctgagctcytgcatcactgctatttttgtgcctttccattgttttgtcctccctgagagagctcctttggtggccagagatcatgtccttcctgttctgctagcaatgccagtcaggagttttgacaagtgtacttcagcacacgcccagttgtaataagacccttgctccttattttctaaggagttagaaagccagcaagaagaaagatgcaacacagcagaacatcagcaacaaagtaaaaaccatgacaaaatatagagagaagggcacagatcaatacaggagccacagaaagcagcttcaaaa

SEQ ID NO: 72185 - DNA, 600 bp, Chicken  19866894351821_1
tgggaggattgctgtgattgctgtataggaggtggggggaaagagaagttgctgaagggttccaagttcttccctgtcaagtatgtcccgcgcagctccttgctagtgggagtctgaatataggacatcctccttttgttctctagagctccccacgctcgtttatttgcgctgaatagcacctactggcaagagcaataggaactcaggagccctgtctatttctaacgtagctctgtaagaaagggacttgcttattttctgtaaaaggaccagtgctgtaactgtgtggagagttcrctcatttgctgtttgtctgtggggtgagatagctgcgtgtggcacaacccatttgtcctctcacggctcctgacttgaagcattatttttttttttatctaccgtgtaagtcttgattttgttcagtggggtcggaactgggtgtgcgtttctcttatgcaccggcatctgtggggtcacagagggagcctggctctggttttgacctcatggaaaaccaccagagtcctgacagtgcgatgggttgggatttttcacttgcaaaagtctgaggtaaggcatcgggggatgcttgcgtgc

SEQ ID NO: 72186 - DNA, 600 bp, Chicken  19866894351821_2
cccgcgcagctccttgctagtgggagtctgaatataggacatcctccttttgttctctagagctccccacgctcgtttatttgcgctgaatagcacctactggcaagagcaataggaactcaggagccctgtctatttctaacgtagctctgtaagaaagggacttgcttattttctgtaaaaggaccagtgctgtaactgtgtggagagttcrctcatttgctgtttgtctgtggggtgagatagctgcgtgtggcacaacccatttgtcctctcacggctcctgacttgaagcattarttttttttttatctaccgtgtaagtcttgattttgttcagtggggtcggaactgggtgtgcgtttctcttatgcaccggcatctgtggggtcacagagggagcctggctctggttttgacctcatggaaaaccaccagagtcctgacagtgcgatgggttgggatttttcacttgcaaaagtctgaggtaaggcatcgggggatgcttgcgtgcgtgtttgccagcggatctcagatgtgagctgtctttcgttgttaacttttgggagaactgcggcttcatctggttgagagttctaa

SEQ ID NO: 72187 - DNA, 600 bp, Chicken  19866894351822_1
gcaaaacagaggtggggaaacctaaaactctgctcttagtgggcacggatgggaaaagggcagagacgggagcagggttttgaggttgctgtcaccccaaacattgggccggcagctccgtgtgctgctgcaggctgctgacgctgtttgctgttccttctcagctgagagacatgctggctgcccgtgcgtcaccgcctcgatggatgacatctattttgagcacaccattaggtaaaggtgccgctttctgccctctctcttggctgggtgtggggctgaggcagagctgtgctgtgytggagctctcctacccatatgctttccagcgccstgctgtcagcccaactggctgccaggtcctgggcacatctgcccctggtgmggtgctggtcagggtgcagggaccctgtggccatccccttttctattgctattgctagtaagacacatttgcttatttggtcagtggcagtggcgcctcagcamggagctgctcagcactggaccacgtgctctgcacacctgtgggacctcaccctcctctcacccctcgtcccttctcctctctgtgttttccagcgtcgggcaagtcgttaa

SEQ ID NO: 72188 - DNA, 600 bp, Chicken  19866894351822_2
cttagtgggcacggatgggaaaagggcagagacgggagcagggttttgaggttgctgtcaccccaaacattgggccggcagctccgtgtgctgctgcaggctgctgacgctgtttgctgttccttctcagctgagagacatgctggctgcccgtgcgtcaccgcctcgatggatgacatctattttgagcacaccattaggtaaaggtgccgctttctgccctctctcttggctgggtgtggggctgaggcagagctgtgctgtgytggagctctcctacccatatgctttccagcgccstgctgtcagcccaactggctgccaggtcctgggcacatctgcccctggtgmggtgctggtcagggtgcagggaccctgtggccatccccttttctattgctattgctagtaagacacatttgcttatttggtcagtggcagtggcgcctcagcamggagctgctcagcactggaccacgtgctctgcacacctgtgggacctcaccctcctctcacccctcgtcccttctcctctctgtgttttccagcgtcgggcaagtcgttaacatcaaagccaaagtgaaccgagccttcaactcc

SEQ ID NO: 72189 - DNA, 600 bp, Chicken  19866894351822_3
ttgctgtcaccccaaacattgggccggcagctccgtgtgctgctgcaggctgctgacgctgtttgctgttccttctcagctgagagacatgctggctgcccgtgcgtcaccgcctcgatggatgacatctattttgagcacaccattaggtaaaggtgccgctttctgccctctctcttggctgggtgtggggctgaggcagagctgtgctgtgytggagctctcctacccatatgctttccagcgccstgctgtcagcccaactggctgccaggtcctgggcacatctgcccctggtgmggtgctggtcagggtgcagggaccctgtggccatccccttttctattgctattgctagtaagacacatttgcttatttggtcagtggcagtggcgcctcagcamggagctgctcagcactggaccacgtgctctgcacacctgtgggacctcaccctcctctcacccctcgtcccttctcctctctgtgttttccagcgtcgggcaagtcgttaacatcaaagccaaagtgaaccgagccttcaactccagcatggaggtctgtgtgctgcagccatgctttgccccctgtgcccaccct

SEQ ID NO: 72190 - DNA, 600 bp, Chicken  19866894351822_4
cgtcaccgcctcgatggatgacatctattttgagcacaccattaggtaaaggtgccgctttctgccctctctcttggctgggtgtggggctgaggcagagctgtgctgtgytggagctctcctacccatatgctttccagcgccstgctgtcagcccaactggctgccaggtcctgggcacatctgcccctggtgmggtgctggtcagggtgcagggaccctgtggccatccccttttctattgctattgctagtaagacacatttgcttatttggtcagtggcagtggcgcctcagcamggagctgctcagcactggaccacgtgctctgcacacctgtgggacctcaccctcctctcacccctcgtcccttctcctctctgtgttttccagcgtcgggcaagtcgttaacatcaaagccaaagtgaaccgagccttcaactccagcatggaggtctgtgtgctgcagccatgctttgccccctgtgcccacccttggcatgctgctgtccctgccagctgcaccctctctgccatggtcacctgtggaacacctacgtgctgctctgctctgtggctctggggctgtgctgtctgttc

SEQ ID NO: 72191 - DNA, 600 bp, Chicken  19866894351833_1
aaggcctgtgtgcattatgccctggtggaattcagagttgtcaggggtctctcgaaactcagaagtcagcacaaaggacgtgctacgcaattagaaatgcaggcttttagccttttctcctgagttggtcctgagagtgagcagtcagaagtggctgcagctccaggtgcggctgaagtcataatgcttcactgccctgaaagggtgtgctcttgcttcttcctcccagcacgtcttttccttcccctgagagtctgacaatgcttttgggagtgtgcagttgagaattaggagggagayggggacctccctgtttgtcaacagtgagcacttgcaggatcatgccctgggtgattagtgtacgttcgctcaaagaagttatgctttgctcgttttataacactgcctcgtgcagaacagaatattgcctaaaactcatcttgaaytgcagaacgttattcaataggaaagctattatacaagtactttgaaacgctgtcatcttctgaaagtcagagattctggtggattttcatagttgttggcctagttgttatcagctgggagagcgtttgtgtgattacctacatccaggagact

SEQ ID NO: 72192 - DNA, 600 bp, Chicken  19866894351833_2
agaagtggctgcagctccaggtgcggctgaagtcataatgcttcactgccctgaaagggtgtgctcttgcttcttcctcccagcacgtcttttccttcccctgagagtctgacaatgcttttgggagtgtgcagttgagaattaggagggagayggggacctccctgtttgtcaacagtgagcacttgcaggatcatgccctgggtgattagtgtacgttcgctcaaagaagttatgctttgctcgttttataacactgcctcgtgcagaacagaatattgcctaaaactcatcttgaaytgcagaacgttattcaataggaaagctattatacaagtactttgaaacgctgtcatcttctgaaagtcagagattctggtggattttcatagttgttggcctagttgttatcagctgggagagcgtttgtgtgattacctacatccaggagactcagttaggatacttctgtgtttttaccagcagttgactacaataactgaccaaagtttgcttttactgaacttttaaaagtggcattatggactggtaaagacacttgaagaaattttgactgaagtgcagccttcctgccaagtc

SEQ ID NO: 72193 - DNA, 600 bp, Chicken  19866894351839_1
ctcacttgggctctggagctggaacaccgtcttcccttcttcttaatgtcatccccagggatgagtgaaagactcctgcaggaagtctttggggaaggatgtggagctgccacgcggtgatcctcctgatggaccccctctgaccgaccctacgccggagaggaaagtcacacagcagttctggctgcgtgggatttgttgctcgatggcatcgggtcattctgatggggtttggggttcctccgtggttctctgctggagaagcacggggaaacgctgctcttggggttgggcctgggraccgcggaggtcttctgcaacctcagtgactctgtgattaagtgggcatggtggggatgggctgacagttggacctgggggtctttgaggtcttttccaacctgaatgggtctacagttctgtgatgcacaacccaagtgagggtgcagggcatggccagggacacgcacaggagcagccagcggctgcatgacccaacgcaaggcacaaccacagagcatcccaacctgcatctcttctggctccagttctgtcccagttcagcatctcaaggacaaatgaagcacatgggattgagct

SEQ ID NO: 72194 - DNA, 600 bp, Chicken  19866894351842_1
aaaaaacacaatacaaagaacgattttttcccctgggggtgcagaagttaatactgtttattgaaaaaaaaatagaaataaaaataattagaacaggttacacatgataagtgacagtggtgtgtgggcccatagtaactctttccttgtgcattcactatgtacgtatataaatatatacagtagggactgaaatctagttctaaatgtttccatatgttcttttaacaaaactctcagtccctatgcaaagcaatattaaatacatcaaatatgataggaactctaattcatttaacrgagtgtgaacttctaatacaaacaaaatacatagcagmctgaatatagagctcagaatcatcctccttaatttagtaagacctctaaatatttttatttataaaaaaataatcctttacagtgggtgttaatgttgattttcaaataaaggaatgtgtacaagctatcatttgattaatgtgcatggatgaaatccaaaaatatgttctctttgtgttactggtccaaatatttacaattataagtaaaaaatatgtattttcacaaagcccsttgacaatgttgcctcaaaggatagat

SEQ ID NO: 72195 - DNA, 600 bp, Chicken  19866894351842_2
gtgcagaagttaatactgtttattgaaaaaaaaatagaaataaaaataattagaacaggttacacatgataagtgacagtggtgtgtgggcccatagtaactctttccttgtgcattcactatgtacgtatataaatatatacagtagggactgaaatctagttctaaatgtttccatatgttcttttaacaaaactctcagtccctatgcaaagcaatattaaatacatcaaatatgataggaactctaattcatttaacrgagtgtgaacttctaatacaaacaaaatacatagcagmctgaatatagagctcagaatcatcctccttaatttagtaagacctctaaatatttttatttataaaaaaataatcctttacagtgggtgttaatgttgattttcaaataaaggaatgtgtacaagctatcatttgattaatgtgcatggatgaaatccaaaaatatgttctctttgtgttactggtccaaatatttacaattataagtaaaaaatatgtattttcacaaagcccsttgacaatgttgcctcaaaggatagatcttcccacgtagtaatttccagtaatatatatcaaaag

SEQ ID NO: 72196 - DNA, 600 bp, Chicken  19866894351842_3
atgataggaactctaattcatttaacrgagtgtgaacttctaatacaaacaaaatacatagcagmctgaatatagagctcagaatcatcctccttaatttagtaagacctctaaatatttttatttataaaaaaataatcctttacagtgggtgttaatgttgattttcaaataaaggaatgtgtacaagctatcatttgattaatgtgcatggatgaaatccaaaaatatgttctctttgtgttactggtccaaatatttacaattataagtaaaaaatatgtattttcacaaagcccsttgacaatgttgcctcaaaggatagatcttcccacgtagtaatttccagtaatatatatcaaaagcaacataaaagtgagagaaatggcagtaacatagaacagcattcaactcatccttcattttctgtctgcagtacttgcagaaaattcaattataaagaactactacaaagagaaacttgatgttcattcctggaaatgtatccttgaatttgaccttctctatgaacttctttgcataaacaaaatgtacacaaaacatgctgcataaactagaggatttacagctgagaaatca

SEQ ID NO: 72197 - DNA, 600 bp, Chicken  19866894351845_1
atgaacttctatgcaagattgatgctaaggagcactatggtcacccaggtgttggtttctcctgcccgtttgaagacgttgtgggtgggagaggtgcatctgaagcccacagctcttgaaaagtgcaacaggaaacctgagtttgcaaatgctgccgttccagcggcggtgcagcgcggagcttcctttgtggcattgcttaatgcagcgtctgcagcagaaagcacagcgttggggtgcagagggctgtgtgggtagcagcaggccaagtgcaaaacgctgctccagcagcctggtaaktgccagcaggttattttggagctcacgtagtgaatgctgtcctgatcacctccccgtcttgctcttgttgttgctcgaacgctgcgtggcaaacagtgtgagtgcatcacagcctgtgggcagtcctgcaggagatggaaatcaatgcttgcagccccgtgatactgttctgcttggatctgactgtgtgagagccttttaatattcaaattctctttaaaagagagagctgtgcagacgctgtcctttgcatgggaccaatgaggctgttggaccaggtagcagacgagggtaaagtca

SEQ ID NO: 72198 - DNA, 576 bp, Chicken  19866894351847_1
cttccaaagaataacagtataaatttgaagtatcatcacagtcttttcagaactgatgggaaatggtgctgcatctaataaattatttaacattcttggattgcaagaataacaaatatcttaattagtggaattaatcaattacgccttcatatattggttgcctgtagtcctctgtaagatactaaaaaaaagtttctactgttattctagccttaaaaacatggttatcatgctctcctccttttgagcgtttagaacaaagttctgataatttaattacatgcctcattcaaatgygggatcatgtgaacctgtaatggctcaaataatgtttactaataattcatccagtggtgttttttttttcttgcctttttttttttttttatgggacaggcgaaggtagaactttatctgcaatttcacttttgtacattataattatgaaagaataacaatataactgtagagtctgccatttaattcaatgtttttgggtgcatttaagctattgaattaatctcacatttaaacaatagaatataatactttaatagcttgcctctgcaccgg

SEQ ID NO: 72199 - DNA, 600 bp, Chicken  19866894351849_1
aagatagaaattggatcacagctcttgcagctgtcctgtgtatccctaaagcctccaggagaatcgtggctgtcaagaatccttgctgctttttgcagagtgaaaacatgactgtctgcaggagctgcacttcatgtttatgtgcctgcatcagtgaagtggaatggttttcttcagagctgggaatactggaccttccttaaatgtgaactttggtatgttctgatgtgttaggtctaagggttttggtttttttccccagcagcagcatgagtcctctcaaacctggaataagcaaargtaggagtcagaaaaccagctgaggtctcctgtccctgaactttaattcagaaaactcctgctattccctttgaattgcctatcagtgtaagcactgtcatgtatgcacaatgtaagcacaatcattgtaagcactgaagagatgctcttttatcaggcagctgaagagaagaggtaccacataggtacagctttctgttacctaaggctccagtctttaaaaccccctacctgggagaaagacccactccttcaccttggttcctgcagaaacattggtcctatgctgccttgggtgac

SEQ ID NO: 72200 - DNA, 600 bp, Chicken  19866894351849_2
ggagtcagaaaaccagctgaggtctcctgtccctgaactttaattcagaaaactcctgctattccctttgaattgcctatcagtgtaagcactgtcatgtatgcacaatgtaagcacaatcattgtaagcactgaagagatgctcttttatcaggcagctgaagagaagaggtaccacataggtacagctttctgttacctaaggctccagtctttaaaaccccctacctgggagaaagacccactccttcaccttggttcctgcagaaacattggtcctatgctgccttgggtgactgwcaggtgaggtgccagctgagtagtgggtatttctcagtgatttctgctgatctggtctgtttgttttgtcttgcttcaaatgggctgttaaagcagctgggagaaatggttgaaatgaaatttagaataatgaaattccctagtaagcaaagaccttacggtagcttacgctmctactaaatctgacgataggtgtgctttgttggtcttttggtgattcttaaggcttatgatgggtagagaagttcctggagttgactgaagtgagttgtcctgttagcctttgactttcctctctgt

SEQ ID NO: 72201 - DNA, 600 bp, Chicken  19866894351849_3
accacataggtacagctttctgttacctaaggctccagtctttaaaaccccctacctgggagaaagacccactccttcaccttggttcctgcagaaacattggtcctatgctgccttgggtgactgwcaggtgaggtgccagctgagtagtgggtatttctcagtgatttctgctgatctggtctgtttgttttgtcttgcttcaaatgggctgttaaagcagctgggagaaatggttgaaatgaaatttagaataatgaaattccctagtaagcaaagaccttacggtagcttacgctmctactaaatctgacgataggtgtgctttgttggtcttttggtgattcttaaggcttatgatgggtagagaagttcctggagttgactgaagtgagttgtcctgttagcctttgactttcctctctgtcattgttatcaaggttataattatctcattcctttgttcctaaataaggattaggaccacatttcatttgttacagtatttgtgacatctttaaaaatggtccaactggatgctgagattgggattttggacacgtttttccagccagggagcgtgtttcatgttttgcctgt

SEQ ID NO: 72202 - DNA, 573 bp, Chicken  19866894351853_1
ccagcagatctgtattggaaatgtgtaacattttgaaatatgtgtaacatttgtattttaccagtattccaaatatttgatgttaaaacatttgaagtatgtcatctggttttatgctgctgcattctcataaagcaaataatagttattttagcggtcacgttgttgactcggtccgtgagactataaaaacagactaggaaatacacttttacagactgtaggctttgagctgagatcaaatactgtcatttagtaccttcaagtacgggattgctgacatgggcttttacttcataygttacggtatgtgatctggaggcacccagtctgcctattttactgccatcaggttacagcttttcacagatgacctagtaccagtggaaagccttgacctctcacttttccagcacttcagaggttaattttgttgagggatcagatttctttctagaaggaagtttctgatgatcaccttctagctaggctttacttgccagtgtctttcagatctgctggatgctgagtgctgttgaaaaacagccttcctccaaatttgcagagcctctg

SEQ ID NO: 72203 - DNA, 600 bp, Chicken  19866894351857_1
tggctttgcaaaggactgccaagcacctgattctgtgcagaattaaagcagacacctcagcgtggactccgactctgcgcgcttaccggctgcgtgcaccggccaccggcccagcccccagtcgggatgaggcgctcatcacgactgcaaaacacagcaccgtaacagccaccgcaaagagaaggaactccacccagtcacagccagcacaagcagcctgcgcgcacgcgctgcccgcccttccgttgctcagccagctgccgtcggggaccgggtcccggctcgccgtgcctgaggcgyctcggagtcctgggaacagccctgggccgctccctgccgggggaagcggctgctctttcggcagcgggcccagcctgccttgggcgctgtcctcgagcgagtgaggaagccctggaggccgtggctcggtgtcaagggggaagcctgggtcacggcggcagctgctccacgcacgggctacagaggacagcgctggcagcccactgcgttgccccaaagagggcagctctctgggaggtcggcgatgacattccagagcgacatcccaggcgatggaggacatcactgcccgctgattgt

SEQ ID NO: 72204 - DNA, 600 bp, Chicken  19866894351857_2
tggtgcttctccccagcctccttctccgtgaggagttcaaagacattggttaccccatgatttttgagggagtgctgctcctggccgatgtctcaggtgggctgggcgtggcggagcccccacagacatgagcccatgggacgctccaggccctcggcagctctgctgcgagacagggtggccatcttgtcactgtgcaggcctcctgccgtgctgcccaaagagcgggcagcttctcctgggccgtcagccatggctgtgacgagcgctgagctggggccggggaaggggtgagctacmggtgcacgcagaggygtcctgatttgcggctgtctttctggcaggtttcactgccttggcagagaagtgcatccagcagagcggcccagagagaggagctgaggagatggtgcaaaccctcaacgcctacatgggtgacattctggaacgtaagagccgtgctgctgggctgtcgggcatcgagccctggggctcgctcactgtggacagagccgtgctgggccgcccgctcctgcctgcctggaaggggcgaggagccgtgcagccgggctgtctttggtggggccgggtcaagaggtg

SEQ ID NO: 72205 - DNA, 600 bp, Chicken  19866894351857_3
gcctccttctccgtgaggagttcaaagacattggttaccccatgatttttgagggagtgctgctcctggccgatgtctcaggtgggctgggcgtggcggagcccccacagacatgagcccatgggacgctccaggccctcggcagctctgctgcgagacagggtggccatcttgtcactgtgcaggcctcctgccgtgctgcccaaagagcgggcagcttctcctgggccgtcagccatggctgtgacgagcgctgagctggggccggggaaggggtgagctacmggtgcacgcagaggygtcctgatttgcggctgtctttctggcaggtttcactgccttggcagagaagtgcatccagcagagcggcccagagagaggagctgaggagatggtgcaaaccctcaacgcctacatgggtgacattctggaacgtaagagccgtgctgctgggctgtcgggcatcgagccctggggctcgctcactgtggacagagccgtgctgggccgcccgctcctgcctgcctggaaggggcgaggagccgtgcagccgggctgtctttggtggggccgggtcaagaggtggtgggcacaagctga

SEQ ID NO: 72206 - DNA, 600 bp, Chicken  19866894351860_1
aaccccctacctgtgataaatatcatgctgaactgctcagccttaagttgtagatcacaaggcagttcgctgattaattctttgcaaaacctgtgataagagcacaacagatacaagaaacgaacaacttgattttcacattcagtacgaatatagatcccctcttctctcctgcttccatccaaacagttttcactaagcttcaggagaaaggaagcactgcttcttagagaaaattgatgcctatcaaccccaaagaatgcagcagagaccacgccttctgtataaagttcacagacwgacagaagtagagaatgactctaccagactgtcatcaaaatgaagatactgaggatattggataaggtttccttacaagagaaaaaatttcccctacctttacacctttctagattaggcagaaaaaaaaaacccaacagccagctctgtcatttctctcatgctcttcactgaattttattttgcttctgcaaatagaggctctgcagtgcatcatcatcagcttttctgacttgcttacattgtctcacacatcccatggcgttcaccgctaagtggtagaacaagcatctatttaaa

SEQ ID NO: 72207 - DNA, 600 bp, Chicken  19866894351870_1
gttctcgggcagtgggcaaatggttactgggcacttggcttcttcagccagtgcgctgacagccgccacaaagtcctcattgtccttcacgctgggaaataaaaccagggaggcacaaggatgcagtggagcccggagggatgcagccaccaaccccctctggcacccacctgcacacaaagacctccaatggtgccaacgtgttgggtgtcatgatccatggagccatgcggaacaccaccgtgtccgtgaaaattggtgtctccagcaagccctgcaaggggggagtgggattgagayattgctcaccccatctgtcrgtaaaacctatgtgatttagggcatcaccttctcagggctctccagcagtgtgacatggaatgcaaccagccctgaaaagctgacgtcagggaaggcaagcccctccacgtagaagatgctttcctcctggtgctggctgggcttcacagcataggcgagcttctcaccacccagcacgtgcttgtactcctccagtgcaatgctgtctgtggacacaagcagcaccatgcagcacccaccttgcactgtagcattccacctccatttctcagctccttg

SEQ ID NO: 72208 - DNA, 600 bp, Chicken  19866894351870_2
tggttactgggcacttggcttcttcagccagtgcgctgacagccgccacaaagtcctcattgtccttcacgctgggaaataaaaccagggaggcacaaggatgcagtggagcccggagggatgcagccaccaaccccctctggcacccacctgcacacaaagacctccaatggtgccaacgtgttgggtgtcatgatccatggagccatgcggaacaccaccgtgtccgtgaaaattggtgtctccagcaagccctgcaaggggggagtgggattgagayattgctcaccccatctgtcrgtaaaacctatgtgatttagggcatcaccttctcagggctctccagcagtgtgacatggaatgcaaccagccctgaaaagctgacgtcagggaaggcaagcccctccacgtagaagatgctttcctcctggtgctggctgggcttcacagcataggcgagcttctcaccacccagcacgtgcttgtactcctccagtgcaatgctgtctgtggacacaagcagcaccatgcagcacccaccttgcactgtagcattccacctccatttctcagctccttgcaaaaggagcagcttggtat

SEQ ID NO: 72209 - DNA, 599 bp, Chicken  19866894351876_1
  misc_feature (1)..(225): n is any nucleotide
nnnnnnnnnnnnnnnnnnnnnnnnnnnnnnnnnnnnnnnnnnnnnnnnnnnnnnnnnnnnnnnnnnnnnnnnnnnnnnnnnnnnnnnnnnnnnnnnnnnnnnnnnnnnnnnnnnnnnnnnnnnnnnnnnnnnnnnnnnnnnnnnnnnnnnnnnnnnnnnnnnnnnnnnnnnnnnnnnnnnnnnnnnnnnnnnnnnnnnnnnnnnnnnnnnnnnnnnnnnnnnnnnctttcactatccacatacattcctgtctgctcttaccctcctgctttccaaaccatcagacaaatgcaaagaggrgtcacctttgmgttgttacaagcagcaggtaggtcttgtgattaagaaatggaykggggmaggttagaagtgctagcacaaagtaatgcgtacagaaagagagcgacaaaggttacatgtccagctggtgcaatctgacagcaggctggggattagaaaaagctgtcagagacagagaatgaggagaaagagagagggaaagagaaaaagaagaaagaaacagagtttgggctgctgaggtagagatctgatgctggaaacacacagagcggaaaaaggcaatgacccaagaaagtatg

SEQ ID NO: 72210 - DNA, 600 bp, Chicken  19866894351876_10
cgtggaacctaccacctggaagctttaccctcagaaggggtaaaggagagggttggactgcctgcttccagatcrgtkagagtgcaggatgcctgcaaagcagggatacccagctcccctcctgtcacctctgggatctaaggctaaggagcagccagcatcttggcagctgcagggcgctggccctttaaacagagcagatttgtttccgtgcacatctagcagagcttgtgaaaatcaagtcgctgctcctactgagggagagagcaaataaggaaatctagcagttcgggaagctcrgcctgaagcttctgttacagagctygttggaaccgtgtaacaggtatgaagcaggctcaggatggcattacagggtgttgtcttacatctgacagctcctggcctgcagcacctgtcatgcatttccctacctttgaagtagctaaaaacttcccrgtgtgttccggatgcccttattttaaagggatccagtcacatttctgtattttctggattgcatctctatcaaaagtraaacaaaaatgcatctggaattgtttcaggcctggaaacgcccccagtctggattggcaagaactt

SEQ ID NO: 72211 - DNA, 600 bp, Chicken  19866894351876_11
taccctcagaaggggtaaaggagagggttggactgcctgcttccagatcrgtkagagtgcaggatgcctgcaaagcagggatacccagctcccctcctgtcacctctgggatctaaggctaaggagcagccagcatcttggcagctgcagggcgctggccctttaaacagagcagatttgtttccgtgcacatctagcagagcttgtgaaaatcaagtcgctgctcctactgagggagagagcaaataaggaaatctagcagttcgggaagctcrgcctgaagcttctgttacagagctygttggaaccgtgtaacaggtatgaagcaggctcaggatggcattacagggtgttgtcttacatctgacagctcctggcctgcagcacctgtcatgcatttccctacctttgaagtagctaaaaacttcccrgtgtgttccggatgcccttattttaaagggatccagtcacatttctgtattttctggattgcatctctatcaaaagtraaacaaaaatgcatctggaattgtttcaggcctggaaacgcccccagtctggattggcaagaactttggaatctaatcttttctgcatttt

SEQ ID NO: 72212 - DNA, 600 bp, Chicken  19866894351876_12
agcatcttggcagctgcagggcgctggccctttaaacagagcagatttgtttccgtgcacatctagcagagcttgtgaaaatcaagtcgctgctcctactgagggagagagcaaataaggaaatctagcagttcgggaagctcrgcctgaagcttctgttacagagctygttggaaccgtgtaacaggtatgaagcaggctcaggatggcattacagggtgttgtcttacatctgacagctcctggcctgcagcacctgtcatgcatttccctacctttgaagtagctaaaaacttcccrgtgtgttccggatgcccttattttaaagggatccagtcacatttctgtattttctggattgcatctctatcaaaagtraaacaaaaatgcatctggaattgtttcaggcctggaaacgcccccagtctggattggcaagaactttggaatctaatcttttctgcattttatttatttactgaattgtccacacgacgtttttaatgctgatttctgggtcgagttggggaattatctttggtctttctacttatttagaaagggcacaatgaaatactgaatacagccgtacttctgaaa

SEQ ID NO: 72213 - DNA, 600 bp, Chicken  19866894351876_13
aaatcaagtcgctgctcctactgagggagagagcaaataaggaaatctagcagttcgggaagctcrgcctgaagcttctgttacagagctygttggaaccgtgtaacaggtatgaagcaggctcaggatggcattacagggtgttgtcttacatctgacagctcctggcctgcagcacctgtcatgcatttccctacctttgaagtagctaaaaacttcccrgtgtgttccggatgcccttattttaaagggatccagtcacatttctgtattttctggattgcatctctatcaaaagtraaacaaaaatgcatctggaattgtttcaggcctggaaacgcccccagtctggattggcaagaactttggaatctaatcttttctgcattttatttatttactgaattgtccacacgacgtttttaatgctgatttctgggtcgagttggggaattatctttggtctttctacttatttagaaagggcacaatgaaatactgaatacagccgtacttctgaaatgtatcttggatagccttatctgaataacttcattttaratgtgaatggacttttgtaaggggaactttcccagataa

SEQ ID NO: 72214 - DNA, 600 bp, Chicken  19866894351876_14
catttctgtattttctggattgcatctctatcaaaagtraaacaaaaatgcatctggaattgtttcaggcctggaaacgcccccagtctggattggcaagaactttggaatctaatcttttctgcattttatttatttactgaattgtccacacgacgtttttaatgctgatttctgggtcgagttggggaattatctttggtctttctacttatttagaaagggcacaatgaaatactgaatacagccgtacttctgaaatgtatcttggatagccttatctgaataacttcattttaratgtgaatggacttttgtaaggggaactttcccagataaacttgagggatattttataactcactggctatctggaagggaaaatctgaacttctgtttccttgggaagaactacatgcaactccaaagctcacatctaaaacccagtagccaagcaaacaaaccaaacaaccagcaagcacctaagatacggaaaagccttttatttgtgaaggaatctaataggagaaatagttaatcctagcacagagttctgttttgtttctctcttttttttttaaacatttggtggttgcttcc

SEQ ID NO: 72215 - DNA, 599 bp, Chicken  19866894351876_2
  misc_feature (1)..(214): n is any nucleotide
nnnnnnnnnnnnnnnnnnnnnnnnnnnnnnnnnnnnnnnnnnnnnnnnnnnnnnnnnnnnnnnnnnnnnnnnnnnnnnnnnnnnnnnnnnnnnnnnnnnnnnnnnnnnnnnnnnnnnnnnnnnnnnnnnnnnnnnnnnnnnnnnnnnnnnnnnnnnnnnnnnnnnnnnnnnnnnnnnnnnnnnnnnnnnnnnnnnnnnnnnnnnnnnnnnnnnnctttcactatccacatacattcctgtctgctcttaccctcctgctttccaaaccatcagacaaatgcaaagaggrgtcacctttgmgttgttacaagcagcaggtaggtcttgtgattaagaaatggaykggggmaggttagaagtgctagcacaaagtaatgcgtacagaaagagagcgacaaaggttacatgtccagctggtgcaatctgacagcaggctggggattagaaaaagctgtcagagacagagaatgaggagaaagagagagggaaagagaaaaagaagaaagaaacagagtttgggctgctgaggtagagatctgatgctggaaacacacagagcggaaaaaggcaatgacccaagaaagtatgcacctgatgat

SEQ ID NO: 72216 - DNA, 599 bp, Chicken  19866894351876_3
  misc_feature (1)..(171): n is any nucleotide
nnnnnnnnnnnnnnnnnnnnnnnnnnnnnnnnnnnnnnnnnnnnnnnnnnnnnnnnnnnnnnnnnnnnnnnnnnnnnnnnnnnnnnnnnnnnnnnnnnnnnnnnnnnnnnnnnnnnnnnnnnnnnnnnnnnnnnnnnnnnnnnnnnnnnnnnnnnnnnnnnnnnnnnnnnnctttcactatccacatacattcctgtctgctcttaccctcctgctttccaaaccatcagacaaatgcaaagaggrgtcacctttgmgttgttacaagcagcaggtaggtcttgtgattaagaaatggaykggggmaggttagaagtgctagcacaaagtaatgcgtacagaaagagagcgacaaaggttacatgtccagctggtgcaatctgacagcaggctggggattagaaaaagctgtcagagacagagaatgaggagaaagagagagggaaagagaaaaagaagaaagaaacagagtttgggctgctgaggtagagatctgatgctggaaacacacagagcggaaaaaggcaatgacccaagaaagtatgcacctgatgatctgagtatgaaagcctgaaatctgtgaagaagaggaaaagttt

SEQ ID NO: 72217 - DNA, 599 bp, Chicken  19866894351876_4
  misc_feature (1)..(170): n is any nucleotide
nnnnnnnnnnnnnnnnnnnnnnnnnnnnnnnnnnnnnnnnnnnnnnnnnnnnnnnnnnnnnnnnnnnnnnnnnnnnnnnnnnnnnnnnnnnnnnnnnnnnnnnnnnnnnnnnnnnnnnnnnnnnnnnnnnnnnnnnnnnnnnnnnnnnnnnnnnnnnnnnnnnnnnnnnnctttcactatccacatacattcctgtctgctcttaccctcctgctttccaaaccatcagacaaatgcaaagaggrgtcacctttgmgttgttacaagcagcaggtaggtcttgtgattaagaaatggaykggggmaggttagaagtgctagcacaaagtaatgcgtacagaaagagagcgacaaaggttacatgtccagctggtgcaatctgacagcaggctggggattagaaaaagctgtcagagacagagaatgaggagaaagagagagggaaagagaaaaagaagaaagaaacagagtttgggctgctgaggtagagatctgatgctggaaacacacagagcggaaaaaggcaatgacccaagaaagtatgcacctgatgatctgagtatgaaagcctgaaatctgtgaagaagaggaaaagttta

SEQ ID NO: 72218 - DNA, 599 bp, Chicken  19866894351876_5
  misc_feature (1)..(165): n is any nucleotide
nnnnnnnnnnnnnnnnnnnnnnnnnnnnnnnnnnnnnnnnnnnnnnnnnnnnnnnnnnnnnnnnnnnnnnnnnnnnnnnnnnnnnnnnnnnnnnnnnnnnnnnnnnnnnnnnnnnnnnnnnnnnnnnnnnnnnnnnnnnnnnnnnnnnnnnnnnnnnnnnnnnnnctttcactatccacatacattcctgtctgctcttaccctcctgctttccaaaccatcagacaaatgcaaagaggrgtcacctttgmgttgttacaagcagcaggtaggtcttgtgattaagaaatggaykggggmaggttagaagtgctagcacaaagtaatgcgtacagaaagagagcgacaaaggttacatgtccagctggtgcaatctgacagcaggctggggattagaaaaagctgtcagagacagagaatgaggagaaagagagagggaaagagaaaaagaagaaagaaacagagtttgggctgctgaggtagagatctgatgctggaaacacacagagcggaaaaaggcaatgacccaagaaagtatgcacctgatgatctgagtatgaaagcctgaaatctgtgaagaagaggaaaagtttaagcaa

SEQ ID NO: 72219 - DNA, 600 bp, Chicken  19866894351876_6
caaagtaatgcgtacagaaagagagcgacaaaggttacatgtccagctggtgcaatctgacagcaggctggggattagaaaaagctgtcagagacagagaatgaggagaaagagagagggaaagagaaaaagaagaaagaaacagagtttgggctgctgaggtagagatctgatgctggaaacacacagagcggaaaaaggcaatgacccaagaaagtatgcacctgatgatctgagtatgaaagcctgaaatctgtgaagaagaggaaaagtttaagcaactttccctcccgttctcartgcactcctcaatttccaattggagatcaaaccgtgcaaagtgcattcacggtgctgaaytcagttccttctgctatgacatgatcttcatgagaaagcgtggaacctaccacctggaagctttaccctcagaaggggtaaaggagagggttggactgcctgcttccagatcrgtkagagtgcaggatgcctgcaaagcagggatacccagctcccctcctgtcacctctgggatctaaggctaaggagcagccagcatcttggcagctgcagggcgctggccctttaaacagagcagat

SEQ ID NO: 72220 - DNA, 600 bp, Chicken  19866894351876_7
cagcaggctggggattagaaaaagctgtcagagacagagaatgaggagaaagagagagggaaagagaaaaagaagaaagaaacagagtttgggctgctgaggtagagatctgatgctggaaacacacagagcggaaaaaggcaatgacccaagaaagtatgcacctgatgatctgagtatgaaagcctgaaatctgtgaagaagaggaaaagtttaagcaactttccctcccgttctcartgcactcctcaatttccaattggagatcaaaccgtgcaaagtgcattcacggtgctgaaytcagttccttctgctatgacatgatcttcatgagaaagcgtggaacctaccacctggaagctttaccctcagaaggggtaaaggagagggttggactgcctgcttccagatcrgtkagagtgcaggatgcctgcaaagcagggatacccagctcccctcctgtcacctctgggatctaaggctaaggagcagccagcatcttggcagctgcagggcgctggccctttaaacagagcagatttgtttccgtgcacatctagcagagcttgtgaaaatcaagtcgctgctcctactgaggga

SEQ ID NO: 72221 - DNA, 600 bp, Chicken  19866894351876_8
tgctggaaacacacagagcggaaaaaggcaatgacccaagaaagtatgcacctgatgatctgagtatgaaagcctgaaatctgtgaagaagaggaaaagtttaagcaactttccctcccgttctcartgcactcctcaatttccaattggagatcaaaccgtgcaaagtgcattcacggtgctgaaytcagttccttctgctatgacatgatcttcatgagaaagcgtggaacctaccacctggaagctttaccctcagaaggggtaaaggagagggttggactgcctgcttccagatcrgtkagagtgcaggatgcctgcaaagcagggatacccagctcccctcctgtcacctctgggatctaaggctaaggagcagccagcatcttggcagctgcagggcgctggccctttaaacagagcagatttgtttccgtgcacatctagcagagcttgtgaaaatcaagtcgctgctcctactgagggagagagcaaataaggaaatctagcagttcgggaagctcrgcctgaagcttctgttacagagctygttggaaccgtgtaacaggtatgaagcaggctcaggatggcattacaggg

SEQ ID NO: 72222 - DNA, 600 bp, Chicken  19866894351876_9
tggaaacacacagagcggaaaaaggcaatgacccaagaaagtatgcacctgatgatctgagtatgaaagcctgaaatctgtgaagaagaggaaaagtttaagcaactttccctcccgttctcartgcactcctcaatttccaattggagatcaaaccgtgcaaagtgcattcacggtgctgaaytcagttccttctgctatgacatgatcttcatgagaaagcgtggaacctaccacctggaagctttaccctcagaaggggtaaaggagagggttggactgcctgcttccagatcrgtkagagtgcaggatgcctgcaaagcagggatacccagctcccctcctgtcacctctgggatctaaggctaaggagcagccagcatcttggcagctgcagggcgctggccctttaaacagagcagatttgtttccgtgcacatctagcagagcttgtgaaaatcaagtcgctgctcctactgagggagagagcaaataaggaaatctagcagttcgggaagctcrgcctgaagcttctgttacagagctygttggaaccgtgtaacaggtatgaagcaggctcaggatggcattacagggtgt

SEQ ID NO: 72223 - DNA, 600 bp, Chicken  19866894351878_1
taatcaggaggcattactttcagagcaacctatggatattagtctattccagcggtagtggttcaaccagcctctctctaaacttgattcaagttgctttttagtagtttgtttagagcagtcattttttactaagttcaaaaaataaagatgtattggacaaagccaatacggttacaagaaaaaccttcaaaactaaatagggctattcatcttactaaatatttggaaggcatattgctatatggctagaaagatactgctggtttttgtaagtgtaaaaaatatctgaggtgtttmaacatgtgataccagtttactgtacaagaatttttcacaaattctaaactcagttatcctcacacactaattttaatgtcactccttagcagaatcttgtcattaaaaagactacacaaaatattccactaactacagcgcaattatttctatattaactataatcacaaacaagacaattattaatatgcccacaacaaaatgtaatgtatcatcctttttggaaaaagtcacaggattatttttctatttaataaacactaaacagaactgatcacaactttccagaggaagctaaat

SEQ ID NO: 72224 - DNA, 599 bp, Chicken  19866894351879_1
  misc_feature (1)..(12): n is any nucleotide
nnnnnnnnnnnnctccttgtcttccatgtgccttggcatagcttccggtgaatctttcccagcacagaggcgaggctgacaggtcgataattccctatgtcatcctttctaccttcttaacaatgagtgtgtcattgccttttttcctgtcaccagatagtccacctgactgccatgacttttcagacattattggcttggtgactgcatcagcagcttcccttagaactctggaatgcatgtcatcagagccaatagactcatggatgctcagattcctcaagtggttgtgaacctgayattctcttacagtgggaaagacgttgatccccaagcttctgacctatctgctcaacggctgtgtgaaaaacagttgacagtgaagactgaggcaaaaaatcagtcttcttgtccgttattaccagtctgcctgaattgctcactagtggagatatgcctccttgktcttctcttttctgattgatgtacgtgtagcgtgtagaaccctttcttgtttttctttgcagtctttgccaagtccagttccacctgagtcaaatttcctaagtttttgagtaaatccctgagcagctggaatt

SEQ ID NO: 72225 - DNA, 600 bp, Chicken  19866894351879_2
ctgactgccatgacttttcagacattattggcttggtgactgcatcagcagcttcccttagaactctggaatgcatgtcatcagagccaatagactcatggatgctcagattcctcaagtggttgtgaacctgayattctcttacagtgggaaagacgttgatccccaagcttctgacctatctgctcaacggctgtgtgaaaaacagttgacagtgaagactgaggcaaaaaatcagtcttcttgtccgttattaccagtctgcctgaattgctcactagtggagatatgcctccttgktcttctcttttctgattgatgtacgtgtagcgtgtagaaccctttcttgtttttctttgcagtctttgccaagtccagttccacctgagtcaaatttcctaagtttttgagtaaatccctgagcagctggaatttgactttcctaaaatttagcatcctgattttactccttatctattccatatgtctcaggagtgtgaattctaacattgcatgactatctgactcaatccctgtgacaaaccctgcagctgaaccagagaaccaacccgtgcctctctcagacatccctatattcaa

SEQ ID NO: 72226 - DNA, 600 bp, Chicken  19866894351879_3
aaatgtaaaaattagatcttataacagtgaggccttgggtatgaagaactagtcctgtgtatgattccaagttctttgatacattacagctttatacagaataatagcttgttacaaattgattaatttagtccagcaatttactgtctttttcttaaggcagttgcagagaaagacagcttgactgtctacagattggaaattcataggaaaaaaaaggaggctcaaaagaatgacaacaaaaattataaatgtatatgaaagtgaaattaagaaaatggaatttagactttaacacawgaaaaagtttctcatgatgctatcaattagactggaaacattaaaacaaaaaaaaaatagaagcattgaaacaaaaaaaaagaaataatttataaggtacagctcagcactggaaaaaagaagatattataaataatgtaatagttctttttatttttaccttcactagccctgtgattatgaatggacatcattttaagagaaaggagggaaaatgtgctttgttataatgacaatgatatttctatgtgtatgtatatatgtctgaattgctgctgtgaagttgcctttatctatctt

SEQ ID NO: 72227 - DNA, 600 bp, Chicken  19866894351881_1
caacagagtgaagataacacaaattctgaacatgacccccaaaataccaacttgccaatacatgcagcgtcccattacttctatccctccccagtcccacagaaagttattgtttattcattttaaatctgatgatttccaccactatgcctagtgtttagtgaatggagactggtattcaagaccattatgcccctgaaaacaaatatgcctttatgccactatggctgttactataaatttcacctttgacttacgagcagttctatataaaatttaaatatttcaaaggagccttastgagttagtggctgcctcttcctggcattccattgcacacctgctttctacatacagtggtcttaattacttcacatgaatgttatgaaacaatttagccatcagaagactctccatgaaaacttctctaagtgcaaaaaaatattacaattaattacaaaaaatattactgggaaaagagaagaaggaattccaagaattcagtttactgcagtagaagtcaagtcactagaaactagttatttgacacatctcacagcttaaaaagccagtgaattttagtagaaacaattccttcag

SEQ ID NO: 72228 - DNA, 600 bp, Chicken  19866894351881_2
ctgctagcaaatccctgaatctatactattattaggcactgtttatagcagagcatccttggcaaaatgagaaaccaacagtgaacgttttgagacagtagatttttttagttaaaattctgagattgttttcttttcctacataagagaacagtgttccaagatcagcttcattaggaagttctgctgggacttgatatttttattttctgacaaaggaaaacttatttctctgagaagagctcaatcttttcacagataaaatgagtaaatatacaatcagtccctctagttttaatktgcattttatgattacaactagattagaattttatacattgcaccatcatttagaaacagtatttcttgtaatttctaaataaaaacaaaaccactcatagctttttctgttactactggtaataacatatgttaacatgaacagaaaaatacagccccttaacacttgtgtaactgccaaatacagaccctcactacagtacttcaaacaaaatgattcgtcaaaactgtatgaggccttagagcaaatcatagttgaggtgggaagactgcaaaagtggcataaagccttatttccct

SEQ ID NO: 72229 - DNA, 599 bp, Chicken  19866894351882_1
  misc_feature (1)..(113): n is any nucleotide
nnnnnnnnnnnnnnnnnnnnnnnnnnnnnnnnnnnnnnnnnnnnnnnnnnnnnnnnnnnnnnnnnnnnnnnnnnnnnnnnnnnnnnnnnnnnnnnnnnnnnnnnnnnnnnnnnattgttgctttttaggcttcggtgtggatgaaatttaaataggtggattttaaaaagccattttcaaaactaattagttgtgctagatggattcttcccaaggcctttttaaatgttgtttagttccaatggagatgtgaaattgaatttttgtaataatgagtaatagagaagcagcttctatagytcaaaatgaatgttgccatggaaactgcatagaaatacatagaccaattgaatcgtcaattaaaataaatccccaagtaatttcatttgtttaaaagctgtttgaaagcagaaaatattmagcactattaagtgctggccacttgatgctctttccattaaatgttggatcacaacagttacatacatcagtagtacctgtaaattcagtttggtaaaacatgctgcaatcaataagggattatgctgagcagtaaatactttgagctttgccrtgtaattgtgcttctttcaatgtat

SEQ ID NO: 72230 - DNA, 600 bp, Chicken  19866894351882_2
ctttttaggcttcggtgtggatgaaatttaaataggtggattttaaaaagccattttcaaaactaattagttgtgctagatggattcttcccaaggcctttttaaatgttgtttagttccaatggagatgtgaaattgaatttttgtaataatgagtaatagagaagcagcttctatagytcaaaatgaatgttgccatggaaactgcatagaaatacatagaccaattgaatcgtcaattaaaataaatccccaagtaatttcatttgtttaaaagctgtttgaaagcagaaaatattmagcactattaagtgctggccacttgatgctctttccattaaatgttggatcacaacagttacatacatcagtagtacctgtaaattcagtttggtaaaacatgctgcaatcaataagggattatgctgagcagtaaatactttgagctttgccrtgtaattgtgcttctttcaatgtatgtgaagtaggaagtaataattaaaaaaatagttgtattttaatttatgtacattattttctataagttttcctttgaacaaaaagtagattgccatatgcttgtttcctcaactaaagcaa

SEQ ID NO: 72231 - DNA, 600 bp, Chicken  19866894351882_3
agtaatagagaagcagcttctatagytcaaaatgaatgttgccatggaaactgcatagaaatacatagaccaattgaatcgtcaattaaaataaatccccaagtaatttcatttgtttaaaagctgtttgaaagcagaaaatattmagcactattaagtgctggccacttgatgctctttccattaaatgttggatcacaacagttacatacatcagtagtacctgtaaattcagtttggtaaaacatgctgcaatcaataagggattatgctgagcagtaaatactttgagctttgccrtgtaattgtgcttctttcaatgtatgtgaagtaggaagtaataattaaaaaaatagttgtattttaatttatgtacattattttctataagttttcctttgaacaaaaagtagattgccatatgcttgtttcctcaactaaagcaactgctcagttttatcaatttttaagagatatcgttattttgattagcatgttaacagattcattaraatgtatgtttatatgaagaccagatgaaataagcatttggttacactgaaggaccaaccagtgagttatcccaataggcctgctttt

SEQ ID NO: 72232 - DNA, 589 bp, Chicken  19866894351882_4
atcagtagtacctgtaaattcagtttggtaaaacatgctgcaatcaataagggattatgctgagcagtaaatactttgagctttgccrtgtaattgtgcttctttcaatgtatgtgaagtaggaagtaataattaaaaaaatagttgtattttaatttatgtacattattttctataagttttcctttgaacaaaaagtagattgccatatgcttgtttcctcaactaaagcaactgctcagttttatcaatttttaagagatatcgttattttgattagcatgttaacagattcattaraatgtatgtttatatgaagaccagatgaaataagcatttggttacactgaaggaccaaccagtgagttatcccaataggcctgcttttgctaatagacctgctctgtctaaataatgctcattagtgtcgttggaaaatgctagcatcattttatggcatggttttaattgcacaatatagtgtgattaaaaatataaatgaataaagtgaatttgaatgccacagctcttcatattaaacgtatagactctaaaagaatatcagtgtagctttactttattgcttact

SEQ ID NO: 72233 - DNA, 600 bp, Chicken  19866894351891_1
tttttgaaaatgtgcaagatgtaattagccacagtttattccctttcgtaaggtgaattgttaacccacgtgagatgcttcagaagaacctgaaggcttttgctcttctgaaagaaatgggttattctggcatggagagtgctgagtggagcgagcaaggatggaagaaaggatggaagagggttgccatcactgtgtgtttatgctctgcatgtgttaatgccaggatctgtaaggaaagtgttgcttgacattggaaaagggagaaggtgggaagagaaacctgtgtacgagtgcacrtatgattgtgcacatggccacgcagtttggaggcattgcaggattccatccgtggtaatacttggcctgggactgccatcttgttttccttcctctcttcgtgtgtttgtttgtttcggcctcattttgtgtctttacagccatcttcctttccctgacttctcttgctcacaaccccctccccttgctggcctgaaccctgtgggctgtaacccaagaggagctccggatacagtaaatagtcctttcacttgtgcagcagaattgctccagacgtttctattgattttcactggactt

SEQ ID NO: 72234 - DNA, 600 bp, Chicken  19866894351892_1
aactaaacctgagaagtctcccatgtcagtggttctttaatagaagacttcacccatttacttcccttctgttttccaggctagaagcaacgctagaaatcatgttaacaggagtggcacgtagctgacctgcatggtattcaccaataggcaggagcacattctcccccaagttaataatttcttatcccttggatgactctgtaaatacatgtgcagtacagctggagctacagaagtactaaaacaggtgagcatcttcataagagcatgatagagcagatttaacaaggaataacraggtgatgaaaggcgtgtttggtattgaaagccagttggtataaagtacccaaatgctctgtgtggtgtgtgaataggcctgccttcatttcttagccatctctgggagatgtgtgctgtctttccttgctggtttgtggcttgaccggcattcccatgtttgtcttctgaggcagtattatgcctgcaaaatgcaggttgctgcagatggtctggatttctcttttgtgagtgaggatttgagaaatagttctgtttcatgctcctcctgggaatttgggcacaaggccttcatgtggg

SEQ ID NO: 72235 - DNA, 600 bp, Chicken  19866894351916_1
gggaaagtataaatatgtaatagacaaataatgaatatgcatattgtggttgcacacagtcatgtacgcagaagcaaaggtagaggactgctttaggtgttaacccccgttctctcgcacactataataaaggatacctgctgataacaactgcagtttgactgttagcagttactggacgtttggctctgtgaaacaataggagctaacacaatatggcagaggtaataacgatttccaaggtatacttatgactatcacacacaaactcccaagaacgttaataaatagacttctgcrattccacttcacttccctacaatcaacaaggaggaaaaagagcagccatggtgctagtggtaaatgaggagactgggatggtttgcaaatgccagtgcccagaagggaatagtatgactgcagcaagactcactggtatcaaacacctcctcattcacacctacaaagatgggaagaatgaacaatacctaatgactgtggtaataaggactgaacaggcatcaagaaaatactcgcttcagctactaatgttgagataaacattgaaggtttcattgaaagcaaccacaaaacttactg

SEQ ID NO: 72236 - DNA, 600 bp, Chicken  19866894351922_1
ggagtctgtacctcactgtgctgagcaaaaatacagccatactctatgcacatcacaagggtgggtaccacatgtgctcctccctctcagccacgttgctcggaggctgtttccaatgttggagctaacaccaaattctctgttctggcaaagcttttgcagatttcctgcagtgctcccctggcctgttgcaaggctctgacccatggagcttcacggtacctctgggtgctctctcttggcaaaagccactgggaacagttctggttctgagtggcaagagatggctgctgggagccraggtgcctgmaaactggcattgtcacaaacacagagataagggctcttayatggggtttgaaaaggatttatgtaagtattctcaggactcaaggtacacttggaaattagagraaatgtaaagacgtaatatatgacggtgattataattcaagtgatgtgtgcaaggagtttagcaacttgtgataaaaatgacagatgaatccaggagcatatagcctggccattgttattatttattaatagagctagtgattcattgggaggcaggctttcccattaaaaagccatttttatatt

SEQ ID NO: 72237 - DNA, 600 bp, Chicken  19866894351922_2
cctcactgtgctgagcaaaaatacagccatactctatgcacatcacaagggtgggtaccacatgtgctcctccctctcagccacgttgctcggaggctgtttccaatgttggagctaacaccaaattctctgttctggcaaagcttttgcagatttcctgcagtgctcccctggcctgttgcaaggctctgacccatggagcttcacggtacctctgggtgctctctcttggcaaaagccactgggaacagttctggttctgagtggcaagagatggctgctgggagccraggtgcctgmaaactggcattgtcacaaacacagagataagggctcttayatggggtttgaaaaggatttatgtaagtattctcaggactcaaggtacacttggaaattagagraaatgtaaagacgtaatatatgacggtgattataattcaagtgatgtgtgcaaggagtttagcaacttgtgataaaaatgacagatgaatccaggagcatatagcctggccattgttattatttattaatagagctagtgattcattgggaggcaggctttcccattaaaaagccatttttatattttcaaatacg

SEQ ID NO: 72238 - DNA, 600 bp, Chicken  19866894351922_3
catcacaagggtgggtaccacatgtgctcctccctctcagccacgttgctcggaggctgtttccaatgttggagctaacaccaaattctctgttctggcaaagcttttgcagatttcctgcagtgctcccctggcctgttgcaaggctctgacccatggagcttcacggtacctctgggtgctctctcttggcaaaagccactgggaacagttctggttctgagtggcaagagatggctgctgggagccraggtgcctgmaaactggcattgtcacaaacacagagataagggctcttayatggggtttgaaaaggatttatgtaagtattctcaggactcaaggtacacttggaaattagagraaatgtaaagacgtaatatatgacggtgattataattcaagtgatgtgtgcaaggagtttagcaacttgtgataaaaatgacagatgaatccaggagcatatagcctggccattgttattatttattaatagagctagtgattcattgggaggcaggctttcccattaaaaagccatttttatattttcaaatacgtttacaatctttcatatatataagaagtattatctgagca

SEQ ID NO: 72239 - DNA, 600 bp, Chicken  19866894351922_4
aatgttggagctaacaccaaattctctgttctggcaaagcttttgcagatttcctgcagtgctcccctggcctgttgcaaggctctgacccatggagcttcacggtacctctgggtgctctctcttggcaaaagccactgggaacagttctggttctgagtggcaagagatggctgctgggagccraggtgcctgmaaactggcattgtcacaaacacagagataagggctcttayatggggtttgaaaaggatttatgtaagtattctcaggactcaaggtacacttggaaattagagraaatgtaaagacgtaatatatgacggtgattataattcaagtgatgtgtgcaaggagtttagcaacttgtgataaaaatgacagatgaatccaggagcatatagcctggccattgttattatttattaatagagctagtgattcattgggaggcaggctttcccattaaaaagccatttttatattttcaaatacgtttacaatctttcatatatataagaagtattatctgagcacagcagatcagaaaaattgaccttcctcaaaggatggaacaagatgagaatgtctgaacataca

SEQ ID NO: 72240 - DNA, 600 bp, Chicken  19866894351926_1
agctagaacagctcccatagtgggatgtggtcactgtaggcaaaaatattcccagatggataagtaggaacagcacattggagagaagccactttgtataagtagaaatagtggttggtgaccctgcacatagcagggggattaaaactagatgatcattgtgatccttttcaacccaggccattctatgattctatgaaataagggactgccatggtgctggaatctgtaaccagagtcaaagctattacagagaagcaaagtattggcaaaagatggccacagaaaaggtttggtgartggcattaaggcactgtgaaaacaaacccaagaatgaggttgtacccaatttctctttctcatctgaactcctttcttatacctgctgttattcttagaccattgctattctacagtactcatcccattgttagaaagtagttagagagctttgaatgtttttctagaataaacttaaaagaaaacatcaacagtaaaggaatatcttgatatgccamgagatttgagcctttttgtgtatgcttggtatagaaataatttggtcctaaaacaaggaagttccaataaattcatcttgtt

SEQ ID NO: 72241 - DNA, 600 bp, Chicken  19866894351926_2
gctggaatctgtaaccagagtcaaagctattacagagaagcaaagtattggcaaaagatggccacagaaaaggtttggtgartggcattaaggcactgtgaaaacaaacccaagaatgaggttgtacccaatttctctttctcatctgaactcctttcttatacctgctgttattcttagaccattgctattctacagtactcatcccattgttagaaagtagttagagagctttgaatgtttttctagaataaacttaaaagaaaacatcaacagtaaaggaatatcttgatatgccamgagatttgagcctttttgtgtatgcttggtatagaaataatttggtcctaaaacaaggaagttccaataaattcatcttgtttcaaatagtcctatgtatttcayggagaagaaagagggtgtaacaataaatgcagatgaagtagggagtaactagctacatgccagcttgcattcattccagctccctgacagactttgtgtggctgagaaaatggttagcagattgtgccagcagaatcatgtgaaaaacaacctgctgtataggggaaggataagggtaaactcgatcctttatgc

SEQ ID NO: 72242 - DNA, 558 bp, Chicken  19866894351926_3
aaacccaagaatgaggttgtacccaatttctctttctcatctgaactcctttcttatacctgctgttattcttagaccattgctattctacagtactcatcccattgttagaaagtagttagagagctttgaatgtttttctagaataaacttaaaagaaaacatcaacagtaaaggaatatcttgatatgccamgagatttgagcctttttgtgtatgcttggtatagaaataatttggtcctaaaacaaggaagttccaataaattcatcttgtttcaaatagtcctatgtatttcayggagaagaaagagggtgtaacaataaatgcagatgaagtagggagtaactagctacatgccagcttgcattcattccagctccctgacagactttgtgtggctgagaaaatggttagcagattgtgccagcagaatcatgtgaaaaacaacctgctgtataggggaaggataagggtaaactcgatcctttatgcactgaacaacaaaacagttattcatggggacaaaggccaccaaagacacatttgttctggatt

SEQ ID NO: 72243 - DNA, 600 bp, Chicken  19866894351939_1
aggtgctactgtacctgacgaggaaacacagatatagtaattcctttagaaattcatcagcaagtgggaggtacatcgtatttcacattaccattgccttccatgacttagaaataattctaaggcttacatactgctatgatcgtgtagctctgagtaaaaggacaggagtattatagtagtataaatgaaacaaatgttgatagcagaaataggggcatccacagtatgaatgggacctaacagcaactgaagtttgcaagctgtatcacatggaggtggcaaaagagtcaggaaaawcaatcagaaatcagtatttctgacgagttgtgatatccatargatgaggctgatgaatccatggcagtcaataactgttgtctctacccctgactggtagagttgctctgggcataaacggtgactcttcacctaatatttcctgtcctcagatattctacatttagtttccttcctctgtcttctttatttttattttctgctttcatatttatggaaaactttgaaggtctgagacagtcagcatcaatacataatctctagttgctgagaatttccttaactgagaaaacatttaca

SEQ ID NO: 72244 - DNA, 600 bp, Chicken  19866894351939_2
cctttagaaattcatcagcaagtgggaggtacatcgtatttcacattaccattgccttccatgacttagaaataattctaaggcttacatactgctatgatcgtgtagctctgagtaaaaggacaggagtattatagtagtataaatgaaacaaatgttgatagcagaaataggggcatccacagtatgaatgggacctaacagcaactgaagtttgcaagctgtatcacatggaggtggcaaaagagtcaggaaaawcaatcagaaatcagtatttctgacgagttgtgatatccatargatgaggctgatgaatccatggcagtcaataactgttgtctctacccctgactggtagagttgctctgggcataaacggtgactcttcacctaatatttcctgtcctcagatattctacatttagtttccttcctctgtcttctttatttttattttctgctttcatatttatggaaaactttgaaggtctgagacagtcagcatcaatacataatctctagttgctgagaatttccttaactgagaaaacatttacatgaataaatatctgggttaaattgtgatttattctgacttgt

SEQ ID NO: 72245 - DNA, 600 bp, Chicken  19866894351951_1
gcaaaggagtgattacaacagtgggccctttgagtttcaggtagaccttaaccccagcactggggtgggttttcctcactgcccattctgagcactcaggaagaaggatatgttttctttgtggtaacaacttatttatctatttaaatatatgcaaaatatttgtaagtagccatgtgtgtccatattacttcatgttctgctccacacttgctcgtatccatcagcacaaattcacccatgcagattgctcagtgacatcaagcggatacatcggaactgttggtctctttctagccyacagcatagctgagcaaaagaaraactgtattctgaatgaggtatcctgtgtgcatgaagaatattagtgccatggcaccagcagaattctgaaattacctttacatttcttgactgcaacgtcttctaaggctttttgggttgttctatgtatgtttgttttctgtaggctaaatagcctataattcttcacggttgttcaaaccgcgattttctctgtgaattaatccatgtgctgagttctacattttgtgtctagttgtaaaagatctatttaagttttttctctaggaaaggtat

SEQ ID NO: 72246 - DNA, 600 bp, Chicken  19866894351951_2
ggccctttgagtttcaggtagaccttaaccccagcactggggtgggttttcctcactgcccattctgagcactcaggaagaaggatatgttttctttgtggtaacaacttatttatctatttaaatatatgcaaaatatttgtaagtagccatgtgtgtccatattacttcatgttctgctccacacttgctcgtatccatcagcacaaattcacccatgcagattgctcagtgacatcaagcggatacatcggaactgttggtctctttctagccyacagcatagctgagcaaaagaaraactgtattctgaatgaggtatcctgtgtgcatgaagaatattagtgccatggcaccagcagaattctgaaattacctttacatttcttgactgcaacgtcttctaaggctttttgggttgttctatgtatgtttgttttctgtaggctaaatagcctataattcttcacggttgttcaaaccgcgattttctctgtgaattaatccatgtgctgagttctacattttgtgtctagttgtaaaagatctatttaagttttttctctaggaaaggtataaaaaggatgtatatatgcaaaa

SEQ ID NO: 72247 - DNA, 600 bp, Chicken  19866894351954_1
attggaattaattccaaaaccaatcatactttttgtgtgtgtgtgtgtgtgtgtctgaacaacagtttctcatctgatttttttgaaatatctgggaattgtgtgtagaaaacttaatcaactaatatcagcgaagcacaatggtaatgaaaaagttctgaatgagctgtgagtatacaatgtggttcccatgcagcagtgataatgataaagaagacttagatggtttactgcttatttttctgaagctggtgaaactgtgtaaaatggtttatccattctgcaagaattctgtttctrttttttaaaatatgttcagtgtacatgcatatatttacaaagtttttagccttcttcaattttcttctcaaaattgcagattaggctactcaaatacctatatattcatgcacatattatttagttcttcattgaaaaacacaaagtcatttctatttatgaacattttcctgtaatgcaacctggcatttctcatcactaccgcttgcagtctagtcttataaaatttaatggatgtcaaaagtgagcacagtatgaaaaataaatagaaaaaaaagaaatcctttacatactaacaaa

SEQ ID NO: 72248 - DNA, 599 bp, Chicken  19866894351959_1
  misc_feature (1)..(17): n is any nucleotide
nnnnnnnnnnnnnnnnnaactggctgcaaggaggcaggttatatgctttatgccataaatgtttaaatgcatctatcaaagctaaatttagtcaagctaagtctaaactgccacccaaaatcttgaccttgacgtctggaaccagccgatgttcaaaggccatgcaagccacaagaagatgtaattgggatggggaaactagtgcagaccccctgaagattagggcttgatgagaatgtgtgtgtgcattggcaaggctaacagccagctcctgtcctggcaaggttgccatgggctggyatgtgtcacccaggtacatcttgtttcttgcaagttgagacctgcaactgtgatggcctgatgcacaaaacctttacaaaaggacactaacttttaatactgaaattaatgttgctgcttggccagcttcacattcaaaatcccccttagctacaatgctatgaaagatgttacagcatttggagttgtaatcaacagcactgcagccagtactcaggttcaagaagcatatgggcaataccctgcaaatcatttccrtatgtagctgctgtttcagggtgtatgcaactgcagcttct

SEQ ID NO: 72249 - DNA, 600 bp, Chicken  19866894351959_2
taacagccagctcctgtcctggcaaggttgccatgggctggyatgtgtcacccaggtacatcttgtttcttgcaagttgagacctgcaactgtgatggcctgatgcacaaaacctttacaaaaggacactaacttttaatactgaaattaatgttgctgcttggccagcttcacattcaaaatcccccttagctacaatgctatgaaagatgttacagcatttggagttgtaatcaacagcactgcagccagtactcaggttcaagaagcatatgggcaataccctgcaaatcatttccrtatgtagctgctgtttcagggtgtatgcaactgcagcttctgttatctccttttctctcctaccttctcaaaacctcccatctgtttagctctcagattaactgggcattttagtacaatgggcaagcaactccaacctattacctttaaggaaatttgaataacttagacttgctggcctgaatattaacccctagtttcctgtgacttattacaggcctctacaagagaacctactacatgccacatgcaggagactaccatgagatttcagagtgtgcgtgttcctatgccgtacac

SEQ ID NO: 72250 - DNA, 600 bp, Chicken  19866894351964_1
ggagcttctttccatagtgcctaaagctttcagcctgcttttgtgtgcactactgtgttctgttaccttgaaagtaagaatactggttttgcactgtgtaattgtagtaacggtagtaacttgtgagcataggcagttcaacagcaaaacttcaggtgtgggacaacaaatggagattcctgcaaagaaattaaagggatttctaaagaccaatgctatgaaaattccaatgtgaaaatttaatacattttagtttattttttttaaagaggaaactgctgttttctcttccctcttttkatgcactggtactgagatgtccttatagatgttgtttgaagtatgcagttgatatctttgggtaagtaacttgaccttttaaaaccagcatatgttcaagaggtatgttgctatagctgattttcgaccgctaacatgagcctgaacctgttcttgaaaaaaacagcgctcacttatagaacaagaaacccatctgaagcagatagaggatattaatagcaggaatgtttcagtgctccccctgtctatgtgcagtatatccggattcttctgtgggaagcacactgttgcagattatgg

SEQ ID NO: 72251 - DNA, 599 bp, Chicken  19866894351989_1
  misc_feature (1)..(6): n is any nucleotide
nnnnnncttcaatatcagaaaactacgcacgcacaaaaagcaccacgtgtatctgcagtatgatgagtacacaaatactcagccactctcacctggtgactgtgtgtgcatcatagatggagaaggtgtcactgtgttatgataggaggtgggtggtgaagtaagaggatatgctcccgatgctcctgcctgctttgcaaatggctgaaagagttaacacaagacaacaaaagtcttttatcattttgtacaaaaactgaagtacgtgcaagagaatactagtgagagtttgatcctcayctgtgatttattcaatccgctatactaccctgttcaaaacacatttaagaatcattttctagtttctcaagacaaaaatgcctttgcatctcatcctttcttatccaccactctgtacagagaagcctcctgactcttcctccctcccttccctgccccacatctttcatcttcaacagccattctcccaccctccgtcaaagctttgcttctcaagtggcaagtctcatatgacactccaaagctgctggtcatctgctatgggctgtttacactggaagcaaaaatgacaaattaac

SEQ ID NO: 72252 - DNA, 459 bp, Chicken  19866894351989_2
tactaccctgttcaaaacacatttaagaatcattttctagtttctcaagacaaaaatgcctttgcatctcatcctttcttatccaccactctgtacagagaagcctcctgactcttcctccctcccttccctgccccacatctttcatcttcaacagccattctcccaccctccgtcaaagctttgcttctcaagtggcaagtctcatatgacactccaaagctgctggtcatctgctatgggctgtttacactggaagcaaaaatgacaaattaacattttgccccaggggaaattccrtcacgtaacacttctatagactcccattcagtttttcactgccgatcatttcagaaggtaagatctcaaaaacctgcatttgtggaaggcaataaacattctagctttgtctgtaggctacctgctgtggttgctggaggagggttgctgaggctgaag

SEQ ID NO: 72253 - DNA, 600 bp, Chicken  19866894351993_1
ctcagtgaaggaaaaaaatcgttgttaccatagatcaggattaatcccatctaagcttatgaataataatatagaataatatagaatggtttaggttggaagggacatttaagatcatttagttctaatcctcctgtataggcagggacaccttccactagaccatgttgctcaaagctttctttaggtttatcaacctaaaaattagttttaatctttaaagatgtatgtgctttcacttttcttctacttagagaccaaacttggctgatctagaatcatagaatcaatcatagaatygtagaatcatatactgcttcctaagtgtggcagaatatctcttgttggtgaggagaagagaataaatgttttctttcttttcttcactaggagagtgtgaggacagcgtggtagaaattagctagctaatttctgtagtcagtcctattagctagtcagtccataatgctttgactgtgctgctcctccactgtcactgtgcttctgctccctgtgggctgccatagatgctgttcttccccagcactgatccccacaggctgtagctctccaagcactgtcccagtgggtccactgctg

SEQ ID NO: 72254 - DNA, 600 bp, Chicken  19866894351996_1
tgagagctgtaatgctatggtttacagatgcttattcacaattatgggagtcagatgctcaaacactctgatgtgtcagtggtcagatcctaattcctgggaaatctcttctgctctgattgttgcatattccccttccaacacctcagcatgacaaggtggctgtgcggtcttcttggaaacaaaattaaccctcactgatattcctacttctgacaagtctgacccaagcaggttgtttaacttcttcattttcatgaacttatccatctattggagggaaataagaagctaatatcwattttcttcttattgtaattatagtaggtaaagtgaactaaggccgagaagcaccaagtcccaggtcttcagaaaaagaaaaaaaagaagaaaaaaaaacaaccaacagaatatctgatgctgtatgtgatattctgaatatattagtcacagtatcgctgtcactctgaaataattcaaaacatacaacttgacaatagaattagaggctaagaaaggagaaaagccttcacttccagagagatgaggaatgtttgtcttggatctgtagcccctctgatgtttcgctagcagatttaa

SEQ ID NO: 72255 - DNA, 600 bp, Chicken  19866894351997_1
cattgggaaccctctcctcctcttggctgctgccgctctggaatgggcatctccgaagctcaccaacacctgcaacatacacaatgagaatcgacgtaactgaaagcaataaatctctttctgaagcttgaatgggatggcagaggcgtgattcccaggtggctgcccagcctccatcgatccagcttgctgcacgtctgtggggatgcgaccgcccagccatgggtgcctgagcactgggatgatcccaactttgctttgcaggaaagtaccagtgcccagggtgggctgctatgggcratttgggaggatgctgactttttgcaaagagcctggttgctcatatcctgcgagcttcaggccattcacctcctggcatctctggccacggatggatcctgcgccttgtgcactccctccagcagatgctaatggggaaaatcagccctggaagggagggcatctctgccagggatggccctggcagcttgtttgcagagcaggtgtgtgctcaggtgggtttttcagggcagaaaaggtctgtgggggtcagaagccacccatcaggctgcatgaagcagaagtctggatttctcccgc

SEQ ID NO: 72256 - DNA, 600 bp, Chicken  19866894352009_1
tgaatttgtgctcggcaggggcagtgtgggtagctgtgatgagttccaggcttcgtcatttgtgtcagcacagtgctgagaaataaggaacgatcagtacggaggagctgtgaactctcaagtctttgattgaaacgtgtgtcgtaggaggagcgaatacaaaggtgatccactgtggctgttgaaccttggccttgctgaagtcagtggcagttcctaatagcgatgagcttagaaaggcacacctgagcactgctgtctgctggcctgttcgtttgtgccctcaggaggagcacctcycttcggggaaagtagcaaagtgtctgttgctgctgcttccaggacacgatgtatagtgagccagtcccactctcatgcgtagaggtttgtgtctagatgagcttggcattttgagtacagcgtgctcgtctctgtggagggccaggctcactccaatgaaggtattcagaagccytgtgttcatctctttggtagccatagactatcagagcagtgaaaagatgctgtgtctgacaggtgagagattggcagtgatgaagacttctgccatattaactctagacagagttgtgaacagca

SEQ ID NO: 72257 - DNA, 600 bp, Chicken  19866894352009_2
tggctgttgaaccttggccttgctgaagtcagtggcagttcctaatagcgatgagcttagaaaggcacacctgagcactgctgtctgctggcctgttcgtttgtgccctcaggaggagcacctcycttcggggaaagtagcaaagtgtctgttgctgctgcttccaggacacgatgtatagtgagccagtcccactctcatgcgtagaggtttgtgtctagatgagcttggcattttgagtacagcgtgctcgtctctgtggagggccaggctcactccaatgaaggtattcagaagccytgtgttcatctctttggtagccatagactatcagagcagtgaaaagatgctgtgtctgacaggtgagagattggcagtgatgaagacttctgccatattaactctagacagagttgtgaacagcatgtttggccttagcactaactgaaggaaaccctgggtagagcccatccagctcagcagcacaaagcatttttctgagcaaatccaagaccctatttccttgtagatcaggacaaaacagtgcaaagcagtgcaaggaacagtgcccattttcctcccaagagctcaccttgggcc

SEQ ID NO: 72258 - DNA, 600 bp, Chicken  19866894352012_1
tatgtttgatgtctacgtaggtggctgatacatcatctggaagccactcagcatcatgctgtggagccaagtctgccatctcccctgcaaccaggcagtttggggtctgtggggccatcacaccttcccctgtagaatcattaaggttgaaaaagaccatagtgatcctcaagtccaactgccaacccatcaccaccatgcccacttgtagaactattaagggtggaaaagtcctctgagatcattgagtccaacttgtcgttcccccacccctgtgatggtgcaatcccatatgggacwtkgctttcccaacagctggggcattgcttggaggcctgatgcggggggtcacrctccagtgcaacccaatggagcacccgaacatccctggggctggaggtgtaatttcctgccttgaaaccatccggttgaacattcaaagagaggcatgtttgctgcagcaattaccctacagtgcatggaaaaatgtttctatgtgtgacatcctgcagccctgaagcaagctgcttggtggaggggaccaaccttcatcccaaagccagtggagagggttggctgagcccaggttgatggggaata

SEQ ID NO: 72259 - DNA, 600 bp, Chicken  19866894352012_2
tgtttgatgtctacgtaggtggctgatacatcatctggaagccactcagcatcatgctgtggagccaagtctgccatctcccctgcaaccaggcagtttggggtctgtggggccatcacaccttcccctgtagaatcattaaggttgaaaaagaccatagtgatcctcaagtccaactgccaacccatcaccaccatgcccacttgtagaactattaagggtggaaaagtcctctgagatcattgagtccaacttgtcgttcccccacccctgtgatggtgcaatcccatatgggacwtkgctttcccaacagctggggcattgcttggaggcctgatgcggggggtcacrctccagtgcaacccaatggagcacccgaacatccctggggctggaggtgtaatttcctgccttgaaaccatccggttgaacattcaaagagaggcatgtttgctgcagcaattaccctacagtgcatggaaaaatgtttctatgtgtgacatcctgcagccctgaagcaagctgcttggtggaggggaccaaccttcatcccaaagccagtggagagggttggctgagcccaggttgatggggaataca

SEQ ID NO: 72260 - DNA, 600 bp, Chicken  19866894352012_3
tcatgctgtggagccaagtctgccatctcccctgcaaccaggcagtttggggtctgtggggccatcacaccttcccctgtagaatcattaaggttgaaaaagaccatagtgatcctcaagtccaactgccaacccatcaccaccatgcccacttgtagaactattaagggtggaaaagtcctctgagatcattgagtccaacttgtcgttcccccacccctgtgatggtgcaatcccatatgggacwtkgctttcccaacagctggggcattgcttggaggcctgatgcggggggtcacrctccagtgcaacccaatggagcacccgaacatccctggggctggaggtgtaatttcctgccttgaaaccatccggttgaacattcaaagagaggcatgtttgctgcagcaattaccctacagtgcatggaaaaatgtttctatgtgtgacatcctgcagccctgaagcaagctgcttggtggaggggaccaaccttcatcccaaagccagtggagagggttggctgagcccaggttgatggggaatacagagctgaacagtgtggatgactgtcatccctctgcacacctgcaagcaaat

SEQ ID NO: 72261 - DNA, 496 bp, Chicken  19866894352012_4
gcagcaattaccctacagtgcatggaaaaatgtttctatgtgtgacatcctgcagccctgaagcaagctgcttggtggaggggaccaaccttcatcccaaagccagtggagagggttggctgagcccaggttgatggggaatacagagctgaacagtgtggatgactgtcatccctctgcacacctgcaagcaaatggggaacagcgtctccacggtcctgcaccaaatcaaggggagaggtctccgtgtttatgagccatagaatggatcttttgggttggagaagagcttcaggatcwcaaagcccaaccatcaacctgtcctactgagtcccatcactacaccatgtccctcagtaccacatccacacatctcttaaatgcccccagggatggggactcccacctgaaaggtctcataaggaccatgggcacctgcatgatcatctccagatgttagaagaaccatctccagatgtgacaaaagacatagcaa

SEQ ID NO: 72262 - DNA, 600 bp, Chicken  19866894352027_1
agaaactaatttgtttctcttcatgtcagctcggttccgtggtaggatgctcacagtgacagaggagagctgctcacagccactatttataactcttttagaaatgttggttgtaaaacttaatttactgcaatgttaaaaaatagtcatttttatcagcatattacactcactcctagcagttgtaatattctcagataacgaatatgagggatattcattttagaaggatgtgtttatcagagttcattttgatgtttatttttacatctggtctatagagcaggctcatggagagtsaaaagcatctcagatgcttgctttgtgacttgttcttattgggatttcctaaggaaatattactgaaaatgaggctgtgtaatactgtggtagggatatatcacwtcccatgtgcacaacattgcttaggagcaataatcttctttggttgaagatcagttgttttcaagatgaggctttattttcaacagtgttgcaggrctctctgctactgggaattgtgtctaattcccaattaattttgtctttgaagactgtaacccaaatgtttggtgcagtacttaaaccaatcttttcaaa

SEQ ID NO: 72263 - DNA, 600 bp, Chicken  19866894352027_2
gttggttgtaaaacttaatttactgcaatgttaaaaaatagtcatttttatcagcatattacactcactcctagcagttgtaatattctcagataacgaatatgagggatattcattttagaaggatgtgtttatcagagttcattttgatgtttatttttacatctggtctatagagcaggctcatggagagtsaaaagcatctcagatgcttgctttgtgacttgttcttattgggatttcctaaggaaatattactgaaaatgaggctgtgtaatactgtggtagggatatatcacwtcccatgtgcacaacattgcttaggagcaataatcttctttggttgaagatcagttgttttcaagatgaggctttattttcaacagtgttgcaggrctctctgctactgggaattgtgtctaattcccaattaattttgtctttgaagactgtaacccaaatgtttggtgcagtacttaaaccaatcttttcaaaatactctgttttgtttttatctcaggagcatagaacagccccggtctggcgctaatatggagcagtgcacagcatgcttctgttttcttcatgaaacaatcttgt

SEQ ID NO: 72264 - DNA, 600 bp, Chicken  19866894352027_3
cgaatatgagggatattcattttagaaggatgtgtttatcagagttcattttgatgtttatttttacatctggtctatagagcaggctcatggagagtsaaaagcatctcagatgcttgctttgtgacttgttcttattgggatttcctaaggaaatattactgaaaatgaggctgtgtaatactgtggtagggatatatcacwtcccatgtgcacaacattgcttaggagcaataatcttctttggttgaagatcagttgttttcaagatgaggctttattttcaacagtgttgcaggrctctctgctactgggaattgtgtctaattcccaattaattttgtctttgaagactgtaacccaaatgtttggtgcagtacttaaaccaatcttttcaaaatactctgttttgtttttatctcaggagcatagaacagccccggtctggcgctaatatggagcagtgcacagcatgcttctgttttcttcatgaaacaatcttgtgactgaggtgcaaccaggctgagtagctatgagaagtgaggttgtttctatcaattggaattttgctttttgtttactgagttagagtatactgta

SEQ ID NO: 72265 - DNA, 599 bp, Chicken  19866894352042_1
  misc_feature (1)..(31): n is any nucleotide
nnnnnnnnnnnnnnnnnnnnnnnnnnnnnnnatgaaatgtacactttttaaaaggtataaattaattcttctggcagtccactatgtcaatcaatgtgactggaaaccttaaatatacattaaaggtactttactcttatccgttgaaggaaatgttgtcgctttcatcatgtgtgtcagactgaagagacagtacttaggacacgggaatgaaaagtcaggtactgcacttttaaagcacatctctaaatgacagaaagaatctgagtaatgaggtacacttagctcaagaaaagtttmtgctctttcaggagaaaggagtaaaacagaacaaggtggcctaatctgggaacatatgcattattcattgttctgctggagacagaggcatcttttcctttagaaatcaaccagataattgggaacaaattcctctgcaaaggaactgacttacattccaccatattcttaatcagaaggcaaatgcaactggaagaggtgctggagaatgtttcagcacagaatcataaaatatcctgagtttgaagagttccccaagaataaccacgtcgaacctctggctccacacagaaccaccc

SEQ ID NO: 72266 - DNA, 600 bp, Chicken  19866894352044_1
attagtaagagcactagcaccaacatgaaatttgctgaagtgcctttttacttgaaatctgtactttgcttttgccttgaatctaaagctgggagcttatttagttatttgtctgagaagggaacacaggtctaattttagaaaatatttatttaatgcaaaaataaattctgtgaaaacgaagagttacttaacaaaattgctgcaattgatagaatactgtcaagaaaactattaaatacaataatgaaaaaaaaattggatctttttaacctattttttttaaatgtatacaatacytgcaatgactattttccacaagtgaaaattaatattagcaaaaagacttttttttaagtagaatagaaatatgtctacaaactcccagtatatactttattgttactgctatatcctgttcatttgctgaaatgtatgaaaaaaaatacatttcccttacaatttgcagtctgtttaactcttctaatatctcaattacaaaattcactcagaataattgctgatacctaacaaatgcgccttcgagacctgcagatttctgtagttcatgtattgtcctgaaggtatcattattcaaaa

SEQ ID NO: 72267 - DNA, 599 bp, Chicken  19866894352046_1
  misc_feature (1)..(154): n is any nucleotide
nnnnnnnnnnnnnnnnnnnnnnnnnnnnnnnnnnnnnnnnnnnnnnnnnnnnnnnnnnnnnnnnnnnnnnnnnnnnnnnnnnnnnnnnnnnnnnnnnnnnnnnnnnnnnnnnnnnnnnnnnnnnnnnnnnnnnnnnnnnnnnnnnnnnnnnnnntataaattcataatttaactcagtattccctccaagtccatattaccttcatctgcaccactaagccacgctcactgcaggggtggccttgcatcaccctcaggtgcaatgctgacacttccaatgtggttttgcagacatagcaycaactgaaacccagcagcttaagcatatgcccctcttattcatcactgtggacaatgccatcaggtctttcaggtcaaagatctgatcacttatgttgcccatacccttaagggtgtcctacacacattctttcagccctctgaattccctattatcaagaaggaacttcccctatctatgaacacaaatttagctaagctccttattccacacttctgtggcaccttttccatgggcctcaacaaaagctaaactgactgacagctacaaatctgtttgacttaacttacttctgcca

SEQ ID NO: 72268 - DNA, 600 bp, Chicken  19866894352046_2
actgaaacccagcagcttaagcatatgcccctcttattcatcactgtggacaatgccatcaggtctttcaggtcaaagatctgatcacttatgttgcccatacccttaagggtgtcctacacacattctttcagccctctgaattccctattatcaagaaggaacttcccctatctatgaacacaaatttagctaagctccttattccacacttctgtggcaccttttccatgggcctcaacaaaagctaaactgactgacagctacaaatctgtttgacttaacttacttctgccatayacctcttaacacccttccactggtgccaggcagaaaaagaaacaacatccctaaattagtaaggagccaccaatgcaccttacattggtttacacgatttggattcaccactcattcctttgaaatcttacgtgcataagagggcttcagaattccctttctgatcctcacaactggaaaaaacaccatcagtgttgggttagcccctcagatttcttgccaataagagacatggcaagaagcacgatggttgacacactgaaggtgcagccccaaacttacattgtcccactccttgtg

SEQ ID NO: 72269 - DNA, 600 bp, Chicken  19866894352062_1
aaaacaatgatgtaccatgcgtgcttgtgcataaagcagcagggaatataaaccaaagtctttccattagaacagagctttgtacgcacacttctgaaacttctctgttgcagcattccttctcacgtattcagctagatggaaaatatggctataggaaggaagaaatgctatacaggctgggatccttgggagggaactctatgaattcctcatccatctccatctctcttggctctgtttcatccatactgtattgttggattctgtatctttaacagccagcagagctttacagartgtaaatccctggctgataccaaagggtcacaggctacacaaagtggccatatccctttctcttctccccacaacactgcyttaccccttcctctgtttggattaaacagaatgttgaagttaggagataaaagggggacatctcgagtaaccctcccttccgtacagcttctgcactgtggcatttgtattttagtgtcactatctgccagtacacgaggagagcaacacggctctgcagaaacacagctcgtatctgtggttctttttcttttaagataacaatcaaccaagtttggc

SEQ ID NO: 72270 - DNA, 600 bp, Chicken  19866894352062_2
gtacgcacacttctgaaacttctctgttgcagcattccttctcacgtattcagctagatggaaaatatggctataggaaggaagaaatgctatacaggctgggatccttgggagggaactctatgaattcctcatccatctccatctctcttggctctgtttcatccatactgtattgttggattctgtatctttaacagccagcagagctttacagartgtaaatccctggctgataccaaagggtcacaggctacacaaagtggccatatccctttctcttctccccacaacactgcyttaccccttcctctgtttggattaaacagaatgttgaagttaggagataaaagggggacatctcgagtaaccctcccttccgtacagcttctgcactgtggcatttgtattttagtgtcactatctgccagtacacgaggagagcaacacggctctgcagaaacacagctcgtatctgtggttctttttcttttaagataacaatcaaccaagtttggccatttgaaagtcagctgcatgggctgctgactcagaggagtcagcaggagtcagtcaggaggaccagataccatcttggca

SEQ ID NO: 72271 - DNA, 599 bp, Chicken  19866894352069_1
  misc_feature (1)..(28): n is any nucleotide
nnnnnnnnnnnnnnnnnnnnnnnnnnnnatgttggcattaaggagaggaaaacaaaatctgtctatatacgcaccactctgtactttgttaagatgtctactctgcagttgcatttggcaatagtaatcattttattaaaaattataataaaagttaagtttgtttctgtagaagatgactttttgtcttgaacttactacaactgtttttatagatagaattcagacataagtgtatataagtgtatgtggttggcttctgagtgagggaaagtaaatgtgagttcctgctgttcctgyatttttaggtagctttaatcacttcggtgatgcatcctacatatttcagcagcagtcagcttttttttatgaaagctgactttgaccttattaatttataataactgtctatgcacagtggatagtgataattgagctacttcaggggtgccatggttactggtcaaacttgaatgatttaaacratctttctcaattcatcaggactactctgtaaccaagttttccctctttaccataattgaggagaatttcatagttggagaaataaaaacaagcactagaccaaatgtaatata

SEQ ID NO: 72272 - DNA, 600 bp, Chicken  19866894352069_2
gtcttgaacttactacaactgtttttatagatagaattcagacataagtgtatataagtgtatgtggttggcttctgagtgagggaaagtaaatgtgagttcctgctgttcctgyatttttaggtagctttaatcacttcggtgatgcatcctacatatttcagcagcagtcagcttttttttatgaaagctgactttgaccttattaatttataataactgtctatgcacagtggatagtgataattgagctacttcaggggtgccatggttactggtcaaacttgaatgatttaaacratctttctcaattcatcaggactactctgtaaccaagttttccctctttaccataattgaggagaatttcatagttggagaaataaaaacaagcactagaccaaatgtaatatagagaaggaaggcaaagtgacaggataggtgaggtttcctcttctccagtctgaacaaaccaagggattaatgttgaagagcactgatcccaagaaagaaccctggggtataccacttgtaaccatcctgcaagcagacttaaatccattgacttttactgttgaatgtaatgtactgttgtatgca

SEQ ID NO: 72273 - DNA, 600 bp, Chicken  19866894352070_1
gggataagacatttgcaagtatgacatcttgagctaataggaatcttttacaatctctgtaaggaaatgaatttccctcttgtaaacttataactctactctgaggtcgcttttatgagaactagatggcattaatccttagaaattcagaagccaggttagagatggatcaaggcaaagcagacagtgctttcctcttagttgcactgtggatgaggctgctggtggtttcaaagcagagtgatttctaaatttactgtgaaatgcgttagaagccatcgtatctaagaggcttttcawtgctaattgcagcrttcccctgtgcagggttcactttggcctctgggacctgraatcactgcctgtgtgtggagctgagctgcacactcctttgtggactgtgctctacartccygtgcaggaggtggtagatgctcttttagcttttgaccatgaaagccatcagcctggaggaagggtttgtttttgttgctgagctgccaaacgcggtagccaaatggaggcaaaggatgctaaggttggggacatcttcagccacccatccatcaccagtgtttttaattagattacatctcgagc

SEQ ID NO: 72274 - DNA, 600 bp, Chicken  19866894352070_2
gcaagtatgacatcttgagctaataggaatcttttacaatctctgtaaggaaatgaatttccctcttgtaaacttataactctactctgaggtcgcttttatgagaactagatggcattaatccttagaaattcagaagccaggttagagatggatcaaggcaaagcagacagtgctttcctcttagttgcactgtggatgaggctgctggtggtttcaaagcagagtgatttctaaatttactgtgaaatgcgttagaagccatcgtatctaagaggcttttcawtgctaattgcagcrttcccctgtgcagggttcactttggcctctgggacctgraatcactgcctgtgtgtggagctgagctgcacactcctttgtggactgtgctctacartccygtgcaggaggtggtagatgctcttttagcttttgaccatgaaagccatcagcctggaggaagggtttgtttttgttgctgagctgccaaacgcggtagccaaatggaggcaaaggatgctaaggttggggacatcttcagccacccatccatcaccagtgtttttaattagattacatctcgagcatcccgtgtttgcc

SEQ ID NO: 72275 - DNA, 600 bp, Chicken  19866894352070_3
tctctgtaaggaaatgaatttccctcttgtaaacttataactctactctgaggtcgcttttatgagaactagatggcattaatccttagaaattcagaagccaggttagagatggatcaaggcaaagcagacagtgctttcctcttagttgcactgtggatgaggctgctggtggtttcaaagcagagtgatttctaaatttactgtgaaatgcgttagaagccatcgtatctaagaggcttttcawtgctaattgcagcrttcccctgtgcagggttcactttggcctctgggacctgraatcactgcctgtgtgtggagctgagctgcacactcctttgtggactgtgctctacartccygtgcaggaggtggtagatgctcttttagcttttgaccatgaaagccatcagcctggaggaagggtttgtttttgttgctgagctgccaaacgcggtagccaaatggaggcaaaggatgctaaggttggggacatcttcagccacccatccatcaccagtgtttttaattagattacatctcgagcatcccgtgtttgccggtctgaggccgtgctcggagctggcaggtgaaggggct

SEQ ID NO: 72276 - DNA, 600 bp, Chicken  19866894352070_4
tttatgagaactagatggcattaatccttagaaattcagaagccaggttagagatggatcaaggcaaagcagacagtgctttcctcttagttgcactgtggatgaggctgctggtggtttcaaagcagagtgatttctaaatttactgtgaaatgcgttagaagccatcgtatctaagaggcttttcawtgctaattgcagcrttcccctgtgcagggttcactttggcctctgggacctgraatcactgcctgtgtgtggagctgagctgcacactcctttgtggactgtgctctacartccygtgcaggaggtggtagatgctcttttagcttttgaccatgaaagccatcagcctggaggaagggtttgtttttgttgctgagctgccaaacgcggtagccaaatggaggcaaaggatgctaaggttggggacatcttcagccacccatccatcaccagtgtttttaattagattacatctcgagcatcccgtgtttgccggtctgaggccgtgctcggagctggcaggtgaaggggctgctcaggtggttgaggtaccgccaggaaagcaaagttgattaagttctccccggagca

SEQ ID NO: 72277 - DNA, 600 bp, Chicken  19866894352070_5
tgagaactagatggcattaatccttagaaattcagaagccaggttagagatggatcaaggcaaagcagacagtgctttcctcttagttgcactgtggatgaggctgctggtggtttcaaagcagagtgatttctaaatttactgtgaaatgcgttagaagccatcgtatctaagaggcttttcawtgctaattgcagcrttcccctgtgcagggttcactttggcctctgggacctgraatcactgcctgtgtgtggagctgagctgcacactcctttgtggactgtgctctacartccygtgcaggaggtggtagatgctcttttagcttttgaccatgaaagccatcagcctggaggaagggtttgtttttgttgctgagctgccaaacgcggtagccaaatggaggcaaaggatgctaaggttggggacatcttcagccacccatccatcaccagtgtttttaattagattacatctcgagcatcccgtgtttgccggtctgaggccgtgctcggagctggcaggtgaaggggctgctcaggtggttgaggtaccgccaggaaagcaaagttgattaagttctccccggagcaaaac

SEQ ID NO: 72278 - DNA, 600 bp, Chicken  19866894352080_1
ggagtagcactgccattcatgagcagtacgaagggaacacatcgacttcaccctcccccccaaaatccagctgcccagattcacaagcacagctgatggcaaaaggagcccacgtgcacagagccacccaaccacaccacgcaatgagaaagcgtttgcatatctgtaggcattgcaatcacacagcaaggcccaaatatttgggggggtgagaggggtggggaggaagatgtgaaaagtaagagaccaaaagctggttgttttccccagcactcattcactgatagctcttgcacgaakgtttttgatatggtggtttccttagcatggtatgaataaatgcttcccaggatggcattggttcaktctttccttatatgctttccagagccaatgaagaaaggaatggagaaggaaaccacctgggtctgtgctgaatcagctcatggtgttgaactgagacacccctccattaccagctcccagctatgcccactgcttcacccaaagccttcctgggatgcagcccaactsctcacagccagaggagcactctgcagyccagttatttacaggctgcccaaaaggcagctccaagag

SEQ ID NO: 72279 - DNA, 600 bp, Chicken  19866894352080_2
ccagctgcccagattcacaagcacagctgatggcaaaaggagcccacgtgcacagagccacccaaccacaccacgcaatgagaaagcgtttgcatatctgtaggcattgcaatcacacagcaaggcccaaatatttgggggggtgagaggggtggggaggaagatgtgaaaagtaagagaccaaaagctggttgttttccccagcactcattcactgatagctcttgcacgaakgtttttgatatggtggtttccttagcatggtatgaataaatgcttcccaggatggcattggttcaktctttccttatatgctttccagagccaatgaagaaaggaatggagaaggaaaccacctgggtctgtgctgaatcagctcatggtgttgaactgagacacccctccattaccagctcccagctatgcccactgcttcacccaaagccttcctgggatgcagcccaactsctcacagccagaggagcactctgcagyccagttatttacaggctgcccaaaaggcagctccaagagagcagttccttgcactgctgctgtgctcagagcacgcagaggcagtgacagcacagcacccagcaa

SEQ ID NO: 72280 - DNA, 600 bp, Chicken  19866894352080_3
aaaagtaagagaccaaaagctggttgttttccccagcactcattcactgatagctcttgcacgaakgtttttgatatggtggtttccttagcatggtatgaataaatgcttcccaggatggcattggttcaktctttccttatatgctttccagagccaatgaagaaaggaatggagaaggaaaccacctgggtctgtgctgaatcagctcatggtgttgaactgagacacccctccattaccagctcccagctatgcccactgcttcacccaaagccttcctgggatgcagcccaactsctcacagccagaggagcactctgcagyccagttatttacaggctgcccaaaaggcagctccaagagagcagttccttgcactgctgctgtgctcagagcacgcagaggcagtgacagcacagcacccagcaacagcagcctgaagctgaagggcacgtggtgatggggaatagagcaggactccatcttctgagctcccttccaacccctgtgatgctgtggatgtgaagagccaagaaaagccatggatgtgagctgctgttatccaacagagcctgaggagatcgtcaacagccccat

SEQ ID NO: 72281 - DNA, 600 bp, Chicken  19866894352080_4
tttccccagcactcattcactgatagctcttgcacgaakgtttttgatatggtggtttccttagcatggtatgaataaatgcttcccaggatggcattggttcaktctttccttatatgctttccagagccaatgaagaaaggaatggagaaggaaaccacctgggtctgtgctgaatcagctcatggtgttgaactgagacacccctccattaccagctcccagctatgcccactgcttcacccaaagccttcctgggatgcagcccaactsctcacagccagaggagcactctgcagyccagttatttacaggctgcccaaaaggcagctccaagagagcagttccttgcactgctgctgtgctcagagcacgcagaggcagtgacagcacagcacccagcaacagcagcctgaagctgaagggcacgtggtgatggggaatagagcaggactccatcttctgagctcccttccaacccctgtgatgctgtggatgtgaagagccaagaaaagccatggatgtgagctgctgttatccaacagagcctgaggagatcgtcaacagccccatgccagaccccagacagccctaggagca

SEQ ID NO: 72282 - DNA, 600 bp, Chicken  19866894352085_1
aatgcctttcctcagcaaatcagaaccagagtctaatttgagtcaaattaaaataattaattctaataattaatttcaataattctgaaacatccccattccaactgcagttgctttaaatttttttagcataattatccaataagtatttttttaagaaaataccaggtcaaaaacaagtaaaaataaatttttagaagatctcatctcacatctctttgttctgagtcctgctcaaataaaattttgtggaaattggcaacttcctctggttcacgtgcctgatttttcaggcaaaaygagacaaaagagtgccttcaaaacctttctcccagctatgtgaagtgcccaaccagggagatgcaargcccatagggaagcagtgttgccctttcaactactctggtttgccatggttgtaatagctggcaattggacacagggatccaatagagtccctagttkcctggtccctacccatgctagatgtgmagcatcttttcaawgccatctcacaacagctgatagccttcttgctagcctcaagcagcttcacaggagagatttaaatggttggggatgtctgagggagattatatt

SEQ ID NO: 72283 - DNA, 600 bp, Chicken  19866894352085_2
aattaatttcaataattctgaaacatccccattccaactgcagttgctttaaatttttttagcataattatccaataagtatttttttaagaaaataccaggtcaaaaacaagtaaaaataaatttttagaagatctcatctcacatctctttgttctgagtcctgctcaaataaaattttgtggaaattggcaacttcctctggttcacgtgcctgatttttcaggcaaaaygagacaaaagagtgccttcaaaacctttctcccagctatgtgaagtgcccaaccagggagatgcaargcccatagggaagcagtgttgccctttcaactactctggtttgccatggttgtaatagctggcaattggacacagggatccaatagagtccctagttkcctggtccctacccatgctagatgtgmagcatcttttcaawgccatctcacaacagctgatagccttcttgctagcctcaagcagcttcacaggagagatttaaatggttggggatgtctgagggagattatattcctctggcctctatttaaatgaagctgctattcatttgctagggtttctaattaccagtgctataat

SEQ ID NO: 72284 - DNA, 600 bp, Chicken  19866894352085_3
caggtcaaaaacaagtaaaaataaatttttagaagatctcatctcacatctctttgttctgagtcctgctcaaataaaattttgtggaaattggcaacttcctctggttcacgtgcctgatttttcaggcaaaaygagacaaaagagtgccttcaaaacctttctcccagctatgtgaagtgcccaaccagggagatgcaargcccatagggaagcagtgttgccctttcaactactctggtttgccatggttgtaatagctggcaattggacacagggatccaatagagtccctagttkcctggtccctacccatgctagatgtgmagcatcttttcaawgccatctcacaacagctgatagccttcttgctagcctcaagcagcttcacaggagagatttaaatggttggggatgtctgagggagattatattcctctggcctctatttaaatgaagctgctattcatttgctagggtttctaattaccagtgctataattgaaataccggagtaatctgtttgaagaaggggaggagggggcagagtcattttattaaaacgtggggtggtaagcttggtgccaaagtgagctgaaa

SEQ ID NO: 72285 - DNA, 600 bp, Chicken  19866894352085_4
tttagaagatctcatctcacatctctttgttctgagtcctgctcaaataaaattttgtggaaattggcaacttcctctggttcacgtgcctgatttttcaggcaaaaygagacaaaagagtgccttcaaaacctttctcccagctatgtgaagtgcccaaccagggagatgcaargcccatagggaagcagtgttgccctttcaactactctggtttgccatggttgtaatagctggcaattggacacagggatccaatagagtccctagttkcctggtccctacccatgctagatgtgmagcatcttttcaawgccatctcacaacagctgatagccttcttgctagcctcaagcagcttcacaggagagatttaaatggttggggatgtctgagggagattatattcctctggcctctatttaaatgaagctgctattcatttgctagggtttctaattaccagtgctataattgaaataccggagtaatctgtttgaagaaggggaggagggggcagagtcattttattaaaacgtggggtggtaagcttggtgccaaagtgagctgaaaaaatgtaattcagctcagacagatcca

SEQ ID NO: 72286 - DNA, 600 bp, Chicken  19866894352085_5
tctcacatctctttgttctgagtcctgctcaaataaaattttgtggaaattggcaacttcctctggttcacgtgcctgatttttcaggcaaaaygagacaaaagagtgccttcaaaacctttctcccagctatgtgaagtgcccaaccagggagatgcaargcccatagggaagcagtgttgccctttcaactactctggtttgccatggttgtaatagctggcaattggacacagggatccaatagagtccctagttkcctggtccctacccatgctagatgtgmagcatcttttcaawgccatctcacaacagctgatagccttcttgctagcctcaagcagcttcacaggagagatttaaatggttggggatgtctgagggagattatattcctctggcctctatttaaatgaagctgctattcatttgctagggtttctaattaccagtgctataattgaaataccggagtaatctgtttgaagaaggggaggagggggcagagtcattttattaaaacgtggggtggtaagcttggtgccaaagtgagctgaaaaaatgtaattcagctcagacagatccaggcaaagacaaggg

SEQ ID NO: 72287 - DNA, 600 bp, Chicken  19866894352088_1
gttaagactattgagaggtgacaagatcattggttttggtctattcagaaccatggctctctgttctcaacacaccacagactttgccagacattggatggaatgttatcttcttctcctttgagctttgaagaaaatgtagcactatggaatgcatccttttgggggacagcctccagcaactggcagacaacctatcctcatccatctctacctcaatcactgtttcctcttgcagaaatatgaagtgccattttgatgctattatttccaaagactccaagttcatactacattttygctttcgcatctctctcttcttatacatctgcaactccctgaagctgtaacatcagtttataatgttgcaaacacatttgttttcagttttgcatttaacaatctgtcagcaggtccaaactgttgctctcttggtgctgcaatttaacatgctaatacagattggtttgactctacatatttttttactccaaggtctctgtccagagtaggatctcaaatcttcacgcttcccatgcagcattttctaatcatttcaagttcatcctggacatctcaagtttaacaataacaaatctg

SEQ ID NO: 72288 - DNA, 600 bp, Chicken  19866894352094_1
aaaaaaaaaaaatgttcaccccagatgacaagaggagtcaaattctgcaaagctgtctttaatcttgaggcaattgcttttttccttttgactactccatgttgtcctattttgtgttgccccaggcctttagtccatctggccaataggtgaatctaccgctgccatctgtcatttgtgacaatttttaaagagctgtaatatataggaagaatgcaaacaacagacataaattctgattggtctttctataaagagcctggagaatcaagaaaactttattactgtctcttccctgcwttatgtaagaataaggaagaagaaatgagaaacattaattctcttactctgcaaagatacatttctgagcgcagttaatcaattgttaaaacatcaacttggaatctgaaacaaaaatggmtctygcagagcttaattaattattttcttggactgaccttgccaccaccaggaactcttgtgtggtgtactgcacaatcctactttttctcttgagtatttttctgctaggagtcttttccagacatcaatgaggagtgacttaaaatgcataaatctaaaataaaaaagaagaaaagc

SEQ ID NO: 72289 - DNA, 600 bp, Chicken  19866894352094_2
ccaggcctttagtccatctggccaataggtgaatctaccgctgccatctgtcatttgtgacaatttttaaagagctgtaatatataggaagaatgcaaacaacagacataaattctgattggtctttctataaagagcctggagaatcaagaaaactttattactgtctcttccctgcwttatgtaagaataaggaagaagaaatgagaaacattaattctcttactctgcaaagatacatttctgagcgcagttaatcaattgttaaaacatcaacttggaatctgaaacaaaaatggmtctygcagagcttaattaattattttcttggactgaccttgccaccaccaggaactcttgtgtggtgtactgcacaatcctactttttctcttgagtatttttctgctaggagtcttttccagacatcaatgaggagtgacttaaaatgcataaatctaaaataaaaaagaagaaaagctgccacttcagtccccaggctgctcacttgatattctctagccccctctaagccagccatcaatgccactaacagtgaaagtgagaagcgcagtgttgctgatgctagcacctctgtgtca

SEQ ID NO: 72290 - DNA, 600 bp, Chicken  19866894352094_3
gcctttagtccatctggccaataggtgaatctaccgctgccatctgtcatttgtgacaatttttaaagagctgtaatatataggaagaatgcaaacaacagacataaattctgattggtctttctataaagagcctggagaatcaagaaaactttattactgtctcttccctgcwttatgtaagaataaggaagaagaaatgagaaacattaattctcttactctgcaaagatacatttctgagcgcagttaatcaattgttaaaacatcaacttggaatctgaaacaaaaatggmtctygcagagcttaattaattattttcttggactgaccttgccaccaccaggaactcttgtgtggtgtactgcacaatcctactttttctcttgagtatttttctgctaggagtcttttccagacatcaatgaggagtgacttaaaatgcataaatctaaaataaaaaagaagaaaagctgccacttcagtccccaggctgctcacttgatattctctagccccctctaagccagccatcaatgccactaacagtgaaagtgagaagcgcagtgttgctgatgctagcacctctgtgtcaattg

SEQ ID NO: 72291 - DNA, 600 bp, Chicken  19866894352095_1
cagttctgtatttctgtgattttaaagtttcaaacttcccttctcctcttcagtagttgtcctttaaattaataaccaaattaacaaacaacgagctttgcttttggactgactttttctgtcattttttgacttgagacacatttttttttttttccaaatgagttaaatactcctcaaaaatcttctgatagaagacatactgatgcagctttggtaagaggaggctctaattggtgcagatggatggctgcaaaactgtcagtttagctctacgatattcactaagcagacaaaggmgtttatatgtaaactatagaacaaagcagttcatatgtgaattatagtatttcttttctggttagtttcacgctgacatgtatttccatttgtactcattttgtttctcactgattaaattatttcccaaatcaccttgtttttttccatccttccttatagttaagtaccactaccaagttcttttttgctcaatttacgtactaaatgcagtaaaatgtgttattgcacaagaagtgcatgcctctgaatgtgacaatctgaaaacatgttattttccatgttaaagtgggtttaaca

SEQ ID NO: 72292 - DNA, 600 bp, Chicken  19866894352097_1
tgactttttggtatgtgcactcaaattgcccagtttccacgttttgatgttcagattttttctttcatccaatctgagatagcaattaaatgtgtgccatttcaatgtcaatcttgtttactttgaaagattcccacaggatcagagctctgtggcagacaaagctccctttcttctacctgatttggagactaatagagaatttgtccaagttttaaagtcaaacagaaaacgttcaaatctaagcactaaagcttttttttctttaaataataattgtaaaaataaaaagttagatgytgtttacagtatacaatcattatttatttaggtgtttgtcattgttgatttaattgcttatttttgataaggttgtgtcatgtgctggagtgaccagatttccctgcagctctgttaggaaaattggcgtgctgagattgttcttaaaaaaaatattcttcatatccacaagaaatggatttgccaaagcaaagcttgaacttctacatgctcatacctgggagagaagttagccggcacttgagttttcagttggaatttgttacagaagttgaaatgcctttttttttcttttttctt

SEQ ID NO: 72293 - DNA, 599 bp, Chicken  19866894352106_1
  misc_feature (1)..(177): n is any nucleotide
nnnnnnnnnnnnnnnnnnnnnnnnnnnnnnnnnnnnnnnnnnnnnnnnnnnnnnnnnnnnnnnnnnnnnnnnnnnnnnnnnnnnnnnnnnnnnnnnnnnnnnnnnnnnnnnnnnnnnnnnnnnnnnnnnnnnnnnnnnnnnnnnnnnnnnnnnnnnnnnnnnnnnnnnnnnnnnnnntgtctgcagtactgcagacagcttttcttatccagactccagtaactcatcctgagaccttccgctcaccatcaaagaaagccaccctacaaagagagacagaatgagtaacttagttcattyacaagaaatgcataactgctggaactataaaagagagcttatctaagtcctttatgccaaatcatttattaccctcaaagtactacagcaaatgcagcccttcattctccaaacacaccagcccacctccagagacgcacaggaaaggacaggtgcagatagagcccctgcaaccagctggaccccatggggcagctcccaccagcacagcgttgccgagccacagagcaccctgctgctacagccagccccacagccctgcaggccatcacatggccacgagagaggatcgatcggat

SEQ ID NO: 72294 - DNA, 600 bp, Chicken  19866894352117_1
aaacggttgtgttttcaccactgcttcagctcaatcactcacgtgtgagcacacaaactccagaggactttgggatacccaaagcattcacttttccctccccgtgagcaaacgtcacttcaaaaggggagcgcgccaagggcggaaatgcagcagagcatccacgactggagcagcagtttcttctggttttttttccatgttatcctctttggaacctttcctgaaagccactcaccttctgctaacagggaggaaagtgtgcctttgggcaccagcaccacttcaaatggccacgcmggacggggacccaaatatcagtgccatgarggcaccgaagcaccaaaaaggcgaaatcaaaactgcaaaagctttcagaactctcccgatttcagttgtggttacagttaacacttgttatttaatggtttttgcaacttttcaggccatgttagtgcctctctgtgccctagattttagccccatgtgactgaaattggggctttgcaggttcctatcacaaactcttctctttccgaagagaaaggagagaaagatgcaaggcaaatggaacaaaaaaaagagaaagggctcaagata

SEQ ID NO: 72295 - DNA, 600 bp, Chicken  19866894352117_2
tcaatcactcacgtgtgagcacacaaactccagaggactttgggatacccaaagcattcacttttccctccccgtgagcaaacgtcacttcaaaaggggagcgcgccaagggcggaaatgcagcagagcatccacgactggagcagcagtttcttctggttttttttccatgttatcctctttggaacctttcctgaaagccactcaccttctgctaacagggaggaaagtgtgcctttgggcaccagcaccacttcaaatggccacgcmggacggggacccaaatatcagtgccatgarggcaccgaagcaccaaaaaggcgaaatcaaaactgcaaaagctttcagaactctcccgatttcagttgtggttacagttaacacttgttatttaatggtttttgcaacttttcaggccatgttagtgcctctctgtgccctagattttagccccatgtgactgaaattggggctttgcaggttcctatcacaaactcttctctttccgaagagaaaggagagaaagatgcaaggcaaatggaacaaaaaaaagagaaagggctcaagatatcccaaaacatcccyacaaaagtactgcta

SEQ ID NO: 72296 - DNA, 454 bp, Chicken  19866894352117_3
tatcagtgccatgarggcaccgaagcaccaaaaaggcgaaatcaaaactgcaaaagctttcagaactctcccgatttcagttgtggttacagttaacacttgttatttaatggtttttgcaacttttcaggccatgttagtgcctctctgtgccctagattttagccccatgtgactgaaattggggctttgcaggttcctatcacaaactcttctctttccgaagagaaaggagagaaagatgcaaggcaaatggaacaaaaaaaagagaaagggctcaagatatcccaaaacatcccyacaaaagtactgctaaagccctctacctgtgcatttccaccctgttgcactgcctttaatggttacaggcaatgctccagcattacagagcagagctgagcactctgcctccttttccaaccacagcacagagccatgcacaggaaagcagccc

SEQ ID NO: 72297 - DNA, 599 bp, Chicken  19866894352120_1
  misc_feature (1)..(190): n is any nucleotide
nnnnnnnnnnnnnnnnnnnnnnnnnnnnnnnnnnnnnnnnnnnnnnnnnnnnnnnnnnnnnnnnnnnnnnnnnnnnnnnnnnnnnnnnnnnnnnnnnnnnnnnnnnnnnnnnnnnnnnnnnnnnnnnnnnnnnnnnnnnnnnnnnnnnnnnnnnnnnnnnnnnnnnnnnnnnnnnnnnnnnnnnnnnnnnttgcaggagtttggcatcaccagctgcacgcagagtaaaagtggggtccagtccttggaaatgccacgtgctactttagatgctaaaagcagtgatgagcacctgccctstcctcgcctgctgcaycagcagcacttctggtgtgggatgggaggggacaaacccagccttgtccagctttgttctcagagatggagtggattctgccttgtgcgtaatcactgccacgagtggagctgccttcagtcactccttgggttctctaacccactccccatgtctcatttcacctgagcccagccagcccaggtggcttgaactccccartcaagagcagctgacccaaagtatycaccaggctgtctcctgccctgggcctggcccctgtctctgcttgttttattccttc

SEQ ID NO: 72298 - DNA, 599 bp, Chicken  19866894352120_2
  misc_feature (1)..(174): n is any nucleotide
nnnnnnnnnnnnnnnnnnnnnnnnnnnnnnnnnnnnnnnnnnnnnnnnnnnnnnnnnnnnnnnnnnnnnnnnnnnnnnnnnnnnnnnnnnnnnnnnnnnnnnnnnnnnnnnnnnnnnnnnnnnnnnnnnnnnnnnnnnnnnnnnnnnnnnnnnnnnnnnnnnnnnnnnnnnnnnttgcaggagtttggcatcaccagctgcacgcagagtaaaagtggggtccagtccttggaaatgccacgtgctactttagatgctaaaagcagtgatgagcacctgccctstcctcgcctgctgcaycagcagcacttctggtgtgggatgggaggggacaaacccagccttgtccagctttgttctcagagatggagtggattctgccttgtgcgtaatcactgccacgagtggagctgccttcagtcactccttgggttctctaacccactccccatgtctcatttcacctgagcccagccagcccaggtggcttgaactccccartcaagagcagctgacccaaagtatycaccaggctgtctcctgccctgggcctggcccctgtctctgcttgttttattccttctctgaggtttgttggt

SEQ ID NO: 72299 - DNA, 600 bp, Chicken  19866894352120_3
acgcagagtaaaagtggggtccagtccttggaaatgccacgtgctactttagatgctaaaagcagtgatgagcacctgccctstcctcgcctgctgcaycagcagcacttctggtgtgggatgggaggggacaaacccagccttgtccagctttgttctcagagatggagtggattctgccttgtgcgtaatcactgccacgagtggagctgccttcagtcactccttgggttctctaacccactccccatgtctcatttcacctgagcccagccagcccaggtggcttgaactccccartcaagagcagctgacccaaagtatycaccaggctgtctcctgccctgggcctggcccctgtctctgcttgttttattccttctctgaggtttgttggtgtcacagctgaacacagggaactcttctgtggctttcactcattcacgctctctctgtgccactgcatttaagcgtagacctaatgcactacagcagggagcttgtcacaacatgttagcagggtatctctggattattcccttccataggctgaaccacatctcactttctgggaatattttaagaatttttgctatgtgt

SEQ ID NO: 72300 - DNA, 600 bp, Chicken  19866894352120_4
ccttggaaatgccacgtgctactttagatgctaaaagcagtgatgagcacctgccctstcctcgcctgctgcaycagcagcacttctggtgtgggatgggaggggacaaacccagccttgtccagctttgttctcagagatggagtggattctgccttgtgcgtaatcactgccacgagtggagctgccttcagtcactccttgggttctctaacccactccccatgtctcatttcacctgagcccagccagcccaggtggcttgaactccccartcaagagcagctgacccaaagtatycaccaggctgtctcctgccctgggcctggcccctgtctctgcttgttttattccttctctgaggtttgttggtgtcacagctgaacacagggaactcttctgtggctttcactcattcacgctctctctgtgccactgcatttaagcgtagacctaatgcactacagcagggagcttgtcacaacatgttagcagggtatctctggattattcccttccataggctgaaccacatctcactttctgggaatattttaagaatttttgctatgtgttgtacaaagcacaggaaacagctcc

SEQ ID NO: 72301 - DNA, 600 bp, Chicken  19866894352122_1
tccacactctcccactagtgtgtttattttggttggtttttagcgtgacttcttgtagactcatccattgcggttttgcactgttgaaagggggttattcaacggaaagtttgcaaacaggaaaatggtccccggcctccgccacgggagggttggcatctcctgcagcttctgcaaggctctgagctgaccgcgcagtcgtggcccctggggttcctgtctagtgggtgggagctgtgttagatgaattgctttggtgtaagtaggtaacatgttcacaagagaacaaattcccttctkctgccgctgacaggcaagaaactggagtcagaaggagatcagttgttgaaagtttgagcaaatctggctctgggctgttgtttgcattgcccgtgtttgccttccaagtgtggcagccctgcagcgtggcagcggagtggggaagcgctgccccaaacctccctttcggagcggaaatgccagcggtgctttgtggcgcacaaatttggttaaatagatgaatcggaaactcatctggctgctttgagccttcactaattaaacccacccatggtttgacagcccagtgtgcacggtccc

SEQ ID NO: 72302 - DNA, 599 bp, Chicken  19866894352124_1
  misc_feature (1)..(87): n is any nucleotide
nnnnnnnnnnnnnnnnnnnnnnnnnnnnnnnnnnnnnnnnnnnnnnnnnnnnnnnnnnnnnnnnnnnnnnnnnnnnnnnnnnnnnnnaaaatgaaagcaggaagaaaatgttggtgaacttctttattcttctccttgtgcacagaggagcagtactgccccttatttaaaaaagcagcaacaaaccaaatgaaaaaccatagcaacaactgtaagatggctgaggcaaatttttctcagtaaagatttctggtttactgcctgtgctctccacagggtaggtcagcatcaaattttacrtgcttttgatacttatccactatccacttgggataagacaacatatacgtaatagaatttgactatcccyttaatccgaaactcaagaaagggggcaaacacaatatggacagaaagtatcatgtaggctataagggtggaggctggagtctgatggtgtcagagtgcagtagctgttttcaaccatgagtgtctagataacttttctattttaatacctgaacaaaatgactgacagagtaaatgtaaatgcttaattagttgcatactttcacatttcacttgcagcagtaattgca

SEQ ID NO: 72303 - DNA, 599 bp, Chicken  19866894352124_2
  misc_feature (1)..(17): n is any nucleotide
nnnnnnnnnnnnnnnnnaaaatgaaagcaggaagaaaatgttggtgaacttctttattcttctccttgtgcacagaggagcagtactgccccttatttaaaaaagcagcaacaaaccaaatgaaaaaccatagcaacaactgtaagatggctgaggcaaatttttctcagtaaagatttctggtttactgcctgtgctctccacagggtaggtcagcatcaaattttacrtgcttttgatacttatccactatccacttgggataagacaacatatacgtaatagaatttgactatcccyttaatccgaaactcaagaaagggggcaaacacaatatggacagaaagtatcatgtaggctataagggtggaggctggagtctgatggtgtcagagtgcagtagctgttttcaaccatgagtgtctagataacttttctattttaatacctgaacaaaatgactgacagagtaaatgtaaatgcttaattagttgcatactttcacatttcacttgcagcagtaattgcaatcttggaagcctcttttatgttgacccagaatttgtatctggtatttgtatctgctatgaaaattgcat

SEQ ID NO: 72304 - DNA, 600 bp, Chicken  19866894352127_1
cttcatgataagaacatttttttctcttcttgaggcatttggccaagtattaaggaagtctcaagaaaaacatgggaaggaaaagcatctgttaaagtgtacttaaaatgcattcatccaagggaagcataagtgtcatatccaatttccccacacacggtgcagtacgaatctctactgcgggtattttgtggaagtatttaatggatgtaagtataatgggaaaatggaaggcttagcccagcggttttcatgggatcatacactgcattggctcgttctttagacgtgaaatcatcrctragcatctcattgacagatggattaagaataaaaaaaataaatgcagtgttttaagcaaaatatctattatctgcttggcacagtcctccatgttccaaaaagcaattctacatctttcagggaaaccatgcaaaactaagtgctcgcttcatttccttccctctgcactgaatggctgaaaggagatgcagtgtaaaatgaggttttctaagtcagcaccagcgacctgtgaatccaggggaaccacaaacagctccttccatgggctctgctcaaattaagctgaaacctttcctg

SEQ ID NO: 72305 - DNA, 600 bp, Chicken  19866894352127_2
catgataagaacatttttttctcttcttgaggcatttggccaagtattaaggaagtctcaagaaaaacatgggaaggaaaagcatctgttaaagtgtacttaaaatgcattcatccaagggaagcataagtgtcatatccaatttccccacacacggtgcagtacgaatctctactgcgggtattttgtggaagtatttaatggatgtaagtataatgggaaaatggaaggcttagcccagcggttttcatgggatcatacactgcattggctcgttctttagacgtgaaatcatcrctragcatctcattgacagatggattaagaataaaaaaaataaatgcagtgttttaagcaaaatatctattatctgcttggcacagtcctccatgttccaaaaagcaattctacatctttcagggaaaccatgcaaaactaagtgctcgcttcatttccttccctctgcactgaatggctgaaaggagatgcagtgtaaaatgaggttttctaagtcagcaccagcgacctgtgaatccaggggaaccacaaacagctccttccatgggctctgctcaaattaagctgaaacctttcctgtct

SEQ ID NO: 72306 - DNA, 600 bp, Chicken  19866894352127_3
tttctaagtcagcaccagcgacctgtgaatccaggggaaccacaaacagctccttccatgggctctgctcaaattaagctgaaacctttcctgtctcttcctgacctttgtttttttttttttttggcttcagcaaaggtcagctgtgctgcagcacacgttttagagaacatttattctccgctcactgttgtcagccctctctgaagtaagaaaacaaagacacttcagcccacctttgctcatgctgctcgctgagaacgttccccaccttccaggctgctgggagggacggtctgytctgccctctgatgctccagtttaggacgcagggttgggcacgttgagtcacacagcaattacatgcattggtcggagctgctctccacccccaacctgacagagagatgccatatgttgaacaatttcatatttcaagatcraaggtcttgagtgcataacaaattacatgcttctaaaagtgaaacagactgaatacatagcttgttagtgcctgcctacagaataccccaagctctgatgtcattgctactgagatgtggaatctggaggatgttagccaagcacacacacaagctt

SEQ ID NO: 72307 - DNA, 600 bp, Chicken  19866894352127_4
ctgtgctgcagcacacgttttagagaacatttattctccgctcactgttgtcagccctctctgaagtaagaaaacaaagacacttcagcccacctttgctcatgctgctcgctgagaacgttccccaccttccaggctgctgggagggacggtctgytctgccctctgatgctccagtttaggacgcagggttgggcacgttgagtcacacagcaattacatgcattggtcggagctgctctccacccccaacctgacagagagatgccatatgttgaacaatttcatatttcaagatcraaggtcttgagtgcataacaaattacatgcttctaaaagtgaaacagactgaatacatagcttgttagtgcctgcctacagaataccccaagctctgatgtcattgctactgagatgtggaatctggaggatgttagccaagcacacacacaagcttccagcatcaggttgctaactgtaaccaaattcctcttcayagyacatttwgcagcactgaaacaggagaggtttcttgctgaaaccagacagcattatggcacacaaaatgaagaggacagaatctcccacttctgctgactt

SEQ ID NO: 72308 - DNA, 600 bp, Chicken  19866894352127_5
acgttgagtcacacagcaattacatgcattggtcggagctgctctccacccccaacctgacagagagatgccatatgttgaacaatttcatatttcaagatcraaggtcttgagtgcataacaaattacatgcttctaaaagtgaaacagactgaatacatagcttgttagtgcctgcctacagaataccccaagctctgatgtcattgctactgagatgtggaatctggaggatgttagccaagcacacacacaagcttccagcatcaggttgctaactgtaaccaaattcctcttcayagyacatttwgcagcactgaaacaggagaggtttcttgctgaaaccagacagcattatggcacacaaaatgaagaggacagaatctcccacttctgctgactttcctctttctctgaacctatccccgagtctctggagatgacttcagtgtcatgttttgtctttcaggtttggcttcatttacaacaaatcaaaacccgccgtccacaagatcgacttggagacagtgacccacatcaagaccatcagcttcaggaactacagctgcgcaccacagaccatggcctacacccacctgg

SEQ ID NO: 72309 - DNA, 600 bp, Chicken  19866894352127_6
ttgagtcacacagcaattacatgcattggtcggagctgctctccacccccaacctgacagagagatgccatatgttgaacaatttcatatttcaagatcraaggtcttgagtgcataacaaattacatgcttctaaaagtgaaacagactgaatacatagcttgttagtgcctgcctacagaataccccaagctctgatgtcattgctactgagatgtggaatctggaggatgttagccaagcacacacacaagcttccagcatcaggttgctaactgtaaccaaattcctcttcayagyacatttwgcagcactgaaacaggagaggtttcttgctgaaaccagacagcattatggcacacaaaatgaagaggacagaatctcccacttctgctgactttcctctttctctgaacctatccccgagtctctggagatgacttcagtgtcatgttttgtctttcaggtttggcttcatttacaacaaatcaaaacccgccgtccacaagatcgacttggagacagtgacccacatcaagaccatcagcttcaggaactacagctgcgcaccacagaccatggcctacacccacctggggg

SEQ ID NO: 72310 - DNA, 600 bp, Chicken  19866894352127_7
acacagcaattacatgcattggtcggagctgctctccacccccaacctgacagagagatgccatatgttgaacaatttcatatttcaagatcraaggtcttgagtgcataacaaattacatgcttctaaaagtgaaacagactgaatacatagcttgttagtgcctgcctacagaataccccaagctctgatgtcattgctactgagatgtggaatctggaggatgttagccaagcacacacacaagcttccagcatcaggttgctaactgtaaccaaattcctcttcayagyacatttwgcagcactgaaacaggagaggtttcttgctgaaaccagacagcattatggcacacaaaatgaagaggacagaatctcccacttctgctgactttcctctttctctgaacctatccccgagtctctggagatgacttcagtgtcatgttttgtctttcaggtttggcttcatttacaacaaatcaaaacccgccgtccacaagatcgacttggagacagtgacccacatcaagaccatcagcttcaggaactacagctgcgcaccacagaccatggcctacacccacctgggggggggtac

SEQ ID NO: 72311 - DNA, 600 bp, Chicken  19866894352135_1
cacattcccagcaaaaaaaaaaaaaaaaataaaaatgacacacatctaaacgaaaataaagaagggggggaagggcgaggagcagctggggcagggagcagtggcagcagagaagtccaatggatgcatggaaatcaatgaaggtgtggtgctcgctccccaccctaccgttcagcacagttgtcctggcaacggaagactgtcatcttcttgtagtcaaagaaggacacaccacgcagcgtgcggctccgagtgttgtccacgtagcaaccgatgtaccttgctggggagggagaggaragggtcagagcctgcagatagtgaggatttttattattattatttctaatagggatgtgctgcagtgctctggcaactcaggacaggacagggaggaaccaaagggtcctcaggaggacatggatgggagcagagctattgggttagggagaaatgcagtgtgaaccaaatttctttcagccaggaactcatgtttccccagccccagacatcaacacagacaatatttgcccagcactaacagttggcaaagtaaagagcgatggctgtgctgagagcaaacgaggatggtcggtggac

SEQ ID NO: 72312 - DNA, 600 bp, Chicken  19866894352135_2
agggaacagagctgaataaatagttacaatgaaatcattcatttgaataaatttagccttttccaataatctgagaacaaacagttatgccctcactgcattccttcctcacagctgtgcccaccatggacagcacccatccagctgtgcccaccatggacagcacccatccagctgtgcttctccacccctacaccaaaccaacagcgagatgccttcacacagcacgccctccctaccaaaataccaccatttcccacctcctgcctgcattgtgcatctgctgagggtcctgcagcrgccccacatcctgcaccccattgctgccatgcccctgtgcacaaccccatccatgctgcagtccagttttccaagccagcccaggcatggggtggaggaaggcagaaagcaacattcctaataactcgaaccaccacgcagtcatcgttcattgctcccaattgctctcagcataacttggcatttccgcagcgctgagcaggtttcggcaggtcagctaatttagttcgtgacagatctaaccagcacaggattgctctggcaattttcacagggccaatgactgatgtgcattacgtt

SEQ ID NO: 72313 - DNA, 600 bp, Chicken  19866894352139_1
gatgcaactgtaaacataaattttaatgtcattcatcctccaatattcttttaagacagctttatcttttacgtagttacacttctaataaatatctaatgctttctgtgtgataatatctgttatctcagtatgtgcttgtgagatgcgtgcctgtacgtatgtgtattatcagcattacagctaggtagatgaaatcacaccggtgatcctgggtttgcactgtgtttacctgatcagctaccatttgactaaatccctgaggatgcttttgggtacttccagcttccttttttttcrtttttttttctttgaatagtaattgcaagcatttaataccttttgtttgaatgttatgaaaatgttgaccaactaaggaatcagatgaaaccaaacagagttcataaattgcctccaaaatagagagraayaagaactgtactagtagctgttaggtgctgactgtggtggctgcccctggaccatcctcacatctcttcaagttggagatacagaataggcaacactgacaaccaaagtgaaattaaaacacaacaaagtgaaaacatattaacccaaccaataaaaataataacatta

SEQ ID NO: 72314 - DNA, 600 bp, Chicken  19866894352139_2
cagtatgtgcttgtgagatgcgtgcctgtacgtatgtgtattatcagcattacagctaggtagatgaaatcacaccggtgatcctgggtttgcactgtgtttacctgatcagctaccatttgactaaatccctgaggatgcttttgggtacttccagcttccttttttttcttttttttttctttgaatagtaattgcaagcatttaataccttttgtttgaatgttatgaaaatgttgaccaactaaggaatcagatgaaaccaaacagagttcataaattgcctccaaaatagagagraayaagaactgtactagtagctgttaggtgctgactgtggtggctgcccctggaccatcctcacatctcttcaagttggagatacagaataggcaacactgacaaccaaagtgaaattaaaacacaacaaagtgaaaacatattaacccaaccaataaaaataataacattaatgataatcaagcaacccgactgcagattgtgctctgaaccttgccaaatttggggctgctggcaggccaccaagaacagcaaatacaacagacaagggcccctcatttgagaaagcyttgctgcagt

SEQ ID NO: 72315 - DNA, 600 bp, Chicken  19866894352139_3
tatgtgcttgtgagatgcgtgcctgtacgtatgtgtattatcagcattacagctaggtagatgaaatcacaccggtgatcctgggtttgcactgtgtttacctgatcagctaccatttgactaaatccctgaggatgcttttgggtacttccagcttccttttttttcttttttttttctttgaatagtaattgcaagcatttaataccttttgtttgaatgttatgaaaatgttgaccaactaaggaatcagatgaaaccaaacagagttcataaattgcctccaaaatagagagraayaagaactgtactagtagctgttaggtgctgactgtggtggctgcccctggaccatcctcacatctcttcaagttggagatacagaataggcaacactgacaaccaaagtgaaattaaaacacaacaaagtgaaaacatattaacccaaccaataaaaataataacattaatgataatcaagcaacccgactgcagattgtgctctgaaccttgccaaatttggggctgctggcaggccaccaagaacagcaaatacaacagacaagggcccctcatttgagaaagcyttgctgcagtctc

SEQ ID NO: 72316 - DNA, 440 bp, Chicken  19866894352139_4
aatagagagraayaagaactgtactagtagctgttaggtgctgactgtggtggctgcccctggaccatcctcacatctcttcaagttggagatacagaataggcaacactgacaaccaaagtgaaattaaaacacaacaaagtgaaaacatattaacccaaccaataaaaataataacattaatgataatcaagcaacccgactgcagattgtgctctgaaccttgccaaatttggggctgctggcaggccaccaagaacagcaaatacaacagacaagggcccctcatttgagaaagcyttgctgcagtctccagagagcttttccctccgaactaactgcagagcatcccagccagtccgaacagacactgtggaattacagcatgagatttctgtgaagtgagattaagctaaacttgaatcttgtgtgaattcaaa

SEQ ID NO: 72317 - DNA, 599 bp, Chicken  19866894352141_1
  misc_feature (1)..(179): n is any nucleotide
nnnnnnnnnnnnnnnnnnnnnnnnnnnnnnnnnnnnnnnnnnnnnnnnnnnnnnnnnnnnnnnnnnnnnnnnnnnnnnnnnnnnnnnnnnnnnnnnnnnnnnnnnnnnnnnnnnnnnnnnnnnnnnnnnnnnnnnnnnnnnnnnnnnnnnnnnnnnnnnnnnnnnnnnnnnnnnnnnnngcttgcctgcctgtcgggtggctgatgaagcaatggccatttgtccttcagatccccacctcacgagccatctttactgtgatttacaatatgctcctactgctcccggtggcatttagaygtgtggcagattgtgacttttgctgcccgtcactttattactcttctgaattttgcaaacagcagatctgtgatgaagtgccttcatctcttattacatcatctttcatttctcccgactacgttgtctgacacagggatgccttttcctctgagtctacagagtgtctgcaatcatgttaccaagacgtctcagtaaatgtggcacaaagtacactgttttaatggctgaaattgctgcaattgtctgagggtacgaacggcctgacattggcacaggctgcccagkgaggtggtgga

SEQ ID NO: 72318 - DNA, 600 bp, Chicken  19866894352141_2
tggcatttagaygtgtggcagattgtgacttttgctgcccgtcactttattactcttctgaattttgcaaacagcagatctgtgatgaagtgccttcatctcttattacatcatctttcatttctcccgactacgttgtctgacacagggatgccttttcctctgagtctacagagtgtctgcaatcatgttaccaagacgtctcagtaaatgtggcacaaagtacactgttttaatggctgaaattgctgcaattgtctgagggtacgaacggcctgacattggcacaggctgcccagkgaggtggtggagtcaccatccctggaggagtgcaaggagygtggagatgaagcactgagggatgtggtcactgggcatggttgggggtggactggggttggactgggtgaccttagcgattccatgattctaggaacagcctctgcctaacttgaaacatgctgggctttgttcagcagctcagaagggagatgcrttagatttatgttggcctttgcagtgaggttccttttggatagaggctatcgatttaacgcttggaagaacgtgggatatccacagctgaagcacaggctcggt

SEQ ID NO: 72319 - DNA, 600 bp, Chicken  19866894352141_3
gtcactttattactcttctgaattttgcaaacagcagatctgtgatgaagtgccttcatctcttattacatcatctttcatttctcccgactacgttgtctgacacagggatgccttttcctctgagtctacagagtgtctgcaatcatgttaccaagacgtctcagtaaatgtggcacaaagtacactgttttaatggctgaaattgctgcaattgtctgagggtacgaacggcctgacattggcacaggctgcccagkgaggtggtggagtcaccatccctggaggagtgcaaggagygtggagatgaagcactgagggatgtggtcactgggcatggttgggggtggactggggttggactgggtgaccttagcgattccatgattctaggaacagcctctgcctaacttgaaacatgctgggctttgttcagcagctcagaagggagatgcrttagatttatgttggcctttgcagtgaggttccttttggatagaggctatcgatttaacgcttggaagaacgtgggatatccacagctgaagcacaggctcggtggctacgctgcgtccccctccaaacccagtgacaacattc

SEQ ID NO: 72320 - DNA, 600 bp, Chicken  19866894352141_4
agacgtctcagtaaatgtggcacaaagtacactgttttaatggctgaaattgctgcaattgtctgagggtacgaacggcctgacattggcacaggctgcccagkgaggtggtggagtcaccatccctggaggagtgcaaggagygtggagatgaagcactgagggatgtggtcactgggcatggttgggggtggactggggttggactgggtgaccttagcgattccatgattctaggaacagcctctgcctaacttgaaacatgctgggctttgttcagcagctcagaagggagatgcrttagatttatgttggcctttgcagtgaggttccttttggatagaggctatcgatttaacgcttggaagaacgtgggatatccacagctgaagcacaggctcggtggctacgctgcgtccccctccaaacccagtgacaacattcccattgctctctacatagctgaacctgacccctaacatggcacttaccccatcctcctcgaacactagctgcctttccagcgcctccagacatgacagggtttttgatttattcatcaaaattcatccagcagcaaatagaagtgcatccccctgt

SEQ ID NO: 72321 - DNA, 600 bp, Chicken  19866894352141_5
tgggatatccacagctgaagcacaggctcggtggctacgctgcgtccccctccaaacccagtgacaacattcccattgctctctacatagctgaacctgacccctaacatggcacttaccccatcctcctcgaacactagctgcctttccagcgcctccagacatgacagggtttttgatttattcatcaaaattcatccagcagcaaatagaagtgcatccccctgtttcacactaatatgcctgtacaatcacccctgctgtttagatgagggcctgatttccatgccaggaatcccrcattgtaccagatccctttattcttcttggaactttgaagatatattatgatgctaattaattcctttctcaagaagagagtaattgcaagtattggaggcaacttcgtcaatgcaggaaatgaaggcaaataaatgctctttttctttctttctttctttcttgtttgattttccttttgaagccaaagaccgtgaattgatctgacttctgggttctgtcattaacccactgtgatctagccacagggtctgatgcagacggttgcaaaccaattctgtccaaaccttgggtttgttt

SEQ ID NO: 72322 - DNA, 599 bp, Chicken  19866894352144_1
  misc_feature (1)..(119): n is any nucleotide
nnnnnnnnnnnnnnnnnnnnnnnnnnnnnnnnnnnnnnnnnnnnnnnnnnnnnnnnnnnnnnnnnnnnnnnnnnnnnnnnnnnnnnnnnnnnnnnnnnnnnnnnnnnnnnnnnnnnnnnaagtaactagttttaaagataattcctaaagctgtttagcactgcatgaattactttcattcatagggatgaattaagatgaaatacctttttaagatgtctgccatgcctcaaagaaaggcagtgtgctcaagtagtgaggttttttggacaatgacatacaggtgtcacagatgggctkttgcttcttctgcttttaaaaatttctgcatgctcagcaatgtgcagttcatgtacatgcactgcttttgtttcagagggatatgcccaagaccaaaaccagcattgaagcctttaaggaacattttcagaccttttcacagagttcctcctcaacaagaagcagacgagtgtgttgtgtgaatatgtatgcagaggatgtacaaccctcacatttgtttgtttgacacttcagtgcagtagcagtactaaaccatggtcattgttagtaattaatgggattagacatttaagtcattg

SEQ ID NO: 72323 - DNA, 480 bp, Chicken  19866894352144_2
acattttcagaccttttcacagagttcctcctcaacaagaagcagacgagtgtgttgtgtgaatatgtatgcagaggatgtacaaccctcacatttgtttgtttgacacttcagtgcagtagcagtactaaaccatggtcattgttagtaattaatgggattagacatttaagtcattgttgtcactggtttggaaaaccaatactttatattttaatctctttttaatgtcagaagtgggatttttatattacactaaaacaaaatgtatgagtagattaaagaagtaaaaggcattakcaaacagcaattaattcatgtattgttgttagtaacagcggggcagtctgtgatgtgcgtgtgtgtgtatattctacctattaacagccatggaaacccaaacatgcacaagtccttagattgctatacagaactgttaatgttctcagactagaactgtgtggagtaaatgtttttaat

SEQ ID NO: 72324 - DNA, 599 bp, Chicken  19866894352163_1
  misc_feature (1)..(89): n is any nucleotide
nnnnnnnnnnnnnnnnnnnnnnnnnnnnnnnnnnnnnnnnnnnnnnnnnnnnnnnnnnnnnnnnnnnnnnnnnnnnnnnnnnnnnnnnntgggaaattgaatctttagcaaatgggtaattatgaaacacatggaaatcataggtggacaaaataacccagcgttcctctacgctgaatgttacccagaacccacctggacagcctgggacgtgacatgtcaggctgagcaagagaaccaggaatctgctgtataaaaatggtcaatctgtgaaaaaagcaattagaaatgtatcatagwagagttgacttcttgstgtcacttccaagcaatagaatcatagacataagtagtaatcatgagaggccccagtccaacactaacatactgttataataaacttagtgcagatgctgagayctgcttacaatacacatggtggtatgtytagtcaaaagtttttctgctgcaggatccattttttgcaatatctggtgattattttcagtatccygagggatggctcttttctcttttccttcctttgtaagttctttctaatatttgtcctacatttctctatttttagctacataata

SEQ ID NO: 72325 - DNA, 599 bp, Chicken  19866894352163_2
  misc_feature (1)..(73): n is any nucleotide
nnnnnnnnnnnnnnnnnnnnnnnnnnnnnnnnnnnnnnnnnnnnnnnnnnnnnnnnnnnnnnnnnnnnnnnnntgggaaattgaatctttagcaaatgggtaattatgaaacacatggaaatcataggtggacaaaataacccagcgttcctctacgctgaatgttacccagaacccacctggacagcctgggacgtgacatgtcaggctgagcaagagaaccaggaatctgctgtataaaaatggtcaatctgtgaaaaaagcaattagaaatgtatcatagwagagttgacttcttgstgtcacttccaagcaatagaatcatagacataagtagtaatcatgagaggccccagtccaacactaacatactgttataataaacttagtgcagatgctgagayctgcttacaatacacatggtggtatgtytagtcaaaagtttttctgctgcaggatccattttttgcaatatctggtgattattttcagtatccygagggatggctcttttctcttttccttcctttgtaagttctttctaatatttgtcctacatttctctatttttagctacataataacagcaagagaaagtc

SEQ ID NO: 72326 - DNA, 600 bp, Chicken  19866894352163_3
tatgaaacacatggaaatcataggtggacaaaataacccagcgttcctctacgctgaatgttacccagaacccacctggacagcctgggacgtgacatgtcaggctgagcaagagaaccaggaatctgctgtataaaaatggtcaatctgtgaaaaaagcaattagaaatgtatcatagwagagttgacttcttgstgtcacttccaagcaatagaatcatagacataagtagtaatcatgagaggccccagtccaacactaacatactgttataataaacttagtgcagatgctgagayctgcttacaatacacatggtggtatgtytagtcaaaagtttttctgctgcaggatccattttttgcaatatctggtgattattttcagtatccygagggatggctcttttctcttttccttcctttgtaagttctttctaatatttgtcctacatttctctatttttagctacataataacagcaagagaaagtctcattacctgtaatcagactcccatctgtataattcctcttccataaatgttcccttttcattttgcagccaagtagtaagaaatacttagcacttttaatcata

SEQ ID NO: 72327 - DNA, 600 bp, Chicken  19866894352163_4
caaaataacccagcgttcctctacgctgaatgttacccagaacccacctggacagcctgggacgtgacatgtcaggctgagcaagagaaccaggaatctgctgtataaaaatggtcaatctgtgaaaaaagcaattagaaatgtatcatagwagagttgacttcttgstgtcacttccaagcaatagaatcatagacataagtagtaatcatgagaggccccagtccaacactaacatactgttataataaacttagtgcagatgctgagayctgcttacaatacacatggtggtatgtytagtcaaaagtttttctgctgcaggatccattttttgcaatatctggtgattattttcagtatccygagggatggctcttttctcttttccttcctttgtaagttctttctaatatttgtcctacatttctctatttttagctacataataacagcaagagaaagtctcattacctgtaatcagactcccatctgtataattcctcttccataaatgttcccttttcattttgcagccaagtagtaagaaatacttagcacttttaatcataaaatgaattcccatcactccatctgtct

SEQ ID NO: 72328 - DNA, 588 bp, Chicken  19866894352163_5
acatgtcaggctgagcaagagaaccaggaatctgctgtataaaaatggtcaatctgtgaaaaaagcaattagaaatgtatcatagwagagttgacttcttgstgtcacttccaagcaatagaatcatagacataagtagtaatcatgagaggccccagtccaacactaacatactgttataataaacttagtgcagatgctgagayctgcttacaatacacatggtggtatgtytagtcaaaagtttttctgctgcaggatccattttttgcaatatctggtgattattttcagtatccygagggatggctcttttctcttttccttcctttgtaagttctttctaatatttgtcctacatttctctatttttagctacataataacagcaagagaaagtctcattacctgtaatcagactcccatctgtataattcctcttccataaatgttcccttttcattttgcagccaagtagtaagaaatacttagcacttttaatcataaaatgaattcccatcactccatctgtctttgccgtaggaatgaatcctggcttctctttaacaacagattcagctttaataa

SEQ ID NO: 72329 - DNA, 600 bp, Chicken  19866894352168_1
cttttgtggctgcatccctcccacaggacaggactcttgctctcaacgctctctgcctcagacattgctgcaggggcctccccggagctctcattcaaggcacacccttgatgttgctgttcaatctcacagtgctgtgaagggttcaccggatgaaagctagtcaaaaaccaggagcatggcattggtaaggcatgtgggcccctcgtctgtccccaggaggctctcttcgtcaggaaagtaattactgaatgcaggagttggtggtcatccttcaatgcgagtctactttctgccaargatggttgtttgattgtagatagaacaaagaatgctgtttggctttggatcagagatggatgggaagagaaaaagactgccaaattctgtttgagaccagggcccttcagacagggtctgtgatgctgccaggggtcttgcaagccaaagtccttgtgctttagctctgttttttcttaccgtgttgtacagctgtggcagtcagctgctcatcatcatgtgtttgtgtctttggacttcctcagcatcaaagcattccctctggctgtttactggagtctcttcgggtcttttccttct

SEQ ID NO: 72330 - DNA, 600 bp, Chicken  19866894352170_1
ttctacctgtcttatgggctccttgaggaagtggtgatgtccttgtgtgcaaaggattggatgggcttctcttccaggaagcgttttgcccatttcttagcccatatatatttgtaaaatccacaacatgttgttacagaatctacctaagtgtatgatgtgcagtatatagtctaatgttcatttcgaacctactgtctgctactttcattggattactgacagttcttgaactacaagaaacagtgaaaaaattgtttttttttaccatgccattttgctagcttatagatctccttyatatgttccctcagatctcttttgcaggcaaataattccaggctacttaactttttctyagacagaaaccattcaatatctttgctcttctctyctgctttttctctacccttttcagttttattgtacttgtatctgtgcttgtgtcttgctcttttagctgtgaaccaaatgttgatttgacacagcagaacaagacagtgtcttttgtctgtataattactggctataagctactagcctgtttaatcacaacctctgctacacaatctatggcatggaaactcacctatgtgatgt

SEQ ID NO: 72331 - DNA, 600 bp, Chicken  19866894352170_2
gatgggcttctcttccaggaagcgttttgcccatttcttagcccatatatatttgtaaaatccacaacatgttgttacagaatctacctaagtgtatgatgtgcagtatatagtctaatgttcatttcgaacctactgtctgctactttcattggattactgacagttcttgaactacaagaaacagtgaaaaaattgtttttttttaccatgccattttgctagcttatagatctccttyatatgttccctcagatctcttttgcaggcaaataattccaggctacttaactttttctyagacagaaaccattcaatatctttgctcttctctyctgctttttctctacccttttcagttttattgtacttgtatctgtgcttgtgtcttgctcttttagctgtgaaccaaatgttgatttgacacagcagaacaagacagtgtcttttgtctgtataattactggctataagctactagcctgtttaatcacaacctctgctacacaatctatggcatggaaactcacctatgtgatgtccagccagattttgtaatcaaccygtacasagtccttaggtcttctattagttataact

SEQ ID NO: 72332 - DNA, 600 bp, Chicken  19866894352170_3
tcttagcccatatatatttgtaaaatccacaacatgttgttacagaatctacctaagtgtatgatgtgcagtatatagtctaatgttcatttcgaacctactgtctgctactttcattggattactgacagttcttgaactacaagaaacagtgaaaaaattgtttttttttaccatgccattttgctagcttatagatctccttyatatgttccctcagatctcttttgcaggcaaataattccaggctacttaactttttctyagacagaaaccattcaatatctttgctcttctctyctgctttttctctacccttttcagttttattgtacttgtatctgtgcttgtgtcttgctcttttagctgtgaaccaaatgttgatttgacacagcagaacaagacagtgtcttttgtctgtataattactggctataagctactagcctgtttaatcacaacctctgctacacaatctatggcatggaaactcacctatgtgatgtccagccagattttgtaatcaaccygtacasagtccttaggtcttctattagttataactttggtttgatgctttcttctgtcttgacatttcca

SEQ ID NO: 72333 - DNA, 444 bp, Chicken  19866894352170_4
caggcaaataattccaggctacttaactttttctyagacagaaaccattcaatatctttgctcttctctyctgctttttctctacccttttcagttttattgtacttgtatctgtgcttgtgtcttgctcttttagctgtgaaccaaatgttgatttgacacagcagaacaagacagtgtcttttgtctgtataattactggctataagctactagcctgtttaatcacaacctctgctacacaatctatggcatggaaactcacctatgtgatgtccagccagattttgtaatcaaccygtacasagtccttaggtcttctattagttataactttggtttgatgctttcttctgtcttgacatttccacatggatctgttggttttgcttcgatggtgggcagtgttgatgaatattcttgtttatagtttagtttatagtt

SEQ ID NO: 72334 - DNA, 438 bp, Chicken  19866894352170_5
aataattccaggctacttaactttttctyagacagaaaccattcaatatctttgctcttctctyctgctttttctctacccttttcagttttattgtacttgtatctgtgcttgtgtcttgctcttttagctgtgaaccaaatgttgatttgacacagcagaacaagacagtgtcttttgtctgtataattactggctataagctactagcctgtttaatcacaacctctgctacacaatctatggcatggaaactcacctatgtgatgtccagccagattttgtaatcaaccygtacasagtccttaggtcttctattagttataactttggtttgatgctttcttctgtcttgacatttccacatggatctgttggttttgcttcgatggtgggcagtgttgatgaatattcttgtttatagtttagtttatagtt

SEQ ID NO: 72335 - DNA, 600 bp, Chicken  19866894352176_1
gtgttccagtttgtacccattgcctcctgttatatcactgcgtactaccgaaaagaatgtcttgatcctctcttcagttatttatatagatttataagattcctcttgagcaggtagcttgttcactatctaaaaatagtatgaacaactgacataaatatttttaaaaaacaccaaactgttaactattacatactgaaatataatatttttctgtcctattaactttcagtttgatttcacatttagtgattgatttattaaagatatcaaatgctatatcctctcatgtcattaatrgaaatagatgactatgaggtgcataacaagttactgaattttgtcctctgctatttgagttagtaattgtcaaccatttacaagctggttcggcccagttctgtgactagcagggcagagggattttgcaaaatctgtgcctccagaaaagggaaacaggagatcccaaagtaattaaaaaaaaaaaaaaaaaaaacaacaacaacaacaacaaaaaaaacagtggcaacgatctgaggagaaacaaactaatttaataaacatgctgttggaatgcaagataacacactataatacaat

SEQ ID NO: 72336 - DNA, 583 bp, Chicken  19866894352181_1
tggttgggtttttttctgaagcactgaactttttctgttagctctaatcataaagaaatataaacatcatttattgtctctgtcctcgatgcaaatagaaatccaactacattaggtaacatattctacacagaaatcatggggaaatgccacagtagcattattttggaactagttgatcctttacaagcatttttaaatgtactttgattctttacaaaagctgtatttttagaattcttctgttgaatgttcattttgaaattcataaaatattattttagtggtgtaataactttratgcacacctttgcaaatttaaaatgtaatagatgttgacttctgttttgtttttttgtacaagttctccttcaactcccataaatgatgtgaaaaatagatatcagcagtgagtggtattgggtgtgaagaattatttctgttttagctgaattttgactgatctagaccgaataatagtggcatcttttctgcatgctggttttattttttctggtctctttaaatgggggatgaaaaacacctgccaatccatactgaaatgcttgtgtctcattgattg

SEQ ID NO: 72337 - DNA, 600 bp, Chicken  19866894352185_1
tgcaaggcaggctgtagacaggcagcctctatcttcctgaagtagttcaatacataagagccttcagctactcattgctgcttctcagatggaaattaccagtgcagtgctcggcgcaggtcaaaccgcagcccaaagtggttggagagcactggactggtgcgataccaacagcagattaggatgcaaccgcatggccagccccagcagcaataaacatttgagggtgataatatctgaaataatcccagctgcttacaatgcatttgtgctgttacaatccctcagcaaacgaatgarcggcagatccaccacacctcgcgccttaagcagattgttcatcatgcactggaaggttcagcctctccctccttgatcttagtttgctatgctgctgtcctcagtaccattcccccaagagcaataaaatccaaggcagcgcatcacaggatggttgtgcgagaaggaaagctctgaaacaagagcactgtcaatttggtcacctgcctccctgcaaaagcagctggatcctgcctaggcagagccaaactccttctgaaccgaagaagaaaaagttcattgtttcttctaagtgctatg

SEQ ID NO: 72338 - DNA, 600 bp, Chicken  19866894352185_2
cagctgttgactgtgttcaattagctggcctatctgcagagcaaagtcctcccactcctccttggcaaagtttgcagcagaacgaaacagatgcgcaggtagagacacatgtcccacctacacctaaccccatttcctttctatccagcagtgctcatgttgcaaaggtctttgatattctgatgggagatgtggaaagcacaatcaatcctatctgacaagagcttactctctcctcatgtaaacacacacgtgttctcccacacccgtggagagcagctggtgatcaaggtggttttyccctcctggccagccctactgatcacttctaggagggtaaaggtctgcccgctccttccctcgctttgcccttggttttaagcatagcaggaaattgggaaagtggctcttattaaaaagataataattgcaggtctgattcatagcctgtttaaagcgcttggcaaagccacagagcaacattagcttacctgggaaaagcactgtggaaatgcctgctgcattccctgacagaatgcaccagatcccctcccccccccccccccccccagactagttttatttaagagctacccacag

SEQ ID NO: 72339 - DNA, 599 bp, Chicken  19866894352197_1
  misc_feature (1)..(122): n is any nucleotide
nnnnnnnnnnnnnnnnnnnnnnnnnnnnnnnnnnnnnnnnnnnnnnnnnnnnnnnnnnnnnnnnnnnnnnnnnnnnnnnnnnnnnnnnnnnnnnnnnnnnnnnnnnnnnnnnnnnnnnnnnnatccaggtaaaaggagcatgtgtattctggtgcaccaaaaccaataacataaggcttattacacaaaattcctatgtcttttagtacagaggagggaaagcaatgcggtctctttcaaggcggaatctgatatgcattatgatgcctgcctagaattcagcagagctgagctctaacrttggttctccctgatatcctcctatgggatgctgggctacaccacaytgcagagcatcaaacaactgcattcaatgaaaagtgaggtcaaatcataacaaaccaagtcacctgattccaccaacctatgccactgaggaagtaagatggtaaatactggcttttgttctaaataaagraaattgcagtattcaatccagtaaaggcaaggactgtcacggccagattgggatccagctgtctcagaaacatctttctgattgtgacaaggagatagatgtttttttaatttatcagtga

SEQ ID NO: 72340 - DNA, 599 bp, Chicken  19866894352197_2
  misc_feature (1)..(75): n is any nucleotide
nnnnnnnnnnnnnnnnnnnnnnnnnnnnnnnnnnnnnnnnnnnnnnnnnnnnnnnnnnnnnnnnnnnnnnnnnnnatccaggtaaaaggagcatgtgtattctggtgcaccaaaaccaataacataaggcttattacacaaaattcctatgtcttttagtacagaggagggaaagcaatgcggtctctttcaaggcggaatctgatatgcattatgatgcctgcctagaattcagcagagctgagctctaacrttggttctccctgatatcctcctatgggatgctgggctacaccacaytgcagagcatcaaacaactgcattcaatgaaaagtgaggtcaaatcataacaaaccaagtcacctgattccaccaacctatgccactgaggaagtaagatggtaaatactggcttttgttctaaataaagraaattgcagtattcaatccagtaaaggcaaggactgtcacggccagattgggatccagctgtctcagaaacatctttctgattgtgacaaggagatagatgtttttttaatttatcagtgaagctatcgggtgtcctcttaccttcctgwgacatggaatgccaagct

SEQ ID NO: 72341 - DNA, 600 bp, Chicken  19866894352197_3
tattacacaaaattcctatgtcttttagtacagaggagggaaagcaatgcggtctctttcaaggcggaatctgatatgcattatgatgcctgcctagaattcagcagagctgagctctaacrttggttctccctgatatcctcctatgggatgctgggctacaccacaytgcagagcatcaaacaactgcattcaatgaaaagtgaggtcaaatcataacaaaccaagtcacctgattccaccaacctatgccactgaggaagtaagatggtaaatactggcttttgttctaaataaagraaattgcagtattcaatccagtaaaggcaaggactgtcacggccagattgggatccagctgtctcagaaacatctttctgattgtgacaaggagatagatgtttttttaatttatcagtgaagctatcgggtgtcctcttaccttcctgwgacatggaatgccaagcttaacacagctcagctacccaaaagtaaacacttaacagctggacaattcctcttcattcagtgtggcccacggaagacaaaggttggacacccacgcctaaaccagtcagaagctgcatcacaatgtcaagc

SEQ ID NO: 72342 - DNA, 573 bp, Chicken  19866894352197_4
atgctgggctacaccacaytgcagagcatcaaacaactgcattcaatgaaaagtgaggtcaaatcataacaaaccaagtcacctgattccaccaacctatgccactgaggaagtaagatggtaaatactggcttttgttctaaataaagraaattgcagtattcaatccagtaaaggcaaggactgtcacggccagattgggatccagctgtctcagaaacatctttctgattgtgacaaggagatagatgtttttttaatttatcagtgaagctatcgggtgtcctcttaccttcctgwgacatggaatgccaagcttaacacagctcagctacccaaaagtaaacacttaacagctggacaattcctcttcattcagtgtggcccacggaagacaaaggttggacacccacgcctaaaccagtcagaagctgcatcacaatgtcaagctgcaagttcacttcccttccctggaagccagaagaaatttacatcattgaaatgaatgatttcctcaggatacctctgaatagtaacagattgctgtcctctctaacaccttgatatgcacct

SEQ ID NO: 72343 - DNA, 600 bp, Chicken  19866894352205_1
ggggtggaagtaatacttccaaggtcaatttaatttgggcagagtagcatttctcttctttcatatatgaatgtggaagtagtggcttttttttcccttgttgaagccttctgatacatagtttgaacaaaagatattctctcaggtaagacaggtttatattaagggcaagacattgtgaaagttactgttttgtacttgtccttgaaaaggatacttttagcaatttttttttctttaaatacttttggaaatgaaaatttgttatgtgtccagtctacctgtgtgagtttccatggygtttcttaagagcttttagaaagtctgtcttccttgtcaaatactgrctatgctgtttgatctgagctatgcctgaagtatgaaataggaaaaaaaaaagtgaaagatgagtttatatcaaacaaaatgtagctagctaactactgaggtagtataatgtgttagaaaaatcagtgccattgtgaacagtctttttcttaatcttgtttccgtgtcataaaatttccttgaaatctatttatttattgagtgtgtatgcactttacaaagtgatcagaagcaaaacagcagcacctgtca

SEQ ID NO: 72344 - DNA, 600 bp, Chicken  19866894352205_2
catttctcttctttcatatatgaatgtggaagtagtggcttttttttcccttgttgaagccttctgatacatagtttgaacaaaagatattctctcaggtaagacaggtttatattaagggcaagacattgtgaaagttactgttttgtacttgtccttgaaaaggatacttttagcaatttttttttctttaaatacttttggaaatgaaaatttgttatgtgtccagtctacctgtgtgagtttccatggygtttcttaagagcttttagaaagtctgtcttccttgtcaaatactgrctatgctgtttgatctgagctatgcctgaagtatgaaataggaaaaaaaaaagtgaaagatgagtttatatcaaacaaaatgtagctagctaactactgaggtagtataatgtgttagaaaaatcagtgccattgtgaacagtctttttcttaatcttgtttccgtgtcataaaatttccttgaaatctatttatttattgagtgtgtatgcactttacaaagtgatcagaagcaaaacagcagcacctgtcagagaagataaatgacttaccggcaaatcatcttagttaaaaggaaga

SEQ ID NO: 72345 - DNA, 600 bp, Chicken  19866894352207_1
gcctgccgtccttcaaagaattcaggaatagcttgcttctcttcttccagaatgatgcttctatcaatttccacttcttgatcaggtggcttaagagcctctgcttcttcttgatgatcttcatccacttggcaggggggatgaaaaagcagtccgttatcagccaggtctctctgttcctcattaagctcctggtcagttatctgcctagcaccatgagacattcctgttctaccctgttcagctttttctataaaatcattgcactgctgatattccaagttcacagatttatcaccrttcacgtgctgagaacacgttgctgcaccatcctgaaacagtaatgcgtccactgtgggttgmttggtattctgagggtcttctttcagcaaagaaacagcagaactatgtccaacatgtggaaaaggatgctccgttccttttgtttcttcagctggactttctgaagttatagataactcggattttccaacaccttgctggaaagcaggagaaaacagttcatccatgtcatcggttatatccacttcttcatcatctgacagcttttcaattttcactgcgttcaggttagggtct

SEQ ID NO: 72346 - DNA, 600 bp, Chicken  19866894352207_2
tcaatttccacttcttgatcaggtggcttaagagcctctgcttcttcttgatgatcttcatccacttggcaggggggatgaaaaagcagtccgttatcagccaggtctctctgttcctcattaagctcctggtcagttatctgcctagcaccatgagacattcctgttctaccctgttcagctttttctataaaatcattgcactgctgatattccaagttcacagatttatcaccrttcacgtgctgagaacacgttgctgcaccatcctgaaacagtaatgcgtccactgtgggttgmttggtattctgagggtcttctttcagcaaagaaacagcagaactatgtccaacatgtggaaaaggatgctccgttccttttgtttcttcagctggactttctgaagttatagataactcggattttccaacaccttgctggaaagcaggagaaaacagttcatccatgtcatcggttatatccacttcttcatcatctgacagcttttcaattttcactgcgttcaggttagggtctgcacggcctctcaagtttccagctgaccatgcttctacccttaccccatcttcagtggggaag

SEQ ID NO: 72347 - DNA, 600 bp, Chicken  19866894352207_3
gaagagtgccaccatgctgactttgctcttctctttcagaaccatcattttttgcctaaggaaagcacaaaatactttaagaaggaaaaaaaaaaaaacagaaacaatctcctctgcctcccacacagtcagaactattttacttgaccaacagacagacattctgagggaggtgtttgacaggttgacaaagcaataaaaataccaaaatcattcaaagcaaactaactttacaacagtatttgaaatactctgtttaccttgttcttaaagtactgcctggcatagctctttacttgyagaacagtacgactcccaatcagcttggcaatttttgtccagcggcggccawacttcacctagcacaacaaagcacacccaagttaccccccagacattccaatttatacccaagaagtgtttaaaagctcagttttgcattacaaacacacaaacagtacagctgaacccaagaagctcagtaatcatattgcaccaagaaaagcattgcatccaacagtaagaactgttgctattcctcactcagtgtatacatgctgtaaattccattgcttactaacccaaggaatcctactgaaa

SEQ ID NO: 72348 - DNA, 599 bp, Chicken  19866894352207_4
tgcctaaggaaagcacaaaatactttaagaaggaaaaaaaaaaaaacagaaacaatctcctctgcctcccacacagtcagaactattttacttgaccaacagacagacattctgagggaggtgtttgacaggttgacaaagcaataaaaataccaaaatcattcaaagcaaactaactttacaacagtatttgaaatactctgtttaccttgttcttaaagtactgcctggcatagctctttacttgyagaacagtacgactcccaatcagcttggcaatttttgtccagcggcggccawacttcacctagcacaacaaagcacacccaagttaccccccagacattccaatttatacccaagaagtgtttaaaagctcagttttgcattacaaacacacaaacagtacagctgaacccaagaagctcagtaatcatattgcaccaagaaaagcattgcatccaacagtaagaactgttgctattcctcactcagtgtatacatgctgtaaattccattgcttactaacccaaggaatcctactgaaacgagtttgtgcttgctgaagcaaacccttttacatcagcattgtacaacca

SEQ ID NO: 72349 - DNA, 600 bp, Chicken  19866894352212_1
gaagtagagcatgagtcctttcaattgtaaatagttccattaatttcagcaaaactatgctgaacaatgtttgtaggattaggccttaaggtgaagctactaataatataggaaaaaagcactggatattttgatggcattactttaacctaggaaagatgtgtgagttagtcatagaaaagggttattctggtaagtcacaacttaattttcgaaacaaatgccagcctgaaattgcttatcagtcacttcatgctatttttctatatgctggtgtgaaatttactccattgtagaaasaaacaaacaaaaaaaaggcatcttctgtaattccaaatctactttaatgtgaggtttatgtgctgcatgggctgtcacacaggttcctgcatgaatattctcacatgtgaacatgtgcactgatagttaacagcattgtgcactacaatgaaaagcctgagggtgacagagacttcaaaaaaacttgtgttttccttaattatgtaacataaagaaaagtttggatggaaaagcactttgcattttgcgaagggaattttatttctggtctagattttctgaatgttacattttatctag

SEQ ID NO: 72350 - DNA, 599 bp, Chicken  19866894352217_1
  misc_feature (1)..(1): n is any nucleotide
nctctattgtttcctttatgtttttctaaataggtcaggtatttacttgctgttgctagagggaacaagcagagcccttctagctgacaggtcgctccatccaaaataatgaaaggaaaaccatatgtaagctatactttctggaaataaactgacccttctataattacagggtcaggggagtacaagttaccccacatgtccccgtgtgactgcctaagtttctacatagcaggagcgaacaggtcacacagatgtagttacagcaactgaaaggggatgcagaagagatgaggaaaygccaccagatttacagcaacaggtggtttcctccacagcacccaccacgaacaagcagagatgggtgccacgaggtgctgagagcaacccctgtaaaggacsctgcacagcatgtctggggacaaggggcaccatggaaagtaaccagaggaactggcaccagcaatgtcagccctttcttagaattggtcctgaaaggagttttggagaaattcaatccttgcaataggggctgtagcttaggactttggaagcatggctttaggcacctgctgtcccagactgcgtgtgactatcaa

SEQ ID NO: 72351 - DNA, 600 bp, Chicken  19866894352217_2
aaaataatgaaaggaaaaccatatgtaagctatactttctggaaataaactgacccttctataattacagggtcaggggagtacaagttaccccacatgtccccgtgtgactgcctaagtttctacatagcaggagcgaacaggtcacacagatgtagttacagcaactgaaaggggatgcagaagagatgaggaaaygccaccagatttacagcaacaggtggtttcctccacagcacccaccacgaacaagcagagatgggtgccacgaggtgctgagagcaacccctgtaaaggacsctgcacagcatgtctggggacaaggggcaccatggaaagtaaccagaggaactggcaccagcaatgtcagccctttcttagaattggtcctgaaaggagttttggagaaattcaatccttgcaataggggctgtagcttaggactttggaagcatggctttaggcacctgctgtcccagactgcgtgtgactatcaacgaaccacttggccacgatgctcagatcccagagagagcttaaatacctttgtagatgtgggcgttggcgtctcagttctcctgtttcctttccacaccagag

SEQ ID NO: 72352 - DNA, 600 bp, Chicken  19866894352220_1
tgggcttcatgtctttcctctcccctttccatcccccagagtgcaactgtgacttccagggcaccgaggacgtggggtgtgacaaatccacaggccactgcctctgccgcccaggtgtcaccggcccccgctgtgaccagtgccaacgggaccactgcagcacctaccccagctgtgagccgtgccacccctgcttccacacctacgatggtgacatccagcggctgcggttgcgcctgcagcaggccagcctgagcaactccagcatagggctgcccgggggctcccacctgggtcttyggctctcacgggcacagggcagcgtgcagcaggcacagggcatccttggtcactcatccgccgccgagcagggcctggcccagctgggcagtgcgctcactgccatcaggtgagggatacactgctttgcttctgtaactggaaatattaaactgccctgcagttttacctggcacacctgtagtattccagcctgagagggtcctgctgtctgcctacatgcagatttctctctgctgaaattctcgttctctgctttttctttttttcagggagcaaatgcaaggcattaatcccaac

SEQ ID NO: 72353 - DNA, 600 bp, Chicken  19866894352222_1
tttcttgccgaggactgtaaatctgtacattaattgctgtctatgaagtgccttaagagccttggacagaaggagcgagagaaatgccaagcattatattattaactcctctgcctgggcgtgtgcttctgtacatgctttacatttcagatgaaagcccacttggaaacaacacgcctcagacaatcagatgatgctcagaagacaaaaccatgcaagaagggaagaaaagggaataattgcaagcagatggcagagagtagaaggcaacaggggaaaacaaaccaggtgttagcacarggctacaaacatctggctgcccttacgaagcctgggttggcagtgttaacacagttttgacatggcaagggttaaaatgcaactcagattgagaatgaagccttcctcatttagaaaaaggtgtaagttatctttgctttgtattcaacgcgaactgcttacaagtttccactaagaaatcctaagactgtgaatgcagcggtgtggtggtgcaggatctccctgatggcagtctgctcccttccaaaccactatggcaagccagtgggctgctgggcatgaccttgggtccacctacat

SEQ ID NO: 72354 - DNA, 542 bp, Chicken  19866894352223_1
ttcactttcttatcggatttataacaggaatattgcatgtgtagttgctctttttttttccagctcattttcaatgtctgaatggttgtacctgagattttatgaaaggcgctgataccagttccctttcatgtgtttgtcttagacacttgtttttgtaaatgaaatgaaatttcatttggttgaatgtatttggttaaaggattgtggcaaagtatgaacttcttttaaaatgttagtgtttttctcagttctaattttaaatcaatttattctttagttttcagtagaaagttgttkttttttttaacctagctgtttatttgaaatcaaattactttcttgatacagtaaagattatagtgtgtaatatgaaaaaaacatttaaaaatacacataaaatgtagaaaatcaaaaccttttctgtattcagagtagacaggtgctggatcatcataactgcagtgtgtttggatttgttacagcagtgctgtatgacaataatatgtcaattaatgcttattgaaatgaaattccaattt

SEQ ID NO: 72355 - DNA, 599 bp, Chicken  19866894352225_1
  misc_feature (1)..(33): n is any nucleotide
nnnnnnnnnnnnnnnnnnnnnnnnnnnnnnnnnagcacagggtgccagtcttgcaagggctgctggcatagcaggacccaagcttggatgccccgtgccagccctttcccttttcagacgcacagtggattcttggagatactcaaaagccacccggatgtggctatgtgcaagcagctcttaggaggccctgcttgagcagggcttggaccagttaccccccagaagtccctttccagcctcaactaacctgcgtcctccctggcactgcggtgtgacaccatctgacagcagggaacygtgtagtgacctgactgctgggaccaggaggagcacagtggaagatgtgtaaaagcaatgctgtgtgctgctgctggctgctgccaccactctgctccagggccaccacttcctctcccagctctgcagtggggacagccaccaccgatgcccaggctttgcccatgagagggacaggcagagaggaatgactgctctttcttttgggtatctggggccctggtgtggtttcaggactcctacgatggggacaacaatcttgtcggtgccatgagtggcacctggcccctcagctgcag

SEQ ID NO: 72356 - DNA, 600 bp, Chicken  19866894352239_1
aggtgctcgcgtgtgaaatagaaatcttgtctgacaagcattagataaatgcaccaaaaactggggatgccccaaatgtcttggctttgttggttttgtcgggactttctaaccatagtgttttgcaaatgccatctgtcacttgtggctggtccctgtcagctcaccgccacacagccgggtcttgctctggtttctttgctattgaattgttcagtctttccctagcacagttcttgtccttccaccttgtgatcccctatgctcttctcagaaaggggctaatggagttgcattaarccattgcttgtccatcttctaaagacttttagaagcactttcagagcaaaagtgaaatgctcaccttggacccatgccctgggaccgtggctgtctctggtttgtgtgggctcctgcagagatggaggcttctccatctccccactggctcggtctggtggggagtcactctgaggaatactacagagttgtgttacttctacttttgtaagcgtgtcacagtcaatgcgtttgatgttagcttcggagggaccagaatcgtatctattgctgctatcctaagctaggggagagactcca

SEQ ID NO: 72357 - DNA, 599 bp, Chicken  19866894352245_1
  misc_feature (1)..(126): n is any nucleotide
nnnnnnnnnnnnnnnnnnnnnnnnnnnnnnnnnnnnnnnnnnnnnnnnnnnnnnnnnnnnnnnnnnnnnnnnnnnnnnnnnnnnnnnnnnnnnnnnnnnnnnnnnnnnnnnnnnnnnnnnnnnnnntgtgttgttatgacgtaatgcctttagctttctctctttcttgcatgaggatctgacagttgctgagttcatcagaagaattttgagggtaggagctgagttgaaattcagtacttcctttccagtcattacagttaactagcgatacagcttcattttgttctagagataacmgaatgttgtccctttctccagaattattttttttccaagcagggcaaaatatatttaagacattcaaggcaaaagtgatgttggataatatatctctggagaactgtgtatatattgttctaatatgtgggaattctagaggacaaggtgtatgaggagcagctgaggccccttcatttgctcagcccagagcagaggaactgagggtggaggcatggatcatgctcctaagggctgtgatcacagcctcaaactgccagagttcaaggaacgtttggaaagtgcattcagacatcggg

SEQ ID NO: 72358 - DNA, 599 bp, Chicken  19866894352250_1
  misc_feature (1)..(150): n is any nucleotide
nnnnnnnnnnnnnnnnnnnnnnnnnnnnnnnnnnnnnnnnnnnnnnnnnnnnnnnnnnnnnnnnnnnnnnnnnnnnnnnnnnnnnnnnnnnnnnnnnnnnnnnnnnnnnnnnnnnnnnnnnnnnnnnnnnnnnnnnnnnnnnnnnnnnnncacagggccctgcacaccctgtaagccctgtggactggtcccagtagagggcactggcgcctgcactctgctgctcatcattaatctctaattaacgtgcagtgccagactgggacagtgtgagggcagaggctgtgcctgcgagtaaaycaytgggttttggggtcattctcatgatccccaggatctgcttcagagaatcacagaatggctcaggttggaggaggccttaaagatcatccagttccaaccccctgccatgggctgggtgccacccaccacatcaggctgccccccatccgacccggccttgggcacctccagggatggggcacccacagcttctctggacagccacaaccagcagcacttcagaactcatccttagcaaagaagactgtttttccccccatmtgcagcacagactgcagctgtagaagagggagaca

SEQ ID NO: 72359 - DNA, 599 bp, Chicken  19866894352250_2
  misc_feature (1)..(147): n is any nucleotide
nnnnnnnnnnnnnnnnnnnnnnnnnnnnnnnnnnnnnnnnnnnnnnnnnnnnnnnnnnnnnnnnnnnnnnnnnnnnnnnnnnnnnnnnnnnnnnnnnnnnnnnnnnnnnnnnnnnnnnnnnnnnnnnnnnnnnnnnnnnnnnnnnnncacagggccctgcacaccctgtaagccctgtggactggtcccagtagagggcactggcgcctgcactctgctgctcatcattaatctctaattaacgtgcagtgccagactgggacagtgtgagggcagaggctgtgcctgcgagtaaaycaytgggttttggggtcattctcatgatccccaggatctgcttcagagaatcacagaatggctcaggttggaggaggccttaaagatcatccagttccaaccccctgccatgggctgggtgccacccaccacatcaggctgccccccatccgacccggccttgggcacctccagggatggggcacccacagcttctctggacagccacaaccagcagcacttcagaactcatccttagcaaagaagactgtttttccccccatmtgcagcacagactgcagctgtagaagagggagacagag

SEQ ID NO: 72360 - DNA, 600 bp, Chicken  19866894352250_3
acagtgtgagggcagaggctgtgcctgcgagtaaaycaytgggttttggggtcattctcatgatccccaggatctgcttcagagaatcacagaatggctcaggttggaggaggccttaaagatcatccagttccaaccccctgccatgggctgggtgccacccaccacatcaggctgccccccatccgacccggccttgggcacctccagggatggggcacccacagcttctctggacagccacaaccagcagcacttcagaactcatccttagcaaagaagactgtttttccccccatmtgcagcacagactgcagctgtagaagagggagacagagcctctcctgcactgtgctctaacgaagtggctgcaaacgtggctttgatgtgaggatctcgtgctggtggggctgtggtgtgtgaagtggaaagagctcagcttgactcgcagaccccagctggagctgcaggcacaaagcgcacttactgccgcttgtaacgcgagtggttttgatttggagcttgctrgtggggaaaataaagtgtgcaaaatcaagaattcattgttcctgctttgcttttctgacgggaatgttttcc

SEQ ID NO: 72361 - DNA, 430 bp, Chicken  19866894352250_4
ttctctggacagccacaaccagcagcacttcagaactcatccttagcaaagaagactgtttttccccccatmtgcagcacagactgcagctgtagaagagggagacagagcctctcctgcactgtgctctaacgaagtggctgcaaacgtggctttgatgtgaggatctcgtgctggtggggctgtggtgtgtgaagtggaaagagctcagcttgactcgcagaccccagctggagctgcaggcacaaagcgcacttactgccgcttgtaacgcgagtggttttgatttggagcttgctrgtggggaaaataaagtgtgcaaaatcaagaattcattgttcctgctttgcttttctgacgggaatgttttcctttgcatgtgaacctgtgtggaataaaacaagggactactgaatgcatttcactcatg

SEQ ID NO: 72362 - DNA, 600 bp, Chicken  19866894352255_1
catatcctcctcttcctcctccgtaaccaggactgccaccgaagttgccacctatgacaatataatcctttaaaataagctttccagtgtagaaggtaaccaagttctacacaggctatttttctgttgagaagtctacaggggaacaaaaagggcaggagtttcaagaagatacatatccaactcccaccctaactgaattgtgactaaaacccactagccagactgcctaaaaacatcaatgaagtgacttgctactattctaaagagaaggacgtggttgttcaagacataaccatrcaatttcccacatcaggtataacgtgagccagtatttatgtgtttcttaaagccaacgraatacctacggcactctgaaattttacatgaatagtaaatgaatgtatagcagttctaagtgagagaaaawataaaaacacaaacagaagcaagcttacctccaggccctccaccatatccattatacccatcaccaaacccacggccactcccatacccatctgttggaggaaaaaaatatatatttatttcaattcatctgtagcaaactgatttctatctaaaccatatgaccttaag

SEQ ID NO: 72363 - DNA, 600 bp, Chicken  19866894352255_2
atataatcctttaaaataagctttccagtgtagaaggtaaccaagttctacacaggctatttttctgttgagaagtctacaggggaacaaaaagggcaggagtttcaagaagatacatatccaactcccaccctaactgaattgtgactaaaacccactagccagactgcctaaaaacatcaatgaagtgacttgctactattctaaagagaaggacgtggttgttcaagacataaccatrcaatttcccacatcaggtataacgtgagccagtatttatgtgtttcttaaagccaacgraatacctacggcactctgaaattttacatgaatagtaaatgaatgtatagcagttctaagtgagagaaaawataaaaacacaaacagaagcaagcttacctccaggccctccaccatatccattatacccatcaccaaacccacggccactcccatacccatctgttggaggaaaaaaatatatatttatttcaattcatctgtagcaaactgatttctatctaaaccatatgaccttaagacccaaatctcacagactactgaagtacacacacttgaatttggataaaacgtatgtga

SEQ ID NO: 72364 - DNA, 600 bp, Chicken  19866894352255_3
gaagtctacaggggaacaaaaagggcaggagtttcaagaagatacatatccaactcccaccctaactgaattgtgactaaaacccactagccagactgcctaaaaacatcaatgaagtgacttgctactattctaaagagaaggacgtggttgttcaagacataaccatrcaatttcccacatcaggtataacgtgagccagtatttatgtgtttcttaaagccaacgraatacctacggcactctgaaattttacatgaatagtaaatgaatgtatagcagttctaagtgagagaaaawataaaaacacaaacagaagcaagcttacctccaggccctccaccatatccattatacccatcaccaaacccacggccactcccatacccatctgttggaggaaaaaaatatatatttatttcaattcatctgtagcaaactgatttctatctaaaccatatgaccttaagacccaaatctcacagactactgaagtacacacacttgaatttggataaaacgtatgtgaaacaacctatctaccattcctctacgccacctactttcttgcatttgtaaagtgctgggttagctttgaac

SEQ ID NO: 72365 - DNA, 599 bp, Chicken  19866894352256_1
gtggaggtttgttagcccagtgagggaagtggaatgacatctcaaatacaatagatccttgcttgttgcatggctttgcaaataccatttttacttctgacattcagaggacaagggatgattgtagcttgctattgtcttaaaattgtatttggcttgcagtggaaagtagagaaagcatcttggcaggaaaaaaagcagcaagcatcagaaagcatctaagggaacgttcccaaacttgtggccaactgagacgtgtcttttgagtgtttgctgactgagactatcaggctcaaaacrctgtaatgagattggtatcggtctagaaaaaaacaacaagaacaacaaaaaccaaatctgtaagggttgttttcctattgattctcctcctgtaggatatcctcaaaaaacacgttcctatgcttgaagcttttgcatgtctgagtgtggctgaggcaagcaacgggcccacggttgtcttagggtgtattagtgataaagctttgcttttgttatagaagatggtggaagctgttagcagctcatatgaatcttatgatgaaagaagagagcagcaaaggcaagtcagcgacccatca

SEQ ID NO: 72366 - DNA, 600 bp, Chicken  19866894352258_1
tttaagcacctttaataacctgatactaaataactgcacaattgaacaagaaatttgtctccgaccacctccatttcctgccagcagttttggattggctcccacgttctactgaaagtacaagcaaagcctgcaggctgaggaccattacgagtacaggggaagctcatcccagtttggaaataaccggcaatactgacagaatgtgctttaaaaaggagtgtttgagtctggaggccagatccagaagggagaaatagaatgcagcaagtaggctgtggcacacagacaactgctgcyyttggtacgttaagggaaaatccacacctggaaggaaaccaaaaggacttgagatataaaggaaaggggtttgttcaaacagcatgggggaagawgggatccaccttgtgcaggaatgccaatgctttgcagtcctttttattcttattctaaccaatgctgccttccaggatatgaggaaaattcaatctaaagatcaaagccactcaaaatttaaggggaatcacttttttcttttcagtgctgtacacagtgccaaagactgccctgtttcagggcagcgaatcccatgagttacac

SEQ ID NO: 72367 - DNA, 600 bp, Chicken  19866894352258_2
ttaagcacctttaataacctgatactaaataactgcacaattgaacaagaaatttgtctccgaccacctccatttcctgccagcagttttggattggctcccacgttctactgaaagtacaagcaaagcctgcaggctgaggaccattacgagtacaggggaagctcatcccagtttggaaataaccggcaatactgacagaatgtgctttaaaaaggagtgtttgagtctggaggccagatccagaagggagaaatagaatgcagcaagtaggctgtggcacacagacaactgctgcyyttggtacgttaagggaaaatccacacctggaaggaaaccaaaaggacttgagatataaaggaaaggggtttgttcaaacagcatgggggaagawgggatccaccttgtgcaggaatgccaatgctttgcagtcctttttattcttattctaaccaatgctgccttccaggatatgaggaaaattcaatctaaagatcaaagccactcaaaatttaaggggaatcacttttttcttttcagtgctgtacacagtgccaaagactgccctgtttcagggcagcgaatcccatgagttacact

SEQ ID NO: 72368 - DNA, 600 bp, Chicken  19866894352258_3
tggctcccacgttctactgaaagtacaagcaaagcctgcaggctgaggaccattacgagtacaggggaagctcatcccagtttggaaataaccggcaatactgacagaatgtgctttaaaaaggagtgtttgagtctggaggccagatccagaagggagaaatagaatgcagcaagtaggctgtggcacacagacaactgctgcyyttggtacgttaagggaaaatccacacctggaaggaaaccaaaaggacttgagatataaaggaaaggggtttgttcaaacagcatgggggaagawgggatccaccttgtgcaggaatgccaatgctttgcagtcctttttattcttattctaaccaatgctgccttccaggatatgaggaaaattcaatctaaagatcaaagccactcaaaatttaaggggaatcacttttttcttttcagtgctgtacacagtgccaaagactgccctgtttcagggcagcgaatcccatgagttacactaccagtgtgaactgagagaaacggtcagaagaggtggagccacgtgagaacagctacctgagcctctgctaaaacgttaattcttctgcaggta

SEQ ID NO: 72369 - DNA, 600 bp, Chicken  19866894352258_4
accagtgtgaactgagagaaacggtcagaagaggtggagccacgtgagaacagctacctgagcctctgctaaaacgttaattcttctgcaggtaaacactaccagatgtaatgcagagcatccccatgcttttagagtgcagcagatgaagtacgtaacatcagcaaatgtcacagccatatccacctgaagcctccttccaacacaggggcagacaagaaacttcacacattaggaaaaccacctttctataacatcatgaaccagacaaacattgagcacataaaacatgactggatkttgtgttgtgagcatgtacgaccagcacaaggctggaacgctgcccagcaagccgacaacttctgcattaaccttgtgtgatcacagctcaggttatctatttataacaccatacccaggtgttgcctacagggggatattacaggaagcagaagttaacagagcttctctccttgggatgcagcccaggtgctcaagctggtgctctcagttaggaactcagagagcatctggagtagaaagacaacagaaatgaacgtcaccatttcccaggggtcaaggattaaccatggcttgcac

SEQ ID NO: 72370 - DNA, 600 bp, Chicken  19866894352258_5
gctcaggttatctatttataacaccatacccaggtgttgcctacagggggatattacaggaagcagaagttaacagagcttctctccttgggatgcagcccaggtgctcaagctggtgctctcagttaggaactcagagagcatctggagtagaaagacaacagaaatgaacgtcaccatttcccaggggtcaaggattaaccatggcttgcacctgccctgtttactgctgagctggtatttcagaagattatcactaataccctttcgttgcttacatttcacagtttattcatcccrtgcaatatggacccctttttaatttgacccaaatataatctgcatcccacctcataccagcctctagacacatttattttagtcaaagacgtgactcaaaaatgctgtatcactcactgtaggtaacagaaaacattatttttatcaagcacattaatacaactcatcacgttcctccacactacaaattctcctgccttgtatctacatctcccactgctctttgtatataagctgaaacatcagtgggtcgggtctggtttttccactgcctgatgcttgattacagttgttggagac

SEQ ID NO: 72371 - DNA, 600 bp, Chicken  19866894352258_6
taatacaactcatcacgttcctccacactacaaattctcctgccttgtatctacatctcccactgctctttgtatataagctgaaacatcagtgggtcgggtctggtttttccactgcctgatgcttgattacagttgttggagaccaaaatagttccaggatctttcctctccactgacagtgttaaacaattagctggtcctaccactgggaatgagtgtgtacacgtccttgctgcagtgtgctcagctccagttggcaaacacaaaccttgcagcagcctctcacagttctccacrctgacctacattccatgcccatgctgacccactggggaggaaatacccactgtgagggttcctggtctcttccactgggagccttaccctgtaaaggaaggctggtagcagggaaaggggagaagaaaggtccctacaacatcaagatggacactggaaggcagagctcatctgtgcccagcagtcacctgccaatgactcccatgaagaccacaagagtgccagtgtaagtcagagctcagctaaacctccataggcaccagtcggtcccttatacagatggctcaatttgtgcagtta

SEQ ID NO: 72372 - DNA, 599 bp, Chicken  19866894352260_1
  misc_feature (1)..(71): n is any nucleotide
nnnnnnnnnnnnnnnnnnnnnnnnnnnnnnnnnnnnnnnnnnnnnnnnnnnnnnnnnnnnnnnnnnnnnnntggctgcatggggaggtgagggggtcaccatccctggtgctgttccagagccatggggatgtggcactcgggtcagagggcatggtggggtggggctgaacttggagatcttggaggtgttttccaacctgaatgattcacgattcaaacagaaagcaatgctccagcacggagcagagggtgctcaggagctcccattaacagcacttagaccggtcatcacattcartcgggttggcgttgcccaaaccatgttggctccagaaaacacctggagggaggaacgcctccttcctgctcatgtcaaagagcacatgccaaaaattgctatccattggcattgctttcattgcatttggagtggaaagcctcttttcaccaccgtcctccagcccaacaaaggaagaaatgaagactacaaagggtggttttttccttttagctttcatttttgcccctttcgccctacccttctmctttcttcctgcggcaactcactgttgtaaatggaaggaaggttgagagaaa

SEQ ID NO: 72373 - DNA, 600 bp, Chicken  19866894352260_2
gagggtgctcaggagctcccattaacagcacttagaccggtcatcacattcartcgggttggcgttgcccaaaccatgttggctccagaaaacacctggagggaggaacgcctccttcctgctcatgtcaaagagcacatgccaaaaattgctatccattggcattgctttcattgcatttggagtggaaagcctcttttcaccaccgtcctccagcccaacaaaggaagaaatgaagactacaaagggtggttttttccttttagctttcatttttgcccctttcgccctacccttctmctttcttcctgcggcaactcactgttgtaaatggaaggaaggttgagagaaaggaagaaagtaggaaaaagaaaatctctgcagtgtttggggaagcgccggtcataagtacatcaatttttagagaatggttttgacctttttttttttgctgccagctctcagagcagcagcgctccgggcagggatgctaatggcgcagatgatggaaagatttgaaccagcagaaggctggtgctggccaccagcagataaccagggacagcggggaggtcagggcagcgccgtgtgggcatccat

SEQ ID NO: 72374 - DNA, 493 bp, Chicken  19866894352264_1
aggagtttgctggggtagacttgaattttccagtttttacctaatctgacaccccttgccctgtaccagcctttctgaggtaacaccacagggtgcttctcttcctcctgcaccttttctgctcctgcatctttccctttacccccaaagggtaaaaggcgtttcagcccagatagctcttccagtcgctgccttttctggacctgttgtgctgctgccacaatgccacaggctggatgcaaaggggacagccagcacttgcctttggagagggtctgtagctgggcagagggtgacaayggctgtcagcaccaggctggagtaacgcrcagaggtgatgatgcaggcagcaggtgggtgaagtcattttattcaaggcacggtcatagcgataaataacaagaaggtacagacctctggcacattcctacagtgtggcagccaagggcaatccaagtctgagctctccaggactcagtgccacttgcagaca

SEQ ID NO: 72375 - DNA, 464 bp, Chicken  19866894352264_2
ccagtttttacctaatctgacaccccttgccctgtaccagcctttctgaggtaacaccacagggtgcttctcttcctcctgcaccttttctgctcctgcatctttccctttacccccaaagggtaaaaggcgtttcagcccagatagctcttccagtcgctgccttttctggacctgttgtgctgctgccacaatgccacaggctggatgcaaaggggacagccagcacttgcctttggagagggtctgtagctgggcagagggtgacaayggctgtcagcaccaggctggagtaacgcrcagaggtgatgatgcaggcagcaggtgggtgaagtcattttattcaaggcacggtcatagcgataaataacaagaaggtacagacctctggcacattcctacagtgtggcagccaagggcaatccaagtctgagctctccaggactcagtgccacttgcagaca

SEQ ID NO: 72376 - DNA, 600 bp, Chicken  19866894352270_1
tgccagggtcctgtgcctcagccatatcctacagctgggacagtgctttggttattagacaaacacacctatttctaaacacatttttttcctaatgagttactgtcctttcttagcacactgaaaagaattgttaatatgcttttttaggctttgccagtaacacagataggagactcttaagaaaaattttaaaatgtgtatgtgcagcgcagtactcactggccaggaaattcaggatgttgagaaatctggtgcttccctgactttgggctatgctcagggcatcctgaaaaaatrgtgggtctaggtatctccaccattgggttggaacaacctggtagaatcatggaattgttaagattggaaatggcccctaagatatttagttcagctgttcacctaccatcaaaattgcacagtaagccacgtctctaagtaccacatccacacaatttttgaacaccctcagggacagtgactctaccacctccctgggcaacctgttccaatgcatcatcactctttctgagaagaagtttttcctaatatccaacctgaacctccccattgcatatcaaggccattccctctcatcct

SEQ ID NO: 72377 - DNA, 600 bp, Chicken  19866894352275_1
tttcaattgtcagaaaaacagaaacatctgttggagtcatgagcagttgattagtggagttcatttctagggtaaggcttcagtagatcagctcttctatctaagtgtgtcactgtagtcactggaagcattacaaagagctacaaagaataagcagcagacatataaataatttgttagggtgctagtatccgtaaaagctaactataatgcatcagtcttccacatttattcactcctttccatgatagcagcatgtgaaattaataactgtatttaaacctcgcttttatctgcaayagctaaacatctgccagcctttcagttataaacctatactatttttgaagcttataaccagagactgtaaaagttctttctaaagataaaacacaatgtacaagctgtcagtctgagcacacttcttacttaataatcaaaccgagttggattctgtctgccagtccaaataatgacaaaaacattagttgttttttagatgctgcttggatttcaacccaaagctttcccagctcattacactaacataaggattaacaccttggaacatctgtgcaaaaagcagaggttaatcagaaa

SEQ ID NO: 72378 - DNA, 600 bp, Chicken  19866894352279_1
gcagttttcttggtaccttgtcttttaagtctacagtcaaacataatatgaaagaaaacagagtgaaagatgtaattaatggttgcaaatacttaaaaaaataagatagttcatctttggaaaaacaacataaaataatccataataatgatgtacagagtatttcaagtggcaaatgtgcagcttgatggcaaaaagttgaatttcccagatttagatgctgggattgtaaccttcctgccttgcccaatttgaatccagcagcaaacaactgctttaagtttactgcattgaattctrtactgtacttaaaatgtgacaaattacagacccaaatctcttcccagagaccttctactttgtaaaaataaatggtaagagcaaagtaagtattgaatrtcttatcctgccttttctgtractagtttttcctgctgtaacatcctatgagaagaaaagggagagtggatagatctcccaggccaatatctaatgtaaaggagaaatttttatctgcagaaaaaacaccagagaccggggattgagatgaatgtgaaaaaatcagattgtcagaaagacgttcacaagaattttatatga

SEQ ID NO: 72379 - DNA, 600 bp, Chicken  19866894352279_2
aataagatagttcatctttggaaaaacaacataaaataatccataataatgatgtacagagtatttcaagtggcaaatgtgcagcttgatggcaaaaagttgaatttcccagatttagatgctgggattgtaaccttcctgccttgcccaatttgaatccagcagcaaacaactgctttaagtttactgcattgaattctrtactgtacttaaaatgtgacaaattacagacccaaatctcttcccagagaccttctactttgtaaaaataaatggtaagagcaaagtaagtattgaatrtcttatcctgccttttctgtractagtttttcctgctgtaacatcctatgagaagaaaagggagagtggatagatctcccaggccaatatctaatgtaaaggagaaatttttatctgcagaaaaaacaccagagaccggggattgagatgaatgtgaaaaaatcagattgtcagaaagacgttcacaagaattttatatgatccttcaatcagcaacaaaacaaggggatcaatgcaaggatttacagtgtaaaaatattattttcagatcaagagaatattgttagctgcattttgagt

SEQ ID NO: 72380 - DNA, 600 bp, Chicken  19866894352279_3
aaaaacaacataaaataatccataataatgatgtacagagtatttcaagtggcaaatgtgcagcttgatggcaaaaagttgaatttcccagatttagatgctgggattgtaaccttcctgccttgcccaatttgaatccagcagcaaacaactgctttaagtttactgcattgaattctrtactgtacttaaaatgtgacaaattacagacccaaatctcttcccagagaccttctactttgtaaaaataaatggtaagagcaaagtaagtattgaatrtcttatcctgccttttctgtractagtttttcctgctgtaacatcctatgagaagaaaagggagagtggatagatctcccaggccaatatctaatgtaaaggagaaatttttatctgcagaaaaaacaccagagaccggggattgagatgaatgtgaaaaaatcagattgtcagaaagacgttcacaagaattttatatgatccttcaatcagcaacaaaacaaggggatcaatgcaaggatttacagtgtaaaaatattattttcagatcaagagaatattgttagctgcattttgagtagttgggaagggaaattacat

SEQ ID NO: 72381 - DNA, 600 bp, Chicken  19866894352279_4
gtaacatcctatgagaagaaaagggagagtggatagatctcccaggccaatatctaatgtaaaggagaaatttttatctgcagaaaaaacaccagagaccggggattgagatgaatgtgaaaaaatcagattgtcagaaagacgttcacaagaattttatatgatccttcaatcagcaacaaaacaaggggatcaatgcaaggatttacagtgtaaaaatattattttcagatcaagagaatattgttagctgcattttgagtagttgggaagggaaattacatgtgcattagctcagaraagatacattcttattaaattcaatcattttaaaatctgtacttgctttttgtcctcttttcaccctagacaactttcacttttcttcagatatcaaaaaaatttctatccaacaaggaaaacaatacttagtttctgtgggatcaacaggtcccagacagagcaatgaattacatacttacatctagaagtaaaattaaagagagaaaggccacttttctttacaactctcaagaacatctctggaatgaatgctgaattgaattcttaccataaaatcctgggagtgtaagatgtatt

SEQ ID NO: 72382 - DNA, 600 bp, Chicken  19866894352280_1
tttatattcatgctttctagaagagggcttaaggttatttgtgggtcctggtggaagcacttcatttggaagccatcatctacctaacaggtatgcagtctcagtgactaatctgtgggtcatgctaagcggaaatgcattgtatatggtattcattctgtgtacgtattactgatggtttcatctttctcttctgtatagctcaaaggcataaaaaaatgttgcttgtcaggttttaaatcagaagacaaaggtttcttgtaaaatccaactgatatgcctagtgaaagcataacttckgaaggtcccgaagtcttagttttcagattatgagccatgtttaggtatacacacaggagacaggcaccagttrgtaatcttggctctagggatggactagaatactctctgaaactggagtcttttcagtgttctatgcatccacctttacagtatcaaacactggtcttcccagtagcaagcctaattttgtttccttcagttttgctcacagctccttctgtttccacaaggtaaactattcgtatttcaacagcctttctgacttgaagctttttgtagccctaaactctgtctttt

SEQ ID NO: 72383 - DNA, 600 bp, Chicken  19866894352280_2
catcatctacctaacaggtatgcagtctcagtgactaatctgtgggtcatgctaagcggaaatgcattgtatatggtattcattctgtgtacgtattactgatggtttcatctttctcttctgtatagctcaaaggcataaaaaaatgttgcttgtcaggttttaaatcagaagacaaaggtttcttgtaaaatccaactgatatgcctagtgaaagcataacttckgaaggtcccgaagtcttagttttcagattatgagccatgtttaggtatacacacaggagacaggcaccagttrgtaatcttggctctagggatggactagaatactctctgaaactggagtcttttcagtgttctatgcatccacctttacagtatcaaacactggtcttcccagtagcaagcctaattttgtttccttcagttttgctcacagctccttctgtttccacaaggtaaactattcgtatttcaacagcctttctgacttgaagctttttgtagccctaaactctgtcttttgataatccgtttggcatatttttcacatagttgtcttagaaccagagagagtatattttcttaagtctcttca

SEQ ID NO: 72384 - DNA, 600 bp, Chicken  19866894352291_1
atgtttaacagactcaaacacatctatatgtcacttactcaattacaagaactgaagggattgctaaaggctcttctggaaaggtattccagaacaaagttttgctaagaacaggggcaacaatcactgaggaagagcccatgcttacgtgtttttaagcagccatttgcatacatcacatctgatcccaatagcagcagaacactgacattctgtactgacacagggctgcatactgaggttgctacacatgagcagaaacgtgtgtctcagcccagtcactacagcagagggatttcycattgctgtatgcaagcgaacagcgttctgaatacacaaatggttgtcagaacagtacagtttgagaccttacagtaatgcctccaacacacaaagaaaggtacctgtccatggctgctgacactcacttttctgggctacagtgttgttcactgaagaatttaacatccagaggtaccactaaattaagacttcagattacagttactgtacattgatacgtgcctgtttaaaacaaacctctgtgtactcttgtaattcactgacagaaaatctgcttcaatgcacctaggtcacaac

SEQ ID NO: 72385 - DNA, 600 bp, Chicken  19866894352296_1
gcaggggacacgcttcttgccctccccacatggctccaggcctcaagggagccagcatggctcctgctgaccccactcccggtgcagcagctgcctcccagctttcttctcagcagcagctggggaaaaaaagcaaaaccttggcagcacggagcaagggaaacaccagagcatgcctgggtccggctggtccccagcagctcctgccttgctgcacgtgcagcaatctccacagtgcatcctgtgctggaagcattcactcaaatctgggggagatgctttgaaaatcacctggctgcwgaatgtgctgtggctgcagggatgtcctgtctccatcatggtatactgtgcatcccagcccactcagtcctattgctcatggagaaagtcctctgggataaacctgctctggagtggcctggatcaccaaacccgtgctgccagtgactgatgggatgtccttatcatgaggtgtgaccagccagcaccacagcatgaccttctagctcctgctgtacaacaaaactccacaarraaattccatttcagtgccgaaccaactcaaagtggagcatttctggtccatccaaaaagccatag

SEQ ID NO: 72386 - DNA, 600 bp, Chicken  19866894352296_2
gtgcatcctgtgctggaagcattcactcaaatctgggggagatgctttgaaaatcacctggctgcwgaatgtgctgtggctgcagggatgtcctgtctccatcatggtatactgtgcatcccagcccactcagtcctattgctcatggagaaagtcctctgggataaacctgctctggagtggcctggatcaccaaacccgtgctgccagtgactgatgggatgtccttatcatgaggtgtgaccagccagcaccacagcatgaccttctagctcctgctgtacaacaaaactccacaarraaattccatttcagtgccgaaccaactcaaagtggagcatttctggtccatccaaaaagccatagagaaacgtgagaggaaattaaagyttctttttgctgacattttttattcttctgatccatctttttcagagtttgagcactgagggacaaagaaacattaccttgactctctgaacatcagtttagactgttaccaaggaatcctgcaaagcagagtgctggacaaggaaaactgctttgcaactacaggggatgagctgttattccagctccgacaccattacacagccccag

SEQ ID NO: 72387 - DNA, 600 bp, Chicken  19866894352296_3
tgcatcctgtgctggaagcattcactcaaatctgggggagatgctttgaaaatcacctggctgcwgaatgtgctgtggctgcagggatgtcctgtctccatcatggtatactgtgcatcccagcccactcagtcctattgctcatggagaaagtcctctgggataaacctgctctggagtggcctggatcaccaaacccgtgctgccagtgactgatgggatgtccttatcatgaggtgtgaccagccagcaccacagcatgaccttctagctcctgctgtacaacaaaactccacaarraaattccatttcagtgccgaaccaactcaaagtggagcatttctggtccatccaaaaagccatagagaaacgtgagaggaaattaaagyttctttttgctgacattttttattcttctgatccatctttttcagagtttgagcactgagggacaaagaaacattaccttgactctctgaacatcagtttagactgttaccaaggaatcctgcaaagcagagtgctggacaaggaaaactgctttgcaactacaggggatgagctgttattccagctccgacaccattacacagccccaga

SEQ ID NO: 72388 - DNA, 600 bp, Chicken  19866894352296_4
tcctgtctccatcatggtatactgtgcatcccagcccactcagtcctattgctcatggagaaagtcctctgggataaacctgctctggagtggcctggatcaccaaacccgtgctgccagtgactgatgggatgtccttatcatgaggtgtgaccagccagcaccacagcatgaccttctagctcctgctgtacaacaaaactccacaarraaattccatttcagtgccgaaccaactcaaagtggagcatttctggtccatccaaaaagccatagagaaacgtgagaggaaattaaagyttctttttgctgacattttttattcttctgatccatctttttcagagtttgagcactgagggacaaagaaacattaccttgactctctgaacatcagtttagactgttaccaaggaatcctgcaaagcagagtgctggacaaggaaaactgctttgcaactacaggggatgagctgttattccagctccgacaccattacacagccccagactccaggcatatgcacagcaagatatggcccctgctgctacctgccmtcagaaatcaatactttccaacaggatagggaaaccacctcc

SEQ ID NO: 72389 - DNA, 600 bp, Chicken  19866894352296_5
ccatccaaaaagccatagagaaacgtgagaggaaattaaagyttctttttgctgacattttttattcttctgatccatctttttcagagtttgagcactgagggacaaagaaacattaccttgactctctgaacatcagtttagactgttaccaaggaatcctgcaaagcagagtgctggacaaggaaaactgctttgcaactacaggggatgagctgttattccagctccgacaccattacacagccccagactccaggcatatgcacagcaagatatggcccctgctgctacctgccmtcagaaatcaatactttccaacaggatagggaaaccacctccaactggcgttactgcatggaggagcagagctcaaggttcagcactaaaccactcgcaagagcagcccctgatgcacccttcacatcaaagcctgcctraaaacacaaacccaagcacgtcctcactggacagactagaaggagttgggggtggggggggaaggaaaagaaaatataagaagtgctctacttaccaccagttcggtgaacatgacatccagctcctccaccggtggcatgggcagtgcgggctccatgg

SEQ ID NO: 72390 - DNA, 600 bp, Chicken  19866894352296_6
ttagactgttaccaaggaatcctgcaaagcagagtgctggacaaggaaaactgctttgcaactacaggggatgagctgttattccagctccgacaccattacacagccccagactccaggcatatgcacagcaagatatggcccctgctgctacctgccmtcagaaatcaatactttccaacaggatagggaaaccacctccaactggcgttactgcatggaggagcagagctcaaggttcagcactaaaccactcgcaagagcagcccctgatgcacccttcacatcaaagcctgcctraaaacacaaacccaagcacgtcctcactggacagactagaaggagttgggggtggggggggaaggaaaagaaaatataagaagtgctctacttaccaccagttcggtgaacatgacatccagctcctccaccggtggcatgggcagtgcgggctccatggtctgcagggcgaagctgctgtcattgcgcagccggtatgtgatctcggggtggtcgctgctgcgaaagcagcagaagatgaaggagatcccccgaccgctcctcttcctcggggccatggccgaaatgctccacgtccct

SEQ ID NO: 72391 - DNA, 599 bp, Chicken  19866894352302_1
  misc_feature (1)..(157): n is any nucleotide
nnnnnnnnnnnnnnnnnnnnnnnnnnnnnnnnnnnnnnnnnnnnnnnnnnnnnnnnnnnnnnnnnnnnnnnnnnnnnnnnnnnnnnnnnnnnnnnnnnnnnnnnnnnnnnnnnnnnnnnnnnnnnnnnnnnnnnnnnnnnnnnnnnnnnnnnnnnnncctggctgctatcactatactttcccatcacgttataccattatgcagtcaaatgccttttttttgccccttaaattaagtagcttcaactcagatatgatgcaggaatcagaaagtattgctttcagtgtgttgatgtcttsttaatgtccttctttggctatggcagagatcatatacaattcaactgatattttctagctctgtttgttgacttgcaaaagcatttatattggagcatctacgtgaactcttcccttggcttatcattacagtttgttacttgaattctttatttctaggatgctgggttgcaactgataattaaatcaccataawtgtagcatgagtcacatgaaatggggtcagaatatttaagtgtatctggagagagtaatacttattcaaagagatatgcaggaacagcagcaaaaagtggagc

SEQ ID NO: 72392 - DNA, 600 bp, Chicken  19866894352302_2
attatgcagtcaaatgccttttttttgccccttaaattaagtagcttcaactcagatatgatgcaggaatcagaaagtattgctttcagtgtgttgatgtcttsttaatgtccttctttggctatggcagagatcatatacaattcaactgatattttctagctctgtttgttgacttgcaaaagcatttatattggagcatctacgtgaactcttcccttggcttatcattacagtttgttacttgaattctttatttctaggatgctgggttgcaactgataattaaatcaccataawtgtagcatgagtcacatgaaatggggtcagaatatttaagtgtatctggagagagtaatacttattcaaagagatatgcaggaacagcagcaaaaagtggagcactgctaactagtctattcatgtactgctggtatactgataagaattcctgttytcttagtggagtatcgaaatggccaccctgcgtaaactatggaatgtaattactctgatatataggaaatttctggcaggcatagacttgctataggtagcacagcatcaccctgcaaagtcccctggtagtagggaaatggc

SEQ ID NO: 72393 - DNA, 600 bp, Chicken  19866894352302_3
tctagctctgtttgttgacttgcaaaagcatttatattggagcatctacgtgaactcttcccttggcttatcattacagtttgttacttgaattctttatttctaggatgctgggttgcaactgataattaaatcaccataawtgtagcatgagtcacatgaaatggggtcagaatatttaagtgtatctggagagagtaatacttattcaaagagatatgcaggaacagcagcaaaaagtggagcactgctaactagtctattcatgtactgctggtatactgataagaattcctgttytcttagtggagtatcgaaatggccaccctgcgtaaactatggaatgtaattactctgatatataggaaatttctggcaggcatagacttgctataggtagcacagcatcaccctgcaaagtcccctggtagtagggaaatggctggtatgttctgatagcttagctatttctgagcctctgtgtggcagattagttttgctgggacagtcctttgacaagatgcaatgtggtgctcttcctttctccctgcttctgctctccttgcttccctataattcctgtactttttgtacgtgaat

SEQ ID NO: 72394 - DNA, 599 bp, Chicken  19866894352311_1
  misc_feature (1)..(10): n is any nucleotide
nnnnnnnnnnattcagtagtggctctattttcagcacctagaaagactcctgtttttactgctgctgattacattaattttctcttcttttcaacttcagaaaaacagtcaagttctaaaaatttaatttgtcagcagaaatctaagtacttaacagattcactgacaaggacagtctcagagacaaaagaaatgaagattttctttaaacaatttcacttactatttttatgttacctaatacaggataacaccagagtatcaacaactgcaaaatggaaacagtctgcctgcacctaraagaccttctgaacaatttatccatccataggatatctctccaagacactaacaccttcattcataagaacaaagacacaggtgaagttcttgtgctttgctatggtaacctgattacacacttccttgagtaacagccaagtagggtctgacagagaggttcttttgaatacttgcataakgtctgctgtcatgtgttaaccatgtacactgttagaagagaactaagctcgagattccctctttgtggtcctggaatcaaatatattctacctcacttctgtgcaagatgatttgaa

SEQ ID NO: 72395 - DNA, 600 bp, Chicken  19866894352311_2
gacaaaagaaatgaagattttctttaaacaatttcacttactatttttatgttacctaatacaggataacaccagagtatcaacaactgcaaaatggaaacagtctgcctgcacctaraagaccttctgaacaatttatccatccataggatatctctccaagacactaacaccttcattcataagaacaaagacacaggtgaagttcttgtgctttgctatggtaacctgattacacacttccttgagtaacagccaagtagggtctgacagagaggttcttttgaatacttgcataakgtctgctgtcatgtgttaaccatgtacactgttagaagagaactaagctcgagattccctctttgtggtcctggaatcaaatatattctacctcacttctgtgcaagatgatttgaagcaccaggaaatttaaatctcacaatacttactcttctgtattttcatttccaagccattcattcagcttcttttgccgaacacctttctgagtcagccacctggacaataattgcaaataaaattaattattagttacagaagttggatgccagaaaaaaaaaaaaatcaaggaaagaattt

SEQ ID NO: 72396 - DNA, 566 bp, Chicken  19866894352312_1
cgagcaaagaaccgggaagtcccaccccgccgctgtcagcaacttttggaattaagtcccaattaaaaagaaataaattcagataccgcaaggcgcagatgaggagatttaagccgcgcagccgacgagcaccttttctcgcgcgtttaagcggtcgcgtctttcctgccgcacacaaaagggacgcaccgcagcagctgcccaacctccgcactcacctcccggctgctttcttccttcccttcaaaggtggcggtggaatcagtcagcagcagtcaccccgcatagagcgcgctgccstcctctcccgggctgacgtgacggcggggctctgccgctgccgcagccccagcgccgctcctcactcctctgcgaggctcatcggcacttgccaacaatgagctgtgtttcttacccagctttggccacagctaatataggatttcagaagggaggagcaaaacccttacaggcaaccagaagtaaaacctggagcaagcgaggggaaaaaaaaaaaaaaaaaaaaaaaaaaaaaccaaccaacacccagcgcgcacacatacacg

SEQ ID NO: 72397 - DNA, 600 bp, Chicken  19866894352314_1
gctgaacagagggtttcaaagttggctccaccatagagcaagcagagatctgcatggcttagtctttgtgcagcagctgatgtggagatcaaggcttgtcccctgcttcagctgacaaatgccaggagtggctcccaggcaaagactggtgaaggaggcagagttgccaagggacaatgcaatgcatgttggaaaacagtgtctttccttcaatgctgcaatagatcacagctgttagaagaagcgcccagggagttggagagaccatggccagaaatgcctagggagatggaatgaccrcagccatcctcaggcagaaggtgatctccgagtttgcgtgtggttaacgttacacaaaatgcactgaaaaggagaaggaaacaccatgagccaactctgtgttctgtcggccccttgatttcagaggcagaaggaaaagattaaaatcgttagcaattggaaaaatccagtttattctatgcattagcaatgctggtatgcaaacacatcttcagagagcagctgctgtcctagcgtgcttttgtctttccagaaacagaacaagaagacccagtaggtgcactgcactttcyattgtca

SEQ ID NO: 72398 - DNA, 600 bp, Chicken  19866894352314_2
atgaccrcagccatcctcaggcagaaggtgatctccgagtttgcgtgtggttaacgttacacaaaatgcactgaaaaggagaaggaaacaccatgagccaactctgtgttctgtcggccccttgatttcagaggcagaaggaaaagattaaaatcgttagcaattggaaaaatccagtttattctatgcattagcaatgctggtatgcaaacacatcttcagagagcagctgctgtcctagcgtgcttttgtctttccagaaacagaacaagaagacccagtaggtgcactgcactttcyattgtcatctccattgtattaataaacccaaccaccttcctgcgcaagggttagctcagtccctcttttcattactgctgaatgtaccagaacagtctcagatatttacagatcttggagtgtgatggagcagtatccaaatagagctggcagcagaagataccaaaaaatagtcactttgaaaacagcagaagaagggaaagaaaaacaaaccaaaacgccctgctctcagccctcaactccagcgctgactccctgtgatttcttggctgctcttgtgaccttcacctaaaaaggggg

SEQ ID NO: 72399 - DNA, 600 bp, Chicken  19866894352322_1
aggcaccactacagaataagaagtttctgacaactttacctgttggaagtcatacaacaaggtcacaaaagagcggatgaggtaattggacgtttgggatatttctaagatgtggaaaagaaattctctatattaagatgatgcaaagtaatgctgtgaagtaatttgatgactgcttgtaagtatctgtagaagaaagtatttctggtgtcaagggactgttgtccttaagaggaataagaatactgggatccagtgactaaaacctgcaccacaatccagaatagaagcagtgcgttyatgagggacagcagtagtgatacaatggctggaaatgtccagcctgagatagcagcgcgcttttggagaagagcagctgtagtttagtaatagttcttggatttgaaataaaaaaaggaagagctgagttgtaaaggaggcaaaaagtaatcaatctartgaatcaatttgcatagggatttttcattgaagattgttaaaggtgatttgttttattcagctgggtttacctgcaggtttacagaagttgttctttattggttgaaaagaagataatcttgaaaacaataggttggaaca

SEQ ID NO: 72400 - DNA, 600 bp, Chicken  19866894352322_2
agtaatttgatgactgcttgtaagtatctgtagaagaaagtatttctggtgtcaagggactgttgtccttaagaggaataagaatactgggatccagtgactaaaacctgcaccacaatccagaatagaagcagtgcgttyatgagggacagcagtagtgatacaatggctggaaatgtccagcctgagatagcagcgcgcttttggagaagagcagctgtagtttagtaatagttcttggatttgaaataaaaaaaggaagagctgagttgtaaaggaggcaaaaagtaatcaatctartgaatcaatttgcatagggatttttcattgaagattgttaaaggtgatttgttttattcagctgggtttacctgcaggtttacagaagttgttctttattggttgaaaagaagataatcttgaaaacaataggttggaacaaggactgttgttcagttctctgttgtacggcaccaactacaacgtggatgctggtttatgactgtgagccctaaactttataaatgacaataatagtactattaacagtaattcacttcttgttttgtgtactatttgaaaatttgggtggctcacatt

SEQ ID NO: 72401 - DNA, 600 bp, Chicken  19866894352325_1
ggtgcagaagttgaaggagccgagtctgaagtgtgtggatatggtagtgagtgagctcacatccaccatcagaaagtgtagcgaaaaggtaaagaaacgaaaaacaccaagaaaggtcaacgcccacccccttcccacacacattggtgcacacaccacgggaccattggcaagcccagggagagaggagggatgtggagatgctctgaaggagggcagccatctgcaggcagcagtgcaggttcaaagcagtggatcaggagcggtgggcattagctggtgggctctttggctgagccrtgggctgggacccagtggttactctgtgctgtgcccttctcctctctgtgtctcagaggtgttcagctcagtgtggaacaagcccttcmctgtgccagtccctgagtatttgggactccttacttgtttttactgggacccccytccctaaaaatyccacacaggagaagggaaagaagccaaagggaatgaacttatgtcccctcacagcgtgagtttcagcaggcctcaccttgcctacagggcactgtgtacaaagcagcaatcgattcaggctcgaagcagaagctattctccagc

SEQ ID NO: 72402 - DNA, 551 bp, Chicken  19866894352325_2
taaagaaacgaaaaacaccaagaaaggtcaacgcccacccccttcccacacacattggtgcacacaccacgggaccattggcaagcccagggagagaggagggatgtggagatgctctgaaggagggcagccatctgcaggcagcagtgcaggttcaaagcagtggatcaggagcggtgggcattagctggtgggctctttggctgagccrtgggctgggacccagtggttactctgtgctgtgcccttctcctctctgtgtctcagaggtgttcagctcagtgtggaacaagcccttcmctgtgccagtccctgagtatttgggactccttacttgtttttactgggacccccytccctaaaaatyccacacaggagaagggaaagaagccaaagggaatgaacttatgtcccctcacagcgtgagtttcagcaggcctcaccttgcctacagggcactgtgtacaaagcagcaatcgattcaggctcgaagcagaagctattctccagcagatacacagagtaaacagaatagtgacccaagtgacttg

SEQ ID NO: 72403 - DNA, 496 bp, Chicken  19866894352325_3
tggtgcacacaccacgggaccattggcaagcccagggagagaggagggatgtggagatgctctgaaggagggcagccatctgcaggcagcagtgcaggttcaaagcagtggatcaggagcggtgggcattagctggtgggctctttggctgagccrtgggctgggacccagtggttactctgtgctgtgcccttctcctctctgtgtctcagaggtgttcagctcagtgtggaacaagcccttcmctgtgccagtccctgagtatttgggactccttacttgtttttactgggacccccytccctaaaaatyccacacaggagaagggaaagaagccaaagggaatgaacttatgtcccctcacagcgtgagtttcagcaggcctcaccttgcctacagggcactgtgtacaaagcagcaatcgattcaggctcgaagcagaagctattctccagcagatacacagagtaaacagaatagtgacccaagtgacttg

SEQ ID NO: 72404 - DNA, 484 bp, Chicken  19866894352325_4
cacgggaccattggcaagcccagggagagaggagggatgtggagatgctctgaaggagggcagccatctgcaggcagcagtgcaggttcaaagcagtggatcaggagcggtgggcattagctggtgggctctttggctgagccrtgggctgggacccagtggttactctgtgctgtgcccttctcctctctgtgtctcagaggtgttcagctcagtgtggaacaagcccttcmctgtgccagtccctgagtatttgggactccttacttgtttttactgggacccccytccctaaaaatyccacacaggagaagggaaagaagccaaagggaatgaacttatgtcccctcacagcgtgagtttcagcaggcctcaccttgcctacagggcactgtgtacaaagcagcaatcgattcaggctcgaagcagaagctattctccagcagatacacagagtaaacagaatagtgacccaagtgacttg

SEQ ID NO: 72405 - DNA, 599 bp, Chicken  19866894352326_1
  misc_feature (1)..(7): n is any nucleotide
nnnnnnnaattttgtctgtcagaaacaaactgctgctacagcatcagtgctccccgctcagttaatgtttatttaaatgtccattttatgcaggcagagagaagactgaactgttttgttgccactgttgcttttaaagccctcaaatacgaaggcgcccgaagccaacatttgattctcattctgttacgacgttttttcccctgcataatttgaataacattctgcttaacccaacagctggagggatatggtctttctttaactttcagaaggagcagctcgttctgtaaaccctcygttctgcaacgagaccaagcataggaagtctggtgtgggttgcagagcgctcgttttccctccccacctttacacggttctggaaatgatcacccagggcctttatttactgcagcgattagtgcagtgtaaccactcagacagagaaaaccagccagcacgaagggcattttaatggcacgcacacctttccattaggaaacagattgatagttagccactcttgggttcccacctcttaagggatcattacaatcaattagccctctccagtctagcgcaagctatagggtttcagc

SEQ ID NO: 72406 - DNA, 600 bp, Chicken  19866894352326_2
ctcacagctcgagctaaagccggtatttaagagaagacagtcctgccctggcttctgttaaaggcttcaaggaaatcctttcaggcatacctgtcctgcagtggctccatcagcctcacaggtaccaccctgcatcccatgagctgtgcacggggcagccccaactcttccctttatcccatgagtcaaagagatagcaggtccttccaaagcccggatctcaatgggagccaaatggattttatcctccacgaggcagcatcacttttaagatgggatttttaggggcattttatggtktttttttttactaccttttcataccttaaccacaaagcattccttcctccctgatcatatgcaagttgaaatgaaagtcagaattgattcaagttttcttaaatcttacttgttactgctcctctgggcccgttattgaaactccagacactcttccccatttcgggagttaatgagagtcattttacactcctgaaacacactcatgttttacctgctattgagagacacgctttcaaggtctctgaaacagcttggcttgataacagagttttaggcagcactataccgggtttattt

SEQ ID NO: 72407 - DNA, 600 bp, Chicken  19866894352343_1
ttgacccgtctcctatgtttgattggcctcctattaagactcttgtaatttcttaattaagatagtttccttataatgctttccagatgtggcttcctactgcttttctttaatagacctaggtacagctctgtgattgtgcttctcaggtgtagtttcctaattgcttatctttacttacacagttgatgtgcttattctaaggcttctgaaaaggttgtgcaaagttttttgatttagtttgcttaaaattcattttacactgctatgatttattaaaataataaatatattttaaayagtttgcaatttatttatatattgataactgtggcattgtttctaaagttagcatctacaaatatagatattcttcacattacaccaatactggaatctgtatttttactattataagagagaagatgttgagagcttacaaaaaaagtgatggtgttcctggagacacagctgtgtttgctgtcagaaggccagagttccagggctagctctggttaacatggccaggacctgcaggtaatgttaatggttttaggcaatttttttagagagtgtcaggctgagggaaataaaaaagga

SEQ ID NO: 72408 - DNA, 600 bp, Chicken  19866894352346_1
cttgaggcactgtagccactggaggataaatataataaacactgtttcctcgctaattactgtttgtgtttttgttatgaaattaatttgttcaaggaagcttgactgaacaggtagagacagatagaacggtctaattccaattaatttctagatattaaatagaaatcctcattttatggagtgccagtcacatcattttggcattagtatactagatactttacacccattgcttcatttgcttgctaatgtatttataaactggtgacaaacaggttgcaaacattttacataaaygtttccagtgtctgaaaccatggtagccctgcaagcagcaagctggcggagaggtggcatttttgagagacactggttggacgtgcacactgtcacgatgtttttcatagaatcacagaatggcatgggctggaagggactttacagacatctagttctaaccccttggatgccagcaggaacagggaattcacaacttgtctggttgacctgtgccaggcctcaccacccttacagtaaagaatttcttccttctatctaatttaaagctactcttgtttagtttaaagccacgggctt

SEQ ID NO: 72409 - DNA, 600 bp, Chicken  19866894352348_1
tttggccgcagccatgccccagaacacagcagtgtcagacacagcacagccctggtgctggacccaaagcttcagtctgatgttaaaaccccaccaacaggagagacagtagagaatcttccctgtccccttccctgaagctcttgttcagtttgacaggggtcaaacctgcatgtgcaccattcacagctgcacagactgtgagcactcaccccctcagacaacacaagggcaatatctatagacctgaagaagcctcccaaggctgcctgacagctacaacgtgcacaattacctcaktatctcacagaacacttgagagtctcatggtgaatttcagcattaagaggatcatcaatttaataaaccttctgtatctctcacgtaagaaaataactaattacaatgacaaacgcaccattcccataagctgctttgaggcaaagccggatggtgttcgccttcatttcctaaagaacagaaatgttgcaggaagaaaaataattctttcttctccaggatctgggaggtatgaaaatggtgaaacaaacccacagaaccacgtgggccccaggcagcctgcagtgggcacagccttcc

SEQ ID NO: 72410 - DNA, 600 bp, Chicken  19866894352348_2
tttcagcattaagaggatcatcaatttaataaaccttctgtatctctcacgtaagaaaataactaattacaatgacaaacgcaccattcccataagctgctttgaggcaaagccggatggtgttcgccttcatttcctaaagaacagaaatgttgcaggaagaaaaataattctttcttctccaggatctgggaggtatgaaaatggtgaaacaaacccacagaaccacgtgggccccaggcagcctgcagtgggcacagccttcctgctgactcagagcagcgtaggcaaaacccacasctccaggagatgtaaatgccagcatctctgctccgggttctgctgtcctctcctgcccagctgagcccaaccttgctggttgccttcccatttccagcatcatgcatygctgacacggactacaatgagatgcaatgcactaattaacttygggggcttttccaattagatttgaactctctgggctgtgcagctgagcctctcagaaggctctcagctgaggaaaataggcagaatagtgatcctgtgtaagccaagagctttaacaygaagcacaaacagcaggaaaagaaaggtgat

SEQ ID NO: 72411 - DNA, 600 bp, Chicken  19866894352348_3
aaagccggatggtgttcgccttcatttcctaaagaacagaaatgttgcaggaagaaaaataattctttcttctccaggatctgggaggtatgaaaatggtgaaacaaacccacagaaccacgtgggccccaggcagcctgcagtgggcacagccttcctgctgactcagagcagcgtaggcaaaacccacasctccaggagatgtaaatgccagcatctctgctccgggttctgctgtcctctcctgcccagctgagcccaaccttgctggttgccttcccatttccagcatcatgcatygctgacacggactacaatgagatgcaatgcactaattaacttygggggcttttccaattagatttgaactctctgggctgtgcagctgagcctctcagaaggctctcagctgaggaaaataggcagaatagtgatcctgtgtaagccaagagctttaacaygaagcacaaacagcaggaaaagaaaggtgattagataacgaagaaagaaacctactgcaattttataaaccgtactcgtccaaactgaaatgcaattactccccatttaaaccacaggaagccacctacagaacatcac

SEQ ID NO: 72412 - DNA, 600 bp, Chicken  19866894352348_4
gttgcaggaagaaaaataattctttcttctccaggatctgggaggtatgaaaatggtgaaacaaacccacagaaccacgtgggccccaggcagcctgcagtgggcacagccttcctgctgactcagagcagcgtaggcaaaacccacasctccaggagatgtaaatgccagcatctctgctccgggttctgctgtcctctcctgcccagctgagcccaaccttgctggttgccttcccatttccagcatcatgcatygctgacacggactacaatgagatgcaatgcactaattaacttygggggcttttccaattagatttgaactctctgggctgtgcagctgagcctctcagaaggctctcagctgaggaaaataggcagaatagtgatcctgtgtaagccaagagctttaacaygaagcacaaacagcaggaaaagaaaggtgattagataacgaagaaagaaacctactgcaattttataaaccgtactcgtccaaactgaaatgcaattactccccatttaaaccacaggaagccacctacagaacatcacacttcattcaccattaattttacctgctttgatcccaaacctg

SEQ ID NO: 72413 - DNA, 600 bp, Chicken  19866894352348_5
tgactcagagcagcgtaggcaaaacccacasctccaggagatgtaaatgccagcatctctgctccgggttctgctgtcctctcctgcccagctgagcccaaccttgctggttgccttcccatttccagcatcatgcatygctgacacggactacaatgagatgcaatgcactaattaacttygggggcttttccaattagatttgaactctctgggctgtgcagctgagcctctcagaaggctctcagctgaggaaaataggcagaatagtgatcctgtgtaagccaagagctttaacaygaagcacaaacagcaggaaaagaaaggtgattagataacgaagaaagaaacctactgcaattttataaaccgtactcgtccaaactgaaatgcaattactccccatttaaaccacaggaagccacctacagaacatcacacttcattcaccattaattttacctgctttgatcccaaacctggcacccatcacctctctctcaaaatacaaacaaatcactctgcaatgagatttgttatcttctgtgctttgtgtcacagccattttgctttaaaaatcatttggaaacagttgattta

SEQ ID NO: 72414 - DNA, 599 bp, Chicken  19866894352349_1
  misc_feature (1)..(79): n is any nucleotide
nnnnnnnnnnnnnnnnnnnnnnnnnnnnnnnnnnnnnnnnnnnnnnnnnnnnnnnnnnnnnnnnnnnnnnnnnnnnnnnccccacagagctccatagaaccccatagagccccatagaaaccgcatagagcctcatagaaaccccatagagcaccatagtagccccatagagccccacagcacccaatagaaaccccatagagccccatagccgccccgtagtgcctcataggaccccatagaaaccccacagagccccattgagacccatggaaccccatagaaaccctgtagagccgsacagtgcccatagaaaccccatrgagccccatarccgccccgtagcgcttcataggaccccatagggaccccatagagacccatagaaaccccacagagccccatagaaaccccgtagagccctacagcgccccatagaaacaccatagcgcctcataggaccccatagcaccctatagaaaccccatagagccccatagcaggagctggaggtgcaggaggaccaaccccacacatcaccccatagctgaccctattatcccatagctgatctcataatatcatagctgaccctgtca

SEQ ID NO: 72415 - DNA, 599 bp, Chicken  19866894352349_2
  misc_feature (1)..(56): n is any nucleotide
nnnnnnnnnnnnnnnnnnnnnnnnnnnnnnnnnnnnnnnnnnnnnnnnnnnnnnnnccccacagagctccatagaaccccatagagccccatagaaaccgcatagagcctcatagaaaccccatagagcaccatagtagccccatagagccccacagcacccaatagaaaccccatagagccccatagccgccccgtagtgcctcataggaccccatagaaaccccacagagccccattgagacccatggaaccccatagaaaccctgtagagccgsacagtgcccatagaaaccccatrgagccccatarccgccccgtagcgcttcataggaccccatagggaccccatagagacccatagaaaccccacagagccccatagaaaccccgtagagccctacagcgccccatagaaacaccatagcgcctcataggaccccatagcaccctatagaaaccccatagagccccatagcaggagctggaggtgcaggaggaccaaccccacacatcaccccatagctgaccctattatcccatagctgatctcataatatcatagctgaccctgtcaccccatagctgaccccacgcaat

SEQ ID NO: 72416 - DNA, 599 bp, Chicken  19866894352349_3
  misc_feature (1)..(45): n is any nucleotide
nnnnnnnnnnnnnnnnnnnnnnnnnnnnnnnnnnnnnnnnnnnnnccccacagagctccatagaaccccatagagccccatagaaaccgcatagagcctcatagaaaccccatagagcaccatagtagccccatagagccccacagcacccaatagaaaccccatagagccccatagccgccccgtagtgcctcataggaccccatagaaaccccacagagccccattgagacccatggaaccccatagaaaccctgtagagccgsacagtgcccatagaaaccccatrgagccccatarccgccccgtagcgcttcataggaccccatagggaccccatagagacccatagaaaccccacagagccccatagaaaccccgtagagccctacagcgccccatagaaacaccatagcgcctcataggaccccatagcaccctatagaaaccccatagagccccatagcaggagctggaggtgcaggaggaccaaccccacacatcaccccatagctgaccctattatcccatagctgatctcataatatcatagctgaccctgtcaccccatagctgaccccacgcaatcccatgtgacc

SEQ ID NO: 72417 - DNA, 600 bp, Chicken  19866894352351_1
atttataagtaatgcaaaatcaaatgagttttgtcaacaaggaaaaggaagtttacaaaggaatgcaatgccttctttccagggcagaggggaggaggaaggaggaactaacttccaccatggaacgttttagagacttcttaaaaactttttagttgttcttttcagtacaactatgggtgttatcttataattttctacgtgctgtattaaagttggttgttgtaggaaggtcttataaagtgaggcagtgattcctgagcaagagaggaaagtgttcagattactgtagcttgtttmattaggaagacagaatttgtattgttaattatgcatttttgcaacaccaaaaakaagagattttctcttttttgcactttatgaaatgttagtcatatgcttggaatttaattattctccctgtttttcagtgcttatgtttcactgatggtgtaacaattgctcccatgcccccagcccaagaccacaagaggctaaaggatggagatgagggccctaacactggagggatgggagcttattctccagcacctcaggtaaaaatgtaataagatgatgacttgctgaacccatactata

SEQ ID NO: 72418 - DNA, 600 bp, Chicken  19866894352351_2
acaaaggaatgcaatgccttctttccagggcagaggggaggaggaaggaggaactaacttccaccatggaacgttttagagacttcttaaaaactttttagttgttcttttcagtacaactatgggtgttatcttataattttctacgtgctgtattaaagttggttgttgtaggaaggtcttataaagtgaggcagtgattcctgagcaagagaggaaagtgttcagattactgtagcttgtttmattaggaagacagaatttgtattgttaattatgcatttttgcaacaccaaaaakaagagattttctcttttttgcactttatgaaatgttagtcatatgcttggaatttaattattctccctgtttttcagtgcttatgtttcactgatggtgtaacaattgctcccatgcccccagcccaagaccacaagaggctaaaggatggagatgagggccctaacactggagggatgggagcttattctccagcacctcaggtaaaaatgtaataagatgatgacttgctgaacccatactatagctctagtattgaaagcagtctggatttttcagttccgctatggcaaacagaac

SEQ ID NO: 72419 - DNA, 600 bp, Chicken  19866894352353_1
agtaagctttattttttaaatgaagaaaaggaatcatgtttaaacgaatgaaatgttctttctacacctgcaaagtaaatcaatgatgtcaaaacattcagcagcctttggttacaggcccttcgacctcaggtgcacttccacattgcagtacttctggcagtgaaactgattaaagagcgtcctgcctgcacctgtctcgagttgcttgttcctgtgcaccaaaagagtttactgacctctcaagatatagttcaatatgttcctttaattagcaaagctgattaaaaaggttttcasttttcccaaccactccttcttctgttgctctcacttcaccacagttacttatatcaattcatataggactgggctaaaaccagtccacagaaaatatgctattgatttccttgaaaaaggccttcgggtgatagccctatgaacaagtaagtactacaactgaatcaaaggcaaacagcaatgaaggtgtaggaagaaggaagggaaggaacatcctacactgtcattgctgccggagaaatcctaacacagaagtgcacgctccgttacactcaacatttttatgttttgatttttttt

SEQ ID NO: 72420 - DNA, 575 bp, Chicken  19866894352364_1
agagcagtgggctcctctgagtccaaacctctgctctctgtgttaagtttggagagaggggaggaacgagctctgagggcgtcgggttcagtgcctgggtctgtcctgggagacaagcagtgagaaagacagaattcccctcagcaaaggagagcagtcagccttaatgcgaatagaagctgctgctgaagaatcaaaatgtcattcgaaaatgtcagaacacagctcagaacacgtcctggccagagaaagacagaaatcccaatagctcctgcagcagctcctggtcctgagcagacygctgctgttcagygagggctgaytgccttcccatcacacggggctgtttgctcatctgtgctggaacgggcagggtgcagtttgtgtgcaactgcacgtgatttattgcaggataaacaaccgattagctggaaagctggtgcrtctgcgtcttgcccatctgctggaggctactgctgcgcctgtaagatgtcagtgccccaaaacagaggcgggagacaattaaaaggcattagagaagcagcaaaaacattgatgcaaagtgcttttatctc

SEQ ID NO: 72421 - DNA, 562 bp, Chicken  19866894352364_2
cctctgagtccaaacctctgctctctgtgttaagtttggagagaggggaggaacgagctctgagggcgtcgggttcagtgcctgggtctgtcctgggagacaagcagtgagaaagacagaattcccctcagcaaaggagagcagtcagccttaatgcgaatagaagctgctgctgaagaatcaaaatgtcattcgaaaatgtcagaacacagctcagaacacgtcctggccagagaaagacagaaatcccaatagctcctgcagcagctcctggtcctgagcagacygctgctgttcagygagggctgaytgccttcccatcacacggggctgtttgctcatctgtgctggaacgggcagggtgcagtttgtgtgcaactgcacgtgatttattgcaggataaacaaccgattagctggaaagctggtgcrtctgcgtcttgcccatctgctggaggctactgctgcgcctgtaagatgtcagtgccccaaaacagaggcgggagacaattaaaaggcattagagaagcagcaaaaacattgatgcaaagtgcttttatctc

SEQ ID NO: 72422 - DNA, 552 bp, Chicken  19866894352364_3
caaacctctgctctctgtgttaagtttggagagaggggaggaacgagctctgagggcgtcgggttcagtgcctgggtctgtcctgggagacaagcagtgagaaagacagaattcccctcagcaaaggagagcagtcagccttaatgcgaatagaagctgctgctgaagaatcaaaatgtcattcgaaaatgtcagaacacagctcagaacacgtcctggccagagaaagacagaaatcccaatagctcctgcagcagctcctggtcctgagcagacygctgctgttcagygagggctgaytgccttcccatcacacggggctgtttgctcatctgtgctggaacgggcagggtgcagtttgtgtgcaactgcacgtgatttattgcaggataaacaaccgattagctggaaagctggtgcrtctgcgtcttgcccatctgctggaggctactgctgcgcctgtaagatgtcagtgccccaaaacagaggcgggagacaattaaaaggcattagagaagcagcaaaaacattgatgcaaagtgcttttatctc

SEQ ID NO: 72423 - DNA, 431 bp, Chicken  19866894352364_4
caaaggagagcagtcagccttaatgcgaatagaagctgctgctgaagaatcaaaatgtcattcgaaaatgtcagaacacagctcagaacacgtcctggccagagaaagacagaaatcccaatagctcctgcagcagctcctggtcctgagcagacygctgctgttcagygagggctgaytgccttcccatcacacggggctgtttgctcatctgtgctggaacgggcagggtgcagtttgtgtgcaactgcacgtgatttattgcaggataaacaaccgattagctggaaagctggtgcrtctgcgtcttgcccatctgctggaggctactgctgcgcctgtaagatgtcagtgccccaaaacagaggcgggagacaattaaaaggcattagagaagcagcaaaaacattgatgcaaagtgcttttatctc

SEQ ID NO: 72424 - DNA, 600 bp, Chicken  19866894352365_1
ggtccctgtcattctctcctttgctgcatgccaagaatgcagtctttcaccatgactcgttgccaaatctttattagttttcacctatattactgaagcaacacttgttttcacttccattctggattgcaaatgctggcctaattattttgccagctcacttgcaccatcagttgaatgactccaaatctagaacaccatgccaacttttagccttgcttagaattttggttaattttaattgagagcattacaggatttggtgtccatcaatgtccttttattcatttgtgtggtgakataaargctgattctcaggtgtctgtatatcattttaggtcattttattcaaagtgagttaaactgaagaatattagaaaactaatgtttagcttgaacgcatagctcagaagtaggagtaatatgatactcaaatatatcacttggctttaactatgatttgtattcatactggcttaagaaaacattttaagtagttgggttttttttttattttttactttctggaatacaataatccgaaagtttttgcaaagtgaaatataggtagtgtggcttaaaatgttgttttggaagtct

SEQ ID NO: 72425 - DNA, 600 bp, Chicken  19866894352365_2
tgtcattctctcctttgctgcatgccaagaatgcagtctttcaccatgactcgttgccaaatctttattagttttcacctatattactgaagcaacacttgttttcacttccattctggattgcaaatgctggcctaattattttgccagctcacttgcaccatcagttgaatgactccaaatctagaacaccatgccaacttttagccttgcttagaattttggttaattttaattgagagcattacaggatttggtgtccatcaatgtccttttattcatttgtgtggtgakataaargctgattctcaggtgtctgtatatcattttaggtcattttattcaaagtgagttaaactgaagaatattagaaaactaatgtttagcttgaacgcatagctcagaagtaggagtaatatgatactcaaatatatcacttggctttaactatgatttgtattcatactggcttaagaaaacattttaagtagttgggttttttttttattttttactttctggaatacaataatccgaaagtttttgcaaagtgaaatataggtagtgtggcttaaaatgttgttttggaagtctcttttg

SEQ ID NO: 72426 - DNA, 600 bp, Chicken  19866894352368_1
gctttgttattcaaccccctgtaaaactatgtgtttctcctcttgttggttcacagggacccttgtgggaaacagctatgattttgcaaactcttgggcattacgcagtgaaaataagttgtgcaagagagtgcagactccaagcagcatgtgcaacgtttcatctgatattgcagaggaggtttgtgccacattcaagctttcaacctcacctacctgtagacagcttgtctcctctttggcaggggaatatcttgagtatgttaatttcttgagtcctacagctgacatattcctccwtcagcaagtagttaggatgccaggtacaggagatgcctgtttgggattttggaggtacagagtgatctgcaatagctatgcaaagcactgcttttgctcccacatggcaaataagtaccacaaagtgtggggatcagtgtttagtctggcaggagcatgcttaggaagcatatggtgcagcagtcaagcatgcattgaaggtggcagggatgcagcgtgccatgctgtggtgtgggtactgccaacattccttatgtctgggcacaggatgcagctatgcttccttgttactgaatgcag

SEQ ID NO: 72427 - DNA, 600 bp, Chicken  19866894352371_1
atctgtaatacagaacaatgttttgaatgtgcccactgaaatttcagtcagacgcttatctgtgcttgacttgtccatggcagctcagcagtaaaatgaacagactcagtaatacaaagcaatcaagtcagagaaagcacaacaaagactcactgcccatgtgtcatttgtacaacaaggttctaatctgttctctccaataatacactgctattattctagttgcatcccgagtatggcacaacaaggctctctaacgagacagttgttcaaaattgttggctattacctcccctaaaygtattcagtgactaaatttggtgctcaaacacctacagtaacmaccatgggaaattttcaaaattccccgtccttgaacaggggcaattgatggcagcgacaacttcaatttgactctacttttagagtgaaacggcactgacagcttaccagataagactcttgctcttccaagaacccctgccaagcwacaattcaagaaacactttctaaaggtgtatacaaattctcatcttaagcatttttctatttctaccttcataagattcatgtaaaccagttacaataaacacgattcct

SEQ ID NO: 72428 - DNA, 600 bp, Chicken  19866894352371_2
tcagtcagacgcttatctgtgcttgacttgtccatggcagctcagcagtaaaatgaacagactcagtaatacaaagcaatcaagtcagagaaagcacaacaaagactcactgcccatgtgtcatttgtacaacaaggttctaatctgttctctccaataatacactgctattattctagttgcatcccgagtatggcacaacaaggctctctaacgagacagttgttcaaaattgttggctattacctcccctaaaygtattcagtgactaaatttggtgctcaaacacctacagtaacmaccatgggaaattttcaaaattccccgtccttgaacaggggcaattgatggcagcgacaacttcaatttgactctacttttagagtgaaacggcactgacagcttaccagataagactcttgctcttccaagaacccctgccaagcwacaattcaagaaacactttctaaaggtgtatacaaattctcatcttaagcatttttctatttctaccttcataagattcatgtaaaccagttacaataaacacgattcctggatgtctgcttcttttcagcattaacgctctgtcaaccctct

SEQ ID NO: 72429 - DNA, 600 bp, Chicken  19866894352371_3
ttctctccaataatacactgctattattctagttgcatcccgagtatggcacaacaaggctctctaacgagacagttgttcaaaattgttggctattacctcccctaaaygtattcagtgactaaatttggtgctcaaacacctacagtaacmaccatgggaaattttcaaaattccccgtccttgaacaggggcaattgatggcagcgacaacttcaatttgactctacttttagagtgaaacggcactgacagcttaccagataagactcttgctcttccaagaacccctgccaagcwacaattcaagaaacactttctaaaggtgtatacaaattctcatcttaagcatttttctatttctaccttcataagattcatgtaaaccagttacaataaacacgattcctggatgtctgcttcttttcagcattaacgctctgtcaaccctctttggttttgttttgctgtcataacaaattggatagggctaacctgaatgagaatagccaatgcactaatgagattacacgttaagctgcaaatatcagatgccctttcaaggaacatttttcgtagcagcactttgactctcatttt

SEQ ID NO: 72430 - DNA, 600 bp, Chicken  19866894352377_1
tgtaacaggcattcgggcttgatcaggaaatttcagtgctgtcataactcagacagtaataataatgtagtgctggcaagaaattctaaaaccagagtgcctcagataatgttagagctgattggtggtttcaaatggaaactagtagaagctggattgtatgaaatggtttcagcctcactatcatagaatcatggaagggttgggctgcaaaggacctcaaagtctcaacccccctgctgtgggcagggctgctgcccaccagaccaggctgcccagggccccatccaacctggcctwgaaacactttcagggatggaacattcacagcttctctgggtaacctgttcctgtgcctyaccactctcttaagtaaaaatttcctcctaacatctaaattgtatctcccctctgtcagtttatcccttacacgtctcacccttgtcctatcgctatcagaccatgtaaaaagtcagtctctatcttgtttgtaagatcccttttaataaagagctgtaatgaagtcttcctagagccttctcttctctagactgaataattgtatttgctattaccagctttcttactgggttataactt

SEQ ID NO: 72431 - DNA, 600 bp, Chicken  19866894352377_2
taataatgtagtgctggcaagaaattctaaaaccagagtgcctcagataatgttagagctgattggtggtttcaaatggaaactagtagaagctggattgtatgaaatggtttcagcctcactatcatagaatcatggaagggttgggctgcaaaggacctcaaagtctcaacccccctgctgtgggcagggctgctgcccaccagaccaggctgcccagggccccatccaacctggcctwgaaacactttcagggatggaacattcacagcttctctgggtaacctgttcctgtgcctyaccactctcttaagtaaaaatttcctcctaacatctaaattgtatctcccctctgtcagtttatcccttacacgtctcacccttgtcctatcgctatcagaccatgtaaaaagtcagtctctatcttgtttgtaagatcccttttaataaagagctgtaatgaagtcttcctagagccttctcttctctagactgaataattgtatttgctattaccagctttcttactgggttataactttatctaaattcagtgcttgacataaaatccaaagggtgctgaatctctctgagcaaaat

SEQ ID NO: 72432 - DNA, 600 bp, Chicken  19866894352385_1
attacttaattcttagaaccagagcccaaatactagagcatgattatttattgtccttttttagggagtacaaaagcagctttacaaagatgactagtagtcattatcacagtgaattttgttacaacctaatgcactgtaaattgaaacctggaggcaggtataaactgtaagacaaactattcttcgcaatcctttaggaagacagatgccacgctacagcttgagcacactccagtatagccccctaatctgtcactgtgactacttccagaacatatcttggaaaaagtaccttaracccagccaacagttctgcagctaatgtggctgctgaaacagctgagagcacccagttcctcctgcattacaggaaaagtagatgagtacagcaaactagaactttgatgtgatacagaggagaaagatgcctttcaggactattggacagatgggaagtagtctgtcatttgaagaattatttttggtttacaacgtttgtttctcaagtagaatgacatgcttccctcttctccaaagtagtggagtgttggtggaaaaggggagacacataagaattaatagatgctgtttcccaag

SEQ ID NO: 72433 - DNA, 600 bp, Chicken  19866894352388_1
agtctaactgtataggtttggcacagcagcctgctgtctctgctatgtgtctcccagtcctgctccagctcgtttgtggtgtatccaactgtacagttcaagccataggtagtccaaaaataaaactgaagaatgaagccagcacatatgagggaatagcgtaaatggaattaaaaactcaaccttttctagatgttaaaacacaaagaaatgataaaagctgttgattgtaggtatgtagctgagttatataaccaaaacaccagaaactgtaacctagatgaaaaaatgaattttagytctggactctatctgcatcctacagaatcctacttatgtctatataaatacatgcacagacacaggtatacatgtaggactgaaaggccacagccagcaaaacaccagacactgacaagtgcatgtgcacctaacaggatagcaaaagcacaggtaagtgctcaaggaagaagaaatgaaacatacacttcattaaatgaatccaatttgtattctttccacactatagaaagaaacatgcactgctgaatgcattcatcacacccttgggtactgcaaaaggcgctgagccatgcagat

SEQ ID NO: 72434 - DNA, 534 bp, Chicken  19866894352394_1
tcaagcactaaatcaggatgcctagggccccatccaacctgctcttgaacacttcagagatggagcatccacagcctctctgggcagcctgtactagcatctcaccaccctctctgtgacaaaattcctcctcatctaaatctcccctttagtttaaaactatttcgctttgtcctattcctatctacccatgtaaaaagtttatttccctcctgtttaaaatctccctttaagtatttaaaggctataatgagatctccccaaagccttgtcttctctagactgaacttgctaaaatastgtttgattttcttgcttccacttatcttccaataaagagttaaagttgaaatgaaggaaatcattgcaagatatctaatgatcatgcctgggctaccaagtgtaacattatatatgccagaagcatagagctgcatttgttcatacacactttgttgatgcgtatctgttgtgttgtatgtactgcattcagatgagcaattttgagtaacttccggtaccacagttcctttt

SEQ ID NO: 72435 - DNA, 567 bp, Chicken  19866894352397_1
tgatgtgcacggtatctgcagcagctctatctggttttctgtttgttgttgaatttccttgttcacacatccccaggggcaatgatgctgagagcagctccagctcactccagagtgaaaaatataatgcaaatctccctgctgtaagtgacaaaatacaatgcaaatctccgagctgttagtgataagatgccaaagtgcagctgcaaggcagtatccggcagtaatggcacagtgctgtaacacatcaacaggaagccaaggcgactgagcagcatccactcaaccacatagtaaggyctgggacaaagagctgatgttgtgtgtaaggatgagctgaatccacctctgagagattacctctttctaagctcrttgtcaggcctgagtacccaggtgaaaaatacagcccctgctatgagatggctccatcmcttcccaggggtactgtaactcttccctctgaaaatgacttttctctcttacggtgttgtagtggagacttgttaatgtaaaaatgtggtaccaaacttatatgtagggaaagtcgataataaggggcaggcc

SEQ ID NO: 72436 - DNA, 492 bp, Chicken  19866894352397_2
ggggcaatgatgctgagagcagctccagctcactccagagtgaaaaatataatgcaaatctccctgctgtaagtgacaaaatacaatgcaaatctccgagctgttagtgataagatgccaaagtgcagctgcaaggcagtatccggcagtaatggcacagtgctgtaacacatcaacaggaagccaaggcgactgagcagcatccactcaaccacatagtaaggyctgggacaaagagctgatgttgtgtgtaaggatgagctgaatccacctctgagagattacctctttctaagctcrttgtcaggcctgagtacccaggtgaaaaatacagcccctgctatgagatggctccatcmcttcccaggggtactgtaactcttccctctgaaaatgacttttctctcttacggtgttgtagtggagacttgttaatgtaaaaatgtggtaccaaacttatatgtagggaaagtcgataataaggggcaggcc

SEQ ID NO: 72437 - DNA, 433 bp, Chicken  19866894352397_3
ctccctgctgtaagtgacaaaatacaatgcaaatctccgagctgttagtgataagatgccaaagtgcagctgcaaggcagtatccggcagtaatggcacagtgctgtaacacatcaacaggaagccaaggcgactgagcagcatccactcaaccacatagtaaggyctgggacaaagagctgatgttgtgtgtaaggatgagctgaatccacctctgagagattacctctttctaagctcrttgtcaggcctgagtacccaggtgaaaaatacagcccctgctatgagatggctccatcmcttcccaggggtactgtaactcttccctctgaaaatgacttttctctcttacggtgttgtagtggagacttgttaatgtaaaaatgtggtaccaaacttatatgtagggaaagtcgataataaggggcaggcc

SEQ ID NO: 72438 - DNA, 600 bp, Chicken  19866894352398_1
gcccccaccttgtagatcttaacatcagagaacttgacgtcaaaggcgtgggggtagaagcagcctcggaagccatagaaatattccctgatgcgatcatctcggcactcccgcctgaagtctttggagcgctccaccaccccgccggatttggggagcagaacagtgcgcacaaagtggggtaggtccctcttaagctcgttgtagagccgttcctggtccagcaccaccaccacgtctacctcaaacgccgaggcggcgtgcaccagtgcctggtagcctgagcccttcacccagccrcacgtgttgatgacgcagccactgaccgatgcacggcggttcacttcacatcgctggttgaagacatcagccaggcgggacgtgatctgcaggcagatatcgggacacaaggataaagcgcatggggtcgagaaggatgtttctgttcccaaaagacatcaacgcagctggaggccatgtgatgaggacctgtcccattcttagggatacagcaaccataggcaatggtcctaactcactcagcaggtttatttagtgctaagaggcagaggcaatgcctgggccataggcagccacttg

SEQ ID NO: 72439 - DNA, 599 bp, Chicken  19866894352405_1
  misc_feature (1)..(177): n is any nucleotide
nnnnnnnnnnnnnnnnnnnnnnnnnnnnnnnnnnnnnnnnnnnnnnnnnnnnnnnnnnnnnnnnnnnnnnnnnnnnnnnnnnnnnnnnnnnnnnnnnnnnnnnnnnnnnnnnnnnnnnnnnnnnnnnnnnnnnnnnnnnnnnnnnnnnnnnnnnnnnnnnnnnnnnnnnnnnnnnnntgtctgatttctggccctgttttgaatgggaaagaaagtgagaattctgtgttttttgtttgtttgtttttaatcaagttgtcctgaatctgtagtggttaaaaagtttccttatgagcctgytcttgtaggtttaatctcagaagaaagttgtatctattacagagtacttgtttatgcagtgttccactgaggatcactgatggaccttgaccaattcttacctgctcacaaggagaatggtttctgatttaggtaaatagacaattgctacatgastttgctgatgttttagaagttttaggttgtttctattagcaaatgtgtgaaacgttcctattgcacagcaaggttgcacgtggctcttttctgtgttttttgcttttggtctgtatatttcatcattgactaacactctattt

SEQ ID NO: 72440 - DNA, 599 bp, Chicken  19866894352405_2
  misc_feature (1)..(21): n is any nucleotide
nnnnnnnnnnnnnnnnnnnnntgtctgatttctggccctgttttgaatgggaaagaaagtgagaattctgtgttttttgtttgtttgtttttaatcaagttgtcctgaatctgtagtggttaaaaagtttccttatgagcctgytcttgtaggtttaatctcagaagaaagttgtatctattacagagtacttgtttatgcagtgttccactgaggatcactgatggaccttgaccaattcttacctgctcacaaggagaatggtttctgatttaggtaaatagacaattgctacatgastttgctgatgttttagaagttttaggttgtttctattagcaaatgtgtgaaacgttcctattgcacagcaaggttgcacgtggctcttttctgtgttttttgcttttggtctgtatatttcatcattgactaacactctattttagcatgtttctgggcatgagcaacttgtactcataaacctgactgcataaacttttaatataataccattatattggataaaatgttcaggaatctatgcgagtagttagagtggttggcctactttaagcaagaggttatttcataacttaatg

SEQ ID NO: 72441 - DNA, 600 bp, Chicken  19866894352406_1
ttacggcatctcttctttttgttttccatgcgcttgtttcttaagcacaaagagaatgatgcccatcaagactaagcagggagacaagggcagaaaacatctccattcctcacgccagctatctcataatgctgcctcccaaaagtacaaagaaagagatcaggaataccgcaggggaaaaaaaaaaaccctcaacaaactgaactgcaggaaactgaaggatggcaatcctcagagagaagcccttccatatgctgttggctaaatgtcaggctttttcacaaatacgcttctgcaagraaggaaatgtgtgaaagttctcactctgaaatcctgaatagtgactacagaaggcatgtgttagcacacaggaatttgaaacaaccgacttgktgctagcgagaggcaggcttacttctgaagtttccctaacaggggtagtagacatctgaaaactttgagaactcaagcttgtcactgcagggagctattgtcttgtcccaacacactatatgaacattttgaaaagacaaaatcaattgcagggtttttttccctttttgagtaacttcctaattgtgagtcagcaagcccagcttc

SEQ ID NO: 72442 - DNA, 600 bp, Chicken  19866894352406_2
aaaacatctccattcctcacgccagctatctcataatgctgcctcccaaaagtacaaagaaagagatcaggaataccgcaggggaaaaaaaaaaaccctcaacaaactgaactgcaggaaactgaaggatggcaatcctcagagagaagcccttccatatgctgttggctaaatgtcaggctttttcacaaatacgcttctgcaagraaggaaatgtgtgaaagttctcactctgaaatcctgaatagtgactacagaaggcatgtgttagcacacaggaatttgaaacaaccgacttgktgctagcgagaggcaggcttacttctgaagtttccctaacaggggtagtagacatctgaaaactttgagaactcaagcttgtcactgcagggagctattgtcttgtcccaacacactatatgaacattttgaaaagacaaaatcaattgcagggtttttttccctttttgagtaacttcctaattgtgagtcagcaagcccagcttccaatttctcctagcttttaaaaaaggctttctggcccacagaaccacaggggtctttctctctgatgtacataaagaagcttttgagttagtt

SEQ ID NO: 72443 - DNA, 600 bp, Chicken  19866894352406_3
ctgcatttttgttacttctacgttactttatgatacataagtagtgtgttcaagagggaggaggaggcaaaaacatggactgctatactgagatgtcttaacagttgatgttattttcagaatttccatgctcagatgctgtttctcactgctcaaactgttctatactttttttcataactctacagatctcctctttgtgctgtgattaatcaagttgaaagacagatcgagagttcaatgtgttatatttattaatatccaaacacaacctatgaggcaattccacagttctgcacrtggggttgcagaggttgagtcatgcctcttcagtaaaaagtagaaatcatgaatcctgtggccaaaaatggtgaaatttctacatgatataatcacataaagtgataaacttcacaagaagttctatttcaagctttttcacactttgttgatgaaatttataagtaaagatgcatttaccttcgtactacaccaataatgactgtattttctgagggttttgttgttctgatagacctttaaataaaaagaaagaacatttaacattttctaaagttcacatttcagaaactgtgactg

SEQ ID NO: 72444 - DNA, 585 bp, Chicken  19866894352410_1
catttagcagtgaaaaagcatgtgtgcataagatgctgtcccatcaagcagaatgcaagaaatcttttgaagttagacctttgaagtctcaagttattgctgcgttaacgcaggtatttcaacaaaagaaaatctctctctgttatttacacagatggaacggggcaccctattataccatcatattcaggggagatttcagttagaagcagaaagtcttaatttaaagaaatatttaaagatagtacatagtacttcttaaactgtggaaccattacaaggctacaagacttttacatratagaatagaccagccagtgtcccaaggctattattgctatggcttgtagcacactgaaatctctttcatctgcctaacctgggattttggttattgtaaatgtatgaatatccttcagtttagggggttatgcttatgttttatttatttgtgcttatgtttctgctttcctcaaaactttctccaattgctagatgcacaaacattctaccaagctctctggttctcactctgctaagtgtccttcagcctgactcccatagtgactccaggctggacctcca

SEQ ID NO: 72445 - DNA, 599 bp, Chicken  19866894352415_1
  misc_feature (1)..(19): n is any nucleotide
nnnnnnnnnnnnnnnnnnnctgttgaaggtctcgcactcaagcccaccgaagacccaaaatattagagaaggtaggagggaagagtttgaacgacaagtaaatagaaagatgccatagacctctgtatattccctttgtcagtcttagtataagaattttgctacttccaggcttttcatttttcaatccaaagaaaaaatatttgtttgcagcattaagaaatggcttttctaactcaaggctgaactagcctgttccatgatgagctacgagaggagcagcctgcagcaggttctgcracgtgtgggactacgtgccatacacattccacacccacggtgtgaaagcagacttcaagcaagaaaagtggctttctgccttgttattttttgagggaaattcagagctgttttttccatttgtttggaaaatacagaggatcttttctttcttgtgctatgaaagtttgagtatcctagtgacagatttaattaagaagaaattagttttttcctttccaattaatacttaagtaggtgtaaagtgaaatggataccagtgacaagtttgcaagaaagaaattcacaaacagattgaa

SEQ ID NO: 72446 - DNA, 600 bp, Chicken  19866894352431_1
ttgcagttaaagtgttaccagctaaggtacagcagaactggtgtgtgcttcacctcccagggcacctggggacaaggctggagcagcaggagggaaaggttattttcgtggcagctcattaggcagacagggggaagagaatgcagggaggtcaggcaggaggaggatgcggtatccaagcagaggcaaccagcctcaggcgggacaggtccgtgaggagacatggaagctatggggctcgttagttagggcccagcctgtcataggagtcatcgctagtactcctgttttctgagccaytgcatgagaatgggcacctcattttgcctgcaataccatggctggcttcaggcactgagttacagatttgttgcacaaacaacaaactctggyatggcaactcccccatgctcctcagtacctaagaggtgttagtgcaccagcaggctgcttctgctctctggcttgacattttagatagctaaggtatgccccaagtatccgtattgccactcagctgcctcattcatattctgtaactgattcaattaggatcaacaccaagggaaaagtgaaagtccagtcctgctcatgcactga

SEQ ID NO: 72447 - DNA, 600 bp, Chicken  19866894352431_2
gaaaggttattttcgtggcagctcattaggcagacagggggaagagaatgcagggaggtcaggcaggaggaggatgcggtatccaagcagaggcaaccagcctcaggcgggacaggtccgtgaggagacatggaagctatggggctcgttagttagggcccagcctgtcataggagtcatcgctagtactcctgttttctgagccaytgcatgagaatgggcacctcattttgcctgcaataccatggctggcttcaggcactgagttacagatttgttgcacaaacaacaaactctggyatggcaactcccccatgctcctcagtacctaagaggtgttagtgcaccagcaggctgcttctgctctctggcttgacattttagatagctaaggtatgccccaagtatccgtattgccactcagctgcctcattcatattctgtaactgattcaattaggatcaacaccaagggaaaagtgaaagtccagtcctgctcatgcactgagcctawgacaacagcatttgagtgttttctgaagaactggggataagagaaggagtcctgaygatctctggatatgttggcttaaattcttcc

SEQ ID NO: 72448 - DNA, 600 bp, Chicken  19866894352431_3
agaatgggcacctcattttgcctgcaataccatggctggcttcaggcactgagttacagatttgttgcacaaacaacaaactctggyatggcaactcccccatgctcctcagtacctaagaggtgttagtgcaccagcaggctgcttctgctctctggcttgacattttagatagctaaggtatgccccaagtatccgtattgccactcagctgcctcattcatattctgtaactgattcaattaggatcaacaccaagggaaaagtgaaagtccagtcctgctcatgcactgagcctawgacaacagcatttgagtgttttctgaagaactggggataagagaaggagtcctgaygatctctggatatgttggcttaaattcttccttgtttggaagtgctttaggatggggaggccagctgctgacacagctgaatagtaccttgttccatgcctwcaactcagctgaaactattcacagagcaagaacggacgatggagtctaattgctttgtaactaatctgagtgaggaagtataattatgatagctatcactgagggacttttcaaagggaatgcatgctagatactgtgacta

SEQ ID NO: 72449 - DNA, 600 bp, Chicken  19866894352431_4
cagatttgttgcacaaacaacaaactctggyatggcaactcccccatgctcctcagtacctaagaggtgttagtgcaccagcaggctgcttctgctctctggcttgacattttagatagctaaggtatgccccaagtatccgtattgccactcagctgcctcattcatattctgtaactgattcaattaggatcaacaccaagggaaaagtgaaagtccagtcctgctcatgcactgagcctawgacaacagcatttgagtgttttctgaagaactggggataagagaaggagtcctgaygatctctggatatgttggcttaaattcttccttgtttggaagtgctttaggatggggaggccagctgctgacacagctgaatagtaccttgttccatgcctwcaactcagctgaaactattcacagagcaagaacggacgatggagtctaattgctttgtaactaatctgagtgaggaagtataattatgatagctatcactgagggacttttcaaagggaatgcatgctagatactgtgactaagcacttagttttttccatcaaattgcttccagcccagcagctagctcagtgtatg

SEQ ID NO: 72450 - DNA, 600 bp, Chicken  19866894352431_5
cttgacattttagatagctaaggtatgccccaagtatccgtattgccactcagctgcctcattcatattctgtaactgattcaattaggatcaacaccaagggaaaagtgaaagtccagtcctgctcatgcactgagcctawgacaacagcatttgagtgttttctgaagaactggggataagagaaggagtcctgaygatctctggatatgttggcttaaattcttccttgtttggaagtgctttaggatggggaggccagctgctgacacagctgaatagtaccttgttccatgcctwcaactcagctgaaactattcacagagcaagaacggacgatggagtctaattgctttgtaactaatctgagtgaggaagtataattatgatagctatcactgagggacttttcaaagggaatgcatgctagatactgtgactaagcacttagttttttccatcaaattgcttccagcccagcagctagctcagtgtatgtaataactctgttgactgtcaatgagatccttcagctcagatcagctgagtacttgctctgtcagagtgggccatagagcagatgcgaggcaccgtggtatc

SEQ ID NO: 72451 - DNA, 600 bp, Chicken  19866894352444_1
cagaatacaaatgcaaaagcctcttcaggacaggaactacctgtaggttgtaggcctctaagacctttgagacaggggctaccgtttggactttagtcattaactgggagatatgatctgtggcaagctgcctggagcccttctctcctggcactctgtgggagctgggtatagggcagatataagcctacaaacccacagttatgctgacgcagtagccaccctctgaagggctgaaagagcaaagagcgcatctgccatggcggaggctgcagatgtgagtagctgctcacacaaccrcagcctccttttgccaggtttgtttccatagagaccagagtatatataccccagaatatgtacctctcctcagggggagctgacttgatttaaataagcaccaatgataaacttctggcaaagcataaatctgtgctgtggtaggggtgtgatgagcagggggtactggaacagtttactggctttctaatagactttttgtcctttcctgtccttctgagttccagccaccacagcagagctgtgcccctgggatcatagaagcttgcccagacttttgttggaaacctggcttttgtg

SEQ ID NO: 72452 - DNA, 599 bp, Chicken  19866894352454_1
  misc_feature (1)..(69): n is any nucleotide
nnnnnnnnnnnnnnnnnnnnnnnnnnnnnnnnnnnnnnnnnnnnnnnnnnnnnnnnnnnnnnnnnnnnnctgtaggactatggcatttaaataagatattgaaaatgcagagtaaccgtcatcatgctagaatacatccaactatgggatttagaaattaaagatttcctgttgtgttcttacagtgccatacaacatctagattcagtaggcaggctaaacagaactgggacactgaacttcatcaggatgttgtttttgcagtgaaaaattctggtcggtagcaaagacagtgcagamactgaaggtatgcatggaatatatatgggtatgttccagctctaggtgtgtgtgcatgtgtcagaagtgtgtcacttgctgaaagtgaaaataaggtcagtgcagatgaattagtatatgggaaaagggcaagaaggaaattcatgtcaaatggagttaaaaatagatggctgagtgggtaagaagaacaacaggagaaatgcaaacaggaaaagtgcaatgtctgagaacgaaggcagtcctgtgcagaaagttaaaatattttgtgaactgggttgaaaatattttacatgtgtgtg

SEQ ID NO: 72453 - DNA, 600 bp, Chicken  19866894352455_1
aaaggcagacaggaaagaagcaaaaaatgtgaatccaacattcactgaacttatttttgttgtgtcactacagatctgtttctagaagtatgcacaacctccctcgtcctctgattttacctacactcgtgagaaaattcctccaaaaaagggatttttacaagggctgctcagaaagtagaggccttcaattttattatgttggcccacaacatcagaagcagatgttggtggtatgacagtaggagctgaaagttcccaccaatatccaatattttgttgccgtgcaacaggtgacarcagaggtacaatctgacagaatggcgtctgacatggaagtgtcaaagctgtgttgctgaacaactccatgtggaaaaaagtgkcactgatattcatcaaggcttactaaaaacttgtggagaccaaacagtggatgtgagcacagtgaggtggtgggtggtgtgtttcagtagtggtggctgcgacatgagaaataagctacattccagatggacatgcacagctgtcacggtacaaaatgaggagggtcttgatcagctcatccacgtgaactggcagattaagattaggcaacagagt

SEQ ID NO: 72454 - DNA, 600 bp, Chicken  19866894352455_2
agaagtatgcacaacctccctcgtcctctgattttacctacactcgtgagaaaattcctccaaaaaagggatttttacaagggctgctcagaaagtagaggccttcaattttattatgttggcccacaacatcagaagcagatgttggtggtatgacagtaggagctgaaagttcccaccaatatccaatattttgttgccgtgcaacaggtgacarcagaggtacaatctgacagaatggcgtctgacatggaagtgtcaaagctgtgttgctgaacaactccatgtggaaaaaagtgkcactgatattcatcaaggcttactaaaaacttgtggagaccaaacagtggatgtgagcacagtgaggtggtgggtggtgtgtttcagtagtggtggctgcgacatgagaaataagctacattccagatggacatgcacagctgtcacggtacaaaatgaggagggtcttgatcagctcatccacgtgaactggcagattaagattaggcaacagagtgtatggagccgaatattggcttcagtgtgttggaaatggtggcaaggttaaatgtcacaaagattgctcctggtaggtctgtc

SEQ ID NO: 72455 - DNA, 600 bp, Chicken  19866894352456_1
tttgtttttttatctttgttttaaacattcggaagataatttaaattgcacattcaggccaaaggatttgtcttgaggccaatctgcatttagcttcagcactgtagacactcagaaaaaatcaatactctgcaatgaccatccagataaatgcataagcaatcacagcaagccaagtcagcaattatttttaaggacatgtgacaagtttcctaatcctctgacagttagacatgcttgtatccagagggggttacccctgctcctctctcccatctgccctgctatgtttctacctgrctgatcagctattctgtccatgcattacagcaggtgggttttacttgcagctctcagagctgaggtaccaatgccagggactgctgtgccagtcagaaaaagatgaacttcagcacctaaaactccctcrtagtttatgattaaaagatagcatagttaaatagctaaacaagcattagcatttgtctctctgcctgcctatgtgcatatgtgcagagtgtaggaaaaactacttatgaatgactacctcaaactctgacccaagccacattagttyggagcagagagaggaaaagaggc

SEQ ID NO: 72456 - DNA, 600 bp, Chicken  19866894352456_2
tgcaatgaccatccagataaatgcataagcaatcacagcaagccaagtcagcaattatttttaaggacatgtgacaagtttcctaatcctctgacagttagacatgcttgtatccagagggggttacccctgctcctctctcccatctgccctgctatgtttctacctgrctgatcagctattctgtccatgcattacagcaggtgggttttacttgcagctctcagagctgaggtaccaatgccagggactgctgtgccagtcagaaaaagatgaacttcagcacctaaaactccctcrtagtttatgattaaaagatagcatagttaaatagctaaacaagcattagcatttgtctctctgcctgcctatgtgcatatgtgcagagtgtaggaaaaactacttatgaatgactacctcaaactctgacccaagccacattagttyggagcagagagaggaaaagaggcaggaaaatctgaggcatgaaaacaccttctattacgaaagcgggaacctggggagggctcctgccaggcactcactcaccttgctggatcttggtcaggagctgcttgacgtgcaagaatcctgcttgtc

SEQ ID NO: 72457 - DNA, 600 bp, Chicken  19866894352456_3
tgccctgctatgtttctacctgrctgatcagctattctgtccatgcattacagcaggtgggttttacttgcagctctcagagctgaggtaccaatgccagggactgctgtgccagtcagaaaaagatgaacttcagcacctaaaactccctcrtagtttatgattaaaagatagcatagttaaatagctaaacaagcattagcatttgtctctctgcctgcctatgtgcatatgtgcagagtgtaggaaaaactacttatgaatgactacctcaaactctgacccaagccacattagttyggagcagagagaggaaaagaggcaggaaaatctgaggcatgaaaacaccttctattacgaaagcgggaacctggggagggctcctgccaggcactcactcaccttgctggatcttggtcaggagctgcttgacgtgcaagaatcctgcttgtcctgtagggaggggcgtcttcgctgtctggtcaaaccacaggtacatctcctggccctcggggtgacactgaggtttaggtagtagcagcccgtgcctgacgtcctgggcacctgcttcaacatctccgctccttttaaaatccctct

SEQ ID NO: 72458 - DNA, 600 bp, Chicken  19866894352457_1
gcacagtaacactatttgatagaacaaattctcagctacagaacactatttttcaacatagtcaccactgttagctacgcatttttgccagcaatgaacaagagcctgctttctgcgcttggaaaaatctgcgtggccatctgaaacatggcttggctttcacactgctgtcaccactgctgaaatgcaccacctacagcctcctcatgctcacatccactgcttggtcttcagaaatattcagtaagtatttacgagtatccatgggtaccattttttccacatggagaaattccattycgcaccttttcttcctacacacttccatgtcagacaccattttctcagggtgtccctcaactgccatttgttgcatagcaacaaaatgtaatggaatattggcaggaaggttcaacctctgctgccataccactaacatctgcctctgatgtcatgggccaacatagtaaaataggaggcattactttcagggcagccttcgtatatgtgtattagctggagaagctatctagaacaaatggattttcaggaaacattttctgacaatattatgtaatcgagcagcagggaggaggtagg

SEQ ID NO: 72459 - DNA, 600 bp, Chicken  19866894352463_1
agtgatctattctgaaacaaacatgatttcaaggattttatcaccacaagaaggtaaataattggtagcctgattccaagttaaaaaaaaattaacgagtctctgtacaggacttagtttttaccgtgttatttctcccatcctccccctttgtttcaggtattgaaagatggagggaagtactttctggacactcccaatgaagactgtggaaactggatgatgtttgtccggctagcccggaaccaagaagaacagacccttgtggcttatcagcactgtggagaagtctactttacmactgttaaggtagttaaacccacattgcttcacctgtcattcaaatggcaatttatcgacaaagattctgaaagaccaacccttttacagatgaaagattgattatattcaggcaaccgctgctttcgtacacaccaccttttatatcacttaatccacagtaaagcaagcagtgtgtggagttttccagtgaaaggtaatgtgtacatatgctgcgggtattgaagaacctgggtagagaaaatgcagaaatatcgttcgtggtggccgtgtttaaacaaaacactgtgaagtgttacc

SEQ ID NO: 72460 - DNA, 599 bp, Chicken  19866894352464_1
  misc_feature (1)..(38): n is any nucleotide
nnnnnnnnnnnnnnnnnnnnnnnnnnnnnnnnnnnnnngcagtctgagtttaaaggcactcctgggtgaaaccgggcaggcagggagcagtgcggggtgctgcaggtgagacagccgtgtgcacatgggggcatggctgtgtgcaggggtgtgtgagcaggtgtgtgcacagatgtgtgcatggataggtggatgcatgggtatgtatgggtgtgtgcatggatttgtgcctggatgtgtgcatggataggtgtgtccatgggtgtgtgcatagataggttagtgcatgagtgtgtgcayagatatgtgcatgtatttgcacacaagtgtgtgcataggtgtatgcataggtttgggcatggatttgagcatgggtgtgtgcatggatgtgtgcactgttaaatgcatggatgtgtgcactgataaatgcatggatgtgtgcacaggtgtgtgtgcatgtgtgcacacattgctcacagctatgcagcccctcaggctgggtctctgctctgccatgcagtggtaccacgctgtgcagcaggggctgctgccccccccatccctgtcctgctaacaggagcagctgcaaaggcctgagc

SEQ ID NO: 72461 - DNA, 589 bp, Chicken  19866894352464_2
tgtgtgcataggtgtatgcataggtttgggcatggatttgagcatgggtgtgtgcatggatgtgtgcactgttaaatgcatggatgtgtgcactgataaatgcatggatgtgtgcacaggtgtgtgtgcatgtgtgcacacattgctcacagctatgcagcccctcaggctgggtctctgctctgccatgcagtggtaccacgctgtgcagcaggggctgctgccccccccatccctgtcctgctaacaggagcagctgcaaaggcctgagcacaattttcagagtgaatgtgcaggatktgagagtccagcttcagaccaaagcagcacatgggactrtgtgtgtgtgtgtgtgggcagcagaaaactggagcaatgcattgggtgccacactgttagcattcacccagggataaatgacaccggagatgaattagaaaatattctagattttgacagctttgtgttatttgggctgatctgcaatcactgtcagctgttgctgttgcttaatttggggcttctcttgcaggatgtgtctgtttaagcagagaagggcagtggctgtcctggggttgttgcagccctc

SEQ ID NO: 72462 - DNA, 550 bp, Chicken  19866894352464_3
gagcatgggtgtgtgcatggatgtgtgcactgttaaatgcatggatgtgtgcactgataaatgcatggatgtgtgcacaggtgtgtgtgcatgtgtgcacacattgctcacagctatgcagcccctcaggctgggtctctgctctgccatgcagtggtaccacgctgtgcagcaggggctgctgccccccccatccctgtcctgctaacaggagcagctgcaaaggcctgagcacaattttcagagtgaatgtgcaggatktgagagtccagcttcagaccaaagcagcacatgggactrtgtgtgtgtgtgtgtgggcagcagaaaactggagcaatgcattgggtgccacactgttagcattcacccagggataaatgacaccggagatgaattagaaaatattctagattttgacagctttgtgttatttgggctgatctgcaatcactgtcagctgttgctgttgcttaatttggggcttctcttgcaggatgtgtctgtttaagcagagaagggcagtggctgtcctggggttgttgcagccctc

SEQ ID NO: 72463 - DNA, 600 bp, Chicken  19866894352467_1
cagcagtgcttgcagagcctttggtgagttagcttagctcttagttcagtatttcttcctattagatgagctgtcattaagtcatgcatcagtttcttttaatcacaacaacacaatgttcccatgttttcacgagggctcttggttctggctcagctgcacaaaacctcgtaacagacacttaaaaacaataaatgagtcaatacagactatcagtctcttaagtaattatgctcaccatccttctgttaacagttggaatctacagagcttagcagtgctaaccaagaccctgcgttyagcagaaaactcattcataatcattcactactgcttacacagtttcacctctgctgtctytggaatcaacgggtaaattttgcattcctaactcatatgagttccatacaaggagatattatggagttaaattttgaattcacgcttttcagaacacaggggaacacatgcatataaaatgcaaaaatactgagaatcaaagcataatttttaaccttcaacaaataaacactgaaactatgtctgtgtatgaagttcacaagacaatcaagttcagttgtggaaaaaaaaaacatcacc

SEQ ID NO: 72464 - DNA, 566 bp, Chicken  19866894352467_2
attagatgagctgtcattaagtcatgcatcagtttcttttaatcacaacaacacaatgttcccatgttttcacgagggctcttggttctggctcagctgcacaaaacctcgtaacagacacttaaaaacaataaatgagtcaatacagactatcagtctcttaagtaattatgctcaccatccttctgttaacagttggaatctacagagcttagcagtgctaaccaagaccctgcgttyagcagaaaactcattcataatcattcactactgcttacacagtttcacctctgctgtctytggaatcaacgggtaaattttgcattcctaactcatatgagttccatacaaggagatattatggagttaaattttgaattcacgcttttcagaacacaggggaacacatgcatataaaatgcaaaaatactgagaatcaaagcataatttttaaccttcaacaaataaacactgaaactatgtctgtgtatgaagttcacaagacaatcaagttcagttgtggaaaaaaaaaacatcacccaatgaactggcagatggtttgtaca

SEQ ID NO: 72465 - DNA, 600 bp, Chicken  19866894352471_1
ttccacatcccctcctttccccaaaaggatcctggagatgcttatctcagcagagcacctaaatcctcagtttgtgtaattccatcacagaagctgtgctgtcggccaagctaagttgaaagtaacatgccaaagaacaccggaccttaaaggggataaggcggctgtatgtcaagttggtgaggacagccagctcaatcacgagtgatttgtaggctatttactgcagcaatgactacaagcccgggctctcatacaaagacaccctaagcagtaagctatgcaaccatagttgctgcratatgcagtcgttggttcctccatcaatactgaactgcaggagcagcacttagagttcttccagccctcactctcttatcactccatggggatttgggactggracaccgggggggcttcagggatacaaattctacccaaaaatgggcacaacccagaagaggtcagctctgcaggcaacttcagayagcttcccgcagagggctctggcacactccctcagactgctgcttccctccaagcattttataaagggagccttgttgccttgaacaaattgcaaggtaacaaaagctgagc

SEQ ID NO: 72466 - DNA, 600 bp, Chicken  19866894352471_2
gccaagctaagttgaaagtaacatgccaaagaacaccggaccttaaaggggataaggcggctgtatgtcaagttggtgaggacagccagctcaatcacgagtgatttgtaggctatttactgcagcaatgactacaagcccgggctctcatacaaagacaccctaagcagtaagctatgcaaccatagttgctgcratatgcagtcgttggttcctccatcaatactgaactgcaggagcagcacttagagttcttccagccctcactctcttatcactccatggggatttgggactggracaccgggggggcttcagggatacaaattctacccaaaaatgggcacaacccagaagaggtcagctctgcaggcaacttcagayagcttcccgcagagggctctggcacactccctcagactgctgcttccctccaagcattttataaagggagccttgttgccttgaacaaattgcaaggtaacaaaagctgagcattggtccagtgagccagagttatccttgaagatcctgtctagacatcatccaagcacagggctgctgaggcttttttcagtgttgtttgagtagtggggtcaa

SEQ ID NO: 72467 - DNA, 600 bp, Chicken  19866894352471_3
gccagctcaatcacgagtgatttgtaggctatttactgcagcaatgactacaagcccgggctctcatacaaagacaccctaagcagtaagctatgcaaccatagttgctgcratatgcagtcgttggttcctccatcaatactgaactgcaggagcagcacttagagttcttccagccctcactctcttatcactccatggggatttgggactggracaccgggggggcttcagggatacaaattctacccaaaaatgggcacaacccagaagaggtcagctctgcaggcaacttcagayagcttcccgcagagggctctggcacactccctcagactgctgcttccctccaagcattttataaagggagccttgttgccttgaacaaattgcaaggtaacaaaagctgagcattggtccagtgagccagagttatccttgaagatcctgtctagacatcatccaagcacagggctgctgaggcttttttcagtgttgtttgagtagtggggtcaatgtcagtgctatgtattgcaaccaagggctgcagactctacaaacataaaatccacatagccagagaaaccagcaagttgtagt

SEQ ID NO: 72468 - DNA, 599 bp, Chicken  19866894352492_1
  misc_feature (1)..(152): n is any nucleotide
nnnnnnnnnnnnnnnnnnnnnnnnnnnnnnnnnnnnnnnnnnnnnnnnnnnnnnnnnnnnnnnnnnnnnnnnnnnnnnnnnnnnnnnnnnnnnnnnnnnnnnnnnnnnnnnnnnnnnnnnnnnnnnnnnnnnnnnnnnnnnnnnnnnnnnnncgagcttcagctgttgtgctgacggcctcactcagagattacatctaccccaccagccctgttggaagccttttgctaagtctggtgggtgttggaaaagccactttgtcttcaccaaggtaggactaatgctgttattttcttgaarggtctttttctttgtgcataagcctgttgttttgttcttggtttgctgatgtgttgcttgtagctgrgaataagttgtatgtcctgcacacagccctgtgtggcccctttgagtgttcccctgcctggcagtccataatctcactaaagcaacatgtgggctgcgagcgtgtgaatatccaccatgactgcacctcgccttcctagtttatgcttattaataacaagctgtaaaaatagcagtcagacaagatgagatcataaggctgattgtgggatgccatatgctgtctgttttac

SEQ ID NO: 72469 - DNA, 599 bp, Chicken  19866894352492_2
  misc_feature (1)..(85): n is any nucleotide
nnnnnnnnnnnnnnnnnnnnnnnnnnnnnnnnnnnnnnnnnnnnnnnnnnnnnnnnnnnnnnnnnnnnnnnnnnnnnnnnnnnnncgagcttcagctgttgtgctgacggcctcactcagagattacatctaccccaccagccctgttggaagccttttgctaagtctggtgggtgttggaaaagccactttgtcttcaccaaggtaggactaatgctgttattttcttgaarggtctttttctttgtgcataagcctgttgttttgttcttggtttgctgatgtgttgcttgtagctgrgaataagttgtatgtcctgcacacagccctgtgtggcccctttgagtgttcccctgcctggcagtccataatctcactaaagcaacatgtgggctgcgagcgtgtgaatatccaccatgactgcacctcgccttcctagtttatgcttattaataacaagctgtaaaaatagcagtcagacaagatgagatcataaggctgattgtgggatgccatatgctgtctgttttaccgagcgagcctcatgcagaggagacctgtgcaagagcagagtgggactagggatccacaggctatgg

SEQ ID NO: 72470 - DNA, 600 bp, Chicken  19866894352494_1
catgactgattcatgcgctaaagctctcatatcaaaatccagagtaattacagctgagtcatgcagacatagagacaagctcagagctggagaaggcgttgccaagacgtgatatagcagcaggggtgcggagaaaggaggtgtcatttcacaatcttgggcaaggcccaggggcactagattaaatgagactataaatgtttaagttcaaagatatgtttctcgctctatgtggatataaggaaaggattaaaaatagaacaggctacctgtttcttgaaatatcagcctggaatattrgcttcattaggagtaaattgtcctatagtttgccctgcaaactgttgccaggagaaggagcagaagtggtaaggtcagccagtgcagttgtttgcaaagtgtgccctacctttggctgcagaaaggcccyataaaacctgggtgttatctctgcgaaaagcctatccagttccaatttttgctccccttcacgtggtgcctcggtgaaaccatggaaggattatttatgcatgaagtacaagaggcctatgagtcatagtcaagctgtacaagttcattcaatgaggtgattccacgcta

SEQ ID NO: 72471 - DNA, 600 bp, Chicken  19866894352494_2
gagaaaggaggtgtcatttcacaatcttgggcaaggcccaggggcactagattaaatgagactataaatgtttaagttcaaagatatgtttctcgctctatgtggatataaggaaaggattaaaaatagaacaggctacctgtttcttgaaatatcagcctggaatattrgcttcattaggagtaaattgtcctatagtttgccctgcaaactgttgccaggagaaggagcagaagtggtaaggtcagccagtgcagttgtttgcaaagtgtgccctacctttggctgcagaaaggcccyataaaacctgggtgttatctctgcgaaaagcctatccagttccaatttttgctccccttcacgtggtgcctcggtgaaaccatggaaggattatttatgcatgaagtacaagaggcctatgagtcatagtcaagctgtacaagttcattcaatgaggtgattccacgctaaagcagctattatttgaactcactgttttgcttgaagattcccttgctcctttgtgcagcatactaatgaggcgcatagttaactagctacctaccgggaacagagccatgcatctttagaaggcttgcc

SEQ ID NO: 72472 - DNA, 600 bp, Chicken  19866894352495_1
ccttggaacgaaataatgctgttcaggcttggttctcttgcacaagaacatggtggtctccttcatgctacctatcaggtattgtcatcagcctgtgctcttctctagatggcatgggcgttgtctcttctgttttcttggcatgagacaactggactggacaagtcagatgagtgctagagtccatgccctgggacaggttgttctgctggggcagattcagaccacacctgctgtagccatatgaactggatgaactcagcggtcctagtcaagcgctcctctgattttacctaaagmaattcagaggctaatgaacagatgatcctaaaaaagtcaatgccagaaatgttgaaataagctcccctggacaattagctgggagcagagcttgccgtgagcagagatgaaacaactaaagctgaggtacactgtgtgatttattgctctacagttgaactcagagctggcatttcctcccactagatgctgatagcaaacacagagctgctctgggaagcagggaacgctgtcctgcataggtgaatgctggagtagatcttgctgctcttgatgtcactccctacagcagattttggc

SEQ ID NO: 72473 - DNA, 600 bp, Chicken  19866894352506_1
catctcctttaatgtaccataagaggccagcaagacatctaaggcattttcagcatactaagtaccagacacattgaaggattctcaaacaaaatgcagtaagcaatatatcctaccacagccttcagctagactttcgcactctgttgctattatataggttcaaagcgaaagttttgatacagaacacacactttgagcatgcacacatgtaaacgtgttctcctgtgatcttctcattcgtgcttgaggtgaagcaaatttgggttcacatcattctgagcagaaacagaacacagytcctaagaaytgcactgctcagattcaagtctgaaatccttatatctacgagattttttcctcccgtgttccatggacagtcttcatttccatgaacaattacctgtgaatcaccaggaagatgaaaacgcaccttctgtagtttagaaacatctgcatatgttcagtatcatcatatctggatgtttctggctgagctgctgtatcctgttccctgtacgtgtgcacagctggggactgcgcacacttctttttctccctctctcaaaacaaaacatcaaatacggtagcctaaaagac

SEQ ID NO: 72474 - DNA, 600 bp, Chicken  19866894352506_2
aatgtaccataagaggccagcaagacatctaaggcattttcagcatactaagtaccagacacattgaaggattctcaaacaaaatgcagtaagcaatatatcctaccacagccttcagctagactttcgcactctgttgctattatataggttcaaagcgaaagttttgatacagaacacacactttgagcatgcacacatgtaaacgtgttctcctgtgatcttctcattcgtgcttgaggtgaagcaaatttgggttcacatcattctgagcagaaacagaacacagytcctaagaaytgcactgctcagattcaagtctgaaatccttatatctacgagattttttcctcccgtgttccatggacagtcttcatttccatgaacaattacctgtgaatcaccaggaagatgaaaacgcaccttctgtagtttagaaacatctgcatatgttcagtatcatcatatctggatgtttctggctgagctgctgtatcctgttccctgtacgtgtgcacagctggggactgcgcacacttctttttctccctctctcaaaacaaaacatcaaatacggtagcctaaaagacatgcgctaca

SEQ ID NO: 72475 - DNA, 600 bp, Chicken  19866894352507_1
acatagcatgtttctttgtgaggcctgctctggggcttcttcgctgttaagatgctccagttctttgccaggtgttttgctgagggggaagagatgttatttattgaccagcgcaggcaagatatccaagttgaacagtggtagtcctccttgataaagtctctattgtcagaacgtggttcagggaattaacattctttctcagaggttcttgactgaaagaaaactcttgttggaggaatttgcctttgaacagaagtgtagtgagaactttcttattgcatgtcatgtcacagctayggacatctctcatcttcttgttgaagaaaataagaatgattgttgcccttggctcagcagacttctgtatttccctaggttctttttctttccagaaaagattctcactgtcctggaatgagtgtctcgctaaataaagactatcacagatgtcctctccagcctgtgcagagacttgggtgattggtcttggctgatgatacggatgtggctgagttcccaaagttccagcgaatatcatgacaaagtgtgcttatatgggtttccagaatacaaatttcctgtgtgtttgcgctcatt

SEQ ID NO: 72476 - DNA, 558 bp, Chicken  19866894352509_1
ggctttaagacaaagcatttccatttagtagctgactttgtaacatccccatgaaaatacattgtgcatgttattgggtaaaacatttaggttgtgctttttgcctccctccttcttaaaggactaaacaggctctgctgaatttctagtgtattcaaacagatatgttatgagaaatccaggactccaatttctatcctagctatcccccctgaagatgacaaacttagaaatgaagtgccaggtattagccccaaagagcttcctattttaaattagaagaacaatcaagtctgtaaygcacatctacttttacaaatgccttagtattcaaggataatcaacttttgtcaactgttaattggttatttgcttatagtggtgctaaaaaagctcttcctacttagatgtatgaatggtggggagggagggaagtctcctaaacaattcaagagatagtcagcagacagaaataaaaaataatctattcctgaaatgagtatttctagtaggtcagatgatgcattacaggctccagaaatggattaatgatagatg

SEQ ID NO: 72477 - DNA, 600 bp, Chicken  19866894352511_1
cttgaagagatctgaagtcagagttccttctaattacttatcaaaaggcacgattctgaagatttataaatgtgacagatgtaaaaataatgttaaaccttttttttttttatgttagaaaaagtacaactatactctgatgttcaaaatggcatttggaattcttgctacctgttcaacattccaggctcaaccttttacatgcaaacacagaaaacccagtaaatactaggacagactctctccctcactccagagatggcactttgcagcctggtggtgttcaaagagcgtttggaygttgtgttgagggacatggtttagagagaacaattggtgaagggcaaatggttggaatggatgatcctgtgggtcttttccaaccttagygattctatggtgatcagggatacttctggtggctgctctgtgtcatgccccaactctgcaggccgccctctgcgcccagagctcatgctgtgagcactgtggtaaacatggccccaccagcagtgttaaggaaagctgtcagagytttccttctttttgtcacagtgggaatgagttcagctcgagcagtctgctctcattacctgttac

SEQ ID NO: 72478 - DNA, 600 bp, Chicken  19866894352511_2
tgttaaaccttttttttttttatgttagaaaaagtacaactatactctgatgttcaaaatggcatttggaattcttgctacctgttcaacattccaggctcaaccttttacatgcaaacacagaaaacccagtaaatactaggacagactctctccctcactccagagatggcactttgcagcctggtggtgttcaaagagcgtttggaygttgtgttgagggacatggtttagagagaacaattggtgaagggcaaatggttggaatggatgatcctgtgggtcttttccaaccttagygattctatggtgatcagggatacttctggtggctgctctgtgtcatgccccaactctgcaggccgccctctgcgcccagagctcatgctgtgagcactgtggtaaacatggccccaccagcagtgttaaggaaagctgtcagagytttccttctttttgtcacagtgggaatgagttcagctcgagcagtctgctctcattacctgttacaaaccaaacaagcaagaggcaacaatgtctttcgttctttacatccaagttttgtaccgccagtgactaactctcatcagactcaacaac

SEQ ID NO: 72479 - DNA, 600 bp, Chicken  19866894352511_3
agactctctccctcactccagagatggcactttgcagcctggtggtgttcaaagagcgtttggaygttgtgttgagggacatggtttagagagaacaattggtgaagggcaaatggttggaatggatgatcctgtgggtcttttccaaccttagygattctatggtgatcagggatacttctggtggctgctctgtgtcatgccccaactctgcaggccgccctctgcgcccagagctcatgctgtgagcactgtggtaaacatggccccaccagcagtgttaaggaaagctgtcagagytttccttctttttgtcacagtgggaatgagttcagctcgagcagtctgctctcattacctgttacaaaccaaacaagcaagaggcaacaatgtctttcgttctttacatccaagttttgtaccgccagtgactaactctcatcagactcaacaacctggcatgaacaacagactttctagagttatttctactcaaatatgagctggtctgggtctcctaggaccgctggaaggggtgtaggtgctcccactgtaggctatgctgacttcccctggcacgcaaggcacccaagggaacag

SEQ ID NO: 72480 - DNA, 600 bp, Chicken  19866894352518_1
tcagcgttttggggggccaggagtccaagtttggggaaccattgggctctgagctcctggaaagagcagattttggggaagggaaggagctgagctggaatatggggctggtggtggtggtgggcgatggattttagccggtgtggcttatgcaggatggctgcatgcaggcatccatcagtcagaaggattatccaaaacagtgcctcccttaaaaatatccactggttttctttagtcgtagagtcatagaatggcttaggttggaggggaccttaaagaccacagagctccaacctscagtgggtaacggcagagggttatgcatccggcatctcgcgtggtcctgctgccgtgtgtgggcactttggagcatcctcagaggctctcaccgccccgatgctctcagcacatcagcatccagctccccaaagcagctccatgacccaatgccacagctgttacgggtggaaagcccctggtttggtgctgctgggaagtgggcagcgctcrgaaccggtcgtggagctgcgggctctgcctgcggggcacgacagaggagagctattcccatttctcttcagaggaacctagtaatta

SEQ ID NO: 72481 - DNA, 600 bp, Chicken  19866894352518_2
aaaaatatccactggttttctttagtcgtagagtcatagaatggcttaggttggaggggaccttaaagaccacagagctccaacctscagtgggtaacggcagagggttatgcatccggcatctcgcgtggtcctgctgccgtgtgtgggcactttggagcatcctcagaggctctcaccgccccgatgctctcagcacatcagcatccagctccccaaagcagctccatgacccaatgccacagctgttacgggtggaaagcccctggtttggtgctgctgggaagtgggcagcgctcrgaaccggtcgtggagctgcgggctctgcctgcggggcacgacagaggagagctattcccatttctcttcagaggaacctagtaattagttcttgcttttaaaatgctttgaagctctcgagtgaaactgctccacaagcaaaaactactattattcatgaacgcccttttccagaatctcagctctgcgggatgctctgcgtcgcagcagtttccagctctggctgtagagtggatgattttcctccccaggagcatcgctggggatccttgagagcaccaagagctgctctgacattgc

SEQ ID NO: 72482 - DNA, 600 bp, Chicken  19866894352518_3
gctgcgggctctgcctgcggggcacgacagaggagagctattcccatttctcttcagaggaacctagtaattagttcttgcttttaaaatgctttgaagctctcgagtgaaactgctccacaagcaaaaactactattattcatgaacgcccttttccagaatctcagctctgcgggatgctctgcgtcgcagcagtttccagctctggctgtagagtggatgattttcctccccaggagcatcgctggggatccttgagagcaccaagagctgctctgacattgccaaccccaaagccrgcagcagaaacgggtttggaagtgagcagggstcaggatctgccaacgtttagaagacgaaaacttgcaagtgctcaacccaagagtgaaaaaagggcttttccttcccccgtttctttgtcacagcctctcagacccctttcgggcccttggggaaggaggtttttaccctcatttgagtgcgttttgtgctgcacccagcaaaaaagaaaaagccgagccctactgggcaggagtgggaaggctttcagcagatgaatgattgtatgggagatcggtcagagcagcccctaaacctgg

SEQ ID NO: 72483 - DNA, 600 bp, Chicken  19866894352518_4
gagagctattcccatttctcttcagaggaacctagtaattagttcttgcttttaaaatgctttgaagctctcgagtgaaactgctccacaagcaaaaactactattattcatgaacgcccttttccagaatctcagctctgcgggatgctctgcgtcgcagcagtttccagctctggctgtagagtggatgattttcctccccaggagcatcgctggggatccttgagagcaccaagagctgctctgacattgccaaccccaaagccrgcagcagaaacgggtttggaagtgagcagggstcaggatctgccaacgtttagaagacgaaaacttgcaagtgctcaacccaagagtgaaaaaagggcttttccttcccccgtttctttgtcacagcctctcagacccctttcgggcccttggggaaggaggtttttaccctcatttgagtgcgttttgtgctgcacccagcaaaaaagaaaaagccgagccctactgggcaggagtgggaaggctttcagcagatgaatgattgtatgggagatcggtcagagcagcccctaaacctgggacttctcagggctcggacgtacccagggctg

SEQ ID NO: 72484 - DNA, 599 bp, Chicken  19866894352521_1
  misc_feature (1)..(119): n is any nucleotide
nnnnnnnnnnnnnnnnnnnnnnnnnnnnnnnnnnnnnnnnnnnnnnnnnnnnnnnnnnnnnnnnnnnnnnnnnnnnnnnnnnnnnnnnnnnnnnnnnnnnnnnnnnnnnnnnnnnnnnncggttaatggtttcttctagccggagcctagagtgagctgcaaatagaagaccttgcaggcattaaaaaaaacgaacaaccaatgaacattggaactagaactgtgggcaccatggtttcttgaggggctgagcttttggcattccctccctcgtgggtcctaatgtgggaattaacttcwggagaacagtgactsgttttctgtagcgcctcatctgcttaagttcatttaggatatattattccaccaaaaaatattactaaaatgtgttcttttgctgaaaaacatctgttaaaacctaacactgtaatgcttctaatggtttaattctggggtctgggctgagatggctgcrtgctggtatatccaccaggttatcctgggaaacaactagggttcraatgyggcaggaggccgtctgagattctcttccccgcatgctacrgtggaggagcagattagtgtcctgctcataatga

SEQ ID NO: 72485 - DNA, 599 bp, Chicken  19866894352521_2
  misc_feature (1)..(104): n is any nucleotide
nnnnnnnnnnnnnnnnnnnnnnnnnnnnnnnnnnnnnnnnnnnnnnnnnnnnnnnnnnnnnnnnnnnnnnnnnnnnnnnnnnnnnnnnnnnnnnnnnnnnnnnncggttaatggtttcttctagccggagcctagagtgagctgcaaatagaagaccttgcaggcattaaaaaaaacgaacaaccaatgaacattggaactagaactgtgggcaccatggtttcttgaggggctgagcttttggcattccctccctcgtgggtcctaatgtgggaattaacttcwggagaacagtgactsgttttctgtagcgcctcatctgcttaagttcatttaggatatattattccaccaaaaaatattactaaaatgtgttcttttgctgaaaaacatctgttaaaacctaacactgtaatgcttctaatggtttaattctggggtctgggctgagatggctgcrtgctggtatatccaccaggttatcctgggaaacaactagggttcraatgyggcaggaggccgtctgagattctcttccccgcatgctacrgtggaggagcagattagtgtcctgctcataatgagtcccttacaaatcc

SEQ ID NO: 72486 - DNA, 600 bp, Chicken  19866894352521_3
caggcattaaaaaaaacgaacaaccaatgaacattggaactagaactgtgggcaccatggtttcttgaggggctgagcttttggcattccctccctcgtgggtcctaatgtgggaattaacttcwggagaacagtgactsgttttctgtagcgcctcatctgcttaagttcatttaggatatattattccaccaaaaaatattactaaaatgtgttcttttgctgaaaaacatctgttaaaacctaacactgtaatgcttctaatggtttaattctggggtctgggctgagatggctgcrtgctggtatatccaccaggttatcctgggaaacaactagggttcraatgyggcaggaggccgtctgagattctcttccccgcatgctacrgtggaggagcagattagtgtcctgctcataatgagtcccttacaaatcccattctggaaaaggatatccagagctttgggagaaactctacaaagastctcatgagaggcccaattcttcacactgggaagtgttgtgggtggactgcaaagctctactgaatattgagttaatccaagatttacatgccataagcttgcagaaattggg

SEQ ID NO: 72487 - DNA, 600 bp, Chicken  19866894352521_4
ctgtgggcaccatggtttcttgaggggctgagcttttggcattccctccctcgtgggtcctaatgtgggaattaacttcwggagaacagtgactsgttttctgtagcgcctcatctgcttaagttcatttaggatatattattccaccaaaaaatattactaaaatgtgttcttttgctgaaaaacatctgttaaaacctaacactgtaatgcttctaatggtttaattctggggtctgggctgagatggctgcrtgctggtatatccaccaggttatcctgggaaacaactagggttcraatgyggcaggaggccgtctgagattctcttccccgcatgctacrgtggaggagcagattagtgtcctgctcataatgagtcccttacaaatcccattctggaaaaggatatccagagctttgggagaaactctacaaagastctcatgagaggcccaattcttcacactgggaagtgttgtgggtggactgcaaagctctactgaatattgagttaatccaagatttacatgccataagcttgcagaaattgggctgtggtgggctttagctaaagcagtgttagctaacctcttaaga

SEQ ID NO: 72488 - DNA, 600 bp, Chicken  19866894352521_5
ggcaccatggtttcttgaggggctgagcttttggcattccctccctcgtgggtcctaatgtgggaattaacttcwggagaacagtgactsgttttctgtagcgcctcatctgcttaagttcatttaggatatattattccaccaaaaaatattactaaaatgtgttcttttgctgaaaaacatctgttaaaacctaacactgtaatgcttctaatggtttaattctggggtctgggctgagatggctgcrtgctggtatatccaccaggttatcctgggaaacaactagggttcraatgyggcaggaggccgtctgagattctcttccccgcatgctacrgtggaggagcagattagtgtcctgctcataatgagtcccttacaaatcccattctggaaaaggatatccagagctttgggagaaactctacaaagastctcatgagaggcccaattcttcacactgggaagtgttgtgggtggactgcaaagctctactgaatattgagttaatccaagatttacatgccataagcttgcagaaattgggctgtggtgggctttagctaaagcagtgttagctaacctcttaagaaaccc

SEQ ID NO: 72489 - DNA, 600 bp, Chicken  19866894352521_6
ctccctcgtgggtcctaatgtgggaattaacttcwggagaacagtgactsgttttctgtagcgcctcatctgcttaagttcatttaggatatattattccaccaaaaaatattactaaaatgtgttcttttgctgaaaaacatctgttaaaacctaacactgtaatgcttctaatggtttaattctggggtctgggctgagatggctgcrtgctggtatatccaccaggttatcctgggaaacaactagggttcraatgyggcaggaggccgtctgagattctcttccccgcatgctacrgtggaggagcagattagtgtcctgctcataatgagtcccttacaaatcccattctggaaaaggatatccagagctttgggagaaactctacaaagastctcatgagaggcccaattcttcacactgggaagtgttgtgggtggactgcaaagctctactgaatattgagttaatccaagatttacatgccataagcttgcagaaattgggctgtggtgggctttagctaaagcagtgttagctaacctcttaagaaacccagtttttctttcctgtgcagtctttccaatgggtcttgtt

SEQ ID NO: 72490 - DNA, 600 bp, Chicken  19866894352521_7
tccaccaaaaaatattactaaaatgtgttcttttgctgaaaaacatctgttaaaacctaacactgtaatgcttctaatggtttaattctggggtctgggctgagatggctgcrtgctggtatatccaccaggttatcctgggaaacaactagggttcraatgyggcaggaggccgtctgagattctcttccccgcatgctacrgtggaggagcagattagtgtcctgctcataatgagtcccttacaaatcccattctggaaaaggatatccagagctttgggagaaactctacaaagastctcatgagaggcccaattcttcacactgggaagtgttgtgggtggactgcaaagctctactgaatattgagttaatccaagatttacatgccataagcttgcagaaattgggctgtggtgggctttagctaaagcagtgttagctaacctcttaagaaacccagtttttctttcctgtgcagtctttccaatgggtcttgttttccaggttctgatcttcaactggcagagcacagcttcatcccgttgaaaagccagtgaagcagataggacgatcttaccctgatgcaattctgttt

SEQ ID NO: 72491 - DNA, 600 bp, Chicken  19866894352521_8
tcatgagaggcccaattcttcacactgggaagtgttgtgggtggactgcaaagctctactgaatattgagttaatccaagatttacatgccataagcttgcagaaattgggctgtggtgggctttagctaaagcagtgttagctaacctcttaagaaacccagtttttctttcctgtgcagtctttccaatgggtcttgttttccaggttctgatcttcaactggcagagcacagcttcatcccgttgaaaagccagtgaagcagataggacgatcttaccctgatgcaattctgtttcstgatgacatgcttgtttccaccaggcaaggcaatgagccaagcactagcaatggaggagtggcrggtgactggcacaaagatcctccattaacctcttctgtggcatttactataaacagaggccagagaagggagttgagaggattcagtgaagtgatgttggcatgaagaagagagaagtcttaagtcaagctgagttgcagtggaaaagcttttatcatggaagtgccaagtataaatcactatcagagattcctcagttgagacactttggaaacaggacagtaataccaactgac

SEQ ID NO: 72492 - DNA, 600 bp, Chicken  19866894352521_9
attgagttaatccaagatttacatgccataagcttgcagaaattgggctgtggtgggctttagctaaagcagtgttagctaacctcttaagaaacccagtttttctttcctgtgcagtctttccaatgggtcttgttttccaggttctgatcttcaactggcagagcacagcttcatcccgttgaaaagccagtgaagcagataggacgatcttaccctgatgcaattctgtttcstgatgacatgcttgtttccaccaggcaaggcaatgagccaagcactagcaatggaggagtggcrggtgactggcacaaagatcctccattaacctcttctgtggcatttactataaacagaggccagagaagggagttgagaggattcagtgaagtgatgttggcatgaagaagagagaagtcttaagtcaagctgagttgcagtggaaaagcttttatcatggaagtgccaagtataaatcactatcagagattcctcagttgagacactttggaaacaggacagtaataccaactgacaatataacagagcaatattatgaccatgtagatcatagtgtgccaaccttttccatagtgtccc

SEQ ID NO: 72493 - DNA, 600 bp, Chicken  19866894352523_1
actaaaaatgtatcaatctgctcttcatgtaaactgttgtttattcctgaaaaacagcactcctgtgaaattggaaaaaaactgcatagaatttctggctaggaggaataactgtcctgatatttaaatatatgcaacttcagaaagccaactgaataatttcaataaagccatcttgtcttagctagccaagttctaggacttcagctctgagaaacaagaagtagtctacagaaattggggtaaaattctaattttattgcaaaaggctcaaggttttcatgttgagctgaataggamgaatcagggcccagacctgaaggagtctgggaccaatttcagagggatatgagggctggttagttggcgggttggagacactgcttggttttgtatgtgcacactgcaagtcgatttctatgttgattaagtggaataaaattggaaacagttttgtagcctttctcagctctgttacatacaaaacatttgtatttcaagctaccattgagacatttaatagaaatagaaaaaaaaaatactgctaacaatacaaagctcacgttttgaaaaagtcccatactttcttccagattagca

SEQ ID NO: 72494 - DNA, 599 bp, Chicken  19866894352524_1
  misc_feature (1)..(16): n is any nucleotide
nnnnnnnnnnnnnnnnatgagactctgtcttgtagtccaccatctcaggtggactgttcccatggtggtgttcccacagacgtgcttggtgtgggaccccaaagtggggacatcatatgggctcctggtgctcgggggaggcctgaggagcaaacacctccaggatttgctcctggtgcccacttcactggcacacttccctgcttgcttgcttctcccacagagacttatgtgctgtttgcaaacgggaatgatgctgttgctgcatcctacacatgctttcctgctctgtgcaagctygggtattgcttccatacacagtgtaagcrctgcagtttcaaagatctaatctaataatagattggtctacatttgctgcgttgccagaaaaagacatatgttgtcaggcagtcgaagtcagcaacagtactgaaatgcaaatgtgctgaaacatgaagaaggcagaaatccagaaggatctatctggggtttggctattagggaactaaaaatattttcttctttacatatatgccttccacacgtacttagagaagtactctttgcctgatgtctcaacgtgattaaagggcatttcc

SEQ ID NO: 72495 - DNA, 600 bp, Chicken  19866894352524_2
ttgtagtccaccatctcaggtggactgttcccatggtggtgttcccacagacgtgcttggtgtgggaccccaaagtggggacatcatatgggctcctggtgctcgggggaggcctgaggagcaaacacctccaggatttgctcctggtgcccacttcactggcacacttccctgcttgcttgcttctcccacagagacttatgtgctgtttgcaaacgggaatgatgctgttgctgcatcctacacatgctttcctgctctgtgcaagctygggtattgcttccatacacagtgtaagcrctgcagtttcaaagatctaatctaataatagattggtctacatttgctgcgttgccagaaaaagacatatgttgtcaggcagtcgaagtcagcaacagtactgaaatgcaaatgtgctgaaacatgaagaaggcagaaatccagaaggatctatctggggtttggctattagggaactaaaaatattttcttctttacatatatgccttccacacgtacttagagaagtactctttgcctgatgtctcaacgtgattaaagggcatttcctttcctttcttgcctttggtgtgagagtaa

SEQ ID NO: 72496 - DNA, 600 bp, Chicken  19866894352528_1
ctttgtttaaactgggtcactgttaatgtaccagttgcctatgctgagaataactgctgcctgctagtcagtgttttctggatgttttctccattacactctattatagttcttgcttttttttttttttaatactctgtacagaggattctaacacaagagatcatctggggaaatcctcatttcaatcactgcaggacggaagctgtgccagatctccttcggccttcaacgtgagcaggttcaagaccctgctcattaaaaactagttggaaaaaaatcagtaaggagaaactttamaacaaacaaactcaatccttgcagttgatgttgctagtaagtgaaatataattttggcctgggtgaaggcggggggggtattttgttttcagtaactgaaacagtgggttttggtatgctccctattcctttctttgactgggaatgattttactgaaatacaggaaagtctgtgttgttttcaaaggaaaaagattcaatttcctgagcagccctataaatggttgcagatcctgatctgggctaggggactgccccttggactagtccaggcagagaatggagccatcttcctgacaa

SEQ ID NO: 72497 - DNA, 600 bp, Chicken  19866894352528_2
cggggggggtattttgttttcagtaactgaaacagtgggttttggtatgctccctattcctttctttgactgggaatgattttactgaaatacaggaaagtctgtgttgttttcaaaggaaaaagattcaatttcctgagcagccctataaatggttgcagatcctgatctgggctaggggactgccccttggactagtccaggcagagaatggagccatcttcctgacaagttccctgaaatcttggcggatgatttgtgcacttgcaaatcaaacaggtcacacctccctactcccakatctttgtgtacctacaagtgaaaccaagaacaggtttcccttgcaaatattactcttactcctaacttctctaactgtaatagcaggagaaagaagaggttaacaggttagaacatatcagaaatgacctttaagaagttaccattagagccctgataccatgctgctgaagccagaaagaacccagttcagtgggctgaagtctgaagcatgaaagtcatcaacagcaacgttaaattgcactgtgctcaaaaggcagagacttcgttaagtctaggggaaagtgaaggggaaggacg

SEQ ID NO: 72498 - DNA, 600 bp, Chicken  19866894352528_3
gttcagtgggctgaagtctgaagcatgaaagtcatcaacagcaacgttaaattgcactgtgctcaaaaggcagagacttcgttaagtctaggggaaagtgaaggggaaggacgtggaagaaattatttgtttatgagcaaggaatggacactgttttcaactctgtattgcttgaatctgtgtactcatataaaagaaaatcttaaggttaaaataagtatctgtaagtgtctgctggcatgtgtggcctctggcagctggtgatcgtggagctttaagtccattcccagtttctaggcmcatatttcccttttaaacctcttgtacactgtgctgacaatggcagaagcactgaaaactcctargggttagggtgaaccccaatggcacacagttactaagctggctttaatgacactatttctgtcaactactttgattttctattagtaaacggagtctccattttgctgtttaaacagcaaagaaaaagctgtcctctgtgccagctggttagtatttcaacaattaagactgtgtgtttagctcctttactaaacttgatcagmgtaaatgtgatgataagtgaaccctgatgaa

SEQ ID NO: 72499 - DNA, 600 bp, Chicken  19866894352528_4
aaaggcagagacttcgttaagtctaggggaaagtgaaggggaaggacgtggaagaaattatttgtttatgagcaaggaatggacactgttttcaactctgtattgcttgaatctgtgtactcatataaaagaaaatcttaaggttaaaataagtatctgtaagtgtctgctggcatgtgtggcctctggcagctggtgatcgtggagctttaagtccattcccagtttctaggcmcatatttcccttttaaacctcttgtacactgtgctgacaatggcagaagcactgaaaactcctargggttagggtgaaccccaatggcacacagttactaagctggctttaatgacactatttctgtcaactactttgattttctattagtaaacggagtctccattttgctgtttaaacagcaaagaaaaagctgtcctctgtgccagctggttagtatttcaacaattaagactgtgtgtttagctcctttactaaacttgatcagmgtaaatgtgatgataagtgaaccctgatgaattatttcctcatttgcgaagagtttgttttaagcttaggtacagctgtgtcaagtgctcttcagc

SEQ ID NO: 72500 - DNA, 600 bp, Chicken  19866894352528_5
gagctttaagtccattcccagtttctaggcmcatatttcccttttaaacctcttgtacactgtgctgacaatggcagaagcactgaaaactcctargggttagggtgaaccccaatggcacacagttactaagctggctttaatgacactatttctgtcaactactttgattttctattagtaaacggagtctccattttgctgtttaaacagcaaagaaaaagctgtcctctgtgccagctggttagtatttcaacaattaagactgtgtgtttagctcctttactaaacttgatcagmgtaaatgtgatgataagtgaaccctgatgaattatttcctcatttgcgaagagtttgttttaagcttaggtacagctgtgtcaagtgctcttcagccatagggctaaactccctcgcaaggaatatttaaaactacgttcccttttttgatcaatcaatatcctcatcttatgttttctcacttgggaagtaccccatcctataactcatccctttgattttacatagaagataccactgattttgaagccagtgccaaggtataacagaaatgtgacttgatcagcctgtaattcaaca

SEQ ID NO: 72501 - DNA, 599 bp, Chicken  19866894352531_1
  misc_feature (1)..(55): n is any nucleotide
nnnnnnnnnnnnnnnnnnnnnnnnnnnnnnnnnnnnnnnnnnnnnnnnnnnnnnncagagagctgatacccagggacttcccaaagggtcagcccttgccagctatggtagtgctgctgggagcaatacactggggaggtcctccaaggagcctgagcaatgcaggaagcaatgtatagactcctttgtttctatttcctgttatttattgaagaaaaagcagaagtgctttttatccccataggtgtgttcagggacaagaaatttattgatcagataaatacaaaggtacctttcccytcatctggggaaaattggaagagcagtggtcacataatgtgtgcgttcttgcttgtatctcattgaggagcaatctgaactctttgcagttgaactttgcayggtagggagcagtaagaaacaaaaattattggtttctatttggtgcctgtcctacaaaggcacatgtaaaaaaaaaaaaagttttgtaaacattacagttgttttagtattaactattggaccatttgattatgtttgatataataagtctgtgagagttatggaaaatcagatgtctctttccatatctgttactt

SEQ ID NO: 72502 - DNA, 600 bp, Chicken  19866894352531_2
ctatggtagtgctgctgggagcaatacactggggaggtcctccaaggagcctgagcaatgcaggaagcaatgtatagactcctttgtttctatttcctgttatttattgaagaaaaagcagaagtgctttttatccccataggtgtgttcagggacaagaaatttattgatcagataaatacaaaggtacctttcccytcatctggggaaaattggaagagcagtggtcacataatgtgtgcgttcttgcttgtatctcattgaggagcaatctgaactctttgcagttgaactttgcayggtagggagcagtaagaaacaaaaattattggtttctatttggtgcctgtcctacaaaggcacatgtaaaaaaaaaaaaagttttgtaaacattacagttgttttagtattaactattggaccatttgattatgtttgatataataagtctgtgagagttatggaaaatcagatgtctctttccatatctgttacttatgctatttaaagcccattattactgttattcaaagaagataaagcaaccagctgagtgatgggtttagtgcagacatttctttggtgaagggggatccataa

SEQ ID NO: 72503 - DNA, 600 bp, Chicken  19866894352532_1
tcagtttgtttcttccacccatactgtagaggcatttctacctgtggtttttcaggccaaatctaatcgtgtaatgaaaacgttaacccaatttcaaagtcctatctggtgatagtgaggaaatattttgcctacagttctttttttacttttttttattattatttttatttttctgtcagaagacctctgtaattctgggcaaatggcctcacttctccactaactgaggaagcgttctgttcaggcactatacttcattatagttttcctaaccacagttttatctgcattacttcrtgttacctgcagggatggttgagtgtttttgtgtttgtatttttttttatctcctctttggcttcctgtagaagatagggaagaggcagtgaagataactcatagattgtacagcagattgttggcagaagcagcctgttccagttgttaccaagattctgtccttaaatctgagaaactgcaaaatgaaattttaacaggcttacttctccttttaaagaaacagaagatcttataagaagtttrtaagctctcctctaaactgaatatgcagatgtgaattggagagctaacaaaatt

SEQ ID NO: 72504 - DNA, 600 bp, Chicken  19866894352532_2
ggcactatacttcattatagttttcctaaccacagttttatctgcattacttcrtgttacctgcagggatggttgagtgtttttgtgtttgtatttttttttatctcctctttggcttcctgtagaagatagggaagaggcagtgaagataactcatagattgtacagcagattgttggcagaagcagcctgttccagttgttaccaagattctgtccttaaatctgagaaactgcaaaatgaaattttaacaggcttacttctccttttaaagaaacagaagatcttataagaagtttrtaagctctcctctaaactgaatatgcagatgtgaattggagagctaacaaaattctcattaaggtttttctctgaaaatgaaatatggaaatgttcctataatcggaatgtcttcaagataagcttggaagaaccttagaaacatattatccaaagatagccacataaacctctaagtcactgttcatttttgattttcaaacttttggagatgcctctcacgtggaggatgtaaagatatgtaatgtcgttgcctctcagctgtctgtaaaggtcttgcatagctgcatactcagctct

SEQ ID NO: 72505 - DNA, 600 bp, Chicken  19866894352537_1
atttacatgtttctgtgtcatagttacagtggcacagagctataaagcgacactacaacagccagtgctgcagtgctgactgttaggggcagtcagcctgcgctggctttctctgccctgatttatgcacctttgtttccttgcctgtacataaggaaagctaattacctctgatggtaatcttcagttgccatctgtctgagaggaaagctgcctaaatcagtcagtagggaatgctgggaaggcttatatgctttcctcagtgctacacagagatcccttcttccccccaaaacataratatttacatacagcatttgtttgcttctgaagaggagagtcgcccctaaaatcacagtggcccagaggagcgtttcaccctaccacacactctcacgtcctcacagtcctcctactccyaccatagcttcaatagctaccacccctgctgagagctgtggggcacagaacgtatgcagccagctctcttggtgggatggctgcaggcgcactgtcctgtccttcccacagctccccaccttcacaccccgtgctcactgccagtcatcagctcccggcacagctttcacttttcacatt

SEQ ID NO: 72506 - DNA, 592 bp, Chicken  19866894352537_2
atttatgcacctttgtttccttgcctgtacataaggaaagctaattacctctgatggtaatcttcagttgccatctgtctgagaggaaagctgcctaaatcagtcagtagggaatgctgggaaggcttatatgctttcctcagtgctacacagagatcccttcttccccccaaaacataratatttacatacagcatttgtttgcttctgaagaggagagtcgcccctaaaatcacagtggcccagaggagcgtttcaccctaccacacactctcacgtcctcacagtcctcctactccyaccatagcttcaatagctaccacccctgctgagagctgtggggcacagaacgtatgcagccagctctcttggtgggatggctgcaggcgcactgtcctgtccttcccacagctccccaccttcacaccccgtgctcactgccagtcatcagctcccggcacagctttcacttttcacattctcagccagttctggtctgctggaagcgaaacagcacctatctctgctgtctgattctcggtttccacagctgttcaaagctacaacaaaacaagcaggagctttctcaggg

SEQ ID NO: 72507 - DNA, 599 bp, Chicken  19866894352552_1
  misc_feature (1)..(43): n is any nucleotide
nnnnnnnnnnnnnnnnnnnnnnnnnnnnnnnnnnnnnnnnnnngtaaaagtattaattcactgatatttgggacttatgaatcagttttcagaactgttactattactgaaataagaagagctccagatatttttttttatttgaattaataaataacagtcaacaaagcagttaagcaagtgttcccctatgcatgtattcaaacaaagtaatgaaataaacacccttcttccccaaagctccttttgtgatcatctttcatatgtagtttatctgactaaaaggcttttttaagatcytttaaattttgatttttagaacaygtatctgagatagtattaatctgagccagctattaccatttaggagctaattctgtagctttagtactgacttctcttgaaataactggaagcatttctggagtggaaaagcttgagttaatttttgtggtaatcattgctgtgaccatgttaacatgacttgagattgtcagtgacaaagaggaatgctggaagtgtttgagatctttcaagtaaatctgatgtgctagcaaactggtgtaatgccaccgaagttgaaagtctgctgaatgaaa

SEQ ID NO: 72508 - DNA, 599 bp, Chicken  19866894352552_2
  misc_feature (1)..(19): n is any nucleotide
nnnnnnnnnnnnnnnnnnngtaaaagtattaattcactgatatttgggacttatgaatcagttttcagaactgttactattactgaaataagaagagctccagatatttttttttatttgaattaataaataacagtcaacaaagcagttaagcaagtgttcccctatgcatgtattcaaacaaagtaatgaaataaacacccttcttccccaaagctccttttgtgatcatctttcatatgtagtttatctgactaaaaggcttttttaagatcytttaaattttgatttttagaacaygtatctgagatagtattaatctgagccagctattaccatttaggagctaattctgtagctttagtactgacttctcttgaaataactggaagcatttctggagtggaaaagcttgagttaatttttgtggtaatcattgctgtgaccatgttaacatgacttgagattgtcagtgacaaagaggaatgctggaagtgtttgagatctttcaagtaaatctgatgtgctagcaaactggtgtaatgccaccgaagttgaaagtctgctgaatgaaaagggattggtagtacaaagtcttt

SEQ ID NO: 72509 - DNA, 600 bp, Chicken  19866894352561_1
ctggctcccaagcactgggatgtgcttacttcatagctttgtgctcacttatgatcgtttataggaaccatttatcccatgtagcatcctttccttcttttccttgcaagccgattcatgtggaatgaaacctttccacgtataaagagtatgaggccctacgcacaggttgcccacggaagctgtggatgtcccatccctggaggcattcaaggccaggttggatgggaccctgggcagcttgggctggtggtctataggggctcacagatcagtaagagctttgtttccagtcgcaaraagagatatcacataagagtgtgccacacttctatttgcccacccatcactgtaagcactgctggaactaacctgtgggctgattcaatgtcctcgtgttatcatcggggtgacagcacagcatcatgtctctagctggctttatttcaaagctgtcggggtcttttcaggctatcttagctgcctgtcctcctgtgaccaggacacgttactaacacgccaggcccttttctgcagagctgctcccagctgggtgccccctacagcgccggtgcttgggtctgtccctctccagctgca

SEQ ID NO: 72510 - DNA, 599 bp, Chicken  19866894352566_1
  misc_feature (1)..(24): n is any nucleotide
nnnnnnnnnnnnnnnnnnnnnnnncaggtcatcataggcaagattcaccaggtagaagtcagtgaaacaaagaaaactggagcagcattttcacgtgcttgactaggtgggtttacagaattcagttcctgctatgatgcatcctccatgtcaaaatgttccatcaaggaaagtttctataatccagtttgtaaggggaggtgaattattttattagaccagctgatgctcccaggaaaagcaaaaggtgttcagtttcagactgacttgacactggattacctgtacataggaagacakttttaggcacagagatccctaacagatcatcacagtaggattcctttataaaaaggaattggtacgtggtcagtaacaaagtttaggtttaccctaataatttttagaaattacattaagatagattgaagagagttgcacagagaagctggaatttaagtatattccaaggcacatgctagttatatggaaaagatttattaaattaaaccattttttctcacattccagaataaaaggaactaaaaagcctgagagtagctaggccctcgctctgataagtgcatgcacatgtggga

SEQ ID NO: 72511 - DNA, 600 bp, Chicken  19866894352566_2
taataatttttagaaattacattaagatagattgaagagagttgcacagagaagctggaatttaagtatattccaaggcacatgctagttatatggaaaagatttattaaattaaaccattttttctcacattccagaataaaaggaactaaaaagcctgagagtagctaggccctcgctctgataagtgcatgcacatgtgggaactggtcccactgaattatcagagcatcccacaatatatgtaatacaacacattttaactgcacaggcactagaacacgtacacacactcccagwaattcttacatcctgcaagaaaacagttaaggtatagctgcttgcattatgagattcatgttcctagtgggctggttttctttcaaaaatcaatctgcttgcttcagagagacagctggaaaattcctattattacagtgcattaacacctaagtttcatgggtagagcagtgataatcatcaggaggataatctcctagtacaagatgtagcttgctgctgctcacataggctcttaggcttttcagacgattctactttatagaatcggtaataagaaagttatttatttacttctgg

SEQ ID NO: 72512 - DNA, 600 bp, Chicken  19866894352570_1
gccttatccctatccttggtgaccaggttgccctcggcatccaacaggggatggagattctccctagccttcctcttgctgttaatgtgtttataaaagcatttactgtttacctttgctttagtggccaagctcagttctagctgcgctttggcttttctaattttctccctgcacagcttcactacatacctgtaaagcttcactacatacctgtaaaatgaatataaatgaactgatcggtgacatggggattagaggctgcctgggctgtagtgaccatgcaatggtggagttcaygctctggagggacatgaaacagctgaagagtaaatttaggaagctaaacttcaggaaagctaacttccagctcgtcggggagttagtcaacaaaataccttgggaaaccgtcctcatgggcaagggtgtggagcagagctggcagatctttaaggaggctttcttcagggtgcaagagctctccatccccaggtgtagcaagtcaggaaagaaaggaaagagaccagcgtgactgaactgggacctgctggtcaaactgaagagcaagaagaacatgcgcaggcagtggaaacaaggaca

SEQ ID NO: 72513 - DNA, 505 bp, Chicken  19866894352570_2
ttttattagagaactgggaatgaaggagataatatatgacgttgcctttgagagtccatacttggttaagttttcagtggggatgagggacctcgtattacaacaagctcctccccaccagtatggctcactggtgtccatactgaaccccttagtggccttagagtccattatccaacaggatgcccaattggtggttgatctaggggagacagggtgccttcggaccaggtgcagtatccaaacattggaagaagccgaggtccaccccattactaaaaccaggagacctgccccacrgactcctcaactgaaaccaatatgggtatcccgaaaacaaatgtttaacgctttaatcagggctggggttcaatttacaaaaattgatcgccatcccaatcatgtcatcctccagctatggaggcagttgaaggactatcaataatttcaaaatcaccccagaaaacctggggtgagaactattgacaaactaccaacaacaaca

SEQ ID NO: 72514 - DNA, 600 bp, Chicken  19866894352577_1
aaaaatagttcagtgtgattatctttgtaatggtgtattgaactcattccctttattaactgtccaccttaaaattattaagtattttttaagaaacagtataaatgtctgaaaatcaattctccagaaatacttcagaagtaaagtttgtgaaggaaacctgataacgttgataggtgccagtaaatttttatttcaaagatgaaacagtcttctatcacaaagatgaaggcatgaataactgcaattcccctaaagcaaagaatatcacttttctgctctggagagcttctctccccrtaacacacgttagtattgtgtccaaaccaattatttcacataatcactgtaaaggcatggtaatggttctgtcacagtaggaatatttccccttggaaaacaagtgtctcgtcttcggtgtgtttgttgagatgtgagagagaccatttattactgaataacatggcattctctcttcactaaattacaggagtctatttaatatcagcttttgttcaacaggtttttttgttggttttgtttggtgttttggtttggtttggtttggttttttttggaaagaaaagaatggctcattct

SEQ ID NO: 72515 - DNA, 600 bp, Chicken  19866894352583_1
ctatggagctaactgcattaaacagtgaaatagagattgagaaatggtggtagttgataatgcctgcaaaaacatgcctgtaaatatttgcttttctaaggacaatgcttatgaatgcatagttccaatgaaattagctttctagtaaaatatttattagttgtttaaatagcttcttcaaagctgaatatatatgtcaactttcaaggtatatatcacatgcaggttttacagtcctacggggattctgaactcaacacagctaagataaaggtctgcaaggtgcattataacccctayttctttttctgcttgtaaaaccattttgtattgaggtaataaggcagaaaaggcagaaatgtaagaaaagtgtctgtctgcatgtgaatcttatcatggagttatcactgaagataactccaatataatgagattagttcaaattgggatcatttcccagcctcctttcaacctgaaggtctccctcagatgctagtcccacagatccatttgaagcacatggatgctcactgagacttttttctgatgcctattaaaacacagaaggtggtctccactgaaacctgcactgcattcatc

SEQ ID NO: 72516 - DNA, 599 bp, Chicken  19866894352606_1
  misc_feature (1)..(115): n is any nucleotide
nnnnnnnnnnnnnnnnnnnnnnnnnnnnnnnnnnnnnnnnnnnnnnnnnnnnnnnnnnnnnnnnnnnnnnnnnnnnnnnnnnnnnnnnnnnnnnnnnnnnnnnnnnnnnnnnnnntctcttgggtgaatttattttgttgttgctgattttgtagctgaggctattgactcacactgatgaaaatttaactgtagttgctggcatgattttggtctgtgccaagcagtacagcctcagagcaatcctgggcatcactgaagagcccaggaccttgctgggtgcagtgtgtaggggtcctytaagtgcaggcttcgaggcttggttgtacagatgtgatctgtgctgtgcagtcggtctttaagctagagagctagctgttcatggccccattatttgttgcacagtgtgtccttcaaagtcacctcaactctggagctctacaaggcaaaataagcagaaccaaggtacttctggtgacacaggtcaccagcagatctccagtaaaggagatgaaaggccagacgcaccaaactctcttctctgcctcctgcagcagctcacagagggagccttggtggaaattaacccctctgaatca

SEQ ID NO: 72517 - DNA, 600 bp, Chicken  19866894352611_1
cctcacagccttctcttctccaggttgaacaagtgcaactccctcagcctattttcataggggaggtgctccagcccgctgatcatgtttgtggccctcctctggacccttatccaacatctccacgtctttcctgtattggggtcaccagacctggacgcagtaatccagatagagcctcatgagggcagaataaagaggaacagtcacctccttgtccctgatgaatcaacagaatcagtctgcttgcattcattacatgcaaattcttcagaatgaagaggggggtttgccttcacstttaaaacacagcagcaatattcacctaaaggaacatgcatgaggtatcctacagcagaggctcgttacactctagtgtgagacagtcaccaaagcaaacgcaaggaagaggttcagggttgatctctgcctctttacctcctcactaagcaccacactgaactcaaactttttttcctccttgtaacaccctagtcacggccctcctgttgcacagcaggaactgagagctccctcttctctcaccctacttcaaacatagggctgccacccactcctgaagtgccagaaccatgcatc

SEQ ID NO: 72518 - DNA, 600 bp, Chicken  19866894352617_1
atttgtcaacttaataaacacagccttttgttagggatggctcaaagatatatcttgccaaagaagagggaaaggattataatttcataattcgtcttttcctgcacatgctggagtttctattaaattgcacagtccatgcatgacacaagaatggattctagatatatttcttaatcttttcccatttatcccacaggatgtggtaaaaacaaaagctaagctacatggtgtatgtggaacttctgtctgtgaaagcacatgttcttgtttctaaacatgacaagatggttggaaaarccttaaggatgttgtatacattaatacattgaaaacaaatttccaatagactttagtagcacagtaaatatgttcagggaagacaaaggccagaaacataaataagtgtgcatatatcagaatttcctatgcttgcacaaaatattgtgtagcacttatcatctgcgtgttgtaaacctgataaactggacaagtaggtgctacagattggtagagttaaaagaaatgctaactcagcaatatcagctcaattggcaacagactaacagaattcttatttctcattttaacatccactcc

SEQ ID NO: 72519 - DNA, 600 bp, Chicken  19866894352623_1
gaatgcaatgcttcctaggttcaccctcattatttgatctgcataattataccaaacctttcaattaaaacaagagcaattaaataagaaaatggtctgaatctactttcaaaagaagagctggctacagttagttacaaaatgtttctgaacatccgtctgtcctaaatgtacggccatagaaatctacatatttcatctaaaaataacatagttttgcctaaacataggaatcaagaacactgtttgacagagaatatatcctcacctgagcctgaccttctctctgagaacaatttsatgcagcctggatgacccattttttatggtttttacagaaactgggacaatggaaagcaaaaaggtgagggagagggaggcamgtgctgagaattttttacgagacaatttaacttgtaaaggtgagcagaaaaattggtgacgtacctccgttaccgccaacttcaagctcgttattgttatatgtctcaaacaaggaatctataacaaaacttcatttatgatacaaaaggtgttccagcacgggaccaagtgcaggaaataaggtaatttttcaccttctgatatgaaaaagaaaga

SEQ ID NO: 72520 - DNA, 600 bp, Chicken  19866894352623_2
ataagaaaatggtctgaatctactttcaaaagaagagctggctacagttagttacaaaatgtttctgaacatccgtctgtcctaaatgtacggccatagaaatctacatatttcatctaaaaataacatagttttgcctaaacataggaatcaagaacactgtttgacagagaatatatcctcacctgagcctgaccttctctctgagaacaatttsatgcagcctggatgacccattttttatggtttttacagaaactgggacaatggaaagcaaaaaggtgagggagagggaggcamgtgctgagaattttttacgagacaatttaacttgtaaaggtgagcagaaaaattggtgacgtacctccgttaccgccaacttcaagctcgttattgttatatgtctcaaacaaggaatctataacaaaacttcatttatgatacaaaaggtgttccagcacgggaccaagtgcaggaaataaggtaatttttcaccttctgatatgaaaaagaaagagacaaggacatttcttccttagaatgttctacaaataagtgaatggcaacagaaactgcagcctaagagatacgctcagcaca

SEQ ID NO: 72521 - DNA, 599 bp, Chicken  19866894352625_1
  misc_feature (1)..(147): n is any nucleotide
nnnnnnnnnnnnnnnnnnnnnnnnnnnnnnnnnnnnnnnnnnnnnnnnnnnnnnnnnnnnnnnnnnnnnnnnnnnnnnnnnnnnnnnnnnnnnnnnnnnnnnnnnnnnnnnnnnnnnnnnnnnnnnnnnnnnnnnnnnnnnnnnnnntgaagatgtttgcggcatgcttagggttgtatatcctgcatgcccgtattggcttcaatgatgtacaccacctcagagctgtcagccaaatatccaacaaactgaagggaaaacagcagtacccaggcagctgcctgcatgcaggccttaccracagcgccgtggtgaaggcgggctgacatgctggctatcagccgggcgcacgcctcaggcagcacatgaggtccaacttccgatgcaatttcgacacagtgatacttctggtagtcatctaaatcctttttgttgcataagttctccatggagttgattctgggaataagtccaagcttcggcgttaagaggaaaggaaaatatttttgcttagatatgctgaaaaccagaatttcccacatcctctgacggtgctgcgcatggcaaggacaggcctggagcactgcacttctaaatct

SEQ ID NO: 72522 - DNA, 600 bp, Chicken  19866894352625_2
gcgcacgcctcaggcagcacatgaggtccaacttccgatgcaatttcgacacagtgatacttctggtagtcatctaaatcctttttgttgcataagttctccatggagttgattctgggaataagtccaagcttcggcgttaagaggaaaggaaaatatttttgcttagatatgctgaaaaccagaatttcccacatcctctgacggtgctgcgcatggcaaggacaggcctggagcactgcacttctaaatctaaattcacatttattctgaaggtctagacattccgcaagttcttcmaataaaakagactgtgtacaaagaagtcagattatattaaggcctcagatacaaggtcagaaatgttgctgctgctaagaggtgccrtgtttacaactccaaaagcagcatccggccaaaaagtttacttgtactactgcgatagggaaaaaaaatcagctgcagactctatgtccaagtatggccagcctttgccaagtccagttatatggaaataattagaggaatgaatatttaaatacttttctcaagagaaggacccaaaaccaacacccactttctgccttgttggaaacttgg

SEQ ID NO: 72523 - DNA, 600 bp, Chicken  19866894352625_3
ctcaggcagcacatgaggtccaacttccgatgcaatttcgacacagtgatacttctggtagtcatctaaatcctttttgttgcataagttctccatggagttgattctgggaataagtccaagcttcggcgttaagaggaaaggaaaatatttttgcttagatatgctgaaaaccagaatttcccacatcctctgacggtgctgcgcatggcaaggacaggcctggagcactgcacttctaaatctaaattcacatttattctgaaggtctagacattccgcaagttcttcmaataaaakagactgtgtacaaagaagtcagattatattaaggcctcagatacaaggtcagaaatgttgctgctgctaagaggtgccrtgtttacaactccaaaagcagcatccggccaaaaagtttacttgtactactgcgatagggaaaaaaaatcagctgcagactctatgtccaagtatggccagcctttgccaagtccagttatatggaaataattagaggaatgaatatttaaatacttttctcaagagaaggacccaaaaccaacacccactttctgccttgttggaaacttggacaatgtc

SEQ ID NO: 72524 - DNA, 600 bp, Chicken  19866894352625_4
ttgcataagttctccatggagttgattctgggaataagtccaagcttcggcgttaagaggaaaggaaaatatttttgcttagatatgctgaaaaccagaatttcccacatcctctgacggtgctgcgcatggcaaggacaggcctggagcactgcacttctaaatctaaattcacatttattctgaaggtctagacattccgcaagttcttcmaataaaakagactgtgtacaaagaagtcagattatattaaggcctcagatacaaggtcagaaatgttgctgctgctaagaggtgccrtgtttacaactccaaaagcagcatccggccaaaaagtttacttgtactactgcgatagggaaaaaaaatcagctgcagactctatgtccaagtatggccagcctttgccaagtccagttatatggaaataattagaggaatgaatatttaaatacttttctcaagagaaggacccaaaaccaacacccactttctgccttgttggaaacttggacaatgtctgcacacaattcccaggaaaatacagaactaattttacttttccaatgtcagggcccatctctaaatatatccatgctt

SEQ ID NO: 72525 - DNA, 600 bp, Chicken  19866894352631_1
aaagggaaattatatataaacaggagggaaatcaactttttacatgggtagatagtgacatgatgaggaagaatggttttaaattaaaagaagttagatctagatgacagggggaagtctttcattgacagggtggtgaggtgctggaacaggctgcccagagaggctgttgatgcctcatccctggagctgttcaaggctaagttggatggggccctcagcaaatttatctagtacttgatctggtggatggcaaccctgcctgtgacagggggtttggaacttgatgatcctaaagtycccttcaacccaaaccatactatgattctaattttatagcgtacaattcaaaagctaattaatgtgactgtgagtctcaaataaatgccttgaagttataggatctatgcatttcacctccgttagtttttttcctccttagtctatttagtttaataatttaaaagttcaaaatatatgtttatgcacatcttgtgtgtaatatgtgtatatatgtgtgcatgtatatacatacattactttttgctgccttcctcatgggtatttactccattaactgaagtaacagcttgtctaatt

SEQ ID NO: 72526 - DNA, 600 bp, Chicken  19866894352640_1
tttgttttgtagagtgatctcacgtagtggtttgttctgttttgtgagtaggtgttcctcctgggctctgtatcatgcactggccatgcagatgtggagcacaagtagaaaaacaccctgcagaccctgacaagaataaaagcaagagagaatctgtgatgggtgagaaaggaaaagtgcactttgaagcaggggacgccccgctggctctgcctatcgcacccaccgccggcgtgttccccatctctccttttggtggttgccatctctcaggtgtcagtaagtaataacacatgagcrttgaaagtttccacttacagaattgtctaaaatagatgcctgtgtgagtgygtatatatcgactcaaaaaattgtgacttacctaacttttttcttatgtttagtgtgctatcagtggaagctttgattgagttatgmtgattatgttattaatataatcagtgctattattttatagtgtggtaatagttcgctaataaacaaaaaagggggagatgtggcataaagaaggtcgttgtattgctaatgagtggtaaagctcgacaataacttgagccagatgtaaacacccacaaggtg

SEQ ID NO: 72527 - DNA, 600 bp, Chicken  19866894352640_2
gtgttcctcctgggctctgtatcatgcactggccatgcagatgtggagcacaagtagaaaaacaccctgcagaccctgacaagaataaaagcaagagagaatctgtgatgggtgagaaaggaaaagtgcactttgaagcaggggacgccccgctggctctgcctatcgcacccaccgccggcgtgttccccatctctccttttggtggttgccatctctcaggtgtcagtaagtaataacacatgagcrttgaaagtttccacttacagaattgtctaaaatagatgcctgtgtgagtgygtatatatcgactcaaaaaattgtgacttacctaacttttttcttatgtttagtgtgctatcagtggaagctttgattgagttatgmtgattatgttattaatataatcagtgctattattttatagtgtggtaatagttcgctaataaacaaaaaagggggagatgtggcataaagaaggtcgttgtattgctaatgagtggtaaagctcgacaataacttgagccagatgtaaacacccacaaggtgtgggaaaactgttgtgggataactgttgggaacacttgtgtgggaaaactg

SEQ ID NO: 72528 - DNA, 600 bp, Chicken  19866894352640_3
aaagcaagagagaatctgtgatgggtgagaaaggaaaagtgcactttgaagcaggggacgccccgctggctctgcctatcgcacccaccgccggcgtgttccccatctctccttttggtggttgccatctctcaggtgtcagtaagtaataacacatgagcrttgaaagtttccacttacagaattgtctaaaatagatgcctgtgtgagtgygtatatatcgactcaaaaaattgtgacttacctaacttttttcttatgtttagtgtgctatcagtggaagctttgattgagttatgmtgattatgttattaatataatcagtgctattattttatagtgtggtaatagttcgctaataaacaaaaaagggggagatgtggcataaagaaggtcgttgtattgctaatgagtggtaaagctcgacaataacttgagccagatgtaaacacccacaaggtgtgggaaaactgttgtgggataactgttgggaacacttgtgtgggaaaactgttgtgttgtgtgggtatataaagctcttaagcacctacaataaacccctttgttctgcaccagcggcggagcgcacacctctttcac

SEQ ID NO: 72529 - DNA, 600 bp, Chicken  19866894352652_1
tccagcctcatttttatagtgctaatgttatgttcagtttcaaacatggaaaacacagataatgcgctttgtgttagtattatgtgtacaaatcctatctttgaagctaataaagttctgccaatactttcactggaaacataatcatcacaataattacttgatcataaaagtaaagaacaatagctctgtaaaatgatttcctcatctaaactcctaatgcaacagagacagtgattttactaaagcagcagcaattagcacggcaggaatactatttttggtgggaaatgtggaacwtaaacatgcagttgtagcttaactgtggtagagttcattatatgtaaaaaaataattagaatttatgaaaaagcttatattgaaatattttgaaaacataagtggtgaaaaatattttcaaaacttattaataaattttgtaagtgtaagatgctttataagcaaattacttgaacaatctgtaaaatattttaacgaatcatttgctaattctccccttattttttagctagaataatttatcagttgattttcaaggatctatttaaaatgcttgatttcactaaagtttcatctaat

SEQ ID NO: 72530 - DNA, 594 bp, Chicken  19866894352652_2
cagttgattttcaaggatctatttaaaatgcttgatttcactaaagtttcatctaatttctgtgcataagaacagtgtgcgtttgaaaagctttttgccctcaacatgtgaactcaggtgttcagacttctcttggatgctgctggcagaagaggagaagagtccacattcttcttctccacttcagctgccagcaaaattgtcaggggaacaccaaatcctatctggacaacaacaaaaaaatcaaatcaagtgacctttaacaacagtatgttttgtcaaaatgtgtttaaaatattmatatgcatatatctgtgatgcagatacaatgactaggcatgactatgtagcaacaaaacctaacttttcagctacaatgcatattgactgcagaattcttaaaatttgtctacaaggacagaattccccattaattgctgaattcttccataagctgtgtattaaattatcctccagagtagaacctattcttgaaaggcttaatacctaacttattatgtatatccaggaacatgtgctgggctctagtagtgggctttcaatcatttcatttttgtcacagttatatgctaa

SEQ ID NO: 72531 - DNA, 600 bp, Chicken  19866894352657_1
tgaagctcttttcccagataaatgatcttatgatcctatagcagtatgctgtagcaggcaacctggttttgcctcggttatgcttgagctatcaatcttatccccgaagtgctcttgtttcagtttctttttttgaaacaggtcaggtggaaaggattacttttcaaatgtctggagcagcagagcctgggcttttattaataatggaagaggacaaaggaagtaatcttcacaagatcagcatactgccttccaggtgttttgagggagcgctgactttggaccaggtaatgctgctcrtgttcacgccatctagatcctcatattttgccaaggattttcttaggaaaggaaaakactaccatacaccctgcaagattgtttagtttcatctgccaagctaggaatgataaaacagatgcagagatatgaatctctgtgtccagagggtatgtggtagggagawgtacaaacctcagctagctcctctcgcactgcaratgaactctgagtcatgtgcaggtcaaatgttgtgtccccaagcaacctgtaacatctcattggttgttgagactgcagaagaagttatgcttttaaacg

SEQ ID NO: 72532 - DNA, 600 bp, Chicken  19866894352657_2
gcaacctggttttgcctcggttatgcttgagctatcaatcttatccccgaagtgctcttgtttcagtttctttttttgaaacaggtcaggtggaaaggattacttttcaaatgtctggagcagcagagcctgggcttttattaataatggaagaggacaaaggaagtaatcttcacaagatcagcatactgccttccaggtgttttgagggagcgctgactttggaccaggtaatgctgctcrtgttcacgccatctagatcctcatattttgccaaggattttcttaggaaaggaaaakactaccatacaccctgcaagattgtttagtttcatctgccaagctaggaatgataaaacagatgcagagatatgaatctctgtgtccagagggtatgtggtagggagawgtacaaacctcagctagctcctctcgcactgcaratgaactctgagtcatgtgcaggtcaaatgttgtgtccccaagcaacctgtaacatctcattggttgttgagactgcagaagaagttatgcttttaaacgcaaatgcaaactttccccaaaacagaaaggtacctgtcagcaagttggttttagttt

SEQ ID NO: 72533 - DNA, 600 bp, Chicken  19866894352657_3
aatgtctggagcagcagagcctgggcttttattaataatggaagaggacaaaggaagtaatcttcacaagatcagcatactgccttccaggtgttttgagggagcgctgactttggaccaggtaatgctgctcrtgttcacgccatctagatcctcatattttgccaaggattttcttaggaaaggaaaakactaccatacaccctgcaagattgtttagtttcatctgccaagctaggaatgataaaacagatgcagagatatgaatctctgtgtccagagggtatgtggtagggagawgtacaaacctcagctagctcctctcgcactgcaratgaactctgagtcatgtgcaggtcaaatgttgtgtccccaagcaacctgtaacatctcattggttgttgagactgcagaagaagttatgcttttaaacgcaaatgcaaactttccccaaaacagaaaggtacctgtcagcaagttggttttagtttttttcattttttatactgtgaacactgatttrtgtgtgtttttaaagtccagygtgaagacaagcagaactggaactggaagacaaagcatcacccatgctggcttaaa

SEQ ID NO: 72534 - DNA, 600 bp, Chicken  19866894352657_4
ataatggaagaggacaaaggaagtaatcttcacaagatcagcatactgccttccaggtgttttgagggagcgctgactttggaccaggtaatgctgctcrtgttcacgccatctagatcctcatattttgccaaggattttcttaggaaaggaaaakactaccatacaccctgcaagattgtttagtttcatctgccaagctaggaatgataaaacagatgcagagatatgaatctctgtgtccagagggtatgtggtagggagawgtacaaacctcagctagctcctctcgcactgcaratgaactctgagtcatgtgcaggtcaaatgttgtgtccccaagcaacctgtaacatctcattggttgttgagactgcagaagaagttatgcttttaaacgcaaatgcaaactttccccaaaacagaaaggtacctgtcagcaagttggttttagtttttttcattttttatactgtgaacactgatttrtgtgtgtttttaaagtccagygtgaagacaagcagaactggaactggaagacaaagcatcacccatgctggcttaaagaggccagaaataatccaggcattctagttcaga

SEQ ID NO: 72535 - DNA, 600 bp, Chicken  19866894352657_5
catctgccaagctaggaatgataaaacagatgcagagatatgaatctctgtgtccagagggtatgtggtagggagawgtacaaacctcagctagctcctctcgcactgcaratgaactctgagtcatgtgcaggtcaaatgttgtgtccccaagcaacctgtaacatctcattggttgttgagactgcagaagaagttatgcttttaaacgcaaatgcaaactttccccaaaacagaaaggtacctgtcagcaagttggttttagtttttttcattttttatactgtgaacactgatttrtgtgtgtttttaaagtccagygtgaagacaagcagaactggaactggaagacaaagcatcacccatgctggcttaaagaggccagaaataatccaggcattctagttcagaaataacaccttgttaagaaggtaaatggcaatcaagcacatgtrctttgtgaaaacctctggatctaaaacaggcaagaaagcagcactgtgtgctgctgctgaataccttgactacttccaagatgagaaaagcctcatgggaatagttgctggccagagtgagaactgctggccaatcagcatcaac

SEQ ID NO: 72536 - DNA, 600 bp, Chicken  19866894352657_6
taaaacagatgcagagatatgaatctctgtgtccagagggtatgtggtagggagawgtacaaacctcagctagctcctctcgcactgcaratgaactctgagtcatgtgcaggtcaaatgttgtgtccccaagcaacctgtaacatctcattggttgttgagactgcagaagaagttatgcttttaaacgcaaatgcaaactttccccaaaacagaaaggtacctgtcagcaagttggttttagtttttttcattttttatactgtgaacactgatttrtgtgtgtttttaaagtccagygtgaagacaagcagaactggaactggaagacaaagcatcacccatgctggcttaaagaggccagaaataatccaggcattctagttcagaaataacaccttgttaagaaggtaaatggcaatcaagcacatgtrctttgtgaaaacctctggatctaaaacaggcaagaaagcagcactgtgtgctgctgctgaataccttgactacttccaagatgagaaaagcctcatgggaatagttgctggccagagtgagaactgctggccaatcagcatcaacatcatgccttactgaaggcca

SEQ ID NO: 72537 - DNA, 541 bp, Chicken  19866894352657_7
aacctgtaacatctcattggttgttgagactgcagaagaagttatgcttttaaacgcaaatgcaaactttccccaaaacagaaaggtacctgtcagcaagttggttttagtttttttcattttttatactgtgaacactgatttrtgtgtgtttttaaagtccagygtgaagacaagcagaactggaactggaagacaaagcatcacccatgctggcttaaagaggccagaaataatccaggcattctagttcagaaataacaccttgttaagaaggtaaatggcaatcaagcacatgtrctttgtgaaaacctctggatctaaaacaggcaagaaagcagcactgtgtgctgctgctgaataccttgactacttccaagatgagaaaagcctcatgggaatagttgctggccagagtgagaactgctggccaatcagcatcaacatcatgccttactgaaggccaacaacaccgtccctaattacattcacctaaaatgtttgtaaagtcaaattatgtcccttttctgtctcaaatgca

SEQ ID NO: 72538 - DNA, 599 bp, Chicken  19866894352675_1
  misc_feature (1)..(83): n is any nucleotide
nnnnnnnnnnnnnnnnnnnnnnnnnnnnnnnnnnnnnnnnnnnnnnnnnnnnnnnnnnnnnnnnnnnnnnnnnnnnnnnnnnntcccttttaagtctcttagttccagcttatttttatcacagatctgctaatagtaaaaatcaagttaacagcacaccactcccctgccccctgcaaatacagatgcattccctcttagcaagagcgctcacagcactacactagccagcagcaggagcagacaccatgctgtcccttgcctccaccccatgcattttaagcaactgctccctatccygctttgccctgagttgcatgaaatacatggctgcttccccgggttgctagatggacttccttgctttgcctactcagactggagtcaggccattcacagtgtcccaactcctcactcgtcaacattagttttgcctggcaaatcaggagaagacaccacgtggtttgctggcgcctactgcgtggatctggccataacaggagagcaataaatattcatgaccctgcatgggtttggcttgaccaacagctacccagctgtgakaagaacaaatgctttcccttcgctctcttcaattt

SEQ ID NO: 72539 - DNA, 600 bp, Chicken  19866894352675_2
ccaccccatgcattttaagcaactgctccctatccygctttgccctgagttgcatgaaatacatggctgcttccccgggttgctagatggacttccttgctttgcctactcagactggagtcaggccattcacagtgtcccaactcctcactcgtcaacattagttttgcctggcaaatcaggagaagacaccacgtggtttgctggcgcctactgcgtggatctggccataacaggagagcaataaatattcatgaccctgcatgggtttggcttgaccaacagctacccagctgtgakaagaacaaatgctttcccttcgctctcttcaatttgtgcctgctacagtggtaattgaagttcaatttttgggcttggtttgttctgatgtttaagtaacactctgctattcccttcactaaaattgtgtagtgattgtcaatgtgcaattccccctccaataaatgctcagagagggtggggaagaggtgattttgtcccagaagctcatggaaaattttctgttctagagacaaataccgtagcttggagttcttgtggtcatctcctaattgtctgtgcctgctcaggacttgttca

SEQ ID NO: 72540 - DNA, 600 bp, Chicken  19866894352677_1
tgacttgctaaattcatagcatgcttataagcttggtgaagattctttgttctttccctacctgataagtttgccatgtcttgacatcttaaagctgtcagctcttctcctattcccctttatttgcataggaacgtgaacgagaacttgcatgcattcgtggtcgatttgataagggcaatctgtggagcgcagagagaagtgaaagttctaagagaaaacttccagaagctaaaatggtaatgttagctgcatgcatcaaagggtgtgtgaattgctttaacatgttctgaacatggrtattttggcacaaatgtagataaaagatgggaatctaaggtttgtacatacctaggctacacaggactgctttctcaagtagcttgtatgattattaatgaagtgttggatttttttctgcggaatcagttacaagtggtactgacttgagttgattgatttagtttttatgacagttattgtcctacttcctatattcttatatgagaaataagtatgcttatttcttatgtatgaatattctttctccctcccaatcccctgccaacttctaaaaactcttcttacaaccattttaac

SEQ ID NO: 72541 - DNA, 599 bp, Chicken  19866894352682_1
  misc_feature (1)..(179): n is any nucleotide
nnnnnnnnnnnnnnnnnnnnnnnnnnnnnnnnnnnnnnnnnnnnnnnnnnnnnnnnnnnnnnnnnnnnnnnnnnnnnnnnnnnnnnnnnnnnnnnnnnnnnnnnnnnnnnnnnnnnnnnnnnnnnnnnnnnnnnnnnnnnnnnnnnnnnnnnnnnnnnnnnnnnnnnnnnnnnnnnnnnactctcccttcatccctctcctactcatctttgtgtgcagcagggcttttattgcatccttggacttggggtttcccaggctcagaggagctgtgtggcccagttgttcccagcttggtgsccacggatcaggacgtgacagtcccatcacttcctcaggctctggctcagaaggaggacatggaggagaggatcaccacactggagaaacgctacctggcagcccagcgagaagccacctccatccatgacctcaacgacaagttggaaagcgagttggccaacaaggagtccctgcaccgccaggtactgaaccaggacccagaggcccccactaccccagggacgtgggagggagaaatgaggctggggtcaccatgcaggcgcctcgtggtacatcgtggtgtgtcacacagtgcg

SEQ ID NO: 72542 - DNA, 600 bp, Chicken  19866894352688_1
gcaaacatgatgttaatttctattatttcccttttatgtacaattttctttaaggctgaggaaaggaaatattctgaaaacgtattccagtcccctcaacccactattctacttgtcatttacccatgaaaatgcattgaaatgtctgtgctgtgggctgcttctagcctgcttaggatcacctactcgataggtggtagataggtggctggatagagtagggagcgccttccattctgctgacagaaaaagctactgcctgaactgttacaaggcatcagataatatgatgtctgctgraagggtgctttctgaactttgggagaagaacttagcaattcaagcatgtcctcacctatctgatgcaaacccatgggaagactgctttcactggtttctcatgactgcaactcaatgtagtatcttttctagttcttaggtggcttcttttaatgagtggcataaatattaccacagctgtcacccaagctgggtgtgaaaagctatactgatcatgaattttcatttgacataggtttcccaaattacccttgggttctgtaatgaccttaagtagcttatggatgcagggttgggctt

SEQ ID NO: 72543 - DNA, 600 bp, Chicken  19866894352696_1
gttcaaaataaatacaaagctggtttcttcagtaaattacataccagatgatatttgaagtgatgagttttcaactctgtagctgtgctgttgcttagccaagagtcaagtcccatttacctgtgggccattgagtcagctgctggtcagtgctaaaggaagaacctctgtgtgccaggtttgctgataactctgattaaacagattaagattactgcttatttcctttgcttagtcaggcttcaattactaaagctttatgctttagaagctgtctatttagtatttcccttccagccyttgctcccaccctctccatttggttgctgatggtgtggtagatatgctgtctatgcagtagattgtgtaactagaggatgcagagcagctggaaatgagtggtgtgcaagaagtcatggctgaagctggaaaccagcgttacctcaagttgatgctggcccatctcaggatgatgtgatgcttgattttattttgtcttgtgttccagactcgccagcctgtgtttgttcagttgctgcaaggtgtgttcagagtttaccattgcaactggttaatgccaagccaaaaggcatcagtgga

SEQ ID NO: 72544 - DNA, 475 bp, Chicken  19866894352710_1
cagctgcattgtgtcactgcacgagacaggcccaagatgcctggggacgatgctgatgctgggatttgggtgtgttggtctcttcctccaggttatagatctcctgcctgttgtgattatgccagagccagtggtgttagctgctgctccttagatcttctagttgcaaagataaggatagaagacatggattatgttatgatctgctcaccactggagctgcaagctgggcctgcactgtgtttttgttggcaaggagaggacacctgaccccttcctggggagggaactgatcaccakcactgcttcccttaaaagcagatgtgagaatgtgctctttcaccctggtggcagagctgtgctactgcatttgaaggttgcagtcacagtgtatgtattcagcaccactgtggcctttgcctcacagagcttgcagtgcaagggttagactgcagtctgttctgaatttgctttt

SEQ ID NO: 72545 - DNA, 600 bp, Chicken  19866894352714_1
tcttctgtactttctggctggattgattttctggtcaaagtggaagccctgtattgacttcaattttgaggaagaacaggggcagaactgtaacctttagagattttctccttcctacaaaaggacgaggaaggttatatgagtttgtaaaactgaaggagagagaagggtgcaggaatttgaagataaagaaacaaaggaagaccagttaaaagtcaagtctttttcttttgctggtttcttggggaattctttagcacacttcttattcgaaggtaagtgcctgttgattctgtcatrttttcaaattcaaaaggtgctatacctacagcaaacttgctcatatcaggaacaggatttgagttctttgcagatgactcagtgcttgtcaccactttattatcaactatactttctccatcgttaacctcatggttgggagcaggcacagtgttatccagcaggccttcagaatctgaattatcaggaatttcctttaaaytaagtgaactattatctggattaggactagttaaagaatgttcattttctggtacctgttcgctgatactggaaaacttagtttctaatgttaccatc

SEQ ID NO: 72546 - DNA, 600 bp, Chicken  19866894352714_2
gaccagttaaaagtcaagtctttttcttttgctggtttcttggggaattctttagcacacttcttattcgaaggtaagtgcctgttgattctgtcatrttttcaaattcaaaaggtgctatacctacagcaaacttgctcatatcaggaacaggatttgagttctttgcagatgactcagtgcttgtcaccactttattatcaactatactttctccatcgttaacctcatggttgggagcaggcacagtgttatccagcaggccttcagaatctgaattatcaggaatttcctttaaaytaagtgaactattatctggattaggactagttaaagaatgttcattttctggtacctgttcgctgatactggaaaacttagtttctaatgttaccatcttatcagatcttacttctgcaacaacatctacttcgttcctggatggtgatgatgtaacagaatttccagttaaaggtgtatcaacagggatatcagagtcactgtttgtgctttctgcttgctctaatgctgcccaaattaatcgctgctgttcctctagttcttccaaggtcagagtatcctcatccatggttgagtcca

SEQ ID NO: 72547 - DNA, 600 bp, Chicken  19866894352714_3
atcgctgctgttcctctagttcttccaaggtcagagtatcctcatccatggttgagtccactatttttggctgagaaacatcactggaaggattcaacgatgaaacagtgttaggaagaggaggatgggtgggtgttgaaggttgagttggtgtaagacttcgtggagtaagtggaggtgtgccttgtggtaaaggaggaggagttgaaatcactggaggtccaggtggcagtggaggttggaactgaaaactgttagttgtttgagatctttgtgacacctccacatctagaaacagayaacaggattttattagaatctgaagtctgactagatcaacattcaatgccaaaactttaggagattaactaccagacaaatgtcttctcatacctggttttcagctgagatagaacaagctttcttaaagtttcaacatccactgaaactacctgtttggggattttaactctcctggccatttcatgaaaaaactatgaaacaaacaaataaatctcttgaatgtactgaacagacttttcttccatccttagacacactacggtaccctctcttataagaaatccaaaagcaaagata

SEQ ID NO: 72548 - DNA, 600 bp, Chicken  19866894352715_1
tcatgatctcatgtctgcaaggcagctccactgaactgctaaatacagtccaaaaagcaactgacaacagaagtaaagcgcactcactgtgtgaggagccacagcagccccttacagacagctcctgctctacaggaactccagagaaactaacccgagcagcctgtgagaaaccaacacacctcaactgccaggcatgaaagcatccaacagagcgggtgggggtggggaaggaacaccaattagggattggtggagaaggagacagccacggtgataatttcatttccctgtaaatcygtgattcgtgcagtcagcggaaccgagacatctgattcagatttacctcccctatctgtctctgctcttaagaaggaaaatattgttcagccttctcaagacagagctaaaaagaacttcccttagagatctatgcagacagaaagtgactgccttactgccagatataaataaaccaacaactctcacgaagtttcagacccagcttttgccttcccagcgcaggctgtcaggagattgaatccttttgtagttgtgcattacccagaagccgtctgccaggaaagaaacagcctcaga

SEQ ID NO: 72549 - DNA, 600 bp, Chicken  19866894352717_1
ccataattaaaccaattaaatgaaagtataaaaaatttccatttggggggatggaatacaactaggatttataccagtaaaactgtgtcaaagaaaaataataggtcattaccaacgtatttatacagcaaaactaagcataagtcagctttcaggaaataactgtactgtaattaagatcaatatacttgggaaaaggacactgccaaaactgaggaagggagaaagctacttcaaacaaacctaacatttttcactgaaagaggagaaacttgatatctggagaatttaaagacaacyaatagaattctaagcaagcaacatagagatatacttcaactgaaagaggctaggaaagccacaaggctgtccaaatatacagaataaggtggcaaagctcttaccatttaggaatatctcagtcccatgyaagcttaggtcaaagtaaaactagcaaacgtgaaatatatcaaagactcaaacaaagtgaagaactagtacataagagaaacacggaaagtaaattatttaagaacattagcagcaggagcttgagaactgatggatcaagtggaccaccttggagtaatacagccaatt

SEQ ID NO: 72550 - DNA, 600 bp, Chicken  19866894352717_2
aaactaagcataagtcagctttcaggaaataactgtactgtaattaagatcaatatacttgggaaaaggacactgccaaaactgaggaagggagaaagctacttcaaacaaacctaacatttttcactgaaagaggagaaacttgatatctggagaatttaaagacaacyaatagaattctaagcaagcaacatagagatatacttcaactgaaagaggctaggaaagccacaaggctgtccaaatatacagaataaggtggcaaagctcttaccatttaggaatatctcagtcccatgyaagcttaggtcaaagtaaaactagcaaacgtgaaatatatcaaagactcaaacaaagtgaagaactagtacataagagaaacacggaaagtaaattatttaagaacattagcagcaggagcttgagaactgatggatcaagtggaccaccttggagtaatacagccaattaagaggattaaagattttgcagaaaagcaaaacagcttcttcgtgtgaaactttaccccataaggtgaacggaaatacactttttcaaaggccaaaatgggaggcagttttggatgtgaaaagtgtctgt

SEQ ID NO: 72551 - DNA, 600 bp, Chicken  19866894352720_1
gggacaagaggtgaattcctgtaacagtttgaatactcggggaagccataattcagatcttgctcctctgtagccatccagtgagtacaagcaccggtgtattttcaggaggtgctgtgaaggatgctggtacttgctgctcactggtgttgtggcagatgaatgtagaaccagctttattctcaagtctggacagggtctgtgaggttgagatactgagcagtgcttgcagcagtctcacgagtgttatggtgtgttttgaggtacctgatgggtgtacacactaaaaagcgttggcayagtaagcctggcatatctgggccacctgcctttttgcaaggcagatggaggtcagtaaaagtatggagctttgactgttcattgcttctttgtactagcacttgtttaaaaaaatataaagtaaagataattcatttaatcagtatccttgacctcatgattgagaaccagccattttagtcagcttttattctctgaaatgtggtttatgttagaattactgagcttatttttagatgagttcctgtatcctttgtttgcagttttcctttattattctctttaccatgttagtttcag

SEQ ID NO: 72552 - DNA, 600 bp, Chicken  19866894352729_1
gggaggctcatgcatgcttttctgtattacgggacatagttactaaaggcattagtgtcttgtttttgcaatttactagataggacagaactttcctttctgtagccacaggcaagacagatgggcatgcaattccaattgaacttcacatgagaaaaaaaggcatcactgagtgggacagctttaaaaagcaaaatacctatccaaacttaaagagcagaaaaaggatgtcgcagttaaaatgacttaggcttagaacatttatctgagatttatgtagctaatttctgtgcaatagargaaggatgctatctcatacctgcttgagggtaagggcaaatttcaggcatctctgaatccagccatccaccccacctcccataactgctacatgacttctagaccaaacagacaggaactgggagagacaaataaaggcagactctgtctatcacatggctgaaatgtgtttgtacttcaaccaaagcatctctatactttttttcactttctggagaagacacagccccctctccactgccaggcctgtggtgacaatagaactcttgaaatacatcaatgctatcttagtgaaacttc

SEQ ID NO: 72553 - DNA, 599 bp, Chicken  19866894352731_1
  misc_feature (1)..(154): n is any nucleotide
nnnnnnnnnnnnnnnnnnnnnnnnnnnnnnnnnnnnnnnnnnnnnnnnnnnnnnnnnnnnnnnnnnnnnnnnnnnnnnnnnnnnnnnnnnnnnnnnnnnnnnnnnnnnnnnnnnnnnnnnnnnnnnnnnnnnnnnnnnnnnnnnnnnnnnnnnngaggctgtggatgccccatccctgcaggcattgaaggccaggctggatgtggctctggtctctgaaggtcccttccaaccattctattctaaatagcagagctcccagctgctgcatgccaccagggacctcactcagagccccayggggtcagccccagccaacgacaacacacctgtgaggtgactgcactctcacagggcaaaactgagtgtttttggtgctgtgttcatctcagcttcccttccccactctacccratgctgtcctgacccgtgggtgcacctcttgcttggaagaggccccgttatcacagcacctcgggtggctgctggcgtacacagcacccagcacatgttagcaggggaaatagtgacgtttgggttgtgttatgtgtacgaatcccagcagtgctttgggtgctgccgtcctcgagcactgccgg

SEQ ID NO: 72554 - DNA, 558 bp, Chicken  19866894352731_2
  misc_feature (1)..(40): n is any nucleotide
nnnnnnnnnnnnnnnnnnnnnnnnnnnnnnnnnnnnnnnngaggctgtggatgccccatccctgcaggcattgaaggccaggctggatgtggctctggtctctgaaggtcccttccaaccattctattctaaatagcagagctcccagctgctgcatgccaccagggacctcactcagagccccayggggtcagccccagccaacgacaacacacctgtgaggtgactgcactctcacagggcaaaactgagtgtttttggtgctgtgttcatctcagcttcccttccccactctacccratgctgtcctgacccgtgggtgcacctcttgcttggaagaggccccgttatcacagcacctcgggtggctgctggcgtacacagcacccagcacatgttagcaggggaaatagtgacgtttgggttgtgttatgtgtacgaatcccagcagtgctttgggtgctgccgtcctcgagcactgccgggaccctgcggtgtatcgtgagggggttgtgcagaagtacgtggaactgtcatacagcacagggggagcagtca

SEQ ID NO: 72555 - DNA, 599 bp, Chicken  19866894352732_1
  misc_feature (1)..(86): n is any nucleotide
nnnnnnnnnnnnnnnnnnnnnnnnnnnnnnnnnnnnnnnnnnnnnnnnnnnnnnnnnnnnnnnnnnnnnnnnnnnnnnnnnnnnnntgcagtaattactttatgcaaaaaataatatgattgatgtaaaacccttaataactcatatttggttaaaataaagtaattttacagacagatttatttataccagtatagatcaatgctgataagagttaagttctctgctgatgaagcagtcacagtgtgttcagttacggctattaaatgtagagttaaaatatacatattcaaatacatwggattttcattagagttaaytgtatggaaaatttcagtgatagtgttataycaaggtcagtaggaggtcagaaagtctgtttacattctgaagttctccctttaactcccaaaagtgtgacttctaatttctaagttaattggctcatttactttgaaactcttatagaatgtatttggtattccaagtacagtaatttgtggatggttacatcataattttgtataggtaaaatacagtttaaatctctaccctagatgtatacttcagttcatcttgtcattacaacttattacatt

SEQ ID NO: 72556 - DNA, 599 bp, Chicken  19866894352732_2
  misc_feature (1)..(66): n is any nucleotide
nnnnnnnnnnnnnnnnnnnnnnnnnnnnnnnnnnnnnnnnnnnnnnnnnnnnnnnnnnnnnnnnnntgcagtaattactttatgcaaaaaataatatgattgatgtaaaacccttaataactcatatttggttaaaataaagtaattttacagacagatttatttataccagtatagatcaatgctgataagagttaagttctctgctgatgaagcagtcacagtgtgttcagttacggctattaaatgtagagttaaaatatacatattcaaatacatwggattttcattagagttaaytgtatggaaaatttcagtgatagtgttataycaaggtcagtaggaggtcagaaagtctgtttacattctgaagttctccctttaactcccaaaagtgtgacttctaatttctaagttaattggctcatttactttgaaactcttatagaatgtatttggtattccaagtacagtaatttgtggatggttacatcataattttgtataggtaaaatacagtttaaatctctaccctagatgtatacttcagttcatcttgtcattacaacttattacattaatacttattcaaagaaaaa

SEQ ID NO: 72557 - DNA, 599 bp, Chicken  19866894352732_3
  misc_feature (1)..(35): n is any nucleotide
nnnnnnnnnnnnnnnnnnnnnnnnnnnnnnnnnnntgcagtaattactttatgcaaaaaataatatgattgatgtaaaacccttaataactcatatttggttaaaataaagtaattttacagacagatttatttataccagtatagatcaatgctgataagagttaagttctctgctgatgaagcagtcacagtgtgttcagttacggctattaaatgtagagttaaaatatacatattcaaatacatwggattttcattagagttaaytgtatggaaaatttcagtgatagtgttataycaaggtcagtaggaggtcagaaagtctgtttacattctgaagttctccctttaactcccaaaagtgtgacttctaatttctaagttaattggctcatttactttgaaactcttatagaatgtatttggtattccaagtacagtaatttgtggatggttacatcataattttgtataggtaaaatacagtttaaatctctaccctagatgtatacttcagttcatcttgtcattacaacttattacattaatacttattcaaagaaaaagccttgttattgtcatttaaactcttcttcc

SEQ ID NO: 72558 - DNA, 596 bp, Chicken  19866894352732_4
gatgtatacttcagttcatcttgtcattacaacttattacattaatacttattcaaagaaaaagccttgttattgtcatttaaactcttcttcctctctgctactagaaataccacagaaagttacaaagaaacaagcagtttattttaaaaagcctaactattgctcttgctatgtggcttgattatttttctgtccttcaatttacttgaccaagtgtggttctgttttgtttccttaatacataatactgtgaaggttttatgaacaacagattgtgtatctttaatacatgtgacwtttgtaaagattttttactgcttattaggctgactggaagataccatccatacctgcagtccttacaacttgtacactgatgcatcagtggcattgaattatcttcccttaattgttctgccatttctcctgaagtggatttctggggttctctttggtgttttgcccatagtaaacttctgtagcatggcccccgtaaataataaggagatattatgatttccaagtattcctagcaaacagcagagatctaaagtctttgactgggacttcataagtatcatttccagtatgta

SEQ ID NO: 72559 - DNA, 576 bp, Chicken  19866894352738_1
tagagcagacaaaagcaattcctgtttgttaggcatgtttgaaatactttttttcccacgtcctctggatttgagaggttggctgtgatttcccctcctccagatggccatgtttctcactttatgaatcaggtaccattttaatcccttcactgggttactgaagtgggtctccctcttttttttttcccctatttcctcccttcagccgtcttttgctcagttgtaatttgaccttaccacctgcttggaagtaaagatgatgtttgagcctgaaaataaacagtgattgattccttmttagacccctcttgtctccagaacattgcagtaagcaaggagaaactcagatctgctcacttccctccatccttagcacaaaaacccttaactgtccagcagccttaaccagctaggttggtgtcattgccttggctgtattatttgtattccagtagcaatgatgtaactgcagtttttaatttactgaacagacttcaaggaaatgtgccatgcttagtgtatgctcactgtctttcatacacgtctaaatctcaattagagggagtaatgagg

SEQ ID NO: 72560 - DNA, 600 bp, Chicken  19866894352748_1
acatgtgctgcctgacatcgtctcttgaaatcaatacaattaattcaaatattttctggagcagatgtgcatctggataagtacgcactggttgtctgcacagttcagataacaacacagaaacaaatctaacacagctgccatgcgctgaactccctgatgcaggtagaatctccttgcccaaagaacagagatcaaagttatgggataaatcccacaaatccagtagtgccgcttacacgtataaagtgccatctttagggagttctgttgaatcttggttttattatttacttacamtgtacatatgactcacttttgtaayrgaaactaaytgaagggggtctaattgtttaaaatatcttctatcatcttcagaagtcttagaaggtgggatgcgaagacaaccctttctctgcacatttatcagcatgtggctctgctcaaactgcatttgcatgcaatgtacttgaagttttttaatctcagttggtccagtgaagccagcaaagtccttttggatttccctgctgtaaacattgtcccagtcttatatcaggacccaagattcaataaaaataagttgccagctatatggaa

SEQ ID NO: 72561 - DNA, 600 bp, Chicken  19866894352748_2
tgaaatcaatacaattaattcaaatattttctggagcagatgtgcatctggataagtacgcactggttgtctgcacagttcagataacaacacagaaacaaatctaacacagctgccatgcgctgaactccctgatgcaggtagaatctccttgcccaaagaacagagatcaaagttatgggataaatcccacaaatccagtagtgccgcttacacgtataaagtgccatctttagggagttctgttgaatcttggttttattatttacttacamtgtacatatgactcacttttgtaayrgaaactaaytgaagggggtctaattgtttaaaatatcttctatcatcttcagaagtcttagaaggtgggatgcgaagacaaccctttctctgcacatttatcagcatgtggctctgctcaaactgcatttgcatgcaatgtacttgaagttttttaatctcagttggtccagtgaagccagcaaagtccttttggatttccctgctgtaaacattgtcccagtcttatatcaggacccaagattcaataaaaataagttgccagctatatggaagttttacatgtatagcaagaaaagc

SEQ ID NO: 72562 - DNA, 600 bp, Chicken  19866894352748_3
gaaatcaatacaattaattcaaatattttctggagcagatgtgcatctggataagtacgcactggttgtctgcacagttcagataacaacacagaaacaaatctaacacagctgccatgcgctgaactccctgatgcaggtagaatctccttgcccaaagaacagagatcaaagttatgggataaatcccacaaatccagtagtgccgcttacacgtataaagtgccatctttagggagttctgttgaatcttggttttattatttacttacamtgtacatatgactcacttttgtaayrgaaactaaytgaagggggtctaattgtttaaaatatcttctatcatcttcagaagtcttagaaggtgggatgcgaagacaaccctttctctgcacatttatcagcatgtggctctgctcaaactgcatttgcatgcaatgtacttgaagttttttaatctcagttggtccagtgaagccagcaaagtccttttggatttccctgctgtaaacattgtcccagtcttatatcaggacccaagattcaataaaaataagttgccagctatatggaagttttacatgtatagcaagaaaagca

SEQ ID NO: 72563 - DNA, 600 bp, Chicken  19866894352748_4
acaattaattcaaatattttctggagcagatgtgcatctggataagtacgcactggttgtctgcacagttcagataacaacacagaaacaaatctaacacagctgccatgcgctgaactccctgatgcaggtagaatctccttgcccaaagaacagagatcaaagttatgggataaatcccacaaatccagtagtgccgcttacacgtataaagtgccatctttagggagttctgttgaatcttggttttattatttacttacamtgtacatatgactcacttttgtaayrgaaactaaytgaagggggtctaattgtttaaaatatcttctatcatcttcagaagtcttagaaggtgggatgcgaagacaaccctttctctgcacatttatcagcatgtggctctgctcaaactgcatttgcatgcaatgtacttgaagttttttaatctcagttggtccagtgaagccagcaaagtccttttggatttccctgctgtaaacattgtcccagtcttatatcaggacccaagattcaataaaaataagttgccagctatatggaagttttacatgtatagcaagaaaagcaaaggaatga

SEQ ID NO: 72564 - DNA, 600 bp, Chicken  19866894352749_1
ccaagataaggccctgcctgcacgtgcgtggtgcctcaaggacatatgtaagattctgcgtgagtgcagatgtctccccaatcctcttgcaagatcagaagattgggtcaatggctgcactccagaaaatgtcactattaacatctccagacataatcacagatacagcacaagaataaagcaggtcagggatacttgggctcctaagctgatggtgcagctgccttgctcccctctaattccctaaatcctagggcacagcgagaatgaaaaagcactgtgctgtaccaaaacagcgcygtgaagcagcagtgtgcaactcagccatgttcaatcttgatctctgggaaagggcaaggtgagaacttattcagtgatcagaacaaagctgtgaatgtatgacaatataaatatttttttggttcacctactttgcattacaaacatttttttccttgcatgcttgcactgatgacataataatgcatttacatcccaaccctgmtgcccaaccacagcacaagtagctgacattcaccataaacaacgtatcaccaatcwcacccaaccacacggcacttcctggcgggttttgcagtt

SEQ ID NO: 72565 - DNA, 600 bp, Chicken  19866894352749_2
aagctgatggtgcagctgccttgctcccctctaattccctaaatcctagggcacagcgagaatgaaaaagcactgtgctgtaccaaaacagcgcygtgaagcagcagtgtgcaactcagccatgttcaatcttgatctctgggaaagggcaaggtgagaacttattcagtgatcagaacaaagctgtgaatgtatgacaatataaatatttttttggttcacctactttgcattacaaacatttttttccttgcatgcttgcactgatgacataataatgcatttacatcccaaccctgmtgcccaaccacagcacaagtagctgacattcaccataaacaacgtatcaccaatcwcacccaaccacacggcacttcctggcgggttttgcagttccatycctgcaggaaacaacaagtttcagcaccgtatttcagtgatgctgtgactttctgtgctgcctataaaggaagctgtaattttccaaatggtttgttatggattcaaacccgacgtgcacggaggtgggaggagggcatggtcagaggcaggaaaagccatgctggtattactggaatgatctttgcaacgcagcacctt

SEQ ID NO: 72566 - DNA, 600 bp, Chicken  19866894352749_3
cgagaatgaaaaagcactgtgctgtaccaaaacagcgcygtgaagcagcagtgtgcaactcagccatgttcaatcttgatctctgggaaagggcaaggtgagaacttattcagtgatcagaacaaagctgtgaatgtatgacaatataaatatttttttggttcacctactttgcattacaaacatttttttccttgcatgcttgcactgatgacataataatgcatttacatcccaaccctgmtgcccaaccacagcacaagtagctgacattcaccataaacaacgtatcaccaatcwcacccaaccacacggcacttcctggcgggttttgcagttccatycctgcaggaaacaacaagtttcagcaccgtatttcagtgatgctgtgactttctgtgctgcctataaaggaagctgtaattttccaaatggtttgttatggattcaaacccgacgtgcacggaggtgggaggagggcatggtcagaggcaggaaaagccatgctggtattactggaatgatctttgcaacgcagcaccttcttgagccactgtgccaagtagggcagcctggttttaatcacaacagcctgcagtt

SEQ ID NO: 72567 - DNA, 600 bp, Chicken  19866894352749_4
gcagcagtgtgcaactcagccatgttcaatcttgatctctgggaaagggcaaggtgagaacttattcagtgatcagaacaaagctgtgaatgtatgacaatataaatatttttttggttcacctactttgcattacaaacatttttttccttgcatgcttgcactgatgacataataatgcatttacatcccaaccctgmtgcccaaccacagcacaagtagctgacattcaccataaacaacgtatcaccaatcwcacccaaccacacggcacttcctggcgggttttgcagttccatycctgcaggaaacaacaagtttcagcaccgtatttcagtgatgctgtgactttctgtgctgcctataaaggaagctgtaattttccaaatggtttgttatggattcaaacccgacgtgcacggaggtgggaggagggcatggtcagaggcaggaaaagccatgctggtattactggaatgatctttgcaacgcagcaccttcttgagccactgtgccaagtagggcagcctggttttaatcacaacagcctgcagttcagtgtgagactccttaccgagtcctccatgtcacactgctgat

SEQ ID NO: 72568 - DNA, 600 bp, Chicken  19866894352751_1
atgcattgatggttatggggaaattgttaatattcttacaatgaaaatgtgcggactatgtctattttcagtaggatatcatttaatttttaaaggaaagtatgttttgcagtgaaataggcacaattctattattgtcttttatttatctacttttatgtcctttaatattgtgaaatgaagttatttcctaatgattatgactttaatattacaatacaaatggaagtgtataaagcattaatattttagaatttaatatattcatatgtaggagacagctgtaaagtaaaatttgarattttcatttgtaaaggatctgcttacaacattgtgaaaatctacccataaatgtttgcccttaaacttatacagagagtatctacccttcctcaacttctgaacttagaagtcagttcctcttgcytgatgctttcacatgttcagaaactgtctttttttgaaagctggaaattgaagaaaacctggagaaactgtgagaaaataataaaaatttgtatatctgctattgtgaatagaatttggtgtagttttactggtgatgagtccattatttgtactcaagttaagctctagctt

SEQ ID NO: 72569 - DNA, 600 bp, Chicken  19866894352751_2
tctattattgtcttttatttatctacttttatgtcctttaatattgtgaaatgaagttatttcctaatgattatgactttaatattacaatacaaatggaagtgtataaagcattaatattttagaatttaatatattcatatgtaggagacagctgtaaagtaaaatttgarattttcatttgtaaaggatctgcttacaacattgtgaaaatctacccataaatgtttgcccttaaacttatacagagagtatctacccttcctcaacttctgaacttagaagtcagttcctcttgcytgatgctttcacatgttcagaaactgtctttttttgaaagctggaaattgaagaaaacctggagaaactgtgagaaaataataaaaatttgtatatctgctattgtgaatagaatttggtgtagttttactggtgatgagtccattatttgtactcaagttaagctctagcttctctcttgcaaaaggtgtggatgagcgatcaggaaaatttttgatcctgttgaactgattttatgaaaagtctgaatatcagtagtctccctgaacatgcataattacagattccagaaacatttga

SEQ ID NO: 72570 - DNA, 600 bp, Chicken  19866894352753_1
tcctctcccatcccagcagtgctcccagggctgctacctgctgcccccacagtgcatcccctagcagggctgcagccctacttgcagtagctttgggacactaaagcttctgttttagctccagttacaaatcctgctgcacttcaccgtgcttacatctggcttatttctagctcgtcaagtctttgtgcctttgcctctgttcagagcaagcacttgctcttctccttttggagggcagggatgtcctgagtgctgcttcatctgcttctgagctgtgattcctttttcctcagcccrggatgatgggcaaatttcatcagcactgcagctctggggcacagctttataataagatccccagggctcctttgtgggaggaggaaaacacctgccaaggatgggtgaggtgtgcagataccagcaggtgattgatggagctcctgcaaaggcaaggatcagctctgggatctccaggctttcctcccgagtcgagagagccaaaacacagatcccaacccttggaaatgccataaagtgaacaccccctccttatggcccagcagtagttagcggtgctcagagcctctccgtgaggca

SEQ ID NO: 72571 - DNA, 600 bp, Chicken  19866894352755_1
tttccagtttctcaaacactagttctagcatgacttgcatttaattgcttttactcatcccttaagaaacacttgtcttgtgtctttcctttatcctactttgcagatattaaataaaaagcactgacaacactgtacattctaattactctttaccttgacaataaccattccaaaatgaaattaaataaaatttaaatagtttcagacagaatgcactgtggtgataccacatctataaacaagacaataagtttaaactgaacccacgtgaaaccagagatcaaaggttgatgaaaracaaatgatatcccaagtcaaagaaaattaatttgaaaggaactccagatgttttcttctctaatacaccattamagcactgagcaaaattaaggttgtatggctatcctaatcacttgcaattatttttttttaatctaggcatgacagacaacactaaaaagaaaacctcacatgaagtaaatattgcccatgatatatatattgcacattatattctaaacttctaagattttaaataaatatttcattaattagctttttttagttacttcctaagaaaacctggatgtcgcagtg

SEQ ID NO: 72572 - DNA, 600 bp, Chicken  19866894352755_2
tcttgtgtctttcctttatcctactttgcagatattaaataaaaagcactgacaacactgtacattctaattactctttaccttgacaataaccattccaaaatgaaattaaataaaatttaaatagtttcagacagaatgcactgtggtgataccacatctataaacaagacaataagtttaaactgaacccacgtgaaaccagagatcaaaggttgatgaaaracaaatgatatcccaagtcaaagaaaattaatttgaaaggaactccagatgttttcttctctaatacaccattamagcactgagcaaaattaaggttgtatggctatcctaatcacttgcaattatttttttttaatctaggcatgacagacaacactaaaaagaaaacctcacatgaagtaaatattgcccatgatatatatattgcacattatattctaaacttctaagattttaaataaatatttcattaattagctttttttagttacttcctaagaaaacctggatgtcgcagtgaaacaaagaagtggaaayacccttcacctaacacacatcagcagaaactatacaacagctgaggatacagtgccc

SEQ ID NO: 72573 - DNA, 443 bp, Chicken  19866894352755_3
caaagaaaattaatttgaaaggaactccagatgttttcttctctaatacaccattamagcactgagcaaaattaaggttgtatggctatcctaatcacttgcaattatttttttttaatctaggcatgacagacaacactaaaaagaaaacctcacatgaagtaaatattgcccatgatatatatattgcacattatattctaaacttctaagattttaaataaatatttcattaattagctttttttagttacttcctaagaaaacctggatgtcgcagtgaaacaaagaagtggaaayacccttcacctaacacacatcagcagaaactatacaacagctgaggatacagtgcccttatttgatctttcaaatgataggagcagatttactaatatcagaaaagagctcaggtccagcttcctcttttctcgtatttccag

SEQ ID NO: 72574 - DNA, 600 bp, Chicken  19866894352756_1
ctgaaatatttcttaatttacaacagcaacttttttacaaaatgaaggatatagctgagcagtcaacaaaactctctaattgcaatctgattcaaatgataaagactgtaaagacattcagaattcttaatgatactcagacattgaatgctgcacactataaaacaaatatgaagaaaggaaatgtctttaagtctttttctgaatttgggtcagtgaatatccatgattactacattttctttgatttttatttttttttcctcagaagctagtgttctgacagcctctatattttcrctaatctgaattagttccacaaacattaagaacttcatcaaaaaggcctatccaaagtgtctgtatggctatttttcttctactaccttagtatcctacttggcctctgctgatagtccagggctctgaacttccatacacctcctattatatgcctgtcctgtatttgactaagatatcttagtgcatctcaaataatacaagttgcctatgtttagactaccaaatgaagtccaaagcttaacttattttgctgaattaatttattcttactaatatatggatggatttaactctcta

SEQ ID NO: 72575 - DNA, 600 bp, Chicken  19866894352757_1
atacagagttggaaatagtgcttcctaaggagatgagctgcactcagagctgtcctgctgtaacatgcttcagaagtatttgctgtgaggaacactgcaaattgttgtgccttgcctacttggccttggcattcaggcttattaaaagcagtaactctgaactgtatcactgctgtggagagggcacacagaaacatccagccaaactggggactgattttggccctctgcctgctcctgaaggatggccggactgagcattgctattactgtggatactctcttagctgcaaagaggtrtcttttcttgaaatccagagatcactgcaaattcagtgtctcttaatgtttccaattgctttcagattcagagtcttgggtggttaatgctgaactgaaaataatgaaactgacgttcttcattgaagaaatgatgctatttgccctcttcttgataytctgtcaggtatgtccagcccctgggtcttgtgtggcctggaccagctcttgatgcctgctgctgccttgcccttgtggcagctcttctccaccaagtggccgagcccaaccttgagcatgtgcccattactcagtaacaac

SEQ ID NO: 72576 - DNA, 546 bp, Chicken  19866894352757_2
gaactgtatcactgctgtggagagggcacacagaaacatccagccaaactggggactgattttggccctctgcctgctcctgaaggatggccggactgagcattgctattactgtggatactctcttagctgcaaagaggtrtcttttcttgaaatccagagatcactgcaaattcagtgtctcttaatgtttccaattgctttcagattcagagtcttgggtggttaatgctgaactgaaaataatgaaactgacgttcttcattgaagaaatgatgctatttgccctcttcttgataytctgtcaggtatgtccagcccctgggtcttgtgtggcctggaccagctcttgatgcctgctgctgccttgcccttgtggcagctcttctccaccaagtggccgagcccaaccttgagcatgtgcccattactcagtaacaaccagaacatctgttattattattaacacttgtctcagctaaaactaggacatggaaaggacacmgtgcaatgcgaattccacctctcatgccttccacacacaca

SEQ ID NO: 72577 - DNA, 341 bp, Chicken  19866894352757_3
agattcagagtcttgggtggttaatgctgaactgaaaataatgaaactgacgttcttcattgaagaaatgatgctatttgccctcttcttgataytctgtcaggtatgtccagcccctgggtcttgtgtggcctggaccagctcttgatgcctgctgctgccttgcccttgtggcagctcttctccaccaagtggccgagcccaaccttgagcatgtgcccattactcagtaacaaccagaacatctgttattattattaacacttgtctcagctaaaactaggacatggaaaggacacmgtgcaatgcgaattccacctctcatgccttccacacacaca

SEQ ID NO: 72578 - DNA, 600 bp, Chicken  19866894352763_1
catttccttgaaaatggcaatacaaacagaggaattgataccttacttgggaaaaaagtagggttatagtactagagctgcagtgaaaccagaatttagggaaatataatgttgtcatacattgccagaataatccttgaaagagaatggaatgcatgacatgaaaggaagtaaaagtattttcttctgagtgctattaattttaatgagtatgattttacacctcagggattttttaagtatacattggtcagtcatattacctgcataataggaattgctaacagatctgctaattartttgagaactcttcattgttctattgcatggttaactamcgagatgttgagtgagaagagttgagttagctttgatttatctgtccttttctgaaaggatttgcagaagaaagcttttggaaactcaaaaatacttgtattttgcctgagaactgatgcagttttataaaattttatttattgtgagatatcatctgtggaattggttcaaaaaaatttgctaatcaaggtgaccaggaaagataaaataatagctttatcagaagccaaaaatcaaaaaaatcttggctgagaatgtgg

SEQ ID NO: 72579 - DNA, 600 bp, Chicken  19866894352763_2
accttacttgggaaaaaagtagggttatagtactagagctgcagtgaaaccagaatttagggaaatataatgttgtcatacattgccagaataatccttgaaagagaatggaatgcatgacatgaaaggaagtaaaagtattttcttctgagtgctattaattttaatgagtatgattttacacctcagggattttttaagtatacattggtcagtcatattacctgcataataggaattgctaacagatctgctaattartttgagaactcttcattgttctattgcatggttaactamcgagatgttgagtgagaagagttgagttagctttgatttatctgtccttttctgaaaggatttgcagaagaaagcttttggaaactcaaaaatacttgtattttgcctgagaactgatgcagttttataaaattttatttattgtgagatatcatctgtggaattggttcaaaaaaatttgctaatcaaggtgaccaggaaagataaaataatagctttatcagaagccaaaaatcaaaaaaatcttggctgagaatgtggatctgaagacaccaatgtgctgaaagatttgtcttacct

SEQ ID NO: 72580 - DNA, 600 bp, Chicken  19866894352769_1
ctgctatccacggtttggtgacgagctcgttctgctcacacagcctcctggaggctcactttgcagatctccattggtgccgagctgatctggctctgtaatgagctctgctcctcacgttgacaatgccttgttctgcgtgctcttctgttcagggtatcagttatgtaaagaagtaataatcttccctgtgctgcttggtttccctcacgagggttacgtggtttgggtaggtagactgtgttgaagtgtttacttggaacgtgtgaacgacttgagacaagtgcgaccttgctgcgygccaggatttctcagtggaaacrctttcacattaaacagcaaagaaagaagagaggtttgtctgagggccaaattgcatgattcatatcattagggtgaagttaggcgcttcgtttttatcatgcctgggagtgagcctgtgcttctcggtgccacacattcagttcttctgtgggatctctcagctggagatgaccacggtgttttgggtgaagcacccatgggaactgcactggagctgtcacagcgtcgtcgtcatcacacagtcatggtatggtggtggctgttgaggacggtaag

SEQ ID NO: 72581 - DNA, 600 bp, Chicken  19866894352769_2
agctcgttctgctcacacagcctcctggaggctcactttgcagatctccattggtgccgagctgatctggctctgtaatgagctctgctcctcacgttgacaatgccttgttctgcgtgctcttctgttcagggtatcagttatgtaaagaagtaataatcttccctgtgctgcttggtttccctcacgagggttacgtggtttgggtaggtagactgtgttgaagtgtttacttggaacgtgtgaacgacttgagacaagtgcgaccttgctgcgygccaggatttctcagtggaaacrctttcacattaaacagcaaagaaagaagagaggtttgtctgagggccaaattgcatgattcatatcattagggtgaagttaggcgcttcgtttttatcatgcctgggagtgagcctgtgcttctcggtgccacacattcagttcttctgtgggatctctcagctggagatgaccacggtgttttgggtgaagcacccatgggaactgcactggagctgtcacagcgtcgtcgtcatcacacagtcatggtatggtggtggctgttgaggacggtaagaaccagaaccaaaatgtgaggtc

SEQ ID NO: 72582 - DNA, 600 bp, Chicken  19866894352770_1
gacgatcttagtgtagtgatatacagcaggagtctgcctgatgctatcggttgtgggcaaatgaatgtaatgggttgttatggtcactcagataccactgcactaggcaaacagaaatcttacaaaaacagtgataaaaggggacgtttctacatttatctgctggatgacatctgcttaaaaacaatttctggaagttaaatgctgcatttctccagcacttcatatggccattccccactattgtgatgcatgcaggctgaatgtatattaaacaagtctcaattctgcaaagaataygcccaacttcagcagcacaggaaatstcttctactcccaaaccaaacctaaactgaacagcagttatgacagagagggagacgcgagatgcacactgggcatgagctgctcactgttttgacccagcagcttgacagtgcactgctgctaacaatgaaaaccagtttagccctgacctggggaagggggaggagagcaatgaaggaaagcaattactccaaggaagagagtgtctgctgcttccatgcaagcccagtcctgcatttctcagcctgattgggctcaggatgatgcagtttc

SEQ ID NO: 72583 - DNA, 600 bp, Chicken  19866894352770_2
caggagtctgcctgatgctatcggttgtgggcaaatgaatgtaatgggttgttatggtcactcagataccactgcactaggcaaacagaaatcttacaaaaacagtgataaaaggggacgtttctacatttatctgctggatgacatctgcttaaaaacaatttctggaagttaaatgctgcatttctccagcacttcatatggccattccccactattgtgatgcatgcaggctgaatgtatattaaacaagtctcaattctgcaaagaataygcccaacttcagcagcacaggaaatstcttctactcccaaaccaaacctaaactgaacagcagttatgacagagagggagacgcgagatgcacactgggcatgagctgctcactgttttgacccagcagcttgacagtgcactgctgctaacaatgaaaaccagtttagccctgacctggggaagggggaggagagcaatgaaggaaagcaattactccaaggaagagagtgtctgctgcttccatgcaagcccagtcctgcatttctcagcctgattgggctcaggatgatgcagtttccaccggcataaagcagacatcgttag

SEQ ID NO: 72584 - DNA, 600 bp, Chicken  19866894352772_1
attgctgcttaatgttcagcctcacaagtttaaatggtgtctccctggaatattctgacatagcccagaggactgaagttactcaagcattttctctaaggaattgtgtgcttccacacacacaatacttaagaatcaccagatgctctaatggctagagctacttgtgttacattaaattgaatttgctaacagagctctaacacctatgtgaaatacccatagcatgagctagtgtttcatctttgtgcagaaaatgcagatcaagctgccaaataatccccactggcagcaaatacwktctcttctttgctcactaagctgattcccatttgtggcaggatctaaaagttactgctcaaaacagtcagtattttacctggcattctccactttgtgtgtatttttcttcattctgcccggcgattcaatcgtcactccaagacttctcagctgtttgagtgtagcattaatcacrctctctttatctaccacttctgtgtcagtccctgaatccctttctgttctatcattgatactctgatactttgcaccatcatcgttaacaaaccctgcttttacaggaaagtgatcttgttc

SEQ ID NO: 72585 - DNA, 600 bp, Chicken  19866894352772_2
ttgctgcttaatgttcagcctcacaagtttaaatggtgtctccctggaatattctgacatagcccagaggactgaagttactcaagcattttctctaaggaattgtgtgcttccacacacacaatacttaagaatcaccagatgctctaatggctagagctacttgtgttacattaaattgaatttgctaacagagctctaacacctatgtgaaatacccatagcatgagctagtgtttcatctttgtgcagaaaatgcagatcaagctgccaaataatccccactggcagcaaatacwktctcttctttgctcactaagctgattcccatttgtggcaggatctaaaagttactgctcaaaacagtcagtattttacctggcattctccactttgtgtgtatttttcttcattctgcccggcgattcaatcgtcactccaagacttctcagctgtttgagtgtagcattaatcacrctctctttatctaccacttctgtgtcagtccctgaatccctttctgttctatcattgatactctgatactttgcaccatcatcgttaacaaaccctgcttttacaggaaagtgatcttgttct

SEQ ID NO: 72586 - DNA, 600 bp, Chicken  19866894352772_3
attgaatttgctaacagagctctaacacctatgtgaaatacccatagcatgagctagtgtttcatctttgtgcagaaaatgcagatcaagctgccaaataatccccactggcagcaaatacwktctcttctttgctcactaagctgattcccatttgtggcaggatctaaaagttactgctcaaaacagtcagtattttacctggcattctccactttgtgtgtatttttcttcattctgcccggcgattcaatcgtcactccaagacttctcagctgtttgagtgtagcattaatcacrctctctttatctaccacttctgtgtcagtccctgaatccctttctgttctatcattgatactctgatactttgcaccatcatcgttaacaaaccctgcttttacaggaaagtgatcttgttcttctgaagactttaacagatggtttacttggccctagagaaaaaaagagagtaggtaagagcccacgctgctaaaaccatgacatgtaggagttgccataaaacaactctgtttttgtttcaagcaattattttgctatgtacaactagctgagctaacaacttagtctgagaaacac

SEQ ID NO: 72587 - DNA, 599 bp, Chicken  19866894352776_1
  misc_feature (1)..(186): n is any nucleotide
nnnnnnnnnnnnnnnnnnnnnnnnnnnnnnnnnnnnnnnnnnnnnnnnnnnnnnnnnnnnnnnnnnnnnnnnnnnnnnnnnnnnnnnnnnnnnnnnnnnnnnnnnnnnnnnnnnnnnnnnnnnnnnnnnnnnnnnnnnnnnnnnnnnnnnnnnnnnnnnnnnnnnnnnnnnnnnnnnnnnnnnnnncttaattgtgatactttcacagtatacctgagtgtagccacggcttgtgactactttgccttttagcgtttaccttgtagaaaaggaagagataggagtagctgtagccctaargcagttaatcagctgatgggaagaggaaatggcttatttagaaaagtaaacagtatgcaaaggtttggcactggagccatcggccagatgatgggtgaggaagaaagactgaagcggttcttatcggtgttttaagatgcatttagtgttttatgagaagcagacttttcggtgctcagctgttgtaaaggaggtgggtggtcggttttgtttttccaataaaacctgcaagctgtcaaagaaacaaagatctctcatgaaaaaaaaatatgctttttactcaatcgtttttgttaaat

SEQ ID NO: 72588 - DNA, 600 bp, Chicken  19866894352776_2
gtttggcactggagccatcggccagatgatgggtgaggaagaaagactgaagcggttcttatcggtgttttaagatgcatttagtgttttatgagaagcagacttttcggtgctcagctgttgtaaaggaggtgggtggtcggttttgtttttccaataaaacctgcaagctgtcaaagaaacaaagatctctcatgaaaaaaaaatatgctttttactcaatcgtttttgttaaataatatttttagcagttcccatctcagctttccaaggctgagaggttcttgcgaagaatgtggygtagatgccayccattttcttcacgacggtctttaatgatgcagaagccacctaggtgcatgcctttgtgtccggagccgtagcgaggaatgagtgctgcccccaggtgctgcatgtcaccgtcgcgtgggtgtattgtggctgtagtggctctgtgagaggggcagagagctacgaacagcagtctgacagtgtggtttggtttcttgaaaaactgccgtattttcagggaaagtaggaaagtcccttcctcgagaaaacacggattgtttcctttaataatgggcctggatattatct

SEQ ID NO: 72589 - DNA, 600 bp, Chicken  19866894352776_3
gagccatcggccagatgatgggtgaggaagaaagactgaagcggttcttatcggtgttttaagatgcatttagtgttttatgagaagcagacttttcggtgctcagctgttgtaaaggaggtgggtggtcggttttgtttttccaataaaacctgcaagctgtcaaagaaacaaagatctctcatgaaaaaaaaatatgctttttactcaatcgtttttgttaaataatatttttagcagttcccatctcagctttccaaggctgagaggttcttgcgaagaatgtggygtagatgccayccattttcttcacgacggtctttaatgatgcagaagccacctaggtgcatgcctttgtgtccggagccgtagcgaggaatgagtgctgcccccaggtgctgcatgtcaccgtcgcgtgggtgtattgtggctgtagtggctctgtgagaggggcagagagctacgaacagcagtctgacagtgtggtttggtttcttgaaaaactgccgtattttcagggaaagtaggaaagtcccttcctcgagaaaacacggattgtttcctttaataatgggcctggatattatctttgtttttgtc

SEQ ID NO: 72590 - DNA, 600 bp, Chicken  19866894352787_1
gcggttcctcctgttcctgttggggatttctcacatttcccatgtgaaaacatgggagcagagtggctgagcctgggcttggtgtgagtggagccagccaggctgtctgcattgggagagctcccaccctgctaaagctgctcctttgccctctgatgggagcagtgtgtttccctggcaggtgtctgttggggtgggggctcagcactgctctgtgctccaggggacccatgccagctcagcacaggcatgctcagtgccacggctgtgccagccacgctctttgctttgtccccagcrtcagaagtgccggtgtgccttgcagacacagatagagccagtgcgtagtggtgcttgattaatgagagttggcatctgccgctgttcatccygtgcccttgaggatgaagcagtgcttgggctgcagtgagcttgggtgctccaggtcacagtgaggctgtgaccaggtgagcagggctgtgggttggctgttcctcctttgggacttgagactttgaaccacaggcagcccgttcagtctgaactcatatggcaaagcatagggaaggggactgggatgtaaacactgcgttcctcctg

SEQ ID NO: 72591 - DNA, 600 bp, Chicken  19866894352787_2
gccagccaggctgtctgcattgggagagctcccaccctgctaaagctgctcctttgccctctgatgggagcagtgtgtttccctggcaggtgtctgttggggtgggggctcagcactgctctgtgctccaggggacccatgccagctcagcacaggcatgctcagtgccacggctgtgccagccacgctctttgctttgtccccagcrtcagaagtgccggtgtgccttgcagacacagatagagccagtgcgtagtggtgcttgattaatgagagttggcatctgccgctgttcatccygtgcccttgaggatgaagcagtgcttgggctgcagtgagcttgggtgctccaggtcacagtgaggctgtgaccaggtgagcagggctgtgggttggctgttcctcctttgggacttgagactttgaaccacaggcagcccgttcagtctgaactcatatggcaaagcatagggaaggggactgggatgtaaacactgcgttcctcctgcagagagagctgggtttgggtttctttccaccctgatttgggctggcagggcaggcactgcacagagcggtgtggggtgcttgtgagcagca

SEQ ID NO: 72592 - DNA, 600 bp, Chicken  19866894352794_1
acgtgaatagtcatggactaggatgtgacaaggagattaaactctcagctatcccagagtgaataaatgaggtccctgaatgtcagtatctggaataacgaggaaagaaataaaacgcagtattgtaaagttttgtgtgttgacaacagtaatgggaataacatatccatttgaaatagaatgcctgagattcaaaattacagtctagatgaactcattgcctacttccaaaattctgttgtaaaacgactgaacagccctatacctttatttggcaatagagatgttccctgtgtgtaytgaagaactcactctaccagatgtgtaaagcagataaaatgcccatttgtaacttaagattactcctatttctgtttctagataaaacaataaaagacatagaagaataatgcattcaatataaacagctaatggttttcttataatgatattttcactgtaattgcatctgcttactgctttctcatagatttgagtgatggacattttggatagatttagacagcaaattttcacatggggaatcatacctaagtactgaatgtcaaaatcttatctgagtttttggaatgtttaggt

SEQ ID NO: 72593 - DNA, 599 bp, Chicken  19866894352801_1
  misc_feature (1)..(14): n is any nucleotide
nnnnnnnnnnnnnncctaaggagtctgaattttccttttaaaagggacatcatttcactttaattattcagtgcaatggttaaggtacagaacttcaaaatcagaattaacattgcatatggatatttatattcctccatacactatagtgacaggaaacatatggaagtcataattatgggattacagaatgaaaattaaaacaaatataaaagaaggtagatgtcaaatcatttcaaagaagtactcacaggaaaattgctgatgatatagatttggtaagactgccctaacttacamtaggtagctagctagcttacrttatgctccaagaaaagtccrggagtctacagaccaggggattaatagtgatagaagacttcattcttattatcttgataccaaataccttgatgtatataaaggtttcagatgtgatcattcaagtttgtctcaatctaaataaagttacagttgcatttgctggctatttggcaccccagtaatcttcccagtttgttgctccaacacacttctggctcttatctctgatattttcctacccctgcagcttttgtttagtctaagtgaagctcgat

SEQ ID NO: 72594 - DNA, 600 bp, Chicken  19866894352801_2
agtctgaattttccttttaaaagggacatcatttcactttaattattcagtgcaatggttaaggtacagaacttcaaaatcagaattaacattgcatatggatatttatattcctccatacactatagtgacaggaaacatatggaagtcataattatgggattacagaatgaaaattaaaacaaatataaaagaaggtagatgtcaaatcatttcaaagaagtactcacaggaaaattgctgatgatatagatttggtaagactgccctaacttacamtaggtagctagctagcttacrttatgctccaagaaaagtccrggagtctacagaccaggggattaatagtgatagaagacttcattcttattatcttgataccaaataccttgatgtatataaaggtttcagatgtgatcattcaagtttgtctcaatctaaataaagttacagttgcatttgctggctatttggcaccccagtaatcttcccagtttgttgctccaacacacttctggctcttatctctgatattttcctacccctgcagcttttgtttagtctaagtgaagctcgattaaccygggagtataagcagsa

SEQ ID NO: 72595 - DNA, 600 bp, Chicken  19866894352801_3
agggacatcatttcactttaattattcagtgcaatggttaaggtacagaacttcaaaatcagaattaacattgcatatggatatttatattcctccatacactatagtgacaggaaacatatggaagtcataattatgggattacagaatgaaaattaaaacaaatataaaagaaggtagatgtcaaatcatttcaaagaagtactcacaggaaaattgctgatgatatagatttggtaagactgccctaacttacamtaggtagctagctagcttacrttatgctccaagaaaagtccrggagtctacagaccaggggattaatagtgatagaagacttcattcttattatcttgataccaaataccttgatgtatataaaggtttcagatgtgatcattcaagtttgtctcaatctaaataaagttacagttgcatttgctggctatttggcaccccagtaatcttcccagtttgttgctccaacacacttctggctcttatctctgatattttcctacccctgcagcttttgtttagtctaagtgaagctcgattaaccygggagtataagcagsagtttaacagcataccttattc

SEQ ID NO: 72596 - DNA, 600 bp, Chicken  19866894352801_4
agctagctagcttacrttatgctccaagaaaagtccrggagtctacagaccaggggattaatagtgatagaagacttcattcttattatcttgataccaaataccttgatgtatataaaggtttcagatgtgatcattcaagtttgtctcaatctaaataaagttacagttgcatttgctggctatttggcaccccagtaatcttcccagtttgttgctccaacacacttctggctcttatctctgatattttcctacccctgcagcttttgtttagtctaagtgaagctcgattaaccygggagtataagcagsagtttaacagcataccttattccatctgtaatgcctatcataatccattttatatattatcttatactacacactataccatggcctactgaaagagtaggtcatcctagttataggtatacactggggaactgaggaaccctgcaagatgtctaaagaatttacagggttgcactaaatgaaccagaaagccatctgggaggagttctatggaaccacagagtgactcaaatgagtagtcaaataaaaaaaataattcattttttaaaaagaaaataaacaaca

SEQ ID NO: 72597 - DNA, 600 bp, Chicken  19866894352801_5
rttatgctccaagaaaagtccrggagtctacagaccaggggattaatagtgatagaagacttcattcttattatcttgataccaaataccttgatgtatataaaggtttcagatgtgatcattcaagtttgtctcaatctaaataaagttacagttgcatttgctggctatttggcaccccagtaatcttcccagtttgttgctccaacacacttctggctcttatctctgatattttcctacccctgcagcttttgtttagtctaagtgaagctcgattaaccygggagtataagcagsagtttaacagcataccttattccatctgtaatgcctatcataatccattttatatattatcttatactacacactataccatggcctactgaaagagtaggtcatcctagttataggtatacactggggaactgaggaaccctgcaagatgtctaaagaatttacagggttgcactaaatgaaccagaaagccatctgggaggagttctatggaaccacagagtgactcaaatgagtagtcaaataaaaaaaataattcattttttaaaaagaaaataaacaacaactgaacaatctaga

SEQ ID NO: 72598 - DNA, 600 bp, Chicken  19866894352803_1
tagaaaatatacagcggataacctcagcctcataaaaagacaaaatgttcttagaaactattttttgcccttgcaggacatcttgcttagtaatgtgtttggtccaatattagaaaacaaagtaaagccattttgtgcaatgtaatcatcttctgagtattcttaaaaaatgctttatgtatagatctccattagctcgtctgctttgcctctaaagaagattgttctcaaaagcaaaattagaagtagtttcaaaattatttcactaaaactcatctcgtgtacaaatagtggaaagcraagtgacaaactgtactgctcaccagaaaagatgtctagactggccccctgcacttgtgartagtttgttggatcctggctttgtccatgtttaaaaaagtcctgcctgtgtcaaaggctttctattagtatagtctgctaaaatagtctgaagtgtttcattcaagctggaaaatgaatttaaacaggaaggactaaggtggaaataaagctgtggtagtaaatatgagtcaatcaaaggaatgctgtgaagactggcaggtccaaagcctacatgacttacatgaggtatttcactat

SEQ ID NO: 72599 - DNA, 600 bp, Chicken  19866894352803_2
tttttgcccttgcaggacatcttgcttagtaatgtgtttggtccaatattagaaaacaaagtaaagccattttgtgcaatgtaatcatcttctgagtattcttaaaaaatgctttatgtatagatctccattagctcgtctgctttgcctctaaagaagattgttctcaaaagcaaaattagaagtagtttcaaaattatttcactaaaactcatctcgtgtacaaatagtggaaagcraagtgacaaactgtactgctcaccagaaaagatgtctagactggccccctgcacttgtgartagtttgttggatcctggctttgtccatgtttaaaaaagtcctgcctgtgtcaaaggctttctattagtatagtctgctaaaatagtctgaagtgtttcattcaagctggaaaatgaatttaaacaggaaggactaaggtggaaataaagctgtggtagtaaatatgagtcaatcaaaggaatgctgtgaagactggcaggtccaaagcctacatgacttacatgaggtatttcactatttctattgacagatgcttgactgaacttgcatctggcaagttctgagagtcaccaaaacaa

SEQ ID NO: 72600 - DNA, 600 bp, Chicken  19866894352808_1
tgcaccttgatgatgggtgaagtctgcgttttaactcctgtcttcagatataatatgtttacacacattctattcattcccattaccgtgaagtaagaagcaaagctcttcccctaaaaactgtggagtgttcatccagctaacagctgaagaattaatttggagaatagttgttcctgatatatcaatatttttctctcatattggtgaactatttactttatatgtgttagcaaaataaaaatgagcttgaattaatctttgccacctgagaactactggttttgaaggttctctacwatatatggaggactatatggacatgttctcaaatctgctgctaatatagttgggcaccacttcacttgcatttcatgaaataatgccaaattattccaacactaattctggtccctgctgccttagttggaagcagtcctaactttaatgctccatatgccaacctaaaattttgggttttttttagggagagaccaaaattggtattgttttactgtatagggtcatttacattccgtaggtctagcagtgaatagcctattaaagaaacttcttctatttttctcatttgtgaattga

SEQ ID NO: 72601 - DNA, 600 bp, Chicken  19866894352809_1
catggccattccctgctcaacagagcccagcaagcccagctccgcagccgggatgctccttgctcacctaccaatgcttccaccaaagaggaggctctgactcctcctgtctgcgctacggccccctagttacacctcagtgcttcaaaaacacctttcccaaaccttctgcacaaaccccttctcgtagtgctgatcccagcagaacagcccctctgccttgcagtcggttctgcctccacctgctaatacttcctcgtctctccttctcctccccaccacaccgctcttcacagcatytaccgtgcctccttcccttaagcttcagggaatccagaaaaaaaaaataaaaataaaataaaatgaaataaaataagccgctatttcaagactgtggatcatttggaagaaatacactgcataaatatacccaattcacaggacaccttagggaaggagctattgggaaacgtgggcttggaataaaggaggctgcaatgtagtttttcataggccacacaggtagtgaggcgtattaaaatatgtaaaatatatatttttccatattttaacagcatggattgaaaacaaaaggttatt

SEQ ID NO: 72602 - DNA, 600 bp, Chicken  19866894352811_1
agggcagctctgctgacgttgtcgtgcgttttctttgttggctcttacgtgcattgtaagcactcttagccgggcagcagatggcccacggcacgttgcacggtgtgtacatgtgtggggcaaagctggtccagggctgcagcacggattaagggatcctggtgtcagtccggggtgggtgctgctgaaccctggtgcgtgtcactcttaatttgcaggctagaggtggtttgttgcattcctttcccaaggtgaggagctgcctttctcaaatgtttcccattgtagacctttgttttygtgctacattagtaggtcgcatacattctgctgcttatttttgctttgctgagtgtttatctattgccatagaagccatgcttttctcagaggggaaaaaaaaaggtaaaagcacttttatgtatacagatgtcccataaactacatattgcatagtgagcatggctggcrggtgctgccctgggacaagcaggcaccagctgcagattccagaagtcggaggaagacttgccatcagactttgccagtcaacaaaggaaactgttctgcacgttgtcatcactgggatgctggggactc

SEQ ID NO: 72603 - DNA, 600 bp, Chicken  19866894352811_2
ggggtgggtgctgctgaaccctggtgcgtgtcactcttaatttgcaggctagaggtggtttgttgcattcctttcccaaggtgaggagctgcctttctcaaatgtttcccattgtagacctttgttttygtgctacattagtaggtcgcatacattctgctgcttatttttgctttgctgagtgtttatctattgccatagaagccatgcttttctcagaggggaaaaaaaaaggtaaaagcacttttatgtatacagatgtcccataaactacatattgcatagtgagcatggctggcrggtgctgccctgggacaagcaggcaccagctgcagattccagaagtcggaggaagacttgccatcagactttgccagtcaacaaaggaaactgttctgcacgttgtcatcactgggatgctggggactcrggactcartgcagcaagctgtggcttatttttcactaaactgagtcattagttcagaactcatggctacgtgattgcagtaatattttccattctgttcatttgaattctttctctccctgctattcckaatccaaaaaacatcactgtgcttaaaatgagctggttctt

SEQ ID NO: 72604 - DNA, 600 bp, Chicken  19866894352811_3
tgctacattagtaggtcgcatacattctgctgcttatttttgctttgctgagtgtttatctattgccatagaagccatgcttttctcagaggggaaaaaaaaaggtaaaagcacttttatgtatacagatgtcccataaactacatattgcatagtgagcatggctggcrggtgctgccctgggacaagcaggcaccagctgcagattccagaagtcggaggaagacttgccatcagactttgccagtcaacaaaggaaactgttctgcacgttgtcatcactgggatgctggggactcrggactcartgcagcaagctgtggcttatttttcactaaactgagtcattagttcagaactcatggctacgtgattgcagtaatattttccattctgttcatttgaattctttctctccctgctattcckaatccaaaaaacatcactgtgcttaaaatgagctggttcttaaaagctcatctcttccaaatggttcgttcaacatccctcaaacaccrcactgcaccattgtgaacctcagcaaaaaacctaccyaagtagagaataggaataaagctcaggtggttctgtagctctgca

SEQ ID NO: 72605 - DNA, 600 bp, Chicken  19866894352811_4
tagtaggtcgcatacattctgctgcttatttttgctttgctgagtgtttatctattgccatagaagccatgcttttctcagaggggaaaaaaaaaggtaaaagcacttttatgtatacagatgtcccataaactacatattgcatagtgagcatggctggcrggtgctgccctgggacaagcaggcaccagctgcagattccagaagtcggaggaagacttgccatcagactttgccagtcaacaaaggaaactgttctgcacgttgtcatcactgggatgctggggactcrggactcartgcagcaagctgtggcttatttttcactaaactgagtcattagttcagaactcatggctacgtgattgcagtaatattttccattctgttcatttgaattctttctctccctgctattcckaatccaaaaaacatcactgtgcttaaaatgagctggttcttaaaagctcatctcttccaaatggttcgttcaacatccctcaaacaccrcactgcaccattgtgaacctcagcaaaaaacctaccyaagtagagaataggaataaagctcaggtggttctgtagctctgcatttagctg

SEQ ID NO: 72606 - DNA, 600 bp, Chicken  19866894352811_5
tgtcccataaactacatattgcatagtgagcatggctggcrggtgctgccctgggacaagcaggcaccagctgcagattccagaagtcggaggaagacttgccatcagactttgccagtcaacaaaggaaactgttctgcacgttgtcatcactgggatgctggggactcrggactcartgcagcaagctgtggcttatttttcactaaactgagtcattagttcagaactcatggctacgtgattgcagtaatattttccattctgttcatttgaattctttctctccctgctattcckaatccaaaaaacatcactgtgcttaaaatgagctggttcttaaaagctcatctcttccaaatggttcgttcaacatccctcaaacaccrcactgcaccattgtgaacctcagcaaaaaacctaccyaagtagagaataggaataaagctcaggtggttctgtagctctgcatttagctggggaaaggggagtgtggtggagggtgggcctgctgagtgggagcaaggggaggcaagcaatggggtatgcacagaggtgtcagcaggggtgggattggaggaagaaagtgctgaagatacc

SEQ ID NO: 72607 - DNA, 537 bp, Chicken  19866894352811_6
gaggaagacttgccatcagactttgccagtcaacaaaggaaactgttctgcacgttgtcatcactgggatgctggggactcrggactcartgcagcaagctgtggcttatttttcactaaactgagtcattagttcagaactcatggctacgtgattgcagtaatattttccattctgttcatttgaattctttctctccctgctattcckaatccaaaaaacatcactgtgcttaaaatgagctggttcttaaaagctcatctcttccaaatggttcgttcaacatccctcaaacaccrcactgcaccattgtgaacctcagcaaaaaacctaccyaagtagagaataggaataaagctcaggtggttctgtagctctgcatttagctggggaaaggggagtgtggtggagggtgggcctgctgagtgggagcaaggggaggcaagcaatggggtatgcacagaggtgtcagcaggggtgggattggaggaagaaagtgctgaagatacccgctgaatgttgtaatcttggttggg

SEQ ID NO: 72608 - DNA, 500 bp, Chicken  19866894352811_7
ggaaactgttctgcacgttgtcatcactgggatgctggggactcrggactcartgcagcaagctgtggcttatttttcactaaactgagtcattagttcagaactcatggctacgtgattgcagtaatattttccattctgttcatttgaattctttctctccctgctattcckaatccaaaaaacatcactgtgcttaaaatgagctggttcttaaaagctcatctcttccaaatggttcgttcaacatccctcaaacaccrcactgcaccattgtgaacctcagcaaaaaacctaccyaagtagagaataggaataaagctcaggtggttctgtagctctgcatttagctggggaaaggggagtgtggtggagggtgggcctgctgagtgggagcaaggggaggcaagcaatggggtatgcacagaggtgtcagcaggggtgggattggaggaagaaagtgctgaagatacccgctgaatgttgtaatcttggttggg

SEQ ID NO: 72609 - DNA, 599 bp, Chicken  19866894352812_1
  misc_feature (1)..(207): n is any nucleotide
nnnnnnnnnnnnnnnnnnnnnnnnnnnnnnnnnnnnnnnnnnnnnnnnnnnnnnnnnnnnnnnnnnnnnnnnnnnnnnnnnnnnnnnnnnnnnnnnnnnnnnnnnnnnnnnnnnnnnnnnnnnnnnnnnnnnnnnnnnnnnnnnnnnnnnnnnnnnnnnnnnnnnnnnnnnnnnnnnnnnnnnnnnnnnnnnnnnnnnnnnnnnnnnagtagttacaaagctatcactcaggaatgttatgggatttttcccctactgagcctctgacaccagtccaaagcctcagctgaagcttttctyttttaaaagctatgaaagagccagctgttagctaaaagcctcacacagcaaaaaggagtcaaacatttttatcatttttatcaaaaggatcaacacacctgtagaaagacctagggatgctttcacaggcaatttgttctagtttgtaaacttgctattagtgactgcctccagctcgtccctttccatgctgttgccatgtcctcttctgacagtcatgttgccattcctcagctctgggagtggctcctttgtaggttttctcttctccctcctgtttgaatacagaactcaccatt

SEQ ID NO: 72610 - DNA, 494 bp, Chicken  19866894352812_2
cctcagctctgggagtggctcctttgtaggttttctcttctccctcctgtttgaatacagaactcaccatttctaggtttcccctcgtgctccttggctttgcctactacatgagttgttccactataagagacaccaccagtgggatttaatactgaggcaaggtgtctgttaacttctgtaatagtaataatagcaataacaacaacagtttaggagtattactcctgcatgtctgtacctgccagtctatgactagatgctgaattaaacctcagtctatttgcagaactccctcaytgygcctctgtaacctttcttccttacaggtctgcactgtttatgaaaacaactyatcatctagtatcccatgtgaattcacagacaaagtgttgcctggttttgagtaaacacctgtgcagctgtaactcaaacgtattcttgtgtttgctatgctgaaaaatgcataagattttcctgcaagttcacccctg

SEQ ID NO: 72611 - DNA, 491 bp, Chicken  19866894352812_3
cagctctgggagtggctcctttgtaggttttctcttctccctcctgtttgaatacagaactcaccatttctaggtttcccctcgtgctccttggctttgcctactacatgagttgttccactataagagacaccaccagtgggatttaatactgaggcaaggtgtctgttaacttctgtaatagtaataatagcaataacaacaacagtttaggagtattactcctgcatgtctgtacctgccagtctatgactagatgctgaattaaacctcagtctatttgcagaactccctcaytgygcctctgtaacctttcttccttacaggtctgcactgtttatgaaaacaactyatcatctagtatcccatgtgaattcacagacaaagtgttgcctggttttgagtaaacacctgtgcagctgtaactcaaacgtattcttgtgtttgctatgctgaaaaatgcataagattttcctgcaagttcacccctg

SEQ ID NO: 72612 - DNA, 439 bp, Chicken  19866894352812_4
tacagaactcaccatttctaggtttcccctcgtgctccttggctttgcctactacatgagttgttccactataagagacaccaccagtgggatttaatactgaggcaaggtgtctgttaacttctgtaatagtaataatagcaataacaacaacagtttaggagtattactcctgcatgtctgtacctgccagtctatgactagatgctgaattaaacctcagtctatttgcagaactccctcaytgygcctctgtaacctttcttccttacaggtctgcactgtttatgaaaacaactyatcatctagtatcccatgtgaattcacagacaaagtgttgcctggttttgagtaaacacctgtgcagctgtaactcaaacgtattcttgtgtttgctatgctgaaaaatgcataagattttcctgcaagttcacccctg

SEQ ID NO: 72613 - DNA, 600 bp, Chicken  19866894352813_1
ctgtcctgccatggctgagcagccacagtgtgcctcttccagctgccagaataacatttaaaagcaaagtcaaaataggcaataggattcccttctccctgggcacagctgctgtgggactgctattgcttcctgccagggctctgggccacactataccctgctgagcatgcaaatcccagctccttgctgtcagctgctccctcacggagaccataccagccctgtgagtcaggagcagcaggggttcctcacagcacgtgttattcctttgctgaatgagctgcgtcagctctggcrtcccagtgccaagctggcacccttgcagcatgtagtccagggaagaacacaggtccttggacttccctactgcaaaatgcacttgcaactaacccttctgctgttatacaaagaacagcagaaaaayggctccaagtgtctagccttgattgcctggtacctcgggaaaaacagaagaaaagtcaggcttccaagaacaacagcccaacctgtgcagggtagcacactagcaatcagccccaccattcctgaagccycccagatgccactctcctttccttctcaaactggttctcttcc

SEQ ID NO: 72614 - DNA, 589 bp, Chicken  19866894352813_2
gcttcctgccagggctctgggccacactataccctgctgagcatgcaaatcccagctccttgctgtcagctgctccctcacggagaccataccagccctgtgagtcaggagcagcaggggttcctcacagcacgtgttattcctttgctgaatgagctgcgtcagctctggcrtcccagtgccaagctggcacccttgcagcatgtagtccagggaagaacacaggtccttggacttccctactgcaaaatgcacttgcaactaacccttctgctgttatacaaagaacagcagaaaaayggctccaagtgtctagccttgattgcctggtacctcgggaaaaacagaagaaaagtcaggcttccaagaacaacagcccaacctgtgcagggtagcacactagcaatcagccccaccattcctgaagccycccagatgccactctcctttccttctcaaactggttctcttcctacttttgtgaaaaagcagatctgaaaaaccttgattttcccagcagggttcagaagacattgcttggtatcgtcaatgcagcgagggagagtttggcaggggaacaaacacagcc

SEQ ID NO: 72615 - DNA, 459 bp, Chicken  19866894352813_3
cacgtgttattcctttgctgaatgagctgcgtcagctctggcrtcccagtgccaagctggcacccttgcagcatgtagtccagggaagaacacaggtccttggacttccctactgcaaaatgcacttgcaactaacccttctgctgttatacaaagaacagcagaaaaayggctccaagtgtctagccttgattgcctggtacctcgggaaaaacagaagaaaagtcaggcttccaagaacaacagcccaacctgtgcagggtagcacactagcaatcagccccaccattcctgaagccycccagatgccactctcctttccttctcaaactggttctcttcctacttttgtgaaaaagcagatctgaaaaaccttgattttcccagcagggttcagaagacattgcttggtatcgtcaatgcagcgagggagagtttggcaggggaacaaacacagcc

SEQ ID NO: 72616 - DNA, 600 bp, Chicken  19866894352817_1
atttcagtatttgaatatggaaagatatccatgcttatgtctatcagcaatattgctaaggctaccttacatttaccaaccagaatactttcttacaattatctgtctgtataataattgatcagttgtaaatgtgaagctgcagcacccagttgattttattatgcaaaaatttatgttactgtctcttctcaaatgaagcagttttcgtttaatcccttctcaaagtgcaacttcaatttagttcattttcaaccatgtggttagcagtggtccattttgaacaaggtggaatctttraatgtggggaaccaggtagaatctgaaattgcttggccttgaggacctattatctgttaccatttattagaacaagtgtaacaagatttactgtatcacctgaagctactcaagcacgggaagtctaatgtaacctcaaaagtaaaaaaaaaagaattattgcacwtgcacagaataattatataacggaaaatatttaatactctctgggaatcttggatagaaatatatgaatattactgagaatctaaaaggagattaaggtagtacaatctcaggcagaaaagacactaatgcctt

SEQ ID NO: 72617 - DNA, 600 bp, Chicken  19866894352817_2
caaaaatttatgttactgtctcttctcaaatgaagcagttttcgtttaatcccttctcaaagtgcaacttcaatttagttcattttcaaccatgtggttagcagtggtccattttgaacaaggtggaatctttraatgtggggaaccaggtagaatctgaaattgcttggccttgaggacctattatctgttaccatttattagaacaagtgtaacaagatttactgtatcacctgaagctactcaagcacgggaagtctaatgtaacctcaaaagtaaaaaaaaaagaattattgcacwtgcacagaataattatataacggaaaatatttaatactctctgggaatcttggatagaaatatatgaatattactgagaatctaaaaggagattaaggtagtacaatctcaggcagaaaagacactaatgccttatggaggtaattgatatttcaaaatattttttagttctgttaggagaaatagccctcatacttttcaattatctgtgaaagactatagaattctggccatgggcatctccatagttaactgttgagcagaccaccctaaactctgacttgaggcaggaccctgaga

SEQ ID NO: 72618 - DNA, 600 bp, Chicken  19866894352820_1
tcagctgaacatagcaggtggaaaagtctggttaagcaacaattctgagactctgaatcacactgttagtgaaaacaaaaaagaaaacctcatgttggaaggaaaaaagagcatcttatcccatagaacagaagaaattgtccttctgttcagtgtatacacacacagattcagcaccaaactgccaccagccctcaggcactgctacccaaagtggaattattccactttgaacagagcagtgacagagttgtttgtccagggacaaagatgatgcctggcccatccttacagtcctgrtcagggcattgtggattgggtgaggccagcacagctgccagcttggcggctccctatcctagagtgttgatagggaagataggcctatttgaaraccatttagagcatctatgttacccctgaaratatgtcccgagggagactcctttccttgactatgaaggtgactgtgctgatcaggaggccagataagcatacttgcagcataagtttttatgatctcccaagtgttctgtctcatgtgtgctgcactccacccattgcaagctgtcattgcccgtgtcaaggcagattttgggg

SEQ ID NO: 72619 - DNA, 600 bp, Chicken  19866894352820_2
ttggaaggaaaaaagagcatcttatcccatagaacagaagaaattgtccttctgttcagtgtatacacacacagattcagcaccaaactgccaccagccctcaggcactgctacccaaagtggaattattccactttgaacagagcagtgacagagttgtttgtccagggacaaagatgatgcctggcccatccttacagtcctgrtcagggcattgtggattgggtgaggccagcacagctgccagcttggcggctccctatcctagagtgttgatagggaagataggcctatttgaaraccatttagagcatctatgttacccctgaaratatgtcccgagggagactcctttccttgactatgaaggtgactgtgctgatcaggaggccagataagcatacttgcagcataagtttttatgatctcccaagtgttctgtctcatgtgtgctgcactccacccattgcaagctgtcattgcccgtgtcaaggcagattttgggggtgagctgctgcatttactttgctccagccaaaaaatacccaacaattttagccatatgacagctgtctcctgttttgcttacacagcttgccc

SEQ ID NO: 72620 - DNA, 600 bp, Chicken  19866894352820_3
gaacagaagaaattgtccttctgttcagtgtatacacacacagattcagcaccaaactgccaccagccctcaggcactgctacccaaagtggaattattccactttgaacagagcagtgacagagttgtttgtccagggacaaagatgatgcctggcccatccttacagtcctgrtcagggcattgtggattgggtgaggccagcacagctgccagcttggcggctccctatcctagagtgttgatagggaagataggcctatttgaaraccatttagagcatctatgttacccctgaaratatgtcccgagggagactcctttccttgactatgaaggtgactgtgctgatcaggaggccagataagcatacttgcagcataagtttttatgatctcccaagtgttctgtctcatgtgtgctgcactccacccattgcaagctgtcattgcccgtgtcaaggcagattttgggggtgagctgctgcatttactttgctccagccaaaaaatacccaacaattttagccatatgacagctgtctcctgttttgcttacacagcttgcccaggaaggcctcctgctacacctttcaaccca

SEQ ID NO: 72621 - DNA, 599 bp, Chicken  19866894352826_1
  misc_feature (1)..(62): n is any nucleotide
nnnnnnnnnnnnnnnnnnnnnnnnnnnnnnnnnnnnnnnnnnnnnnnnnnnnnnnnnnnnnngctagataaacaaagtgtcctttgcctctcctcatatgatatgccttccaatgcttctacccgctttcttgtcctcctcttaatatccttttaatattacatatttacattgttcttcatctatttcacaaccaggatattcaaggaaacaaagcatttaggtaaatcaggtacttccagacttccacatcgtggcttgagaacagttatcgtggaacaatcacccctggtaggacargcaagtacacactccctacacatggctggggaacagtaaatsgggtagatatcatgcatttcttcaattcatgcttgcccttgttatactggttcaagctgtactttgtccttgccttgaaacctccatcacacaaattctttagcagagatatttgatgtttgcagaagatwatttacaaactcaaaacagccagaactgattgtagaagtgagagtttttgtttgtttgyttgtttgcttgtttttgcctttatatttttaaatagcattcttgggggggaagaaaatcaaacctat

SEQ ID NO: 72622 - DNA, 599 bp, Chicken  19866894352826_2
  misc_feature (1)..(20): n is any nucleotide
nnnnnnnnnnnnnnnnnnnngctagataaacaaagtgtcctttgcctctcctcatatgatatgccttccaatgcttctacccgctttcttgtcctcctcttaatatccttttaatattacatatttacattgttcttcatctatttcacaaccaggatattcaaggaaacaaagcatttaggtaaatcaggtacttccagacttccacatcgtggcttgagaacagttatcgtggaacaatcacccctggtaggacargcaagtacacactccctacacatggctggggaacagtaaatsgggtagatatcatgcatttcttcaattcatgcttgcccttgttatactggttcaagctgtactttgtccttgccttgaaacctccatcacacaaattctttagcagagatatttgatgtttgcagaagatwatttacaaactcaaaacagccagaactgattgtagaagtgagagtttttgtttgtttgyttgtttgcttgtttttgcctttatatttttaaatagcattcttgggggggaagaaaatcaaacctatcaataacctgcagtagcattgcactgctcagactgaggacaa

SEQ ID NO: 72623 - DNA, 600 bp, Chicken  19866894352826_3
gttcttcatctatttcacaaccaggatattcaaggaaacaaagcatttaggtaaatcaggtacttccagacttccacatcgtggcttgagaacagttatcgtggaacaatcacccctggtaggacargcaagtacacactccctacacatggctggggaacagtaaatsgggtagatatcatgcatttcttcaattcatgcttgcccttgttatactggttcaagctgtactttgtccttgccttgaaacctccatcacacaaattctttagcagagatatttgatgtttgcagaagatwatttacaaactcaaaacagccagaactgattgtagaagtgagagtttttgtttgtttgyttgtttgcttgtttttgcctttatatttttaaatagcattcttgggggggaagaaaatcaaacctatcaataacctgcagtagcattgcactgctcagactgaggacaataccgccacatacctacccctcccatatctgaaatccagtcctgtcttataagaagaaaaccctaagcagtgcctcagaagattttctgcaacagctcactcccagtggtttccgttcatgctattcaattt

SEQ ID NO: 72624 - DNA, 586 bp, Chicken  19866894352826_4
gtacttccagacttccacatcgtggcttgagaacagttatcgtggaacaatcacccctggtaggacargcaagtacacactccctacacatggctggggaacagtaaatsgggtagatatcatgcatttcttcaattcatgcttgcccttgttatactggttcaagctgtactttgtccttgccttgaaacctccatcacacaaattctttagcagagatatttgatgtttgcagaagatwatttacaaactcaaaacagccagaactgattgtagaagtgagagtttttgtttgtttgyttgtttgcttgtttttgcctttatatttttaaatagcattcttgggggggaagaaaatcaaacctatcaataacctgcagtagcattgcactgctcagactgaggacaataccgccacatacctacccctcccatatctgaaatccagtcctgtcttataagaagaaaaccctaagcagtgcctcagaagattttctgcaacagctcactcccagtggtttccgttcatgctattcaattttctttgctataagtatctgctaggccagaaaaatacttactttga

SEQ ID NO: 72625 - DNA, 567 bp, Chicken  19866894352829_1
  misc_feature (1)..(53): n is any nucleotide
nnnnnnnnnnnnnnnnnnnnnnnnnnnnnnnnnnnnnnnnnnnnnnnnnnnnncaagcaggttagcacaggtactgagggaagtaagatgcactaaaatacttctataaggaagcaaggtacacctggaccatcaaagcaacaggtctcctgcctaaaactgcaaattccttgtaagggtcatacattgaccccccattccttcataggatggctaagttggaagggaccttaaagcccatccagttccaatcccctgctgtgggcagggcagccacccactagatcaagctgcccaggrtcccattccatctgaccctgaggatgcctggttccgaagggcatagtgcctcacaattagatgtctccatgcagaagtatctaaaggaccacatataggatcactgtgatctctgccttctgccagcccacgtttcccttttcgtggtcccatgggagagtgaggtgatccagatgtcaggatgtagcccagataccctcagactcatggaaagcagaagtttccaaactacaaaccacaaagcatttccctttcaacagaagaata

SEQ ID NO: 72626 - DNA, 600 bp, Chicken  19866894352830_1
ctctggcactgtctcctgctaataaactttcatctgttttcagttaacacctgaaggatattttcctctgtttcctttgcttgaacttagaataactgagaacctgggggatataagaaataattcagcaagtgcgtaaaatgcaatagaattctttactttataaaatacggtacagatgggatacacatagtacgttataatgtgagggttttattgctgttactttagacagaccttagatatctctccttagtgactttgcctactgcaatttttatgccatctgaggccaaggaragccttacgtggaactaccacagtacttggcacaggtagagatagctgctcagtcactggagaaagtttctttagtcaggattgcatgctggggactagaaatctgcaagagtgaagctgttcagatatttaagtgccagttactgagagctaaaatataaacagtaagaggttcttgacttgtctctctctgggagcataagatagagtggcatttctccaccrtattcaaagagttacaggtaagtcattcacttttatatacagtactgcaacttgaggaaggctgaaataagtcat

SEQ ID NO: 72627 - DNA, 600 bp, Chicken  19866894352830_2
ctttagacagaccttagatatctctccttagtgactttgcctactgcaatttttatgccatctgaggccaaggaragccttacgtggaactaccacagtacttggcacaggtagagatagctgctcagtcactggagaaagtttctttagtcaggattgcatgctggggactagaaatctgcaagagtgaagctgttcagatatttaagtgccagttactgagagctaaaatataaacagtaagaggttcttgacttgtctctctctgggagcataagatagagtggcatttctccaccrtattcaaagagttacaggtaagtcattcacttttatatacagtactgcaacttgaggaaggctgaaataagtcatgcagtcctactgattaaattctgcatatgaattttggtgtaaatgtgtgtgttcttctaggagagaagcgtgtctacctttcactgcctagaccaggggtaagttgctcttgagactgttctatttacattatatgctgttaactagcaatacctcggtaacactttgacttggtggctaaataaaaacacatggaaagctgaagtaactaatcacacagacttt

SEQ ID NO: 72628 - DNA, 529 bp, Chicken  19866894352832_1
ctacagggctgctgatgtttggagctggggctgacaggtgtgttgggaggaggccgaggcctatgcagcccagctgggcaaatcatggaatgacagagtggcttaggttggaggaggggatcttaaagatcatccatttccaagcttctgctgtgggcagtgctgctgcccactggatcaggctgcccagtgccccatccaagctggctttgagtgcctccagggatggggtacccacagcttcttgggaaacgtgttccagtgcctcaccaccctctgagtaaagaaattcttcataamgtctaacttaaatctctcctcttttgatttaaagctgtttccccttgtcctgtcactgtgagaccatgtaaaatggttccactcctgcatgtgagctacttgcaagtactggcaggctgcagtgaggtctccctgtttctgtgtgctgtttgcctgggttttggtgggcagaagaaggaagggaaaccttgcyggcagtttgctgctctgtgttcgtctcttgcatggc

SEQ ID NO: 72629 - DNA, 336 bp, Chicken  19866894352832_2
cccatccaagctggctttgagtgcctccagggatggggtacccacagcttcttgggaaacgtgttccagtgcctcaccaccctctgagtaaagaaattcttcataamgtctaacttaaatctctcctcttttgatttaaagctgtttccccttgtcctgtcactgtgagaccatgtaaaatggttccactcctgcatgtgagctacttgcaagtactggcaggctgcagtgaggtctccctgtttctgtgtgctgtttgcctgggttttggtgggcagaagaaggaagggaaaccttgcyggcagtttgctgctctgtgttcgtctcttgcatggc

SEQ ID NO: 72630 - DNA, 600 bp, Chicken  19866894352835_1
gtaaacaaaagttacatattttgaacctggaggctgcagttctacttagctaataaaagcctaaaataggctatcacattgcatactgagattatccatcacgagactgagaacacctgacccagaagtaaagctcttacagaactgtaagactgcttctggaaagggcatacaggtggttaaagcagggagcagagaataataaaacaggcttttgttctgtatttcttctgaatcaacaaggatatgctcacacacaggcagcccatcagtcagcagggacggacccgtgagcaggarcagtgagagtttgcactggggatgtgcaaacaaacataggcgtaaacctacagctgaaatcccttcttcctcacaaggtgaattagggatggttccactaaagctaatggagctaacccagtgtgaggctttatgagcgagagcagcgtcagctctgatgagtgcagggctcactcccgggagtacgtatgaggtggtgaagagatgaagtgtttgatagcagcccggctcctctctcacctgcagccggagcaggagcagcactgcatgagcaagcactgctctcagttctctcacgga

SEQ ID NO: 72631 - DNA, 600 bp, Chicken  19866894352835_2
atcataatagcataagttcatcatagttggttgcttttgtctgctgccatgttctcaatgttcactaacagcaagacctactggagcataataagcaccaacaactccttgtcttccactaaagtccagagagcatattgaataaatagggtgaaccttcaccaggtttccttataccaaatgttacaaactgtaccacaaaaagtcaatctgggtaggtgagatctgccactgagataacctcgcactgcggtctttgaaggaagttgggcagttgacccccacgagagtttaatttcrgattacagattgcagtgctcggggaaccccggggagaccctgsaggactgtgatctcatggtcccggagagtgagagtctacatttacacctatgctctgcagtgaaagttttctcctcgctcattttgcagttatagcgcctgtgaattcattgctgctctctgtcctatgccactgacaccgtgccagtgtctggattgttgtggccatcgtgttttagaattattgctaattcatactaaaaattgcaactttttgtgctttccatccacaacgggcaacctgaaacacctcccagt

SEQ ID NO: 72632 - DNA, 600 bp, Chicken  19866894352835_3
ctgccatgttctcaatgttcactaacagcaagacctactggagcataataagcaccaacaactccttgtcttccactaaagtccagagagcatattgaataaatagggtgaaccttcaccaggtttccttataccaaatgttacaaactgtaccacaaaaagtcaatctgggtaggtgagatctgccactgagataacctcgcactgcggtctttgaaggaagttgggcagttgacccccacgagagtttaatttcrgattacagattgcagtgctcggggaaccccggggagaccctgsaggactgtgatctcatggtcccggagagtgagagtctacatttacacctatgctctgcagtgaaagttttctcctcgctcattttgcagttatagcgcctgtgaattcattgctgctctctgtcctatgccactgacaccgtgccagtgtctggattgttgtggccatcgtgttttagaattattgctaattcatactaaaaattgcaactttttgtgctttccatccacaacgggcaacctgaaacacctcccagtgccgtgattgacgacgggtacagcaaacagatgtcagaaaaga

SEQ ID NO: 72633 - DNA, 600 bp, Chicken  19866894352855_1
cttatacaagagagaaaaagaattgtactagatatccgaaagagtacaacgtacctatgtaacaacatttctgtctgttttgcaaaaataactagtcaagtgtcaaagaagctacaacatacacctaaaacatgacttcgtacaaagaagaggcgagtgtacagagtcttacaaaggtacctataccagtaataattttcctctcctcttgcctttcagagcagttaaattactgttaagatgaactgaaacttagccttattattctattttcagcacctctttcatctggctggtcartacaaggacaatatgtaaaacagcccaagctctgagtttaacaccagccactcttcacaagccccaaagatgccatcactctaatgagcaattgctttatttgctcgtctcaaacgccctgctccctagcarctgaagacctgcacaccatcttcatcactgaggcccacagacacatcctcttctacctcctcatcaagctgaaggcttccaaaggagtacttatttcttggcataggagaggaactcagcacaacgggatttccaaacaccagggggtgagtgaaggggttaatgatt

SEQ ID NO: 72634 - DNA, 600 bp, Chicken  19866894352855_2
tgacttcgtacaaagaagaggcgagtgtacagagtcttacaaaggtacctataccagtaataattttcctctcctcttgcctttcagagcagttaaattactgttaagatgaactgaaacttagccttattattctattttcagcacctctttcatctggctggtcartacaaggacaatatgtaaaacagcccaagctctgagtttaacaccagccactcttcacaagccccaaagatgccatcactctaatgagcaattgctttatttgctcgtctcaaacgccctgctccctagcarctgaagacctgcacaccatcttcatcactgaggcccacagacacatcctcttctacctcctcatcaagctgaaggcttccaaaggagtacttatttcttggcataggagaggaactcagcacaacgggatttccaaacaccagggggtgagtgaaggggttaatgatttccgagtcagaatcgctagattctgtcccactgctggtggagccctccatcacctggattgcagccatatgatccatcacgccactggcatgcagtgactgtatgactgggctctgctttcgattgcccccc

SEQ ID NO: 72635 - DNA, 599 bp, Chicken  19866894352857_1
  misc_feature (1)..(221): n is any nucleotide
nnnnnnnnnnnnnnnnnnnnnnnnnnnnnnnnnnnnnnnnnnnnnnnnnnnnnnnnnnnnnnnnnnnnnnnnnnnnnnnnnnnnnnnnnnnnnnnnnnnnnnnnnnnnnnnnnnnnnnnnnnnnnnnnnnnnnnnnnnnnnnnnnnnnnnnnnnnnnnnnnnnnnnnnnnnnnnnnnnnnnnnnnnnnnnnnnnnnnnnnnnnnnnnnnnnnnnnnnnnnnctctttctcttcttcctctctcggtgtgtgccggccgctctcccccgccgtggcggtgtatatcacaccgggatggctygagggctgtgctgacaagccaaactgtcagcaaattttacagcttcatctccaatcctgggcgagcgggggatgcgggaagcctttgcggcgtgtggaggtcaaacctaatgggattttcatctgcgcctcccccagagccgtgggggaaaaaargaaaggaaaaaaggcagtgccattttcggaggaatcttgccatgatggggaatgcaggcggtggtggaagggttgtactgccttggtgtgcacggtgtgagtggggcatgcggtccccgtatcagctgtagggtatgggagggc

SEQ ID NO: 72636 - DNA, 599 bp, Chicken  19866894352857_2
  misc_feature (1)..(66): n is any nucleotide
nnnnnnnnnnnnnnnnnnnnnnnnnnnnnnnnnnnnnnnnnnnnnnnnnnnnnnnnnnnnnnnnnnctctttctcttcttcctctctcggtgtgtgccggccgctctcccccgccgtggcggtgtatatcacaccgggatggctygagggctgtgctgacaagccaaactgtcagcaaattttacagcttcatctccaatcctgggcgagcgggggatgcgggaagcctttgcggcgtgtggaggtcaaacctaatgggattttcatctgcgcctcccccagagccgtgggggaaaaaargaaaggaaaaaaggcagtgccattttcggaggaatcttgccatgatggggaatgcaggcggtggtggaagggttgtactgccttggtgtgcacggtgtgagtggggcatgcggtccccgtatcagctgtagggtatgggagggcggcgatgctgctcccatccacttttgggagctggggtgctctacgtgtgygttggcactgggttggtgacccttctgctcttcttttgcaggtgtaccgtggatgacagggtgacgcgggtagcgtggttgaaccgcagcaccatcctttatgct

SEQ ID NO: 72637 - DNA, 600 bp, Chicken  19866894352857_3
tccaatcctgggcgagcgggggatgcgggaagcctttgcggcgtgtggaggtcaaacctaatgggattttcatctgcgcctcccccagagccgtgggggaaaaaargaaaggaaaaaaggcagtgccattttcggaggaatcttgccatgatggggaatgcaggcggtggtggaagggttgtactgccttggtgtgcacggtgtgagtggggcatgcggtccccgtatcagctgtagggtatgggagggcggcgatgctgctcccatccacttttgggagctggggtgctctacgtgtgygttggcactgggttggtgacccttctgctcttcttttgcaggtgtaccgtggatgacagggtgacgcgggtagcgtggttgaaccgcagcaccatcctttatgctggcaatgacaagtggtctatagacaaccgcgtggtcatcctctccaacaccaaaacccagtacagcatcaagatccacaacgtggatgtgtacgatgaggggccctacacctgctctgtgcagacagacaatcaccccaaaacatcgcgcgtccacctcatcgtgcaaggtgagtccgaacgttcacggtgctgg

SEQ ID NO: 72638 - DNA, 600 bp, Chicken  19866894352858_1
aagctgactggttcgttttatcacggagtcagggaacgttagcagctaataataaaggaagtacaaaatgtgagatcttgtttcactctatgaacaaaagcttgtgatttcaggatggaaagaaaagaatattgcttgacatcataatgtaactttaaataataataaaaagctttaaaccatcagattatccgttttaacaggatttgaattagtgtctcattggggtcattacttaaattgagattctttcttcagcaatgtcatgcgttctgaagggaaggaggctgtaagtagagraaattctcatttgagaaactagacagtcgtgaaatgctcacaaaatcatatttactwttttctaacattactttgagccttcattacccatcttgtggcaatgcaaatagatggggtacaacctaaacccttctttcatggcttacaatttctcttgtcatcacagcccacttatagaagaaaacaaacttwgaatttaaaatttagagattaatttagaagagacaaaaatatcaacaacttgccgtaaatcttcctgggaaaagaaaagtcatcatgcatttgatttcagttttaaac

SEQ ID NO: 72639 - DNA, 600 bp, Chicken  19866894352858_2
gaagtacaaaatgtgagatcttgtttcactctatgaacaaaagcttgtgatttcaggatggaaagaaaagaatattgcttgacatcataatgtaactttaaataataataaaaagctttaaaccatcagattatccgttttaacaggatttgaattagtgtctcattggggtcattacttaaattgagattctttcttcagcaatgtcatgcgttctgaagggaaggaggctgtaagtagagraaattctcatttgagaaactagacagtcgtgaaatgctcacaaaatcatatttactwttttctaacattactttgagccttcattacccatcttgtggcaatgcaaatagatggggtacaacctaaacccttctttcatggcttacaatttctcttgtcatcacagcccacttatagaagaaaacaaacttwgaatttaaaatttagagattaatttagaagagacaaaaatatcaacaacttgccgtaaatcttcctgggaaaagaaaagtcatcatgcatttgatttcagttttaaactaatggaattgcattgtagattaaaggtggtagggagagacacctgttcaaaccacg

SEQ ID NO: 72640 - DNA, 600 bp, Chicken  19866894352858_3
cgttttaacaggatttgaattagtgtctcattggggtcattacttaaattgagattctttcttcagcaatgtcatgcgttctgaagggaaggaggctgtaagtagagraaattctcatttgagaaactagacagtcgtgaaatgctcacaaaatcatatttactwttttctaacattactttgagccttcattacccatcttgtggcaatgcaaatagatggggtacaacctaaacccttctttcatggcttacaatttctcttgtcatcacagcccacttatagaagaaaacaaacttwgaatttaaaatttagagattaatttagaagagacaaaaatatcaacaacttgccgtaaatcttcctgggaaaagaaaagtcatcatgcatttgatttcagttttaaactaatggaattgcattgtagattaaaggtggtagggagagacacctgttcaaaccacgytaawttgggatggaagaggccaggtgaagagagcaagtctggataagatgcatttaggaagagaaagtcttcctgtgctctcagagactcaattccagctttgtgtgggtaaactgtgggaggagatgctagtg

SEQ ID NO: 72641 - DNA, 512 bp, Chicken  19866894352858_4
tttctaacattactttgagccttcattacccatcttgtggcaatgcaaatagatggggtacaacctaaacccttctttcatggcttacaatttctcttgtcatcacagcccacttatagaagaaaacaaacttwgaatttaaaatttagagattaatttagaagagacaaaaatatcaacaacttgccgtaaatcttcctgggaaaagaaaagtcatcatgcatttgatttcagttttaaactaatggaattgcattgtagattaaaggtggtagggagagacacctgttcaaaccacgytaawttgggatggaagaggccaggtgaagagagcaagtctggataagatgcatttaggaagagaaagtcttcctgtgctctcagagactcaattccagctttgtgtgggtaaactgtgggaggagatgctagtgagatagcagcctgcctttgggttcagagctgcaggggaacactgcctgcagagcaaagtggcacaaacctaacaagag

SEQ ID NO: 72642 - DNA, 508 bp, Chicken  19866894352858_5
taacattactttgagccttcattacccatcttgtggcaatgcaaatagatggggtacaacctaaacccttctttcatggcttacaatttctcttgtcatcacagcccacttatagaagaaaacaaacttwgaatttaaaatttagagattaatttagaagagacaaaaatatcaacaacttgccgtaaatcttcctgggaaaagaaaagtcatcatgcatttgatttcagttttaaactaatggaattgcattgtagattaaaggtggtagggagagacacctgttcaaaccacgytaawttgggatggaagaggccaggtgaagagagcaagtctggataagatgcatttaggaagagaaagtcttcctgtgctctcagagactcaattccagctttgtgtgggtaaactgtgggaggagatgctagtgagatagcagcctgcctttgggttcagagctgcaggggaacactgcctgcagagcaaagtggcacaaacctaacaagag

SEQ ID NO: 72643 - DNA, 600 bp, Chicken  19866894352859_1
aggtgtttgcttttattcaacgtatctcaagtatcaaaggaaaaaaaatgggaacatggaatataacgggtttttttgtcacatactggagttcctgtgtgtttaaatcttgcacttgtcaaatctccctgaatactggcagaggaaaaattcctggatgtaccttaggagttaggaatggcagaggaagtaaaggtcaactattttaattaaaaataaacagtggatctaatgaagcaaacaaccttttttgtgggtatgcagtattatataatctgttctcaaggttgtaattcaagkaaatgaagaggcagtttaagaactccttaaatgaccttttttaattgacagtacactgaatatagagtctaatcccagacatcttcacctccattaaggtgtatgagctcacggttcggagacgacttgcttaatttccagtgctgcatctaaaaatagcaaccatcctttaagataatttctttgcatggcaaaaaaacaggagcaatcctgtgctcagaagtgttataatgacaagatgcttgggaggcatcactgattgcttattagctggaaggcaggatggaaaatactgtttat

SEQ ID NO: 72644 - DNA, 600 bp, Chicken  19866894352860_1
attcctcctgctcagattggcagtgtctcccaagtcccaagcttcacaaagacagcacaagttatgttaatgactgattcacattttttaaacaaatatctgtagtttactttctcctcaaatttgtttttagagatctttggaagaaactccatatgcatgtttctaaaaataatttctcgcctgaccgagtaatgagctttctgaaaaagcaaagctaaaatgctgcaacaaggctatgggacagcaagttaaatgatcataatggtacaccgtgagattgtaaaaagaatttttttkggagaataaagagaggaaacaattccattaagtaaccatacttccttagctggtcttaagctagatgaccagttaactgtggtacacttcaacactgcagtcatgtcagtactctataaatayggttactcaaaaagtacctggtaaattttgcactactgaagtgattgtgctctaaagattgatctacctttttgaaccactgatgaagtgcatagttaagttttgaatactataaaaccagaagtttttcagccacaactatgtgctaaaattggtcttaattagaaagaactgaga

SEQ ID NO: 72645 - DNA, 600 bp, Chicken  19866894352860_2
ttgtttttagagatctttggaagaaactccatatgcatgtttctaaaaataatttctcgcctgaccgagtaatgagctttctgaaaaagcaaagctaaaatgctgcaacaaggctatgggacagcaagttaaatgatcataatggtacaccgtgagattgtaaaaagaatttttttkggagaataaagagaggaaacaattccattaagtaaccatacttccttagctggtcttaagctagatgaccagttaactgtggtacacttcaacactgcagtcatgtcagtactctataaatayggttactcaaaaagtacctggtaaattttgcactactgaagtgattgtgctctaaagattgatctacctttttgaaccactgatgaagtgcatagttaagttttgaatactataaaaccagaagtttttcagccacaactatgtgctaaaattggtcttaattagaaagaactgagatttcttatgtggtgtctgtaacatgtttgtgttaagaaaaacgagtatggaaaatgagactatctgatctaactgaaccaaaacagagcagactttattctttttcagaagactttatgagtt

SEQ ID NO: 72646 - DNA, 600 bp, Chicken  19866894352865_1
ctaactcctgagtgacttttgcagctcaataagtgctgaaacactgacacatcagcacgaaatgtctctcgtgggctgagaccaatgggttttcaaaatctgccccacctttgcgtagctgagatgcataatgagcagggagggcagggaacatcaagtttttaaaaagcaagttttccctgttgagtttggctaatttaatcatgttttctacttctaatagacaaaatgcgagctgttgtgttgaattttctgacacaaaagacaagcgatatgttggtctttccagccattaatacrcaacttgatgtgagttatcactgcttcagcactgyaaagattygtctcatcacagaagaaagatttaggaactgtaatttctaaattgttgcttttttccaggagctctatgcctctgggcttgcttttcttttttcagtatagacagttctgagagttttgaagtttttcctcacattaaatttgaaagggttctatccatgwttggtggaaagcatatcactgtcactgtttttttcttttagctaacagtgtcaaactgtgtgcattgcatttgaggtagttgtagatggagacatt

SEQ ID NO: 72647 - DNA, 600 bp, Chicken  19866894352865_2
ctgaaacactgacacatcagcacgaaatgtctctcgtgggctgagaccaatgggttttcaaaatctgccccacctttgcgtagctgagatgcataatgagcagggagggcagggaacatcaagtttttaaaaagcaagttttccctgttgagtttggctaatttaatcatgttttctacttctaatagacaaaatgcgagctgttgtgttgaattttctgacacaaaagacaagcgatatgttggtctttccagccattaatacrcaacttgatgtgagttatcactgcttcagcactgyaaagattygtctcatcacagaagaaagatttaggaactgtaatttctaaattgttgcttttttccaggagctctatgcctctgggcttgcttttcttttttcagtatagacagttctgagagttttgaagtttttcctcacattaaatttgaaagggttctatccatgwttggtggaaagcatatcactgtcactgtttttttcttttagctaacagtgtcaaactgtgtgcattgcatttgaggtagttgtagatggagacatttccaaagtgtcatattccattacagtgtgaaattc

SEQ ID NO: 72648 - DNA, 600 bp, Chicken  19866894352865_3
ctgacacatcagcacgaaatgtctctcgtgggctgagaccaatgggttttcaaaatctgccccacctttgcgtagctgagatgcataatgagcagggagggcagggaacatcaagtttttaaaaagcaagttttccctgttgagtttggctaatttaatcatgttttctacttctaatagacaaaatgcgagctgttgtgttgaattttctgacacaaaagacaagcgatatgttggtctttccagccattaatacrcaacttgatgtgagttatcactgcttcagcactgyaaagattygtctcatcacagaagaaagatttaggaactgtaatttctaaattgttgcttttttccaggagctctatgcctctgggcttgcttttcttttttcagtatagacagttctgagagttttgaagtttttcctcacattaaatttgaaagggttctatccatgwttggtggaaagcatatcactgtcactgtttttttcttttagctaacagtgtcaaactgtgtgcattgcatttgaggtagttgtagatggagacatttccaaagtgtcatattccattacagtgtgaaattctatgaaag

SEQ ID NO: 72649 - DNA, 455 bp, Chicken  19866894352865_4
tgttttctacttctaatagacaaaatgcgagctgttgtgttgaattttctgacacaaaagacaagcgatatgttggtctttccagccattaatacrcaacttgatgtgagttatcactgcttcagcactgyaaagattygtctcatcacagaagaaagatttaggaactgtaatttctaaattgttgcttttttccaggagctctatgcctctgggcttgcttttcttttttcagtatagacagttctgagagttttgaagtttttcctcacattaaatttgaaagggttctatccatgwttggtggaaagcatatcactgtcactgtttttttcttttagctaacagtgtcaaactgtgtgcattgcatttgaggtagttgtagatggagacatttccaaagtgtcatattccattacagtgtgaaattctatgaaagtcaaagcatgttgaaa

SEQ ID NO: 72650 - DNA, 600 bp, Chicken  19866894352870_1
tgctttttaaaatgctttctaatatagaaactctaagtgccttctaggataactgaaatacacagaaatataatcagattcccaagctccgtgattttacctgggtcaaaactgcaatatgggattcattgattactgacaagagtcttcatttccaggttactctaaacagtactgttgattttctaaaactcaagatgtagctacgttgcacaatcagacacttaatgatgtcctgcaagcaaagattttatcagccatccatactctgtttgaaaagtctcaaggataaatccatcrtgcagaatgtgtaaaattgctttctgtcaccttaaaatagacaaagattctgccagacagatgcgaaaaatagattaccagttggacactgcggggttattatcagtgcatcattgcttataattgattgatcagataaggaaggttagggggtagttttataacaaatggtaatttcttcctctcttctatgggtgtgctataggaagcaatagaccacagaacatggctaccccctttgattttactgcagatctggccacaggaaatgttgcacatttggatcaagcaggataaaca

SEQ ID NO: 72651 - DNA, 464 bp, Chicken  19866894352874_1
gtgccttggacttctccttgttctttgcctggcccttgaagcctttcatgggagagtcatcaagtttgatttctgggtccaaggggaagcggcagggaaggaggagatggaaatgaaggtgaggaagggtgggggagacagggaagggagacttgatcaaggtctttaaaatgggaggatcatgaaagctgacagctgtgactgcctgcagctcccatttcagccctggagtaactcttcaagccctctcctgtctttccttgttctctggccatcaaagcctgtgtcacagcatttccrtgagcctagtggtctctrtgaaaggaccttccagaacayaaattattcagactgagwgcactaggttctagctagcctccgtagcagtaagaagatctgattccaccaacagcatctcctttcctcctcccactggagactttttcctgtcacgtgcagcctgg

SEQ ID NO: 72652 - DNA, 446 bp, Chicken  19866894352874_2
tgttctttgcctggcccttgaagcctttcatgggagagtcatcaagtttgatttctgggtccaaggggaagcggcagggaaggaggagatggaaatgaaggtgaggaagggtgggggagacagggaagggagacttgatcaaggtctttaaaatgggaggatcatgaaagctgacagctgtgactgcctgcagctcccatttcagccctggagtaactcttcaagccctctcctgtctttccttgttctctggccatcaaagcctgtgtcacagcatttccrtgagcctagtggtctctrtgaaaggaccttccagaacayaaattattcagactgagwgcactaggttctagctagcctccgtagcagtaagaagatctgattccaccaacagcatctcctttcctcctcccactggagactttttcctgtcacgtgcagcctgg

SEQ ID NO: 72653 - DNA, 425 bp, Chicken  19866894352874_3
agcctttcatgggagagtcatcaagtttgatttctgggtccaaggggaagcggcagggaaggaggagatggaaatgaaggtgaggaagggtgggggagacagggaagggagacttgatcaaggtctttaaaatgggaggatcatgaaagctgacagctgtgactgcctgcagctcccatttcagccctggagtaactcttcaagccctctcctgtctttccttgttctctggccatcaaagcctgtgtcacagcatttccrtgagcctagtggtctctrtgaaaggaccttccagaacayaaattattcagactgagwgcactaggttctagctagcctccgtagcagtaagaagatctgattccaccaacagcatctcctttcctcctcccactggagactttttcctgtcacgtgcagcctgg

SEQ ID NO: 72654 - DNA, 407 bp, Chicken  19866894352874_4
catcaagtttgatttctgggtccaaggggaagcggcagggaaggaggagatggaaatgaaggtgaggaagggtgggggagacagggaagggagacttgatcaaggtctttaaaatgggaggatcatgaaagctgacagctgtgactgcctgcagctcccatttcagccctggagtaactcttcaagccctctcctgtctttccttgttctctggccatcaaagcctgtgtcacagcatttccrtgagcctagtggtctctrtgaaaggaccttccagaacayaaattattcagactgagwgcactaggttctagctagcctccgtagcagtaagaagatctgattccaccaacagcatctcctttcctcctcccactggagactttttcctgtcacgtgcagcctgg

SEQ ID NO: 72655 - DNA, 599 bp, Chicken  19866894352876_1
  misc_feature (1)..(32): n is any nucleotide
nnnnnnnnnnnnnnnnnnnnnnnnnnnnnnnncctgtgtcacagcatttccgtgagcctagtggtctctgtgaaaggaccttccagaacacaaattattcagactgagtgcactaggttctagctagcctccgtagcagtaagaagatctgattccaccaacagcatctcctttcctcctcctactggagacttttcctgtcacgtgcagcctggagaaaaaaaagcccagcctaggtgttgcaaaggtgacagtgcttgatgctcagcaccaaggcacagtctgctgcccttacagagkgtgatgcccatggcgagctgcgtctctattcagagcagccaccagctggtggcaccagttacacaaggaaaggctgttggaaagaagtctgagctaagcaactttgtgctcttctcccacccatctacaatctccatccctcactgcctcaatctgccagctttcatgaatgctgggcggtgcagatgaggacagatgaaaaacaacaaggacatagtgaggaagaggaatggaggaaggaatgggagtgccaaggggaaatgggtcctgctcagaagacagaagaagaaggatgtggg

SEQ ID NO: 72656 - DNA, 600 bp, Chicken  19866894352883_1
actttaaggtgtgttaatccagataaagaagtatcaaccactgtgttttgagataacacacggagtgtgttctgttctgctgtgcacgtgctctccctaatgctgtttgatctgtgtgagcatttctcattgttttatcaggaccagggattatatatttcacacctaagacttttctgagggagccaggggcagctctcacagtgggtcactgcccctctgcctcccgtttccttgagaatgaaactcttttatgttgttgttctgggacagggaaacatgcacctttgaggaagttcrgaggctcacaatgctgagttcttgttgtctttggatgtctatttataaagcaaggcttatccataacccctttcaaagtttctttctaggtctgatgtgtcccacttgcgatgtggtgtcacccagtgacaaagttatacaagtcttttatcagccagccaactgtctgtcaagaatccctttgccaggtctggttgttatgatgaacacatccattccagtttctcgtactttccctgtaattactgagaagttaggagctggatgckgggtcctgcatgctcttcatatattcttgtt

SEQ ID NO: 72657 - DNA, 600 bp, Chicken  19866894352883_2
acagggaaacatgcacctttgaggaagttcrgaggctcacaatgctgagttcttgttgtctttggatgtctatttataaagcaaggcttatccataacccctttcaaagtttctttctaggtctgatgtgtcccacttgcgatgtggtgtcacccagtgacaaagttatacaagtcttttatcagccagccaactgtctgtcaagaatccctttgccaggtctggttgttatgatgaacacatccattccagtttctcgtactttccctgtaattactgagaagttaggagctggatgckgggtcctgcatgctcttcatatattcttgttggcacttactctttttgtgttaatcttagtggccaaatacacagaataccttcttgctaatctttggattaatgaacttctttcctgtctaacatgctaggaaaacactgttccatccaggtgaggattttttttttctattttcaaaaacactttttaaaaattaagcgtgttgaggaatagaaggacatttcatgagagtaggaaaaatcttttatttgaaattatcgaaatattttgacttctcacattgtttcatcagctcctat

SEQ ID NO: 72658 - DNA, 600 bp, Chicken  19866894352885_1
atttcacagaagggcgcaggttggaagggaccgtaaagcccattcagttccaatcccccttgcatggtcagggctacaccccaccagctcagtccgcccagggccccatccaacctggccttgagcaccttcaaggatggggcaccacagcttctctgggcagctgtgccagggcctcgcaaccctctctgagtaaggagtttcttcctaacatctaactttaatctcccctcttttggtttaaaaccatacccctttgccctacctctatcagaccatgtaaaaagtcagactccctcytgtttataagctcccatcaagtactgkaaggctgcagcaagatctctcccagcttggtcactataagcactacatagccttaagcttacaggcatggacatggtttaaataggtttaaaactactttttgcacagattattcctggatctattttgaaccggcaacacaagcagttcactcccacaaccgaaggctaaaataaaataaaataaaataaataataatttaaaaaaaaaaaaaaaggaatagagagcagacaagcatttccaagagtcgtactctcagaagaaacccagtcc

SEQ ID NO: 72659 - DNA, 600 bp, Chicken  19866894352885_2
ggaccgtaaagcccattcagttccaatcccccttgcatggtcagggctacaccccaccagctcagtccgcccagggccccatccaacctggccttgagcaccttcaaggatggggcaccacagcttctctgggcagctgtgccagggcctcgcaaccctctctgagtaaggagtttcttcctaacatctaactttaatctcccctcttttggtttaaaaccatacccctttgccctacctctatcagaccatgtaaaaagtcagactccctcytgtttataagctcccatcaagtactgkaaggctgcagcaagatctctcccagcttggtcactataagcactacatagccttaagcttacaggcatggacatggtttaaataggtttaaaactactttttgcacagattattcctggatctattttgaaccggcaacacaagcagttcactcccacaaccgaaggctaaaataaaataaaataaaataaataataatttaaaaaaaaaaaaaaaggaatagagagcagacaagcatttccaagagtcgtactctcagaagaaacccagtccaaactacgcctccagctcacagcaggc

SEQ ID NO: 72660 - DNA, 600 bp, Chicken  19866894352891_1
tgcaaactgggattaagcaaaggttacctgtgtcttgcacaactcctgtatgcaaggactcatgaataagcatggaaatatcccatgaatggcaaggaaaaggtgctgcctgataacagcaggtaaataacgtgggtcactccaaaccaatgcctcctatttatttccaaggaaatcgcaagaggtccaaaaaccacaataacagtggtgacggagcacagctagtggtgctgactatgctgaaaaatagcgttttgcagctgagaatttgctctgtcaaatggtgctcttgtgctcttyggatctgytgcagtttccatggaaataaataggaggcattactttcaggggaaaagtacagccctggttttgtgccagcaaaatcttcttgtccaggagaagctgcatctgtccggctggtctactaatgccaaagcactgtgttcataggtggctgcagctctactgggactaaatgttaaactggggtcaggtgtggggaggaaattcttcatgtagaggcggtgaggcrttggcacagcccagagctgtgggtaccccattcttggagatgccccaggccatggatgggcactgggc

SEQ ID NO: 72661 - DNA, 600 bp, Chicken  19866894352891_2
gggattaagcaaaggttacctgtgtcttgcacaactcctgtatgcaaggactcatgaataagcatggaaatatcccatgaatggcaaggaaaaggtgctgcctgataacagcaggtaaataacgtgggtcactccaaaccaatgcctcctatttatttccaaggaaatcgcaagaggtccaaaaaccacaataacagtggtgacggagcacagctagtggtgctgactatgctgaaaaatagcgttttgcagctgagaatttgctctgtcaaatggtgctcttgtgctcttyggatctgytgcagtttccatggaaataaataggaggcattactttcaggggaaaagtacagccctggttttgtgccagcaaaatcttcttgtccaggagaagctgcatctgtccggctggtctactaatgccaaagcactgtgttcataggtggctgcagctctactgggactaaatgttaaactggggtcaggtgtggggaggaaattcttcatgtagaggcggtgaggcrttggcacagcccagagctgtgggtaccccattcttggagatgccccaggccatggatgggcactgggcagcctgag

SEQ ID NO: 72662 - DNA, 393 bp, Chicken  19866894352891_3
gactatgctgaaaaatagcgttttgcagctgagaatttgctctgtcaaatggtgctcttgtgctcttyggatctgytgcagtttccatggaaataaataggaggcattactttcaggggaaaagtacagccctggttttgtgccagcaaaatcttcttgtccaggagaagctgcatctgtccggctggtctactaatgccaaagcactgtgttcataggtggctgcagctctactgggactaaatgttaaactggggtcaggtgtggggaggaaattcttcatgtagaggcggtgaggcrttggcacagcccagagctgtgggtaccccattcttggagatgccccaggccatggatgggcactgggcagcctgaggtggggggatgggggga

SEQ ID NO: 72663 - DNA, 599 bp, Chicken  19866894352894_1
  misc_feature (1)..(125): n is any nucleotide
nnnnnnnnnnnnnnnnnnnnnnnnnnnnnnnnnnnnnnnnnnnnnnnnnnnnnnnnnnnnnnnnnnnnnnnnnnnnnnnnnnnnnnnnnnnnnnnnnnnnnnnnnnnnnnnnnnnnnnnnnnnnntgacatctgtcagtctgagctgagaaagtcacagaatcacagaaccattaaggctggagagaccacgaagatcatctaatccaaccatcaacccgccgtgcccactgaccacatcccgcagtgccacaaagcccacagctgccgccctgcctgtcgctgcacacacaaaagatcrtgagatacttgagctgatttcttagcactttctgtgtactgcagaatgcaatgaagaaattagaaaaatgagagcagtttggagctgrggaggaagaatgtttgcttctggcagcctacagatgacacgcagaagcctggaagcatggcatttgttatttcggtacgatgtaagatgatgtgataaataatgtaaacgttgaaatttcaaggaatatcagacaagactcggaatactgggaggcgaagcctttgttcagtgatgctctctcacttgggatgctagcagcctgcagctct

SEQ ID NO: 72664 - DNA, 599 bp, Chicken  19866894352894_2
  misc_feature (1)..(37): n is any nucleotide
nnnnnnnnnnnnnnnnnnnnnnnnnnnnnnnnnnnnntgacatctgtcagtctgagctgagaaagtcacagaatcacagaaccattaaggctggagagaccacgaagatcatctaatccaaccatcaacccgccgtgcccactgaccacatcccgcagtgccacaaagcccacagctgccgccctgcctgtcgctgcacacacaaaagatcrtgagatacttgagctgatttcttagcactttctgtgtactgcagaatgcaatgaagaaattagaaaaatgagagcagtttggagctgrggaggaagaatgtttgcttctggcagcctacagatgacacgcagaagcctggaagcatggcatttgttatttcggtacgatgtaagatgatgtgataaataatgtaaacgttgaaatttcaaggaatatcagacaagactcggaatactgggaggcgaagcctttgttcagtgatgctctctcacttgggatgctagcagcctgcagctctcatcacaaacagccccataaagatttcgctttgagaccaaagcatcgccttcaaattctgccatgaaaaagcacaaagcagctcttcc

SEQ ID NO: 72665 - DNA, 600 bp, Chicken  19866894352899_1
atttcccataaatagggttaacaagtacttgacagcctgagagaaacgtcttctaggccagaggaaaaaacagaagtctcaaacagtagtatgaaaagcatttgtaactgcagcaaagtaaagggattttcctagttcagtataaacaaatgggctcacttctgcacattttgtgagagcagtatcaggcccattttccattgaaagcatgccagttttagagcaaaataagccctggtttagggtgaaaatgactcttttattatgtatgaacaaggtgatattttcgtctgggttttrtcctgctttgagggatctgaggtcaagtagtgaagacaggcatgtctattgcagcacacagaaggccatgaccatgagaagcacagccacatgcaaygctgcartagggagcattattctgttccagatttatctgcccaggtaaatgccactgaggcagcataccacagtccccagcagctggggatgagygtggctgcctttgggctggagaggacaggtcatgctggaactgccagctcatgagcagatctaatgtccttagggacaccgatttctcatcctggtaaaaaaataata

SEQ ID NO: 72666 - DNA, 534 bp, Chicken  19866894352899_2
gcatttgtaactgcagcaaagtaaagggattttcctagttcagtataaacaaatgggctcacttctgcacattttgtgagagcagtatcaggcccattttccattgaaagcatgccagttttagagcaaaataagccctggtttagggtgaaaatgactcttttattatgtatgaacaaggtgatattttcgtctgggttttrtcctgctttgagggatctgaggtcaagtagtgaagacaggcatgtctattgcagcacacagaaggccatgaccatgagaagcacagccacatgcaaygctgcartagggagcattattctgttccagatttatctgcccaggtaaatgccactgaggcagcataccacagtccccagcagctggggatgagygtggctgcctttgggctggagaggacaggtcatgctggaactgccagctcatgagcagatctaatgtccttagggacaccgatttctcatcctggtaaaaaaataataatggctttaaagcagggttttgtgtggggag

SEQ ID NO: 72667 - DNA, 527 bp, Chicken  19866894352899_3
taactgcagcaaagtaaagggattttcctagttcagtataaacaaatgggctcacttctgcacattttgtgagagcagtatcaggcccattttccattgaaagcatgccagttttagagcaaaataagccctggtttagggtgaaaatgactcttttattatgtatgaacaaggtgatattttcgtctgggttttrtcctgctttgagggatctgaggtcaagtagtgaagacaggcatgtctattgcagcacacagaaggccatgaccatgagaagcacagccacatgcaaygctgcartagggagcattattctgttccagatttatctgcccaggtaaatgccactgaggcagcataccacagtccccagcagctggggatgagygtggctgcctttgggctggagaggacaggtcatgctggaactgccagctcatgagcagatctaatgtccttagggacaccgatttctcatcctggtaaaaaaataataatggctttaaagcagggttttgtgtggggag

SEQ ID NO: 72668 - DNA, 439 bp, Chicken  19866894352899_4
attttccattgaaagcatgccagttttagagcaaaataagccctggtttagggtgaaaatgactcttttattatgtatgaacaaggtgatattttcgtctgggttttrtcctgctttgagggatctgaggtcaagtagtgaagacaggcatgtctattgcagcacacagaaggccatgaccatgagaagcacagccacatgcaaygctgcartagggagcattattctgttccagatttatctgcccaggtaaatgccactgaggcagcataccacagtccccagcagctggggatgagygtggctgcctttgggctggagaggacaggtcatgctggaactgccagctcatgagcagatctaatgtccttagggacaccgatttctcatcctggtaaaaaaataataatggctttaaagcagggttttgtgtggggag

SEQ ID NO: 72669 - DNA, 599 bp, Chicken  19866894352900_1
  misc_feature (1)..(164): n is any nucleotide
nnnnnnnnnnnnnnnnnnnnnnnnnnnnnnnnnnnnnnnnnnnnnnnnnnnnnnnnnnnnnnnnnnnnnnnnnnnnnnnnnnnnnnnnnnnnnnnnnnnnnnnnnnnnnnnnnnnnnnnnnnnnnnnnnnnnnnnnnnnnnnnnnnnnnnnnnnnnnnnnnnnntgtggaaatagggtgagataccatatcaggaggggatgtatctgccctcactcccattcttgcaccatttacaatgccatcgtaacagaatcgagaacaacccatgctatttcctttctttgctttcgaggcactrggaagtgtgtacaggatcttccatcgatgattctttatacactgcttgaactaaaccctaaataatcctgtagaacatgtggatggcttcatctccattttaccgattggagggtgaggcgcagacaaaacaatactttattggaaattgcagtataagctagtaggagattcagatttccatcacgactcctgacatttgtccttgccactagaatgtgtccccctttcagtgccacggcgtgttttataataggagggaaaaaaatggttttgagcagaactgttctacattaaaag

SEQ ID NO: 72670 - DNA, 600 bp, Chicken  19866894352903_1
cagcaatactccaaaagaaagcagatgtacgtgctggatggagtgaccagattccagcacctatttctgacagctcttctccatacaaaaaactgagggaagggggaggatgggacactaaattctaccacaaaacacagctgcttatttatctatttgtcattctgctgcagttgagtgttatgcccagatgaaagaaaccagctgggtgcaacaaaagcactgggcactctgctgatggaggcactgcaaagcaaaccccagcttgctacaaggaacggggtacaatgagagttgtgygggatggaggagatgccactgtggcttctgctaaagtgataatggtgaaagaattgaccaggctctctggtctgctgctatccatacaactcaagcacagctttgagtagaacggatacttgagtagtatccgtagttgtgtctggccttacaatatatgggccaggaagcattaacttggggtgtaagtgctaatttttcccgcatgggaaaatctcctctgttttgagacttcctactgcctacatttttcagtcctgtcaactagaaacccgtgctcttgctattcagtcttgaggg

SEQ ID NO: 72671 - DNA, 599 bp, Chicken  19866894352909_1
  misc_feature (1)..(4): n is any nucleotide
nnnnatggaaagtttgaatgacagaagagaagagaggtggtcctaatgtttccagctcctccagggaacaagggaatgccctggaggagaaattgagaagagctacaaaggctaagcttgcattcaaatttaaatgcgttcttcaatatttagcttttagaagtgctttcaagaatcagccgagggacaggttgtataatagaggttgaagtggtgacaattacttttttggctaagagcagccttgtcaaggaagaaatggtgaagtttatcttgtaggaaagctgggagaacagaatrgagagcatctaaatggggcagctggaagcaggttgacattaattggtggttttcctgggttatatgaagtgttgtcatgttttgaggtctagttaaaagtatggcaaagggaattacagttgagtgtattctggaacagatataaaggggaaaaaaagagagatgttgggaaattgggcagagctgtttctaaggctcagaacaagataaaaacagctgttgtctttggggtggttacagccatcgattcatgaggcaaagacggttgggatgtatacttgtaggggaggactggagca

SEQ ID NO: 72672 - DNA, 600 bp, Chicken  19866894352910_1
acagcctgggaaaggagatataaagttatttttattcttaaattccttagggggtgaggcactcagatacaagtgtgatgagagccatacaagtacatagagagagcgcgcaagagaaggaaaggagtgattaatgcatccaggctatgctgcttgctggaagatgaaaccgaacccacaaaaccaacattttgacagaaacattccactccaactatggtaactttcaagttaaagataccagaggcactattaaccctggtttcaaacaactgtgacagaaaccattgccaccagctraggatggctgctgctccttgcacaagtgaccagagatgaccaggcccagcactctcccccagacacatcggctgccaccagccttgcaagctggtagcagaacagaaggcatgaagagagagtagyatagctgatgttgcttttggctatttaaagaagatagaaatttctagaaaagtcagacagctgcatctctggaaagaccatgtatgtgcatgctttgttttytgggggatgtctgtgagactgcaaacacgattagtaggcagatcaaactgcagcctaaaaaaccctgagaca

SEQ ID NO: 72673 - DNA, 600 bp, Chicken  19866894352910_2
gtgattaatgcatccaggctatgctgcttgctggaagatgaaaccgaacccacaaaaccaacattttgacagaaacattccactccaactatggtaactttcaagttaaagataccagaggcactattaaccctggtttcaaacaactgtgacagaaaccattgccaccagctraggatggctgctgctccttgcacaagtgaccagagatgaccaggcccagcactctcccccagacacatcggctgccaccagccttgcaagctggtagcagaacagaaggcatgaagagagagtagyatagctgatgttgcttttggctatttaaagaagatagaaatttctagaaaagtcagacagctgcatctctggaaagaccatgtatgtgcatgctttgttttytgggggatgtctgtgagactgcaaacacgattagtaggcagatcaaactgcagcctaaaaaaccctgagacacgtttcacagtgtggacatttctcctcaggatctgtttatgactcactgttcctgtcaaggaggataatgtgcctctaaatttcccctgacagaaaatgtatcacactgtcagctgcattagggaa

SEQ ID NO: 72674 - DNA, 600 bp, Chicken  19866894352910_3
aagttaaagataccagaggcactattaaccctggtttcaaacaactgtgacagaaaccattgccaccagctraggatggctgctgctccttgcacaagtgaccagagatgaccaggcccagcactctcccccagacacatcggctgccaccagccttgcaagctggtagcagaacagaaggcatgaagagagagtagyatagctgatgttgcttttggctatttaaagaagatagaaatttctagaaaagtcagacagctgcatctctggaaagaccatgtatgtgcatgctttgttttytgggggatgtctgtgagactgcaaacacgattagtaggcagatcaaactgcagcctaaaaaaccctgagacacgtttcacagtgtggacatttctcctcaggatctgtttatgactcactgttcctgtcaaggaggataatgtgcctctaaatttcccctgacagaaaatgtatcacactgtcagctgcattagggaatgacaaacacagccctgtggtggtactgccagacacctcttggatgctcgcagcaagcacaggtgcagaagttacctgcctcagtgcaagtagagtaaaagg

SEQ ID NO: 72675 - DNA, 600 bp, Chicken  19866894352910_4
accctgagacacgtttcacagtgtggacatttctcctcaggatctgtttatgactcactgttcctgtcaaggaggataatgtgcctctaaatttcccctgacagaaaatgtatcacactgtcagctgcattagggaatgacaaacacagccctgtggtggtactgccagacacctcttggatgctcgcagcaagcacaggtgcagaagttacctgcctcagtgcaagtagagtaaaaggacttggtcagctcgaggacacacttagacaagttcagcaacttgtaaaagcattcattaawctctatataaaaaagcctctccagctcctgggaggagaacatgtcaaggtggaatctgggtgacctgattataaaattgacatagaagcaacatttggcctctgagcaacagctgctgtttgaaggggccttccagcagcccaccacacacagcaggcacagcccatgcagctgctgggggggtcctggctccaggtgtccaggccatgccaaagcagggcacaggccacaaagtgtgtgatgttgctgtagatcaagggagcacctgatagctcaccctgattttaggatccacactgg

SEQ ID NO: 72676 - DNA, 599 bp, Chicken  19866894352927_1
  misc_feature (1)..(58): n is any nucleotide
nnnnnnnnnnnnnnnnnnnnnnnnnnnnnnnnnnnnnnnnnnnnnnnnnnnnnnnnnntatgcatagaatattgaatgcttctaatttagcttaagatgtttacttggagaatcccttttatttgaatggttagcaaagccatttgctcacgatgaatggtgccctcctgtctacagggtgctctgcagtgcatgctgctggatgtgtccagtgtaaaaagtatcatcagcaaaactattgttggtgctaattgctaactggctggctgtgtgtttgcagaaatttttggccatgctgtsgctggctgctcgttagaaaagcacttgtgaaaggatgatgctggcagcgctgtgtttgtgaatggcagacctgggattaatagcaccgacgttttaaagcagatacaacgcggccataaatccactgcgagcactgagcgcatgcaaagcaggcgttgtaaagttccagatgatgcttggaagtgttttgctaataaaccatttttatagtggtgtgatgaggtgagtctgtggggtggtcctcatctgagcagctcctttgcctgcagcgatgctttgtggtcagggtgagcagtgat

SEQ ID NO: 72677 - DNA, 600 bp, Chicken  19866894352927_2
tgctcgttagaaaagcacttgtgaaaggatgatgctggcagcgctgtgtttgtgaatggcagacctgggattaatagcaccgacgttttaaagcagatacaacgcggccataaatccactgcgagcactgagcgcatgcaaagcaggcgttgtaaagttccagatgatgcttggaagtgttttgctaataaaccatttttatagtggtgtgatgaggtgagtctgtggggtggtcctcatctgagcagctcctttgcctgcagcgatgctttgtggtcagggtgagcagtgatgtatggygtcgctgtcagtcccagcacgtcttccttaatttattttcattagatgaatgcccttattgtgggacagatgtaacccatctataaagcaatccctgtgtttgtacacgggtggatgcagcgctcctcccttcgtagctctgcatctctggtgtatggtgccatgggtggaaccagggccgactgctgctccgtgcactggctgtcccagctcagcacgctgctcagtgaggcttcaaggccagctcaggatgcttctgtgctgcccctggccttcctcgtgttgcacctgaactatgaa

SEQ ID NO: 72678 - DNA, 600 bp, Chicken  19866894352930_1
caagctttcttccctaaatttcatcatggaaaaaccagaaggggagtgggatgtaatggcacatgtaattccagacctgtcagctgttcactctaatccagatcagcatgttagcagctgcagcagctttgcattgggtagttcacacatcagcctgctggtaagcagtgacatacgtgttttaggtctctgttactgctgcacactctcactccatgcattgtgttagtatgagatgtgtgactaaatcctgcctacctgcaagttcagttagaatgttgtaaggaaacagtgctccaytattcccaaattactcattctttgacaattcagcttggaagaccaatagctgtctggaacaggtgattaaaaacaagacctcaaactgggctttaaagcctatttctaatcatataactaaggcactctttacaggagagactgtctttatggggttaaatcaatgtcttgaaacatggaggatttctcaaggaagtttactgaaattctatgttcaaagtgcccttcattgctgaaagcccaaggagtccagtatctgaactactgacaactcctactctagaggtcacatactctgaa

SEQ ID NO: 72679 - DNA, 600 bp, Chicken  19866894352939_1
tccttcaaattctttcagttgttcaggtgataattgttggtccatacctggctatccttctctttcttttcttgatacctctggggatgtactctccttgcatcagagaggtggggacacttggaccaaagccagccctcatcggacaccgtggagcaccaatggtaggtgtggagaagttgttaaacatctcttcatcttctgtgttgctacctctgtcatcatcttttattttcttttttttttcttttttttttcttttcttttttcccttaagaaatcagtggagggtagaagggsaggtatttcagtttggaattgcatgccaaagggatcactytatggttctgctaacatggacagcactgctcttgagggacaaagatgggtttggtagccaaagaaacaagagactttatcaagaaaatggtggtaccttaatagaaaactgaagtattacaaagagacagagtgtatttgaagagttctccagagtgtatccaaaaccattttggtcatgggccatttctttcctcagctggccccagaaaacactgagatgtcatttcagaagacaattgaacatggtgcggatggtct

SEQ ID NO: 72680 - DNA, 600 bp, Chicken  19866894352939_2
tccatacctggctatccttctctttcttttcttgatacctctggggatgtactctccttgcatcagagaggtggggacacttggaccaaagccagccctcatcggacaccgtggagcaccaatggtaggtgtggagaagttgttaaacatctcttcatcttctgtgttgctacctctgtcatcatcttttattttcttttttttttcttttttttttcttttcttttttcccttaagaaatcagtggagggtagaagggsaggtatttcagtttggaattgcatgccaaagggatcactytatggttctgctaacatggacagcactgctcttgagggacaaagatgggtttggtagccaaagaaacaagagactttatcaagaaaatggtggtaccttaatagaaaactgaagtattacaaagagacagagtgtatttgaagagttctccagagtgtatccaaaaccattttggtcatgggccatttctttcctcagctggccccagaaaacactgagatgtcatttcagaagacaattgaacatggtgcggatggtcttgaaacagatgtcaccattaggtaagtggacaacatcatg

SEQ ID NO: 72681 - DNA, 600 bp, Chicken  19866894352943_1
tataaactgaaggtgtgattgagcatttgcttttgacacacgctccttaatttggtgcagaaagatacgatctcagtctatccccttgacacgttttgctgcccatgttaagaataagccatctgttgttttctgagtatatttcacagtcaattttattcaaatgtgctgaaagctgctgaaggaagagatttttgtcaggcacttaagtatgactaagtggagtatatgacatctagatttactccttgagagtgataagttcagtggtgcaattaggctgggcacttcctagctggygctctgacactgttcttgtctgcatggagagccactgcaattctttccaacctgtcatgataaatgaaactaagaagagtattcaacgtgtacaattaatttgataggcatttttgctactaacaacactatgaattttgccagcagtactcaggatggctcttgatgctggcatgtgagtaacctcacttctgggcatatttgcagcaactgtggacatgcaggtgagccctcttctttttacctactttgggaaaatgttccaaatactttttttccaccttattttttttttttaat

SEQ ID NO: 72682 - DNA, 600 bp, Chicken  19866894352947_1
tgtgctcctaccaacaacatttcagtaacagaacaacagaactgctgcctgtcgcctgccgcaggcccttagagcccacgaccccgcaccgctgccgggagatcagcgagaaggccccgccggcctcctgcgagcagccctccatcgccggagcggcttagccaggcagaggcacggccgcggaccaccccggcaacgacgtggtgtgaggaaccctcaggcgcctgtgcacggcttcacttcctctcacttcgcgaaccctcacccatcctcacctccaccatggcgccgtcactcccmgctccccaccgacagctatggggacacttccggcgcctgccccatacgcaccggaagtgacacgcggcgggggcgccgggctgcacgcccggaggcgctgtggacgttcgagcaacgcgggcgccgcgtgggctgcagttagagccttgcaacgccagagtgcggcattgcgcttgtttagggatcccggatgcacggtgagtagggtacgagcagggagttcgtccgccgacgtcacgtgcttgtgtgtttggtttttgtttttttttttaacgtacggccttggcactttgcattctg

SEQ ID NO: 72683 - DNA, 600 bp, Chicken  19866894352949_1
ataaatatattactatatctataactatatctttgtgcattgtatgaggaatggctttcttctgcaattcctaagactctataatacaggaatctcaagttatgttaacagcaagctcattaagcaatttctgctgtacctatgagcataatagtacccagcaaagtgatgatatatagctttcacttttgctgcacctcatatctacatattctattagatgctagtagagtgggcacagaaaacttaggcttaaacttccttaggaaacaaatgttcttaagtccccatggtcagcayccttagatcttaaattcagcaacacatatcaggcaatctagaaaaactactactatttactcccaatggtgctctttttcctcagtaaaaacagaggttgggtattcctgtattccctttctgtcagagtaacttggacaatatagacttgcaactcctgaagttcttaaagctcagcagattatgaatgaagagatttatttctcactttcattttatgtataaaacaaagaaatggatttccctggaaaaggattgattcctgtgcaattagtatattgaccactcctaggagacagt

SEQ ID NO: 72684 - DNA, 599 bp, Chicken  19866894352950_1
  misc_feature (1)..(106): n is any nucleotide
nnnnnnnnnnnnnnnnnnnnnnnnnnnnnnnnnnnnnnnnnnnnnnnnnnnnnnnnnnnnnnnnnnnnnnnnnnnnnnnnnnnnnnnnnnnnnnnnnnnnnnnnnnaagtacaatttgaaggtgagctgtagctgcagtgtgtctgtagattacagtgcacgtgttacttgcctgttttcactgcactgctatttaaagtaaaccttctgtcctgcttaattgcatcttgtagtggagtctgtgctgaagtccttgttttactattgacatctctagaattggttccttggcaaatcttyccattgctatttgtgctgcaataatattaagtctccataaagctgtgtgatggcaaatgtatagtaatctgtagtgctggattgtatacgtatatgcagcattgtcctttgaggctgatctgtggctgcagggcagagggcagcagctctgcgtggctgccaacagctgcatctgaaagcaccagcccttagatcttcctctggtcctgtggatgctgcagcagcaagctgaaccgagctgtcagcatggagcccctgctgtagatgcctattttctttcagtgtcataaactgtccca

SEQ ID NO: 72685 - DNA, 401 bp, Chicken  19866894352950_2
ccagcccttagatcttcctctggtcctgtggatgctgcagcagcaagctgaaccgagctgtcagcatggagcccctgctgtagatgcctattttctttcagtgtcataaactgtcccaagggtttttggtaacttttgtttttccttcatgtaaggagaaattctacgtcgtgtcccagcatcggtgggctgggatgttaatcagaatgtaaaatcttatagctcagactgtttagtcatacaatctacggttttacacttgggctctgaaaagctctgtatgctaagagcaattgcagygagaagctctaattcctgtaggtataagactactgtgtgtgcacaccaaaacttcacttatatcctacaggtatttaccaactagttacaattcctatttg

SEQ ID NO: 72686 - DNA, 600 bp, Chicken  19866894352953_1
tgaaacacagctgaacacaagagatccttgtaatctcgaactgcaattttcagtgtaaagcagtcagttctgaaaattgttccagaacagttactaatgagtagctgtgttccagacctaatgcgtaccaaaatagtaaaggctgaaataaaaaataaaatttaacaacaaggagcagtttaggtgcactcaaaactagtttgagacttaaatgctattgcctatttgataagaagtgcatgtatcctacttaataacttggagagctaattcatgaactccacttttttttttttcttygttgctaacagttattactaacattaacttcttggcttttggaaaaggcagaacatttcctcatgctccactgtggttactttttcagccaatggagacctgttattctacacaatcacttaaaatattatacagtattacattaaaactctaatttgtacaaagtgtcgctttgttttcaaatgaaagactgaggaacacaaacactcttcaagtggcaataaacatgcagggaaaagctgagacccaatacaaaggaattaattgagtttattccagatggttcttctcacttagaat

SEQ ID NO: 72687 - DNA, 600 bp, Chicken  19866894352953_2
caacaatctctggattacgaatttaactaaacaaatgggtttgaaaccgtcaatgtattgaatgggtttacaaaggcacttccctacccggaataggaaatgacgatctgcagcctagagggaggttggagaagaatgctcatgaactactgcacaatctcaactttaagaaaaaataagcaggatttaatcaaacatttataggattcaatgtgatccacttcttaaagagttcacacagtctcatctttgtttttctgttgcttttcctggctctctcgctctgtactttggctcctycgacgatcgtgtttgtctgaatggtccttgctatcactgtgatcatgtttgtggggaacgttctttgcttctactacgctttctagatctttctttactgggactgtggtctcgttttcttgacttctcaacactatctggtcttcctctgcttctgcttctacttcgtttatttgatttctctttactttcacttttatgcttacttgatttctctttgctcctgctcctgctgcgcttacctgtattcttacttcggcttctactcctatgctttctttcccggcttcgacttctgct

SEQ ID NO: 72688 - DNA, 600 bp, Chicken  19866894352953_3
tctttcgatctttctctagatcgatcgctatctttttctctctcactacctctatccttatcataatctctctctttttttcggctgcgttcattttctttctctcgctccctatccctatctcttctctctcctttcctgtcacgacttcgactacggcttctatatcgttccctgcttctgcttcgtctcctttctagtgcacgatcggtacttcgagacctacgcctctctttttccctctctttagcttcacgttccaatctctgacgttctctttctctttcaagttctctgtcraaactggatgacccgtgggcttcccgatgatgacttctgcttctggatcttctgggagacctcctgggactgagggatcgtcttggagacctttcaaaataaagggtattcaatatgaaacaacagttttccaagtgaagggaacccatctactctccaatgtatgctttacatacacaacctctatttcatcttaaataccaggtagcctacaagatagcagtaatgtcagattttatccattaacatccataaaccaattgccctagaagccatcttactgaaagatgacttagttct

SEQ ID NO: 72689 - DNA, 599 bp, Chicken  19866894352958_1
  misc_feature (1)..(44): n is any nucleotide
nnnnnnnnnnnnnnnnnnnnnnnnnnnnnnnnnnnnnnnnnnnntaagtccttcagcctccctgtgatgccatatttagcagcacactgttcgtgctaatgtgcttttacaatattaattttcacgctgagggaatgttcaccgttactatagtccctctttcagcagtattcgagactgatcccctctgacttttctgcagtggtctttcagatagatatttatacatattatcatatcatcatagaatcatagaatcacaaggctggaaaggacctacaagatcatctagtccaaccrtcctcccattaccattgctaccacaagccactcaaccgtatctcgtagctcctcatcctcttaaacactgccagggacggcgactccaccacctctctgggcaggccattccagtgcctgaccactctctgagagaagaagcttttccttatrtctaatccaaacctcctctggtgcaacttgtggccatttcctcaggtcctgtttgttgcctgggagaagaggccaaacccctcctcatcacaacctcccttcaggaagttgyagagtgcactgaggtctyccttgagccccctctt

SEQ ID NO: 72690 - DNA, 600 bp, Chicken  19866894352958_2
tccctctttcagcagtattcgagactgatcccctctgacttttctgcagtggtctttcagatagatatttatacatattatcatatcatcatagaatcatagaatcacaaggctggaaaggacctacaagatcatctagtccaaccrtcctcccattaccattgctaccacaagccactcaaccgtatctcgtagctcctcatcctcttaaacactgccagggacggcgactccaccacctctctgggcaggccattccagtgcctgaccactctctgagagaagaagcttttccttatrtctaatccaaacctcctctggtgcaacttgtggccatttcctcaggtcctgtttgttgcctgggagaagaggccaaacccctcctcatcacaacctcccttcaggaagttgyagagtgcactgaggtctyccttgagccccctcttctccagactaagcaatcccagctccctcagcagctcctcataaggcccrtgctccagacccctcaccagttttgttgcttttctctggacacgttccagggcctcaatgtctttcttgtagtgaggggctcaaaactgagcacagtactcaagr

SEQ ID NO: 72691 - DNA, 600 bp, Chicken  19866894352958_3
ctggaaaggacctacaagatcatctagtccaaccrtcctcccattaccattgctaccacaagccactcaaccgtatctcgtagctcctcatcctcttaaacactgccagggacggcgactccaccacctctctgggcaggccattccagtgcctgaccactctctgagagaagaagcttttccttatrtctaatccaaacctcctctggtgcaacttgtggccatttcctcaggtcctgtttgttgcctgggagaagaggccaaacccctcctcatcacaacctcccttcaggaagttgyagagtgcactgaggtctyccttgagccccctcttctccagactaagcaatcccagctccctcagcagctcctcataaggcccrtgctccagacccctcaccagttttgttgcttttctctggacacgttccagggcctcaatgtctttcttgtagtgaggggctcaaaactgagcacagtactcaagrtgcggcctcaccagcgctgagtacaggggcatgattacctccctgctcctgctggccacagtatttctaatgcaggccaggatggcattggtcctcttggcaacctgggctc

SEQ ID NO: 72692 - DNA, 600 bp, Chicken  19866894352958_4
atcatctagtccaaccrtcctcccattaccattgctaccacaagccactcaaccgtatctcgtagctcctcatcctcttaaacactgccagggacggcgactccaccacctctctgggcaggccattccagtgcctgaccactctctgagagaagaagcttttccttatrtctaatccaaacctcctctggtgcaacttgtggccatttcctcaggtcctgtttgttgcctgggagaagaggccaaacccctcctcatcacaacctcccttcaggaagttgyagagtgcactgaggtctyccttgagccccctcttctccagactaagcaatcccagctccctcagcagctcctcataaggcccrtgctccagacccctcaccagttttgttgcttttctctggacacgttccagggcctcaatgtctttcttgtagtgaggggctcaaaactgagcacagtactcaagrtgcggcctcaccagcgctgagtacaggggcatgattacctccctgctcctgctggccacagtatttctaatgcaggccaggatggcattggtcctcttggcaacctgggctcactgtcagcccatgttga

SEQ ID NO: 72693 - DNA, 600 bp, Chicken  19866894352958_5
ctcctcatcctcttaaacactgccagggacggcgactccaccacctctctgggcaggccattccagtgcctgaccactctctgagagaagaagcttttccttatrtctaatccaaacctcctctggtgcaacttgtggccatttcctcaggtcctgtttgttgcctgggagaagaggccaaacccctcctcatcacaacctcccttcaggaagttgyagagtgcactgaggtctyccttgagccccctcttctccagactaagcaatcccagctccctcagcagctcctcataaggcccrtgctccagacccctcaccagttttgttgcttttctctggacacgttccagggcctcaatgtctttcttgtagtgaggggctcaaaactgagcacagtactcaagrtgcggcctcaccagcgctgagtacaggggcatgattacctccctgctcctgctggccacagtatttctaatgcaggccaggatggcattggtcctcttggcaacctgggctcactgtcagcccatgttgagccaagcatcaaccaacacccccaggtccctttcctcttcacagtaatccagccactcagcccca

SEQ ID NO: 72694 - DNA, 600 bp, Chicken  19866894352958_6
tctaatccaaacctcctctggtgcaacttgtggccatttcctcaggtcctgtttgttgcctgggagaagaggccaaacccctcctcatcacaacctcccttcaggaagttgyagagtgcactgaggtctyccttgagccccctcttctccagactaagcaatcccagctccctcagcagctcctcataaggcccrtgctccagacccctcaccagttttgttgcttttctctggacacgttccagggcctcaatgtctttcttgtagtgaggggctcaaaactgagcacagtactcaagrtgcggcctcaccagcgctgagtacaggggcatgattacctccctgctcctgctggccacagtatttctaatgcaggccaggatggcattggtcctcttggcaacctgggctcactgtcagcccatgttgagccaagcatcaaccaacacccccaggtccctttcctcttcacagtaatccagccactcagccccaagcctacagcgctgcatggggttactgtggccaaagtgcaggacctgacacttggcctttctacagatgaaagaggcaataatcattcctgtctggatggcatca

SEQ ID NO: 72695 - DNA, 600 bp, Chicken  19866894352969_1
ggtgtcgtttgattctggacagagcttcatgaggattatcataagcctgttcaatcaagcccagctcctccctctgtgactgattcaggcgagatttcacactggaagtgagaaagaacaaccgtttgtgcactcaagcatgaacaaactaatatctgctgcattgaactgacgaaagataagtgttcaaccaagcagctcaagacaagatctctaattcttcacaattcacagtcagtcccaattggcagagtccatgaagaatgcccaggcagccttggcagtaccatatcccatagyatcaccctgcctattctgggtaagtgttacagtgtactcaattccaggaataatggataacaaaatagtttcagaagcctttcccagagcagatgtttgacccttgagagaaactagtcacttcccagtgcttacctgtaagcttccttcagcctctccagggccaatatgagcaacttggtatcgtgcttgtaggacaatggggggaatggaatgggtgagaacctcctgctttccagccagtgcactgtggttgtgtacacagcaacagcctcttctgcggtgatgtaaggcccatcc

SEQ ID NO: 72696 - DNA, 600 bp, Chicken  19866894352970_1
ccctgatgccctttgggtgatttctcattttagaaagcctcggtgttggcagtcactggaggaaatgtgctgttgtctccttggccatgaagggtggaaggttcgtcagatgctctctgcttctgcagcagtgaatgagctccgaggcagcaagccaacaaatggatttcacagagcaaggagcgaggaacaagactggaaatgctgttggttgttaaaggtttccctgcattcccaaaaggaaaagaagtggtcattctctgtatgctttggatctgagcagtcttcttgttctctttracatttgcatcatcacttatgtagttgtttttaaactcactcaggtttcatatatgttttatttcagactkaagtgaccaaagtgtgagtattttacagcccctccaaggctgttgctgacgtacaggcactaggatgacctccaaccatcagtggtgttgcacaaagcatttggagatctgctcagtgaatgcatctcgttatctgtcgtaggtagaaatgaaattaaacatactaatcttcattagggcaaagaattgtctgctgtgtctgtttcttgttgctccgtgtcgtattaat

SEQ ID NO: 72697 - DNA, 600 bp, Chicken  19866894352970_2
gttgtctccttggccatgaagggtggaaggttcgtcagatgctctctgcttctgcagcagtgaatgagctccgaggcagcaagccaacaaatggatttcacagagcaaggagcgaggaacaagactggaaatgctgttggttgttaaaggtttccctgcattcccaaaaggaaaagaagtggtcattctctgtatgctttggatctgagcagtcttcttgttctctttracatttgcatcatcacttatgtagttgtttttaaactcactcaggtttcatatatgttttatttcagactkaagtgaccaaagtgtgagtattttacagcccctccaaggctgttgctgacgtacaggcactaggatgacctccaaccatcagtggtgttgcacaaagcatttggagatctgctcagtgaatgcatctcgttatctgtcgtaggtagaaatgaaattaaacatactaatcttcattagggcaaagaattgtctgctgtgtctgtttcttgttgctccgtgtcgtattaatcgttgacttccatgctgctgctgctctcgggatgctcagtcggtggcatctgtccttcctcaccactcggg

SEQ ID NO: 72698 - DNA, 505 bp, Chicken  19866894352970_3
gtggtgttgcacaaagcatttggagatctgctcagtgaatgcatctcgttatctgtcgtaggtagaaatgaaattaaacatactaatcttcattagggcaaagaattgtctgctgtgtctgtttcttgttgctccgtgtcgtattaatcgttgacttccatgctgctgctgctctcgggatgctcagtcggtggcatctgtccttcctcaccactcggggtgctgggggccgtcctgccccattgcaggaatgatataaaacatcaatctggctgaagatttttagctaaacatcattcygtggatagcagtgcagctctgggttscagtgtgcaccctgtgatggctgggctgggcccatatgcggcatgccragctggcatatggaaaccacatggatgttttacgtggtttcccagcacgtggtatcccatctcctgggctgcagcctggcacagtagcacggtgctgagtgtgctgaggctctgcagtgctctgtgcctta

SEQ ID NO: 72699 - DNA, 479 bp, Chicken  19866894352970_4
tctgctcagtgaatgcatctcgttatctgtcgtaggtagaaatgaaattaaacatactaatcttcattagggcaaagaattgtctgctgtgtctgtttcttgttgctccgtgtcgtattaatcgttgacttccatgctgctgctgctctcgggatgctcagtcggtggcatctgtccttcctcaccactcggggtgctgggggccgtcctgccccattgcaggaatgatataaaacatcaatctggctgaagatttttagctaaacatcattcygtggatagcagtgcagctctgggttscagtgtgcaccctgtgatggctgggctgggcccatatgcggcatgccragctggcatatggaaaccacatggatgttttacgtggtttcccagcacgtggtatcccatctcctgggctgcagcctggcacagtagcacggtgctgagtgtgctgaggctctgcagtgctctgtgcctta

SEQ ID NO: 72700 - DNA, 431 bp, Chicken  19866894352970_5
taaacatactaatcttcattagggcaaagaattgtctgctgtgtctgtttcttgttgctccgtgtcgtattaatcgttgacttccatgctgctgctgctctcgggatgctcagtcggtggcatctgtccttcctcaccactcggggtgctgggggccgtcctgccccattgcaggaatgatataaaacatcaatctggctgaagatttttagctaaacatcattcygtggatagcagtgcagctctgggttscagtgtgcaccctgtgatggctgggctgggcccatatgcggcatgccragctggcatatggaaaccacatggatgttttacgtggtttcccagcacgtggtatcccatctcctgggctgcagcctggcacagtagcacggtgctgagtgtgctgaggctctgcagtgctctgtgcctta

SEQ ID NO: 72701 - DNA, 600 bp, Chicken  19866894352973_1
tcttctagcttaaagaggaaggaaattctatgtattttcacctactggcatgattataatacatggttactagcatggatggagacgattgctcctagcaatttttttaataagcaattacataatctgtagatgaaataaatcaactagtgcaattacacttacttgatgattgctaagtggttagggttggtatcatggacatcgctgctggtaacatcacaattgtatcattcagacaaattccagataaaacagattttcttcagaaacatgtttctgaataagctacacacaagrgaaaaaaaaatagctatcaaataaaaayacactgtagtgcagtcacytcacctgctttccatgctgagttgctcaagacacaattttagggaaactgtaggatgtctagtcctcgtgttgatagcttgtgtgtaagcacatgagaatcatgtgtattcactgcgacctgtaaaaaaattcctttacattacatctaatagccctacttcttttttgctctaacatcactgcaatgaacattgcagaacagtctcacgttttcacaagtcttagtaaagttaataaatgcctgcaaaacac

SEQ ID NO: 72702 - DNA, 600 bp, Chicken  19866894352973_2
tatgtattttcacctactggcatgattataatacatggttactagcatggatggagacgattgctcctagcaatttttttaataagcaattacataatctgtagatgaaataaatcaactagtgcaattacacttacttgatgattgctaagtggttagggttggtatcatggacatcgctgctggtaacatcacaattgtatcattcagacaaattccagataaaacagattttcttcagaaacatgtttctgaataagctacacacaagrgaaaaaaaaatagctatcaaataaaaayacactgtagtgcagtcacytcacctgctttccatgctgagttgctcaagacacaattttagggaaactgtaggatgtctagtcctcgtgttgatagcttgtgtgtaagcacatgagaatcatgtgtattcactgcgacctgtaaaaaaattcctttacattacatctaatagccctacttcttttttgctctaacatcactgcaatgaacattgcagaacagtctcacgttttcacaagtcttagtaaagttaataaatgcctgcaaaacacttcagcctagaacttcaaataacaccag

SEQ ID NO: 72703 - DNA, 600 bp, Chicken  19866894352973_3
gcatgattataatacatggttactagcatggatggagacgattgctcctagcaatttttttaataagcaattacataatctgtagatgaaataaatcaactagtgcaattacacttacttgatgattgctaagtggttagggttggtatcatggacatcgctgctggtaacatcacaattgtatcattcagacaaattccagataaaacagattttcttcagaaacatgtttctgaataagctacacacaagrgaaaaaaaaatagctatcaaataaaaayacactgtagtgcagtcacytcacctgctttccatgctgagttgctcaagacacaattttagggaaactgtaggatgtctagtcctcgtgttgatagcttgtgtgtaagcacatgagaatcatgtgtattcactgcgacctgtaaaaaaattcctttacattacatctaatagccctacttcttttttgctctaacatcactgcaatgaacattgcagaacagtctcacgttttcacaagtcttagtaaagttaataaatgcctgcaaaacacttcagcctagaacttcaaataacaccagtcagaggagcttactgaaa

SEQ ID NO: 72704 - DNA, 600 bp, Chicken  19866894352974_1
tatcctgtttgaaacatgaccaaaaaaactcttagtatttcttgtaagtcgctgaagtgctgcctaccactatgctaaaaatattacagaatcttttctgcacaaatgagaaatcagtgtaagacaataaatgagaccaaaactcccagctgctctgataggaatatatgccatgacaaaaccgttgttctctgggggaagctgttggaggggaaaggcctaatacccattccctcctcaagtttcttagtttttttcagcagttaagtatgtatgacaatttttgaaggtgtactgtarcatcaagtgttttttgttgttgtttgtttgtttttagtcaacattgtatawgctttaaatcagtttctagcagtaatcaacttaaccatggtgactctctttacaatacattttgtagtaaccatgaccatatttttttgttaattgaaagatacgatactgagtaatgtattttaaaaaatagaagaggtaaagtgagaagggtattgaagatggcctgttatcacagggcagaaggagacttgaaagctgatgaaaaatagatgaagaagaagggtgcaaggggatgcacttacttaa

SEQ ID NO: 72705 - DNA, 600 bp, Chicken  19866894352974_2
ctgaagtgctgcctaccactatgctaaaaatattacagaatcttttctgcacaaatgagaaatcagtgtaagacaataaatgagaccaaaactcccagctgctctgataggaatatatgccatgacaaaaccgttgttctctgggggaagctgttggaggggaaaggcctaatacccattccctcctcaagtttcttagtttttttcagcagttaagtatgtatgacaatttttgaaggtgtactgtarcatcaagtgttttttgttgttgtttgtttgtttttagtcaacattgtatawgctttaaatcagtttctagcagtaatcaacttaaccatggtgactctctttacaatacattttgtagtaaccatgaccatatttttttgttaattgaaagatacgatactgagtaatgtattttaaaaaatagaagaggtaaagtgagaagggtattgaagatggcctgttatcacagggcagaaggagacttgaaagctgatgaaaaatagatgaagaagaagggtgcaaggggatgcacttacttaattgtggcagtagagtgtgaacatgtagcttccaaggtgaggtccccaaaat

SEQ ID NO: 72706 - DNA, 600 bp, Chicken  19866894352982_1
ttaccatttgggggagccttcatacagtgccataaacaaaatgtggagattccacaatttctgtgcagccacaccatggcacatgcagctgtaccacacaaagcaaagacagacccaaacgtacaacagtcgtcttccataatgccctgggatgtgaaaagcatggaagcgtccaatgtgtgataagcaaatcagagaaggaaaagttggtgtttggaaagataaattgtgtactttttgctttttttcagttgtgtctgctttctgtgtccttactttagtcgaagcaaaaatgtgtcrttccccactctccaagtcagcctttacagcctgcaagagctttcttaggagtcatccaagtgccacagaatcagtacattttccagcaaatgactcacttttttaatcccctgtgtgtaactgtagggcacagaaaacacgtgcgtttatattgtttctggttggctgtgcagctagaaattgtactgctgtgacttcatcctcaccaagggacttgctgttacagcaggctgatcatcatgttttagtcatgccaaaagggaaaacctgtgcgtggctacttaaggcaatcactgaacc

SEQ ID NO: 72707 - DNA, 600 bp, Chicken  19866894352985_1
ttccttcttacctctccctctctatctcatactttttcctttttgaagcagaatgtcagtgtggatgagttcatcttatcaaactgtcaactccactgatagtcagtggaaagaagtaaggattaacaggggcaaaaagtatttcttattttataataggttagaccaatgtatcttgtgtgtggattttcctttctattggaattaagattaatcctctcagatgtgtgtcactgatattttaagttaagtaaaagggtatcaccaaagatcagagtgatcatagccagaaagaattaygttgccactgtctcacattaatagaagctactcctatatctcttcatcatccttctcatattcagtttcccctaccaaaaactgtgttggctttggtgtttccccaytttcaatgtttttattaacagacacagcatatggggacattgcttttcttctttttttgcagcatactgcgtgtgcatggatcagaaagtttcaaactctgaagctgctcttcaaacattaaaacagttaaagtactgagcacctcacggttaggtccgctatcaccgttaggtctgttatcacagatttcag

SEQ ID NO: 72708 - DNA, 594 bp, Chicken  19866894352985_2
ggaaagaagtaaggattaacaggggcaaaaagtatttcttattttataataggttagaccaatgtatcttgtgtgtggattttcctttctattggaattaagattaatcctctcagatgtgtgtcactgatattttaagttaagtaaaagggtatcaccaaagatcagagtgatcatagccagaaagaattaygttgccactgtctcacattaatagaagctactcctatatctcttcatcatccttctcatattcagtttcccctaccaaaaactgtgttggctttggtgtttccccaytttcaatgtttttattaacagacacagcatatggggacattgcttttcttctttttttgcagcatactgcgtgtgcatggatcagaaagtttcaaactctgaagctgctcttcaaacattaaaacagttaaagtactgagcacctcacggttaggtccgctatcaccgttaggtctgttatcacagatttcagacagcagaaacagagaaaatgcttgtttactgtcttttcattttttaaattcagattaacttattgtcctctgttatgttgaatgccatcaatgttcccca

SEQ ID NO: 72709 - DNA, 600 bp, Chicken  19866894352988_1
cattggaggtattccctgtgcatcatccaggtggcattttgtgaggaaagctaatttctagaaagtttttcaggtaacacagaaaacttacttggttattcctgaaaatatcattgcggtgttacagttatattaggaactgctctggaaatatactttcaataaatctgtggaggaccttcctgaactcttagctgtagcctcattcccccctaaaacaagtgatagctgcaattaacaaattgacaaatcttgcttagagctgcaaaattgagggagattcacttagcacatgcatcrtaagaatttcttctatacaatggctttctttttttttgttaggacaaattagggtcaaagcattattctcagcacaaaacacatggcatttttaggagctcagcaaacagaagcagctaacagtgtcagcttgctttgaaaacaaacaaaataaagctgtccgattaccacacggtgcaattcaaacagtccttaagagtgtggaaatgtgagctggcaggaaygcacttcagcaagggaaattctcatttattaaaaagaagaacttctttgcagtggagaaagaagakgctgcccagt

SEQ ID NO: 72710 - DNA, 600 bp, Chicken  19866894352988_2
atagctgcaattaacaaattgacaaatcttgcttagagctgcaaaattgagggagattcacttagcacatgcatcrtaagaatttcttctatacaatggctttctttttttttgttaggacaaattagggtcaaagcattattctcagcacaaaacacatggcatttttaggagctcagcaaacagaagcagctaacagtgtcagcttgctttgaaaacaaacaaaataaagctgtccgattaccacacggtgcaattcaaacagtccttaagagtgtggaaatgtgagctggcaggaaygcacttcagcaagggaaattctcatttattaaaaagaagaacttctttgcagtggagaaagaagakgctgcccagtagttacagaatttacacccttggaggctgtccagactcactgagaaacctaattctgaagtttgcagaaacagaaagcagatgacatccaaaggtctcatctaacctaagttactttgcaagcctgtggctatcagagttatcagcttaacgcctgtggttgatttattgtatccagcaaacagcttacaccaaggtttcaacttcttacttaaggaaacctaa

SEQ ID NO: 72711 - DNA, 600 bp, Chicken  19866894352988_3
acatgcatcrtaagaatttcttctatacaatggctttctttttttttgttaggacaaattagggtcaaagcattattctcagcacaaaacacatggcatttttaggagctcagcaaacagaagcagctaacagtgtcagcttgctttgaaaacaaacaaaataaagctgtccgattaccacacggtgcaattcaaacagtccttaagagtgtggaaatgtgagctggcaggaaygcacttcagcaagggaaattctcatttattaaaaagaagaacttctttgcagtggagaaagaagakgctgcccagtagttacagaatttacacccttggaggctgtccagactcactgagaaacctaattctgaagtttgcagaaacagaaagcagatgacatccaaaggtctcatctaacctaagttactttgcaagcctgtggctatcagagttatcagcttaacgcctgtggttgatttattgtatccagcaaacagcttacaccaaggtttcaacttcttacttaaggaaacctaagggcttacaagattgatttataattgcttagagattttaaatgcttccagaaagtaccactcacat

SEQ ID NO: 72712 - DNA, 600 bp, Chicken  19866894352989_1
tttaaagcacggaaagcacagcgcgcggccgccggcggggacagcccgcagctctccagctgcagcagcaccgccgccgcctccccccgacgcacccaccgtggggatgcaaaacccaccccgagcagctgggcctggccccacagctcacccagcccgggggtgtgagcaccacccctgcgcccctccccggctgcgcccgctgacacggagcggcggcgtgggctcaccttcttggcagacagtgccagcttcttggctgggggcggtgatgtggtgctgcccggctccagcgcggcrgatttcagctttgccagcctggagccctcggggagatccgcgccacagtccgtgtcctgaggggggctgaggccgcccgccccgctcttggccttcggggctgctttggctgcatcccccgctgcggtgtgtgcggggctgggggctgcgctgccgcaggagccgcgctgtggggtgcccgggctgggcgaggtgggggaccgcgtgccgtccccggggctctgctggggtggatgtgcagcgccggagctgcacgggcccggggacgctttcggtgccggaggccgctgtggggatggc

SEQ ID NO: 72713 - DNA, 600 bp, Chicken  19866894353004_1
ttcagatatataacacttatcccatacttcatttatcaacctacatgtaaattacctgaacaaaatcagaaataatttgggaaaaaggatcatatcatataaaagctctgaaaaattctacagttctatcaacatgcaaaattattgaagagataggggaaataaaggagtgaatccaatatcaactaataataaagctccttacccagtctactttttgcagtgaggactgtactgaagtatgtatggattctttacttataagactgtatcataagaaacgttaatttgtatcttaamtcaaaagataaaacctacagcagaatttggaaagcagagtatcaaaaatactatacaagaactagattcttacttgtgttactccttcgcctatacatttctttaatgtcattagaacagttatatattcttatcataaccrtagagccaaaagaaaaaaatcctattcaacaagsgacagagtttctaaaatcagagaatgcataggaratgaaactgtgtccttcctagttcatagtggaaaaatccacaccctcagtggatttaattttagggcactccttctctccttgccaactg

SEQ ID NO: 72714 - DNA, 600 bp, Chicken  19866894353004_2
tattgaagagataggggaaataaaggagtgaatccaatatcaactaataataaagctccttacccagtctactttttgcagtgaggactgtactgaagtatgtatggattctttacttataagactgtatcataagaaacgttaatttgtatcttaamtcaaaagataaaacctacagcagaatttggaaagcagagtatcaaaaatactatacaagaactagattcttacttgtgttactccttcgcctatacatttctttaatgtcattagaacagttatatattcttatcataaccrtagagccaaaagaaaaaaatcctattcaacaagsgacagagtttctaaaatcagagaatgcataggaratgaaactgtgtccttcctagttcatagtggaaaaatccacaccctcagtggatttaattttagggcactccttctctccttgccaactgttctcaggaagataaaaaggccctttagcccttcatcccactttttcttttktaggcacagaactgaccagaaagggaagacacatagcacagtaatgtggctcaccaaattaggtgctacaaaatctctctaaaagaacaa

SEQ ID NO: 72715 - DNA, 600 bp, Chicken  19866894353004_3
ggggaaataaaggagtgaatccaatatcaactaataataaagctccttacccagtctactttttgcagtgaggactgtactgaagtatgtatggattctttacttataagactgtatcataagaaacgttaatttgtatcttaamtcaaaagataaaacctacagcagaatttggaaagcagagtatcaaaaatactatacaagaactagattcttacttgtgttactccttcgcctatacatttctttaatgtcattagaacagttatatattcttatcataaccrtagagccaaaagraaaaaatcctattcaacaagsgacagagtttctaaaatcagagaatgcataggaratgaaactgtgtccttcctagttcatagtggaaaaatccacaccctcagtggatttaattttagggcactccttctctccttgccaactgttctcaggaagataaaaaggccctttagcccttcatcccactttttcttttktaggcacagaactgaccagaaagggaagacacatagcacagtaatgtggctcaccaaattaggtgctacaaaatctctctaaaagaacaaaaatagcactgca

SEQ ID NO: 72716 - DNA, 600 bp, Chicken  19866894353004_4
caatatcaactaataataaagctccttacccagtctactttttgcagtgaggactgtactgaagtatgtatggattctttacttataagactgtatcataagaaacgttaatttgtatcttaamtcaaaagataaaacctacagcagaatttggaaagcagagtatcaaaaatactatacaagaactagattcttacttgtgttactccttcgcctatacatttctttaatgtcattagaacagttatatattcttatcataaccrtagagccaaaagaaaaaaatcctattcaacaagsgacagagtttctaaaatcagagaatgcataggaratgaaactgtgtccttcctagttcatagtggaaaaatccacaccctcagtggatttaattttagggcactccttctctccttgccaactgttctcaggaagataaaaaggccctttagcccttcatcccactttttcttttktaggcacagaactgaccagaaagggaagacacatagcacagtaatgtggctcaccaaattaggtgctacaaaatctctctaaaagaacaaaaatagcactgcattcctccaaaatattagtata

SEQ ID NO: 72717 - DNA, 600 bp, Chicken  19866894353004_5
ctactttttgcagtgaggactgtactgaagtatgtatggattctttacttataagactgtatcataagaaacgttaatttgtatcttaamtcaaaagataaaacctacagcagaatttggaaagcagagtatcaaaaatactatacaagaactagattcttacttgtgttactccttcgcctatacatttctttaatgtcattagaacagttatatattcttatcataaccrtagagccaaaagaaaaaaatcctattcaacaagsgacagagtttctaaaatcagagaatgcataggaratgaaactgtgtccttcctagttcatagtggaaaaatccacaccctcagtggatttaattttagggcactccttctctccttgccaactgttctcaggaagataaaaaggccctttagcccttcatcccactttttcttttktaggcacagaactgaccagaaagggaagacacatagcacagtaatgtggctcaccaaattaggtgctacaaaatctctctaaaagaacaaaaatagcactgcattcctccaaaatattagtataaagtaagaaacaacccaaaccaattaatattaag

SEQ ID NO: 72718 - DNA, 600 bp, Chicken  19866894353004_6
atacaagaactagattcttacttgtgttactccttcgcctatacatttctttaatgtcattagaacagttatatattcttatcataaccrtagagccaaaagaaaaaaatcctattcaacaagsgacagagtttctaaaatcagagaatgcataggaratgaaactgtgtccttcctagttcatagtggaaaaatccacaccctcagtggatttaattttagggcactccttctctccttgccaactgttctcaggaagataaaaaggccctttagcccttcatcccactttttcttttktaggcacagaactgaccagaaagggaagacacatagcacagtaatgtggctcaccaaattaggtgctacaaaatctctctaaaagaacaaaaatagcactgcattcctccaaaatattagtataaagtaagaaacaacccaaaccaattaatattaagaaactgtttttgcactgttctctacaaggaaggccatccttatgcccattttattcacacataaagagtttcctgatgttttaaaaaatctctttctatatgttggaaaatgttttctttcattgtaaagttttcagatttt

SEQ ID NO: 72719 - DNA, 600 bp, Chicken  19866894353006_1
tgatatgtctgagcatcgatttttatttgcgtgttcatggattaatttattttttaacagtgaaactaattatctttgtatatgtataaacctgtgttgctctactattattttttatttcccgagagttttatctataacctacatagatcatcttccaaaacaatatgcttaagatgagtaatccacggagtatattcagaattgaacgctcagttcctcagttatggactgacaaacgtgttcccacaggcaacttattaggccttttgatacaaaatgggaagcgtcacaaagtamgtttataaaaaggagcactgtgctgcacagagactgtttcagacgctctgagattcttatccaacaccgtggaacatgttctggagtcacatcctttccgtgcattgtgtttactttagaggatgcgataacaccgtcattacgttacacaagagcatacaataataactagagctagctaggaagtaaaatttttattctacaggaagttccagcttgtcaatattttgtttcatcaaacacaggaacaaaatgcattggctctgcagcctttctggcaaaaatggaacaatctatttc

SEQ ID NO: 72720 - DNA, 600 bp, Chicken  19866894353006_2
ttactttagaggatgcgataacaccgtcattacgttacacaagagcatacaataataactagagctagctaggaagtaaaatttttattctacaggaagttccagcttgtcaatattttgtttcatcaaacacaggaacaaaatgcattggctctgcagcctttctggcaaaaatggaacaatctatttctttgccagctgtcatgcctggggagccaagaaaccaactgagctgttggcgtattgccagggagagggagggcggagagtggggatcagctccgccagtcagctgagctraagtaaacagccagcttggctggattgctggccagctgccacagccatatcacggcttcagcttctgtcagaaagtcttgatggaaccactactagccagcacttccactgccaatctgctcgattggaaaatgctcaaacagcctccggataactgactactgtcagaaagggagtgcaactgtccttcactttggattacttatggatttcttcwactttgacttgtgttttatgcaccttcccccgcccctyaagaatgtgagcttatgaatgaatgtragcaatgaatttttcctt

SEQ ID NO: 72721 - DNA, 592 bp, Chicken  19866894353006_3
aagaaaccaactgagctgttggcgtattgccagggagagggagggcggagagtggggatcagctccgccagtcagctgagctraagtaaacagccagcttggctggattgctggccagctgccacagccatatcacggcttcagcttctgtcagaaagtcttgatggaaccactactagccagcacttccactgccaatctgctcgattggaaaatgctcaaacagcctccggataactgactactgtcagaaagggagtgcaactgtccttcactttggattacttatggatttcttcwactttgacttgtgttttatgcaccttcccccgcccctyaagaatgtgagcttatgaatgaatgtragcaatgaatttttccttagagaagtgatggtgctcaggcccgtgagggattattcagggtgttctttgttgctactttcatagttagaattatatgaataatattgcatgctgggagtacctactaatatctgtttctgtatgcctgctaaccagaaggtactgctactgtggacacctcactgtgagattgaaacgaactcttacaactgttgtcggatatacag

SEQ ID NO: 72722 - DNA, 554 bp, Chicken  19866894353006_4
gggagggcggagagtggggatcagctccgccagtcagctgagctraagtaaacagccagcttggctggattgctggccagctgccacagccatatcacggcttcagcttctgtcagaaagtcttgatggaaccactactagccagcacttccactgccaatctgctcgattggaaaatgctcaaacagcctccggataactgactactgtcagaaagggagtgcaactgtccttcactttggattacttatggatttcttcwactttgacttgtgttttatgcaccttcccccgcccctyaagaatgtgagcttatgaatgaatgtragcaatgaatttttccttagagaagtgatggtgctcaggcccgtgagggattattcagggtgttctttgttgctactttcatagttagaattatatgaataatattgcatgctgggagtacctactaatatctgtttctgtatgcctgctaaccagaaggtactgctactgtggacacctcactgtgagattgaaacgaactcttacaactgttgtcggatatacag

SEQ ID NO: 72723 - DNA, 527 bp, Chicken  19866894353006_5
cgccagtcagctgagctraagtaaacagccagcttggctggattgctggccagctgccacagccatatcacggcttcagcttctgtcagaaagtcttgatggaaccactactagccagcacttccactgccaatctgctcgattggaaaatgctcaaacagcctccggataactgactactgtcagaaagggagtgcaactgtccttcactttggattacttatggatttcttcwactttgacttgtgttttatgcaccttcccccgcccctyaagaatgtgagcttatgaatgaatgtragcaatgaatttttccttagagaagtgatggtgctcaggcccgtgagggattattcagggtgttctttgttgctactttcatagttagaattatatgaataatattgcatgctgggagtacctactaatatctgtttctgtatgcctgctaaccagaaggtactgctactgtggacacctcactgtgagattgaaacgaactcttacaactgttgtcggatatacag

SEQ ID NO: 72724 - DNA, 600 bp, Chicken  19866894353008_1
tggtacacatagcgtgggcaggctgtctgccctttccattgcattgcaggtaattatgctgtttgcctaaaatctcagccttcatgtagctcagcttgaaagctgcccgagattgcttctttctgcagttaggttctgtcattctcagtacagtaccagtaaggatgggggggaaaccagatcccactaagaagtgagttatttcttgctatttatatatcagaataactgggatgtttactgctacatttgatatggtagtttctcttctcgagttgtttgtatgatatcagtatccgytgttaaacgtttggttcagaccacatcagaactgggtacattgtgtggtagggtggtggagcctgggaaacactgagggttattctaaacaatatcctgctcttttgcagagtcttaatttaagggtgctggaatatgtaaaattgccagaaaccaacaaagtcaaaatagccccaagactgctgcttcaggaataagggccttgattctgtgggaatcccatcagtgaaaacaaatgccatctgagctgttgtcttccatctgcatttcccatattcatgttagaagggacttgatgtg

SEQ ID NO: 72725 - DNA, 600 bp, Chicken  19866894353009_1
gcttgctctgccttttgtctgtgcaaaaacaaaagttctatctgctgcccagagaacgtggtgacttcagggcttttctagtgccagcagctaactgcaaacagatggaagtccccagccacatccccatcaatgctgtgtcttaggtaggagggtctgattctgcactttgacattggtgaaatgctcctggtttacagccttgtgtccaggagtgccatctggccatcagcaatcaagttgccttggaagagaaggcaaaaaatccacatgacacttgtgacgtgagtatctccaatrtctagtttcccttagcctcagtaaataaagggtaattgattgcaatgagcaakctggacactcttcaggaagcctcacaggacaaagaagcaaatggcacaatgcttccactcyatttctatctctttaaaacccrcaaagaggactcagcagagctgctgagaactagattttcagccagtagaaagaagattcctaatattctagtttttgtttttactctggattaagactgaagaagtctaagtgtaatgttttcttgtggaatggagagtttggaaagaattgtcagtagatgac

SEQ ID NO: 72726 - DNA, 600 bp, Chicken  19866894353009_2
gaacgtggtgacttcagggcttttctagtgccagcagctaactgcaaacagatggaagtccccagccacatccccatcaatgctgtgtcttaggtaggagggtctgattctgcactttgacattggtgaaatgctcctggtttacagccttgtgtccaggagtgccatctggccatcagcaatcaagttgccttggaagagaaggcaaaaaatccacatgacacttgtgacgtgagtatctccaatrtctagtttcccttagcctcagtaaataaagggtaattgattgcaatgagcaakctggacactcttcaggaagcctcacaggacaaagaagcaaatggcacaatgcttccactcyatttctatctctttaaaacccrcaaagaggactcagcagagctgctgagaactagattttcagccagtagaaagaagattcctaatattctagtttttgtttttactctggattaagactgaagaagtctaagtgtaatgttttcttgtggaatggagagtttggaaagaattgtcagtagatgacaaaattattttttctgttcaaattatcagataattgtgtgcctctgtgtcaga

SEQ ID NO: 72727 - DNA, 600 bp, Chicken  19866894353009_3
ccagccacatccccatcaatgctgtgtcttaggtaggagggtctgattctgcactttgacattggtgaaatgctcctggtttacagccttgtgtccaggagtgccatctggccatcagcaatcaagttgccttggaagagaaggcaaaaaatccacatgacacttgtgacgtgagtatctccaatrtctagtttcccttagcctcagtaaataaagggtaattgattgcaatgagcaakctggacactcttcaggaagcctcacaggacaaagaagcaaatggcacaatgcttccactcyatttctatctctttaaaacccrcaaagaggactcagcagagctgctgagaactagattttcagccagtagaaagaagattcctaatattctagtttttgtttttactctggattaagactgaagaagtctaagtgtaatgttttcttgtggaatggagagtttggaaagaattgtcagtagatgacaaaattattttttctgttcaaattatcagataattgtgtgcctctgtgtcagagtgacttagagccattgtagttccagcaatccaccccatcctgggttttctgtgctgctat

SEQ ID NO: 72728 - DNA, 600 bp, Chicken  19866894353009_4
tgtgtcttaggtaggagggtctgattctgcactttgacattggtgaaatgctcctggtttacagccttgtgtccaggagtgccatctggccatcagcaatcaagttgccttggaagagaaggcaaaaaatccacatgacacttgtgacgtgagtatctccaatrtctagtttcccttagcctcagtaaataaagggtaattgattgcaatgagcaakctggacactcttcaggaagcctcacaggacaaagaagcaaatggcacaatgcttccactcyatttctatctctttaaaacccrcaaagaggactcagcagagctgctgagaactagattttcagccagtagaaagaagattcctaatattctagtttttgtttttactctggattaagactgaagaagtctaagtgtaatgttttcttgtggaatggagagtttggaaagaattgtcagtagatgacaaaattattttttctgttcaaattatcagataattgtgtgcctctgtgtcagagtgacttagagccattgtagttccagcaatccaccccatcctgggttttctgtgctgctattgtggcccatctgtggtaccag

SEQ ID NO: 72729 - DNA, 600 bp, Chicken  19866894353014_1
ttttattctggaattcctcttgactgcaacaaacatagacgatcaattcatgacagaaaatgtaatttaatgcaagtcttgaagctgcctaacggacaaaaaatagccattaatttttattttatcttccctgctgttcttgatggtgccctctgcaatgggccacagctctccctcagacagtgtttgctaccatgggatctttcttgctaagccacagaccggttctgttggtggggcacgggctgcatctccttaaaggcctgcccacacttcagccttgtatcagaatcaaaagarcttcctccggtgtttttggtgccctctgtactcacagctgtccccggacttttggatcatgcttgagaatttgacagagcctcttagggcttcacagagatatcctatctgtagagcctgtcataggatgggagttaagcgagtgactgtttttgcactyggggagacaaaattatgtcctgaagcatggatgagttgtatctggtgttctgggacatattcagcaggccatagactacccactaactgtccttacctagaggctataaacctcactggagctgctagcctgctgcataa

SEQ ID NO: 72730 - DNA, 600 bp, Chicken  19866894353014_2
ggccacagctctccctcagacagtgtttgctaccatgggatctttcttgctaagccacagaccggttctgttggtggggcacgggctgcatctccttaaaggcctgcccacacttcagccttgtatcagaatcaaaagarcttcctccggtgtttttggtgccctctgtactcacagctgtccccggacttttggatcatgcttgagaatttgacagagcctcttagggcttcacagagatatcctatctgtagagcctgtcataggatgggagttaagcgagtgactgtttttgcactyggggagacaaaattatgtcctgaagcatggatgagttgtatctggtgttctgggacatattcagcaggccatagactacccactaactgtccttacctagaggctataaacctcactggagctgctagcctgctgcataatatttatggcagatgcagctcagagaggtgttcacagcacggagctgcaatacatagccatttcaaataggagtatagctgtgagctaatggaaaattagaagcaaaacaaccaagcttcttgttgctgtataagctcagcactgcctgaatctcttctt

SEQ ID NO: 72731 - DNA, 599 bp, Chicken  19866894353020_1
  misc_feature (1)..(170): n is any nucleotide
nnnnnnnnnnnnnnnnnnnnnnnnnnnnnnnnnnnnnnnnnnnnnnnnnnnnnnnnnnnnnnnnnnnnnnnnnnnnnnnnnnnnnnnnnnnnnnnnnnnnnnnnnnnnnnnnnnnnnnnnnnnnnnnnnnnnnnnnnnnnnnnnnnnnnnnnnnnnnnnnnnnnnnnnnnatagtacaaaggaacacagtggcctgaatctaatacatgagtctgggaaagtccacatcccgatgactctaacagagctagcaacctagataccatgaagtgaatcgctgcttctgggggagaagctgcrcacacagcagaattgtttcctatcttttatgaaaaatgaaatgagtgaccaatggaagtcaaaggttcccaagtgttcatgtgtgcgggaaactccgtgggatcggcacaaaacgtgggatcggcacaaaacatcagcattacctattacacagtttttaaagtgcatttcatccacctaataaggtaccgaacaaacaagcagtaacagggactcacaacccaggaaagcatttttaacagcgtcttacacagcaaacagaaatcagaagtcatccgtcccatttctgacttgtacac

SEQ ID NO: 72732 - DNA, 600 bp, Chicken  19866894353032_1
acaccttctcagctctggttttgcatttgtaatgtcctgtaatcaacggatctcagccccactcagtgttgggcccccaaagtttttgagtggcataagagatcttccaagaattcatggctctgtttgctctcttaacctgttaagaactcttagaaatgatctgtggatcctgggagtcattaagcagcagattgaaaacgtgacttgcaattgtttgtgagctgagctcagaggctaagtatttttggctgacttcagagctttggctcttactctcttccttctcttttcccaatrcacacctccatcccaagagatctggagactcccagcccaattttaggcagctaaaacaaactttctctctttctttgtatttttttttttataattgtgctttaggttttctggagcctgaaacacagcgggagggctaggttaatacaaaccaaaagcacacttgctgatctggcatttatgcttaacgtgaacaaaattcctgctaggatgaggtcagtggcatgcaacggtttggaattggctgaggtgtaatggtatgacwgcagctacctgatcttagggacaggtacaggtctg

SEQ ID NO: 72733 - DNA, 600 bp, Chicken  19866894353032_2
agtttttgagtggcataagagatcttccaagaattcatggctctgtttgctctcttaacctgttaagaactcttagaaatgatctgtggatcctgggagtcattaagcagcagattgaaaacgtgacttgcaattgtttgtgagctgagctcagaggctaagtatttttggctgacttcagagctttggctcttactctcttccttctcttttcccaatrcacacctccatcccaagagatctggagactcccagcccaattttaggcagctaaaacaaactttctctctttctttgtarttttttttttataattgtgctttaggttttctggagcctgaaacacagcgggagggctaggttaatacaaaccaaaagcacacttgctgatctggcatttatgcttaacgtgaacaaaattcctgctaggatgaggtcagtggcatgcaacggtttggaattggctgaggtgtaatggtatgacwgcagctacctgatcttagggacaggtacaggtctgggggtctccaagcagaacactgaaaagccaaagtctgcaggctgatgatgaataagcatattttaaagctgctatctgtt

SEQ ID NO: 72734 - DNA, 577 bp, Chicken  19866894353032_3
ttggctcttactctcttccttctcttttcccaatrcacacctccatcccaagagatctggagactcccagcccaattttaggcagctaaaacaaactttctctctttctttgtatttttttttttataattgtgctttaggttttctggagcctgaaacacagcgggagggctaggttaatacaaaccaaaagcacacttgctgatctggcatttatgcttaacgtgaacaaaattcctgctaggatgaggtcagtggcatgcaacggtttggaattggctgaggtgtaatggtatgacwgcagctacctgatcttagggacaggtacaggtctgggggtctccaagcagaacactgaaaagccaaagtctgcaggctgatgatgaataagcatattttaaagctgctatctgttctgtgtatcctgctctaaaacaggtatagcccataggtggtaggaatggcttgctctcagttcagaagaaaatacgtaattcctaatgtgaggaggctctttagaccagtagaggaaaggatgtaacaagatccaacgtctgtgtttatctagcattgattt

SEQ ID NO: 72735 - DNA, 600 bp, Chicken  19866894353033_1
ctctgctgctgttttgcaagcttctgattcctgacttcagcccatagatacacaattctgcaaaagcagatgcctccggtttccaagaatagtttgactgagtatacaattaactaggcaagaaccccaggggttctgcaaatgatgcactgctgtttattatttcacctgtaaacctgataatttcaccaataaacctcatttgctgaggtcctgcagaacaccgagaaaacagagactgtaagcaatgccttgcttgagctcttgattgtgtaccgtaatgttctgctacgttacccrctgcagaaaattaaattatatgcttactccatgaattttctcacctgccaacactggaaagaaggctgttatatataagaagctcatttataccaaaggttatcattaagcacaaactggcaaaagatattgcaattactgttttactggctctcattagcaaaagaaaatagcaagaatatacattactgcttaatattctgtgacttagttcagtaacgtttacttttcttcttgatcttgcaagcaggcaacctaaatgtttttaatttaattgttgatgttttcaatgtaaattca

SEQ ID NO: 72736 - DNA, 600 bp, Chicken  19866894353034_1
tctttttagtgcagccttttactcctgttgtctaaaaattcttacgctaaactattcagaactggaaaacaaaacatgtgaaccaaggtgacttcacggtggccatgtccccacagctggggctgctctggcatagctgagctccttggtccccccagacggagagggaaaggctcgtgtggtcactcagttccagtggggcatttcccaccaaaaacccccacgtacgttgccttgtcttgttttagtgtcttatctactggctgccactgtttcctattctgcagtctaatggagctytatttaacgcattagactggtattgaactaaacttttagctgcagaatgtcatcatgttgttctttcttactgtgtattttcttcagccacgcctaagcatttcagtttccacatcctttgaatatcaaacaacactcctgcctcgcctccagttggaaattataactttaggacacctgtgatccaaactacagcaaacaagacaacgtcaacatgaacatatgctgggggcatatagtccaggtttgcccctaggctttaactttacaggtgtgaaaggatactctgcccgaaggaat

SEQ ID NO: 72737 - DNA, 600 bp, Chicken  19866894353037_1
tccggagtggacttttcttcctagaatcctaggggttggaagggacctttagaggtccccctctccaacttcctgctaagtcaggttccatagagtaggttgcacaggaaagcatccggccgggtaagttttgtatatctccaaagatggagactgcacaacctctctgggcagcctgttctattgttctaacaccctcaaagtaaagaatttctttctcgtggttttgtggaacttcctgtgttcctctttgtgcttattggtctgacctccacaatcagagtggaatttagggttggyttttttttttttcctctgttttggaggataattagaaatggttttagcaacttccagtatggagtctcaggttggtgttagagatgagcagcagccatgttggaaagctctaccagagcagcagcgtagcatggttggctgtgggttttgtctgtagcgctccatccctttcccacagattcccagttcctccgtcaaattcactgtgtattgaataacactatcaatgttaatcctgctccccttgctttttctccaatcttctgggacacaggaggatgaacaagatgtctgtctcgg

SEQ ID NO: 72738 - DNA, 600 bp, Chicken  19866894353037_2; identical to SEQ ID NO: 72737

SEQ ID NO: 72739 - DNA, 600 bp, Chicken  19866894353041_1
gagggttcaatactgacttagtttttttttcatctaactttaaatatctgcctgtttctcttcttggctcaagtaaggctgcatttaaactgataggagaggttattggatggttcatggggcggaatgtgttcaatgtatatgttgcaatagggagccatacttggaatcaggaatttcttctgcgaggatcctgttgcctcttgtatccattcaaaagacaaataagagactacatctgaaagaacagctgccttctgggaaaggagacaccaacatcaatgatatactcctggcatmcagttggaggtgggagtggaatgagtgctacaacagttgctgtgaattgtgaacatttgtgtatatgaacacttgctagggtctcctgagtgcccagcatgcctgattgggaatcatttgtcattactacagtgtattcttactgaagtttttatggttagctaatgtgattaaaagactttacttcaaggttgcatactaagctgtttcagacttagtttaaaaggtagatttaattgtttacttgtttgctttaaatcaaaggacaacagaggattgaaagattattcagtgtcaaaa

SEQ ID NO: 72740 - DNA, 600 bp, Chicken  19866894353043_1
ctctgtttatccttcttctacccaactgcagcaaaccagacgtcaaaatcccagccagtgcagccttacacctcagtgtagctgcacagagctcagttcttcccttgttcgtggcacaactggggcaggaggctgcaggagcccagcagcagaggttagcacaaatcaggatgcagaataagaggtacaaacctgtaaccccacctgtaatccctccagttaaatccgtagcacgccggtctgaagcacaatttgaattgtcttttcctgatggaatgtgagccaaatgagccatcagtrtctctcatttaatgaacttttgattaccaagattatttctgtgtttgcattctagacacatacttttactatggtttgaaatgcaagagcaagtgttctgcaaaatgatataggtaaataactatgattaacttttaataactcagatcagcaacctcacagcaaatcccttacatttttggaggtctatcaaacaggtctgattcaaaagtgtcctgctgatagcagctgtgacctggaggacatcctttcaagtgataactgctgtcagtgaggagggaagcaaagagagcagaaagg

SEQ ID NO: 72741 - DNA, 600 bp, Chicken  19866894353049_1
ggtgttcaggaaacgtagatgtggcactgagggacgtggttagtgggcctggtggtgacgggttgatggtgggactagctgatcttagtggccggtttcaatctttatgattctgtcagaagagattcagtaatcagacatatagaacaggactggtctgaaaagcagtgccttctaacctctatgctggtttctgcatctgctgtggcagcaacagaatgaaggtgagggccaaaaatctcagactgagaggagactggggaggagaatacacgtaacagtgctctgcgccattttccyctggtggctcccctcccgctgccggtccagccactattgtgccacatgctgccatggcctcatggcctgcagcgtctcaggacactcagagaactgccatattggagatacgtggctcccacagcagaggttccagcttctaaatagaggcttccttcagggggttgcaggaagacccacgctgtttgccccaggccttccgtgtgaggcyggccgaaccccagcagtgctgcaggctttttgtgcaacatcaaaatatgtctgttgtgggcaaaatggtctcaagtggcaacttctact

SEQ ID NO: 72742 - DNA, 600 bp, Chicken  19866894353049_2
caacagaatgaaggtgagggccaaaaatctcagactgagaggagactggggaggagaatacacgtaacagtgctctgcgccattttccyctggtggctcccctcccgctgccggtccagccactattgtgccacatgctgccatggcctcatggcctgcagcgtctcaggacactcagagaactgccatattggagatacgtggctcccacagcagaggttccagcttctaaatagaggcttccttcagggggttgcaggaagacccacgctgtttgccccaggccttccgtgtgaggcyggccgaaccccagcagtgctgcaggctttttgtgcaacatcaaaatatgtctgttgtgggcaaaatggtctcaagtggcaacttctactttattgtcaattaacacaaaatgctgatcgctcatttgggtatttagaaagcacacaaatgatcagccacttacatgaacacctgtcctacctccagcatgaacgtccttatttttcaccacaggttacatgcagcttgtcagaatgcctctggcaagctgcaaggcagcgtgagcagcccaagggacttctgtgaggctcttttgctgct

SEQ ID NO: 72743 - DNA, 599 bp, Chicken  19866894353051_1
  misc_feature (1)..(155): n is any nucleotide
nnnnnnnnnnnnnnnnnnnnnnnnnnnnnnnnnnnnnnnnnnnnnnnnnnnnnnnnnnnnnnnnnnnnnnnnnnnnnnnnnnnnnnnnnnnnnnnnnnnnnnnnnnnnnnnnnnnnnnnnnnnnnnnnnnnnnnnnnnnnnnnnnnnnnnnnnnngcttctcacaatgctagagtgtgacatatgaattaaaagacatcctttctctcattatatatggataatgagtttaaattacattacatcaagaattgaaacatcatctgtaattagatttggatgacacctcctcttgtaagarcatttcccatattttcagttactgacagaaacgctttttttaaatttggctgctcaagatgacatttccgtgctgatacctgcttctgggtgctttttgtaattataaccaactttgtgcatctgtttccaagtatgatactaagaaaaaragtgttattttttattaaaacttccctaaccttttctttgaggagatctagtgtctttattccttggagcagaaattagagacttggcaaggaagtagactattatatcagcccttttactgtcctcacaatcaccttgctaagaaac

SEQ ID NO: 72744 - DNA, 599 bp, Chicken  19866894353051_2
  misc_feature (1)..(4): n is any nucleotide
nnnngcttctcacaatgctagagtgtgacatatgaattaaaagacatcctttctctcattatatatggataatgagtttaaattacattacatcaagaattgaaacatcatctgtaattagatttggatgacacctcctcttgtaagarcatttcccatattttcagttactgacagaaacgctttttttaaatttggctgctcaagatgacatttccgtgctgatacctgcttctgggtgctttttgtaattataaccaactttgtgcatctgtttccaagtatgatactaagaaaaaragtgttattttttattaaaacttccctaaccttttctttgaggagatctagtgtctttattccttggagcagaaattagagacttggcaaggaagtagactattatatcagcccttttactgtcctcacaatcaccttgctaagaaacaatattggtcagcaaatccttgttgatgattcacatctaactcctctatattcattctatccaaaggagggactaaattgcatatacagttttttccatgcagcttttgagagcatgaagcctttgtcttcatgatgaagaagatcagtgc

SEQ ID NO: 72745 - DNA, 600 bp, Chicken  19866894353051_3
ctgtgacaaagagttggtgcacaggagttagtttctggagatgactggcaaagagaatcagggaatgaaacactagaaaaacttgtgcagcagctgatttaacagacctaggactgagaatctcagtggtggtagctgagtcaagatagatagacagcagttcagtctgatggcatggagcatttgactgaggaagacctcttgctgcccttcagcttctccacaagctgaggaggagtttgtgagaagataatgtactattgctatcaatcatcttttaaaacaatagaaccaatgatrtccattttctgacatattaatggtgaatcaatgtttatgccaaactgtagagtgactactagtctgtcggatcaaagcataagtctctacacactagtataaatactgcagggatactatttctgtttcaaaactgaggtccagaaggaaaagcttttcagaattatgactctcttgtaaagctctggtgtcttcttttaaagctctttttatagatggaagaaagattaaatattatcttaattgtaaagacaagccctccaattgagtaattattgacctctgtttgaattattgctg

SEQ ID NO: 72746 - DNA, 600 bp, Chicken  19866894353059_1
acaggctgcccagaggctatggaatgtcctccgtggagacctccaaaagccgctgggatgtggtgcagagaactgtgctctatccaggtggctctgcttaggcatgggttggaccagacagacccagatgtcccctccaaccagtccctaattctgggagtcagtgatctacatctccctgtgacagcacgaacaaagttccaagctccacacagaaaaccatcagcctgagaatgctgcagtcaggccaagatgggactgggagcattcgagtttcactccctccaacccagtttgagsccaaasaaatccatgcatggttggtcatttcatactgaaaaaaaaaaaatccaacaaactaatgaagtctgccctaacacctcaaagaaaaatatatcaacctgcagtctagaactctagaagatatcatcaaccctactgaggtcaggatcaacatgcctttagcatatgcaattgttaactagcgtggtttgtcaccccatcctccaactgctccaccacacaaacctcatcttttccacaagagcacaactcctttagagaaaagatggcaccgatggggctcagagacagcagctg

SEQ ID NO: 72747 - DNA, 600 bp, Chicken  19866894353059_2
tgcccagaggctatggaatgtcctccgtggagacctccaaaagccgctgggatgtggtgcagagaactgtgctctatccaggtggctctgcttaggcatgggttggaccagacagacccagatgtcccctccaaccagtccctaattctgggagtcagtgatctacatctccctgtgacagcacgaacaaagttccaagctccacacagaaaaccatcagcctgagaatgctgcagtcaggccaagatgggactgggagcattcgagtttcactccctccaacccagtttgagsccaaasaaatccatgcatggttggtcatttcatactgaaaaaaaaaaaatccaacaaactaatgaagtctgccctaacacctcaaagaaaaatatatcaacctgcagtctagaactctagaagatatcatcaaccctactgaggtcaggatcaacatgcctttagcatatgcaattgttaactagcgtggtttgtcaccccatcctccaactgctccaccacacaaacctcatcttttccacaagagcacaactcctttagagaaaagatggcaccgatggggctcagagacagcagctgagtaat

SEQ ID NO: 72748 - DNA, 600 bp, Chicken  19866894353062_1
taagggacggtgcttttgcagcctctcaaggcagggcatgtttctgcacccctctgcttatccccttacctctgctgccaggtagttgcctgtggcgaggtgcttgaagcggtacaagccattccagtgcccagccccccctcggcacgggtcgtggtgaaccacctggaaggagcagaggagggttcagagtggggctgcccaagcaaacaccccagtgacagaaacccgtcctacctcaaagatgcccacaagtcaataaacttgggcacagacacgagacagccagcgaggggctgragggatgctcgtctcttgggcagcctacactatgaaatcgccctggatccctcagccccactcacctccacctcccagagggcgttggagctggtggccgaggtggccgactgccgcagggtggtgcgcaggaagacgtgcagcttgcccttgtactcatcacaggtcaggaacttctcctgctcggcgtggaagagcctcaccacgtccccctggcaccgggatgtgacagtgaggacacagaggcagcattcactccgtgccccgtggctgtggttcacctcctccaagccagtgcag

SEQ ID NO: 72749 - DNA, 600 bp, Chicken  19866894353071_1
aatggaagtaaatttcatttaattcttaccatactcccttaaatcttaatcacaattgctgccttctatttctatcactgagctttggttctctgaaggagtgacactgaatattgtcagatccacagttcagtgcagttttttaaaaaagtactctgtgatatctttgcttcattttcaaatctttgtattcatacttctgcacattttgtaagagcaaaatagttcagaaacctaccttacgggaggctgacaatcaagagctggatttatgcctaacaaaacccattcctgcatctmaagatattgggtttctttcagatttatccacagctacagatatacacaaatttggctagtgggcaaaagacaaagaagatatttcctcagcatttcccagatgaaagatgtgaaaactaggatgacctgatttcagctgggacagtgttaaacagtacactgatgtttttgtttttgctaagtttgatttttgactaataatatatggactgtgcatcttatacactacttttcacttagtacttaaatttgatagatatgagctgcaacaagtcagaagcccatctgtagcaacattta

SEQ ID NO: 72750 - DNA, 562 bp, Chicken  19866894353073_1
  misc_feature (1)..(93): n is any nucleotide
nnnnnnnnnnnnnnnnnnnnnnnnnnnnnnnnnnnnnnnnnnnnnnnnnnnnnnnnnnnnnnnnnnnnnnnnnnnnnnnnnnnnnnnnnnnnnaaaatcattaacaatgaaaaataatttctagtaattataaaataagtcctaataatgggacatacggaatcatattggagaaataatgattaataaagagcgtataattgtaaataatgaggaaataaacagtaataataaggaaataatggcttatggtaggaaatagaagagtaataatggggaaagaaaaggataataatgggraactgttgttaataatggggaataattggaaataataggaaatattgggtaattattaggaaataattgcaggtagtttgtaaataatgattaataatggcgattagcgattaataaggaagaataaatgaggaataagcgataataacggggaaaaaagagggagtggtggcagaatacccattaataatggggaaaggagcggtggtagtgggaaatagggattaataatggggaaataattggggttcccctccccccc

SEQ ID NO: 72751 - DNA, 600 bp, Chicken  19866894353080_1
agagagatcctgacacactggaaaaagggcctgccagaaacctcacaaagttcaacaaatggaattgtcctgtacctgcagaggaataacctcaaggaccaggacatgctggaaagtagcctggcaggaaaggacctgaagttgctgctggacaccaagttgaacaaaaaaggacaatggtattattcactgcattaggcaaagtatcaccagcaggtcaagagaggtgatccttcctctccactcagtactatgtccagatctgagtccaccagtacaagagagacatggacatgctgragacaatacaaaaaaacccccaaagccatgaaagagacaaagggactgaagtacctgtcctgtgagggggggctgagagctgggactgatcatcctagaaaagaaaagcctcagggtagatttcttcagtctatgtgtatccctgaagggagagcacygagaagacagagccaggctcttttcagtgagacccagtgccaagacaaaggcaacaggcacaaactggaacaggagttcccctctgaacaccagggaaacaattccacactgtgtgggcaaccgggcactggcacaggctac

SEQ ID NO: 72752 - DNA, 512 bp, Chicken  19866894353080_2
gttgaacaaaaaaggacaatggtattattcactgcattaggcaaagtatcaccagcaggtcaagagaggtgatccttcctctccactcagtactatgtccagatctgagtccaccagtacaagagagacatggacatgctgragacaatacaaaaaaacccccaaagccatgaaagagacaaagggactgaagtacctgtcctgtgagggggggctgagagctgggactgatcatcctagaaaagaaaagcctcagggtagatttcttcagtctatgtgtatccctgaagggagagcacygagaagacagagccaggctcttttcagtgagacccagtgccaagacaaaggcaacaggcacaaactggaacaggagttcccctctgaacaccagggaaacaattccacactgtgtgggcaaccgggcactggcacaggctacccagaggctttgcagtcacctccttggagatcttcagaagacacctggacatgtccctggacaacctgct

SEQ ID NO: 72753 - DNA, 600 bp, Chicken  19866894353081_1
cgatcattaaaagtgctggtgctctgcaaaagaaatctgcatagtaaaatgtggctaaatttagccttcagacaatcactgagaaaaaaatgttattgtgagcaatctgtaatatcatagaatcgtagaattgcgcaggttggaaaagaccttagagatcatcagtgtattacagtaccatcatgtattacagatattgtagctacatttatcacttgtttatttatttgtttgtttgtttgtttgttttaaatcaaaatcttccatcaagcaactgaaatacaccagtggatgtttgayggttaccactgacttaactacgagttgagctctgcaattatcttgaaatcaagttctcattttatgattttcagtgcaattttttgcaggatgtattttatgccatgctcccaagtttctgactatttgtcagttgttttacatatgtccaaagtttgcccacttagctcaggcacaagcaaaaagagtcagataatactctggtaagtcagcatcactacttctctcgtagagaagtccagggagcccagacactccttagaagttgctgtcagtgttttgaattcaatggtaaaaggt

SEQ ID NO: 72754 - DNA, 539 bp, Chicken  19866894353086_1
ttttgaggtcttcatttcagaactgctaaaactaaatgattgtgtgtaataagcttcctgtcagagcacatcataatgcagaggctgtaggtgttattcttctatataaaataacattatatttccatagtccttcgccaaggatttctagagcaacttaagtatagaaatagacctctatcaccaaactgttgggcaatataacccctccagacagatacttcttttgccccggttcctgcctccttttaatcctttgtgcgtgggttcagttattaaccatatctgagccctattacygcagggagaaggggaaagaaaaaaaaggaaagttgaactagaaccattttccacaattgtagacagcgttaaggaaaacttcacttttcctcattttcctcatctactggtgcatcgtttcctattatgtgttgtttgcttagcacaatattcttgtattccttctgcaagttttttcatgcgctactgttggttgctgtttccattaccatcttttggtgggctttctctcttcggtg

SEQ ID NO: 72755 - DNA, 600 bp, Chicken  19866894353087_1
ggtcatcttctcttccagcagtttgttcctttaactttttggtgatgcttcacattttcacagcaaaaacagctttttgcatagtatgttagaaccacctaatctcttctgtgtcatactgttgcctgatctgttcacctcctttcacctctatattgtgaagttaaatatattgagtgagtgtaagcataaaactcgctgcccaagattatttcatcttgtaattataacaacttttagccttttttttcctataaatgaataattgctccatatcttaagtattattatcatctcccraatgcaattttttttcccttacaacagaaagatttttggatttgctatcaaaaaaactgtcagtagctcattttatcaactgtctgttttcaataatttcttctaatgtaaacagagccctgttacttattatagcattatcaaaaatttacatttcttctaactgatagcaaacaaggcttgtccagcagtccagatttgcttactggaaaccttaaagaaaagaagaggcaagagaaaggaaaaaataataaaaacacatttttttttattgctcagtggaattggataatgtagtta

SEQ ID NO: 72756 - DNA, 600 bp, Chicken  19866894353091_1
ctccagaaaaagaatgttatcacatggcaattaactagaggcaagatacaggagggaaggacactcctccagaattaaacctattttcattcaatgttcctagagataagaatattctgaatgaggtataagtggggcaagaagcacagattcacagagaaaatgcctcaaatacaatgttgtctctaaataaaatggttttgaaagcatagaagtgacatgcatggctgtctaatggtgcagtgtctcaagagaaacattcaccatagctgccataaacaaaacttctgttctttctcyttctgatgaatatgttttacagattcatgttgtatcattcattttcatgacaggtagatttcagtggatttttgaaagatttgctgagacattctaataagttctgaaaggataaatggcattaaaaattctttgacttcagttaaccttttctttggtgaagggtttctgttttgccccgctgtatgtgataactgcyttcaaactaacttttatttaattttttatataatgacttaaattgtctgctttctttaatgaactcattcatgtgacccattagggtcttctactgtttga

SEQ ID NO: 72757 - DNA, 600 bp, Chicken  19866894353091_2
tttgaaagcatagaagtgacatgcatggctgtctaatggtgcagtgtctcaagagaaacattcaccatagctgccataaacaaaacttctgttctttctcyttctgatgaatatgttttacagattcatgttgtatcattcattttcatgacaggtagatttcagtggatttttgaaagatttgctgagacattctaataagttctgaaaggataaatggcattaaaaattctttgacttcagttaaccttttctttggtgaagggtttctgttttgccccgctgtatgtgataactgcyttcaaactaacttttatttaattttttatataatgacttaaattgtctgctttctttaatgaactcattcatgtgacccattagggtcttctactgtttgaattattcgacacttatgaaaattttgcttattatattcatatagtctgacattgaagttatatcacttattcttaagtcccttgaactaaacatgtaattaaaatactgaactactatgaagcagcaaggatacccataaatatgttgactgattctcataatttccagtttactctttagtaactttgttttataaag

SEQ ID NO: 72758 - DNA, 600 bp, Chicken  19866894353099_1
ccgtcctctgtactttgacctaaattctcctctggctctcaagggggtgcgtgcaggaagagtgcagcagtacttcctccagtgcacgggatgggcaacccatgcaagcagtcctcatctgctgcattttgagggcattttgaggtctgggctctgctatatcgggtgctgtgcaccgttctacccaaacacaccgatccctaacagctctgcacagcactttggactcagccctgattctccagggcgacctttctctgctccatgaagttcagaaagtcaacgctgttattctaacaraaggaggagaagtggcacaaacagctttctttgctcagtaattgcmcagccagcttatgtgcacagtaagaaagaaaatattactgtgaaattcagccttttttttttcttttccccaggaataatcagatctgcataaacacttcaaaggtcatcgtattttttgccaggttcatttgtcatgttagattcgagtgaaatggttcgtttagatcctttcattgctacataatcccacttgcagctttaggcatatgaatcatgtgtgtgtacacagcactgcgacaagagcagcgcaca

SEQ ID NO: 72759 - DNA, 600 bp, Chicken  19866894353099_2
gtgcgtgcaggaagagtgcagcagtacttcctccagtgcacgggatgggcaacccatgcaagcagtcctcatctgctgcattttgagggcattttgaggtctgggctctgctatatcgggtgctgtgcaccgttctacccaaacacaccgatccctaacagctctgcacagcactttggactcagccctgattctccagggcgacctttctctgctccatgaagttcagaaagtcaacgctgttattctaacaraaggaggagaagtggcacaaacagctttctttgctcagtaattgcmcagccagcttatgtgcacagtaagaaagaaaatattactgtgaaattcagccttttttttttcttttccccaggaataatcagatctgcataaacacttcaaaggtcatcgtattttttgccaggttcatttgtcatgttagattcgagtgaaatggttcgtttagatcctttcattgctacataatcccacttgcagctttaggcatatgaatcatgtgtgtgtacacagcactgcgacaagagcagcgcacacaaacaagtgtagggcagagggaggtggggcaggaaggagaactgg

SEQ ID NO: 72760 - DNA, 600 bp, Chicken  19866894353104_1
tctgatcgatcagcagacaaacgaaccactcttccttcattcttcacttcctcaatgacgcagttcaggctctgccctattttcaagtcagaccctacaaaagcaagccacagcataaatcgccttccaggaacactagggggttcccttttgtctgtagtttactctaaagcattttcagagttccttctattttaagaagctaaaagacctcatcaaagtgaggtctactgtcagtaaggatcaaagggcttggaacagcagcatggtttggcagaaaacagggaatctagtggcttsctgcttatcagccattgctgttttcaacaatttgcaaagactccatcatgacccaaccctcactgaggtgcaccaacaccatagataaagggatygaagctcactgtcattctccacacctattttaacctcagtagctcttcttgtaatactacttacccctcttgactgctttgatgtaattttgggctttctgatgaggaaggaaggcatgagtcccactaactccgatatcaatgaggtagccatggtcttctacactagacacaaatccagagagcagctgttgggagggaagca

SEQ ID NO: 72761 - DNA, 600 bp, Chicken  19866894353104_2
tacaaaagcaagccacagcataaatcgccttccaggaacactagggggttcccttttgtctgtagtttactctaaagcattttcagagttccttctattttaagaagctaaaagacctcatcaaagtgaggtctactgtcagtaaggatcaaagggcttggaacagcagcatggtttggcagaaaacagggaatctagtggcttsctgcttatcagccattgctgttttcaacaatttgcaaagactccatcatgacccaaccctcactgaggtgcaccaacaccatagataaagggatygaagctcactgtcattctccacacctattttaacctcagtagctcttcttgtaatactacttacccctcttgactgctttgatgtaattttgggctttctgatgaggaaggaaggcatgagtcccactaactccgatatcaatgaggtagccatggtcttctacactagacacaaatccagagagcagctgttgggagggaagcattacaattcagtaatatgaagaaacagctgagtctgcagagaatgcacctttgatgagagatttaccacacaagtacccacttgtttcacgaggc

SEQ ID NO: 72762 - DNA, 600 bp, Chicken  19866894353107_1
tgtagatttctatggatgattattaaatcttctcttctgatgctgccaccacgttcacttagctgcagctctcttgttccatttgaaacagggaatttcacatgagccagcagcagatactcccttgtgtgaacagaaccgaacacctccaacaaccacgagctagcaagttttgcaattgcatctctgagtctttgttgggaaaattctctgcaattttgctgaaaaagcaacacctttgaatcacttggattcaacctcaccgctgccctgtaaaaacatttgaaggatgcacttggycagactgcagatccatcagcccacactcctggctctgaccttcagccaccatggacattcaaggaaaatgcataatacaaaggaaaagtatagagatttcctactctgctatactttggaattacagtgaaggtgtttacggtgcagcagggagtatgactggtagaaagggaaaaagaaaacagctttaaaatacatctaaatatagagagaggagcgattcttctcatgttctttttcatgttacggcactctaaatgaaagacagacaagatctcccttttctgctctataaagaag

SEQ ID NO: 72763 - DNA, 600 bp, Chicken  19866894353116_1
caaccgtggttattctgctcggacatctgttcatctttgcctacctgcatgccaaatgtgcttttgatcttccagaggagcatatcacaggagctcccgctcctttccctgggcttgctggttacaagtgttgtggtttttcatccctgagaccagaactacttaaacacatctacaggttataaaaaccagttgtttcaaagacaggcttcctctaattgcctccatcatttgctttccctgggcctgggtcaccctcagcagcatgaaataagcccaaaccgcagtaccaggcagcarttgttttgctttttccctrgcttctttttgcaaggagggagttccctaggccagccaattcactgcaggagcagaatgtagggtgtccttcagcaaacgtggtggcagagcaggccggtgtcaatagctctgctccttgcattttaatagtggggaaagaaaaaaaagcagagaaaggagaacatccttataatgccttttttctttgtatcccactgtaaatctgaacggccttcgtggtggtggccttgagagmagcatgctcagcagtgctgatggcactgtgggcacagtaacttt

SEQ ID NO: 72764 - DNA, 600 bp, Chicken  19866894353116_2
cggacatctgttcatctttgcctacctgcatgccaaatgtgcttttgatcttccagaggagcatatcacaggagctcccgctcctttccctgggcttgctggttacaagtgttgtggtttttcatccctgagaccagaactacttaaacacatctacaggttataaaaaccagttgtttcaaagacaggcttcctctaattgcctccatcatttgctttccctgggcctgggtcaccctcagcagcatgaaataagcccaaaccgcagtaccaggcagcarttgttttgctttttccctrgcttctttttgcaaggagggagttccctaggccagccaattcactgcaggagcagaatgtagggtgtccttcagcaaacgtggtggcagagcaggccggtgtcaatagctctgctccttgcattttaatagtggggaaagaaaaaaaagcagagaaaggagaacatccttataatgccttttttctttgtatcccactgtaaatctgaacggccttcgtggtggtggccttgagagmagcatgctcagcagtgctgatggcactgtgggcacagtaactttgctggccctgctattgact

SEQ ID NO: 72765 - DNA, 600 bp, Chicken  19866894353116_3
ctcagcagcatgaaataagcccaaaccgcagtaccaggcagcarttgttttgctttttccctrgcttctttttgcaaggagggagttccctaggccagccaattcactgcaggagcagaatgtagggtgtccttcagcaaacgtggtggcagagcaggccggtgtcaatagctctgctccttgcattttaatagtggggaaagaaaaaaaagcagagaaaggagaacatccttataatgccttttttctttgtatcccactgtaaatctgaacggccttcgtggtggtggccttgagagmagcatgctcagcagtgctgatggcactgtgggcacagtaactttgctggccctgctattgactgctcacaggtttcctgtttgcayggcattcgattcattgagctggctgctggttsagtggatctttcccaaatgaagcgcygggatctttcttcttgctgctgctgcaaacggagtctatgttattgcatatagaaatccactgggaggatcacaaacaacacacacacacaaaaaaaaaacccaagcagaagtctggccatctgcatgctgagcacaccgtcctgcccatccagca

SEQ ID NO: 72766 - DNA, 600 bp, Chicken  19866894353116_4
tccctaggccagccaattcactgcaggagcagaatgtagggtgtccttcagcaaacgtggtggcagagcaggccggtgtcaatagctctgctccttgcattttaatagtggggaaagaaaaaaaagcagagaaaggagaacatccttataatgccttttttctttgtatcccactgtaaatctgaacggccttcgtggtggtggccttgagagmagcatgctcagcagtgctgatggcactgtgggcacagtaactttgctggccctgctattgactgctcacaggtttcctgtttgcayggcattcgattcattgagctggctgctggttsagtggatctttcccaaatgaagcgcygggatctttcttcttgctgctgctgcaaacggagtctatgttattgcatatagaaatccactgggaggatcacaaacaacacacacacacaaaaaaaaaacccaagcagaagtctggccatctgcatgctgagcacaccgtcctgcccatccagcacagcacaggctgggctgcttttaaaagcacagtgttgtcactgtcacrgtgtggttttggagtgctctctcaatgagcatcgcaga

SEQ ID NO: 72767 - DNA, 600 bp, Chicken  19866894353116_5
aatgtagggtgtccttcagcaaacgtggtggcagagcaggccggtgtcaatagctctgctccttgcattttaatagtggggaaagaaaaaaaagcagagaaaggagaacatccttataatgccttttttctttgtatcccactgtaaatctgaacggccttcgtggtggtggccttgagagmagcatgctcagcagtgctgatggcactgtgggcacagtaactttgctggccctgctattgactgctcacaggtttcctgtttgcayggcattcgattcattgagctggctgctggttsagtggatctttcccaaatgaagcgcygggatctttcttcttgctgctgctgcaaacggagtctatgttattgcatatagaaatccactgggaggatcacaaacaacacacacacacaaaaaaaaaacccaagcagaagtctggccatctgcatgctgagcacaccgtcctgcccatccagcacagcacaggctgggctgcttttaaaagcacagtgttgtcactgtcacrgtgtggttttggagtgctctctcaatgagcatcgcagagcatcccggtgtcccgagttgagttgcactcc

SEQ ID NO: 72768 - DNA, 600 bp, Chicken  19866894353116_6
ggtggcagagcaggccggtgtcaatagctctgctccttgcattttaatagtggggaaagaaaaaaaagcagagaaaggagaacatccttataatgccttttttctttgtatcccactgtaaatctgaacggccttcgtggtggtggccttgagagmagcatgctcagcagtgctgatggcactgtgggcacagtaactttgctggccctgctattgactgctcacaggtttcctgtttgcayggcattcgattcattgagctggctgctggttsagtggatctttcccaaatgaagcgcygggatctttcttcttgctgctgctgcaaacggagtctatgttattgcatatagaaatccactgggaggatcacaaacaacacacacacacaaaaaaaaaacccaagcagaagtctggccatctgcatgctgagcacaccgtcctgcccatccagcacagcacaggctgggctgcttttaaaagcacagtgttgtcactgtcacrgtgtggttttggagtgctctctcaatgagcatcgcagagcatcccggtgtcccgagttgagttgcactcctgggacccaacatcacactgaggatg

SEQ ID NO: 72769 - DNA, 600 bp, Chicken  19866894353116_7
gccctgctattgactgctcacaggtttcctgtttgcayggcattcgattcattgagctggctgctggttsagtggatctttcccaaatgaagcgcygggatctttcttcttgctgctgctgcaaacggagtctatgttattgcatatagaaatccactgggaggatcacaaacaacacacacacacaaaaaaaaaacccaagcagaagtctggccatctgcatgctgagcacaccgtcctgcccatccagcacagcacaggctgggctgcttttaaaagcacagtgttgtcactgtcacrgtgtggttttggagtgctctctcaatgagcatcgcagagcatcccggtgtcccgagttgagttgcactcctgggacccaacatcacactgaggatgctcagacagaagagcagcaccaagaggatactgctgcccaggaaaggtcctcagcactgatgttggcagtggaagaagccacatgagaacctgagtattccagcaagactggggactgcagccccactggtgtgctcttttcatattgcaccattcccttgtactttgtcctggagataccacaagatccactgggatttctgc

SEQ ID NO: 72770 - DNA, 600 bp, Chicken  19866894353116_8
cactcctgggacccaacatcacactgaggatgctcagacagaagagcagcaccaagaggatactgctgcccaggaaaggtcctcagcactgatgttggcagtggaagaagccacatgagaacctgagtattccagcaagactggggactgcagccccactggtgtgctcttttcatattgcaccattcccttgtactttgtcctggagataccacaagatccactgggatttctgccttttagggcatgaatgctcagggtgacaggatctgctgcaagactgatgctctgctgcttgtsacttccaatagctctgctggcttaaaaaatgatctcaggaggaacgcacagtgtagacatgggtatttaagcagtgacacttttgtcttcctcagctcttttcgaggactcctggtatttttcttctcctctccaggaagggaaaatcgaaatccatagacaatgctctcatgtcaaggcctttctggattctttctgtctgcttctgtggtttttttctgtgctggatgtttcattaatgtggccagagaaagctgttccagaagagggtatatgtggcactgaggggcatggctgagg

SEQ ID NO: 72771 - DNA, 600 bp, Chicken  19866894353118_1
ttgatcattgttaattgcttggtcctggagcataatctgacagagtattttgactggagaacagactgctctgcttgtaaacactcctttccccgtttttattgaaaattaatatgagacactaataattcttgacaagtcctctcctagtgccattttatatcagagcttgtgcagtgtttttaaaataatgttgctctttcatgattcttattttaattgctctgctgggggaatgggtcagcacaagctacatgttctaatggttcgcctttgtacaggaaattctgaataactccwtggaacaaacataygggaatagctttaaccagagcagctccttgagtctggagccacttccactggcatgtggaaaacaaaatgaggtgtaaataggaatattagatgggagctcaaattgattggccagcaaaggcatctgttgtcacttgaggtgaccttgagacatctgacatatcctcatgaggttggtgtgtttcagacctatgggagaatatgtcttcctgggaactactgtaataaatggcctttgactgttacatagagtaaaattgaccagtgttgatgcctacacacagg

SEQ ID NO: 72772 - DNA, 600 bp, Chicken  19866894353118_2
ttgcttggtcctggagcataatctgacagagtattttgactggagaacagactgctctgcttgtaaacactcctttccccgtttttattgaaaattaatatgagacactaataattcttgacaagtcctctcctagtgccattttatatcagagcttgtgcagtgtttttaaaataatgttgctctttcatgattcttattttaattgctctgctgggggaatgggtcagcacaagctacatgttctaatggttcgcctttgtacaggaaattctgaataactccwtggaacaaacataygggaatagctttaaccagagcagctccttgagtctggagccacttccactggcatgtggaaaacaaaatgaggtgtaaataggaatattagatgggagctcaaattgattggccagcaaaggcatctgttgtcacttgaggtgaccttgagacatctgacatatcctcatgaggttggtgtgtttcagacctatgggagaatatgtcttcctgggaactactgtaataaatggcctttgactgttacatagagtaaaattgaccagtgttgatgcctacacacaggactggaggtttaac

SEQ ID NO: 72773 - DNA, 600 bp, Chicken  19866894353120_1
cttttaggataagcgtgccacaggacaagagctacggcctgatcctttaaagcagcactcatttctgtaattttccagacaagcacaaaaagtcccacttttttcccaccttcagcacacgagctgaaaaggaaacttatttctctttatccataaagtgcttgatgtgggataaaagttagaaagcactgtgtaacactgttaaggcagaaggtaggatgggtcactaaaaagatctcagttcaatgttaaaagaatatggaagagcaaactaccagaggggtaattttgaaggatttyttcacacacaacagccatggartgagtgacattttcccccttaaacatcacaagtgaagtatttgcaaaagtttcagaasagagtaagaagttttaaaaacagtactattcaaatctgtacactggaaatccagtcagtatcaaaggatagcagttctttcctttggtttcaacacctgataaaaatctacttgagaacaatgttatttaaaggatatttaaataaaggcttttagcttgctcttgaaaatctcagctaaggtaactacttttaaaatcagctaactagacacttcaggt

SEQ ID NO: 72774 - DNA, 600 bp, Chicken  19866894353120_2
ggacaagagctacggcctgatcctttaaagcagcactcatttctgtaattttccagacaagcacaaaaagtcccacttttttcccaccttcagcacacgagctgaaaaggaaacttatttctctttatccataaagtgcttgatgtgggataaaagttagaaagcactgtgtaacactgttaaggcagaaggtaggatgggtcactaaaaagatctcagttcaatgttaaaagaatatggaagagcaaactaccagaggggtaattttgaaggatttyttcacacacaacagccatggartgagtgacattttcccccttaaacatcacaagtgaagtatttgcaaaagtttcagaasagagtaagaagttttaaaaacagtactattcaaatctgtacactggaaatccagtcagtatcaaaggatagcagttctttcctttggtttcaacacctgataaaaatctacttgagaacaatgttatttaaaggatatttaaataaaggcttttagcttgctcttgaaaatctcagctaaggtaactacttttaaaatcagctaactagacacttcaggtactcaatttaaagtttttatgg

SEQ ID NO: 72775 - DNA, 600 bp, Chicken  19866894353120_3
aagcacaaaaagtcccacttttttcccaccttcagcacacgagctgaaaaggaaacttatttctctttatccataaagtgcttgatgtgggataaaagttagaaagcactgtgtaacactgttaaggcagaaggtaggatgggtcactaaaaagatctcagttcaatgttaaaagaatatggaagagcaaactaccagaggggtaattttgaaggatttyttcacacacaacagccatggartgagtgacattttcccccttaaacatcacaagtgaagtatttgcaaaagtttcagaasagagtaagaagttttaaaaacagtactattcaaatctgtacactggaaatccagtcagtatcaaaggatagcagttctttcctttggtttcaacacctgataaaaatctacttgagaacaatgttatttaaaggatatttaaataaaggcttttagcttgctcttgaaaatctcagctaaggtaactacttttaaaatcagctaactagacacttcaggtactcaatttaaagtttttatggcaggttactcccattttgctaaataacactgattcttagtgattgctaacctatatga

SEQ ID NO: 72776 - DNA, 599 bp, Chicken  19866894353121_1
  misc_feature (1)..(1): n is any nucleotide
ntctgctatggcctttgagcccggccagtttatggtaacacattcatagcagcaatatcggtggcaattgaggatgctatcaattcactgttgctagttactcttctctctgaccccagccagtcagcaagaccctgctgcatgccaccacagcctagtgatgcttgggattatgcacagagccaagaacatgtgtgagtaagtctatccttaacttgttttcttttcttttctttttttccttcttcttcttcttcttctttttttaatgtcattttaaggtcaaatctacattagatmttttggcatagcaataaaccatggttcttactgcactgtttcattgagagtggcaactgaaggaggacagcaggaaggtcaccactgttacacacagagtcattggaccttctctaggctcacttaaaggaccaygtattcctaatactttcagtaatgttcccacttatcagtrctttcagacccatggcaatgatggtgaaagaaaacatgaagatgctgtccaagatgactctgagaccagctttaactcagtcacacctcagagcccagatcagagaaagcttcctatatactat

SEQ ID NO: 72777 - DNA, 600 bp, Chicken  19866894353121_2
tgctgcatgccaccacagcctagtgatgcttgggattatgcacagagccaagaacatgtgtgagtaagtctatccttaacttgttttcttttcttttctttttttccttcttcttcttcttcttctttttttaatgtcattttaaggtcaaatctacattagatmttttggcatagcaataaaccatggttcttactgcactgtttcattgagagtggcaactgaaggaggacagcaggaaggtcaccactgttacacacagagtcattggaccttctctaggctcacttaaaggaccaygtattcctaatactttcagtaatgttcccacttatcagtrctttcagacccatggcaatgatggtgaaagaaaacatgaagatgctgtccaagatgactctgagaccagctttaactcagtcacacctcagagcccagatcagagaaagcttcctatatactatttcccatagtaggggggtggaactagataacgtttaaggttccttccaactcaagccattctatgattctgattgctgtccccctgattcttgacatatgaaagcacaaggcactgtctttgtgtcwtttggctct

SEQ ID NO: 72778 - DNA, 600 bp, Chicken  19866894353121_3
cacagagccaagaacatgtgtgagtaagtctatccttaacttgttttcttttcttttctttttttccttcttcttcttcttcttctttttttaatgtcattttaaggtcaaatctacattagatmttttggcatagcaataaaccatggttcttactgcactgtttcattgagagtggcaactgaaggaggacagcaggaaggtcaccactgttacacacagagtcattggaccttctctaggctcacttaaaggaccaygtattcctaatactttcagtaatgttcccacttatcagtrctttcagacccatggcaatgatggtgaaagaaaacatgaagatgctgtccaagatgactctgagaccagctttaactcagtcacacctcagagcccagatcagagaaagcttcctatatactatttcccatagtaggggggtggaactagataacgtttaaggttccttccaactcaagccattctatgattctgattgctgtccccctgattcttgacatatgaaagcacaaggcactgtctttgtgtcwtttggctctaaataggagtaactgaaatatataattctcgggtagtttt

SEQ ID NO: 72779 - DNA, 600 bp, Chicken  19866894353121_4
aaggaccaygtattcctaatactttcagtaatgttcccacttatcagtrctttcagacccatggcaatgatggtgaaagaaaacatgaagatgctgtccaagatgactctgagaccagctttaactcagtcacacctcagagcccagatcagagaaagcttcctatatactatttcccatagtaggggggtggaactagataacgtttaaggttccttccaactcaagccattctatgattctgattgctgtccccctgattcttgacatatgaaagcacaaggcactgtctttgtgtcwtttggctctaaataggagtaactgaaatatataattctcgggtagttttgggtactttcataaaatctataggttttttttttgccctgttcctcattagaagggctatgagtcaaaccaagaggccaaatcactaattcacctctgagattagcacaggctgcattcttgcttccaagctcagagaattggcagtggttgagcctctcctgccatccctggaagccatccttcccaaacagaaatgatacacattggcagcatactgcagtgatcctgttcttgtctctttgtttccct

SEQ ID NO: 72780 - DNA, 599 bp, Chicken  19866894353129_1
  misc_feature (1)..(23): n is any nucleotide
nnnnnnnnnnnnnnnnnnnnnnnttccaaagttcatgcagttagtacgcccaagcatgatttcccatccctctgtgagttatgttttagcttggggtttgggattctttgtgattgaaagtttttacgcagctctttgtgacctcatgctagggcaatcactgtgttgatttgaaggaatgtagatgggtttgcagaaatgtcagggtgtcccattaagatgtttctttcacctcagctggagtactcagcatttcagtgctgttgttactgagatgccctgtagtaagtaatagagcayagagcaaaactgctctgatgtattccagtaacatggtgttaatgtgctattgcttctctgtatttcagcgccaaggcatcacttttttggattacaataacataggcaagtagacttctgctttaagaaaacagtgcaaatctgtctttgcagcagttatgcatggggacagtgggatacaatcagcacttttcactctgtgcctgaatgcaagacatgatctcaaaagaattctgagtcctgcaaagccttcttcacgtgcttccctttgcacttgatgcaaggctctgtggcacact

SEQ ID NO: 72781 - DNA, 600 bp, Chicken  19866894353129_2
aaactgctctgatgtattccagtaacatggtgttaatgtgctattgcttctctgtatttcagcgccaaggcatcacttttttggattacaataacataggcaagtagacttctgctttaagaaaacagtgcaaatctgtctttgcagcagttatgcatggggacagtgggatacaatcagcacttttcactctgtgcctgaatgcaagacatgatctcaaaagaattctgagtcctgcaaagccttcttcacgtgcttccctttgcacttgatgcaaggctctgtggcacactgctccaytgctcctggatggctttggatcaggctggctcaatacgtctgtttgaaaggggcccctctttcacaatgtcccaatgtatgcatttgcagtaccggagtgcagtgtacacggtaactcatgtaatccgttttgactaaacttttccatttgttatgctggcatttgtaccatctaatgtgtatttgctctgccaaggctctcagcgcctacaagtgcaattacatatttcagaaagctctcatctcagaagctctctttatgtctgagtgttcattatcctaaggattgaactcttgcaa

SEQ ID NO: 72782 - DNA, 599 bp, Chicken  19866894353130_1
  misc_feature (1)..(103): n is any nucleotide
nnnnnnnnnnnnnnnnnnnnnnnnnnnnnnnnnnnnnnnnnnnnnnnnnnnnnnnnnnnnnnnnnnnnnnnnnnnnnnnnnnnnnnnnnnnnnnnnnnnnnnnctgggctgggcagaggggatcctggagctgccagctcccaggacacagagcagcactacgcagcctctgtgcccccagcagtcccagctctgccacgtgctcccggggacaggcccacagcatgctgctgggttccattcattgcaggggagttggactggatgacctttaaaggtcccttccagctcggaggattstatgattctcgcagtcaagctctgtacaaacaagtgtggtttattaaggcatttctttgagaagttggcacttgggtccaggctgtgctggagcagcccagtgtgcgggccgacaagcagcgcccaatacatgcagctcagcgagacacgatacaaaagtacaaacaaagtagaaaacaggaatcatagtacaatgtgtaaaaataaataactggaggcttggctcccggctgggctcagcagcacacggctggaacccccacaccaaagcggggccatgtgtctgaccctaccctatg

SEQ ID NO: 72783 - DNA, 600 bp, Chicken  19866894353131_1
tctgtaagtacaggaatatactggaaggtaatagagatcaaaatatttaaattaattctgttgatttgaaaagtgaataaaagaagcaaaatccgtggatttttcttacactttcagaatttgtaatatatttcagaaaagatctgcagaaaatcaatttttcattgcagatagcagtaactgcaatatagtctcaaagcacatatttcacttgcccatcacttcccttaacttcaaactttaagaaacagctttctagacctaatcttttcccacaggtttgttctttctttttaaacwtaaatccaccattttctttagaacactgtgaaaaagaagagtgaaatatgcttctctcaaagttaaaaaaaaaaagtttttttttttttttgtttgttttttgaacatcaacactctcatggctgcttttaccaaatggtaaagcctggcatggaaagaccttttcctcttgagaaggacttctgaatattctagggagcaatggttcagagtcgaccaagctgtgagaattcacatattacatactgggtatgtacaaagggtatgtaaaattgtcacacatggaggtaacctgtagtg

SEQ ID NO: 72784 - DNA, 600 bp, Chicken  19866894353144_1
ggatttacttctatctttccttaaatgacgaacattttagatatcaaaatggatgtacattgcaagcttaatgtatattaatatcgtcaaaactattgatgattaaacaatcagaaaatgtgatttatgtctttctgattaagaatttccactttgtaagaaaaaagctgtagttgtccagttttccatcatatgtatcttagatttttttatagcatagtaagagaattttccattggaaatgaactcatgtgatctaagaaatttttgctcctcagaaactagctgccacacttttayctaagtataagaactgacccaatgtatattcttagcctatttcagggtgaagccaagcacagtagcttaaatcacctccaaagctaagactatagcatgcagtatcactttttcagtgactaatgatagctcaataaatctcaaatccttgtttctacatgaagctactctggtacatgaaagcaccatggctttcctgatgtagtcacattaggaagaggaaggcaatatttttgatatcctgaaattacatgattttggtgcaggcagtttgaagaagaaattttagagtctcatgaa

SEQ ID NO: 72785 - DNA, 600 bp, Chicken  19866894353144_2
tttacaaatggctataatgttcttattgatgtagaattagaataagttgcacagactagtttattcattgtataggagaagggcctgtacgtgtatatacaggaagatacaatttgcttaatcctagcataaggttctgtgaaagttccaaagctaagattacaggctttgggagtctgcttttctactaaaaaaaaaacctatattacttagtttacttttaattacatgataaatattttagcatttatagtataactgtcatatgattctaatagtaatagctgcagaatgtcttgktttttttttaactaagataaagaagcatgtgattttcttgtaattatgctgtttatactatgcaattacataataaataagaagtgaaccaaaaataattatatagctctttgcagtctacacagtcaaaatctaaggcttaaaagaatggcagagctcaaagcacctcaaggattgtcacgtgtcagctgcttttttgaactttagtaagagcagaaattaatagagctctcaatataaagtcattacacattaaaattattgtaatagtaattaacagaaatggtaaacaaagaagac

SEQ ID NO: 72786 - DNA, 600 bp, Chicken  19866894353152_1
gttgttcatcttttatactcagcatctcatctgtgatatccagaaggacacaccagaatccacattttcatttacctcttctcttaactttcgaatcagctccgtgtcattatgatgagttttgattacttcagctttgccacttgcaacaagggaagcactttcaatgagatcaggtctgagggtaccctgagcaagaaaaacctcttcaggtttcagattcatttctccaataacttcattggcaatctgtaagatggagaggaaaagagaacttttcagttttcaaaggtctccatygccagtggattaggtcatctgtagcttacccagcactgtgctgctgagcacacagtgcttcagaatgaaatagtctgagatagaaaacgtatctagaatccatgtggaaaaaaagaattatagatattaccttaacaaacgtgtcaccgataatcttccttttttcttcaggacttgtagtcatatttaaggtcttgctaattcttttacgtggagttctgtcttcatcagagattggtagagttgttgtaccattatagaaagaatgagctgcattcaccactgtatgaaataacagga

SEQ ID NO: 72787 - DNA, 599 bp, Chicken  19866894353171_1
  misc_feature (1)..(15): n is any nucleotide
nnnnnnnnnnnnnnnatatgttgtggtggggcaaaagcagaaaggacttctgtatgaacataaatttcattctcaaggtaggagataagcaaatggattgaggcttcttcaaaactcagcaaaaattctgcagttgtgtaactactctaagatgcagtagtggaaattagcttcctaagcagttgcctgccttgaggaacgtcttgatttcaagtgaagcaagctgtacttctgaaaatcaccatatttccatgtcccgttactcctggcaaaactcctttttgaattgagctgaccaasctcatagtaccagtgcaatgcaaaaccagtgtccctgcagagtgggggacaacgtgccctgaaaggagcaaacaccccactttgcacccactgtcgtcccgctgcagtggggtatttgctccactcgagggagctcctgcttttgagtagatgaacttcaagcctcgaagcatctccaggcaaaaccctgtgggtgacaagttgtccgggccacgggaagaggctgaaccccaccgaggtgctgtgccagagctgggctgctcctggctgtgctaaggtcaggtttgagccccggctgc

SEQ ID NO: 72788 - DNA, 599 bp, Chicken  19866894353172_1
  misc_feature (1)..(36): n is any nucleotide
nnnnnnnnnnnnnnnnnnnnnnnnnnnnnnnnnnnntttgtgatggacagttggttgatagtaaattttctaatctctgtaagattaaaaccttcaaatactgaaattctcactttactcgagtgtcacatttaattgtccagtcaggattattgtgatagttcttctccttaaatgcattgcaaggattttagtgtttggttatgtagtatctgtatcagactgaaaattaatcaagagtaacttttacaagtgatctctttgtaacttgaggtagtaaggagatgcaagctttgattyattttttttcctgctcttaagtacagaaaccaattgtatttgctatatattttttttcagaacacgttagtttctctccctcatatatacatacatatacatacatacattatatataatgtttcattattttcttactattgcagttacaaaatcctgctggagaagagcrctgtgaggatgaatctgttatcctatcttgattagaaccctgattttatttatttgacggagaattaaaaaaaaaaagagagaaatgctaattatttgtatgtgtatatgtatttgttttttctttc

SEQ ID NO: 72789 - DNA, 587 bp, Chicken  19866894353172_2
aaatgcattgcaaggattttagtgtttggttatgtagtatctgtatcagactgaaaattaatcaagagtaacttttacaagtgatctctttgtaacttgaggtagtaaggagatgcaagctttgattyattttttttcctgctcttaagtacagaaaccaattgtatttgctatatattttttttcagaacacgttagtttctctccctcatatatacatacatatacatacatacattatatataatgtttcattattttcttactattgcagttacaaaatcctgctggagaagagcrctgtgaggatgaatctgttatcctatcttgattagaaccctgattttatttatttgacggagaattaaaaaaaaaaagagagaaatgctaattatttgtatgtgtatatgtatttgttttttctttccttaagaatagtgattaaataaacttcactgtgtattagtatagaagagtagaagaagataatggagagaatctattgggatagaaagccttgcacctcatgcagaagttctttctgcattataattttgtcaagctgatgttcagggggaactcagtct

SEQ ID NO: 72790 - DNA, 600 bp, Chicken  19866894353179_1
atggcttatgaaagaccgtgcttcaagttcccacaaagatatctttttcatctcttcaactaagaaacattaacatatagcttatcactggtgttagtatagtcagctatttagttttgtgctatataaaattcaatcaaaaggattgctgaatccattccagtaagttaaatgttaggtttgctcttctgtacttactccagacgaactggagcagacatttttctcaaggaagccaagacagagtaattcagagaacttaccacgtcagtctatgagcagcatgtagtactgccaaaytgcttatttcaagaagtccctttctcaaactctttaacaagtgaagtatwattagcatcaagtttctagcaaatgatcagatagtctattcagtaatactactttagtattcttcctgcaaactttgttccagataacttcagagtcctgtatttcttctatctyrtaccctgcataagtatttgcacctgtgtgaagcatgtaacagttctacagctggatggaattttccatctgtctacakaggaagaaaaggcagaggaaaatacattcttagaytccacttacagactggagggg

SEQ ID NO: 72791 - DNA, 600 bp, Chicken  19866894353179_2
tctcttcaactaagaaacattaacatatagcttatcactggtgttagtatagtcagctatttagttttgtgctatataaaattcaatcaaaaggattgctgaatccattccagtaagttaaatgttaggtttgctcttctgtacttactccagacgaactggagcagacatttttctcaaggaagccaagacagagtaattcagagaacttaccacgtcagtctatgagcagcatgtagtactgccaaaytgcttatttcaagaagtccctttctcaaactctttaacaagtgaagtatwattagcatcaagtttctagcaaatgatcagatagtctattcagtaatactactttagtattcttcctgcaaactttgttccagataacttcagagtcctgtatttcttctatctyrtaccctgcataagtatttgcacctgtgtgaagcatgtaacagttctacagctggatggaattttccatctgtctacakaggaagaaaaggcagaggaaaatacattcttagaytccacttacagactggagggggaaaaaaaagaatttgataaagttcacgaggcactttatgacaactcaca

SEQ ID NO: 72792 - DNA, 600 bp, Chicken  19866894353179_3
agttaaatgttaggtttgctcttctgtacttactccagacgaactggagcagacatttttctcaaggaagccaagacagagtaattcagagaacttaccacgtcagtctatgagcagcatgtagtactgccaaaytgcttatttcaagaagtccctttctcaaactctttaacaagtgaagtatwattagcatcaagtttctagcaaatgatcagatagtctattcagtaatactactttagtattcttcctgcaaactttgttccagataacttcagagtcctgtatttcttctatctyrtaccctgcataagtatttgcacctgtgtgaagcatgtaacagttctacagctggatggaattttccatctgtctacakaggaagaaaaggcagaggaaaatacattcttagaytccacttacagactggagggggaaaaaaaagaatttgataaagttcacgaggcactttatgacaactcacaagcaagcatgagtcagagaatatcagtaatacttgattaaccaaactgcatgttacaacagataaaactaagcaataaaaacacatagaaatcaagtaaattcaagctatagatt

SEQ ID NO: 72793 - DNA, 600 bp, Chicken  19866894353179_4
gttaaatgttaggtttgctcttctgtacttactccagacgaactggagcagacatttttctcaaggaagccaagacagagtaattcagagaacttaccacgtcagtctatgagcagcatgtagtactgccaaaytgcttatttcaagaagtccctttctcaaactctttaacaagtgaagtatwattagcatcaagtttctagcaaatgatcagatagtctattcagtaatactactttagtattcttcctgcaaactttgttccagataacttcagagtcctgtatttcttctatctyrtaccctgcataagtatttgcacctgtgtgaagcatgtaacagttctacagctggatggaattttccatctgtctacakaggaagaaaaggcagaggaaaatacattcttagaytccacttacagactggagggggaaaaaaaagaatttgataaagttcacgaggcactttatgacaactcacaagcaagcatgagtcagagaatatcagtaatacttgattaaccaaactgcatgttacaacagataaaactaagcaataaaaacacatagaaatcaagtaaattcaagctatagattt

SEQ ID NO: 72794 - DNA, 554 bp, Chicken  19866894353179_5
agtaattcagagaacttaccacgtcagtctatgagcagcatgtagtactgccaaaytgcttatttcaagaagtccctttctcaaactctttaacaagtgaagtatwattagcatcaagtttctagcaaatgatcagatagtctattcagtaatactactttagtattcttcctgcaaactttgttccagataacttcagagtcctgtatttcttctatctyrtaccctgcataagtatttgcacctgtgtgaagcatgtaacagttctacagctggatggaattttccatctgtctacakaggaagaaaaggcagaggaaaatacattcttagaytccacttacagactggagggggaaaaaaaagaatttgataaagttcacgaggcactttatgacaactcacaagcaagcatgagtcagagaatatcagtaatacttgattaaccaaactgcatgttacaacagataaaactaagcaataaaaacacatagaaatcaagtaaattcaagctatagattttaaacctcctcatcacaaaccaataagatggg

SEQ ID NO: 72795 - DNA, 519 bp, Chicken  19866894353179_6
cagcatgtagtactgccaaaytgcttatttcaagaagtccctttctcaaactctttaacaagtgaagtatwattagcatcaagtttctagcaaatgatcagatagtctattcagtaatactactttagtattcttcctgcaaactttgttccagataacttcagagtcctgtatttcttctatctyrtaccctgcataagtatttgcacctgtgtgaagcatgtaacagttctacagctggatggaattttccatctgtctacakaggaagaaaaggcagaggaaaatacattcttagaytccacttacagactggagggggaaaaaaaagaatttgataaagttcacgaggcactttatgacaactcacaagcaagcatgagtcagagaatatcagtaatacttgattaaccaaactgcatgttacaacagataaaactaagcaataaaaacacatagaaatcaagtaaattcaagctatagattttaaacctcctcatcacaaaccaataagatggg

SEQ ID NO: 72796 - DNA, 600 bp, Chicken  19866894353194_1
tcccagtgaagctttcctgctcctccaggtaacacagttctgcatgaaaaacgcaatctgtcctaccaatgatgccaccttagctctatacacgagttgtgttaaagtttctaaagtggaaacaaaaaaggaaggtctgttctttcaccagaactgctcctcacagcctccctctaacctcagaggatcccccccacagcaaaaacctgctggacatctcagctccaggcatcacactcattttcgagctgtcttaggaatacctttgcacatgatctccttctgtttagcactattaaytgcaatgagtagattatgaaaggcacttygyagattgtcacacaggctccaaactcaaacttyctcatgcctcaaactcatgtatcctcaccaaagcatggatcagagccgtcatacaactgtgtggtccattataatccagataaatattctgaatcaattaaagatccatattattcacccaaaccaaaataaaagttgccatgaaatgaggtaactttcagcttagagtgtcatraatggcaaaaagatctcacttcataaaaatatttctatgtttctcatcccagacaaaacact

SEQ ID NO: 72797 - DNA, 600 bp, Chicken  19866894353194_2
taacacagttctgcatgaaaaacgcaatctgtcctaccaatgatgccaccttagctctatacacgagttgtgttaaagtttctaaagtggaaacaaaaaaggaaggtctgttctttcaccagaactgctcctcacagcctccctctaacctcagaggatcccccccacagcaaaaacctgctggacatctcagctccaggcatcacactcattttcgagctgtcttaggaatacctttgcacatgatctccttctgtttagcactattaaytgcaatgagtagattatgaaaggcacttygyagattgtcacacaggctccaaactcaaacttyctcatgcctcaaactcatgtatcctcaccaaagcatggatcagagccgtcatacaactgtgtggtccattataatccagataaatattctgaatcaattaaagatccatattattcacccaaaccaaaataaaagttgccatgaaatgaggtaactttcagcttagagtgtcatraatggcaaaaagatctcacttcataaaaatatttctatgtttctcatcccagacaaaacactttcctctctcaaacatgtacagactgaga

SEQ ID NO: 72798 - DNA, 600 bp, Chicken  19866894353194_3
acacagttctgcatgaaaaacgcaatctgtcctaccaatgatgccaccttagctctatacacgagttgtgttaaagtttctaaagtggaaacaaaaaaggaaggtctgttctttcaccagaactgctcctcacagcctccctctaacctcagaggatcccccccacagcaaaaacctgctggacatctcagctccaggcatcacactcattttcgagctgtcttaggaatacctttgcacatgatctccttctgtttagcactattaaytgcaatgagtagattatgaaaggcacttygyagattgtcacacaggctccaaactcaaacttyctcatgcctcaaactcatgtatcctcaccaaagcatggatcagagccgtcatacaactgtgtggtccattataatccagataaatattctgaatcaattaaagatccatattattcacccaaaccaaaataaaagttgccatgaaatgaggtaactttcagcttagagtgtcatraatggcaaaaagatctcacttcataaaaatatttctatgtttctcatcccagacaaaacactttcctctctcaaacatgtacagactgagata

SEQ ID NO: 72799 - DNA, 600 bp, Chicken  19866894353194_4
taccaatgatgccaccttagctctatacacgagttgtgttaaagtttctaaagtggaaacaaaaaaggaaggtctgttctttcaccagaactgctcctcacagcctccctctaacctcagaggatcccccccacagcaaaaacctgctggacatctcagctccaggcatcacactcattttcgagctgtcttaggaatacctttgcacatgatctccttctgtttagcactattaaytgcaatgagtagattatgaaaggcacttygyagattgtcacacaggctccaaactcaaacttyctcatgcctcaaactcatgtatcctcaccaaagcatggatcagagccgtcatacaactgtgtggtccattataatccagataaatattctgaatcaattaaagatccatattattcacccaaaccaaaataaaagttgccatgaaatgaggtaactttcagcttagagtgtcatraatggcaaaaagatctcacttcataaaaatatttctatgtttctcatcccagacaaaacactttcctctctcaaacatgtacagactgagataagaaaacaaaggactcattaatctacattcat

SEQ ID NO: 72800 - DNA, 600 bp, Chicken  19866894353194_5
cattttcgagctgtcttaggaatacctttgcacatgatctccttctgtttagcactattaaytgcaatgagtagattatgaaaggcacttygyagattgtcacacaggctccaaactcaaacttyctcatgcctcaaactcatgtatcctcaccaaagcatggatcagagccgtcatacaactgtgtggtccattataatccagataaatattctgaatcaattaaagatccatattattcacccaaaccaaaataaaagttgccatgaaatgaggtaactttcagcttagagtgtcatraatggcaaaaagatctcacttcataaaaatatttctatgtttctcatcccagacaaaacactttcctctctcaaacatgtacagactgagataagaaaacaaaggactcattaatctacattcatataaacaaagtattcattttaagagttacaagagctagtcaaacaattgctcataagtcccattattaaaaattatttgcttcttattgcccatgaggattgagaggaattaaagtgcctaaaataaagcatcctcaacacagaagttgcttttcttgtatttacaaggatgaga

SEQ ID NO: 72801 - DNA, 600 bp, Chicken  19866894353198_1
gaggggtgtgctgcctcatgtagggctctgtgtacctcatgtcagcctcagattaatggccagagtgtgtccttgtcctcttgtttactgaccctctgtataaagaatttccacaaatacagctgaagggtgagagacgtcctcaggcttgtgtctgtaatgtggacaaataaatgccatagatgcccacgagtatttctgaacagagcagtttccttagggattcaattagttacctcatgatctgttgtaaaaacagaaacgcgtgaagcccagccaggccctgccaggaagatttcycttcctggtttacttacagtatgttctgctctacgggaacataaatgttgtttcttgggtgatttctgttaaaatcaggcaagctgtggccatctgtatcatttgttcgggtgaggtttaaagtagygttggcagcaaaatcgtgaaccgaagttgtttgtaaaaaccactgttgacaaaacaactggaagtactagcccttctaaaatgcttgccttctaaaatgcttcttttttctcctttgccgtggatgttcagttacagagattgctttcttggcttggaggtccctgcgtgctg

SEQ ID NO: 72802 - DNA, 600 bp, Chicken  19866894353198_2
gggtgagagacgtcctcaggcttgtgtctgtaatgtggacaaataaatgccatagatgcccacgagtatttctgaacagagcagtttccttagggattcaattagttacctcatgatctgttgtaaaaacagaaacgcgtgaagcccagccaggccctgccaggaagatttcycttcctggtttacttacagtatgttctgctctacgggaacataaatgttgtttcttgggtgatttctgttaaaatcaggcaagctgtggccatctgtatcatttgttcgggtgaggtttaaagtagygttggcagcaaaatcgtgaaccgaagttgtttgtaaaaaccactgttgacaaaacaactggaagtactagcccttctaaaatgcttgccttctaaaatgcttcttttttctcctttgccgtggatgttcagttacagagattgctttcttggcttggaggtccctgcgtgctgaagctctctgggcacagctcagcgctgttcagagcgtagtagctggtccgtagtgtgaaaggcgaattgcactgccaaaatgctaactgctttgctgcagtcattgttttggcttttttattttttt

SEQ ID NO: 72803 - DNA, 599 bp, Chicken  19866894353209_1
  misc_feature (1)..(77): n is any nucleotide
nnnnnnnnnnnnnnnnnnnnnnnnnnnnnnnnnnnnnnnnnnnnnnnnnnnnnnnnnnnnnnnnnnnnnnnnnnnnntttatgatttaattttattctttttctaagttagagacagaaatagaaatataaataaggcatttgctcaactaccctgtgcagaagacggatgtgaataaaggaggtttctatcagtacctttttttgctcagccttcactttgcagcttcctcattcactttcagtctgtaatgagaaaaagctgatgaccctctcagttatttcttgatttctgggaaaygtgcctccaactaccaaatagaaactcactgtcacctaattgcactaaaagctttcctcatttgcagtgtaaagaaaatgaaccgagtgagcatctggaaaaaaaatccattttcctcttggaggaaaacaccactagtctgttaggaacaaaaacgtatgagtttgtattgcataagctgtgctcgctctatggatactcatggaatttgtttccaggcctttgtgacccctttaacagtcatcagattttctgcaaaagtatttcggggtagccagcaaagcctgtgtagctactgt

SEQ ID NO: 72804 - DNA, 600 bp, Chicken  19866894353209_2
ctatggatactcatggaatttgtttccaggcctttgtgacccctttaacagtcatcagattttctgcaaaagtatttcggggtagccagcaaagcctgtgtagctactgttctgtgagtgacctgagctcagtgtgattctgggagtgcaaataaatgtggctgtgtttgtgtagctgctggcaaaatgcaggactgattagctcaagcgcaacctcatctcagtatatcaggagctcaagtctccagctggtgtcccagcacggtttgtgctttgctctatggatgttgcatcctgcamagatctgagctccagcccagtggttccacagtgtaagcagtattctccaggcaagctgtaggaattgaaggccagatcaggaatgctggttaggtgcccagcttctgtgtaaacattactagatttcaaaaggaattatgcagctaaatatctctgtacatctgggcattagtgttttttctccaaataaaatgcacttaagcctactctgagatgggaagaatccatcccagttgactgccacttggcagctgtcctagcttgaaacccttttggatcagattgtttgtgcaactgctg

SEQ ID NO: 72805 - DNA, 402 bp, Chicken  19866894353214_1
cagctcaagtctcacagtactttgccccactccacaacaacagcatcctcatcacaaacagctaatattagtcctaacttccttctaacaaacagaaagggagagcaaacaggttatcactttcaaccataaacacacataagcaaagaaaataaatgaggaaaaaaagagcaactgaagactgcataaacttcttcataagcacctgcaggatttaatagcactgtaggagtaatccacttaaagcaatccagtaacagaacaccgaagtgccgcagtgctgagctggctcttagctaycccacatctccactcctcctcaatgtaggaacaaaagcactgtgtgccctagctttaatcccacatattctctgagctatacctagggtcataaaatcataa

SEQ ID NO: 72806 - DNA, 600 bp, Chicken  19866894353227_1
taaagacagtttggtttggttttatttgttttctacctgctatgggaagactgaaaaagcagcttgaaccagtttatgtctgtgtgtgcatttagtcaagcttttgaattcagtttaggagatggaaatcaaggtaagagaactttaaaaaatgttttctttcaagccacatcctttctctaccactttcccagtttcacacattcattaaaagtggagatatactgcagagataaaacaaacccaacccatccaagttggaatgtattgctatttgatttagaaacactccttttaagkcttagagtctataaaaatcacatcaagagaatactgtactctgtggtcatgtttcagtaaagctgacaggaaatcaaaactgaaaggattcttctgtaaagccaacttgctgtaattgaagccaggggaaaaatatttatctgtttacttgactaagaagaaagaaacaaaaacatattttcctccaatagtacagggggattagattgttattagtcacttgtgtgctggactttcctccagatctcttctaatattttgtcttaagttcaaaacaaacacaatatcagctctaaggaa

SEQ ID NO: 72807 - DNA, 600 bp, Chicken  19866894353229_1
acaacagcatgaggtcttggctggtcctgagctgcctgaatgctcgtttaaacaaaacttctacagtttaacttactggaggggcaacacttcagctgctgaacaccctgagaatcagaggtgtcccagtgtgatttagagcctttgctcattaataggccattaatagtgtatgtgaagaaaagtggaagagctgcatgccaggacaaagcctgcgcttccttgacacatcttacgtgtatcggtggaatctttatttatagctgcaacaacagaaaggaataaattgtgagctgaacrtcactcagctaaagcccccagcactgctggcgtctgacagctaccgcaggagctgagttagatttatatgagtgtggaagaggagcttacacacttggtcttgtcagcacgttttctaatggaatgaaggacgctccgaaggccaaaaaccctctgtgtgagggatggagcccacttgcatagcagcatccaaaagtgatattctgggatcttacaagtcagcacccgggcagtcccaccacatccaggtatgggtgctaccagggcatggaaaccacagctctaaggtgatgtaacacc

SEQ ID NO: 72808 - DNA, 599 bp, Chicken  19866894353234_1
  misc_feature (1)..(59): n is any nucleotide
nnnnnnnnnnnnnnnnnnnnnnnnnnnnnnnnnnnnnnnnnnnnnnnnnnnnnnnnnnnccttttgttttcccctctctaccctccccactactccttcacattccaaccctctaggcaaacaactcaaccctgctgtaccaagtaccttcatgcttgtatttatggcagcctatttataacagcagatataaaaatcacctcccattgccctgcagtaagatgattgttcctgagtgaggtggaatggatagggtggaggcccttggtaggcagacagcatagtcccttgctcccagcsaagtcccatcctgcacctgtgccttaccaggagagtttcttttgcattttcctacctgaaaagaggttgtawtgaggtgggagtcagcctcttctctcaggtaaccagcaataggatgcgaggtattggcctcaagctttgctagggggagatccagatagaatatttggaaagttttcttctcagaaagagtagtgaggcagtggcacagactgcccagggatgtagtggagtcactgtccctggaggtgttcaagaaatgttgagatgtggcaccaagggacacggttagtggggat

SEQ ID NO: 72809 - DNA, 600 bp, Chicken  19866894353234_2
cctctctaccctccccactactccttcacattccaaccctctaggcaaacaactcaaccctgctgtaccaagtaccttcatgcttgtatttatggcagcctatttataacagcagatataaaaatcacctcccattgccctgcagtaagatgattgttcctgagtgaggtggaatggatagggtggaggcccttggtaggcagacagcatagtcccttgctcccagcsaagtcccatcctgcacctgtgccttaccaggagagtttcttttgcattttcctacctgaaaagaggttgtawtgaggtgggagtcagcctcttctctcaggtaaccagcaataggatgcgaggtattggcctcaagctttgctagggggagatccagatagaatatttggaaagttttcttctcagaaagagtagtgaggcagtggcacagactgcccagggatgtagtggagtcactgtccctggaggtgttcaagaaatgttgagatgtggcaccaagggacacggttagtggggatgggttgatggctggactaggcgatcttagaggtcttttacaaccttaatgattctatgattctaagcacttgg

SEQ ID NO: 72810 - DNA, 587 bp, Chicken  19866894353235_1
ggggagcggatccatcacatctgcgggatgaaaatgacatttcgggttcaaaaaaagggaatttggggccatccctatggggcttcaggccctgaatgtcacactggaccttgggagagagagtttggggcaaaaaactgcagagttgtggcagaataatgcaggtttggggaactccgaatgaggggagggatttggggggcagaaggattgcaggaatgtggggcggatgtggggacactgtgggaaggggatgcagggatgggggcacatgggggacatggggtatggggacatacrgggacatgggaatgtggggccatcacgagatgggggctaccatgagggctatgggccaccactgggagatgtgggccactataatgaatggggaccaccataaggggctgtgggccaccgtggcacggagcgctgccatctcagcacatttaatgctgcagttgtggtggactcaatggaactggggaaaactcaaagaaactcaaccaaattggtagaaaagtcagtgaaaatgggcaaatctcaatgacattcgtggaaaactcaacggaattgagggaaaactg

SEQ ID NO: 72811 - DNA, 600 bp, Chicken  19866894353240_1
gagggtatccccagcggcagctcaatagagcaggtggcctgcatggcaccggtgcacagggagtcaggagcctgtgtcttatcagagcatataatttaaaaatcattcagcctatttttttctcctgggggacgtgatgatgatgacacaggattcttatgctagaaactaattgttaacttgcagaagaagtcattcagcacaaatcccaccggaaaagggctgggtgatggatgtttctggatagcaggccaaggtgccatttgtttttcaaccaatagttctgtgggttacctcaaygttttcatgccaagtacctcgcagacttgaaaagagagaacatgttaaaattaaacagtgtttacaatttctgtctgctaatatgtatgtatttcaagcttakagaaaagcaaccattccttccctctctctgggatttctgactggtgatcagacttctttgaagcaaagcagtggctgtgtggagaacttagtgttaagaaactgtatcaaacaggaatgtagcaggtaggtgatgctatggaaagaaatgtaagattgcatatgcatctgtccttacagccatagccagtagtgatt

SEQ ID NO: 72812 - DNA, 600 bp, Chicken  19866894353240_2
cattcagcctatttttttctcctgggggacgtgatgatgatgacacaggattcttatgctagaaactaattgttaacttgcagaagaagtcattcagcacaaatcccaccggaaaagggctgggtgatggatgtttctggatagcaggccaaggtgccatttgtttttcaaccaatagttctgtgggttacctcaaygttttcatgccaagtacctcgcagacttgaaaagagagaacatgttaaaattaaacagtgtttacaatttctgtctgctaatatgtatgtatttcaagcttakagaaaagcaaccattccttccctctctctgggatttctgactggtgatcagacttctttgaagcaaagcagtggctgtgtggagaacttagtgttaagaaactgtatcaaacaggaatgtagcaggtaggtgatgctatggaaagaaatgtaagattgcatatgcatctgtccttacagccatagccagtagtgattgtccacctgtatttagctatcactggactaagtctgcagtacatccagtggtatccccccatgctctggcatgactgaaacattggtgaactgaagtgagttc

SEQ ID NO: 72813 - DNA, 447 bp, Chicken  19866894353240_3
tctgactggtgatcagacttctttgaagcaaagcagtggctgtgtggagaacttagtgttaagaaactgtatcaaacaggaatgtagcaggtaggtgatgctatggaaagaaatgtaagattgcatatgcatctgtccttacagccatagccagtagtgattgtccacctgtatttagctatcactggactaagtctgcagtacatccagtggtatccccccatgctctggcatgactgaaacattggtgaactgaagtgagttcagctttttacttacgcatcttctactcccttttcygccttcaaatatgtcttctagccccactgtcactgggtcgtgaagccctctgggttcccctagctttcagagtttcctcagtacccctcagtcatcagggtaatctcaccagtcaataaaattatggagactcttcatggtaatcac

SEQ ID NO: 72814 - DNA, 600 bp, Chicken  19866894353245_1
ttttttttagtggaagatacagagcaagcctgtggcaaagaactcatacacattttagctccataccagcaggtttcacatcaggtgccaggaagctagttcaggtcctgaagtagcacagctgcatttgctcagcagtggaatcagaccaacaaacctgactgcacagattaagacagatgccacacaagacaaccatgctgtttcccagaccacagcattgtgttacaacacagaaacttactggttttcattgctctaccttgggaatgactgttatcttttgcacagtataactayataaatgaataatattctgatgcaacasatcccatgaaagacttgctgctacacttaaacacacagtaaacataattgggwgttgctttctgaagagtatagtgttccctgttctatacgcaggaactttccactaatcttgtcgtaacattgctcacagtaagtacatgatgaaatccactcttgcctcaagaccagttatacacaaatgtaaaaaaacaaaactccttccctgattattcttaccatgttaaagtaattacgaatttttgttcctttgtctatatcccatatgaaaat

SEQ ID NO: 72815 - DNA, 600 bp, Chicken  19866894353245_2
cctgtggcaaagaactcatacacattttagctccataccagcaggtttcacatcaggtgccaggaagctagttcaggtcctgaagtagcacagctgcatttgctcagcagtggaatcagaccaacaaacctgactgcacagattaagacagatgccacacaagacaaccatgctgtttcccagaccacagcattgtgttacaacacagaaacttactggttttcattgctctaccttgggaatgactgttatcttttgcacagtataactayataaatgaataatattctgatgcaacasatcccatgaaagacttgctgctacacttaaacacacagtaaacataattgggwgttgctttctgaagagtatagtgttccctgttctatacgcaggaactttccactaatcttgtcgtaacattgctcacagtaagtacatgatgaaatccactcttgcctcaagaccagttatacacaaatgtaaaaaaacaaaactccttccctgattattcttaccatgttaaagtaattacgaatttttgttcctttgtctatatcccatatgaaaatatttccatcgtgacccgcggaaagtaca

SEQ ID NO: 72816 - DNA, 600 bp, Chicken  19866894353245_3
caggtgccaggaagctagttcaggtcctgaagtagcacagctgcatttgctcagcagtggaatcagaccaacaaacctgactgcacagattaagacagatgccacacaagacaaccatgctgtttcccagaccacagcattgtgttacaacacagaaacttactggttttcattgctctaccttgggaatgactgttatcttttgcacagtataactayataaatgaataatattctgatgcaacasatcccatgaaagacttgctgctacacttaaacacacagtaaacataattgggwgttgctttctgaagagtatagtgttccctgttctatacgcaggaactttccactaatcttgtcgtaacattgctcacagtaagtacatgatgaaatccactcttgcctcaagaccagttatacacaaatgtaaaaaaacaaaactccttccctgattattcttaccatgttaaagtaattacgaatttttgttcctttgtctatatcccatatgaaaatatttccatcgtgacccgcggaaagtacaatcctttggtcgaatggatgggcctccagaacaaaaacttcatcatcatgacc

SEQ ID NO: 72817 - DNA, 600 bp, Chicken  19866894353246_1
ctgtgcactcagtggtggcctttcacgagtccaagccccctcgcactgtggtgaggggtcggctcgtttccttttgcttctgaatcatttaagcttttcagttctgaaggctttcagaactgctctctgatggaacaagcagagctgtgtgcaatagtgaagacctttcccgtccgagtcctggattttggcattgctttttgaaaccttagctccaaacaacttgttgttgcgttaaaacatcaaactgggagttgcagcgtggccatctgggcctctaagaattgcatgtgcaggacsggatcctttgatgaaagtgctgaagtagtaggcccttgcctaattcttgcccctacagcaagaaatgacctcgtgtaaagctatcatccgttttcttaaatargaagatgagcctgttatgaatgtcagtactgtcttttaattgaaaggcacaattcgttcttaactcatgtaaaagaaaagtgtgtctgtttgcacaatgaagcagaacaaacagatgttgcactggtgaaaaactagcgtgctcacactatttccatagctaatgtttgcctgcaggctgctgatgctttccctgtg

SEQ ID NO: 72818 - DNA, 600 bp, Chicken  19866894353246_2
ctgaaggctttcagaactgctctctgatggaacaagcagagctgtgtgcaatagtgaagacctttcccgtccgagtcctggattttggcattgctttttgaaaccttagctccaaacaacttgttgttgcgttaaaacatcaaactgggagttgcagcgtggccatctgggcctctaagaattgcatgtgcaggacsggatcctttgatgaaagtgctgaagtagtaggcccttgcctaattcttgcccctacagcaagaaatgacctcgtgtaaagctatcatccgttttcttaaatargaagatgagcctgttatgaatgtcagtactgtcttttaattgaaaggcacaattcgttcttaactcatgtaaaagaaaagtgtgtctgtttgcacaatgaagcagaacaaacagatgttgcactggtgaaaaactagcgtgctcacactatttccatagctaatgtttgcctgcaggctgctgatgctttccctgtgctgagcagcaggctgcatggccaggctgtgctcacagtgcctttaaaatctgtgtgctggtgctggtgcgcagtgctgccttctgggggctgtatgggctcac

SEQ ID NO: 72819 - DNA, 600 bp, Chicken  19866894353247_1
gatgctatgacagtggtatttctgagcactcttgagatagtgaagaggtccatctaacctctgcatccagtttcatactgagcttttcttgaccccttttctgacatctaaaatattcattagatagagccacctgttctacttgcctccagaaaaaggggcaacaagcccaattccttctcccacttcaacagccctttgctgttttgtagcaaaatgcctaaaattgctataaataaaatatgacgtcaggtcagtattgagccacttgttagatgatacttatatagaggtgaaaaktttgttgtcagtttgaagggaagaatttttattgttttgatgcaagaggaacttttaaaacagtttcctatctctttattttgccattactgtactctatcctgtttcttacatttttgatgagtagagtatatttgacccaatgattataactgagatgcttggagttgaaaatgtttttgttgggagtgggctgacatgctgataaaaaacatgaactacactccatgtcaaattttatatagcaaatttttcaaggctacttgaaactttgatattgcaaaagcataagtcttctgt

SEQ ID NO: 72820 - DNA, 600 bp, Chicken  19866894353248_1
gcttgcctcttatcagcagtattctgtattcctacatgctggacatcttccatctccctttctagcatttcaaagctgacatcaaccattcttgataaaagatgctctactgtattcttacatatgcctaattttccactcttttccacctttctttttatctccttcatacagcgtgacactggtatgagctcttttgtgaattttactttaagttagccctttctagtataaaagaatggtaatcttgctttaaggcttgtctctaggcagttacattccactgtgagaaagtgttartttttctacacagaccrtagtattgctttattcatgcaactccagagcgaaatttcagtacatggtttcttagtacaccattttctttcttactgccaccttgcttcatgtttacttcacaactccagttgaagaagcagatatggcatctgcataaccttttgactgaaatctgacctgaccttggagccctgtgcaaagagtgatgaattccctccaacaggtcactggaggaacaagagatgaagaaactgatattccttcacctcagatccctatatagtttgtgcaggatggata

SEQ ID NO: 72821 - DNA, 600 bp, Chicken  19866894353248_2
agtattctgtattcctacatgctggacatcttccatctccctttctagcatttcaaagctgacatcaaccattcttgataaaagatgctctactgtattcttacatatgcctaattttccactcttttccacctttctttttatctccttcatacagcgtgacactggtatgagctcttttgtgaattttactttaagttagccctttctagtataaaagaatggtaatcttgctttaaggcttgtctctaggcagttacattccactgtgagaaagtgttartttttctacacagaccrtagtattgctttattcatgcaactccagagcgaaatttcagtacatggtttcttagtacaccattttctttcttactgccaccttgcttcatgtttacttcacaactccagttgaagaagcagatatggcatctgcataaccttttgactgaaatctgacctgaccttggagccctgtgcaaagagtgatgaattccctccaacaggtcactggaggaacaagagatgaagaaactgatattccttcacctcagatccctatatagtttgtgcaggatggataagtaacrtgagaaggaa

SEQ ID NO: 72822 - DNA, 600 bp, Chicken  19866894353248_3
acacagaccrtagtattgctttattcatgcaactccagagcgaaatttcagtacatggtttcttagtacaccattttctttcttactgccaccttgcttcatgtttacttcacaactccagttgaagaagcagatatggcatctgcataaccttttgactgaaatctgacctgaccttggagccctgtgcaaagagtgatgaattccctccaacaggtcactggaggaacaagagatgaagaaactgatattccttcacctcagatccctatatagtttgtgcaggatggataagtaacrtgagaaggaataaatcttcagactattaatgtgggataaataaacagctgtgcaattcatggatttgatctatgaagggtatgacatagggatatttgatctataaaaggtatttccagtgtgtgacttacaataagaactcaaaacactctcaacagctttttgaatatgcttggctttcaggggagatgagctgcacagagcagagaagcgcagacattcaaaatccttcttaactttgaagaaacagccaatagcacatccatcagtgagaggaatgggtgaaaagatcacaaacca

SEQ ID NO: 72823 - DNA, 600 bp, Chicken  19866894353249_1
tctcagatttctctttaaaacgatttgttatatatatatatataaaaagtcaaagagtgcattgctaagggctgacttcaccaaggtgtggctgaaatatcatttaatgacccaagggacagcacagctctgctgttgcactgtgagggcactgtcccacgaagccgtccttgtgtggcctgaatgccatgagctgatcagagaggtggtgaaggcaaagaaagccaaagtaggacagagcacagcacgttgagaaattccggttaatcttcacaacgttcagagctaatcatcagggcygtcttgttcacatgtgggggaatcctatgtaagaaattcccacggtgacagaaagcgtgagcccaacactgctgtctgtgctcacagcacccctctgtgccgtaagcgctgagtcgcagatgaaggcattaaataacacagatccaccaggctggtgctaagtgaggccaattaaactgatgtcacttactgttggagcaagctgaagcagatcttgcagagagttattcattcagctccaaagctgtccataattttccccttattgctcggtacatggcgtgccgtctgctcgcatcc

SEQ ID NO: 72824 - DNA, 599 bp, Chicken  19866894353265_1
  misc_feature (1)..(176): n is any nucleotide
nnnnnnnnnnnnnnnnnnnnnnnnnnnnnnnnnnnnnnnnnnnnnnnnnnnnnnnnnnnnnnnnnnnnnnnnnnnnnnnnnnnnnnnnnnnnnnnnnnnnnnnnnnnnnnnnnnnnnnnnnnnnnnnnnnnnnnnnnnnnnnnnnnnnnnnnnnnnnnnnnnnnnnnnnnnnnnnncaaagcaatgcaggtgttggaatccgtaggcacacagtgacaaattgttatggctcaccacggttctcagctgctctctggacctgaatcttgcatgaataaattgccagcagctgtgtgagcytcattgccttacagagatcgtgcttcagggtcctctggaagctgacggtgagaagccagccttcgctgagcagagccgataatggcaaatcagaggggaacagctttaaagaagtttcaggtgaaacaatatgttctttctttatttcttagtggacttggggtgagctggaggactgtactgaaagaacagtctgaccaagtggcaagaaaggaatattctgcaaaaaaacaacaaagatgggagttggctgggtttgcaaggtagcagctgcatttggggtgaaagaggatattttt

SEQ ID NO: 72825 - DNA, 600 bp, Chicken  19866894353274_1
ctttggatgtcatgaaacacactccacttttccgagcttgtgaaatgggacacaaagaagtgatacaaacactcattaaaggtcagctgttaaaaaatttacaaaactgttcagatttctgatgttcctttatgtagagctgtgaaattaatagcattactgagcaagaaggggagaggaaaattactcctctaaaaaaatattgtctgtaagtaccctctgtggaacagcattagaaaataacaagaggtttttcagagcactgagcaaaagactggcagagttaaatctaaactttcraaacagggatggttctttgcactgttcttttctgtccaagcctgttcaagtacgttctaatctctccaactgcctcatcccccagcaagccattgctttggggggtttttcttctttctttttgttctgttctcaatgaatgagatcaaattaagctttcttctgagacaaagcatttgtagtcatctttggaaattttttggctatttaaattcatcttcatctttaagtagggtagttatcaaaatccaaaatcattaatattttcccgtagttggttgttagaaatagtatggtatt

SEQ ID NO: 72826 - DNA, 599 bp, Chicken  19866894353278_1
  misc_feature (1)..(26): n is any nucleotide
nnnnnnnnnnnnnnnnnnnnnnnnnncatcatgtgttaactgttccttgggaaggcaaatgccatcactccaaatgttccctcttccaccttccctccagcttttgctatatgatgccatatggtatagaatatctctttggccagtctgggtcagctttcctggttctggccctcgcccccccctctcccacccggctccttgtgcaccaccagctcctcatcattaggacaagcacaaggagctgaacattccttggctccgtgtaagcactgctcagcaacaattaaaacaactatktgttatcaacattgttttcatcaaaaatacaaaacacagcagcatacaagcctctgctaagaaaatgaactctatcycagccaaaaccataacatgttgccaaaaaagtcatggaatgaaagatgaaactgaatgcaagacagcatctggatagcactgcaaagcagcagaaggagctgtaactacctcagtactacagaagtttawgtcacatatatcaaacagtatgaagatgaacatcaccatggatatttaattgaaaacacttcagtgggaaatattaaagcagataaaataaa

SEQ ID NO: 72827 - DNA, 600 bp, Chicken  19866894353278_2
tccctcttccaccttccctccagcttttgctatatgatgccatatggtatagaatatctctttggccagtctgggtcagctttcctggttctggccctcgcccccccctctcccacccggctccttgtgcaccaccagctcctcatcattaggacaagcacaaggagctgaacattccttggctccgtgtaagcactgctcagcaacaattaaaacaactatktgttatcaacattgttttcatcaaaaatacaaaacacagcagcatacaagcctctgctaagaaaatgaactctatcycagccaaaaccataacatgttgccaaaaaagtcatggaatgaaagatgaaactgaatgcaagacagcatctggatagcactgcaaagcagcagaaggagctgtaactacctcagtactacagaagtttawgtcacatatatcaaacagtatgaagatgaacatcaccatggatatttaattgaaaacacttcagtgggaaatattaaagcagataaaataaatgttaagttgtattaaggaggtgacaaagaatagtaccaaatagaatgaaaaccaaagacttctgctgctggtcactg

SEQ ID NO: 72828 - DNA, 600 bp, Chicken  19866894353278_3
accaccagctcctcatcattaggacaagcacaaggagctgaacattccttggctccgtgtaagcactgctcagcaacaattaaaacaactatktgttatcaacattgttttcatcaaaaatacaaaacacagcagcatacaagcctctgctaagaaaatgaactctatcycagccaaaaccataacatgttgccaaaaaagtcatggaatgaaagatgaaactgaatgcaagacagcatctggatagcactgcaaagcagcagaaggagctgtaactacctcagtactacagaagtttawgtcacatatatcaaacagtatgaagatgaacatcaccatggatatttaattgaaaacacttcagtgggaaatattaaagcagataaaataaatgttaagttgtattaaggaggtgacaaagaatagtaccaaatagaatgaaaaccaaagacttctgctgctggtcactgaagtgccatttactaatatagaaggagaactgcaagctgcagagtttcaaatataccagctaaaatggtacagaagacatcagagaaaaggatagttccaaaaagaaagaaagaaaaaggaggaaggaag

SEQ ID NO: 72829 - DNA, 600 bp, Chicken  19866894353286_1
ttcatttaggcctctggttcttgcagagaaagtaatttgctttgtttgttaggctggtcactgtgctggactgttcccagctcctccagacatcatctttgcatggaaaagctgctagcccccagtcaccatccaaactgactggaggtgtccaaggactgtgaaaaatcccctttcaccatcttccctggaacacagtccacatgtaaatgacaggatattcaggttccctttcgggaaaccaaacagtggtgcaagctgccttcccttcttcggtctttcacaatctctgcccttctygacctcttcatccccaggagctactcagtccagccccagccttgagtgagaccaagcacagagggaaagacatggaaggtctagttcactttcttctccatgctctcacgtccacagctctgagagcagcaggagctgggctcaggaacgagtagttttgtctgaaagagtctagcagaaggaaatagcagtcagaaaagtgtccatcaccaaatctgtgcagctattctgagctcagaggagcctcttagcacagtacagagaagcagaaggtgtacattgcaaatggggccaggaggt

SEQ ID NO: 72830 - DNA, 600 bp, Chicken  19866894353290_1
agcattcagttactgatccacttgccatgtgtgattgcacattgctgttaaaaaggcatattggccctaatcctgaaaagctctcaggcatgtatgcattcagtgagataaaggactatagggagatgtctacatttcctacagggacatcatactgttaaaaacaatatgtaggtgcagtgttctaggattactttgtgagattaaagtgtgggcataaatgtacatatatgtgatctgcaaacatatatagtgcatctctgcctctgagtgacattaccacaggaataataaagcctmgaaatagcatagtgaaaaatttagattcctatttttgagtctttcatttgtgaactgccaaggagtagattgctatatcctcaaatttatatttgaaaattatctacaaataacttgtttgtgaaacttgtttgacagagtgccttgagtgtcacctmtttactgattcactgagactgtgtgtttgtctttaaactaccaggactaattctttacctcagcttgtggcaatttgtattctcagctccaaaaatccagagttcactcagcactgttgcctctgtgtggaattcttatgca

SEQ ID NO: 72831 - DNA, 600 bp, Chicken  19866894353290_2
taaaaacaatatgtaggtgcagtgttctaggattactttgtgagattaaagtgtgggcataaatgtacatatatgtgatctgcaaacatatatagtgcatctctgcctctgagtgacattaccacaggaataataaagcctmgaaatagcatagtgaaaaatttagattcctatttttgagtctttcatttgtgaactgccaaggagtagattgctatatcctcaaatttatatttgaaaattatctacaaataacttgtttgtgaaacttgtttgacagagtgccttgagtgtcacctmtttactgattcactgagactgtgtgtttgtctttaaactaccaggactaattctttacctcagcttgtggcaatttgtattctcagctccaaaaatccagagttcactcagcactgttgcctctgtgtggaattcttatgcagaaaaataacttttatgtttatctgcctgagagtttgacatcaaatttcatagaatgtcrcacaatccatgctgcttaatatgtagcaaagtataaggacaaagatcaggaactctagacttctcacagcccaataagcatgttaactatacctgtgc

SEQ ID NO: 72832 - DNA, 600 bp, Chicken  19866894353290_3
aggagtagattgctatatcctcaaatttatatttgaaaattatctacaaataacttgtttgtgaaacttgtttgacagagtgccttgagtgtcacctmtttactgattcactgagactgtgtgtttgtctttaaactaccaggactaattctttacctcagcttgtggcaatttgtattctcagctccaaaaatccagagttcactcagcactgttgcctctgtgtggaattcttatgcagaaaaataacttttatgtttatctgcctgagagtttgacatcaaatttcatagaatgtcrcacaatccatgctgcttaatatgtagcaaagtataaggacaaagatcaggaactctagacttctcacagcccaataagcatgttaactatacctgtgcccatcttgcagtcattactgtcagtgtgaatcaagaatgtcagtgatagacttagtcaactacaggacccaaactatgtaaatgaaaatgaattacatacaagtgcctgcctactgtgtgtgaatgtatgtatttatttacacatactaactggcaaaaatgctttttaatttacaagattcagttcttcaactaattcaaa

SEQ ID NO: 72833 - DNA, 551 bp, Chicken  19866894353304_1
tagctgagaatttgaattgttttaaggcttctgaaggatggtggaaatggacaatggacaatgtatttttacctctcaattaatgaaggaaattatttaagaacacattatgacagtgatatgagagctgaagccttggtcttaatggtaaaaacataggcagtgggcatcagtatgctagaaatcatcaaaggtattacagaaggatgtgaaatttgtttgaggcataatcaaacaaaacaaaagagtaactctgggagttactagtagattgatttttcaagactagaagtgtaaagkttaaaaaacttattggtgtttgtcaactgacctttttaggtcagccacaaactttcctatgtcctatcaacaaagctagagaagtagtcagtagtagagaagtttggagtttctgaaggattgtcgtgagagagaggaccccacattacagaaggtataatttagtgactttttaggtttttgcagatcaagtgggatttacacactcaatagagaccacaatctaggagaaaaaaaaaaaaagaaaaaaa

SEQ ID NO: 72834 - DNA, 599 bp, Chicken  19866894353308_1
  misc_feature (1)..(94): n is any nucleotide
nnnnnnnnnnnnnnnnnnnnnnnnnnnnnnnnnnnnnnnnnnnnnnnnnnnnnnnnnnnnnnnnnnnnnnnnnnnnnnnnnnnnnnnnnnnnnngctccttaaatactgcatacaaattgaaactgttcatcaaaaaaaggcaagttccccactctccatctcatctcatgcccagctgggtaactgaagcatctatactgcaatcccttgaaaaaagttccatcatcttagcccatctcctacatgtcataataatgcttactataaaacaagatttgctcagaaagtatctgaggagsagttgaatgaagtcatgaatccaagtctcagagttaacagctgcaactgtgatgtaacaagaaggagcagttcctttcactgctggagcagagagaagctatatgtcatgtatgaagaaggaagagaaacaaagcgttcgtcattgtcccagctggatttagaaatttgtgaatcgggtaaaccctgagttttatgtatagctttctgccaaatgaacagcactgcagtgctgccatcctcgcttactctttcttttgtcccatttatttgtttgctaacccaaatcaccaccgttcac

SEQ ID NO: 72835 - DNA, 600 bp, Chicken  19866894353313_1
tgtcttacccatggtgactacctcaacagatgtaagactctgcattcatctgtgttacaaagtggtaatcagatccccttagtaattgtaagggtaagctaaggaaggaaaaagaaaacaatattttctgttgacttgcgatttttatgcatgttgatatctcagtcatcatttgggtagtatacccaaatgaacattcttccttttgttcctcttaatctgtgttttgcaatttgaactttgttgtgacttcatagtgattcagcaaccacctgtgttcattttctcaatggagtggtrgtggtggtgatgaccttttcataaatcccattaagaatctatgccttcatgaagcaaaacttattagtacctaatgtaacttctcatcattacctaatgtaacttctccttctgaaccatgacctataaaacatgaaaatctttgagttgcatgtggttaatggctgctcccctttctcatgcagtctgtctgcattgtggatacctccctgcatgtattgagccaccaaacataaacactatcttcttctgatggtgctattcctttttaatatagtccagcaggcttttcttgtactg

SEQ ID NO: 72836 - DNA, 600 bp, Chicken  19866894353315_1
tctgtactgcatcttgaaggaaaactcttgtttggccacgagaaacttcaaatgtcaatattaacagtctccaaagcaggcttcaaggcatccaggtgattaaaacacatttaagaagatagcaagaactgagaaaactcatgggaagacattaggacagatcaccccgaacttcacagaggaatttgggcagtgactctgatgactttgctaaaactacacaaggtttcattaaagccttagaacttcattagaagaacttttgccctaatgatgactaatcaaagcctaattattttrtgatgcaatcttgcctactgttgtttcccacagttttcctaaaacacatgtttaagtctgagcagaactagttcagccagtgaaactcaatgggcccactacagtggaacgctttcacctatacaagggaaagtaaaccagccattacagtgtttttgaggaggaaggactacgtccagggatttcaattcccagatgatatgtgaaatttacccartgatccaagaaccatcgcaggagagcagatcagagactacaactttgcacttctgcatgactgccttttgcccagttgagtgc

SEQ ID NO: 72837 - DNA, 600 bp, Chicken  19866894353315_2
tacacaaggtttcattaaagccttagaacttcattagaagaacttttgccctaatgatgactaatcaaagcctaattattttrtgatgcaatcttgcctactgttgtttcccacagttttcctaaaacacatgtttaagtctgagcagaactagttcagccagtgaaactcaatgggcccactacagtggaacgctttcacctatacaagggaaagtaaaccagccattacagtgtttttgaggaggaaggactacgtccagggatttcaattcccagatgatatgtgaaatttacccartgatccaagaaccatcgcaggagagcagatcagagactacaactttgcacttctgcatgactgccttttgcccagttgagtgccccctcttggagcsacatcttttgcacaacatgagacctaatgctgacaaaataaggtagagaacactggaaaactcccaaaaggtcggttttttcaggtgtgcatctagtagtcctgagcccaatgaaatatgggtagaaactcattaagatgggacaatgatcacacctagtgagagcaggctgccagcatggagcaagccgaagttacaccaga

SEQ ID NO: 72838 - DNA, 600 bp, Chicken  19866894353315_3
ctactgttgtttcccacagttttcctaaaacacatgtttaagtctgagcagaactagttcagccagtgaaactcaatgggcccactacagtggaacgctttcacctatacaagggaaagtaaaccagccattacagtgtttttgaggaggaaggactacgtccagggatttcaattcccagatgatatgtgaaatttacccartgatccaagaaccatcgcaggagagcagatcagagactacaactttgcacttctgcatgactgccttttgcccagttgagtgccccctcttggagcsacatcttttgcacaacatgagacctaatgctgacaaaataaggtagagaacactggaaaactcccaaaaggtcggttttttcaggtgtgcatctagtagtcctgagcccaatgaaatatgggtagaaactcattaagatgggacaatgatcacacctagtgagagcaggctgccagcatggagcaagccgaagttacaccagaatctggcagcagttgaatgaggttttgcatatgacagatttgatttaaaagcctaaatccctctcaggatctacttcaatgaaaaccatagaaatga

SEQ ID NO: 72839 - DNA, 600 bp, Chicken  19866894353320_1
agctcctgaaaattttcagtgggcacacagtcatatcttggcttactttattatgcaattaattattaaaatatacatttgagtataaaactttcttcaaaaggcacctcaaggataatgtattttgtaaattgacaaacagagggaacaagtttgactaatagaaccaaatgtagtacaaaatgtttaatagctgcattaaacagtacttaaccagaaatattctgttcagcagtactgctttggggagtatgagtgagagtttcccatcttggatagcagactgaattttgcatatasttttttttttcatacaccccctctggtcctatgagtttttagatgttcatttgtgcaagttgctatactcagagcataaaatgtactttgtactaggagttggtaagttgtattttatagttttttgaaggtagtatgttagtaatatcctcaagtaataaaaatggatggaacaattcaattagaaacaaataaaacccatataatccagcagattatatgatttgtagtaactttagaaataacttaatattaacatccctcatacaactaaaaacagtcatgaaaagtcatgtaaat

SEQ ID NO: 72840 - DNA, 600 bp, Chicken  19866894353321_1
tcccccctttaccatctgtacattaggaagcctttcaccatgttggtgatgtgccacctttcagttgggtcatcgacatctcattccctagcagcaagaccccagcctggaaagaacttcgggggtggagcaggaggcagcgaggcacagtagttgcaagaactcccagtgttggtggggtacacagattgttctgaagtatgagccatagtgcagtttccctccactgaataagctgcatcactgttaaatacattaggtttctctacttattcttcatatatcttaaaagctgatagrtggagataaaacaaaaaccatcctgggatagattaccacttcccaggtcctttaggggagtcagcataaccaggaacagattttgtagtgcagtttattcctccgagccccagtcaggtaaagctttccctccagcaaggccaggtgtgarattagtcacggccattgaaaagagtttaaataatacttgcattgtacatctctgtgctgagacrgggcgtttttatggtgcagtaacrcaagcagtcccttgacacagctagagaatcactgcagattcgactgaattgaccttttttt

SEQ ID NO: 72841 - DNA, 600 bp, Chicken  19866894353321_2
agttgcaagaactcccagtgttggtggggtacacagattgttctgaagtatgagccatagtgcagtttccctccactgaataagctgcatcactgttaaatacattaggtttctctacttattcttcatatatcttaaaagctgatagrtggagataaaacaaaaaccatcctgggatagattaccacttcccaggtcctttaggggagtcagcataaccaggaacagattttgtagtgcagtttattcctccgagccccagtcaggtaaagctttccctccagcaaggccaggtgtgarattagtcacggccattgaaaagagtttaaataatacttgcattgtacatctctgtgctgagacrgggcgtttttatggtgcagtaacrcaagcagtcccttgacacagctagagaatcactgcagattcgactgaattgaccttttttttccccttctttcagcaaacaagcgccgtaagtgcaatgctggtactggtgaaatcgctatcggggccaagagaacacattgtggatctggagatgctaacagtcaacagtttgaattaccgtacgagctcagtgttgagattaacaataat

SEQ ID NO: 72842 - DNA, 600 bp, Chicken  19866894353321_3
gtttccctccactgaataagctgcatcactgttaaatacattaggtttctctacttattcttcatatatcttaaaagctgatagrtggagataaaacaaaaaccatcctgggatagattaccacttcccaggtcctttaggggagtcagcataaccaggaacagattttgtagtgcagtttattcctccgagccccagtcaggtaaagctttccctccagcaaggccaggtgtgarattagtcacggccattgaaaagagtttaaataatacttgcattgtacatctctgtgctgagacrgggcgtttttatggtgcagtaacrcaagcagtcccttgacacagctagagaatcactgcagattcgactgaattgaccttttttttccccttctttcagcaaacaagcgccgtaagtgcaatgctggtactggtgaaatcgctatcggggccaagagaacacattgtggatctggagatgctaacagtcaacagtttgaattaccgtacgagctcagtgttgagattaacaataatagtgggaccttatgcattttagtggttttcaataacccttcactggcacttaaagcagccaaag

SEQ ID NO: 72843 - DNA, 600 bp, Chicken  19866894353321_4
atcactgttaaatacattaggtttctctacttattcttcatatatcttaaaagctgatagrtggagataaaacaaaaaccatcctgggatagattaccacttcccaggtcctttaggggagtcagcataaccaggaacagattttgtagtgcagtttattcctccgagccccagtcaggtaaagctttccctccagcaaggccaggtgtgarattagtcacggccattgaaaagagtttaaataatacttgcattgtacatctctgtgctgagacrgggcgtttttatggtgcagtaacrcaagcagtcccttgacacagctagagaatcactgcagattcgactgaattgaccttttttttccccttctttcagcaaacaagcgccgtaagtgcaatgctggtactggtgaaatcgctatcggggccaagagaacacattgtggatctggagatgctaacagtcaacagtttgaattaccgtacgagctcagtgttgagattaacaataatagtgggaccttatgcattttagtggttttcaataacccttcactggcacttaaagcagccaaagaatattatcttaaagaaagcactt

SEQ ID NO: 72844 - DNA, 599 bp, Chicken  19866894353323_1
  misc_feature (1)..(185): n is any nucleotide
nnnnnnnnnnnnnnnnnnnnnnnnnnnnnnnnnnnnnnnnnnnnnnnnnnnnnnnnnnnnnnnnnnnnnnnnnnnnnnnnnnnnnnnnnnnnnnnnnnnnnnnnnnnnnnnnnnnnnnnnnnnnnnnnnnnnnnnnnnnnnnnnnnnnnnnnnnnnnnnnnnnnnnnnnnnnnnnnnnnnnnnnnttttgcctctttctttctttctcttcctgaaaaatatttaagtgaatggtacgaataactcacaagctgctcatttcactgaagtctctggccaaaaaagatgctgaaaagggakcttgcttctattcatggacaatataaatttttgtggagtgtgtgtaatttacctttgaatgtaaaatttagaggaagcctaggctttctttcacgtattgctgtttatgggcagcaaacagttatcacagtaggtatttactcctgtggtcttgtgtgtactgtgcagtcctttgacggtaaaggaaggagttaacaaagttatttggtgccatccactawtattttcacatttctacattttcttttcttgggcaaagttttaaaaccccagtataagtcaggatgtttttgttaaag

SEQ ID NO: 72845 - DNA, 600 bp, Chicken  19866894353323_2
tttaagtgaatggtacgaataactcacaagctgctcatttcactgaagtctctggccaaaaaagatgctgaaaagggakcttgcttctattcatggacaatataaatttttgtggagtgtgtgtaatttacctttgaatgtaaaatttagaggaagcctaggctttctttcacgtattgctgtttatgggcagcaaacagttatcacagtaggtatttactcctgtggtcttgtgtgtactgtgcagtcctttgacggtaaaggaaggagttaacaaagttatttggtgccatccactawtattttcacatttctacattttcttttcttgggcaaagttttaaaaccccagtataagtcaggatgtttttgttaaagtttttcatgggcaagtggtagttccaaatgaactaagtggccatgataactcctcctgtctccctgctgttagatctgcactggatttgggatggacttccaggtaccattggaaacttttcagttttgtcccttaccattttccccatatgaaagagctgggattctcactgggatggcgaactgtttcccttgaagccattgacttcagttaaccttcca

SEQ ID NO: 72846 - DNA, 600 bp, Chicken  19866894353324_1
acagtggtggcaaagaaaccatacatacaggcacccagttaagatcagtttacatcaagatgaacagtctccaattaatttgccattattttaattcatctgcactccttcctgctacaactcttggtatgaaaagaagtagaaagcattgaaaaattattgcaatctcaaggatgcacaaggctttgctctgatctaaattaagagcgtcatgagaccgagaatctttagaaccaaaacagatggaaaaaaacatttaagtatgtaaatacctcctggtctggcttgcaactatacatmtgtgttgtcatgtatctaaccattttcaagccattcattttaaggctacataatccatccaagaaaatactattactacctgcagctgaagatactatgtagaactattatggctattttcctaggcacgtttggagtcaacttattttaagtaggataaatccctacaagggagccattcccatcacaccaggaggtgccctaagtgacacagaaaaaaatcaggttggcactggaggttacataacttggaaaagtaacagtggtgatggagctacattgtattccacttcccccatc

SEQ ID NO: 72847 - DNA, 600 bp, Chicken  19866894353330_1
gggtgttgccggccctcggtcgggacaagctctcttttgtgtatgcgtggatgagagagacacctagggagcctttttccagatgtgctcaagagaagaatctgagactctttgtgcatgaaatttgtttaatagatgagcttctgtctctccgggagtgcctggagaaagtgacggcgcaaccgcttgcaaattcgtcgaatttcctaacgctttaaatacgtttgcatggctttttggagttcttttccctctgcacagggaggaggaggcgaggccagcatatgtggaaagagctckcagctccgggcgccccttcccccatcctgctgttgtgcagggctctgccctgtggctggcggagctggtaggactttgctctgggaaaatttgcggcactttgggggcaggtggggagaactttctggagtcaacccgtatgagaaggtgaaargaagcctgactcctgcatcttgtttactttatggtccatgttggkttkttttttttttttttttggtttttattttttgctatggttctcacactgctccctccccccttcagctggaaggaagttggcaaataggggaaatacag

SEQ ID NO: 72848 - DNA, 600 bp, Chicken  19866894353330_2
ggagtgcctggagaaagtgacggcgcaaccgcttgcaaattcgtcgaatttcctaacgctttaaatacgtttgcatggctttttggagttcttttccctctgcacagggaggaggaggcgaggccagcatatgtggaaagagctckcagctccgggcgccccttcccccatcctgctgttgtgcagggctctgccctgtggctggcggagctggtaggactttgctctgggaaaatttgcggcactttgggggcaggtggggagaactttctggagtcaacccgtatgagaaggtgaaargaagcctgactcctgcatcttgtttactttatggtccatgttggkttkttttttttttttttttggtttttattttttgctatggttctcacactgctccctccccccttcagctggaaggaagttggcaaataggggaaatacagatgcagtgtgtcagaccgcagtgttggaacagcttttactgcgtgccctgagacaaactgctttctttctaccagctcaggtggcaaatggcattctgctctctccctctgtgatccttctcttttcactacccagggaaggcagcttggctcc

SEQ ID NO: 72849 - DNA, 600 bp, Chicken  19866894353330_3
gaatttcctaacgctttaaatacgtttgcatggctttttggagttcttttccctctgcacagggaggaggaggcgaggccagcatatgtggaaagagctckcagctccgggcgccccttcccccatcctgctgttgtgcagggctctgccctgtggctggcggagctggtaggactttgctctgggaaaatttgcggcactttgggggcaggtggggagaactttctggagtcaacccgtatgagaaggtgaaargaagcctgactcctgcatcttgtttactttatggtccatgttggkttkttttttttttttttttggtttttattttttgctatggttctcacactgctccctccccccttcagctggaaggaagttggcaaataggggaaatacagatgcagtgtgtcagaccgcagtgttggaacagcttttactgcgtgccctgagacaaactgctttctttctaccagctcaggtggcaaatggcattctgctctctccctctgtgatccttctcttttcactacccagggaaggcagcttggctcctgaaagttgtcttgtggccaaagactgagagccacgtgcatgtct

SEQ ID NO: 72850 - DNA, 600 bp, Chicken  19866894353330_4
tttcctaacgctttaaatacgtttgcatggctttttggagttcttttccctctgcacagggaggaggaggcgaggccagcatatgtggaaagagctckcagctccgggcgccccttcccccatcctgctgttgtgcagggctctgccctgtggctggcggagctggtaggactttgctctgggaaaatttgcggcactttgggggcaggtggggagaactttctggagtcaacccgtatgagaaggtgaaargaagcctgactcctgcatcttgtttactttatggtccatgttggkttkttttttttttttttttggtttttattttttgctatggttctcacactgctccctccccccttcagctggaaggaagttggcaaataggggaaatacagatgcagtgtgtcagaccgcagtgttggaacagcttttactgcgtgccctgagacaaactgctttctttctaccagctcaggtggcaaatggcattctgctctctccctctgtgatccttctcttttcactacccagggaaggcagcttggctcctgaaagttgtcttgtggccaaagactgagagccacgtgcatgtcttac

SEQ ID NO: 72851 - DNA, 599 bp, Chicken  19866894353341_1
  misc_feature (1)..(33): n is any nucleotide
nnnnnnnnnnnnnnnnnnnnnnnnnnnnnnnnntagttttgtattaaaactatttttggagcctagtgattttgacttcacaagccttaaaatgtttaggtgacatttgtcacctcagatactcagaatctggtctctgctgctcctgggtgatgagaccatacggttttgagagctgtataaattaacatataaccctcactctacaactgcttacctttttctttgcttccaacataaaaccaataagcatgatgttgtttccctgatgtatgtcttattcctctgcattttggatgyttgcagtgagttcttacagcagtaaaacagtagtaaaattggttttcaagargaatatagaaattaatcattaacaactgctagatattataggaagctgtaggcaaaaaggttctcagatgtaacygtgcagttcaatactgttaggtgaaacgcagtacatcaggtgttacagaagccactcgtttattgacaatttactcacattccaggcagcacagacagtcccagtcactgcacagaggtgtgagagggaatcgcatctaatcaggtgaggcatccaatacaggctcagtcca

SEQ ID NO: 72852 - DNA, 600 bp, Chicken  19866894353341_2
tttttggagcctagtgattttgacttcacaagccttaaaatgtttaggtgacatttgtcacctcagatactcagaatctggtctctgctgctcctgggtgatgagaccatacggttttgagagctgtataaattaacatataaccctcactctacaactgcttacctttttctttgcttccaacataaaaccaataagcatgatgttgtttccctgatgtatgtcttattcctctgcattttggatgyttgcagtgagttcttacagcagtaaaacagtagtaaaattggttttcaagargaatatagaaattaatcattaacaactgctagatattataggaagctgtaggcaaaaaggttctcagatgtaacygtgcagttcaatactgttaggtgaaacgcagtacatcaggtgttacagaagccactcgtttattgacaatttactcacattccaggcagcacagacagtcccagtcactgcacagaggtgtgagagggaatcgcatctaatcaggtgaggcatccaatacaggctcagtccaaagatggccctgcctcaacttacaccccctttctttctggcggtggattatat

SEQ ID NO: 72853 - DNA, 600 bp, Chicken  19866894353341_3
atctggtctctgctgctcctgggtgatgagaccatacggttttgagagctgtataaattaacatataaccctcactctacaactgcttacctttttctttgcttccaacataaaaccaataagcatgatgttgtttccctgatgtatgtcttattcctctgcattttggatgyttgcagtgagttcttacagcagtaaaacagtagtaaaattggttttcaagargaatatagaaattaatcattaacaactgctagatattataggaagctgtaggcaaaaaggttctcagatgtaacygtgcagttcaatactgttaggtgaaacgcagtacatcaggtgttacagaagccactcgtttattgacaatttactcacattccaggcagcacagacagtcccagtcactgcacagaggtgtgagagggaatcgcatctaatcaggtgaggcatccaatacaggctcagtccaaagatggccctgcctcaacttacaccccctttctttctggcggtggattatatatattatgcccacccggttacacatcacatgataacacattgcaataatcagaagctctggtcatagtgacctga

SEQ ID NO: 72854 - DNA, 458 bp, Chicken  19866894353343_1
aagggcttgtgggttgggacacagggagatcacataccagttgtcaccaaaacttgccatgctggaagcaagatgacccgttctacccctgtaggcagccagtcttactgtgcactaccttcataagagtattctatatatgattcctgagaaactgaagaagtaggagacctgaatgctggaattttccattacttctctgagtttttttttcagtaatagactagatgctccattcccaaagaaaattgttatgtacgtatttccaagattgtatttagcttgtaaatttagcacacrtgaacctgtaatgagagtgtatgatctcattacagcctgtgtgtgactttactgtatgtttggatgtcacatattcatataagctgaatatgaccgtataaatagcatccatttattattatttttttttatatcactgaatccaactacctatggaa

SEQ ID NO: 72855 - DNA, 600 bp, Chicken  19866894353347_1
tagtttatagctgaaagcacacttaggttctcactataatgtggtaaaattttgaactgctgcgaagctcagctgaaatatatctaatataccacactaaagaggacagagggtttttttcccccatgaagacgggagatatttgagtcctgtattgctcatatagatactgaaaattattttgttgatacctgttactgaaatgctaaaagatattttccaggaggagtcatttggaggtcttgtatgaaataataagaaataaaaagtcagtcatttaagaaatctataaatcccccyatgtaggtatctcagtgatgattcttttaaatatgttttgtttgaagcaccatttcctaggtaagaattaataacacacttctttcatctgtttcattcatctgctacaatagttaattcctccttcatcatttaattgacctgtcagtactcttcacactgtgggaagcattaagtcgcaacagacttctaaatgttattactgtattttaagagggaccaatagggttactattattatgttgtaacggcaaaagagctggcttatgtttaaatgggatttgttcagttcagaaaact

SEQ ID NO: 72856 - DNA, 599 bp, Chicken  19866894353349_1
  misc_feature (1)..(108): n is any nucleotide
nnnnnnnnnnnnnnnnnnnnnnnnnnnnnnnnnnnnnnnnnnnnnnnnnnnnnnnnnnnnnnnnnnnnnnnnnnnnnnnnnnnnnnnnnnnnnnnnnnnnnnnnnnnncgttcacttagtagtttcaagacttggggtttcttaggttaaattatttaaagataaaacagactatggtggctgcctgaaccctgatgggtagctgttcagcagttattcactgaggagcttttattaaagtttgtgagattcttgaatgtgtgttggagtatcagaaacgaaaacaagattgccaaatayggttttcctaaatctagcagccagtaaagtggactggtttacagaaggttggatttttttaacgttccttaaagataagagaaaagcatcagaactattcaaacagtcatttaaataaaagtggtccmggatgaaatcctgtatttgtgttattttattctactttaaagttacaatatttgacatgcaacagatgcatttaaatgtatgcttgaattctaagctggcagtccaaaaacagtatgtgtgtgtgtgcatgatataaataatatcaagtgcytcaaatgctcataagcttt

SEQ ID NO: 72857 - DNA, 600 bp, Chicken  19866894353349_2
gacttggggtttcttaggttaaattatttaaagataaaacagactatggtggctgcctgaaccctgatgggtagctgttcagcagttattcactgaggagcttttattaaagtttgtgagattcttgaatgtgtgttggagtatcagaaacgaaaacaagattgccaaatayggttttcctaaatctagcagccagtaaagtggactggtttacagaaggttggatttttttaacgttccttaaagataagagaaaagcatcagaactattcaaacagtcatttaaataaaagtggtccmggatgaaatcctgtatttgtgttattttattctactttaaagttacaatatttgacatgcaacagatgcatttaaatgtatgcttgaattctaagctggcagtccaaaaacagtatgtgtgtgtgtgcatgatataaataatatcaagtgcytcaaatgctcataagctttactgaatcgttttggacctaagmagaaggttggtcaggtaggagaagaaaatcacaaaatcatttgcacatagtatgagaggttgatgcatgtctgctgacaggcataaagattacttctaattctatt

SEQ ID NO: 72858 - DNA, 600 bp, Chicken  19866894353349_3
aaaacaagattgccaaatayggttttcctaaatctagcagccagtaaagtggactggtttacagaaggttggatttttttaacgttccttaaagataagagaaaagcatcagaactattcaaacagtcatttaaataaaagtggtccmggatgaaatcctgtatttgtgttattttattctactttaaagttacaatatttgacatgcaacagatgcatttaaatgtatgcttgaattctaagctggcagtccaaaaacagtatgtgtgtgtgtgcatgatataaataatatcaagtgcytcaaatgctcataagctttactgaatcgttttggacctaagmagaaggttggtcaggtaggagaagaaaatcacaaaatcatttgcacatagtatgagaggttgatgcatgtctgctgacaggcataaagattacttctaattctattctgtttttctcattcagttgtatatgcttcagtgctggtttcccctcttcttttttctgttttatttatgccatgcttatttaattattgtgtatctttaaattatggcgaaatgatgacttttcaactttcattgtaaaagtaggaagtaa

SEQ ID NO: 72859 - DNA, 600 bp, Chicken  19866894353349_4
agtaaagtggactggtttacagaaggttggatttttttaacgttccttaaagataagagaaaagcatcagaactattcaaacagtcatttaaataaaagtggtccmggatgaaatcctgtatttgtgttattttattctactttaaagttacaatatttgacatgcaacagatgcatttaaatgtatgcttgaattctaagctggcagtccaaaaacagtatgtgtgtgtgtgcatgatataaataatatcaagtgcytcaaatgctcataagctttactgaatcgttttggacctaagmagaaggttggtcaggtaggagaagaaaatcacaaaatcatttgcacatagtatgagaggttgatgcatgtctgctgacaggcataaagattacttctaattctattctgtttttctcattcagttgtatatgcttcagtgctggtttcccctcttcttttttctgttttatttatgccatgcttatttaattattgtgtatctttaaattatggcgaaatgatgacttttcaactttcattgtaaaagtaggaagtaatgaataaaaattcattagtctgataaacttattaagtaattt

SEQ ID NO: 72860 - DNA, 600 bp, Chicken  19866894353349_5
ttctgtttttctcattcagttgtatatgcttcagtgctggtttcccctcttcttttttctgttttatttatgccatgcttatttaattattgtgtatctttaaattatggcgaaatgatgacttttcaactttcattgtaaaagtaggaagtaatgaataaaaattcattagtctgataaacttattaagtaatttttgtgcactaggtaatttttagtaaactctatgtattgggctgtcatatctgcaagagtacatttcataaaaaaaactgtcttattcttgtttgacttggaagmtttttttttcattgtttacctttgccaaattattgttattttgctgtgattstaatgctgcattctgactaatggctagaggttttccctctgggcctttccccttaactaggccagaatgctgagtttttgtgttctctccagtggagtgaaatttttcatcatcctcttgtgtattctttttccatagggaaatacaggtatcctctgtgtgtttgttagctctggtgtgtagcagatttgcattgcttctgcaagtttacaacagtgccgctatctttgaggattaaacatctgata

SEQ ID NO: 72861 - DNA, 600 bp, Chicken  19866894353349_6
ttttttctgttttatttatgccatgcttatttaattattgtgtatctttaaattatggcgaaatgatgacttttcaactttcattgtaaaagtaggaagtaatgaataaaaattcattagtctgataaacttattaagtaatttttgtgcactaggtaatttttagtaaactctatgtattgggctgtcatatctgcaagagtacatttcataaaaaaaactgtcttattcttgtttgacttggaagttttttttttcattgtttacctttgccaaattattgttattttgctgtgattstaatgctgcattctgactaatggctagaggttttccctctgggcctttccccttaactaggccagaatgctgagtttttgtgttctctccagtggagtgaaatttttcatcatcctcttgtgtattctttttccatagggaaatacaggtatcctctgtgtgtttgttagctctggtgtgtagcagatttgcattgcttctgcaagtttacaacagtgccgctatctttgaggattaaacatctgataattacagaggatactttgaagcatccaacgtgaaaagatatgggaataaaaa

SEQ ID NO: 72862 - DNA, 600 bp, Chicken  19866894353361_1
ttttcctccattcctcagacgttaaggtataaataacaacggcgtcctctgtaagcccagaaaactttcacacttctttttttcctcaaaatcaactaagaggacacagcaggttttttgttctgttgtgtctttactttttgataggcgtgtgtctttccaggcagtcaataatagattgttataatagaagtgttgcactgcaataaaacttgagtacaccttcaaagcatggaggttgttttagtggattcagtcaaaccagtaactaattgcatgaacttatcctatgggagctgrctcctgaaaaaggctgcaggagcatatctgagatgaatagatgcacctcgtccttgcacttttgattcagtcaccaaagtttaataagtgagcttcagggagtaaattgcttcttacacattttcttttcttgaacatatggctcatatagtgggagtgatctgttttcttatgcacagtttacttttttttttttacttattttagcaaccaaaaaatcccaacaagtttaattcagaatcaagttatgactcagagaaaacaaaacaaaaacaccaacaagctttactgtatttagaa

SEQ ID NO: 72863 - DNA, 600 bp, Chicken  19866894353372_1
gaatgagacgattgcgactctttgtggtgtccccaaagcagctgctgcaggcgttccaccccgagtgatggagctcgtctttcaggttgggcatgggcaggcggtggatgacctgcagcgtcagacttgagattcagtctgggatcgtttttctccccaggcaaagaaatgggtctttgtgtcaaagcataaattaataaagagcagaaggaaacagctgtttgtgattcaggaagcggagtcagtgcagaatacaaagagctgaagtgagaaactgggagaggaaagttggacatcacratcgcatrgcatttgttaaatgttgtatgcygttaaattcatccaaagctttaaaaatttccaactaattgaggagttgtggagtaattatacagaaaacaaaaaccaaaccaaccaaaaaaacagaaaaaaaccacaattgtccgtgcactgcaagtcctggagttcacacgtttcacctgattgcatctgggaatgctgcaraccggctcattaatttgcactcttgctcctgacttttacccttcttccctagaactaagaggatttggagataacagaaagatccgtcacagtctc

SEQ ID NO: 72864 - DNA, 600 bp, Chicken  19866894353372_2
cgattgcgactctttgtggtgtccccaaagcagctgctgcaggcgttccaccccgagtgatggagctcgtctttcaggttgggcatgggcaggcggtggatgacctgcagcgtcagacttgagattcagtctgggatcgtttttctccccaggcaaagaaatgggtctttgtgtcaaagcataaattaataaagagcagaaggaaacagctgtttgtgattcaggaagcggagtcagtgcagaatacaaagagctgaagtgagaaactgggagaggaaagttggacatcacratcgcatrgcatttgttaaatgttgtatgcygttaaattcatccaaagctttaaaaatttccaactaattgaggagttgtggagtaattatacagaaaacaaaaaccaaaccaaccaaaaaaacagaaaaaaaccacaattgtccgtgcactgcaagtcctggagttcacacgtttcacctgattgcatctgggaatgctgcaraccggctcattaatttgcactcttgctcctgacttttacccttcttccctagaactaagaggatttggagataacagaaagatccgtcacagtctcaggaaatt

SEQ ID NO: 72865 - DNA, 600 bp, Chicken  19866894353372_3
cccaaagcagctgctgcaggcgttccaccccgagtgatggagctcgtctttcaggttgggcatgggcaggcggtggatgacctgcagcgtcagacttgagattcagtctgggatcgtttttctccccaggcaaagaaatgggtctttgtgtcaaagcataaattaataaagagcagaaggaaacagctgtttgtgattcaggaagcggagtcagtgcagaatacaaagagctgaagtgagaaactgggagaggaaagttggacatcacratcgcatrgcatttgttaaatgttgtatgcygttaaattcatccaaagctttaaaaatttccaactaattgaggagttgtggagtaattatacagaaaacaaaaaccaaaccaaccaaaaaaacagaaaaaaaccacaattgtccgtgcactgcaagtcctggagttcacacgtttcacctgattgcatctgggaatgctgcaraccggctcattaatttgcactcttgctcctgacttttacccttcttccctagaactaagaggatttggagataacagaaagatccgtcacagtctcaggaaatttgcttcctccactcctccacaat

SEQ ID NO: 72866 - DNA, 600 bp, Chicken  19866894353372_4
tgagattcagtctgggatcgtttttctccccaggcaaagaaatgggtctttgtgtcaaagcataaattaataaagagcagaaggaaacagctgtttgtgattcaggaagcggagtcagtgcagaatacaaagagctgaagtgagaaactgggagaggaaagttggacatcacratcgcatrgcatttgttaaatgttgtatgcygttaaattcatccaaagctttaaaaatttccaactaattgaggagttgtggagtaattatacagaaaacaaaaaccaaaccaaccaaaaaaacagyaaaaaaccacaattgtccgtgcactgcaagtcctggagttcacacgtttcacctgattgcatctgggaatgctgcaraccggctcattaatttgcactcttgctcctgacttttacccttcttccctagaactaagaggatttggagataacagaaagatccgtcacagtctcaggaaatttgcttcctccactcctccacaataaaaacctaaatggtagctataaaaaaaagaaaggagagcgaatgatgaaaagctttgctgtcaaaccagaaccaccgttccttaaagatatggag

SEQ ID NO: 72867 - DNA, 600 bp, Chicken  19866894353372_5
cagaaggaaacagctgtttgtgattcaggaagcggagtcagtgcagaatacaaagagctgaagtgagaaactgggagaggaaagttggacatcacratcgcatrgcatttgttaaatgttgtatgcygttaaattcatccaaagctttaaaaatttccaactaattgaggagttgtggagtaattatacagaaaacaaaaaccaaaccaaccaaaaaaacagaaaaaaaccacaattgtccgtgcactgcaagtcctggagttcacacgtttcacctgattgcatctgggaatgctgcaraccggctcattaatttgcactcttgctcctgacttttacccttcttccctagaactaagaggatttggagataacagaaagatccgtcacagtctcaggaaatttgcttcctccactcctccacaataaaaacctaaatggtagctataaaaaaaagaaaggagagcgaatgatgaaaagctttgctgtcaaaccagaaccaccgttccttaaagatatggagatcagaatccaaaatatcttcactgactcgagtcggtcaactttccagttgcaaaataaatggagcagatttctatt

SEQ ID NO: 72868 - DNA, 586 bp, Chicken  19866894353400_1
acataatgattaataatgtttttgaactcagaaataacccctcaaaatgctttgaaggctgcagcaaacgcagagtcgtatcaatacaccagggattgcttctcaagacaaagaaacacattataaaaataaaggttgtaggattgaaggcagaaacactgagatcacagtgactggactgggtggcaagacaaatattttcttgctgttatatagcactgttcagtgtatgcgtagagactctgatcccaaatctactgtgatacattacttctgccatttcccatttttatgtcttcytcccccatgtacagaaggcatgcatttccttctagaaatctccagccaacaaattctcatggtcaaaacagctttgtgccttgccacccagcgtcactggtgcagtcattcccactaccacacccaaagcatctgaccctgaggtcaaacctgtttgccaaaatattgaccataggttcagaactgtgttaaagagaagtgaaatcagtagatttcagactaaggtggcaagaatgactattcccggagtttgtgatgtgctcctcagaagaaagcccattggaaa

SEQ ID NO: 72869 - DNA, 571 bp, Chicken  19866894353404_1
aatgcttatcatgtaagactaaagaatatctccagaggaactgaaaaaataacaactaaaaaagaaaacaaattataaaggttttaaaataactcaaacaaagatggatttaccaaatggaaaaggcagctgtaatgtctgaactctctttatcagtattctaacaaataacacctcccgtgctttaaatatttaatgtgaaatccatggatttatatagcttacaaaatgccagaggcttgttatctttacagattgcatgacaggaatattcatattatttgaattcctctttaaaamaacaagaattcctccaggtgctaatggtagataacttgtgtgctgcttcaataatctgctaattatagaatccctcaggtagaacaatgtcattaatctgattaaattatttatatttctggaaagcaaaatcttattaggtccttggcatttgactgtgtctactatgcagctgtgtttgtagtttatggtgtggaggaaaaggtctatattttacctagctttactagagctggaggaggaccagagtgtcttgtctcctaacattata

SEQ ID NO: 72870 - DNA, 600 bp, Chicken  19866894353406_1
gctgtaaacttagctaataaaagctaggttgagataacaactaatgtaccattcagaatggatgatagctttacaaatttttccttttcctgtttttttttttctttctgtagagaatacacgttgcattgaagacagagatatggaaaggcttggcagctactggtatgccagagagttgttctgctcagtgaggaggggagcagttcccaagaaagacatcaaatatagcaattaatgttcttccttcatgtgatggatactgtatatatttagaaacctccgagcttgtgcctgagygcaagtcacgtagtatttttattgggatagtggagatcttcagtgtttttgttcgtgatacttgaggctttgctcccagacatagttcagaaatgcgtgacattccttttacgtttcaaagcaaaaagtgagccagggtgagcaggaaggacattccgtagcccagtgaatcttctagcagtttttcattgtgtcatatttgttttcgtagaagcagctttaaactagggcagtatcagcaaggaataaggttctgcctcacataaaaataaaaagaagtgcgatcagaatctgctcatc

SEQ ID NO: 72871 - DNA, 600 bp, Chicken  19866894353406_2
tttgttttcgtagaagcagctttaaactagggcagtatcagcaaggaataaggttctgcctcacataaaaataaaaagaagtgcgatcagaatctgctcatctgtaatgagtgttcgtcgagtcggttactatcaggatatacagttttcctcttttcacaaccttcccttagactggtgaaaatatagtgtccctaaaacaacatgtttttttagctttccttccttcttagcttcccctatttccctaacagagaaacactagtaacctcatttaacataggctgtgtttgtgtccaygtctcttatggccgggatgtgtctccagaaattctgctgtgtaacgaatcacttcctatctccttagtcatgtaatatatcttctcatatttttattttcctttgtttcagaatgtaaacagcagcaaacattgttgattttcttttcctgtcctccatctccyctttccctttccctgttttgaggatgaatactaaaacacaagtgtactgttctcaagccaaggacaagacgtttgtcttaaacatattcactttttcctggttctgttttaacctccctgaaaataattgcctcgt

SEQ ID NO: 72872 - DNA, 600 bp, Chicken  19866894353406_3
ttcccttagactggtgaaaatatagtgtccctaaaacaacatgtttttttagctttccttccttcttagcttcccctatttccctaacagagaaacactagtaacctcatttaacataggctgtgtttgtgtccaygtctcttatggccgggatgtgtctccagaaattctgctgtgtaacgaatcacttcctatctccttagtcatgtaatatatcttctcatatttttattttcctttgtttcagaatgtaaacagcagcaaacattgttgattttcttttcctgtcctccatctccyctttccctttccctgttttgaggatgaatactaaaacacaagtgtactgttctcaagccaaggacaagacgtttgtcttaaacatattcactttttcctggttctgttttaacctccctgaaaataattgcctcgtgaattaacgaatacaccttttctgtaacctctgttaactggtaaggaagagtttgtggcctggaacaaagatttggggcgataatctaaaatttcttaacaatatgatgctgtaaatggccatttcaaaggtcttggaagtttatatgtggaaatgtcatagga

SEQ ID NO: 72873 - DNA, 600 bp, Chicken  19866894353410_1
aaaattagtcataatgggtctattgcattgtattagctgcaatttgatcaggcattggttggggagatgaaactggtagggagtgctacaagattgttaatgctgacattagtatttcttatatttttctgtatgacttcccaaacgagggatgaatagaaggaatatgccagagtccttcacacctttgaattgcaggtttgtccaatgttagctgatgcagaggggaggaaatggcaataaatgactcaaggaacaacaaaggaaaaggaaatttaacaggaagcatccatctttctrccctttcattttgaccaaatttgtgaagcttagtaactgcatgtgagtgcatcagtggccagaaagtagtgagaggaggcagaggacagctgcactacagagtatttctccctccatagaaacaaagaaataactgtgaggtatttcacagttttgtccaccttgctatgctgtctagttgctgctggagcagttagccttactgataagcaggggcattatgtctatgagctaactttactagtagtgctgaggcatcgaacatgaaaaggggtacaaacgctgagttcctattcattg

SEQ ID NO: 72874 - DNA, 600 bp, Chicken  19866894353410_2
attaggcagcactgcaaaggacagtgcagcccagctagcacaatttcaaactgctgtgcctgggcttcttttgtagatgctcttacaaagagtagaagtgcaggttcactgataatttagagggctctcctaaaaacctaccaattctgacagtagtttatcactaccatttcccatcccacctcttccagatactatgtgataaactaggacactgtttctcctgagacattgtatagacataacagaagagcttatcagggaagagtgtttctcaggtacagtgcactgaagttcccytggtgctgactgggttcattgtagttgaaactggatagacataaatgactttgatatctgttttggcagtatgaccttggagctagcagggacagtagtcttcctccaggatgaaatgcgaatttgcagcagctgcaagaaggaagggtggrattgatgggtacttatcaatgttgcatctggtgcctcatgcccgaaggctgacagattaatctgtctgtgactgttaactccttctgtgccatgccaggtgaggcatgcatgtacatgctcatgcattcaaaaacagaaggagaaggt

SEQ ID NO: 72875 - DNA, 600 bp, Chicken  19866894353410_3
gtagtttatcactaccatttcccatcccacctcttccagatactatgtgataaactaggacactgtttctcctgagacattgtatagacataacagaagagcttatcagggaagagtgtttctcaggtacagtgcactgaagttcccytggtgctgactgggttcattgtagttgaaactggatagacataaatgactttgatatctgttttggcagtatgaccttggagctagcagggacagtagtcttcctccaggatgaaatgcgaatttgcagcagctgcaagaaggaagggtggrattgatgggtacttatcaatgttgcatctggtgcctcatgcccgaaggctgacagattaatctgtctgtgactgttaactccttctgtgccatgccaggtgaggcatgcatgtacatgctcatgcattcaaaaacagaaggagaaggtctttcatttggttcaaatggccaatttctggatgcttcacatccagctgggaaatcagaggctatgccagaagactcattcaccttccacagtgacaaatttaataaactctgcaagcctcagtctaagtctgggtggctcatcatgtgcat

SEQ ID NO: 72876 - DNA, 600 bp, Chicken  19866894353418_1
gccttcaagagctcttactgagaaagatatcagatgggttagctaagtagggtgtacattttcacagtatttactgtggagcaggtgaaatgaaaagggactctctcttgttttctgtagcttcagttctcctttgtcttctttttaggagtatgtatgaatgcccatgttcagtatgcaggagagatctcacctaagaagttgcgtggctttgtaaatgtgacctcctctgtgtttcttgcactaggaaaagctgtagcaagagttcttggattacggtacttgtgctgctccttctgstcctattttctattagtcttctgtgcggcaggaaagtccagtcctagaaacagacacacacaggaggtggggttgtacttcacttaacttttgctgtcaaaaaggaaacgtctgccccatgccagtcactgaggttcccttgtcagtcactgaggagaggaacacatttctcttgaggaaggattaaatccatctttgaaggtgcagtctctctgctgaagttaataagaacaaattatatatatatatatcttcaagcttaacagtcccgagacgtgagagctctgctgatttcttgat

SEQ ID NO: 72877 - DNA, 600 bp, Chicken  19866894353422_1
aaattactaaactatttatgtcttcagatggacttctcccagccttatgaagcacaagctggagacctcccctttatgttcacaaaacagatttttcaatagaaaggatatttgtacattttttgctagcagtcatggcttcctgcctttgttaggggaaacacagtggagggaagcagcaacctagctgtctgtctgatgcacagataacctgctccgggtgcatggttactgtacagcttgcggcacagataggactggtttgactttgcctgcagcgtctgtcatgacaggagttgmactgttagttagagctcaaatgtgtacaaagaactaaatatagctctcaaataaagggattatccagagagaatactaggtgctgtacttttttctgggcacacagtttgtgtaaggaaatgttgtgggaaagtctgggttgctaggcagttgttttgctatgggaacttagccaatgcagagcaagtcataaagactgttcttttcaggccacttaacagcagagagcctcagtagcttctttgcactcagttttcctcactgtctgaacatttaggaaaccttttatgtcaaaacccc

SEQ ID NO: 72878 - DNA, 600 bp, Chicken  19866894353422_2
gggaacttagccaatgcagagcaagtcataaagactgttcttttcaggccacttaacagcagagagcctcagtagcttctttgcactcagttttcctcactgtctgaacatttaggaaaccttttatgtcaaaacccctcactcttacagctgataaaatacctgctagtctcttttctcccctcatccgaaaagtttccctattttaacgcgtctctgatcttcagtttttaaatttcagcttacgcaaaacttcaatcatcacttctggaaaaagtgagattgagaaaatgcaagaargctgctaacctgaaaactaaaaaatgcaagaaaacgaaagtccgaattcttacagttcagtgtgtgaaacaaataaatgagaaaataatttatttatctgtatgctcatcagtgactcttttgagtttctttgttggcactctcattttaaaaattaactctgcctaaagttaagcaaactagaatactatcctaaacagttacaccaacttaaaacctcagtaacctggatgtgcagtgtcttacgaaggcacgaaaagattcctgtagttcatatgaataaccacgggatccagactc

SEQ ID NO: 72879 - DNA, 600 bp, Chicken  19866894353427_1
ctgtgccttcgtgtccccatatccatccagatgatgcgcgctgaatccctccatccccaccgatatccctgctctgcgtccttccagcatcccctcctgctttgctccccttatccgtgaggtttttggggtggcaccgcttgtggcttccttccgtccccacgagtccctgcctggccccggcagaagggctcatctcagagccaacctccgcctgtttgccttggcatcccaggcaggatttgcacgtgagcccctggagacaacaagcagctcagctctaatcctcttggctgcagygcctagggctgctcacggccttggggcttgcaccatgcacactccgtggctgcagtgcaggagctgctgctctgttctccccaggttttttccacctagaggagctctgggtgttgcacgtccttgagtgactcccaaaaatgtgctgggagaaaagtrggtgagcagcgatggatgtgcaagaggaygagtgtgccatgcagtgagtgtgcaaggtggagagagtgcacaaggtgatgaccatgcaacgcattgcacgtgatgattgtgcagtgcgacaagcatgcaaggtggtgagag

SEQ ID NO: 72880 - DNA, 600 bp, Chicken  19866894353427_2
ccacgagtccctgcctggccccggcagaagggctcatctcagagccaacctccgcctgtttgccttggcatcccaggcaggatttgcacgtgagcccctggagacaacaagcagctcagctctaatcctcttggctgcagygcctagggctgctcacggccttggggcttgcaccatgcacactccgtggctgcagtgcaggagctgctgctctgttctccccaggttttttccacctagaggagctctgggtgttgcacgtccttgagtgactcccaaaaatgtgctgggagaaaagtrggtgagcagcgatggatgtgcaagaggaygagtgtgccatgcagtgagtgtgcaaggtggagagagtgcacaaggtgatgaccatgcaacgcattgcacgtgatgattgtgcagtgcgacaagcatgcaaggtggtgagagtrcaatgcaatggggatgcaaaatgataagcatgcaaggtgatgagcatgcagtgcaatgagcatgcaaggtgaggagcgagtgaccatgcaaagggacgaacatacaaggtgataagcatgtaaaaggatggccatgcaacgtggtgaacatgccagg

SEQ ID NO: 72881 - DNA, 600 bp, Chicken  19866894353427_3
gggctcatctcagagccaacctccgcctgtttgccttggcatcccaggcaggatttgcacgtgagcccctggagacaacaagcagctcagctctaatcctcttggctgcagygcctagggctgctcacggccttggggcttgcaccatgcacactccgtggctgcagtgcaggagctgctgctctgttctccccaggttttttccacctagaggagctctgggtgttgcacgtccttgagtgactcccaaaaatgtgctgggagaaaagtrggtgagcagcgatggatgtgcaagaggaygagtgtgccatgcagtgagtgtgcaaggtggagagagtgcacaaggtgatgaccatgcaacgcattgcacgtgatgattgtgcagtgcgacaagcatgcaaggtggtgagagtrcaatgcaatggggatgcaaaatgataagcatgcaaggtgatgagcatgcagtgcaatgagcatgcaaggtgaggagcgagtgaccatgcaaagggacgaacatacaaggtgataagcatgtaaaaggatggccatgcaacgtggtgaacatgccaggtgatcatgcactgggcatgcaatgtgctc

SEQ ID NO: 72882 - DNA, 581 bp, Chicken  19866894353427_4
ctagggctgctcacggccttggggcttgcaccatgcacactccgtggctgcagtgcaggagctgctgctctgttctccccaggttttttccacctagaggagctctgggtgttgcacgtccttgagtgactcccaaaaatgtgctgggagaaaagtrggtgagcagcgatggatgtgcaagaggaygagtgtgccatgcagtgagtgtgcaaggtggagagagtgcacaaggtgatgaccatgcaacgcattgcacgtgatgattgtgcagtgcgacaagcatgcaaggtggtgagagtrcaatgcaatggggatgcaaaatgataagcatgcaaggtgatgagcatgcagtgcaatgagcatgcaaggtgaggagcgagtgaccatgcaaagggacgaacatacaaggtgataagcatgtaaaaggatggccatgcaacgtggtgaacatgccaggtgatcatgcactgggcatgcaatgtgctcagcatgcaatgcaagagggcgagtgtgcaacgctcatttgcttcaggtctttgccagccccaaagctgctgcttcgctccctgtgccccactgaa

SEQ ID NO: 72883 - DNA, 600 bp, Chicken  19866894353428_1
gagagctgttggcttagaggaaagctggaaacctaaaaatactacatttattaagcaagtacaggaaacacaaaaggagataggacccttaaaagaccagctagtcccgtaagtggtggaggtcaggacagctggtctatgaggttttgcctctggcacggtaaggggcatgctctgagcaaagctggcccggccctgggagccccacaactgctcacaccctggtgccctctcccatctgcaacagcacagacaagcctttccttcagaaaggtcaccagcttgtcgccaccctacatmcgaccgcctgcttcataaaactgctaggaatttaaggtctttgtgatctcaacctttctgttaaatttagctgaaaccggccagcggattccaatgctattacaggagactaagagaaagatagcaagctccggaaagaaaacaagctaaaatatcggtcctggcccttgaaaaatgatgttggactggcaagaaaggtaaacaaccagatctgatgtgaaaattcagagctgcagtgctaattctgcaagattaattagtaccaaatccaagcagagccttgcccagggagatttattt

SEQ ID NO: 72884 - DNA, 599 bp, Chicken  19866894353432_1
  misc_feature (1)..(4): n is any nucleotide
nnnncttccttgcagattgccccatattgtcacatgcaaatgaaacttttttacaactgacttttttaaatcaatgtttcttcatattacaggagatgttgcaaaaagaacagtcatttacaataagtctttagttttcaatctcgtgttctagtaagactctttggaaagtattgggattttgcgtgactcattatgatagggaattcttaatctcaaatatacattctacggtccttggaaagtacactgttgattgcattggaggtgtctgagttgcttaatatattaccaaacgcytgattactaaataatgctttacataaatgaattttgcttacagagaaattccatgctaaatacaatttaccacagacttaaaagtcaaagagaagatgtgttcaaggccgggttggatggggccctgaggagcctgatctagtgtctggtttagttgttggcagccctgcccattgcagggaggttggaactacatgatctttaaggcccattccaagccaagccattctatgggttctgtgttttgtttttctcaaatctgtgatctaaaatgacagcataggagggagacacactgt

SEQ ID NO: 72885 - DNA, 600 bp, Chicken  19866894353433_1
ctggttgttctccagtgaaatgcatgtggtggacatggttgccttgcaaaaaaaaaaaaaatgtttctttggaagcctgctagagcagccccttaaagcacaccagtttatctgactgagccctgtctatcactccaattggtataggaagatacagcaatcccaagagtagagcaaggctgtttctaaatcattccttctcattatttccaaaattattagtccaacttgcttcaatttttatacatatatgcagtgattgctacttcaagaaattaggtggtctttaaggccccctcycatctaaaccaatctatgagtctatgattctgtcatcaagggctccagttatgacaccccaaagtgtaagtacagagtttaagacaaggtatgtgatacactggttccttggaaaacaagcatttcaagcacgcgctcatctgattgtcactgatgcttggtatctacagctttaatggatttcatgcccaaggaggtgtggatgccccatccccagaggcattcaaggtcaggctggatgtggctctgggcagcctggtccagtggttggtgaccgcgcacacagcaggagggttgaaa

SEQ ID NO: 72886 - DNA, 600 bp, Chicken  19866894353435_1
caaattcttcgtattttaaatgactttcttactgacttcaaggttttcaagactctttcaacagaaagagtatgatcatcccctacaaaagtggcgtgaggattgtcctaacttgttctcttacactatagacaaggacccttgaagagtaaaatcaggaagaggtgttaatacttacgcttttcagtttggtacacttttgtcctttgcatccaaaatgatgtgattactcaaaagaagcaaatgggcaggttttcaaatcaacttcctgaattaagaaatgtagaaggtttattttayatcagttactctagtgtacagttcaggggaaatttgtgattctttctaaaaaaaaaataattgtgtcacattgacagaaatgtactgcttatggctatttcagcaagttagcacaaatttccagggggatcagatgacagcaggcgattgcaagtgccatcaagaaagcagcaactccttttagactctctgcaaagtgctgatttgtccacagatgtagcgaacaaacaacttgctctctgaacagctgaagcaagctgtgtcaacaagacagaatttgaattattacatggtgctgtt

SEQ ID NO: 72887 - DNA, 600 bp, Chicken  19866894353437_1
catctgccacaggctgtagaaagcaggcggatgaaagcaaggcctggcgagcaggatgttgcagggcgctgtgggtgataggggtcagaggaggctctgtctgtccagcaggcacccagggcactttcaagggctggtgctcgcactgaggccatgggcccgcagtccttctccgtttccgcctagctctgcacgagatatttctgagcctgcctggggtgacttgggctgaaaaatgtctgttctgccagaacaattaattcagcccacagcctcttccctgctgacccctttcctaargatccctcaggtgcaagcagcatgaatgcagccatggtgacggtattatggtataggctgcagctccttccaagggtctgcgccttcagatgtttgaggagcggacaggcccttccctcctggcagctgctgcagcgttcacaccacactgctctgagcttggtttagggatgggaaaggatgagattttgtaccccaaaggccattttggcagcacaatcccatggtggttggtgtacatgaaacagacaaaggaggctgttggaacaagctagccagcaggttgtgagtgcataaggc

SEQ ID NO: 72888 - DNA, 600 bp, Chicken  19866894353443_1
atattgatttgtcatgaaagtaagtgattggcggcttttattgcaaggagcaaacactgtgacccaggaaaagaaaaccacgtttgcattagaactacctacatagtagctgctgttattgacttcttaaagccaactttgatgccttatgcaatgctagtagggaggcacgttgtatttgctattactggcaagctgtgaactaatagggatcaatttatgttactttaagcaaagtgcttccaggagacatattttaaaatgaatttcattccagtctgcttttttatctctaggccratttttgctaagatgttttttgggggtgagaaggcagatcaccaaaaaacaamagaaaaaagggcaaggtttcgtgtgcacacctacacatagaatctaagtgattcttatcagaaataagttaaacaccagagaaatcagggcagccatataaaatgaaactgggaagtaacatccaacactttagcctgtgaatagagtcagaaaataacacgtgaaattatgtcagtcagaccctccatagggttaaggtgggaatggtcagctttttgcacgctcggaggcatcttttgctcccgt

SEQ ID NO: 72889 - DNA, 600 bp, Chicken  19866894353443_2
acactgtgacccaggaaaagaaaaccacgtttgcattagaactacctacatagtagctgctgttattgacttcttaaagccaactttgatgccttatgcaatgctagtagggaggcacgttgtatttgctattactggcaagctgtgaactaatagggatcaatttatgttactttaagcaaagtgcttccaggagacatattttaaaatgaatttcattccagtctgcttttttatctctaggccratttttgctaagatgttttttgggggtgagaaggcagatcaccaaaaaacaamagaaaaaagggcaaggtttcgtgtgcacacctacacatagaatctaagtgattcttatcagaaataagttaaacaccagagaaatcagggcagccatataaaatgaaactgggaagtaacatccaacactttagcctgtgaatagagtcagaaaataacacgtgaaattatgtcagtcagaccctccatagggttaaggtgggaatggtcagctttttgcacgctcggaggcatcttttgctcccgtgtaggtaatgcagggtgaacatactaagctgtctctatgcattgtggcacctg

SEQ ID NO: 72890 - DNA, 600 bp, Chicken  19866894353445_1
tttttttcccttcctcccccccccccctccccatataaagcaggctcattaatttgaatagatttaaatgccaggtgaggctaactccaaacataacatagtttcaatgggatgggctgtttccaggaaataaacagtgtgttccctccctgtttctggcttagaagtaagtaaccatggtgatagcaaaagcttaacttctgcacagactctgcaattgtcatcattcacagttttgctctctctttcacccttcaaaacaattaccttgccaaataatctcgctgctttgctactcartgctaatagaagacttgttataattaatcctttctttaaactgaagctattgtatcatgcagcagattatctctaatctcatatctacatgggaattctgatggtaaactgcagaaaagctgaccaaacaagtccaaagtacaagataaaagcacctgcatggccagtgagcccgtgctcctttcccaggcagtgctggtgcctcaacatatggagctcactggtactccccttcaagctggccagttcatttctgacaggtgtctggggtcagtgggcactcagtaggtttgtgcctga

SEQ ID NO: 72891 - DNA, 523 bp, Chicken  19866894353447_1
gtctagtcactagtaatgatgtgatccagaaagctgtcaccttcaaccttgtgttggttcagtgggtcctgaaaaacttggatatggtgttctatggatgtggccccacagatgtggcccacctggcacaagccttacagtgttccaacattgccaccatagtttccaatgcattgaagccaatattcatgcagtaccctggtaataatctgctaatttgcgctgattcgctgattgagacactcttcattttgtggtgtaacagctgcacatgacaggaatgtggcttgtctttcacawkagaatcagagaatcatagaatctcaaggttggaaaggacatataagatcatcgtagtccaactgtcctcccattacccttgcttctacaagctactaaaccatatctcatagctcctcatccagatgcctcttgaacactgccagggacagtgactccaccacctcactgggcaggccattccagtgcctgattactctctgagagaagtttttccttatgt

SEQ ID NO: 72892 - DNA, 522 bp, Chicken  19866894353447_2
tctagtcactagtaatgatgtgatccagaaagctgtcaccttcaaccttgtgttggttcagtgggtcctgaaaaacttggatatggtgttctatggatgtggccccacagatgtggcccacctggcacaagccttacagtgttccaacattgccaccatagtttccaatgcattgaagccaatattcatgcagtaccctggtaataatctgctaatttgcgctgattcgctgattgagacactcttcattttgtggtgtaacagctgcacatgacaggaatgtggcttgtctttcacawkagaatcagagaatcatagaatctcaaggttggaaaggacatataagatcatcgtagtccaactgtcctcccattacccttgcttctacaagctactaaaccatatctcatagctcctcatccagatgcctcttgaacactgccagggacagtgactccaccacctcactgggcaggccattccagtgcctgattactctctgagagaagtttttccttatgt

SEQ ID NO: 72893 - DNA, 514 bp, Chicken  19866894353458_1
tttgttttgtcctggtgcttgtggatgttcccagagtttaatcctttgtttattgagacctaaacccttcctatgtttatgcacaagcaattatcaatttattccagcacggagaagaggctacaaggttacagttgtttctaatgtgcatctgaatatacgttcttttgattgctctgtttttcagggtatttgtttccccctaacaatgcttttcctttgttgaacaaccgttggatggtttaacaataatgcctaattgtgagggcctctgttctccccagcatttgtccaggtgtrttgggatgttttgtctgtgttacaggtgttttgtttttttgtttttgtttttaatgaacacctttataggagtgacattgggttggaaaggtggaggaggtattaaataattgattaaaacaagaacattcaattgagatcagtccccacgaaatttgggagaaggcgagggaggtaaaaagaatttttaattgagattctttagtaaaagtaa

SEQ ID NO: 72894 - DNA, 599 bp, Chicken  19866894353459_1
  misc_feature (1)..(32): n is any nucleotide
nnnnnnnnnnnnnnnnnnnnnnnnnnnnnnnncaatgatgattctctaacacggtaccattaaattactgtggtgataattgagacattaaaaaaagacagatgctaggtctgtttctaggctcttataaccctttagctattaaatttcaatgagataacataacacagctatagcaaaaattaacagctgggaatatttttctgtaaaattgcctttctctaactgaattaatatttttacagatccagattttcatttcagattctgcttgactgatatgattttagcattgctggrcaggggaaaggcagggctaaaaaggagctgaccaagattctcgtaatggggagggatggaatatggggtattgttgtcagattctatagattcagtgtattctacgcctaaaaaccatgcatactagagaatgtgccagggcttcagtgaaacagaaagttcaactagcagcaaacaagagcagagaggtagagatagaagcaggggagagtgaacagagatttttcagttcacgtcaccacagagcagaagcaaaggagaggtggtgtggaacactgcccgccagtcctgctctcagg

SEQ ID NO: 72895 - DNA, 600 bp, Chicken  19866894353472_1
gaaagaaagcaacacagatttattgaagggagggcttcatgctgtctgatatcttcccgtgatatgaaattgtgtccctgggattctccttgtttagaaaatcagaagtgcttgagacacagccttgggggaaactgtcagtaaaatcagaaaatatgggatgcagtgcaagggctataaggtgagtaaggaagtgactaatcaggaggtcttagcagttgctccagaaggagttgtgtcagtatcagagaagttatggatgattcttctcaagaatctttgcaggattggtcaataaamaataaaaagaagtaataaagaaatactttcctttactaggcagctgtgagcaacagatgtagcatagctatgtaaaggcagatactgtagcaggctgtactgggagcagcacatccaggtaaacaaacagtgatgccactatgtaaggcactggtcatgcatcagaagttgtatctgtaaatgtaatattctggtcaaatacactcaagtgagatgaatcacaagccaacaggagcaggaaagtacagtggacaggagcaagtgagggtgtttacaaaaagaaactagtcgaatatgact

SEQ ID NO: 72896 - DNA, 600 bp, Chicken  19866894353474_1
ttcctcacctttctgaggagctagccatggaagggaatatttaaagcctctatctagagatgggactaaatcaaatccttttccccttccaactatttcatttgaacaaaatgattacatgtcagtgttatgtttggcatactgtagaaatctggcatagaattctggtgttcatgttttaaagcgaaaacttacatagaagagtgatggcaatatactatatacagcaggaaaagatgtaatttctactggctgtaaaacagcccgttagtcaggataaaaagaaagttgagtagtgayttgatgacaattcagaaatactttttgagagggaaaaatatggaatgctaaagcacttcttaagccagggaaaatctgtaaaaaaaaccaacaatagttgaagctgaagccacrcagtacttttagcaattacccttgaatcctggatgctatctgagaggtacgctayagctcaaactgtatcragtacagccatgcacacyacttgtggagctatgttttkagctgaactaatagcttgtagagtagttgttgggtggtaaagaagctttactgttatataggggaaaaatataaagc

SEQ ID NO: 72897 - DNA, 600 bp, Chicken  19866894353474_2
ttacatgtcagtgttatgtttggcatactgtagaaatctggcatagaattctggtgttcatgttttaaagcgaaaacttacatagaagagtgatggcaatatactatatacagcaggaaaagatgtaatttctactggctgtaaaacagcccgttagtcaggataaaaagaaagttgagtagtgayttgatgacaattcagaaatactttttgagagggaaaaatatggaatgctaaagcacttcttaagccagggaaaatctgtaaaaaaaaccaacaatagttgaagctgaagccacrcagtacttttagcaattacccttgaatcctggatgctatctgagaggtacgctayagctcaaactgtatcragtacagccatgcacacyacttgtggagctatgttttkagctgaactaatagcttgtagagtagttgttgggtggtaaagaagctttactgttatataggggaaaaatataaagcttttctgggcatggacagaaaactttgggggaaatatagaacattaagacctcaggtaggatttgtagcacaactttctttgacttggtgcattagtgttctccctgarttgta

SEQ ID NO: 72898 - DNA, 600 bp, Chicken  19866894353474_3
gttcatgttttaaagcgaaaacttacatagaagagtgatggcaatatactatatacagcaggaaaagatgtaatttctactggctgtaaaacagcccgttagtcaggataaaaagaaagttgagtagtgayttgatgacaattcagaaatactttttgagagggaaaaatatggaatgctaaagcacttcttaagccagggaaaatctgtaaaaaaaaccaacaatagttgaagctgaagccacrcagtacttttagcaattacccttgaatcctggatgctatctgagaggtacgctayagctcaaactgtatcragtacagccatgcacacyacttgtggagctatgttttkagctgaactaatagcttgtagagtagttgttgggtggtaaagaagctttactgttatataggggaaaaatataaagcttttctgggcatggacagaaaactttgggggaaatatagaacattaagacctcaggtaggatttgtagcacaactttctttgacttggtgcattagtgttctccctgarttgtattttagatgtcaaagtgatatttcaaaatcctctgtaaaactaagaagcatatga

SEQ ID NO: 72899 - DNA, 600 bp, Chicken  19866894353474_4
gaaaacttacatagaagagtgatggcaatatactatatacagcaggaaaagatgtaatttctactggctgtaaaacagcccgttagtcaggataaaaagaaagttgagtagtgayttgatgacaattcagaaatactttttgagagggaaaaatatggaatgctaaagcacttcttaagccagggaaaatctgtaaaaaaaaccaacaatagttgaagctgaagccacrcagtacttttagcaattacccttgaatcctggatgctatctgagaggtacgctayagctcaaactgtatcragtacagccatgcacacyacttgtggagctatgttttkagctgaactaatagcttgtagagtagttgttgggtggtaaagaagctttactgttatataggggaaaaatataaagcttttctgggcatggacagaaaactttgggggaaatatagaacattaagacctcaggtaggatttgtagcacaactttctttgacttggtgcattagtgttctccctgarttgtattttagatgtcaaagtgatatttcaaaatcctctgtaaaactaagaagcatatgatattttttcyrgaata

SEQ ID NO: 72900 - DNA, 600 bp, Chicken  19866894353474_5
gtgatggcaatatactatatacagcaggaaaagatgtaatttctactggctgtaaaacagcccgttagtcaggataaaaagaaagttgagtagtgayttgatgacaattcagaaatactttttgagagggaaaaatatggaatgctaaagcacttcttaagccagggaaaatctgtaaaaaaaaccaacaatagttgaagctgaagccacrcagtacttttagcaattacccttgaatcctggatgctatctgagaggtacgctayagctcaaactgtatcragtacagccatgcacacyacttgtggagctatgttttkagctgaactaatagcttgtagagtagttgttgggtggtaaagaagctttactgttatataggggaaaaatataaagcttttctgggcatggacagaaaactttgggggaaatatagaacattaagacctcaggtaggatttgtagcacaactttctttgacttggtgcattagtgttctccctgarttgtattttagatgtcaaagtgatatttcaaaatcctctgtaaaactaagaagcatatgatattttttcyrgaataggtaattttggagctatg

SEQ ID NO: 72901 - DNA, 600 bp, Chicken  19866894353474_6
acagcaggaaaagatgtaatttctactggctgtaaaacagcccgttagtcaggataaaaagaaagttgagtagtgayttgatgacaattcagaaatactttttgagagggaaaaatatggaatgctaaagcacttcttaagccagggaaaatctgtaaaaaaaaccaacaatagttgaagctgaagccacrcagtacttttagcaattacccttgaatcctggatgctatctgagaggtacgctayagctcaaactgtatcragtacagccatgcacacyacttgtggagctatgttttkagctgaactaatagcttgtagagtagttgttgggtggtaaagaagctttactgttatataggggaaaaatataaagcttttctgggcatggacagaaaactttgggggaaatatagaacattaagacctcaggtaggatttgtagcacaactttctttgacttggtgcattagtgttctccctgarttgtattttagatgtcaaagtgatatttcaaaatcctctgtaaaactaagaagcatatgatattttttcyrgaataggtaattttggagctatgagggtccagatcctggaaac

SEQ ID NO: 72902 - DNA, 600 bp, Chicken  19866894353474_7
ccacrcagtacttttagcaattacccttgaatcctggatgctatctgagaggtacgctayagctcaaactgtatcragtacagccatgcacacyacttgtggagctatgttttkagctgaactaatagcttgtagagtagttgttgggtggtaaagaagctttactgttatataggggaaaaatataaagcttttctgggcatggacagaaaactttgggggaaatatagaacattaagacctcaggtaggatttgtagcacaactttctttgacttggtgcattagtgttctccctgarttgtattttagatgtcaaagtgatatttcaaaatcctctgtaaaactaagaagcatatgatattttttcyrgaataggtaattttggagctatgagggtccagatcctggaaacagaaatggcagacagtgcttctccattaccatacctattattttccatttttatagcatgctgcttgtctgttgtctcctaggtcatctccttatggttaagagaaatagtttgtatacgctagcttagaaaagaaaatcctcaaaacatatttcattgaaaaaagtagtaaaacttttgtttcct

SEQ ID NO: 72903 - DNA, 600 bp, Chicken  19866894353474_8
gtatcragtacagccatgcacacyacttgtggagctatgttttkagctgaactaatagcttgtagagtagttgttgggtggtaaagaagctttactgttatataggggaaaaatataaagcttttctgggcatggacagaaaactttgggggaaatatagaacattaagacctcaggtaggatttgtagcacaactttctttgacttggtgcattagtgttctccctgarttgtattttagatgtcaaagtgatatttcaaaatcctctgtaaaactaagaagcatatgatattttttcyrgaataggtaattttggagctatgagggtccagatcctggaaacagaaatggcagacagtgcttctccattaccatacctattattttccatttttatagcatgctgcttgtctgttgtctcctaggtcatctccttatggttaagagaaatagtttgtatacgctagcttagaaaagaaaatcctcaaaacatatttcattgaaaaaagtagtaaaacttttgtttcctaaactccagcgattctcaatatttgtaactgaatcatcactaatttctagtcattaacattttcagcaag

SEQ ID NO: 72904 - DNA, 600 bp, Chicken  19866894353474_9
tatcragtacagccatgcacacyacttgtggagctatgttttkagctgaactaatagcttgtagagtagttgttgggtggtaaagaagctttactgttatataggggaaaaatataaagcttttctgggcatggacagaaaactttgggggaaatatagaacattaagacctcaggtaggatttgtagcacaactttctttgacttggtgcattagtgttctccctgarttgtattttagatgtcaaagtgatatttcaaaatcctctgtaaaactaagaagcatatgatattttttcyrgaataggtaattttggagctatgagggtccagatcctggaaacagaaatggcagacagtgcttctccattaccatacctattattttccatttttatagcatgctgcttgtctgttgtctcctaggtcatctccttatggttaagagaaatagtttgtatacgctagcttagaaaagaaaatcctcaaaacatatttcattgaaaaaagtagtaaaacttttgtttcctaaactccagcgattctcaatatttgtaactgaatcatcactaatttctagtcattaacattttcagcaaga

SEQ ID NO: 72905 - DNA, 600 bp, Chicken  19866894353475_1
actcaggaggtggcacctagcccattgagtcaatactgcattgatgatctggcactgagagaggacacgatgtcttcttgctggtgccttatccaaaccaaggcataaaactttcagtttttcacacttaatataccatattgttttcttttccttttctttggtttcgcaagcttgcacttgtgaaaatgaatctaggttttctcaataaaagagaaagtctgtttgaagaaagtatgagttactctcaaccacagctccttaagattttgtcacaaagcccaagatgatggcagtgcwgcagcttctcaacctgggtcttgcctattttaaagcagccttaaagatacacttttaagcctggaatcactttcccctgcagcagcaggaactctctccatctttcccagtggggtgcatttccctccccagcattacaatccttgggctggagggaacagaagctgcatatgctctgcagtaacaaggtgactcaagactactgctgattgtgttttttttgtgcaaatactgcccagacaaaacaaacaaaatgatcactggttggcagtctccctcagccaccgcagaaatggaagt

SEQ ID NO: 72906 - DNA, 600 bp, Chicken  19866894353478_1
taaataggcttacccacagctgaaagaagtgttttcacatccttcttccatctaataaatacaaccctattagtccaggcagaactgaccatcaggtgcctattaaatggactatttgttgaaagaaataagtacagtgagtcagtgtttatctgtggaccatttgacaacaaccaaggccttgtttcctttgaaagaaggaactccttcaacctaaagaaatcaagccttttgcccaaaaggaaaagtatctgaagtgtaagccaggactgccccccacttcagcaaaaacttttacarctgcccttgcacatccaccgtcactacatcacaaaagcaataataaatatgataaatagaacatgcttgctacagctctcacttgtggtgatttctgtttgaaaattttaagtttcattttttcagctttcaaccacaaaggcaaatatcccaccagggatagggaacagtcacagcatccaccttctccaagaagagacactcaaacctcttgcgatcctctttggtttcctcaagtaaaaagaagtcaggatccacaatgattactaatctaaagaagaaatgcctcaattttcaaat

SEQ ID NO: 72907 - DNA, 599 bp, Chicken  19866894353483_1
  misc_feature (1)..(60): n is any nucleotide
nnnnnnnnnnnnnnnnnnnnnnnnnnnnnnnnnnnnnnnnnnnnnnnnnnnnnnnnnnnntattatggagctggccaccaataactttttgaaaataaaaccaataggctatggctttattgtactcagaggtgccttagattttggtacccaaattttttttaatattttgtctaccttggacacaatccagtctaggaaaaagtagggatttggcaacttagagagcaggaaacatctcattatcagtgagccaataagagaataaagaattgcagaaagtggaaaccaagcagacakaaactgtcttacttatgacaaagatggagagactgatgctggcgaggcaaggaggcaggggctgagagctgtgaggggatggaggaaaaactgctggggtggagaaaggggtgcgtgggtggataagtgaactctgctgaggaggcagtgactgggtgcagaagtggaggtaaggtcggaacaaggtgcwgaggacataaaggcacaggacaagctagcctgagtaccaagaggagcatttacattgctgtaattcaagcacaggtgactagtctccctgcatgacagcagctcctcta

SEQ ID NO: 72908 - DNA, 600 bp, Chicken  19866894353483_2
cagtctaggaaaaagtagggatttggcaacttagagagcaggaaacatctcattatcagtgagccaataagagaataaagaattgcagaaagtggaaaccaagcagacakaaactgtcttacttatgacaaagatggagagactgatgctggcgaggcaaggaggcaggggctgagagctgtgaggggatggaggaaaaactgctggggtggagaaaggggtgcgtgggtggataagtgaactctgctgaggaggcagtgactgggtgcagaagtggaggtaaggtcggaacaaggtgcwgaggacataaaggcacaggacaagctagcctgagtaccaagaggagcatttacattgctgtaattcaagcacaggtgactagtctccctgcatgacagcagctcctctagcagacaaactacccaccttcgcattcttgctctgaatcatctttttctgttctctgtcctcactgagggatactaatctgcaatgcctgaaagctggcctttgcagatatcccctggagacaagagcaggtgtcctatacaagagctaatagtcagtcctggagctgaaccactctcagacacccacaca

SEQ ID NO: 72909 - DNA, 600 bp, Chicken  19866894353492_1
ctgcaacaccacatctcatggctgtgccctgctgcggttctgttgctgatgtggtgttacccctctgggcgatgctgctctgaagagcagtaagaagtcaccagtcctatcttcctgccaggaagtgtttatttaataatatttaagctgttgacaaataaacataccaagcttttgcaaacacaaaccagcaagcagtgggctctggggtaaaatgtgtcacttgtggctggctcacagacaggccagaaggatacacagcacagtgcagtgctgggcatggctgtgggtgagggtccrgctgtggtgcagaccctggggaacggcccayagggattcttgctctgctcttgctaaagaccgtgcagactggagccataaattcctagcgtggcagctgtcatccgtgtgccaactcctgcgctccccggtggtggttttgtttgagtaaggcccgggatatgcaaaggagctgctctgtttatcatcatttactgacagatggaaatattgcctgctatgttaatgggaacggagctcataaattccagcctgcagcttccaggctgtgccccaggcccggttacggcgtggtgtgcg

SEQ ID NO: 72910 - DNA, 600 bp, Chicken  19866894353492_2
ctgcggttctgttgctgatgtggtgttacccctctgggcgatgctgctctgaagagcagtaagaagtcaccagtcctatcttcctgccaggaagtgtttatttaataatatttaagctgttgacaaataaacataccaagcttttgcaaacacaaaccagcaagcagtgggctctggggtaaaatgtgtcacttgtggctggctcacagacaggccagaaggatacacagcacagtgcagtgctgggcatggctgtgggtgagggtccrgctgtggtgcagaccctggggaacggcccayagggattcttgctctgctcttgctaaagaccgtgcagactggagccataaattcctagcgtggcagctgtcatccgtgtgccaactcctgcgctccccggtggtggttttgtttgagtaaggcccgggatatgcaaaggagctgctctgtttatcatcatttactgacagatggaaatattgcctgctatgttaatgggaacggagctcataaattccagcctgcagcttccaggctgtgccccaggcccggttacggcgtggtgtgcggatgccatgggcgcattcctgccgagccaag

SEQ ID NO: 72911 - DNA, 600 bp, Chicken  19866894353494_1
cgtggctcctggatcactgttctccgaccagagcatctcttattcaccctttttcctgctggggattctgccatctccaggctgcagtattgaggcaaggctcacaccccagatgtcatttaaattccattggcaaaataagcacttctgatggcagctgtaagtggcatattctgtacagaatctgaggagaaaaaattagaataggattttaaaagcacagaaatcaaacaatttagcatgaatattctggtctttggtgctgggccatacaacaccaaggtctcagtgcttgcacarctgaagctgctcttgaaactccccagtgtcagacatactgctgcattaacggctytcctgatatgcattccagtagaaaagcttagcatattattttcacttttattattaatacatatatgtagctaacgttattcaacagagtgctttaggacagaatttaaaaaaaaaatacagagatcttagttatataatttattgcagaagtaaaaaattatacacagtctcctaatagagagagattaaaayrgataaataatgaaaagatcacaatagctgtatttctcagggtctagttta

SEQ ID NO: 72912 - DNA, 600 bp, Chicken  19866894353494_2
ctgctggggattctgccatctccaggctgcagtattgaggcaaggctcacaccccagatgtcatttaaattccattggcaaaataagcacttctgatggcagctgtaagtggcatattctgtacagaatctgaggagaaaaaattagaataggattttaaaagcacagaaatcaaacaatttagcatgaatattctggtctttggtgctgggccatacaacaccaaggtctcagtgcttgcacarctgaagctgctcttgaaactccccagtgtcagacatactgctgcattaacggctytcctgatatgcattccagtagaaaagcttagcatattattttcacttttattattaatacatatatgtagctaacgttattcaacagagtgctttaggacagaatttaaaaaaaaaatacagagatcttagttatataatttattgcagaagtaaaaaattatacacagtctcctaatagagagagattaaaayrgataaataatgaaaagatcacaatagctgtatttctcagggtctagtttatattgttaacctaagtactgtactctagtcatgattaggcacaccgctcatataa

SEQ ID NO: 72913 - DNA, 589 bp, Chicken  19866894353494_3
ctggtctttggtgctgggccatacaacaccaaggtctcagtgcttgcacarctgaagctgctcttgaaactccccagtgtcagacatactgctgcattaacggctytcctgatatgcattccagtagaaaagcttagcatattattttcacttttattattaatacatatatgtagctaacgttattcaacagagtgctttaggacagaatttaaaaaaaaaatacagagatcttagttatataatttattgcagaagtaaaaaattatacacagtctcctaatagagagagattaaaayrgataaataatgaaaagatcacaatagctgtatttctcagggtctagtttatattgttaacctaagtactgtactctagtcatgattaggcacaccgctcatataaaaaacgcagtgcatctgctcttcataagagcaatacccatgccatgctctttcccagactttgcaggtgctggatcgtgcactttccatgtgttggcagcagcacaccaaatggtgccctatgtctacctgagattctcttcattcaagggtgcccaaggcatgtagaaaaggagataatgtg

SEQ ID NO: 72914 - DNA, 588 bp, Chicken  19866894353494_4
tggtctttggtgctgggccatacaacaccaaggtctcagtgcttgcacarctgaagctgctcttgaaactccccagtgtcagacatactgctgcattaacggctytcctgatatgcattccagtagaaaagcttagcatattattttcacttttattattaatacatatatgtagctaacgttattcaacagagtgctttaggacagaatttaaaaaaaaaatacagagatcttagttatataatttattgcagaagtaaaaaattatacacagtctcctaatagagagagattaaaayrgataaataatgaaaagatcacaatagctgtatttctcagggtctagtttatattgttaacctaagtactgtactctagtcatgattaggcacaccgctcatataaaaaacgcagtgcatctgctcttcataagagcaatacccatgccatgctctttcccagactttgcaggtgctggatcgtgcactttccatgtgttggcagcagcacaccaaatggtgccctatgtctacctgagattctcttcattcaagggtgcccaaggcatgtagaaaaggagataatgtg

SEQ ID NO: 72915 - DNA, 599 bp, Chicken  19866894353500_1
  misc_feature (1)..(50): n is any nucleotide
nnnnnnnnnnnnnnnnnnnnnnnnnnnnnnnnnnnnnnnnnnnnnnnnnnacagtgggctgtcacgaagggagatgcaactatattccagcaccatgcatcacttccagctccaggggcagcaatgtgaaattacacttcccagctgatattttgtcttctgtaatagcaatgcgtatcccatactgaagaaattcaagagcatgcttaagaccagcttgctaagcatgccacaagctacctgtacttcacagggaatgctgatgcaatgttagtttgtcacatgcagctttcagccccrcagcactgctgctcttgatggagacagcaatgtttgtccctgcaaggagctggtattcactgctggtcaccaccacagggggaaaggggtggatgtaaggagcaaaattagccagctttcagacatgaacgagtactcagtggacaataaatctgaccaagcaactttggttgaatatgctctgatatgaaggaaatcttargcgtgtgcaaataaaagcaaataaaacacataaggaaggagctgaatctaaaagcatatattagatttcttttctctgttgctctctgaacaaatat

SEQ ID NO: 72916 - DNA, 600 bp, Chicken  19866894353500_2
atgcttaagaccagcttgctaagcatgccacaagctacctgtacttcacagggaatgctgatgcaatgttagtttgtcacatgcagctttcagccccrcagcactgctgctcttgatggagacagcaatgtttgtccctgcaaggagctggtattcactgctggtcaccaccacagggggaaaggggtggatgtaaggagcaaaattagccagctttcagacatgaacgagtactcagtggacaataaatctgaccaagcaactttggttgaatatgctctgatatgaaggaaatcttargcgtgtgcaaataaaagcaaataaaacacataaggaaggagctgaatctaaaagcatatattagatttcttttctctgttgctctctgaacaaatattgtccaagaatatttgacaatctgtttgccagctgaagtgtgcaggactctgataacaatataacagaaaattacacgtccatttttgtcaagctgaggcaagtccaagctgtattgtttgcctaaatgaaaaacaaaaccatgaagaattgacctgggacagcacaagattgtgtaggatgagcgctagggagcacaggaaa

SEQ ID NO: 72917 - DNA, 599 bp, Chicken  19866894353510_1
  misc_feature (1)..(68): n is any nucleotide
nnnnnnnnnnnnnnnnnnnnnnnnnnnnnnnnnnnnnnnnnnnnnnnnnnnnnnnnnnnnnnnnnnnnaattataggttttatgagaatttcagctttcctttacgtttttttggtaaagaaacacaaatttcaggtcttgtaggatggaaaaagaaatgaaaataggaagcaaacatatgcttaaaaggttcaggcgcgtcagaacatcgaaacagacaaactcgattggctgtttctatttaagttgcatcgcttttggaggcttgttttggcactatcaattagttcctctgtgctyttctaccttcagcagaagcagtggcagctttagcaatgtctttttataatcctcaaacaacccactttcatttcccatctatttgttgccagcacaaagaggtttaatcacaaaatgattgataactctatttaaacagaacattagcctaatgacgtatgaaactgtagcagagttgttagcttatgtacaaatgcattccttgaagagcaacaggagttgccttgtcttgtgtctgccttgattcactaatctctctgcaaattcctcttgggtattaatctgctgctggtgaacgt

SEQ ID NO: 72918 - DNA, 600 bp, Chicken  19866894353510_2
tttaatcacaaaatgattgataactctatttaaacagaacattagcctaatgacgtatgaaactgtagcagagttgttagcttatgtacaaatgcattccttgaagagcaacaggagttgccttgtcttgtgtctgccttgattcactaatctctctgcaaattcctcttgggtattaatctgctgctggtgaacgtgcatgagccacgtggcaggcagctgctcagtgcccacagccagcccgtgtcctggcccggagcagtggccgaggagctggcacccagggcacccagctggtarggaatggcctgatatctgtggtaaagtctaaggaaaaccacacggagcctagagcatcagcacagctcgtgtttccccacacaatgcatggagaagcaacagaatcttgatatcacctttcacccttcccaaagctccactggtattgagttattaaatgaaggacttgcccaacagaacagtgtaayggctgcagatgtatgtaagggtatctacaggatgcatgcttgggttcatgtcaggagcagatgcttctgcttagcttggcttttgccatcttcagtgggaaatgttttgtga

SEQ ID NO: 72919 - DNA, 471 bp, Chicken  19866894353510_3
ggtgaacgtgcatgagccacgtggcaggcagctgctcagtgcccacagccagcccgtgtcctggcccggagcagtggccgaggagctggcacccagggcacccagctggtarggaatggcctgatatctgtggtaaagtctaaggaaaaccacacggagcctagagcatcagcacagctcgtgtttccccacacaatgcatggagaagcaacagaatcttgatatcacctttcacccttcccaaagctccactggtattgagttattaaatgaaggacttgcccaacagaacagtgtaayggctgcagatgtatgtaagggtatctacaggatgcatgcttgggttcatgtcaggagcagatgcttctgcttagcttggcttttgccatcttcagtgggaaatgttttgtgaaaggcttccagttgcagtggagtcaatctttgcacaaaccagaactcacctgctctcca

SEQ ID NO: 72920 - DNA, 600 bp, Chicken  19866894353511_1
atagcaaaaacagctgataataatgaaacaaaggtttgatcctttgtaacacccaagaaaaaaaattgaatttgtgccaatcagtcaaacatttaatttcaggatggattcacacagtgaactttttggtaaatcccttattttcaatgtcaatatagctgtatcttaaaggtgacattaatcctagtttacacatcttttactgaatgaagtccacagttaagccacagttagtccactccttccttgtatggaacaaggcattgagggaccaatatattatacaagagaggaatctgkttgtaaaacacatacacacaaaattaaaatctcaatagagcaccactctactgtacttattaaagtaaatcaccaattgtctttgattatattttggttccactgcaagtttaamtgtgtcttgattgaatcctttgagatcaatattttatttagtaatatgattcattttggatagtgtgtctgtctaaattaaccccagtaacatgacagccagcaggatccttgacacgaagtaaggagtgaacaaatttttgcaggggtgaaaaatgggcttgcacttatctgcaagtgacatgt

SEQ ID NO: 72921 - DNA, 600 bp, Chicken  19866894353511_2
agtgaactttttggtaaatcccttattttcaatgtcaatatagctgtatcttaaaggtgacattaatcctagtttacacatcttttactgaatgaagtccacagttaagccacagttagtccactccttccttgtatggaacaaggcattgagggaccaatatattatacaagagaggaatctgkttgtaaaacacatacacacaaaattaaaatctcaatagagcaccactctactgtacttattaaagtaaatcaccaattgtctttgattatattttggttccactgcaagtttaamtgtgtcttgattgaatcctttgagatcaatattttatttagtaatatgattcattttggatagtgtgtctgtctaaattaaccccagtaacatgacagccagcaggatccttgacacgaagtaaggagtgaacaaatttttgcaggggtgaaaaatgggcttgcacttatctgcaagtgacatgttaaaaaaagacgtccagctggtcaaaaggagaaggaaattattaaaacagctagggagtcttcagaattcttctttaatctctttatctctgaagacaaagcttcaatttatctt

SEQ ID NO: 72922 - DNA, 600 bp, Chicken  19866894353517_1
caatttgaggatacagtgataaacaaaaagagttcagagagtaagctcgacctgtgcttttgactgcctgcgttcttggcaactcacacactggctgtgcctgctctaagtcaactctttccaagacaagtctgttgcagttgaatttagtctcaggaacagagcaaatccaggcaaatctagttcctgtcactttgacaatcattgattcagcattgcaggtaggaacacggagacttctctgtcctaggcttatccctgcagctaagatctagacattgctaaattcatggtttaatrtggaagtggtccatgtctcragatccagtacttagagtaagaactgaataaattttgaatcaaaaccttcagaggatagacatgccagaattccatatgaaatactattctttcacaaattctacctttgtaaaaagttctagaaaaagaacattgaactattttttcttcttcttaaagaactaaagaagtcaacatgtatctgaatacttccctgacaaattcagaacttctaaaggtttatccagcattaattatgagctgatgaagccttatttgcaatacaagagaaacaagacg

SEQ ID NO: 72923 - DNA, 600 bp, Chicken  19866894353517_2
aaacaaaaagagttcagagagtaagctcgacctgtgcttttgactgcctgcgttcttggcaactcacacactggctgtgcctgctctaagtcaactctttccaagacaagtctgttgcagttgaatttagtctcaggaacagagcaaatccaggcaaatctagttcctgtcactttgacaatcattgattcagcattgcaggtaggaacacggagacttctctgtcctaggcttatccctgcagctaagatctagacattgctaaattcatggtttaatrtggaagtggtccatgtctcragatccagtacttagagtaagaactgaataaattttgaatcaaaaccttcagaggatagacatgccagaattccatatgaaatactattctttcacaaattctacctttgtaaaaagttctagaaaaagaacattgaactattttttcttcttcttaaagaactaaagaagtcaacatgtatctgaatacttccctgacaaattcagaacttctaaaggtttatccagcattaattatgagctgatgaagccttatttgcaatacaagagaaacaagacgcgcttgggaaagctttttaa

SEQ ID NO: 72924 - DNA, 600 bp, Chicken  19866894353519_1
ccatttgtttgtgttatctttgtacctgcctttgtttggttgacaattaaagaatattttctcctcatgttcttcattgccttaattactttcagtgtcaacaccatgatttagttctaatgagagcccatttgttcctccttcttaccatatccttcagtctcactgtaatgatcttcagtatattataaaaaagttttctcttacaacatctttggaagagatgaatgctatgcaaaacctctcttaccataggaagtggtcaggtcaatgtcttttaagatcaaatatccaaatatstctaagtaattctgcctgccaggctactagcttcttgctgcattcttctgccttttggctttcatcactcttaaaacagaaagtcatcccgatgggagatgacttgcacatgcttattctttagtcttcgaagttgctttgagtaagctgtgatctctgaggtgctccaggggttcttgataatgtgtgcatcattattctctgagattacaagttagtcaaactgcactcactttttatgtgttcactcaaggcaggcaacacattgtctgcctcccagtggctgagtattcttcctgc

SEQ ID NO: 72925 - DNA, 599 bp, Chicken  19866894353528_1
  misc_feature (1)..(85): n is any nucleotide
nnnnnnnnnnnnnnnnnnnnnnnnnnnnnnnnnnnnnnnnnnnnnnnnnnnnnnnnnnnnnnnnnnnnnnnnnnnnnnnnnnnnntaactcacttgtggaattcagcacaacatgcatataggaactatagaaaggactatcaaggccaccaagtccagcttcctaacactgcaagcgaccacaaaagacatttagtctagaagacggcagattgttgccactacccactgaaaaactcagtgcctgcagcaagagataagaaccacagtcatcatgtaagtataggaagagaagatatkaatatttattagaacattgggcartttctgggatacatggtcttacaccatttaaaatcttcaattatgaagtgagttgaagatgatttttttttcttcctactaagttgaagttggagaattgcatatgttcactctgcactgctactattattaaaaaaaagaaaaagcttcagtttatgagaaagcacactatttgttatactaattttcagcctcagtagaagaatctgttttcagctaatcagctgtcttttcaggttgctgagggtaagtaagcttgtaggactcaccaacca

SEQ ID NO: 72926 - DNA, 599 bp, Chicken  19866894353528_2
  misc_feature (1)..(61): n is any nucleotide
nnnnnnnnnnnnnnnnnnnnnnnnnnnnnnnnnnnnnnnnnnnnnnnnnnnnnnnnnnnnntaactcacttgtggaattcagcacaacatgcatataggaactatagaaaggactatcaaggccaccaagtccagcttcctaacactgcaagcgaccacaaaagacatttagtctagaagacggcagattgttgccactacccactgaaaaactcagtgcctgcagcaagagataagaaccacagtcatcatgtaagtataggaagagaagatatkaatatttattagaacattgggcartttctgggatacatggtcttacaccatttaaaatcttcaattatgaagtgagttgaagatgatttttttttcttcctactaagttgaagttggagaattgcatatgttcactctgcactgctactattattaaaaaaaagaaaaagcttcagtttatgagaaagcacactatttgttatactaattttcagcctcagtagaagaatctgttttcagctaatcagctgtcttttcaggttgctgagggtaagtaagcttgtaggactcaccaaccaagataaatagattcttctttttct

SEQ ID NO: 72927 - DNA, 600 bp, Chicken  19866894353531_1
agacaaagcaaccagaaaccaagaggggctgagctatttcaatgtttgcgtagtcagtggttggcattaataacaagaaaagccactgcaaatacagcgtactgacacagagagactatgaagagttacatgaattgatctgtcagctgagggttatcaacagattgcttacaaggaagaatgtgtttcaaacagcttgctttggttctgagcaaaagtgcactcaactaaagagaaaacaatggttaggtttcttggaccaagagaaccatcactttaggctacatctgcacacagacwtttcaacacactatatataaggaaagactttctaagttagatagataaacttggtaagttctacagaagaccatggaaaagaaaagtaccatcagatttccatgtgtttcccatgtaggagcttctgctttgtacagttcttcaaactgtttacggtaattgggaactagttccttgtccagcttttcaacacactggaagtactgtgccttaaacaagcaaacaaacaaataaatgaacttccatatgcattcttgtgtggttttttgcaatcacaggtggataattagtacacaactt

SEQ ID NO: 72928 - DNA, 486 bp, Chicken  19866894353535_1
ccagttcttcctcttattactaattcgcttacaggttaacttcttattatcactgctgtttcatactagttgcatagctttgtttcttagcttccagagctatcctctatttccttcaccaattatcttcaatgctttgatttatattttgtctgtgcttccttcttgtaaggacagctgttatgatactcaatttaaatttcatctagacttctgtatgtgtgcacatgtttgctttctttgaagggcagctttccttaactgttgttgatttctacaaaaatcccttaagtctttcaygaccaacagttcctgcaaaccaagtgattcttctaattacccataagagaattcatttattgatccttctagttcgactacctactggaaatccccactgtgttagcaccttgtttctttctcttccacccttctctggacacttatatcaaaaccatggctgcataggcactcaaaaaatctact

SEQ ID NO: 72929 - DNA, 600 bp, Chicken  19866894353536_1
agcataaactgtagcaagtcactagtgttagctcttggcaataggaaaaagtatcagattaataccctagaaattacaaaaacaaagctttgcaaagagttccttgctgtcttttagattttatcagcagagaattccacggagcccagtttttgacctgagcaaaactgagaaagaactaaaggtatttttcaaattaaatgaaaagcaaaatgaaatgtttggcttcaaattagcaaatagtccttcattaaagtgatgcatggagctgcagaagcagtgatattgagtgggcttttytgaagcaatttttatctcccatccaccagatgtggaacgggacaaagtctctgggagcacacagtaatggtttcacattttctagcctcacatatctcttgaatggaggagttcctgctttcttacctctagtgtacaattcacaatgaagcttaaatatttataaccaggttgtttttcacgttcccctaggtgctgcgtatgagcttgttttacgagatttcagtaaagagcagcatgtccaagttccaagcttgaatcccagtgggacttatcaagtatcagctggagaatgcagaa

SEQ ID NO: 72930 - DNA, 600 bp, Chicken  19866894353552_1
tttcatgttgcgtcaccttttccttccctgtaggtgaagtacaaaggagctgctaagaaagacctttccaactctctttatcagcagatgccagctacaattgacagtgcatttgcaaaagaattaactcagctgcagagcaaggtgcgactttaaaatcacaaaaatgatttgtacattaattgtagggtagaatatgaacactttgaacaatattgttgaatggatacttgattgcctgcttgattaattttgggtgggattatcatccagagtttgttatcacagctacttcaacarctactcaattctaaaatgtagaygatctgactgccaagtttattaaatataaacattaaaaaagattaaaaccaggcaaaatcaattagcagcccatgggtgcaatagggaattactgaattcagtaacattttattgtgtttaaagaatatgcaaattttagataacaaccatttccactcaaatgttctgttagctttttaaaatgtctgaagtagaatcaaagtgaaaaaaaatgcatttagcagcatatgaaagcactcatttttaacagtaacaatatttccaatgtcactaatc

SEQ ID NO: 72931 - DNA, 600 bp, Chicken  19866894353552_2
ttccctgtaggtgaagtacaaaggagctgctaagaaagacctttccaactctctttatcagcagatgccagctacaattgacagtgcatttgcaaaagaattaactcagctgcagagcaaggtgcgactttaaaatcacaaaaatgatttgtacattaattgtagggtagaatatgaacactttgaacaatattgttgaatggatacttgattgcctgcttgattaattttgggtgggattatcatccagagtttgttatcacagctacttcaacarctactcaattctaaaatgtagaygatctgactgccaagtttattaaatataaacattaaaaaagattaaaaccaggcaaaatcaattagcagcccatgggtgcaatagggaattactgaattcagtaacattttattgtgtttaaagaatatgcaaattttagataacaaccatttccactcaaatgttctgttagctttttaaaatgtctgaagtagaatcaaagtgaaaaaaaatgcatttagcagcatatgaaagcactcatttttaacagtaacaatatttccaatgtcactaatcatttacataccactgacaacaaa

SEQ ID NO: 72932 - DNA, 600 bp, Chicken  19866894353556_1
ctccacataggagggatctctagaaagagatccttctccagtggcaatcagcccttaaatggggtctaggaggggtggagcctggctccactccttccagtcacacaggtgaatggccttcacctgtgttcccgtggctgatccagtccttgcctcagatgatcaatcagtggttcaggccataactcagcagttcccatacaatcactaacccccttcttagctatgaagggtgaaattttggaaagcatgtttcaaatacagagagcaagtacccaagaacggaaataataggtcaarcctacatatttgatttgtgtatttatcagtttgatgtatttattatttaagaaagaatatttacagcagcataattgaacactttctattctctttgaaattaataagctacatrtttacttatgtaaacacagatttrtgagtagttcactacttgcaggtgatgcaggttcagcatgggcttaagaacatatattagaagatcaggtcgcagtctatatgggctgttacaaatatatgtagtccaaacaacacttggccaagagaaaagggaaacaaataacacaagaattaagtaag

SEQ ID NO: 72933 - DNA, 525 bp, Chicken  19866894353556_2
gccttcacctgtgttcccgtggctgatccagtccttgcctcagatgatcaatcagtggttcaggccataactcagcagttcccatacaatcactaacccccttcttagctatgaagggtgaaattttggaaagcatgtttcaaatacagagagcaagtacccaagaacggaaataataggtcaarcctacatatttgatttgtgtatttatcagtttgatgtatttattatttaagaaagaatatttacagcagcataattgaacactttctattctctttgaaattaataagctacatrtttacttatgtaaacacagatttrtgagtagttcactacttgcaggtgatgcaggttcagcatgggcttaagaacatatattagaagatcaggtcgcagtctatatgggctgttacaaatatatgtagtccaaacaacacttggccaagagaaaagggaaacaaataacacaagaattaagtaagctttctcaattaaaagcctgtagactaaaaatacttcata

SEQ ID NO: 72934 - DNA, 501 bp, Chicken  19866894353556_3
gatccagtccttgcctcagatgatcaatcagtggttcaggccataactcagcagttcccatacaatcactaacccccttcttagctatgaagggtgaaattttggaaagcatgtttcaaatacagagagcaagtacccaagaacggaaataataggtcaarcctacatatttgatttgtgtatttatcagtttgatgtatttattatttaagaaagaatatttacagcagcataattgaacactttctattctctttgaaattaataagctacatrtttacttatgtaaacacagatttrtgagtagttcactacttgcaggtgatgcaggttcagcatgggcttaagaacatatattagaagatcaggtcgcagtctatatgggctgttacaaatatatgtagtccaaacaacacttggccaagagaaaagggaaacaaataacacaagaattaagtaagctttctcaattaaaagcctgtagactaaaaatacttcata

SEQ ID NO: 72935 - DNA, 600 bp, Chicken  19866894353574_1
ataaacagactgtcaccatggcttcagcatcagctttagccagctttggtgggcagcgctgatcctggggaacttcccctcccttccaccctgaccatcctcttcctgtggacgagcactgcctttcacatggtcaccccaatagggagggggagtgatttaggccatagccaggcactaagttattcatccacccacccttctaccctctcatttatttgcttatgtgtgtgtgtgctgggaagcagcttcctagcacagttcactgagcagttgagtgaggtcttgtgtgtgcacccyagggatgctctgacctacatgtgtttttggtttttttttggcattttcatgtctgctatgcccaagtcctctcttttgggctgccactacagattgttaccaaagggagacccacaggacacctctttatgtgtggctgtgatgacaggtgttatcagatgggaatcccactgattcttaaaaattgaagtggaagtgtagaggagcaggagggagagtgtagggctgaaggtgtgtcactctttgagttgacatgctagactgaagtgtgtgagctgagccttatggaacaagaatgta

SEQ ID NO: 72936 - DNA, 599 bp, Chicken  19866894353575_1
  misc_feature (1)..(132): n is any nucleotide
nnnnnnnnnnnnnnnnnnnnnnnnnnnnnnnnnnnnnnnnnnnnnnnnnnnnnnnnnnnnnnnnnnnnnnnnnnnnnnnnnnnnnnnnnnnnnnnnnnnnnnnnnnnnnnnnnnnnnnnnnnnnnnnnnnnnaaccccactagaacaggctgccctgttcaagacctggccttgaagcacagcagccataatatagcgtagtacagtatataatgccagtgccattttatggctgctgtagctagaaagacatctttacaattaaatgcattaaaatattctgtggtagtgtttttttgyttttttgtttgtttgtttttatcattctccagacctgaaccattcagtccttcctttcctttgtgttgtgcaaaaagcaattttaatgctaaatttgcttttgatatggttcaataacaatgtaaaatggatgaggtctaataaaataacacaaagttaaaggcaagcctgaattcttggctttgctatcattttacctggatttgataaatgacattgcctgcatggtagacagtatgagttgtcatatttttctaagatcttgtctagtgggaaaagttaatgtatttttttttctc

SEQ ID NO: 72937 - DNA, 599 bp, Chicken  19866894353575_2; identical to SEQ ID NO: 72936
  misc_feature (1)..(132): n is any nucleotide

SEQ ID NO: 72938 - DNA, 599 bp, Chicken  19866894353575_3; identical to SEQ ID NO: 72936
  misc_feature (1)..(132): n is any nucleotide

SEQ ID NO: 72939 - DNA, 599 bp, Chicken  19866894353575_4; identical to SEQ ID NO: 72936
  misc_feature (1)..(132): n is any nucleotide

SEQ ID NO: 72940 - DNA, 599 bp, Chicken  19866894353580_1
  misc_feature (1)..(140): n is any nucleotide
nnnnnnnnnnnnnnnnnnnnnnnnnnnnnnnnnnnnnnnnnnnnnnnnnnnnnnnnnnnnnnnnnnnnnnnnnnnnnnnnnnnnnnnnnnnnnnnnnnnnnnnnnnnnnnnnnnnnnnnnnnnnnnnnnnnnnnnnnnnntggggcaattgaactgtcatcggatctccttctaggaagagcctccttttttatcagaaagatggaattggtaaattacaacatgggcagagtgaagactgtccaaagagtgagggttctgtgagctatggatatgtcagcatgctgtgtagaaactgtrcttgtgaaccagcactacgtttcattccacaggccatagcagagccaggtgctacagtgagraacactgcaatgcaacagagttgattaggagtttttcttgcatcgttttctaagagaacatgtatttcttcttgtgttctgaaagaaaaataatttatattaacaaagtggctttttgtttagcgacttttaaaatggagttatacctgctggaaggaaactgtgtatgcacacaagttcttggcagaaatgcacttgtaaatctcagctgagcatctgttgtcctgcaagtcagga

SEQ ID NO: 72941 - DNA, 599 bp, Chicken  19866894353580_2
  misc_feature (1)..(78): n is any nucleotide
nnnnnnnnnnnnnnnnnnnnnnnnnnnnnnnnnnnnnnnnnnnnnnnnnnnnnnnnnnnnnnnnnnnnnnnnnnnnnntggggcaattgaactgtcatcggatctccttctaggaagagcctccttttttatcagaaagatggaattggtaaattacaacatgggcagagtgaagactgtccaaagagtgagggttctgtgagctatggatatgtcagcatgctgtgtagaaactgtrcttgtgaaccagcactacgtttcattccacaggccatagcagagccaggtgctacagtgagraacactgcaatgcaacagagttgattaggagtttttcttgcatcgttttctaagagaacatgtatttcttcttgtgttctgaaagaaaaataatttatattaacaaagtggctttttgtttagcgacttttaaaatggagttatacctgctggaaggaaactgtgtatgcacacaagttcttggcagaaatgcacttgtaaatctcagctgagcatctgttgtcctgcaagtcaggagaggtgagcctacaggtaactttgcctgaagggctattaagaagcataacagaagtggtcat

SEQ ID NO: 72942 - DNA, 600 bp, Chicken  19866894353593_1
atcgaagccgacaactgcctgcactggctttatggcggcttctacatgtgctacattcccactgctgtcccctccctcatgcagatcacagttattccccacccagcatttccatttaccctgagcaacatgtggagatggggaccaacatcacccatccgctgctggaacaaggactacggggccgccttcctcctgcacaaggatgggagctcaccccctatcaagcaccaggaccccagtggtggaggtgctgcaaactttaccttcctggcggtgaccccagctgacagtggcacmtacaggtgctcctaccgcctctggcgctatgccttcatgtcctcaccccttggggacagcgtgatgctggaggtgacacccacagctgcaccctcaggtgggtctgagccccccatttgcataccccccgtcatggatgggtggctgtgtctctgcatccagtctgcatagggcttgtggctggcaatagggacacccaaacacctggatcccacaggtgctgtggagcagtcctgggccaattttgtgatggcactggtgaggggctttgtggctgcactcgtctttggcctcggagtc

SEQ ID NO: 72943 - DNA, 511 bp, Chicken  19866894353595_1
accttgaatgcctccagtgatggatgaatgcatccacaacatcccttagcaacctgttccagtgcatcaccaccctctgtgtgaaaaacttcttcctaatatctaacctaaacctcccctatctcagtttaagaccattctcccttgtcccatacaccctcgtatacagctgttccccttccttcaagtatgctcccttcaagtactggaaggctgcaatgaggtctccctggagccttcttttctccaaactaaacaagcccagttccctcaacctttcctcctagagaggtgctccartcctctgatcatcttagtggtcctcctctggacccgctccaagagctccatgtctytcttgtgctgggggccccaggcctagatgcagtactccagatgggtcctcacaagagctgagtagaggggcacaatcacctccctctccctgctggccaccccttttttaatgcagcccagaactcagttgacattctgggctgcaagggatttg

SEQ ID NO: 72944 - DNA, 455 bp, Chicken  19866894353595_2
ttccagtgcatcaccaccctctgtgtgaaaaacttcttcctaatatctaacctaaacctcccctatctcagtttaagaccattctcccttgtcccatacaccctcgtatacagctgttccccttccttcaagtatgctcccttcaagtactggaaggctgcaatgaggtctccctggagccttcttttctccaaactaaacaagcccagttccctcaacctttcctcctagagaggtgctccartcctctgatcatcttagtggtcctcctctggacccgctccaagagctccatgtctytcttgtgctgggggccccaggcctagatgcagtactccagatgggtcctcacaagagctgagtagaggggcacaatcacctccctctccctgctggccaccccttttttaatgcagcccagaactcagttgacattctgggctgcaagggatttg

SEQ ID NO: 72945 - DNA, 599 bp, Chicken  19866894353597_1
  misc_feature (1)..(70): n is any nucleotide
nnnnnnnnnnnnnnnnnnnnnnnnnnnnnnnnnnnnnnnnnnnnnnnnnnnnnnnnnnnnnnnnnnnnnngcaccctgtgccattcctcaccaccctcattgtaaagcacttcttccctcatatctaatctcttctttttttagtttgaaactgtttccccttaccctattgcaacagatcttgctgaagaatctgtcctctcatagtccctgtttagatactgaaaagctgctgttgggtctccctggagccttcttttctccaggctgaacagcccccagctcttccagcttgtcctygtatccatctyttagcctgttcctgtgtctgtgttgttatggacagctaaacagttccatcagctactgttatcaattgtaacgcttatggcccagggttctccctgctgatagctgggtatgcagcatcaggccaagtggctgcaaaagtataaatcraggattcaagccaacctttggttgtttggctttgggaagttattttaatatcgccagctcttttagccaacttmtgtctgcttctaacagctgagatcagttcacccagttttaaaatccaaactaaaaatacctttcat

SEQ ID NO: 72946 - DNA, 599 bp, Chicken  19866894353597_2
  misc_feature (1)..(59): n is any nucleotide
nnnnnnnnnnnnnnnnnnnnnnnnnnnnnnnnnnnnnnnnnnnnnnnnnnnnnnnnnnngcaccctgtgccattcctcaccaccctcattgtaaagcacttcttccctcatatctaatctcttctttttttagtttgaaactgtttccccttaccctattgcaacagatcttgctgaagaatctgtcctctcatagtccctgtttagatactgaaaagctgctgttgggtctccctggagccttcttttctccaggctgaacagcccccagctcttccagcttgtcctygtatccatctyttagcctgttcctgtgtctgtgttgttatggacagctaaacagttccatcagctactgttatcaattgtaacgcttatggcccagggttctccctgctgatagctgggtatgcagcatcaggccaagtggctgcaaaagtataaatcraggattcaagccaacctttggttgtttggctttgggaagttattttaatatcgccagctcttttagccaacttmtgtctgcttctaacagctgagatcagttcacccagttttaaaatccaaactaaaaatacctttcatactataagcag

SEQ ID NO: 72947 - DNA, 600 bp, Chicken  19866894353597_3
ccttaccctattgcaacagatcttgctgaagaatctgtcctctcatagtccctgtttagatactgaaaagctgctgttgggtctccctggagccttcttttctccaggctgaacagcccccagctcttccagcttgtcctygtatccatctyttagcctgttcctgtgtctgtgttgttatggacagctaaacagttccatcagctactgttatcaattgtaacgcttatggcccagggttctccctgctgatagctgggtatgcagcatcaggccaagtggctgcaaaagtataaatcraggattcaagccaacctttggttgtttggctttgggaagttattttaatatcgccagctcttttagccaacttmtgtctgcttctaacagctgagatcagttcacccagttttaaaatccaaactaaaaatacctttcatactataagcagccgtgacagttaccttttgtatcaacaggcaatgctttattttaactttgtaggtcctggtggagatcgaccgagtgaaatctagaatgcagttggctgctgagtctcttcaggaagcagacaaatggactacattaagcgcagatatc

SEQ ID NO: 72948 - DNA, 596 bp, Chicken  19866894353597_4
tgttgggtctccctggagccttcttttctccaggctgaacagcccccagctcttccagcttgtcctygtatccatctyttagcctgttcctgtgtctgtgttgttatggacagctaaacagttccatcagctactgttatcaattgtaacgcttatggcccagggttctccctgctgatagctgggtatgcagcatcaggccaagtggctgcaaaagtataaatcraggattcaagccaacctttggttgtttggctttgggaagttattttaatatcgccagctcttttagccaacttmtgtctgcttctaacagctgagatcagttcacccagttttaaaatccaaactaaaaatacctttcatactataagcagccgtgacagttaccttttgtatcaacaggcaatgctttattttaactttgtaggtcctggtggagatcgaccgagtgaaatctagaatgcagttggctgctgagtctcttcaggaagcagacaaatggactacattaagcgcagatatcgaagagacccttaaaacacaggtagaggccacatagttctttggttcgtagttcatttagttcatagggt

SEQ ID NO: 72949 - DNA, 599 bp, Chicken  19866894353607_1
  misc_feature (1)..(186): n is any nucleotide
nnnnnnnnnnnnnnnnnnnnnnnnnnnnnnnnnnnnnnnnnnnnnnnnnnnnnnnnnnnnnnnnnnnnnnnnnnnnnnnnnnnnnnnnnnnnnnnnnnnnnnnnnnnnnnnnnnnnnnnnnnnnnnnnnnnnnnnnnnnnnnnnnnnnnnnnnnnnnnnnnnnnnnnnnnnnnnnnnnnnnnnnnnaattgaaaaagaaaataaactagataaatgtcattcagtaaaccactcctcagaatgactgaaaacataatggtctgctaaaattcgtaatatggtcaactaagcttggagaakcagttgaagtttcgctagggcagaaggcagtaagctgagtcagttctaaccttagattcacgggagttctttctgttgtaggtggaaccagccagagttaattgagtcattayttggtcaaagtagaaatagaatctggccttcaaaatgtaggagatcaactttatatgttacaatacagtctatttgtgcagctcataaaatcaaattgattgtcatttttcctcatgtatacatatataaggaaatatacatacacatatatraggaaaaaatctttaacagtaagggtgataagg

SEQ ID NO: 72950 - DNA, 599 bp, Chicken  19866894353607_2
  misc_feature (1)..(73): n is any nucleotide
nnnnnnnnnnnnnnnnnnnnnnnnnnnnnnnnnnnnnnnnnnnnnnnnnnnnnnnnnnnnnnnnnnnnnnnnnaattgaaaaagaaaataaactagataaatgtcattcagtaaaccactcctcagaatgactgaaaacataatggtctgctaaaattcgtaatatggtcaactaagcttggagaakcagttgaagtttcgctagggcagaaggcagtaagctgagtcagttctaaccttagattcacgggagttctttctgttgtaggtggaaccagccagagttaattgagtcattayttggtcaaagtagaaatagaatctggccttcaaaatgtaggagatcaactttatatgttacaatacagtctatttgtgcagctcataaaatcaaattgattgtcatttttcctcatgtatacatatataaggaaatatacatacacatatatraggaaaaaatctttaacagtaagggtgataaggtactagaacaggttgcccagtgttgtggttgatgccccatccctgcagactttcaaggcgaggctggatcaggtctgggcaacctgatctgtccgtggtgtccctgttcattg

SEQ ID NO: 72951 - DNA, 600 bp, Chicken  19866894353607_3
aaattcgtaatatggtcaactaagcttggagaakcagttgaagtttcgctagggcagaaggcagtaagctgagtcagttctaaccttagattcacgggagttctttctgttgtaggtggaaccagccagagttaattgagtcattayttggtcaaagtagaaatagaatctggccttcaaaatgtaggagatcaactttatatgttacaatacagtctatttgtgcagctcataaaatcaaattgattgtcatttttcctcatgtatacatatataaggaaatatacatacacatatatraggaaaaaatctttaacagtaagggtgataaggtactagaacaggttgcccagtgttgtggttgatgccccatccctgcagactttcaaggcgaggctggatcaggtctgggcaacctgatctgtccgtggtgtccctgttcattgcaggggagctggactagatggccttcagcggtcccttccaactctaagggttctatgactaaatctctaatgaaattatttcagtgaattggagttatgttcagaagtttcagataccacatctagcaaatgaatactgaatttatgatctgtg

SEQ ID NO: 72952 - DNA, 600 bp, Chicken  19866894353611_1
tagaaaacttcagcaatatgtccttttactaatggtaacccgggctgcattaggaagagtgttttcttcaggcaaagggaggtgactctcaccctctgtctttgttcaacccaaagtatttcttaagagtatactggctcactagaagaagaaacatatgaactactggagagagtccagagaagggccatgaagatattggaggccatggaggagggtttggagcaactctcttagtgtttggagcaactctcttatgacaaaaggcttagatagctgagattggttagggtggggaaratgaggctcagggagatctcatcaatgtctataaatgcctgaagggagtatgaaatgaagataggctctgttcagtgctcagtgccgagacaagaggcagtgggcacaaactggaacacaggaggttcctcctgaacaccacgaagcagttctgggctgtgcagtgctagagtggtacccagagtgggatctcctcctcagacaaactcaaaagccatctgggtgtgggccagagcaccttgctcaggaggtcctgctgtagccaggggctgggccacatggacccagaggtaccttcca

SEQ ID NO: 72953 - DNA, 599 bp, Chicken  19866894353621_1
  misc_feature (1)..(95): n is any nucleotide
nnnnnnnnnnnnnnnnnnnnnnnnnnnnnnnnnnnnnnnnnnnnnnnnnnnnnnnnnnnnnnnnnnnnnnnnnnnnnnnnnnnnnnnnnnnnnnnccatgttttccatgggaaacatccctttctttctctgcagagttctgtgctgtactgaaattctttcagttttagcagggaaatagaagtgagcttactactgtaggctgaggtgacccaaactgagtcacttctgcctgctgaatcacagcggtttggtgttgggttggtctcatatttgtcaatgcctgtgaggacatcagcrgacctggagctggrgagytcagtgctcctcatcctccccagcccatgaggacctgcgggctcattgtgatgaagggatgctctggaaaacagagacaagcctcaaagtgttataaaacactccagtttccattcctgtgacttgctggagcaggcaggcacgtttcctccaggaccaaattagcaaataacagactttctgatattgcttaacattttctctttgccctcctcctcctcctccttggagaatttctctgttctgacatttccattcgggacaaaggtggtttcccactg

SEQ ID NO: 72954 - DNA, 599 bp, Chicken  19866894353621_2
  misc_feature (1)..(81): n is any nucleotide
nnnnnnnnnnnnnnnnnnnnnnnnnnnnnnnnnnnnnnnnnnnnnnnnnnnnnnnnnnnnnnnnnnnnnnnnnnnnnnnnnccatgttttccatgggaaacatccctttctttctctgcagagttctgtgctgtactgaaattctttcagttttagcagggaaatagaagtgagcttactactgtaggctgaggtgacccaaactgagtcacttctgcctgctgaatcacagcggtttggtgttgggttggtctcatatttgtcaatgcctgtgaggacatcagcrgacctggagctggrgagytcagtgctcctcatcctccccagcccatgaggacctgcgggctcattgtgatgaagggatgctctggaaaacagagacaagcctcaaagtgttataaaacactccagtttccattcctgtgacttgctggagcaggcaggcacgtttcctccaggaccaaattagcaaataacagactttctgatattgcttaacattttctctttgccctcctcctcctcctccttggagaatttctctgttctgacatttccattcgggacaaaggtggtttcccactgggtggaaattctcc

SEQ ID NO: 72955 - DNA, 599 bp, Chicken  19866894353621_3
  misc_feature (1)..(77): n is any nucleotide
nnnnnnnnnnnnnnnnnnnnnnnnnnnnnnnnnnnnnnnnnnnnnnnnnnnnnnnnnnnnnnnnnnnnnnnnnnnnnccatgttttccatgggaaacatccctttctttctctgcagagttctgtgctgtactgaaattctttcagttttagcagggaaatagaagtgagcttactactgtaggctgaggtgacccaaactgagtcacttctgcctgctgaatcacagcggtttggtgttgggttggtctcatatttgtcaatgcctgtgaggacatcagcrgacctggagctggrgagytcagtgctcctcatcctccccagcccatgaggacctgcgggctcattgtgatgaagggatgctctggaaaacagagacaagcctcaaagtgttataaaacactccagtttccattcctgtgacttgctggagcaggcaggcacgtttcctccaggaccaaattagcaaataacagactttctgatattgcttaacattttctctttgccctcctcctcctcctccttggagaatttctctgttctgacatttccattcgggacaaaggtggtttcccactgggtggaaattctcctcct

SEQ ID NO: 72956 - DNA, 599 bp, Chicken  19866894353631_1
  misc_feature (1)..(31): n is any nucleotide
nnnnnnnnnnnnnnnnnnnnnnnnnnnnnnnaaatggtgggatttcaaaaggagggattcttaaagaacagcacatctcaggggagggatcaactgccagtccaagtggcaggtaaggcacaacacaggcataagtcgcaaatgttcttcagtgaacaaaagttaaagaaatatctctgatgtctctaaagcttgtctatatccaaagccctgctctgttcttggcctctgtcttggtcttctatccctacagttgaatcaaatgttcaattctctatgtatctcaaccagataacctcyacaattctgtttatgtcttataactcaaaagattgtcattaggaaagcatggtactgaatcctgcggctcaaggagacaacatggtatarcaatgctccaaaatgatggatctattcatgaacccagaggctctgtaatcctgacatagccaccatgttcrgaaaagttctcttgtggctaccaggagcaattgcatcactgttaagccacatcagaccaagctctgtatcrgtccagtacaaacacccttgcaggcagccagctgtgctgcagaaacagaagacttgtctgacagcag

SEQ ID NO: 72957 - DNA, 600 bp, Chicken  19866894353631_2
caactgccagtccaagtggcaggtaaggcacaacacaggcataagtcgcaaatgttcttcagtgaacaaaagttaaagaaatatctctgatgtctctaaagcttgtctatatccaaagccctgctctgttcttggcctctgtcttggtcttctatccctacagttgaatcaaatgttcaattctctatgtatctcaaccagataacctcyacaattctgtttatgtcttataactcaaaagattgtcattaggaaagcatggtactgaatcctgcggctcaaggagacaacatggtatarcaatgctccaaaatgatggatctattcatgaacccagaggctctgtaatcctgacatagccaccatgttcrgaaaagttctcttgtggctaccaggagcaattgcatcactgttaagccacatcagaccaagctctgtatcrgtccagtacaaacacccttgcaggcagccagctgtgctgcagaaacagaagacttgtctgacagcaggaaagaaaggaagatagttaggactttggtgttggttccttagtagctctcacaggaaccactttaaaaacagattaaacataacaaaatc

SEQ ID NO: 72958 - DNA, 600 bp, Chicken  19866894353631_3
gttaaagaaatatctctgatgtctctaaagcttgtctatatccaaagccctgctctgttcttggcctctgtcttggtcttctatccctacagttgaatcaaatgttcaattctctatgtatctcaaccagataacctcyacaattctgtttatgtcttataactcaaaagattgtcattaggaaagcatggtactgaatcctgcggctcaaggagacaacatggtatarcaatgctccaaaatgatggatctattcatgaacccagaggctctgtaatcctgacatagccaccatgttcrgaaaagttctcttgtggctaccaggagcaattgcatcactgttaagccacatcagaccaagctctgtatcrgtccagtacaaacacccttgcaggcagccagctgtgctgcagaaacagaagacttgtctgacagcaggaaagaaaggaagatagttaggactttggtgttggttccttagtagctctcacaggaaccactttaaaaacagattaaacataacaaaatcagtgaggtaaagcagaaaacagacttcagaaacattgaattcctttgttactttgggaaatatctacatcg

SEQ ID NO: 72959 - DNA, 600 bp, Chicken  19866894353631_4
cttggtcttctatccctacagttgaatcaaatgttcaattctctatgtatctcaaccagataacctcyacaattctgtttatgtcttataactcaaaagattgtcattaggaaagcatggtactgaatcctgcggctcaaggagacaacatggtatarcaatgctccaaaatgatggatctattcatgaacccagaggctctgtaatcctgacatagccaccatgttcrgaaaagttctcttgtggctaccaggagcaattgcatcactgttaagccacatcagaccaagctctgtatcrgtccagtacaaacacccttgcaggcagccagctgtgctgcagaaacagaagacttgtctgacagcaggaaagaaaggaagatagttaggactttggtgttggttccttagtagctctcacaggaaccactttaaaaacagattaaacataacaaaatcagtgaggtaaagcagaaaacagacttcagaaacattgaattcctttgttactttgggaaatatctacatcgtacagtgaccaagcagtgaagctaacgtgtggtgggtcactgacttccagacctttgcatttcctttactt

SEQ ID NO: 72960 - DNA, 600 bp, Chicken  19866894353632_1
gcaaaagctgacaaatgaaggtgatgtaaagcaatcccaatgagtagcatgccaaccacaaaggaatttggatgctcaagggaaagctgaggtgggcacaaaggatcttccagcaaaaatgggatgctacaagggcacctgcagaaggcagggggggatcctggtggagagggcttctttaattttagtttggtcatgaaactcgcattgctacaggactaggacaatacttggccattagcacctttacggttgctgttaccttctgttgactcatgatggtcttgccatcaccatcgrgctgccagctgcctttcagcctcactgaggagttcggatgaacacagaactcggctggaacggctcagagctgaggttgtgattgcagcagggcttctccaaaaacagaggttttgtttgtcaaaaccaacgggtttgacctggaagtccttgggattggatgactgcaaagccttayggagacacagaacgcactcagagctggttgggaattggtttggaatttcttgctacaggctttttggctgaaaaggagtgtaacggcattgattacattttcatcaggaacaatccttaggc

SEQ ID NO: 72961 - DNA, 553 bp, Chicken  19866894353632_2
ttaattttagtttggtcatgaaactcgcattgctacaggactaggacaatacttggccattagcacctttacggttgctgttaccttctgttgactcatgatggtcttgccatcaccatcgrgctgccagctgcctttcagcctcactgaggagttcggatgaacacagaactcggctggaacggctcagagctgaggttgtgattgcagcagggcttctccaaaaacagaggttttgtttgtcaaaaccaacgggtttgacctggaagtccttgggattggatgactgcaaagccttayggagacacagaacgcactcagagctggttgggaattggtttggaatttcttgctacaggctttttggctgaaaaggagtgtaacggcattgattacattttcatcaggaacaatccttaggcctgcagaacaatccacagtcaatgaataagccttagacttagcctcatccacagtgataatgatatcagaccactacaaggtctgaggccgcctccacaccagagatggcagagatcgataaacccaacca

SEQ ID NO: 72962 - DNA, 600 bp, Chicken  19866894353634_1
gcacaggtgcccagaggcaacgctcataggacagccagcatccttcgggaaacacgagtggtaacccgcgatcctcatcagtgcaggcacccaaagtcacccagcactgagagcacagcacctccaccacctcctgctcctttccccaaagcaggttcagcatccagccacgcgatatcctggctgaacagctcgatctgccctcacctccataagcacagccctgcgttacagacaccgcgacggccgtgatggtgtaggacaaataggaggaaataggagctactaaagcgtttttckcctctctggatttgctgtcaaggttcacttgggtataaacccacatttcatcctcaagattattcaagtgtgaacttcaaagctgccatggcttttaattaaacgttcatctgcacataaatgcgtgctcctaattgctctcaaaatgctatatcaactctcactaactggatagtgtcaagtatgaggactaatttctgcgagtgaagcaggcaccagaagtatttctttaaaggttgtggtctccacgctccgtaaaatgtaatgaaccggcacgttatgggaacactggtaaatgcc

SEQ ID NO: 72963 - DNA, 485 bp, Chicken  19866894353641_1
aaatctcaggcttggaagcagggatgtgtgtctgataagtgaacggcttctctagtaacacaataaccaaatacttattttctttaaattcttggaagtttatcatgtcaactttctgccatttaaggcacaaaaagtctgcttaggttatggattgacttgggtttctcctgcaagtatgtacttctcacctcacgaggccaagagaaccagctgcaagcagacagtggctgcagtgagcatagggagggaccagccccaccaacaccttgcagccagcacaaagttagctcccatacyggcaaggccatcagcctgccagcatgtataggtgctgggaaagcttaacagagaccataggagggagaaggcagcagcaaaaataaaaattaaaaatgacaggagcagcagcagttgcaggacactgcatgtgcaggggccctcttgtcatcatgttgccactccaccaaacaggcaggcagaag

SEQ ID NO: 72964 - DNA, 600 bp, Chicken  19866894353642_1
tctcctctttttcttattgtaaattttggacactgctaagggcagaccacaatggagaacttttcagggaagacttggaaatttgctggtgaatttggacaaggcactactaagtgcattacagcctatggccatcccttcattctcctaaaattttttcaaggaagtgcctcagcagaccatattttcaataaacttctaatgaggacagcaaatttgcaagaaaatcattaagttgcctactaggtaatgatctgtgcctgtcttgtactccagtagttgtcaaaagtaaaccttgayactggacttggaaataaaaatgaactctttttgtgattttcctgtgatttggagccagtgaaacttgcctgtggaacaaaagaaaagctattgaaaatacccttttgtgtaacagcataagcaagcaagaggtgcccagcgtcttgtcaggaacatttttatagcgtggcgtgtgctgtggttctcagtgatcccattttgaggcagatcaggagcagtgctcagcagttcggtgcgagcgggtgaaatagtgactgacttgtgttggcagatgggaattgagggactcattagtcatgc

SEQ ID NO: 72965 - DNA, 600 bp, Chicken  19866894353646_1
agctccagctgcccaactttacacacttcagctctccccttggtgttggggctggttctggcagcagcaggaggcacccagggctctgagccctggtatccccatgctcttcccggggctgggagctgcagccctgtcaccacttctggctgcattgaatggggagtgctgtcactggctggaagcgatgccttcaagaggccttgaaatgtggcattttgggcagatattctaatcaccagcttgagtcagctgctctgattaaaattcccaaaggaaatggattgttacggattggcrgttgctgtgaatgaggtttgatgagtgttttggaagtaatcgaagcacttccaaatgggaagtaaatgtccagtgctgtctgcrtgcaaccttgggtaatttgatgatgatttgatgcaaaccagcaaatatttaggataacgtactataaaaatatattttctaaaggggaataagtccatatcaatgaacagttcaggtttttcaccttgcataaaattgctgccaatgttggtaaagccatcagatcttgatggctggagccatttgtgttgcagtagcataacgctcgtagtttgc

SEQ ID NO: 72966 - DNA, 600 bp, Chicken  19866894353646_2
tctgagccctggtatccccatgctcttcccggggctgggagctgcagccctgtcaccacttctggctgcattgaatggggagtgctgtcactggctggaagcgatgccttcaagaggccttgaaatgtggcattttgggcagatattctaatcaccagcttgagtcagctgctctgattaaaattcccaaaggaaatggattgttacggattggcrgttgctgtgaatgaggtttgatgagtgttttggaagtaatcgaagcacttccaaatgggaagtaaatgtccagtgctgtctgcrtgcaaccttgggtaatttgatgatgatttgatgcaaaccagcaaatatttaggataacgtactataaaaatatattttctaaaggggaataagtccatatcaatgaacagttcaggtttttcaccttgcataaaattgctgccaatgttggtaaagccatcagatcttgatggctggagccatttgtgttgcagtagcataacgctcgtagtttgcggtctgttacttgtagtcaggctttgcttagaatttagacaccagtgatagtctcaggtaaaagacttcattaaaatcctggta

SEQ ID NO: 72967 - DNA, 599 bp, Chicken  19866894353648_1
  misc_feature (1)..(120): n is any nucleotide
nnnnnnnnnnnnnnnnnnnnnnnnnnnnnnnnnnnnnnnnnnnnnnnnnnnnnnnnnnnnnnnnnnnnnnnnnnnnnnnnnnnnnnnnnnnnnnnnnnnnnnnnnnnnnnnnnnnnnnnnaatatatttcaatattccatttcataaagatctaaagttgaacataaagcaaataaaaggccctttgaaattctgcctcttttgagcttacataattaatctatattcagtgctctggcatttattttaacctttttaagttctgacccagacaaaaataaattcaaagagtgcctcttyagaactccccccctgtcgtacagagctgcgttatcaaaaggggcccggctgattagtacacacaagacagcgccaggcaatgagcgtaaggctcatggctttttgttattaaggtaatctctcctcaaaagttctcagcagcagcagccgcttcgctcactgatttacaaaggctccttacaagtctacgatgtcaatggtatctccgctaacgagtgcatttcttgtttttttgaagcccagacagctacacactgcacttcctttgcaaggacagcaagacttattttatccacaga

SEQ ID NO: 72968 - DNA, 599 bp, Chicken  19866894353657_1
  misc_feature (1)..(139): n is any nucleotide
nnnnnnnnnnnnnnnnnnnnnnnnnnnnnnnnnnnnnnnnnnnnnnnnnnnnnnnnnnnnnnnnnnnnnnnnnnnnnnnnnnnnnnnnnnnnnnnnnnnnnnnnnnnnnnnnnnnnnnnnnnnnnnnnnnnnnnnnnnntgactcgggcagcgtgcccgatggaaggagggctgatgggtgaggcaccgctcccggctctagagacagccactgctttgataccagcggtaattaaaggaaagaactgcatgagactatgattagaagttgcacatcatcgtagaacacgcagaaacacrcagcctgctgctgctaccacccctattcagcacctgcagcctgagagaagcgatgcttggcatggccatcagctgctgcacagcagggaaagcgaggcacggaggagcccttcccttcttgtaagtaaatgctccccttcttccctcctggtgtgtgctcgtttatggtggcacagctccttcctcctggcactgagggcccaaacatgaggctgtccgctggggtgggacctcccaatgtggtgtttgttccccagtggcacctggaagggtcctcccaaagcttgggcgacaccatt

SEQ ID NO: 72969 - DNA, 546 bp, Chicken  19866894353658_1
gttggcacatcccccactgctgccccaggtgtggcaactgtgccagggcatcgtccctggggggaaggagagaggccagaaggatgcatttattttgctctcctcttgcccagctctgccccagctccctgcaataacgctggaggccaacagaagcacagtgatatgcaaacagcctgacaagctatcccaaacctctgaacaaaccttggagcctccccatcctgttcaaactgttcctgaaacgtaagcaatcaactgcttgttatctgagaatcagtgcaatatgaaagagagaasccagcaggtcagctgcccagccctccccacgcmtccagcacaaacagcatgaggaggattctgagttccctctgatcccttcttcaacatttgtcatgaagttttggaagtggaggggtgagaacacaacacaggtttctccggaaaggagaaaagcagagggaaagcaacatccatctggactgcacgcagacctcagcaaacagattccacaaatggcaagctctgcatatagagacattaatt

SEQ ID NO: 72970 - DNA, 513 bp, Chicken  19866894353658_2
gcaactgtgccagggcatcgtccctggggggaaggagagaggccagaaggatgcatttattttgctctcctcttgcccagctctgccccagctccctgcaataacgctggaggccaacagaagcacagtgatatgcaaacagcctgacaagctatcccaaacctctgaacaaaccttggagcctccccatcctgttcaaactgttcctgaaacgtaagcaatcaactgcttgttatctgagaatcagtgcaatatgaaagagagaasccagcaggtcagctgcccagccctccccacgcmtccagcacaaacagcatgaggaggattctgagttccctctgatcccttcttcaacatttgtcatgaagttttggaagtggaggggtgagaacacaacacaggtttctccggaaaggagaaaagcagagggaaagcaacatccatctggactgcacgcagacctcagcaaacagattccacaaatggcaagctctgcatatagagacattaatt

SEQ ID NO: 72971 - DNA, 599 bp, Chicken  19866894353660_1
  misc_feature (1)..(189): n is any nucleotide
nnnnnnnnnnnnnnnnnnnnnnnnnnnnnnnnnnnnnnnnnnnnnnnnnnnnnnnnnnnnnnnnnnnnnnnnnnnnnnnnnnnnnnnnnnnnnnnnnnnnnnnnnnnnnnnnnnnnnnnnnnnnnnnnnnnnnnnnnnnnnnnnnnnnnnnnnnnnnnnnnnnnnnnnnnnnnnnnnnnnnnnnnnnnnaccaaggagggcacgtggacagaggagttcaagctgtgcaagagcctgcagggcacctgccctccacctccagagctcaacctcgtggagtacaagtgcgagcaggggcayggcataggtgagggcaggagaacaccctgcagaaacccagaccctgtgttgagtcagccatcctggagagccagctggaaggtcacggtgactcttctacttgggccaattcccattaaatctatgaaaaaatagttttttcttcaatctcctcttgaacacagagccctagggtggctttagccctgtgcatcccctgctaagttagaattgccatcagcgtaagcacttcttcagaagcaagggctgactcatctctagggcaagcccagccctctgcagtgctttatctcaccctc

SEQ ID NO: 72972 - DNA, 600 bp, Chicken  19866894353660_2
acttgggccaattcccattaaatctatgaaaaaatagttttttcttcaatctcctcttgaacacagagccctagggtggctttagccctgtgcatcccctgctaagttagaattgccatcagcgtaagcacttcttcagaagcaagggctgactcatctctagggcaagcccagccctctgcagtgctttatctcaccctccagctctcagtcccaccataacctctgcacttaatgtgactgctgacatatgcagggttaatggggcaggtccaagataagagctggagtgacaactgkgygtaacagggcgctttcaccagatgagggaccacatcatacatttctttctaaaagacttggtcgtttttcagctgcagtgccgtcacagtcattacatcccacctggcatcccgctggatgggacattagtgtaaaacccaaaactggcttaggcttggcctaaggtaaacttgggacagacctgatgtgaagctgggactgaagctgggactcacctgctttgccaagtgggagttttacagcttttttttcctcctggtcccaggcagtcatggtagaactgttagaaatactttc

SEQ ID NO: 72973 - DNA, 600 bp, Chicken  19866894353660_3
ttgggccaattcccattaaatctatgaaaaaatagttttttcttcaatctcctcttgaacacagagccctagggtggctttagccctgtgcatcccctgctaagttagaattgccatcagcgtaagcacttcttcagaagcaagggctgactcatctctagggcaagcccagccctctgcagtgctttatctcaccctccagctctcagtcccaccataacctctgcacttaatgtgactgctgacatatgcagggttaatggggcaggtccaagataagagctggagtgacaactgkgygtaacagggcgctttcaccagatgagggaccacatcatacatttctttctaaaagacttggtcgtttttcagctgcagtgccgtcacagtcattacatcccacctggcatcccgctggatgggacattagtgtaaaacccaaaactggcttaggcttggcctaaggtaaacttgggacagacctgatgtgaagctgggactgaagctgggactcacctgctttgccaagtgggagttttacagcttttttttcctcctggtcccaggcagtcatggtagaactgttagaaatactttctg

SEQ ID NO: 72974 - DNA, 600 bp, Chicken  19866894353662_1
ccaccgatcaatcagacttcagtgttgtactttgagtggataaatggatggccaatgtttgttgtccagatgcacctttagtttccagaagaaaaaagaagaggaagaaaatgacataagcccaaaaacactttgacagacgtatagtcctctatcagttgtcttgtaggtatttctgaaagacactccaaacgtcattgacatccatatgctgttgtcttgctgccaggttagttcacctctgtcatttgagcctcatttggaaaactagtacttaagatgagtagctctactcacccrcatactccatggagtgtaacggagtgctttgcatgctccattatgcttgcccctcctgaaacaccacagtcagaaacaggagtgtaagattgtatcaccaacgttttgcactgtatctttgcaaatccctgttgtatagaagctgccgtttcttccacacttcatgctttagcaccagcgtcccaacgactgctggaatatgatcaaccacaaggctgtacatcttggtctggcgactcatgactttccacatcaatgttctgtccaacatctccttcctaccaactcgtatctgtctct

SEQ ID NO: 72975 - DNA, 600 bp, Chicken  19866894353663_1
tatctgctgctatatcacttaattgcaatactctcaattaacatatactacagtgaaaacaagaaaggatcatacacatctagaaaagtaagtggaatatttctgatagcatgcagcaaggagaagagggatataaatggcaagagtgcaatccttctgttaagaaaaggtcaagctgactatgatctgtcaaccgatttgtggttcacaactactgtcacagaatcattaaggttggaaaagatcattaagatcatctagtcgaactgccaacccatcactgtcacacctgctaagccrcatcctgtgttttagaatgaaaataattccagaaaacattattttgatcctagcttagctactcctgtgattgactgcatgtagctaaagggaaaggccaatagaagagcccaacactgattgtggacattatctaaaggaatgctctgaagctttgcaaagcccaattctggaagattaagaaggtcagggctatccaggcttattaaaagaaagtaattgtgtatttatctttgcaaagagaacatcttatcagatcttctacagcactagggttaatgaggcctcatcctgtgggca

SEQ ID NO: 72976 - DNA, 600 bp, Chicken  19866894353664_1
agcctgaactgaaaatttctgccttgcaaaaagtagggtctggctgaagaatattgaagaatttcagctgtgggattatgaagaattctcctttttctgaagatctagaggatcattttccttcattctgtgctgcactgtagtgactcatgtatccagtattctttattcatatttttttcatacaaaaatgattgtgtaattaactttacaacatctgggagtaaagaagaaagcctatatcaagacaaaagatcacaaatgggaaataataacgaacatgagatcatctttttatcrctgcagacagttattaatgttagactcaaagagatcattttctctagatttcttgctatactgttcctgattttcaatgacattctggcaatatattaagcattttcatgcacttaattctaaaataagctatgtttctcctcaatctctgactctttcctaatgtaaaataacagacttattcagtttacctcggtacagaacatctcagatgtaacccctggatgtactaactggcttgacataattctctggtggtgcgtaacaagggctgctcccccccccctccccgctcctact

SEQ ID NO: 72977 - DNA, 600 bp, Chicken  19866894353668_1
taatatcacagagcttacagcatgcataatgctttaaaaatcatgtatcaggaagtaacaaatacttgcatctaaatgccattttactgtaacttaaacaattttaaaagcatcttgatggtaactatataaaaataccaaactttctcactaagggcatttaacatatgataaaaattccatgggtgtaccattgcatctacatggagtacatacatacaagacagatgtcaagataagcatgcaccactttcttctctgctcttaaacagtctctcacccttattcaaattacatcarataggaaatatcacatttcgtctctacagtttaaacaactttcacatcccagtggatttaaataaacatgctagctagaaatgataaagtccacattaccaactcaattcaacagacttttaaaatctagcagtaaaactacaatttgaaaagtcacggtaaccatatagttcagaaatatacagaaaatacagagtatatagaaaatatacagaaattacaaaatataggccattttagcttatttacttttattttttaaatagttcttcactccttgggtcttggccaacagaagct

SEQ ID NO: 72978 - DNA, 600 bp, Chicken  19866894353668_2
atttaaataaacatgctagctagaaatgataaagtccacattaccaactcaattcaacagacttttaaaatctagcagtaaaactacaatttgaaaagtcacggtaaccatatagttcagaaatatacagaaaatacagagtatatagaaaatatacagaaattacaaaatataggccattttagcttatttacttttattttttaaatagttcttcactccttgggtcttggccaacagaagctataaaacccatggcacttctctttttttgttaacaaataggaaacaatgtcaaasctctctcagaaatggtcttctgtaaatatgtggcacacactgaatgcaaggaaagactgctgttggggacgacacaaccatttggcttgagaacatgactagcatctgtctttcagaaataaatccatcgccattcctatgctactgcaaactgccatgcctaatacaatggcactggacacgaggacatacgctacatccatatagctcacagtgtatgagaaatgcactggtgccttaccttttcttagttgtatactgagcctcttccctatctttttggtgttatacccgctgttt

SEQ ID NO: 72979 - DNA, 600 bp, Chicken  19866894353668_3
ccaaatgaatggcgtacgcatggcttggcgaaacatatgctgtgctctaggtttcaaaatgaacagaaaattagcaaattaggactggcagactacaagacattataagcataattactgatgttaattaagcaacatgagctgacagacacatagcagaaattcaggcataagtataaaacctgaatctgttcattagttttctttgtctgccttttgctaaggtttactgcctcggggtaacacaatggttaaatatgcttaaaaactagcattccaaatacttagaaaagaaaaaawtttaaccacaatcttgaaaggcagattgttctatggcaggattacagcgtacttttttgctttgaaccttgacaattgtttcttcagatacagtaatcgcagtgacgacagaattattggaatgaaaattacactttatacaaagactaggtcataaacagacattgggcattaggtcacgatgtgaaatacacaaagtcaaaaagtctcctcrggcttaaattttgattctgaatcttagagcatgtggagacaaggtgcttttcaccatgtggtaaaagggtcatgttccaataaagg

SEQ ID NO: 72980 - DNA, 600 bp, Chicken  19866894353668_4
ttttgctaaggtttactgcctcggggtaacacaatggttaaatatgcttaaaaactagcattccaaatacttagaaaagaaaaaawtttaaccacaatcttgaaaggcagattgttctatggcaggattacagcgtacttttttgctttgaaccttgacaattgtttcttcagatacagtaatcgcagtgacgacagaattattggaatgaaaattacactttatacaaagactaggtcataaacagacattgggcattaggtcacgatgtgaaatacacaaagtcaaaaagtctcctcrggcttaaattttgattctgaatcttagagcatgtggagacaaggtgcttttcaccatgtggtaaaagggtcatgttccaataaaggataaagatatgaagaaagcatttcagatgaatgttaaagtacaggacaatcagcctaaatgatattcttctggctctcaacatatgtaagctttcagaacaatattagcatcttkaaaattagacattttctgcatatctcttttctgctctctcttttaattatctgtgtgtgacacagaaactgatttcagtgttaaaagtctttctcattc

SEQ ID NO: 72981 - DNA, 515 bp, Chicken  19866894353668_5
attggaatgaaaattacactttatacaaagactaggtcataaacagacattgggcattaggtcacgatgtgaaatacacaaagtcaaaaagtctcctcrggcttaaattttgattctgaatcttagagcatgtggagacaaggtgcttttcaccatgtggtaaaagggtcatgttccaataaaggataaagatatgaagaaagcatttcagatgaatgttaaagtacaggacaatcagcctaaatgatattcttctggctctcaacatatgtaagctttcagaacaatattagcatcttkaaaattagacattttctgcatatctcttttctgctctctcttttaattatctgtgtgtgacacagaaactgatttcagtgttaaaagtctttctcattcaccatttcaggattctaccaacttcagacttccactacacaaaaatttatcatgccttaaacttctccagaaagtttctctatatagtcccttttagtttccacacagaaaactat

SEQ ID NO: 72982 - DNA, 600 bp, Chicken  19866894353678_1
caattggtctaaaggtggtctttttcactgtaatgtggtaaggtgctatgcagaatggactagctctgtgggcttctcatctctgcagtaatgcataaaaatactaacaaaaaatgccagagcagattaaaaaaatcaggtacctcctttacaaaaagcccacactgagcctcttaagatgaagatagtagagcactgagatgtacaattgcagttggcagggttttggactgggaatcgggactcccaggattcttattggtcattgcagttgtaggcagttatgtttcttcaattttkccttcattgttgcttgcgttattttttttaagattttttttagcttgcgtattacttttaatatacaagaatcatatgaagctcttgtcttgattacaaattctgagtgttacctttctgcaagtaaatgataatgattaaaaataaatatacacatagaaaaggaggggtgcagttaagagactgcttatatccaatgttcacattcaactatttcctaaaacttcagagtacaaaaatctatacagaaatctatcatgaagataaattcacaacctctttcaacttgtttcttcattc

SEQ ID NO: 72983 - DNA, 600 bp, Chicken  19866894353679_1
tttctcttacctcaatgagcgacccgtctgaccgtatgatgcggatgaccatcaccatagggatgcagatcatggaggaaagggcaagaacccatcccaggccgattgcccactcagggtatgtgtagaccttgttgtaggtcagtggtttgtacttggccaaagaaaagataaagcacccctgtgggagagaaatgagaattaaatgagtctcaaaaagggttcaaagcagcagggctctgatcctatcactggtcctaaggaagacaggcagcaagaagcagagtcaacacatatatrttttaaatgaatggggacattattcttccatttaaattataatagcatctacatctgctcataagtaaacctttgcttggtaatagastgttaagtgatggtgctgaacagctgtggtacatcgcctgtcctctttgtaagctcaaacacttgctgaacattgcaaggagyttacttggaatgtccttcccagcaaatgaaataatccacactgagtgtctgcctcagactggcagtcctgccctgggactcrtagttctattactcaaagtaacgctctttggagtgaactgtgtgtgt

SEQ ID NO: 72984 - DNA, 600 bp, Chicken  19866894353679_2
aacccatcccaggccgattgcccactcagggtatgtgtagaccttgttgtaggtcagtggtttgtacttggccaaagaaaagataaagcacccctgtgggagagaaatgagaattaaatgagtctcaaaaagggttcaaagcagcagggctctgatcctatcactggtcctaaggaagacaggcagcaagaagcagagtcaacacatatatrttttaaatgaatggggacattattcttccatttaaattataatagcatctacatctgctcataagtaaacctttgcttggtaatagastgttaagtgatggtgctgaacagctgtggtacatcgcctgtcctctttgtaagctcaaacacttgctgaacattgcaaggagyttacttggaatgtccttcccagcaaatgaaataatccacactgagtgtctgcctcagactggcagtcctgccctgggactcrtagttctattactcaaagtaacgctctttggagtgaactgtgtgtgtcacaaatgtaatacacaatttgcatgggcagtcacactaacagacaatgtctgagaagataccaagcctccagcagctctgtaaattg

SEQ ID NO: 72985 - DNA, 600 bp, Chicken  19866894353679_3
taaagcacccctgtgggagagaaatgagaattaaatgagtctcaaaaagggttcaaagcagcagggctctgatcctatcactggtcctaaggaagacaggcagcaagaagcagagtcaacacatatatrttttaaatgaatggggacattattcttccatttaaattataatagcatctacatctgctcataagtaaacctttgcttggtaatagastgttaagtgatggtgctgaacagctgtggtacatcgcctgtcctctttgtaagctcaaacacttgctgaacattgcaaggagyttacttggaatgtccttcccagcaaatgaaataatccacactgagtgtctgcctcagactggcagtcctgccctgggactcrtagttctattactcaaagtaacgctctttggagtgaactgtgtgtgtcacaaatgtaatacacaatttgcatgggcagtcacactaacagacaatgtctgagaagataccaagcctccagcagctctgtaaattggtctctcaacrytacagacttcacttaaagagaagcaatgggagggggcttaaagctgccccatcagcctaggatagcactca

SEQ ID NO: 72986 - DNA, 600 bp, Chicken  19866894353679_4
ggtcctaaggaagacaggcagcaagaagcagagtcaacacatatatrttttaaatgaatggggacattattcttccatttaaattataatagcatctacatctgctcataagtaaacctttgcttggtaatagastgttaagtgatggtgctgaacagctgtggtacatcgcctgtcctctttgtaagctcaaacacttgctgaacattgcaaggagyttacttggaatgtccttcccagcaaatgaaataatccacactgagtgtctgcctcagactggcagtcctgccctgggactcrtagttctattactcaaagtaacgctctttggagtgaactgtgtgtgtcacaaatgtaatacacaatttgcatgggcagtcacactaacagacaatgtctgagaagataccaagcctccagcagctctgtaaattggtctctcaacrytacagacttcacttaaagagaagcaatgggagggggcttaaagctgccccatcagcctaggatagcactcaccacacaaagaactggtgtgatcacaatccagctccatttcatccagggaccaggtctgtatccaatcatatcctcaatggc

SEQ ID NO: 72987 - DNA, 600 bp, Chicken  19866894353679_5
ggtgctgaacagctgtggtacatcgcctgtcctctttgtaagctcaaacacttgctgaacattgcaaggagyttacttggaatgtccttcccagcaaatgaaataatccacactgagtgtctgcctcagactggcagtcctgccctgggactcrtagttctattactcaaagtaacgctctttggagtgaactgtgtgtgtcacaaatgtaatacacaatttgcatgggcagtcacactaacagacaatgtctgagaagataccaagcctccagcagctctgtaaattggtctctcaacrytacagacttcacttaaagagaagcaatgggagggggcttaaagctgccccatcagcctaggatagcactcaccacacaaagaactggtgtgatcacaatccagctccatttcatccagggaccaggtctgtatccaatcatatcctcaatggcatcataaatattatcagcgcctgtattggacagtgagtatcttgatcagaactgaacaaataaaagccacgtaagaactgtagaattacagctgcctttcttggcccccagggggtattttaaaacaagggtgtcagatgtattgc

SEQ ID NO: 72988 - DNA, 600 bp, Chicken  19866894353679_6
gtgctgaacagctgtggtacatcgcctgtcctctttgtaagctcaaacacttgctgaacattgcaaggagyttacttggaatgtccttcccagcaaatgaaataatccacactgagtgtctgcctcagactggcagtcctgccctgggactcrtagttctattactcaaagtaacgctctttggagtgaactgtgtgtgtcacaaatgtaatacacaatttgcatgggcagtcacactaacagacaatgtctgagaagataccaagcctccagcagctctgtaaattggtctctcaacrytacagacttcacttaaagagaagcaatgggagggggcttaaagctgccccatcagcctaggatagcactcaccacacaaagaactggtgtgatcacaatccagctccatttcatccagggaccaggtctgtatccaatcatatcctcaatggcatcataaatattatcagcgcctgtattggacagtgagtatcttgatcagaactgaacaaataaaagccacgtaagaactgtagaattacagctgcctttcttggcccccagggggtattttaaaacaagggtgtcagatgtattgcc

SEQ ID NO: 72989 - DNA, 600 bp, Chicken  19866894353695_1
ataggaattgtgaagcccagtgaagaccttcaaatgctagcattaatcagtccattactattgggttaatgaatggagtgggaagagctgtgcacagcagagctgacatttcagagatgcagcagaggaagaaaatcaaatgcaaaaaaaaaggatagaacaacagtgacttaactaggaacattttcctatgaatacagcactagtaaattgaataactgataaagaacagatgcctgaaatctgtgtttttttctgtgatccaatgttcttgctgtattgctgttggaggaagagatraagttctttgaaggcaatayggaagtcttgcattttatttggtccacagaatatcatgtctgattctctcttccagaaaagcgtgactcttatccacatcagtcctttatttcttttcatcagcatgtgataaacatcactcccattacattttagtgaaggtagtagaaaagactaagtgcaagctagaaataattaggggtatcatcatactacagaaataggaaaggttgaaaaaacataatgagctttttcaattccaggtataaggtcttaggcaggatawagtttcccataatt

SEQ ID NO: 72990 - DNA, 600 bp, Chicken  19866894353695_2
tgaagaccttcaaatgctagcattaatcagtccattactattgggttaatgaatggagtgggaagagctgtgcacagcagagctgacatttcagagatgcagcagaggaagaaaatcaaatgcaaaaaaaaaggatagaacaacagtgacttaactaggaacattttcctatgaatacagcactagtaaattgaataactgataaagaacagatgcctgaaatctgtgtttttttctgtgatccaatgttcttgctgtattgctgttggaggaagagatraagttctttgaaggcaatayggaagtcttgcattttatttggtccacagaatatcatgtctgattctctcttccagaaaagcgtgactcttatccacatcagtcctttatttcttttcatcagcatgtgataaacatcactcccattacattttagtgaaggtagtagaaaagactaagtgcaagctagaaataattaggggtatcatcatactacagaaataggaaaggttgaaaaaacataatgagctttttcaattccaggtataaggtcttaggcaggatawagtttcccataattcccaaatctattagcgataa

SEQ ID NO: 72991 - DNA, 600 bp, Chicken  19866894353695_3
tggaggaagagatraagttctttgaaggcaatayggaagtcttgcattttatttggtccacagaatatcatgtctgattctctcttccagaaaagcgtgactcttatccacatcagtcctttatttcttttcatcagcatgtgataaacatcactcccattacattttagtgaaggtagtagaaaagactaagtgcaagctagaaataattaggggtatcatcatactacagaaataggaaaggttgaaaaaacataatgagctttttcaattccaggtataaggtcttaggcaggatawagtttcccataattcccaaatctattagcgataaaatatcctcagcaaaattaaagcatgaaataaaggtggttgtacttaatccaatagtagatgtcccatggaaaagtttgcatttaagtatgaaacaaaacatctttgggtgttttggtatactgctagctgaaaatacttccaagttcacttgcatctaatgtcaactcagcaagaagcatggaatatttactttccttcacaactcgctgagcagatgaataaagataaatgccaaatggagaggaaaatggtaaacatgcaact

SEQ ID NO: 72992 - DNA, 600 bp, Chicken  19866894353700_1
gaacggatataagggcgcaggtcatctgacttgcccctcttctcgtcttgccatgttccctgtcagatcggctcgctactgctgctcctgactgcacgcaaggcttcagtattagcataaggcctttggctctcggacaatctttctctcaattattgttaatttatatcgtattatagtgtgttatcttacattccgatactatatttagtaaattagtttgtttctcctcagatcgttgccactgtttttaattattttagggttccctgtttcccttcctggaggcgcggattttgygaaatccctcagccccactagttgtggaactgggccggaccagcccttaaaccgttaacactatccgttcctcaggaaggttgttttttaaaataatagacaaggagatgtactttttgaattgcccttattagttcctgggaagtttactattctgataccagccctagccaaactatacatgtgctctaagcatatgacattgctattcaagtcaagtatattttctgctcacataaaagtatcaacagttaaaaataattctttaagttaaattctttaattttaatttaattaatt

SEQ ID NO: 72993 - DNA, 600 bp, Chicken  19866894353706_1
agtttcttggcctcttatcctccaaattctaaaattccattcagatttcagaaagaaatcttgaattctgacagttcacatgttctgtcttccattggctttcccttgaattttcaagacctcttttaagctacctctcacaaacattcactccacatgatacacttttaaaaacattaagctttgaaatctgttatcactattcacttgcaatttctttttcaatcataaatcaatctaatgtctactgtacttcccatgcatctgtgcaggttacttaaaaatgtatgtaagcttatytgtgatcttcctacagctctttcccccaaaactctgatgtgatttttgtggggagtgtacagttaacaaatatacagttagaagagtggtgtgattaggctggtattttacagatttatagttagaaagattatcgtggtggaaagagactatcaaaaataaatgaaatgctcacctgtctcctaggctcacagcagaaaactgcaaagggggcaattgccagaaaaagatcctttcccsgtggcaatcagcccttaaacgggatctaggagaggtggagccaggctccaccccttctgg

SEQ ID NO: 72994 - DNA, 600 bp, Chicken  19866894353706_2
atgtctactgtacttcccatgcatctgtgcaggttacttaaaaatgtatgtaagcttatytgtgatcttcctacagctctttcccccaaaactctgatgtgatttttgtggggagtgtacagttaacaaatatacagttagaagagtggtgtgattaggctggtattttacagatttatagttagaaagattatcgtggtggaaagagactatcaaaaataaatgaaatgctcacctgtctcctaggctcacagcagaaaactgcaaagggggcaattgccagaaaaagatcctttcccsgtggcaatcagcccttaaacgggatctaggagaggtggagccaggctccaccccttctggtcacacaggtgaattgccttcacctgttcttccatggctgactcagtgcttgcctcaggtggtcaatcagtggttctgaactcaacagttcctatacagagggaaaaaaggaaggaaagaaaaaccatgagaaacagaaaagaacaaatatccttgaaatagatatttggtgcctttatctaatatcttctatcttctcttttcttaactttttttttttgtattggactcttatgcttg

SEQ ID NO: 72995 - DNA, 599 bp, Chicken  19866894353707_1
  misc_feature (1)..(126): n is any nucleotide
nnnnnnnnnnnnnnnnnnnnnnnnnnnnnnnnnnnnnnnnnnnnnnnnnnnnnnnnnnnnnnnnnnnnnnnnnnnnnnnnnnnnnnnnnnnnnnnnnnnnnnnnnnnnnnnnnnnnnnnnnnnnnngttttgttgcattatatagtagtatgttatagaaatgatcttgcttaactatttttacgagcagtgccagatactaacatgtcagttctttaccacctcaaaaagcaccagagctgcctctgcccaccttgcccccctgatgtgttcaggaaacacaagcatccctgcaggtcygcatcctactcaggtgctcctaggytcctgatctttcttcacatagcaactgtcrttcttgattgtgagtttatcccctcagcagagagattcacacaaagaccttagaaaaatatgttgtcayaatgtttaattgttttcctgagaagtcatggtgttctcaacagatcaaccccaccaaactgcacgttcttggatccatgaaagaaaacttcctatcagataacagcagtgagaaatagttcattacctgagcacattaaaaaaaactgcttaaacttggaagcatctttaagagg

SEQ ID NO: 72996 - DNA, 599 bp, Chicken  19866894353707_2
  misc_feature (1)..(101): n is any nucleotide
nnnnnnnnnnnnnnnnnnnnnnnnnnnnnnnnnnnnnnnnnnnnnnnnnnnnnnnnnnnnnnnnnnnnnnnnnnnnnnnnnnnnnnnnnnnnnnnnnnnnngttttgttgcattatatagtagtatgttatagaaatgatcttgcttaactatttttacgagcagtgccagatactaacatgtcagttctttaccacctcaaaaagcaccagagctgcctctgcccaccttgcccccctgatgtgttcaggaaacacaagcatccctgcaggtcygcatcctactcaggtgctcctaggytcctgatctttcttcacatagcaactgtcrttcttgattgtgagtttatcccctcagcagagagattcacacaaagaccttagaaaaatatgttgtcayaatgtttaattgttttcctgagaagtcatggtgttctcaacagatcaaccccaccaaactgcacgttcttggatccatgaaagaaaacttcctatcagataacagcagtgagaaatagttcattacctgagcacattaaaaaaaactgcttaaacttggaagcatctttaagaggcttaattaacataaactggcatrca

SEQ ID NO: 72997 - DNA, 599 bp, Chicken  19866894353707_3
  misc_feature (1)..(71): n is any nucleotide
nnnnnnnnnnnnnnnnnnnnnnnnnnnnnnnnnnnnnnnnnnnnnnnnnnnnnnnnnnnnnnnnnnnnnnngttttgttgcattatatagtagtatgttatagaaatgatcttgcttaactatttttacgagcagtgccagatactaacatgtcagttctttaccacctcaaaaagcaccagagctgcctctgcccaccttgcccccctgatgtgttcaggaaacacaagcatccctgcaggtcygcatcctactcaggtgctcctaggytcctgatctttcttcacatagcaactgtcrttcttgattgtgagtttatcccctcagcagagagattcacacaaagaccttagaaaaatatgttgtcayaatgtttaattgttttcctgagaagtcatggtgttctcaacagatcaaccccaccaaactgcacgttcttggatccatgaaagaaaacttcctatcagataacagcagtgagaaatagttcattacctgagcacattaaaaaaaactgcttaaacttggaagcatctttaagaggcttaattaacataaactggcatrcatacaggtggagatactttctaagcctctag

SEQ ID NO: 72998 - DNA, 599 bp, Chicken  19866894353707_4
  misc_feature (1)..(2): n is any nucleotide
nngttttgttgcattatatagtagtatgttatagaaatgatcttgcttaactatttttacgagcagtgccagatactaacatgtcagttctttaccacctcaaaaagcaccagagctgcctctgcccaccttgcccccctgatgtgttcaggaaacacaagcatccctgcaggtcygcatcctactcaggtgctcctaggytcctgatctttcttcacatagcaactgtcrttcttgattgtgagtttatcccctcagcagagagattcacacaaagaccttagaaaaatatgttgtcayaatgtttaattgttttcctgagaagtcatggtgttctcaacagatcaaccccaccaaactgcacgttcttggatccatgaaagaaaacttcctatcagataacagcagtgagaaatagttcattacctgagcacattaaaaaaaactgcttaaacttggaagcatctttaagaggcttaattaacataaactggcatrcatacaggtggagatactttctaagcctctagtaatagggagtatttcaggcagtgttacactccaccagcttctgttgtagraaatgtaagaatatgaca

SEQ ID NO: 72999 - DNA, 600 bp, Chicken  19866894353707_5
ggytcctgatctttcttcacatagcaactgtcrttcttgattgtgagtttatcccctcagcagagagattcacacaaagaccttagaaaaatatgttgtcayaatgtttaattgttttcctgagaagtcatggtgttctcaacagatcaaccccaccaaactgcacgttcttggatccatgaaagaaaacttcctatcagataacagcagtgagaaatagttcattacctgagcacattaaaaaaaactgcttaaacttggaagcatctttaagaggcttaattaacataaactggcatrcatacaggtggagatactttctaagcctctagtaatagggagtatttcaggcagtgttacactccaccagcttctgttgtagraaatgtaagaatatgacacttgaattacgctgaattgtgctccagggttaaggctgtcttcaggcatctttaaattgcacacccggtacttatacagccaataagccaaactgacactgaccttgacaagattatggggacagtctttacataacgatgagctggtcttgctcatcattgacttcaggcttaatcatttggggagaaagacagaact

SEQ ID NO: 73000 - DNA, 600 bp, Chicken  19866894353707_6
tagaaaaatatgttgtcayaatgtttaattgttttcctgagaagtcatggtgttctcaacagatcaaccccaccaaactgcacgttcttggatccatgaaagaaaacttcctatcagataacagcagtgagaaatagttcattacctgagcacattaaaaaaaactgcttaaacttggaagcatctttaagaggcttaattaacataaactggcatrcatacaggtggagatactttctaagcctctagtaatagggagtatttcaggcagtgttacactccaccagcttctgttgtagraaatgtaagaatatgacacttgaattacgctgaattgtgctccagggttaaggctgtcttcaggcatctttaaattgcacacccggtacttatacagccaataagccaaactgacactgaccttgacaagattatggggacagtctttacataacgatgagctggtcttgctcatcattgacttcaggcttaatcatttggggagaaagacagaactgcacaggttttgctttactatcagacacatgaactttgtgccaactccttcccatttaagatacagtgaagataatacaaagt

SEQ ID NO: 73001 - DNA, 600 bp, Chicken  19866894353707_7
tgctccagggttaaggctgtcttcaggcatctttaaattgcacacccggtacttatacagccaataagccaaactgacactgaccttgacaagattatggggacagtctttacataacgatgagctggtcttgctcatcattgacttcaggcttaatcatttggggagaaagacagaactgcacaggttttgctttactatcagacacatgaactttgtgccaactccttcccatttaagatacagtgaagataatacaaagtttggaacactgacttccttgaattcagaaccttttcytccttgctcgtgtcaacttcattttccacccatgccaaagggcagaagactgggatttgctatgatccgagtacttggaaatgagttggcaaccagcagcttgcaggtatatttccagaactttcatgcccttctgactaatgtttcatttaaattttacttaatataatcacaggtttttactacttaaaatattctgtaaatgcctgaagtgtcacgctagattagtacatttgcttatactcctcagcaccaatcacagagctaacatacagcttacagtaattatatgagctgagc

SEQ ID NO: 73002 - DNA, 600 bp, Chicken  19866894353709_1
ctgttcctacagcaccatctgcatcctgaaggcgtgacagcctccttcatctgctggcacaaaatgtcagttgtcacattttacttcttggttttttgctgcattctccaccgttgcattgtcagcggggagctgcaggtcttccttgctgccagatttgctctggaatcgtagctggatgcagagcttaggaagtgaaatggtggctgttgtttttatcgcctttgctagcggatagcaggtaatgcagtgaaaaataaggggtagatttatttgtaataaagaggacatttgaaagcrttgcagagtgaaggaaaaygcatagcagtggctgcatttatcagttcagtggaattggcaatgtcccattaggtggattttcttttgcttgattatcttagccagcagtccctgtccctggaacacccgctaatccgcttatcgaccacagtttgtttttctttctcccctgcatggaggaagaggagtggcagccttacttatttatttattactggcatctgagcctttgaatagggcgttccccagggctcctggccggtgtcagccctcctttcagatggtgctgctggcagataa

SEQ ID NO: 73003 - DNA, 600 bp, Chicken  19866894353709_2
tgcatcctgaaggcgtgacagcctccttcatctgctggcacaaaatgtcagttgtcacattttacttcttggttttttgctgcattctccaccgttgcattgtcagcggggagctgcaggtcttccttgctgccagatttgctctggaatcgtagctggatgcagagcttaggaagtgaaatggtggctgttgtttttatcgcctttgctagcggatagcaggtaatgcagtgaaaaataaggggtagatttatttgtaataaagaggacatttgaaagcrttgcagagtgaaggaaaaygcatagcagtggctgcatttatcagttcagtggaattggcaatgtcccattaggtggattttcttttgcttgattatcttagccagcagtccctgtccctggaacacccgctaatccgcttatcgaccacagtttgtttttctttctcccctgcatggaggaagaggagtggcagccttacttatttatttattactggcatctgagcctttgaatagggcgttccccagggctcctggccggtgtcagccctcctttcagatggtgctgctggcagataacctctgacagcctccgtgc

SEQ ID NO: 73004 - DNA, 533 bp, Chicken  19866894353709_3
ctggccggtgtcagccctcctttcagatggtgctgctggcagataacctctgacagcctccgtgcaaatgaatgggaatgtaccagggcaaagacagcgcggacacccaaatggtgctgttgtctttgcagggtgatgtgtcctcctgggctcgtgtctgaactgggggctgctgagttctgcgtgtggaatctgagggggcttcaaatggggctcagatgccaactgaaaaaaaaaagcaaatgaatccattctaatttgatctctgttccaatgataaactgcttgtgctgtgtcccygggaccttcaggggtggaaagtttcttttttatcacttgacctttgggtgtaatcgaatctcaggcaatgcaggctcgatgctgcttttggttttctttttaatagcctttggttttagtggccctcttcccaagctatcctggatgcttctgttcctgtttagggtaaagaaaaggacgtgccgacttgtgtcaggattgcgccttttgtgtcgctgttgtttttgtgtggt

SEQ ID NO: 73005 - DNA, 600 bp, Chicken  19866894353717_1
agtacacatctgaagaagatctgcttggtcatttaaggttttttacatgtattttcagacaagcccagctgcgcttctaacagtagctaaaaaatacagaatttaagtagggaaaatttgctgtgacgcttcatgttttagtcaacagccttccaagatgtaaaccttcggttgctctggaaactgtaacttggacacaaccatgtctatacatcaaccccctggctagaaacgaaaacacgtcagcaacaccacaacgctcgggtgacaaagacttaacagcgagcattacgtcctaaygctcacctgaggaggctgcgtcccacggaagagctcaggggtggcagggacctaccatcctcaccgtgacccatcagatgaaggggatgggaaygcaygtgcttgcttgcaggatgagccgggggttcaaacacagggggtctgcttgtgttcgtgctgtgccagtggcacctgagctggaagcgagggctcctaccaaaaggagggctcggagggacagggctggggcacagcgccttcagctgccggaggtgggaagggagagagggggatgctccaaagaggagcaggaggaagcgc

SEQ ID NO: 73006 - DNA, 600 bp, Chicken  19866894353717_2
tacagaatttaagtagggaaaatttgctgtgacgcttcatgttttagtcaacagccttccaagatgtaaaccttcggttgctctggaaactgtaacttggacacaaccatgtctatacatcaaccccctggctagaaacgaaaacacgtcagcaacaccacaacgctcgggtgacaaagacttaacagcgagcattacgtcctaaygctcacctgaggaggctgcgtcccacggaagagctcaggggtggcagggacctaccatcctcaccgtgacccatcagatgaaggggatgggaaygcaygtgcttgcttgcaggatgagccgggggttcaaacacagggggtctgcttgtgttcgtgctgtgccagtggcacctgagctggaagcgagggctcctaccaaaaggagggctcggagggacagggctggggcacagcgccttcagctgccggaggtgggaagggagagagggggatgctccaaagaggagcaggaggaagcgccgggcgctcgtggatgagggtccgacacagcacaacacgggaagccagataaagagaaaaaggatgggaggggggatagatagataaataaata

SEQ ID NO: 73007 - DNA, 600 bp, Chicken  19866894353717_3
gaatttaagtagggaaaatttgctgtgacgcttcatgttttagtcaacagccttccaagatgtaaaccttcggttgctctggaaactgtaacttggacacaaccatgtctatacatcaaccccctggctagaaacgaaaacacgtcagcaacaccacaacgctcgggtgacaaagacttaacagcgagcattacgtcctaaygctcacctgaggaggctgcgtcccacggaagagctcaggggtggcagggacctaccatcctcaccgtgacccatcagatgaaggggatgggaaygcaygtgcttgcttgcaggatgagccgggggttcaaacacagggggtctgcttgtgttcgtgctgtgccagtggcacctgagctggaagcgagggctcctaccaaaaggagggctcggagggacagggctggggcacagcgccttcagctgccggaggtgggaagggagagagggggatgctccaaagaggagcaggaggaagcgccgggcgctcgtggatgagggtccgacacagcacaacacgggaagccagataaagagaaaaaggatgggaggggggatagatagataaataaataaata

SEQ ID NO: 73008 - DNA, 600 bp, Chicken  19866894353718_1
gagtgtatttctgtcatctaatatgaaaaatcttccttattagggcatataactttatgggtttcacagagtttctctatttctatcaatggaaacacttacaatctcatacatataaatatgatagggcatgttatttgctcaagagaaaaacaaatacactttcaaagggtgagaactatgtgaatgtagacagccttttgaaaagtcagcaggattggctggctctgattctcctggaaacagtgatgacaaaacccaggagtctgggaatcttctttttgtggaaaacttcgcttyctattctgttctgatattgttgacagaaaaaatgttaaagggaacaatgccagtttccttgtaatgcaacatgaagyatgtcacttttgcattctgaaaagttttacatgaaagtcccatttatgatgaagcagtaatctgaaatagtgcaacaaaagcactattttagtgctttttgtatatcacacagtgatatacaataaaccatttcacaaatccaaataagcagaggaaaagaatttgaggggtgttagctggcagctggttgaataaaagccattagtgtgcctagatggctaa

SEQ ID NO: 73009 - DNA, 600 bp, Chicken  19866894353718_2
tatttctatcaatggaaacacttacaatctcatacatataaatatgatagggcatgttatttgctcaagagaaaaacaaatacactttcaaagggtgagaactatgtgaatgtagacagccttttgaaaagtcagcaggattggctggctctgattctcctggaaacagtgatgacaaaacccaggagtctgggaatcttctttttgtggaaaacttcgcttyctattctgttctgatattgttgacagaaaaaatgttaaagggaacaatgccagtttccttgtaatgcaacatgaagyatgtcacttttgcattctgaaaagttttacatgaaagtcccatttatgatgaagcagtaatctgaaatagtgcaacaaaagcactattttagtgctttttgtatatcacacagtgatatacaataaaccatttcacaaatccaaataagcagaggaaaagaatttgaggggtgttagctggcagctggttgaataaaagccattagtgtgcctagatggctaagaaggccagtgacatcctcgcttgtatcagaaatagcattgctagtaggagcagggaggtgatcatctgtacttggc

SEQ ID NO: 73010 - DNA, 599 bp, Chicken  19866894353732_1
  misc_feature (1)..(97): n is any nucleotide
nnnnnnnnnnnnnnnnnnnnnnnnnnnnnnnnnnnnnnnnnnnnnnnnnnnnnnnnnnnnnnnnnnnnnnnnnnnnnnnnnnnnnnnnnnnnnnnnnctggcactgggagcagtgtgctgcagccaggctggggtgctgcagcgtttgcctacagcatcttcaggtgggttgagagcggaggtcctgtgcagtcaggatgtgcctggtgcaggacaggctgtgggcacagcactgcagcaggggagggctgctggcctacgatggagttgagtcacccatgtgcgtgagaaggacctgaygtgtaggatctgttccctcctccctcccrtttccttttcatccatttatgcagccttgaagctcccccagtcagtgcctgagtgaacaggcacactgtgcattccccagcttctaaccctcgtgcgctgctgattcagagccctgggatccagcagcagctgtgagcccctgcggggccctgctgagagctgctaggctctctctgccccagctcccccttaacaggtgggtagtgagccaaagggatgtcctctgcccctccaagccatctctttgyacggctgcatgccctcacacc

SEQ ID NO: 73011 - DNA, 599 bp, Chicken  19866894353732_2
  misc_feature (1)..(68): n is any nucleotide
nnnnnnnnnnnnnnnnnnnnnnnnnnnnnnnnnnnnnnnnnnnnnnnnnnnnnnnnnnnnnnnnnnnnctggcactgggagcagtgtgctgcagccaggctggggtgctgcagcgtttgcctacagcatcttcaggtgggttgagagcggaggtcctgtgcagtcaggatgtgcctggtgcaggacaggctgtgggcacagcactgcagcaggggagggctgctggcctacgatggagttgagtcacccatgtgcgtgagaaggacctgaygtgtaggatctgttccctcctccctcccrtttccttttcatccatttatgcagccttgaagctcccccagtcagtgcctgagtgaacaggcacactgtgcattccccagcttctaaccctcgtgcgctgctgattcagagccctgggatccagcagcagctgtgagcccctgcggggccctgctgagagctgctaggctctctctgccccagctcccccttaacaggtgggtagtgagccaaagggatgtcctctgcccctccaagccatctctttgyacggctgcatgccctcacaccaccaccacgcagtcaggtgagttggtccg

SEQ ID NO: 73012 - DNA, 527 bp, Chicken  19866894353732_3
atgtgcgtgagaaggacctgaygtgtaggatctgttccctcctccctcccrtttccttttcatccatttatgcagccttgaagctcccccagtcagtgcctgagtgaacaggcacactgtgcattccccagcttctaaccctcgtgcgctgctgattcagagccctgggatccagcagcagctgtgagcccctgcggggccctgctgagagctgctaggctctctctgccccagctcccccttaacaggtgggtagtgagccaaagggatgtcctctgcccctccaagccatctctttgyacggctgcatgccctcacaccaccaccacgcagtcaggtgagttggtccggatggcatcagagatcatcttggctcctgactggccaatacggttcccctgcaggctgggagcaggraggaagaacggttcaggatccccactgggtatgagagaagctccccagccctgcaccagcctcaccatccagctgagtgctcaccgccacttacttgacgtaggtgaggc

SEQ ID NO: 73013 - DNA, 410 bp, Chicken  19866894353732_4
tgtgcattccccagcttctaaccctcgtgcgctgctgattcagagccctgggatccagcagcagctgtgagcccctgcggggccctgctgagagctgctaggctctctctgccccagctcccccttaacaggtgggtagtgagccaaagggatgtcctctgcccctccaagccatctctttgyacggctgcatgccctcacaccaccaccacgcagtcaggtgagttggtccggatggcatcagagatcatcttggctcctgactggccaatacggttcccctgcaggctgggagcaggraggaagaacggttcaggatccccactgggtatgagagaagctccccagccctgcaccagcctcaccatccagctgagtgctcaccgccacttacttgacgtaggtgaggc

SEQ ID NO: 73014 - DNA, 600 bp, Chicken  19866894353733_1
caccaacaaactatactggactgatgcaggtactgggctcctctgctttactggagtttcagccttcattatgagtaacgaaaactgagtaacagctgaatggttctttgtctcatcacaaatttgcctatttctgtctaacaaaaaaacccacatgagatcaaactcccttaaacgaaggggaggttgaagtggaatcattagttaacctctgtagtgttcctggtgctaattctttagaaagacttatagcagaagtcaagttccactgctctcttgctgcagagcttgtatctgtgygtgtccacatcatatcttccaacagtgtatcttgtggygcagaaggtaggatttgaaggttgttccctgtgggagtacgagtttgaagagatgtaagaaaggtgattcttctccagctgttgtcttatctctatattgtatagatactttggtagcttagggaagtgctggcttgcactgccacagaacttggcaccagtcacagccacacaggtgacaggggtgatactttgagccacatttcttatttatcttccagacaggaaaagagatgggggatggagaagaaagcattgctgt

SEQ ID NO: 73015 - DNA, 600 bp, Chicken  19866894353733_2
tcctctgctttactggagtttcagccttcattatgagtaacgaaaactgagtaacagctgaatggttctttgtctcatcacaaatttgcctatttctgtctaacaaaaaaacccacatgagatcaaactcccttaaacgaaggggaggttgaagtggaatcattagttaacctctgtagtgttcctggtgctaattctttagaaagacttatagcagaagtcaagttccactgctctcttgctgcagagcttgtatctgtgygtgtccacatcatatcttccaacagtgtatcttgtggygcagaaggtaggatttgaaggttgttccctgtgggagtacgagtttgaagagatgtaagaaaggtgattcttctccagctgttgtcttatctctatattgtatagatactttggtagcttagggaagtgctggcttgcactgccacagaacttggcaccagtcacagccacacaggtgacaggggtgatactttgagccacatttcttatttatcttccagacaggaaaagagatgggggatggagaagaaagcattgctgtatggatagcgtttaccttatctgttgttattccagagg

SEQ ID NO: 73016 - DNA, 600 bp, Chicken  19866894353735_1
ttctgactccctttccagggtgaagtcctggccccagtgtagctggtggcagttttgctattcacttctgtagggctaggatttcacctctgtgtgttatgaaggcctttgcagtgatggagatcctgccagggcatctgccgagcattccggcagagctccacagctttgtacaacaaactggcagtttttccccatttgctgcattccctccaaatgcatattttgcagagatgagaagcagcgaggcctgaggggagctgttagtacagagcatctcctgggctgccacttttggtycttcctgcacaaaaagccataccaggtattagctttattacacttgccaggttccagctccaatcagcagggtttcctgtttctccccttggaaggctatgagcattattctgctgatacgtaggagcctttatgttgtttgtagctgaatatcctcaattatgcatggatgaacaagcctttggctgaaattgatcttctgacgtttggcaatcagccctctaatgtattaagagatagaaatcagtttcagtcttatttgcaatcatcagttttccagatgagccttcatctgtgttt

SEQ ID NO: 73017 - DNA, 600 bp, Chicken  19866894353737_1
agaacttgaagatattaaatgtgtgatcttggaattgagggctatggaaatagaattatattaacagtagttttatttcaaatgaggtcttgatttgctaaaactgataatgccacaagaggtgatctgatggtcttcctcaatttgtttctcagagagcattctgctgtgagggaaaactttctgtgatgccattatcttctgctgcacaagaccttgcagaaaacaagagtcgcacagaacttcagctaatagatgctcttagcatctatttctcatctgatcattcctaaaccaaarttgacacaagagataaaaagcaatggtaaccaaaacaaagggatggcccttgaccttgttgacccaattctactccaaaatgcttayttttgtttcatttaagaaataactatgtttgaaaattcacctgtattttgttacaactgcttcctcactgggaagctaagcagaacaggcttacattacattacagtacattttctacccactggcagaatgggcctgttttctcttgcctctaaaaaaacacaggatgtgactcttccatctgcaaatgaatagcagaagtaacgagtgagt

SEQ ID NO: 73018 - DNA, 600 bp, Chicken  19866894353737_2
tcttgatttgctaaaactgataatgccacaagaggtgatctgatggtcttcctcaatttgtttctcagagagcattctgctgtgagggaaaactttctgtgatgccattatcttctgctgcacaagaccttgcagaaaacaagagtcgcacagaacttcagctaatagatgctcttagcatctatttctcatctgatcattcctaaaccaaarttgacacaagagataaaaagcaatggtaaccaaaacaaagggatggcccttgaccttgttgacccaattctactccaaaatgcttayttttgtttcatttaagaaataactatgtttgaaaattcacctgtattttgttacaactgcttcctcactgggaagctaagcagaacaggcttacattacattacagtacattttctacccactggcagaatgggcctgttttctcttgcctctaaaaaaacacaggatgtgactcttccatctgcaaatgaatagcagaagtaacgagtgagtttagtcaagctaaacagtaaggaaaatgagaactgcatcctaaatgtcagcacattccccctagacwtttagtactgcttggcactt

SEQ ID NO: 73019 - DNA, 600 bp, Chicken  19866894353737_3
ttctactccaaaatgcttayttttgtttcatttaagaaataactatgtttgaaaattcacctgtattttgttacaactgcttcctcactgggaagctaagcagaacaggcttacattacattacagtacattttctacccactggcagaatgggcctgttttctcttgcctctaaaaaaacacaggatgtgactcttccatctgcaaatgaatagcagaagtaacgagtgagtttagtcaagctaaacagtaaggaaaatgagaactgcatcctaaatgtcagcacattccccctagacwtttagtactgcttggcacttcartagcactttttataggaggactcaaaaggccagtccttagttcaatcttataatacccttttaaggttggtaaaatgcccagataaaggaactcgagtacagaaaagttaaatgatttactaacagtaacatacagtagcagaaaccaaaggtgcaaatgcccagacctgcactgtaaatataacaagcaataagcaaattctgaacattgttagtagatttgtggacttattctttaatagaatacattgaatatgcatcctttgagccttaaatg

SEQ ID NO: 73020 - DNA, 600 bp, Chicken  19866894353737_4
tgtttcatttaagaaataactatgtttgaaaattcacctgtattttgttacaactgcttcctcactgggaagctaagcagaacaggcttacattacattacagtacattttctacccactggcagaatgggcctgttttctcttgcctctaaaaaaacacaggatgtgactcttccatctgcaaatgaatagcagaagtaacgagtgagtttagtcaagctaaacagtaaggaaaatgagaactgcatcctaaatgtcagcacattccccctagacwtttagtactgcttggcacttcartagcactttttataggaggactcaaaaggccagtccttagttcaatcttataatacccttttaaggttggtaaaatgcccagataaaggaactcgagtacagaaaagttaaatgatttactaacagtaacatacagtagcagaaaccaaaggtgcaaatgcccagacctgcactgtaaatataacaagcaataagcaaattctgaacattgttagtagatttgtggacttattctttaatagaatacattgaatatgcatcctttgagccttaaatgctcagtaaatcaaactgagttaa

SEQ ID NO: 73021 - DNA, 599 bp, Chicken  19866894353738_1
  misc_feature (1)..(244): n is any nucleotide
nnnnnnnnnnnnnnnnnnnnnnnnnnnnnnnnnnnnnnnnnnnnnnnnnnnnnnnnnnnnnnnnnnnnnnnnnnnnnnnnnnnnnnnnnnnnnnnnnnnnnnnnnnnnnnnnnnnnnnnnnnnnnnnnnnnnnnnnnnnnnnnnnnnnnnnnnnnnnnnnnnnnnnnnnnnnnnnnnnnnnnnnnnnnnnnnnnnnnnnnnnnnnnnnnnnnnnnnnnnnnnnnnnnnnnnnnnnnnnnnnnnntacatagatcactttttctaaagcatctcgagtgttctgagttggatagctcacakttcttaattaaaattagaacataaattaatattctaagacactacatccacttgcccagaaacatacttggttcttctacrtaataaccaacgtaatccaaatatctgctttatcttaaaaagttttttaaagacttagtattaaaatagccattttcaataaactgaccttgcattttcacaaagtcattagctgacttcatttatataaatgcagtgaakcccttactgtagtctaataacagcaaccggaatagatacatctgaaaaggtgatgcaccaactctgtttgttggatc

SEQ ID NO: 73022 - DNA, 599 bp, Chicken  19866894353738_2
  misc_feature (1)..(163): n is any nucleotide
nnnnnnnnnnnnnnnnnnnnnnnnnnnnnnnnnnnnnnnnnnnnnnnnnnnnnnnnnnnnnnnnnnnnnnnnnnnnnnnnnnnnnnnnnnnnnnnnnnnnnnnnnnnnnnnnnnnnnnnnnnnnnnnnnnnnnnnnnnnnnnnnnnnnnnnnnnnnnnnnnnntacatagatcactttttctaaagcatctcgagtgttctgagttggatagctcacakttcttaattaaaattagaacataaattaatattctaagacactacatccacttgcccagaaacatacttggttcttctacrtaataaccaacgtaatccaaatatctgctttatcttaaaaagttttttaaagacttagtattaaaatagccattttcaataaactgaccttgcattttcacaaagtcattagctgacttcatttatataaatgcagtgaakcccttactgtagtctaataacagcaaccggaatagatacatctgaaaaggtgatgcaccaactctgtttgttggatcactatgacaaatgagccaggtagtcacgtaatgaccttttagaacatttgttttggagccaatgaattatttacttgaaat

SEQ ID NO: 73023 - DNA, 599 bp, Chicken  19866894353738_3
  misc_feature (1)..(22): n is any nucleotide
nnnnnnnnnnnnnnnnnnnnnntacatagatcactttttctaaagcatctcgagtgttctgagttggatagctcacakttcttaattaaaattagaacataaattaatattctaagacactacatccacttgcccagaaacatacttggttcttctacrtaataaccaacgtaatccaaatatctgctttatcttaaaaagttttttaaagacttagtattaaaatagccattttcaataaactgaccttgcattttcacaaagtcattagctgacttcatttatataaatgcagtgaakcccttactgtagtctaataacagcaaccggaatagatacatctgaaaaggtgatgcaccaactctgtttgttggatcactatgacaaatgagccaggtagtcacgtaatgaccttttagaacatttgttttggagccaatgaattatttacttgaaatcctcaacatgtttgtgttccctcctcgttctaaaaataacaaaatggagtatagagaagaaaaacaaagaatggcgattttcaatactctgaatgtaccaatccagtcccttgcaaggactatctaaagctgtgtgcttat

SEQ ID NO: 73024 - DNA, 533 bp, Chicken  19866894353740_1
gtgcgaaaaggagaagagctgcccttggtatttgttagcagagcatacagccaacgcgctgtgtttgttggaacagctgggaatggttgttgatgtgttcatccccaggaagaggtacgtccccaggacacagtatctgtcattggaggagtggcaggaggcagcaagcaggggagaaaagcagcctggaagtttgtacgggacaactgggaggaactttataaccgataccagggcggattcttgatatccagactaataaaggtgcgtgtggctctgaggatggctctgtttgtgtgsagggcccaaagtgagtggtgttggaaatgctgactgcttacctttggttatctgtttgtttttttctgcagctaacagtggatgggttcgccaacgataaaatggcagcagaagtcaaggtaagaaatatgatttatggaggtaattcatttgtgatagacgtgggctgccctgagctgtaagcacctcgtgggagagccacgagttcctgtgcagattgggggattgtgcct

SEQ ID NO: 73025 - DNA, 600 bp, Chicken  19866894353758_1
agatgaaggacttgctatttgcacaacttacatttcttgtagttcaggcatcttaatgttttgttttcatatacatttatacctcgaaatgtatcatcagtaagccaccagttttacccctaaaacttgaatgactgcctactgcaaactgtggatctgtgcctttcagtgaatgagcagctcagagctcctgcattcccagatcccaatgaaggcacagtgacatctttctgctgctgactatccttccaggcatcctgccttggctgtcctgctgtgtctgagctgtgcccgggctcygatgagtgctgaggccgcctgtcccgatcccagagctgagcgctgckttctgcaggcgctgccttgagcaaaggcggcgatgtgttgcagagcaagatgagcacttggcacatctcttctggcacagartaatcttctacaagagccaaaagagtgcataggatgctgtgcggatctcttacaaccgaacgctygcrtgatcttgtccacagctcccaccaaccccagtaatttcccccactgacagtagtaggtaaggtgctggctgcctcagaacatcatcttattctgagcacaata

SEQ ID NO: 73026 - DNA, 600 bp, Chicken  19866894353758_2
gcatcttaatgttttgttttcatatacatttatacctcgaaatgtatcatcagtaagccaccagttttacccctaaaacttgaatgactgcctactgcaaactgtggatctgtgcctttcagtgaatgagcagctcagagctcctgcattcccagatcccaatgaaggcacagtgacatctttctgctgctgactatccttccaggcatcctgccttggctgtcctgctgtgtctgagctgtgcccgggctcygatgagtgctgaggccgcctgtcccgatcccagagctgagcgctgckttctgcaggcgctgccttgagcaaaggcggcgatgtgttgcagagcaagatgagcacttggcacatctcttctggcacagartaatcttctacaagagccaaaagagtgcataggatgctgtgcggatctcttacaaccgaacgctygcrtgatcttgtccacagctcccaccaaccccagtaatttcccccactgacagtagtaggtaaggtgctggctgcctcagaacatcatcttattctgagcacaataattagggcagacgtctggagggcgtgtactgcatttcacagcctcca

SEQ ID NO: 73027 - DNA, 600 bp, Chicken  19866894353758_3
aatgactgcctactgcaaactgtggatctgtgcctttcagtgaatgagcagctcagagctcctgcattcccagatcccaatgaaggcacagtgacatctttctgctgctgactatccttccaggcatcctgccttggctgtcctgctgtgtctgagctgtgcccgggctcygatgagtgctgaggccgcctgtcccgatcccagagctgagcgctgckttctgcaggcgctgccttgagcaaaggcggcgatgtgttgcagagcaagatgagcacttggcacatctcttctggcacagartaatcttctacaagagccaaaagagtgcataggatgctgtgcggatctcttacaaccgaacgctygcrtgatcttgtccacagctcccaccaaccccagtaatttcccccactgacagtagtaggtaaggtgctggctgcctcagaacatcatcttattctgagcacaataattagggcagacgtctggagggcgtgtactgcatttcacagcctccagaattgttaaaacttgcagccagcttgggagagaagcctgcaaaacgttgctgttactgacagctaatgcagaaagggttta

SEQ ID NO: 73028 - DNA, 600 bp, Chicken  19866894353758_4
attcccagatcccaatgaaggcacagtgacatctttctgctgctgactatccttccaggcatcctgccttggctgtcctgctgtgtctgagctgtgcccgggctcygatgagtgctgaggccgcctgtcccgatcccagagctgagcgctgckttctgcaggcgctgccttgagcaaaggcggcgatgtgttgcagagcaagatgagcacttggcacatctcttctggcacagartaatcttctacaagagccaaaagagtgcataggatgctgtgcggatctcttacaaccgaacgctygcrtgatcttgtccacagctcccaccaaccccagtaatttcccccactgacagtagtaggtaaggtgctggctgcctcagaacatcatcttattctgagcacaataattagggcagacgtctggagggcgtgtactgcatttcacagcctccagaattgttaaaacttgcagccagcttgggagagaagcctgcaaaacgttgctgttactgacagctaatgcagaaagggtttatggtgatcgagcattaatgggaaatggtattctgcagtcagctgttctccctgtggtctcaagtt

SEQ ID NO: 73029 - DNA, 600 bp, Chicken  19866894353758_5
cccagatcccaatgaaggcacagtgacatctttctgctgctgactatccttccaggcatcctgccttggctgtcctgctgtgtctgagctgtgcccgggctcygatgagtgctgaggccgcctgtcccgatcccagagctgagcgctgckttctgcaggcgctgccttgagcaaaggcggcgatgtgttgcagagcaagatgagcacttggcacatctcttctggcacagartaatcttctacaagagccaaaagagtgcataggatgctgtgcggatctcttacaaccgaacgctygcrtgatcttgtccacagctcccaccaaccccagtaatttcccccactgacagtagtaggtaaggtgctggctgcctcagaacatcatcttattctgagcacaataattagggcagacgtctggagggcgtgtactgcatttcacagcctccagaattgttaaaacttgcagccagcttgggagagaagcctgcaaaacgttgctgttactgacagctaatgcagaaagggtttatggtgatcgagcattaatgggaaatggtattctgcagtcagctgttctccctgtggtctcaagtttcc

SEQ ID NO: 73030 - DNA, 600 bp, Chicken  19866894353761_1
tcactttaaattacctcttaggctgttggaattcatcttgaaggtatttttgtaatgaatatttttcatgagctctaatacaacctgtgggagatctgaataaaaaagaaaatccaccagtcctgccaagagaataccttacgtgccagctgctactttttgttgttgttatcctgcattctgtgatattaatatagctggtttccaaggtactttaaatatataacaggctgttatagtatggagaagttctccttgagaagtaaaaaacaaggactgcttcctgaacggccctctttygtaacccagaagttgctgcattcagatgactaaaccttgtgtcttttgtaggttattgtgctgttctgtcttgtagacgtatttcccactgcatcccagattagtgaataactcctcaaatcacttttttctgtggtcagtctgtacagagcaaaggtgtttatccttgtgttcaagatgagacttcccttgcagctatctgggtgacatttggtaatgttttatcacctgcccgatcaacatcttacctactgtgactgttcagaatttatagctatggcttattaaactatgctaaat

SEQ ID NO: 73031 - DNA, 600 bp, Chicken  19866894353770_1
gttgttctgtcagaagcaaatcagaggctttatagacatgaatcagctccaaacacgttaaaatgaagctctaaaacttcagccctgaagctctaaacataaaaacaatgttagaatgacttaggttttacagatataggccacagatactatcttctgaaagcaggactttattctataaccaatacgatatctctaaatagcatggatagtccatgcaattcaacagtaggaaatatttttaaatttcgtgttcaagcttttgtaaaaaatgacatcagattcttctgggattgagcwcttyrtgagctcacacgttgaccagattaattcctgtggttggcatagtaaagcagatagagaaaaaatggttttcactctaagaatcctgaaaattctgggaatcaaaacagagcttaaaacaatgtatgaagggcatgaggtagcacttccagagtgttaatttcatggacatcctcactgctttatctaacaaactgctatacattgtagatatcttgcccttgacacaattcttatttgtcagcagaaagcagatgacaatagctataattgctttatgaccctggtgtaagtatc

SEQ ID NO: 73032 - DNA, 600 bp, Chicken  19866894353770_2
ttctgtcagaagcaaatcagaggctttatagacatgaatcagctccaaacacgttaaaatgaagctctaaaacttcagccctgaagctctaaacataaaaacaatgttagaatgacttaggttttacagatataggccacagatactatcttctgaaagcaggactttattctataaccaatacgatatctctaaatagcatggatagtccatgcaattcaacagtaggaaatatttttaaatttcgtgttcaagcttttgtaaaaaatgacatcagattcttctgggattgagcwcttyrtgagctcacacgttgaccagattaattcctgtggttggcatagtaaagcagatagagaaaaaatggttttcactctaagaatcctgaaaattctgggaatcaaaacagagcttaaaacaatgtatgaagggcatgaggtagcacttccagagtgttaatttcatggacatcctcactgctttatctaacaaactgctatacattgtagatatcttgcccttgacacaattcttatttgtcagcagaaagcagatgacaatagctataattgctttatgaccctggtgtaagtatctgac

SEQ ID NO: 73033 - DNA, 600 bp, Chicken  19866894353770_3
tctgtcagaagcaaatcagaggctttatagacatgaatcagctccaaacacgttaaaatgaagctctaaaacttcagccctgaagctctaaacataaaaacaatgttagaatgacttaggttttacagatataggccacagatactatcttctgaaagcaggactttattctataaccaatacgatatctctaaatagcatggatagtccatgcaattcaacagtaggaaatatttttaaatttcgtgttcaagcttttgtaaaaaatgacatcagattcttctgggattgagcwcttyrtgagctcacacgttgaccagattaattcctgtggttggcatagtaaagcagatagagaaaaaatggttttcactctaagaatcctgaaaattctgggaatcaaaacagagcttaaaacaatgtatgaagggcatgaggtagcacttccagagtgttaatttcatggacatcctcactgctttatctaacaaactgctatacattgtagatatcttgcccttgacacaattcttatttgtcagcagaaagcagatgacaatagctataattgctttatgaccctggtgtaagtatctgaca

SEQ ID NO: 73034 - DNA, 599 bp, Chicken  19866894353774_1
  misc_feature (1)..(165): n is any nucleotide
nnnnnnnnnnnnnnnnnnnnnnnnnnnnnnnnnnnnnnnnnnnnnnnnnnnnnnnnnnnnnnnnnnnnnnnnnnnnnnnnnnnnnnnnnnnnnnnnnnnnnnnnnnnnnnnnnnnnnnnnnnnnnnnnnnnnnnnnnnnnnnnnnnnnnnnnnnnnnnnnnnnnnatgattgggaaaggggatgaaaaagtgtcgtctttttgttttcctattctgatgttaactttttctgtgacctaagataagatgcttaaactctatgtactcacacatacctaaagcaggccaagacatacctayaagtttttaacctacttagttaaccaagtaatctttgtataattctctaggtcagagcatgaacgtctccttgacctggatttttttctacttttatacattgagtagccttctatcgtgcaaagagttctgcttctatctgttttaatattgtgaagcaatatgttctctaatgtaaaaatagttatcggaacctgtgtgaacataatagaaacagaagagattggtgatatatcagaacatggtatgaaaccttgaacttaccccttgtccccaaaaatacttttgtcgtgtactgt

SEQ ID NO: 73035 - DNA, 600 bp, Chicken  19866894353776_1
tctgattagattcctctcatccatctaggccaaatcacaacagggaaaatggggattttgagtttgcagggtgagtgtcaggcagcagcccctgcctggttatttccaattcaccctttaataacctcccaagtttgtaacccctgtgatcacgtcacctctcctctgatccaaacaactgccctgcagagcagagggctccgtgcgccatccctgcatgtcccaaaactgcacacagaagcatcctgcgcttttgctttgctgggtgcagcaaggtggcagcaggagggaagggccctygttcaaacagaaatacctttggcagcggctgcagccaatggaaaggggaaatggattttttgttgaaaagttggcgttgttttttcaagtctgacgaatgtgaaagtccccatttaaaggaggcgaacctgcagtgaagtcggtcactgtttacacacccacgcgccgactggggcggccgaaagcaaacttcctggtgtatcctgctccaaatcacctgggagcggagctcattgagcagggttgtttctgtgctggatgctggtgtgaatatgtgggcaggcagctggatcctgagga

SEQ ID NO: 73036 - DNA, 599 bp, Chicken  19866894353783_1
  misc_feature (1)..(193): n is any nucleotide
nnnnnnnnnnnnnnnnnnnnnnnnnnnnnnnnnnnnnnnnnnnnnnnnnnnnnnnnnnnnnnnnnnnnnnnnnnnnnnnnnnnnnnnnnnnnnnnnnnnnnnnnnnnnnnnnnnnnnnnnnnnnnnnnnnnnnnnnnnnnnnnnnnnnnnnnnnnnnnnnnnnnnnnnnnnnnnnnnnnnnnnnnnnnnnnnnccatcttttgtattgaccattcattattttcgtgacttttttgcttactacctctgaaatcagggctgtaacacttcttcaaaatgttgtttgttctatttaaaaakaatgtacagcctactggagtgcaagttttacatgtcagatacttccaagatgacgaaagaaagctaaatatcagagtactcaaaagctagtgacttgcagctaaaataaacagcatgacttaactcttaaacacatgtctgtctgcatgcacgttagctggcacggtttcttgggcagcctgctgaaaaacgctggatggaatagtttggttgaaaccagaacacactcactgcaaagaatcactgagttctttgcaaggttggacttttgctctctcttcctccagtcttttgcgtag

SEQ ID NO: 73037 - DNA, 600 bp, Chicken  19866894353783_2
aggaataccagtggaaaataaaaataccaacttacagttgaaatcagtgagatcctcagctcaggctggagctgttgaactggtggttctgataaaattccttttgtctactcacatgcacctggagtttatggtttaacttggtccacttctgcttaaatgggtcaaacagttttacgtaagcacaaggagaataatatcaaggaaaattaaaacttgaaaaaattaatgtttttaaaaaggaacttcttggattccagtatctaaacagaccttcattccttaacctaaattttgtcwagggcattgagacagggtagctgcatgcagttcactaagtctgttcattaaaacaatggaacaaacataaatgtggggtaaattatgcataayaatatatcactgctgacatttaaataaaaactgaagttaatatttcgactgtttggtttcccarcatttactttatgccaaaaaaccctactgttttatataagtaattacattagaccttgctgctgttaaaatatcaccatgcataacagtgtactaaggagcttcacaaacacacttcctgagccaatgctgaaaataacccac

SEQ ID NO: 73038 - DNA, 600 bp, Chicken  19866894353783_3
aaaattccttttgtctactcacatgcacctggagtttatggtttaacttggtccacttctgcttaaatgggtcaaacagttttacgtaagcacaaggagaataatatcaaggaaaattaaaacttgaaaaaattaatgtttttaaaaaggaacttcttggattccagtatctaaacagaccttcattccttaacctaaattttgtcwagggcattgagacagggtagctgcatgcagttcactaagtctgttcattaaaacaatggaacaaacataaatgtggggtaaattatgcataayaatatatcactgctgacatttaaataaaaactgaagttaatatttcgactgtttggtttcccarcatttactttatgccaaaaaaccctactgttttatataagtaattacattagaccttgctgctgttaaaatatcaccatgcataacagtgtactaaggagcttcacaaacacacttcctgagccaatgctgaaaataacccacaggaaaaggctgttgttgagcatataaatgcgtctttcatcaattcccatctgaggtactctctgaaactacgtgttgggaacctgcagcata

SEQ ID NO: 73039 - DNA, 600 bp, Chicken  19866894353783_4
aaatgggtcaaacagttttacgtaagcacaaggagaataatatcaaggaaaattaaaacttgaaaaaattaatgtttttaaaaaggaacttcttggattccagtatctaaacagaccttcattccttaacctaaattttgtcwagggcattgagacagggtagctgcatgcagttcactaagtctgttcattaaaacaatggaacaaacataaatgtggggtaaattatgcataayaatatatcactgctgacatttaaataaaaactgaagttaatatttcgactgtttggtttcccarcatttactttatgccaaaaaaccctactgttttatataagtaattacattagaccttgctgctgttaaaatatcaccatgcataacagtgtactaaggagcttcacaaacacacttcctgagccaatgctgaaaataacccacaggaaaaggctgttgttgagcatataaatgcgtctttcatcaattcccatctgaggtactctctgaaactacgtgttgggaacctgcagcatacagcactgttggcaactggagacagggaggctggtgcttgatgcagagtgcgaggccagcatca

SEQ ID NO: 73040 - DNA, 600 bp, Chicken  19866894353787_1
taaagatgtcaatgattggacacccagtttcttgagggagcaagttgagtgcagtggaatcattagacctcttttgctataaatgggaggaagcgatgggaaggctgctctcataaaggcttttcaaattaagattaatttactttcttgttcacgcacatcccatttggctaatcacttgagagtaaccagaactctatctccatgttttactgtaggtaggtgaaaagtctggaatgtagtcttggtgggatttgattctatggagcgttgactggaaaagggagtttctagacttaytaatacagttaaatgtgcattggtttctcactgctgtggctttgtcattacctcagttaggatattttgtatgttagtgtactaagattagtatttgggcttaactgtcttcagttccaggctggctttgtatttgtgaaatggttctccctttgtctgatagtagtagagattactactctactcaattgtgttgtattttgtgaggatggtagcaagcagagacccaaagcagcaccttttgtccccaggttgatggcaggtattgtgttttacctgctggttggctgctcagcgtgc

SEQ ID NO: 73041 - DNA, 600 bp, Chicken  19866894353792_1
tttttaattgtaaaaaacttgtacttctactttatgatccacaagtcctgcaaaacattcccttcaaaagatgcagggattttaagttgttttgacttgtggcattatgcttcaccttggttgcttcgggctcatgctattaaaatgtcagtgaacttcagcaatgtcatacggcttttttctttatattattttggcttgtttgtttattttaaataattattaaattcacagataagaacatttattaaggaaaaactaatatatcaaaaagagagcatccatgtttgtgaaaacacyagccatgttaaaagttttgatctaagcaagaaattatgagataataatatatttttatattaaaattatcttactgttatcctagagtagtatgtcttaaaatgcttctgttcccactttaatgctacctttaccttcatatgatcacagaattgctgagaagcgaaggcacctctgtggactgtctagtccaacccccttataaatgcagggtcacctaaagcagattgaggaggaaactgttcagttgagttttgatccacagatggagattggtcttctttctgaagtgggtgttat

SEQ ID NO: 73042 - DNA, 600 bp, Chicken  19866894353796_1
ctggggagcattactatttagcatttaatagcattactattttaaagctatcgtatctttacgtaaatttgaaaagaaagttaatttaggggaagactgtttttcactttcccttcaaagcactcttaaaattcaagtacctactcagaaaaagaaaagaaaaatagcaattggttcagactatgagacttcaaatgaagttttcaatatgtttaactataaatggcataagttaaaagttttcataagtcaagtttcatcgtcagagatgtactctaccaattttacatgtaattaagsagcatttttttttcatatgccagagagaaattaaaacctggcacaaaattacaacattccagaggaaaaaaacctgacagcattcccctagtgaaagctgtgtgttacatcatctttaaatctagacaatcatgtacttgtttccctggcatttttcacatcattcataagatacggtgaggtaggggttggcctcttctcctgcataataggattagaggtaatggcctcaagttgtgccaggggagtttcaggttgtatattatgaaaaacttcttctccaaagagtgggttgtgtgc

SEQ ID NO: 73043 - DNA, 600 bp, Chicken  19866894353798_1
ttgcttcaactttctattactgttgtattctgttttctctcaaccttcagatgtcataaaagggaacataaagcaaaaaacatttccccttttctaacagcgacaaagcaaggtgaaacacctctcctggggcttccacatcagctgccttcttctttccttttttcacaccaacacagacgagacacaactgtctgtattcccaatttgcctctggcctttcaaaacatagcatttaacatagcatacagaagaacttctttatggttagggtgatgaagcactggcaaaggctgcccrgagagttggtggagtctccttctacggagatagtcaakactcatctggacatccacctgtgtgacctattgtagggaactgctttagccaggggcttggacttgatgatctcttgaggttccttccaacctctgtgattctgtgtttcatgagcccatgagcaccgtgtacaaatagtgaatttagtttgtgctatctttttattaaatatatatgtatataattgtctctttattggaaattgcacctcctctgcctgcgtccagcaccaggtttgtacacctcatacctcagaaagat

SEQ ID NO: 73044 - DNA, 600 bp, Chicken  19866894353798_2
ctcaaccttcagatgtcataaaagggaacataaagcaaaaaacatttccccttttctaacagcgacaaagcaaggtgaaacacctctcctggggcttccacatcagctgccttcttctttccttttttcacaccaacacagacgagacacaactgtctgtattcccaatttgcctctggcctttcaaaacatagcatttaacatagcatacagaagaacttctttatggttagggtgatgaagcactggcaaaggctgcccrgagagttggtggagtctccttctacggagatagtcaakactcatctggacatccacctgtgtgacctattgtagggaactgctttagccaggggcttggacttgatgatctcttgaggttccttccaacctctgtgattctgtgtttcatgagcccatgagcaccgtgtacaaatagtgaatttagtttgtgctatctttttattaaatatatatgtatataattgtctctttattggaaattgcacctcctctgcctgcgtccagcaccaggtttgtacacctcatacctcagaaagatggaactatttagatggatgttgaaaccaagctttagtc

SEQ ID NO: 73045 - DNA, 600 bp, Chicken  19866894353800_1
taccttacatctcacatatcaggagtcacaagaaacaaacaggaacttactttgcccttgtgtgtctcttggagccactgtctcagccgaatgaggcagctttcctgcatgggtgtcaagtcgcccagataacgcttgatgtagtctgcatctagcttgtctaaaaggagatgtacatgtgattaaagtggtcctgaactgacctaaccaaaacagcaaatgatcttatatgctgatatctgagacagaagtggtggctctgtgttctctgtggagttggatgaaatttctctgaatcartgaaaagacgagcaaagaaayagaattawcttcatgttaaattgagaagactcattcttctgcaactaaaaaaggagtgaaaaatgggcatttacaaaagctttttttcacagtatattcagacttgtcaatccacagcaatcacagggttcgattcttctggaaatattagaggagctttgacttaaaccttccagggcaaaaawtttcccaaattccattactgacagcagaaggaagatagaacagaatacagtgaccagggaactctcctccttgttattgctacggttaaaccca

SEQ ID NO: 73046 - DNA, 600 bp, Chicken  19866894353800_2
ggagtcacaagaaacaaacaggaacttactttgcccttgtgtgtctcttggagccactgtctcagccgaatgaggcagctttcctgcatgggtgtcaagtcgcccagataacgcttgatgtagtctgcatctagcttgtctaaaaggagatgtacatgtgattaaagtggtcctgaactgacctaaccaaaacagcaaatgatcttatatgctgatatctgagacagaagtggtggctctgtgttctctgtggagttggatgaaatttctctgaatcartgaaaagacgagcaaagaaayagaattawcttcatgttaaattgagaagactcattcttctgcaactaaaaaaggagtgaaaaatgggcatttacaaaagctttttttcacagtatattcagacttgtcaatccacagcaatcacagggttcgattcttctggaaatattagaggagctttgacttaaaccttccagggcaaaaawtttcccaaattccattactgacagcagaaggaagatagaacagaatacagtgaccagggaactctcctccttgttattgctacggttaaacccatcccataatttctgaacaaaa

SEQ ID NO: 73047 - DNA, 600 bp, Chicken  19866894353800_3
aagaaacaaacaggaacttactttgcccttgtgtgtctcttggagccactgtctcagccgaatgaggcagctttcctgcatgggtgtcaagtcgcccagataacgcttgatgtagtctgcatctagcttgtctaaaaggagatgtacatgtgattaaagtggtcctgaactgacctaaccaaaacagcaaatgatcttatatgctgatatctgagacagaagtggtggctctgtgttctctgtggagttggatgaaatttctctgaatcartgaaaagacgagcaaagaaayagaattawcttcatgttaaattgagaagactcattcttctgcaactaaaaaaggagtgaaaaatgggcatttacaaaagctttttttcacagtatattcagacttgtcaatccacagcaatcacagggttcgattcttctggaaatattagaggagctttgacttaaaccttccagggcaaaaawtttcccaaattccattactgacagcagaaggaagatagaacagaatacagtgaccagggaactctcctccttgttattgctacggttaaacccatcccataatttctgaacaaaatgsagggt

SEQ ID NO: 73048 - DNA, 600 bp, Chicken  19866894353800_4
accaaaacagcaaatgatcttatatgctgatatctgagacagaagtggtggctctgtgttctctgtggagttggatgaaatttctctgaatcartgaaaagacgagcaaagaaayagaattawcttcatgttaaattgagaagactcattcttctgcaactaaaaaaggagtgaaaaatgggcatttacaaaagctttttttcacagtatattcagacttgtcaatccacagcaatcacagggttcgattcttctggaaatattagaggagctttgacttaaaccttccagggcaaaaawtttcccaaattccattactgacagcagaaggaagatagaacagaatacagtgaccagggaactctcctccttgttattgctacggttaaacccatcccataatttctgaacaaaatgsagggtactgatctgcaacctaatgaacaaagagaaaagcttctcyactcttctgatcttcattcactaaaaagacaagctgataacagctctttaaggtgatgttcaagttttcagctacccaggagaagtagcacagtgccgccaagagcctctacagtacaaagaatcccactaaaacaa

SEQ ID NO: 73049 - DNA, 600 bp, Chicken  19866894353800_5
attawcttcatgttaaattgagaagactcattcttctgcaactaaaaaaggagtgaaaaatgggcatttacaaaagctttttttcacagtatattcagacttgtcaatccacagcaatcacagggttcgattcttctggaaatattagaggagctttgacttaaaccttccagggcaaaaawtttcccaaattccattactgacagcagaaggaagatagaacagaatacagtgaccagggaactctcctccttgttattgctacggttaaacccatcccataatttctgaacaaaatgsagggtactgatctgcaacctaatgaacaaagagaaaagcttctcyactcttctgatcttcattcactaaaaagacaagctgataacagctctttaaggtgatgttcaagttttcagctacccaggagaagtagcacagtgccgccaagagcctctacagtacaaagaatcccactaaaacaagtcaaaccaccataccatcaggtgttcctgcggtaagctctgaggggctgcttgagatgttgaggatctccttattgttcaagccctcctttgtggcagaatctggcacattaacagc

SEQ ID NO: 73050 - DNA, 600 bp, Chicken  19866894353800_6
aaaaggagtgaaaaatgggcatttacaaaagctttttttcacagtatattcagacttgtcaatccacagcaatcacagggttcgattcttctggaaatattagaggagctttgacttaaaccttccagggcaaaaawtttcccaaattccattactgacagcagaaggaagatagaacagaatacagtgaccagggaactctcctccttgttattgctacggttaaacccatcccataatttctgaacaaaatgsagggtactgatctgcaacctaatgaacaaagagaaaagcttctcyactcttctgatcttcattcactaaaaagacaagctgataacagctctttaaggtgatgttcaagttttcagctacccaggagaagtagcacagtgccgccaagagcctctacagtacaaagaatcccactaaaacaagtcaaaccaccataccatcaggtgttcctgcggtaagctctgaggggctgcttgagatgttgaggatctccttattgttcaagccctcctttgtggcagaatctggcacattaacagcaggtgaaactggtcgtcttgtgtgggatgtgctgctctccaattt

SEQ ID NO: 73051 - DNA, 600 bp, Chicken  19866894353805_1
ccatctatcaaatctgtatctttccaatttgggtaccgtaaaagccttaatgaagtcagatagatgacatcatgtggctattcctttcttcacttatgcagttatgccagcataaaaggccactaggaaggtcaggcaggacttgtccttcatgaagccaagctggttatcctatattacctccctgtcttccatgtgccttagcatagtttccaggaggatctgttctataaccttcacagagctgaggctgacaagctgtagctccccaggccatactttctacccttcttaaaaatrggtgctatattgcctttttcctgtcaccagggacttcacctgaccaccgtgacttttgaaatattgagagtggcttagcgaccatgtcagtcaattccctcaggactctgggatgtatctcattgggacccatttacttaacggatgttcaggttcctcaggtggtcgcaaacctgatcttcacttacactgggaagaactttgctccccccgcctttctcaccttccaacccatctgctcaagatgtgtaaagaacaattgccaacgaagactgaagcaaaagaaggtgctgggtatct

SEQ ID NO: 73052 - DNA, 600 bp, Chicken  19866894353807_1
aatgttcaagtagacctgtgctccatgccctgagtgcactcgctcatccctctgctgcacagccaggccctttcttgcagtgtcagatgtgggtttgaaagtcctccagccaagaagggctcaaaacccttgtgtctcatttcctgagcatgtgttcaaaccactaattcaaaattcaggcattgcccacagtgcctgctttgtatttatgcttttaaaggacagaatgggtgtttttttgtcctgaaaatacaaagtgttaccactgatcctcaaggtaggacactgtgtttgagtgckgaaggtttccccagcatccactgcccaggaaagcttcacactaaactcagtgaccccrgctgatacctcacactggtaagaaacarccacacagcatttaaaaggaagtaaaatgagtgacttttaatagaaatattgcttctgccgtcagatgtttcttgattaaaataccatcagaaaatatgtttaataaaattatacattttaatagaatcttattgcataggattctcttacctaagacattttcttagagatctaaaaggctaacctaactggaaagtctcctaaaagaaaaga

SEQ ID NO: 73053 - DNA, 600 bp, Chicken  19866894353807_2
acagccaggccctttcttgcagtgtcagatgtgggtttgaaagtcctccagccaagaagggctcaaaacccttgtgtctcatttcctgagcatgtgttcaaaccactaattcaaaattcaggcattgcccacagtgcctgctttgtatttatgcttttaaaggacagaatgggtgtttttttgtcctgaaaatacaaagtgttaccactgatcctcaaggtaggacactgtgtttgagtgckgaaggtttccccagcatccactgcccaggaaagcttcacactaaactcagtgaccccrgctgatacctcacactggtaagaaacarccacacagcatttaaaaggaagtaaaatgagtgacttttaatagaaatattgcttctgccgtcagatgtttcttgattaaaataccatcagaaaatatgtttaataaaattatacattttaatagaatcttattgcataggattctcttacctaagacattttcttagagatctaaaaggctaacctaactggaaagtctcctaaaagaaaagagttttgtaatgcaaagctctcttgtctaagcatttacttttagtacactgtttttgta

SEQ ID NO: 73054 - DNA, 600 bp, Chicken  19866894353807_3
atgtgggtttgaaagtcctccagccaagaagggctcaaaacccttgtgtctcatttcctgagcatgtgttcaaaccactaattcaaaattcaggcattgcccacagtgcctgctttgtatttatgcttttaaaggacagaatgggtgtttttttgtcctgaaaatacaaagtgttaccactgatcctcaaggtaggacactgtgtttgagtgckgaaggtttccccagcatccactgcccaggaaagcttcacactaaactcagtgaccccrgctgatacctcacactggtaagaaacarccacacagcatttaaaaggaagtaaaatgagtgacttttaatagaaatattgcttctgccgtcagatgtttcttgattaaaataccatcagaaaatatgtttaataaaattatacattttaatagaatcttattgcataggattctcttacctaagacattttcttagagatctaaaaggctaacctaactggaaagtctcctaaaagaaaagagttttgtaatgcaaagctctcttgtctaagcatttacttttagtacactgtttttgtagaagatttaccattgctgagaaaacctt

SEQ ID NO: 73055 - DNA, 599 bp, Chicken  19866894353808_1
  misc_feature (1)..(72): n is any nucleotide
nnnnnnnnnnnnnnnnnnnnnnnnnnnnnnnnnnnnnnnnnnnnnnnnnnnnnnnnnnnnnnnnnnnnnnnnatgttgtgtttttacactctgtgcccttctcatatactttgtaatcctggaaaatgaaaacatgatttattattagattcagaaaaacagttacatttttcattgtactgccatttcctcttggattcacaatgcagtaattaacaataacatgaaatcactctccatcagctacagcatttatcagcatcttcctaaggagaaagggagtgtaacatctacctacaygcattgggcrgcgtgccatgctggaagagttgtataatgggaagatccaaacactttcatgctgaaagcacttaaagagtctacttatttagcatacactgaccgagttgtccaagtctgaaaatactatgaggtggttgggaattccttgctgaatcgctttggttagtcctggggaagttatttccttagcacatcagtttctaccttcagaaaaaaaaaaaaaaaaagaagaattgtttctattcattatggagagagtgcaaggagttatcatattgcccagactgcatctttgc

SEQ ID NO: 73056 - DNA, 599 bp, Chicken  19866894353808_2
  misc_feature (1)..(62): n is any nucleotide
nnnnnnnnnnnnnnnnnnnnnnnnnnnnnnnnnnnnnnnnnnnnnnnnnnnnnnnnnnnnnnatgttgtgtttttacactctgtgcccttctcatatactttgtaatcctggaaaatgaaaacatgatttattattagattcagaaaaacagttacatttttcattgtactgccatttcctcttggattcacaatgcagtaattaacaataacatgaaatcactctccatcagctacagcatttatcagcatcttcctaaggagaaagggagtgtaacatctacctacaygcattgggcrgcgtgccatgctggaagagttgtataatgggaagatccaaacactttcatgctgaaagcacttaaagagtctacttatttagcatacactgaccgagttgtccaagtctgaaaatactatgaggtggttgggaattccttgctgaatcgctttggttagtcctggggaagttatttccttagcacatcagtttctaccttcagaaaaaaaaaaaaaaaaagaagaattgtttctattcattatggagagagtgcaaggagttatcatattgcccagactgcatctttgccctgactcag

SEQ ID NO: 73057 - DNA, 458 bp, Chicken  19866894353808_3
gagtctacttatttagcatacactgaccgagttgtccaagtctgaaaatactatgaggtggttgggaattccttgctgaatcgctttggttagtcctggggaagttatttccttagcacatcagtttctaccttcagaaaaaaaaaaaaaaaaagaagaattgtttctattcattatggagagagtgcaaggagttatcatattgcccagactgcatctttgccctgactcagtgctgaatgaacgcatatacaacactaggatctagaagaccaaatacaaattcaaagtagaaataargactatgtatttatcaaacagaacaatttaacagggggaagaacttatcaagggctagtgtagattctccatcactagaaattttaaaatcaatagtggctgtgtttctaagacatatgtttttacttcaaacaagcactaattcacagtccttataa

SEQ ID NO: 73058 - DNA, 600 bp, Chicken  19866894353809_1
aactggatgcaaccctccctccttgggacaaaagagaagagaggggtaaagcaggaggggaacacagtgcttgaagaagtcgtttgacacaaatagctgtttttttttttggtaagtatttggctggacaagaaggcaatgaaaaagcagtataatttatggagagcaaaattacggcaggaaagcaggtagaataagatttaaaaagcaattaactgaaggcatgaagacaaacaaggcatttttttcaacaaccagcagcagaatgcctgcaggaatcagttagaaaatggggtaacrgaggaaaaggcaccgaggagcttttttctcagcacaacacattgcggtctgcgagtcgtgtaagggaagggttaataagaattattattaaagtcagtgactcattaaacaacctgaatagaagagaattaggagtggctccctagaaggaaggaactgaacaattattaggaagagctcctaatgaataaccatgtcagggcaagaacatagagatgaatgttatcatttcagtctttgtttgtctgctaacgaagtcgggtcccaccgtgagatgaatgtggatgtaggcagcggaat

SEQ ID NO: 73059 - DNA, 600 bp, Chicken  19866894353812_1
ccaccctacaatgacttcttttgatatgcattcaccttgaaggatcctcactgcactccatcagttatcctgggatcgagttataaattgcattcttcaatttctgctgtcccgaacctttgcttttaaagtcaaatctaaccttccctcttacatcgcactacagtaatccttgtaaaaatgaaagtaacattgtatcataacattttatcacaaccagacattctgttggaaaatgtagagcccagaaataacctttcatctactgcccttgtcattaaaaattttccctttagtctyaactttaaatgtagagatatgagcctgacctttcattaaactaacctaacagaaacctccttgccaacatcatctgtcactrgaagaccagtggctgttctagctcctcaagcctattatcactacatgtgctactaaaagcattctctgaccttgactcctattaacaccacttcattttcttgcaccagacctcatcctagctttgctaaccttgcattagttatgctaatccagcagtaaggctagcttgtaagcaactgtagtcaagagatgaatgcagttctgaacaaaaatctg

SEQ ID NO: 73060 - DNA, 600 bp, Chicken  19866894353812_2
ataaattgcattcttcaatttctgctgtcccgaacctttgcttttaaagtcaaatctaaccttccctcttacatcgcactacagtaatccttgtaaaaatgaaagtaacattgtatcataacattttatcacaaccagacattctgttggaaaatgtagagcccagaaataacctttcatctactgcccttgtcattaaaaattttccctttagtctyaactttaaatgtagagatatgagcctgacctttcattaaactaacctaacagaaacctccttgccaacatcatctgtcactrgaagaccagtggctgttctagctcctcaagcctattatcactacatgtgctactaaaagcattctctgaccttgactcctattaacaccacttcattttcttgcaccagacctcatcctagctttgctaaccttgcattagttatgctaatccagcagtaaggctagcttgtaagcaactgtagtcaagagatgaatgcagttctgaacaaaaatctgccttcaatattagagaccagtgacacccagatccaaaaatctgagtaattcaatcactttggcccagactactgttaaacct

SEQ ID NO: 73061 - DNA, 600 bp, Chicken  19866894353822_1
tggaaagaccactaagatcatctagttcaatcaccactgcatcactaaaatcatgtcactcaatgtgacatctcccacttccttgaaaaccttcttcagggatggtgactccaacacttccctgggcagcctgttccaatacaccaccactccttccaagaaattttccctaacatccaacatgagcctcccctggcacaactaaaagccatgatctctctttgggaaaagagaccagcttactataacctcctcctttcaggccactgcagagagcaataaagtctccttgagcctccygctctccagactgaataatcccagtttccccaactactcctcagaggatgttgttaaatgctgtgtgcaaagaaacatctccagatacctcagactcatccwgaaaagaccacattcagaaatctacagagctagacatggacaraaactttaaaatacagaatatgtgagggggaagggaagaaaatcagtcaaacttcagtatatgaagaccagtcagtctgctggtgtaagtagcttcagcagctatgaagggaaagtttcttgtaatactacaaattttaagttgtaatctacttt

SEQ ID NO: 73062 - DNA, 576 bp, Chicken  19866894353822_2
tggtgactccaacacttccctgggcagcctgttccaatacaccaccactccttccaagaaattttccctaacatccaacatgagcctcccctggcacaactaaaagccatgatctctctttgggaaaagagaccagcttactataacctcctcctttcaggccactgcagagagcaataaagtctccttgagcctccygctctccagactgaataatcccagtttccccaactactcctcagaggatgttgttaaatgctgtgtgcaaagaaacatctccagatacctcagactcatccwgaaaagaccacattcagaaatctacagagctagacatggacaraaactttaaaatacagaatatgtgagggggaagggaagaaaatcagtcaaacttcagtatatgaagaccagtcagtctgctggtgtaagtagcttcagcagctatgaagggaaagtttcttgtaatactacaaattttaagttgtaatctactttttaaatatgtattaayttattagcatatctacagtagaaaccctcaaaagcattccatataaatttcacacttactta

SEQ ID NO: 73063 - DNA, 533 bp, Chicken  19866894353822_3
accactccttccaagaaattttccctaacatccaacatgagcctcccctggcacaactaaaagccatgatctctctttgggaaaagagaccagcttactataacctcctcctttcaggccactgcagagagcaataaagtctccttgagcctccygctctccagactgaataatcccagtttccccaactactcctcagaggatgttgttaaatgctgtgtgcaaagaaacatctccagatacctcagactcatccwgaaaagaccacattcagaaatctacagagctagacatggacaraaactttaaaatacagaatatgtgagggggaagggaagaaaatcagtcaaacttcagtatatgaagaccagtcagtctgctggtgtaagtagcttcagcagctatgaagggaaagtttcttgtaatactacaaattttaagttgtaatctactttttaaatatgtattaayttattagcatatctacagtagaaaccctcaaaagcattccatataaatttcacacttactta

SEQ ID NO: 73064 - DNA, 362 bp, Chicken  19866894353822_4
aatcccagtttccccaactactcctcagaggatgttgttaaatgctgtgtgcaaagaaacatctccagatacctcagactcatccwgaaaagaccacattcagaaatctacagagctagacatggacaraaactttaaaatacagaatatgtgagggggaagggaagaaaatcagtcaaacttcagtatatgaagaccagtcagtctgctggtgtaagtagcttcagcagctatgaagggaaagtttcttgtaatactacaaattttaagttgtaatctactttttaaatatgtattaayttattagcatatctacagtagaaaccctcaaaagcattccatataaatttcacacttactta

SEQ ID NO: 73065 - DNA, 600 bp, Chicken  19866894353823_1
acaagaaatgatgaaaaaatctggcaaagcaatggggaattaaaacttcatgatattgcagagagacactgcatatgatgagtttttaccaaattctaaaacacagcaattcataatgaatacacatagagttgtttaactaaaaacattaaaaattagataaaacaaaagcttaattgcaagtgaaatgcctcaaggcaattcatgattgataaagacattggtgatcaagcagggaaaggaggaattactagtagtctcctaaagatgaggtgaagaaattcggtgtagtaaggagasggaagctactaaagagagtcagggaaagtctttgcttacaggttgcccagagaggtgatggatgccccgtccctggagatactcaagatcagactggatggggctctgagcaacctgatctaactgtaggtgtccctgttcattgcaggggagttggactagaagatctttaagggtctcttccaactcaaaggattctacgattctgtgattctatgaaagtatgccacagaacaatccacaggggagatgactataatacctcatgtgtgggttgcagtgagtttggatgatgaacac

SEQ ID NO: 73066 - DNA, 600 bp, Chicken  19866894353825_1
gtattgctgagctgtatgatttcaacatctaatagaacaggaggaagttcagataaacagtgctgttgatgtaaccagctcacataagcatgtccgtgtgtggaatggtgtcagtgtaactacactgtgacaagctggccaacgttttgacaacagaaaatctgatctgttggtgggaagtcacaactaacatcacaaattatttcgtaattaaatgcttatgaggctgatgatccttcttgtcagtttgacataaaaacagtgttagtatttgtggatatctcagtctcctttatcccyatttggtaaaattaatcacttaggagatggsatgtgtaaaataaataaataaatatgtataataataatcaaaacaaaaacttacatttttatctctcactatcacaactcatttaggatggcacccggcctccactagatacagacgtaaaccttgaagaaattgcttacagtcaacaatgtgattgttatacgtgagtacttcctaattttgacttcagtcttagtatgcagtgatgcacaataatttgtgctgtttttcttacattcatttgaccgttttgccaaggactgggtggg

SEQ ID NO: 73067 - DNA, 600 bp, Chicken  19866894353825_2
atagaacaggaggaagttcagataaacagtgctgttgatgtaaccagctcacataagcatgtccgtgtgtggaatggtgtcagtgtaactacactgtgacaagctggccaacgttttgacaacagaaaatctgatctgttggtgggaagtcacaactaacatcacaaattatttcgtaattaaatgcttatgaggctgatgatccttcttgtcagtttgacataaaaacagtgttagtatttgtggatatctcagtctcctttatcccyatttggtaaaattaatcacttaggagatggsatgtgtaaaataaataaataaatatgtataataataatcaaaacaaaaacttacatttttatctctcactatcacaactcatttaggatggcacccggcctccactagatacagacgtaaaccttgaagaaattgcttacagtcaacaatgtgattgttatacgtgagtacttcctaattttgacttcagtcttagtatgcagtgatgcacaataatttgtgctgtttttcttacattcatttgaccgttttgccaaggactgggtgggagtctatggatgctaaaatagccttcttcgt

SEQ ID NO: 73068 - DNA, 600 bp, Chicken  19866894353828_1
ttgaaattctgcagccaagataatttttaaaaatttagggctagtaaccatctgccataaatgatagaaattaaatataaataaaatagtacttctactaccagtgatgggaatcacaagccaaatgtatccatggtctaggcagcaggaacacttgtagaacgaaagcagctaaaggagctgttttggcccagacatgttttgatgtgtagtgtatcctgttggctgaacaacagcattattaagcaatttgggctggagcatcactgggctctgtgaagaatttgaagatcttgactkgagcgtgttgcaagaagaatcatgctgtgtcattcagtaaaaatataatcagtcttacgccactggcacattcaaacacctagtgggatatgctgggcatcagtgttcaaggttttatgtaaggtaacagctgctttggtcaggcagttaattaaatgtgttaattttccatacaaccaacagtagtgacaacagatcaaagtggaattttatgacatttcagggttcccttatgtgatcacaatggtggatggcacccacgctatctttcacatcccttcactgtatgatgctgccttt

SEQ ID NO: 73069 - DNA, 600 bp, Chicken  19866894353828_2
cagtcttacgccactggcacattcaaacacctagtgggatatgctgggcatcagtgttcaaggttttatgtaaggtaacagctgctttggtcaggcagttaattaaatgtgttaattttccatacaaccaacagtagtgacaacagatcaaagtggaattttatgacatttcagggttcccttatgtgatcacaatggtggatggcacccacgctatctttcacatcccttcactgtatgatgctgcctttcccctctggaaagcttcagtctttaactctgcaaatactccaatggtartactttggtactacttgctggatattgccagttgtcccaactccaatcttgaaaagctgcttgggcttattcccatactgatgttggtttagtctgaagatgaagcaattcatttgcaaagctattttgaattttctgcctcctgtcttacatttcttatgagaaatattcaatgagcagatatgtagtgtggaaataaactagtatggtatttttgaatagatactgtattcttcagatgtagaattacagaaaattatttccttttccttgatagttccgtttgctgcattgcgagat

SEQ ID NO: 73070 - DNA, 599 bp, Chicken  19866894353837_1
  misc_feature (1)..(122): n is any nucleotide
nnnnnnnnnnnnnnnnnnnnnnnnnnnnnnnnnnnnnnnnnnnnnnnnnnnnnnnnnnnnnnnnnnnnnnnnnnnnnnnnnnnnnnnnnnnnnnnnnnnnnnnnnnnnnnnnnnnnnnnnnncaaaagaagcttgggaacaaacccagctccacacagcattgcacccacggcagcagagctgctgagaaacgctgtgatgtgggtttggggttttggtgtgcgctgggtgacagtgactgccccgatggctgcagctgggctgtctgcctgcaggagttctgcagtgtgtggctcttgyatagaaaggtgtaattctcagttctcagagctgtgataacaacttgggtctagcaggatcttaacattaagcttttactttacatgattcaactctagccattgtgactgggggagctgtacagagacggacctgcacggaacagagagtaaaacggatttgtgtatagttcccaggtgtatcaacctaaaatgggaatggctcaggagtctctctttgactttttctgtctctatttggttgaatactgcatttggaagctttcagtagagaaagctgctctcctatggtttgatgaa

SEQ ID NO: 73071 - DNA, 600 bp, Chicken  19866894353837_2
gttaggtatgctcttgctgctgctgctattatttcccaacagtagatggcaatagccgttcatttgtgaaacaggagtcgaaccgcgctatggaatttaatgtgtaagttgggtcattcctggttagggatcctaagcagaactatatagaaaaatattttttgtttgtttgtttgtttttgttttttgagtacaggtgaactgccattaaataccaaccttttcaatttaattagcttaatgctaatgaaaatgaaaatgttgtaaaatccacttcaaattaaaacatgtgaaagacayacacagcaaggtactgcattgagttgtcatccctccatgagaaggtattacaaatacatttctatgtacattctagcaaagctcaagtgagtaaagaatgtgagttagacagattttcrttccttcacaagcttgctcaaagtagtcataatgttcgtgtcgtgtttggcttagaagctacttaggggttgtcttgttggcttaaggaactttatttcctcttcataaatgttagggttgaatttgaaacctttatacccccccctacccccccccagtatgtatgtatgcgtatatata

SEQ ID NO: 73072 - DNA, 498 bp, Chicken  19866894353837_3
ctggttagggatcctaagcagaactatatagaaaaatattttttgtttgtttgtttgtttttgttttttgagtacaggtgaactgccattaaataccaaccttttcaatttaattagcttaatgctaatgaaaatgaaaatgttgtaaaatccacttcaaattaaaacatgtgaaagacayacacagcaaggtactgcattgagttgtcatccctccatgagaaggtattacaaatacatttctatgtacattctagcaaagctcaagtgagtaaagaatgtgagttagacagattttcrttccttcacaagcttgctcaaagtagtcataatgttcgtgtcgtgtttggcttagaagctacttaggggttgtcttgttggcttaaggaactttatttcctcttcataaatgttagggttgaatttgaaacctttatacccccccctacccccccccagtatgtatgtatgcgtatatatatatacacacatctatgt

SEQ ID NO: 73073 - DNA, 482 bp, Chicken  19866894353842_1
tacaggcttatatgtcaaggttttattgtacagtatgcagctatagtattttggcatacgtgtgacataaaaaatgaatcctgggatgcttttcaaagttttcatttttgaaatgagtatttgtttaatgtttccaatgtttttctctcaactatgcatatgcacaaaattatgttcatatgcacagaagaataaaatgaaagtgttttttaaaaaggagcttagatgcctgagatgacagtgttacttaactctagaacagtaacatatggcagtgtaagctttgtatttattccatartttctggaactatgttaataagtttttcttacaattttccctatttccacgtttatgtagtgaagcaatatttttagtgtcaaacttaagatgaagacaagagtcttgaatacccaatacataaatatgaaatctgtttttttaatttgaaattataaactgtggaattgaaaatttaatac

SEQ ID NO: 73074 - DNA, 600 bp, Chicken  19866894353844_1
tgagtggtagttaatggcatcagttgcaatctgtttgtttcttggttcatgatttttttttttcttggctaaaactacgtcaggtggagcaggagtgggagtgggtatcccagataatcaatgtggagggaggaatgcatgatgatagttttagtttattgagaaatgttaataaagttacaaggtgaatgcttaggttaagagttaagaacttgtgcagtcttggctcagagctgaacaggaatgcctcctacatttatttgtactgcttgccttttgtaatgttgattgtcagtctcstcagtctgtcagtctcgtttcaatctacttccatttcagagttctatgccaggcggcatgtcttacctttgactgaatgtttgacatgccattttctccctctttttcagtgaggcttaatttcacttcttaggggagtttcatgaaattatctaacacatatgctacctagaatacaacatttatgttgtgcaccttctgtacagcagttgcttggcttatgcttgttaagaatgtccttgttctccccacctctcagtcctgtgagacttcttgctcgcaagcagacatcatgtatgt

SEQ ID NO: 73075 - DNA, 600 bp, Chicken  19866894353847_1
acagcaggagggacacttttccatttctgggttcagttagtaagatctgggggactccacacggtatcttatgtttcctaaccctctgggaccagtagcagcagtggggccagggcagcctgatccatcagacgtggattaactggccagtctccttgtgaaacaggtgagtagtattaatggcagccaggaggtaacgcaaaggattattcccctccggttgtaaaagaagacttttaaatttacttgtctttctctcagggaggtgttgcctcaggacatttttgtctgaagagcacratgagcttcaaagacacagcaaaacgttccctgctgctgagaacgattttgcaaagacccagtgagatttacaagtctgattaaaatttgctggtcttataagtaactttaatgggatgcagacaaagaaatgtttccaccacattttgtgttgcaagctaaatgatgtctgtaatccattttctcgactgcctgctcccagtatttggaggtccctgtccctgctgcaggggttgctcaagttcttctaaagccacagctaaattatcatgatttactgaatggcatattaaggtaaac

SEQ ID NO: 73076 - DNA, 600 bp, Chicken  19866894353855_1
aaaggccttgtctcatgaaattcaagtactcacagcttcaccttggttttgctttcatgactccttttcactcacagcactgtacttggtgtgcagaattctccccgacaaaaaatgagtatccagtcctgaatatataaactactgtctgtggttttacaggcagaggatcacatgccatgcagagctgacttcacaaagacagttgacctgtgcaaaagtagctctgctgaccacaggagtctgtttctccttaaatgggcacagatgttgtaagtgtggtcacattcacatcaatakactcccttctgatttagacstaggctagtgggagcgtgcarccatcccagcagaaaaggcctccattcctcttctggtatctatatggcacaaagttcatgagaaaggcagtggcatggactatgtgctgttcaccctgaaactgctgttagtagaccacagtgtatgcaaaaagtgactgaacaaggcacaagcaattttttcagatgccagggcccagcaccccaggactgtagttgttcgctgtgcatgctgagtaggccttcattccttattcccttaacactcagtaacggtttt

SEQ ID NO: 73077 - DNA, 600 bp, Chicken  19866894353855_2
ttcaagtactcacagcttcaccttggttttgctttcatgactccttttcactcacagcactgtacttggtgtgcagaattctccccgacaaaaaatgagtatccagtcctgaatatataaactactgtctgtggttttacaggcagaggatcacatgccatgcagagctgacttcacaaagacagttgacctgtgcaaaagtagctctgctgaccacaggagtctgtttctccttaaatgggcacagatgttgtaagtgtggtcacattcacatcaatakactcccttctgatttagacstaggctagtgggagcgtgcarccatcccagcagaaaaggcctccattcctcttctggtatctatatggcacaaagttcatgagaaaggcagtggcatggactatgtgctgttcaccctgaaactgctgttagtagaccacagtgtatgcaaaaagtgactgaacaaggcacaagcaattttttcagatgccagggcccagcaccccaggactgtagttgttcgctgtgcatgctgagtaggccttcattccttattcccttaacactcagtaacggttttgagaagtagagttgaaatag

SEQ ID NO: 73078 - DNA, 600 bp, Chicken  19866894353855_3
cttggttttgctttcatgactccttttcactcacagcactgtacttggtgtgcagaattctccccgacaaaaaatgagtatccagtcctgaatatataaactactgtctgtggttttacaggcagaggatcacatgccatgcagagctgacttcacaaagacagttgacctgtgcaaaagtagctctgctgaccacaggagtctgtttctccttaaatgggcacagatgttgtaagtgtggtcacattcacatcaatakactcccttctgatttagacstaggctagtgggagcgtgcarccatcccagcagaaaaggcctccattcctcttctggtatctatatggcacaaagttcatgagaaaggcagtggcatggactatgtgctgttcaccctgaaactgctgttagtagaccacagtgtatgcaaaaagtgactgaacaaggcacaagcaattttttcagatgccagggcccagcaccccaggactgtagttgttcgctgtgcatgctgagtaggccttcattccttattcccttaacactcagtaacggttttgagaagtagagttgaaatagcaatatttgaagcaatgagtc

SEQ ID NO: 73079 - DNA, 599 bp, Chicken  19866894353860_1
  misc_feature (1)..(98): n is any nucleotide
nnnnnnnnnnnnnnnnnnnnnnnnnnnnnnnnnnnnnnnnnnnnnnnnnnnnnnnnnnnnnnnnnnnnnnnnnnnnnnnnnnnnnnnnnnnnnnnnnnctgtaagggcctgaagatagggatacctataccaccactttaaactccctcagaaagaggagacagaggcagaagtggagagagaaatgaaataaaaaaaaagacagaaaaggagacagtgttagtgtttgtgtgagtagatgagaaagcaagacaaaaaaatcaaatacatagtagcagcctgaatacctagacttgacamtggggactatattctactttcagtgacatacttcagattaatattaatagtaaccactccaagatgcataaagtttgcttttatgattacctgttacaggacttagatctgtatctgtgtaggcagaaaccctaaaaaagccacccttttctctctcccacagctgagcctgtgggttggcatttaatttgcaacagccatggcaagtaacacatttaaaaagtcatgctttatgaaacacaaacattgccaatgctctggcaccttctctatcaaagaatgattctttgtatttctga

SEQ ID NO: 73080 - DNA, 600 bp, Chicken  19866894353860_2
ccacagctgagcctgtgggttggcatttaatttgcaacagccatggcaagtaacacatttaaaaagtcatgctttatgaaacacaaacattgccaatgctctggcaccttctctatcaaagaatgattctttgtatttctgagtgccctgtattaagaggctgagtcaggtctgctttactcccacagaaaaccagtgcaaggtaaccatggcctgactgaatacagtctgtacacttactcactactaaattctagctcttggacacagggctccagctcatacaaaaaagaaaaaaaragacttcaaggactgatagcaggttgctttgtatggctaaaacttaggcccaagtttactgaaaatgtcaagcagagaggtacagtttgctgtttgctccaagaatgaaatgccaatacctgttgtgtacagaccaagcagacaatgctatttgtttgcatagatgcatgaaacagctctcaagagctcacccagaactctctcatttgaaggtagcagtggggtctttgttgatttcagtaaataataacagatcagatccacagcagcacttgttattccagcctaagtgagggactc

SEQ ID NO: 73081 - DNA, 600 bp, Chicken  19866894353861_1
ccccgttagaaatgccttttcactccaatggcacagtgttcttgaaccagctgtaaacactttttggcaatttcattcatcttttagcagttccagatatatttctttccctagtttgtttatgagattcatgccttcctctctatcagaagtctcaaagtcaaaacctatcacatctactgcatcgccccagtccgctaggcgagtcaccctgtcagagagtaaagttagatgggcttgatgtgatcttcctgatgaattgacatcagagagttcttttcaggtttgaaacatacattsgrtaggaagctaattcatacgtactgttgctgcctggaaggcatgagaaaaaggattaagagagaggcgtctggggctgtggtaatctgaagggaatggaggcaaaagaataaaatgcaggagtgaaaaactgaaacgcaatggtgagcaagtgaaatgcagaagtgaacaagcagtctgctattaagattctggagctgccagtagcccctccagtaagcaccaaaagctcagagggatggtctgtaaatgcttttacaggctgtagtatcagtgaggcatcacatctataccaggagt

SEQ ID NO: 73082 - DNA, 600 bp, Chicken  19866894353861_2
ccgttagaaatgccttttcactccaatggcacagtgttcttgaaccagctgtaaacactttttggcaatttcattcatcttttagcagttccagatatatttctttccctagtttgtttatgagattcatgccttcctctctatcagaagtctcaaagtcaaaacctatcacatctactgcatcgccccagtccgctaggcgagtcaccctgtcagagagtaaagttagatgggcttgatgtgatcttcctgatgaattgacatcagagagttcttttcaggtttgaaacatacattsgrtaggaagctaattcatacgtactgttgctgcctggaaggcatgagaaaaaggattaagagagaggcgtctggggctgtggtaatctgaagggaatggaggcaaaagaataaaatgcaggagtgaaaaactgaaacgcaatggtgagcaagtgaaatgcagaagtgaacaagcagtctgctattaagattctggagctgccagtagcccctccagtaagcaccaaaagctcagagggatggtctgtaaatgcttttacaggctgtagtatcagtgaggcatcacatctataccaggagtgc

SEQ ID NO: 73083 - DNA, 600 bp, Chicken  19866894353862_1
cttgtggttaattcaccagttcccgtgcaggtacaaggcacttcagtgcaaggcttgctagaatagaatcagcttcaggaaatcacaacgtacccccccatatcattctagatctctttcaactaagtgacagcagtttccagtccccagacatcactgaacacagcacaaaaactcagattaagtactgataaatttgcaaattcagacacagcccaagcaataaaagaaatcagtactggccaagcatctcctgactgcatgattgcagtttgagtcatttgtgctccgaagaagaaragtgattcagaataatagttctaatagttctgcaccaacaaaaatggtaggtgacctgcagggatgtaccacgagagcccatgtctgacaaacaccctgagagcctgcagacatttacacaccacagctcctcaggagggaaatattcagataaatgtacaataaagattcgtgcaagtatagctttgggtgcacacacacatcacagcattcaaacagtgaagtgagtgtgtacttgaaacacttgtaagctgtaaattatgttattgggggaagataatattattcagggctgccaac

SEQ ID NO: 73084 - DNA, 600 bp, Chicken  19866894353867_1
attccagtggagtcagttgttaacaagtaggttaaagactagcatgaagtagattagcaatttcacgggaagttgtttgtgaaagaaaaacagtctgtgagagaggctatcatactgccttgttctgaggcttgggagtaccaaattttctaaaaatattgtagaaaaaaaggaacagaatttttctttgttatctaatatttatcagtgttttctccttgaaaaattgaagtatgaacctattgtgttctgttgatcattaaaacgagtaacaaaatgcttttgaccttgataaaaaasaaatgcaaactaagcaaatatttttcacattatcactgtttacttgtttacctaagttgtttttaaatcctgtaagtcctcaccatcctattcaaagccacgctcaccatttatatgcttaattgtattgaataatgtgatctaataaacattctaaccattcgagtgagtttgtaagtgcatgtggtatatatgattggcatatatttagtattatgcattgggaaatgtaaaagaataataaaaatcttcagttatgacaatraatctaatgacattacatcttgtgttactttaatt

SEQ ID NO: 73085 - DNA, 600 bp, Chicken  19866894353867_2
cgagtaacaaaatgcttttgaccttgataaaaaasaaatgcaaactaagcaaatatttttcacattatcactgtttacttgtttacctaagttgtttttaaatcctgtaagtcctcaccatcctattcaaagccacgctcaccatttatatgcttaattgtattgaataatgtgatctaataaacattctaaccattcgagtgagtttgtaagtgcatgtggtatatatgattggcatatatttagtattatgcattgggaaatgtaaaagaataataaaaatcttcagttatgacaatraatctaatgacattacatcttgtgttactttaatttctcctaaaatatgcttttttccttcatttcaatttgctgaaaagtaagtctcttcctttggtgccaaagacaacaacagaaggttttgatacaagaaataagtaaactaatggtatacaatgcatagtaacacagtgtacatagtactttttttcctttaatagacaaaaattgaatacagttgttgcatggactatattcagcctgttttgccttctattgtgtaatcttagttagacagtctcctaatgggatggtttataa

SEQ ID NO: 73086 - DNA, 599 bp, Chicken  19866894353869_1
  misc_feature (1)..(206): n is any nucleotide
nnnnnnnnnnnnnnnnnnnnnnnnnnnnnnnnnnnnnnnnnnnnnnnnnnnnnnnnnnnnnnnnnnnnnnnnnnnnnnnnnnnnnnnnnnnnnnnnnnnnnnnnnnnnnnnnnnnnnnnnnnnnnnnnnnnnnnnnnnnnnnnnnnnnnnnnnnnnnnnnnnnnnnnnnnnnnnnnnnnnnnnnnnnnnnnnnnnnnnnnnnnnnnattcggaagcagtgtcctttgtagattcctaaatgaaaacaaagcaagcaacatgtattcaagagaaccaggtaaaagtgcctctgccagctcygctttaatcccctttcctcttcctatagggtactctacttatgcaactaattcgccactgatgttttatgccatcaagaaaccatctcttaggttatgaatttggagcagattgaccagaagctcagctgcaggaagggacagccaggattcctctgttattctcttaactctgccactaatatccttctcttgagttctctaatctctctgtgctgtactttctcggtgctgttcttatcttggtaggataccaagtccgcaaagctgctttttgttcctcgatggctgtctcttgtg

SEQ ID NO: 73087 - DNA, 600 bp, Chicken  19866894353869_2
tatccttctcttgagttctctaatctctctgtgctgtactttctcggtgctgttcttatcttggtaggataccaagtccgcaaagctgctttttgttcctcgatggctgtctcttgtgggtccctcccccacatcatgggctacacagcagggctgggcaccagagccgtgctcatccccgtgagctgctgcttcccttatcagaactgctggatattgaactgtcttgatgcctcctcaattggaaaacaagtccataaatctcttcctgctgcaacttaaacccgcacgtccccctcraagttggttcagtttttaatggcatatttgctcagctaactgggagcccgtgcaggaagccaggctgtgagtgtgcactcctgagacctgcaggaacaacgccagggttggacgggtgaacaaggcagagtgttcagcactttgtccacctgcgtaaaggtttgcatcagtgttttatattactttctatgattacacagagctgcagctggtctcagcctgggagctgtgcatgctgctgcaggagctgcatggggaggtctatctgagagcttcctgcagcggtttggccccgaggtg

SEQ ID NO: 73088 - DNA, 600 bp, Chicken  19866894353875_1
tgtaggctgctttatttctgctacctggcctggccttgggcataggaaagagaaaaatcctgtctatgtgatggaaagccagcgactttcagcctgatgtagcaccttgtgccttgtacaaaggtgagtcagtccttatctgaagtaagaaaaccctcacaatcttaagtgtgctctttattaaaataaaaaataaaaataaatacatgaaactaatttctgttttgcattgttctaacctcagctttccgactgtgatacctaaccatgactgaaacaaacagctctcaacaaagagayagttttactttctttgccttccatctttcactttcttcatgttaaacactgcagttcagatgagtggtttgaaacatacaactgcaataagcagtggtagacctgtagaaagggctctaagaactttagtgagacacagtcagaattaagagacttgaatataagcatattttgttttaaaaacacataccattgtgtgaaaactgacatgccgattacccaacctttacttgcatggatgaacttttatgcaaggaagactagcaaggtggcatctcaagaaaagaaggctcagggcat

SEQ ID NO: 73089 - DNA, 600 bp, Chicken  19866894353888_1
ttttaacatttttttattcaggctcagtgagctaaaagttttagaaagaacagtcaaaacatggactgaactttgtatgcaactgagggtgaaaagagctgcattacctggggtggtgatgagcccatttaaacatctaagtgttcaacaggctcagagcgtaaacattacttctataggaggagacattaaattcagagcagactagggaggtatttgttctgtgttgcaccactcactgcttgctggttatatgtggtatcatgtaactttgcgtttgtagaaaggtcaggatgaccygaggactctgaggctctgaggactgtagctctgtgcaaagccccatcartgccacaactcaaccccgcttcccacatgtcagttggctcatacggctcagcctgctccagagggctcgctcctggtcagcctcattccaaaggcagagaagtagcaatggtaacgaatagtaacaaaacaactagtaagaatagaaggaaaaagaaagaaataaaatcagattgggtttccaccagtggagaaaatagactttgtgaagtctattattcatcacatgaggttttggtgtttctgtcaaga

SEQ ID NO: 73090 - DNA, 600 bp, Chicken  19866894353888_2
acagtcaaaacatggactgaactttgtatgcaactgagggtgaaaagagctgcattacctggggtggtgatgagcccatttaaacatctaagtgttcaacaggctcagagcgtaaacattacttctataggaggagacattaaattcagagcagactagggaggtatttgttctgtgttgcaccactcactgcttgctggttatatgtggtatcatgtaactttgcgtttgtagaaaggtcaggatgaccygaggactctgaggctctgaggactgtagctctgtgcaaagccccatcartgccacaactcaaccccgcttcccacatgtcagttggctcatacggctcagcctgctccagagggctcgctcctggtcagcctcattccaaaggcagagaagtagcaatggtaacgaatagtaacaaaacaactagtaagaatagaaggaaaaagaaagaaataaaatcagattgggtttccaccagtggagaaaatagactttgtgaagtctattattcatcacatgaggttttggtgtttctgtcaagacttggagtccagtgcctagctctggtgatagttttctgagtactgctat

SEQ ID NO: 73091 - DNA, 600 bp, Chicken  19866894353891_1
ctaaacagtgaggtacattcaactgctgcaattgctcatatcttttctactttatatttgactgtttcataaatatctcacgtccttcttgcctctaatgagagaagaaaagctaattgcaagtatttgcaaagcaagaacaaaatagtaaactcagactctgagatgaattattgacatgtgttaattttctccagaggtatttcttcaccaccatatatgtttgtagtttacagtaagaattctctttcagcactcaaattaggattacagtaattacttcccagctagttcatcttrccagcagtctcacgaagaagtgtgtcaatgaatgtcaaaccataactttagatagattctaattattgcagtctgtacaaaagtggcagaatttttactcactgaacagcagtctgtaggatcacagagccacatcacttgctgaagcactatctcagtttccaatagggaacagagacagagaagctaaaygatttgtttaaagacaatggtgcacgtcaatggtgaagcagggatttgaaagaaggaaatagccattttcatcccagagtcaattcacgtacaggtgctgcctctaaa

SEQ ID NO: 73092 - DNA, 563 bp, Chicken  19866894353891_2
tccagaggtatttcttcaccaccatatatgtttgtagtttacagtaagaattctctttcagcactcaaattaggattacagtaattacttcccagctagttcatcttrccagcagtctcacgaagaagtgtgtcaatgaatgtcaaaccataactttagatagattctaattattgcagtctgtacaaaagtggcagaatttttactcactgaacagcagtctgtaggatcacagagccacatcacttgctgaagcactatctcagtttccaatagggaacagagacagagaagctaaaygatttgtttaaagacaatggtgcacgtcaatggtgaagcagggatttgaaagaaggaaatagccattttcatcccagagtcaattcacgtacaggtgctgcctctaaatgaatttttcaagtccagttacaaaacaaaagttttccaactaacaaacgtattgcaaatacaggagtccaataagtggcaaagaaatgggagaaattttttagcctcgcagattagattgcagcctgataagaaagcaaaagaaagccggatta

SEQ ID NO: 73093 - DNA, 599 bp, Chicken  19866894353894_1
  misc_feature (1)..(173): n is any nucleotide
nnnnnnnnnnnnnnnnnnnnnnnnnnnnnnnnnnnnnnnnnnnnnnnnnnnnnnnnnnnnnnnnnnnnnnnnnnnnnnnnnnnnnnnnnnnnnnnnnnnnnnnnnnnnnnnnnnnnnnnnnnnnnnnnnnnnnnnnnnnnnnnnnnnnnnnnnnnnnnnnnnnnnnnnnnnnntgctgggctccagccccctgcacacttttgacatagttgctttattttcttgatgtctttccaaagttagtgtcccaaagtagaagtttttattttgttcttcttaatatctcagctcctcagcccmaaagctrgaagacatttgttttttgtttcattttcttcttctcttctttaagttaggaktgtacctgagcatgactgaactgtcttctccctgccatagcacccttccctgccattcaacaatgtgctctttgcattacaagtggccatttttagagacaataaacatggtggcaacaagatgaccyatgtgagctgacccaatttgtgctagaactgggagagaaaaactgtcagagcgggaacgtaataccctgtactttacaatgaagacctaggttaacccagaatgagacaacg

SEQ ID NO: 73094 - DNA, 599 bp, Chicken  19866894353894_2
  misc_feature (1)..(166): n is any nucleotide
nnnnnnnnnnnnnnnnnnnnnnnnnnnnnnnnnnnnnnnnnnnnnnnnnnnnnnnnnnnnnnnnnnnnnnnnnnnnnnnnnnnnnnnnnnnnnnnnnnnnnnnnnnnnnnnnnnnnnnnnnnnnnnnnnnnnnnnnnnnnnnnnnnnnnnnnnnnnnnnnnnnnnntgctgggctccagccccctgcacacttttgacatagttgctttattttcttgatgtctttccaaagttagtgtcccaaagtagaagtttttattttgttcttcttaatatctcagctcctcagcccmaaagctrgaagacatttgttttttgtttcattttcttcttctcttctttaagttaggaktgtacctgagcatgactgaactgtcttctccctgccatagcacccttccctgccattcaacaatgtgctctttgcattacaagtggccatttttagagacaataaacatggtggcaacaagatgaccyatgtgagctgacccaatttgtgctagaactgggagagaaaaactgtcagagcgggaacgtaataccctgtactttacaatgaagacctaggttaacccagaatgagacaacgacaactg

SEQ ID NO: 73095 - DNA, 599 bp, Chicken  19866894353894_3
  misc_feature (1)..(114): n is any nucleotide
nnnnnnnnnnnnnnnnnnnnnnnnnnnnnnnnnnnnnnnnnnnnnnnnnnnnnnnnnnnnnnnnnnnnnnnnnnnnnnnnnnnnnnnnnnnnnnnnnnnnnnnnnnnnnnnnnntgctgggctccagccccctgcacacttttgacatagttgctttattttcttgatgtctttccaaagttagtgtcccaaagtagaagtttttattttgttcttcttaatatctcagctcctcagcccmaaagctrgaagacatttgttttttgtttcattttcttcttctcttctttaagttaggaktgtacctgagcatgactgaactgtcttctccctgccatagcacccttccctgccattcaacaatgtgctctttgcattacaagtggccatttttagagacaataaacatggtggcaacaagatgaccyatgtgagctgacccaatttgtgctagaactgggagagaaaaactgtcagagcgggaacgtaataccctgtactttacaatgaagacctaggttaacccagaatgagacaacgacaactggtctgtatcatgaccctatttagatattccttcaaaactggatgatagatgg

SEQ ID NO: 73096 - DNA, 600 bp, Chicken  19866894353894_4
cccctgcacacttttgacatagttgctttattttcttgatgtctttccaaagttagtgtcccaaagtagaagtttttattttgttcttcttaatatctcagctcctcagcccmaaagctrgaagacatttgttttttgtttcattttcttcttctcttctttaagttaggaktgtacctgagcatgactgaactgtcttctccctgccatagcacccttccctgccattcaacaatgtgctctttgcattacaagtggccatttttagagacaataaacatggtggcaacaagatgaccyatgtgagctgacccaatttgtgctagaactgggagagaaaaactgtcagagcgggaacgtaataccctgtactttacaatgaagacctaggttaacccagaatgagacaacgacaactggtctgtatcatgaccctatttagatattccttcaaaactggatgatagatggagatgagcagaaagaagttttgtttcatgaaatttcctactagtctgatatacatattttttccattacaccaaaaaatatcctcccaatattttgggtaatgttttccctagaactgaacttggtctt

SEQ ID NO: 73097 - DNA, 600 bp, Chicken  19866894353906_1
cagggtgccatctctgtccttacatagccacagcaggcctcagagagcagcctgctgattcaaacatcttacattatttataacagcaacgtgcaaagtactttcttaataattaatcccctctcagacaataccaaattacagctcctgtgtgcactagctatttttgtttggaatgttaatggactggtcacttgaaaatgatggcatccaaaaggtccacacaaggtgttccagcatggctcaaatactggctgtttcagtagtctcaccatcaacctcatccccaccagcaggatmagaattgattttaacaagaaagartgagtttgtttgcaatataatgaatgagcaaagcacttgatagtcattgaatattgtgtttgctcagacttgtcatagtttttacattattcgcctgtagaagagcagctagaactcagcacatccttattccttctggaaaatatttctgcagccctttctgcctctacaaggattttcctatgcgcaagaaactgaattctcaatcagtaaccagtggcagctttacaaacaggacacaatccccattcacacatactaraaaagtttgtttta

SEQ ID NO: 73098 - DNA, 600 bp, Chicken  19866894353906_2
tagccacagcaggcctcagagagcagcctgctgattcaaacatcttacattatttataacagcaacgtgcaaagtactttcttaataattaatcccctctcagacaataccaaattacagctcctgtgtgcactagctatttttgtttggaatgttaatggactggtcacttgaaaatgatggcatccaaaaggtccacacaaggtgttccagcatggctcaaatactggctgtttcagtagtctcaccatcaacctcatccccaccagcaggatmagaattgattttaacaagaaagartgagtttgtttgcaatataatgaatgagcaaagcacttgatagtcattgaatattgtgtttgctcagacttgtcatagtttttacattattcgcctgtagaagagcagctagaactcagcacatccttattccttctggaaaatatttctgcagccctttctgcctctacaaggattttcctatgcgcaagaaactgaattctcaatcagtaaccagtggcagctttacaaacaggacacaatccccattcacacatactaraaaagtttgttttacctctttgtgaagcatgtccaaag

SEQ ID NO: 73099 - DNA, 600 bp, Chicken  19866894353906_3
ccaccagcaggatmagaattgattttaacaagaaagartgagtttgtttgcaatataatgaatgagcaaagcacttgatagtcattgaatattgtgtttgctcagacttgtcatagtttttacattattcgcctgtagaagagcagctagaactcagcacatccttattccttctggaaaatatttctgcagccctttctgcctctacaaggattttcctatgcgcaagaaactgaattctcaatcagtaaccagtggcagctttacaaacaggacacaatccccattcacacatactaraaaagtttgttttacctctttgtgaagcatgtccaaagctacttgaatattataggtgtagttttcaggagaatagcgtatctgttgaaataagaggactgagctttattgtcaatcagtttactcaagcaggcacaacagtgacaatttggcatctgtcagagcagtgttcacattctaattcttgggtcactggtaacagagtcccatgcaaactttctctgtctctgcttttcttctttcctatcacagttgtcttatttattcacaataaaagaggtagtggcgaggcagcaaatt

SEQ ID NO: 73100 - DNA, 600 bp, Chicken  19866894353906_4
atatcccttcgtttatcatgtcattaaggtgaacagtctcaacgctgctgcacaaggtagccaagttcactctgcgggcagcgggtgacttacaggatcttcgcagaatttacataggtcgtttcctcctatgaaaagcgttataagcttccagtcagactgcatatttattctctgtgcacagaaagagacggaatggaagttatgaggaaagaaagtaaaataaaatgaagaccaggcaacagactaaacacaaatataatatttttcaggcaacctggtattacctctaagcgtctycatgacaaaagaacttgtagtcacaactgtgaggatgtacaaacaactgtgatctaaataaggtttacagtatcaatagtatcatgcaaaattattggtttctgaaaactattgctcaaaaatccatctgcatgcttttttttttttgccttttttttttttttccctcttgtgtcagtcttgggtatacactgactgactcctccagcagctttgggaatacgtcttcattgcagaaatgatggtatgtgttttactgtgtcataaataatgcagctatcctgctggaaaacccaggag

SEQ ID NO: 73101 - DNA, 465 bp, Chicken  19866894353909_1
ctgcagatcaggctcttgggcatctgtgagtgattgctgagggtatgtgaaggcagcatttaaataatgcagaaaagacctgtttctttagctggctgttgtgttgtcatcagctaagaagcggaatgcagcagaaagcagtgatgtcctcctgatgtgtgcatctggttgcctgtgggcttttctgcagaggttgatgtcactgctgccacctcattagctggatgtccttctgcctctcctctctctaaagaaagacagataaataaatgcacaattcccatttctgaatagtgagarggggtgacagaaatcccctgagaaccacacacttgtcacagtcctgtagtggtgccattgtaattggctgagttaaacctcctcactggatccccagtgaaccttctacaacaagggggggtaaatgggctgctgaagtctgagggcaataagttgctgaacacc

SEQ ID NO: 73102 - DNA, 599 bp, Chicken  19866894353936_1
  misc_feature (1)..(216): n is any nucleotide
nnnnnnnnnnnnnnnnnnnnnnnnnnnnnnnnnnnnnnnnnnnnnnnnnnnnnnnnnnnnnnnnnnnnnnnnnnnnnnnnnnnnnnnnnnnnnnnnnnnnnnnnnnnnnnnnnnnnnnnnnnnnnnnnnnnnnnnnnnnnnnnnnnnnnnnnnnnnnnnnnnnnnnnnnnnnnnnnnnnnnnnnnnnnnnnnnnnnnnnnnnnnnnnnnnnnnnnnaaacatgcatgggatagtttaagtaatgtgaccttgcctccttggtgtggttgaagctcttcaccttgaagctcactgtgctayaratgccccagaagaaaagcacttactccaagtcagctggctccgggtttggctgtgctcacactgtcagccatccccaaacagttctagacatacattcagccacgctggattgctgcacagctgagcaaccgacggagcttttctgcccttatcctcacttctcacagcatttacagaagcctgagagatagcaaaaccacaataaagtaactgggataagcccctggtgactaagcagcagcttaattagagcaagtaacgcaaatgggaggaaacccagtgctggcagcaaaaag

SEQ ID NO: 73103 - DNA, 599 bp, Chicken  19866894353936_2
  misc_feature (1)..(214): n is any nucleotide
nnnnnnnnnnnnnnnnnnnnnnnnnnnnnnnnnnnnnnnnnnnnnnnnnnnnnnnnnnnnnnnnnnnnnnnnnnnnnnnnnnnnnnnnnnnnnnnnnnnnnnnnnnnnnnnnnnnnnnnnnnnnnnnnnnnnnnnnnnnnnnnnnnnnnnnnnnnnnnnnnnnnnnnnnnnnnnnnnnnnnnnnnnnnnnnnnnnnnnnnnnnnnnnnnnnnnnaaacatgcatgggatagtttaagtaatgtgaccttgcctccttggtgtggttgaagctcttcaccttgaagctcactgtgctayaratgccccagaagaaaagcacttactccaagtcagctggctccgggtttggctgtgctcacactgtcagccatccccaaacagttctagacatacattcagccacgctggattgctgcacagctgagcaaccgacggagcttttctgcccttatcctcacttctcacagcatttacagaagcctgagagatagcaaaaccacaataaagtaactgggataagcccctggtgactaagcagcagcttaattagagcaagtaacgcaaatgggaggaaacccagtgctggcagcaaaaagtg

SEQ ID NO: 73104 - DNA, 600 bp, Chicken  19866894353936_3
ctcacactgtcagccatccccaaacagttctagacatacattcagccacgctggattgctgcacagctgagcaaccgacggagcttttctgcccttatcctcacttctcacagcatttacagaagcctgagagatagcaaaaccacaataaagtaactgggataagcccctggtgactaagcagcagcttaattagagcaagtaacgcaaatgggaggaaacccagtgctggcagcaaaaagtgatctttatattccatttgtacaactgcaacacgtcctgatcccgaaccagggcagygctgtcgaggaagcagacaaacaggtaaaggatctcatgctccagaatgagcagtggagctcacaaagccctgctgccagcaacccttcccctatcagcccttcagcccaaagcatttcctcatgcataaaaccaccccttgtggattaaaaatggatttttgtagtaggtttctttagmactccttatacctgtctcacttggaggctcctaaaatgtgacccacrggcaacagacaacttcagcaggktctgttactaactaaaaatgtccgtatcctcctaccacttccacacgtgc

SEQ ID NO: 73105 - DNA, 600 bp, Chicken  19866894353936_4
gcagcagcttaattagagcaagtaacgcaaatgggaggaaacccagtgctggcagcaaaaagtgatctttatattccatttgtacaactgcaacacgtcctgatcccgaaccagggcagygctgtcgaggaagcagacaaacaggtaaaggatctcatgctccagaatgagcagtggagctcacaaagccctgctgccagcaacccttcccctatcagcccttcagcccaaagcatttcctcatgcataaaaccaccccttgtggattaaaaatggatttttgtagtaggtttctttagmactccttatacctgtctcacttggaggctcctaaaatgtgacccacrggcaacagacaacttcagcaggktctgttactaactaaaaatgtccgtatcctcctaccacttccacacgtgctgctaagcttcactaacaaaaaccatacctaaaatccttggtattaaccaaaagaacacacttttgctcagaacttttcccaagcttaatggaaaagtgcaagtacaattaaatggggaaaaaaggggtaaaaacccacctcataaaaaacaaccccgccaaacacttgggagaaatctg

SEQ ID NO: 73106 - DNA, 600 bp, Chicken  19866894353936_5
gctggcagcaaaaagtgatctttatattccatttgtacaactgcaacacgtcctgatcccgaaccagggcagygctgtcgaggaagcagacaaacaggtaaaggatctcatgctccagaatgagcagtggagctcacaaagccctgctgccagcaacccttcccctatcagcccttcagcccaaagcatttcctcatgcataaaaccaccccttgtggattaaaaatggatttttgtagtaggtttctttagmactccttatacctgtctcacttggaggctcctaaaatgtgacccacrggcaacagacaacttcagcaggktctgttactaactaaaaatgtccgtatcctcctaccacttccacacgtgctgctaagcttcactaacaaaaaccatacctaaaatccttggtattaaccaaaagaacacacttttgctcagaacttttcccaagcttaatggaaaagtgcaagtacaattaaatggggaaaaaaggggtaaaaacccacctcataaaaaacaaccccgccaaacacttgggagaaatctgcagcaggttcagtttgtaacaccagcactcccaccatctcacttctt

SEQ ID NO: 73107 - DNA, 586 bp, Chicken  19866894353936_6
atattccatttgtacaactgcaacacgtcctgatcccgaaccagggcagygctgtcgaggaagcagacaaacaggtaaaggatctcatgctccagaatgagcagtggagctcacaaagccctgctgccagcaacccttcccctatcagcccttcagcccaaagcatttcctcatgcataaaaccaccccttgtggattaaaaatggatttttgtagtaggtttctttagmactccttatacctgtctcacttggaggctcctaaaatgtgacccacrggcaacagacaacttcagcaggktctgttactaactaaaaatgtccgtatcctcctaccacttccacacgtgctgctaagcttcactaacaaaaaccatacctaaaatccttggtattaaccaaaagaacacacttttgctcagaacttttcccaagcttaatggaaaagtgcaagtacaattaaatggggaaaaaaggggtaaaaacccacctcataaaaaacaaccccgccaaacacttgggagaaatctgcagcaggttcagtttgtaacaccagcactcccaccatctcacttcttgtgataacg

SEQ ID NO: 73108 - DNA, 600 bp, Chicken  19866894353937_1
gggggacaaggaggggacagggctgccagctgtgtgagtggggacatcagtagaaacacatctttcagaaggatgacaggatgaggcacaagggcacgcaagcatgctgcagttcataagagcctggcgacttgcaaatctcatccacagctcccagcccaattagtgagggtttgctctgggggctgttagcatccaccaaggcactcaggtagtcaacgtggcacccactgtgtgtggccactggtggctggcccttgccctgtgccagcaagtggccacagcctgtggtcatcgtcygtcagcagcacctccatggtgacttagtgccgtctgctagtggcaaagcrtgctaatctgtgtcgaggtggggaacagagattgagcaatagcagtgtcagaagcagacacctctctggggagctggtcactccctgagtccctattaaatagttagcacacggctgggagtcacttgacaggaccatccctgtctatcagcctgtgagcatgctcgtgtggatttatggtcctcacaccctttagaccacccctgagaaatacccatccaaacaaaaatcacccatgacccttggcttt

SEQ ID NO: 73109 - DNA, 600 bp, Chicken  19866894353937_2
tagaaacacatctttcagaaggatgacaggatgaggcacaagggcacgcaagcatgctgcagttcataagagcctggcgacttgcaaatctcatccacagctcccagcccaattagtgagggtttgctctgggggctgttagcatccaccaaggcactcaggtagtcaacgtggcacccactgtgtgtggccactggtggctggcccttgccctgtgccagcaagtggccacagcctgtggtcatcgtcygtcagcagcacctccatggtgacttagtgccgtctgctagtggcaaagcrtgctaatctgtgtcgaggtggggaacagagattgagcaatagcagtgtcagaagcagacacctctctggggagctggtcactccctgagtccctattaaatagttagcacacggctgggagtcacttgacaggaccatccctgtctatcagcctgtgagcatgctcgtgtggatttatggtcctcacaccctttagaccacccctgagaaatacccatccaaacaaaaatcacccatgacccttggctttgacttggtgacctctccctttcccttgcacatgccctgtctgcctgtgat

SEQ ID NO: 73110 - DNA, 470 bp, Chicken  19866894353940_1
cagtgggtagcactggacaattgttttgtagacacccaaggatgcaaaggagactattttagcaggggaagtcagtggtcaggctatgggatggtaagctcagcattgtagaaagattcagcttgatgtgactttccttgctgcctagaaatggccagtgagtaagctcagaggcttcacccagctactagtataagcattcccaaacaggaattgaaaagtctcttttgccatatgattctagacagaaacagatttttggtggtattattgtcaacttccagtgaatgcataacataytgtagccatagtttgccccagatagtcttgtatttacaaaatctttcctgaagagacatccatatcaggagctggcaggaatgactgagggctgatggcccattccgtcatatcaggtagagggctttcctccgtatttattatgttcagttctcattgcatttcgcata

SEQ ID NO: 73111 - DNA, 600 bp, Chicken  19866894353946_1
atgtaacttttaccaacctttaaaatactgatcatgaatgagtcactgtttctcaagggttttggtcagctgttccagtttactggtctggaatctcacttctaccatccagtctctctgaacttccatttgtttgtttaaaagctgcatttaccatctttactgagagaagctgtcatagcaccagggttggaaatccactgtaatagttgctacttacatacgtagggagacagagcacctacttttgcagatctgttattgaactgttttcctgctttggtgcagttccttagggcygtgatttctcatcatggcagttttataattgcaacctcccyagcatcaygcgaagggtgtttttgctgcaagaaggtggtgaggagcgcattgctggaagcttccttccttcacccccaccctctctcagaatcaccccagtccatcccgtacaagctggctagtgccacccccctgatggatatgcactgctcatccacctcttgagtgaatgcccatgcctgacacmcaggccacagagcagggtgagccccagaatcctgtgggatgcccatggggaagcctgggagccaccgcctg

SEQ ID NO: 73112 - DNA, 600 bp, Chicken  19866894353946_2
gtcactgtttctcaagggttttggtcagctgttccagtttactggtctggaatctcacttctaccatccagtctctctgaacttccatttgtttgtttaaaagctgcatttaccatctttactgagagaagctgtcatagcaccagggttggaaatccactgtaatagttgctacttacatacgtagggagacagagcacctacttttgcagatctgttattgaactgttttcctgctttggtgcagttccttagggcygtgatttctcatcatggcagttttataattgcaacctcccyagcatcaygcgaagggtgtttttgctgcaagaaggtggtgaggagcgcattgctggaagcttccttccttcacccccaccctctctcagaatcaccccagtccatcccgtacaagctggctagtgccacccccctgatggatatgcactgctcatccacctcttgagtgaatgcccatgcctgacacmcaggccacagagcagggtgagccccagaatcctgtgggatgcccatggggaagcctgggagccaccgcctgaaagggtgggttcacgcttggctctcaggcttctgctcaga

SEQ ID NO: 73113 - DNA, 600 bp, Chicken  19866894353946_3
ttctcaagggttttggtcagctgttccagtttactggtctggaatctcacttctaccatccagtctctctgaacttccatttgtttgtttaaaagctgcatttaccatctttactgagagaagctgtcatagcaccagggttggaaatccactgtaatagttgctacttacatacgtagggagacagagcacctacttttgcagatctgttattgaactgttttcctgctttggtgcagttccttagggcygtgatttctcatcatggcagttttataattgcaacctcccyagcatcaygcgaagggtgtttttgctgcaagaaggtggtgaggagcgcattgctggaagcttccttccttcacccccaccctctctcagaatcaccccagtccatcccgtacaagctggctagtgccacccccctgatggatatgcactgctcatccacctcttgagtgaatgcccatgcctgacacmcaggccacagagcagggtgagccccagaatcctgtgggatgcccatggggaagcctgggagccaccgcctgaaagggtgggttcacgcttggctctcaggcttctgctcagagcgtggcc

SEQ ID NO: 73114 - DNA, 596 bp, Chicken  19866894353946_4
gagacagagcacctacttttgcagatctgttattgaactgttttcctgctttggtgcagttccttagggcygtgatttctcatcatggcagttttataattgcaacctcccyagcatcaygcgaagggtgtttttgctgcaagaaggtggtgaggagcgcattgctggaagcttccttccttcacccccaccctctctcagaatcaccccagtccatcccgtacaagctggctagtgccacccccctgatggatatgcactgctcatccacctcttgagtgaatgcccatgcctgacacmcaggccacagagcagggtgagccccagaatcctgtgggatgcccatggggaagcctgggagccaccgcctgaaagggtgggttcacgcttggctctcaggcttctgctcagagcgtggcccctcaccgcgagcagtggtgagaggcacccctaatgaggtccctcgctgctcactggaccagtgtggttttaagtcttaataacgcaaggctattttgttagcagctttactttccaagtcttttccccttccagcacccctaggtacggctctacggatcagttaccatctgctc

SEQ ID NO: 73115 - DNA, 599 bp, Chicken  19866894353949_1
  misc_feature (1)..(38): n is any nucleotide
nnnnnnnnnnnnnnnnnnnnnnnnnnnnnnnnnnnnnngtattaccattttgcagatctgaactcataaaaacagcaaacaaagtttgttatttccttcccccattccccaccattattgtatgcattaaaattaatgttttttaaaagcaacagaatctctgcaacagtattataaggatgtctctttttgtctggaaaagcatatttgaatataacttaaaaaaatcacgcagggactttacagacagaagtgatgaaatgggaagacggtgtcaaagtgaggcattcagaccagccycattatctttcaaaagcaagggaaacctcaaatgtctcagtatttttcctataagaaggcctcatatttctgccagcagcacttctccttagagggtgcctggtaaagtgtgcattttcctgaaaagcaacaggctttttgttaattcattagcatcgctcagcagtggcagtatgtgggcagggattaaccccccggcccggccagctggcctacacatcctccttcagaaggcaggcacactgcccaaacctccaacaaaacaaaggcagatgcagaactaacgcacagagggaaac

SEQ ID NO: 73116 - DNA, 600 bp, Chicken  19866894353949_2
ccaccattattgtatgcattaaaattaatgttttttaaaagcaacagaatctctgcaacagtattataaggatgtctctttttgtctggaaaagcatatttgaatataacttaaaaaaatcacgcagggactttacagacagaagtgatgaaatgggaagacggtgtcaaagtgaggcattcagaccagccycattatctttcaaaagcaagggaaacctcaaatgtctcagtatttttcctataagaaggcctcatatttctgccagcagcacttctccttagagggtgcctggtaaaytgtgcattttcctgaaaagcaacaggctttttgttaattcattagcatcgctcagcagtggcagtatgtgggcagggattaaccccccggcccggccagctggcctacacatcctccttcagaaggcaggcacactgcccaaacctccaacaaaacaaaggcagatgcagaactaacgcacagagggaaacgccagttttgtacccaaacttctgctctgttattgatgrgttttaggacttgggtacatcccacacaaggaggcaacatgtgttgtgcctcttgtcctcctcctgcccg

SEQ ID NO: 73117 - DNA, 600 bp, Chicken  19866894353949_3
caccattattgtatgcattaaaattaatgttttttaaaagcaacagaatctctgcaacagtattataaggatgtctctttttgtctggaaaagcatatttgaatataacttaaaaaaatcacgcagggactttacagacagaagtgatgaaatgggaagacggtgtcaaagtgaggcattcagaccagccycattatctttcaaaagcaagggaaacctcaaatgtctcagtatttttcctataagaaggcctcatatttctgccagcagcacttctccttagagggtgcctggtaaagygtgcattttcctgaaaagcaacaggctttttgttaattcattagcatcgctcagcagtggcagtatgtgggcagggattaaccccccggcccggccagctggcctacacatcctccttcagaaggcaggcacactgcccaaacctccaacaaaacaaaggcagatgcagaactaacgcacagagggaaacgccagttttgtacccaaacttctgctctgttattgatgrgttttaggacttgggtacatcccacacaaggaggcaacatgtgttgtgcctcttgtcctcctcctgcccgt

SEQ ID NO: 73118 - DNA, 482 bp, Chicken  19866894353949_4
agtatttttcctataagaaggcctcatatttctgccagcagcacttctccttagagggtgcctggtaaagtgtgcattttcctgaaaagcaacaggctttttgttaattcattagcatcgctcagcagtggcagtatgtgggcagggattaaccccccggcccggccagctggcctacacatcctccttcagaaggcaggcacactgcccaaacctccaacaaaacaaaggcagatgcagaactaacgcacagagggaaacgccagttttgtacccaaacttctgctctgttattgatgrgttttaggacttgggtacatcccacacaaggaggcaacatgtgttgtgcctcttgtcctcctcctgcccgtcttctcactgtgctgctagcagacatatgagggacgatttttgagagcgtagcggacaaaatggtcacagcctgtcctccagcacacatttctaataccagagacaacatt

SEQ ID NO: 73119 - DNA, 600 bp, Chicken  19866894353955_1
aaagaatccctttacagtcaatacttgagcaaaaactttaaaaccaatcttcagactgatcgccagttgtcatcaaagtaataataccagattttttacaggagaatttagcatgagggatgtgcctgaaatataaaattagatatcatgtaacaggtgctaatgctgcagggaaaatcaggtagaatatcactagtgcaatttaacaagcagaggaaacacgtccctctttgacaagagtaaagaaaaaaagtatttgaaaaaaaaaattagccatcttaatagagaatacctcacttytcaaaattttatgctttcagtttatttcagtctgttgtgacctatgggaagaaaacagtaagaaaaactctcctgtcaatttgacatgcagtttttacaataaaaagcagaagtccaactctccttcagtgtaacaacacagaaacaattctggtgaaaatgcttgcatttatcttgggtgtgaaaacataaaggaagctagcatgagttaaataattgcagtgtaactaaacgtatcaagacttaaaatttttgaagttccactttaatttttgttacagttggagccatttacatcca

SEQ ID NO: 73120 - DNA, 599 bp, Chicken  19866894353957_1
  misc_feature (1)..(220): n is any nucleotide
nnnnnnnnnnnnnnnnnnnnnnnnnnnnnnnnnnnnnnnnnnnnnnnnnnnnnnnnnnnnnnnnnnnnnnnnnnnnnnnnnnnnnnnnnnnnnnnnnnnnnnnnnnnnnnnnnnnnnnnnnnnnnnnnnnnnnnnnnnnnnnnnnnnnnnnnnnnnnnnnnnnnnnnnnnnnnnnnnnnnnnnnnnnnnnnnnnnnnnnnnnnnnnnnnnnnnnnnnnnnacttagaggggaaggtgttctcttgaaaatgaattcctttgagataaccttcttagtatgctgaaagcttagaggaaacrcggagattctggtacacacaaaccaagtctgtacgtaaggtactttcttttatgggaaaagtggaaaacaaaaacctaaaatgctttaaagcaaagcttagagaattgtctcacagtgtatctcgtaaaggttgaggagaatgaggttttgtgtgggatggccgagtgtgaacctatacatacctgtaagcgtagtacatgttttgagaggccatggcctctgaactaacttgctgttctggaaattaacaaagctattttgaacacacagcctttaacaattaaggctttccatgtct

SEQ ID NO: 73121 - DNA, 600 bp, Chicken  19866894353965_1
ctttctttctgaggcatcgtttccaaactctaattcccatacagtgacgtttatagagaacgcctatgaggacaagtggaacattcatcacagcctatgagagagacagtgttctcaccttcagcgtttcattaaattctggattggtgctgttactcttaattttggtcttgcgtttactttggcgggacttatcaggcagaaggtatgctttgacgtatctgtagaccaagaagtgagtattaatgaggaatataaacaaacaatctgagcaaggacctgccatttctgcatgagcawcaggtatgaggaaatgcatttctgcagtctaaagaatgtacatatgtaacagccagtatgtgaaacatggaaaggtatggtctttctgcacaaacacagcagtgctggtcttataggatcagaataacacaaaggtagggctawawcaatttactcattctcagaaacacagaaaactttcctaacactttctcttttgcaatattatgatttttgactggttatatatgacaatgtacatccagaaaatacctgagaatgaaaaaattcatatctgacatacaacaggattagagatga

SEQ ID NO: 73122 - DNA, 531 bp, Chicken  19866894353965_2
tggtgctgttactcttaattttggtcttgcgtttactttggcgggacttatcaggcagaaggtatgctttgacgtatctgtagaccaagaagtgagtattaatgaggaatataaacaaacaatctgagcaaggacctgccatttctgcatgagcawcaggtatgaggaaatgcatttctgcagtctaaagaatgtacatatgtaacagccagtatgtgaaacatggaaaggtatggtctttctgcacaaacacagcagtgctggtcttataggatcagaataacacaaaggtagggctawawcaatttactcattctcagaaacacagaaaactttcctaacactttctcttttgcaatattatgatttttgactggttatatatgacaatgtacatccagaaaatacctgagaatgaaaaaattcatatctgacatacaacaggattagagatgatgaaatatactattcattcctgatctatgagaattgacatattatgctgaaaaatatcatgtgaatcccagaaaa

SEQ ID NO: 73123 - DNA, 529 bp, Chicken  19866894353965_3
gtgctgttactcttaattttggtcttgcgtttactttggcgggacttatcaggcagaaggtatgctttgacgtatctgtagaccaagaagtgagtattaatgaggaatataaacaaacaatctgagcaaggacctgccatttctgcatgagcawcaggtatgaggaaatgcatttctgcagtctaaagaatgtacatatgtaacagccagtatgtgaaacatggaaaggtatggtctttctgcacaaacacagcagtgctggtcttataggatcagaataacacaaaggtagggctawawcaatttactcattctcagaaacacagaaaactttcctaacactttctcttttgcaatattatgatttttgactggttatatatgacaatgtacatccagaaaatacctgagaatgaaaaaattcatatctgacatacaacaggattagagatgatgaaatatactattcattcctgatctatgagaattgacatattatgctgaaaaatatcatgtgaatcccagaaaa

SEQ ID NO: 73124 - DNA, 600 bp, Chicken  19866894353968_1
atgatgtttctggctcaaaaaagcttaaaaaaaaaacagcagaaggcagcagtgaagctgattatcaacaagggagaaagatctttctattgcagtgaaatccagaaagaaattaagaatctactgccacatgttcttcacagaggaaacagaagggaaagaacagctccattttctagtttgctcttaagatggtagatgcttcatacagaaaatttattggatcattgaccagtacaaaacagcagcaacctgctgatttttggcaaattcaactcacttagtattgatctttgcctrgtaacataatagaatcagccatgcactttgtctttcttagctgcactgggttgctggctcagctctcatttttcaaattctcagtatgccaatgtgtttcaagctaactgtgtgttttcatacaattaataaagcaatggttgaggatcaaggactgcaggattttgatagattstgtaccagataatatattacagaaacatgaaaaagctttgaaatcaaagaactctggaaagacttctgatatatttagagactttcttttaatcttttttttctcctccttggtaagttgatttt

SEQ ID NO: 73125 - DNA, 556 bp, Chicken  19866894353968_2
ctagtttgctcttaagatggtagatgcttcatacagaaaatttattggatcattgaccagtacaaaacagcagcaacctgctgatttttggcaaattcaactcacttagtattgatctttgcctrgtaacataatagaatcagccatgcactttgtctttcttagctgcactgggttgctggctcagctctcatttttcaaattctcagtatgccaatgtgtttcaagctaactgtgtgttttcatacaattaataaagcaatggttgaggatcaaggactgcaggattttgatagattstgtaccagataatatattacagaaacatgaaaaagctttgaaatcaaagaactctggaaagacttctgatatatttagagactttcttttaatcttttttttctcctccttggtaagttgattttgaactcagcttatccactttttttccagttagaatgggcacttgaagaaaatagattatgacttgctacacaaagccttactttgctagttcacactacttgcactgctggattaatacccaagcaatcga

SEQ ID NO: 73126 - DNA, 600 bp, Chicken  19866894353973_1
gaaccctttaccaactgactgtattgtgtcatgtgtgattttttttaatttactacttaacaatttttttcttatttatgtctcatagaggtcacagatcataatggtataactttgatctgtagaagtctgtaacactcttaagaaccctatgttcatagagaatgcttgttaaaagaaatactgagataaaccttgtctttatgtattagtctacaattatagaattgcttgggtgaaaaaagctacctaccatatgtgagctttcgctcaattccttatccacagctatcagacatrgtatgggtgagacgtgagagtatgtcattatgtactttggaaatcatcttaactgaaatggtcactccaccaaattaagacattcttaactctgaggatttctttcttttcaataaaaagtgagaggaggaaataacattgaaattttcatctcgtgctggttatagggctgtttggaagtgctttgtcttaatgggtagtgttgtaaaggtgcagaaaattcccctttacagtccctcctgccaagtctcagaggactaagctaaaactagtcattgtaaacacaagatgaggcaagaa

SEQ ID NO: 73127 - DNA, 600 bp, Chicken  19866894353975_1
ctctactcaagatttaacaaaatcttttaagtcccatgacattttatttcacaatagcaatttaccctaaatcctatgtactaatggctaaaaatggtcacccactttttaatacaccataatccaagtttaaacctaaaacaagttcaataaggtattaaaatactttcctatcttaaaacaaataagctgataaataagatgattctagactttgttaggacacccttccttataataaatttctattccatacaaacatttttcttttcaaattttccactgattaatatggtaacrttgagaataatattgatttccagtcttgcaaagcatttctayttatatttaagatttggtgactttggaayaccagggtctttgtgaataataggaaagttttaagccttatatactaagaaaggatcctcaagaaaccaatgttctttggataaggtggagatattctttcttactaaagaaaccactcacatgcatttaattgctgatgggtttctgaagaatggtatggacagttatatttcatttaccagaacaaaggaaaagaaaatatgcaaaagccaaaataaaacaaaaaca

SEQ ID NO: 73128 - DNA, 600 bp, Chicken  19866894353975_2
tttatttcacaatagcaatttaccctaaatcctatgtactaatggctaaaaatggtcacccactttttaatacaccataatccaagtttaaacctaaaacaagttcaataaggtattaaaatactttcctatcttaaaacaaataagctgataaataagatgattctagactttgttaggacacccttccttataataaatttctattccatacaaacatttttcttttcaaattttccactgattaatatggtaacrttgagaataatattgatttccagtcttgcaaagcatttctayttatatttaagatttggtgactttggaayaccagggtctttgtgaataataggaaagttttaagccttatatactaagaaaggatcctcaagaaaccaatgttctttggataaggtggagatattctttcttactaaagaaaccactcacatgcatttaattgctgatgggtttctgaagaatggtatggacagttatatttcatttaccagaacaaaggaaaagaaaatatgcaaaagccaaaataaaacaaaaacatctccacaaaaggaacaaaacaaaacaaaaatatgttctgat

SEQ ID NO: 73129 - DNA, 600 bp, Chicken  19866894353975_3
tcctatgtactaatggctaaaaatggtcacccactttttaatacaccataatccaagtttaaacctaaaacaagttcaataaggtattaaaatactttcctatcttaaaacaaataagctgataaataagatgattctagactttgttaggacacccttccttataataaatttctattccatacaaacatttttcttttcaaattttccactgattaatatggtaacrttgagaataatattgatttccagtcttgcaaagcatttctayttatatttaagatttggtgactttggaayaccagggtctttgtgaataataggaaagttttaagccttatatactaagaaaggatcctcaagaaaccaatgttctttggataaggtggagatattctttcttactaaagaaaccactcacatgcatttaattgctgatgggtttctgaagaatggtatggacagttatatttcatttaccagaacaaaggaaaagaaaatatgcaaaagccaaaataaaacaaaaacatctccacaaaaggaacaaaacaaaacaaaaatatgttctgattgttctgtaatgcactacaagagtaatac

SEQ ID NO: 73130 - DNA, 600 bp, Chicken  19866894353978_1
gaaaaattcacgacctatggagaactgccattgagttgtcaccagcttctctcaacttctccttcattttacaacttcatctcatcatctggggtactccaatgggaatgatccattcagagtctgacttcaattcaaaattgattttcctgttctaggtcagttttgttagtcaagaagttaggtgacctaattaatatctgttacatgaaatgtttaagcatggctctacagaaaactgtaggatatgtcaccaaagcttacacaaatcctgcatacttaaactatcaaagaaatctrtctatttacacccacagtgctccctgcagatccactgccataaatatatagagattaagttccttatactcacagcacccaaaaggctgggcaatttggtactctgaagaatgaataatagtgactttgcagttcccttccttatattctctggacaacttttgccttattctactaggacaatcaaagtttttatctacatccagattctttatctccagtatatacactgaaagcactcaaacacttccaataataaatccagaaaacgaaatagaaaatattagcactctattgatt

SEQ ID NO: 73131 - DNA, 599 bp, Chicken  19866894353982_1
  misc_feature (1)..(226): n is any nucleotide
nnnnnnnnnnnnnnnnnnnnnnnnnnnnnnnnnnnnnnnnnnnnnnnnnnnnnnnnnnnnnnnnnnnnnnnnnnnnnnnnnnnnnnnnnnnnnnnnnnnnnnnnnnnnnnnnnnnnnnnnnnnnnnnnnnnnnnnnnnnnnnnnnnnnnnnnnnnnnnnnnnnnnnnnnnnnnnnnnnnnnnnnnnnnnnnnnnnnnnnnnnnnnnnnnnnnnnnnnnnnnnnnnntcaaaaagacagtaagacagatgcccaattttatctcctctaagccactgcctcatctcacagtcctctccacrttgtggccaatccctttgttatagaaattcactgacccaaaccaaaaaggtcatttaatcacacccaagccattcacctactaacaccagacagcactgctgtactcctttcaactgatctcaaatcacagaactcttccaaaatgctggattaaaggagcctttttcagagagatagcaaatcttgtctgcgttccaagcagtggcaactccaccatttcctcctgcaagctgttccaaactttaattttccttgcagctaggaaaccacgtcttatttcaaggttgaatttgtccaa

SEQ ID NO: 73132 - DNA, 600 bp, Chicken  19866894353985_1
ttggttttcaccagggtacggaattccagaggcagccctactggcctgtgatattaaaaaaatgctttggacagaggagataaccctcctccaagcttttcagcctctgggttggagcttgactactccaacaagagaaaaaaaaataaccagtttgtgaaatgcaacatttccattcctagaaacagattttaggagaatttgtgagtaaatagattggaatcttcaaattctctgataccagcatatgctataacatctggttgccactggaagagggtgctcagtaccattggttcyggcaagagattggaccagcagataactcatyggggtggcaggatgccagtcagcactgscactgcaaggggctctgcggcctctgcaccacatctaggactcagtccagaaactccaggaatcagagaaccagccagacgtgtttgaaacattatctgacactccctggtgataattcagttgtgtccctttcactctgtgccatcagttctgaagggcttttttttttttactccttgaaaagctagaaaattgtgtctcatcttgtcacaagggagttcaaggaaagctggtgtatta

SEQ ID NO: 73133 - DNA, 600 bp, Chicken  19866894353985_2
gcagccctactggcctgtgatattaaaaaaatgctttggacagaggagataaccctcctccaagcttttcagcctctgggttggagcttgactactccaacaagagaaaaaaaaataaccagtttgtgaaatgcaacatttccattcctagaaacagattttaggagaatttgtgagtaaatagattggaatcttcaaattctctgataccagcatatgctataacatctggttgccactggaagagggtgctcagtaccattggttcyggcaagagattggaccagcagataactcatyggggtggcaggatgccagtcagcactgscactgcaaggggctctgcggcctctgcaccacatctaggactcagtccagaaactccaggaatcagagaaccagccagacgtgtttgaaacattatctgacactccctggtgataattcagttgtgtccctttcactctgtgccatcagttctgaagggcttttttttttttactccttgaaaagctagaaaattgtgtctcatcttgtcacaagggagttcaaggaaagctggtgtattaattagatttccttgcagcttaatcaatcatt

SEQ ID NO: 73134 - DNA, 600 bp, Chicken  19866894353985_3
aaatgctttggacagaggagataaccctcctccaagcttttcagcctctgggttggagcttgactactccaacaagagaaaaaaaaataaccagtttgtgaaatgcaacatttccattcctagaaacagattttaggagaatttgtgagtaaatagattggaatcttcaaattctctgataccagcatatgctataacatctggttgccactggaagagggtgctcagtaccattggttcyggcaagagattggaccagcagataactcatyggggtggcaggatgccagtcagcactgscactgcaaggggctctgcggcctctgcaccacatctaggactcagtccagaaactccaggaatcagagaaccagccagacgtgtttgaaacattatctgacactccctggtgataattcagttgtgtccctttcactctgtgccatcagttctgaagggcttttttttttttactccttgaaaagctagaaaattgtgtctcatcttgtcacaagggagttcaaggaaagctggtgtattaattagatttccttgcagcttaatcaatcattgctccaggcttgggatggaaaaatagca

SEQ ID NO: 73135 - DNA, 600 bp, Chicken  19866894353992_1
acaaataaaaaccaaaaagtaaacaattaatacctcatcaatattctctgtggtttaaaaacaagtaagttatgcacaagaaaaacctccagaagtgtcattagaaatgggttattaaaactctttaaatgctttatgagtccaggaggatggcacctagccagagcctgtttgctgtgaatgagtatggattatgtaaataggctgtcctgtgcaatctattgtttatttgtgtttaatttcaaaatttcccatagatctgcctttctcttttggaaactgttattattattattattwttwtytttkkkggggggggggtgtaaaattgatcagctgtaactttgaaatttcatcttgaacagttactgtgctatttaatcctgtattacttgcttaaatagttaaaagagagaaaaaaatcaaggaagaaacatggcacggctatggatagcagatagctcagaacactatctcaactgtcttttttgttgttttaaagccttagaaacgctactgaaaggaaataaagataataaagcatttttccattaaagaagagtgtcttgagtcactgggtaactaccttctgtgcaacag

SEQ ID NO: 73136 - DNA, 600 bp, Chicken  19866894353992_2
aataaaaaccaaaaagtaaacaattaatacctcatcaatattctctgtggtttaaaaacaagtaagttatgcacaagaaaaacctccagaagtgtcattagaaatgggttattaaaactctttaaatgctttatgagtccaggaggatggcacctagccagagcctgtttgctgtgaatgagtatggattatgtaaataggctgtcctgtgcaatctattgtttatttgtgtttaatttcaaaatttcccatagatctgcctttctcttttggaaactgttattattattattattwttwtytttkkkggggggggggtgtaaaattgatcagctgtaactttgaaatttcatcttgaacagttactgtgctatttaatcctgtattacttgcttaaatagttaaaagagagaaaaaaatcaaggaagaaacatggcacggctatggatagcagatagctcagaacactatctcaactgtcttttttgttgttttaaagccttagaaacgctactgaaaggaaataaagataataaagcatttttccattaaagaagagtgtcttgagtcactgggtaactaccttctgtgcaacaggaa

SEQ ID NO: 73137 - DNA, 600 bp, Chicken  19866894353992_3
taaaaaccaaaaagtaaacaattaatacctcatcaatattctctgtggtttaaaaacaagtaagttatgcacaagaaaaacctccagaagtgtcattagaaatgggttattaaaactctttaaatgctttatgagtccaggaggatggcacctagccagagcctgtttgctgtgaatgagtatggattatgtaaataggctgtcctgtgcaatctattgtttatttgtgtttaatttcaaaatttcccatagatctgcctttctcttttggaaactgttattattattattattwttwtytttkkkggggggggggtgtaaaattgatcagctgtaactttgaaatttcatcttgaacagttactgtgctatttaatcctgtattacttgcttaaatagttaaaagagagaaaaaaatcaaggaagaaacatggcacggctatggatagcagatagctcagaacactatctcaactgtcttttttgttgttttaaagccttagaaacgctactgaaaggaaataaagataataaagcatttttccattaaagaagagtgtcttgagtcactgggtaactaccttctgtgcaacaggaaaa

SEQ ID NO: 73138 - DNA, 600 bp, Chicken  19866894353992_4
aaccaaaaagtaaacaattaatacctcatcaatattctctgtggtttaaaaacaagtaagttatgcacaagaaaaacctccagaagtgtcattagaaatgggttattaaaactctttaaatgctttatgagtccaggaggatggcacctagccagagcctgtttgctgtgaatgagtatggattatgtaaataggctgtcctgtgcaatctattgtttatttgtgtttaatttcaaaatttcccatagatctgcctttctcttttggaaactgttattattattattattwttwtytttkkkggggggggggtgtaaaattgatcagctgtaactttgaaatttcatcttgaacagttactgtgctatttaatcctgtattacttgcttaaatagttaaaagagagaaaaaaatcaaggaagaaacatggcacggctatggatagcagatagctcagaacactatctcaactgtcttttttgttgttttaaagccttagaaacgctactgaaaggaaataaagataataaagcatttttccattaaagaagagtgtcttgagtcactgggtaactaccttctgtgcaacaggaaaatgaa

SEQ ID NO: 73139 - DNA, 600 bp, Chicken  19866894353992_5
accaaaaagtaaacaattaatacctcatcaatattctctgtggtttaaaaacaagtaagttatgcacaagaaaaacctccagaagtgtcattagaaatgggttattaaaactctttaaatgctttatgagtccaggaggatggcacctagccagagcctgtttgctgtgaatgagtatggattatgtaaataggctgtcctgtgcaatctattgtttatttgtgtttaatttcaaaatttcccatagatctgcctttctcttttggaaactgttattattattattattwttwtytttkkkggggggggggtgtaaaattgatcagctgtaactttgaaatttcatcttgaacagttactgtgctatttaatcctgtattacttgcttaaatagttaaaagagagaaaaaaatcaaggaagaaacatggcacggctatggatagcagatagctcagaacactatctcaactgtcttttttgttgttttaaagccttagaaacgctactgaaaggaaataaagataataaagcatttttccattaaagaagagtgtcttgagtcactgggtaactaccttctgtgcaacaggaaaatgaac

SEQ ID NO: 73140 - DNA, 600 bp, Chicken  19866894353992_6
ccaaaaagtaaacaattaatacctcatcaatattctctgtggtttaaaaacaagtaagttatgcacaagaaaaacctccagaagtgtcattagaaatgggttattaaaactctttaaatgctttatgagtccaggaggatggcacctagccagagcctgtttgctgtgaatgagtatggattatgtaaataggctgtcctgtgcaatctattgtttatttgtgtttaatttcaaaatttcccatagatctgcctttctcttttggaaactgttattattattattattwttwtytttkkkggggggggggtgtaaaattgatcagctgtaactttgaaatttcatcttgaacagttactgtgctatttaatcctgtattacttgcttaaatagttaaaagagagaaaaaaatcaaggaagaaacatggcacggctatggatagcagatagctcagaacactatctcaactgtcttttttgttgttttaaagccttagaaacgctactgaaaggaaataaagataataaagcatttttccattaaagaagagtgtcttgagtcactgggtaactaccttctgtgcaacaggaaaatgaaca

SEQ ID NO: 73141 - DNA, 600 bp, Chicken  19866894354002_1
gtaaaggcttgcttagtggaatattagtagagttaacttgcaagtgtctggcaagcaaggctacgagttttattcaaaggacaaaaaaccaaaattttcagtttttatttattttatgttttattgacaatcatttattttatgcctccaactgcaatctcagagaatctcagaaaatctgaacgctccagtgaattaaccaagagtctaattgtactggcataataagtagaaaaagtagctgcatttgctttaaataaaatctgaccaattcactttgattagggttatgttatccargaattartataaattctgggattttttctcttttcctacttgactacagctttgtttcactaagtggtgttttttctgctsttcctttttgcttatgtgaaaagaaacatayggaaaaaaaggtgtcagtgaatcacagaatatcccaaactggaaggaacccacagtgatcactgagttcatctcctggctccacacaggaccacccaaaaggagccctttgtayggcttctgggtttcatcactgctggaaaatcaattctggctctctgcatcgatggaattgtatcttcaaatggg

SEQ ID NO: 73142 - DNA, 600 bp, Chicken  19866894354002_2
cttgcttagtggaatattagtagagttaacttgcaagtgtctggcaagcaaggctacgagttttattcaaaggacaaaaaaccaaaattttcagtttttatttattttatgttttattgacaatcatttattttatgcctccaactgcaatctcagagaatctcagaaaatctgaacgctccagtgaattaaccaagagtctaattgtactggcataataagtagaaaaagtagctgcatttgctttaaataaaatctgaccaattcactttgattagggttatgttatccargaattartataaattctgggattttttctcttttcctacttgactacagctttgtttcactaagtggtgttttttctgctsttcctttttgcttatgtgaaaagaaacatayggaaaaaaaggtgtcagtgaatcacagaatatcccaaactggaaggaacccacagtgatcactgagttcatctcctggctccacacaggaccacccaaaaggagccctttgtayggcttctgggtttcatcactgctggaaaatcaattctggctctctgcatcgatggaattgtatcttcaaatgggtttctat

SEQ ID NO: 73143 - DNA, 600 bp, Chicken  19866894354002_3
caaaaaaccaaaattttcagtttttatttattttatgttttattgacaatcatttattttatgcctccaactgcaatctcagagaatctcagaaaatctgaacgctccagtgaattaaccaagagtctaattgtactggcataataagtagaaaaagtagctgcatttgctttaaataaaatctgaccaattcactttgattagggttatgttatccargaattartataaattctgggattttttctcttttcctacttgactacagctttgtttcactaagtggtgttttttctgctsttcctttttgcttatgtgaaaagaaacatayggaaaaaaaggtgtcagtgaatcacagaatatcccaaactggaaggaacccacagtgatcactgagttcatctcctggctccacacaggaccacccaaaaggagccctttgtayggcttctgggtttcatcactgctggaaaatcaattctggctctctgcatcgatggaattgtatcttcaaatgggtttctattaaaaatagtctctcattcaagcatcccaacatagtttgatggtcgtagagagaataactgaatttgtaaagaa

SEQ ID NO: 73144 - DNA, 600 bp, Chicken  19866894354002_4
tttatgttttattgacaatcatttattttatgcctccaactgcaatctcagagaatctcagaaaatctgaacgctccagtgaattaaccaagagtctaattgtactggcataataagtagaaaaagtagctgcatttgctttaaataaaatctgaccaattcactttgattagggttatgttatccargaattartataaattctgggattttttctcttttcctacttgactacagctttgtttcactaagtggtgttttttctgctsttcctttttgcttatgtgaaaagaaacatayggaaaaaaaggtgtcagtgaatcacagaatatcccaaactggaaggaacccacagtgatcactgagttcatctcctggctccacacaggaccacccaaaaggagccctttgtayggcttctgggtttcatcactgctggaaaatcaattctggctctctgcatcgatggaattgtatcttcaaatgggtttctattaaaaatagtctctcattcaagcatcccaacatagtttgatggtcgtagagagaataactgaatttgtaaagaaacaaaaggcttttgtcttgagacacagtata

SEQ ID NO: 73145 - DNA, 600 bp, Chicken  19866894354002_5
aagtagaaaaagtagctgcatttgctttaaataaaatctgaccaattcactttgattagggttatgttatccargaattartataaattctgggattttttctcttttcctacttgactacagctttgtttcactaagtggtgttttttctgctsttcctttttgcttatgtgaaaagaaacatayggaaaaaaaggtgtcagtgaatcacagaatatcccaaactggaaggaacccacagtgatcactgagttcatctcctggctccacacaggaccacccaaaaggagccctttgtayggcttctgggtttcatcactgctggaaaatcaattctggctctctgcatcgatggaattgtatcttcaaatgggtttctattaaaaatagtctctcattcaagcatcccaacatagtttgatggtcgtagagagaataactgaatttgtaaagaaacaaaaggcttttgtcttgagacacagtatattgagaagagaaacatartgcacaaatcatggctgcaaagtaaatagaaaaatatcctcttatcactagttttgragttttctgtctggatatagaggatatttgacttcatta

SEQ ID NO: 73146 - DNA, 600 bp, Chicken  19866894354002_6
gaatcacagaatatcccaaactggaaggaacccacagtgatcactgagttcatctcctggctccacacaggaccacccaaaaggagccctttgtayggcttctgggtttcatcactgctggaaaatcaattctggctctctgcatcgatggaattgtatcttcaaatgggtttctattaaaaatagtctctcattcaagcatcccaacatagtttgatggtcgtagagagaataactgaatttgtaaagaaacaaaaggcttttgtcttgagacacagtatattgagaagagaaacatartgcacaaatcatggctgcaaagtaaatagaaaaatatcctcttatcactagttttgragttttctgtctggatatagaggatatttgacttcattatactctrttatggaacaaaaatggggaaaacccacacattcagatttatrtcttttattttacagatttgaacaatcttggttgacttttactccgctctaagtttttcagttctgacctatgtgtttctgagcaggatcagaagttgcaagataccacaaggctgaatatctttttagtatttgtcagtcaagagaaatcata

SEQ ID NO: 73147 - DNA, 600 bp, Chicken  19866894354002_7
tggctccacacaggaccacccaaaaggagccctttgtayggcttctgggtttcatcactgctggaaaatcaattctggctctctgcatcgatggaattgtatcttcaaatgggtttctattaaaaatagtctctcattcaagcatcccaacatagtttgatggtcgtagagagaataactgaatttgtaaagaaacaaaaggcttttgtcttgagacacagtatattgagaagagaaacatartgcacaaatcatggctgcaaagtaaatagaaaaatatcctcttatcactagttttgragttttctgtctggatatagaggatatttgacttcattatactctrttatggaacaaaaatggggaaaacccacacattcagatttatrtcttttattttacagatttgaacaatcttggttgacttttactccgctctaagtttttcagttctgacctatgtgtttctgagcaggatcagaagttgcaagataccacaaggctgaatatctttttagtatttgtcagtcaagagaaatcataaaatagtaaaaatcttaggaaattgtgtatttatgttctagaccaacttacaatttc

SEQ ID NO: 73148 - DNA, 600 bp, Chicken  19866894354002_8
gggtttcatcactgctggaaaatcaattctggctctctgcatcgatggaattgtatcttcaaatgggtttctattaaaaatagtctctcattcaagcatcccaacatagtttgatggtcgtagagagaataactgaatttgtaaagaaacaaaaggcttttgtcttgagacacagtatattgagaagagaaacatartgcacaaatcatggctgcaaagtaaatagaaaaatatcctcttatcactagttttgragttttctgtctggatatagaggatatttgacttcattatactctrttatggaacaaaaatggggaaaacccacacattcagatttatrtcttttattttacagatttgaacaatcttggttgacttttactccgctctaagtttttcagttctgacctatgtgtttctgagcaggatcagaagttgcaagataccacaaggctgaatatctttttagtatttgtcagtcaagagaaatcataaaatagtaaaaatcttaggaaattgtgtatttatgttctagaccaacttacaatttcaagataataattcagaattcttgggtgcctctctgaagtttcagtg

SEQ ID NO: 73149 - DNA, 600 bp, Chicken  19866894354002_9
gatggaattgtatcttcaaatgggtttctattaaaaatagtctctcattcaagcatcccaacatagtttgatggtcgtagagagaataactgaatttgtaaagaaacaaaaggcttttgtcttgagacacagtatattgagaagagaaacatartgcacaaatcatggctgcaaagtaaatagaaaaatatcctcttatcactagttttgragttttctgtctggatatagaggatatttgacttcattatactctrttatggaacaaaaatggggaaaacccacacattcagatttatrtcttttattttacagatttgaacaatcttggttgacttttactccgctctaagtttttcagttctgacctatgtgtttctgagcaggatcagaagttgcaagataccacaaggctgaatatctttttagtatttgtcagtcaagagaaatcataaaatagtaaaaatcttaggaaattgtgtatttatgttctagaccaacttacaatttcaagataataattcagaattcttgggtgcctctctgaagtttcagtgctttatccttttgaaataaatgaaatatgatgtatcagcttga

SEQ ID NO: 73150 - DNA, 600 bp, Chicken  19866894354009_1
agcatgattgcctagggcctcctagaagagaggttatcagcaactgtgcttaatggtgtctccttggaagttggcttggctgaaggctgtaacaaagttacagtgcccttgcctggggaatttgagatgagtataggctgtccttacgcctaaattctactctaaatttgagaggctctgaggatacaaagtcaaaataagctttgtatttcttatgtgatgtaaatcatttcccagttgtaaaattcctcagacaagaggcatgatgtcaaattaaaagaagttcagatcaaatacctyagtacatacgtttagaaattcattattatctcccaatgtttataccattattctgttttggaatggtcgtctgattcaagaaagtagtttaccattgggctttcattgccctcctctcccgacatcagaagcttgggttgcttgcattttagggaatagaggggagaaaggataaggcatgttgaaagcaaagttggtgtgttttgtttaagttttttggggagagggggaagtttgaaacatagtgacaaggtgctattttagatttgagaatctgtaacttccagctatcgctttcta

SEQ ID NO: 73151 - DNA, 600 bp, Chicken  19866894354015_1
ggatattaggaggaagttttttcactcagtgtgtggtgatgcactggaacaggttgcccaaggaggctgtggatgccccatccctggaagcattcaaggccaggctggatgtggctctgggcagcctggtctactggttggcaactctgcacatagcagggggattgaaacgatgatcattatagtccttttcaacccaggctactctatgaaactatgataaagaatgaattcttgtaaatcattaatactcagtttttcacttattctgatgaactagaattgctttccagtgatttyttccctcccaatgaatgcaaaaatagagattttgagtaaaacatgtgtgagaacacacaaaaatcacatacacaaaagctttgttgcacattctcacacgcaaatctttatctaaaatgacattaaggctttctcatcattatcttcttcacattgtcacattgtgtacatgattgatctgttcagttgctttactgacattctgcatggagatatttagcttgtttttacattaaaacaaacctgaagtgttttatttgtcactaggtcagggactttttcaagcacttctaactaatg

SEQ ID NO: 73152 - DNA, 599 bp, Chicken  19866894354018_1
  misc_feature (1)..(40): n is any nucleotide
nnnnnnnnnnnnnnnnnnnnnnnnnnnnnnnnnnnnnnnnacgacagagcttatgcttttgtcatttacccagttgcaagccataattattactatgaaggtcaatggagctggatgtgtataaaagcaaaggagagggtgaaaacaggtccctttggggggatgtgctgtcttggagaaggggaaatttcacagccaaacctggtaccactccctgggatctctctggcccttctctgtcccctgattttgggtgagagcccattcctaggcagggcatcctgctgcagtcccagctgrggggaaggtgatgtctatagtaaaaaaagccctctaaggcatgaggggaggatgtattcagacctccatgcacacctgatgcttttggcctcagtgccctgctcttgataaagtcaaggggagcttaatgctttttaaaggtcctctgtttttatgggctgtaaagcattgaccttaaagggagatgttgagggaagtatattaaagagaggcctatgggggatagctgggcacaccagctttcctgcagctgctctctgggctgctttttttttttcctaagctctctctaaaccaat

SEQ ID NO: 73153 - DNA, 600 bp, Chicken  19866894354033_1
caagcagtctgcattcagggaaagctttgagctcttccaccagtaaaccgtagcttgtgccaaagcctctttgatgaagcaaagcatcttgcattgcccttggtgagcctgtaaagcatccctggctgcttctgggtttctccagcaaagttatgtagcagttacatttcacatcgtaacttaaggaaacaacagaaataaaaagaaagaaagtgctttcagacaggtgggatgcatggcgttgaaggaccagctccatcatggtccaaacccaactgcagagtaacaaatgctgttgaygttggtgggacccgacacagcagaagactgtattacatataccagctgcaaactcagtgcaaggaacctggcaggaacctggcagtgaccccaggtgtcctttccttcagcagcgttagctgtcccactgccaactcctgaggctgttcctcaggcggctgctggccccgtgctacccagaagtcacacacacagccagctggtttccaggcctgccctctgtttttggaggcaaccacccactgtgcttaccctgacgaggggcctctgagagcaaagaagacatcttctgcttgtggt

SEQ ID NO: 73154 - DNA, 600 bp, Chicken  19866894354033_2
aggctccctgtttgacaccaaaaggggatataagggaatttttatgtgttgctacatgtggcttgggcaagagaaatagttgttttctggcatttcatttagtactgcaaagaaaactaaaagcaaaggttccagctgaattcttttgttgctctgtaactaaggaagggaagcaaatatggcattaattaagaggatttactaagtgctctctctagtgaaacaagcttgttccagctgagacggtgcagggaaggctggtgtggggcagagctggatgaggacatggcacatggcacrcaccatgggtcagcaggcaccaggccccccctagcaccataacctgctctcattccctacagtcccacaagaccccccagcaacagatcgaagaarcagatacagaagtggctcaccgaggggaacccatgggaggtcataactgctcctttcacctcactcatgaccagtctgcatgctttttcactgccaggttcaccatgctccagtgcacacatgtacaacatctaattaccaattacttgccagtcaaatgcctccttgtgctccacttggccaggtggagcaagagaggcctga

SEQ ID NO: 73155 - DNA, 574 bp, Chicken  19866894354033_3
atttagtactgcaaagaaaactaaaagcaaaggttccagctgaattcttttgttgctctgtaactaaggaagggaagcaaatatggcattaattaagaggatttactaagtgctctctctagtgaaacaagcttgttccagctgagacggtgcagggaaggctggtgtggggcagagctggatgaggacatggcacatggcacrcaccatgggtcagcaggcaccaggccccccctagcaccataacctgctctcattccctacagtcccacaagaccccccagcaacagatcgaagaarcagatacagaagtggctcaccgaggggaacccatgggaggtcataactgctcctttcacctcactcatgaccagtctgcatgctttttcactgccaggttcaccatgctccagtgcacacatgtacaacatctaattaccaattacttgccagtcaaatgcctccttgtgctccacttggccaggtggagcaagagaggcctgagtaacgctctcctcccctgtcagtcaccaaaatccttctgagatccttcaccaagcccacgggaggatga

SEQ ID NO: 73156 - DNA, 600 bp, Chicken  19866894354034_1
gagatttgatgtactaagcaaagcaggggagaaggaggataaggatgaagaataaagcaagagatggagaatgtgttcaagtgtagttttgcacccagtgtttgtggtcttggttgttaggtgaggagacaatgaagcctttggatgtgttaccgagtgctatgagagctgactgatgctcctatctggtttctcttcggtctgtgagtcccacatccagcaaaaagatgaaagcctgtcccctctgtggcctctttgaagttgagggaattgaattccaggcaccttgattctgttccsagtgtctgtaaggtctggcggatcaacatccacaagtcaggtattgatctagtcacagagatacttcaagtccttggagtgcaagctacattgcattcattatatccatctgcatcatgaggttsagctattggatggacttttggcagtgaaagctgattgtaacctgggctgcagtagggccagtgcagccagcactgggtctgcttgagggctccccaaaacaaatggagccgccaagctgagtttgatgctgtggtcagagataatacactgagaattggctggggtggaaaactg

SEQ ID NO: 73157 - DNA, 563 bp, Chicken  19866894354034_2
gagacaatgaagcctttggatgtgttaccgagtgctatgagagctgactgatgctcctatctggtttctcttcggtctgtgagtcccacatccagcaaaaagatgaaagcctgtcccctctgtggcctctttgaagttgagggaattgaattccaggcaccttgattctgttccsagtgtctgtaaggtctggcggatcaacatccacaagtcaggtattgatctagtcacagagatacttcaagtccttggagtgcaagctacattgcattcattatatccatctgcatcatgaggttsagctattggatggacttttggcagtgaaagctgattgtaacctgggctgcagtagggccagtgcagccagcactgggtctgcttgagggctccccaaaacaaatggagccgccaagctgagtttgatgctgtggtcagagataatacactgagaattggctggggtggaaaactgttcacatctacagtacaaggctgtgttgtaagggttgtgcgtttatacactgcaagtcattcatgaaactgcaacttcactgcaggag

SEQ ID NO: 73158 - DNA, 599 bp, Chicken  19866894354035_1
  misc_feature (1)..(185): n is any nucleotide
nnnnnnnnnnnnnnnnnnnnnnnnnnnnnnnnnnnnnnnnnnnnnnnnnnnnnnnnnnnnnnnnnnnnnnnnnnnnnnnnnnnnnnnnnnnnnnnnnnnnnnnnnnnnnnnnnnnnnnnnnnnnnnnnnnnnnnnnnnnnnnnnnnnnnnnnnnnnnnnnnnnnnnnnnnnnnnnnnnnnnnnnntgaatatatgactgtcacattttttacagtgttcttatatatacatttaatgtgattgtcctcaaggttgttgtctttattactgttaggacatggctttaaaaattgataacartatttatgatttggatccacagattttgactgtcactgcagtcagtaagctaccacgttactgggacaggcaagacccttctttctttttgaggtctcatccacatgatcattagtattcatgatggacttcttactctaaccgtttagctttccttactctacttatttgcagcataaacagcagtaattgaactgtcttgttctggcagctgcatgactttggagatgatgactttcaaaaggacttttgtagaaagcttttcttacctgacacgctgacaaaaatgtgtcatttta

SEQ ID NO: 73159 - DNA, 600 bp, Chicken  19866894354035_2
ctttggagatgatgactttcaaaaggacttttgtagaaagcttttcttacctgacacgctgacaaaaatgtgtcattttaaagtagctgtgtatatactgctttaactctgatgaagacaaatcatacaatctgcatcacagctgtataaatttacaactttggtttccaatcttcaggtaatttaaatggccatttccgtttgcttacaattgtctgttattctcatgtctgtgtcttactttcaatacaggaaagagaagtaatgatgatattaacagcatacatttggtataaaaaracctataatgtaayacttgccaatgttaatccartaagtccttgggtagaacaaagagaagcacacaataatgcatttcaaaatttaaaacagaaatctcaagctaaaaattgatggttccctttaaatacatcaggtttctttctgttaaaaagtggatgttgatatgtttcatacaacttctttgtggaattgtttcactttttgacaccgtcccccaagaagagtaacagattttgatgtatttaatgaagagcactttcaagtttggacagtctgacatttctttaaaagtcttct

SEQ ID NO: 73160 - DNA, 600 bp, Chicken  19866894354035_3
actttcaaaaggacttttgtagaaagcttttcttacctgacacgctgacaaaaatgtgtcattttaaagtagctgtgtatatactgctttaactctgatgaagacaaatcatacaatctgcatcacagctgtataaatttacaactttggtttccaatcttcaggtaatttaaatggccatttccgtttgcttacaattgtctgttattctcatgtctgtgtcttactttcaatacaggaaagagaagtaatgatgatattaacagcatacatttggtataaaaacacctataatgtaayacttgccaatgttaatccartaagtccttgggtagaacaaagagaagcacacaataatgcatttcaaaatttaaaacagaaatctcaagctaaaaattgatggttccctttaaatacatcaggtttctttctgttaaaaagtggatgttgatatgtttcatacaacttctttgtggaattgtttcactttttgacaccgtcccccaagaagagtaacagattttgatgtatttaatgaagagcactttcaagtttggacagtctgacatttctttaaaagtcttctttcaaatgttcgga

SEQ ID NO: 73161 - DNA, 600 bp, Chicken  19866894354035_4
agaaagcttttcttacctgacacgctgacaaaaatgtgtcattttaaagtagctgtgtatatactgctttaactctgatgaagacaaatcatacaatctgcatcacagctgtataaatttacaactttggtttccaatcttcaggtaatttaaatggccatttccgtttgcttacaattgtctgttattctcatgtctgtgtcttactttcaatacaggaaagagaagtaatgatgatattaacagcatacatttggtataaaaacacctataatgtaayacttgccaatgttaatccartaagtccttgggtagaacaaagagaagcacacaataatgcatttcaaaatttaaaacagaaatctcaagctaaaaattgatggttccctttaaatacatcaggtttctttctgttaaaaagtggatgttgatatgtttcatacaacttctttgtggaattgtttcactttttgacaccgtcccccaagaagagtaacagattttgatgtatttaatgaagagcactttcaagtttggacagtctgacatttctttaaaagtcttctttcaaatgttcggatatatattggtatcttctaa

SEQ ID NO: 73162 - DNA, 600 bp, Chicken  19866894354038_1
tgcaggcaatttgggagcagtggggatggttatgatgcacaggagccttgtaccctgtggtattgacttgctgaaggatgactttggtttctctgtgctgtagacagactcagtcccgtgacactagtcagggaaacattccttagcataaagcagagctccacaaataagcaaaccgatgatattgccctaaacaccactcttttttccttctgaaaaatagatttgttaatacttccatatcccaggatggctctgggacagtttctgaggtggttgttgtctctcagtgggctgttyttgaatagtccctttaaaacagacatggtgccgatggctaacagtagcttgtgatggcactccatgagatgtgacacagctctcatcccagaaaaatattgcttgcctcycccagcttctcatccctgccttaacaccagccttcacacatgcactaatttcagtaagaactgattattcaccctccagctgacaaggaaatgctgcctgtgaaaagcagtgccatcaaggcagtggtgggggctgtgggtgggatgcctgcagctatctgcctgcctgtggtggtgtttgagagatgca

SEQ ID NO: 73163 - DNA, 600 bp, Chicken  19866894354038_2
cagtcccgtgacactagtcagggaaacattccttagcataaagcagagctccacaaataagcaaaccgatgatattgccctaaacaccactcttttttccttctgaaaaatagatttgttaatacttccatatcccaggatggctctgggacagtttctgaggtggttgttgtctctcagtgggctgttyttgaatagtccctttaaaacagacatggtgccgatggctaacagtagcttgtgatggcactccatgagatgtgacacagctctcatcccagaaaaatattgcttgcctcycccagcttctcatccctgccttaacaccagccttcacacatgcactaatttcagtaagaactgattattcaccctccagctgacaaggaaatgctgcctgtgaaaagcagtgccatcaaggcagtggtgggggctgtgggtgggatgcctgcagctatctgcctgcctgtggtggtgtttgagagatgcaggaaacctgagggcactctcagcctaccgtgccagggatggtcacagamgatttcttagctggaggttacttttaccatctgtgcaaaggggatatttcatttggttgtt

SEQ ID NO: 73164 - DNA, 450 bp, Chicken  19866894354038_3
tgtgatggcactccatgagatgtgacacagctctcatcccagaaaaatattgcttgcctcycccagcttctcatccctgccttaacaccagccttcacacatgcactaatttcagtaagaactgattattcaccctccagctgacaaggaaatgctgcctgtgaaaagcagtgccatcaaggcagtggtgggggctgtgggtgggatgcctgcagctatctgcctgcctgtggtggtgtttgagagatgcaggaaacctgagggcactctcagcctaccgtgccagggatggtcacagamgatttcttagctggaggttacttttaccatctgtgcaaaggggatatttcatttggttgttcgtctgtttgcttatggaacgagggaaaaagtctggggtgcctttagcagtttttccccccccccataaagaccccccccagaccccaa

SEQ ID NO: 73165 - DNA, 599 bp, Chicken  19866894354050_1
  misc_feature (1)..(76): n is any nucleotide
nnnnnnnnnnnnnnnnnnnnnnnnnnnnnnnnnnnnnnnnnnnnnnnnnnnnnnnnnnnnnnnnnnnnnnnnnnnntcttatgttctacttagctctctagagaaatcacgatgcacagttataagatggtggttgtatttttcccatatccctaaggacttcaaccagtcactttttcggggcaataatgccttctttggctgcattactagcatgtaatggctagctatacagtgctctgcatgcaatgcattaccaagccttctgagtagagctatcattttatttttgttacattwtattctgtaccagaacttggaaaaggagagcattagtgttctaaaatgaggctgaacttccactgtgcatttttgcctcactttgtgatgctaattcataccatttatgtgtgtgccttgtaatagataaaattttggcttgttttgcagaaaggactgtgtgtctcatcctttgttcataagagaagcrtgtttgtaactgaagaaggtgaaatgtaaaggctgaagatacataaagacttgaaagcattaacatctattattaagtgaatctcctgacttttaagagagtctaacaa

SEQ ID NO: 73166 - DNA, 600 bp, Chicken  19866894354050_2
gccttctttggctgcattactagcatgtaatggctagctatacagtgctctgcatgcaatgcattaccaagccttctgagtagagctatcattttatttttgttacattwtattctgtaccagaacttggaaaaggagagcattagtgttctaaaatgaggctgaacttccactgtgcatttttgcctcactttgtgatgctaattcataccatttatgtgtgtgccttgtaatagataaaattttggcttgttttgcagaaaggactgtgtgtctcatcctttgttcataagagaagcrtgtttgtaactgaagaaggtgaaatgtaaaggctgaagatacataaagacttgaaagcattaacatctattattaagtgaatctcctgacttttaagagagtctaacaatgtgcttgcatttgcatcattgtgtctgaattctgcaattggcagcagtttagtttaaggctaaaggataatttttgctattgacttccataggtacaaggttaggccatctagggctcagatcagatgatcttatctctgctagtagaatcttttttttttttwaatgttaaatataagctgcctccaaa

SEQ ID NO: 73167 - DNA, 600 bp, Chicken  19866894354050_3
ctcatcctttgttcataagagaagcrtgtttgtaactgaagaaggtgaaatgtaaaggctgaagatacataaagacttgaaagcattaacatctattattaagtgaatctcctgacttttaagagagtctaacaatgtgcttgcatttgcatcattgtgtctgaattctgcaattggcagcagtttagtttaaggctaaaggataatttttgctattgacttccataggtacaaggttaggccatctagggctcagatcagatgatcttatctctgctagtagaatcttttttttttttwaatgttaaatataagctgcctccaaatattctgtgtgcaatggtctgatgagggagggattcatgtcattttagaagaaagatatacaggaagtctctggtgaaaagaaagaaaagaaaaagaaaatcgcctgcttgaacagaggctagatttttctttgatgaagccacaaagaatttgagcacatatgaagaacgtcttacaaaaagctttcagaacccaagtaagacatacttcaccccttaaaacgtatacatagaacaagccccatggtctgtgtggtacatcagccacagcaca

SEQ ID NO: 73168 - DNA, 600 bp, Chicken  19866894354059_1
tccctaggaaatgatgaatggtgctaattttgggctcattgcaggcaatcactctttactcgtgagtgaaatttctgttgaactgacagatgtgaaacagcatttaaaattcttttaagatacatcaggcaaccaagggcttggaaacctaacacatacacttttcaacacgcttttgagatttaaaactacaaaatgtgttgagcaaatctcaagtgtcaatcttagatagagttagtgactgaaatgaattgtttcttgtccctggggggttttgaataaacaggagtcgttctcttmaatctcacttttactgtttaaaacaggagagaaggctattttatttttcagctgccagtgcccagttgctatcgcagcttggaattaaccattggtggaatcgctgcatgtgtatttctattatatgcagagaggctggggcactggaaatgaaagaaaaaaaaggaaaaaaaaaaaaaaaggtcaggattagggttaactttctttaattggctcaccagtttttttgtcttgcattcaaattccatctcatttagtgctgaaaaatcccaaatccccaagtgccatgggtgttccatt

SEQ ID NO: 73169 - DNA, 599 bp, Chicken  19866894354063_1
  misc_feature (1)..(79): n is any nucleotide
nnnnnnnnnnnnnnnnnnnnnnnnnnnnnnnnnnnnnnnnnnnnnnnnnnnnnnnnnnnnnnnnnnnnnnnnnnnnnnncagtaggtcaggccatgtcatgacgccttttttcccctctcagattcccaatatctgatcctgctgtcctgcctggagcactccaccaccaccgtggcctgcagctcatgcacggctgaggagtagcagagattccatgctctccaggcaggaggagcaacggctcagggacagcacagtcacatccaaactcacttgtgacaacacggaggtgtcacatsgctttgtacactgtaaaccacaatagctgcaaccaaactctttccaacctctgtgagttctcacgccttgaaacaggctttcctgaaggccacaggccacacggccaccaaccacaggcatctgtctgcctgggcacagggagaatgctgcgtccttgtgagcccaccgcacccagcaggagcattcttctgtggtgggatcatggatgaagtcaacattggtttggttgagacaaaaccacacggccccaggaaccatgctgacagtgcagacaggaacaaggagccgctgtctccca

SEQ ID NO: 73170 - DNA, 600 bp, Chicken  19866894354063_2
cacacccacagccacaggctcaggacggtccatgtgcaaacctcccaaagacagccaagccaagccttgatttgccccttctgattatgcctacctccccacacaggcagagctcagcagggaatctacagcaaagccaagtgcttttctcctttggctcccagaagccagcttggcaaccacacctgagagcccctctgggcaggggacgcagcgcgagggaagagctgtagctgggcaccagcagcagtgtcctacattctcctttgttacaggggatttctagcctgcagggctgcrgatgggccctgagaagaggagggaaaatacattacttcatagcattagatgtcaactcacagaaggcaaaattcaccaccgggcagcatagaaaagctcttggagagcagcacgtcagcaggaacaaagaaccaggagctgtgctccgccagcagcactgagccatggctgacgcagggctgtgctgtcacaccacggcagggctgggagcggaacggccgctgcaggaaaacacgcagcactcagcccagaggaggcaatggcagggatgggcggcacgcagcgcagcgctgtgggtgc

SEQ ID NO: 73171 - DNA, 600 bp, Chicken  19866894354067_1
gagctactatgaaaaaaatattctagccaaaaccagtacagttggtcatctggagaaaacttggtcacagactaaaaagcactgttcattctctgaatctcaagagcatcaaaccatttctatctcattccttttgctttttagcttcatcttgagtagtactcaatatattcctgttttctttactagtattatgctttattaaaataatattaattgtgtgaactgctagtctgactgttctctggatgttgcaactgttctatttacaattgatagatcctaaactgctcagacacstaggtacttgaatgtagatcctctttgatctgaattttgttgccttaaagaaagctggaatgatttcaggttgcacattctccaaggatgtttttcttatactggatgtactgcagaggaaaagagaagtcataagcgattcagcagcaggttgtacttcacacccgcagaacagttttccattattaaatttttttctacaccatatccagtatttattatctaccttacagtgtttttactgctttctttgcagtgaatctatggagaaggcagtggcagcaggcagagtgttaattt

SEQ ID NO: 73172 - DNA, 600 bp, Chicken  19866894354068_1
ccccttaccagtggaaaaactatcttgtcattatagaagggcactaaggagtaagcctgtgtgaagaaactgtgtatgcataacaggcaaattcccaatacccttgggatttcagctatatctatatttattttctcacaaaaggcaataatcagtagttgcttaatgttctgggaaaaataagcaccatttcattattttttttcagaattaactgaattgctaatgtatattcatataacttatgttcacttaatatgggctttggttactatttttatttttatcatctataaaaakgtattatagagttgggcttcttgttcccaccaatggtaaactgcaacattaaaaggaatacarcttgagagtctctgtagcataattaacctttgtgaactatcagcagtagtactgcttttcagtcatactttgatattctgcttctaggagaaacttattttacaaatactgctttcagttaactcattagaaatgctttactgcttaaaaatctcaaagaaaggagaaatrgggagatgattaaactctagtgttaaattgtttcaygcgaggcagcaaaatcttttctaactcatc

SEQ ID NO: 73173 - DNA, 600 bp, Chicken  19866894354068_2
aagaaactgtgtatgcataacaggcaaattcccaatacccttgggatttcagctatatctatatttattttctcacaaaaggcaataatcagtagttgcttaatgttctgggaaaaataagcaccatttcattattttttttcagaattaactgaattgctaatgtatattcatataacttatgttcacttaatatgggctttggttactatttttatttttatcatctataaaaakgtattatagagttgggcttcttgttcccaccaatggtaaactgcaacattaaaaggaatacarcttgagagtctctgtagcataattaacctttgtgaactatcagcagtagtactgcttttcagtcatactttgatattctgcttctaggagaaacttattttacaaatactgctttcagttaactcattagaaatgctttactgcttaaaaatctcaaagaaaggagaaatrgggagatgattaaactctagtgttaaattgtttcaygcgaggcagcaaaatcttttctaactcatcagttgagtaaaattttatttcttaaaaatatattgaattcattcctattttatttctgtagaa

SEQ ID NO: 73174 - DNA, 526 bp, Chicken  19866894354068_3
catataacttatgttcacttaatatgggctttggttactatttttatttttatcatctataaaaakgtattatagagttgggcttcttgttcccaccaatggtaaactgcaacattaaaaggaatacarcttgagagtctctgtagcataattaacctttgtgaactatcagcagtagtactgcttttcagtcatactttgatattctgcttctaggagaaacttattttacaaatactgctttcagttaactcattagaaatgctttactgcttaaaaatctcaaagaaaggagaaatrgggagatgattaaactctagtgttaaattgtttcaygcgaggcagcaaaatcttttctaactcatcagttgagtaaaattttatttcttaaaaatatattgaattcattcctattttatttctgtagaaagctttctgtaatgtggttagtacaagtttacttaaggttggagaccataatgtcatgaaaaaataagagaatgggtatttaaaagtattcacgaat

SEQ ID NO: 73175 - DNA, 490 bp, Chicken  19866894354068_4
actatttttatttttatcatctataaaaakgtattatagagttgggcttcttgttcccaccaatggtaaactgcaacattaaaaggaatacarcttgagagtctctgtagcataattaacctttgtgaactatcagcagtagtactgcttttcagtcatactttgatattctgcttctaggagaaacttattttacaaatactgctttcagttaactcattagaaatgctttactgcttaaaaatctcaaagaaaggagaaatrgggagatgattaaactctagtgttaaattgtttcaygcgaggcagcaaaatcttttctaactcatcagttgagtaaaattttatttcttaaaaatatattgaattcattcctattttatttctgtagaaagctttctgtaatgtggttagtacaagtttacttaaggttggagaccataatgtcatgaaaaaataagagaatgggtatttaaaagtattcacgaat

SEQ ID NO: 73176 - DNA, 600 bp, Chicken  19866894354069_1
gctgtcctgcccctgtgaggctgctagcttactagctccacgctcccatccagtatccaatgtgtgatcactaacaggggtcaacaggcccatggcagtgatagacaaagaagtctgatgtaaagtttgtggtcaaaattattttttccagtgatggtaaaccagcttttttggaggcaacattcattttttcctgagtccatctgttctgctaacctggagcattctggattgtgtttgagaatgtcaggaccccataacctacactgtccagtgctgatgtgtgctggtgtacgcccygggctctctttgtaaggccacctgtgcccaaagaagtgctgtacgtcacacacagatgcatccccgtgttccctacaaacaggggaacatgtcagtaggtacagcttgctggcaagctgccaagacttaatggctcctcagactgcaggggtaccctcgcacctcacacacacacacctttctcaggtacacatagtaaaagggcactcagttcccctgtttggcaccacagcagctgcaaagcactgaggaacaacctgagctcagaaaagactcagacactcatcagaattaacagtg

SEQ ID NO: 73177 - DNA, 599 bp, Chicken  19866894354071_1
  misc_feature (1)..(94): n is any nucleotide
nnnnnnnnnnnnnnnnnnnnnnnnnnnnnnnnnnnnnnnnnnnnnnnnnnnnnnnnnnnnnnnnnnnnnnnnnnnnnnnnnnnnnnnnnnnnnncaaaggaggacgttcttgtggctaaggctgagaactgggtgtcaggacatctggtttctattcccagctttgctaccacatcatatgacgctggggcaaatcacttaacttctctatgcctaaaatttgtttacagaatttgaggggagaaaaacaccatctctgaggatcctggaaaaaggtgaagcttaaatactagcaaattrttttctttcagatacagtaaagcattttagaaggaattcaatttttgatctttgaatttaagaattcattcctctaaaagaggaratatgttttaaatatattgtgatttttagtaaagaaggctgcagaggagcttgaagatgaatgcacagttgagaggaaaggagacaaatccatgtcgtccataggtgaacatgaggacttattaaaattgctttcatggttgtcttagatgttgttagcataagtggattataaatccactctggatccttaacagataaatcctggtaaaatc

SEQ ID NO: 73178 - DNA, 599 bp, Chicken  19866894354071_2
  misc_feature (1)..(9): n is any nucleotide
nnnnnnnnncaaaggaggacgttcttgtggctaaggctgagaactgggtgtcaggacatctggtttctattcccagctttgctaccacatcatatgacgctggggcaaatcacttaacttctctatgcctaaaatttgtttacagaatttgaggggagaaaaacaccatctctgaggatcctggaaaaaggtgaagcttaaatactagcaaattrttttctttcagatacagtaaagcattttagaaggaattcaatttttgatctttgaatttaagaattcattcctctaaaagaggaratatgttttaaatatattgtgatttttagtaaagaaggctgcagaggagcttgaagatgaatgcacagttgagaggaaaggagacaaatccatgtcgtccataggtgaacatgaggacttattaaaattgctttcatggttgtcttagatgttgttagcataagtggattataaatccactctggatccttaacagataaatcctggtaaaatcttgctgcagtgacttgtatatcattattcttagatggtcactgctggggattacttcctccttggctgtcagcaaggactgtata

SEQ ID NO: 73179 - DNA, 600 bp, Chicken  19866894354071_3
tccataggtgaacatgaggacttattaaaattgctttcatggttgtcttagatgttgttagcataagtggattataaatccactctggatccttaacagataaatcctggtaaaatcttgctgcagtgacttgtatatcattattcttagatggtcactgctggggattacttcctccttggctgtcagcaaggactgtatacccattcttcaggtattccaatgcagaggcagtatcttgacttgccagtgaaaataggtttaaagaaagatgtttatctgttgactgaaacagtaggrctatcatatacctgcttctctgttgacttcagtttagacattttgttctccaacagaaggtaagatgaagaaacctgaatagaaacctgaatttcactgcctctcgctgcttctttatctttgataaatgaaaactgatttgaaaaatttcccttaacatgtcttctcaaaagcaactctgtaactcatcttcccattgctgcaaatcattttgaattctaataaccactgatagttttgcattctagtatatatcgtgtatgtaatataaccgatcaccctttttccatagaccttttg

SEQ ID NO: 73180 - DNA, 599 bp, Chicken  19866894354075_1
  misc_feature (1)..(72): n is any nucleotide
nnnnnnnnnnnnnnnnnnnnnnnnnnnnnnnnnnnnnnnnnnnnnnnnnnnnnnnnnnnnnnnnnnnnnnnnctattgtccttatactatgtggttgtaacatgccattaaatacataaactgcaagcatgtatttctggttaacacagttcaacagaccagcttttaataacctgtgcacactactacagagttcataaggtagaaggtgcaagaaacattaaacaaaactattttacttaaactgtagcattctctggaataactgacaaaaatgaacactgagtgaatagcatcacraaaacacataggagactctgcaggagcaagtgataagtaaggaagagtgagcattgagaagctcagagaaagtattcagaagaggctrcaaaaacatctctcaatctaagagaccttctgtgtcaattttagaagtacaaatatacagagctccatcaagccctgattttcagcgaatcccacactatttttattacctgttttacacgtgcatgtggaggttgccaagctgtataaagatttgtactgcatgttcaatcactgagctacttaaaaatgcagctgtttgcaaacatgat

SEQ ID NO: 73181 - DNA, 600 bp, Chicken  19866894354075_2
atgtggttgtaacatgccattaaatacataaactgcaagcatgtatttctggttaacacagttcaacagaccagcttttaataacctgtgcacactactacagagttcataaggtagaaggtgcaagaaacattaaacaaaactattttacttaaactgtagcattctctggaataactgacaaaaatgaacactgagtgaatagcatcacraaaacacataggagactctgcaggagcaagtgataagtaaggaagagtgagcattgagaagctcagagaaagtattcagaagaggctrcaaaaacatctctcaatctaagagaccttctgtgtcaattttagaagtacaaatatacagagctccatcaagccctgattttcagcgaatcccacactatttttattacctgttttacacgtgcatgtggaggttgccaagctgtataaagatttgtactgcatgttcaatcactgagctacttaaaaatgcagctgtttgcaaacatgatctcttgccataccacaacagatttgcacactcttcatctttaccttgcacagtttgcagtaactacaagcaccataacaagctgctctc

SEQ ID NO: 73182 - DNA, 600 bp, Chicken  19866894354075_3
aaatatacagagctccatcaagccctgattttcagcgaatcccacactatttttattacctgttttacacgtgcatgtggaggttgccaagctgtataaagatttgtactgcatgttcaatcactgagctacttaaaaatgcagctgtttgcaaacatgatctcttgccataccacaacagatttgcacactcttcatctttaccttgcacagtttgcagtaactacaagcaccataacaagctgctctcaaggaatttagattaacctcccaatgcagttctgtatatatacacagccrcmtccagctggcaactctccatttcagaagaaccacacaacaaactcaagttgtttccatttcttcctgatggttgcaatgagtttgtcttctctgagatgtcttcaatcaaagcaatcagtcctaagacatgcaggacttccgctgacttcctcagcaggtctgcacatataacaaaaagcacgaactcaggacaccaatgttcagaaacatctatccatcttgctagctcttctcaccacacatacaccctttacatgacagcagtagcattcagcagcctaacaaaggctacttatc

SEQ ID NO: 73183 - DNA, 600 bp, Chicken  19866894354075_4
atatacagagctccatcaagccctgattttcagcgaatcccacactatttttattacctgttttacacgtgcatgtggaggttgccaagctgtataaagatttgtactgcatgttcaatcactgagctacttaaaaatgcagctgtttgcaaacatgatctcttgccataccacaacagatttgcacactcttcatctttaccttgcacagtttgcagtaactacaagcaccataacaagctgctctcaaggaatttagattaacctcccaatgcagttctgtatatatacacagccrcmtccagctggcaactctccatttcagaagaaccacacaacaaactcaagttgtttccatttcttcctgatggttgcaatgagtttgtcttctctgagatgtcttcaatcaaagcaatcagtcctaagacatgcaggacttccgctgacttcctcagcaggtctgcacatataacaaaaagcacgaactcaggacaccaatgttcagaaacatctatccatcttgctagctcttctcaccacacatacaccctttacatgacagcagtagcattcagcagcctaacaaaggctacttatctt

SEQ ID NO: 73184 - DNA, 600 bp, Chicken  19866894354076_1
tttctgaaagacagtagcttcactgacataaatctaattttaattagaaactcctactctttgcattttagcactagtagctacatatgcaaaatgtactaaaatgcctcagactcaatctacacccctattttgcaatacatttcatggtactatatttctcagtattgaaatcaccaaatccagcaaagtagaatgtagaatacagtgattccgattaacaaaatttttaatttcctttgattttagtgtcataatgttgaaattcttcacttgaagatagcttagataatgtactcwgtacaccagctatcccagtcaagtaaagagttctggaaaagctagatacrctccataccacaatatcatcctaatagttgcttaatacagttctgtactaactaccaaatcatgtaaaaagcataaacacaggaaaaataacatctcaatatatgaaatgaagctgcactggagtgatatgtctgtacatgaaaccacaaatcagcaaattcacagtactgcatccatctgttacactacacaactccaggtaacactgtacactcatttttaccattctttcctgtgctgcctttctaa

SEQ ID NO: 73185 - DNA, 600 bp, Chicken  19866894354076_2
ctcctactctttgcattttagcactagtagctacatatgcaaaatgtactaaaatgcctcagactcaatctacacccctattttgcaatacatttcatggtactatatttctcagtattgaaatcaccaaatccagcaaagtagaatgtagaatacagtgattccgattaacaaaatttttaatttcctttgattttagtgtcataatgttgaaattcttcacttgaagatagcttagataatgtactcwgtacaccagctatcccagtcaagtaaagagttctggaaaagctagatacrctccataccacaatatcatcctaatagttgcttaatacagttctgtactaactaccaaatcatgtaaaaagcataaacacaggaaaaataacatctcaatatatgaaatgaagctgcactggagtgatatgtctgtacatgaaaccacaaatcagcaaattcacagtactgcatccatctgttacactacacaactccaggtaacactgtacactcatttttaccattctttcctgtgctgcctttctaacaaatctactctgtccatcttcttaatgatggcaataaattaaaaattaa

SEQ ID NO: 73186 - DNA, 599 bp, Chicken  19866894354077_1
  misc_feature (1)..(77): n is any nucleotide
nnnnnnnnnnnnnnnnnnnnnnnnnnnnnnnnnnnnnnnnnnnnnnnnnnnnnnnnnnnnnnnnnnnnnnnnnnnnnagaactttccgaactcttcatcctgaaaaaatctacatgtctatgcagaggaaggttgttagactcatgtgtgaccactatgcctacagcaactgctctttgctgcttatttgtagtggtggcactttgcaggaaccttgcagagcataactgggtggtcctgtgggctccctgccttgctctgcaaacattagcctgatgcagccccttgcctcagacagcrtcctgcagcagacacacagaggcaaagaaaaagggtacagcaactacacaggaacctttcagcatgatattccccagccttcagcagcccttagctgaagggcttcttcccaagccaggaatgcttaatagccctttctgcattttttccatgactctaattgcttttgcaatagtctcaacttctggcayccacagcaccctggagcaatcagttccacagyataactacatgtactgtgttaaaggaaccttcttttgtctgttccaaacctagtatctcatagtccctgtattcag

SEQ ID NO: 73187 - DNA, 600 bp, Chicken  19866894354077_2
agtggtggcactttgcaggaaccttgcagagcataactgggtggtcctgtgggctccctgccttgctctgcaaacattagcctgatgcagccccttgcctcagacagcrtcctgcagcagacacacagaggcaaagaaaaagggtacagcaactacacaggaacctttcagcatgatattccccagccttcagcagcccttagctgaagggcttcttcccaagccaggaatgcttaatagccctttctgcattttttccatgactctaattgcttttgcaatagtctcaacttctggcayccacagcaccctggagcaatcagttccacagyataactacatgtactgtgttaaaggaaccttcttttgtctgttccaaacctagtatctcatagtccctgtattcagaagcagggaataatggacctttttaaactttctcaatgctacttctaatttcaaagatcccgttatacccaccaccccagatactccttaaagctagcatgtcccgttctagtttattacttgactccttgcctctcttcttggtacttttcctcttcttctgctactttcattacaacttttttgatagac

SEQ ID NO: 73188 - DNA, 600 bp, Chicken  19866894354077_3
ataactgggtggtcctgtgggctccctgccttgctctgcaaacattagcctgatgcagccccttgcctcagacagcrtcctgcagcagacacacagaggcaaagaaaaagggtacagcaactacacaggaacctttcagcatgatattccccagccttcagcagcccttagctgaagggcttcttcccaagccaggaatgcttaatagccctttctgcattttttccatgactctaattgcttttgcaatagtctcaacttctggcayccacagcaccctggagcaatcagttccacagyataactacatgtactgtgttaaaggaaccttcttttgtctgttccaaacctagtatctcatagtccctgtattcagaagcagggaataatggacctttttaaactttctcaatgctacttctaatttcaaagatcccgttatacccaccaccccagatactccttaaagctagcatgtcccgttctagtttattacttgactccttgcctctcttcttggtacttttcctcttcttctgctactttcattacaacttttttgatagacttccatgtgcccagtggccttgtggtagaagc

SEQ ID NO: 73189 - DNA, 600 bp, Chicken  19866894354079_1
gttattcggataaactcagctacaagttcactttgtgctatttgtgctcagcctgggtggctgcagcctcttctgctgcggttgcctttgggtcaggatttgttgctccatctcacaacacaacagcgatccggcgttcccattgcttgggaagctctgcctaccctgatttcatttgtttccttaggaaatcaccccatgctaagagaacggacaaaactaggaggtaaaccgaaaggacgggaacggaacgctccttcagttccttaaatcagacccaaatacccattttccccgcgytgatggcatcgagttttatatcctcacagtgacgagtcaagctttgcagctcccacagccaacgtctgatcctctccttcactcagcacacagcgacagaaccagccaggatccttcagggagtcggtgttgttacaaaaatcacacagatcaataaactgaaatgcctctagctacacatccccaccacatttttccacgctcaccatcatatactccaagtacacagccatgccaccacaccagcagagtttgttttggcaaaacacgttcttcscatccattctccaacgtccaaca

SEQ ID NO: 73190 - DNA, 519 bp, Chicken  19866894354079_2
ccaaatacccattttccccgcgytgatggcatcgagttttatatcctcacagtgacgagtcaagctttgcagctcccacagccaacgtctgatcctctccttcactcagcacacagcgacagaaccagccaggatccttcagggagtcggtgttgttacaaaaatcacacagatcaataaactgaaatgcctctagctacacatccccaccacatttttccacgctcaccatcatatactccaagtacacagccatgccaccacaccagcagagtttgttttggcaaaacacgttcttcscatccattctccaacgtccaacaggagaagcacttggaacgcccaacccatgggaaacacacagggatgagtgctgcactgagcgctgggtgactgctttgggaacagaaccacatcactgcgcatcccaaacctcaccccgtgcacatggagctccgtgctcagcacagcacatgcttcacggaccaaagattttacaccagcaaaggaaatgccgca

SEQ ID NO: 73191 - DNA, 600 bp, Chicken  19866894354091_1
ccagtgagttacttcatgcatggaaaccactgtccagatgcagcttgctgggagctgaagttgacacatccacagttgacagttcagtgccaagaaccagaaatctagccctggcacttccctgtgcaacagcctggtggcagtggggactttgggtgcctgcctgcaggagggatcatggagcaaatccttcgtgtatccctgcagagcaaaccccggtgtaacggcatgctggggccacttgcagatgtttaaacacagataacacagagcatcccactgcattgagctggatcctgrtggatccctgaggccagtggagctggacacatactggggagacagyagagcctgtgacactgagtcccacattgggtcccaggtatcaaaggwtggactgctcacatcccggcctccagcagcagtgatgcactgtgccttggccccggtgtacctcaggacatgaagcaccaaatgaaatgaattcctgccatcagtgccgtttcctgttttcctcttacaagggaccatgcttccccgcagtccttgaccccaaggagcagtgctagaaaggatgcagtgcaccaggtcccggccggg

SEQ ID NO: 73192 - DNA, 600 bp, Chicken  19866894354091_2
gctgggagctgaagttgacacatccacagttgacagttcagtgccaagaaccagaaatctagccctggcacttccctgtgcaacagcctggtggcagtggggactttgggtgcctgcctgcaggagggatcatggagcaaatccttcgtgtatccctgcagagcaaaccccggtgtaacggcatgctggggccacttgcagatgtttaaacacagataacacagagcatcccactgcattgagctggatcctgrtggatccctgaggccagtggagctggacacatactggggagacagyagagcctgtgacactgagtcccacattgggtcccaggtatcaaaggwtggactgctcacatcccggcctccagcagcagtgatgcactgtgccttggccccggtgtacctcaggacatgaagcaccaaatgaaatgaattcctgccatcagtgccgtttcctgttttcctcttacaagggaccatgcttccccgcagtccttgaccccaaggagcagtgctagaaaggatgcagtgcaccaggtcccggccgggtgcagggctgggccatacagctgccccacagcctgctggtttgttt

SEQ ID NO: 73193 - DNA, 600 bp, Chicken  19866894354091_3
gaaccagaaatctagccctggcacttccctgtgcaacagcctggtggcagtggggactttgggtgcctgcctgcaggagggatcatggagcaaatccttcgtgtatccctgcagagcaaaccccggtgtaacggcatgctggggccacttgcagatgtttaaacacagataacacagagcatcccactgcattgagctggatcctgrtggatccctgaggccagtggagctggacacatactggggagacagyagagcctgtgacactgagtcccacattgggtcccaggtatcaaaggwtggactgctcacatcccggcctccagcagcagtgatgcactgtgccttggccccggtgtacctcaggacatgaagcaccaaatgaaatgaattcctgccatcagtgccgtttcctgttttcctcttacaagggaccatgcttccccgcagtccttgaccccaaggagcagtgctagaaaggatgcagtgcaccaggtcccggccgggtgcagggctgggccatacagctgccccacagcctgctggtttgtttgtccatctgcaccagcacaaagccacgcggtgcctccaggctgcagc

SEQ ID NO: 73194 - DNA, 418 bp, Chicken  19866894354091_4
tgaagcaccaaatgaaatgaattcctgccatcagtgccgtttcctgttttcctcttacaagggaccatgcttccccgcagtccttgaccccaaggagcagtgctagaaaggatgcagtgcaccaggtcccggccgggtgcagggctgggccatacagctgccccacagcctgctggtttgtttgtccatctgcaccagcacaaagccacgcggtgcctccaggctgcagcttcccctggggacgggattgtgtgtccgagaggggagaggcacagccccagaacaaagcaaacgacagcrcggaaaacaaagctgagcctttgatacaaacccttttcttccctccctgagcaagacattcggtgtcaccttctcacttgcacttccccacccgctgtggccagatcctctgtttggg

SEQ ID NO: 73195 - DNA, 600 bp, Chicken  19866894354095_1
actgctggagagctgcactgcggaacacagtgttaatttctcccaatactttgggaagttgctatttatgcagtagatatgatattaaaactgtgtttcatgtcagaactgtactcttttcttcgcccccggacaaatgcttctataatatgtccaaaaaagcaatcctgtttctaactccaccagtgcgctctgttagtaacatctgctcgttggcaggaataactgagatctgtggcaatatatatatactttgcaatatttacctgacgtctcgaagtaatttctgttccatttatsacacggcttcacagcagtttcagaacacaggaaaacgccaaccrgccacgtgatatccgtgtgtagggctgcagcactcaggacgtgcaatgccacggcgttgttgaccctgaaagcatcagttcgcccagatcctagaaaagaataaccattggaagatgattattagctttatcgcagccctattcattgttcagctcatttaggtgcatttcgactgtggattttacatctaccggccttcggatgaaacatcacctatgaactgcgcttcggtgaagtccatccagcagtgaaatg

SEQ ID NO: 73196 - DNA, 600 bp, Chicken  19866894354095_2
aatactttgggaagttgctatttatgcagtagatatgatattaaaactgtgtttcatgtcagaactgtactcttttcttcgcccccggacaaatgcttctataatatgtccaaaaaagcaatcctgtttctaactccaccagtgcgctctgttagtaacatctgctcgttggcaggaataactgagatctgtggcaatatatatatactttgcaatatttacctgacgtctcgaagtaatttctgttccatttatsacacggcttcacagcagtttcagaacacaggaaaacgccaaccrgccacgtgatatccgtgtgtagggctgcagcactcaggacgtgcaatgccacggcgttgttgaccctgaaagcatcagttcgcccagatcctagaaaagaataaccattggaagatgattattagctttatcgcagccctattcattgttcagctcatttaggtgcatttcgactgtggattttacatctaccggccttcggatgaaacatcacctatgaactgcgcttcggtgaagtccatccagcagtgaaatggttaacactgtgggcatttaagtgctcataattaacagtccatt

SEQ ID NO: 73197 - DNA, 599 bp, Chicken  19866894354096_1
  misc_feature (1)..(171): n is any nucleotide
nnnnnnnnnnnnnnnnnnnnnnnnnnnnnnnnnnnnnnnnnnnnnnnnnnnnnnnnnnnnnnnnnnnnnnnnnnnnnnnnnnnnnnnnnnnnnnnnnnnnnnnnnnnnnnnnnnnnnnnnnnnnnnnnnnnnnnnnnnnnnnnnnnnnnnnnnnnnnnnnnnnnnnnnnnnaaaatatcctatgaatgttttcattcagctttttcagaattaatgaatatatatgaaatagtgaaatgtctcagcattatctctctaaaagggttctgagaatttttttaaaggtatcaaatgaatgawaatgcattgtattattcatccaaaggaaacactgtaaaaatgatagctagtcagtaactgttatgacagaggaaagggaggagagattcttcctagaactgcattatatcacatgagaaaggggatgctgtgccttttcatctaatcttttttttttttttttttgttaaccattttratggaaagtattttttttttcttgtttttgaaggagaagaagaaaaatgatggctttgttatttccttaaatattgcacaaatcttagcacagaaaaatcacttctaactgatgtgattta

SEQ ID NO: 73198 - DNA, 600 bp, Chicken  19866894354096_2
cctatgaatgttttcattcagctttttcagaattaatgaatatatatgaaatagtgaaatgtctcagcattatctctctaaaagggttctgagaatttttttaaaggtatcaaatgaatgawaatgcattgtattattcatccaaaggaaacactgtaaaaatgatagctagtcagtaactgttatgacagaggaaagggaggagagattcttcctagaactgcattatatcacatgagaaaggggatgctgtgccttttcatctaatcttttttttttttttttttgttaaccattttratggaaagtattttttttttcttgtttttgaaggagaagaagaaaaatgatggctttgttatttccttaaatattgcacaaatcttagcacagaaaaatcacttctaactgatgtgatttactctctaacawtcagaagagtaaatctttctccattgacattattcagtaattaatgtagattttaaagtactcattgaaaaatccctgtgcgctatataaaggagagcagatgacatatgaagatatgacactactctgtgaactgctctttgaaatattgaaacattttaaagcagc

SEQ ID NO: 73199 - DNA, 600 bp, Chicken  19866894354096_3
attattcatccaaaggaaacactgtaaaaatgatagctagtcagtaactgttatgacagaggaaagggaggagagattcttcctagaactgcattatatcacatgagaaaggggatgctgtgccttttcatctaatcttttttttttttttttttgttaaccattttratggaaagtattttttttttcttgtttttgaaggagaagaagaaaaatgatggctttgttatttccttaaatattgcacaaatcttagcacagaaaaatcacttctaactgatgtgatttactctctaacawtcagaagagtaaatctttctccattgacattattcagtaattaatgtagattttaaagtactcattgaaaaatccctgtgcgctatataaaggagagcagatgacatatgaagatatgacactactctgtgaactgctctttgaaatattgaaacattttaaagcagcaaaattttcacatcttattaaaatattagattatgagaaagaaatagcctacataaaaatatgaaaattcacatccttggtattcagacacttaactttatctttctgaatgagctgcttgcttcctggcag

SEQ ID NO: 73200 - DNA, 600 bp, Chicken  19866894354098_1
atacaacacagatgtatatatatattattaatgccatagtcaactaaaacaatccaaatgaaggaaagataggaaacttactctcgtgcaaagcttctggtgataggagatctaactggggcttgtaattcttcccattcaggcagaggttttatttctagtggagctggttttgctatatgagaacacaagcacagaacgttcttgagcaaacttgaatttaatagcttttcaaatttttaatgccaaaaagaaatactgtttattaaacagtaaacactagctaagaagagacacttycattctcataaagctatgatatattaacttatgttttacgctttccagttacagaaaagcaacagtattttaaaaagacacaattgaagaattttgcaagatagacaggtacacagtaattctatttcgaaaagagactgaaaatggcatcgagttctgtggcatgacgacttgctgaactgataagcacagatagggctgactgacagtttcagcctaaaatgcaagcatagccaactctgtatgcttttattggcttgtgggcaattattattatgcaaactctgccctcactgcaca

SEQ ID NO: 73201 - DNA, 599 bp, Chicken  19866894354101_1
  misc_feature (1)..(47): n is any nucleotide
nnnnnnnnnnnnnnnnnnnnnnnnnnnnnnnnnnnnnnnnnnnnnnnagccccatccagcctgaccttgaacgtttccaggatggagcatccaccacatcactgggcaacatgttttagtgcctcaccacccttacttcttccttatatccagtctaaatctccactctttaagtttgaaaccatttccccttatcctgtcacaacagaccctgctgaagaatctgtcctttcttatagatcccttttagatactgaaaggccactgtcaggtttccctggagccttctcttctccacgstgaacagacccaacactcagcctgtgcattcctgcttctaaccagtctacctttcttcaacatgaaaggacactgaaggacatactaaactctactcaaatcattgaaatttaaacacttgtaaataatttcatgaataacggctcatacatacgcaacagttttttatttcttttaactgtgatgacttcacagtccattttcaagctctcacatatgaagaaccactaatatcatcttataacttttccttctacataacttttgtctgtggtgcttttttttttttttttcattgc

SEQ ID NO: 73202 - DNA, 599 bp, Chicken  19866894354107_1
  misc_feature (1)..(55): n is any nucleotide
nnnnnnnnnnnnnnnnnnnnnnnnnnnnnnnnnnnnnnnnnnnnnnnnnnnnnnntatttagtaaatttatttgctgacacgtggagttgaaactgcacctagaaaacagcagcaaatgcattctgctcccaagtcccatgaggacagatggaattaaagcatgggggaactgagcgagtgtagaagaaaaatgatgaaagggtaaaaaggaagctgtgattacagggaaaaaaatagcccacttccttgacacacacagagaaaaaaacaactaataaataacccatggcaggagcctrgcagtagcagagtgctttgggtgcgaccatgggagtcgtcatagcccattttcagttggttttatttccagggtttcgtgtcgaagcagaatgctgcaatgcttatgttgcaagggctgcggagaggcattggtatgctaagagrmggcttttcagtacagaactgcatgaaaagatttatgctggccctagaattcgcaaaacctgtttttattgcacctgggttccgtgccaaatttgagaaggcgcaagcgaaataaatcacatgtggaaaagagggttgatttatatcggacggg

SEQ ID NO: 73203 - DNA, 600 bp, Chicken  19866894354107_2
cagatggaattaaagcatgggggaactgagcgagtgtagaagaaaaatgatgaaagggtaaaaaggaagctgtgattacagggaaaaaaatagcccacttccttgacacacacagagaaaaaaacaactaataaataacccatggcaggagcctrgcagtagcagagtgctttgggtgcgaccatgggagtcgtcatagcccattttcagttggttttatttccagggtttcgtgtcgaagcagaatgctgcaatgcttatgttgcaagggctgcggagaggcattggtatgctaagagrmggcttttcagtacagaactgcatgaaaagatttatgctggccctagaattcgcaaaacctgtttttattgcacctgggttccgtgccaaatttgagaaggcgcaagcgaaataaatcacatgtggaaaagagggttgatttatatcggacgggccaasctgaggcagatttaacctgctactgtcttaaaaataaatgagaacgtacaagcaaaattgtgggaaagcaaggatgagttcacactgctcccagctccacaatctatgtattttattcagtggttgatggtgcacataatg

SEQ ID NO: 73204 - DNA, 600 bp, Chicken  19866894354107_3
agatggaattaaagcatgggggaactgagcgagtgtagaagaaaaatgatgaaagggtaaaaaggaagctgtgattacagggaaaaaaatagcccacttccttgacacacacagagaaaaaaacaactaataaataacccatggcaggagcctrgcagtagcagagtgctttgggtgcgaccatgggagtcgtcatagcccattttcagttggttttatttccagggtttcgtgtcgaagcagaatgctgcaatgcttatgttgcaagggctgcggagaggcattggtatgctaagagrmggcttttcagtacagaactgcatgaaaagatttatgctggccctagaattcgcaaaacctgtttttattgcacctgggttccgtgccaaatttgagaaggcgcaagcgaaataaatcacatgtggaaaagagggttgatttatatcggacgggccaasctgaggcagatttaacctgctactgtcttaaaaataaatgagaacgtacaagcaaaattgtgggaaagcaaggatgagttcacactgctcccagctccacaatctatgtattttattcagtggttgatggtgcacataatgc

SEQ ID NO: 73205 - DNA, 600 bp, Chicken  19866894354107_4
tagcagagtgctttgggtgcgaccatgggagtcgtcatagcccattttcagttggttttatttccagggtttcgtgtcgaagcagaatgctgcaatgcttatgttgcaagggctgcggagaggcattggtatgctaagagrmggcttttcagtacagaactgcatgaaaagatttatgctggccctagaattcgcaaaacctgtttttattgcacctgggttccgtgccaaatttgagaaggcgcaagcgaaataaatcacatgtggaaaagagggttgatttatatcggacgggccaasctgaggcagatttaacctgctactgtcttaaaaataaatgagaacgtacaagcaaaattgtgggaaagcaaggatgagttcacactgctcccagctccacaatctatgtattttattcagtggttgatggtgcacataatgcccaaagagcgacagaaagaacatttcagacagtggtgattaaaaccctgccaagagtggaagcaaactgaaaagaaaagggaaaaaaaaaaaaggctcagatgcagaaagtgtcatgaatggcagcgtctattcacagggcttcatgtgtgtggagga

SEQ ID NO: 73206 - DNA, 600 bp, Chicken  19866894354108_1
gctatctgcatagcttcctgcagtgttccaggttagaggcacatctcctctgtacattttaatgtttttattaaaacgaacagaaatgtgtacttcttcagctgccttcatacagccggataaccagtggtaacaacaataccttaattcaaaccccaaaaagtattttgagtatctcgtcataatcatgaacactagagaaaaacctcagtgttgctaacttctgcctgggttatttgggtgccccagcacattcagcaaatgctctcagggctgggctgcccttggtgcagccaaggygatcactcaggattgcattgcaggggagcactgaactcctcttcaaagagagcaaatcagaggcacatctgcagctgggctccctaataacctctgctttgttcccgatctaaagcagaagttaaaagaaagggatcaggatatcaaaagggggcagggaggaatcagaagagctgcttttcagcatccatgatttcagatgttttcatttattctgaattttagtgcccccatcaattaaatctaacaaaggacagaactcttctaccactggagtgttcagtctggacattcacacac

SEQ ID NO: 73207 - DNA, 599 bp, Chicken  19866894354109_1
  misc_feature (1)..(10): n is any nucleotide
nnnnnnnnnnaaaaggaaaaactaaccgttggcatagcaacagggctatgacacttctgctcacactgctcatctctccatgaagggaaacatggcaggagccttctcagcccagctgacacctgccaggtattgccactgagcgcagacgaagggcagctatcatgcacacagagaacaaagcccttcagaacaaaatgcttatttaactcagcttttgtgctgtgggttcccacttccactgcctccccttgttcaggaaaggtcactgctcttcccttctgggcccattttgtgctsctcttctctctgactgagaattgttaaagcaatctcaggtctatctcagatttcaaagcatggcttgacattgtatgaggtaccttccaagcagcagctgcaaaagactaacttctaacagccactctaaacagcttttccagaggcccatgaacttgcagatgaaattacgggagctacaggaggtagtaaagaaagtcagaattcrttttctgcacatgctatgaagctgtaacctaatacttaaccaaaccaygcagcatgcccagggccagctgcagaaagcatacaattgagct

SEQ ID NO: 73208 - DNA, 600 bp, Chicken  19866894354109_2
actcagcttttgtgctgtgggttcccacttccactgcctccccttgttcaggaaaggtcactgctcttcccttctgggcccattttgtgctsctcttctctctgactgagaattgttaaagcaatctcaggtctatctcagatttcaaagcatggcttgacattgtatgaggtaccttccaagcagcagctgcaaaagactaacttctaacagccactctaaacagcttttccagaggcccatgaacttgcagatgaaattacgggagctacaggaggtagtaaagaaagtcagaattcrttttctgcacatgctatgaagctgtaacctaatacttaaccaaaccaygcagcatgcccagggccagctgcagaaagcatacaattgagctcaccagaaactatgcacccaagccacatcaaatgaatcatatcctacaaatgcccatatcctccactcccagcaagcgaggcagccgctgataactaactcagaagcagctgcctatgctgtagacatgggaaattgaagaatatgagccctagctgcggggaatacgaggacccacgatgacagacacatctagcgtggcaggagaga

SEQ ID NO: 73209 - DNA, 600 bp, Chicken  19866894354109_3
caggaaaggtcactgctcttcccttctgggcccattttgtgctsctcttctctctgactgagaattgttaaagcaatctcaggtctatctcagatttcaaagcatggcttgacattgtatgaggtaccttccaagcagcagctgcaaaagactaacttctaacagccactctaaacagcttttccagaggcccatgaacttgcagatgaaattacgggagctacaggaggtagtaaagaaagtcagaattcrttttctgcacatgctatgaagctgtaacctaatacttaaccaaaccaygcagcatgcccagggccagctgcagaaagcatacaattgagctcaccagaaactatgcacccaagccacatcaaatgaatcatatcctacaaatgcccatatcctccactcccagcaagcgaggcagccgctgataactaactcagaagcagctgcctatgctgtagacatgggaaattgaagaatatgagccctagctgcggggaatacgaggacccacgatgacagacacatctagcgtggcaggagagagaggatcacaacccatcccagcctgctctgtaaacttagcagcatggt

SEQ ID NO: 73210 - DNA, 600 bp, Chicken  19866894354111_1
tccagtctgtgcaggtcttgttgaatagcagcacagccttctggtatgtcagaaaatatatttatggatccaaatatgtttcacaaccaaagcttattcctttctccattttccttcctactgaaaatatttcagtattattattttttttttaaatgtcctggcctatttgacctagacaggaaaatgttcttccaagaagaaaagagtggagtttgattatagaccagtttagccaacagtaggaagaacagccttaaggaaaaagtaacttctgcagtaagttttctgagaatgagrcaagagaggaattaactgaagaagaatcaatgctatcttatgaaacaatgttattttttgcactaataaagtgttaagtttgattgtaaaaattggcttaccttgatctacatttccactataaagaatcatttgatttytttgtaaaaaaacactgaaaacttttcaaaaatgcataaagagaaattatttcattttaagaaaagaaaaaaaaaataaagaggaagaaattatacattagtaaaaaatgatgttccagacactggaaaagaagactgaatcatattgctgtcctttatt

SEQ ID NO: 73211 - DNA, 600 bp, Chicken  19866894354111_2
ttattttttttttaaatgtcctggcctatttgacctagacaggaaaatgttcttccaagaagaaaagagtggagtttgattatagaccagtttagccaacagtaggaagaacagccttaaggaaaaagtaacttctgcagtaagttttctgagaatgagrcaagagaggaattaactgaagaagaatcaatgctatcttatgaaacaatgttattttttgcactaataaagtgttaagtttgattgtaaaaattggcttaccttgatctacatttccactataaagaatcatttgatttytttgtaaaaaaacactgaaaacttttcaaaaatgcataaagagaaattatttcattttaagaaaagaaaaaaaaaataaagaggaagaaattatacattagtaaaaaatgatgttccagacactggaaaagaagactgaatcatattgctgtcctttatttaatatggagggcaaagccatgcattacatgaaatgagaaagattagtctatacttcatcatctgaagtcaatgatgttctattttcttcctctagaaacagttttaattaaaaaatgacagaaatcaacccaaaaaata

SEQ ID NO: 73212 - DNA, 600 bp, Chicken  19866894354113_1
ttactgacaggttacaaagcaatgtaggttaaccatcctaattgctggatcacagaactacaataattttttttttccaaaaggtctttatgacaaagactcacgaacaaacaggagaaccaggaacatctgagactggacgactctcactgctgactctgagccaaggcacatcagttttctcagttcatcaagggccagtcaactagtagttattgcacaggaaaaccaaagcttcacttacctagaaaaagaaagaaagaaagagagaaaatacagttagtggatttccctgaaacrtacagatgctggttatctttatttcccaggtgattcccacatccaggcacctcgttaggagattcctgacatgaatgatctatgctagcgcttttaccacatggccactatctctcctggtatttaatgctctgtggtgctatttaatgttatacagattattcattaagaaaagcaaaactgagcaggtgttttcctcaacatcttgttctgttaaaaaaaaataataataaaaaggagcaagagaggctctatgacaacattaaccacagggagggaacaaattattctgactgtgaa

SEQ ID NO: 73213 - DNA, 600 bp, Chicken  19866894354114_1
gctcatggctggcacgccatagggctgtctagctgtgcatcagttccagcctcatctctggagactactaagtaacagaataggcagacaaagctttgtgaacgggactgggttcattatactttcctcctgtctgcacctttctccttaaaagccttttcttggtgctcagattatacagtaatagctgctacttaccggaacatagactcccccaaggaagaaagatattccagaaagatctcttctgtaacttcagtgttccccaagtcaataactgagtctggggggccaagaagygttcctccctgtaggaattaacaygcagaagactcttcaaatcacactgaattggttttggctccactgaattgagccctcccggcttgtacaggcacagaaggaggaacttctagtatgtttatcaaggaaagggccctactggccttccattcttcactcagaggctgagaggcagtgtgttgaaagctctaagctctgacagaactctgctttagaggaacaactcatcagttttacctctccaagaacagaaaggtctgttgaagcatcatggattttttctttaaccttgaaaag

SEQ ID NO: 73214 - DNA, 600 bp, Chicken  19866894354114_2
ctgtctagctgtgcatcagttccagcctcatctctggagactactaagtaacagaataggcagacaaagctttgtgaacgggactgggttcattatactttcctcctgtctgcacctttctccttaaaagccttttcttggtgctcagattatacagtaatagctgctacttaccggaacatagactcccccaaggaagaaagatattccagaaagatctcttctgtaacttcagtgttccccaagtcaataactgagtctggggggccaagaagygttcctccctgtaggaattaacaygcagaagactcttcaaatcacactgaattggttttggctccactgaattgagccctcccggcttgtacaggcacagaaggaggaacttctagtatgtttatcaaggaaagggccctactggccttccattcttcactcagaggctgagaggcagtgtgttgaaagctctaagctctgacagaactctgctttagaggaacaactcatcagttttacctctccaagaacagaaaggtctgttgaagcatcatggattttttctttaaccttgaaaaggatgctttgagtagccaggccttc

SEQ ID NO: 73215 - DNA, 600 bp, Chicken  19866894354119_1
gacctaagatctccttattaattagcatcttcgtggtggtcctggaaggcacagcccaggcatttcccagccctgtgctgacactctgcttgttgctgtagggtgggaaatggaggagtgaatgagtggggctgtgaagttgttgtatgggatcccaaaagattgcagctgggcgattgtgcaagcgtggcacccacccctaaggaggcacagagctacaccagcctgcagacacttcacatccagacacgaatggcctaatgccaggaagaacttagcaagttaatgctagcacagaaygyatgatataggaagaaagccctgttggaatgctaacatgagtaatcaccagctaaatgatggagctttggcaaaattggtgacttcttcgttaatttttgggtgccagagctgcacccactgcctcatacactgggggagaaaaaaaaaaaaaacaaggggaactgcccaaagaggatgcagggccagatgcactgccacagcacttctgcctgcactgaaaagggaagtgcacatttctgctgtcccagccacacttcccatcagcagagaggcaactggggcagagagctggctctg

SEQ ID NO: 73216 - DNA, 600 bp, Chicken  19866894354119_2
cctaagatctccttattaattagcatcttcgtggtggtcctggaaggcacagcccaggcatttcccagccctgtgctgacactctgcttgttgctgtagggtgggaaatggaggagtgaatgagtggggctgtgaagttgttgtatgggatcccaaaagattgcagctgggcgattgtgcaagcgtggcacccacccctaaggaggcacagagctacaccagcctgcagacacttcacatccagacacgaatggcctaatgccaggaagaacttagcaagttaatgctagcacagaaygyatgatataggaagaaagccctgttggaatgctaacatgagtaatcaccagctaaatgatggagctttggcaaaattggtgacttcttcgttaatttttgggtgccagagctgcacccactgcctcatacactgggggagaaaaaaaaaaaaaacaaggggaactgcccaaagaggatgcagggccagatgcactgccacagcacttctgcctgcactgaaaagggaagtgcacatttctgctgtcccagccacacttcccatcagcagagaggcaactggggcagagagctggctctgag

SEQ ID NO: 73217 - DNA, 600 bp, Chicken  19866894354119_3
ttgtatgggatcccaaaagattgcagctgggcgattgtgcaagcgtggcacccacccctaaggaggcacagagctacaccagcctgcagacacttcacatccagacacgaatggcctaatgccaggaagaacttagcaagttaatgctagcacagaaygyatgatataggaagaaagccctgttggaatgctaacatgagtaatcaccagctaaatgatggagctttggcaaaattggtgacttcttcgttaatttttgggtgccagagctgcacccactgcctcatacactgggggagyaaaaaaaaaaaaacaaggggaactgcccaaagaggatgcagggccagatgcactgccacagcacttctgcctgcactgaaaagggaagtgcacatttctgctgtcccagccacacttcccatcagcagagaggcaactggggcagagagctggctctgagctgggtttgtaagcccagggtttgtaagccccacagctggagggagtgcagctgaggagctacaggggagatgcacataatcccagtgcaaggtgtacaaagtatgcaagatgagcaaggcatgcaaggtgagcaaagaa

SEQ ID NO: 73218 - DNA, 600 bp, Chicken  19866894354119_4
tgtatgggatcccaaaagattgcagctgggcgattgtgcaagcgtggcacccacccctaaggaggcacagagctacaccagcctgcagacacttcacatccagacacgaatggcctaatgccaggaagaacttagcaagttaatgctagcacagaaygyatgatataggaagaaagccctgttggaatgctaacatgagtaatcaccagctaaatgatggagctttggcaaaattggtgacttcttcgttaatttttgggtgccagagctgcacccactgcctcatacactgggggagayaaaaaaaaaaaacaaggggaactgcccaaagaggatgcagggccagatgcactgccacagcacttctgcctgcactgaaaagggaagtgcacatttctgctgtcccagccacacttcccatcagcagagaggcaactggggcagagagctggctctgagctgggtttgtaagcccagggtttgtaagccccacagctggagggagtgcagctgaggagctacaggggagatgcacataatcccagtgcaaggtgtacaaagtatgcaagatgagcaaggcatgcaaggtgagcaaagaat

SEQ ID NO: 73219 - DNA, 600 bp, Chicken  19866894354119_5
gtatgggatcccaaaagattgcagctgggcgattgtgcaagcgtggcacccacccctaaggaggcacagagctacaccagcctgcagacacttcacatccagacacgaatggcctaatgccaggaagaacttagcaagttaatgctagcacagaaygyatgatataggaagaaagccctgttggaatgctaacatgagtaatcaccagctaaatgatggagctttggcaaaattggtgacttcttcgttaatttttgggtgccagagctgcacccactgcctcatacactgggggagaayaaaaaaaaaaacaaggggaactgcccaaagaggatgcagggccagatgcactgccacagcacttctgcctgcactgaaaagggaagtgcacatttctgctgtcccagccacacttcccatcagcagagaggcaactggggcagagagctggctctgagctgggtttgtaagcccagggtttgtaagccccacagctggagggagtgcagctgaggagctacaggggagatgcacataatcccagtgcaaggtgtacaaagtatgcaagatgagcaaggcatgcaaggtgagcaaagaatg

SEQ ID NO: 73220 - DNA, 600 bp, Chicken  19866894354119_6
gaactgcccaaagaggatgcagggccagatgcactgccacagcacttctgcctgcactgaaaagggaagtgcacatttctgctgtcccagccacacttcccatcagcagagaggcaactggggcagagagctggctctgagctgggtttgtaagcccagggtttgtaagccccacagctggagggagtgcagctgaggagctacaggggagatgcacataatcccagtgcaaggtgtacaaagtatgcaagatgagcaaggcatgcaaggtgagcaaagaatgcaaggtgtgcaaggcgygcaaggctcagggagtgagctgctgcatggaccaaacccacatccaggggcacccaccccacgtgctgctgccagggctcagccccatggctgggaataaggctcacgacagcactgcactgcggccatttccttattcctgtctccaaaatgctttgaagttagctcagtgaattagcaaggatgaaataaatcagttgttttgtgccaacttcaggtctgaatcatggtggggggtcaagtcaatctcaaagaattttagttgggactccataggatgaaattctggtaatcagaagt

SEQ ID NO: 73221 - DNA, 599 bp, Chicken  19866894354120_1
  misc_feature (1)..(7): n is any nucleotide
nnnnnnngagaggaagctccggcccgtggagacatcataccggggtcagaaaggtactggcatggcctcctctgcaccacgggtgtcatggcaggacccagtgccaaaccccatccccttcgcagggtacagctcgctgccctgcatcccacacgcctgctccagccacctcacctccaactcctgcatcgatctctccatgcccgaggccagcaccgcgccagcacggccacggccccgcgtcctgctcaaggcacccacactggcagagatggaggagatgagcatctccgaggtgcraaargggctgcggtggggatgccaggggggcacaggacagaggtgcgggggtctctgggtgacgctgtccctgtggccttgcaggaggaggactcaccgagcacagagtctgcctcggggctgcccatgaagcgggaccgctccttctcagagcaggacctagcccagttccagagtgagcttgctggtggccaygcagcacccaaggtgctggagtcactggatcctgagccccggccccgatcaggtacctctgcaataccccaagcccagtcctgtgttgggatccccatcccatg

SEQ ID NO: 73222 - DNA, 599 bp, Chicken  19866894354120_2
  misc_feature (1)..(3): n is any nucleotide
nnngagaggaagctccggcccgtggagacatcataccggggtcagaaaggtactggcatggcctcctctgcaccacgggtgtcatggcaggacccagtgccaaaccccatccccttcgcagggtacagctcgctgccctgcatcccacacgcctgctccagccacctcacctccaactcctgcatcgatctctccatgcccgaggccagcaccgcgccagcacggccacggccccgcgtcctgctcaaggcacccacactggcagagatggaggagatgagcatctccgaggtgcraaargggctgcggtggggatgccaggggggcacaggacagaggtgcgggggtctctgggtgacgctgtccctgtggccttgcaggaggaggactcaccgagcacagagtctgcctcggggctgcccatgaagcgggaccgctccttctcagagcaggacctagcccagttccagagtgagcttgctggtggccaygcagcacccaaggtgctggagtcactggatcctgagccccggccccgatcaggtacctctgcaataccccaagcccagtcctgtgttgggatccccatcccatggaca

SEQ ID NO: 73223 - DNA, 600 bp, Chicken  19866894354120_3
ctccatgcccgaggccagcaccgcgccagcacggccacggccccgcgtcctgctcaaggcacccacactggcagagatggaggagatgagcatctccgaggtgcraaargggctgcggtggggatgccaggggggcacaggacagaggtgcgggggtctctgggtgacgctgtccctgtggccttgcaggaggaggactcaccgagcacagagtctgcctcggggctgcccatgaagcgggaccgctccttctcagagcaggacctagcccagttccagagtgagcttgctggtggccaygcagcacccaaggtgctggagtcactggatcctgagccccggccccgatcaggtacctctgcaataccccaagcccagtcctgtgttgggatccccatcccatggacagtcagtgtccctgtcctcagcacagcccaccccatgtcccgcatgccctgtgacatccctctccccgtgtcaccaagggtcactttgccatgccctccagccaacacttgctggaggagttgtgtgtggcagcgtgtcctcactgtgtcctcccggtgtcccaccacgcaggctctgtccccgccagctacc

SEQ ID NO: 73224 - DNA, 599 bp, Chicken  19866894354128_1
  misc_feature (1)..(189): n is any nucleotide
nnnnnnnnnnnnnnnnnnnnnnnnnnnnnnnnnnnnnnnnnnnnnnnnnnnnnnnnnnnnnnnnnnnnnnnnnnnnnnnnnnnnnnnnnnnnnnnnnnnnnnnnnnnnnnnnnnnnnnnnnnnnnnnnnnnnnnnnnnnnnnnnnnnnnnnnnnnnnnnnnnnnnnnnnnnnnnnnnnnnnnnnnnnnnaagaaaacctaaggactgacctaagagctctttatgcaccatgtatgggaactgcagaatcatggcctgaacctctgattaatcacctgaggcgagcgctgagtcagctgsagggacacaggtgaacacaatttcacctgagtgaccagaatgggtggagccaggctcctagacccccccatttaagggctgactcccacrgaggaaggatctctatctggagatcacccctcttggagcccttctgcaagccaggccatgggtaagctctttatctcattactcccttgtaaatgcaataatctctgtggtcctatacctatttaccttacaatctgtatacctgtttgccatacgcaccataaaaccattcttgcatgatgggtttttgttgttgttttgtttttgtt

SEQ ID NO: 73225 - DNA, 599 bp, Chicken  19866894354128_2
  misc_feature (1)..(99): n is any nucleotide
nnnnnnnnnnnnnnnnnnnnnnnnnnnnnnnnnnnnnnnnnnnnnnnnnnnnnnnnnnnnnnnnnnnnnnnnnnnnnnnnnnnnnnnnnnnnnnnnnnnaagaaaacctaaggactgacctaagagctctttatgcaccatgtatgggaactgcagaatcatggcctgaacctctgattaatcacctgaggcgagcgctgagtcagctgsagggacacaggtgaacacaatttcacctgagtgaccagaatgggtggagccaggctcctagacccccccatttaagggctgactcccacrgaggaaggatctctatctggagatcacccctcttggagcccttctgcaagccaggccatgggtaagctctttatctcattactcccttgtaaatgcaataatctctgtggtcctatacctatttaccttacaatctgtatacctgtttgccatacgcaccataaaaccattcttgcatgatgggtttttgttgttgttttgtttttgttttgctttctaatgaagctctcttccctacttctttcaatgtctccttaattttgctgagtccactttttgggattgtgtaatcactacag

SEQ ID NO: 73226 - DNA, 599 bp, Chicken  19866894354130_1
  misc_feature (1)..(32): n is any nucleotide
nnnnnnnnnnnnnnnnnnnnnnnnnnnnnnnncgatttgctaacagcccacaactacgtgaaaggggaactgccaagattagaaataaattctcctctgtagtgctggatggaaaattgcaatggaaaaaagaaggaagcaaattgcagcatgggagattctggttggagaaagaaaacatccttctgcaggtgggtgtggtagtcccaggacacatcaccaggcagatgcaggatctccaacttaagagattctcaacacttggctgaacaatgccagtcaccctgtcctagtgatggrgacagccttgctccaagcataagaccgtactagagacacccagatgtctgctccattgaaaccactatgattccaagacgtgcttaagygaagcttgtcaagagccactgaaaaattaatctagggcaattctcaaataagagttataggaattctcaaacaagttacaggaatttcctagattatcctctttcatttctaaggatacagaaggaaagaaagagaggagaacgtttaccaccacaccattttgcaactctgcctgtagaaaayattctcacttacctccagttcactgt

SEQ ID NO: 73227 - DNA, 600 bp, Chicken  19866894354130_2
ttctcctctgtagtgctggatggaaaattgcaatggaaaaaagaaggaagcaaattgcagcatgggagattctggttggagaaagaaaacatccttctgcaggtgggtgtggtagtcccaggacacatcaccaggcagatgcaggatctccaacttaagagattctcaacacttggctgaacaatgccagtcaccctgtcctagtgatggrgacagccttgctccaagcataagaccgtactagagacacccagatgtctgctccattgaaaccactatgattccaagacgtgcttaagygaagcttgtcaagagccactgaaaaattaatctagggcaattctcaaataagagttataggaattctcaaacaagttacaggaatttcctagattatcctctttcatttctaaggatacagaaggaaagaaagagaggagaacgtttaccaccacaccattttgcaactctgcctgtagaaaayattctcacttacctccagttcactgtcttgtgaagaagaggtgtctgctttccttttccctctgttcttcccagggatattttttcttgcctgttcatctgactctttacttgctg

SEQ ID NO: 73228 - DNA, 600 bp, Chicken  19866894354130_3
tgccagtcaccctgtcctagtgatggrgacagccttgctccaagcataagaccgtactagagacacccagatgtctgctccattgaaaccactatgattccaagacgtgcttaagygaagcttgtcaagagccactgaaaaattaatctagggcaattctcaaataagagttataggaattctcaaacaagttacaggaatttcctagattatcctctttcatttctaaggatacagaaggaaagaaagagaggagaacgtttaccaccacaccattttgcaactctgcctgtagaaaayattctcacttacctccagttcactgtcttgtgaagaagaggtgtctgctttccttttccctctgttcttcccagggatattttttcttgcctgttcatctgactctttacttgctgttgctcttgacaatgagggacttgtggatgcatctcctgcagaaaaaaaatcaaatagctctcatcccctgttttactattcaatagcttctcttaatacttcttgacaccatatatcagaaactcttagtctggagtgaaactacaaaggaaagtattgagtaatgtctgtccatcctagatt

SEQ ID NO: 73229 - DNA, 600 bp, Chicken  19866894354138_1
taataattccaagtacagcattactttccaataaatagtgttttagaagcaatccttgcaaaaacatcccctgcagtgtgtgtacaggtcttttctgctatcggaataatctattaagcctttgattatgacaaagatcatcagtaatgcctctaaacattgataacatttatgcagatactggaagctctgatcacttggtatgtgtgagctcagtgttaagaggcagctctccaatgcagttcctcagatgagagctcatctctggacatcttaataaagatgcacgtcccatagggraagtgccagaaaagtcagttacagtaaactactatcagacacagaagaggcaatttacctgatggagacaagcagaatgggaagaactccacacggagtacatgatccaggcaaaggaaatttactgagtgatttgaacaaagaagaccaaataacgtggattttataattccatattttctaatgatccagtcacagtcaataaggagttctggtgctgactgcagcagagccaaaattttcttcgtgatacatagatacagatagaataataacacagattttaacggttctagggtt

SEQ ID NO: 73230 - DNA, 600 bp, Chicken  19866894354151_1
catatccctgtaccagcaattgtagagtctgagatctaggggcagccactgggcaggccaggtgacctgggccggactgctggtgggatccactttgtgcagatgtgtatgtatatgtgtgtatttgttcatttgtttgttggtttatgtgatctctaagacacagatatgcaaggagcctttttccaccttacagtgcctgtcagcatctggctgtggctgagtcctgctttcctcagctgcacccttcaggccctgtgtgcatagcagtaaatcttggtgagctttcaggaccgaggwagtgtggggctctgtggctgttaattcccttacaaccccattttgatgcccttccttgggctgagggagtcctggagtagttcagccccagataaaccatgcgtggtgctctgagcagcctgatctgacaccctgcagatgtgtctgcttattgcagaggagttggacaagatggcctttaaaggtcccttccaactcttaagagttctgtgattctgtggtaagtgagcatccgttttgggcatgggctggttgacccatcaatttaatccattttagcaatctcagtaacaaataatg

SEQ ID NO: 73231 - DNA, 586 bp, Chicken  19866894354158_1
atctcatagaaagagttcaagagggtggacttacattgatttagcagagccaaaaggagctagagtccttcctcctctatccaaaatttttagttactatttgccatgtttgcaagaagtttcttataaaatgatgatcatttctttattttattttatttttggcctcctcagacacagaaaaggctgaggtacttaacgcgtcctttgcctcagtcttcacagccagtcaggctcctcacacctcttgtgtccgggaaattctaagtggggatcaaaggagcaaaatcactcccaacytaagagcagagcaagtctgagaccatctcatgagacggaatgtgtacaaatcaatggggcctgatgacatgcatcccagggttctgaaggaagtggctggtgtggttgccaagtcgatctccatatatatctgaaaaattgtggctgtcacgcaaagtccctggtgaccagaaaaggggaaacgtcacaaaggtggacatgagccagcagtgtgctcttgcagctcggaaggccagctgcatcctgggctgcatcaaaagagtggggaagaagggagagggaggtg

SEQ ID NO: 73232 - DNA, 600 bp, Chicken  19866894354166_1
atgctggcagcactttttatgaatggcaacagttggattaatacaattgtagatgtacgtgcatcaagatgtggggtctctctctgttccctaagatgcaaatagatgcctcaaatagatgccttcagcatcaccactgagcagctctccatctgggacaatgccccactttacagaagggaaaacaggatgataaccactcccatggctatggtttgaagaggacaacaaagtcaaggttggataagtgaagcaattagttaggtatttgataggggaaaaaaaaataagcaatgctayatagataaaacagcaaaagattacaccaaaatctgccagggagagctcagctcttggctgctatggggatcacgtcccattctgctccctggcatccagttggagaaggaaatgggtccttcttgggactgtgatcaaccaagcaccccaagcctccaaatactgtcttacaagtggggatggagaacaggtaacaaacccacagataaccatatatcctccctttccttctagctctgatgggatgcaggaggagatgcttagggaccttctgtccatctctccgtgtcaccacattat

SEQ ID NO: 73233 - DNA, 600 bp, Chicken  19866894354166_2
gatgcaggaggagatgcttagggaccttctgtccatctctccgtgtcaccacattattaatgaggtggactgctctgcggtctgtgtgactattaaggcaagagtcatgggtttattaggctctgcttagcattgattctctttcaagttgtcctgctttgtgcttagcagatttgcatacaaatgaagtattacctggagtcaacaaggttgggtgttcagtttgacctgatagtgtgcacttttgcagtattcatagaacaacagaatcatagaatggcttgggttggaagggacttsaaggatcatcaagttccaatccccctgccacaagcagggttgccagccactatgtcaactactagaaaaaattgcacccattgacattcatcaatacctacagaatgtctgtagagaccaaacagtggatgtgagcacagtgaggtggtgggtggtgcatttcagcagtggtgccagtgactgtgggtcacctctgctagtgcagatttttgtgagtgtggcatgaaggctcttggtcatcgctggtaaaaatgcatagttgatggtggtggctgttaaaaacagtgttttgtagctgat

SEQ ID NO: 73234 - DNA, 499 bp, Chicken  19866894354166_3
atcaatacctacagaatgtctgtagagaccaaacagtggatgtgagcacagtgaggtggtgggtggtgcatttcagcagtggtgccagtgactgtgggtcacctctgctagtgcagatttttgtgagtgtggcatgaaggctcttggtcatcgctggtaaaaatgcatagttgatggtggtggctgttaaaaacagtgttttgtagctgatattttgctcaaacagtgttattgtgctctttgtatctgttgtcgtttccatggaaataaatagacagcattacttttggagtgacctaygtatatgcggcccaagacaattcctcttcactcagtgcacacaggcaaaccaattggtcggactcccatgcctttatgtcttgtccaagcttatccacccctctcttagggaaaattcacaaataatacttcactgatgctggagagaagggcaccagactcacgctccccatctagctgctctaaatcttcgccagaa

SEQ ID NO: 73235 - DNA, 599 bp, Chicken  19866894354173_1
  misc_feature (1)..(83): n is any nucleotide
nnnnnnnnnnnnnnnnnnnnnnnnnnnnnnnnnnnnnnnnnnnnnnnnnnnnnnnnnnnnnnnnnnnnnnnnnnnnnnnnnnnatctgggaaactgaacactgtgatccagctccactcttgtgttgaggtaatcaaggaggaaacacagaattcatctaaagcaaacatctccaaccttcagaggtggtgaaggaaacctgagactgcatgttctggaaaacagggaatgttctgagcagggaacagtagagcccagagcccagccttcctcgctcctcatccaggtggtcagctggtraagggacagcttgcttctgctaagtgctgagctcacttatgctgcccttcagtattttattggcacccaccgggagtctttggccacagctgtggtctaaataattacagaagggaagaggggccagcatgaacattccaatattacaaatatgactccacagtgagcattagctgctctttcccaacctcctctccatgcttgaaggagcataacagtaggaagagaccaagtccggccctcaaccctctgtcctagagcatggctttattggtaattaaaaactacatctcagctta

SEQ ID NO: 73236 - DNA, 599 bp, Chicken  19866894354177_1
  misc_feature (1)..(203): n is any nucleotide
nnnnnnnnnnnnnnnnnnnnnnnnnnnnnnnnnnnnnnnnnnnnnnnnnnnnnnnnnnnnnnnnnnnnnnnnnnnnnnnnnnnnnnnnnnnnnnnnnnnnnnnnnnnnnnnnnnnnnnnnnnnnnnnnnnnnnnnnnnnnnnnnnnnnnnnnnnnnnnnnnnnnnnnnnnnnnnnnnnnnnnnnnnnnnnnnnnnnnnnnnnnttttgccatttttgtatttctaaaacagcaatctgaagagtttccatattatttctgaaaaacatgatcaggatgattttcaaaaaatgcacatctyggttactccaacagataaacagtaaaagtgctgaatatcaacccagaaaaacagtgaaagtttctcacagtagtaatttgttttgatttcctccaaacaggtttgcttttataatggttatatcctaactcataggttcttctgggaatgtagttgtgttttgcaaaagatatccgcagtagtactttcttaaatgatgatatatgtaaactgataattcaataaaatacaaaacttattctatatcctttgggtaatataactcaaaactgaaaacccragaagaaactcatctgaca

SEQ ID NO: 73237 - DNA, 600 bp, Chicken  19866894354177_2
tttcaaaaaatgcacatctyggttactccaacagataaacagtaaaagtgctgaatatcaacccagaaaaacagtgaaagtttctcacagtagtaatttgttttgatttcctccaaacaggtttgcttttataatggttatatcctaactcataggttcttctgggaatgtagttgtgttttgcaaaagatatccgcagtagtactttcttaaatgatgatatatgtaaactgataattcaataaaatacaaaacttattctatatcctttgggtaatataactcaaaactgaaaacccragaagaaactcatctgacaacagaaaataattcctagatgaattttaagagaaactcttctctcagaaggagacattttaaagagctaggttgttaaatctgaatcgtttgctctattttgcctcagccattagaactacacatcagaacacttctttagtgctctgtttggtttcaaaggggacagactccttgcaaacaaggagtgacaaacaagttttttctcaagtcctgcaaacaactatcagtatatgttcaggcagattgggatcctgaaatttgaaacaggtggtgatattc

SEQ ID NO: 73238 - DNA, 600 bp, Chicken  19866894354193_1
ataacctctatgtggtctatcaagatgcatgtctgtgttgagcgctggaagatgttgcacccacatcaggaaatgcacacttagtaagaggtagccaagagtgttcactgagcattttaaaattgcacaggtgcctcagctgtgtgcttttaagattagagtataacaaaaagacacggccagctcacttgctcaagatggccaggttagaagtggccctaggactggaaaggtgagaagaacgtaaacataccaatatcaagagataacttgcaaaaggaacttctttcagagaacccrtgcaatgaaaaggaaggctgcagccaggtgcagctcaggaatgtcaacagcctcccgcattacacataagaaatttttccagaggcatgttacaatccataggacatgcaagtgaaccagaaggtcttactcatgattctgcactgaatcttctttcactttgcttcccagctgttttgggctataagaaggaacgtaaggatcccttcttggagatttayagatgacccatgtagagtatgaaagcgttgtagagctgcagccttccaaacaaaatatttgaaccactggtatacaacc

SEQ ID NO: 73239 - DNA, 600 bp, Chicken  19866894354193_2
ggactggaaaggtgagaagaacgtaaacataccaatatcaagagataacttgcaaaaggaacttctttcagagaacccrtgcaatgaaaaggaaggctgcagccaggtgcagctcaggaatgtcaacagcctcccgcattacacataagaaatttttccagaggcatgttacaatccataggacatgcaagtgaaccagaaggtcttactcatgattctgcactgaatcttctttcactttgcttcccagctgttttgggctataagaaggaacgtaaggatcccttcttggagatttayagatgacccatgtagagtatgaaagcgttgtagagctgcagccttccaaacaaaatatttgaaccactggtatacaaccatgaaatggactgcagtgtaaagtcagctttatgatggcacttggagcaaagtttctgaactcatcaagaaaattaaattttcagtacttagcacaggagatataacaatgcactgtaaggatggcaggctggctttcaagtgctcattagagtggtttttatgaaaagcatgcaggttctggacaggatgctgctagcaccagattgttaaattcaccca

SEQ ID NO: 73240 - DNA, 600 bp, Chicken  19866894354194_1
atcatccagttccaacacccctgccatggacaggattgccaatccctaggtcatgctgcccagcgtcccatccaacttggccttgaatgcctccagggacaggacattcaaagcttctctgggtaattggttccagtgcctcaccaccctttgaatacaaaattttctactgaaattttgttttcagatacaatctgaatcttcagtcttttggtttaaatccattccctgttgtcctattgctatcagaccatgaaaaagtgagtttcccacttgtttataagctcgttttaagtactrgaaggctgtaatgaactctccctagagccttcttgcccagggaggtggtagagtcaccgatcctgaaggtgttcaacaaacgtttggacgttgtgttgagggacatggtttagcgagaactattggtgatgggtggatggttggactggatgatcctgcgggtctttttcaacgtcgggtgattctatgattctataattctattattctcttctccaagctaaagaagcctaatgccctaagcctgtcttcataggagagattctccaggccactgatcatcctcaaggccctcctctg

SEQ ID NO: 73241 - DNA, 599 bp, Chicken  19866894354200_1
  misc_feature (1)..(80): n is any nucleotide
nnnnnnnnnnnnnnnnnnnnnnnnnnnnnnnnnnnnnnnnnnnnnnnnnnnnnnnnnnnnnnnnnnnnnnnnnnnnnnnntggttgcataccaggctcacctcggtacaggtcagcctggaacactcccctttaaaagggtgattccaagtcactggagactaagggaaacgttttgttcatccctcttaatctgagcacccatgtgaagctcctggcccacataagggtgcctaaactgggttgcatagaggccacataaagcagtatagtatctgtgacactggccagtgtctcaagrgtataaaagcgaagataagggtgaagcagcaaagttaaaatgaatcaaccgttacgagtgttagcacaacagattttcaggatcttttcatcatgcagatgtgtcttcatcatacttaaaggttatccaagcattcctcctgtctgggggatgatcttcttgtttaacttttatcaaatattactagtatctagggaaactgaatggtgcagtctgtcagggggaaggaagtttatttgaagaagcagaccctgacttccttagtctgatgtttgtataagacctgctgctagacatac

SEQ ID NO: 73242 - DNA, 428 bp, Chicken  19866894354200_2
atcatacttaaaggttatccaagcattcctcctgtctgggggatgatcttcttgtttaacttttatcaaatattactagtatctagggaaactgaatggtgcagtctgtcagggggaaggaagtttatttgaagaagcagaccctgacttccttagtctgatgtttgtataagacctgctgctagacatacgtgatttgctatgcaccactgtattcaaaatccttttttaaaatatattacctctggggaagttagaactttataaccaaacactatactcttccaattttccatttcwgagtagtgaagaaactactctcaggtgttaacaacagaggggagaccacattaaaaagcagtaggcttttctttatggcttaggattttatagatgaccggtgactttattttcttgccaagatagta

SEQ ID NO: 73243 - DNA, 600 bp, Chicken  19866894354202_1
ggttcttgtacttaccactagcctgatttcttcttttggagcaagctgttccagcagctcaaaacccagctgataacacagaatgctggactgacacagaccacattcaactgctttttcatctttctgacatgtgtgagaaccaccccagggtgcctggaacacattgtttatgatggatattatatcttttgaaatgctgttctctaagcccaaagtgacaccatcatcctggagctccatctgaaaaagtgaaaagagtaagtatttaatatttctttagaaaccacagcgctaagygttctgcctattcctacatctcttccaatcttcaagcccgagacttaacagctggagtaaggttttgaaggtaaataaacaatttcaagcacaggaccattaacattacctggagactgttactcaaaacagttggatctgaattctcaatgtataactttagctaaccaaaaattatgcatctaatctaagcctgtcaacaaacttcttctagcctgtagaaaaatcacatctccaaagaaaagctcattttactcatatgagacacctgacacaacgtgggaggtgtctacctgctct

SEQ ID NO: 73244 - DNA, 600 bp, Chicken  19866894354204_1
agggacaggtagcctaagagtattatagggatcctaataggctgcgtatggatggggtcaggaagaccaaggcccaaatgcaactggacttgacaaagggcacaaagaagaacaagaaaggcttctacaggtacataaaccagaaaaggagagaccaagaaggtgtaaccccactcctagtgaccaatacaggcaagctagtaacagtggacaagcagaaggctgaggtcctcaacaactttttttgctcactcttcactgacaactgctcttcacacatcactcaagaggatagtttgraaggtagagactggtggagcaatggccctcctgctgtaagcaaagaccagatttgcaactacctaaggaacttgaacaacagtaagtccgagtcccacatgagatgcatcccagagtcctgagggaattggctgatatagtcaccaaggcacttttgatgatatttgagaagtcacgacagtgacgtaaagccactggtcaccagaaagaaaggcaaagctgcatccattttcaagaaggatagaaaggaagacccagggagctactgacctgttagcgtcacctctgtgctggggaaga

SEQ ID NO: 73245 - DNA, 599 bp, Chicken  19866894354208_1
  misc_feature (1)..(207): n is any nucleotide
nnnnnnnnnnnnnnnnnnnnnnnnnnnnnnnnnnnnnnnnnnnnnnnnnnnnnnnnnnnnnnnnnnnnnnnnnnnnnnnnnnnnnnnnnnnnnnnnnnnnnnnnnnnnnnnnnnnnnnnnnnnnnnnnnnnnnnnnnnnnnnnnnnnnnnnnnnnnnnnnnnnnnnnnnnnnnnnnnnnnnnnnnnnnnnnnnnnnnnnnnnnnnnncccctcccctgactgctctgtgcagttccttcaggccctgttgcaccccttacatcgtaagcactgcccattcattttggtgctgctgaatartttaaaaaatgcagccctggttatacctactggacttcccccaagaatattctgctcacaaatatcccctgaggccaactatgccaaccatacacagccttcaatttgaagctaaatttactttcctttcttgtatgtcagcccatttgaattactgaaactatcaaggagggggatgattagttcagcgtatgcacccatatttcagttgcagttagctagcttcacaaagcaagccactctttctgaagcaaaacaaccctgggtttatttaatgaagccaaacactttatttaaaa

SEQ ID NO: 73246 - DNA, 600 bp, Chicken  19866894354210_1
tggggggctgtttagaaagaggtctatccctagcagctgccacattgctctctttacatacacaacggtcccactgatttctgtgctgaagcaccacagttgcccaatctctgctcgacatgcagacaaacgaagggagcatgcacaggctgcaaacaaaagcacaggtcaaggaggagatgcaaagccacaggcagccctgcacggagcacagccacacacacagaagggagaacacacacagaaggaagaacaaatgcacagggaattctgcactagggcagctctaacgatgggcaygcctgtgtcctgtgctgatagatggacacacgcaggtatacaggagtatctcaacacactcgtggttcaagaaaacctcctgcaggtttaaagtctcccgaccctgtaaattgatcatgtttttattgaaaacctgctctctcttcattcacttctaatagaactccattttgttctccactgactctggagaagggcttcagatgtcacaggcagcatactctaactcaactcttttactgtgcaaatgaaaatgaaaagaactacttggaatacaattggaaaccaacactaaaacat

SEQ ID NO: 73247 - DNA, 600 bp, Chicken  19866894354210_2
aggtatacaggagtatctcaacacactcgtggttcaagaaaacctcctgcaggtttaaagtctcccgaccctgtaaattgatcatgtttttattgaaaacctgctctctcttcattcacttctaatagaactccattttgttctccactgactctggagaagggcttcagatgtcacaggcagcatactctaactcaactcttttactgtgcaaatgaaaatgaaaagaactacttggaatacaattggaaaccaacactaaaacatttttcggtgacttattaacatattgcttggtgraagttagctgagaacgcattcactcctatctccacgatgtgcccacgatagctgcttctcgctgccttttcttcccaacttccaggagctatttagattccttcaatctgattctggaattgatccgacaccaccttcactagtaagaagccatgtaaatagcaacatttgacagtgaataatctcgttagctaaggagttctaaggaactcgtgattaacctcagaagctcgttgtctctgagcgtacaccattctaagtgagtgtgcactgaacagggtaagtgcctggcagcatgtc

SEQ ID NO: 73248 - DNA, 600 bp, Chicken  19866894354210_3
aagaattatgattaatgaaacctgggataatggcctgcatttttgtcattgtacttccaacgcaaatggaaaagaagcaaaaataatacattctttaaaaagaaaaaaaaaaaaaagaaaggaagatatactcaggaacattacaggccacactgcaaatggcaaacagcaacgggacaaatctgaacttttagtcaaactgttaggacaggatggaggtaactcccaagcgcaacgtgagaccacagcagcaggaaagcatcgggcagcgatgctgggatacacatctcctcctttctsatgtttccatgcaatatagaaataacactgatatcagagagcctgtacaagccctcccattccccagtgcccagccagcacctcatccgctccagctacaacccatgagctgcccattgcaatgccaagtccgaacgcagacgacatgcaaagcacaagctatcaacgagcacacggcaacggatgcgttccttatgaacacccttacagacgttttctttctatataacaatctgttaaggagcaatttgggttattcgtgtttgaagaacggagttttgcgttagcagaatctgcaaa

SEQ ID NO: 73249 - DNA, 600 bp, Chicken  19866894354210_4
ttttttcagctgtaatgtgtcagaattcttccctgtaaggcacaaagggaaagcaacaacaactgctgatgctcttgctttactcccagcataggttctaaagccctacacattcctgctagtcactgcaagtcaggcttggaacatgtctgcgcagctcctgccagctgcaatccctcacccaagccaaaggctgctgaaaaacagaacgtatttgtgcaaagttcacaatttttggtttaggtaagggaaaaaaaacagcactccaaatactccccaactcccagtgccttcatttgyatgacaccgaataaaaataatacagcatctaagaatcaagactgcacgtgccctagcatcctacaagtaactgcaaaagataaaagcaaaatcttggatggggtgactcctgtaaccgtgacaatactgtggcaggggagaaatggccccgtgtgcccccatcatccaactcagcatctgctggtggcattcccaccccaaggggaccccaggtaagggctgtgcagcacagagagcgctgrgcagagggtggtcagaccatggsagctgcttgctccaagggcacacagcgtgtcaaat

SEQ ID NO: 73250 - DNA, 600 bp, Chicken  19866894354210_5
ggtaagggaaaaaaaacagcactccaaatactccccaactcccagtgccttcatttgyatgacaccgaataaaaataatacagcatctaagaatcaagactgcacgtgccctagcatcctacaagtaactgcaaaagataaaagcaaaatcttggatggggtgactcctgtaaccgtgacaatactgtggcaggggagaaatggccccgtgtgcccccatcatccaactcagcatctgctggtggcattcccaccccaaggggaccccaggtaagggctgtgcagcacagagagcgctgrgcagagggtggtcagaccatggsagctgcttgctccaagggcacacagcgtgtcaaatactttcagacagtttccatctccccaggaatggatttgcaaatggaaagaaaaattcttgctatggaaactaaaacgcaccgtagactcgtaagctaaattatattggtggagagcaattacaataataatggcraggcgctccgtgtttattctatgggaaggaaaaaagaggacccaacaccgtatatgaaatctgacacaaaagaaactgatgtaacaaagcagtatccatagcaacaa

SEQ ID NO: 73251 - DNA, 600 bp, Chicken  19866894354210_6
ccaaatactccccaactcccagtgccttcatttgyatgacaccgaataaaaataatacagcatctaagaatcaagactgcacgtgccctagcatcctacaagtaactgcaaaagataaaagcaaaatcttggatggggtgactcctgtaaccgtgacaatactgtggcaggggagaaatggccccgtgtgcccccatcatccaactcagcatctgctggtggcattcccaccccaaggggaccccaggtaagggctgtgcagcacagagagcgctgrgcagagggtggtcagaccatggsagctgcttgctccaagggcacacagcgtgtcaaatactttcagacagtttccatctccccaggaatggatttgcaaatggaaagaaaaattcttgctatggaaactaaaacgcaccgtagactcgtaagctaaattatattggtggagagcaattacaataataatggcraggcgctccgtgtttattctatgggaaggaaaaaagaggacccaacaccgtatatgaaatctgacacaaaagaaactgatgtaacaaagcagtatccatagcaacaacaacttaatatttcagtcctctt

SEQ ID NO: 73252 - DNA, 600 bp, Chicken  19866894354210_7
gggagaaatggccccgtgtgcccccatcatccaactcagcatctgctggtggcattcccaccccaaggggaccccaggtaagggctgtgcagcacagagagcgctgrgcagagggtggtcagaccatggsagctgcttgctccaagggcacacagcgtgtcaaatactttcagacagtttccatctccccaggaatggatttgcaaatggaaagaaaaattcttgctatggaaactaaaacgcaccgtagactcgtaagctaaattatattggtggagagcaattacaataataatggcraggcgctccgtgtttattctatgggaaggaaaaaagaggacccaacaccgtatatgaaatctgacacaaaagaaactgatgtaacaaagcagtatccatagcaacaacaacttaatatttcagtcctcttcagctgcagtggattaaatataatgacaagatgttccctttgaaaagtaacctgttgccatggcaacgttgtattctgaaaagtaaacaggggctggtcaggaagagatggaagcctgcaacggaatatcaaagaggcagaaacctctttgagagcagggctgcaccagc

SEQ ID NO: 73253 - DNA, 600 bp, Chicken  19866894354216_1
gtgttaagccgatactctgagacctgatttcagtttgataatcattacacttacatgatggtacaagtcaccgcttgtagatttatgtcccccctcagctcttttgcattaatctgcctctgaataagctatttgcacttcctcagtgcatgcaggaaattgaaataaggtgcaaatttgtaggccttaaatctgaacaagtacagacagatatttttcacctgataccattcatttgtttcgagtaaatacaaaagacattttttattctttgtctttgtcctgaggcagttcctcacsaaaacgacggttatgttatttcctccgtatttatttcagctttctccaatggactgactaaacgaactatctggcaattagctctttaggcaggcactgcgcactgaggccgatagggtatttacggcagcacctctcccctcgtgtgggtcccttcctcctccctttgttttctgagcccccccccggctgagggtgcctctctggactggcggcagtgagcacaggtttaggccgcggtgcagccctcagtgctggggctccggcagcaccrcagtgcgtgagctgcagccacgctgc

SEQ ID NO: 73254 - DNA, 600 bp, Chicken  19866894354216_2
tctttgtcctgaggcagttcctcacsaaaacgacggttatgttatttcctccgtatttatttcagctttctccaatggactgactaaacgaactatctggcaattagctctttaggcaggcactgcgcactgaggccgatagggtatttacggcagcacctctcccctcgtgtgggtcccttcctcctccctttgttttctgagcccccccccggctgagggtgcctctctggactggcggcagtgagcacaggtttaggccgcggtgcagccctcagtgctggggctccggcagcaccrcagtgcgtgagctgcagccacgctgcacccctcgcgtattttaattgctggcaaataccgtttcagatgtttaaaagcaacaataaaaccctaagtgcccgctcgtaaattatgatcaggaaattttgagattcctggctgagctcgtccctcctaaagcctattcctcgtgggctgacctgtagccaatcaggctgtttatatcggagatttatgagcatgcatcttcctggcaatggcctgcatgatgacctagggctatggcaccagcaggggaagcattcatttcacagcagctgc

SEQ ID NO: 73255 - DNA, 600 bp, Chicken  19866894354217_1
aggggattttgcctctgagctgggaatgtgtggaaaacagatgactcatcacatgagtgatttcctttagaaaataccccaaaatcagtagcctaagaaaataaggcggttttcagtatattaaatcaattaagatattgacacatagtcttctgagacctctttctccaaatacattccaattggccccattgatcgcttaaaaactgactctaaaactgagggtgatgctaaagagatattagtggctgggaaatggacaaactgacagtcacatagaggatagttcctgttttttaytgaatgttttcaataaagcacagggggagagaaaggatgctggaccattttaattacgaagaggaaagtcacagacagtgctgttttgagagcctttattcacgttcattgaaggacctacaagcatcaccaaagacaagaggtaataaaagtggaagtagggtgattaaaaatatggagctggaaaataacagtggtattcatgggaaaatgtaacccagtacacccagggaaatgtaatttgaaacacagacattcaaaggcagggagaatcctagaaagcagcaatgctgacagaga

SEQ ID NO: 73256 - DNA, 599 bp, Chicken  19866894354221_1
  misc_feature (1)..(60): n is any nucleotide
nnnnnnnnnnnnnnnnnnnnnnnnnnnnnnnnnnnnnnnnnnnnnnnnnnnnnnnnnnnntgaatgtaactggctttgtgctttcgcatatatttcattatcaggtttcctaagtctcctatgcctttacacaaaactaggtctatatatagcaacaacctaaatttgctgaggaacttactttttccacctcatcttcaccaggaagccaagaaaaacagctctctcttctgagttataaaactcaattttataactgagttttctttgcggggtatggtgtttcttcaaacttgaaastcaaaaggaaaatacagcacagaaagttgtgcccaacttagtggaagctccctcagtctgaggagcaaggcatgccagtaatgtcaatcctttctgagccctagttctgtgacaaaatgtaagacccagcaagtagcacttatctatagggaaattcaaagggtctgtctctctcccccctctgttgtttttattgatgctatttttttccaaagacagtcaggattaaagtggtgtttgctgtctgtcaccattcaaattcgaacgaagtaacacaggaaataaaaacatgcaaaaaa

SEQ ID NO: 73257 - DNA, 599 bp, Chicken  19866894354224_1
  misc_feature (1)..(86): n is any nucleotide
nnnnnnnnnnnnnnnnnnnnnnnnnnnnnnnnnnnnnnnnnnnnnnnnnnnnnnnnnnnnnnnnnnnnnnnnnnnnnnnnnnnnnnctacattaaaaaaaataatcaatgagacataacaatgtacataatgacataaacccatgaaaattctcattttgatttttatttaaagtattgcatagggtaaatgaagaacgtgaaaagagaacaaagggataatttccacacaacagctgttcagctttctagagccaacatttcatatagccgatcacagtcactattatgcccccacatrcatgagtaaagtacaacagttacacttgacctggagctgtaagacaaatactcacttgtaattctcaataacactacttttgtatggccctcgttgctctcttgcctaggaggtagaagactgcagttctrttttgcttttttaaaagggaaacaaaagaatatcaaggtatcacactgctcagcaattcagwttaaatacatattcactagcgaggctttcaaacactttgtgcaataacttaaagcccctaaaatttgatgacctttttctaccacttagaaagaacacacctcaca

SEQ ID NO: 73258 - DNA, 600 bp, Chicken  19866894354224_2
gacataaacccatgaaaattctcattttgatttttatttaaagtattgcatagggtaaatgaagaacgtgaaaagagaacaaagggataatttccacacaacagctgttcagctttctagagccaacatttcatatagccgatcacagtcactattatgcccccacatrcatgagtaaagtacaacagttacacttgacctggagctgtaagacaaatactcacttgtaattctcaataacactacttttgtatggccctcgttgctctcttgcctaggaggtagaagactgcagttctrttttgcttttttaaaagggaaacaaaagaatatcaaggtatcacactgctcagcaattcagwttaaatacatattcactagcgaggctttcaaacactttgtgcaataacttaaagcccctaaaatttgatgacctttttctaccacttagaaagaacacacctcacactgatgtcatgtacgagagcactgcattggtaagagcaaagggctagatgtactttgcaataccatacaaaaactgagatccacacacacctcaatgtaatttgcaggctgttattaagggaacaacaaagg

SEQ ID NO: 73259 - DNA, 600 bp, Chicken  19866894354224_3
agaacgtgaaaagagaacaaagggataatttccacacaacagctgttcagctttctagagccaacatttcatatagccgatcacagtcactattatgcccccacatrcatgagtaaagtacaacagttacacttgacctggagctgtaagacaaatactcacttgtaattctcaataacactacttttgtatggccctcgttgctctcttgcctaggaggtagaagactgcagttctrttttgcttttttaaaagggaaacaaaagaatatcaaggtatcacactgctcagcaattcagwttaaatacatattcactagcgaggctttcaaacactttgtgcaataacttaaagcccctaaaatttgatgacctttttctaccacttagaaagaacacacctcacactgatgtcatgtacgagagcactgcattggtaagagcaaagggctagatgtactttgcaataccatacaaaaactgagatccacacacacctcaatgtaatttgcaggctgttattaagggaacaacaaaggctatactgaaattattgttttgctatctatctctctcaaattcaacagaagttgtataatcc

SEQ ID NO: 73260 - DNA, 600 bp, Chicken  19866894354230_1
gtaatgtttgttgcaggatgatttcatgccaaagcatttaccttagtgcaatattaaactgcatgattttggtttctatccaaaaagtaatggagtttcccagggagaagggggtatcagatgcccagggagctccagggacaagccctctctcaagaataacccattgcaccagacagtgtgacactggactctctatgaaagagtctgatatccaagatgaccagagatcactctgtggggaccaccacaagagcaacaggagaaacagatggaaggacacaagctcaaacctcagaygttgctaaatgcattgggtgtgaagatggactagctcacatcccatacctgtggtttataaccctgttgtcatgtgttgagagctagctgcttgaaatcagtagggatttaatgaccaatgaaggtaaaacaaaatattctgccagaacgtagaaagtatgctctaagtttgctttgcactggagaaaaggtggtggtgtcctgggctgtgcaatgagcatccygcggtggggtccagtctttcaactgtctatgggggggtcaaagcaggagccataactggccagtgcctaccatcac

SEQ ID NO: 73261 - DNA, 600 bp, Chicken  19866894354230_2
cagagatcactctgtggggaccaccacaagagcaacaggagaaacagatggaaggacacaagctcaaacctcagaygttgctaaatgcattgggtgtgaagatggactagctcacatcccatacctgtggtttataaccctgttgtcatgtgttgagagctagctgcttgaaatcagtagggatttaatgaccaatgaaggtaaaacaaaatattctgccagaacgtagaaagtatgctctaagtttgctttgcactggagaaaaggtggtggtgtcctgggctgtgcaatgagcatccygcggtggggtccagtctttcaactgtctatgggggggtcaaagcaggagccataactggccagtgcctaccatcactattgaatatctgcagtatcaaagagtggcagatccatcagtcagaggatccaaacatttttgcctggctgaagtgatgacgatccatctcctgatgcaagcctggataatgaggaaggagaagatgtgatttgaagaggggaagacagagaaactctctgaaagcaacagaccaagggagacttagtacgtttaaacccagcagaaggctgatccaaaaagta

SEQ ID NO: 73262 - DNA, 600 bp, Chicken  19866894354232_1
cagcaccgtgacccctgcagaccccatcctggccgccagctctgcccatgagctccactcatacggccccaagctgatttggggagagatcccataaaaaggcccattcttttctgatcgcattaggaaggctaagctctgtcccgagtgggcacgaggcaagcagagagggcagggggccctgtgtgccaccaccatcttagcacaacctgctgccctttgctcatgtgtttttattttcccccttctagccaccacgatggcctggagtccagcagcgaatacgtgaaggtaagaccwtcacctcccctgggctctctttgtcctcggaagacatttcctgccagaaatcatgcaagccgtgcacggtgcccccagcactgctccctgcctttcgtgctccccatcactcgccaccgccgctgcctcctccctctgcccccacgtaggaaaggaagggtttgagccactttcgtggggctgtcacatgaaagtcggtgtaaatctctccaaatctcttgcttatcctccagcaaactattaacattcctgaggactcttcatgtctggccagaaattcattagcgaggcgcctggctc

SEQ ID NO: 73263 - DNA, 599 bp, Chicken  19866894354240_1
  misc_feature (1)..(33): n is any nucleotide
nnnnnnnnnnnnnnnnnnnnnnnnnnnnnnnnntcaccgaaatggtgagggatgaacggtctgcgagtttaagtttcaagggaaatttgcttgttgtcagctacaatgattagtcagtgttggtgctcaagaaaaatgttctccctgtaaatattgagttgtgtcattatcactgatacgctgggctttcataaatattgacattctgtaattagacagctggctgtaaactggaggagacagtcattaaaatagccattaacagagctcggagcagaaaagaaggctgcttcttattcwtttgggacaatgaagctgagaacaaaaaaggaaatttttacatattccacatctgacgtaacctctgttatatccctgttcttgtattccttcagccaaacaaygcatcctggatcttcatttcccattcacacagatgaaagcatgaccacctttctgtgtgtataatccacagtgctccagcaagaaggacatgtggaaaagtactcgcaaggtctttgtatggactttatagcctgcttgcaaatatcaggtagtaccagaagggctgtgtaaagtgactgatctgtgacaggttt

SEQ ID NO: 73264 - DNA, 600 bp, Chicken  19866894354240_2
aatgattagtcagtgttggtgctcaagaaaaatgttctccctgtaaatattgagttgtgtcattatcactgatacgctgggctttcataaatattgacattctgtaattagacagctggctgtaaactggaggagacagtcattaaaatagccattaacagagctcggagcagaaaagaaggctgcttcttattcwtttgggacaatgaagctgagaacaaaaaaggaaatttttacatattccacatctgacgtaacctctgttatatccctgttcttgtattccttcagccaaacaaygcatcctggatcttcatttcccattcacacagatgaaagcatgaccacctttctgtgtgtataatccacagtgctccagcaagaaggacatgtggaaaagtactcgcaaggtctttgtatggactttatagcctgcttgcaaatatcaggtagtaccagaagggctgtgtaaagtgactgatctgtgacaggttttcacaggctaaataccactgttgttaactgaacactttgctttctgccacaagaaaaatacccacaattcgctggcaatagatactgagcaattttctagccttg

SEQ ID NO: 73265 - DNA, 600 bp, Chicken  19866894354244_1
ccaaacccaacgccatcaacgttgggcagagggagcggggctgtgggactgggcacagtgctgggctcatcgggtcgttctgctggtgacagatccacccgagccactttctatcgaaatatttatgtacctgctgcagtctccctttgctattgaagtacgtgcagctggactcgtgctatgacttttattcctgaggcagaggcacaaaatagtactcagtgcttcttaagtggtgtaaaatatttctaaaataacccctccatccctgttaagcaaacattatctcctcacccattytcttcattcccatttcagtacgccacagctttttcctgcattcaatcagttcctctttagaaaaagcaaattattaaaaaaggaggaaaaaagagaggagatttgatgggaacaaacagattaataactaaccgtgataatatctggctgcctttctcagaggtgcgtgcggagtggaacgtgaagctctattatcaaaacaggttaaagttttatcacgactcccatgtattatatgagattctcaaagcacacctcctccagtaatgcccggaataatccagactggttatagatgga

SEQ ID NO: 73266 - DNA, 600 bp, Chicken  19866894354246_1
gatcttgtactttttgattcatcctcagtcatcatccccaccaagtatatcctgaccaacactacactagaaatccactggggctagagtgattaaaaaaaaaaaaaaaaaagatgctgatgtgtaaaaatgctacaaaaaacagcactgttctgtattcatatattatagattagtaatatccagctgtaagttctcctcttattttagtcctttactacaaatatgtgagaagccttctgaaaggctacaatcttcctaaaatcaaggatttggagaccatgccttcacagacctgakgacataaattcaagtgtttaaattccagttattcaaattgaacaagatgtctaagaacagatcrcctgtgaacaagactttggcttgaggcaggtttgaggcacctattattgtggaactgatttttatttttattattagttttaaaatcaagcaatgaccttcaccattttagtattccatttcctcatatcatgatttgctacctggaagttttttatttttatttttgcatttactttttactaagcaaatcattccttacagttacgaaagattaggtaattcctacatccattg

SEQ ID NO: 73267 - DNA, 600 bp, Chicken  19866894354246_2
cactagaaatccactggggctagagtgattaaaaaaaaaaaaaaaaaagatgctgatgtgtaaaaatgctacaaaaaacagcactgttctgtattcatatattatagattagtaatatccagctgtaagttctcctcttattttagtcctttactacaaatatgtgagaagccttctgaaaggctacaatcttcctaaaatcaaggatttggagaccatgccttcacagacctgakgacataaattcaagtgtttaaattccagttattcaaattgaacaagatgtctaagaacagatcrcctgtgaacaagactttggcttgaggcaggtttgaggcacctattattgtggaactgatttttatttttattattagttttaaaatcaagcaatgaccttcaccattttagtattccatttcctcatatcatgatttgctacctggaagttttttatttttatttttgcatttactttttactaagcaaatcattccttacagttacgaaagattaggtaattcctacatccattgtccacctactctaatttattcaaaaatgagagcattattagcacacctggtccttgatatgcct

SEQ ID NO: 73268 - DNA, 599 bp, Chicken  19866894354247_1
  misc_feature (1)..(137): n is any nucleotide
nnnnnnnnnnnnnnnnnnnnnnnnnnnnnnnnnnnnnnnnnnnnnnnnnnnnnnnnnnnnnnnnnnnnnnnnnnnnnnnnnnnnnnnnnnnnnnnnnnnnnnnnnnnnnnnnnnnnnnnnnnnnnnnnnnnnnnnnntgcttgcaggtgtgctcatctttagttgcaatagacttttcatgaaatgtgtgttttgcatgtaagaatgagacaccttcagataaatggagaaatcttgactctatgtagagctcttaatattgctgaacttcgtcttcaaaagaagaaattacaggaagcsgtccctgcagcttgtagaaaactcttatcagcacatactcctttcataggaaagactgtgatatctagtctatgtaattccagaagccaaactgtgctagaacttgtcagcaaatgtgcaaaagctcagggaaagagagggattctgggctgtggtccatttccttacctggttgctcctgtagactcattacattcctgaatttctaagttaacttaaaaagggatacaaggcggtcaagattgcaaagaatgagattccaacccatccttaattttatggaaatagaggagtgtttt

SEQ ID NO: 73269 - DNA, 599 bp, Chicken  19866894354248_1
  misc_feature (1)..(280): n is any nucleotide
nnnnnnnnnnnnnnnnnnnnnnnnnnnnnnnnnnnnnnnnnnnnnnnnnnnnnnnnnnnnnnnnnnnnnnnnnnnnnnnnnnnnnnnnnnnnnnnnnnnnnnnnnnnnnnnnnnnnnnnnnnnnnnnnnnnnnnnnnnnnnnnnnnnnnnnnnnnnnnnnnnnnnnnnnnnnnnnnnnnnnnnnnnnnnnnnnnnnnnnnnnnnnnnnnnnnnnnnnnnnnnnnnnnnnnnnnnnnnnnnnnnnnnnnnnnnnnnnnnnnnnnnnnnnnnnnnnnnnnnntgtttatagagttgtactcrgttatattttaagtatgaatttacatttcccttttagagaggtgatagttgacaactttgatattcatctcacttcccccgtttccccartatgatgctttccaggaatacttaaattgaaagcaggcatacatccagatagacattagggatgaaagaaagctctcgtttataaaatgttgattccttattcatagaaagaattaatcacaagattaagcagagtaactgtgatcactgatcattatcctactgcaagtatgttatcttgtgctctgcccctgctcagaaacagcttt

SEQ ID NO: 73270 - DNA, 599 bp, Chicken  19866894354248_2
  misc_feature (1)..(190): n is any nucleotide
nnnnnnnnnnnnnnnnnnnnnnnnnnnnnnnnnnnnnnnnnnnnnnnnnnnnnnnnnnnnnnnnnnnnnnnnnnnnnnnnnnnnnnnnnnnnnnnnnnnnnnnnnnnnnnnnnnnnnnnnnnnnnnnnnnnnnnnnnnnnnnnnnnnnnnnnnnnnnnnnnnnnnnnnnnnnnnnnnnnnnnnnnnnnnntgtttatagagttgtactcrgttatattttaagtatgaatttacatttcccttttagagaggtgatagttgacaactttgatattcatctcacttcccccgtttccccartatgatgctttccaggaatacttaaattgaaagcaggcatacatccagatagacattagggatgaaagaaagctctcgtttataaaatgttgattccttattcatagaaagaattaatcacaagattaagcagagtaactgtgatcactgatcattatcctactgcaagtatgttatcttgtgctctgcccctgctcagaaacagctttgtgagagctggcagacatctggagcaagagaattctaaagaagatgagataaaacattctgagacrttttttttccccaagcattgcaaa

SEQ ID NO: 73271 - DNA, 600 bp, Chicken  19866894354248_3
catctcacttcccccgtttccccartatgatgctttccaggaatacttaaattgaaagcaggcatacatccagatagacattagggatgaaagaaagctctcgtttataaaatgttgattccttattcatagaaagaattaatcacaagattaagcagagtaactgtgatcactgatcattatcctactgcaagtatgttatcttgtgctctgcccctgctcagaaacagctttgtgagagctggcagacatctggagcaagagaattctaaagaagatgagataaaacattctgagacrttttttttccccaagcattgcaaacctttgtggcaagcctgctccaccttcctgctttgttgcacacactcaggccataaaaagcatctgaaggaggttacacactgatatggtacactgaaggcacagttgccttccttttatcacagaactccaggcacataaatttactggggcactctggacaacacctaggattagttttgccaaactcagccaatttgcatggcaattagtactgcaagccaaaataaattccaagttcctttgtatagcatttctgtatacaagtatcaataa

SEQ ID NO: 73272 - DNA, 600 bp, Chicken  19866894354249_1
ctgcaggaagcggggctcattatttttaggaaggggttggctcggtcataccccagccttcttccactggcattagacttcttgaggagagcttcaggcaagcaatgcgggagaaaaagtggctttttggggatatttcctgccatttgcatgagtcaccttgctgcagcatgcaccatccaagcagagacatggggatgcagaactgtggtggtgtggagagcagagcaggatgtgaagaaggaaagtgctgtgctcaagaggaaataaggggtataagttttccatgtgccaccctgycttgagctgccctgtcagcagaagcactcagctctttatcctcaggggtactggcacctctgtgcccaaggggaccacgcaaaggccaccagcactgcctctgtgatcaaaccagcaaggtcctgaaccaagcaaggggagagaagagacaacatcccacccgagaagccatatagatggatgtcctgtctgtggagcaggcaaccatctcctggcacctcggtgggctctctggtgtctgatgaaatctatgctcatggcgaatccttgcccaagcacggtgggaacatgaacaggagt

SEQ ID NO: 73273 - DNA, 599 bp, Chicken  19866894354251_1
  misc_feature (1)..(122): n is any nucleotide
nnnnnnnnnnnnnnnnnnnnnnnnnnnnnnnnnnnnnnnnnnnnnnnnnnnnnnnnnnnnnnnnnnnnnnnnnnnnnnnnnnnnnnnnnnnnnnnnnnnnnnnnnnnnnnnnnnnnnnnnnnaaatctcatctctctcttcctgaagctaacatgtattaaactctgcaatgattgataggaaactaaaaatgagctggttctgggatgtactttgtaggaattacttctacttctaacacagtttcactttggtttgcagaaaccccttctccatttccagagggctgtattatctggyggctatttctctgtcaaacaattgaaatcacacataagttgaygaatgatgggcttttactttagaaagccttgtcctgatgtcagctattgttctgagtgccagggcagttctgtctttagttagaagggagctgtggggaattatgaaggctggggcaactctcccagaaattaaactaggactcctacattgcaccaagtcttggcttttaacttcaatattattcatgtaaagccagcactcaactttaggattgtctttttttctgtatattaagaaagttgtaaggaaagaaa

SEQ ID NO: 73274 - DNA, 599 bp, Chicken  19866894354251_2
  misc_feature (1)..(79): n is any nucleotide
nnnnnnnnnnnnnnnnnnnnnnnnnnnnnnnnnnnnnnnnnnnnnnnnnnnnnnnnnnnnnnnnnnnnnnnnnnnnnnnaaatctcatctctctcttcctgaagctaacatgtattaaactctgcaatgattgataggaaactaaaaatgagctggttctgggatgtactttgtaggaattacttctacttctaacacagtttcactttggtttgcagaaaccccttctccatttccagagggctgtattatctggyggctatttctctgtcaaacaattgaaatcacacataagttgaygaatgatgggcttttactttagaaagccttgtcctgatgtcagctattgttctgagtgccagggcagttctgtctttagttagaagggagctgtggggaattatgaaggctggggcaactctcccagaaattaaactaggactcctacattgcaccaagtcttggcttttaacttcaatattattcatgtaaagccagcactcaactttaggattgtctttttttctgtatattaagaaagttgtaaggaaagaaacactcttcaaagatgctgatgagtccagcttggtaggtgtttt

SEQ ID NO: 73275 - DNA, 600 bp, Chicken  19866894354253_1
catcatatttctgagatggccatgatatcattaccccatcccccttgttaaatataaacaggcattgtggataattcagttcttctatgccaattagaacttgcagactattgctttgattgctatttttatgctgcatgtataaatgcagtctgtcttatgttgactgttttttgcaacttttttttttgaacctatggaattcattgacacacctttgcttcatttgcacttccatgtcagatgccgttgtgtcaaacggcccctctgctgccatctgtcacacagcaacatgtaacrgagtgttggctggaaagytcaacctctgccataccagcatttacctctgacmttgtaggccaagataataacataggaggtattgcttttggagcatcccttgtatatacattaacttttctgcagattctacttggaggaggaggaaagaggaagcattcagggaatggaagctctcacctttaggggcattaggtgttctgttgtattctgttgtgaatggagccacatgttccttgcaggcctccctggtccctgaagttttctcagtaaagctttcgttgttctgctgcatttccc

SEQ ID NO: 73276 - DNA, 600 bp, Chicken  19866894354253_2
gccatgatatcattaccccatcccccttgttaaatataaacaggcattgtggataattcagttcttctatgccaattagaacttgcagactattgctttgattgctatttttatgctgcatgtataaatgcagtctgtcttatgttgactgttttttgcaacttttttttttgaacctatggaattcattgacacacctttgcttcatttgcacttccatgtcagatgccgttgtgtcaaacggcccctctgctgccatctgtcacacagcaacatgtaacrgagtgttggctggaaagytcaacctctgccataccagcatttacctctgacmttgtaggccaagataataacataggaggtattgcttttggagcatcccttgtatatacattaacttttctgcagattctacttggaggaggaggaaagaggaagcattcagggaatggaagctctcacctttaggggcattaggtgttctgttgtattctgttgtgaatggagccacatgttccttgcaggcctccctggtccctgaagttttctcagtaaagctttcgttgttctgctgcatttccctgcacagggacttctctg

SEQ ID NO: 73277 - DNA, 600 bp, Chicken  19866894354253_3
tataaacaggcattgtggataattcagttcttctatgccaattagaacttgcagactattgctttgattgctatttttatgctgcatgtataaatgcagtctgtcttatgttgactgttttttgcaacttttttttttgaacctatggaattcattgacacacctttgcttcatttgcacttccatgtcagatgccgttgtgtcaaacggcccctctgctgccatctgtcacacagcaacatgtaacrgagtgttggctggaaagytcaacctctgccataccagcatttacctctgacmttgtaggccaagataataacataggaggtattgcttttggagcatcccttgtatatacattaacttttctgcagattctacttggaggaggaggaaagaggaagcattcagggaatggaagctctcacctttaggggcattaggtgttctgttgtattctgttgtgaatggagccacatgttccttgcaggcctccctggtccctgaagttttctcagtaaagctttcgttgttctgctgcatttccctgcacagggacttctctgttggggagggattatttttattattattatttgt

SEQ ID NO: 73278 - DNA, 600 bp, Chicken  19866894354254_1
ttgcaacgttttccctctctttctgcatatgtttttcagtgctttacggaaactcttacatttccctccaccatgaatacaaattgcccttcaattgcaagcttttccctttcatcgcctttctctctccaccttcatttccccatctgcaaagcatgtaatggctctgcccatccacaggcaaaccagatccctcaaacactctgtaattatgtgctaaatgccataattctgcctgcttggaggtccacgggctttcagccagggcatcacctggagtgcagaggtaatagaagaagscacacgcagccaccaaagagcagagtttggtggtgtggccttgggttttcagaagctgcggtgcctttctgcgtaagcagccccatgcagtcagcaatcagcacatcttcattattcaccctgtgaagtatatgaggcgtttgtgaattttggccgagagcgtacgaaggatttggacaagccgcggtaacacgccgcttatccccgcagagtggatgcggtgaggctggcagggttggctgcccacccaccagctttgattttctgctcagtgaccagcgttacattttggctgtcatt

SEQ ID NO: 73279 - DNA, 600 bp, Chicken  19866894354254_2
cacgccgcttatccccgcagagtggatgcggtgaggctggcagggttggctgcccacccaccagctttgattttctgctcagtgaccagcgttacattttggctgtcattaatttatgcgcgaggaggaaaaaagaaaaaggaaaaaaagaagggaagcttttacatctgctcggggacctcgtcctgcacagcgggaaagtgctgcaacagggtccactcggagctcttttttctttagcaggatctgaatcccgcaggctttcaggtgcttttggaagctgaaatgaatgagcagtcyccccgttttcaggagctgctccccaaggcctgatccacagcccagagagcacacacgccgattcaacrggccctgcgcagacagggctgacacctcctccgtgcacacacagcacttttaatgtcgacattatgtcaaacagtgagaatgaatgcttccctaataattgctctcagggagaagtcacattatagtcaaggcgtcccgcagaaacatcatgagtcagaggagaggcaattctgcgacaatcacgcagttagctgggggccgggatgtgaagagcaggcagatccctatggg

SEQ ID NO: 73280 - DNA, 581 bp, Chicken  19866894354254_3
gattttctgctcagtgaccagcgttacattttggctgtcattaatttatgcgcgaggaggaaaaaagaaaaaggaaaaaaagaagggaagcttttacatctgctcggggacctcgtcctgcacagcgggaaagtgctgcaacagggtccactcggagctcttttttctttagcaggatctgaatcccgcaggctttcaggtgcttttggaagctgaaatgaatgagcagtcyccccgttttcaggagctgctccccaaggcctgatccacagcccagagagcacacacgccgattcaacrggccctgcgcagacagggctgacacctcctccgtgcacacacagcacttttaatgtcgacattatgtcaaacagtgagaatgaatgcttccctaataattgctctcagggagaagtcacattatagtcaaggcgtcccgcagaaacatcatgagtcagaggagaggcaattctgcgacaatcacgcagttagctgggggccgggatgtgaagagcaggcagatccctatgggatagtaatttgggttctgtcatccttcattttcctatcctactgttaag

SEQ ID NO: 73281 - DNA, 599 bp, Chicken  19866894354255_1
  misc_feature (1)..(116): n is any nucleotide
nnnnnnnnnnnnnnnnnnnnnnnnnnnnnnnnnnnnnnnnnnnnnnnnnnnnnnnnnnnnnnnnnnnnnnnnnnnnnnnnnnnnnnnnnnnnnnnnnnnnnnnnnnnnnnnnnnnnggctctttggtttccaggaggaagatgtcaggcggatgtttcccttcttgaaaaaagggctctacaggatcttggcggagtctggctatgctcacatacaggcaacaagacctgatactgttggtaaagaaacacacaaaaatacgtatttaattttagctgtactgtcatacaaacaggacaygttgcttaattacacaaaagatgagtgtttttcacaaaaatggaagtaggaaggttagargttttaaacagcaggttcttcttctgcatgtaagttgtaaaggactaggagggggttggaacaagatggtctttggaatggctctgagcccaagccattctatgatagatgggtatctagtattaaactcgctttttcatacaaaagrgatacatctgtacatcaaaagcaagcaccctctaagtgccactgacctcattttcagttttcataaataaaaatagcttaatacttttcca

SEQ ID NO: 73282 - DNA, 599 bp, Chicken  19866894354255_2
  misc_feature (1)..(56): n is any nucleotide
nnnnnnnnnnnnnnnnnnnnnnnnnnnnnnnnnnnnnnnnnnnnnnnnnnnnnnnnggctctttggtttccaggaggaagatgtcaggcggatgtttcccttcttgaaaaaagggctctacaggatcttggcggagtctggctatgctcacatacaggcaacaagacctgatactgttggtaaagaaacacacaaaaatacgtatttaattttagctgtactgtcatacaaacaggacaygttgcttaattacacaaaagatgagtgtttttcacaaaaatggaagtaggaaggttagargttttaaacagcaggttcttcttctgcatgtaagttgtaaaggactaggagggggttggaacaagatggtctttggaatggctctgagcccaagccattctatgatagatgggtatctagtattaaactcgctttttcatacaaaagrgatacatctgtacatcaaaagcaagcaccctctaagtgccactgacctcattttcagttttcataaataaaaatagcttaatacttttccacatctgctgccactggggactgtaattgtattgcaaatgcagctatgctgagaacaaaag

SEQ ID NO: 73283 - DNA, 600 bp, Chicken  19866894354255_3
cacatacaggcaacaagacctgatactgttggtaaagaaacacacaaaaatacgtatttaattttagctgtactgtcatacaaacaggacaygttgcttaattacacaaaagatgagtgtttttcacaaaaatggaagtaggaaggttagargttttaaacagcaggttcttcttctgcatgtaagttgtaaaggactaggagggggttggaacaagatggtctttggaatggctctgagcccaagccattctatgatagatgggtatctagtattaaactcgctttttcatacaaaagrgatacatctgtacatcaaaagcaagcaccctctaagtgccactgacctcattttcagttttcataaataaaaatagcttaatacttttccacatctgctgccactggggactgtaattgtattgcaaatgcagctatgctgagaacaaaagacagtttcttcacatagaatcaatcacagtcaaaagatgtaaactccaaaaagcttttagctgtttcagcatgcaagctagtttatttataggcataaataatacctgaaaggtaaaatcaaatttggttcttactcactgttatgaat

SEQ ID NO: 73284 - DNA, 600 bp, Chicken  19866894354258_1
tcttctgtctgctgtggttcaccaagatttgttcccagattccatctcagtgccgtgtggccttgcctgtacccagcaattgcttcatccccatgacactgaatggccattctggagctggatctgactctggccattacccatccatttatccctgtcccagctcagtcacaactcatccccatcttcagggaggtgtctgatacccagagttggatctggtctaatactccagctgccctgctcctgtctggtgcagtgagacaggccctggctgccaggttttactctcgtggaccytggaaaaccctcatcactcacagtttgcttgtccatgcagagctgtcagcctgcactgctcccttgcaggaagatgccatattttcagagaaagctggaatttttgtacatgtagcacacaggaattgtcattatcaataatactggatgcaccatggtgaatcacggttattcacaattattctgtacttgcagaaagagactaatcattccagaatttgttttctgcatctttgtcaacacttgcagagcagacatatttattagggatcaaattcatcgaaactattgaaacagact

SEQ ID NO: 73285 - DNA, 600 bp, Chicken  19866894354259_1
catgctgtagggaagggaaagcatccagagggatctggacagatctgagatgggccaagcaaaaaaacatggaagtacaaaaaggccaagcagaaattcctgcacgtgtgctgtgggaagcccagacacaaatacaggcttggcaacaagcggatagagtcttcagagtggagaagagcttgagtttacaggtggatgaaaagcttgacacaagccagtagtgtgagcttcagtccaggaagctaacaatatctgcagcaatagaaacatgactaacagggtgagggaggtgattctccycctttactccactctcatgagatcccacctgaagtactgcattcagctttggggcccttggcacaagaaggatatagggagagggggctgagcgcatctcctacaaagaaaggctgagggagctggaattcttcagcatggagaagagaaggttctgggaaaccatacaggggccttaacagtatttaaatggggcctacaggaataatggggagggactctttatcaaggaccatagtggtaagacaagcagtaatcattttaaactaaaaaagggcaggtttatatatgtagttatat

SEQ ID NO: 73286 - DNA, 599 bp, Chicken  19866894354262_1
  misc_feature (1)..(107): n is any nucleotide
nnnnnnnnnnnnnnnnnnnnnnnnnnnnnnnnnnnnnnnnnnnnnnnnnnnnnnnnnnnnnnnnnnnnnnnnnnnnnnnnnnnnnnnnnnnnnnnnnnnnnnnnnnnccatgggggtcgacctggtgtgggatggaccgtcagggcatgagggtccacgcaccccaaaccccacagagctgcaggactcactgcttcgtggcactggcggaaggggtcggtgagcagcatcccacacatggcctcggctgcccgatgtgctgtgctgcccatggcacagccaggactgggctccactgcrtcactgcaggagagctgcgccaggatgggatcmgatcagagacaccccactgctgtagggctgtgctgggagcagggtggggacacagccccaagggagccccacagggtgcygggatggtccccatctcggccccgtccatgctctgcctgacccaatacctcagggttggcatctgggatcctccaggagttcccaaagctggcagccaacggggcaacgtccccttcaacccgcaggaagtcatctgtgggcaaagtggggttggggacatggcatgtaccctcagcgcagccacg

SEQ ID NO: 73287 - DNA, 599 bp, Chicken  19866894354262_2
  misc_feature (1)..(74): n is any nucleotide
nnnnnnnnnnnnnnnnnnnnnnnnnnnnnnnnnnnnnnnnnnnnnnnnnnnnnnnnnnnnnnnnnnnnnnnnnnccatgggggtcgacctggtgtgggatggaccgtcagggcatgagggtccacgcaccccaaaccccacagagctgcaggactcactgcttcgtggcactggcggaaggggtcggtgagcagcatcccacacatggcctcggctgcccgatgtgctgtgctgcccatggcacagccaggactgggctccactgcrtcactgcaggagagctgcgccaggatgggatcmgatcagagacaccccactgctgtagggctgtgctgggagcagggtggggacacagccccaagggagccccacagggtgcygggatggtccccatctcggccccgtccatgctctgcctgacccaatacctcagggttggcatctgggatcctccaggagttcccaaagctggcagccaacggggcaacgtccccttcaacccgcaggaagtcatctgtgggcaaagtggggttggggacatggcatgtaccctcagcgcagccacgctgtgtcccccatcacccaacagtgatgctgtg

SEQ ID NO: 73288 - DNA, 600 bp, Chicken  19866894354262_3
gggtcgacctggtgtgggatggaccgtcagggcatgagggtccacgcaccccaaaccccacagagctgcaggactcactgcttcgtggcactggcggaaggggtcggtgagcagcatcccacacatggcctcggctgcccgatgtgctgtgctgcccatggcacagccaggactgggctccactgcrtcactgcaggagagctgcgccaggatgggatcmgatcagagacaccccactgctgtagggctgtgctgggagcagggtggggacacagccccaagggagccccacagggtgcygggatggtccccatctcggccccgtccatgctctgcctgacccaatacctcagggttggcatctgggatcctccaggagttcccaaagctggcagccaacggggcaacgtccccttcaacccgcaggaagtcatctgtgggcaaagtggggttggggacatggcatgtaccctcagcgcagccacgctgtgtcccccatcacccaacagtgatgctgtgacacacggggtgttaccagtcgggtcgtcattgtaggggccgcagagccccttcgtgctgccccgcagctccacgctgacc

SEQ ID NO: 73289 - DNA, 600 bp, Chicken  19866894354264_1
tacagtaattacttttgaaaatctacaccatctattacaaataagtagggtactctccacatttttatgcccttggtttaatggcctacagagtatttaaaagaaacaaacaaggctattcaatacagatgttaaaagatgtaggaaacatgcaaagggttaacataattaaatagaaagatatatgttttaacagagttgtgctttaaaattacttctaatttatccacttacgaggcatgcatggaggtaaaatgatcactggtaatgtgcaacagaaagatatatacttttttaatkgtagccaagaggaaaaaaacagcatggaataacttaatcgttgctaattataatatcactgaggtaattacaatagattttgattgtctcattttcacaccagaggagggcacaatactggcttttctcttaatacatatttgtttttagagaagagctgacaattacactaattgtagtcacagcatgaaactttgtttttaaagaaaaatttgtctacatgtcacagagaataaactcatcctttctgttttgttaggtgcaaattaaagacatattaattgctttgttcactgtaac

SEQ ID NO: 73290 - DNA, 600 bp, Chicken  19866894354265_1
tggctgtctcccaggctgccttgctggctgcaggctgagctgtgggactgggaacagcactacatgtgctgtagtcccggtgttcgctctcctccgagcagtgggaagggctgctcagcagctccagttgtttgtcagtggaagcgttgtactcctaatgcagatgatattgaacacgtcaatttaatttatacctgaagagatgggtgctttctctctcactcctgtttagcgtaggctgggaaaggcattctctgcgttgtgttccatcagttctgggggcacgttgcttgtcagacrcgttggtgctttgtcttatttctgatagcttaaataattgctttcataaaagataactagatttctttcatctggaagtgcattagttgtaaattgcattttctttttaaacttaaaagtatagatgtcaacaccgatttccactggcaatgcgcagtgctgctggtggagttctctgttgtaaaggtacgtcttctgtgctgaaataaaatggwctggaaaatgagggctgttgcttggatgtgcacatggaatccagcagactagactgtcccggcagggtgtcctaaattgggtgat

SEQ ID NO: 73291 - DNA, 531 bp, Chicken  19866894354265_2
ctctcactcctgtttagcgtaggctgggaaaggcattctctgcgttgtgttccatcagttctgggggcacgttgcttgtcagacrcgttggtgctttgtcttatttctgatagcttaaataattgctttcataaaagataactagatttctttcatctggaagtgcattagttgtaaattgcattttctttttaaacttaaaagtatagatgtcaacaccgatttccactggcaatgcgcagtgctgctggtggagttctctgttgtaaaggtacgtcttctgtgctgaaataaaatggwctggaaaatgagggctgttgcttggatgtgcacatggaatccagcagactagactgtcccggcagggtgtcctaaattgggtgatcttgggggtgctttgctgcaaggaaatgggcatgctgcagagtatgcaaggctttcatataaaatgtaagaatgtatttcgctctttaagtgctcgtcttcacttttagcctgccaagagcatctcaccccatgtaggacagtaag

SEQ ID NO: 73292 - DNA, 450 bp, Chicken  19866894354266_1
gggccatcactgaaacaagcctagattgtaggttggaccgcagctcttttgtggattcataccaagattatgaggtgtggtactacacagctagaagtcagaagaagatgctgaactcttgccaaaagcagagtacttcttcctttcatccatgtgctgtgtttgagccttttctgctgtatctttcctaaatgtgctgcattgtccagtcattctacttgacgtgtgtagtgccactgatttcagtaaagctacatgtgtgaagcttgcatggtgtggtttgctccacagacctttagyagcatttcttaattttaataaatttaggttagtctggtttaacgctgtccattctcctttggtgtggaagttaatgaaataatgctgaatagcacgaccatcctctgtataggcatactctaggcatagtcagtgtgtttgtctgcctcg

SEQ ID NO: 73293 - DNA, 600 bp, Chicken  19866894354268_1
tcatctgaaagaagctttttagtgggtgagttagagagtatggggaagtatcaggcaggttttgctgatgctgtcttgagtctctgtcttgtcattttaaaaaatgaatttttaactttggatatcaggaattccttgtgttggaatatacccagcataagtcatcacactgagaatttttactttgttctgttagcattctctgaggtagatgccccgtactttttgcatatgtatgatagacttttgtactgaaattattttcaaagcaacaattaatgcgttttaaagactgttctstgttggttttcagtttttccatctcaggctagcgatgatgagtcaagtagcgatgaaaccagcaatcagtccagtcctacggtacgaagacgccgggctaagaggaggctgatctcttgctctgaggctgagagcgggtcgcctgttggtccagagcctgaacctccmcaggagcagcaacacaagcggcagttcagtagtggccttaatagatgcatcattctggctttggtgattgcaatcagcatgggctttggacacttctatggtgagtgtatgggaaacaaagaacatagaacc

SEQ ID NO: 73294 - DNA, 600 bp, Chicken  19866894354268_2
actgagaatttttactttgttctgttagcattctctgaggtagatgccccgtactttttgcatatgtatgatagacttttgtactgaaattattttcaaagcaacaattaatgcgttttaaagactgttctstgttggttttcagtttttccatctcaggctagcgatgatgagtcaagtagcgatgaaaccagcaatcagtccagtcctacggtacgaagacgccgggctaagaggaggctgatctcttgctctgaggctgagagcgggtcgcctgttggtccagagcctgaacctccmcaggagcagcaacacaagcggcagttcagtagtggccttaatagatgcatcattctggctttggtgattgcaatcagcatgggctttggacacttctatggtgagtgtatgggaaacaaagaacatagaaccaacagcttacatatgaaacaaatactgttttatttagactctgctaaaaatttgaacctaaaactaagaagtagcaactaatatatggataataaagagaggcccttcagcaatgtaattgtgttaaatataactacattcaaagtttaaaataacttgtttgctctt

SEQ ID NO: 73295 - DNA, 599 bp, Chicken  19866894354270_1
  misc_feature (1)..(70): n is any nucleotide
nnnnnnnnnnnnnnnnnnnnnnnnnnnnnnnnnnnnnnnnnnnnnnnnnnnnnnnnnnnnnnnnnnnnnnctgacctaaccctggccccaagttccatcctacttcatcagtggcaaagctccttgcaatgacgacagtgctaatgactaattctgataataattaaatgtcaaggagaacttttcatcccaaacgataccagaagtatgggctaacactgtgcagataggagaaccaagtgtgtggcagttcacctgcgtggaaggtttcctactttcacacctggcaagcagaaagcrattgtcccgcactggcctggaaccagctcttccctgggcaaaatcctttgtgaagaaagaacctcaagagttaacagcccatctaacctgcagcaaagcttccaccaacatgagcagagctgaacgtctcccactcctgtccccagagccttgtaactgctctgtgcctgttcagcaagatccccatccaaaccccgatccaacatcctcgtgtactcatgggctgatccttcacgaaacctgcagaaggaatttgcatgaatataggtcatcccatatacatttgtatgtatttgctt

SEQ ID NO: 73296 - DNA, 600 bp, Chicken  19866894354270_2
attgtcccgcactggcctggaaccagctcttccctgggcaaaatcctttgtgaagaaagaacctcaagagttaacagcccatctaacctgcagcaaagcttccaccaacatgagcagagctgaacgtctcccactcctgtccccagagccttgtaactgctctgtgcctgttcagcaagatccccatccaaaccccgatccaacatcctcgtgtactcatgggctgatccttcacgaaacctgcagaaggaatttgcatgaatataggtcatcccatatacatttgtatgtatttgcttsctctctagctggaaaattcaaatcaagaaacgggaaatgacttattttgacctcagccacagcactgcacttgctcagaactggaatctggacccacacagttcttttggtaatggggcagagagaagggaattcctctgcgactttcccaaaccaacacacttccttaaaatagctgcacagtttgtttctttggcctgaggtgcactgcattataatggcattgtagggaaggtgcatctttatgcagcaacctcttaatctcatggaagatcatttctcaagagccaccactccctg

SEQ ID NO: 73297 - DNA, 600 bp, Chicken  19866894354273_1
caccgtacgtccatctacacatactgaaacaatcagtgagcatctacctcccaggaatttgggtggaaaatactgtacttgtgtgactatgttcaaaattgccaaatccagctgaaatatttcagcgctagctctccattttggatcataagctgcaatgtggcagatgtggagatgcagaagggctcagttgtttaaaagagctgagctgatatatgacatatgtgaaggacaatgaaacaatagaattactgagttcatttctccaagtaagcaagtgctcagtccattaactcattyctggactcctttacaacgttgagacaagcagttctgtagctagaaacactcctyattccaaaaactaatatttagaatatagaacagatagttagaccagtcacatstgcaaggatatttttcactatacagaaagaacccagtttctcagactggctgaaattgcaggaaatagccaaggcagtaggcatgtctctggagtgtaagcagaaaggaaatgttgaccctacctggacatttaactggacatttaacacacttactggcaagtggaagttcatttgctgatgcaaaacagcg

SEQ ID NO: 73298 - DNA, 600 bp, Chicken  19866894354273_2
gaatttgggtggaaaatactgtacttgtgtgactatgttcaaaattgccaaatccagctgaaatatttcagcgctagctctccattttggatcataagctgcaatgtggcagatgtggagatgcagaagggctcagttgtttaaaagagctgagctgatatatgacatatgtgaaggacaatgaaacaatagaattactgagttcatttctccaagtaagcaagtgctcagtccattaactcattyctggactcctttacaacgttgagacaagcagttctgtagctagaaacactcctyattccaaaaactaatatttagaatatagaacagatagttagaccagtcacatstgcaaggatatttttcactatacagaaagaacccagtttctcagactggctgaaattgcaggaaatagccaaggcagtaggcatgtctctggagtgtaagcagaaaggaaatgttgaccctacctggacatttaactggacatttaacacacttactggcaagtggaagttcatttgctgatgcaaaacagcgttatgtcattttggatgcactgtggtatcctgtcagacttccaactgattttgc

SEQ ID NO: 73299 - DNA, 582 bp, Chicken  19866894354273_3
ccagctgaaatatttcagcgctagctctccattttggatcataagctgcaatgtggcagatgtggagatgcagaagggctcagttgtttaaaagagctgagctgatatatgacatatgtgaaggacaatgaaacaatagaattactgagttcatttctccaagtaagcaagtgctcagtccattaactcattyctggactcctttacaacgttgagacaagcagttctgtagctagaaacactcctyattccaaaaactaatatttagaatatagaacagatagttagaccagtcacatstgcaaggatatttttcactatacagaaagaacccagtttctcagactggctgaaattgcaggaaatagccaaggcagtaggcatgtctctggagtgtaagcagaaaggaaatgttgaccctacctggacatttaactggacatttaacacacttactggcaagtggaagttcatttgctgatgcaaaacagcgttatgtcattttggatgcactgtggtatcctgtcagacttccaactgattttgcagggagagtcctctatagattctgtatcataagta

SEQ ID NO: 73300 - DNA, 461 bp, Chicken  19866894354277_1
ctgtaagacattacaagtatctcaagccaaacaagaccattagatcatgaagatgaccactcaacagtataggagattgcattacacacagctgcccttgacctgagctgaaaaccgtacatagtactaaagtaactttccagaaaggcatctggcctttatgtaaagactttcatatgctatttcaaagtgtcttatttttcttaaatttggcagtattcagcttttagcctcctctctccaaccagagcagaaacaatcatttgccttttccaggtctttttcccagggattctcagsagtgccaaatgtgctgtcgctgacccagcagggagatcaggctgtggtgtaaggaagagaccggtaatgccccctggggaagcacaagaagagtctgaaagcataaaatgtttttataatttttactgggcctggggtaagtcatgcacacaataattata

SEQ ID NO: 73301 - DNA, 600 bp, Chicken  19866894354278_1
taaagcaaataaagggaaaaatgtgcataacaaatgacattttaagtgccccagaaaggttttcagcactggtggggttgatttcgttgtgatgatttgttacaagctttacagttacgagccacaatggtgtggacacttctcccaacagggttaattgtataataatactcagtaactggcaggccttcacctttcaagggaggactttggagtgtgaagacatgcactgatgctgccaaatttctgcaccttgagaatctctgaatgctaatgtgcctccaatctatcaaaggctgyctttcagctggatgcaattcagggtggatccattatgtaagtggtgaggaacaaagctgggcttttgagaaaaaaagataccactgaggagtagtttatgccttgaaaagtcaaatccaggtgtttcaagaactatttcctaatttaagtaaaattcaccctaataatattttccggaaaatacagagatggggcaggacacaaaagcaagcaggaggaggttcctctaatggattaccactgcaaattctgcactagcacaggacaggaagagacacataatgaattgccttttccacc

SEQ ID NO: 73302 - DNA, 600 bp, Chicken  19866894354290_1
ctttcggtatcaacttacaaaggatttgctttgcattttacttgtaattacaaagctcacattgcacctttcatatcactaatgtgcaaatgtatattttatgtgaatggtttgaagggcttttaatacaagagtgaaagttctactttgaataatgtctagagggctagaggctatattgagtaatgcttcatgagaagggacatattaatgctatagaagcacatcactggtgccttactaatactgacttgaatcacagccactgtaatggaatgaaagttacatggttgttataayctgaaccttcttttcatacacataggagagaattggtgtagttttggcctttgtttaactgccttgtagtaatgcaaggcattactccagtgtatctcttggagtctgtttcagcagttctgtggaataatgacatcaacatctgtttgctcacagtggatgttcttttgggagcatggggaaatgaaattggcttaattttataaaaggtaattgtttatttctcagtattatagagctctgcatacatcagtatttaagcttctaagtctaacccacttgctccttttaagtacttct

SEQ ID NO: 73303 - DNA, 600 bp, Chicken  19866894354291_1
cagctactcagtgcacagacagaaagtgccataattttaaatggcctctccaggtctctctattcattaaggattttaaatgtcaggcttagtgctaagctctcaattttacttacaatagaccttcacctaatatcacagcagatgcagcaattttctaaggaaagagcaaaaggtaaattccagagctgttgtaaatgttcctacagataaggactgctacagttttcatgtcatgtaacagctgtctgaaagttagacattcagctaagttaataattaaattctcactccagtcaraggggggaagtgaacagccctttgaaacgcctttctccaccactctctggctgtggatggacactatttgctaagcttaacctaggcttcacttttggaggactgacactgggtgaaatgaaatctatccaycgtgatttctgtgtcccacagacacagattccatataggatcttggcgggggggaggctggtggtggtaagaggagaaaaatgtccaaggtgacatcgtgcccttgtggcatgtatacctccagcatgcctgcaataggcaaggggggtctgccactaatcgatcagc

SEQ ID NO: 73304 - DNA, 548 bp, Chicken  19866894354291_2
atatcacagcagatgcagcaattttctaaggaaagagcaaaaggtaaattccagagctgttgtaaatgttcctacagataaggactgctacagttttcatgtcatgtaacagctgtctgaaagttagacattcagctaagttaataattaaattctcactccagtcaraggggggaagtgaacagccctttgaaacgcctttctccaccactctctggctgtggatggacactatttgctaagcttaacctaggcttcacttttggaggactgacactgggtgaaatgaaatctatccaycgtgatttctgtgtcccacagacacagattccatataggatcttggcgggggggaggctggtggtggtaagaggagaaaaatgtccaaggtgacatcgtgcccttgtggcatgtatacctccagcatgcctgcaataggcaaggggggtctgccactaatcgatcagcgtgcttaagtacttcattcttctatattcagtacaggaagagaaagcacttcaaacaagatgtaccatgttgcaacatga

SEQ ID NO: 73305 - DNA, 600 bp, Chicken  19866894354294_1
gattgcaaataactgagttatcttttcacctttttgatttgagatatttctcatagtctcatgatttgtggctctagaactttttcttatgaaagtactacaaaattttatttccctttttttgtaccgtcttcctttcttttccagaagtggtggagaggaaaatgggaaaaaaaattgcttatgccatatatcattatatgtaattaacgatagttcatatcatgccaagattttgtggccaaactattgcagaagtgcaacataaggtgactgtgacagtaaataggccctctgttmccttaagtacatttgtctcagtaaatatgctgacatgggattatatttttatttttaaatagaagatctcaaaggctatgcagttcattttccagtccttctcttgtaagttagagatcttaaagggaattcttgagaatctctctgctatcctttggagtaaagaagttaaaagatgtgtttttctatacktatatgaatttagaggcaatattgcattttaaatctgacagaaataaaggtttttgagtggggacaagaagctagagatgcagtcaactgtactctgtggactcataa

SEQ ID NO: 73306 - DNA, 600 bp, Chicken  19866894354294_2
atcattatatgtaattaacgatagttcatatcatgccaagattttgtggccaaactattgcagaagtgcaacataaggtgactgtgacagtaaataggccctctgttmccttaagtacatttgtctcagtaaatatgctgacatgggattatatttttatttttaaatagaagatctcaaaggctatgcagttcattttccagtccttctcttgtaagttagagatcttaaagggaattcttgagaatctctctgctatcctttggagtaaagaagttaaaagatgtgtttttctatacktatatgaatttagaggcaatattgcattttaaatctgacagaaataaaggtttttgagtggggacaagaagctagagatgcagtcaactgtactctgtggactcataagcaaatgaagaagaaaagtcccacgattcataaaagaggtatagatgtttctggatgatttaaggccagattaacaaaccactacaatgcaatttgtagctctagataatgggaggtcaaacatgtattaccagctgacttaaatttgatttgactgaaagataaaacttcactacatgagccatattaact

SEQ ID NO: 73307 - DNA, 600 bp, Chicken  19866894354296_1
atctaactcctccatgacagcctcccagtgaaataaagataggcagaaagagcaacttcaccttagcaggaagacttctaggctgcaaagttggctaatgccacaggctgtaatatttgaagattttctggaagtgcttttttcctttatacttgtctcgtttcccctagtacatgatgtggttatcaatgcatatgctgatgtcatctgcctggctttgcagctcaagatagatcttcaagtcactggtattcactggatgaaatttgctttaatgggagcctgtgaaatgcctgggcwtttgtttcagttttgactgcttcgtgccagttttgaggatcaatatcagttctgaaaaagacccatttgaagtcataatggaatcagctcagggctgggaaattcctttttgaggagtctatttctcaaaccagtttaagtgctcagacagagattttctcttctgaaatcaagaaggtgaatgacgtaggactcaggtgatggggtacagggagataaatggagtctacagagaaatgaatgacaagcaaaatgtaaatagatgaaacagtagtataggctgaaggaggaaacatggaa

SEQ ID NO: 73308 - DNA, 599 bp, Chicken  19866894354297_1
  misc_feature (1)..(38): n is any nucleotide
nnnnnnnnnnnnnnnnnnnnnnnnnnnnnnnnnnnnnncatagaggtgggattgggtggagagactaaccaccccccaggccccaagagcccacaaacagacatcaacacttggttcccaagccaggaggtaaaatgaggactgggtagctggtgtttttaccctccaccaggaatcctggacagatcagatggattcaggcatcttggatgctagacagactgtctgagtacacatgtcctagtgctggtaagtatgcaggtataaaattgtgaccacaaaggaatgacactggctttrttttgtaataagttcccttgccttcctgcaaagtctttcatttaacttcactatgctgttgctgcagtgttacagctctcttactgatctcaataagttcagaggaaaggaggcctcggagcttctattttctgagcatagtattcaaacatgaaaactggatggaagggacttctggatatcattgcttcccatgcrgatgtctgttctagctcagcagatgttggctccttcatctctgtgacagcctttcaaaatacaaacccaacaaagtctttcaaagagcagctaccattctg

SEQ ID NO: 73309 - DNA, 600 bp, Chicken  19866894354297_2
aggcatcttggatgctagacagactgtctgagtacacatgtcctagtgctggtaagtatgcaggtataaaattgtgaccacaaaggaatgacactggctttrttttgtaataagttcccttgccttcctgcaaagtctttcatttaacttcactatgctgttgctgcagtgttacagctctcttactgatctcaataagttcagaggaaaggaggcctcggagcttctattttctgagcatagtattcaaacatgaaaactggatggaagggacttctggatatcattgcttcccatgcrgatgtctgttctagctcagcagatgttggctccttcatctctgtgacagcctttcaaaatacaaacccaacaaagtctttcaaagagcagctaccattctgtccacctgttcacagcacaaggtaatgagagaggtttgcaccaagcaccaacctgtatggaaatctaatgttaagggcagtgcatacaactgcaggcatgaacttctcagcacagcaagaaccacctcctctgctctttccatctaccaagttcttactagacagtgaagtttcttagtgttcaggtatataatattgc

SEQ ID NO: 73310 - DNA, 600 bp, Chicken  19866894354304_1
agcctcagaagtagcaggtggatgcaatctgtgtatggtgtcctaagagtacaaagcatggagaaagctggtgaactttaaaattctttttctctcttctcatggatctcagagagttgtgactcaaagtgtgattttatttatttattttctactagtggtggtgattcttttccttttaagataagcagttccatctcagggtatttttttccatagcatgctgcaggagggtgatgtgttactgttcccacgaggtggagctcttgacatatgtaattgatgcgaactgcgtaccaytggtgaatctcaaggagctctgttgaaatccaagttcagattatagatcatcaattaggtcttctttagttcacctcctttcagaaagcagtattatgtagaacataaaatagcaactattgttttaataaagtagggtaatctcttggtgaaggcagtgcattaattattattattatgttgtaattgtaaacacttatgtgtttgaattaaatattatgataatccccctgtgaattatcaaccaatacgtttttatcttcattaccttgagatacaagttgttttattactaagaaa

SEQ ID NO: 73311 - DNA, 600 bp, Chicken  19866894354304_2
atccaagttcagattatagatcatcaattaggtcttctttagttcacctcctttcagaaagcagtattatgtagaacataaaatagcaactattgttttaataaagtagggtaatctcttggtgaaggcagtgcattaattattattattatgttgtaattgtaaacacttatgtgtttgaattaaatattatgataatccccctgtgaattatcaaccaatacgtttttatcttcattaccttgagatacaagttgttttattactaagaaaaagtaacaaacactgattcttataacrgtgaatactgcactgcctatkctacactgtatgcagctccagaatctggctgtgttgtctggagttgtttgataacattttacatgcataagaaatctcctgatagcaaactaattatgtcactcagtgtttcrtaaatatgtatgccaatgrtggtagatttaaatgtgatgcaaaagtagcaggagtggtgaactgcagctattggagagccccagaacaccaggaagcagctaaatccaaaggcattgctatgaccacaaacagacactcaggcagtacaaaccagtggtggagttc

SEQ ID NO: 73312 - DNA, 600 bp, Chicken  19866894354304_3
catcaattaggtcttctttagttcacctcctttcagaaagcagtattatgtagaacataaaatagcaactattgttttaataaagtagggtaatctcttggtgaaggcagtgcattaattattattattatgttgtaattgtaaacacttatgtgtttgaattaaatattatgataatccccctgtgaattatcaaccaatacgtttttatcttcattaccttgagatacaagttgttttattactaagaaaaagtaacaaacactgattcttataacrgtgaatactgcactgcctatkctacactgtatgcagctccagaatctggctgtgttgtctggagttgtttgataacattttacatgcataagaaatctcctgatagcaaactaattatgtcactcagtgtttcrtaaatatgtatgccaatgrtggtagatttaaatgtgatgcaaaagtagcaggagtggtgaactgcagctattggagagccccagaacaccaggaagcagctaaatccaaaggcattgctatgaccacaaacagacactcaggcagtacaaaccagtggtggagttcccctggcagcrtctttttaca

SEQ ID NO: 73313 - DNA, 600 bp, Chicken  19866894354304_4
attaattattattattatgttgtaattgtaaacacttatgtgtttgaattaaatattatgataatccccctgtgaattatcaaccaatacgtttttatcttcattaccttgagatacaagttgttttattactaagaaaaagtaacaaacactgattcttataacrgtgaatactgcactgcctatkctacactgtatgcagctccagaatctggctgtgttgtctggagttgtttgataacattttacatgcataagaaatctcctgatagcaaactaattatgtcactcagtgtttcrtaaatatgtatgccaatgrtggtagatttaaatgtgatgcaaaagtagcaggagtggtgaactgcagctattggagagccccagaacaccaggaagcagctaaatccaaaggcattgctatgaccacaaacagacactcaggcagtacaaaccagtggtggagttcccctggcagcrtctttttacagtcttgttctcattttagatatattcagtctgtggtgttttactactgttttcacttacgggtgtattgatgaatgtgagtacacactgatacacagaactctacttttgtga

SEQ ID NO: 73314 - DNA, 600 bp, Chicken  19866894354304_5
ttgtaattgtaaacacttatgtgtttgaattaaatattatgataatccccctgtgaattatcaaccaatacgtttttatcttcattaccttgagatacaagttgttttattactaagaaaaagtaacaaacactgattcttataacrgtgaatactgcactgcctatkctacactgtatgcagctccagaatctggctgtgttgtctggagttgtttgataacattttacatgcataagaaatctcctgatagcaaactaattatgtcactcagtgtttcrtaaatatgtatgccaatgrtggtagatttaaatgtgatgcaaaagtagcaggagtggtgaactgcagctattggagagccccagaacaccaggaagcagctaaatccaaaggcattgctatgaccacaaacagacactcaggcagtacaaaccagtggtggagttcccctggcagcrtctttttacagtcttgttctcattttagatatattcagtctgtggtgttttactactgttttcacttacgggtgtattgatgaatgtgagtacacactgatacacagaactctacttttgtgatagtgatactcgtttttca

SEQ ID NO: 73315 - DNA, 600 bp, Chicken  19866894354304_6
actgcctatkctacactgtatgcagctccagaatctggctgtgttgtctggagttgtttgataacattttacatgcataagaaatctcctgatagcaaactaattatgtcactcagtgtttcrtaaatatgtatgccaatgrtggtagatttaaatgtgatgcaaaagtagcaggagtggtgaactgcagctattggagagccccagaacaccaggaagcagctaaatccaaaggcattgctatgaccacaaacagacactcaggcagtacaaaccagtggtggagttcccctggcagcrtctttttacagtcttgttctcattttagatatattcagtctgtggtgttttactactgttttcacttacgggtgtattgatgaatgtgagtacacactgatacacagaactctacttttgtgatagtgatactcgtttttcacttttctttgagatcagtgtaaggagacctaaacttgggggaaagcagcaacaaatagaacttttctctcattttggttgtgcatccagcatagacattgtgtgcggcccatgcagggaggactcatgcatgcacagtacctgtggaggcacggtcgg

SEQ ID NO: 73316 - DNA, 600 bp, Chicken  19866894354307_1
tctgcaaacttgctgagtgtgccctcaatcctacagtccatgttgcctacaaagatgtcaagtaacaccagtcctagcaccaaaccctgaggatctccacttgtcaccgatctccacttggacacagagccattgccctcaactctctgagagcaaccatccagccaattccttatccagtgagaggttcattgatcaaatccatttttctccaatttgttgaccaggatgtcatgcaggacactgtcaaattgttcgcacaagtccaggtagatgacatcagttgctctttctttatcyactgatgctgtaactacattgtaaaaggccaccaagtttgtcaggcatgacttgcccttggtgaagccatgttggttaccaccaatcacctcatctttattttccatgtgccttagtagggagttcagaaggatctgctccattatctcgccaggcacagagctaagactgaccggtgcctgtagttcactatatgttgtttttgtttttgttttgttttttgattgtttttttgtttttttttctctggatcttatcactaaagtcacctttgcatcactgcataacataaacaaaatc

SEQ ID NO: 73317 - DNA, 599 bp, Chicken  19866894354316_1
  misc_feature (1)..(61): n is any nucleotide
nnnnnnnnnnnnnnnnnnnnnnnnnnnnnnnnnnnnnnnnnnnnnnnnnnnnnnnnnnnnncttgtagtaactggtcttaggcctcccagatttctatgtctaacttgagggacagagatactatccatagtgactatttaatccaaacagataggcacatgtcccatgggatgcatcttagggtcttgagggacctgttcagtgctattccgaggccttcctgtatgaacttcgaaagtactgtgactagattttttcctgatgactggaaaaaggtatcttcagagagaagaaagggraggatcttgggaagaatgggagcagtcaacttcctcatgattccttggaatattatggagaaagtcctcaaaagccagttcaggacacatgaaggccaaggtaatttggaacaaccagcacaagtttagccagagcaaatcatgccataccaatggttaggaagtgtgtgatagatgagtggacattgaggtagactgtgaaccggctgacttgcagagctcagaaggttgcaatcagcagtgcagagtctacttggagatctgcagctagaactgttccctagggtctggttctggat

SEQ ID NO: 73318 - DNA, 600 bp, Chicken  19866894354327_1
ttactgcaaagacatgagcttacaatatattcactggtactttgtcggtgatttttttaaccatttagtatcatgcttactaaatcctagttactgtaaaaatggcagaacctgatagcaaaggagtcaaggcaaaaagggattgtttgggggacattttctttcctttactttctggatctcacattatacttccatcagtcattatttgggtgacattcatggaaaaactgtgttaggaggatagttaatgccttgaaagaatatgttcatttgctggaaaaaacaggaataaacagwgttgtctgtcttcctttctattccaatagtgatttgttgtacagtgttcagagagccacggtagtaaataggcctatgtattactacccagattttgtagtaacttgcacttcaaatccaacctaataatcaagcacagttgccttgcttacttgctagaactttttaatgaaaattttacaggatgaggttttgggtccatggaacttgttaggaactctgttgctaacttaatggaagccagcgtaatttagaatgactataataataataaaaaagagttctaatgtgcttcaacaa

SEQ ID NO: 73319 - DNA, 600 bp, Chicken  19866894354341_1
gcttggatggttttattgttgaatgattgtctcgctcctatttataggagggagaggaggttctttgaaatatgtatgcccggcgtgagattaagaaacaacggttcaaatgttggtccgaccagtttattacaaatgttaataagggagatgaagaaaggggaggatggacactattacggataggggtgatggggaagggaaggcgagcaatagaaaagataggaagaagcaagaattgcgtaaagcggggatagtcaccaccaggatccggcagtaatcccgttgcacgacgttccracagtccgaggccgaaggacaggagcagcaaggccagtcttgggcaacaagagggtgcaggtatcgggtgggtccaggaagaagctgcagagtaagcccgggaggaagcagcaggtctcaggtagcaggcccagggaagtccatcagcatatggtccgtagagaaggatctgatgacagacacctctagtccgtcagcatgccgacctttcatagtgaggaatctgatggcagaaaccctatcctcatggttgttggaccctcttttatcctccttttttcctgtctatgtgacatccct

SEQ ID NO: 73320 - DNA, 600 bp, Chicken  19866894354342_1
ctttgttcacttctgtaagctatttaaagacattgccgtagaatcaggtttcttccattcctattcaattcatgggattcacggtatttgactgaagaaaatgttcagtgatagcttctgggaaaatcagtcaacagggggtcattgtctgcctctcattatcagcgagggcaggggagaagggactgcgagcatatgcagagagaggtgcccagagaaaagctgttcacacttctcgtgtgttcatggaagctgatgtcgattgcaggcacccagccctaaaccaggagcccctgttcytataaaaggcctgagtgtttctctcggttgctgcatcagccctccasattgctctgccagagcaaacattaggcatggctaagctcttgggccaaacgacaggattacctagcacattagcactcgggtccattttccatctctttgaagttctttctttatctgtgccttgctcttcctccctgtgttccctcagtaatgagagatgatgttgtctgaaagcgaaggaatctgaccctattcatagcagcttgctttttttcctcttctcgctaatgtgtccttttccacagcaagtgg

SEQ ID NO: 73321 - DNA, 600 bp, Chicken  19866894354342_2
gtttcttccattcctattcaattcatgggattcacggtatttgactgaagaaaatgttcagtgatagcttctgggaaaatcagtcaacagggggtcattgtctgcctctcattatcagcgagggcaggggagaagggactgcgagcatatgcagagagaggtgcccagagaaaagctgttcacacttctcgtgtgttcatggaagctgatgtcgattgcaggcacccagccctaaaccaggagcccctgttcytataaaaggcctgagtgtttctctcggttgctgcatcagccctccasattgctctgccagagcaaacattaggcatggctaagctcttgggccaaacgacaggattacctagcacattagcactcgggtccattttccatctctttgaagttctttctttatctgtgccttgctcttcctccctgtgttccctcagtaatgagagatgatgttgtctgaaagcgaaggaatctgaccctattcatagcagcttgctttttttcctcttctcgctaatgtgtccttttccacagcaagtggcagagagatgactttgccattgcacacatggttttaaagcagttcaa

SEQ ID NO: 73322 - DNA, 575 bp, Chicken  19866894354345_1
gagagcattacgtgagcactagaagatctttctacaaaagatagtgcagaatgaattatgtgaacatagaataatgaaaatacaatgctaaaatcacttcctggatatacagtcagctttttggtgatattttctcctttgatgcacgcagattatgaccatagttcagccaaaaacagtttacagatagacacacactgttccacttccccacaactcagatggttaattttagctagctgttgattcattttagaaccacagaatccttagagttgaaagggatctttaaaggtcgtmttgtccaactcccctacaataagcagggacacctacagctagatcaggtgctcagagcccagtccagcctcaccttgagtgtctccagggatggcgcatccaccacacctctggacaacctgtgccagtgcctcaccgccctcactgtaaaagacttttaccttacatcaaacctaaatctatcttctttagatctgaaaccatttcccccatgtcctatcacaacaaacactggttacctgtccccttctttcttacaagctccccttcagata

SEQ ID NO: 73323 - DNA, 600 bp, Chicken  19866894354351_1
aaaacctataaaactggtattcttttaaacagctgatttaagtgtggctactgtttgcatgatcccctcattattaaaattaatttaaaatgggctaccatggtttagtagttattcattttgaagcagtaaacaaaataggaaaccctacagtgacatgcaatgaaaagtactgctcgtattacgatttcattatttacatagaagcaagatttctagacatttaatagataagtaaatcagcaagttctaaagaaaggaccaaaacctagacaaaacaaaaactgacacaagcatgcrttgtacataactgaactagaaagtgaaaactacaattatttcacctggtgaaaaccacagctgatccagactctgtctgaagctattaacctatggtgcattaacatttacattaaagttgacataagtgcctaatttgtgtgttttcctttgagaataatgacttagggccatccaaaaaccattaaagcagaagaagaacttaactcgaattaagcacaagagattcgaggaggcaaaatgctgagtacgtggtgattttgactaacagagtaccactgtgttagcaaaagatgggaa

SEQ ID NO: 73324 - DNA, 599 bp, Chicken  19866894354363_1
  misc_feature (1)..(225): n is any nucleotide
nnnnnnnnnnnnnnnnnnnnnnnnnnnnnnnnnnnnnnnnnnnnnnnnnnnnnnnnnnnnnnnnnnnnnnnnnnnnnnnnnnnnnnnnnnnnnnnnnnnnnnnnnnnnnnnnnnnnnnnnnnnnnnnnnnnnnnnnnnnnnnnnnnnnnnnnnnnnnnnnnnnnnnnnnnnnnnnnnnnnnnnnnnnnnnnnnnnnnnnnnnnnnnnnnnnnnnnnnnnnnnnnnatgctgtattttgacagttgcctatttatgctaaagtggaggcataataaaatcagtttggcgtctggctcactytatctgtagcttttacttaaggatccgatgatcttttttttagattgactgacattactgtttagtttctgatttgttgttttggactctttttttttcttttccttttcttcttttttgtaatttttgaaataaaagctttcctaagaagctggcattcttttycttgaacacacccttcctcagctgcaaatctaaaaaaaggagacagcattgttaaaagaaaggaatttttatatatacttttttttttcttccctttaaaacttactggaaaaaaaataaatgcagcaagcaaa

SEQ ID NO: 73325 - DNA, 599 bp, Chicken  19866894354363_2
  misc_feature (1)..(60): n is any nucleotide
nnnnnnnnnnnnnnnnnnnnnnnnnnnnnnnnnnnnnnnnnnnnnnnnnnnnnnnnnnnnatgctgtattttgacagttgcctatttatgctaaagtggaggcataataaaatcagtttggcgtctggctcactytatctgtagcttttacttaaggatccgatgatcttttttttagattgactgacattactgtttagtttctgatttgttgttttggactctttttttttcttttccttttcttcttttttgtaatttttgaaataaaagctttcctaagaagctggcattcttttycttgaacacacccttcctcagctgcaaatctaaaaaaaggagacagcattgttaaaagaaaggaatttttatatatacttttttttttcttccctttaaaacttactggaaaaaaaataaatgcagcaagcaaacaaaaaaccttctgcagtctaagagcagcagatgctgaagctgtgggtaagaggctgtaggctgctgtagcaatcttctccctggctctggtacacrgcctgtctgatgatgggcagccagagcatgtgttggtgtgatctgatgtggggttccccactgcaaca

SEQ ID NO: 73326 - DNA, 600 bp, Chicken  19866894354363_3
ttcttttccttttcttcttttttgtaatttttgaaataaaagctttcctaagaagctggcattcttttycttgaacacacccttcctcagctgcaaatctaaaaaaaggagacagcattgttaaaagaaaggaatttttatatatacttttttttttcttccctttaaaacttactggaaaaaaaataaatgcagcaagcaaacaaaaaaccttctgcagtctaagagcagcagatgctgaagctgtgggtaagaggctgtaggctgctgtagcaatcttctccctggctctggtacacrgcctgtctgatgatgggcagccagagcatgtgttggtgtgatctgatgtggggttccccactgcaacacagtactgccttccagtagctcacttaaaggcatgactggcatttgtcatctgttgtctggtctttctcatgctttccccagcagataagtgtttgcaataagggatcttgcattcctaaggagtttttttagtgtttgtatttgttctgtgttagaggaggtagctcagaggtagacattttgcatgggagcaaacaactragttttgcggtgtttattaattttggggga

SEQ ID NO: 73327 - DNA, 600 bp, Chicken  19866894354363_4
tagcaatcttctccctggctctggtacacrgcctgtctgatgatgggcagccagagcatgtgttggtgtgatctgatgtggggttccccactgcaacacagtactgccttccagtagctcacttaaaggcatgactggcatttgtcatctgttgtctggtctttctcatgctttccccagcagataagtgtttgcaataagggatcttgcattcctaaggagtttttttagtgtttgtatttgttctgtgttagaggaggtagctcagaggtagacattttgcatgggagcaaacaactragttttgcggtgtttattaattttgggggaatttaatcctgattcttaacccaggcacaaagaaatctttgtccttaactttattacagaaatttgcttggaccagaaaaatgatgtttttggttttgatctaygtctttgagtttttgacactcagaagcattgtaggtgtgctgagcagaagtggttgcagatatgcctgttttggataaggaacaccaaagcagcacgtcatacctgatatggtgcactgacatcaacagttttccctcctccccaggtcagtgtttctggcaatga

SEQ ID NO: 73328 - DNA, 600 bp, Chicken  19866894354363_5
ctggcatttgtcatctgttgtctggtctttctcatgctttccccagcagataagtgtttgcaataagggatcttgcattcctaaggagtttttttagtgtttgtatttgttctgtgttagaggaggtagctcagaggtagacattttgcatgggagcaaacaactragttttgcggtgtttattaattttgggggaatttaatcctgattcttaacccaggcacaaagaaatctttgtccttaactttattacagaaatttgcttggaccagaaaaatgatgtttttggttttgatctaygtctttgagtttttgacactcagaagcattgtaggtgtgctgagcagaagtggttgcagatatgcctgttttggataaggaacaccaaagcagcacgtcatacctgatatggtgcactgacatcaacagttttccctcctccccaggtcagtgtttctggcaatgaggcacagtcaagtctcagaatgcagtaccccacacttagccctgggttagcttttgcagtcasagcctgatttcaaaaggcaatgtatttagggagatgaaccaaagagcatttcaggagcatttctgtagccc

SEQ ID NO: 73329 - DNA, 600 bp, Chicken  19866894354363_6
aatctttgtccttaactttattacagaaatttgcttggaccagaaaaatgatgtttttggttttgatctaygtctttgagtttttgacactcagaagcattgtaggtgtgctgagcagaagtggttgcagatatgcctgttttggataaggaacaccaaagcagcacgtcatacctgatatggtgcactgacatcaacagttttccctcctccccaggtcagtgtttctggcaatgaggcacagtcaagtctcagaatgcagtaccccacacttagccctgggttagcttttgcagtcasagcctgatttcaaaaggcaatgtatttagggagatgaaccaaagagcatttcaggagcatttctgtagccctttgtacctgaaggaaggagaatttttggaaaaaaatgtcaatgatattgtaaggatctcaggattttactggatgagaggaaaatctaaartggccaaaataggattacgcattagtaactccttggaaataaaatattggcatttactcctctgctacctgcttgagcaaggtattcctgtgctactgctgtgggagagggtgttggagcagagacccaggcagtgg

SEQ ID NO: 73330 - DNA, 600 bp, Chicken  19866894354363_7
gcacgtcatacctgatatggtgcactgacatcaacagttttccctcctccccaggtcagtgtttctggcaatgaggcacagtcaagtctcagaatgcagtaccccacacttagccctgggttagcttttgcagtcasagcctgatttcaaaaggcaatgtatttagggagatgaaccaaagagcatttcaggagcatttctgtagccctttgtacctgaaggaaggagaatttttggaaaaaaatgtcaatgatattgtaaggatctcaggattttactggatgagaggaaaatctaaartggccaaaataggattacgcattagtaactccttggaaataaaatattggcatttactcctctgctacctgcttgagcaaggtattcctgtgctactgctgtgggagagggtgttggagcagagacccaggcagtggggcagcagtaggcacatgccctgctcagcctaaggatcccagctctggtcttcattgccccaagctaaatcaagcctcatcctgtacatccccagaaggattataaaattttctgcacaccaaaccctttgttctctatgctcaaggtggtcctgggtgttag

SEQ ID NO: 73331 - DNA, 600 bp, Chicken  19866894354371_1
ctgatctaggggagaaagggagagatgcttttgtattttaaagagttactggctggttcagtttattattttaagtcctggtttatgtatttatttagtttttattttatagaaaatcttaattttcttctttttgggtaatttgctcacagagtaattaaaaagcatgcattcacttaaaatatatatttatagtgattgtgtagttagaatatattttgcatttctgtaacttcgcgttgagtgtttcaggatattacgtttatttctaaaagacaactgttgatttcagcttaaaawtctctttaagttttcgtgcacttcctcaccaaaaagatcaagaggtatatatagaactatttattcaaaggtatatcagatatgaagatcaaagatcttctacttctaggttcgtttaattagaactatttaaaaataattattttatttaaaacggtaaagctatttaaagtcaaagcaatttttgataagcagttcagagaaaatctgtggtctgaatcctggcgtggcagctttgtgttgtgttcccagtgcagagtctcactaatatcagcagaactgccaatgagaagatcacgg

SEQ ID NO: 73332 - DNA, 599 bp, Chicken  19866894354373_1
  misc_feature (1)..(85): n is any nucleotide
nnnnnnnnnnnnnnnnnnnnnnnnnnnnnnnnnnnnnnnnnnnnnnnnnnnnnnnnnnnnnnnnnnnnnnnnnnnnnnnnnnnnnaatcaagctcaagccttggggactggtccattttctggttttactttttattttactttgtggttgggcattcacagccaaaaaaacagggtttggggctgaatgcctgaaaaggatagcacagctatcatggatgtccctgacactgtccccatcccacgtgcagttcatgagtccagtgggcacagagagcagcgccacgctccagatttcarcacagccactcccagagctgagctgcatttttttttgctcaggtgccctgactcgattttcctttggagaataactctttgttttaattgcttctcattaaacccgctgttacccttcaccttgcgtacacagagcaatagacaattgtcactactacaatataagggagacagyrggagctcaaccgcccaccccagacctggctctggccatccttccctccttagcaattgtgctattttgcagctgggattttccttagtgcccagcctgaacctgcttttcttccaggttaaat

SEQ ID NO: 73333 - DNA, 600 bp, Chicken  19866894354373_2
gtttggggctgaatgcctgaaaaggatagcacagctatcatggatgtccctgacactgtccccatcccacgtgcagttcatgagtccagtgggcacagagagcagcgccacgctccagatttcarcacagccactcccagagctgagctgcatttttttttgctcaggtgccctgactcgattttcctttggagaataactctttgttttaattgcttctcattaaacccgctgttacccttcaccttgcgtacacagagcaatagacaattgtcactactacaatataagggagacagyrggagctcaaccgcccaccccagacctggctctggccatccttccctccttagcaattgtgctattttgcagctgggattttccttagtgcccagcctgaacctgcttttcttccaggttaaataagttgcccagtactgctttgatcattgttgctgttttaatcaggagttgaaaggtattcaatgtttttgttaaatgtacagcttcagagagaagtagttgcatgggattcatgcacttcaccttaaataaagctctcattgttagcttttatagtgtcagagcaaaggtggaaaa

SEQ ID NO: 73334 - DNA, 600 bp, Chicken  19866894354373_3
tttggggctgaatgcctgaaaaggatagcacagctatcatggatgtccctgacactgtccccatcccacgtgcagttcatgagtccagtgggcacagagagcagcgccacgctccagatttcarcacagccactcccagagctgagctgcatttttttttgctcaggtgccctgactcgattttcctttggagaataactctttgttttaattgcttctcattaaacccgctgttacccttcaccttgcgtacacagagcaatagacaattgtcactactacaatataagggagacagyrggagctcaaccgcccaccccagacctggctctggccatccttccctccttagcaattgtgctattttgcagctgggattttccttagtgcccagcctgaacctgcttttcttccaggttaaataagttgcccagtactgctttgatcattgttgctgttttaatcaggagttgaaaggtattcaatgtttttgttaaatgtacagcttcagagagaagtagttgcatgggattcatgcacttcaccttaaataaagctctcattgttagcttttatagtgtcagagcaaaggtggaaaag

SEQ ID NO: 73335 - DNA, 600 bp, Chicken  19866894354381_1
ttgttgttgagcaagtttgacactttagacgtatataaagtgtgtaaattgtactcaattaaacatatgactaaaactgagctactttaccgcctgtagtttattgaacagtggaatgatactagtgtgcaaattgaattggctctttctattaaatatcttaactgtcataactccacactgtttcctaagtacaggatgaacaaggtgaaacaagataagacgagacaactggtttgaaatttgttattgagctcctgtagtgtcagcaggtgattttcctttcttttttttttgtgrcaaggttttagatgccaatagagatatcaaaggtaatggtttcatattaagaactgcaatagctgtgatgtatactgtttgagctttctgtatgctaccctaaacaaagcagacaaagcagaattttttcattaggtaaaagaggacaactaccttctaaagtgcgtttgcatacctgaataaattgcagatcagtgtcctcagtgaataagctcggctctttagttattacatgggaacttttgtagcaaaatagtaacaaaaatagacactcaagtcattgctgcaaatacacaacta

SEQ ID NO: 73336 - DNA, 600 bp, Chicken  19866894354382_1
cccctggggcacagagtggtgtgaagtggtccaactggcagatggcagagatgaccagtgggaaggaatggggcagcaggcaggagctgactgccaatgttgggagccaggaaggggacaaatgcatggaaaaagagatcttgttgctgctaggaggtgatggtgttggctggaggctggatatgagcttgtgtccctcgatggagattcctgcagagctgtcaggcctgaagttgtgctggcactcctctagccaccgttctcccactgcaggcagccaccctctctggagagagaaayactttcttcctgccacagcccatgaaatttagcttggcaaggcagatttcaacacagaggactgggagcaccacaccactttgcctgcccagccctgtctctgccagggatcccaggagaggggtgctgaaggcactgcatggaagcaaaccttaccttttgttttcatacaccttcagtctgagctcccaggggagcttgcaagggtgtcaccagctttaaaggtcactggattgtcattgtccacatcagtaaaggcagcattgctgcagcttctttcttccttaaaggtgacctaaa

SEQ ID NO: 73337 - DNA, 577 bp, Chicken  19866894354385_1
cagagccaaccacagtaaccattgctgaagcctgccccagctagacccggtgctacagcgagcacccggctgtgtttgttacctgccaggggcactgtccccggtggcacagagttcctccgctgatcctggtgtcgctgtgccctgcgggagcgctggcgtttctctgggggtgctgaggtgtggctggaacatctgcactgtcactctcattgagagcaccacgcaggtgctcagctgcccctgttttgttctgcccggtgctctgctcagaagtgttctcccccatttcctcctgcrtggcagctgctgttgtctcattctgccaggccgctccctctgtgtgctgctgattggggtccccaccatcatcctccatggctgtgctttgcccagatgcatcctttaaatcttccttttccccagcagcactttgcttcaccttggcctgtttaactgcatgggctgtgctcatgttccacgtggccaccttgtgccatgcttcctccgaggcaccccgggctctaatcaggccacatggaaacggggctgggggagcaaagggggaaaaagaaaa

SEQ ID NO: 73338 - DNA, 600 bp, Chicken  19866894354387_1
aataagctcagaattaccaaatgcttttgtctaagaggtgactggtcagctttttggaattgtagacacttttattgttgtatcagaggaaaagtacccagatttgtccttctcattcaggaacaaacctgcatgagacacacgtgcactttgtcactggattttctgcagagaagtgatggtctgaataagaatgtaccctgagcttccagctttgtttcaaataaatatctgcagagcaatgttgaatccttgcattctgtccatgcatccatctcgtcaatacctaatagtccaggmtccctaagttattaaccagtgagagttcatcaaatccaaatcccatagaaaacaaaaatacaagtgagaaaaatgactatcaattgattcttatgtcagatctgtttttaggaatgtctagaaatggcatacagaaattacaaaataccaatgccactgaagtcctttaaatttattacctgaatatgcatatgggacccaggctttagtttcctttagctgaaatttccactccagtcagctgcaaaatgttcttgatttgcctacagtgtactgtgtagtaaatctttaaatcacatt

SEQ ID NO: 73339 - DNA, 600 bp, Chicken  19866894354387_2
ccagtgagagttcatcaaatccaaatcccatagaaaacaaaaatacaagtgagaaaaatgactatcaattgattcttatgtcagatctgtttttaggaatgtctagaaatggcatacagaaattacaaaataccaatgccactgaagtcctttaaatttattacctgaatatgcatatgggacccaggctttagtttcctttagctgaaatttccactccagtcagctgcaaaatgttcttgatttgcctacagtgtactgtgtagtaaatctttaaatcacattcattgtgtacaaccmtgcaagattactgctttaacacttgttttgtggcagatgacaaattaagtgtgtgaggaaggaggacagtacgtttcaaggtgcaatactggaagatgttgcacaaaaaggtgttaaacaaacactgcagaaaaactcccacagcttcaagatctcaagtgaaataatgtagaaaaacacaaaacaggctgctttcctcagcattttttgaatgtaatagaatgctgtgggtctcttcctttttgccactcctttggaaatggacaatccgagtactgactggttcttcatgcagtttgc

SEQ ID NO: 73340 - DNA, 599 bp, Chicken  19866894354398_1
  misc_feature (1)..(162): n is any nucleotide
nnnnnnnnnnnnnnnnnnnnnnnnnnnnnnnnnnnnnnnnnnnnnnnnnnnnnnnnnnnnnnnnnnnnnnnnnnnnnnnnnnnnnnnnnnnnnnnnnnnnnnnnnnnnnnnnnnnnnnnnnnnnnnnnnnnnnnnnnnnnnnnnnnnnnnnnnnnnnnnnnnatttcacaacagtgctgtgacacaactccagaagtggcagtccatgctctactctaccacttctctacctaaagcaaactggagccctttaacttccagttcctacgagattcttggatcccacagaaaaggaactckyrgagattcttttggcatgcctggtataaacacccttattatgacttracaaaaagaatggtctttaagttaacttcacacgtgtgcataattcaaggaaatttgtctttatcctttgtgaaaaagctgagtgcacacacgcaaaaaagaaagcagagcagcacatgtgagcctatttcctggaggcaagcatgccttgctgcggtagcgtgatcctatgaagaagctgatggatataaaacatactcaacagatctaagtgattttcaattctttgttctaagaagctttcaggtatt

SEQ ID NO: 73341 - DNA, 599 bp, Chicken  19866894354398_2
  misc_feature (1)..(161): n is any nucleotide
nnnnnnnnnnnnnnnnnnnnnnnnnnnnnnnnnnnnnnnnnnnnnnnnnnnnnnnnnnnnnnnnnnnnnnnnnnnnnnnnnnnnnnnnnnnnnnnnnnnnnnnnnnnnnnnnnnnnnnnnnnnnnnnnnnnnnnnnnnnnnnnnnnnnnnnnnnnnnnnnnatttcacaacagtgctgtgacacaactccagaagtggcagtccatgctctactctaccacttctctacctaaagcaaactggagccctttaacttccagttcctacgagattcttggatcccacagaaaaggaactckyrgagattcttttggcatgcctggtataaacacccttattatgacttracaaaaagaatggtctttaagttaacttcacacgtgtgcataattcaaggaaatttgtctttatcctttgtgaaaaagctgagtgcacacacgcaaaaaagaaagcagagcagcacatgtgagcctatttcctggaggcaagcatgccttgctgcggtagcgtgatcctatgaagaagctgatggatataaaacatactcaacagatctaagtgattttcaattctttgttctaagaagctttcaggtattc

SEQ ID NO: 73342 - DNA, 599 bp, Chicken  19866894354398_3
  misc_feature (1)..(160): n is any nucleotide
nnnnnnnnnnnnnnnnnnnnnnnnnnnnnnnnnnnnnnnnnnnnnnnnnnnnnnnnnnnnnnnnnnnnnnnnnnnnnnnnnnnnnnnnnnnnnnnnnnnnnnnnnnnnnnnnnnnnnnnnnnnnnnnnnnnnnnnnnnnnnnnnnnnnnnnnnnnnnnnnatttcacaacagtgctgtgacacaactccagaagtggcagtccatgctctactctaccacttctctacctaaagcaaactggagccctttaacttccagttcctacgagattcttggatcccacagaaaaggaactckyrgagattcttttggcatgcctggtataaacacccttattatgacttracaaaaagaatggtctttaagttaacttcacacgtgtgcataattcaaggaaatttgtctttatcctttgtgaaaaagctgagtgcacacacgcaaaaaagaaagcagagcagcacatgtgagcctatttcctggaggcaagcatgccttgctgcggtagcgtgatcctatgaagaagctgatggatataaaacatactcaacagatctaagtgattttcaattctttgttctaagaagctttcaggtattct

SEQ ID NO: 73343 - DNA, 599 bp, Chicken  19866894354398_4
  misc_feature (1)..(114): n is any nucleotide
nnnnnnnnnnnnnnnnnnnnnnnnnnnnnnnnnnnnnnnnnnnnnnnnnnnnnnnnnnnnnnnnnnnnnnnnnnnnnnnnnnnnnnnnnnnnnnnnnnnnnnnnnnnnnnnnnnatttcacaacagtgctgtgacacaactccagaagtggcagtccatgctctactctaccacttctctacctaaagcaaactggagccctttaacttccagttcctacgagattcttggatcccacagaaaaggaactckyrgagattcttttggcatgcctggtataaacacccttattatgacttracaaaaagaatggtctttaagttaacttcacacgtgtgcataattcaaggaaatttgtctttatcctttgtgaaaaagctgagtgcacacacgcaaaaaagaaagcagagcagcacatgtgagcctatttcctggaggcaagcatgccttgctgcggtagcgtgatcctatgaagaagctgatggatataaaacatactcaacagatctaagtgattttcaattctttgttctaagaagctttcaggtattctcacatttcttccactccatatgaaaaagttaaatgaattgtatttg

SEQ ID NO: 73344 - DNA, 600 bp, Chicken  19866894354398_5
tgtgcataattcaaggaaatttgtctttatcctttgtgaaaaagctgagtgcacacacgcaaaaaagaaagcagagcagcacatgtgagcctatttcctggaggcaagcatgccttgctgcggtagcgtgatcctatgaagaagctgatggatataaaacatactcaacagatctaagtgattttcaattctttgttctaagaagctttcaggtattctcacatttcttccactccatatgaaaaagttaaatgaattgtatttggcattttaaaatacagataatagcgactgtcccamacaactcatgaaaaaatacaaatgtagcttgccaggattgcaagagttctctacagcacttattacgtatcgattaaaacatttttcttccaggctactggctgctttcctactcacatgctggctatattccagagctgttaattcggatactaatgtaacaactaacctctgcatttgtgttgatgctcagatgcaaaacattttgattgccatagaaaaagagctattcctactgaaagcacttaaactttccttgggcactggaacttcagaatgtacttctcaaagcacgctatt

SEQ ID NO: 73345 - DNA, 600 bp, Chicken  19866894354405_1
tctttctgtgagggaaaattctgagaggctggtcagcggattatttgcatctgtccatggttttacaacctccagctcacttctttctcaggtctgcttacttcacccaacctgttctattgcctagatgactagagctgctggcttctctccctgtgtatcaggggtcagtatcagctattgtcaggcctctttctagtttgcaggggcaggatcttaccctttcttctgtcatacattaagaagcacatcaataaatcaaagatcctgttggaaatgtttcatgctactctgaggtcyggataatcttttgcactgaggtactwcctggttgacccgcaatcctctactggaccaggttgtatatggtgagcagatttgagtgacagatctcagtgctgtgttacttcagrccttactttctggttgggtgaccagaagctgatcactgacagcaggggaggttaaagggggaattttaaaatgtcagcagctttcattggagctgcccaagtgcagtatcttaaaagcattgatagctattttaggttattcctgaaataacttggtttcatcattagaaatatgaaaaaacgttct

SEQ ID NO: 73346 - DNA, 600 bp, Chicken  19866894354405_2
ggctggtcagcggattatttgcatctgtccatggttttacaacctccagctcacttctttctcaggtctgcttacttcacccaacctgttctattgcctagatgactagagctgctggcttctctccctgtgtatcaggggtcagtatcagctattgtcaggcctctttctagtttgcaggggcaggatcttaccctttcttctgtcatacattaagaagcacatcaataaatcaaagatcctgttggaaatgtttcatgctactctgaggtcyggataatcttttgcactgaggtactwcctggttgacccgcaatcctctactggaccaggttgtatatggtgagcagatttgagtgacagatctcagtgctgtgttacttcagrccttactttctggttgggtgaccagaagctgatcactgacagcaggggaggttaaagggggaattttaaaatgtcagcagctttcattggagctgcccaagtgcagtatcttaaaagcattgatagctattttaggttattcctgaaataacttggtttcatcattagaaatatgaaaaaacgttctgaaacattaaaaaaatgaatagaact

SEQ ID NO: 73347 - DNA, 600 bp, Chicken  19866894354405_3
gttctattgcctagatgactagagctgctggcttctctccctgtgtatcaggggtcagtatcagctattgtcaggcctctttctagtttgcaggggcaggatcttaccctttcttctgtcatacattaagaagcacatcaataaatcaaagatcctgttggaaatgtttcatgctactctgaggtcyggataatcttttgcactgaggtactwcctggttgacccgcaatcctctactggaccaggttgtatatggtgagcagatttgagtgacagatctcagtgctgtgttacttcagrccttactttctggttgggtgaccagaagctgatcactgacagcaggggaggttaaagggggaattttaaaatgtcagcagctttcattggagctgcccaagtgcagtatcttaaaagcattgatagctattttaggttattcctgaaataacttggtttcatcattagaaatatgaaaaaacgttctgaaacattaaaaaaatgaatagaactgaagcatttttaacataccacagcaagtacttaatttctagttagttagttcagttgccattgtatttgccttccttcctgtctggc

SEQ ID NO: 73348 - DNA, 600 bp, Chicken  19866894354408_1
gttacaactaatttcttgtctctgacttaccagtttgtttagatagtggaagtactatcttatacaacttctgcattgcaggaggagagtgagagcttgacagaacagctacagcaagacaattaagtgcccttggacctcctttccctttctcctcagactcctttcttctttcacagctgcaaacctgcatcttttcctttgagcagccatagtgacaagggactgggacatatttgctttcaataaatgctctgtttattctgctatgaccctgaatagaaaaaagctggtctcccytgattcttgtgagtacaaatacaagctttacaggtgtgttttttgggatgacgttacagaagattttgcagaagtgcatcaggagatacacacagtttctctgtgtaatgttctgcaaatggtccattaatactacattattgcagcttatggaaatatgcttttaaattatatagaaacccaaatctgaatgcagtaatttgtgtaaatactcgtaatgtattaggaaagaaaatgtgaactggtatttttaaataacatagcagatatttaaaagagagttttgcttcccaaaatagc

SEQ ID NO: 73349 - DNA, 600 bp, Chicken  19866894354415_1
taagatttaaatttaagatatctctataaatccttttaaaatgaaaaaaaacaaacccaaaacaaaacccaacccaaagtcctttcaagaagattaacatctctgtagtacgatgagaaatggaaactatatttaggcttttattttaaggccgctgattatgatgaacgttcagggaactggccaaaaggaagaaaacacctatagataaaagtagttttatctcccgggaacaccaaaccacagatttgcatttatttccccaagcaatcattttgcagataatcagaagcactgcaygtgctgcacgctgtattaacaagcttttgacttaagagggaaagggagcaaagaacaggagggaaaaaaaaagtttccattcaagtgttcattaaagtcatggaattcagattctaatagagagggacagcagcagcctccccacacagcagtacactgccagcatcagggcagcgcaatagcaagcagccaggctccggcagagttgggcgtaccaatgcaagccttggacttgagaaaagcacactgcagtctgccaggcaagctcacaactctgactcctgctcttgtttctttaaa

SEQ ID NO: 73350 - DNA, 600 bp, Chicken  19866894354416_1
gcttagcttctttccttttaggactgcggaaggagatggtaaagaaggcatgctgggaatacaaactgatccattgtttctacaaatactctgaatctgatcatttggagcactagatagcaggttgccaggttttcaaaccagtatttcctttttgttccccctttgatgcaatacgctcctctgttctatccctggtacgctttcattgcttttaagggagaataaatggcttcatggcctgagcccctgagcatccccccgctgatgtgctgtgggaagcttggctgggaggcctcrtggaaacaccgttggggtttgggttggggtagatgatccccgcaggcactcccaacctcagctgttctgtgaaacgcaagtttgggggagctgaaggcttccttcatctttcaggtccctgtgttaaacagaaagcagctcatctagttttaaaaacaagatgaagagaactggcattatataaaaatccctttgcagtgctttgttctaggctcggaagccttattaagtaggtttctttttataaagcatccttgctttccttaacagaatcgctgcccttttgtctgcgctctcctg

SEQ ID NO: 73351 - DNA, 600 bp, Chicken  19866894354422_1
ccactatgtaaagcagcttttatgactgatgagaattatacagcgtggtggtggtttgcagcattggttacaagatccttgatcacacatgagctctgtaacctgaacgttctgttacactggaagaagtagttgcccgtcacctctcagaaataggtcctaaaatcccagtgctataaatacctatgaaagtagatgcttgatttgcctgtctaagtaaaggtagaatattcacatagctggaattttgtacagatgtgtgaaggagtgtagacttaactaataatgtaacacagctgwtatctctgtgagaggtttcacagctgtagagaaaataaytattttagtcttattagatctgtttgttaaatttcctttctttttggtcttgaaaagtaaaagtgtacttaacattaaaactttgcttgattttaattataattgtaagatctgtcgtgtcccaaagcctactgaagcctttcctgtggttacacaatactcagagaaaggtgtttttgcccacagtaaactgggagctgctgtatgctgctcttcaagacaagtagggaaataggcaggtcaagtgatttagttgtttag

SEQ ID NO: 73352 - DNA, 600 bp, Chicken  19866894354422_2
acagcgtggtggtggtttgcagcattggttacaagatccttgatcacacatgagctctgtaacctgaacgttctgttacactggaagaagtagttgcccgtcacctctcagaaataggtcctaaaatcccagtgctataaatacctatgaaagtagatgcttgatttgcctgtctaagtaaaggtagaatattcacatagctggaattttgtacagatgtgtgaaggagtgtagacttaactaataatgtaacacagctgwtatctctgtgagaggtttcacagctgtagagaaaataaytattttagtcttattagatctgtttgttaaatttcctttctttttggtcttgaaaagtaaaagtgtacttaacattaaaactttgcttgattttaattataattgtaagatctgtcgtgtcccaaagcctactgaagcctttcctgtggttacacaatactcagagaaaggtgtttttgcccacagtaaactgggagctgctgtatgctgctcttcaagacaagtagggaaataggcaggtcaagtgatttagttgtttagcatttgtgtgtgccacttctgatgtgtaaaagtgagttt

SEQ ID NO: 73353 - DNA, 600 bp, Chicken  19866894354432_1
gtgtccagagaagggcagtgaagctgatgagggatccgtaacacaagtctgatggggagcaactgagggaactgggattgttcagtctggagaagaggaggctcaggggagatctcattgctctctacaaccacctgaaaggaggatgtggtggggtgggggtccccctcttctttcacataacagagttaggatgagggaatggtctcaagttgcaccaggggaagttcaggttggacattaggaaacattgctcctcggaagaagtggtgagttattggaacaggctgcccaggaagrtggtggagtcaccatccctggaggtgtttaacgaaagggtagatgttgtacttaggaatgtggtctagtgggcaatattggtgggtgratagttggactaaatgatatcagaggtcttttctaactttaacgattctatgattctatgtttttaaatttttttttccatatctttggtttcccaatttgtgaacaaactgtgttttgttctggtgagttatgcccaaatttaatgagctgtgaactgctagagacagggaaatgttgggaacatgctcgtctacttttcataaactwttc

SEQ ID NO: 73354 - DNA, 600 bp, Chicken  19866894354432_2
ggagaagaggaggctcaggggagatctcattgctctctacaaccacctgaaaggaggatgtggtggggtgggggtccccctcttctttcacataacagagttaggatgagggaatggtctcaagttgcaccaggggaagttcaggttggacattaggaaacattgctcctcggaagaagtggtgagttattggaacaggctgcccaggaagrtggtggagtcaccatccctggaggtgtttaacgaaagggtagatgttgtacttaggaatgtggtctagtgggcaatattggtgggtgratagttggactaaatgatatcagaggtcttttctaactttaacgattctatgattctatgtttttaaatttttttttccatatctttggtttcccaatttgtgaacaaactgtgttttgttctggtgagttatgcccaaatttaatgagctgtgaactgctagagacagggaaatgttgggaacatgctcgtctacttttcataaactwttctaggcacccagttttgaccattattagcaaaagaggtgctgggctggatggggtggaggtctaactgtgagatacctgtcattagatc

SEQ ID NO: 73355 - DNA, 600 bp, Chicken  19866894354432_3
agrtggtggagtcaccatccctggaggtgtttaacgaaagggtagatgttgtacttaggaatgtggtctagtgggcaatattggtgggtgratagttggactaaatgatatcagaggtcttttctaactttaacgattctatgattctatgtttttaaatttttttttccatatctttggtttcccaatttgtgaacaaactgtgttttgttctggtgagttatgcccaaatttaatgagctgtgaactgctagagacagggaaatgttgggaacatgctcgtctacttttcataaactwttctaggcacccagttttgaccattattagcaaaagaggtgctgggctggatggggtggaggtctaactgtgagatacctgtcattagatctgcagtggttaatgcctgaatgaaccaggtgwtcaggaagatatttttttaaatatatttttgtatctccattggcttcatctgagatggtccgtctcagatccaagtcaaactgacagctgagaaatgtttagtcagcaaagcatttcctgttctttttccaagatgttgaccccactgaataccttccayaatctatttcacagtta

SEQ ID NO: 73356 - DNA, 600 bp, Chicken  19866894354432_4
ctaactttaacgattctatgattctatgtttttaaatttttttttccatatctttggtttcccaatttgtgaacaaactgtgttttgttctggtgagttatgcccaaatttaatgagctgtgaactgctagagacagggaaatgttgggaacatgctcgtctacttttcataaactwttctaggcacccagttttgaccattattagcaaaagaggtgctgggctggatggggtggaggtctaactgtgagatacctgtcattagatctgcagtggttaatgcctgaatgaaccaggtgwtcaggaagatatttttttaaatatatttttgtatctccattggcttcatctgagatggtccgtctcagatccaagtcaaactgacagctgagaaatgtttagtcagcaaagcatttcctgttctttttccaagatgttgaccccactgaataccttccayaatctatttcacagttaagaagtgaggctaagccacatactgtagattatgtgttctgctgtggttaaaggacagcagatggaagtgaaagttgttttagctaccaattatgagaaggtagttgtcatacagcaagcaga

SEQ ID NO: 73357 - DNA, 599 bp, Chicken  19866894354432_5
ctacttttcataaactwttctaggcacccagttttgaccattattagcaaaagaggtgctgggctggatggggtggaggtctaactgtgagatacctgtcattagatctgcagtggttaatgcctgaatgaaccaggtgwtcaggaagatatttttttaaatatatttttgtatctccattggcttcatctgagatggtccgtctcagatccaagtcaaactgacagctgagaaatgtttagtcagcaaagcatttcctgttctttttccaagatgttgaccccactgaataccttccayaatctatttcacagttaagaagtgaggctaagccacatactgtagattatgtgttctgctgtggttaaaggacagcagatggaagtgaaagttgttttagctaccaattatgagaaggtagttgtcatacagcaagcagaggtgactaatgcaatgtcctcttccttttcctgtcactgtatgaatcacctttcttccaaacagagcattctgtccaaggaaagctcacttcagtttcttagttctcggatgagctttcagttaaaaagtactgcaggatcagaacattacttagtgtg

SEQ ID NO: 73358 - DNA, 600 bp, Chicken  19866894354433_1
ttataagttaattgtattttgttacagcatggtaatttctgaagtggtttgtgtggaacaggagtaaacgtcccataagcaattttaattccttattcataaagctgcataagatatgaaaggatttgtggtaagtgtacaaaatggtaggaaagaagatattagaataggtatctgcttcttcagatgttgttgctgtatttattcctgatgctacatagaatcatagaatatatagagttggaagggatctgtataggtcatgtagtccaactctcctgcaaagaacagggacatccrctgctcagtcaggttgctcagagcctgatccagcctggccctccgtgtctccagggacagggcttctaccacatttctgggcaacctgttccactgcctcaccatcctcactgcaaaagactttttccttatatccaactcaaatctcccctcttttattttgaaactgtttcctcttgttctgtcaccacagaccatgctaaggagtctgtcctcttctttcttggaactcccttttatgtactaagaggccactatcaggtcatcttgaagccttctcttctccaggctcaacagctc

SEQ ID NO: 73359 - DNA, 600 bp, Chicken  19866894354435_1
cctcttttccacctttattcttcgctatccacattgaaatgcaaatatcagcgcagggtttccaccagcgtgccactcacaaattgaaaagcagtttttatctatgcaaatgtaagcatggtaattgaagttaatcaatcaatgctagctttcactaaaaccttgaacatgattgaataaagtaattatcattcagcagaaaatgatgaagttgtagacagcatgaaccttattaaaggaggattttgagtcacaatggcttaatttagctaacagcccagccttagcccaagcaacacrctacccttgctgtctggaattgctgggggggggagggggggattaaaaaatatatgactatttttacagtgttggatcagtagaaggtacttgttacaccacaaaggataaaccgtcattaacatccttctttattccaaatggatcaatgaacaaagattgctgtgacacagcaaaggtgtccaacccgaacaacagtcaattaaaactgttatactttgaaataaaatggaggcagcgacacaacttcaacaaaatgaccacagtgctcatccmgttccaaccccctgctatgtgcag

SEQ ID NO: 73360 - DNA, 573 bp, Chicken  19866894354435_2
cccagccttagcccaagcaacacrctacccttgctgtctggaattgctgggggggggagggggggattaaaaaatatatgactatttttacagtgttggatcagtagaaggtacttgttacaccacaaaggataaaccgtcattaacatccttctttattccaaatggatcaatgaacaaagattgctgtgacacagcaaaggtgtccaacccgaacaacagtcaattaaaactgttatactttgaaataaaatggaggcagcgacacaacttcaacaaaatgaccacagtgctcatccmgttccaaccccctgctatgtgcagggtcgccaaccagcagcccaggctgcccagagccacatccagcctggccttgaatgcctgcagggatggggcatccacagcctccttgggcaacctgttcaagtgcgtcaccaccctctgggggaaaaacttcctctctcatatccaacctaaacctcccctgtctcagtttaaaaccattcccccttgtcctatcaccatccaccctcataaacagccgttccccctcctgtttgtacgctcccttca

SEQ ID NO: 73361 - DNA, 600 bp, Chicken  19866894354436_1
tccttagtactggcctcgcagactaaatttttgcagccattaagtccaatgagtttaaccaaatgacatgactctcatttgtaacatttgtccatcgcagaccgcatcaaaaacctcctgcagtagatacaggttttgttcttgtttttttaaagaagaaacaggttcattctggttaaatctgcaataggaagagtcctctgtagcttgtgggtggaattgctgatcaaaacgaaggtaagaaaaaaagccaccatgctccagagcttgagtccctatctgaaagttcagaggcacagmcttgcatgcgtggatctgtccaatttcaaccaagacccccatgtgtccatcctcactatactgttgggacagcctygtgctctggcacaaggaagcttttccattygcacctgcaaacaccaggattatgcctcagcccaagttcacacacccagagcgaacctccatcaggctagaggctgactcttcgagctctttttggctttccagaaaaaaatacctgctgtatctttgcragactaccaccatggaatcaaaaagttggtgtctgtttgattctgtcacttttggacttgcttt

SEQ ID NO: 73362 - DNA, 600 bp, Chicken  19866894354436_2
atttgtaacatttgtccatcgcagaccgcatcaaaaacctcctgcagtagatacaggttttgttcttgtttttttaaagaagaaacaggttcattctggttaaatctgcaataggaagagtcctctgtagcttgtgggtggaattgctgatcaaaacgaaggtaagaaaaaaagccaccatgctccagagcttgagtccctatctgaaagttcagaggcacagmcttgcatgcgtggatctgtccaatttcaaccaagacccccatgtgtccatcctcactatactgttgggacagcctygtgctctggcacaaggaagcttttccattygcacctgcaaacaccaggattatgcctcagcccaagttcacacacccagagcgaacctccatcaggctagaggctgactcttcgagctctttttggctttccagaaaaaaatacctgctgtatctttgcragactaccaccatggaatcaaaaagttggtgtctgtttgattctgtcacttttggacttgctttgcccagctaaacaacagtaacagtcatcctcatccatccttgtctgaacaaaaacaagctggagattttagggaag

SEQ ID NO: 73363 - DNA, 600 bp, Chicken  19866894354436_3
tcaaaaacctcctgcagtagatacaggttttgttcttgtttttttaaagaagaaacaggttcattctggttaaatctgcaataggaagagtcctctgtagcttgtgggtggaattgctgatcaaaacgaaggtaagaaaaaaagccaccatgctccagagcttgagtccctatctgaaagttcagaggcacagmcttgcatgcgtggatctgtccaatttcaaccaagacccccatgtgtccatcctcactatactgttgggacagcctygtgctctggcacaaggaagcttttccattygcacctgcaaacaccaggattatgcctcagcccaagttcacacacccagagcgaacctccatcaggctagaggctgactcttcgagctctttttggctttccagaaaaaaatacctgctgtatctttgcragactaccaccatggaatcaaaaagttggtgtctgtttgattctgtcacttttggacttgctttgcccagctaaacaacagtaacagtcatcctcatccatccttgtctgaacaaaaacaagctggagattttagggaagcaataatttgctcctagtcattatrgacaa

SEQ ID NO: 73364 - DNA, 600 bp, Chicken  19866894354436_4
ggtaagaaaaaaagccaccatgctccagagcttgagtccctatctgaaagttcagaggcacagmcttgcatgcgtggatctgtccaatttcaaccaagacccccatgtgtccatcctcactatactgttgggacagcctygtgctctggcacaaggaagcttttccattygcacctgcaaacaccaggattatgcctcagcccaagttcacacacccagagcgaacctccatcaggctagaggctgactcttcgagctctttttggctttccagaaaaaaatacctgctgtatctttgcragactaccaccatggaatcaaaaagttggtgtctgtttgattctgtcacttttggacttgctttgcccagctaaacaacagtaacagtcatcctcatccatccttgtctgaacaaaaacaagctggagattttagggaagcaataatttgctcctagtcattatrgacaatatatgtctgtggagtacctgccacagtggctgatgaggakataacacttgcaaagcaaaaggtagagcagctgcttcatgcacgacagaagcagagaacagatttgcagccacacagagccaaatgtcc

SEQ ID NO: 73365 - DNA, 600 bp, Chicken  19866894354436_5
cattygcacctgcaaacaccaggattatgcctcagcccaagttcacacacccagagcgaacctccatcaggctagaggctgactcttcgagctctttttggctttccagaaaaaaatacctgctgtatctttgcragactaccaccatggaatcaaaaagttggtgtctgtttgattctgtcacttttggacttgctttgcccagctaaacaacagtaacagtcatcctcatccatccttgtctgaacaaaaacaagctggagattttagggaagcaataatttgctcctagtcattatrgacaatatatgtctgtggagtacctgccacagtggctgatgaggakataacacttgcaaagcaaaaggtagagcagctgcttcatgcacgacagaagcagagaacagatttgcagccacacagagccaaatgtccctcatcccagtgcctaatacataaccagtagcagtggcgcatccacatcccactgtcactattactggctcttgtactccagcgttcaggcttgccatgtctgcagaaagcatcccttgatggtgcatgccctcctgcagggacattaataaatctagctaatga

SEQ ID NO: 73366 - DNA, 600 bp, Chicken  19866894354436_6
acacccagagcgaacctccatcaggctagaggctgactcttcgagctctttttggctttccagaaaaaaatacctgctgtatctttgcragactaccaccatggaatcaaaaagttggtgtctgtttgattctgtcacttttggacttgctttgcccagctaaacaacagtaacagtcatcctcatccatccttgtctgaacaaaaacaagctggagattttagggaagcaataatttgctcctagtcattatrgacaatatatgtctgtggagtacctgccacagtggctgatgaggakataacacttgcaaagcaaaaggtagagcagctgcttcatgcacgacagaagcagagaacagatttgcagccacacagagccaaatgtccctcatcccagtgcctaatacataaccagtagcagtggcgcatccacatcccactgtcactattactggctcttgtactccagcgttcaggcttgccatgtctgcagaaagcatcccttgatggtgcatgccctcctgcagggacattaataaatctagctaatgaatggagggaaataaaacggatagttagcattcccatgggactcctc

SEQ ID NO: 73367 - DNA, 599 bp, Chicken  19866894354439_1
  misc_feature (1)..(12): n is any nucleotide
nnnnnnnnnnnncattgggtgtagagcattgcagagctcaggagcaggttgtagcctcatagagttaacctggcactccagagaagtttctacctgcctgaagaaagaaaaatacacttccactattaaaaagaaaagagtgtttctattagaagtgggatcacaaatgaaaacagagctataagaattgcttttcatcactgcttactcaactctgtcatgaaagtaaatgcgaggcctaacctgcagtgtagccagtaagggagcttggagaaggtttcagtgacacaaaggtgtctkttgaagcctgtgcacaggaaaagatgtcagtctgtccagctgtctttatttagtacactatctactcatgaaacaaagagaagctctcagacctctatatcaaaaccaagggcaagagtaaattcccaagtccccttccagcctccctgacaattgaaattactacaccagactgattcctaaaccagtgcagatcagaacagatgcagactttgtaactttttaagatgtttgggtatttagttatactacaacgctagtctttattaatgcmttgttttcattttataggtaaagtc

SEQ ID NO: 73368 - DNA, 600 bp, Chicken  19866894354439_2
aggtttcagtgacacaaaggtgtctkttgaagcctgtgcacaggaaaagatgtcagtctgtccagctgtctttatttagtacactatctactcatgaaacaaagagaagctctcagacctctatatcaaaaccaagggcaagagtaaattcccaagtccccttccagcctccctgacaattgaaattactacaccagactgattcctaaaccagtgcagatcagaacagatgcagactttgtaactttttaagatgtttgggtatttagttatactacaacgctagtctttattaatgcmttgttttcattttataggtaaagtctacaaatacccagtttacgatgactttgacttcactgaacgaccactgtttactcagcctctagttaacacgtttgctgtagctggttacaatgctactttgaactgcagtgttcggggcaaccccaaggtacagcacagcagtgtcatttaacacatgagaaagtttaacccaacaataagaactgtaatacaattgttactatacaaagcctgctgaagaaaaaaagagaggtgtgggccttaaagcatacaaaaaggacctatgcctactta

SEQ ID NO: 73369 - DNA, 536 bp, Chicken  19866894354440_1
gattaaggcttcatgtaactatcactcaagaatttatttgcctagctcttcaacagtatttctcacaggaagcagatgtcacttgtactttattggtccgcactggcttccaattcaggtttgattttactggaaagtgttgcttcagacctggaacattctggctgcctgggagatgctacacttaacagggaaatgcgagctaaaagctgtggatgtagttgggaggtgaaggaggcaaggtgttaactgtgcaattcttatcctgttttatgttttctggagccaaactttttgctytcaggatttattttttcccttgyatttttaacgaacttttgttatactgttttttctgtaccattctatttcatgctctataatgaactggcagtgttaggtaatcctgctttgtgaactagcagtctgaattttttagtttgtgaatattgaatgtagattactaaagctaaatacttttaagaaaaatttaagaaaaagaagctgatggaaacattgtgtaaatgttgacattt

SEQ ID NO: 73370 - DNA, 513 bp, Chicken  19866894354440_2
actcaagaatttatttgcctagctcttcaacagtatttctcacaggaagcagatgtcacttgtactttattggtccgcactggcttccaattcaggtttgattttactggaaagtgttgcttcagacctggaacattctggctgcctgggagatgctacacttaacagggaaatgcgagctaaaagctgtggatgtagttgggaggtgaaggaggcaaggtgttaactgtgcaattcttatcctgttttatgttttctggagccaaactttttgctytcaggatttattttttcccttgyatttttaacgaacttttgttatactgttttttctgtaccattctatttcatgctctataatgaactggcagtgttaggtaatcctgctttgtgaactagcagtctgaattttttagtttgtgaatattgaatgtagattactaaagctaaatacttttaagaaaaatttaagaaaaagaagctgatggaaacattgtgtaaatgttgacattt

SEQ ID NO: 73371 - DNA, 600 bp, Chicken  19866894354441_1
agaaaacatatattttttagtataatgcaaataaaaagaattgagtcaatatgtctttaagggttgaacaaatagttaattataaacgtttcttttcaataactggttcactgaaacacaagtatattggtgaaattattatggagatcaatttagtcttaaggaaaaaccctggcagcaaaaactgcagtggtggttaaaagatttcttttataataggacattataaacctagattttgtgtgtgcctacagccagttctaagtataaataaattgtagctctgagaatattatctaygccttgtacttcagagctgtcagtcagtatttttgatcattagccatctgtgattattttaatttttgccagcaggagaaggaactcttttccaccagggagctctgttattacaatataatttatatgtaaagagctcatttcattagaggaaaaaaaaaacttttaacattttttttccctaaagtttaaatgaaacttgtagctttaaaatatttattttgcatttctttttgatgtaattggcatggtccacataaaagcatttaacattttactgggagagttaacaataattct

SEQ ID NO: 73372 - DNA, 600 bp, Chicken  19866894354441_2
tgtaataattagttgcttgtattagctgtgataattggacttgttcaaatcttgcactctcagctactttagaatttgccataggtatcacctggttttgtactttctgattccttcacaaggagatccataaacaaaggaaataaaggaaaatgatttctgttctattcttccccctcttcactctagagaggaatgggtgttttagcatcatagaatggcgtgggttggaaggggccctaaggatcattacgttccaactcccctgccacaggcagggccaccaacctccagcatttkcagtactggccagtaaaaggttattattttcccaaatgaatagtaacttatgttaccagtggaactcagcaaaagtaaataagtaaggcaaaataaccatcttgagaatctaatgaccacactacaagtgatgaagagggatttgaggagcatgaatacctcagattacctcagcccacgaaatgaaacctttgggatctcttctgtcatatttgctgaaattggccagtaagtctgctgttataaaaataggagtaggtmatacacaaacacaccacaaatatatactaaaaaactctc

SEQ ID NO: 73373 - DNA, 600 bp, Chicken  19866894354441_3
tcccctgccacaggcagggccaccaacctccagcatttkcagtactggccagtaaaaggttattattttcccaaatgaatagtaacttatgttaccagtggaactcagcaaaagtaaataagtaaggcaaaataaccatcttgagaatctaatgaccacactacaagtgatgaagagggatttgaggagcatgaatacctcagattacctcagcccacgaaatgaaacctttgggatctcttctgtcatatttgctgaaattggccagtaagtctgctgttataaaaataggagtaggtmatacacaaacacaccacaaatatatactaaaaaactctcaaaaaatgtcaattagatttaatgaagataatattctacaagcttctctgtttgataagttctggattaaaaaacaacaacactatgacaaaaaacaacttttgaaaattataagagcttgcaatttgtatagtaaacaatgttgtagtagaatcagccagtataagcttttctacatttttaacaaaagtgccttcatatactatccaggttctgttaaacaaaatatccttgggacaacctgaaagtaattcatatttt

SEQ ID NO: 73374 - DNA, 600 bp, Chicken  19866894354442_1
aaaaaaaaaaaaaaaaggaggaggaggaatttttgggaaagattctatcgcagacaagtcaggaggacactgctgacttctggaaccggtcaatgggctgagcctctcttcccgcccccacagggatacctactggggaagattttcacactcagtttcaccacgggcttccctgggaaacacagaaatctctgtaggggtatttcatagttcagagctgtgttattcacattattggtattcaaaagaatctgccaacttggatatataccctttaacacagcaattaagcagaaatayttacattattatcataaaagtcaccaatgttcaaagccctaagcaagatatttggttactgcctgcatatagmttgggtcaaaggtggaagtaatctgaatgtagtgagacattttttttttttttttaacagcttatgagttaatatcccctcaagtccttttaaaacaaactcctagtgaacagactgcaggaggtatggattattctttttgcactgacatgtctggacaaagcagcctaaamacaaagtagctacaggaaaatctgatataaaagacccaggccataactttgtac

SEQ ID NO: 73375 - DNA, 600 bp, Chicken  19866894354442_2
tgacttctggaaccggtcaatgggctgagcctctcttcccgcccccacagggatacctactggggaagattttcacactcagtttcaccacgggcttccctgggaaacacagaaatctctgtaggggtatttcatagttcagagctgtgttattcacattattggtattcaaaagaatctgccaacttggatatataccctttaacacagcaattaagcagaaatayttacattattatcataaaagtcaccaatgttcaaagccctaagcaagatatttggttactgcctgcatatagmttgggtcaaaggtggaagtaatctgaatgtagtgagacattttttttttttttttaacagcttatgagttaatatcccctcaagtccttttaaaacaaactcctagtgaacagactgcaggaggtatggattattctttttgcactgacatgtctggacaaagcagcctaaamacaaagtagctacaggaaaatctgatataaaagacccaggccataactttgtacctagctaggaatgtattacagttgagaactgcaaaagctagtcacattatgtgactggggaattcccatggct

SEQ ID NO: 73376 - DNA, 454 bp, Chicken  19866894354442_3
agaatctgccaacttggatatataccctttaacacagcaattaagcagaaatayttacattattatcataaaagtcaccaatgttcaaagccctaagcaagatatttggttactgcctgcatatagmttgggtcaaaggtggaagtaatctgaatgtagtgagacattttttttttttttttaacagcttatgagttaatatcccctcaagtccttttaaaacaaactcctagtgaacagactgcaggaggtatggattattctttttgcactgacatgtctggacaaagcagcctaaamacaaagtagctacaggaaaatctgatataaaagacccaggccataactttgtacctagctaggaatgtattacagttgagaactgcaaaagctagtcacattatgtgactggggaattcccatggctgtcaaaaatagaacaaatacagcagta

SEQ ID NO: 73377 - DNA, 600 bp, Chicken  19866894354448_1
atacttataaagccatctttgtgaaagtcttatatacattgtatcacagcttcaaagagtagaagcagtaatccaaactatatttatgaaataattcatactgtggtaatactaatgctacagtgtaccatgtaatgcccttattcctgaaacaaacaaacaaaagaaacaaaaatgagttgaacatatgtttaagtggattatgtctgaatttctggagagttatttgctttattactaaactgtggatgggagctgactgtggagaaatttcttagaatgtattattcagttctacartaacattgaattaagataactgaaagacgaaattgtgctaatatactgtagaatgaagtttaggagacaaacaaatccacgttttgatttaaggagctgcgtgtcagctgcaatgatctctaagttccagagagtggcagctgagtacagtctttgagtcaggaactgccctctcggttctcagcctgggaaaaccttcccttcccaccgcattccagtgagaatacctgaacaaacatcgtggaacccaggatttccagagggaagatagcaacacaacagagatctttccttagaggg

SEQ ID NO: 73378 - DNA, 557 bp, Chicken  19866894354456_1
  misc_feature (1)..(68): n is any nucleotide
nnnnnnnnnnnnnnnnnnnnnnnnnnnnnnnnnnnnnnnnnnnnnnnnnnnnnnnnnnnnnnnnnnnnatgcagagaatcaaaacggtgcgagagtaaatggtttcctccagccaacgttggctgctaagaatagcagagggaaacaagcggaggccataagctgatacacagggaagaggaagacgagcagcgcatcgttcccctcctccccttaacgttaaagctccgcgttgcggatcgggggctgcaggaaaccccctgcgctccttccccttcctcctcctgcttggagaggggytttarctgaaagaaatatataacatgtgtttccctccttccaagctcctttcctccatcctttaaaaggaaattttgcatttctttatttatcggttatgcttttaagtcagcacccccgactcaccgccgacgcatcccgcgaggaaatccaaagccatagctcagcgctcagcgctcagcgccctccgctcccaccggcggggcccggccctctgcgcgctgctcaccgcgcactgccgctgctccccccgcctt

SEQ ID NO: 73379 - DNA, 552 bp, Chicken  19866894354456_2
  misc_feature (1)..(63): n is any nucleotide
nnnnnnnnnnnnnnnnnnnnnnnnnnnnnnnnnnnnnnnnnnnnnnnnnnnnnnnnnnnnnnnatgcagagaatcaaaacggtgcgagagtaaatggtttcctccagccaacgttggctgctaagaatagcagagggaaacaagcggaggccataagctgatacacagggaagaggaagacgagcagcgcatcgttcccctcctccccttaacgttaaagctccgcgttgcggatcgggggctgcaggaaaccccctgcgctccttccccttcctcctcctgcttggagaggggytttarctgaaagaaatatataacatgtgtttccctccttccaagctcctttcctccatcctttaaaaggaaattttgcatttctttatttatcggttatgcttttaagtcagcacccccgactcaccgccgacgcatcccgcgaggaaatccaaagccatagctcagcgctcagcgctcagcgccctccgctcccaccggcggggcccggccctctgcgcgctgctcaccgcgcactgccgctgctccccccgcctt

SEQ ID NO: 73380 - DNA, 599 bp, Chicken  19866894354459_1
  misc_feature (1)..(135): n is any nucleotide
nnnnnnnnnnnnnnnnnnnnnnnnnnnnnnnnnnnnnnnnnnnnnnnnnnnnnnnnnnnnnnnnnnnnnnnnnnnnnnnnnnnnnnnnnnnnnnnnnnnnnnnnnnnnnnnnnnnnnnnnnnnnnnnnnnnnnnntcaaatcaaggcctctttattacaaaaataaaaacaaacaaacaaaaaagtatgagagacgacaagatgctgaagtgtcactccaatcgtccctgtagagaacaattgcatcccatttcttattcattctcttctctcatttctacgatgtctgtcatttcctcygtgtgaggcatgtcggtcatggcagagtcttcaccttctgcagatgtttcattctcattccgcttctttttctagattgaaacaaccagtcataaacatacaaatatgttgtttgtgaacacagacctacaaacttcgggcactgggagaaayaaggtagaaataatacatctgttagggtatgtaataaagagctgtaatatttgtgtcatattcacggcttgccactagyaggttgtcayaatttagagggttttcataaacttttgggactcagctttcaccttcctaacataaac

SEQ ID NO: 73381 - DNA, 600 bp, Chicken  19866894354459_2
attacaaaaataaaaacaaacaaacaaaaaagtatgagagacgacaagatgctgaagtgtcactccaatcgtccctgtagagaacaattgcatcccatttcttattcattctcttctctcatttctacgatgtctgtcatttcctcygtgtgaggcatgtcggtcatggcagagtcttcaccttctgcagatgtttcattctcattccgcttctttttctagattgaaacaaccagtcataaacatacaaatatgttgtttgtgaacacagacctacaaacttcgggcactgggagaaayaaggtagaaataatacatctgttagggtatgtaataaagagctgtaatatttgtgtcatattcacggcttgccactagyaggttgtcayaatttagagggttttcataaacttttgggactcagctttcaccttcctaacataaacgcagtaatagatgcatttcttatgctaacagatatccaagacgggcgtcactgtgactggagggaagaaagcatctggaatcttttacatcatggacttttttattaataataaaaacaaacaaaaaaaaagcaaacracatatttgagaagat

SEQ ID NO: 73382 - DNA, 600 bp, Chicken  19866894354459_3
gagaacaattgcatcccatttcttattcattctcttctctcatttctacgatgtctgtcatttcctcygtgtgaggcatgtcggtcatggcagagtcttcaccttctgcagatgtttcattctcattccgcttctttttctagattgaaacaaccagtcataaacatacaaatatgttgtttgtgaacacagacctacaaacttcgggcactgggagaaayaaggtagaaataatacatctgttagggtatgtaataaagagctgtaatatttgtgtcatattcacggcttgccactagyaggttgtcayaatttagagggttttcataaacttttgggactcagctttcaccttcctaacataaacgcagtaatagatgcatttcttatgctaacagatatccaagacgggcgtcactgtgactggagggaagaaagcatctggaatcttttacatcatggacttttttattaataataaaaacaaacaaaaaaaaagcaaacracatatttgagaagataggttgctctagggagaaatctgaatttctcaaatgtcaaacttcagtaatttttaagatgtaagcattctggcttttc

SEQ ID NO: 73383 - DNA, 600 bp, Chicken  19866894354459_4
gcatcccatttcttattcattctcttctctcatttctacgatgtctgtcatttcctcygtgtgaggcatgtcggtcatggcagagtcttcaccttctgcagatgtttcattctcattccgcttctttttctagattgaaacaaccagtcataaacatacaaatatgttgtttgtgaacacagacctacaaacttcgggcactgggagaaayaaggtagaaataatacatctgttagggtatgtaataaagagctgtaatatttgtgtcatattcacggcttgccactagyaggttgtcayaatttagagggttttcataaacttttgggactcagctttcaccttcctaacataaacgcagtaatagatgcatttcttatgctaacagatatccaagacgggcgtcactgtgactggagggaagaaagcatctggaatcttttacatcatggacttttttattaataataaaaacaaacaaaaaaaaagcaaacracatatttgagaagataggttgctctagggagaaatctgaatttctcaaatgtcaaacttcagtaatttttaagatgtaagcattctggcttttcttggtattgc

SEQ ID NO: 73384 - DNA, 600 bp, Chicken  19866894354459_5
acctacaaacttcgggcactgggagaaayaaggtagaaataatacatctgttagggtatgtaataaagagctgtaatatttgtgtcatattcacggcttgccactagyaggttgtcayaatttagagggttttcataaacttttgggactcagctttcaccttcctaacataaacgcagtaatagatgcatttcttatgctaacagatatccaagacgggcgtcactgtgactggagggaagaaagcatctggaatcttttacatcatggacttttttattaataataaaaacaaacaayaaaaaagcaaacracatatttgagaagataggttgctctagggagaaatctgaatttctcaaatgtcaaacttcagtaatttttaagatgtaagcattctggcttttcttggtattgctgatctactgtgmgcccccaccccaccaaagcctagtaatacttgagtatttttggacagcaggagcgggagggcattcaagagtcctgtgattcatccaggatgtcctggattagtaaagctaagaagtattcagccccactaaaaacaaattgaagcatctgttccttattatccatttc

SEQ ID NO: 73385 - DNA, 600 bp, Chicken  19866894354459_6; identical to SEQ ID NO: 73384

SEQ ID NO: 73386 - DNA, 600 bp, Chicken  19866894354459_7
gggcactgggagaaayaaggtagaaataatacatctgttagggtatgtaataaagagctgtaatatttgtgtcatattcacggcttgccactagyaggttgtcayaatttagagggttttcataaacttttgggactcagctttcaccttcctaacataaacgcagtaatagatgcatttcttatgctaacagatatccaagacgggcgtcactgtgactggagggaagaaagcatctggaatcttttacatcatggacttttttattaataataaaaacaaacaaaaaaaaagcaaacracatatttgagaagataggttgctctagggagaaatctgaatttctcaaatgtcaaacttcagtaatttttaagatgtaagcattctggcttttcttggtattgctgatctactgtgmgcccccaccccaccaaagcctagtaatacttgagtatttttggacagcaggagcgggagggcattcaagagtcctgtgattcatccaggatgtcctggattagtaaagctaagaagtattcagccccactaaaaacaaattgaagcatctgttccttattatccatttctcagcaggctgac

SEQ ID NO: 73387 - DNA, 536 bp, Chicken  19866894354459_8
ttcataaacttttgggactcagctttcaccttcctaacataaacgcagtaatagatgcatttcttatgctaacagatatccaagacgggcgtcactgtgactggagggaagaaagcatctggaatcttttacatcatggacttttttattaataataaaaacaaacaaaaaaaaagcaaacracatatttgagaagataggttgctctagggagaaatctgaatttctcaaatgtcaaacttcagtaatttttaagatgtaagcattctggcttttcttggtattgctgatctactgtgmgcccccaccccaccaaagcctagtaatacttgagtatttttggacagcaggagcgggagggcattcaagagtcctgtgattcatccaggatgtcctggattagtaaagctaagaagtattcagccccactaaaaacaaattgaagcatctgttccttattatccatttctcagcaggctgactagtcttactgaaaacacttgtaatgctgacaaaaataccccccataggtatta

SEQ ID NO: 73388 - DNA, 600 bp, Chicken  19866894354460_1
agccagttgaataagcaacgaacaggatgcaatggctttaaataacgttctaataaaacaacttttttaattttgtaaacaataaaaaacaatagccattttctttaagaatcaaattataaaacttctccatgaaacactccatagcacctaagccttgctaaaatatcaaattgtaattatgaggaatgaaacttgtaccttaaaacctctaaaaacacccatctgtataagcatttgtgtatacttaagatgaaattaccattaatctactaatttctacttttaaagtactgccasttgcaaagaccattcaaaactaccagaaacctctcttctatttcagtgtgacatcgccttttgtgacagcgggtaccacacttctgacaaataccattttctctttttttatcgccttcctttaattttggagcaggaaagtttatgacttattaatgttcaacttcagtcatgacatcatttctkaaaagagaataatagtccaaagaaaattgaataattacagaaaatgaacactagaagtcattaaaatagagaaggagagaaaaaagatcatccttacatcttatacaaatcaac

SEQ ID NO: 73389 - DNA, 600 bp, Chicken  19866894354460_2
gaatgaaacttgtaccttaaaacctctaaaaacacccatctgtataagcatttgtgtatacttaagatgaaattaccattaatctactaatttctacttttaaagtactgccasttgcaaagaccattcaaaactaccagaaacctctcttctatttcagtgtgacatcgccttttgtgacagcgggtaccacacttctgacaaataccattttctctttttttatcgccttcctttaattttggagcaggaaagtttatgacttattaatgttcaacttcagtcatgacatcatttctkaaaagagaataatagtccaaagaaaattgaataattacagaaaatgaacactagaagtcattaaaatagagaaggagagaaaaaagatcatccttacatcttatacaaatcaaccattgttaaattactaaatggtttacttctgtgactcttcaacaaagactacagttactggtgtttcattaacttgttttaagaacccttaagtcaagatgtttaagatatttagcaatttcaaaaatacgctcaaaataactctcaatccctccaaattattgtatatttcctttcttttttaaa

SEQ ID NO: 73390 - DNA, 600 bp, Chicken  19866894354461_1
aatggcctgggttgaaaaggaccacaatgaccatctcatttcaaccccactgttatgtgcagggttgccaaccaccagatcaggctgcccagagccacatccagcctggccttgaatgcctccagggatggggcatccacaacctccttgggcaacctgttccagtgtgccaccaccctctgagtgaaaaacttcctactaatatctaacctaaacctcctccgtctcagtttaaaaccattcccccttgtcctatcgctatccaccctcataaacagtccccctcctgtttatacactyccttcaaatattggaaggccacaatgatgtttccctggagccttctcttctctaaatgtttatgtttatgatgtcacatggactaaaaagaaccaaatcagagagacttasgaatcttggtgctctttgtagcatcttcatgaaagtgcctaatgatgattgtttttccttatctcagcggtacagacaactccaccacgtgagctgacagcaaagaaagtcccctcttcaacaccttctcctccaatccagggtcaaagtgtgctgagttacagcccatcccgctctcctagtgccagt

SEQ ID NO: 73391 - DNA, 600 bp, Chicken  19866894354461_2
ttgaatgcctccagggatggggcatccacaacctccttgggcaacctgttccagtgtgccaccaccctctgagtgaaaaacttcctactaatatctaacctaaacctcctccgtctcagtttaaaaccattcccccttgtcctatcgctatccaccctcataaacagtccccctcctgtttatacactyccttcaaatattggaaggccacaatgatgtttccctggagccttctcttctctaaatgtttatgtttatgatgtcacatggactaaaaagaaccaaatcagagagacttasgaatcttggtgctctttgtagcatcttcatgaaagtgcctaatgatgattgtttttccttatctcagcggtacagacaactccaccacgtgagctgacagcaaagaaagtcccctcttcaacaccttctcctccaatccagggtcaaagtgtgctgagttacagcccatcccgctctcctagtgccagtccaaagtttgccaccagttgcatcccagggtacagccctcagctgcaggctctgtcaaacaacagtgcttcttacagcagtacgatcgcctattcaccgggcagcacctac

SEQ ID NO: 73392 - DNA, 600 bp, Chicken  19866894354461_3
cgttaccgctcttcacccattctctataattctcctactggcaaagaagactacatgacagacctcaagtcattggataccttccttcgaagtgaagaagagaagcagcatcgagttcagttgggtaaggaaagaatactgtttgatctgaaaagcttggcaagggcatggtgctggtttgatgctggagttgattttgtggttgaggagagttgcaaaggactacagcagaaagtgctgatagacctcactcatcacctgttaatcacctgtgaacttggtaatgatgtggtaatcacmgttcagccttctactgagtgtttaaggcatgatgtagaatgccatratgtctacccgtctccacggcttaggagcttgggaagttttcctctaaagtactcctttgggtagaacaagcacttcttacccacagaatcaaccttattgaggcatgtgctgatggactgtgtccatagtgtttgttggctgtagtggaccgtgacaagatgaagggctttaatcaccttgatgagaggtgtatcttgtggagataaggtatttgcagataaggaggggcgtgaattacctgcaggttgcttt

SEQ ID NO: 73393 - DNA, 600 bp, Chicken  19866894354461_4
aagactacatgacagacctcaagtcattggataccttccttcgaagtgaagaagagaagcagcatcgagttcagttgggtaaggaaagaatactgtttgatctgaaaagcttggcaagggcatggtgctggtttgatgctggagttgattttgtggttgaggagagttgcaaaggactacagcagaaagtgctgatagacctcactcatcacctgttaatcacctgtgaacttggtaatgatgtggtaatcacmgttcagccttctactgagtgtttaaggcatgatgtagaatgccatratgtctacccgtctccacggcttaggagcttgggaagttttcctctaaagtactcctttgggtagaacaagcacttcttacccacagaatcaaccttattgaggcatgtgctgatggactgtgtccatagtgtttgttggctgtagtggaccgtgacaagatgaagggctttaatcaccttgatgagaggtgtatcttgtggagataaggtatttgcagataaggaggggcgtgaattacctgcaggttgcttttgtcctgcatagatacaatgcttgttaagatagagaatgaaatcag

SEQ ID NO: 73394 - DNA, 599 bp, Chicken  19866894354462_1
  misc_feature (1)..(51): n is any nucleotide
nnnnnnnnnnnnnnnnnnnnnnnnnnnnnnnnnnnnnnnnnnnnnnnnnnntgtccttgatatgttattttgtctagacactacatagtcacaaaagtatcaaatagaagacaaatttgagaatcggctctaagtttaacttgaaaagcattctacaacatacaacactactgtaaatgttgatctaggtttattctttccctcaacccaaatgttattctaagccttgggcaaggcacctcttcctatgattaaaaattctctagggacactcctttttgcagttttctgtctgctctkggaacctttttgcatgttgccttcatctgttgctctgtgctctgttgctcttaaccacaacactgaccttatgtagtttatcataccccagaaaatccttctccctccagcaatttccttggaactctccatgaatgttctccatggaagagttctaacttcagccctttgttgcctgtaggtagttcttaccagttcctagctatgtatctatctccaagcttttcttgtctttaatctacatttgtgggctgctccacagagagccagtgtctttgattattgttcagggacaatac

SEQ ID NO: 73395 - DNA, 599 bp, Chicken  19866894354467_1
  misc_feature (1)..(55): n is any nucleotide
nnnnnnnnnnnnnnnnnnnnnnnnnnnnnnnnnnnnnnnnnnnnnnnnnnnnnnnatcttgtattgcgtttctatgtatatataaggctggtggaaggacttgatgaaaagtaagaatttctttgtgtttacttacttctgctttcagtttctcttcctagttgatgtagctctctcctgagaggacgattattttctttttattttattcctttctttctcttcccctttcattccttcttgcatgccctcaaggtgtttcatgagaaattctgcattttccaagagatgcagaagaaygaggtacctgtggttagcaggggacagatgtgcaatacaggggttcaaataagagttacggagttgctgctctgtcttgtgtgctccttcaggaggaagcaggccttaaataaggtccatgcctatgttcagactggagtatgccttgatggcccatgggtgttttttttttttgtatatttgtcttttctatgctgagctactttcacttaaaatggcgttaggagaaaaagatgtggtcactaagctttggggggatgggtgacagtggcagatggctgggatcctaatactcaaaa

SEQ ID NO: 73396 - DNA, 600 bp, Chicken  19866894354471_1
cttctggtcacagctctgacccactgaactgtcctcctctgtgtcacagtgttgccttcctacctgcactctggcttgccgaattactgtgtaagtacttcagggtgaaataattctgtgctgtagggctctgatgtgggttaggacccctgggcactagatgtgctggaagtcattaatttgtccagaaaaagaaatgttaaagcttgcagtaaagattccccagtgtttactgacttgaagttggagaaaaatgttccctgaaatccatgaccttggttgaactctttgaagtttctkacttttcctggctgaagatattgtttcagccagcctctctacttgccctcctctcttcctttctctatacccaccaatgagtcctctgcaggagacttggttttggtttgaggtggcagtttctcatctccaggaagagctgagcttcccacttcttcactgtggtcctccggactggcctatcagtttgctttgctgatagacagtgattcccataatggacatgattgttcaagaatgcaaataaaaaaccatgcagctaaaccctctacagttatgatactgacacagaagcttctc

SEQ ID NO: 73397 - DNA, 600 bp, Chicken  19866894354479_1
tgagggagcaaatataaagtagcaaatcaatattcaagaagccatcctttttattcttttagtgtgatagtaagtgaacagtaaactcaagcaaatggaacgaatagaaggaaatacttgcccatatgtagtctgagagctaatgcctcaaaagattatttcagattatggattagataaaggaactagtagttaatgctcggttgagtatatgatttgcatccaaactacaggattcagtgtttcatatcaaattataacactgagaaaggaaccgtaaaagttttcatgatttaaatygtgattagatatacctcttgctggaagtagctgtttgaagaacagctccagagcaagaagctccatagaatctccgggttttctccactgtggcattctgtctaaatgtctctttccacatatgccttattccattggtcatgcagatccaagtgacctaacacttggatgccagggcttttttactgcacagtcttgctcatggtgggaaaaggacccttggatttatggatccccataggatttcatgcaatgaagaaaaatgtataaaacatgattctcattggttggaatagaggt

SEQ ID NO: 73398 - DNA, 600 bp, Chicken  19866894354482_1
gctcagcaaactacgctgccaccactcctcacatgtcacctgggtgctggagcagtcacacagtgccctttaggatgggttttctccatccacacacatcccactgcttcagcctgcacccccaggtctggtcctctggtggctgtgactgagctcgacctgagcatggcccttgcttcactagtgggtaatgcatacacatactgcattctgcacagtggctgggtgctctcccaccactgggtggcagtgggtgcccacacacactcgtgtcaccatgcccccacacagatatcgagkctccctccctgttgtcctttcatcctgcacagtgccaagacatggggaccggtgccgggcagagacaacgtggtggccttatgtcacatcacctctgcagctgccatcaccctgtgcttcacttccattgaggacatgaggatgccgcaaagctttcacctggaatgcaaccagaaggggtgaagttgaggccaagaacatcacctaaccttaaccagcagccctctgggtcctgtccccactgtgggacatggctgaagcaagcagcactcacgttcagggcagccaagacaggctctc

SEQ ID NO: 73399 - DNA, 600 bp, Chicken  19866894354485_1
ttgctttaaagtatttttgtttgattatttgcttgcttatgcaagagatttacaaaggctcccatgacaatggtaattactactgctaccctggagtatttgcctttcaaatttcttgttataagctagctcaggtttatagtgaatagcttttgctatatggtgatgataatatacttatgtcctttgtttaaattctgcttggtacaaatctatatttacagctggtgttattagttggggaaagatccaacagaattaaaacaatcctctttgtaggtccctgtttattcagcttcktctactgtgtcccttcatctgttatgaagctataaaataaactagatggaggaaatgaactaggtgcaaaataacatttgtttttcttggttatttttacctgtatctgttcccttatggtatttggttttcttatgtatcacagagagttcggccagcataatcacagggttgtacagagacaaaagtgatcagtggtgcaggggataaacccaagttgtgcaaaacagctaccagaacaaacttctgacaaactgtatcctcagtctgaatgttactttcttgggaagatcgtattgg

SEQ ID NO: 73400 - DNA, 600 bp, Chicken  19866894354489_1
aaaccacactgaaagctgactgacaaatgatcttctccctgaactaaaagaccccatcttaacacaggagactctcctggggaagttcagcatttggaggagatacaaagccaagatcatttgtgggcattaagaactccgtggcttgtctgtcctggttttgtaacacgcaaacattaactggaatgatatgataaattataaaccacataattagattttctctgcctgcactctccctgcatttccagctaacactgctcatccctatttctttgtctaagtcatttgggagtgctsctgtgtgctcctggctgcrgctgtgttcctaatcaaaggtacctccattttcatgctggatgacccatttttacccagatctcaaagatgttataagccttaattactttaagaaatatttaagaaatatactttgagttcaaaaagtatacatttttttgtatacacacaggacaaaaagtgcacatttttttatttagtaatcattttataaaaattgtttgctgtaactactggataaaatatcagttctctgcctgggagaaatgcatacatgaatctccctgtcaaattatatag

SEQ ID NO: 73401 - DNA, 600 bp, Chicken  19866894354489_2
ctgacaaatgatcttctccctgaactaaaagaccccatcttaacacaggagactctcctggggaagttcagcatttggaggagatacaaagccaagatcatttgtgggcattaagaactccgtggcttgtctgtcctggttttgtaacacgcaaacattaactggaatgatatgataaattataaaccacataattagattttctctgcctgcactctccctgcatttccagctaacactgctcatccctatttctttgtctaagtcatttgggagtgctsctgtgtgctcctggctgcrgctgtgttcctaatcaaaggtacctccattttcatgctggatgacccatttttacccagatctcaaagatgttataagccttaattactttaagaaatatttaagaaatatactttgagttcaaaaagtatacatttttttgtatacacacaggacaaaaagtgcacatttttttatttagtaatcattttataaaaattgtttgctgtaactactggataaaatatcagttctctgcctgggagaaatgcatacatgaatctccctgtcaaattatatagctgcctacaacacagaatt

SEQ ID NO: 73402 - DNA, 600 bp, Chicken  19866894354495_1
ggggctgctcttctcacctgaggcccagatcccagccccttcctcagcccaagccacacatcaagagggagcaaactacaaacacgctagctgagaatactaattcccagcttgcctttgccatcgtacaggccaacgttcaattttcatcctgtccctactctatctcacagcatttagagagcccatgctgcccttctagacatgggaaaatcacatctttatttcccttagttcaatttattctctcttattcttcttttctacagtatgtgatgtattccttacatgtaggtatawcttccatgatgtgtatgtgctttccttgacaggcataatgctaaagctattaaatctgcattaaaagtcctgctactgcctgtagtaatacactaaattgttcatcacatatagtttatgattatgttttcatccacctaggaagagtgggatttatgtagaaataattgagaaaattaactatctgagaaatcttgggtagaatttaataatatccttaatatacttatgtactttaaagccacacaacacacgggaccgggatgctgggcattttgttgctgacatcagactgagcca

SEQ ID NO: 73403 - DNA, 599 bp, Chicken  19866894354498_1
  misc_feature (1)..(126): n is any nucleotide
nnnnnnnnnnnnnnnnnnnnnnnnnnnnnnnnnnnnnnnnnnnnnnnnnnnnnnnnnnnnnnnnnnnnnnnnnnnnnnnnnnnnnnnnnnnnnnnnnnnnnnnnnnnnnnnnnnnnnnnnnnnnnnctacagagcagtttctcacaaacaaatttcttctacatatagaagctagaggcagtttacttgtgtgctcaagctaacatgagctctttctcatgggctatttgcctgttcaggctgtgatctgctttttttccacaaaggctctaagggacatgctttactcacagggcttgstaggtcaagytgaaacttgaacttgatcttgaaggtcttttccaacctagatgattctgtgattctaagaatctgttgtttacagtggaaacagtattttttgcagcacagctatgccttcctaatcagaaaggcagtagcctgacagaggctaaaaaaaatttgcagtgtactgggacaactgataagatcctcwrtttgtggagtcagaagaagaaaatttgctgtcctgtatagggatattacaggccactttacctgtatttctggtgttttgtcttcaagaaaacatggctgga

SEQ ID NO: 73404 - DNA, 599 bp, Chicken  19866894354498_2
  misc_feature (1)..(116): n is any nucleotide
nnnnnnnnnnnnnnnnnnnnnnnnnnnnnnnnnnnnnnnnnnnnnnnnnnnnnnnnnnnnnnnnnnnnnnnnnnnnnnnnnnnnnnnnnnnnnnnnnnnnnnnnnnnnnnnnnnnnctacagagcagtttctcacaaacaaatttcttctacatatagaagctagaggcagtttacttgtgtgctcaagctaacatgagctctttctcatgggctatttgcctgttcaggctgtgatctgctttttttccacaaaggctctaagggacatgctttactcacagggcttgstaggtcaagytgaaacttgaacttgatcttgaaggtcttttccaacctagatgattctgtgattctaagaatctgttgtttacagtggaaacagtattttttgcagcacagctatgccttcctaatcagaaaggcagtagcctgacagaggctaaaaaaaatttgcagtgtactgggacaactgataagatcctcwrtttgtggagtcagaagaagaaaatttgctgtcctgtatagggatattacaggccactttacctgtatttctggtgttttgtcttcaagaaaacatggctggattccaaaaaa

SEQ ID NO: 73405 - DNA, 600 bp, Chicken  19866894354498_3
aagctaacatgagctctttctcatgggctatttgcctgttcaggctgtgatctgctttttttccacaaaggctctaagggacatgctttactcacagggcttgstaggtcaagytgaaacttgaacttgatcttgaaggtcttttccaacctagatgattctgtgattctaagaatctgttgtttacagtggaaacagtattttttgcagcacagctatgccttcctaatcagaaaggcagtagcctgacagaggctaaaaaaaatttgcagtgtactgggacaactgataagatcctcwrtttgtggagtcagaagaagaaaatttgctgtcctgtatagggatattacaggccactttacctgtatttctggtgttttgtcttcaagaaaacatggctggattccaaaaaacattcacaactgctgaagatcatcacaggtttcctctttgtccctagaaggacaagcatttaccatcttgaataccagacttagatgatcaaatatcaagaaattatagtttccagaaattttcatcatagaagagagaagatatattgaaacgaaatccttactgaaggtctgcgtttttatcacc

SEQ ID NO: 73406 - DNA, 600 bp, Chicken  19866894354498_4
agctaacatgagctctttctcatgggctatttgcctgttcaggctgtgatctgctttttttccacaaaggctctaagggacatgctttactcacagggcttgstaggtcaagytgaaacttgaacttgatcttgaaggtcttttccaacctagatgattctgtgattctaagaatctgttgtttacagtggaaacagtattttttgcagcacagctatgccttcctaatcagaaaggcagtagcctgacagaggctaaaaaaaatttgcagtgtactgggacaactgataagatcctcwrtttgtggagtcagaagaagaaaatttgctgtcctgtatagggatattacaggccactttacctgtatttctggtgttttgtcttcaagaaaacatggctggattccaaaaaacattcacaactgctgaagatcatcacaggtttcctctttgtccctagaaggacaagcatttaccatcttgaataccagacttagatgatcaaatatcaagaaattatagtttccagaaattttcatcatagaagagagaagatatattgaaacgaaatccttactgaaggtctgcgtttttatcacct

SEQ ID NO: 73407 - DNA, 403 bp, Chicken  19866894354498_5
aaatttgctgtcctgtatagggatattacaggccactttacctgtatttctggtgttttgtcttcaagaaaacatggctggattccaaaaaacattcacaactgctgaagatcatcacaggtttcctctttgtccctagaaggacaagcatttaccatcttgaataccagacttagatgatcaaatatcaagaaattatagtttccagaaattttcatcatagaagagagaagatatattgaaacgaaatccttactgaaggtctgcgtttttatcaccttccatcttcaactattattygcaaaatattttaattgtgacttttttaatgaggtctgagcaggctgagatctcttgacttgaaatcaagaactgggagcaactctctaagatttgtaggaaa

SEQ ID NO: 73408 - DNA, 600 bp, Chicken  19866894354508_1
gctttatgtctttttgtataatttctctcctgagaaaatgttctcccactataactgtttggctggtttgactgtagatgacataggcatgtttatgtctcagattagacaggcctcctggggaacagcgcatttccattttactcactgtgtattacacccattttagacctttcatgtttatttttttagcatgtctagcataacgcaatatgcagacaatgtttttttattattgaatgaatggtggaacccccttctggctggactgcatttctaatttatttttttaggcattcygtcagtgaacacctctatttttatagaagtctatctcattttgatgctaaagttcctgagatcttcaagtggaatactccaccgtgttttgcagcattttcacttgatttgtagccctgtaaagacacggaatgtattttgaataatcaattatatttcaatgggagagaacactaagctgttgacaccaktatttaattagaataaagagactatctgctcataaacattttacctcattaataatttgggctcagtactcacttatcatgaaagctatgtgcatccttggctttgaac

SEQ ID NO: 73409 - DNA, 600 bp, Chicken  19866894354508_2
gcatgtctagcataacgcaatatgcagacaatgtttttttattattgaatgaatggtggaacccccttctggctggactgcatttctaatttatttttttaggcattcygtcagtgaacacctctatttttatagaagtctatctcattttgatgctaaagttcctgagatcttcaagtggaatactccaccgtgttttgcagcattttcacttgatttgtagccctgtaaagacacggaatgtattttgaataatcaattatatttcaatgggagagaacactaagctgttgacaccaktatttaattagaataaagagactatctgctcataaacattttacctcattaataatttgggctcagtactcacttatcatgaaagctatgtgcatccttggctttgaacatgtgacccagacaaattcttaacagatgatacattctgcccttcagaggcatcctgcacatcttgaattgtacataaattatttacgtgttggcaacaaaggttgagataccataggaaaagagtataagtttcccaaacaagagagtgaaatttctgtaaatacactgtcttttctgttagtaatacag

SEQ ID NO: 73410 - DNA, 599 bp, Chicken  19866894354514_1
  misc_feature (1)..(76): n is any nucleotide
nnnnnnnnnnnnnnnnnnnnnnnnnnnnnnnnnnnnnnnnnnnnnnnnnnnnnnnnnnnnnnnnnnnnnnnnnnnntatgtataccagttttattatagcaaactagaaataaaaagagactgcattcttagaatttgtcccatggaacttactctaaaactcaactcacactaagcaaactacatttgcagacaccctcccagcctctattaagttagaatctgcttgttaaaaaagtctgattacttgtttgcagtttctgctttgactttgtcatcatgccctcattatcatattcwattaattagtgtttaaaggtaatattccagcatgcacacctccctaagaaacattattgacttcaactaaataaataaaactgcaacaaaagaaagggaattaaaaagatctaggagcttgtaagcatacagaattgcatatatatcttatgaaaagcataccatagtaaaatcatactagtttcctgtaatgatacttgaaagacaaaagcaaaagcacagaataatgttaagtacaggtaaaactggggaaaaatatataccttctgaaaagtgcattcatttctttctcacctcaa

SEQ ID NO: 73411 - DNA, 600 bp, Chicken  19866894354528_1
ggaggggcggaagcagcgctccgcaggagcggcggtgacagccgcgcttccgccggactgagccgctcgctcccttcctgccttgggccggattagaccttgcgggcacgaaagccgctgttttgctgcgtgtgcttaggttggaggcatctggcagcgaatcccagcgtttggggcttgctcaggacgccgcgggctgaagagagcctgtttgtgattttattccgtgggcagatgttgaagggaaaatgtcaaatggtgaaatgactgtgctttcacagtaagaattacagtattcayttgatacgcagttatttggagtgaccacactaattcctgcatatgctttctcccttcagctgccatggagaatagtacaagcagtgctaaggatgctcggagcaccktggatgaagaggacagaggaaatacaactgagcagaaaactcgggaagaartcctctttcatgaggaaacaattgatctgggtggtgatgagtttgagtctgaagggaatgaaacggtatcagaagattcaaataactttatagataagcttaatgaacaaatgatggagagtgtcattatttcagactctcc

SEQ ID NO: 73412 - DNA, 600 bp, Chicken  19866894354528_2
acgaaagccgctgttttgctgcgtgtgcttaggttggaggcatctggcagcgaatcccagcgtttggggcttgctcaggacgccgcgggctgaagagagcctgtttgtgattttattccgtgggcagatgttgaagggaaaatgtcaaatggtgaaatgactgtgctttcacagtaagaattacagtattcayttgatacgcagttatttggagtgaccacactaattcctgcatatgctttctcccttcagctgccatggagaatagtacaagcagtgctaaggatgctcggagcaccktggatgaagaggacagaggaaatacaactgagcagaaaactcgggaagaartcctctttcatgaggaaacaattgatctgggtggtgatgagtttgagtctgaagggaatgaaacggtatcagaagattcaaataactttatagataagcttaatgaacaaatgatggagagtgtcattatttcagactctccaaacaacagtgaagatgacaccggtgaactcggttgcctgcaagagatggtagagcaaatggaagctaaggataaccaaaacagtcgagcagaagtgagtaaagaag

SEQ ID NO: 73413 - DNA, 600 bp, Chicken  19866894354528_3
gaatcccagcgtttggggcttgctcaggacgccgcgggctgaagagagcctgtttgtgattttattccgtgggcagatgttgaagggaaaatgtcaaatggtgaaatgactgtgctttcacagtaagaattacagtattcayttgatacgcagttatttggagtgaccacactaattcctgcatatgctttctcccttcagctgccatggagaatagtacaagcagtgctaaggatgctcggagcaccktggatgaagaggacagaggaaatacaactgagcagaaaactcgggaagaartcctctttcatgaggaaacaattgatctgggtggtgatgagtttgagtctgaagggaatgaaacggtatcagaagattcaaataactttatagataagcttaatgaacaaatgatggagagtgtcattatttcagactctccaaacaacagtgaagatgacaccggtgaactcggttgcctgcaagagatggtagagcaaatggaagctaaggataaccaaaacagtcgagcagaagtgagtaaagaagagcttttaagtaatgagagtgaaactgaacatgaagaaacacccaaagaca

SEQ ID NO: 73414 - DNA, 600 bp, Chicken  19866894354530_1
cctaaggagctcttatctgaaatacagtttttccacattctagaggtatatgagagtgtggagaacaaaatgcactcttttttgagaacacggagcacagactgtggcttacagaatgcaattggacagcgagccaaagattttgtgatactcttaggacatccgtaaggggcctcattttgtatgatttttatgggtaaaaaggaaatttccttaaaagttttctgttaaactgagaattcagtcaaaaatcattacttttaaagatgagattcttttaaagaaaaaagcgagaaaccrtaaaattcagcaactgtagaaaaagcactccttaaaaagaagggcattcaccacaacaatgatgycatctacttagaagagaaacattttgtccaggctgcaattctcaacgaaatgctgactcatgctgaaacaaagtgggaagaattttctactctgattcagttttacatgtcatctagatccacaggctgcattatatgctcagtactgaatggatagcaatagctctacattaagtacagaagaccatgacaaaacatttctcagagacctgcttatctgaaacagataacacaa

SEQ ID NO: 73415 - DNA, 600 bp, Chicken  19866894354530_2
caaaatgcactcttttttgagaacacggagcacagactgtggcttacagaatgcaattggacagcgagccaaagattttgtgatactcttaggacatccgtaaggggcctcattttgtatgatttttatgggtaaaaaggaaatttccttaaaagttttctgttaaactgagaattcagtcaaaaatcattacttttaaagatgagattcttttaaagaaaaaagcgagaaaccrtaaaattcagcaactgtagaaaaagcactccttaaaaagaagggcattcaccacaacaatgatgycatctacttagaagagaaacattttgtccaggctgcaattctcaacgaaatgctgactcatgctgaaacaaagtgggaagaattttctactctgattcagttttacatgtcatctagatccacaggctgcattatatgctcagtactgaatggatagcaatagctctacattaagtacagaagaccatgacaaaacatttctcagagacctgcttatctgaaacagataacacaagaattgttctatttttctgcactgcaaaatgtaatktatttaatattgctcatcttatctcaagg

SEQ ID NO: 73416 - DNA, 600 bp, Chicken  19866894354530_3
aagaagggcattcaccacaacaatgatgycatctacttagaagagaaacattttgtccaggctgcaattctcaacgaaatgctgactcatgctgaaacaaagtgggaagaattttctactctgattcagttttacatgtcatctagatccacaggctgcattatatgctcagtactgaatggatagcaatagctctacattaagtacagaagaccatgacaaaacatttctcagagacctgcttatctgaaacagataacacaagaattgttctatttttctgcactgcaaaatgtaatktatttaatattgctcatcttatctcaaggaccataaatctactgtttcatatgccaatacttatattgcaaacccctccttgattgctctttttcatgcatggcctcctacaaaagacaatcctcatccttccaaaacaggtctaatataaaaagaattaccgtttacacctgatatctgctagccccttccaactgtttgttcaagtatgatcaggtgtggtaagtgatagtaattcattgtttctcttcatcctggcctttcaagttattcatttatcatttctactttcacactgtt

SEQ ID NO: 73417 - DNA, 600 bp, Chicken  19866894354530_4
ctagccccttccaactgtttgttcaagtatgatcaggtgtggtaagtgatagtaattcattgtttctcttcatcctggcctttcaagttattcatttatcatttctactttcacactgtttcctgtataagtctcaaagagggcagcttccttaagataagaactgatgctcagaatctgatgtgagagctaatgagtggaatatatagcataatgctgagaaggcttgatgacattcattaacaaaattatctccagaaagtgtcattttggcctaactgaagtgattgattactggasagcagagattagcaagtgtcccccaagtatttgtgtacagtgtctttacttacatcctctcaaagttttccagacagatccaattactatatagtttctagasggacttgacaaactcttaatcaagggatcctctattacttgctacaagtatatcactgttaatgccaaggagaaagactacttttctcagttgatactccttttatcctgtagatttaaacatcttagaaactttttttcacaatagaataaaagcataaagcaataggcctgtagaaatatactgcctgaaaatgc

SEQ ID NO: 73418 - DNA, 600 bp, Chicken  19866894354530_5
tctactttcacactgtttcctgtataagtctcaaagagggcagcttccttaagataagaactgatgctcagaatctgatgtgagagctaatgagtggaatatatagcataatgctgagaaggcttgatgacattcattaacaaaattatctccagaaagtgtcattttggcctaactgaagtgattgattactggasagcagagattagcaagtgtcccccaagtatttgtgtacagtgtctttacttacatcctctcaaagttttccagacagatccaattactatatagtttctagasggacttgacaaactcttaatcaagggatcctctattacttgctacaagtatatcactgttaatgccaaggagaaagactacttttctcagttgatactccttttatcctgtagatttaaacatcttagaaactttttttcacaatagaataaaagcataaagcaataggcctgtagaaatatactgcctgaaaatgccatgttaatgaaataccttgactctgaatttttgatcaacagatataggctacttgagttctttcttgaaaacttactggataaaggtaatcctggaactctc

SEQ ID NO: 73419 - DNA, 599 bp, Chicken  19866894354535_1
  misc_feature (1)..(122): n is any nucleotide
nnnnnnnnnnnnnnnnnnnnnnnnnnnnnnnnnnnnnnnnnnnnnnnnnnnnnnnnnnnnnnnnnnnnnnnnnnnnnnnnnnnnnnnnnnnnnnnnnnnnnnnnnnnnnnnnnnnnnnnnnntctatattctgccccttagtgtctttcatcatgagctttcccagaaaagctgtggtccatgtgagttggattttggtttgattgtcctaaccaccctctggcttccaatctatgagaggaaaatgctgaccgcaaaggcaaactgtgatttttacagctaaatcgggaaagaactgartaaactgagagatggttcttcagctgcaaaaggtgactggctccagggcacagaaacccacagggaatrcagattgggcagttcctgtctkcccaaggaaggtccttgtggtgaggctgrcgttaaaaattctgactcaaatgcaggaaacacagagttaaggaggtgaattattgattgagtgcaactattaccatatctgacagatggagactgtctgagaacattttgcagagtggcatctgcactgtgcctgattggcgtccctgatctttcacacatcagatgcagagtatcaa

SEQ ID NO: 73420 - DNA, 599 bp, Chicken  19866894354535_2
  misc_feature (1)..(53): n is any nucleotide
nnnnnnnnnnnnnnnnnnnnnnnnnnnnnnnnnnnnnnnnnnnnnnnnnnnnntctatattctgccccttagtgtctttcatcatgagctttcccagaaaagctgtggtccatgtgagttggattttggtttgattgtcctaaccaccctctggcttccaatctatgagaggaaaatgctgaccgcaaaggcaaactgtgatttttacagctaaatcgggaaagaactgartaaactgagagatggttcttcagctgcaaaaggtgactggctccagggcacagaaacccacagggaatrcagattgggcagttcctgtctkcccaaggaaggtccttgtggtgaggctgrcgttaaaaattctgactcaaatgcaggaaacacagagttaaggaggtgaattattgattgagtgcaactattaccatatctgacagatggagactgtctgagaacattttgcagagtggcatctgcactgtgcctgattggcgtccctgatctttcacacatcagatgcagagtatcaacacacaaactctgatgcagcgattaaatctgtcctgtaatgaacctgggcttgatagccaacagaaatc

SEQ ID NO: 73421 - DNA, 599 bp, Chicken  19866894354535_3
  misc_feature (1)..(31): n is any nucleotide
nnnnnnnnnnnnnnnnnnnnnnnnnnnnnnntctatattctgccccttagtgtctttcatcatgagctttcccagaaaagctgtggtccatgtgagttggattttggtttgattgtcctaaccaccctctggcttccaatctatgagaggaaaatgctgaccgcaaaggcaaactgtgatttttacagctaaatcgggaaagaactgartaaactgagagatggttcttcagctgcaaaaggtgactggctccagggcacagaaacccacagggaatrcagattgggcagttcctgtctkcccaaggaaggtccttgtggtgaggctgrcgttaaaaattctgactcaaatgcaggaaacacagagttaaggaggtgaattattgattgagtgcaactattaccatatctgacagatggagactgtctgagaacattttgcagagtggcatctgcactgtgcctgattggcgtccctgatctttcacacatcagatgcagagtatcaacacacaaactctgatgcagcgattaaatctgtcctgtaatgaacctgggcttgatagccaacagaaatccatgcactcacttgaagactga

SEQ ID NO: 73422 - DNA, 599 bp, Chicken  19866894354535_4
  misc_feature (1)..(2): n is any nucleotide
nntctatattctgccccttagtgtctttcatcatgagctttcccagaaaagctgtggtccatgtgagttggattttggtttgattgtcctaaccaccctctggcttccaatctatgagaggaaaatgctgaccgcaaaggcaaactgtgatttttacagctaaatcgggaaagaactgartaaactgagagatggttcttcagctgcaaaaggtgactggctccagggcacagaaacccacagggaatrcagattgggcagttcctgtctkcccaaggaaggtccttgtggtgaggctgrcgttaaaaattctgactcaaatgcaggaaacacagagttaaggaggtgaattattgattgagtgcaactattaccatatctgacagatggagactgtctgagaacattttgcagagtggcatctgcactgtgcctgattggcgtccctgatctttcacacatcagatgcagagtatcaacacacaaactctgatgcagcgattaaatctgtcctgtaatgaacctgggcttgatagccaacagaaatccatgcactcacttgaagactgaaagtcttaattcttgtattttaggaagat

SEQ ID NO: 73423 - DNA, 600 bp, Chicken  19866894354535_5
gtgaattattgattgagtgcaactattaccatatctgacagatggagactgtctgagaacattttgcagagtggcatctgcactgtgcctgattggcgtccctgatctttcacacatcagatgcagagtatcaacacacaaactctgatgcagcgattaaatctgtcctgtaatgaacctgggcttgatagccaacagaaatccatgcactcacttgaagactgaaagtcttaattcttgtattttaggaagatattaaaataattacatccagaccactgtgtttgaatctacacttaygatgccagcatacacgagtatgtatcactttcaggaaatgatctgcagtgtgtcatctcttacttggattttactgaaggctataaatcttgccttgtattttacaatttgtattccagatttgagatcaaatagtgcatacaggatataaaattcagatggcatggcatgtcatggactcttaaaatcattaaggttgaaaaagacctcaaaggccacttaatccaagcgttcaccacccaccaatattgcccactaagtgtcatataagtgcattgacatctaaagctgaagttagtc

SEQ ID NO: 73424 - DNA, 600 bp, Chicken  19866894354560_1
gtagaggaacacagtcacctcccttgccctgctggccatttttttcttgatgtagcccagaatatggttggctttcttggctgtgtgggcacattgctggctcatgtccagctgccatccatcagtaacctcaaatctttaccagcagggctgcgttctatcctttcctcccacagcttgtattgatagtgggggttgccttgatccaggtgcaagaccttccacttggcttgttaaacatcatgtggttctcctgggccaactgctcaagcctgtctaggtcctcctggatggcatccygtcccttgggcatgttgaccacaccgcacagcttggtgtcatccaccaacttgccaaggatacacttgatcccattatcaatgtcatcgatgaagatactgaagagtgtctgttccaacactgacccccgaggaasatcatttgtcacagacctctatctagacattgagccatcaaccatcacagtctgggtttgatcctgcagccagttctttgtccatttaacagtcctcctgtcaaatctatatctttccaatttggagagaaggatattgtggggtaccttattaaaggccttac

SEQ ID NO: 73425 - DNA, 600 bp, Chicken  19866894354560_2
ctttaccagcagggctgcgttctatcctttcctcccacagcttgtattgatagtgggggttgccttgatccaggtgcaagaccttccacttggcttgttaaacatcatgtggttctcctgggccaactgctcaagcctgtctaggtcctcctggatggcatccygtcccttgggcatgttgaccacaccgcacagcttggtgtcatccaccaacttgccaaggatacacttgatcccattatcaatgtcatcgatgaagatactgaagagtgtctgttccaacactgacccccgaggaasatcatttgtcacagacctctatctagacattgagccatcaaccatcacagtctgggtttgatcctgcagccagttctttgtccatttaacagtcctcctgtcaaatctatatctttccaatttggagagaaggatattgtggggtaccttattaaaggccttacagaagtccatgtagatgacatgagttgctcttcatctttgtgggttgtagttgtatgcatctctacagtggagggaaaaaagaaacccaaaaatctgtggcaacgggatttacaaaaggaaattgcagactgagtc

SEQ ID NO: 73426 - DNA, 578 bp, Chicken  19866894354562_1
tgaggtctgggcaggggtggatcctggctccagcccttctggtcactcagagcattgcttacacctgagctcccctggcttggccctgccttccaccgggtgctcaatcaccacttcaagccctgacttagtatttcagctacaccctgcctgcctggagacaatgcaggtgcagagcctggcatcagagggctgcacctgggagatcccagcccagccagcagagcacaaggaggaggtaagttggcacgcatcccttccatgccaagggctataaacttctggctccagctgggcctygtgtccatgaggctgtggcttgctcagacacagatgcagcttcagccgccctgcagtgctcgctgtgctcctgcaggtgatgctccctgctgtgctcacacctccctcagctccatcacgtactgtgctggctccatgtggaaccaataacacgggcttcccagccattcctgcacacggcatagagcagagctggccgagcatcccatgccaggcgcacggtcagccgagccaggtggccagacacagccctattaggcagcactgtttgctgcaaa

SEQ ID NO: 73427 - DNA, 600 bp, Chicken  19866894354577_1
ttgaaaatttcaatgctgttaatactattcacttcttgtccactctaatcttatttattgtgtctctgacatcttccattatccttcccctgactccttgttttagataaaacatttctactgctttaacattgaaaatgatattatttcagtgctatcagtggcaacttcctgtgcctttatatatacaaattaaagagtggattatcattaattatgtactacaatttttcctggcaacaatctgcaagtgacaaaacatttgcttttgtcatagttctattaagtgaacccaaatgragctgctgaaatttatgacactttaccatgtttttaatttgcaacacagggtcaggatcatgacagtgattttattttattttgcactttattttcaatgattcttataaggatgttaattacattatttaaactaaattgtttttatcattctaacaacccatatttattgcatattaaggagaaatttactgttagcattacttaattttctaacagttctgtttaataatggaaaaagcctctatgctaggaaagacaaccactctaaccagaattacaatgaggaattttttctta

SEQ ID NO: 73428 - DNA, 599 bp, Chicken  19866894354582_1
  misc_feature (1)..(73): n is any nucleotide
nnnnnnnnnnnnnnnnnnnnnnnnnnnnnnnnnnnnnnnnnnnnnnnnnnnnnnnnnnnnnnnnnnnnnnnnntttgtccattgaaaattgctcatggggaaaaataatgttaactttatccagtagtcatagaatattatgaaaaagtttcagatcttgatcttacttcttcttccataaaatgcaatatatttaaaataaaagactaatgactgctgtttatatttacagaatgtcatacttaacatgtgtatacgaataaagaagagaatgaatatttcacacacctaaattgagckgtttcctttacttaataaagtattactaggaaaagtaatgattactttcatactttctcctaaatgagagttcctgtttgtttctcattttctctgcatycttttgaactaccaaaaatactgagggttaaaaaattaaatctgatatacaacatcgtatgaagacacacagaagtggaatagaatagagcagttcaattggaagggccctacagagaacatttcagggatacccacaagttaaagcatactattaaaggcattgtccaaatgacttttgaacgctgacaggcatgggg

SEQ ID NO: 73429 - DNA, 600 bp, Chicken  19866894354582_2
aaaaataatgttaactttatccagtagtcatagaatattatgaaaaagtttcagatcttgatcttacttcttcttccataaaatgcaatatatttaaaataaaagactaatgactgctgtttatatttacagaatgtcatacttaacatgtgtatacgaataaagaagagaatgaatatttcacacacctaaattgagckgtttcctttacttaataaagtattactaggaaaagtaatgattactttcatactttctcctaaatgagagttcctgtttgtttctcattttctctgcatycttttgaactaccaaaaatactgagggttaaaaaattaaatctgatatacaacatcgtatgaagacacacagaagtggaatagaatagagcagttcaattggaagggccctacagagaacatttcagggatacccacaagttaaagcatactattaaaggcattgtccaaatgacttttgaacgctgacaggcatggggcatcaaacacctttctaggaaacctgtatcagtgtttgaccgctgtcagagtaaataatttttttctaatgtccactctgaacttcccctggcgtggcttt

SEQ ID NO: 73430 - DNA, 568 bp, Chicken  19866894354582_3
tatacaacatcgtatgaagacacacagaagtggaatagaatagagcagttcaattggaagggccctacagagaacatttcagggatacccacaagttaaagcatactattaaaggcattgtccaaatgacttttgaacgctgacaggcatggggcatcaaacacctttctaggaaacctgtatcagtgtttgaccgctgtcagagtaaataatttttttctaatgtccactctgaacttcccctggcgtggctttgtgccattttcttgtgttctatcattggttaccagggagaagggrttaaatagatgggattaaacagaactatgaaagcttgcttaacccggaattttctaaaaagtgggctaaaagaaacttcagcagaagattaatgatggaagtaaactgcagaagtaggacttagtacaggataaaatgtcattgatctgttattctctgcttcttttgctgttactaacaccagctacatttaaataatgtttgtcaactttaagcataagtctggttctgaacacaagcccttttgtacatgatcacatatttccat

SEQ ID NO: 73431 - DNA, 600 bp, Chicken  19866894354585_1
atgcaaattaatatatactaaaattatgcatctaaatatgtctaagtatatcttgaatatatatctatatacatttaaaaacatatttaatttccaagacttgcacttgtaagcacaagaggtgttgtaaagtggagtatacaaattctgatgagcatggtatttgtattatatactttacttctatactccatatacaaattactaagcataattttattattgaaattagttcatttaatgcctcagctctgcccaggggtaatgctggagctggctccgatgtgacatgcggcagcrytggcactgctcacagagaccacccctgcagcccctcactatgaaaacattgccrtataaaccccatacagccatcattaatgaatggcgtgtctcctacataagcatatggaagttgttctgatcactccaacaacacacctgaacaccagcaccatgatccagaacctcgctcaaggccatcatcaggtcttttgtaaaaacaaaaatctccatctctaggatgtaaagccagaaatcagtaaaaatccagcatttgtcatctcatgaggaattctccattttgttcctttcctagta

SEQ ID NO: 73432 - DNA, 600 bp, Chicken  19866894354585_2
tgcaaattaatatatactaaaattatgcatctaaatatgtctaagtatatcttgaatatatatctatatacatttaaaaacatatttaatttccaagacttgcacttgtaagcacaagaggtgttgtaaagtggagtatacaaattctgatgagcatggtatttgtattatatactttacttctatactccatatacaaattactaagcataattttattattgaaattagttcatttaatgcctcagctctgcccaggggtaatgctggagctggctccgatgtgacatgcggcagcrytggcactgctcacagagaccacccctgcagcccctcactatgaaaacattgccrtataaaccccatacagccatcattaatgaatggcgtgtctcctacataagcatatggaagttgttctgatcactccaacaacacacctgaacaccagcaccatgatccagaacctcgctcaaggccatcatcaggtcttttgtaaaaacaaaaatctccatctctaggatgtaaagccagaaatcagtaaaaatccagcatttgtcatctcatgaggaattctccattttgttcctttcctagtag

SEQ ID NO: 73433 - DNA, 547 bp, Chicken  19866894354585_3
aatatatatctatatacatttaaaaacatatttaatttccaagacttgcacttgtaagcacaagaggtgttgtaaagtggagtatacaaattctgatgagcatggtatttgtattatatactttacttctatactccatatacaaattactaagcataattttattattgaaattagttcatttaatgcctcagctctgcccaggggtaatgctggagctggctccgatgtgacatgcggcagcrytggcactgctcacagagaccacccctgcagcccctcactatgaaaacattgccrtataaaccccatacagccatcattaatgaatggcgtgtctcctacataagcatatggaagttgttctgatcactccaacaacacacctgaacaccagcaccatgatccagaacctcgctcaaggccatcatcaggtcttttgtaaaaacaaaaatctccatctctaggatgtaaagccagaaatcagtaaaaatccagcatttgtcatctcatgaggaattctccattttgttcctttcctagtagt

SEQ ID NO: 73434 - DNA, 600 bp, Chicken  19866894354586_1
gggctgccgtcccttaacttgttccacacgggcaggcagttgttagaaatatatctgctgagatactttggttgaggctttcaaagctgtcatttattttctcatgaaagatggtgaccagattccccatcaccgtttattggatttgtaggtcaggaggaaggaaacaaaacctgtgttgtggtacgttgctgccttgtgtagagcatcagaaagagaagtcctttatgtgctggttctttggggactgtcttccacttttggccagtgtcacttcactgacctagctagataatgggraggaaatagtgcagggctcctcgacaccaggtcagcttcagggatttgcccaggagaaaagatctcaaagggctgtttggggttggaacagaaggggcacacacatcagcgtctcactgaggagcggggcagttgtgacagggccaacgcattcagggtgtcagtgcctgcttgggtagctcctatttgaggctgcagagcagtcgtctaggtctaaaaggtataataaaaatggctttgttgataaatgttattaataaaagacttttttctggttgaaaggggaaagagtttattctt

SEQ ID NO: 73435 - DNA, 600 bp, Chicken  19866894354586_2
acagaaggggcacacacatcagcgtctcactgaggagcggggcagttgtgacagggccaacgcattcagggtgtcagtgcctgcttgggtagctcctatttgaggctgcagagcagtcgtctaggtctaaaaggtataataaaaatggctttgttgataaatgttattaataaaagacttttttctggttgaaaggggaaagagtttattctttcagagcatgatgaaagacaacgaagagatgtaggaacacagtggtcctctttgtgaaatgaaaaactaggtgtcactttgagaacrgaaatgcccgtggactgactgtgttctcagggcagagttgtagkgctggccgaagcatggggcacatgctggcrgctgaggaacaccatctttttctaccactgaggcagaccatgccaaaggaggcactcttcgtctcagcctgtaacgtactgtagacatcacctgtctgcctacccatgaagtcttggctttccagacaggtctatgcagaaccatcccagctccggccgcggggcaggtgctgctgagtgcagtgctcaaggatgggcaaagcccacagcagtcaattgcatgaag

SEQ ID NO: 73436 - DNA, 600 bp, Chicken  19866894354586_3
gttgtgacagggccaacgcattcagggtgtcagtgcctgcttgggtagctcctatttgaggctgcagagcagtcgtctaggtctaaaaggtataataaaaatggctttgttgataaatgttattaataaaagacttttttctggttgaaaggggaaagagtttattctttcagagcatgatgaaagacaacgaagagatgtaggaacacagtggtcctctttgtgaaatgaaaaactaggtgtcactttgagaacrgaaatgcccgtggactgactgtgttctcagggcagagttgtagkgctggccgaagcatggggcacatgctggcrgctgaggaacaccatctttttctaccactgaggcagaccatgccaaaggaggcactcttcgtctcagcctgtaacgtactgtagacatcacctgtctgcctacccatgaagtcttggctttccagacaggtctatgcagaaccatcccagctccggccgcggggcaggtgctgctgagtgcagtgctcaaggatgggcaaagcccacagcagtcaattgcatgaaggtgcttttcctaaactgctcctgcagtttgcatttctggaagtc

SEQ ID NO: 73437 - DNA, 600 bp, Chicken  19866894354586_4
cagtgcctgcttgggtagctcctatttgaggctgcagagcagtcgtctaggtctaaaaggtataataaaaatggctttgttgataaatgttattaataaaagacttttttctggttgaaaggggaaagagtttattctttcagagcatgatgaaagacaacgaagagatgtaggaacacagtggtcctctttgtgaaatgaaaaactaggtgtcactttgagaacrgaaatgcccgtggactgactgtgttctcagggcagagttgtagkgctggccgaagcatggggcacatgctggcrgctgaggaacaccatctttttctaccactgaggcagaccatgccaaaggaggcactcttcgtctcagcctgtaacgtactgtagacatcacctgtctgcctacccatgaagtcttggctttccagacaggtctatgcagaaccatcccagctccggccgcggggcaggtgctgctgagtgcagtgctcaaggatgggcaaagcccacagcagtcaattgcatgaaggtgcttttcctaaactgctcctgcagtttgcatttctggaagtcaaatatgcttttttcccttcacaaaagaca

SEQ ID NO: 73438 - DNA, 600 bp, Chicken  19866894354587_1
tgcactgacttcagtaagatctggttagagcagaatttactaggctgagctggtaatttatcagtgggtaaacggtaaccacaatctccccatcaatcaatgtttcttttatgcctttctgctttctatattagaatttcctctccatgaaaagcagattaccttttttgcttttcctttctaacacgcttttaagttttttgctcttcacatccagaacaattgagaagggccccagaagagccaggtacaaagtaaagatgactgagagaggctgagagaaatccacgggatggtcaytggtcaggagatggggagcagacagtcctagattcaccacatcacaaaagagaagaggaatgctatcaggcggcaggcctcaaaacaaacagaagatgattttccacataacagctaaatcatggaattcagaggacaggaacgtttgcctagattgacttcaactgcagtttaaagagcaattagatgaaatcacacagtaatagaacagatcacacttcaggatcacaaacatgctgaggtatgtagccttgaaagcagctttccttgctcttacattatcacagtggaatttgctat

SEQ ID NO: 73439 - DNA, 600 bp, Chicken  19866894354590_1
ataagccttctcagactcagagttgacttcccaggcagtgctgttagctgctctctctctttagtcaaggtggcaaggctgaaatttcacagttcactgtatgctgctgcttctgagtaccagttgtattaaagctcatagaattacaattttgcatctgtttctctagacaactgcatctgtttctctagcattctagactacctgattagtgtgaatgccgaagatagattaacttcacaaagaagtaatgaaatgaaatgtaatatatttggaataactaactcttaaatttgagamaaatctggcaaagggtttttaagaggtaaaaacactatacagccactgtaaataccatcacgagcactgaagcgactggtgccagttctgatgctcagttacccacaccatgagttataaattatagagaaaagggaaatcagctttctctgaaaaccagagacaaaagtagaaaataaaaggaagaaatgcatttgcaaacacctcaagcaatccagcagctgaggagctcttccttcctcattgcagggacaggagtgtcttcattaagtcatctcacatcaggaatactaaatttaa

SEQ ID NO: 73440 - DNA, 477 bp, Chicken  19866894354591_1
  misc_feature (1)..(29): n is any nucleotide
nnnnnnnnnnnnnnnnnnnnnnnnnnnnngcggttgggaacggggagccctgagcgggcagagccagaaccgggcgggcagcgcggcagggcgctgcgtgtccccggcacagcagccccgggtgccgctttgggagtgcggaggagagggtcggggaccctggaagagccattcacacggaacacggcggggcgggctcccgctttgctgcccgatgtaggggcagctctaaggagccgggctcacccggtgctttggacgcttcgcttttctctgtgcctgctcgctccggttcggtaytggggagctcgtttgragctcctcctggaccaccagcagcagcagcagcagcagaagtttccgtgccgaagtcgctcgttggcgctgtgcgctgttctggggcagcgccgtgcccggtccggggtagcgtggccgaaccgcggagcccacgggagtgccgcgcgtgtcctccccgcg

SEQ ID NO: 73441 - DNA, 461 bp, Chicken  19866894354591_2
  misc_feature (1)..(13): n is any nucleotide
nnnnnnnnnnnnngcggttgggaacggggagccctgagcgggcagagccagaaccgggcgggcagcgcggcagggcgctgcgtgtccccggcacagcagccccgggtgccgctttgggagtgcggaggagagggtcggggaccctggaagagccattcacacggaacacggcggggcgggctcccgctttgctgcccgatgtaggggcagctctaaggagccgggctcacccggtgctttggacgcttcgcttttctctgtgcctgctcgctccggttcggtaytggggagctcgtttgragctcctcctggaccaccagcagcagcagcagcagcagaagtttccgtgccgaagtcgctcgttggcgctgtgcgctgttctggggcagcgccgtgcccggtccggggtagcgtggccgaaccgcggagcccacgggagtgccgcgcgtgtcctccccgcg

SEQ ID NO: 73442 - DNA, 600 bp, Chicken  19866894354595_1
gtttagagatgcctgcaaactcaagcctttcttccagccttagcaatgctgaaaatgaagacttggcttccttaaactatagcaatggcagatctcccacttgaagcccctgaccagattgtccccttgggtacccacacattagcctttaaattaggttcaggggcacacttcagaagcagttctcctcatcactcaagttccctgtgctcccctgcattatcatcaaaacatctcccagtgaggagctatcttttgttagaatgaaaccaataaaaacaagctaggatacggaagacrtactacaggaccacacctattgcatcaagctgcaaccaagcatgtaggccctgggataagatcatatctagtttgaaacaacaaaattttaacatggacatcaggttctcaacacctagtgatctgccctacagacacactcttttgttcacacaatttgctaatgtatgctaggatggaacctctgtctccattctcccacctacattcaaaaggataataataattagctgcttcctccctcacagaggtgacagtgagactgatcagatagtgggtgtacagtactttgaaaatagg

SEQ ID NO: 73443 - DNA, 597 bp, Chicken  19866894354595_2
gatcatatctagtttgaaacaacaaaattttaacatggacatcaggttctcaacacctagtgatctgccctacagacacactcttttgttcacacaatttgctaatgtatgctaggatggaacctctgtctccattctcccacctacattcaaaaggataataataattagctgcttcctccctcacagaggtgacagtgagactgatcagatagtgggtgtacagtactttgaaaataggaagtgctatgtaactcttccctcttattacaaatgctcttgtatctagtagagtagtayagaaataagaackaatttggaaaagtctccatttctatgcagttaaacattgctccacttgatcaagcaactgattgcagcaggtttacttcatacaaattgacagtcatccgacatgctcactctgagtatatttattgattttatttaggatgctgttcttctagatagaaaaagctttcctagatctgaaaaagccacttagtattcatcagccaggatccagaaagaccatgaaattattaactgaatcattctcaatgtaattgctacacacagcacaagcagaagtaccag

SEQ ID NO: 73444 - DNA, 584 bp, Chicken  19866894354595_3
ttgaaacaacaaaattttaacatggacatcaggttctcaacacctagtgatctgccctacagacacactcttttgttcacacaatttgctaatgtatgctaggatggaacctctgtctccattctcccacctacattcaaaaggataataataattagctgcttcctccctcacagaggtgacagtgagactgatcagatagtgggtgtacagtactttgaaaataggaagtgctatgtaactcttccctcttattacaaatgctcttgtatctagtagagtagtayagaaataagaackaatttggaaaagtctccatttctatgcagttaaacattgctccacttgatcaagcaactgattgcagcaggtttacttcatacaaattgacagtcatccgacatgctcactctgagtatatttattgattttatttaggatgctgttcttctagatagaaaaagctttcctagatctgaaaaagccacttagtattcatcagccaggatccagaaagaccatgaaattattaactgaatcattctcaatgtaattgctacacacagcacaagcagaagtaccag

SEQ ID NO: 73445 - DNA, 600 bp, Chicken  19866894354601_1
agctcatccactttgtctccgaagcactctgtaagcagtgattgagccattctgccctctggcaagagaggttaatattattcactccagcgtgcagagaaagatgcagaaccatgcagaggttatgggccagataaccaaaactgtcttttagttctgggcactttcattttaaagcatccaacctccgcgataccatcagtctggttttcaaaggccttcagcacctcctgctttcatcgccctcaaacacagaggaacacagcactgaaggcagcaatagacatcctcggccagagmgagctgcctggtgcgcagcgggcagggggagcccattgatgtggctctgggcagcctggtctggtggttggagaccctacccatggcaggtgggttgaaactagatgatttttatggtccttttcaacccaggccattctatgattgatatcttcgggctcatggtcccacatccccatggttcttgaacagctccagggacagtgactacagcaccttcctgggcagcccatgccaaygcctatctgatctttgggagaagagtgctggtcgatctgagaagctgytaacgcctcagga

SEQ ID NO: 73446 - DNA, 600 bp, Chicken  19866894354601_2
tcgccctcaaacacagaggaacacagcactgaaggcagcaatagacatcctcggccagagmgagctgcctggtgcgcagcgggcagggggagcccattgatgtggctctgggcagcctggtctggtggttggagaccctacccatggcaggtgggttgaaactagatgatttttatggtccttttcaacccaggccattctatgattgatatcttcgggctcatggtcccacatccccatggttcttgaacagctccagggacagtgactacagcaccttcctgggcagcccatgccaaygcctatctgatctttgggagaagagtgctggtcgatctgagaagctgytaacgcctcaggaatgcattcagggaaatgtatatgcagagatctcctacaatgggaataaccttcccatgcgccaggctacagagactgttccttgactgtaattggggacctggtaattagatgatggcaaaatgtaccagaagctcagttttcattctgtggtccaaattacaaaccatcatattttgaaagtgatgctgacattcctcagccaggaggctttgccaaaaacaactcgagcaaggcttg

SEQ ID NO: 73447 - DNA, 600 bp, Chicken  19866894354601_3
cctcggccagagmgagctgcctggtgcgcagcgggcagggggagcccattgatgtggctctgggcagcctggtctggtggttggagaccctacccatggcaggtgggttgaaactagatgatttttatggtccttttcaacccaggccattctatgattgatatcttcgggctcatggtcccacatccccatggttcttgaacagctccagggacagtgactacagcaccttcctgggcagcccatgccaaygcctatctgatctttgggagaagagtgctggtcgatctgagaagctgytaacgcctcaggaatgcattcagggaaatgtatatgcagagatctcctacaatgggaataaccttcccatgcgccaggctacagagactgttccttgactgtaattggggacctggtaattagatgatggcaaaatgtaccagaagctcagttttcattctgtggtccaaattacaaaccatcatattttgaaagtgatgctgacattcctcagccaggaggctttgccaaaaacaactcgagcaaggcttgtcttggcacaaaatcaaactcagggcctcagcagcgaaactgaaaaca

SEQ ID NO: 73448 - DNA, 597 bp, Chicken  19866894354601_4
ggcacaaaatcaaactcagggcctcagcagcgaaactgaaaacatttacacagctggacccaaatcaccctattttctaaagagtttgtcagagcctgaagctcttggtgtatttctgcctgctttaaagaatcctgtgttcttgcaatctaccagctatccacatataggaaataaaatacactggaaaaagtgggtggtctttctattaaagtccaaaaaaataatccagcaaagcctcgcagggataatgagaacgggccccatatttacccgctccatcgatagatgtgccagacrtattatatttgcatacatagatatggaaacctcatcattttgccgtatgtatgtaatggctaataaatgcattagcaaaccgctaatgaaaacaaattgaagccaatgtcacaaattacgacagtgtgaggaattgcctttctgcattttttcctagctaaatgtcctgcctatattttttttattacatcagtcgtacacattgctcatgcattatgcatcggtcactagcaccagggtaaatagtgctgggtctctggagcatcatgtgcaccccaactgtgtgcatccttgcct

SEQ ID NO: 73449 - DNA, 600 bp, Chicken  19866894354604_1
gttcctgactctgaggcaggctgtgataccaatgcccttggttttattcctgcagttagctgttttccagaagagctctccattcattagcagttgtaggtctgtctatgctaagctgttgaactcttttggtacagaagcaagaatgacctgctgatgggtttgtggtgcattttttgtgatgctgatggattttccttctaagaaagctgtaaaagttcattgaggagttaaataagggaaagatgattagaaggaacaaattaccttgggggtatttcatttctaatttgatccagrccaagaaccgtggtggctgatttaacatctactagatggaataaataatcagcaggctgacttttttttccaggatttgtgatgagctgaattttttgtacatttattttgtttcttccaggcagggtgcagacaatttaagccatgtatttgagaggttcctgtgtgtgtgtgtagcaagtgttttgaaaaatggatgttctgctctcctcaggtgttatgcacagaggagtagaagtttgtttccagttataaatgtcaagtattttttttctaaagctccacatagaactaaatctg

SEQ ID NO: 73450 - DNA, 428 bp, Chicken  19866894354606_1
tgctttatgcctctatggacagcctaacttgctttgccccaggttatcacactgcagtgggcagcagtggtgcttcctgaggataaaagcactaggtttcctgacaggtagaatttaacactggaaaaaatccattacataacctgtcacacacagtataaagcaatatttcagaaaactggttttaaatcaccttgtctttaagtccactgatcctgagtggcaaggccatgagagaaagccgccctgcagacattccttttgtcacaggaatgcaccatggggtgcattgaggtgagyttggggcaaagacttaaatgcatagtgctcagaagtgagcctctcaatgatccctcagctacttaaaataagaaatctaaattctcagcatttggaaaaacaagcagaagacactctaaaaataaata

SEQ ID NO: 73451 - DNA, 600 bp, Chicken  19866894354607_1
ttgatgcaacccaggatacaattggccttccgggctgcaagtgcacattgctggctcatgttgagtctttcatcaaccaacacctccaaatccttttcctcagggctgctctcaagccattcttcacccaacctgtatttgtgcttgggattgccccgactcaggtgcaggaccttgcatttggccttgctgaacttcatgaggttgatatgggcacaccactcaagcctgtccaggtccctctggatggcatccctttccttggtcatgttgactgcaccactcagcttggtgtcatcygcaaacttgctgagggtgcactggatcccactgtccatgttgcctacaaagatgttaaatagcactggtcccagcaccaatccccgaggaatgctgctygtcactggtctctgcttggacattgagccgttgaccacaactctgaatgtgaacatccagccaattccttgctgttcactgtgctcactagtagcactcatttaaggtattaacattgatgttatcacttcctgttcattcctgtcccatctgtgcctctctccctccccatccaacacagtgtctccactacagggcctt

SEQ ID NO: 73452 - DNA, 600 bp, Chicken  19866894354607_2
tcagggctgctctcaagccattcttcacccaacctgtatttgtgcttgggattgccccgactcaggtgcaggaccttgcatttggccttgctgaacttcatgaggttgatatgggcacaccactcaagcctgtccaggtccctctggatggcatccctttccttggtcatgttgactgcaccactcagcttggtgtcatcygcaaacttgctgagggtgcactggatcccactgtccatgttgcctacaaagatgttaaatagcactggtcccagcaccaatccccgaggaatgctgctygtcactggtctctgcttggacattgagccgttgaccacaactctgaatgtgaacatccagccaattccttgctgttcactgtgctcactagtagcactcatttaaggtattaacattgatgttatcacttcctgttcattcctgtcccatctgtgcctctctccctccccatccaacacagtgtctccactacagggcctttactgtgccagcatagttgtttgtgcagctgcagtcagcgctggattgagggactgttttaactggtataaaagcaagcattttgctttgctggattga

SEQ ID NO: 73453 - DNA, 600 bp, Chicken  19866894354615_1
aggatgttttactcttccaacaataacagcagtacagaacgtgaggctgaaagatccttctggagctctgtcaccaccactttatgcagtagaagtgtgtcaaaagatgactaatgtctgtcatgtattgttcacttctttcctcccattctctccctggagaggacagagttggtcacgtagctgtttttctttaaagctgccatttacgttgtagctaatcctgcatttggcacattgttcatgaagatgccaatcagcattttacagtcaccattttcccccgaagcaggtgttgawtgtccccattttatcctctggtgtgggraggccacttaaagagaaggatgggttcagtccctggcaccacgagctgctgcccrcagtggtgaaagctttcaggatttcttaagttctttaggggagaaaatagagttatgtcacagaacacatagaaaataattaaatcatttgcatttcctaagacagttatccttgctgcacaggataggattcagcacaaactgaatgcagcctaattacattagcacagcatttcccatgacctgacttacccttttgaagcagagcctgctaatg

SEQ ID NO: 73454 - DNA, 600 bp, Chicken  19866894354615_2
gcagtacagaacgtgaggctgaaagatccttctggagctctgtcaccaccactttatgcagtagaagtgtgtcaaaagatgactaatgtctgtcatgtattgttcacttctttcctcccattctctccctggagaggacagagttggtcacgtagctgtttttctttaaagctgccatttacgttgtagctaatcctgcatttggcacattgttcatgaagatgccaatcagcattttacagtcaccattttcccccgaagcaggtgttgawtgtccccattttatcctctggtgtgggraggccacttaaagagaaggatgggttcagtccctggcaccacgagctgctgcccrcagtggtgaaagctttcaggatttcttaagttctttaggggagaaaatagagttatgtcacagaacacatagaaaataattaaatcatttgcatttcctaagacagttatccttgctgcacaggataggattcagcacaaactgaatgcagcctaattacattagcacagcatttcccatgacctgacttacccttttgaagcagagcctgctaatgcaggagtgctgcccagcttgttggagct

SEQ ID NO: 73455 - DNA, 561 bp, Chicken  19866894354615_3
atgcagtagaagtgtgtcaaaagatgactaatgtctgtcatgtattgttcacttctttcctcccattctctccctggagaggacagagttggtcacgtagctgtttttctttaaagctgccatttacgttgtagctaatcctgcatttggcacattgttcatgaagatgccaatcagcattttacagtcaccattttcccccgaagcaggtgttgawtgtccccattttatcctctggtgtgggraggccacttaaagagaaggatgggttcagtccctggcaccacgagctgctgcccrcagtggtgaaagctttcaggatttcttaagttctttaggggagaaaatagagttatgtcacagaacacatagaaaataattaaatcatttgcatttcctaagacagttatccttgctgcacaggataggattcagcacaaactgaatgcagcctaattacattagcacagcatttcccatgacctgacttacccttttgaagcagagcctgctaatgcaggagtgctgcccagcttgttggagctggagtgaggactgggg

SEQ ID NO: 73456 - DNA, 599 bp, Chicken  19866894354618_1
  misc_feature (1)..(210): n is any nucleotide
nnnnnnnnnnnnnnnnnnnnnnnnnnnnnnnnnnnnnnnnnnnnnnnnnnnnnnnnnnnnnnnnnnnnnnnnnnnnnnnnnnnnnnnnnnnnnnnnnnnnnnnnnnnnnnnnnnnnnnnnnnnnnnnnnnnnnnnnnnnnnnnnnnnnnnnnnnnnnnnnnnnnnnnnnnnnnnnnnnnnnnnnnnnnnnnnnnnnnnnnnnnnnnnnnnttgtgaatttggtatttgagccttgggccggagtctgtcactgccttctgctccaactgcagggtctgaacatgccagaaacagaagacrtctatgcagaggtatcatttgcagtccytatggagagtcctctgtccaagtgggtctgtcagtccctggataggtgttaaaatgccatccgttacaacaccagagcttcttcattagccaggcagccacatcagaaggtttacgaactcatgtcaagaagaaagtgaaaactacgtatcctgccaagcccaaagcctcatcttcttgggccagatcctgatgtaactgtgtggtttccattagacgggagctggatctaactgagggtgaactgtatgaatgcaggtcaccagctctct

SEQ ID NO: 73457 - DNA, 599 bp, Chicken  19866894354618_2
  misc_feature (1)..(182): n is any nucleotide
nnnnnnnnnnnnnnnnnnnnnnnnnnnnnnnnnnnnnnnnnnnnnnnnnnnnnnnnnnnnnnnnnnnnnnnnnnnnnnnnnnnnnnnnnnnnnnnnnnnnnnnnnnnnnnnnnnnnnnnnnnnnnnnnnnnnnnnnnnnnnnnnnnnnnnnnnnnnnnnnnnnnnnnnnnnnnnnnnnnnnnttgtgaatttggtatttgagccttgggccggagtctgtcactgccttctgctccaactgcagggtctgaacatgccagaaacagaagacrtctatgcagaggtatcatttgcagtccytatggagagtcctctgtccaagtgggtctgtcagtccctggataggtgttaaaatgccatccgttacaacaccagagcttcttcattagccaggcagccacatcagaaggtttacgaactcatgtcaagaagaaagtgaaaactacgtatcctgccaagcccaaagcctcatcttcttgggccagatcctgatgtaactgtgtggtttccattagacgggagctggatctaactgagggtgaactgtatgaatgcaggtcaccagctctctccttaagtagctttaagccaaatctcca

SEQ ID NO: 73458 - DNA, 600 bp, Chicken  19866894354624_1
cctcagccctcaccctgcagctcactcagcgccctccacgccatgcgctgctaaatgtcacttctggacagtgcagatctcctctgcttcattgaaataaaatcattgactaaagctgcagtgtgtacgcattgcacccagagcgcagtgcccggcaaagtgtcctcccatccctgtccccactgtgccccatccatcccccacccctctgctggggtcccaggagctgagctctgttccttttcctcctgcccaacgcagcagatgccgttgtctgaaatggacctctgctccacagasccaggcgagttctcctcgtgccgctgggacaaacaggaatgaatgttccattgcaaagtaaccaacacaaagggaaacgtcttggaaaccacttgaaattatttatttggtgccacttagaagtggttgtttgaggggcttgccctggccctttgcacagttctgctcgtgcgttttttctctttgcaaggtcacactgtgcaaaagctgtcagagctgctgggaaggtggtggggatgtgctgggcacaaacctgagagcaccaaattaatttaatgggctgcatttcagcgtcggaac

SEQ ID NO: 73459 - DNA, 600 bp, Chicken  19866894354627_1
aaacacaagccaagcattaatttgaagctttaatgcatttttcagtatgccacaataataaaatgagcttgaaacatttttctgagcggaagcaattgttgagtgctctgatcagagaactatttgctctcctttgggatatacttatggatggagaatgcgtatgcttgggttgaaagtcactgtatttatgctattttttatacagagccactggggaggcaggaaatgtcatgctagattaaaggaaacatcacatgtgactcatttgttttaattctactgttttcatagatttayttacaaagaggatagagaaaaactctgccccaaaacatatgaaccaaaaagggagcataaattatcaaaaatcatccccctctagactgcaagcaaaagggattaacagatgtttattccagtaaaggttacatcccttgaactccagaaaccccaaaactccataaaaggtgaaagacttctcataaaagattgaaaactttctatgaataccccaaactatgctgtaccgtcagagtcctttgctggtgtacagcacagtgggaaacaaaggctggtttgaaatggaagtctacttta

SEQ ID NO: 73460 - DNA, 585 bp, Chicken  19866894354637_1
aagtctgatatgacagtgctgcagtccttgttaatatccatgcatgatttcaagtcattcattcttaagaaagaattcactatgagaataattcataggctaacagtgagtcctacagaagcatttctctagtgagggtttcttgaaagttaagggaatagttagaaatttcattggagaacctgattcttatttttattagttgttgttgtctcaggaatttcaggaacaaaacgtgtccaaaaggtgcagtcttttgtgttagcttcgcttcttcagatagattttaaagctaatacrcttctttaattctatacaggaaagaaaataacaatataatttgtgatgacttaaaagaaggtgaaaagcgctgcattcccaatcctgtttgtaaatttgaagatgtatttgagcaatatcctgatattatggctaacataagaaaaactggttttcagaaacctacaccaattcaggtacttgttccattttgatgactcttttaactgaagcttaggagaaaaacacatctaagtattcattgttttatgttagtcccaggcatggccaatcatactacaagga

SEQ ID NO: 73461 - DNA, 600 bp, Chicken  19866894354638_1
tttagcccatccagtgtccttatctgtctgaactttaaatatgctgtctgaactatttgtctattgtgtttccagacactatgtaatcccagtacaaggtaagaagaacataactttgctgtctatatggataacaccctgccatgtaccattggcttctctgcttgtaacacgacatttctcttaaaatagctattgtatattttttcatagttggtgctcattatttggctatattcatttgctgtatttagatcaaacctgcctgccacataggctttttgttctgtgtttgtatarcacataagaacaggttgagaacctggtctctgatttggggtcctagcactagtgcaccacaaatatgaactgtctagaggcaatgaagagcaagggtgctaatgacagtgtagcaacaaaaataaaatgaaaataatctgcaaagttttaagtaatgatgataaatagttaaaaaaaataaaagtcagtgttcctattcataacagcactttgcatctgcttagcattatgtatatgaagagccccaagatttcgaggatactagtcatatacttaaaaattaagcttcaagttattgga

SEQ ID NO: 73462 - DNA, 600 bp, Chicken  19866894354639_1
taaaatgaggtaaaatgaaaccctggtctaaggagcattaaataacacatatttggtggcacatgtgattacacagcccgctgtgtaactggttctgtttcctccctctctgagttggtcacagacttgtaaacttttttcacccttggaagctgttgctgtctatggctgttcccctcttgctgtaaggagaatcaattcatccattattaaatgagatgagagagattaaaaatacacttctctaaactgtccttagatttttttaaaacaatcctgaactcaaactagcttggtgtrccctaactgaggatcagtgccgccttctgtgggaaattagctttgatttgacagctatttttgtttcaagatcgtatgcacaccagtttttctgctgaggcctggctctcagggacagttgcacatgcatggccggctgtgcatcaaatgctgtaatccaaagggatgctccaggtcatgattatttaatttaaaaaaaaaaagaaagaaaggaaaggaaaaagagaaatctcagtccaaagagatgctgtaccaaaatgtggccttgcaccaagcaaatatttrtcaacttggaaaaca

SEQ ID NO: 73463 - DNA, 600 bp, Chicken  19866894354639_2
aactagcttggtgtrccctaactgaggatcagtgccgccttctgtgggaaattagctttgatttgacagctatttttgtttcaagatcgtatgcacaccagtttttctgctgaggcctggctctcagggacagttgcacatgcatggccggctgtgcatcaaatgctgtaatccaaagggatgctccaggtcatgattatttaatttaaaaaaaaaaagaaagaaaggaaaggaaaaagagaaatctcagtccaaagagatgctgtaccaaaatgtggccttgcaccaagcaaatatttrtcaacttggaaaacaaagagtgtctgtcctctccagaccgcttctattcagtattccrcttttcttcatcatgcatatacaactaaattagttgaatgggttagatttagactgaaaatgaaactagaagataccttatactgaaggaagggtttgagtcagcacattaaaatgtgctcagcccctgatgtgaacttgtgtacaacttkagagctgcattgtgttgggggaaggtattggagcaagcggaaggagaaattctggaccaggcattccaagctggtgattcagcaccgccaa

SEQ ID NO: 73464 - DNA, 600 bp, Chicken  19866894354639_3
tgatttgacagctatttttgtttcaagatcgtatgcacaccagtttttctgctgaggcctggctctcagggacagttgcacatgcatggccggctgtgcatcaaatgctgtaatccaaagggatgctccaggtcatgattatttaatttaaaaaaaaaaagaaagaaaggaaaggaaaaagagaaatctcagtccaaagagatgctgtaccaaaatgtggccttgcaccaagcaaatatttrtcaacttggaaaacaaagagtgtctgtcctctccagaccgcttctattcagtattccrcttttcttcatcatgcatatacaactaaattagttgaatgggttagatttagactgaaaatgaaactagaagataccttatactgaaggaagggtttgagtcagcacattaaaatgtgctcagcccctgatgtgaacttgtgtacaacttkagagctgcattgtgttgggggaaggtattggagcaagcggaaggagaaattctggaccaggcattccaagctggtgattcagcaccgccaaccaccccagcaaggctgaggccgtgctgtcagcacatggaggggcagcttgttgattc

SEQ ID NO: 73465 - DNA, 600 bp, Chicken  19866894354639_4
aaaaaaaaagaaagaaaggaaaggaaaaagagaaatctcagtccaaagagatgctgtaccaaaatgtggccttgcaccaagcaaatatttrtcaacttggaaaacaaagagtgtctgtcctctccagaccgcttctattcagtattccrcttttcttcatcatgcatatacaactaaattagttgaatgggttagatttagactgaaaatgaaactagaagataccttatactgaaggaagggtttgagtcagcacattaaaatgtgctcagcccctgatgtgaacttgtgtacaacttkagagctgcattgtgttgggggaaggtattggagcaagcggaaggagaaattctggaccaggcattccaagctggtgattcagcaccgccaaccaccccagcaaggctgaggccgtgctgtcagcacatggaggggcagcttgttgattcaaggctgcaatctgtgtgctagtagctggaggctgtatctgcattagtaagtagtgccgcgcagtaggtgaagatctgtagagcaaaacagctggtgttgacaacatgatgtccacgccaaacatgttttgcagaggttccctttggacta

SEQ ID NO: 73466 - DNA, 566 bp, Chicken  19866894354639_5
caggcattccaagctggtgattcagcaccgccaaccaccccagcaaggctgaggccgtgctgtcagcacatggaggggcagcttgttgattcaaggctgcaatctgtgtgctagtagctggaggctgtatctgcattagtaagtagtgccgcgcagtaggtgaagatctgtagagcaaaacagctggtgttgacaacatgatgtccacgccaaacatgttttgcagaggttccctttggactagatccagtccagctgagtgaactaaatgcctgttaatggctggcttgcattaggtgmgcttgtggagaccatctgattcctcccttgtgcaagcattcagtttgtgagctcagrgatcactctgcagagcagggcaaggcatggaaaatggggcaatttggatagtgccttcagaagagcccttctcaactgagccaaaacgtgagtgtgaatttggcattataaggactattccttttgtgataataagctcattaggcgtcctgccagacgccgtgtctggaactgtaggtaataaaggtgggcttgagtatgtgggtttt

SEQ ID NO: 73467 - DNA, 509 bp, Chicken  19866894354639_6
tgctgtcagcacatggaggggcagcttgttgattcaaggctgcaatctgtgtgctagtagctggaggctgtatctgcattagtaagtagtgccgcgcagtaggtgaagatctgtagagcaaaacagctggtgttgacaacatgatgtccacgccaaacatgttttgcagaggttccctttggactagatccagtccagctgagtgaactaaatgcctgttaatggctggcttgcattaggtgmgcttgtggagaccatctgattcctcccttgtgcaagcattcagtttgtgagctcagrgatcactctgcagagcagggcaaggcatggaaaatggggcaatttggatagtgccttcagaagagcccttctcaactgagccaaaacgtgagtgtgaatttggcattataaggactattccttttgtgataataagctcattaggcgtcctgccagacgccgtgtctggaactgtaggtaataaaggtgggcttgagtatgtgggtttt

SEQ ID NO: 73468 - DNA, 599 bp, Chicken  19866894354643_1
  misc_feature (1)..(125): n is any nucleotide
nnnnnnnnnnnnnnnnnnnnnnnnnnnnnnnnnnnnnnnnnnnnnnnnnnnnnnnnnnnnnnnnnnnnnnnnnnnnnnnnnnnnnnnnnnnnnnnnnnnnnnnnnnnnnnnnnnnnnnnnnnnnngatttgcagtttgcttaggaaatgcttgtcctcctttataattacataaaggtaaggaacccacagtattgctcctcaggatcataggctcaaaccctgttctttcattctggtgactttttccattcacaatacaaaagcacatagtgaatacaaatatcaaacaatgtgtaargctgtattamttaactaaaaactggcagctaattagctaacatgagaacaaaaccacaggcttgaggaaaaagagaaatcattttgatctagcctggattagtcacttttctgaacatattctccctggtactaagctggcaagtactcaacaccacatcagcaagatcaagacctgccatcaagagacactgagcacatcctcggatttaaaagtatcatacattttgttctaagaggctattcaaagtgtaaactgattgaaactactccatgccgaacaccaagcatcacgtccaa

SEQ ID NO: 73469 - DNA, 599 bp, Chicken  19866894354643_2
  misc_feature (1)..(115): n is any nucleotide
nnnnnnnnnnnnnnnnnnnnnnnnnnnnnnnnnnnnnnnnnnnnnnnnnnnnnnnnnnnnnnnnnnnnnnnnnnnnnnnnnnnnnnnnnnnnnnnnnnnnnnnnnnnnnnnnnnngatttgcagtttgcttaggaaatgcttgtcctcctttataattacataaaggtaaggaacccacagtattgctcctcaggatcataggctcaaaccctgttctttcattctggtgactttttccattcacaatacaaaagcacatagtgaatacaaatatcaaacaatgtgtaargctgtattamttaactaaaaactggcagctaattagctaacatgagaacaaaaccacaggcttgaggaaaaagagaaatcattttgatctagcctggattagtcacttttctgaacatattctccctggtactaagctggcaagtactcaacaccacatcagcaagatcaagacctgccatcaagagacactgagcacatcctcggatttaaaagtatcatacattttgttctaagaggctattcaaagtgtaaactgattgaaactactccatgccgaacaccaagcatcacgtccaaacactgcatg

SEQ ID NO: 73470 - DNA, 600 bp, Chicken  19866894354643_3
tgaggaaaaagagaaatcattttgatctagcctggattagtcacttttctgaacatattctccctggtactaagctggcaagtactcaacaccacatcagcaagatcaagacctgccatcaagagacactgagcacatcctcggatttaaaagtatcatacattttgttctaagaggctattcaaagtgtaaactgattgaaactactccatgccgaacaccaagcatcacgtccaaacactgcatgtcctcaaataatttgaagaccaccctgtttctcacctttcccctttcttcttkatgagcgtggacctgtcctgcttctgtccaggtctggcactgttggaagccatttctgacttcttcactggtatgcatttttacacagtgctagcytctccccacaatacaccttctagtcatcagctctccatttcattttcctttccctctcctctgcaagaatgtctcatcatacacagctgtcatccaaggtcaaaccacacaggagcagatgaatcccttcgataattaagtttggactgatatactgctatgactatttgaactgaagcatttgggtaatgcaattcatagtgg

SEQ ID NO: 73471 - DNA, 600 bp, Chicken  19866894354643_4
tcagcaagatcaagacctgccatcaagagacactgagcacatcctcggatttaaaagtatcatacattttgttctaagaggctattcaaagtgtaaactgattgaaactactccatgccgaacaccaagcatcacgtccaaacactgcatgtcctcaaataatttgaagaccaccctgtttctcacctttcccctttcttcttkatgagcgtggacctgtcctgcttctgtccaggtctggcactgttggaagccatttctgacttcttcactggtatgcatttttacacagtgctagcytctccccacaatacaccttctagtcatcagctctccatttcattttcctttccctctcctctgcaagaatgtctcatcatacacagctgtcatccaaggtcaaaccacacaggagcagatgaatcccttcgataattaagtttggactgatatactgctatgactatttgaactgaagcatttgggtaatgcaattcatagtggaaaggtgcggaaaataggagctacatagaaattggttgtttgttgcattctaaaactatcagcactcatatgactgtccagttcatttcctctayt

SEQ ID NO: 73472 - DNA, 541 bp, Chicken  19866894354643_5
ytctccccacaatacaccttctagtcatcagctctccatttcattttcctttccctctcctctgcaagaatgtctcatcatacacagctgtcatccaaggtcaaaccacacaggagcagatgaatcccttcgataattaagtttggactgatatactgctatgactatttgaactgaagcatttgggtaatgcaattcatagtggaaaggtgcggaaaataggagctacatagaaattggttgtttgttgcattctaaaactatcagcactcatatgactgtccagttcatttcctctaytgctcagacaagcaagaccacaaacaaacaaatcattactgccacacctgtgagtaggggagtccgttggtggcccagagggagaaagcagcacctctggccagccctctcccttaataatcggggggaatcaaaagagacatccattctacaaactacattttaaaaggagggaaaatatgctcagttgactggtaaattccacagagtactttcttctgccatagtgctttgcccttca

SEQ ID NO: 73473 - DNA, 600 bp, Chicken  19866894354650_1
tcctgctctctctcatcttttaacctgcttcactcctcactccatttgccatatcaccttgctctaaaatcattagaaaaagataaccttttgaatactccaactaataaaagttcagtgtgatgcatctgctcattctcatttaaatctaatgaaggttgcctgtacttgctaggaatgtgtcttggatatgcccttaggatagccaaaatgattcacctaccctgatatctgtcgagcaggttgagacaagtgcattttttcctatataatgaaaactagtctcccacctgcagtcaractgcacaaaaagctctgaaacatttacttcccatttacttatatatttccaggtttttcagctacattattaaagtttatatgtgctgaaatattaaaatcrttttctataaatccaatgcaaaacaggttctgtgttttacaacacagaaattctcattataactgaaaaaaatatatattcttaagccttttaaatgtaggaaaagatgaggaaatatttttgggatatgttaagcatagaggttccctaccactccatttgtttcgtagtaggcatttacacaaattcaatagaac

SEQ ID NO: 73474 - DNA, 600 bp, Chicken  19866894354650_2
ctaataaaagttcagtgtgatgcatctgctcattctcatttaaatctaatgaaggttgcctgtacttgctaggaatgtgtcttggatatgcccttaggatagccaaaatgattcacctaccctgatatctgtcgagcaggttgagacaagtgcattttttcctatataatgaaaactagtctcccacctgcagtcaractgcacaaaaagctctgaaacatttacttcccatttacttatatatttccaggtttttcagctacattattaaagtttatatgtgctgaaatattaaaatcrttttctataaatccaatgcaaaacaggttctgtgttttacaacacagaaattctcattataactgaaaaaaatatatattcttaagccttttaaatgtaggaaaagatgaggaaatatttttgggatatgttaagcatagaggttccctaccactccatttgtttcgtagtaggcatttacacaaattcaatagaactataaaactataagtataaaagcacttaaagtctacttcatgttcattttaaattggatagagggaagaccagcagaaaaccagctcttcttcatttttaaga

SEQ ID NO: 73475 - DNA, 600 bp, Chicken  19866894354651_1
actgtatgtaatagctggtttatgctatttgctaaatattcagaaatgttaaagtcactcaacctcatgttactttgcacttttccagtctcaataccagcaatgcattcttatatccaatctgtaaatcatgggtgttcaacatcttggcttgcctgggtcacgctgagtgaagaggaatcgtcttgggccacatataaaatacagcatagttaatgcataccagtaacaaaaccttaaaaaaatatattttatgaaaatgttaaaaaacaaaagaaggcaagaaggcaacaaaaccaraatgagtgggtttgacatgtttggtataaggtgaaacatctgtttaagaataccacacagagatcaaatcccaaagcaggatatttatgagtggcagagtgtctgggaagatatgggcaggcacctagaacagcaggcacctctgtgcttttggagttcactcctgaacaactgcagaatcctgaaaaactggtaaaacgcttgaaaaagatacaccatcacctgggcaattccaaagccagcaattcctgcaacatgctggggcttggcttatgcctgccgagcagcactcaacactac

SEQ ID NO: 73476 - DNA, 600 bp, Chicken  19866894354659_1
ttttattccttgtacccacgtcctgacccaaatgcagatcccatcacatttctgtaactttatctctctcagaattatctgtgtcttagtggttcatattttttcctactccactttcaggagaaaaaaaaatgtatcttagaaactgcctccataagactcagtacttattatcaatgctgcagtcagcttattatcacacctttggcaactacgttgtcttttttgttagttttactctaaattaccagcaagctgctctcagaatctctgcaatgtcagagcttaactgtaaagccygtgggctattaaacattgttcaaagtcagtttcaaaggtaacacaaattttttacacacttgaaagggcatagaagtagcacctaataagtgatgtaacaaaaaggtttatataactatgctcttctggccagcagacctgggaatttagagactgattgtcagttaaacagaggcaactatcaggctttttaccagatgaaaccagctgctttaagaaaggagcagttcaaagagcttgacttcatagccagactcaatgccaagtgaaggcatatttccacagacctctgctaaattt

SEQ ID NO: 73477 - DNA, 600 bp, Chicken  19866894354659_2
cccttgtgcttttaaactctatccactggaagaaataggttttaatgattattgtgcccctcttcgctacttcagtgaaacaaagaaatggaaacaaagcaacaaaaaaagttcctccagatccagcctttatagtttgattattttatgtcaattatcagctttatgtttcatacttcctgaagcctacaagataattgttaagtttaaaaatcatagagatgacacaattaagtataattaattttgactttgagaaattgtattctaccattactattcttcaagcatgtaaaaatyacacactgctcaatttwttttttcagtaaaggaacatttattttcttgtgcaaataatttttataatacacttgcaccgactgtgactgtattgtgtcaacgttaattcagccatctcctttgtctagggtttgtaaactacattagaaatcctctgtcaaaactactattaagattctgtaattcgtacacgattactttaaagcagtctaaacagttcattcagcaagccaagtttaaatgttttgcccacacagcacacagactgtatatttaagaaaatttcccatttatatcaag

SEQ ID NO: 73478 - DNA, 600 bp, Chicken  19866894354659_3
tctatccactggaagaaataggttttaatgattattgtgcccctcttcgctacttcagtgaaacaaagaaatggaaacaaagcaacaaaaaaagttcctccagatccagcctttatagtttgattattttatgtcaattatcagctttatgtttcatacttcctgaagcctacaagataattgttaagtttaaaaatcatagagatgacacaattaagtataattaattttgactttgagaaattgtattctaccattactattcttcaagcatgtaaaaatyacacactgctcaatttwttttttcagtaaaggaacatttattttcttgtgcaaataatttttataatacacttgcaccgactgtgactgtattgtgtcaacgttaattcagccatctcctttgtctagggtttgtaaactacattagaaatcctctgtcaaaactactattaagattctgtaattcgtacacgattactttaaagcagtctaaacagttcattcagcaagccaagtttaaatgttttgcccacacagcacacagactgtatatttaagaaaatttcccatttatatcaagcataccatggagactta

SEQ ID NO: 73479 - DNA, 600 bp, Chicken  19866894354660_1
catagtctggggaaaatcacactcacagcactgaggacaagaatttcaacagaaggaggagaagaaactgagcattgtagctcacaagagtgaaatgaaatcaccatcttttggtagaagtatcagggtctgaaagacctgttttaagtttgtagtgacaactatgttgacaaccttcatcttcccaaattttgaatgttctctagtttttttgagtgattttttttcaggatataacatgttggttataaagaaaaaaacattaaagtccactgcactggcgcacctgtacagtaggcrttggtatgtgtctgcttcttcagctgctcacwacagctcagctcttccccactgtgacgacatttgcccccaagacctccagcatcactggagaagcccatctgccaggacacccagcacacttctgtacatgaatccatctctacagcacttcagcacttgtcagattagagcaggagggcagaggagacgcttggaggaatctgttgtggagggaaggaaatacacaggcttatgttgctagcagactgcatcccacttgttgtttgttgcttctgcacccagcatttccctgcggga

SEQ ID NO: 73480 - DNA, 600 bp, Chicken  19866894354660_2
gaggacaagaatttcaacagaaggaggagaagaaactgagcattgtagctcacaagagtgaaatgaaatcaccatcttttggtagaagtatcagggtctgaaagacctgttttaagtttgtagtgacaactatgttgacaaccttcatcttcccaaattttgaatgttctctagtttttttgagtgattttttttcaggatataacatgttggttataaagaaaaaaacattaaagtccactgcactggcgcacctgtacagtaggcrttggtatgtgtctgcttcttcagctgctcacwacagctcagctcttccccactgtgacgacatttgcccccaagacctccagcatcactggagaagcccatctgccaggacacccagcacacttctgtacatgaatccatctctacagcacttcagcacttgtcagattagagcaggagggcagaggagacgcttggaggaatctgttgtggagggaaggaaatacacaggcttatgttgctagcagactgcatcccacttgttgtttgttgcttctgcacccagcatttccctgcgggatcaggatgactgtgactgtggtgacagctgtg

SEQ ID NO: 73481 - DNA, 599 bp, Chicken  19866894354665_1
  misc_feature (1)..(120): n is any nucleotide
nnnnnnnnnnnnnnnnnnnnnnnnnnnnnnnnnnnnnnnnnnnnnnnnnnnnnnnnnnnnnnnnnnnnnnnnnnnnnnnnnnnnnnnnnnnnnnnnnnnnnnnnnnnnnnnnnnnnnnnnaaacaattttttatcttgggaaaagtcacattcctggcattagcaggtctgatctgcagagaaacaacccccactccatttccttcaaaatttatcaggcaaataaaaatcaagaccaaacccaaaacccaacttcttcctccacaagcattttcctaggaaagataagtgattgctacytctttgctatcaccacatggttatggagatcaggagtcctgataccaaatcccttttttagctagctgtaacgctataatgtgatggaaagtacagcaataatagcagggtggcacaatcctaggctgcagcaagtaagcatatgctcaagtgcagcagctgtggatacacaaaggaaaaaagtctgcttaccttcagaaggcctcagatatgcagcaatctccatcaagatatccttgcctctactgccaacctttatatgaggtgtgggaaggggtggatcctagttccatcccttc

SEQ ID NO: 73482 - DNA, 600 bp, Chicken  19866894354666_1
tagataacagcatgttgtacaacgtttcatcagcgatatttagatctaaattaggagcagttgtgagatgggttgccgattttcttgtgataaaagggaaatagttcaagaaatacagaccagatgttatcttaatccgatcctcatgtacgagagcacactgtgagacagtaataatagtcccttctacctgtttctaattttccttctctgcaacaccccctgtgaaaaacagattaaaccaacacatcatttacggatgggcgctgggcgggttgcagtccgtatggaatgcggctyggagcggaggctgcagccgctgtgctgtgatgctggtgtgacggtgctgggtgagacagcagccctccrtgattgaaaaggagagtagtcggtttgggtttgagtcgggctcttggttcagcatatccctacacggtttcaaatttgtcatcggcgtttccaggctgtatatgttacacaaccctcagcagaccaaaaaagagggggttgatcctcagctgctgtaaatcaacgctgatccattgatttagatggaactgcactgatttgtaccatctcatggtctggacgaagtatatt

SEQ ID NO: 73483 - DNA, 600 bp, Chicken  19866894354666_2
gggttgccgattttcttgtgataaaagggaaatagttcaagaaatacagaccagatgttatcttaatccgatcctcatgtacgagagcacactgtgagacagtaataatagtcccttctacctgtttctaattttccttctctgcaacaccccctgtgaaaaacagattaaaccaacacatcatttacggatgggcgctgggcgggttgcagtccgtatggaatgcggctyggagcggaggctgcagccgctgtgctgtgatgctggtgtgacggtgctgggtgagacagcagccctccrtgattgaaaaggagagtagtcggtttgggtttgagtcgggctcttggttcagcatatccctacacggtttcaaatttgtcatcggcgtttccaggctgtatatgttacacaaccctcagcagaccaaaaaagagggggttgatcctcagctgctgtaaatcaacgctgatccattgatttagatggaactgcactgatttgtaccatctcatggtctggacgaagtatattaactttccccatgaaaatccttcgcaacaaaaagctccattcacagtcctggtggataaacagtaatta

SEQ ID NO: 73484 - DNA, 600 bp, Chicken  19866894354667_1
cagggcaagaacaactgtatgactatctccgttctatagctttaactaaaacttcagtttgtaattcacgtttagatagaataggaacactgaagtggagcatttttaggttgaactgctttagctacaacatcaagcatgctgctactccaaagtcttaaaaaacattaacaaaaattcaaaatcttcctcaaaactgttttggcagtacctgttcatagggaagatcatatattccttgacagaacctaatctgtggttccttgtaggtttacctatggattgaattacctgaaatawaacatttccaatgataagaacctgtgttatttcatctcattctgtgaataagatgcagtattatccaatagaactaagaaagaaatatcagttaaacaaactgaacacgctgatacaataaacaaccactgaaagaatgaaaawgaccatttgaccagctttaattgattaacagatcccacattgaaaggaaatcaaaagagcaagccagttttgcaagaactgaatgactccaattgcttgtcaactgaatcccgtcagcaactcacggggttgataactacagtccagagaaacagg

SEQ ID NO: 73485 - DNA, 600 bp, Chicken  19866894354667_2
ctactccaaagtcttaaaaaacattaacaaaaattcaaaatcttcctcaaaactgttttggcagtacctgttcatagggaagatcatatattccttgacagaacctaatctgtggttccttgtaggtttacctatggattgaattacctgaaatawaacatttccaatgataagaacctgtgttatttcatctcattctgtgaataagatgcagtattatccaatagaactaagaaagaaatatcagttaaacaaactgaacacgctgatacaataaacaaccactgaaagaatgaaaawgaccatttgaccagctttaattgattaacagatcccacattgaaaggaaatcaaaagagcaagccagttttgcaagaactgaatgactccaattgcttgtcaactgaatcccgtcagcaactcacggggttgataactacagtccagagaaacaggttcaaagaggagtatttaaaagatggactgaaatggtttagcacttagaaatttaaatttatttttctcctgcagcactcaaatcaagacaatatgtcattacgttcggtattactcaaacatccgaacactcttcctaatcaa

SEQ ID NO: 73486 - DNA, 600 bp, Chicken  19866894354668_1
ttgtttgttttatagctgcatttcctcatttttcaacagcagggaggtaaacagctacgaataggtgagtttgtacatccagaaatttccacatgaattcagtctctccaattaaatctattttctggctgtgtggatacttcagagcttgctgaagcagtttgtcgtgagctgaagcagcctttgtgtttctagaaaatctaagacaaagcagtttgaattatttttaataaaatcttttctatctcaaatttaatccaaaaatcatgcaactgggaaacactaatgcataaacaaatytgatcctrcttaaagcaaatgggaattttggtaatggattcagagagaacaggaattaactagcttttcctccattaagtgtatagagtaaggcacttcctggaaagtgcattgtttataattacaaacatacagagccataaattaaggctttaacaggactaaaacaccactgttctctgttttcgtttgtcctacaaaatgccgtctcctgcttttcctactaaatgcttttcctactaaactgtagtgctgttatttttgtccatgatcagygctttggattcttggcagcacaca

SEQ ID NO: 73487 - DNA, 600 bp, Chicken  19866894354668_2
tttatagctgcatttcctcatttttcaacagcagggaggtaaacagctacgaataggtgagtttgtacatccagaaatttccacatgaattcagtctctccaattaaatctattttctggctgtgtggatacttcagagcttgctgaagcagtttgtcgtgagctgaagcagcctttgtgtttctagaaaatctaagacaaagcagtttgaattatttttaataaaatcttttctatctcaaatttaatccaaaaatcatgcaactgggaaacactaatgcataaacaaatytgatcctrcttaaagcaaatgggaattttggtaatggattcagagagaacaggaattaactagcttttcctccattaagtgtatagagtaaggcacttcctggaaagtgcattgtttataattacaaacatacagagccataaattaaggctttaacaggactaaaacaccactgttctctgttttcgtttgtcctacaaaatgccgtctcctgcttttcctactaaatgcttttcctactaaactgtagtgctgttatttttgtccatgatcagygctttggattcttggcagcacacagctccatt

SEQ ID NO: 73488 - DNA, 600 bp, Chicken  19866894354668_3
gaaacactaatgcataaacaaatytgatcctrcttaaagcaaatgggaattttggtaatggattcagagagaacaggaattaactagcttttcctccattaagtgtatagagtaaggcacttcctggaaagtgcattgtttataattacaaacatacagagccataaattaaggctttaacaggactaaaacaccactgttctctgttttcgtttgtcctacaaaatgccgtctcctgcttttcctactaaatgcttttcctactaaactgtagtgctgttatttttgtccatgatcagygctttggattcttggcagcacacagctccatttatatacaatatctggcagctttcagaaccagaggctgtgtgatgagaccttggcaactagaaataaactgagccaagactgctctgtgcacctccaaggacagaaaggcagtggtttccttcagtttggatgaatgcattgtatgttttggaccccttacccattgatgctttctcagaaattttaaataagcagtgtattgagggaagaacattcagatttaacagtgatgatacctgagaagtcatctctttcagttactgtcat

SEQ ID NO: 73489 - DNA, 600 bp, Chicken  19866894354673_1
taaaatttgtgctcatatttaatatcctccgacagactgcagtaaattccccttaattcacaccccatcctttcattcagactggtcactgttggcacctctcccttcagcttaattccgtggaagtgactcccagacatcagcattttattgactcactatttcattttaattcctgataaaaatacactgacacagaacaccaaatttgttcatgctacacagtcttacctattccttcacactcgggattgaagcccttatgcttcaaactccacatgggcacagtaaacctcaccsagcctgcaaggagcccagacctctgggacatgaagcacagctaaaaacaggtgagcttaaaataaacaaataaatacatagcagacagtggcattcactgtccctttgtatgaaattagaagttcacccaaatagggaaagggtcagttgtacaaacactaaggatttccagaggtatattactgagttatatatgyctaggatgcacattgcagcctaggccacaaaacactttacacagctaaaagcatgctcaaattaggtgcataattcaccttcttaagaaggcttttttttttt

SEQ ID NO: 73490 - DNA, 600 bp, Chicken  19866894354673_2
gaacaccaaatttgttcatgctacacagtcttacctattccttcacactcgggattgaagcccttatgcttcaaactccacatgggcacagtaaacctcaccsagcctgcaaggagcccagacctctgggacatgaagcacagctaaaaacaggtgagcttaaaataaacaaataaatacatagcagacagtggcattcactgtccctttgtatgaaattagaagttcacccaaatagggaaagggtcagttgtacaaacactaaggatttccagaggtatattactgagttatatatgyctaggatgcacattgcagcctaggccacaaaacactttacacagctaaaagcatgctcaaattaggtgcataattcaccttcttaagaaggctttttttttttttctttttctttttttaatttttattttttttaatggtggtaggtttgtttcttcctgtacgtttctttggaggatatgggttttggtcagaagctgacccaaactttccggagtatctggggttagcaaggcaatttcggaaatatattcatacgattggccatgtgagcttagttctccgggtttaagttctgga

SEQ ID NO: 73491 - DNA, 600 bp, Chicken  19866894354681_1
tggaggaagcataggagggaaatgtaaagacatggaagatattcagaacatataattacaaagcattatttgtttccataatgcttcctatggaaataaagcaaaacaaacaaaaaaagaacctcctccccctatccctttaaaaatgaaaaataacaaattttcattcatttgttttgtgtaccaaaatcacagtgttgtgatcttagaaccacatccttgtggttcaactattactcttgtaggctaagattctggatgcttccaatcagtaacctcctctttaaatttctatttcawtatgataacataaaacataaaaataaaaaatatataaaaacccttcagaaaacaaagcattttttatatttttcataataaaatgcaaatcctaacttgaatcacactgtcactgtattttaagataacttttctaattcrtcattattccaacttcatgacattttataaccattaactgtattcttttctttccctatacatttttaagtaaaaataagtctcattgtatctccagagtatccagaggggataacaaagtgcatcatctgaagaaaatctaccagttctagataaaaa

SEQ ID NO: 73492 - DNA, 599 bp, Chicken  19866894354681_2
aaaaatgaaaaataacaaattttcattcatttgttttgtgtaccaaaatcacagtgttgtgatcttagaaccacatccttgtggttcaactattactcttgtaggctaagattctggatgcttccaatcagtaacctcctctttaaatttctatttcawtatgataacataaaacataaaaataaaaaatatataaaaacccttcagaaaacaaagcattttttatatttttcataataaaatgcaaatcctaacttgaatcacactgtcactgtattttaagataacttttctaattcrtcattattccaacttcatgacattttataaccattaactgtattcttttctttccctatacatttttaagtaaaaataagtctcattgtatctccagagtatccagaggggataacaaagtgcatcatctgaagaaaatctaccagttctagataaaaaatctgttaaacatcttctgtcttgggttctttaaaaaacaaaacaaacaaacaaacaaacaaaaaactttaaatacctcccaggtaaaagttggtgaactacacaataaattttatattcaatatcttgctgtttacaaa

SEQ ID NO: 73493 - DNA, 499 bp, Chicken  19866894354683_1
cagaatcacaaaaaggaggccttacacatacacacacacacacacacacacacacacacacaaaaagaaaacaacttgcaatcaattgctgaattgatttcaagctcatatttactaccattcctgatactgggcaaatacatttaatacaaataacatccaccctatgatgcgaaaactcaaaatgggataaaaatcaagtacagtaacaggcattacatgtggacaacagtcaaaaattcattaccaggtctactgaaagccagaactgtggcaattacgacgtttggaagcaatttrctcagggtacatacagtacttctttcaactgctcattattgctacacagaagaatcattaacaagtaccacagcgatgaacagtttcactgctcactttgtttcctcccctgttgctgggccaccatcctccatctgactctgaccgcacaggtgaccggaggcactactccaaaagaaacaaggtctaagatagcaaa

SEQ ID NO: 73494 - DNA, 600 bp, Chicken  19866894354686_1
cccaaaccaatagctccctccccagggtcggtcagacagcagtctcagaggatgctgttaggcccatgtcacactcatccctgcctgttctgctgctttctgcagccgtgcccattccaggggatgcacaagtgtccatggcactgggtttgcatctcagaaccggggaatggcacaagaaacccacagctggaaagctgcacagaggagaaggatctgcagtgatggtccaaaccctgaatccatgctgcagttccaacactgaccagtgctggagagctctgctcactgaggagagaygraaaactgacacagrtgagtawaatttggagcagaggggagagcagcagcttgttcatggctatttcacagtcacctgattgaagttatcggagattggatttgccatgaaagcacacagggaatcccttccagttgcccttttacacgaagctctacaaccactggcccatctcacaggagcaggatggactgcgagcacccacagcccacccttcctaaaggctgctatttcaggctaccaagccaagatctgaacaaaacgaagagtcccatttagtttctgaggagtcctgctct

SEQ ID NO: 73495 - DNA, 600 bp, Chicken  19866894354686_2
caaaccaatagctccctccccagggtcggtcagacagcagtctcagaggatgctgttaggcccatgtcacactcatccctgcctgttctgctgctttctgcagccgtgcccattccaggggatgcacaagtgtccatggcactgggtttgcatctcagaaccggggaatggcacaagaaacccacagctggaaagctgcacagaggagaaggatctgcagtgatggtccaaaccctgaatccatgctgcagttccaacactgaccagtgctggagagctctgctcactgaggagagaygraaaactgacacagrtgagtawaatttggagcagaggggagagcagcagcttgttcatggctatttcacagtcacctgattgaagttatcggagattggatttgccatgaaagcacacagggaatcccttccagttgcccttttacacgaagctctacaaccactggcccatctcacaggagcaggatggactgcgagcacccacagcccacccttcctaaaggctgctatttcaggctaccaagccaagatctgaacaaaacgaagagtcccatttagtttctgaggagtcctgctctgg

SEQ ID NO: 73496 - DNA, 600 bp, Chicken  19866894354686_3
cctccccagggtcggtcagacagcagtctcagaggatgctgttaggcccatgtcacactcatccctgcctgttctgctgctttctgcagccgtgcccattccaggggatgcacaagtgtccatggcactgggtttgcatctcagaaccggggaatggcacaagaaacccacagctggaaagctgcacagaggagaaggatctgcagtgatggtccaaaccctgaatccatgctgcagttccaacactgaccagtgctggagagctctgctcactgaggagagaygraaaactgacacagrtgagtawaatttggagcagaggggagagcagcagcttgttcatggctatttcacagtcacctgattgaagttatcggagattggatttgccatgaaagcacacagggaatcccttccagttgcccttttacacgaagctctacaaccactggcccatctcacaggagcaggatggactgcgagcacccacagcccacccttcctaaaggctgctatttcaggctaccaagccaagatctgaacaaaacgaagagtcccatttagtttctgaggagtcctgctctggcctgatagtttgct

SEQ ID NO: 73497 - DNA, 600 bp, Chicken  19866894354686_4
agggtcggtcagacagcagtctcagaggatgctgttaggcccatgtcacactcatccctgcctgttctgctgctttctgcagccgtgcccattccaggggatgcacaagtgtccatggcactgggtttgcatctcagaaccggggaatggcacaagaaacccacagctggaaagctgcacagaggagaaggatctgcagtgatggtccaaaccctgaatccatgctgcagttccaacactgaccagtgctggagagctctgctcactgaggagagaygraaaactgacacagrtgagtawaatttggagcagaggggagagcagcagcttgttcatggctatttcacagtcacctgattgaagttatcggagattggatttgccatgaaagcacacagggaatcccttccagttgcccttttacacgaagctctacaaccactggcccatctcacaggagcaggatggactgcgagcacccacagcccacccttcctaaaggctgctatttcaggctaccaagccaagatctgaacaaaacgaagagtcccatttagtttctgaggagtcctgctctggcctgatagtttgctaattaaa

SEQ ID NO: 73498 - DNA, 600 bp, Chicken  19866894354687_1
gtaagaattgacgcactctctggggtaactgaggatgagcctgggggaagaaacccacagaatatccattctctcctgtatgtggagtaaagattggcccttaacttcttggacatgtgtcactgtcaaaagtctcactaaatgtcgattcattccttcctcttgctctggtgccaccagtactatgctagtcctcaagaaaagagtagttctttcttcacagtgggatttccaagccattccaacttgttctagttgccataatgccctttacagaattcttccaggaagttttcctcrgtgctatctgcagtctgcttttagtgtgggagaggagtgttgacttctgactcttcactttgcttgttctgaggatacagggaactggaaggtaataggagctgagagaactgaagtgtacttttttgtacaaaattcatgcagtgggtgcttctggcttcagcaaaatatgtctgattctggaggtcctggaagatcctttgaagttgatcttagtgtagaatggaggagacaaatgtctaagacaaagcctggaacactgaaagcatagctggaattgtgaggacgtgagatgtggga

SEQ ID NO: 73499 - DNA, 459 bp, Chicken  19866894354694_1
tcatttttatttattttttaagctaacaccattctttatggcattaggcagatccaaccccaaccactggttcctgatgttcccgttaaccagctgcttaactacttcagacctctcctttcaatcctcagcttcaccagtctttttccaattgatttcaaatccgatataccccaaaattcctattcatttaatgtaatggggctgtagtccaacctagacaaaagagattgcttgttttagctttgcttagagaagttgttatggtatgaaagaagtgtgtcaggtcagcattacaarggataactgggcaaggagccagatgagctctgagatgaagtatggtcttttaacacttggtcaaacttggagattgaatctgataactcaggatacagtttctagtctacttcatatgaaaaaaggatacatacaagccacaaaagttctttggcaaca

SEQ ID NO: 73500 - DNA, 600 bp, Chicken  19866894354696_1
atatttgaaaatgcatacaaaacactaacacccttttacaggatttcaaagttgttttattcatttaaatacgcaatgctctggtacaatttttaagatgcactgctactgcaatgcagttttaaagttcagtttgcactcttgtaattgcaaatacattctttatgtttgaagtactgtaactgctgtgctctcttaacaaaaactgctgtgctctcataacaaaaacaggctctgagcaacctgatctagctgtagatgtccctgctcattccaggggagtgggactagatgatcctwaaaggtcccttccaactcgagggacgctatgattttaacagtcattcctaatataccgacattatgttagaacaatcattttaacagaatccttgaaaaatgtgcaacctacttatattagtactgatattagtatcatcaggggatatttactgatgcatttgtctcacggcaaggtacactatttcagtagtcacacacatcttaggcaatccaggtgaaacagagatcctaacatcattcaatacaaggagagaggacatgtcagtaaggtatgtttgcagaccaaagagatctccc

SEQ ID NO: 73501 - DNA, 600 bp, Chicken  19866894354697_1
cagagtagggaacaaaaggtttgtgagataaatactagggcagatcaagtgcagttgccccattctggacactgaggcttgtggtaagcctgtgccagcgcaagaatttgagttgactctgatgctttgttcctccagtcacttactgtttattcagccttcttgatctaagcgtaagtaactgctgcaataggttataataaatcactgtggaggcattctggatatcaaactgtcactgtttttctgtgctttcagtagcaatatctactaagtgcatgtaggattttaacagctggwttttcttccacagaaaacatcctttcatcgctcgcagacactgggatacaaaaatgggtttgccttttctcggctgccaacagtggggatcggcggggagcgactgtatgtgaatcagccttctcaagctgaattagatgaattatctaacacaggacccacgctgacctatgggcaagccaagaaggctcctccttcaggcttcattccagcacacgtggcttttgacaaaaaggtataaagaagtttattccaggaatatcggctggccaaattcagagacataaacagtcagctcca

SEQ ID NO: 73502 - DNA, 600 bp, Chicken  19866894354699_1
ggccgtgggcagcctgagctggtgggggcaaccagcccacggcagggggttggaactgtatggactttaatgtcccttccaacccaactcattctgtgattctctcctgccacagaggctgcactgcccaagtagtgcccaaaaacatcccaggttttcaaggctttttagccttgaaaggcttctgatgtttcttagccattccctctttctaggagttcttcagggttgtgagggaatttacaacttctgtatcatgcagaccccatcctacaggttccctaggggccatcttctccrtgtttcccctcttctctgcccttcctggcactatggaacctccccatgccaccactcgcaagagacacgtttatattcagctgatctggggacaagtctagcaaacggagctggcagagccacaggggaaaggggacagccatgtgggatggcagctgtcaccctgcagagcgatgaatgtcaccagcgtgagccacgcactattgcatccctattgcacgttccagcccactgcgcctcctgtgcaattcataactgcttaacaaggccaccaatggtaaattagccaaacatcagtaa

SEQ ID NO: 73503 - DNA, 600 bp, Chicken  19866894354701_1
tgaatatgaaatatattgactatgaaatagaattaaatagaaaatagaccatagctcttgcatattgcaatctgccttacttgtctaaaaaacaatccctgagaatatacaatactcagggtctatacagtactcccagggcatcattttttatacaagtaagctattacaagttttacaaggaccttacacatgtgctgacataagttaatattatctcgcctgataaggaatacattaaaaaaagctggttctggaaaattaacatgaagaaaaacatgaaaaatatatcagtcattrcaagaatgactgatatattactttcttaaaagaaaatttcctgcaatttcttggcagtttagatatgcagagaccatagaagaaatacattcaaaagtcagcatttctatttttataacttttccactggatctgtgattacatatgaggcagctaaataaaaacttgcaaacactgagcttcattgtttatctggaaatcctttccttaggaccttcttactcaagtgggaccactgcaaatgctggtatttcataataaaaatgagtaactgtattatggaaatatttaataaagttt

SEQ ID NO: 73504 - DNA, 430 bp, Chicken  19866894354706_1
aacttctaacataacccaaatggcactaaccttctctacttccccctgctttcttctttttcgaacagttattgactgattagagctgaaacacttgattataagacaaatggataaaaccgtatcataggatcatagaatggcttgggttgaaaaggacctcaaagatcatcaagtttcaaccccctgctatgtgcagggtcgccaaccaccagaccaggctgcccagagccacatccagcctggccttgaatgcctccagggatggggcatccacagcctccgtgggcaacctgttcyagtgcgtcgccaccctctgtgtgaaaaactttctcctaatatctgacctaaacctccccatcttagtttaagaccattcccccttgtcctatcactacccaccaccacatatacaaagaaaatcaagctt

SEQ ID NO: 73505 - DNA, 599 bp, Chicken  19866894354710_1
  misc_feature (1)..(258): n is any nucleotide
nnnnnnnnnnnnnnnnnnnnnnnnnnnnnnnnnnnnnnnnnnnnnnnnnnnnnnnnnnnnnnnnnnnnnnnnnnnnnnnnnnnnnnnnnnnnnnnnnnnnnnnnnnnnnnnnnnnnnnnnnnnnnnnnnnnnnnnnnnnnnnnnnnnnnnnnnnnnnnnnnnnnnnnnnnnnnnnnnnnnnnnnnnnnnnnnnnnnnnnnnnnnnnnnnnnnnnnnnnnnnnnnnnnnnnnnnnnnnnnnnnnnnnnnnnnnnnnnnnggtcatagcctgggaacaatatttacacaacatttgccttgrgaagaaaagagtaaaataagaattgacctcacaaagaattatttgcatcttcttctgccctcagtgcaaggaggaaaaacaatccaattaagctactgagatattgctcatgtgcccttctttgaagagacctttctcccccagcaaacacacatctccctggggaggggctggtgcagaagggagtgagcacacacagcaccagcatcccatccccgatcccctccgagccttgggctcaactcattgttattttctcccagtgtccccasytgtacagtatgtgcacctgcttggaa

SEQ ID NO: 73506 - DNA, 600 bp, Chicken  19866894354710_2
aacaatatttacacaacatttgccttgrgaagaaaagagtaaaataagaattgacctcacaaagaattatttgcatcttcttctgccctcagtgcaaggaggaaaaacaatccaattaagctactgagatattgctcatgtgcccttctttgaagagacctttctcccccagcaaacacacatctccctggggaggggctggtgcagaagggagtgagcacacacagcaccagcatcccatccccgatcccctccgagccttgggctcaactcattgttattttctcccagtgtccccasytgtacagtatgtgcacctgcttggaaaccaactgatttcgagggacaattattgtccctagaaagccaggtgaaygcctgcttttgagaaggaagactttgggacatgccatgccagtgctcctagtccaactggggccagcacaggaggtttctgggcaaggtgtgccaaacctgcacccacctgctgctggcagtgtgtctgcatgctgcttcatgggtgtgcgtgcaactgagctccagaagacaactccaagcatgaagccactgtcatttggaaaaccacaaccttttgacccc

SEQ ID NO: 73507 - DNA, 600 bp, Chicken  19866894354710_3
acaatatttacacaacatttgccttgrgaagaaaagagtaaaataagaattgacctcacaaagaattatttgcatcttcttctgccctcagtgcaaggaggaaaaacaatccaattaagctactgagatattgctcatgtgcccttctttgaagagacctttctcccccagcaaacacacatctccctggggaggggctggtgcagaagggagtgagcacacacagcaccagcatcccatccccgatcccctccgagccttgggctcaactcattgttattttctcccagtgtccccasytgtacagtatgtgcacctgcttggaaaccaactgatttcgagggacaattattgtccctagaaagccaggtgaaygcctgcttttgagaaggaagactttgggacatgccatgccagtgctcctagtccaactggggccagcacaggaggtttctgggcaaggtgtgccaaacctgcacccacctgctgctggcagtgtgtctgcatgctgcttcatgggtgtgcgtgcaactgagctccagaagacaactccaagcatgaagccactgtcatttggaaaaccacaaccttttgacccca

SEQ ID NO: 73508 - DNA, 600 bp, Chicken  19866894354710_4
cttcttctgccctcagtgcaaggaggaaaaacaatccaattaagctactgagatattgctcatgtgcccttctttgaagagacctttctcccccagcaaacacacatctccctggggaggggctggtgcagaagggagtgagcacacacagcaccagcatcccatccccgatcccctccgagccttgggctcaactcattgttattttctcccagtgtccccasytgtacagtatgtgcacctgcttggaaaccaactgatttcgagggacaattattgtccctagaaagccaggtgaaygcctgcttttgagaaggaagactttgggacatgccatgccagtgctcctagtccaactggggccagcacaggaggtttctgggcaaggtgtgccaaacctgcacccacctgctgctggcagtgtgtctgcatgctgcttcatgggtgtgcgtgcaactgagctccagaagacaactccaagcatgaagccactgtcatttggaaaaccacaaccttttgaccccaaattctatagtcaattattgcaacaacttctgcagaatatgagaactaactgcagctagcaatcggcgttcgctg

SEQ ID NO: 73509 - DNA, 470 bp, Chicken  19866894354710_5
ccagtgctcctagtccaactggggccagcacaggaggtttctgggcaaggtgtgccaaacctgcacccacctgctgctggcagtgtgtctgcatgctgcttcatgggtgtgcgtgcaactgagctccagaagacaactccaagcatgaagccactgtcatttggaaaaccacaaccttttgaccccaaattctatagtcaattattgcaacaacttctgcagaatatgagaactaactgcagctagcaatcggcgttcgctgccacctgcgaggacagagtcctctctgcgctggggctrtagggctgcatggtgctcactgcaagacggggacaggagagcttttcagctggcaacccacaaaatgtcatggaataaggagcgtcccctgccctcccatcacctccagagaggttaagctgctgcgggacgcagattggtgtttttgcgcagctccctctttgggctcc

SEQ ID NO: 73510 - DNA, 600 bp, Chicken  19866894354711_1
ccagggggctactgagatctccacagcaaagatagataaatactgtctaaatgtgttttgttttcgtttgttactatttcctgacctaagaatgtatgattacagtcttggacaaccagtacatgactgtgaacaaatccacaagttaggaagaagtttctgttttgtgtgcctaaactgtaaacatagcatatatgcattatatattgcaagtgggaatagaggtatctgcatatacgtgtgtgtgtatcaatgttacgattccctttgttgatgaagcacaaatttgggctcttctaraattctgggcctgatacttggatattttagctttagttcactgtattcctgcagcaccggatactctccaatgcaagcaatgtgatactaaacctttttcagagggcaagatcctgaagatttgctatgccctttcctgacactaggatcaactcacgtagctgaatctggcattcatatagatttcaatgtctctgtgggaactgcatgtgctctttttattttatgctgagattccactaaattgttctttggatttatttcaaagaaggagaagggagaaaaaggcagtaaagattg

SEQ ID NO: 73511 - DNA, 600 bp, Chicken  19866894354714_1
tgagattcagcctgaacacgttcacaagtcttctccgcctacaaatcagtatgagaaatccagttagtcagaacttttccattattctgcagtatttagggctcaaaccaaagtaagcatatcatcatttttacttaccttattgttgtcattgcacagtctactaattgacacatagtgtctaatctttctgtaggcaaaaaacagtgcgttaattcccatccaaacctcagctctaattcagtgctgatacacaaaatgggcaatagcaacaaatgaacataaagcagatcctgttcyggcaggaaggctcagcagggaatgaaaaaaaawaaaagctgttctgcttcacgtgattgggaatacaaaataggaacatctttttcaaagaacrtcccttcctctttctccttgcccccatggcttcttctgrgccatggtatgatgtgtcaggtacaatataactgaaatatatttktcttgcagggttggcatactaagctgaaaatacgttttcactccactgacatagagagcatgaattacttccaagggatgaaatcaacctgaaacacttttttttagraagcagctgcatga

SEQ ID NO: 73512 - DNA, 600 bp, Chicken  19866894354714_2
tccgcctacaaatcagtatgagaaatccagttagtcagaacttttccattattctgcagtatttagggctcaaaccaaagtaagcatatcatcatttttacttaccttattgttgtcattgcacagtctactaattgacacatagtgtctaatctttctgtaggcaaaaaacagtgcgttaattcccatccaaacctcagctctaattcagtgctgatacacaaaatgggcaatagcaacaaatgaacataaagcagatcctgttcyggcaggaaggctcagcagggaatgaaaaaaaawaaaagctgttctgcttcacgtgattgggaatacaaaataggaacatctttttcaaagaacrtcccttcctctttctccttgcccccatggcttcttctgrgccatggtatgatgtgtcaggtacaatataactgaaatatatttktcttgcagggttggcatactaagctgaaaatacgttttcactccactgacatagagagcatgaattacttccaagggatgaaatcaacctgaaacacttttttttagraagcagctgcatgaagaagctgcattcagcccctctctcatgatgac

SEQ ID NO: 73513 - DNA, 600 bp, Chicken  19866894354714_3
tttagggctcaaaccaaagtaagcatatcatcatttttacttaccttattgttgtcattgcacagtctactaattgacacatagtgtctaatctttctgtaggcaaaaaacagtgcgttaattcccatccaaacctcagctctaattcagtgctgatacacaaaatgggcaatagcaacaaatgaacataaagcagatcctgttcyggcaggaaggctcagcagggaatgaaaaaaaawaaaagctgttctgcttcacgtgattgggaatacaaaataggaacatctttttcaaagaacrtcccttcctctttctccttgcccccatggcttcttctgrgccatggtatgatgtgtcaggtacaatataactgaaatatatttktcttgcagggttggcatactaagctgaaaatacgttttcactccactgacatagagagcatgaattacttccaagggatgaaatcaacctgaaacacttttttttagraagcagctgcatgaagaagctgcattcagcccctctctcatgatgacacaccttcctgaacaagtatctcagccaagtgcttttaattactgttcaggtctccttaaa

SEQ ID NO: 73514 - DNA, 600 bp, Chicken  19866894354714_4
cttaccttattgttgtcattgcacagtctactaattgacacatagtgtctaatctttctgtaggcaaaaaacagtgcgttaattcccatccaaacctcagctctaattcagtgctgatacacaaaatgggcaatagcaacaaatgaacataaagcagatcctgttcyggcaggaaggctcagcagggaatgaaaaaaaawaaaagctgttctgcttcacgtgattgggaatacaaaataggaacatctttttcaaagaacrtcccttcctctttctccttgcccccatggcttcttctgrgccatggtatgatgtgtcaggtacaatataactgaaatatatttktcttgcagggttggcatactaagctgaaaatacgttttcactccactgacatagagagcatgaattacttccaagggatgaaatcaacctgaaacacttttttttagraagcagctgcatgaagaagctgcattcagcccctctctcatgatgacacaccttcctgaacaagtatctcagccaagtgcttttaattactgttcaggtctccttaaagggctttgaaattactacagccaagagcaggggagcaca

SEQ ID NO: 73515 - DNA, 600 bp, Chicken  19866894354714_5
tgtctaatctttctgtaggcaaaaaacagtgcgttaattcccatccaaacctcagctctaattcagtgctgatacacaaaatgggcaatagcaacaaatgaacataaagcagatcctgttcyggcaggaaggctcagcagggaatgaaaaaaaawaaaagctgttctgcttcacgtgattgggaatacaaaataggaacatctttttcaaagaacrtcccttcctctttctccttgcccccatggcttcttctgrgccatggtatgatgtgtcaggtacaatataactgaaatatatttktcttgcagggttggcatactaagctgaaaatacgttttcactccactgacatagagagcatgaattacttccaagggatgaaatcaacctgaaacacttttttttagraagcagctgcatgaagaagctgcattcagcccctctctcatgatgacacaccttcctgaacaagtatctcagccaagtgcttttaattactgttcaggtctccttaaagggctttgaaattactacagccaagagcaggggagcacagaaggacacagtgcagctgagcagcagaacagagcacaggtgggc

SEQ ID NO: 73516 - DNA, 600 bp, Chicken  19866894354714_6
gcagatcctgttcyggcaggaaggctcagcagggaatgaaaaaaaawaaaagctgttctgcttcacgtgattgggaatacaaaataggaacatctttttcaaagaacrtcccttcctctttctccttgcccccatggcttcttctgrgccatggtatgatgtgtcaggtacaatataactgaaatatatttktcttgcagggttggcatactaagctgaaaatacgttttcactccactgacatagagagcatgaattacttccaagggatgaaatcaacctgaaacacttttttttagraagcagctgcatgaagaagctgcattcagcccctctctcatgatgacacaccttcctgaacaagtatctcagccaagtgcttttaattactgttcaggtctccttaaagggctttgaaattactacagccaagagcaggggagcacagaaggacacagtgcagctgagcagcagaacagagcacaggtgggctctgttgctcccagcactgcacacagacagacaggatggaacacatgtgcttctatgagtattagaagaataaggcacaagtgagcacacctggatttttggctcctt

SEQ ID NO: 73517 - DNA, 600 bp, Chicken  19866894354717_1
agcatagactaagtagagaacatcaaatataaacctctctaatcctggacaacagagccattacagagcaactcagaaaaggctttcttttaagacatctcctctaaactttttatactccataatcttctacctaaaaatgcaatccttagatttaatgttacaagacaatcttctttctttgtaatatttgcaatacttgtaaaggtggaatgactacattttggagtatttatagtagttgtaaaagaacccggtttcttttcaagaatcccagagagtgaatcttataaattgctygagacaatatagcccctctggtgttagaaaaagatgtgccaacagatttcctgcccccatagagcccatagataagcagctacaaaagtaatagctggatgtggtctgtgattgcctgtgtraaacacctgtaaattacattaccggttctccaagagatcctggcttgccatctttgccatcattaccagcaatgccctattaatgaaatgcacaacaaggtataacaaggagtttatagragagattggtacacttgcgtcaatatgaaaactcaaaatagcacctctgcttcattgt

SEQ ID NO: 73518 - DNA, 600 bp, Chicken  19866894354717_2
taatcttctacctaaaaatgcaatccttagatttaatgttacaagacaatcttctttctttgtaatatttgcaatacttgtaaaggtggaatgactacattttggagtatttatagtagttgtaaaagaacccggtttcttttcaagaatcccagagagtgaatcttataaattgctygagacaatatagcccctctggtgttagaaaaagatgtgccaacagatttcctgcccccatagagcccatagataagcagctacaaaagtaatagctggatgtggtctgtgattgcctgtgtraaacacctgtaaattacattaccggttctccaagagatcctggcttgccatctttgccatcattaccagcaatgccctattaatgaaatgcacaacaaggtataacaaggagtttatagragagattggtacacttgcgtcaatatgaaaactcaaaatagcacctctgcttcattgtgattgtatttaattttgcttaatgctccagaaattctgttatttttatagttcagacataaagcttttctgtcacgtttctatagggaaacacttttttgttttttccctattcaatatggc

SEQ ID NO: 73519 - DNA, 600 bp, Chicken  19866894354717_3
tgtaaaagaacccggtttcttttcaagaatcccagagagtgaatcttataaattgctygagacaatatagcccctctggtgttagaaaaagatgtgccaacagatttcctgcccccatagagcccatagataagcagctacaaaagtaatagctggatgtggtctgtgattgcctgtgtraaacacctgtaaattacattaccggttctccaagagatcctggcttgccatctttgccatcattaccagcaatgccctattaatgaaatgcacaacaaggtataacaaggagtttatagragagattggtacacttgcgtcaatatgaaaactcaaaatagcacctctgcttcattgtgattgtatttaattttgcttaatgctccagaaattctgttatttttatagttcagacataaagcttttctgtcacgtttctatagggaaacacttttttgttttttccctattcaatatggcaactctaaggggcttcctccttctcagcaaggcaagcatgtcaacaatcttaaagaaggatctaaagacagctgttataaatcattatcgtgtcattatagtggcattcacttaaactac

SEQ ID NO: 73520 - DNA, 599 bp, Chicken  19866894354730_1
  misc_feature (1)..(72): n is any nucleotide
nnnnnnnnnnnnnnnnnnnnnnnnnnnnnnnnnnnnnnnnnnnnnnnnnnnnnnnnnnnnnnnnnnnnnnnncgtgagttggcgctcaactatcatctgctgagcgatgagctgctgctcgccttgtcttctgaaaaacacgtcaggttagaacacttgcgcattgatgttgttagtgaaaatcctggacagactcagttccacacgattcagaagagcagctgggacgctttcatcaagcattctcctaaagtgaacttagtcatgtactttttcttgtacgaagaagagttcgacccrttctttcgctatgaaatacctgtcactcacctttactttggacgatcggtaagcaaagatgtacttggccgcgttgggatgacgtgtcctcggttggttgagttggtcgtgtgcgccaatggattacggccactggacgaggagctgatccgtatcgcagagcggtgcaagtatttgtcagctgttggcctaggagagtgtgaagtctcttgcagtgcctttgttgagtttgtgaagatgtgtggcggtcgtctctcacagctttctattatggaggaagttctgattcctgaccagaa

SEQ ID NO: 73521 - DNA, 600 bp, Chicken  19866894354733_1
actgcaagaaacctgtgttaatatctctagaatatcctacaaaaaactctaatatcaactttggatggtttcttaacgttgattgcatttcttgcaacctagcacctctctgcagttcttgtttagacgctgtttctggaagttcacctttgggggaagaaaaattgcatagcaacttaggaaataactgacagaattctttgataccggtttaaacagtatcagtgtatctgtatttaaacagtatcttcagtgtactttattttgactattcaattagttaggattacagacaggtgyggagcttatggtttgccagaggtgaagttgagaaaaggagatttaagctctatgaggaggaacaagatgtgatttcttttggaacgggtattttcttagttagtgatgctgcttgacacatcaagtcaacaaagtgcaaggtggagcaagctgctgtttagtagtctgttgtaatccatcagtagtgaagagatgggactgctaactgccattaaactgcgatcccgagactgaaaatcagtggatgtaagatgagtactgatagaatggcacaattaaacggtgactttatgtgctcct

SEQ ID NO: 73522 - DNA, 600 bp, Chicken  19866894354743_1
ctgatttcaagcagtgaaacagcaaacaaaccaaggttactaaattttggctaaccttagatctcttgtcaagacagtcatgaaaactgtgtaggatggaaccaaggcgtccctaaccagcactggttagggcctgagtttccttgtccttgtttgcttcctctccctgtttacctacactgtgccagtgctgtacatgtgttcactcagcagctaattacatcaggttccccatgacagtgactaacaattttgatgcctactgcagacggctttgtgccaacagagatgcccaggagyctaatactgaaatctgttctctcttctgcagcaagactgggcatagcagcatattgcttccagmgctatgtaagtacccacaaaatgctgattgcattctgctggagacaatgtaaagtccaagtgcccagaaaggctgaacaactggtaagcttcacatccacgcctggagctgtgctgggcagtgtggctaggggcagaactgtaggctggggagaagctgagtaaaggctgaaatcgtggtcctctcctgctctagatagattattcttagcaatcacttgtatcatttcctgaaat

SEQ ID NO: 73523 - DNA, 600 bp, Chicken  19866894354743_2
cttgtcaagacagtcatgaaaactgtgtaggatggaaccaaggcgtccctaaccagcactggttagggcctgagtttccttgtccttgtttgcttcctctccctgtttacctacactgtgccagtgctgtacatgtgttcactcagcagctaattacatcaggttccccatgacagtgactaacaattttgatgcctactgcagacggctttgtgccaacagagatgcccaggagyctaatactgaaatctgttctctcttctgcagcaagactgggcatagcagcatattgcttccagmgctatgtaagtacccacaaaatgctgattgcattctgctggagacaatgtaaagtccaagtgcccagaaaggctgaacaactggtaagcttcacatccacgcctggagctgtgctgggcagtgtggctaggggcagaactgtaggctggggagaagctgagtaaaggctgaaatcgtggtcctctcctgctctagatagattattcttagcaatcacttgtatcatttcctgaaattgtgtgctttttagttcttggcacaaagcctcttctgttaagattattttgggtttgggattag

SEQ ID NO: 73524 - DNA, 398 bp, Chicken  19866894354749_1
tgttcaccagcatatagaagtcatcctgacatcaagcgtgcagctgtggggacacactgtatttgagaagaggcaaaatcatcacccttgtgatatttagagcctgaagttcagtaaaaaaatctgttcatgtttgcaaatgtcacatacattttcctgatgcctctccgaccattagttttgtcagtatatttgttgaagggcaaaaataacaaaaaagtcgcaatgggagcactcatatttagcaaaaaatagctatcatcagtcctatcttcacatgattttaatgagatgtcttcrtaagacaagaagcatgactattgcccagcttccccccgtggtcttgttcttgcaaggtcatggggcagtatgtgggcctgaggaggaacatgcaggga

SEQ ID NO: 73525 - DNA, 600 bp, Chicken  19866894354767_1
ttactaaactgttctttggcacaaacctctggcactaaggagagtctcacaagcaatccacgtagtgcatacctaatgaggggaggaatgctggctccctccgttcaataaagagggtgggatgtaatctcttcctatatcagcttggattttaatttaaaatatctcaaggggaaaggctgctaagtaagggacttggtcttaaaagccagtcatgtgctcagtggcaacctggcactcctgatctgctcttaccttcctctgaaattaaatcgtattagagcaggtatcaggagcacrgaggtgaaggagcagcttctgcagatttaaaagactacccatcgaagctcatgttgtttgctttctgtgtctgtggccttcatttttgttacttttttccagcatggagagttgaatgatactgggtagtggtctgatgagatcattcagggccttaggcttttctttagtacagttactataatcagtagcagagaagcrtgggatgcctgtgtgcttctgtctctactagtcctgatgagacaggctactcagttaattcctgacacaccacacacatacagagtgtactcatgcact

SEQ ID NO: 73526 - DNA, 421 bp, Chicken  19866894354767_2
ttaaaagccagtcatgtgctcagtggcaacctggcactcctgatctgctcttaccttcctctgaaattaaatcgtattagagcaggtatcaggagcacrgaggtgaaggagcagcttctgcagatttaaaagactacccatcgaagctcatgttgtttgctttctgtgtctgtggccttcatttttgttacttttttccagcatggagagttgaatgatactgggtagtggtctgatgagatcattcagggccttaggcttttctttagtacagttactataatcagtagcagagaagcrtgggatgcctgtgtgcttctgtctctactagtcctgatgagacaggctactcagttaattcctgacacaccacacacatacagagtgtactcatgcacttctgcgtaccaaacagctgaat

SEQ ID NO: 73527 - DNA, 600 bp, Chicken  19866894354776_1
gctgccacttctagatccatcctaaattaaaattaaaaaagacaaaattggcagatgcctggtgctgctgatgaatcatcaaaggtggacctacagctgtgcatgtttggcaaggaattatttccattttctcttgtgtttactagttagccagtcaggagatgttacagagaaaaagctgagtactgctattaagaatatacttcttgttaatgggttgaagtgcctctgccagcacctttcctcccactcttgcttttctgagaactggtgcattttttacctttcacctcagacagrtttctgttgtctggcygtggttagtcatgtgtgagttcttttgttcttaagattagagcaaatttcayagcgctcattaactctgcagcatgccttctgacttggctgtagattccaggtggggaggaagaagaatgagaacgatgtcattagtgacacttataatgactggcatttgcagcatggcagcaagcagtgacatgactctgctttctcctgacacctttttttgatgagcataaccccagagacattggccagagaaagcaaaatacatcagtagtttgtgtaattgtaaat

SEQ ID NO: 73528 - DNA, 600 bp, Chicken  19866894354776_2
ccatcctaaattaaaattaaaaaagacaaaattggcagatgcctggtgctgctgatgaatcatcaaaggtggacctacagctgtgcatgtttggcaaggaattatttccattttctcttgtgtttactagttagccagtcaggagatgttacagagaaaaagctgagtactgctattaagaatatacttcttgttaatgggttgaagtgcctctgccagcacctttcctcccactcttgcttttctgagaactggtgcattttttacctttcacctcagacagrtttctgttgtctggcygtggttagtcatgtgtgagttcttttgttcttaagattagagcaaatttcayagcgctcattaactctgcagcatgccttctgacttggctgtagattccaggtggggaggaagaagaatgagaacgatgtcattagtgacacttataatgactggcatttgcagcatggcagcaagcagtgacatgactctgctttctcctgacacctttttttgatgagcataaccccagagacattggccagagaaagcaaaatacatcagtagtttgtgtaattgtaaatgaggcaagctggttgt

SEQ ID NO: 73529 - DNA, 600 bp, Chicken  19866894354776_3
tgatgaatcatcaaaggtggacctacagctgtgcatgtttggcaaggaattatttccattttctcttgtgtttactagttagccagtcaggagatgttacagagaaaaagctgagtactgctattaagaatatacttcttgttaatgggttgaagtgcctctgccagcacctttcctcccactcttgcttttctgagaactggtgcattttttacctttcacctcagacagrtttctgttgtctggcygtggttagtcatgtgtgagttcttttgttcttaagattagagcaaatttcayagcgctcattaactctgcagcatgccttctgacttggctgtagattccaggtggggaggaagaagaatgagaacgatgtcattagtgacacttataatgactggcatttgcagcatggcagcaagcagtgacatgactctgctttctcctgacacctttttttgatgagcataaccccagagacattggccagagaaagcaaaatacatcagtagtttgtgtaattgtaaatgaggcaagctggttgttgaggtgacaataaccatcactgcgctgaccagtgaccattatcttgtatat

SEQ ID NO: 73530 - DNA, 600 bp, Chicken  19866894354780_1
acataatcaagttttgcatttttctgtccagaaaaaattctaaactacacatttcagggtttgcacatgcctgaaaatagcgccaagacaccgctgcatttcaaaaaaatctagctccacatggtgacgctgtgcaataatttgatttaaaaaaatcatttgataagttttctccaaagatagagcaaaaactaatgagactaagactacattctgtacaacttcctaatatgaaatctgttattcttcaatagaaatctatatgaaaaattcagcaagtaagcagtctggcaccaatcrctacacaacaaaccctggacttgaagtctagcagattaaaaaaatgtaaaagatagaatacatcatttaagacaatattcattattattattactagaaaacgtgaccaggatttagggaagagatccaattaacaactgtgtagactggcttcctgagaaaagcgaaactgtttcaaataaagaggtagttaaaaaaaagactataaacatgcaaggatgcataaggaagaaaaaaaaaattcataattagaaaatagttctgcaaagtcctggttggaaacatttaaacttagatgca

SEQ ID NO: 73531 - DNA, 600 bp, Chicken  19866894354780_2
atgcagaaagtgattatttcaatcctttatcggctaagaaatatataagggaaaaattatttaccaatcaacattctatgatgatcagataggatcaagccaaataatgatcttacatgcttatactattaaatactaatgtatctacatgctctatgacattttcctacaaatacaaataaaaacaacgcaaaggaaaaaagttgtaacaaatatttttataaagaaagacaagttatttcaacagtgaaactagaaagaaaagtatccacctctcagattaacataaacctgacaagycaaagataattttggtattttgaagcatgaattacaaacaaaatgagggtaaaaatgtgatgacattttcaatattgtcatttatcatttacctggtttaagatcatagtgtataatagggggcttgatctcattgagataccgtagtgcatttactatttgcattacaatggacctagcttccttctctgacatcaatttatgttgcttgagatagaaatccaagtcattgccttcacagtattctaacaccgtgcaaaacctagggcagaatttacagagacaaaattaaatgacata

SEQ ID NO: 73532 - DNA, 599 bp, Chicken  19866894354784_1
  misc_feature (1)..(43): n is any nucleotide
nnnnnnnnnnnnnnnnnnnnnnnnnnnnnnnnnnnnnnnnnnnctctgatttcccacagcagaatattgaatgtttcattttgttatatatagataatttagcattttaaatgcggttgttcagttgaagaatctgctttttttttttctattgcaccactggtctaaattttcccagctcagtgttcattgatcagcgcggacgaggggcgctccaaaacatctgtatttccccacgcacagaggaaggccggggctcaatatctgcatacagacgtggcggggttgagcttccccackcagccaggtgtcatttagaagaattacacggtgagcgccgtgcctgggattgcagcctcccagcagatggaggaacgctcccgttacagtggtaaagagaaaaatacaagttccgatcttcgaaaagcaaaagtaaatacctttggctagcagctgtaaattccactttacagctatgatgttgagaatgtttgtcactttaaaatgaaggtaaaaaaaaattaaacggagagaaaaattaataaaaactgtaatttcaaggtttccaaacggctttttacccatgaatgcaggcaggc

SEQ ID NO: 73533 - DNA, 600 bp, Chicken  19866894354785_1
gctgtcccaggcacattcctgaccagtaccaggtatgaaaatacactgaaatgaaactggtaagaaaagctaatgataaatacaaatcacagaatcccctcttgcaagcatttaaaacttcaaataattgtattttctgatcttaatgatttcggtaccaccgggaagcacctgttgggtttatgtgctgtgttcttcactaccccctctgctgtagcagtacctgcagcacctgggcatgctggtgttgggctggatctgtgctgctgcttctgcacatgcccttccttgccttcctcyccccttggtgtcctgcttctctggatctcccyrtggctggggtaatacctctgcctgattactgctcttttgggggacggacatgcccttccctgaccagcactgacttgaagacctggcagtcaggaagaaaatgtggttcttgctgatgccgtttcagtgcctgggcaacatctaccaaaagtccctctgggctggaacgtgatctgaaagaaccggagtgttttacccggtgctgtagtagatgttgcactatgtccttagtaggaaagctcccgatttccatggagatccttccaa

SEQ ID NO: 73534 - DNA, 600 bp, Chicken  19866894354785_10
tgagtgacacagcctggagcagatgccatgcagcagaaactgcagttatccctctccaagatgctgctgctggagctgctaratggtttgggcttcacagtcwcctacgggttagttctggtggggggaagactgctgggtatacaaagaggtacctgagtgctctaaatgtgacttacccccttaccctgcgttgtgccttggccaaagggcagcaccagggctgtgtggggcagagctgtgcctatagctgtkctggagccctcccagaggtggggagagctctgtgtgacgtggggygatagggatggcttcttgcaatatcgatagctccaggtgggtgtaaggcaggaatggagggcagctccacgcagtgcaggtcgctgtgcrgagcactcctcaggcagggtttcagctccgtgtttgctgccatctgagcccttcctggacagcctctgcagtctgcattaagcagcaccccacaagtgagcatcggtgtcttccccttgttctccaggtcccgtgggtgtcagttctgtggcaagggaacaagaaagatgattcctgtgtctgtcctcgagtccaacagagctgcttctg

SEQ ID NO: 73535 - DNA, 573 bp, Chicken  19866894354785_11
ggcttcacagtcwcctacgggttagttctggtggggggaagactgctgggtatacaaagaggtacctgagtgctctaaatgtgacttacccccttaccctgcgttgtgccttggccaaagggcagcaccagggctgtgtggggcagagctgtgcctatagctgtkctggagccctcccagaggtggggagagctctgtgtgacgtggggygatagggatggcttcttgcaatatcgatagctccaggtgggtgtaaggcaggaatggagggcagctccacgcagtgcaggtcgctgtgcrgagcactcctcaggcagggtttcagctccgtgtttgctgccatctgagcccttcctggacagcctctgcagtctgcattaagcagcaccccacaagtgagcatcggtgtcttccccttgttctccaggtcccgtgggtgtcagttctgtggcaagggaacaagaaagatgattcctgtgtctgtcctcgagtccaacagagctgcttctggttcccctgttgtcatagaaaagaagtccagagctcaagagagggttattttggagttctgtg

SEQ ID NO: 73536 - DNA, 600 bp, Chicken  19866894354785_2
gtatgaaaatacactgaaatgaaactggtaagaaaagctaatgataaatacaaatcacagaatcccctcttgcaagcatttaaaacttcaaataattgtattttctgatcttaatgatttcggtaccaccgggaagcacctgttgggtttatgtgctgtgttcttcactaccccctctgctgtagcagtacctgcagcacctgggcatgctggtgttgggctggatctgtgctgctgcttctgcacatgcccttccttgccttcctcyccccttggtgtcctgcttctctggatctcccyrtggctggggtaatacctctgcctgattactgctcttttgggggacggacatgcccttccctgaccagcactgacttgaagacctggcagtcaggaagaaaatgtggttcttgctgatgccgtttcagtgcctgggcaacatctaccaaaagtccctctgggctggaacgtgatctgaaagaaccggagtgttttacccggtgctgtagtagatgttgcactatgtccttagtaggaaagctcccgatttccatggagatccttccaattcaggcattgaaaccctggcgctttggtgag

SEQ ID NO: 73537 - DNA, 600 bp, Chicken  19866894354785_3
tatgaaaatacactgaaatgaaactggtaagaaaagctaatgataaatacaaatcacagaatcccctcttgcaagcatttaaaacttcaaataattgtattttctgatcttaatgatttcggtaccaccgggaagcacctgttgggtttatgtgctgtgttcttcactaccccctctgctgtagcagtacctgcagcacctgggcatgctggtgttgggctggatctgtgctgctgcttctgcacatgcccttccttgccttcctcyccccttggtgtcctgcttctctggatctcccyrtggctggggtaatacctctgcctgattactgctcttttgggggacggacatgcccttccctgaccagcactgacttgaagacctggcagtcaggaagaaaatgtggttcttgctgatgccgtttcagtgcctgggcaacatctaccaaaagtccctctgggctggaacgtgatctgaaagaaccggagtgttttacccggtgctgtagtagatgttgcactatgtccttagtaggaaagctcccgatttccatggagatccttccaattcaggcattgaaaccctggcgctttggtgagg

SEQ ID NO: 73538 - DNA, 600 bp, Chicken  19866894354785_4
tattgttcaaaaagagggctgtattctgacagctgtcagtgctggagttacgtcctgcatttctggattaaacctcagctggtggtaaagaacagttgtgaaaccaacctcctggagagcactgcctgccaactttggctttccaaccccatttcccacatagtcccacagaacacacagctgggaccattgtaagggtgggctctgtcaggctgcggctccaaggataagaagaggtggggacccagcaattcgagctgtgcatctttgtgtgtctgaatgctgacagcctctgcttgytggcagaacactcygttctgcctcactgcygcgggcacttcgaagggtggtcgggagtggtgggttgtggtgcagaaggctgggagggagctgggcgtttggctgagtgacacagcctggagcagatgccatgcagcagaaactgcagttatccctctccaagatgctgctgctggagctgctaratggtttgggcttcacagtcwcctacgggttagttctggtggggggaagactgctgggtatacaaagaggtacctgagtgctctaaatgtgacttacccccttaccctgcgttgt

SEQ ID NO: 73539 - DNA, 600 bp, Chicken  19866894354785_5
agggctgtattctgacagctgtcagtgctggagttacgtcctgcatttctggattaaacctcagctggtggtaaagaacagttgtgaaaccaacctcctggagagcactgcctgccaactttggctttccaaccccatttcccacatagtcccacagaacacacagctgggaccattgtaagggtgggctctgtcaggctgcggctccaaggataagaagaggtggggacccagcaattcgagctgtgcatctttgtgtgtctgaatgctgacagcctctgcttgytggcagaacactcygttctgcctcactgcygcgggcacttcgaagggtggtcgggagtggtgggttgtggtgcagaaggctgggagggagctgggcgtttggctgagtgacacagcctggagcagatgccatgcagcagaaactgcagttatccctctccaagatgctgctgctggagctgctaratggtttgggcttcacagtcwcctacgggttagttctggtggggggaagactgctgggtatacaaagaggtacctgagtgctctaaatgtgacttacccccttaccctgcgttgtgccttggccaaagg

SEQ ID NO: 73540 - DNA, 600 bp, Chicken  19866894354785_6
agctgtcagtgctggagttacgtcctgcatttctggattaaacctcagctggtggtaaagaacagttgtgaaaccaacctcctggagagcactgcctgccaactttggctttccaaccccatttcccacatagtcccacagaacacacagctgggaccattgtaagggtgggctctgtcaggctgcggctccaaggataagaagaggtggggacccagcaattcgagctgtgcatctttgtgtgtctgaatgctgacagcctctgcttgytggcagaacactcygttctgcctcactgcygcgggcacttcgaagggtggtcgggagtggtgggttgtggtgcagaaggctgggagggagctgggcgtttggctgagtgacacagcctggagcagatgccatgcagcagaaactgcagttatccctctccaagatgctgctgctggagctgctaratggtttgggcttcacagtcwcctacgggttagttctggtggggggaagactgctgggtatacaaagaggtacctgagtgctctaaatgtgacttacccccttaccctgcgttgtgccttggccaaagggcagcaccagggctgt

SEQ ID NO: 73541 - DNA, 600 bp, Chicken  19866894354785_7
accattgtaagggtgggctctgtcaggctgcggctccaaggataagaagaggtggggacccagcaattcgagctgtgcatctttgtgtgtctgaatgctgacagcctctgcttgytggcagaacactcygttctgcctcactgcygcgggcacttcgaagggtggtcgggagtggtgggttgtggtgcagaaggctgggagggagctgggcgtttggctgagtgacacagcctggagcagatgccatgcagcagaaactgcagttatccctctccaagatgctgctgctggagctgctaratggtttgggcttcacagtcwcctacgggttagttctggtggggggaagactgctgggtatacaaagaggtacctgagtgctctaaatgtgacttacccccttaccctgcgttgtgccttggccaaagggcagcaccagggctgtgtggggcagagctgtgcctatagctgtkctggagccctcccagaggtggggagagctctgtgtgacgtggggygatagggatggcttcttgcaatatcgatagctccaggtgggtgtaaggcaggaatggagggcagctccacgcagtgcaggtc

SEQ ID NO: 73542 - DNA, 600 bp, Chicken  19866894354785_8
gtcaggctgcggctccaaggataagaagaggtggggacccagcaattcgagctgtgcatctttgtgtgtctgaatgctgacagcctctgcttgytggcagaacactcygttctgcctcactgcygcgggcacttcgaagggtggtcgggagtggtgggttgtggtgcagaaggctgggagggagctgggcgtttggctgagtgacacagcctggagcagatgccatgcagcagaaactgcagttatccctctccaagatgctgctgctggagctgctaratggtttgggcttcacagtcwcctacgggttagttctggtggggggaagactgctgggtatacaaagaggtacctgagtgctctaaatgtgacttacccccttaccctgcgttgtgccttggccaaagggcagcaccagggctgtgtggggcagagctgtgcctatagctgtkctggagccctcccagaggtggggagagctctgtgtgacgtggggygatagggatggcttcttgcaatatcgatagctccaggtgggtgtaaggcaggaatggagggcagctccacgcagtgcaggtcgctgtgcrgagcactcctcag

SEQ ID NO: 73543 - DNA, 600 bp, Chicken  19866894354785_9
ggtgggttgtggtgcagaaggctgggagggagctgggcgtttggctgagtgacacagcctggagcagatgccatgcagcagaaactgcagttatccctctccaagatgctgctgctggagctgctaratggtttgggcttcacagtcwcctacgggttagttctggtggggggaagactgctgggtatacaaagaggtacctgagtgctctaaatgtgacttacccccttaccctgcgttgtgccttggccaaagggcagcaccagggctgtgtggggcagagctgtgcctatagctgtkctggagccctcccagaggtggggagagctctgtgtgacgtggggygatagggatggcttcttgcaatatcgatagctccaggtgggtgtaaggcaggaatggagggcagctccacgcagtgcaggtcgctgtgcrgagcactcctcaggcagggtttcagctccgtgtttgctgccatctgagcccttcctggacagcctctgcagtctgcattaagcagcaccccacaagtgagcatcggtgtcttccccttgttctccaggtcccgtgggtgtcagttctgtggcaagggaacaagaa

SEQ ID NO: 73544 - DNA, 600 bp, Chicken  19866894354790_1
acttatgatggcttaccctgtgtcagccaagggctatcatcttccacatgggccaccccagtgacttgatgtgtcccagtggctctccatgtgatgataagaagatcttgtaccgaagcagtaggtgtgagtcaacggctgcaggtcatggtggcaagggaaggaggcagctctgatcagcaggacaaccagcagtcaaagtgtgccatcacccttcatttggcctgtgtcttcggtggtgcaatgggagaacaattctataaggtgtggtatgaaagagaaaaccactgtaagagtgaraagaaagtgcaaaaataatcagaggaatgagggaacayatcctgtggtgtagggtcgtcagcattacaggaggaacaaaaatatcyctggctgtataaaggatgcactgggtaagagggaaatcagccagaagcagctaggggtgggggatgtgggggacatgtgggaacctggcacagggaagggacaagaggtgagggcaggagggggatgtgtgggcacaacccacaaccagagaccagtcagagatgctagagagagtataggccttgggtgatgaaaccgagactctttcacttg

SEQ ID NO: 73545 - DNA, 600 bp, Chicken  19866894354790_2
atcttccacatgggccaccccagtgacttgatgtgtcccagtggctctccatgtgatgataagaagatcttgtaccgaagcagtaggtgtgagtcaacggctgcaggtcatggtggcaagggaaggaggcagctctgatcagcaggacaaccagcagtcaaagtgtgccatcacccttcatttggcctgtgtcttcggtggtgcaatgggagaacaattctataaggtgtggtatgaaagagaaaaccactgtaagagtgaraagaaagtgcaaaaataatcagaggaatgagggaacayatcctgtggtgtagggtcgtcagcattacaggaggaacaaaaatatcyctggctgtataaaggatgcactgggtaagagggaaatcagccagaagcagctaggggtgggggatgtgggggacatgtgggaacctggcacagggaagggacaagaggtgagggcaggagggggatgtgtgggcacaacccacaaccagagaccagtcagagatgctagagagagtataggccttgggtgatgaaaccgagactctttcacttggagatgctcctttgtaaaaagcactataaatgagactt

SEQ ID NO: 73546 - DNA, 600 bp, Chicken  19866894354790_3
ccatgtgatgataagaagatcttgtaccgaagcagtaggtgtgagtcaacggctgcaggtcatggtggcaagggaaggaggcagctctgatcagcaggacaaccagcagtcaaagtgtgccatcacccttcatttggcctgtgtcttcggtggtgcaatgggagaacaattctataaggtgtggtatgaaagagaaaaccactgtaagagtgaraagaaagtgcaaaaataatcagaggaatgagggaacayatcctgtggtgtagggtcgtcagcattacaggaggaacaaaaatatcyctggctgtataaaggatgcactgggtaagagggaaatcagccagaagcagctaggggtgggggatgtgggggacatgtgggaacctggcacagggaagggacaagaggtgagggcaggagggggatgtgtgggcacaacccacaaccagagaccagtcagagatgctagagagagtataggccttgggtgatgaaaccgagactctttcacttggagatgctcctttgtaaaaagcactataaatgagacttgagttatctttgaggttcatgaaaggatttttaatgaaactatttgtg

SEQ ID NO: 73547 - DNA, 600 bp, Chicken  19866894354791_1
gactaaataatctttaaggtcttttccaatctgagtgtttatatgattctatgattaggcccagtgaagtcatgcagatattaacattgcagctgatttttgctttataaaatctgattaaaatggcataacgattatcttggaagttagtaattaaagtttagaaacagaaactacagaagtaaaaattgcaaaaggaaagtggaagggaagagcaagctttagaatgctcattcaaattcttcacaaatatgaaattcttcatttttttcttactaaactgttctctcttttatcaarscaggtttaataaatagaaatcttggtacatttttagccttgtggtgtgcattagagtattattcttttatttctggcattctttctatttacttgctctgtacagccactgaaaggaacatgaaaaattcaggaatctcaaaaatgtatataaatagattgctccaaatctaatgtctcttattcattttcatggaaatacaacagatacaaagagcacattaacactattcaatactgagtaaattctctgctacaaaacactatttttcagcatagtcaccaccattagtcattcat

SEQ ID NO: 73548 - DNA, 600 bp, Chicken  19866894354791_2
actaaataatctttaaggtcttttccaatctgagtgtttatatgattctatgattaggcccagtgaagtcatgcagatattaacattgcagctgatttttgctttataaaatctgattaaaatggcataacgattatcttggaagttagtaattaaagtttagaaacagaaactacagaagtaaaaattgcaaaaggaaagtggaagggaagagcaagctttagaatgctcattcaaattcttcacaaatatgaaattcttcatttttttcttactaaactgttctctcttttatcaarscaggtttaataaatagaaatcttggtacatttttagccttgtggtgtgcattagagtattattcttttatttctggcattctttctatttacttgctctgtacagccactgaaaggaacatgaaaaattcaggaatctcaaaaatgtatataaatagattgctccaaatctaatgtctcttattcattttcatggaaatacaacagatacaaagagcacattaacactattcaatactgagtaaattctctgctacaaaacactatttttcagcatagtcaccaccattagtcattcatt

SEQ ID NO: 73549 - DNA, 599 bp, Chicken  19866894354795_1
  misc_feature (1)..(35): n is any nucleotide
nnnnnnnnnnnnnnnnnnnnnnnnnnnnnnnnnnngaagcttctatagctcctgcatgatacacttagaatgcttggatcaaacaaggaaaaaacaaaacaaaacgtgccaacccaaagcactcagatctctgggacaacaaccacaaactcatttttcttcctctgttcatgtcagacttctaagacttcaaaattcttttaagaattggaaactcaccaattgtctttaccactcagcacaacataccctacgctgggctacgtgttaaacaaacactatcccaagccctcccaccaygacatgtggatgacaccacctcccagcctgccaacttgctgctctggcacacaggcaccagcctgcagcacaagctgccttcagtcccattgagttggaatcacattttcactgtcattcagtcacctccggtgcttacctgctgcagtttcagaagggtcaccggatgccccacacacacaggggagtccagtttaacagcactgcaggaccttgcgagcacaggtctcggatgcgcagcagggtgagcggtttgctggggatccactgatggtgagggtgaggcatttggagtaacc

SEQ ID NO: 73550 - DNA, 599 bp, Chicken  19866894354797_1
  misc_feature (1)..(55): n is any nucleotide
nnnnnnnnnnnnnnnnnnnnnnnnnnnnnnnnnnnnnnnnnnnnnnnnnnnnnnnctcctctcttgctaattcacagcatcccatagtatttatttttttctcttcctctgttcaatactttattttctttttaatattttcagtatgttttgttaactcgttaatgatgctgttagaacaacaacaacaacaacaacaaaacaaacaaacaaacaaaaaaacctctcagctactttaaatggatttttttaaatcaccactggctcaataataggccagcctatgtgggattcattacmtaaatacctaagcttgagctagtaccttcatgcctatgratgtctttttagtaccaatgaggaggagtagaagcctccagcagaaatagcagaccagcatattgtcagcaccccctcgtctgtacaaactggcttgctcctgccatcactgcataaggtaacgcccacaaaccaaattaracaggattgatattgtgacaaatggtactgcagacaggaaacttttatgacagcattgcaaaaactaggacaaaactgttcaagtcattgattggctttgtctgaaactaagtgcaaam

SEQ ID NO: 73551 - DNA, 599 bp, Chicken  19866894354797_2
  misc_feature (1)..(16): n is any nucleotide
nnnnnnnnnnnnnnnnctcctctcttgctaattcacagcatcccatagtatttatttttttctcttcctctgttcaatactttattttctttttaatattttcagtatgttttgttaactcgttaatgatgctgttagaacaacaacaacaacaacaacaaaacaaacaaacaaacaaaaaaacctctcagctactttaaatggatttttttaaatcaccactggctcaataataggccagcctatgtgggattcattacmtaaatacctaagcttgagctagtaccttcatgcctatgratgtctttttagtaccaatgaggaggagtagaagcctccagcagaaatagcagaccagcatattgtcagcaccccctcgtctgtacaaactggcttgctcctgccatcactgcataaggtaacgcccacaaaccaaattaracaggattgatattgtgacaaatggtactgcagacaggaaacttttatgacagcattgcaaaaactaggacaaaactgttcaagtcattgattggctttgtctgaaactaagtgcaaamccttattgtaaaaatgttctttggcatgtcaatatggaa

SEQ ID NO: 73552 - DNA, 600 bp, Chicken  19866894354797_3
aacaacaacaacaacaacaaaacaaacaaacaaacaaaaaaacctctcagctactttaaatggatttttttaaatcaccactggctcaataataggccagcctatgtgggattcattacmtaaatacctaagcttgagctagtaccttcatgcctatgratgtctttttagtaccaatgaggaggagtagaagcctccagcagaaatagcagaccagcatattgtcagcaccccctcgtctgtacaaactggcttgctcctgccatcactgcataaggtaacgcccacaaaccaaattaracaggattgatattgtgacaaatggtactgcagacaggaaacttttatgacagcattgcaaaaactaggacaaaactgttcaagtcattgattggctttgtctgaaactaagtgcaaamccttattgtaaaaatgttctttggcatgtcaatatggaactttctatatacaagtattaggctgttaactccttgtcttattgctacaaaccactgagaaaagcctggctcatccacttgcctcccacctccctttatgtatttctaaacattaatcagatcttctctcagccttctcttc

SEQ ID NO: 73553 - DNA, 573 bp, Chicken  19866894354797_4
mtaaatacctaagcttgagctagtaccttcatgcctatgratgtctttttagtaccaatgaggaggagtagaagcctccagcagaaatagcagaccagcatattgtcagcaccccctcgtctgtacaaactggcttgctcctgccatcactgcataaggtaacgcccacaaaccaaattaracaggattgatattgtgacaaatggtactgcagacaggaaacttttatgacagcattgcaaaaactaggacaaaactgttcaagtcattgattggctttgtctgaaactaagtgcaaamccttattgtaaaaatgttctttggcatgtcaatatggaactttctatatacaagtattaggctgttaactccttgtcttattgctacaaaccactgagaaaagcctggctcatccacttgcctcccacctccctttatgtatttctaaacattaatcagatcttctctcagccttctcttctccaggctaaacggacccaggttactcagtctttcctcatatgaaaagaagtttcaggcccttaatcatctttctgaccctctgctgggctt

SEQ ID NO: 73554 - DNA, 600 bp, Chicken  19866894354800_1
gtctgcagccagacgtgctgaccatggtttctaaaaagcgtcgcctgcttcttctgattgttggcctccttctgaatcttgtcctttatcctggtttataatagcagggtttactcattagctctgtttgtcagttaagctcatctgcaggtgaaaacctgcatatatgtcgcagtgaagttctaaggtttgctgaattttcaggcacctgcctaaacttccttaacttatgaataaggataggttcaagtacatgcttgcagctgcccctcacctacgtgcattcaactcaggctgaakcgctgtgctgcactaagaaggaaacacagctgggacacctcataggtcttccccaaagcactgcaygctctctgaagaggttcagaagaagctttcagctttgcagacgccgtatctctgaggcactgacctcctggtagtggccttgcactaagtgttgcacttggctggagtcctcctcagtaatttggcattttagtaacacgcagcagctctccttgcagcagtccatcagagctaatcagcctggctgttctccatctctcactgactggcagtttcacaaggaaggttagtaga

SEQ ID NO: 73555 - DNA, 600 bp, Chicken  19866894354800_2
tccttctgaatcttgtcctttatcctggtttataatagcagggtttactcattagctctgtttgtcagttaagctcatctgcaggtgaaaacctgcatatatgtcgcagtgaagttctaaggtttgctgaattttcaggcacctgcctaaacttccttaacttatgaataaggataggttcaagtacatgcttgcagctgcccctcacctacgtgcattcaactcaggctgaakcgctgtgctgcactaagaaggaaacacagctgggacacctcataggtcttccccaaagcactgcaygctctctgaagaggttcagaagaagctttcagctttgcagacgccgtatctctgaggcactgacctcctggtagtggccttgcactaagtgttgcacttggctggagtcctcctcagtaatttggcattttagtaacacgcagcagctctccttgcagcagtccatcagagctaatcagcctggctgttctccatctctcactgactggcagtttcacaaggaaggttagtagatggtaaccacttaaattgaagaacgtgttaagtaacgacagctgtaacttgggaagtgcctcaaag

SEQ ID NO: 73556 - DNA, 600 bp, Chicken  19866894354803_1
gttggaccatttccttgcttttggaaagggtcagcaatcatggctcaggagagcacagcacaggaacagcatgtttcctaacagctgctgatatctcaccagctggccaacaagcaggtcaaagagcaaagccttatttggaggagaggtctgggctgcagcggccattttgtcatctatagaggttggaccatgatctgacagcccgtgttgtgggattttcctctttataacccactttttggttcgatactgtcatatgtagtggttcttagtcttattaggatggatggaaagaayagggtggatagcaacctcctgagccccactcttgtacctggctttgccctgtgcatagagctgtccccagttgcacttaytgcaaatacatgtatgtgtgagtccccagcattccaaccacytgtgcactgctggctacagaaagcagggcacctgacccagggctccccgcctggattttgggttgatctttgacctcagtaacacrtgatggcatacatacagacaatatacattcagatgagcaaattgcacagcacttcaatttttggtgtgggagctgcacgtgtctgtagggat

SEQ ID NO: 73557 - DNA, 600 bp, Chicken  19866894354803_2
acagctgctgatatctcaccagctggccaacaagcaggtcaaagagcaaagccttatttggaggagaggtctgggctgcagcggccattttgtcatctatagaggttggaccatgatctgacagcccgtgttgtgggattttcctctttataacccactttttggttcgatactgtcatatgtagtggttcttagtcttattaggatggatggaaagaayagggtggatagcaacctcctgagccccactcttgtacctggctttgccctgtgcatagagctgtccccagttgcacttaytgcaaatacatgtatgtgtgagtccccagcattccaaccacytgtgcactgctggctacagaaagcagggcacctgacccagggctccccgcctggattttgggttgatctttgacctcagtaacacrtgatggcatacatacagacaatatacattcagatgagcaaattgcacagcacttcaatttttggtgtgggagctgcacgtgtctgtagggatcctcactgtcctacccattgcagttgctgacattacttgcaggagcagcctgcagtaaggaacagacctttgatggggaa

SEQ ID NO: 73558 - DNA, 600 bp, Chicken  19866894354803_3
agagcaaagccttatttggaggagaggtctgggctgcagcggccattttgtcatctatagaggttggaccatgatctgacagcccgtgttgtgggattttcctctttataacccactttttggttcgatactgtcatatgtagtggttcttagtcttattaggatggatggaaagaayagggtggatagcaacctcctgagccccactcttgtacctggctttgccctgtgcatagagctgtccccagttgcacttaytgcaaatacatgtatgtgtgagtccccagcattccaaccacytgtgcactgctggctacagaaagcagggcacctgacccagggctccccgcctggattttgggttgatctttgacctcagtaacacrtgatggcatacatacagacaatatacattcagatgagcaaattgcacagcacttcaatttttggtgtgggagctgcacgtgtctgtagggatcctcactgtcctacccattgcagttgctgacattacttgcaggagcagcctgcagtaaggaacagacctttgatggggaattgctggtgctgatttgtacccatttcagtcaccttcttgag

SEQ ID NO: 73559 - DNA, 600 bp, Chicken  19866894354803_4
tgttgtgggattttcctctttataacccactttttggttcgatactgtcatatgtagtggttcttagtcttattaggatggatggaaagaayagggtggatagcaacctcctgagccccactcttgtacctggctttgccctgtgcatagagctgtccccagttgcacttaytgcaaatacatgtatgtgtgagtccccagcattccaaccacytgtgcactgctggctacagaaagcagggcacctgacccagggctccccgcctggattttgggttgatctttgacctcagtaacacrtgatggcatacatacagacaatatacattcagatgagcaaattgcacagcacttcaatttttggtgtgggagctgcacgtgtctgtagggatcctcactgtcctacccattgcagttgctgacattacttgcaggagcagcctgcagtaaggaacagacctttgatggggaattgctggtgctgatttgtacccatttcagtcaccttcttgagtgctttaaaacagtgttatgtttaattttgttttcatagcaggtagctttgccatgtctctggagtgcagtgcatttcttcattat

SEQ ID NO: 73560 - DNA, 600 bp, Chicken  19866894354803_5
ggtgtgggagctgcacgtgtctgtagggatcctcactgtcctacccattgcagttgctgacattacttgcaggagcagcctgcagtaaggaacagacctttgatggggaattgctggtgctgatttgtacccatttcagtcaccttcttgagtgctttaaaacagtgttatgtttaattttgttttcatagcaggtagctttgccatgtctctggagtgcagtgcatttcttcattatttcatgcctagattttcctctaactccagtacattttatgaaatccagttagcaggtgaacrggcagtccttgggcatgaatctstttctgttaacatcctacaattcatctttctgtgaagtgttacgagtgcttcccatttcctctgctgtaggatttcactacatgtggatagtagaacratgcatggcacagaatctgtcccatacgtatcactggtttgtccagtgctgcccattggggaacctggctctggytctctcagtgcctgtcttrcagccctgcctttcacagccttggaattcttttggaggtgaccagattaatgagactaacactttctttggacagatattttttc

SEQ ID NO: 73561 - DNA, 600 bp, Chicken  19866894354803_6
tagggatcctcactgtcctacccattgcagttgctgacattacttgcaggagcagcctgcagtaaggaacagacctttgatggggaattgctggtgctgatttgtacccatttcagtcaccttcttgagtgctttaaaacagtgttatgtttaattttgttttcatagcaggtagctttgccatgtctctggagtgcagtgcatttcttcattatttcatgcctagattttcctctaactccagtacattttatgaaatccagttagcaggtgaacrggcagtccttgggcatgaatctstttctgttaacatcctacaattcatctttctgtgaagtgttacgagtgcttcccatttcctctgctgtaggatttcactacatgtggatagtagaacratgcatggcacagaatctgtcccatacgtatcactggtttgtccagtgctgcccattggggaacctggctctggytctctcagtgcctgtcttrcagccctgcctttcacagccttggaattcttttggaggtgaccagattaatgagactaacactttctttggacagatattttttcttaactatagaaacactgcttac

SEQ ID NO: 73562 - DNA, 600 bp, Chicken  19866894354803_7
gatttgtacccatttcagtcaccttcttgagtgctttaaaacagtgttatgtttaattttgttttcatagcaggtagctttgccatgtctctggagtgcagtgcatttcttcattatttcatgcctagattttcctctaactccagtacattttatgaaatccagttagcaggtgaacrggcagtccttgggcatgaatctstttctgttaacatcctacaattcatctttctgtgaagtgttacgagtgcttcccatttcctctgctgtaggatttcactacatgtggatagtagaacratgcatggcacagaatctgtcccatacgtatcactggtttgtccagtgctgcccattggggaacctggctctggytctctcagtgcctgtcttrcagccctgcctttcacagccttggaattcttttggaggtgaccagattaatgagactaacactttctttggacagatattttttcttaactatagaaacactgcttacatcaagacctaattacactgtccctacttctgtaccaaaaaccagttctttgggggctgtctttttaatagaatcatttattttacctactttaaaca

SEQ ID NO: 73563 - DNA, 544 bp, Chicken  19866894354803_8
agctttgccatgtctctggagtgcagtgcatttcttcattatttcatgcctagattttcctctaactccagtacattttatgaaatccagttagcaggtgaacrggcagtccttgggcatgaatctstttctgttaacatcctacaattcatctttctgtgaagtgttacgagtgcttcccatttcctctgctgtaggatttcactacatgtggatagtagaacratgcatggcacagaatctgtcccatacgtatcactggtttgtccagtgctgcccattggggaacctggctctggytctctcagtgcctgtcttrcagccctgcctttcacagccttggaattcttttggaggtgaccagattaatgagactaacactttctttggacagatattttttcttaactatagaaacactgcttacatcaagacctaattacactgtccctacttctgtaccaaaaaccagttctttgggggctgtctttttaatagaatcatttattttacctactttaaacaagctgttacgaaacctggg

SEQ ID NO: 73564 - DNA, 525 bp, Chicken  19866894354803_9
agtgcagtgcatttcttcattatttcatgcctagattttcctctaactccagtacattttatgaaatccagttagcaggtgaacrggcagtccttgggcatgaatctstttctgttaacatcctacaattcatctttctgtgaagtgttacgagtgcttcccatttcctctgctgtaggatttcactacatgtggatagtagaacratgcatggcacagaatctgtcccatacgtatcactggtttgtccagtgctgcccattggggaacctggctctggytctctcagtgcctgtcttrcagccctgcctttcacagccttggaattcttttggaggtgaccagattaatgagactaacactttctttggacagatattttttcttaactatagaaacactgcttacatcaagacctaattacactgtccctacttctgtaccaaaaaccagttctttgggggctgtctttttaatagaatcatttattttacctactttaaacaagctgttacgaaacctggg

SEQ ID NO: 73565 - DNA, 599 bp, Chicken  19866894354807_1
  misc_feature (1)..(44): n is any nucleotide
nnnnnnnnnnnnnnnnnnnnnnnnnnnnnnnnnnnnnnnnnnnntttgttgtcagaactaaagtgttttgaagggagggcaggccagagaaaaagcaaacgaataacctatgaaacagcagacagagcatccttttcaaaacagtgtgatagaactgggagccttaaatgtagcacaggactgaagtacaagtgtctttttaaaagatgagaagttaagaatgggtcaggtactgctgtcacaggagggtgatgctgtactggctgtgctgtgacccggagccctttgcctgatacagcwtagtgcccactattgctttcctttccgccctctctttttcactcctttttgtcaggaccctccttagtgatcagaagctgatctcttggaggaagcccccatccactttgaaagttcccygctgagygcagccaggcacagaatgagsatgcaacaagccttcctgctggagggcaggatcagtagacgaggcagtgcagaacacctargggaagataggtagtctcctgttgttgctggctctgaaaattgctgccctcttttctagctgcgttaccattgaactacctcagagtttt

SEQ ID NO: 73566 - DNA, 600 bp, Chicken  19866894354807_2
gacagagcatccttttcaaaacagtgtgatagaactgggagccttaaatgtagcacaggactgaagtacaagtgtctttttaaaagatgagaagttaagaatgggtcaggtactgctgtcacaggagggtgatgctgtactggctgtgctgtgacccggagccctttgcctgatacagcwtagtgcccactattgctttcctttccgccctctctttttcactcctttttgtcaggaccctccttagtgatcagaagctgatctcttggaggaagcccccatccactttgaaagttcccygctgagygcagccaggcacagaatgagsatgcaacaagccttcctgctggagggcaggatcagtagacgaggcagtgcagaacacctargggaagataggtagtctcctgttgttgctggctctgaaaattgctgccctcttttctagctgcgttaccattgaactacctcagagttttctgtggtttagtacctctgtgctttcccaycttctctttccctttctctagtgayccagcagctcccttctcacagcagtagctctcaagatgggtagctcttatttatcttccctgtttg

SEQ ID NO: 73567 - DNA, 600 bp, Chicken  19866894354807_3
catccttttcaaaacagtgtgatagaactgggagccttaaatgtagcacaggactgaagtacaagtgtctttttaaaagatgagaagttaagaatgggtcaggtactgctgtcacaggagggtgatgctgtactggctgtgctgtgacccggagccctttgcctgatacagcwtagtgcccactattgctttcctttccgccctctctttttcactcctttttgtcaggaccctccttagtgatcagaagctgatctcttggaggaagcccccatccactttgaaagttcccygctgagygcagccaggcacagaatgagsatgcaacaagccttcctgctggagggcaggatcagtagacgaggcagtgcagaacacctargggaagataggtagtctcctgttgttgctggctctgaaaattgctgccctcttttctagctgcgttaccattgaactacctcagagttttctgtggtttagtacctctgtgctttcccaycttctctttccctttctctagtgayccagcagctcccttctcacagcagtagctctcaagatgggtagctcttatttatcttccctgtttgtgacctt

SEQ ID NO: 73568 - DNA, 600 bp, Chicken  19866894354807_4
atagaactgggagccttaaatgtagcacaggactgaagtacaagtgtctttttaaaagatgagaagttaagaatgggtcaggtactgctgtcacaggagggtgatgctgtactggctgtgctgtgacccggagccctttgcctgatacagcwtagtgcccactattgctttcctttccgccctctctttttcactcctttttgtcaggaccctccttagtgatcagaagctgatctcttggaggaagcccccatccactttgaaagttcccygctgagygcagccaggcacagaatgagsatgcaacaagccttcctgctggagggcaggatcagtagacgaggcagtgcagaacacctargggaagataggtagtctcctgttgttgctggctctgaaaattgctgccctcttttctagctgcgttaccattgaactacctcagagttttctgtggtttagtacctctgtgctttcccaycttctctttccctttctctagtgayccagcagctcccttctcacagcagtagctctcaagatgggtagctcttatttatcttccctgtttgtgacctttaagcagcaagaagcacccat

SEQ ID NO: 73569 - DNA, 600 bp, Chicken  19866894354807_5
agaagttaagaatgggtcaggtactgctgtcacaggagggtgatgctgtactggctgtgctgtgacccggagccctttgcctgatacagcwtagtgcccactattgctttcctttccgccctctctttttcactcctttttgtcaggaccctccttagtgatcagaagctgatctcttggaggaagcccccatccactttgaaagttcccygctgagygcagccaggcacagaatgagsatgcaacaagccttcctgctggagggcaggatcagtagacgaggcagtgcagaacacctargggaagataggtagtctcctgttgttgctggctctgaaaattgctgccctcttttctagctgcgttaccattgaactacctcagagttttctgtggtttagtacctctgtgctttcccaycttctctttccctttctctagtgayccagcagctcccttctcacagcagtagctctcaagatgggtagctcttatttatcttccctgtttgtgacctttaagcagcaagaagcacccataaagagaacaattcaagcataagcactggggcctccatagtgctatgtggagacatttgca

SEQ ID NO: 73570 - DNA, 600 bp, Chicken  19866894354807_6
ctctctttttcactcctttttgtcaggaccctccttagtgatcagaagctgatctcttggaggaagcccccatccactttgaaagttcccygctgagygcagccaggcacagaatgagsatgcaacaagccttcctgctggagggcaggatcagtagacgaggcagtgcagaacacctargggaagataggtagtctcctgttgttgctggctctgaaaattgctgccctcttttctagctgcgttaccattgaactacctcagagttttctgtggtttagtacctctgtgctttcccaycttctctttccctttctctagtgayccagcagctcccttctcacagcagtagctctcaagatgggtagctcttatttatcttccctgtttgtgacctttaagcagcaagaagcacccataaagagaacaattcaagcataagcactggggcctccatagtgctatgtggagacatttgcagaractggagagctgaacttgtggtagacttgagcatgacctttattgctaactggggccctgggtacctgtgttcataggcgtgtgtgcctggctgaagcttttctcacggctgatatc

SEQ ID NO: 73571 - DNA, 600 bp, Chicken  19866894354807_7
ggaccctccttagtgatcagaagctgatctcttggaggaagcccccatccactttgaaagttcccygctgagygcagccaggcacagaatgagsatgcaacaagccttcctgctggagggcaggatcagtagacgaggcagtgcagaacacctargggaagataggtagtctcctgttgttgctggctctgaaaattgctgccctcttttctagctgcgttaccattgaactacctcagagttttctgtggtttagtacctctgtgctttcccaycttctctttccctttctctagtgayccagcagctcccttctcacagcagtagctctcaagatgggtagctcttatttatcttccctgtttgtgacctttaagcagcaagaagcacccataaagagaacaattcaagcataagcactggggcctccatagtgctatgtggagacatttgcagaractggagagctgaacttgtggtagacttgagcatgacctttattgctaactggggccctgggtacctgtgttcataggcgtgtgtgcctggctgaagcttttctcacggctgatatcatcctgagtacactgcagaacatct

SEQ ID NO: 73572 - DNA, 600 bp, Chicken  19866894354807_8
aagataggtagtctcctgttgttgctggctctgaaaattgctgccctcttttctagctgcgttaccattgaactacctcagagttttctgtggtttagtacctctgtgctttcccaycttctctttccctttctctagtgayccagcagctcccttctcacagcagtagctctcaagatgggtagctcttatttatcttccctgtttgtgacctttaagcagcaagaagcacccataaagagaacaattcaagcataagcactggggcctccatagtgctatgtggagacatttgcagaractggagagctgaacttgtggtagacttgagcatgacctttattgctaactggggccctgggtacctgtgttcataggcgtgtgtgcctggctgaagcttttctcacggctgatatcatcctgagtacactgcagaacatctccgagggactcgtagtatatccaaaggtaaataattagatagcatatgcggagttgcatccttgatcgtactgcaactgtgccaaaagggaaggggggtgggggagaaggagcagtaaatcttcccaaagattgtatttctatctgtttgttcagttt

SEQ ID NO: 73573 - DNA, 599 bp, Chicken  19866894354809_1
  misc_feature (1)..(9): n is any nucleotide
nnnnnnnnntagatccagtgctgtctgagagtgtaaaagtacacaccaaattctgtatttcatttctttccacatatggtaaaacagcctttgaaaaagccaacttacaaaacagctgatgaaatatccgatgactttatttcatatctgtgtgtagggtgctgcacatgcaatgcttattcagctgaaatcagttctaactgggttagcatcactagtcaacctgattgttacattatgtacaaacattccatacttgctctgtactcattttctttaatgcctaaataaaactcatawtatgtagtctattagatrttatgtgcaatgactagcgttgtaaactagctttcccacccacacatgcctatttatggatatcatttcccattacaaacacaagaggagggtaaacatggagaaaataaattttgtgaaagtagatcctggctacacacctgagaagaaggttacagttagcttaggaatttcttgatttttttgtttggtgggtttttgttatttttctttttggctgcaaattcactgaagttcaaatctgtcctaagaaaggttgatggagtggggcttgtttagct

SEQ ID NO: 73574 - DNA, 600 bp, Chicken  19866894354809_2
tgctgtctgagagtgtaaaagtacacaccaaattctgtatttcatttctttccacatatggtaaaacagcctttgaaaaagccaacttacaaaacagctgatgaaatatccgatgactttatttcatatctgtgtgtagggtgctgcacatgcaatgcttattcagctgaaatcagttctaactgggttagcatcactagtcaacctgattgttacattatgtacaaacattccatacttgctctgtactcattttctttaatgcctaaataaaactcatawtatgtagtctattagatrttatgtgcaatgactagcgttgtaaactagctttcccacccacacatgcctatttatggatatcatttcccattacaaacacaagaggagggtaaacatggagaaaataaattttgtgaaagtagatcctggctacacacctgagaagaaggttacagttagcttaggaatttcttgatttttttgtttggtgggtttttgttatttttctttttggctgcaaattcactgaagttcaaatctgtcctaagaaaggttgatggagtggggcttgtttagcttgtagaaggctccaaggag

SEQ ID NO: 73575 - DNA, 599 bp, Chicken  19866894354815_1
  misc_feature (1)..(4): n is any nucleotide
nnnntgactcgtccctcttctcgtctcgccgtgttccctgtcggatcggctcgctactgctgctcccgactgcacacaaggcttcagtattagcgtaaggcctttggctctcggacaatctttctctcaattatttttgatttatattgtattactgtgtgttatcttacattccgatactatatttagtaaattagtttgtttctcctcagatcgttgccgctgtttttaattattttggggtccctgtttcccttcctggaggtgcagattttgtgaaatccctctgccccactagtygcggaaccgggctggaccagcccttaaaccgttgacacttctggatactgaattctctctgaggttcctacttcctacccttccaatgtggttgggattggctagcaggtctgaaagtcatgggctgctttttgtaggtcaaagatcacatagyggtgtcttcttggggagtcaataatgaaagcaaatatgactgaagaaggactgaattaagttaatggcagaatgtttatctccattcttcaagctttgagggaaaaaaagtcacagaaatgaaaaatagttcatctctattgcat

SEQ ID NO: 73576 - DNA, 600 bp, Chicken  19866894354815_2
ctgtgtgttatcttacattccgatactatatttagtaaattagtttgtttctcctcagatcgttgccgctgtttttaattattttggggtccctgtttcccttcctggaggtgcagattttgtgaaatccctctgccccactagtygcggaaccgggctggaccagcccttaaaccgttgacacttctggatactgaattctctctgaggttcctacttcctacccttccaatgtggttgggattggctagcaggtctgaaagtcatgggctgctttttgtaggtcaaagatcacatagyggtgtcttcttggggagtcaataatgaaagcaaatatgactgaagaaggactgaattaagttaatggcagaatgtttatctccattcttcaagctttgagggaaaaaaagtcacagaaatgaaaaatagttcatctctattgcattagttgtattctcaagcaataacactttggtctttattctctgagagggtcagtagctttacctacccataatagatttacgtagagatatatgctatatatactatacatatagtttatattttttatcatcaaatctattatatatctatgta

SEQ ID NO: 73577 - DNA, 600 bp, Chicken  19866894354819_1
cacggaagtgtttgggagcaatttgtcttctccaacttctgaatgcagtaattacctgcctctaagtatacagaacagatgagatcattatttgtttgtaaggcagccaggacaccagacttgagcccagaattttactgaacagtaaaaatgtatgcaatggatgcttactgaaggggtttcgtatatgtatttatacagacatttttgttttcatttgtaggtataaaacaactacttaatattaacttggtgtacaccttgttattgcagtgtttgatgtaaaattatggatctctyggagccagcagctcagctccatcttgcacgtgcttttctccctccaagtcacaccacctcagcagtagattttaaacagatttcaatatgaccaggatttcactgaatctctaatacttgaagggaattcctgagtgctaagaattaaggtcgctgtaacatgaaactagtgcagttaataatacagcctttgttttgctcaagttttactaatgaaggcctgtgtctgctgattgcttgaaaacaattttcactgtcaggagaataaaatcaaaataatcacggggagtataagaatta

SEQ ID NO: 73578 - DNA, 600 bp, Chicken  19866894354825_1
tttacagcaacccccttgccttttttctgtgtcattgaccaacttgattctacacaataaaggtgaccggaatttggaggtgtattcattacacatcatttctcacttgttttgaagccattatttggttctagtcaagaaaactaccatttgaaattaaatagtagcatatattgtattgcaatctggaaaaaaatggtcatgataacactgttcacacagtttcattctgtaaactgcttttttttttttttttagcacagttatttaactacacttttcctggtgccaatgttgagktgagcagaagtgaagctggagtgagtatgtttaatgagactattaatcaaggagttccaaggccatattcaatgagtctgcagacagagactgtactgtctgagaaatactctttgtcctataaaggaaaaagtgtcaggtagtccacataataatttgtgatctacagtattttaacttctgaatagcgttgtgttataatgctctagaagatagacacaaatgatcttctgaaatgaaagagtgacagacagagtccatagtgcctgtgaaatgtaatcttaaacttgactatgtgca

SEQ ID NO: 73579 - DNA, 600 bp, Chicken  19866894354826_1
ctttgcctatctactaaggaaataatgtactacagaattcttaaaagaccacttatgacccagaagtggtactgcaagaggagttgttagatttatctctttcactgcatgacacatctagctgtagcacgactcaatgtgacttgcaatggctggttctgaagttgtgatttagggctaaacaggagtcagaaaatctcctgtctatgacacctctattttgattatcatatccaaacacaatgttaggattgctgtcaggagagaaatatttttttaattgcctattgatgcaaattrtaataaaaagcaataaatttgaatttaccatcttaaaagtaactttaaattgtagtgtaatggttattggcgtacatagtggtcttgaactgacttacgatttgaattgggattttctacatgttattctacatattctatgtagtggtcttgatatcacacagtgtttaacttggggaaaaaaaaaaaaggaagccaagcagaagaatttgcaagccaagccaagaaactgtgcaataacttagaaatacgagtaataacttagaaatgcaaggtagaagcaattaaaaaatacatgct

SEQ ID NO: 73580 - DNA, 599 bp, Chicken  19866894354827_1
  misc_feature (1)..(128): n is any nucleotide
nnnnnnnnnnnnnnnnnnnnnnnnnnnnnnnnnnnnnnnnnnnnnnnnnnnnnnnnnnnnnnnnnnnnnnnnnnnnnnnnnnnnnnnnnnnnnnnnnnnnnnnnnnnnnnnnnnnnnnnnnnnnnnnntctgatttaaaaaaaaaaaaaaaatagtcactcaagggctctttaaactactgtgaaaaagaaagaagagctgaaaattgtatccacacaaaattagactggaaatgaagaagaataggaggaaggctagtggattttgttgtcttttggtttgtcgtcttgcctttatttwttttttttttccagacttgagaatgttaaaccattagtgaaaattacaaaagaagtagtggattttccatctcttgataccttcaaataaggactatatttttccagtcaagcatgttggattttatacagggataacagcttaaaaacaccaccacagttatgatattctgaaagactacttatttcttctaatgggtctccctactgtagttaaattgttgactgtaaaaaatccatcctcttgtgggtgctcccctcagtgattccctccagtcaggggtgtctcatgtcttttca

SEQ ID NO: 73581 - DNA, 600 bp, Chicken  19866894354828_1
tcgcagtaattcacataatacttttgtctcctcttatgaaggcacacacaaaagttttatgaagagctactgtctccactcctaactattttttaacaaaaggagttcatttttcattttaaaactgattaaaattaacttggtaagcatataaaagtcagaagaattttttctatgtcttaaatctctacaaattagagagccatgcatacctccagccatggttttctgccacacaggattattctctaactacgattagctataaacatgcccacatagatcccggtactgcagagmcgcagatagttgcttaactttgtgcactacagtcatctcgctgacctcaggcttgttattaacaatggctgaaggtaggaatgtgcaaataactttctgcagaactgagccttgcgctgtttgtgccgtcccatattattcttctgggtcatccatccagaatggatggcaggatacccgcaaaccgtaatgtttgtatgggaagtgtttgtcatctgccccttggctcagggctgatttgaatctttggacagactttataacttcaggtatggatttatgtttgttttatctgagaaa

SEQ ID NO: 73582 - DNA, 600 bp, Chicken  19866894354831_1
tgttgcactatcacacttaagttaaaggtgattttacccttttctattgcaataggtaaggatttatgaacaatttgaattcatctttcaaaatttaggctgccttaattacttctaagtagcagtaaatgtgctatagtctttgtgctatagtctttgtataatattgccttaatgaaaaaaagtgttactttgctgtcactgctacacaagcaaaatttcctaaaattttaattaattcccatcatccttcatggaaaagataaatgaaatttctagataaagacagatgtagatttmcagattataaaccaagggggaggatagtttagattatctgttttgactgctgcataacacagaacaacgaatttccctcatttatatcccattcaaagtagagtatatctttcagaaataaatccttcttttcttttaaattagcccattatgcagaatctagcataaccattaggaaacttttctaatagttaattattctcattttcacagtatacctgtttcttgcctgaatttggtagatttgacatttagtaattgttaattctcatttttttttctgccattttgtgcacatta

SEQ ID NO: 73583 - DNA, 600 bp, Chicken  19866894354832_1
ataaagcattgttatggaattgaactttgttatttatgtgcttaaaatcagtgcagatatattgatattagagagaactgtgagagtctataaaatgatgcatgtaaatctctgcaataattgtcctcttaatatttcatgactacatttacaaagtcttactttcaggcaaacatgctaatcaatccattctttcagtgtttactatctgaatggaaatccatatatgcactcttagctctttctttcctgcaaaactgcaaaataattaggacataaaaatatttccaaacactcttyccctccacttcttcttgcccaatggaaaagcaaaacacatgacaaagaagtactaaaaattgcaacaaggcactttccagatttcatttgaagattcaggaagttacaggggaaacacatgttttcattcattgtgtgaaaaccttactgactagcatttttgctaactgccttatgtccactggaactgatctgccctatgagtaattgtatgacccgtctcttgctctggtgctttgaaaaaaaaaaaccccaaaacacaaaaaaccagcacaatgggctctaaaacattttyacctt

SEQ ID NO: 73584 - DNA, 600 bp, Chicken  19866894354832_2
tcttyccctccacttcttcttgcccaatggaaaagcaaaacacatgacaaagaagtactaaaaattgcaacaaggcactttccagatttcatttgaagattcaggaagttacaggggaaacacatgttttcattcattgtgtgaaaaccttactgactagcatttttgctaactgccttatgtccactggaactgatctgccctatgagtaattgtatgacccgtctcttgctctggtgctttgaaaaaaaaaaaccccaaaacacaaaaaaccagcacaatgggctctaaaacattttyaccttttcaccactgacaaggatagatactatatatgacttcatgtttgatatctcacatgaattctaggtgcaccttggattaaaatgagtctgtawaattggagcagaagatttcttagaggaggtacaaagcatcattcagaaggtaaagtttattacactgccccttgaaggacttctctgagaggtcagaaacccagtccaatcagtcttgtacccataacacttttcattcttctctcctactcactagacttggaaagaaagtgatccagtagcattaaacagtgtgtcacag

SEQ ID NO: 73585 - DNA, 600 bp, Chicken  19866894354832_3
attcaggaagttacaggggaaacacatgttttcattcattgtgtgaaaaccttactgactagcatttttgctaactgccttatgtccactggaactgatctgccctatgagtaattgtatgacccgtctcttgctctggtgctttgaaaaaaaaaaaccccaaaacacaaaaaaccagcacaatgggctctaaaacattttyaccttttcaccactgacaaggatagatactatatatgacttcatgtttgatatctcacatgaattctaggtgcaccttggattaaaatgagtctgtawaattggagcagaagatttcttagaggaggtacaaagcatcattcagaaggtaaagtttattacactgccccttgaaggacttctctgagaggtcagaaacccagtccaatcagtcttgtacccataacacttttcattcttctctcctactcactagacttggaaagaaagtgatccagtagcattaaacagtgtgtcacagtattaggagccactcaaattaaataaactgaattcaaaatatgtgccccagttggaagaactattcatatgatatgcagacctgttccaaacagtacc

SEQ ID NO: 73586 - DNA, 600 bp, Chicken  19866894354839_1
taattctttttttattttttgtgctaatgcattaattggttccaggcagactgggaacagcagagccaagatattgcaaggaaggctgcagtccaggtaatttgaggtctgtcaggaggctgaaaaacaccaggaagttcataaaccctggagtcttttattatctgaaaagttttgtaggtccagaaagtctgaacaatgccatgttttggggtgcttaaagagaaagaaggaagagaaatgtcataatactttggagttattccaggagtgctgtgctgccttaaggggaacctcagraatttatctcctgaccctgggtaccatatttctggctcctatgattgccttccaagctactaaagatcagtccttagcaactgaatgttaggattccttgtcccaaacctcatgcttaacctcttcttatgacaccgctgggtgctagcattcttgactgttagcatgtgggtggccctcttcattagccccatcttgagcatgttgtctctgtactacccttttgggttgtgactggttcaaaatctgtcattgcaggattcgtgcttaccaggtgctctccccttggaatggtctgat

SEQ ID NO: 73587 - DNA, 600 bp, Chicken  19866894354840_1
atcaggtacttgagaagacaaacaaaatcagttatagggtttagaaaggactgtattttgtgcgtgtttgtgtagcagaggattttttgagtgctttgatgacttacaagaaactatattaaggcattcaaagagcaggaaattgttctatgggtccagtgaacatagttcaggaaattcaaatatttggaatctacaaggatattaacttgaccgttaatgcgtgtgtttcagttttctttaataagacttttggtttgtggtgcacaaataacattttcatgactggtatattttttyaacctgttgatgtcttcaggtagcacttaattactgtaatagaagaaaattgtgcttgctttctttcagtattgacagtgctttgcctgttgctacatttggtcttgccctgtggctgtagcgatcactttaaaccttttgtgtgggattcgtgcacagcagacagacataactgaagacagaaacttgggtattcaaaccacaaacctggagcagaaagagttaccttaaacaacttctaattcctgagagagagaagaggcttttacttgactctctattgcatatttattttcacat

SEQ ID NO: 73588 - DNA, 600 bp, Chicken  19866894354840_2
ttaaacaacttctaattcctgagagagagaagaggcttttacttgactctctattgcatatttattttcacatcaaaatgtatacccatgtatatttttatgccacatagcacggttagcctgcacttcaagatttgccattgccatcgtttggctcagaaatcctttctatctgatggaaaagcatgtcagtttgcattgtgatgctgatacacttgcagaagaggaagagatgcttgtttttaaaaacagtaagactttgagtttagttttgctggtgcaggaaaattggcaggaacrggtgttaaatacttcagctatgccttcagtgtttagaatggctcagggartgatttttcttcactggaatcctatctaacgaatctgtccgaagacagtaacagtgccctgccccttctccctttctacctctaaaagctgggattgtcagtgcggcaaggatgccatacagtaacccttcctactttatattatttaaaattaagattacaaaggaagatctccactctcattctttcctcactgtggcttggtcactgttccatctctcttgcgttgcttcaccttctgaaggacttt

SEQ ID NO: 73589 - DNA, 600 bp, Chicken  19866894354840_3
ctattgcatatttattttcacatcaaaatgtatacccatgtatatttttatgccacatagcacggttagcctgcacttcaagatttgccattgccatcgtttggctcagaaatcctttctatctgatggaaaagcatgtcagtttgcattgtgatgctgatacacttgcagaagaggaagagatgcttgtttttaaaaacagtaagactttgagtttagttttgctggtgcaggaaaattggcaggaacrggtgttaaatacttcagctatgccttcagtgtttagaatggctcagggartgatttttcttcactggaatcctatctaacgaatctgtccgaagacagtaacagtgccctgccccttctccctttctacctctaaaagctgggattgtcagtgcggcaaggatgccatacagtaacccttcctactttatattatttaaaattaagattacaaaggaagatctccactctcattctttcctcactgtggcttggtcactgttccatctctcttgcgttgcttcaccttctgaaggactttcttacctttcttccccagaccttcttcagcagaagtgctagccccagaca

SEQ ID NO: 73590 - DNA, 600 bp, Chicken  19866894354845_1
ccactcatttattatgtgatactcctcaaatactgttaatgaaaatcagggagatgttctagacaaaagagtcagctgtgcatgggggaaaaagagtaacatgatacagtctacttttaagagacgatattgtacctgttagtgctttagcattaataaaaacattgcatcatgaacctctcatttaaattttaagtattgataacatcttcaattgaaagaaatcaacggccttgctagtgatatcactgaaagttgtgctgttcaaagacgctgaaaaccctatcctcagtgtacaasttttaattatctctactttctacaggtccaagattaaaacaaaacaaaacaaaacaaaacaaacaatcatctgaaatacattttaaaagttacttgcaattgcagaattctgttcatctctcaacaatcattgtgacacaagaatgagaaataaatttggtaagacaacactgcatatttaaaatgcaagctgtaaaatggtaatggacaagcaacaccctttagctacagctaaccctactgtccacatggtcagggttatgtatttttttttaaacttgacttttcacagtttgacac

SEQ ID NO: 73591 - DNA, 402 bp, Chicken  19866894354848_1
atctcatggaattcctacagggtggtcaggcctcaaacactgactgtccttatgctcttagccattcacaaaagcaaggtctaaagcagttaatcaggacgggtcagtttgcaaacactcgtgcatagatgctcagtgctgtaactacggacattttactgaagagcttcccacagacttattttgcaaattttaccagtgtaagtggcttttctgacagattctggtatgcctcctgagtgctccagaatgttcacacagcaagaagtgatgtaccacgaataaactaaaagacctctmaaagttatttgggcataagcttactttagtactaaaagatgacacaacactagtggtaggaagactaaggttcaaacttccaagccagttcttcagttttaa

SEQ ID NO: 73592 - DNA, 599 bp, Chicken  19866894354849_1
  misc_feature (1)..(212): n is any nucleotide
nnnnnnnnnnnnnnnnnnnnnnnnnnnnnnnnnnnnnnnnnnnnnnnnnnnnnnnnnnnnnnnnnnnnnnnnnnnnnnnnnnnnnnnnnnnnnnnnnnnnnnnnnnnnnnnnnnnnnnnnnnnnnnnnnnnnnnnnnnnnnnnnnnnnnnnnnnnnnnnnnnnnnnnnnnnnnnnnnnnnnnnnnnnnnnnnnnnnnnnnnnnnnnnnnnnnctgttaaagtaagcatcctgaaataatcccctgaaaggattagacgctttttgataaataacccttctggtggctaattatgggatgwtggggggaagagggcaggagtatcagctgcttgtttggggaagttaattaatatttttcttccttgaacagccagtccttcccgtgatcaaatcattttactgttcctggttgcctaaggagcgcagttctggaatcccatggtgtctgctctcatgagtctgagagtatattcccaaaatggcttcagagtcaacatataggaattagtttatgaacagcttttgcaataatctgatagcagcaagcatgcttccaatggaaaggaaggccttccattggaagcatggaaaaaggaaa

SEQ ID NO: 73593 - DNA, 600 bp, Chicken  19866894354852_1
caagcacatagcaaagtacaggagcccgagaacagtagggtggtatgacccagagcagctagaagcagccatccccccatccttctcacccacagggtggccagcaagtgatgctcttggctgcagctctgagatgacgtggaaggacataatggagttcccacaggcaagagaaggtgaaacctccaaaaacaccccaaaatgtgggcctcgaagtcctgttgtgactagccagccctgggctcaggagacatcaggcagagctgaaacacccagagggagagatggaggcttggatgsgcagctgagagccatgggatctggaaagcaacactttgatttaatggacctttgtgtttgaaaattaaatcaagagagctcttgtatttgccacagggctgagcataaggcgaacacgcaggatttagaggcggaagagctttccagatgagcggaatgcaattttgtcctaagaaccaaaataatgataaaaataactagcataggagaaagggagctgtgagcgcagcatacaaatgtcaaacttcagatcctctcagcagaaccataataaaagggtttaacctattatatctatta

SEQ ID NO: 73594 - DNA, 575 bp, Chicken  19866894354852_2
ttcttgcgggcaggctcatttcctacacgcactgcattcaggggctttggcagcgtggtgagttttaactggtaaataaaagatgtaataccaccaaggactgattccattcacaaaaagcagcactgggcagagcaatggattctcattgctcctgagaggagagagccccaagcggtctccagccctgggggaggacacgtgctgagctttatggtcagaactgctgagagcaaggccttctctgctgctcccttgcagcttctgcaagtgctctctgcattgctcacctggctctcmaagcagaaagatggtaattggtgtgaggaaccactaagcctttaaagaaccacctcagagcagtttctttcctgactcccccagtccaaacacacaagataaacacttccctgtcactgctggtggaagcatcctatgttcccagggtcgaagtacaaatgcaatgtcctgcctcctcttcctgtataacggaggtaacaaatgcctcctctgcaaaaggttgaaaacattgtaaggacaaagccatgatgaggcccaccaatctggactacatt

SEQ ID NO: 73595 - DNA, 600 bp, Chicken  19866894354857_1
cggatcgattcaattggatttggggagcagattgctcatattactgacattactatgcagatctgggcctgggaaatggaataacgttaatagaaactcagtaccagcactgatgctttgtatacttacaaactgctatgagtcaaaaggttaacacactcagacaggtctctgtgggagagcccttagagactgatctccaatttcatacaatatccagacaaatctctttattacagaccaacagcagtctcagcatcacacaaatgagatggctgaaggccgcatggggaacagaargtcagtgcagracacctggaacagcagcacacagcaattcagcagaggtgctctggaggtactgcattttcccaagctcaccagccatgagaaacacagattgactgcagtgtgcagaaaggctgttaattacaatgccacgagtctctgcaagcatctgtgattcacaaaaggactccaggagactgaaggcacgtaagcagatcacagtcttagccaacacaccaactgctgcaatggagatgrgtgaaggtggaaactcagggcttgacactgttggggggaaaggtttgcaaagtg

SEQ ID NO: 73596 - DNA, 600 bp, Chicken  19866894354857_2
aattggatttggggagcagattgctcatattactgacattactatgcagatctgggcctgggaaatggaataacgttaatagaaactcagtaccagcactgatgctttgtatacttacaaactgctatgagtcaaaaggttaacacactcagacaggtctctgtgggagagcccttagagactgatctccaatttcatacaatatccagacaaatctctttattacagaccaacagcagtctcagcatcacacaaatgagatggctgaaggccgcatggggaacagaargtcagtgcagracacctggaacagcagcacacagcaattcagcagaggtgctctggaggtactgcattttcccaagctcaccagccatgagaaacacagattgactgcagtgtgcagaaaggctgttaattacaatgccacgagtctctgcaagcatctgtgattcacaaaaggactccaggagactgaaggcacgtaagcagatcacagtcttagccaacacaccaactgctgcaatggagatgrgtgaaggtggaaactcagggcttgacactgttggggggaaaggtttgcaaagtgcagacaagaag

SEQ ID NO: 73597 - DNA, 600 bp, Chicken  19866894354857_3
gcagtctcagcatcacacaaatgagatggctgaaggccgcatggggaacagaargtcagtgcagracacctggaacagcagcacacagcaattcagcagaggtgctctggaggtactgcattttcccaagctcaccagccatgagaaacacagattgactgcagtgtgcagaaaggctgttaattacaatgccacgagtctctgcaagcatctgtgattcacaaaaggactccaggagactgaaggcacgtaagcagatcacagtcttagccaacacaccaactgctgcaatggagatgrgtgaaggtggaaactcagggcttgacactgttggggggaaaggtttgcaaagtgcagacaagaagttccagtttgctgtttgcacaaaagtctacaggaagaacactccaattaaagcagttctctgctatgcagaattaggacagttgctgccaaaggggtccagaagcatatgaaagcaacgggaagacatggcccgtgtgcagggctggatccacagcagtctcccaagagacttcccatggagaaggccagaatggacatgtgcatccagaccagcgatgcaggaaaccttgatgc

SEQ ID NO: 73598 - DNA, 599 bp, Chicken  19866894354858_1
  misc_feature (1)..(206): n is any nucleotide
nnnnnnnnnnnnnnnnnnnnnnnnnnnnnnnnnnnnnnnnnnnnnnnnnnnnnnnnnnnnnnnnnnnnnnnnnnnnnnnnnnnnnnnnnnnnnnnnnnnnnnnnnnnnnnnnnnnnnnnnnnnnnnnnnnnnnnnnnnnnnnnnnnnnnnnnnnnnnnnnnnnnnnnnnnnnnnnnnnnnnnnnnnnnnnnnnnnnnnnnnnnnnnagggggaaggaaaacagagtaattgaggaaagggaaacgtctcattaacgcagctctgctgagtggggggtgaaggaggaggaatttgggctcyggggtaggatagagggcggacgagccttcccccatccccatagtggtggtggggtctgggtttggtgcccggctggggcttgcccccaaaagcagaggcaggaacgtgcatccattgcgccgcggggtcttagcatgggtggagggcgcacatccagcatcgcctccctgagccctctgtggtatccgtggggggaatgcagaatgcagccgtcacctccagcacacagctgtgcgtcggggctgtgcagggtttgcagctgggaaaggagagggagaccaaacggaaagcctcagtca

SEQ ID NO: 73599 - DNA, 600 bp, Chicken  19866894354859_1
ttgatctatctccagtcatttgtatttgatgttaaccctgaaacctaatgactctacctgctcttcgtgctagcaaaatctttgcagggtcatggcttacccatacctgctctgatggctggcatcaaacaagtggacatttgtggagtctttcttacatggaggagttcaaatctatgtccttcagtttttaatctatgttcaacagcacctcattgctaaataggatcctgggaccagagtatttaactgttctgctgaaaacccgccttccccgtggttcctcagtaatgcaggccyacagtttccatagggaaatctattgcatgtcaaaaagacaagagctatagaaaataactggaatataatgctgaaataaataacagcagaaattcagtactggatgcattattaattatatgagtaacgaggacataatattccactggcatccttagaagtgcccctaaatctgctgcagcactggaggttgctgtaactaggggccctcccctgagtttcagtctattttcctactgactgcacgaggctctgggtcccctgctttgctggtgggtttggggggactaatgaactggt

SEQ ID NO: 73600 - DNA, 600 bp, Chicken  19866894354860_1
gttaactcttacagatgtaggttaatattttatttgcatatatcccccagttttttcctgttcttcagttgaatttatcacaagcccgcagacatgtcttgctgctcagagtgggcaggaacaattaagatttcagtcagaactccagtgagcactttcactcaggctgcatttgctaagctttgtggtagctgcattgataaggcagggagaagttcaagtgtgagaaatctgaagtgaagatgcaaatctcacgcttagctggtattttgttatctgagagtacactgatcctgagtrgcatcacagtagttttgggttagagagtgtttctgtttcttctcttgtgaaagtgtacaaatgcctttgacagaattactacttctttatcattactgagaactcaaacaaattttttaatgttgtgattcgaattaccatttcataaggttttaaatgtatttttagaaaatgctcattaatattcagagcttttccaaaaaaatagatctgcatctcacactgtcagacactcttttgtgactattcacagatttggagagttgagatgagggttctggtttgaaacagtgatcaatg

SEQ ID NO: 73601 - DNA, 600 bp, Chicken  19866894354871_1
tgtgtgtgtagggagatctacatcaaaaatgggagggagatttcatcaaaaaaatgttcagagtgctgtatcttttctcctctttaaaacaactcagagatgcgaggagctagatgtaacagtaaaactccaagtcattccacagactcctttgaacaaatgtgatgttttcaggatggtttctggtttctgccagcagggttttctccccatttcactgctcgccagtcccgagatgacatgaatgcacatttccaagaaagccacacatgtggggcttgtttctccctactgtacgtsttgcatctggactgtggatgggtaaacagatcatgaaatgccatcgttaccatacctgstttccccacgttcagttactggtgtgcggggggtggcctgcctgccctcacctccccattgctggcacctgtcctgcttaggagggctgggaacaaaatggagccacagaaaatggatgtgcagaggcactcggaggcagacacagggctggacagcccccgtggcactactggggagctccagtttagatctgctgtccgcgagctgtttgtgaaggcaaaggctaattttcctgcagca

SEQ ID NO: 73602 - DNA, 600 bp, Chicken  19866894354871_2
agagtgctgtatcttttctcctctttaaaacaactcagagatgcgaggagctagatgtaacagtaaaactccaagtcattccacagactcctttgaacaaatgtgatgttttcaggatggtttctggtttctgccagcagggttttctccccatttcactgctcgccagtcccgagatgacatgaatgcacatttccaagaaagccacacatgtggggcttgtttctccctactgtacgtsttgcatctggactgtggatgggtaaacagatcatgaaatgccatcgttaccatacctgstttccccacgttcagttactggtgtgcggggggtggcctgcctgccctcacctccccattgctggcacctgtcctgcttaggagggctgggaacaaaatggagccacagaaaatggatgtgcagaggcactcggaggcagacacagggctggacagcccccgtggcactactggggagctccagtttagatctgctgtccgcgagctgtttgtgaaggcaaaggctaattttcctgcagcactggcatctgcagatctcccgatggtggaaaacctgctctctcccagctttccttgcca

SEQ ID NO: 73603 - DNA, 600 bp, Chicken  19866894354871_3
aacaactcagagatgcgaggagctagatgtaacagtaaaactccaagtcattccacagactcctttgaacaaatgtgatgttttcaggatggtttctggtttctgccagcagggttttctccccatttcactgctcgccagtcccgagatgacatgaatgcacatttccaagaaagccacacatgtggggcttgtttctccctactgtacgtsttgcatctggactgtggatgggtaaacagatcatgaaatgccatcgttaccatacctgstttccccacgttcagttactggtgtgcsgggggtggcctgcctgccctcacctccccattgctggcacctgtcctgcttaggagggctgggaacaaaatggagccacagaaaatggatgtgcagaggcactcggaggcagacacagggctggacagcccccgtggcactactggggagctccagtttagatctgctgtccgcgagctgtttgtgaaggcaaaggctaattttcctgcagcactggcatctgcagatctcccgatggtggaaaacctgctctctcccagctttccttgccaggctttttaacatatatactttttaagt

SEQ ID NO: 73604 - DNA, 600 bp, Chicken  19866894354871_4; identical to SEQ ID NO: 73603

SEQ ID NO: 73605 - DNA, 600 bp, Chicken  19866894354872_1
aaaaacaccctgacaaaaatttaatggaaacacatgcattattgtaagaagttcagatgaatctgcagttttcttcaaaaaattcaagctgttgacaaattccaccatacaatgtttgatataagacatgccttcatttgagcacccatctgtacttcagtccttggatgtgtctggccggttttccaaggccatagttactaatgcagttcactccatagcaattacattgtggttttatatacgtaagaactggattaaacaaccttgcagatatcaaagggtatgagcattcttttyttccttctttttttccctcattattttcctgactgtagtggcttcactcactcctaatggaattgataggtatagtgtgtttggcaattattattacacatatgctttgtcccacactaattcctatgaaatgttcccccttgagcattcatcagtgcaagaaccaagtatttgaataatggcagaaaaataaacaaagggatttgactgcactgaaagttcatttgcattttattaagttatccacagatatgctcagtttgtgctttagcacacttttccaattcttttcttttcctt

SEQ ID NO: 73606 - DNA, 599 bp, Chicken  19866894354876_1
  misc_feature (1)..(62): n is any nucleotide
nnnnnnnnnnnnnnnnnnnnnnnnnnnnnnnnnnnnnnnnnnnnnnnnnnnnnnnnnnnnnncttgctttgctgcacacacaccactgtgagggttatttcacagcttctcatattgctcctagctgtttcagaaaccttatgctctttccaacctcagattccagtctctttcaagcagatacagaatgtggcagacttttataatgtttctgcattgtgtagcacagagataccatcacacaagtaatacatactagaaataatagaaattaaacacaatgaaacttaaaaacacttyaaattataaaggttattctaccaaaacaatttttaaagtacttcatcctaattttccaaagaagaaaaaaaatcaaatctgttgctactgtagtcagctggcataaggttccagatagacccaaacagaaagcctgagtgctatatagatggaccaaaatatgacaatggctaaagatcactatcaaaaaacattgggaacacactgatgcccacagtatttatgtacatatacatctgctaaattcccaaaacttcacatttgactgagtataataccctctcaaatgtggaaatacc

SEQ ID NO: 73607 - DNA, 600 bp, Chicken  19866894354876_2
ttattctaccaaaacaatttttaaagtacttcatcctaattttccaaagaagaaaaaaaatcaaatctgttgctactgtagtcagctggcataaggttccagatagacccaaacagaaagcctgagtgctatatagatggaccaaaatatgacaatggctaaagatcactatcaaaaaacattgggaacacactgatgcccacagtatttatgtacatatacatctgctaaattcccaaaacttcacatttgactgagtataataccctctcaaatgtggaaataccagctctctagaaygttgactggattaataacagtaatagctaagaaaagattactcaagaatggcaaaaactactctcagtcagctttaacacagaagcaatagagcagcgaaagtagttggcagcaggtggcatattcatagattctgaaatacagtctttctcaaaagccagtgaaaccattgtgcttattaccacaagactgagaagaagctaaaattttatatgcttttaaaaaaacatttagacaaacttatggataaccctcccctcccccaaaaggctattgaagtgaaaatcgctgctttgggct

SEQ ID NO: 73608 - DNA, 600 bp, Chicken  19866894354881_1
actaagtcttcataacttatattttaaaacaattaaagctatgcatgttattgtacaaatgcaaaatgtatgcacaccagatggcaatttggacatatatgcatgagttgaagatatgtaacattttgctcacagcacaccttgaataaaaataacactgatttttttattcttttcttataatgaaacacattttttctttaaagggattttcagttaagatttttgaagtaggagtggggcaacacagctcaaagaataccatgatctgatttgttcactttctattactctgttaargaattaatattaaacgctaaatgtggtttaaagtggttgtggaaaagaaatcagaagataaaatatttaaaataactgtaagaacataaatagtttatatttttaatcacttataacattcttcctttataagatgatcaaaagatccttcctttgtatttcaactttaaactactctctgaaaaataagtctaaaaggtaacatttttttagacgagggatggcatatttataaagcaacgctcacttgtctcttttagtccttttttcatggtcatttgtttggaaatacatttgtgc

SEQ ID NO: 73609 - DNA, 599 bp, Chicken  19866894354882_1
  misc_feature (1)..(37): n is any nucleotide
nnnnnnnnnnnnnnnnnnnnnnnnnnnnnnnnnnnnnacggaggtgccagggaggcatttgcatgctgaaatcccccctgcctgctcagagctttttccagcccatacgtttgtattaaatggtctgttagagatttgctggtacttttcaagctctgacagccctgtttttatttcaattgcctctaagccacttcatgaaattttcatatataaatatgaaaatatgcaaaagccctctgatttataggatccgacactgtggtttaagtgaatcccccatgatcctgcctcctgctyacaccgctcccacagcaccccgagccctgggtgactgttcagcaataggactccatcctgggcaggctgggggccacataaacaaccctctgcctcccagccacctatctcctgtcgcctgtgctcgatcctaacatgccagagcctgggccgctgctttgctgccctaagcagtcactgccaccgactcaagagctgcaaggacaygctgggcaccttgcctgggttatccaagaamatcactacacgtgcaactcctttattttctccccatagcctcactccttcaggatcttgtg

SEQ ID NO: 73610 - DNA, 600 bp, Chicken  19866894354882_2
catatataaatatgaaaatatgcaaaagccctctgatttataggatccgacactgtggtttaagtgaatcccccatgatcctgcctcctgctyacaccgctcccacagcaccccgagccctgggtgactgttcagcaataggactccatcctgggcaggctgggggccacataaacaaccctctgcctcccagccacctatctcctgtcgcctgtgctcgatcctaacatgccagagcctgggccgctgctttgctgccctaagcagtcactgccaccgactcaagagctgcaaggacaygctgggcaccttgcctgggttatccaagaamatcactacacgtgcaactcctttattttctccccatagcctcactccttcaggatcttgtgcaaatgaaggtcttcatggaatcatagaattgttagagctggaagggaccctcaaaggccgactgcaatgaacagggacacccacagctccatcaggagctcagagccccatccagcctgaccttggaagtctgtagggacaggaaatttctattattcccaaaccaagccatggacacgtcccagcccagctcaccaaacagcactg

SEQ ID NO: 73611 - DNA, 600 bp, Chicken  19866894354882_3
tctgatttataggatccgacactgtggtttaagtgaatcccccatgatcctgcctcctgctyacaccgctcccacagcaccccgagccctgggtgactgttcagcaataggactccatcctgggcaggctgggggccacataaacaaccctctgcctcccagccacctatctcctgtcgcctgtgctcgatcctaacatgccagagcctgggccgctgctttgctgccctaagcagtcactgccaccgactcaagagctgcaaggacaygctgggcaccttgcctgggttatccaagaamatcactacacgtgcaactcctttattttctccccatagcctcactccttcaggatcttgtgcaaatgaaggtcttcatggaatcatagaattgttagagctggaagggaccctcaaaggccgactgcaatgaacagggacacccacagctccatcaggagctcagagccccatccagcctgaccttggaagtctgtagggacaggaaatttctattattcccaaaccaagccatggacacgtcccagcccagctcaccaaacagcactgctggcaatccactctcgccgctccatgcctc

SEQ ID NO: 73612 - DNA, 586 bp, Chicken  19866894354896_1
catttttaaacagctccatggagccccagcgctttgcttgtaatggtttcgacattcatcatccgccgagccccactgaacgactccttaaactgctcgagattaactctgctcgcagcagctctgcaggatgagtgggggacgtgctcagagacaaaagccatgtatatctatttgggtctccaccccaaaaaacttcctgatcaaccaaaatctgcctaagggtcaagcacctgggagcagcacctccctcccacctctggtgtggatttgcactgggatggcagcaggatgagaagkgtattkgtgggctgctacggcaggtctctgctcctctgctacctttgtttcccccttaccctgcactgagggaccaggaaataaaaattgatggggaacaaattgctttggccaggagcttgctgcttaaaagagtcgtagcaggaaagcaattacctgacatcagaaagctgtcagggcagcgagtgacccggccgtgcttcttgccttctggcacagggacagggaccagcacggcacattcacctgccctattccaaaaccacttgctaaagaacaagcaacc

SEQ ID NO: 73613 - DNA, 580 bp, Chicken  19866894354896_2
taaacagctccatggagccccagcgctttgcttgtaatggtttcgacattcatcatccgccgagccccactgaacgactccttaaactgctcgagattaactctgctcgcagcagctctgcaggatgagtgggggacgtgctcagagacaaaagccatgtatatctatttgggtctccaccccaaaaaacttcctgatcaaccaaaatctgcctaagggtcaagcacctgggagcagcacctccctcccacctctggtgtggatttgcactgggatggcagcaggatgagaagkgtattkgtgggctgctacggcaggtctctgctcctctgctacctttgtttcccccttaccctgcactgagggaccaggaaataaaaattgatggggaacaaattgctttggccaggagcttgctgcttaaaagagtcgtagcaggaaagcaattacctgacatcagaaagctgtcagggcagcgagtgacccggccgtgcttcttgccttctggcacagggacagggaccagcacggcacattcacctgccctattccaaaaccacttgctaaagaacaagcaacc

SEQ ID NO: 73614 - DNA, 600 bp, Chicken  19866894354904_1
accaccccatcacctcactgtgtaatctccatacatgttcagcacgagttgattaatgtccacaggcacaatattttccacatttcatttccaatgaattccacatggaggaattcactgacacatctttggtttatatgtactttcatgtcaaatgccattttgtcagcctgcccctctgctgccatctctcacacagcaataaaacattaatggaatactggtaggaagattgaacccgtactgccataccaacaatatctgcctctgatgtcatgggctaacataacaaaataagargcattactttcggagcatcccttgtaaatgtatttcctctacttaatgtagaatatttaaaattcttcagcttcagtgcacagaaggtgctataaaggtccactgcaaaacatttccagatgttagatataaagcaaatcaaagtattttccctttaagccctttgactttattaacaagcagttttagatttaactgatgattactttgacaaagaaattaagaacagaggtttacatctgtttggaagcatcaatttattgaacaagccgtcaaaaagcaaagtatctgcaaaaaaag

SEQ ID NO: 73615 - DNA, 599 bp, Chicken  19866894354905_1
  misc_feature (1)..(176): n is any nucleotide
nnnnnnnnnnnnnnnnnnnnnnnnnnnnnnnnnnnnnnnnnnnnnnnnnnnnnnnnnnnnnnnnnnnnnnnnnnnnnnnnnnnnnnnnnnnnnnnnnnnnnnnnnnnnnnnnnnnnnnnnnnnnnnnnnnnnnnnnnnnnnnnnnnnnnnnnnnnnnnnnnnnnnnnnnnnnnnnntgtgcacagaggttggtaagcatctattcagcgtatagcatcacataggtggagtacggctgcattcatggctgctgtgctgtataggacccatagagagccatccaaacccacaaccacacgygctgaacaagtgaacctctgggggtgcccaggygccacatgccagccctgctgcctgtctgtcaccagcagggcctgcttcccccatttcctggccaaggcaatgactcatctctaaattgtactttctttttcagtggtcctcctaactgcagttggggttttgtgtgcttatttcttcaggtccttcgttagccagtgtagtttcttccagacagcaatactgaaatatagctttccagttacttgattatgaaatagcaaaccattaatttctacatgttctcgtatttccacgcg

SEQ ID NO: 73616 - DNA, 599 bp, Chicken  19866894354905_2
  misc_feature (1)..(143): n is any nucleotide
nnnnnnnnnnnnnnnnnnnnnnnnnnnnnnnnnnnnnnnnnnnnnnnnnnnnnnnnnnnnnnnnnnnnnnnnnnnnnnnnnnnnnnnnnnnnnnnnnnnnnnnnnnnnnnnnnnnnnnnnnnnnnnnnnnnnnnnnnnnnnnntgtgcacagaggttggtaagcatctattcagcgtatagcatcacataggtggagtacggctgcattcatggctgctgtgctgtataggacccatagagagccatccaaacccacaaccacacgygctgaacaagtgaacctctgggggtgcccaggygccacatgccagccctgctgcctgtctgtcaccagcagggcctgcttcccccatttcctggccaaggcaatgactcatctctaaattgtactttctttttcagtggtcctcctaactgcagttggggttttgtgtgcttatttcttcaggtccttcgttagccagtgtagtttcttccagacagcaatactgaaatatagctttccagttacttgattatgaaatagcaaaccattaatttctacatgttctcgtatttccacgcgtataatttgttaccagaagctgaaactgaagta

SEQ ID NO: 73617 - DNA, 600 bp, Chicken  19866894354907_1
cagtttctctacatgtagccaaacaggaaaactatcattaaaatataaagttaaataatagtagtaccttaataatggctcaattaatttaacttttctccagttatgtcttcattgtcctgataattttgacttgctaacaagtcaaaatcacagctttgaagatactcattgctttgtcacattgtaactctgcttttagagaagaatttgtaattgattttatgtacttaagattgagatagccctaaccttatagtcacgcaatgagaaaaagactttccatagtttcctccatgrttmtctttgcatgcatttcttcctgcccacacctgggaatcgtgacctccacattagtttctgtctactggtcaaagtttgttctgtgacaacaagagagaaattaattcctgtgtttgtgaaaataatgcaataaaacatcagttacagttccagaaggatctcagggaggtgggaacctcacattcttctcagtgacctctcagggggcttttgctgctgagactctggggaaaacgtacccagaatttcccacttctaatatttagaccaatccttagcaaagctaattcaggagaa

SEQ ID NO: 73618 - DNA, 600 bp, Chicken  19866894354907_2
tttctctacatgtagccaaacaggaaaactatcattaaaatataaagttaaataatagtagtaccttaataatggctcaattaatttaacttttctccagttatgtcttcattgtcctgataattttgacttgctaacaagtcaaaatcacagctttgaagatactcattgctttgtcacattgtaactctgcttttagagaagaatttgtaattgattttatgtacttaagattgagatagccctaaccttatagtcacgcaatgagaaaaagactttccatagtttcctccatgrttmtctttgcatgcatttcttcctgcccacacctgggaatcgtgacctccacattagtttctgtctactggtcaaagtttgttctgtgacaacaagagagaaattaattcctgtgtttgtgaaaataatgcaataaaacatcagttacagttccagaaggatctcagggaggtgggaacctcacattcttctcagtgacctctcagggggcttttgctgctgagactctggggaaaacgtacccagaatttcccacttctaatatttagaccaatccttagcaaagctaattcaggagaaagt

SEQ ID NO: 73619 - DNA, 599 bp, Chicken  19866894354909_1
  misc_feature (1)..(7): n is any nucleotide
nnnnnnncctttccatccacaggtaacacccacagggatcctgcaatctgatgactgcctccagctgaacctcagagctgcaacacagcatccatggccgtactcatcggcgcagtttaactcgctgcagggaaagaaaactgcactcaacctgaaataacctgccagctccagactccgtgtcccacgccacgcacgctgtcacactgcccacgggccgcatgtgttactctgtgcgtacgcatgtcctcgttgagagcagtgctaacatatgtctgctttgattccttgagctctacrttcaaagtgagacgagcaggacgtagcggtggcacacgggatttcccagctctgccagctcctgcctgagctccwcggatgagagctggggaggtcgctgctcccatgcactcagacagcccccaggagcaggggttgaacgcaygctaacctcagctcccaaacacagtgtgcatcacactggtttggcttgggggagagagggcattttaaatgtgggtggtttttttttttttgttaaaatagcatactgttgaataaaacacataatggttgtgtaggctgggcttggctggcag

SEQ ID NO: 73620 - DNA, 600 bp, Chicken  19866894354909_2
agctgcaacacagcatccatggccgtactcatcggcgcagtttaactcgctgcagggaaagaaaactgcactcaacctgaaataacctgccagctccagactccgtgtcccacgccacgcacgctgtcacactgcccacgggccgcatgtgttactctgtgcgtacgcatgtcctcgttgagagcagtgctaacatatgtctgctttgattccttgagctctacrttcaaagtgagacgagcaggacgtagcggtggcacacgggatttcccagctctgccagctcctgcctgagctccwcggatgagagctggggaggtcgctgctcccatgcactcagacagcccccaggagcaggggttgaacgcaygctaacctcagctcccaaacacagtgtgcatcacactggtttggcttgggggagagagggcattttaaatgtgggtggtttttttttttttgttaaaatagcatactgttgaataaaacacataatggttgtgtaggctgggcttggctggcaggaggcaggggactgaatgccacagctatttctcagataaaaatcaccggattggtctttatttcccatccagcagg

SEQ ID NO: 73621 - DNA, 600 bp, Chicken  19866894354909_3
ctcaacctgaaataacctgccagctccagactccgtgtcccacgccacgcacgctgtcacactgcccacgggccgcatgtgttactctgtgcgtacgcatgtcctcgttgagagcagtgctaacatatgtctgctttgattccttgagctctacrttcaaagtgagacgagcaggacgtagcggtggcacacgggatttcccagctctgccagctcctgcctgagctccwcggatgagagctggggaggtcgctgctcccatgcactcagacagcccccaggagcaggggttgaacgcaygctaacctcagctcccaaacacagtgtgcatcacactggtttggcttgggggagagagggcattttaaatgtgggtggtttttttttttttgttaaaatagcatactgttgaataaaacacataatggttgtgtaggctgggcttggctggcaggaggcaggggactgaatgccacagctatttctcagataaaaatcaccggattggtctttatttcccatccagcaggcacacaaagccaaatccctccaagggagaacagaaaatgctgttcccaggagggagctgcacgctgctac

SEQ ID NO: 73622 - DNA, 600 bp, Chicken  19866894354916_1
tcaacaggcagccaaagggcagcagaaacagaagtttcaggagcaaacttttagtatgtaacataaccgtgaaggcaaattgatcctggtttcctaaaattgggacagattgtctgcagacaaaattatgttttttaccatctatgtagtcactgcatttcattatctttcagactgattttattaatgtgctattacctgtttcctggatatgagtgagctttacctatttttttagtagattgttttacttcatgcctcagattgagtagctcttctgtttggctgcttatgttcacrccamgtgtccaatagtcacaaattcaacggagttgctcttgactataaattataagctgttttttggcagggattttatttggctacattcttaactgataacatacatatattaaaaatactcattgaaagcttttatattctttgaatagattggatgatagtagttaataatttataaattgtaagcagtgaatgacttagtatgttgcctggagtgaaaacgtgaactgtgtgcagacttttttaaatgcaggataaatctattgtaatcaagtctcataagtatatctacattcc

SEQ ID NO: 73623 - DNA, 600 bp, Chicken  19866894354916_2
caggcagccaaagggcagcagaaacagaagtttcaggagcaaacttttagtatgtaacataaccgtgaaggcaaattgatcctggtttcctaaaattgggacagattgtctgcagacaaaattatgttttttaccatctatgtagtcactgcatttcattatctttcagactgattttattaatgtgctattacctgtttcctggatatgagtgagctttacctatttttttagtagattgttttacttcatgcctcagattgagtagctcttctgtttggctgcttatgttcacrccamgtgtccaatagtcacaaattcaacggagttgctcttgactataaattataagctgttttttggcagggattttatttggctacattcttaactgataacatacatatattaaaaatactcattgaaagcttttatattctttgaatagattggatgatagtagttaataatttataaattgtaagcagtgaatgacttagtatgttgcctggagtgaaaacgtgaactgtgtgcagacttttttaaatgcaggataaatctattgtaatcaagtctcataagtatatctacattccaatg

SEQ ID NO: 73624 - DNA, 599 bp, Chicken  19866894354936_1
  misc_feature (1)..(218): n is any nucleotide
nnnnnnnnnnnnnnnnnnnnnnnnnnnnnnnnnnnnnnnnnnnnnnnnnnnnnnnnnnnnnnnnnnnnnnnnnnnnnnnnnnnnnnnnnnnnnnnnnnnnnnnnnnnnnnnnnnnnnnnnnnnnnnnnnnnnnnnnnnnnnnnnnnnnnnnnnnnnnnnnnnnnnnnnnnnnnnnnnnnnnnnnnnnnnnnnnnnnnnnnnnnnnnnnnnnnnnnnnntttgagtacgctcatcagctgacacaggtggcaattgctgtcagacactttgcaccagcaatgttagtttgtgtgcagttcygaccacggggctattttaattttgtgtacagaggtttactaccaccttataaaagaaggatttccagaaggcaaatggaccgatgtctcaaaatagagtgtttacattaacacttggcaagcaaagcccggcaaacatagatgaatagagataagctataaaaacaccatggacatttacttgctggaatagtagcttgtaatccaatttcaagtcttcctgccaagtgttacacacagcatctttgtgtatgacgacttcagccctcatcccccaccagcccctcagcaaagattagc

SEQ ID NO: 73625 - DNA, 600 bp, Chicken  19866894354943_1
tttgtttgttttgccaagaggttcctcggctggtggatgtgggtgcatggcacagggagggcaggctggaggacacagccctctgcaccatgctatgtccctgccccagtcacaggagaagcatggtggtacctacgggaagggagagctggtgatgcaagtcaggttgagatgctgatggtcatcatggagcaaaacagtcgctgggcatcctagaggttttgtgggattctttttctaattgtaaggcatgagggtgggacctgacgcagttctggtgccactgcagggcagggctgkcctggtgttaccagcccaggggagaggaaaggaggtggtgatggtggaacccagctcctcagggttcttctgccatggtcaaagcccacatctgctcaaagatgtgagtcttcaagggcaaaggcagcttggcctgggggccagcagctatgtggacataatgatttttttktgtgtgtgtgggatcaaactcttagggaatcaactgaaaaatcccttttgttttattatttctcaaatccaccatagtaaagacttagaagcaatgacaaagtagtgtttaggagaaccccagccaag

SEQ ID NO: 73626 - DNA, 600 bp, Chicken  19866894354943_2
tgctgatggtcatcatggagcaaaacagtcgctgggcatcctagaggttttgtgggattctttttctaattgtaaggcatgagggtgggacctgacgcagttctggtgccactgcagggcagggctgkcctggtgttaccagcccaggggagaggaaaggaggtggtgatggtggaacccagctcctcagggttcttctgccatggtcaaagcccacatctgctcaaagatgtgagtcttcaagggcaaaggcagcttggcctgggggccagcagctatgtggacataatgatttttttktgtgtgtgtgggatcaaactcttagggaatcaactgaaaaatcccttttgttttattatttctcaaatccaccatagtaaagacttagaagcaatgacaaagtagtgtttaggagaaccccagccaagatagcagcatccagttggcacgaacaaggctgttttctgtatcagctgctcctgagccatggagcagcccaaagtgtgcacggtgagaggagtgggacatagcgtacccatcctacagggctgcctgtcctctgtgctctttcttcaggggatgttgctttcccacattcag

SEQ ID NO: 73627 - DNA, 600 bp, Chicken  19866894354945_1
ttttgcaaaaaggatgaaacctttgggttctcagttgtctgtatcaattccaaaatacagaatactgattgtgtaaatataaagatttctgaggacaagactcagtgaagacttctaaagcatgattgaaagaagagattagaagaaattgttttcaaaagaaaattccctttcactttttctatggaatttaggaattctctatgatgcttgtttcaagaaagaatttgaaaattctgagtacaagatccagtcaaaatatagtgatctgcatttttagtgaatggaaatcaagaaaargttgacttattgtgacctgttcatatggtctgatataaaagtatcactcatgaatgaaaattcatctcctatgttgctactgaaagatgtactggataaactggacttaaaaaatgttcaatgtgtaatctaatgaaaatgtaatattgtatactacatactgtacagacttcatgacattttagaattctgttaactaattaattttaaaatgaataagttttttctaaactattacgggctcctaaaccacatactcatattctcctttttagtgactcataatatcttttacctata

SEQ ID NO: 73628 - DNA, 599 bp, Chicken  19866894354949_1
  misc_feature (1)..(141): n is any nucleotide
nnnnnnnnnnnnnnnnnnnnnnnnnnnnnnnnnnnnnnnnnnnnnnnnnnnnnnnnnnnnnnnnnnnnnnnnnnnnnnnnnnnnnnnnnnnnnnnnnnnnnnnnnnnnnnnnnnnnnnnnnnnnnnnnnnnnnnnnnnnnntatggatttagcagaaagtctgttgactcaaaccatttgcagtgaggggaaaagtagaaatctcctactgcagcaatcagctgcagaaagggaagttagagagaaatggggatgctacttgaaatgggatgtctgatctcaaagattaaatgtggaagyggacccaggaagcactcaaggatagatcttggggatcaacttgtaatgagtaggaggaaccaaagcccacagcaaagagctggtgggacccaagggggaatgaggatcctcctcagcagtgctgtccaaracccaaatggccaattccatgggacaaaatacagatgtgacaaccactgcagctcatcctccatcgcacagagaagcacaaaagcccttttcagtgctattaaaccacctgagatcaccyggcgtcagcttgcagcrtgcaaggtaaacatttgttcttcctgggcaag

SEQ ID NO: 73629 - DNA, 599 bp, Chicken  19866894354949_2
  misc_feature (1)..(11): n is any nucleotide
nnnnnnnnnnntatggatttagcagaaagtctgttgactcaaaccatttgcagtgaggggaaaagtagaaatctcctactgcagcaatcagctgcagaaagggaagttagagagaaatggggatgctacttgaaatgggatgtctgatctcaaagattaaatgtggaagyggacccaggaagcactcaaggatagatcttggggatcaacttgtaatgagtaggaggaaccaaagcccacagcaaagagctggtgggacccaagggggaatgaggatcctcctcagcagtgctgtccaaracccaaatggccaattccatgggacaaaatacagatgtgacaaccactgcagctcatcctccatcgcacagagaagcacaaaagcccttttcagtgctattaaaccacctgagatcaccyggcgtcagcttgcagcrtgcaaggtaaacatttgttcttcctgggcaaggactgctttctttttcacggtcggcctcaagcgctgcttttgtgaatgctttatgggcagcacaatgaagcagcaaagtcttgcttttattccaacaaatcgggcttctctcagccctcccattgattcc

SEQ ID NO: 73630 - DNA, 600 bp, Chicken  19866894354949_3
ggatgctacttgaaatgggatgtctgatctcaaagattaaatgtggaagyggacccaggaagcactcaaggatagatcttggggatcaacttgtaatgagtaggaggaaccaaagcccacagcaaagagctggtgggacccaagggggaatgaggatcctcctcagcagtgctgtccaaracccaaatggccaattccatgggacaaaatacagatgtgacaaccactgcagctcatcctccatcgcacagagaagcacaaaagcccttttcagtgctattaaaccacctgagatcaccyggcgtcagcttgcagcrtgcaaggtaaacatttgttcttcctgggcaaggactgctttctttttcacggtcggcctcaagcgctgcttttgtgaatgctttatgggcagcacaatgaagcagcaaagtcttgcttttattccaacaaatcgggcttctctcagccctcccattgattcctccccccgtgctgggctggcagtgagcattcgtccacccttggcacgatccatgcattaaattgggccagggtcaaacccacagtgtggccaggctgggacaggaggtagytttcaaccgg

SEQ ID NO: 73631 - DNA, 600 bp, Chicken  19866894354949_4
ggatgtctgatctcaaagattaaatgtggaagyggacccaggaagcactcaaggatagatcttggggatcaacttgtaatgagtaggaggaaccaaagcccacagcaaagagctggtgggacccaagggggaatgaggatcctcctcagcagtgctgtccaaracccaaatggccaattccatgggacaaaatacagatgtgacaaccactgcagctcatcctccatcgcacagagaagcacaaaagcccttttcagtgctattaaaccacctgagatcaccyggcgtcagcttgcagcrtgcaaggtaaacatttgttcttcctgggcaaggactgctttctttttcacggtcggcctcaagcgctgcttttgtgaatgctttatgggcagcacaatgaagcagcaaagtcttgcttttattccaacaaatcgggcttctctcagccctcccattgattcctccccccgtgctgggctggcagtgagcattcgtccacccttggcacgatccatgcattaaattgggccagggtcaaacccacagtgtggccaggctgggacaggaggtagytttcaaccgggtggctgaaccaaaatt

SEQ ID NO: 73632 - DNA, 551 bp, Chicken  19866894354949_5
gagatcaccyggcgtcagcttgcagcrtgcaaggtaaacatttgttcttcctgggcaaggactgctttctttttcacggtcggcctcaagcgctgcttttgtgaatgctttatgggcagcacaatgaagcagcaaagtcttgcttttattccaacaaatcgggcttctctcagccctcccattgattcctccccccgtgctgggctggcagtgagcattcgtccacccttggcacgatccatgcattaaattgggccagggtcaaacccacagtgtggccaggctgggacaggaggtagytttcaaccgggtggctgaaccaaaatttgggagggaaaaaaatgatcccagtcaacgggaggtcatagcaaatagtttctgcctgcttctttaacccttccttattcttggctttggtttgaatcagggaatatttctgctcttctcaaaccaacagctttgttctgggagaaaaaaaataacacatctcccaaaaacaatgatgtctcccattgttctgggggtgaatcgttcccctcaagtgatctcca

SEQ ID NO: 73633 - DNA, 600 bp, Chicken  19866894354950_1
ctttccatgaaggtcagtgatagctcctacaaatgtctctagagctaaaatgggctgttgtagctttccctgagatcgtttttattccagagaactggaggttcccttggcacaacagcttgcagccactttaggtcctgcttttttcattttgcagactgagcatcattctcccatctcacctgaaactgcctctgtgttcaaatgtccaataaagttaacaagccactggttgttagcactgtattgcactcacaggtttttccaatccaaagaatttggggctgcttaaatgagacyctgtaatctgtactggcttgtagtctgcatgtatagatcctccagtgcaaattttgtctgccttccagtgccatggctatcttattttgtttctgagtagataggataaagcgtatgcagactgtatccttttcaaagttatgagtatattatggcaaactccatccatgaactttgcaaaaggtttgtgcatactatgtgttagaaattttctcagaggcagaaatgatagcagaaataattttgttgaaaaacaaatgtatttgtcacgtagaaacatagcaaattctttacaagaga

SEQ ID NO: 73634 - DNA, 600 bp, Chicken  19866894354954_1
tgagagctaccttgggaattagtggtttactacccgctgcagggatggggagccagcaacgcatctgtgtatgtagaagactccatagggttcctcagacctttgagaatgctcagtttttaggctgatgtccatccttatgcttttcccaaaaggttttagaccctggttccagttggtgatgtatgaagccaaatcactacttccatctactggaaaatctactgtgattttgactcacctatatgtgggttgaaggggcagtgagaacactgattacagcagggtggtcttgagtgrtgggaagtggtgcaattcacttcatccatcccctgtagaccaagtgcgtaggcttcatcctgggacttgcatggagtcgcatcgccaaatatggggatttcttactaaaaagagatgagacaaataagaatgacttgtcagagggtcaggacatgttgcctcygcaaagctgtactcttcagaccccacrgaaagctttttctttttttttttttcagctgtgagctgacctagcaataaaatcagacaagacgtcagcaaaggcaactagtggaaactgacggattcaaacagaatagc

SEQ ID NO: 73635 - DNA, 600 bp, Chicken  19866894354954_2
ccctggttccagttggtgatgtatgaagccaaatcactacttccatctactggaaaatctactgtgattttgactcacctatatgtgggttgaaggggcagtgagaacactgattacagcagggtggtcttgagtgrtgggaagtggtgcaattcacttcatccatcccctgtagaccaagtgcgtaggcttcatcctgggacttgcatggagtcgcatcgccaaatatggggatttcttactaaaaagagatgagacaaataagaatgacttgtcagagggtcaggacatgttgcctcygcaaagctgtactcttcagaccccacrgaaagctttttctttttttttttttcagctgtgagctgacctagcaataaaatcagacaagacgtcagcaaaggcaactagtggaaactgacggattcaaacagaatagctggagcgaagctactgctgtcatcctgtcgctcccagataaccagacacttcacaataaaagtagatgtaaataggattttcaatcacagatcccagtttctacttttccgtgacagctaggcgtgatttctttgtacgcaaggggcttagctctaagcactt

SEQ ID NO: 73636 - DNA, 600 bp, Chicken  19866894354954_3
gccaaatcactacttccatctactggaaaatctactgtgattttgactcacctatatgtgggttgaaggggcagtgagaacactgattacagcagggtggtcttgagtgrtgggaagtggtgcaattcacttcatccatcccctgtagaccaagtgcgtaggcttcatcctgggacttgcatggagtcgcatcgccaaatatggggatttcttactaaaaagagatgagacaaataagaatgacttgtcagagggtcaggacatgttgcctcygcaaagctgtactcttcagaccccacrgaaagctttttctttttttttttttcagctgtgagctgacctagcaataaaatcagacaagacgtcagcaaaggcaactagtggaaactgacggattcaaacagaatagctggagcgaagctactgctgtcatcctgtcgctcccagataaccagacacttcacaataaaagtagatgtaaataggattttcaatcacagatcccagtttctacttttccgtgacagctaggcgtgatttctttgtacgcaaggggcttagctctaagcacttgaagttacatacttactggtatgagtg

SEQ ID NO: 73637 - DNA, 600 bp, Chicken  19866894354959_1
caaggttggatggggccctgggtagcctggtctagtattaaatgtggaggttggtggccctgcatgtggcaggggggttggagcttgatgatccttgagatcccttccaacccaagccattctatgtatctataattctatgatatgtcaggaggaatatatagcattatttacgaaaataaatagcttatggaatatcattccttcacatacaaaccaaatagcaaaaattcctaaatattgtcatatggtttatagtcttagagatgatagatgcttgcactgataaagaattaatcrttgtaatctgtagaacttcagtagctaaggaatggtacattattgttgtttgttctactgacttcccactgtaaagacaaaaatacagagcatattaagtacaaaggaaattttccaaagcaactgaacctgattttcagtgtttgcataccaaaggacaacatttagtcttcagatgaatggttgtgagtcttatcttaaagcccaagggctaactctgcttctaggttataaatacttgagtgaatatgtttatttatacttacagacagtagcactgatttgtatagaggtcttaat

SEQ ID NO: 73638 - DNA, 600 bp, Chicken  19866894354959_2
gctaactctgcttctaggttataaatacttgagtgaatatgtttatttatacttacagacagtagcactgatttgtatagaggtcttaatgaaagtcattttgtaaatgggaatatgtatgtacatatatacacacttatctccatatactgatgaatttgtctttaactattagcctctagtcattgttcaaagaggaatataaatattgaaaagatggcccatttttactcttctgactgcatttaagtttagacaatcaccacagggctgagccttgtcgggctatcgcctgcattmctatctactcagtctacctgatggatgtatccctgtactgactggcatcttgtttcctcatgtagcagttttacctcagctctgtcttatatccatgtaagcatttccctcactaaggagctattattttaattgcttactgttttctaaattagaatggcagtggcctcactaagcaagcagctctgggcctctctctttgactaaycagtgaccattaaagagttttctaatgtgctctggtctcctgaatcaaatatgttacattggtgtgaatttagaaaaagatatacacaagaa

SEQ ID NO: 73639 - DNA, 600 bp, Chicken  19866894354959_3
ttgaaaagatggcccatttttactcttctgactgcatttaagtttagacaatcaccacagggctgagccttgtcgggctatcgcctgcattmctatctactcagtctacctgatggatgtatccctgtactgactggcatcttgtttcctcatgtagcagttttacctcagctctgtcttatatccatgtaagcatttccctcactaaggagctattattttaattgcttactgttttctaaattagaatggcagtggcctcactaagcaagcagctctgggcctctctctttgactaaycagtgaccattaaagagttttctaatgtgctctggtctcctgaatcaaatatgttacattggtgtgaatttagaaaaagatatacacaagaaatttaacatatagctttattttccaactaagcacttttcttacacttccaataggtccatttataaactgaccttcaggatatcttatttgcatgcctccctaagcacaataactggaatgcaaagtgacattcaatagcactaacatacacacactctttycttagcttgactgaagatactgaatataaaagagtgactaatgata

SEQ ID NO: 73640 - DNA, 502 bp, Chicken  19866894354959_4
gtggcctcactaagcaagcagctctgggcctctctctttgactaaycagtgaccattaaagagttttctaatgtgctctggtctcctgaatcaaatatgttacattggtgtgaatttagaaaaagatatacacaagaaatttaacatatagctttattttccaactaagcacttttcttacacttccaataggtccatttataaactgaccttcaggatatcttatttgcatgcctccctaagcacaataactggaatgcaaagtgacattcaatagcactaacatacacacactctttycttagcttgactgaagatactgaatataaaagagtgactaatgatagctgtaggaaagatttttattttactttcttaataagatgtattacggtgcatatactctggaattctaagttctggtattcaagtcaggcatttataagaatatgggagggtttgttcagatttatcttctggaataccataagaggaggaaggc

SEQ ID NO: 73641 - DNA, 600 bp, Chicken  19866894354960_1
tctcttgtgtccctcactctctgccttattctttcttgaaatttaaaatgctcttactctttttggcaatttcccttttcagaagagcaggaaggtcgcatggatcttagtcatcctgtccatgctgataactgtctgttggatcctgaggggaaagagtgctggaaagagccacctgcctatgtctacagggactacaggtaagagaaagggatctgcattagagcttgtggagatcaaaacgtctccccagccccaagaaagtatgagctcagcttataaaaaccagccaatgggtcrttggctcaaagtgagagttatagcatgaggctgagagctgcatcagtggattcagagtgaggtgtcatacaccttccctaggctgctctttcttccctccccacgttcagcattgacagacagcacaatgaaactgagaggctgatggatctcgaaccatgatattgtcttttgtctctcacaatgctacagtctactgctaccacttagaagaagatgtttctttgaattttattctgtctttctcagtcttactctcccactgtccacacattacaggacagggagaaccaggctcct

SEQ ID NO: 73642 - DNA, 600 bp, Chicken  19866894354966_1
agttctttgttctgagtgaattgctgagtttcaagttttttgatatttaattgcagtctatgctaatctgcatgtttaatttctagaaatctactccatttgaactctagaatgaagttaatggaaacaggacaatgacttgactataatacacattaaaagaaaaacaacaacaacaacaaaaaaaacagttcaaagctgtatatagtaacgtatacatgaatttgtacacgttgactcctttgaagccttcttatataacatttcgactatgacacacacttatctgcatcaacaaarctgcacgttttcaccattctagttagtatctttctatcatattacgagatatttgttcataattctaaaggtgggtcagcttatttcttctccttcagcaatttctgcacaggtaatgaccactctattgactcccttgacctcccagcacgccagagtctacacaagatcaccagagggctgatgcttgtcactggggggagtccaggatccagaggtggtctgggacctatgaactcaaagattataaactcacaacttttcaaagcccttgttcaaagggcaaagtaaaccaggctt

SEQ ID NO: 73643 - DNA, 600 bp, Chicken  19866894354972_1
tgtatatataaagcataccacagatctgataaaaagaaacattaagggatctttctttgcatttgtccaaatctttctttacattccctgaaattatacatttgggaggtgaaatatctcatgattcagagattatctgatgtgtcccagctagaaatgacagctagtcttcctccatcacttggaagactcttgttttgaagagtccctagttaattctgaattgttaaggaaacaaaaaaggtgagagaggaaaattggcttgtatttttttcatcatttatatgtctactggaagaytgtgcagtccgtagtatgctgtataagtttggattttttccttacygtattttctaagtagcatgcaggccggtactaaaagcatctcactcatctcaggcttacagatagcactacttgataatattagatcatgaaaytttaacggcttaattactttgacataatttttaaagccaccacctttgtctcatctagtttgcaaaacasggccaccactttcacttgacctgtaaggccactatcttttgaccaactgaaatttttaactcttgtaaactcctgtaacatacactggta

SEQ ID NO: 73644 - DNA, 600 bp, Chicken  19866894354972_2
ggatctttctttgcatttgtccaaatctttctttacattccctgaaattatacatttgggaggtgaaatatctcatgattcagagattatctgatgtgtcccagctagaaatgacagctagtcttcctccatcacttggaagactcttgttttgaagagtccctagttaattctgaattgttaaggaaacaaaaaaggtgagagaggaaaattggcttgtatttttttcatcatttatatgtctactggaagaytgtgcagtccgtagtatgctgtataagtttggattttttccttacygtattttctaagtagcatgcaggccggtactaaaagcatctcactcatctcaggcttacagatagcactacttgataatattagatcatgaaaytttaacggcttaattactttgacataatttttaaagccaccacctttgtctcatctagtttgcaaaacasggccaccactttcacttgacctgtaaggccactatcttttgaccaactgaaatttttaactcttgtaaactcctgtaacatacactggtaacycagcaagcagcctgatcaaaggccatcttggatgaagtagttt

SEQ ID NO: 73645 - DNA, 600 bp, Chicken  19866894354972_3
tgtgtcccagctagaaatgacagctagtcttcctccatcacttggaagactcttgttttgaagagtccctagttaattctgaattgttaaggaaacaaaaaaggtgagagaggaaaattggcttgtatttttttcatcatttatatgtctactggaagaytgtgcagtccgtagtatgctgtataagtttggattttttccttacygtattttctaagtagcatgcaggccggtactaaaagcatctcactcatctcaggcttacagatagcactacttgataatattagatcatgaaaytttaacggcttaattactttgacataatttttaaagccaccacctttgtctcatctagtttgcaaaacasggccaccactttcacttgacctgtaaggccactatcttttgaccaactgaaatttttaactcttgtaaactcctgtaacatacactggtaacycagcaagcagcctgatcaaaggccatcttggatgaagtagttttgcatggatagaatatgcattctcatgcacctcaaagatgtaactactctatgccctgttctttgtactatttaagagtgtgaggcatacacca

SEQ ID NO: 73646 - DNA, 600 bp, Chicken  19866894354972_4
agttaattctgaattgttaaggaaacaaaaaaggtgagagaggaaaattggcttgtatttttttcatcatttatatgtctactggaagaytgtgcagtccgtagtatgctgtataagtttggattttttccttacygtattttctaagtagcatgcaggccggtactaaaagcatctcactcatctcaggcttacagatagcactacttgataatattagatcatgaaaytttaacggcttaattactttgacataatttttaaagccaccacctttgtctcatctagtttgcaaaacasggccaccactttcacttgacctgtaaggccactatcttttgaccaactgaaatttttaactcttgtaaactcctgtaacatacactggtaacycagcaagcagcctgatcaaaggccatcttggatgaagtagttttgcatggatagaatatgcattctcatgcacctcaaagatgtaactactctatgccctgttctttgtactatttaagagtgtgaggcatacaccagtgataataaagcaaagtaagctctaggggactgggagcgaagggagggaaacaaggtgtttaattcatt

SEQ ID NO: 73647 - DNA, 600 bp, Chicken  19866894354972_5
gcagtccgtagtatgctgtataagtttggattttttccttacygtattttctaagtagcatgcaggccggtactaaaagcatctcactcatctcaggcttacagatagcactacttgataatattagatcatgaaaytttaacggcttaattactttgacataatttttaaagccaccacctttgtctcatctagtttgcaaaacasggccaccactttcacttgacctgtaaggccactatcttttgaccaactgaaatttttaactcttgtaaactcctgtaacatacactggtaacycagcaagcagcctgatcaaaggccatcttggatgaagtagttttgcatggatagaatatgcattctcatgcacctcaaagatgtaactactctatgccctgttctttgtactatttaagagtgtgaggcatacaccagtgataataaagcaaagtaagctctaggggactgggagcgaagggagggaaacaaggtgtttaattcattttcactagacatatcaaaagccctgggtcacgttacacctctattccgtgaatgggacaaatgttagcagtctccataaaaggaaacttcagc

SEQ ID NO: 73648 - DNA, 600 bp, Chicken  19866894354980_1
ctgagatcagtaagatgaaattgattaagagaaaaattgaaaggtttatttatatttctacctaggaatgaaaaaaatcagattcaagactgggaaatagggaatagctatgtagaaagtggtatgatagaaaataatctgggacccagtgatgaaaaggtaataatgggccacagattgtgtgatgagttaatgggataatgaggagtggtgggtggggcaagtttaagcatattatggatctaattaaggactgtaaggaatcaaggctgtaaaatattatttcattctgttcatcartatcttatgcagggttytttgtttataagagataacaaatttaagaatgattaaaaaaataaaatcacttgcacatttcatcccaaaagttcattaaaattcccctatgaggaagtgttcaaatttgtatgtgtgaaatcagcttctatagccagatagaaaattcagctaaagcatataggggggaacttgtaatttaaagaaattgagcgtaaagaatagtctttttggtgaactaagtactggatgaaggtgtgagttctctgtggtagaagcagaaattggaacaggtaaaacaga

SEQ ID NO: 73649 - DNA, 600 bp, Chicken  19866894354980_2
aaattgattaagagaaaaattgaaaggtttatttatatttctacctaggaatgaaaaaaatcagattcaagactgggaaatagggaatagctatgtagaaagtggtatgatagaaaataatctgggacccagtgatgaaaaggtaataatgggccacagattgtgtgatgagttaatgggataatgaggagtggtgggtggggcaagtttaagcatattatggatctaattaaggactgtaaggaatcaaggctgtaaaatattatttcattctgttcatcartatcttatgcagggttytttgtttataagagataacaaatttaagaatgattaaaaaaataaaatcacttgcacatttcatcccaaaagttcattaaaattcccctatgaggaagtgttcaaatttgtatgtgtgaaatcagcttctatagccagatagaaaattcagctaaagcatataggggggaacttgtaatttaaagaaattgagcgtaaagaatagtctttttggtgaactaagtactggatgaaggtgtgagttctctgtggtagaagcagaaattggaacaggtaaaacagatagagagttgtctgaga

SEQ ID NO: 73650 - DNA, 599 bp, Chicken  19866894354985_1
  misc_feature (1)..(60): n is any nucleotide
nnnnnnnnnnnnnnnnnnnnnnnnnnnnnnnnnnnnnnnnnnnnnnnnnnnnnnnnnnnngctgggctgtatgagcttaactctggtcgctggtggggggtaccagacagatagactgtcctgggctccttttttgggcaaactgatgatagagctgcaagtcttttccttccactcaggtacagtaagagttcctgcggagctttggttggttggttttggtggttttttgtttgtttgttcatttccagaaaaacaaaacatgaaacaaactcaagtatgttgtggtatcttattctkggttgagactaatctacttttgtgcttttatttatttgtagttgagctgctgtttccttcactagctaataagctaggaggattaaaaagaagatgggtttttttcctgctacaaggaaatacgtgcaaataacacagaggctggagtatatcttaagtataagctccatcaagcctcttggtgttagagaagaaatttcaacaactaaaaaaatctgaaagctgctggaaagtgttgacggattcttagaatatattaaaaaaaaaaaaaaagttttggcgccttcacccccttactt

SEQ ID NO: 73651 - DNA, 600 bp, Chicken  19866894354992_1
tatcaagctcttgtaagattaatttatcttcatttttatatttattttgtattgtgtatcactatacttactggcttataccattatttggagagcacaatcctgaccctcatcccaccccactattattcttttctaatatttaaaagtctatttctgtctccttaattactttgttaccttcctcattcatgcttttaaaagtgtcattactgcagtcctttagagaaagttagaaatttacaggcaattgattggaactcatcataacaacaaaaagaatgaaaatgtaaaaaaaawtctagaattgttctaacttttttttttttttttgctaaatttcacattctcttttttattactgggccacagcaaacaaagcaatgcaatttctacattawgagcaaggtaactttaagaaacaataaacattacataacgataagcacatgtaaattttcctgagaagcagcattagccagtcaaaatgcaaatggaacatgccagctttttgccacctttattactgtagcccaaaaccctatacacgctgtatcttgcttagacaacaaactatctttaagaaaacttaatttgtat

SEQ ID NO: 73652 - DNA, 600 bp, Chicken  19866894354992_2
cctgaccctcatcccaccccactattattcttttctaatatttaaaagtctatttctgtctccttaattactttgttaccttcctcattcatgcttttaaaagtgtcattactgcagtcctttagagaaagttagaaatttacaggcaattgattggaactcatcataacaacaaaaagaatgaaaatgtaaaaaaaawtctagaattgttctaacttttttttttttttttgctaaatttcacattctcttttttattactgggccacagcaaacaaagcaatgcaatttctacattawgagcaaggtaactttaagaaacaataaacattacataacgataagcacatgtaaattttcctgagaagcagcattagccagtcaaaatgcaaatggaacatgccagctttttgccacctttattactgtagcccaaaaccctatacacgctgtatcttgcttagacaacaaactatctttaagaaaacttaatttgtatcacattaaaatttaacaaacttctaaagttagaagactattaaaatcatttctccccttaatgcttacctattttaaagctatcattagaaatctaaaccc

SEQ ID NO: 73653 - DNA, 600 bp, Chicken  19866894354993_1
gtcaaaagaatccccatctctcacaatccctgctcactggctgctgacattatttcttggttagtggctgacagttcagtgccttgagtgttcctctcgctgtagggttagtaggataattgacaaaccacagggaccagatccctggattaggatgaccggactgtcaaaacagccatgacaaactctcacatcaacttctactgcaagtcaagtctatgaggaaaaaatgcaccttggcagggccagaagggaagtctttagtttaaatattttcccactgcacaaaaagctacagcwgggggaggagagagcatggatttttccatgtaattcatagaaaaacctgttacgacaagtcacaattaattagagaacttgagtcaacattttggggtcctattgtgtttgtttgcttaatgtgtttactggaatgcatgacagatgtcacttctgtttcttattagagactgacaaatgactgtatattcagtgcatgtgcatacatggaggaaatgtagccctcacacatagaaacagaaattgacttagctctgtaaggtaatcattagcatctaaaggttgtggacactgaattaa

SEQ ID NO: 73654 - DNA, 600 bp, Chicken  19866894354998_1
atacattagcttgagcaagcctccagcatccagatgttcaaatattgctagtttcataattcaggtacacaagccgattttcagaggagctaaagatgttcagtttgcacgtaatatatgaaggctaaaatgagaaataaattgctttgaaagaaaattgcttatgtggagtggctgaaggaacagggattgtttagtctggagaagaggaggctcggggaagattttattgccctctacaatgacctgaaaagaagttgtggagagatgagggttggcctcttctcccaagtaacagcrataggatgagacagaatggtctyragttgcaccaggggagattcaggttggatattaggaaacatttattctcagaaagagaggtcgggcaatgaaacaggccgcccagggaggtggtggagtcaccatctctggaggtgttcaggagctgtggagatgtggcgcttaagggcacagttagtgggtgatattggtggtgggtggacagttggacaaggtaccttagagatcttttccaacctaaaatgattatatgagtttatgaaacttttaagtgtggttgtacccatttcagtaacg

SEQ ID NO: 73655 - DNA, 600 bp, Chicken  19866894354998_2
cagcatccagatgttcaaatattgctagtttcataattcaggtacacaagccgattttcagaggagctaaagatgttcagtttgcacgtaatatatgaaggctaaaatgagaaataaattgctttgaaagaaaattgcttatgtggagtggctgaaggaacagggattgtttagtctggagaagaggaggctcggggaagattttattgccctctacaatgacctgaaaagaagttgtggagagatgagggttggcctcttctcccaagtaacagcrataggatgagacagaatggtctyragttgcaccaggggagattcaggttggatattaggaaacatttattctcagaaagagaggtcgggcaatgaaacaggccgcccagggaggtggtggagtcaccatctctggaggtgttcaggagctgtggagatgtggcgcttaagggcacagttagtgggtgatattggtggtgggtggacagttggacaaggtaccttagagatcttttccaacctaaaatgattatatgagtttatgaaacttttaagtgtggttgtacccatttcagtaacggcaaagcaattcctactgcacaa

SEQ ID NO: 73656 - DNA, 600 bp, Chicken  19866894354998_3
agcatccagatgttcaaatattgctagtttcataattcaggtacacaagccgattttcagaggagctaaagatgttcagtttgcacgtaatatatgaaggctaaaatgagaaataaattgctttgaaagaaaattgcttatgtggagtggctgaaggaacagggattgtttagtctggagaagaggaggctcggggaagattttattgccctctacaatgacctgaaaagaagttgtggagagatgagggttggcctcttctcccaagtaacagcrataggatgagacagaatggtctyragttgcaccaggggagattcaggttggatattaggaaacatttattctcagaaagagaggtcgggcaatgaaacaggccgcccagggaggtggtggagtcaccatctctggaggtgttcaggagctgtggagatgtggcgcttaagggcacagttagtgggtgatattggtggtgggtggacagttggacaaggtaccttagagatcttttccaacctaaaatgattatatgagtttatgaaacttttaagtgtggttgtacccatttcagtaacggcaaagcaattcctactgcacaaa

SEQ ID NO: 73657 - DNA, 600 bp, Chicken  19866894354998_4
ttggatattaggaaacatttattctcagaaagagaggtcgggcaatgaaacaggccgcccagggaggtggtggagtcaccatctctggaggtgttcaggagctgtggagatgtggcgcttaagggcacagttagtgggtgatattggtggtgggtggacagttggacaaggtaccttagagatcttttccaacctaaaatgattatatgagtttatgaaacttttaagtgtggttgtacccatttcagtaacggcaaagcaattcctactgcacaaatccattgaatgaaaagtagttayctgggcactctatgtttgtaartaataaacctgcgtggtacacggacttagctcaagtaaagtgaagaggtgttctggattaactttggtgatatctacactcactcattgcattttgtaatggatgcttccatctctgcttcactgaggccgtagcaaggggctgcccagtgtccctttgagaatggtgctcattaaccattttaaataaaaaataaattgcttgcgtgggtacaatggaaaatactacacatttagaaaagcaggagaagggaaaaatgattgttgatctcagttagg

SEQ ID NO: 73658 - DNA, 600 bp, Chicken  19866894354998_5
tctcagaaagagaggtcgggcaatgaaacaggccgcccagggaggtggtggagtcaccatctctggaggtgttcaggagctgtggagatgtggcgcttaagggcacagttagtgggtgatattggtggtgggtggacagttggacaaggtaccttagagatcttttccaacctaaaatgattatatgagtttatgaaacttttaagtgtggttgtacccatttcagtaacggcaaagcaattcctactgcacaaatccattgaatgaaaagtagttayctgggcactctatgtttgtaartaataaacctgcgtggtacacggacttagctcaagtaaagtgaagaggtgttctggattaactttggtgatatctacactcactcattgcattttgtaatggatgcttccatctctgcttcactgaggccgtagcaaggggctgcccagtgtccctttgagaatggtgctcattaaccattttaaataaaaaataaattgcttgcgtgggtacaatggaaaatactacacatttagaaaagcaggagaagggaaaaatgattgttgatctcagttaggcttgttgctaagtcttatggag

SEQ ID NO: 73659 - DNA, 600 bp, Chicken  19866894355005_1
aagaattgaagtgaggaaagattccaccagcgcagaaattacacatttctgagtaacacaaacttgtatttggtgcagacattagaggaaatgccaacttatatttgaaaacagacttcttcattcaaacaactgctcctctattgcctggaccttaagtaacaactcccaccaagacttctcccactcttcaggctgatttttgtcagcccagttaacctcccttctctccccagtagccagctgcctgaagaagcatccaaagagattccaactggagtctctgagcttcctcactgyaggtcccagggcagggagcaaacagcaccttaccttgactgtagaggaagaggttgcaatctgaatcacttgggccaggagatttttgggaagygggaactgagtcagagcacggatggcagtgttgtcatctgtcatttcaatggaactccctcctcggctagatggaagagaacagtttgatacacaaatatccactctrtcctcagacccacctcacttcaggtctgctaccgagtacaggtaacctcagtcacctgatcagtcaggctgctcttactactaaaatctgtcaattac

SEQ ID NO: 73660 - DNA, 600 bp, Chicken  19866894355005_2
caacttatatttgaaaacagacttcttcattcaaacaactgctcctctattgcctggaccttaagtaacaactcccaccaagacttctcccactcttcaggctgatttttgtcagcccagttaacctcccttctctccccagtagccagctgcctgaagaagcatccaaagagattccaactggagtctctgagcttcctcactgyaggtcccagggcagggagcaaacagcaccttaccttgactgtagaggaagaggttgcaatctgaatcacttgggccaggagatttttgggaagygggaactgagtcagagcacggatggcagtgttgtcatctgtcatttcaatggaactccctcctcggctagatggaagagaacagtttgatacacaaatatccactctrtcctcagacccacctcacttcaggtctgctaccgagtacaggtaacctcagtcacctgatcagtcaggctgctcttactactaaaatctgtcaattacagaacaatcaccctgagcagcaattacaacattacagtggtattacaaatcagactgaataaacagctttggactgattaaataaaaaaaraca

SEQ ID NO: 73661 - DNA, 600 bp, Chicken  19866894355005_3
ttgtcagcccagttaacctcccttctctccccagtagccagctgcctgaagaagcatccaaagagattccaactggagtctctgagcttcctcactgyaggtcccagggcagggagcaaacagcaccttaccttgactgtagaggaagaggttgcaatctgaatcacttgggccaggagatttttgggaagygggaactgagtcagagcacggatggcagtgttgtcatctgtcatttcaatggaactccctcctcggctagatggaagagaacagtttgatacacaaatatccactctrtcctcagacccacctcacttcaggtctgctaccgagtacaggtaacctcagtcacctgatcagtcaggctgctcttactactaaaatctgtcaattacagaacaatcaccctgagcagcaattacaacattacagtggtattacaaatcagactgaataaacagctttggactgattaaataaaaaaaracaaggcagggttaagttatttctgtatccaacagcatccctcaaaacaaccaacaccaccaggaccctactgattttcctcctgttgactacttgaaacrtaagacttgy

SEQ ID NO: 73662 - DNA, 600 bp, Chicken  19866894355005_4
agygggaactgagtcagagcacggatggcagtgttgtcatctgtcatttcaatggaactccctcctcggctagatggaagagaacagtttgatacacaaatatccactctrtcctcagacccacctcacttcaggtctgctaccgagtacaggtaacctcagtcacctgatcagtcaggctgctcttactactaaaatctgtcaattacagaacaatcaccctgagcagcaattacaacattacagtggtattacaaatcagactgaataaacagctttggactgattaaataaaaaaaracaaggcagggttaagttatttctgtatccaacagcatccctcaaaacaaccaacaccaccaggaccctactgattttcctcctgttgactacttgaaacrtaagacttgygctcataaagacaagcaagcaagcatggtgatgaaaaggagcagactcagcattgtccccaacatttaggggattacaaaaggactcctacctgcaatgcttttggaaacagaaatctctctaggcccagaactccaaagatggcacttgggcattccattgtgaaaacagtgatgcacaagatcaggc

SEQ ID NO: 73663 - DNA, 600 bp, Chicken  19866894355005_5
atccactctrtcctcagacccacctcacttcaggtctgctaccgagtacaggtaacctcagtcacctgatcagtcaggctgctcttactactaaaatctgtcaattacagaacaatcaccctgagcagcaattacaacattacagtggtattacaaatcagactgaataaacagctttggactgattaaataaaaaaaracaaggcagggttaagttatttctgtatccaacagcatccctcaaaacaaccaacaccaccaggaccctactgattttcctcctgttgactacttgaaacrtaagacttgygctcataaagacaagcaagcaagcatggtgatgaaaaggagcagactcagcattgtccccaacatttaggggattacaaaaggactcctacctgcaatgcttttggaaacagaaatctctctaggcccagaactccaaagatggcacttgggcattccattgtgaaaacagtgatgcacaagatcaggctgccccactacctctcacatacaaaacagcacagcagtcagtgctgggcccacctacaggtcacaccagcaacatgagaatcctcccattctgaggaacta

SEQ ID NO: 73664 - DNA, 600 bp, Chicken  19866894355005_6
tcctcagacccacctcacttcaggtctgctaccgagtacaggtaacctcagtcacctgatcagtcaggctgctcttactactaaaatctgtcaattacagaacaatcaccctgagcagcaattacaacattacagtggtattacaaatcagactgaataaacagctttggactgattaaataaaaaaaracaaggcagggttaagttatttctgtatccaacagcatccctcaaaacaaccaacaccaccaggaccctactgattttcctcctgttgactacttgaaacrtaagacttgygctcataaagacaagcaagcaagcatggtgatgaaaaggagcagactcagcattgtccccaacatttaggggattacaaaaggactcctacctgcaatgcttttggaaacagaaatctctctaggcccagaactccaaagatggcacttgggcattccattgtgaaaacagtgatgcacaagatcaggctgccccactacctctcacatacaaaacagcacagcagtcagtgctgggcccacctacaggtcacaccagcaacatgagaatcctcccattctgaggaactatggggtgcat

SEQ ID NO: 73665 - DNA, 599 bp, Chicken  19866894355016_1
  misc_feature (1)..(28): n is any nucleotide
nnnnnnnnnnnnnnnnnnnnnnnnnnnnttattctgatgaacatttaaaacagcaaatggaaacaaaaatgtaatgttaaagagtttcactactttaaacaaaagctttacaattcataatccaaaacgaagtgtggcactggtgaatgaatttcacattttttttttctttcccttccctgtcctttataaaaacaatgtccccactgactatgattgcatattctgaggtataacttcatagaattctacagaaagcaatacatttatatttgtggataaacattactgcaggaaaaytgtattttcaatacaagatgatgaattagggctgtaatttcttctgagataagcaattacttttatgatttttaaaagttggcatgtagtaaaattttactatttatctgatattttctcaagcatttaatttagacatctgagaaaaacagatgttttaaaatgcttgccacaagatatcctaagattaaaaattcgctagttagacaagttttgaacataataaatcttttatattttactacataattcactataatcaagaaatattaagtactaagcacacgttttactcattt

SEQ ID NO: 73666 - DNA, 600 bp, Chicken  19866894355017_1
aatgattccacctcacatcatactttctctgttcatacctgtaagtctttcaagaaaagtaggcagtcttttcttgtgctatatgaatagcagcagaagcttagcaaaaatgtgagtgtgtgttttagtaaacgtcaaccccctgattcataccatttaatttaacagcgggacacaatttccaaagcatttagtggtatgcagtcatgtcagtacatggctaggaatttcaataaccatgaatatgtacaattgcagtccacttaatattctccatattcttatgagaaatgtaatgtwcccaattaagtttagcatttatacactatacactgtgtagtatggccaactattcacatccagaattctttagaagtaataaagctggattgtacattaaaatgtgatatgactcccagctgtatgctgcctacattttttggcacttggcatgacacattattttccactggttcaaatgacaggcagagcccatctgaggcaaatgaaacagtttccaactggtgggcttgatagtgcaggtgacattaaataattaacaagttctctttcagaaccatgcctactgctttaattaat

SEQ ID NO: 73667 - DNA, 599 bp, Chicken  19866894355026_1
  misc_feature (1)..(114): n is any nucleotide
nnnnnnnnnnnnnnnnnnnnnnnnnnnnnnnnnnnnnnnnnnnnnnnnnnnnnnnnnnnnnnnnnnnnnnnnnnnnnnnnnnnnnnnnnnnnnnnnnnnnnnnnnnnnnnnnnntcattaaacatgtttagacatttgtaattcctgtaatttccctccccacgtcaactatagcaaatggcaacctcagtcgattacagaaccaaattttaaacttccttgttgacagtatgtctttggatgttatttccaataaacttctcactttttgatggaacagctacctcgggcttgtagagmtctctccttcccagtaccataaaataagttggtagaaattaaaatatgagaaatgatgtaatggaacactttatctgtgcttttcacctccacagcatgccctggcatctcttctcattgttttaccactagttaccttttctccttcttgcaggcataaaatctctcaagtcaatttgaggattaaggtatggaagagttatgagaagtaggcttgttccttagcaaagaattttggttgtttcagagccasagccagagccagtcaaaagagattcaggaaatacagagagatcaac

SEQ ID NO: 73668 - DNA, 600 bp, Chicken  19866894355026_2
taaacttctcactttttgatggaacagctacctcgggcttgtagagmtctctccttcccagtaccataaaataagttggtagaaattaaaatatgagaaatgatgtaatggaacactttatctgtgcttttcacctccacagcatgccctggcatctcttctcattgttttaccactagttaccttttctccttcttgcaggcataaaatctctcaagtcaatttgaggattaaggtatggaagagttatgagaagtaggcttgttccttagcaaagaattttggttgtttcagagccasagccagagccagtcaaaagagattcaggaaatacagagagatcaacacctgaatgagccccaggtaacactcttctttcttgactattcatcatggccaggactaatgatcttccagatgtttctgtgtgctgagcgtccccactgccgcaaataagccacactgtgatagtctaacctgaatctaacctgaattatctccctggctttcatttgtgtcataccttttgtgcagtcatcaaggcaacatacaattgacatagagatagagctccatgctgtagaaatgcttctgtactaa

SEQ ID NO: 73669 - DNA, 577 bp, Chicken  19866894355029_1
gccagagcaggacctctgttctctctgcagtgcatatgagcaagcagaaagattgcttttctcagactgttgtcacatgaagcaaatgagcttgggcaaggccatctacaaatcctctcctctgcaatctcttttataaggctggataattatatgggaactaattctcagcctgaattttctcatataagacaaagaaggtaggcacaatagagaacaataaagctgactttgaatgagcagttattaggagtttcagccctcttgttaatctgcaaagtccttacaggcagactccayggggaaaaggttcctggagacagcagaagatggtggagccggggcggcttgctgtaaatctcaccgtgtatcatgttcttgctgtgctggccggtggctacacggactgactcagggctttgttctcagtgccagctcaatccctgcattttcttctggaaaagaaaggagtcataaaatttcaattggcctgaataaaagagataacaaaaggaacgggaacagagaaaggctgttattgccaagttttgaatgtattaatacaatagcacctgaa

SEQ ID NO: 73670 - DNA, 599 bp, Chicken  19866894355030_1
  misc_feature (1)..(168): n is any nucleotide
nnnnnnnnnnnnnnnnnnnnnnnnnnnnnnnnnnnnnnnnnnnnnnnnnnnnnnnnnnnnnnnnnnnnnnnnnnnnnnnnnnnnnnnnnnnnnnnnnnnnnnnnnnnnnnnnnnnnnnnnnnnnnnnnnnnnnnnnnnnnnnnnnnnnnnnnnnnnnnnnnnnnnnnnaatgatgagagcagtaaggctgctcagaaataaatgaatagcatgaaatcatactgcttgtgtaagaaatgacgacaagtttaaggagaggtgttctgacaagccgaagctgtatttctgatggtctttcartttttggtcatttcaatctttggccattgctttggcagcaagaagggccaaacctggccaggacgccgggcagatgcagatctgtgttaatttgcatctgaagttaagacaaataaatgtataaggtaacagttactacaacttaggcaagaaccaaagaaggcattctttaagtacgctgtttgcagcacaataatctttgacagcttcctactacaagggatacatcagagagccgagtgtctatcttggtgataaaaacagaaggaatgtaaaagaaaggttaatccaatagatac

SEQ ID NO: 73671 - DNA, 600 bp, Chicken  19866894355031_1
ctacataatgttagtggtcttttccaaccttaacaattctatgattctatgagcaaggtgacaccaaggaagtcaccagagtgctggacacaagggcctgaggtccagaaaagcccagaggcaaaaagcacctctgggtgcaaccagaccagcagggccttggagcccagggacctaaaacatgctggagaggaaggtgctttccgaaggtgtccattatttcccctctcacaccaagtagagaacgggctgtactttttgcttctgattcacaaatattaaattccctcttcctgctaytagtgactcagaaaaatgactcattcacctctagatagtgctatttcccccacatctgaaatgaaacaaacaaaaaaaagtcccccacataagctgcctggagaaaacagaaaaaaaaaagtagctttttcttcctattcatcaatccttgcttacaatgcagagattaaaacaattcattccagactccagacaccagctcactgctctggctgttccacaaagtcagcaggatgcagttaagaggagctgtgcccagctccagccatgtcattccccactagaggctgctgaagggaa

SEQ ID NO: 73672 - DNA, 600 bp, Chicken  19866894355033_1
tttgtaaaacttcataccagctgtgtggcagagagaagacaagcaaacacaggtaactatgtatacatacacacaaatgatattaaggctgttgtagacctttacatttgcaaacattttaattttataatactacatctttagtttatgtcactcttggaaaataaaatatcaaccttcagctttaagttcttcttttctgccctttcagtttgtataactactgtaatatctgcagacttaatttcccctaatggatttgtgttcttttgcttttcttgagcatcagtgctgctaaakaaatatcaactaatagtgaatttaatttaatatatatatttaatataatagtgaagttaatttaatatctccaagcgctgacctcatactctgctaatagaaatggttccacagcctacagctaccctccaccttgcacatggtacccgctccttctggtctctaaccacacttgttagagacctgacacagttaggtaacaccagcaaggcaaggatatcaactcagagcccaccagcactgatagcatgtcctcctgctcagttaaattagcatgctaatgaagaggaccacgagaca

SEQ ID NO: 73673 - DNA, 600 bp, Chicken  19866894355038_1
gactaaaagatcatgagatactgaaaacgtcttggcagttccgatttacacttggtctctatgggactctttcatttgagaaagagatgaattccttccttgtgagtatagtgcttatccctacctgtccccagtctcagcatccctaatctcaaaaaactgcatagcctgctattcctgtatgcacaaggttacaaatgaaaacatgtctttaaactaattagctttacacctgcatgttcttgctggcgaagcaatgctgtcactgattcttgttagcaacgatcagtctatgaatgyaggtgaatgaggcaragataygcttaagactgaagaacgattggaaggaaaacttgagagtgtttaatgcaaaatttatagtaaatcacagctctttcwggtttacaccttttggggaaaccattgttaaagcatttctaaatctacggtaccaaagtgatcktcataagacaaaagaattttcaagacacttctcagtacagaataatcaaagcaatgacacccatacaacacctgagaagctgtgggaaggaaggaactyaacttgattatagcagactgactggtaaactgtaaagc

SEQ ID NO: 73674 - DNA, 600 bp, Chicken  19866894355038_2
agatactgaaaacgtcttggcagttccgatttacacttggtctctatgggactctttcatttgagaaagagatgaattccttccttgtgagtatagtgcttatccctacctgtccccagtctcagcatccctaatctcaaaaaactgcatagcctgctattcctgtatgcacaaggttacaaatgaaaacatgtctttaaactaattagctttacacctgcatgttcttgctggcgaagcaatgctgtcactgattcttgttagcaacgatcagtctatgaatgyaggtgaatgaggcaragataygcttaagactgaagaacgattggaaggaaaacttgagagtgtttaatgcaaaatttatagtaaatcacagctctttcwggtttacaccttttggggaaaccattgttaaagcatttctaaatctacggtaccaaagtgatcktcataagacaaaagaattttcaagacacttctcagtacagaataatcaaagcaatgacacccatacaacacctgagaagctgtgggaaggaaggaactyaacttgattatagcagactgactggtaaactgtaaagctgaccatctggtcat

SEQ ID NO: 73675 - DNA, 600 bp, Chicken  19866894355038_3
tgaaaacgtcttggcagttccgatttacacttggtctctatgggactctttcatttgagaaagagatgaattccttccttgtgagtatagtgcttatccctacctgtccccagtctcagcatccctaatctcaaaaaactgcatagcctgctattcctgtatgcacaaggttacaaatgaaaacatgtctttaaactaattagctttacacctgcatgttcttgctggcgaagcaatgctgtcactgattcttgttagcaacgatcagtctatgaatgyaggtgaatgaggcaragataygcttaagactgaagaacgattggaaggaaaacttgagagtgtttaatgcaaaatttatagtaaatcacagctctttcwggtttacaccttttggggaaaccattgttaaagcatttctaaatctacggtaccaaagtgatcktcataagacaaaagaattttcaagacacttctcagtacagaataatcaaagcaatgacacccatacaacacctgagaagctgtgggaaggaaggaactyaacttgattatagcagactgactggtaaactgtaaagctgaccatctggtcatacatgc

SEQ ID NO: 73676 - DNA, 600 bp, Chicken  19866894355038_4
ttgtgagtatagtgcttatccctacctgtccccagtctcagcatccctaatctcaaaaaactgcatagcctgctattcctgtatgcacaaggttacaaatgaaaacatgtctttaaactaattagctttacacctgcatgttcttgctggcgaagcaatgctgtcactgattcttgttagcaacgatcagtctatgaatgyaggtgaatgaggcaragataygcttaagactgaagaacgattggaaggaaaacttgagagtgtttaatgcaaaatttatagtaaatcacagctctttcwggtttacaccttttggggaaaccattgttaaagcatttctaaatctacggtaccaaagtgatcktcataagacaaaagaattttcaagacacttctcagtacagaataatcaaagcaatgacacccatacaacacctgagaagctgtgggaaggaaggaactyaacttgattatagcagactgactggtaaactgtaaagctgaccatctggtcatacatgctaataccaaacaattaaaaatgtgtaatctgagtccaaatattctctctcaaacactattcacagcgaaatgatcgac

SEQ ID NO: 73677 - DNA, 600 bp, Chicken  19866894355038_5
atagcctgctattcctgtatgcacaaggttacaaatgaaaacatgtctttaaactaattagctttacacctgcatgttcttgctggcgaagcaatgctgtcactgattcttgttagcaacgatcagtctatgaatgyaggtgaatgaggcaragataygcttaagactgaagaacgattggaaggaaaacttgagagtgtttaatgcaaaatttatagtaaatcacagctctttcwggtttacaccttttggggaaaccattgttaaagcatttctaaatctacggtaccaaagtgatcktcataagacaaaagaattttcaagacacttctcagtacagaataatcaaagcaatgacacccatacaacacctgagaagctgtgggaaggaaggaactyaacttgattatagcagactgactggtaaactgtaaagctgaccatctggtcatacatgctaataccaaacaattaaaaatgtgtaatctgagtccaaatattctctctcaaacactattcacagcgaaatgatcgacttaagtccaaggttattttagcacctttatggctacctgttatctttgctcggctatttcagta

SEQ ID NO: 73678 - DNA, 600 bp, Chicken  19866894355038_6
tcactgattcttgttagcaacgatcagtctatgaatgyaggtgaatgaggcaragataygcttaagactgaagaacgattggaaggaaaacttgagagtgtttaatgcaaaatttatagtaaatcacagctctttcwggtttacaccttttggggaaaccattgttaaagcatttctaaatctacggtaccaaagtgatcktcataagacaaaagaattttcaagacacttctcagtacagaataatcaaagcaatgacacccatacaacacctgagaagctgtgggaaggaaggaactyaacttgattatagcagactgactggtaaactgtaaagctgaccatctggtcatacatgctaataccaaacaattaaaaatgtgtaatctgagtccaaatattctctctcaaacactattcacagcgaaatgatcgacttaagtccaaggttattttagcacctttatggctacctgttatctttgctcggctatttcagtaaaaatcctcaaggagaagcttggtgagggcattactaatccatagcacatgttcagctcacacggattcatgaacaggtatttgcccactttctagcac

SEQ ID NO: 73679 - DNA, 599 bp, Chicken  19866894355039_1
  misc_feature (1)..(10): n is any nucleotide
nnnnnnnnnnctttaatgtttattctaccaagaccacattgtactggatgccattcagggttaatatctcactgcagagaatgaaacagcatagctgtgatagtgattacagcgttagcaagaaagagaacacaacaaaacctgagaagtagatgtcagataattgcaaagcttcatgctgcaggctgtacatgtgaattgcacacattgaaaataagtacattctgtcaggaaacctaatttgctacagttttaaaatatacattgaaagtttgacgagcttattttataacaaatggmtggtgttgaggacagtgttaaagcaaaattcactaccttctcactcattaaaacaaacagacaagcaaacatacttacatataaacaaaatactaacataggaagaacatggagacataaagttaggactccctaggcagcaacgcttttgtcttcaaaattctgtgctccataccctcctacaaaagtaaatacaaagttgcttgtatgtatctcagctcattaacatttcaaattgtcctttctctcaaatttaaataagaatagatcattgtctatgagagggatgaatcatttcg

SEQ ID NO: 73680 - DNA, 599 bp, Chicken  19866894355047_1
  misc_feature (1)..(72): n is any nucleotide
nnnnnnnnnnnnnnnnnnnnnnnnnnnnnnnnnnnnnnnnnnnnnnnnnnnnnnnnnnnnnnnnnnnnnnnnccggctgtgtccttgtgcagctgcctacagttggtcttttttttaattctactgatacagttgatcattttgttcattactgtgacccacagtgtcgtaatgaagacaaatgtttagcagtactctgcttcccaaacaaatctgctaaaccttggtgaggtggtacagcactggcagttgcagtgtccagacacagttgttaatggttacagataagctgctgtcacraagtactggagatgcttgttccaatacttaggactgataaagagaggtaaaaccgtagcagttttgctagcttgaatgagacatttctcaaatccttctgttcttttgcagatctttgatgtaggagagaatctgactgtccctgatgagttcacagtggaagagaggcagacagggatgtggtggagacatctggttgcaggtggaggtgcaggtgccgtgtccagaacctgtacagctcccttggatcgcttgaaagtgctcatgcaggtaagatggaacagttccagtttgtttga

SEQ ID NO: 73681 - DNA, 600 bp, Chicken  19866894355058_1
agtgagatgtctgaatctggaccttcataattttaatgggaaaataggaaagcctggttgaagtgacgtgtgtgaaaatggtcttatgttgttgcacctgccctggttttagcacttggatttcaagtgaaaaagaaagatgaatgttcatggaaaaaattgtcatgctccacagaaaacaaacatcaggtgaaatccagcaagttgcagcagttaatgtgtgcactaaaggaaaataaactgtgaaaagttatttaaaatctctccttaagcctttccaaattcaatatgcattgaacragcaagtccaccgggtcatagagtactaataaacttctaatgctcctggggtcactctggccttttgcatttgaatgtatcatgtttatgacactgctgtaaactctggacctcaattactacatgataacaagtttttattgcattaccctttcgaaacctgagaacttgcactaggcactgggacacagatgggagatggtctgcataaccaattagaagattacttctccaaatatgtattcttcactacagaggtctaaaaacgatccatcatctccagctacctgcagccatcac

SEQ ID NO: 73682 - DNA, 492 bp, Chicken  19866894355058_2
ctaaaaacgatccatcatctccagctacctgcagccatcacttaagggaaagggaaagagaagatatttggctacatctctatgattgcataaacaatgtttcatgtacttgacaaactatattaatagcaccccagagggcatgctctgaacatgcaaaatgttgcaaagcacttgtattttatggcaaatctttttaatttttcagttaaaatgataataactattgattttccatgtaccattactacatctagaacacttcctggcagagtctatgaaatttattaaagtcatttrgtttgagttgtcagacatcaaatgtgtgatacaaaaatacaaaggggtgttttccgagaatcctggctcgtgttctgtcctaaggaaacgcacagttttccttatgcttttttaagcagctctgattttaagggtagttgagaaagacaaaccagcaagtgtcaatcagcagagatttgatatgcaagcttg

SEQ ID NO: 73683 - DNA, 599 bp, Chicken  19866894355060_1
  misc_feature (1)..(42): n is any nucleotide
nnnnnnnnnnnnnnnnnnnnnnnnnnnnnnnnnnnnnnnnnncaacttttgtccaaatcttggtgcacttttgctgaaattaccagtgctgacatctggatgatacataaagtgtgcagtaggagtagagggagggaattgcttttaattagatgtaacctacccaggagaacaagacagggaaacatccatctggccagttcttattaataggacaacaaaagataaatgtatttgtaatatgcaaagacaccactgttgaccatttttattagaatcctagacagcctgaactgtaargtgagaagtaagacttagaaagaaagaagcatcaaaaaaggtgacggtccttgcacgtcctaaaaggaaacagtaagcaagtgatgggtgaccatcaagtcccaaacagctattttgtagagatgcttcctctgttccagacaagttacagaccatttctacaaggacctacagtaacaaaggaaagcgtgacaaaattgttttactatcctttaataaaatttaacattgatgcaaggagtgccaacaagatgctccagccattcctggtgagtctagtgattttaagtggctctggt

SEQ ID NO: 73684 - DNA, 600 bp, Chicken  19866894355069_1
tctgaatgtccatggttaggccctgcagagtcaaggatgcagcaagtcgttctttcttcacttctccttttaggagctactgatcctgtacactctgcgcagctgcacgtttttcccgcagcagagcgcattcatgcctttcgtgttccaggcggtggtcatcctcacccactgtcatgcagaagacacaattgacaacttctcccggctgcctaggcctacagaaaggtattggcactcctgcctttgatgttgctgtggtcacagttgtagtttgcctctgccagagggatccggggrggaagtagcttttcttttttcctctcaaagtctgtttgaggtgaaaattacttattcacaactctcctttttctagtgagacgtggaagagaataatagagttttgtcttcaacggtggagacggtagaagaagagaagggaagggaagggaaaggaagggaagtgaagtgaagcgaagggaagtgaattgaagcgaagtgaagagaaaagaaaaaagaagagaaaaggagaagaaaggaaaagaagaaggaaaaggacaagagaagaaaagagaagaaaggaaaagaaaggaaagaaaa

SEQ ID NO: 73685 - DNA, 600 bp, Chicken  19866894355074_1
gatgctcagtagctaacaaggtgccaacaggagttacatcttggaagggtcctggaagcaacaattgcttaaaacatttcatcgccctccctgctgccaccctcagaattcccccagatccatctctcctgcacaacatatttgcttattctttatataataacacaacatgtctacctcttattacaagcctttacttctaacattttcaagctatgcttctgtaagttgcagaataccagcctttccctaactattctgctattaaatgttatttctttctaaagaaagaacaaaagycacaaaataactattgatctaaatagttaacgcttccaagaataatagctattttgaattagtactgcaaatgatctcactatatgcgaggatgtgtaaatctgaatttccagcaggggggaacaaaaaaaaaaacaacaaaaaacaaggaaatctatcccacttttggtaccagtttaatgcttttcttttctgagatgcttaaggaactgttgatatttgctcattctactactgctgaggtactctgatacagctggctactaccagaattctgttgtgcctaacaccagtaagaac

SEQ ID NO: 73686 - DNA, 600 bp, Chicken  19866894355074_2
tgtgcagaattccatacaatccatgtaaatcagctgcaggcaacagactgacgctaccctttaggatgctaagcctcaccccacggccaggctctcatgtaagacttcacaggcaagtgggagtcatccctccagcactgcgccttctgcacccaaaggtgtcaccagcacttcccatggcagggacaggggaagtaacctagtttagaactatgtatgttgctgaaggcattctttactcacagaaagtagtttagaaaacaaatccagctgtctttaagacagaaacccttacaagtyaatcacgaactcacagaattgtagggattggaaggaacctctgtggatctcccagtccaaccctctgccaaagcaggttccctacagtaggtggcacaggaaagcatccaggttggttttgagtacctccagaggatactcccccacctttctgggctgttccagtgctctgtcaccctcaaagtacagaagtttttcctcatgttcatatggaacttcctgtgctgcagttcatgcccactgcctcgtcctgttgctgggcaccaccaaagggcccagccccatccacttgactctcac

SEQ ID NO: 73687 - DNA, 600 bp, Chicken  19866894355076_1
gagaagtgttgtttgtttttgtttttttttttccctgtgctacttgttaatagcaatttacaagtcttttgtagctcctgattataatctaactcgtactattcatattttgtggattaattaatttttctgtattacttttcctgtaaactttgtcggcatgtatattcatgaaaagaacagaggggaaaaaatcccagaaattaccaaaagaaaaacccctgctaaaagcaataagtttgctgacagatggtagaatcagttgaaaatcgagtaccatatttactaagtctaacccayttagtaagccagaaaagtgttatctaattctatcccctgtgtgtttgtgttttggaataaacagatgcctaatgaggaatgtgtctagtatggtttttgaagaacctggatggatcctggttctgattcaatacttgactttgacaaagatgataaaatacacggcagaacctattgttttgtctcacaaaatcgtaaccgttccagtgctagctgatagacagaaagtggcttaaaaaaaaaggtgccagaatagggcacaaattgggaggggggggggggagaaaagaaaaggaaaaa

SEQ ID NO: 73688 - DNA, 600 bp, Chicken  19866894355087_1
tattttacgtgttcatctgtgctgtagtcagctgttagagcatatgtgctggctcaacaacttggtcctgataggattgtatgttatgtatggttgtaactcactcatcaaaacccatttgagagcttcagaaaaggtaaaacataacattccaaatgcaaagcaatatcaggatgctgaaatgcgaggtgatttgctaagcaacctggtcaaatgatttactgggtgggagggagcaacaatacctaagatacagtcagggtgtatgtcagaagatgacagaagaaaatcagtgtgttwaaggatcagcatgatgaacactgagagacacctgtggcttgctcctgagaggcactgtaarggagacacaagaagcaaagttcatagtaaagaaattgcattcagacttgcatttcacatattcagagagattcagatttggtttctccactatgggrgmaaacaggaacgatctaaagaggaaggtagaactgatgttaacaattacagggatatttttaagttctgttacagaacataaagagaaacaaaagtgggaattactgtctgtgcatttgccttcagtccaacaggcattta

SEQ ID NO: 73689 - DNA, 600 bp, Chicken  19866894355087_2
ttggtcctgataggattgtatgttatgtatggttgtaactcactcatcaaaacccatttgagagcttcagaaaaggtaaaacataacattccaaatgcaaagcaatatcaggatgctgaaatgcgaggtgatttgctaagcaacctggtcaaatgatttactgggtgggagggagcaacaatacctaagatacagtcagggtgtatgtcagaagatgacagaagaaaatcagtgtgttwaaggatcagcatgatgaacactgagagacacctgtggcttgctcctgagaggcactgtaarggagacacaagaagcaaagttcatagtaaagaaattgcattcagacttgcatttcacatattcagagagattcagatttggtttctccactatgggrgmaaacaggaacgatctaaagaggaaggtagaactgatgttaacaattacagggatatttttaagttctgttacagaacataaagagaaacaaaagtgggaattactgtctgtgcatttgccttcagtccaacaggcatttataggctcagtttccttcatgcagtgcaacctggaaggacaattctgccatactgcatttcy

SEQ ID NO: 73690 - DNA, 600 bp, Chicken  19866894355087_3
caaagcaatatcaggatgctgaaatgcgaggtgatttgctaagcaacctggtcaaatgatttactgggtgggagggagcaacaatacctaagatacagtcagggtgtatgtcagaagatgacagaagaaaatcagtgtgttwaaggatcagcatgatgaacactgagagacacctgtggcttgctcctgagaggcactgtaarggagacacaagaagcaaagttcatagtaaagaaattgcattcagacttgcatttcacatattcagagagattcagatttggtttctccactatgggrgmaaacaggaacgatctaaagaggaaggtagaactgatgttaacaattacagggatatttttaagttctgttacagaacataaagagaaacaaaagtgggaattactgtctgtgcatttgccttcagtccaacaggcatttataggctcagtttccttcatgcagtgcaacctggaaggacaattctgccatactgcatttcytttaaaaaaattaactgaatcagctgcattctgtttttagcaaagtgtttgggatcagcattctaacacaaattcccatcttccaatgagaataaac

SEQ ID NO: 73691 - DNA, 600 bp, Chicken  19866894355087_4
aagcaatatcaggatgctgaaatgcgaggtgatttgctaagcaacctggtcaaatgatttactgggtgggagggagcaacaatacctaagatacagtcagggtgtatgtcagaagatgacagaagaaaatcagtgtgttwaaggatcagcatgatgaacactgagagacacctgtggcttgctcctgagaggcactgtaarggagacacaagaagcaaagttcatagtaaagaaattgcattcagacttgcatttcacatattcagagagattcagatttggtttctccactatgggrgmaaacaggaacgatctaaagaggaaggtagaactgatgttaacaattacagggatatttttaagttctgttacagaacataaagagaaacaaaagtgggaattactgtctgtgcatttgccttcagtccaacaggcatttataggctcagtttccttcatgcagtgcaacctggaaggacaattctgccatactgcatttcytttaaaaaaattaactgaatcagctgcattctgtttttagcaaagtgtttgggatcagcattctaacacaaattcccatcttccaatgagaataaactt

SEQ ID NO: 73692 - DNA, 600 bp, Chicken  19866894355087_5
ggagacacaagaagcaaagttcatagtaaagaaattgcattcagacttgcatttcacatattcagagagattcagatttggtttctccactatgggrgmaaacaggaacgatctaaagaggaaggtagaactgatgttaacaattacagggatatttttaagttctgttacagaacataaagagaaacaaaagtgggaattactgtctgtgcatttgccttcagtccaacaggcatttataggctcagtttccttcatgcagtgcaacctggaaggacaattctgccatactgcatttcytttaaaaaaattaactgaatcagctgcattctgtttttagcaaagtgtttgggatcagcattctaacacaaattcccatcttccaatgagaataaacttaagcaactgctgtcgtttgtgcagtttgaggcacattttcatcgcaaggttttattccatttactgctctggatgctttatgctgttgtgtactcaggagatgccagattgggggattcagaaaggaaatcaaaggagacctttgcgtgtattccttcctaattcagctctgcagggacgcgtgcttggaactgtgttaaa

SEQ ID NO: 73693 - DNA, 600 bp, Chicken  19866894355087_6
atcagcattctaacacaaattcccatcttccaatgagaataaacttaagcaactgctgtcgtttgtgcagtttgaggcacattttcatcgcaaggttttattccatttactgctctggatgctttatgctgttgtgtactcaggagatgccagattgggggattcagaaaggaaatcaaaggagacctttgcgtgtattccttcctaattcagctctgcagggacgcgtgcttggaactgtgttaaatacagaggcagagtttaggaaaagaagtgattcaaggtgaattcaggaggagyaaaagtagaaagattcatgatacaacgttaaggcagatagacttrgcggccacacagtggcttctgaagggtaagagcgagccttgctgcttggtgtctcactgaggttgctagccctaatttggaagcaagttaattcatacagtgaaatcttttccatttactttcctagttgtgcccttcttaaaaatgttttgttttttttttccyttatgctgattttatgaagtctgtcttaaaattagactgaaatacactaagtgattaagtgaatgtagcacagaaaacattaacctgctt

SEQ ID NO: 73694 - DNA, 600 bp, Chicken  19866894355087_7
taagcaactgctgtcgtttgtgcagtttgaggcacattttcatcgcaaggttttattccatttactgctctggatgctttatgctgttgtgtactcaggagatgccagattgggggattcagaaaggaaatcaaaggagacctttgcgtgtattccttcctaattcagctctgcagggacgcgtgcttggaactgtgttaaatacagaggcagagtttaggaaaagaagtgattcaaggtgaattcaggaggagyaaaagtagaaagattcatgatacaacgttaaggcagatagacttrgcggccacacagtggcttctgaagggtaagagcgagccttgctgcttggtgtctcactgaggttgctagccctaatttggaagcaagttaattcatacagtgaaatcttttccatttactttcctagttgtgcccttcttaaaaatgttttgttttttttttccyttatgctgattttatgaagtctgtcttaaaattagactgaaatacactaagtgattaagtgaatgtagcacagaaaacattaacctgcttttaatttttccctcagctccctgtattgccagattccaggcagga

SEQ ID NO: 73695 - DNA, 600 bp, Chicken  19866894355087_8
cagctctgcagggacgcgtgcttggaactgtgttaaatacagaggcagagtttaggaaaagaagtgattcaaggtgaattcaggaggagyaaaagtagaaagattcatgatacaacgttaaggcagatagacttrgcggccacacagtggcttctgaagggtaagagcgagccttgctgcttggtgtctcactgaggttgctagccctaatttggaagcaagttaattcatacagtgaaatcttttccatttactttcctagttgtgcccttcttaaaaatgttttgttttttttttccyttatgctgattttatgaagtctgtcttaaaattagactgaaatacactaagtgattaagtgaatgtagcacagaaaacattaacctgcttttaatttttccctcagctccctgtattgccagattccaggcaggatcagcttttcacctgtaacctctttttgaaaaccacgtcatcaaatgggaacgtgcaatacagaacaatcccaaggaagaagcacattttcagtacacccaacctgaacatgaaatttttcaacagcaatgtttgttgaaccaagtgcactttttgttgtccttc

SEQ ID NO: 73696 - DNA, 600 bp, Chicken  19866894355104_1
aattatgacctgttttatttcttgattcattccatgcagcagcagctgcctctggagatggacagaaatctctccatgctgtgaagagcagcaattaaatctaggctttcaaatattaaccagaagcctaactgcttgctggcacacgtgttattgcacaatggatttggtgtgttaatacatgatagtgggtgtgcttctgtctgtggagggagtggtgtttacgaaatgacagtgcatatgtacaccttttgtgtgatgtttggtcctgctgcaagctgggatctgtttgaacacatrcagtgagaaagctgatagctcctgaatgttcagagctcctctgcttttttgtctgtcactttgcagcagcctctggttcccaggccacatccygttccttgtatttcagctgcctttctccccttctgccctcctgctggttctcgttgcaaatgccaagaagtgggcgactgcagtgtacgatgtgtaatcaggagctgaagtgctgactctgcataccccaagtgcctgaatgcctccgagcggggacgtggcaggataacctctgtgcagagtgatcagagaagagctcaccccttg

SEQ ID NO: 73697 - DNA, 600 bp, Chicken  19866894355104_2
attaaatctaggctttcaaatattaaccagaagcctaactgcttgctggcacacgtgttattgcacaatggatttggtgtgttaatacatgatagtgggtgtgcttctgtctgtggagggagtggtgtttacgaaatgacagtgcatatgtacaccttttgtgtgatgtttggtcctgctgcaagctgggatctgtttgaacacatrcagtgagaaagctgatagctcctgaatgttcagagctcctctgcttttttgtctgtcactttgcagcagcctctggttcccaggccacatccygttccttgtatttcagctgcctttctccccttctgccctcctgctggttctcgttgcaaatgccaagaagtgggcgactgcagtgtacgatgtgtaatcaggagctgaagtgctgactctgcataccccaagtgcctgaatgcctccgagcggggacgtggcaggataacctctgtgcagagtgatcagagaagagctcaccccttgggcgggatccaaacacaacatgggattaactttgccctatctgtgctgctagcagctgagagtcactgagagagcttatgtgatcggtcctgg

SEQ ID NO: 73698 - DNA, 600 bp, Chicken  19866894355107_1
gtgaagggctaagagtgatgaagagggtgtgttcagtgagcaatgtcagcatcctaggacaaggctggataacagatcttagcatgcgtaacttcccaggcagatctggacaacatacttaataaaattccaaccttatctgcaaggaagagactacttttctacctactctgcattcatgtgaactaagaatactacctgtagacaacagcaaatgtatttttcaggaaaaacctaacattaaagcaaggcatggaaattttcccttttccttagtgatgcctatatatcattagaacyaccctttgaattctgagaaggagagattttactgaagcattcctgtayactgttytttttcagatgataatttttttttcagtgcccaaataacctaaattcaatggtctttcctcccttttaaaaatgataaaaatctgtaactgttgaaccttggttatgaattccaacccctcagagcactggaaagatttgatcagcaaattgtcaatagtccagattcactgwggacaagatttcgtgggaaccacctctgagcctcctttctacccttgtgcaaaactttgcttgtgctcagta

SEQ ID NO: 73699 - DNA, 600 bp, Chicken  19866894355107_2
gcatcctaggacaaggctggataacagatcttagcatgcgtaacttcccaggcagatctggacaacatacttaataaaattccaaccttatctgcaaggaagagactacttttctacctactctgcattcatgtgaactaagaatactacctgtagacaacagcaaatgtatttttcaggaaaaacctaacattaaagcaaggcatggaaattttcccttttccttagtgatgcctatatatcattagaacyaccctttgaattctgagaaggagagattttactgaagcattcctgtayactgttytttttcagatgataatttttttttcagtgcccaaataacctaaattcaatggtctttcctcccttttaaaaatgataaaaatctgtaactgttgaaccttggttatgaattccaacccctcagagcactggaaagatttgatcagcaaattgtcaatagtccagattcactgwggacaagatttcgtgggaaccacctctgagcctcctttctacccttgtgcaaaactttgcttgtgctcagtatgcagaagggcactgtgctggctctctgttagtgttgacctgtgtaag

SEQ ID NO: 73700 - DNA, 600 bp, Chicken  19866894355107_3
aggacaaggctggataacagatcttagcatgcgtaacttcccaggcagatctggacaacatacttaataaaattccaaccttatctgcaaggaagagactacttttctacctactctgcattcatgtgaactaagaatactacctgtagacaacagcaaatgtatttttcaggaaaaacctaacattaaagcaaggcatggaaattttcccttttccttagtgatgcctatatatcattagaacyaccctttgaattctgagaaggagagattttactgaagcattcctgtayactgttytttttcagatgataatttttttttcagtgcccaaataacctaaattcaatggtctttcctcccttttaaaaatgataaaaatctgtaactgttgaaccttggttatgaattccaacccctcagagcactggaaagatttgatcagcaaattgtcaatagtccagattcactgwggacaagatttcgtgggaaccacctctgagcctcctttctacccttgtgcaaaactttgcttgtgctcagtatgcagaagggcactgtgctggctctctgttagtgttgacctgtgtaagatgttct

SEQ ID NO: 73701 - DNA, 600 bp, Chicken  19866894355107_4
aaaaacctaacattaaagcaaggcatggaaattttcccttttccttagtgatgcctatatatcattagaacyaccctttgaattctgagaaggagagattttactgaagcattcctgtayactgttytttttcagatgataatttttttttcagtgcccaaataacctaaattcaatggtctttcctcccttttaaaaatgataaaaatctgtaactgttgaaccttggttatgaattccaacccctcagagcactggaaagatttgatcagcaaattgtcaatagtccagattcactgwggacaagatttcgtgggaaccacctctgagcctcctttctacccttgtgcaaaactttgcttgtgctcagtatgcagaagggcactgtgctggctctctgttagtgttgacctgtgtaagatgttctgttctcccagckagggtgtgagggtctgytgttacagttgttgtctgtcaactgtccaggcatgtacatttgacaggctttctatgagagctactgttttgcctttgtatgcctgttttctgtgtttgtgttctctgtgaatatgatgccagagataacttgtcaccttgcat

SEQ ID NO: 73702 - DNA, 600 bp, Chicken  19866894355107_5
taatttttttttcagtgcccaaataacctaaattcaatggtctttcctcccttttaaaaatgataaaaatctgtaactgttgaaccttggttatgaattccaacccctcagagcactggaaagatttgatcagcaaattgtcaatagtccagattcactgwggacaagatttcgtgggaaccacctctgagcctcctttctacccttgtgcaaaactttgcttgtgctcagtatgcagaagggcactgtgctggctctctgttagtgttgacctgtgtaagatgttctgttctcccagckagggtgtgagggtctgytgttacagttgttgtctgtcaactgtccaggcatgtacatttgacaggctttctatgagagctactgttttgcctttgtatgcctgttttctgtgtttgtgttctctgtgaatatgatgccagagataacttgtcaccttgcatcaacttttcatatgccctcaccaargattaaagcacagaagagaaatagwgttattgttctttttatgttgtttttctccttatctttctaaagcagtgccaagggggtwaagggaaatgtttggcaatctaaactacc

SEQ ID NO: 73703 - DNA, 600 bp, Chicken  19866894355107_6
cccaaataacctaaattcaatggtctttcctcccttttaaaaatgataaaaatctgtaactgttgaaccttggttatgaattccaacccctcagagcactggaaagatttgatcagcaaattgtcaatagtccagattcactgwggacaagatttcgtgggaaccacctctgagcctcctttctacccttgtgcaaaactttgcttgtgctcagtatgcagaagggcactgtgctggctctctgttagtgttgacctgtgtaagatgttctgttctcccagckagggtgtgagggtctgytgttacagttgttgtctgtcaactgtccaggcatgtacatttgacaggctttctatgagagctactgttttgcctttgtatgcctgttttctgtgtttgtgttctctgtgaatatgatgccagagataacttgtcaccttgcatcaacttttcatatgccctcaccaargattaaagcacagaagagaaatagwgttattgttctttttatgttgtttttctccttatctttctaaagcagtgccaagggggtwaagggaaatgtttggcaatctaaactacctcaggttatactccttc

SEQ ID NO: 73704 - DNA, 600 bp, Chicken  19866894355107_7
ctgagcctcctttctacccttgtgcaaaactttgcttgtgctcagtatgcagaagggcactgtgctggctctctgttagtgttgacctgtgtaagatgttctgttctcccagckagggtgtgagggtctgytgttacagttgttgtctgtcaactgtccaggcatgtacatttgacaggctttctatgagagctactgttttgcctttgtatgcctgttttctgtgtttgtgttctctgtgaatatgatgccagagataacttgtcaccttgcatcaacttttcatatgccctcaccaargattaaagcacagaagagaaatagwgttattgttctttttatgttgtttttctccttatctttctaaagcagtgccaagggggtwaagggaaatgtttggcaatctaaactacctcaggttatactccttcacttggaacctcttctcattgctgtgagcaaaacttacaccaaactactaaagatctagtgaaatcaaaggcctttgaataaaagctgaaaacgaattttcagagtctaattttctgggtgtttttctgctgtagtaatttgtacatggtgactatacaggcttctcca

SEQ ID NO: 73705 - DNA, 600 bp, Chicken  19866894355107_8
aaaactttgcttgtgctcagtatgcagaagggcactgtgctggctctctgttagtgttgacctgtgtaagatgttctgttctcccagckagggtgtgagggtctgytgttacagttgttgtctgtcaactgtccaggcatgtacatttgacaggctttctatgagagctactgttttgcctttgtatgcctgttttctgtgtttgtgttctctgtgaatatgatgccagagataacttgtcaccttgcatcaacttttcatatgccctcaccaargattaaagcacagaagagaaatagwgttattgttctttttatgttgtttttctccttatctttctaaagcagtgccaagggggtwaagggaaatgtttggcaatctaaactacctcaggttatactccttcacttggaacctcttctcattgctgtgagcaaaacttacaccaaactactaaagatctagtgaaatcaaaggcctttgaataaaagctgaaaacgaattttcagagtctaattttctgggtgtttttctgctgtagtaatttgtacatggtgactatacaggcttctccagaggatgccactagtgagcagaaga

SEQ ID NO: 73706 - DNA, 583 bp, Chicken  19866894355107_9
cctgtgtaagatgttctgttctcccagckagggtgtgagggtctgytgttacagttgttgtctgtcaactgtccaggcatgtacatttgacaggctttctatgagagctactgttttgcctttgtatgcctgttttctgtgtttgtgttctctgtgaatatgatgccagagataacttgtcaccttgcatcaacttttcatatgccctcaccaargattaaagcacagaagagaaatagwgttattgttctttttatgttgtttttctccttatctttctaaagcagtgccaagggggtwaagggaaatgtttggcaatctaaactacctcaggttatactccttcacttggaacctcttctcattgctgtgagcaaaacttacaccaaactactaaagatctagtgaaatcaaaggcctttgaataaaagctgaaaacgaattttcagagtctaattttctgggtgtttttctgctgtagtaatttgtacatggtgactatacaggcttctccagaggatgccactagtgagcagaagagacattttcagacaaaagtcttgctttctgctatggacgtctt

SEQ ID NO: 73707 - DNA, 600 bp, Chicken  19866894355109_1
tgctgttcacctgacatgtctgacagctttttggctccaacagtcaaaagagtatcaagatcagaaaatgatttcttgttctcaaatgaagatatcctgaagggggccattttttgtagccttttcatagatcctaactgccaaaattcacactgtaactactccagatactaccaaagtatttaacattatatataatgcttctctgtgccttatcactctgagtattgtgcaataattatccatcttccttcacagagttattaagaaggttatttaattaatgtttctagcaccctygagattctcagatgaagaaacagtacgtctatgtagggctttgaggaaactttgaatcaactgtcataattacaaataaatcaaggacaaattttatagtatttcactcagtttttcctctgttaactactttcttcctacagctgaccatttactgccaactaaggtggaattccacattatgccttgctttaggaaaaaaagatcccacaaactacatccataacgtattaattgtatctaaggaacactggtgagtcagaccgtgttttcgcagtcacacctgtgcaacaagatgga

SEQ ID NO: 73708 - DNA, 600 bp, Chicken  19866894355109_2
atctaaggaacactggtgagtcagaccgtgttttcgcagtcacacctgtgcaacaagatggactcagagctacacctccttcatgcctgaaagcagtcatggcagaacaccaaaagatgcgtgcagcataatggctcctttgcttctgacaccaacatcacatcttcttggtgtcactgggaacaacccacagctgcgtatattaaattcccccaatcttcccatcactgttgttaggtagattaacttccaatccttcatttttcctgtcaattatttttaataacaaaataatatttyaaaaaaatatgtatataaattgtgtccttttatataaacgatagacatttttaaaaaaccaagaatatgtggattatgaaacaaacaaaaaaagcattygaactgtactacattgtaaataccaaacatgtgccggtttctttctggtagctttcactgtaaaggacccttttactttrtctgaggttaataactgaacattcacaagtgacatccatttagggcccataataattatctaagaaatcttttaagtattgtagaataaataaatttcaaaatcaaattcagcactaaaga

SEQ ID NO: 73709 - DNA, 600 bp, Chicken  19866894355109_3
tggcagaacaccaaaagatgcgtgcagcataatggctcctttgcttctgacaccaacatcacatcttcttggtgtcactgggaacaacccacagctgcgtatattaaattcccccaatcttcccatcactgttgttaggtagattaacttccaatccttcatttttcctgtcaattatttttaataacaaaataatatttaaaaaaaatatgtatataaattgtgtccttttatataaacgatagacatttttaaaaaaccaagaatatgtggattatgaaacaaacaaaaaaagcattygaactgtactacattgtaaataccaaacatgtgccggtttctttctggtagctttcactgtaaaggacccttttactttrtctgaggttaataactgaacattcacaagtgacatccatttagggcccataataattatctaagaaatcttttaagtattgtagaataaataaatttcaaaatcaaattcagcactaaagatcataacattggatttgtgagagtttacagattgttagggagaaaaagtaacatttctaacatgctgaatacttcatattatctaagaagcttaaatag

SEQ ID NO: 73710 - DNA, 600 bp, Chicken  19866894355109_4
ggaacaacccacagctgcgtatattaaattcccccaatcttcccatcactgttgttaggtagattaacttccaatccttcatttttcctgtcaattatttttaataacaaaataatatttaaaaaaaatatgtatataaattgtgtccttttatataaacgatagacatttttaaaaaaccaagaatatgtggattatgaaacaaacaaaaaaagcattygaactgtactacattgtaaataccaaacatgtgccggtttctttctggtagctttcactgtaaaggacccttttactttrtctgaggttaataactgaacattcacaagtgacatccatttagggcccataataattatctaagaaatcttttaagtattgtagaataaataaatttcaaaatcaaattcagcactaaagatcataacattggatttgtgagagtttacagattgttagggagaaaaagtaacatttctaacatgctgaatacttcatattatctaagaagcttaaatagcttaataatctgcaattaacttaagaatgaggtttgttttattttattttgaagtccaaaaggataaaatatttcctttt

SEQ ID NO: 73711 - DNA, 600 bp, Chicken  19866894355116_1
catgttatttgttggtgagatggctcggtgtggcagggagggctgttggctcaacagcatccacctcagagctgcctcgagatatttagatacctaagcaaataaacctacagctttgcaaataggccacgatacgtacatgtgacttgctcaaagtattaacagcttaggtttctcaggacttcaaaacattgtcttctgctcttcataacagctcagaaaaaacttttgccaaatgtgtttgttggtttttgtttagttgttgttttgttctgttcttttgccctgacaaactggaakgagaagcaccctgtagaaatccaataggccaagatacaggagctggtggctgtcataaaaattgcaaagctatcacttgcctgttagaagtggtggcaccactcttcctcaggaaagtgatggtgatacttgttttctaaaattccactttgaaaacattttttttctacatttttaattaaagggcattgcgctcattgcatgcaagagagaaattatgtttattcttcaaaaagtaaattgatttctaccccatgactgctcagtgaatagaagctgacgagctgtcatgagtctctg

SEQ ID NO: 73712 - DNA, 600 bp, Chicken  19866894355126_1
accactgacctgctgaacctcacaggctctcacagtcatgtagtatgacctgcactctctaggctctgcttagtactggtaagagcagtgactggggctgtctgttcaagaaacagagaaagtgtaagaggatctctgatcaactgatcacaactaggtagtttgtgttacctgaatacataaaaacattaaaatcagacaagaaacttctgtgtgccacaggcagatagaagacactgtactggatgtgaaagctaggcactgggtggctaaaatggaattattcctatcacctggtaytcctgcttgaacactgtctaccacatacagcgtaacatcacttgttggataaagctgcaaagtgtgggggaatcctggtgctgcaagccctgaggggctttggcacagtaatggtattgggctatattggcagggctgtgcactgccaacactgtagtcctctgtgtatggccaaaactttgggcacaagcatgcctctaagctcagctgccttggggttttgatggctgggagattgtctgcaggtgggtacacaatggcaactcaatcctatatccacttgaactccattcttaatcc

SEQ ID NO: 73713 - DNA, 600 bp, Chicken  19866894355128_1
tgcactggagcatttcagtcttcctagacaaagccaagttgaggtgactgtccataacttcttgccgaacaggttcaccatgactgaatggccagggtataacgagcatgagaagtaacatgtaggcatttgcctgtgagataattaacctttgaagtaaatgaacgggctgtggcagatgctccttctaggcaatattcaaactctttttaaaaatgaaatcctgattttatacagcaggcagtaatgggtgtaaccagacaccactaatggaagcctgctagacagcaatatgaaggygttgcagcagataattatcagagcctattcagtcctcacactgatatctcagcaagccacagactgaacagattcaaatcttgagcatctactactcctagctcttcagttttattaattcccactgttaagtccacttattcctgtaagatctgaggtcactacatcaacggtatactatttagctgttctggctgctctctcacttaaaataatcaaatttctacakgctgtgatcctccacaccacagcaaaggaccacagtgcccagtggtrcccaccagcactttctgaactcct

SEQ ID NO: 73714 - DNA, 600 bp, Chicken  19866894355128_2
ttatacagcaggcagtaatgggtgtaaccagacaccactaatggaagcctgctagacagcaatatgaaggygttgcagcagataattatcagagcctattcagtcctcacactgatatctcagcaagccacagactgaacagattcaaatcttgagcatctactactcctagctcttcagttttattaattcccactgttaagtccacttattcctgtaagatctgaggtcactacatcaacggtatactatttagctgttctggctgctctctcacttaaaataatcaaatttctacakgctgtgatcctccacaccacagcaaaggaccacagtgcccagtggtrcccaccagcactttctgaactcctctggtagtactgttgtcacaacacactcacaaaagaggtccttctccagaagggaaggtaaaaatctatctcagtcctgggaaagaaggtattcaatgctgcgtaccctacttaagggagggtgatgcaaaaagaactgccttgttctaacatcacaaatatccatccttctaaataagtgttcacggtctgggtttaccagtagcaccaggaaagctgtataggtgtc

SEQ ID NO: 73715 - DNA, 600 bp, Chicken  19866894355128_3
cctgctagacagcaatatgaaggygttgcagcagataattatcagagcctattcagtcctcacactgatatctcagcaagccacagactgaacagattcaaatcttgagcatctactactcctagctcttcagttttattaattcccactgttaagtccacttattcctgtaagatctgaggtcactacatcaacggtatactatttagctgttctggctgctctctcacttaaaataatcaaatttctacakgctgtgatcctccacaccacagcaaaggaccacagtgcccagtggtrcccaccagcactttctgaactcctctggtagtactgttgtcacaacacactcacaaaagaggtccttctccagaagggaaggtaaaaatctatctcagtcctgggaaagaaggtattcaatgctgcgtaccctacttaagggagggtgatgcaaaaagaactgccttgttctaacatcacaaatatccatccttctaaataagtgttcacggtctgggtttaccagtagcaccaggaaagctgtataggtgtccttttaaactggccttttcccccagcttatcccttctgacatactcc

SEQ ID NO: 73716 - DNA, 599 bp, Chicken  19866894355144_1
  misc_feature (1)..(50): n is any nucleotide
nnnnnnnnnnnnnnnnnnnnnnnnnnnnnnnnnnnnnnnnnnnnnnnnnntaaattgttaataaggtgaagaaagacatatctgaaaagagtgttgtcttgaaataaaaatcttaatttttgtaattttcaagaaatcaaaacaattgttacaatttcagcacatgcttgttcattttggatatgtgttggactatgtatgatagtccacattatgataacatttatataactgtttgataagatatactatggtatcttctcgctgagatgatgttaggtaccatgcactcagtgataytctcttgactctgccaaagagattggttttgaatttaaaggtaaacataacttatcacatcaaagctcttctgtgatttgtttctttgaaaatctttatattttgcttctcccttcttaaatagcataatagaaagcctgcctgcctttccaaatcaaatatttaaaagatattttattttccatataatagtatatgcttctataatatttttgggaggtggggtgaagagaagaaaactatccttttgcactaaatatttttgaagattttgaaggagttttaagtaatttatgaaa

SEQ ID NO: 73717 - DNA, 600 bp, Chicken  19866894355145_1
agcagattgatcaatactacctgacttaataccctattttcagttgctttcagatcctcaaatttaatcatgcagcctgaagattcagctgctttgtttttgagaaatttcaattggaaaaaataaaaaagaagcagaagaaagccattcattttggaaatgggattaaggaaaaaaaaaaaaaaagatatattctttacataaaagttcttataaattttcagctgaaatgctttaatgtttctttgacttaaatgagtggcttgaaatgccttttatgttctgcagaagttgataaargatactagacaacaaaatgtatttctttcaatatggaattgtctaagttacagatctgaatagagaaaactcattagataataactctttctgggatgtctacattggttaaatcaatgctttctgtactatttctgcaccagtgaaacaagagtttagaattggctgatctatattttctcactaaatatgacataaaaatatgaacttctgtgatatatctgttctttttttattgcgtatatacaatggattcatacatattttatgaaaacctttcaccaaaagctcttgcagtcc

SEQ ID NO: 73718 - DNA, 600 bp, Chicken  19866894355150_1
tacacagttgctaaactgatttggagggaagtagtcttgcctggcttggctaaactttggtaagaataggtctttcagtcttctttgcagctttctgaacaaatcatggtattaatgtttggttggggaggggaacttaatgcattttttaaaaccacaggtgtctttgagccatagctaggagcttggcttcctctggttttatattgtatcagagaaggaaatcagacctgttataggaaatcagagccaactttctataacggcacttaaatgaactctcacataacacactgcgcrtgtgctatcctggcatcagcagtcttcacctttgctttagcttgactgggctttggacaagttactctgcctgtctgatccttatctcaccttttacaaatatattggtggcaaacttaatagttaacgatctggttatgaagtagttcacatttgcaaagtgctttgatgtgagtcgctttagcttgtttgctaccaaggagcattaactaagttgtcgttctagacttggtgcagtggcaggtagtttagttcctggtgagtgccttaactgtaaaagtcaccgcaataaaacttttg

SEQ ID NO: 73719 - DNA, 600 bp, Chicken  19866894355150_2
tgcgccacagctgtgaatcattggaacaacttccaaacattgaggaaaaaggtctgcccagaattttcagctaatggagcagatgtgaggtcggggagtcactcccaggtattcaccttttcctgtctctgaggtgggatcaagacaaacgtccctctaatgggacaaaggaggaaaatgtgaagaaatctttaactgacggaggttgatctgtgggagtgccgaaaatacaatgcccatgcatcctctgaacttgagaataagatcacacaccagtttaagtgcagtatcaaagtgtcygtaggaatgactgcgaacaatcctgttggtcagtctgtactggtatctgtcaaagcccgtggaaaggtgggttgctgggcagtttgctggtgcagctttgtcttttagaaagaagctttcttagtaaaccactggaaacagctggaatgggaacagtccagtttctccatggtgcagaagtattgagaatttattgtgaagctgttttcagatacttcaaaatagaggaaccagaatcaaccagcagcctgggccctgcaaggtattgctggtgatgagactcgaccaggacttgctttt

SEQ ID NO: 73720 - DNA, 600 bp, Chicken  19866894355155_1
cataaaagaatatttcacttctactgctttgaaaaaataagtgctttccaacattcaaaatcaagcagccccaactggaggttgctttctggcttggtttgttaggggacagaagggatctttttcaggggagcccataagatctgaaatccagcctgaaattcttcataattttagtggatcttttaatcgaagaccttcttcagaaaccacactggttcaaagcttacttcttgtccttcaccaattttattttctctcttctttcactcttccctctgtaaatgaaagtaatgggcstttatacttctttaaaggaagacaagtgcataaataaccaccaaaaaatgtacctcacaaaagtcatggcagttatgcaattaagcattttctccttctcgttgtgtgttttattgaggtataaatcaggagtggaaggcaattccgtgcagataggaattttactgggggtgcagatcccctgggttcatctggaaaatgagaaacatacccatagatgatgcatctcatcgggtgcaagattcactggagctagagagccctacgtctagactgagatttaactttctcatttaaatc

SEQ ID NO: 73721 - DNA, 600 bp, Chicken  19866894355156_1
atgctgctttaaagttggccctcttgtaagagagatactgcattgttatacaggttatcctgtcagatttaactttctgaggtgacagggataaaggatctgctagatcagtgggtaatttgtcagtgagtaggtggattatgggatccagttccagatgaactggagatgtaggcatgctgtcatggatggaggtacctggaaaactgctcaaaacactgttgattaaaaccccagtgcaatgcagatgcagtgtagtagggttgacagcagtgcatgttcctggccccaaaagatttwatggcatagaaaccattaactgcagaaggaaaggatagtttctgtgatactgtgaaatwctatttgggatctattcacaatttgtcataaacgctgcactagaaataactgagaaaccgacctgttgctgatgtatctttaaatccccatttatgctttaaactgaaggacagtaccttgaatctgccagcctgccatgtacagttttttctgtgaccttcagacaaaaatgtcacaactatcctcattcttgaatgtctgtcttgcaaaaacctgcaaattccaacagcccttgacatt

SEQ ID NO: 73722 - DNA, 600 bp, Chicken  19866894355156_2
ctgtcagatttaactttctgaggtgacagggataaaggatctgctagatcagtgggtaatttgtcagtgagtaggtggattatgggatccagttccagatgaactggagatgtaggcatgctgtcatggatggaggtacctggaaaactgctcaaaacactgttgattaaaaccccagtgcaatgcagatgcagtgtagtagggttgacagcagtgcatgttcctggccccaaaagatttwatggcatagaaaccattaactgcagaaggaaaggatagtttctgtgatactgtgaaatwctatttgggatctattcacaatttgtcataaacgctgcactagaaataactgagaaaccgacctgttgctgatgtatctttaaatccccatttatgctttaaactgaaggacagtaccttgaatctgccagcctgccatgtacagttttttctgtgaccttcagacaaaaatgtcacaactatcctcattcttgaatgtctgtcttgcaaaaacctgcaaattccaacagcccttgacattatgcagtactttgggcaagcaggcagacagaaaatttcttgtttcacagaaatacggat

SEQ ID NO: 73723 - DNA, 561 bp, Chicken  19866894355172_1
  misc_feature (1)..(6): n is any nucleotide
nnnnnnctgaaaggaatagtgctgcgagaagccgcttctttcttttccttcgagctcttaactactgctggctcgctctgactattccagaaacactgttacgtgctgaagttcctcggagctggggaaatctgcctgtaaaaatggctccccccgccccaaagtgccacctgcaccctctccacggtggggaaggcactttggggaccacttgtccggccgtgatgttcagtccgcagtgatcgcacagccctcactctcgggaaggtcagtcacaggcgagcagtgctctttatacastgtaacattctgcgtgttggtatcagagcaatgcaaataagctgtaggccgtgctgctgctgacagcacttctctgaacttttttgtgggaggctgtgccagagccgctcgcaggcagagggcacttgtgtgtatgcaatgggtggcagcaggaacgttgggagcgctgcctgcgtggccccatcagcaggacagtgctccccaggcttgtggccatccgttcctccatggcacctgtgtgcgctgggcttgagggcacgg

SEQ ID NO: 73724 - DNA, 600 bp, Chicken  19866894355174_1
gtccgctttgttcccacctcctccctgtacccactgcaaccttttcccagccccttctcctccccagcccactgttgtgccccccagccctgagacacacacacccctggtgtgagaaggttgcacaagtccccagcgggagccagctcctgcccaaaggcaaaatgtgtggaattctcaaaggcaaggggcagggcatggatgcaggcagcatgaccagagaggcaccgggctatgcaatactcccgcaggaatgcccgtcgctctgtccgttccttcaacatcagcttgaggaccacyggtgagcctgggatggagggagagggtcagcaccaagattttgggtccatgtacttaatgagcatgcaactccaatgcaaagggtgcccccattcacattacaagcatgcaaccccccctgtgaagtgtgttcccatgcacactgtgagcatgcaactccaatgcaaacgatgtcctcttgcattatacatgcatgaggtgcagcattggggcaaagaccccacagctcctcaccaccatcccgaggctcagtgagcaccacatggccataggtgccactgcccagctcggccagcacgc

SEQ ID NO: 73725 - DNA, 600 bp, Chicken  19866894355189_1
agaatgacttctgtggtttgctgtccaaataatctatgtaagcctttgtgttcttggttttatctcactagatggaagaacttactaatttaagaccgtttccttggtgaatcacctgaggctttcaggaatggttaagaagagctctgatttgcccgttgtcttatctcgcaatgaaatgatctttctttaatgtgactagtcaggaatgtagcttccaggcatttatggctctgatgcttctccacatttcacccaggcagctgtcacgcgtgtggtgtttagccttgtcttcttatyaaaggtatttcattagaataatcttctaacagcagaaatggatccagataataacgtataccacgacactgacttctggttgttattcttcacttcctctgccaataaaaacttgtctttgactcagtcagtcaaatgatctgggtctatttttgttgtcatacttttttggttgcttttgttttctgaaggaaaaccaaatcgttcactactttgacctttcctttgcttgtagaaagcaaggtaaggccagccaagctgggagctgctacatgctttgatgtgtgcttggcgtttccc

SEQ ID NO: 73726 - DNA, 599 bp, Chicken  19866894355191_1
  misc_feature (1)..(112): n is any nucleotide
nnnnnnnnnnnnnnnnnnnnnnnnnnnnnnnnnnnnnnnnnnnnnnnnnnnnnnnnnnnnnnnnnnnnnnnnnnnnnnnnnnnnnnnnnnnnnnnnnnnnnnnnnnnnnnnnctgcttgcttcccctctcttacagttttacctaaataactgctggtatttcaggcaagcaatacctcctgtgactgctgctgagctttcagagctattgctgtcgggtgaaagatgctggcagtgctgtctctcctccccccatttttgacatcccaagccagctgtgttggcagctgacaaagactsagacctggcattggrgtgacactgcagatttcagctgtgayrgtctctcactgaatagtttttggaagaggtgcctgtggttttcaaagcagtcttttcccatctcttctctagagcaaactggagaaagccagaccaactgcctcctgtcgccagccttgttccagactcacgtgattcctgtgctgctgaagctctttgaggttcacgaggagcacgtgcggatggtgctgctgtctcacatccatgcctatgcagaactgttctctcgggaagagttgaaaaacatcatattgcca

SEQ ID NO: 73727 - DNA, 599 bp, Chicken  19866894355191_2
  misc_feature (1)..(97): n is any nucleotide
nnnnnnnnnnnnnnnnnnnnnnnnnnnnnnnnnnnnnnnnnnnnnnnnnnnnnnnnnnnnnnnnnnnnnnnnnnnnnnnnnnnnnnnnnnnnnnnnnctgcttgcttcccctctcttacagttttacctaaataactgctggtatttcaggcaagcaatacctcctgtgactgctgctgagctttcagagctattgctgtcgggtgaaagatgctggcagtgctgtctctcctccccccatttttgacatcccaagccagctgtgttggcagctgacaaagactsagacctggcattggrgtgacactgcagatttcagctgtgayrgtctctcactgaatagtttttggaagaggtgcctgtggttttcaaagcagtcttttcccatctcttctctagagcaaactggagaaagccagaccaactgcctcctgtcgccagccttgttccagactcacgtgattcctgtgctgctgaagctctttgaggttcacgaggagcacgtgcggatggtgctgctgtctcacatccatgcctatgcagaactgttctctcgggaagagttgaaaaacatcatattgccacaggttaaggatggg

SEQ ID NO: 73728 - DNA, 599 bp, Chicken  19866894355191_3
  misc_feature (1)..(71): n is any nucleotide
nnnnnnnnnnnnnnnnnnnnnnnnnnnnnnnnnnnnnnnnnnnnnnnnnnnnnnnnnnnnnnnnnnnnnnnctgcttgcttcccctctcttacagttttacctaaataactgctggtatttcaggcaagcaatacctcctgtgactgctgctgagctttcagagctattgctgtcgggtgaaagatgctggcagtgctgtctctcctccccccatttttgacatcccaagccagctgtgttggcagctgacaaagactsagacctggcattggrgtgacactgcagatttcagctgtgayrgtctctcactgaatagtttttggaagaggtgcctgtggttttcaaagcagtcttttcccatctcttctctagagcaaactggagaaagccagaccaactgcctcctgtcgccagccttgttccagactcacgtgattcctgtgctgctgaagctctttgaggttcacgaggagcacgtgcggatggtgctgctgtctcacatccatgcctatgcagaactgttctctcgggaagagttgaaaaacatcatattgccacaggttaaggatgggaaagtaatacatggtgcatatccaag

SEQ ID NO: 73729 - DNA, 599 bp, Chicken  19866894355191_4
  misc_feature (1)..(70): n is any nucleotide
nnnnnnnnnnnnnnnnnnnnnnnnnnnnnnnnnnnnnnnnnnnnnnnnnnnnnnnnnnnnnnnnnnnnnnctgcttgcttcccctctcttacagttttacctaaataactgctggtatttcaggcaagcaatacctcctgtgactgctgctgagctttcagagctattgctgtcgggtgaaagatgctggcagtgctgtctctcctccccccatttttgacatcccaagccagctgtgttggcagctgacaaagactsagacctggcattggrgtgacactgcagatttcagctgtgayrgtctctcactgaatagtttttggaagaggtgcctgtggttttcaaagcagtcttttcccatctcttctctagagcaaactggagaaagccagaccaactgcctcctgtcgccagccttgttccagactcacgtgattcctgtgctgctgaagctctttgaggttcacgaggagcacgtgcggatggtgctgctgtctcacatccatgcctatgcagaactgttctctcgggaagagttgaaaaacatcatattgccacaggttaaggatgggaaagtaatacatggtgcatatccaagt

SEQ ID NO: 73730 - DNA, 599 bp, Chicken  19866894355193_1
  misc_feature (1)..(190): n is any nucleotide
nnnnnnnnnnnnnnnnnnnnnnnnnnnnnnnnnnnnnnnnnnnnnnnnnnnnnnnnnnnnnnnnnnnnnnnnnnnnnnnnnnnnnnnnnnnnnnnnnnnnnnnnnnnnnnnnnnnnnnnnnnnnnnnnnnnnnnnnnnnnnnnnnnnnnnnnnnnnnnnnnnnnnnnnnnnnnnnnnnnnnnnnnnnnnnttcaggactggagaagagactagtactgacttttaagggagggcttttggttctctgtcctagtgaatccatggcgatgtcacttatcagcttctgattctccagccagwaatcatagctgtctccatcaacccactgatgtctcaaaagctctccttctgcacagctcagggatccttggagcggtcccaacgttatatgcctgcatagttgcttccccccacccttgcagagatctcctgactcactcactcacaagtggattcatgttttcctgctatttatacgcacagcagtcatcccagctgtgcattagggtgcatgatgcacactgtcgtgacctgacatctttccccatatatgtgcatacttgactagactgtgagtcaaggcaagtaaaattgtgtgg

SEQ ID NO: 73731 - DNA, 573 bp, Chicken  19866894355193_2
cggtcccaacgttatatgcctgcatagttgcttccccccacccttgcagagatctcctgactcactcactcacaagtggattcatgttttcctgctatttatacgcacagcagtcatcccagctgtgcattagggtgcatgatgcacactgtcgtgacctgacatctttccccatatatgtgcatacttgactagactgtgagtcaaggcaagtaaaattgtgtgggatgctcttttgagtgctaggcctgcattcaaaactgccatctgttgggaccttcaattgagataagcctatgyagttattcacaagctattatgtgatgctctatcatatctgaatgaaccagacattcaaatgaatttagatgaatttatccatatggtgctgcaaacctttgtcgcaggaagataacaaagcacagaragaaaatgatgactccaaagctttggtgcttaccatgcggggtttttctcttgtgtttggaatttgtttcctctatggcttgctctgaggactttgctattttctggatttatcatgtaaagtccccattaatgtcaatagaagtt

SEQ ID NO: 73732 - DNA, 446 bp, Chicken  19866894355193_3
cattagggtgcatgatgcacactgtcgtgacctgacatctttccccatatatgtgcatacttgactagactgtgagtcaaggcaagtaaaattgtgtgggatgctcttttgagtgctaggcctgcattcaaaactgccatctgttgggaccttcaattgagataagcctatgyagttattcacaagctattatgtgatgctctatcatatctgaatgaaccagacattcaaatgaatttagatgaatttatccatatggtgctgcaaacctttgtcgcaggaagataacaaagcacagaragaaaatgatgactccaaagctttggtgcttaccatgcggggtttttctcttgtgtttggaatttgtttcctctatggcttgctctgaggactttgctattttctggatttatcatgtaaagtccccattaatgtcaatagaagtt

SEQ ID NO: 73733 - DNA, 600 bp, Chicken  19866894355200_1
ttttctgtctcctgtagggtaagtggtgccaaatcagaactgtgggaataaaattcattggattctgattaactcaagcattgtagcagtacctaaattggctcttagaatttcatgtctctcagaggtcataaggaatctctgtggaaatagaagaaggagtcggttctataccaatggtgatgcatatttattttccaccaaaatgaatttcatggatgaagttttattttcctatttcttaaaaacgagattttatggaagtatttttttttttttaatgaaattggagttgaatcratggtctatcccttctgttcatatggtttcagatgcctaaagccacaggatatgaggtgggttattagatatgcctttccaaaaaggaaatggtaagacaaaaatggcctgcctgaagttacagtttatagattagaaaaaggcacaaacaattaaaagacagagacagttagggcaaattacttgcaatcaagttgcagctaaatgagcttcttgatgaggaaaccaaatttatgttgyttagaaccacaaagaaatgttcccaaaacaaaacaaaaaaaagttgaaggtgagcaaagt

SEQ ID NO: 73734 - DNA, 600 bp, Chicken  19866894355200_2
cttaaaaacgagattttatggaagtatttttttttttttaatgaaattggagttgaatcratggtctatcccttctgttcatatggtttcagatgcctaaagccacaggatatgaggtgggttattagatatgcctttccaaaaaggaaatggtaagacaaaaatggcctgcctgaagttacagtttatagattagaaaaaggcacaaacaattaaaagacagagacagttagggcaaattacttgcaatcaagttgcagctaaatgagcttcttgatgaggaaaccaaatttatgttgyttagaaccacaaagaaatgttcccaaaacaaaacaaaaaaaagttgaaggtgagcaaagtgttagcacaattggatacagatgtgctgataagagaagttatgggtgcaattaaagttctggtcttggataataaagaaaagagtagtaactacagagagctttttctgtcaaatccagtgagacaaaaccttaacagatgtaaaatagtggtggttatattcaaggtcttttctcctctatttccacctgtggctagcaacttcaatcatcagttttgattcaaaacaaacaaattttg

SEQ ID NO: 73735 - DNA, 553 bp, Chicken  19866894355202_1
acttttctgtcctgttttccatagctttggtaagtcaaaattaacatgcatagcatttttcagtaactaaacgtagatttcctctctacttaataaaaagaagtccctagtctgaacttctggaggaaccttcttcccactatgtattgaaggagcctggcagccttaaaggatgaagttggcttttgtgaatatctccttacagcaacacaatttagtagttcagagtgatgacgactataagttgaacttcttatgctgcaagtagttgtcttaaatgtacaagcttcttcagttttrctggcttttctgtagaatttgaaaaggcatcctgaagagtagtttatcttttagatatatcttaaacagtaatggatctggtcttttctacttcagctttcctatgtggaggcagttatttggagataatctccttgagaatgcatttaattaatttgaagtccttgtaagaattaggtggagttggagcccgacgtactggattctgaactgactcgtaatgacagaagagatctggagtgtgctagaaata

SEQ ID NO: 73736 - DNA, 600 bp, Chicken  19866894355209_1
catatctatcaataactgtaccatcaatcccttccatctgtctaaatttgcttacacctagctgaatatattcatgcagatgttataggctactcctgcattatgcacttttttaggcattcacatacatgtttagttttgagtatgcacacaatattaatttgccatagatttctgttgtaagcatgctaggcaattagcaataatgttcaaagttagctacccaagttcttggtctgtcaagcttctttccttattgtgactgaagaaaaaaggatgtcagtgtggaagatccttgayttcaggaccctgcactgaaagaacactggctattttggttcctagtttttatgcctggtacagtcacactgaacatcataaaaactatacttctgctgtttttagttygcaaaattcaactctaaaactcttgtagtatatgtgaaagctgtctgtataacaaaaagccagtccaatattcttgattatgwtcatttctattaaggagaaacttgtactctaataatgaggaacaacattattaggaagacttctgagacatcatctcagtacaaatgagggcaggagggtgcctctgca

SEQ ID NO: 73737 - DNA, 600 bp, Chicken  19866894355209_2
ttttttaggcattcacatacatgtttagttttgagtatgcacacaatattaatttgccatagatttctgttgtaagcatgctaggcaattagcaataatgttcaaagttagctacccaagttcttggtctgtcaagcttctttccttattgtgactgaagaaaaaaggatgtcagtgtggaagatccttgayttcaggaccctgcactgaaagaacactggctattttggttcctagtttttatgcctggtacagtcacactgaacatcataaaaactatacttctgctgtttttagttygcaaaattcaactctaaaactcttgtagtatatgtgaaagctgtctgtataacaaaaagccagtccaatattcttgattatgwtcatttctattaaggagaaacttgtactctaataatgaggaacaacattattaggaagacttctgagacatcatctcagtacaaatgagggcaggagggtgcctctgcagatgacctggttcaatcctcctcccacccccagtcagagcagggtcagcaggagcagtttgcttggtgaccagttgggttttgaacatttccaacagtggagactcca

SEQ ID NO: 73738 - DNA, 600 bp, Chicken  19866894355209_3
ggcaattagcaataatgttcaaagttagctacccaagttcttggtctgtcaagcttctttccttattgtgactgaagaaaaaaggatgtcagtgtggaagatccttgayttcaggaccctgcactgaaagaacactggctattttggttcctagtttttatgcctggtacagtcacactgaacatcataaaaactatacttctgctgtttttagttygcaaaattcaactctaaaactcttgtagtatatgtgaaagctgtctgtataacaaaaagccagtccaatattcttgattatgwtcatttctattaaggagaaacttgtactctaataatgaggaacaacattattaggaagacttctgagacatcatctcagtacaaatgagggcaggagggtgcctctgcagatgacctggttcaatcctcctcccacccccagtcagagcagggtcagcaggagcagtttgcttggtgaccagttgggttttgaacatttccaacagtggagactccacaggctctcacagcatccagtgtttgactgtcctcattagatttttttccttctattcatacagggttccctatatttcagtg

SEQ ID NO: 73739 - DNA, 563 bp, Chicken  19866894355211_1
ccagggaaagacacaaaacagactggatgcccctcgctgcaccataatggccccagacccaacccggggcaccgctcccatcaccccaataccccgacagacagagaaggggcagagcctgagcctggtgcccccatgtccctgtacatggggatggggtgaagagatgggaggatgaaaggggtcctccagccgtcatgctccaatgggatccctctgctgggggctgatcagagcctcaggacgggatttggagtgggaacccacactcgggttaagcccgagcagttcggagtggcmgcacctcctccgttcccctcccgcagctcacggccgggccggcggatgcacggagccgggaggcggctgccctggcaacggcaccatggcaacagcgccatggcaacagcgccatggcaacgcgggcgagacggcacccggccgggggatgcgcgatgtgccgcgctccgctccgaccgccaggacctcgggacggggccgggccgggattcggcacctgtaaggctcccgggaagccgcagccacgccggtgtgagctgcac

SEQ ID NO: 73740 - DNA, 599 bp, Chicken  19866894355212_1
  misc_feature (1)..(11): n is any nucleotide
nnnnnnnnnnntgggtgaaaataattaagataaaggtatcactttatcttccaatggagcttatttatgcattgaacagagcatttcatatatttagtttactgcttcctcatacaaacaggagaaaagaactattcgaatttgtaaaggtgtagatttttaactgtgtatgtccctcaaaaaaaaaaaaaaacatttactctgaagtcagtttcatcagttttagtaattaaaaattctctgcactaatttgcttgcaacttactttaaaaaaaaaaaggcaagaaagctggtattttyaatattcatttaaatacttctcgtctcacatygcacttgcccttcattccctccaatctgtataagaatatgattacttaaatagcattcttcagcataatgatcagattaggtcttacctgatggcatatgtagaagcwgtacacattaggaataacactaacaccataatgactccagtcagacctggaactaaaacaaacattatgtaacttatatttgaattytggggaggtatacttatctactaaacagatgagtaagaattaatcctgtatctctatttgtaagactgactg

SEQ ID NO: 73741 - DNA, 600 bp, Chicken  19866894355212_2
aaggtatcactttatcttccaatggagcttatttatgcattgaacagagcatttcatatatttagtttactgcttcctcatacaaacaggagaaaagaactattcgaatttgtaaaggtgtagatttttaactgtgtatgtccctcaaaaaaaaaaaaaaacatttactctgaagtcagtttcatcagttttagtaattaaaaattctctgcactaatttgcttgcaacttactttaaaaaaaaaaaggcaagaaagctggtattttyaatattcatttaaatacttctcgtctcacatygcacttgcccttcattccctccaatctgtataagaatatgattacttaaatagcattcttcagcataatgatcagattaggtcttacctgatggcatatgtagaagcwgtacacattaggaataacactaacaccataatgactccagtcagacctggaactaaaacaaacattatgtaacttatatttgaattytggggaggtatacttatctactaaacagatgagtaagaattaatcctgtatctctatttgtaagactgactgtgcaagtttaggcatttcttttttgttccaaac

SEQ ID NO: 73742 - DNA, 600 bp, Chicken  19866894355212_3
tttgtaaaggtgtagatttttaactgtgtatgtccctcaaaaaaaaaaaaaaacatttactctgaagtcagtttcatcagttttagtaattaaaaattctctgcactaatttgcttgcaacttactttaaaaaaaaaaaggcaagaaagctggtattttyaatattcatttaaatacttctcgtctcacatygcacttgcccttcattccctccaatctgtataagaatatgattacttaaatagcattcttcagcataatgatcagattaggtcttacctgatggcatatgtagaagcwgtacacattaggaataacactaacaccataatgactccagtcagacctggaactaaaacaaacattatgtaacttatatttgaattytggggaggtatacttatctactaaacagatgagtaagaattaatcctgtatctctatttgtaagactgactgtgcaagtttaggcatttcttttttgttccaaactctaaactctgttgaacactacaattataaacctgatcagggacaaaatttcaagcaaatcaatttcaatgcaagctgtcactgcaattgtttgccaacccatttcat

SEQ ID NO: 73743 - DNA, 600 bp, Chicken  19866894355212_4
aattaaaaattctctgcactaatttgcttgcaacttactttaaaaaaaaaaaggcaagaaagctggtattttyaatattcatttaaatacttctcgtctcacatygcacttgcccttcattccctccaatctgtataagaatatgattacttaaatagcattcttcagcataatgatcagattaggtcttacctgatggcatatgtagaagcwgtacacattaggaataacactaacaccataatgactccagtcagacctggaactaaaacaaacattatgtaacttatatttgaattytggggaggtatacttatctactaaacagatgagtaagaattaatcctgtatctctatttgtaagactgactgtgcaagtttaggcatttcttttttgttccaaactctaaactctgttgaacactacaattataaacctgatcagggacaaaatttcaagcaaatcaatttcaatgcaagctgtcactgcaattgtttgccaacccatttcatcctggaatgagaaagagcccaaaattattctctatggcactgtaatatgcttgaaattattgcctgtagagcaaggtccatgagagt

SEQ ID NO: 73744 - DNA, 599 bp, Chicken  19866894355213_1
  misc_feature (1)..(44): n is any nucleotide
nnnnnnnnnnnnnnnnnnnnnnnnnnnnnnnnnnnnnnnnnnnnttctttttccctagtgcctttgatttcttctttgcatgcacagacatgcacttaattaaaactttccatccaagtggcattagctagacacgcaaggcataccaagatgctctcaggcttccttccagaaagccagcagtgctgacgccttccttcatttacgttaaaatgtcagcaaaacaagcaatttatgaccactatctgcagcaatacagcgcagacacagcctttagctagttctggtcccactgacctrtccacattgccaaatgcaaggtcagaacacactttactaagtgtcttccagaacactataataaaataaatcagtaatacgatcatttaaaaaggtgtcagggagcagcaagaacaaatcccattagcagacaaaaggatttgtgaggatatctactattcgccactttgaaaatgtaaccctgaggctttatatgtacgagcagggcacagatgtatcacgttatgaaatgagtttggtttttatcaggacgtctggatttttgttagcaaataaagatacaatgagaaaagcaaaag

SEQ ID NO: 73745 - DNA, 525 bp, Chicken  19866894355213_2
tcagaacacactttactaagtgtcttccagaacactataataaaataaatcagtaatacgatcatttaaaaaggtgtcagggagcagcaagaacaaatcccattagcagacaaaaggatttgtgaggatatctactattcgccactttgaaaatgtaaccctgaggctttatatgtacgagcagggcacagatgtatcacgttatgaaatgagtttggtttttatcaggacgtctggatttttgttagcaaataaagatacaatgagaaaagcaaaagcctgtcatacagcactatgatktaggaattttaaaaagtatctgaaaaaaagagaaacaactaaaacatcgtgtaattgccagaagcattttttgaaagtccctaagacatgacaatagctctcattctgtggtaccagctctgctttgaaagactaatggaaggcttcaggaagatatctggcaaacaacaggagagaaaaagtgtattttttgatcaccaacgtgatcctacaggaaaaacaggg

SEQ ID NO: 73746 - DNA, 600 bp, Chicken  19866894355215_1
tgttcgtggacacagaaaaccacagacatgggctatttttctaaagcaatgtgcctgaaaacacatctataatagacttggacaaagaacttacattgaagtctctctatggatgcgttgtttccccctaaacagctgctgagataatgaacaaggcacagccgttctacgtgcatctgaaaacctgaagagcaagaggacgatgctaaaaagatggcacgtatctttaatggattgtaacaactctataacaacctgaaaaaacttgaaatcgtgggaatgctgtcgagtcctgcagamctggctgggggacttccctacagaactcccatttgctgcccctcgttcattagggacatcagtgtatacaagtaggaaaacagccaatgcacacatattcgagaactccattctcagtccatgggagctggttccagagaggaatgaagacgtgggacacactcaactttcagggcacttcctgaagcttttctgaaagcttagggaacgtttgcagtttcctacgctcatgccacagaagcaagataggattctgtagttacacttttattactgtgataaagatggctttatttttat

SEQ ID NO: 73747 - DNA, 600 bp, Chicken  19866894355225_1
gtaacctgctatcaaggcctacacagaaggcacggcacagtctgactgaatcaactttaacctgacaggcaaaaaaaaaaaaaaaaaaaaaaacaccaataatgtgctcacatcagctctggaaaaaaaaaatattttcaatagcaaaatttaaaatcagacattacgtgactccgtgactgcagtctaaatctatgagtatggaaattctgttagcaatctattttgtggatgtatagacctcatcccaaactaaaaagctcatataggagcatttatattgatagatcccatttccartcaactcaggcctacagtttaattacaggatttctacaatgtatatgtgttttcttattgccatattaaccataagacaggacaaataggtcaaaatcttaaaaatcacagaataaccattatgactttgagctgtttgacagacatcaaacactgccctccaaaagcttccacacctttgcaaccagtcttgaatgtcacccctagaagatgatgaatctgttggcggagtttaattgtgcctggaatcagcagtactttggaacaggggatcccataaacagggcagctttggaagca

SEQ ID NO: 73748 - DNA, 599 bp, Chicken  19866894355231_1
  misc_feature (1)..(275): n is any nucleotide
nnnnnnnnnnnnnnnnnnnnnnnnnnnnnnnnnnnnnnnnnnnnnnnnnnnnnnnnnnnnnnnnnnnnnnnnnnnnnnnnnnnnnnnnnnnnnnnnnnnnnnnnnnnnnnnnnnnnnnnnnnnnnnnnnnnnnnnnnnnnnnnnnnnnnnnnnnnnnnnnnnnnnnnnnnnnnnnnnnnnnnnnnnnnnnnnnnnnnnnnnnnnnnnnnnnnnnnnnnnnnnnnnnnnnnnnnnnnnnnnnnnnnnnnnnnnnnnnnnnnnnnnnnnnnnnnnnncctcctcctccctgggagctgtggytcctctcatcaactcatagaatttccccagagggaaagaatccataaggataattaagtccaactccaggtccacacaggaccacccaaaacccagcccyaatgtgtgagagcggtgtcccagcrctccctgagctccggcatcggggccgtgcccactgccctgggcagcctgtgccatgcccacmgccctctggggcacagcctttccctcagccccacctgccctcccctgacacagctccgtgccgttcccttgtgccctgtcactgtccccagaaagcagaccttcgcactgcc

SEQ ID NO: 73749 - DNA, 599 bp, Chicken  19866894355231_2
  misc_feature (1)..(175): n is any nucleotide
nnnnnnnnnnnnnnnnnnnnnnnnnnnnnnnnnnnnnnnnnnnnnnnnnnnnnnnnnnnnnnnnnnnnnnnnnnnnnnnnnnnnnnnnnnnnnnnnnnnnnnnnnnnnnnnnnnnnnnnnnnnnnnnnnnnnnnnnnnnnnnnnnnnnnnnnnnnnnnnnnnnnnnnnnnnnnnncctcctcctccctgggagctgtggytcctctcatcaactcatagaatttccccagagggaaagaatccataaggataattaagtccaactccaggtccacacaggaccacccaaaacccagcccyaatgtgtgagagcggtgtcccagcrctccctgagctccggcatcggggccgtgcccactgccctgggcagcctgtgccatgcccacmgccctctggggcacagcctttccctcagccccacctgccctcccctgacacagctccgtgccgttcccttgtgccctgtcactgtccccagaaagcagaccttcgcactgccctccactccctgtgaggagctggaggctgccatgaggcctcccctcaactccattgctctgtgttgagcaaacccaagggcctcagctgctcctttattc

SEQ ID NO: 73750 - DNA, 599 bp, Chicken  19866894355231_3
  misc_feature (1)..(150): n is any nucleotide
nnnnnnnnnnnnnnnnnnnnnnnnnnnnnnnnnnnnnnnnnnnnnnnnnnnnnnnnnnnnnnnnnnnnnnnnnnnnnnnnnnnnnnnnnnnnnnnnnnnnnnnnnnnnnnnnnnnnnnnnnnnnnnnnnnnnnnnnnnnnnnnnnnnnnncctcctcctccctgggagctgtggytcctctcatcaactcatagaatttccccagagggaaagaatccataaggataattaagtccaactccaggtccacacaggaccacccaaaacccagcccyaatgtgtgagagcggtgtcccagcrctccctgagctccggcatcggggccgtgcccactgccctgggcagcctgtgccatgcccacmgccctctggggcacagcctttccctcagccccacctgccctcccctgacacagctccgtgccgttcccttgtgccctgtcactgtccccagaaagcagaccttcgcactgccctccactccctgtgaggagctggaggctgccatgaggcctcccctcaactccattgctctgtgttgagcaaacccaagggcctcagctgctcctttattcatttaggcctctagacccttcccca

SEQ ID NO: 73751 - DNA, 599 bp, Chicken  19866894355231_4
  misc_feature (1)..(88): n is any nucleotide
nnnnnnnnnnnnnnnnnnnnnnnnnnnnnnnnnnnnnnnnnnnnnnnnnnnnnnnnnnnnnnnnnnnnnnnnnnnnnnnnnnnnnnnncctcctcctccctgggagctgtggytcctctcatcaactcatagaatttccccagagggaaagaatccataaggataattaagtccaactccaggtccacacaggaccacccaaaacccagcccyaatgtgtgagagcggtgtcccagcrctccctgagctccggcatcggggccgtgcccactgccctgggcagcctgtgccatgcccacmgccctctggggcacagcctttccctcagccccacctgccctcccctgacacagctccgtgccgttcccttgtgccctgtcactgtccccagaaagcagaccttcgcactgccctccactccctgtgaggagctggaggctgccatgaggcctcccctcaactccattgctctgtgttgagcaaacccaagggcctcagctgctcctttattcatttaggcctctagacccttccccaccttcatatcccttctttggatamtggtagttttrcatcctttacgctgtggctctgaaagc

SEQ ID NO: 73752 - DNA, 600 bp, Chicken  19866894355231_5
ccgtgcccactgccctgggcagcctgtgccatgcccacmgccctctggggcacagcctttccctcagccccacctgccctcccctgacacagctccgtgccgttcccttgtgccctgtcactgtccccagaaagcagaccttcgcactgccctccactccctgtgaggagctggaggctgccatgaggcctcccctcaactccattgctctgtgttgagcaaacccaagggcctcagctgctcctttattcatttaggcctctagacccttccccaccttcatatcccttctttggatamtggtagttttrcatcctttacgctgtggctctgaaagctgcacacagcgctcgaggcgaggccgcacagcacagtcacctcagaaggtgccatgtctctccctgcagccagcttcaccacactgcccccagctttgtgccaggcctttctgcagggctgcacgacgggaggctcaccgtggctcctccatcgctccctttgggccgcagctcgaggggcactaacttcgtgtgaactttctcctttgctgctctctgctcagatcccacggatccgggaggggtcctcccttggcggagc

SEQ ID NO: 73753 - DNA, 600 bp, Chicken  19866894355231_6
gccctgggcagcctgtgccatgcccacmgccctctggggcacagcctttccctcagccccacctgccctcccctgacacagctccgtgccgttcccttgtgccctgtcactgtccccagaaagcagaccttcgcactgccctccactccctgtgaggagctggaggctgccatgaggcctcccctcaactccattgctctgtgttgagcaaacccaagggcctcagctgctcctttattcatttaggcctctagacccttccccaccttcatatcccttctttggatamtggtagttttrcatcctttacgctgtggctctgaaagctgcacacagcgctcgaggcgaggccgcacagcacagtcacctcagaaggtgccatgtctctccctgcagccagcttcaccacactgcccccagctttgtgccaggcctttctgcagggctgcacgacgggaggctcaccgtggctcctccatcgctccctttgggccgcagctcgaggggcactaacttcgtgtgaactttctcctttgctgctctctgctcagatcccacggatccgggaggggtcctcccttggcggagcgcagggacagc

SEQ ID NO: 73754 - DNA, 600 bp, Chicken  19866894355233_1
tagatatcaaaggcttgtgcttcatctcagtctccaaattgaatgagagtctttaaagtttgcagagataagggacagagattggttctatatcagctcttggagaggaaatgaatgacactttcatcactttctcacttttttcagcaccaggggaaaactccgtgcaagacattaatggtgttttgagagactttcacatcttgcaaaaagtagcaataaatgaacttctccagtggctgagcatacatcatttattttaaaggccattagggttgaggctgattctctgagtgcagkctttctgcttgtcaactacaaaacacaaacgtctctactgtgtttgcacagaagtgtggttttttttaacgtttgtttgttttaaagtagttcctcccatttggatcagaggatcaagaacagcagagactgatgatttcccaaactcagcccttccagttcaaatcagccatggagcaatgagaattggaggaaactgaaactttgttgttggttgggctggaagttttgctgtacctcaggtccagggagaattcccaggctgggaaatttcagctcaagtggttaaaactgagcaaa

SEQ ID NO: 73755 - DNA, 600 bp, Chicken  19866894355240_1
gggtgcagtcaggaaaagcactgtaaaatgtaaattgcattgtgctgaaaatatagcagctgttagtcagagtgaagaacaaggagcaaagtcagatgagctgtaactcaaaggctgtgtgcagtgccaagggtgtctggaacagggcacaaatccatttctaactcctggtacttacaacatcctattactctgatattatttagaagttaattacaggccccatcagctcttttggctcaacaatatttcagtgagaagtattcgggcattatgtgactggttgcaagggggattatmaaaaagtcggagaagtgtaataatcaggggatttctttgttaataaggaacctaatgaaaaacaaattagttaacactacactgagttgaagtcttgctgctggcatatttgaaattaattcaaaaaaacaagcttgcaagacattttaaagtttagtaaaataccaaaattatgcatatgtttttcttaatttagatctccagttcatgtttttaggcatacrggtgatcctcatcagcatagtatctgaacatttctggaatgctatctgaaaaatcagaaggcagaaaatgttatgt

SEQ ID NO: 73756 - DNA, 600 bp, Chicken  19866894355240_2
atcagctcttttggctcaacaatatttcagtgagaagtattcgggcattatgtgactggttgcaagggggattatmaaaaagtcggagaagtgtaataatcaggggatttctttgttaataaggaacctaatgaaaaacaaattagttaacactacactgagttgaagtcttgctgctggcatatttgaaattaattcaaaaaaacaagcttgcaagacattttaaagtttagtaaaataccaaaattatgcatatgtttttcttaatttagatctccagttcatgtttttaggcatacrggtgatcctcatcagcatagtatctgaacatttctggaatgctatctgaaaaatcagaaggcagaaaatgttatgtttaaaataaataagtaaatgtattatctgtacatgaatccacctcaatccacagctgcattaaatctgtccatggctgtttaggaataacgttctggataagctgcagcctgtgctttatctgcagtttcctgagaagataaacacaatatggctgtgtatgtttctgatatgccaaggagaggctgctaattatgacagaggctcattgtgtggcactcctag

SEQ ID NO: 73757 - DNA, 567 bp, Chicken  19866894355240_3
ttctggaactgaaatctgaccagattctgacaaaaccttttacaaacttctagttggaaagtagtgaaaagtggttggaagtgtttcttgttggaaagtgtatcttgctgtctacaatgcaccactcacagggataaacttttcctcaccacctatcaaagtgtttgtttccccattggttttctccggtatttgttcccttgccaactaacatacatttcaactaacatggtgtttgtgggctgaagagagaagagtgcactttgtattaatgtttgagttcccaaatgaaacattcayagaataacgataatgtagtataagggaacttgtttcacattttccttcctttatgtactctgttcatggactgtgtgaagatttacggtgtatgcattcagcatgcagtcatgcatcaatgccagagcgtttacttgattcttcttattatacttttcaagtgaataatataatgcacataaattttgcttcaggaaaatgaatgcatcctcacaaactgcagtgaggagaggaagtggattattagcttaataattcctatcataa

SEQ ID NO: 73758 - DNA, 600 bp, Chicken  19866894355250_1
ttttatttcattgccattatagcagcatctcatgccttttaaatacttctgtttataaattatttaatcttagtacatatggacttttctgcaagaaaaacaaataaggcagcagaacaaaattatgaaatgagtatgggtgggagacaagaaacaggagagatgctgtttccaagtatgcagatatgtggggttttgcttacatttggagaagaaatctcatcgtatttatcaaacaaagttctgctcataggttttctcttgcactcgtcagtgttatttagagcatgtatttttttscaagtcttatgaagagtagctgagggaactggaattatttcttttggagaagagaaggctcaagggaaactttatagttctctayaactacctgaagggtgattgtggtgaggtgggtgttggcctcttctcccacgtaactagccataggactggagggaatggactcaagttgtgccagtttcaggctggacattaggagaagcttattctccaaaagagtggtcgggcactggaatgggctgcccagggaggtgggtgaagtcaccgaccctgggaggtgttcaagaaacatttaga

SEQ ID NO: 73759 - DNA, 581 bp, Chicken  19866894355250_2
tttctgcaagaaaaacaaataaggcagcagaacaaaattatgaaatgagtatgggtgggagacaagaaacaggagagatgctgtttccaagtatgcagatatgtggggttttgcttacatttggagaagaaatctcatcgtatttatcaaacaaagttctgctcataggttttctcttgcactcgtcagtgttatttagagcatgtatttttttscaagtcttatgaagagtagctgagggaactggaattatttcttttggagaagagaaggctcaagggaaactttatagttctctayaactacctgaagggtgattgtggtgaggtgggtgttggcctcttctcccacgtaactagccataggactggagggaatggactcaagttgtgccagtttcaggctggacattaggagaagcttattctccaaaagagtggtcgggcactggaatgggctgcccagggaggtgggtgaagtcaccgaccctgggaggtgttcaagaaacatttagatgttgtactgagggacatgggttagtgggaaatattggcgataggtggatggttggactggatgat

SEQ ID NO: 73760 - DNA, 600 bp, Chicken  19866894355259_1
ttctccgggctgtgctgttcgctgatcaataagaccaaccacagagacatagtgcggaaatgaattgatttctgtgaagagagaagaatgtgactaattattgtgaagccacctgccgctgcagccggattgaaacatctcccactattcgctgctatgtttagcagaaaattactcagtatgaaggctttttttttttttgcgagcattgcaaatgcccggtacgagaggttgccttattcagagcataatcctatgactgtggcttttgttgacatgctgacatcaaagtaggtgctyctacrgaaatrggaggcgtatggctcaccccacgtgtctggcttttaggtagttttgaaggtgatttggagttcagctagggatatgaccacaacctgcaggcctggcactatccttattgtagacatctctggtgtctgctctagatgcaggaaatagttttcaaagagcatttttctttgatgaacctcaagatgcttaaccaaggctgccacaactatcctctctcccaagtgggaaaactgaggcagggagaccatagtgactgcctttcatcagtcaagataacaatgcagaggc

SEQ ID NO: 73761 - DNA, 600 bp, Chicken  19866894355259_2
cgggctgtgctgttcgctgatcaataagaccaaccacagagacatagtgcggaaatgaattgatttctgtgaagagagaagaatgtgactaattattgtgaagccacctgccgctgcagccggattgaaacatctcccactattcgctgctatgtttagcagaaaattactcagtatgaaggctttttttttttttgcgagcattgcaaatgcccggtacgagaggttgccttattcagagcataatcctatgactgtggcttttgttgacatgctgacatcaaagtaggtgctyctacrgaaatrggaggcgtatggctcaccccacgtgtctggcttttaggtagttttgaaggtgatttggagttcagctagggatatgaccacaacctgcaggcctggcactatccttattgtagacatctctggtgtctgctctagatgcaggaaatagttttcaaagagcatttttctttgatgaacctcaagatgcttaaccaaggctgccacaactatcctctctcccaagtgggaaaactgaggcagggagaccatagtgactgcctttcatcagtcaagataacaatgcagaggctgaaa

SEQ ID NO: 73762 - DNA, 600 bp, Chicken  19866894355259_3
gtgctgttcgctgatcaataagaccaaccacagagacatagtgcggaaatgaattgatttctgtgaagagagaagaatgtgactaattattgtgaagccacctgccgctgcagccggattgaaacatctcccactattcgctgctatgtttagcagaaaattactcagtatgaaggctttttttttttttgcgagcattgcaaatgcccggtacgagaggttgccttattcagagcataatcctatgactgtggcttttgttgacatgctgacatcaaagtaggtgctyctacrgaaatrggaggcgtatggctcaccccacgtgtctggcttttaggtagttttgaaggtgatttggagttcagctagggatatgaccacaacctgcaggcctggcactatccttattgtagacatctctggtgtctgctctagatgcaggaaatagttttcaaagagcatttttctttgatgaacctcaagatgcttaaccaaggctgccacaactatcctctctcccaagtgggaaaactgaggcagggagaccatagtgactgcctttcatcagtcaagataacaatgcagaggctgaaattgaat

SEQ ID NO: 73763 - DNA, 600 bp, Chicken  19866894355259_4
ccacgtgtctggcttttaggtagttttgaaggtgatttggagttcagctagggatatgaccacaacctgcaggcctggcactatccttattgtagacatctctggtgtctgctctagatgcaggaaatagttttcaaagagcatttttctttgatgaacctcaagatgcttaaccaaggctgccacaactatcctctctcccaagtgggaaaactgaggcagggagaccatagtgactgcctttcatcagtcaagataacaatgcagaggctgaaattgaattcaggtcatttgcaaaaygccttctaggtgtgttatttcctagtatctgccctcgtttgtaccttcagttcttctgggaagtcatctgctctaagagaaaagaaatgatggatctcacctgagacattttcaaagcaagttgtgttgtcttcctcagtcccagacctgcctagctgcggatgtccctgttcattgcaggggagttggactagatgacctttaaaggtcccttccaactctaaagattttatgactctatgagtctaccaagctgacccagatgctcgatgcagctcctccaggccagagtgcattaca

SEQ ID NO: 73764 - DNA, 599 bp, Chicken  19866894355267_1
  misc_feature (1)..(67): n is any nucleotide
nnnnnnnnnnnnnnnnnnnnnnnnnnnnnnnnnnnnnnnnnnnnnnnnnnnnnnnnnnnnnnnnnnncagtaataacattccaaaaccagagaactttcccaggaggctaacaatgctttgatggatcatttacttgaagattcttttctaagaagacatagataaacacagctaggcatcacttttcaagaggaatcccacactatgttgagctattagcaaggagaactaaaccatgaattacagcattcagtctattaagactcaaattcctgacttggagaatctgtgtgcattcwcagatgcaattgcttagcaaataacgcaaggatagctctactactaagtaaacatcttttggttactacactttacataattattagtaagaaatcctagtttttttgaataacacagacctgccagtttctcagatccctactagcaatctcagagtgacaaaaagaaacttgggatyrgagagctggatagtgaatctccagcaatttattatccrtgcaaataaagcaaacttattttgattccttcaccctatcattatgaccctgaacatttacagaaaagaaccaagaaaaaa

SEQ ID NO: 73765 - DNA, 600 bp, Chicken  19866894355267_2
tcacttttcaagaggaatcccacactatgttgagctattagcaaggagaactaaaccatgaattacagcattcagtctattaagactcaaattcctgacttggagaatctgtgtgcattcwcagatgcaattgcttagcaaataacgcaaggatagctctactactaagtaaacatcttttggttactacactttacataattattagtaagaaatcctagtttttttgaataacacagacctgccagtttctcagatccctactagcaatctcagagtgacaaaaagaaacttgggatyrgagagctggatagtgaatctccagcaatttattatccrtgcaaataaagcaaacttattttgattccttcaccctatcattatgaccctgaacatttacagaaaagaaccaagaaaaaaaatcagtggttttcaaaagattattttgaactcttcacatgggaacatgctactagattctaaaaaggtaactcttttatagagttagaacatgtaatagggctatcttttacatatttataattctaagttttagttttacctaacacttagtgcatttactgaataagcgtgcataga

SEQ ID NO: 73766 - DNA, 600 bp, Chicken  19866894355267_3
cacttttcaagaggaatcccacactatgttgagctattagcaaggagaactaaaccatgaattacagcattcagtctattaagactcaaattcctgacttggagaatctgtgtgcattcwcagatgcaattgcttagcaaataacgcaaggatagctctactactaagtaaacatcttttggttactacactttacataattattagtaagaaatcctagtttttttgaataacacagacctgccagtttctcagatccctactagcaatctcagagtgacaaaaagaaacttgggatyrgagagctggatagtgaatctccagcaatttattatccrtgcaaataaagcaaacttattttgattccttcaccctatcattatgaccctgaacatttacagaaaagaaccaagaaaaaaaatcagtggttttcaaaagattattttgaactcttcacatgggaacatgctactagattctaaaaaggtaactcttttatagagttagaacatgtaatagggctatcttttacatatttataattctaagttttagttttacctaacacttagtgcatttactgaataagcgtgcatagaa

SEQ ID NO: 73767 - DNA, 600 bp, Chicken  19866894355267_4
agcaaggagaactaaaccatgaattacagcattcagtctattaagactcaaattcctgacttggagaatctgtgtgcattcwcagatgcaattgcttagcaaataacgcaaggatagctctactactaagtaaacatcttttggttactacactttacataattattagtaagaaatcctagtttttttgaataacacagacctgccagtttctcagatccctactagcaatctcagagtgacaaaaagaaacttgggatyrgagagctggatagtgaatctccagcaatttattatccrtgcaaataaagcaaacttattttgattccttcaccctatcattatgaccctgaacatttacagaaaagaaccaagaaaaaaaatcagtggttttcaaaagattattttgaactcttcacatgggaacatgctactagattctaaaaaggtaactcttttatagagttagaacatgtaatagggctatcttttacatatttataattctaagttttagttttacctaacacttagtgcatttactgaataagcgtgcatagaaagacactttccatagcacatgtaattaagcagagcaca

SEQ ID NO: 73768 - DNA, 600 bp, Chicken  19866894355271_1
ggtcgcgaaggtctcggtcatagaaaccatgagatagacaaaaatgtcagaacagcgccgtgatgttttcccacctctggctaaatcaagaaatattgcctgctaatgtgacaaaaaggcgtgaggctagcaggggattgataccctcccggagacacggtgtactcgctctcctccaagttctctcatgctatttccatggcaactccatataatgatgactcccactgattttcttcttttatctgttattttggtctcagatagtgatggagctgagaagcgcgtttctttcacacmatttgatgcccatcgccggctaaaagtaaataatgtcctcattcttcagacctttaggaagtgcagttagttcacagcgcttttgggaactcacctgcggagctggaaagggctgagataggaaaagcggtgctgcagatgctcaaagggaagcggagatgatggatgctcgctgtcagcccaggtgacagcggtacctcccagccgtgccttccccccacctgggtagaggcaaagtagggrggcacagtgcaatgggagatgggtggtttgggtgcagggagcatcccagctcacaga

SEQ ID NO: 73769 - DNA, 560 bp, Chicken  19866894355271_2
atctgttattttggtctcagatagtgatggagctgagaagcgcgtttctttcacacmatttgatgcccatcgccggctaaaagtaaataatgtcctcattcttcagacctttaggaagtgcagttagttcacagcgcttttgggaactcacctgcggagctggaaagggctgagataggaaaagcggtgctgcagatgctcaaagggaagcggagatgatggatgctcgctgtcagcccaggtgacagcggtacctcccagccgtgccttccccccacctgggtagaggcaaagtagggrggcacagtgcaatgggagatgggtggtttgggtgcagggagcatcccagctcacagagacaggaggccacccttcagggctggaggtgctcccattctctgctcactgcttatgttcgtggatccgatctggctcataagacatgaacaggagcttctcccagacagagacaccctcggcccagtgcctccagctcgtgacttcctctctcttaggaaatctctgcagtgtgctactgctgggagatttgcaagcagaaa

SEQ ID NO: 73770 - DNA, 599 bp, Chicken  19866894355285_1
  misc_feature (1)..(160): n is any nucleotide
nnnnnnnnnnnnnnnnnnnnnnnnnnnnnnnnnnnnnnnnnnnnnnnnnnnnnnnnnnnnnnnnnnnnnnnnnnnnnnnnnnnnnnnnnnnnnnnnnnnnnnnnnnnnnnnnnnnnnnnnnnnnnnnnnnnnnnnnnnnnnnnnnnnnnnnnnnnnnnnnctggtatttgtataaaagaaaccctatttgctctttggtttatgttaaaaaagaattacgaaagcttgactgaaaagaaatctactgagaagagtgttctggcatagatgttctctctatcataccaaaatttctaattytgtggtattacaagtcacttttaatttcatccatgttacttgctttacatcactgatgtactgactgctctgcagctyaagcaaagaatgtttggtgcagcgtttatccacttctccacacacaaagcactcatctctgccagatgcaaatgctcacgttctcttagctaaggcaggatggctcagaccagtcaagccctggagaaaggcaacaaagccacttccaaacgccagccctctgcatggactgcacattctgtgctgacaaaagctctggacttcatagaatcatgggttgg

SEQ ID NO: 73771 - DNA, 599 bp, Chicken  19866894355285_2
  misc_feature (1)..(82): n is any nucleotide
nnnnnnnnnnnnnnnnnnnnnnnnnnnnnnnnnnnnnnnnnnnnnnnnnnnnnnnnnnnnnnnnnnnnnnnnnnnnnnnnnnctggtatttgtataaaagaaaccctatttgctctttggtttatgttaaaaaagaattacgaaagcttgactgaaaagaaatctactgagaagagtgttctggcatagatgttctctctatcataccaaaatttctaattytgtggtattacaagtcacttttaatttcatccatgttacttgctttacatcactgatgtactgactgctctgcagctyaagcaaagaatgtttggtgcagcgtttatccacttctccacacacaaagcactcatctctgccagatgcaaatgctcacgttctcttagctaaggcaggatggctcagaccagtcaagccctggagaaaggcaacaaagccacttccaaacgccagccctctgcatggactgcacattctgtgctgacaaaagctctggacttcatagaatcatgggttggaaaggaccttaaagactacaagttcaacctcctgygatgggcactgacacctcccactgcatctggttgctcaaagcg

SEQ ID NO: 73772 - DNA, 600 bp, Chicken  19866894355285_3
gttacttgctttacatcactgatgtactgactgctctgcagctyaagcaaagaatgtttggtgcagcgtttatccacttctccacacacaaagcactcatctctgccagatgcaaatgctcacgttctcttagctaaggcaggatggctcagaccagtcaagccctggagaaaggcaacaaagccacttccaaacgccagccctctgcatggactgcacattctgtgctgacaaaagctctggacttcatagaatcatgggttggaaaggaccttaaagactacaagttcaacctcctgygatgggcactgacacctcccactgcatctggttgctcaaagcgtataacacctatctaaaataccttctttgggttataaatgtattccaaggatttgaggactgttgtaatgcattccaactggcagctacacacttagctaagaaactcaaatcactttcagttttacacaacaaagcttctaccgtatcccttctggaaactcatgtgtcatgtcctgctttacctacctacaggttacgttcaaacaccttaagaatattaggaaattcacataaatacattgccagcttatagct

SEQ ID NO: 73773 - DNA, 600 bp, Chicken  19866894355294_1
tgctggaggatgccatgagctgcagcttgggctgcggagacccttcacagctcaacacagtgggtcttgtcattggccaaggcaaagagttcccacagctgtggtatgaggaggtgtcttagacatagtgtttgttttgaatgttcctctctgcaaaagtgtgtgaagctgcagggtgaaatacatggcagtgacatgtaggcttggtttctcccttgagttttcacgaagatggcaggagggagggaaggagcccagcagcctgcagacagcccctttgtgacacagccagccttcagygtgtttgttttactgcgcctaatggttcgtgtgaccccacacagcccacattggcacctggattaaggacagctgtggagacctgtgggccaactgttggctggagatgggaagctgtccctgaccaacaactgtctgctgtgggcaaagcctccaaacaaaacttagaggtgtaagatggctgatttaagctgagagatcacatggaatgtgagaccttgttgttgtagaggttgtatgatctgtcttggctgtgctcgccaagatttgcttagtgggcatggaggggatgagttggtg

SEQ ID NO: 73774 - DNA, 600 bp, Chicken  19866894355317_1
aactgggtacttaagacttcggccttgttttcaagagacactgctccactgtgacttcatgtaattcctaccacaccactccagtatcgattcttgcataccaaaacttcttacactggtgtgattcatactaactacctttgggaaacatggcctctgttcattactacataagaaactaagtttccacaagtgctgggagccacaaaaacaacaacaagaaccacaaataaatgctaatgctagggaattttatcttttcaaggaccagagccaatctttctgaaaaatctaattttsaagttgtgtaaaaacagagacgaaggggagattttattgtaaagaaaaagcaaaacaaaatccctcagtatttctgaagtataggagttgagatttcatagatacatcttttaagtacatgttgaacaccacaaaagtatgtggagtattgctactcaatagttaattcatctatacctcaggtctcatacagctgatgaaaataaaagatgttttcctactcatctttttttcaaatttttgattttattttttattctttattctaatgatgtgccattcacatttgcctgtttttca

SEQ ID NO: 73775 - DNA, 600 bp, Chicken  19866894355317_2
ctgaggagagcctatattggcacattcctgagtttaaacaaattattattgttagcatccgattctatttaaataactctgttgattactcagtttcaaaggttaagtatttaaagctttcataaagaaaaaaactttttagaaagtcattactggggagagaaaagatctactatgttctcattcaagttgaacaaggagccatgcactgtaaccagtacttggtgttacacgcacaaaagcacaaaagcctattctaaaacagtagctccaccttctgtttcagcaacaacaacaacsaaaaaaaaaaagggcagaaatgaggtcaagcactatttcattttagacttaatgggtggatctgaatagttttaacttcacaagctatgcatcagagcccaaacaggtacgcttaaatatgagtaaagagaaatttaatggtgaatactattagcatgctctgttgtattatgtcaaaaccaatccgttcccaaatgccgaaataaaatcaagtgattgtgcattgcatgatgataccattagatgtgcaactttggttcatgcaaagtttcatttgatggacacattgctgatagtcca

SEQ ID NO: 73776 - DNA, 600 bp, Chicken  19866894355317_3
tgaggagagcctatattggcacattcctgagtttaaacaaattattattgttagcatccgattctatttaaataactctgttgattactcagtttcaaaggttaagtatttaaagctttcataaagaaaaaaactttttagaaagtcattactggggagagaaaagatctactatgttctcattcaagttgaacaaggagccatgcactgtaaccagtacttggtgttacacgcacaaaagcacaaaagcctattctaaaacagtagctccaccttctgtttcagcaacaacaacaacasaaaaaaaaaagggcagaaatgaggtcaagcactatttcattttagacttaatgggtggatctgaatagttttaacttcacaagctatgcatcagagcccaaacaggtacgcttaaatatgagtaaagagaaatttaatggtgaatactattagcatgctctgttgtattatgtcaaaaccaatccgttcccaaatgccgaaataaaatcaagtgattgtgcattgcatgatgataccattagatgtgcaactttggttcatgcaaagtttcatttgatggacacattgctgatagtccat

SEQ ID NO: 73777 - DNA, 584 bp, Chicken  19866894355322_1
atctagacatgcatactctctccacctgggataaaaataaaaaagtacaaatgaccttcagttaaaaacttggcaaccatttcaaagtctacttctaaatttaactttgttatgtatgcttattaaaaatataattaattgcctgggactctggtctgaaataccagtatctatcataaatgctggacaatttttcaatgtatctgctttcagacattggcacagtatcagtttcaatgactaggtcaaattaagggatttgcaaatgatgccgtaggctttaatgacagatctgtgaawccactgacaaacaatgctaccgaagttcaaaagattcacaattattttgattttctgtcacatttagaagttgagtcatgaagatcttgtaaacagtgcctaagtcaggagaaaacattgccacccttaacacatgaatggccttaattagctgctgaaagtgctggagtgactttctctgttttgtctttacaggtaggaaacatatgttatggtgggggggtggggagcaagcaattgctgctgggtttttttttttttttttttttttttttttttttttt

SEQ ID NO: 73778 - DNA, 600 bp, Chicken  19866894355327_1
gagaaaaccaggctgtaggtaacatgcaccctgagctctccatagagtggctaattgtcagacatctgcagcttggctctgaagtgctgaaatgcatagtgcatctctctgctctggcagatttgtagcaggaatttgaacttcagcctgtcacatccaagatgaacaccctaatcactatagcttctccaccaatatgatgtatgtgcacgtaaacaggtccatcaggagagaaagagatccatgccaccatataaacaggcacttaagaattttctgccagaggctctcaccctactmaggtacctgaatttctctcccttagtggcaaaatattcatasaacgccaattcttctgctctgttctcttctccctaagggtgcttctgcctagccagaacacacatgttgtgttggcatgccaactgcctgtctgaccaagtagggcagattttcttgaatctttttttcttatacgctctccatccatcagtaattcaagaatgaactgctgttcagcaggatctaattcataggtacagctatcagagcctcttggagagaaagataatacctattaaaaaaaatctgtatgctgtt

SEQ ID NO: 73779 - DNA, 600 bp, Chicken  19866894355327_2
tagagtggctaattgtcagacatctgcagcttggctctgaagtgctgaaatgcatagtgcatctctctgctctggcagatttgtagcaggaatttgaacttcagcctgtcacatccaagatgaacaccctaatcactatagcttctccaccaatatgatgtatgtgcacgtaaacaggtccatcaggagagaaagagatccatgccaccatataaacaggcacttaagaattttctgccagaggctctcaccctactmaggtacctgaatttctctcccttagtggcaaaatattcatasaacgccaattcttctgctctgttctcttctccctaagggtgcttctgcctagccagaacacacatgttgtgttggcatgccaactgcctgtctgaccaagtagggcagattttcttgaatctttttttcttatacgctctccatccatcagtaattcaagaatgaactgctgttcagcaggatctaattcataggtacagctatcagagcctcttggagagaaagataatacctattaaaaaaaatctgtatgctgttaacattgggcagaaatccattgctgggtggactgggagaagc

SEQ ID NO: 73780 - DNA, 600 bp, Chicken  19866894355331_1
gagcagccacacttaccttacgttatgtttaacgcactgtggagttctggcagcactctgaaccccatctgagacttggagaatcttgtcttcacctcaccttcacatctccccctcataaaaagcctgacctcagcctgatctctgaagctcagcagccctatcccacctgaaggagacaatgctgggccttgggctgttctggttgtctattactcttgtgccagggatacacagagatgaaatgggtggagagggccagacctttcagagcataccaggatcggttgtcacaggggkttttttatccatatggagtagcctgatatttctaagccaggccaacygggctgccctaaatccagccctgatggttcttcagcaagcagctgaggtggcagtaactcagctacacttttagtcagtgaatctagtatcagtgttgtctagagtgctagaagacaataaatattccacacttttccaagtccttcagagtgctgaagacacaggatcaaagtacatcaccattaaatcgataaaactatattttggaccagccagtctctctttaactttctctaaaacttctcagtagaa

SEQ ID NO: 73781 - DNA, 600 bp, Chicken  19866894355331_2
tggcagcactctgaaccccatctgagacttggagaatcttgtcttcacctcaccttcacatctccccctcataaaaagcctgacctcagcctgatctctgaagctcagcagccctatcccacctgaaggagacaatgctgggccttgggctgttctggttgtctattactcttgtgccagggatacacagagatgaaatgggtggagagggccagacctttcagagcataccaggatcggttgtcacaggggkttttttatccatatggagtagcctgatatttctaagccaggccaacygggctgccctaaatccagccctgatggttcttcagcaagcagctgaggtggcagtaactcagctacacttttagtcagtgaatctagtatcagtgttgtctagagtgctagaagacaataaatattccacacttttccaagtccttcagagtgctgaagacacaggatcaaagtacatcaccattaaatcgataaaactatattttggaccagccagtctctctttaactttctctaaaacttctcagtagaaaacaagccattatctgtaataaacagaaaaaaaaaataggacagact

SEQ ID NO: 73782 - DNA, 600 bp, Chicken  19866894355331_3
agtacatcaccattaaatcgataaaactatattttggaccagccagtctctctttaactttctctaaaacttctcagtagaaaacaagccattatctgtaataaacagaaaaaaaaaataggacagactctctcacaaaaaaattacacgttcacaaaataattacatcataatcttgttaatcactgaaccggtgtttataatttggtcagatcatcccgtaaccagtccgtaatcatggcagccatctccttgctggcatccagcacgaacgcatggcggagccctttctcacagagycgaatgtccccatctggaaaatccattttgatctcatcgtagtagttctgcggacaccagctgtctccagttccatagtaaaaaatcagctagaaatcaaagcatatcaaaccattaatttaaaaggctactgatgaagcaacaaatacccaagcgaagagcagtgaattatttggaaagaggtgacacttcacaacccaacatacactgtgagaaatagcagattggtaactcttgcttatttccaagtctacaattacagtccagtcaattaaatggactctaacttagtttcctcat

SEQ ID NO: 73783 - DNA, 600 bp, Chicken  19866894355334_1
cgtgcccaactgcttccattggtttgttactctgcaacagtcacaagtgttcatagccaagcacgataaccagcacaccaccttacttggtgatcactgagtgtctgatagctcctgggctgtgtttgctcagataagtgccacccgtggcactgtcacatgggctgactgccctcctgccacaatgacagctaaccaaacacaaagccaaactgatgagagctgtattaaaatgtagattggaaggatagagcttctgggaacgaggcagccctgcagacaacaggaactattaaaaaygtctgcacaacacagaagaaatgtacgtggcatccttatgtaagcaggtaactgctctggttccttcattttgggctcttccatctgcagctcacagccctcattcagctcctttgctgcacaggcagtgtctttgcacagctgcaccaccagaaccactgtgcaagactgaaggatcaggaattcggtccttcccccgtcagaggccctttaattacatccctttgggttagactgcctttgacaagcgatgtgtgcttttttctttttcctgaaggttttaacaggtaagaaatgatg

SEQ ID NO: 73784 - DNA, 599 bp, Chicken  19866894355336_1
  misc_feature (1)..(139): n is any nucleotide
nnnnnnnnnnnnnnnnnnnnnnnnnnnnnnnnnnnnnnnnnnnnnnnnnnnnnnnnnnnnnnnnnnnnnnnnnnnnnnnnnnnnnnnnnnnnnnnnnnnnnnnnnnnnnnnnnnnnnnnnnnnnnnnnnnnnnnnnnnnttccagctgcttctcccagttttaccctgtctgcaaactgtctgaaggtgtatcccatcatctcatgggttttgatcaagaactgacggctggggtatgctaccagggattgacctccagctgaacttcatgtcacttatgacaactcattgagcttggcygctcmgttagtttgtagcccacctcactgaccacttatccagcttgtaaaaaaatacttcacgagtttgtctgtacataacgcattggtgggaagcagtgcaggcacattcttaaaggatctgtacttgtaaaatactaaggtctrtgtttcagagggatctgcataggattacactcaccagtcacacagaagtccatgacaaaaggttgtatgcagtaatgttagttgggattctacagctgaattcattaatttctgctcaagtccatagagtgactactttccacgtagcttgga

SEQ ID NO: 73785 - DNA, 599 bp, Chicken  19866894355336_2
  misc_feature (1)..(134): n is any nucleotide
nnnnnnnnnnnnnnnnnnnnnnnnnnnnnnnnnnnnnnnnnnnnnnnnnnnnnnnnnnnnnnnnnnnnnnnnnnnnnnnnnnnnnnnnnnnnnnnnnnnnnnnnnnnnnnnnnnnnnnnnnnnnnnnnnnnnnnttccagctgcttctcccagttttaccctgtctgcaaactgtctgaaggtgtatcccatcatctcatgggttttgatcaagaactgacggctggggtatgctaccagggattgacctccagctgaacttcatgtcacttatgacaactcattgagcttggcygctcmgttagtttgtagcccacctcactgaccacttatccagcttgtaaaaaaatacttcacgagtttgtctgtacataacgcattggtgggaagcagtgcaggcacattcttaaaggatctgtacttgtaaaatactaaggtctrtgtttcagagggatctgcataggattacactcaccagtcacacagaagtccatgacaaaaggttgtatgcagtaatgttagttgggattctacagctgaattcattaatttctgctcaagtccatagagtgactactttccacgtagcttggactgtg

SEQ ID NO: 73786 - DNA, 600 bp, Chicken  19866894355336_3
tgcttctcccagttttaccctgtctgcaaactgtctgaaggtgtatcccatcatctcatgggttttgatcaagaactgacggctggggtatgctaccagggattgacctccagctgaacttcatgtcacttatgacaactcattgagcttggcygctcmgttagtttgtagcccacctcactgaccacttatccagcttgtaaaaaaatacttcacgagtttgtctgtacataacgcattggtgggaagcagtgcaggcacattcttaaaggatctgtacttgtaaaatactaaggtctrtgtttcagagggatctgcataggattacactcaccagtcacacagaagtccatgacaaaaggttgtatgcagtaatgttagttgggattctacagctgaattcattaatttctgctcaagtccatagagtgactactttccacgtagcttggactgtgactatcaaagtctatatttaacctcagaaacagtgattrcttataatttaacctttctacattactactttatcttccttatgttgtcaaggaagacaagtatatcctatatatggatgattatatcccgtttatgaacaag

SEQ ID NO: 73787 - DNA, 528 bp, Chicken  19866894355336_4
ttgtaaaaaaatacttcacgagtttgtctgtacataacgcattggtgggaagcagtgcaggcacattcttaaaggatctgtacttgtaaaatactaaggtctrtgtttcagagggatctgcataggattacactcaccagtcacacagaagtccatgacaaaaggttgtatgcagtaatgttagttgggattctacagctgaattcattaatttctgctcaagtccatagagtgactactttccacgtagcttggactgtgactatcaaagtctatatttaacctcagaaacagtgattrcttataatttaacctttctacattactactttatcttccttatgttgtcaaggaagacaagtatatcctatatatggatgattatatcccgtttatgaacaagcaccagagcattttaatttacttcatactaacctagatagaggaaaaatggattttaaatgtctatgaaattctgctctatttagttaggggagggagggagggaggaaggaaggaaggaaggaa

SEQ ID NO: 73788 - DNA, 600 bp, Chicken  19866894355339_1
actgtagggagtgataaggtcacccctgagtctcctcttctccagactgaacaaccctcagttcctcagaacttgtgctccagacctctcagctccactgcccttctctggtcacactccagggcctccacgtcttttcttgtactgaggggcccagaacagaacacagcacttgaggtgcagcctcaccaatgctaagtgcaaagggactaccacataaaacatgccaattctcactgttaacttcattatgattctacaccaacagtagttcactcagtggatacaggcacagtacakgcagacacacaagccatggcagctcagtgacactgcaagaaagtggcccactgacacagrgcaaccaccttgctggccagcagcatccccacatgacaatgtgaccttgtgcctaggcatcaccaaacagaccctcatttatcttgtgatgcttttagccagtcaacactggtctccgtcaaaacctgctttcttgctgctggctccaacccatcgcttgaaaggtcaacattaatttatcttacaaaccaatttcactaatccctttacattttatatcaatcacctcctagcaatggt

SEQ ID NO: 73789 - DNA, 600 bp, Chicken  19866894355339_2
gttcctcagaacttgtgctccagacctctcagctccactgcccttctctggtcacactccagggcctccacgtcttttcttgtactgaggggcccagaacagaacacagcacttgaggtgcagcctcaccaatgctaagtgcaaagggactaccacataaaacatgccaattctcactgttaacttcattatgattctacaccaacagtagttcactcagtggatacaggcacagtacakgcagacacacaagccatggcagctcagtgacactgcaagaaagtggcccactgacacagrgcaaccaccttgctggccagcagcatccccacatgacaatgtgaccttgtgcctaggcatcaccaaacagaccctcatttatcttgtgatgcttttagccagtcaacactggtctccgtcaaaacctgctttcttgctgctggctccaacccatcgcttgaaaggtcaacattaatttatcttacaaaccaatttcactaatccctttacattttatatcaatcacctcctagcaatggtttgcacatttgtctctggcagccatcagggaaggccgtgtgggctcctctctgggggcag

SEQ ID NO: 73790 - DNA, 550 bp, Chicken  19866894355343_1
caatttcattatgcaactttccaaagctcttgggcaatctgctttctttctctggctttcttttccttatcagtatttatgctcttaactccggtacctcattctttacacgtggcatgtccctctttctaatgcttgattactttttgcactcacttattcagagtgacctttttcactcctagcgtatttatcgctagatggctctcataacccttgggcatactgtcatttatctctctaccccttctattccctacccttccaatgtggctttgcttagtgtcccttttgctcctygaaacattgtgctgctgaaagcaaagcatttgaaatactggaaaaaaaaaaaaaaaccataatcattaattgtttgttgcctcgctgcttcaacactctaatgttgccaattgttgcatttgcatagggaaagaacagctatatgctttcgacgtgaatgacttaaattttatattaaggaaaacagcagaaaggcagaactgggaggatggcactgcaaagggtagttcctttgtgatgtggctgggtg

SEQ ID NO: 73791 - DNA, 600 bp, Chicken  19866894355347_1
gcttacggatcgattcagttcacgccatttttttctgttttttttttttttttttttcctaaatatgaacttacatttcgccttgcagtacgtgctttgcgagtggcggggatgagtgggtgttaagtgtagcagtaacggtccttgggagcacaagttgtgacttgcccttatcttgtagtgagttggagatactgcagctgtagtgtttggatggtggcagttctcagggcaggaagtcccccgtgacgcgtgctgtgctaaggtgtgcagttactctgcatagtgtgagaaaatgargcaagctgcggcrtgcctgaaatgaaggactaaaagtgtgaaggaaacttaaaacgatttccatctctgcatgctcacgtgtggttttctaaggaatttaagcctattamtataagtacagtaaataagattgttgtatgtcattcctacctacatcatagacatttcctgtaattagacaaactacacactgaacaaaaaggtagcaacaggcatgctctgttaaaacttgccaaacrcagacatttttattgcttggtgttgtaataacgcccccagaaaggttttatctttaatact

SEQ ID NO: 73792 - DNA, 600 bp, Chicken  19866894355347_2
ttcagttcacgccatttttttctgttttttttttttttttttttcctaaatatgaacttacatttcgccttgcagtacgtgctttgcgagtggcggggatgagtgggtgttaagtgtagcagtaacggtccttgggagcacaagttgtgacttgcccttatcttgtagtgagttggagatactgcagctgtagtgtttggatggtggcagttctcagggcaggaagtcccccgtgacgcgtgctgtgctaaggtgtgcagttactctgcatagtgtgagaaaatgargcaagctgcggcrtgcctgaaatgaaggactaaaagtgtgaaggaaacttaaaacgatttccatctctgcatgctcacgtgtggttttctaaggaatttaagcctattamtataagtacagtaaataagattgttgtatgtcattcctacctacatcatagacatttcctgtaattagacaaactacacactgaacaaaaaggtagcaacaggcatgctctgttaaaacttgccaaacrcagacatttttattgcttggtgttgtaataacgcccccagaaaggttttatctttaatacttctttttcctctt

SEQ ID NO: 73793 - DNA, 600 bp, Chicken  19866894355347_3
gatgagtgggtgttaagtgtagcagtaacggtccttgggagcacaagttgtgacttgcccttatcttgtagtgagttggagatactgcagctgtagtgtttggatggtggcagttctcagggcaggaagtcccccgtgacgcgtgctgtgctaaggtgtgcagttactctgcatagtgtgagaaaatgargcaagctgcggcrtgcctgaaatgaaggactaaaagtgtgaaggaaacttaaaacgatttccatctctgcatgctcacgtgtggttttctaaggaatttaagcctattamtataagtacagtaaataagattgttgtatgtcattcctacctacatcatagacatttcctgtaattagacaaactacacactgaacaaaaaggtagcaacaggcatgctctgttaaaacttgccaaacrcagacatttttattgcttggtgttgtaataacgcccccagaaaggttttatctttaatacttctttttcctctttaccagaaacaatagttcccttgtccctctttctgtttcactaagacaactcagtgtcttcctgtactgtgcctcttaactgccacttgttccagcc

SEQ ID NO: 73794 - DNA, 600 bp, Chicken  19866894355347_4
tcccccgtgacgcgtgctgtgctaaggtgtgcagttactctgcatagtgtgagaaaatgargcaagctgcggcrtgcctgaaatgaaggactaaaagtgtgaaggaaacttaaaacgatttccatctctgcatgctcacgtgtggttttctaaggaatttaagcctattamtataagtacagtaaataagattgttgtatgtcattcctacctacatcatagacatttcctgtaattagacaaactacacactgaacaaaaaggtagcaacaggcatgctctgttaaaacttgccaaacrcagacatttttattgcttggtgttgtaataacgcccccagaaaggttttatctttaatacttctttttcctctttaccagaaacaatagttcccttgtccctctttctgtttcactaagacaactcagtgtcttcctgtactgtgcctcttaactgccacttgttccagccctagtgaggtttagaagcgtctccttcatgtattcttgtccttcagaggtgaacgagacttcttaaaggcttaaagttaaggacatgagacgcggkgacaactgagtctgcagtctttaaatttagaag

SEQ ID NO: 73795 - DNA, 600 bp, Chicken  19866894355347_5
caacaggcatgctctgttaaaacttgccaaacrcagacatttttattgcttggtgttgtaataacgcccccagaaaggttttatctttaatacttctttttcctctttaccagaaacaatagttcccttgtccctctttctgtttcactaagacaactcagtgtcttcctgtactgtgcctcttaactgccacttgttccagccctagtgaggtttagaagcgtctccttcatgtattcttgtccttcagaggtgaacgagacttcttaaaggcttaaagttaaggacatgagacgcggkgacaactgagtctgcagtctttaaatttagaagcttgatcttctttcactttcactggtacagaagtggcagccgaattaggccaaacttgtgagaaccgcatctgttacatgaccttaccactcctgctgcatgatagtttgctttttgttgtgaggragataggtttcaattaaagcagtgtggtgaatttcgcctgaagaccgaagtcaaatggtatttttcrgttgtarttactgagaactaaaatcaaacagatacttcgctcttgttgcaggccacacttcctgctttgtggta

SEQ ID NO: 73796 - DNA, 600 bp, Chicken  19866894355347_6
agtgtcttcctgtactgtgcctcttaactgccacttgttccagccctagtgaggtttagaagcgtctccttcatgtattcttgtccttcagaggtgaacgagacttcttaaaggcttaaagttaaggacatgagacgcggkgacaactgagtctgcagtctttaaatttagaagcttgatcttctttcactttcactggtacagaagtggcagccgaattaggccaaacttgtgagaaccgcatctgttacatgaccttaccactcctgctgcatgatagtttgctttttgttgtgaggragataggtttcaattaaagcagtgtggtgaatttcgcctgaagaccgaagtcaaatggtatttttcrgttgtarttactgagaactaaaatcaaacagatacttcgctcttgttgcaggccacacttcctgctttgtggtagatatatgattatccatgcagaagttgaagttatcaaattagagactaaccatggagcaaagtcaaaaataccatactgtgcattcagagaacagaaatgatgtgtttaaaatactttttaatgggagtatggtgcttaaaaaactggcaatagctttt

SEQ ID NO: 73797 - DNA, 600 bp, Chicken  19866894355347_7
ccttcatgtattcttgtccttcagaggtgaacgagacttcttaaaggcttaaagttaaggacatgagacgcggkgacaactgagtctgcagtctttaaatttagaagcttgatcttctttcactttcactggtacagaagtggcagccgaattaggccaaacttgtgagaaccgcatctgttacatgaccttaccactcctgctgcatgatagtttgctttttgttgtgaggragataggtttcaattaaagcagtgtggtgaatttcgcctgaagaccgaagtcaaatggtatttttcrgttgtarttactgagaactaaaatcaaacagatacttcgctcttgttgcaggccacacttcctgctttgtggtagatatatgattatccatgcagaagttgaagttatcaaattagagactaaccatggagcaaagtcaaaaataccatactgtgcattcagagaacagaaatgatgtgtttaaaatactttttaatgggagtatggtgcttaaaaaactggcaatagcttttagtgttatacatcttcattcctaaatgtctaaaatacttgcatgacctgttgcattaatttccacat

SEQ ID NO: 73798 - DNA, 600 bp, Chicken  19866894355347_8
gtattcttgtccttcagaggtgaacgagacttcttaaaggcttaaagttaaggacatgagacgcggkgacaactgagtctgcagtctttaaatttagaagcttgatcttctttcactttcactggtacagaagtggcagccgaattaggccaaacttgtgagaaccgcatctgttacatgaccttaccactcctgctgcatgatagtttgctttttgttgtgaggragataggtttcaattaaagcagtgtggtgaatttcgcctgaagaccgaagtcaaatggtatttttcrgttgtarttactgagaactaaaatcaaacagatacttcgctcttgttgcaggccacacttcctgctttgtggtagatatatgattatccatgcagaagttgaagttatcaaattagagactaaccatggagcaaagtcaaaaataccatactgtgcattcagagaacagaaatgatgtgtttaaaatactttttaatgggagtatggtgcttaaaaaactggcaatagcttttagtgttatacatcttcattcctaaatgtctaaaatacttgcatgacctgttgcattaatttccacatgtgatta

SEQ ID NO: 73799 - DNA, 600 bp, Chicken  19866894355351_1
tttatgcatgaaatgccattcatcccctgaaaattattaagtggaataggtcccagttcctattcttggccacatctccaggctttcctaattatagaaggactagaggtgctcacagtgatctctagtgcttggcacctgcctagaactacctgggagaggagggacttaaattaatctcagcagataagaggacttagagggatgtgtagaaaatgcactcagttttagactttcaaagagaaaacacatttagagtggatgtttcagaagtgttgtcattatatgaagatacagagraaaaaaaaaaagtagaaaaagcctggtagaggaaaaatctaggggtgagaaatccctaggttttctcacctaatgatgagaaatctctagatcccctgaaaaataggagagggaagaaggactcctttttttttattatttatcttattttttttgcaaggtctgatatgaaagaagtacccatttctttcttggggtattctacactaccacagtctcctacctttccaggcagaatgggatgggatacacctccttcatggctcgcctcggtgggtctttggccccacttgtgttcct

SEQ ID NO: 73800 - DNA, 600 bp, Chicken  19866894355351_2
ttatgcatgaaatgccattcatcccctgaaaattattaagtggaataggtcccagttcctattcttggccacatctccaggctttcctaattatagaaggactagaggtgctcacagtgatctctagtgcttggcacctgcctagaactacctgggagaggagggacttaaattaatctcagcagataagaggacttagagggatgtgtagaaaatgcactcagttttagactttcaaagagaaaacacatttagagtggatgtttcagaagtgttgtcattatatgaagatacagagaraaaaaaaaaagtagaaaaagcctggtagaggaaaaatctaggggtgagaaatccctaggttttctcacctaatgatgagaaatctctagatcccctgaaaaataggagagggaagaaggactcctttttttttattatttatcttattttttttgcaaggtctgatatgaaagaagtacccatttctttcttggggtattctacactaccacagtctcctacctttccaggcagaatgggatgggatacacctccttcatggctcgcctcggtgggtctttggccccacttgtgttcctg

SEQ ID NO: 73801 - DNA, 600 bp, Chicken  19866894355352_1
ttgacagaaggcatgtgggtttaccttaaaaatggaccgcgggcctagtaggtacaggtcactgtgtactgggatttcattcccagaaaactcttgaatgctctttgaaaaggccccctttttttttccttgctcatgagtgtatcagccacttcttgatgaataggatccataatgcccggagatatttgaaatcaagcatatggtccattgaatatgcatgtaagcaggcagggagggagctcgtgtgtgatactagcaaagcgtgtctggaagttcagcagagcagaagtcgaactragcatttcagcatgctttaggaagcataactttctgtttcctctggtaaactaggtaatagaacacagtcaaaagcatatctgggggttttaacaactcagatatttggttataaacagaattatgctgttttgcttcttttgtaaaatgcttatttttacaataaaaatataaagaccatcaagtctgaagttgtwaaaaaatacatatagataacttcttcaactgagaaatggtcaattcttcactagggaagaatctcagatgactcttcttcgcatttaaatgaaaagagtgctt

SEQ ID NO: 73802 - DNA, 600 bp, Chicken  19866894355352_2
agcatatggtccattgaatatgcatgtaagcaggcagggagggagctcgtgtgtgatactagcaaagcgtgtctggaagttcagcagagcagaagtcgaactragcatttcagcatgctttaggaagcataactttctgtttcctctggtaaactaggtaatagaacacagtcaaaagcatatctgggggttttaacaactcagatatttggttataaacagaattatgctgttttgcttcttttgtaaaatgcttatttttacaataaaaatataaagaccatcaagtctgaagttgtwaaaaaatacatatagataacttcttcaactgagaaatggtcaattcttcactagggaagaatctcagatgactcttcttcgcatttaaatgaaaagagtgcttggagaatgtgcattctggtaagttttccttacgagtgggtagagagaaagggagctggggctgaataggagcgattgggcatgaagtagtaactatgaggtcctggaggcaagagaacaagagagggaaaggaagaaaaaaagagaagagaagccagcagaaaggcaaggaggaggagggggaaggcaggatacgtg

SEQ ID NO: 73803 - DNA, 477 bp, Chicken  19866894355355_1
acaacttgtggttattctgtcagatatttatatagccactggggcgccatagttatgcaccgcatacatcattgtatttttaaaatgtacttaatgaacattttttcttttctggtaactacttcattgccttaaatgaatgcattccaatagaatttgtaacaaatgagcactttgtgtttgcattaatgccaaacacgtttaacaaatttttaacaaggaacgctggcaaaaagccaaactcctagagggacactgaaggaatgctataaatttaaactagattttaccttttcactyggctcaacaagtgtcttaagtgtctttggtatcttggcatttggaagttttccgcatgggctggatgcaacctttaagtcttaattattcctcttgctggccctccctgtgggaggattttcacatggatatgacagacttcagcaggacactgtgttctttagaaagcaagggggg

SEQ ID NO: 73804 - DNA, 599 bp, Chicken  19866894355358_1
  misc_feature (1)..(79): n is any nucleotide
nnnnnnnnnnnnnnnnnnnnnnnnnnnnnnnnnnnnnnnnnnnnnnnnnnnnnnnnnnnnnnnnnnnnnnnnnnnnnnnaagtacaaagccactctttattattaaagagataaatgaaaaaaaaagataaatgaagatcaaatccattaacaacccaggcagtatgtattgcatataaaacaaagtctctcgggttgtaagaagcattctgtaggtagtatgtaagttagccaggaacagcacagagctagtgactacacaggccctagaaaaaagtacttctggtggatgaaaagccrcacacgaggcagcagtgtccatttggggtctggaaagccaacggcatcctgggctgcaccaacagaggggtggcagcgggcagggaggggactgtcccctctgctctgccctcgtgaggccccacctgcaggactgcgtccaggcctggggcccccagcacaggaagggtgcggagctgctggagcggggccagaggagggcacggagatgctcccagggctgcacacctctgctatggagacgggctgaggagctgggggtgttcagcctggagaaaaggctgtgaggagacctcatt

SEQ ID NO: 73805 - DNA, 600 bp, Chicken  19866894355360_1
aaacaggtttgcaaaggtaccttgcaacaaaccactggcttgtaatagcaaaaaatagcttgcttttcttagataatttgcacttatactgcttgtgggtaattaaatttagtttttgtttttattgtttgtatcaatattttcacttacatgatctataatttaattttagtctcttactattaaaatagcttcatgcttttgtagatgcctttgtatgccttccttcaccatattgcaagcttaaaattcaggtcctaaaatcagatgtcatagattagatattcatgaattaacacrtgctctctattgctttctttctcttatttttagcctactgtgaatgcctgtataattctcagaaggttttctaaacgtatctcctctatatctataggctgtgtagctcgaacagtaaattctccaaaccaacatctgctgagaactgaagatgttattagttgctgtttggatctgagcgcccccagcatctcttttcggataaatggacagccagttcaaggaatgtttgagaatttcaacatagatggccttttcttcccagttgtcagcttctctgcaggaataaagttagtatca

SEQ ID NO: 73806 - DNA, 600 bp, Chicken  19866894355364_1
tagaaagatcaaggcatgcaacttcattgtattcacattatctctaataatattctccagggttttgcagctctatatgttacaagctttatggattaagcttttctattgtctttgtattatgttcaagagaagcataagaccagggaattacacgtttgtgtgtacgtttgtatttgtttaactctcattatcataactgcaaaaagtcagccttgatattctacttgctgactcatctgcctgtataattcttacgttcttctctctgaaacagtgagtaggtggtaattaattttrttttaagaattaacaatatgagtygaaattcatattctgcatgttgtcccagtgccyggaggtatctgatactttcagttattgaggagtatctctgtagcatatttaccgagcttgatgcttaaggaaagcttatgcagagaacacttggcactgcttttcagtgttttctattaatgtatgctgaggagcatgtgctgctataaaacagagcaagctgtacgttgcacaggctccctggtaacttggagggcaaatgtgctcaacagaaaggcagatgggttagactcttctgtcata

SEQ ID NO: 73807 - DNA, 600 bp, Chicken  19866894355364_2
cattgtattcacattatctctaataatattctccagggttttgcagctctatatgttacaagctttatggattaagcttttctattgtctttgtattatgttcaagagaagcataagaccagggaattacacgtttgtgtgtacgtttgtatttgtttaactctcattatcataactgcaaaaagtcagccttgatattctacttgctgactcatctgcctgtataattcttacgttcttctctctgaaacagtgagtaggtggtaattaattttrttttaagaattaacaatatgagtygaaattcatattctgcatgttgtcccagtgccyggaggtatctgatactttcagttattgaggagtatctctgtagcatatttaccgagcttgatgcttaaggaaagcttatgcagagaacacttggcactgcttttcagtgttttctattaatgtatgctgaggagcatgtgctgctataaaacagagcaagctgtacgttgcacaggctccctggtaacttggagggcaaatgtgctcaacagaaaggcagatgggttagactcttctgtcataccaacatcttcatttagtcattgc

SEQ ID NO: 73808 - DNA, 600 bp, Chicken  19866894355364_3
cagggttttgcagctctatatgttacaagctttatggattaagcttttctattgtctttgtattatgttcaagagaagcataagaccagggaattacacgtttgtgtgtacgtttgtatttgtttaactctcattatcataactgcaaaaagtcagccttgatattctacttgctgactcatctgcctgtataattcttacgttcttctctctgaaacagtgagtaggtggtaattaattttrttttaagaattaacaatatgagtygaaattcatattctgcatgttgtcccagtgccyggaggtatctgatactttcagttattgaggagtatctctgtagcatatttaccgagcttgatgcttaaggaaagcttatgcagagaacacttggcactgcttttcagtgttttctattaatgtatgctgaggagcatgtgctgctataaaacagagcaagctgtacgttgcacaggctccctggtaacttggagggcaaatgtgctcaacagaaaggcagatgggttagactcttctgtcataccaacatcttcatttagtcattgctttgttttctaactattcagtgtttatactggg

SEQ ID NO: 73809 - DNA, 600 bp, Chicken  19866894355365_1
acagttcttgctctgacatcaggcaatccagaccaagagggaacctttatgaaacaccctaactagagaatgcacaacagtttgaggcgtacaccttcacaaatcactaaaaccaccaggccacaggccacaggagaccaagctgcctcagttctggttacttgtttacaagcatttccagaaatgtatattcggaggcacaccgtggtcatgcatctcatatatcttgcaaccagatgtctgaaacgctcttcagctgacatcgaaaaagagctctccacgggcagcaaggtggttttytggattcacaaagtgtaagactgtgaggagaaatataccaagttactgggggaagtgctgtaacaaaaacagcactcctactcagccacttcctttgcatgaccagtgcaaatagccaccctcttcacaccacaatgtttaactgagtcatttacgcacagggaataattagtttttccagtttagctggcaagaggcttgtcatgagaataccaatgttgtagccactctgtatgggaactctgtatgagtcacagcctgaaccactgattgagcacctggggaaaggacccggtcagc

SEQ ID NO: 73810 - DNA, 600 bp, Chicken  19866894355371_1
gtattagatgtcgctgtcaacaggtgcttacacgttgatcaaaaatatgatatattgctttaatatgctatattgctctaatatgttttgtcctgttatatgtaaaattgctcatacagacaaaatgttctaaacagttcacaaaatatcagagaatcagtaattagtatcaatgttaacttcaagaggaaactagcttgttttgaagaaaattaatctggaattggaactaacttgtgcaaggtctgatagaagcactcacctaacttaaacagagcctgtgtttaaaaaactgttagmgttaattgaatacttatattatttgaacaccaaatatgttaagtttaatagcacattaaaaaactgaataagatatttcttaagcatgaatcagttctaaatagaatagtatgaaataactaacaatttttataaaaaaggaagatacacaacgatgatgayttgtggacataatgaagtggacatgtggttgtttttttgcagttaaaagaggtacaaatgactgtaattaaaattgagctaaaagtacagttaatgctttttaaaaagtagatgtgaattaaaattaattagatgtat

SEQ ID NO: 73811 - DNA, 600 bp, Chicken  19866894355371_2
attagtatcaatgttaacttcaagaggaaactagcttgttttgaagaaaattaatctggaattggaactaacttgtgcaaggtctgatagaagcactcacctaacttaaacagagcctgtgtttaaaaaactgttagmgttaattgaatacttatattatttgaacaccaaatatgttaagtttaatagcacattaaaaaactgaataagatatttcttaagcatgaatcagttctaaatagaatagtatgaaataactaacaatttttataaaaaaggaagatacacaacgatgatgayttgtggacataatgaagtggacatgtggttgtttttttgcagttaaaagaggtacaaatgactgtaattaaaattgagctaaaagtacagttaatgctttttaaaaagtagatgtgaattaaaattaattagatgtatttgagatgttttaaggtgacttaattttactccattctaaatcaagagattttcatttaaaatcttttattacatacaacaatcattaaacatctttaaacaatgtccttatgttactgtccacaaacatatttgaaaattcttgaaaccagtaagtaaata

SEQ ID NO: 73812 - DNA, 599 bp, Chicken  19866894355373_1
  misc_feature (1)..(123): n is any nucleotide
nnnnnnnnnnnnnnnnnnnnnnnnnnnnnnnnnnnnnnnnnnnnnnnnnnnnnnnnnnnnnnnnnnnnnnnnnnnnnnnnnnnnnnnnnnnnnnnnnnnnnnnnnnnnnnnnnnnnnnnnnnncaacggtgggcagggaaacgagaggagggaggtgaaaaaactaaaaataacaaaaataagagcaaagatcatttctctttatcctaagatcggagagcacgcagtctcaacatacctttagttgcatgtgctcacctatgaaaaggcaatctccagccttaaaagtgccagagttcyttgtttaccttttgtttacccagatatttctggaaaacaccactagatcttaaaaagtgaacgttttcacagggtgttttcaagcagacacagtttccatcaagccttttcctgccctcctctcccattcttctcccagtcaccgtgagtacaaagcagagagaacgtgcagattctgtcccaaaggccataaattggaagcctacagaaaacctgaaggcttacacaaatctagaaggaggcattcccaaagccacagacagccaaaacaataaatggaatcgttcatatttagcctc

SEQ ID NO: 73813 - DNA, 600 bp, Chicken  19866894355378_1
gaaaagacaaaaatgcacatatagtacttttaaccaatgacttaccttacagtacctgacataaactacataaaatgccaaaatttgcctaggaaacacacggacatgatctcagctactttcgctgtattgttttatctctatacaataaattttattcttctttaatttcactgagttggcaaattgggtgcttcgggtctgattaaaattagacctttacgaggaatttctttctgaattcactgcaatcctgaattttctggggaggagatttttattaatattaattttattaayaytgagaatatcttttctgttttaccccttccttttcgcctggactgtattagctagggcaacgcagatagtgcaaacaaaaggtgtgcagaagggtaggtgaacagcgaagccattgcaaataataacaattatgtctaaggtgaattcacttagcactgcaagggaaacaagaaaaggtacaaggggtgtaaccatcagtctgactggtgggaaacgatgcacaatactataaagcaaaactcgtcatcccatcaggacataaataggattaaaacaagtgtggatattaatgcaggg

SEQ ID NO: 73814 - DNA, 600 bp, Chicken  19866894355378_2
aaagacaaaaatgcacatatagtacttttaaccaatgacttaccttacagtacctgacataaactacataaaatgccaaaatttgcctaggaaacacacggacatgatctcagctactttcgctgtattgttttatctctatacaataaattttattcttctttaatttcactgagttggcaaattgggtgcttcgggtctgattaaaattagacctttacgaggaatttctttctgaattcactgcaatcctgaattttctggggaggagatttttattaatattaattttattaayaytgagaatatcttttctgttttaccccttccttttcgcctggactgtattagctagggcaacgcagatagtgcaaacaaaaggtgtgcagaagggtaggtgaacagcgaagccattgcaaataataacaattatgtctaaggtgaattcacttagcactgcaagggaaacaagaaaaggtacaaggggtgtaaccatcagtctgactggtgggaaacgatgcacaatactataaagcaaaactcgtcatcccatcaggacataaataggattaaaacaagtgtggatattaatgcagggca

SEQ ID NO: 73815 - DNA, 600 bp, Chicken  19866894355379_1
tcttgtaaaagacaagagatgttaaaccgcatctaagagctaattgcccagggtcaatgatggctagagagactgaaaaacagagagaaatttaactctgttttagactggacgctgactttaggattaaacaggtcaccctacagagatgccccatccctggagacacccaagatcaggttggacagggctctgagcacctgactgagctgtgggtatccctgttcattgcaggggagttggactagacggccttttagaggttcctcccaactcaaacagctccatgattctatgatyctatttcccccaaaaagaaacatggcttacggtagatgtatcacatttgcaaagctgagaatccagccttcaaatacttcacatttctcatacagctcatggctctaacagattctaaaggcttaaactgctcttgctctgcgggagtgctgtgggattatgaatgtacagcaggtgcagctgtgctgcggggagcaggagaaaagagtgaagaatgcagagagatggacccagtgcacctctgagggagtggtcctgagcatttatgctctgcacacctgtgctgctgctctgatcacc

SEQ ID NO: 73816 - DNA, 599 bp, Chicken  19866894355383_1
  misc_feature (1)..(102): n is any nucleotide
nnnnnnnnnnnnnnnnnnnnnnnnnnnnnnnnnnnnnnnnnnnnnnnnnnnnnnnnnnnnnnnnnnnnnnnnnnnnnnnnnnnnnnnnnnnnnnnnnnnnnncacacgcagctccgctcggccgccggccccgcttcacaacttggggaaacttcggggttcggccccgcctccatttaaaggagccgcgacgccgccggagctgggtgcgggcgggcccgggccgccagcgcgggactgggaggcgcggccccgcgggagctccgcgctgtgaggaagcggcgggccgcctcagccggmggacgcctcagccgcccctcagggcgcgtcccaaagcgacttcacatccccgcgtgcctcagagtttcttcgtttttccacaaatgcacgccgggaagatcgcggtgaccccacctgctcccagccgggctggtgttggccggccccagagctgactgctggcagccacaagcaggagcggtggatgcctggatctctgctaccttttgtaaccagaacacctgggacactgcttgcttttaatgtcaacatacatgcacgtacctgtgaacttatctgcagttcaggggatttagtta

SEQ ID NO: 73817 - DNA, 600 bp, Chicken  19866894355383_2
ctgactgctggcagccacaagcaggagcggtggatgcctggatctctgctaccttttgtaaccagaacacctgggacactgcttgcttttaatgtcaacatacatgcacgtacctgtgaacttatctgcagttcaggggatttagttacactctgtacaacctcttcgctgtacagtgatgtgctggttagctttctgctgactttaagcttttacatctctgcgccccttcacataggaggatgaaaatgatcccttagatcacagaatcacagaatgggtcagaatggacgttaaagyccactcagttccaaccttgtggtgtgggctgggtgccacccagcagatcaggctgctcagggcaccatccaacctgaccttgaatgtctccaggaatgggacatctctctgggcagtcctctaacagctgtagttgtcagggtagttcaccactgcaaaagcaagaccaggtgccacactacatgtttttgctggtttgccttagatcagttgtattcccaagactttcctgccacgtgggaaaccaccactgtgctggtccagccaggtcctccctgcattcatgtcagcggtggtgaa

SEQ ID NO: 73818 - DNA, 546 bp, Chicken  19866894355404_1
tcatacccatgacctccagtgtatcacttactggtaagtgatcatactcccacaagggagatgataacacgctcagcaagactgaaacaggaggagacagcatccttgcagcaccagtgaggcatgaattcagtctacttatgatgactggaatcactccaaccctaatgctacctcatttactttctaacattctgttgagatagcaaagttgccatacagatttggaaagccacaacggtccactgctgattcatgctgttaaatcatgctgttactacattatatttatgctgttcycacactactttatgataggagacttcattatggtcagagagccagagcagatgatgaacaacatgtcaagaagaagtaacacttacttgcctacataaagatacgtaaagcctgtactgattttagtactagagaaacaatgcagtcacacacatctctatttcagtgattattcaaacacacaggcatgttttgccaatcgaaagatttagctgttatcacatgagaatagcactaaggttgaga

SEQ ID NO: 73819 - DNA, 600 bp, Chicken  19866894355407_1
cttccagacgtatttatacagtgtggttgctgcaggcatcagcaattgtgtttttctctgtaggtggcctagaaagaatccaattagaagcaagaatatctgtgaacatttgtttttttactaatcgtctggaggaggaaacagatagtgtgtagtattattgcctgcagtgtagtcataatcacaaaatacttacaaaaactatataccattaactgtaaaatggaattatttccatcattgaataggataatgtacaggcattattctgtaaggtcctccgctatgcatgctttatcrtgtcatgccttgataagagctgagaattgcaatatatacattttttttctgtgtctgaaaaattcgaaatcatttatttgaattaagttttttttgaaagatggcagtcatggcagtcttttcctgacatttgacagaacgtagagaagaaaattctgaactacaaaataaaacctcctctcagtaccttctcaactcttatttttgtattcttggtacttctgtgccaaagacaaaatatttttctatcatctctgcatatgaaatcagatgaaagtatttgtgaaaatagtaagatag

SEQ ID NO: 73820 - DNA, 600 bp, Chicken  19866894355407_2
atcatctctgcatatgaaatcagatgaaagtatttgtgaaaatagtaagatagttggtgagacaaaattcaaacattttatagaacctgaagaaggcaatgccaactgtggtgtcttataactggagaaaattttgagtaaatgtagatcctcctgtaacatgtcccatctagtgactgctttctcacagcactcactttctccttcacattttttttttttccatatgaagactacactcttcatatggaaggactgcactcttccagtctagccttcacacatcctctgcactgagcrtccccattgtattaccctgggaaaacagtctggcagaaccagactgtaatgtagttgaaatgccatcagtattgtaaatgagtaagcaatgattatgctgaagagacagactgtttcagccaacagtgacattgttaattttttaaataatctctaaaatagttttattttttccaaagaaaaaaaaatacttggttatttgcaattaagaatctgttcacattataaaaaggcactgatgggtaatagaagctacagttttatttatgcctgatcttttcaaaaagacaaaagacttca

SEQ ID NO: 73821 - DNA, 600 bp, Chicken  19866894355407_3
tttctcacagcactcactttctccttcacattttttttttttccatatgaagactacactcttcatatggaaggactgcactcttccagtctagccttcacacatcctctgcactgagcrtccccattgtattaccctgggaaaacagtctggcagaaccagactgtaatgtagttgaaatgccatcagtattgtaaatgagtaagcaatgattatgctgaagagacagactgtttcagccaacagtgacattgttaattttttaaataatctctaaaatagttttattttttccaaagraaaaaaaatacttggttatttgcaattaagaatctgttcacattataaaaaggcactgatgggtaatagaagctacagttttatttatgcctgatcttttcaaaaagacaaaagacttcatgatgtgctattaagaaaattatcctgtttgctaagtaaacaaaataaaatctatatgaatgatctttgcagttacaactaaatattagacaccaaatcatttattttacctttgctgcctaacttgcaaagcaaatgcaaaaatgcttttgctacatattcatgggaacacttctttca

SEQ ID NO: 73822 - DNA, 600 bp, Chicken  19866894355407_4
aaacccttggcagtaacattaatgacgctgtgattcatttgaaatgtaatgttctgatgtaaatgttttttacattttaagcattagttcggagtattcattctgacagtgtagttgtgcataccttcgagagagctgtaaggccccttccttctcattgtgtctggagtgtcccatggaaattcacacagcacgtcagaaagcagatggtgtgggcagtcagacgtgcaactctgagagtgctctctgtgtgactgtagcacagtagagatgatgcagcccttgaattcagcagtaatraattgagaagtggtgacaatatacctgaagtatagtagaaattgctcatagtgacctaatttgctactgttgtatataatgcacataatttggcatgttccatttaaatgttattaacttactgctatgtaaagacagtaatgttcttaacatttacttctgtacagatatttgtctctatgaaaattaaatattgtaattaaatagcaattatccattgtggccctcagaaagtgtgaagagcatccccgagtcatattgcttaatagctgtttccacatggctctctttgtattttgt

SEQ ID NO: 73823 - DNA, 600 bp, Chicken  19866894355444_1
agccactgaaacacacagctctctcctaaaacttccttcttcagtgctctctctctattaaatcaagtttctaaatagcatctgcccatcaaattcactcagacagcaaaaacattccaaaaaaacaggtgctcagatggagccaattcattacggactccgctggagctgaagacaggaaattaagtgtacatcaggcaccatataaaactattttttatctatggtaggagtgcacagacttctgagcatgaatgaaaacaggaataaatgcatttttcctgcagccaccctgccttrcttacaaaatatgatcacttccacagaccttaagctggtaagtaaagccacgggcaaacaatctgtactattatctgtactattgccccagctccaaaacgctgcttcacaacgcgatgcaacagttatcaccaggcacctcctaatgaagcctaacaggttaaagagaagtcagascagaaggaaragaaacacacacacgcacrgcaagttaaagctgaagcacacaaccaacaaaccaaaactttcatgactttcttcctccagcacacactgcccgctggtcgccaaggttctttg

SEQ ID NO: 73824 - DNA, 487 bp, Chicken  19866894355444_2
ggaaattaagtgtacatcaggcaccatataaaactattttttatctatggtaggagtgcacagacttctgagcatgaatgaaaacaggaataaatgcatttttcctgcagccaccctgccttrcttacaaaatatgatcacttccacagaccttaagctggtaagtaaagccacgggcaaacaatctgtactattatctgtactattgccccagctccaaaacgctgcttcacaacgcgatgcaacagttatcaccaggcacctcctaatgaagcctaacaggttaaagagaagtcagascagaaggaaragaaacacacacacgcacrgcaagttaaagctgaagcacacaaccaacaaaccaaaactttcatgactttcttcctccagcacacactgcccgctggtcgccaaggttctttgaaccctgcactaaattttgccaagtaattaatatgaggccagcaacctcgcctttttcaggctg

SEQ ID NO: 73825 - DNA, 477 bp, Chicken  19866894355444_3
tgtacatcaggcaccatataaaactattttttatctatggtaggagtgcacagacttctgagcatgaatgaaaacaggaataaatgcatttttcctgcagccaccctgccttrcttacaaaatatgatcacttccacagaccttaagctggtaagtaaagccacgggcaaacaatctgtactattatctgtactattgccccagctccaaaacgctgcttcacaacgcgatgcaacagttatcaccaggcacctcctaatgaagcctaacaggttaaagagaagtcagascagaaggaaragaaacacacacacgcacrgcaagttaaagctgaagcacacaaccaacaaaccaaaactttcatgactttcttcctccagcacacactgcccgctggtcgccaaggttctttgaaccctgcactaaattttgccaagtaattaatatgaggccagcaacctcgcctttttcaggctg

SEQ ID NO: 73826 - DNA, 458 bp, Chicken  19866894355444_4
aaaactattttttatctatggtaggagtgcacagacttctgagcatgaatgaaaacaggaataaatgcatttttcctgcagccaccctgccttrcttacaaaatatgatcacttccacagaccttaagctggtaagtaaagccacgggcaaacaatctgtactattatctgtactattgccccagctccaaaacgctgcttcacaacgcgatgcaacagttatcaccaggcacctcctaatgaagcctaacaggttaaagagaagtcagascagaaggaaragaaacacacacacgcacrgcaagttaaagctgaagcacacaaccaacaaaccaaaactttcatgactttcttcctccagcacacactgcccgctggtcgccaaggttctttgaaccctgcactaaattttgccaagtaattaatatgaggccagcaacctcgcctttttcaggctg

SEQ ID NO: 73827 - DNA, 599 bp, Chicken  19866894355453_1
  misc_feature (1)..(72): n is any nucleotide
nnnnnnnnnnnnnnnnnnnnnnnnnnnnnnnnnnnnnnnnnnnnnnnnnnnnnnnnnnnnnnnnnnnnnnnnaaatcctcctgtgttagtggcataccaaaaaaaaaaaaaaaaaaaaaggcatgaaactttagatctgtgtgcattctatactggaataagcctcatgaaaaccatcaccctctttgtatgatgactgtaatttcatgcatatttcaatttaccttctgtaaagctgtggaaaattatatcaatctaaacactctgttgttcaaatatataagtttttatgcttgcagwatctgtacattgcaaaatacatttcctgttatcggtgtttagttccaartactcgcgtttcctcctgtttagttgttgacctgctgcatttgttatagatttgcctttccttgtggtcccaaggacttttatcacatagtttcaagttccttgtgcctggaacagaagtgcctgkagagaagaaatctcttgtaagtaaacgttttgtttaatacctctcccgacctcttcatttattttcccttcatctctggtcctcagtaaggttatagatttgcatagttcttttaaaatcctac

SEQ ID NO: 73828 - DNA, 599 bp, Chicken  19866894355453_2
  misc_feature (1)..(23): n is any nucleotide
nnnnnnnnnnnnnnnnnnnnnnnaaatcctcctgtgttagtggcataccaaaaaaaaaaaaaaaaaaaaaggcatgaaactttagatctgtgtgcattctatactggaataagcctcatgaaaaccatcaccctctttgtatgatgactgtaatttcatgcatatttcaatttaccttctgtaaagctgtggaaaattatatcaatctaaacactctgttgttcaaatatataagtttttatgcttgcagwatctgtacattgcaaaatacatttcctgttatcggtgtttagttccaartactcgcgtttcctcctgtttagttgttgacctgctgcatttgttatagatttgcctttccttgtggtcccaaggacttttatcacatagtttcaagttccttgtgcctggaacagaagtgcctgkagagaagaaatctcttgtaagtaaacgttttgtttaatacctctcccgacctcttcatttattttcccttcatctctggtcctcagtaaggttatagatttgcatagttcttttaaaatcctacagatttatgtacttagagcgtagcattcacagcccagctcctgctccct

SEQ ID NO: 73829 - DNA, 600 bp, Chicken  19866894355453_3
atcaccctctttgtatgatgactgtaatttcatgcatatttcaatttaccttctgtaaagctgtggaaaattatatcaatctaaacactctgttgttcaaatatataagtttttatgcttgcagwatctgtacattgcaaaatacatttcctgttatcggtgtttagttccaartactcgcgtttcctcctgtttagttgttgacctgctgcatttgttatagatttgcctttccttgtggtcccaaggacttttatcacatagtttcaagttccttgtgcctggaacagaagtgcctgkagagaagaaatctcttgtaagtaaacgttttgtttaatacctctcccgacctcttcatttattttcccttcatctctggtcctcagtaaggttatagatttgcatagttcttttaaaatcctacagatttatgtacttagagcgtagcattcacagcccagctcctgctcccttgccacaatttgcttttatcactctcayccccagttttatctactgcagtcctgactgattcatttaggggattaactgtgcagyttgttgtcggttttctaaacatactagaatttacgtagcaac

SEQ ID NO: 73830 - DNA, 600 bp, Chicken  19866894355453_4
tgacctgctgcatttgttatagatttgcctttccttgtggtcccaaggacttttatcacatagtttcaagttccttgtgcctggaacagaagtgcctgkagagaagaaatctcttgtaagtaaacgttttgtttaatacctctcccgacctcttcatttattttcccttcatctctggtcctcagtaaggttatagatttgcatagttcttttaaaatcctacagatttatgtacttagagcgtagcattcacagcccagctcctgctcccttgccacaatttgcttttatcactctcayccccagttttatctactgcagtcctgactgattcatttaggggattaactgtgcagyttgttgtcggttttctaaacatactagaatttacgtagcaacaaggatatacatgtagtttacgttcctgaaatactgactcatactagcaactgaggaggggttatatttgatgctgtggtgctgatggttgactctgatccttgaagtggttcagcttgtactacctcttcctttagactgctgttcttgtggtaaggctgaagagttttcaatatacatgctgtgcaaatcttctatatt

SEQ ID NO: 73831 - DNA, 600 bp, Chicken  19866894355453_5
acatagtttcaagttccttgtgcctggaacagaagtgcctgkagagaagaaatctcttgtaagtaaacgttttgtttaatacctctcccgacctcttcatttattttcccttcatctctggtcctcagtaaggttatagatttgcatagttcttttaaaatcctacagatttatgtacttagagcgtagcattcacagcccagctcctgctcccttgccacaatttgcttttatcactctcayccccagttttatctactgcagtcctgactgattcatttaggggattaactgtgcagyttgttgtcggttttctaaacatactagaatttacgtagcaacaaggatatacatgtagtttacgttcctgaaatactgactcatactagcaactgaggaggggttatatttgatgctgtggtgctgatggttgactctgatccttgaagtggttcagcttgtactacctcttcctttagactgctgttcttgtggtaaggctgaagagttttcaatatacatgctgtgcaaatcttctatatttcagtaactgactcctgcagtaatcacacatatgtacataaatttgatacatattta

SEQ ID NO: 73832 - DNA, 495 bp, Chicken  19866894355455_1
ccatctggttattttagcagaaatggttttagttatttcatatctaggctttttggactgaaagggtatctgaaactgcaaagacagtgcaaagtcttgaggatgatgttgcttgttgtggaacatataattgcctctcattgcaggcatcttccataaaggcaaatgttgccataccactagtaacttatctcgagaggacttctattggagacgaatgcttcctctcagggaaagcttcttctgcagtacagtgccaatatctacaggtttttttctgggctgtgcatcaagttttgrgacagaactgaggaatccactgcagcatgtatccattagtcatttcttccacagaaatgatgtaaaatgttgaaaatgaaatttgagattcatgccagtgctttgcttttttggtgcttttgttcttgctgttggtctccaaatacctgcctgtaatgcagtttatttggtcagtagatttaaaaaaaaaaaagg

SEQ ID NO: 73833 - DNA, 599 bp, Chicken  19866894355458_1
  misc_feature (1)..(33): n is any nucleotide
nnnnnnnnnnnnnnnnnnnnnnnnnnnnnnnnnagctgacattgtgtttgaggtggttattgctgccagcccttctcctaactcctggtggatgaaaaacttagcatgagccagcagtgtgctcttgcagcttggaaagcaaatggtattctgggctccagcagatgaggggtggccagcaggggcagggaggtgattgttcctctctactctgccctcatgaagccccatctggagtactgcatccagttctggggcctcaaatacaagaaagacagggagctgttggagggggtccasaggaggaccacaaaagatgattagagggctgcagcacctccctatgaagacaggctgaaggagctaggcttgttcagcctggagaagagaaggcttcagggtgacctcattgcagctttccagtctacaaacaggaggggagtcaactctttttgaaagcgtagataacatcaggactaggggaaatgattttaagttgagggaaggaagatttaggttgtatgtcagggggaagttctttaccaagagagcggtgaggtgctggaacaggttgcccagagaggctgtggatgccccaa

SEQ ID NO: 73834 - DNA, 600 bp, Chicken  19866894355459_1
tgcatggattcctatcttcccatgaactgactgtaattatatttagctaacattttaaaattctgtctttcacctttgtcttgctttccttgactgactttcatcttgttctctttgacttactaatagctttttccagtctatgtcctgttaaaacgcataagaattctgtgcacacatttctcaggctgctcacctggcttaaactaaggccagccacattctggtggcaatggtaattaaatttaatttcaaagacttaaattcacagatttacataagacttttgaaattcctatwaaaaaaaaagcaacatattttctcttcagtttgtggtatttcactctgagcttttaatrtatgcttttgaacatggtttactttctttctttactagtacatgtgcaagctaatactacgaaatgcataggtaaagacagttttcaaaacaccatgcaatgtaacactggcaaaggacatgctaaagccagaaggggtggtgataccctaaagcatttctgctcatctgaaaagctatcaaagccttcactggaagctgtgggaggttagaaactggggctctgtttctttctcagttta

SEQ ID NO: 73835 - DNA, 569 bp, Chicken  19866894355459_2
attctgtctttcacctttgtcttgctttccttgactgactttcatcttgttctctttgacttactaatagctttttccagtctatgtcctgttaaaacgcataagaattctgtgcacacatttctcaggctgctcacctggcttaaactaaggccagccacattctggtggcaatggtaattaaatttaatttcaaagacttaaattcacagatttacataagacttttgaaattcctatwaaaaaaaaagcaacatattttctcttcagtttgtggtatttcactctgagcttttaatrtatgcttttgaacatggtttactttctttctttactagtacatgtgcaagctaatactacgaaatgcataggtaaagacagttttcaaaacaccatgcaatgtaacactggcaaaggacatgctaaagccagaaggggtggtgataccctaaagcatttctgctcatctgaaaagctatcaaagccttcactggaagctgtgggaggttagaaactggggctctgtttctttctcagtttatgatgtacctgctttcactgacattggg

SEQ ID NO: 73836 - DNA, 600 bp, Chicken  19866894355462_1
tgataaagatacatggacgcttttaggcggtgctcattatagataagtcagcgtcttaatgctgtgtggcagttcgtttgtggttgttacctctgacactacttcacatttctgatatttttaatctctcctcaaaattggaattctaatactttaattctaaaagttgacttatcgaagtgcctctgattaagtgtatatatataatcttatgtaattataattgcatttctataaaaccatagagttatgttttgattaagcagtgttctttccctctccttaaagtcagagttttcyctttctggaggtgctgctcccgggcaggaatgcaggacatgcacggggaggttctgtgccacaaaggagcagttggctttggtcagtgtggatttagatgcagagtttttgaggatgaagcccagtatgctgggctttarattccagacaattcctcattaatcaagcagctgcgatgcagtccgctccccttggctctgtggctgttcttttatgttgacctgcaataaaagtgtttgaccgtgctatgtagtcactgctgccatggagcttgtcggaccttctcctggcttccatctg

SEQ ID NO: 73837 - DNA, 599 bp, Chicken  19866894355462_2
gaattctaatactttaattctaaaagttgacttatcgaagtgcctctgattaagtgtatatatataatcttatgtaattataattgcatttctataaaaccatagagttatgttttgattaagcagtgttctttccctctccttaaagtcagagttttcyctttctggaggtgctgctcccgggcaggaatgcaggacatgcacggggaggttctgtgccacaaaggagcagttggctttggtcagtgtggatttagatgcagagtttttgaggatgaagcccagtatgctgggctttarattccagacaattcctcattaatcaagcagctgcgatgcagtccgctccccttggctctgtggctgttcttttatgttgacctgcaataaaagtgtttgaccgtgctatgtagtcactgctgccatggagcttgtcggaccttctcctggcttccatctgctgctttgatttctcttcatttcctggaaatctaaaggccaccaatgtctgacttctacaatgcatctcttaaatactgaggagaagtctcctcagtgtaagcagtggaagtcaaatttgaccttccattaaaagaggg

SEQ ID NO: 73838 - DNA, 600 bp, Chicken  19866894355466_1
ggacgagcccatttctagatgaacctgtcatagtaattcggtttaaccattaacgagtgcctagtaattgacgtgtaatttttggttttaaaaaagcagcagtgtgtgatcattacctcgtggggcagggaaggtcgagccttcgtccatgtaacccataattgattgctgcactttaacagtgtaagccctgactgctcagcagccagtttcaaggtctgcttttaggctttccaactgcccacagccaggtgagctgcagccttctctgagctttatggactgtttaacttcctctgwtcactgagcaagatactactggtggagaaggacctgcttgaagggctagcattgaaggctttaagccagtttctgttcagtggaatcttctttctttacctattgacttaaaaggtttgtatggattaagtagactgccatctcagttcttctgggataagtttctatctaaaatacttaacaggctttttttttctccctctctatgaaataaagaatgaaagcaaaataataaaggttgattttaggaatgtactccagtgtgtaatggcagtcaccttttctgatgcccagggagcc

SEQ ID NO: 73839 - DNA, 599 bp, Chicken  19866894355473_1
  misc_feature (1)..(71): n is any nucleotide
nnnnnnnnnnnnnnnnnnnnnnnnnnnnnnnnnnnnnnnnnnnnnnnnnnnnnnnnnnnnnnnnnnnnnnnttctgtacattcattcggctctgaaatctcctccatctgtatttctttccccaaactaaaagaaaaagagataaagggaggcaaaaacaaacaaacaaaaaggaaaggtaaggtggaatgaaaaacaggaaaatgaaaatatacatagaaacatagaatcattaaggttgaaaaagaccactgacatcacttagtccagatgcagcccatccccaccatgcccgctaayccatgaccctcagtgtcacacctacgtgtttcttgaacctccggggatggtgttccactgcctccatgggcagtctgttccagtgcttcaccgtactttctgagaagaaatgtttcctaataatcaacatgtaacaaaacaaaacaaaacaaaatttgtttcttttcaaacctgtagaacaagcatggcttcaaaattccctatttcctgacatacatttgtgatgacagcaaggtgtcttgccactgtgccttcattagagctcagttttctcagagaaaggaggaggaaacccagca

SEQ ID NO: 73840 - DNA, 599 bp, Chicken  19866894355485_1
  misc_feature (1)..(182): n is any nucleotide
nnnnnnnnnnnnnnnnnnnnnnnnnnnnnnnnnnnnnnnnnnnnnnnnnnnnnnnnnnnnnnnnnnnnnnnnnnnnnnnnnnnnnnnnnnnnnnnnnnnnnnnnnnnnnnnnnnnnnnnnnnnnnnnnnnnnnnnnnnnnnnnnnnnnnnnnnnnnnnnnnnnnnnnnnnnnnnnnnnnnnntctgagctgctgccttcctggtaatagaaacttcacccaacagtgcatcaggcagtaggcctgtctgattcatagagaactctcccagacgtggattctggatgtttgttggtttttwaaaaaaaactttaggaattttcaggagttgcatgtaaaaaattactyaagaacaaacttgttctactgtaattttggtaagaaaaaaatacattaaaacttgcataccagcaagagtagcttaattcctccagctcaggtgctgaggttggcaagtatggaatttttactttgtacagtaatgaaaccacactgctgtgtgtgcaaagtaatgtgcaaagatctgtgggcaaaagtgttttacgtgtgtgtctgcttacagttttcgtatacaccttctgttttaggattctgtcgcct

SEQ ID NO: 73841 - DNA, 599 bp, Chicken  19866894355485_2
  misc_feature (1)..(135): n is any nucleotide
nnnnnnnnnnnnnnnnnnnnnnnnnnnnnnnnnnnnnnnnnnnnnnnnnnnnnnnnnnnnnnnnnnnnnnnnnnnnnnnnnnnnnnnnnnnnnnnnnnnnnnnnnnnnnnnnnnnnnnnnnnnnnnnnnnnnnnntctgagctgctgccttcctggtaatagaaacttcacccaacagtgcatcaggcagtaggcctgtctgattcatagagaactctcccagacgtggattctggatgtttgttggtttttwaaaaaaaactttaggaattttcaggagttgcatgtaaaaaattactyaagaacaaacttgttctactgtaattttggtaagaaaaaaatacattaaaacttgcataccagcaagagtagcttaattcctccagctcaggtgctgaggttggcaagtatggaatttttactttgtacagtaatgaaaccacactgctgtgtgtgcaaagtaatgtgcaaagatctgtgggcaaaagtgttttacgtgtgtgtctgcttacagttttcgtatacaccttctgttttaggattctgtcgcctggggaggaatggcgaaaactttttcataaattaactaacctttatct

SEQ ID NO: 73842 - DNA, 508 bp, Chicken  19866894355487_1
attcagtccagaggccaggctcttttcatgccttacttccaactgaaaccttccttgttaattttccatacaaattggtacttttttttttttccctgtacttatgttcctaccttaattgttggttaaaaaaggcaaccagcttccactgtccaggccaggtatccagtgattcctcctttgcattgatatatttacttttcccagtgttgacttttagataacagaaaactttttagatttgctatttgccacactgtgcagatttgccttggttttacagtgatggccagtctccawaccttctctcctgtcacctgtggtcaccatagtggtcttcactaaaccgatgcttgatcttacagcttattgagactggttctttgttagttaatgaaagggtcacaatccatcctataaactcctgtcattctcagagggtgcctcagaggacagacatctccctaactctgggacagtgattttgaaaaagcatattgagaactca

SEQ ID NO: 73843 - DNA, 599 bp, Chicken  19866894355491_1
  misc_feature (1)..(78): n is any nucleotide
nnnnnnnnnnnnnnnnnnnnnnnnnnnnnnnnnnnnnnnnnnnnnnnnnnnnnnnnnnnnnnnnnnnnnnnnnnnnnntttatgagagccaaaatccggctccatgtgggcttcaaaggaagcagctctccatacggcactgtgtttgagaaataactcacccctgtgtagaggcactgtaaccgtgttggcaccatttaaaacctgagaacaggtacaaatttaatcatgataaatgaactatagttgataacttccaaataaatgagggagggattatagggaagatgatgctaaaawatatatatatttgagtatcaggttaagtttattagcagcttattaatatctgtgaactgcagtagtttttctgaggttttgtggagtctgtgcagttaatatatagaggaacagagctaagggctgcatgtaagctatcagctcttatgtgcttgcctccatgtgccagatgcctactgtcaagttctggagggtgtgcaactacatctgtagttttcttytgtgcctgtggcccattctcctgctgccctttttccatgaaggcccagctggrttctcaaagtacagagccagtgcat

SEQ ID NO: 73844 - DNA, 599 bp, Chicken  19866894355491_2; identical to SEQ ID NO: 73843
  misc_feature (1)..(78): n is any nucleotide

SEQ ID NO: 73845 - DNA, 599 bp, Chicken  19866894355491_3; identical to SEQ ID NO: 73843
  misc_feature (1)..(78): n is any nucleotide

SEQ ID NO: 73846 - DNA, 599 bp, Chicken  19866894355491_4; identical to SEQ ID NO: 73843
  misc_feature (1)..(78): n is any nucleotide

SEQ ID NO: 73847 - DNA, 600 bp, Chicken  19866894355491_5
tttaatcatgataaatgaactatagttgataacttccaaataaatgagggagggattatagggaagatgatgctaaaaaatatatatatttgagtatcaggttaagtttattagcagcttattaatatctgtgaactgcagtagtttttctgaggttttgtggagtctgtgcagttaatatatagaggaacagagctaagggctgcatgtaagctatcagctcttatgtgcttgcctccatgtgccagatgcctactgtcaagttctggagggtgtgcaactacatctgtagttttcttytgtgcctgtggcccattctcctgctgccctttttccatgaaggcccagctggrttctcaaagtacagagccagtgcatccacccttgtactgcaggtttctggaaaagacagacccaagcagtccttcatgatgcactttgcgtttgtaatttgtcatcgtgataagacttctagttcaaataattgtgaaactgaaaaacataggagaggaaaaagaaaaaaaaagtagtatatatcttaaatcattttgcagtttgtcaatttgtggctgtgtggctgactaactgtaaggaaaggat

SEQ ID NO: 73848 - DNA, 585 bp, Chicken  19866894355491_6
gattatagggaagatgatgctaaaaaatatatatatttgagtatcaggttaagtttattagcagcttattaatatctgtgaactgcagtagtttttctgaggttttgtggagtctgtgcagttaatatatagaggaacagagctaagggctgcatgtaagctatcagctcttatgtgcttgcctccatgtgccagatgcctactgtcaagttctggagggtgtgcaactacatctgtagttttcttytgtgcctgtggcccattctcctgctgccctttttccatgaaggcccagctggrttctcaaagtacagagccagtgcatccacccttgtactgcaggtttctggaaaagacagacccaagcagtccttcatgatgcactttgcgtttgtaatttgtcatcgtgataagacttctagttcaaataattgtgaaactgaaaaacataggagaggaaaaagaaaaaaaaagtagtatatatcttaaatcattttgcagtttgtcaatttgtggctgtgtggctgactaactgtaaggaaaggataattcctgcacatactttcaccattgtatctttatctg

SEQ ID NO: 73849 - DNA, 600 bp, Chicken  19866894355495_1
ctacagggtgtgcagggaggagacacaaacacagctcgagggatggagaaaaatatttacagagagacaattcgatcttatctcaaagaagacttgagacagccacgattagcgtattagtaaccttcccggaaggaaaataacatacacaaaatggtcctttaatcttgcagagaaaacttaacagccaattcatggaaactgaaattgagcaaattcatattaaacatttttaagtgagtatgattaaccgctgacatacactgaaacagagcataacaggtttttgtactttgtgtytgtactaacataaaaagaagccaaggctttcatcagcaaagctagaatctttcttatttaccttaatccaagcttaaaggatcatgcttacacttctatggcttcaggtcaagactagctatgtttcctgcagtgatatgtaaaccaaaggacagcacaagctcttggactccacctaggagtaacaatgtgagactgaatgatgaacggcgtagactttttcatctgagggtcacattttagctatctacaaatctacacaacttgtttgcaaaatatatcttgaatactcacacttgc

SEQ ID NO: 73850 - DNA, 599 bp, Chicken  19866894355497_1
  misc_feature (1)..(41): n is any nucleotide
nnnnnnnnnnnnnnnnnnnnnnnnnnnnnnnnnnnnnnnnncaatctgatggcacagattaaggtgtgagcaacttctagaaaatcatccactccagctgtatcttcaagctgtgctgccaacagtcactacagacagtcattgggtatcataaaattaaatgaatctgttttgaacataagggctccaacagctgacaccacagattcaagctttcttcccaaacactgcccacactactgccctggacagcatctgtgctcatccatcctctcactgaagagctttttcctaagagcrcagtttgttaaaattcccctctgaaagcattaagccactccctcagttcccatcccttggcatagcaaacactgaactcaatttctaacarttaagaaaggatacagtcaaaaatgatcctaataaatagcagatatttcttgctatctcctgttctaactttgcattwtakcttctgtcacctgcatcttctgctgttcaggccatactcrgcttcaactgcattcagtgcagtaatcattgccttgatccagacttctcacaaagatcacaagtgactcactcagtcctcagaggaa

SEQ ID NO: 73851 - DNA, 600 bp, Chicken  19866894355497_2
ctccagctgtatcttcaagctgtgctgccaacagtcactacagacagtcattgggtatcataaaattaaatgaatctgttttgaacataagggctccaacagctgacaccacagattcaagctttcttcccaaacactgcccacactactgccctggacagcatctgtgctcatccatcctctcactgaagagctttttcctaagagcrcagtttgttaaaattcccctctgaaagcattaagccactccctcagttcccatcccttggcatagcaaacactgaactcaatttctaacarttaagaaaggatacagtcaaaaatgatcctaataaatagcagatatttcttgctatctcctgttctaactttgcattwtakcttctgtcacctgcatcttctgctgttcaggccatactcrgcttcaactgcattcagtgcagtaatcattgccttgatccagacttctcacaaagatcacaagtgactcactcagtcctcagaggaaaaaggtggcccagagacattcctgacctcagtgggatctgagattcatgccacccatgcccgcctaggcctcactgctgctaagctgtaccg

SEQ ID NO: 73852 - DNA, 600 bp, Chicken  19866894355497_3
ttttgaacataagggctccaacagctgacaccacagattcaagctttcttcccaaacactgcccacactactgccctggacagcatctgtgctcatccatcctctcactgaagagctttttcctaagagcrcagtttgttaaaattcccctctgaaagcattaagccactccctcagttcccatcccttggcatagcaaacactgaactcaatttctaacarttaagaaaggatacagtcaaaaatgatcctaataaatagcagatatttcttgctatctcctgttctaactttgcattwtakcttctgtcacctgcatcttctgctgttcaggccatactcrgcttcaactgcattcagtgcagtaatcattgccttgatccagacttctcacaaagatcacaagtgactcactcagtcctcagaggaaaaaggtggcccagagacattcctgacctcagtgggatctgagattcatgccacccatgcccgcctaggcctcactgctgctaagctgtaccgattgtgcttcaccccattcgagaacaagtggtccccatctattctgtggtctccatctattctgtggtcccatgtcct

SEQ ID NO: 73853 - DNA, 600 bp, Chicken  19866894355497_4
tgaacataagggctccaacagctgacaccacagattcaagctttcttcccaaacactgcccacactactgccctggacagcatctgtgctcatccatcctctcactgaagagctttttcctaagagcrcagtttgttaaaattcccctctgaaagcattaagccactccctcagttcccatcccttggcatagcaaacactgaactcaatttctaacarttaagaaaggatacagtcaaaaatgatcctaataaatagcagatatttcttgctatctcctgttctaactttgcattwtakcttctgtcacctgcatcttctgctgttcaggccatactcrgcttcaactgcattcagtgcagtaatcattgccttgatccagacttctcacaaagatcacaagtgactcactcagtcctcagaggaaaaaggtggcccagagacattcctgacctcagtgggatctgagattcatgccacccatgcccgcctaggcctcactgctgctaagctgtaccgattgtgcttcaccccattcgagaacaagtggtccccatctattctgtggtctccatctattctgtggtcccatgtcctccg

SEQ ID NO: 73854 - DNA, 600 bp, Chicken  19866894355497_5
ctttcttcccaaacactgcccacactactgccctggacagcatctgtgctcatccatcctctcactgaagagctttttcctaagagcrcagtttgttaaaattcccctctgaaagcattaagccactccctcagttcccatcccttggcatagcaaacactgaactcaatttctaacarttaagaaaggatacagtcaaaaatgatcctaataaatagcagatatttcttgctatctcctgttctaactttgcattwtakcttctgtcacctgcatcttctgctgttcaggccatactcrgcttcaactgcattcagtgcagtaatcattgccttgatccagacttctcacaaagatcacaagtgactcactcagtcctcagaggaaaaaggtggcccagagacattcctgacctcagtgggatctgagattcatgccacccatgcccgcctaggcctcactgctgctaagctgtaccgattgtgcttcaccccattcgagaacaagtggtccccatctattctgtggtctccatctattctgtggtcccatgtcctccgctttggtactactgatggatttaatccacatgccaccagc

SEQ ID NO: 73855 - DNA, 599 bp, Chicken  19866894355503_1
  misc_feature (1)..(99): n is any nucleotide
nnnnnnnnnnnnnnnnnnnnnnnnnnnnnnnnnnnnnnnnnnnnnnnnnnnnnnnnnnnnnnnnnnnnnnnnnnnnnnnnnnnnnnnnnnnnnnnnnnnttggaggcagaattagatgggcaaaatgcaaaccactcctgtcacgtagctgcaacacagccattcatctttctgagctaagaaaacacaaaattgtgttttgtcttagggctggacaggcaaccatgtgaagatcacaagagacctacctgcttcaagtgctgcacagtccagatacaggaaaagcacttgagacattayaagtgctcaccagcatgaacatgaacttgtaacaactgcttgtgggccatgattccttctaatgaggtccaggaggacaaagggacagttttttttgtttgtttttttttgtttgtgctaagaataagcacaatatcatcaccttcttgcatgtaacaagctgccaaacattctcagcagaagcactgagcaccctagttatgaaagccgtaagaactctgctacagaagagacagaagtgctttctcaaataaattaaacctcagttaagacattccctcaaacataaatgggtgtat

SEQ ID NO: 73856 - DNA, 600 bp, Chicken  19866894355508_1
gatgtctgtacaggctaccttacacgcacattcactcaaaccacggactgaagattaagcctaatagaaatagagattctagaggaccacggctgccaaacaggatgttggtggcttaacattccttaagagctgtcaacacaagtcagattttcacttgtgatgggaaatggactgatttgcctgaaataatggcattctaaacacacatgacaatataaggtgtagcataagtattacacatgtgtttctgcactactgcattatcagcgattgaaatgctgaccagaatcttggccytccttaacttggattgtgtacaactccatagcaatttttcagttttcaaagtgagcctgtttacctggtctagtgcacttgtcagactgtgtaatgtataaaaaggacaagttgtagtcatgaacattgtgttttacagcttgaactgatcagcagtttcacagcagtgcacagactcatttaaacaaaactgcagcctaaagtaatggctcgtacaaggcaaccaacagttttaatacctctgcttgtgttctagaatcacagacacaacttggtggaaatctggaaactaygactatc

SEQ ID NO: 73857 - DNA, 525 bp, Chicken  19866894355508_2
ttggccytccttaacttggattgtgtacaactccatagcaatttttcagttttcaaagtgagcctgtttacctggtctagtgcacttgtcagactgtgtaatgtataaaaaggacaagttgtagtcatgaacattgtgttttacagcttgaactgatcagcagtttcacagcagtgcacagactcatttaaacaaaactgcagcctaaagtaatggctcgtacaaggcaaccaacagttttaatacctctgcttgtgttctagaatcacagacacaacttggtggaaatctggaaactaygactatcaggaccacctgattgctcctgctttcttatcattttttcctttgtagcctcacatgaaatacaattacctcacagctcacaaactcaacactgtgcattttatcatgctgaaatgccactctctacttagtctctgagctcagattttctagctcataataggactgttgggagaacatccattgtaacacagagcctgcaagctcaaaaggaagatg

SEQ ID NO: 73858 - DNA, 599 bp, Chicken  19866894355512_1
  misc_feature (1)..(28): n is any nucleotide
nnnnnnnnnnnnnnnnnnnnnnnnnnnncaacatattagtctctgtattaatgataataaaatattgactcttgatcctaatttgtagataaaataggaataaaataagaaaacaactgtattttttctgcatttgtacagatagatatgtcaccaaggaaagcttttttcttttttcttctttcaaattcataatagactactggatagaaaaaaaaaaaatagaaagactggaataccagtgattaacttgggttgtgtggattctcatactttaaaccaattgaataattttgcacrttaactcagactagtacagatttgaacaaacatgcaggacagttactcctgagtcaagtcccattaatgggagamaatgactgaatggtttaatagagtatttcaaggaagagcctgtcttcccagtgaattgtgcaactacatcattgttcttaaaattactacatctaagcaagtataacaaaagaattctgtgatcagttccccacattagcatttacacaattttcagacttgaatttatcagatatttaactgagcagcttttctcagtgtgtgactgtatamattcattactg

SEQ ID NO: 73859 - DNA, 600 bp, Chicken  19866894355512_2
tcctaatttgtagataaaataggaataaaataagaaaacaactgtattttttctgcatttgtacagatagatatgtcaccaaggaaagcttttttcttttttcttctttcaaattcataatagactactggatagaaaaaaaaaaaatagaaagactggaataccagtgattaacttgggttgtgtggattctcatactttaaaccaattgaataattttgcacrttaactcagactagtacagatttgaacaaacatgcaggacagttactcctgagtcaagtcccattaatgggagamaatgactgaatggtttaatagagtatttcaaggaagagcctgtcttcccagtgaattgtgcaactacatcattgttcttaaaattactacatctaagcaagtataacaaaagaattctgtgatcagttccccacattagcatttacacaattttcagacttgaatttatcagatatttaactgagcagcttttctcagtgtgtgactgtatamattcattactgtaatttcataagtatctgcctaccaaattagcaggggagttgaactagatgacttttaaaggtcccttccaactca

SEQ ID NO: 73860 - DNA, 600 bp, Chicken  19866894355512_3
taattttgcacrttaactcagactagtacagatttgaacaaacatgcaggacagttactcctgagtcaagtcccattaatgggagamaatgactgaatggtttaatagagtatttcaaggaagagcctgtcttcccagtgaattgtgcaactacatcattgttcttaaaattactacatctaagcaagtataacaaaagaattctgtgatcagttccccacattagcatttacacaattttcagacttgaatttatcagatatttaactgagcagcttttctcagtgtgtgactgtatamattcattactgtaatttcataagtatctgcctaccaaattagcaggggagttgaactagatgacttttaaaggtcccttccaactcaaacaattctatgattatgtgattgtacattagtagagtatgtagatagtgaaaaaaagaacagtttcacatcaaaaccttgagccgcttacatgatgatttaaactatgcattttaatttgcaaaagctgtatatgcggtctattacctttgttatgtgcaattgttcattaggatacagaaatatggtaactttgtagtgctgatatggctg

SEQ ID NO: 73861 - DNA, 599 bp, Chicken  19866894355530_1
  misc_feature (1)..(50): n is any nucleotide
nnnnnnnnnnnnnnnnnnnnnnnnnnnnnnnnnnnnnnnnnnnnnnnnnntatttaacgatgaggactgctcatgatgcccattttgatgtcattcagcactctagcagactgaagaggttaattttaagatttataaaagacaggggagagaacaaggaagcaagcttatagaagccagcattttcttacaaaattcttttggtttttaaggaagtcagcagaaatatagagaatagagaatacagaatatagcaccactcagcacccaccagtgcgagaatcagagcctttgtctttwaaagacagacagatgttgtgtttgaaatctgagcttctagattagactagtcagcagatctcctgcttgtaagcattaaccaagttctctaattaaaacttagaagtttcacagtcaaatgaaacattttatatctgtatattaaagagtttcaaagtatttaaatactttcttacaccagttgttcaagttccygttgggctaaggaaattcttcatgagaacttccagtactagtttgggaaacaaatccaccaaggatctgcttttcagtaggcacaaaatcatttcattaagtgt

SEQ ID NO: 73862 - DNA, 600 bp, Chicken  19866894355530_2
ttcttttggtttttaaggaagtcagcagaaatatagagaatagagaatacagaatatagcaccactcagcacccaccagtgcgagaatcagagcctttgtctttwaaagacagacagatgttgtgtttgaaatctgagcttctagattagactagtcagcagatctcctgcttgtaagcattaaccaagttctctaattaaaacttagaagtttcacagtcaaatgaaacattttatatctgtatattaaagagtttcaaagtatttaaatactttcttacaccagttgttcaagttccygttgggctaaggaaattcttcatgagaacttccagtactagtttgggaaacaaatccaccaaggatctgcttttcagtaggcacaaaatcatttcattaagtgttcaatgtgaaccatcaacgactatgagagtcataaatcaattccaaaaataacctgcttatctacaattaacaacggcagccttcagaaagtacggttttacttaaagttacatgtataaaagttcagaattgataaagtaagcttcttctggaggagaaactccagttttctcatcttatttgttgagaaagaac

SEQ ID NO: 73863 - DNA, 600 bp, Chicken  19866894355530_3
aaagaaagaaatgaagacgtgtcaaaccagctctaaccaaatcaattactattctctattactattcatcctaacttcatggttgaggaaataaaagtaaatagaggaaagcagaaaaaaatatctaaaagacttccttttattaatggggaatttaaaggaagttctctaacatgttaccaatggaaagcatctaatttgtgcatcccaatatgaaaagtgcatgcaagactggagtactgtgactgccacctaggtatagatgaaaggctaactggatggctgggggagagactggaragccagttatctctgtacttacatctttatctctgtgtatcttctataaaacaaataaaccatcatttggtgatatcaagcaaatgctgactcaagtgactttaaatcagtgacacatggaattagagtttaaatatatcttgcataagcacttacctattcctctgccttaaggcataattccacttgtatcatcttagatcttcttatctacttgttcaccactgttggaagctacaatccccaagcaatttgttccagtgcttccctacttgtgcattttgaaatttagaaatattt

SEQ ID NO: 73864 - DNA, 436 bp, Chicken  19866894355537_1
tgtgcatcgtttccttacctgtaaattagagattctaatacctgttccaagatttgtggcaaatttttcatgtggtgccttcttctccgttgcttagaattgtggcaaaggagacttgacttagattttgtttcttgatgaagaacattttaaaagagttgatagtaatgtttggattaagtccttttgatccttttttaatttcagtattgctgaatattgaatcaaaggttatatttttagaaatgctgtatttgccttctagtctttcagtatcgtcatgaggtctttaaccatcawagagagaatgaccacaataaatctgtgggctataatattgcagatttatactggaggcacacgcaaaactgaaatgattcagcggtgtacttctactggaggaatgctgacaaacaaagtagccacttctcttcct

SEQ ID NO: 73865 - DNA, 600 bp, Chicken  19866894355547_1
ccttcgtggttgtctcctttccctgcagtcttttaagcaccacacgtatacagaaatacatggcctatgtgataaacatggcccaaaccattcaggtctgattagctttaactgcatcttcatcaggaatgacttggatctaaggaaaacaaaggagtccagtttgccagtcacaggtgcaatgtgtttgcccaggccttcatcacaaggaaggcagggtattgggttcagcctttctgtagctgttggctccaactccagtaacaaaagcgagagcaactcaacctggcgcaacatccwggaagtgatgaaaatgcagactgtcatccggagaagtgctggttacacacgagccaactttagagagtatttttagtgtgtatgtccagcttcgtcatttcaaaaacagcaacggccttgtccattggtgacctttgcagggatactggaacatcaggagacatcggggactgcagggccgacacagccgacagctcttaaattcctacatttcttcagaatcaagttcaaaccaggacatcaaaaagccctmggtctgaaatcctacaacacactgccccccaaaatcagctgcctttt

SEQ ID NO: 73866 - DNA, 600 bp, Chicken  19866894355547_2
aactccagtaacaaaagcgagagcaactcaacctggcgcaacatccwggaagtgatgaaaatgcagactgtcatccggagaagtgctggttacacacgagccaactttagagagtatttttagtgtgtatgtccagcttcgtcatttcaaaaacagcaacggccttgtccattggtgacctttgcagggatactggaacatcaggagacatcggggactgcagggccgacacagccgacagctcttaaattcctacatttcttcagaatcaagttcaaaccaggacatcaaaaagccctmggtctgaaatcctacaacacactgccccccaaaatcagctgcctttttttggcttgcttttttatttgttttgttgttgttgtttttatccttcttcaaaattatcattggattccctcaattattttttattttatgcctttggtaactcacctgtgatctactacatcataccatgcaattaccttctaactgtcacttgcagaattctcacatgtctcacggtgaaaattccaggcttcacaaatgcttctggcacagaactgaaagcagctgaaatgaagaaggagtggcgaagaa

SEQ ID NO: 73867 - DNA, 600 bp, Chicken  19866894355547_3
gaagaaggagtggcgaagaaaaatataactgaagtttgtattaaaatacgggaatacatacagaattaaattggttttcagaacatcagcacgtacgtgggttgctgtgaaagtaacacttcctatttattttcctggaaactgcaacaaagagtacaataacgctacttgataaagcaaatgttcagctacaaaatgctctttcccaacatatccaccaccattagctatgcattactgccagagatgagcaagagccttcatgccgccctcacagaaatctgaatggccatctggaaygtggtttgtcttccactgtcatcactggtactgaaactcaccacccacggcctcactgtgctcacatccactgcttggtttcagcagccatcgatgaatgtcaatgggtgccattttctctgcttggaggaatgcagcaacacccctttgctccacacacacttccacatcagatgccattttgccagactgcccctctgctgccatctgtcccatggcaacaacgtgcaatgggatacagttgggaaggttcagcctctgctgccataccaccatccatctctaatgctgtgggccaac

SEQ ID NO: 73868 - DNA, 599 bp, Chicken  19866894355548_1
  misc_feature (1)..(171): n is any nucleotide
nnnnnnnnnnnnnnnnnnnnnnnnnnnnnnnnnnnnnnnnnnnnnnnnnnnnnnnnnnnnnnnnnnnnnnnnnnnnnnnnnnnnnnnnnnnnnnnnnnnnnnnnnnnnnnnnnnnnnnnnnnnnnnnnnnnnnnnnnnnnnnnnnnnnnnnnnnnnnnnnnnnnnnnnnnnctgggggcaaaaggggtaggataggtaggataggcactgcccattttctctgtgatctatgaacaaagagaagtgatgggaaacgggagcgatgccagctcagataccctttgtgtggtgttgaggggraagacaagcactctctgctctatccttgcatttctcaacacgcagcgctgtctctttacgtggggcagggattggtgaggtcacatcacaaatgcagacctgaggagcagagggaggccccttcttgccttgcctttcccccagcatatccggtaggagcccatacacctctcctcatatcctgcagttggctgcttctgggaccaaagggaaacctcaaagcagatgggatttagcttacttacgttttctatagctaactcaaatttcattaaagacagctgtaatcccagacttct

SEQ ID NO: 73869 - DNA, 600 bp, Chicken  19866894355548_2
ataaaattgcttgtaacccatttgtatggcagagcaacaataggaatcgtgtgcttttattctgagtacagtactttcatccagatgcttctggagtgaaaaactgtaggacactactgtgcaaatattcttccaaaatgaagtggattcaatacacaagtttaattcacaaaagagtggatgtttcttttcctgcactagcagtaccaatcatttaataatacctatgttttcagaataatcaagacagagcagaaaagtcttcttgctgcattcaattctttggttatcccagatgartggcagtcactatctataataaggaacgcacagaagcacacaaccaaggtgaagatctaaccaagaaaagagttcctgctgtagatctctgttttcatctgttatctccagaacagccctgatttttctagagtacatttaagttcctctcatctaaaataagtttaagggcaaatatttatattatgagagtgtttttctaatgttattagtttcaatcacatttattctggcaaaggcagtgactcccacaaggctgacttctaaaattgatgcctggagaacagagagaggatggat

SEQ ID NO: 73870 - DNA, 600 bp, Chicken  19866894355552_1
ttcgaagaactgtatgagacacgtatgagacaagacagattttaaatgtacttacctctgctttaaattctccaggttttggaatggcccaagcaataggacatcttgacttttatccaaacggaggagtggaaatgccaggatgtgataagaatcctctttcacagattatagaccttgatggcatctgggaaggtaaggatgttgattacattacaaattcagaggaaggtcagcttcaatatgtaatgacttaacattccttcattcaggtgttttgtattagcttttgttgtgtgyaccatcagtggcaaatacccagtgcagtgaaattgttagcgtgttcaaacataccactttcctgtaattattttcatccatggatcaaataacaaataagacaaagggtttgatctggaaawctcctttaaagcagttagaagtagagacaaacactacttaaaccttcctaaaaattgtaaagggtctgtaacaacacacagatctttgctggtggagagggacattcagactctcacttctggtttgggatcttcagatacaattcttcagtgtagagcagaacatttaattattatt

SEQ ID NO: 73871 - DNA, 600 bp, Chicken  19866894355552_2
ggaggagtggaaatgccaggatgtgataagaatcctctttcacagattatagaccttgatggcatctgggaaggtaaggatgttgattacattacaaattcagaggaaggtcagcttcaatatgtaatgacttaacattccttcattcaggtgttttgtattagcttttgttgtgtgyaccatcagtggcaaatacccagtgcagtgaaattgttagcgtgttcaaacataccactttcctgtaattattttcatccatggatcaaataacaaataagacaaagggtttgatctggaaawctcctttaaagcagttagaagtagagacaaacactacttaaaccttcctaaaaattgtaaagggtctgtaacaacacacagatctttgctggtggagagggacattcagactctcacttctggtttgggatcttcagatacaattcttcagtgtagagcagaacatttaattattattattttaattagctattacaaatctgggttgcactgaagcaatgttactgtgtctattttcagtcacctaaataaagattagcaagtggctgctctaatacattttccattgttgttttctac

SEQ ID NO: 73872 - DNA, 600 bp, Chicken  19866894355566_1
gggaggtggaatccacaacttctcagggcaccctgttccagagtctcaccatgctcacagtaaaaaatttcttcctaatatctagtctaaatctacctttttccagtttaaaaccacttcaccttgtccttttgctacatgcccttgtaagaagtccccagctttactgtaggccctcatcaggtactggaatgctattataaggtttccctggagccttctcttcttagcctctccccatcatactcaaacagtctgttcatctttgtggctctcttctggacccactccaacagctcmatgtccttcttgtgttgggggccccagaactggatgctgtactccaggtggggtctaagaagagcaaagtagagaggtagaatcacctcccttgacgtgctggtcacgcttcccttgatgcaacccagttggccttctgggctgcaagcgtacagtgctggckcatgttgagtcattcatcaacgaacactctaaatccttctccctggggctgctctcaagctattctctgcccaacctgtatctgtgcttgggattaccccaacscaggtgtaggaccttgctcctggccttcctgaa

SEQ ID NO: 73873 - DNA, 600 bp, Chicken  19866894355566_2
ttactgtaggccctcatcaggtactggaatgctattataaggtttccctggagccttctcttcttagcctctccccatcatactcaaacagtctgttcatctttgtggctctcttctggacccactccaacagctcmatgtccttcttgtgttgggggccccagaactggatgctgtactccaggtggggtctaagaagagcaaagtagagaggtagaatcacctcccttgacgtgctggtcacgcttcccttgatgcaacccagttggccttctgggctgcaagcgtacagtgctggckcatgttgagtcattcatcaacgaacactctaaatccttctccctggggctgctctcaagctattctctgcccaacctgtatctgtgcttgggattaccccaacscaggtgtaggaccttgctcctggccttcctgaacttcgtgagtttggcacgggcccacccttcaagtctgtccagggccctctggatcacatctcttccctctaacatgtcaactgcaccactcagcttggtgtcatctacaaacttgctgaggggtgcacttgatcctgctgtccgtgtcacctataaagatgtt

SEQ ID NO: 73874 - DNA, 600 bp, Chicken  19866894355566_3
gtggctctcttctggacccactccaacagctcmatgtccttcttgtgttgggggccccagaactggatgctgtactccaggtggggtctaagaagagcaaagtagagaggtagaatcacctcccttgacgtgctggtcacgcttcccttgatgcaacccagttggccttctgggctgcaagcgtacagtgctggckcatgttgagtcattcatcaacgaacactctaaatccttctccctggggctgctctcaagctattctctgcccaacctgtatctgtgcttgggattaccccaacscaggtgtaggaccttgctcctggccttcctgaacttcgtgagtttggcacgggcccacccttcaagtctgtccagggccctctggatcacatctcttccctctaacatgtcaactgcaccactcagcttggtgtcatctacaaacttgctgaggggtgcacttgatcctgctgtccgtgtcacctataaagatgttaacactggtcccagcactgatccctgtggaatgccactcagtacctgtctccacttggaccctgagctcttgactgcaactctcttagtgtgacccagcacttt

SEQ ID NO: 73875 - DNA, 586 bp, Chicken  19866894355567_1
cactgatgaaatgattcatctgcagaaggggaaccaagagaaaagcatttgcagaactgaattataatataaagcaaaaggcaagttggggatcacagtcaggaagaagagaatgagagtaatggcataaaaggcttgtttctgaaagagtaagcctcttgtttttggaagagacaaagcatcaggccttctcgttactcaccctgcagttcaattctgaaccatattctgaaatatactttatagactacacataccctattccaagggtgagttcctctcagcagaacagacagcttycaaaccattccaatctccatggccttataaacagccttgaaactacgaataatgcagattaaaagggacctgtgcaggtcatctggtctagcaccctacttgagacaggactgattttaagaacagagcactttgataggacctttgtccatgtgagatgtgactacctgtaaggatgacaatgccaccaagacttggaacacttatttcaccacaatctttgaaaaggtttttccttgtacccagtgggaaactccctctagtgagtcttttgcctctcttcctt

SEQ ID NO: 73876 - DNA, 599 bp, Chicken  19866894355575_1
  misc_feature (1)..(98): n is any nucleotide
nnnnnnnnnnnnnnnnnnnnnnnnnnnnnnnnnnnnnnnnnnnnnnnnnnnnnnnnnnnnnnnnnnnnnnnnnnnnnnnnnnnnnnnnnnnnnnnnnnatttccttacatcagaaaacaaacctacacaaaaatatccctgtgcttgatgagacatctgaatactgctttcctgttgagaagctgagaagtacctactagcttccctgtgctcaagtctcctcccataatttgtgccaaaaatctagttttgagctctagtttttagctagtcaatggcacaggatcagtccttccagaytccatcccccagagtctctagcagggaaggtaatagataatagagcttctccaccttctttaatttcatcatagtttcactggtggtccaaaacattcatatgtcagctttgaattaaaaaaataaacataatttaaaagcaacaacaacaacagcgacctcagggggacataaaaacacctcagagatctatccatctgggaatcctttccatttatgcaaatggataacatttatagtagtaaaactgcctctggcagaataaatgctctgtgtgttttagacagtctcaattatgt

SEQ ID NO: 73877 - DNA, 599 bp, Chicken  19866894355576_1
  misc_feature (1)..(78): n is any nucleotide
nnnnnnnnnnnnnnnnnnnnnnnnnnnnnnnnnnnnnnnnnnnnnnnnnnnnnnnnnnnnnnnnnnnnnnnnnnnnnnccacaacagacgtcatggtgcattcaagttggggatggatttcacatgtggcaacggggatggagttgcaccaccacagctgggctcaaaacaaaggtgagacatgaatccaagcctactggtcccacagtgctgtggcaatgaggagctggtggaaacctcagcaaagctgaactaggagaggtgcctagaagactttgcatgcaagagaacaatcagatrtttgctgaatttttctgactccccttagggagaaatcatgaaccttgatttcatgaggtccaataaatccaagcacaaggtcttgcacctgggttatagcaacccctgctatcaggacaagctgggggatgtaaggatggagcacagctgtagtgaaaagaacatggggatactggtgaatggtagctggacataagccagcaatgtgctctcacagctcagaaagccacccagatactgggctacaccaaaagcagcatggccagcaaggtgagggaaggtgatcctgcccctctgct

SEQ ID NO: 73878 - DNA, 600 bp, Chicken  19866894355582_1
tttggcagcaaggtaagttttgtgtttgccaagagtgattttccatcagtcagggaatacatcaggaaataaaagggcgaattgccccaccgagcatcattagccgtgttccttcttcctttttctgcctctggagaaacagatttactgctgaaaagcgaggaacacccatgaggtgtcatacggcactttttctatcctcagaccttccagaaagaaagcgctgcataaatcccaatctcaagacaaaaatcagtccttgggactgtgcatttccgtgtgtgttcagtggcagaaggsttttgttgatccctcttctgatggtcactgcaaaatggggcatttttgaggagtttgaraaacgaagcataatggagacagaacaatgaatggacagatggtcttacaacacctggtgtgtgtgcagccagcttcactgaaagcagtttgcattttcctatggttctatagtattacagtttcctatttacttctgaaggcagaatcctggctgtatttctaagtgtagcagatacttctgggtgatgagcatcttcctggagctgtggcatctattctaaatacccagcatgcaagggc

SEQ ID NO: 73879 - DNA, 600 bp, Chicken  19866894355582_2
catcaggaaataaaagggcgaattgccccaccgagcatcattagccgtgttccttcttcctttttctgcctctggagaaacagatttactgctgaaaagcgaggaacacccatgaggtgtcatacggcactttttctatcctcagaccttccagaaagaaagcgctgcataaatcccaatctcaagacaaaaatcagtccttgggactgtgcatttccgtgtgtgttcagtggcagaaggsttttgttgatccctcttctgatggtcactgcaaaatggggcatttttgaggagtttgaraaacgaagcataatggagacagaacaatgaatggacagatggtcttacaacacctggtgtgtgtgcagccagcttcactgaaagcagtttgcattttcctatggttctatagtattacagtttcctatttacttctgaaggcagaatcctggctgtatttctaagtgtagcagatacttctgggtgatgagcatcttcctggagctgtggcatctattctaaatacccagcatgcaagggctcatactgcttttgaactgagcacttctctaagggaaagttgctaacacccagcaaagt

SEQ ID NO: 73880 - DNA, 599 bp, Chicken  19866894355589_1
  misc_feature (1)..(51): n is any nucleotide
nnnnnnnnnnnnnnnnnnnnnnnnnnnnnnnnnnnnnnnnnnnnnnnnnnnacctgtgagttattcagctgcgtcccaggctctgctgcagtgtttctacaactggtgaaagttagctttcaatcctgcctatgattgatcaccctgagatggtgatgtgcattcttcctggaaagaagaatgtgaaaacaaaacaaaacaaacaaacaaacaaacaaaaaacccctgagaatcttggctgcactcaggccagagaagaaagctgcaaagctggggaatgggcagctggtttctcatgtrtacagggagactcatgttaggatttggaacaggctagccatgagccttagcaaagagcaatctggggaatcacctctggagattttttgggaatgcaatcaacagtctagagagaagactgtgagtaaatttgcctgttagaatagtatatgttctgctgaagttttctgaggcaggtatgtgatttgggattggtaatccttggctctgacccacagtaataagtttagcaagcagccacaatatgtaaacaggctggtaatatatcaccccctgccagctttctatctccccatttc

SEQ ID NO: 73881 - DNA, 600 bp, Chicken  19866894355597_1
tcttttaaagaaaagaaagtaggattggcagagatgacaacagtagcgtgttaattaatgtgtaggcagctgcaattatgggtcacaagtggctgagctggccgggacatgactactgccctcatttactccctcaaggagggagccctgaacaaggttgcagccgttttacttcttctaatcttcaggaactgaactgatgtcaacccagggtcacataaatacagagacagtaaaaaagggaggaaggaatacttttggaagaaaaaaatggagatacgcatttttgaactaaaatgwaataaaccgctcttcagcagaattcggggagtcacaccaggttggacactggcttaaataaatcaattaaagtactgatttaagctaaaccaatacgctagygaggccttaggttttcatctttcaaagacttatgtgcatgcttggctgaacagtgggagtgattatctgtgtaattcatggtaggaatacggccttattatttaaggattccattgtataatatatgccctatttgcacatcgttgcctctgtgcaggtttctgtggagctggagctacttgctctgggtgaaatgtg

SEQ ID NO: 73882 - DNA, 541 bp, Chicken  19866894355597_2
cgggacatgactactgccctcatttactccctcaaggagggagccctgaacaaggttgcagccgttttacttcttctaatcttcaggaactgaactgatgtcaacccagggtcacataaatacagagacagtaaaaaagggaggaaggaatacttttggaagaaaaaaatggagatacgcatttttgaactaaaatgwaataaaccgctcttcagcagaattcggggagtcacaccaggttggacactggcttaaataaatcaattaaagtactgatttaagctaaaccaatacgctagygaggccttaggttttcatctttcaaagacttatgtgcatgcttggctgaacagtgggagtgattatctgtgtaattcatggtaggaatacggccttattatttaaggattccattgtataatatatgccctatttgcacatcgttgcctctgtgcaggtttctgtggagctggagctacttgctctgggtgaaatgtgttcccagctcctccacccaccccatgcactcccacccgtgctc

SEQ ID NO: 73883 - DNA, 600 bp, Chicken  19866894355598_1
cttctgattcaactatttataaaatcagaattagctttccaggaatcttctctccccttttctttaagctaacaaaaataaagagataacaatacacacagtggcctatgagcattcctgccagggaacttgtttcctggaagcagaaggggagaaaatgcaatcaaagcaaatgtatttaaaaccaaataaatctccatatagcttcatttgaacatttcttctcctctggtatttgctctgctctcattgtttcttcccatgcttccatgatcaatctctctgtgttagaactgtgcyaccacaactgcatcccagaactcagcaaatcagagaaattcagtgtgagtgtattctggtagtgagatcagtgatttcttattgggaacaaaacaaaacaaaacaacaaacaaaacaaaacctggcccggaacaatggtctgtttttaagctgaaaaaggaatatttcatggaagccatgctatacaagcagcagtcttagaagttgtgccaaacagccataagaacaggaagtggtgaatgtgtggccatgtgttcttacagcacatccagcagattaaagccttacctgatgttgttc

SEQ ID NO: 73884 - DNA, 600 bp, Chicken  19866894355600_1
atcagcaggcaaatgactagataggaaaaaagctgtgctttcccctagctacacagtaagagaaagcaaagagaaacagcccaaggtttcttagtaattactgtatgaaaagatttcatgaaaagtactaattgcacagagggtagaaagctccttgcctgggttgctatagcaactgccctccaaagcttttttgtgctatccctgcagagaaaggtggagggtttgtgctttggaagaggatttgtatctacaggaaaagattttgttgctgtagctgaatcataaacagctactgcmgaytgaaaggctgggaagtatggcacgtacagtaagagcatggttggatttgctggtcacgtctgcttgctttttgttagttagactaaaatacatatgatgacttatttgtcaatacttytcaaaataagagaaaaaaacacctagttttgaagtggtatcttttgttcaggcacagcactgacagtgagaagacgtgccggtgtgtgtgtgtgtgtgtgtgtgtgtgtgtgtgtgtgtgtgtgtgtctttgggtaggaaggatacagaatgaggtgcctgttgcttcacctcatttta

SEQ ID NO: 73885 - DNA, 600 bp, Chicken  19866894355600_2
agcaggcaaatgactagataggaaaaaagctgtgctttcccctagctacacagtaagagaaagcaaagagaaacagcccaaggtttcttagtaattactgtatgaaaagatttcatgaaaagtactaattgcacagagggtagaaagctccttgcctgggttgctatagcaactgccctccaaagcttttttgtgctatccctgcagagaaaggtggagggtttgtgctttggaagaggatttgtatctacaggaaaagattttgttgctgtagctgaatcataaacagctactgcmgaytgaaaggctgggaagtatggcacgtacagtaagagcatggttggatttgctggtcacgtctgcttgctttttgttagttagactaaaatacatatgatgacttatttgtcaatacttytcaaaataagagaaaaaaacacctagttttgaagtggtatcttttgttcaggcacagcactgacagtgagaagacgtgccggtgtgtgtgtgtgtgtgtgtgtgtgtgtgtgtgtgtgtgtgtgtgtctttgggtaggaaggatacagaatgaggtgcctgttgcttcacctcattttattc

SEQ ID NO: 73886 - DNA, 600 bp, Chicken  19866894355600_3
aaagtactaattgcacagagggtagaaagctccttgcctgggttgctatagcaactgccctccaaagcttttttgtgctatccctgcagagaaaggtggagggtttgtgctttggaagaggatttgtatctacaggaaaagattttgttgctgtagctgaatcataaacagctactgcmgaytgaaaggctgggaagtatggcacgtacagtaagagcatggttggatttgctggtcacgtctgcttgctttttgttagttagactaaaatacatatgatgacttatttgtcaatacttytcaaaataagagaaaaaaacacctagttttgaagtggtatcttttgttcaggcacagcactgacagtgagaagacgtgccggtgtgtgtgtgtgtgtgtgtgtgtgtgtgtgtgtgtgtgtgtgtgtctttgggtaggaaggatacagaatgaggtgcctgttgcttcacctcattttattcttagtaatacaccaaagcctactcagctaaagttagcgaggaaatgctgttctccagttgttaccaggcagttagtttgagtgctgagatgtaacttactgctagagggtcttctgta

SEQ ID NO: 73887 - DNA, 600 bp, Chicken  19866894355602_1
tttctgcttttttgaggcagattttatttttttctgaaatttttaaagcagatacatacatttgcaacatacacttgtacacttcaatattctttgtcttaatttatgtaaaagtcaattccaactgattgcttacttaatgtggcagtcaacaggcaaaataatattataataaaatattattatcagttaacaaggaccaaaggcttaatcctacaactgcaatgataacatcctctactgcaaacaggagaagcttaactgcttatcttactgtgctacagtaagtttgctagagayacatggtcacatccacgctgctctgacgtcccacatctgaggactgctgcaccagcactcactctgcacaggataatcctgtgcttgatgatgcccagcagtccatttggcttgttttccctcatgggtcctctttttgccctttccctgacacctgcaccacgtgttctgcacagcggcctgctacccttatactaggacaccctgcacaagtgtggcctacactgaggtcacagggctaacaaacttgttcatcaccttcccagaatttgtgcatgagcatatgtcagtccgtaaggg

SEQ ID NO: 73888 - DNA, 600 bp, Chicken  19866894355602_2
ctctgacgtcccacatctgaggactgctgcaccagcactcactctgcacaggataatcctgtgcttgatgatgcccagcagtccatttggcttgttttccctcatgggtcctctttttgccctttccctgacacctgcaccacgtgttctgcacagcggcctgctacccttatactaggacaccctgcacaagtgtggcctacactgaggtcacagggctaacaaacttgttcatcaccttcccagaatttgtgcatgagcatatgtcagtccgtaaggggaaagggaagcagcatttaygcatgagcttaatgctcaaaccattgcctgggatgtgacacgtttactcaggagcgtaatggaggaagtacagtatgggaccattacagaacatctctgcaggaatgaaattctgagcaggctcctcagagctgggacagacaggaaggaaatttgctggtacacagcagagcgccacacttcttgctgcctcttattgcaccaccttgccaaattcccccttaagaaattagcaaacaaacaccacacaaaaataacctgtttctgagaagcctggtctacattaagaggaaaggacat

SEQ ID NO: 73889 - DNA, 600 bp, Chicken  19866894355604_1
cttcagttgccaaaggttagctcacaggatgtgtttgtctgcatagactgcagataaacatttggttacacccaggaaccacacacagcaccacacggtggaaggtaactacctctgggaagaacattccctagcagcttgctgatcagctaggtgccctttgggggcacctatgctacattctaccaaattcctccctacacccaaaggtaacaggattagcatgcaacatcctgaaactaaagagagcttatgactccacaacgcaaacaggcaaaatgagatcccagcatcagagcyctgattgcattaattgctcataatggttctaatcaggctcacctggagatttcaccgcccacagccttttatgcagagaatgagtaagcacattggtgaaggttttgttgcgagttttacatttagtacagaaaaggcctgaggaagccaaatcttaataattgtgggctcacttgttacatgctgaagtgaggaacaaatgagtaagtgccagcttattctcagattmtctaaatattttctcaatattctttttttcatcttgatctcttgctttctgtactccaagaaccccttctt

SEQ ID NO: 73890 - DNA, 584 bp, Chicken  19866894355604_2
catcctgaaactaaagagagcttatgactccacaacgcaaacaggcaaaatgagatcccagcatcagagcyctgattgcattaattgctcataatggttctaatcaggctcacctggagatttcaccgcccacagccttttatgcagagaatgagtaagcacattggtgaaggttttgttgcgagttttacatttagtacagaaaaggcctgaggaagccaaatcttaataattgtgggctcacttgttacatgctgaagtgaggaacaaatgagtaagtgccagcttattctcagattmtctaaatattttctcaatattctttttttcatcttgatctcttgctttctgtactccaagaaccccttctttcaccagggaaggaacagggaacctgctacattatgttgttctcacttaattgaggcacttgttttgctcacctgtgccagggttttttattcagctgtgtcagacaaaatcactgtaaaatgcacagtgtacctttctaatgctgtgtagaggatctggttggatgcttttgttagaaaactattagctagtaagatgtactggtgccttag

SEQ ID NO: 73891 - DNA, 600 bp, Chicken  19866894355607_1
gcaatggatttggcttaacacaaggcataaaggtcatttaaagagagcaccctgctggtctaatagatcgtcctgtggcattgacccagctggtggtgtagagtgaatgggtttccacaattctaccactggttctgccacaataaaacttagctatttcaattgggtgttgccctttgtttaaatatttatttaaacagaattggagcaccactggcagctgggagttgactttgcttggactgctttgtaacattttgataagtcacagaatgcagagcaatactcatctgacaaaayaaaaaaattcaaatggacaaaccttcttagataaaataaaaggaaatcagacttaatcattaactaacttaatcattaattggaatgctcttgagtagtgtataatacttaaattaatcatagacctacctgcatagttttactttcttctcaagtaagttgagcaaaagccatggataaagccacgccacagaatgtacgtctctaagggactgcggccaatggacgtccaggctgaagcagggagaaggggaggagttcactgcaatgttaaactctattgcttaatccaaaatgaca

SEQ ID NO: 73892 - DNA, 600 bp, Chicken  19866894355610_1
atctgctcctgggcaacaacaaaaatagatgattattctccttgtgtcagttcagcactagagcaaacttcagcacaccttgtgctgtcaagaagcctccaacacgtgaacttaaagaacgagcagctcacagaatggcaacatcagagtctgggggacaaagaatcacagaacaggcagggtaggaagtgaccttaaagaccacacagtttcaacccctgctgtgagcagggttgccactcaccagatcaggctgcttgggtccctatctaacttggtttccaacacctccaaggacasagcatccacagctttgctaggcaacctgctacagtgcctcactcttaggaaaaaaatttccctcgaacatctaacctaaatctgccctcttttagtttaaaaccattccccctgtcttatcactatcagataatgtaaaaaaaaaagtccatctctgtcctgtttgtaagctccctttaaagaactgggagaccacaaagaggtgtccctggagcctcctcttctccagactgactgaacaagtccaaccccctctgtcatccttcgaaggagatgtgctccagatccctaagcaccttc

SEQ ID NO: 73893 - DNA, 600 bp, Chicken  19866894355610_2
taggcaacctgctacagtgcctcactcttaggaaaaaaatttccctcgaacatctaacctaaatctgccctcttttagtttaaaaccattccccctgtcttatcactatcagataatgtaaaaaaaaaagtccatctctgtcctgtttgtaagctccctttaaagaactgggagaccacaaagaggtgtccctggagcctcctcttctccagactgactgaacaagtccaaccccctctgtcatccttcgaaggagatgtgctccagatccctaagcaccttcacagctcccttgatcargtgaccaccagatattggtctagtccctaatttcaatccacaaactctcaacctgatcatgactgttttttaaagacagctctctgcaatccatccacttcttaacataaagggcagctcctccacccctcctgccctgcctatttcttctaaaaagcttgtagccctcaaccagagtattccagttgtgtgatttgtcccatcatgtttctgtgatagcaattatgtcatagttttatacttgcaagatggcttccaactccttctgcttatttctcatacttgtgttcatcagtgttg

SEQ ID NO: 73894 - DNA, 600 bp, Chicken  19866894355610_3
tgtgtgatttgtcccatcatgtttctgtgatagcaattatgtcatagttttatacttgcaagatggcttccaactccttctgcttatttctcatacttgtgttcatcagtgttgaggcacttcaagtgggctatggacagggttacttttttggagagccctcccaaattcctctgggacaaatgtgaagttttccccagctgcttcataaagtgacagtgtctcccagctcttctctgtcacgggagcagtacatccccccctcctggagaggacatctgggggtgcctccctgctccrggaagccattaggcactgggtatctagaaccatgttatacaagttcacttcagtgcttggtgaatatttatctccaaaaattataaatgctaagtgactgagtgcactatacgtatcaacagattattaaaaagatctttcttattctgtgctgtcttctcctccactaccattactggtcaactgggagatcagccagtgcctgtcacatacagtgctgttgctgggctccgtctcattcctaagtaacacttggtttgtgcttggcacaccaggcactccataaataattattctgat

SEQ ID NO: 73895 - DNA, 599 bp, Chicken  19866894355611_1
  misc_feature (1)..(150): n is any nucleotide
nnnnnnnnnnnnnnnnnnnnnnnnnnnnnnnnnnnnnnnnnnnnnnnnnnnnnnnnnnnnnnnnnnnnnnnnnnnnnnnnnnnnnnnnnnnnnnnnnnnnnnnnnnnnnnnnnnnnnnnnnnnnnnnnnnnnnnnnnnnnnnnnnnnnnntccctggattccctgattaaaccgttgccaaaaagcagcagaaaaaagcatctcaggttagaattgagtaatccaaatagcctgggattacagaaaggtttgtatcccatcaggcaacaaactgtcataacccaaatccttggggagctkcttcagtgtgatgcaaaggctcccctccgtcacctccaaaataccagagctgtgtatggcttaaccataagaattcagagagcaccagccctggcagaggtaagagcctgaaggatgaaccccaccaagagcagtgccctggaaactcctcctttgatttcacagggaggtagttcagactcatacctaagtacttgagatacaccaatttccatgctgtgctagagctacgttataccaaatagcacatgaaacagcattgaagatgcactaaatcaaaggcacactatttcacaaga

SEQ ID NO: 73896 - DNA, 579 bp, Chicken  19866894355611_2
cagagagcaccagccctggcagaggtaagagcctgaaggatgaaccccaccaagagcagtgccctggaaactcctcctttgatttcacagggaggtagttcagactcatacctaagtacttgagatacaccaatttccatgctgtgctagagctacgttataccaaatagcacatgaaacagcattgaagatgcactaaatcaaaggcacactatttcacaagatctaagacaacttgaaccactgaaataaaaccatagcaaggcaaggcaacacagtccgttccagatgcatcaggtrcagtgactcaggcaatcacgattttgctccaaagaaccatacaagggcacctgcacacaggcatcacctycagccctttggtaaagagggaacaaaactctttcttaaaagcacccatgaagccaaacctcacgaaggacaaagctggcagggctttgctgaaggagacgctaatacctctcagcacagccaggccttaaaccctcagaaaggcactcagcagcatcaggtcctcctttctgctaggaaaagcacaggacaaaagtgctttcagaacaa

SEQ ID NO: 73897 - DNA, 509 bp, Chicken  19866894355611_3
ctcctcctttgatttcacagggaggtagttcagactcatacctaagtacttgagatacaccaatttccatgctgtgctagagctacgttataccaaatagcacatgaaacagcattgaagatgcactaaatcaaaggcacactatttcacaagatctaagacaacttgaaccactgaaataaaaccatagcaaggcaaggcaacacagtccgttccagatgcatcaggtrcagtgactcaggcaatcacgattttgctccaaagaaccatacaagggcacctgcacacaggcatcacctycagccctttggtaaagagggaacaaaactctttcttaaaagcacccatgaagccaaacctcacgaaggacaaagctggcagggctttgctgaaggagacgctaatacctctcagcacagccaggccttaaaccctcagaaaggcactcagcagcatcaggtcctcctttctgctaggaaaagcacaggacaaaagtgctttcagaacaa

SEQ ID NO: 73898 - DNA, 600 bp, Chicken  19866894355614_1
gtttctcccacactgcatcccaacacttggggaatggttcttgtaaagctccagcagccccatggaggtgctgggaaaaagaatcaactcctgagaatccatccagccctcactaacagcagctgaacttgtgtatttccacatggaaaaaaggatagcatgtgccaaatttctccactcttgatctaggaaagagcctggccatgcaacacacgagcatggagctttcttctggccttctcctctgtccattttcatcgcccatgcaactccaactagggaaagtagtaatgacaaaarctaaacctmtcgaaaagactcggtggagaccctcgggcaaaatatcttcttcacccacaatgcctgcagggtcttatttcagtaagacattgtttttatcctggaagggggaatgtagtctgaggaaagaaaccagcatttagtcactctctgggtgtacaggacgtgcgtggccatgcaaatgtgtaaatctgatgctgtcagcaaaatcttgctgccttctgacagccaccctgtgcagccttcaaacctgctccagttgctcctcacacctgtcagcctgaaagataacgtggacca

SEQ ID NO: 73899 - DNA, 600 bp, Chicken  19866894355614_2
acactgcatcccaacacttggggaatggttcttgtaaagctccagcagccccatggaggtgctgggaaaaagaatcaactcctgagaatccatccagccctcactaacagcagctgaacttgtgtatttccacatggaaaaaaggatagcatgtgccaaatttctccactcttgatctaggaaagagcctggccatgcaacacacgagcatggagctttcttctggccttctcctctgtccattttcatcgcccatgcaactccaactagggaaagtagtaatgacaaaarctaaacctmtcgaaaagactcggtggagaccctcgggcaaaatatcttcttcacccacaatgcctgcagggtcttatttcagtaagacattgtttttatcctggaagggggaatgtagtctgaggaaagaaaccagcatttagtcactctctgggtgtacaggacgtgcgtggccatgcaaatgtgtaaatctgatgctgtcagcaaaatcttgctgccttctgacagccaccctgtgcagccttcaaacctgctccagttgctcctcacacctgtcagcctgaaagataacgtggaccagtcttccct

SEQ ID NO: 73900 - DNA, 593 bp, Chicken  19866894355617_1
atgtgaatgcacaagactcacatctagccactcacatggagttaagcatgcactcggatgtacagaaccattctttcatccaacacttgctttgattccaacaaaaacttagcacaaaagagagttaggaccaaaacctgttgattcctgctctacctcccattgaggttcttattccaggctaggcatcgacccatggccttctgcagctaacagaaattattcccaagggcagtgatggatacagggcaagctttaggggaatagggcactgaaaatgcattaggaaggaaggtaggyaccctttaaattccaaggcaatgctgcttccctactttttttgtagacactctgtgtgtagttccacacacagaatggccaattttgccaccaaaaaaatgctccccataaacacagatcatagttgtaaagatctatttgatatttaagcagttcctaaaatctttatgggtataattccaggggattgaatatatcgctagcatatggccagcaatgtcttaaggactgttctcacttcagaagatccattccatcacagtttgcccataacaaatgcactgggataatgg

SEQ ID NO: 73901 - DNA, 600 bp, Chicken  19866894355620_1
ttgtagctcgtcgtgcctccctgagagatcagcttccataaaaccgagttcctttaaagaaggtgccatactgtcaggacatctgtctcaagaaagggaaggaagcactgaaggaggaggattgctgttcattaattgcatcatattgagcttgcaggcagacaagtacttgagacagccaaaaggtggagatttttaggttcatcccccagcttttcttttcctcccccttcccaatagaagcgctttgccaaaaccttgctgtggcagcaccggggcttttaaagaagagtcggaacygaagaaagaatttcaggaacttgattaatttcagtcctgtcttttctgaagkcttgagaattcaatgttgtgtacagcaagaataatgatatgagtgtgctagactgctgtgaagaacaacactgactgactatcaaaaattaccagtttgtacttgctcaggaggttattgctgaaagattttatacaattagattcctaaccataaaaaaggagggtaggcctgattctttttcttcttttagctatctgagggaagtagtctgtggttctgtcattaacttttaaaatatgtgattg

SEQ ID NO: 73902 - DNA, 600 bp, Chicken  19866894355620_2
tttaaagaaggtgccatactgtcaggacatctgtctcaagaaagggaaggaagcactgaaggaggaggattgctgttcattaattgcatcatattgagcttgcaggcagacaagtacttgagacagccaaaaggtggagatttttaggttcatcccccagcttttcttttcctcccccttcccaatagaagcgctttgccaaaaccttgctgtggcagcaccggggcttttaaagaagagtcggaacygaagaaagaatttcaggaacttgattaatttcagtcctgtcttttctgaagkcttgagaattcaatgttgtgtacagcaagaataatgatatgagtgtgctagactgctgtgaagaacaacactgactgactatcaaaaattaccagtttgtacttgctcaggaggttattgctgaaagattttatacaattagattcctaaccataaaaaaggagggtaggcctgattctttttcttcttttagctatctgagggaagtagtctgtggttctgtcattaacttttaaaatatgtgattgaccttctttaaataccttacgtgcataggagaatgtaagagctcttggaaga

SEQ ID NO: 73903 - DNA, 600 bp, Chicken  19866894355624_1
tccagtgtgttggtgtaaagcagtgctaatcacctaagaatggttattacaaaatgtagtagtaactcctgtgttagtctttggactgtggtgtgtttgcttttgctgagataagttggcctgaaacttcaacacaggaagttctgtactaatatgcagaacttccttaacagtaagggtgacagagcactggagcagagaggttgtggagtctccttctatggagatgttcaagacagacgtggacacctacctgtgtgaaatgttggagggtgcctgttttgtctcatgtccagatgyccatgacacartgctgtaaagcatttctctctgtcatgttytatgtggcctgttcttgcaaagtagggttcttggtgctcaccagctgtgattggtagaacaaaacagcaaatctttgcccctgctgcatgcacaccttgtgtgcacagccagcctgatggcaacatcccaccatatctgctgctggctcactgggtgatcacctcatggctgcaagggggaggagagcatggtgcctgcacacgtggcaggcaggggactgtggcttggctgtgcccaggcccaggggttgtcagttac

SEQ ID NO: 73904 - DNA, 600 bp, Chicken  19866894355624_2
ggtgtaaagcagtgctaatcacctaagaatggttattacaaaatgtagtagtaactcctgtgttagtctttggactgtggtgtgtttgcttttgctgagataagttggcctgaaacttcaacacaggaagttctgtactaatatgcagaacttccttaacagtaagggtgacagagcactggagcagagaggttgtggagtctccttctatggagatgttcaagacagacgtggacacctacctgtgtgaaatgttggagggtgcctgttttgtctcatgtccagatgyccatgacacartgctgtaaagcatttctctctgtcatgttytatgtggcctgttcttgcaaagtagggttcttggtgctcaccagctgtgattggtagaacaaaacagcaaatctttgcccctgctgcatgcacaccttgtgtgcacagccagcctgatggcaacatcccaccatatctgctgctggctcactgggtgatcacctcatggctgcaagggggaggagagcatggtgcctgcacacgtggcaggcaggggactgtggcttggctgtgcccaggcccaggggttgtcagttacagagcacgtac

SEQ ID NO: 73905 - DNA, 581 bp, Chicken  19866894355624_3
ggttattacaaaatgtagtagtaactcctgtgttagtctttggactgtggtgtgtttgcttttgctgagataagttggcctgaaacttcaacacaggaagttctgtactaatatgcagaacttccttaacagtaagggtgacagagcactggagcagagaggttgtggagtctccttctatggagatgttcaagacagacgtggacacctacctgtgtgaaatgttggagggtgcctgttttgtctcatgtccagatgyccatgacacartgctgtaaagcatttctctctgtcatgttytatgtggcctgttcttgcaaagtagggttcttggtgctcaccagctgtgattggtagaacaaaacagcaaatctttgcccctgctgcatgcacaccttgtgtgcacagccagcctgatggcaacatcccaccatatctgctgctggctcactgggtgatcacctcatggctgcaagggggaggagagcatggtgcctgcacacgtggcaggcaggggactgtggcttggctgtgcccaggcccaggggttgtcagttacagagcacgtactttacaactta

SEQ ID NO: 73906 - DNA, 600 bp, Chicken  19866894355626_1
acccttataataaaaaccttcttccttatatccagtctgaatctcccctttttcagtttgaaaccatttccccttgtactctcacaacagatcctgctgacaagtctgtccccttccttctcacaacctccctgcaggtacatgaaggataaagcctcagtaactccaaaaacacgtggagcctgaagtttccacaagcagactcttccctggccccattctctgctgttctggggctcactggatggcgttcaagtcagccccacaaccagcagtgctcagcaaaacaccccactcagkgctgcctccctccagcaaccccaccacaacacagtgctgctgaaaatgtacctttctgcagaagggcaggtaactgaagagatctgggtctgctgagatgcacaggataaggcgtgcagtaaccaaggctcccggagcagggcaacaggatccctcccagtgcctcataaagttatacagcagtgtgagaggcacaggaattaattagaaagcgggtttccatgtctgatcatgtgtctgctctttgtttacaaggaggacgggcactgggctgactcctctgaaacaagatggccccta

SEQ ID NO: 73907 - DNA, 599 bp, Chicken  19866894355639_1
  misc_feature (1)..(90): n is any nucleotide
nnnnnnnnnnnnnnnnnnnnnnnnnnnnnnnnnnnnnnnnnnnnnnnnnnnnnnnnnnnnnnnnnnnnnnnnnnnnnnnnnnnnnnnnnngggggcaggaggcagggaaagggcttggatatggagcaggggaagagcagggagcagatcaaattttcaaacaccgtctgaatgcatcagtgaggagcagtatggaaagaacatggccgggctatgagagctgactgaacagcacgatgcaagttgctctgtttaagcacgctctgtgtgcacgctgtaagaaacaaggcaccatggcaycacagaaggcaaaaggcaaaatcttcagctgttcaayaaagtaacttcattttcagcctttaatgcatttcagccaaacgcatttggcttaggcaaaaagctcacgttgccraagttagagggacrcygcagaaatgcttgataacrttactgaagcctaggtaagaggatctgaagaaataataaacctgaactcagtgcttcaactcttcacatggtaacagcataccttgcctgaacggcccattggctcctgtctgctcactgcccacgtcgtggccctgctgccttccacacaa

SEQ ID NO: 73908 - DNA, 599 bp, Chicken  19866894355639_2
  misc_feature (1)..(53): n is any nucleotide
nnnnnnnnnnnnnnnnnnnnnnnnnnnnnnnnnnnnnnnnnnnnnnnnnnnnngggggcaggaggcagggaaagggcttggatatggagcaggggaagagcagggagcagatcaaattttcaaacaccgtctgaatgcatcagtgaggagcagtatggaaagaacatggccgggctatgagagctgactgaacagcacgatgcaagttgctctgtttaagcacgctctgtgtgcacgctgtaagaaacaaggcaccatggcaycacagaaggcaaaaggcaaaatcttcagctgttcaayaaagtaacttcattttcagcctttaatgcatttcagccaaacgcatttggcttaggcaaaaagctcacgttgccraagttagagggacrcygcagaaatgcttgataacrttactgaagcctaggtaagaggatctgaagaaataataaacctgaactcagtgcttcaactcttcacatggtaacagcataccttgcctgaacggcccattggctcctgtctgctcactgcccacgtcgtggccctgctgccttccacacaactgcccacattgctgcttcacagggctgaaagaccct

SEQ ID NO: 73909 - DNA, 600 bp, Chicken  19866894355639_3
gcttggatatggagcaggggaagagcagggagcagatcaaattttcaaacaccgtctgaatgcatcagtgaggagcagtatggaaagaacatggccgggctatgagagctgactgaacagcacgatgcaagttgctctgtttaagcacgctctgtgtgcacgctgtaagaaacaaggcaccatggcaycacagaaggcaaaaggcaaaatcttcagctgttcaayaaagtaacttcattttcagcctttaatgcatttcagccaaacgcatttggcttaggcaaaaagctcacgttgccraagttagagggacrcygcagaaatgcttgataacrttactgaagcctaggtaagaggatctgaagaaataataaacctgaactcagtgcttcaactcttcacatggtaacagcataccttgcctgaacggcccattggctcctgtctgctcactgcccacgtcgtggccctgctgccttccacacaactgcccacattgctgcttcacagggctgaaagaccctcagaaagtttactcagctcatccttttctcaaaggcagaattagccatgcctgctccattcctgacatagctcctg

SEQ ID NO: 73910 - DNA, 600 bp, Chicken  19866894355639_4
caggggaagagcagggagcagatcaaattttcaaacaccgtctgaatgcatcagtgaggagcagtatggaaagaacatggccgggctatgagagctgactgaacagcacgatgcaagttgctctgtttaagcacgctctgtgtgcacgctgtaagaaacaaggcaccatggcaycacagaaggcaaaaggcaaaatcttcagctgttcaayaaagtaacttcattttcagcctttaatgcatttcagccaaacgcatttggcttaggcaaaaagctcacgttgccraagttagagggacrcygcagaaatgcttgataacrttactgaagcctaggtaagaggatctgaagaaataataaacctgaactcagtgcttcaactcttcacatggtaacagcataccttgcctgaacggcccattggctcctgtctgctcactgcccacgtcgtggccctgctgccttccacacaactgcccacattgctgcttcacagggctgaaagaccctcagaaagtttactcagctcatccttttctcaaaggcagaattagccatgcctgctccattcctgacatagctcctgaagcaatctattcc

SEQ ID NO: 73911 - DNA, 600 bp, Chicken  19866894355639_5
ggggaagagcagggagcagatcaaattttcaaacaccgtctgaatgcatcagtgaggagcagtatggaaagaacatggccgggctatgagagctgactgaacagcacgatgcaagttgctctgtttaagcacgctctgtgtgcacgctgtaagaaacaaggcaccatggcaycacagaaggcaaaaggcaaaatcttcagctgttcaayaaagtaacttcattttcagcctttaatgcatttcagccaaacgcatttggcttaggcaaaaagctcacgttgccraagttagagggacrcygcagaaatgcttgataacrttactgaagcctaggtaagaggatctgaagaaataataaacctgaactcagtgcttcaactcttcacatggtaacagcataccttgcctgaacggcccattggctcctgtctgctcactgcccacgtcgtggccctgctgccttccacacaactgcccacattgctgcttcacagggctgaaagaccctcagaaagtttactcagctcatccttttctcaaaggcagaattagccatgcctgctccattcctgacatagctcctgaagcaatctattccca

SEQ ID NO: 73912 - DNA, 600 bp, Chicken  19866894355639_6
atcaaattttcaaacaccgtctgaatgcatcagtgaggagcagtatggaaagaacatggccgggctatgagagctgactgaacagcacgatgcaagttgctctgtttaagcacgctctgtgtgcacgctgtaagaaacaaggcaccatggcaycacagaaggcaaaaggcaaaatcttcagctgttcaayaaagtaacttcattttcagcctttaatgcatttcagccaaacgcatttggcttaggcaaaaagctcacgttgccraagttagagggacrcygcagaaatgcttgataacrttactgaagcctaggtaagaggatctgaagaaataataaacctgaactcagtgcttcaactcttcacatggtaacagcataccttgcctgaacggcccattggctcctgtctgctcactgcccacgtcgtggccctgctgccttccacacaactgcccacattgctgcttcacagggctgaaagaccctcagaaagtttactcagctcatccttttctcaaaggcagaattagccatgcctgctccattcctgacatagctcctgaagcaatctattcccatgctccactatttctgtac

SEQ ID NO: 73913 - DNA, 599 bp, Chicken  19866894355644_1
  misc_feature (1)..(43): n is any nucleotide
nnnnnnnnnnnnnnnnnnnnnnnnnnnnnnnnnnnnnnnnnnntctcccctctgatgctttctgattgcaccacaaggaagttttatctgcccaggtttccacgcttaccttaagctgtgtttacttgcttggtacttgaagacccctctaggacttcagcagctgatctgaccactatttcttcattcttgtatactctttgagtcaattccctatgcttttctttccaacgagggtctgacattcttttataaaggtgggcagctttttgctgtccctcatttcctttgctgatggcraagtaggaaaatgtgaattcatccagaacttttgaggcaaggaaatcaaatcagacacagtgtttggaagcagatgggtttctgcacaacactacactagcagtgccatttcaacagctgggcagatttagtctctgcttagaaagcacagctgcaccaaaagcacaaaggatctgggcacgaactcagttgagtgaagaggtggctgtgttgtagagagagctgatgggaaacatctgcttgtaaagctgttagctctgaggcagctgtcggagaagttctgtgagctcctcatctct

SEQ ID NO: 73914 - DNA, 509 bp, Chicken  19866894355644_2
gaaaatgtgaattcatccagaacttttgaggcaaggaaatcaaatcagacacagtgtttggaagcagatgggtttctgcacaacactacactagcagtgccatttcaacagctgggcagatttagtctctgcttagaaagcacagctgcaccaaaagcacaaaggatctgggcacgaactcagttgagtgaagaggtggctgtgttgtagagagagctgatgggaaacatctgcttgtaaagctgttagctctgaggcagctgtcggagaagttctgtgagctcctcatctctggagttstcttcagctgtcaatgttcatcgtgctgggagcccccacatgggacagactgggaaggaaaatgaggagcggtagtgggggcatggatctgtctgtgctcaaaatggaagagcggttgtattgaggaacgtgtacgtgtgtgcacatctgacttaagtttgctgtaaaaagttctttctaatctgagttcttctgcagcacttatctgt

SEQ ID NO: 73915 - DNA, 600 bp, Chicken  19866894355661_1
cagctgtggctcacgtggtctgatggcattgccccgctggcaatagccaaagaattcccccatcatgtgaaagcataactgattccaaagccgttctgtgcacgtcgtgttaaacgtggctgctgatgggggtccggcgctgagcctgggatccagagttgatcacttatacaaaatagctgcaaggctggcagtgttgtggcttcccccatggggacagctcgcaggctgtgggtgttttgttatcattttctttttgttgttgttgttgttttatcatttaattcttgaggtacttcrcatsggggagctttggcaacctagtatcgtgtttcaggcattatcayaatgkggaaacaaagtgatacaagaaatgatggtgctcaatagcataaattcaatgaagctgttatccaaccttctcatatgcaggacaggagcgctgtgtcaatgctgcacgttatggtgttagctttgggatgataacaaatcacggagtcggttcctctttgtgtcctccagtgcccttggaggggtcatttggttaaattcctcactatttttgcagctgtggttgtggtttattaactgatgctgctt

SEQ ID NO: 73916 - DNA, 600 bp, Chicken  19866894355661_2
tgtggctcacgtggtctgatggcattgccccgctggcaatagccaaagaattcccccatcatgtgaaagcataactgattccaaagccgttctgtgcacgtcgtgttaaacgtggctgctgatgggggtccggcgctgagcctgggatccagagttgatcacttatacaaaatagctgcaaggctggcagtgttgtggcttcccccatggggacagctcgcaggctgtgggtgttttgttatcattttctttttgttgttgttgttgttttatcatttaattcttgaggtacttcrcatsggggagctttggcaacctagtatcgtgtttcaggcattatcayaatgkggaaacaaagtgatacaagaaatgatggtgctcaatagcataaattcaatgaagctgttatccaaccttctcatatgcaggacaggagcgctgtgtcaatgctgcacgttatggtgttagctttgggatgataacaaatcacggagtcggttcctctttgtgtcctccagtgcccttggaggggtcatttggttaaattcctcactatttttgcagctgtggttgtggtttattaactgatgctgcttaaag

SEQ ID NO: 73917 - DNA, 600 bp, Chicken  19866894355661_3
caaagaattcccccatcatgtgaaagcataactgattccaaagccgttctgtgcacgtcgtgttaaacgtggctgctgatgggggtccggcgctgagcctgggatccagagttgatcacttatacaaaatagctgcaaggctggcagtgttgtggcttcccccatggggacagctcgcaggctgtgggtgttttgttatcattttctttttgttgttgttgttgttttatcatttaattcttgaggtacttcrcatsggggagctttggcaacctagtatcgtgtttcaggcattatcayaatgkggaaacaaagtgatacaagaaatgatggtgctcaatagcataaattcaatgaagctgttatccaaccttctcatatgcaggacaggagcgctgtgtcaatgctgcacgttatggtgttagctttgggatgataacaaatcacggagtcggttcctctttgtgtcctccagtgcccttggaggggtcatttggttaaattcctcactatttttgcagctgtggttgtggtttattaactgatgctgcttaaagaggagtctgtgtctgcagcagagttttcattactcatctgtca

SEQ ID NO: 73918 - DNA, 600 bp, Chicken  19866894355661_4
aattcccccatcatgtgaaagcataactgattccaaagccgttctgtgcacgtcgtgttaaacgtggctgctgatgggggtccggcgctgagcctgggatccagagttgatcacttatacaaaatagctgcaaggctggcagtgttgtggcttcccccatggggacagctcgcaggctgtgggtgttttgttatcattttctttttgttgttgttgttgttttatcatttaattcttgaggtacttcrcatsggggagctttggcaacctagtatcgtgtttcaggcattatcayaatgkggaaacaaagtgatacaagaaatgatggtgctcaatagcataaattcaatgaagctgttatccaaccttctcatatgcaggacaggagcgctgtgtcaatgctgcacgttatggtgttagctttgggatgataacaaatcacggagtcggttcctctttgtgtcctccagtgcccttggaggggtcatttggttaaattcctcactatttttgcagctgtggttgtggtttattaactgatgctgcttaaagaggagtctgtgtctgcagcagagttttcattactcatctgtcaatact

SEQ ID NO: 73919 - DNA, 600 bp, Chicken  19866894355661_5
atacaagaaatgatggtgctcaatagcataaattcaatgaagctgttatccaaccttctcatatgcaggacaggagcgctgtgtcaatgctgcacgttatggtgttagctttgggatgataacaaatcacggagtcggttcctctttgtgtcctccagtgcccttggaggggtcatttggttaaattcctcactatttttgcagctgtggttgtggtttattaactgatgctgcttaaagaggagtctgtgtctgcagcagagttttcattactcatctgtcaatacttccagggtaaarcaaatcggtctgggtagagaggctttrctcttctgtgtaaatgctctggcttatttttctccctccccctatttcaccaaaggagaggatatggaatagttgttgatgcagtgtgtgggttatgttgtgctaggtaggaaggcctggccagctttgtccatcaggattattttaagctctgatgtttagattttgttaaatgaaccagaaggaattgaaaacatctctctttcccaaaatatcccaactcatacagctgtaaaatgccctttatcctgaatcataccagaagaattgcca

SEQ ID NO: 73920 - DNA, 600 bp, Chicken  19866894355661_6
ataaattcaatgaagctgttatccaaccttctcatatgcaggacaggagcgctgtgtcaatgctgcacgttatggtgttagctttgggatgataacaaatcacggagtcggttcctctttgtgtcctccagtgcccttggaggggtcatttggttaaattcctcactatttttgcagctgtggttgtggtttattaactgatgctgcttaaagaggagtctgtgtctgcagcagagttttcattactcatctgtcaatacttccagggtaaarcaaatcggtctgggtagagaggctttrctcttctgtgtaaatgctctggcttatttttctccctccccctatttcaccaaaggagaggatatggaatagttgttgatgcagtgtgtgggttatgttgtgctaggtaggaaggcctggccagctttgtccatcaggattattttaagctctgatgtttagattttgttaaatgaaccagaaggaattgaaaacatctctctttcccaaaatatcccaactcatacagctgtaaaatgccctttatcctgaatcataccagaagaattgccagggttactcttttgcgatgggtaaaat

SEQ ID NO: 73921 - DNA, 599 bp, Chicken  19866894355671_1
  misc_feature (1)..(140): n is any nucleotide
nnnnnnnnnnnnnnnnnnnnnnnnnnnnnnnnnnnnnnnnnnnnnnnnnnnnnnnnnnnnnnnnnnnnnnnnnnnnnnnnnnnnnnnnnnnnnnnnnnnnnnnnnnnnnnnnnnnnnnnnnnnnnnnnnnnnnnnnnnnnaatcctattaaagatagattattaattaagttattctttattagtcaagattgctcctttctgaattatcctttgaaatgaaactgtttctcccaggagaagagattcagttggagcttgagttcacgttctgtattttgcagagaagtgggcctccatraagttcctgcacagcagcagtgccagcacatcttcaggccagagtgacacatcagaaagttggtatgtaggaatgagtccttgtcaaatgatgggctgattacaaaatgaaagtacacaatttccccatcacatctatctcagtttcctttattttggaaagaagatggaattgccactccctttattagttgatattttgagcaaagaaaaacagtgatctaagcacagcaccaccattttgcaagagggaccataaatacagtatgactgacactagcaaggtagcgtccaacaact

SEQ ID NO: 73922 - DNA, 600 bp, Chicken  19866894355684_1
gtttgtaaaatgttgtcagccctgcttcctttgagtaaggtcgctctactaaaaatggcttcgtctgtgtagctttaacttaggggcttgatttaagtttctttttcagctgaaataatttcacccatattgtgatgctgtattatttcagaacacccagttctgcttgggaagaatgtaagtctgccttcaacttgtggatacacaagaacatacaccttaatccatgtaggaaaactcctggactgaaatacgtctccatccaagaagactacctgagtatcaacaagtgtgccacayatcagcagtggctgtagaagaccaaacatcttcagagaaactactctgagatcattctgctcctcaactccaccactgaagctgaactgcatccctatttagcaagttttaataatctgcctcggaagaggatggttcctgaaaacagatgtatagctctctttcaatcactctatatatccataaattaattccctttttgttaggttgcatgttatgttaagaagttctttaagctagcttcccaagcaggcttctaactaaccactaagtataggtcacagcagttgtgtcccagtt

SEQ ID NO: 73923 - DNA, 600 bp, Chicken  19866894355686_1
caacttcttttcagcggtctgtggggacaggacaaagggaaacagccataaactggagtatagaaagctctgcaccaacatgtgaaggaacttcttcacagtgagggtgacagggcactgaaaaaggctgcacagggaggctgaggagtctcctccggagatattcaagaccggtctggatgcctacccgtgcagcctgctgcagggagcctgctttgcagggagcttggactcaatgttctctagaggtcccttccaacccctacaatcttgtataaaaaaaaaaaaaaaaaaaaagaygaagtgtgtctgtactttgctctgtatgacttgacaacaaaaaactcccattaactgacaagaattaacggtcattctcttgcatcattttccatcagttttggtgacagttttgtgttcttaacctagaacagcagttggctccattgaactttttcagaagcataatactgctcgtaccagaagaccatcactacattaatattcatggagaaatcctaaaataaaaaggatttcaacaaggtgctaagtcaagtgatctaaaacaatttctgatgagtacactaaaaatgataagac

SEQ ID NO: 73924 - DNA, 600 bp, Chicken  19866894355689_1
cctagccataagaatccctccggtgctcttctctccagtgaaggaaaccccacagaacagggacccagaacgggtctgggaatcccccatcaccacagcaccttcgtgcctctcccccacgcctgccagctgcaggctccctcccataccgtccctccgacgcaggaccatcattcccagtgagatggaaaagttacctgtcaaagccagctggggctgcttgcctttcctccggtgtctgcagcctgcaccttggagacagctggacatcaggggtgaggatgcttggcttcagcagcrggtgatactgcttctcctcctccactgaggaaccttccccagagcaaggagagaaagaagctcttctctgtgcagactcccagaaaaactcaccccttcctgcccactgcagtcccttaagggagacagaggagcagcacaagcagctggagaatggccgcaaacacctctgagctgccagcttacaccagcatccttccccgtggctcggggtgaccctctcctctgtatgcacgcttgctgtgcagcaccggcccggggtctctgggtaaaaacaaatgttctcccccactgccaccc

SEQ ID NO: 73925 - DNA, 600 bp, Chicken  19866894355690_1
aagttacttcagccacctctacactttctttcctccttgccaagcacagatgggaaactttttgataattagatcaaagccatttacattagatcaaagcataaaatgagcatgtacagttgttctgactggccagtagaggtaacagatggtaattaagcaatagtaataaggcagcagtgtgtttacagaggggcattagagtaatgtggggattactgaggagagggctgtgagcacgcctagcacacagcagcagggcttagacatgagggctgcaaattgctccttgtgtctctkcatgttggcaggtacaagtggtgtgagggcacccacagagtggccccaagcagagcatggaagacaagtcaggctagacattatccactatgtcagatttccctagtctattttgttaaaatttctttttaacatatgctgctgaggctggayggacaacttccaagaccaaagtcctcattgctaatatggcacagcatggtcagcagtatattcccatgtcatctcctttaaggtattgctcagatgaggtcgtgagaagaaaggggaagatggttcagccactgcagcctactcaca

SEQ ID NO: 73926 - DNA, 600 bp, Chicken  19866894355690_2
aattaagcaatagtaataaggcagcagtgtgtttacagaggggcattagagtaatgtggggattactgaggagagggctgtgagcacgcctagcacacagcagcagggcttagacatgagggctgcaaattgctccttgtgtctctkcatgttggcaggtacaagtggtgtgagggcacccacagagtggccccaagcagagcatggaagacaagtcaggctagacattatccactatgtcagatttccctagtctattttgttaaaatttctttttaacatatgctgctgaggctggayggacaacttccaagaccaaagtcctcattgctaatatggcacagcatggtcagcagtatattcccatgtcatctcctttaaggtattgctcagatgaggtcgtgagaagaaaggggaagatggttcagccactgcagcctactcacaatttagcgtctttaatgagagaggaatgttgtgcatgtgatgtttgtaatatgaatatatctgtagaagtgttggcagcttttgcaatagccttgtcagttgtgcaagactttttgttaacactctgcctgctggaatcaggaagtggagtag

SEQ ID NO: 73927 - DNA, 599 bp, Chicken  19866894355692_1
  misc_feature (1)..(9): n is any nucleotide
nnnnnnnnncctgcagaagtcgagtgccttgccctgtttctatcatcgggcctcctcttgggttgcctgcttcctacgagacctgggtgagtcaaaaagggctcggggaggtgcagccttggcaggcagctcgtctcatttgagaagttttagttcccagacaggttctgaaagaacaacgccctgaagcaagagattaccagacagcttggctgcatttcatcctgagccacgggggcttcaagcagagctccccgagctctttaccacaatacacactgctcctccagcagcaagcasagaaagcagaagctgtcgcggtgcattaactggtagaaagaatatgcttagatatgcctgacatcccacttgcagagtccaatgtcatccttcgaaccacttcctcctcgtcagcagcttcctgtgtgatttcckgccttgttgtgtaagggcagcgcaaatgaaaggattcctcgtttacagaaagccattttctgtcctcagcagcttctccttcaactctacttacaaaatcccttttaaaagcagtttcctaacaggttggttaacataggaacataaaacctcactgtttctgt

SEQ ID NO: 73928 - DNA, 600 bp, Chicken  19866894355692_2
tcatttgagaagttttagttcccagacaggttctgaaagaacaacgccctgaagcaagagattaccagacagcttggctgcatttcatcctgagccacgggggcttcaagcagagctccccgagctctttaccacaatacacactgctcctccagcagcaagcasagaaagcagaagctgtcgcggtgcattaactggtagaaagaatatgcttagatatgcctgacatcccacttgcagagtccaatgtcatccttcgaaccacttcctcctcgtcagcagcttcctgtgtgatttcckgccttgttgtgtaagggcagcgcaaatgaaaggattcctcgtttacagaaagccattttctgtcctcagcagcttctccttcaactctacttacaaaatcccttttaaaagcagtttcctaacaggttggttaacataggaacataaaacctcactgtttctgttacaaaaggtgttgtctgagaaagagtacagcagggcttctattgcacacacatgagttagtttttcacttaaatcactcggggatcttaatagctacaaatgtctcgggctttatttcctgaagaaattaatttc

SEQ ID NO: 73929 - DNA, 600 bp, Chicken  19866894355698_1
agcagctctgcttcctagtcaagcgtgcagatattcagtaataataagcacgcattattcagtgataaagtaaacagaagttgtgataacatttcctcacctcagacccaaccgtgcctctgggttaaaacaagtgtgcagtttttttaatcatcagaatcatgatttcttctctgtgtgggcagctctgctgcaccaggacaatatgaactggacaattctgggctcaggtgcaaaggcattgccaggaggattgcagcagtccacatcaagccgtagttgcaagggaaacaaatacgrtcttcagagagtcggaggcctttcctctgacaagcacaaaggagaacraccttagaaaacccaaacatttcaggatgtggcatctaagaccagcatgagagatattcaacagaaatgtgaggcttgattgactgttgcacgtgcttaaaactaacctacagaaataactaattgggcttttctacttggacagcaaccaacaagaaaatgccactttctggggcctccaagggtcagtgcgtatacacacacatctccataccaactttttatctgtgccataggcatctgtttaaatag

SEQ ID NO: 73930 - DNA, 600 bp, Chicken  19866894355698_2
cacgcattattcagtgataaagtaaacagaagttgtgataacatttcctcacctcagacccaaccgtgcctctgggttaaaacaagtgtgcagtttttttaatcatcagaatcatgatttcttctctgtgtgggcagctctgctgcaccaggacaatatgaactggacaattctgggctcaggtgcaaaggcattgccaggaggattgcagcagtccacatcaagccgtagttgcaagggaaacaaatacgrtcttcagagagtcggaggcctttcctctgacaagcacaaaggagaacraccttagaaaacccaaacatttcaggatgtggcatctaagaccagcatgagagatattcaacagaaatgtgaggcttgattgactgttgcacgtgcttaaaactaacctacagaaataactaattgggcttttctacttggacagcaaccaacaagaaaatgccactttctggggcctccaagggtcagtgcgtatacacacacatctccataccaactttttatctgtgccataggcatctgtttaaatagctctgtttgagatggggtgcgatgacccgcgcggtcagcccagccggt

SEQ ID NO: 73931 - DNA, 600 bp, Chicken  19866894355704_1
caggctctgtgtgctcactgctttgtcccaaatgcacataaaccagcacagcccacgcagacctgcacctcagctcatgtcacatacaagccccagttccagctacctctcatttcagccctgcagggtttaaaacttcagtgatgactaaatcccactgcttgtactgggggcaggctacatcgcctagtcggagagaaagataatgtgacctggagatctcccagccacctcccacctcatggtgccacctggctttatcccatctctgtcctagaaaacaactgctctatctgtgcwgactcctccttgtttcccaccaccacagtggctgacctctagggaatgctgggctatggggcttaaaaatctcttggggagtcagagattcagtgtggggctgtggggaaggagttgggcagccagcagaatgagtagccttcagactctcggtgactgagggagagaatgctgtgggatttacaaaaagcatccacagtggtgctctccaagagggttttgtgtcaccagtgtgtgggtaggggacagcatgctgccgcccctgccctttcactgatttttatcccagtccccactgga

SEQ ID NO: 73932 - DNA, 599 bp, Chicken  19866894355714_1
  misc_feature (1)..(249): n is any nucleotide
nnnnnnnnnnnnnnnnnnnnnnnnnnnnnnnnnnnnnnnnnnnnnnnnnnnnnnnnnnnnnnnnnnnnnnnnnnnnnnnnnnnnnnnnnnnnnnnnnnnnnnnnnnnnnnnnnnnnnnnnnnnnnnnnnnnnnnnnnnnnnnnnnnnnnnnnnnnnnnnnnnnnnnnnnnnnnnnnnnnnnnnnnnnnnnnnnnnnnnnnnnnnnnnnnnnnnnnnnnnnnnnnnnnnnnnnnnnnnnnnnnnnnnnnncaaattactgatttcgccacattagaattcctgcagctgcagctccctcaytgaacccaaacattttggatctgaaagcactcgaacacaaagaaaccttagttgctctcagaaggtggtctacgttggagtatttaagagraaaaaaaagctgttttcaaatagaacgttcatgttgtgtcctaaatagttgtgaggctttacaagaagcactccagcactcccactcatgtccaactgcacacggaggatgcactttttttagcgtgtgtgactccaagcacagcagcatttcaacccccagagcataaataatccatcccgtacagattctcctacacacaccttcc

SEQ ID NO: 73933 - DNA, 599 bp, Chicken  19866894355714_2
  misc_feature (1)..(158): n is any nucleotide
nnnnnnnnnnnnnnnnnnnnnnnnnnnnnnnnnnnnnnnnnnnnnnnnnnnnnnnnnnnnnnnnnnnnnnnnnnnnnnnnnnnnnnnnnnnnnnnnnnnnnnnnnnnnnnnnnnnnnnnnnnnnnnnnnnnnnnnnnnnnnnnnnnnnnnnnnnnnnncaaattactgatttcgccacattagaattcctgcagctgcagctccctcaytgaacccaaacattttggatctgaaagcactcgaacacaaagaaaccttagttgctctcagaaggtggtctacgttggagtatttaagagraaaaaaaagctgttttcaaatagaacgttcatgttgtgtcctaaatagttgtgaggctttacaagaagcactccagcactcccactcatgtccaactgcacacggaggatgcactttttttagcgtgtgtgactccaagcacagcagcatttcaacccccagagcataaataatccatcccgtacagattctcctacacacaccttccagatctggatgccacgtactcagctcctgtctcaagcccactctctgctacaaaattaccccttcacaatctctgtgacaaaggggaatcc

SEQ ID NO: 73934 - DNA, 600 bp, Chicken  19866894355717_1
cctagcctctcttcaaagaagtaactaagtgttccagaagagaatggcttgtgccttggagagaggctgcagagcgagcactgaaaggagaaataaaaatgcagcatttcgcagccccagattgtttaaaactcaacacaatgtgaagcacagaccgctgcatctccaggagcgtgagcgcaaagcagggactgactgaggatcccgtgtgctgtacagctttggtgtgaacagcgcggcctggctccacagtgaagcacgtcttgccagagacgcagcccgaacggaatatgggaaagracaaggatgtctgtgagagggcagaaagatgtgtgagtacccggtgatggtaggcaggcactgcacactttgtcaggggatggagcttttcrgctggagagatgatgatgcacaccagcagtctccggagcactgggagtgctcagggaattacagagggagggagtcatctcagtgcacgaggaatgcagcaaaacctcctctgactaagccagctaatgcacgttgctttttttttttttcctttcctgataatccagttccataatatttccttaataatttaatacatgaagagta

SEQ ID NO: 73935 - DNA, 600 bp, Chicken  19866894355717_2
ataaaaatgcagcatttcgcagccccagattgtttaaaactcaacacaatgtgaagcacagaccgctgcatctccaggagcgtgagcgcaaagcagggactgactgaggatcccgtgtgctgtacagctttggtgtgaacagcgcggcctggctccacagtgaagcacgtcttgccagagacgcagcccgaacggaatatgggaaagracaaggatgtctgtgagagggcagaaagatgtgtgagtacccggtgatggtaggcaggcactgcacactttgtcaggggatggagcttttcrgctggagagatgatgatgcacaccagcagtctccggagcactgggagtgctcagggaattacagagggagggagtcatctcagtgcacgaggaatgcagcaaaacctcctctgactaagccagctaatgcacgttgctttttttttttttcctttcctgataatccagttccataatatttccttaataatttaatacatgaagagtagcagcccttctgcaaagcgttcaaatcgtgaagtctcactttcagactaacccttgcccctcttgtccttgaaatgctctggggatttgtac

SEQ ID NO: 73936 - DNA, 600 bp, Chicken  19866894355721_1
ggagaccctatgttgtttttgccacagagtatagaacagctctgagctgcttaaatgaagagtcagatctcagcagaaagttttttgtcaagcaagaaagagtaaggcaggaaagccatagtaaagaggttttccaggtcagataaatggatattattttgtttagactagttctagaaagacaaatttttcagtcttcgtgactttgcaacagagaaaagaggtatgtgtggaaatgcaatgctgctttaatacatcattctcaactctatggtcatattaactactgtaaaatagatyagctgataatgacgataagctgataagtcttgctggacttgtccatctcagttgagatagtagtccttctgctcccctgaaactgaagactttcttatacagtccccctgttgttcacacattcctccagcaaatattaacttaatgtctcaaaatgttctctttgtttcagtgcttttgaaacttcagaacaagaaggcctactcagtgggcttatctttggccatgattatgaatcagcttactcccttgcctgtaccttatacacagcaacaaatacaagaagataaacttggtctc

SEQ ID NO: 73937 - DNA, 599 bp, Chicken  19866894355722_1
  misc_feature (1)..(33): n is any nucleotide
nnnnnnnnnnnnnnnnnnnnnnnnnnnnnnnnntatcaacagttgtcatgaaaatgcagaatgaagaagtgtgcagaaaacactaattaaagtggaaccaatctgctgaaagctcccttgtccggcttggctgctcccagctcggcattccatgctgtaatgggagccgagcagcagcatccttgggctgagagtttgggaaataatttgtttctgcttcagacacccaaaggtgcaggtcagaaagtgcctcctacgtggatccaactgctgggttatgggcaggagcctcacactgcragattccataaatcctcctgctgctaaaacacttgtttcgcatcaagcagccatgaaacagttaatcccaattagctcaaaacagcagatatcattctttatattttggcagttctcgttttgaaggaaaaaatatttttgtgttcttggagtcaggctgaacaataaaatcagatgccaattttctggtctaaattaggtgaaagaccagactttttatcatatgtgtgtctgtgtgtgctgttccgttgtgtgtttattttccttctccctgtatttactgctgagatcgagggctg

SEQ ID NO: 73938 - DNA, 600 bp, Chicken  19866894355732_1
ttaacaattttgaacttcactaaaaatctcatttctgttccatgtgaagtaacaaggtgtgattagatttaatgtcaaggatacattaaaaggtaacatttctccacatctgattttctgaaagggctatggaataaattagatcttatcagatcacttgcatttgccaaaatctctctcattttgcgtttaaaatatataatggatgcatgaatgaatggaacattctattgctcctgtccaccttctatgataattaaaaaatcctgttagctcagacaatcttcaaaatgctgctgyaaatgaaaaaggaataacastccatgtccctggtgtataagacaaaaatttccttgcagcaaggaaaattcagctatgaggaaatatttccagtagaaaggattatgaagtcctggaataaactgccagcatgtctccaacacgtgtaatctttaagatcactaaaatcagcctagaaaaacactcaccaagcctaacccagatatagcttgtaaaatgttgacctccctaccaatcctatgatgctgtcattcttagtaagaatttacaccagtgtttctaacagagctgtccatcrga

SEQ ID NO: 73939 - DNA, 600 bp, Chicken  19866894355732_2
taaaaatctcatttctgttccatgtgaagtaacaaggtgtgattagatttaatgtcaaggatacattaaaaggtaacatttctccacatctgattttctgaaagggctatggaataaattagatcttatcagatcacttgcatttgccaaaatctctctcattttgcgtttaaaatatataatggatgcatgaatgaatggaacattctattgctcctgtccaccttctatgataattaaaaaatcctgttagctcagacaatcttcaaaatgctgctgyaaatgaaaaaggaataacastccatgtccctggtgtataagacaaaaatttccttgcagcaaggaaaattcagctatgaggaaatatttccagtagaaaggattatgaagtcctggaataaactgccagcatgtctccaacacgtgtaatctttaagatcactaaaatcagcctagaaaaacactcaccaagcctaacccagatatagcttgtaaaatgttgacctccctaccaatcctatgatgctgtcattcttagtaagaatttacaccagtgtttctaacagagctgtccatcrgatataattagcagtctatgat

SEQ ID NO: 73940 - DNA, 600 bp, Chicken  19866894355732_3
gyaaatgaaaaaggaataacastccatgtccctggtgtataagacaaaaatttccttgcagcaaggaaaattcagctatgaggaaatatttccagtagaaaggattatgaagtcctggaataaactgccagcatgtctccaacacgtgtaatctttaagatcactaaaatcagcctagaaaaacactcaccaagcctaacccagatatagcttgtaaaatgttgacctccctaccaatcctatgatgctgtcattcttagtaagaatttacaccagtgtttctaacagagctgtccatcrgatataattagcagtctatgatttccaaaataaaattacattggtaaatctctaatctaatctattctaaatgaaggatcattatattttgatacatgtgtctataacaaagaaactagtgaatatctttatttgtgattattatattttaaaagatacctatgtattatcctcattgtttgagagaaaaagagggattaccaaaagtataaattacataccwccaagcacaaaggaaattgaataaagagcagaagagaacccagatctattacagtcagactgaaactcaaactatac

SEQ ID NO: 73941 - DNA, 600 bp, Chicken  19866894355732_4
gacctccctaccaatcctatgatgctgtcattcttagtaagaatttacaccagtgtttctaacagagctgtccatcrgatataattagcagtctatgatttccaaaataaaattacattggtaaatctctaatctaatctattctaaatgaaggatcattatattttgatacatgtgtctataacaaagaaactagtgaatatctttatttgtgattattatattttaaaagatacctatgtattatcctcattgtttgagagaaaaagagggattaccaaaagtataaattacataccwccaagcacaaaggaaattgaataaagagcagaagagaacccagatctattacagtcagactgaaactcaaactatacttttattcttgggcacattaacatatccctaacaaatagagttgatcaaaatgcagaagtgtcaatggactttgactctgtctgaaatgaaacgtactagttttaacataaaataacattgctgaagaaaagtgaaaccaaactgatgtctctgatctctctttattttgttccattaaaatgaaaatcatttccttgcccaaaagaattacataggcatacc

SEQ ID NO: 73942 - DNA, 600 bp, Chicken  19866894355735_1
aaaaacaggaggagttctgatatgaacgtctctgtgacaggcctcggcatagacaaaactatggagttttaagtgagggttgaatccaaattctaaacatattcttacaatacttttcaaattggaaaatgacctaaaatgcatacagcctcagaaaattatgatcttcagtttagttaatagtacaagcctgaaagcaggctattaaatgagaagttttgtctgcctacccactctttctgcccaaattctgactcaccttttgatagttggatcctgaaataggcaatgagcagcagkaggagtaaagtcacaggcatgaagatccagccaaagataaagtatccaggcagctcccttgcaaacaccgaaattatgtaaattatgctcatttcttctgccgcagcctggctgaataagttccttcagatccctaactgtagaacctatttatcctgctttcttcggtttttttctgtatccacattctgccctttgctcagaccattatcactttttggactttggtttgtttgcacaggcctgtgattcctaataggactggagttcacttgcaaaattactcagccatggagttta

SEQ ID NO: 73943 - DNA, 600 bp, Chicken  19866894355735_2
ggcatgaagatccagccaaagataaagtatccaggcagctcccttgcaaacaccgaaattatgtaaattatgctcatttcttctgccgcagcctggctgaataagttccttcagatccctaactgtagaacctatttatcctgctttcttcggtttttttctgtatccacattctgccctttgctcagaccattatcactttttggactttggtttgtttgcacaggcctgtgattcctaataggactggagttcacttgcaaaattactcagccatggagtttaaaagtgcttcttaawgtagtgctgggcttcaaaacctttacatatgttggrtttagctcagtatgtaaagctgcttccttttgagtgacatagactatcatctgctaattctgtacaggtcattctgaataataataatcttctttccagatacattattgattttacaataaacctaaattactcaatcaaagtgagaaccctgcaacacaaacaggtcaaaccacatgggcgtacatgtagtcactgctctgaagagttttcaaaccactgaggcaggcacaagttcagagaatggatattgcagcagcagaa

SEQ ID NO: 73944 - DNA, 581 bp, Chicken  19866894355735_3
agctcccttgcaaacaccgaaattatgtaaattatgctcatttcttctgccgcagcctggctgaataagttccttcagatccctaactgtagaacctatttatcctgctttcttcggtttttttctgtatccacattctgccctttgctcagaccattatcactttttggactttggtttgtttgcacaggcctgtgattcctaataggactggagttcacttgcaaaattactcagccatggagtttaaaagtgcttcttaawgtagtgctgggcttcaaaacctttacatatgttggrtttagctcagtatgtaaagctgcttccttttgagtgacatagactatcatctgctaattctgtacaggtcattctgaataataataatcttctttccagatacattattgattttacaataaacctaaattactcaatcaaagtgagaaccctgcaacacaaacaggtcaaaccacatgggcgtacatgtagtcactgctctgaagagttttcaaaccactgaggcaggcacaagttcagagaatggatattgcagcagcagaatttcttccaaagtgcag

SEQ ID NO: 73945 - DNA, 600 bp, Chicken  19866894355737_1
tgcctgctcttcctgcatgcctggtggcactactccctgctcccccgcatcctgtttcctgctggaatggggaggtaaaataagccagccccagccctggcagtcagggaagtttaacgcaggacatgccttaaacttgctgacacaggcaagaatcgagctgcccaaatgtcccaatgaaaccagttgggaagacaaatccaaaggcgatgacggttttgctgggcttcaccggcagccacgtgttctgctctaaagcaagaatcctgctcttgtaaccaatgggttttctttgcaaaygtggagagcagttgtttgtcatagactctttttttctccctcaaatgtaagagttttggtctctgcatttcccccatcatccactgcctgaggtcccatggaagcacaggacttcagcctgaggaagtcctgagccagaggatgggagtgggcacagcaacaggaggaggaacgcaggcttacaacatgaccccgagatgcaggagaggtattgcacggcccctcctcctcatcacagaacagtaagaggaactgcagcagcaaggaatagcaaatctagacagagacacgaggaggaaa

SEQ ID NO: 73946 - DNA, 600 bp, Chicken  19866894355737_2
gaatacagctccagatccaaaagaagaatcggaacttgcaggagggaaggcaggagcagtgccagccacccagccctgagcctcagccctggcacagcacttctccacccaccagcgtgacgtagggccgttctcactctatttctggtactgaagagtcaacacaaagtttcaattctgagtttcaccgcttccgtacctccctgaatggggaccttgctctggcaacctgttcttaaggcataaaggcttttcccttccaccctcactgcctcaggtccatccaactccttctgcacrcygagaacacctcaatcacaaactggccgaccaaaggctcaactgaaggcacaactgaagtagcaggaaacaaagcaggagcttgccaaggctcacagctcacatttacacttgtgctgttcaccacttcactggaaaatgcccccataaggttccaaattacgaagtgttcattatggctgcatcggtgcgaggcggtgtttaaactccaggggggatgttggcatcgaggggagcagaaagccatggtgaacaaggtgggtgccaggggcaggagggacacccaaccacctccttcca

SEQ ID NO: 73947 - DNA, 600 bp, Chicken  19866894355737_3
atacagctccagatccaaaagaagaatcggaacttgcaggagggaaggcaggagcagtgccagccacccagccctgagcctcagccctggcacagcacttctccacccaccagcgtgacgtagggccgttctcactctatttctggtactgaagagtcaacacaaagtttcaattctgagtttcaccgcttccgtacctccctgaatggggaccttgctctggcaacctgttcttaaggcataaaggcttttcccttccaccctcactgcctcaggtccatccaactccttctgcacrcygagaacacctcaatcacaaactggccgaccaaaggctcaactgaaggcacaactgaagtagcaggaaacaaagcaggagcttgccaaggctcacagctcacatttacacttgtgctgttcaccacttcactggaaaatgcccccataaggttccaaattacgaagtgttcattatggctgcatcggtgcgaggcggtgtttaaactccaggggggatgttggcatcgaggggagcagaaagccatggtgaacaaggtgggtgccaggggcaggagggacacccaaccacctccttccagg

SEQ ID NO: 73948 - DNA, 600 bp, Chicken  19866894355748_1
aacatcaggctggtgaatgctttccatctgtttggcaataatgtttagttaacaatagtctttaaaagaagcaccttcaacttcagttcttaaagttatttatagggccattcttaacacaccagcactcttgctaacaagagctttagccacttggaaattattagccacacagctgcataggaaaaggaatggcagcatttaacatctgtatctctccagatttacaagcatcaacctcatttaaagtcatatcttaatgaacagttctgtggtctgtattaatattatagttgcacrcacaaagatcataaggagccaaacatttttttaataccaacagtaggcctatcagtaatgaagctgtcagcataaaggacagaataatagcttctttaaccctcagacaggattcattcatttgtagagtagaagacaccaatttaaaaactgctcatgggtttgctcacctttataaaggcaaaaatctaatttggtactaatttgatacaattgtctttccaataaaagtctcctaaagccatcctttatttcatgataaaacaactgctataactaaaactgtcatgaaataattac

SEQ ID NO: 73949 - DNA, 599 bp, Chicken  19866894355759_1
  misc_feature (1)..(20): n is any nucleotide
nnnnnnnnnnnnnnnnnnnncaagtaaagaatgctacctatcttactgtttgtttacaaggataacccatgtgcaaaagcatggaaaatttctgtgctaccaggtgcacatcactgaatttttctgaaaactattacctttgaaattgacattgaaagacaaatgaccagaaacgtatagcaagaaggaaggatacaactcactcccttctaaaaagcttaaatgtgaaaggaaaatacaacaaaagtttacttatgtaacaaaaccaaataaacgctgccattaagtacaggaagcagstcagttagtaaaagaacctaagcctgtcrgagcagatctgaacttgcaggttttttgaccaagatctcctgaccctcacattatgtatcaattgcagaagctccataaggaagaggygaatgcagacaggacacctaaccttggtccaaggcataaaaggagaaataaaatctcaaaaccaatctcgaagtacttgagagaactgcgataaaatctttcttaaaacgttttccaaatcttccacatgggatatccacatcttaaaacagagygttgtgaacctctgataaatgaggctg

SEQ ID NO: 73950 - DNA, 600 bp, Chicken  19866894355759_2
aatgctacctatcttactgtttgtttacaaggataacccatgtgcaaaagcatggaaaatttctgtgctaccaggtgcacatcactgaatttttctgaaaactattacctttgaaattgacattgaaagacaaatgaccagaaacgtatagcaagaaggaaggatacaactcactcccttctaaaaagcttaaatgtgaaaggaaaatacaacaaaagtttacttatgtaacaaaaccaaataaacgctgccattaagtacaggaagcagstcagttagtaaaagaacctaagcctgtcrgagcagatctgaacttgcaggttttttgaccaagatctcctgaccctcacattatgtatcaattgcagaagctccataaggaagaggygaatgcagacaggacacctaaccttggtccaaggcataaaaggagaaataaaatctcaaaaccaatctcgaagtacttgagagaactgcgataaaatctttcttaaaacgttttccaaatcttccacatgggatatccacatcttaaaacagagygttgtgaacctctgataaatgaggctgtctgtaaaccaaaatttagtcaacagaaac

SEQ ID NO: 73951 - DNA, 600 bp, Chicken  19866894355759_3
atttttctgaaaactattacctttgaaattgacattgaaagacaaatgaccagaaacgtatagcaagaaggaaggatacaactcactcccttctaaaaagcttaaatgtgaaaggaaaatacaacaaaagtttacttatgtaacaaaaccaaataaacgctgccattaagtacaggaagcagstcagttagtaaaagaacctaagcctgtcrgagcagatctgaacttgcaggttttttgaccaagatctcctgaccctcacattatgtatcaattgcagaagctccataaggaagaggygaatgcagacaggacacctaaccttggtccaaggcataaaaggagaaataaaatctcaaaaccaatctcgaagtacttgagagaactgcgataaaatctttcttaaaacgttttccaaatcttccacatgggatatccacatcttaaaacagagygttgtgaacctctgataaatgaggctgtctgtaaaccaaaatttagtcaacagaaactaacaagaactatgtccagcargtctccactgatgaattctcttcaaatwagttcaccaaaagtctcatagtcaagtgccctttatga

SEQ ID NO: 73952 - DNA, 600 bp, Chicken  19866894355759_4
aacgctgccattaagtacaggaagcagstcagttagtaaaagaacctaagcctgtcrgagcagatctgaacttgcaggttttttgaccaagatctcctgaccctcacattatgtatcaattgcagaagctccataaggaagaggygaatgcagacaggacacctaaccttggtccaaggcataaaaggagaaataaaatctcaaaaccaatctcgaagtacttgagagaactgcgataaaatctttcttaaaacgttttccaaatcttccacatgggatatccacatcttaaaacagagygttgtgaacctctgataaatgaggctgtctgtaaaccaaaatttagtcaacagaaactaacaagaactatgtccagcargtctccactgatgaattctcttcaaatwagttcaccaaaagtctcatagtcaagtgccctttatgaggaaacagtccaatgcaagtgctgaaaaacaacatggggacctcaattacatgtccagccacacacccttcctattaktacttaaagaggatccacaagaaaactggagagggaatttctatcagagacagtacaragaggataaagcgtaatga

SEQ ID NO: 73953 - DNA, 570 bp, Chicken  19866894355759_5
tttttgaccaagatctcctgaccctcacattatgtatcaattgcagaagctccataaggaagaggygaatgcagacaggacacctaaccttggtccaaggcataaaaggagaaataaaatctcaaaaccaatctcgaagtacttgagagaactgcgataaaatctttcttaaaacgttttccaaatcttccacatgggatatccacatcttaaaacagagygttgtgaacctctgataaatgaggctgtctgtaaaccaaaatttagtcaacagaaactaacaagaactatgtccagcargtctccactgatgaattctcttcaaatwagttcaccaaaagtctcatagtcaagtgccctttatgaggaaacagtccaatgcaagtgctgaaaaacaacatggggacctcaattacatgtccagccacacacccttcctattaktacttaaagaggatccacaagaaaactggagagggaatttctatcagagacagtacaragaggataaagcgtaatgactttaaaagacagatttagattagatatttggaataaatcctttactca

SEQ ID NO: 73954 - DNA, 542 bp, Chicken  19866894355759_6
attatgtatcaattgcagaagctccataaggaagaggygaatgcagacaggacacctaaccttggtccaaggcataaaaggagaaataaaatctcaaaaccaatctcgaagtacttgagagaactgcgataaaatctttcttaaaacgttttccaaatcttccacatgggatatccacatcttaaaacagagygttgtgaacctctgataaatgaggctgtctgtaaaccaaaatttagtcaacagaaactaacaagaactatgtccagcargtctccactgatgaattctcttcaaatwagttcaccaaaagtctcatagtcaagtgccctttatgaggaaacagtccaatgcaagtgctgaaaaacaacatggggacctcaattacatgtccagccacacacccttcctattaktacttaaagaggatccacaagaaaactggagagggaatttctatcagagacagtacaragaggataaagcgtaatgactttaaaagacagatttagattagatatttggaataaatcctttactca

SEQ ID NO: 73955 - DNA, 426 bp, Chicken  19866894355759_7
gagagaactgcgataaaatctttcttaaaacgttttccaaatcttccacatgggatatccacatcttaaaacagagygttgtgaacctctgataaatgaggctgtctgtaaaccaaaatttagtcaacagaaactaacaagaactatgtccagcargtctccactgatgaattctcttcaaatwagttcaccaaaagtctcatagtcaagtgccctttatgaggaaacagtccaatgcaagtgctgaaaaacaacatggggacctcaattacatgtccagccacacacccttcctattaktacttaaagaggatccacaagaaaactggagagggaatttctatcagagacagtacaragaggataaagcgtaatgactttaaaagacagatttagattagatatttggaataaatcctttactca

SEQ ID NO: 73956 - DNA, 368 bp, Chicken  19866894355759_8
ccacatcttaaaacagagygttgtgaacctctgataaatgaggctgtctgtaaaccaaaatttagtcaacagaaactaacaagaactatgtccagcargtctccactgatgaattctcttcaaatwagttcaccaaaagtctcatagtcaagtgccctttatgaggaaacagtccaatgcaagtgctgaaaaacaacatggggacctcaattacatgtccagccacacacccttcctattaktacttaaagaggatccacaagaaaactggagagggaatttctatcagagacagtacaragaggataaagcgtaatgactttaaaagacagatttagattagatatttggaataaatcctttactca

SEQ ID NO: 73957 - DNA, 600 bp, Chicken  19866894355762_1
taatacataaaaattccaaaaataagaatgcaatttgaaaaagatttaaagagaaaatgcccactagaagaatttatatggacaaaacatttatacagaaagaagtaccataagaaaaaaaacaattgtagccagagtccatattaaaatgttaaatgattacgcgtgtattggcctggtcaaatttgcagctaactgctagaaacttgacttgctgaaaagaaaatgtacagaacagaggaagaccaatgatctcttggccagacaaaggtaacagagctagtttcagctgacttctcwctattgtacccatatttagagagcagtccccttcaaccaaaaatgtgttaaaatttccttctggatttagggcacgagaaagaacagacactagcatttgtgtttactctgttgagttttaaactgttgagatttagctggagttgccaacgatgtgccaactacttggcgtgctgcccaatttgccagctctacttcaaggtctacaaaacttatttttctttcttggggtctgcattgtagcctcacagctgtgagttttaaccttatgaaccctagactgaggagaatttatctgct

SEQ ID NO: 73958 - DNA, 599 bp, Chicken  19866894355765_1
  misc_feature (1)..(133): n is any nucleotide
nnnnnnnnnnnnnnnnnnnnnnnnnnnnnnnnnnnnnnnnnnnnnnnnnnnnnnnnnnnnnnnnnnnnnnnnnnnnnnnnnnnnnnnnnnnnnnnnnnnnnnnnnnnnnnnnnnnnnnnnnnnnnnnnnnnnncacgtaatgcaccagaaacatatggaatcattgattattctctcagtttctccagaccagaagggaaatttggtccccttgcaagggcccacaggagctgtaagaggccatcagacttagcagcatggaaacaagcaggcacaacacaagaatacagtctcacccayagtgctgrtaccaaggagacggtaccccagccctagtacagcagtcagagagccctccacttggcacaataygagattcctgccaagcacaatgcccacacagyaacacctctgcctctttcatcaccaatctcctgcaccgtagctcagcggccaactacagatctaggcacgacagctgctcatgagccaaacactagcactcagaaccacatccacagggcatcttagcaccatagtctccctccttccatcggtcctcccagctcagccttggtacacgagcgacccatctccta

SEQ ID NO: 73959 - DNA, 599 bp, Chicken  19866894355765_2
  misc_feature (1)..(125): n is any nucleotide
nnnnnnnnnnnnnnnnnnnnnnnnnnnnnnnnnnnnnnnnnnnnnnnnnnnnnnnnnnnnnnnnnnnnnnnnnnnnnnnnnnnnnnnnnnnnnnnnnnnnnnnnnnnnnnnnnnnnnnnnnnnnncacgtaatgcaccagaaacatatggaatcattgattattctctcagtttctccagaccagaagggaaatttggtccccttgcaagggcccacaggagctgtaagaggccatcagacttagcagcatggaaacaagcaggcacaacacaagaatacagtctcacccayagtgctgrtaccaaggagacggtaccccagccctagtacagcagtcagagagccctccacttggcacaataygagattcctgccaagcacaatgcccacacagyaacacctctgcctctttcatcaccaatctcctgcaccgtagctcagcggccaactacagatctaggcacgacagctgctcatgagccaaacactagcactcagaaccacatccacagggcatcttagcaccatagtctccctccttccatcggtcctcccagctcagccttggtacacgagcgacccatctcctacgtgttca

SEQ ID NO: 73960 - DNA, 599 bp, Chicken  19866894355765_3
  misc_feature (1)..(61): n is any nucleotide
nnnnnnnnnnnnnnnnnnnnnnnnnnnnnnnnnnnnnnnnnnnnnnnnnnnnnnnnnnnnncacgtaatgcaccagaaacatatggaatcattgattattctctcagtttctccagaccagaagggaaatttggtccccttgcaagggcccacaggagctgtaagaggccatcagacttagcagcatggaaacaagcaggcacaacacaagaatacagtctcacccayagtgctgrtaccaaggagacggtaccccagccctagtacagcagtcagagagccctccacttggcacaataygagattcctgccaagcacaatgcccacacagyaacacctctgcctctttcatcaccaatctcctgcaccgtagctcagcggccaactacagatctaggcacgacagctgctcatgagccaaacactagcactcagaaccacatccacagggcatcttagcaccatagtctccctccttccatcggtcctcccagctcagccttggtacacgagcgacccatctcctacgtgttcacaagctgtggagcaaagcctgggtcaggggaccgagaactgcacctgccagcacgctgctcaca

SEQ ID NO: 73961 - DNA, 599 bp, Chicken  19866894355765_4
  misc_feature (1)..(35): n is any nucleotide
nnnnnnnnnnnnnnnnnnnnnnnnnnnnnnnnnnncacgtaatgcaccagaaacatatggaatcattgattattctctcagtttctccagaccagaagggaaatttggtccccttgcaagggcccacaggagctgtaagaggccatcagacttagcagcatggaaacaagcaggcacaacacaagaatacagtctcacccayagtgctgrtaccaaggagacggtaccccagccctagtacagcagtcagagagccctccacttggcacaataygagattcctgccaagcacaatgcccycacagyaacacctctgcctctttcatcaccaatctcctgcaccgtagctcagcggccaactacagatctaggcacgacagctgctcatgagccaaacactagcactcagaaccacatccacagggcatcttagcaccatagtctccctccttccatcggtcctcccagctcagccttggtacacgagcgacccatctcctacgtgttcacaagctgtggagcaaagcctgggtcaggggaccgagaactgcacctgccagcacgctgctcacaccaagacctgtcctcctgtctctccc

SEQ ID NO: 73962 - DNA, 599 bp, Chicken  19866894355765_5; identical to SEQ ID NO: 73961
  misc_feature (1)..(35): n is any nucleotide

SEQ ID NO: 73963 - DNA, 599 bp, Chicken  19866894355765_6
  misc_feature (1)..(29): n is any nucleotide
nnnnnnnnnnnnnnnnnnnnnnnnnnnnncacgtaatgcaccagaaacatatggaatcattgattattctctcagtttctccagaccagaagggaaatttggtccccttgcaagggcccacaggagctgtaagaggccatcagacttagcagcatggaaacaagcaggcacaacacaagaatacagtctcacccayagtgctgrtaccaaggagacggtaccccagccctagtacagcagtcagagagccctccacttggcacaataygagattcctgccaagcacaatgcccacacagyaacacctctgcctctttcatcaccaatctcctgcaccgtagctcagcggccaactacagatctaggcacgacagctgctcatgagccaaacactagcactcagaaccacatccacagggcatcttagcaccatagtctccctccttccatcggtcctcccagctcagccttggtacacgagcgacccatctcctacgtgttcacaagctgtggagcaaagcctgggtcaggggaccgagaactgcacctgccagcacgctgctcacaccaagacctgtcctcctgtctctcccagagcc

SEQ ID NO: 73964 - DNA, 600 bp, Chicken  19866894355765_7
caatctcctgcaccgtagctcagcggccaactacagatctaggcacgacagctgctcatgagccaaacactagcactcagaaccacatccacagggcatcttagcaccatagtctccctccttccatcggtcctcccagctcagccttggtacacgagcgacccatctcctacgtgttcacaagctgtggagcaaagcctgggtcaggggaccgagaactgcacctgccagcacgctgctcacaccaagacctgtcctcctgtctctcccagagccacagccacgctgctctgcctcccygtgcactcacctgtgtgctggggtcagctccctgagcaaggacagggcccctgcgggagcctccattccccccaagtctaaaacgaacagagcagaagcaagtgctgacctgtcagcgacacgatctgccctccagctctggcagggaagtggaagaccgtgtgctgtgcctgatgtagctgtccagctgtacccgcgaccgcctggccctgctggctggaaagagccagcgagtgcggctgtaaatgagggagagaaatggcaggggtccccagagacagggaagcacctgccaaaagg

SEQ ID NO: 73965 - DNA, 600 bp, Chicken  19866894355765_8
ctggggaaggagaaagggtgacagctcaggctctgcgggctgtgcccccgtgccgccaaggaagggttaaggcgggcacacttgcagccctcccgcagcacggcgggcccagcgctcccacgtgctgcgccttgttcccggcttgtcagcctgccagcagccaggaattcacagctccgcgaacagctaaaaaagggaaggcagcccattttagacaggggggagccaatcctgggcactcggccctgccccagggcccgtcgagggaggagagcagagcccctctgccttggcactgcrgtccccccacgtccaaattagaagaggcacgtgatcacggcgcggcgcccagcgcaggcactttccattagctcagccgcagccccccgcgacgtgggagccacaggcacactcccacctgggccatgaagcccacttggctgtgtgagccacagcagagtgggctcacttccagctggaacagcccagctccctcatccccatgcacagccctgcgtgccccagggcctgtaacatcaccgcgctacatcctctggggcatgggaaaggcagcccgagagatgcacgcagagcgcccca

SEQ ID NO: 73966 - DNA, 600 bp, Chicken  19866894355770_1
acgacctgaggagaaacaaactaatttcctaaatacaatattggaatgcgagataacaccctataatacaatataattagaattgaagcaaataaatcaaatacaacgagggaaagtatctgaaagctgtaggccttacagtagtgctgaggcgatgcgtgcggtcaggatgagcagtagccacgagaggctgacaattgaaaagagagacatcagggtgaccttgccagaggatatatctcctctctgactgcaaagccccctggggtatgtagttcttctcttctggacagctacccrgaactggagcattaacactgtaactccgagtgcactacatgacgttaagatgtggaataccagtaaccaaaaatcacaaaaacgtgacacatgcacatcagataaggggccttaattagaagctatagtagtactgtagtagaaggtactggtacttggatggtaggaagaagttcttagatgtcatggggaagttcttcacagagagagtggtgaggtgctggaacaggctgcccagtgaggctgtggacgctctgttcaaggccaggttggatgaggccctggacaacctggtctagt

SEQ ID NO: 73967 - DNA, 600 bp, Chicken  19866894355772_1
ggcaagaagtttgcacttttttggtgttgttttgctgcatttgcacactgttttttctttgtttaagactgtagacaacttttttgttacaagagaaatcaaagtcgcacagaatacacagcttttcagcactcatagcccacagaggaaaagccatgaactgagagcaaatgccagtgcagggagaaatcttctagcatgttcctgttttcccttctgtatctctggctgcagcgtactgcctgctgttcttcaacagagtcccagacatcagcctgacatcagactaagtctgtgaaktctgaaaaygtactcaaattcaccaattccccaggtctaatttgcaacaccttaccastccaaccacgagagaacagtcctccgagctagaaggaagagctcaacaaggaaggaatgaacacatttagttcttaagtgctttccttctgccacgcaagttactgagttacctatacgcatcgtatgttttaaatgcagtttgctactgctccaggcagttcaactacagaattacaggctaaaatttgggaggrcttgacaaatgtaccaaaaaagcaaacacggatacaatccacactc

SEQ ID NO: 73968 - DNA, 600 bp, Chicken  19866894355772_2
tttgcacttttttggtgttgttttgctgcatttgcacactgttttttctttgtttaagactgtagacaacttttttgttacaagagaaatcaaagtcgcacagaatacacagcttttcagcactcatagcccacagaggaaaagccatgaactgagagcaaatgccagtgcagggagaaatcttctagcatgttcctgttttcccttctgtatctctggctgcagcgtactgcctgctgttcttcaacagagtcccagacatcagcctgacatcagactaagtctgtgaaktctgaaaaygtactcaaattcaccaattccccaggtctaatttgcaacaccttaccastccaaccacgagagaacagtcctccgagctagaaggaagagctcaacaaggaaggaatgaacacatttagttcttaagtgctttccttctgccacgcaagttactgagttacctatacgcatcgtatgttttaaatgcagtttgctactgctccaggcagttcaactacagaattacaggctaaaatttgggaggrcttgacaaatgtaccaaaaaagcaaacacggatacaatccacactcacttgtagc

SEQ ID NO: 73969 - DNA, 600 bp, Chicken  19866894355772_3
ttgtttaagactgtagacaacttttttgttacaagagaaatcaaagtcgcacagaatacacagcttttcagcactcatagcccacagaggaaaagccatgaactgagagcaaatgccagtgcagggagaaatcttctagcatgttcctgttttcccttctgtatctctggctgcagcgtactgcctgctgttcttcaacagagtcccagacatcagcctgacatcagactaagtctgtgaaktctgaaaaygtactcaaattcaccaattccccaggtctaatttgcaacaccttaccastccaaccacgagagaacagtcctccgagctagaaggaagagctcaacaaggaaggaatgaacacatttagttcttaagtgctttccttctgccacgcaagttactgagttacctatacgcatcgtatgttttaaatgcagtttgctactgctccaggcagttcaactacagaattacaggctaaaatttgggaggrcttgacaaatgtaccaaaaaagcaaacacggatacaatccacactcacttgtagcttctcatgtaaattttcccatcgacagctgtgaaatgcagaacatgttc

SEQ ID NO: 73970 - DNA, 600 bp, Chicken  19866894355772_4
aacagagtcccagacatcagcctgacatcagactaagtctgtgaaktctgaaaaygtactcaaattcaccaattccccaggtctaatttgcaacaccttaccastccaaccacgagagaacagtcctccgagctagaaggaagagctcaacaaggaaggaatgaacacatttagttcttaagtgctttccttctgccacgcaagttactgagttacctatacgcatcgtatgttttaaatgcagtttgctactgctccaggcagttcaactacagaattacaggctaaaatttgggaggrcttgacaaatgtaccaaaaaagcaaacacggatacaatccacactcacttgtagcttctcatgtaaattttcccatcgacagctgtgaaatgcagaacatgttctaacccagccagacgaatgttgggcacagtaggacctctgaagaaatctgaaaaaatatttaaaaataagtgtctgattacttgactgaaaacaaagccaggaaatgactgtaacaaactggctcatttcataatggttccacatgatagcagcgatataaactcctcgactctgcagattctcytatggcatcaa

SEQ ID NO: 73971 - DNA, 476 bp, Chicken  19866894355772_5
atttgggaggrcttgacaaatgtaccaaaaaagcaaacacggatacaatccacactcacttgtagcttctcatgtaaattttcccatcgacagctgtgaaatgcagaacatgttctaacccagccagacgaatgttgggcacagtaggacctctgaagaaatctgaaaaaatatttaaaaataagtgtctgattacttgactgaaaacaaagccaggaaatgactgtaacaaactggctcatttcataatggttccacatgatagcagcgatataaactcctcgactctgcagattctcytatggcatcaaaaagggtctctgtgtgtgaaaccaagtgcatgaaggaatcctgagaggaacacttcccagagagagtttcagaagcaatatacgtatatgggatctaaacccaagtgcatggacaagaacaaataccctttcagagcagtaactccattttaaccacctgactgg

SEQ ID NO: 73972 - DNA, 600 bp, Chicken  19866894355781_1
atcattgttatcccaaaaagagacagaggagaatcttcagctttctctatttgaataaagggaaagtccacaggggcatacccctgtgggatctctcaaagtacagggggacacagcctctattttatccctgtaccccaacagtagtgagcccttccccctttccccccagtgacttaagtacttggggttcacattcttctcggtttgcctgtcagccatcaccccctgtaggtgccccccttcatttcctttggttatacatactttgcaatctaggttcagagtttgttgttttgyccagcwagaactatctytgtatcttgtaaagtctaccactctttgttctgcccagcaaacacgatttacatgcargtgctaagctagcatctcctgccatatacctgcaagataagtttgtttaaccagtttcttgtgactgaaattcttctcctcagcttttcctttatcttgttttgcagggactccctatccttcctttgttcttcccaaatttcagcttattttgcaaggacatcttattcttgtttttccttcacagtggacgctcgggagtttctccattaacatcatatgcaa

SEQ ID NO: 73973 - DNA, 600 bp, Chicken  19866894355781_2
gttatcccaaaaagagacagaggagaatcttcagctttctctatttgaataaagggaaagtccacaggggcatacccctgtgggatctctcaaagtacagggggacacagcctctattttatccctgtaccccaacagtagtgagcccttccccctttccccccagtgacttaagtacttggggttcacattcttctcggtttgcctgtcagccatcaccccctgtaggtgccccccttcatttcctttggttatacatactttgcaatctaggttcagagtttgttgttttgyccagcwagaactatctytgtatcttgtaaagtctaccactctttgttctgcccagcaaacacgatttacatgcargtgctaagctagcatctcctgccatatacctgcaagataagtttgtttaaccagtttcttgtgactgaaattcttctcctcagcttttcctttatcttgttttgcagggactccctatccttcctttgttcttcccaaatttcagcttattttgcaaggacatcttattcttgtttttccttcacagtggacgctcgggagtttctccattaacatcatatgcaacttaaa

SEQ ID NO: 73974 - DNA, 600 bp, Chicken  19866894355781_3
aagagacagaggagaatcttcagctttctctatttgaataaagggaaagtccacaggggcatacccctgtgggatctctcaaagtacagggggacacagcctctattttatccctgtaccccaacagtagtgagcccttccccctttccccccagtgacttaagtacttggggttcacattcttctcggtttgcctgtcagccatcaccccctgtaggtgccccccttcatttcctttggttatacatactttgcaatctaggttcagagtttgttgttttgyccagcwagaactatctytgtatcttgtaaagtctaccactctttgttctgcccagcaaacacgatttacatgcargtgctaagctagcatctcctgccatatacctgcaagataagtttgtttaaccagtttcttgtgactgaaattcttctcctcagcttttcctttatcttgttttgcagggactccctatccttcctttgttcttcccaaatttcagcttattttgcaaggacatcttattcttgtttttccttcacagtggacgctcgggagtttctccattaacatcatatgcaacttaaaaagttacaact

SEQ ID NO: 73975 - DNA, 579 bp, Chicken  19866894355781_4
gcatacccctgtgggatctctcaaagtacagggggacacagcctctattttatccctgtaccccaacagtagtgagcccttccccctttccccccagtgacttaagtacttggggttcacattcttctcggtttgcctgtcagccatcaccccctgtaggtgccccccttcatttcctttggttatacatactttgcaatctaggttcagagtttgttgttttgyccagcwagaactatctytgtatcttgtaaagtctaccactctttgttctgcccagcaaacacgatttacatgcargtgctaagctagcatctcctgccatatacctgcaagataagtttgtttaaccagtttcttgtgactgaaattcttctcctcagcttttcctttatcttgttttgcagggactccctatccttcctttgttcttcccaaatttcagcttattttgcaaggacatcttattcttgtttttccttcacagtggacgctcgggagtttctccattaacatcatatgcaacttaaaaagttacaactcacatttgatttttagctttcttaatggaaatatttt

SEQ ID NO: 73976 - DNA, 600 bp, Chicken  19866894355790_1
ttaggactatggttgagagggtcccttgggaggtagttttggagagcataggagctcaggaaggctaggaatactttaaggaagtaattttaaaggggcaggagttgaccatccccaagtcacagaaaatgagctatcaggcaaggaggctggactggttgaacagagacctttcgctggaactcaagaacaaaaggaaagtttacggtctctggaagaatgggcaagctacttatgaggactacaggtatgtagtgaagctgtgcaaggagagaattagaaaagccaaagcgaagctargactgaattyggccactaaggtaaaagaaagcattaaatgtttctataaatacatcaacagcaagaggagggctagggagaatctccatcctttgttgaacactgacagcaacttggtgaccaaggatcgggataagrctgaggtgcttaacaccttctttgcctcagtctttaatagtaagacttgttactccctggcgacacagccccctgctctggtagatagggaaggggaacagaataggccctgcatgatccatgaagagatgrttttggacctgctctgaaagctggacgctc

SEQ ID NO: 73977 - DNA, 600 bp, Chicken  19866894355790_2
ggttgagagggtcccttgggaggtagttttggagagcataggagctcaggaaggctaggaatactttaaggaagtaattttaaaggggcaggagttgaccatccccaagtcacagaaaatgagctatcaggcaaggaggctggactggttgaacagagacctttcgctggaactcaagaacaaaaggaaagtttacggtctctggaagaatgggcaagctacttatgaggactacaggtatgtagtgaagctgtgcaaggagagaattagaaaagccaaagcgaagctargactgaattyggccactaaggtaaaagaaagcattaaatgtttctataaatacatcaacagcaagaggagggctagggagaatctccatcctttgttgaacactgacagcaacttggtgaccaaggatcgggataagrctgaggtgcttaacaccttctttgcctcagtctttaatagtaagacttgttactccctggcgacacagccccctgctctggtagatagggaaggggaacagaataggccctgcatgatccatgaagagatgrttttggacctgctctgaaagctggacgctcacaagtccat

SEQ ID NO: 73978 - DNA, 600 bp, Chicken  19866894355790_3
aggcaaggaggctggactggttgaacagagacctttcgctggaactcaagaacaaaaggaaagtttacggtctctggaagaatgggcaagctacttatgaggactacaggtatgtagtgaagctgtgcaaggagagaattagaaaagccaaagcgaagctargactgaattyggccactaaggtaaaagaaagcattaaatgtttctataaatacatcaacagcaagaggagggctagggagaatctccatcctttgttgaacactgacagcaacttggtgaccaaggatcgggataagrctgaggtgcttaacaccttctttgcctcagtctttaatagtaagacttgttactccctggcgacacagccccctgctctggtagatagggaaggggaacagaataggccctgcatgatccatgaagagatgrttttggacctgctctgaaagctggacgctcacaagtccatggggccggataaattgcaccctagagttctgagggagttcacagatgtagttgccaagmcactctccatcatccttcagcagtcctggctaaccggggatgtctcggcagagtggagactggcaaatg

SEQ ID NO: 73979 - DNA, 488 bp, Chicken  19866894355790_4
agagaattagaaaagccaaagcgaagctargactgaattyggccactaaggtaaaagaaagcattaaatgtttctataaatacatcaacagcaagaggagggctagggagaatctccatcctttgttgaacactgacagcaacttggtgaccaaggatcgggataagrctgaggtgcttaacaccttctttgcctcagtctttaatagtaagacttgttactccctggcgacacagccccctgctctggtagatagggaaggggaacagaataggccctgcatgatccatgaagagatgrttttggacctgctctgaaagctggacgctcacaagtccatggggccggataaattgcaccctagagttctgagggagttcacagatgtagttgccaagmcactctccatcatccttcagcagtcctggctaaccggggatgtctcggcagagtggagactggcaaatgtgatgtgcatcttcaagaag

SEQ ID NO: 73980 - DNA, 389 bp, Chicken  19866894355790_5
gggctagggagaatctccatcctttgttgaacactgacagcaacttggtgaccaaggatcgggataagrctgaggtgcttaacaccttctttgcctcagtctttaatagtaagacttgttactccctggcgacacagccccctgctctggtagatagggaaggggaacagaataggccctgcatgatccatgaagagatgrttttggacctgctctgaaagctggacgctcacaagtccatggggccggataaattgcaccctagagttctgagggagttcacagatgtagttgccaagmcactctccatcatccttcagcagtcctggctaaccggggatgtctcggcagagtggagactggcaaatgtgatgtgcatcttcaagaag

SEQ ID NO: 73981 - DNA, 600 bp, Chicken  19866894355815_1
acagggatacctgagtgttacctttcacagacaatcagagcaattagtggagctcccacttcagtttcagaatggtggaaaaatcaaagatgcctctggtcctcagataattttaaaagctttaaagatctgttctttgtgatctactatcagaagaaatactacagtctttggaaccataggtgtcaatcaatgcacatagattctcatcgcctcctacagaaaacttggaggtaaaagtatggttctcttcccacaaatctaaatgttctgtagcattttacataaattgattaaacrtacaaagctcataaaaacagggacacattatttcttactcatcttcatggaattagaaagtttgttgctcttataagcatgtgtgaaggacctcgctgtctatttctttccctgagttagctggcattgctaaagcaatgcagagattagggcaggctaacatctaatacttactccagctttgcaggaggattttacagcccacagtaacttccaggcttcttcaagcccaatgctattgttagacaaaggttatacctacatgaactgtacctgcacatttgtctctgcagcaaacat

SEQ ID NO: 73982 - DNA, 600 bp, Chicken  19866894355815_2
taaaaacagggacacattatttcttactcatcttcatggaattagaaagtttgttgctcttataagcatgtgtgaaggacctcgctgtctatttctttccctgagttagctggcattgctaaagcaatgcagagattagggcaggctaacatctaatacttactccagctttgcaggaggattttacagcccacagtaacttccaggcttcttcaagcccaatgctattgttagacaaaggttatacctacatgaactgtacctgcacatttgtctctgcagcaaacatatcactgggcwcttaaactgaaaccccagcctcagtaatgtcaataggcttttttcccctcagatttcaattttgatttggatttagatttcaccatcagaatccaaatcccactcacttcaggaagacttatgctcctacaggtggttcttagcttttgatgtgtataagaagttcatcatctgaagctcagtcagtcacttcacagtcacaaaagagaaacaggcaccttcaaagagtagcttgtcctatctgtctcctagagtgagatgaattgccctctggatatgaatgtttattggacaaaaaag

SEQ ID NO: 73983 - DNA, 600 bp, Chicken  19866894355822_1
gcaacccagaagtcatactttgtgcacacagcactgcagcattaccacgactcctaaacttcacagtagtgcctcaagagtacatttacagatgcatctcaagctccgtttcttagggcaggattatatgacccagggacagtacaccagttgatttcagttatttccactgcactttactcttcttgatttcccttgtgagcatgcatgaagacgaccacagggaaaaggaacatttgcataaagcctgaactctattatagtgtcacactgcatagacacaggaggagatcgcacacyggaaactagcagtaatatttttatttccaaaagccattaggtgaaacttcaatgccttcaaaatttctttttcatctgtccaaacctgcatactgttcaattccttttaatagaatgttttttgaggatatatacttgtgaaagaatgcaggaaagcttatttgcaactaagggaagaaggctctttgacgggctttgtaagaatgggcattcatcttgctatattacatcgaacagacagacatgagcaaccaagagaacttctgttttaattacagtacagttcatataagttactgc

SEQ ID NO: 73984 - DNA, 600 bp, Chicken  19866894355822_2
gtgaaagaatgcaggaaagcttatttgcaactaagggaagaaggctctttgacgggctttgtaagaatgggcattcatcttgctatattacatcgaacagacagacatgagcaaccaagagaacttctgttttaattacagtacagttcatataagttactgctagtttttgatagcctatacaaaaaatgtttcttcattccgtctgaaaagcctcttaagaagatagacttaagttcattacccactagttatagatacactaacattttataatatgtatacacatacattgcctayacatgggcattcctggatacacctaccgagaacccttagtcttccaattaaagtaatgtgcaggatgaacctacttccattttaagtttttgtgaggagctttaacctcagaatttctcaaacagaagctgcctttaccctaaacactgaagtcagtccatttctcatccagttcatcacaaaagcattcttgttgaatccttagcactacaaatcccatagacaagacaacatttggggtagtttccatgaggtctcagttacaaagactgtttaaacataaaaccttgtgactcaatt

SEQ ID NO: 73985 - DNA, 600 bp, Chicken  19866894355824_1
gaaaatacggtgtaacaaagcatcatattattacttcttaaattccatagtatttctcagcatttggactatcctctcccagtgtgccattgagttgtatccatcaacctgtcccttgagttgcatccatcacttccaaaaattttcttggctcttgagtgccaacctacagtgtttgaaatgccagatatcctatctgtaagtccctacaaccagtggaaatcaacagcagtgtctctcaagctccaatcaccagtatctcagtgaattgtactctagggacatgtgagcaaccatttygttcattctcctaacaacctgctgcctgagtgcacagtcattaacatcactctggcactcaccagctgctactttgagcagcccatgaatgaaagggtcagctgcacaygatcaagtcagctgagtcagtgatccttaatctaacctcccattgaaatgcaactccaatgtacatcctctgactcataggacagcccagcctgaacaggtgctgggcagctcagtctgataaactcctgttggaacatgcacagggatgtgcctgtgaatccagatacttggaacacttcagaataagta

SEQ ID NO: 73986 - DNA, 600 bp, Chicken  19866894355824_2
tgtcccttgagttgcatccatcacttccaaaaattttcttggctcttgagtgccaacctacagtgtttgaaatgccagatatcctatctgtaagtccctacaaccagtggaaatcaacagcagtgtctctcaagctccaatcaccagtatctcagtgaattgtactctagggacatgtgagcaaccatttygttcattctcctaacaacctgctgcctgagtgcacagtcattaacatcactctggcactcaccagctgctactttgagcagcccatgaatgaaagggtcagctgcacaygatcaagtcagctgagtcagtgatccttaatctaacctcccattgaaatgcaactccaatgtacatcctctgactcataggacagcccagcctgaacaggtgctgggcagctcagtctgataaactcctgttggaacatgcacagggatgtgcctgtgaatccagatacttggaacacttcagaataagtagacgttttcatgagaatggggstgtgcatgtatgtgcaacatatgccagtgctctgcagactagaaatgatacaatgcaattagaaaagaatatggaaaagtaactttt

SEQ ID NO: 73987 - DNA, 600 bp, Chicken  19866894355824_3
tgcctgagtgcacagtcattaacatcactctggcactcaccagctgctactttgagcagcccatgaatgaaagggtcagctgcacaygatcaagtcagctgagtcagtgatccttaatctaacctcccattgaaatgcaactccaatgtacatcctctgactcataggacagcccagcctgaacaggtgctgggcagctcagtctgataaactcctgttggaacatgcacagggatgtgcctgtgaatccagatacttggaacacttcagaataagtagacgttttcatgagaatggggstgtgcatgtatgtgcaacatatgccagtgctctgcagactagaaatgatacaatgcaattagaaaagaatatggaaaagtaacttttcaaaaaaactgaaaggtgaagattgcaatagagaaacagagtatgctaatactctctactacagtcaatatttttactctaaagtcaacataatttcctcaaaaatctgtataatttgcatctgtttaacaaagtcaatttcttctgagtgaagatgtacaacattcatagtgatatgaaagcacaatataatgcataatccataccatagcc

SEQ ID NO: 73988 - DNA, 599 bp, Chicken  19866894355827_1
  misc_feature (1)..(93): n is any nucleotide
nnnnnnnnnnnnnnnnnnnnnnnnnnnnnnnnnnnnnnnnnnnnnnnnnnnnnnnnnnnnnnnnnnnnnnnnnnnnnnnnnnnnnnnnnnnnnttttcctgacctgtcatcttcctctcttctcttgtgtgtttttctctctcctgcttactgtagttaaaaaatgtcgaagggccatatgcacttgcagtctcttgacttccccatacaaagagttattatctttgttgagatttgcatgcagctagggtatgaatcttttcattcaatgagcttagggagtgctctcatgaagacaaytggacatttggacagtacgagctcagagaagggctctacatgggggccagttgcagtcccccaaggagctgcaacaagccctgtaaatgggatgtggcctgaatgcaggaaacaacagccattattctggaatattcctaattgaatgtgactcctaacaaaaccactgctgtgagtcacaacactgctaagtacttctctcaatcagacacaataaaatataattggagtcaggctgttgttattgattagaacataatgcattagagaacatcctttttaatacattctatttatag

SEQ ID NO: 73989 - DNA, 600 bp, Chicken  19866894355827_2
acaacagccattattctggaatattcctaattgaatgtgactcctaacaaaaccactgctgtgagtcacaacactgctaagtacttctctcaatcagacacaataaaatataattggagtcaggctgttgttattgattagaacataatgcattagagaacatcctttttaatacattctatttatagtgcctgcatcatggaacagtcgttacagcttttccatccttagtgctcaatcatgagcaaaacattaaacatgcatttctgatagcacactaactcatgcctgtcaaaaacracagggactaaagccaacccaagaatttagcttttaaggagggaacacttctgtcgggatccattcaagtagagtgaaatctaggggaggaggggagggatttatcaagggatgttaattttcaacatggaaaatgctacacgttgaagacacgttatgtgcacttgcactgccaaaacatttgcaggcagatggcactccatgagccttctttccctgcaaaagcagctccgagcccagctccacagctttcccttcagtcactccatggacatgcagccccaggagaagccattccca

SEQ ID NO: 73990 - DNA, 600 bp, Chicken  19866894355827_3
tgaaatctaggggaggaggggagggatttatcaagggatgttaattttcaacatggaaaatgctacacgttgaagacacgttatgtgcacttgcactgccaaaacatttgcaggcagatggcactccatgagccttctttccctgcaaaagcagctccgagcccagctccacagctttcccttcagtcactccatggacatgcagccccaggagaagccattcccaaattggcttgcagtggaaaacaaggcttgtgttctgccagatccactttgccttaaatatagtgcaaagaaacytcccagagaaacagaygtcaattgaatgagggatctattaacgggcacgagagcaggaaagtacctttaagctaatgcagtgcaagtgtgtgcacagtcagagagaaactcgtgtgctgacaacacactcttcctccccctcgctgtgaatgccacagagggttccatttagctactgctgtccccagtgctgggggtgctggtggtgacagcgcagtgtcacctgatacaacctctgatacagaggctgcattctgcaagaggacacacagagttgccctctcaagaatgaggtgtacg

SEQ ID NO: 73991 - DNA, 600 bp, Chicken  19866894355827_4
aggggagggatttatcaagggatgttaattttcaacatggaaaatgctacacgttgaagacacgttatgtgcacttgcactgccaaaacatttgcaggcagatggcactccatgagccttctttccctgcaaaagcagctccgagcccagctccacagctttcccttcagtcactccatggacatgcagccccaggagaagccattcccaaattggcttgcagtggaaaacaaggcttgtgttctgccagatccactttgccttaaatatagtgcaaagaaacytcccagagaaacagaygtcaattgaatgagggatctattaacgggcacgagagcaggaaagtacctttaagctaatgcagtgcaagtgtgtgcacagtcagagagaaactcgtgtgctgacaacacactcttcctccccctcgctgtgaatgccacagagggttccatttagctactgctgtccccagtgctgggggtgctggtggtgacagcgcagtgtcacctgatacaacctctgatacagaggctgcattctgcaagaggacacacagagttgccctctcaagaatgaggtgtacgttggcccagatggatg

SEQ ID NO: 73992 - DNA, 600 bp, Chicken  19866894355827_5
cccctcgctgtgaatgccacagagggttccatttagctactgctgtccccagtgctgggggtgctggtggtgacagcgcagtgtcacctgatacaacctctgatacagaggctgcattctgcaagaggacacacagagttgccctctcaagaatgaggtgtacgttggcccagatggatggtgagacagcacgatgggttccaggggaaagagcaacgtgcagggcttctgaactagtccttttgggttaatgtgtgcagtcacctcacagagccccaagggcaggtctgcaggggctcrctgtcatacaggtagccaaaatcagggccaccattctgyaaagcagataagcacatgattaactgcttgaagtcaaacacttagtcaagcatttcactaaactgaagttgaaggtgacagtgaaggaacaacttaaaaccaaaataagaagcgtgttactggaaacacttgtggcatttctttcaagtcactatgtacagatatagccctccttatttctcccctgcttgcaccctgcagtagccacgcagagctcaactggactgattcacctcagagggctctgcatttcagtggcaa

SEQ ID NO: 73993 - DNA, 600 bp, Chicken  19866894355827_6
ctgctgtccccagtgctgggggtgctggtggtgacagcgcagtgtcacctgatacaacctctgatacagaggctgcattctgcaagaggacacacagagttgccctctcaagaatgaggtgtacgttggcccagatggatggtgagacagcacgatgggttccaggggaaagagcaacgtgcagggcttctgaactagtccttttgggttaatgtgtgcagtcacctcacagagccccaagggcaggtctgcaggggctcrctgtcatacaggtagccaaaatcagggccaccattctgyaaagcagataagcacatgattaactgcttgaagtcaaacacttagtcaagcatttcactaaactgaagttgaaggtgacagtgaaggaacaacttaaaaccaaaataagaagcgtgttactggaaacacttgtggcatttctttcaagtcactatgtacagatatagccctccttatttctcccctgcttgcaccctgcagtagccacgcagagctcaactggactgattcacctcagagggctctgcatttcagtggcaattactttggaagcagaatttattctgttagtaataatta

SEQ ID NO: 73994 - DNA, 600 bp, Chicken  19866894355832_1
gctgcactgaaatcaatttataaatgtaagccacgagtctagaaacaatttcaaatggctgcatgagctcacacagagccacggtgcgtggaccctatttcagaatgtctttaaataaacttgttgctgtctggtcatttctaattctcaccctagcataagaacaattcaaaagagatctaaaatggatgtatccagacatttaatgaagatcatccatatcttaaatgtcaaatgagaactatgaataactcacctgcactggacagacagttgaacaccaacaccttgaatgcattycaagtatttcactctcaggaagcttgtgttctgctccaagtgtaaaaacatgcctggcttctcttttgtaacaagtgctgtttattaaaaatgagattccattatcggatagagccacaacagttacattgttatttaggccttgggtcaaaatatctgagagaactttaatttctgtgtctaccttgaatgcatcatttgtatagaaagctgctccaaaatttgataacaaaactgctgttgttggaaaacatgcagaccatttaatagagagttcactgttctgagtggaacagagtg

SEQ ID NO: 73995 - DNA, 553 bp, Chicken  19866894355843_1
tgccggcatcccggtgtgtgctgcgagtgagctgggaatagggaggccgaagcggggggagaaaattgctttccaattttatgaagctagagtgagtgccagatgatatttttcctttttttctttttttcttttcgtgagcagtttggagtgtgggcttattttatccttctgctggaaaaagtacctccacctctgaagagacccatcttcatcttggccttccttctgtatgatgatgttttattaggtatataggtgctttgccagtattatacgttacaggcaggatatagggcyggaagcctgtaaatcagtaaaaatgagtgggtccacatttgagagagatgaaaggatatcatctcatctggccatacacaggatctcagaatgtgggagaagcacttgtgtttgtgaagaaggcaggatttctcatgcgctgccatcttagaaaagccccagctggtgccgtcagtgggtttgcctgcagacagacttgcaggagggagcgaccccaagcaaagtgccaggagacatgggcagcccaagcaga

SEQ ID NO: 73996 - DNA, 599 bp, Chicken  19866894355856_1
  misc_feature (1)..(39): n is any nucleotide
nnnnnnnnnnnnnnnnnnnnnnnnnnnnnnnnnnnnnnnagagctttgctgtctttggctgaaatagataggaaaacagctgtaaaaaaaatttggacgggatgacacttggcatgcatgccctaggtgaaataaatctttgccatcttaacctgttactcttgcaggcttgaggtcaaacaatccatgctgaaacaacagttgcctttttacagggttattggttacaatcttgagagctccagatttgccacctcagaacgtgggagtctcagaggcgtctgtgctgttccctacacrgagaatgtcagggacaactgcagcccagaagacccagcacataaaaaaggggaataaaaaaaacgcagtgggcaaatgcttgcagacagctggcactctgcaagcgctctcagatcatcccagctactgcctacccyctgactgctccttggcacatttgggaattagcactggacaggaactattcccaacaggcagtcttcacgcagagtaagaggatttaatactgtagacacatacaacagcaaggtagttgacttgtgaagcagtcctaagtgtstatgtgaatagctaatgac

SEQ ID NO: 73997 - DNA, 600 bp, Chicken  19866894355856_2
ctttgccatcttaacctgttactcttgcaggcttgaggtcaaacaatccatgctgaaacaacagttgcctttttacagggttattggttacaatcttgagagctccagatttgccacctcagaacgtgggagtctcagaggcgtctgtgctgttccctacacrgagaatgtcagggacaactgcagcccagaagacccagcacataaaaaaggggaataaaaaaaacgcagtgggcaaatgcttgcagacagctggcactctgcaagcgctctcagatcatcccagctactgcctacccyctgactgctccttggcacatttgggaattagcactggacaggaactattcccaacaggcagtcttcacgcagagtaagaggatttaatactgtagacacatacaacagcaaggtagttgacttgtgaagcagtcctaagtgtstatgtgaatagctaatgacagcttaagagttgctggaagatgctacttctatgtggggagtctcagtagacttaatacctaagaattaatttatccttctattataacctagtccttctctgtcagaggatcagcctttccaagtgacataggaaga

SEQ ID NO: 73998 - DNA, 600 bp, Chicken  19866894355856_3
tctgtgctgttccctacacrgagaatgtcagggacaactgcagcccagaagacccagcacataaaaaaggggaataaaaaaaacgcagtgggcaaatgcttgcagacagctggcactctgcaagcgctctcagatcatcccagctactgcctacccyctgactgctccttggcacatttgggaattagcactggacaggaactattcccaacaggcagtcttcacgcagagtaagaggatttaatactgtagacacatacaacagcaaggtagttgacttgtgaagcagtcctaagtgtstatgtgaatagctaatgacagcttaagagttgctggaagatgctacttctatgtggggagtctcagtagacttaatacctaagaattaatttatccttctattataacctagtccttctctgtcagaggatcagcctttccaagtgacataggaagatgacaaagtaatgttttcacgttctctttactttccttgtctaaagccaagagcatttattcacaatctgtttcatcttccatcccaaggaggctcaaacccatgctttcctttttcccagaggaggactctaatttgttgat

SEQ ID NO: 73999 - DNA, 600 bp, Chicken  19866894355859_1
aagcctttctgaagcaatggatgcatttgagtctttgtggtatctgttgactcggatactgttttgctaggaggacttgtgttgctcactgcatgctccagatgatacttgagctattcttgctggcttcaagtttcagcccacttaaaacaagttgctagtgaggcattattctgttgggtgccttctgtgaaccttgtatggccttcaggtgtgtggaaacttcatgttgcctttgggagggtcacagactcaaaaggaaagaggaagaacttggttttgagttattttctggagcakacttgacttaagccaagattctttgttgaggccttgtatgtgctcatttagatctggaagaattgatgagctttttaattagaggacaaggagggcaaggagtagttttgcagaaattggtagcattgcctattgaaacacctttaaaatgctgcaagatcagaaaagccattctccttgttagctaggtcaagtggttgcaagcattttccagacataaatgaaaaactacagaagctacacctccattattattcaccccaacccgtccttctttctgctcaacacttaatggtctgg

SEQ ID NO: 74000 - DNA, 599 bp, Chicken  19866894355861_1
  misc_feature (1)..(73): n is any nucleotide
nnnnnnnnnnnnnnnnnnnnnnnnnnnnnnnnnnnnnnnnnnnnnnnnnnnnnnnnnnnnnnnnnnnnnnnnnctgcattttaatttcaaacgtattaggtatgcggcaaataactgggggaagaattcatggagggctatgcaaggactctgagcctgcaaggaaaacagaaaaaaacaagcaggtttttttttaaaatgctttttccagtattgcacaggtgagccttctagttatattaatttgcctgtttctatacatgaattgtcaggaaatggcaaaatctcctggcaacaatkgagaaatgaagatagcattgttgagtaggaggaaagcataacctcaggaccaggttgctccatactgagcttttccataccaaatggcttggtcaaatacatttattgcttacagagtccaggaaatgatactgttcggtggaagttagactggaacctgcttagcacagattagcaaagatttagctcctggatgatgttatgcaacaacactgtccgcagtatggtggagaaaatctggcctgaagtgtgaagggrtgatgtcacgttaaagccagtgctgttagttcactaagatt

SEQ ID NO: 74001 - DNA, 600 bp, Chicken  19866894355861_2
acatgaattgtcaggaaatggcaaaatctcctggcaacaatkgagaaatgaagatagcattgttgagtaggaggaaagcataacctcaggaccaggttgctccatactgagcttttccataccaaatggcttggtcaaatacatttattgcttacagagtccaggaaatgatactgttcggtggaagttagactggaacctgcttagcacagattagcaaagatttagctcctggatgatgttatgcaacaacactgtccgcagtatggtggagaaaatctggcctgaagtgtgaagggrtgatgtcacgttaaagccagtgctgttagttcactaagattttagatctgggggaaaagtttttcccatcccgtaattcctttaaaatttcataaaaccagtgctgtctgctttctcagtttcattgagtttgctcygggaactggagttgtcctccataatttcttgacatagtttttcaccttcatcgtgtctcttaaaacataaagcttcagagaaatgctgtagttaattacaagggaagcaactccacgtttggcccaagaattcagagggctattctctgcacactaggaagca

SEQ ID NO: 74002 - DNA, 600 bp, Chicken  19866894355861_3
aatacatttattgcttacagagtccaggaaatgatactgttcggtggaagttagactggaacctgcttagcacagattagcaaagatttagctcctggatgatgttatgcaacaacactgtccgcagtatggtggagaaaatctggcctgaagtgtgaagggrtgatgtcacgttaaagccagtgctgttagttcactaagattttagatctgggggaaaagtttttcccatcccgtaattcctttaaaatttcataaaaccagtgctgtctgctttctcagtttcattgagtttgctcygggaactggagttgtcctccataatttcttgacatagtttttcaccttcatcgtgtctcttaaaacataaagcttcagagaaatgctgtagttaattacaagggaagcaactccacgtttggcccaagaattcagagggctattctctgcacactaggaagcagcacgtattcttgaccacagtaagcagagtcgcagctctaaatcccatttgtccattacttgcatacacagactcattaggagagtccttccctacctcactgcagctgtctaaactgtgcaaacgcatgtgatgca

SEQ ID NO: 74003 - DNA, 600 bp, Chicken  19866894355862_1
ttaattgctactttggttgcagcaaaagtactgagggggaaacaaatggtgctcaagcagctggccccctcttaccaaagagagacaatctgtcacccagcactctgcatatgcctaaagtgtcctcctggattcagacactcattcatgggaactgggatttcatacttcatatgagcacacacatacacttaaaatgaacagaagtatttaagtctcaggtagaagagattttaactgtatgatctaaaatacacagcttacggcattcatcagtacagcaataaattttggaagtgratcaatattttccaagatttctacttataatactttcattctcatgcacagtttaatctggaaacttctaacatacgtgcataaaagtttagaactcattttcatgccagcagaaagcgagtagcagccatccaatacagtccattgcagtcacagtccttcacaatgattgtcagtagtagtaaagtttcttgattttactcaagcaatacatgtcagcaggagtatcatttgtgttagaaccatggttcatttgggtacagggtagacatctcacatagaagcaacttacatttcagt

SEQ ID NO: 74004 - DNA, 600 bp, Chicken  19866894355888_1
attttattactcagctgcaagaatgacagacccagacaggcacctgcgtctcatctactcttgtgcaaaatgatatattacctccttggtggaaaaagagagcacagcagtgtgaactgaatgaacagctgaggcacagtcacacatggatgaaaaacaaggagagtaatgtcttaaatcatgtcagtatgctccagtgaatgatatccattaataggaggaattatcacttcgctatatacatgtatccatatttatctgggataaatatgatatataaaattacaatcttaacattamatcagcatgtctttaactaatccaaaggaacttctctgaaaattcttatgagttgtttttctttttttcaacatttaatacattattgtacagttttcattaactaacgaaaactgcatatgatgtcatggtcactgtactccattctacgtgatgtctacacaactagttacaagaatactaaggctgggaatgggtttcacacccacactgccatctgcaaagctgaaaagatatgttcattcattcatggtagtaataaattatatataaaacagtctaaaattaagttcaattata

SEQ ID NO: 74005 - DNA, 600 bp, Chicken  19866894355889_1
cgtaatgaggtaatatcctcccacacagctacttccattaggccatacgaaactgcacattgtaatgttgtaatgctttgaacaattttctcctttaattcaccctccaggaaggtttgcagggtctgagtttgcagtgagtgagtgagtgcaatgcatttcagttgtacagctttctgtggtcctgtcctggaggaggatgctgagtgagcacgggtagggtaaggcatcacactatccaaaatgctgtaccaccacagtgttaaaaagagctgggcaaataatgccaggagcattccrcggatgtttatccaaatttgaataaaatcagcttgctctttttatgtcccattttgtgtttcttttcttggaacaatcaaacaattcagttttactggcagagggggtttcaaagccacatacacaaatgtgctggaaagcagaattgcaaatgtgcagatcctgtcagagcaggaaactcggagggctttatgcggctcctgcgataactgaatagcgaagctgaaatgtagaacaattgcaattggtccgtagagttaaaacataaaatggtagtcattaaaataatttaaagcatcg

SEQ ID NO: 74006 - DNA, 600 bp, Chicken  19866894355893_1
ctcaaacccttaaagcacccattctaaataacgtgactgcctcttacaaatacatttacagggcgcattggttgattgtggacctgttgcactagcttctacaaaaagctaatggaagaaagtaaaaagatgaagcagaattaccacttatggaaacaaagacaaagggctgacagatgaaccatagcgtggttatgcattctcaggagtagacaccactggatgaagggcagagatccatgcatcttcatattaagtaatcaaaggatgtccttttctgaatacaattctctactctgrgggagggggggggraraaagcctattttacagttttcttgcctctcaattttgatttcttcatcattcagtggggggaaaarggggggaaaaaaaagccattcaaatgaaatttggcacactgttctactgctgatttgccagattcctgtgtccttgagtgtgacacagtgttattatttggtgtcctgtgtttaaaatctgaagtgatttaacctggctctctgccatcccacttgctgacatgttgacaccatgtaaataatgcatagctgtgtggccacactactttcatgccaca

SEQ ID NO: 74007 - DNA, 600 bp, Chicken  19866894355893_2
gcacccattctaaataacgtgactgcctcttacaaatacatttacagggcgcattggttgattgtggacctgttgcactagcttctacaaaaagctaatggaagaaagtaaaaagatgaagcagaattaccacttatggaaacaaagacaaagggctgacagatgaaccatagcgtggttatgcattctcaggagtagacaccactggatgaagggcagagatccatgcatcttcatattaagtaatcaaaggatgtccttttctgaatacaattctctactctgrgggagggggggggraraaagcctattttacagttttcttgcctctcaattttgatttcttcatcattcagtggggggaaaarggggggaaaaaaaagccattcaaatgaaatttggcacactgttctactgctgatttgccagattcctgtgtccttgagtgtgacacagtgttattatttggtgtcctgtgtttaaaatctgaagtgatttaacctggctctctgccatcccacttgctgacatgttgacaccatgtaaataatgcatagctgtgtggccacactactttcatgccacatgctgagggaaaca

SEQ ID NO: 74008 - DNA, 600 bp, Chicken  19866894355893_3
cacccattctaaataacgtgactgcctcttacaaatacatttacagggcgcattggttgattgtggacctgttgcactagcttctacaaaaagctaatggaagaaagtaaaaagatgaagcagaattaccacttatggaaacaaagacaaagggctgacagatgaaccatagcgtggttatgcattctcaggagtagacaccactggatgaagggcagagatccatgcatcttcatattaagtaatcaaaggatgtccttttctgaatacaattctctactctgrgggagggggggggrrraaagcctattttacagttttcttgcctctcaattttgatttcttcatcattcagtggggggaaaarggggggaaaaaaaagccattcaaatgaaatttggcacactgttctactgctgatttgccagattcctgtgtccttgagtgtgacacagtgttattatttggtgtcctgtgtttaaaatctgaagtgatttaacctggctctctgccatcccacttgctgacatgttgacaccatgtaaataatgcatagctgtgtggccacactactttcatgccacatgctgagggaaacag

SEQ ID NO: 74009 - DNA, 600 bp, Chicken  19866894355893_4
acccattctaaataacgtgactgcctcttacaaatacatttacagggcgcattggttgattgtggacctgttgcactagcttctacaaaaagctaatggaagaaagtaaaaagatgaagcagaattaccacttatggaaacaaagacaaagggctgacagatgaaccatagcgtggttatgcattctcaggagtagacaccactggatgaagggcagagatccatgcatcttcatattaagtaatcaaaggatgtccttttctgaatacaattctctactctgrgggagggggggggraraaagcctattttacagttttcttgcctctcaattttgatttcttcatcattcagtggggggaaaarggggggaaaaaaaagccattcaaatgaaatttggcacactgttctactgctgatttgccagattcctgtgtccttgagtgtgacacagtgttattatttggtgtcctgtgtttaaaatctgaagtgatttaacctggctctctgccatcccacttgctgacatgttgacaccatgtaaataatgcatagctgtgtggccacactactttcatgccacatgctgagggaaacaga

SEQ ID NO: 74010 - DNA, 600 bp, Chicken  19866894355893_5
cctgttgcactagcttctacaaaaagctaatggaagaaagtaaaaagatgaagcagaattaccacttatggaaacaaagacaaagggctgacagatgaaccatagcgtggttatgcattctcaggagtagacaccactggatgaagggcagagatccatgcatcttcatattaagtaatcaaaggatgtccttttctgaatacaattctctactctgrgggagggggggggraraaagcctattttacagttttcttgcctctcaattttgatttcttcatcattcagtggggggaaaarggggggaaaaaaaagccattcaaatgaaatttggcacactgttctactgctgatttgccagattcctgtgtccttgagtgtgacacagtgttattatttggtgtcctgtgtttaaaatctgaagtgatttaacctggctctctgccatcccacttgctgacatgttgacaccatgtaaataatgcatagctgtgtggccacactactttcatgccacatgctgagggaaacagacaacacctgctattattattagccacatcttagataccttgggaatgtgcaaaagggacatcaaaa

SEQ ID NO: 74011 - DNA, 599 bp, Chicken  19866894355900_1
  misc_feature (1)..(6): n is any nucleotide
nnnnnntgaaaatttaatggcaggaaggagaatctaaagtagttagtgtccaaaggtgagttttcaaaagcccaaatcagtatctgaattacatttcaacagcaaacctgaaatacattcaattatgaattacctatgtatacttacttgccttctgataagaactacacagaacaatgagaatttgtattctatacatactctaatatttctgtaatacatcccttgatctaggtagaatctcacaaagttttttaaaaacaggaaaaaaacatttttgggggcagtggtgttctaagrcgttttatggaatctcttcatgcagaaattctgttccaatttccttccatcacttttctgagcatagcgcatgtttctttattatgatctctcagagtgtcatcaaaacactcaataaaattaggcaatgactcagggaacagcagtgcatttcacaacaaatgttattcatcagtcatcgttccaattactccttgcttttgggaaatagacctctcttccctgttacatatattcattggccagtatattaagtcacatactggggctagatgtttcctatgtcatttaactaaaaa

SEQ ID NO: 74012 - DNA, 600 bp, Chicken  19866894355900_2
gagcatagcgcatgtttctttattatgatctctcagagtgtcatcaaaacactcaataaaattaggcaatgactcagggaacagcagtgcatttcacaacaaatgttattcatcagtcatcgttccaattactccttgcttttgggaaatagacctctcttccctgttacatatattcattggccagtatattaagtcacatactggggctagatgtttcctatgtcatttaactaaaaaccagataagcagcaaggtttgcagctctgctaagaattttatctgagattctctcaattyctcttctcacccttcccttctgtagtatatatagtccatacataagctttagccctacttccccgggtcctgacatgccacatacagctggttagatcacttaccactatgtactgcagcgtcttaggctggaaaaaacattacagataggatggaatctgtcaagtggcaaattcattcaagccctgctcccatgctagcattcttttcctgccccacaatattgctttaaatctttatcaacgaaaaaatgaaaggaacatgcactactgaggcactaaggaggaatagattacccat

SEQ ID NO: 74013 - DNA, 600 bp, Chicken  19866894355908_1
gtaaagagcattctgcagtcagtctctgaaatacttctttcagatattaagaggcccagtgcctgatcataaatatttctgggtttttaagatgctgtgaggatgctggattcctctgttggttttgctgcttgtattaatagtttcaagaagaacataaatttgatttctgctgcacgtacataaatggaagagctcaatatcttcaagaacctttttttctttctttttttttttttttgtggggttttttgcactaaaagctgtaggattatttatgggagcttcatgacttgacaytgggttggaaccatctcaccaccgtgcccataaccatgtccccaagtgccacatctccatggccttgggacacctccaggggcattgactccatcackccctgggcagcctgtgccaatgcctgaccactctgatamgcaccttgtgcaacatctccagcttcaggagctttcatggatccttctatactccagtggttgcataagcgttgtgtaggtgtagctctgatggatagcagtgggctcaaktttagtgatgcttccatgagtcttggctggatcactgaaggtgaagggtgtg

SEQ ID NO: 74014 - DNA, 600 bp, Chicken  19866894355908_2
gaggatgctggattcctctgttggttttgctgcttgtattaatagtttcaagaagaacataaatttgatttctgctgcacgtacataaatggaagagctcaatatcttcaagaacctttttttctttctttttttttttttttgtggggttttttgcactaaaagctgtaggattatttatgggagcttcatgacttgacaytgggttggaaccatctcaccaccgtgcccataaccatgtccccaagtgccacatctccatggccttgggacacctccaggggcattgactccatcackccctgggcagcctgtgccaatgcctgaccactctgatamgcaccttgtgcaacatctccagcttcaggagctttcatggatccttctatactccagtggttgcataagcgttgtgtaggtgtagctctgatggatagcagtgggctcaaktttagtgatgcttccatgagtcttggctggatcactgaaggtgaagggtgtgttataaacctgagtctgtgctgctgcaaacatgctttgctttctctttgttttgcttttcagggttgtgtcactgagcaaaccaggcagagctccgct

SEQ ID NO: 74015 - DNA, 600 bp, Chicken  19866894355908_3
taatagtttcaagaagaacataaatttgatttctgctgcacgtacataaatggaagagctcaatatcttcaagaacctttttttctttctttttttttttttttgtggggttttttgcactaaaagctgtaggattatttatgggagcttcatgacttgacaytgggttggaaccatctcaccaccgtgcccataaccatgtccccaagtgccacatctccatggccttgggacacctccaggggcattgactccatcackccctgggcagcctgtgccaatgcctgaccactctgatamgcaccttgtgcaacatctccagcttcaggagctttcatggatccttctatactccagtggttgcataagcgttgtgtaggtgtagctctgatggatagcagtgggctcaaktttagtgatgcttccatgagtcttggctggatcactgaaggtgaagggtgtgttataaacctgagtctgtgctgctgcaaacatgctttgctttctctttgttttgcttttcagggttgtgtcactgagcaaaccaggcagagctccgcttctgtgctctgctatgtctggtccaaacctaagataaat

SEQ ID NO: 74016 - DNA, 600 bp, Chicken  19866894355908_4
tttttgcactaaaagctgtaggattatttatgggagcttcatgacttgacaytgggttggaaccatctcaccaccgtgcccataaccatgtccccaagtgccacatctccatggccttgggacacctccaggggcattgactccatcackccctgggcagcctgtgccaatgcctgaccactctgatamgcaccttgtgcaacatctccagcttcaggagctttcatggatccttctatactccagtggttgcataagcgttgtgtaggtgtagctctgatggatagcagtgggctcaaktttagtgatgcttccatgagtcttggctggatcactgaaggtgaagggtgtgttataaacctgagtctgtgctgctgcaaacatgctttgctttctctttgttttgcttttcagggttgtgtcactgagcaaaccaggcagagctccgcttctgtgctctgctatgtctggtccaaacctaagataaatcatatatatatatatatgtgtgtgagtgtttatataatgattaaactgaagaaggtccagaaaaatggtggttgataacgcactgccaacgtatgatgcctttatgataat

SEQ ID NO: 74017 - DNA, 600 bp, Chicken  19866894355909_1
ttcaaacatacctgaagagctcgtcttgcaagtgtgtagcatcttctccttctcttctgcatcacaacaaacgtcctgctcgctacactgcacatcatggaacagcacaaataaactgtcattaaccttttccgctgatggatttgatttccatcttacacatttcattaaacacttccctacaacaccaatgttagtaatgaaactgccaggacttctcttctgccagctgtctggggactacagagccctgaagtctctttatatttgtaattctgagaggacagatttgtaaaagayaaaagccacaatgccttgtcatatatacataaatactaaatctgtgcacgcaactgaaaatgcattactcaccaaagctttaagtctatgttctactgaggttgagcaacaatcagtgatcctgcctcatctcatatgactgaaagaggacaaacagctagggaaactgcagggaagggttttgtgtagccaggtggtaattaaattacgctcatctacatccaaatctgctttcttaagaagaaataagaagtaacattgctaatccatttgcatatatttcccttgagaacaagaaaa

SEQ ID NO: 74018 - DNA, 600 bp, Chicken  19866894355912_1
acagccaaattaatagtgagcatataggcaagtgcagatcacatagttaggggtaacgagcttgattcttgccctagcaagtcaggtttacccctcctatgtagaggcacaggattagtaactcaggcacactttgggcaaactggagctctttttgctatttgcattcacaatttaagtatgttgaatttatgaagaattcaacagatattttcaaggctggcaattaaacctatcagaaatattgaggttcagcctctcagtgtccttccatatagtcttcctcttctgaatgcaggygtgtttttttattttraaagatttagtaacagtttcagttaatctagagcatggcagtatagaagacattagctgtgaactagtaaaagcttcttttaaagctttttgcattcctgcctattttagctgttgtgtaaatatgtcaggcatttactttttgttatctgagtcttcaggtttcccctaatggtatcactcaaaggaaaaccttaatcataaattattgaaaataaattccttaccaaactggccaggcyagatagtgaatcatgcatacaactgtggtttccaaatctattt

SEQ ID NO: 74019 - DNA, 600 bp, Chicken  19866894355912_2
tgagcatataggcaagtgcagatcacatagttaggggtaacgagcttgattcttgccctagcaagtcaggtttacccctcctatgtagaggcacaggattagtaactcaggcacactttgggcaaactggagctctttttgctatttgcattcacaatttaagtatgttgaatttatgaagaattcaacagatattttcaaggctggcaattaaacctatcagaaatattgaggttcagcctctcagtgtccttccatatagtcttcctcttctgaatgcaggygtgtttttttattttraaagatttagtaacagtttcagttaatctagagcatggcagtatagaagacattagctgtgaactagtaaaagcttcttttaaagctttttgcattcctgcctattttagctgttgtgtaaatatgtcaggcatttactttttgttatctgagtcttcaggtttcccctaatggtatcactcaaaggaaaaccttaatcataaattattgaaaataaattccttaccaaactggccaggcyagatagtgaatcatgcatacaactgtggtttccaaatctatttagcaatgctgcttagg

SEQ ID NO: 74020 - DNA, 600 bp, Chicken  19866894355912_3
tctcagtgtccttccatatagtcttcctcttctgaatgcaggygtgtttttttattttraaagatttagtaacagtttcagttaatctagagcatggcagtatagaagacattagctgtgaactagtaaaagcttcttttaaagctttttgcattcctgcctattttagctgttgtgtaaatatgtcaggcatttactttttgttatctgagtcttcaggtttcccctaatggtatcactcaaaggaaaaccttaatcataaattattgaaaataaattccttaccaaactggccaggcyagatagtgaatcatgcatacaactgtggtttccaaatctatttagcaatgctgcttaggtaacattgaaagagatctgcagaaatgataattaatgctttaaacacccacaccaaagtaggtaaatacatactattcctctttcatgtagggaagattagagtgtagggagttaaaaacttatccaaggcaatagagagagccaaagttatgataatatctctgtgggttgtttctgattcctgctattgcttgacccaagtacatcagctgagccttgtgctgtttccatgatgttata

SEQ ID NO: 74021 - DNA, 599 bp, Chicken  19866894355927_1
  misc_feature (1)..(114): n is any nucleotide
nnnnnnnnnnnnnnnnnnnnnnnnnnnnnnnnnnnnnnnnnnnnnnnnnnnnnnnnnnnnnnnnnnnnnnnnnnnnnnnnnnnnnnnnnnnnnnnnnnnnnnnnnnnnnnnnnnaaatatgtgtgtggcagcagaagcacctgtgccaagacaaatcatcatcaaacctgatcaaaataatgcaaataatcaacccagactggtcctcaaaaaaacacagcttacacctactgctgatttcttcagttaaacacattactctcagaagaggagcatagtgataaggacccatcactctgrgggaaccccccccagaccacctatgtccctgaaggcaacaggaaaacactgtcagggtgtcagccccgagtatttattccttttgtgccatttactccagtatgaccttcacatccactaggaagatgtttgaaagctctgagaagatgcaaaaacccagcaagtgctacagggtgccagttatggtcatacactgagccctgtgataccagagtttttcaggctcagctcctaactgactcagctcacatgatttctttcacctgctgtggacttttgggaggtattggggagggcac

SEQ ID NO: 74022 - DNA, 600 bp, Chicken  19866894355927_2
cccgagtatttattccttttgtgccatttactccagtatgaccttcacatccactaggaagatgtttgaaagctctgagaagatgcaaaaacccagcaagtgctacagggtgccagttatggtcatacactgagccctgtgataccagagtttttcaggctcagctcctaactgactcagctcacatgatttctttcacctgctgtggacttttgggaggtattggggagggcacaatcctttgtagcttgctaattatgctctcaagctgctctatagcctcccccctcgttgtcctcycagtgacacttgtacaacccctgaacaaaytgcactcaggtgacagcagaccagcccttctgctgcaggtgatgactgctctgaaggatgagagtgtacaaggaaaacatcccttgctcagacaggatgtgcttgtcaagactaagggcttctaagtgtgttcagtgacccgtgtgtatcacttcagatttagctgccaccatctccaaactacctttgagcaaccacacacctccctgtatctacatgaggtaagaccactggaaaggtgcgttacacgagaggacagcttgctcagca

SEQ ID NO: 74023 - DNA, 600 bp, Chicken  19866894355927_3
ctccagtatgaccttcacatccactaggaagatgtttgaaagctctgagaagatgcaaaaacccagcaagtgctacagggtgccagttatggtcatacactgagccctgtgataccagagtttttcaggctcagctcctaactgactcagctcacatgatttctttcacctgctgtggacttttgggaggtattggggagggcacaatcctttgtagcttgctaattatgctctcaagctgctctatagcctcccccctcgttgtcctcycagtgacacttgtacaacccctgaacaaaytgcactcaggtgacagcagaccagcccttctgctgcaggtgatgactgctctgaaggatgagagtgtacaaggaaaacatcccttgctcagacaggatgtgcttgtcaagactaagggcttctaagtgtgttcagtgacccgtgtgtatcacttcagatttagctgccaccatctccaaactacctttgagcaaccacacacctccctgtatctacatgaggtaagaccactggaaaggtgcgttacacgagaggacagcttgctcagcacaagtggcagtgcagcaccagagccagcac

SEQ ID NO: 74024 - DNA, 600 bp, Chicken  19866894355927_4
tgaaggatgagagtgtacaaggaaaacatcccttgctcagacaggatgtgcttgtcaagactaagggcttctaagtgtgttcagtgacccgtgtgtatcacttcagatttagctgccaccatctccaaactacctttgagcaaccacacacctccctgtatctacatgaggtaagaccactggaaaggtgcgttacacgagaggacagcttgctcagcacaagtggcagtgcagcaccagagccagcactgagcacccatggcttttggaggcagcagtgtcccagctgtggtccacgtrtgctgccactccttgcttcgggcacyggtagctctgctcagagctgtatcccacatgcagagattgggaaaaataactgtccaacagccacaaagctttgtggtagtgtcctgataacacaggtgtgacaactgcccacagctgctcagacgtagtgaacaaaacccactgtcctgtcctcaggccatgctgggtggaggagctctgaccaagagtgtgacttcacccaccacaaactcatctagcaacacaaagatgtcacctttgggattagctctgacatggacacgctgctcttct

SEQ ID NO: 74025 - DNA, 600 bp, Chicken  19866894355927_5
catcccttgctcagacaggatgtgcttgtcaagactaagggcttctaagtgtgttcagtgacccgtgtgtatcacttcagatttagctgccaccatctccaaactacctttgagcaaccacacacctccctgtatctacatgaggtaagaccactggaaaggtgcgttacacgagaggacagcttgctcagcacaagtggcagtgcagcaccagagccagcactgagcacccatggcttttggaggcagcagtgtcccagctgtggtccacgtrtgctgccactccttgcttcgggcacyggtagctctgctcagagctgtatcccacatgcagagattgggaaaaataactgtccaacagccacaaagctttgtggtagtgtcctgataacacaggtgtgacaactgcccacagctgctcagacgtagtgaacaaaacccactgtcctgtcctcaggccatgctgggtggaggagctctgaccaagagtgtgacttcacccaccacaaactcatctagcaacacaaagatgtcacctttgggattagctctgacatggacacgctgctcttctctccatgtcagccttttacagtgaca

SEQ ID NO: 74026 - DNA, 600 bp, Chicken  19866894355927_6
gggattagctctgacatggacacgctgctcttctctccatgtcagccttttacagtgacagaacctttgcagaagccaaactccttatagaaagagaaaaaaaaatgcagccctggtcactccctgcttggtgagcttgtgacgtttgacattcacgtctggtgtttgctatgggacacaggagatgctactcctttgtctcacaccaaaacagatttggagtcggtgcagcccgtcaggctctgcaggcacctgctgcatctcctcctctctcctgtgccagaaacaagagctttcctyctgctctatccagtatgacgccggatcagagactgccagcagtggttacacaaagagcagcgccagccagatctgttcatctacacactcagcaattttgacaaaaatgaaagtacaaggcagataatgctcacatctctcacccaagcatcttgcctatgcccaacatgagccttgaactcgaatcacctcctaatcccttgcatccatcatcattatggagtggtttggcttttcatttcttttctcccccccgggaggagggtgagggaagcaaccagcccggctggttctgggcaa

SEQ ID NO: 74027 - DNA, 600 bp, Chicken  19866894355930_1
tggctatatagttgacataggtgtccatacacttgagtgggctggtgggctcagtaaactataatcaatgggacaaattccagctggcagtcagtttctactactgtatctttgacacattctggggtcaatcacatttaatattttcattaatcatctgtataatgagaccaaatgcatgtgtataatgaatcccaaattgaaggcaacactcaatatattggagggcaaggttatatcatcatgatagaacctagtttctggttatatccattgatcttttgagggacagaccaggayacatagaacatagtagatgggtaatgcattctgggttgtctgatcagaagaaaataaggcagcggcaaggcattcacgcaggtggctcacaaatggcactagaagaccttcttaactctgcaaagacttttgaaattaggaatttactaagttttcaaagaattctatgaagtccagtcatgtttcatggaggacttgaagagaaattcacagtggtctcaaagttaatggaaaggctaggcgtaactaagggtaagctagttacacataggttaacagggttacgtagggaaaggaagt

SEQ ID NO: 74028 - DNA, 600 bp, Chicken  19866894355936_1
tactactttacagaaggcagttcaggggagatgatcatttgagaaggtctggtgttctctgcaatgagactctaagagcagctttaggtcttaagtggtctgtactgctgaagcatctgacatgtgaacggggtggtggtatgtgtttcatggaacacgttgttctgtttgtttagctgcatactggactttgagaagaggcatgagaggaaaacagacagaaattaactgcttttgcagctgtggctggtgtgaagactttaaagagtgtaaagctattgctgagtttatcaaatccayagagtggattgcatttgtcttgtctattacctcttcttagaaatggaaagtgctttgtgaacagtagtgattatcagtgtggttgtgaaagtatyttgggctcttaaaacatttcacaactaaaggcatttgggatcattgccagtgactacttacggtggtttgtctgtggctcctaatttgatcactcttagtgcatctgtccccttaatagccatgtcatctattctgtgctgaaccccaactctctcagcctgtctccatgggggaggtgcttcaagtgctctgatcagtcttatg

SEQ ID NO: 74029 - DNA, 600 bp, Chicken  19866894355936_2
tggtctgtactgctgaagcatctgacatgtgaacggggtggtggtatgtgtttcatggaacacgttgttctgtttgtttagctgcatactggactttgagaagaggcatgagaggaaaacagacagaaattaactgcttttgcagctgtggctggtgtgaagactttaaagagtgtaaagctattgctgagtttatcaaatccayagagtggattgcatttgtcttgtctattacctcttcttagaaatggaaagtgctttgtgaacagtagtgattatcagtgtggttgtgaaagtatyttgggctcttaaaacatttcacaactaaaggcatttgggatcattgccagtgactacttacggtggtttgtctgtggctcctaatttgatcactcttagtgcatctgtccccttaatagccatgtcatctattctgtgctgaaccccaactctctcagcctgtctccatgggggaggtgcttcaagtgctctgatcagtcttatggcctcctctgggcctgctccaacacatccatgcccttctgctgggcaccacgctgctggagggggggggctcacgggagtggagtagagcaggag

SEQ ID NO: 74030 - DNA, 600 bp, Chicken  19866894355937_1
aaattgcttctgtagaaatagaggatggacctcttgtgtgtgagagatccgagctgccacagaaagcacgtaaaatctcctttcatgatctttattttaaaaattggcttgatttcctttttatttttcatgtgtcctcactatttctactggaagggatttccagcgcctgtctatttataccatttcttctcgtgccaacattgtctcttctcttaaataactttcctctgcctgctgcttgcctccttgatgcatccacaggcagctgtcagatctcccctcagccttttctccttyggcaaaacaagtcratcccatttaataacctcttgtgggagagtccccattccccagattcttcctgccctctgctcctctttttgggtgtgctgatgagcactgctaccctgcatgcccagctccgggtccacgagccctcccttcccaaagttccccatccaacacattttaggatcacatcatcatctgaggactcagaagaaaggtcaggacggttctttcttcactttcacccctgccagtaacaaaacaatcactgcttaataacgcaacaattaatcatatccattgtgtcac

SEQ ID NO: 74031 - DNA, 600 bp, Chicken  19866894355937_2
gaaatagaggatggacctcttgtgtgtgagagatccgagctgccacagaaagcacgtaaaatctcctttcatgatctttattttaaaaattggcttgatttcctttttatttttcatgtgtcctcactatttctactggaagggatttccagcgcctgtctatttataccatttcttctcgtgccaacattgtctcttctcttaaataactttcctctgcctgctgcttgcctccttgatgcatccacaggcagctgtcagatctcccctcagccttttctccttyggcaaaacaagtcratcccatttaataacctcttgtgggagagtccccattccccagattcttcctgccctctgctcctctttttgggtgtgctgatgagcactgctaccctgcatgcccagctccgggtccacgagccctcccttcccaaagttccccatccaacacattttaggatcacatcatcatctgaggactcagaagaaaggtcaggacggttctttcttcactttcacccctgccagtaacaaaacaatcactgcttaataacgcaacaattaatcatatccattgtgtcacacagacttcagaga

SEQ ID NO: 74032 - DNA, 600 bp, Chicken  19866894355937_3
gtgggagagtccccattccccagattcttcctgccctctgctcctctttttgggtgtgctgatgagcactgctaccctgcatgcccagctccgggtccacgagccctcccttcccaaagttccccatccaacacattttaggatcacatcatcatctgaggactcagaagaaaggtcaggacggttctttcttcactttcacccctgccagtaacaaaacaatcactgcttaataacgcaacaattaatcatatccattgtgtcacacagacttcagagatgttatatacatcatattasggaatattgctacaattagctccacaagctattccattttctcattaacaatagcaaatgaggacgttgcttcttcctctgcaaatttcagtccctgtgcgtgcactcagacatgagcaaataaatgcacgcattcattggctcaggaacaatacagaaaggtaaaagatcggcttcctcttcacatcttggaaaaagcaattaattcctcctactattactattgctgcctcttcatcaacgttgtgtctattcatggcaaagcatactgcacaggcagacaaaaaaaaaaaaaatcac

SEQ ID NO: 74033 - DNA, 600 bp, Chicken  19866894355941_1
gatgaagtaatattcaataactcaaacagggagatataaatcgctatatagctcttctgttctgtacatagtcagcaaaaagtattaaatcctcacactatgagctaataatgatattatcattaatggctatatctagcaaaaaaccgtttggagtgtgttctgttacaaaactgataatgagaatgtctggtgcactgagaagatttaaagggcagacagtcttctaaaaagtttctagcctataggaactagaacaattttctgtgatgaacgagactactgaaaaaacttcagttktaatgttttttaatcagttatgaatccagtgggaaaataatggaagtgcattggagacagaataaaatcaytgatatttatccaggattttgaagggaaaaataaaagataaaacacaatagaaaataaaggatacaacacaacagatgagagtaccaaaaaagccaagagggtatctggagatagaagatgaaatcagcagtgtcacaggtggaagccatggttaataagaaaccatggtaacaatttggtcagttgcttaagcattttttgtgaagaatgctgaatcataaatgtaag

SEQ ID NO: 74034 - DNA, 542 bp, Chicken  19866894355941_2
tcagcaaaaagtattaaatcctcacactatgagctaataatgatattatcattaatggctatatctagcaaaaaaccgtttggagtgtgttctgttacaaaactgataatgagaatgtctggtgcactgagaagatttaaagggcagacagtcttctaaaaagtttctagcctataggaactagaacaattttctgtgatgaacgagactactgaaaaaacttcagttktaatgttttttaatcagttatgaatccagtgggaaaataatggaagtgcattggagacagaataaaatcaytgatatttatccaggattttgaagggaaaaataaaagataaaacacaatagaaaataaaggatacaacacaacagatgagagtaccaaaaaagccaagagggtatctggagatagaagatgaaatcagcagtgtcacaggtggaagccatggttaataagaaaccatggtaacaatttggtcagttgcttaagcattttttgtgaagaatgctgaatcataaatgtaaggctctcttctaga

SEQ ID NO: 74035 - DNA, 600 bp, Chicken  19866894355944_1
gaaaccatctccccttgtcctgtcacaacagaccctgtgaaagagtctgtctcctttattataccccccttcagatactgaaaggctgctctcagatcaccttgcagctttctcttctccaggctgaacagctgcagctcactcagcctgtcctcataggagaggtgttccatcccttgcatcattttctctggccctcttctggacatacttcaacaggtctgtgtctctcctgtactgcggactccacatctggatgcagtactccaggtgaggcctccccagcacagagcagagggrcaggatcacctctggccatgcttcttttgatgcagcccagggtacagtttgatttctgggctgtgagggyacactgctggctcatgtccagcccttccaccagtacccccagttcttttccagcagggctgtgctctgtccttacatcccccagcttgtactgacagcaggggttgccatggcccaggtgcgagacctcatacttgaatttgttcaacctcatgaggttcacctgagcccactgtttgagcctaagtctctctgaatggcatcctgtcccttgggcatgtcagccacacc

SEQ ID NO: 74036 - DNA, 600 bp, Chicken  19866894355944_2
tcagatactgaaaggctgctctcagatcaccttgcagctttctcttctccaggctgaacagctgcagctcactcagcctgtcctcataggagaggtgttccatcccttgcatcattttctctggccctcttctggacatacttcaacaggtctgtgtctctcctgtactgcggactccacatctggatgcagtactccaggtgaggcctccccagcacagagcagagggrcaggatcacctctggccatgcttcttttgatgcagcccagggtacagtttgatttctgggctgtgagggyacactgctggctcatgtccagcccttccaccagtacccccagttcttttccagcagggctgtgctctgtccttacatcccccagcttgtactgacagcaggggttgccatggcccaggtgcgagacctcatacttgaatttgttcaacctcatgaggttcacctgagcccactgtttgagcctaagtctctctgaatggcatcctgtcccttgggcatgtcagccacaccacacaggttgacactgtctgcaaactttctgagggtgcacttgatcccacctttgatgtcattgctggaa

SEQ ID NO: 74037 - DNA, 600 bp, Chicken  19866894355949_1
taagctcagtaaaacacagacacgttctaactcatgaagaagaagaatcttaggatctaaggagaaaagcattcttaaatcacatcatctgactagtgagatatgaaagaataccatggtgagcaactggaagaaaaataggattttgtgtgagaatggagacagttttagctgaatatttcatttcgggaagtaggctgagaagttaaagcatacaaaacagaaaagagagggtccatatttttctgtctttttcttaagtagccacgaaggccctgcagtgatgggacaaccaccackcctgctgggagaagagctgccacatccaaggatgtttcccagtaggaggcattttctttgtccttttgctcttaattacttaccttgatatcacataaaaatgtatggtacacaatgcaaagcagcaacaatgaaaagtaggtattacagacaaactaaaagcagaaatttttacttactgtatttatagaaactcagtatcatatgttaccattacttttgtcagtgctttggaaagagctctatagagccgtaacaaggaagcttcaatgaaggagaccttatcttttttgaaaagta

SEQ ID NO: 74038 - DNA, 397 bp, Chicken  19866894355949_2
cccattacctcttgttatgtcacatacattttactcttaaccttcagatattcataaacagtggttaagattcccccctcagtcttttcttctccagactgaacacaaccacatctctcagcttttcctcaaacagaagatgctccaggccctttatcatctttgttgtcctctgctggactccttctaggacatctgtcttttctgaactggggaacccaaaaatggacatagcattccagcctcatcagagcagagcagaggggaaggatcacctcccttgacctgctggccacgctyttcttaatgcaccccaaggtaccatcagccttcttggccacaagggctcagtgctttgtgcacttagacattgtgttaagggacgtggtttagtgcg

SEQ ID NO: 74039 - DNA, 599 bp, Chicken  19866894355955_1
  misc_feature (1)..(25): n is any nucleotide
nnnnnnnnnnnnnnnnnnnnnnnnntctttttttcttttctttttttttttggctgtaaagaatagcacgcgtaactcgttaatttatttcctaacgtctataccaaacaaaagatgctgggggaggggaaagcccctgccaagatgagctgagcccttcagcacatggcatcaaatcacgaggactcaaaatgagtagaggccaaattctgcagtttggggttttgtgccaatctgaaagctgcagaaattggtccacgagaaattgatccgcaagggccgggcatgtgctctgtacaygatagcctcagtcgtttgatttcagtggagctgtgccggtcctctgagcctggcactgctctgagaagaaaaatctgtgtgcctgaatgttgtagtctgggaggagctgtkggtgagacgtgcaagactatgacaagagactaggtagggttcaaatgcacttcacttcgccgagttggcattgtaatttcaggggtttcaaaatcactcatttatatggagcagtcttttgattctgttcaccatatttgaatattaaactaataaacatcacttgataatttaccgctatctgtgag

SEQ ID NO: 74040 - DNA, 600 bp, Chicken  19866894355955_2
aagatgctgggggaggggaaagcccctgccaagatgagctgagcccttcagcacatggcatcaaatcacgaggactcaaaatgagtagaggccaaattctgcagtttggggttttgtgccaatctgaaagctgcagaaattggtccacgagaaattgatccgcaagggccgggcatgtgctctgtacaygatagcctcagtcgtttgatttcagtggagctgtgccggtcctctgagcctggcactgctctgagaagaaaaatctgtgtgcctgaatgttgtagtctgggaggagctgtkggtgagacgtgcaagactatgacaagagactaggtagggttcaaatgcacttcacttcgccgagttggcattgtaatttcaggggtttcaaaatcactcatttatatggagcagtcttttgattctgttcaccatatttgaatattaaactaataaacatcacttgataatttaccgctatctgtgagtcagtcaaaggggaggtggctgcatctcaccacgctctgttctctttcacgctttatcacattttatctacactgaaaatattatgggtgtttttgtcgcacactttcaatt

SEQ ID NO: 74041 - DNA, 600 bp, Chicken  19866894355958_1
tgtaattaatgtcagtgagaagtaacattaatcccacatactgccagaagcagggaacaagtctcctggtatttatgtccttctccccccttagcagggggaagtttcctctttgaattgattcaagggagctgtgataataacgggtccttgaaggtgattctctcacgtctgaattaagaaatgagaaagagaagacccaagaagacctgcagcagagattaaatttgcccagactcgggggagataaggatggcagtccagcacctaaatatacctgtgagcttcttattagttctkagatatgctcatcctagataggtttgtccagaataaagagcagctgttttttcttaaatcaagtcaagtttgtccctgcataagtagagcattactctggtggaagagctgcagggccatcctcacactgatgacagcaataggcaccgttagactccaccttaaagcacaggatgggaagtgttgcttgaaaaagtccacccaaatgagtattactgaatggtttgagactgactctttgaagacaggcagcaggaaagtcaaagtgacagatagggaactgcaacaatttcaaccaga

SEQ ID NO: 74042 - DNA, 442 bp, Chicken  19866894355972_1
aggcatttctcccattacataagtggcccatacatacagtgctgaatgccttctgagtcttgtgtaacaacagatttcaaatgataaatcagaacacgagcaccacttcaggctttgaaatacagcttacctcttaccaaatatgatgtgtcaaattaattatgaaattcagaagaaagaagaaacctcttagatgatccaagcatctccctgcaagtccaggactgtttccagtgaaatgcaggattggcagaagagagatttattgccacagtttcttaattctatattttgtacctyagtaagccatcctatcctgcttcacatggtgcctttaacaagtagtcaaaagtaatttaagaagtaaaacgcacttgtcatcacaatatgcagtgctgagcactgcttatttcctgtaagactttgttaaaaaataaattga

SEQ ID NO: 74043 - DNA, 599 bp, Chicken  19866894355979_1
  misc_feature (1)..(72): n is any nucleotide
nnnnnnnnnnnnnnnnnnnnnnnnnnnnnnnnnnnnnnnnnnnnnnnnnnnnnnnnnnnnnnnnnnnnnnnnctgctagacagcagtttgctggagttaatgcaccttcttgaaagtcactgcttgacccgaccttgtgccttgtgcaaaaaggcagaggagaatggttcctcacctcgcagtctatgaatgtcataaaatcattgacttaatgagatgagataaaagaaaccaagttaaaagcgtttacagctatttgaatgctactaattatgccaaagagcattgcaggagaacagrgagagaaaaaaatatggcaataaccataagggaaaggcagaggagggaagggcagaacagcagaagatccattttcttcttgtgtgcctgcacagttcctcatatagaagatctacattatcagtaccaacaataattacgacactggctcattaggaaggtacaacaggtaaacactgcagtcaacacaggaaaatcacacctaccgtagctgtgacccttgaagcaaaatgactcttgttaataacgaaggaggagggcaggctgtgtgtgcagyctctggttggatctgcacggaa

SEQ ID NO: 74044 - DNA, 574 bp, Chicken  19866894355979_2
aaagagcattgcaggagaacagrgagagaaaaaaatatggcaataaccataagggaaaggcagaggagggaagggcagaacagcagaagatccattttcttcttgtgtgcctgcacagttcctcatatagaagatctacattatcagtaccaacaataattacgacactggctcattaggaaggtacaacaggtaaacactgcagtcaacacaggaaaatcacacctaccgtagctgtgacccttgaagcaaaatgactcttgttaataacgaaggaggagggcaggctgtgtgtgcagyctctggttggatctgcacggaaayggttggagygttttgcttttgttatttttggaacagaacgttgactcagaaatcaatttatcctttctctggataaattaagacaaaaggtgagcctggaaatgaggagaaaacactgygcatcagcttgaggaaaatgctttaaccaacataaagtaagcggaggtttttgtttgtygtcttgtgaactggaggaggatttggcacaggacccgtccagaggtaatatcctccttcctcaactttctca

SEQ ID NO: 74045 - DNA, 550 bp, Chicken  19866894355979_3
agagaaaaaaatatggcaataaccataagggaaaggcagaggagggaagggcagaacagcagaagatccattttcttcttgtgtgcctgcacagttcctcatatagaagatctacattatcagtaccaacaataattacgacactggctcattaggaaggtacaacaggtaaacactgcagtcaacacaggaaaatcacacctaccgtagctgtgacccttgaagcaaaatgactcttgttaataacgaaggaggagggcaggctgtgtgtgcagyctctggttggatctgcacggaaayggttggagygttttgcttttgttatttttggaacagaacgttgactcagaaatcaatttatcctttctctggataaattaagacaaaaggtgagcctggaaatgaggagaaaacactgygcatcagcttgaggaaaatgctttaaccaacataaagtaagcggaggtttttgtttgtygtcttgtgaactggaggaggatttggcacaggacccgtccagaggtaatatcctccttcctcaactttctca

SEQ ID NO: 74046 - DNA, 541 bp, Chicken  19866894355979_4
aatatggcaataaccataagggaaaggcagaggagggaagggcagaacagcagaagatccattttcttcttgtgtgcctgcacagttcctcatatagaagatctacattatcagtaccaacaataattacgacactggctcattaggaaggtacaacaggtaaacactgcagtcaacacaggaaaatcacacctaccgtagctgtgacccttgaagcaaaatgactcttgttaataacgaaggaggagggcaggctgtgtgtgcagyctctggttggatctgcacggaaayggttggagygttttgcttttgttatttttggaacagaacgttgactcagaaatcaatttatcctttctctggataaattaagacaaaaggtgagcctggaaatgaggagaaaacactgygcatcagcttgaggaaaatgctttaaccaacataaagtaagcggaggtttttgtttgtygtcttgtgaactggaggaggatttggcacaggacccgtccagaggtaatatcctccttcctcaactttctca

SEQ ID NO: 74047 - DNA, 431 bp, Chicken  19866894355979_5
tcagtaccaacaataattacgacactggctcattaggaaggtacaacaggtaaacactgcagtcaacacaggaaaatcacacctaccgtagctgtgacccttgaagcaaaatgactcttgttaataacgaaggaggagggcaggctgtgtgtgcagyctctggttggatctgcacggaaayggttggagygttttgcttttgttatttttggaacagaacgttgactcagaaatcaatttatcctttctctggataaattaagacaaaaggtgagcctggaaatgaggagaaaacactgygcatcagcttgaggaaaatgctttaaccaacataaagtaagcggaggtttttgtttgtygtcttgtgaactggaggaggatttggcacaggacccgtccagaggtaatatcctccttcctcaactttctca

SEQ ID NO: 74048 - DNA, 372 bp, Chicken  19866894355979_6
cagtcaacacaggaaaatcacacctaccgtagctgtgacccttgaagcaaaatgactcttgttaataacgaaggaggagggcaggctgtgtgtgcagyctctggttggatctgcacggaaayggttggagygttttgcttttgttatttttggaacagaacgttgactcagaaatcaatttatcctttctctggataaattaagacaaaaggtgagcctggaaatgaggagaaaacactgygcatcagcttgaggaaaatgctttaaccaacataaagtaagcggaggtttttgtttgtygtcttgtgaactggaggaggatttggcacaggacccgtccagaggtaatatcctccttcctcaactttctca

SEQ ID NO: 74049 - DNA, 600 bp, Chicken  19866894355980_1
catatatgtgtgtggtaaacctgtgctcagcactgaatgtgctgctgggaggctgagaagaccacgctaccacagttcgtggctcttcaccaagcttccctcacaaaacagcctgcatctgagtggtggtgttcctcatcaataaagtgctttccactaacagtactaagattcctgagatgcacgtacttcataaagtaagccaggtttccagcctctcattactggaactgagtacagaatgttttgtattaattaggtttgggggatctcaaatttctcccatgtgtatgaagtgamatttaacagagctccttcacytatcagcttgctgatttcaggaggcatctgttttttcttcccctattgttttacagttcctaaagctctaaagatacctctaccaagactgtcttgtgagggaactcaatgtgattatacttattgggtcttcatttaaaccccctagtaacttatcttgctgttgctctctgtgtttctagctgagaaatccaaaactagggccatgtcacaagcctgttctagatacacagcatgtgttgctggcttgcaataaggctgccaaatggaaattgtctt

SEQ ID NO: 74050 - DNA, 600 bp, Chicken  19866894355980_2
tgtgctcagcactgaatgtgctgctgggaggctgagaagaccacgctaccacagttcgtggctcttcaccaagcttccctcacaaaacagcctgcatctgagtggtggtgttcctcatcaataaagtgctttccactaacagtactaagattcctgagatgcacgtacttcataaagtaagccaggtttccagcctctcattactggaactgagtacagaatgttttgtattaattaggtttgggggatctcaaatttctcccatgtgtatgaagtgamatttaacagagctccttcacytatcagcttgctgatttcaggaggcatctgttttttcttcccctattgttttacagttcctaaagctctaaagatacctctaccaagactgtcttgtgagggaactcaatgtgattatacttattgggtcttcatttaaaccccctagtaacttatcttgctgttgctctctgtgtttctagctgagaaatccaaaactagggccatgtcacaagcctgttctagatacacagcatgtgttgctggcttgcaataaggctgccaaatggaaattgtctttgtggcacactgcctctgaac

SEQ ID NO: 74051 - DNA, 600 bp, Chicken  19866894355983_1
catccaaataaatatttgcagttatgaggttttaaagtgccatgcataactgatacaaacctgaaaattaagttatttaatggaggggttatatttacattggagaaaaaattatttttcccattgtggtaagctattatctgtttttcatacaattaatctcttcttactgtaagtagtctatcaacctaaaaatactatccataaatgcagaatctgggtagcagaaaacatgaaaaattttcagtcaattatatcaaagtcttgacatgcttgctttacatatgccatttctttccyttccatcatgagtctatctatttttaatttacattatatacactcatcagcaaataaatttggtcattaagaagytctctgaatttaatctaactacctaatatgaagtaataaacagtaaaccaaaacaaacctaaatacaaatagctcacatttacctccgcattgtagaatttggttttcacatctagtggtttgagcacctgagtgaaatggaaaaaagacaggttgacaattggtttctcagacatctttagtataaactgtctataagtgctaaatcttcaccgaagtggtatt

SEQ ID NO: 74052 - DNA, 600 bp, Chicken  19866894355983_2
tttaatggaggggttatatttacattggagaaaaaattatttttcccattgtggtaagctattatctgtttttcatacaattaatctcttcttactgtaagtagtctatcaacctaaaaatactatccataaatgcagaatctgggtagcagaaaacatgaaaaattttcagtcaattatatcaaagtcttgacatgcttgctttacatatgccatttctttccyttccatcatgagtctatctatttttaatttacattatatacactcatcagcaaataaatttggtcattaagaagytctctgaatttaatctaactacctaatatgaagtaataaacagtaaaccaaaacaaacctaaatacaaatagctcacatttacctccgcattgtagaatttggttttcacatctagtggtttgagcacctgagtgaaatggaaaaaagacaggttgacaattggtttctcagacatctttagtataaactgtctataagtgctaaatcttcaccgaagtggtattcttggaattttttcctactttttaccttaagcagaacaggtgcataaaggaacacacaatagtatcagctaaaaa

SEQ ID NO: 74053 - DNA, 600 bp, Chicken  19866894355987_1
ccacactaccacccttccttcctcatctaccccttcggaagagcttgtagccatccatcacagcactccagtcatgggagtgatcccaccatgtttcagtaatagcaactagatcacatgttagcctgacgcacagtcgcttccaactcctcctgcttgttgcccatgctgcatgcattggtgtagagtcatctgcctcaccctcagctcaagcatcgttcccctaggctaatctcttgtgagccttgttttgtcccctttccctgtcatagatagtttaaagctcttttgataagcccygctagcttgtgctctaggatttgttgctccctttgagataggtgggttccagggacagacagtaggccagaggctgagtaaactgccccatgatcaaagaacctaaagtttctggctcaacaccagcctctgagccagttattcattgcttgtgctttccaagcctgctccatgtccctcactgcccctgaaggtgtagaacaaaagattacttgagctcctgttccttgaactaagcaccctaaaaccctgaaatctctcttcataattcataggcttctctgagcaatttcatcactg

SEQ ID NO: 74054 - DNA, 599 bp, Chicken  19866894355988_1
  misc_feature (1)..(62): n is any nucleotide
nnnnnnnnnnnnnnnnnnnnnnnnnnnnnnnnnnnnnnnnnnnnnnnnnnnnnnnnnnnnnnctcccttggagggcacaggagtagccctcgtgctataaacttggatgagggcagtgcaaaactgcagctcttgaagtcgctgggtcaaaaacaccccagcgcaatgtaacacaaataggtaaggagaaaagcttgacttactgcagtaagggccctgccccggcagtagaacccagccttgcagggaccacttggcccagtctgccctggagcagcacagtagaaaccatggccacaygggctgcactctgacagtccagacagtccctttttgttactgtaggttccctctgggcagggctcaggtttagagctgccttcaccacagtagaagccctgcaagacaaagtcagcttaatacagcattcgggactcttctatttaatagatcccccacatacagcttcttctcttagatagccactaaagaacaactcaccactgggcaagctttgggttctgtcaaggcaggagagtcacagtagttcccagctggacacggtttgcacctgtcttcatcctctgcactggaattat

SEQ ID NO: 74055 - DNA, 599 bp, Chicken  19866894355989_1
  misc_feature (1)..(21): n is any nucleotide
nnnnnnnnnnnnnnnnnnnnnataataaaattggaaaggattaggaataaaatgttaagagaaagagctgtcagcatttattcattcagcctgatctacaatactatgcatgatattaaagcttgaagattctaaggaaagtttagcaggcaaagtcaaggaagagacaaatactgttctcatttatatactactgggtaaaaaacaagagacacaaaaagcagttaataaaaggctgcctcttttaatcagttcaaatatgaaaatatacaatgagatttactgagactatttccagayagactagtaatgtattacaagagragtagatctttcaagcaaaactgcttttttgtcaaagacccaacacttctaccattagcactttgggaaggttctattttaggcttactattacatgctacctcagactgaaagctcattagtagctgcaattaatcaggtgccttattttcagaaagaaagaaattcagctaagtattacattttagttcaaaattgaagtgtgcattttgaagcacgtctcttccagtcacccccacttatttatcatactgcactttgcattgtggcatggt

SEQ ID NO: 74056 - DNA, 600 bp, Chicken  19866894355989_2
ataaaattggaaaggattaggaataaaatgttaagagaaagagctgtcagcatttattcattcagcctgatctacaatactatgcatgatattaaagcttgaagattctaaggaaagtttagcaggcaaagtcaaggaagagacaaatactgttctcatttatatactactgggtaaaaaacaagagacacaaaaagcagttaataaaaggctgcctcttttaatcagttcaaatatgaaaatatacaatgagatttactgagactatttccagayagactagtaatgtattacaagagragtagatctttcaagcaaaactgcttttttgtcaaagacccaacacttctaccattagcactttgggaaggttctattttaggcttactattacatgctacctcagactgaaagctcattagtagctgcaattaatcaggtgccttattttcagaaagaaagaaattcagctaagtattacattttagttcaaaattgaagtgtgcattttgaagcacgtctcttccagtcacccccacttatttatcatactgcactttgcattgtggcatggtctcagggcacatgtgctagattctt

SEQ ID NO: 74057 - DNA, 600 bp, Chicken  19866894356002_1
gattagttttaccacaaagcatcagcgtagcatattcttgaaactatttttcctgttttccttcagtcattctttctctaaatagtaagaacttgcacaactgttgaaagatcgtgatgtcctagaacagccaagtaataaaaataatactcttgaaaagtgtaacaacactgagattcaaaaataaggttaaaatctacatcattttccatgatactcatatcttattcaattatttcagggttctgaactccacatgcagtttaagcaaatctaagtattttaagtcgtttgcatagyttattataaagaaaatagcaagacccacacaagaacagaactgaaagcagccaccagaaaatactgatcacagagaagctacggagcacaagacaggaaggaaaaagcagacatataggaagcactgataaatacaaagatacatacatcctggtaataacagcagtactaaaaagcaagcaacatttcattacatgagggagaaccaatcatgaaacttatttggagacaatacagaaccagattagatgcttgcaggattctaaaaaattgaatttcactgaatacaggaatttccct

SEQ ID NO: 74058 - DNA, 600 bp, Chicken  19866894356012_1
ctttgaggaaaaccatttttcctttaggggatttaacaaaaagcttcgtaaggaagatagcgtcagaacatggccttcatcacgtgctaaagaaaaaagaggcatggtaacacttaaactcttttgatttgtatctctctctaaaatggactttctgatctttttgaaccttaatctctgacaaatcagctgtttccatgaacaatgatagaataggttgggagctggtttcatcattgcctgcctgctttcaggcactttacatgctcctggttagttctctgttttagtttgcagatwatttatgtgccattgtgtctcagaagagccaagatgagcatgaatgtratagraggctctaaggraagcagtctttgttacagcagaggagaagccttggtctttactctccatagctttcaaaggtttcatcactgtcagtgggtttggatatgttttcacagactgggccatgctgtttttctacagttagtttttccaagagaagttctgcatccctggctgagaacttaacacgtcatgatttaatcctagaaagcacaatgcagccagcaattgtatgctgatacagccttgctt

SEQ ID NO: 74059 - DNA, 600 bp, Chicken  19866894356012_2
taaggaagatagcgtcagaacatggccttcatcacgtgctaaagaaaaaagaggcatggtaacacttaaactcttttgatttgtatctctctctaaaatggactttctgatctttttgaaccttaatctctgacaaatcagctgtttccatgaacaatgatagaataggttgggagctggtttcatcattgcctgcctgctttcaggcactttacatgctcctggttagttctctgttttagtttgcagatwatttatgtgccattgtgtctcagaagagccaagatgagcatgaatgtratagraggctctaaggraagcagtctttgttacagcagaggagaagccttggtctttactctccatagctttcaaaggtttcatcactgtcagtgggtttggatatgttttcacagactgggccatgctgtttttctacagttagtttttccaagagaagttctgcatccctggctgagaacttaacacgtcatgatttaatcctagaaagcacaatgcagccagcaattgtatgctgatacagccttgcttgctttaaatgtattcatccaccataaatgttttatctgaagaacatag

SEQ ID NO: 74060 - DNA, 600 bp, Chicken  19866894356012_3
aagatagcgtcagaacatggccttcatcacgtgctaaagaaaaaagaggcatggtaacacttaaactcttttgatttgtatctctctctaaaatggactttctgatctttttgaaccttaatctctgacaaatcagctgtttccatgaacaatgatagaataggttgggagctggtttcatcattgcctgcctgctttcaggcactttacatgctcctggttagttctctgttttagtttgcagatwatttatgtgccattgtgtctcagaagagccaagatgagcatgaatgtratagraggctctaaggraagcagtctttgttacagcagaggagaagccttggtctttactctccatagctttcaaaggtttcatcactgtcagtgggtttggatatgttttcacagactgggccatgctgtttttctacagttagtttttccaagagaagttctgcatccctggctgagaacttaacacgtcatgatttaatcctagaaagcacaatgcagccagcaattgtatgctgatacagccttgcttgctttaaatgtattcatccaccataaatgttttatctgaagaacataggaagt

SEQ ID NO: 74061 - DNA, 600 bp, Chicken  19866894356012_4
gaacatggccttcatcacgtgctaaagaaaaaagaggcatggtaacacttaaactcttttgatttgtatctctctctaaaatggactttctgatctttttgaaccttaatctctgacaaatcagctgtttccatgaacaatgatagaataggttgggagctggtttcatcattgcctgcctgctttcaggcactttacatgctcctggttagttctctgttttagtttgcagatwatttatgtgccattgtgtctcagaagagccaagatgagcatgaatgtratagraggctctaaggraagcagtctttgttacagcagaggagaagccttggtctttactctccatagctttcaaaggtttcatcactgtcagtgggtttggatatgttttcacagactgggccatgctgtttttctacagttagtttttccaagagaagttctgcatccctggctgagaacttaacacgtcatgatttaatcctagaaagcacaatgcagccagcaattgtatgctgatacagccttgcttgctttaaatgtattcatccaccataaatgttttatctgaagaacataggaagtaactgcaaggaa

SEQ ID NO: 74062 - DNA, 599 bp, Chicken  19866894356015_1
  misc_feature (1)..(8): n is any nucleotide
nnnnnnnnatcatattaatgcttttaaactgcaggattgcacaagaagaaacctgcattcaacggattatctaccatgaccttcaaagctttctctgtcgctgctttccagaggaaagagatatcctgtaagtgagacctgtagttcagttcctagatcacagagggctgattcaaatcaaggtattgggtattagtccggtcttatttaaattggcaagcaggaaaatctggcatgagtcatatattctaatctcgttttgcattaatttattttggttactcttttaaagaaaggtcyagtagcgctggttggtaaatactggattttgttttattattagctatagcttttccactatgctcagcaggcctttttgcyaaccagaaaaaaaacacattcaagtgtccacacacacttatttaagcaattatgcactaagacaaatatttattcagatcttaagtttaacacacttattacattagaaaaatggtaaacataacttttgttagcaggtcatctttttcattcacaattattgctcattcatagctgaagcaatttgactctcttcaagaacggatcttcattactaa

SEQ ID NO: 74063 - DNA, 600 bp, Chicken  19866894356015_2
ttcaaagctttctctgtcgctgctttccagaggaaagagatatcctgtaagtgagacctgtagttcagttcctagatcacagagggctgattcaaatcaaggtattgggtattagtccggtcttatttaaattggcaagcaggaaaatctggcatgagtcatatattctaatctcgttttgcattaatttattttggttactcttttaaagaaaggtcyagtagcgctggttggtaaatactggattttgttttattattagctatagcttttccactatgctcagcaggcctttttgcyaaccagaaaaaaaacacattcaagtgtccacacacacttatttaagcaattatgcactaagacaaatatttattcagatcttaagtttaacacacttattacattagaaaaatggtaaacataacttttgttagcaggtcatctttttcattcacaattattgctcattcatagctgaagcaatttgactctcttcaagaacggatcttcattactaaagaaaccactttaaaataaacttgatccacattcaaaatatcgttaaacaaaacaagaaatagcttcaaggactgacagcat

SEQ ID NO: 74064 - DNA, 600 bp, Chicken  19866894356015_3
aatgtgcatgcatctatgatcattgttttttttttatttatttatctttgcttttttgagctcaattctttctgcatacaacgcagttgaatcaagctgtactccttaattaaggaagctctgtaacaagttcttcatctgactttaagcccttcagcactgaaagcagtatttcaaggtaagttgtcacctgcctttacacacaccgtttttacaagaaatcagttaaggctccaatagcggcagcacaaggggttcagtctctgctccccctgccctccccgacacaagtctggtcaycctgcttctgctgtattccagaggtatctagcagctagcactctgatctcatgccttctttgacaggacaataactcagagacatttaagatcatttgcttttgagtactcagtgattcagaaatgcataataccactctggatatagagtaccactttccctccgcttctacttattcaattctctctaaataggttataaccatttattttaacattccaatcctgtgaaccttcccgctagatttcaagtaataccaagtagatgaaatttataatcacaaatgagaaatttcagct

SEQ ID NO: 74065 - DNA, 600 bp, Chicken  19866894356019_1
ttccctcacataaatgctttttcagaatccttgccagcagttctcttggagtttaatgtaccattctcagcctcagattggcaggactcctcatttcgccttcaaagtctgtcaggaacagaggtctatgtatttgtaaaatgttagggtgctttaggtgggtgaaagtagcaaaaggtggtcttgcactatcttattatctcactatcttattatcatgtttctcttttcaagagaaaagaattacctgcagtaatttgtaaattctcaaccccaagcagaaggaatacttatttttcygctctttctatactagaaaataaagctggagtggttggctggaaaaaaaaaaaagaggtggagacacaagagtagctgtaagtgaagtgggagagaaacagcatttggtgtgctcagactgggagaagaaataaaatcatctacatcaagagtttggaagaactggtgtataaaactgccattccaagaacagagattttagaaatctctcaagctagcactgctccaatctgacagcagaacagtaggcaccgtacccgtgcttattaaaaagactcagattgtcttggcagtcaaaga

SEQ ID NO: 74066 - DNA, 600 bp, Chicken  19866894356019_2
gctggagtggttggctggaaaaaaaaaaaagaggtggagacacaagagtagctgtaagtgaagtgggagagaaacagcatttggtgtgctcagactgggagaagaaataaaatcatctacatcaagagtttggaagaactggtgtataaaactgccattccaagaacagagattttagaaatctctcaagctagcactgctccaatctgacagcagaacagtaggcaccgtacccgtgcttattaaaaagactcagattgtcttggcagtcaaagactcatcagtctttctgcagtcgtrggcaatctttagaacaagttttgaagaaaagaataattaagacttaagacctacaggtaagtagaaaatgatagaagataaagtgattatgataaattcagctggtatctctgttgattttccagacgtagctcatctacctgggcactgaattgaagagctaacttgttaaatcaggttgatttgatcacttgtggtcatctcagccttagagtagaggagatagacacagagctggatctagggagcgaggaaggatccagcmcagatcaacctgaagaattactgagtgagaaggta

SEQ ID NO: 74067 - DNA, 600 bp, Chicken  19866894356019_3
gcagtcaaagactcatcagtctttctgcagtcgtrggcaatctttagaacaagttttgaagaaaagaataattaagacttaagacctacaggtaagtagaaaatgatagaagataaagtgattatgataaattcagctggtatctctgttgattttccagacgtagctcatctacctgggcactgaattgaagagctaacttgttaaatcaggttgatttgatcacttgtggtcatctcagccttagagtagaggagatagacacagagctggatctagggagcgaggaaggatccagcmcagatcaacctgaagaattactgagtgagaaggtaattaatgttggcattcttcatggttttggacctgatcctattaaagattttcatttattaccatgacacttgttaatgaagttttgaagtattggcagcatagatgaggaatgaaatgtaaatgtgctgcatggcaatggtgacsaaagcagtggaaataagatggcattgtctggggcagaatacaatccatgttttagggatgagctgtttggacatcagatgtcaaaaccaaggagttatcagggcttctttgtcagtaatg

SEQ ID NO: 74068 - DNA, 600 bp, Chicken  19866894356019_4
cactgaattgaagagctaacttgttaaatcaggttgatttgatcacttgtggtcatctcagccttagagtagaggagatagacacagagctggatctagggagcgaggaaggatccagcmcagatcaacctgaagaattactgagtgagaaggtaattaatgttggcattcttcatggttttggacctgatcctattaaagattttcatttattaccatgacacttgttaatgaagttttgaagtattggcagcatagatgaggaatgaaatgtaaatgtgctgcatggcaatggtgacsaaagcagtggaaataagatggcattgtctggggcagaatacaatccatgttttagggatgagctgtttggacatcagatgtcaaaaccaaggagttatcagggcttctttgtcagtaatgcagggggaggatcacttctggaagacaattcagccttactacctcagacaatgatctgaagtggatcacttgtggaggtgctactcttttgcactggaggtatctgtgaaacctatttggtcagctaaagttatgtcagatctgtcctgaccttaagaagagtgcctgctccaaaaaggt

SEQ ID NO: 74069 - DNA, 600 bp, Chicken  19866894356024_1
tgattagcaaagaacataattcagcatcccacaccaagaacccttgatttttatgcctttgctgtttagctagctgaatgcataactctgcattttgcagcataaaaattctccagtaagtgcatggtttggagccatccagagccaactgagtaagaaatcatccatgtaatgctgggcatatgcttaaagcatcaaagtctgttcaggaagctaaatggcccatgagctttgctgagtttattacttcttgaaaagcaaaaaattacttgtctcaggaaggaaatgcactgttcccawaagcatctgtagtttactggcaaagaaggatgacaaacccaattatgcttgcttctttctcatttttcttcaacaagcgaagtgcccaaccacaatgctaaaccatgtatttatttggttgcttcaaaatgacacgtgacggcaagaaaagtcaatttgcaaccatttatcaagtctgctgttggagttaataaatgctatatgagttttatattctcttgctggcttgttttggagaatttgccaccactgataaatctgaaagttcaagggaagaagttagaaagggaatatgtaatc

SEQ ID NO: 74070 - DNA, 600 bp, Chicken  19866894356031_1
tttcgaatatacttctgggcacctctgtgtgaaagtattattaggcagctctcggcactcgagagtatttagctgtcacactgcagcgtggagagggagaggccgggggagagttgcattgtgcatcttgtgaggaaagtggattacataaaattgtcagggaaacgctggttacggatttctattgtgtgggaagcagagcggtgcttttcacagaacacatgcctgtcttggaaaactgaaaggtgccaacactcgaaataacacactgggaagaaggtctctctgtgtggttccttrggttatataagcagtgcatgtgcacragtcttttccttcagcccagaaattcaaggttgctgcgaaactttcctagcggggctgcctgtgggagagaagcagtgagcgtgtggacacatgctaacaccaacactgtgaagtattttgctgtcagattgcagcgagtgcaccattaagaggctgtgaacattcctcagtcctaaccgaggctcaacacgctgatattttatatctggggaagaaagatggtcacctacccgtgttccccccttgtttacacctaaaaaattgtgcagaatt

SEQ ID NO: 74071 - DNA, 600 bp, Chicken  19866894356031_2
gtgtgaaagtattattaggcagctctcggcactcgagagtatttagctgtcacactgcagcgtggagagggagaggccgggggagagttgcattgtgcatcttgtgaggaaagtggattacataaaattgtcagggaaacgctggttacggatttctattgtgtgggaagcagagcggtgcttttcacagaacacatgcctgtcttggaaaactgaaaggtgccaacactcgaaataacacactgggaagaaggtctctctgtgtggttccttrggttatataagcagtgcatgtgcacragtcttttccttcagcccagaaattcaaggttgctgcgaaactttcctagcggggctgcctgtgggagagaagcagtgagcgtgtggacacatgctaacaccaacactgtgaagtattttgctgtcagattgcagcgagtgcaccattaagaggctgtgaacattcctcagtcctaaccgaggctcaacacgctgatattttatatctggggaagaaagatggtcacctacccgtgttccccccttgtttacacctaaaaaattgtgcagaattagctcgtcaagcagtggttaaatcct

SEQ ID NO: 74072 - DNA, 599 bp, Chicken  19866894356034_1
  misc_feature (1)..(142): n is any nucleotide
nnnnnnnnnnnnnnnnnnnnnnnnnnnnnnnnnnnnnnnnnnnnnnnnnnnnnnnnnnnnnnnnnnnnnnnnnnnnnnnnnnnnnnnnnnnnnnnnnnnnnnnnnnnnnnnnnnnnnnnnnnnnnnnnnnnnnnnnnnnnnntgcagctgaaggcttctttttgcaatgtacagtatagacatgtcacaaagactggtttaagcctcaaattgttcatagtgcttgagaacagtaaaaagagggaggaaaccaatagaatggtggtaatggaaaatgtttcctgttcttgatattcatgrgaaacagataatcgccacaacccccatgaagtacatgaatacagattatttctgttaatctcagtgtgatttgtctatagaactaaaaaagaaagctttctgttttgcaaagaggtagacataggctttggtacagaattgctcctgcatatgctggtaggattaggtataaagttacttttgagaaagattttgcaacaggcatcatctgattttgaaactgagattttaccataagaattcactgcacaagacaaggagaaacacaagttaatatagatggagtagttcaggtctat

SEQ ID NO: 74073 - DNA, 600 bp, Chicken  19866894356036_1
gtaaagtatcatgcattctctcaaatagatcttcacctcaagcttttaattcagttttttcaagttgctacgcagctgcatgtttagtatttttaattaaaattagaagggctgtgaaatccagtcttagatattaaaatccacgaagtttatcagagtaaaatatatttaagttcacttgaggtcttaaccagaaaaaacactgataaaaattcttagaatagagtatacattcttagaacagagaacatttttaataacttatccatgaagactataaagtttctcctaagcagtgartgctagctttatcaattccatcaaagactacatgtgcacaaagctctacagcccacattgtaacagctgagcaagacatacttttctaaaataaaatactggttgcaaaaaaagtacaaatgcagttctgtttgcttgcattctgttgctgatctcctcattcagctagcagcatctacccttacacatttcaaatatcactcacctcagctagttctagtatcacactagtaagaatagtttttaaagaaatacttgagactattcaagtcagttatcaataatcagtttctctaatgt

SEQ ID NO: 74074 - DNA, 599 bp, Chicken  19866894356037_1
  misc_feature (1)..(6): n is any nucleotide
nnnnnncctgcagtgaggtgtgctggtgacccagcagcgcatcccctgacctgccccaggcttccacggggattttgcgactcaaggctgcgaggctggcagagacaggtgggcacccagcagggagcagcaatgggacccccccaccacttctgtgggattttttttaggtggctaaagtaaatctaattaaagtagagcgtgtttaaatgagctttgtttaacatgcactttgtatagctgtgctgttaataatggcaggtcttgtttttattattagtgctatcgttttcttgtatytcctgatactcctaggaattgactggattatttatcagaagaattgggggtgggtttccatttctaaatgctgttttggaactgtcctgtgaacttgttcttgctgtgctcaggagacaccacagagtatcagagatgagatgcaagtctgtgctttcaggctaaaaagagaccatactccatagagaaactgtattctctttaaggagaaggcaaacagaagggagaaaaaatgtttgatttgagatacgtttgtagttttttggaagtagccttgtaaaaaaaaaaaaaaagtttct

SEQ ID NO: 74075 - DNA, 600 bp, Chicken  19866894356038_1
cagcaatgcaaggcaattcctgtggctgccgggcttggggtcaccgcctcaccagtgcacgcagcaccggctctcctaacagctgcctgcacaagctccctgccatcaagtcaggttgtcagctcggatataacattaacgattccccagccaaggagggaggcttcaaagtaatcggcctaaatgagcagccaaattagccccaatatatctgtcacagcaatactcatagtatttaaatactgaggtttatttaacatgtgctctgcttgcaagtacagcccttcaagacactacacrattattaagacagatttaaattgaccaggagaagccttctgcttgcttaaaaaaagaaaaaatcacactgatatactgtggctgtccactctgaggctagcagctgctctccctttcccttacatagcattagaggctaattcagcttggcagggagcatagcaagccctcttgtccagctcctgctctcagcatcaggacacaggaaccacagccgcccctggaaggacaagaccaggcaggaagcccagggccagctgtgggcttggtgggcccaggggccatcctgcagaactggct

SEQ ID NO: 74076 - DNA, 600 bp, Chicken  19866894356045_1
ctggagagatcagcgggatcaccaggagcaaagctttcccccaaccccccctcaccctcaaactgattggtattatgcacaaattcagctgggcaactgcgctctgctttcatagcacgctgctgcaagcacagctcgtgggaatggcagaactggaggggttgggaggaactgctggaggccgtctgtccaacccctcctgctgaagtagggaactcttggccacagatcaaaaatcaagtggaaagaaatatatatattttaagaaggctttccagcagtgtctccattggtgttatywtttttttttcccagagaaagagcagcatgtgatggctttctccactctcctcctttgaraacggcagagatgtggcacatgggaacgtggggcgatggctgatgatcttaagaggccttttctaatttattataaytttcttgtaactaataacttttctaaccttaacggctctaggatgagctgctcctgtgctggaggaagggacacttacttggaaccactgcgcacctgggcaccgtggtacaggtaaacgaggctgaggaaatgcaccaggaactgcagcagcactgtcagca

SEQ ID NO: 74077 - DNA, 600 bp, Chicken  19866894356045_2
tggagagatcagcgggatcaccaggagcaaagctttcccccaaccccccctcaccctcaaactgattggtattatgcacaaattcagctgggcaactgcgctctgctttcatagcacgctgctgcaagcacagctcgtgggaatggcagaactggaggggttgggaggaactgctggaggccgtctgtccaacccctcctgctgaagtagggaactcttggccacagatcaaaaatcaagtggaaagaaatatatatattttaagaaggctttccagcagtgtctccattggtgttatywtttttttttcccagagaaagagcagcatgtgatggctttctccactctcctcctttgaraacggcagagatgtggcacatgggaacgtggggcgatggctgatgatcttaagaggccttttctaatttattataaytttcttgtaactaataacttttctaaccttaacggctctaggatgagctgctcctgtgctggaggaagggacacttacttggaaccactgcgcacctgggcaccgtggtacaggtaaacgaggctgaggaaatgcaccaggaactgcagcagcactgtcagcac

SEQ ID NO: 74078 - DNA, 600 bp, Chicken  19866894356045_3
aactgattggtattatgcacaaattcagctgggcaactgcgctctgctttcatagcacgctgctgcaagcacagctcgtgggaatggcagaactggaggggttgggaggaactgctggaggccgtctgtccaacccctcctgctgaagtagggaactcttggccacagatcaaaaatcaagtggaaagaaatatatatattttaagaaggctttccagcagtgtctccattggtgttatywtttttttttcccagagaaagagcagcatgtgatggctttctccactctcctcctttgaraacggcagagatgtggcacatgggaacgtggggcgatggctgatgatcttaagaggccttttctaatttattataaytttcttgtaactaataacttttctaaccttaacggctctaggatgagctgctcctgtgctggaggaagggacacttacttggaaccactgcgcacctgggcaccgtggtacaggtaaacgaggctgaggaaatgcaccaggaactgcagcagcactgtcagcaccgtgtagaggttgaagatgttcggcagcgggcgctccttggacagagtcttcaaaggct

SEQ ID NO: 74079 - DNA, 541 bp, Chicken  19866894356045_4
gtgggaatggcagaactggaggggttgggaggaactgctggaggccgtctgtccaacccctcctgctgaagtagggaactcttggccacagatcaaaaatcaagtggaaagaaatatatatattttaagaaggctttccagcagtgtctccattggtgttatywtttttttttcccagagaaagagcagcatgtgatggctttctccactctcctcctttgaraacggcagagatgtggcacatgggaacgtggggcgatggctgatgatcttaagaggccttttctaatttattataaytttcttgtaactaataacttttctaaccttaacggctctaggatgagctgctcctgtgctggaggaagggacacttacttggaaccactgcgcacctgggcaccgtggtacaggtaaacgaggctgaggaaatgcaccaggaactgcagcagcactgtcagcaccgtgtagaggttgaagatgttcggcagcgggcgctccttggacagagtcttcaaaggctgggaacaaaaagcaagcg

SEQ ID NO: 74080 - DNA, 600 bp, Chicken  19866894356060_1
ttgtgcttatagcaggctggaaatcaattcactgacatgaaaagcaataaggtcatacagaggataagcaaacctcccactaagtgaggatcaaaagatttagctgcattccggaagagaatgagaaagaaaagtcaccaacagattagggtttgaaaaggaccaaaggacaaagtgtgggaagagctgagaacagagaaactgggggaaaagaggggagggaggaggggggaaagaatgtgtaaaatgaacataaaaggagatacattctcaacagttacagagaataactagtactcycacatacacacacacacacacacacacacaaaaaacagattgtctgtcactgcagaactccatttgtcaaatttaaaagtcctgcagaaagcaaaataagagacagggtgttttgccttttgattgcatgtttctttcccttttcaagtatttctagaaaatactttgaaattgaaaattgaaaaaaaattgaaaaaaaaatctttcaatttttcaaaactgatttccaagcagaaagaggagcacagtgggagacttaccctagctttgccacaaccacatttcaaaatttcagcattt

SEQ ID NO: 74081 - DNA, 600 bp, Chicken  19866894356063_1
agatacaagtacaggctagtataaacttgtactagtttagttgctggagagtagcagagaagaaagggatccgaatgtgttggctgacaacaggttcaacatgagcctgtactgtactagggcagtcaagaggacaaaccacattttgggatgcattagacatagtacaactactcagtcaaaaaaaagtgattctcctgtcatatttagcattggtgcagcctcaccttggaaactacacgcagttctggtctccatagtataaagaggatgttaacatctgtaacagcacccaaagascaaaaaagctagtaacagggctggaagacatgtcctgtgagaagagactgaggacagttgcattagacacctagagaaaagaaagctgagaggcaacctcattactttccacaacttcctggagagagggaattgagaagggaggtactggactcttctcccaggtcactagtaatagaatgtgtggcagtggtacaaaactgtgctggggggtttggaatcaacgtaaggaaacaagtttctttaccacgtgggtgctcaaacactggaattgtcttcctagaaaagacagttaacacc

SEQ ID NO: 74082 - DNA, 600 bp, Chicken  19866894356068_1
gcactgagcaaagtcccatgcgcccacggtgggcagcaacaatgggtccgcaggaggtgaggagaagggaagaatgagctgggttaggggaaatacagcctgaaagaaaaggaaagggccagtggatctgaaagccccgataaaagcccgagacaaaggacaaaggagcctgggagattaccaaagggaagtgggaggaggagcagggagaatgatgtcgagtggtacggtgatgatgggtcaatggttggatgagatgatctccggggtcttttccagcttttatgattctgcaagagytgtgtggaggtgggagatccccgggtagggcagagggtgctgaacggctcgctgctctccatatataagaacacagccttttcccctttcttgctgggagcacctggcaaactaagggacagatccagcagggaaacacgtctgtgtccatctgtagccccacgtctgcttgcacacccacaacagcagccctctctggctccccatccccaaccacacagaaccacggagatggcaggcagggagtcgggctgggcatccagcaccctgctgctggaggaagtgtcacactgctgctgt

SEQ ID NO: 74083 - DNA, 600 bp, Chicken  19866894356075_1
gagcaagtttctttttggactgtaaatttgctacagcaagctcagctctcacacagctgcccaactgattttatttttattaatgaacaaaaaggctaacctctccttacggatcataatgtcacttacctatgctgtgaactaatttagtcacacagcacttgtttcatacacaacagctctttcccactgatttgagtggtaaagtaagattctctagaccttacataaaaaagcctctggttttgtggctagtctgcatttttccatgcttcacaagaattaccaaaacaaaatgartaaaatcataacaaaaaagaaaacaagaaagaaacaaagctttagaatacataactgtgtttttgtacaattatctactttaacaagcacccatccagacatacagcacacatgcacattaactgcatcctcacattcatattaggtctttttcactagttgaattaccttgtctgcatccacttttcctttgataaattccttcttccaaaattccagtgcctgttccagggtcaaaccaatgccttttaagaaaagcccatattgcatacggcctccatgacggaggtgatggttctc

SEQ ID NO: 74084 - DNA, 600 bp, Chicken  19866894356080_1
gaataagctgtaattcttcatgagttctcaaggtgtgagagttctcacattaatgttctcacagtagtgatttttttaatctaattttactcttcttgcgcttcatctttgaaaatatgtaggttgttctggatgtagcatctccaatttctgtggaaattacaacacatataaagagcatataacactgttagagaaaattctcagctacaaaatgctaattttcaaccaagaccctaccattaaccattaactgccattaactaaccctagcattttttatcaacgatggacaagagyctgtgctcttaaaaatcagtatggctgtctgtaacgtggcttatttttcatactactgttgccactgctgaaatatacgacccagggcctcactgtccattgtttggtcaccataaacattcagcaggcattagtgaatgtcaacaggtgcctttttttccacacaaaggaattcaattccacaccttttcttcatatgagcatccatgtcagataccatgttgtcagactgaccttctgctaccatctgtcacacagcagcaaaatataggggaatattggtgggaaggttcagcctct

SEQ ID NO: 74085 - DNA, 600 bp, Chicken  19866894356080_2
cttatttttcatactactgttgccactgctgaaatatacgacccagggcctcactgtccattgtttggtcaccataaacattcagcaggcattagtgaatgtcaacaggtgcctttttttccacacaaaggaattcaattccacaccttttcttcatatgagcatccatgtcagataccatgttgtcagactgaccttctgctaccatctgtcacacagcagcaaaatataggggaatattggtgggaaggttcagcctctactgctataccaccaacatccacttctgatgttgtgggytaacgtaataagayaggaagcattattctcaatgaagttctcacaattttttaacaaatgtatatactgcccaaaaatgatgacatgaataaggcaggattatgaaatgaggcatatttttctctgataggatagatcttataaaaatcttattaagagaaagatcaaacttttcctgaagttgaatgcctgattacaacatttcatttgaaaatttgcaggtaatgtatatatgttgactgaaaatagagttgcaaatataccaaaaaatcagatgatttattttttcagaagtcttgc

SEQ ID NO: 74086 - DNA, 600 bp, Chicken  19866894356080_3
tactgttgccactgctgaaatatacgacccagggcctcactgtccattgtttggtcaccataaacattcagcaggcattagtgaatgtcaacaggtgcctttttttccacacaaaggaattcaattccacaccttttcttcatatgagcatccatgtcagataccatgttgtcagactgaccttctgctaccatctgtcacacagcagcaaaatataggggaatattggtgggaaggttcagcctctactgctataccaccaacatccacttctgatgttgtgggytaacgtaataagayaggaagcattattctcaatgaagttctcacaattttttaacaaatgtatatactgcccaaaaatgatgacatgaataaggcaggattatgaaatgaggcatatttttctctgataggatagatcttataaaaatcttattaagagaaagatcaaacttttcctgaagttgaatgcctgattacaacatttcatttgaaaatttgcaggtaatgtatatatgttgactgaaaatagagttgcaaatataccaaaaaatcagatgatttattttttcagaagtcttgctacatattcgcaac

SEQ ID NO: 74087 - DNA, 600 bp, Chicken  19866894356085_1
aattttttttttgtgataaactaatacatctctccagcctttttattgtagatattggtgattgatttacaaggtgcagcacagattgttgtgatgagaattcatattaacaagggaataacatgtatataaatgtgtcataacccatctaaatcagtgttaacccttctcccttagttaggtctgagatctgcaagcatatttttttttgtaatgagaaagtgataagcaatgaatatcctaatttatttaatttcattttaatggattcaatttactttttttttcttaaacaaatgycaagttcagttgaagatgattaatcttggctattgttgtaaatatatcttctgtgctcaaagttactaactaaaatggtaatcaggctattttctgcccagtcctattagctaccacttcaaactgaagctccaaaggtttaaagactgcttctgaacagtcaagacctccctgtggcactagaaattaaactcaccttttcttctcccttttttcagattgcgtattccatcaggagtaatttgctctaattagaggttgtgtgttctgaatctataactatttctccaggacaagtaa

SEQ ID NO: 74088 - DNA, 600 bp, Chicken  19866894356087_1
tctcaacaggggtcaattttcccttttagtgaacatgcagctctaatcgatgctgcaattaagcacatagttacaagaaagaagtataacccttagtagcagagttatgtggtacttatagaggacttaattatttggtttcctcagcttttagaagcatagaaatactgttggtttagcttagcaactatatagatgaaatgcagctctgttacatacatctcatgagattaatctcaagtattttaaaaatgaaagcaaaaaaatggctagcactcttgtactatggaagagctttgwcrgggttcgtaaggtagcttccgatcctttcctctaaaggaaaaagcattttaggaaawctgtttcaccgaattcttaggtattgtgttctggtatatacagctgaaataactgaaatgcacatttactaaatatgcaagatactgttccattttatttgctggaagaattcaaactgcagaataaaaatgaaaaaatgccagggagaataaataagcattccacaaaaacaggctacataaacagtgaggtgaattgaaaactggccgaatgtctgagcacagagcactgtgatcaggc

SEQ ID NO: 74089 - DNA, 600 bp, Chicken  19866894356087_2
tcaacaggggtcaattttcccttttagtgaacatgcagctctaatcgatgctgcaattaagcacatagttacaagaaagaagtataacccttagtagcagagttatgtggtacttatagaggacttaattatttggtttcctcagcttttagaagcatagaaatactgttggtttagcttagcaactatatagatgaaatgcagctctgttacatacatctcatgagattaatctcaagtattttaaaaatgaaagcaaaaaaatggctagcactcttgtactatggaagagctttgwcrgggttcgtaaggtagcttccgatcctttcctctaaaggaaaaagcattttaggaaawctgtttcaccgaattcttaggtattgtgttctggtatatacagctgaaataactgaaatgcacatttactaaatatgcaagatactgttccattttatttgctggaagaattcaaactgcagaataaaaatgaaaaaatgccagggagaataaataagcattccacaaaaacaggctacataaacagtgaggtgaattgaaaactggccgaatgtctgagcacagagcactgtgatcaggcaa

SEQ ID NO: 74090 - DNA, 600 bp, Chicken  19866894356087_3
taagcacatagttacaagaaagaagtataacccttagtagcagagttatgtggtacttatagaggacttaattatttggtttcctcagcttttagaagcatagaaatactgttggtttagcttagcaactatatagatgaaatgcagctctgttacatacatctcatgagattaatctcaagtattttaaaaatgaaagcaaaaaaatggctagcactcttgtactatggaagagctttgwcrgggttcgtaaggtagcttccgatcctttcctctaaaggaaaaagcattttaggaaawctgtttcaccgaattcttaggtattgtgttctggtatatacagctgaaataactgaaatgcacatttactaaatatgcaagatactgttccattttatttgctggaagaattcaaactgcagaataaaaatgaaaaaatgccagggagaataaataagcattccacaaaaacaggctacataaacagtgaggtgaattgaaaactggccgaatgtctgagcacagagcactgtgatcaggcaaatgaagtcctgttgcaggccagtgaccagtgtacacccaggagctaagtgtcaagcc

SEQ ID NO: 74091 - DNA, 600 bp, Chicken  19866894356087_4
ccagtgtacacccaggagctaagtgtcaagccagtactgtttaccccctcattgatgaccagggtgataagaaagtcaacctacagtaagtttgacgatgatacagcgggaggttgtgctgccattcacaatgaccttgacaggctgaaaaaaaatggatgatgggaacttaatgaagttctacaaaggaaaatgcaaagtcctgcatgtgggaaggaatatcctcatgcactagtacagactaagggtcacccagctggaaagtagccctgcaaaaatggcctcgaggtccctgcaggmagcaattgatcaccacccagcaagatgcytttatggaaaagatgccagcagcatcttcggctgcattatgataagcaagtcaagggaggtgatccttcctttctactcagcactggtgagacacatcttgctgggtccagtcctaggcttgcctgtagcagaaaaatatggacatactgaagcagctccaggagagggccaaagagaggattaagagtctcaagcatctgtcagaagaggtgaggctgggagagctgtaattgttcagcctgcaaaggcctggagagactttatcaacat

SEQ ID NO: 74092 - DNA, 600 bp, Chicken  19866894356087_5
gccagtactgtttaccccctcattgatgaccagggtgataagaaagtcaacctacagtaagtttgacgatgatacagcgggaggttgtgctgccattcacaatgaccttgacaggctgaaaaaaaatggatgatgggaacttaatgaagttctacaaaggaaaatgcaaagtcctgcatgtgggaaggaatatcctcatgcactagtacagactaagggtcacccagctggaaagtagccctgcaaaaatggcctcgaggtccctgcaggmagcaattgatcaccacccagcaagatgcytttatggaaaagatgccagcagcatcttcggctgcattatgataagcaagtcaagggaggtgatccttcctttctactcagcactggtgagacacatcttgctgggtccagtcctaggcttgcctgtagcagaaaaatatggacatactgaagcagctccaggagagggccaaagagaggattaagagtctcaagcatctgtcagaagaggtgaggctgggagagctgtaattgttcagcctgcaaaggcctggagagactttatcaacatatataaatataaaatgagaaagtaaagga

SEQ ID NO: 74093 - DNA, 600 bp, Chicken  19866894356089_1
cgtttgcttttcctcgtcttgtttttccacttctgtatttcttccatttttcttaccttttcatttttttttctcttcagtaaattactcttcttctctcatatcctttcctcagtccacaccctcctcccctctatgtgttgatgttttttaacatttctcagcacagactgcttaggctgtgaagactgaggatttgctggcaataggtaatcatgtactaaattgcaagtcatcctgtaggcagctattgtgttgacgaaagttgggtctggcacaggttgattagttagagaagtmcttttctctaacagaatgaagatatttattctaatggaatgtccctcaaacagtattgggcaaaagtgtgaaaccactggactgctctgcagtgtctctcacgatagttattctgataaaaatgcaattagaaggaaacaagtttttgaattgcagctatccatcaacaaaaacaaggaaaaatgacctgatgtactatgaataaaatcagtatcaaaaatacagcagaaataacaagatagaaagaggacggaggctgatgcaatctgtatggaacagtagtatcaggactttgaagtc

SEQ ID NO: 74094 - DNA, 600 bp, Chicken  19866894356110_1
agtattttacaacttagatccatcttaacctggaactaaatcattgcggtatctcttgaccttttcaaactacatcttaggccaaaggtaaggatacgatctgtaccaggaaataaaacaccacctttgatcatttctcccatgatgcacccaactgaccaaatgtcaactgaaaacaaaatgcaatgatattaacagaaaagatagttatcaaaataaaggaaataaaaatatctagacgcacacacacatgaagtgactataaaaagcatgtgtaatggaagtgagtgaaggtgaacrtacgctaactacaggaccagcagagactatgtcctactgctaggtgcagcctgagttaaaatgaagtccttaggttttttttcagtgttatcgcaagagaaattcatgtccatttaataaaaaaaaattgtacaatatgcattttcatgacataacatcaataaaaaggttaatcacttcctaactaattcaacctgctgcagcagcacaaggatacagtcccttcctggaaagaggattttgtggcaaaccatttcgcccataatgcaccccacagaccataaatccactatgtttgta

SEQ ID NO: 74095 - DNA, 600 bp, Chicken  19866894356113_1
cagtgcaatgcaaagagtctcagggaccagtatgcaatacaaaaatagatcttagaccaaaggatgcactgctctgctttcctatttaaaaaattaaatctgcctccattttcccttttaaaaccttccttattacaagcaaaaagatccttaccttctgcaggagctgggaacccgagtacttggctgcaatagatttgatctccccaccaaacgctgaggcccagagcttcacactgtgaggaaaaaaaaaagaggcaggaagaaatgtaatacacatgtcatagcaagcaacacagrctgtagcagcttcagctgcactcataaggattcaagcaattttgcattaaggagctcacaaaggaacctaggcacagcaaaagattagcaaagctgttcaagtacaagcacaagctacatgctctgccaaggtgaggcctctgactccgaaccacccaacctgcactttttaaatttaaacaatcagcttgcccagaaacacactttggcacaatgtgtttacacacaaatgaaaggagcagataaaacagcagaacggttctgaatggtaacttctcacataacaatgagttaacataa

SEQ ID NO: 74096 - DNA, 600 bp, Chicken  19866894356118_1
aaaattgttaaaaacaattggcataggtacattaaaacaacagatttgcaatgaatttctaatgaaataaatgtatcaagcacagatgtctcaagacaccaacatccaattctctcctggccaaaagtatacagaagataaatattatccccacttgctggagtgcacaaaaagttctaagtactttgtcctgtttactgagacaatgtttctgaattcactttaatggtgtaaacattgccctaagcaactggaagattatgttacaggaagaagtacacttgcagtattgtgcaagcsgtgggttctgggacatttctactgtttccttcatgaaactgatgcaaattttcagtgcagaacttgttattctgtagagatggatatgtgcaagtcaacaaggtagatactctaacagcagaacagaattggttaattataaggtactgaaatgataaatttaggttttcaccgcatgacagttagctaaaatgatgcctgtagtgatgaaaaattacttctgtagttttcggtaatgtcacgacagctcacttagaacagttttctgaactcactagatgaaaataaagggtattaaag

SEQ ID NO: 74097 - DNA, 600 bp, Chicken  19866894356118_2
agtgagtgcagcaaagcagatagactgaccaggcagatggtctttggagcagggaattcttcatggtacagacccagctcaaggaacaagaacaggaacgtgcactctccgcttttctgggttttaatttaatgatagggacaactgtggtgctgctctctcaaagaatcaaaccataaaggcattacaagaactcagtgctaccgtagccttctcgtccttactgagctagattagaggtgggacatgctggttagagctcagtgccacaggtactgctgaatcttctgtgatgatatwaaggtgttgctttccactgcagtgaaactagcagcttcagaaaaatataaagtttctctaaaaaataaatctaataaattgtgttaaaagctgtgtgatatgaatagaggtgagaggaatgtgtatcgatgaacctagagaagagttgaactccatagctattttttttaaaagcagatcatacagccttgtttctctgtattctgtatgttcctagagtggctggtagggtttttaaataattattattttttttattttttattaagagagggtagaaactgagtagatatcaaagaa

SEQ ID NO: 74098 - DNA, 600 bp, Chicken  19866894356118_3
aactcaaacgattctgtgagaataaataaagctaacaaagcagtatcagtgtggcatgactgacaaaaacagcgcacaagtctcatgcaacacctcccccagcaggcagcgttaatttcttctgcctgtctattatttccaatgccacaatttgcagctagaatactaatcaaaaccaatttaatcatatgctttctaagacacgttgacattttttttaggatagaaagcctaactctgtttctgctcagaacctatcttgtcatctgtcacaactggaactcacccagttgtatttcrggtatactggttgtgacatttcatcaggattcaagttctttataagaccagtaccaatggaaaccctctgcctgacaaacaatagggagtttttccttttcttctcatttgttgtggtgttcatcactgctagaaaagcagcgaagtagcaggacagcaccacctacacaagcatggcaaaccaggagtacaaaggagggacatgagcaaaatctcaactacatgttgaggttccaaacagaggaacagccaagaaggtgagacagcgcccgaggcctcagagaacagctgagaggctgt

SEQ ID NO: 74099 - DNA, 600 bp, Chicken  19866894356119_1
tgtaagtgctactatagtgcagacatgtaatgctgcctcttaagtaagtcaattttgcctattaaattcccttgtctatgctgtaactcttaaaaaaggaaatacatattcattttattcttcaaagtttatctttccacttctgcagtggtgaaagcaaattaattattttgtaagtaattagttgtaacctaagtctgttttctcttaacctttttcttccagacaatttccttatgtgtgctgcaggaaggttataccgataaaactctaggtaatcccaggaggtagaggttaaamgtcaatcagagaattcaaaatggttctttactgtctacaatgctgcaatttaagtgcatttatttcacttgttctattgtgtacttaaaaaaaaaaaataaagtgcagaccttacctttcgattttacagtcctgtacagaagcctatgggcagagcattgaagcaaacgcgttacggttttccgtaggtattccatgtcataacatcacgctaaactgtcagagccgggacggctgctgggaagctgcacttcccacgtggtttccaggaggaaaggagctgacataaccacggcctta

SEQ ID NO: 74100 - DNA, 599 bp, Chicken  19866894356124_1
  misc_feature (1)..(64): n is any nucleotide
nnnnnnnnnnnnnnnnnnnnnnnnnnnnnnnnnnnnnnnnnnnnnnnnnnnnnnnnnnnnnnnncgaaggaacttcttcacagtgagggtgacagagcacacgaacaggctgcccagggaggttgtggagtctccttctctggagatattcaagacctgcctggacgccaacctgtgcagtctgctgtagggagcctgctttgcagggaggctggactcgaggatccctggaggtcccttccaaaccttacaattctgtgattctgtgatttatgaagtcctcccttgtcccagtacacrtggagcaaagtgaaaaccagcctattttccctgacaagtggtggctcaaaccatctcatgatgctgaacaaagcaataatcagtgtgattttaatttttttccttcctcagctttaccttcttctcagtttatctacatcagatgatggcttattgtatctcgaatatgacagcacttccttggaaatatgggaatcttctcacattaaatatgyacagctgtgcccgttaccatgggagttgaactctgaacaaggctcaaggccagagcatcrtgttcctgtgccacagtctaggga

SEQ ID NO: 74101 - DNA, 598 bp, Chicken  19866894356124_2
actcgaggatccctggaggtcccttccaaaccttacaattctgtgattctgtgatttatgaagtcctcccttgtcccagtacacrtggagcaaagtgaaaaccagcctattttccctgacaagtggtggctcaaaccatctcatgatgctgaacaaagcaataatcagtgtgattttaatttttttccttcctcagctttaccttcttctcagtttatctacatcagatgatggcttattgtatctcgaatatgacagcacttccttggaaatatgggaatcttctcacattaaatatgyacagctgtgcccgttaccatgggagttgaactctgaacaaggctcaaggccagagcatcrtgttcctgtgccacagtctagggaggaaacagggatttttaccaaagacactacagcagagaaacaggtattctctctaaggcagcaattcagaaacaaagacacaagcaaacaaaaacaaaactaccatttgcaatttctactcctaattagctgcaacagaaatgagggaaatagttaaacatttcatgctgctactgaatgaaaacagcaaatgttgtgatgataataatgatag

SEQ ID NO: 74102 - DNA, 538 bp, Chicken  19866894356124_3
aagtcctcccttgtcccagtacacrtggagcaaagtgaaaaccagcctattttccctgacaagtggtggctcaaaccatctcatgatgctgaacaaagcaataatcagtgtgattttaatttttttccttcctcagctttaccttcttctcagtttatctacatcagatgatggcttattgtatctcgaatatgacagcacttccttggaaatatgggaatcttctcacattaaatatgyacagctgtgcccgttaccatgggagttgaactctgaacaaggctcaaggccagagcatcrtgttcctgtgccacagtctagggaggaaacagggatttttaccaaagacactacagcagagaaacaggtattctctctaaggcagcaattcagaaacaaagacacaagcaaacaaaaacaaaactaccatttgcaatttctactcctaattagctgcaacagaaatgagggaaatagttaaacatttcatgctgctactgaatgaaaacagcaaatgttgtgatgataataatgatag

SEQ ID NO: 74103 - DNA, 599 bp, Chicken  19866894356133_1
  misc_feature (1)..(150): n is any nucleotide
nnnnnnnnnnnnnnnnnnnnnnnnnnnnnnnnnnnnnnnnnnnnnnnnnnnnnnnnnnnnnnnnnnnnnnnnnnnnnnnnnnnnnnnnnnnnnnnnnnnnnnnnnnnnnnnnnnnnnnnnnnnnnnnnnnnnnnnnnnnnnnnnnnnnnnctggtaaggccacacctggagatctgtgtccatgctgggatccccagtatgagagacacatggacatgctggaaagagtccaacaaagggccacggagatgttgaagcaactggagcacttctcctgtgaggagagtctgagagaggtgrgactcttattcttggagaagaggakgctcagggtgatctaatcagtatctataaatatctgaagagaggatacaaagaggacagagctaagctcttttcagtggtacccagtgccagaaaaagaggcaatgagcacaaatggggacatagaacaagaggttctgtgttgtgtgagtagctcagcactgacacaagttgccatgaaggcagactgggacagtggggtttttccaaattcttgggtaacttcacagttttcaaatagatccaagcttctacaaggtggtacctgaagttac

SEQ ID NO: 74104 - DNA, 599 bp, Chicken  19866894356133_2
  misc_feature (1)..(125): n is any nucleotide
nnnnnnnnnnnnnnnnnnnnnnnnnnnnnnnnnnnnnnnnnnnnnnnnnnnnnnnnnnnnnnnnnnnnnnnnnnnnnnnnnnnnnnnnnnnnnnnnnnnnnnnnnnnnnnnnnnnnnnnnnnnnnctggtaaggccacacctggagatctgtgtccatgctgggatccccagtatgagagacacatggacatgctggaaagagtccaacaaagggccacggagatgttgaagcaactggagcacttctcctgtgaggagagtctgagagaggtgrgactcttattcttggagaagaggakgctcagggtgatctaatcagtatctataaatatctgaagagaggatacaaagaggacagagctaagctcttttcagtggtacccagtgccagaaaaagaggcaatgagcacaaatggggacatagaacaagaggttctgtgttgtgtgagtagctcagcactgacacaagttgccatgaaggcagactgggacagtggggtttttccaaattcttgggtaacttcacagttttcaaatagatccaagcttctacaaggtggtacctgaagttactagccaaggacttctgtacatactt

SEQ ID NO: 74105 - DNA, 600 bp, Chicken  19866894356133_3
aggatacaaagaggacagagctaagctcttttcagtggtacccagtgccagaaaaagaggcaatgagcacaaatggggacatagaacaagaggttctgtgttgtgtgagtagctcagcactgacacaagttgccatgaaggcagactgggacagtggggtttttccaaattcttgggtaacttcacagttttcaaatagatccaagcttctacaaggtggtacctgaagttactagccaaggacttctgtacatacttctgagagttgtgtcttgcagggcttggatcaaacctgaaatrtattccaagttaaaaataytgcaaagacaaatgccttctagggatttgcagccttcaagacagatctgaaatgctaattttcatggacattaataaaatattttcttatactgtagtgagccagacaaggttccctgaaataaaatcattgcccatctgtctttaaccattagctgatataatggatctgacagtagatagaacttgtgcctagaagtgctgaccctttcctgagaaatgaataaatttttcatttacgaagcagactttatatataaatagaatggtagtcatttggaa

SEQ ID NO: 74106 - DNA, 600 bp, Chicken  19866894356133_4
gctaagctcttttcagtggtacccagtgccagaaaaagaggcaatgagcacaaatggggacatagaacaagaggttctgtgttgtgtgagtagctcagcactgacacaagttgccatgaaggcagactgggacagtggggtttttccaaattcttgggtaacttcacagttttcaaatagatccaagcttctacaaggtggtacctgaagttactagccaaggacttctgtacatacttctgagagttgtgtcttgcagggcttggatcaaacctgaaatrtattccaagttaaaaataytgcaaagacaaatgccttctagggatttgcagccttcaagacagatctgaaatgctaattttcatggacattaataaaatattttcttatactgtagtgagccagacaaggttccctgaaataaaatcattgcccatctgtctttaaccattagctgatataatggatctgacagtagatagaacttgtgcctagaagtgctgaccctttcctgagaaatgaataaatttttcatttacgaagcagactttatatataaatagaatggtagtcatttggaaagtaagtggtttcctgcaa

SEQ ID NO: 74107 - DNA, 600 bp, Chicken  19866894356140_1
attgcagtttgctttgtaaaagaagtctctccacgaagtaatattttagtattacttactcctggggtgatggaaaggtgcagtgagagctgattcttatttaacttgctcaaatttatttattcagtagaactgtgggaatgaaatcctgtgagactgcgttgaagaagtcagaaatctttttatatacattatatatctttgtacgagatactgctgttactgttttgaaaatattttcatgtgtaactgacaaagaatgtgagctctgtttgttgactgactcctgcccttctcagyttgcaatggagaggaatggtgcttggtggtgttttgaaagcagaatgcagcttgccagacagagtcccaaccctgtcctgtatgaacgcacttatgtttgaagcaaatcaacagagttcagctactctgggcagcctggtctgctggttggtgaccctgcacgtggcagggggttgaaactcaatgatcgttgtggtccttttcaacccaggccattctacgcttccattctatgatgctctgaatgccccccattatcaaaggctttccaactctttgtgtgcacctgtgagcttaaat

SEQ ID NO: 74108 - DNA, 599 bp, Chicken  19866894356143_1
  misc_feature (1)..(54): n is any nucleotide
nnnnnnnnnnnnnnnnnnnnnnnnnnnnnnnnnnnnnnnnnnnnnnnnnnnnnntgtgcactgagttgacttcatgtattctactcttaggtggaaaactgataaggcaatacctacactatgaaaacgttatcaaaatgctacacatcagcacactttgctttacctacactgcagctcagttctgcacaagcacatcacagctgtcctcagcaaggacagttctacacactgcataaggcagtggtgtgtgtcagcagagcattaaggacataaaacattccagtcagttctctacayacacaattcaaaagatatctggctactgtctattttttaatatatttttttcattttcaaatatttactccttgcaataaaaatacccattattaaaggaggaagtgagtctacatggaatattcacttaaacatccagcaccaccttgtccttcctttcagagcaaacagtttgttcgtgcactctgggaacaaagtgactcatcctgcaggatggagcaacagaggacagagctctggtagcatcttctttctgtctctccagacagtacacagaaaacttgcttctgaacactggg

SEQ ID NO: 74109 - DNA, 600 bp, Chicken  19866894356143_2
aacattccagtcagttctctacayacacaattcaaaagatatctggctactgtctattttttaatatatttttttcattttcaaatatttactccttgcaataaaaatacccattattaaaggaggaagtgagtctacatggaatattcacttaaacatccagcaccaccttgtccttcctttcagagcaaacagtttgttcgtgcactctgggaacaaagtgactcatcctgcaggatggagcaacagaggacagagctctggtagcatcttctttctgtctctccagacagtacacayaaaacttgcttctgaacactgggtttcagtcacacacgactgccagtgcatcacaccaccattttaatttttataggaaaaactattgagaaagctgagttctcaatttttttccccattgatatttccaccttgcattttacaaaattagtattaygaattacagctattccacataaaattctgaagtttataatcctcacataaattacaatacttatccacacatttatcaggtactttggaccttccgcaactaattcaaatatcacacccataaagcagcaaataaaatacatt

SEQ ID NO: 74110 - DNA, 600 bp, Chicken  19866894356143_3
atccagcaccaccttgtccttcctttcagagcaaacagtttgttcgtgcactctgggaacaaagtgactcatcctgcaggatggagcaacagaggacagagctctggtagcatcttctttctgtctctccagacagtacacagaaaacttgcttctgaacactgggtttcagtcacacacgactgccagtgcatcacaccaccattttaatttttataggaaaaactattgagaaagctgagttctcaatttttttccccattgatatttccaccttgcattttacaaaattagtattaygaattacagctattccacataaaattctgaagtttataatcctcacataaattacaatacttatccacacatttatcaggtactttggaccttccgcaactaattcaaatatcacacccataaagcagcaaataaaatacattccttacgtagcagacttttgttatagaacatcagaacctgtctgaaccaatttacagaaacaaaaaggagaaggaattcaagtaaaatgggcaggaacaagaaatgtcatatataccttaagttctagaaagttaatataggggatgacacaaactg

SEQ ID NO: 74111 - DNA, 600 bp, Chicken  19866894356144_1
gtgctgttcggtagcttttaccccattttaatgatgaaattggttctgatgtttagacattaaagttattggaactttggctgccataaaatcccaactttatggggttttcagatttgcgggctgagttattctacagactgtaaaggatgctcgtccgttaaagggcaacacagactaatagagttaaaaaggcttttttggagcttgtttgtgtaatgccagaataacttggcaataccccttagcatttgctgggcttttttttttttctgaggtggaatttattctttcttgttsttctcagaggacattgctgaagtactttcttctcattcagctgcttcctcgtagggtattttaagactgcttctatgattgcactgtgaaatctcaactaagaaatacagtggaatggtggacacaaggaaagagatgttctaagccactcrgtccttctctctggtttgagactgcttaaagccattttcttttcatcgttctgctgagtaagcagtaagcagtccrtcgtgatgaaagttgaagcaaggggaaggaaaaacacacaaatgcagtgtattgtgagtttctctttgcaac

SEQ ID NO: 74112 - DNA, 600 bp, Chicken  19866894356144_2
ctcgtccgttaaagggcaacacagactaatagagttaaaaaggcttttttggagcttgtttgtgtaatgccagaataacttggcaataccccttagcatttgctgggcttttttttttttctgaggtggaatttattctttcttgttsttctcagaggacattgctgaagtactttcttctcattcagctgcttcctcgtagggtattttaagactgcttctatgattgcactgtgaaatctcaactaagaaatacagtggaatggtggacacaaggaaagagatgttctaagccactcrgtccttctctctggtttgagactgcttaaagccattttcttttcatcgttctgctgagtaagcagtaagcagtccrtcgtgatgaaagttgaagcaaggggaaggaaaaacacacaaatgcagtgtattgtgagtttctctttgcaacccaccctgcccaaataaaaccccttctgcactgacctaatgctttcctatcagagctccgtgcctgaagcagctgttttgttctgcatatgcacacagtgggatatccaagttctgctgcactctgagataagctttggttctgctgctttc

SEQ ID NO: 74113 - DNA, 600 bp, Chicken  19866894356144_3
aacttggcaataccccttagcatttgctgggcttttttttttttctgaggtggaatttattctttcttgttsttctcagaggacattgctgaagtactttcttctcattcagctgcttcctcgtagggtattttaagactgcttctatgattgcactgtgaaatctcaactaagaaatacagtggaatggtggacacaaggaaagagatgttctaagccactcrgtccttctctctggtttgagactgcttaaagccattttcttttcatcgttctgctgagtaagcagtaagcagtccrtcgtgatgaaagttgaagcaaggggaaggaaaaacacacaaatgcagtgtattgtgagtttctctttgcaacccaccctgcccaaataaaaccccttctgcactgacctaatgctttcctatcagagctccgtgcctgaagcagctgttttgttctgcatatgcacacagtgggatatccaagttctgctgcactctgagataagctttggttctgctgctttctatatcgtttgcattgtattattccatttgaaatactgacattcccattgcaatgactgctttctgaaatagccag

SEQ ID NO: 74114 - DNA, 600 bp, Chicken  19866894356159_1
atcagtgtgaggaattacattgatattcacttaaaattagatttttgctttcatttttcttgcttttagacttgacaatttgccagactctgttagcatgaacatactggtgtcatgaatattgtaggttccatggggctttgttagtgagctgatgtaaatctttgttaacaagaaaatatttaagtgcttgaagtgacttcagtctcttgaaacagttgtgtagtctggtgtgatctactgcccttgttggcattaatttgttttttcttattgccagcttgcttcatcatcatgttrttttctyaccaccagtatagatgaatgtgctgtatagcctatagtaggttataatatttygtaggttatagtaggacactaaattcttcagtgcaacattagaccagtgaaaaatgagtggaatgcttgtgctttgagcctatgttattgctgaaaatgttttgacgccttcagagagcagaagttctaaaaagcaggaaattagcactgcaatatatacttgtgctatcaacttttggttttgagagcaatgtagctctcatacaactgattttactagtgaaaaaaaaaatatatata

SEQ ID NO: 74115 - DNA, 600 bp, Chicken  19866894356159_2
tgaggaattacattgatattcacttaaaattagatttttgctttcatttttcttgcttttagacttgacaatttgccagactctgttagcatgaacatactggtgtcatgaatattgtaggttccatggggctttgttagtgagctgatgtaaatctttgttaacaagaaaatatttaagtgcttgaagtgacttcagtctcttgaaacagttgtgtagtctggtgtgatctactgcccttgttggcattaatttgttttttcttattgccagcttgcttcatcatcatgttrttttctyaccaccagtatagatgaatgtgctgtatagcctatagtaggttataatatttygtaggttatagtaggacactaaattcttcagtgcaacattagaccagtgaaaaatgagtggaatgcttgtgctttgagcctatgttattgctgaaaatgttttgacgccttcagagagcagaagttctaaaaagcaggaaattagcactgcaatatatacttgtgctatcaacttttggttttgagagcaatgtagctctcatacaactgattttactagtgaaaaaaaaaatatatatatatgaat

SEQ ID NO: 74116 - DNA, 600 bp, Chicken  19866894356159_3
tgcttttagacttgacaatttgccagactctgttagcatgaacatactggtgtcatgaatattgtaggttccatggggctttgttagtgagctgatgtaaatctttgttaacaagaaaatatttaagtgcttgaagtgacttcagtctcttgaaacagttgtgtagtctggtgtgatctactgcccttgttggcattaatttgttttttcttattgccagcttgcttcatcatcatgttrttttctyaccaccagtatagatgaatgtgctgtatagcctatagtaggttataatatttygtaggttatagtaggacactaaattcttcagtgcaacattagaccagtgaaaaatgagtggaatgcttgtgctttgagcctatgttattgctgaaaatgttttgacgccttcagagagcagaagttctaaaaagcaggaaattagcactgcaatatatacttgtgctatcaacttttggttttgagagcaatgtagctctcatacaactgattttactagtgaaaaaaaaaatatatatatatgaattacttctttgcttcccacccctgtttctttgtcatttttgcatctcttgccat

SEQ ID NO: 74117 - DNA, 599 bp, Chicken  19866894356162_1
  misc_feature (1)..(1): n is any nucleotide
ntggcagcagagggacagtctgataaaatggtgccagacgtggaagtgcacgtgaagcaaaggtgtgccactgaattcatccacacagagagcattgcacccattgatgcttgctgaaagtttacaaagaccaaccagtggatgtcagcacagtgaggcatagctaatggtggtgactacgttgaaaaggagtgttttgtagatgacatttagctcttctaaattgtgttacagtgctctttgtatcttgtaatttccatgcagataaataagaggcattacttttggagtgacctacayataatatgttgagcttaaaactatcattcttctgatggcaaggcagagtgggaaagagaaaaaccwtgatgccatgtgarcactgttcagcaactgtggtatcagcagcattttagcaaaaaatacgaagctcagcaccgtgctatgaggaaagcacaccatcacagccagagccagtatagcacactaggaggagcatagtgactttgaagtggtacactaacattcattcgggcttgccaatgaagaactttccatggatgtttttatactgctactgttcatagtagtactgttgt

SEQ ID NO: 74118 - DNA, 600 bp, Chicken  19866894356162_2
gccactgaattcatccacacagagagcattgcacccattgatgcttgctgaaagtttacaaagaccaaccagtggatgtcagcacagtgaggcatagctaatggtggtgactacgttgaaaaggagtgttttgtagatgacatttagctcttctaaattgtgttacagtgctctttgtatcttgtaatttccatgcagataaataagaggcattacttttggagtgacctacayataatatgttgagcttaaaactatcattcttctgatggcaaggcagagtgggaaagagaaaaaccwtgatgccatgtgarcactgttcagcaactgtggtatcagcagcattttagcaaaaaatacgaagctcagcaccgtgctatgaggaaagcacaccatcacagccagagccagtatagcacactaggaggagcatagtgactttgaagtggtacactaacattcattcgggcttgccaatgaagaactttccatggatgtttttatactgctactgttcatagtagtactgttgtgtttgaagtgactgagggtctttagtagcatcttaaagtgtttgactgcaagatatgtgtaagccat

SEQ ID NO: 74119 - DNA, 600 bp, Chicken  19866894356162_3
ccacacagagagcattgcacccattgatgcttgctgaaagtttacaaagaccaaccagtggatgtcagcacagtgaggcatagctaatggtggtgactacgttgaaaaggagtgttttgtagatgacatttagctcttctaaattgtgttacagtgctctttgtatcttgtaatttccatgcagataaataagaggcattacttttggagtgacctacayataatatgttgagcttaaaactatcattcttctgatggcaaggcagagtgggaaagagaaaaaccwtgatgccatgtgarcactgttcagcaactgtggtatcagcagcattttagcaaaaaatacgaagctcagcaccgtgctatgaggaaagcacaccatcacagccagagccagtatagcacactaggaggagcatagtgactttgaagtggtacactaacattcattcgggcttgccaatgaagaactttccatggatgtttttatactgctactgttcatagtagtactgttgtgtttgaagtgactgagggtctttagtagcatcttaaagtgtttgactgcaagatatgtgtaagccatactggtttgtaatt

SEQ ID NO: 74120 - DNA, 450 bp, Chicken  19866894356163_1
atgacttatttcagctattgctgttgtgttctattacatcacaatgtcagggtatttaccgtcaaattaataaaaacagactgtgaggacagaacagagcataactggaagtctatctcttctaatcccaaagcagataagctgctagctctacatgtatccctgattttacatttgaggatggttcaaatgaatggtgaaaaagttgatgaacagagtcttaactacagttcaaatagagtttggttatcaaagcaagaaaaaacaacaacaaaaaaaatagcttctcccaacagattwaaaaaaatgattcataaaacttaggaaaaacagggttctggtgttatatgtgacagtgttgcctgcttttgctgcaagaccactgttctctttgcagtcctacagacccactccaacagctctgcttcattcttgtactgggtgccccag

SEQ ID NO: 74121 - DNA, 600 bp, Chicken  19866894356166_1
gctaactctgaccttcttaaaacaccatggcggtaacactcagaggagggtgaagatgtcagagcagaggccttacaagtcacaaacaggggctctgagccggagttaatctgggtccaaactcagatcacgtgcacctcatgactattctcaccattctcacaatggtggattcgtcttgttttgtgtctcagaccaatcgctacactttcatcaagcagtaatactcaggattcatgcaagacgtgcaggttggttacacagactgtggagtttctaacacaaaaaggctttacacarccacttggcatgtaagtatttctgaagccagtggatggagaaggatgttgtgacttaataagttaaccaaccttgttaagagctcaggggaggatgggaataagccttaactacccaccgcaggcagcacaacatccaagagactcctccacctgcagattgggagctggctggcaagcagggacttgatgacaggaggaggctctctccgtgcggaccgatgacatgaaaagggtgtgcttgtttgtgtgcgtgtggctggagcccaaagatgaatttaagactacagaaagcagcaga

SEQ ID NO: 74122 - DNA, 600 bp, Chicken  19866894356167_1
caagtctgatttcttgatgtggtatttagggaaagacccagcctgacgagcagcactcacgtgatggaccatttaccaggagctgggagaggctcctgcagcaagttcgttcatgtaagtgagttaaccaatacacttgcagcattaacctccctgagtaacaggcttataacagcattagcatatcaagagattacatgcaggttatggagcaaggttgccaggcacagaaatagtagattttcagactgaggttgatattctgctcacaaatcttgttacaagataataggatttctrtttgatctctgcacagctcttctgcccttcacacagaacagtgtggtctaagcagtaaaagcaatagagcaggacggtcttggaaggattaaatgctttttagagagaaggtgaaataaattcagtattctcaaccagaatggcatggactgagcaaagagttcctactgacaaagccaaagttttgtgccttaaaaccactgtgtacagaagaatttgcagacagacgtgtttaaaggaagataaacagatgaaaaccagtctatattgcaccttaccagagagcattacatgcctcag

SEQ ID NO: 74123 - DNA, 600 bp, Chicken  19866894356170_1
gctgcattaaacagctttgtgcaaaccagtatttttccttatttaaagtatttgtacactgtaatcaaactgcctttctgtcttctttctcaaattgaacagattgagatctttgtttttcactgtaaggcactgtctccaaacctaaactaattcgtctggtttctttttacaaatcctctcatttttcagcaactcctaagaaatgaggatgccagacctatttgcagtactcttgtataggtttcgcaaaagctatatacaaaggtaaaattattttctggatcctactcactactyctttgttttctacaagaccatcaacttggaactcattcctacagctttataaaattgcacttgagaatgatagatttttatttatgcaaaatgctgtttcaaggtaatcaaaactccatgagctcagatcaaatttagcagctggattcagcctaaaggagcagtaaaatgtttcaagaggctatacatttcatttcgattctttgttgtttaatagaaaatgttttgattcctcattggaaaactgtctcgagtttttttaagtatagaaagaaatgattttgaaatgtttctcttgaa

SEQ ID NO: 74124 - DNA, 600 bp, Chicken  19866894356172_1
tatggttgttttccatataccctaattgctagtccgtgacatataatgccttttaaattaatgtcatcctttgttgtccacgcctcaaagttaccctgatcttcctaaaagctatcaaatcttaggtcgtgtaactcacctcatggaaacacagggaactgtgtaaataaatcttaatccctgctcttgcagtcaactgtttcaatagccctggttgtatgcatgccaagctttatctctgaattttttgttcacctcccaagacttgtgaggtaggactccgtgctctacataccatarctatctattggtctcaggagatgctgattctgaaaatgtgtggagtttctggcattctgtaggccaagtcttattccattacctgcataagaatgacttctcttgctggtcctgctgctatgtttttcagagcagaagtgccagtaatgtatattcagtctgagtccaagctctagatcctgcaggactgaggggtgggcccggggaaatacaagccaagaacgtgcttctgctgccaccacagtcgtaaggcacaggagaagaaaagcaagcaggagcccaggccagctttaaagtgct

SEQ ID NO: 74125 - DNA, 600 bp, Chicken  19866894356174_1
taaagtgccttaggttgagagggaagcttttctcatgagagagaaattggctgggaaacaaattacagaaatactgtaatgtgtctgtgttcagcagggtgatagtgagcaacgttagtggagaatggagaagtctccttaagaaagtgcattttattttgatgcagaaataagggaccaaaaaatttaactaggaaatggcagatgttatttgaaatagagaggaaggtgctatttcagatctgctgatatccccaattcgctgctcctagctgctgtggaactggctcgtttgtgccygtgcagcagttggaaaagtcactgaaagaagagtttgatgtatgctaagcgcaggcattcttgtcctggcactcaagaaggttatcaaagaacagatgctgaaaatctgcaggactaggtttaaggaatgtcattgtatgcctgctcttctcctttgtcactcagaaataagatttctgtcctatctggtgtatgctaggaaggactgctaagaatcatagcatttgctgatttttttcttctttattgaatgaaaataccatgcctatgtgcactgatctcacaaccagtttgggagaa

SEQ ID NO: 74126 - DNA, 600 bp, Chicken  19866894356180_1
attggaaaagttcttggagaagagtcacccagtgacactgcatggggtagcggctgcctccctcctgactgcctcctgatctgtgtaccccaaaatacagtggacgatggttctgcatgctatttcaggctgcacaaactacgtggtaatacacagggtggtgaactgaagccactttcagccaagcacagtgtccagctgcctcttcagcacaatgagggcatgggaaagggaggtcacggcctacatctcaccaccttcagctggtagagctcatggatcagagctattggtctcagscatcacagaacagccagtttatacacacattttcagctgaacagagatgatttaaaaaaaggagaagaaatgcttgtggtggtagcgggagaagaagatgactctataccaactttcaatgaactgtctttttcctttacactgcttgttctccagaagaactgtcacagtccttcagttgtgtgtttcggcaccttaaaacatggatgtacccaatgcacattaatgactacaagtcaccagatacctattagagttatgaatcatatgattaagaattatttagaaaagttagtgctt

SEQ ID NO: 74127 - DNA, 600 bp, Chicken  19866894356180_2
agtttatacacacattttcagctgaacagagatgatttaaaaaaaggagaagaaatgcttgtggtggtagcgggagaagaagatgactctataccaactttcaatgaactgtctttttcctttacactgcttgttctccagaagaactgtcacagtccttcagttgtgtgtttcggcaccttaaaacatggatgtacccaatgcacattaatgactacaagtcaccagatacctattagagttatgaatcatatgattaagaattatttagaaaagttagtgcttatgctggaaaaaatrctatttcataaataataagtaccttcaaaattyttgtcttaaaagctataatttttctttccaaatgaatttcaaatacgcaagcactccgggaattgactcattcatttgtaagtttagcataaaagcaccctgtattacaaagccatgaattcaaaacctgtaactcagaatccacatctcctcttacaaactagtccttcacattttcatactacgttacactaaagggaagtttatgaattgagctcaagkagacaaaaagtcaagtgctagaaaaaaatgactaaaaaataacac

SEQ ID NO: 74128 - DNA, 600 bp, Chicken  19866894356180_3
gatttaaaaaaaggagaagaaatgcttgtggtggtagcgggagaagaagatgactctataccaactttcaatgaactgtctttttcctttacactgcttgttctccagaagaactgtcacagtccttcagttgtgtgtttcggcaccttaaaacatggatgtacccaatgcacattaatgactacaagtcaccagatacctattagagttatgaatcatatgattaagaattatttagaaaagttagtgcttatgctggaaaaaatrctatttcataaataataagtaccttcaaaattyttgtcttaaaagctataatttttctttccaaatgaatttcaaatacgcaagcactccgggaattgactcattcatttgtaagtttagcataaaagcaccctgtattacaaagccatgaattcaaaacctgtaactcagaatccacatctcctcttacaaactagtccttcacattttcatactacgttacactaaagggaagtttatgaattgagctcaagkagacaaaaagtcaagtgctagaaaaaaatgactaaaaaataacacacacaacctaactcctggttttctgtgtcctac

SEQ ID NO: 74129 - DNA, 600 bp, Chicken  19866894356180_4
attaagaattatttagaaaagttagtgcttatgctggaaaaaatrctatttcataaataataagtaccttcaaaattyttgtcttaaaagctataatttttctttccaaatgaatttcaaatacgcaagcactccgggaattgactcattcatttgtaagtttagcataaaagcaccctgtattacaaagccatgaattcaaaacctgtaactcagaatccacatctcctcttacaaactagtccttcacattttcatactacgttacactaaagggaagtttatgaattgagctcaagkagacaaaaagtcaagtgctagaaaaaaatgactaaaaaataacacacacaacctaactcctggttttctgtgtcctacacattgttttagtgggcctcaaygaagagtgtaacagtcatttcatgatttaagttgtggcttgtttgtcctttaaatcaaaacctaacaaaactggcgagccaagaaccaataatgtctggatgagcactttctttttgagtggtctcatgactcagkaagagttgaataaaaaggacatgggacaagtcaattgctaaaccagaaatactgtaatcttca

SEQ ID NO: 74130 - DNA, 535 bp, Chicken  19866894356180_5
ctttccaaatgaatttcaaatacgcaagcactccgggaattgactcattcatttgtaagtttagcataaaagcaccctgtattacaaagccatgaattcaaaacctgtaactcagaatccacatctcctcttacaaactagtccttcacattttcatactacgttacactaaagggaagtttatgaattgagctcaagkagacaaaaagtcaagtgctagaaaaaaatgactaaaaaataacacacacaacctaactcctggttttctgtgtcctacacattgttttagtgggcctcaaygaagagtgtaacagtcatttcatgatttaagttgtggcttgtttgtcctttaaatcaaaacctaacaaaactggcgagccaagaaccaataatgtctggatgagcactttctttttgagtggtctcatgactcagkaagagttgaataaaaaggacatgggacaagtcaattgctaaaccagaaatactgtaatcttcacaaacgcggagcactctagtcctccaaaaagcagag

SEQ ID NO: 74131 - DNA, 399 bp, Chicken  19866894356180_6
actagtccttcacattttcatactacgttacactaaagggaagtttatgaattgagctcaagkagacaaaaagtcaagtgctagaaaaaaatgactaaaaaataacacacacaacctaactcctggttttctgtgtcctacacattgttttagtgggcctcaaygaagagtgtaacagtcatttcatgatttaagttgtggcttgtttgtcctttaaatcaaaacctaacaaaactggcgagccaagaaccaataatgtctggatgagcactttctttttgagtggtctcatgactcagkaagagttgaataaaaaggacatgggacaagtcaattgctaaaccagaaatactgtaatcttcacaaacgcggagcactctagtcctccaaaaagcagag

SEQ ID NO: 74132 - DNA, 599 bp, Chicken  19866894356183_1
  misc_feature (1)..(80): n is any nucleotide
nnnnnnnnnnnnnnnnnnnnnnnnnnnnnnnnnnnnnnnnnnnnnnnnnnnnnnnnnnnnnnnnnnnnnnnnnnnnnnnnccagactacaatttcattttgtcagcagtgaatcatgctgagacttgtaagcaacttacatcagtggcacatccaagctgtgtagcactaacatggaacactgataactgagtagtgaaacaatgatctttttgatgtcaaagggaattttgccatgttcattatagtacaatgaggttcttattcgtcacatttgcaaattgtgtctttaaaattcccraatacttaattaaagtagaagacaagttaaaacgaaaaacaccacgatttctctggctgtttctacattattttctctgaatgtagagaaagaaaaaaaaagataaatatatcctaatgcaaactttaaccttacaaatcagaagtattatttagttactatttagttactatgtctgtaatacttttgcaccagattatccacaaaagtaaattagtacatttaagattagtgagctgtactggtttacgtcaacagctgctgaatatttggctcattatttttaatgctatggcatc

SEQ ID NO: 74133 - DNA, 600 bp, Chicken  19866894356185_1
tgttctcacagtgtcacctttgattcaaatcacactatgtcacaccaagcatctctgcaaagtttgtctttgttgccagtcattcttttatcatacttaagaactgacagcatagtttgcaattacggcacctgatgcagtttatgtcagaaaaaaaacatcagataaattgagaccaatgaagtcaaatcatcatgtgcagcaagatacaagagataccaccacggacagctctcacacatttcctacatttacccattctagtacgtattcttatacaccagtgccagaaggcaggargaaaggacatgccaacaattcacttacagtcccccccgtgttccagagagtaaatgttctaacagctgcacacataattatagctgacagccaagaacataactgcacagacatgcctagagatctccagttaagaccgtacacttgttcttccatactggtaacgctaattgactagaaaagaaaggtatttcgttaatgagactttaaacatggttctggtttcagatgaaaaagtacatgatcattaactctctacaaagtttactgccttttcacgatgtggacaaacactgagat

SEQ ID NO: 74134 - DNA, 600 bp, Chicken  19866894356190_1
gaacacctctgtcctccggggtcggtgcttttagaggcgttttaccccgagggaacaagagatggaggaaagtgggctgatgtttggtaggtgctggaagcttatctcatatcccttcttatctaatcccttctgctgcctctttgcatgctgctgtgttggtagggaggctggggaaatgattacatagtgaagctgatgggcatttgccttttcaagctcttaatgagtgtaactttaagggcacagagccctaccctttgttggggatagggttgaaggaagggggaaagaaaggaraatggatcaagaagggagttggtttgatttcttaaaactgagataacgttcccaagtcataatcttccccattctgatgggatacagcgttatgttaattgtaaaagcatgcataaaaaatagcttcctcgagctgctctgaagtgtctgtgcttaattgtagctgagtagggtgtgtttcggtgggatgggtggctttcattttaaggccccaatcccacagatgtgaatgcacatgtatatcatactgcctgtaatttcgttgacttaatagaagctgatctcagtatgtgaatgtaa

SEQ ID NO: 74135 - DNA, 600 bp, Chicken  19866894356196_1
ttgttgagatggaggcacagaggagtcagagcagctacaatgaatgggaaactggagatgaaatcccaagtgccaggcaccagagtgctgcagcacagtacagtaaggggagacctcagaacgagcaagtgtgggatctctgtgtgggaccattcctcgttgctgacggcgtgtcacagtggggtgggcagaaatgtatcttctggattctgtagagtggatggaattttaatttaaagccagtttcctggggccaggagcttactgtccagtgccttgctgttcatggatgttcttctktgtctggtttcccatcagataaggtgaamgatcggaggttaagcattactgataattcaggtacatgtgcattgcgtatctgagctgtgagagttggaccccgtcccttcccacccctccctgtgccttctctgatctctgctctgtggtagctgtatctttgtccctggagaagtgacctctctgccaggagggacccattctgcacactcagccctggttgtgttccatatgggatttaatcccatgcagtctttcctkggtttggcattctccatttaactgattggcagcttttct

SEQ ID NO: 74136 - DNA, 600 bp, Chicken  19866894356196_2
agcagctacaatgaatgggaaactggagatgaaatcccaagtgccaggcaccagagtgctgcagcacagtacagtaaggggagacctcagaacgagcaagtgtgggatctctgtgtgggaccattcctcgttgctgacggcgtgtcacagtggggtgggcagaaatgtatcttctggattctgtagagtggatggaattttaatttaaagccagtttcctggggccaggagcttactgtccagtgccttgctgttcatggatgttcttctktgtctggtttcccatcagataaggtgaamgatcggaggttaagcattactgataattcaggtacatgtgcattgcgtatctgagctgtgagagttggaccccgtcccttcccacccctccctgtgccttctctgatctctgctctgtggtagctgtatctttgtccctggagaagtgacctctctgccaggagggacccattctgcacactcagccctggttgtgttccatatgggatttaatcccatgcagtctttcctkggtttggcattctccatttaactgattggcagcttttctaaatccactcatgcccctgctgactgtgt

SEQ ID NO: 74137 - DNA, 600 bp, Chicken  19866894356196_3
ttactgtccagtgccttgctgttcatggatgttcttctktgtctggtttcccatcagataaggtgaamgatcggaggttaagcattactgataattcaggtacatgtgcattgcgtatctgagctgtgagagttggaccccgtcccttcccacccctccctgtgccttctctgatctctgctctgtggtagctgtatctttgtccctggagaagtgacctctctgccaggagggacccattctgcacactcagccctggttgtgttccatatgggatttaatcccatgcagtctttcctkggtttggcattctccatttaactgattggcagcttttctaaatccactcatgcccctgctgactgtgtgtcttattgaggaatatctgaatcggttaattgcagaagcatcagttctgggctcctccagcagacatattctctttcacccttggatattttcttgcagaaacatttatacagcagtatgcattgcaccatttaaaattgttaattggagattgaattacttgtcagcctttaaaaatgtagtcctgtgaggtcagagatgaggcggttagcagagccgagtggatgagcc

SEQ ID NO: 74138 - DNA, 600 bp, Chicken  19866894356206_1
aacttgcaatgtcacttaaaaacaatgaataaatttggcaagatctaacaaccacaaatgtgcattgattagcatgaatactattaataacattagcactattattgtcccttttgagatagtgagtgttacagacctttttttcaacgaccacaatacttgtgtgtgtggggaaggcagctgggattctccgaagctcgggccatgcttctcattcttccctggctgagaacttcgctgctgtaggttttgctgtaggatttttttgttggtcatcacacacaagaccagactgtgtcrggtgagcacacagtggttactttacctgtacttgtcttcagctctggagtttctcattttctgctcctgaatgtctcaggttcggtgtctagaggcaagtatcacaccactggcatctgtcccttcccacagaagygcccacctgcaggagcactcagctgagcagggatcaggaagggcaaggaagggccaccccccccaggggggactgcagtcattgcctgtactcccttagccagggtgggagcagcttgctccatctggggacacggtgtcctgctgcaggagcttcctgcactt

SEQ ID NO: 74139 - DNA, 552 bp, Chicken  19866894356206_2
ctttttttcaacgaccacaatacttgtgtgtgtggggaaggcagctgggattctccgaagctcgggccatgcttctcattcttccctggctgagaacttcgctgctgtaggttttgctgtaggatttttttgttggtcatcacacacaagaccagactgtgtcrggtgagcacacagtggttactttacctgtacttgtcttcagctctggagtttctcattttctgctcctgaatgtctcaggttcggtgtctagaggcaagtatcacaccactggcatctgtcccttcccacagaagygcccacctgcaggagcactcagctgagcagggatcaggaagggcaaggaagggccaccccccccaggggggactgcagtcattgcctgtactcccttagccagggtgggagcagcttgctccatctggggacacggtgtcctgctgcaggagcttcctgcacttgccatgggaccttcaaaaatgggctctgagactttcccagagtgtccctgcagctccatgctccttcagccttccggctcttcttttt

SEQ ID NO: 74140 - DNA, 599 bp, Chicken  19866894356211_1
  misc_feature (1)..(70): n is any nucleotide
nnnnnnnnnnnnnnnnnnnnnnnnnnnnnnnnnnnnnnnnnnnnnnnnnnnnnnnnnnnnnnnnnnnnnnagccagcagcaagactgcatgttaattggagcttctggatgaagcaaatcctggtacaacacatcatagggctattccttctattattttctgcaggctccaggaagttcttatgtgcagggtgaaactcttacagcagcacacaaagcacagaaaaaggtacgttgctgcttgttgccacgcaggcagccagatgaccttgcagcaataatgggaccgttaacacgcaygtttgctttccagctgacagttccattaccactcctgcctacccctattcagacataggagttagtcaarcagctcataagaaaaatggatatcccaaaagagaatttcaggagaagcttaattaaataactgattattcttggtgcttaagaaataaatacatgcacatacgcttccttgtgacaacctcccaagggaaaatttgtaaaataaacactgtgcttatttaactcagagaagcaattaagccattaagaagagatcaaagtaggcattatgctaattagcccttaattga

SEQ ID NO: 74141 - DNA, 600 bp, Chicken  19866894356211_2
agccagcagcaagactgcatgttaattggagcttctggatgaagcaaatcctggtacaacacatcatagggctattccttctattattttctgcaggctccaggaagttcttatgtgcagggtgaaactcttacagcagcacacaaagcacagaaaaaggtacgttgctgcttgttgccacgcaggcagccagatgaccttgcagcaataatgggaccgttaacacgcaygtttgctttccagctgacagttccattaccactcctgcctacccctattcagacataggagttagtcaarcagctcataagaaaaatggatatcccaaaagagaatttcaggagaagcttaattaaataactgattattcttggtgcttaagaaataaatacatgcacatacgcttccttgtgacaacctcccaagggaaaatttgtaaaataaacactgtgcttatttaactcagagaagcaattaagccattaagaagagatcaaagtaggcattatgctaattagcccttaattgaatgcattcacaacagtgatacacaaactgcagcactaacagctaccttccatgctcattgcttcctgacct

SEQ ID NO: 74142 - DNA, 599 bp, Chicken  19866894356232_1
  misc_feature (1)..(188): n is any nucleotide
nnnnnnnnnnnnnnnnnnnnnnnnnnnnnnnnnnnnnnnnnnnnnnnnnnnnnnnnnnnnnnnnnnnnnnnnnnnnnnnnnnnnnnnnnnnnnnnnnnnnnnnnnnnnnnnnnnnnnnnnnnnnnnnnnnnnnnnnnnnnnnnnnnnnnnnnnnnnnnnnnnnnnnnnnnnnnnnnnnnnnnnnnnnnacatttaaacaacattgtttcaaaccatcagtattttaagcaagccaacatttcttagatttcagcattaataatgcactttttttgaagctgccaactcaacgaggaaaamatgcaaaatgcaccatatttcatttcctgtgtgttagcaccatcacctccgttagaaagccggcagtctgttatgccttaaaacaaagttatctcacgttcaagcctcccaccacgtgaagtggatgagaaaccatttgcgcaggctcctgctgggtgctggtaagctgacagcaggactctgggcggcccagctatgtctgcaggcccctggaagtgccttggtggagcacatagggcagtcagcaccagccgtgctgtgtcctgtcccacctgttggcgtacatcagcatttttccc

SEQ ID NO: 74143 - DNA, 600 bp, Chicken  19866894356232_2
gcaccatcacctccgttagaaagccggcagtctgttatgccttaaaacaaagttatctcacgttcaagcctcccaccacgtgaagtggatgagaaaccatttgcgcaggctcctgctgggtgctggtaagctgacagcaggactctgggcggcccagctatgtctgcaggcccctggaagtgccttggtggagcacatagggcagtcagcaccagccgtgctgtgtcctgtcccacctgttggcgtacatcagcatttttccccctgagcagtgacccagctcgggcatgagtgcacagygctattcctctgcatccttcccagggaattccttagagttcagaatcaggaagatacagatttacatattaatgtaatgctgaagcataaaagctcaggaaaatggaagcagccctaagcacaggcagctgggctcagcttgcagacactcagactccaagccaggcctggtgctgggacagcagatccatcacctcgctccagggactcacctgcccttccagcctgccctggggacacacagccctgcgctcacacccgagtcacacagggcagccgatgcacacagggtgaaagtcg

SEQ ID NO: 74144 - DNA, 600 bp, Chicken  19866894356238_1
taaatctgggtgaacatgtacatccacccatcccctgtcccatataaacaaactgcagggcaatggtgcaagcatgtcagcatccctttattttctggctttctccatctccatgctagcacagagcagattattaataggcttgatgatgatggggtgaacagatgtgactgggggagctgggatgtccattctgctggtgacacagtaggactgcaagagttcctacttcccaatagttgtaatagctctgggagtgcaacgtgattttggggacatggttactggggatggtggtgwtgagttgacaattaaaattgatgatcttagaggtcttttccaaccttaatgattctatgatccaatgaaggggtcaatgcctttttaagttgggagagagattgtcttttctttcatcaaagctgagctttggtggtaagagttaggaaccaaaaccccattgtgtctcagagctgaggtctattggcacagcctcactgggtcaccccgtgccaccctatgcttgcaaacccaggaacaagagcgggaagcacaggaaccctaagctcatgttttcaccccctcttgataccagccctg

SEQ ID NO: 74145 - DNA, 600 bp, Chicken  19866894356249_1
aagcgatgaggggtgctgcgttggggcgggtgttgcctggggcgcccggaatgggtctgcatctggggcgggtgcccccataagagatcagatggggattgcaggggtagctccatcccggcgccataaggagcctttctggggtgcgggggtccctccccagtgcccccgggaggggcttcccgtgtcgttggtggggaagcggccgtgggaggaaggtttgtcgtgcatccggagagcccttcccgtcgtggggaaggaggaaagatttcctcccagcacagcctccgggcgataacsgggcttttcttttccttgcattggaacagggaatcgttctaacaattagcggggctttgttttgttttcttctgttttgttctctgttttactttgtttttgtacaactggcacccggggctcagacgtgtccctttttcctgccgggcaggtgtctgctcagctgtgctggaggtgcacgtgggaacgggctctgtctactcagtggaaggggagggagccgtgctgcccgcctggtacaccagcagctcacagaagaggccctacatcagctggatgctgaaaaaggcagctgctaag

SEQ ID NO: 74146 - DNA, 600 bp, Chicken  19866894356253_1
ttttgctcagactgaaaatacaatattcacaactccctgatagctgtgagatttcctttaatgtgaatttcagaggtgaatccccaacaacagaggcgtattatgcacattttcaaatgtcctcgcccttcatccagacaacagtggtcaatctaaattatgttgctccagtaaaatgcagttatagctgatgaggtcagatacatcattttttcttctctaggcacagcctgcagcctcagtttgtagtgggttaggtggcacttatagagtgatctctgcactggaaaaacagattgrcatgatgggcatgaacagtttagcaggytggaaatcggtaagctggtgtttacaagcaaattggtgtaagtacaggctgttttggttttgagaacaacaccagggtgctttgaagtcgcatgccgcagcagctgcttaacaattaattgaaggaaaaattataaaaataacgacaagaaaaaataatagtctttcaaaagtgacaaaatattgtctagtctttgaacccatataaagatgtagcatccaggaaatgaatgttttgtgtacaagacacctcttattgtatgctctcaactt

SEQ ID NO: 74147 - DNA, 600 bp, Chicken  19866894356253_2
acaactccctgatagctgtgagatttcctttaatgtgaatttcagaggtgaatccccaacaacagaggcgtattatgcacattttcaaatgtcctcgcccttcatccagacaacagtggtcaatctaaattatgttgctccagtaaaatgcagttatagctgatgaggtcagatacatcattttttcttctctaggcacagcctgcagcctcagtttgtagtgggttaggtggcacttatagagtgatctctgcactggaaaaacagattgrcatgatgggcatgaacagtttagcaggytggaaatcggtaagctggtgtttacaagcaaattggtgtaagtacaggctgttttggttttgagaacaacaccagggtgctttgaagtcgcatgccgcagcagctgcttaacaattaattgaaggaaaaattataaaaataacgacaagaaaaaataatagtctttcaaaagtgacaaaatattgtctagtctttgaacccatataaagatgtagcatccaggaaatgaatgttttgtgtacaagacacctcttattgtatgctctcaacttaccataaactaacttaatttgataactc

SEQ ID NO: 74148 - DNA, 600 bp, Chicken  19866894356255_1
actaaaacttttaaatccagtgttggtgggtcattaaaactacaggtgtggctttcaggaggttcagccttgactttgtaactggtaaggggagggaagcaagaatagtaggaaggttgtggagtactcgagggggaactgtcaagctgtgcaaaaaatacacatatatacatagacttataggctccttgacttagaagtgcttaaacctgaatatgttatcctgaacaccactaaccataaaagggtgttggtgatcaaagatgccttgtgggtgcttgtgccatcaataacactgcrtatctgtaggaattagtatgtatttacatgcrgagtgactctgtctcaccctttgatttgattgagccctgcttctgaaatggctaataaatcaagaggaaggggaatacagtctgctggtgtggggtgtgcatttcaagtgcatcaggctgtggcctcggcagaggcacagagattgtgattgcctgaaacactgtgctgctttgtgcatgctgggtaaggcaaagggaatagtgaaacttggcaattgctgccatggattgaatgcagaacagttataccctttctaagggaaaattc

SEQ ID NO: 74149 - DNA, 600 bp, Chicken  19866894356255_2
attaaaactacaggtgtggctttcaggaggttcagccttgactttgtaactggtaaggggagggaagcaagaatagtaggaaggttgtggagtactcgagggggaactgtcaagctgtgcaaaaaatacacatatatacatagacttataggctccttgacttagaagtgcttaaacctgaatatgttatcctgaacaccactaaccataaaagggtgttggtgatcaaagatgccttgtgggtgcttgtgccatcaataacactgcrtatctgtaggaattagtatgtatttacatgcrgagtgactctgtctcaccctttgatttgattgagccctgcttctgaaatggctaataaatcaagaggaaggggaatacagtctgctggtgtggggtgtgcatttcaagtgcatcaggctgtggcctcggcagaggcacagagattgtgattgcctgaaacactgtgctgctttgtgcatgctgggtaaggcaaagggaatagtgaaacttggcaattgctgccatggattgaatgcagaacagttataccctttctaagggaaaattccacatgttggtgtatgaatgctattttacatg

SEQ ID NO: 74150 - DNA, 600 bp, Chicken  19866894356259_1
tcaaatccgtgtacctgtctgtctctcactgctcatctcacttctatctacccatgtagaaattagactactgatacaactagggctctcaaattcctcttcgtgagctggctacattgtctgatcctggaataggtgtctaaagtagatgggatgaactgctgtagagcagtgcctttctctctttgtctacctcagagggaccctacagggctaacttcaaccaactgctttaactcttagaaattcagctctggatgataaatgtctttacagtccctctgcctgaatttgttcacrtggttttatctatccagatccctaagtagttccgttattgctttaaaaaaattgtctctgtggtgttggcggctagtgcagagctggaagagcacasattttagtgttatgcaggatgttttccctcctgttgcaggtcaatttgttcatcccaaagagattcgcagtgcagctacggtggcttttctgaagctatattaattcactgtggtggcaacaggggcccttgttggctatttcccttagctgtagaaggaaatgtaacagaagagtaatgcatcaagctttaattttgctttc

SEQ ID NO: 74151 - DNA, 600 bp, Chicken  19866894356259_2
atctacccatgtagaaattagactactgatacaactagggctctcaaattcctcttcgtgagctggctacattgtctgatcctggaataggtgtctaaagtagatgggatgaactgctgtagagcagtgcctttctctctttgtctacctcagagggaccctacagggctaacttcaaccaactgctttaactcttagaaattcagctctggatgataaatgtctttacagtccctctgcctgaatttgttcacrtggttttatctatccagatccctaagtagttccgttattgctttraaaaaattgtctctgtggtgttggcggctagtgcagagctggaagagcacasattttagtgttatgcaggatgttttccctcctgttgcaggtcaatttgttcatcccaaagagattcgcagtgcagctacggtggcttttctgaagctatattaattcactgtggtggcaacaggggcccttgttggctatttcccttagctgtagaaggaaatgtaacagaagagtaatgcatcaagctttaattttgctttcatttgtagcgttgtcacctgagagactgcattcacaaatttttaa

SEQ ID NO: 74152 - DNA, 600 bp, Chicken  19866894356259_3
tcttcgtgagctggctacattgtctgatcctggaataggtgtctaaagtagatgggatgaactgctgtagagcagtgcctttctctctttgtctacctcagagggaccctacagggctaacttcaaccaactgctttaactcttagaaattcagctctggatgataaatgtctttacagtccctctgcctgaatttgttcacrtggttttatctatccagatccctaagtagttccgttattgctttaaaaaaattgtctctgtggtgttggcggctagtgcagagctggaagagcacasattttagtgttatgcaggatgttttccctcctgttgcaggtcaatttgttcatcccaaagagattcgcagtgcagctacggtggcttttctgaagctatattaattcactgtggtggcaacaggggcccttgttggctatttcccttagctgtagaaggaaatgtaacagaagagtaatgcatcaagctttaattttgctttcatttgtagcgttgtcacctgagagactgcattcacaaatttttaagcttcttcgcactgacaagggaaatttgccaaaaaggaaaacaaaattgaag

SEQ ID NO: 74153 - DNA, 600 bp, Chicken  19866894356259_4
aacagaagagtaatgcatcaagctttaattttgctttcatttgtagcgttgtcacctgagagactgcattcacaaatttttaagcttcttcgcactgacaagggaaatttgccaaaaaggaaaacaaaattgaagcattatccacttaggatatgtaagaaatgtgctcttttatttctttgtctaggaattacaactgtgctgactatgacaacaatcaacacacatctgcgagagactttgcctaaaattccctatgttaaagccattgacatgtatcttatgggctgctttgtattygtcttcttggccttacttgaatatgcctttgtcaactacattttcttcggaaaaggccctcaaaggcagaagaaacttgcggaaaaatcagcaaaggcaaacaacgatcgctcaaggtttgaaggcagccgggtaggattctttatatatagtctcttctttcttttattacaaatgctaactgtatggaataaacaacaacaacaaaaatctgtgtaaaaacatcaccaaccacatctcctttttgtggtcaaacttcagcatttttgtattcaattacctacaaagaagaatatattt

SEQ ID NO: 74154 - DNA, 600 bp, Chicken  19866894356267_1
ccgccagcagcatggaggggaaccagagcgccagggccgtgtcctgcagagcaggaggttatgggggtggttcttggggggcacagaccgcagcgcccacccgcacagagctgagaggggcccatgcggaccaacggaggccgggatggagagaggggaaagagaaaaaatagggaaagcagaagcgaagggcaccaggcgcacgcatactcacatagatgcgcgtggtgttgaaggggcagtcgttggtggctatggctgcacgggcatcggccggcagtgcggggctgctgcagcccrtcaccaggcgcatcccacggctgtggatggtgagcccgatggccaacgccaaccccacactgcacgctgtggacagcaggcagttcagcaggggacacgctcagcagggcccagtgctgccagcataaggagagcgtgtgagagcgggactggccagagccggggaaagacatggggttgggcatgccgtggctctgcgcagggtcactgggaaccctgcagaggtttctgccacgtagatacgtgctgtgcacattcccggctcttggtgtgcttcagccatcccctgggctgtgcctc

SEQ ID NO: 74155 - DNA, 599 bp, Chicken  19866894356278_1
  misc_feature (1)..(11): n is any nucleotide
nnnnnnnnnnnggaaaaagggaaaaaagaaaaagaaaagaaaagaaaaccttagcaaaaacgaggaagagagaatatagcattctgtggcttcagtgagacaaactggattgcgggatagcctaatgtgagccagagctaccgcaaaaggaatgggtggatcacagggtcagggaatacattttaagcatctctgtagcactgagccattaaatcaatcttttacatagttaaatctctgcaggggaaagagagaagatggcactgtcaactcctactctgctgccttagtaatggattrtgatgaaggcaatgcaaatgaatcatgtatggaaaaaaaatcagttgctttcagatgctctttcatgttgcacaktaacagttcatgcaataaaaaatcaagtggccatgtagaagaactgtacaaaatctgtgaagttcatgtgcagaaaacatccgataagaataagctttataaacatagaattttcctgtatgtaacgagatcactctatcttactttcccttttaacaatatggtgtggttcaaggaagtactcttcaaagtctggtagagcatgtgggcagtggccctcagag

SEQ ID NO: 74156 - DNA, 600 bp, Chicken  19866894356278_2
atagcattctgtggcttcagtgagacaaactggattgcgggatagcctaatgtgagccagagctaccgcaaaaggaatgggtggatcacagggtcagggaatacattttaagcatctctgtagcactgagccattaaatcaatcttttacatagttaaatctctgcaggggaaagagagaagatggcactgtcaactcctactctgctgccttagtaatggattrtgatgaaggcaatgcaaatgaatcatgtatggaaaaaaaatcagttgctttcagatgctctttcatgttgcacaktaacagttcatgcaataaaaaatcaagtggccatgtagaagaactgtacaaaatctgtgaagttcatgtgcagaaaacatccgataagaataagctttataaacatagaattttcctgtatgtaacgagatcactctatcttactttcccttttaacaatatggtgtggttcaaggaagtactcttcaaagtctggtagagcatgtgggcagtggccctcagagtcactgatctagctgctgacctgtttgtcttgatcagctgtttactcatgagagcatttgccttgctgggaatttt

SEQ ID NO: 74157 - DNA, 599 bp, Chicken  19866894356289_1
  misc_feature (1)..(104): n is any nucleotide
nnnnnnnnnnnnnnnnnnnnnnnnnnnnnnnnnnnnnnnnnnnnnnnnnnnnnnnnnnnnnnnnnnnnnnnnnnnnnnnnnnnnnnnnnnnnnnnnnnnnnnnntgatgaatgtcagggtgccattttttctgcttgaaggaattcagtgggacacctttgcttcatccacacttccacatcagacgcctttctgacagactgccctgtgctgccatccttttcatggcaacagcatgtaacagaatattggtgggaatgctggctactgccataccaccaacacccacctctgatgtcrtgggctaccacaataaaacaggaggcattacttttggagcagcccctatacatgaatgtggttttggttttaagattcaccccagagtgtttggcagattgctatattgactacttgtgtttggcagtgctcctaatagtcaagyacagaatgatgaaggggaaaaatcacactgtttgtaaaagaaaggacaatcagtgaggaaataatccatttgcaggctactgaaggagtgctgcaagcatcaatgttgactgtaacataaggaccataatcatagggctgacttgctctttatt

SEQ ID NO: 74158 - DNA, 600 bp, Chicken  19866894356289_2
cagtgggacacctttgcttcatccacacttccacatcagacgcctttctgacagactgccctgtgctgccatccttttcatggcaacagcatgtaacagaatattggtgggaatgctggctactgccataccaccaacacccacctctgatgtcrtgggctaccacaataaaacaggaggcattacttttggagcagcccctatacatgaatgtggttttggttttaagattcaccccagagtgtttggcagattgctatattgactacttgtgtttggcagtgctcctaatagtcaagyacagaatgatgaaggggaaaaatcacactgtttgtaaaagaaaggacaatcagtgaggaaataatccatttgcaggctactgaaggagtgctgcaagcatcaatgttgactgtaacataaggaccataatcatagggctgacttgctctttattttcttcatggtatttcattctgcattcagcaatcaccacctcctgtaacagctcttcccacctctgctccaacttcctgagtcgtttaactacctgagccaacaatgagccaggtttgagctgttacatggcttatggttgcttaa

SEQ ID NO: 74159 - DNA, 600 bp, Chicken  19866894356294_1
tggtccaaccatttgataaagtgttttaaacgttctgttcctttgttttcccattacctgtaattctggtctttttaacccagcagtgcctgctgcaaatatctgtgagcaggagcatggcaccccggtaccttaccctgacttcccttagctaaaaatccctaagtatgtgaccatgcacttctacacgtggtatataagcatcccataagtatccctggcacataggcattccctcagaggaacggatgtaattggggcagaggagctgcagaagcactgaggatcctcagccactgyttttgtaaaaacgtttctcattctccagctactttctctccttgtatcgccaagggctccctgatagggagatttgctttgccaccctctcccctctctgtctcctgctatggcacactgcaaaaacagccccaaaacagccagcggctgagttgggaaataggttgagcatggggacctttccctggaaccatcacagatcaaaatgggatctcagcagtaggctgtatggagaaacacatattttctcttagatttgcctcttccagtgtcttctctccataaatgtgtattattaga

SEQ ID NO: 74160 - DNA, 600 bp, Chicken  19866894356310_1
tttaattagttattaaataataataatccatacgttgaaagcaagtttgtatttttattcatttcattcatttgtaatatgtagcaagcatcctcagtcatttgctagaaaataggcaggagtataatccaggcaccctactaaaatcctgttagctgtgagctctttaacattttctctttggggatccataaatattcagcatcttcctcctaaggggcaattattttagacttaaggatgtcttgacatccttgaaacctaatgtccacttcaagtacctgcgaacttcttttcttycagacccatgctgagaaatgcataccttaaaagtgctggttcccagttccagcaaactgttttacaaactgaacagtgtaagccacaaattaaaagcaggaacaaagaaacattcatgtgtttcatggtcacgctttggatgtgattacrtggatatctgagttgccatcagaaggcatgtctttcacattcattctctttctctttcctgctgccagttccttccacttccctcctcttgctctgcttatgctcctttgtatcactggactgatcatagtcctgttcatcttcccaaac

SEQ ID NO: 74161 - DNA, 600 bp, Chicken  19866894356310_2
gttagctgtgagctctttaacattttctctttggggatccataaatattcagcatcttcctcctaaggggcaattattttagacttaaggatgtcttgacatccttgaaacctaatgtccacttcaagtacctgcgaacttcttttcttycagacccatgctgagaaatgcataccttaaaagtgctggttcccagttccagcaaactgttttacaaactgaacagtgtaagccacaaattaaaagcaggaacaaagaaacattcatgtgtttcatggtcacgctttggatgtgattacrtggatatctgagttgccatcagaaggcatgtctttcacattcattctctttctctttcctgctgccagttccttccacttccctcctcttgctctgcttatgctcctttgtatcactggactgatcatagtcctgttcatcttcccaaaccactggaaaataatccatcacttcttttttgggagaaagagagttagagggaaacgttcattttctgccaagttaagagcctgcactgactctcagcatcatctgataagttggcaaaatatacacaacatcagattttaactagagagg

SEQ ID NO: 74162 - DNA, 600 bp, Chicken  19866894356313_1
gaaatgttcgcagaaaacctgtaatagtttgtgataagctaaatatttacactgaggctggtgctagaagtgtaagtatctgcctgccttgcaaagccagaaacatacatttggattggacttctctgagtgtcggttaagtggatgaaaataagttttgacataatagacatatggattccttctcagctatttccagaaggattcttgtacaacctcatgctatcctcatttgtaaaatgggggaacaatacctgctctcttcatatggttttgctcaataattgggtttttgaagcrtggtcttttggcttccatcccagtgcacctgtctcttggtgaaaaggtatttgatgggggctgtttatctctgtctctcaaattgcagatatgttggtcagacrctttcccagctggggagccatatgtcgcaattgcttatgttcagtggctttgattaggcatttttctttcaattaratgaaaatcatcagattttaaacagaagtgttaagtctgtccatttgtagataaaaggtgaagtttgcaggagcagtgacctaactaagcaggacaaggttatgtaaaatgggtacagaa

SEQ ID NO: 74163 - DNA, 600 bp, Chicken  19866894356313_2
atacatttggattggacttctctgagtgtcggttaagtggatgaaaataagttttgacataatagacatatggattccttctcagctatttccagaaggattcttgtacaacctcatgctatcctcatttgtaaaatgggggaacaatacctgctctcttcatatggttttgctcaataattgggtttttgaagcrtggtcttttggcttccatcccagtgcacctgtctcttggtgaaaaggtatttgatgggggctgtttatctctgtctctcaaattgcagatatgttggtcagacrctttcccagctggggagccatatgtcgcaattgcttatgttcagtggctttgattaggcatttttctttcaattaratgaaaatcatcagattttaaacagaagtgttaagtctgtccatttgtagataaaaggtgaagtttgcaggagcagtgacctaactaagcaggacaaggttatgtaaaatgggtacagaatttgaaacccacctgtcctctatgatatgtaaccgttgataatagtaygtgatgagtactaagttgtagaattttgtagtatagtgaattatggtgctctcctt

SEQ ID NO: 74164 - DNA, 600 bp, Chicken  19866894356313_3
ccttctcagctatttccagaaggattcttgtacaacctcatgctatcctcatttgtaaaatgggggaacaatacctgctctcttcatatggttttgctcaataattgggtttttgaagcrtggtcttttggcttccatcccagtgcacctgtctcttggtgaaaaggtatttgatgggggctgtttatctctgtctctcaaattgcagatatgttggtcagacrctttcccagctggggagccatatgtcgcaattgcttatgttcagtggctttgattaggcatttttctttcaattaratgaaaatcatcagattttaaacagaagtgttaagtctgtccatttgtagataaaaggtgaagtttgcaggagcagtgacctaactaagcaggacaaggttatgtaaaatgggtacagaatttgaaacccacctgtcctctatgatatgtaaccgttgataatagtaygtgatgagtactaagttgtagaattttgtagtatagtgaattatggtgctctcctttttcaggaggtagaaacaaacccaaattatgagttgttttaattataaagtgacatttatctacaaattcagtgat

SEQ ID NO: 74165 - DNA, 600 bp, Chicken  19866894356313_4
atttgatgggggctgtttatctctgtctctcaaattgcagatatgttggtcagacrctttcccagctggggagccatatgtcgcaattgcttatgttcagtggctttgattaggcatttttctttcaattaratgaaaatcatcagattttaaacagaagtgttaagtctgtccatttgtagataaaaggtgaagtttgcaggagcagtgacctaactaagcaggacaaggttatgtaaaatgggtacagaatttgaaacccacctgtcctctatgatatgtaaccgttgataatagtaygtgatgagtactaagttgtagaattttgtagtatagtgaattatggtgctctcctttttcaggaggtagaaacaaacccaaattatgagttgttttaattataaagtgacatttatctacaaattcagtgatttcctgtaaggatatttcaacacaagaatcttgataacgtcttctactaatttagaggcatggaaatatgaaaactgttggtacgtggctgcatctttaactgtttatttttctcaaaggaagcaaaattagcacttttctcccagtcatcagtcacatctttaaatt

SEQ ID NO: 74166 - DNA, 600 bp, Chicken  19866894356315_1
gccttcactgatggtgtgaagtccctgggaagcaccggattgcagctggtaaatccctgcaggtggcacatgcagggagctgcccctgaggatttgctttggggtttccacgtgggaagtcaccatgctgagatggagtgagcagaggaggctctgagccaacgccaggctgcccagcaagcagcagaaggagatctctatcctatggagatggcagcggaggcgtgcgagcagagctggcacaggaaggagggcaggcagtgcaccgggctgagtgtgagcactgggagggattgctgkgaacctggacgtttgcacccagtgcgggatcctcgtgcagcaccacggggtgaggggaaaacaactgcttgtacacactggtgaccaggagagaacagcactgggatggattggatcgccgtgctgctggaaggacgtcgtgggatggctgtgggcagggagcacccgacaaccccctcctgcctgagcttccagcactgtcgctgagccctgctctctgcctgctgtcccggcatagccgtgtaaatccttggtgctgagcagagccaggggtcccggcccgctttgctggctgtctgc

SEQ ID NO: 74167 - DNA, 600 bp, Chicken  19866894356324_1
aggaaaatacaagcactgagcaaatagattactctgtgtcactaggctgacatctgcattttcttgcttctctcatatattctgtttttcaaatgatatcgaacttttagcctggcaacgagcccaaattttgcttcctttgaaatccctgaattcctatgttttcatccttgaaatcttactgctttataaaagcataacaaaacccgtgacttgagaaagggttaataaacgttagtgaatcccctgtaacacagcttggaagcacaaacaacagctcaatgcatgattctgctgacytattgcatccgatcaactgtggttttatttctagcaatgccagcaggtgggaactgacaacatgtttctttggaatcgtaaagaaagatcggctctgatggagaattagctggaagtaagcgaggttgtttggcacagatctaagcagggacaatgcttgattatggctatcactctccagctgctgtcagaatgttaagtttgctttcttgaggcctgacatctaacacatttctttttctaattagtatctggtactgtagatgctgatattttactgcatgtcagatgcacaaggct

SEQ ID NO: 74168 - DNA, 600 bp, Chicken  19866894356339_1
ttcaaaacatttgcttagggccaaaacaagcataatttctttacaaagactctgaacaaaggaaagtcatcaattccaatgggtagtttaatttacatggtgttcacttaaagcttattaaatcttatggcctattcttgaatatatatataatcaaaagtactcgcccaaatattacattgttatatttaaattaatcaaatatataagacaatagatagtaggagaaaagtagcatcaattttaattcaaactgtattgtgaagtaaacacagccctaaaatagaatgaaaataaaartttattttatcttttctgagtgcaaagaatatttaacactctgccagtatttcagaacatgcaggaaacaggaraagacatgatctcttggattactaaagttgaktgtcactcagccacttttcctctttaaaaaaagaaattatgaagaacaggaagataaagattttaaaactgatgaagaaagttaaaattaaaccaatgacttcttgaaattccatgggattgaatgtatcgacaatttatttcaagtccataaaatactatatgtatgttaagctcacatagaagctgacataa

SEQ ID NO: 74169 - DNA, 600 bp, Chicken  19866894356339_2
tccaatgggtagtttaatttacatggtgttcacttaaagcttattaaatcttatggcctattcttgaatatatatataatcaaaagtactcgcccaaatattacattgttatatttaaattaatcaaatatataagacaatagatagtaggagaaaagtagcatcaattttaattcaaactgtattgtgaagtaaacacagccctaaaatagaatgaaaataaaartttattttatcttttctgagtgcaaagaatatttaacactctgccagtatttcagaacatgcaggaaacaggaraagacatgatctcttggattactaaagttgaktgtcactcagccacttttcctctttaaaaaaagaaattatgaagaacaggaagataaagattttaaaactgatgaagaaagttaaaattaaaccaatgacttcttgaaattccatgggattgaatgtatcgacaatttatttcaagtccataaaatactatatgtatgttaagctcacatagaagctgacataagctcacatatatgtatgttaagctcatatatgcatgaagctcacctcacattgttaacatttgagctgttaaga

SEQ ID NO: 74170 - DNA, 576 bp, Chicken  19866894356339_3
cttaaagcttattaaatcttatggcctattcttgaatatatatataatcaaaagtactcgcccaaatattacattgttatatttaaattaatcaaatatataagacaatagatagtaggagaaaagtagcatcaattttaattcaaactgtattgtgaagtaaacacagccctaaaatagaatgaaaataaaartttattttatcttttctgagtgcaaagaatatttaacactctgccagtatttcagaacatgcaggaaacaggaraagacatgatctcttggattactaaagttgaktgtcactcagccacttttcctctttaaaaaaagaaattatgaagaacaggaagataaagattttaaaactgatgaagaaagttaaaattaaaccaatgacttcttgaaattccatgggattgaatgtatcgacaatttatttcaagtccataaaatactatatgtatgttaagctcacatagaagctgacataagctcacatatatgtatgttaagctcatatatgcatgaagctcacctcacattgttaacatttgagctgttaagattttttat

SEQ ID NO: 74171 - DNA, 599 bp, Chicken  19866894356344_1
  misc_feature (1)..(64): n is any nucleotide
nnnnnnnnnnnnnnnnnnnnnnnnnnnnnnnnnnnnnnnnnnnnnnnnnnnnnnnnnnnnnnnncattaaaaatggatatttaaactttaagtcggggctcaggaaatgttagctagtgttacgtatctacataaaaagcagttctccaaaatgctttcggaaggtgatggttctgtttaactgtcgttgattgggtgaactgctacttaggcttctgccttagttatgccattttgttcttctctgtagcaagcactgtttctaagacattcaaagatcaattcaaatgctgtgaacayttaaaatcacgattttaggtgtttaaataaccttagmagttttataagaacatagaattgaactgccaattgtctgagtgactcgaagatagccaaaagatttgaaagaggagcagaagctacctaatgtgaaaaaccacccctgactcctgaccaaacattgtctcagtatgctttgtgcagcacttttttctcagaatgtttcccgtgtttgttagatggcttagctccagcagtgctttcacatagtcagcttgttttcttcttctatgtctcgctgatgatgttttccttctctt

SEQ ID NO: 74172 - DNA, 599 bp, Chicken  19866894356344_2
  misc_feature (1)..(27): n is any nucleotide
nnnnnnnnnnnnnnnnnnnnnnnnnnncattaaaaatggatatttaaactttaagtcggggctcaggaaatgttagctagtgttacgtatctacataaaaagcagttctccaaaatgctttcggaaggtgatggttctgtttaactgtcgttgattgggtgaactgctacttaggcttctgccttagttatgccattttgttcttctctgtagcaagcactgtttctaagacattcaaagatcaattcaaatgctgtgaacayttaaaatcacgattttaggtgtttaaataaccttagmagttttataagaacatagaattgaactgccaattgtctgagtgactcgaagatagccaaaagatttgaaagaggagcagaagctacctaatgtgaaaaaccacccctgactcctgaccaaacattgtctcagtatgctttgtgcagcacttttttctcagaatgtttcccgtgtttgttagatggcttagctccagcagtgctttcacatagtcagcttgttttcttcttctatgtctcgctgatgatgttttccttctcttcattatccaggtctgtaatgtacgctgtattattcct

SEQ ID NO: 74173 - DNA, 600 bp, Chicken  19866894356345_1
aaagttacatgaaaatagaagtaaaaatcacagctatttttttactaccaaaagttgagaaagcaaaacaaagcatggaagacaacattttactttgcaataagcatcacaagttaaaaatgtctaagaaataaggtagaacaccagaaaccaggagagtcataagtccttcttgcatatttctttgaaattccaaagcttaagagcctggtgtccaaaagtgactatcaacctgagcagagctcacggtggggtttgcaactccagattcagaaattccctttcccacacacccacatrcacaacattctgatcacagtgtgtgagtacatgcatgtacacacaggaccacttgtgtttccattttcaggtcaggatcataagaacatgtgggcaaagcaggcaagtttcaagaacaggtgtctgctggagatgagaaaaggacaatcaaaaaatagatctgaccacctactgttgacttcaraaagctgaatacagttggtgatactgagaaggaagcaactagtatactttcttttaaattaaaatatgataaaaaatttaattttataaaattaagacattgcctacacagtctac

SEQ ID NO: 74174 - DNA, 539 bp, Chicken  19866894356345_2
ttgaaattccaaagcttaagagcctggtgtccaaaagtgactatcaacctgagcagagctcacggtggggtttgcaactccagattcagaaattccctttcccacacacccacatrcacaacattctgatcacagtgtgtgagtacatgcatgtacacacaggaccacttgtgtttccattttcaggtcaggatcataagaacatgtgggcaaagcaggcaagtttcaagaacaggtgtctgctggagatgagaaaaggacaatcaaaaaatagatctgaccacctactgttgacttcaraaagctgaatacagttggtgatactgagaaggaagcaactagtatactttcttttaaattaaaatatgataaaaaatttaattttataaaattaagacattgcctacacagtctactggtgttaagcctacaccaatttgccaagattccttcacaagaaagctgcttccttctctttctcctccagaaacacatattaatgagatcagagtctcttacaacttgtcacatgaaacgat

SEQ ID NO: 74175 - DNA, 600 bp, Chicken  19866894356347_1
atgctccatttctgaaagtagtaatgatgataaaaaacactataaagagagtaggacttaaccacattctcttctagagtcattaaataaatgatagctctatgctaatggaaaaagtctttaatttggaatctaaaagccatatacttcaattacatcttaattacatgagaaatcctcttataattgctcagggttattattgctttgctaggcatggcacttgattaattgaattaatatttaacatgttgtattgcagagagtcaggaaatgctacaaaagactcaacatatattraaatayagctgcaatttaaaagttcccagtacctagaaatgcagttgcagatccaatcatcaattaaatttgcttcttaacttcagagcacctgactgttgggaattttaacacagaaatcctatcactatcattggagaacgggatcccattccattcaccagcatttatgcccccatgtggtgaccacagctcttttaaagatgggaaaagtcctgggcaatctggagcagcgactctgtccttgcggcctcttacattcagacttaatttggagcataaggagactaactgtagtaa

SEQ ID NO: 74176 - DNA, 600 bp, Chicken  19866894356347_2
catttctgaaagtagtaatgatgataaaaaacactataaagagagtaggacttaaccacattctcttctagagtcattaaataaatgatagctctatgctaatggaaaaagtctttaatttggaatctaaaagccatatacttcaattacatcttaattacatgagaaatcctcttataattgctcagggttattattgctttgctaggcatggcacttgattaattgaattaatatttaacatgttgtattgcagagagtcaggaaatgctacaaaagactcaacatatattraaatayagctgcaatttaaaagttcccagtacctagaaatgcagttgcagatccaatcatcaattaaatttgcttcttaacttcagagcacctgactgttgggaattttaacacagaaatcctatcactatcattggagaacgggatcccattccattcaccagcatttatgcccccatgtggtgaccacagctcttttaaagatgggaaaagtcctgggcaatctggagcagcgactctgtccttgcggcctcttacattcagacttaatttggagcataaggagactaactgtagtaaatacaa

SEQ ID NO: 74177 - DNA, 599 bp, Chicken  19866894356352_1
  misc_feature (1)..(4): n is any nucleotide
nnnntatatcttatttttgggatgaatattaagacctttctcagaaaggtcagtgttttgctctttaactccttgtaaaggacaaaatcatatataatgaaaaaaatagggggattaaatgattctcaaatttcagacatattgaacagagctatccgctgtatctttactgggtggacttcctgcatttttgtcaacttccaaatagctctaaatatgccattacagaaaaacttagttatgcttacggaaagctgcagcacactgcaggtgagaaggctctataaaaattgtggaagygagttatgattttgactaaaacagtctcacaaactgtttgagagttctgttcagttctgctctcagatatttggggcttagctttgtttccttgcacacaagtggtaggagatgaggtcagccacagctggaaggaggagctgccctaccttttctttgaagtgaacatctgaaggacaaaaatccctaaaatgtttttttgttaaagcataggctaatctactagaacaagatgactcttcaaatagaataatttctgatcaactatggcagattatrcagagcagtttgaagcaaat

SEQ ID NO: 74178 - DNA, 600 bp, Chicken  19866894356352_2
ctctataaaaattgtggaagygagttatgattttgactaaaacagtctcacaaactgtttgagagttctgttcagttctgctctcagatatttggggcttagctttgtttccttgcacacaagtggtaggagatgaggtcagccacagctggaaggaggagctgccctaccttttctttgaagtgaacatctgaaggacaaaaatccctaaaatgtttttttgttaaagcataggctaatctactagaacaagatgactcttcaaatagaataatttctgatcaactatggcagattatrcagagcagtttgaagcaaatctgtttgtgcacattaggagtttgtagggtgggtttctttcacacatttgtattttctactgtagaaattttcagtaggtttgtaatttgaaataatgcattccacatacatttctatgacagaagctgcctgttacctgtctgttcaatgctctcctggaccttctctagggagcaggacaaacagatatgcacctgctgctccctcaactttctaaaaagtcttaggttatctctatagtaaatttgaaattaaattattctgacaaatccaaacgag

SEQ ID NO: 74179 - DNA, 599 bp, Chicken  19866894356365_1
  misc_feature (1)..(77): n is any nucleotide
nnnnnnnnnnnnnnnnnnnnnnnnnnnnnnnnnnnnnnnnnnnnnnnnnnnnnnnnnnnnnnnnnnnnnnnnnnnnnttgcccaaggaggttgtggatgccccatccctggaggcattcaaggccaggctggatgtgactctgggcagcctggtctggtggttggcaaccctgcacatagcaggggggttgaaactaggtgatcattgtggtccttttcaacccagggcattctatgattctctgattatgattctatgattctgtagcagggtacttatatccaacgttatactgagtrgatttcatctcatgcagcttctcaatgctaaaatgaatatgtccatgagagtttcctgttgttaacaaaagtaaataggcactttgaatatctactgaagatgaactgtgctacccaagtctccttttatctctgatgtcaatcaagggaatccagataactggcaaagttttaatacatttacagtcagcaacattcttcatcagtgggccattgcttcaaggccttcaagaaatggcttgggatatttwaaaaaaacttgctcctactcaatttattgcagaacaaaataaaagmaa

SEQ ID NO: 74180 - DNA, 600 bp, Chicken  19866894356365_2
attctatgattctgtagcagggtacttatatccaacgttatactgagtrgatttcatctcatgcagcttctcaatgctaaaatgaatatgtccatgagagtttcctgttgttaacaaaagtaaataggcactttgaatatctactgaagatgaactgtgctacccaagtctccttttatctctgatgtcaatcaagggaatccagataactggcaaagttttaatacatttacagtcagcaacattcttcatcagtgggccattgcttcaaggccttcaagaaatggcttgggatatttwaaaaaaacttgctcctactcaatttattgcagaacaaaataaaagmaaattcttactggatcagaaaggggactgtaaaaatgtgcttattccagatcaaagtaagtacctaaatcttatgaaagagataagatatcagatttctccttttctgtttatttgttcttttgatacttcctcttgctacacttacatagtccactatttattgcattaataggcattcagtcttctccttctggcacaaaaagtcttgacgccaacattagcactgtgaattctattttttgaataaagtgt

SEQ ID NO: 74181 - DNA, 600 bp, Chicken  19866894356365_3
gtrgatttcatctcatgcagcttctcaatgctaaaatgaatatgtccatgagagtttcctgttgttaacaaaagtaaataggcactttgaatatctactgaagatgaactgtgctacccaagtctccttttatctctgatgtcaatcaagggaatccagataactggcaaagttttaatacatttacagtcagcaacattcttcatcagtgggccattgcttcaaggccttcaagaaatggcttgggatatttwaaaaaaacttgctcctactcaatttattgcagaacaaaataaaagmaaattcttactggatcagaaaggggactgtaaaaatgtgcttattccagatcaaagtaagtacctaaatcttatgaaagagataagatatcagatttctccttttctgtttatttgttcttttgatacttcctcttgctacacttacatagtccactatttattgcattaataggcattcagtcttctccttctggcacaaaaagtcttgacgccaacattagcactgtgaattctattttttgaataaagtgtctgaaagtccttctgtagagctaacctttgagatcctcaggttcaa

SEQ ID NO: 74182 - DNA, 600 bp, Chicken  19866894356370_1
ctagcaacaagtttcaggtaagtaaatagctcagaaagccacagatctctgtggagactaaaaataccactttgattgtcactctgattgcaacaagaatattgaatgttgatggcaccttctgctattgatccttaactcctagcaaatctatgtctatgtcatggaacatcccagctcaggacacccagctgcaaagcatgactgcaattctggacacatcacaaagagagagagacgggagaaggatgaaaccaatcacagtgaatctgttatcaaacacatatctttggtacagcwgggagtcaggtgatttggagggtggacttgatgatttttttgaggtccttccaaccccagcagacttacgattctgtgattgcttagcaggaaagaactctgacccaggattcagcagaagaaccacagaagagtaaagtgaaatgcacatgttggttctggttcagacatgttaggatatgttttctgatctcaggctattctagaggagcaaggccagagctttgttctcccttctctacaacccctctccctggagtgaagagtaaaggagctgtccctgctgcaactgcaagattt

SEQ ID NO: 74183 - DNA, 520 bp, Chicken  19866894356382_1
cttaaatgaaaatcatcctaagcttgtttctgatctgagataccagaaaggcatcttgcttcattttcactggaggacagataaggcagcaccaagtcaggaaaattcacttccgtctgaattactgatgaattagcctactggcattatatcttaaagctaatgctatttagtattcactttgaaccctcctgctatgactcagtcaggggaggctcacagccaaatgtgagctgacatcatcagacgtgatatggtacagttttcatctatcagactggctccactgagcaaaggtcrtaataaacttcttacttgaaggtaaaattaatgtgattgaaaagatacttggcagaaaatatgtatctggagaaaaccggaatgcctttttttggtgcctgcctgcttctccgtcacccaggagattctcatcaagctgagtgacaccaggggtgacactcctgacctagctaggcaatatcactgtgatgacggagacactgggtaatcacagagagaa

SEQ ID NO: 74184 - DNA, 600 bp, Chicken  19866894356390_1
tcatcgagtttcaaccctcctgctatgtgcagggtcgccaaccactagaccaggctgcccagagccacatccagcctggccttgaatgcctccagggattgggcatccacaacctccttgggcaacctgttccagtgtgtcaccaccctctgggtggaaaaacttcttcctaatatctaacctaaacctcccctgtctcagtttaaaaccattcccccttgtcctatcactatccaccctcataaacaaccattctccctcctgtttatatactcccttcaagtactggaaggccacaaygaggtctccccggagacttctcttcttcaaactaaacaagcccagttccctcaatctttcctcataggagaggtgctccagcccctttgatcatcttagtggccctcctctggacccccccaagagctctatgtccttcctgtactggkcccaggccccaggcctggaygcagtactctaggtggggccacactagagctgagtagaggggcacaattctacaagtttatcagtgataaaaggtaggtcagggaagatgtggaccctctccaggaggaaactagagacaggtcatgagat

SEQ ID NO: 74185 - DNA, 600 bp, Chicken  19866894356390_2
ctgggtggaaaaacttcttcctaatatctaacctaaacctcccctgtctcagtttaaaaccattcccccttgtcctatcactatccaccctcataaacaaccattctccctcctgtttatatactcccttcaagtactggaaggccacaaygaggtctccccggagacttctcttcttcaaactaaacaagcccagttccctcaatctttcctcataggagaggtgctccagcccctttgatcatcttagtggccctcctctggacccccccaagagctctatgtccttcctgtactggkcccaggccccaggcctggaygcagtactctaggtggggccacactagagctgagtagaggggcacaattctacaagtttatcagtgataaaaggtaggtcagggaagatgtggaccctctccaggaggaaactagagacaggtcatgagatatatggagagaactgaaatgtttggtgacttctttgactcagtgttaactggcaagggttctagctgcaccacctaagttgtagaaagttaaggcatgaactgggagaaagaagctctgcccactgtaagttacaatcagagggcagga

SEQ ID NO: 74186 - DNA, 600 bp, Chicken  19866894356390_3
ctaatatctaacctaaacctcccctgtctcagtttaaaaccattcccccttgtcctatcactatccaccctcataaacaaccattctccctcctgtttatatactcccttcaagtactggaaggccacaaygaggtctccccggagacttctcttcttcaaactaaacaagcccagttccctcaatctttcctcataggagaggtgctccagcccctttgatcatcttagtggccctcctctggacccccccaagagctctatgtccttcctgtactggkcccaggccccaggcctggaygcagtactctaggtggggccacactagagctgagtagaggggcacaattctacaagtttatcagtgataaaaggtaggtcagggaagatgtggaccctctccaggaggaaactagagacaggtcatgagatatatggagagaactgaaatgtttggtgacttctttgactcagtgttaactggcaagggttctagctgcaccacctaagttgtagaaagttaaggcatgaactgggagaaagaagctctgcccactgtaagttacaatcagagggcaggaacacctgctctatcaggaca

SEQ ID NO: 74187 - DNA, 508 bp, Chicken  19866894356392_1
gactatttttattcaaaaagactccaacatactttaaagatgtactaaatgaatacactgtataaaggagtcagtataataatggtggaaaaataattctcctcaaaaaagaagcataattgctactgaatggagcatgacctttcaaaaactactgaaatctctcttgcatttacttagacaccagtcactaaattaacctctctggtaactatgatgaggtcaatgggattgttatctcaaggatgaattcccattttcattttttgagctattgactaggtattcaggttttttttwaaagaaggatacaacaaatgaatttgcataaagttgcttcatatataatgtatatatatatatatatatataaatatatatatacagacatatacatatgcaagagaactctctacttttgatgaatgatcaaagcatatcttaaataagaacaaatgcaggtcctcagacacagtaatactagtagaaagttctaaactagttaaaa

SEQ ID NO: 74188 - DNA, 599 bp, Chicken  19866894356400_1
  misc_feature (1)..(125): n is any nucleotide
nnnnnnnnnnnnnnnnnnnnnnnnnnnnnnnnnnnnnnnnnnnnnnnnnnnnnnnnnnnnnnnnnnnnnnnnnnnnnnnnnnnnnnnnnnnnnnnnnnnnnnnnnnnnnnnnnnnnnnnnnnnnncctgtagatgctgattctttgaagaatgcaaataatgaggctaagagcaaaacaaataagggaagcaaatctgaagatgaaactccaagttctgttttgctgcctggtttgaaagaagaagaggaattggattctgatcagtttattcatagatgttctatttcagaagaattgmaaaaagatgtarggaaacgggagataaacgattctctttttgcagtatcagctactcccgaagagcatatttataagtcattaacaccgatttctaagaaaagatgtcgacagcaacgtatcatttctcctcgtgcaggcccaaataagattcaaggccagcaagatgatttaacatggctaggtaatagcatgaacatcaaaacctctccctaaagcatctcgttctacgaataagcatgataaaatcaattttaattgcaaattttgtagttctgcctataaaagctctgcgcttct

SEQ ID NO: 74189 - DNA, 599 bp, Chicken  19866894356400_2
  misc_feature (1)..(113): n is any nucleotide
nnnnnnnnnnnnnnnnnnnnnnnnnnnnnnnnnnnnnnnnnnnnnnnnnnnnnnnnnnnnnnnnnnnnnnnnnnnnnnnnnnnnnnnnnnnnnnnnnnnnnnnnnnnnnnnnncctgtagatgctgattctttgaagaatgcaaataatgaggctaagagcaaaacaaataagggaagcaaatctgaagatgaaactccaagttctgttttgctgcctggtttgaaagaagaagaggaattggattctgatcagtttattcatagatgttctatttcagaagaattgmaaaaagatgtarggaaacgggagataaacgattctctttttgcagtatcagctactcccgaagagcatatttataagtcattaacaccgatttctaagaaaagatgtcgacagcaacgtatcatttctcctcgtgcaggcccaaataagattcaaggccagcaagatgatttaacatggctaggtaatagcatgaacatcaaaacctctccctaaagcatctcgttctacgaataagcatgataaaatcaattttaattgcaaattttgtagttctgcctataaaagctctgcgcttctaaagagacacat

SEQ ID NO: 74190 - DNA, 600 bp, Chicken  19866894356409_1
agagtcaacataatagataggttggtgtgctctcctgaactggttcaaattcactgaccattctgcttgtttccagtggttggacagagaggttaagatgttttggaattggttttctccagtgtgattttctggtattaccagcagtaacaattttggcaaatgtgtgggagactcctgagcttgctaggctcactaatgtgtgcagaaccaaagatgtgtttttgtaactttctgtaagttttaagatgttttctggaactttctgaggttaacatactttaatatagtcccttaaastgtacttaccgaaggctagattcaaataggtatttatgtggctcttttattcaggcctctggactgtgagtggagttacatgcctggtaacacytgtgtttctggctgtagatgccttcctgtcttgcactggctttgctgtaaggaagggatagtaaacaaacgtaataaagctgggagttgagctgaacaaaactgttctctctgcttttacatatgagtaaaggagccagcccccaatgtttgctgaagtgccacggtctcatttgcttttgggtagcctgcagcaatgtacacaat

SEQ ID NO: 74191 - DNA, 600 bp, Chicken  19866894356409_2
aagatgttttggaattggttttctccagtgtgattttctggtattaccagcagtaacaattttggcaaatgtgtgggagactcctgagcttgctaggctcactaatgtgtgcagaaccaaagatgtgtttttgtaactttctgtaagttttaagatgttttctggaactttctgaggttaacatactttaatatagtcccttaaastgtacttaccgaaggctagattcaaataggtatttatgtggctcttttattcaggcctctggactgtgagtggagttacatgcctggtaacacytgtgtttctggctgtagatgccttcctgtcttgcactggctttgctgtaaggaagggatagtaaacaaacgtaataaagctgggagttgagctgaacaaaactgttctctctgcttttacatatgagtaaaggagccagcccccaatgtttgctgaagtgccacggtctcatttgcttttgggtagcctgcagcaatgtacacaattgaggattttcccatctttctttagtacaggctacatttccatacattgtgcatttgtaacaagcatgtgttgtttgtttaagaacttagagcc

SEQ ID NO: 74192 - DNA, 520 bp, Chicken  19866894356409_3
gtaaacaaacgtaataaagctgggagttgagctgaacaaaactgttctctctgcttttacatatgagtaaaggagccagcccccaatgtttgctgaagtgccacggtctcatttgcttttgggtagcctgcagcaatgtacacaattgaggattttcccatctttctttagtacaggctacatttccatacattgtgcatttgtaacaagcatgtgttgtttgtttaagaacttagagcctatgccagaattttcttgcttggctttaaatgtgacctaagggtagttttattctagatrtctgtgaataggagcatgtttgtgttctcagtgaccaaagctgtgaacaagatttgagctgagtcttcggctcttgccgtgttacgttaggtatatccagaggggtagaagcacgtgaccttttgccatttcaagaagctgggctgtgactgaagtaaccacagtgtttataaaacagactgtcatcactctggccactggttttgccctactgaagtaa

SEQ ID NO: 74193 - DNA, 600 bp, Chicken  19866894356410_1
ctccatcctctgctagcttcccattgcttggttacaaattattcaacatttgtgcctcagtttccccatctattaagcaaaagtaacacaacctcttctggatggaactttcacaccttggattttgtaaaggactgtgcaaaaaagcactacaggacctacagatcataagcaaagcagccaaaactcttaagagcagacactagagtgggtcagcccagctatgaagctgctgtgttgcctggagttatgggcaccaagggagcaactgagccagcagcactgcagcaagcgcgtgckacaggcagcctgtgccactgtagccagacacagtgcgagctcagaaagccaaagaaaagagagaagctgccaacttcttcatattcatgagctctttaataatgctcaacaaaacttggaggcatgttcactgctgttgctcctgcccttttgcacagcgagcaagtcataaatatttcaggggaagagtccagaaaatttgcaagattggtcgtagccttttacagcattaatgagcaggccattaatagttaatgaaacagctgctggtgatctcagaggtaaaggcaagatgagaac

SEQ ID NO: 74194 - DNA, 600 bp, Chicken  19866894356410_2
ccaacttcttcatattcatgagctctttaataatgctcaacaaaacttggaggcatgttcactgctgttgctcctgcccttttgcacagcgagcaagtcataaatatttcaggggaagagtccagaaaatttgcaagattggtcgtagccttttacagcattaatgagcaggccattaatagttaatgaaacagctgctggtgatctcagaggtaaaggcaagatgagaacagcagtgtttgcccactcactacagtgtgataatgtgaaggaacagcctgatccttttattggatcctycccaacaggagaggaccatggagatgggtggaaggcccccagtgcagctccagccaggccctctgcaggccgtaccctgtgcaggcccagagatggaggttgctgcagaggagctycacagctgtcccagtgctgcattggggtgaggaaactggaacatatgcacagcatcccgaaagcatgtcacagaatcacagaatggcctgagttgaaaaggaccacaaygatcatcgagtttcaacccccctgckatgtgcagggtcrccaaccaccagaccaggctgcccagagccacatcca

SEQ ID NO: 74195 - DNA, 600 bp, Chicken  19866894356410_3
agagtccagaaaatttgcaagattggtcgtagccttttacagcattaatgagcaggccattaatagttaatgaaacagctgctggtgatctcagaggtaaaggcaagatgagaacagcagtgtttgcccactcactacagtgtgataatgtgaaggaacagcctgatccttttattggatcctycccaacaggagaggaccatggagatgggtggaaggcccccagtgcagctccagccaggccctctgcaggccgtaccctgtgcaggcccagagatggaggttgctgcagaggagctycacagctgtcccagtgctgcattggggtgaggaaactggaacatatgcacagcatcccgaaagcatgtcacagaatcacagaatggcctgagttgaaaaggaccacaaygatcatcgagtttcaacccccctgckatgtgcagggtcrccaaccaccagaccaggctgcccagagccacatccagcctggccttgaatgcctccagggatggggcatccacaacctccttgggcaacctgttccagtgtgtcaccaccctctgcatgaaaaacttcctcctaatatccaacctaaacctc

SEQ ID NO: 74196 - DNA, 600 bp, Chicken  19866894356410_4
gagaacagcagtgtttgcccactcactacagtgtgataatgtgaaggaacagcctgatccttttattggatcctycccaacaggagaggaccatggagatgggtggaaggcccccagtgcagctccagccaggccctctgcaggccgtaccctgtgcaggcccagagatggaggttgctgcagaggagctycacagctgtcccagtgctgcattggggtgaggaaactggaacatatgcacagcatcccgaaagcatgtcacagaatcacagaatggcctgagttgaaaaggaccacaaygatcatcgagtttcaacccccctgckatgtgcagggtcrccaaccaccagaccaggctgcccagagccacatccagcctggccttgaatgcctccagggatggggcatccacaacctccttgggcaacctgttccagtgtgtcaccaccctctgcatgaaaaacttcctcctaatatccaacctaaacctcccctgtctcagtttaagaccattccccttgtcctatctctatcaacccatgcaaacaattgtttcccctcctgtttatacgctccctttcaagtactggaaggccacaa

SEQ ID NO: 74197 - DNA, 587 bp, Chicken  19866894356410_5
tacagtgtgataatgtgaaggaacagcctgatccttttattggatcctycccaacaggagaggaccatggagatgggtggaaggcccccagtgcagctccagccaggccctctgcaggccgtaccctgtgcaggcccagagatggaggttgctgcagaggagctycacagctgtcccagtgctgcattggggtgaggaaactggaacatatgcacagcatcccgaaagcatgtcacagaatcacagaatggcctgagttgaaaaggaccacaaygatcatcgagtttcaacccccctgckatgtgcagggtcrccaaccaccagaccaggctgcccagagccacatccagcctggccttgaatgcctccagggatggggcatccacaacctccttgggcaacctgttccagtgtgtcaccaccctctgcatgaaaaacttcctcctaatatccaacctaaacctcccctgtctcagtttaagaccattccccttgtcctatctctatcaacccatgcaaacaattgtttcccctcctgtttatacgctccctttcaagtactggaaggccacaatgaggtctccccg

SEQ ID NO: 74198 - DNA, 574 bp, Chicken  19866894356410_6
tgtgaaggaacagcctgatccttttattggatcctycccaacaggagaggaccatggagatgggtggaaggcccccagtgcagctccagccaggccctctgcaggccgtaccctgtgcaggcccagagatggaggttgctgcagaggagctycacagctgtcccagtgctgcattggggtgaggaaactggaacatatgcacagcatcccgaaagcatgtcacagaatcacagaatggcctgagttgaaaaggaccacaaygatcatcgagtttcaacccccctgckatgtgcagggtcrccaaccaccagaccaggctgcccagagccacatccagcctggccttgaatgcctccagggatggggcatccacaacctccttgggcaacctgttccagtgtgtcaccaccctctgcatgaaaaacttcctcctaatatccaacctaaacctcccctgtctcagtttaagaccattccccttgtcctatctctatcaacccatgcaaacaattgtttcccctcctgtttatacgctccctttcaagtactggaaggccacaatgaggtctccccg

SEQ ID NO: 74199 - DNA, 600 bp, Chicken  19866894356416_1
tgttgtgctgtaggagatggtgggggcctgagggaggatatagggtgtctgtggggggctgttgggggatatagaggagatatggagtctagaagggttctggggggatatgaggttggatatgggagagtgtggggggctctggagggggtctagggccagtgtagggttgtgggtagctgtaaggggcgatggggctatagggactgggggactgtagggagggttttaggactgtagaggggacatggggttctatggggctgtagggaacaggggaataatatgacactgtagggrgctattgtgggagctctatggttctmtggggaggctatagggggcagtgggagagctatagcgggtttataggtggttatgtggctatagggttctgtgggtgggctgtaggagggttctcgtagggtaggaggctatagggggctatggaggggatatagggagatatggggcaatagtgggtttttagggggttgtggcgggctgtgtgagggtataggatgatagagggccggagrgggtttctagagagggatattatgctggagaaggtatggggggctaaaagtgggctgtgag

SEQ ID NO: 74200 - DNA, 600 bp, Chicken  19866894356416_2
cctgagggaggatatagggtgtctgtggggggctgttgggggatatagaggagatatggagtctagaagggttctggggggatatgaggttggatatgggagagtgtggggggctctggagggggtctagggccagtgtagggttgtgggtagctgtaaggggcgatggggctatagggactgggggactgtagggagggttttaggactgtagaggggacatggggttctatggggctgtagggaacaggggaataatatgacactgtagggrgctattgtgggagctctatggttctmtggggaggctatagggggcagtgggagagctatagcgggtttataggtggttatgtggctatagggttctgtgggtgggctgtaggagggttctcgtagggtaggaggctatagggggctatggaggggatatagggagatatggggcaatagtgggtttttagggggttgtggcgggctgtgtgagggtataggatgatagagggccggagrgggtttctagagagggatattatgctggagaaggtatggggggctaaaagtgggctgtgagggttatagtagggctgtggtgggcta

SEQ ID NO: 74201 - DNA, 600 bp, Chicken  19866894356416_3
gaggggacatggggttctatggggctgtagggaacaggggaataatatgacactgtagggrgctattgtgggagctctatggttctmtggggaggctatagggggcagtgggagagctatagcgggtttataggtggttatgtggctatagggttctgtgggtgggctgtaggagggttctcgtagggtaggaggctatagggggctatggaggggatatagggagatatggggcaatagtgggtttttagggggttgtggcgggctgtgtgagggtataggatgatagagggccggagrgggtttctagagagggatattatgctggagaaggtatggggggctaaaagtgggctgtgagggttatagtagggctgtggtgggctatttaaatataaggagatatgaggctatagagggtgtttggaggatgtggtcctctaaggggctgtgtgggtccataggatgatctggagctatagggtgatctctaaagggatgtggggcttgaaggctctcccttccttcctttccccccttccacagcagggcgggtgaaatgctagtcatgaaattgaaactggaactggagttgtattg

SEQ ID NO: 74202 - DNA, 600 bp, Chicken  19866894356420_1
ctgatccccctggacatcacacacgtgccgtgtgatctcacccaagatgatttgcttggtactgaggtcaggctgacaggcctgtagttccccagatccttcttacagcccttcttgtagatgggagtcacatctgcaggcctccaatcccctgggacttctcccagataaccaggaatgctgatagatggtggagggtggcttcgctggtgcacctcccctacgaagacaggctgagggagctgggcttattcagcctggagaagagaaggctgcagagtgacctcattgcagcctttyagtacctgaagggagcctataaacaaaaagggagtaaaccctttgaaagggtagataccagcaggacgagagggaacggttttaagktgaaagagggaagatttaggttggatgttagggggaagttctttaccaggagastggtgaggtgctggagtgggctgcccagagaggttgtagatgccccatccctggaggtgttcaaggccaggttggatggggccctgtgcaacctggtctagtaaatggggaggttgctggccctgcctggcaggggggttggagattcatggtccttgg

SEQ ID NO: 74203 - DNA, 600 bp, Chicken  19866894356420_2
ttccccagatccttcttacagcccttcttgtagatgggagtcacatctgcaggcctccaatcccctgggacttctcccagataaccaggaatgctgatagatggtggagggtggcttcgctggtgcacctcccctacgaagacaggctgagggagctgggcttattcagcctggagaagagaaggctgcagagtgacctcattgcagcctttyagtacctgaagggagcctataaacaaaaagggagtaaaccctttgaaagggtagataccagcaggacgagagggaacggttttaagktgaaagagggaagatttaggttggatgttagggggaagttctttaccaggagastggtgaggtgctggagtgggctgcccagagaggttgtagatgccccatccctggaggtgttcaaggccaggttggatggggccctgtgcaacctggtctagtaaatggggaggttgctggccctgcctggcaggggggttggagattcatggtccttggggtaccttccaacccaggccattctgtgattggcaatcacccctgccaactccgtcagcaccctaggatggagcccctccagtccca

SEQ ID NO: 74204 - DNA, 600 bp, Chicken  19866894356420_3
ctccaatcccctgggacttctcccagataaccaggaatgctgatagatggtggagggtggcttcgctggtgcacctcccctacgaagacaggctgagggagctgggcttattcagcctggagaagagaaggctgcagagtgacctcattgcagcctttyagtacctgaagggagcctataaacaaaaagggagtaaaccctttgaaagggtagataccagcaggacgagagggaacggttttaagktgaaagagggaagatttaggttggatgttagggggaagttctttaccaggagastggtgaggtgctggagtgggctgcccagagaggttgtagatgccccatccctggaggtgttcaaggccaggttggatggggccctgtgcaacctggtctagtaaatggggaggttgctggccctgcctggcaggggggttggagattcatggtccttggggtaccttccaacccaggccattctgtgattggcaatcacccctgccaactccgtcagcaccctaggatggagcccctccagtcccatggacttgtgacagtccagatggaggaggagctctctaactttttccacctgaa

SEQ ID NO: 74205 - DNA, 600 bp, Chicken  19866894356422_1
cacagggtggggaataaacaggaagaattagtaatcagtatgtggacataggccacgatcttattacaagaacatagttgaatagcttgtatgactggctatgtgctttttaggaaagacaggctaggaaagcaaggtgatggagttgctctttatgtgagagatcaactggaatctatcagccttttcctagaggtggatatagagcaagtcaagagcttacacgtaaggattaaaagttagtctaacacaagtgacactagtatgagtagtttctacaggataatttatagggatgtyagtgaggctttctacagacagctggaagtaacctcaaaggccttgattctcatggggactttaaccaactttatatctgctktaaggacaacacagccagggacacacaytctgaggggtttcttcagaacacttataaatttttgacacmggtagtggaggagacaacaagatgtgtgctgctggaccttgtgctaacaaacaataaaggaattgtggagtctggggacagagttgacagcagagaccacaagatctgaatgattctgcttaagtggggaggttgaactagatgatgtc

SEQ ID NO: 74206 - DNA, 600 bp, Chicken  19866894356422_2
tagcttgtatgactggctatgtgctttttaggaaagacaggctaggaaagcaaggtgatggagttgctctttatgtgagagatcaactggaatctatcagccttttcctagaggtggatatagagcaagtcaagagcttacacgtaaggattaaaagttagtctaacacaagtgacactagtatgagtagtttctacaggataatttatagggatgtyagtgaggctttctacagacagctggaagtaacctcaaaggccttgattctcatggggactttaaccaactttatatctgctktaaggacaacacagccagggacacacaytctgaggggtttcttcagaacacttataaatttttgacacmggtagtggaggagacaacaagatgtgtgctgctggaccttgtgctaacaaacaataaaggaattgtggagtctggggacagagttgacagcagagaccacaagatctgaatgattctgcttaagtggggaggttgaactagatgatgtccagtggccccttccaaccttaagtgacctgtgtctgtgcaaaaaagaatgcctatattcagagttcttgaaaatattgaaac

SEQ ID NO: 74207 - DNA, 600 bp, Chicken  19866894356422_3
taggaaagacaggctaggaaagcaaggtgatggagttgctctttatgtgagagatcaactggaatctatcagccttttcctagaggtggatatagagcaagtcaagagcttacacgtaaggattaaaagttagtctaacacaagtgacactagtatgagtagtttctacaggataatttatagggatgtyagtgaggctttctacagacagctggaagtaacctcaaaggccttgattctcatggggactttaaccaactttatatctgctktaaggacaacacagccagggacacacaytctgaggggtttcttcagaacacttataaatttttgacacmggtagtggaggagacaacaagatgtgtgctgctggaccttgtgctaacaaacaataaaggaattgtggagtctggggacagagttgacagcagagaccacaagatctgaatgattctgcttaagtggggaggttgaactagatgatgtccagtggccccttccaaccttaagtgacctgtgtctgtgcaaaaaagaatgcctatattcagagttcttgaaaatattgaaacatttgtaaaaacagctggaacctctgtg

SEQ ID NO: 74208 - DNA, 600 bp, Chicken  19866894356422_4
tttatgtgagagatcaactggaatctatcagccttttcctagaggtggatatagagcaagtcaagagcttacacgtaaggattaaaagttagtctaacacaagtgacactagtatgagtagtttctacaggataatttatagggatgtyagtgaggctttctacagacagctggaagtaacctcaaaggccttgattctcatggggactttaaccaactttatatctgctktaaggacaacacagccagggacacacaytctgaggggtttcttcagaacacttataaatttttgacacmggtagtggaggagacaacaagatgtgtgctgctggaccttgtgctaacaaacaataaaggaattgtggagtctggggacagagttgacagcagagaccacaagatctgaatgattctgcttaagtggggaggttgaactagatgatgtccagtggccccttccaaccttaagtgacctgtgtctgtgcaaaaaagaatgcctatattcagagttcttgaaaatattgaaacatttgtaaaaacagctggaacctctgtgactctccagagaaacagaaagtttttagttctatgattctt

SEQ ID NO: 74209 - DNA, 600 bp, Chicken  19866894356422_5
gtggggaggttgaactagatgatgtccagtggccccttccaaccttaagtgacctgtgtctgtgcaaaaaagaatgcctatattcagagttcttgaaaatattgaaacatttgtaaaaacagctggaacctctgtgactctccagagaaacagaaagtttttagttctatgattcttaaatttaatatttttaatatcattgttgttgcttataaagtgtatgtttcagagatcttctagcttatgacctattcttatttttgttgttgatcagtcagaactggaatagattctgctatkctgataaagcttaaactctgaactggtcagagagagaagagagaggacaaaaacagagaaggaaaaattaattaatgtaaactaaaggatgacagaaactcagtggttagactataatgaatatttttctccatctgattggcccttccattttctctactggcagtttgcacttccagctaaggtaatacgagaaaaaaaaatcttatattcaattatcagtgatatacaggtaaatgcatttttttcctcttcaacatcttctgaattattttactacttttcatggtacttcaatga

SEQ ID NO: 74210 - DNA, 600 bp, Chicken  19866894356429_1
tacaagtgaataagcagattagatcacacagacaactggagaccagtctttcttgagaagctgagggatcctgaccagcctgttctgtaacttttgttaatgaattgaaacagaaacccttgcacaggatgcttaaccccttgtccttttactcaaaagcatttctcagacaagcctatatgtaagaaggacatgcaaactgcctgtgcaaatcttgttttgttggtttgtagtgggcacttttgcactacttcgtaaaccattttaatcttctggaaattcgcatccacataaaatccycatcatcttcattagtggtccattcccccattgcagactgttacatttttattacaggaaattacttctataggacactgtggagtagttgatagagtaaatgtgtaagatacaggataaattcccttcataaaactttaatttactgactggcaaaaagttgctacttcttgaaactcttgaaaaggttttttttgcaaggtgttctgtgttaaatggcactgtaattcctaggcaagtgctgacctgttaagggctattaaagaaaaattgtaccactcatatacaattttatttttt

SEQ ID NO: 74211 - DNA, 600 bp, Chicken  19866894356434_1
caagagcagacactcttgtttaccattttctggctagaaaaaggactctgttgaaaatgcagactggtaccagagtggtgaaatagagcaggctgactctaaattatatccatttggttttcacgtttctttctaaatagcaatgattgaagctttaaagccaagatttggatcctcaaagcagaaactctgattccactcacacctctgttttaaatgagatactgcactgagtgacacttctggagaaggaggcacatttctaaattaggataacatagttattactgacaaagataycatttgaaaaaaaaaaacaaactttgaatttattagaagattcatgcagagaaccaatactccactctagggagattctctgtggtggtaagtgattaccagcagaaggattatacaatttagctatccttttccaaagttccattgggcttaaacctgtgattgttatgttacgttaatcatctgtttcctaatacttggaaaagtacaagagaacacaaaacttcctaattttcttttgctttcatttttataaagcttcttcagttttccacacaaaagaattttccttcaattttc

SEQ ID NO: 74212 - DNA, 600 bp, Chicken  19866894356452_1
accaaatccagcccactcttcctcattgtccctgtatgaacaggtgtgaaaactcctgggaaacgggcagttttgctgagaaaagctgccccagaaaaatgcctcgtgacaaagaaggagaaggtgcaatctgtggaatgatagggcaatgtttctgaaattatccttgtcaaagcaactgaagaatgtcacgttcattctcttgcataacagaagcacaccaaaaactttgaacaaacgtgcctggaaatctgataaacagatatttgtggatcttctcttttttaaaagaatgctttycttcaccgtctgtggctcagaatggtacagctttttgtattcagtttttcactcagtttcgtggtatarcattaaccacagcttatatttaaaatgcaagctgcaccttctcttataatgtaggtaatattaaacctgaatcaaaaggaaatgctaacaacagcactaccctggtgtccggtaaacccatcactctcttcctaccgtgtttaaaactcacttaaaacttacaccaaaaaaatttaaaaaaaaaaggaaaaaaagaaaaagaataaagatcaggctttacggattcagtcc

SEQ ID NO: 74213 - DNA, 600 bp, Chicken  19866894356452_2
gttttgctgagaaaagctgccccagaaaaatgcctcgtgacaaagaaggagaaggtgcaatctgtggaatgatagggcaatgtttctgaaattatccttgtcaaagcaactgaagaatgtcacgttcattctcttgcataacagaagcacaccaaaaactttgaacaaacgtgcctggaaatctgataaacagatatttgtggatcttctcttttttaaaagaatgctttycttcaccgtctgtggctcagaatggtacagctttttgtattcagtttttcactcagtttcgtggtatarcattaaccacagcttatatttaaaatgcaagctgcaccttctcttataatgtaggtaatattaaacctgaatcaaaaggaaatgctaacaacagcactaccctggtgtccggtaaacccatcactctcttcctaccgtgtttaaaactcacttaaaacttacaccaaaaaaatttaaaaaaaaaaggaaaaaaagaaaaagaataaagatcaggctttacggattcagtccacattttccttctctaggtttgtttcatattcattagagaagaattgtgattttctgctgagctcctca

SEQ ID NO: 74214 - DNA, 600 bp, Chicken  19866894356456_1
aaagtcttccttctcagaactagctaatttttatctgggtcaaggctttgtcatctttccaatagacttttaaaaagtctgctgctcttgtcacgtttcttaatgagaatcatacatcatttcatcatacttagctatccgcccttatctctcactgtacaaaaggcagaggggtatgcatcctgttttctcccacgctgtcgtagttgttggtttcagaataagttgaatttaagcctcaaactggggagggattcattgcagtcctcatgttggtaagcatttactcatgcaaagcckctaggatgactcagctgagcgtgggcagcaaaccaacacaagctaggattgcctgcactgtgtaaccagcatctattggtcttgttaaaccaaggcctggactgttcggaagcataggggctttgttttctgtgctggatgttcatatgataaaattcatgcatgtcttttctgtaaaactttgccagtagtatgaattacagaagcttgtcaaagcatagtttagcagtgttgcttgtaatttcagttgtcacaggcaatacaccttgtacagcaggatttcagtgccctccattgcca

SEQ ID NO: 74215 - DNA, 599 bp, Chicken  19866894356461_1
  misc_feature (1)..(79): n is any nucleotide
nnnnnnnnnnnnnnnnnnnnnnnnnnnnnnnnnnnnnnnnnnnnnnnnnnnnnnnnnnnnnnnnnnnnnnnnnnnnnnnctggagctcccatatgccagcggagatctgagcatgttggtgctgttgcctgatgaggtttctggcctggagcgggtacggccctggcaggggaagccaactagttcggagttcagtgggaacttctgactgctgtcagacctttggctgtcctctcactccttggctgtgctgtgctggccaggcaggggagcacaacagtggcccaggtgcttctaggygctcaggcagaggttggcctctaaggagagccctagcctcaatgttattaaacaaagagtgtagctaacaaaacaaaggtaaaggagcctagggctgctgtagtcctgcagsaggggatgttggtatrtgcaagttatctccatcaagtactagagacagatatgctagcaggatttctttttttactttgaagaaatttcaattcccagagatcaagtagagttcaaacactgttaccaagtcatagggaccaattctgttgatgaccgttaatagatttttttcatgagtcacccct

SEQ ID NO: 74216 - DNA, 600 bp, Chicken  19866894356461_2
atgttggtgctgttgcctgatgaggtttctggcctggagcgggtacggccctggcaggggaagccaactagttcggagttcagtgggaacttctgactgctgtcagacctttggctgtcctctcactccttggctgtgctgtgctggccaggcaggggagcacaacagtggcccaggtgcttctaggygctcaggcagaggttggcctctaaggagagccctagcctcaatgttattaaacaaagagtgtagctaacaaaacaaaggtaaaggagcctagggctgctgtagtcctgcagsaggggatgttggtatrtgcaagttatctccatcaagtactagagacagatatgctagcaggatttctttttttactttgaagaaatttcaattcccagagatcaagtagagttcaaacactgttaccaagtcatagggaccaattctgttgatgaccgttaatagatttttttcatgagtcacccctccaaataattaaatttaattttttttttgtaaatatgagggatattttaaatgatcatttctcattgaatgtagaaaaaaataggaaaaatataacaagaaaacaaacagcat

SEQ ID NO: 74217 - DNA, 600 bp, Chicken  19866894356461_3
ctgatgaggtttctggcctggagcgggtacggccctggcaggggaagccaactagttcggagttcagtgggaacttctgactgctgtcagacctttggctgtcctctcactccttggctgtgctgtgctggccaggcaggggagcacaacagtggcccaggtgcttctaggygctcaggcagaggttggcctctaaggagagccctagcctcaatgttattaaacaaagagtgtagctaacaaaacaaaggtaaaggagcctagggctgctgtagtcctgcagsaggggatgttggtatrtgcaagttatctccatcaagtactagagacagatatgctagcaggatttctttttttactttgaagaaatttcaattcccagagatcaagtagagttcaaacactgttaccaagtcatagggaccaattctgttgatgaccgttaatagatttttttcatgagtcacccctccaaataattaaatttaattttttttttgtaaatatgagggatattttaaatgatcatttctcattgaatgtagaaaaaaataggaaaaatataacaagaaaacaaacagcatttctgagaggttagct

SEQ ID NO: 74218 - DNA, 600 bp, Chicken  19866894356462_1
gcagccagttactgcagcttagctgatgtgtgttaattcattatgttaaaaagttatgataatttgatcgtgtgcctaagttccaatactgcagccaaatcagccccaagtactgctggtgttactattcacgggtttctggcagagctgctttcatttgttcagatttctggccagtggataatctgagaaactgtatcctaaaggtagcaagaaggtggaggtgccagtggttgggtcagagcctgtctggaggacctgggggctgggattgggaataatcgttgcagtgaaatcccygaagaagatctctgcaaggagaaaaatggcaataggtgaacaaagcagaaaggagaggagcttccagcmacgtcagccagttaagcacagactgaaactttggagaacagaatgcattccctagacattgcaggtcacatacagagttggatctgtctggttaagagactgcacaccagcctcctcctcatcagttctgcccacatcctgccactgaacttcaggaaagatcactctgcatcctctttattaaagaaaaccgggggcagtgcaagattcattaagggaactgtgagggag

SEQ ID NO: 74219 - DNA, 600 bp, Chicken  19866894356462_2
gtgtgcctaagttccaatactgcagccaaatcagccccaagtactgctggtgttactattcacgggtttctggcagagctgctttcatttgttcagatttctggccagtggataatctgagaaactgtatcctaaaggtagcaagaaggtggaggtgccagtggttgggtcagagcctgtctggaggacctgggggctgggattgggaataatcgttgcagtgaaatcccygaagaagatctctgcaaggagaaaaatggcaataggtgaacaaagcagaaaggagaggagcttccagcmacgtcagccagttaagcacagactgaaactttggagaacagaatgcattccctagacattgcaggtcacatacagagttggatctgtctggttaagagactgcacaccagcctcctcctcatcagttctgcccacatcctgccactgaacttcaggaaagatcactctgcatcctctttattaaagaaaaccgggggcagtgcaagattcattaagggaactgtgagggaggtgaaaggataaagctggtggaaaactacaggtgtcttctgattctgcttggaggagcagagcgtgcca

SEQ ID NO: 74220 - DNA, 600 bp, Chicken  19866894356464_1
ttatctatatagtaactccccttattcttcctcctcattgaaatgattcatacctacacatttagtaccgcttctcagggaagtgccaaatattcctaactccttttttctctcagacttgcctcctgtgattagcaataccactgcagccataaatctgaaaccacatgcagaaatctaacacaacctttgcacgttgcagggaattaatttcagaagtgagaaatgacttgcagagcaaatatgaactccttctatatatacgaaatggggaaagtctcctttcaaagggtacatggrtttgtcaggtttttaaaagcgcggtgatgggttaatgttacctcattgaatcccagcagtcagcagtgaagaaaatagattttcatataatatgttattacaattcaggaagccgtatgaagaattagaactgattccaaagttttaaatggtccttctgaatggcaagagcaaaacccaaaaaaaagaaaaaagggttctgttctaggatacggtattcattaaatgtcaggatgacatgcttttgctttaaatcataaatgacaattatgaatttacttgacatatggtggataacat

SEQ ID NO: 74221 - DNA, 600 bp, Chicken  19866894356464_2
actacctgcaaatcaaaaacataaacagtaacagcaagacaatgtaaccctgacagaacagaaaataaagaactccatctgacagcaaatcagctttcccccatcaagtaaccaccaaaatgtgttactctttccttaaaagacaacatattgtgaagtgccaaactgaaccacagaactgaggcacacacattccccctctgaaaaaaaaagtttcataaattgctctctctcccctattattctgtgctattattctgagtattctgagtttaaagagaatgcaatactataagaagmtggtgcacaacacgcagatattcactggcattgccgtgactcacaattttcttcttagctgctcagaagtaactgagtcaatattaaagagtgagagaagtagggttttagacaagttcagcgtggagctggaggatgggagacatttctctacctaagacataaatgtaactggcaagtgaaaacatcttaggaattacgacagcttaaaggtttcactttcaccttattttttaaatgtcacacaggatttcagcttctcaaagaaaaaaatctattttacagtcccttctgtgtgat

SEQ ID NO: 74222 - DNA, 600 bp, Chicken  19866894356465_1
aatctctttcctgaaggcagcaagcagcccccctccctccctcccctctcaggctgacagatggctcccagcctggaggctgcagcagtcccctccctcccctccctgtcagcaggcaggacaccgggcagagcttccttgctttgggatctactagatagttaggcattaactatgcagtgctcattacccggtttatatataaaaaagtacagagcctgtggctcctctgctgctgcctgcctcaccagtggcttagtgggcatgatggggatgggttggactagacgactgtagtgkttttttctgaccttaatgattctgtgattcttggcttcccactcctgtgcctttcctcccagccatgagcatctgatgcttgcattcagtccacagctccttggtggtctaattgggcaatacctttacctgggtcacaactgcagcctccctgaggctgcctataagcagcagacagattactgatgctgcctactctgacgtatatcccaagctgttcaagatgaaggcagtaaggtaacgcacgctcatctgatgacttctttcacccttttctcagcttgtgcagtaatatttctt

SEQ ID NO: 74223 - DNA, 371 bp, Chicken  19866894356465_2
cagcctccctgaggctgcctataagcagcagacagattactgatgctgcctactctgacgtatatcccaagctgttcaagatgaaggcagtaaggtaacgcacgctcatctgatgacttctttcacccttttctcagcttgtgcagtaatatttcttggtggtggacaggagcatttgttgtcgtgtaatcattttaaaagctgagggcacctgatgaaggggaaagctccttttaaaggctctggagctccacaatatatattgcagcaacaagacggtcagtcttcatctgttccctytgcagaccatctgatcttgtttaaagcgtatcttgtcattcttaccacttttaaccctcaatacccactct

SEQ ID NO: 74224 - DNA, 599 bp, Chicken  19866894356466_1
  misc_feature (1)..(208): n is any nucleotide
nnnnnnnnnnnnnnnnnnnnnnnnnnnnnnnnnnnnnnnnnnnnnnnnnnnnnnnnnnnnnnnnnnnnnnnnnnnnnnnnnnnnnnnnnnnnnnnnnnnnnnnnnnnnnnnnnnnnnnnnnnnnnnnnnnnnnnnnnnnnnnnnnnnnnnnnnnnnnnnnnnnnnnnnnnnnnnnnnnnnnnnnnnnnnnnnnnnnnnnnnnnnnnnngtgtctgaatctagcagtgttatttaagtgtaaaatccaagcagattcttggaccatttctattccacaggggtaactactcatatgaaackgaacacacaggctatatttcagatattctcctcccttcagcaatttccattatcatcttaagcattccctgatacagcatgcagattttaagatcatcatgttcctcatcagctatcaaggttttcctctgtttgtgaatctgaaccttaatctagtttgactcatgtaaattttactgcatgcctgcttgcctctttcagtacataaatatttgcaaaaatgtgaccttaggtcttaacccaactccattcttacacaaaacagtactgatcaacccaaacaatttacatatattcca

SEQ ID NO: 74225 - DNA, 600 bp, Chicken  19866894356466_2
aaggagcaatagcaaaagtattgctgaagcattaacagctgcagctctgatttatatttttatttatattaagggaaagagataatgtaacaggcttggaaggagcataaaataaatgaacatgttagcattaaaaacagattaaataagtcacagtacataaaattaatttatctggctttgtacactggactgaagcccatacgggacaactcagatttccagagaaaacctcatagtgctgaaagtttaaacttgcactgttctgtgggagatgagactctgtaccatacaaaaaaytgattttgtacctgaatgatgtgggtactctgtaggcaagatatatctctctttatattgatgagtctttaaaatgtatgcagctggagaactccataagttgctacttacactgaatattaagctaccagggaagaggataatgcaaatttcagttacaagtgaggtttcaaaggcaagacatttacatcaggtcatcatatgggtagtgaaaaaccattaactaccacttacatagcagtactccttttcagctgtttcatctcattgctgctatgcacattgtgtggaatttttcac

SEQ ID NO: 74226 - DNA, 599 bp, Chicken  19866894356470_1
  misc_feature (1)..(95): n is any nucleotide
nnnnnnnnnnnnnnnnnnnnnnnnnnnnnnnnnnnnnnnnnnnnnnnnnnnnnnnnnnnnnnnnnnnnnnnnnnnnnnnnnnnnnnnnnnnnnnncagtaatcttgatgtatgaatttcatacagtttgcaggcatgcttctctccgacctatttctcttttcaggtaacatttgtaatctgataatactgtatttctgtatatgtatataatatatatattctgtataagtatacaggcatgtataagagctgtgtataagaacaggtgacaaatcacatctagtgatggcaatcatgmagagaatatcagggatataatgctattaaaggcctgtatcaaagaacacatgggctaaaatattttcttcagttttggtttctagtggcrggataagggaagatgttattctgattctccagggaattaattgtaatggatagagtgaaaagcyttgtgagttttcaaccactataccatttcaataagcataaccagrgtgttcagaagcccataaggaaatctaattcactagaagttcttgcattagaagaagaggggggaaagtagatttaattcaagatccacataacctaagt

SEQ ID NO: 74227 - DNA, 599 bp, Chicken  19866894356470_2
  misc_feature (1)..(5): n is any nucleotide
nnnnncagtaatcttgatgtatgaatttcatacagtttgcaggcatgcttctctccgacctatttctcttttcaggtaacatttgtaatctgataatactgtatttctgtatatgtatataatatatatattctgtataagtatacaggcatgtataagagctgtgtataagaacaggtgacaaatcacatctagtgatggcaatcatgmagagaatatcagggatataatgctattaaaggcctgtatcaaagaacacatgggctaaaatattttcttcagttttggtttctagtggcrggataagggaagatgttattctgattctccagggaattaattgtaatggatagagtgaaaagcyttgtgagttttcaaccactataccatttcaataagcataaccagrgtgttcagaagcccataaggaaatctaattcactagaagttcttgcattagaagaagaggggggaaagtagatttaattcaagatccacataacctaagttctctgtggtatagaactatcccccttcttatctcaatccatgatatttgtgacttatgacactaacaagaatgcatataaaatacttgc

SEQ ID NO: 74228 - DNA, 600 bp, Chicken  19866894356470_3
tctcttttcaggtaacatttgtaatctgataatactgtatttctgtatatgtatataatatatatattctgtataagtatacaggcatgtataagagctgtgtataagaacaggtgacaaatcacatctagtgatggcaatcatgmagagaatatcagggatataatgctattaaaggcctgtatcaaagaacacatgggctaaaatattttcttcagttttggtttctagtggcrggataagggaagatgttattctgattctccagggaattaattgtaatggatagagtgaaaagcyttgtgagttttcaaccactataccatttcaataagcataaccagrgtgttcagaagcccataaggaaatctaattcactagaagttcttgcattagaagaagaggggggaaagtagatttaattcaagatccacataacctaagttctctgtggtatagaactatcccccttcttatctcaatccatgatatttgtgacttatgacactaacaagaatgcatataaaatacttgctaatgaaactaggatgaacctagatttaattaattactgttttatcatgttcagatacgtgaaca

SEQ ID NO: 74229 - DNA, 600 bp, Chicken  19866894356470_4
tatatgtatataatatatatattctgtataagtatacaggcatgtataagagctgtgtataagaacaggtgacaaatcacatctagtgatggcaatcatgmagagaatatcagggatataatgctattaaaggcctgtatcaaagaacacatgggctaaaatattttcttcagttttggtttctagtggcrggataagggaagatgttattctgattctccagggaattaattgtaatggatagagtgaaaagcyttgtgagttttcaaccactataccatttcaataagcataaccagrgtgttcagaagcccataaggaaatctaattcactagaagttcttgcattagaagaagaggggggaaagtagatttaattcaagatccacataacctaagttctctgtggtatagaactatcccccttcttatctcaatccatgatatttgtgacttatgacactaacaagaatgcatataaaatacttgctaatgaaactaggatgaacctagatttaattaattactgttttatcatgttcagatacgtgaacaagtacagagagccttaaacttgaagcttaactaattcatcattat

SEQ ID NO: 74230 - DNA, 600 bp, Chicken  19866894356470_5
tatagaactatcccccttcttatctcaatccatgatatttgtgacttatgacactaacaagaatgcatataaaatacttgctaatgaaactaggatgaacctagatttaattaattactgttttatcatgttcagatacgtgaacaagtacagagagccttaaacttgaagcttaactaattcatcattattcattcattaacaatactcaaattcctgatatcataagatatagcttagcatatcatcagaatgttagtaaggacaattagatttttaaagtaaaactgtaagatcaaratttttattttgtttgtttgttttgaacagttctgcttacgagtgtgtttatattggaaatcaatgatgtctgtttcccaaatgcaaggctgttgaactgcacatgaaaagttaaaaagactatgcatgatcactccttgtcttttgaaaagagaagactgcaaaagaaaagtaatagtttaggacggacttttcatggaaaaaaagaaaaaaaacagtaaaattttccaatgtttctgtcatttgactcatatctaatcactgcgcaggagttctatgattggtagctgtagcagcatt

SEQ ID NO: 74231 - DNA, 600 bp, Chicken  19866894356472_1
cttcactaaaaaacagaatccatcacagtatttatgcatgctcccccgcaatgagaataacaagggagtttaagagaagtaacaatctctttttcctccttccctgtgggcaggagatatactggcttattttgatatggctttgatttgctttctatttttgtgcttcttttctttgaacaagcagctagagagacttaggaccagaagactggctgctaccagcaacttactcccatttgcaacagctgattactcatctgccagctcatcagtaagctttttgatacaacatcacayttctgtagagactttccctgtcatccttgtgctggtgttctcaccctggaagaatgaactacctgtgaccctaccagcatgggtttgaatcagcttgttgctgtttgtctctccctcatactcttactctccagctagtttggcatttaccccatacttttctgtgctggaaatatttccactgggaacccaatattctgcatctgcttcatagttatatttagtgtgaaaatatctgattcaatagataagaaagatttccctttgcagatatccactactgtggcaaagaataatgaa

SEQ ID NO: 74232 - DNA, 599 bp, Chicken  19866894356480_1
  misc_feature (1)..(25): n is any nucleotide
nnnnnnnnnnnnnnnnnnnnnnnnncagaagatcatgaagtaatccctggtgtctgagaatagaattaagttgagcaaccctaacgaaaagtcagtaattcctcccttatttcagcctctgcattctttgagtcacactttctgatgaagctggtgctctaaggtcagcagaaaaagagatctcaaacttcggggacagcttaaggttgtgcttttgctagcaaaatacttgaccattttaaaagtccttttaacaaatgcaacgaactcaatacaaggggaacttgcgtggacagaccrgcttgccttgcagctgccttagcccatacatttgttaagctctactccattaattttgcttcttcgtgaaaagtgtccttaaccggcaataggaaaaaatgcaaagaaactgcacataggatgaaaaaaaaaagagcttgaatggaacttggcaaatattatagtgtctgctttgcctgagcatttgtgttggctgctgcagttstaactgtggcgatgggatgcactggaattttccttggatttgatttcaggggggtgttccccaagtgcagccatttgcacggcaggacaaaagc

SEQ ID NO: 74233 - DNA, 600 bp, Chicken  19866894356480_2
gttgtgcttttgctagcaaaatacttgaccattttaaaagtccttttaacaaatgcaacgaactcaatacaaggggaacttgcgtggacagaccrgcttgccttgcagctgccttagcccatacatttgttaagctctactccattaattttgcttcttcgtgaaaagtgtccttaaccggcaataggaaaaaatgcaaagaaactgcacataggatgaaaaaaaaaagagcttgaatggaacttggcaaatattatagtgtctgctttgcctgagcatttgtgttggctgctgcagttstaactgtggcgatgggatgcactggaattttccttggatttgatttcaggggggtgttccccaagtgcagccatttgcacggcaggacaaaagccaagctctagaaagcaaatgtcagtcttttgtcagacttgaccactgctaccgrttgcagatcttactgatgcttcctctgaagtggcatcgtcctgagcggtgctgcacctctgggttccacccagtgcagctgttgatcacattgggcagaggtgtaagtatccatcaagtctgaaaattgtaaactccgaagcaaagcttaaa

SEQ ID NO: 74234 - DNA, 533 bp, Chicken  19866894356480_3
ttttgcttcttcgtgaaaagtgtccttaaccggcaataggaaaaaatgcaaagaaactgcacataggatgaaaaaaaaaagagcttgaatggaacttggcaaatattatagtgtctgctttgcctgagcatttgtgttggctgctgcagttstaactgtggcgatgggatgcactggaattttccttggatttgatttcaggggggtgttccccaagtgcagccatttgcacggcaggacaaaagccaagctctagaaagcaaatgtcagtcttttgtcagacttgaccactgctaccgrttgcagatcttactgatgcttcctctgaagtggcatcgtcctgagcggtgctgcacctctgggttccacccagtgcagctgttgatcacattgggcagaggtgtaagtatccatcaagtctgaaaattgtaaactccgaagcaaagcttaaaaaatcacttctgtgcttaactcccccaagtctaactaacggccttgcaattaatatacagtggtcttgcaactaccaactg

SEQ ID NO: 74235 - DNA, 599 bp, Chicken  19866894356488_1
  misc_feature (1)..(26): n is any nucleotide
nnnnnnnnnnnnnnnnnnnnnnnnnntttttgggaatgcagtactgtaggcatcagagtggttaagataccaagccttattactacctatcctgcatagtaattctcaataaagttactgcagatttgttaaacagcaaacattatattcgaggtccttatctgtgattaaaaagactgcaactgattggtatcagatctcttactaatgaacaaagacttgctaattctgtatgttttcaagtgaattgataagcctttatctcagttatgctgaagtatttaacatccagttacttgygctactgagtttacmcaataatatccgatagtgctttcctgggagagctctcttttcagcaagagtgcctacaaagagcatttctatgcaatgtcttttcacctgagcttaactatcttgttttgattttcttctgttcagttttctgcacctactttcaaacagctcataatttcaaaatgctcctggtattttggataaacagcttttgctggtggggacccttgaaacatattatcccattttaaaccattcaagtatttgatttagcatttttttaaagttctctttaatctata

SEQ ID NO: 74236 - DNA, 599 bp, Chicken  19866894356488_2
  misc_feature (1)..(11): n is any nucleotide
nnnnnnnnnnntttttgggaatgcagtactgtaggcatcagagtggttaagataccaagccttattactacctatcctgcatagtaattctcaataaagttactgcagatttgttaaacagcaaacattatattcgaggtccttatctgtgattaaaaagactgcaactgattggtatcagatctcttactaatgaacaaagacttgctaattctgtatgttttcaagtgaattgataagcctttatctcagttatgctgaagtatttaacatccagttacttgygctactgagtttacmcaataatatccgatagtgctttcctgggagagctctcttttcagcaagagtgcctacaaagagcatttctatgcaatgtcttttcacctgagcttaactatcttgttttgattttcttctgttcagttttctgcacctactttcaaacagctcataatttcaaaatgctcctggtattttggataaacagcttttgctggtggggacccttgaaacatattatcccattttaaaccattcaagtatttgatttagcatttttttaaagttctctttaatctataaaatctcctctgyat

SEQ ID NO: 74237 - DNA, 600 bp, Chicken  19866894356488_3
acmcaataatatccgatagtgctttcctgggagagctctcttttcagcaagagtgcctacaaagagcatttctatgcaatgtcttttcacctgagcttaactatcttgttttgattttcttctgttcagttttctgcacctactttcaaacagctcataatttcaaaatgctcctggtattttggataaacagcttttgctggtggggacccttgaaacatattatcccattttaaaccattcaagtatttgatttagcatttttttaaagttctctttaatctataaaatctcctctgyatactcattacacaraaatattttgccttagtttttcatgacctaccacatttcatatgcatttttttaaaatatatgttacggtccaaaaatatgcaatgcttctgaatattaaaccaaaagcaaatacatacaagaaacgtgggccaagaaacatttatacaaatatagatatggtcattatacattgagagagaatcaattataagatgtttatactaggaaaaaaaaaaggcaaatgccatattgattatattaacaataacagcatgtgtcaaatcagtacaataagccttcact

SEQ ID NO: 74238 - DNA, 600 bp, Chicken  19866894356488_4
atagtgctttcctgggagagctctcttttcagcaagagtgcctacaaagagcatttctatgcaatgtcttttcacctgagcttaactatcttgttttgattttcttctgttcagttttctgcacctactttcaaacagctcataatttcaaaatgctcctggtattttggataaacagcttttgctggtggggacccttgaaacatattatcccattttaaaccattcaagtatttgatttagcatttttttaaagttctctttaatctataaaatctcctctgyatactcattacacaraaatattttgccttagtttttcatgacctaccacatttcatatgcatttttttaaaatatatgttacggtccaaaaatatgcaatgcttctgaatattaaaccaaaagcaaatacatacaagaaacgtgggccaagaaacatttatacaaatatagatatggtcattatacattgagagagaatcaattataagatgtttatactaggaaaaaaaaaaggcaaatgccatattgattatattaacaataacagcatgtgtcaaatcagtacaataagccttcactctgctcagcagtgct

SEQ ID NO: 74239 - DNA, 599 bp, Chicken  19866894356493_1
  misc_feature (1)..(111): n is any nucleotide
nnnnnnnnnnnnnnnnnnnnnnnnnnnnnnnnnnnnnnnnnnnnnnnnnnnnnnnnnnnnnnnnnnnnnnnnnnnnnnnnnnnnnnnnnnnnnnnnnnnnnnnnnnnnnnnaatagatgtacacaagttctattttatattagtgtatattacaaaattcaaacatgcagtctctattttgaatgcagaacgctccagtccatgtgtaccggggatgctgctatgttttcttcacagcaccatcatgtgacaggggaaagtcttgtgtttttagctgacttccaacctctttgcctctcrccggcgtgagagtcccctctttgcagggcctggtgctgccatctggcacaggagaggctctcagagctgcttgtctcagagcgtgcggcagctcctttgctggggccactttgctgctacctcccagtgcttcygatgctttagtgctgcaggaaattgcctctttcttggccaccatgggacacgttgcctcccagggtttcgctgagctcagtgactccgtgcaggatgcactcctcgtggtcaaaccactggcactggatggtttggccttctcctggcacactcctgcttgtgaa

SEQ ID NO: 74240 - DNA, 600 bp, Chicken  19866894356493_2
ttatattagtgtatattacaaaattcaaacatgcagtctctattttgaatgcagaacgctccagtccatgtgtaccggggatgctgctatgttttcttcacagcaccatcatgtgacaggggaaagtcttgtgtttttagctgacttccaacctctttgcctctcrccggcgtgagagtcccctctttgcagggcctggtgctgccatctggcacaggagaggctctcagagctgcttgtctcagagcgtgcggcagctcctttgctggggccactttgctgctacctcccagtgcttcygatgctttagtgctgcaggaaattgcctctttcttggccaccatgggacacgttgcctcccagggtttcgctgagctcagtgactccgtgcaggatgcactcctcgtggtcaaaccactggcactggatggtttggccttctcctggcacactcctgcttgtgaagcttcctgctttttttgcttcccatctctctcttctttacacgaggcacccaaatgggggaaatcctttctcttttccatctctccagaaccagccatgctgagctttaaggggcccaaaacactctgcgccagc

SEQ ID NO: 74241 - DNA, 600 bp, Chicken  19866894356497_1
agagaaaaacctaatcatccataacttcctttaaatacacacgtatacaactgttttttttttcctcactctgattattttccattttcaaccaggtttaatgcctttcctatgggaaaccacatattccctatcctgaataccctttcttccaatccatcttccctattctcctcacaaatacacattttattggaaaaatattgtgataatatttgacattttctttctagttccccctgcttactgtgcacagagagctcctcaaaatggagatccatctcagtgtatgatattacycaataccagaccacagttacaataacttggtagttacttcactgctaaaaatacaaaacttgtcctatataacattgcaaaaagtttgctctgttaacaaaagagtcactgttgttactggataagcaaaggcttattttctgagtttaaatctcaatgtaattaaacagagaggttaatattgcatttgcaagtaacacagctctgctaatgtcaattattctttgcaaacacagtatgagttctgattaatgaaacaaatcagttcaacgtgcaccactgcatagacccattgtactt

SEQ ID NO: 74242 - DNA, 599 bp, Chicken  19866894356504_1
  misc_feature (1)..(58): n is any nucleotide
nnnnnnnnnnnnnnnnnnnnnnnnnnnnnnnnnnnnnnnnnnnnnnnnnnnnnnnnnnacagggccatgcatgcaggggacagcactgtgcacacagggacacggctgtggcctcaccaggatgcaggcaggagtcctgcagtgagcgtggtgcctgggttgctccatgcacgcaggattgcttagtacagtgcagagctgagctgctgggtgctggcagtgcagggttcagcgctgtggctgcagggagatggtaactgctgtgatatgggtgcttgcagtgctggagctggattttgsccctgaaccagcaccagggggatctcagccacgtgcttcgacatcgctgtggggctgagctttgccccaccgtctggatgggggccgcctstgatcagcaaacaaatygagcctgtgatttttcttccccactaggtgttctcacggccatctgcatctcagcacgaggcttggctggcagcaccatgagctgcagggggcaggtaaggcatgcctggagctcccacccgagcacgcggttcccccayggcacccggagtccactgatggctgtttcatccatctgtccacactttgct

SEQ ID NO: 74243 - DNA, 600 bp, Chicken  19866894356504_2
acacagggacacggctgtggcctcaccaggatgcaggcaggagtcctgcagtgagcgtggtgcctgggttgctccatgcacgcaggattgcttagtacagtgcagagctgagctgctgggtgctggcagtgcagggttcagcgctgtggctgcagggagatggtaactgctgtgatatgggtgcttgcagtgctggagctggattttgsccctgaaccagcaccagggggatctcagccacgtgcttcgacatcgctgtggggctgagctttgccccaccgtctggatgggggccgcctstgatcagcaaacaaatygagcctgtgatttttcttccccactaggtgttctcacggccatctgcatctcagcacgaggcttggctggcagcaccatgagctgcagggggcaggtaaggcatgcctggagctcccacccgagcacgcggttcccccayggcacccggagtccactgatggctgtttcatccatctgtccacactttgctgctgctctgttcctatttcactcccccagctttgcagccctgtcgtcacggaggtcctgtcagcatgtaaatacggaaggcgctctgcccgc

SEQ ID NO: 74244 - DNA, 600 bp, Chicken  19866894356504_3
tggcctcaccaggatgcaggcaggagtcctgcagtgagcgtggtgcctgggttgctccatgcacgcaggattgcttagtacagtgcagagctgagctgctgggtgctggcagtgcagggttcagcgctgtggctgcagggagatggtaactgctgtgatatgggtgcttgcagtgctggagctggattttgsccctgaaccagcaccagggggatctcagccacgtgcttcgacatcgctgtggggctgagctttgccccaccgtctggatgggggccgcctstgatcagcaaacaaatygagcctgtgatttttcttccccactaggtgttctcacggccatctgcatctcagcacgaggcttggctggcagcaccatgagctgcagggggcaggtaaggcatgcctggagctcccacccgagcacgcggttcccccayggcacccggagtccactgatggctgtttcatccatctgtccacactttgctgctgctctgttcctatttcactcccccagctttgcagccctgtcgtcacggaggtcctgtcagcatgtaaatacggaaggcgctctgcccgcgggagctcggctgtcct

SEQ ID NO: 74245 - DNA, 600 bp, Chicken  19866894356504_4
agatggtaactgctgtgatatgggtgcttgcagtgctggagctggattttgsccctgaaccagcaccagggggatctcagccacgtgcttcgacatcgctgtggggctgagctttgccccaccgtctggatgggggccgcctstgatcagcaaacaaatygagcctgtgatttttcttccccactaggtgttctcacggccatctgcatctcagcacgaggcttggctggcagcaccatgagctgcagggggcaggtaaggcatgcctggagctcccacccgagcacgcggttcccccayggcacccggagtccactgatggctgtttcatccatctgtccacactttgctgctgctctgttcctatttcactcccccagctttgcagccctgtcgtcacggaggtcctgtcagcatgtaaatacggaaggcgctctgcccgcgggagctcggctgtcctcgtttgtcaccgccgtgttgtcacttccccaccaagctctctccttcctgcacggctgcattggttccaattgcccccgacgtcctgagcgctcccaccgcgctgctctgcaatgggtccttggtggccgttagcaatta

SEQ ID NO: 74246 - DNA, 600 bp, Chicken  19866894356509_1
taataaagaagtctaggctggctgaacttttttttttttcagtctagagaagtacttgtgctctgcatttaaaatgagtttgaagacagtgagaaaatcagtcagttatgaatagttaacagccagttttccactattcaaccaagagaacagcttcccttccaggtagataatccacacgtaacattgctttgcagtgaaacatttactgttcagatatattaatcaatcatataaaaatactttgttatagaaatagattcttaggctaaaaataatttaggactcgtattgctcagyaaagaacaaggtagcttccctttcaacacataaatctgcatcattactagaggttgctgagatgcttctgatgccttattagataacgtttagatagattacctgcagcactaaacaatttactgagaacagaaaatgggctttcaattcagactagaaatgaaacatcacaattatgcgagatgctctgtaaccttggaaacaattgagagcagtgacatcagcaacaattatgtgcaatttttgtctttagtttatcaccaaggtaaccagagcagatttccctgcttgaaattttaa

SEQ ID NO: 74247 - DNA, 600 bp, Chicken  19866894356515_1
aagaattttgatccaaacgagtcactgtccccctagataggatgcaagaaatgttaaatattcttatgtagtttgcagatccgaaagtaaaataaattctcttcctttagcgccgttccttcctttgtattctgatgactcatctggtgaagcattatggtgccaatttctctccttttcaaagctaacaggtgtttcttggatttgcctcatctgctacgaatcaccgttgagtccaactggagattttcccttcagcagacaggcagtgccctgcacattggtattctgcacctgctyccgccatgcccagtccatccccagtatcgtagttgagtctggctggacatctcttgacagctggttcatcagatccacatcattgtttgtgcagggtggatttattgtacagagagcccggggcacctgtatctcattatgtaaatgcaaccactctgtcctaagatgttgtttactgttggaatgtgattacaggcaggtactggtcctgaattgtttccttttctgagaagatcagygtttgagaatggtaacatcaacaatcatccttaggcaaaatgttttttttattttttttta

SEQ ID NO: 74248 - DNA, 499 bp, Chicken  19866894356515_2
ctggagattttcccttcagcagacaggcagtgccctgcacattggtattctgcacctgctyccgccatgcccagtccatccccagtatcgtagttgagtctggctggacatctcttgacagctggttcatcagatccacatcattgtttgtgcagggtggatttattgtacagagagcccggggcacctgtatctcattatgtaaatgcaaccactctgtcctaagatgttgtttactgttggaatgtgattacaggcaggtactggtcctgaattgtttccttttctgagaagatcagygtttgagaatggtaacatcaacaatcatccttaggcaaaatgttttttttatttttttttacagtgcagtgaaagcttattttaataactttctgttgcccaaattctcatctttttaaagttaaatgttctgccagaatgagatgaatgagtcgtctgttcaaaatacacaacacgcacaagttctcatcagtcttta

SEQ ID NO: 74249 - DNA, 505 bp, Chicken  19866894356516_1
cacaaaatggtaaagtgctcagtgcctttctgtgatgccaagctgtgttatgtactgctgatgaaggctgcactcagtgagtatctagtctcctgagcaagggaaggtaatgtgagtgctgtgcaagctgatccatcatattgcagcctacaggctcagacagaccctgcctgaccagtgtacagggttgtaaagtagaacagagaaatgagataaagatctctgaccccctaggctgtgttaggtatagttatttttcagattagatgaatgcttggagctcacgggcataacatccaytctttgtgtagactatatgtcagaagtaatgaaatctatgtaaaatgagattcctaaaacaataggagtgatttcctaaaatatagggttttgcagtgatagcctgggagaggcaacgagttgtgctgcagtctgaatgcatatagggaggagcaagtattttcttgcggcaggttataagcatgggtgaaaaggtgcagcagga

SEQ ID NO: 74250 - DNA, 562 bp, Chicken  19866894356528_1
tggagggtattccaaagctacagagcgccacttgccagtgaacaagtgcctacatattacccaggctatgcaaaagagaaataactgcttaatctcatgatacgatgcagaaatttcatgtgattctatctcctggaaatgaaactttgaggcacacggttcaagtccttatgtaaaaaaacctcatttggtagtgaaacataactttggacccatgaatatagccaaagcctctcccagttatagctatgcatcctctcagactcaggatagtgtctcattttggactcctgactaaartggtgcacacagggaaatcttgtaagttttgatcatagctaggaccaacagtgacttttattcctcggctttgatggttattgcaatctattaaagtttcctctctaaaaagacttgaatgcactcctagttgagcagaccagaaaaatagtcactccaatctcaacaagcactttatacagtacatttatctggcaattgattgatattggatctattttagcattatgctttgtttaaaaaaatcctccatataaatgcc

SEQ ID NO: 74251 - DNA, 599 bp, Chicken  19866894356537_1
  misc_feature (1)..(121): n is any nucleotide
nnnnnnnnnnnnnnnnnnnnnnnnnnnnnnnnnnnnnnnnnnnnnnnnnnnnnnnnnnnnnnnnnnnnnnnnnnnnnnnnnnnnnnnnnnnnnnnnnnnnnnnnnnnnnnnnnnnnnnnnnctacagaatgacaatacaatgtgaaggagctgacaagatcatgtcaggaacaaatcaatctgtcttccatctttaatagggcaatcatcccaacagatagactggtgggagaaggcatgatttatcttgacttcactgacattgttgtaagtaaaataagtaaacagagttaaaaatamaggaacatttaagactgcaaaattgttctcaaaatagatacacttttcactgcctgatcaggaaacatttcaaagaggatcctcttgggagccaccttaccttcttctattcagatttttaattaacaactttttattgtaggctagatagcttattgcacaatttgtgaattgttcctaggtaggaacagtaggaattgctttggaagatgagatttgatgtgcaaatgatggagaggctgtttgaaatcaacaggaagagatacataaaccatccagagggaagtactatacttggg

SEQ ID NO: 74252 - DNA, 600 bp, Chicken  19866894356537_2
caacaggaagagatacataaaccatccagagggaagtactatacttgggaaggaactattaaatgaacaaagtaagaaataacaggtcagatggaccacagaccaaatatatgtgggtagcattgtgatattacaaaaacacccttctgtggttttatggaagccagaagaatgagctactctcctggactcggtactttttcgatccaaaatgtaatatggtatctgcttttgggaattatatctttaaaagtttgcagttaatatggagatgttttcaataattgaagcttaggaaakatgaattattaaaytgaaagaagtataatagtcttcatcttycctttacacaggaaagaaaaagaaataatcatcctaacctgcagcaaaggctgtttgcctcagatgtatgaaagcttttaagggcagcttaggctaagttggtttacatttgggccaactatttaattctgccttagagccaggatgagaactacctatttttctgtatctgctcaaatgtaaaggccacctggacttttggggaaaaaaaacatcatctatcctatatcatgttgctcttctatcactgactaggtc

SEQ ID NO: 74253 - DNA, 600 bp, Chicken  19866894356537_3
acataaaccatccagagggaagtactatacttgggaaggaactattaaatgaacaaagtaagaaataacaggtcagatggaccacagaccaaatatatgtgggtagcattgtgatattacaaaaacacccttctgtggttttatggaagccagaagaatgagctactctcctggactcggtactttttcgatccaaaatgtaatatggtatctgcttttgggaattatatctttaaaagtttgcagttaatatggagatgttttcaataattgaagcttaggaaakatgaattattaaaytgaaagaagtataatagtcttcatcttycctttacacaggaaagaaaaagaaataatcatcctaacctgcagcaaaggctgtttgcctcagatgtatgaaagcttttaagggcagcttaggctaagttggtttacatttgggccaactatttaattctgccttagagccaggatgagaactacctatttttctgtatctgctcaaatgtaaaggccacctggacttttggggaaaaaaaacatcatctatcctatatcatgttgctcttctatcactgactaggtcttctcccagctgaa

SEQ ID NO: 74254 - DNA, 600 bp, Chicken  19866894356537_4
acttgggaaggaactattaaatgaacaaagtaagaaataacaggtcagatggaccacagaccaaatatatgtgggtagcattgtgatattacaaaaacacccttctgtggttttatggaagccagaagaatgagctactctcctggactcggtactttttcgatccaaaatgtaatatggtatctgcttttgggaattatatctttaaaagtttgcagttaatatggagatgttttcaataattgaagcttaggaaakatgaattattaaaytgaaagaagtataatagtcttcatcttycctttacacaggaaagaaaaagaaataatcatcctaacctgcagcaaaggctgtttgcctcagatgtatgaaagcttttaagggcagcttaggctaagttggtttacatttgggccaactatttaattctgccttagagccaggatgagaactacctatttttctgtatctgctcaaatgtaaaggccacctggacttttggggaaaaaaaacatcatctatcctatatcatgttgctcttctatcactgactaggtcttctcccagctgaaagtcagagttgcaaaatactaatgaggc

SEQ ID NO: 74255 - DNA, 600 bp, Chicken  19866894356546_1
agaaagtccagtgctctcaagacttgggctaacttcacagatgtgggtgaactgtactgtgtacatgtaggttgaacgtgtcacaagggaagaagcagtgcagacctcacatacctctgaaaagagatggtgaggtctgctgtgtcaggaagttttaatagctctccatagcgaaggatgctgtaattttccctcactcctctaattttgttgtttcctcagactgcatccatggagcacattcagggagcttggaagactatcagtaatggttttggactcaaggattctgtctttgayggcccaaactgcatttcaccgaccattgtccagcagtttggttatcagcgccgagcatctgatgatggcaagatatcagatacttccaaaaccagtaataccattcgagttttcttgcccaacaagcaacgtacagtggtaagtccgtgttaccttgatggaagaaatgtggtactgtttgcatggctaacgctatgacatttatttttactatagaaatgccaagcttcacaaaactttcctgtgttttttttatattgtcatcgagtttccaattcttgaggacacgtgttgtaagct

SEQ ID NO: 74256 - DNA, 600 bp, Chicken  19866894356553_1
ataagaggcttcttatggttttatgtattaacagatttgtagaagctgaactcatagtacctaataatatggtacatccaagtcaatacagtaaaaggatctttacggaatgtaatccacttaaattaaaaatagacacagattgaatcataaagcctaaattaaaattgacatacagtcaatcaataaaacatttcgtataaagtcttatgtaaactactataatgtttttcaatttcatagcataaaaagttatgtgtatttctttttatttaataaagacttcatcacttcagaacragtcatcataaataccacccggacaatgacttaaaactttccaggcacgtacaatatcctgttaattaaatacacctgtatttgcagatgtcagatttatttctcttttaaaacgtgtattagttgtcaagacttgaattatctgattaaaccatttcatctttaaaatcactacgatttgtaagaaacctgggccaacaccatatgagtgataagtcagtggaagcaaaataaaaaaatactatactttataatataaagtatttttagattcttacatacagaaaaactttgaataaa

SEQ ID NO: 74257 - DNA, 599 bp, Chicken  19866894356556_1
  misc_feature (1)..(13): n is any nucleotide
nnnnnnnnnnnnnattgctgtgttgtagtgtgacagctacatattgcagggagcctgagagtggcaggcttgttgcctctgctggatgaccggtggatgaggcatcttcatcttgagactgggagagaccttagtgttttatataaagaaatcaatatttctgattaaaaaaaaaaagaaaaagtttctacattctatcaaattatgggcagaaatgaattcttatgagtacaaacccatggctctgaggcttggtggttaagaagggaatctgggagatatcgtgtgctttagctttcytgggataaaatcagaaacaaaaagcatgaagaccctctggaagtcatcactatctcctgcaagaactacataataaaatttctcattgttgttcaaccctgagcatgaccccctggaacactattttccctaccatgtacccacctttgcgtcagagrtaaaaaagctatcacagattaatcaaatgccatggagatcrtcttgtgtcagtatggcaaaacctttgctgtccaccaggataggagctgtgtgaaaaatggtgcattgaggcagtggtctgaacagttcaaagaacaaag

SEQ ID NO: 74258 - DNA, 600 bp, Chicken  19866894356556_2
ttctgattaaaaaaaaaaagaaaaagtttctacattctatcaaattatgggcagaaatgaattcttatgagtacaaacccatggctctgaggcttggtggttaagaagggaatctgggagatatcgtgtgctttagctttcytgggataaaatcagaaacaaaaagcatgaagaccctctggaagtcatcactatctcctgcaagaactacataataaaatttctcattgttgttcaaccctgagcatgaccccctggaacactattttccctaccatgtacccacctttgcgtcagagrtaaaaaagctatcacagattaatcaaatgccatggagatcrtcttgtgtcagtatggcaaaacctttgctgtccaccaggataggagctgtgtgaaaaatggtgcattgaggcagtggtctgaacagttcaaagaacaaaggagcccttctgtgtattcctggaggagaatctccaagagcatcacatggagcaagtgtgctgggcacagggatcacattacccaaaggaccacattacctaaaggaagaacacgcgtggtttagaaaacacaatcagttctttctatgagaaaaaaaaa

SEQ ID NO: 74259 - DNA, 600 bp, Chicken  19866894356556_3
aaattatgggcagaaatgaattcttatgagtacaaacccatggctctgaggcttggtggttaagaagggaatctgggagatatcgtgtgctttagctttcytgggataaaatcagaaacaaaaagcatgaagaccctctggaagtcatcactatctcctgcaagaactacataataaaatttctcattgttgttcaaccctgagcatgaccccctggaacactattttccctaccatgtacccacctttgcgtcagagrtaaaaaagctatcacagattaatcaaatgccatggagatcrtcttgtgtcagtatggcaaaacctttgctgtccaccaggataggagctgtgtgaaaaatggtgcattgaggcagtggtctgaacagttcaaagaacaaaggagcccttctgtgtattcctggaggagaatctccaagagcatcacatggagcaagtgtgctgggcacagggatcacattacccaaaggaccacattacctaaaggaagaacacgcgtggtttagaaaacacaatcagttctttctatgagaaaaaaaaaagcatgaaacaggctagttatatctggaactgggacatgaa

SEQ ID NO: 74260 - DNA, 600 bp, Chicken  19866894356563_1
caagctctgtggagctgaactataccctgcagccaaaaggagccctcagcttctttccagcagagcaggacaactctgctcccttccaaggctgtttgactgtatggcttcacagctccccacatacaaagggtcactgctcttcggtgtaacccgggaaggcacagggtgatgtggcttggctgtgcatgagaaggggcatacctgcagcaaaacctggatttggcagccagagctgctggatcccggctcgctgccctgctctcagctctgtgagcaatagtgaagcacagcaaaaamccaaattcagagagcaccagcactgtccccygcaccctgcctgcttacaaatcaagccagaactgggcttgtaaatctccttttatcttcctgggaggcaaccccagattgagtgattttaaccaggccagcttgtccatcctgaacacgcagctaattgctgcaggttcattaacacagaataagactttttaaaaggtagtagagcaggacagcgatgctttgcaatttcagagtgcctggaaatttatgatcccattaccagatacttaactattcctgctgtgattgaaggtaata

SEQ ID NO: 74261 - DNA, 600 bp, Chicken  19866894356563_2
gccaaaaggagccctcagcttctttccagcagagcaggacaactctgctcccttccaaggctgtttgactgtatggcttcacagctccccacatacaaagggtcactgctcttcggtgtaacccgggaaggcacagggtgatgtggcttggctgtgcatgagaaggggcatacctgcagcaaaacctggatttggcagccagagctgctggatcccggctcgctgccctgctctcagctctgtgagcaatagtgaagcacagcaaaaamccaaattcagagagcaccagcactgtccccygcaccctgcctgcttacaaatcaagccagaactgggcttgtaaatctccttttatcttcctgggaggcaaccccagattgagtgattttaaccaggccagcttgtccatcctgaacacgcagctaattgctgcaggttcattaacacagaataagactttttaaaaggtagtagagcaggacagcgatgctttgcaatttcagagtgcctggaaatttatgatcccattaccagatacttaactattcctgctgtgattgaaggtaataatgacaaaacgccctatcttgcttgacccaa

SEQ ID NO: 74262 - DNA, 599 bp, Chicken  19866894356575_1
  misc_feature (1)..(65): n is any nucleotide
nnnnnnnnnnnnnnnnnnnnnnnnnnnnnnnnnnnnnnnnnnnnnnnnnnnnnnnnnnnnnnnnngaaatgcattttcacttagtcacactttttgttttacagtgcttccatcatcctgtttaacagtcttatatcatcatgactcaaaaagaaagaaaatattaattaaccacaaattctgacacagaacatctgaaatacacaattgctctcttagagctttaatttttttttttaattttggggcatattatgttttatacttacaagacaacttgaagcatttctgaatacagawtttttgaaaatttcaacatcttttctatcttagcatgacataaactaccattaacttcctggcatgccaattactaaagagaaaacatttgttccagtaagcctacagttatgtagaccaatggctaaaaagaggcctttttcacctttaaggtcatcactgaaacaaaggccaagcctagggtcaggtctgtactcattgtaaaagaacatgctttaattgtaggatgaccaatggacatgagataaacacaatgaagccaaagcacctccaattatccactamgtaaatctaatcat

SEQ ID NO: 74263 - DNA, 600 bp, Chicken  19866894356575_2
tttctgaatacagawtttttgaaaatttcaacatcttttctatcttagcatgacataaactaccattaacttcctggcatgccaattactaaagagaaaacatttgttccagtaagcctacagttatgtagaccaatggctaaaaagaggcctttttcacctttaaggtcatcactgaaacaaaggccaagcctagggtcaggtctgtactcattgtaaaagaacatgctttaattgtaggatgaccaatggacatgagataaacacaatgaagccaaagcacctccaattatccactamgtaaatctaatcatttttcatggaatgyrtacrgtactggcctttcagatgtattcttccttggggtagaacatgtaatgactaaagggtaagaaaaacaccattttctttaataatcagaacagggaatgagaaattacactggacagcttcaattcaaagctagagaagagaataacaacaaaasatctggagtactgggtcctgatcagggcctcttggtacagaggagagatggaactacttgagaaagtccagaaaagtgccacaaagatgcttaacagtctagagcatcactcc

SEQ ID NO: 74264 - DNA, 600 bp, Chicken  19866894356575_3
caacatcttttctatcttagcatgacataaactaccattaacttcctggcatgccaattactaaagagaaaacatttgttccagtaagcctacagttatgtagaccaatggctaaaaagaggcctttttcacctttaaggtcatcactgaaacaaaggccaagcctagggtcaggtctgtactcattgtaaaagaacatgctttaattgtaggatgaccaatggacatgagataaacacaatgaagccaaagcacctccaattatccactamgtaaatctaatcatttttcatggaatgyrtacrgtactggcctttcagatgtattcttccttggggtagaacatgtaatgactaaagggtaagaaaaacaccattttctttaataatcagaacagggaatgagaaattacactggacagcttcaattcaaagctagagaagagaataacaacaaaasatctggagtactgggtcctgatcagggcctcttggtacagaggagagatggaactacttgagaaagtccagaaaagtgccacaaagatgcttaacagtctagagcatcactcctatgaagaaaggctgagagaactaggac

SEQ ID NO: 74265 - DNA, 600 bp, Chicken  19866894356575_4
aacatcttttctatcttagcatgacataaactaccattaacttcctggcatgccaattactaaagagaaaacatttgttccagtaagcctacagttatgtagaccaatggctaaaaagaggcctttttcacctttaaggtcatcactgaaacaaaggccaagcctagggtcaggtctgtactcattgtaaaagaacatgctttaattgtaggatgaccaatggacatgagataaacacaatgaagccaaagcacctccaattatccactamgtaaatctaatcatttttcatggaatgyrtacrgtactggcctttcagatgtattcttccttggggtagaacatgtaatgactaaagggtaagaaaaacaccattttctttaataatcagaacagggaatgagaaattacactggacagcttcaattcaaagctagagaagagaataacaacaaaasatctggagtactgggtcctgatcagggcctcttggtacagaggagagatggaactacttgagaaagtccagaaaagtgccacaaagatgcttaacagtctagagcatcactcctatgaagaaaggctgagagaactaggact

SEQ ID NO: 74266 - DNA, 600 bp, Chicken  19866894356575_5
tcttttctatcttagcatgacataaactaccattaacttcctggcatgccaattactaaagagaaaacatttgttccagtaagcctacagttatgtagaccaatggctaaaaagaggcctttttcacctttaaggtcatcactgaaacaaaggccaagcctagggtcaggtctgtactcattgtaaaagaacatgctttaattgtaggatgaccaatggacatgagataaacacaatgaagccaaagcacctccaattatccactamgtaaatctaatcatttttcatggaatgyrtacrgtactggcctttcagatgtattcttccttggggtagaacatgtaatgactaaagggtaagaaaaacaccattttctttaataatcagaacagggaatgagaaattacactggacagcttcaattcaaagctagagaagagaataacaacaaaasatctggagtactgggtcctgatcagggcctcttggtacagaggagagatggaactacttgagaaagtccagaaaagtgccacaaagatgcttaacagtctagagcatcactcctatgaagaaaggctgagagaactaggactgttc

SEQ ID NO: 74267 - DNA, 600 bp, Chicken  19866894356575_6
caagcctagggtcaggtctgtactcattgtaaaagaacatgctttaattgtaggatgaccaatggacatgagataaacacaatgaagccaaagcacctccaattatccactamgtaaatctaatcatttttcatggaatgyrtacrgtactggcctttcagatgtattcttccttggggtagaacatgtaatgactaaagggtaagaaaaacaccattttctttaataatcagaacagggaatgagaaattacactggacagcttcaattcaaagctagagaagagaataacaacaaaasatctggagtactgggtcctgatcagggcctcttggtacagaggagagatggaactacttgagaaagtccagaaaagtgccacaaagatgcttaacagtctagagcatcactcctatgaagaaaggctgagagaactaggactgttcagcctggagaaggctcatgaggaatcttatcaatgtctattaacacctgaagcgatgattcaaagaggggagagccaggcccttgccacaagagaacaggcaatgggcacaaactgaaatatgtgaggctccctctgaatatcaggaaacactt

SEQ ID NO: 74268 - DNA, 599 bp, Chicken  19866894356578_1
  misc_feature (1)..(92): n is any nucleotide
nnnnnnnnnnnnnnnnnnnnnnnnnnnnnnnnnnnnnnnnnnnnnnnnnnnnnnnnnnnnnnnnnnnnnnnnnnnnnnnnnnnnnnnnnnnntgtaaactttagtgaaaaggagtaaagtagactcctgtggatgataacattttgtaaatgatccttttgctgtataacagtgcattctggctgaacactgctgaatgatccatatttctcctgccacagctagggatccagtattttgcctgcaggactggatccagtcactgtaatgacttaaagctcttaatctgcctgcactgayttcagcagaagaagggcagtgtggacttacagcacaaggttgtaygcattcttggatctctgcccctaagagctatacctgtgtctttgatgctgacagttctgtatcagttcctttccttttaagcaagttgctgatactactgcttatagaaggtaaacaacaacaacagttttcagaataggaaaatctgatataccacctgtccaacttgttttagtggcaacagtagtctggcatgaatgcagcagaaactgtgaaagtgggctgggagggaaggttaaaaggaatataaacaa

SEQ ID NO: 74269 - DNA, 599 bp, Chicken  19866894356578_2
  misc_feature (1)..(47): n is any nucleotide
nnnnnnnnnnnnnnnnnnnnnnnnnnnnnnnnnnnnnnnnnnnnnnntgtaaactttagtgaaaaggagtaaagtagactcctgtggatgataacattttgtaaatgatccttttgctgtataacagtgcattctggctgaacactgctgaatgatccatatttctcctgccacagctagggatccagtattttgcctgcaggactggatccagtcactgtaatgacttaaagctcttaatctgcctgcactgayttcagcagaagaagggcagtgtggacttacagcacaaggttgtaygcattcttggatctctgcccctaagagctatacctgtgtctttgatgctgacagttctgtatcagttcctttccttttaagcaagttgctgatactactgcttatagaaggtaaacaacaacaacagttttcagaataggaaaatctgatataccacctgtccaacttgttttagtggcaacagtagtctggcatgaatgcagcagaaactgtgaaagtgggctgggagggaaggttaaaaggaatataaacaagtgggaaaaaaaaaaaacagaaaaaaaaaagaaaagaaaagcaga

SEQ ID NO: 74270 - DNA, 600 bp, Chicken  19866894356578_3
cagaagaagggcagtgtggacttacagcacaaggttgtaygcattcttggatctctgcccctaagagctatacctgtgtctttgatgctgacagttctgtatcagttcctttccttttaagcaagttgctgatactactgcttatagaaggtaaacaacaacaacagttttcagaataggaaaatctgatataccacctgtccaacttgttttagtggcaacagtagtctggcatgaatgcagcagaaactgtgaaagtgggctgggagggaaggttaaaaggaatataaacaagtgggyaaaaaaaaaaacagaaaaaaaaaagaaaagaaaagcagatatacagaaagtaagaaattataaatccacacaacagcaaacaatycctttcacagttttgagccagtgcacaaaatctgcatttatgataacctctgatggcaaggagtctacaaacatgtacagccttactcacgccaaatgagttgccttacaccacgtgtgccctcagtgttttcattgtcataacagacaaacccatgtccagctcatctgaaagaatttttcacgtgaattttgttgttgctgacttctgtgcac

SEQ ID NO: 74271 - DNA, 600 bp, Chicken  19866894356578_4
tgctgacagttctgtatcagttcctttccttttaagcaagttgctgatactactgcttatagaaggtaaacaacaacaacagttttcagaataggaaaatctgatataccacctgtccaacttgttttagtggcaacagtagtctggcatgaatgcagcagaaactgtgaaagtgggctgggagggaaggttaaaaggaatataaacaagtgggaaaaaaaaaaaacagaaaaaaaaaagaaaagaaaagcagatatacagaaagtaagaaattataaatccacacaacagcaaacaatycctttcacagttttgagccagtgcacaaaatctgcatttatgataacctctgatggcaaggagtctacaaacatgtacagccttactcacgccaaatgagttgccttacaccacgtgtgccctcagtgttttcattgtcataacagacaaacccatgtccagctcatctgaaagaatttttcacgtgaattttgttgttgctgacttctgtgcactcccattttccagtctcttcatgggtcatgtgtctagtaacatgcaccaggctgcacaatatgtatcctgaacgtgctgctgagt

SEQ ID NO: 74272 - DNA, 599 bp, Chicken  19866894356579_1
  misc_feature (1)..(134): n is any nucleotide
nnnnnnnnnnnnnnnnnnnnnnnnnnnnnnnnnnnnnnnnnnnnnnnnnnnnnnnnnnnnnnnnnnnnnnnnnnnnnnnnnnnnnnnnnnnnnnnnnnnnnnnnnnnnnnnnnnnnnnnnnnnnnnnnnnnnnntatataagcttgtgtaaactcagagaatgtttcagagcacggatgcattactagtattattattagtttatttagtagttctaaaatacataaaaatacattcctggctttttagagcagagaatttaaacatgacacagagacagagtagcaaagaagtgtgtcragaaagattttaaaaatttgtaaacaggtcatgtggatgcatagttgagaaaagagcatatcttgcactgaaaaagggttttgtttggttgtwttttkaaattttgtccactagaaaaaacctttctttagaaatgtctcacaattttgtttcttgcaattcctagcccctgccaacattcctcacacaaagaagcaggattaatcctttggaaaagaaataagaagtaggctaggattatggaaaaaatattagcagcagcagagaatttagtagcacagttaatattctgtcattcc

SEQ ID NO: 74273 - DNA, 599 bp, Chicken  19866894356579_2
  misc_feature (1)..(41): n is any nucleotide
nnnnnnnnnnnnnnnnnnnnnnnnnnnnnnnnnnnnnnnnntatataagcttgtgtaaactcagagaatgtttcagagcacggatgcattactagtattattattagtttatttagtagttctaaaatacataaaaatacattcctggctttttagagcagagaatttaaacatgacacagagacagagtagcaaagaagtgtgtcragaaagattttaaaaatttgtaaacaggtcatgtggatgcatagttgagaaaagagcatatcttgcactgaaaaagggttttgtttggttgtwttttkaaattttgtccactagaaaaaacctttctttagaaatgtctcacaattttgtttcttgcaattcctagcccctgccaacattcctcacacaaagaagcaggattaatcctttggaaaagaaataagaagtaggctaggattatggaaaaaatattagcagcagcagagaatttagtagcacagttaatattctgtcattcctggatttaactatcaagtttgtactgttttcttttaaaaagtgagtactactatcagcctttgctgacaaagataaccctatgcacactatgt

SEQ ID NO: 74274 - DNA, 599 bp, Chicken  19866894356579_3
  misc_feature (1)..(36): n is any nucleotide
nnnnnnnnnnnnnnnnnnnnnnnnnnnnnnnnnnnntatataagcttgtgtaaactcagagaatgtttcagagcacggatgcattactagtattattattagtttatttagtagttctaaaatacataaaaatacattcctggctttttagagcagagaatttaaacatgacacagagacagagtagcaaagaagtgtgtcragaaagattttaaaaatttgtaaacaggtcatgtggatgcatagttgagaaaagagcatatcttgcactgaaaaagggttttgtttggttgtwttttkaaattttgtccactagaaaaaacctttctttagaaatgtctcacaattttgtttcttgcaattcctagcccctgccaacattcctcacacaaagaagcaggattaatcctttggaaaagaaataagaagtaggctaggattatggaaaaaatattagcagcagcagagaatttagtagcacagttaatattctgtcattcctggatttaactatcaagtttgtactgttttcttttaaaaagtgagtactactatcagcctttgctgacaaagataaccctatgcacactatgtattag

SEQ ID NO: 74275 - DNA, 599 bp, Chicken  19866894356589_1
  misc_feature (1)..(70): n is any nucleotide
nnnnnnnnnnnnnnnnnnnnnnnnnnnnnnnnnnnnnnnnnnnnnnnnnnnnnnnnnnnnnnnnnnnnnnttctataagcccacatgcttacaaagcacatcaccaaagtcaagaaaacctgttaggcccatatttttccttcttgggtgtttgcagaattgatacatctcaatagggtcaatagaaccatagaaccacagaattgtaaaggttgggaaagacctctaagatcatcaagtccaaccatcagcccaccatgctcactgaactgtgtccctcagtatcctcaatagtgcaakcaaagattatatatccagaagtagtgaattgtgtcatgccttctctctgtaaaaccctataacgtaaagtattacaataaatctaacactatgttataggtatgtggtttgtataaacacaagcgaccaactccacataatcatgttccctctcctgcttttttgcttaattaaacaacaagccaacaatctccatttaccagattactagaatagagctgaattctaatgctataataatggatcctttctgtctgttagcatatatttactgctctacaatctcctggtcatttctg

SEQ ID NO: 74276 - DNA, 600 bp, Chicken  19866894356603_1
ttaaagcccatggccatggattactactgtttcataccaaaagagaagaggttattgattccaaaaaacagagcttttgatttcattgaatgtgaatatgtgtttattaatatttatacgctcctctggaggtgtgtggtgctgtgcatactactgagatgacgaagtctctgccctcagatgcttacaagacagataacacaatgaattatgacacaggctaagaagggtcagagaggaggtgaaagaggaaaggaaatgacagaaagcaaaagaaagcaaatttgtttcatgaaaggrccattatttacaaagcacagacatcaggtaatttgattccctttggctgttattttggatttgtttttcactttgttttattatgtttaataattgggcatgggtgagatagtgcataacactagagctgagattaacgatgaaaggctgagagaaagctgtggctctcgaggagggatttgaggaagaaaagcatttgttttttcactcattagaaggagggaagctcaggcacagaagagtttcacacttgtgctaaactttaaattaaccacrtgtgtaagtctttgtgggaatagg

SEQ ID NO: 74277 - DNA, 600 bp, Chicken  19866894356603_2
aagcaaatttgtttcatgaaaggrccattatttacaaagcacagacatcaggtaatttgattccctttggctgttattttggatttgtttttcactttgttttattatgtttaataattgggcatgggtgagatagtgcataacactagagctgagattaacgatgaaaggctgagagaaagctgtggctctcgaggagggatttgaggaagaaaagcatttgttttttcactcattagaaggagggaagctcaggcacagaagagtttcacacttgtgctaaactttaaattaaccacrtgtgtaagtctttgtgggaataggggactaattgggtagattagaatacaattaactgtgaagacgggctagcactagctgacagtgtttaaagagtgaaaaagatgataaaatcctgtgcagctaagaaagccccacacaactgtaaagatattctaggtgagaagggaaaggatccttaactgttttcagaaggatactaactacagaaacctaggtgagtttggtgctctccattgttactatataccttccttggctatactaattttttactcccagatccatttcaattaactc

SEQ ID NO: 74278 - DNA, 594 bp, Chicken  19866894356603_3
taactggaaagctggatcagctaccaaatgtgttctccaaatggcagtatatctcctgagaagtcctggctgcttttatctagtttgggaaataactatcgttaatccaagcatcagagctttgtgtgaatatctgctgagtattcagccttctatgaaatgtaacttaaaaaatcacccaagaactttctagaagatgccagatagtttcatgtattcatacatgaaattgagtgattctttggaaagcaactgctttccaatctacgtgactttcatcttacagagacataaaaaaamtctcttcttcatatatttggaatcacctcaagtagagttcattaaagtctacttgtctctcttaagattatccatcaggtaatctaatttgtaagtagtttttcatgcctggtgtattcagaaagctgatctcactgttattaaatctttttgccctttgcaaaacaggtaatgatgaaaagtctctaaacatttgtaccttttgagggaaagacatggaagagtcagactctgtatttcaatctgtttgaccctcatttgctaacttcacttgacattttagtgtgtaaagca

SEQ ID NO: 74279 - DNA, 600 bp, Chicken  19866894356604_1
gttgacgcagtatttatatcggaatcggaaagtctccaaggaggtttcaggcacttctttacgtagaacaaatgaactgcagacgcttgaagacaagagattttgctttcatgttctagaatgtggttctttgtttcaggtaaggtctctctctgcctcagtcaacctaactcacatacctgtcaaattttctgagatgcaccagaaaacgtcttacctacatcacctgtctctcagttgtctgattctggcaatatccgtgtacagctctgagcaggcagaagctgctacccaacgccrtctcatcaggggcccaaagtcatcagcttttacttctgatggtatattgggtcctgcacctgttctgacgtagggttttatgaggacaattatgttgctgcaggcataaatatgactaagctgctctggtatagaactttatatatatacatttatcagttataggtaaaaataattgtattcttcattttctctataccaccctaggtgagaaagatgaagctatagtggagattacagtaaagaagtataagtaattaagttgtaaggaaaaatataccccactctactgatgtaaat

SEQ ID NO: 74280 - DNA, 599 bp, Chicken  19866894356612_1
  misc_feature (1)..(21): n is any nucleotide
nnnnnnnnnnnnnnnnnnnnntccctctccctgctgcctccctctgatgctgcccaggatactgctggctttccggctgcaggagcacagtgctggctcatgtccagcttttcattcaccagaacccccaagatatctacagggttgctctctatgagttctcccagtatattctcatgcctgagatcacctcaaccttgcactcggcctcattaaacctcattaaattgtgtgcctgcttttcaagtgtgtctaggtccctctggatggcatccttcacttttattgtgtcagctgcarcttggtgtcatcagcaaacttgctgagggtgcattcaatcccactgacacaggaatgtggtgtgcactggggtggtgggtcctgtttggcaggctgggacacaggtctctkccagcaatgtccaggaagtttaaatttcctattgaggttttggaatttctcttcaggaacggtagcatttctttttaagcacttaggtaccaaatatgcagctgttcatttttggttctaacctactacaaaataacatttctcagattttcagattgcactggaggcttaatacaagctgtgacagc

SEQ ID NO: 74281 - DNA, 600 bp, Chicken  19866894356612_2
tcattcaccagaacccccaagatatctacagggttgctctctatgagttctcccagtatattctcatgcctgagatcacctcaaccttgcactcggcctcattaaacctcattaaattgtgtgcctgcttttcaagtgtgtctaggtccctctggatggcatccttcacttttattgtgtcagctgcarcttggtgtcatcagcaaacttgctgagggtgcattcaatcccactgacacaggaatgtggtgtgcactggggtggtgggtcctgtttggcaggctgggacacaggtctctkccagcaatgtccaggaagtttaaatttcctattgaggttttggaatttctcttcaggaacggtagcatttctttttaagcacttaggtaccaaatatgcagctgttcatttttggttctaacctactacaaaataacatttctcagattttcagattgcactggaggcttaatacaagctgtgacagcccataaagctcctctaacaggcactccttcctggtgttctgcagttatagaattgctcttgtcctgcagagtaggaagtcatttactgaagtattggatatcttccaattaa

SEQ ID NO: 74282 - DNA, 600 bp, Chicken  19866894356613_1
aaaagctgcaagcatcccaccagctttccctgggatacatctaagaatctcttaaagtactatgctatattactgcccagccaagggtattattaaacagagctgcattaaagagtcttaatctatagggcagaggatgagacaaagaattgatgtttcttagacaagaaaactgaatttctcttaaacagttatgctcttctgtttgcagagatttgaacccttgtatttctgggacaagaaaaacttgacgttgggagaaacactatgaggtttctgtgtatttcagtttgtttaacygtgatttgctggctagctgaaggtaccttgtcaaaaacagacgcaaagaaagctgctacaaaaaaactggaagaaaaggtaagctaaataattgaaatgcttgtcttatttaacatgtgcagtgatataactcaactttgagagatggtaagggtattctcattctttaaaaaaaaaaaaaagtgttgaaatcaactgtacacttccactgaagcttattctcacaaatgaaactacatgaaattgtcctttctttcatcttttctcattgtcacaaatgcttcactcctttaaccaata

SEQ ID NO: 74283 - DNA, 600 bp, Chicken  19866894356613_2
aaactgaatttctcttaaacagttatgctcttctgtttgcagagatttgaacccttgtatttctgggacaagaaaaacttgacgttgggagaaacactatgaggtttctgtgtatttcagtttgtttaacygtgatttgctggctagctgaaggtaccttgtcaaaaacagacgcaaagaaagctgctacaaaaaaactggaagaaaaggtaagctaaataattgaaatgcttgtcttatttaacatgtgcagtgatataactcaactttgagagatggtaagggtattctcattctttyaaaaaaaaaaaaagtgttgaaatcaactgtacacttccactgaagcttattctcacaaatgaaactacatgaaattgtcctttctttcatcttttctcattgtcacaaatgcttcactcctttaaccaatacaacatagacttctggagctttcaactccaatggaagctgcataagattgctgtagaagcaagaactgtttgtcctcaactgcatgtaaaggagacatacctccatccctgtattgacagttgaagcagcactagtgttggtcaagagtgccgggtcatttatacagag

SEQ ID NO: 74284 - DNA, 600 bp, Chicken  19866894356619_1
ggattgcttgggcttgattctacaaaaagttgaacaatgcgatctcaagcttttgaaggaagtcctgcaagagagctgcctgagtaagggaacatggtgattttactcagggcactcacttgaccattaagtccatagagaacggtagcacagtcgaggtttgtcctaaacctctccaggcccttccaaagaaaatgtgagggaggtccatgaagcactacagcatctactgcccaaacccacagagatcaagcagtcattacattaaagtcaaaatggctcctggatatttatataatrcatggacttagtaaaaacatcaggttttccttctttttgatttctctaacactggtcaccaattgatctgtgaaatcaaagctgaaagaaccgttatttcaagacttgcaactcagatatagtgattattttcaagtacctctcctgtggattaacagagattagccagagcacatttttcaaggtgtgataataaatctgggactttttggactggcttgctgagagttagattaaaaacaggcagtttcttttatttgctgtattaccaggggcatgtgaagagatctgtgataccag

SEQ ID NO: 74285 - DNA, 600 bp, Chicken  19866894356621_1
gtgttacttcatgaaagtttctccttgctgggttgcatgtgttacatagctgggaaatgcacagggtagtgtgcaacaaatggttgaggtgaggtgagctgtgacactgcttgttccttggcttgttcctcagggctttgccaagtcacttgtcactgtggggccataacctcactgaggcaatgctgttctggccagcctgcaggctgtttctccctgcttttaatttcaggatttgagatttgatttgaacttgggtcatactggtgatggctttgcttttcatttgtctgatgtttrcagcttttgcttatcgttgcggcattgaagctgtgagccctgctggtcttgctggcttttgtgcctatgctgtaagctgctgtaatgctattgcttaaaggaaggttcagaagaggggagaagttcatgtttctgctgtaatgcttacagctgttgctatgccatgtcagtaccttggcacacagtaggtttcagatactgaawtccctaagcaggctgctaaatggcaggtgtctgtctgtcctctcacctggtgcttcatctcctttgcctcacttgtaatygaaactgaagttgtcc

SEQ ID NO: 74286 - DNA, 600 bp, Chicken  19866894356621_2
ggctgtttctccctgcttttaatttcaggatttgagatttgatttgaacttgggtcatactggtgatggctttgcttttcatttgtctgatgtttrcagcttttgcttatcgttgcggcattgaagctgtgagccctgctggtcttgctggcttttgtgcctatgctgtaagctgctgtaatgctattgcttaaaggaaggttcagaagaggggagaagttcatgtttctgctgtaatgcttacagctgttgctatgccatgtcagtaccttggcacacagtaggtttcagatactgaawtccctaagcaggctgctaaatggcaggtgtctgtctgtcctctcacctggtgcttcatctcctttgcctcacttgtaatygaaactgaagttgtccgatgcaagagctacatctgaactcggtgcttgcttttagagtctaacatagcccatgcctcttccccagcaatcaacccgtaaagcttgtttgtgagaggagggagaagtgaaagcaaaaatgatgcctctaatctcgtgaggacaaaagtggtaaagtgtctcctgctttaaaacctgctgcagggtttgttcttggtctcct

SEQ ID NO: 74287 - DNA, 600 bp, Chicken  19866894356621_3
atttgtctgatgtttrcagcttttgcttatcgttgcggcattgaagctgtgagccctgctggtcttgctggcttttgtgcctatgctgtaagctgctgtaatgctattgcttaaaggaaggttcagaagaggggagaagttcatgtttctgctgtaatgcttacagctgttgctatgccatgtcagtaccttggcacacagtaggtttcagatactgaawtccctaagcaggctgctaaatggcaggtgtctgtctgtcctctcacctggtgcttcatctcctttgcctcacttgtaatygaaactgaagttgtccgatgcaagagctacatctgaactcggtgcttgcttttagagtctaacatagcccatgcctcttccccagcaatcaacccgtaaagcttgtttgtgagaggagggagaagtgaaagcaaaaatgatgcctctaatctcgtgaggacaaaagtggtaaagtgtctcctgctttaaaacctgctgcagggtttgttcttggtctcctggcagctgattgcagaggtctcactaaattcagtggctatggcatgtaatcagatagcagcaaagattgctaagacctgt

SEQ ID NO: 74288 - DNA, 600 bp, Chicken  19866894356627_1
agaacaggtcaaacagtcctgtacctaaagtgtaggcagagtcagaatcatgttttctcctcttcagctttcagggcttatcatcagttgaccataggtcagtagaattcagctgctgtgctcgactgcaaccatcaccagctagtcagagcagtctggagtacttgagactccagataccatgtacatctgttttgctacagataccatgtaatagtcagttgtgttacaaaaagaaaagccaacctcacctcacccaatttttaccatttataacttgggagctgactgggatgatastgatttgatgtgactgtaatcctgcagtaaccctggtgctaatggtagcagaaggtcccattacagtataatttaggcatcacaactggatatagctgtctgaagatgagtgccatggacaactcaagaaagcaaaagaaagcttcatttagtgaatttccatgccccagtgacagctgctataaggctgtagcagtggtatgcttttctcagtaagaatctcctatctttcggagaagtcagtttgaaaccagttaattagggcagttatttctggccctggcatttgtatagaacaga

SEQ ID NO: 74289 - DNA, 600 bp, Chicken  19866894356629_1
ggagttcggaggaactgtatgttcttgattcataggaaagacatataggtgtcttgaaaactgatagattttgtgtcagtaatctgcttaagtggattatttgcttaaaagcagttgtttttaagtaatgaagaaaatgcattaaggtagctttctcatatctaggtatggagaaacgttagatgcatataagctgatctgtgtatatacatcaacacaaaactttaaaatatagaatacactttattaaaaaagcaaaacagtcaacaaaaaatcaacattattcattactagaacctrtaaaagataaatagaaagcaatttttacatgccacgtatcattattattaggctttctattaattgggtccaaacggtgaaataaaaggagaatgtagaatttttgtgaaaaatctatttatgtatttagcaagagaaaaccttcaaggcctgaaactagtatacatccttgctgagaccactgtctgtcaaagaactattaggcaagaacttttcctgttctgtgtaagagataatccacatttagattcctgaccacatggaaatatgaggagtcttctgtgaaagtgaagcgtacac

SEQ ID NO: 74290 - DNA, 600 bp, Chicken  19866894356629_2
ctattaggcaagaacttttcctgttctgtgtaagagataatccacatttagattcctgaccacatggaaatatgaggagtcttctgtgaaagtgaagcgtacactgaaattttattttctctccacagaatcagagaacacattgcagataaggccaaattacccattctaatttttccagaaggtaggaattaactctatattgctttgctcactttacactgaatgtgctttatcatgtctaatctttaaaactgaggtgtttgtttttagttgaagaattactgagctcttgtgagrtattaaaagtgagaytctactatgtaactgaattttatgacagtttatttggtttagtgtgttacaacctgactgagctactctgggtaatgtgtggagatcacagagttcaagaatcatttggggtaaattaaggtgaaatgacaccgaacaatcagttaaatattcatttgtatcccactgtgatatttagatttaagtatctataccttattggtaataagctatgatagtatggcttgctttatgttctaatatgacttggaaagagagagaaagaaaaggggggagagggagaca

SEQ ID NO: 74291 - DNA, 600 bp, Chicken  19866894356629_3
ttttcctgttctgtgtaagagataatccacatttagattcctgaccacatggaaatatgaggagtcttctgtgaaagtgaagcgtacactgaaattttattttctctccacagaatcagagaacacattgcagataaggccaaattacccattctaatttttccagaaggtaggaattaactctatattgctttgctcactttacactgaatgtgctttatcatgtctaatctttaaaactgaggtgtttgtttttagttgaagaattactgagctcttgtgagrtattaaaagtgagaytctactatgtaactgaattttatgacagtttatttggtttagtgtgttacaacctgactgagctactctgggtaatgtgtggagatcacagagttcaagaatcatttggggtaaattaaggtgaaatgacaccgaacaatcagttaaatattcatttgtatcccactgtgatatttagatttaagtatctataccttattggtaataagctatgatagtatggcttgctttatgttctaatatgacttggaaagagagagaaagaaaaggggggagagggagacagagacagagagagaa

SEQ ID NO: 74292 - DNA, 600 bp, Chicken  19866894356631_1
tatttaagtgccgtgctgaaaactgttccatttgttccaagacacatggaatcaaacaaaatggtaatagaagaaacgaacactgcaaattttgtccttggcatttaatcctgttcatctgatactatgttttcatctcaggataatataaatatttaaagccacatgtagttctgctaataaaaatcagtttggttagattgggattagagcaactcataaataggacttcctgctgaagtttggtttagtatttattctagagcaagaaacagggatgagatgatgttcttaggtccmaacyttcacttcattttgccaatggcctatggattcatctctagcatctaagcacgtgacagaaactaatttatcactgagcaagaaagtcctcaacagggctattggcaataaacatttgtttctcagcacaaaacttgtctgagccctgatcttgtcttcactggacattcaaagttcccagtgacttcaatctggaagtgttgtaagagtgggtttggaaccttggcaaaatgcaggaagccattattcagtagctaattacctatttcctctttcagatgtttaatttatttttaa

SEQ ID NO: 74293 - DNA, 600 bp, Chicken  19866894356631_2
taagtgccgtgctgaaaactgttccatttgttccaagacacatggaatcaaacaaaatggtaatagaagaaacgaacactgcaaattttgtccttggcatttaatcctgttcatctgatactatgttttcatctcaggataatataaatatttaaagccacatgtagttctgctaataaaaatcagtttggttagattgggattagagcaactcataaataggacttcctgctgaagtttggtttagtatttattctagagcaagaaacagggatgagatgatgttcttaggtccmaacyttcacttcattttgccaatggcctatggattcatctctagcatctaagcacgtgacagaaactaatttatcactgagcaagaaagtcctcaacagggctattggcaataaacatttgtttctcagcacaaaacttgtctgagccctgatcttgtcttcactggacattcaaagttcccagtgacttcaatctggaagtgttgtaagagtgggtttggaaccttggcaaaatgcaggaagccattattcagtagctaattacctatttcctctttcagatgtttaatttatttttaatgaa

SEQ ID NO: 74294 - DNA, 600 bp, Chicken  19866894356633_1
ttccaaagatcaacaaattggcaatgctctaccacaagggtgcattctcaacgtcactagtaagaaaaagcactattttattaatcctaattgcaaaaagatgtcaagcacactttcttaatgcacgaagtccatatgtaattggtaaggaaataagataacttcattctacactacagaaaataatttatggctaccaggccagataacaaagcacttttgtttagatagatttattggaacaaatgctagctgcttctcacttgtggccttccactacttgaagggagtgtataaacrggagggggaacggttgtttacaagtgtgcatagtgacagaacaagggggaatggtattaactgaggcggggaggtttaggttagatattaggaggaagtttttcacccagaggatggtgacacacaggaacaggttgcccgaggaggttgtggatgccccatccctggaagcattcaaggccaggctggatgtggctctaggcagcctggtctggtggttggcgaccctgcacatagcagggggttgaaactggatgatcattgcagtgcttttcaacccaggccattctatgattccat

SEQ ID NO: 74295 - DNA, 600 bp, Chicken  19866894356636_1
tacgtcaacaggcttgagtttaattaaaaaatttccaactctactattttactaccctctcctcgatcaggcaataagccacggggtttatacagttttatgagaagcagtttttgtgttttttttcctgaaatgcctcatgtgaagggtaccttccttgcagcaattgtgctttctcacagcctcccatccatcagtgcactgctggagcctatttctgcccttccaggtaaaacagagcagactggatttgatcagagatggaagagggagaaacaaataaaagcatcattagtaccygaggcattatttgaaatatatttggttcagtggttctaaacctatggctctcagatccatggagggccatttccagaggctcgtgaacagctgtgacaactgccagttgttggagctggggaagtagttttaccagacagacataaaacactcctctgttggttctgggtttggttttactgacaccacacagcccgtaactgtgcccaagtatcactttttacctgaagaagaaaatgttccaacctctcaggtctgtctgcaggagctgcctctcaatccctgctttctgcaggaaaa

SEQ ID NO: 74296 - DNA, 600 bp, Chicken  19866894356639_1
tcacacagtttaaaaacatcaaggatttgtaaaaacacttactttgatgttgtgttttttctctgcattgtcagttttgtagataaagtggggtttgtcttcagtaaagatctaactggcagtgtaaataatatgcagttattgttagtgaaatcagctttcttgaacatgagtacatgctgtgtgtttaccaagtttgtagggcatattgatactgtggtagttgtataaataagtgtaatattgggctgtataagaacactgtgctatataagtagaaataaagctgcttcctccgtygtatgctttgtaacggtaggagatgagaggcaaggaagaagccaagctccttcayggtttctgttcctcyrtatactttatgcctcactggtgaacccatacttgtaatgtaagtctattagtgttatgaagttctaggtttaatttattctttgttacatgactaactcagtgaaggctatttcaagtcaaggraattaatgggcctgttaacttaaagaaatatatatttggcaaagcattgcactcttatcaccttttttctcccagagcatgcaagtcttagtcatatcagaatat

SEQ ID NO: 74297 - DNA, 600 bp, Chicken  19866894356639_2
tttttctctgcattgtcagttttgtagataaagtggggtttgtcttcagtaaagatctaactggcagtgtaaataatatgcagttattgttagtgaaatcagctttcttgaacatgagtacatgctgtgtgtttaccaagtttgtagggcatattgatactgtggtagttgtataaataagtgtaatattgggctgtataagaacactgtgctatataagtagaaataaagctgcttcctccgtygtatgctttgtaacggtaggagatgagaggcaaggaagaagccaagctccttcayggtttctgttcctcyrtatactttatgcctcactggtgaacccatacttgtaatgtaagtctattagtgttatgaagttctaggtttaatttattctttgttacatgactaactcagtgaaggctatttcaagtcaaggraattaatgggcctgttaacttaaagaaatatatatttggcaaagcattgcactcttatcaccttttttctcccagagcatgcaagtcttagtcatatcagaatatagtagactgcctcagcacttaaatctcaaaggaattcttaacactttaaaaacta

SEQ ID NO: 74298 - DNA, 600 bp, Chicken  19866894356639_3
tcagttttgtagataaagtggggtttgtcttcagtaaagatctaactggcagtgtaaataatatgcagttattgttagtgaaatcagctttcttgaacatgagtacatgctgtgtgtttaccaagtttgtagggcatattgatactgtggtagttgtataaataagtgtaatattgggctgtataagaacactgtgctatataagtagaaataaagctgcttcctccgtygtatgctttgtaacggtaggagatgagaggcaaggaagaagccaagctccttcayggtttctgttcctcyrtatactttatgcctcactggtgaacccatacttgtaatgtaagtctattagtgttatgaagttctaggtttaatttattctttgttacatgactaactcagtgaaggctatttcaagtcaaggraattaatgggcctgttaacttaaagaaatatatatttggcaaagcattgcactcttatcaccttttttctcccagagcatgcaagtcttagtcatatcagaatatagtagactgcctcagcacttaaatctcaaaggaattcttaacactttaaaaactaagacatacttgcgtg

SEQ ID NO: 74299 - DNA, 600 bp, Chicken  19866894356639_4
cagttttgtagataaagtggggtttgtcttcagtaaagatctaactggcagtgtaaataatatgcagttattgttagtgaaatcagctttcttgaacatgagtacatgctgtgtgtttaccaagtttgtagggcatattgatactgtggtagttgtataaataagtgtaatattgggctgtataagaacactgtgctatataagtagaaataaagctgcttcctccgtygtatgctttgtaacggtaggagatgagaggcaaggaagaagccaagctccttcayggtttctgttcctcyrtatactttatgcctcactggtgaacccatacttgtaatgtaagtctattagtgttatgaagttctaggtttaatttattctttgttacatgactaactcagtgaaggctatttcaagtcaaggraattaatgggcctgttaacttaaagaaatatatatttggcaaagcattgcactcttatcaccttttttctcccagagcatgcaagtcttagtcatatcagaatatagtagactgcctcagcacttaaatctcaaaggaattcttaacactttaaaaactaagacatacttgcgtgg

SEQ ID NO: 74300 - DNA, 600 bp, Chicken  19866894356639_5
tttgtagggcatattgatactgtggtagttgtataaataagtgtaatattgggctgtataagaacactgtgctatataagtagaaataaagctgcttcctccgtygtatgctttgtaacggtaggagatgagaggcaaggaagaagccaagctccttcayggtttctgttcctcyrtatactttatgcctcactggtgaacccatacttgtaatgtaagtctattagtgttatgaagttctaggtttaatttattctttgttacatgactaactcagtgaaggctatttcaagtcaaggraattaatgggcctgttaacttaaagaaatatatatttggcaaagcattgcactcttatcaccttttttctcccagagcatgcaagtcttagtcatatcagaatatagtagactgcctcagcacttaaatctcaaaggaattcttaacactttaaaaactaagacatacttgcgtgggttggtccttcacagtagataaagtaggagagacctgtttcagatagtatgaggttcaagaatggaacaaaacaaaaatctaacatcaggcacgctatattaataccaactttgaattatttga

SEQ ID NO: 74301 - DNA, 600 bp, Chicken  19866894356639_6
cccagagcatgcaagtcttagtcatatcagaatatagtagactgcctcagcacttaaatctcaaaggaattcttaacactttaaaaactaagacatacttgcgtgggttggtccttcacagtagataaagtaggagagacctgtttcagatagtatgaggttcaagaatggaacaaaacaaaaatctaacatcaggcacgctatattaataccaactttgaattatttgattattttatgcttatgtaaattagcacgtgaaaccttggtgaaagtatgaaagcatttgaatgagggcastatcttatactgcaggcagagaggaaatcagatatagaagtggactaaccattttaaaatgtcaacaggtaaactttaacattgggttgaaaaggttaggtttgtgacagttatctaaaaggcagagaattagcattgagcaatggtagtgcagtatttaaagtataagcatgaaacgtgtagtaagttctctgctagcttcaccacagtgtgtgagctgaagtgaattactttcctatcctcagttcccataagaaaaagaggtgaccaggtcttctctacttcaagatacagggatga

SEQ ID NO: 74302 - DNA, 600 bp, Chicken  19866894356640_1
ggatatatcacgttcctactgcttccacagcaaggaattttgatcccttttaggagaaacatcataaaagttgtgggttttcatagtaataaacctgatttttttcctgatgggtaataaattatgatggctctattggtttggaatacaacaacagaattatgtgggtactttaataaataaaaggtgtagtgttatagaagtgcatttttaaactgaggaccaattaactgtactactgcttgttatgcagagcacctggatgactaatggtatcacagcccttctctcccacctcaygcttacccttcctgtgttgctgattagcatcacccagtaatgacaaagctggctctggctatggatcttgtagactgtttccagagaagtttttaacagcataacactgggcacatatctgtaataagcggggctgggcttgttgttcaccacaagtggtgaacatgttgagaaagtggtgaggatgtgctgggatttctgtcttcattacagagcatcagcttgtattgaaataaggtgaaaaggtgctagtactgacaggaacttcactgtaaattttccaagggaaaaggaaagatg

SEQ ID NO: 74303 - DNA, 599 bp, Chicken  19866894356643_1
  misc_feature (1)..(127): n is any nucleotide
nnnnnnnnnnnnnnnnnnnnnnnnnnnnnnnnnnnnnnnnnnnnnnnnnnnnnnnnnnnnnnnnnnnnnnnnnnnnnnnnnnnnnnnnnnnnnnnnnnnnnnnnnnnnnnnnnnnnnnnnnnnnnnnatacactctgaatgatgctactgtaatgacttctgtggatctaacagtagtggtgcaggtgctttctgccctttcttactaatagcttttctgtatagttaacttagaaaagcttgtctgatccttctatgagtttagtcatggctaagacaactctgggcagggctgacttkgtaagtaaaggtgccwtctgggaattcaggagaaaatatttgtagaatagcaacatagttctgcttactttgtatctaatagcagtgtatgtgagatacttgtgcttcctcttggtctcccatctgcttgcttttgtcctctctctgcacttaccttactcttgtgactaacagtctttttgaatggtgttagtggaatctcagggtaatgctaagaatttgatattttgctttttttttcccctaaaatgttcagaattgtttttaaacagtatttttaacttcaagtgttggaagta

SEQ ID NO: 74304 - DNA, 599 bp, Chicken  19866894356643_2
  misc_feature (1)..(111): n is any nucleotide
nnnnnnnnnnnnnnnnnnnnnnnnnnnnnnnnnnnnnnnnnnnnnnnnnnnnnnnnnnnnnnnnnnnnnnnnnnnnnnnnnnnnnnnnnnnnnnnnnnnnnnnnnnnnnnnatacactctgaatgatgctactgtaatgacttctgtggatctaacagtagtggtgcaggtgctttctgccctttcttactaatagcttttctgtatagttaacttagaaaagcttgtctgatccttctatgagtttagtcatggctaagacaactctgggcagggctgacttkgtaagtaaaggtgccwtctgggaattcaggagaaaatatttgtagaatagcaacatagttctgcttactttgtatctaatagcagtgtatgtgagatacttgtgcttcctcttggtctcccatctgcttgcttttgtcctctctctgcacttaccttactcttgtgactaacagtctttttgaatggtgttagtggaatctcagggtaatgctaagaatttgatattttgctttttttttcccctaaaatgttcagaattgtttttaaacagtatttttaacttcaagtgttggaagtacagagaataaatagag

SEQ ID NO: 74305 - DNA, 600 bp, Chicken  19866894356643_3
ttgtgcttcctcttggtctcccatctgcttgcttttgtcctctctctgcacttaccttactcttgtgactaacagtctttttgaatggtgttagtggaatctcagggtaatgctaagaatttgatattttgctttttttttcccctaaaatgttcagaattgtttttaaacagtatttttaacttcaagtgttggaagtacagagaataaatagagctgaggaatggaaataacctcaaaacttccttactctgtgcagtggaattgccaggtcacagcctgaacctggttgagcaccasgtgagaaagtgtggctgacccagggagcctagaattgttctgtagggtttgattgctgctagaaggcactgtctgtagtcttatcttgctgtatactctgctactctcacttgaaatgtctgttactcatacatggaaggggaattatctaaatgattttaagtagatgaaatgttttttaatgttttttttattgcttgattcatcaaggaaagtttcactttctgatataatgtcaactagaaggacataggtattagggaactaataaaatattgtttgacaggaaatctagaaatt

SEQ ID NO: 74306 - DNA, 600 bp, Chicken  19866894356645_1
ttccctctcctgaatgcaggaaaattcttggaacctttcagcaaagctgctggctgagaacccaatattgtgcatgattattaatgaaaattattttattagtaatggtaaaataatggaattttcatacagcagactgacaaaatatatgcatgtatgccaaatgatgttgtaagttacatcacagagtaaaaagttatgttacagagcaccataataagcacagtaataattcacatatgtaaatctgctacatgttctttcccataacccacagccaatctatgaaataaagtcacmaaatacttgcaggaatcccaacacagatgcaacacccatattacattccagcacagttacgtgaggcaggctgaactgacatgcttcgggtgcgagccaacaagtaactgtccatggctgagaaacagcttcctttcaaatacctgctgcagatttctgctggtcacaggatgtacagctctcatatagtaaaacatcaccaattccaacagagaagcaaaatacaactctccctaaaaatatatcaggatacaattgtttctaattttaaaagctaacagtttattagatggtcttcct

SEQ ID NO: 74307 - DNA, 599 bp, Chicken  19866894356648_1
  misc_feature (1)..(83): n is any nucleotide
nnnnnnnnnnnnnnnnnnnnnnnnnnnnnnnnnnnnnnnnnnnnnnnnnnnnnnnnnnnnnnnnnnnnnnnnnnnnnnnnnnnggagaggatctgagcgggtgctgaagcgatggatggagcagagggaggaagatgcagcgagagggtgaggaggaaaaggagaaggagacttcccacacacctgtagctcagcttctgggttttctcgtggacgtttttcaggaccagatgtttgatcacctcttttccgagctcccagccacgccactggagtgtttctgccacttcaatgccccaraatgtgcctttcttctgtgcctttctcgaggatggcttaggaatttgcaatgggagcatcagcagtttgtgacagggggagaaaccacccccacagctgttgccttgcattaaaagcctgtgaccctggcaaaggatgtagagccaccctgtggcagggccccaggagcccccacaaagctctgtgggatcctcctggatgtcagcaactccagaagcaggggttaaagagtcggtggctgcctcccttcccctttatyctggtaaatccacccatggcaacagcacctttggctccag

SEQ ID NO: 74308 - DNA, 600 bp, Chicken  19866894356648_2
agccacgccactggagtgtttctgccacttcaatgccccaraatgtgcctttcttctgtgcctttctcgaggatggcttaggaatttgcaatgggagcatcagcagtttgtgacagggggagaaaccacccccacagctgttgccttgcattaaaagcctgtgaccctggcaaaggatgtagagccaccctgtggcagggccccaggagcccccacaaagctctgtgggatcctcctggatgtcagcaactccagaagcaggggttaaagagtcggtggctgcctcccttcccctttatyctggtaaatccacccatggcaacagcacctttggctccagcgctcaccttcctggcacagccacagcatcgcctccggagagggtccgggttggggggctccccctgcacctcagccagcatctgaggagggagaggagagcatcctcacacacaccgctcctctgccaggctccttgctgccagcacccgggagcccccagggcccaaccaccgctcctcggggttccctggcaccccccatttcccagctgggccccctctcagcttggaaagcaggcttttatattgctcctatagc

SEQ ID NO: 74309 - DNA, 600 bp, Chicken  19866894356657_1
cagtaaagcttgcacagaatattctttactacctggacatgaaaacagatgaatgggagtactgaaggagccatggcctgacagaaaataacattctttcctgcggcacttcacgtaggacgatagttacattggcagcacataatgaaagtggtgttctattgcttgcttaaatcacagtggttgcataaaaagttaccttggctataagcgtgctatcccacgcagtcacccacttgccatggcaactgtcagtacaccagcagcaattctggtcactgctctaagcaatggaatgtrattctctgagggagcagcttaagagttgattgaatggcttctctttttaatctgtttttgttttaataacgtggtgtaatgatcagagaatgcagatgtttcaaagatgcagataattccttgtgggtgcagtactggcagaactgtttcaagaaagctggacatgaaaattagtgtttaagcgtgaggctccatccagcaacttcatagcagtctggatatactctcaatgtgctgttttgatgggaagtattaaatgcaaaaaaaaaaaaaaaaaaaaacctgctggcttttgggttg

SEQ ID NO: 74310 - DNA, 600 bp, Chicken  19866894356658_1
tcttccccccaaacatatcccccaaggccttctgggtgctggtcccattcagagaagcagacgtcccagtgagccccctgccacagggcacactgcgaccccaggcagtggctgcaggctgcatgctcgccaggctggggacgagttgaccctgtggtttttcaattactagtcactgacctttgttaccctgcaccagccaagagagagaatcattgttcctcacattgaaaataagtagagaatatgacggataatatattttgtcagtcaggaacttagattcctattaagaagtckagcaatattgataagataaagcaatgttacaaggggcatttattatggaatatgtaggctgttgggccaaaaatactctaatcttccactgtttataaaacattagggaaggggaggggaagattccttgatttatagtgactgtaagaagatactgagatgaagtaaagtattcagctgagaaagtgtcactccttgggtttagcacatgagatatgcgtgtttgccacagcccagaaaacaggacacagggcagcacagaggtggccaaggaccaaaagcttcattcctttccttggg

SEQ ID NO: 74311 - DNA, 600 bp, Chicken  19866894356658_2
aaggggaggggaagattccttgatttatagtgactgtaagaagatactgagatgaagtaaagtattcagctgagaaagtgtcactccttgggtttagcacatgagatatgcgtgtttgccacagcccagaaaacaggacacagggcagcacagaggtggccaaggaccaaaagcttcattcctttccttgggagcagagacacacacctatgcctgagtgccaccattgctcaactgttcactgcggcacacaccagcctacattttatcccctttgagaaggggggaagagatctggayyagtttcaagatgttgtggctcagtcccaactctgaaactaacaaattacttctctttttctttgtgctgtgttgaactgggtaaattatgccgagaaacatgttttcttatgagatttttttaataacctcgcgttaccttgaagttcattccatcagatttctccagatttatacttatttattgtagattatttttcatgtgcccaaaatatgggtaggtagaagttctcaaactggaccacgctcagatggatgcctaacatacactgaaagagctaaagtagtgtcaagtcagtg

SEQ ID NO: 74312 - DNA, 600 bp, Chicken  19866894356658_3
aggggaggggaagattccttgatttatagtgactgtaagaagatactgagatgaagtaaagtattcagctgagaaagtgtcactccttgggtttagcacatgagatatgcgtgtttgccacagcccagaaaacaggacacagggcagcacagaggtggccaaggaccaaaagcttcattcctttccttgggagcagagacacacacctatgcctgagtgccaccattgctcaactgttcactgcggcacacaccagcctacattttatcccctttgagaaggggggaagagatctggayyagtttcaagatgttgtggctcagtcccaactctgaaactaacaaattacttctctttttctttgtgctgtgttgaactgggtaaattatgccgagaaacatgttttcttatgagatttttttaataacctcgcgttaccttgaagttcattccatcagatttctccagatttatacttatttattgtagattatttttcatgtgcccaaaatatgggtaggtagaagttctcaaactggaccacgctcagatggatgcctaacatacactgaaagagctaaagtagtgtcaagtcagtgt

SEQ ID NO: 74313 - DNA, 600 bp, Chicken  19866894356662_1
gggatgacttctgcatgattttcagagccaaaccataagggaagatgggtttcttattttttaagctctcattagcagtaatccctctgcacacaaatgaggctgaagtctcagtgtgaaacatcgtgaaattgagcaggaagagaaagttcatatctggggaaattagtgtctaatagtgaaaaaatacaacaactgcagtgggaattcagacccgttgtgtggctgaccctgggcagctcccacagccaccagtaacagccaggcccagtgctgggagccacagcctgtgtggatctrtagccgtccctgcaggcatctcgcagtgctccaagcctgcttgtttctttccctagcaggtagaacaggcaatatatttttctatctctgcctttaaccagctctaacctgcttctgtggaaagcagtggcaaaactcctggcttcagtgaagcacaagcacagccaaagtgtgctataaacacaaggcagctgtaattacatttgcttgctcactgcacagtgtctgtgcagaactttccctttgtcccgggagcgacactgtgtcctcaaatcaatacaatcaatgcctttataaaag

SEQ ID NO: 74314 - DNA, 599 bp, Chicken  19866894356669_1
  misc_feature (1)..(208): n is any nucleotide
nnnnnnnnnnnnnnnnnnnnnnnnnnnnnnnnnnnnnnnnnnnnnnnnnnnnnnnnnnnnnnnnnnnnnnnnnnnnnnnnnnnnnnnnnnnnnnnnnnnnnnnnnnnnnnnnnnnnnnnnnnnnnnnnnnnnnnnnnnnnnnnnnnnnnnnnnnnnnnnnnnnnnnnnnnnnnnnnnnnnnnnnnnnnnnnnnnnnnnnnnnnnnnnnctgagggatgttgggactttccctgaagttgttaatattgacaaaatctgaaaagccgggcacgtttcaattaaatacaggcacaatctacmttgaaaaacaacatcttccaactaaaggcaggcactgatyctgcctatrtaacagtcacctgataatggtgttgcgggagtcagtgatctgcttcaagctgtgaaggaaaatactgtgccaacayctgtgccatagcatctccagaggatggctttggctgctcacacatctgttcatccccaacatcrccraataccaatagatctggagaacaaacttgaagatgacctttgtgtagtcagcatcttctttttagaaactctcaacaaatactttcaattgaaagggaagtctcacc

SEQ ID NO: 74315 - DNA, 599 bp, Chicken  19866894356669_2
  misc_feature (1)..(168): n is any nucleotide
nnnnnnnnnnnnnnnnnnnnnnnnnnnnnnnnnnnnnnnnnnnnnnnnnnnnnnnnnnnnnnnnnnnnnnnnnnnnnnnnnnnnnnnnnnnnnnnnnnnnnnnnnnnnnnnnnnnnnnnnnnnnnnnnnnnnnnnnnnnnnnnnnnnnnnnnnnnnnnnnnnnnnnnnctgagggatgttgggactttccctgaagttgttaatattgacaaaatctgaaaagccgggcacgtttcaattaaatacaggcacaatctacmttgaaaaacaacatcttccaactaaaggcaggcactgatyctgcctatrtaacagtcacctgataatggtgttgcgggagtcagtgatctgcttcaagctgtgaaggaaaatactgtgccaacayctgtgccatagcatctccagaggatggctttggctgctcacacatctgttcatccccaacatcrccraataccaatagatctggagaacaaacttgaagatgacctttgtgtagtcagcatcttctttttagaaactctcaacaaatactttcaattgaaagggaagtctcaccagctcatgcttctaatgggttgcattgatggttggactgg

SEQ ID NO: 74316 - DNA, 599 bp, Chicken  19866894356669_3
  misc_feature (1)..(159): n is any nucleotide
nnnnnnnnnnnnnnnnnnnnnnnnnnnnnnnnnnnnnnnnnnnnnnnnnnnnnnnnnnnnnnnnnnnnnnnnnnnnnnnnnnnnnnnnnnnnnnnnnnnnnnnnnnnnnnnnnnnnnnnnnnnnnnnnnnnnnnnnnnnnnnnnnnnnnnnnnnnnnnnctgagggatgttgggactttccctgaagttgttaatattgacaaaatctgaaaagccgggcacgtttcaattaaatacaggcacaatctacmttgaaaaacaacatcttccaactaaaggcaggcactgatyctgcctatrtaacagtcacctgataatggtgttgcgggagtcagtgatctgcttcaagctgtgaaggaaaatactgtgccaacayctgtgccatagcatctccagaggatggctttggctgctcacacatctgttcatccccaacatcrccraataccaatagatctggagaacaaacttgaagatgacctttgtgtagtcagcatcttctttttagaaactctcaacaaatactttcaattgaaagggaagtctcaccagctcatgcttctaatgggttgcattgatggttggactgggtgatccag

SEQ ID NO: 74317 - DNA, 599 bp, Chicken  19866894356669_4
  misc_feature (1)..(83): n is any nucleotide
nnnnnnnnnnnnnnnnnnnnnnnnnnnnnnnnnnnnnnnnnnnnnnnnnnnnnnnnnnnnnnnnnnnnnnnnnnnnnnnnnnnctgagggatgttgggactttccctgaagttgttaatattgacaaaatctgaaaagccgggcacgtttcaattaaatacaggcacaatctacmttgaaaaacaacatcttccaactaaaggcaggcactgatyctgcctatrtaacagtcacctgataatggtgttgcgggagtcagtgatctgcttcaagctgtgaaggaaaatactgtgccaacayctgtgccatagcatctccagaggatggctttggctgctcacacatctgttcatccccaacatcrccraataccaatagatctggagaacaaacttgaagatgacctttgtgtagtcagcatcttctttttagaaactctcaacaaatactttcaattgaaagggaagtctcaccagctcatgcttctaatgggttgcattgatggttggactgggtgatccagtgcgtcttttccaaccttggtgattctacgatattcaaaatttataatgtggataataacttaaagattataaggg

SEQ ID NO: 74318 - DNA, 599 bp, Chicken  19866894356669_5
  misc_feature (1)..(19): n is any nucleotide
nnnnnnnnnnnnnnnnnnnctgagggatgttgggactttccctgaagttgttaatattgacaaaatctgaaaagccgggcacgtttcaattaaatacaggcacaatctacmttgaaaaacaacatcttccaactaaaggcaggcactgatyctgcctatrtaacagtcacctgataatggtgttgcgggagtcagtgatctgcttcaagctgtgaaggaaaatactgtgccaacayctgtgccatagcatctccagaggatggctttggctgctcacacatctgttcatccccaacatcrccraataccaatagatctggagaacaaacttgaagatgacctttgtgtagtcagcatcttctttttagaaactctcaacaaatactttcaattgaaagggaagtctcaccagctcatgcttctaatgggttgcattgatggttggactgggtgatccagtgcgtcttttccaaccttggtgattctacgatattcaaaatttataatgtggataataacttaaagattataaggggcagagagggaaatacccttgctattcatcatacaaaatccagtgctgtgttcagtcagcgatc

SEQ ID NO: 74319 - DNA, 599 bp, Chicken  19866894356669_6
  misc_feature (1)..(16): n is any nucleotide
nnnnnnnnnnnnnnnnctgagggatgttgggactttccctgaagttgttaatattgacaaaatctgaaaagccgggcacgtttcaattaaatacaggcacaatctacmttgaaaaacaacatcttccaactaaaggcaggcactgatyctgcctatrtaacagtcacctgataatggtgttgcgggagtcagtgatctgcttcaagctgtgaaggaaaatactgtgccaacayctgtgccatagcatctccagaggatggctttggctgctcacacatctgttcatccccaacatcrccraataccaatagatctggagaacaaacttgaagatgacctttgtgtagtcagcatcttctttttagaaactctcaacaaatactttcaattgaaagggaagtctcaccagctcatgcttctaatgggttgcattgatggttggactgggtgatccagtgcgtcttttccaaccttggtgattctacgatattcaaaatttataatgtggataataacttaaagattataaggggcagagagggaaatacccttgctattcatcatacaaaatccagtgctgtgttcagtcagcgatcaca

SEQ ID NO: 74320 - DNA, 600 bp, Chicken  19866894356671_1
agagcagaggaagcatgagttaaaacgttgcctgaaagctccagagattattatagacatcccagaaagctagagttcttctttttcaaggtttgttgatagaattagagctgtaatcctggttttcacaaacatgatatttgccagagaaatccagttaccaattagaacaaattctgtgaatgcgagctgctttgttacagaatgtttgtatcatactacattttcattttgaaatctttaaaatattgagtactaggatatttagctattaaaggtaaaagatgaattagaaagctkgaaatgaaaatgtttcatgtcaggtaaaattcagttttcagggcttaacttttgaccactgaacaaaaagcatgtctttcatacagttagagatgtacagaaatagttgcttatacaaaatgtcttgtttaatcgtgcatagagtttttaaagactccagaaactgaaacttagaagagctggtaagcttgtttacaggcattttttaaaatatattacttcttttttctccattctctttcctcacagtgagaatactactacttgagaaatggtacatggtactattacttatggtac

SEQ ID NO: 74321 - DNA, 600 bp, Chicken  19866894356673_1
atccaacatcatcactgtcagaaacactgtttaaatactatggcagatttacctttcctagatcagtggtctaaagcatctgtatgcaggagcagagaattcatagagctttcgttatggccatggaaatgtgtcaactgcagatcttcttagaagcatgcactcacatgggaatttacaagaattatttttcttctgccaatattgctggaaaccaaaattcttaagagtgaaaaacaaaaaagaagaacagaatagtctaaccaagtgtgggattgcagatccaaataattgcaacarcttcttgcaagattcattccgctgtggatctgataataaaaccttgactgaaaatgcctaacacttatgttatatagtaataaagcgcttatgttatatattaataattctgaataactttacaaagactgctatatgaaggcttcatttctggtttcctttctacattacatacgtggtgagttagataaaaaacatggtaaagtgaagtacatgaaagccaatatttctagagcagaatattaattgcccagaaagaaatgtattcaggtcagcacgtagcaaagcagcttgaatagt

SEQ ID NO: 74322 - DNA, 600 bp, Chicken  19866894356673_2
gagttagataaaaaacatggtaaagtgaagtacatgaaagccaatatttctagagcagaatattaattgcccagaaagaaatgtattcaggtcagcacgtagcaaagcagcttgaatagtttaacagttatttaattttgctaatagctctcattgccgaaacaagtttaaaattatccgccattcttattgtttgctcacagggcatttgccagcaataatgcatgcttttattatacaattttagggcacactccatacctgacttcggtagggaagaggcagaagagggcttctggkgtggggtcaaccctttggagaaaaaataagtcagtgtcagagctactgcttagagctacatttctataagttatttcttcatttttagccagtgttgccttatttaatagctcaagagtagaaaaggaagaaagactgtgggaaagaccttgtaagttcaggaaagaattctgattttctgatgacaaaaaaatgaagggtcaactcaaggagagatgtttgtgtcatgcatgaatatgctgagaattcctgcagtatcacaggggtgctttggccagacttcctgggagctgtggatag

SEQ ID NO: 74323 - DNA, 600 bp, Chicken  19866894356673_3
tatttcttcatttttagccagtgttgccttatttaatagctcaagagtagaaaaggaagaaagactgtgggaaagaccttgtaagttcaggaaagaattctgattttctgatgacaaaaaaatgaagggtcaactcaaggagagatgtttgtgtcatgcatgaatatgctgagaattcctgcagtatcacaggggtgctttggccagacttcctgggagctgtggataggttttatgtaagccacattacatcacagccaccttctggaagtggtttaaagcagagctgtgtgctctcgragcctggggaatgacatggggatttgtgataggacaagagagaatgatttcaaactaaaagagtagagattcaaattggatataagaaagacttttttacaataaggttggtgaggtactgtcagaagttgcccagagaggtggtggataccccattcctgaagacattcaaagtcaggctggatgggtctctgagcaacctgatatagatataggtgtctctgttcattgcaagggggttggactagatgacttataatggtctcctccaactcaattctatgattctatgaaatgtta

SEQ ID NO: 74324 - DNA, 600 bp, Chicken  19866894356675_1
ctcaccagatggcatgcttgtttcactccagccccacagttcagtgcaggatgctcctagcaccaggctaattaaaggcttggacaccaactggcagccccactcccccagtccagtggtggctctgcaggactctcagatgtggcccatgcaacactgccagtgcatggagcagctgcccacagctccatgagactgggcactggaagaacagggagcttgggaactgtaaagcccagcagaaaaagtgggtctggtttagcccgaacaaaatgtcgtctatctaaaacattaccggtrgcagcaccggggtagtagtgcacgtccacagagtgctgtgatctgggcagcatgcacacacttgaacagactctgcaattactgaaaattgccatctcctctgcttctaacagcttgccatatcaacgtctaatgtctcatgttttgatttgattcatgactgtaaatcactgacataacatttggaggataaaacaaggatgcattatagagaaaccgtcttccgaaaccgcgtgaaaatattaaatgcagcaacaaaaacatacaaaaggtgtccacccaaaactcctgagaaacagc

SEQ ID NO: 74325 - DNA, 599 bp, Chicken  19866894356680_1
  misc_feature (1)..(246): n is any nucleotide
nnnnnnnnnnnnnnnnnnnnnnnnnnnnnnnnnnnnnnnnnnnnnnnnnnnnnnnnnnnnnnnnnnnnnnnnnnnnnnnnnnnnnnnnnnnnnnnnnnnnnnnnnnnnnnnnnnnnnnnnnnnnnnnnnnnnnnnnnnnnnnnnnnnnnnnnnnnnnnnnnnnnnnnnnnnnnnnnnnnnnnnnnnnnnnnnnnnnnnnnnnnnnnnnnnnnnnnnnnnnnnnnnnnnnnnnnnnnnnnnnnnnnncaagttttaaattcaagttataaagagtcatattgttaatgtattggaagaaaraaataataaaatacagactttgatgacactcaaaaagactgtcttagaaataatctgattgcctaaaatgcatgcatgcatactcytacatgtgtcccccagcaacaaaactatggaaacgatttgtttattccaggataataataaaaaaatgcacagaatacttctgaatgcttctctaggatgcaaagaagcaaagctacagaagtgtgtaattgtatgtttattactgtgcacacaaaagtctgttgttacagcagatttttccactcggagtttacaaaaacaatcagaattat

SEQ ID NO: 74326 - DNA, 599 bp, Chicken  19866894356680_2
  misc_feature (1)..(160): n is any nucleotide
nnnnnnnnnnnnnnnnnnnnnnnnnnnnnnnnnnnnnnnnnnnnnnnnnnnnnnnnnnnnnnnnnnnnnnnnnnnnnnnnnnnnnnnnnnnnnnnnnnnnnnnnnnnnnnnnnnnnnnnnnnnnnnnnnnnnnnnnnnnnnnnnnnnnnnnnnnnnnnnncaagttttaaattcaagttataaagagtcatattgttaatgtattggaagaaaraaataataaaatacagactttgatgacactcaaaaagactgtcttagaaataatctgattgcctaaaatgcatgcatgcatactcytacatgtgtcccccagcaacaaaactatggaaacgatttgtttattccaggataataataaaaaaatgcacagaatacttctgaatgcttctctaggatgcaaagaagcaaagctacagaagtgtgtaattgtatgtttattactgtgcacacaaaagtctgttgttacagcagatttttccactcggagtttacaaaaacaatcagaattatgaaaactgcaacagaaaacagtattmtttcatggaaacagaaaacggacagtttacagttgacgtgactaccagtttgaatattac

SEQ ID NO: 74327 - DNA, 600 bp, Chicken  19866894356680_3
acactcaaaaagactgtcttagaaataatctgattgcctaaaatgcatgcatgcatactcytacatgtgtcccccagcaacaaaactatggaaacgatttgtttattccaggataataataaaaaaatgcacagaatacttctgaatgcttctctaggatgcaaagaagcaaagctacagaagtgtgtaattgtatgtttattactgtgcacacaaaagtctgttgttacagcagatttttccactcggagtttacaaaaacaatcagaattatgaaaactgcaacagaaaacagtattmtttcatggaaacagaaaacggacagtttacagttgacgtgactaccagtttgaatattacctcatacttaaaaaaaaatctttcataatttcttttttttaaaaaaaagagagaaacaaagaaaaaggattggctcatttggttcctagaatgtaaactaagagaaataaaatattgccatagtgaggttacagaatactgaagcaccactgcctcaaaatatttactttatgatcatatgcaataataaaaacatgacagatacagtatattatttcacatgacttttggagaagtgtc

SEQ ID NO: 74328 - DNA, 599 bp, Chicken  19866894356681_1
  misc_feature (1)..(77): n is any nucleotide
nnnnnnnnnnnnnnnnnnnnnnnnnnnnnnnnnnnnnnnnnnnnnnnnnnnnnnnnnnnnnnnnnnnnnnnnnnnnntgggcatgaatgaaaaggcagctctcaactccaatagcttaaacagtcccatactgtaggctattccctgacttgtttattgtgactactgttctctcaatttttccaaatccttctgttccaaagactctcaaattggcagtgtgtaagcagatggaagtccttggttttgctacatcggtaaggaataatatgaattttttatattcatgcagtgaaaaartgcttgtaaatatggtatagggacatatactgcatttattcctaaattaaatacacttactttaagcagatagcaatgaaaggtttgtctctgaactttctttaggcttggacttaaaaactcatagagataaatgtgaccgcacctctcaaagaaattgttttatactagttcagagctcggcaagacagaactgcatcrgcttgaacttggctcacattgtgagtacgtctccaaaaccatatggagtggatattttgtgttagttttaaaaaatgtgggacgagtttctgcagcac

SEQ ID NO: 74329 - DNA, 600 bp, Chicken  19866894356681_2
agactctcaaattggcagtgtgtaagcagatggaagtccttggttttgctacatcggtaaggaataatatgaattttttatattcatgcagtgaaaaartgcttgtaaatatggtatagggacatatactgcatttattcctaaattaaatacacttactttaagcagatagcaatgaaaggtttgtctctgaactttctttaggcttggacttaaaaactcatagagataaatgtgaccgcacctctcaaagaaattgttttatactagttcagagctcggcaagacagaactgcatcrgcttgaacttggctcacattgtgagtacgtctccaaaaccatatggagtggatattttgtgttagttttaaaaaatgtgggacgagtttctgcagcacagttctgtagcgagagcagattctgggacaagttccacagcctgagatttactgggtctgggatatacttaatagccatcactccacacagggtaaggctccacattttgtgactgctcaccatgctgagtcaagaaatatttatacttgcaattacctaagaaaccaggagtgagaatttccagcttaacgcttgcaatat

SEQ ID NO: 74330 - DNA, 600 bp, Chicken  19866894356685_1
agctgaatattttacctacctcattgaatggtgctttcacggtgtgttctggaaatatgactattaaatcttgtaaattcagaggcaaatgtgttagcagaaagctctatgctcatttatactcattcattcttgtctttccaataaagatgcaatgaaactatgctgcctatgtgctgtgcaacgtcaaatggattgatttgtgaagatgatattttaaacccttagcttgatcttcaagggagtaaaaccaagtgagattggtgctcacaacgtggtacatctaagttgtccatactktagtttgtgtcattctggaggtgagagctgaatgtaaagaacacaacataacttcctagatattgcatgtctttccaccaagaccagagaaaaaaatttatttgctggctaaactgtccagaactgtgaacttctagtaatgatcttaatgaaactcccagaaataaaagctgaaaactagtctgatgaaaaatgccttgcagctgtaattgttcatgtgctgttcaccaccactgtggaagttctgaaagcaaagcaactgaaagtacaactaagctcaaagcgtttgtgcttgcttcc

SEQ ID NO: 74331 - DNA, 600 bp, Chicken  19866894356687_1
gattatatttccactttaaagtattgggctacttttaagtatttaaaagcagaacgttacccctatgtacttttaaaagcctttttgttcctccagtgctgctaactcaaaaagcagaagcactctcacaccgcctccaccaacctccttcccttacattaagggagctgttgttgagctccttagaagtctactctacattgaagcatatttgcctctctggggtttactgaataagagccacctctcccaaccctcaagggacacatatccatgtctgccaccggtattaagcatcasactgcttactgcagtctaatcaaaggctgagaaatagactcagcaaactcagccttgcatatctgagaaygcctctatctctgctcatccagattttagcacacaaaacaactcatcgttgttgctgagacttctgcaccaagttaccaaaatatgaaatccacacaacatgaaaaaaatatttaactgctaatctatttcagctttatcttagcttagaagagaagccaagtgagaatcatagagaggctttcttggcttctctacaattaatctttaaaatattgctaaggagataag

SEQ ID NO: 74332 - DNA, 600 bp, Chicken  19866894356687_2
ttttaaaagcctttttgttcctccagtgctgctaactcaaaaagcagaagcactctcacaccgcctccaccaacctccttcccttacattaagggagctgttgttgagctccttagaagtctactctacattgaagcatatttgcctctctggggtttactgaataagagccacctctcccaaccctcaagggacacatatccatgtctgccaccggtattaagcatcasactgcttactgcagtctaatcaaaggctgagaaatagactcagcaaactcagccttgcatatctgagaaygcctctatctctgctcatccagattttagcacacaaaacaactcatcgttgttgctgagacttctgcaccaagttaccaaaatatgaaatccacacaacatgaaaaaaatatttaactgctaatctatttcagctttatcttagcttagaagagaagccaagtgagaatcatagagaggctttcttggcttctctacaattaatctttaaaatattgctaaggagataagatagctaaatgatcattctatcaaacatacactgatcatcttatagcacagccagtttattccagttctg

SEQ ID NO: 74333 - DNA, 600 bp, Chicken  19866894356689_1
ttttgcctcttttgtgagacagcagcaaggtcctgatttcaggatttcatgaaaagcaatggaaaaaaggagggtttatgacacctggaggtcccaaacacaacaggcatgaggcagcttgcaagaagggctttcaagaagtagacaggatttctgctccagtgaaaactgagacacaagaaaaataccaccccagggcacagggcagtgaatgggatcatcaagcaaaagcctccagtacagcagagcccaaagaatatcccagggctgggaatggggctacagagctggtcagctgcrggtctgcagtgtgatggatgagcacaagccacgctgatgggacacactgagcaattaggtaaggaggtctagacacccgtgtgcaggttcagatggagactgtgctaatgaggactggggacaacgaggtgaggcagcagtcaggctgatggrcagaccagatccaaaaagggtggtgaaagggcttcagtagcagcttagatctgtaaaagggaaggaagtgatcccccttcctaatggtaaggggagcagaggaggacacatacagagcactgtttacgtcccctccttaacacaggc

SEQ ID NO: 74334 - DNA, 600 bp, Chicken  19866894356689_2
ctgctccagtgaaaactgagacacaagaaaaataccaccccagggcacagggcagtgaatgggatcatcaagcaaaagcctccagtacagcagagcccaaagaatatcccagggctgggaatggggctacagagctggtcagctgcrggtctgcagtgtgatggatgagcacaagccacgctgatgggacacactgagcaattaggtaaggaggtctagacacccgtgtgcaggttcagatggagactgtgctaatgaggactggggacaacgaggtgaggcagcagtcaggctgatggrcagaccagatccaaaaagggtggtgaaagggcttcagtagcagcttagatctgtaaaagggaaggaagtgatcccccttcctaatggtaaggggagcagaggaggacacatacagagcactgtttacgtcccctccttaacacaggcagcgttggacaaactaaaactacagctatcacagygyacacaaacatcaaagagggagagaaataattcagaawatcatacacacacatttccctttgttaatgtgaatactaggaaaggcttggtggccatcacagcccagcccagcatcct

SEQ ID NO: 74335 - DNA, 588 bp, Chicken  19866894356689_3
gatgggacacactgagcaattaggtaaggaggtctagacacccgtgtgcaggttcagatggagactgtgctaatgaggactggggacaacgaggtgaggcagcagtcaggctgatggrcagaccagatccaaaaagggtggtgaaagggcttcagtagcagcttagatctgtaaaagggaaggaagtgatcccccttcctaatggtaaggggagcagaggaggacacatacagagcactgtttacgtcccctccttaacacaggcagcgttggacaaactaaaactacagctatcacagygyacacaaacatcaaagagggagagaaataattcagaawatcatacacacacatttccctttgttaatgtgaatactaggaaaggcttggtggccatcacagcccagcccagcatcctaaggaaaaggagaggggcagtgacatctgtaaggctgcggggagctggcagagccaggtcaggctcctgcagtttgctttcactctgcagattacactctcagtgcatcacttcagcctttctgccttgcagccagaggaacaggtgtatgagaaacccctattgcatta

SEQ ID NO: 74336 - DNA, 586 bp, Chicken  19866894356689_4
tgggacacactgagcaattaggtaaggaggtctagacacccgtgtgcaggttcagatggagactgtgctaatgaggactggggacaacgaggtgaggcagcagtcaggctgatggrcagaccagatccaaaaagggtggtgaaagggcttcagtagcagcttagatctgtaaaagggaaggaagtgatcccccttcctaatggtaaggggagcagaggaggacacatacagagcactgtttacgtcccctccttaacacaggcagcgttggacaaactaaaactacagctatcacagygyacacaaacatcaaagagggagagaaataattcagaawatcatacacacacatttccctttgttaatgtgaatactaggaaaggcttggtggccatcacagcccagcccagcatcctaaggaaaaggagaggggcagtgacatctgtaaggctgcggggagctggcagagccaggtcaggctcctgcagtttgctttcactctgcagattacactctcagtgcatcacttcagcctttctgccttgcagccagaggaacaggtgtatgagaaacccctattgcatta

SEQ ID NO: 74337 - DNA, 549 bp, Chicken  19866894356689_5
acccgtgtgcaggttcagatggagactgtgctaatgaggactggggacaacgaggtgaggcagcagtcaggctgatggrcagaccagatccaaaaagggtggtgaaagggcttcagtagcagcttagatctgtaaaagggaaggaagtgatcccccttcctaatggtaaggggagcagaggaggacacatacagagcactgtttacgtcccctccttaacacaggcagcgttggacaaactaaaactacagctatcacagygyacacaaacatcaaagagggagagaaataattcagaawatcatacacacacatttccctttgttaatgtgaatactaggaaaggcttggtggccatcacagcccagcccagcatcctaaggaaaaggagaggggcagtgacatctgtaaggctgcggggagctggcagagccaggtcaggctcctgcagtttgctttcactctgcagattacactctcagtgcatcacttcagcctttctgccttgcagccagaggaacaggtgtatgagaaacccctattgcatta

SEQ ID NO: 74338 - DNA, 600 bp, Chicken  19866894356699_1
ttaatattgatgctgtcctttttcactgatgtaaagtatgcaactgacacttgacagaacaagtacgtaagaaagttttgccaaaaactaatgtgataaaaatctgagtgaaaaggtcgctctatggggttctggttgaaaacccagccaatagttttacagcacaatgacacagtaccatcatttaactactgctgacaaggagtgctaatgactaaaacctaagtaccacctaggtaactgatgtccccgtttcaacaaataggtacttatatatatacatgtatttgtatcacaacmtcagaaccatcactgtcaccacttcaccgtttcatattcagtcaagtaatgctctgcatttcctaaacaaatggtttacttgacaagtgtaccagtgtggtacagttatatgcaaaaatgctttgaaaactgaattattaataaaggaggaaagtgtttacatcaattcccaactaaatggttaggacaaaaaaagattaccacccccaaaaatgagtagttcttattagtggttactcaaacttttctgtaagcagacaatgccactgaagtaggcgttttctgaaacaaatctcacac

SEQ ID NO: 74339 - DNA, 600 bp, Chicken  19866894356708_1
tttctatctgcttactgctgagctcttatgagaagtcattgctcaatgcagactgataaatcttgctttagctgggggtcttaaataaagtaatgaaattttagaacagctttataactgcagtcaaaatattggttgcacctatttttatctggctgtctccttggaggaattgccctttagggtattcagcaacttcctaattggaaaatgttttgctagttagcccagaataggatctcagcatcacagattttgagattagcccctgtgacttcatggagaaccatactgtttggyggaagtcagtagccaacacttactccctggaaagaaatattttcactctaataacactgcacaatgacatttcttcactgtacatatagtctgaagtgggaaactttgatttatccagaccaagcaaaacactagtgccttatatttgttctccctcaaacacagttcccaccaaagtagtggtaaggaacaggaacatgttgctcaaagaatttgtggatgccctrtccctggaagtattcaaggccaagatggatggggttccaggcaatctgatctggtgggtggaaggggcagtgg

SEQ ID NO: 74340 - DNA, 600 bp, Chicken  19866894356708_2
ccagaataggatctcagcatcacagattttgagattagcccctgtgacttcatggagaaccatactgtttggyggaagtcagtagccaacacttactccctggaaagaaatattttcactctaataacactgcacaatgacatttcttcactgtacatatagtctgaagtgggaaactttgatttatccagaccaagcaaaacactagtgccttatatttgttctccctcaaacacagttcccaccaaagtagtggtaaggaacaggaacatgttgctcaaagaatttgtggatgccctrtccctggaagtattcaaggccaagatggatggggttccaggcaatctgatctggtgggtggaaggggcagtggaactggttggtctttaagatcccttccaactcaagccattatatgattctatgatgctacaattctgattctgattctatgattctatgagtatgcatctctccatggtaaaagcacagtgcagaagctgttggaacctcatcrtcacaaagaagcactcacctgtgaagaaagataatgtggcaatagtgtgccacgaggagaaagagttatccacatttgctctc

SEQ ID NO: 74341 - DNA, 600 bp, Chicken  19866894356708_3
tttgttctccctcaaacacagttcccaccaaagtagtggtaaggaacaggaacatgttgctcaaagaatttgtggatgccctrtccctggaagtattcaaggccaagatggatggggttccaggcaatctgatctggtgggtggaaggggcagtggaactggttggtctttaagatcccttccaactcaagccattatatgattctatgatgctacaattctgattctgattctatgattctatgagtatgcatctctccatggtaaaagcacagtgcagaagctgttggaacctcatcrtcacaaagaagcactcacctgtgaagaaagataatgtggcaatagtgtgccacgaggagaaagagttatccacatttgctctccagaaaactgtctgagaggttaaaaactttcttttctccatttgctgacataggaaagactatttatctatcccattacagaagaaaagagttgttagatcagaccagatgcaatccagtctcctttctctagcaataaggaaaattagaataattcaagctatggtatgaggtcttctcaactcccatatttgagaagtcaccctgatgcacaatg

SEQ ID NO: 74342 - DNA, 599 bp, Chicken  19866894356712_1
  misc_feature (1)..(61): n is any nucleotide
nnnnnnnnnnnnnnnnnnnnnnnnnnnnnnnnnnnnnnnnnnnnnnnnnnnnnnnnnnnnnatactgagatcatattcttaactactaataggtgttttttgtctcctgagactgataatctacccttcccccatccttataccatctttgtggttgtgatattttgcttctaggtgacttttcttgattttctatgattaataaaattaatgtaatattgtctctgcagtctgatgtattttcttattcctgagctgtgatatggtggtatggtattgttagatgtttttcttttaatstccacaaacatgcaaggtcgtcttaatttttgtttcagttccttgcatacgttttaatttatatctttttgcccatgttacctaagatttgctattttattttatttttttttctttgcctttcttttctgaactcatttttcttttcccatttttgtttcctccatccagtatctgcagatgaaatggccactgcttgatgttcaggcagggagccttcagagtagacaagccctcaaggatgctaggtctccatctccagcacacattgttgtaagtaaacacagaagatgttcttt

SEQ ID NO: 74343 - DNA, 600 bp, Chicken  19866894356712_2
cctgagactgataatctacccttcccccatccttataccatctttgtggttgtgatattttgcttctaggtgacttttcttgattttctatgattaataaaattaatgtaatattgtctctgcagtctgatgtattttcttattcctgagctgtgatatggtggtatggtattgttagatgtttttcttttaatstccacaaacatgcaaggtcgtcttaatttttgtttcagttccttgcatacgttttaatttatatctttttgcccatgttacctaagatttgctattttattttasttttttttctttgcctttcttttctgaactcatttttcttttcccatttttgtttcctccatccagtatctgcagatgaaatggccactgcttgatgttcaggcagggagccttcagagtagacaagccctcaaggatgctaggtctccatctccagcacacattgttgtaagtaaacacagaagatgttctttattcgttttctattttttcttaagggcatttgaccttaattgcattgattgtcatcacttttcttttgcacaaacgggaagataaatacttgaaaagaaacagaaa

SEQ ID NO: 74344 - DNA, 455 bp, Chicken  19866894356718_1
tgttgctgctgccatgctactcttcctacttatgcttttgctagtgatgaggagtctgttggcctttcttagactttgtgatgttttactagtaactccagctgctatttgcaatgctgcggtctgttccattagtgagcagagtcttcacgtgcagcggattcagagtactgtaggctggctcccaagctgtttatttacacctgcttaggatttaatgcatcttcccagcttgatcatttcctgatcaagcagatccttccatcactcagtcatggacacaggagatatgaaagcttyaggcttttttactatgtttttcagaactgttggcacagaatcacatttattgcattttctgaaactgccagtcatcttacaacaaatgcttaattaaagtcagaagtttaattaaagacaagaaagtctggcagtcacaatcattttttcctcca

SEQ ID NO: 74345 - DNA, 574 bp, Chicken  19866894356720_1
atgagagtgatggcttcgttcattgctctgtattacatttagattgcaaaagagactggctcggcgtcctgagtgtctttcagaacttgccatggccctgactcagactgctctgatgataaatagcttcaatagaggacactgaattttgattttgctattttatcatggcgcttttttttgatattttggcaatttataagagtaactaagaaagaggaggtgtattccatttcattgtatttgtattggcaaaacacttcttgaagtagcagtgtggagaagtgatttgccttcatmtgtcttattttattaggtgctggctgcagctaatgtactggtcattttcaactagataggtgagcagaggcagcaggacttatatgcaatttcttttctgtattccagttaccttgatctggtctgcagcagaactggatctagttaaagcaggtgcttctggtgggttattcaactggggaaaggtaaaggggaatgtacacatgtgtattttaactgcttgcgctagcctgattggatactggcatcttgcctgtagctgtgagcttgactg

SEQ ID NO: 74346 - DNA, 600 bp, Chicken  19866894356725_1
tgctttgtcactatgtcagcactgctgagtttggagttcctgtctgtctggaagggatcctcatgctttccctcccaggtgctgttagtgatggtgggagctgcaacctcatttacccctttttaataatccgtccttattttcctaaagccaggtttggagaatggttgaagctggaagggatctttggaggtcaactgatacagtccttgctcagccctgttcagccctggctggcttatggtaaggatcattcccctgaaagcacataggatgaatctgcagcatgccttaacacayggagcattttcagtgtatacggtgaaagtgatggtttaacccagaggcatatatgtgctcacagagggaaggggggaaagtcagcactcagccatcagagtgttctttgttttagagccaccacgacaccacctatatattttcttccctgaactgtggttttgaaatcaatctttgtgatccagaatgctatctgctaatagatcttctcctcctcactgtgtcctgtggtaacaaaactctccagccttcggctacacagtggtgctgctcctttctggggcagctccttttacctct

SEQ ID NO: 74347 - DNA, 600 bp, Chicken  19866894356726_1
gttatgcctgtaaaatattcctaacagcaaaaagtacaattgatgaacccacttatgttctcttgatatctccttaaatgttatttttagtgggctgaccacatagagcagaagaactgcatcttcttacaatgtacctgattccttcaaaaaagaaaaaaaaaaaaaattacttttcattcgtgttccttgcaagaacaaataaaagactcgctgattacaatttatccctactgggttttgaaattttacagaagcctttggaattattccagcacatgcagaatgttgtttgtttgktttttttgtattgctattgggtatttgaaaatactagctggctaacttgaggccttcaggatggagaacagagtacctatgttatcctagcccaaatattaatgtttggagtcatacactggaaaaagttagacttccagaccttgataggaaatttaggcagggcacagtggatcatactttttgtcatatttaaatggagcttgcttatgagtaattggtatttggtattgcttatgagtatttaattggtcattaccatccgcaattcttttttattatattgagtatttgtgtcaa

SEQ ID NO: 74348 - DNA, 600 bp, Chicken  19866894356727_1
aaaggaacacttaatgacaatcacttgaaccagcagccctgaagaacttgcattctattttctgaagtgtattaaaatacagggtgcttctttgtacacatatgtggtcattagattatccatgatcacttaaatctaattttgctgtaactcttatctgtttctggtgtggagtggatgtggttgtgtatttcaagttagagacattaaaggggcaaaccagcacgtgaagcaaagaagaaacagctggagtatgcacctattaaactctggatttgtatcagttcagtaaacagttargtactgttgttggtgtgaaaataaacctagcagaagagagcttttgctgctaagggagtagaagtaaaacttcaattggccttgagacacttccagaatggctggaagcaacttgatatttcattttcatattagcgtttgatgaacaaatgtgcagctggttttattgcccagagaatgtctttataattaaaataccagctgtattcaggaaagctccagaatcatggaatgctgaccaaggcctctgtaagagggaaacatgatctggtctggatcaggcaagagaaatggtccttg

SEQ ID NO: 74349 - DNA, 600 bp, Chicken  19866894356728_1
ataaattaaagactaagcatatctgaggattagttagtttaagagttatgactttcataaaacagcaattcaaaagtgttggattttacatgtggaataatatgattatcttaggctgtggcctgcattagcgagtaattaagggaaataggaatggctcagaagaacaaaaaaaataggtgctaaagactccacatctgcctaatgcaaagactgttgcttcacctgtcttgcctttatccaacaggaggctctaatgttagtagtcaagtttactttgcgaagatactgcatgagatygggagtagatgaccaagtttttcctgtttaccatgaactaacatcatgattttgtcatcattagacaaatactgagaactttatctatatccaagaaaatggtatcactgtgcagaatctaacaccgctcatggtatacctcttcatggagagaaacatatatgttcagaaggaaatttatcccattgtaaagcacctgccagagaagtaaggactagaaattatatcttactatgtaaactatagaattttaattattctgatatacagggtgggagagagtgacataagaattcaagg

SEQ ID NO: 74350 - DNA, 600 bp, Chicken  19866894356728_2
taaagcacctgccagagaagtaaggactagaaattatatcttactatgtaaactatagaattttaattattctgatatacagggtgggagagagtgacataagaattcaaggggaaaagggaaaacactggcaattaaatattgggaatattgagggaaaataaaacagaaaatatgtcaacggaacaacagatctttttgttggtggtggtggtgttttttgttttgtttttctttttgtttgtttgtttaaattaacttataatttattttcacagaatcacaaaatgtttaatgctmtggaagtaatctggtccaagccacttgctcaatcaagatcatccaaaccaggttgctcatgatcacgtccagaaagcttttgaagatctccagggagatcccactgcttcttcaggcagcttgtactagcattcagtcatccacagagtaaaaataaagaaatgaaatgaaacaaataaaataataaagtaaagtaaaataaatggtgtttaagcaaaatattttgtgtttctgtttgagcctgttgccttttgtcctggcacttggcaccactgtttttagtgactcagattcttttga

SEQ ID NO: 74351 - DNA, 600 bp, Chicken  19866894356736_1
tgaatttcgtttcacatcgtccttcaaaatgacttaccttggaagtccatcagaagtttcttttcctatggtggactcgcatgagaatccatcaacaaaagcaattcaaaaaatgaacaggaggccacagctggcaaagtatagacgtggattttctatttgcagggctcctcatctggtctctataacactattttcattatgtagttacttggcttgataatagcaaacctgctgaagtggttaccagattggtctgtcagtctgcagcatcttccagactgtgcttcagcaatagcytttcgagtgtttattaccgaagaactgtagtatggaagtattggaagtatagccactgccatctttaggaagctgtctgcaagtcatactaagaaagaatgtaaaatcttgtttttcctgtgaaactgaacatccaagttgttagtattgtgctggttgccatattttccttttgtcatttctctcccttctgcctctcctccctgttggtcctccttccattttccgtctctttgtggcatctcctttcatcagggagatttcccctttttggttaaattgtctggaacgaaaggtaat

SEQ ID NO: 74352 - DNA, 592 bp, Chicken  19866894356736_2
agtatagccactgccatctttaggaagctgtctgcaagtcatactaagaaagaatgtaaaatcttgtttttcctgtgaaactgaacatccaagttgttagtattgtgctggttgccatattttccttttgtcatttctctcccttctgcctctcctccctgttggtcctccttccattttccgtctctttgtggcatctcctttcatcagggagatttcccctttttggttaaattgtctggaacgaaaggtaatggtggtattcaaggtggcattactagaactggtatgtaacacagygatgtcaagaggaaggtggaattgttcatgtggaaggaggtggttgttcatctgtcagttggattttctcattgtcttgtacatccgtgtaagtggttgaaagacttcccttccaattaagccattgagacaccaaaatgcaagatgctgtttcataaaaggatgtgatctcactgaaagctcttgtaccttgtttctgtccatctggaataacctgaacgctttgacaggagtcaaacccctgagatgttcttcatgttattgattgcatgttactacctattaaaatgag

SEQ ID NO: 74353 - DNA, 600 bp, Chicken  19866894356745_1
tccttttgttccctggccgcacagccacggcacagcacggcgtggtggtctccaggaacagccccggctttgcctcgcccccagcaggacaggtttccccacgcacacacgttgcggggtgccgtgcgtcctcaccgctgtgtttggcggtgctgctgttccctccgtgagccatccgcccatctgcacaccggggacggggaggggacgggcgctgtgcggcatccccccgccgacagctctgctttgcctccagaagacaggaagctctttgtgggcatgctggggaagcagcagagygaggatgacgtccggcgcctcttcgagcccttyggacagattgaggagtgcaccatcctgcgtgggcccgatggggcgagcaaaggtgggagcagagagcggggcctggcagcggggcattgcccgaacgcatcttgtcactgtccctgtccctctgcctgcaggttgtgcctttgtgaagtacagcagccacgccgaggcacaagccgccatcagcagcctgcacggcagccagaccatgccggtaagcgccggccgcgctgtcccctaatccaatcaccggctaatttgatctgtcta

SEQ ID NO: 74354 - DNA, 600 bp, Chicken  19866894356745_2
agcacggcgtggtggtctccaggaacagccccggctttgcctcgcccccagcaggacaggtttccccacgcacacacgttgcggggtgccgtgcgtcctcaccgctgtgtttggcggtgctgctgttccctccgtgagccatccgcccatctgcacaccggggacggggaggggacgggcgctgtgcggcatccccccgccgacagctctgctttgcctccagaagacaggaagctctttgtgggcatgctggggaagcagcagagygaggatgacgtccggcgcctcttcgagcccttyggacagattgaggagtgcaccatcctgcgtgggcccgatggggcgagcaaaggtgggagcagagagcggggcctggcagcggggcattgcccgaacgcatcttgtcactgtccctgtccctctgcctgcaggttgtgcctttgtgaagtacagcagccacgccgaggcacaagccgccatcagcagcctgcacggcagccagaccatgccggtaagcgccggccgcgctgtcccctaatccaatcaccggctaatttgatctgtctaattggatcacgatcccggtgtgttgcccggatc

SEQ ID NO: 74355 - DNA, 600 bp, Chicken  19866894356750_1
catatgctatgcaattgatttttcaatattctgtccacaaacataaataaaccatctcatttgaacctttagcatctctgtaaaagactttatagtgaagacatcagttctgcaaagactcaaagacattattaaatccatatataggattatgcttacagggctttactcagtgtgtagcagtaaacatgtttaagaccttcctgggcacaaaaactagcaattccaggaactcaagaattgatgagatgaactgacaaagtcatgagatttggcttgaaagttgtttaattttctggrtgagcctccaaaattttgttttttgactttgcacatatgagccaacttgcaacagtttctagcatataaggccagctttttggtctctttgggagccctcactagaagaaccagctgggactaaatcacaaaaaagctgccagatggtgtagccacctttctccctccaactaaaatgcccaatgagaaataattatgtgcttctgtaacacagtatctgccagccatttaatattgcagcagctcactacatatccctcttccctacactgtatcaatttgagtcttcatcattcactg

SEQ ID NO: 74356 - DNA, 600 bp, Chicken  19866894356753_1
tccccaagagacccagcagtgcccctcagcattgtcctgctgaggctcagctgagggatgcatgcaggatgaggccactgctggcaggatgaggcggtgccgtcaggacaagcccttgccagcagcgtgaggccatgctggcagctccttgccctgcagatttgcaaggtttgggctcatcccagcccgctttcagggatgcagcacaacagatgcaaggcaggcaccactagtagaagctgccattctttcggccttgggctctttacaagcagtggccttcttgagagtcacccggcrtttggccagatccccagtggctttgcacattccttttctttctctgaatgaatggtctaatctggctggagggcattgcaaggcccaatagccagtttgctgcacctgctcatcaaagattgaaacacctgccctggtcggggcttagcatttaagtgctgctatttgaagacaaatcttgtcttttgtctctgcctgagccttgtcccatgcccccccagccccctttwaaaaaaaaataaaaaaaagaagaagaaaaaaggctgtgctgtgtattttttggatggggctcattttttt

SEQ ID NO: 74357 - DNA, 600 bp, Chicken  19866894356753_2
tagtagaagctgccattctttcggccttgggctctttacaagcagtggccttcttgagagtcacccggcrtttggccagatccccagtggctttgcacattccttttctttctctgaatgaatggtctaatctggctggagggcattgcaaggcccaatagccagtttgctgcacctgctcatcaaagattgaaacacctgccctggtcggggcttagcatttaagtgctgctatttgaagacaaatcttgtcttttgtctctgcctgagccttgtcccatgcccccccagccccctttwaaaaaaaaataaaaaaaagaagaagaaaaaaggctgtgctgtgtattttttggatggggctcatttttttcctctagttttccagaaaaacaacccttgctttccctgttaggtgaattgctagggaagattagacacactggcacaaagcagcgtgagcactttccttttgcctgcagctctgtgaggggcttgtgctgatactaaagcgctccagtgttcagcagatgcactctgaagtactgttgcataggccaagtactggccagcaatgccatgcaatgaagtgatgtttttact

SEQ ID NO: 74358 - DNA, 600 bp, Chicken  19866894356757_1
tgatacaggcagcagctcagactaacacgaatgaacacaagaagtcagaatatgactatcacagcattacaaaagctccagtgtcacctgcaaatgctcatatgcattagatgattaattaaatcaaacctttacacattacctcattttatctagctctgaaggaagtatttttgagaggctgcttaagttaagacaactactcgtatataaacttttccctcttttctcaggttaaaattagaagtggaagatacttaagaatggtcagcaccactcagtgctgttatgtccatccaygttgcacgctacggtcatacttctacccatgcttgtgaagatacccayccttgtgaagaacacaactattaaggcattcaattcagtattaattgaatccatgagttcataataatctgctaagaaaaagcatactcgtgttgattagctcagctaattttttttctatgtagagaatttgcttaacagtaattacttacamtttttactgaactttaagagcactgttggacataggataaaacaagctattataaaccacaacaaacattccaaaacaacctttcctgttacacaagg

SEQ ID NO: 74359 - DNA, 600 bp, Chicken  19866894356757_2
aatatgactatcacagcattacaaaagctccagtgtcacctgcaaatgctcatatgcattagatgattaattaaatcaaacctttacacattacctcattttatctagctctgaaggaagtatttttgagaggctgcttaagttaagacaactactcgtatataaacttttccctcttttctcaggttaaaattagaagtggaagatacttaagaatggtcagcaccactcagtgctgttatgtccatccaygttgcacgctacggtcatacttctacccatgcttgtgaagatacccayccttgtgaagaacacaactattaaggcattcaattcagtattaattgaatccatgagttcataataatctgctaagaaaaagcatactcgtgttgattagctcagctaattttttttctatgtagagaatttgcttaacagtaattacttacamtttttactgaactttaagagcactgttggacataggataaaacaagctattataaaccacaacaaacattccaaaacaacctttcctgttacacaaggaaattacctatcggtagaagtttctttgcatttcagaagccagtgcac

SEQ ID NO: 74360 - DNA, 600 bp, Chicken  19866894356757_3
ctcgtatataaacttttccctcttttctcaggttaaaattagaagtggaagatacttaagaatggtcagcaccactcagtgctgttatgtccatccaygttgcacgctacggtcatacttctacccatgcttgtgaagatacccayccttgtgaagaacacaactattaaggcattcaattcagtattaattgaatccatgagttcataataatctgctaagaaaaagcatactcgtgttgattagctcagctaattttttttctatgtagagaatttgcttaacagtaattacttacamtttttactgaactttaagagcactgttggacataggataaaacaagctattataaaccacaacaaacattccaaaacaacctttcctgttacacaaggaaattacctatcggtagaagtttctttgcatttcagaagccagtgcacaactctggctatttctagactatctatttgcagtcatcttccaccagcagctagtgctgatcatcacagaggcatctactaggttacatataatctgggctattcatagctttttttcccccctttctttaaaaatatatatgcacatatatat

SEQ ID NO: 74361 - DNA, 600 bp, Chicken  19866894356759_1
gcttctcacggtcatcttcatcagacttgactccagctccccatacatctccttgcagggcacatgcccatggcccctgcctcactgcaggaccttttccagtttctccacatccctttccatctaggtgtcagtatggaggcagcatttcagggcagcttcacttgagcagaggggtgaagctttcacagaatcagaatatccaagttggaagggatacataaggaccattgagtccaattcctggctccacacagaaccacccaagattcaaagcatatttctgagaatatttcatcmgcctgctagccaccctcctcctaaagcagcccagtgtctggtttgcaatgatagcactccattggctcatccttaacttgacatctgtcatagcccccaggtcattctctttgtcttgtctatctgctgctaacttgctgtttgctctttcttgagtcattaattttatttgcacgtgcctcttatccctgctgtttcagcatctctgtcaatttgaagtkagagctctgtgtaatctccaagagactgtttcatagtgtatgtttgcacagtactcagtacattagggtcccataagct

SEQ ID NO: 74362 - DNA, 501 bp, Chicken  19866894356759_2
taaggaccattgagtccaattcctggctccacacagaaccacccaagattcaaagcatatttctgagaatatttcatcmgcctgctagccaccctcctcctaaagcagcccagtgtctggtttgcaatgatagcactccattggctcatccttaacttgacatctgtcatagcccccaggtcattctctttgtcttgtctatctgctgctaacttgctgtttgctctttcttgagtcattaattttatttgcacgtgcctcttatccctgctgtttcagcatctctgtcaatttgaagtkagagctctgtgtaatctccaagagactgtttcatagtgtatgtttgcacagtactcagtacattagggtcccataagcttgcttatatatatatttactaattaaggggagagggtttactttctattgcaattttaatccacacattaagtgaactttaagtcatgtccttattttaggactgcaacaaaaagaaccata

SEQ ID NO: 74363 - DNA, 600 bp, Chicken  19866894356768_1
agtaatctctctcaagttccatacacttcctttagcctaacaagttagagcaagcagggcagcatcccagtgggactgtgtagaagatacagaaagagtgtaagaaacctgtacttttgtgtgaatcctagtgttttgcagttgcaggagcaaaacttttcagaagtctctccaggatgttagactcagtggtttccccacggagtcttgacaggacccaagtcagtggcttgaatgtgcttatgcaatgatcttgtgacagcaagtccattggcaggcagctccaacagtgattgtgcmtacaggtttctacctggcatgccagagaagattgggcaagaaatgaggtaagaaggaattcattccatcctactgcaaagtaaggaggaaggtcttgttccttctgtcagctatctgttagggatcttccttcctrtgttttcacagactgtgatagcatgacagctcattttactggaaaatacagcataaggatacaaagcgagtgcaagtgcagaatcttacaggggaggagtttttttagtgtaaattctgtgtcttgctgctttgtccttcagaagtgctctgtttctttgctca

SEQ ID NO: 74364 - DNA, 600 bp, Chicken  19866894356768_2
tgcagttgcaggagcaaaacttttcagaagtctctccaggatgttagactcagtggtttccccacggagtcttgacaggacccaagtcagtggcttgaatgtgcttatgcaatgatcttgtgacagcaagtccattggcaggcagctccaacagtgattgtgcmtacaggtttctacctggcatgccagagaagattgggcaagaaatgaggtaagaaggaattcattccatcctactgcaaagtaaggaggaaggtcttgttccttctgtcagctatctgttagggatcttccttcctrtgttttcacagactgtgatagcatgacagctcattttactggaaaatacagcataaggatacaaagcgagtgcaagtgcagaatcttacaggggaggagtttttttagtgtaaattctgtgtcttgctgctttgtccttcagaagtgctctgtttctttgctcagctgaatggcagggatgtcagcagcagggaaggctgagcagaagaatcagggctccaagctccttggggaagcctcaggccccactgtactgaaagaaggcgtttggggatgttccccccggcacagctgtcactt

SEQ ID NO: 74365 - DNA, 600 bp, Chicken  19866894356768_3
ttttcacagactgtgatagcatgacagctcattttactggaaaatacagcataaggatacaaagcgagtgcaagtgcagaatcttacaggggaggagtttttttagtgtaaattctgtgtcttgctgctttgtccttcagaagtgctctgtttctttgctcagctgaatggcagggatgtcagcagcagggaaggctgagcagaagaatcagggctccaagctccttggggaagcctcaggccccactgtactgaaagaaggcgtttggggatgttccccccggcacagctgtcacttgktgtcccaggagcactgagcagtcagtgccccaagcagagctctggcagggctggagttctgcacaggccgcagggtttgcaagacctgaggcatttgcatgacccaccttatagcgggctattttagttctcagatgtgcttgacctatcagcctggactaattcctgcaacatgaactgcacttcagtgtacctttcatctcattatttctgcaatttcgttccttttgttgtcagttttatctgagaaaacaaattaccattcatgatttcccactgtcagagaatgaacttgccttc

SEQ ID NO: 74366 - DNA, 600 bp, Chicken  19866894356782_1
tgaatctacagcctcgtggctacacctactgacagcaggcaggagtgcaggctcaccagcaggcacaggacctgaagcactcccatccattccctcccagtggttgtgccagatactgcctatctgctctgataagctgctctgatgcctgcatgtcttctggaagtgttctccaggtgtgagctcctgtcctgccctctcaggcattcagtctggggagcacccagcacttcctgtgtgccattcatctctgccccaatgacccactgtggctgcacatcatctctcagcaaccactgrgatggcagtgctcaaaaccaagatatttaaaaaaaaaattagggaaggggaaaataatatttatgtacctttgtagatctttcttgttttaaaaatactactgagttaaacatttatctacctatatcctctgtaccctatgccagaattcacttactttcatgatctttaaatttgccctgatgtatttaaaatgatgtgtggataaacttcttgccaattctagggagccaagagctgctgctttgttattttcaaaaggaaccagagaaatggatggaactgtgagcaacctggttg

SEQ ID NO: 74367 - DNA, 600 bp, Chicken  19866894356784_1
tacttcacacgtgatagtggtgttttgggctgcagttggagcagagaaggcaaataaaaaataagtgagaatagatcgcttgtgtcattatggtttaaagtcgaactgatcaagcagaattatctttgcctagctgcatgaaatctgcagtgactacagtaatttggattagaggcaaacaggaacatttttaagtggatttagaaagacatctcatgataatcctaatatgctacaaaataactgatgatgtattcagagttacttagaaccgatggaagagaactacatgtgtttctrtagtttaatatctgtcctttcacataatgtatacagacatgcatttacttactaactcttgagtgatatayaggaagttgttttttcttagtttatttctaaagtctttctgtattatttcacctccgtccttttcacttcagttaaaattcaaatccatgcctccagcactatttatgaaataattgatctctggaaagtaataagcatgctaatttattkattttaaattttcatttaagttccattakgtattgactttaagtatccttttatatataattttgtctgtattcattt

SEQ ID NO: 74368 - DNA, 600 bp, Chicken  19866894356784_2
tagatcgcttgtgtcattatggtttaaagtcgaactgatcaagcagaattatctttgcctagctgcatgaaatctgcagtgactacagtaatttggattagaggcaaacaggaacatttttaagtggatttagaaagacatctcatgataatcctaatatgctacaaaataactgatgatgtattcagagttacttagaaccgatggaagagaactacatgtgtttctrtagtttaatatctgtcctttcacataatgtatacagacatgcatttacttactaactcttgagtgatatayaggaagttgttttttcttagtttatttctaaagtctttctgtattatttcacctccgtccttttcacttcagttaaaattcaaatccatgcctccagcactatttatgaaataattgatctctggaaagtaataagcatgctaatttattkattttaaattttcatttaagttccattakgtattgactttaagtatccttttatatataattttgtctgtattcatttctcagcaaacctcattgttgtaacactgatgataatgggacagactgtacaaacggccctaggaaagagga

SEQ ID NO: 74369 - DNA, 600 bp, Chicken  19866894356784_3
tcctaatatgctacaaaataactgatgatgtattcagagttacttagaaccgatggaagagaactacatgtgtttctrtagtttaatatctgtcctttcacataatgtatacagacatgcatttacttactaactcttgagtgatatayaggaagttgttttttcttagtttatttctaaagtctttctgtattatttcacctccgtccttttcacttcagttaaaattcaaatccatgcctccagcactatttatgaaataattgatctctggaaagtaataagcatgctaatttattkattttaaattttcatttaagttccattakgtattgactttaagtatccttttatatataattttgtctgtattcatttctcagcaaacctcattgttgtaacactgatgataatgggacagactgtacaaacggccctaggaaagaggaaacgtgaggtctttggtacagacgtagttctttgtactggacagctgtcatgacctacagggaaggggagtccatgatagcgtaaagaaagatgctatgggatttagaaaagtgacagtaaagcagactgtaaactgtagtgtctctaggt

SEQ ID NO: 74370 - DNA, 600 bp, Chicken  19866894356784_4
gtattcagagttacttagaaccgatggaagagaactacatgtgtttctrtagtttaatatctgtcctttcacataatgtatacagacatgcatttacttactaactcttgagtgatatayaggaagttgttttttcttagtttatttctaaagtctttctgtattatttcacctccgtccttttcacttcagttaaaattcaaatccatgcctccagcactatttatgaaataattgatctctggaaagtaataagcatgctaatttattkattttaaattttcatttaagttccattakgtattgactttaagtatccttttatatataattttgtctgtattcatttctcagcaaacctcattgttgtaacactgatgataatgggacagactgtacaaacggccctaggaaagaggaaacgtgaggtctttggtacagacgtagttctttgtactggacagctgtcatgacctacagggaaggggagtccatgatagcgtaaagaaagatgctatgggatttagaaaagtgacagtaaagcagactgtaaactgtagtgtctctaggtagctacatgtgatccctaaagaatttgaa

SEQ ID NO: 74371 - DNA, 599 bp, Chicken  19866894356799_1
  misc_feature (1)..(99): n is any nucleotide
nnnnnnnnnnnnnnnnnnnnnnnnnnnnnnnnnnnnnnnnnnnnnnnnnnnnnnnnnnnnnnnnnnnnnnnnnnnnnnnnnnnnnnnnnnnnnnnnnnnaatcctcctggatcagagaaaaaaaatgtgttttacctcgctgatgagaggctgatgcctggaagcatagtctatgaacacaatgtatgttactgctgccatgagagttgcttcctcacagctcacaggcatatgagggagttccatgtaaatccagaagaataaatatggttcaggcaagctgtgtgctactacagctcygcaggtcctgaagatcttctttctgaggtacctctgttgcacattgttaaccagcaggcagttcagactagaattcaggctagcaatgagctttctggtcttttctactcaggggactgagctgctgctgttagagaaaatagaaactggactagcagtaacagaagtacagcagctactacagtgagttaccataagtgaattcaccaacagaggaaagtcagagaactcctracgaaatgtgagttggaaataaaatgtgaaacaaaatcgctggtagactgatttagaaaatcacc

SEQ ID NO: 74372 - DNA, 560 bp, Chicken  19866894356799_2
agggagttccatgtaaatccagaagaataaatatggttcaggcaagctgtgtgctactacagctcygcaggtcctgaagatcttctttctgaggtacctctgttgcacattgttaaccagcaggcagttcagactagaattcaggctagcaatgagctttctggtcttttctactcaggggactgagctgctgctgttagagaaaatagaaactggactagcagtaacagaagtacagcagctactacagtgagttaccataagtgaattcaccaacagaggaaagtcagagaactcctracgaaatgtgagttggaaataaaatgtgaaacaaaatcgctggtagactgatttagaaaatcaccttctcagktgaccacctgaaattcttttgtgtgattgcatattctttccatttcccttccagcacttaayattgaaatccagccatgatgtaaagccaccaactggttcttaaccaagattctccagccctcccaccataacaaaatactggattggaataaatagctctatgaataaatttaaaataacacatt

SEQ ID NO: 74373 - DNA, 487 bp, Chicken  19866894356799_3
ctgaagatcttctttctgaggtacctctgttgcacattgttaaccagcaggcagttcagactagaattcaggctagcaatgagctttctggtcttttctactcaggggactgagctgctgctgttagagaaaatagaaactggactagcagtaacagaagtacagcagctactacagtgagttaccataagtgaattcaccaacagaggaaagtcagagaactcctracgaaatgtgagttggaaataaaatgtgaaacaaaatcgctggtagactgatttagaaaatcaccttctcagktgaccacctgaaattcttttgtgtgattgcatattctttccatttcccttccagcacttaayattgaaatccagccatgatgtaaagccaccaactggttcttaaccaagattctccagccctcccaccataacaaaatactggattggaataaatagctctatgaataaatttaaaataacacatt

SEQ ID NO: 74374 - DNA, 425 bp, Chicken  19866894356799_4
agaattcaggctagcaatgagctttctggtcttttctactcaggggactgagctgctgctgttagagaaaatagaaactggactagcagtaacagaagtacagcagctactacagtgagttaccataagtgaattcaccaacagaggaaagtcagagaactcctracgaaatgtgagttggaaataaaatgtgaaacaaaatcgctggtagactgatttagaaaatcaccttctcagktgaccacctgaaattcttttgtgtgattgcatattctttccatttcccttccagcacttaayattgaaatccagccatgatgtaaagccaccaactggttcttaaccaagattctccagccctcccaccataacaaaatactggattggaataaatagctctatgaataaatttaaaataacacatt

SEQ ID NO: 74375 - DNA, 600 bp, Chicken  19866894356804_1
ctgtcataacttagggatattctgtccttggaagcggtataaaccccacatgtatgcggtagtttacatgatgtaatcatgataatgtgcttatctaataaggtatcttaaatctccctatgaagcatagctataatagattatttctcatactgctacatgctgttgccagggaagcacaatagagaatgcgcttcagtgagatatcaagaaggaatttggcccactaagtatgtaccatctacacacccactaacttaatttgtccctaaaggtaaagcatattcaccagctttgcaytgtacagtcaccactgcagcccctttcacaaagcagaagagcagtagaatgaatttttagtagtcccatctgcctccaggaattaccttctatgagataagtaatttagtcctatattatgaggagtttagatgctctcactattttagtgcatcagtatcaccttcagacctatgaattacttcagtgtaatagggaagagccatttagccacttaaatgatcatttaagacyctatttgcatactcaggatgtttaatatctgcacatctgaagcttgctattcagtactacttttat

SEQ ID NO: 74376 - DNA, 600 bp, Chicken  19866894356804_2
gtaccatctacacacccactaacttaatttgtccctaaaggtaaagcatattcaccagctttgcaytgtacagtcaccactgcagcccctttcacaaagcagaagagcagtagaatgaatttttagtagtcccatctgcctccaggaattaccttctatgagataagtaatttagtcctatattatgaggagtttagatgctctcactattttagtgcatcagtatcaccttcagacctatgaattacttcagtgtaatagggaagagccatttagccacttaaatgatcatttaagacyctatttgcatactcaggatgtttaatatctgcacatctgaagcttgctattcagtactacttttatctaacataaatgatatttgattagaagttgagaacattaaacttgtcttctgtagcaatacagtatttcacaaccatcttgagtgacaaaggagggctaagatatcaccctttccatattaccactctgggcaatatgaaaggagcctgaagatatgtaatgcttgaagaaaacctgcaattccccttctattcttttccccacgccaggcacggaagtattttctagaggcag

SEQ ID NO: 74377 - DNA, 599 bp, Chicken  19866894356807_1
  misc_feature (1)..(59): n is any nucleotide
nnnnnnnnnnnnnnnnnnnnnnnnnnnnnnnnnnnnnnnnnnnnnnnnnnnnnnnnnnntaagctgcaaatgatgcacaggaatccttcgttagctacaggattcagttctcaaacttgcacttcttggaaaacagctcagttttacttactgctcctcgcatattacaagggcttacagctcagccatattgctatcttcgctttttccctaaaaaagatttgcacctttctggccttgaaatactacaaatgccctacatcaatccaaagcagatttaaaaaagaatcatagttacgraagttaaatattgtgctcaaacccttcctggcaacrtttctaggtgacatttggcactgggtacagttcagggtaacaacaggcagggacagaacacgacataatacaggacagtgatggtgtccagctccaaactccacaggtaatggctctgagatgawgttagaaagcatcagagtgacaagcagtacatggggagtaaatcacagtttcagggttccttgtggttactgagaaaactaaacgctacaagtgtaatatggattgtgatcaagaattagcttaaaggaagaaaagat

SEQ ID NO: 74378 - DNA, 599 bp, Chicken  19866894356807_2
  misc_feature (1)..(23): n is any nucleotide
nnnnnnnnnnnnnnnnnnnnnnntaagctgcaaatgatgcacaggaatccttcgttagctacaggattcagttctcaaacttgcacttcttggaaaacagctcagttttacttactgctcctcgcatattacaagggcttacagctcagccatattgctatcttcgctttttccctaaaaaagatttgcacctttctggccttgaaatactacaaatgccctacatcaatccaaagcagatttaaaaaagaatcatagttacgraagttaaatattgtgctcaaacccttcctggcaacrtttctaggtgacatttggcactgggtacagttcagggtaacaacaggcagggacagaacacgacataatacaggacagtgatggtgtccagctccaaactccacaggtaatggctctgagatgawgttagaaagcatcagagtgacaagcagtacatggggagtaaatcacagtttcagggttccttgtggttactgagaaaactaaacgctacaagtgtaatatggattgtgatcaagaattagcttaaaggaagaaaagatgccttttataataagagaacgaaagccttggattgc

SEQ ID NO: 74379 - DNA, 600 bp, Chicken  19866894356807_3
atattacaagggcttacagctcagccatattgctatcttcgctttttccctaaaaaagatttgcacctttctggccttgaaatactacaaatgccctacatcaatccaaagcagatttaaaaaagaatcatagttacgraagttaaatattgtgctcaaacccttcctggcaacrtttctaggtgacatttggcactgggtacagttcagggtaacaacaggcagggacagaacacgacataatacaggacagtgatggtgtccagctccaaactccacaggtaatggctctgagatgawgttagaaagcatcagagtgacaagcagtacatggggagtaaatcacagtttcagggttccttgtggttactgagaaaactaaacgctacaagtgtaatatggattgtgatcaagaattagcttaaaggaagaaaagatgccttttataataagagaacgaaagccttggattgctcttgaatatacttaactgtagcgtctgtaacacctacctcacaagggctgactcaatcagccacagagggagaacgttaagtactttgtctcttgccttattaaggctttacaaatcatttctct

SEQ ID NO: 74380 - DNA, 600 bp, Chicken  19866894356817_1
gatttcagacgagatcaactacaaaatataaaaaccgacacatcaacctcaattcctgaatacaactgcactgacagctaagagtggttccgaattataagagatgtcccaagcttggctctgcagaaacacaacaaggacagactgcatccgctatgcaggccccacctctgctcagtagagagcaattgagcgcgaaagcatgcggtacggggactgtattcacctcttctttgctgcttacagaggaacccttccactgtcattaactcccacaaggctgaggccaggggagacacrgacccctccttcacacctctcagcctacagaaacgcatccagcacctctgtgatcaggaaaccctgagcccaggcctcccctgccctgaggacactcagggatgtgctcttcaccttgccaacagccccactactgttaatcgccaggacgatgcaccctcacttagcaatcatcagcctgcaagttatcacttcataaagcagagctgggctccgagtgccccaggagagagagctctggtgctaaaaggtttataatccacaactgcacccacagaaggcgagatgtagcatctgtca

SEQ ID NO: 74381 - DNA, 600 bp, Chicken  19866894356817_2
ggattaggaggagtgcccgttctgtacagccacattgtccacatccacttctaaacccagcagaggagatgcctcaggactctgtattttctctaaggcagttctgtttttctcacctgttgtgtgaggtttgtaaaggcttctgttggcttccaaagcagatcaccagcgccatgcgacaacattcacacataaaacgtggttcccattactgtttaatttctcactaattgagtgggaaccttctagcctgaatcagaatgatggtttccctctcccaaaaaggaaacaaaaaatgarcaaagcaacaggaagcaacactttactaaattttgtctatcatctgtgtgctgttttttcctgtggcatttgttactgtgggcaaaacccacataagtagacgtatgacagagacagattcctagcttgtctgtggcgagatgaggctgcagtagtggcaggacacccttttcatatatcatcaccaggagttggagttgtacagaaaaccaagcagtgccatctagtattttttttagcttaacgagaagcttaccaaaatagctttaaagaagctttaccaaataaagccagaaagag

SEQ ID NO: 74382 - DNA, 446 bp, Chicken  19866894356818_1
  misc_feature (1)..(57): n is any nucleotide
nnnnnnnnnnnnnnnnnnnnnnnnnnnnnnnnnnnnnnnnnnnnnnnnnnnnnnnnncaggcccagcactctgcggatgtgctctctccacttcaacattaacctttcagaaatgtcagccaaacagcctgctgccttggtgttagagcctgtaatttttggccttgtgactatagcttcagttaactccttcattgcctgtgttcactttcctgctcccccccagacagttccagctccaaggtccttttatctgcagtgatcttcatgctctgcatgtaggtgacctctctttcccartgcactgcttgggatggcaatgtcagagggcactactcaaacacaagtgcttggaggtgtgtttacaaggaggagcagcatattgctgacttgcaggagctggactgtcactgcaggaagagtagggcagggtgggatcatccttc

SEQ ID NO: 74383 - DNA, 600 bp, Chicken  19866894356821_1
gacaatggaatttgagggtattccgcagtttctagcgctgtgcttgataaagtgcaaagacttctaagtgtttgtaacaaagtttccctggaagactctcaattcccttcccctgaggcatatttcactgggagctggttttcctccagcacatcatcatgtacttcatgggctatactttatagcatgacagaaattgaaacccaccttcgaacatggcattcaagtgatggctgtttaaagcacctttaaagaccgggaagagacattagggaagcatactcgttaccacgagagcayrgtatgtgcagtcytgctcctgctgctgaacctgagtgcccagttaaccctctgcatgtaggctaatcgttggcagagggagcagcaatttgagttatcgcagcatcataacagctattaactgcttacccaaacctgcctgttatctatttaacatttaaaaaatgtttaaacaataattttcctatattggaactcagtgttaaaaatttcctctaaacgtaaccatgtcctggttgatggaaaaatgttatatgaggcagcagtgtgtatcgaaggacatttgcagttttaaaggca

SEQ ID NO: 74384 - DNA, 600 bp, Chicken  19866894356821_2
acaatggaatttgagggtattccgcagtttctagcgctgtgcttgataaagtgcaaagacttctaagtgtttgtaacaaagtttccctggaagactctcaattcccttcccctgaggcatatttcactgggagctggttttcctccagcacatcatcatgtacttcatgggctatactttatagcatgacagaaattgaaacccaccttcgaacatggcattcaagtgatggctgtttaaagcacctttaaagaccgggaagagacattagggaagcatactcgttaccacgagagcayrgtatgtgcagtcytgctcctgctgctgaacctgagtgcccagttaaccctctgcatgtaggctaatcgttggcagagggagcagcaatttgagttatcgcagcatcataacagctattaactgcttacccaaacctgcctgttatctatttaacatttaaaaaatgtttaaacaataattttcctatattggaactcagtgttaaaaatttcctctaaacgtaaccatgtcctggttgatggaaaaatgttatatgaggcagcagtgtgtatcgaaggacatttgcagttttaaaggcag

SEQ ID NO: 74385 - DNA, 600 bp, Chicken  19866894356821_3
agggtattccgcagtttctagcgctgtgcttgataaagtgcaaagacttctaagtgtttgtaacaaagtttccctggaagactctcaattcccttcccctgaggcatatttcactgggagctggttttcctccagcacatcatcatgtacttcatgggctatactttatagcatgacagaaattgaaacccaccttcgaacatggcattcaagtgatggctgtttaaagcacctttaaagaccgggaagagacattagggaagcatactcgttaccacgagagcayrgtatgtgcagtcytgctcctgctgctgaacctgagtgcccagttaaccctctgcatgtaggctaatcgttggcagagggagcagcaatttgagttatcgcagcatcataacagctattaactgcttacccaaacctgcctgttatctatttaacatttaaaaaatgtttaaacaataattttcctatattggaactcagtgttaaaaatttcctctaaacgtaaccatgtcctggttgatggaaaaatgttatatgaggcagcagtgtgtatcgaaggacatttgcagttttaaaggcagtagcacctttacc

SEQ ID NO: 74386 - DNA, 600 bp, Chicken  19866894356822_1
gaactaggttgaaccttcaccaaactaaagttagtaacaggctggaggctacaatcatgtccgctgtccctatcagcatgcagctgatggatgtgctaaactgatggtgtatgaaaatagaacaaaacaaaatctcatattcatttttaaaatgcctttactaaataaaataggtgttctgttcccatcagtgaaatccccaccggcagcactaatgctgctcacccaggaggacagagatctggatggagataccctgaggtatcaggctgagcttcagtgctgatgtggggtgcagtyggcagrgaagagtgctattcccaagcaagagtaccatcaaaataccttcagaaacagccctgaaggggggaatctgtaaaggtacaaactgtgatggaaatacaagaagacttagcaaatcttttgtaatttctgaaagggatattacctacgtgttaagtacactcctggtgttttcctaaaccaccaacagctccaggactgctttccctgcactctggtcttgtgcattgcttcttattgcactcttacactcttcaatatattactgtctccttattttttaattcctctgtgttt

SEQ ID NO: 74387 - DNA, 600 bp, Chicken  19866894356822_2
ggttgaaccttcaccaaactaaagttagtaacaggctggaggctacaatcatgtccgctgtccctatcagcatgcagctgatggatgtgctaaactgatggtgtatgaaaatagaacaaaacaaaatctcatattcatttttaaaatgcctttactaaataaaataggtgttctgttcccatcagtgaaatccccaccggcagcactaatgctgctcacccaggaggacagagatctggatggagataccctgaggtatcaggctgagcttcagtgctgatgtggggtgcagtyggcagrgaagagtgctattcccaagcaagagtaccatcaaaataccttcagaaacagccctgaaggggggaatctgtaaaggtacaaactgtgatggaaatacaagaagacttagcaaatcttttgtaatttctgaaagggatattacctacgtgttaagtacactcctggtgttttcctaaaccaccaacagctccaggactgctttccctgcactctggtcttgtgcattgcttcttattgcactcttacactcttcaatatattactgtctccttattttttaattcctctgtgtttttttcc

SEQ ID NO: 74388 - DNA, 600 bp, Chicken  19866894356826_1
gtttgaagggatttgacttgggacgcagtattttttcttctcacacatagtcacttcaacctgaaacttgttattctattctgtgttcttgaggctagtgaataatctactgttctcttatataatttgctgctgtaaacattattgtgaactgagctaagggatatccatctcaaagcctggctatgactgattcacaggctgaacagaatgaaataaagtgatgttgaatcataatcccaaattcactttagtttaactgagttatgaatctcatcaatggctgttgtcctggtgacrtttgcttattttttattgtacactactttaaagaacggatgaggattacttgctaaattctatttgcaatatattgtttaaatgaaaagtaataacgaggtttagaatttatggaggaataagtaattgctcttctcctagtcccagaactaattaatttgctctacaattgtcttttgatagtttctatttttctttatcattcttcaaactatgaaatgttctaaagcacagtaaattaaggttaatagagcmttttacttgctttttacacctgaccttgatttcaaagattaagca

SEQ ID NO: 74389 - DNA, 600 bp, Chicken  19866894356826_2
ttaactgagttatgaatctcatcaatggctgttgtcctggtgacrtttgcttattttttattgtacactactttaaagaacggatgaggattacttgctaaattctatttgcaatatattgtttaaatgaaaagtaataacgaggtttagaatttatggaggaataagtaattgctcttctcctagtcccagaactaattaatttgctctacaattgtcttttgatagtttctatttttctttatcattcttcaaactatgaaatgttctaaagcacagtaaattaaggttaatagagcmttttacttgctttttacacctgaccttgatttcaaagattaagcaggtttctgggaatttattttcattttataaaattacatgaaatcatagtactgaaggtgggcaaattcaccttaaaaagttgctagcaaattcatcacgttgagaatttcatcagctctccctttagttcaatacagagaagataatgcaatctctggatagctagcaattgcttgtaggaaaatgtttattttaagacattttttactgcgagatttttgcactcactggaagtgtatctctgtgttattattt

SEQ ID NO: 74390 - DNA, 600 bp, Chicken  19866894356835_1
ctggatgcaattcagggaatagccagctggccaatctcacctatagttcttccctccaggcctacttcccagcacttgcacccatatacgaagatgatcctgttgttggatgcgggactggatgtacacaactccaggaattatttctcccctttgtagggctggagcaggtgtcctgtgctcacctgaaaatttactgggctgtgctggtcttaccttgctgaagataaaaatagaaaatagattcgttattgaaattgtttttcctagtattaagtaaatgagagtaatcttaagtawaagtartagattattccaggagatacacaaatgagttttatgatgartattttggtaactgatggagctgaargactctgaagattggactgctgtattttttctcatcgctttactaggtaatcagcaactgcattagtcaccttcagttattttagtgcctctgatcctgcatctcatactcctggagactaacacattttgtaccactagagactatccttccttttaacacacacaaagcagactttgctagcaagaaacttgcaaatttaaccagttgatgtagccaggcatgag

SEQ ID NO: 74391 - DNA, 600 bp, Chicken  19866894356835_2
gcaattcagggaatagccagctggccaatctcacctatagttcttccctccaggcctacttcccagcacttgcacccatatacgaagatgatcctgttgttggatgcgggactggatgtacacaactccaggaattatttctcccctttgtagggctggagcaggtgtcctgtgctcacctgaaaatttactgggctgtgctggtcttaccttgctgaagataaaaatagaaaatagattcgttattgaaattgtttttcctagtattaagtaaatgagagtaatcttaagtawaagtartagattattccaggagatacacaaatgagttttatgatgartattttggtaactgatggagctgaargactctgaagattggactgctgtattttttctcatcgctttactaggtaatcagcaactgcattagtcaccttcagttattttagtgcctctgatcctgcatctcatactcctggagactaacacattttgtaccactagagactatccttccttttaacacacacaaagcagactttgctagcaagaaacttgcaaatttaaccagttgatgtagccaggcatgaggcgctt

SEQ ID NO: 74392 - DNA, 600 bp, Chicken  19866894356835_3
tcttccctccaggcctacttcccagcacttgcacccatatacgaagatgatcctgttgttggatgcgggactggatgtacacaactccaggaattatttctcccctttgtagggctggagcaggtgtcctgtgctcacctgaaaatttactgggctgtgctggtcttaccttgctgaagataaaaatagaaaatagattcgttattgaaattgtttttcctagtattaagtaaatgagagtaatcttaagtawaagtartagattattccaggagatacacaaatgagttttatgatgartattttggtaactgatggagctgaargactctgaagattggactgctgtattttttctcatcgctttactaggtaatcagcaactgcattagtcaccttcagttattttagtgcctctgatcctgcatctcatactcctggagactaacacattttgtaccactagagactatccttccttttaacacacacaaagcagactttgctagcaagaaacttgcaaatttaaccagttgatgtagccaggcatgaggcgctttccttccaattttaaaggtttattttctcataacctcccat

SEQ ID NO: 74393 - DNA, 600 bp, Chicken  19866894356835_4
acttgcacccatatacgaagatgatcctgttgttggatgcgggactggatgtacacaactccaggaattatttctcccctttgtagggctggagcaggtgtcctgtgctcacctgaaaatttactgggctgtgctggtcttaccttgctgaagataaaaatagaaaatagattcgttattgaaattgtttttcctagtattaagtaaatgagagtaatcttaagtawaagtartagattattccaggagatacacaaatgagttttatgatgartattttggtaactgatggagctgaargactctgaagattggactgctgtattttttctcatcgctttactaggtaatcagcaactgcattagtcaccttcagttattttagtgcctctgatcctgcatctcatactcctggagactaacacattttgtaccactagagactatccttccttttaacacacacaaagcagactttgctagcaagaaacttgcaaatttaaccagttgatgtagccaggcatgaggcgctttccttccaattttaaaggtttattttctcataacctcccatattcagaaagactcagatataagtac

SEQ ID NO: 74394 - DNA, 600 bp, Chicken  19866894356835_5
tcagatataagtacctcacattcatgctgagtctaaaatatactgtgccattgttaatgagtgctcaaaaccctcacctcttacccattttctcactgcttgttcttgtttgttggactgcatctccccatcactttatgaattatctattaggctgtcataaattataaagatgtctaagacctgccgatttgtatacctaggtctcaatacatcgcgagttaaaaggtgtttaaagtttctcttgtgtataggttagtattggtgctaaacattggctatagcctattttgattcttygttatgagattgctgaagagtggctgatgaacctgtcaacctctttctatgggtagctgctatcatctacttaattatttttttatatcatctgaagtataatacatattatagaatgcaagaggtgtctgtcagtaagccaaccacctgtgaggatcaattaaaaacaggtggtgaagaaacagttttgccaaaatgtcaaaattatggaatgatgctggaaattactgcctgatgtttattaatatagtagttatgacccccaatcattttgcatgtatagtttgttgcactcattct

SEQ ID NO: 74395 - DNA, 563 bp, Chicken  19866894356841_1
caacaggagttacaagtttcaaaacataagcaggatccatgaggaaccactcatacataactacagtttgtgtacacggacactcatgcgcaaggcacaacattcaaggtgtgcaccagtctggtgaccaatctgcacataccctgttgtgattgacttcatggtgaaccagtgacctagcatatttctttaaagaataaaatcagtcaattaggttttaaaagtcaacaaaagtcactaaaaaaactgaaaatctatgctggggaaaatttggaaagaggaagtgtgtactgtgttacyggaactaaatgggatttttccaaaagtattacaaatgctgtttccaatgaatacttttttgtcttctaggtaacatgtagcccagaggaagttcgaaggaacaagttataatccctcgaagggagaagtttatgatacaaacactggaaggcccttcattatggtatggatgccttggcactgttagagtaacagtagcgtacaatgagtgataaagaaggcaatccttacttaaaatgtcacacttataacaagtaataaag

SEQ ID NO: 74396 - DNA, 600 bp, Chicken  19866894356845_1
acttggagcatttaaacactgtaatttttggttcagatgtaggatgagatcctcacaaagcagaaagggaatagaagaccactcactccgcacaattcctttttccttctttggcaacacagataacttacttctatttcattcagaatatccagttttgcgagtctcagcataataaatgacactatgcagacttaccatgaccaaaaaccaacaacgagcacttttccatccacatccaatcttcacaactgtgtctgaacacatcagatggatgttctcccctaacccactccatgyatctctgcttgcctccaagaagccctaccatcagccaccagcttttgaagctgtttgcagtcacacaagctctgtccctgagctcattctgcaccaaggcccattagagcagcattcaccaacacctcccctttattttcctgtttaattttgcaaaacccagcaagaaaggagccctgagcacggtgtgcagctcagaaccactttctctgtacagtctgaggatgatttcttcacagtttaagataagcaagctgtactaagagttcataatgaacttctcctattagaaatggagga

SEQ ID NO: 74397 - DNA, 600 bp, Chicken  19866894356845_2
gtgttcttgctgccttgccctgaaactaatgcgtatcatttttaatactgtgttcataaccctttgggagaggtggtattattaaatgctatgtaacaaatacacgggggaaacaaatactacagaaaaattattaagttgcgctattttgttgtgcaagctttttattcccctttcaggttaaaactgggggctatacaggacaaattatgtgttaactcccaatttcaattatggatttcagtgtcccctgaacgtattagagaggtgtaacatttactaatataaggagtaactaarcttgacagtccaataaatcaaaccgcttcagacaaaaagctttgcatttcagaaaggaaagtgtaataaaaacaaacaagccagagtcacaaatatgtttctattgccagctatttagcatacctctttaatacacctggtaatgcattaaagcacagcagctatgagaagaacagtattacaccacggcagcatttccaccactgccttcaaagtgtaaagacttttctacactgarcattaccactggaatctgtattgagtaaaccaaacaatgrtttttctgaagttcactcaatc

SEQ ID NO: 74398 - DNA, 600 bp, Chicken  19866894356845_3
tttcagtgtcccctgaacgtattagagaggtgtaacatttactaatataaggagtaactaarcttgacagtccaataaatcaaaccgcttcagacaaaaagctttgcatttcagaaaggaaagtgtaataaaaacaaacaagccagagtcacaaatatgtttctattgccagctatttagcatacctctttaatacacctggtaatgcattaaagcacagcagctatgagaagaacagtattacaccacggcagcatttccaccactgccttcaaagtgtaaagacttttctacactgarcattaccactggaatctgtattgagtaaaccaaacaatgrtttttctgaagttcactcaatcwtttgcccttacagacattgatatactgcacaacaggacttgccatgctttagttagatgaactaagcttctacaaattatccagccccgaagcttgcctgacattacattccccaaatgctatttatattgtctatcatattactatcttaaagttaaaaatacsctttttttcaataaaagattctgcttccttgctgaaatttctctgtaaaatgctacactgcaacattatcat

SEQ ID NO: 74399 - DNA, 600 bp, Chicken  19866894356845_4
actaatataaggagtaactaarcttgacagtccaataaatcaaaccgcttcagacaaaaagctttgcatttcagaaaggaaagtgtaataaaaacaaacaagccagagtcacaaatatgtttctattgccagctatttagcatacctctttaatacacctggtaatgcattaaagcacagcagctatgagaagaacagtattacaccacggcagcatttccaccactgccttcaaagtgtaaagacttttctacactgarcattaccactggaatctgtattgagtaaaccaaacaatgrtttttctgaagttcactcaatcwtttgcccttacagacattgatatactgcacaacaggacttgccatgctttagttagatgaactaagcttctacaaattatccagccccgaagcttgcctgacattacattccccaaatgctatttatattgtctatcatattactatcttaaagttaaaaatacsctttttttcaataaaagattctgcttccttgctgaaatttctctgtaaaatgctacactgcaacattatcatcatttcaattgcacatytcaggcaggatttcagtcctacg

SEQ ID NO: 74400 - DNA, 600 bp, Chicken  19866894356845_5
ttgacagtccaataaatcaaaccgcttcagacaaaaagctttgcatttcagaaaggaaagtgtaataaaaacaaacaagccagagtcacaaatatgtttctattgccagctatttagcatacctctttaatacacctggtaatgcattaaagcacagcagctatgagaagaacagtattacaccacggcagcatttccaccactgccttcaaagtgtaaagacttttctacactgarcattaccactggaatctgtattgagtaaaccaaacaatgrtttttctgaagttcactcaatcwtttgcccttacagacattgatatactgcacaacaggacttgccatgctttagttagatgaactaagcttctacaaattatccagccccgaagcttgcctgacattacattccccaaatgctatttatattgtctatcatattactatcttaaagttaaaaatacsctttttttcaataaaagattctgcttccttgctgaaatttctctgtaaaatgctacactgcaacattatcatcatttcaattgcacatytcaggcaggatttcagtcctacggcagaacaagctgtggtgtcatt

SEQ ID NO: 74401 - DNA, 547 bp, Chicken  19866894356845_6
agaagaacagtattacaccacggcagcatttccaccactgccttcaaagtgtaaagacttttctacactgarcattaccactggaatctgtattgagtaaaccaaacaatgrtttttctgaagttcactcaatcwtttgcccttacagacattgatatactgcacaacaggacttgccatgctttagttagatgaactaagcttctacaaattatccagccccgaagcttgcctgacattacattccccaaatgctatttatattgtctatcatattactatcttaaagttaaaaatacsctttttttcaataaaagattctgcttccttgctgaaatttctctgtaaaatgctacactgcaacattatcatcatttcaattgcacatytcaggcaggatttcagtcctacggcagaacaagctgtggtgtcattcagcattcagaagctttcccaattaatccccagtcgttgagaattgtagctccgcaatgctaaagaactctgaattactacttagcatgagaaaacccagtggccactcctg

SEQ ID NO: 74402 - DNA, 458 bp, Chicken  19866894356845_7
gtattgagtaaaccaaacaatgrtttttctgaagttcactcaatcwtttgcccttacagacattgatatactgcacaacaggacttgccatgctttagttagatgaactaagcttctacaaattatccagccccgaagcttgcctgacattacattccccaaatgctatttatattgtctatcatattactatcttaaagttaaaaatacsctttttttcaataaaagattctgcttccttgctgaaatttctctgtaaaatgctacactgcaacattatcatcatttcaattgcacatytcaggcaggatttcagtcctacggcagaacaagctgtggtgtcattcagcattcagaagctttcccaattaatccccagtcgttgagaattgtagctccgcaatgctaaagaactctgaattactacttagcatgagaaaacccagtggccactcctg

SEQ ID NO: 74403 - DNA, 599 bp, Chicken  19866894356857_1
  misc_feature (1)..(117): n is any nucleotide
nnnnnnnnnnnnnnnnnnnnnnnnnnnnnnnnnnnnnnnnnnnnnnnnnnnnnnnnnnnnnnnnnnnnnnnnnnnnnnnnnnnnnnnnnnnnnnnnnnnnnnnnnnnnnnnnnnnnntaatgacaatgtgaagagatccggcctctaatttagacctataatacttgtagaaatgacagcaaatgacagtagatctgattaaatagattggcagctgaagcccaaggatactctaactaatagtctgcttcagcttaacaggaacaaggtgctcagtggtgctatctcactttacaaccrgcatgtaatttytgtttcatatcaaagcagatgaagttatcrtaaggaggttaaaagatacaaagttcagggtatttaaagctgtgcaagctaaggtactttttgcccactcttgacagctatttattctcagaagtcatcttttgggtccctgggaccattgtggagcccaggtaacctgagagctgacggtttccaagttgagtgatgggattgaaaatgccagcaaagtcctgatcctggggtcatctcagtttcttcagcatttggrtttaattttcttttgtttgtttgctgta

SEQ ID NO: 74404 - DNA, 599 bp, Chicken  19866894356857_2
  misc_feature (1)..(105): n is any nucleotide
nnnnnnnnnnnnnnnnnnnnnnnnnnnnnnnnnnnnnnnnnnnnnnnnnnnnnnnnnnnnnnnnnnnnnnnnnnnnnnnnnnnnnnnnnnnnnnnnnnnnnnnnntaatgacaatgtgaagagatccggcctctaatttagacctataatacttgtagaaatgacagcaaatgacagtagatctgattaaatagattggcagctgaagcccaaggatactctaactaatagtctgcttcagcttaacaggaacaaggtgctcagtggtgctatctcactttacaaccrgcatgtaatttytgtttcatatcaaagcagatgaagttatcrtaaggaggttaaaagatacaaagttcagggtatttaaagctgtgcaagctaaggtactttttgcccactcttgacagctatttattctcagaagtcatcttttgggtccctgggaccattgtggagcccaggtaacctgagagctgacggtttccaagttgagtgatgggattgaaaatgccagcaaagtcctgatcctggggtcatctcagtttcttcagcatttggrtttaattttcttttgtttgtttgctgtagcgtggttcaat
